United States Patent Application Publication US 2023/0026259 A1 - sequence listing, part 69

SEQ ID NO: 168962 - DNA, 648 bp, Homo sapiens
  Payload ID: 13262
  Gene Symbol: PCYOX1
  Gene Name: prenylcysteine oxidase 1
  ENST ID: ENST00000451279
  CDS Start-End: 186-648
attcacacttcagggcggctttcagctctggtcggaataggactgtgcattcccaggcgtggagagcgattattggagccggaattggtggcacttcagcagcctattacctgcggcagaaatttgggaaagatgtgaagatagacctgtttgaaagagaagaggtcgggggccgcctggctaccatgatggtgcaggggcaagaatacgaggcaggaggttctgtcatccatcctttaaatctgcacatgaaacgttttgtcaaagacctgggtctctctgctgttcaggcctctggtggcctactggggatatataatggagagactctggtatttgaggagagcaactggttcataattaacgtgattaaattagtttggcgctatggatttcaatccctccgtatgcacatgtgggtagaggacgtgttagacaagttcatgaggatctaccgctaccagtctcatgactatgccttcagtagtgtcgaaaaattacttcatgctctaggaggagatgacttccttggaatgcttaatcgaacacttcttgaaaccttgcaaaaggccggcttttctgagaagttcctcaatgaaatgattgctcctgttatgagggtcaattatggccaaagcacggacatca

SEQ ID NO: 168963 - DNA, 957 bp, Homo sapiens
  Payload ID: 13262
  Gene Symbol: PCYOX1
  Gene Name: prenylcysteine oxidase 1
  ENST ID: ENST00000414812
  CDS Start-End: 330-957
ctcccgagtagctgggactacaggcgcccgccactatgccgagctaaatttttgtatttttagtagagacggggtttcaccgtgttagccaggatggtctcgatctcctgacctcatgatccacccacctcggcctcccaaagtgctgggattacaggcttgagccaccgcgcccggccagcttctgccttcgatgtcttctgaaggaggcgattattggagccggaattggtggcacttcagcagcctattacctgcggcagaaatttgggaaagatgtgaagatagacctgtttgaaagagaagaggtcgggggccgcctggctaccatgatggtgcaggggcaagaatacgaggcaggaggttctgtcatccatcctttaaatctgcacatgaaacgttttgtcaaagacctgggtctctctgctgttcaggcctctggtggcctactggggatatataatggagagactctggtatttgaggagagcaactggttcataattaacgtgattaaattagtttggcgctatggatttcaatccctccgtatgcacatgtgggtagaggacgtgttagacaagttcatgaggatctaccgctaccagtctcatgactatgccttcagtagtgtcgaaaaattacttcatgctctaggaggagatgacttccttggaatgcttaatcgaacacttcttgaaaccttgcaaaaggccggcttttctgagaagttcctcaatgaaatgattgctcctgttatgagggtcaattatggccaaagcacggacatcaatgcctttgtgggggcggtgtcactgtcctgttctgattctggcctttgggcagtagaaggtggcaataaacttgtttgctcagggcttctgcaggcatccaaaagcaatcttatatctggctcagtaatgtacatcgaggagaaaacaaagaccaagtacacag

SEQ ID NO: 168964 - DNA, 2546 bp, Homo sapiens
  Payload ID: 13263
  Gene Symbol: PCYOX1L
  Gene Name: prenylcysteine oxidase 1 like
  Uniprot ID: Q8NBM8
  ENST ID: ENST00000274569
  CDS Start-End: 63-1547
ggagagccgagcgccaacccgctagcgcctgaatccggcgtgctgcccgctcgccgcccgccatggcccgcgcagccccgctgctcgccgcgttgaccgcgctcctcgccgccgccgctgctggcggagatgccccgccgggcaaaatcgcggtggttggggctgggattgggggctctgctgtggcccattttctccagcagcactttggacctcgggtgcagatcgacgtgtacgagaagggaaccgtgggtggccgcttggccaccatctcagtcaacaagcagcactatgagagcggggctgcctccttccactccctgagcctgcacatgcaggacttcgtcaagctgctggggctgaggcaccggcgcgaggtggtgggcaggagcgccatcttcggcggggagcacttcatgctggaggagactgactggtacctgctgaacctcttccgcctctggtggcactatggcatcagcttcctgaggctgcagatgtgggtggaggaggtcatggagaagttcatgaggatctataagtaccaggcccacggctatgccttctcgggtgtggaggagctgctctactcactgggggagtccacctttgttaacatgacccagcactctgtggctgagtccctgctgcaggtgggcgtcacgcagcgctttattgatgatgtcgtttctgctgtcctgcgggccagctatggccagtcagcagcgatgcccgcctttgcaggagccatgtcactagccggggcccaaggcagcctgtggtctgtggaaggaggcaataagctggtttgttccggtttgctgaagctcaccaaggccaatgtgatccatgccacagtgacctctgtgaccctgcacagcacagaggggaaagccctgtaccaggtggcgtatgagaatgaggtaggcaacagctctgacttctatgacatcgtggtcatcgccacccccctgcacctggacaacagcagcagcaacttaacctttgcaggcttccacccgcccattgatgacgtgcagggctctttccagcccaccgtcgtctccttggtccacggctacctcaactcgtcctacttcggtttcccagaccctaagcttttcccctttgccaacatccttaccacagatttccccagcttcttctgcactctggacaacatctgccctgtcaacatctctgccagcttccggcgaaagcagccccaggaggcagctgtttggcgagtccagtcccccaagcccctctttcggacccagctaaagaccctgttccgttcctattactcagtgcagacagctgagtggcaggcccatcccctctatggctcccgccccacgctcccgaggtttgcactccatgaccagctcttctacctcaatgccctggagtgggcggccagctccgtggaggtgatggccgtggctgccaagaatgtggccttgctggcttacaaccgctggtaccaggacctagacaagattgatcaaaaagatttgatgcacaaggtcaagactgaactgtgagggctctagggagagcctgggaactttcatcccccactgaagatggatcatcccacagcagcccaggactgaataagccatgctcgcccaccaggcttctttctgacccctcatgtatcaagcatctccaggtgacctactgtctgcctatattaagggtccacacggcggctgctgcttttttttaagggggaaagtaagaaaagagaaggaaatccaagccagtatatttgttttatttattttttttaagaagaaaaaagttcatcttcacaaggtgcttcagacttggtttcttagctagaaaccagaagactacgggagggaatataaggcagagaactatgagtcttattttattactgtttttcactacctactcccacaatggacaatcaattgaggcaacctacaagaaaacatttacaaccagatggttacaaataaagtagaagggaagatcagaaaacctaagaaatgatcatagctcctggttactgtggacttgatggatttgaagtacctagttcagaactccctagtcaccatctccaagcctgtcaacatcactgcatattggaggagatgactgtggtaggacccaaggaagagatgtgtgcctgaatagtcgtcaccatatctccaagcttcctggcaaccagtgggaaaagaaacatgcgaggctgtaggaagagggaagctcttccttggcacctagaggaattagccattctcttccttatgcaaagattgaggaatgcaacaatataaagaagagaagtccccagatggtagagagcagtcatatcttacccctagatgttcatcccagcagaagaaagaagaaggtgttggggtaggattcttcagaggttagcctggtactttctcatcagacactagcttgaagtaagaggagaattatgcttttctttgctttttctacaaacccttaaaaatcacttgttttaaaaagaaagtaaaagcccttttcattcc

SEQ ID NO: 168965 - DNA, 582 bp, Homo sapiens
  Payload ID: 13263
  Gene Symbol: PCYOX1L
  Gene Name: prenylcysteine oxidase 1 like
  ENST ID: ENST00000510990
  CDS Start-End: 33-368
gaatccggcgtgctgcccgctcgccgcccgccatggcccgcgcagccccgctgctcgccgcgttgaccgcgctcctcgccgccgccgctgctggcggagatgccccgccgggcaaaatcgcggtggttggggctgggattgggggctctgctgtggcccattttctccagcagcactttggacctcgggtgcagatcgacgtgtacgagaagggaaccgtgggtggccgcttggccaccatctcagtcaacaagcagcactatgagagcggggctgcctccttccactccctgagcctgcacatgcaggacttcgtcaagctgctggatggagcaacagaaacaagagaggggaaggaacttgcctgaggttacacaggctgaggcaccggcgcgaggtggtgggcaggagcgccatcttcggcggggagcacttcatgctggaggagactgactggtacctgctgaacctcttccgcctctggtggcactatggcatcagcttcctgaggctgcagatgtgggtggaggaggtcatggagaagttcatgaggatctataagtaccaggcccacggctatgc

SEQ ID NO: 168966 - DNA, 2500 bp, Homo sapiens
  Payload ID: 13263
  Gene Symbol: PCYOX1L
  Gene Name: prenylcysteine oxidase 1 like
  Uniprot ID: Q8NBM8
  ENST ID: ENST00000511945
  CDS Start-End: 1-249
atggcccgcgcagccccgctgctcgccgcgttgaccgcgctcctcgccgccgccgctgctggcggagatgccccgccgggcaaaatcggtgcgggaaggacgcgcggtggttggggctgggattgggggctctgctgtggcccattttctccagcagcactttggacctcgggtgcagatcgacgtgtacgagaagggaaccgtgggtggccgcttggccaccatctcagtcaacaagcagcactatgagagcggggctgcctccttccactccctgagcctgcacatgcaggacttcgtcaagctgctggggctgaggcaccggcgcgaggtggtgggcaggagcgccatcttcggcggggagcacttcatgctggaggagactgactggtacctgctgaacctcttccgcctctggtggcactatggcatcagcttcctgaggctgcagatgtgggtggaggaggtcatggagaagttcatgaggatctataagtaccaggcccacggctatgccttctcgggtgtggaggagctgctctactcactgggggagtccacctttgttaacatgacccagcactctgtggctgagtccctgctgcaggtgggcgtcacgcagcgctttattgatgatgtcgtttctgctgtcctgcgggccagctatggccagtcagcagcgatgcccgcctttgcaggagccatgtcactagccggggcccaaggcagcctgtggtctgtggaaggaggcaataagctggtttgttccggtttgctgaagctcaccaaggccaatgtgatccatgccacagtgacctctgtgaccctgcacagcacagaggggaaagccctgtaccaggtggcgtatgagaatgaggtaggcaacagctctgacttctatgacatcgtggtcatcgccacccccctgcacctggacaacagcagcagcaacttaacctttgcaggcttccacccgcccattgatgacgtgcagggctctttccagcccaccgtcgtctccttggtccacggctacctcaactcgtcctacttcggtttcccagaccctaagcttttcccctttgccaacatccttaccacagatttccccagcttcttctgcactctggacaacatctgccctgtcaacatctctgccagcttccggcgaaagcagccccaggaggcagctgtttggcgagtccagtcccccaagcccctctttcggacccagctaaagaccctgttccgttcctattactcagtgcagacagctgagtggcaggcccatcccctctatggctcccgccccacgctcccgaggtttgcactccatgaccagctcttctacctcaatgccctggagtgggcggccagctccgtggaggtgatggccgtggctgccaagaatgtggccttgctggcttacaaccgctggtaccaggacctagacaagattgatcaaaaagatttgatgcacaaggtcaagactgaactgtgagggctctagggagagcctgggaactttcatcccccactgaagatggatcatcccacagcagcccaggactgaataagccatgctcgcccaccaggcttctttctgacccctcatgtatcaagcatctccaggtgacctactgtctgcctatattaagggtccacacggcggctgctgcttttttttaagggggaaagtaagaaaagagaaggaaatccaagccagtatatttgttttatttattttttttaagaagaaaaaagttcatcttcacaaggtgcttcagacttggtttcttagctagaaaccagaagactacgggagggaatataaggcagagaactatgagtcttattttattactgtttttcactacctactcccacaatggacaatcaattgaggcaacctacaagaaaacatttacaaccagatggttacaaataaagtagaagggaagatcagaaaacctaagaaatgatcatagctcctggttactgtggacttgatggatttgaagtacctagttcagaactccctagtcaccatctccaagcctgtcaacatcactgcatattggaggagatgactgtggtaggacccaaggaagagatgtgtgcctgaatagtcgtcaccatatctccaagcttcctggcaaccagtgggaaaagaaacatgcgaggctgtaggaagagggaagctcttccttggcacctagaggaattagccattctcttccttatgcaaagattgaggaatgcaacaatataaagaagagaagtccccagatggtagagagcagtcatatcttacccctagatgttcatcccagcagaagaaagaagaaggtgttggggtaggattcttcagaggttagcctggtactttctcatcagacactagcttgaagtaagaggagaattatgcttttctttgctttttctacaaacccttaaaaatcacttgttttaaaaagaaagtaaaagcccttttcattcc

SEQ ID NO: 168967 - DNA, 2323 bp, Homo sapiens
  Payload ID: 13263
  Gene Symbol: PCYOX1L
  Gene Name: prenylcysteine oxidase 1 like
  Uniprot ID: Q8NBM8
  ENST ID: ENST00000505669
  CDS Start-End: 1-249
atggcccgcgcagccccgctgctcgccgcgttgaccgcgctcctcgccgccgccgctgctggcggagatgccccgccgggcaaaatcggtgcgggaaggacgcgcggtggttggggctgggattgggggctctgctgtggcccattttctccagcagcactttggacctcgggtgcagatcgacgtgtacgagaagggaaccgtgggtggccgcttggccaccatctcagtcaacaagcagcactatgagagcggggctgcctccttccactccctgagcctgcacatgcaggacttcgtcaagctgctggggctgaggcaccggcgcgaggtggtgggcaggagcgccatcttcggcggggagcacttcatgctggaggagactgactggtacctgctgaacctcttccgcctctggtggcactatggcatcagcttcctgaggctgcagatgtgggtggaggaggtcatggagaagttcatgagctatggccagtcagcagcgatgcccgcctttgcaggagccatgtcactagccggggcccaaggcagcctgtggtctgtggaaggaggcaataagctggtttgttccggtttgctgaagctcaccaaggccaatgtgatccatgccacagtgacctctgtgaccctgcacagcacagaggggaaagccctgtaccaggtggcgtatgagaatgaggtaggcaacagctctgacttctatgacatcgtggtcatcgccacccccctgcacctggacaacagcagcagcaacttaacctttgcaggcttccacccgcccattgatgacgtgcagggctctttccagcccaccgtcgtctccttggtccacggctacctcaactcgtcctacttcggtttcccagaccctaagcttttcccctttgccaacatccttaccacagatttccccagcttcttctgcactctggacaacatctgccctgtcaacatctctgccagcttccggcgaaagcagccccaggaggcagctgtttggcgagtccagtcccccaagcccctctttcggacccagctaaagaccctgttccgttcctattactcagtgcagacagctgagtggcaggcccatcccctctatggctcccgccccacgctcccgaggtttgcactccatgaccagctcttctacctcaatgccctggagtgggcggccagctccgtggaggtgatggccgtggctgccaagaatgtggccttgctggcttacaaccgctggtaccaggacctagacaagattgatcaaaaagatttgatgcacaaggtcaagactgaactgtgagggctctagggagagcctgggaactttcatcccccactgaagatggatcatcccacagcagcccaggactgaataagccatgctcgcccaccaggcttctttctgacccctcatgtatcaagcatctccaggtgacctactgtctgcctatattaagggtccacacggcggctgctgcttttttttaagggggaaagtaagaaaagagaaggaaatccaagccagtatatttgttttatttattttttttaagaagaaaaaagttcatcttcacaaggtgcttcagacttggtttcttagctagaaaccagaagactacgggagggaatataaggcagagaactatgagtcttattttattactgtttttcactacctactcccacaatggacaatcaattgaggcaacctacaagaaaacatttacaaccagatggttacaaataaagtagaagggaagatcagaaaacctaagaaatgatcatagctcctggttactgtggacttgatggatttgaagtacctagttcagaactccctagtcaccatctccaagcctgtcaacatcactgcatattggaggagatgactgtggtaggacccaaggaagagatgtgtgcctgaatagtcgtcaccatatctccaagcttcctggcaaccagtgggaaaagaaacatgcgaggctgtaggaagagggaagctcttccttggcacctagaggaattagccattctcttccttatgcaaagattgaggaatgcaacaatataaagaagagaagtccccagatggtagagagcagtcatatcttacccctagatgttcatcccagcagaagaaagaagaaggtgttggggtaggattcttcagaggttagcctggtactttctcatcagacactagcttgaagtaagaggagaattatgcttttctttgctttttctacaaacccttaaaaatcacttgttttaaaaagaaagtaaaagcccttttcattcc

SEQ ID NO: 168968 - DNA, 2793 bp, Homo sapiens
  Payload ID: 13263
  Gene Symbol: PCYOX1L
  Gene Name: prenylcysteine oxidase 1 like
  ENST ID: ENST00000514349
  CDS Start-End: 580-1794
ccaaacactgatcactgaacagaactggtcagtaacttttaacaattcatagggaaataagaaagttagaagcaaggtagtgagttttatataaaactaaatttattctctttaattggtcatcctgactttcagtattctttgctggtcttttgctgcaaaatacctttttctttatgaaacgaaagtatagtaggcagcagttttcaggtttgcctttgcttattaatagctctactgacaactcagtccgcagatttccttttggaaatgttataagcctaggaaatttaagcacctgggaaccaccagcgcaggaggatacaaagtgtgaactacagcctctcactctcatgttctgtctctcttcttccctacctcccgggcctgctgacagcggtggttggggctgggattgggggctctgctgtggcccattttctccagcagcactttggacctcgggtgcagatcgacgtgtacgagaagggaaccgtgggtggccgcttggccaccatctcagtcaacaagcagcactatgagagcggggctgcctccttccactccctgagcctgcacatgcaggacttcgtcaagctgctggggctgaggcaccggcgcgaggtggtgggcaggagcgccatcttcggcggggagcacttcatgctggaggagactgactggtacctgctgaacctcttccgcctctggtggcactatggcatcagcttcctgaggctgcagatgtgggtggaggaggtcatggagaagttcatgaggatctataagtaccaggcccacggctatgccttctcgggtgtggaggagctgctctactcactgggggagtccacctttgttaacatgacccagcactctgtggctgagtccctgctgcaggtgggcgtcacgcagcgctttattgatgatgtcgtttctgctgtcctgcgggccagctatggccagtcagcagcgatgcccgcctttgcaggagccatgtcactagccggggcccaaggcagcctgtggtctgtggaaggaggcaataagctggtttgttccggtttgctgaagctcaccaaggccaatgtgatccatgccacagtgacctctgtgaccctgcacagcacagaggggaaagccctgtaccaggtggcgtatgagaatgaggtaggcaacagctctgacttctatgacatcgtggtcatcgccacccccctgcacctggacaacagcagcagcaacttaacctttgcaggcttccacccgcccattgatgacgtgcagggctctttccagcccaccgtcgtctccttggtccacggctacctcaactcgtcctacttcggtttcccagaccctaagcttttcccctttgccaacatccttaccacagatttccccagcttcttctgcactctggacaacatctgccctgtcaacatctctgccagcttccggcgaaagcagccccaggaggcagctgtttggcgagtccagtcccccaagcccctctttcggacccagctaaagaccctgttccgttcctattactcagtgcagacagctgagtggcaggcccatcccctctatggctcccgccccacgctcccgaggtttgcactccatgaccagctcttctacctcaatgccctggagtgggcggccagctccgtggaggtgatggccgtggctgccaagaatgtggccttgctggcttacaaccgctggtaccaggacctagacaagattgatcaaaaagatttgatgcacaaggtcaagactgaactgtgagggctctagggagagcctgggaactttcatcccccactgaagatggatcatcccacagcagcccaggactgaataagccatgctcgcccaccaggcttctttctgacccctcatgtatcaagcatctccaggtgacctactgtctgcctatattaagggtccacacggcggctgctgcttttttttaagggggaaagtaagaaaagagaaggaaatccaagccagtatatttgttttatttattttttttaagaagaaaaaagttcatcttcacaaggtgcttcagacttggtttcttagctagaaaccagaagactacgggagggaatataaggcagagaactatgagtcttattttattactgtttttcactacctactcccacaatggacaatcaattgaggcaacctacaagaaaacatttacaaccagatggttacaaataaagtagaagggaagatcagaaaacctaagaaatgatcatagctcctggttactgtggacttgatggatttgaagtacctagttcagaactccctagtcaccatctccaagcctgtcaacatcactgcatattggaggagatgactgtggtaggacccaaggaagagatgtgtgcctgaatagtcgtcaccatatctccaagcttcctggcaaccagtgggaaaagaaacatgcgaggctgtaggaagagggaagctcttccttggcacctagaggaattagccattctcttccttatgcaaagattgaggaatgcaacaatataaagaagagaagtccccagatggtagagagcagtcatatcttacccctagatgttcatcccagcagaagaaagaagaaggtgttggggtaggattcttcagaggttagcctggtactttctcatcagacactagcttgaagtaagaggagaattatgcttttctttgctttttctacaaacccttaaaaatcacttgttttaaaaagaaagtaaaagcccttttcattcc

SEQ ID NO: 168969 - DNA, 1200 bp, Homo sapiens
  Payload ID: 13264
  Gene Symbol: PNOC
  Gene Name: prepronociceptin
  Uniprot ID: Q13519
  ENST ID: ENST00000301908
  CDS Start-End: 209-739
gccaggaaggcttgcaggttctgctgtttggttgctgaagggggtcagtgtgtgtatgtgtcatggaggtgggcagggaaggggagggctgtgcgtgggggagaggatatatatgctggtgtggctgagaaagcggaaccgagcctcgcatccatcggagggagccggggactgacagctctcagcacctgcttcctgctcctgcaccatgaaagtcctgctttgtgacctgctgctgctcagtctcttctccagtgtgttcagcagttgtcagagggactgtctcacatgccaggagaagctccacccagccctggacagcttcgacctggaggtgtgcatcctcgagtgtgaagagaaggtcttccccagccccctctggactccatgcaccaaggtcatggccaggagctcttggcagctcagccctgccgccccagagcatgtggcggctgctctctaccagccgagagcttcggagatgcagcatctgcggcgaatgccccgagtccggagcttgttccaggagcaggaagagcccgagcctggcatggaggaggctggtgagatggagcagaagcagctgcagaagagatttgggggcttcaccggggcccggaagtcggccaggaagttggccaatcagaagcggttcagtgagtttatgaggcaatacttggtcctgagcatgcagtccagccagcgccggcgcaccctgcaccagaatggtaatgtgtagccggaaggggcgctcctcccagctgtaccggccactgcaacccatgagcgtccaggtgatcccccaaacagcatgtgctcagccccagacctgccgcctgggaatcaggattccttcttccccaaggcactgagcgcctgcagatcccgcaggcttcgtttgcctccagaaccttcccgtctgattgttcctccccagccccctggcatgtttcaccacaaccctgttgctacatcagagtgtatttttgtaattcctctagctaccatttcaatagccccatctctcctgctcacccgcctcttgccccttctaggggcaggtgaaaggaataggaaattgaacctggggttttgacttgccactgccataacttgtttgtaaaagagctgttctttttgactgattgttttaaacaacgatttctccattaaacttctactgagcaaatggttaataaa

SEQ ID NO: 168970 - DNA, 554 bp, Homo sapiens
  Payload ID: 13264
  Gene Symbol: PNOC
  Gene Name: prepronociceptin
  ENST ID: ENST00000518479
  CDS Start-End: 92-554
tcagtcctcacagagcctctggaagcacagggaaggcagctgtgggatcctggctgaacagagtccagcacctgcttcctgctcctgcaccatgaaagtcctgctttgtgacctgctgctgctcagtctcttctccagtgtgttcagcagttgtcagagggactgtctcacatgccaggagaagctccacccagccctggacagcttcgacctggaggtgtgcatcctcgagtgtgaagagaaggtcttccccagccccctctggactccatgcaccaaggtcatggccaggagctcttggcagctcagccctgccgccccagagcatgtggcggctgctctctaccagccgagagcttcggagatgcagcatctgcggcgaatgccccgagtccggagcttgttccaggagcaggaagagcccgagcctggcatggaggaggctggtgagatggagcagaagcagctgcagaagagatttgggggcttcaccggggcccggaagtcggccaggaagttggccaatcagaagcggttcagtgagtttatgaggc

SEQ ID NO: 168971 - DNA, 1007 bp, Homo sapiens
  Payload ID: 13264
  Gene Symbol: PNOC
  Gene Name: prepronociceptin
  Uniprot ID: Q13519
  ENST ID: ENST00000522209
  CDS Start-End: 208-546
agaacaaaataaaattctttatgggtgacagtcatgagctgtgcttggctccaaaaacccgactaaagatgtaacaaggtgcggtgttgggcgcatttatcctgtgttaacttcctatgttaacgtgctgtgacaccagaggtgtgcatcctcgagtgtgaagagaaggtcttccccagccccctctggactccatgcaccaaggtcatggccaggagctcttggcagctcagccctgccgccccagagcatgtggcggctgctctctaccagccgagagcttcggagatgcagcatctgcggcgaatgccccgagtccggagcttgttccaggagcaggaagagcccgagcctggcatggaggaggctggtgagatggagcagaagcagctgcagaagagatttgggggcttcaccggggcccggaagtcggccaggaagttggccaatcagaagcggttcagtgagtttatgaggcaatacttggtcctgagcatgcagtccagccagcgccggcgcaccctgcaccagaatggtaatgtgtagccggaaggggcgctcctcccagctgtaccggccactgcaacccatgagcgtccaggtgatcccccaaacagcatgtgctcagccccagacctgccgcctgggaatcaggattccttcttccccaaggcactgagcgcctgcagatcccgcaggcttcgtttgcctccagaaccttcccgtctgattgttcctccccagccccctggcatgtttcaccacaaccctgttgctacatcagagtgtatttttgtaattcctctagctaccatttcaatagccccatctctcctgctcacccgcctcttgccccttctaggggcaggtgaaaggaataggaaattgaacctggggttttgacttgccactgccataacttgtttgtaaaagagctgttctttttgactgattgttttaaacaacgatttctccattaaacttctactgagcaaatggttaataaa

SEQ ID NO: 168972 - DNA, 6078 bp, Homo sapiens
  Payload ID: 13265
  Gene Symbol: PSEN1
  Gene Name: presenilin 1
  Uniprot ID: P49768
  ENST ID: ENST00000324501
  CDS Start-End: 273-1676
cggtgagggttctcgggcggggcctgggacaggcagctccggggtccgcggtttcacatcggaaacaaaacagcggctggtctggaaggaacctgagctacgagccgcggcggcagcggggcggcggggaagcgtatacctaatctgggagcctgcaagtgacaacagcctttgcggtccttagacagcttggcctggaggagaacacatgaaagaaagaacctcaagaggctttgttttctgtgaaacagtatttctatacagttgctccaatgacagagttacctgcaccgttgtcctacttccagaatgcacagatgtctgaggacaaccacctgagcaatactgtacgtagccagaatgacaatagagaacggcaggagcacaacgacagacggagccttggccaccctgagccattatctaatggacgaccccagggtaactcccggcaggtggtggagcaagatgaggaagaagatgaggagctgacattgaaatatggcgccaagcatgtgatcatgctctttgtccctgtgactctctgcatggtggtggtcgtggctaccattaagtcagtcagcttttatacccggaaggatgggcagctaatctataccccattcacagaagataccgagactgtgggccagagagccctgcactcaattctgaatgctgccatcatgatcagtgtcattgttgtcatgactatcctcctggtggttctgtataaatacaggtgctataaggtcatccatgcctggcttattatatcatctctattgttgctgttctttttttcattcatttacttgggggaagtgtttaaaacctataacgttgctgtggactacattactgttgcactcctgatctggaattttggtgtggtgggaatgatttccattcactggaaaggtccacttcgactccagcaggcatatctcattatgattagtgccctcatggccctggtgtttatcaagtacctccctgaatggactgcgtggctcatcttggctgtgatttcagtatatgatttagtggctgttttgtgtccgaaaggtccacttcgtatgctggttgaaacagctcaggagagaaatgaaacgctttttccagctctcatttactcctcaacaatggtgtggttggtgaatatggcagaaggagacccggaagctcaaaggagagtatccaaaaattccaagtataatgcagaaagcacagaaagggagtcacaagacactgttgcagagaatgatgatggcgggttcagtgaggaatgggaagcccagagggacagtcatctagggcctcatcgctctacacctgagtcacgagctgctgtccaggaactttccagcagtatcctcgctggtgaagacccagaggaaaggggagtaaaacttggattgggagatttcattttctacagtgttctggttggtaaagcctcagcaacagccagtggagactggaacacaaccatagcctgtttcgtagccatattaattggtttgtgccttacattattactccttgccattttcaagaaagcattgccagctcttccaatctccatcacctttgggcttgttttctactttgccacagattatcttgtacagccttttatggaccaattagcattccatcaattttatatctagcatatttgcggttagaatcccatggatgtttcttctttgactataacaaaatctggggaggacaaaggtgattttcctgtgtccacatctaacaaagtcaagattcccggctggacttttgcagcttccttccaagtcttcctgaccaccttgcactattggactttggaaggaggtgcctatagaaaacgattttgaacatacttcatcgcagtggactgtgtccctcggtgcagaaactaccagatttgagggacgaggtcaaggagatatgataggcccggaagttgctgtgccccatcagcagcttgacgcgtggtcacaggacgatttcactgacactgcgaactctcaggactaccgttaccaagaggttaggtgaagtggtttaaaccaaacggaactcttcatcttaaactacacgttgaaaatcaacccaataattctgtattaactgaattctgaacttttcaggaggtactgtgaggaagagcaggcaccagcagcagaatggggaatggagaggtgggcaggggttccagcttccctttgattttttgctgcagactcatcctttttaaatgagacttgttttcccctctctttgagtcaagtcaaatatgtagattgcctttggcaattcttcttctcaagcactgacactcattaccgtctgtgattgccatttcttcccaaggccagtctgaacctgaggttgctttatcctaaaagttttaacctcaggttccaaattcagtaaattttggaaacagtacagctatttctcatcaattctctatcatgttgaagtcaaatttggattttccaccaaattctgaatttgtagacatacttgtacgctcacttgccccagatgcctcctctgtcctcattcttctctcccacacaagcagtctttttctacagccagtaaggcagctctgtcgtggtagcagatggtcccattattctagggtcttactctttgtatgatgaaaagaatgtgttatgaatcggtgctgtcagccctgctgtcagaccttcttccacagcaaatgagatgtatgcccaaagacggtagaattaaagaagagtaaaatggctgttgaagcactttctgtcctggtattttgtttttgcttttgccacacagtagctcagaatttgaacaaatagccaaaagctggtggttgatgaattatgaactagttgtatcaacacaaagcaagagttggggaaagccatatttaacttggtgagctgtgggagaacctggtggcagaaggagaaccaactgccaaggggaaagagaaggggcctccagcagcgaaggggatacagtgagctaatgatgtcaaggaggagtttcaggttattctcgtcagctccacaaatgggtgctttgtggtctctgcccgcgttacctttcctctcaatgtacctttgtgtgaactgggcagtggaggtgcctgctgcagttaccatggagttcaggctctgggcagctcagtcaggcaaaacacacaaacagccatcagcctgtgtgggctcagggcacctctggacaaaggcttgtggggcataaccttctttaccacagagagcccttagctatgctgatcagaccgtaagcgtttatgagaaacttagtttcctcctgtggctgaggaggggccagctttttcttcttttgcctgctgttttctctcccaatctatgatatgatatgacctggtttggggctgtctttggtgtttagaatatttgttttctgtcccaggatatttcttataagaacctaacttcaagagtagtgtgcgagtactgatctgaatttaaattaaaattggcttatattaggcagtcacagacaggaaaaataagagctatgcaaagaaagggggatttaaagtagtaggttctatcatctcaattcatttttttccatgaaatcccttcttccaagattcattccctctctcagacatgtgctagcatgggtattatcattgagaaagcacagctacagcaaagccacctgaatagcaatttgtgattggaagcattcttgagggatccctaatctagagtaatttatttgtgtaaggatcccaaatgtgttgcacctttcatgatacatttcttctctgaagagggtacgtggggtgtgtgtatttaaatccatcctatgtattactgattgtcctgtgtagaaagatggcaattattctgtctctttctccaagtttgagccacatctcagccacattgttagacagtgtacagagaacctatctttcctttttttttttttaaaggacaggattttgctgtgttgcccaggctagacttgaactcctgggctcaagtaatccacctcagcctgagtagctgagactacagcccatcttatttctttaaatcattcatctcaggcagagaacttttccctcaaacattctttttagaattagttcagtcattcctaaaacatccaaatgctagtcttccaccatgaaaaatagattgtcactggaaagaacagtagcaatttccataaggatgtgccttcactcacacgggacaggcggtggttatagagtcgggcaaaaccagcagtagagtatgaccagccaagccaatctgcttaataaaaagatggaagacagtaaggaaggaaagtagccactaagagtctgagtctgactgggctacagaataaagggtatttatggacagaatgtcattacatgcctatgggaataccaatcatatttggaagatttgcagattttttttcagagaggaaagactcaccttcctgtttttggttctcagtaggttcgtgtgtgttcctagaatcacagctctgactccaaatgactcaatttctcaattagaaaaagtagaagctttctaagcaacttggaagaaaacagtcataagtaagcaatttgttgattttactacagaagcaacaactgaagaggcagtgtttttactttcagactccgggattcccattctgtagtctctctgcttttaaaaaccctccttttgcaatagatgcccaaacagatgatgtttattacttgttatttacgtggcctcagacagtgtatgtattctcgatataacttgtagagtgtgaaatataagtttaactaccaaataaggtctcccagggttagatgactgcgggaagcctttgatcccaacccccaaggctttgtatatttgatcatttgtgatctaaccctggaagaaaaagagctcagaaaccactatgaaaaaatttgttcagtgttttctgtgttcccgtaggttctggagtctgaggatgcaaagatgaataagataaattctcagaatgtagttataatctcttgttttctggtatatgccatctttctttaacttctctaaaatattgggtatttgtcaaataaccacttttaacagttaccattactgagggcttatacattggtgttataaaagtgacttgattcagaaatcaatccattcagtaaagtactccttctctaaatttgctgttatgtctataaggaacagtttgacctgcccttctcctcacctcctcacctgccttccaacattgaatttggaaggagacgtgaaaattggacatttggttttgcccttgggctggaaactatcatataatcataagtttgagcctagaagtgatccttgtgatcttctcacctctttaaattcccacaacacaagagattaaaaacagaggtttcagctcttcatagtgcgttgtgaaatggctggccagagtgtaccaacaaagctgtcatcgggctcacagctcagagacatctgcatgtgatcatctgcatagtcctctcctctaacgggaaacacctcagatttgcatataaaaaagcaccctggtgctgaaatgaacccctttcttgaacatcaaagctgtctcccacagccttgggcagcagggtgcctcttagtggatgtgctgggtccaccctgagccctgacatgtggtggcagcattgccagttggtctgtgtgtctgtgtagcagggacgatttcccagaaagcaattttccttttgaaatacgtaattgttgagactaggcagtttcaaagtcagctgcatatagtagcaagtacaggactgtcttgtttttggtgtccttggaggtgctggggtgagggtttcagtgggatcatttactctcacatgttgtctgccttctgcttctgtggacactgctttgtacttaattcagacagactgtgaatacaccttttttataaatacctttcaaattcttggtaagatataattttgatagctgattgcagattttctgtatttgtcagattaataaagactgcatgaatcca

SEQ ID NO: 168973 - DNA, 2776 bp, Homo sapiens
  Payload ID: 13265
  Gene Symbol: PSEN1
  Gene Name: presenilin 1
  Uniprot ID: P49768
  ENST ID: ENST00000357710
  CDS Start-End: 273-1664
cggtgagggttctcgggcggggcctgggacaggcagctccggggtccgcggtttcacatcggaaacaaaacagcggctggtctggaaggaacctgagctacgagccgcggcggcagcggggcggcggggaagcgtatacctaatctgggagcctgcaagtgacaacagcctttgcggtccttagacagcttggcctggaggagaacacatgaaagaaagaacctcaagaggctttgttttctgtgaaacagtatttctatacagttgctccaatgacagagttacctgcaccgttgtcctacttccagaatgcacagatgtctgaggacaaccacctgagcaatactaatgacaatagagaacggcaggagcacaacgacagacggagccttggccaccctgagccattatctaatggacgaccccagggtaactcccggcaggtggtggagcaagatgaggaagaagatgaggagctgacattgaaatatggcgccaagcatgtgatcatgctctttgtccctgtgactctctgcatggtggtggtcgtggctaccattaagtcagtcagcttttatacccggaaggatgggcagctaatctataccccattcacagaagataccgagactgtgggccagagagccctgcactcaattctgaatgctgccatcatgatcagtgtcattgttgtcatgactatcctcctggtggttctgtataaatacaggtgctataaggtcatccatgcctggcttattatatcatctctattgttgctgttctttttttcattcatttacttgggggaagtgtttaaaacctataacgttgctgtggactacattactgttgcactcctgatctggaattttggtgtggtgggaatgatttccattcactggaaaggtccacttcgactccagcaggcatatctcattatgattagtgccctcatggccctggtgtttatcaagtacctccctgaatggactgcgtggctcatcttggctgtgatttcagtatatgatttagtggctgttttgtgtccgaaaggtccacttcgtatgctggttgaaacagctcaggagagaaatgaaacgctttttccagctctcatttactcctcaacaatggtgtggttggtgaatatggcagaaggagacccggaagctcaaaggagagtatccaaaaattccaagtataatgcagaaagcacagaaagggagtcacaagacactgttgcagagaatgatgatggcgggttcagtgaggaatgggaagcccagagggacagtcatctagggcctcatcgctctacacctgagtcacgagctgctgtccaggaactttccagcagtatcctcgctggtgaagacccagaggaaaggggagtaaaacttggattgggagatttcattttctacagtgttctggttggtaaagcctcagcaacagccagtggagactggaacacaaccatagcctgtttcgtagccatattaattggtttgtgccttacattattactccttgccattttcaagaaagcattgccagctcttccaatctccatcacctttgggcttgttttctactttgccacagattatcttgtacagccttttatggaccaattagcattccatcaattttatatctagcatatttgcggttagaatcccatggatgtttcttctttgactataacaaaatctggggaggacaaaggtgattttcctgtgtccacatctaacaaagtcaagattcccggctggacttttgcagcttccttccaagtcttcctgaccaccttgcactattggactttggaaggaggtgcctatagaaaacgattttgaacatacttcatcgcagtggactgtgtccctcggtgcagaaactaccagatttgagggacgaggtcaaggagatatgataggcccggaagttgctgtgccccatcagcagcttgacgcgtggtcacaggacgatttcactgacactgcgaactctcaggactaccgttaccaagaggttaggtgaagtggtttaaaccaaacggaactcttcatcttaaactacacgttgaaaatcaacccaataattctgtattaactgaattctgaacttttcaggaggtactgtgaggaagagcaggcaccagcagcagaatggggaatggagaggtgggcaggggttccagcttccctttgattttttgctgcagactcatcctttttaaatgagacttgttttcccctctctttgagtcaagtcaaatatgtagattgcctttggcaattcttcttctcaagcactgacactcattaccgtctgtgattgccatttcttcccaaggccagtctgaacctgaggttgctttatcctaaaagttttaacctcaggttccaaattcagtaaattttggaaacagtacagctatttctcatcaattctctatcatgttgaagtcaaatttggattttccaccaaattctgaatttgtagacatacttgtacgctcacttgccccagatgcctcctctgtcctcattcttctctcccacacaagcagtctttttctacagccagtaaggcagctctgtcgtggtagcagatggtcccattattctagggtcttactctttgtatgatgaaaagaatgtgttatgaatcggtgctgtcagccctgctgtcagaccttcttccacagcaaatgagatgtatgcccaaagacggtagaattaaagaagagtaaaatggctgttgaagc

SEQ ID NO: 168974 - DNA, 1249 bp, Homo sapiens
  Payload ID: 13265
  Gene Symbol: PSEN1
  Gene Name: presenilin 1
  Uniprot ID: P49768
  ENST ID: ENST00000394157
  CDS Start-End: 273-827
cggtgagggttctcgggcggggcctgggacaggcagctccggggtccgcggtttcacatcggaaacaaaacagcggctggtctggaaggaacctgagctacgagccgcggcggcagcggggcggcggggaagcgtatacctaatctgggagcctgcaagtgacaacagcctttgcggtccttagacagcttggcctggaggagaacacatgaaagaaagaacctcaagaggctttgttttctgtgaaacagtatttctatacagttgctccaatgacagagttacctgcaccgttgtcctacttccagaatgcacagatgtctgaggacaaccacctgagcaatactgtacgtagccagaatgacaatagagaacggcaggagcacaacgacagacggagccttggccaccctgagccattatctaatggacgaccccagggtaactcccggcaggtggtggagcaagatgaggaagaagatgaggagctgacattgaaatatggcgccaagcatgtgatcatgctctttgtccctgtgactctctgcatggtggtggtcgtggctaccattaagtcagtcagcttttatacccggaaggatgggcagctaatctataccccattcacagaagataccgagactgtgggccagagagccctgcactcaattctgaatgctgccatcatgatcagtgtcattgttgtcatgactatcctcctggtggttctgtataaatacaggtgctataaggtgagcatgagacacagatctttgctttccaccctgttcttcttatggttgggtattcttgtcacagtaacttaactgatctaggaaagaaaaaatgttttgtcttctagagataagttaatttttagttttcttcctcctcactgtggaacattcaaaaaatacaaaaaggaagccaggtgcatgtgtaatgccaggctcagaggctgaggcaggaggatcacttgggcccaggagttcacaagcagcttgggcaacgtagcaagaccctgcctctattaaagaaaacaaaaaacaaatattggaagtattttatatgcatggaatctatatgtcatgaaaaaattagtgtaaaatatatatattatgattagttatcaagatttagtgataatttatgttattttggatttcaatgcctttttaggccattgtctcaaaaaataaaagcagaaaacaaaaaaagttgtaactgaaaaataaacatttccatataa

SEQ ID NO: 168975 - DNA, 3046 bp, Homo sapiens
  Payload ID: 13265
  Gene Symbol: PSEN1
  Gene Name: presenilin 1
  Uniprot ID: P49768
  ENST ID: ENST00000394164
  CDS Start-End: 543-1934
ggaaatgctgtttgctcgaagacgtctcagggcgcaggtgccttgggccgggattagtagccgtctgaactggagtggagtaggagaaagaggaagcgtcttgggctgggtctgcttgagcaactggtgaaactccgcgcctcacgccccgggtgtgtccttgtccaggggcgacgagcattctgggcgaagtccgcacgcctcttgttcgaggcggaagacggggtctgatgctttctccttggtcgggactgtctcgaggcatgcatgtccagtgactcttgtgtttgctgctgcttccctctcagattcttctcaccgttgtggtcagctctgctttaggcatattaatccatagtggaggctgggatgggtgagagaattgaggtgacttttccataattcagacctaatctgggagcctgcaagtgacaacagcctttgcggtccttagacagcttggcctggaggagaacacatgaaagaaagaacctcaagaggctttgttttctgtgaaacagtatttctatacagttgctccaatgacagagttacctgcaccgttgtcctacttccagaatgcacagatgtctgaggacaaccacctgagcaatactaatgacaatagagaacggcaggagcacaacgacagacggagccttggccaccctgagccattatctaatggacgaccccagggtaactcccggcaggtggtggagcaagatgaggaagaagatgaggagctgacattgaaatatggcgccaagcatgtgatcatgctctttgtccctgtgactctctgcatggtggtggtcgtggctaccattaagtcagtcagcttttatacccggaaggatgggcagctaatctataccccattcacagaagataccgagactgtgggccagagagccctgcactcaattctgaatgctgccatcatgatcagtgtcattgttgtcatgactatcctcctggtggttctgtataaatacaggtgctataaggtcatccatgcctggcttattatatcatctctattgttgctgttctttttttcattcatttacttgggggaagtgtttaaaacctataacgttgctgtggactacattactgttgcactcctgatctggaattttggtgtggtgggaatgatttccattcactggaaaggtccacttcgactccagcaggcatatctcattatgattagtgccctcatggccctggtgtttatcaagtacctccctgaatggactgcgtggctcatcttggctgtgatttcagtatatgatttagtggctgttttgtgtccgaaaggtccacttcgtatgctggttgaaacagctcaggagagaaatgaaacgctttttccagctctcatttactcctcaacaatggtgtggttggtgaatatggcagaaggagacccggaagctcaaaggagagtatccaaaaattccaagtataatgcagaaagcacagaaagggagtcacaagacactgttgcagagaatgatgatggcgggttcagtgaggaatgggaagcccagagggacagtcatctagggcctcatcgctctacacctgagtcacgagctgctgtccaggaactttccagcagtatcctcgctggtgaagacccagaggaaaggggagtaaaacttggattgggagatttcattttctacagtgttctggttggtaaagcctcagcaacagccagtggagactggaacacaaccatagcctgtttcgtagccatattaattggtttgtgccttacattattactccttgccattttcaagaaagcattgccagctcttccaatctccatcacctttgggcttgttttctactttgccacagattatcttgtacagccttttatggaccaattagcattccatcaattttatatctagcatatttgcggttagaatcccatggatgtttcttctttgactataacaaaatctggggaggacaaaggtgattttcctgtgtccacatctaacaaagtcaagattcccggctggacttttgcagcttccttccaagtcttcctgaccaccttgcactattggactttggaaggaggtgcctatagaaaacgattttgaacatacttcatcgcagtggactgtgtccctcggtgcagaaactaccagatttgagggacgaggtcaaggagatatgataggcccggaagttgctgtgccccatcagcagcttgacgcgtggtcacaggacgatttcactgacactgcgaactctcaggactaccgttaccaagaggttaggtgaagtggtttaaaccaaacggaactcttcatcttaaactacacgttgaaaatcaacccaataattctgtattaactgaattctgaacttttcaggaggtactgtgaggaagagcaggcaccagcagcagaatggggaatggagaggtgggcaggggttccagcttccctttgattttttgctgcagactcatcctttttaaatgagacttgttttcccctctctttgagtcaagtcaaatatgtagattgcctttggcaattcttcttctcaagcactgacactcattaccgtctgtgattgccatttcttcccaaggccagtctgaacctgaggttgctttatcctaaaagttttaacctcaggttccaaattcagtaaattttggaaacagtacagctatttctcatcaattctctatcatgttgaagtcaaatttggattttccaccaaattctgaatttgtagacatacttgtacgctcacttgccccagatgcctcctctgtcctcattcttctctcccacacaagcagtctttttctacagccagtaaggcagctctgtcgtggtagcagatggtcccattattctagggtcttactctttgtatgatgaaaagaatgtgttatgaatcggtgctgtcagccctgctgtcagaccttcttccacagcaaatgagatgtatgcccaaagacggtagaattaaagaagagtaaaatggctgttgaagc

SEQ ID NO: 168976 - DNA, 4062 bp, Homo sapiens
  Payload ID: 13265
  Gene Symbol: PSEN1
  Gene Name: presenilin 1
  ENST ID: ENST00000406768
  CDS Start-End: 1823-2950
ttttttttttttttttttgcttcgaagaatgattgcctttaccttctcagttctcagttattttccagcacattatgattttatgaccttgatacagaagggctgggctcctggctaaattccacccttaaacctggaactgcaaccctaagtgaaaacagctaaccccattttttttcccacccaaatgttgcctctttggcctgccatgcccctatcctgtgctcataaaaatatttcagctgggctgggtgcggtggctcactcctataatcccagcactttgggagaccgaggcaggtggatcacctggggtcaggagttcaagaccagcctggccaacatggcaaaaccgtatctctactaaaaatacaaaaattagttgggcatggtggtgggcaccataatcccagctacttgggaggatgaggcaggagaattgcttgaacctgggcggcggaggttacagtgagcccagattgtgccagtgcactccagcctgggcaaccgagtgagactctgtctcaaaaaaaaaaaaacaaaaacaaaaaagatttcagcagctgggagaacaatataagcagctgacgtcagggatataaatggctgtgtgttgggaatacaagcagctgattgtcggaaatacaagccactgagtgttggtgatacaagtggctgagcagcgagcagagaatcaggtgagcgttggagactatggatgggacgtggctaacttcagatggtgcagctttggagaataggcccagccggagatggcctggcttcagggaaagatcaccttcttcccataccatccctttttcaactccccattctgctgagaaccacttccatcgtgcaatacaatcttctgcatatactacccttcaatctgttcatgtgatctgattattcctggacactggaagagaacctgggtgccaagaggagagggcaggggctgccaccctgaccctccactgagctggctggcacctggccatccccgaatggccgcgttgaaggagcattgattgtaacacacttggatgctgctgcggggccgcatagagcctgcgcctgccagagaggagcaactggctggttcccgcattcgtttgctctgattcccacactcactcactcgcttgcacactgcctcttgcaaggggtttgagtgtgtggtggccgagtaaacgagccacgctccgagccatgagggggtcaagggaattatccagtctcatctcaatccgacttccctcttcactgttttacttttgtaaaacccttgatgaacttcccattgtcaattcagggtctttttagctctcatcctgccagactgttgataacacctctgatttgtgctccacttttggcttctgtgtcatattgattcctgagttttcttccttctcctctattctcttaatctcgttttctggttttctcccatcacctgctggttaagcttaggggttatttacacttctctccttggtcatctttttactgtatttttccctccacagctatttcatccatttctgaggcctgagatttcatccatttctgaggctatagagaccagtgacttcctctgactcttctgagcttgaaattcctattgaatgacaatagagaacggcaggagcacaacgacagacggagccttggccaccctgagccattatctaatggacgaccccagggtaactcccggcaggtggtggagcaagatgaggaagaagatgaggagctgacattgaaatatggcgccaagcatgtgatcatgctctttgtccctgtgactctctgcatggtggtggtcgtggctaccattaagtcagtcagcttttatacccggaaggatgggcagctaatctataccccattcacagaagataccgagactgtgggccagagagccctgcactcaattctgaatgctgccatcatgatcagtgtcattgttgtcatgactatcctcctggtggttctgtataaatacaggtgctataaggtcatccatgcctggcttattatatcatctctattgttgctgttctttttttcattcatttacttgggggaagtgtttaaaacctataacgttgctgtggactacattactgttgcactcctgatctggaattttggtgtggtgggaatgatttccattcactggaaaggtccacttcgactccagcaggcatatctcattatgattagtgccctcatggccctggtgtttatcaagtacctccctgaatggactgcgtggctcatcttggctgtgatttcagtatatgatttagtggctgttttgtgtccgaaaggtccacttcgtatgctggttgaaacagctcaggagagaaatgaaacgctttttccagctctcatttactcctcaacaatggtgtggttggtgaatatggcagaaggagacccggaagctcaaaggagagtatccaaaaattccaagtataatgcagaaagcacagaaagggagtcacaagacactgttgcagagaatgatgatggcgggttcagtgaggaatgggaagcccagagggacagtcatctagggcctcatcgctctacacctgagtcacgagctgctgtccaggaactttccagcagtatcctcgctggtgaagacccagaggaaaggggagtaaaacttggattgggagatttcattttctacagtgttctggttggtaaagcctcagcaacagccagtggagactggaacacaaccatagcctgtttcgtagccatattaattggtttgtgccttacattattactccttgccattttcaagaaagcattgccagctcttccaatctccatcacctttgggcttgttttctactttgccacagattatcttgtacagccttttatggaccaattagcattccatcaattttatatctagcatatttgcggttagaatcccatggatgtttcttctttgactataacaaaatctggggaggacaaaggtgattttcctgtgtccacatctaacaaagtcaagattcccggctggacttttgcagcttccttccaagtcttcctgaccaccttgcactattggactttggaaggaggtgcctatagaaaacgattttgaacatacttcatcgcagtggactgtgtccctcggtgcagaaactaccagatttgagggacgaggtcaaggagatatgataggcccggaagttgctgtgccccatcagcagcttgacgcgtggtcacaggacgatttcactgacactgcgaactctcaggactaccgttaccaagaggttaggtgaagtggtttaaaccaaacggaactcttcatcttaaactacacgttgaaaatcaacccaataattctgtattaactgaattctgaacttttcaggaggtactgtgaggaagagcaggcaccagcagcagaatggggaatggagaggtgggcaggggttccagcttccctttgattttttgctgcagactcatcctttttaaatgagacttgttttcccctctctttgagtcaagtcaaatatgtagattgcctttggcaattcttcttctcaagcactgacactcattaccgtctgtgattgccatttcttcccaaggccagtctgaacctgaggttgctttatcctaaaagttttaacctcaggttccaaattcagtaaattttggaaacagtacagctatttctcatcaattctctatcatgttgaagtcaaatttggattttccaccaaattctgaatttgtagacatacttgtacgctcacttgccccagatgcctcctctgtcctcattcttctctcccacacaagcagtctttttctacagccagtaaggcagctctgtcgtggtagcagatggtcccattattctagggtcttactctttgtatgatgaaaagaatgtgttatgaatcggtgctgtcagccctgctgtcagaccttcttccacagcaaatgagatgtatgcccaaagacggtagaattaaagaagagtaaaatggctgttgaagc

SEQ ID NO: 168977 - DNA, 552 bp, Homo sapiens
  Payload ID: 13265
  Gene Symbol: PSEN1
  Gene Name: presenilin 1
  ENST ID: ENST00000556951
  CDS Start-End: 280-552
aatgacgacaacggtgagggttctcgggcggggcctgggacaggcagctccggggtccgcggtttcacatcggaaacaaaacagcggctggtctggaaggaacctgagctacgagccgcggcggcagcggggcggcggggaagcacctaatctgggagcctgcaagtgacaacagcctttgcggtccttagacagcttggcctggaggagaacacatgaaagaaagaacctcaagaggctttgttttctgtgaaacagtatttctatacagttgctccaatgacagagttacctgcaccgttgtcctacttccagaatgcacagatgtctgaggacaaccacctgagcaatactaatgacaatagagaacggcaggagcacaacgacagacggagccttggccaccctgagccattatctaatggacgaccccagggtaactcccggcaggtggtggagcaagatgaggaagaagatgaggagctgacattgaaatatggcgccaagcatgtgatcatgctctttgtccctgtgactctctgcatggtggtg

SEQ ID NO: 168978 - DNA, 754 bp, Homo sapiens
  Payload ID: 13265
  Gene Symbol: PSEN1
  Gene Name: presenilin 1
  ENST ID: ENST00000555254
  CDS Start-End: 288-754
ttctcgggcggggcctgggacaggcagctccggggtccgcggtttcacatcggaaacaaaacagcggctggtctggaaggaacctgagctacgagccgcggcggcagcggggcggcggggaagcgtatacctaatctgggagcctgcaagtgacaacagcctttgcggtccttagacagcttggcctggaggagaacacatgaaagaaagttctgtttttctttcccttttcagaacctcaagaggctttgttttctgtgaaacagtatttctatacagttgctccaatgacagagttacctgcaccgttgtcctacttccagaatgcacagatgtctgaggacaaccacctgagcaatactgtacgtagccagaatgacaatagagaacggcaggagcacaacgacagacggagccttggccaccctgagccattatctaatggacgaccccagggtaactcccggcaggtggtggagcaagatgaggaagaagatgaggagctgacattgaaatatggcgccaagcatgtgatcatgctctttgtccctgtgactctctgcatggtggtggtcgtggctaccattaagtcagtcagcttttatacccggaaggatgggcagctaatctataccccattcacagaagataccgagactgtgggccagagagccctgcactcaattctgaatgctgccatcatgatcagtgtcattgttgtcatgactatcctcctggtggttctgtataaata

SEQ ID NO: 168979 - DNA, 1484 bp, Homo sapiens
  Payload ID: 13265
  Gene Symbol: PSEN1
  Gene Name: presenilin 1
  Uniprot ID: P49768
  ENST ID: ENST00000555386
  CDS Start-End: 1-1125
atgacagagttacctgcaccgttgtcctacttccagaatgcacagatgtctgaggacaaccacctgagcaatactaatgacaatagagaacggcaggagcacaacgacagacggagccttggccaccctgagccattatctaatggacgaccccagggtaactcccggcaggtggtggagcaagatgaggaagaagatgaggagctgacattgaaatatggcgccaagcatgtgatcatgctctttgtccctgtgactctctgcatggtggtggtcgtggctaccattaagtcagtcagcttttatacccggaaggatgggcagctaatctataccccattcacagaagataccgagactgtgggccagagagccctgcactcaattctgaatgctgccatcatgatcagtgtcattgttgtcatgactatcctcctggtggttctgtataaatacaggtgctataaggtcatccatgcctggcttattatatcatctctattgttgctgttctttttttcattcatttacttgggggaagtgtttaaaacctataacgttgctgtggactacattactgttgcactcctgatctggaattttggtgtggtgggaatgatttccattcactggaaaggtccacttcgactccagcaggcatatctcattatgattagtgccctcatggccctggtgtttatcaagtacctccctgaatggactgcgtggctcatcttggctgtgatttcagtatatgatttagtggctgttttgtgtccgaaaggtccacttcgtatgctggttgaaacagctcaggagagaaatgaaacgctttttccagctctcatttactcctcaacaatggtgtggttggtgaatatggcagaaggagacccggaagctcaaaggagagtatccaaaaattccaagtataatgcagaaagagcctgtctgcctcctgctgccatcaacctgctgtctatagctcccatggcacccaggctgttcatgccaaagggtgcctgcaggcccacggcacagaaagggagtcacaagacactgttgcagagaatgatgatggcgggttcagtgaggaatgggaagcccagagggacagtcatctagggcctcatcgctctacacctgagtcacgagctgctgtccaggaactttccagcagtatcctcgctggtgaagacccagaggaaaggggagtaaaacttggattgggagatttcattttctacagtgttctggttggtaaagcctcagcaacagccagtggagactggaacacaaccatagcctgtttcgtagccatattaattggtttgtgccttacattattactccttgccattttcaagaaagcattgccagctcttccaatctccatcacctttgggcttgttttctactttgccacagattatcttgtacagccttttatggaccaattagcattccatcaattttatatctag

SEQ ID NO: 168980 - DNA, 555 bp, Homo sapiens
  Payload ID: 13265
  Gene Symbol: PSEN1
  Gene Name: presenilin 1
  ENST ID: ENST00000557037
  CDS Start-End: 368-555
gagctacgagccgcggcggcagcggggcggcggggaagcgtatattcttctcaccgttgtggtcagctctgctttaggcatattaatccatagtggaggctgggatgggtgagagaattgaggtgacttttccataattcaggcatacaaatttattagcatgcagactgggagaaccacaagcctgggtgacagagcaagactgtgtctcaaaataaagacaggaacaaagacctaatctgggagcctgcaagtgacaacagcctttgcggtccttagacagcttggcctggaggagaacacatgaaagaaagaacctcaagaggctttgttttctgtgaaacagtatttctatacagttgctccaatgacagagttacctgcaccgttgtcctacttccagaatgcacagatgtctgaggacaaccacctgagcaatactaatgacaatagagaacggcaggagcacaacgacagacggagccttggccaccctgagccattatctaatggacgaccccagggtaactcccggcaggtggtggagcaagatga

SEQ ID NO: 168981 - DNA, 1230 bp, Homo sapiens
  Payload ID: 13265
  Gene Symbol: PSEN1
  Gene Name: presenilin 1
  Uniprot ID: P49768
  ENST ID: ENST00000557511
  CDS Start-End: 1-1230
atgacagagttacctgcaccgttgtcctacttccagaatgcacagatgtctgaggacaaccacctgagcaatactgtacgtagccagaatgacaatagagaacggcaggagcacaacgacagacggagccttggccaccctgagccattatctaatggacgaccccagggtaactcccggcaggtggtggagcaagatgaggaagaagatgaggagctgacattgaaatatggcgccaagcatgtgatcatgctctttgtccctgtgactctctgcatggtggtggtcgtggctaccattaagtcagtcagcttttatacccggaaggatgggcagctaatctataccccattcacagaagataccgagactgtgggccagagagccctgcactcaattctgaatgctgccatcatgatcagtgtcattgttgtcatgactatcctcctggtggttctgtataaatacaggtgctataaggtcatccatgcctggcttattatatcatctctattgttgctgttctttttttcattcatttacttgggggaagtgtttaaaacctataacgttgctgtggactacattactgttgcactcctgatctggaattttggtgtggtgggaatgatttccattcactggaaaggtccacttcgactccagcaggcatatctcattatgattagtgccctcatggccctggtgtttatcaagtacctccctgaatggactgcgtggctcatcttggctgtgatttcagtatatgatttagtggctgttttgtgtccgaaaggtccacttcgtatgctggttgaaacagctcaggagagaaatgaaacgctttttccagctctcatttactcctcaacaatggtgtggttggtgaatatggcagaaggagacccggaagctcaaaggagagtatccaaaaattccaagtataatgcagaaaggggagtaaaacttggattgggagatttcattttctacagtgttctggttggtaaagcctcagcaacagccagtggagactggaacacaaccatagcctgtttcgtagccatattaattggtttgtgccttacattattactccttgccattttcaagaaagcattgccagctcttccaatctccatcacctttgggcttgttttctactttgccacagattatcttgtacagccttttatggaccaattagcattccatcaattttatatctag

SEQ ID NO: 168982 - DNA, 571 bp, Homo sapiens
  Payload ID: 13265
  Gene Symbol: PSEN1
  Gene Name: presenilin 1
  ENST ID: ENST00000557356
  CDS Start-End: 167-571
aacgacgccagagccggaaatgacgacaacgacctaatctgggagcctgcaagtgacaacagcctttgcggtccttagacagcttggcctggaggagaacacatgaaagaaagaacctcaagaggctttgttttctgtgaaacagtatttctatacagttgctccaatgacagagttacctgcaccgttgtcctacttccagaatgcacagatgtctgaggacaaccacctgagcaatactaatgacaatagagaacggcaggagcacaacgacagacggagccttggccaccctgagccattatctaatggacgaccccagggtaactcccggcaggtggtggagcaagatgaggaagaagatgaggagctgacattgaaatatggcgccaagcatgtgatcatgctctttgtccctgtgactctctgcatggtggtggtcgtggctaccattaagtcagtcagcttttatacccggaaggatgggcagctaatctataccccattcacagaagataccgagactgtgggccagagagccctgcactcaattctgaatgctgccatcatg

SEQ ID NO: 168983 - DNA, 574 bp, Homo sapiens
  Payload ID: 13265
  Gene Symbol: PSEN1
  Gene Name: presenilin 1
  ENST ID: ENST00000556864
  CDS Start-End: 384-574
aaatgacgacaacggtgagggttctcgggcggggcctgggacaggcagctccggggtccgcggtttcacatcggaaacaaaacagcggctggtctggaaggaacctgagctacgagccgcggcggcagcggggcggcggggaagcgtatattcttctcaccgttgtggtcagctctgctttaggcatattaatccatagtggaggctgggatgggtgagagaattgaggtgacttttccataattcagacctaatctgggagcctgcaagtgacaacagcctttgcggtccttagacagcttggcctggaggagaacacatgaaagaaagaacctcaagaggctttgttttctgtgaaacagtatttctatacagttgctccaatgacagagttacctgcaccgttgtcctacttccagaatgcacagatgtctgaggacaaccacctgagcaatactaatgacaatagagaacggcaggagcacaacgacagacggagccttggccaccctgagccattatctaatggacgaccccagggtaactcccggcaggtggtggagcaagatgagga

SEQ ID NO: 168984 - DNA, 442 bp, Homo sapiens
  Payload ID: 13265
  Gene Symbol: PSEN1
  Gene Name: presenilin 1
  ENST ID: ENST00000556011
  CDS Start-End: 315-442
cggtgagggttctcgggcggggcctgggacaggcagctccggggtccgcggtttcacatcggaaacaaaacagcggctggtctggaaggaacctgagctacgagccgcggcggcagcggggcggcggggaagcaaaaggcatacaaatttattagcatgcagactgggagaaccacaagacctaatctgggagcctgcaagtgacaacagcctttgcggtccttagacagcttggcctggaggagaacacatgaaagaaagaacctcaagaggctttgttttctgtgaaacagtatttctatacagttgctccaatgacagagttacctgcaccgttgtcctacttccagaatgcacagatgtctgaggacaaccacctgagcaatactgtacgtagccagagacgagttctcgccatattggccaggctgatctcaaactc

SEQ ID NO: 168985 - DNA, 712 bp, Homo sapiens
  Payload ID: 13265
  Gene Symbol: PSEN1
  Gene Name: presenilin 1
  ENST ID: ENST00000553719
  CDS Start-End: 272-712
caacggtgagggttctcgggcggggcctgggacaggcagctccggggtccgcggtttcacatcggaaacaaaacagcggctggtctggaaggaacctgagctacgagccgcggcggcagcggggcggcggggaagcacctaatctgggagcctgcaagtgacaacagcctttgcggtccttagacagcttggcctggaggagaacacatgaaagaaagaacctcaagaggctttgttttctgtgaaacagtatttctatacagttgctccaatgacagagttacctgcaccgttgtcctacttccagaatgcacagatgtctgaggacaaccacctgagcaatactaatgacaatagagaacggcaggagcacaacgacagacggagccttggccaccctgagccattatctaatggacgaccccagggtaactcccggcaggtggtggagcaagatgaggaagaagatgaggagctgacattgaaatatggcgccaagcatgtgatcatgctctttgtccctgtgactctctgcatggtggtggtcgtggctaccattaagtcagtcagcttttatacccggaaggatgggcagctaatctataccccattcacagaagataccgagactgtgggccagagagccctgcactcaattctgaatgctgccatcatgatcagtgtcattgttgtcatgactatcctcctggtg

SEQ ID NO: 168986 - DNA, 576 bp, Homo sapiens
  Payload ID: 13265
  Gene Symbol: PSEN1
  Gene Name: presenilin 1
  ENST ID: ENST00000557293
  CDS Start-End: 279-576
atgacgacaacggtgagggttctcgggcggggcctgggacaggcagctccggggtccgcggtttcacatcggaaacaaaacagcggctggtctggaaggaacctgagctacgagccgcggcggcagcggggcggcggggaagcacctaatctgggagcctgcaagtgacaacagcctttgcggtccttagacagcttggcctggaggagaacacatgaaagaaagaacctcaagaggctttgttttctgtgaaacagtatttctatacagttgctccaatgacagagttacctgcaccgttgtcctacttccagaatgcacagatgtctgaggacaaccacctgagcaatactgtacgtagccagaatgacaatagagaacggcaggagcacaacgacagacggagccttggccaccctgagccattatctaatggacgaccccagggtaactcccggcaggtggtggagcaagatgaggaagaagatgaggagctgacattgaaatatggcgccaagcatgtgatcatgctctttgtccctgtgactctctgcatggtggtggtcgtggctacca

SEQ ID NO: 168987 - DNA, 591 bp, Homo sapiens
  Payload ID: 13265
  Gene Symbol: PSEN1
  Gene Name: presenilin 1
  ENST ID: ENST00000554131
  CDS Start-End: 265-591
ggtttcacatcggaaacaaaacagcggctggtctggaaggaacctgagctacgagccgcggcggcagcggggcggcggggaagcgtatgcatacaaatttattagcatgcagactgggagaaccacaagacctaatctgggagcctgcaagtgacaacagcctttgcggtccttagacagcttggcctggaggagaacacatgaaagaaagaacctcaagaggctttgttttctgtgaaacagtatttctatacagttgctccaatgacagagttacctgcaccgttgtcctacttccagaatgcacagatgtctgaggacaaccacctgagcaatactgtacgtagccagaatgacaatagagaacggcaggagcacaacgacagacggagccttggccaccctgagccattatctaatggacgaccccagggtaactcccggcaggtggtggagcaagatgaggaagaagatgaggagctgacattgaaatatggcgccaagcatgtgatcatgctctttgtccctgtgactctctgcatggtggtggtcgtggctaccattaagtcagtcagcttttatacccggaag

SEQ ID NO: 168988 - DNA, 550 bp, Homo sapiens
  Payload ID: 13265
  Gene Symbol: PSEN1
  Gene Name: presenilin 1
  ENST ID: ENST00000556533
  CDS Start-End: 274-550
aaatgacgacaacggtgagggttctcgggcggggcctgggacaggcagctccggggtccgcggtttcacatcggaaacaaaacagcggctggtctggaaggaacctgagctacgagccgcggcggcagcggggcggcggggaagcgtatacctaatctgggagcctgcaagtgacaacagcctttgcggtccttagacagcttggcctggaggagaacacatgaaagaaaggctttgttttctgtgaaacagtatttctatacagttgctccaatgacagagttacctgcaccgttgtcctacttccagaatgcacagatgtctgaggacaaccacctgagcaatactaatgacaatagagaacggcaggagcacaacgacagacggagccttggccaccctgagccattatctaatggacgaccccagggtaactcccggcaggtggtggagcaagatgaggaagaagatgaggagctgacattgaaatatggcgccaagcatgtgatcatgctctttgtccctgtgactctctgcatggtggtggtcg

SEQ ID NO: 168989 - DNA, 1254 bp, Homo sapiens
  Payload ID: 13265
  Gene Symbol: PSEN1
  Gene Name: presenilin 1
  Uniprot ID: P49768
  ENST ID: ENST00000553855
  CDS Start-End: 1-1137
atgacagagttacctgcaccgttgtcctacttccagaatgcacagatgtctgaggacaaccacctgagcaatactgtacgtagccagaatgacaatagagaacggcaggagcacaacgacagacggagccttggccaccctgagccattatctaatggacgaccccagggtaactcccggcaggtggtggagcaagatgaggaagaagatgaggagctgacattgaaatatggcgccaagcatgtgatcatgctctttgtccctgtgactctctgcatggtggtggtcgtggctaccattaagtcagtcagcttttatacccggaaggatgggcagctaatctataccccattcacagaagataccgagactgtgggccagagagccctgcactcaattctgaatgctgccatcatgatcagtgtcattgttgtcatgactatcctcctggtggttctgtataaatacaggtgctataaggtcatccatgcctggcttattatatcatctctattgttgctgttctttttttcattcatttacttgggggaagtgtttaaaacctataacgttgctgtggactacattactgttgcactcctgatctggaattttggtgtggtgggaatgatttccattcactggaaaggtccacttcgactccagcaggcatatctcattatgattagtgccctcatggccctggtgtttatcaagtacctccctgaatggactgcgtggctcatcttggctgtgatttcagtatatgatttagtggctgttttgtgtccgaaaggtccacttcgtatgctggttgaaacagctcaggagagaaatgaaacgctttttccagctctcatttactcctcaacaatggtgtggttggtgaatatggcagaaggagacccggaagctcaaaggagagtatccaaaaattccaagtataatgcagaaagagcctgtctgcctcctgctgccatcaacctgctgtctatagctcccatggcacccaggctgttcatgccaaagggtgcctgcaggcccacggcacagaaagggagtcacaagacactgttgcagagaatgatgatggcgggttcagtgaggaatgggaagcccagagggacagtcatctagggcctcatcgctctacacctgagtcacgagctgctgtccaggaactttccagcagtatcctcgctggtgaagacccagaggaaaggggagtaaaacttggattgggagatttcattt

SEQ ID NO: 168990 - DNA, 612 bp, Homo sapiens
  Payload ID: 13265
  Gene Symbol: PSEN1
  Gene Name: presenilin 1
  ENST ID: ENST00000556066
  CDS Start-End: 439-612
tgaatttggtcagcatagaaaaaggaatgttgagaacattccttaagattactcagctccctttgctggaaatcagaagtcattaagtatctttgtggttgaaaatgtttggtgtctcaggcggttctacttattgctaaagaggtctaccttgagcttatagtaaatttgtcagttagttgaaagtcgtgacaaattaatacattcctggtttacaaattggtcttataagtatttgattggtttaaatgaatttactaggatttaactaacaatggatgacctggtgaaatcctatttcagacctaatctgggagcctgcaagtgacaacagcctttgcggtccttagacagcttggcctggaggagaacacatgaaagaaagaacctcaagaggctttgttttctgtgaaacagtatttctatacagttgctccaatgacagagttacctgcaccgttgtcctacttccagaatgcacagatgtctgaggacaaccacctgagcaatactaatgacaatagagaacggcaggagcacaacgacagacggagccttggccaccctgagccattatctaatggacgaccccagggtaactcccggcaggtg

SEQ ID NO: 168991 - DNA, 591 bp, Homo sapiens
  Payload ID: 13265
  Gene Symbol: PSEN1
  Gene Name: presenilin 1
  ENST ID: ENST00000553599
  CDS Start-End: 317-591
aacggtgagggttctcgggcggggcctgggacaggcagctccggggtccgcggtttcacatcggaaacaaaacagcggctggtctggaaggaacctgagctacgagccgcggcggcagcggggcggcggggaagcgtatgatttaactaacaatggatgacctggtgaaatcctatttcagacctaatctgggagcctgcaagtgacaacagcctttgcggtccttagacagcttggcctggaggagaacacatgaaagaaagaacctcaagaggctttgttttctgtgaaacagtatttctatacagttgctccaatgacagagttacctgcaccgttgtcctacttccagaatgcacagatgtctgaggacaaccacctgagcaatactaatgacaatagagaacggcaggagcacaacgacagacggagccttggccaccctgagccattatctaatggacgaccccagggtaactcccggcaggtggtggagcaagatgaggaagaagatgaggagctgacattgaaatatggcgccaagcatgtgatcatgctctttgtccctgtgactctctgcatggtggtggt

SEQ ID NO: 168992 - DNA, 699 bp, Homo sapiens
  Payload ID: 13265
  Gene Symbol: PSEN1
  Gene Name: presenilin 1
  ENST ID: ENST00000560005
  CDS Start-End: 371-699
gagggttctcgggcggggcctgggacaggcagctccggggtccgcggtttcacatcggaaacaaaacagcggctggtctggaaggaacctgagctacgagccgcggcggcagcggggcggcggggaagcgtatgctgggcacagtggctcacacctgtaatctgccagcactttgggaggccgaggcaggtagatcacctgaggtcaggagttcgagaccagcctcgccaaaatgacctaatctgggagcctgcaagtgacaacagcctttgcggtccttagacagcttggcctggaggagaacacatgaaagaaagaacctcaagaggctttgttttctgtgaaacagtatttctatacagttgctccaatgacagagttacctgcaccgttgtcctacttccagaatgcacagatgtctgaggacaaccacctgagcaatactaatgacaatagagaacggcaggagcacaacgacagacggagccttggccaccctgagccattatctaatggacgaccccagggtaactcccggcaggtggtggagcaagatgaggaagaagatgaggagctgacattgaaatatggcgccaagcatgtgatcatgctctttgtccctgtgactctctgcatggtggtggtcgtggctaccattaagtcagtcagcttttatacccggaaggatgggcagctgta

SEQ ID NO: 168993 - DNA, 795 bp, Homo sapiens
  Payload ID: 13265
  Gene Symbol: PSEN1
  Gene Name: presenilin 1
  ENST ID: ENST00000559361
  CDS Start-End: 198-371
agcggctggtctggaaggaacctgagctacgagccgcggcggcagcggggcggcggggaagcacctaatctgggagcctgcaagtgacaacagcctttgcggtccttagacagcttggcctggaggagaacacatgaaagaaagaacctcaagaggctttgttttctgtgaaacagtatttctatacagttgctccaatgacagagttacctgcaccgttgtcctacttccagaatgcacagatgtctgaggacaaccacctgagcaatactagacgagttctcgccatattggccaggctgatctcaaactcctgggctcaagtaatcctcccactttggcctcccaaaatacagagattatgggtgtgagccatcatgcccagctggctagatatttcataatgacaatagagaacggcaggagcacaacgacagacggagccttggccaccctgagccattatctaatggacgaccccagggtaactcccggcaggtggtggagcaagatgaggaagaagatgaggagctgacattgaaatatggcgccaagcatgtgatcatgctctttgtccctgtgactctctgcatggtggtggtcgtggctaccattaagtcagtcagcttttatacccggaaggatgggcagctaatctataccccattcacagaagataccgagactgtgggccagagagccctgcactcaattctgaatgctgccatcatgatcagtgtcattgttgtcatgactatcctcctggtggttctgtataaatacaggtgctataag

SEQ ID NO: 168994 - DNA, 2465 bp, Homo sapiens
  Payload ID: 13266
  Gene Symbol: PSEN2
  Gene Name: presenilin 2
  ENST ID: ENST00000366782
  CDS Start-End: 501-1946
ccagcagtgaggagacagccagaagcaagcttttggagctgaaggaacctgagacagaagctagtcccccctctgaattttactgatgaagaaactgaggccacagagctaaagtgacttttcccaaggtcgcccagcgaggacgtgggacttctcagacgtcaggagagtgatgtgagggagctgtgtgaccatagaaagtgacgtgttaaaaaccagcgctgccctctttgaaagccagggagcatcattcatttagcctgctgagaagaagaaaccaagtgtccgggattcagacctctctgcggccccaagtgttcgtgggtgtgaagctcagccctgagggtctctggacagcgatcactcagcctctggacagcgatcactcagcctctggacagacagcgatcactcagcctctggacagcgatcactcagcctctggacagcgatcactcagcctctggacagcgataactcagcctctgtccccgtctgagatgttggcagggactgtcagatttgccaggcattgtttgaagttcttcccagcccagaaacctgcatgtgtagattttggtgcttccagaggcagggctatgctcacattcatggcctctgacagcgaggaagaagtgtgtgatgagcggacgtccctaatgtcggctgagagccccacgccgcgctcctgccaggagggcaggcagggcccagaggatggagagaacactgcccagtggagaagccaggagaacgaggaggacggtgaggaggaccctgaccgctatgtctgtagtggggttcccgggcggccgccaggcctggaggaagagctgaccctcaaatacggagcgaagcacgtgatcatgctgtttgtgcctgtcactctgtgcatgatcgtggtggtagccaccatcaagtctgtgcgcttctacacagagaagaatggacagctcatctacacgccattcactgaggacacaccctcggtgggccagcgcctcctcaactccgtgctgaacaccctcatcatgatcagcgtcatcgtggttatgaccatcttcttggtggtgctctacaagtaccgctgctacaagttcatccatggctggttgatcatgtcttcactgatgctgctgttcctcttcacctatatctaccttggggaagtgctcaagacctacaatgtggccatggactaccccaccctcttgctgactgtctggaacttcggggcagtgggcatggtgtgcatccactggaagggccctctggtgctgcagcaggcctacctcatcatgatcagtgcgctcatggccctagtgttcatcaagtacctcccagagtggtccgcgtgggtcatcctgggcgccatctctgtgtatgatctcgtggctgtgctgtgtcccaaagggcctctgagaatgctggtagaaactgcccaggagagaaatgagcccatattccctgccctgatatactcatctgccatggtgtggacggttggcatggcgaagctggacccctcctctcagggtgccctccagctcccctacgacccggagatggaagaagactcctatgacagttttggggagccttcataccccgaagtctttgagcctcccttgactggctacccaggggaggagctggaggaagaggaggaaaggggcgtgaagcttggcctcggggacttcatcttctacagtgtgctggtgggcaaggcggctgccacgggcagcggggactggaataccacgctggcctgcttcgtggccatcctcattggcttgtgtctgaccctcctgctgcttgctgtgttcaagaaggcgctgcccgccctccccatctccatcacgttcgggctcatcttttacttctccacggacaacctggtgcggccgttcatggacaccctggcctcccatcagctctacatctgagggacatggtgtgccacaggctgcaagctgcagggaattttcattggatgcagttgtatagttttacactctagtgccatatatttttaagacttttctttccttaaaaaataaagtacgtgtttacttggtgaggaggaggcagaaccagctctttggtgccagctgtttcatcaccagactttggctcccgctttggggagcgcctcgcttcacggacaggaagcacagcaggtttatccagatgaactgagaaggtcagattagggcggggagaagagcatccggcatgagggctgagatgcgcaaagagtgtgctcgggagtggcccctggcacctgggtgctctggctggagaggaaaagccagttccctacgaggagtgttcccaatgctttgtccatgatgtccttgttattttattgcctttagaaactgagtcctgttcttgttacggcagtcacactgctgggaagtggcttaatagtaatatcaataaatagatgagtcctgttagaa

SEQ ID NO: 168995 - DNA, 2306 bp, Homo sapiens
  Payload ID: 13266
  Gene Symbol: PSEN2
  Gene Name: presenilin 2
  Uniprot ID: P49810
  ENST ID: ENST00000366783
  CDS Start-End: 437-1783
gcgtggggcggggcctgggccggcgccgggtccggccgggcgctcagccagctgcgtaaactccgctggagcgcggcggcagagcaggcatttccagcagtgaggagacagccagaagcaagcttttggagctgaaggaacctgagacagaagctagtcccccctctgaattttactgatgaagaaactgaggccacagagctaaagtgacttttcccaaggtcgcccagcgaggacgtgggacttctcagacgtcaggagagtgatgtgagggagctgtgtgaccatagaaagtgacgtgttaaaaaccagcgctgccctctttgaaagccagggagcatcattcatttagcctgctgagaagaagaaaccaagtgtccgggattcagacctctctgcggccccaagtgttcgtggtgcttccagaggcagggctatgctcacattcatggcctctgacagcgaggaagaagtgtgtgatgagcggacgtccctaatgtcggctgagagccccacgccgcgctcctgccaggagggcaggcagggcccagaggatggagagaacactgcccagtggagaagccaggagaacgaggaggacggtgaggaggaccctgaccgctatgtctgtagtggggttcccgggcggccgccaggcctggaggaagagctgaccctcaaatacggagcgaagcacgtgatcatgctgtttgtgcctgtcactctgtgcatgatcgtggtggtagccaccatcaagtctgtgcgcttctacacagagaagaatggacagctcatctacacgccattcactgaggacacaccctcggtgggccagcgcctcctcaactccgtgctgaacaccctcatcatgatcagcgtcatcgtggttatgaccatcttcttggtggtgctctacaagtaccgctgctacaagttcatccatggctggttgatcatgtcttcactgatgctgctgttcctcttcacctatatctaccttggggaagtgctcaagacctacaatgtggccatggactaccccaccctcttgctgactgtctggaacttcggggcagtgggcatggtgtgcatccactggaagggccctctggtgctgcagcaggcctacctcatcatgatcagtgcgctcatggccctagtgttcatcaagtacctcccagagtggtccgcgtgggtcatcctgggcgccatctctgtgtatgatctcgtggctgtgctgtgtcccaaagggcctctgagaatgctggtagaaactgcccaggagagaaatgagcccatattccctgccctgatatactcatctgccatggtgtggacggttggcatggcgaagctggacccctcctctcagggtgccctccagctcccctacgacccggagatggaagaagactcctatgacagttttggggagccttcataccccgaagtctttgagcctcccttgactggctacccaggggaggagctggaggaagaggaggaaaggggcgtgaagcttggcctcggggacttcatcttctacagtgtgctggtgggcaaggcggctgccacgggcagcggggactggaataccacgctggcctgcttcgtggccatcctcattggcttgtgtctgaccctcctgctgcttgctgtgttcaagaaggcgctgcccgccctccccatctccatcacgttcgggctcatcttttacttctccacggacaacctggtgcggccgttcatggacaccctggcctcccatcagctctacatctgagggacatggtgtgccacaggctgcaagctgcagggaattttcattggatgcagttgtatagttttacactctagtgccatatatttttaagacttttctttccttaaaaaataaagtacgtgtttacttggtgaggaggaggcagaaccagctctttggtgccagctgtttcatcaccagactttggctcccgctttggggagcgcctcgcttcacggacaggaagcacagcaggtttatccagatgaactgagaaggtcagattagggcggggagaagagcatccggcatgagggctgagatgcgcaaagagtgtgctcgggagtggcccctggcacctgggtgctctggctggagaggaaaagccagttccctacgaggagtgttcccaatgctttgtccatgatgtccttgttattttattgcctttagaaactgagtcctgttcttgttacggcagtcacactgctgggaagtggcttaatagtaatatcaataaatagatgagtcctgttagaatctt

SEQ ID NO: 168996 - DNA, 1947 bp, Homo sapiens
  Payload ID: 13266
  Gene Symbol: PSEN2
  Gene Name: presenilin 2
  Uniprot ID: P49810
  ENST ID: ENST00000422240
  CDS Start-End: 380-1723
aaactccgctggagcgcggcggcagagcaggcatttccagcagtgaggagacagccagaagcaagcttttggagctgaaggaacctgagacagaagctagtcccccctctgaattttactgatgaagaaactgaggccacagagctaaagtgacttttcccaaggtcgcccagcgaggacgtgggacttctcagacgtcaggagagtgatgtgagggagctgtgtgaccatagaaagtgacgtgttaaaaaccagcgctgccctctttgaaagccagggagcatcattcatttagcctgctgagaagaagaaaccaagtgtccgggattcagacctctctgcggccccaagtgttcgtggtgcttccagaggcagggctatgctcacattcatggcctctgacagcgaggaagaagtgtgtgatgagcggacgtccctaatgtcggctgagagccccacgccgcgctcctgccaggagggcaggcagggcccagaggatggagagaacactgcccagtggagaagccaggagaacgaggaggacggtgaggaggaccctgaccgctatgtctgtagtggggttcccgggcggccgccaggcctggaggaagagctgaccctcaaatacggagcgaagcacgtgatcatgctgtttgtgcctgtcactctgtgcatgatcgtggtggtagccaccatcaagtctgtgcgcttctacacagagaagaatggacagctcatctacacgccattcactgaggacacaccctcggtgggccagcgcctcctcaactccgtgctgaacaccctcatcatgatcagcgtcatcgtggttatgaccatcttcttggtggtgctctacaagtaccgctgctacaagttcatccatggctggttgatcatgtcttcactgatgctgctgttcctcttcacctatatctaccttggggaagtgctcaagacctacaatgtggccatggactaccccaccctcttgctgactgtctggaacttcggggcagtgggcatggtgtgcatccactggaagggccctctggtgctgcagcaggcctacctcatcatgatcagtgcgctcatggccctagtgttcatcaagtacctcccagagtggtccgcgtgggtcatcctgggcgccatctctgtgtatgatctcgtggctgtgctgtgtcccaaagggcctctgagaatgctggtagaaactgcccaggagagaaatgagcccatattccctgccctgatatactcatctgccatggtgtggacggttggcatggcgaagctggacccctcctctcagggtgccctccagctcccctacgacccggagatggaagactcctatgacagttttggggagccttcataccccgaagtctttgagcctcccttgactggctacccaggggaggagctggaggaagaggaggaaaggggcgtgaagcttggcctcggggacttcatcttctacagtgtgctggtgggcaaggcggctgccacgggcagcggggactggaataccacgctggcctgcttcgtggccatcctcattggcttgtgtctgaccctcctgctgcttgctgtgttcaagaaggcgctgcccgccctccccatctccatcacgttcgggctcatcttttacttctccacggacaacctggtgcggccgttcatggacaccctggcctcccatcagctctacatctgagggacatggtgtgccacaggctgcaagctgcagggaattttcattggatgcagttgtatagttttacactctagtgccatatatttttaagacttttctttccttaaaaaataaagtacgtgtttacttggtgaggaggaggcagaaccagctctttggtgccagctgtttcatcaccagactttggctcccgctttggggagcgcctcgcttcacggacagga

SEQ ID NO: 168997 - DNA, 1163 bp, Homo sapiens
  Payload ID: 13266
  Gene Symbol: PSEN2
  Gene Name: presenilin 2
  ENST ID: ENST00000472139
  CDS Start-End: 137-1051
aaggaataaggccaggtgtggtgtctcatgcctgtaatcccagcactttgggagactgagcatctacacgccattcactgaggacacaccctcggtgggccagcgcctcctcaactccgtgctgaacaccctcatcatgatcagcgtcatcgtggttatgaccatcttcttggtggtgctctacaagtaccgctgctacaagttcatccatggctggttgatcatgtcttcactgatgctgctgttcctcttcacctatatctaccttggggaagtgctcaagacctacaatgtggccatggactaccccaccctcttgctgactgtctggaacttcggggcagtgggcatggtgtgcatccactggaagggccctctggtgctgcagcaggcctacctcatcatgatcagtgcgctcatggccctagtgttcatcaagtacctcccagagtggtccgcgtgggtcatcctgggcgccatctctgtgtatgatctcgtggctgtgctgtgtcccaaagggcctctgagaatgctggtagaaactgcccaggagagaaatgagcccatattccctgccctgatatactcatctgccatggtgtggacggttggcatggcgaagctggacccctcctctcagggtgccctccagctcccctacgacccggagatggaagaagactcctatgacagttttggggagccttcataccccgaagtctttgagcctcccttgactggctacccaggggaggagctggaggaagaggaggaaaggggcgtgaagcttggcctcggggacttcatcttctacagtgtgctggtgggcaaggcggctgccacgggcagcggggactggaataccacgctggcctgcttcgtggccatcctcattggcttgtgtctgaccctcctgctgcttgctgtgttcaagaaggcgctgcccgccctccccatctccatcacgttcgggctcatcttttacttctccacggacaacctggtgcggccgttcatggacaccctggcctcccatcagctctacatctgagggacatggtgtgccacaggctgcaagctgcagggaattttcattggatgcagttgtatagttttacactctagtgccatatatttttaagacttttctttccttaaaaaat

SEQ ID NO: 168998 - DNA, 782 bp, Homo sapiens
  Payload ID: 13266
  Gene Symbol: PSEN2
  Gene Name: presenilin 2
  ENST ID: ENST00000460775
  CDS Start-End: 349-782
atttccagcagtgaggagacagccagaagcaagcttttggagctgaaggaacctgagacagaagctagtcccccctctgaattttactgatgaagaaactgaggccacagagctaaagtgacttttcccaaggtcgcccagcgaggacgtgggacttctcagacgtcaggagagtgatgtgagggagctgtgtgaccatagaaagtgacgtgttaaaaaccagcgctgccctctttgaaagccagggagcatcattcatttagcctgctgagaagaagaaaccaagtgtccgggattcagacctctctgcggccccaagtgttcgtgttcatccatggctggttgatcatgtcttcactgatgctgctgttcctcttcacctatatctaccttggggaagtgctcaagacctacaatgtggccatggactaccccaccctcttgctgactgtctggaacttcggggcagtgggcatggtgtgcatccactggaagggccctctggtgctgcagcaggcctacctcatcatgatcagtgcgctcatggccctagtgttcatcaagtacctcccagagtggtccgcgtgggtcatcctgggcgccatctctgtgtatgatctcgtggctgtgctgtgtcccaaagggcctctgagaatgctggtagaaactgcccaggagagaaatgagcccatattccctgccctgatatactcatctgccatggtgtggacggttggcatggcgaagctggacccctcctctcagggtgccctccagctccc

SEQ ID NO: 168999 - DNA, 734 bp, Homo sapiens
  Payload ID: 13266
  Gene Symbol: PSEN2
  Gene Name: presenilin 2
  ENST ID: ENST00000524196
  CDS Start-End: 672-734
aattttatgcagagctcctggtggctctgaagcgccctagggaacagaccaggaacattctcatggtgttagctcacattgggccattagtgctcctttaatgtgagaacaaccgggaggaggaggggatgtggacccaaaactacaagaaagagtgtcctcgaagcctatgtcctaccgccccacgctgctgccaggcccgcaggaagatgacaggcccggcctccactccttctaaggtcgtcgcttagttccgacgtcgggatgaccctgtcatccacgcggcgtgaaggccaccctccccgcgcgcccgggactccaggcatttccagcagtgaggagacagccagaagcaagcttttggagctgaaggaacctgagacagaagctagtcccccctctgaattttactgatgaagaaactgaggccacagagctaaagtgacttttcccaaggtcgcccagcgaggacgtgggacttctcagacgtcaggagagtgatgtgagggagctgtgtgaccatagaaagtgacgtgttaaaaaccagcgctgccctctttgaaagccagggagcatcattcatttagcctgctgagaagaagaaaccaagtgtccgggattcagacctctctgcggccccaagtgttcgtggtgcttccagaggcagggctatgctcacattcatggcctctgacagcgaggaagaagtgtgtgatgagcggacgtccctaatg

SEQ ID NO: 169000 - DNA, 627 bp, Homo sapiens
  Payload ID: 13266
  Gene Symbol: PSEN2
  Gene Name: presenilin 2
  ENST ID: ENST00000495488
  CDS Start-End: 241-627
gcgtaaactccgctggagcgcggcggcagagcagcgaggacgtgggacttctcagacgtcaggagagtgatgtgagggagctgtgtgaccatagaaagtgacgtgttaaaaaccagcgctgccctctttgaaagccagggagcatcattcatttagcctgctgagaagaagaaaccaagtgtccgggattcagacctctctgcggccccaagtgttcgtggtgcttccagaggcagggctatgctcacattcatggcctctgacagcgaggaagaagtgtgtgatgagcggacgtccctaatgtcggctgagagccccacgccgcgctcctgccaggagggcaggcagggcccagaggatggagagaacactgcccagtggagaagccaggagaacgaggaggacggtgaggaggaccctgaccgctatgtctgtagtggggttcccgggcggccgccaggcctggaggaagagctgaccctcaaatacggagcgaagcacgtgatcatgctgtttgtgcctgtcactctgtgcatgatcgtggtggtagccaccatcaagtctgtgcgcttctacacagagaagaatggacagctcatctacacgccattcactgaggacacaccc

SEQ ID NO: 169001 - DNA, 1972 bp, Homo sapiens
  Payload ID: 13266
  Gene Symbol: PSEN2
  Gene Name: presenilin 2
  ENST ID: ENST00000626989
  CDS Start-End: 1-1446
atgttggcagggactgtcagatttgccaggcattgtttgaagttcttcccagcccagaaacctgcatgtgtagattttggtgcttccagaggcagggctatgctcacattcatggcctctgacagcgaggaagaagtgtgtgatgagcggacgtccctaatgtcggctgagagccccacgccgcgctcctgccaggagggcaggcagggcccagaggatggagagaacactgcccagtggagaagccaggagaacgaggaggacggtgaggaggaccctgaccgctatgtctgtagtggggttcccgggcggccgccaggcctggaggaagagctgaccctcaaatacggagcgaagcacgtgatcatgctgtttgtgcctgtcactctgtgcatgatcgtggtggtagccaccatcaagtctgtgcgcttctacacagagaagaatggacagctcatctacacgccattcactgaggacacaccctcggtgggccagcgcctcctcaactccgtgctgaacaccctcatcatgatcagcgtcatcgtggttatgaccatcttcttggtggtgctctacaagtaccgctgctacaagttcatccatggctggttgatcatgtcttcactgatgctgctgttcctcttcacctatatctaccttggggaagtgctcaagacctacaatgtggccatggactaccccaccctcttgctgactgtctggaacttcggggcagtgggcatggtgtgcatccactggaagggccctctggtgctgcagcaggcctacctcatcatgatcagtgcgctcatggccctagtgttcatcaagtacctcccagagtggtccgcgtgggtcatcctgggcgccatctctgtgtatgatctcgtggctgtgctgtgtcccaaagggcctctgagaatgctggtagaaactgcccaggagagaaatgagcccatattccctgccctgatatactcatctgccatggtgtggacggttggcatggcgaagctggacccctcctctcagggtgccctccagctcccctacgacccggagatggaagaagactcctatgacagttttggggagccttcataccccgaagtctttgagcctcccttgactggctacccaggggaggagctggaggaagaggaggaaaggggcgtgaagcttggcctcggggacttcatcttctacagtgtgctggtgggcaaggcggctgccacgggcagcggggactggaataccacgctggcctgcttcgtggccatcctcattggcttgtgtctgaccctcctgctgcttgctgtgttcaagaaggcgctgcccgccctccccatctccatcacgttcgggctcatcttttacttctccacggacaacctggtgcggccgttcatggacaccctggcctcccatcagctctacatctgagggacatggtgtgccacaggctgcaagctgcagggaattttcattggatgcagttgtatagttttacactctagtgccatatatttttaagacttttctttccttaaaaaataaagtacgtgtttacttggtgaggaggaggcagaaccagctctttggtgccagctgtttcatcaccagactttggctcccgctttggggagcgcctcgcttcacggacaggaagcacagcaggtttatccagatgaactgagaaggtcagattagggcggggagaagagcatccggcatgagggctgagatgcgcaaagagtgtgctcgggagtggcccctggcacctgggtgctctggctggagaggaaaagccagttccctacgaggagtgttcccaatgctttgtccatgatgtccttgttattttattgcctttagaaactgagtcctgttcttgttacggcagtcacactgctgggaagtggcttaatagtaatatcaataaatagatgagtcctgttagaatcttgga

SEQ ID NO: 169002 - DNA, 1240 bp, Homo sapiens
  Payload ID: 13267
  Gene Symbol: PARL
  Gene Name: presenilin associated, rhomboid-like
  Uniprot ID: Q9H300
  ENST ID: ENST00000311101
  CDS Start-End: 43-1032
gggttggtaaggtcgggccatggtggggcagaggttgggaagatggcgtggcgaggctgggcgcagagaggctggggctgcggccaggcgtggggtgcgtcggtgggcggccgcagctgcgaggagctcactgcggtcctaaccccgccgcagctcctcggacgcaggtttaacttctttattcaacaaaaatgcggattcagaaaagcacccaggaaggttgaacctcgaagatcagacccagggacaagtggtgaagcatacaagagaagtgctttgattcctcctgtggaagaaacagtcttttatccttctccctatcctataaggagtctcataaaacctttattttttactgttgggtttacaggctgtgcatttggatcagctgctatttggcaatatgaatcactgaaatccagggtccagagttattttgatggtataaaagctgattggttggatagcataagaccacaaaaagaaggagacttcagaaaggagattaacaagtggtggaataacctaagtgatggccagcggactgtgacaggtattatagctgcaaatgtccttgtattctgtttatggagagtaccttctctgcagcggacaatgatcagatatttcacatcgaatccagcctcaagtgttatttccaattttgtcagttacgtgggtaaagttgccacaggaagatatggaccatcacttggtgcatctggtgccatcatgacagtcctcgcagctgtctgcactaagatcccagaagggaggcttgccattattttccttccgatgttcacgttcacagcagggaatgccctgaaagccattatcgccatggatacagcaggaatgatcctgggatggaaattttttgatcatgcggcacatcttgggggagctctttttggaatatggtatgttacttacggtcatgaactgatttggaagaacagggagccgctagtgaaaatctggcatgaaataaggactaatggccccaaaaaaggaggtggctctaagtaaaactgggattggacagtagtggtgcatctggtccttgccgcctgagagccccaggagacatcggctagagtgaccatggctatgctcccgtctggaagatgccagcatctggcctcccactgttttcagctgtgtcccccagtccgtgtctttttagaatgtgaatgatgataaagttgtgaaataaaggtttctatctagtttgtaa

SEQ ID NO: 169003 - DNA, 1414 bp, Homo sapiens
  Payload ID: 13267
  Gene Symbol: PARL
  Gene Name: presenilin associated, rhomboid-like
  Uniprot ID: Q9H300
  ENST ID: ENST00000317096
  CDS Start-End: 62-1201
ggaagtagttgcgcagctggggttggtaaggtcgggccatggtggggcagaggttgggaagatggcgtggcgaggctgggcgcagagaggctggggctgcggccaggcgtggggtgcgtcggtgggcggccgcagctgcgaggagctcactgcggtcctaaccccgccgcagctcctcggacgcaggtttaacttctttattcaacaaaaatgcggattcagaaaagcacccaggaaggttgaacctcgaagatcagacccagggacaagtggtgaagcatacaagagaagtgctttgattcctcctgtggaagaaacagtcttttatccttctccctatcctataaggagtctcataaaacctttattttttactgttgggtttacaggctgtgcatttggatcagctgctatttggcaatatgaatcactgaaatccagggtccagagttattttgatggtataaaagctgattggttggatagcataagaccacaaaaagaaggagacttcagaaaggagattaacaagtggtggaataacctaagtgatggccagcggactgtgacaggtattatagctgcaaatgtccttgtattctgtttatggagagtaccttctctgcagcggacaatgatcagatatttcacatcgaatccagcctcaaaggtcctttgttctccaatgttgctgtcaacattcagtcatttctccttatttcacatggcagcaaatatgtatgttttgtggagcttctcttccagcatagtgaacattctgggtcaagagcagttcatggcagtgtacctatctgcaggtgttatttccaattttgtcagttacgtgggtaaagttgccacaggaagatatggaccatcacttggtgcatctggtgccatcatgacagtcctcgcagctgtctgcactaagatcccagaagggaggcttgccattattttccttccgatgttcacgttcacagcagggaatgccctgaaagccattatcgccatggatacagcaggaatgatcctgggatggaaattttttgatcatgcggcacatcttgggggagctctttttggaatatggtatgttacttacggtcatgaactgatttggaagaacagggagccgctagtgaaaatctggcatgaaataaggactaatggccccaaaaaaggaggtggctctaagtaaaactgggattggacagtagtggtgcatctggtccttgccgcctgagagccccaggagacatcggctagagtgaccatggctatgctcccgtctggaagatgccagcatctggcctcccactgttttcagctgtgtcccccagtccgtgtctttttagaatgtgaatgatgataaagttgtgaaataaaggtttctatctagtttgtaagcaga

SEQ ID NO: 169004 - DNA, 546 bp, Homo sapiens
  Payload ID: 13267
  Gene Symbol: PARL
  Gene Name: presenilin associated, rhomboid-like
  ENST ID: ENST00000418450
  CDS Start-End: 1-338
ccagcatagtgaacattctgggtcaagagcagttcatggcagtgtacctatctgcaggtgttatttccaattttgtcagttacgtgggtaaagttgccacaggaagatatggaccatcacttggtgcagccctgaaagccattatcgccatggatacagcaggaatgatcctgggatggaaattttttgatcatgcggcacatcttgggggagctctttttggaatatggtatgttacttacggtcatgaactgatttggaagaacagggagccgctagtgaaaatctggcatgaaataaggactaatggccccaaaaaaggaggtggctctaagtaaaactgggattggacagtagtggtgcatctggtccttgccgcctgagagccccaggagacatcggctagagtgaccatggctatgctcccgtctggaagatgccagcatctggcctcccactgttttcagctgtgtcccccagtccgtgtctttttagaatgtgaatgatgataaagttgtgaaataaaggtttctatctagtttgtaa

SEQ ID NO: 169005 - DNA, 476 bp, Homo sapiens
  Payload ID: 13267
  Gene Symbol: PARL
  Gene Name: presenilin associated, rhomboid-like
  ENST ID: ENST00000449306
  CDS Start-End: 1-476
acgcaggtttaacttctttattcaacaaaaatgcggattcagaaaagcacccaggaaggttgaacctcgaagatcagacccagggacaagtggtgaagcatacaagagaagtgctttgattcctcctgtggaagaaacagtcttttatccttctccctatcctataaggagtctcataaaacctttattttttactgttgggattaacaagtggtggaataacctaagtgatggccagcggactgtgacaggtattatagctgcaaatgtccttgtattctgtttatggagagtaccttctctgcagcggacaatgatcagatatttcacatcgaatccagcctcaagtgttatttccaattttgtcagttacgtgggtaaagttgccacaggaagatatggaccatcacttggtgcatctggtgccatcatgacagtcctcgcagctgtctgcactaagatcccagaagggaggc

SEQ ID NO: 169006 - DNA, 722 bp, Homo sapiens
  Payload ID: 13267
  Gene Symbol: PARL
  Gene Name: presenilin associated, rhomboid-like
  ENST ID: ENST00000417784
  CDS Start-End: 1-514
gcagcggacaatgatcagatatttcacatcgaatccagcctcaacaaatatgtatgttttgtggagcttctcttccagcatagtgaacattctgggtcaagagcagttcatggcagtgtacctatctgcaggtgttatttccaattttgtcagttacgtgggtaaagttgccacaggaagatatggaccatcacttggtgcatctggtgccatcatgacagtcctcgcagctgtctgcactaagatcccagaagggaggcttgccattattttccttccgatgttcacgttcacagcagggaatgccctgaaagccattatcgccatggatacagcaggaatgatcctgggatggaaattttttgatcatgcggcacatcttgggggagctctttttggaatatggtatgttacttacggtcatgaactgatttggaagaacagggagccgctagtgaaaatctggcatgaaataaggactaatggccccaaaaaaggaggtggctctaagtaaaactgggattggacagtagtggtgcatctggtccttgccgcctgagagccccaggagacatcggctagagtgaccatggctatgctcccgtctggaagatgccagcatctggcctcccactgttttcagctgtgtcccccagtccgtgtctttttagaatgtgaatgatgataaagttgtgaaataaaggtttctatctagtttgtaa

SEQ ID NO: 169007 - DNA, 1098 bp, Homo sapiens
  Payload ID: 13267
  Gene Symbol: PARL
  Gene Name: presenilin associated, rhomboid-like
  ENST ID: ENST00000435888
  CDS Start-End: 10-897
gttgggaagatggcgtggcgaggctgggcgcagagaggctggggctgcggccaggcgtggggtgcgtcggtgggcggccgcagctgcgaggagctcactgcggtcctaaccccgccgcagctcctcggacgcaggtttaacttctttattcaacaaaaatgcggattcagaaaagcacccaggaaggttgaacctcgaagatcagacccagggacaagtggtgaagcatacaagagaagtgctttgattcctcctgtggaagaaacagtcttttatccttctccctatcctataaggagtctcataaaacctttattttttactgttgggtttacaggctgtgcatttggatcagctgctatttggcaatatgaatcactgaaatccagggtccagagttattttgatggtataaaagctgattggttggatagcataagaccacaaaaagaaggagacttcagaaaggagattaacaagtggtggaataacctaagtgatggccagcggactgtgacaggtattatagctgcaaatgtccttgtattctgtttatggagagtaccttctctgcagcggacaatgatcagatatttcacatcgaatccagcctcaagtgttatttccaattttgtcagttacgtgggtaaagttgccacaggaagatatggaccatcacttggtgcagccctgaaagccattatcgccatggatacagcaggaatgatcctgggatggaaattttttgatcatgcggcacatcttgggggagctctttttggaatatggtatgttacttacggtcatgaactgatttggaagaacagggagccgctagtgaaaatctggcatgaaataaggactaatggccccaaaaaaggaggtggctctaagtaaaactgggattggacagtagtggtgcatctggtccttgccgcctgagagccccaggagacatcggctagagtgaccatggctatgctcccgtctggaagatgccagcatctggcctcccactgttttcagctgtgtcccccagtccgtgtctttttagaatgtgaatgatgataaagttgtgaaataaaggtttctatctag

SEQ ID NO: 169008 - DNA, 488 bp, Homo sapiens
  Payload ID: 13267
  Gene Symbol: PARL
  Gene Name: presenilin associated, rhomboid-like
  ENST ID: ENST00000450375
  CDS Start-End: 1-192
cacatggcagcaaatatgtatgttttgtggagcttctcttccagcatagtgaacattctgggtcaagagcagttcatggcagtgtacctatctgcaggtgttatttccaattttgtcagttacgtgggtaaagttgccacaggaagatatggaccatcacttggtgcaatggtatgttacttacggtcatgaactgatttggaagaacagggagccgctagtgaaaatctggcatgaaataaggactaatggccccaaaaaaggaggtggctctaagtaaaactgggattggacagtagtggtgcatctggtccttgccgcctgagagccccaggagacatcggctagagtgaccatggctatgctcccgtctggaagatgccagcatctggcctcccactgttttcagctgtgtcccccagtccgtgtctttttagaatgtgaatgatgataaagttgtgaaataaaggtttctatctagtttgtaa

SEQ ID NO: 169009 - DNA, 1347 bp, Homo sapiens
  Payload ID: 13267
  Gene Symbol: PARL
  Gene Name: presenilin associated, rhomboid-like
  ENST ID: ENST00000421484
  CDS Start-End: 63-584
cggaagtagttgcgcagctggggttggtaaggtcgggccatggtggggcagaggttgggaagatggcgtggcgaggctgggcgcagagaggctggggctgcggccaggcgtggggtgcgtcggtgggcggccgcagctgcgaggagctcactgcggtcctaaccccgccgcagctcctcggacgcaggtttaacttctttattcaacaaaaatgcggattcagaaaagcacccaggaaggttgaacctcgaagatcagacccagggacaagtggtgaagcatacaagagaagtgctttgattcctcctgtggaagaaacagtcttttatccttctccctatcctataaggagtctcataaaacctttattttttactgttgggtttacaggctgtgcatttggatcagctgctatttggcaatatgaatcactgaaatccagggtccagagttattttgatggtataaaagctgattggttggatagcataagaccacaaaaagaaggagacttcagaaaggagattaacaagtggtggaataacctaagtgatggccagcggactgtgacaggtttgtgttagcttacacgttttaaccattcaagggaagagaaatcaaaccaaaaggtattatagctgcaaatgtccttgtattctgtttatggagagtaccttctctgcagcggacaatgatcagatatttcacatcgaatccagcctcaaaggtcctttgttctccaatgttgctgtcaacattcagtcatttctccttatttcacatggcagcaaatatgtatgttttgtggagcttctcttccagcatagtgaacattctgggtcaagagcagttcatggcagtgtacctatctgcaggtgttatttccaattttgtcagttacgtgggtaaagttgccacaggaagatatggaccatcacttggtgcatctggtgccatcatgacagtcctcgcagctgtctgcactaagatcccagaagggaggcttgccattattttccttccgatgttcacgttcacagcagggaatgccctgaaagccattatcgccatggatacagcaggaatgatcctgggatggaaattttttgatcatgcggcacatcttgggggagctctttttggaatatggtatgttacttacggtcatgaactgatttggaagaacagggagccgctagtgaaaatctggcatgaaataaggactaatggccccaaaaaaggaggtggctctaagtaaaactgggattggacagtagtggtgcatctggtccttgccgcctgagagccccaggagacatcggctagagtgaccatggctatgctccc

SEQ ID NO: 169010 - DNA, 603 bp, Homo sapiens
  Payload ID: 13268
  Gene Symbol: PSENEN
  Gene Name: presenilin enhancer gamma secretase subunit
  Uniprot ID: Q9NZ42
  ENST ID: ENST00000222266
  CDS Start-End: 141-446
agggaaacctggggcgtctcgcgcaaacgtccataactgaaagtagctaaggcaccccagccggaggaagtgagctctcctgggtcaaggcttgggtcttgccccgcagacccttgggacgacccggccccagcgcagctatgaacctggagcgagtgtccaatgaggagaaattgaacctgtgccggaagtactacctgggggggtttgctttcctgccttttctctggttggtcaacatcttctggttcttccgagaggccttccttgtcccagcctacacagaacagagccaaatcaaaggctatgtctggcgctcagctgtgggcttcctcttctgggtgatagtgctcacctcctggatcaccatcttccagatctaccggccccgctggggtgcccttggggactacctctccttcaccatacccctgggcaccccctgacaacttctgcacatactggggccctgcttattctcccaggacaggctccttaaagcagaggagcctgtcctgggagccccttctcaaactcctaagacttgttttcatgtcccacgttctctgctgacatcccccaataaaggaccctaactttcga

SEQ ID NO: 169011 - DNA, 1661 bp, Homo sapiens
  Payload ID: 13268
  Gene Symbol: PSENEN
  Gene Name: presenilin enhancer gamma secretase subunit
  Uniprot ID: Q9NZ42
  ENST ID: ENST00000587708
  CDS Start-End: 684-989
ccgggtctcacctggctgaatgtcggcttgttgtgaagccgggagcaccggtccccgtgccggcagaccccgatcttaaagtaaaaagagcagttaaccctggaaaaggtgcaaagacaaaggtgaaccgagggccggggaagctgggcaccccagaaacaccgccccaccacccaggaccccagtaccccggccccgaccccccgagagtccactcccagcgcccgttctcacttgtccttctcagtcccgaatatcgaagctaaatattcagccatttttacccaagccctccaggtctggctgctcttacgtcacttccgttgcttaggagcactgggaagtgtagttcgttgccctctccaggcgcttaccaagcgctcggaaacgccccagggcgcttgcgcgtgggaggcgcgcgccctccccatagactccccggtaggagttcttttaacagcgcatgcgtgcagtgttgcctcgcccaaagaagactacaatctccagggaaacctggggcgtctcgcgcaaacgtccataactgaaagtagctaaggcaccccagccggaggaagtgagctctcctggggcgtggttgttcgtgatccttgcatctgttacttagggtcaaggcttgggtcttgccccgcagacccttgggacgacccggccccagcgcagctatgaacctggagcgagtgtccaatgaggagaaattgaacctgtgccggaagtactacctgggggggtttgctttcctgccttttctctggttggtcaacatcttctggttcttccgagaggccttccttgtcccagcctacacagaacagagccaaatcaaaggctatgtctggcgctcagctgtgggcttcctcttctgggtgatagtgctcacctcctggatcaccatcttccagatctaccggccccgctggggtgcccttggggactacctctccttcaccatacccctgggcaccccctgacaacttctgcacatactggggccctgcttattctcccaggacaggctccttaaagcagaggagcctgtcctgggagccccttctcaaactcctaagacttgttttcatgtcccacgttctctgctgacatcccccaataaaggaccctaactttcgatactgacttcctgggatcttttagaggttgaggcataaatgattattaatatttaaaaacatctgttgagagctttgtacgaggcttagtatttagacatgatgtacattttttacagtgcatactactcataatcttctgaactaggaactttcctgctcaggaaactattagatgagaaactaagaaaggaatagtgcttccatttctttttcttttttcttttttttttttttttttgagacagagtcttgctctgtcagccaggctggagtgcagtggtaggatcggcctagtgcttccatttctaggggctgttatcctgtactggtagtcgtgaattcaaaaatataactttcctactgtgggctgcagtattctcatcagaagtgtagatcacgatgctacttcctgggatttatctggaccaagacgtgtgacaaatggaagtttcccgttttctgaaggaagtgttgtctgcaaaaataaaaatagtcaagagctttctcagagaa

SEQ ID NO: 169012 - DNA, 833 bp, Homo sapiens
  Payload ID: 13268
  Gene Symbol: PSENEN
  Gene Name: presenilin enhancer gamma secretase subunit
  ENST ID: ENST00000591949
  CDS Start-End: 198-491
aaagaagactacaatctccagggaaacctggggcgtctcgcgcaaacgtccataactgaaagtagctaaggcaccccagccggaggaagtgagctctcctggggcgtggttgttcgtgatccttgcatctgttacttagggtcaaggcttgggtcttgccccgcagacccttgggacgacccggccccagcgcagctatgaacctggagcgagtgtccaatgaggagaaattgaacctgtgccggaagtactacctgggggggtttgctttcctgccttttctctggttggtcaacatcttctggttcttccgagaggccttccttgtcccagcctacacagaacagagccaaatcaaaggctgtgagtctagagcacagaggagggaggccagtggcaggggagagggggaagcggggaatcttggtgggaagggacaatggaggatccaaaatgttggggctctgggtgagaagggaaggctggtctagggaagtctggagagcagccggaggccaacccttccagcttctgtttcccatgacagatgtctggcgctcagctgtgggcttcctcttctgggtgatagtgctcacctcctggatcaccatcttccagatctaccggccccgctggggtgcccttggggactacctctccttcaccatacccctgggcaccccctgacaacttctgcacatactggggccctgcttattctcccaggacaggctccttaaagcagaggagcctgtcctgggagccccttctcaaactcctaagacttgttttcatgtcccacgttctctgctgacatcccccaataaaggacc

SEQ ID NO: 169013 - DNA, 587 bp, Homo sapiens
  Payload ID: 13269
  Gene Symbol: PAM16
  Gene Name: presequence translocase-associated motor 16 homolog (S. cerevisiae)
  Uniprot ID: Q9Y3D7
  ENST ID: ENST00000318059
  CDS Start-End: 139-516
ggcaatgcgcatgcccagcgccgtatcgcgcacgcgctctctgcggctttccttgacctctgacccgccgaccacgcttgatccccggccgcggggccaggaagtcggagtttgagccccggaggcagagcggctgccatggccaagtacctggcccagatcattgtgatgggcgtgcaggtggtgggcagggcctttgcacgggccttgcggcaggagtttgcagccagccgggccgcagctgatgcccgaggacgcgctggacaccggtctgcagccgcttccaacctctccggcctcagcctccaggaggcacagcagattctcaacgtgtccaagctgagccctgaggaggtccagaagaactatgaacacttatttaaggtgaatgataaatccgtgggtggctccttctacctgcagtcaaaggtggtccgcgcaaaggagcgcctggatgaggaactcaaaatccaggcccaggaggacagagaaaaagggcagatgccccatacgtgactgctcggctccccccgcccaccccgccgcctctaatttatagcttggtaataaatttcttttctgcattt

SEQ ID NO: 169014 - DNA, 518 bp, Homo sapiens
  Payload ID: 13269
  Gene Symbol: PAM16
  Gene Name: presequence translocase-associated motor 16 homolog (S. cerevisiae)
  ENST ID: ENST00000575848
  CDS Start-End: 37-450
tcacatcttagtgagtccccagggcctctgcggggcatggaatcacacgtgcagtgttccggcatgttcagcctggccaagtacctggcccagatcattgtgatgggcgtgcaggtggtgggcagggcctttgcacgggccttgcggcaggagtttgcagccagccgggccgcagctgatgcccgaggacgcgctggacaccggtctgcagccgcttccaacctctccggcctcagcctccaggaggcacagcagattctcaacgtgtccaagctgagccctgaggaggtccagaagaactatgaacacttatttaaggtgaatgataaatccgtgggtggctccttctacctgcagtcaaaggtggtccgcgcaaaggagcgcctggatgaggaactcaaaatccaggcccaggaggacagagaaaaagggcagatgccccatacgtgactgctcggctccccccgcccaccccgccgcctctaatttatagcttggtaataaatttcttttctgca

SEQ ID NO: 169015 - DNA, 732 bp, Homo sapiens
  Payload ID: 13269
  Gene Symbol: PAM16
  Gene Name: presequence translocase-associated motor 16 homolog (S. cerevisiae)
  ENST ID: ENST00000575636
  CDS Start-End: 109-393
ggcggcctcagggccagggaaaaccgtctgcctggaagaggccgggcaaacgtggtcgcgctgtgcctagcccgcgtgtgagcgagcagccgtgggcagcggtggagcatgagtctggctggccaagtacctggcccagatcattgtgatgggcgtgcaggtggtgggcagggcctttgcacgggccttgcggcaggagtttgcagcctctaccccctaaaaaggaaaccactcctggagaagaggcagctcctagccacctgtccctgtgtctctcatcctgtgctggtggcaggggtgagccaccaactcggaaggcccagggtgaagtgtgggctgctgaggactgagcgatcacccacatgtccacacagccagccgggccgcagctgatgcccgaggacgcgctggacaccggtctgcagccgcttccaacctctccggcctcagcctccaggaggcacagcagattctcaacgtgtccaagctgagccctgaggaggtccagaagaactatgaacacttatttaaggtgaatgataaatccgtgggtggctccttctacctgcagtcaaaggtggtccgcgcaaaggagcgcctggatgaggaactcaaaatccaggcccaggaggacagagaaaaagggcagatgccccatacgtgactgctcggctccccccgcccaccccgccgcctctaatttatagcttggtaataaatttcttttctgca

SEQ ID NO: 169016 - DNA, 548 bp, Homo sapiens
  Payload ID: 13269
  Gene Symbol: PAM16
  Gene Name: presequence translocase-associated motor 16 homolog (S. cerevisiae)
  ENST ID: ENST00000577031
  CDS Start-End: 32-421
gagtttgagccccggaggcagagcggctgccatggccaagtacctggcccagatcattgtgatgggcgtgcaggtggtgggcagggcctttgcacgggccttgcggcaggagtttgcagccagccgggccgcagctgatgcccgaggacgcgctggacaccggtctgcagccgcttccaacctctccggcctcagcctccaggaggcacagcagattctcaacgtgtccaagctgagccctgaggaggtccagaagaactatgaacacttatttaaggtgaatgataaatccgtgggtggctccttctacctgcagtcaaagagatcgggtctctccatgttgcccaaactgatctcgaactcctggcctcaagcgatcctcctgccttggcctcccaaaacgctgggactacatgcctgagccaccacgcttggcgaaactgcgtcttttacaggcatcgcctcagatcgcagagctcagaagtggaaaaactatcagatttgccaagaccagctcggtcgggagactaatccggcggcgctagagg

SEQ ID NO: 169017 - DNA, 606 bp, Homo sapiens
  Payload ID: 13269
  Gene Symbol: PAM16
  Gene Name: presequence translocase-associated motor 16 homolog (S. cerevisiae)
  ENST ID: ENST00000571986
  CDS Start-End: 82-267
ctctgacccgccgaccacgcttgatccccggccgcggggccaggaagtcggagtttgagccccggaggcagagcggctgccatggccaagtacctggcccagatcattgtgatgggcgtgcaggtggtgggcagggcctttgcacgggccttgcggcaggagtttgcaggggtgagccaccaactcggaaggcccagggtgaagtgtgggctgctgaggactgagcgatcacccacatgtccacacagccagccgggccgcagctgatgcccgaggacgcgctggacaccggtctgcagccgcttccaacctctccggcctcagcctccaggaggcacagcagattctcaacgtgtccaagctgagccctgaggaggtccagaagaactatgaacacttatttaaggtgaatgataaatccgtgggtggctccttctacctgcagtcaaaggtggtccgcgcaaaggagcgcctggatgaggaactcaaaatccaggcccaggaggacagagaaaaagggcagatgccccatacgtgactgctcggctccccccgcccaccccgccgcctctaatttatagcttggtaataaatttcttttctgca

SEQ ID NO: 169018 - DNA, 722 bp, Homo sapiens
  Payload ID: 13269
  Gene Symbol: PAM16
  Gene Name: presequence translocase-associated motor 16 homolog (S. cerevisiae)
  ENST ID: ENST00000573553
  CDS Start-End: 217-654
agaattaggacagatctgtttccccgttggtaaagtaaaggttgggcctgatgatctcagaaactcaggaagagtgatggtcggccccagggtcgagagtgagttactgccaggtccagggctgtccctgtgttctggctcccagaccacagtgtttcttcctgaagccggtggttgcagccactttgccttgctcctctacgcctttcctgaaggatgaggtggggccagtctgcctctgggagctcggtcaagttcacccgcctgcctgcctgtccagccaagtacctggcccagatcattgtgatgggcgtgcaggtggtgggcagggcctttgcacgggccttgcggcaggagtttgcagccagccgggccgcagctgatgcccgaggacgcgctggacaccggtctgcagccgcttccaacctctccggcctcagcctccaggaggcacagcagattctcaacgtgtccaagctgagccctgaggaggtccagaagaactatgaacacttatttaaggtgaatgataaatccgtgggtggctccttctacctgcagtcaaaggtggtccgcgcaaaggagcgcctggatgaggaactcaaaatccaggcccaggaggacagagaaaaagggcagatgccccatacgtgactgctcggctccccccgcccaccccgccgcctctaatttatagcttggtaataaatttcttttctgca

SEQ ID NO: 169019 - DNA, 353 bp, Homo sapiens
  Payload ID: 13269
  Gene Symbol: PAM16
  Gene Name: presequence translocase-associated motor 16 homolog (S. cerevisiae)
  ENST ID: ENST00000571178
  CDS Start-End: 1-179
gatccccggccgcggggccaggaagtcggagtttgagccccggaggcagagcggctgccatgccagccgggccgcagctgatgcccgaggacgcgctggacaccggtctgcagccgcttccaacctctccggcctcagcctccaggaggcacagcagattctcaacgtgtccaagctgagccctgaggaggtccagaagaactatgaacacttatttaaggtgaatgataaatccgtgggtggctccttctacctgcagtcaaaggtggtccgcgcaaaggagcgcctggatgaggaactcaaaatccaggcccaggaggacagagaaaaagggcagatgccccatacgtgac

SEQ ID NO: 169020 - DNA, 674 bp, Homo sapiens
  Payload ID: 13269
  Gene Symbol: PAM16
  Gene Name: presequence translocase-associated motor 16 homolog (S. cerevisiae)
  ENST ID: ENST00000571941
  CDS Start-End: 169-606
cgtgtttcaagccgaggggaccctctgactttcacctctgtccttcagacagcaccagcatcccatccctgagcctcctgttccactcgggaggggctttaggaaggaggcgaagtcagccggtggttgcagccactttgccttgctcctctacgcctttcctgaaggatgaggtggggccagtctgcctctgggagctcggtcaagttcacccgcctgcctgcctgtccagccaagtacctggcccagatcattgtgatgggcgtgcaggtggtgggcagggcctttgcacgggccttgcggcaggagtttgcagccagccgggccgcagctgatgcccgaggacgcgctggacaccggtctgcagccgcttccaacctctccggcctcagcctccaggaggcacagcagattctcaacgtgtccaagctgagccctgaggaggtccagaagaactatgaacacttatttaaggtgaatgataaatccgtgggtggctccttctacctgcagtcaaaggtggtccgcgcaaaggagcgcctggatgaggaactcaaaatccaggcccaggaggacagagaaaaagggcagatgccccatacgtgactgctcggctccccccgcccaccccgccgcctctaatttatagcttggtaataaatttcttttctgca

SEQ ID NO: 169021 - DNA, 493 bp, Homo sapiens
  Payload ID: 13269
  Gene Symbol: PAM16
  Gene Name: presequence translocase-associated motor 16 homolog (S. cerevisiae)
  Uniprot ID: Q9Y3D7
  ENST ID: ENST00000576217
  CDS Start-End: 48-425
aatcccagctccttgggagtttgagccccggaggcagagcggctgccatggccaagtacctggcccagatcattgtgatgggcgtgcaggtggtgggcagggcctttgcacgggccttgcggcaggagtttgcagccagccgggccgcagctgatgcccgaggacgcgctggacaccggtctgcagccgcttccaacctctccggcctcagcctccaggaggcacagcagattctcaacgtgtccaagctgagccctgaggaggtccagaagaactatgaacacttatttaaggtgaatgataaatccgtgggtggctccttctacctgcagtcaaaggtggtccgcgcaaaggagcgcctggatgaggaactcaaaatccaggcccaggaggacagagaaaaagggcagatgccccatacgtgactgctcggctccccccgcccaccccgccgcctctaatttatagcttggtaataaatttcttttctgca

SEQ ID NO: 169022 - DNA, 587 bp, Homo sapiens; identical to SEQ ID NO: 169013
  Payload ID: 13269
  Gene Symbol: PAM16
  Gene Name: presequence translocase-associated motor 16 homolog (S. cerevisiae)
  Uniprot ID: Q9Y3D7
  ENST ID: ENST00000616009
  CDS Start-End: 139-516

SEQ ID NO: 169023 - DNA, 606 bp, Homo sapiens; identical to SEQ ID NO: 169017
  Payload ID: 13269
  Gene Symbol: PAM16
  Gene Name: presequence translocase-associated motor 16 homolog (S. cerevisiae)
  ENST ID: ENST00000633650
  CDS Start-End: 82-267

SEQ ID NO: 169024 - DNA, 478 bp, Homo sapiens
  Payload ID: 13269
  Gene Symbol: PAM16
  Gene Name: presequence translocase-associated motor 16 homolog (S. cerevisiae)
  Uniprot ID: Q9Y3D7
  ENST ID: ENST00000634045
  CDS Start-End: 33-410
ggggtttgagccccggaggcagagcggctgccatggccaagtacctggcccagatcattgtgatgggcgtgcaggtggtgggcagggcctttgcacgggccttgcggcaggagtttgcagccagccgggccgcagctgatgcccgaggacgcgctggacaccggtctgcagccgcttccaacctctccggcctcagcctccaggaggcacagcagattctcaacgtgtccaagctgagccctgaggaggtccagaagaactatgaacacttatttaaggtgaatgataaatccgtgggtggctccttctacctgcagtcaaaggtggtccgcgcaaaggagcgcctggatgaggaactcaaaatccaggcccaggaggacagagaaaaagggcagatgccccatacgtgactgctcggctccccccgcccaccccgccgcctctaatttatagcttggtaataaatttcttttctgca

SEQ ID NO: 169025 - DNA, 548 bp, Homo sapiens; identical to SEQ ID NO: 169016
  Payload ID: 13269
  Gene Symbol: PAM16
  Gene Name: presequence translocase-associated motor 16 homolog (S. cerevisiae)
  ENST ID: ENST00000634029
  CDS Start-End: 32-421

SEQ ID NO: 169026 - DNA, 722 bp, Homo sapiens; identical to SEQ ID NO: 169018
  Payload ID: 13269
  Gene Symbol: PAM16
  Gene Name: presequence translocase-associated motor 16 homolog (S. cerevisiae)
  ENST ID: ENST00000631739
  CDS Start-End: 217-654

SEQ ID NO: 169027 - DNA, 674 bp, Homo sapiens; identical to SEQ ID NO: 169020
  Payload ID: 13269
  Gene Symbol: PAM16
  Gene Name: presequence translocase-associated motor 16 homolog (S. cerevisiae)
  ENST ID: ENST00000633831
  CDS Start-End: 169-606

SEQ ID NO: 169028 - DNA, 518 bp, Homo sapiens; identical to SEQ ID NO: 169014
  Payload ID: 13269
  Gene Symbol: PAM16
  Gene Name: presequence translocase-associated motor 16 homolog (S. cerevisiae)
  ENST ID: ENST00000633944
  CDS Start-End: 37-450

SEQ ID NO: 169029 - DNA, 732 bp, Homo sapiens; identical to SEQ ID NO: 169015
  Payload ID: 13269
  Gene Symbol: PAM16
  Gene Name: presequence translocase-associated motor 16 homolog (S. cerevisiae)
  ENST ID: ENST00000631595
  CDS Start-End: 109-393

SEQ ID NO: 169030 - DNA, 353 bp, Homo sapiens; identical to SEQ ID NO: 169019
  Payload ID: 13269
  Gene Symbol: PAM16
  Gene Name: presequence translocase-associated motor 16 homolog (S. cerevisiae)
  ENST ID: ENST00000633558
  CDS Start-End: 1-179

SEQ ID NO: 169031 - DNA, 1618 bp, Homo sapiens
  Payload ID: 13270
  Gene Symbol:
  Gene Name: PRH1-PRR4
  ENST ID: ENST00000536668
  CDS Start-End: 342-1139
tgctggccccggaggccgttagcttagtcatggctctaaatatgtacctgcaatcggatgttgaggatcaccgagcccgcgacgtagaagtacgggaagttcatgcgcagctgccaggccagctcgaagaaggcgagcagggtgcgggagagccccttgcagaagacgccgtacgaggttctccagcatttggctcaaggccccaagggcacatgtgacaagaaggcgccagctttttaaacattggaagttcttctgtgtcagttctgtgacagaacatttacttaacacatcatgaaggctagtttggatgtggaggggaatagactccatctatccatatgagagttggagtctcactctgttatccaggctggagttcagtggtaggatcatggcttactgcagtctggaactcctgggctcaaaccatcctcccacctcagccttctgctgcagaagaatattttgcctgctggaacctgctgtatctactcaagagtggaagttttcacagggagctgacacgtttctcccagcacaaagttgggagtgacaccagagcctcctgcaagatgcttctgattctgctgtcagtggccctgctggccttcagctcagctcaggatttaaatgaagatgtcagccaggaagatgttcccctcgtaatatcagatggaggagactctgagcagttcctagatgaggagcgtcagggaccacctttgggaggacagcaatctcaaccctctgctggtgatgggaaccaggatgatggccctcagcagggaccaccccaacaaggaggccagcagcaacaaggtccaccacctcctcagggaaagccacaaggaccaccccaacaaggaggccagcagcaacaaggtccaccacctcctcagggaaagccacaaggaccaccccaacagggaggccatccccctcctcctcaaggaaggccacaaggaccaccccaacagggaggccatccccgtcctcctcgaggaaggccacaaggaccaccccaacagggaggccatcagcaaggtcctcccccacctcctcctggaaagccccagggaccacctccccaagggggccgcccacaaggacctccacaggggcagtctcctcagtaatctaggattcaatgacagatgtgaactatgaagactttactttcaccataccagatgtagaggactcaagtcagagaccagatcagggaccccagagacctcctcctgaaggactcctacctagaccccctggtgatagtggtaaccaagatgatggtcctcagcagagaccaccaaaaccaggaggccatcaccgccatcctcccccacctccttttcaaaatcagcaacgaccaccccgacgaggacaccgtcaactctctctaccccgatttccttctgtcagcctgcaggaagcatcatcattcttccagagggacagaccagcaagacatccccaggagcaaccactctggtaatctagaattcagtggcagaaaataaataagaagataacttccttcagaaagccatgacattgaaataatgtggtcataactctttcttcagtataccaataaaatattaatagcatgcaa

SEQ ID NO: 169032 - DNA, 1618 bp, Homo sapiens
  Payload ID: 13270
  Gene Symbol:
  Gene Name: PRH1-PRR4
  ENST ID: ENST00000632393
  CDS Start-End: 342-1139
tgctggccccggaggccgttagcttagtcatggctctaaatatgtacctgcaatcggatgttgaggatcaccgagcccgcgacgtagaagtacgggaagttcatgcgcagctgccaggccagctcgaagaaggcgagcagggtgcgggagagccccttgcagaagacgccgtacgaggttctccagcatttggctcaaggccccaagggcacatgtgacaagaaggcgccggctttttaaacattggaagttcttctgtgtcagttctgtgacagaacatttacttaacacatcatgaaggctagtttggatgtggaggggaatagactccatctatccatatgagagttggagtctcactctgttatccaggctggagttcagtggtaggatcatggcttactgcagtctggaactcctgggctcaaaccatcctcccacctcagccttctgctgcagaagaatattttgcctgctggaacctgctgtatctactcaagagtggaagttttcacagggagctgacacgtttctcccagcacaaagttgggagtgacaccagagcctcctgcaagatgcttctgattctgctgtcagtggccctgctggccttcagctcagctcaggatttaaatgaagatgtcagccaggaagatgttcccctcgtaatatcagatggaggagactctgagcagttcctagatgaggagcgtcagggaccacctttgggaggacagcaatctcaaccctctgctggtgatgggaaccaggatgatggccctcagcagggaccaccccaacaaggaggccagcagcaacaaggtccaccacctcctcagggaaagccacaaggaccaccccaacaaggaggccagcagcaacaaggtccaccacctcctcagggaaagccacaaggaccaccccaacagggaggccatccccctcctcctcaaggaaggccacaaggaccaccccaacagggaggccatccccgtcctcctcgaggaaggccacaaggaccaccccaacagggaggccatcagcaaggtcctcccccacctcctcctggaaagccccagggaccacctccccaagggggccgcccacaaggacctccacaggggcagtctcctcagtaatctaggattcaatgacagatgtgaactatgaagactttactttcaccataccagatgtagaggactcaagtcagagaccagatcagggaccccagagacctcctcctgaaggactcctacctagaccccctggtgatagtggtaaccaagatgatggtcctcagcagagaccaccaaaaccaggaggccatcaccgccatcctcccccacctccttttcaaaatcagcaacgaccaccccgacgaggacaccgtcaactctctctaccccgatttccttctgtcagcctgcaggaagcatcatcattcttccagagggacagaccagcaagacatccccaggagcaaccactctggtaatctagaattcagtggcagaaaataaataagaagataacttccttcagaaagccatgacattgaaataatgtggtcataactctttcttcagtataccaataaaatattaatagcatgcaa

SEQ ID NO: 169033 - DNA, 5811 bp, Homo sapiens
  Payload ID: 13271
  Gene Symbol: PRICKLE1
  Gene Name: prickle homolog 1
  Uniprot ID: Q96MT3
  ENST ID: ENST00000345127
  CDS Start-End: 261-2756
catgccagcctcgcgcagcctgcgctgacttccccgagacgcgccgcggtcggcacggagactttctgggctctggatggttcgtgcgctgctcaccctcgcccacccctgacgccgcggaccgcagctcctcagccccgcagccccgcagcccagcagccccgcagcggcgccgaggacagtgcagccgagttgcgtctccctcgcgcgagcagccattgtttgatgtcctgtgactgagaaaccaggctttaaactttatgcctttggagatggagcccaagatgagcaaactggcctttggctgtcagagaagttccacatcagatgatgactctggctgtgcattggaggagtacgcctgggtccccccgggcctgagaccagagcagatccagctctattttgcttgcttaccagaggaaaaagttccttacgttaacagccccggagagaagcatcggattaaacagcttttgtaccagttaccaccacatgataatgaggtacggtattgccagtctttgagtgaagaggagaaaaaagagttgcaggtgttcagtgctcagcggaagaaagaagcactgggaagaggaacaattaagcttctgtccagagcagtcatgcatgctgtgtgtgagcagtgtggtttgaagataaatggaggtgaagttgcagtgttcgcctcccgtgcgggccctggtgtgtgctggcacccatcctgttttgtctgtttcacgtgtaatgagctgctggtcgacctcatctatttttatcaggatggaaaaattcactgtggcaggcaccatgcagaactgctcaaaccacggtgctcagcatgtgacgagataatttttgctgatgagtgcacagaagctgagggtcgccattggcacatgaaacacttctgctgccttgagtgtgaaacggtcctgggaggacagaggtatatcatgaaggacggccgccccttctgctgtggctgttttgagtctctctatgcggagtactgtgaaacctgtggggaacatattggtgtggaccatgcacagatgacctatgacgggcagcactggcacgccacggaagcctgcttttcttgtgcccagtgtaaagcctctttgttgggatgtcccttccttcccaaacagggtcagatttactgctcaaaaacgtgcagtcttggtgaagacgtccatgcctctgattcttccgactctgcatttcagtcagctcgatcaagagactcccgaagaagtgtccgaatgggcaagagcagccggtcagcagatcagtgtagacagtctctcctcttatcgcctgctctgaactacaagtttcctggcctctcaggcaatgctgatgacaccctttctcgaaaattggatgatctgagtctctccagacaaggaacaagttttgccagtgaagaattttggaaaggcagagtagagcaggaaactccagaagaccctgaagaatgggctgatcatgaagattatatgacgcagctcctcctcaagtttggtgataaaagcctctttcagccacagcccaatgagatggatattcgagccagtgagcactggatatctgataacatggttaaaagtaagaccgagttaaagcaaaataaccagagccttgcaagtaaaaaataccagtctgatatgtactgggcacagtcacaagatggactgggcgattctgcttatggcagccacccaggccctgcaagcagtagaaggcttcaggaattggaactggaccatggggcttcagggtataatcatgatgaaacacagtggtatgaagattccctggagtgtctgtcagacctgaaaccagagcaaagtgttcgggattcgatggattctttggcattgtccaatatcacaggggcttcggtggatggagaaaacaagccaaggccatcattgtattctctgcaaaattttgaggagatggaaacagaagattgtgagaagatgagcaatatgggaactttgaactcttccatgctgcacaggagtgcagagtccttaaagagtctaagttcagagttgtgtccagagaaaatcctgcctgaagagaagccagtacatctgccagtgctcagaaggtccaagtctcaatccagaccccagcaggtcaagttttctgatgatgtcattgacaatgggaactatgacattgaaatccggcagcctccgatgagtgaaaggactcggagacgcgtctacaattttgaagagaggggatccaggtctcatcaccaccgccgccggagaagtagaaagtcccgctccgacaatgccctgaatcttgttacagaaagaaaatactctcccaaggacagactgcggctgtacacccccgataactatgagaaatttatacagaataaaagtgcccgggagatccaagcatacatccagaatgctgatctctacggacagtacgcccatgccacttccgattatggcctgcagaacccaggaatgaatcggtttctgggactctacggcgaggatgatgattcctggtgttcttcctcctcctcctcttccgactcggaagaagaaggatattttcttggacaaccaatccctcaaccccggccacagagatttgcctactatacagatgacctttctagtccaccatctgcacttcccacccctcagtttggtcagaggacaacaaaatccaagaagaaaaagggacacaagggcaaaaattgtattatttcttaaccaagtagtgatgcagagcatttgtttaaaacttagccattaaccgtctgaatcgtttccttttcttccgtaggaaagttgtgaaaatagtttaaagtgctttctttgcccatgtaaatgagaactcaactgctgtttacagtgtcagattaacatttgaaaggtgtgatttctccaatttaccctctttggatggtgccaggtggacgtgacatctcgtgcctgtccggtgcgggtgcgttacagatggacgtagctgctttggttttccagtcctcaagggaatactgaagatgctgactgaaggggattggatgttgattttagaagatggagaactccagccacctttgtaaagcactagtgtttgtcatttatgtaagtcaggtcggctcaggtcttgatagtccgtcttggtgtgaggcatgcctgtcacgatgacctagctaacactgtgcatcttattgtgaggccagcttgtcccctcgaaccctctttggccaggtaaacattgtattgtatcagcgccagctacagattgaaaaaaaaaaacaaaaaacattgctatttataacttagtatttcatagacttaagtgtattcctaatttaacggtgcaaatattaatgtatatactgtacagttcagattttaaagctgatatttttatatccctgaattgtaagccgtttgttacgctgcagtgctagatttgccagggaaccagaatttatggatgaactgattgcttatattttagtcagggtttataaatgtagatggtcaaatttacattgcctagtgatggaaaattcaactttttttgatttttttttccaatattaaaaaaggctctgtatgcatggtggggctatgtaagtactctttaaaactatggccctattaatcttacaagtgttacttatgggtcaagcaatgtaaactgtataaatgtaaaaacaacccctccacacacataacccctggaatatatggtaaaaacaagtagaagctgtttcagcgagtgggttttttccccctgcctgcggggggtgcctttctcattttcagcaaggtgatgattatctcatgggaaatgacaaagatctgcttttgtggcagaggactttgtagatttgttattttaagagaggttattcctttttattccttccctcccactaatttgttggcctttaacagcaattttgaaaactgggtcttctggttatgtttttgttttaaaatctttaaattagaggatgctgtgccattgagtactgtaagttaatatgaggttctggttcaaggaaaacttacgttggatctgaaccaatgagcagatattttgatatgtgccactcttgcatatacatctcagtcctaactaaaggttctagtggcatccaggacctttagggaggcatttaataaacacttaataaataacaaaactacctttctgaatataaatctttgcaaatgtatccagataacttccattttgtgcctgtgttcaggcatgatttattttgcagttgccctaccattaacagacctccatttgtctcgtgtgtccacacgccccacttgtaggccagaaatagggcttcagacacagaggcttattttttccatatagactggagtggggaaaatttggccttagggaggacagacacaagtccaatgggtaaaccagcgagtagtaggtggacagccgtcccacacaagggtttgtatctgggctacacagattcccttcagaaaagcaccaatggtgagagagttcttcactcagtaacttacattccctggtctggtgcctttaaaaaaccatcagcaatgaaaaggaagtgcatacacatgacaaaaaaattcaaatagggcaaaagtcagagacagcatctcctttccattcttcatcccagtcccccaggtcctctccccagaagtaaccactcttacccagttttagtgtctccttcagacattcaaagcacattcgtataaatgtgtcttttaaaagtggtagtgacctatatgtgctgtgacatgcttttttccctttgtatgtggacatttcacgttagtgcatataggtctacccattctttcagtgactgcttaatagcctactcctaatgatggagttgactttcctcatacattatgctacactggcacatgtgcacataaatcgggagcagcgtagttactgggacaaaggttacgtatttaagactgatggatattgccaattttcctccaaaagaaattctcctgatttacattaatgtaatgtaaatgagagtgtttgttccatcacaacctctcaatgtattagcagatttcttgattttgaagaaattttcagaacctgtgctgccacaagtgggcatccttttagaaaagactgttgcaatatgttgcttataaaggatggataataaatagtaaacaggtgatacttagcctgaagaaatgcaggtataaggtgaaggtactgccctcacttttcaagtacattctcaaaagataggggtaacatagcctgccaaaggcttaaggaaatgcagatatttattcacaataataatgtgactttcttttccttttttttttttttttgagatggagtttcgctcctgttgcccaggctggagcgcaacggcacaatctcagttcactgcaacctctgcctcccgggttcaagcaattctcctgtctcagcctccggagtagctgagattacaggtgcctgccaccatgctcggctaattttttatatttttagtagagacagtgtttcaccaagttggccaggctggtctcgaactcctgaccttcaggtgatccacctgcctcagcctcccaaagtgcaggggattacaggcatgagccactgcgtctggcaataatgtaactttgaagcttaaaaattaatcccagtttgtagcaataacagaagactatctacaacggaagaaagaagcaactgccttacagttctgtaaagaattggcaagaaaataaagcctatagttgccgactt

SEQ ID NO: 169034 - DNA, 4080 bp, Homo sapiens
  Payload ID: 13271
  Gene Symbol: PRICKLE1
  Gene Name: prickle homolog 1
  Uniprot ID: Q96MT3
  ENST ID: ENST00000445766
  CDS Start-End: 131-2626
agaccagcctgtgggattacacgagacaggatcgagtccaaacgggtccccagctcggcaaggcgcgccggaaggaatctaacagccattgtttgatgtcctgtgactgagaaaccaggctttaaactttatgcctttggagatggagcccaagatgagcaaactggcctttggctgtcagagaagttccacatcagatgatgactctggctgtgcattggaggagtacgcctgggtccccccgggcctgagaccagagcagatccagctctattttgcttgcttaccagaggaaaaagttccttacgttaacagccccggagagaagcatcggattaaacagcttttgtaccagttaccaccacatgataatgaggtacggtattgccagtctttgagtgaagaggagaaaaaagagttgcaggtgttcagtgctcagcggaagaaagaagcactgggaagaggaacaattaagcttctgtccagagcagtcatgcatgctgtgtgtgagcagtgtggtttgaagataaatggaggtgaagttgcagtgttcgcctcccgtgcgggccctggtgtgtgctggcacccatcctgttttgtctgtttcacgtgtaatgagctgctggtcgacctcatctatttttatcaggatggaaaaattcactgtggcaggcaccatgcagaactgctcaaaccacggtgctcagcatgtgacgagataatttttgctgatgagtgcacagaagctgagggtcgccattggcacatgaaacacttctgctgccttgagtgtgaaacggtcctgggaggacagaggtatatcatgaaggacggccgccccttctgctgtggctgttttgagtctctctatgcggagtactgtgaaacctgtggggaacatattggtgtggaccatgcacagatgacctatgacgggcagcactggcacgccacggaagcctgcttttcttgtgcccagtgtaaagcctctttgttgggatgtcccttccttcccaaacagggtcagatttactgctcaaaaacgtgcagtcttggtgaagacgtccatgcctctgattcttccgactctgcatttcagtcagctcgatcaagagactcccgaagaagtgtccgaatgggcaagagcagccggtcagcagatcagtgtagacagtctctcctcttatcgcctgctctgaactacaagtttcctggcctctcaggcaatgctgatgacaccctttctcgaaaattggatgatctgagtctctccagacaaggaacaagttttgccagtgaagaattttggaaaggcagagtagagcaggaaactccagaagaccctgaagaatgggctgatcatgaagattatatgacgcagctcctcctcaagtttggtgataaaagcctctttcagccacagcccaatgagatggatattcgagccagtgagcactggatatctgataacatggttaaaagtaagaccgagttaaagcaaaataaccagagccttgcaagtaaaaaataccagtctgatatgtactgggcacagtcacaagatggactgggcgattctgcttatggcagccacccaggccctgcaagcagtagaaggcttcaggaattggaactggaccatggggcttcagggtataatcatgatgaaacacagtggtatgaagattccctggagtgtctgtcagacctgaaaccagagcaaagtgttcgggattcgatggattctttggcattgtccaatatcacaggggcttcggtggatggagaaaacaagccaaggccatcattgtattctctgcaaaattttgaggagatggaaacagaagattgtgagaagatgagcaatatgggaactttgaactcttccatgctgcacaggagtgcagagtccttaaagagtctaagttcagagttgtgtccagagaaaatcctgcctgaagagaagccagtacatctgccagtgctcagaaggtccaagtctcaatccagaccccagcaggtcaagttttctgatgatgtcattgacaatgggaactatgacattgaaatccggcagcctccgatgagtgaaaggactcggagacgcgtctacaattttgaagagaggggatccaggtctcatcaccaccgccgccggagaagtagaaagtcccgctccgacaatgccctgaatcttgttacagaaagaaaatactctcccaaggacagactgcggctgtacacccccgataactatgagaaatttatacagaataaaagtgcccgggagatccaagcatacatccagaatgctgatctctacggacagtacgcccatgccacttccgattatggcctgcagaacccaggaatgaatcggtttctgggactctacggcgaggatgatgattcctggtgttcttcctcctcctcctcttccgactcggaagaagaaggatattttcttggacaaccaatccctcaaccccggccacagagatttgcctactatacagatgacctttctagtccaccatctgcacttcccacccctcagtttggtcagaggacaacaaaatccaagaagaaaaagggacacaagggcaaaaattgtattatttcttaaccaagtagtgatgcagagcatttgtttaaaacttagccattaaccgtctgaatcgtttccttttcttccgtaggaaagttgtgaaaatagtttaaagtgctttctttgcccatgtaaatgagaactcaactgctgtttacagtgtcagattaacatttgaaaggtgtgatttctccaatttaccctctttggatggtgccaggtggacgtgacatctcgtgcctgtccggtgcgggtgcgttacagatggacgtagctgctttggttttccagtcctcaagggaatactgaagatgctgactgaaggggattggatgttgattttagaagatggagaactccagccacctttgtaaagcactagtgtttgtcatttatgtaagtcaggtcggctcaggtcttgatagtccgtcttggtgtgaggcatgcctgtcacgatgacctagctaacactgtgcatcttattgtgaggccagcttgtcccctcgaaccctctttggccaggtaaacattgtattgtatcagcgccagctacagattgaaaaaaaaaaacaaaaaacattgctatttataacttagtatttcatagacttaagtgtattcctaatttaacggtgcaaatattaatgtatatactgtacagttcagattttaaagctgatatttttatatccctgaattgtaagccgtttgttacgctgcagtgctagatttgccagggaaccagaatttatggatgaactgattgcttatattttagtcagggtttataaatgtagatggtcaaatttacattgcctagtgatggaaaattcaactttttttgatttttttttccaatattaaaaaaggctctgtatgcatggtggggctatgtaagtactctttaaaactatggccctattaatcttacaagtgttacttatgggtcaagcaatgtaaactgtataaatgtaaaaacaacccctccacacacataacccctggaatatatggtaaaaacaagtagaagctgtttcagcgagtgggttttttccccctgcctgcggggggtgcctttctcattttcagcaaggtgatgattatctcatgggaaatgacaaagatctgcttttgtggcagaggactttgtagatttgttattttaagagaggttattcctttttattccttccctcccactaatttgttggcctttaacagcaattttgaaaactgggtcttctggttatgtttttgttttaaaatctttaaattagaggatgctgtgccattgagtactgtaagttaatatgaggttctggttcaaggaaaacttacgttggatctgaaccaatgagcagatattttgatatgtgccactcttgcatatacatctcagtcctaactaaaggttctagtggcatccaggacctttagggaggcatttaataaacacttaataaataacaaaa

SEQ ID NO: 169035 - DNA, 4253 bp, Homo sapiens
  Payload ID: 13271
  Gene Symbol: PRICKLE1
  Gene Name: prickle homolog 1
  Uniprot ID: Q96MT3
  ENST ID: ENST00000455697
  CDS Start-End: 287-2782
acttttgaagatcgccggccccaggcgggctcccggcgctgagcggagacgagtttttctccccgcagaggaggatcctggaaggacgcggagctggggcttgggggatgcagtggcctggacgaggtgactccaacccgggggagcagagtccgtcacgccggcagggaccgagggtctctgcggagctggaggaccttttgtgggatgcctcacggctgctgaggggctgcagcggcagccattgtttgatgtcctgtgactgagaaaccaggctttaaactttatgcctttggagatggagcccaagatgagcaaactggcctttggctgtcagagaagttccacatcagatgatgactctggctgtgcattggaggagtacgcctgggtccccccgggcctgagaccagagcagatccagctctattttgcttgcttaccagaggaaaaagttccttacgttaacagccccggagagaagcatcggattaaacagcttttgtaccagttaccaccacatgataatgaggtacggtattgccagtctttgagtgaagaggagaaaaaagagttgcaggtgttcagtgctcagcggaagaaagaagcactgggaagaggaacaattaagcttctgtccagagcagtcatgcatgctgtgtgtgagcagtgtggtttgaagataaatggaggtgaagttgcagtgttcgcctcccgtgcgggccctggtgtgtgctggcacccatcctgttttgtctgtttcacgtgtaatgagctgctggtcgacctcatctatttttatcaggatggaaaaattcactgtggcaggcaccatgcagaactgctcaaaccacggtgctcagcatgtgacgagataatttttgctgatgagtgcacagaagctgagggtcgccattggcacatgaaacacttctgctgccttgagtgtgaaacggtcctgggaggacagaggtatatcatgaaggacggccgccccttctgctgtggctgttttgagtctctctatgcggagtactgtgaaacctgtggggaacatattggtgtggaccatgcacagatgacctatgacgggcagcactggcacgccacggaagcctgcttttcttgtgcccagtgtaaagcctctttgttgggatgtcccttccttcccaaacagggtcagatttactgctcaaaaacgtgcagtcttggtgaagacgtccatgcctctgattcttccgactctgcatttcagtcagctcgatcaagagactcccgaagaagtgtccgaatgggcaagagcagccggtcagcagatcagtgtagacagtctctcctcttatcgcctgctctgaactacaagtttcctggcctctcaggcaatgctgatgacaccctttctcgaaaattggatgatctgagtctctccagacaaggaacaagttttgccagtgaagaattttggaaaggcagagtagagcaggaaactccagaagaccctgaagaatgggctgatcatgaagattatatgacgcagctcctcctcaagtttggtgataaaagcctctttcagccacagcccaatgagatggatattcgagccagtgagcactggatatctgataacatggttaaaagtaagaccgagttaaagcaaaataaccagagccttgcaagtaaaaaataccagtctgatatgtactgggcacagtcacaagatggactgggcgattctgcttatggcagccacccaggccctgcaagcagtagaaggcttcaggaattggaactggaccatggggcttcagggtataatcatgatgaaacacagtggtatgaagattccctggagtgtctgtcagacctgaaaccagagcaaagtgttcgggattcgatggattctttggcattgtccaatatcacaggggcttcggtggatggagaaaacaagccaaggccatcattgtattctctgcaaaattttgaggagatggaaacagaagattgtgagaagatgagcaatatgggaactttgaactcttccatgctgcacaggagtgcagagtccttaaagagtctaagttcagagttgtgtccagagaaaatcctgcctgaagagaagccagtacatctgccagtgctcagaaggtccaagtctcaatccagaccccagcaggtcaagttttctgatgatgtcattgacaatgggaactatgacattgaaatccggcagcctccgatgagtgaaaggactcggagacgcgtctacaattttgaagagaggggatccaggtctcatcaccaccgccgccggagaagtagaaagtcccgctccgacaatgccctgaatcttgttacagaaagaaaatactctcccaaggacagactgcggctgtacacccccgataactatgagaaatttatacagaataaaagtgcccgggagatccaagcatacatccagaatgctgatctctacggacagtacgcccatgccacttccgattatggcctgcagaacccaggaatgaatcggtttctgggactctacggcgaggatgatgattcctggtgttcttcctcctcctcctcttccgactcggaagaagaaggatattttcttggacaaccaatccctcaaccccggccacagagatttgcctactatacagatgacctttctagtccaccatctgcacttcccacccctcagtttggtcagaggacaacaaaatccaagaagaaaaagggacacaagggcaaaaattgtattatttcttaaccaagtagtgatgcagagcatttgtttaaaacttagccattaaccgtctgaatcgtttccttttcttccgtaggaaagttgtgaaaatagtttaaagtgctttctttgcccatgtaaatgagaactcaactgctgtttacagtgtcagattaacatttgaaaggtgtgatttctccaatttaccctctttggatggtgccaggtggacgtgacatctcgtgcctgtccggtgcgggtgcgttacagatggacgtagctgctttggttttccagtcctcaagggaatactgaagatgctgactgaaggggattggatgttgattttagaagatggagaactccagccacctttgtaaagcactagtgtttgtcatttatgtaagtcaggtcggctcaggtcttgatagtccgtcttggtgtgaggcatgcctgtcacgatgacctagctaacactgtgcatcttattgtgaggccagcttgtcccctcgaaccctctttggccaggtaaacattgtattgtatcagcgccagctacagattgaaaaaaaaaaacaaaaaacattgctatttataacttagtatttcatagacttaagtgtattcctaatttaacggtgcaaatattaatgtatatactgtacagttcagattttaaagctgatatttttatatccctgaattgtaagccgtttgttacgctgcagtgctagatttgccagggaaccagaatttatggatgaactgattgcttatattttagtcagggtttataaatgtagatggtcaaatttacattgcctagtgatggaaaattcaactttttttgatttttttttccaatattaaaaaaggctctgtatgcatggtggggctatgtaagtactctttaaaactatggccctattaatcttacaagtgttacttatgggtcaagcaatgtaaactgtataaatgtaaaaacaacccctccacacacataacccctggaatatatggtaaaaacaagtagaagctgtttcagcgagtgggttttttccccctgcctgcggggggtgcctttctcattttcagcaaggtgatgattatctcatgggaaatgacaaagatctgcttttgtggcagaggactttgtagatttgttattttaagagaggttattcctttttattccttccctcccactaatttgttggcctttaacagcaattttgaaaactgggtcttctggttatgtttttgttttaaaatctttaaattagaggatgctgtgccattgagtactgtaagttaatatgaggttctggttcaaggaaaacttacgttggatctgaaccaatgagcagatattttgatatgtgccactcttgcatatacatctcagtcctaactaaaggttctagtggcatccaggacctttagggaggcatttaataaacacttaataaataacaaaactacctttctgaatata

SEQ ID NO: 169036 - DNA, 456 bp, Homo sapiens
  Payload ID: 13271
  Gene Symbol: PRICKLE1
  Gene Name: prickle homolog 1
  ENST ID: ENST00000547113
  CDS Start-End: 128-456
catgccagcctcgcgcagcctgcgctgacttccccgagacgcgccgcggtcggcacggagactttctgggctctggatgcagccattgtttgatgtcctgtgactgagaaaccaggctttaaactttatgcctttggagatggagcccaagatgagcaaactggcctttggctgtcagagaagttccacatcagatgatgactctggctgtgcattggaggagtacgcctgggtccccccgggcctgagaccagagcagatccagctctattttgcttgcttaccagaggaaaaagttccttacgttaacagccccggagagaagcatcggattaaacagcttttgtaccagttaccaccacatgataatgaggtacggtattgccagtctttgagtgaagaggagaaaaaagagttgcaggtgttcagtgctcagcggaagaaagaagcactggg

SEQ ID NO: 169037 - DNA, 693 bp, Homo sapiens
  Payload ID: 13271
  Gene Symbol: PRICKLE1
  Gene Name: prickle homolog 1
  ENST ID: ENST00000551050
  CDS Start-End: 337-693
gaggaggggttcgctcgctgcctctgcgtcctgagctcggcctctggctcctggggccggggacgcagagaggggctggagccggtcgacccacggcccagggcgccccctcgcggcctaagcagcggccgccgcctggagcgcagagtttgcggggcccagggggcgccgacgcccgctctgaggcgtctctgctgctgcggcggcggggatggggacgacccaggggaccccctgcagccatcactggcagccccatcaagaattggccggctgagttttcccaaacagccattgtttgatgtcctgtgactgagaaaccaggctttaaactttatgcctttggagatggagcccaagatgagcaaactggcctttggctgtcagagaagttccacatcagatgatgactctggctgtgcattggaggagtacgcctgggtccccccgggcctgagaccagagcagatccagctctattttgcttgcttaccagaggaaaaagttccttacgttaacagccccggagagaagcatcggattaaacagcttttgtaccagttaccaccacatgataatgaggtacggtattgccagtctttgagtgaagaggagaaaaaagagttgcaggtgttcagtgctcagcggaagaaagaagcactgggaagaggaacaattaagcttctgtccaga

SEQ ID NO: 169038 - DNA, 585 bp, Homo sapiens
  Payload ID: 13271
  Gene Symbol: PRICKLE1
  Gene Name: prickle homolog 1
  ENST ID: ENST00000552108
  CDS Start-End: 108-585
tatttgcatcttagcggcttcactcactgggctcgggagaatggagcgggcgggcggcgcagccattgtttgatgtcctgtgactgagaaaccaggctttaaactttatgcctttggagatggagcccaagatgagcaaactggcctttggctgtcagagaagttccacatcagatgatgactctggctgtgcattggaggagtacgcctgggtccccccgggcctgagaccagagcagatccagctctattttgcttgcttaccagaggaaaaagttccttacgttaacagccccggagagaagcatcggattaaacagcttttgtaccagttaccaccacatgataatgaggtacggtattgccagtctttgagtgaagaggagaaaaaagagttgcaggtgttcagtgctcagcggaagaaagaagcactgggaagaggaacaattaagcttctgtccagagcagtcatgcatgctgtgtgtgagcagtgtggtttgaagataaatggaggtgaagttgcagtgttcgcctcccgtgcgggccctggtgtgtgctggcacccatcctgttttgtctgtttca

SEQ ID NO: 169039 - DNA, 3584 bp, Homo sapiens
  Payload ID: 13271
  Gene Symbol: PRICKLE1
  Gene Name: prickle homolog 1
  Uniprot ID: Q96MT3
  ENST ID: ENST00000548696
  CDS Start-End: 231-2726
tttttctccccgcagaggaggatcctggaaggacgcggagctggggcttgggggatgcagtggcctggacgaggtgactccaacccgggggagcagagtccgtcacgccggcagggaccgagggtctctgcggagctggaggaccttttgtgggatgcctcacggctgctgaggggctgcagcggccattgtttgatgtcctgtgactgagaaaccaggctttaaactttatgcctttggagatggagcccaagatgagcaaactggcctttggctgtcagagaagttccacatcagatgatgactctggctgtgcattggaggagtacgcctgggtccccccgggcctgagaccagagcagatccagctctattttgcttgcttaccagaggaaaaagttccttacgttaacagccccggagagaagcatcggattaaacagcttttgtaccagttaccaccacatgataatgaggtacggtattgccagtctttgagtgaagaggagaaaaaagagttgcaggtgttcagtgctcagcggaagaaagaagcactgggaagaggaacaattaagcttctgtccagagcagtcatgcatgctgtgtgtgagcagtgtggtttgaagataaatggaggtgaagttgcagtgttcgcctcccgtgcgggccctggtgtgtgctggcacccatcctgttttgtctgtttcacgtgtaatgagctgctggtcgacctcatctatttttatcaggatggaaaaattcactgtggcaggcaccatgcagaactgctcaaaccacggtgctcagcatgtgacgagataatttttgctgatgagtgcacagaagctgagggtcgccattggcacatgaaacacttctgctgccttgagtgtgaaacggtcctgggaggacagaggtatatcatgaaggacggccgccccttctgctgtggctgttttgagtctctctatgcggagtactgtgaaacctgtggggaacatattggtgtggaccatgcacagatgacctatgacgggcagcactggcacgccacggaagcctgcttttcttgtgcccagtgtaaagcctctttgttgggatgtcccttccttcccaaacagggtcagatttactgctcaaaaacgtgcagtcttggtgaagacgtccatgcctctgattcttccgactctgcatttcagtcagctcgatcaagagactcccgaagaagtgtccgaatgggcaagagcagccggtcagcagatcagtgtagacagtctctcctcttatcgcctgctctgaactacaagtttcctggcctctcaggcaatgctgatgacaccctttctcgaaaattggatgatctgagtctctccagacaaggaacaagttttgccagtgaagaattttggaaaggcagagtagagcaggaaactccagaagaccctgaagaatgggctgatcatgaagattatatgacgcagctcctcctcaagtttggtgataaaagcctctttcagccacagcccaatgagatggatattcgagccagtgagcactggatatctgataacatggttaaaagtaagaccgagttaaagcaaaataaccagagccttgcaagtaaaaaataccagtctgatatgtactgggcacagtcacaagatggactgggcgattctgcttatggcagccacccaggccctgcaagcagtagaaggcttcaggaattggaactggaccatggggcttcagggtataatcatgatgaaacacagtggtatgaagattccctggagtgtctgtcagacctgaaaccagagcaaagtgttcgggattcgatggattctttggcattgtccaatatcacaggggcttcggtggatggagaaaacaagccaaggccatcattgtattctctgcaaaattttgaggagatggaaacagaagattgtgagaagatgagcaatatgggaactttgaactcttccatgctgcacaggagtgcagagtccttaaagagtctaagttcagagttgtgtccagagaaaatcctgcctgaagagaagccagtacatctgccagtgctcagaaggtccaagtctcaatccagaccccagcaggtcaagttttctgatgatgtcattgacaatgggaactatgacattgaaatccggcagcctccgatgagtgaaaggactcggagacgcgtctacaattttgaagagaggggatccaggtctcatcaccaccgccgccggagaagtagaaagtcccgctccgacaatgccctgaatcttgttacagaaagaaaatactctcccaaggacagactgcggctgtacacccccgataactatgagaaatttatacagaataaaagtgcccgggagatccaagcatacatccagaatgctgatctctacggacagtacgcccatgccacttccgattatggcctgcagaacccaggaatgaatcggtttctgggactctacggcgaggatgatgattcctggtgttcttcctcctcctcctcttccgactcggaagaagaaggatattttcttggacaaccaatccctcaaccccggccacagagatttgcctactatacagatgacctttctagtccaccatctgcacttcccacccctcagtttggtcagaggacaacaaaatccaagaagaaaaagggacacaagggcaaaaattgtattatttcttaaccaagtagtgatgcagagcatttgtttaaaacttagccattaaccgtctgaatcgtttccttttcttccgtaggaaagttgtgaaaatagtttaaagtgctttctttgcccatgtaaatgagaactcaactgctgtttacagtgtcagattaacatttgaaaggtgtgatttctccaatttaccctctttggatggtgccaggtggacgtgacatctcgtgcctgtccggtgcgggtgcgttacagatggacgtagctgctttggttttccagtcctcaagggaatactgaagatgctgactgaaggggattggatgttgattttagaagatggagaactccagccacctttgtaaagcactagtgtttgtcatttatgtaagtcaggtcggctcaggtcttgatagtccgtcttggtgtgaggcatgcctgtcacgatgacctagctaacactgtgcatcttattgtgaggccagcttgtcccctcgaaccctctttggccaggtaaacattgtattgtatcagcgccagctacagattgaaaaaaaaaaacaaaaaacattgctatttataacttagtatttcatagacttaagtgtattcctaatttaacggtgcaaatattaatgtatatactgtacagttcagattttaaagctgatatttttatatccctgaattgtaagccgtttgttacgctgcagtgctagatttgccagggaaccagaatttatggatgaactgattgcttatattttagtcagggtttataaatgtagatggtcaaatttacattgcctagtgatggaaaattcaactttttttgatttttttttccaatattaaaaaaggctctgt

SEQ ID NO: 169040 - DNA, 3324 bp, Homo sapiens
  Payload ID: 13271
  Gene Symbol: PRICKLE1
  Gene Name: prickle homolog 1
  Uniprot ID: Q96MT3
  ENST ID: ENST00000552240
  CDS Start-End: 288-2783
atgtagtggggacccggtgcttgctgccccaccctgctggggtctcctccggaaatgagtgggtgcgggtgactcgtagggcacccagccctctgttccttcgggagtcctccgctcccgctccgggccgccagcctccttcagacgcagagcgggcgggcggctagtgcgcgccgagggctcaggggccggcgccgcgaggggctgcaggccgcgctcggccgctgtccgggccgcagcagccattgtttgatgtcctgtgactgagaaaccaggctttaaactttatgcctttggagatggagcccaagatgagcaaactggcctttggctgtcagagaagttccacatcagatgatgactctggctgtgcattggaggagtacgcctgggtccccccgggcctgagaccagagcagatccagctctattttgcttgcttaccagaggaaaaagttccttacgttaacagccccggagagaagcatcggattaaacagcttttgtaccagttaccaccacatgataatgaggtacggtattgccagtctttgagtgaagaggagaaaaaagagttgcaggtgttcagtgctcagcggaagaaagaagcactgggaagaggaacaattaagcttctgtccagagcagtcatgcatgctgtgtgtgagcagtgtggtttgaagataaatggaggtgaagttgcagtgttcgcctcccgtgcgggccctggtgtgtgctggcacccatcctgttttgtctgtttcacgtgtaatgagctgctggtcgacctcatctatttttatcaggatggaaaaattcactgtggcaggcaccatgcagaactgctcaaaccacggtgctcagcatgtgacgagataatttttgctgatgagtgcacagaagctgagggtcgccattggcacatgaaacacttctgctgccttgagtgtgaaacggtcctgggaggacagaggtatatcatgaaggacggccgccccttctgctgtggctgttttgagtctctctatgcggagtactgtgaaacctgtggggaacatattggtgtggaccatgcacagatgacctatgacgggcagcactggcacgccacggaagcctgcttttcttgtgcccagtgtaaagcctctttgttgggatgtcccttccttcccaaacagggtcagatttactgctcaaaaacgtgcagtcttggtgaagacgtccatgcctctgattcttccgactctgcatttcagtcagctcgatcaagagactcccgaagaagtgtccgaatgggcaagagcagccggtcagcagatcagtgtagacagtctctcctcttatcgcctgctctgaactacaagtttcctggcctctcaggcaatgctgatgacaccctttctcgaaaattggatgatctgagtctctccagacaaggaacaagttttgccagtgaagaattttggaaaggcagagtagagcaggaaactccagaagaccctgaagaatgggctgatcatgaagattatatgacgcagctcctcctcaagtttggtgataaaagcctctttcagccacagcccaatgagatggatattcgagccagtgagcactggatatctgataacatggttaaaagtaagaccgagttaaagcaaaataaccagagccttgcaagtaaaaaataccagtctgatatgtactgggcacagtcacaagatggactgggcgattctgcttatggcagccacccaggccctgcaagcagtagaaggcttcaggaattggaactggaccatggggcttcagggtataatcatgatgaaacacagtggtatgaagattccctggagtgtctgtcagacctgaaaccagagcaaagtgttcgggattcgatggattctttggcattgtccaatatcacaggggcttcggtggatggagaaaacaagccaaggccatcattgtattctctgcaaaattttgaggagatggaaacagaagattgtgagaagatgagcaatatgggaactttgaactcttccatgctgcacaggagtgcagagtccttaaagagtctaagttcagagttgtgtccagagaaaatcctgcctgaagagaagccagtacatctgccagtgctcagaaggtccaagtctcaatccagaccccagcaggtcaagttttctgatgatgtcattgacaatgggaactatgacattgaaatccggcagcctccgatgagtgaaaggactcggagacgcgtctacaattttgaagagaggggatccaggtctcatcaccaccgccgccggagaagtagaaagtcccgctccgacaatgccctgaatcttgttacagaaagaaaatactctcccaaggacagactgcggctgtacacccccgataactatgagaaatttatacagaataaaagtgcccgggagatccaagcatacatccagaatgctgatctctacggacagtacgcccatgccacttccgattatggcctgcagaacccaggaatgaatcggtttctgggactctacggcgaggatgatgattcctggtgttcttcctcctcctcctcttccgactcggaagaagaaggatattttcttggacaaccaatccctcaaccccggccacagagatttgcctactatacagatgacctttctagtccaccatctgcacttcccacccctcagtttggtcagaggacaacaaaatccaagaagaaaaagggacacaagggcaaaaattgtattatttcttaaccaagtagtgatgcagagcatttgtttaaaacttagccattaaccgtctgaatcgtttccttttcttccgtaggaaagttgtgaaaatagtttaaagtgctttctttgcccatgtaaatgagaactcaactgctgtttacagtgtcagattaacatttgaaaggtgtgatttctccaatttaccctctttggatggtgccaggtggacgtgacatctcgtgcctgtccggtgcgggtgcgttacagatggacgtagctgctttggttttccagtcctcaagggaatactgaagatgctgactgaaggggattggatgttgattttagaagatggagaactccagccacctttgtaaagcactagtgtttgtcatttatgtaagtcaggtcggctcaggtcttgatagtccgtcttggtgtgaggcatgcctgtcacgatgacctagctaacactgtgcatcttattgtgaggccagcttgtcccctcgaaccctctttggccaggtaaacattgtattgtatcagcgccagctacagattg

SEQ ID NO: 169041 - DNA, 8305 bp, Homo sapiens
  Payload ID: 13272
  Gene Symbol: PRICKLE2
  Gene Name: prickle homolog 2
  Uniprot ID: Q7Z3G6
  ENST ID: ENST00000295902
  CDS Start-End: 587-3121
gacttctcaggcaccaccagcagcgccaccgagagttattattattttttgaccaagcagcacatttcctggttcagtggcttgagctctgtgagcagctgactagtcaccccgggtctggctcaggatcagctggtgacgctgggctggagtctatgacttcttccttcagattgtcatgaagaaggggagttaagaggaaactgggggtcctccggaaggcgatctgagcactcaggctgatctagaggaagagtagaagtcatactttttttctcttgcttggtgaattccccagcagagtctggatccagcagtgctgttttccctgagggaatgtggagcagctcggcttgagtctgttgccagcttcaggaagggttcagactgaaaagggggtttgaggagaagatgctttggctgcctgaggtcctgcttgcgttcttagaagtcagatccagggagaaagtgaactgggacaattgacaagctccaagggtctggcagaagcttcctccgagactgggcatttcatcctccctggaggaagatctgcctgcactgcaagtgtccccaggaggagcacatggtgacagtgatgccgctggagatggagaagaccatcagcaaactcatgtttgactttcagaggaactcgacctcagatgatgactcaggctgtgctttggaagagtatgcctgggtcccgccgggtctgaagcctgaacaggtacaccagtactatagctgtctcccagaagagaaagtcccttatgtcaacagtcctggagagaaactgcgaatcaagcagctactacaccagctgccgccacatgacaatgaggttcgatattgcaactccctggatgaggaagagaagagggagctgaagcttttcagcagccagaggaaacgcgaaaacttgggccgcgggaatgtcaggcctttcccagtcaccatgacaggagctatttgtgaacagtgcggaggccagatcaatggtggagacatcgctgtgtttgcgtcacgcgctggccacggcgtttgctggcacccgccgtgcttcgtatgcactgtctgcaatgagctcctggtggatctgatctacttttaccaagatgggaagatatactgtggcaggcaccatgctgagtgcctgaagccgcgctgtgctgcctgcgatgagatcatctttgcagatgaatgcacagaagctgaggggcgacactggcacatgaaacacttttgctgcttcgagtgtgagacagtgctgggcggccagcgctacatcatgaaggagggaagaccctactgttgccactgcttcgagtccttgtatgcagaatattgtgacacctgtgcccaacatataggtatcgaccaaggtcaaatgacctatgatggccaacactggcatgccactgagacctgtttctgctgtgctcactgcaagaaatccctcctggggcggccattcctcccgaagcagggccagatattctgctcacgggcctgcagtgctggggaagaccccaatggttctgactcctctgattccgccttccagaacgccagggccaaggagtcccggcgcagtgccaaaattggcaagaacaagggcaagacggaggagcccatgctgaaccagcacagccagctgcaagtgagttctaaccggctgtcagccgacgtagaccccctgtcactgcagatggacatgctcagcctgtccagccagacacccagcctcaaccgggaccccatctggaggagccgggaagagccctaccattatgggaacaagatggagcagaaccagacccagagccctctgcagctcctcagccagtgcaacatcagaacttcctacagtccaggagggcaaggggctggggcccagcccgaaatgtggggcaagcacttcagcaaccccaaaaggagctcgtcactggccatgacaggacatgctggcagcttcatcaaggaatgccgagaagactattacccggggaggctgagatctcaggagagctacagtgatatgtctagtcagagtttcagtgagacccgaggcagcatccaagtccccaaatatgaggaggaagaggaagaggaagggggcttgtccactcagcagtgtcggacccgtcatcccatcagttccctgaaatacacagaggacatgacgcccacagagcagacccctcggggctccatggaatccctggccctgtctaatgcaacaggcctctctgctgatggtggtgccaagcgccaggagcacctatcccgattttccatgcctgacctcagcaaagactctggaatgaatgtgtctgagaagctgagcaacatgggcactcttaactcgtccatgcagttccggagcgcagagtcagttcgcagcctgctctctgcccagcagtaccaggagatggagggaaacctccaccagctcagcaaccccattggctacagagacctgcagtcccacggaaggatgcatcagagctttgattttgatggagggatggcgggcagcaagctgccagggcaggagggcgtgaggatccagcccatgagtgaacgcacccggagaagagctacttcacgcgacgacaaccgccgtttccgacctcacaggtccaggcgttcccgacgctctcgctccgacaacgccctccacctggccagcgaacgcgaggccatctcccggttaaaagataggccccctctgagagccagggaggactatgaccaatttatgcgccagcggagcttccaggagagcatggggcatgggtcccggagggacctgtacggccagtgccctaggactgtgtcggacctggctttgcagaatgcctttggggaccgctggggaccctacttcgccgagtatgattggtgttccacctgctcctcctcttcagagtctgacaacgagggctatttcctaggagaacccatcccccagccagcgcgcctgcgatacgtcacaagcgatgagctgctgcacaaatacagctcctacggcctccccaaatcttccacattaggtggcagaggacagttgcacagcaggaaaagacagaagagcaaaaactgtatcatttcttaatatgattgggatcagggaatgggagaagatgggagctaagaatgtaaagtcagaaacttgcactgttttaaatgttaaagcgcttttgggggtggcttatgggggagaaaagggaaaatgctgtcagtagatggaggcaaggttacaggttgactcaataggtagtcacagttcttggcatgttgaatattatttgcacatttcactttggaaacacagtagactctatcgaggccaggcttggtcacttccttcccatcagttctgtgttgagttgccatctctcaagatggtaaattgtttcctgctcgcttttatcctctctggttctcttacttttaggacccttttttcagtaagtaatttgtttattagccaggacccaagactaagttatttacatgtccattgtaaatgcaatgtaaatgagagttctgataaaatatttttgtattttgtaatatcaaaggaatttctatatcgtaggactcagtggggacttgcatgcacatccaccattgtctctgagtagtattgaaatgtggcccggtaccaccttttttttttttttttttttttctatacaaatttgttacatgtcagtgagacctttttcaaaggaacatattcaatttggctttttgtggctgaaaaaacataactgttagacccaaagcattttatgctccgttccatcttaaggagccatccttaagtctgctcccaccctcagtagaatttattttctacaaagtggtagtaatttttttttaaattgcaaatgtaatttttgccaattagagaaaccaaccggtgtcagtaaaattctgtgagaaatgccatccctgctgggaatgttgaagttacttaatgttgatctatcccttggggaaagtaaaagtgactgtgagtggtgccattgtgtgatgtcagcatgacgttgttttgaatgtggcattatgttctggtgctcatgtttcctggattgtattatctgctttcctttaccaaggcagacagaactgctgccttagcctgacaaccggttgtcctcaaagcaaatgaacttaagcatttgggattgagggacagaaggattctgagggggctctgcgagggacggtgtgtgacatgtcatgcctggagaaggaacaaggctatttgaaaacagaaggcaggtcaagggtagaagttaaaggagaatctgaaggcaggtcagggaaaagaagaactggaaatgaaacagaggacaggtgacaaccacctcgaagagctcccagagattgtagaaagagtccagtgtaaccagcttagtaaccagagtatctggattacccaggaaggttgagctgctgagatttcagtggtgcaatgtctttaaaaaaacaggctttgttgggagggtatttccattttgaactttgaggactgttggtcagaaaatgggctcaaaagtgagtttgcttaatgaagacatttaacggttgtgctgtttatagtaaaataaaactccctaccttgcttcagttaaaaatgaagcacttggtttcttccatcctcctcctccccttaatggattgtggcagttgaaataatccatcggatgacccacctgtagtgagatgtactgtcgatgtagtgcccggtgtatctcagtggccatctgccatggtgaggtgagcgtgatctcttttcagtatagtagttaacattttctagtattttttatggagagaatgtcaaaagtggcatttcagaccccgtcccagatgggtctgaggaaaggaaggctgtaaaggacatggtaatggcactccattcgggatgtattaaaataatttgcttttcaggtattaatatgacatttgtcattgtcactgatttttttaaaaaagcaatgcacatgttggttgtggctgttttccgcatgctatcttcatatctaaatgcttcattaattatccgagcctccggagaattaactctattacgtttgtatagtaagtttgtaaactgcttggcaaactgattaagaaataatttgcaataccgtgctactaaagtggcaggtttctggtagaaattgtgcgagtccaatttggagttttaagttccttgattgatgaaactaaaaaggcaattttggaaaaagagagggggaaaagtagatcacttatcttagcaaacggttgaaaatatgtctgtcctctgtggccccaaatccagtgaaagaaattctcccagtaaaagttgcttcctaactctgtttttctcagaatacctcttacctttctcaaagaaagcttcaaccaccatcatcagaaagaaggtggcctaaaaactgacacatggccagtgcccggaggggtctggaggcataagtctagatgcccagagagcatccaggcactgaactgctcagagcttgagatgaaatgacatacaagcttcagggtaaaactgtctactagcaagattacctccctcaattctaccattgcagatttcttctgaccccaaatgcaaccttacagagaatgctgaatgaggaaggccaattccttacaatgatggcagaacccccaagcgaatgccctattgaggagaaggacatcactgtatttggaattctgcctgctagtgatagctcacacatcacatcccagaatcccactcccaatgcattatttcctgaggcaagaacttaaggtcctcacctaattcctccatcacaaccattaactcttattggacaagctcctcctgtgagtagggcctgtactcacttcctcttagatcataattccatcttcaagagactgatttccagaatagtaatctttttccagcgttctctcttctccaatgccctggttgttatttttcccacctctcctaatattgatcttcttgtcttttggttagaactgcaacttcggagttgagttcatttcctattgctgctcaattcagtagcaacatagctggcttgttcccagacccaggaagtataagtcattgacagtttcctgagtggctctgccaatccataccacccttggtactgtgaaaaggcttcttggcagccaggtggcattgaggatggtattcagggcgctttccttctgtcatatagttgtgggatctctaccaagtgtgaaggtgaatgaggtaagggagatcagaaccatgcttcctggtttttcatacatccaaggaagaagtcctggtgtgggttgtttgacaccttctttccactttcaccttttattttttattccttcctttctacccccaaccagtcgagcaaatgagcaattttgtgtttctaatacaggatctggaagtagtgctttctaatcctcatttcctgtaggatgttcctgcactataacaagattatgttttcttccttctgcagcagctttctgcttcttgggtactactagctattgttcaattcaggtgaggcctgtgatgacatatatgtagcatgtgctctgcgctccctgcaagctgagcagatacaaccaatgcatcactgtatactcttgctgagaatgtggatgcagcctcacagatctttgcaacactccaaccagccaggaccagttgatcagaactgatcttattggtctgataaccaatcttatttgtgaactgattcatatctgtctttccactcttggttctcttgccgtagaacaaaaacagtttaggaagcataattacgaacatttaggaaccaatatgtataagtaattcggagactccaattcacctgcccctcccccatcccaggttgtggaggctcgaggaagctgacttcttaggctaaaggacaaaaaaatctctttacctccttggccattttcatgttctctgccaattactataggcagtcttcattttgcagaggtgaggtaagacttcatcttattcttcatgtaatcccaccttctaacaaaaaataaataaatatttaaattccaaggagaagtgttctttgtgtatttctagcagaaaacagatgcttaagcctaagaaggaagatccgtccatgacaaaggaaagtggaaaactgaaccagttatctgaatacttcatgccaggacagttgctattagcaactgttttgcaccttcagggctttaaaatgggctctgcagacagcatttgcatatgcaagactcagtagccaagcctccactgccaattgttgaaggcagtttcagatcgccaccttttgaggtacatttctttaagcacaagagaagtagaaatggcctttgccttgtctccagtggtttgtccctctggtgcctcagcagataccagagcttattcttatgaccatttggaagtagtcctcaaagtaaagatcaagaaaaaattggattctttttccattttctcataatagtagcctagtcaacacaagactcccataaaatatgactcactattgggagccatactattttataagcttacttcctgctgacaaaactagctttcctcaaggaaatataaaggaggggaaagtcacatagtgttaggaaaacattcctgtgttttgaatacgatgaatccataggatagagaaaaatctgcttgttctattctgagagttctctgagatatcccttcactctgcttggcatttggccattgatattcaacaggtcactgaccaagcttttctaaatttttcagagagagttacttaccagtaaggtctgttcttaaacctacctagttgattttcatatctttccataaagtgtcatgattctgtcatagaccctgacttaacattgtaaggactatgagtcctccattttttaattaatttttttttagcaaattaggacttcggcaggttttcctctcctaaactcattctttcctccacaggattgctttgtccatctcctgctttcatttcaagtgcataaacaaaacctcaaagggcctgggaaggtgaggcaggccagagtctgtgttctgtgttgagtgtcaagctatttgttaagaaggtctgcaacaggcctttggtgtgggctctgccagagactgttctgaacactttgcttgagatccgtgccctgtaaaatggatatgatgttttactgatgtctgtaatacatttgtaaacttccaataaaatttgaataaaagaaa

SEQ ID NO: 169042 - DNA, 573 bp, Homo sapiens
  Payload ID: 13272
  Gene Symbol: PRICKLE2
  Gene Name: prickle homolog 2
  ENST ID: ENST00000498162
  CDS Start-End: 122-573
aaccccctttccccggctcccccgcagtttcccgggccggcagaggcgccgcagcgtcggagcaatgcaaggctaagccgggaagatctgcctgcactgcaagtgtccccaggaggagcacatggtgacagtgatgccgctggagatggagaagaccatcagcaaactcatgtttgactttcagaggaactcgacctcagatgatgactcaggctgtgctttggaagagtatgcctgggtcccgccgggtctgaagcctgaacaggtacaccagtactatagctgtctcccagaagagaaagtcccttatgtcaacagtcctggagagaaactgcgaatcaagcagctactacaccagctgccgccacatgacaatgaggttcgatattgcaactccctggatgaggaagagaagagggagctgaagcttttcagcagccagaggaaacgcgaaaacttgggccgcgggaatgtcaggcctttcccagtcaccatgacaggagctatttgtgaacagtgcggaggccagatcaatggtggagacatcgctgtgtttgcgtcacgcgctggcca

SEQ ID NO: 169043 - DNA, 4242 bp, Homo sapiens
  Payload ID: 13272
  Gene Symbol: PRICKLE2
  Gene Name: prickle homolog 2
  ENST ID: ENST00000564377
  CDS Start-End: 11-2713
gcgtccggccatgttcagccggagctcccggaaaagactctccagccgctcgttgaccggactggggcggatagagcgaggccagccatgtaacgcctgtggtgaccagtgccctgggttcgccttgcataaatggaggaagatctgcctgcactgcaagtgtccccaggaggagcacatggtgacagtgatgccgctggagatggagaagaccatcagcaaactcatgtttgactttcagaggaactcgacctcagatgatgactcaggctgtgctttggaagagtatgcctgggtcccgccgggtctgaagcctgaacaggtacaccagtactatagctgtctcccagaagagaaagtcccttatgtcaacagtcctggagagaaactgcgaatcaagcagctactacaccagctgccgccacatgacaatgaggttcgatattgcaactccctggatgaggaagagaagagggagctgaagcttttcagcagccagaggaaacgcgaaaacttgggccgcgggaatgtcaggcctttcccagtcaccatgacaggagctatttgtgaacagtgcggaggccagatcaatggtggagacatcgctgtgtttgcgtcacgcgctggccacggcgtttgctggcacccgccgtgcttcgtatgcactgtctgcaatgagctcctggtggatctgatctacttttaccaagatgggaagatatactgtggcaggcaccatgctgagtgcctgaagccgcgctgtgctgcctgcgatgagatcatctttgcagatgaatgcacagaagctgaggggcgacactggcacatgaaacacttttgctgcttcgagtgtgagacagtgctgggcggccagcgctacatcatgaaggagggaagaccctactgttgccactgcttcgagtccttgtatgcagaatattgtgacacctgtgcccaacatataggtatcgaccaaggtcaaatgacctatgatggccaacactggcatgccactgagacctgtttctgctgtgctcactgcaagaaatccctcctggggcggccattcctcccgaagcagggccagatattctgctcacgggcctgcagtgctggggaagaccccaatggttctgactcctctgattccgccttccagaacgccagggccaaggagtcccggcgcagtgccaaaattggcaagaacaagggcaagacggaggagcccatgctgaaccagcacagccagctgcaagtgagttctaaccggctgtcagccgacgtagaccccctgtcactgcagatggacatgctcagcctgtccagccagacacccagcctcaaccgggaccccatctggaggagccgggaagagccctaccattatgggaacaagatggagcagaaccagacccagagccctctgcagctcctcagccagtgcaacatcagaacttcctacagtccaggagggcaaggggctggggcccagcccgaaatgtggggcaagcacttcagcaaccccaaaaggagctcgtcactggccatgacaggacatgctggcagcttcatcaaggaatgccgagaagactattacccggggaggctgagatctcaggagagctacagtgatatgtctagtcagagtttcagtgagacccgaggcagcatccaagtccccaaatatgaggaggaagaggaagaggaagggggcttgtccactcagcagtgtcggacccgtcatcccatcagttccctgaaatacacagaggacatgacgcccacagagcagacccctcggggctccatggaatccctggccctgtctaatgcaacaggcctctctgctgatggtggtgccaagcgccaggagcacctatcccgattttccatgcctgacctcagcaaagactctggaatgaatgtgtctgagaagctgagcaacatgggcactcttaactcgtccatgcagttccggagcgcagagtcagttcgcagcctgctctctgcccagcagtaccaggagatggagggaaacctccaccagctcagcaaccccattggctacagagacctgcagtcccacggaaggatgcatcagagctttgattttgatggagggatggcgggcagcaagctgccagggcaggagggcgtgaggatccagcccatgagtgaacgcacccggagaagagctacttcacgcgacgacaaccgccgtttccgacctcacaggtccaggcgttcccgacgctctcgctccgacaacgccctccacctggccagcgaacgcgaggccatctcccggttaaaagataggccccctctgagagccagggaggactatgaccaatttatgcgccagcggagcttccaggagagcatggggcatgggtcccggagggacctgtacggccagtgccctaggactgtgtcggacctggctttgcagaatgcctttggggaccgctggggaccctacttcgccgagtatgattggtgttccacctgctcctcctcttcagagtctgacaacgagggctatttcctaggagaacccatcccccagccagcgcgcctgcgatacgtcacaagcgatgagctgctgcacaaatacagctcctacggcctccccaaatcttccacattaggtggcagaggacagttgcacagcaggaaaagacagaagagcaaaaactgtatcatttcttaatatgattgggatcagggaatgggagaagatgggagctaagaatgtaaagtcagaaacttgcactgttttaaatgttaaagcgcttttgggggtggcttatgggggagaaaagggaaaatgctgtcagtagatggaggcaaggttacaggttgactcaataggtagtcacagttcttggcatgttgaatattatttgcacatttcactttggaaacacagtagactctatcgaggccaggcttggtcacttccttcccatcagttctgtgttgagttgccatctctcaagatggtaaattgtttcctgctcgcttttatcctctctggttctcttacttttaggacccttttttcagtaagtaatttgtttattagccaggacccaagactaagttatttacatgtccattgtaaatgcaatgtaaatgagagttctgataaaatatttttgtattttgtaatatcaaaggaatttctatatcgtaggactcagtggggacttgcatgcacatccaccattgtctctgagtagtattgaaatgtggcccggtaccaccttttttttttttttttttttttctatacaaatttgttacatgtcagtgagacctttttcaaaggaacatattcaatttggctttttgtggctgaaaaaacataactgttagacccaaagcattttatgctccgttccatcttaaggagccatccttaagtctgctcccaccctcagtagaatttattttctacaaagtggtagtaatttttttttaaattgcaaatgtaatttttgccaattagagaaaccaaccggtgtcagtaaaattctgtgagaaatgccatccctgctgggaatgttgaagttacttaatgttgatctatcccttggggaaagtaaaagtgactgtgagtggtgccattgtgtgatgtcagcatgacgttgttttgaatgtggcattatgttctggtgctcatgtttcctggattgtattatctgctttcctttaccaaggcagacagaactgctgccttagcctgacaaccggttgtcctcaaagcaaatgaacttaagcatttgggattgagggacagaaggattctgagggggctctgcgagggacggtgtgtgacatgtcatgcctggagaaggaacaaggctatttgaaaacagaaggcaggtcaagggtagaagttaaaggagaatctgaaggcaggtcagggaaaagaagaactggaaatgaaacagaggacaggtgacaaccacctcgaagagctcccagagattgtagaaagagtccagtgtaaccagcttagtaaccagagtatctggattacccaggaaggttgagctgctgagatttcagtggtgcaatgtctttaaaaaaacaggctttgttgggagggtatttccattttgaactttgaggactgttggtcagaaaatgggctcaaaagtgagtttgcttaatgaagacatttaacggttgtgctgtttatagtaaaataaaactccctaccttgcttcagtt

SEQ ID NO: 169044 - DNA, 524 bp, Homo sapiens
  Payload ID: 13272
  Gene Symbol: PRICKLE2
  Gene Name: prickle homolog 2
  ENST ID: ENST00000569824
  CDS Start-End: 105-524
agccaggccagcggccgccgagggtgcccgcccaggctacccgccctcccggccgcggcgcggacggaccgacggacggcgctgcgagcaggaggcgtccggccatgttcagccggagctcccggaaaagactctccagccgctcggtgagtgtcccccgctcgagcggggccgatcgccgggcacctccagccggccgcgagcgcccgcgcgcagccccactgcgccccgcggctgcgcacctgtggccccagttgaccggactggggcggatagagcgaggccagccatgtaacgcctgtggtgaccagtgccctgggttcgccttgcataaatggaggaagatctgcctgcactgcaagtgtccccaggaggagcacatggtgacagtgatgccgctggagatggagaagaccatcagcaaactcatgtttgactttcagaggaactcgacctcagatgatgactcaggctgtgctttggaagagtatgcctgggtcccgccgggtctgaagcctgaacag

SEQ ID NO: 169045 - DNA, 574 bp, Homo sapiens
  Payload ID: 13273
  Gene Symbol: PRICKLE3
  Gene Name: prickle homolog 3
  ENST ID: ENST00000376317
  CDS Start-End: 232-574
agaggcctttcccgcggggcactccgggctacgtgcagttcacctctaggcagggggcgccctggcagcggagagaccacatgcccgggggcgggccctgcggggcgcgctcctcccacgagggtgtcaggtttacggaaccgagttcccaggccggacgcgcggtggcctgacggtcgcaaggattacattcgcctgacccggcccggcttgaccctgcccgggcgcgccatgttcgcgcgtgggtcccggaggcgccgctccgggcgtgcgcctccagaggcagaggacccagaccggggccagccctgcaactcctgtagggagcagtgccctggcttcctgctccacggctggagaaagatctgccagcattgcaaatgcccgcgggaggagcatgcagtgcacgcggtgcctgtggacctggaacgcatcatgtgtcggctaatctcggacttccagcgccactccatctccgacgacgactcaggctgtgcatcggaggagtatgcctgggtgcccccaggccttaagccggagcagttgttttctcccactcctatgtcctcccagg

SEQ ID NO: 169046 - DNA, 1937 bp, Homo sapiens
  Payload ID: 13273
  Gene Symbol: PRICKLE3
  Gene Name: prickle homolog 3
  ENST ID: ENST00000453382
  CDS Start-End: 242-1885
agtggaggggcgggcgttgacttctccttccctgcttccgcgcctcacccggccctgcatctgcccccgcccactgcagcctccagaggcagaggacccagaccggggccagccctgcaactcctgtagggagcagtgccctggcttcctgctccacggctggagaaagatctgccagcattgcaaatgcccgcgggaggagcatgcagtgcacgcggtgcctgtggacctggaacgcatcatgtgtcggctaatctcggacttccagcgccactccatctccgacgacgactcaggctgtgcatcggaggagtatgcctgggtgcccccaggccttaagccggagcaggtatatcaatttttcagctgcctcccagaggacaaggtcccctacgtcaacagtcctggggagaaatacaggatcaagcagctgctgcaccagctgcccccacacgacagtgaggcacagtactgcacagcactggaagaggaggaaaagaaagagctccgagcctttagccagcagcggaagcgggagaatctggggcgtggcatcgtgcgcatcttcccggtgaccatcactggggccatctgtgaggagtgcggaaagcagattggaggtggggacatcgcagtgtttgccagccgtgcaggcctgggtgcctgctggcacccacagtgcttcgtgtgtaccacgtgccaggaactgctggttgacctcatctacttctaccatgttggcaaggtctactgcgggcgtcaccatgccgaatgcctgcgtccacgctgccaagcctgtgacgagatcatcttctcccctgagtgcacggaggctgagggccgccactggcacatggatcacttctgctgctttgagtgtgaagcttcactaggagggcagcgctatgtcatgcgtcagagccgcccccactgctgcgcctgctacgaggcccgccacgcggagtactgtgatggctgtggggagcacatcggcctggaccaaggccagatggcttacgagggccagcactggcatgcctcagaccgctgcttctgctgtagtcgctgtgggcgggccctgctgggccgcccattcctgccacgccgaggcctaatcttctgctctcgagcctgcagccttgggtccgagcccacagctccagggccgagccgccgcagctggagtgccggccctgtcacagccccacttgcagcctccacagcctctttctctgctgtgaagggggcatcagagaccaccaccaaaggcaccagcacagagttagcgccagctacaggccctgaggagccctcccgctttctgagaggggctccccaccgccactccatgccggaactggggctccgcagtgtccccgagccgcccccagagtcccccggccagcctaacctgcgcccagatgatagtgccttcggtcgtcagagcaccccacgcgtcagcttccgcgaccctctggtgtctgaaggaggcccgcgccggaccctgagtgcacccccggcccagcgccgcaggccacgcagtcccccacccagggcccccagccgtcgccgccaccatcatcataatcaccatcaccatcacaaccgccacccaagcagacgtcgccactatcaatgtgacgcgggatcagggtcagactcggaatcttgctccagctcgccctccagttccagttccgaatcatcagaggatgatggcttcttcctaggagagcgcatccctctgcccccgcatttgtgcaggcccatgcctgctcaggacactgcaatggagaccttcaactccccatctttatcgctccccagggactctcgcgcagggatgcctcgtcaggcccgagacaagaactgcatcgtggcttgaaggcaggccgtcctggagggggctccattctccagtcagagtagatgatgag

SEQ ID NO: 169047 - DNA, 990 bp, Homo sapiens
  Payload ID: 13273
  Gene Symbol: PRICKLE3
  Gene Name: prickle homolog 3
  ENST ID: ENST00000432913
  CDS Start-End: 236-990
cccgcctctgcctcggttgtgtcccgctcccccgcactctgggcgctgtcccagcctgcccagcgctgcccagcctccagaggcagaggacccagaccggggccagccctgcaactcctgtagggagcagtgccctggcttcctgctccacggctggagaaagatctgccagcattgcaaatgcccgcgggaggagcatgcagtgcacgcggtgcctgtggacctggaacgcatcatgtgtcggctaatctcggacttccagcgccactccatctccgacgacgactcaggctgtgcatcggaggagtatgcctgggtgcccccaggccttaagccggagcaggtatatcaatttttcagctgcctcccagaggacaaggtcccctacgtcaacagtcctggggagaaatacaggatcaagcagctgctgcaccagctgcccccacacgacagtgaggcacagtactgcacagcactggaagaggaggaaaagaaagagctccgagcctttagccagcagcggaagcgggagaatctggggcgtggcatcgtgcgcatcttcccggtgaccatcactggggccatctgtgaggagtgcggaaagcagattggaggtggggacatcgcagtgtttgccagccgtgcaggcctgggtgcctgctggcacccacagtgcttcgtgtgtaccacgtgccaggaactgctggttgacctcatctacttctaccatgttggcaaggtctactgcgggcgtcaccatgccgaatgcctgcgtccacgctgccaagcctgtgacgagatcatcttctcccctgagtgcacggaggctgagggccgccactggcacatggatcacttctgctgctttgagtgtgaagcttcactaggagggcagcgctatgtcatgcgtcagagccgcccccactgctgcgcctgctacgaggcccgccacgcggagtactgtgatggctgtggggagcacatcggtgg

SEQ ID NO: 169048 - DNA, 2246 bp, Homo sapiens
  Payload ID: 13273
  Gene Symbol: PRICKLE3
  Gene Name: prickle homolog 3
  ENST ID: ENST00000540849
  CDS Start-End: 231-527
ctctgcctcggttgtgtcccgctcccccgcactctgggcgctgtcccagcctgcccagcgctgcccagcctccagaggcagaggacccagaccggggccagccctgcaactcctgtagggagcagtgccctggcttcctgctccacggctggagaaagatctgccagcattgcaaatgcccgcgggaggagcatgcagtgcacgcggtgcctgtggacctggaacgcatcatgtgtcggctaatctcggacttccagcgccactccatctccgacgacgactcaggctgtgcatcggaggagtatgcctgggtgcccccaggccttaagccggagcaggtgaccagaggccagccctccactcttgctgtccagtgggtgcacactaatgctcacacacacacacacacactcaggcacagtactgcacagcactggaagaggaggaaaagaaagagctccgagcctttagccagcagcggaagcgggagaatctggggcgtggcatcgtgcgcatcttcccggtgaccatcactggggccatctgtgaggagtgcggaaagcagattggaggtggggacatcgcagtgtttgccagccgtgcaggcctgggtgcctgctggcacccacagtgcttcgtgtgtaccacgtgccaggaactgctggttgacctcatctacttctaccatgttggcaaggtctactgcgggcgtcaccatgccgaatgcctgcgtccacgctgccaagcctgtgacgagatcatcttctcccctgagtgcacggaggctgagggccgccactggcacatggatcacttctgctgctttgagtgtgaagcttcactaggagggcagcgctatgtcatgcgtcagagccgcccccactgctgcgcctgctacgaggcccgccacgcggagtactgtgatggctgtggggagcacatcggcctggaccaaggccagatggcttacgagggccagcactggcatgcctcagaccgctgcttctgctgtagtcgctgtgggcgggccctgctgggccgcccattcctgccacgccgaggcctaatcttctgctctcgagcctgcagccttgggtccgagcccacagctccagggccgagccgccgcagctggagtgccggccctgtcacagccccacttgcagcctccacagcctctttctctgctgtgaagggggcatcagagaccaccaccaaaggcaccagcacagagttagcgccagctacaggccctgaggagccctcccgctttctgagaggggctccccaccgccactccatgccggaactggggctccgcagtgtccccgagccgcccccagagtcccccggccagcctaacctgcgcccagatgatagtgccttcggtcgtcagagcaccccacgcgtcagcttccgcgaccctctggtgtctgaaggaggcccgcgccggaccctgagtgcacccccggcccagcgccgcaggccacgcagtcccccacccagggcccccagccgtcgccgccaccatcatcataatcaccatcaccatcacaaccgccacccaagcagacgtcgccactatcaatgtgacgcgggatcagggtcagactcggaatcttgctccagctcgccctccagttccagttccgaatcatcagaggatgatggcttcttcctaggagagcgcatccctctgcccccgcatttgtgcaggcccatgcctgctcaggacactgcaatggagaccttcaactccccatctttatcgctccccagggactctcgcgcagggatgcctcgtcaggcccgagacaagaactgcatcgtggcttgaaggcaggccgtcctggagggggctccattctccagtcagagtagatgatgaggcccatgcccctcacccccacgccccgcccctacaacctaagtcataaatcctcttcctccctcctttatcagtttgtttctatttttgtttctgttttagagacttggtctaccctattgcccaggctggagtgcagtggtgtgatcagggctcactgcagcctcaaaagttttgggctcaagctatcctcccacctcagcctcccaagtagctgggactccaggctcgtgtcagcgttcccagctaattttttaattttttggtagagatggggttttgccatgttgcccaggctggtctagaactcctgggctcaagcaatcctcccgcagcctcccaaaggactgggattaca

SEQ ID NO: 169049 - DNA, 2062 bp, Homo sapiens
  Payload ID: 13273
  Gene Symbol: PRICKLE3
  Gene Name: prickle homolog 3
  Uniprot ID: O43900
  ENST ID: ENST00000599218
  CDS Start-End: 96-1943
ggaaccgagttcccaggccggacgcgcggtggcctgacggtcgcaaggattacattcgcctgacccggcccggcttgaccctgcccgggcgcgccatgttcgcgcgtgggtcccggaggcgccgctccgggcgtgcgcctccagaggcagaggacccagaccggggccagccctgcaactcctgtagggagcagtgccctggcttcctgctccacggctggagaaagatctgccagcattgcaaatgcccgcgggaggagcatgcagtgcacgcggtgcctgtggacctggaacgcatcatgtgtcggctaatctcggacttccagcgccactccatctccgacgacgactcaggctgtgcatcggaggagtatgcctgggtgcccccaggccttaagccggagcaggtatatcaatttttcagctgcctcccagaggacaaggtcccctacgtcaacagtcctggggagaaatacaggatcaagcagctgctgcaccagctgcccccacacgacagtgaggcacagtactgcacagcactggaagaggaggaaaagaaagagctccgagcctttagccagcagcggaagcgggagaatctggggcgtggcatcgtgcgcatcttcccggtgaccatcactggggccatctgtgaggagtgcggaaagcagattggaggtggggacatcgcagtgtttgccagccgtgcaggcctgggtgcctgctggcacccacagtgcttcgtgtgtaccacgtgccaggaactgctggttgacctcatctacttctaccatgttggcaaggtctactgcgggcgtcaccatgccgaatgcctgcgtccacgctgccaagcctgtgacgagatcatcttctcccctgagtgcacggaggctgagggccgccactggcacatggatcacttctgctgctttgagtgtgaagcttcactaggagggcagcgctatgtcatgcgtcagagccgcccccactgctgcgcctgctacgaggcccgccacgcggagtactgtgatggctgtggggagcacatcggcctggaccaaggccagatggcttacgagggccagcactggcatgcctcagaccgctgcttctgctgtagtcgctgtgggcgggccctgctgggccgcccattcctgccacgccgaggcctaatcttctgctctcgagcctgcagccttgggtccgagcccacagctccagggccgagccgccgcagctggagtgccggccctgtcacagccccacttgcagcctccacagcctctttctctgctgtgaagggggcatcagagaccaccaccaaaggcaccagcacagagttagcgccagctacaggccctgaggagccctcccgctttctgagaggggctccccaccgccactccatgccggaactggggctccgcagtgtccccgagccgcccccagagtcccccggccagcctaacctgcgcccagatgatagtgccttcggtcgtcagagcaccccacgcgtcagcttccgcgaccctctggtgtctgaaggaggcccgcgccggaccctgagtgcacccccggcccagcgccgcaggccacgcagtcccccacccagggcccccagccgtcgccgccaccatcatcataatcaccatcaccatcacaaccgccacccaagcagacgtcgccactatcaatgtgacgcgggatcagggtcagactcggaatcttgctccagctcgccctccagttccagttccgaatcatcagaggatgatggcttcttcctaggagagcgcatccctctgcccccgcatttgtgcaggcccatgcctgctcaggacactgcaatggagaccttcaactccccatctttatcgctccccagggactctcgcgcagggatgcctcgtcaggcccgagacaagaactgcatcgtggcttgaaggcaggccgtcctggagggggctccattctccagtcagagtagatgatgaggcccatgcccctcacccccacgccccgcccctacaacctaagtcataaatcctcttcctccctcctt

SEQ ID NO: 169050 - DNA, 2871 bp, Homo sapiens
  Payload ID: 13274
  Gene Symbol: PRICKLE4
  Gene Name: prickle homolog 4
  Uniprot ID: Q2TBC4
  ENST ID: ENST00000335515
  CDS Start-End: 588-1742
aaaaactctggggatctatcgagagggcagttggcgggactgggcactccccttccttctccctcccactgtccccagaaatcttcccatccctccacctccccaagccctaagtcctctcgggctctgcccttcagggcagcgggtgttggggatgtccagctcctgagccctcttgcacggaggctctgcacggaggcaagacaaggggttcagctctgtcccttatctgaggtgggagggggaagggaattatggaaggaatccagctggcctgttagtaagggtgttccagtgctaggtggaggtggagtttggctgcctttggggagattggaagggtgaggaatagaggcctgatttctgagtgttgtttctgtgttggacaattctatgcaaactagagccaaaatggaagagggtgcaagtcccctcctggggccccagacgccccctcctttcttgctgcctggagcaggggcagtgctgttagtggctactcctggtgtgaacagcccatcctggccaccttccacaggaaacctgacctgaaggacagaagaggaaggaagcaggctttgccacaaatgtcagtgcagaactctggctggccccaccaagaagacagccccaagccccaggatccaggtccaccagccaactcagacagtgactcaggccacctgccgggggaggaccctgaggatacccatgctcagggtcctgcagttctgagcttgggttccctttgcctggacaccaaccaagcccccaactggactggacttcagaccctcctgcagcaactccctccgcaggacattgatgagcgctactgcctggcccttggggaggaggagcgggccgagctgcagctcttctgtgccaggcggaagcaggaagccctgggacagggggtagcccgcctggtacttcccaagcttgaaggacacacctgtgagaagtgtagggagctgctgaagccaggggagtacggagtgtttgcagcccgggcaggggaacagcgctgctggcaccagccttgctttgcctgccaggcctgtggccaggccctgataaacctcatctacttctaccatgatggacaactctactgcggccgtcatcatgcagagttgctgcgcccgcgctgcccggcttgtgaccagctgatcttctcctggcgctgcaccgaggcggagggacagcgctggcatgagaaccacttctgttgccaggactgcgccgggcctctgggcgggggacgttatgccctgcctgggggaagcccctgctgccccagctgcttcgagaaccgctactcggatgcaggctcgagctgggccggggcactggaagggcaggcattccttggggagactggactcgaccgaactgaaggaagggaccaaacctcggtgaactctgcaaccctctcccgaacactcctcgctgctgccggcggttccagcctgcaaactcagagggggctgcctggatccagtccccagcaggagaaccgacctggggacaaagcggaggcacccaaagggcaggagcaatgccgcctggagactattcgtgatcccaaggacacccctttctccacctgctcctcctcctctgactcggaacctgaaggatttttcttaggcgagcgccttccccagtcctggaagacccccggaagcctccaagcagaggacagcaacgcctctaagacgcactgcaccatgtgctagtggcgcagctcagagaggggatgtgagtgggaggaaaggggtctgtaaagcgggagaacaaggctagcctccccctaacaatcctagactgagacgcagtcaggcgcacgcccgcaagaggcggcgaggtgacaagtttggagtgcgcccccttcagtactgcgcgttctaagacttttggcggagactttcttggcaaaacccattccccaaagctacgcttcccctgctgagatagcccctacccccacctccacaggctgggacagccccgtccccaccatcctcctcccaagccaattaaatgatcacagcacgcgtgacagttaccggctggagagccggaggtgggaccgggagcaggggaccgtagaaccgggccgcgctcctcccctcctagagttcgtggaggcgcagcagagggccgtccctcttccggatgtcggactaagcgaacagcgcccccactgccggccggtagcagccggaagtgccagaccggaggtgcgtcattcaccggcgacgccgatacggttcctccaccgaggcccatgcgaagctttccactatggcttccagcactgtcccggtgagcgctgctggctcggctaatgaaactcccgaaataccggacaacgtgggagattggcttcggggcgtctaccgctttgccactgataggaatgacttccggaggaacttgatactaaatttgggactctttgctgcgggagtttggctggccaggaacttgagtgacattgacctcatggcacctcagccaggggtgtagccaagtagacaaatggaatcctgtgctgaacccgaatcttccaaaaaacagcctacaatctgtgaccaccacaagatgtgccctgatggcagctgaagtttgattcagatgggcacttttcttccccttccctgcctagtttccttttgttccttgagtccacgcagaattccattctctggtcagcagacaggcttaagctaaagtattgcctctattctgtaaagttctgtacatagttcccaagcttctgcagggggtgatttttgctcttgtcctgagaaataacagtgctgttttaaaaaacatttgaaataaataccgcacacaaaggca

SEQ ID NO: 169051 - DNA, 2098 bp, Homo sapiens
  Payload ID: 13274
  Gene Symbol: PRICKLE4
  Gene Name: prickle homolog 4
  Uniprot ID: Q2TBC4
  ENST ID: ENST00000359201
  CDS Start-End: 821-1855
tggaagagggtgcaagtcccctcctggggccccagacgccccctcctttcttgctgcctggagcaggggcagtgctgttagtggctactcctggtgtgaacagcccatcctggccaccttccacaggaaacctgacctgaaggacagaagaggaaggaagcaggctttgccacaaatgtcagtgcagaactctggctggccccaccaagaagacagccccaagccccaggatccaggtccaccagccaactcagacagtgactcaggccacctgccgggggaggaccctgaggatacccatgctcaggtagtagagtcgtgcccttcctctgagaccaacatgtcctctatcctgtggagtggccacccttttccaccaacccggaggtagtttgacttcgtgcctaatctcttgttgcctttttctcttttcaggaattcctgtctctgcacctgcttagaacatggggttttgactttaaactcattcacatgagtattcattatctctcctagggggtctgtattgtcaaaccagactctaggggctttggccccaaggcgtgaagggggttaagaagggaaagcataagaagggaagctgttttggggtgtggggcctccccagcctccctcaaggaagaccacacatgcaggcatcagtcagctatccttgcactcagtgaggatctgcaaggaggaccctcccaaatggagggcatgcttagaagctgctctagattggagaagaggtggcaatgatgagggggaaagaaggagaaaggaaagaaaaacctagtttcactcctccccttcttccatgtctcctcagggtcctgcagttctgagcttgggttccctttgcctggacaccaaccaagcccccaactggactggacttcagaccctcctgcagcaactccctccgcaggacattgatgagcgctactgcctggcccttggggaggaggagcgggccgagctgcagctcttctgtgccaggcggaagcaggaagccctgggacagggggtagcccgcctggtacttcccaagcttgaaggacacacctgtgagaagtgtagggagctgctgaagccaggggagtacggagtgtttgcagcccgggcaggggaacagcgctgctggcaccagccttgctttgcctgccaggcctgtggccaggccctgataaacctcatctacttctaccatgatggacaactctactgcggccgtcatcatgcagagttgctgcgcccgcgctgcccggcttgtgaccagctgatcttctcctggcgctgcaccgaggcggagggacagcgctggcatgagaaccacttctgttgccaggactgcgccgggcctctgggcgggggacgttatgccctgcctgggggaagcccctgctgccccagctgcttcgagaaccgctactcggatgcaggctcgagctgggccggggcactggaagggcaggcattccttggggagactggactcgaccgaactgaaggaagggaccaaacctcggtgaactctgcaaccctctcccgaacactcctcgctgctgccggcggttccagcctgcaaactcagagggggctgcctggatccagtccccagcaggagaaccgacctggggacaaagcggaggcacccaaagggcaggagcaatgccgcctggagactattcgtgatcccaaggacacccctttctccacctgctcctcctcctctgactcggaacctgaaggatttttcttaggcgagcgccttccccagtcctggaagacccccggaagcctccaagcagaggacagcaacgcctctaagacgcactgcaccatgtgctagtggcgcagctcagagaggggatgtgagtgggaggaaaggggtctgtaaagcgggagaacaaggctagcctccccctaacaatcctagactgagacgcagtcaggcgcacgcccgcaagaggcggcgaggtgacaagtttggagtgcgcccccttcagtactgcgcgttctaagacttttggcggagactttcttggcaaaacccattccccaaagctacgcttcccctgctgagatagcccct

SEQ ID NO: 169052 - DNA, 939 bp, Homo sapiens
  Payload ID: 13274
  Gene Symbol: PRICKLE4
  Gene Name: prickle homolog 4
  ENST ID: ENST00000394259
  CDS Start-End: 1-939
atgtctcctcagggtcctgcagttctgagcttgggttccctttgcctggacaccaaccaagcccccaactggactggacttcagaccctcctgcagcaactccctccgcaggacattgatgagcgctactgcctggcccttggggaggaggagcgggccgagctgcagctcttctgtgccaggcggaagcaggaagccctgggacagggggtagcccgcctggtacttcccaagcttgaaggacacacctgtgagaagtgtagggagctgctgaagccaggggagtacggagtgtttgcagcccgggcaggggaacagcgctgctggcaccagccttgctttgcctgccaggcctgtggccaggccctgataaacctcatctacttctaccatgatggacaactctactgcggccgtcatcatgcagagttgctgcgcccgcgctgcccggcttgtgaccagctgatcttctcctggcgctgcaccgaggcggagggacagcgctggcatgagaaccacttctgttgccaggactgcgccgggcctctgggcgggggacgttatgccctgcctgggggaagcccctgctgccccagctgcttcgagaaccgctactcggatgcaggctcgagctgggccggggcactggaagggcaggcattccttggagcgcccccaccgcaccccccagacccaagcctcggggcccgcagctctcaccgcgcatccctggccggagcgttccaagggccgcccgaacccaccccgcgccgcggtcggggttgcggcgccagactccctcccaggcgcgggaggcggacgccctctggtggaggcgggggaccctggcgaggactctcggcggcggcggcggcgcgcacggcccaggggctgggcggggcgggaggctgggcctcacccccactagctgcggtgtag

SEQ ID NO: 169053 - DNA, 1035 bp, Homo sapiens
  Payload ID: 13274
  Gene Symbol: PRICKLE4
  Gene Name: prickle homolog 4
  ENST ID: ENST00000394260
  CDS Start-End: 1-1035
atgtctcctcagggtcctgcagttctgagcttgggttccctttgcctggacaccaaccaagcccccaactggactggacttcagaccctcctgcagcaactccctccgcaggacattgatgagcgctactgcctggcccttggggaggaggagcgggccgagctgcagctcttctgtgccaggcggaagcaggaagccctgggacagggggtagcccgcctggtacttcccaagcttgaaggacacacctgtgagaagtgtagggagctgctgaagccaggggagtacggagtgtttgcagcccgggcaggggaacagcgctgctggcaccagccttgctttgcctgccaggcctgtggccaggccctgataaacctcatctacttctaccatgatggacaactctactgcggccgtcatcatgcagagttgctgcgcccgcgctgcccggcttgtgaccagctgatcttctcctggcgctgcaccgaggcggagggacagcgctggcatgagaaccacttctgttgccaggactgcgccgggcctctgggcgggggacgttatgccctgcctgggggaagcccctgctgccccagctgcttcgagaaccgctactcggatgcaggctcgagctgggccggggcactggaagggcaggcattccttggggagactggactcgaccgaactgaaggaagggaccaaacctcggtgaactctgcaaccctctcccgaacactcctcgctgctgccggcggttccagcctgcaaactcagagggggctgcctggatccagtccccagcaggagaaccgacctggggacaaagcggaggcacccaaagggcaggagcaatgccgcctggagactattcgtgatcccaaggacacccctttctccacctgctcctcctcctctgactcggaacctgaaggatttttcttaggcgagcgccttccccagtcctggaagacccccggaagcctccaagcagaggacagcaacgcctctaagacgcactgcaccatgtgctag

SEQ ID NO: 169054 - DNA, 1155 bp, Homo sapiens
  Payload ID: 13274
  Gene Symbol: PRICKLE4
  Gene Name: prickle homolog 4
  ENST ID: ENST00000394263
  CDS Start-End: 1-1155
atgtcagtgcagaactctggctggccccaccaagaagacagccccaagccccaggatccaggtccaccagccaactcagacagtgactcaggccacctgccgggggaggaccctgaggatacccatgctcagggtcctgcagttctgagcttgggttccctttgcctggacaccaaccaagcccccaactggactggacttcagaccctcctgcagcaactccctccgcaggacattgatgagcgctactgcctggcccttggggaggaggagcgggccgagctgcagctcttctgtgccaggcggaagcaggaagccctgggacagggggtagcccgcctggtacttcccaagcttgaaggacacacctgtgagaagtgtagggagctgctgaagccaggggagtacggagtgtttgcagcccgggcaggggaacagcgctgctggcaccagccttgctttgcctgccaggcctgtggccaggccctgataaacctcatctacttctaccatgatggacaactctactgcggccgtcatcatgcagagttgctgcgcccgcgctgcccggcttgtgaccagctgatcttctcctggcgctgcaccgaggcggagggacagcgctggcatgagaaccacttctgttgccaggactgcgccgggcctctgggcgggggacgttatgccctgcctgggggaagcccctgctgccccagctgcttcgagaaccgctactcggatgcaggctcgagctgggccggggcactggaagggcaggcattccttggggagactggactcgaccgaactgaaggaagggaccaaacctcggtgaactctgcaaccctctcccgaacactcctcgctgctgccggcggttccagcctgcaaactcagagggggctgcctggatccagtccccagcaggagaaccgacctggggacaaagcggaggcacccaaagggcaggagcaatgccgcctggagactattcgtgatcccaaggacacccctttctccacctgctcctcctcctctgactcggaacctgaaggatttttcttaggcgagcgccttccccagtcctggaagacccccggaagcctccaagcagaggacagcaacgcctctaagacgcactgcaccatgtgctag

SEQ ID NO: 169055 - DNA, 3947 bp, Homo sapiens
  Payload ID: 13274
  Gene Symbol: PRICKLE4
  Gene Name: prickle homolog 4
  ENST ID: ENST00000456057
  CDS Start-End: 662-874
cggggctgggagaccacagggagagtttggggagacctgggaactgcggagagacagggctgcgggcccggcgaggcgtttccattcagcgaatggttgaaaacccagcgtaaacgcggctcccggcgtctgctggatgcctgccgggcgcagtccgagccagagagcccttgcacctgcatggcagaggccatggagcccgcacatttccaccctgagatcccataaatgtggttttgttttccttttttttttcctccccccaatctgcagctccaggcccctccctgagccgcccctctccaccagccggggaggggcgggcgggggccgctggggcgtgggagaggaagggccgcgctattagggcgggcgggggcggacgggggcgggcgctgaagccttggggtggggaccgggtgaggggcctgacggcagagtcggtccagaactgcccggacagcgacgcacagcgaggagccaaaatggaagagggtgcaagtcccctcctggggccccagacgccccctcctttcttgctgcctggagcaggggcagtgctgttagtggctactcctggtgtgaacagcccatcctggccaccttccacaggaaacctgacctgaaggacagaagaggaaggaagcaggctttgccacaaatgtcagtgcagaactctggctggccccaccaagaagacagccccaagccccaggatccaggtccaccagccaactcagacagtgactcaggccacctgccgggggaggaccctgaggatacccatgctcaggaattcctgtctctgcacctgcttagaacatggggttttgactttaaactcattcacatgagtattcattatctctcctagggggtctgtattgtcaaaccagactctaggggctttggccccaaggcgtgaagggggttaagaagggaaagcataagaagggaagctgttttggggtgtggggcctccccagcctccctcaaggaagaccacacatgcaggcatcagtcagctatccttgcactcagtgaggatctgcaaggaggaccctcccaaatggagggcatgcttagaagctgctctagattggagaagaggtggcaatgatgagggggaaagaaggagaaaggaaagaaaaacctagtttcactcctccccttcttccatgtctcctcagggtcctgcagttctgagcttgggttccctttgcctggacaccaaccaagcccccaactggactggacttcagaccctcctgcagcaactccctccgcaggacattgatgagcgctactgcctggcccttggggaggaggagcgggccgagctgcagctcttctgtgccaggcggaagcaggaagccctgggacagggggtagcccgcctggtacttcccaagcttgaaggacacacctgtgagaagtgtagggagctgctgaagccaggggagtacggagtgtttgcagcccgggcaggggaacagcgctgctggcaccagccttgctttgcctgccaggcctgtggccaggccctgataaacctcatctacttctaccatgatggacaactctactgcggccgtcatcatgcagagttgctgcgcccgcgctgcccggcttgtgaccagctgatcttctcctggcgctgcaccgaggcggagggacagcgctggcatgagaaccacttctgttgccaggactgcgccgggcctctgggcgggggacgttatgccctgcctgggggaagcccctgctgccccagctgcttcgagaaccgctactcggatgcaggctcgagctgggccggggcactggaagggcaggcattccttggagcgcccccaccgcaccccccagacccaagcctcggggcccgcagctctcaccgcgcatccctggccggagcgttccaagggccgcccgaacccaccccgcgccgcggtcggggttgcggcgccagactccctcccaggcgcgggaggcggacgccctctggtggaggcgggggaccctggcgaggactctcggcggcggcggcggcgcgcacggcccaggggctgggcggggcgggaggctgggcctcacccccactagctgcggtgtaggtccagctccgcggctctgagaccagcgtttccgacccggcccggaacaggggagactggactcgaccgaactgaaggaagggaccaaacctcggtgaactctgcaaccctctcccgaacactcctcgctgctgccggcggttccagcctgcaaactcagagggggctgcctggatccagtccccagcaggagaaccgacctggggacaaagcggaggcacccaaagggcaggagcaatgccgcctggagactattcgtgatcccaaggacacccctttctccacctgctcctcctcctctgactcggaacctgaaggatttttcttaggcgagcgccttccccagtcctggaagacccccggaagcctccaagcagaggacagcaacgcctctaagacgcactgcaccatgtgctagtggcgcagctcagagaggggatgtgagtgggaggaaaggggtctgtaaagcgggagaacaaggctagcctccccctaacaatcctagactgagacgcagtcaggcgcacgcccgcaagaggcggcgaggtgacaagtttggagtgcgcccccttcagtactgcgcgttctaagacttttggcggagactttcttggcaaaacccattccccaaagctacgcttcccctgctgagatagcccctacccccacctccacaggctgggacagccccgtccccaccatcctcctcccaagccaattaaatgatcacagcacgcgtgacagttaccggctggagagccggaggtgggaccgggagcaggggaccgtagaaccgggccgcgctcctcccctcctagagttcgtggaggcgcagcagagggccgtccctcttccggatgtcggactaagcgaacagcgcccccactgccggccggtagcagccggaagtgccagaccggaggtgcgtcattcaccggcgacgccgatacggttcctccaccgaggcccatgcgaagctttccactatggcttccagcactgtcccggtgagcgctgctggctcggctaatgaaactcccgaaataccggacaacgtgggagattggcttcggggcgtctaccgctttgccactgataggaatgacttccggaggaacttgatactaaatttgggactctttgctgcgggagtttggctggccaggaacttgagtgacattgacctcatggcacctcagccaggggtgtagccaagtagttctaatgccacctgtcgtcttatcatctgattgcagacaaatggaatcctgtgctgaacccgaatcttccaaaaaacagcctacaatctgtgaccaccacaagatgtgccctgatggcagctgaagtttgattcagatgggcacttttcttccccttccctgcctagtttccttttgttccttgagtccacgcagaattccattctctggtcagcagacaggcttaagctaaagtattgcctctattctgtaaagttctgtacatagttcccaagcttctgcagggggtgatttttgctcttgtcctgagaaataacagtgctgttttaaaaaacatttgaaataaataccgcacacaaaggcagtcattttattcttttaataagaaacttttgcttacaaaaacaaggtgtaaaaagatttacaaaaatcataaaaacatgatttatatttcacacttgagagacaaaaacaagccccaaaacatggattttaatggaggtggtttgcttcattttaaaagggaaaaaaaaaaaaggaagctgtaaccatacattgatgttaacctagcatgaagtttattcttgaagaatttacattgttgagcaat

SEQ ID NO: 169056 - DNA, 1646 bp, Homo sapiens
  Payload ID: 13274
  Gene Symbol: PRICKLE4
  Gene Name: prickle homolog 4
  Uniprot ID: Q2TBC4
  ENST ID: ENST00000458694
  CDS Start-End: 249-1403
gaccgggtgaggggcctgacggcagagtcggtccagaactgcccggacagcgacgcacagcgaggagccaaaatggaagagggtgcaagtcccctcctggggccccagacgccccctcctttcttgctgcctggagcaggggcagtgctgttagtggctactcctggtgtgaacagcccatcctggccaccttccacaggaaacctgacctgaaggacagaagaggaaggaagcaggctttgccacaaatgtcagtgcagaactctggctggccccaccaagaagacagccccaagccccaggatccaggtccaccagccaactcagacagtgactcaggccacctgccgggggaggaccctgaggatacccatgctcagggtcctgcagttctgagcttgggttccctttgcctggacaccaaccaagcccccaactggactggacttcagaccctcctgcagcaactccctccgcaggacattgatgagcgctactgcctggcccttggggaggaggagcgggccgagctgcagctcttctgtgccaggcggaagcaggaagccctgggacagggggtagcccgcctggtacttcccaagcttgaaggacacacctgtgagaagtgtagggagctgctgaagccaggggagtacggagtgtttgcagcccgggcaggggaacagcgctgctggcaccagccttgctttgcctgccaggcctgtggccaggccctgataaacctcatctacttctaccatgatggacaactctactgcggccgtcatcatgcagagttgctgcgcccgcgctgcccggcttgtgaccagctgatcttctcctggcgctgcaccgaggcggagggacagcgctggcatgagaaccacttctgttgccaggactgcgccgggcctctgggcgggggacgttatgccctgcctgggggaagcccctgctgccccagctgcttcgagaaccgctactcggatgcaggctcgagctgggccggggcactggaagggcaggcattccttggggagactggactcgaccgaactgaaggaagggaccaaacctcggtgaactctgcaaccctctcccgaacactcctcgctgctgccggcggttccagcctgcaaactcagagggggctgcctggatccagtccccagcaggagaaccgacctggggacaaagcggaggcacccaaagggcaggagcaatgccgcctggagactattcgtgatcccaaggacacccctttctccacctgctcctcctcctctgactcggaacctgaaggatttttcttaggcgagcgccttccccagtcctggaagacccccggaagcctccaagcagaggacagcaacgcctctaagacgcactgcaccatgtgctagtggcgcagctcagagaggggatgtgagtgggaggaaaggggtctgtaaagcgggagaacaaggctagcctccccctaacaatcctagactgagacgcagtcaggcgcacgcccgcaagaggcggcgaggtgacaagtttggagtgcgcccccttcagtactgcgcgttctaagacttttggcggagactttcttggcaaaacccattccccaaagctacgcttcccctgctgagatagcccct

SEQ ID NO: 169057 - DNA, 880 bp, Homo sapiens
  Payload ID: 13274
  Gene Symbol: PRICKLE4
  Gene Name: prickle homolog 4
  ENST ID: ENST00000483200
  CDS Start-End: 1-844
ggaagccctgggacagggggtagcccgcctggtacttcccaagcttgaaggacacacctgtgagaagtgtagggagctgctgaagccaggggagtacggagtgtttgcagcccgggcaggggaacagcgctgctggcaccagccttgctttgcctgccaggcctgtggccaggccctgataaacctcatctacttctaccatgatggacaactctactgcggccgtcatcatgcagagttgctgcgcccgcgctgcccggcttgtgaccagctgatcttctcctggcgctgcaccgaggcggagggacagcgctggcatgagaaccacttctgttgccaggactgcgccgggcctctgggcgggggacgttatgccctgcctgggggaagcccctgctgccccagctgcttcgagaaccgctactcggatgcaggctcgagctgggccggggcactggaagggcaggcattccttggtaagggagaggatgcagagcaaagcgggagggagcttgggctgggctgtgggggttctcccgggctgggaccctcgccccggtcccacgccgtcccgtccctccaggagcgcccccaccgcaccccccagacccaagcctcggggcccgcagctctcaccgcgcatccctggccggagcgttccaagggccgcccgaacccaccccgcgccgcggtcggggttgcggcgccagactccctcccaggcgcgggaggcggacgccctctggtggaggcgggggaccctggcgaggactctcggcggcggcggcggcgcgcacggcccaggggctgggcggggcgggaggctgggcctcacccccactagctgcggtgtaggtccagctccgcggctctgagacca

SEQ ID NO: 169058 - DNA, 746 bp, Homo sapiens
  Payload ID: 13275
  Gene Symbol: PIFO
  Gene Name: primary cilia formation
  Uniprot ID: Q8TCI5
  ENST ID: ENST00000369737
  CDS Start-End: 34-510
gcagtacacaagtgctagccctagcagctcgcgatgtgcttcagcagagcagacgctgcggataactacccttttggaacatgtcaacagaggaaactttttcctcacttccatcccccgaatttgattgggaacaagtttgtccctcttaggggatcaccccacagagggcctgggtgttatttttcagatgaaatgacacctcatgcaggcaggtaccagaaagtaagtcctcagcaggaaaaacacaaacaaaattttgctccatttaatgtcttggtgcctcgatttaagaactacccaaaggacacttactatcccagccctggtgcatacaacccagagaagaagccaccgccaaaaattgcctggccaatgaaatttggatctccagactgggctcaggttccatgtctacagaaaagaaccctaaaagctgagctgtccacagacaaagactttagaaagcatcggaaccgtgtggcctacctaagcctgtattataattgagcggctgtaactaccttcacgtgctcctcttatacacagactctccaggactgaggacagagctgctcttcttcttctacgttactgtggccctcttgtctggcagcctggagcccagggagggacaggggcttatagctgctgtatgagaacataaagactagtgcacagtgctatctccatctactgacttgtggtgtacacgtgcatgtctgggtctgtgggtttctgttggg

SEQ ID NO: 169059 - DNA, 2627 bp, Homo sapiens
  Payload ID: 13275
  Gene Symbol: PIFO
  Gene Name: primary cilia formation
  Uniprot ID: Q8TCI5
  ENST ID: ENST00000369738
  CDS Start-End: 366-941
ccttacttgctggtggcccagacttcgggacattctgaacctcactgtccttccctctacaacagcgcattcctcttggcccagcttccaaagctatttgccgccccgtcaaccctgcagcccctacagccgcgaatccaggaaaccctctacccgcagcccagctactgagtttacaatcccctgggctttgggctccaaggtgcgggttcctgccccagtagtggctcggtggacgccccaacttgccgcgcaggcgcgctcgggccctctccccctccccgcgctccgcagctgggaatcacgggactagccttcgtttccttggcaacgcagtacacaagtgctagccctagcagctcgcgatgtgcttcagcagagcagacgctgcggataactacccttttggaacatgtcaacagaggaaactttttcctcacttccatcccccgaatttgattgggaacaagtttgtccctcttaggggatcaccccacagagggcctgggtgttatttttcagatggatatggcttggcatacgacttatctaagatcccaaccagtataaaaggatatactttgggagccagaacagctgtgaggtttaagccaatacagaaggaaatgacacctcatgcaggcaggtaccagaaagtaagtcctcagcaggaaaaacacaaacaaaattttgctccatttaatgtcttggtgcctcgatttaagaactacccaaaggacacttactatcccagccctggtgcatacaacccagagaagaagccaccgccaaaaattgcctggccaatgaaatttggatctccagactgggctcaggttccatgtctacagaaaagaaccctaaaagctgagctgtccacagacaaagactttagaaagcatcggaaccgtgtggcctacctaagcctgtattataattgagcggctgtaactaccttcacgtgctcctcttatacacagactctccaggactgaggacagagctgctcttcttcttctacgttactgtggccctcttgtctggcagcctggagcccagggagggacaggggcttatagctgctgtatgagaacataaagactagtgcacagtgctatctccatctactgacttgtggtgtacacgtgcatgtctgggtctgtgggtttctgttgggtgctgagttgggtgatttcattttagtgaaatatttgtgggcccctgctctctagttctaattcccaggagccaattttatatattctaccactagccctggtcataggaggctgttagcctatacatgtcaagggtttggatgggatttgggcttgctagatacagaaaacacttaaggcagattaaaacatgtattggagctctcccaattgtgttgctcagtgtggagtgggaaggtcttgatttggttgactttcccagattgacataaaactcaaaaaccaaaaaattgcccctttcctatgacatcatccatttagtctgtgagtcaacatatatactgaggtcctactatgtgttgagcagagcagtaagcactggggatatggcaggaatcaaaataaacttatctactaagtccttgggcctggcctgaagtcagaggaggactccccagggcagctaggggattgggtctgccctccaatctgaatgaccccctagaaccttacaagtcattctggggttataaagatcataacatttatagccccagactgacttgtaagcagctgcatttaaagtacttactcagacactcaggcctgagagatagacccctttctttccagcactagctgaaataatcaagtatatagtttgttcaggattggcactaaatgtgatttaatcttttaataaaagggtccttttgtacccacttaggcttcttcgtaattaccagaaaggtgataagcctgcatgtgtctggacaccaaagattgagaagctgccagtggctgcaagagagcctactgtaaccctcatggccaccccctgatgagtgttacctggggaaagggctagcaagaggtgaagcctcctggtcatatgatgctgggggtgcctaattccttaaaggccaaggtcttctgaaataataatggtgaaggacagaaaagtctttatgagaaatcacataggatatattaagataatgataaagatacctcagcaagaacatacctaatatatacacttcttttaatctgatgacttaatgatttctgttatcaagaagtatttatgacttgagataagtcaggattaactgttatcacctctcctgtacacctccctcctttttctcctttgtacccacatgtgcagattttttcagaggtgacaatttagcatttaatgtttttttttctgcttcaagttcttaggtccctttggaggatattgatgggggtggaggtggggatagaacatctttcacactgtttggtacagagacgctcaaagcttttcccagggaaaggaactctctaaaatagtaatctgatttgatgaaagataaaattttaatatagcttcagttaaccttcaggatactttaaatgctacattgtatataaaagtaataaagtacaaatgaacacgaa

SEQ ID NO: 169060 - DNA, 2289 bp, Homo sapiens
  Payload ID: 13276
  Gene Symbol: PRIMPOL
  Gene Name: primase and polymerase (DNA-directed)
  Uniprot ID: Q96LW4
  ENST ID: ENST00000314970
  CDS Start-End: 434-2116
gcgccccgcccccgcgccccgcgtcctcacgccctggtcccgccctcgcgtcccgcgccagtcctcccgctttggtcccgccctgaggctcggcccggctcccccgccccggatttgaaatctaggtcttcctgagagtccgcgggcttccgctcccagcgcgggattctggagggaaattgagggagacttggaaaccgcgccaggcccaacgggtacctagaagggagacaaagccaggcctgctgcccagtttgagctctgggaagaagaggagcaggccgggacgcccaccgaggtatcccagaggtgacagaacttgatctgggcctggaaggggaagaattcgggaaaagcaacgtggggcattccagtagtaattgatagaaatattacgtgggataggatttattctctccacacttctgaaccaatgaatagaaaatgggaagcaaaactgaagcaaattgaagaacgagcatctcattatgagaggaaaccgttgtcctcagtgtatagaccaagattgtccaagccagaagaaccaccctccatctggagactatttcatcgacaagctcaagcttttaattttgttaaaagctgtaaagaagacgttcatgtatttgctttggaatgcaaagtaggagatggacaacgtatttaccttgtgacaacctatgctgaattttggttttactataaatccagaaaaaatctcttacactgctatgaagttattcctgaaaatgctgtgtgcaagctttattttgatttggaatttaacaaacctgccaacccaggagctgatgggaaaaagatggttgcattactcattgagtatgtgtgtaaagcacttcaagagttatacggtgttaattgctcagctgaagatgttttgaacttggattctagcactgatgaaaaattcagccggcatttaatatttcagctccatgatgtggcatttaaagataatattcatgttggtaattttttgagaaaaattttgcagcctgctcttgacttgcttggcagtgaagatgatgatagcgctccagagacaacaggccatggatttccccatttttcagaagcacctgcaagacaaggattttctttcaataaaatgttcacagaaaaggctacagaggaaagctggacatcgaattcaaagaaactggagaggctggggtcagctgagcaaagcagtcctgacctttcatttctagttgtgaagaataacatgggagagaagcatctttttgtagatctcggagtttatacaagaaatagaaactttcggctatataaatcatcaaaaattggaaagcgtgtggctttggaggttactgaagataacaaattttttcctatacagtcaaaagatgtttctgacgaatatcaatattttctctcttctttggtcagcaatgtcaggttctcagatactttacgaattcttacatgtgagccatctcagaataaacaaaaaggagttggatattttaacagtatcggcacttcagtagaaaccattgaaggttttcagtgttctccctatcctgaagttgatcattttgttctttctttggtgaataaagatggcattaaaggaggaattcggcgttggaactactttttcccagaagaattactggtttatgatatttgtaaatatcggtggtgtgaaaacattggaagagcccataagagtaataatataatgattctggttgatctgaaaaatgaagtttggtatcaaaaatgtcatgaccctgtatgtaaagcagaaaacttcaaatctgactgtttcccattacctgctgaagtatgtctcctgtttcttttcaaagaggaagaagagtttacaacagatgaagcagatgaaactaggagcaatgaaacccagaatcctcataaaccatcacctagcaggctgtcaacaggtgcatctgctgatgctgtctgggataatggcattgatgatgcttattttttagaagctactgaagatgctgaattagctgaagctgcagagaacagtcttctcagttataacagtgaagtggatgaaattcctgatgaactaattatagaagtattacaagagtaactaattcactatgaacacttttgtcaccaggctataatttgcctgatgtctgtgagatttgataaatatatcattcaacctgtttatataaactaagttttattactttgctttccaatttttgttttttacttctgtaaaccaatttcattaaaaattagctttggtgtaaa

SEQ ID NO: 169061 - DNA, 2168 bp, Homo sapiens
  Payload ID: 13276
  Gene Symbol: PRIMPOL
  Gene Name: primase and polymerase (DNA-directed)
  Uniprot ID: Q96LW4
  ENST ID: ENST00000503752
  CDS Start-End: 349-2031
ctgaggctcggcccggctcccccgccccggatttgaaatctaggtcttcctgagagtccgcgggcttccgctcccagcgcgggattctggagggaaattgagggagacttggaaaccgcgccaggcccaacgggtacctagaagggagacaaagccaggcctgctgcccagtttgagctctgggaagaagaggagcaggccgggacgcccaccgaggtatcccagaggtgacagaacttgatctgggcctggaaggggaagaattcgggaaaagcaacgtggggcattccagtaattgatagaaatattacgtgggataggatttattctctccacacttctgaaccaatgaatagaaaatgggaagcaaaactgaagcaaattgaagaacgagcatctcattatgagaggaaaccgttgtcctcagtgtatagaccaagattgtccaagccagaagaaccaccctccatctggagactatttcatcgacaagctcaagcttttaattttgttaaaagctgtaaagaagacgttcatgtatttgctttggaatgcaaagtaggagatggacaacgtatttaccttgtgacaacctatgctgaattttggttttactataaatccagaaaaaatctcttacactgctatgaagttattcctgaaaatgctgtgtgcaagctttattttgatttggaatttaacaaacctgccaacccaggagctgatgggaaaaagatggttgcattactcattgagtatgtgtgtaaagcacttcaagagttatacggtgttaattgctcagctgaagatgttttgaacttggattctagcactgatgaaaaattcagccggcatttaatatttcagctccatgatgtggcatttaaagataatattcatgttggtaattttttgagaaaaattttgcagcctgctcttgacttgcttggcagtgaagatgatgatagcgctccagagacaacaggccatggatttccccatttttcagaagcacctgcaagacaaggattttctttcaataaaatgttcacagaaaaggctacagaggaaagctggacatcgaattcaaagaaactggagaggctggggtcagctgagcaaagcagtcctgacctttcatttctagttgtgaagaataacatgggagagaagcatctttttgtagatctcggagtttatacaagaaatagaaactttcggctatataaatcatcaaaaattggaaagcgtgtggctttggaggttactgaagataacaaattttttcctatacagtcaaaagatgtttctgacgaatatcaatattttctctcttctttggtcagcaatgtcaggttctcagatactttacgaattcttacatgtgagccatctcagaataaacaaaaaggagttggatattttaacagtatcggcacttcagtagaaaccattgaaggttttcagtgttctccctatcctgaagttgatcattttgttctttctttggtgaataaagatggcattaaaggaggaattcggcgttggaactactttttcccagaagaattactggtttatgatatttgtaaatatcggtggtgtgaaaacattggaagagcccataagagtaataatataatgattctggttgatctgaaaaatgaagtttggtatcaaaaatgtcatgaccctgtatgtaaagcagaaaacttcaaatctgactgtttcccattacctgctgaagtatgtctcctgtttcttttcaaagaggaagaagagtttacaacagatgaagcagatgaaactaggagcaatgaaacccagaatcctcataaaccatcacctagcaggctgtcaacaggtgcatctgctgatgctgtctgggataatggcattgatgatgcttattttttagaagctactgaagatgctgaattagctgaagctgcagagaacagtcttctcagttataacagtgaagtggatgaaattcctgatgaactaattatagaagtattacaagagtaactaattcactatgaacacttttgtcaccaggctataatttgcctgatgtctgtgagatttgataaatatatcattcaacctgtttatataaactaagttttattactttgctttccaatttttgttttttacttctg

SEQ ID NO: 169062 - DNA, 2007 bp, Homo sapiens
  Payload ID: 13276
  Gene Symbol: PRIMPOL
  Gene Name: primase and polymerase (DNA-directed)
  ENST ID: ENST00000515774
  CDS Start-End: 528-1823
gcgccagtcctcccgctttggtcccgccctgaggctcggcccggctcccccgccccggatttgaaatctaggtcttcctgagagtccgcgggcttccgctcccagcgcgggattctggagggaaattgagggagacttggaaaccgcgccaggcccaacgggtacctagaagggagacaaagccaggcctgctgcccagtttgagctctgggaagaagaggagcaggccgggacgcccaccgaggtatcccagaggtgacagaacttgatctgggcctggaaggggaagaattcgggaaaagcaacgtggggcattccaggacgttcatgtatttgctttggaatgcaaagtaggagatggacaacgtatttaccttgtgacaacctatgctgaattttggttttactataaatccagaaaaaatctcttacactgctatgaagttattcctgaaaatgctgtgtgcaagctttattttgatttggaatttaacaaacctgccaacccaggagctgatgggaaaaagatggttgcattactcattgagtatgtgtgtaaagcacttcaagagttatacggtgttaattgctcagctgaagatgttttgaacttggattctagcactgatgaaaaattcagccggcatttaatatttcagctccatgatgtggcatttaaagataatattcatgttggtaattttttgagaaaaattttgcagcctgctcttgacttgcttggcagtgaagatgatgatagcgctccagagacaacaggccatggatttccccatttttcagaagcacctgcaagacaaggattttctttcaataaaatgttcacagaaaaggctacagaggaaagctggacatcgaattcaaagaaactggagaggctggggtcagctgagcaaagcagtcctgacctttcatttctagttgtgaagaataacatgggagagaagcatctttttgtagatctcggagtttatacaagaaatagaaactttcggctatataaatcatcaaaaattggaaagcgtgtggctttggaggttactgaagataacaaattttttcctatacagtcaaaagatgtttctgacgaatatcaatattttctctcttctttggtcagcaatgtcaggttctcagatactttacgaattcttacatgtgagccatctcagaataaacaaaaaggagttggatattttaacagtatcggcacttcagtagaaaccattgaaggttttcagtgttctccctatcctgaagttgatcattttgttctttctttggtgaataaagatggcattaaaggaggaattcggcgttggaactactttttcccagaagaattactggtttatgatatttgtaaatatcggtggtgtgaaaacattggaagagcccataagagtaataatataatgattctggttgatctgaaaaatgaagtttggtatcaaaaatgtcatgaccctgtatgtaaagcagaaaacttcaaatctgactgtttcccattacctgctgaagtatgtctcctgtttcttttcaaagaggaagaagagtttacaacagatgaagcagatgaaactaggagcaatgaaacccagaatcctcataaaccatcacctagcaggctgtcaacaggtgcatctgctgatgctgtctgggataatggcattgatgatgcttattttttagaagctactgaagatgctgaattagctgaagctgcagagaacagtcttctcagttataacagtgaagtggatgaaattcctgatgaactaattatagaagtattacaagagtaactaattcactatgaacacttttgtcaccaggctataatttgcctgatgtctgtgagatttgataaatatatcattcaacctgtttatataaactaagttttattactttgctttccaatttttgttttttacttctgtaaaccaatttcattaaaaattagctttggtgtaaattcaggagaaa

SEQ ID NO: 169063 - DNA, 784 bp, Homo sapiens
  Payload ID: 13276
  Gene Symbol: PRIMPOL
  Gene Name: primase and polymerase (DNA-directed)
  ENST ID: ENST00000515152
  CDS Start-End: 263-601
ctggagggaaattgagggagacttggaaaccgcgccaggcccaacgggtacctagaagggagacaaagccaggcctgctgcccagtttgagctctgggaagaagaggagcaggccgggacgcccaccgaggtatcccagaggtgacagaacttgatctgggcctggaaggggaagaattcgggaaaagcaacgtggggcattccagtaattgatagaaatattacgtgggataggatttattctctccacacttctgaaccaatgaatagaaaatgggaagcaaaactgaagcaaattgaagaacgagcatctcattatgagaggaaaccgttgtcctcagtgtatagaccaagattgtccaagccagaagaaccaccctccatctggagactatttcatcgacaagctcaagcttttaattttgttaaaagctgtaaagaagacgttcatgtatttgctttggaatgcaaagtaggagatggacaacgtatttaccttgtgacaacctatgctgaattttggttttactataaatccagtatgtgtgtaaagcacttcaagagttatacggtgttaattgctcagctgaagatgttttgaacttggattctagcactgatgaaaaattcagccggcatttaatatttcagctccatgatgtggcatttaaagataatattcatgttggtaattttttgagaaaaattttgcagcctgctcttgacttgcttggcagtgaagatgatgatagcgctccagagacaacaggccatggatttcccc

SEQ ID NO: 169064 - DNA, 1631 bp, Homo sapiens
  Payload ID: 13276
  Gene Symbol: PRIMPOL
  Gene Name: primase and polymerase (DNA-directed)
  ENST ID: ENST00000509002
  CDS Start-End: 309-590
gtcttcctgagagtccgcgggcttccgctcccagcgcgggattctggagggaaattgagggagacttggaaaccgcgccaggcccaacgggtacctagaagggagacaaagccaggcctgctgcccagtttgagctctgggaagaagaggagcaggccgggacgcccaccgaggtatcccagaggtgacagaacttgatctgggcctggaaggggaagaattcgggaaaagcaacgtggggcattccagtagtaattgatagaaatattacgtgggataggatttattctctccacacttctgaaccaatgaatagaaaatgggaagcaaaactgaagcaaattgaagaacgagcatctcattatgagaggaaaccgttgtcctcagtgtatagaccaagattgtccaagccagaagaaccaccctccatctggagactatttcatcgacaagctcaagcttttaattttgttaaaagctgtaaagaagacgttcatgtatttgctttggaatgcaaagtaggagatggacaacgtatttaccttgtgacaacctatgctgaattttggttttactataaatccaggtaattttttgagaaaaattttgcagcctgctcttgacttgcttggcagtgaagatgatgatagcgctccagagacaacaggccatggatttccccatttttcagaagcacctgcaagacaaggattttctttcaataaaatgttcacagaaaaggctacagaggaaagctggacatcgaattcaaagaaactggagaggctggggtcagctgagcaaagcagtcctgacctttcatttctagttgtgaagaataacatgggagagaagcatctttttgtagatctcgaaaccattgaaggttttcagtgttctccctatcctgaagttgatcattttgttctttctttggtgaataaagatggcattaaaggaggaattcggcgttggaactactttttcccagaagaattactggtttatgatatttgtaaatatcggtggtgtgaaaacattggaagagcccataagagtaataatataatgattctggttgatctgaaaaatgaagtttggtatcaaaaatgtcatgaccctgtatgtaaagcagaaaacttcaaatctgactgtttcccattacctgctgaagtatgtctcctgtttcttttcaaagaggaagaagagtttacaacagatgaagcagatgaaactaggagcaatgaaacccagaatcctcataaaccatcacctagcaggctgtcaacaggtgcatctgctgatgctgtctgggataatggcattgatgatgcttattttttagaagctactgaagatgctgaattagctgaagctgcagagaacagtcttctcagttataacagtgaagtggatgaaattcctgatgaactaattatagaagtattacaagagtaactaattcactatgaacacttttgtcaccaggctataatttgcctgatgtctgtgagatttgataaatatatcattcaacctgtttatataaactaagttttattactttgctttccaatttttgttttttacttctgtaaaccaatttcattaaaaattagctttggtgtaaa

SEQ ID NO: 169065 - DNA, 1138 bp, Homo sapiens
  Payload ID: 13276
  Gene Symbol: PRIMPOL
  Gene Name: primase and polymerase (DNA-directed)
  ENST ID: ENST00000506278
  CDS Start-End: 270-608
gattctggagggaaattgagggagacttggaaaccgcgccaggcccaacgggtacctagaagggagacaaagccaggcctgctgcccagtttgagctctgggaagaagaggagcaggccgggacgcccaccgaggtatcccagaggtgacagaacttgatctgggcctggaaggggaagaattcgggaaaagcaacgtggggcattccagtagtaattgatagaaatattacgtgggataggatttattctctccacacttctgaaccaatgaatagaaaatgggaagcaaaactgaagcaaattgaagaacgagcatctcattatgagaggaaaccgttgtcctcagtgtatagaccaagattgtccaagccagaagaaccaccctccatctggagactatttcatcgacaagctcaagcttttaattttgttaaaagctgtaaagaagacgttcatgtatttgctttggaatgcaaagtaggagatggacaacgtatttaccttgtgacaacctatgctgaattttggttttactataaatccagtatgtgtgtaaagcacttcaagagttatacggtgttaattgctcagctgaagatgttttgaacttggattctagcactgatgaaaaattcagccggcatttaatatttcagctccatgatgtggcatttaaagataatattcatgttggtaattttttgagaaaaattttgcagcctgctcttgacttgcttggcagtgaagatgatgatagcgctccagagacaacaggccatggatttccccatttttcagaagcacctgcaagacaaggattttctttcaataaaatgttcacagaaaaggctacagaggaaagctggacatcgaattcaaagaaactggagaggctggggtcagctgagcaaagcagtcctgacctttcatttctagttgtgaagaataacatgggagagaagcatctttttgtagatctcggagtttatacaagaaatagaaactttcggctatataaatcatcaaaaattggaaagcgtgtggctttggaggttactgaagataacaaattttttcctatacagtcaaaagatgtttctgacgaatatcaatattttctctcttctttggtcagc

SEQ ID NO: 169066 - DNA, 518 bp, Homo sapiens
  Payload ID: 13276
  Gene Symbol: PRIMPOL
  Gene Name: primase and polymerase (DNA-directed)
  ENST ID: ENST00000508001
  CDS Start-End: 1-518
aaattggaaagcgtgtggctttggaggttactgaagataacaaattttttcctatacagtcaaaagatgtttctgacgaatatcaatattttctctcttctttggtcagcaatgtcagtagaaaccattgaaggttttcagtgttctccctatcctgaagttgatcattttgttctttctttggtgaataaagatggcattaaaggaggaattcggcgttggaactactttttcccagaagaattactggtttatgatatttgtaaatatcggtggtgtgaaaacattggaagagcccataagagtaataatataatgattctggttgatctgaaaaatgaagtttggtatcaaaaatgtcatgaccctgtatgtaaagcagaaaacttcaaatctgactgtttcccattacctgctgaagtatgtctcctgtttcttttcaaagaggaagaagagtttacaacagatgaagcagatgaaactaggagcaatgaaacccagaatcctcataaaccatc

SEQ ID NO: 169067 - DNA, 2174 bp, Homo sapiens
  Payload ID: 13276
  Gene Symbol: PRIMPOL
  Gene Name: primase and polymerase (DNA-directed)
  ENST ID: ENST00000512834
  CDS Start-End: 322-2001
atttgaaatctaggtcttcctgagagtccgcgggcttccgctcccagcgcgggattctggagggaaattgagggagacttggaaaccgcgccaggcccaacgggtacctagaagggagacaaagccaggcctgctgcccagtttgagctctgggaagaagaggagcaggccgggacgcccaccgaggtatcccagaggtgacagaacttgatctgggcctggaaggggaagaattcgggaaaagcaacgtggggcattccagtagtaattgatagaaatattacgtgggataggatttattctctccacacttctgaaccaatgaatagaaaatgggaagcaaaactgaagcaaattgaagaacgagcatctcattatgagaggaaaccgttgtcctcagtgtatagaccaagattgtccaagccagaagaaccaccctccatctggagactatttcatcgacaagctcaagcttttaattttgttaaaagctgtaaagaagacgttcatgtatttgctttggaatgcaaagtaggagatggacaacgtatttaccttgtgacaacctatgctgaattttggttttactataaatccagaaaaaatctcttacactgctatgaagttattcctgaaaatgctgtgtgcaagctttattttgatttggaatttaacaaacctgccaacccaggagctgatgggaaaaagatggttgcattactcattgagtatgtgtgtaaagcacttcaagagttatacggtgttaattgctcagctgaagatgttttgaacttggattctagcactgatgaaaaattcagccggcatttaatatttcagctccatgatgtggcatttaaagataatattcatgttggtaattttttgagaaaaattttgcagcctgctcttgacttgcttggcagtgaagatgatgatagcgctccagagacaacaggccatggatttccccatttttcagaagcacctgcaagacaaggattttctttcaataaaatgttcacagaaaaggctacagaggaaagctggacatcgaattcaaagaaactggagaggctggggtcagctgagcaaagcagtcctgacctttcatttctagttgtgaagaataacatgggagagaagcatctttttgtagatctcggagtttatacaagaaatagaaactttcggctatataaatcatcaaaaattggaaagcgtgtggctttggaggttactgaagataacaaattttttcctatacagtcaaaagatgtttctgacgaatatcaatattttctctcttctttggtcagcaatgtcaggttctcagatactttacgaattcttacatgtgagccatctcagaataaacaaaaaggagttggatattttaacagtatcggcacttcagaaaccattgaaggttttcagtgttctccctatcctgaagttgatcattttgttctttctttggtgaataaagatggcattaaaggaggaattcggcgttggaactactttttcccagaagaattactggtttatgatatttgtaaatatcggtggtgtgaaaacattggaagagcccataagagtaataatataatgattctggttgatctgaaaaatgaagtttggtatcaaaaatgtcatgaccctgtatgtaaagcagaaaacttcaaatctgactgtttcccattacctgctgaagtatgtctcctgtttcttttcaaagaggaagaagagtttacaacagatgaagcagatgaaactaggagcaatgaaacccagaatcctcataaaccatcacctagcaggctgtcaacaggtgcatctgctgatgctgtctgggataatggcattgatgatgcttattttttagaagctactgaagatgctgaattagctgaagctgcagagaacagtcttctcagttataacagtgaagtggatgaaattcctgatgaactaattatagaagtattacaagagtaactaattcactatgaacacttttgtcaccaggctataatttgcctgatgtctgtgagatttgataaatatatcattcaacctgtttatataaactaagttttattactttgctttccaatttttgttttttacttctgtaaaccaatttcattaaaaattagctttggtgtaaa

SEQ ID NO: 169068 - DNA, 1393 bp, Homo sapiens
  Payload ID: 13277
  Gene Symbol: PRIM1
  Gene Name: primase, DNA, polypeptide 1 (49kDa)
  Uniprot ID: P49642
  ENST ID: ENST00000338193
  CDS Start-End: 38-1300
cctgtggtaatccttaccgtggcgagttccgcgctcaatggagacgtttgaccccaccgagctgcccgagctgcttaaactttattaccggaggctctttccctactctcagtactatcgctggctcaactacggtggagtgataaagaattactttcaacaccgtgaattttcattcacattgaaagatgatatttacattcgctaccaatccttcaacaaccagagtgatctggaaaaggagatgcagaaaatgaatccatacaagattgatataggcgcagtatattctcacagacccaatcaacacaatacagtgaagctgggagctttccaggctcaggaaaaagaactggtatttgacattgacatgacagactatgacgatgtgaggagatgttgtagttctgcagacatatgtcctaagtgctggaccctcatgacaatggccatacgcatcattgacagagcattgaaggaggactttggatttaagcatcgtctctgggtatattctggaaggagaggtgttcattgttgggtctgtgatgaatcagttagaaaactgtcttctgcagtacgttctgggatagttgagtatttgagccttgtaaagggtggtcaagacgttaaaaagaaagttcacctaagtgaaaaaattcacccttttatcagaaaatctataaacataataaaaaaatactttgaagaatatgccttggttaatcaagatattctcgaaaataaagaaagctgggataagattttagcccttgttcctgaaacaattcatgatgaacttcaacaaagcttccaaaagtctcacaattcacttcagcgttgggagcacttgaagaaagtagccagcagatatcagaataacatcaaaaatgacaaatatggaccctggctggagtgggagattatgctccagtactgttttccacggctggatatcaatgtcagcaaaggaatcaatcatctactgaagagcccttttagtgttcatcctaaaacaggtcgcatatctgtgcctattgatttgcagaaagtggaccagtttgatccatttactgttccgaccataagcttcatctgccgtgaattggatgccatttccactaatgaagaggaaaaagaggagaatgaagctgaatctgatgtcaaacatagaaccagagattataagaagaccagtctagcaccttatgtgaaagtttttgaacattttcttgaaaatctggataaatcccgaaaaggagaacttcttaagaagagtgatttacaaaaagatttctgaagacagagctcctcaaaccattgtggatatcttctgccttcaaccacagatcaaatacttcaagagccatttaataaatatggcagaactata

SEQ ID NO: 169069 - DNA, 1459 bp, Homo sapiens
  Payload ID: 13277
  Gene Symbol: PRIM1
  Gene Name: primase, DNA, polypeptide 1 (49kDa)
  ENST ID: ENST00000552590
  CDS Start-End: 76-633
cagtcgcggggccgccggccgtgctgttcccgccaattcctgtggtaatccttaccgtggcgagttccgcgctcaatggagacgtttgaccccaccgagctgcccgagctgcttaaactttattaccggaggctctttccctactctcagtactatcgctggctcaactacggtggagtgataaagaattactttcaacaccgtgaattttcattcacattgaaagatgatatttacattcgctaccaatccttcaacaaccagagtgatctggaaaaggagatgcagaaaatgaatccatacaagattgatataggcgcagtatattctcacagacccaatcaacacaatacagtgaagctgggagctttccaggctcaggaaaaagaactggtatttgacattgacatgacagactatgacgatgtgaggagatgttgtagttctgcagacatatgtcctaagtgctggaccctcatgacaatggccatacgcatcattgacagagcattgaagggcaagactttggatttaagcatcgtctctgggtatattctggaaggagaggtgttcattgttgggtctgtgatgaatcagttagaaaactgtcttctgcagtacgttctgggatagttgagtatttgagccttgtaaagggtggtcaagacgttaaaaagaaagttcacctaagtgaaaaaattcacccttttatcagaaaatctataaacataataaaaaaatactttgaagaatatgccttggttaatcaagatattctcgaaaataaagaaagctgggataagattttagcccttgttcctgaaacaattcatgatgaacttcaacaaagcttccaaaagtctcacaattcacttcagcgttgggagcacttgaagaaagtagccagcagatatcagaataacatcaaaaatgacaaatatggaccctggctggagtgggagattatgctccagtactgttttccacggctggatatcaatgtcagcaaaggaatcaatcatctactgaagagcccttttagtgttcatcctaaaacaggtcgcatatctgtgcctattgatttgcagaaagtggaccagtttgatccatttactgttccgaccataagcttcatctgccgtgaattggatgccatttccactaatgaagaggaaaaagaggagaatgaagctgaatctgatgtcaaacatagaaccagagattataagaagaccagtctagcaccttatgtgaaagtttttgaacattttcttgaaaatctggataaatcccgaaaaggagaacttcttaagaagagtgatttacaaaaagatttctgaagacagagctcctcaaaccattgtggatatcttctgccttcaaccacagatcaaatacttcaagagccatttaataaatatggcagaactatatatgtgtcttaaacctcaaagtaaat

SEQ ID NO: 169070 - DNA, 456 bp, Homo sapiens
  Payload ID: 13277
  Gene Symbol: PRIM1
  Gene Name: primase, DNA, polypeptide 1 (49kDa)
  ENST ID: ENST00000549549
  CDS Start-End: 1-456
agaaaatctataaacataataaaaaaatactttgaagaatatgccttggttaatcaagatattctcgaaaataaagaaagctgggataagattttagcccttgttcctgaaaaaagcttccaaaagtctcacaattcacttcagcgttgggagcacttgaagaaagtagccagcagatatcagaataacatcaaaaatgacaaatatggaccctggctggagtgggagattatgctccagtactgttttccacggctggatatcaatgtcagcaaaggaatcaatcatctactgaagagcccttttagtgttcatcctaaaacaggtcgcatatctgtgcctattgatttgcagaaagtggaccagtttgatccatttactgttccgaccataagcttcatctgccgtgaattggatgccatttccactaatgaagaggaaaaagaggagaatgaa

SEQ ID NO: 169071 - DNA, 1008 bp, Homo sapiens
  Payload ID: 13277
  Gene Symbol: PRIM1
  Gene Name: primase, DNA, polypeptide 1 (49kDa)
  ENST ID: ENST00000550770
  CDS Start-End: 26-1008
cttaccgtggcgagttccgcgctcaatggagacgtttgaccccaccgagctgcccgagctgcttaaactttattaccggaggctctttccctactctcagtactatcgctggctcaactacggtggaggtgatggagtgataaagaattactttcaacaccgtgaattttcattcacattgaaagatgatatttacattcgctaccaatccttcaacaaccagagtgatctggaaaaggagatgcagaaaatgaatccatacaagattgatataggcgcagtatattctcacagacccaatcaacacaatacagtgaagctgggagctttccaggctcaggaaaaagaactggtatttgacattgacatgacagactatgacgatgtgaggagatgttgtagttctgcagacatatgtcctaagtgctggaccctcatgacaatggccatacgcatcattgacagagcattgaaggaggactttggatttaagcatcgtctctgggtatattctggaaggagaggtgttcattgttgggtctgtgatgaatcagttagaaaactgtcttctgcagtacgttctgggatagttgagtatttgagccttgtaaagggtggtcaagacgttaaaaagaaagttcacctaagtgaaaaaattcacccttttatcagaaaatctataaacataataaaaaaatactttgaagaatatgccttggttaatcaagatattctcgaaaataaagaaagctgggataagattttagcccttgttcctgaaacaattcatgatgaacttcaacaaagcttccaaaagtctcacaattcacttcagcgttgggagcacttgaagaaagtagccagcagatatcagaataacatcaaaaatgacaaatatggaccctggctggagtgggagattatgctccagtactgttttccacggctggatatcaatgtcagcaaaggaatcaatcatctactgaagagcccttttagtgttcatcc

SEQ ID NO: 169072 - DNA, 909 bp, Homo sapiens
  Payload ID: 13278
  Gene Symbol: PRIM2
  Gene Name: primase, DNA, polypeptide 2 (58kDa)
  Uniprot ID: P49643
  ENST ID: ENST00000370687
  CDS Start-End: 126-602
gatttactgaacatggctgctgaaatgtataacattattgtgcattattgctaccgtgatatgcggatttatattgcaattgcctctggattcagaaaaacacccttcacagtgaggtgaccaagatggagttttctggaagaaagtggaggaagctgaggttggcaggtgaccagaggaatgcttcctaccctcattgccttcagttttacttgcagccaccttctgaaaacatatctttaatagaatttgaaaacttggctattgatagagttaaattgttaaaatcagttgaaaatcttggagtgagctatgtgaaaggaactgaacaataccagagtaagttggagagtgagcttcggaagctcaagttttcctacagagaaaacttagaagatgaatatgaaccacgaagaagagatcatatttctcattttattttgcggcttgcttattgccagtctgaagaacttagacgctggttcattcaacaagaaatggatctccttcgatttagatttagtattttacccaaggataaaattcaggatttcttaaaggatagccaattgcagtttgaggctgtaagtatatttttgtagttatttctaattgttctcaccattcatttttcccttctgtcttaagtgctggtactaatgtgtagtgtgttctctttacattctccaagtacctgcctgaaacagtagctaatagctttggataacaatatatctttccttctctatgactagaagaaaaggactccttaataacaaagtctcacacttacttgctctgttaaatgtgtgctttattaaagcacaagaaggtttagtttataaaggttcatctttaaccaaaattttgtcggccaaaataaagctaataatgtgttaaactagacaa

SEQ ID NO: 169073 - DNA, 2308 bp, Homo sapiens
  Payload ID: 13278
  Gene Symbol: PRIM2
  Gene Name: primase, DNA, polypeptide 2 (58kDa)
  Uniprot ID: P49643
  ENST ID: ENST00000615550
  CDS Start-End: 88-1617
ggtttcatatgaactctcccgccacccgggaacagtggctgccaccgtttgtgttttcccgagtttgaattcttgcaggtgaccaagatggagttttctggaagaaagtggaggaagctgaggttggcaggtgaccagaggaatgcttcctaccctcattgccttcagttttacttgcagccaccttctgaaaacatatctttaatagaatttgaaaacttggctattgatagagttaaattgttaaaatcagttgaaaatcttggagtgagctatgtgaaaggaactgaacaataccagagtaagttggagagtgagcttcggaagctcaagttttcctacagagaaaacttagaagatgaatatgaaccacgaagaagagatcatatttctcattttattttgcggcttgcttattgccagtctgaagaacttagacgctggttcattcaacaagaaatggatctccttcgatttagatttagtattttacccaaggataaaattcaggatttcttaaaggatagccaattgcagtttgaggctataagtgatgaagagaagactcttcgagaacaggagattgttgcctcatcaccaagtttaagtggacttaagttggggttcgagtccatttataagatcccttttgctgatgctctggatttgtttcgaggaaggaaagtctatttggaagatggctttgcttacgtaccacttaaggacattgtggcaatcatcctgaatgaatttagagccaaactgtccaaggctttggcattaacagccaggtccttgcctgctgtgcagtctgatgaaagacttcagcctctgctcaatcacctcagtcattcctacactggccaagattacagtacccagggaaatgttgggaagatttctttagatcagattgatttgctttctaccaaatccttcccaccttgcatgcgtcagttacataaagccttgcgggaaaatcaccatcttcgtcatggaggccgaatgcagtatggcctatttctgaagggcattggtttaactttggaacaggcattgcagttctggaagcaagaatttatcaaaggaaagatggatccagacaagtttgataaaggttactcttacaacatccgtcacagctttggaaaggaaggcaagaggacagactatacacctttcagttgcctgaagattattctgtccaatccaccaagccaaggggattatcatgggtgcccattccgtcacagtgatccagagctgctgaagcaaaagttgcagtcatacaagatctctcctggagggataagccagattttggatttagtaaaggggacacattaccaggtagcctgtcaaaaatactttgagatgatacacaatgtggatgattgtggcttttctttgaatcatcctaatcagttcttttgtgagagccaacgtattctaaatggtggtaaagacataaagaaggaacctatccaaccagaaactcctcaacccaaaccaagtgtccagaaaaccaaggatgcatcatctgctctggcctctttaaattcctctctggaaatggatatggaaggactagaagattactttagtgaagattcttaggcagttttataaccctttttcctcaatagcctgtttcctgtttttaagattttgcctttgttgttgaaaaagggtttcactctgtcaccaaggcttagtgcagtgacacaattacagctgattgcagccttgaccttcccagctcaagtgatcctcctacctcagcctcccaagtagttaggaccacaggtgtgcacctcatatccagataatttttttcaatttttttttgtagaggtggggggtctccctatgttgcccaggcagatctcagactcctgggctcaagcgatcctcacacctcagcgtcccagagtgctgggattacggttgtgagccactgtgcctggccttttttttttttttaacctttttgtttaacttctctcttcactgcatcccaatccatctacaggcatgcacacttattaggaaaggaggtttgaggtaacaacagagactttcactatattttgctttgacagaaggaaagaggaggagtttctattaaaatctgtcacttgagtgatgtcatttaagtcctattttaggagataaaaacagctttggggactggttaaagtcccccagaaactacaataaagaacaacttttgttttaactcttaatcactttgtaattttgactcaatccttttctggaccatttttgttaataaatatcaaagtgt

SEQ ID NO: 169074 - DNA, 864 bp, Homo sapiens
  Payload ID: 13278
  Gene Symbol: PRIM2
  Gene Name: primase, DNA, polypeptide 2 (58kDa)
  Uniprot ID: P49643
  ENST ID: ENST00000274891
  CDS Start-End: 88-564
ggtttcatatgaactctcccgccacccgggaacagtggctgccaccgtttgtgttttcccgagtttgaattcttgcaggtgaccaagatggagttttctggaagaaagtggaggaagctgaggttggcaggtgaccagaggaatgcttcctaccctcattgccttcagttttacttgcagccaccttctgaaaacatatctttaatagaatttgaaaacttggctattgatagagttaaattgttaaaatcagttgaaaatcttggagtgagctatgtgaaaggaactgaacaataccagagtaagttggagagtgagcttcggaagctcaagttttcctacagagaaaacttagaagatgaatatgaaccacgaagaagagatcatatttctcattttattttgcggcttgcttattgccagtctgaagaacttagacgctggttcattcaacaagaaatggatctccttcgatttagatttagtattttacccaaggataaaattcaggatttcttaaaggatagccaattgcagtttgaggctgtaagtatatttttgtagttatttctaattgttctcaccattcatttttcccttctgtcttaagtgctggtactaatgtgtagtgtgttctctttacattctccaagtacctgcctgaaacagtagctaatagctttggataacaatatatctttccttctctatgactagaagaaaaggactccttaataacaaagtctcacacttacttgctctgttaaatgtgtgctttattaaagcacaagaaggtttagtttataaaggttcatctttaaccaaaattttgtcggccaaaataaagctaataatgtgttaaac

SEQ ID NO: 169075 - DNA, 375 bp, Homo sapiens
  Payload ID: 13278
  Gene Symbol: PRIM2
  Gene Name: primase, DNA, polypeptide 2 (58kDa)
  ENST ID: ENST00000550475
  CDS Start-End: 1-280
tcattcctacactggccaagattacagtacccagggaaatgttgggaagatttctttagatcagattgatttgctttctaccaaatccttcccaccttgcatgcgtcagttacataaagccttgcgggaaaatcaccatcttcgtcatggaggccgaatgcagtatggcctatttctgaagggcattggtttaactttggaacaggcattgcagttctggaagcaagaatttatcaaaggaaagatggatccagacaaggaagaggaaaatgatgaatagtagaagctccgcctgtgaagataattttacctgcagctgaaataccatgacccagatattgaacacacagaataattaaacttttcgtctagaaa

SEQ ID NO: 169076 - DNA, 2657 bp, Homo sapiens
  Payload ID: 13279
  Gene Symbol: PRNP
  Gene Name: prion protein
  Uniprot ID: P04156
  ENST ID: ENST00000379440
  CDS Start-End: 288-1049
gaatctcaactcgttttttccggtgactcattcccggccctgcttggcagcgctgcaccctttaacttaaacctcggccggccgcccgccgggggcacagagtgtgcgccgggccgcgcggcaattggtccccgcgccgacctccgcccgcgagcgccgccgcttcccttccccgccccgcgtccctccccctcggccccgcgcgtcgcctgtcctccgagccagtcgctgacagccgcggcgccgcgagcttctcctctcctcacgaccgaggcagagcagtcattatggcgaaccttggctgctggatgctggttctctttgtggccacatggagtgacctgggcctctgcaagaagcgcccgaagcctggaggatggaacactgggggcagccgatacccggggcagggcagccctggaggcaaccgctacccacctcagggcggtggtggctgggggcagcctcatggtggtggctgggggcagcctcatggtggtggctgggggcagccccatggtggtggctggggacagcctcatggtggtggctggggtcaaggaggtggcacccacagtcagtggaacaagccgagtaagccaaaaaccaacatgaagcacatggctggtgctgcagcagctggggcagtggtggggggccttggcggctacatgctgggaagtgccatgagcaggcccatcatacatttcggcagtgactatgaggaccgttactatcgtgaaaacatgcaccgttaccccaaccaagtgtactacaggcccatggatgagtacagcaaccagaacaactttgtgcacgactgcgtcaatatcacaatcaagcagcacacggtcaccacaaccaccaagggggagaacttcaccgagaccgacgttaagatgatggagcgcgtggttgagcagatgtgtatcacccagtacgagagggaatctcaggcctattaccagagaggatcgagcatggtcctcttctcctctccacctgtgatcctcctgatctctttcctcatcttcctgatagtgggatgaggaaggtcttcctgttttcaccatctttctaatctttttccagcttgagggaggcggtatccacctgcagcccttttagtggtggtgtctcactctttcttctctctttgtcccggataggctaatcaatacccttggcactgatgggcactggaaaacatagagtagacctgagatgctggtcaagccccctttgattgagttcatcatgagccgttgctaatgccaggccagtaaaagtataacagcaaataaccattggttaatctggacttatttttggacttagtgcaacaggttgaggctaaaacaaatctcagaacagtctgaaatacctttgcctggatacctctggctccttcagcagctagagctcagtatactaatgccctatcttagtagagatttcatagctatttagagatattttccattttaagaaaacccgacaacatttctgccaggtttgttaggaggccacatgatacttattcaaaaaaatcctagagattcttagctcttgggatgcaggctcagcccgctggagcatgagctctgtgtgtaccgagaactggggtgatgttttacttttcacagtatgggctacacagcagctgttcaacaagagtaaatattgtcacaacactgaacctctggctagaggacatattcacagtgaacataactgtaacatatatgaaaggcttctgggacttgaaatcaaatgtttgggaatggtgcccttggaggcaacctcccattttagatgtttaaaggaccctatatgtggcattcctttctttaaactataggtaattaaggcagctgaaaagtaaattgccttctagacactgaaggcaaatctcctttgtccatttacctggaaaccagaatgattttgacatacaggagagctgcagttgtgaaagcaccatcatcatagaggatgatgtaattaaaaaatggtcagtgtgcaaagaaaagaactgcttgcatttctttatttctgtctcataattgtcaaaaaccagaattaggtcaagttcatagtttctgtaattggcttttgaatcaaagaatagggagacaatctaaaaaatatcttaggttggagatgacagaaatatgattgatttgaagtggaaaaagaaattctgttaatgttaattaaagtaaaattattccctgaattgtttgatattgtcacctagcagatatgtattacttttctgcaatgttattattggcttgcactttgtgagtattctatgtaaaaatatatatgtatataaaatatatattgcataggacagacttaggagttttgtttagagcagttaacatctgaagtgtctaatgcattaacttttgtaaggtactgaatacttaatatgtgggaaacccttttgcgtggtccttaggcttacaatgtgcactgaatcgtttcatgtaagaatccaaagtggacaccattaacaggtctttgaaatatgcatgtactttatattttctatatttgtaactttgcatgttcttgttttgttatataaaaaaattgtaaatgtttaatatctgactgaaattaaacgagcgaagatgagcaccacc

SEQ ID NO: 169077 - DNA, 2539 bp, Homo sapiens
  Payload ID: 13279
  Gene Symbol: PRNP
  Gene Name: prion protein
  Uniprot ID: P04156
  ENST ID: ENST00000430350
  CDS Start-End: 170-931
cgcgcggcaattggtccccgcgccgacctccgcccgcgagcgccgccgcttcccttccccgccccgcgtccctccccctcggccccgcgcgtcgcctgtcctccgagccagtcgctgacagccgcggcgccgcgagcttctcctctcctcacgaccgagagcagtcattatggcgaaccttggctgctggatgctggttctctttgtggccacatggagtgacctgggcctctgcaagaagcgcccgaagcctggaggatggaacactgggggcagccgatacccggggcagggcagccctggaggcaaccgctacccacctcagggcggtggtggctgggggcagcctcatggtggtggctgggggcagcctcatggtggtggctgggggcagccccatggtggtggctggggacagcctcatggtggtggctggggtcaaggaggtggcacccacagtcagtggaacaagccgagtaagccaaaaaccaacatgaagcacatggctggtgctgcagcagctggggcagtggtggggggccttggcggctacatgctgggaagtgccatgagcaggcccatcatacatttcggcagtgactatgaggaccgttactatcgtgaaaacatgcaccgttaccccaaccaagtgtactacaggcccatggatgagtacagcaaccagaacaactttgtgcacgactgcgtcaatatcacaatcaagcagcacacggtcaccacaaccaccaagggggagaacttcaccgagaccgacgttaagatgatggagcgcgtggttgagcagatgtgtatcacccagtacgagagggaatctcaggcctattaccagagaggatcgagcatggtcctcttctcctctccacctgtgatcctcctgatctctttcctcatcttcctgatagtgggatgaggaaggtcttcctgttttcaccatctttctaatctttttccagcttgagggaggcggtatccacctgcagcccttttagtggtggtgtctcactctttcttctctctttgtcccggataggctaatcaatacccttggcactgatgggcactggaaaacatagagtagacctgagatgctggtcaagccccctttgattgagttcatcatgagccgttgctaatgccaggccagtaaaagtataacagcaaataaccattggttaatctggacttatttttggacttagtgcaacaggttgaggctaaaacaaatctcagaacagtctgaaatacctttgcctggatacctctggctccttcagcagctagagctcagtatactaatgccctatcttagtagagatttcatagctatttagagatattttccattttaagaaaacccgacaacatttctgccaggtttgttaggaggccacatgatacttattcaaaaaaatcctagagattcttagctcttgggatgcaggctcagcccgctggagcatgagctctgtgtgtaccgagaactggggtgatgttttacttttcacagtatgggctacacagcagctgttcaacaagagtaaatattgtcacaacactgaacctctggctagaggacatattcacagtgaacataactgtaacatatatgaaaggcttctgggacttgaaatcaaatgtttgggaatggtgcccttggaggcaacctcccattttagatgtttaaaggaccctatatgtggcattcctttctttaaactataggtaattaaggcagctgaaaagtaaattgccttctagacactgaaggcaaatctcctttgtccatttacctggaaaccagaatgattttgacatacaggagagctgcagttgtgaaagcaccatcatcatagaggatgatgtaattaaaaaatggtcagtgtgcaaagaaaagaactgcttgcatttctttatttctgtctcataattgtcaaaaaccagaattaggtcaagttcatagtttctgtaattggcttttgaatcaaagaatagggagacaatctaaaaaatatcttaggttggagatgacagaaatatgattgatttgaagtggaaaaagaaattctgttaatgttaattaaagtaaaattattccctgaattgtttgatattgtcacctagcagatatgtattacttttctgcaatgttattattggcttgcactttgtgagtattctatgtaaaaatatatatgtatataaaatatatattgcataggacagacttaggagttttgtttagagcagttaacatctgaagtgtctaatgcattaacttttgtaaggtactgaatacttaatatgtgggaaacccttttgcgtggtccttaggcttacaatgtgcactgaatcgtttcatgtaagaatccaaagtggacaccattaacaggtctttgaaatatgcatgtactttatattttctatatttgtaactttgcatgttcttgttttgttatataaaaaaattgtaaatgtttaatatctgactgaaattaaacgagcgaagatgagcaccacc

SEQ ID NO: 169078 - DNA, 806 bp, Homo sapiens
  Payload ID: 13279
  Gene Symbol: PRNP
  Gene Name: prion protein
  ENST ID: ENST00000424424
  CDS Start-End: 60-806
agtcgctgacagccgcggcgccgcgagcttctcctctcctcacgaccgaggcagtcattatggcgaaccttggctgctggatgctggttctctttgtggccacatggagtgacctgggcctctgcaagaagcgcccgaagcctggaggatggaacactgggggcagccgatacccggggcagggcagccctggaggcaaccgctacccacctcagggcggtggtggctgggggcagcctcatggtggtggctgggggcagcctcatggtggtggctgggggcagccccatggtggtggctggggacagcctcatggtggtggctggggtcaaggaggtggcacccacagtcagtggaacaagccgagtaagccaaaaaccaacatgaagcacatggctggtgctgcagcagctggggcagtggtggggggccttggcggctacatgctgggaagtgccatgagcaggcccatcatacatttcggcagtgactatgaggaccgttactatcgtgaaaacatgcaccgttaccccaaccaagtgtactacaggcccatggatgagtacagcaaccagaacaactttgtgcacgactgcgtcaatatcacaatcaagcagcacacggtcaccacaaccaccaagggggagaacttcaccgagaccgacgttaagatgatggagcgcgtggttgagcagatgtgtatcacccagtacgagagggaatctcaggcctattaccagagaggatcgagcatggtcctcttctcctctccacctgtgatcctcctgatctctttcctcatcttc

SEQ ID NO: 169079 - DNA, 855 bp, Homo sapiens
  Payload ID: 13279
  Gene Symbol: PRNP
  Gene Name: prion protein
  ENST ID: ENST00000457586
  CDS Start-End: 205-855
gggggcaggggagccgcgggggccgagtgaggaccccgggcctcgggtcccaggcgcaagggtgcccggccgggcggggtcgggaccccagtgaggaggggccgggggctgccccgcgggcgcgtgacgcgtctcgggcctgcccggctgcgctggtctccgctcgggtgaggcggcttggcttcgcttttcagagcagtcattatggcgaaccttggctgctggatgctggttctctttgtggccacatggagtgacctgggcctctgcaagaagcgcccgaagcctggaggatggaacactgggggcagccgatacccggggcagggcagccctggaggcaaccgctacccacctcagggcggtggtggctgggggcagcctcatggtggtggctgggggcagcctcatggtggtggctgggggcagccccatggtggtggctggggacagcctcatggtggtggctggggtcaaggaggtggcacccacagtcagtggaacaagccgagtaagccaaaaaccaacatgaagcacatggctggtgctgcagcagctggggcagtggtggggggccttggcggctacatgctgggaagtgccatgagcaggcccatcatacatttcggcagtgactatgaggaccgttactatcgtgaaaacatgcaccgttaccccaaccaagtgtactacaggcccatggatgagtacagcaaccagaacaactttgtgcacgactgcgtcaatatcacaatcaagcagcacacggtcaccacaaccaccaagggggagaacttcaccgagaccgacgttaagatgatggagcgcgtggttgagcagatgtgtatcacccag

SEQ ID NO: 169080 - DNA, 2333 bp, Homo sapiens
  Payload ID: 13280
  Gene Symbol: PRNT
  Gene Name: prion protein (testis specific)
  Uniprot ID: Q86SH4
  ENST ID: ENST00000326539
  CDS Start-End: 939-1223
gtccctagagacagcctggaaagattgggtgccagctgcagagaggagagcaaggcgaccaaacgcagggtaaggtctggaggtgctcatagttcactacgggacatgtacatggaagtgaataattatgtcacaaggtgccaagggggctagttacctcacataggatcttagaaaaggtctcctggagaccatgtctgagctggtcctgaggtgtgagtagggattctccgcagggcggggaaggacttgaaagagtctggcaatatggagcacatcaggattatggaaggtgagcttggagaacaaggcagagtctagcctgtgaaaggcctcttgcaatttgttgaggatccatgaccttctcccatgcatggtgaaatgcccttaaaggattttgaatagatttaaaagacactcaaaaacaaaaaacggtagattcaaaatagacggtagggatcgctttcttccgttttctttgaaggatcagaagtgtttaccaccacctggattgtttttgggctttcagctgtggctgcctgcagcccatcctgcccccagcacctagagtcatctttagaaatgcaagcctgatcgtggaatccaccttcctaacacccttcagtgccctcctcttcgttacacccttactatacaaacgatagtccatggaccagcagcatcaacataaccagggagcttgttagaaatgtagaatctggtccatcccaaacctgacgaagcagaagctgcattttgccaagatcccagggaatttgtgtgcccgttatggtttgcgaagtgcttcccaagagaacatacggcaagccagagggatctttgcagatcttgctcctttcattctctggcctcatcttgtcgctctcctccatccgtgcccacatccccactgtactggaccgcttgcagctccttgaatgcagcatagtcttgttttcttttttgcagtgattctacatctttcccatcttctccacctggatgcctccatccatcctttcagacttcccttctctagcaaacctttcttgctaattcccatgtctaacacaacacttccccatactgcatggccattatcctttctgcatcagactgtgagcaccttgaaggcagtggcagtgactcattcattgtggcatctgcagattccagtggactgccaggcatgcaatagaaaatcaaaaaagatttactgctaaataatcctcaactccagtggcagctccatgtgccatttctcttccgctctggcctcggctcttcctgtgcctacctggggcttggctttcacctaggtgtctgcatggaagggagagcgacctggaggaccatcgccaatccatcaatagcctcccggttgagatgacttcagctctgatttggaagagctatgatattgtttataggagtgaattaatatgtgtaaaggttacaaagtaaacagttaaattaaattaattgtgctggagcaggtcaaacaggcttctgagagatgaacatacacatctctattaactccacattcagtgagtgtgggtaacttgaaattggctgggtcaccatttacatcatagaaattggcaaatagtacaaattagggctccctcacccctactcgggcatagagctggtacactagcacacctctggttatacatgcatgcgtgtgccaccagaacaaaacacctaacagcaggcacgttgcctctgttgcccaccattacagctcccgcacggagcagacagactcatggcaggaattgaatgcatgtttgtcgagtggaagcatgaacaaatccacaaaatgcccaagatgaggcaaagaaggacattggctcaaatgttaaacataagttaggagctgagataatgcccagaggaaaaatgttctgtaattctaagtaaaacccatctctaaggcaggatgctgcttatgagggctccacagacagatgggggaggcctgggtcctgcccttggaaagagtctgacagctcgacttctggaaacagccatctgcacaggtcaacatcttcttagctgacagggagcagatttgcagaccacatcacatttgaaattccagaagaaacttcttggagtctgctcttgtgcaaatgagcctagaaagcccgttaactttgggtggaggcttccactgtttggctatcccaagtgggcccaaagctaaggaaaacccaccagccctttgcttcctgcttcctctatttgtttgccccaggaaatcagaggtgatgacatgatttggcttgggcacgacaggaataaacgatatttaagagacgtca

SEQ ID NO: 169081 - DNA, 2096 bp, Homo sapiens
  Payload ID: 13280
  Gene Symbol: PRNT
  Gene Name: prion protein (testis specific)
  Uniprot ID: Q86SH4
  ENST ID: ENST00000423718
  CDS Start-End: 702-986
gtccctagagacagcctggaaagattgggtgccagctgcagagaggagagcaaggcgaccaaacgcagggtaaggtctggaggtgctcatagttcactacgggacatgtacatggaagtgaataattatgtcacaaggtgccaagggggctagttacctcacataggatcttagaaaaggtctcctggagaccatgtctgagctggtcctgaggtgtgagtagggattctccgcagggcggggaaggacttgaaagagtctggcaatatggagcacatcaggattatggaagctgtggctgcctgcagcccatcctgcccccagcacctagagtcatctttagaaatgcaagcctgatcgtggaatccaccttcctaacacccttcagtgccctcctcttcgttacacccttactatacaaacgatagtccatggaccagcagcatcaacataaccagggagcttgttagaaatgtagaatctggtccatcccaaacctgacgaagcagaagctgcattttgccaagatcccagggaatttgtgtgcccgttatggtttgcgaagtgcttcccaagagaacatacggcaagccagagggatctttgcagatcttgctcctttcattctctggcctcatcttgtcgctctcctccatccgtgcccacatccccactgtactggaccgcttgcagctccttgaatgcagcatagtcttgttttcttttttgcagtgattctacatctttcccatcttctccacctggatgcctccatccatcctttcagacttcccttctctagcaaacctttcttgctaattcccatgtctaacacaacacttccccatactgcatggccattatcctttctgcatcagactgtgagcaccttgaaggcagtggcagtgactcattcattgtggcatctgcagattccagtggactgccaggcatgcaatagaaaatcaaaaaagatttactgctaaataatcctcaactccagtggcagctccatgtgccatttctcttccgctctggcctcggctcttcctgtgcctacctggggcttggctttcacctaggtgtctgcatggaagggagagcgacctggaggaccatcgccaatccatcaatagcctcccggttgagatgacttcagctctgatttggaagagctatgatattgtttataggagtgaattaatatgtgtaaaggttacaaagtaaacagttaaattaaattaattgtgctggagcaggtcaaacaggcttctgagagatgaacatacacatctctattaactccacattcagtgagtgtgggtaacttgaaattggctgggtcaccatttacatcatagaaattggcaaatagtacaaattagggctccctcacccctactcgggcatagagctggtacactagcacacctctggttatacatgcatgcgtgtgccaccagaacaaaacacctaacagcaggcacgttgcctctgttgcccaccattacagctcccgcacggagcagacagactcatggcaggaattgaatgcatgtttgtcgagtggaagcatgaacaaatccacaaaatgcccaagatgaggcaaagaaggacattggctcaaatgttaaacataagttaggagctgagataatgcccagaggaaaaatgttctgtaattctaagtaaaacccatctctaaggcaggatgctgcttatgagggctccacagacagatgggggaggcctgggtcctgcccttggaaagagtctgacagctcgacttctggaaacagccatctgcacaggtcaacatcttcttagctgacagggagcagatttgcagaccacatcacatttgaaattccagaagaaacttcttggagtctgctcttgtgcaaatgagcctagaaagcccgttaactttgggtggaggcttccactgtttggctatcccaagtgggcccaaagctaaggaaaacccaccagccctttgcttcctgcttcctctatttgtttgccccaggaaatcagaggtgatgacatgatttggcttgggcacgacaggaataaacgatatttaagagacgtca

SEQ ID NO: 169082 - DNA, 1873 bp, Homo sapiens
  Payload ID: 13280
  Gene Symbol: PRNT
  Gene Name: prion protein (testis specific)
  Uniprot ID: Q86SH4
  ENST ID: ENST00000418528
  CDS Start-End: 479-763
gtccctagagacagcctggaaagattgggtgccagctgcagagaggagagcaaggcgaccaaacgcaggctgtggctgcctgcagcccatcctgcccccagcacctagagtcatctttagaaatgcaagcctgatcgtggaatccaccttcctaacacccttcagtgccctcctcttcgttacacccttactatacaaacgatagtccatggaccagcagcatcaacataaccagggagcttgttagaaatgtagaatctggtccatcccaaacctgacgaagcagaagctgcattttgccaagatcccagggaatttgtgtgcccgttatggtttgcgaagtgcttcccaagagaacatacggcaagccagagggatctttgcagatcttgctcctttcattctctggcctcatcttgtcgctctcctccatccgtgcccacatccccactgtactggaccgcttgcagctccttgaatgcagcatagtcttgttttcttttttgcagtgattctacatctttcccatcttctccacctggatgcctccatccatcctttcagacttcccttctctagcaaacctttcttgctaattcccatgtctaacacaacacttccccatactgcatggccattatcctttctgcatcagactgtgagcaccttgaaggcagtggcagtgactcattcattgtggcatctgcagattccagtggactgccaggcatgcaatagaaaatcaaaaaagatttactgctaaataatcctcaactccagtggcagctccatgtgccatttctcttccgctctggcctcggctcttcctgtgcctacctggggcttggctttcacctaggtgtctgcatggaagggagagcgacctggaggaccatcgccaatccatcaatagcctcccggttgagatgacttcagctctgatttggaagagctatgatattgtttataggagtgaattaatatgtgtaaaggttacaaagtaaacagttaaattaaattaattgtgctggagcaggtcaaacaggcttctgagagatgaacatacacatctctattaactccacattcagtgagtgtgggtaacttgaaattggctgggtcaccatttacatcatagaaattggcaaatagtacaaattagggctccctcacccctactcgggcatagagctggtacactagcacacctctggttatacatgcatgcgtgtgccaccagaacaaaacacctaacagcaggcacgttgcctctgttgcccaccattacagctcccgcacggagcagacagactcatggcaggaattgaatgcatgtttgtcgagtggaagcatgaacaaatccacaaaatgcccaagatgaggcaaagaaggacattggctcaaatgttaaacataagttaggagctgagataatgcccagaggaaaaatgttctgtaattctaagtaaaacccatctctaaggcaggatgctgcttatgagggctccacagacagatgggggaggcctgggtcctgcccttggaaagagtctgacagctcgacttctggaaacagccatctgcacaggtcaacatcttcttagctgacagggagcagatttgcagaccacatcacatttgaaattccagaagaaacttcttggagtctgctcttgtgcaaatgagcctagaaagcccgttaactttgggtggaggcttccactgtttggctatcccaagtgggcccaaagctaaggaaaacccaccagccctttgcttcctgcttcctctatttgtttgccccaggaaatcagaggtgatgacatgatttggcttgggcacgacaggaataaacgatatttaagagacgtca

SEQ ID NO: 169083 - DNA, 3980 bp, Homo sapiens
  Payload ID: 13281
  Gene Symbol: PRND
  Gene Name: prion protein 2 (dublet)
  Uniprot ID: Q9UKY0
  ENST ID: ENST00000305817
  CDS Start-End: 72-602
gggtgtgctgggggactgtgcagctcgaggctccagaggcacactccagagagagccaaggttctgacgcgatgaggaagcacctgagctggtggtggctggccactgtctgcatgctgctcttcagccacctctctgcggtccagacgaggggcatcaagcacagaatcaagtggaaccggaaggccctgcccagcactgcccagatcactgaggcccaggtggctgagaaccgcccgggagccttcatcaagcaaggccgcaagctcgacattgacttcggagccgagggcaacaggtactacgaggccaactactggcagttccccgatggcatccactacaacggctgctctgaggctaatgtgaccaaggaggcatttgtcaccggctgcatcaatgccacccaggcggcgaaccagggggagttccagaagccagacaacaagctccaccagcaggtgctctggcggctggtccaggagctctgctccctcaagcattgcgagttttggttggagaggggcgcaggacttcgggtcaccatgcaccagccagtgctcctctgccttctggctttgatctggctcacggtgaaataagcttgccaggaggctggcagtacagagtgcagcagcgagcaaatcctggcaagtgacccagctcttctcccccaaacccacgcgtgttctgaaggtgcccaggagcggcgatgcactcgcactgcaaatgccgctctcacgtatgcgccctggtatgtgcctgcgttctgatagatgggggactgtggcttctccgtcactccattctcagcccctagcagagcgtctggcacactagattagtagtaaatgcttgatgagaagaacacatcaggcactgcgccacctgcttcacagtacttcccaacaactcttagaggtaggtgtattcccgttttacagataaggaaactgaggcccagagagctgaagtactgcacccagcatcaccagctagaaagtggcagagccaggattcaaccctggcttgtctaaccccaggttttctgctctgtccaattccagagctgtctggtgatcactttatgtctcacagggacccacatccaaacatgtatctctaatgaaattgtgaaagctccatgtttagaaataaatgaaaacacctgagctggtggctgtgtactttgactggtacatggaggctattttaatccttctaactaaactaaaatagattaaaggaattaaactaaaatacaagtaaagctagacaaaggcccagaaatcatactgtaaggaaatgttattggaagctgattcccagagcagaccacatatacagcaggatgtgcctgtggcatgaagattttctttctcttttttttttttttttagatggagttttactcttgttgcccaggctggagtgcaacggcatgattttggctcactgcagcctctgcctcccaggctcaagcacttttcctgtctcagccttccgagtagctgggattacaggtgtgtgccatcatgcctgactaattttgtatttttagtagagacagggtttcaccatgttggccaggctggtcttgaactcctgacctcaggtgatccacccacctgggcctcccatagtgctgggattcaattttttttttttttttttcaaaagaagggtaagtgcttgctgttcccatccctgaaacattgcatgtatttaagaaaaacaaaatgttagtggcatatttgcttctaatgttcccctaaccctacatgcatgttttatgtgcactcatatgagtatctttaaatataatccctttacatctgtgttctatgcaaagtctctcatttctttcaagacagcctaatgaaggccatcatctctgtaaaccacttgtcactacaaaaatacaattactcaccaaaaagctttaaaaaataaagctgtgtctttagggagacccaataaagaatgcaatccatgccataagcaggagttgatacaccaccttattagctaaaaatatatataacacaatatgagtaatgtttaagatctgttttaaatttaaaacaatgaattgaatgctctaagaggctcctacaggcgctccaggccactctcagagactcccaggagttgttgaactatatttggagaaaacagccactgaatattatcatttctcctttaaagagagtttgtaaggggggaacatgcattttatcagacaatttatccaaagcattgcagaacatgagtgctgatgagggcacctcttgtgctgagtcccctcagctatcagtgttcttctcaaggacacatttggaaggttttaacattgaaagtgagcggaggacttgggggcagagcagcacaaagaaacagccttacactgggcacatggaggagacgtccaccctgcagccaggactggggttcacgtcactgccagagctacactcgccttctgcttccacggtcctgttaattctagatcagagagcaagaaaaaagtacagaacatatcctctacggttatttcctgctttctaattaaaaaaataataaccatggcaagagagaaagaaagagaaagtactcagaggctgacactgacatttcacttcctcgctctcctaagtttaattacaacagcacgtgcagccacgtcagccaaatgacttcatttctgatgtgaaaacgcttaggccatgatgtcgttcattttctgtaattgctgccttttctcattctgttaatagtcccggcaaccagatttcagtggggcatgacgtgaatgtgtatatggtgattcaaatgcaaaatttgtttatggggcttttaatcgaacgcgtgtgtgcctgaacattcttgctcaagttgatgaatcatggggtggaataaaggctgagtttagtttttcactttagcaaaggggcaatggggtgcctactatgtgcgagacattgggaggggcttctgaattattctggatatcgtcattttgcagtgtgcataattttgccaaccgttgctttcgtagcccctgctaagtgttgactttttaaaatataagtttattgtaaaagtgacatgaaaattacaacagatattccagaccaaaataatacaacaatcccagcatctgattgagtcagtgtttgctgtttcccctgcactttcctagttcttaagcatttgcgtatgtaaacattcatatttgcaataaaaaagtgagcttttatattctaaatttttacttaacttaattcaatgctttctactcatttttctatacttttttttttgaggcagagtctcattctgttgcccaggctggagtgcagtggcgtgatcttggctcactacaacctccaccttccaggcttaagcgattctcatgcctcatcctcccaagtaggtgggattacaggtgcccaccaccaagccctgcaaatttttttgtatttttagtagagacagtgttttgccatgttggccaggctggtctcgaactcctgacatcaggtgatccacctgcctcggcctcccaaagtgctgggattacaggtgtgagccaccacgccctgcctactctttgttttctttcctccccacccattttcccccgtcctgtcccctccttccagcctgagatgtaggctccaccttaactgtgctcagatacacaagtgagggctttttaacttgattatgccttttaaaaatactatgtatgtaaaatatttattcatctgcaatttggcttccctaacttaacattgcatcatgaaactctttggaacaacagctatctagatagctgactcattcttttggattgctacgtaatctcacttaatacagatgtatcatgattgattgaatcattgccttgttgatgggccttcagattatttccagttttttgccactgcaaacaataaacatccttgtacatacta

SEQ ID NO: 169084 - DNA, 9129 bp, Homo sapiens
  Payload ID: 13282
  Gene Symbol: PAWR
  Gene Name: PRKC, apoptosis, WT1, regulator
  Uniprot ID: Q96IZ0
  ENST ID: ENST00000328827
  CDS Start-End: 374-1396
ttttccgctcgtgcttcggcgccgctcggctcccttcccgcccctggctccctccctccctccctccctccttcttctccctccctcctgtcctgggattgcctggagctccgcaccgcgagtttgccgcggcactttccgcgcggcggaagagcgcgcgccagcttcggcacacctgggagccggatcccagccctacgcctcgtcccctacaagctcctccaagccccgccggctgctgtgggagcggcggccgtccctctcctggaggtcgtctcctggcatcctcggggccgcaggaaggaagaggaggcagcggccggagccctggtgggcggcctgaggtgagagcccgaccggcccctttgggaatatggcgaccggtggctaccggaccagcagcggcctcggcggcagcaccacagacttcctggaggagtggaaggcgaaacgcgagaagatgcgcgccaagcagaaccccccgggcccggcccccccgggagggggcagcagcgacgccgctgggaagccccccgcgggggctctgggcaccccggcggccgccgctgccaacgagctcaacaacaacctcccgggcggcgcgccggccgcacctgccgtccccggtcccgggggcgtgaactgcgcggtcggctccgccatgctgacgcgggcggcccccggcccgcggcggtcggaggacgagcccccagccgcctctgcctcggctgcaccgccgccccagcgtgacgaggaggagccggacggcgtcccagagaagggcaagagctcgggccccagtgccaggaaaggcaaggggcagatcgagaagaggaagctgcgggagaagcggcgctccaccggcgtggtcaacatccctgccgcagagtgcttagatgagtacgaagatgatgaagcagggcagaaagagcggaaacgagaagatgcaattacacaacagaacactattcagaatgaagctgtaaacttactagatccaggcagttcctatctgctacaggagccacctagaacagtttcaggcagatataaaagcacaaccagtgtctctgaagaagatgtctcaagtagatattctcgaacagatagaagtgggttccctagatataacagggatgcaaatgtttcaggtactctggtttcaagtagcacactggaaaagaaaattgaagatcttgaaaaggaagtagtaagagaaagacaagaaaacctaagacttgtgagactgatgcaagataaagaggaaatgattggaaaactcaaagaagaaattgatttattaaatagagacctagatgacatagaagatgaaaatgaacagctaaagcaggaaaataaaactcttttgaaagttgtgggtcagctgaccaggtagaggattcaagactcaatgtggaaaaaatattttaaactactgattgaatgttaatggtcaatgctagcacaatattcctatgctgcaatacattaaaataactaagcaagtatatttatttctagcaaacagatgtttgttttcaaaatacttctttttcattattggttttaaaaaagcattatccttttatctcacaaataagtaatatctttcagttattaaatgatagataatgcctttttggttttgtgtggtattcaactaatacatggtttaaagtcacagccgtttgaatatattttatcttggtagtacattttctcccttaggaatatacatagtctttgtttacatgagttcaaatacttttgggatgttaccttcacatgtcctattactgatgtgtgcaaccttttatgtgttgatgactcactcataaaggtttttgtctactgtcatttgttctttccacttattctaagcatttagagtaatagagtcatacttttttataacagcaaccttttaaaaggaaagctcttataaagtcactgtcatgttttagttgactaaatataaatttaagagaatacttgaattgtgctatagtaaataaaaatttactattttgtgtttgaatattgaaaaattgaatcactttaactcctgaaaaacatacaattgtaatttcaatgtaaaatttcttatgtaggtactacctttttttatcgttccaaggtttgctagtgaacacaggatattttaaaagttttttattcttcgggcctggaaagtgtacaaagtcagtgtaggagaaaaaaatccatatttttatattagcatgcacactaaaaaccaaaatattattcatacttaaaacattcatacaaaacaatatgtaagcagaaatagtactaaaatactttgcctaatttctaagttgaagaataacactgggacacagttttttcatatgagagaatattccgctatttcaaatttaagggattttcttcctaacattgaaattttaaaaacagagttacttctaaataattatacagattttttcttctattaaatattattatttagaattgtttttgtattacatattcatgttaagaaccccgtcttcccttaaaatacattaaaattatgacatttttgctttgtgattgaatttcaaatagcagtatggtatccttttatctagttaatatatgaaagtggcttgaatatagtcaaatccattttaggtactctactgactttttccttcacttgccaagcccttttattgttcactgttagaaaaatagagaaggtgagacagctgggggaaaatgtggagtaaatgataatcaaatgttgaattctaaaagtctctacatttacctaggttggctttctcccccagttcagaagtttccagcttggccaatcatcagaatcacttgaggaacttagaaagaactccctggctgtagctcctatgtaggtttaggttgagactctggattccacaatttttaaaggttaccatctgaggtttctgatcatagtctacttttgaagcagctgctgctgtttctttattccattgaacaccctggaattgacataattttatctatcagcatttctccccttttagtttatttaataattaacccggtctccagggcagttttcatatgaccatgtgtatattcactgctcacgaaaaagtttaatgttagattaccaaatttaatatagttacagaattactgcataagggcttcccttcttggagactcttacccagcatgggaacagtgatctgcccacatgacagggtggtatgccaggcatagttaactgcttttggttgtgaggtactcatcttcctttagttacccttagttatgtggcacacatgtccttattgcctagttcgtcatccacactttggatcttgtgaaaatgctgttagtatccaaccttaaaatatattagtatatgggtttttattaaaagaattactttgaattttctatttaattcatatgtaaataaaggaacatttcatttcacttaaaaaaattatatcagttattaggctgggtgcagtggctcatgcctgtaatcccagcactttgggaggccaaggcgggtggattaccagagttcgggagtttgagaccagcttgaccaacatggagaaaccccgtctctactaaaaatacaaaattagccaggtgtggtggcgcatgcctgtaatcctggctactcaggaggctgaggcaggagaatcgcttgaaaacccaggagacagaggttgcggtgagctgagattgcgccattgtactccagcctgggcaagaagagcgaaactctgtctccaaaaaaaaaaaaaaaaaaattattaatacttttaaagactgagctgtttaagaattttttggggaacatttctagcagtgatttttttggcctttaatgatagcgtaaagacaggagccttacaacttaggcaaagcatttcacatgcagtccttcttccatctcaaaatatgtacttattttacatacagaattttacactaaccattgaaaaataaagtaggatctgctacagtttcacctgaaaatttataaaaagtgttgagattggtagaaggtagtttttaagtacatgtgcactaccctaaaagacttgtctattgtcaataaagtgttagtatttgtgaaattattattcctgttcagaaatactatttcttaaatctcctgggaatttgtggcataataaagcacattcaaagttctaatgtatttatgagctcattttcaaaatagtaagtttgtcatctttaaaatgaacatgacttgcctccttgatttctgaaatgaattaattgaagattgctatagtaatctttatttcatctttctagagttgttgacaattttattatacaacagttaccattagagaaggagggaagggcttttgggtgtgtatttataggtactaagggatttactaaatatagtagattagcactgtcacacttgttcaagtagtttcaaacatagaaaattaagtatcaggtatgtggagcaatgtagtttttttttttcttcagtttaaaaaatttttaattgtggtagaagcaatgtattcttaaggtgaaaaacctacctcggttacatgtggtttgtgttttttggattaatctggattttataattagaaataaaaatgtaagattttgaatccacttaatttcttgaaaatagtacaagtcagtgtaatagagaagcattcatatattcaacactgtaagacaaaacagcagagaccttggatttgataattgatctgatatcctggacagtattcatatgtacagtgataggtatctttctttggagttttttttttgtgcatatgtgtatagttttatgggttctgagttggtgaccagtaagttgcatgtagtgctggcacttacttaataactattcatgatattgttaataacttgttataggattgtattcccaattacagtctctaagattgtaattgatattatctgagaggtagtgtgacaactttcttttgttgttacattaagccgaaaacataatactaatagacaactaacagtttgcttatcaggcacatcaactaaggcacctccccccatgctaagtttctcctggatatatggaagttgattgtttcccagtttaaaaacttgaactaatatctcctaagaaaatctgagtccatattgtttttattttacttagctagaatctcatagcatgttaaagtcatatccttatccccactaaaaataactatgtctatgtgagaggaatatagtatgtgggagctgtattaaatactattacaggtgttacagaatctttaaataaatggacatggaccaactttccatctagtagtgtacgatctatatagtgcatgtcagtagcacaaaatgcagtcttagcattagcctgtctaatctgaatagtttactcaaaagtacttctttgtgttaagtattcagccactgtttttagatctagttaataggttctatttaatttgctacaacatttactgaatggtggagtgaaaaaactgatgcatactgggaaatatctaccattttttaaagataatgttaattaggaaaagaacacttttaaggaatttatagcagtgatgaaatgaattcagttatatcagatacaccaaactgttgatggtatttaaatgtgacttcaagttagtatttctgtatatattattgattactggtttgtttttagatatgtaagtctgttctaatctacagttcacatatcgacagttactctggtaataatagaatgttagtgatgatcacttggtggatgttgattaagtgcctgtgttttgtttcctcctctggataccaaataggtgtatgctacttttttggtgaacttatttcttggaagatttggctatgctattcagggtttttattcttatgtttttcttctaaatttaagtagcatcctgctgctaccatattaaagctaaaatttaacttttgctgaagaatcagctaattcaggtaatccaaatatttgtggaaaaacatctggataatttattgaacacattagtattgtgttagacagctttgatcattcccatttcataggtttttattgtggaatagtcaacttaatatagattcactttcaatttgcatgtataaagtaatactcaataaaatttttttcatttatttttcaacagtggttattttttttcttcctgtactatcagtaaaatcctgactatgagttttacttttgaagctaaaggataatgctggtaatctaattatgtacctcttacagaaaccatatgcagcactttaaaaatctttatttggtatattattttaggtggacaatgatttaagactcaaagccatcatattaaggtctaaatacattagtggtggggtttctcgaataaatgaggaagtgcacaaaagttcagcctgactgaaaattttaattgtgttttaaaactacatgaataatttcttgattcaaaatcagaactcttataaactaaatctgatggtgtccaaagaatttcaggtccttcaaagtttgtaaaagataagtaggggcctaggaatataaaaatttagacttttttagtaaatggtttacataaccttttgtcttaatttgtcattcttcatacacaggcacaagctaatcagtcttctctacttctagaactctaaatcttctcagtaatgtcatacaagtctaacaagaggaaaagcatccttaagtcagtctatttagataaactcttcaagtccctatataaggacgtattccactagcaagccagtaaatttttccaaggtcacataatcttacatgaaatggaacctttcatcttagacttcatcaaactcaattttttcccttctagattcactttgtgtttatgcatgcatgcacgcgtgcacacaattctatcagcagctgtaaactacccacatattttcttaatctcattttttcagtttttcttcatctttaaaagaggttacatttcattcctggtcaactcttaaaaagaattatgtaatgttgggccttcatattaaagagagagactggttataagatcctttacagtccattcattttattctgatgtctaaccagatagacactagcaagcaaaacttccctcttaatcctggaccaaatgcataattttactgtcactttcaaaaatctgttatgactgaatcaaaatccttttaaagaaaggaaaaagctccttttgtgtcaaatagttgaacaacatgaaaacagtatgagccggttaaagatagattgaatttttactttacacatatgaaaaacagtaagttttgactgctgtgtatgttattcatgttaatatgtgctcagttattcactattgttaatccacatataatcagttgctatccctggttagacacactatggaacttgaaatgcacaatatttacattgttagaggcttctatccaaatatctgcattcctttaaaatgtgaactatttgctgtgattaaccaaaggtagattatgtcatcagtggacattttagctttatggaaacaaattattaagaaatgaatagaaaggtgtctttttctttgtgtagtgcaaaagcctaaagctatcagtcaaaggcctaagaaatccacatttgaaaaacgtaaatcatgattggtaagaatacattcatctgatagtattgagaaaagttgaaaaactgttagccttccataacacattaaacattttatgtatggatggctgaaagtattgagaaaagctgaaaaactgttagccttccataacacattaaacgttttgtgtatggatggcttaggacaataaacaacatcattaaagtaaaattatgtcagtctgttcatattaacttatttaaatcaatgaaaattttgatgagatgactaaatggatgctttggaaatgcaggattataggaggcctaaaagtgcatcttgtttcttgtaacccttttaaaaccaatatgcctggctaggtgcagtggctcatgcctgtaataccaacggggtaacacagggttatgccgtctatacaaaaaaataaatgagctgggcaagatggcatgcacctgtagtcccagctgcttggtaggctgagggggaaggattgcttgagcctgggaggtcgagactgcagtgagccaagatcacaccactgcactccagcctgggtgacagagcaagactctacctcaaaaataaaaataatcaatatagtttcaatgaagcaaagcatctcaggtaacaatttgagcataactttaaccataacttatgatagcataataacattcattagtaattcagtagccgtatgtgccaggctgtgttaggtgctttatatattgtttaatttttaaaaacttgtggagtgtacagattggtaaggtgacattgtatcacaaagctagtctttgagtccaaagttttgtggttttatgttatgatatacttttatcatggaattgtcttattaaatgttttgccagtggttcttaaagtgtgtttctgacaccagtagcattgacttcacttagaaacctgttagaaatacaaattatttggccccacccaacacttgagtcacaaactttgcagatggggctcaatctgttttaacaagcgcttcatgtaattttgatgcaggcctaagtttttgagccactgcagtatgcatttctatttttaagcaaagatcttggtctttctttttggacattgtagaaataacatgaacttgttttttgtttgtttttgttttgttttgttttaagctcctgatctttgttggttatgttgcaaaagattgtatcaggagaagcctcagcatggacattggcatcctgacataacccccattaatttagtattctttctgaaactcaaatggattctcaagtccaagagactatggaataaaatcattgtttgtctgtgttaagttttatctctgttattgcctgaagacttttggtaacaataatgcgctttcatcaaacttttaagacttgattggaaaaaataaatgtatgtttcatcagttatacaa

SEQ ID NO: 169085 - DNA, 494 bp, Homo sapiens
  Payload ID: 13282
  Gene Symbol: PAWR
  Gene Name: PRKC, apoptosis, WT1, regulator
  ENST ID: ENST00000548426
  CDS Start-End: 268-494
gcctcctctgcgaaccggctaggagctccgcgcctcgccttgggagtggggttgtagctgacggggacctcggaccggcggtggctagagcgcggagcaggcgatacgacgagccgacagccccgccggctgctgtgggagcggcggccgtccctctcctggaggtcgtctcctggcatcctcggggccgcaggaaggaagaggaggcagcggccggagccctggtgggcggcctgaggtgagagcccgaccggcccctttgggaatatggcgaccggtggctaccggaccagcagcggcctcggcggcagcaccacagacttcctggaggagtggaaggcgaaacgcgagaagatgcgcgccaagcagaaccccccgggcccggcccccccgggagggggcagcagcgacgccgctgggaagccccccgcgggggctctgggcaccccggcggccgccgctgccaacgagctcaacaacaacctcccgggcgg

SEQ ID NO: 169086 - DNA, 482 bp, Homo sapiens
  Payload ID: 13282
  Gene Symbol: PAWR
  Gene Name: PRKC, apoptosis, WT1, regulator
  ENST ID: ENST00000550603
  CDS Start-End: 1-219
aagaaaattgaagatcttgaaaaggaagtagtaagagaaagacaagaaaacctaagacttgtgagactgatgcaagataaagaggaaatgattggaaaactcaaagaagaaattgatttattaaatagagacctagatgacatagaagatgaaaatgaacagctaaagcaggaaaataaaactcttttgaaagttgtgggtcagctgaccagctcctgatctttgttggttatgttgcaaaagattgtatcaggagaagcctcagcatggacattggcatcctgacataacccccattaatttagtattctttctgaaactcaaatggattctcaagtccaagagactatggaataaaatcattgtttgtctgtgttaagttttatctctgttattgcctgaagacttttggtaacaataatgcgctttcatcaaacttttaagacttgattggaaaaaataaatgtatgtttcatcagtta

SEQ ID NO: 169087 - DNA, 1573 bp, Homo sapiens
  Payload ID: 13282
  Gene Symbol: PAWR
  Gene Name: PRKC, apoptosis, WT1, regulator
  ENST ID: ENST00000551712
  CDS Start-End: 1-583
gggggctctgggcaccccggcggccgccgctgccaacgagctcaacaacaacctcccgggcggcgcgccggccgcacctgccgtccccggtcccgggggcgtgaactgcgcggtcggctccgccatgctgacgcgggcggcccccggcccgcggcggtcggaggacgagcccccagccgcctctgcctcggctgcaccgccgccccagcgtgacgaggaggagccggacggcgtcccagagaagggcaagagctcgggccccagtgccaggaaaggcaaggggcagatcgagaagaggaagctgcgggagaagcggcgctccaccggcgtggtcaacatccctgccgcagagtgcttagatgagtacgaagatgatgaagcagggcagaaagagcggaaacgagaagatgcaattacacaacagaacactattcagaatgaagctgtaaacttactagatccaggcagttcctatctgctacaggagccacctagaacagtttcaggcagatataaaaggaagagagataaaccctacacagagcaaggagctgttacgaggagtgggagtgttggagggtgaagagaatggggcagtgaaagatactaaaaggatggaagccagttaagtagttgttggttatttgggaatttcagaatatatcctgtacttctgaatatttgatacttattctaaaagtaggatttacccttgagtcttgtatttcttctcattgctaagctttataatgtctattttagtggaaaattcctctagctataatctcttaatgctgccaatctcattctcatgatagttttagaataatagtgtaattttccccaacacaacaccccctggtgtttctacataagatgcgaaaattcccagagggggaaaacttccagtaaggggtggcatttatctttgatgatactgtttcttttcccttttctgagcattatagttcatgtctttgtagctaagagtggagggaggattctttttggatcgtattagagatttatgttaacattcctaagtaaaatgttaaaaactttttggagttaatgaacaatcttttattctgagtattttgcactgtgcatatctggctttcaaaataggttaaatggctaaatttggcaataagatcaagtaacacaattcttcacaattatgacagtattccctaaaacataatacatattgggaatgaagcactgattttgtttttcactattccttgcatttgcataatgaaggccgggtgtggtggctcatgcctgtaatcccagcactttgggaaggccgaggtgggcggatcacctgaggtcaggagtttgagaccagcctggtcaacatggggaaaccccatctctactaaaaatacaaaaattagccgggcgtggtggcgggcgcctgtaatcccagctacttgggaggcggaggcaggagaatcacttgactgcaggctgaggttgcagtgagccaaaatagtggcattgcactccagcctgggcaacaggagcgaaactctgtctccaaaaaaaaaaaaaaaaaaaaaaaaaa

SEQ ID NO: 169088 - DNA, 364 bp, Homo sapiens
  Payload ID: 13282
  Gene Symbol: PAWR
  Gene Name: PRKC, apoptosis, WT1, regulator
  ENST ID: ENST00000552637
  CDS Start-End: 174-364
ggcgatcgtcggggtccgtactgtagccccgccggctgctgtgggagcggcggccgtccctctcctggaggtcgtctcctggcatcctcggggccgcaggaaggaagaggaggcagcggccggagccctggtgggcggcctgaggtgagagcccgaccggcccctttgggaatatggcgaccggtggctaccggaccagcagcggcctcggcggcagcaccacagacttcctggaggagtggaaggcgaaacgcgagaagatgcgcgccaagcagaaccccccgggcccggcccccccgggagggggcagcagcgacgccgctgggaagccccccgcgggggctctgggcaccccggcggccgc

SEQ ID NO: 169089 - DNA, 2159 bp, Homo sapiens
  Payload ID: 13283
  Gene Symbol: PRKRIP1
  Gene Name: PRKR interacting protein 1 (IL11 inducible)
  Uniprot ID: Q9H875
  ENST ID: ENST00000397912
  CDS Start-End: 50-604
atacttgcgcgccgacgccgccgctcgcttgtgaaactggaaggctgccatggctagcccagccgcctcctcggtgcgaccaccgaggcccaagaaagagccgcagacgctcgtcatccccaagaatgcggcggaggagcagaagctcaagctggagcggctcatgaagaacccggacaaagcagttccaattccagagaaaatgagtgaatgggcacctcgacctcccccagaatttgtccgagatgtcatgggttcaagtgctggggccggcagtggagagttccacgtgtacagacatctgcgccggagagaatatcagcgacaggactacatggatgccatggctgagaagcaaaaattggatgcagagtttcagaaaagactggaaaagaataaaattgctgcagaggagcagaccgcaaagcgccggaagaagcgccagaagttaaaagagaagaaattactggcaaagaagatgaaacttgaacagaagaaacaagaaggacccggtcagcccaaggagcaggggtccagcagctctgcggaggcatctggaacagaggaggaggaggaagtgcccagtttcaccatggggcgatgacaatgtttgccacagcctctgcctggaacctggctcgtgctgtgaccagaagggaaaggcggctgtttggctctttctcccccgcaaggacccgctgacccgctggatggagagcaaaggagacccctcccgagccgctcacagtcctgtatttggcaggtttgggagcctgaggggccatctccctgacactcagaggcactgccttgcagacaccatccgtgctcctggtaaagggggacagagagcctcaccttgccacatatttgaacagtgatgagtttggggctggtttctgggaagggaacgtttatttagtaaagagcagaacacccttgcgttttgttgggacatgtggaccgtgagtcgcaaacactctggagaaggctgagatgccaccattcccacggggactgaagacacattacgtggacctggtcccaggctcagtgaggagatggcctcagctgtggggctggtccatgttgcccactcactccagtgggaagtggggaccacgccatagagggtctgctcccactgcagctcccggtgctctcgtgttctgggaaggcctgggtgtgtgcacaaggaggcccgggccagggacttcaccaggggctgggtcacaagggcacagggtgtgtggaaagcgctgtgggggaagagccggtcaccggagagtgagcaggcggagactccaagctgggctgagccagagcagaaggcgagggattcccagccggacgggggttctctcaccaacagctgtgatttcatcccgaagtggaagggggtctaaacagaacaggctgagagaggcgggactgggtcaagtgggtggagctcctccttgcatgactgcaactgtcggggctttccgccggctcacagcagttggggccagcggggagaagagaggcggaactgctgtgtcctcatgtggcgcagcctcaaactggcatccaggcactgggcccatgcagagaaggcacctgcagagagcagggcagcccggcgcaggggcatgcgcctagaatcccagctactcggaaggccaaggcaggaggaccgcttgagtccagggattcaaggccaacctgggcaatagagcgagaccctgtctcttaaaaaacgatgatgatgaacacagaggacggggcactgtgctgggagccagggggcctgggaggagccgagaccagccttttacctcggggttttgaggccaacagggacgacagagacagtttctagttagagccttggctccatttttggatgatttagccccgagttcctgagtctattttatgccccttacgtactttgatagaactaaggaaatagtggttttgagtgaagggaaaggaaacccagaaacattttacgttgcttttacttctgtagtgtagattgccccggcccctctctgagccctgtagcatctgtgatagcttctgtcccttcatcggttcatgtcacagggattttctttcccaggaagcggacacggagagtcagccctaataaatgagcacatgccctggctgta

SEQ ID NO: 169090 - DNA, 3430 bp, Homo sapiens
  Payload ID: 13283
  Gene Symbol: PRKRIP1
  Gene Name: PRKR interacting protein 1 (IL11 inducible)
  Uniprot ID: Q9H875
  ENST ID: ENST00000496391
  CDS Start-End: 1311-1865
ctgcgcctcttcaggtcatcgcttgctctcgttcccaggctttggcctctagtggacgagaatcaccgagtctgcggggctggacgctgactgcccgggccagcacctaggcgggcgggagctgtgcggcccagggttcacgcgggccgggtagaggctcgagccgggacccccgagcgtgaaccccggagccggcggcgctggggccagaggggccgggcgggaggtggtggcggaggcgaaggggcgacgggacctgggcctggcccgtgtgtgtcctcggcggcctggcgccggccgtcgctgtacggtgagccccagggaggcggatctgggccccgagaaggacccccgcctggatttgccccgtaggcccggcccgggcccctcgggagcagaacagctttggtgaggtggacaggaggtgacctcgcgagcagacgcgcgcgccagcgacagcagcccgccccggcctctcgggagccgtggggcagaggctgcggagccccaggagggtgatttctgcctttgcaggccggagccctcatgacttcagtgacctgcttctgcccctctaggtctatcagccacagtctctgcaagtttccaagagcagcagaaaatgaacacattgcaggggccagtgtcattcaaagatgtggctgtggatttcacccaggaggagtggcagcaactggaccctgatgagaagatagcatacggggatgtgatgttggagaactacagccatctagtttctgtggggtatgattatcaccaagccaaacatcatcatggagtggaggtgaaggaagtggagcagggagaggagccgtggataatggaaggtgaatttccatgtcaacatagtccaggagattgtcagaaatggaggagggggcaccagatccaaggaagtgcccggacaaagccgggaggcgaggagagccgacggggaggaggtgccgagagcatcagcggggctgctcggtggcacgaagacgcccgcggggactggagaggtcggctagggccaggctactcaggcacggagggccacctccccttcagggacgtgagcatctagctgcactgatttgttgttcaggaacaggaaatgaaaccccgcagctttgaacacaataacccacgccagcctcaggctcatgaatattcagcaggctgcttgcgccttgcaaccccgcctccgttcccctctgcggagactgcgtatgcgtcgccggcgcgcggctgtgtcgtcatacttgcgcgccgacgccgccgctcgcttgtgaaactggaaggctgccatggctagcccagccgcctcctcggtgcgaccaccgaggcccaagaaagagccgcagacgctcgtcatccccaagaatgcggcggaggagcagaagctcaagctggagcggctcatgaagaacccggacaaagcagttccaattccagagaaaatgagtgaatgggcacctcgacctcccccagaatttgtccgagatgtcatgggttcaagtgctggggccggcagtggagagttccacgtgtacagacatctgcgccggagagaatatcagcgacaggactacatggatgccatggctgagaagcaaaaattggatgcagagtttcagaaaagactggaaaagaataaaattgctgcagaggagcagaccgcaaagcgccggaagaagcgccagaagttaaaagagaagaaattactggcaaagaagatgaaacttgaacagaagaaacaagaaggacccggtcagcccaaggagcaggggtccagcagctctgcggaggcatctggaacagaggaggaggaggaagtgcccagtttcaccatggggcgatgacaatgtttgccacagcctctgcctggaacctggctcgtgctgtgaccagaagggaaaggcggctgtttggctctttctcccccgcaaggacccgctgacccgctggatggagagcaaaggagacccctcccgagccgctcacagtcctgtatttggcaggtttgggagcctgaggggccatctccctgacactcagaggcactgccttgcagacaccatccgtgctcctggtaaagggggacagagagcctcaccttgccacatatttgaacagtgatgagtttggggctggtttctgggaagggaacgtttatttagtaaagagcagaacacccttgcgttttgttgggacatgtggaccgtgagtcgcaaacactctggagaaggctgagatgccaccattcccacggggactgaagacacattacgtggacctggtcccaggctcagtgaggagatggcctcagctgtggggctggtccatgttgcccactcactccagtgggaagtggggaccacgccatagagggtctgctcccactgcagctcccggtgctctcgtgttctgggaaggcctgggtgtgtgcacaaggaggcccgggccagggacttcaccaggggctgggtcacaagggcacagggtgtgtggaaagcgctgtgggggaagagccggtcaccggagagtgagcaggcggagactccaagctgggctgagccagagcagaaggcgagggattcccagccggacgggggttctctcaccaacagctgtgatttcatcccgaagtggaagggggtctaaacagaacaggctgagagaggcgggactgggtcaagtgggtggagctcctccttgcatgactgcaactgtcggggctttccgccggctcacagcagttggggccagcggggagaagagaggcggaactgctgtgtcctcatgtggcgcagcctcaaactggcatccaggcactgggcccatgcagagaaggcacctgcagagagcagggcagcccggcgcaggggcatgcgcctagaatcccagctactcggaaggccaaggcaggaggaccgcttgagtccagggattcaaggccaacctgggcaatagagcgagaccctgtctcttaaaaaacgatgatgatgaacacagaggacggggcactgtgctgggagccagggggcctgggaggagccgagaccagccttttacctcggggttttgaggccaacagggacgacagagacagtttctagttagagccttggctccatttttggatgatttagccccgagttcctgagtctattttatgccccttacgtactttgatagaactaaggaaatagtggttttgagtgaagggaaaggaaacccagaaacattttacgttgcttttacttctgtagtgtagattgccccggcccctctctgagccctgtagcatctgtgatagcttctgtcccttcatcggttcatgtcacagggattttctttcccaggaagcggacacggagagtcagccctaataaatgagcacatgccctggctgtacattttgaaa

SEQ ID NO: 169091 - DNA, 884 bp, Homo sapiens
  Payload ID: 13283
  Gene Symbol: PRKRIP1
  Gene Name: PRKR interacting protein 1 (IL11 inducible)
  ENST ID: ENST00000462601
  CDS Start-End: 71-454
ttatcaccaagccaaacatcatcatggagtggaggtgaaggaagtggagcagggagaggagccgtggataatggaaggtgaatttccatgtcaacatagtccaggttcaagtgctggggccggcagtggagagttccacgtgtacagacatctgcgccggagagaatatcagcgacaggactacatggatgccatggctgagaagcaaaaattggatgcagagtttcagaaaagactggaaaagaataaaattgctgcagaggagcagaccgcaaagcgccggaagaagcgccagaagttaaaagagaagaaattactggcaaagaagatgaaacttgaacagaagaaacaagaaggacccggtcagcccaaggagcaggggtccagcagctctgcggaggcatctggaacagaggaggaggaggaagtgcccagtttcaccatggggcgatgacaatgtttgccacagcctctgcctggaacctggctcgtgctgtgaccagaagggaaaggcggctgtttggctctttctcccccgcaaggacccgctgacccgctggatggagagcaaaggagacccctcccgagccgctcacagtcctgtatttggcaggtttgggagcctgaggggccatctccctgacactcagaggcactgccttgcagacaccatccgtgctcctggtaaagggggacagagagcctcaccttgccacatatttgaacagtgatgagtttggggctggtttctgggaagggaacgtttatttagtaaagagcagaacacccttgcgttttgttgggacatgtggaccgtgagtcgcaaacactctggagaaggctgagatgccaccattcccacggggactgaagacacattacgt

SEQ ID NO: 169092 - DNA, 1680 bp, Homo sapiens
  Payload ID: 13284
  Gene Symbol: PANO1
  Gene Name: proapoptotic nucleolar protein 1
  Uniprot ID: I0J062
  ENST ID: ENST00000620120
  CDS Start-End: 116-763
agacagcaggagagcagagaccaccccacaggaagataccgctgcttccgaatctgcaggggtaaaatcctccacccaagaagccgccaggctcctcctacccccaagaaaggcaatgggggtgaggctccgagtctggccggcggctccccattcaatctcccgctgtccccgtcctcttggggcggtgctttctatcctgctggctggagggtcccggaaggggactccaactgcgcgatgcctcggccagaggacaaaggagaagcgggttgggggccgctctctgcgctcggaggccggctcaggcccctgccctactgctggggctcagccgaccgctccgtcctccgcctggccaccgcgactccggccacgcacgtgtccacagatgtccggtgaactcccacgtgtgcgtcccacacgggtcggcctttcttccttgggctcgggccccggacacccaccctcggggacacgtatgtgcggggagcgcgcccggaaccgtcggggccgagcacggcgtctcacgccagagcagccgcggatcggagcatccgctggtccaggaccccccctcccgcccgccaggccacgttgttcgggcagctgtcacctccctcggccgccgcagcacctctcgcccccgcagcccggccgcgttcggatgggcgcagcagaagggagccgccgggcagacactcaccacgctcgccgccgccgccgcgctcgcctgcccgccccgcgctcggccagcacctaggcggggaggcgcgtccgctcggcgccgcgcgcgctccgccctcggcctcctccgggcttcggctccccctcctggccgtcgaggctactgcgcccagccaggccacagccacgcgcccacccgccccctggccgtgggttcccccgggcagggtggcagttctgcgcgcagaggccgggccgcgcgtccccaaggtcctttcttggtttccgggcctcaggcccctgcaggcacaaggacccgcggggcgcgggcaggtggcagagcgccggtggatgagggtgccctgggggaggcgtggcctccagggcagacacaggtgatccgtggaactgctgggccagcgcaatggagaagtggaggcacaaccccacccgccgaacagcgactttgtatccaaagcaccccacttggggctgggcgcagtggctcacacctgcaatcccagcacttttggaggccgaggcaggcggatcacttaaggtcaggagttcgagaccagcctggccaacatggtgaaaccccgtctactaaaaatacaaaaattagccagcgtggtggcaagtgccctagtcccagctacttgagagggtgacgcagaatcgcttgaacctgggaggcagaggttgcagtgagctgagatcatgccactgcactccagcctgggtgacagaaactccatttaaaaaaaaaaaaaaagtagcccatgtgggttactttgtagcacagctcctccctcccaggaagatgaggacccacaggaggccccaggcacagtgggagaggacaggaccaggatgtggggcacctgtgcacacaggcctccctccccgcaggggccaggcctctaccccaccaccctccgccctccaacggcttctccatccaacaaataaatcaagctctgaggtgaaaga

SEQ ID NO: 169093 - DNA, 1702 bp, Homo sapiens
  Payload ID: 13285
  Gene Symbol: PCOLCE
  Gene Name: procollagen C-endopeptidase enhancer
  Uniprot ID: Q15113
  ENST ID: ENST00000223061
  CDS Start-End: 281-1630
gatgacgttacttgaggcctgggagacggcctctgcccctcactgctcctccccctcctaaggtcaacatttatgtgtcctagacctagagaggtcccaggacacgccactgtcccgccttccccattgcccgccccactggccagtccccacgcccacacacccaaggctgccccatctggcgctgattatcctgctgctgccgccaccgctgctgctgctctgcaaaattcagctgctgcctctgtcttgaggaccccagcgcctttcccccggggccatgctgcctgcagccacagcctccctcctggggcccctcctcactgcctgcgccctgctgccttttgcccagggccagacccccaactacaccagacccgtgttcctgtgcggaggggatgtgaagggggaatcaggttacgtggcaagtgaggggttccccaacctctacccccctaataaggagtgcatctggaccataacggtccccgagggccagactgtgtccctctcattccgagtcttcgacctggagctgcaccccgcctgccgctacgatgctctggaggtcttcgctgggtctgggacttccggccagcggctcggacgcttttgtgggaccttccggcctgcgcccctagtcgcccccggcaaccaggtgaccctgaggatgacgacggatgagggcacaggaggacgaggcttcctgctctggtacagcgggcgggccacctcgggcactgagcaccaattttgcggggggcggctggagaaggcccagggaaccctgaccacgcccaactggcccgagtccgattaccccccgggcatcagctgttcctggcacatcatcgcgcccccggaccaggtcatcgcgctgaccttcgagaagtttgacctggagccggacacctactgccgctatgactcggtcagcgtgttcaacggagccgtgagcgacgactcccggaggctggggaagttctgcggcgacgcagtcccgggctccatctcctccgaagggaatgaactcctcgtccagttcgtctcagatctcagtgtcaccgctgatggcttctcagcctcctacaagaccctgccgcggggcactgccaaagaagggcaagggcccggccccaaacggggaactgagcctaaagtcaagctgccccccaagtcccaacctccggagaaaacagaggaatctccttcagcccctgatgcacccacctgcccaaagcagtgccgccggacaggcaccttgcagagcaacttctgtgccagcagccttgtggtgactgcgacagtgaagtccatggttcgggagccaggggagggccttgccgtgactgtcagtcttattggtgcttataaaactggaggactggacctgccttctccacccactggtgcctccctgaagttttacgtgccttgcaagcagtgcccccccatgaagaaaggagtcagttatctgctgatgggccaggtagaagagaacagaggccccgtccttcctccagagagctttgtggttctccaccggcccaaccaggaccagatcctcaccaacctaagcaagaggaagtgcccctctcaacctgtgcgggctgctgcgtcccaggactgagacgcaggccagccccggcccctagccctcaggccttctttcttatccaaataaatgtttcttaatgaggaa

SEQ ID NO: 169094 - DNA, 2021 bp, Homo sapiens
  Payload ID: 13286
  Gene Symbol: PCOLCE2
  Gene Name: procollagen C-endopeptidase enhancer 2
  Uniprot ID: Q9UKZ9
  ENST ID: ENST00000295992
  CDS Start-End: 308-1555
gaacaaacgggatattcagcagtggcctgtggctgccagagcagctcctcaggggaaactaagcgtcgagtcagacggcaccataatcgcctttaaaagtgcctccgccctgccggccgcgtatcccccggctacctgggccgccccgcggcggtgcgcgcgtgagagggagcgcgcgggcagccgagcgccggtgtgagccagcgctgctgccagtgtgagcggcggtgtgagcgcggtgggtgcggaggggcgtgtgtgccggcgcgcgcgccgtggggtgcaaaccccgagcgtctacgctgccatgaggggcgcgaacgcctgggcgccactctgcctgctgctggctgccgccacccagctctcgcggcagcagtccccagagagacctgttttcacatgtggtggcattcttactggagagtctggatttattggcagtgaaggttttcctggagtgtaccctccaaatagcaaatgtacttggaaaatcacagttcccgaaggaaaagtagtcgttctcaatttccgattcatagacctcgagagtgacaacctgtgccgctatgactttgtggatgtgtacaatggccatgccaatggccagcgcattggccgcttctgtggcactttccggcctggagcccttgtgtccagtggcaacaagatgatggtgcagatgatttctgatgccaacacagctggcaatggcttcatggccatgttctccgctgctgaaccaaacgaaagaggggatcagtattgtggaggactccttgacagaccttccggctcttttaaaacccccaactggccagaccgggattaccctgcaggagtcacttgtgtgtggcacattgtagccccaaagaatcagcttatagaattaaagtttgagaagtttgatgtggagcgagataactactgccgatatgattatgtggctgtgtttaatggcggggaagtcaacgatgctagaagaattggaaagtattgtggtgatagtccacctgcgccaattgtgtctgagagaaatgaacttcttattcagtttttatcagacttaagtttaactgcagatgggtttattggtcactacatattcaggccaaaaaaactgcctacaactacagaacagcctgtcaccaccacattccctgtaaccacgggtttaaaacccaccgtggccttgtgtcaacaaaagtgtagacggacggggactctggagggcaattattgttcaagtgactttgtattagccggcactgttatcacaaccatcactcgcgatgggagtttgcacgccacagtctcgatcatcaacatctacaaagagggaaatttggcgattcagcaggcgggcaagaacatgagtgccaggctgactgtcgtctgcaagcagtgccctctcctcagaagaggtctaaattacattattatgggccaagtaggtgaagatgggcgaggcaaaatcatgccaaacagctttatcatgatgttcaagaccaagaatcagaagctcctggatgccttaaaaaataagcaatgttaacagtgaactgtgtccatttaagctgtattctgccattgcctttgaaagatctatgttctctcagtagaaaaaaaaatacttataaaattacatattctgaaagaggattccgaaagatgggactggttgactcttcacatgatggaggtatgaggcctccgagatagctgagggaagttctttgcctgctgtcagaggagcagctatctgattggaaacctgccgacttagtgcggtgataggaagctaaaagtgtcaagcgttgacagcttggaagcgtttatttatacatctctgtaaaaggatattttagaattgagttgtgtgaagatgtcaaaaaaagattttagaagtgcaatatttatagtgttatttgtttcaccttcaagcctttgccctgaggtgttacaatcttgtcttgcgttttctaaatcaatgcttaataaaatatttttaaaggattaca

SEQ ID NO: 169095 - DNA, 773 bp, Homo sapiens
  Payload ID: 13286
  Gene Symbol: PCOLCE2
  Gene Name: procollagen C-endopeptidase enhancer 2
  ENST ID: ENST00000480473
  CDS Start-End: 1-304
tggcactttccggcctggagcccttgtgtccagtggcaacaagatgatggtgcagatgatttctgatgccaacacagctggcaatggcttcatggccatgttctccgctgctgaaccaaacgaaagaggaaaaaaaaagaaaagaggccctgagtccacttctcccctctctcgtgttgctatgctatgtcaggggatcagtattgtggaggactccttgacagaccttccggctcttttaaaacccccaactggccagaccgggattaccctgcaggagtcacttgtgtgtggcacattgtagccccaaagaatcagcttatagaattaaagtttgagaagtttgatgtggagcgagataactactgccgatatgattatgtggctgtgtttaatggcggggaagtcaacgatgctagaagaattggaaagtattgtggtgatagtccacctgcgccaattgtgtctgagagaaatgaacttcttattcagtttttatcagacttaagtttaactgcagatgggtttattggtcactacatattcaggccaaaaaaactgcctacaactacagaacagcctgtcaccaccacattccctgtaaccacgggtttaaaacccaccgtggccttgtgtcaacaaaagtgtagacggacggggactctggagggcaattattgttcaagtgactttgtattagccggcactgttatcacaaccatcactcgcgatgggagtttgcacgccacagtctcgatcatcaacatctacaa

SEQ ID NO: 169096 - DNA, 728 bp, Homo sapiens
  Payload ID: 13286
  Gene Symbol: PCOLCE2
  Gene Name: procollagen C-endopeptidase enhancer 2
  ENST ID: ENST00000470310
  CDS Start-End: 1-423
acagaacagcctgtcaccaccacattccctgtaaccacgggtttaaaacccaccgtggccttgtgtcaacaaaagtgtagacggacggggactctggagggcaattattgttcaagtgactttgtattagccggcactgttatcacaaccatcactcgcgatgggagtttgcacgccacagtctcgatcatcaacatctacaaagagggaaatttggcgattcagcaggcgggcaagaacatgagtgccaggctgactgtcgtctgcaagcagtgccctctcctcagaagaggtctaaattacattattatgggccaagtaggtgaagatgggcgaggcaaaatcatgccaaacagctttatcatgatgttcaagaccaagaatcagaagctcctggatgccttaaaaaataagcaatgttaacagtgaactgtgtccatttaagctgtattctgccattgcctttgaaagatctatgttctctcagtagaaaaaaaaatacttataaaattacatattctgaaagaggattccgaaagatgggactggttgactcttcacatgatggagaatctcctattggtgaattacaagcagcatgctggcgggtatcaagcttctgcatgaccagcggaaagacttcttcaggccgtcaccagatgtgggcccttgactttggacttcccagcctccagaactgtaagaaataaatatctgttctttatgaa

SEQ ID NO: 169097 - DNA, 1088 bp, Homo sapiens
  Payload ID: 13286
  Gene Symbol: PCOLCE2
  Gene Name: procollagen C-endopeptidase enhancer 2
  ENST ID: ENST00000485766
  CDS Start-End: 4-915
gccatgaggggcgcgaacgcctgggcgccactctgcctgctgctggctgccgccacccagctctcgcggcagcagtccccagagagacctgttttcacatgtggtggcattcttactggagagtctggatttattggcagtgaaggttttcctggagtgtaccctccaaatagcaaatgtacttggaaaatcacagttcccgaaggaaaagtagtcgttctcaatttccgattcatagacctcgagagtgacaacctgtgccgctatgactttgtggatgtgtacaatggccatgccaatggccagcgcattggccgcttctgtggcactttccggcctggagcccttgtgtccagtggcaacaagatgatggtgcagatgatttctgatgccaacacagctggcaatggcttcatggccatgttctccgctgctgaaccaaacgaaagaggggatcagtattgtggaggactccttgacagaccttccggctcttttaaaacccccaactggccagaccgggattaccctgcaggagtcacttgtgtgtggcacattgtagccccaaagaatcagcttatagaattaaagtttgagaagtttgatgtggagcgagataactactgccgatatgattatgtggctgtgtttaatggcggggaagtcaacgatgctagaagaattggaaagtattgtggtgatagtccacctgctattagccggcactgttatcacaaccatcactcgcgatgggagtttgcacgccacagtctcgatcatcaacatctacaaagagggaaatttggcgattcagcaggcgggcaagaacatgagtgccaggctgactgtcgtctgcaagcagtgccctctcctcagaagaggtctaaattacattattatgggccaagtaggtgaagatgggcgaggcaaaatcatgccaaacagctttatcatgatgttcaagaccaagaatcagaagctcctggatgccttaaaaaataagcaatgttaacagtgaactgtgtccatttaagctgtattctgccattgcctttgaaagatctatgttctctcagtagaaaaaaaaa

SEQ ID NO: 169098 - DNA, 2940 bp, Homo sapiens
  Payload ID: 13287
  Gene Symbol: PLOD1
  Gene Name: procollagen-lysine, 2-oxoglutarate 5-dioxygenase 1
  Uniprot ID: Q02809
  ENST ID: ENST00000196061
  CDS Start-End: 28-2211
cggccgatcgtcccccatacctcggccatgcggcccctgctgctactggccctgctgggctggctgctgctggccgaagcgaagggcgacgccaagccggaggacaaccttttagtcctcacggtggccactaaggagaccgagggattccgtcgcttcaagcgctcagctcagttcttcaactacaagatccaggcgcttggcctaggggaggactggaatgtggagaaggggacgtcggcaggtggagggcagaaggtccggctgctgaagaaagctctggagaagcacgcagacaaggaggatctggtcattctcttcgcagacagctatgacgtgctgtttgcatcggggccccgggagctcctgaagaagttccggcaggccaggagccaggtggtcttctctgctgaggagctcatctacccagaccgcaggctggagaccaagtatccggtggtgtccgatggcaagaggttcctgggctctggaggcttcatcggttatgcccccaacctcagcaaactggtggccgagtgggagggccaggacagcgacagcgatcagctgttttacaccaagatcttcttggacccggagaagagggagcagatcaatatcaccctggaccaccgctgccgtatcttccagaacctggatggagccttggatgaggtcgtgctcaagtttgaaatgggccatgtgagagcgaggaacctggcctatgacaccctcccggtcctgatccatggcaacgggccaaccaagctgcagttgaactacctgggcaactacatcccgcgcttctggaccttcgaaacaggctgcaccgtgtgtgacgaaggcttgcgcagcctcaagggcattggggatgaagctctgcccacggtcctggtcggcgtgttcatcgaacagcccacgccgtttgtgtccctgttcttccagcggctcctgcggctccactacccccagaaacacatgcgacttttcatccacaaccacgagcagcaccacaaggctcaggtggaagagttcctggcacagcatggcagcgagtaccagtctgtgaagctggtgggccctgaggtgcggatggcgaatgcagatgccaggaacatgggcgcagacctgtgccggcaggaccgcagctgcacctactacttcagcgtggatgctgacgtggccctgaccgagcccaacagcctgcggctgctgatccaacagaacaagaacgtcattgccccgctgatgacccggcatgggaggctgtggtcgaacttctggggggctctcagtgcagatggctactatgcccgttccgaggactacgtggacattgtgcaggggcggcgtgttggtgtctggaatgtgccctatatttcaaacatctacttgatcaagggcagtgccctgcggggtgagctgcagtcctcagatctcttccaccacagcaagctggaccccgacatggccttctgtgccaacatccggcagcaggatgtgttcatgttcctgaccaaccggcacacccttggccatctgctctccctagacagctaccgcaccacccacctgcacaacgacctctgggaggtgttcagcaaccccgaggactggaaggagaagtacatccaccagaactacaccaaagccctggcagggaagctggtggagacgccctgcccggatgtctattggttccccatcttcacggaggtggcctgtgatgagctggtggaggagatggagcactttggccagtggtctctgggcaacaacaaggacaaccgcatccagggtggctacgagaacgtgccgactattgacatccacatgaaccagatcggctttgagcgggagtggcacaaattcctgctggagtacattgcgcccatgacggagaagctctaccccggctactacaccagggcccagtttgacctggcctttgtcgtccgctacaagcctgatgagcagccctcactgatgccacaccatgatgcctccaccttcaccatcaacatcgccctgaaccgagtcggggtggattacgagggcgggggctgtcggttcctgcgctacaactgttccatccgagccccaaggaagggctggaccctcatgcaccctggacgactcacgcattaccatgaggggctccccaccaccaggggcacccgctacatcgcagtctccttcgtcgatccctaattggccaggcctgaccctcttggacctttcttctttgccgacaaccactgcccagcagcctctgggacctcggggtcccagggaacccagtccagcctcctggctgttgacttcccattgctcttggagccaccaatcaaagagattcaaagagattcctgcaggccagaggcggaacacacctttatggctggggctctccgtggtgttctggacccagcccctggagacaccattcacttttactgctttgtagtgactcgtgctctccaacctgtcttcctgaaaaaccaaggcccccttcccccacctcttccatggggtgagacttgagcagaacaggggcttccccaagttgcccagaaagactgtctgggtgagaagccatggccagagcttctcccaggcacaggtgttgcaccagggacttctgcttcaagttttggggtaaagacacctggatcagactccaagggctgccctgagtctgggacttctgcctccatggctggtcatgagagcaaaccgtagtcccctggagacagcgactccagagaacctcttgggagacagaagaggcatctgtgcacagctcgatcttctacttgcctgtggggaggggagtgacaggtccacacaccacactgggtcaccctgtcctggatgcctctgaagagagggacagaccgtcagaaactggagagtttctattaaaggtcatttaaacca

SEQ ID NO: 169099 - DNA, 886 bp, Homo sapiens
  Payload ID: 13287
  Gene Symbol: PLOD1
  Gene Name: procollagen-lysine, 2-oxoglutarate 5-dioxygenase 1
  ENST ID: ENST00000429000
  CDS Start-End: 38-886
gccgccgggtcggccgatcgtcccccatacctcggccatgcggcccctgctgctactggccctgctgggctggctgctgctggccgaagcgaagggcgacgccaagccggaggacaaccttttagtcctcacggtggccactaaggagaccgagggattccgtcgcttcaagcgctcagctcagttcttcaactacaagatccaggcgcttggcctaggggaggactggaatgtggagaaggggacgtcggcaggtggagggcagaaggtccggctgctgaagaaagctctggagaagcacgcagacaaggaggatctggtcattctcttcgcagacagctatgacgtgctgtttgcatcggggccccgggagctcctgaagaagttccggcaggccaggagccaggtggtcttctctgctgaggagctcatctacccagaccgcaggctggagaccaagtatccggtggtgtccgatggcaagaggttcctgggctctggaggcttcatcggttatgcccccaacctcagcaaactggtggccgagtgggagggccaggacagcgacagcgatcagctgttttacaccaagatcttcttggacccggagaagagggagcagatcaatatcaccctggaccaccgctgccgtatcttccagaacctggatggagccttggtgtctccctggggccagggccaccttcctggggcctgctatgaactcactgcctctgtcctcacatctgagctcagcgtgatgccttcttttcctgctgtggtgctgcagttgaactacctgggcaactacatcccgcgcttctggaccttcgaaacaggctgcaccgtgtgtgacgaaggcttgcgcagcctcaagggcattggg

SEQ ID NO: 169100 - DNA, 762 bp, Homo sapiens
  Payload ID: 13287
  Gene Symbol: PLOD1
  Gene Name: procollagen-lysine, 2-oxoglutarate 5-dioxygenase 1
  ENST ID: ENST00000449038
  CDS Start-End: 87-762
gtggcagcgggacctgcggccccgtcgcgaagtttccagccctgcgagcgccgccgggtcggccgatcgtcccccatacctcggccatgcggcccctgctgctactggccctgctgggctggctgctgctggccgaagcgaagggcgacgccaagccggaggccccctgttgccaagagggcctcagagctggtggctctggttctcttcacctggggagagacttcaccgtcctggcaggagctcgggggagcccttccccaagtgtgagcagcatccctcgtttctggatcccaggttcagacaaccttttagtcctcacggtggccactaaggagaccgagggattccgtcgcttcaagcgctcagctcagttcttcaactacaagatccaggcgcttggcctaggggaggactggaatgtggagaaggggacgtcggcaggtggagggcagaaggtccggctgctgaagaaagctctggagaagcacgcagacaaggaggatctggtcattctcttcgcagacagctatgacgtgctgtttgcatcggggccccgggagctcctgaagaagttccggcaggccaggagccaggtggtcttctctgctgaggagctcatctacccagaccgcaggctggagaccaagtatccggtggtgtccgatggcaagaggttcctgggctctggaggcttcatcggttatgcccccaacctcagcaaactggtggccgagtgggagggccaggacagcgacagcg

SEQ ID NO: 169101 - DNA, 3732 bp, Homo sapiens
  Payload ID: 13288
  Gene Symbol: PLOD2
  Gene Name: procollagen-lysine, 2-oxoglutarate 5-dioxygenase 2
  Uniprot ID: O00469
  ENST ID: ENST00000282903
  CDS Start-End: 179-2455
ccgacgacctcactcagctgcgttacgcgccgctccggctgccggccgcgcgccttgcccgccggctcccgcccgcaatcggcggctcagggcggacccgggtctctgcgttctcgcgagaagcgcggcgctgcggggccgtgggcgcctgagcccgcgcggccctcgagggccgaatatggggggatgcacggtgaagcctcagctgctgctcctggcgctcgtcctccacccctggaatccctgtctgggtgcggactcggagaagccctcgagcatccccacagataaattattagtcataactgtagcaacaaaagaaagtgatggattccatcgatttatgcagtcagccaaatatttcaattatactgtgaaggtccttggtcaaggagaagaatggagaggtggtgatggaattaatagtattggagggggccagaaagtgagattaatgaaagaagtcatggaacactatgctgatcaagatgatctggttgtcatgtttactgaatgctttgatgtcatatttgctggtggtccagaagaagttctaaaaaaattccaaaaggcaaaccacaaagtggtctttgcagcagatggaattttgtggccagataaaagactagcagacaagtatcctgttgtgcacattgggaaacgctatctgaattcaggaggatttattggctatgctccatatgtcaaccgtatagttcaacaatggaatctccaggataatgatgatgatcagctcttttacactaaagtttacattgatccactgaaaagggaagctattaacatcacattggatcacaaatgcaaaattttccagaccttaaatggagctgtagatgaagttgttttaaaatttgaaaatggcaaagccagagctaagaatacattttatgaaacattaccagtggcaattaatggaaatggacccaccaagattctcctgaattattttggaaactatgtacccaattcatggacacaggataatggctgcactctttgtgaattcgatacagtcgacttgtctgcagtagatgtccatccaaacgtatcaataggtgtttttattgagcaaccaaccccttttctacctcggtttctggacatattgttgacactggattacccaaaagaagcacttaaactttttattcataacaaagaagtttatcatgaaaaggacatcaaggtattttttgataaagctaagcatgaaatcaaaactataaaaatagtaggaccagaagaaaatctaagtcaagcggaagccagaaacatgggaatggacttttgccgtcaggatgaaaagtgtgattattactttagtgtggatgcagatgttgttttgacaaatccaaggactttaaaaattttgattgaacaaaacagaaagatcattgctcctcttgtaactcgtcatggaaagctgtggtccaatttctggggagcattgagtcctgatggatactatgcacgatctgaagattatgtggatattgttcaagggaatagagtaggagtatggaatgtcccatatatggctaatgtgtacttaattaaaggaaagacactccgatcagagatgaatgaaaggaactattttgttcgtgataaactggatcctgatatggctctttgccgaaatgctagagaaatgactttacaaagggaaaaagactcccctactccggaaacattccaaatgctcagccccccaaagggtgtatttatgtacatttctaatagacatgaatttggaaggctattatccactgctaattacaatacttcccattataacaatgacctctggcagatttttgaaaatcctgtggactggaaggaaaagtatataaaccgtgattattcaaagattttcactgaaaatatagttgaacagccctgtccagatgtcttttggttccccatattttctgaaaaagcctgtgatgaattggtagaagaaatggaacattacggcaaatggtctgggggaaaacatcatgatagccgtatatctggtggttatgaaaatgtcccaactgatgatatccacatgaagcaagttgatctggagaatgtatggcttcattttatccgggagttcattgcaccagttacactgaaggtctttgcaggctattatacgaagggatttgcactactgaattttgtagtaaaatactcccctgaacgacagcgttctcttcgtcctcatcatgatgcttctacatttaccataaacattgcacttaataacgtgggagaagactttcagggaggtggttgcaaatttctaaggtacaattgctctattgagtcaccacgaaaaggctggagcttcatgcatcctgggagactcacacatttgcatgaaggacttcctgttaaaaatggaacaagatacattgcagtgtcatttatagatccctaagttatttacttttcattgaattgaaatttattttggatgaatgactggcatgaacacgtctttgaagttgtggctgagaagatgagaggaatatttaaataacatcaacagaacaacttcactttgggccaaacatttgaaaaactttttataaaaaattgtttgatatttcttaatgtctgctctgagccttaaaacacagattgaagaagaaaagaaagaaaaaacttaaatatttatttctatgctttgttgcctctgagaataatgacaatttatgaatttgtgtttcaaattgataaaatatttaggtacaaataacaagactaataatattttcttatttaaaaaaagcatgggaagatttttatttatcaaaatatagaggaaatgtagacaaaatggatataaatgaaaattaccatgttgtaaaaccttgaaaatcagattctaactggatttgtatgcaactaagtatttttctgaacacctatgcaggtcttatttacagtagttactaagggaacacacaaagaattacacaacgttttcctcaagaaaatggtacaaaacacaaccgaggagcgtatacagttgaaaacatttttgttttgattggaaggcagattattttatattagtattaaaaatcaaaccctatgtttctttcagatgaatcttccaaagtggattatattaagcaggtattagatttaggaaaacctttccatttcttaaagtattatcaagtgtcaagatcagcaagtgtccttaagtcaaacaggttttttttgttgttgtttttgctttgtttccttttttagaaagttctagaaaataggaaaacgaaaaatttcattgagatgagtagtgcatttaattattttttaaaaaactttttaagtacttgaattttatatcaggaaaacaaagttgttgagccttgcttcttccgttttgccctttgtctcgctccttattctttttttggggggagggttatttgcttttttatcttcctggcataatttccattttattcttctgagtgtctatgttaacttccctctatcccgcttataaaaaaattctccaacaaaaatacttgttgacttgatgttttatcacttctctaagtaaggttgaaatatccttattgtagctactgtttttaatgtaaaggttaaacttgaaaagaaattcttaatcacggtgccaaaattcattttctaacaccatgtgttagaaaattataaaaaataaaataattttagaaa

SEQ ID NO: 169102 - DNA, 3665 bp, Homo sapiens
  Payload ID: 13288
  Gene Symbol: PLOD2
  Gene Name: procollagen-lysine, 2-oxoglutarate 5-dioxygenase 2
  Uniprot ID: O00469
  ENST ID: ENST00000360060
  CDS Start-End: 179-2392
ccgacgacctcactcagctgcgttacgcgccgctccggctgccggccgcgcgccttgcccgccggctcccgcccgcaatcggcggctcagggcggacccgggtctctgcgttctcgcgagaagcgcggcgctgcggggccgtgggcgcctgagcccgcgcggccctcgagggccgaatatggggggatgcacggtgaagcctcagctgctgctcctggcgctcgtcctccacccctggaatccctgtctgggtgcggactcggagaagccctcgagcatccccacagataaattattagtcataactgtagcaacaaaagaaagtgatggattccatcgatttatgcagtcagccaaatatttcaattatactgtgaaggtccttggtcaaggagaagaatggagaggtggtgatggaattaatagtattggagggggccagaaagtgagattaatgaaagaagtcatggaacactatgctgatcaagatgatctggttgtcatgtttactgaatgctttgatgtcatatttgctggtggtccagaagaagttctaaaaaaattccaaaaggcaaaccacaaagtggtctttgcagcagatggaattttgtggccagataaaagactagcagacaagtatcctgttgtgcacattgggaaacgctatctgaattcaggaggatttattggctatgctccatatgtcaaccgtatagttcaacaatggaatctccaggataatgatgatgatcagctcttttacactaaagtttacattgatccactgaaaagggaagctattaacatcacattggatcacaaatgcaaaattttccagaccttaaatggagctgtagatgaagttgttttaaaatttgaaaatggcaaagccagagctaagaatacattttatgaaacattaccagtggcaattaatggaaatggacccaccaagattctcctgaattattttggaaactatgtacccaattcatggacacaggataatggctgcactctttgtgaattcgatacagtcgacttgtctgcagtagatgtccatccaaacgtatcaataggtgtttttattgagcaaccaaccccttttctacctcggtttctggacatattgttgacactggattacccaaaagaagcacttaaactttttattcataacaaagaagtttatcatgaaaaggacatcaaggtattttttgataaagctaagcatgaaatcaaaactataaaaatagtaggaccagaagaaaatctaagtcaagcggaagccagaaacatgggaatggacttttgccgtcaggatgaaaagtgtgattattactttagtgtggatgcagatgttgttttgacaaatccaaggactttaaaaattttgattgaacaaaacagaaagatcattgctcctcttgtaactcgtcatggaaagctgtggtccaatttctggggagcattgagtcctgatggatactatgcacgatctgaagattatgtggatattgttcaagggaatagagtaggagtatggaatgtcccatatatggctaatgtgtacttaattaaaggaaagacactccgatcagagatgaatgaaaggaactattttgttcgtgataaactggatcctgatatggctctttgccgaaatgctagagaaatgggtgtatttatgtacatttctaatagacatgaatttggaaggctattatccactgctaattacaatacttcccattataacaatgacctctggcagatttttgaaaatcctgtggactggaaggaaaagtatataaaccgtgattattcaaagattttcactgaaaatatagttgaacagccctgtccagatgtcttttggttccccatattttctgaaaaagcctgtgatgaattggtagaagaaatggaacattacggcaaatggtctgggggaaaacatcatgatagccgtatatctggtggttatgaaaatgtcccaactgatgatatccacatgaagcaagttgatctggagaatgtatggcttcattttatccgggagttcattgcaccagttacactgaaggtctttgcaggctattatacgaagggatttgcactactgaattttgtagtaaaatactcccctgaacgacagcgttctcttcgtcctcatcatgatgcttctacatttaccataaacattgcacttaataacgtgggagaagactttcagggaggtggttgcaaatttctaaggtacaattgctctattgagtcaccacgaaaaggctggagcttcatgcatcctgggagactcacacatttgcatgaaggacttcctgttaaaaatggaacaagatacattgcagtgtcatttatagatccctaagttatttacttttcattgaattgaaatttattttggatgaatgactggcatgaacacgtctttgaagttgtggctgagaagatgagaggaatatttaaataacatcaacagaacaacttcactttgggccaaacatttgaaaaactttttataaaaaattgtttgatatttcttaatgtctgctctgagccttaaaacacagattgaagaagaaaagaaagaaaaaacttaaatatttatttctatgctttgttgcctctgagaataatgacaatttatgaatttgtgtttcaaattgataaaatatttaggtacaaataacaagactaataatattttcttatttaaaaaaagcatgggaagatttttatttatcaaaatatagaggaaatgtagacaaaatggatataaatgaaaattaccatgttgtaaaaccttgaaaatcagattctaactggatttgtatgcaactaagtatttttctgaacacctatgcaggtcttatttacagtagttactaagggaacacacaaagaattacacaacgttttcctcaagaaaatggtacaaaacacaaccgaggagcgtatacagttgaaaacatttttgttttgattggaaggcagattattttatattagtattaaaaatcaaaccctatgtttctttcagatgaatcttccaaagtggattatattaagcaggtattagatttaggaaaacctttccatttcttaaagtattatcaagtgtcaagatcagcaagtgtccttaagtcaaacaggttttttttgttgttgtttttgctttgtttccttttttagaaagttctagaaaataggaaaacgaaaaatttcattgagatgagtagtgcatttaattattttttaaaaaactttttaagtacttgaattttatatcaggaaaacaaagttgttgagccttgcttcttccgttttgccctttgtctcgctccttattctttttttggggggagggttatttgcttttttatcttcctggcataatttccattttattcttctgagtgtctatgttaacttccctctatcccgcttataaaaaaattctccaacaaaaatacttgttgacttgatgttttatcacttctctaagtaaggttgaaatatccttattgtagctactgtttttaatgtaaaggttaaacttgaaaagaaattcttaatcacggtgccaaaattcattttctaacaccatgtgttagaaaattataaaaaataaaataatttta

SEQ ID NO: 169103 - DNA, 3043 bp, Homo sapiens
  Payload ID: 13288
  Gene Symbol: PLOD2
  Gene Name: procollagen-lysine, 2-oxoglutarate 5-dioxygenase 2
  Uniprot ID: O00469
  ENST ID: ENST00000461497
  CDS Start-End: 510-1766
aagtgctgactgggaccgacagtgagggaggggagcccagagggaagttgataacccaaatgtcatctggtatctccagttgttcattccttgatattgctgatgataatgttacaaactgtaccagggaaagcaaacatagtcactgcccctggtaagaaggcaggggaataactatcttagaaaatttgatgaaaatcaagtttgtaaaatattaatacctgaaaagtcatatacttacatctccaacattcatttaaaactgagttgtgggatatgtaagttgcatttgtgtgcatgtgtatgtatgtatgtatgtatgcagaaacattttgatttgtggatgttttatgccttaaaatatttactggcttgaaaatatattttaactggcttaaaattttagaggtgagctccctgtgaatatccgtgttaaattgaccattttgaaatttaagacaatatatatatcgtttcagatattgttccactattttgatcagaaaagtatgctagagaaccatattttacataaaagaatatatatattaacatttttcagtcagcagatatttattttatgtcatgcccatttcattttctttttcactgttagggacttttgccgtcaggatgaaaagtgtgattattactttagtgtggatgcagatgttgttttgacaaatccaaggactttaaaaattttgattgaacaaaacagaaagatcattgctcctcttgtaactcgtcatggaaagctgtggtccaatttctggggagcattgagtcctgatggatactatgcacgatctgaagattatgtggatattgttcaagggaatagagtaggagtatggaatgtcccatatatggctaatgtgtacttaattaaaggaaagacactccgatcagagatgaatgaaaggaactattttgttcgtgataaactggatcctgatatggctctttgccgaaatgctagagaaatgactttacaaagggaaaaagactcccctactccggaaacattccaaatgctcagccccccaaagggtgtatttatgtacatttctaatagacatgaatttggaaggctattatccactgctaattacaatacttcccattataacaatgacctctggcagatttttgaaaatcctgtggactggaaggaaaagtatataaaccgtgattattcaaagattttcactgaaaatatagttgaacagccctgtccagatgtcttttggttccccatattttctgaaaaagcctgtgatgaattggtagaagaaatggaacattacggcaaatggtctgggggaaaacatcatgatagccgtatatctggtggttatgaaaatgtcccaactgatgatatccacatgaagcaagttgatctggagaatgtatggcttcattttatccgggagttcattgcaccagttacactgaaggtctttgcaggctattatacgaagggatttgcactactgaattttgtagtaaaatactcccctgaacgacagcgttctcttcgtcctcatcatgatgcttctacatttaccataaacattgcacttaataacgtgggagaagactttcagggaggtggttgcaaatttctaaggtacaattgctctattgagtcaccacgaaaaggctggagcttcatgcatcctgggagactcacacatttgcatgaaggacttcctgttaaaaatggaacaagatacattgcagtgtcatttatagatccctaagttatttacttttcattgaattgaaatttattttggatgaatgactggcatgaacacgtctttgaagttgtggctgagaagatgagaggaatatttaaataacatcaacagaacaacttcactttgggccaaacatttgaaaaactttttataaaaaattgtttgatatttcttaatgtctgctctgagccttaaaacacagattgaagaagaaaagaaagaaaaaacttaaatatttatttctatgctttgttgcctctgagaataatgacaatttatgaatttgtgtttcaaattgataaaatatttaggtacaaataacaagactaataatattttcttatttaaaaaaagcatgggaagatttttatttatcaaaatatagaggaaatgtagacaaaatggatataaatgaaaattaccatgttgtaaaaccttgaaaatcagattctaactggatttgtatgcaactaagtatttttctgaacacctatgcaggtcttatttacagtagttactaagggaacacacaaagaattacacaacgttttcctcaagaaaatggtacaaaacacaaccgaggagcgtatacagttgaaaacatttttgttttgattggaaggcagattattttatattagtattaaaaatcaaaccctatgtttctttcagatgaatcttccaaagtggattatattaagcaggtattagatttaggaaaacctttccatttcttaaagtattatcaagtgtcaagatcagcaagtgtccttaagtcaaacaggttttttttgttgttgtttttgctttgtttccttttttagaaagttctagaaaataggaaaacgaaaaatttcattgagatgagtagtgcatttaattattttttaaaaaactttttaagtacttgaattttatatcaggaaaacaaagttgttgagccttgcttcttccgttttgccctttgtctcgctccttattctttttttggggggagggttatttgcttttttatcttcctggcataatttccattttattcttctgagtgtctatgttaacttccctctatcccgcttataaaaaaattctccaacaaaaatacttgttgacttgatgttttatcacttctctaagtaaggttgaaatatccttattgtagctactgtttttaatgtaaaggttaaacttgaaaagaaattcttaatcacggtgccaaaattcattttctaacaccatgtgttagaaaattataaaaaataaaataattttagaaa

SEQ ID NO: 169104 - DNA, 550 bp, Homo sapiens
  Payload ID: 13288
  Gene Symbol: PLOD2
  Gene Name: procollagen-lysine, 2-oxoglutarate 5-dioxygenase 2
  ENST ID: ENST00000480704
  CDS Start-End: 3-299
atatggggggatgcacggtgaagcctcagctgctgctcctggcgctcgtcctccacccctggaatccctgtctgggtgcggactcggagaagccctcgagcatccccacagataaattattagtcataactgtagcaacaaaagaaagtgatggattccatcgatttatgcagtcagccaaatatttcaattatactgtgaagaaagaaggatctgtcagccaagtcttttctacaaataagaggagaacaaggagatacctaggtccttggtcaaggagaagaatggagaggtggtgatggaattaatagtattggagggggccagaaagtgagattaatgaaagaagtcatggaacactatgctgatcaagatgatctggttgtcatgtttactgaatgctttgatgtcatatttgctggtggtccagaagaagttctaaaaaaattccaaaaggcaaaccacaaagtggtctttgcagcagatggaattttgtggccagataaaagactagcagacaagtatcctgttgtgcacattgggaaacgct

SEQ ID NO: 169105 - DNA, 723 bp, Homo sapiens
  Payload ID: 13288
  Gene Symbol: PLOD2
  Gene Name: procollagen-lysine, 2-oxoglutarate 5-dioxygenase 2
  ENST ID: ENST00000469350
  CDS Start-End: 36-723
aaggaatagatgaagagagaacatgaagggaaaaaatgacaagatttggagtccggctctataaattattagtcataactgtagcaacaaaagaaagtgatggattccatcgatttatgcagtcagccaaatatttcaattatactgtgaaggtccttggtcaaggagaagaatggagaggtggtgatggaattaatagtattggagggggccagaaagtgagattaatgaaagaagtcatggaacactatgctgatcaagatgatctggttgtcatgtttactgaatgctttgatgtcatatttgctggtggtccagaagaagttctaaaaaaattccaaaaggcaaaccacaaagtggtctttgcagcagatggaattttgtggccagataaaagactagcagacaagtatcctgttgtgcacattgggaaacgctatctgaattcaggaggatttattggctatgctccatatgtcaaccgtatagttcaacaatggaatctccaggataatgatgatgatcagctcttttacactaaagtttacattgatccactgaaaagggaagctattaacatcacattggatcacaaatgcaaaattttccagaccttaaatggagctgtagatgaagttgttttaaaatttgaaaatggcaaagccagagctaagaatacattttatgaaacattaccagtggcaattaatggaaatggaccca

SEQ ID NO: 169106 - DNA, 2908 bp, Homo sapiens
  Payload ID: 13288
  Gene Symbol: PLOD2
  Gene Name: procollagen-lysine, 2-oxoglutarate 5-dioxygenase 2
  ENST ID: ENST00000494950
  CDS Start-End: 261-2372
aatatggggggatgcacggtgaagcctcagctgctgctcctggcgctcgtcctccacccctggaatccctgtctgggtgcggactcggagaagccctcgagcatccccacaggtgagcaccccgcggtccgccgctgtcccgcgaggctcggccggcgggggggcagttcattcatccaccagcccttccgcggggctggccagataaattattagtcataactgtagcaacaaaagaaagtgatggattccatcgatttatgcagtcagccaaatatttcaattatactgtgaaggtccttggtcaaggagaagaatggagaggtggtgatggaattaatagtattggagggggccagaaagtgagattaatgaaagaagtcatggaacactatgctgatcaagatgatctggttgtcatgtttactgaatgctttgatgtcatatttgctggtggtccagaagaagttctaaaaaaattccaaaaggcaaaccacaaagtggtctttgcagcagatggaattttgtggccagataaaagactagcagacaagtatcctgttgtgcacattgggaaacgctatctgaattcaggaggatttattggctatgctccatatgtcaaccgtatagttcaacaatggaatctccaggataatgatgatgatcagctcttttacactaaagtttacattgatccactgaaaagggaagctattaacatcacattggatcacaaatgcaaaattttccagaccttaaatggagctgtagatgaagttgttttaaaatttgaaaatggcaaagccagagctaagaatacattttatgaaacattaccagtggcaattaatggaaatggacccaccaagattctcctgaattattttggaaactatgtacccaattcatggacacaggataatggctgcactctttgtgaattcgatacagtcgacttgtctgcagtagatgtccatccaaacgtatcaataggtgtttttattgagcaaccaaccccttttctacctcggtttctggacatattgttgacactggattacccaaaagaagcacttaaactttttattcataacaaagaagtttatcatgaaaaggacatcaaggtattttttgataaagctaagcatgaaatcaaaactataaaaatagtaggaccagaagaaaatctaagtcaagcggaagccagaaacatgggaatggacttttgccgtcaggatgaaaagtgtgattattactttagtgtggatgcagatgttgttttgacaaatccaaggactttaaaaattttgattgaacaaaacagaaagatcattgctcctcttgtaactcgtcatggaaagctgtggtccaatttctggggagcattgagtcctgatggatactatgcacgatctgaagattatgtggatattgttcaagggaatagagtaggagtatggaatgtcccatatatggctaatgtgtacttaattaaaggaaagacactccgatcagagatgaatgaaaggaactattttgttcgtgataaactggatcctgatatggctctttgccgaaatgctagagaaatgactttacaaagggaaaaagactcccctactccggaaacattccaaatgctcagccccccaaagggtgtatttatgtacatttctaatagacatgaatttggaaggctattatccactgctaattacaatacttcccattataacaatgacctctggcagatttttgaaaatcctgtggactggaaggaaaagtatataaaccgtgattattcaaagattttcactgaaaatatagttgaacagccctgtccagatgtcttttggttccccatattttctgaaaaagcctgtgatgaattggtagaagaaatggaacattacggcaaatggtctgggggaaaacatcatgatagccgtatatctggtggttatgaaaatgtcccaactgatgatatccacatgaagcaagttgatctggagaatgtatggcttcattttatccgggagttcattgcaccagttacactgaaggtctttgcaggctattatacgaagggatttgcactactgaattttgtagtaaaatactcccctgaacgacagcgttctcttcgtcctcatcatgatgcttctacatttaccataaacattgcacttaataacgtgggagaagactttcagggaggtggttgcaaatttctaaggtacaattgctctattgagtcaccacgaaaaggctggagcttcatgcatcctgggagactcacacatttgcatgaaggacttcctgttaaaaatggaacaagatacattgcagtgtcatttatagatccctaagttatttacttttcattgaattgaaatttattttggatgaatgactggcatgaacacgtctttgaagttgtggctgagaagatgagaggaatatttaaataacatcaacagaacaacttcactttgggccaaacatttgaaaaactttttataaaaaattgtttgatatttcttaatgtctgctctgagccttaaaacacagattgaagaagaaaagaaagaaaaaacttaaatatttatttctatgctttgttgcctctgagaataatgacaatttatgaatttgtgtttcaaattgataaaatatttaggtacaaataacaagactaataatattttcttatttaaaaaaagcatgggaagatttttatttatcaaaatatagaggaaatgtagacaaaatggatataaatgaaaattaccatgttgtaaaaccttgaaaatcagattctaactggatttgtatgcaactaagtatttttctgaacacctatgcaggtcttatttacagtagttactaagggaacacacaaaga

SEQ ID NO: 169107 - DNA, 2920 bp, Homo sapiens
  Payload ID: 13289
  Gene Symbol: PLOD3
  Gene Name: procollagen-lysine, 2-oxoglutarate 5-dioxygenase 3
  Uniprot ID: O60568
  ENST ID: ENST00000223127
  CDS Start-End: 400-2616
actctctgggcagggctgcggccaggacccgcccccgcgtcccgcccgaccctccgccaggggtcacttcccctgtccaggtttcagcttccacatgtgtcaagcggctggctcagcccagagtccctgtctcccgcccgccggcccgagccgccgcccctcccccgcctcccgtgcgcccgggacaatcctcgccttgtctgtggcgccggcatctggagctttctgtagcctccggatacgcctttttttcagggcgtagccccagccaagctgctccccgcggcggccgcacagcagcccgagcgccccctttccagagctcccctccggagctgggatccaggcgcgtagcggagatcccaggatcctgggtgctgtctgggcccgctccccaccatgacctcctcggggcctggaccccggttcctgctgctgctgccgctgctgctgccccctgcggcctcagcctccgaccggccccggggccgagacccggtcaacccagagaagctgctggtgatcactgtggccacagctgaaaccgaggggtacctgcgtttcctgcgctctgcggagttcttcaactacactgtgcggaccctgggcctgggagaggagtggcgagggggtgatgtggctcgaacagttggtggaggacagaaggtccggtggttaaagaaggaaatggagaaatacgctgaccgggaggatatgatcatcatgtttgtggatagctacgacgtgattctggccggcagccccacagagctgctgaagaagttcgtccagagtggcagccgcctgctcttctctgcagagagcttctgctggcccgagtgggggctggcggagcagtaccctgaggtgggcacggggaagcgcttcctcaattctggtggattcatcggttttgccaccaccatccaccaaatcgtgcgccagtggaagtacaaggatgatgacgacgaccagctgttctacacacggctctacctggacccaggactgagggagaaactcagccttaatctggatcataagtctcggatctttcagaacctcaacggggctttagatgaagtggttttaaagtttgatcggaaccgtgtgcgtatccggaacgtggcctacgacacgctccccattgtggtccatggaaacggtcccactaagctgcagctcaactacctgggaaactacgtccccaatggctggactcctgagggaggctgtggcttctgcaaccaggaccggaggacactcccgggggggcagcctcccccccgggtgtttctggccgtgtttgtggaacagcctactccgtttctgccccgcttcctgcagcggctgctactcctggactatccccccgacagggtcacccttttcctgcacaacaacgaggtcttccatgaaccccacatcgctgactcctggccgcagctccaggaccacttctcagctgtgaagctcgtggggccggaggaggctctgagcccaggcgaggccagggacatggccatggacctgtgtcggcaggaccccgagtgtgagttctacttcagcctggacgccgacgctgtcctcaccaacctgcagaccctgcgtatcctcattgaggagaacaggaaggtgatcgcccccatgctgtcccgccacggcaagctgtggtccaacttctggggcgccctgagccccgatgagtactacgcccgctccgaggactacgtggagctggtgcagcggaagcgagtgggtgtgtggaatgtaccatacatctcccaggcctatgtgatccggggtgataccctgcggatggagctgccccagagggatgtgttctcgggcagtgacacagacccggacatggccttctgtaagagctttcgagacaagggcatcttcctccatctgagcaatcagcatgaatttggccggctcctggccacttccagatacgacacggagcacctgcaccccgacctctggcagatcttcgacaaccccgtcgactggaaggagcagtacatccacgagaactacagccgggccctggaaggggaaggaatcgtggagcagccatgcccggacgtgtactggttcccactgctgtcagaacaaatgtgtgatgagctggtggcagagatggagcactacggccagtggtcaggcggccggcatgaggattcaaggctggctggaggctacgagaatgtgcccaccgtggacatccacatgaagcaggtggggtacgaggaccagtggctgcagctgctgcggacgtatgtgggccccatgaccgagagcctgtttcccggttaccacaccaaggcgcgggcggtgatgaactttgtggttcgctaccggccagacgagcagccgtctctgcggccacaccacgactcatccaccttcaccctcaacgttgccctcaaccacaagggcctggactatgagggaggtggctgccgcttcctgcgctacgactgtgtgatctcctccccgaggaagggctgggcactcctgcaccccggccgcctcacccactaccacgaggggctgccaacgacctggggcacacgctacatcatggtgtcctttgtcgacccctgacactcaaccactctgccaaacctgccctgccattgtgcctttttagggggcctggcccccgtcctgggagttgggggatgggtctctctgtctccccacttcctgagttcatgttccgcgtgcctgaactgaatatgtcaccttgctcccaagacacggccctctcaggaagctcccggagtccccgcctctctcctccgcccacaggggttcgtgggcacagggcttctggggactccccgcgtgataaattattaatgttccgcagtctcactctgaataaaggacagtttgtaagtcttga

SEQ ID NO: 169108 - DNA, 536 bp, Homo sapiens
  Payload ID: 13289
  Gene Symbol: PLOD3
  Gene Name: procollagen-lysine, 2-oxoglutarate 5-dioxygenase 3
  ENST ID: ENST00000440925
  CDS Start-End: 1-200
acttcagcctggacgccgacgctgtcctcaccaacctgcagaccctgcgtatcctcattgaggagaacaggaaggtgatcgcccccatgctgtcccgccacggcaagctgtggtccaacttctggggcgccctgagccccgatgagtactacgcccgctccgaggactacgtggagctggtgcagcggaagcgagtgtgagtcccgccagcctgcagccccccgcctcctccgacccggggcccaggggtgtgtggaatgtaccatacatctcccaggcctatgtgatccggggtgataccctgcggatggagctgccccagagggatgtgttctcgggcagtgacacagacccggacatggccttctgtaagagctttcgagacaagggcatcttcctccatctgagcaatcagcatgaatttggccggctcctggccacttccagatacgacacggagcacctgcaccccgacctctggcagatcttcgacaaccccgtcgactggaaggagcagtacatccacgagaactaca

SEQ ID NO: 169109 - DNA, 565 bp, Homo sapiens
  Payload ID: 13289
  Gene Symbol: PLOD3
  Gene Name: procollagen-lysine, 2-oxoglutarate 5-dioxygenase 3
  ENST ID: ENST00000424135
  CDS Start-End: 1-378
accctgggcctgggagaggagtggcgagggggtgatgtggctcgaacagttggtggaggacagaaggtccggtggttaaagaaggaaatggagaaatacgctgaccgggaggatatgatcatcatgtttgtggatagctacgacgtgattctggccggcagccccacagagctgctgaagaagttcgtccagagtggcagccgcctgctcttctctgcagagagcttctgctggcccgagtgggggctggcggagcagtaccctgaggattcatcggttttgccaccaccatccaccaaatcgtgcgccagtggaagtacaaggatgatgacgacgaccagctgttctacacacggctctacctggacccaggactgagggagaaactcagccttaatctggatcataagtctcggatctttcagaacctcaacggggctttagatgaagtggttttaaagtttgatcggaaccgtgtgcgtatccggaacgtggcctacgacacgctccccattgtggtccatggaaacggtcccactaagctgcagctcaactacctgggaaa

SEQ ID NO: 169110 - DNA, 539 bp, Homo sapiens
  Payload ID: 13289
  Gene Symbol: PLOD3
  Gene Name: procollagen-lysine, 2-oxoglutarate 5-dioxygenase 3
  ENST ID: ENST00000414785
  CDS Start-End: 26-539
gtgtaaatcttgtgggagccacgaaatgggtcattttaaagatgtggtcacggtgttcttacaagaaatcttattttcctttggtccttgtgaagatgctgtgatcacaaaggcagcccctggagcttctccgggcagaagaggagagaagctgctggtgatcactgtggccacagctgaaaccgaggggtacctgcgtttcctgcgctctgcggagttcttcaactacactgtgcggaccctgggcctgggagaggagtggcgagggggtgatgtggctcgaacagttggtggaggacagaaggtccggtggttaaagaaggaaatggagaaatacgctgaccgggaggatatgatcatcatgtttgtggatagctacgacgtgattctggccggcagccccacagagctgctgaagaagttcgtccagagtggcagccgcctgctcttctctgcagagagcttctgctggcccgagtgggggctggcggagcagtaccctgaggtgggcacggggaagcgcttcctcaattctggtg

SEQ ID NO: 169111 - DNA, 1098 bp, Homo sapiens
  Payload ID: 13289
  Gene Symbol: PLOD3
  Gene Name: procollagen-lysine, 2-oxoglutarate 5-dioxygenase 3
  ENST ID: ENST00000454310
  CDS Start-End: 1-794
ccaacttctggggcgccctgagccccgatgagtactacgcccgctccgaggactacgtggagctggtgcagcggaagcgagtgggtgtgtggaatgtaccatacatctcccaggcctatgtgatccggggtgataccctgcggatggagctgccccagagggatgtgttctcgggcagtgacacagacccggacatggccttctgtaagagctttcgagacaagggcatcttcctccatctgagcaatcagcatgaatttggccggctcctggccacttccagatacgacacggagcacctgcaccccgacctctggcagatcttcgacaaccccgtcgactggaaggagcagtacatccacgagaactacagccgggccctggaaggggaaggaatcgtggagcagccatgcccggacgtgtactggttcccactgctgtcagaacaaatgtgtgatgagctggtggcagagatggagcactacggccagtggtcaggcggccggcatgaggcgcgggcggtgatgaactttgtggttcgctaccggccagacgagcagccgtctctgcggccacaccacgactcatccaccttcaccctcaacgttgccctcaaccacaagggcctggactatgagggaggtggctgccgcttcctgcgctacgactgtgtgatctcctccccgaggaagggctgggcactcctgcaccccggccgcctcacccactaccacgaggggctgccaacgacctggggcacacgctacatcatggtgtcctttgtcgacccctgacactcaaccactctgccaaacctgccctgccattgtgcctttttagggggcctggcccccgtcctgggagttgggggatgggtctctctgtctccccacttcctgagttcatgttccgcgtgcctgaactgaatatgtcaccttgctcccaagacacggccctctcaggaagctcccggagtccccgcctctctcctccgcccacaggggttcgtgggcacagggcttctggggactccccgcgtgataaattattaatgttccgcagtctcactctgaataaaggacagtttgtaagtcttga

SEQ ID NO: 169112 - DNA, 809 bp, Homo sapiens
  Payload ID: 13289
  Gene Symbol: PLOD3
  Gene Name: procollagen-lysine, 2-oxoglutarate 5-dioxygenase 3
  ENST ID: ENST00000421736
  CDS Start-End: 1-809
gattcatcggttttgccaccaccatccaccaaatcgtgcgccagtggaagtacaaggatgatgacgacgaccagctgttctacacacggctctacctggacccaggactgagggagaaactcagccttaatctggatcataagtctcggatctttcagaacctcaacggggctttagatgaagtggttttaaagtttgatcggaaccgtgtgcgtatccggaacgtggcctacgacacgctccccattgtggtccatggaaacggtcccactaagctgcagctcaactacctgggaaactacgtccccaatggctggactcctgagggaggctgtggcttctgcaaccaggaccggaggacactcccgggggggcaggaggtcttccatgaaccccacatcgctgactcctggccgcagctccaggaccacttctcagctgtgaagctcgtggggccggaggaggctctgagcccaggcgaggccagggacatggccatggacctgtgtcggcaggaccccgagtgtgagttctacttcagcctggacgccgacgctgtcctcaccaacctgcagaccctgcgtatcctcattgaggagaacaggaaggtgatcgcccccatgctgtcccgccacggcaagctgtggtccaacttctggggcgccctgagccccgatgagtactacgcccgctccgaggactacgtggagctggtgcagcggaagcgagtgggtgtgtggaatgtaccatacatctcccaggcctatgtgatccggggtgataccctgcggatggagctgccccagagg

SEQ ID NO: 169113 - DNA, 563 bp, Homo sapiens
  Payload ID: 13289
  Gene Symbol: PLOD3
  Gene Name: procollagen-lysine, 2-oxoglutarate 5-dioxygenase 3
  ENST ID: ENST00000456079
  CDS Start-End: 337-563
atgcttgcagttccagccactccggaggctgaggtgggaggatggtttgatcccaggaaatcgaggctgcagtgagctatgactatgccactgcactccagcctaggcgaaagagcgagaccaaaaaagaggaatgactagatgctgtgatcacaaaggcagcccctggagcttctccgggcagaagaggagggcgtagccccagccaagctgctccccgcggcggccgcacagcagcccgagcgccccctttccagagctcccctccggagctgggatccaggcgcgtagcggagatcccaggatcctgggtgctgtctgggcccgctccccaccatgacctcctcggggcctggaccccggttcctgctgctgctgccgctgctgctgccccctgcggcctcagcctccgaccggccccggggccgagacccggtcaacccagagaagctgctggtgatcactgtggccacagctgaaaccgaggggtacctgcgtttcctgcgctctgcggagttcttcaactacactgtgcggaccctgggcctgggagaggagtggcg

SEQ ID NO: 169114 - DNA, 2555 bp, Homo sapiens
  Payload ID: 13290
  Gene Symbol: PDYN
  Gene Name: prodynorphin
  Uniprot ID: P01213
  ENST ID: ENST00000217305
  CDS Start-End: 227-991
atttgaaggggctttggtggtgttcacagctgcctctttggcacctcctcccaagccggagtcaaggaggcccctgagccttggaccagccactgccacctccgacctgctcggccagaagctgcccagggacaaagcagagtgcaggtcatttatcttcaggctttgagatctgcgtggggggagctgttgcagcagcccaagccgcaggaattgctgagacaggatggcctggcaggggctggtcctggctgcctgcctcctcatgttcccctccaccacagcggactgcctgtcgcggtgctccttgtgtgctgtaaagacccaggatggtcccaaacctatcaatcccctgatttgctccctgcaatgccaggctgccctgctgccctctgaggaatgggagagatgccagagctttctgtcttttttcaccccctccacccttgggctcaatgacaaggaggacttggggagcaagtcggttggggaagggccctacagtgagctggccaagctctctgggtcattcctgaaggagctggagaaaagcaagtttctcccaagtatctcaacaaaggagaacactctgagcaagagcctggaggagaagctcaggggtctctctgacgggtttagggagggagcagagtctgagctgatgagggatgcccagctgaacgatggtgccatggagactggcacactctatctcgctgaggaggaccccaaggagcaggtcaaacgctatgggggctttttgcgcaaataccccaagaggagctcagaggtggctggggagggggacggggatagcatgggccatgaggacctgtacaaacgctatgggggcttcttgcggcgcattcgtcccaagctcaagtgggacaaccagaagcgctatggcggttttctccggcgccagttcaaggtggtgactcggtctcaggaagatccgaatgcttactctggagagctttttgatgcataagcacctcttttcatggagtagagtcaggagaaacccctgacaccttttcaggttggagtgcattcattcatcctcttatatgtgccccttccccatgctcagctcagcattgtgtacaaaatatccaagcccagcctatctctcttctgcgtgggagtatgttatttctctggggtctgtgatggggaagggtggatgtcccttccccacaataggcttagtgcttggctcagacacctagactctaaaactatcagcagcggcagcagcagcagcagcagcagtttgtgatctgtccttccaacctgttcacgtgactcctcaattccagggaaccagagcgatgtgttctttgtacctgtaggtctatgatgtccaaacttaacagatcacatgcccctcttagaagaaatatgagcatgctccctcatgcagatagtatacacatcataaacaaagagtagaactttaaaagaaggtaaataatcatacacagaaatcctaacattatattcccaaatctcaaaagatctcctgtgcacctgactttggagacgatgctttaggtaaaaagcttaaacattgccttatattggatcaggaacccttacagtagagggtccagtcttctagtgggtttaatgtttagtcagtgtactctgagtcctcattgttcagaaaagcacctcttgaagaactgacttcctgaactcccagtcatgttggtaccctggacagtgcctaactccttacagaagggagtgaaaacctctttcggaaatgattgagagcagcctcttgaatgcttaaatgatcaaggagggagaaaggcaaaccaatttgttctgtgcaacaaactcaaaatgtggaccagttccctcagccctcattaaactaattaaactgatgggtatcatgcttctactccatggtgaactgaagcagagtcaagctgatgaagttaagcacaaccatgttcttgagcagctgaattggctgccaagagtccaagccatctggcccaacatacgcactgggcattgggtaagggactccagaagcagcagctagaaagagaaaaagccctcttcaatccccataatgcttctttcctcttaatgtctcaaaataaaaccagaaagaggaataaaatgattaagtgcttgaggccaaatgagttcccttgattcaaataaccctgaatcagaggcagagacctcctgatgtcttggtttccatcaaagccctccctgtctgtctgtctctcttttgctctctcattcccaggcactctcttttggtttgtgggtccaggagatgaggctggataggagaggaaaaggcttgagtctggataatttgtataagatgctgctgagcacatctcttcatgcgcagtccccaggtatctgatgatgttctgaaatggatagattgttttagagttattttgtgtcctttaaaaaaatcccatttatgcaatttacttggaatttgcttagcctttaataggcttgtgtaatttcctgctcctccagtacaataaataaaagaaagatgctga

SEQ ID NO: 169115 - DNA, 2725 bp, Homo sapiens
  Payload ID: 13290
  Gene Symbol: PDYN
  Gene Name: prodynorphin
  Uniprot ID: P01213
  ENST ID: ENST00000539905
  CDS Start-End: 395-1159
agaatccgccccctccccaacacggctgccttcctcctccacatccctgtcacgaagagaagcctattgtgtcaggcccagggagttcgagttgaagggcctgggggtctgtgctctgactgctctcagccacttccccattggctcccagcagcctgtgctcagcaagggctgagcgacaggggaggctctcgtccataaaaggggggaagaggcaccagaactgccatttgaaggggctttggtggtgttcacagctgcctctttggcacctcctcccaagccggagtcaaggaggcccctgagccttggaccagccactgccacctccgacctgctcggccagaagctgcccagggacaaagcagagtgcagcaggaattgctgagacaggatggcctggcaggggctggtcctggctgcctgcctcctcatgttcccctccaccacagcggactgcctgtcgcggtgctccttgtgtgctgtaaagacccaggatggtcccaaacctatcaatcccctgatttgctccctgcaatgccaggctgccctgctgccctctgaggaatgggagagatgccagagctttctgtcttttttcaccccctccacccttgggctcaatgacaaggaggacttggggagcaagtcggttggggaagggccctacagtgagctggccaagctctctgggtcattcctgaaggagctggagaaaagcaagtttctcccaagtatctcaacaaaggagaacactctgagcaagagcctggaggagaagctcaggggtctctctgacgggtttagggagggagcagagtctgagctgatgagggatgcccagctgaacgatggtgccatggagactggcacactctatctcgctgaggaggaccccaaggagcaggtcaaacgctatgggggctttttgcgcaaataccccaagaggagctcagaggtggctggggagggggacggggatagcatgggccatgaggacctgtacaaacgctatgggggcttcttgcggcgcattcgtcccaagctcaagtgggacaaccagaagcgctatggcggttttctccggcgccagttcaaggtggtgactcggtctcaggaagatccgaatgcttactctggagagctttttgatgcataagcacctcttttcatggagtagagtcaggagaaacccctgacaccttttcaggttggagtgcattcattcatcctcttatatgtgccccttccccatgctcagctcagcattgtgtacaaaatatccaagcccagcctatctctcttctgcgtgggagtatgttatttctctggggtctgtgatggggaagggtggatgtcccttccccacaataggcttagtgcttggctcagacacctagactctaaaactatcagcagcggcagcagcagcagcagcagcagtttgtgatctgtccttccaacctgttcacgtgactcctcaattccagggaaccagagcgatgtgttctttgtacctgtaggtctatgatgtccaaacttaacagatcacatgcccctcttagaagaaatatgagcatgctccctcatgcagatagtatacacatcataaacaaagagtagaactttaaaagaaggtaaataatcatacacagaaatcctaacattatattcccaaatctcaaaagatctcctgtgcacctgactttggagacgatgctttaggtaaaaagcttaaacattgccttatattggatcaggaacccttacagtagagggtccagtcttctagtgggtttaatgtttagtcagtgtactctgagtcctcattgttcagaaaagcacctcttgaagaactgacttcctgaactcccagtcatgttggtaccctggacagtgcctaactccttacagaagggagtgaaaacctctttcggaaatgattgagagcagcctcttgaatgcttaaatgatcaaggagggagaaaggcaaaccaatttgttctgtgcaacaaactcaaaatgtggaccagttccctcagccctcattaaactaattaaactgatgggtatcatgcttctactccatggtgaactgaagcagagtcaagctgatgaagttaagcacaaccatgttcttgagcagctgaattggctgccaagagtccaagccatctggcccaacatacgcactgggcattgggtaagggactccagaagcagcagctagaaagagaaaaagccctcttcaatccccataatgcttctttcctcttaatgtctcaaaataaaaccagaaagaggaataaaatgattaagtgcttgaggccaaatgagttcccttgattcaaataaccctgaatcagaggcagagacctcctgatgtcttggtttccatcaaagccctccctgtctgtctgtctctcttttgctctctcattcccaggcactctcttttggtttgtgggtccaggagatgaggctggataggagaggaaaaggcttgagtctggataatttgtataagatgctgctgagcacatctcttcatgcgcagtccccaggtatctgatgatgttctgaaatggatagattgttttagagttattttgtgtcctttaaaaaaatcccatttatgcaatttacttggaatttgcttagcctttaataggcttgtgtaatttcctgctcctccagtacaataaataaaagaaagatgctgatg

SEQ ID NO: 169116 - DNA, 2472 bp, Homo sapiens
  Payload ID: 13290
  Gene Symbol: PDYN
  Gene Name: prodynorphin
  Uniprot ID: P01213
  ENST ID: ENST00000540134
  CDS Start-End: 142-906
agaccagtgagagactgctctttggactctccctttctgcacagtcctggcttaaacaggtggtcatttatcttcaggctttgagatctgcgtggggggagctgttgcagcagcccaagccgcaggaattgctgagacaggatggcctggcaggggctggtcctggctgcctgcctcctcatgttcccctccaccacagcggactgcctgtcgcggtgctccttgtgtgctgtaaagacccaggatggtcccaaacctatcaatcccctgatttgctccctgcaatgccaggctgccctgctgccctctgaggaatgggagagatgccagagctttctgtcttttttcaccccctccacccttgggctcaatgacaaggaggacttggggagcaagtcggttggggaagggccctacagtgagctggccaagctctctgggtcattcctgaaggagctggagaaaagcaagtttctcccaagtatctcaacaaaggagaacactctgagcaagagcctggaggagaagctcaggggtctctctgacgggtttagggagggagcagagtctgagctgatgagggatgcccagctgaacgatggtgccatggagactggcacactctatctcgctgaggaggaccccaaggagcaggtcaaacgctatgggggctttttgcgcaaataccccaagaggagctcagaggtggctggggagggggacggggatagcatgggccatgaggacctgtacaaacgctatgggggcttcttgcggcgcattcgtcccaagctcaagtgggacaaccagaagcgctatggcggttttctccggcgccagttcaaggtggtgactcggtctcaggaagatccgaatgcttactctggagagctttttgatgcataagcacctcttttcatggagtagagtcaggagaaacccctgacaccttttcaggttggagtgcattcattcatcctcttatatgtgccccttccccatgctcagctcagcattgtgtacaaaatatccaagcccagcctatctctcttctgcgtgggagtatgttatttctctggggtctgtgatggggaagggtggatgtcccttccccacaataggcttagtgcttggctcagacacctagactctaaaactatcagcagcggcagcagcagcagcagcagcagtttgtgatctgtccttccaacctgttcacgtgactcctcaattccagggaaccagagcgatgtgttctttgtacctgtaggtctatgatgtccaaacttaacagatcacatgcccctcttagaagaaatatgagcatgctccctcatgcagatagtatacacatcataaacaaagagtagaactttaaaagaaggtaaataatcatacacagaaatcctaacattatattcccaaatctcaaaagatctcctgtgcacctgactttggagacgatgctttaggtaaaaagcttaaacattgccttatattggatcaggaacccttacagtagagggtccagtcttctagtgggtttaatgtttagtcagtgtactctgagtcctcattgttcagaaaagcacctcttgaagaactgacttcctgaactcccagtcatgttggtaccctggacagtgcctaactccttacagaagggagtgaaaacctctttcggaaatgattgagagcagcctcttgaatgcttaaatgatcaaggagggagaaaggcaaaccaatttgttctgtgcaacaaactcaaaatgtggaccagttccctcagccctcattaaactaattaaactgatgggtatcatgcttctactccatggtgaactgaagcagagtcaagctgatgaagttaagcacaaccatgttcttgagcagctgaattggctgccaagagtccaagccatctggcccaacatacgcactgggcattgggtaagggactccagaagcagcagctagaaagagaaaaagccctcttcaatccccataatgcttctttcctcttaatgtctcaaaataaaaccagaaagaggaataaaatgattaagtgcttgaggccaaatgagttcccttgattcaaataaccctgaatcagaggcagagacctcctgatgtcttggtttccatcaaagccctccctgtctgtctgtctctcttttgctctctcattcccaggcactctcttttggtttgtgggtccaggagatgaggctggataggagaggaaaaggcttgagtctggataatttgtataagatgctgctgagcacatctcttcatgcgcagtccccaggtatctgatgatgttctgaaatggatagattgttttagagttattttgtgtcctttaaaaaaatcccatttatgcaatttacttggaatttgcttagcctttaataggcttgtgtaatttcctgctcctccagtacaataaataaaagaaagatgctgatg

SEQ ID NO: 169117 - DNA, 1199 bp, Homo sapiens
  Payload ID: 13291
  Gene Symbol: PENK
  Gene Name: proenkephalin
  Uniprot ID: P01210
  ENST ID: ENST00000314922
  CDS Start-End: 78-881
cggcgagggtcctgccgagggaccccgttctgcgcccaggcaggctcgaagcacgcgtccctctctcctcgcagtccatggcgcggttcctgacactttgcacttggctgctgttgctcggccccgggctcctggcgaccgtgcgggccgaatgcagccaggattgcgcgacgtgcagctaccgcctagtgcgcccggccgacatcaacttcctggcttgcgtaatggaatgtgaaggtaaactgccttctctgaaaatttgggaaacctgcaaggagctcctgcagctgtccaaaccagagcttcctcaagatggcaccagcaccctcagagaaaatagcaaaccggaagaaagccatttgctagccaaaaggtatgggggcttcatgaaaaggtatggaggcttcatgaagaaaatggatgagctttatcccatggagccagaagaagaggccaatggaagtgagatcctcgccaagcggtatgggggcttcatgaagaaggatgcagaggaggacgactcgctggccaattcctcagacctgctaaaagagcttctggaaacaggggacaaccgagagcgtagccaccaccaggatggcagtgataatgaggaagaagtgagcaagagatatgggggcttcatgagaggcttaaagagaagcccccaactggaagatgaagccaaagagctgcagaagcgatatgggggcttcatgagaagagtaggtcgcccagagtggtggatggactaccagaaacggtatggaggtttcctgaagcgctttgccgaggctctgccctccgacgaagaaggcgaaagttactccaaagaagttcctgaaatggaaaaaagatacggaggatttatgagattttaatatcttttcccactagtggccccaggccccagcaagcctccctccatcctccagtgggaaactgttgatggtgttttattgtcatgtgttgcttgccttgtatagttgacttcattgtctggataactatacaacctgaaaactgtcatttcaggttctgtgctctttttggagtctttaagctcagtattagtctattgcagctatctcgttttcatgctaaaatagtttttgttatcttgtctcttatttttgacaaacatcaataaatgcttacttgtatatagagataataaacctattaccccaagtgcataa

SEQ ID NO: 169118 - DNA, 1029 bp, Homo sapiens
  Payload ID: 13291
  Gene Symbol: PENK
  Gene Name: proenkephalin
  Uniprot ID: P01210
  ENST ID: ENST00000451791
  CDS Start-End: 226-1029
ctgcgtcagctgcagcccgccggcgattggggcgcgcgcgcctccttcggtttggggctaattataaagtggctccagcagccgttaagccccgggacggcgaggcaggcgctcagagccccgcagcctggcccgtgaccccgcagagacgctgaggaccgcgacgagtcgtgtctgaacccggcttttccaattggcctgctccatccgaacagcgtcaactccatggcgcggttcctgacactttgcacttggctgctgttgctcggccccgggctcctggcgaccgtgcgggccgaatgcagccaggattgcgcgacgtgcagctaccgcctagtgcgcccggccgacatcaacttcctggcttgcgtaatggaatgtgaaggtaaactgccttctctgaaaatttgggaaacctgcaaggagctcctgcagctgtccaaaccagagcttcctcaagatggcaccagcaccctcagagaaaatagcaaaccggaagaaagccatttgctagccaaaaggtatgggggcttcatgaaaaggtatggaggcttcatgaagaaaatggatgagctttatcccatggagccagaagaagaggccaatggaagtgagatcctcgccaagcggtatgggggcttcatgaagaaggatgcagaggaggacgactcgctggccaattcctcagacctgctaaaagagcttctggaaacaggggacaaccgagagcgtagccaccaccaggatggcagtgataatgaggaagaagtgagcaagagatatgggggcttcatgagaggcttaaagagaagcccccaactggaagatgaagccaaagagctgcagaagcgatatgggggcttcatgagaagagtaggtcgcccagagtggtggatggactaccagaaacggtatggaggtttcctgaagcgctttgccgaggctctgccctccgacgaagaaggcgaaagttactccaaagaagttcctgaaatggaaaaaagatacggaggatttatgagattttaa

SEQ ID NO: 169119 - DNA, 467 bp, Homo sapiens
  Payload ID: 13291
  Gene Symbol: PENK
  Gene Name: proenkephalin
  ENST ID: ENST00000518974
  CDS Start-End: 151-467
gacggtgaggccctacgtccgccagcacacccgggcccgcttctccccgacgcccgccctcctcacacttgccttcttctcttccctctagagtcgtgtctgaacccggcttttccaattggcctgctccatccgaacagcgtcaactccatggcgcggttcctgacactttgcacttggctgctgttgctcggccccgggctcctggcgaccgtgcgggccgaatgcagccaggattgcgcgacgtgcagctaccgcctagtgcgcccggccgacatcaacttcctggcttgcgtaatggaatgtgaaggtaaactgccttctctgaaaatttgggaaacctgcaaggagctcctgcagctgtccaaaccagagcttcctcaagatggcaccagcaccctcagagaaaatagcaaaccggaagaaagccatttgctagccaaaaggtatgggggcttcatgaaaag

SEQ ID NO: 169120 - DNA, 772 bp, Homo sapiens
  Payload ID: 13291
  Gene Symbol: PENK
  Gene Name: proenkephalin
  ENST ID: ENST00000523051
  CDS Start-End: 133-372
gggacggcgaggcaggcgctcagagccccgcagcctggcccgtgaccccgcagagacgctgaggaccgcgacgagtcgtgtctgaacccggcttttccaattggcctgctccatccgaacagcgtcaactccatggcgcggttcctgacactttgcacttggctgctgttgctcggccccgggctcctggcgaccgtgcgggccgaatgcagccaggattgcgcgacgtgcagctaccgcctagtgcgcccggccgacatcaacttcctggattgtgggggaggagaagaggaaggctgctctttccagaattttccatactgctttttatgctcttgttgttatcacttattactattatcattactttaatccaggtgatggaatggcacgtgtagtgttagcaacttgaaaaaaatagataataagcaaccatcaataaaaatagtcttatagaaaggcattttgcataataactgatttgcattggaccctacatttagggttgttattgtctcaatgacaaaaggtttacttagtgactgtctcgctagaattacaacattctgggattttggctcggatgcaaaagacatgtgagaaacgaggttgcctagccaaaattatgtagtgaaatcaatgtaacaaatatttactgagcttctaccatgagaaagacacttatgattggtactgtggtggatgcagagatgagcaggcgtgctatggctgatgtccagatagaatttcccatctaatgtgatcttgacca

SEQ ID NO: 169121 - DNA, 532 bp, Homo sapiens
  Payload ID: 13291
  Gene Symbol: PENK
  Gene Name: proenkephalin
  ENST ID: ENST00000517415
  CDS Start-End: 1-267
ttcctgacactttgcacttggctgctgttgctcggccccgggctcctggcgaccgtgcgggccgaatgcagccaggattgcgcgacgtgcagctaccgcctagtgcgcccggccgacatcaacttcctgaagcacccccgcatagatcaattcattcattcaacaaatgaatatttgatggaagaggctccagatggagggaagagccagtgcaatgcctcaaaatggagacatggtgtattaatggagaagcagcaggacttgtgaaagcctgggacgagggcttggggttttattctcaatatgatagaaaatgattcaaggctgagagcaggagagtggcaggatatactgacttatttaaatctcactgtctcccacaaagaacaagttttatctctcctcatgctcctgagagaagaatgtactgcttatctaccatcatttctgcatccatcgaaacatctgggtttacctgaaaagaaattatataaaactttcagtgttttctaataaaaatgcaatgaataca

SEQ ID NO: 169122 - DNA, 863 bp, Homo sapiens
  Payload ID: 13291
  Gene Symbol: PENK
  Gene Name: proenkephalin
  ENST ID: ENST00000518770
  CDS Start-End: 155-433
gctccagcagccgttaagccccgggacggcgaggcaggcgctcagagccccgcagcctggcccgtgaccccgcagagacgctgaggaccgcgacgagtcgtgtctgaacccggcttttccaattggcctgctccatccgaacagcgtcaactccatggcgcggttcctgacactttgcacttggctgctgttgctcggccccgggctcctggcgaccgtgcgggccgaatgcagccaggattgcgcgacgtgcagctaccgcctagtgcgcccggccgacatcaacttcctggtgagtgttgcgcgcggcgagtgttgcgcaccttgtgagacagagtttccgcaacagtacgcggactgcctccggcccaccgcgcggcgcgtatggcggttcgcaccgggtcggagccgcagcggcgcgagcccgtggtgacctgggtgtctcagctgttcctggaacactgactgaagtcctgccctggctcttagcttcggggatccgcgactatctggggaccggtaagggtagcggtgtcgccgcacaaaccaagtttgttttaaccctgggaattcgggaaccccgagaagtcctctgttcagcacctcggatagcactgggttctctcctgggctgtcagaaggaagatggctgtcaccacaactcctaacatatcccagctaagggcccctccacacgcagtcatcttcccatctttcccacaaataatgtaattttttgttagtgacatttcggtgcctttctttagatttatgttccccagctctcttaacctcaggtccctcattccctaccctcacctgtaaataggagagagcaaagggatggaaaaggggtacgggga

SEQ ID NO: 169123 - DNA, 1291 bp, Homo sapiens
  Payload ID: 13292
  Gene Symbol: PFN1
  Gene Name: profilin 1
  Uniprot ID: P07737
  ENST ID: ENST00000225655
  CDS Start-End: 621-1043
ctcccggccccggcgcaggcgcaggcgcgggcacacgcgccgccgcccgccggtccttcccttcggcggaggtgggggaaggaggagtcatcccgtttaaccctgggctccccgaactctccttaatttgctaaatttgcagcttgctaattcctcctgctttctccttccttccttcttctggctcactccctgccccgataccaaagtctggtttatattcagtgcaaattggagcaaaccctacccttcacctctctcccgccaccccccatccttctgcattgctttccatcgaactctgcaaattttgcaatagggggagggatttttaaaattgcatttgcaaagttcggtgtctgggctggcgagtgggggagggagggaatggggagtaggccccgcccctaccgtcctttgcaaataaaaatctagcggggcggggggggggaggagcaggaagtggcggtgcgagggctgctgcacagcgagcggagccgcggtccggacggcagcgcgtgccccgagctctccgcctccccccgcccgccagccgaggcagctcgagcccagtccgcggccccagcagcagcgccgagagcagccccagtagcagcgccatggccgggtggaacgcctacatcgacaacctcatggcggacgggacctgtcaggacgcggccatcgtgggctacaaggactcgccctccgtctgggccgccgtccccgggaaaacgttcgtcaacatcacgccagctgaggtgggtgtcctggttggcaaagaccggtcaagtttttacgtgaatgggctgacacttgggggccagaaatgttcggtgatccgggactcactgctgcaggatggggaatttagcatggatcttcgtaccaagagcaccggtggggcccccaccttcaatgtcactgtcaccaagactgacaagacgctagtcctgctgatgggcaaagaaggtgtccacggtggtttgatcaacaagaaatgttatgaaatggcctcccaccttcggcgttcccagtactgacctcgtctgtcccttccccttcaccgctccccacagctttgcacccctttcctccccatacacacacaaaccattttattttttgggccattaccccataccccttattgctgccaaaaccacatgggctgggggccagggctggatggacagacacctccccctacccatatccctcccgtgtgtggttggaaaacttttgttttttggggttttttttttctgaataaaaaagattctactaacaa

SEQ ID NO: 169124 - DNA, 539 bp, Homo sapiens
  Payload ID: 13292
  Gene Symbol: PFN1
  Gene Name: profilin 1
  ENST ID: ENST00000572383
  CDS Start-End: 43-539
cgggcgcgctcccgtgcagccggctccggccccgaccgccccatgcactcccggccccggcgcaggcgcaggcgcgggcacacgcgccgccgcccgccggtccttcccttcggcggaggaagtggcggtgcgagggctgctgcacagcgagcggagccgcggtccggacggcagcgcgtgccccgagctctccgcctccccccgcccgccagccgaggcagctcgagcccagtccgcggccccagcagcagcgccgagagcagccccagtagcagcgccatggccgggtggaacgcctacatcgacaacctcatggcggacgggacctgtcaggacgcggccatcgtgggctacaaggactcgccctccgtctgggccgccgtccccgggaaaacgttcgtcaacatcacgccagctgaggtgggtgtcctggttggcaaagaccggtcaagtttttacgtgaatgggctgacacttgggggccagaaatgttcggtgatccgggactcactgctgcaggatggggaatttagcatgga

SEQ ID NO: 169125 - DNA, 1173 bp, Homo sapiens
  Payload ID: 13292
  Gene Symbol: PFN1
  Gene Name: profilin 1
  ENST ID: ENST00000574872
  CDS Start-End: 626-940
gggggcttggggtgaaagggggaggggggaaaggttcccggggtacctagacccgagagctggcctgccgggtctggcccctgtccaccttcaaaagttttccaactttcccggaaagcccccaggggtctgcttcctcatctcagagcagagatacctggagctaaactctaggttacttggagacccaggcgtccgggccctaacagctcctgcagaacctttgaccaaataagggcaaagttgcttctcttgcctcgcccgcccccctcccttcccctctccgcttctgcttttcctgaaggagagttctgagcatccaaaggctcctcacttacctcactgactccctttatttcctgggtttactttccccattaacactgacatctaaatctctagaggagtatgtcatcccttcctccctggttccatattctaagtttcagaatcatgatctttttctgcactaacgtcccacagtcctcagagtttctcacagttcattgatgtgtactgagtatataatttatacttagcccccacggcggggtggttctcagaagtggaagacaggtgggtctttggagaacacggtgggaatcttggtgcactgactaacttgatgggcgcttggttcctcttccagccagctgaggtgggtgtcctggttggcaaagaccggtcaagtttttacgtgaatgggctgacacttgggggccagaaatgttcggtgatccgggactcactgctgcaggatggggaatttagcatggatcttcgtaccaagagcaccggtggggcccccaccttcaatgtcactgtcaccaagactgacaagacgctagtcctgctgatgggcaaagaaggtgtccacggtggtttgatcaacaagaaatgttatgaaatggcctcccaccttcggcgttcccagtactgacctcgtctgtcccttccccttcaccgctccccacagctttgcacccctttcctccccatacacacacaaaccattttattttttgggccattaccccataccccttattgctgccaaaaccacatgggctgggggccagggctggatggacagacacctccccctacccatatccctcccgtgtgtggttggaaaacttttgttttttggggttttttttttctgaataaaaa

SEQ ID NO: 169126 - DNA, 2261 bp, Homo sapiens
  Payload ID: 13293
  Gene Symbol: PFN2
  Gene Name: profilin 2
  Uniprot ID: P35080
  ENST ID: ENST00000239940
  CDS Start-End: 254-676
gccgctggtttgtcagccccgcggctgcgggcggccgggcggccgagcgcgctctgaggttcgtccctcatcgctgaacccgcgtcctcccgccgcagctcctcggggaggggggcggtcggtgcctgcgcagagccgcctcctccccgcccccgccccgcctccccccgcgccgccgccgcccgctaccgccgccgccgccgctgcgcctgctgctcctcgccgtccgcgctgcagtgcgaagggctcgaagatggccggttggcagagctacgtggataacctgatgtgcgatggctgctgccaggaggccgccattgtcggctactgcgacgccaaatacgtctgggcagccacggccgggggcgtctttcagagcattacgccaatagaaatagatatgattgtaggaaaagaccgggaaggtttctttaccaacggtttgactcttggcgcgaagaaatgctcagtgatcagagatagtctatacgtcgatggtgactgcacaatggacatccggacaaagagtcaaggtggggagccaacatacaatgtggctgtcggcagagctggtagagtcttggtctttgtaatgggaaaagaaggggtccatggaggcggattgaataagaaggcatactcaatggcaaaatacttgagagactctgggttctagctgctaggcagactgttaagtattaggggaaaattgctcttaaactttcctagctataagcttaagtcttaattctggaaattttattagcaatgcagggtgatggggtatgaacctgtgtctcctttgtatccctctgttggtggggaaaggtgtctttctttctgccctccccccccaaaataattctgttcacttttgttttgtttccttgtgtactccagcattggttatagtcatgggaaaggaaggtgtccacggaggcacacttaacaagaaagcatatgaactcgctttatacctgaggaggtctgatgtgtaagcagcctctccccatctacctagcaactgtcttcatcaacaaccctaattatggtcacaatgctaccaaactgtagatggtagctaatttttctttacctattttctaatgtcatgattcctgtttgcccaatggatcatttgtatgttaaccactgtatgtaaccaacccttatctggcaacataattgcagcacaataatgatttgcatgataccttgaaattggggggagggggcatgccaagttgggcatcactttgtcttagcaattaatgggatattgattactaaaataagttaatattaagcaaggtgccggttgtacaatctctgatcagtgtcttttcagcactttgagcatttacttggctcatttagtcttccttttgtagcgcatggttgggaggaaaaagtgcatgcatcattccttcactcttctctttttcccgccccccctcccttcgcacataggcatttggtttgcttccatctttttttatgcagtgcctgtttttttttaaccaattaaaatcccttttgttgatgagctattgagagctgcagtagtttgcttttagtattgttgttgcacttgagcagagacaaacctttattcatagtgtctacaggacatatgaagagtgcaatggcaaaacaagagcaaaaagcacttcctcccatgaccttacagtaaccatactgattgaatccccagggacattccatcattgcaatagctcagatttttcttcctttttctttgcacaccagctctactctttagtaaaattgtaaaaggctgccattatggacattaggtatcccaacataaccatctggagtgtgtccagtttgttcttcataggaccaatttttatttgcagcttgagtttttatatgaagttgcattattgtggacttggctgtcttgtgatgaatttttttcatatgtattctgtgccatactattgttaaaatgaactgttgctattgtgagatggattttaactgacctattaagggtttctttcgaatggcactactttagggacattctagtatttgcttctattgtttgggccttgtggataatgtacagatttaaaaacaaatcttgttgctgatttgtccatttctttccctgcactttgttacatctgggatacagtctaactcatctgatttaatatgcatttaaaaaaatgccataactattaaacaccttgtttacagacagatgaaataaatttattccaaccaaa

SEQ ID NO: 169127 - DNA, 911 bp, Homo sapiens
  Payload ID: 13293
  Gene Symbol: PFN2
  Gene Name: profilin 2
  ENST ID: ENST00000423691
  CDS Start-End: 67-633
accgccgccgccgccgctgcgcctgctgctcctcgccgtccgcgctgcagtgcgaagggctcgaagatggccggttggcagagctacgtggataacctgatgtgcgatggctgctgccaggaggccgccattgtcggctactgcgacgccaaatacgtctgggcagccacggccgggggcgtctttcagagcattacgccaatagaaatagatatgattgtaggaaaagaccgggaaggtttctttaccaacggtttgactcttggcgcgaagaaatgctcagtgatcagagatagtctatacgtcgatggtgactgcacaatggacatccggacaaagagtcaaggtggggagccaacatacaatgtggctgtcggcagagctggtagagcattggttatagtcatgggaaaggaaggtgtccacggaggcacacttaacaagaaagcatatgaactcgctttatacctgaggaggtatcccaacataaccatctggagtgtgtccagtttgttcttcataggaccaatttttatttgcagcttgagtttttatatgaagttgcattattgtggacttggctgtcttgtgatgaatttttttcatatgtattctgtgccatactattgttaaaatgaactgttgctattgtgagatggattttaactgacctattaagggtttctttcgaatggcactactttagggacattctagtatttgcttctattgtttgggccttgtggataatgtacagatttaaaaacaaatcttgttgctgatttgtccatttctttccctgcactttgttacatctgggatacagtctaactcatctgatttaatatgcatttaaaaaaatgccataactattaaacaccttgtttacagacagatgaaataaatttatt

SEQ ID NO: 169128 - DNA, 1780 bp, Homo sapiens
  Payload ID: 13293
  Gene Symbol: PFN2
  Gene Name: profilin 2
  Uniprot ID: P35080
  ENST ID: ENST00000452853
  CDS Start-End: 95-517
gcctccccccgcgccgccgccgcccgctaccgccgccgccgccgctgcgcctgctgctcctcgccgtccgcgctgcagtgcgaagggctcgaagatggccggttggcagagctacgtggataacctgatgtgcgatggctgctgccaggaggccgccattgtcggctactgcgacgccaaatacgtctgggcagccacggccgggggcgtctttcagagcattacgccaatagaaatagatatgattgtaggaaaagaccgggaaggtttctttaccaacggtttgactcttggcgcgaagaaatgctcagtgatcagagatagtctatacgtcgatggtgactgcacaatggacatccggacaaagagtcaaggtggggagccaacatacaatgtggctgtcggcagagctggtagagcattggttatagtcatgggaaaggaaggtgtccacggaggcacacttaacaagaaagcatatgaactcgctttatacctgaggaggtctgatgtgtaagcagcctctccccatctacctagcaactgtcttcatcaacaaccctaattatggtcacaatgctaccaaactgtagatggtagctaatttttctttacctattttctaatgtcatgattcctgtttgcccaatggatcatttgtatgttaaccactgtatgtaaccaacccttatctggcaacataattgcagcacaataatgatttgcatgataccttgaaattggggggagggggcatgccaagttgggcatcactttgtcttagcaattaatgggatattgattactaaaataagttaatattaagcaaggtgccggttgtacaatctctgatcagtgtcttttcagcactttgagcatttacttggctcatttagtcttccttttgtagcgcatggttgggaggaaaaagtgcatgcatcattccttcactcttctctttttcccgccccccctcccttcgcacataggcatttggtttgcttccatctttttttatgcagtgcctgtttttttttaaccaattaaaatcccttttgttgatgagctattgagagctgcagtagtttgcttttagtattgttgttgcacttgagcagagacaaacctttattcatagtgtctacaggacatatgaagagtgcaatggcaaaacaagagcaaaaagcacttcctcccatgaccttacagtaaccatactgattgaatccccagggacattccatcattgcaatagctcagatttttcttcctttttctttgcacaccagctctactctttagtaaaattgtaaaaggctgccattatggacattaggtatcccaacataaccatctggagtgtgtccagtttgttcttcataggaccaatttttatttgcagcttgagtttttatatgaagttgcattattgtggacttggctgtcttgtgatgaatttttttcatatgtattctgtgccatactattgttaaaatgaactgttgctattgtgagatggattttaactgacctattaagggtttctttcgaatggcactactttagggacattctagtatttgcttctattgtttgggccttgtggataatgtacagatttaaaaacaaatcttgttgctgatttgtccatttctttccctgcactttgttacatctgggatacagtctaactcatctgatttaatatgcatttaaaaaaatgccataactattaaacaccttgtttacagacagatgaaataaatttattccaaccaaa

SEQ ID NO: 169129 - DNA, 858 bp, Homo sapiens
  Payload ID: 13293
  Gene Symbol: PFN2
  Gene Name: profilin 2
  ENST ID: ENST00000490975
  CDS Start-End: 70-447
gctaccgccgccgccgccgctgcgcctgctgctcctcgccgtccgcgctgcagtgcgaagggctcgaagatggccggttggcagagctacgtggataacctgatgtgcgatggctgctgccaggaggccgccattgtcggctactgcgacgccaaatacgtctgggcagccacggccgggggcgtctttcagagcattacgccaatagaaatagatatgattgtaggaaaagaccgggaaggtttctttaccaacggtttgactcttggcgcgaagaaatgctcagtgatcagagatagtctatacgtcgatggtgactgcacaatggacatccggacaaagagtcaagtcttggtctttgtaatgggaaaagaaggggtccatggaggcggattgaataagaaggcatactcaatggcaaaatacttgagagactctgggttctagctgctaggcagactgttaagtattaggggaaaattgctcttaaactttcctagctataagcttaagtcttaattctggaaattttattagcaatgcagggtgatggggtatgaacctgtgtctcctttgtatccctctgttggtggggaaaggtgtctttctttctgccctccccccccaaaataattctgttcacttttgttttgtttccttgtgtactccagcattggttatagtcatgggaaaggaaggtgtccacggaggcacacttaacaagaaagcatatgaactcgctttatacctgaggaggtctgatgtgtaagcagcctctccccatctacctagcaactgtcttcatcaacaaccctaattatggtcacaatgctaccaaactgtagatggtagctaatt

SEQ ID NO: 169130 - DNA, 743 bp, Homo sapiens
  Payload ID: 13293
  Gene Symbol: PFN2
  Gene Name: profilin 2
  ENST ID: ENST00000497148
  CDS Start-End: 140-415
gtcttccacggagaatgcatccgcgtctcaagagtcggagtcccccgccgccgccgccgccatcttgaggagggtgtgagcgtgtattgagggggagagctagcgaagagttagcgcggcgaagccaatagaaatagatatgattgtaggaaaagaccgggaaggtttctttaccaacggtttgactcttggcgcgaagaaatgctcagtgatcagagatagtctatacgtcgatggtgactgcacaatggacatccggacaaagagtcaaggtggggagccaacatacaatgtggctgtcggcagagctggtagagtcttggtctttgtaatgggaaaagaaggggtccatggaggcggattgaataagaaggcatactcaatggcaaaatacttgagagactctgggttctagctgctaggcagactgttaagtattaggggaaaattgctcttaaactttcctagctataagcttaagtcttaattctggaaattttattagcaatgcagggtgatggggtatgaacctgtgtctcctttgtatccctctgttggtggggaaaggtgtctttctttctgccctccccccccaaaataattctgttcacttttgttttgtttccttgtgtactccagcattggttatagtcatgggaaaggaaggtgtccacggaggcacacttaacaagaaagcatatgaactcgctttatacctgaggaggtctgatgtgtaagcagcc

SEQ ID NO: 169131 - DNA, 606 bp, Homo sapiens
  Payload ID: 13293
  Gene Symbol: PFN2
  Gene Name: profilin 2
  ENST ID: ENST00000461930
  CDS Start-End: 49-186
gcgcctgctgctcctcgccgtccgcgctgcagtgcgaagggctcgaagatggccggttggcagagctacgtggataacctgatgtgcgatggctgctgccaggaggccgccattgtcggctactgcgacgccaaatacgtctgggcagccacggccgggggcgtctttcagagcattacgaaatagatatgattgtaggaaaagaccgggaaggtttctttaccaacggtttgactcttggcgcgaagaaatgctcagtgatcagagatagtctatacgtcgatggtgactgcacaatggacatccggacaaagagtcaaggtggggagccaacatacaatgtggctgtcggcagagctggtagaggtgagtaaggcattcttttggttaaagttgcatgccacattacaacttattaagcagtttcttttaacattttgaataaaagttagtccataatggctattaaggtggtttttgtgaactgcccagcactatggagaagcactgctttagttttacctactctacagcatctatgacctggcctcttagatcctgattttgtttctacgatagaatattcgtatgaactcactttcagct

SEQ ID NO: 169132 - DNA, 942 bp, Homo sapiens
  Payload ID: 13293
  Gene Symbol: PFN2
  Gene Name: profilin 2
  ENST ID: ENST00000460404
  CDS Start-End: 49-186
gcgcctgctgctcctcgccgtccgcgctgcagtgcgaagggctcgaagatggccggttggcagagctacgtggataacctgatgtgcgatggctgctgccaggaggccgccattgtcggctactgcgacgccaaatacgtctgggcagccacggccgggggcgtctttcagagcattacgaaatagatatgattgtaggaaaagaccgggaaggtttctttaccaacggtttgactcttggcgcgaagaaatgctcagtgatcagagatagtctatacgtcgatggtgactgcacaatggacatccggacaaagagtcaaggtggggagccaacatacaatgtggctgtcggcagagctggtagagcattggttatagtcatgggaaaggaaggtgtccacggaggcacacttaacaagaaagcatatgaactcgctttatacctgaggaggtctgatgtgtaagcagcctctccccatctacctagcaactgtcttcatcaacaaccctaattatggtcacaatgctaccaaactgtagatggtagctaatttttctttacctattttctaatgtcatgattcctgtttgcccaatggatcatttgtatgttaaccactgtatgtaaccaacccttatctggcaacataattgcagcacaataatgatttgcatgataccttgaaattggggggagggggcatgccaagttgggcatcactttgtcttagcaattaatgggatattgattactaaaataagttaatattaagcaaggtgccggttgtacaatctctgatcagtgtcttttcagcactttgagcatttacttggctcatttagtcttccttttgtagcgcatggttgggaggaaaaagtgcatgcatcattccttcactcttctctttttcccgccccccctcccttcgcacataggcattt

SEQ ID NO: 169133 - DNA, 637 bp, Homo sapiens
  Payload ID: 13293
  Gene Symbol: PFN2
  Gene Name: profilin 2
  ENST ID: ENST00000475518
  CDS Start-End: 133-408
agagcattacggtgaggaccagtggcggccggtaccctggtccctgcaccggagcggggtggccggccgcgggggcaccgcagcgcggggctggaacactgagggccgagcccgcagccaatagaaatagatatgattgtaggaaaagaccgggaaggtttctttaccaacggtttgactcttggcgcgaagaaatgctcagtgatcagagatagtctatacgtcgatggtgactgcacaatggacatccggacaaagagtcaaggtggggagccaacatacaatgtggctgtcggcagagctggtagagtcttggtctttgtaatgggaaaagaaggggtccatggaggcggattgaataagaaggcatactcaatggcaaaatacttgagagactctgggttctagctgctaggcagactgttaagtattaggggaaaattgctcttaaactttcctagctataagcttaagtcttaattctggaaattttattagcaatgcagggtgatggggtatgaacctgtgtctcctttgtatccctctgttggtggggaaaggtgtctttctttctgccctccccccccaaaataattctgttcacttttgttttgtttccttgtgtactccagcattg

SEQ ID NO: 169134 - DNA, 560 bp, Homo sapiens
  Payload ID: 13293
  Gene Symbol: PFN2
  Gene Name: profilin 2
  ENST ID: ENST00000481275
  CDS Start-End: 64-339
cttttttcctcctagtgcggttcccctaggttctcttgaagccctgagccaatagaaatagatatgattgtaggaaaagaccgggaaggtttctttaccaacggtttgactcttggcgcgaagaaatgctcagtgatcagagatagtctatacgtcgatggtgactgcacaatggacatccggacaaagagtcaaggtggggagccaacatacaatgtggctgtcggcagagctggtagagtcttggtctttgtaatgggaaaagaaggggtccatggaggcggattgaataagaaggcatactcaatggcaaaatacttgagagactctgggttctagctgctaggcagactgttaagtattaggggaaaattgctcttaaactttcctagctataagcttaagtcttaattctggaaattttattagcaatgcagggtgatggggtatgaacctgtgtctcctttgtatccctctgttggtggggaaaggtgtctttctttctgccctccccccccaaaataattctgttcacttttgttttgtttccttgtgtactc

SEQ ID NO: 169135 - DNA, 894 bp, Homo sapiens
  Payload ID: 13293
  Gene Symbol: PFN2
  Gene Name: profilin 2
  ENST ID: ENST00000468323
  CDS Start-End: 43-210
gctgctcctcgccgtccgcgctgcagtgcgaagggctcgaagatggccggttggcagagctacgtggataacctgatgtgcgatggctgctgccaggaggccgccattgtcggctactgcgacgccaaatacgtctgggcagccacggccgggggcgtctttcagagcattacggaaaagaccgggaaggtttctttaccaacggtttgactcttggcgcgaagaaatgctcagtgatcagagatagtctatacgtcgatggtgactgcacaatggacatccggacaaagagtcaaggtggggagccaacatacaatgtggctgtcggcagagctggtagagcattggttatagtcatgggaaaggaaggtgtccacggaggcacacttaacaagaaagcatatgaactcgctttatacctgaggaggtctgatgtgtaagcagcctctccccatctacctagcaactgtcttcatcaacaaccctaattatggtcacaatgctaccaaactgtagatggtagctaatttttctttacctattttctaatgtcatgattcctgtttgcccaatggatcatttgtatgttaaccactgtatgtaaccaacccttatctggcaacataattgcagcacaataatgatttgcatgataccttgaaattggggggagggggcatgccaagttgggcatcactttgtcttagcaattaatgggatattgattactaaaataagttaatattaagcaaggtgccggttgtacaatctctgatcagtgtcttttcagcactttgagcatttacttggctcatttagtcttccttttgtagcgcatggttgggaggaaaaagtgcatgcatcattccttcactcttctctttttcccgcccc

SEQ ID NO: 169136 - DNA, 662 bp, Homo sapiens
  Payload ID: 13293
  Gene Symbol: PFN2
  Gene Name: profilin 2
  ENST ID: ENST00000498169
  CDS Start-End: 27-194
cgcgctgcagtgcgaagggctcgaagatggccggttggcagagctacgtggataacctgatgtgcgatggctgctgccaggaggccgccattgtcggctactgcgacgccaaatacgtctgggcagccacggccgggggcgtctttcagagcattacggaaaagaccgggaaggtttctttaccaacggtttgactcttggcgcgaagaaatgctcagtgatcagagatagtctatacgtcgatggtgactgcacaatggacatccggacaaagagtcaaggtggggagccaacatacaatgtggctgtcggcagagctggtagagtcttggtctttgtaatgggaaaagaaggggtccatggaggcggattgaataagaaggcatactcaatggcaaaatacttgagagactctgggttctagctgctaggcagactgttaagtattaggggaaaattgctcttaaactttcctagctataagcttaagtcttaattctggaaattttattagcaatgcagggtgatggggtatgaacctgtgtctcctttgtatccctctgttggtggggaaaggtgtctttctttctgccctccccccccaaaataattctgttcacttttgttttgtttccttgtgtactccagcattggttatagtc

SEQ ID NO: 169137 - DNA, 793 bp, Homo sapiens
  Payload ID: 13293
  Gene Symbol: PFN2
  Gene Name: profilin 2
  ENST ID: ENST00000494827
  CDS Start-End: 208-483
actcccaccgaggccctgcaacagcaccaagtctatttctaggcagcccatgaccagggctgagaacttgccccagaccatgagcctcccggctgagaaaacaagttaactcacagtttttcagcatctcagggagcctgcagcagtgatccagttccttcaaactgtctgtggattctctcggctttcctgccaatagaaatagatatgattgtaggaaaagaccgggaaggtttctttaccaacggtttgactcttggcgcgaagaaatgctcagtgatcagagatagtctatacgtcgatggtgactgcacaatggacatccggacaaagagtcaaggtggggagccaacatacaatgtggctgtcggcagagctggtagagcattggttatagtcatgggaaaggaaggtgtccacggaggcacacttaacaagaaagcatatgaactcgctttatacctgaggaggtctgatgtgtaagcagcctctccccatctacctagcaactgtcttcatcaacaaccctaattatggtcacaatgctaccaaactgtagatggtagctaatttttctttacctattttctaatgtcatgattcctgtttgcccaatggatcatttgtatgttaaccactgtatgtaaccaacccttatctggcaacataattgcagcacaataatgatttgcatgataccttgaaattggggggagggggcatgccaagttgggcatcactttgtcttagcaattaatgggatattgattactaaaataagttaatattaagc

SEQ ID NO: 169138 - DNA, 556 bp, Homo sapiens
  Payload ID: 13293
  Gene Symbol: PFN2
  Gene Name: profilin 2
  ENST ID: ENST00000498307
  CDS Start-End: 77-352
ggatcgcacgcacgcgcgcgcgcacgcccagccgtgtccgcggaaaacggagggcgctgcgccaatagaaatagatatgattgtaggaaaagaccgggaaggtttctttaccaacggtttgactcttggcgcgaagaaatgctcagtgatcagagatagtctatacgtcgatggtgactgcacaatggacatccggacaaagagtcaaggtggggagccaacatacaatgtggctgtcggcagagctggtagagtcttggtctttgtaatgggaaaagaaggggtccatggaggcggattgaataagaaggcatactcaatggcaaaatacttgagagactctgggttctagctgctaggcagactgttaagtattaggggaaaattgctcttaaactttcctagctataagcttaagtcttaattctggaaattttattagcaatgcagggtgatggggtatgaacctgtgtctcctttgtatccctctgttggtggggaaaggtgtctttctttctgccctccccccccaaaataattctgttcacttttgttt

SEQ ID NO: 169139 - DNA, 613 bp, Homo sapiens
  Payload ID: 13293
  Gene Symbol: PFN2
  Gene Name: profilin 2
  ENST ID: ENST00000461868
  CDS Start-End: 85-417
gcgccgccgccgcccgctaccgccgccgccgccgctgcgcctgctgctcctcgccgtccgcgctgcagtgcgaagggctcgaagatggccggttggcagagctacgtggataacctgatgtgcgatggctgctgccaggaggccgccattgtcggctactgcgacgccaaatacgtctgggcagccacggccgggggcgtctttcagagcattacgccaatagaaatagatatgattgtaggaaaagaccgggaaggtttctttaccaacggtttgactcttggcgcgaagaaatgctcagtgatcagagatagtctatacgtcgatggtgactgcacaatggacatccggacaaagagtcaaggtggggagccaacatacaatgtggctgtcggcagagctggtagaggtgagtaaggcattcttttggttaaagttgcatgccacattacaacttattaagcagtttcttttaacattttgaataaaagttagtccataatggctattaaggtggtttttgtgaactgcccagcactatggagaagcactgctttagttttacctactctacagcatctatgacctggcctcttagatcctgattttgttt

SEQ ID NO: 169140 - DNA, 1620 bp, Homo sapiens
  Payload ID: 13293
  Gene Symbol: PFN2
  Gene Name: profilin 2
  ENST ID: ENST00000481767
  CDS Start-End: 113-388
agtggcggccggtaccctggtccctgcaccggagcggggtggccggccgcgggggcaccgcagcgcggggctggaacactgagggccgagcccgcagccaatagaaatagatatgattgtaggaaaagaccgggaaggtttctttaccaacggtttgactcttggcgcgaagaaatgctcagtgatcagagatagtctatacgtcgatggtgactgcacaatggacatccggacaaagagtcaaggtggggagccaacatacaatgtggctgtcggcagagctggtagagcattggttatagtcatgggaaaggaaggtgtccacggaggcacacttaacaagaaagcatatgaactcgctttatacctgaggaggtctgatgtgtaagcagcctctccccatctacctagcaactgtcttcatcaacaaccctaattatggtcacaatgctaccaaactgtagatggtagctaatttttctttacctattttctaatgtcatgattcctgtttgcccaatggatcatttgtatgttaaccactgtatgtaaccaacccttatctggcaacataattgcagcacaataatgatttgcatgataccttgaaattggggggagggggcatgccaagttgggcatcactttgtcttagcaattaatgggatattgattactaaaataagttaatattaagcaaggtgccggttgtacaatctctgatcagtgtcttttcagcactttgagcatttacttggctcatttagtcttccttttgtagcgcatggttgggaggaaaaagtgcatgcatcattccttcactcttctctttttcccgccccccctcccttcgcacataggcatttggtttgcttccatctttttttatgcagtgcctgtttttttttaaccaattaaaatcccttttgttgatgagctattgagagctgcagtagtttgcttttagtattgttgttgcacttgagcagagacaaacctttattcatagtgtctacaggacatatgaagagtgcaatggcaaaacaagagcaaaaagcacttcctcccatgaccttacagtaaccatactgattgaatccccagggacattccatcattgcaatagctcagatttttcttcctttttctttgcacaccagctctactctttagtaaaattgtaaaaggctgccattatggacattaggtatcccaacataaccatctggagtgtgtccagtttgttcttcataggaccaatttttatttgcagcttgagtttttatatgaagttgcattattgtggacttggctgtcttgtgatgaatttttttcatatgtattctgtgccatactattgttaaaatgaactgttgctattgtgagatggattttaactgacctattaagggtttctttcgaatggcactactttagggacattctagtatttgcttctattgtttgggccttgtggataatgtacagatttaaaaacaaatcttgttgctgatttgtccatttctttccctgcactttgttacatctgggatacagtctaactcatctgatttaatatgcatttaaaaaaatgccataactattaaacaccttgtttac

SEQ ID NO: 169141 - DNA, 636 bp, Homo sapiens
  Payload ID: 13293
  Gene Symbol: PFN2
  Gene Name: profilin 2
  ENST ID: ENST00000489155
  CDS Start-End: 188-463
cgccgcggaaggatcgcacgcacgcgcgcgcgcacgcccagccgtgtccgcggaaaacggagggcgctgcggtaaggagcagccgccacaggcacagccgcttcgcagcctcccgccgctggtttgtcagccccgcggctgcgggcggccgggcggccgagcgcgctctgagccaatagaaatagatatgattgtaggaaaagaccgggaaggtttctttaccaacggtttgactcttggcgcgaagaaatgctcagtgatcagagatagtctatacgtcgatggtgactgcacaatggacatccggacaaagagtcaaggtggggagccaacatacaatgtggctgtcggcagagctggtagagtcttggtctttgtaatgggaaaagaaggggtccatggaggcggattgaataagaaggcatactcaatggcaaaatacttgagagactctgggttctagctgctaggcagactgttaagtattaggggaaaattgctcttaaactttcctagctataagcttaagtcttaattctggaaattttattagcaatgcagggtgatggggtatgaacctgtgtctcctttgtatccctctgttggtggggaaaggtgtctttctttctgccctcc

SEQ ID NO: 169142 - DNA, 530 bp, Homo sapiens
  Payload ID: 13294
  Gene Symbol: PFN3
  Gene Name: profilin 3
  Uniprot ID: P60673
  ENST ID: ENST00000358571
  CDS Start-End: 61-474
cgcgtggcgcctctatatttccccgagaggtgcgaggcggctgggcgcactcggagcgcgatgggcgactggaaggtctacatcagtgcagtgctgcgggaccagcgcatcgacgacgtggccatcgtgggccatgcggacaacagctgcgtgtgggcttcgcggcccgggggcctgctggcggccatctcgccgcaggaggtgggcgtgctcacggggccggacaggcacaccttcctgcaggcgggcctgagcgtggggggccgccgctgctgcgtcatccgcgaccacctgctggccgagggtgacggcgtgctggacgcacgcaccaaggggctggacgcgcgcgccgtgtgcgtgggccgtgcgccgcgcgcgctcctggtgctaatgggccgacgcggcgtacatgggggcatcctcaacaagacggtgcacgaactcatacgcgggctgcgcatgcagggcgcctagccggccagccaggccgcccactggtagcgcgggccaaataaactgtgacctgggcg

SEQ ID NO: 169143 - DNA, 974 bp, Homo sapiens
  Payload ID: 13295
  Gene Symbol: PFN4
  Gene Name: profilin family, member 4
  Uniprot ID: Q8NHR9
  ENST ID: ENST00000313213
  CDS Start-End: 373-762
agcgagtccgcgcgggcggtgccggggcggcggaggacggcttcaggcccaaaggggattgggcggcggctctaggtggcgggtcttggtttgcggaaggggctggagtcgctgcttctcggtgaccggcgcgtggcccggccaatcctgccgccgccacccacccgcaaccgcgtccgttgacggtcgggtccttggtcgccgggtccttgcgggcaccacagagcggggtggcgtccgctccctcgagtcctcggtgccagggaattcaccgctcaccaccccctgccccgccttgggtcctgctcggggaccaaaccactggaaggcagtggcgggaaacgggcgcctgtgccggagagttgagggaacatgagccatttgcagagcttattgttagacaccctcttgggaaccaagcatgtggacagtgcagccctcatcaaaatccaggagcggagcttgtgtgtagcatcaccaggtttcaatgtaacgcccagtgatgtccgaacactggtgaatggatttgccaagaaccctttgcaagcccgaagagaaggactgtatttcaagggaaaagattacagatgtgtccgggcagatgaatattctctttatgccaaaaatgagaacactggtgtggttgtcgtgaagacccatctgtatcttctggtagcaacttacactgagggcatgtatcctagcatctgtgtggaagccacagagagcctgggagactacctaagaaaaaaaggaagttaagtcatcagaggcccatgaaagacaattttattattttagaagaaaattgaagagcctaaagaaaaaatattttatggttgaaaaaacactagacagaaggcactaaaaaagaagaatgaattaagggagcaatttttattacttccagagatcctcttctttcactggaattacttgatcaactgttttttaataagtgttggtcatcggca

SEQ ID NO: 169144 - DNA, 470 bp, Homo sapiens
  Payload ID: 13295
  Gene Symbol: PFN4
  Gene Name: profilin family, member 4
  ENST ID: ENST00000436622
  CDS Start-End: 442-470
gggcggtgccggggcggcggaggacggcttcaggcccaaaggggattgggcggcggctctaggtggcgggtcttggtttgcggaaggggctggagtcgctgcttctcggtgaccggcgcgtggcccggccaatcctgccgccgccacccacccgcaaccgcgtccgttgacggtcgggtccttggtcgccgggtccttgcgggcaccacagagcggggtggcgtccgctccctcgagtcctcggtgccagggaattcaccgctcaccaccccctgccccgccttgggtcctgctcggggaccaaaccactggaaggcagtggcgggaaacgggcgcctgtgccggagataatcctgatgtaaaccattgacatagccagaaaatcaccaggctgtgattttccaaactcagcttcataacctattctgtagttgagggaacatgagccatttgcagagcttattgttaga

SEQ ID NO: 169145 - DNA, 480 bp, Homo sapiens
  Payload ID: 13296
  Gene Symbol: PGC
  Gene Name: progastricsin (pepsinogen C)
  ENST ID: ENST00000356667
  CDS Start-End: 62-480
tccactgcgactgcagaactcagagctgctcttcctctgtggccagttggggaccagcatcatgaagtggatggtggtggtcttggtctgcctccagctcttggaggcagcagtggtcaaagtgcccctgaagaaatttaagtctatccgtgagaccatgaaggagaagggcttgctgggggagttcctgaggacccacaagtatgatcctgcttggaagtaccgctttggtgacctcagcgtgacctacgagcccatggcctacatggatgtccagagcatccaggtccccaaccaggagttcggcttgagtgagaatgagcctggtaccaacttcgtctatgcgcagtttgatggcatcatgggcctggcctaccctgctctgtccgtggatgaggccaccacagctatgcagggcatggtgcaggagggcgccctcaccagccccgtcttcagcgtctacctcagcaaccagcaggg

SEQ ID NO: 169146 - DNA, 1371 bp, Homo sapiens
  Payload ID: 13296
  Gene Symbol: PGC
  Gene Name: progastricsin (pepsinogen C)
  Uniprot ID: P20142
  ENST ID: ENST00000373025
  CDS Start-End: 64-1230
actccactgcgactgcagaactcagagctgctcttcctctgtggccagttggggaccagcatcatgaagtggatggtggtggtcttggtctgcctccagctcttggaggcagcagtggtcaaagtgcccctgaagaaatttaagtctatccgtgagaccatgaaggagaagggcttgctgggggagttcctgaggacccacaagtatgatcctgcttggaagtaccgctttggtgacctcagcgtgacctacgagcccatggcctacatggatgctgcctactttggtgagatcagcatcgggactccaccccagaacttcctggtcctttttgacaccggctcctccaacttgtgggtgccctctgtctactgccagagccaggcctgcaccagtcactcccgcttcaaccccagcgagtcgtccacctactccaccaatgggcagaccttctccctgcagtatggcagtggcagcctcaccggcttctttggctatgacaccctgactgtccagagcatccaggtccccaaccaggagttcggcttgagtgagaatgagcctggtaccaacttcgtctatgcgcagtttgatggcatcatgggcctggcctaccctgctctgtccgtggatgaggccaccacagctatgcagggcatggtgcaggagggcgccctcaccagccccgtcttcagcgtctacctcagcaaccagcagggctccagcgggggagcggttgtctttgggggtgtggatagcagcctgtacacggggcagatctactgggcgcctgtcacccaggaactctactggcagattggcattgaagagttcctcatcggcggccaggcctccggctggtgttctgagggttgccaggccatcgtggacacaggcacctctctgctcactgtgccccagcagtacatgagtgctcttctgcaggccacaggggcccaggaggatgagtatggacagtttctcgtgaactgtaacagcattcagaatctgcccagcttgaccttcatcatcaatggtgtggagttccctctgccaccttcctcctatatcctcagtaacaacggctactgcaccgtgggagtcgagcccacctacctgtcctcccagaacggccagcccctgtggatcctcggggatgtcttcctcaggtcctactattccgtctacgacttgggcaacaacagagtaggctttgccactgccgcctagacttgctgcctcgacacgtgggctcccctcttcctcttgaccctgcaccctcctagggcattgtatctgtctttccactctggattcagccttctttttctggactctggactttctctaataataaatagttcttcttta

SEQ ID NO: 169147 - DNA, 399 bp, Homo sapiens
  Payload ID: 13296
  Gene Symbol: PGC
  Gene Name: progastricsin (pepsinogen C)
  ENST ID: ENST00000415707
  CDS Start-End: 142-399
agagagaagagagggcaaagcaaagagaagcaggaatgagaaatggagaaagggtcctggtagtgtttgcatctcagattctagctgatcctaaggctccaccctatccctccccttcctgaagctgggctgccctgcgaaatgtgccttcatccatccagtacacctcctttccaccaacccagaaaggaagcagtcatctgcaagcaaagagtgcccctgaagaaatttaagtctatccgtgagaccatgaaggagaagggcttgctgggggagttcctgaggacccacaagtatgatcctgcttggaagtaccgctttggtgacctcagcgtgacctacgagcccatggcctacatggatgctgcctactttggtgagatcagcatcgggactcca

SEQ ID NO: 169148 - DNA, 1152 bp, Homo sapiens
  Payload ID: 13296
  Gene Symbol: PGC
  Gene Name: progastricsin (pepsinogen C)
  Uniprot ID: P20142
  ENST ID: ENST00000425343
  CDS Start-End: 68-1015
cttcactccactgcgactgcagaactcagagctgctcttcctctgtggccagttggggaccagcatcatgaagtggatggtggtggtcttggtctgcctccagctcttggaggcagcagtggtcaaagtgcccctgaagaaatttaagtctatccgtgagaccatgaaggagaagggcttgctgggggagttcctgaggacccacaagtatgatcctgcttggaagtaccgctttggtgacctcagcgtgacctacgagcccatggcctacatggatgctgcctactttggtgagatcagcatcgggactccaccccagaacttcctggtcctttttgacaccggctcctccaacttgtgggtgccctctgtctactgccagagccaggcctgcaccagtcactcccgcttcaaccccagcgagtcgtccacctactccaccaatgggcagaccttctccctgcagtatggcagtggcagcctcaccggcttctttggctatgacaccctgactgtccagagcatccaggtccccaaccaggagttcggcttgagtgagaatgagcctggtaccaacttcgtctatgcgcagtttgatggcatcatgggcctggcctaccctgctctgtccgtggatgaggccaccacagctatgcagggcatggtgcaggagggcgccctcaccagccccgtcttcagcgtctacctcagcaacctggtcctggagtcttctggtctaggtccactgctgacccctagcagagcagctccacccagctccacactccagctaccagagaagcctctggaacaaacatggaatatccttacccccttcaccaagaccctacctgtctccaatctcagcagaaaagtaacaagctgggccggggtggggatcccggtgacatgtctaccagaggcaggaagcggaggggagaggagagcagagtgtgggctgggggtcccaaccactaggggaccccccagaagtcagcatcattcgggagcctgaggcgctgggaattccaaggcctggccagaaagccccagtctaagggacgcatcccagtccccagggagccccaatctaagggatacagccccatcctcagggagccccagtctgagggagacacagactcgtcctca

SEQ ID NO: 169149 - DNA, 821 bp, Homo sapiens
  Payload ID: 13297
  Gene Symbol: PAEP
  Gene Name: progestagen-associated endometrial protein
  Uniprot ID: P09466
  ENST ID: ENST00000277508
  CDS Start-End: 26-568
ctcagagccacccacagccgcagccatgctgtgcctcctgctcaccctgggcgtggccctggtctgtggtgtcccggccatggacatcccccagaccaagcaggacctggagctcccaaagttggcagggacctggcactccatggccatggcgaccaacaacatctccctcatggcgacactgaaggcccctctgagggtccacatcacctcactgttgcccacccccgaggacaacctggagatcgttctgcacagatgggagaacaacagctgtgttgagaagaaggtccttggagagaagactgagaatccaaagaagttcaagatcaactatacggtggcgaacgaggccacgctgctcgatactgactacgacaatttcctgtttctctgcctacaggacaccaccacccccatccagagcatgatgtgccagtacctggccagagtcctggtggaggacgatgagatcatgcagggattcatcagggctttcaggcccctgcccaggcacctatggtacttgctggacttgaaacagatggaagagccgtgccgtttctaggtgagctcctgcctggtcctgcctcctggctcacctccgcctccaggaagaccagactcccacccttccacacctccagagcagtgggacttcctcctgccctttcaaagaataaccacagctcagaagacgatgacgtggtcatctgtgtcgccatccccttcctgctgcacacctgcaccacggccatggggaggctgctccctgggggcagagtctctggcagaggttattaataaacccttggagcatg

SEQ ID NO: 169150 - DNA, 851 bp, Homo sapiens
  Payload ID: 13297
  Gene Symbol: PAEP
  Gene Name: progestagen-associated endometrial protein
  Uniprot ID: P09466
  ENST ID: ENST00000371766
  CDS Start-End: 36-578
ggctccagagctcagagccacccacagccgcagccatgctgtgcctcctgctcaccctgggcgtggccctggtctgtggtgtcccggccatggacatcccccagaccaagcaggacctggagctcccaaagttggcagggacctggcactccatggccatggcgaccaacaacatctccctcatggcgacactgaaggcccctctgagggtccacatcacctcactgttgcccacccccgaggacaacctggagatcgttctgcacagatgggagaacaacagctgtgttgagaagaaggtccttggagagaagactgagaatccaaagaagttcaagatcaactatacggtggcgaacgaggccacgctgctcgatactgactacgacaatttcctgtttctctgcctacaggacaccaccacccccatccagagcatgatgtgccagtacctggccagagtcctggtggaggacgatgagatcatgcagggattcatcagggctttcaggcccctgcccaggcacctatggtacttgctggacttgaaacagatggaagagccgtgccgtttctaggtgagctcctgcctggtcctgcctcctgggtgacctgtaaacccaacagctcacctccgcctccaggaagaccagactcccacccttccacacctccagagcagtgggacttcctcctgccctttcaaagaataaccacagctcagaagacgatgacgtggtcatctgtgtcgccatccccttcctgctgcacacctgcaccacggccatggggaggctgctccctgggggcagagtctctggcagaggttattaataaacccttggagcatg

SEQ ID NO: 169151 - DNA, 826 bp, Homo sapiens
  Payload ID: 13297
  Gene Symbol: PAEP
  Gene Name: progestagen-associated endometrial protein
  ENST ID: ENST00000433563
  CDS Start-End: 1-394
tgtcccggccatggacatcccccagaccaagcaggacctggagctcccaaaggcccctctgagggtccacatcacctcactgttgcccacccccgaggacaacctggagatcgttctgcacagatgggagaacaacagctgtgttgagaagaaggtccttggagagaagactgagaatccaaagaagttcaagatcaactgcaaggcctctggagctccccagctctcatggaagccccaggggcccaggactgacccagcctcttccacagccagagtcctggtggaggacgatgagatcatgcagggattcatcagggctttcaggcccctgcccaggcacctatggtacttgctggacttgaaacagatggaagagccgtgccgtttctaggtgagctcctgcctggtcctgcctcctggctcacctccgcctccaggaagaccagactcccacccttccacacctccagagcagtgggacttcctcctgccctttcaaagaataaccacagctcagaagacgatgacgtggtcatctgtgtcgccatccccttcctgctgcacacctgcaccacggccatggggaggctgctccctgggggcagagtctctggcagaggttattaataaacccttggagcatgtcctgtctggatgcgcagccactgctgggtgtgggattcagggacgagggcctggggtcggggcaggcccaggccaccgcctggcagaaccggagctcctacagacccatgggcagcttctggtggagaaaatacctcaagtttcttatctacaaaacaaaagggtccactttcacaaa

SEQ ID NO: 169152 - DNA, 575 bp, Homo sapiens
  Payload ID: 13297
  Gene Symbol: PAEP
  Gene Name: progestagen-associated endometrial protein
  ENST ID: ENST00000457014
  CDS Start-End: 1-100
tgagatcatgcagggattcatcagggctttcaggcccctgcccaggcacctatggtacttgctggacttgaaacagatggaagagccgtgccgtttctagatggagtctcgctctgtcaccaggctggagtgcagtggcacaatctcagctcactgcaacctcgacctcctgggttcaagcgattctcctgcctcaaccccccgagttgctggaaccacaggcgtgtgccaccatgcccagctaatttttgtatttttaatagaaacggggtttcaccatgttggccacgatggtctcaatctcttgacctcatgatccccccgctttagcctcccaaagtgctgggatttcagtgccacattcttaagggggtgtcctcaagcccaccacatccttccagggctcccccgaaacaccctgctcttcctccctctacttaagtgacctgtaaacccaacagctcacctccgcctccaggaagaccagactcccacccttccacacctccagagcagtgggacttcctcctgccctttcaaagaataaccacagctcagaagacgatgacgtggtc

SEQ ID NO: 169153 - DNA, 465 bp, Homo sapiens
  Payload ID: 13297
  Gene Symbol: PAEP
  Gene Name: progestagen-associated endometrial protein
  ENST ID: ENST00000418284
  CDS Start-End: 1-399
ctcatggcgacactgaaggcccctctgagggtccacatcacctcactgttgcccacccccgaggacaacctggagatcgttctgcacagatgggagaacaacagctgtgttgagaagaaggtccttggagagaagactgagaatccaaagaagttcaagatcaactatacggtggcgaacgaggccacgctgctcgatactgactacgacaatttcctgtttctctgcctacaggacaccaccacccccatccagagcatgatgtgccagtacctggccagagtcctggtggaggacgatgagatcatgcagggattcatcagggctttcaggcccctgcccaggcacctatggtacttgctggacttgaaacagatggaagagccgtgccgtttctaggtgagctcctgcctggtcctgcctcctggatggagtctcgctctgtcaccaggctggagtgcagtg

SEQ ID NO: 169154 - DNA, 629 bp, Homo sapiens
  Payload ID: 13297
  Gene Symbol: PAEP
  Gene Name: progestagen-associated endometrial protein
  ENST ID: ENST00000454923
  CDS Start-End: 1-379
ccctctgagggtccacatcacctcactgttgcccacccccgaggacaacctggagatcgttctgcacagatgggagaacaacagctgtgttgagaagaaggtccttggagagaagactgagaatccaaagaagttcaagatcaactatacggtggcgaacgaggccacgctgctcgatactgactacgacaatttcctgtttctctgcctacaggacaccaccacccccatccagagcatgatgtgccagtacctggccagagtcctggtggaggacgatgagatcatgcagggattcatcagggctttcaggcccctgcccaggcacctatggtacttgctggacttgaaacagatggaagagccgtgccgtttctagtgacctgtaaacccaacagctcacctccgcctccaggaagaccagactcccacccttccacacctccagagcagtgggacttcctcctgccctttcaaagaataaccacagctcagaagacgatgacgtggtcatctgtgtcgccatccccttcctgctgcacacctgcaccacggccatggggaggctgctccctgggggcagagtctctggcagaggttattaataaacccttggagcatgtcctgtc

SEQ ID NO: 169155 - DNA, 990 bp, Homo sapiens
  Payload ID: 13297
  Gene Symbol: PAEP
  Gene Name: progestagen-associated endometrial protein
  Uniprot ID: P09466
  ENST ID: ENST00000479141
  CDS Start-End: 45-587
catccctctggctccagagctcagagccacccacagccgcagccatgctgtgcctcctgctcaccctgggcgtggccctggtctgtggtgtcccggccatggacatcccccagaccaagcaggacctggagctcccaaagttggcagggacctggcactccatggccatggcgaccaacaacatctccctcatggcgacactgaaggcccctctgagggtccacatcacctcactgttgcccacccccgaggacaacctggagatcgttctgcacagatgggagaacaacagctgtgttgagaagaaggtccttggagagaagactgagaatccaaagaagttcaagatcaactatacggtggcgaacgaggccacgctgctcgatactgactacgacaatttcctgtttctctgcctacaggacaccaccacccccatccagagcatgatgtgccagtacctggccagagtcctggtggaggacgatgagatcatgcagggattcatcagggctttcaggcccctgcccaggcacctatggtacttgctggacttgaaacagatggaagagccgtgccgtttctagctcacctccgcctccaggaagaccagactcccacccttccacacctccagagcagtgggacttcctcctgccctttcaaagaataaccacagctcagaagacgatgacgtggtcatctgtgtcgccatccccttcctgctgcacacctgcaccacggccatggggaggctgctccctgggggcagagtctctggcagaggttattaataaacccttggagcatgtcctgtctggatgcgcagccactgctgggtgtgggattcagggacgagggcctggggtcggggcaggcccaggccaccgcctggcagaaccggagctcctacagacccatgggcagcttctggtggagaaaatacctcaagtttcttatctacaaaacaaaagggtccactttcacaaa

SEQ ID NO: 169156 - DNA, 838 bp, Homo sapiens
  Payload ID: 13297
  Gene Symbol: PAEP
  Gene Name: progestagen-associated endometrial protein
  ENST ID: ENST00000371768
  CDS Start-End: 47-556
agcatccctctggctccagagctcagagccacccacagccgcagccatgctgtgcctcctgctcaccctgggcgtggccctggtctgtggtgtcccggccatggacatcccccagaccaagcaggacctggagctcccaaagttggcagggacctggcactccatggccatggcgaccaacaacatctccctcatggcgacactgaaggcccctctgagggtccacatcacctcactgttgcccacccccgaggacaacctggagatcgttctgcacagatgggagaacaacagctgtgttgagaagaaggtccttggagagaagactgagaatccaaagaagttcaagatcaactatacggtggcgaacgaggccacgctgctcgatactgactacgacaatttcctgtttctctgcctacaggacaccaccacccccatccagagcatgatgtgccagtacctggagtcctggtggaggacgatgagatcatgcagggattcatcagggctttcaggcccctgcccaggcacctatggtacttgctggacttgaaacagatggaagagccgtgccgtttctaggtgagctcctgcctggtcctgcctcctggctcacctccgcctccaggaagaccagactcccacccttccacacctccagagcagtgggacttcctcctgccctttcaaagaataaccacagctcagaagacgatgacgtggtcatctgtgtcgccatccccttcctgctgcacacctgcaccacggccatggggaggctgctccctgggggcagagtctctggcagaggttattaataaacccttggagcatg

SEQ ID NO: 169157 - DNA, 729 bp, Homo sapiens
  Payload ID: 13297
  Gene Symbol: PAEP
  Gene Name: progestagen-associated endometrial protein
  ENST ID: ENST00000611414
  CDS Start-End: 45-476
catccctctggctccagagctcagagccacccacagccgcagccatgctgtgcctcctgctcaccctgggcgtggccctggtctgtggtgtcccggccatggacatcccccagaccaagcaggacctggagctcccaaagttggcagggacctggcactccatggccatggcgaccaacaacatctccctcatggcgacactgaaggcccctctgagggtccacatcacctcactgttgcccacccccgaggacaacctggagatcgttctgcacagatgggagaacaacagctgtgttgagaagaaggtccttggagagaagactgagaatccaaagaagttcaagatcaactccagagtcctggtggaggacgatgagatcatgcagggattcatcagggctttcaggcccctgcccaggcacctatggtacttgctggacttgaaacagatggaagagccgtgccgtttctaggtgagctcctgcctggtcctgcctcctggctcacctccgcctccaggaagaccagactcccacccttccacacctccagagcagtgggacttcctcctgccctttcaaagaataaccacagctcagaagacgatgacgtggtcatctgtgtcgccatccccttcctgctgcacacctgcaccacggccatggggaggctgctccctgggggcagagtctctggcagaggttattaataaacccttggagcatg

SEQ ID NO: 169158 - DNA, 3154 bp, Homo sapiens
  Payload ID: 13298
  Gene Symbol: PIBF1
  Gene Name: progesterone immunomodulatory binding factor 1
  Uniprot ID: Q8WXW3
  ENST ID: ENST00000326291
  CDS Start-End: 339-2612
gtggcctaggcggggcttccttctggacgccacctcacaacgtgtgttgctttccgctcctcggaacatccgggagagttgacttccggcggcttgtgggagtgctggttctgtcctccttgcgggtgcggagatggttgtcttggttacgggtcctaacggtcccctgccttgaaatcccttgttgagggcctgcaaccttgtgcttccgaccggagacgcctttggtccctcggtgtctgcactggctgctggtcaaggcttcagtgtggagtaattgacactttcgagaatattaaaatcaaattagagaagaaaactgatccataataataaaaatgtctcgaaaaatttcaaaggagtcaaaaaaagtgaacatctctagttctctggaatctgaagatattagtttagaaacaacagttcctacggatgatatttcctcatcagaagagcgagagggcaaagtcagaatcaccaggcagctaattgaacgaaaagaactacttcataatattcagttactaaaaattgagctatcccagaaaactatgatgatcgacaatttgaaagtggattatcttacaaagattgaagaattggaggagaaacttaatgatgcacttcaccagaagcagctactaacattgagattagacaaccaattggcttttcaacagaaagatgccagcaaatatcaagaattaatgaaacaagaaatggaaaccattttgttgagacagaaacaactagaagagacaaatcttcagctaagagaaaaagctggagatgttcgtcgaaacctgcgtgactttgagttgacagaagagcaatatattaaattaaaagcttttcctgaagatcagctttctattcctgaatatgtatctgttcgcttctatgagctagtgaatccattaagaaaggaaatctgtgaactacaagtgaaaaagaatatcctagcagaagaattaagtacaaacaaaaaccaactgaagcagctgacagagacatatgaggaagatcgaaaaaactactctgaagttcaaattagatgtcaacgtttggccttagaattagcagacacaaaacagttaattcagcaaggtgactaccgtcaagagaactatgataaagtcaagagtgaacgtgatgcacttgaacaggaagtaattgagcttaggagaaaacatgaaatacttgaagcctctcacatgattcaaacaaaagaacgaagtgaattatcaaaagaggtagtcaccttagagcaaactgttactttactgcaaaaggataaagaatatcttaatcgccaaaacatggagcttagtgttcgctgtgctcatgaagaggatcgccttgaaagacttcaagctcaactggaagaaagcaaaaaggctagagaagagatgtatgaaaaatatgtagcatccagagaccattataaaacagaatatgaaaataaactacatgatgaactagaacaaatcagattgaaaaccaaccaagaaattgatcaacttcgaaatgcctctagggaaatgtatgaacgagaaaacagaaatctccgagaagcaagggataatgctgtggctgaaaaggaacgagcagtgatggctgaaaaggatgctttagaaaaacacgatcagctcttagacaggtacagagaactacaacttagtacagaaagcaaagtaacagaatttctccatcaaagtaaattaaaatcttttgaaagtgagcgtgttcaacttctgcaagaggaaacagcaagaaatctcacacagtgtcaattggaatgtgaaaaatatcagaaaaaattggaggttttaaccaaagaattttatagtctccaagcctcttctgaaaaacgcattactgaacttcaagcacagaactcagagcatcaagcaaggctagacatttatgagaaactggaaaaagagcttgatgaaataataatgcaaactgcagaaattgaaaatgaagatgaggctgaaagggttcttttttcctacggctatggtgctaatgttcccacaacagccaaaagacgactaaagcaaagtgttcacttggcaagaagagtgcttcaattagaaaaacaaaactcgctgattttaaaagatctggaacatcgaaaggaccaagtaacacagctttcacaagagcttgacagagccaattcgctattaaaccagactcaacagccttacaggtatctcattgaatcagtgcgtcagagagattctaagattgattcactgacggaatctattgcacaacttgagaaagatgtcagcaacttaaataaagaaaagtcagctttactacagacgaagaatcaaatggcattagatttagaacaacttctaaatcatcgtgaggaattggcagcaatgaaacagattctcgttaagatgcatagtaaacattctgagaacagcttacttctcactaaaacagaaccaaaacatgtgacagaaaatcagaaatcaaagactttgaatgtgcctaaagagcatgaagacaatatatttacacctaaaccaacactctttactaaaaaagaagcacctgagtggtctaagaaacaaaagatgaagacctagtgttttggatgggaagcacctgtagaccattatatactcctgaagttctttttctgatggaaaacaaaattcagcttaatcgtgtactcagcattttttaaataacaatgtttatttgaactaatattaaattaacaaattcagtgtaatcaaaatgtgtaaagaacaatcaatatactttatttttttttctattttataaaataaatatatatgctatgctttaaattttggagctttcataaatgttcaatgcattttaagtgtgtggcttataaatattttggtatttttctatactacgtaaattctgagtttaaatgtcatacacaaatactaagacactttgcatttttaaaaattaagaatcatttgtgaagtccactacgaggtacttcaaaagcccagtaatggtggtcagataccatgtagatggatacagattgttgactcttttgaagttgtttttttcttatattttatattaccattaaccaataaaatctggcagaaagtctgctattccattggtaaagtgaaaa

SEQ ID NO: 169159 - DNA, 2882 bp, Homo sapiens
  Payload ID: 13298
  Gene Symbol: PIBF1
  Gene Name: progesterone immunomodulatory binding factor 1
  ENST ID: ENST00000617689
  CDS Start-End: 258-2354
acttccggcggcttgtgggagtgctggttctgtcctccttgcgggtgcggagatggttgtcttggttacgggtcctaacggtcccctgccttgaaatcccttgttgagggcctgcaaccttgtgcttccgaccggagacgcctttggtccctcggtgtctgcactggctgctggtcaaggcttcagtgtggagtaattgacactttcgagaatattaaaatcaaattagagaagaaaactgatccataataataaaaatgtctcgaaaaatttcaaaggagtcaaaaaaagtgaacatctctagttctctggaatctgaagatattagtttagaaacaacagttcctacggatgatatttcctcatcagaagagcgagagggcaaagtcagaatcaccaggcagctaattgaacgaaaagaactacttcataatattcagttactaaaaattgagctatcccagaaaactatgatgatcgacaatttgaaagtggattatcttacaaagattgaagaattggaggagaaacttaatgatgcacttcaccagaagcagctactaacattgagattagacaaccaattggcttttcaacagaaagatgccagcaaatatcaagaattaatgaaacaagaaatggaaaccattttgttgagacagaaacaactagaagagacaaatcttcagctaagagaaaaagctggagatgttcgtcgaaacctgcgtgactttgagttgacagaagagcaatatattaaattaaaagcttttcctgaagatcagctttctattcctgaatatgtatctgttcgcttctatgagctagtgaatccattaagaaaggaaatctgtgaactacaagtgaaaaagaatatcctagcagaagaattaagtacaaacaaaaaccaactgaagcagctgacagagacatatgaggaagatcgaaaaaactactctgaagttcaaattagatgtcaacgtttggccttagaattagcagacacaaaacagttaattcagcaaggtgactaccgtcaagagaactatgataaagtcaagagtgaacgtgatgcacttgaacaggaagtaattgagcttaggagaaaacatgaaatacttgaagcctctcacatgattcaaacaaaagaacgaagtgaattatcaaaagaggtagtcaccttagagcaaactgttactttactgcaaaaggataaagaatatcttaatcgccaaaacatggagcttagtgttcgctgtgctcatgaagaggatcgccttgaaagacttcaagctcaactggaagaaagcaaaaaggctagagaagagatgtatgaaaaatatgtagcatccagagaccattataaaacagaatatgaaaataaactacatgatgaactagaacaaatcagattgaaaaccaaccaagaaattgatcaacttcgaaatgcctctagggaaatgtatgaacgagaaaacagaaatctccgagaagcaagggataatgctgtggctgaaaaggaacgagcagtgatggctgaaaaggatgctttagaaaaacacgatcagctcttagacaggtacagagaactacaacttagtacagaaagcaaagtaacagaatttctccatcaaagtaaattaaaatcttttgaaagtgagcgtgttcaacttctgcaagaggaaacagcaagaaatctcacacagtgtcaattggaatgtgaaaaatatcagaaaaaattggaggttttaaccaaagaattttatagtctccaagcctcttctgaaaaacgcattactgaacttcaagcacagaactcagagcatcaagcaaggctagacatttatgagaaactggaaaaagagcttgatgaaataataatgcaaactgcagaaattgaaaatgaagatgaggctgaaagggttcttttttcctacggctatggtgctaatgttcccacaacagccaaaagacgactaaagcaaagtgttcacttggcaagaagagtgcttcaattagaaaaacaaaactcgctgattttaaaagatctggaacatcgaaaggaccaagtaacacagctttcacaagagcttgacagagccaattcgctattaaaccagactcaacagccttacaggtatctcattgaatcagtgcgtcagagagattctaagattgattcactgacggaatctattgcacaacttgagaaagatgtcagcaacttaaataaagaaaagtcagctttactacagacgaagaatcaaatggcattagatttagaacaacttctaaatcatcgtgaggtatttttcctattttgtcataattgtaatcattttaggcttttttaaaaactgctatcaggttaaaattattggatcccagttgtgcatgttcattaatgacttctcttatttatgtctcactgtaattttgtccttttttattcaacttttgatatacttcttagagttaattcttattcctagaataaccccttcttgttgtgttgatatctgtcactgaatttccccatattatttaataataatctgttttatcttattctgcaactagacagttaatttccttagtgtgcctctcgtcttctttatcaatgtatgcccagtgcctgtagtgtagataatttgtgttgagctttaaagttcataaaattattttcttttcttcatttgttccctaccaaaattcttttagagtaaatataattcctattttatagatggagaaatgagttttaagtggcttgcccatggcagttagtaactaagagataagttctgttttgttttgtttttttcctttaaggtttattgagttataatctacaaagaataaaattaaccttttttagcaga

SEQ ID NO: 169160 - DNA, 1098 bp, Homo sapiens
  Payload ID: 13298
  Gene Symbol: PIBF1
  Gene Name: progesterone immunomodulatory binding factor 1
  Uniprot ID: Q8WXW3
  ENST ID: ENST00000615625
  CDS Start-End: 387-1037
ctgccttgaaatcccttgttgagggcctgcaaccttgtgcttccgaccggagacgcctttggtccctcggtgtctgcactggctgctggtcaaggcttcagtgtggagtaattgacactttcgagagaccattataaaacagaatatgaaaataaactacatgatgaactagaacaaatcagattgaaaaccaaccaagaaattgatcaacttcgaaatgcctctagggaaatgtatgaacgagaaaacaggttttaaccaaagaattttatagtctccaagcctcttctgaaaaacgcattactgaacttcaagcacagaactcagagcatcaagcaaggctagacatttatgagaaactggaaaaagagcttgatgaaataataatgcaaactgcagaaattgaaaatgaagatgaggctgaaagggttcttttttcctacggctatggtgctaatgttcccacaacagccaaaagacgactaaagcaaagtgttcacttggcaagaagagtgcttcaattagaaaaacaaaactcgctgattttaaaagatctggaacatcgaaaggaccaagtaacacagctttcacaagagcttgacagagccaattcgctattaaaccagactcaacagccttacaggtatctcattgaatcagtgcgtcagagagattctaagattgattcactgacggaatctattgcacaacttgagaaagatgtcagcaacttaaataaagaaaagtcagctttactacagacgaagaatcaaatggcattagatttagaacaacttctaaatcatcgtgaggaattggcagcaatgaaacagattctcgttaagatgcatagtaaacattctgagaacagcttacttctcactaaaacagaaccaaaacatgtgacagaaaatcagaaatcaaagactttgaatgtgcctaaagagcatgaagacaatatatttacacctaaaccaacactctttactaaaaaagaagcacctgagtggtctaagaaacaaaagatgaagacctagtgttttggatgggaagcacctgtagaccattatatactcctgaagttctttttctgatgga

SEQ ID NO: 169161 - DNA, 2496 bp, Homo sapiens
  Payload ID: 13299
  Gene Symbol: PGR
  Gene Name: progesterone receptor
  Uniprot ID: P06401
  ENST ID: ENST00000263463
  CDS Start-End: 1-2496
atgactgagctgaaggcaaagggtccccgggctccccacgtggcgggcggcccgccctcccccgaggtcggatccccactgctgtgtcgcccagccgcaggtccgttcccggggagccagacctcggacaccttgcctgaagtttcggccatacctatctccctggacgggctactcttccctcggccctgccagggacaggacccctccgacgaaaagacgcaggaccagcagtcgctgtcggacgtggagggcgcatattccagagctgaagctacaaggggtgctggaggcagcagttctagtcccccagaaaaggacagcggactgctggacagtgtcttggacactctgttggcgccctcaggtcccgggcagagccaacccagccctcccgcctgcgaggtcaccagctcttggtgcctgtttggccccgaacttcccgaagatccaccggctgcccccgccacccagcgggtgttgtccccgctcatgagccggtccgggtgcaaggttggagacagctccgggacggcagctgcccataaagtgctgccccggggcctgtcaccagcccggcagctgctgctcccggcctctgagagccctcactggtccggggccccagtgaagccgtctccgcaggccgctgcggtggaggttgaggaggaggatggctctgagtccgaggagtctgcgggtccgcttctgaagggcaaacctcgggctctgggtggcgcggcggctggaggaggagccgcggctgtcccgccgggggcggcagcaggaggcgtcgccctggtccccaaggaagattcccgcttctcagcgcccagggtcgccctggtggagcaggacgcgccgatggcgcccgggcgctccccgctggccaccacggtgatggatttcatccacgtgcctatcctgcctctcaatcacgccttattggcagcccgcactcggcagctgctggaagacgaaagttacgacggcggggccggggctgccagcgcctttgccccgccgcggagttcaccctgtgcctcgtccaccccggtcgctgtaggcgacttccccgactgcgcgtacccgcccgacgccgagcccaaggacgacgcgtaccctctctatagcgacttccagccgcccgctctaaagataaaggaggaggaggaaggcgcggaggcctccgcgcgctccccgcgttcctaccttgtggccggtgccaaccccgcagccttcccggatttcccgttggggccaccgcccccgctgccgccgcgagcgaccccatccagacccggggaagcggcggtgacggccgcacccgccagtgcctcagtctcgtctgcgtcctcctcggggtcgaccctggagtgcatcctgtacaaagcggagggcgcgccgccccagcagggcccgttcgcgccgccgccctgcaaggcgccgggcgcgagcggctgcctgctcccgcgggacggcctgccctccacctccgcctctgccgccgccgccggggcggcccccgcgctctaccctgcactcggcctcaacgggctcccgcagctcggctaccaggccgccgtgctcaaggagggcctgccgcaggtctacccgccctatctcaactacctgaggccggattcagaagccagccagagcccacaatacagcttcgagtcattacctcagaagatttgtttaatctgtggggatgaagcatcaggctgtcattatggtgtccttacctgtgggagctgtaaggtcttctttaagagggcaatggaagggcagcacaactacttatgtgctggaagaaatgactgcatcgttgataaaatccgcagaaaaaactgcccagcatgtcgccttagaaagtgctgtcaggctggcatggtccttggaggttttcgaaacttacatattgatgaccagataactctcattcagtattcttggatgagcttaatggtgtttggtctaggatggagatcctacaaacacgtcagtgggcagatgctgtattttgcacctgatctaatactaaatgaacagcggatgaaagaatcatcattctattcattatgccttaccatgtggcagatcccacaggagtttgtcaagcttcaagttagccaagaagagttcctctgtatgaaagtattgttacttcttaatacaattcctttggaagggctacgaagtcaaacccagtttgaggagatgaggtcaagctacattagagagctcatcaaggcaattggtttgaggcaaaaaggagttgtgtcgagctcacagcgtttctatcaacttacaaaacttcttgataacttgcatgatcttgtcaaacaacttcatctgtactgcttgaatacatttatccagtcccgggcactgagtgttgaatttccagaaatgatgtctgaagttattgctgcacaattacccaagatattggcagggatggtgaaaccccttctctttcataaaaagtga

SEQ ID NO: 169162 - DNA, 13748 bp, Homo sapiens
  Payload ID: 13299
  Gene Symbol: PGR
  Gene Name: progesterone receptor
  Uniprot ID: P06401
  ENST ID: ENST00000325455
  CDS Start-End: 1455-4256
ggatccattttataagctcaaagataattacttttcagactaagaatatttagggtaaaaagtactgttcaacatctctactgaggatgttatgatgtagcacactgtataagctggagctaaaggaaactttccttaaagtgctatttactaaaaattggaacacattccttaagacaaatcgaagtgtggcacacaacatccaaacttccatcatagatacagaggtgttaccatctcccactcccaaatttctttgtcacgctgaggatactcaagaggagcaggacatgttggtcgcagcaggagaaacttgaaagcattcacttttatggaactcataagggagagaatctcttatttagtatcgtccttgatacatttattattttaaaagataatgtagccaaatgtcttcctctgtgttaaatctttacaaaactgaaatcttaaaatggtgacaaaaattctacttctgatagaatctattcatttttccaattagatagggcataattcttaatttgcaaaacaaaacgtaatatgcttatgaggttccatcccaaagaacctgctattgagagtagcattcagaataacgggtggaaatgccaactccagagtttcagatcctaccggtaattggggtagggaggggctttgggcggggcctccctagaggaggaggcgttgttagaaagctgtctggccagtccacagctgtcactaatcggggtaagccttgttgtatttgtgcgtgtgggtggcattctcaatgagaactagcttcacttgtcatttgagtgaaatctacaacccgaggcggctagtgctcccgcactactgggatctgagatcttcggagatgactgtcgcccgcagtacggagccagcagaagtccgacccttcctgggaatgggctgtaccgagaggtccgactagccccagggttttagtgagggggcagtggaactcagcgagggactgagagcttcacagcatgcacgagtttgatgccagagaaaaagtcgggagataaaggagccgcgtgtcactaaattgccgtcgcagccgcagccactcaagtgccggacttgtgagtactctgcgtctccagtcctcggacagaagttggagaactctcttggagaactccccgagttaggagacgagatctcctaacaattactactttttcttgcgctccccacttgccgctcgctgggacaaacgacagccacagttcccctgacgacaggatggaggccaagggcaggagctgaccagcgccgccctcccccgcccccgacccaggaggtggagatccctccggtccagccacattcaacacccactttctcctccctctgcccctatattcccgaaaccccctcctccttcccttttccctcctcctggagacgggggaggagaaaaggggagtccagtcgtcatgactgagctgaaggcaaagggtccccgggctccccacgtggcgggcggcccgccctcccccgaggtcggatccccactgctgtgtcgcccagccgcaggtccgttcccggggagccagacctcggacaccttgcctgaagtttcggccatacctatctccctggacgggctactcttccctcggccctgccagggacaggacccctccgacgaaaagacgcaggaccagcagtcgctgtcggacgtggagggcgcatattccagagctgaagctacaaggggtgctggaggcagcagttctagtcccccagaaaaggacagcggactgctggacagtgtcttggacactctgttggcgccctcaggtcccgggcagagccaacccagccctcccgcctgcgaggtcaccagctcttggtgcctgtttggccccgaacttcccgaagatccaccggctgcccccgccacccagcgggtgttgtccccgctcatgagccggtccgggtgcaaggttggagacagctccgggacggcagctgcccataaagtgctgccccggggcctgtcaccagcccggcagctgctgctcccggcctctgagagccctcactggtccggggccccagtgaagccgtctccgcaggccgctgcggtggaggttgaggaggaggatggctctgagtccgaggagtctgcgggtccgcttctgaagggcaaacctcgggctctgggtggcgcggcggctggaggaggagccgcggctgtcccgccgggggcggcagcaggaggcgtcgccctggtccccaaggaagattcccgcttctcagcgcccagggtcgccctggtggagcaggacgcgccgatggcgcccgggcgctccccgctggccaccacggtgatggatttcatccacgtgcctatcctgcctctcaatcacgccttattggcagcccgcactcggcagctgctggaagacgaaagttacgacggcggggccggggctgccagcgcctttgccccgccgcggagttcaccctgtgcctcgtccaccccggtcgctgtaggcgacttccccgactgcgcgtacccgcccgacgccgagcccaaggacgacgcgtaccctctctatagcgacttccagccgcccgctctaaagataaaggaggaggaggaaggcgcggaggcctccgcgcgctccccgcgttcctaccttgtggccggtgccaaccccgcagccttcccggatttcccgttggggccaccgcccccgctgccgccgcgagcgaccccatccagacccggggaagcggcggtgacggccgcacccgccagtgcctcagtctcgtctgcgtcctcctcggggtcgaccctggagtgcatcctgtacaaagcggagggcgcgccgccccagcagggcccgttcgcgccgccgccctgcaaggcgccgggcgcgagcggctgcctgctcccgcgggacggcctgccctccacctccgcctctgccgccgccgccggggcggcccccgcgctctaccctgcactcggcctcaacgggctcccgcagctcggctaccaggccgccgtgctcaaggagggcctgccgcaggtctacccgccctatctcaactacctgaggccggattcagaagccagccagagcccacaatacagcttcgagtcattacctcagaagatttgtttaatctgtggggatgaagcatcaggctgtcattatggtgtccttacctgtgggagctgtaaggtcttctttaagagggcaatggaagggcagcacaactacttatgtgctggaagaaatgactgcatcgttgataaaatccgcagaaaaaactgcccagcatgtcgccttagaaagtgctgtcaggctggcatggtccttggaggtcgaaaatttaaaaagttcaataaagtcagagttgtgagagcactggatgctgttgctctcccacagccagtgggcgttccaaatgaaagccaagccctaagccagagattcactttttcaccaggtcaagacatacagttgattccaccactgatcaacctgttaatgagcattgaaccagatgtgatctatgcaggacatgacaacacaaaacctgacacctccagttctttgctgacaagtcttaatcaactaggcgagaggcaacttctttcagtagtcaagtggtctaaatcattgccaggttttcgaaacttacatattgatgaccagataactctcattcagtattcttggatgagcttaatggtgtttggtctaggatggagatcctacaaacacgtcagtgggcagatgctgtattttgcacctgatctaatactaaatgaacagcggatgaaagaatcatcattctattcattatgccttaccatgtggcagatcccacaggagtttgtcaagcttcaagttagccaagaagagttcctctgtatgaaagtattgttacttcttaatacaattcctttggaagggctacgaagtcaaacccagtttgaggagatgaggtcaagctacattagagagctcatcaaggcaattggtttgaggcaaaaaggagttgtgtcgagctcacagcgtttctatcaacttacaaaacttcttgataacttgcatgatcttgtcaaacaacttcatctgtactgcttgaatacatttatccagtcccgggcactgagtgttgaatttccagaaatgatgtctgaagttattgctgcacaattacccaagatattggcagggatggtgaaaccccttctctttcataaaaagtgaatgtcatctttttcttttaaagaattaaattttgtggtatgtctttttgttttggtcaggattatgaggtcttgagtttttataatgttcttctgaaagccttacatttataacatcatagtgtgtaaatttaaaagaaaaattgtgaggttctaattattttcttttataaagtataattagaatgtttaactgttttgtttacccatattttcttgaagaatttacaagattgaaaaagtactaaaattgttaaagtaaactatcttatccatattatttcataccatgtaggtgaggatttttaacttttgcatctaacaaatcatcgacttaagagaaaaaatcttacatgtaataacacaaagctattatatgttatttctaggtaactccctttgtgtcaattatatttccaaaaatgaacctttaaaatggtatgcaaaattttgtctatatatatttgtgtgaggaggaaattcataactttcctcagattttcaaaagtatttttaatgcaaaaaatgtagaaagagtttaaaaccactaaaatagattgatgttcttcaaactaggcaaaacaactcatatgttaagaccattttccagattggaaacacaaatctcttaggaagttaataagtagattcatatcattatgcaaatagtattgtgggttttgtaggtttttaaaataaccttttttggggagagaattgtcctctaatgaggtattgcgagtggacataagaaatcagaagattatggcctaactgtactccttaccaactgtggcatgctgaaagttagtcactcttactgattctcaattctctcacctttgaaagtagtaaaatatctttcctgccaattgctcctttgggtcagagcttattaacatcttttcaaatcaaaggaaagaagaaagggagaggaggaggagggaggtatcaattcacatacctttctcctctttatcctccactatcatgaattcatattatgtttcagccatgcaaatctttttaccatgaaatttcttccagaattttccccctttgacacaaattccatgcatgtttcaaccttcgagactcagccaaatgtcatttctgtaaaatcttccctgagtcttccaagcagtaatttgccttctcctagagtttacctgccattttgtgcacatttgagttacagtagcatgttattttacaattgtgactctcctgggagtctgggagccatataaagtggtcaatagtgtttgctgactgagagttgaatgacattttctctctgtcttggtattactgtagatttcgatcattctttggttacatttctgcatatttctgtacccatgactttatcactttcttctcccatgctttatctccatcaattatcttcattacttttaaattttccacctttgcttcctactttgtgagatctctccctttactgactataacatagaagaatagaagtgtattttatgtgtcttaaggacaatactttagattccttgttctaagtttttaaactgaatgaatggaatattatttctctccctaagcaaaattccacaaaacaattatttcttatgtttatgtagccttaaattgttttgtactgtaaacctcagcataaaaactttcttcatttctaatttcattcaacaaatattgattgaatacctggtattagcacaagaaaaatgtgctaataagccttatgagaatttggagctgaagaaagacatataactcaggaaagttacagtccagtagtaggtataaattacagtgcctgataaataggcattttaatatttgtacactcaacgtatactaggtaggtgcaaaacatttacatataattttactgatacccatgcagcacaaaggtactaactttaaatattaaataacacctttatgtgtcagtaattcatttgcattaaatcttattgaaaaggctttcaatatattttccccacaaatgtcatcccaagaaaaaagtatttttaacatctcccaaatataatagttacaggaaatctacctctgtgagagtgacacctctcagaatgaactgtgtgacacaagaaaatgaatgtaggtctatccaaaaaaaaccccaagaaacaaaaacaatattattagccctttatgcttaagtgatggactcagggaacagttgatgttgtgatcattttattatctgattcttgttactttgaattaaaccaatattttgatgatataaatcatttccaccagcatatatttaatttccataataactttaaaattttctaatttcactcaactatgagggaatagaatgtggtggccacaggtttggcttttgttaaaatgtttgatatcttcgatgttgatctctgtctgcaatgtagatgtctaaacactaggatttaatatttaaggctaagctttaaaaataaagtacctttttaaaaagaatatggcttcaccaaatggaaaatacctaatttctaaatctttttctctacaaagtcctatctactaatgtctccattactatttagtcatcataaccattatcttcattttacatgtcgtgttctttctggtagctctaaaatgacactaaatcataagaagacaggttacatatcaggaaatacttgaaggttactgaaatagattcttgagttaatgaaaatattttctgtaaaaaggtttgaaaagccatttgagtctaaagcattatacctccattatcagtagttatgtgacaattgtgtgtgtgtttaatgtttaaagatgtggcactttttaataaggcaatgctatgctattttttcccatttaacattaagataatttattgctatacagatgatatggaaatatgatgaacaatattttttttgccaaaactatgccttgtaagtagccatggaatgtcaacctgtaacttaaattatccacagatagtcatgtgtttgatgatgggcactgtggagataactgacataggactgtgccccccttctctgccacttactagctggatgagattaagcaagtcatttaactgctctgattaaacctgcctttcccaagtgctttgtaatgaatagaaatggaaaccaaaaaaaacgtatacaggccttcagaaatagtaattgctactattttgttttcattaagccatagttctggctataattttatcaaactcaccagctatattctacagtgaaagcaggattctagaaagtctcactgttttatttatgtcaccatgtgctatgatatatttggttgaattcatttgaaattagggctggaagtattcaagtaatttcttctgctgaaaaaatacagtgttttgagtttagggcctgttttatcaaagttctaaagagcctatcactcttccattgtagacattttaaaataatgacactgattttaacatttttaagtgtctttttagaacagagagcctgactagaacacagcccctccaaaaacccatgctcaaattatttttactatggcagcaattccacaaaagggaacaatgggtttagaaattacaatgaagtcatcaacccaaaaaacatccctatccctaagaaggttatgatataaaatgcccacaagaaatctatgtctgctttaatctgtcttttattgctttggaaggatggctattacatttttagtttttgctgtgaatacctgagcagtttctctcatccatacttatccttcacacatcagaagtcaggatagaatatgaatcattttaaaaacttttacaactccagagccatgtgcataagaagcattcaaaacttgccaaaacatacattttttttcaaatttaaagatactctatttttgtattcaatagctcaacaactgtggtccccactgataaagtgaagtggacaaggagacaagtaatggcataagtttgtttttcccaaagtatgcctgttcaatagccattggatgtgggaaatttctacatctcttaaaattttacagaaaatacatagccagatagtctagcaaaagttcaccaagtcctaaattgcttatccttacttcactaagtcatgaaatcattttaatgaaaagaacatcacctaggttttgtggtttctttttttcttattcatggctgagtgaaaacaacaatctctgtttctccctagcatctgtggactatttaatgtaccattattccacactctatggtccttactaaatacaaaattgaacaaaaagcagtaaaacaactgactcttcacccatattataaaatataatccaagccagattagtcaacatccataagatgaatccaagctgaactgggcctagattattgagttcaggttggatcacatccctatttattaataaacttaggaaagaaggccttacagaccatcagttagctggagctaatagaacctacacttctaaagttcggcctagaatcaatgtggccttaaaagctgaaaagaagcaggaaagaacagttttcttcaataatttgtccaccctgtcactggagaaaatttaagaatttgggggtgttggtagtaagttaaacacagcagctgttcatggcagaaattattcaatacataccttctctgaatatcctataaccaaagcaaagaaaaacaccaaggggtttgttctcctccttggagttgacctcattccaaggcagagctcaggtcacaggcacaggggctgcgcccaagcttgtccgcagccttatgcagctgtggagtctggaagactgttgcaggactgctggcctagtcccagaatgtcagcctcattttcgatttactggctcttgttgctgtatgtcatgctgaccttattgttaaacacaggtttgtttgctttttttccactcatggagacatgggagaggcattatttttaagctggttgaaagctttaaccgataaagcatttttagagaaatgtgaatcaggcagctaagaaagcatactctgtccattacggtaaagaaaatgcacagattattaactctgcagtgtggcattagtgtcctggtcaatattcggatagatatgaataaaatatttaaatggtattgtaaatagttttcaggacatatgctatagcttatttttattatcttttgaaattgctcttaatacatcaaatcctgatgtattcaatttatcagatataaattattctaaatgaagcccagttaaatgtttttgtcttgtcagttatatgttaagtttctgatctctttgtctatgacgtttactaatctgcatttttactgttatgaattattttagacagcagtggtttcaagctttttgccactaaaaataccttttattttctcctcccccagaaaagtctataccttgaagtatctatccaccaaactgtacttctattaagaaatagttattgtgttttcttaatgttttgttattcaaagacatatcaatgaaagctgctgagcagcatgaataacaattatatccacacagatttgatatattttgtgcagccttaacttgatagtataaaatgtcattgctttttaaataatagttagtcaatggacttctatcatagctttcctaaactaggttaagatccagagctttggggtcataatatattacatacaattaagttatctttttctaagggctttaaaattcatgagaataaccaaaaaaggtatgtggagagttaatacaaacataccatattcttgttgaaacagagatgtggctctgcttgttctccataaggtagaaatactttccagaatttgcctaaactagtaagccctgaatttgctatgattagggataggaagagattttcacatggcagactttagaattcttcactttagccagtaaagtatctccttttgatcttagtattctgtgtattttaacttttctgagttgtgcatgtttataagaaaaatcagcacaaagggtttaagttaaagcctttttactgaaatttgaaagaaacagaagaaaatatcaaagttctttgtattttgagaggattaaatatgatttacaaaagttacatggagggctctctaaaacattaaattaattattttttgttgaaaagtcttactttaggcatcattttattcctcagcaactagctgtgaagcctttactgtgctgtatgccagtcactctgctagattgtggagattaccagtgttcccgtcttctccgagcttagagttggatggggaataaagacaggtaaacagatagctacaatattgtactgtgaatgcttatgctggaggaagtacagggaactattggagcacctaagaggagcacctaccttgaatttaggggttagcagaggcatcctgaaaaaagtcaaagctaagccacaatctataagcagtttaggaattagcagaacgtgcgtggtgaggagatgccaaaggcaagaagagaagagtattccaaacaggagggattccaaagagagaagagtatcccaaacaacatttgcacaaacctgatggggagagagaatgtggggtggggatggatgatgagactgaagaagaaagccaggtctagataatcagtggccttgtacaccatgttaaagagtgtagacttgattctgttgtaaacaggaaagcagcacaattcatatgaatattttagaagactcccactggaatatggagaataaagttggagatgactaatcctggaagcagggagaacatttttgaggaagttgcactattttggtgaaaatgatgatcataaacatgaagaattgtaggtgatcatgacctcctctctaattttccagaagggttttggaagatataacataggaacattgacaggactgacgaaaggagatgaaatacaccatataaattgtcaaacacaaggccagatgtctaattattttgcttatgtgttgaaattacaaatttttcatcaggaaaccaaaaactacaaaacttagttttcccaagtcccagaattctatctgtccaaacaatctgtaccactccacctatatccctacctttgcatgtctgtccaacctcaaagtccaggtctatacacacgggtaagactagagcagttcaagtttcagaaaatgagaaagaggaactgagttgtgctgaacccatacaaaataaacacattctttgtatagattcttggaacctcgagaggaattcacctaactcataggtatttgatggtatgaatccatggctgggctcggcttttaaaaagccttatctgggattccttctatggaaccaagttccatcaaagcccatttaaaagcctacattaaaaacaaaattcttgctgcattgtatacaaataatgatgtcatgatcaaataatcagatgccattatcaagtggaattacaaaatggtatacccactccaaaaaaaaaaaaaaagctaaattctcagtagaacattgtgacttcatgagccctccacagccttggagctgaggagggagcactggtgagcagtaggttgaagagaaaacttggcgcttaataatctatccatgttttttcatctaaaagagccttctttttggattaccttattcaatttccatcaaggaaattgttagttccactaaccagacagcagctgggaaggcagaagcttactgtatgtacatggtagctgtgggaaggaggtttctttctccaggtcctcactggccatacaccagtcccttgttagttatgcctggtcatagacccccgttgctatcatctcatatttaagtctttggcttgtgaatttatctattctttcagcttcagcactgcagagtgctgggactttgctaacttccatttcttgctggcttagcacattcctcataggcccagctcttttctcatctggccctgctgtggagtcaccttgccccttcaggagagccatggcttaccactgcctgctaagcctccactcagctgccaccacactaaatccaagcttctctaagatgttgcagactttacaggcaagcataaaaggcttgatcttcctggacttccctttacttgtctgaatctcacctccttcaactttcagtctcagaatgtaggcatttgtcctctttgccctacatcttccttcttctgaatcatgaaagcctctcacttcctcttgctatgtgctggaggcttctgtcaggttttagaatgagttctcatctagtcctagtagcttttgatgcttaagtccaccttttaaggatacctttgagatttagaccatgtttttcgcttgagaaagccctaatctccagacttgcctttctgtggatttcaaagaccaactgaggaagtcaaaagctgaatgttgactttctttgaacatttccgctataacaattccaattctcctcagagcaatatgcctgcctccaactgaccaggagaaaggtccagtgccaaagagaaaaacacaaagattaattatttcagttgagcacatactttcaaagtggtttgggtattcatatgaggttttctgtcaagagggtgagactcttcatctatccatgtgtgcctgacagttctcctggcactggctggtaacagatgcaaaactgtaaaaattaagtgatcatgtattttaacgatatcatcacatacttattttctatgtaatgttttaaatttcccctaacatactttgactgttttgcacatggtagatattcacatttttttgtgttgaagttgatgcaatcttcaaagttatctaccccgttgcttattagtaaaactagtgttaatacttggcaagagatgcagggaatctttctcatgactcacgccctatttagttattaatgctactaccctattttgagtaagtagtaggtccctaagtacattgtccagagttatacttttaaagatatttagccccatatacttcttgaatctaaagtcatacaccttgctcctcatttctgagtgggaaagacatttgagagtatgttgacaattgttctgaaggtttttgccaagaaggtgaaactgtcctttcatctgtgtatgcctggggctgggtccctggcagtgatggggtgacaatgcaaagctgtaaaaactaggtgctagtgggcacctaatatcatcatcatatacttattttcaagctaatatgcaaaatcccatctctgtttttaaactaagtgtagatttcagagaaaatattttgtggttcacataagaaaacagtctactcagcttgacaagtgttttatgttaaattggctggtggtttgaaatgaatcatcttcacataatgttttctttaaaaatattgtgaatttaactctaattcttgttattctgtgtgataataaagaataaactaatttcta

SEQ ID NO: 169163 - DNA, 2750 bp, Homo sapiens
  Payload ID: 13299
  Gene Symbol: PGR
  Gene Name: progesterone receptor
  ENST ID: ENST00000534780
  CDS Start-End: 1-2412
atgactgagctgaaggcaaagggtccccgggctccccacgtggcgggcggcccgccctcccccgaggtcggatccccactgctgtgtcgcccagccgcaggtccgttcccggggagccagacctcggacaccttgcctgaagtttcggccatacctatctccctggacgggctactcttccctcggccctgccagggacaggacccctccgacgaaaagacgcaggaccagcagtcgctgtcggacgtggagggcgcatattccagagctgaagctacaaggggtgctggaggcagcagttctagtcccccagaaaaggacagcggactgctggacagtgtcttggacactctgttggcgccctcaggtcccgggcagagccaacccagccctcccgcctgcgaggtcaccagctcttggtgcctgtttggccccgaacttcccgaagatccaccggctgcccccgccacccagcgggtgttgtccccgctcatgagccggtccgggtgcaaggttggagacagctccgggacggcagctgcccataaagtgctgccccggggcctgtcaccagcccggcagctgctgctcccggcctctgagagccctcactggtccggggccccagtgaagccgtctccgcaggccgctgcggtggaggttgaggaggaggatggctctgagtccgaggagtctgcgggtccgcttctgaagggcaaacctcgggctctgggtggcgcggcggctggaggaggagccgcggctgtcccgccgggggcggcagcaggaggcgtcgccctggtccccaaggaagattcccgcttctcagcgcccagggtcgccctggtggagcaggacgcgccgatggcgcccgggcgctccccgctggccaccacggtgatggatttcatccacgtgcctatcctgcctctcaatcacgccttattggcagcccgcactcggcagctgctggaagacgaaagttacgacggcggggccggggctgccagcgcctttgccccgccgcggagttcaccctgtgcctcgtccaccccggtcgctgtaggcgacttccccgactgcgcgtacccgcccgacgccgagcccaaggacgacgcgtaccctctctatagcgacttccagccgcccgctctaaagataaaggaggaggaggaaggcgcggaggcctccgcgcgctccccgcgttcctaccttgtggccggtgccaaccccgcagccttcccggatttcccgttggggccaccgcccccgctgccgccgcgagcgaccccatccagacccggggaagcggcggtgacggccgcacccgccagtgcctcagtctcgtctgcgtcctcctcggggtcgaccctggagtgcatcctgtacaaagcggagggcgcgccgccccagcagggcccgttcgcgccgccgccctgcaaggcgccgggcgcgagcggctgcctgctcccgcgggacggcctgccctccacctccgcctctgccgccgccgccggggcggcccccgcgctctaccctgcactcggcctcaacgggctcccgcagctcggctaccaggccgccgtgctcaaggagggcctgccgcaggtctacccgccctatctcaactacctgaggccggattcagaagccagccagagcccacaatacagcttcgagtcattacctcagaagatttgtttaatctgtggggatgaagcatcaggctgtcattatggtgtccttacctgtgggagctgtaaggtcttctttaagagggcaatggaagggcagcacaactacttatgtgctggaagaaatgactgcatcgttgataaaatccgcagaaaaaactgcccagcatgtcgccttagaaagtgctgtcaggctggcatggtccttggaggtcgaaaatttaaaaagttcaataaagtcagagttgtgagagcactggatgctgttgctctcccacagccagtgggcgttccaaatgaaagccaagccctaagccagagattcactttttcaccaggtcaagacatacagttgattccaccactgatcaacctgttaatgagcattgaaccagatgtgatctatgcaggacatgacaacacaaaacctgacacctccagttctttgctgacaagtcttaatcaactaggcgagaggcaacttctttcagtagtcaagtggtctaaatcattgccaggttttcgaaacttacatattgatgaccagataactctcattcagtattcttggatgagcttaatggtgtttggtctaggatggagatcctacaaacacgtcagtgggcagatgctgtattttgcacctgatctaatactaaatgaatcccacaggagtttgtcaagcttcaagttagccaagaagagttcctctgtatgaaagtattgttacttcttaatacaattcctttggaagggctacgaagtcaaacccagtttgaggagatgaggtcaagctacattagagagctcatcaaggcaattggtttgaggcaaaaaggagttgtgtcgagctcacagcgtttctatcaacttacaaaacttcttgataacttgcatgatcttgtcaaacaacttcatctgtactgcttgaatacatttatccagtcccgggcactgagtgttgaatttccagaaatgatgtctgaagttattgctgcacaattacccaagatattggcagggatggtgaaaccccttctctttcataaaaagtga

SEQ ID NO: 169164 - DNA, 2633 bp, Homo sapiens
  Payload ID: 13299
  Gene Symbol: PGR
  Gene Name: progesterone receptor
  ENST ID: ENST00000528960
  CDS Start-End: 1-2295
atgactgagctgaaggcaaagggtccccgggctccccacgtggcgggcggcccgccctcccccgaggtcggatccccactgctgtgtcgcccagccgcaggtccgttcccggggagccagacctcggacaccttgcctgaagtttcggccatacctatctccctggacgggctactcttccctcggccctgccagggacaggacccctccgacgaaaagacgcaggaccagcagtcgctgtcggacgtggagggcgcatattccagagctgaagctacaaggggtgctggaggcagcagttctagtcccccagaaaaggacagcggactgctggacagtgtcttggacactctgttggcgccctcaggtcccgggcagagccaacccagccctcccgcctgcgaggtcaccagctcttggtgcctgtttggccccgaacttcccgaagatccaccggctgcccccgccacccagcgggtgttgtccccgctcatgagccggtccgggtgcaaggttggagacagctccgggacggcagctgcccataaagtgctgccccggggcctgtcaccagcccggcagctgctgctcccggcctctgagagccctcactggtccggggccccagtgaagccgtctccgcaggccgctgcggtggaggttgaggaggaggatggctctgagtccgaggagtctgcgggtccgcttctgaagggcaaacctcgggctctgggtggcgcggcggctggaggaggagccgcggctgtcccgccgggggcggcagcaggaggcgtcgccctggtccccaaggaagattcccgcttctcagcgcccagggtcgccctggtggagcaggacgcgccgatggcgcccgggcgctccccgctggccaccacggtgatggatttcatccacgtgcctatcctgcctctcaatcacgccttattggcagcccgcactcggcagctgctggaagacgaaagttacgacggcggggccggggctgccagcgcctttgccccgccgcggagttcaccctgtgcctcgtccaccccggtcgctgtaggcgacttccccgactgcgcgtacccgcccgacgccgagcccaaggacgacgcgtaccctctctatagcgacttccagccgcccgctctaaagataaaggaggaggaggaaggcgcggaggcctccgcgcgctccccgcgttcctaccttgtggccggtgccaaccccgcagccttcccggatttcccgttggggccaccgcccccgctgccgccgcgagcgaccccatccagacccggggaagcggcggtgacggccgcacccgccagtgcctcagtctcgtctgcgtcctcctcggggtcgaccctggagtgcatcctgtacaaagcggagggcgcgccgccccagcagggcccgttcgcgccgccgccctgcaaggcgccgggcgcgagcggctgcctgctcccgcgggacggcctgccctccacctccgcctctgccgccgccgccggggcggcccccgcgctctaccctgcactcggcctcaacgggctcccgcagctcggctaccaggccgccgtgctcaaggagggcctgccgcaggtctacccgccctatctcaactacctgaggccggattcagaagccagccagagcccacaatacagcttcgagtcattacctcagaagatttgtttaatctgtggggatgaagcatcaggctgtcattatggtgtccttacctgtgggagctgtaaggtcttctttaagagggcaatggaaggtcgaaaatttaaaaagttcaataaagtcagagttgtgagagcactggatgctgttgctctcccacagccagtgggcgttccaaatgaaagccaagccctaagccagagattcactttttcaccaggtcaagacatacagttgattccaccactgatcaacctgttaatgagcattgaaccagatgtgatctatgcaggacatgacaacacaaaacctgacacctccagttctttgctgacaagtcttaatcaactaggcgagaggcaacttctttcagtagtcaagtggtctaaatcattgccaggttttcgaaacttacatattgatgaccagataactctcattcagtattcttggatgagcttaatggtgtttggtctaggatggagatcctacaaacacgtcagtgggcagatgctgtattttgcacctgatctaatactaaatgaatcccacaggagtttgtcaagcttcaagttagccaagaagagttcctctgtatgaaagtattgttacttcttaatacaattcctttggaagggctacgaagtcaaacccagtttgaggagatgaggtcaagctacattagagagctcatcaaggcaattggtttgaggcaaaaaggagttgtgtcgagctcacagcgtttctatcaacttacaaaacttcttgataacttgcatgatcttgtcaaacaacttcatctgtactgcttgaatacatttatccagtcccgggcactgagtgttgaatttccagaaatgatgtctgaagttattgctgcacaattacccaagatattggcagggatggtgaaaccccttctctttcataaaaagtga

SEQ ID NO: 169165 - DNA, 1901 bp, Homo sapiens
  Payload ID: 13299
  Gene Symbol: PGR
  Gene Name: progesterone receptor
  Uniprot ID: P06401
  ENST ID: ENST00000534013
  CDS Start-End: 446-1465
atttgagtgaaatctacaacccgaggcggctagtgctcccgcactactgggatctgagatcttcggagatgactgtcgcccgcagtacggagccagcagaagtccgacccttcctgggaatgggctgtaccgagaggtccgactagccccagggttttagtgagggggcagtggaactcagcgagggactgagagcttcacagcatgcacgagtttgatgccagagaaaaagtcgggagataaaggagccgcgtgtcactaaattgccgtcgcagccgcagccactcaagtgccggacttgccggattcagaagccagccagagcccacaatacagcttcgagtcattacctcagaagatttgtttaatctgtggggatgaagcatcaggctgtcattatggtgtccttacctgtgggagctgtaaggtcttctttaagagggcaatggaagggcagcacaactacttatgtgctggaagaaatgactgcatcgttgataaaatccgcagaaaaaactgcccagcatgtcgccttagaaagtgctgtcaggctggcatggtccttggaggtcgaaaatttaaaaagttcaataaagtcagagttgtgagagcactggatgctgttgctctcccacagccagtgggcgttccaaatgaaagccaagccctaagccagagattcactttttcaccaggtcaagacatacagttgattccaccactgatcaacctgttaatgagcattgaaccagatgtgatctatgcaggacatgacaacacaaaacctgacacctccagttctttgctgacaagtcttaatcaactaggcgagaggcaacttctttcagtagtcaagtggtctaaatcattgccaggttttcgaaacttacatattgatgaccagataactctcattcagtattcttggatgagcttaatggtgtttggtctaggatggagatcctacaaacacgtcagtgggcagatgctgtattttgcacctgatctaatactaaatgaacagcggatgaaagaatcatcattctattcattatgccttaccatgtggcagatcccacaggagtttgtcaagcttcaagttagccaagaagagttcctctgtatgaaagtattgttacttcttaatacaattcctttggaagggctacgaagtcaaacccagtttgaggagatgaggtcaagctacattagagagctcatcaaggcaattggtttgaggcaaaaaggagttgtgtcgagctcacagcgtttctatcaacttacaaaacttcttgataacttgcatgatcttgtcaaacaacttcatctgtactgcttgaatacatttatccagtcccgggcactgagtgttgaatttccagaaatgatgtctgaagttattgctgcacaattacccaagatattggcagggatggtgaaaccccttctctttcataaaaagtgaatgtcatctttttcttttaaagaattaaattttgtggtatgtctttttgttttggtcaggattatgaggtcttgagtttttataatgttcttctgaaagccttacatttataacatcatagtgtgtaaatttaaaagaaaaattgtgaggttctaattattttcttttataaagtataattagaatgtttaactgttttgtttacccatattttcttgaagaatttacaagattgaaaaagtactaaaattgttaaagtaaactatcttatccatattatttcataccatgtaggtgaggatttttaacttttgcatctaacaaatcatcgacttaagagaaaaaatcttacatgtaataacacaaagctattatatgttatttctaggtaactccctttgtgtcaattatatttccaaaaatgaacctttaaaat

SEQ ID NO: 169166 - DNA, 2365 bp, Homo sapiens
  Payload ID: 13299
  Gene Symbol: PGR
  Gene Name: progesterone receptor
  ENST ID: ENST00000526300
  CDS Start-End: 1-2088
atgactgagctgaaggcaaagggtccccgggctccccacgtggcgggcggcccgccctcccccgaggtcggatccccactgctgtgtcgcccagccgcaggtccgttcccggggagccagacctcggacaccttgcctgaagtttcggccatacctatctccctggacgggctactcttccctcggccctgccagggacaggacccctccgacgaaaagacgcaggaccagcagtcgctgtcggacgtggagggcgcatattccagagctgaagctacaaggggtgctggaggcagcagttctagtcccccagaaaaggacagcggactgctggacagtgtcttggacactctgttggcgccctcaggtcccgggcagagccaacccagccctcccgcctgcgaggtcaccagctcttggtgcctgtttggccccgaacttcccgaagatccaccggctgcccccgccacccagcgggtgttgtccccgctcatgagccggtccgggtgcaaggttggagacagctccgggacggcagctgcccataaagtgctgccccggggcctgtcaccagcccggcagctgctgctcccggcctctgagagccctcactggtccggggccccagtgaagccgtctccgcaggccgctgcggtggaggttgaggaggaggatggctctgagtccgaggagtctgcgggtccgcttctgaagggcaaacctcgggctctgggtggcgcggcggctggaggaggagccgcggctgtcccgccgggggcggcagcaggaggcgtcgccctggtccccaaggaagattcccgcttctcagcgcccagggtcgccctggtggagcaggacgcgccgatggcgcccgggcgctccccgctggccaccacggtgatggatttcatccacgtgcctatcctgcctctcaatcacgccttattggcagcccgcactcggcagctgctggaagacgaaagttacgacggcggggccggggctgccagcgcctttgccccgccgcggagttcaccctgtgcctcgtccaccccggtcgctgtaggcgacttccccgactgcgcgtacccgcccgacgccgagcccaaggacgacgcgtaccctctctatagcgacttccagccgcccgctctaaagataaaggaggaggaggaaggcgcggaggcctccgcgcgctccccgcgttcctaccttgtggccggtgccaaccccgcagccttcccggatttcccgttggggccaccgcccccgctgccgccgcgagcgaccccatccagacccggggaagcggcggtgacggccgcacccgccagtgcctcagtctcgtctgcgtcctcctcggggtcgaccctggagtgcatcctgtacaaagcggagggcgcgccgccccagcagggcccgttcgcgccgccgccctgcaaggcgccgggcgcgagcggctgcctgctcccgcgggacggcctgccctccacctccgcctctgccgccgccgccggggcggcccccgcgctctaccctgcactcggcctcaacgggctcccgcagctcggctaccaggccgccgtgctcaaggagggcctgccgcaggtctacccgccctatctcaactacctgaggccggattcagaagccagccagagcccacaatacagcttcgagtcattacctcagaagatttgtttaatctgtggggatgaagcatcaggctgtcattatggtgtccttacctgtgggagctgtaaggtcttctttaagagggcaatggaagggcagcacaactacttatgtgctggaagaaatgactgcatcgttgataaaatccgcagaaaaaactgcccagcatgtcgccttagaaagtgctgtcaggctggcatggtccttggaggttttcgaaacttacatattgatgaccagataactctcattcagtattcttggatgagcttaatggtgtttggtctaggatggagatcctacaaacacgtcagtgggcagatgctgtattttgcacctgatctaatactaaatgattcctttggaagggctacgaagtcaaacccagtttgaggagatgaggtcaagctacattagagagctcatcaaggcaattggtttgaggcaaaaaggagttgtgtcgagctcacagcgtttctatcaacttacaaaacttcttgataacttgcatgatcttgtcaaacaacttcatctgtactgcttgaatacatttatccagtcccgggcactgagtgttgaatttccagaaatgatgtctgaagttattgctgcacaattacccaagatattggcagggatggtgaaaccccttctctttcataaaaagtga

SEQ ID NO: 169167 - DNA, 2816 bp, Homo sapiens
  Payload ID: 13299
  Gene Symbol: PGR
  Gene Name: progesterone receptor
  ENST ID: ENST00000617858
  CDS Start-End: 744-2816
agtccacagctgtcactaatcggggtaagccttgttgtatttgtgcgtgtgggtggcattctcaatgagaactagcttcacttgtcatttgagtgaaatctacaacccgaggcggctagtgctcccgcactactgggatctgagatcttcggagatgactgtcgcccgcagtacggagccagcagaagtccgacccttcctgggaatgggctgtaccgagaggtccgactagccccagggttttagtgagggggcagtggaactcagcgagggactgagagcttcacagcatgcacgagtttgatgccagagaaaaagtcgggagataaaggagccgcgtgtcactaaattgccgtcgcagccgcagccactcaagtgccggacttgtgagtactctgcgtctccagtcctcggacagaagttggagaactctcttggagaactccccgagttaggagacgagatctcctaacaattactactttttcttgcgctccccacttgccgctcgctgggacaaacgacagccacagttcccctgacgacaggatggaggccaagggcaggagctgaccagcgccgccctcccccgcccccgacccaggaggtggagatccctccggtccagccacattcaacacccactttctcctccctctgcccctatattcccgaaaccccctcctccttcccttttccctcctcctggagacgggggaggagaaaaggggagtccagtcgtcatgactgagctgaaggcaaagggtccccgggctccccacgtggcgggcggcccgccctcccccgaggtcggatccccactgctgtgtcgcccagccgcaggtccgttcccggggagccagacctcggacaccttgcctgaagtttcggccatacctatctccctggacgggctactcttccctcggccctgccagggacaggacccctccgacgaaaagacgcaggaccagcagtcgctgtcggacgtggagggcgcatattccagagctgaagctacaaggggtgctggaggcagcagttctagtcccccagaaaaggacagcggactgctggacagtgtcttggacactctgttggcgccctcaggtcccgggcagagccaacccagccctcccgcctgcgaggtcaccagctcttggtgcctgtttggccccgaacttcccgaagatccaccggctgcccccgccacccagcgggtgttgtccccgctcatgagccggtccgggtgcaaggttggagacagctccgggacggcagctgcccataaagtgctgccccggggcctgtcaccagcccggcagctgctgctcccggcctctgagagccctcactggtccggggccccagtgaagccgtctccgcaggccgctgcggtggaggttgaggaggaggatggctctgagtccgaggagtctgcgggtccgcttctgaagggcaaacctcgggctctgggtggcgcggcggctggaggaggagccgcggctgtcccgccgggggcggcagcaggaggcgtcgccctggtccccaaggaagattcccgcttctcagcgcccagggtcgccctggtggagcaggacgcgccgatggcgcccgggcgctccccgctggccaccacggtgatggatttcatccacgtgcctatcctgcctctcaatcacgccttattggcagcccgcactcggcagctgctggaagacgaaagttacgacggcggggccggggctgccagcgcctttgccccgccgcggagttcaccctgtgcctcgtccaccccggtcgctgtaggcgacttccccgactgcgcgtacccgcccgacgccgagcccaaggacgacgcgtaccctctctatagcgacttccagccgcccgctctaaagataaaggaggaggaggaaggcgcggaggcctccgcgcgctccccgcgttcctaccttgtggccggtgccaaccccgcagccttcccggatttcccgttggggccaccgcccccgctgccgccgcgagcgaccccatccagacccggggaagcggcggtgacggccgcacccgccagtgcctcagtctcgtctgcgtcctcctcggggtcgaccctggagtgcatcctgtacaaagcggagggcgcgccgccccagcagggcccgttcgcgccgccgccctgcaaggcgccgggcgcgagcggctgcctgctcccgcgggacggcctgccctccacctccgcctctgccgccgccgccggggcggcccccgcgctctaccctgcactcggcctcaacgggctcccgcagctcggctaccaggccgccgtgctcaaggagggcctgccgcaggtctacccgccctatctcaactacctgaggccggattcagaagccagccagagcccacaatacagcttcgagtcattacctcagaagatttgtttaatctgtggggatgaagcatcaggctgtcattatggtgtccttacctgtgggagctgtaaggtcttctttaagagggcaatggaagggcagcacaactacttatgtgctggaagaaatgactgcatcgttgataaaatccgcagaaaaaactgcccagcatgtcgccttagaaagtgctgtcaggctggcatggtccttggaggttttcgaaacttacatattgatgaccagataactctcattcagtattcttggatgagcttaatggtgtttggtctaggatggagatcctacaaacacgtcagtgggcagatgctgtattttgcacctgatctaatactaaatgaggaaagtattgttacttcttaa

SEQ ID NO: 169168 - DNA, 3038 bp, Homo sapiens
  Payload ID: 13299
  Gene Symbol: PGR
  Gene Name: progesterone receptor
  ENST ID: ENST00000619228
  CDS Start-End: 744-3038
agtccacagctgtcactaatcggggtaagccttgttgtatttgtgcgtgtgggtggcattctcaatgagaactagcttcacttgtcatttgagtgaaatctacaacccgaggcggctagtgctcccgcactactgggatctgagatcttcggagatgactgtcgcccgcagtacggagccagcagaagtccgacccttcctgggaatgggctgtaccgagaggtccgactagccccagggttttagtgagggggcagtggaactcagcgagggactgagagcttcacagcatgcacgagtttgatgccagagaaaaagtcgggagataaaggagccgcgtgtcactaaattgccgtcgcagccgcagccactcaagtgccggacttgtgagtactctgcgtctccagtcctcggacagaagttggagaactctcttggagaactccccgagttaggagacgagatctcctaacaattactactttttcttgcgctccccacttgccgctcgctgggacaaacgacagccacagttcccctgacgacaggatggaggccaagggcaggagctgaccagcgccgccctcccccgcccccgacccaggaggtggagatccctccggtccagccacattcaacacccactttctcctccctctgcccctatattcccgaaaccccctcctccttcccttttccctcctcctggagacgggggaggagaaaaggggagtccagtcgtcatgactgagctgaaggcaaagggtccccgggctccccacgtggcgggcggcccgccctcccccgaggtcggatccccactgctgtgtcgcccagccgcaggtccgttcccggggagccagacctcggacaccttgcctgaagtttcggccatacctatctccctggacgggctactcttccctcggccctgccagggacaggacccctccgacgaaaagacgcaggaccagcagtcgctgtcggacgtggagggcgcatattccagagctgaagctacaaggggtgctggaggcagcagttctagtcccccagaaaaggacagcggactgctggacagtgtcttggacactctgttggcgccctcaggtcccgggcagagccaacccagccctcccgcctgcgaggtcaccagctcttggtgcctgtttggccccgaacttcccgaagatccaccggctgcccccgccacccagcgggtgttgtccccgctcatgagccggtccgggtgcaaggttggagacagctccgggacggcagctgcccataaagtgctgccccggggcctgtcaccagcccggcagctgctgctcccggcctctgagagccctcactggtccggggccccagtgaagccgtctccgcaggccgctgcggtggaggttgaggaggaggatggctctgagtccgaggagtctgcgggtccgcttctgaagggcaaacctcgggctctgggtggcgcggcggctggaggaggagccgcggctgtcccgccgggggcggcagcaggaggcgtcgccctggtccccaaggaagattcccgcttctcagcgcccagggtcgccctggtggagcaggacgcgccgatggcgcccgggcgctccccgctggccaccacggtgatggatttcatccacgtgcctatcctgcctctcaatcacgccttattggcagcccgcactcggcagctgctggaagacgaaagttacgacggcggggccggggctgccagcgcctttgccccgccgcggagttcaccctgtgcctcgtccaccccggtcgctgtaggcgacttccccgactgcgcgtacccgcccgacgccgagcccaaggacgacgcgtaccctctctatagcgacttccagccgcccgctctaaagataaaggaggaggaggaaggcgcggaggcctccgcgcgctccccgcgttcctaccttgtggccggtgccaaccccgcagccttcccggatttcccgttggggccaccgcccccgctgccgccgcgagcgaccccatccagacccggggaagcggcggtgacggccgcacccgccagtgcctcagtctcgtctgcgtcctcctcggggtcgaccctggagtgcatcctgtacaaagcggagggcgcgccgccccagcagggcccgttcgcgccgccgccctgcaaggcgccgggcgcgagcggctgcctgctcccgcgggacggcctgccctccacctccgcctctgccgccgccgccggggcggcccccgcgctctaccctgcactcggcctcaacgggctcccgcagctcggctaccaggccgccgtgctcaaggagggcctgccgcaggtctacccgccctatctcaactacctgaggccggattcagaagccagccagagcccacaatacagcttcgagtcattacctcagaagatttgtttaatctgtggggatgaagcatcaggctgtcattatggtgtccttacctgtgggagctgtaaggtcttctttaagagggcaatggaaggtcgaaaatttaaaaagttcaataaagtcagagttgtgagagcactggatgctgttgctctcccacagccagtgggcgttccaaatgaaagccaagccctaagccagagattcactttttcaccaggtcaagacatacagttgattccaccactgatcaacctgttaatgagcattgaaccagatgtgatctatgcaggacatgacaacacaaaacctgacacctccagttctttgctgacaagtcttaatcaactaggcgagaggcaacttctttcagtagtcaagtggtctaaatcattgccaggttttcgaaacttacatattgatgaccagataactctcattcagtattcttggatgagcttaatggtgtttggtctaggatggagatcctacaaacacgtcagtgggcagatgctgtattttgcacctgatctaatactaaatgaatcccacaggagtttgtcaagcttcaagttagccaagaagagttcctctgtatga

SEQ ID NO: 169169 - DNA, 551 bp, Homo sapiens
  Payload ID: 13299
  Gene Symbol: PGR
  Gene Name: progesterone receptor
  ENST ID: ENST00000632634
  CDS Start-End: 40-551
cccagtggggcagaaagtgcgcggcgagttgggggctttatgaaatgcttctttcttagaagaaggacgtttaccaggagtgcttgtcttggagaggagccggattcagaagccagccagagcccacaatacagcttcgagtcattacctcagaagatttgtttaatctgtggggatgaagcatcaggctgtcattatggtgtccttacctgtgggagctgtaaggtcttctttaagagggcaatggaagggcagcacaactacttatgtgctggaagaaatgactgcatcgttgataaaatccgcagaaaaaactgcccagcatgtcgccttagaaagtgctgtcaggctggcatggtccttggaggtcgaaaatttaaaaagttcaataaagtcagagttgtgagagcactggatgctgttgctctcccacagccagtgggcgttccaaatgaaagccaagccctaagccagagattcactttttcaccaggtcaagacatacagttgattccaccactgatcaacctgttaatgagcattgaaccaga

SEQ ID NO: 169170 - DNA, 1911 bp, Homo sapiens
  Payload ID: 13300
  Gene Symbol: PGRMC1
  Gene Name: progesterone receptor membrane component 1
  Uniprot ID: O00264
  ENST ID: ENST00000217971
  CDS Start-End: 112-699
tagtctttggccgccgccgaaccccgcgcgccactcgctcgctcagagggaggagaaagtggcgagttccggatccctgcctagcgcggcccaacctttactccagagatcatggctgccgaggatgtggtggcgactggcgccgacccaagcgatctggagagcggcgggctgctgcatgagattttcacgtcgccgctcaacctgctgctgcttggcctctgcatcttcctgctctacaagatcgtgcgcggggaccagccggcggccagcggcgacagcgacgacgacgagccgccccctctgccccgcctcaagcggcgcgacttcacccccgccgagctgcggcgcttcgacggcgtccaggacccgcgcatactcatggccatcaacggcaaggtgttcgatgtgaccaaaggccgcaaattctacgggcccgaggggccgtatggggtctttgctggaagagatgcatccaggggccttgccacattttgcctggataaggaagcactgaaggatgagtacgatgacctttctgacctcactgctgcccagcaggagactctgagtgactgggagtctcagttcactttcaagtatcatcacgtgggcaaactgctgaaggagggggaggagcccactgtgtactcagatgaggaagaaccaaaagatgagagtgcccggaaaaatgattaaagcattcagtggaagtatatctatttttgtattttgcaaaatcatttgtaacagtccactctgtctttaaaacatagtgattacaatatttagaaagttttgagcacttgctataagttttttaattaacatcactagtgacactaataaaattaacttcttagaatgcatgatgtgtttgtgtgtcacaaatccagaaagtgaactgcagtgctgtaatacacatgttaatactgtttttcttctatctgtagttagtacaggatgaatttaaatgtgtttttcctgagagacaaggaagacttgggtatttcccaaaacaggtaaaaatcttaaatgtgcaccaagagcaaaggatcaacttttagtcatgatgttctgtaaagacaacaaatccctttttttttctcaattgacttaactgcatgatttctgttttatctacctctaaagcaaatctgcagtgttccaaagactttggtatggattaagcgctgtccagtaacaaaatgaaatctcaaaacagagctcagctgcaaaaaagcatattttctgtgtttctggactgcactgttgtccttgccctcacatagacactcagacaccctcacaaacacagtagtctatagttaggattaaaataggatctgaacattcaaaagaaagctttggaaaaaaagagctggctggcctaaaaacctaaatatatgatgaagattgtaggactgtcttcccaagccccatgttcatggtggggcaatggttatttggttattttactcaattggttactctcatttgaaatgagggagggacatacagaataggaacaggtgtttgctctcctaagagccttcatgcacacccctgaaccacgaggaaacagtacagtcgctagtcaagtggtttttaaagtaaagtatattcataaggtaacagttattctgttgttataaaactatacccactgcaaaagtagtagtcaagtgtctaggtctttgatattgctcttttggttaacactaagcttaagtagactatacagttgtatgaatttgtaaaagtatatgaacacctagtgagatttcaaacttgtaattgtggttaaatagtcattgtattttcttgtgaactgtgttttatgattttacctcaaatcagaaaacaaaatgatgtgctttggtcagttaataaaaatggttttacccacta

SEQ ID NO: 169171 - DNA, 1762 bp, Homo sapiens
  Payload ID: 13300
  Gene Symbol: PGRMC1
  Gene Name: progesterone receptor membrane component 1
  Uniprot ID: O00264
  ENST ID: ENST00000535419
  CDS Start-End: 120-551
tccccggctagtctttggccgccgccgaaccccgcgcgccactcgctcgctcagagggaggagaaagtggcgagttccggatccctgcctagcgcggcccaacctttactccagagatcatggctgccgaggatgtggtggcgactggcgccgacccaagcgatctggagagcggcgggctgctgcatgagattttcacgtcgccgctcaacctgctgctgcttggcctctgcatcttcctgctctacaagatcgtgcgcggggaccagccggcggccagcggcgacagcgacgacgacgagccgccccctctgccccgcctcaagcggcgcgacttcacccccgccgagctgcggcgcttcgacggcgtccaggacccgcgcatactcatggccatcaacggcaaggtgttcgatgtgaccaaaggccgcaaattctacgggcccgtcaagtatcatcacgtgggcaaactgctgaaggagggggaggagcccactgtgtactcagatgaggaagaaccaaaagatgagagtgcccggaaaaatgattaaagcattcagtggaagtatatctatttttgtattttgcaaaatcatttgtaacagtccactctgtctttaaaacatagtgattacaatatttagaaagttttgagcacttgctataagttttttaattaacatcactagtgacactaataaaattaacttcttagaatgcatgatgtgtttgtgtgtcacaaatccagaaagtgaactgcagtgctgtaatacacatgttaatactgtttttcttctatctgtagttagtacaggatgaatttaaatgtgtttttcctgagagacaaggaagacttgggtatttcccaaaacaggtaaaaatcttaaatgtgcaccaagagcaaaggatcaacttttagtcatgatgttctgtaaagacaacaaatccctttttttttctcaattgacttaactgcatgatttctgttttatctacctctaaagcaaatctgcagtgttccaaagactttggtatggattaagcgctgtccagtaacaaaatgaaatctcaaaacagagctcagctgcaaaaaagcatattttctgtgtttctggactgcactgttgtccttgccctcacatagacactcagacaccctcacaaacacagtagtctatagttaggattaaaataggatctgaacattcaaaagaaagctttggaaaaaaagagctggctggcctaaaaacctaaatatatgatgaagattgtaggactgtcttcccaagccccatgttcatggtggggcaatggttatttggttattttactcaattggttactctcatttgaaatgagggagggacatacagaataggaacaggtgtttgctctcctaagagccttcatgcacacccctgaaccacgaggaaacagtacagtcgctagtcaagtggtttttaaagtaaagtatattcataaggtaacagttattctgttgttataaaactatacccactgcaaaagtagtagtcaagtgtctaggtctttgatattgctcttttggttaacactaagcttaagtagactatacagttgtatgaatttgtaaaagtatatgaacacctagtgagatttcaaacttgtaattgtggttaaatagtcattgtattttcttgtgaactgtgttttatgattttacctcaaatcagaaaacaaaatgatgtgctttggtcagttaataaaaatggttttacccact

SEQ ID NO: 169172 - DNA, 2767 bp, Homo sapiens
  Payload ID: 13301
  Gene Symbol: PGRMC2
  Gene Name: progesterone receptor membrane component 2
  Uniprot ID: O15173
  ENST ID: ENST00000296425
  CDS Start-End: 22-693
ggaaggcgctggcgggcagtgatggcggctggtgatggggacgtgaagctaggcaccctggggagtggcagcgagagcagcaacgacggcggcagcgagagtccaggcgacgcgggagcggcagcggaagggggaggctgggcggcggcggcgttggcgcttctgacggggggcggggaaatgctgctgaacgtggcgctggtggctctggtgctgctgggggcctaccggctgtgggtgcgctgggggcggcggggtctgggggccggggccggggcgggcgaggagagccccgccacctctctgcctcgcatgaagaagcgggacttcagcttggagcagctgcgccagtacgacggctcccgcaacccgcgcatcctgctcgcggtcaatgggaaagtcttcgacgtgaccaaaggcagcaagttctacggcccggcgggtccatatggaatatttgctggtagggatgcctccagaggactggccacattttgcctagataaagatgcacttagagatgaatatgatgatctctcagatttgaatgcagtacaaatggagagtgttcgagaatgggaaatgcagtttaaagaaaaatatgattatgtaggcagactcctaaaaccaggagaagaaccatcagaatatacagatgaagaagataccaaggatcacaataaacaggattgaactttgtaaacaaccaaagtcaggggccttcagaactgcaattcttactccctttcacagactgtccggagtctttgggtttgattcacctgctgcgaaaaacattcaacaaattgtgtacaagataaattaatctcactatgaagatttgaataactagacattatttatgctgccaaactcatttgttgcagttgtttgtaatgtctagtggggcttcatcatcctgaaaagaaggagacagggatttttttaaagagcaagaaagtcacaatattacttctttccttccttttttccttctttcctttcttctttctctttctttctttttaaaatatattgaagacaaccagatatgtatttgctactcaagtgtacagatctcctcaagaaacatcaagggactcctgtgtcacatactgtgtttttattttaacatgggtgagggaggcgacctgatcaggggaggtgggggtacacatcaatttgagttgttcaggctactgaaacattaaaatgtgaattcccaaacttttctttttggctttgtcagggaaaagaaaaatatctttataaagaaatctttggaaattaggagaaggaatttcaggtgggtttaagtcagagctagttccccaacagaaagatcatttgaaaccagtttttatcccttctctttccttccctttccctaaatcaaatcaatattaattgtgccttatttcacttaacatagacttgaattatttttagggaaagcccctataatgaattcagaaatcactacaagcagcattaagactgaagttggaatattctgttgaccataaaaccttgatatcattctgtgtatatagaatgtaaaaggaatattacagtgttaactgccatatatgtaatatacacaaactcaattagcattgtaatggccaaatgcattcccccatgcttttctgttttcaaaaaaattgaaaaacaaatcaactcttatccccaacagctgcctaattttaggagtctgaccctccacatctcactggtgtgggtgcatggggctgtggagtgggtgtcagtatggatgtgtctgaatgtgtgaggccttggaagggactctttctgcagatactgtaaatacaagtaccattttaataaagcatgtacaataaaccaaaataagcttgagttggactttatatacagaactgtaagccagtgcattatgatacagttgtaagattgtgcatttgattcaagataaggaaaaatcttggaaatgaaaagcaggcactggttaaccaagttgtacacattgtaccacattcagcataactttaggaagaaattccactttgtggaacattctccagaaatccaagattattcaggtaagaattggtatattaaatgtacatctttttactttctattttgatgccaactgattatactagacaattagcactccaggtggttattgaacacaaaacagtaaaagaatattgcactgatagatactaaattattattttattaggttgaaaaagcccttactaaaagcccctcatatatcaattactttatttcattatgactacttaggttccgggctggggacaagttcacttaaaaaggcaatgttatttaacaggtcaccagttaagacttctgctttgtagatacatgcagaagccatcaaacaagggggagcttttaactgcaacaataagctaaagtatgtaaaatactacattctattcagtcttggagtgttttgtagaaagttatcttcagccaaatctttgctgaagactggttgtggagtgttggtaaatgctttgtgtttttatgtaaaatattttctaaacaaaaaatgttaaaagtacatgtcctctgtagtaaactgatatctatatatatgaatcattcaagcctaaagtctagtaataaactgtacttgtgaatagagaaaccctaaatattcatgcagaaaaaattatgcggtctgttaagaaaaatgagtaatttgtgttttggacttgaaataaacagtgttctgtagataattcctcaa

SEQ ID NO: 169173 - DNA, 3785 bp, Homo sapiens
  Payload ID: 13301
  Gene Symbol: PGRMC2
  Gene Name: progesterone receptor membrane component 2
  Uniprot ID: O15173
  ENST ID: ENST00000520121
  CDS Start-End: 968-1711
actttttcacactagaatttcaaggtgtgagaggctaaaagacgtccaagtacatgaaacagaacctgcaaataagagtgaatgacgaatagaaagaccacctcaacctgtccacttccctacggccgcagaagttatgattcaaggaataatgagactctaaatcctttaaaattctacaagagcagcctttgccaaacccagcggggagtggctgctcggtgccagcgcgaggagcacgtagactgccgatgccagagaagcccggtgcgggttccgtgctttctctccgttccaggaagaccccagctcgtggccaaatcttcttgccgcttcccggtctgcgcgcctacgctgccggtttcccgacaaaagcgacggcgccctggtgaaaagcagacgcccctcatcggtttgcgccttgcagctcaactatgccccagcctcccacaagccacctgcccgcgtcctccgccaggcgtccagcccggacctgcccccgcggccgccaaggcgcacgtgaagctcccgggcggggggagcgcaaggaggcgggagtttgcggacgcgaacgcaggcctaggaagggaagcgattccagggcgcacgcgcagagcctggagactgggcggggcgtgcctcccgcaggggttacgaacgaaaggcgagcgcgtggcgctcaggagcccgcgcacgcgctgtggtctcgccccgcccatgagcgtccgcgcggccgtcgtagcatcttttcttcagacccgcccggctcgtctacttaacctagcggaggcttggagtgagagcagggaagtgtggggcgaggtgggcggggcgttgcacgcgtgcgcggccagcgaaagaagggagggggcgggagatccgagacaacgttaccccgtcaacacccaatcaggagccggcctgaccccgccccctcttctcacgttattggctgagaggcccccagatgggcggggccggccgtggggttggggagggcagggggcggggaggaggaggaaggcgctggcgggcagtgatggcggctggtgatggggacgtgaagctaggcaccctggggagtggcagcgagagcagcaacgacggcggcagcgagagtccaggcgacgcgggagcggcagcggaagggggaggctgggcggcggcggcgttggcgcttctgacggggggcggggaaatgctgctgaacgtggcgctggtggctctggtgctgctgggggcctaccggctgtgggtgcgctgggggcggcggggtctgggggccggggccggggcgggcgaggagagccccgccacctctctgcctcgcatgaagaagcgggacttcagcttggagcagctgcgccagtacgacggctcccgcaacccgcgcatcctgctcgcggtcaatgggaaagtcttcgacgtgaccaaaggcagcaagttctacggcccggcgggtccatatggaatatttgctggtagggatgcctccagaggactggccacattttgcctagataaagatgcacttagagatgaatatgatgatctctcagatttgaatgcagtacaaatggagagtgttcgagaatgggaaatgcagtttaaagaaaaatatgattatgtaggcagactcctaaaaccaggagaagaaccatcagaatatacagatgaagaagataccaaggatcacaataaacaggattgaactttgtaaacaaccaaagtcaggggccttcagaactgcaattcttactccctttcacagactgtccggagtctttgggtttgattcacctgctgcgaaaaacattcaacaaattgtgtacaagataaattaatctcactatgaagatttgaataactagacattatttatgctgccaaactcatttgttgcagttgtttgtaatgtctagtggggcttcatcatcctgaaaagaaggagacagggatttttttaaagagcaagaaagtcacaatattacttctttccttccttttttccttctttcctttcttctttctctttctttctttttaaaatatattgaagacaaccagatatgtatttgctactcaagtgtacagatctcctcaagaaacatcaagggactcctgtgtcacatactgtgtttttattttaacatgggtgagggaggcgacctgatcaggggaggtgggggtacacatcaatttgagttgttcaggctactgaaacattaaaatgtgaattcccaaacttttctttttggctttgtcagggaaaagaaaaatatctttataaagaaatctttggaaattaggagaaggaatttcaggtgggtttaagtcagagctagttccccaacagaaagatcatttgaaaccagtttttatcccttctctttccttccctttccctaaatcaaatcaatattaattgtgccttatttcacttaacatagacttgaattatttttagggaaagcccctataatgaattcagaaatcactacaagcagcattaagactgaagttggaatattctgttgaccataaaaccttgatatcattctgtgtatatagaatgtaaaaggaatattacagtgttaactgccatatatgtaatatacacaaactcaattagcattgtaatggccaaatgcattcccccatgcttttctgttttcaaaaaaattgaaaaacaaatcaactcttatccccaacagctgcctaattttaggagtctgaccctccacatctcactggtgtgggtgcatggggctgtggagtgggtgtcagtatggatgtgtctgaatgtgtgaggccttggaagggactctttctgcagatactgtaaatacaagtaccattttaataaagcatgtacaataaaccaaaataagcttgagttggactttatatacagaactgtaagccagtgcattatgatacagttgtaagattgtgcatttgattcaagataaggaaaaatcttggaaatgaaaagcaggcactggttaaccaagttgtacacattgtaccacattcagcataactttaggaagaaattccactttgtggaacattctccagaaatccaagattattcaggtaagaattggtatattaaatgtacatctttttactttctattttgatgccaactgattatactagacaattagcactccaggtggttattgaacacaaaacagtaaaagaatattgcactgatagatactaaattattattttattaggttgaaaaagcccttactaaaagcccctcatatatcaattactttatttcattatgactacttaggttccgggctggggacaagttcacttaaaaaggcaatgttatttaacaggtcaccagttaagacttctgctttgtagatacatgcagaagccatcaaacaagggggagcttttaactgcaacaataagctaaagtatgtaaaatactacattctattcagtcttggagtgttttgtagaaagttatcttcagccaaatctttgctgaagactggttgtggagtgttggtaaatgctttgtgtttttatgtaaaatattttctaaacaaaaaatgttaaaagtacatgtcctctgtagtaaactgatatctatatatatgaatcattcaagcctaaagtctagtaataaactgtacttgtgaatagagaaaccctaaatattcatgcagaaaaaattatgcggtctgttaagaaaaatgagtaatttgtgttttggacttgaaataaacagtgttctgtagataattcctcaa

SEQ ID NO: 169174 - DNA, 2858 bp, Homo sapiens
  Payload ID: 13301
  Gene Symbol: PGRMC2
  Gene Name: progesterone receptor membrane component 2
  ENST ID: ENST00000394276
  CDS Start-End: 664-798
ctgaactagtcactgggaccacaaagatgatacagtctcttttctcatagaattacaaccttcataaggatagcagaaagaaaaatgttacagattcaagttcagctgagtctttacataatacatgatgttctgttgattatttttatttttttgatgccactattaacagcaaccagtaaacattatttcccctcaagcagactggcttctaaacctaaccacttaagtttcttcttctccctcattacctcacagtcttcattttgaatattaagtttggggatatctgaagtaattgaaattgagggttttaagatctaagtgaaaagctttacttgggtcaaaaggcagatttccaacaaatttcttttcttattccatctagtatctgtacatgttttgaaattaagggtatatacaaatgtgaattatgaggggtttttttctttgttgtgtttttttttttttttttttactttttcctttgagacattctaaaatattgttaggtgatctaaataatttattttcttttttccagcgggtccatatggaatatttgctggtagggatgcctccagaggactggccacattttgcctagataaagatgcacttagagatgaatatgatgatctctcagatttgaatgcagtacaaatggagagtgttcgagaatgggaaatgcagtttaaagaaaaatatgattatgtaggcagactcctaaaaccaggagaagaaccatcagaatatacagatgaagaagataccaaggatcacaataaacaggattgaactttgtaaacaaccaaagtcaggggccttcagaactgcaattcttactccctttcacagactgtccggagtctttgggtttgattcacctgctgcgaaaaacattcaacaaattgtgtacaagataaattaatctcactatgaagatttgaataactagacattatttatgctgccaaactcatttgttgcagttgtttgtaatgtctagtggggcttcatcatcctgaaaagaaggagacagggatttttttaaagagcaagaaagtcacaatattacttctttccttccttttttccttctttcctttcttctttctctttctttctttttaaaatatattgaagacaaccagatatgtatttgctactcaagtgtacagatctcctcaagaaacatcaagggactcctgtgtcacatactgtgtttttattttaacatgggtgagggaggcgacctgatcaggggaggtgggggtacacatcaatttgagttgttcaggctactgaaacattaaaatgtgaattcccaaacttttctttttggctttgtcagggaaaagaaaaatatctttataaagaaatctttggaaattaggagaaggaatttcaggtgggtttaagtcagagctagttccccaacagaaagatcatttgaaaccagtttttatcccttctctttccttccctttccctaaatcaaatcaatattaattgtgccttatttcacttaacatagacttgaattatttttagggaaagcccctataatgaattcagaaatcactacaagcagcattaagactgaagttggaatattctgttgaccataaaaccttgatatcattctgtgtatatagaatgtaaaaggaatattacagtgttaactgccatatatgtaatatacacaaactcaattagcattgtaatggccaaatgcattcccccatgcttttctgttttcaaaaaaattgaaaaacaaatcaactcttatccccaacagctgcctaattttaggagtctgaccctccacatctcactggtgtgggtgcatggggctgtggagtgggtgtcagtatggatgtgtctgaatgtgtgaggccttggaagggactctttctgcagatactgtaaatacaagtaccattttaataaagcatgtacaataaaccaaaataagcttgagttggactttatatacagaactgtaagccagtgcattatgatacagttgtaagattgtgcatttgattcaagataaggaaaaatcttggaaatgaaaagcaggcactggttaaccaagttgtacacattgtaccacattcagcataactttaggaagaaattccactttgtggaacattctccagaaatccaagattattcaggtaagaattggtatattaaatgtacatctttttactttctattttgatgccaactgattatactagacaattagcactccaggtggttattgaacacaaaacagtaaaagaatattgcactgatagatactaaattattattttattaggttgaaaaagcccttactaaaagcccctcatatatcaattactttatttcattatgactacttaggttccgggctggggacaagttcacttaaaaaggcaatgttatttaacaggtcaccagttaagacttctgctttgtagatacatgcagaagccatcaaacaagggggagcttttaactgcaacaataagctaaagtatgtaaaatactacattctattcagtcttggagtgttttgtagaaagttatcttcagccaaatctttgctgaagactggttgtggagtgttggtaaatgctttgtgtttttatgtaaaatattttctaaacaaaaaatgttaaaagtacatgtcctctgtagtaaactgatatctatatatatgaatcattcaagcctaaagtctagtaataaactgtacttgtgaatagagaaaccctaaatattcatgcagaaaaaattatgcggtctgttaagaaaaatgagtaatttgtgttttggacttgaaataaacagtgttctgt

SEQ ID NO: 169175 - DNA, 1028 bp, Homo sapiens
  Payload ID: 13301
  Gene Symbol: PGRMC2
  Gene Name: progesterone receptor membrane component 2
  ENST ID: ENST00000503872
  CDS Start-End: 283-417
gccactgatctccttttttccctcgctgtattactccgtaaggccacgtttaggggcatgtaaagtcccaaccctccagtctctgaagtccagacgtataagcaacacctcggactctctttaaaccagttttagttcggagttgctttccatgattaacaagcgggtccatatggaatatttgctggtagggatgcctccagaggactggccacattttgcctagataaagatgcacttagagatgaatatgatgatctctcagatttgaatgcagtacaaatggagagtgttcgagaatgggaaatgcagtttaaagaaaaatatgattatgtaggcagactcctaaaaccaggagaagaaccatcagaatatacagatgaagaagataccaaggatcacaataaacaggattgaactttgtaaacaaccaaagtcaggggccttcagaactgcaattcttactccctttcacagactgtccggagtctttgggtttgattcacctgctgcgaaaaacattcaacaaattgtgtacaagataaattaatctcactatgaagatttgaataactagacattatttatgctgccaaactcatttgttgcagttgtttgtaatgtctagtggggcttcatcatcctgaaaagaaggagacagggatttttttaaagagcaagaaagtcacaatattacttctttccttccttttttccttctttcctttcttctttctctttctttctttttaaaatatattgaagacaaccagatatgtatttgctactcaagtgtacagatctcctcaagaaacatcaagggactcctgtgtcacatactgtgtttttattttaacatgggtgagggaggcgacctgatcaggggaggtgggggtacacatcaatttgagttgttcaggctactgaaacattaaaatgtgaattcccaaacttttctttttggctttgtcagggaaaagaaaaatatctttataaagaaatctttggaaattaggagaaggaatttc

SEQ ID NO: 169176 - DNA, 1144 bp, Homo sapiens
  Payload ID: 13301
  Gene Symbol: PGRMC2
  Gene Name: progesterone receptor membrane component 2
  ENST ID: ENST00000512483
  CDS Start-End: 306-440
gggcggggcgtgcctcccgcaggggttacgaacgaaaggcgagcgcgtggcgctcaggagcccgcgcacgcgctgtggtctcgccccgcccatgagcgtccgcgcggccgtcgtagcatcttttcttcagacccgcccggctcgtctacttaacctagcggaggcttggagtgagagcagggaagtcgggtccatatggaatatttgctggtagggatgcctccagaggactggccacattttgcctagataaagatgcacttagagatgaatatgatgatctctcagatttgaatgcagtacaaatggagagtgttcgagaatgggaaatgcagtttaaagaaaaatatgattatgtaggcagactcctaaaaccaggagaagaaccatcagaatatacagatgaagaagataccaaggatcacaataaacaggattgaactttgtaaacaaccaaagtcaggggccttcagaactgcaattcttactccctttcacagactgtccggagtctttgggtttgattcacctgctgcgaaaaacattcaacaaattgtgtacaagataaattaatctcactatgaagatttgaataactagacattatttatgctgccaaactcatttgttgcagttgtttgtaatgtctagtggggcttcatcatcctgaaaagaaggagacagggatttttttaaagagcaagaaagtcacaatattacttctttccttccttttttccttctttcctttcttctttctctttctttctttttaaaatatattgaagacaaccagatatgtatttgctactcaagtgtacagatctcctcaagaaacatcaagggactcctgtgtcacatactgtgtttttattttaacatgggtgagggaggcgacctgatcaggggaggtgggggtacacatcaatttgagttgttcaggctactgaaacattaaaatgtgaattcccaaacttttctttttggctttgtcagggaaaagaaaaatatctttataaagaaatctttggaaattaggagaaggaatttcaggtgggtttaagtcagagctagttccccaacagaaagatcatttgaaaccagtttttatcccttctctttccttccctttccctaaatcaaa

SEQ ID NO: 169177 - DNA, 430 bp, Homo sapiens
  Payload ID: 13301
  Gene Symbol: PGRMC2
  Gene Name: progesterone receptor membrane component 2
  ENST ID: ENST00000509070
  CDS Start-End: 1-180
aagttctacggcccgggtgaggagttggaaggggaggggaaggaccccctgcagctgaagcacaacccccttcggacagggaggcctctgggcaccgggccacgtttaggggcatgtaaagtcccaaccctccagtctctgaagtccagacgtataagcaacacctcggactctctttaaaccagttttagttcggagttgctttccatgattaacaagcgggtccatatggaatatttgctggtagggatgcctccagaggactggccacattttgcctagataaagatgcacttagagatgaatatgatgatctctcagatttgaatgcagtacaaatggagagtgttcgagaatgggaaatgcagtttaaagaaaaatatgattatgtaggcagactcctaaaaccaggagaagaaccatcagaata

SEQ ID NO: 169178 - DNA, 818 bp, Homo sapiens
  Payload ID: 13301
  Gene Symbol: PGRMC2
  Gene Name: progesterone receptor membrane component 2
  ENST ID: ENST00000503588
  CDS Start-End: 98-373
agacgtataagcaacacctcggactctctttaaaccagttttagttcggagttgctttccatgattaacaaggtatgtgggatgagaacagaccagaatgcagagcttattaaagactgcgggtccatatggaatatttgctggtagggatgcctccagaggactggccacattttgcctagataaagatgcacttagagatgaatatgatgatctctcagatttgaatgcagtacaaatggagagtgttcgagaatgggaaatgcagtttaaagaaaaatatgattatgtaggcagactcctaaaaccaggagaagaaccatcagaatatacagatgaagaagataccaaggatcacaataaacaggattgaactttgtaaacaaccaaagtcaggggccttcagaactgcaattcttactccctttcacagactgtccggagtctttgggtttgattcacctgctgcgaaaaacattcaacaaattgtgtacaagataaattaatctcactatgaagatttgaataactagacattatttatgctgccaaactcatttgttgcagttgtttgtaatgtctagtggggcttcatcatcctgaaaagaaggagacagggatttttttaaagagcaagaaagtcacaatattacttctttccttccttttttccttctttcctttcttctttctctttctttctttttaaaatatattgaagacaaccagatatgtatttgctactcaagtgtacagatctcctcaagaaacatcaagggactcctgtgtcacatactgtgtttttattttaacatggg

SEQ ID NO: 169179 - DNA, 3783 bp, Homo sapiens
  Payload ID: 13301
  Gene Symbol: PGRMC2
  Gene Name: progesterone receptor membrane component 2
  Uniprot ID: O15173
  ENST ID: ENST00000613358
  CDS Start-End: 961-1704
cacactagaatttcaaggtgtgagaggctaaaagacgtccaagtacatgaaacagaacctgcaaataagagtgaatgacgaatagaaagaccacctcaacctgtccacttccctacggccgcagaagttatgattcaaggaataatgagactctaaatcctttaaaattctacaagagcagcctttgccaaacccagcggggagtggctgctcggtgccagcgcgaggagcacgtagactgccgatgccagagaagcccggtgcgggttccgtgctttctctccgttccaggaagaccccagctcgtggccaaatcttcttgccgcttcccggtctgcgcgcctacgctgccggtttcccgacaaaagcgacggcgccctggtgaaaagcagacgcccctcatcggtttgcgccttgcagctcaactatgccccagcctcccacaagccacctgcccgcgtcctccgccaggcgtccagcccggacctgcccccgcggccgccaaggcgcacgtgaagctcccgggcggggggagcgcaaggaggcgggagtttgcggacgcgaacgcaggcctaggaagggaagcgattccagggcgcacgcgcagagcctggagactgggcggggcgtgcctcccgcaggggttacgaacgaaaggcgagcgcgtggcgctcaggagcccgcgcacgcgctgtggtctcgccccgcccatgagcgtccgcgcggccgtcgtagcatcttttcttcagacccgcccggctcgtctacttaacctagcggaggcttggagtgagagcagggaagtgtggggcgaggtgggcggggcgttgcacgcgtgcgcggccagcgaaagaagggagggggcgggagatccgagacaacgttaccccgtcaacacccaatcaggagccggcctgaccccgccccctcttctcacgttattggctgagaggcccccagatgggcggggccggccgtggggttggggagggcagggggcggggaggaggaggaaggcgctggcgggcagtgatggcggctggtgatggggacgtgaagctaggcaccctggggagtggcagcgagagcagcaacgacggcggcagcgagagtccaggcgacgcgggagcggcagcggaagggggaggctgggcggcggcggcgttggcgcttctgacggggggcggggaaatgctgctgaacgtggcgctggtggctctggtgctgctgggggcctaccggctgtgggtgcgctgggggcggcggggtctgggggccggggccggggcgggcgaggagagccccgccacctctctgcctcgcatgaagaagcgggacttcagcttggagcagctgcgccagtacgacggctcccgcaacccgcgcatcctgctcgcggtcaatgggaaagtcttcgacgtgaccaaaggcagcaagttctacggcccggcgggtccatatggaatatttgctggtagggatgcctccagaggactggccacattttgcctagataaagatgcacttagagatgaatatgatgatctctcagatttgaatgcagtacaaatggagagtgttcgagaatgggaaatgcagtttaaagaaaaatatgattatgtaggcagactcctaaaaccaggagaagaaccatcagaatatacagatgaagaagataccaaggatcacaataaacaggattgaactttgtaaacaaccaaagtcaggggccttcagaactgcaattcttactccctttcacagactgtccggagtctttgggtttgattcacctgctgcgaaaaacattcaacaaattgtgtacaagataaattaatctcactatgaagatttgaataactagacattatttatgctgccaaactcatttgttgcagttgtttgtaatgtctagtggggcttcatcatcctgaaaagaaggagacagggatttttttaaagagcaagaaagtcacaatattacttctttccttccttttttccttctttcctttcttctttctctttctttctttttaaaatatattgaagacaaccagatatgtatttgctactcaagtgtacagatctcctcaagaaacatcaagggactcctgtgtcacatactgtgtttttattttaacatgggtgagggaggcgacctgatcaggggaggtgggggtacacatcaatttgagttgttcaggctactgaaacattaaaatgtgaattcccaaacttttctttttggctttgtcagggaaaagaaaaatatctttataaagaaatctttggaaattaggagaaggaatttcaggtgggtttaagtcagagctagttccccaacagaaagatcatttgaaaccagtttttatcccttctctttccttccctttccctaaatcaaatcaatattaattgtgccttatttcacttaacatagacttgaattatttttagggaaagcccctataatgaattcagaaatcactacaagcagcattaagactgaagttggaatattctgttgaccataaaaccttgatatcattctgtgtatatagaatgtaaaaggaatattacagtgttaactgccatatatgtaatatacacaaactcaattagcattgtaatggccaaatgcattcccccatgcttttctgttttcaaaaaaattgaaaaacaaatcaactcttatccccaacagctgcctaattttaggagtctgaccctccacatctcactggtgtgggtgcatggggctgtggagtgggtgtcagtatggatgtgtctgaatgtgtgaggccttggaagggactctttctgcagatactgtaaatacaagtaccattttaataaagcatgtacaataaaccaaaataagcttgagttggactttatatacagaactgtaagccagtgcattatgatacagttgtaagattgtgcatttgattcaagataaggaaaaatcttggaaatgaaaagcaggcactggttaaccaagttgtacacattgtaccacattcagcataactttaggaagaaattccactttgtggaacattctccagaaatccaagattattcaggtaagaattggtatattaaatgtacatctttttactttctattttgatgccaactgattatactagacaattagcactccaggtggttattgaacacaaaacagtaaaagaatattgcactgatagatactaaattattattttattaggttgaaaaagcccttactaaaagcccctcatatatcaattactttatttcattatgactacttaggttccgggctggggacaagttcacttaaaaaggcaatgttatttaacaggtcaccagttaagacttctgctttgtagatacatgcagaagccatcaaacaagggggagcttttaactgcaacaataagctaaagtatgtaaaatactacattctattcagtcttggagtgttttgtagaaagttatcttcagccaaatctttgctgaagactggttgtggagtgttggtaaatgctttgtgtttttatgtaaaatattttctaaacaaaaaatgttaaaagtacatgtcctctgtagtaaactgatatctatatatatgaatcattcaagcctaaagtctagtaataaactgtacttgtgaatagagaaaccctaaatattcatgcagaaaaaattatgcggtctgttaagaaaaatgagtaatttgtgttttggacttgaaataaacagtgttctgtagataattcctcaacttca

SEQ ID NO: 169180 - DNA, 2153 bp, Homo sapiens
  Payload ID: 13302
  Gene Symbol: PAQR3
  Gene Name: progestin and adipoQ receptor family member III
  ENST ID: ENST00000342820
  CDS Start-End: 171-1046
agtggccggtgtgagcgcagagccgggccctgggcagcagcggcagcgcggtaggacctcgcgcagcgtccgcgggctccggggcgggggcgccagcggcgaagccccctccccggggaggcgggacctgggggagctcccgagccggggagcggcggcggccgggaacgatgcatcagaagctgctgaagagcgcgcattacatcgagctgggcagctaccagtactggccggtcctggtgccccgtggcatccgcctgtacacctacgagcagatccccgggtccctcaaggacaacccgtacatcaccgacggctaccgggcctacctgccgtccaggctgtgtatcaaaagtttgtttattttatctaatgagacagtaaacatctggagtcatttgctgggtttctttctcttcttcaccctgggaatatatgacatgacatctgtgttaccttcagcaagtgcgtccagagaagattttgtaatttgttctatttgtcttttctgcttccaggtctgtatgctttgctctgtgggctatcatcttttttcctgccatcggtcagaaaaaacatgtcgaagatggatggcattagattatgcaggaatttctattggaatactgggctgctatgtctcaggagtattttacgcattttattgtaataactactggcgtcaggtgtacttgatcacagtgcttgctatgatcctggcagtgttctttgcgcagattcatcccaattacctcacgcagcaatggcaaaggctccgttctatcatcttttgttctgtttcgggatatggagtgattcctactcttcactgggtttggctcaatggaggaattggtgctcctattgtacaggactttgcaccccgtgtaattgtgatgtatatgattgctcttcttgctttcctattctacatttccaaagtcccagagcggtactttccagaaaatattttcagatggaaaataactaagaggacactgggtggagtgaacaacagtctccaaaacctgtatttgcttgtttgagaactttagctctggagtcagactgcttgggttcaagacccacatcaaccactttctagttacgtgggctaaaatcacttccacggtgaatcagagaagggattgtaccactcgtcacgtgtgttgggaaagaagaaagggtgagaaaccctggcctaaacaatccatcccacagatcctcaggcattcctttgtgtacttggtttttcaccactgagctttaaataagaatggaaatacaagggaaaacctgcgttgtaaacatgaggatttgggaacagatctaggacatgccactgaattgaagaccacccatcttccaggcagggccagaattacagaaaacaattctggacaactaaactacctcggatcaagccaccaaatatggcatatccttgcagtagtgatgttatattggtggcatcagtcaacagtgtatgtcatgcagtacagacatagcaagccttgtcctgactatgtttcacatttgtgaattagaatcaggaacgaagattcagggaatgtctgtcacatcttatggcatcccacctggacagaatatccgatttgaagattgtgattgacttccgtaaaactgtacaactctccatttggcagtgcttacgtgaagtaccaaaacctaaaataaaccaagcagagtagctgacttgtaagaaaactgctctgcctggtgaacttcagcatagaagagtgggctccaccttagattttccaccagcaagaggacaacagtctatcactcttaaacaataaacaggtacctcctgctgaggaaaagttaggttccaggctgcaagttaccacaatccaagataaccaaacaagtctgaatgttgaaaagctgttcaatgtactcagcagaaatcctaaacactcaattcttcttttggctttacattttgatgatgttacatgtgtaacttgcctgaatgagaaatgaaaggaacagaaccaaaaggatcttctggaggatggttatgtggagcagaaagtgagtctacattcttatctgaggatgctctctcctcgagcctatctgcaaaaataagatgaaacgaaataaaaaatgaaatgaaataaaaa

SEQ ID NO: 169181 - DNA, 3995 bp, Homo sapiens
  Payload ID: 13302
  Gene Symbol: PAQR3
  Gene Name: progestin and adipoQ receptor family member III
  Uniprot ID: Q6TCH7
  ENST ID: ENST00000395594
  CDS Start-End: 180-989
gctggcggcagtggccggtgtgagcgcagagccgggccctgggcagcagcggcagcgcggtaggacctcgcgcagcgtccgcgggctccggggcgggggcgccagcggcgaagccccctccccggggaggcgggacctgggggagctcccgagccggggagcggcggcggccgggaacgatgcatcagaagctgctgaagagcgcgcattacatcgagctgggcagctaccagtactggccggtcctggtgccccgtggcatccgcctgtacacctacgagcagatccccgggtccctcaaggacaacccgtacatcaccgacggctaccgggcctacctgccgtccaggctgtgtatcaaaagtttgtttattttatctaatgagacagtaaacatctggagtcatttgctgggtttctttctcttcttcaccctgggaatatatgacatgacatctgtgttaccttcagcaagtgcgtccagagaagattttgtaatttgttctatttgtcttttctgcttccaggtctgtatgctttgctctgtgggctatcatcttttttcctgccatcggtcagaaaaaacatgtcgaagatggatggcattagattatgcaggaatttctattggaatactgggctgctatgtctcaggagtattttacgcattttattgtaataactactggcgtcaggtgtacttgatcacagtgcttgctatgatcctggcagtgttctttgcgcagattcatcccaattacctcacgcagcaatggcaaaggctccgttctatcatcttttgttctgtttcgggatatggagtgattcctactcttcactgggtttggctcaatggaggaattggtgctcctattgtacaggactttgcaccccgtgtaattgtgatgtatatgattgctcttcttgctttcctattctacatttccaaagtcccagagcggtactttccagaatcacttccacggtgaatcagagaagggattgtaccactcgtcacgtgtgttgggaaagaagaaagggtgagaaaccctggcctaaacaatccatcccacagatcctcaggcattcctttgtgtacttggtttttcaccactgagctttaaataagaatggaaatacaagggaaaacctgcgttgtaaacatgaggatttgggaacagatctaggacatgccactgaattgaagaccacccatcttccaggcagggccagaattacagaaaacaattctggacaactaaactacctcggatcaagccaccaaatatggcatatccttgcagtagtgatgttatattggtggcatcagtcaacagtgtatgtcatgcagtacagacatagcaagccttgtcctgactatgtttcacatttgtgaattaggtatggccacctggtgaattcagttgttaagcaatatataatggggaattgtataccccactatttctaagattcccattagttttccctttttcctttttaatatgagtaatgctttataaaaatgggaaaaaaagtatacttaaggatctgtagtaataactgctttacaaaatccttaaaactactaatttgctgcttgtacagaaagtgaaaattagttggcaatcataagaaacatctgaataacaacgatgaatgggaaactagtgttgaaataggattcattttacttagcaccagcttaatttccttaggaagggctcatgtccattagaaaatggagtcatcttatgtgcttaattattttcagttaattgtcaagtttaagtgcctaatcaaggcaagtgttgtttcagcctatgcttaatgcaagctaggatagtgattttaaataatcactaaaatcactagatttaaataatcactaaaatgatttgtgagaaactggcacttcagatattatatcctttagctataggttcttctctccctaagaacattagatattttagttttccagaacaaaagctttaaacttctgcagtaagttgagagaagggttgagaagaggaaaagaacttctcattttctatcagataagaatcacattagaaactaagtacaagattagacaacaaattatgtggtcaaataatatagtcattagccacctaaacattttaattccagatattatttaattccatataataactgaattcttgtgagtggattacaggtttttgatcccaaaattccagagctttcaactctctgaatttgtagtcctgaatatcccagtggtgggggttcccagcattgtgggtgctacttgcaaggccatagaatctagatggccctgtcttgaccctgaaatgaaccttaagccttagaacaaagtcatgcagatgccccatttgataataatcttattcacctgtgctctggtcctcggtttctgcatgtgttagcattgcattgataactcagaatcttgataaacacttaatatttgggcctgaagcattaaactttctttttattgtatatacttaaaaaatagaactcactgccctatcatacattgtagccctcttattctttggtctttcatatgcattagttaaatcccttaaagtagacattcataaaaacttacattgtttattggagtataaaatattacccaagtttcttcatgagttgacatgagctgttttaaatactggtgtattttcagaacagtaaaattactgaatatcagaaaaaatgttaattgatgatgaagcttattcccaaaatgccttttgtgcatatgatacttggaaagtcactaatgtgcctcagttaatacatcagtaaaatgttgtgtttcttttccagtgtagtgtttttggaatataaattccccatgctagtatagtatctcagcaaagagaatttccccccaggaggctcagtaaaggaataccgtgtcttacccatcgttatgatggaaggctgctttgaaaatggctgttttaccttataaggttaaaattttgatccatatgttaagtgatagaagattttggtgcaacagtagtaggatatatttctcctagaacatcccttattggcttacatgattttattgccttttaatagatattttgtcattttggccaaacaaaagacactgagtagttacacttaagttaaaaatgaggggaaaatcattattttaggtgtggagccatttttattataaaactttctcaaaataaaaaaacattgaatcatttcaatttttgcagtccctgtattagtatatgaatacatacttgccatttgaattaataacatgaaaagagtatactgtgtttttaaatccgtgtttctttgaatttaaagggtgtacaggtctttctgtagggaaaattattccatgtaaacatttcaactctgtatgaaaatgttaaatattgtaagaaagttatcctctcattttttcactgctatgatatatttattataaaatagggaatgaatgaatgaatatggattgctgttaactagaaacacttctgtatgtcagtcagcatttaatgaccacctactgtgtgcacagcactactggtaaaattttgaagacattgttaacattaaaaaatattttaaagttgtctacaaatctgagccttgtaatgatgtatatttaagttatttttgtttttatagattaaagtaagattaaaatatactatccagttttattactaaaaaagactggttttaattttaccaatgtgtgaactataaaagctttttgcctacagattttacattttaaaattatctatggctgttttaaattgtctagcaatttatatggttgtggttaactcatttaagaaacaattatctttctatattaagccattttcaaatagcaagacagtgcttgtctttttttgttattacactaactgcaattcagtaagctgcatgacaaaatatgtattatgtaaataaactgggtttactaaata

SEQ ID NO: 169182 - DNA, 549 bp, Homo sapiens
  Payload ID: 13302
  Gene Symbol: PAQR3
  Gene Name: progestin and adipoQ receptor family member III
  ENST ID: ENST00000508599
  CDS Start-End: 8-214
gggaacgatgcatcagaagctgctgaagagcgcgcattacatcgagctgggcagctaccagtactggccggtcctggtgccccgtggcatccgcctgtacacctacgagcagatccccgggtccctcaaggacaacccgtacatcaccgacggctaccgggcctacctgccgtccaggctgtgtatcaaaagacactatacaaggcatcggtaaaacagtgctgaacagaaccaacctggtataaaggtcaagccactcgtaggtgtgcagaagagacagtgaggcagggcatttaagcaggaaaaaagaagcaagacacactttcttagcactttctggacttgcaggtctgtatgctttgctctgtgggctatcatcttttttcctgccatcggtcagaaaaaacatgtcgaagatggatggcattagattatgcaggaatttctattggaatactgggctgctatgtctcaggagtattttacgcattttattgtaataactactggcgtcaggtgtacttgatcacagtgcttgctatgatcctg

SEQ ID NO: 169183 - DNA, 9811 bp, Homo sapiens
  Payload ID: 13302
  Gene Symbol: PAQR3
  Gene Name: progestin and adipoQ receptor family member III
  Uniprot ID: Q6TCH7
  ENST ID: ENST00000512733
  CDS Start-End: 215-1150
agaggaggctgcgacgctgccgggtccgccgcggcgctggcggcagtggccggtgtgagcgcagagccgggccctgggcagcagcggcagcgcggtaggacctcgcgcagcgtccgcgggctccggggcgggggcgccagcggcgaagccccctccccggggaggcgggacctgggggagctcccgagccggggagcggcggcggccgggaacgatgcatcagaagctgctgaagagcgcgcattacatcgagctgggcagctaccagtactggccggtcctggtgccccgtggcatccgcctgtacacctacgagcagatccccgggtccctcaaggacaacccgtacatcaccgacggctaccgggcctacctgccgtccaggctgtgtatcaaaagtttgtttattttatctaatgagacagtaaacatctggagtcatttgctgggtttctttctcttcttcaccctgggaatatatgacatgacatctgtgttaccttcagcaagtgcgtccagagaagattttgtaatttgttctatttgtcttttctgcttccaggtctgtatgctttgctctgtgggctatcatcttttttcctgccatcggtcagaaaaaacatgtcgaagatggatggcattagattatgcaggaatttctattggaatactgggctgctatgtctcaggagtattttacgcattttattgtaataactactggcgtcaggtgtacttgatcacagtgcttgctatgatcctggcagtgttctttgcgcagattcatcccaattacctcacgcagcaatggcaaaggctccgttctatcatcttttgttctgtttcgggatatggagtgattcctactcttcactgggtttggctcaatggaggaattggtgctcctattgtacaggactttgcaccccgtgtaattgtgatgtatatgattgctcttcttgctttcctattctacatttccaaagtcccagagcggtactttccaggacaactaaactacctcggatcaagccaccaaatatggcatatccttgcagtagtgatgttatattggtggcatcagtcaacagtgtatgtcatgcagtacagacatagcaagccttgtcctgactatgtttcacatttgtgaattaggtatggccacctggtgaattcagttgttaagcaatatataatggggaattgtataccccactatttctaagattcccattagttttccctttttcctttttaatatgagtaatgctttataaaaatgggaaaaaaagtatacttaaggatctgtagtaataactgctttacaaaatccttaaaactactaatttgctgcttgtacagaaagtgaaaattagttggcaatcataagaaacatctgaataacaacgatgaatgggaaactagtgttgaaataggattcattttacttagcaccagcttaatttccttaggaagggctcatgtccattagaaaatggagtcatcttatgtgcttaattattttcagttaattgtcaagtttaagtgcctaatcaaggcaagtgttgtttcagcctatgcttaatgcaagctaggatagtgattttaaataatcactaaaatcactagatttaaataatcactaaaatgatttgtgagaaactggcacttcagatattatatcctttagctataggttcttctctccctaagaacattagatattttagttttccagaacaaaagctttaaacttctgcagtaagttgagagaagggttgagaagaggaaaagaacttctcattttctatcagataagaatcacattagaaactaagtacaagattagacaacaaattatgtggtcaaataatatagtcattagccacctaaacattttaattccagatattatttaattccatataataactgaattcttgtgagtggattacaggtttttgatcccaaaattccagagctttcaactctctgaatttgtagtcctgaatatcccagtggtgggggttcccagcattgtgggtgctacttgcaaggccatagaatctagatggccctgtcttgaccctgaaatgaaccttaagccttagaacaaagtcatgcagatgccccatttgataataatcttattcacctgtgctctggtcctcggtttctgcatgtgttagcattgcattgataactcagaatcttgataaacacttaatatttgggcctgaagcattaaactttctttttattgtatatacttaaaaaatagaactcactgccctatcatacattgtagccctcttattctttggtctttcatatgcattagttaaatcccttaaagtagacattcataaaaacttacattgtttattggagtataaaatattacccaagtttcttcatgagttgacatgagctgttttaaatactggtgtattttcagaacagtaaaattactgaatatcagaaaaaatgttaattgatgatgaagcttattcccaaaatgccttttgtgcatatgatacttggaaagtcactaatgtgcctcagttaatacatcagtaaaatgttgtgtttcttttccagtgtagtgtttttggaatataaattccccatgctagtatagtatctcagcaaagagaatttccccccaggaggctcagtaaaggaataccgtgtcttacccatcgttatgatggaaggctgctttgaaaatggctgttttaccttataaggttaaaattttgatccatatgttaagtgatagaagattttggtgcaacagtagtaggatatatttctcctagaacatcccttattggcttacatgattttattgccttttaatagatattttgtcattttggccaaacaaaagacactgagtagttacacttaagttaaaaatgaggggaaaatcattattttaggtgtggagccatttttattataaaactttctcaaaataaaaaaacattgaatcatttcaatttttgcagtccctgtattagtatatgaatacatacttgccatttgaattaataacatgaaaagagtatactgtgtttttaaatccgtgtttctttgaatttaaagggtgtacaggtctttctgtagggaaaattattccatgtaaacatttcaactctgtatgaaaatgttaaatattgtaagaaagttatcctctcattttttcactgctatgatatatttattataaaatagggaatgaatgaatgaatatggattgctgttaactagaaacacttctgtatgtcagtcagcatttaatgaccacctactgtgtgcacagcactactggtaaaattttgaagacattgttaacattaaaaaatattttaaagttgtctacaaatctgagccttgtaatgatgtatatttaagttatttttgtttttatagattaaagtaagattaaaatatactatccagttttattactaaaaaagactggttttaattttaccaatgtgtgaactataaaagctttttgcctacagattttacattttaaaattatctatggctgttttaaattgtctagcaatttatatggttgtggttaactcatttaagaaacaattatctttctatattaagccattttcaaatagcaagacagtgcttgtctttttttgttattacactaactgcaattcagtaagctgcatgacaaaatatgtattatgtaaataaactgggtttactaaatatttttaactgctgcttgtcattctttgtaatacataacagctttaaaatcatattttagaatcaggaacgaagattcagggaatgtctgtcacatcttatggcatcccacctggacagaatatccgatttgaagattgtgattgacttccgtaaaactgtacaactctccatttggcaggtacctactagataatactttgccctgtattaaatgtcaaggggcaaagcctattcctgtgaattcctgctggttgctttgctgcattaggtccctgtccactgtaaatcatcattcctgggaattctacttctgcccaagtgtgtaaagaatcagctcacctattagagaaggggtagaaataccttctgtgtgcattatcacaataactgtgtttacactaaagaggtgtaaatacagtcctctgaaattttgtaccagaattcccaagtagtgtaatgagataatgatccagaactgaaactacccttaagaaaacatttttggaagggagaggtaaatagcagtagggggtttcttgtgaaaaattaacctccatccttaagagggctgaaatgaacagccaccaaggttctagtcctgctctataaaatctgagatcaaaatactacctaacctgcacataatctcaattgtgacaaccatctgaactatctcatttaatatgtaacaacaaatacaagctcaagctttcaatatgagaatattaactacatgttacatatgatgcttgacctgggcttccttaaaaaggtattcgttatccaaaataaatagctcaaattgcagcatatattcatctcaagtaactataactgaatttgaacagtaatacactgcaaactattctttgttaatagaacttttctaatcatttgtgttattttgctttgtaccattcattttcattaaaaagatacaaagcccctttttttcacataactttagataaatgttacaacttcagaaaaagttaattcataaaaataggatgaacctttccacaggctaccaaagactccagtttttggaataatacatattataaccttgatgccaagcttagtccatcaatccaataaataggttttctctttaatgtgtcatagcctcttttctgatataattgaggattacaatgttatttaagcaaataaccagtattaattcagccaaagatgttatcagttttaaagatttttaaaaatttataatgtggaagctgtaaaataagttattcagaaggcactacacaatattgtttttgccttactgtcatcactcgagtatcagtaattatgactcactgaaaaagtcgtgctattaagtgttcttgtggcaaaaactcttaagtcaaatgggttttcttacctaaattgtaaactctgagctccttaagaatagggatctaatcttagcaacttttctattccactagctgctacataataggtgcttaatgtttgtggtgtgaatgaaataactgaatttgaatagaagtttacatccaaaagtcataataagacaaataatgaaaaactccaaagtcactgattataaagaatatgcaatccatttgggatttattgcatttaaagaaaacagattaaaacaggtatgataaatacagtaagaaaataactttaaatttcaaacaaaacagtgaatcagggacagaattcagtcaaaaagaataagcagtgtaaaggcaataaagtaataaaatcagttagtgcttaattagatatggcaggggaaaaggggtgggagggggagactgagtctatctcataattgtttcccagctatatttgaggactgaagttactttagcaagtatgttttgtaacaagtagaaatacaataaagatgtaaatttgctttatttaaaggttaaagttatttgcttagtggtacataaaaggcttcagaaaattcaagtttaacaaaaaatggaagtgtaatcaaagaaagtgcacttaaagctgtttgccagcaattaaaaagtagcttctatacagcttctattagatgacttttcaatcacaaaaagagcatagtcataaaaacaattctttcaaaagtagcagtataaattttaaaataaaacaaaaataaccccaaatcatgaccctttgcattatcatctaccttattctcttagtagcttttgtaaaccctcactaggagtgaatgttctcttagatatgattgtggttgcaattccattttttaaaaattcacattaactccacagtagagagatgtgacatgcatgtgtgtacatatttttatcttaatatataaaacaccactgagtataaaagttctcaaataaactattcatcatttatggtattctcacagtagatatgtcatctcattctcacagtagactgtcaactcaataattggacctaaaataacaagtttgctaaaaagaaaaaaaaatgagaaaaaagtttactgcacattctaaatatattaaaaacaaatgtacccaagcgcctcaaaactagtgatattaatacacttgtaccttctaacagtgcttacgtgaagtaccaaaacctaaaataaaccaagcagagtagctgacttgtaagaaaactgctctgcctggtgaacttcagcatagaagagtgggctccaccttagattttccaccagcaagaggacaacagtctatcactcttaaacaataaacagggtaagactgaaagttgtgtctatttgcaaatccggataatgtcgtaactatacccaacacgtacacagggattggggtaagggaaaataattacactcctgaataaatgttctagtcagttaaattttcatccggcctacaacctttcctcctccacctattatacttaccatgcaatttttgtgtcttagcagatacattcttcaatgccataaaaagctgatctttttaatactaacattttactgacgtgatattaaaataagcaaatggtccactttttaaaggattattcaaaatcaacaagcattattaaagctgttaagaaacaactttggcctcaagatttttgctagcttcataataatttacttctcttagtgatgttcaagtataacaggtttagttataactacatcctaaagaagcacaggggacacccaaataatattagggaaaaaaaaccccaaatatatatatatatatatatttgcttagtggtacatatataataacctttcttccttccttaaaccagaattgaaccatcccataatagagccaaacttttattgagtgctgtgtgccaggtactgtgttaagcactttcacatatcttgggagctttattctcataattctcacaagggaataacctgagcatcagctgtgtggagtgacctacaccttgaccatgattctgggggatgatgaatgaaaatgcaaagtataaatctatactccttaggaaaatgcctctactacaacacaaaggaatctctccatttctatcctattgaacccccaattgaatcctgtatcttttctctgagctacaatcttgaaagaagaaagtcactgtgctgtgttataagaatgtaaatattttatgctgtcagttgtttcctcagaatttataagtcaaagggtctacatcagtgtcagaatcatttaaaattattcagtgtattgaaaagcaagtaaaactctaggtatttcatgtttacatctgaaggagacattagttcatcctctaccccttttctaaatgatgaaactcatgaggtctagcagagaccaaggactaatacaatcaagaagcatattgtgtacacctcaacagattttcattaaaaaaaattgtttgatacaaacctactgtagttcatgaatttactatgtgtaatcatcaactcttcacttttaaaagaaagtatcacttgaatctattttgtaaagtttttaaacatctacttgagcatttgcattagcagtattaatcaacctgagaatcagaaaaaaaaaaaaaggtgcaaacatatttgcctttggcacgaggacaagtaattggtgcagtccagctctaaataataatgtaatgcttggtctgcctctgctacattgtgattcacatattgcttccctatccacaaatctatatttgatttagcatataaaagaagggaaaaagcaataaaaagacaaatatgtggtttagttacatatactttgcttctttccaagttcagaactgtgaaaataggcaaatagcttatcccattggggcactataagagattcctaataaaattactcgtaaaatatactttgagatcgaagagagttaatttaaaatataaaaatcaaagagagtgccagttgatgagtttctactcctttctgtaaatagcattaactgttctagaaacttccaaatgttaatctgatagcgcagcacaattatatcttaaaatagtcatagacacaggaagcacagatactatattcacattaattcacatatgtaatctctatcattaaatgatttctataaaacctcaagtttctaattaggatttgtggtgtaaaaaaaggcaaattggtagctgggttcttttcagtaaagacacaatcaactagcagaattaagatgctagtccaccttatatgcattttaggatctggtatattagtgcagaggtacttgcagcaggatgcatgaatcctgcctttatataaggctttgtgggtgtcaccattctgtgcactttattaaaactactccaccccccaaaacctaataaaaataattgttgcttatgacttggggaatatttggtgaagttgctaataaagtacattgttaaatgcaacatgatttcacattgtaaatgtcttgaaaattcagtttccgctacatattttcttcataaaataaaatttttatacaacccttgtcctccaatttttccaataatctgctttattagggccatcacaataaaagtttggggcaagaagccatgcataaagtgtttctaaagtagtgaatgttttctgttctgtatctttttttcttcttataatttctttacaaatgtcagatatttctcttcatatttttgttctaggcttctgtgcgacgatagtccatttttttaatttgttttaactgacaaaaattatatatatttatcatgtataacattgttttggaatatgtaagttgtggaatagttaaattgagctaattacacattatttcatatgcttatcattagatattccattttaatggcacttgtttttaaaaatgaaacagagttttaggcacaatagtcagttacttctggctctgctttgtggagaaaggtgtatggactgaaatctctgcactctccagataataactttctaatgctttaagataactagattgtttttaactgtctggaaattaaaagagaccttaaaaaaaattcacaagtgtaactagtgtatgtagaaataaccctaattttagggatatgcacataaaaatgacattctgatatcaaaaataacagtttcactgtcccttctcagtggctacacacctagaaaggtgccatgtgctttcactggaagtaccacacttgcatttctgtgttgtgatgtcagtagcagaaacccttagttagagcttgcaatttagctcccttttctcctgaagaggaatcaagttactaccctgtagagatacttcattcttctatttggtttatttagaaatcacctattctgactgatctttaagaatgaatgctataaagagctaccaaattttctttcaaattcataaaactgttcacacttttttgaaacaggagttaatgccgagaatccatcagaagtatctactgtttagaaggaaatggagcagcaccaaatgggtctaattcgactggttgggactgttgggactgatgtggagtgatgctttgcaccacaagttctgtaaagggcacggcaccaaaatcatccattttcaatacatctgcactatggaatga

SEQ ID NO: 169184 - DNA, 3370 bp, Homo sapiens
  Payload ID: 13302
  Gene Symbol: PAQR3
  Gene Name: progestin and adipoQ receptor family member III
  Uniprot ID: Q6TCH7
  ENST ID: ENST00000515853
  CDS Start-End: 1-267
atgcatcagaagctgctgaagagcgcgcattacatcgagctgggcagctaccagtactggccggtcctggtgccccgtggcatccgcctgtacacctacgagcagatccccgggtccctcaaggacaacccgtacatcaccgacggctaccgggcctacctgccgtccaggctgtgtatcaaaaggtctgtatgctttgctctgtgggctatcatcttttttcctgccatcggtcagaaaaaacatgtcgaagatggatggcattagattatgcaggaatttctattggaatactgggctgctatgtctcaggagtattttacgcattttattgtaataactactggcgtcaggtgtacttgatcacagtgcttgctatgatcctggcagtgttctttgcgcagattcatcccaattacctcacgcagcaatggcaaaggctccgttctatcatcttttgttctgtttcgggatatggagtgattcctactcttcactgggtttggctcaatggaggaattggtgctcctattgtacaggactttgcaccccgtgtaattgtgatgtatatgattgctcttcttgctttcctattctacatttccaaagtcccagagcggtactttccaggacaactaaactacctcggatcaagccaccaaatatggcatatccttgcagtagtgatgttatattggtggcatcagtcaacagtgtatgtcatgcagtacagacatagcaagccttgtcctgactatgtttcacatttgtgaattaggtatggccacctggtgaattcagttgttaagcaatatataatggggaattgtataccccactatttctaagattcccattagttttccctttttcctttttaatatgagtaatgctttataaaaatgggaaaaaaagtatacttaaggatctgtagtaataactgctttacaaaatccttaaaactactaatttgctgcttgtacagaaagtgaaaattagttggcaatcataagaaacatctgaataacaacgatgaatgggaaactagtgttgaaataggattcattttacttagcaccagcttaatttccttaggaagggctcatgtccattagaaaatggagtcatcttatgtgcttaattattttcagttaattgtcaagtttaagtgcctaatcaaggcaagtgttgtttcagcctatgcttaatgcaagctaggatagtgattttaaataatcactaaaatcactagatttaaataatcactaaaatgatttgtgagaaactggcacttcagatattatatcctttagctataggttcttctctccctaagaacattagatattttagttttccagaacaaaagctttaaacttctgcagtaagttgagagaagggttgagaagaggaaaagaacttctcattttctatcagataagaatcacattagaaactaagtacaagattagacaacaaattatgtggtcaaataatatagtcattagccacctaaacattttaattccagatattatttaattccatataataactgaattcttgtgagtggattacaggtttttgatcccaaaattccagagctttcaactctctgaatttgtagtcctgaatatcccagtggtgggggttcccagcattgtgggtgctacttgcaaggccatagaatctagatggccctgtcttgaccctgaaatgaaccttaagccttagaacaaagtcatgcagatgccccatttgataataatcttattcacctgtgctctggtcctcggtttctgcatgtgttagcattgcattgataactcagaatcttgataaacacttaatatttgggcctgaagcattaaactttctttttattgtatatacttaaaaaatagaactcactgccctatcatacattgtagccctcttattctttggtctttcatatgcattagttaaatcccttaaagtagacattcataaaaacttacattgtttattggagtataaaatattacccaagtttcttcatgagttgacatgagctgttttaaatactggtgtattttcagaacagtaaaattactgaatatcagaaaaaatgttaattgatgatgaagcttattcccaaaatgccttttgtgcatatgatacttggaaagtcactaatgtgcctcagttaatacatcagtaaaatgttgtgtttcttttccagtgtagtgtttttggaatataaattccccatgctagtatagtatctcagcaaagagaatttccccccaggaggctcagtaaaggaataccgtgtcttacccatcgttatgatggaaggctgctttgaaaatggctgttttaccttataaggttaaaattttgatccatatgttaagtgatagaagattttggtgcaacagtagtaggatatatttctcctagaacatcccttattggcttacatgattttattgccttttaatagatattttgtcattttggccaaacaaaagacactgagtagttacacttaagttaaaaatgaggggaaaatcattattttaggtgtggagccatttttattataaaactttctcaaaataaaaaaacattgaatcatttcaatttttgcagtccctgtattagtatatgaatacatacttgccatttgaattaataacatgaaaagagtatactgtgtttttaaatccgtgtttctttgaatttaaagggtgtacaggtctttctgtagggaaaattattccatgtaaacatttcaactctgtatgaaaatgttaaatattgtaagaaagttatcctctcattttttcactgctatgatatatttattataaaatagggaatgaatgaatgaatatggattgctgttaactagaaacacttctgtatgtcagtcagcatttaatgaccacctactgtgtgcacagcactactggtaaaattttgaagacattgttaacattaaaaaatattttaaagttgtctacaaatctgagccttgtaatgatgtatatttaagttatttttgtttttatagattaaagtaagattaaaatatactatccagttttattactaaaaaagactggttttaattttaccaatgtgtgaactataaaagctttttgcctacagattttacattttaaaattatctatggctgttttaaattgtctagcaatttatatggttgtggttaactcatttaagaaacaattatctttctatattaagccattttcaaatagcaagacagtgcttgtctttttttgttattacactaactgcaattcagtaagctgcatgacaaaatatgtattatgtaaataaactgggtttactaaa

SEQ ID NO: 169185 - DNA, 2288 bp, Homo sapiens
  Payload ID: 13302
  Gene Symbol: PAQR3
  Gene Name: progestin and adipoQ receptor family member III
  Uniprot ID: Q6TCH7
  ENST ID: ENST00000511594
  CDS Start-End: 2-937
gatgcatcagaagctgctgaagagcgcgcattacatcgagctgggcagctaccagtactggccggtcctggtgccccgtggcatccgcctgtacacctacgagcagatccccgggtccctcaaggacaacccgtacatcaccgacggctaccgggcctacctgccgtccaggctgtgtatcaaaagtttgtttattttatctaatgagacagtaaacatctggagtcatttgctgggtttctttctcttcttcaccctgggaatatatgacatgacatctgtgttaccttcagcaagtgcgtccagagaagattttgtaatttgttctatttgtcttttctgcttccaggtctgtatgctttgctctgtgggctatcatcttttttcctgccatcggtcagaaaaaacatgtcgaagatggatggcattagattatgcaggaatttctattggaatactgggctgctatgtctcaggagtattttacgcattttattgtaataactactggcgtcaggtgtacttgatcacagtgcttgctatgatcctggcagtgttctttgcgcagattcatcccaattacctcacgcagcaatggcaaaggctccgttctatcatcttttgttctgtttcgggatatggagtgattcctactcttcactgggtttggctcaatggaggaattggtgctcctattgtacaggactttgcaccccgtgtaattgtgatgtatatgattgctcttcttgctttcctattctacatttccaaagtcccagagcggtactttccaggacaactaaactacctcggatcaagccaccaaatatggcatatccttgcagtagtgatgttatattggtggcatcagtcaacagtgtatgtcatgcagtacagacatagcaagccttgtcctgactatgtttcacatttgtgaattagaatcaggaacgaagattcagggaatgtctgtcacatcttatggcatcccacctggacagaatatccgatttgaagattgtgattgacttccgtaaaactgtacaactctccatttggcaggagttaatgccgagaatccatcagaagtatctactgtttagaaggaaatggagcagcaccaaatgggtctaattcgactggttgggactgttgggactgatgtggagtgatgctttgcaccacaagttctgtaaagggcacggcaccaaaatcatccattttcaatacatctgcactatggaatgacccatgtagtgaattttgtcttggccgccctggcaggacagtattgtgatcagcacggatgtcgctcaggccctgatgtggagggtgccatgacaggtctggagaatggaagggcttggcaccgaaggggtccaacaggctctcctcaggttgtaagacattccccctatctttcccatcagtcagtgcaacactaatgttctccttggagtctgagatggttaaaaattcattgctactttgagagtctcggcggcccacttttttgtgcctgcgagccctctctggagtgcgataggtaggcttcaaagtcttctttgtgctagttggcgtgccatgatgccgcttcccattacttttggacatatcctgctttgtgcgcctttggcgagaggacagtttctgtaagctgcgctgtttgactttttgctgctggctccccgttatttcatcaaagggcacaagcccaaaaaggtcctcattgctttcacttttacttgttgatgtgaggaagggctgaaatggagtggagccaaatacatctacacttttgggataaccagggatagtatgtgcctcaggccccactgcatggcattcttgtacattcaccttcttgctaaaaggcgcctttgtgaatacatcaaattcctcctgctccagtcctgcagcaggaaacctgtgttgagggaggttcttttcattcttttcttgctggggctgttgagcacgcactgcaaagaaggggacagcgccaaatacatcaaactcctgtttgggagtctccactgcaacatcagaggataattgggctgaggtgaggagtattgtattaagatcttgggttggtccactgccagatctgtctctgtagacagagctcatgtcactgtactttgctttagcctgctcataatcagaatcagagctatgtttctcctcttcttcctcatcttcagaatccatgaggagaggcctatgacccagattttctggttcagtatcatcatcattaaaatctccttgttccccctgaagaa

SEQ ID NO: 169186 - DNA, 1431 bp, Homo sapiens
  Payload ID: 13302
  Gene Symbol: PAQR3
  Gene Name: progestin and adipoQ receptor family member III
  Uniprot ID: Q6TCH7
  ENST ID: ENST00000512760
  CDS Start-End: 136-402
agcagcggcagcgcggtaggacctcgcgcagcgtccgcgggctccggggcgggggcgccagcggcgaagccccctccccggggaggcgggacctgggggagctcccgagccggggagcggcggcggccgggaacgatgcatcagaagctgctgaagagcgcgcattacatcgagctgggcagctaccagtactggccggtcctggtgccccgtggcatccgcctgtacacctacgagcagatccccgggtccctcaaggacaacccgtacatcaccgacggctaccgggcctacctgccgtccaggctgtgtatcaaaaggtctgtatgctttgctctgtgggctatcatcttttttcctgccatcggtcagaaaaaacatgtcgaagatggatggcattagattatgcaggaatttctattggaatactgggctgctatgtctcaggagtattttacgcattttattgtaataactactggcgtcaggtgtacttgatcacagtgcttgctatgatcctggcagtgttctttgcgcagattcatcccaattacctcacgcagcaatggcaaaggctccgttctatcatcttttgttctgtttcgggatatggagtgattcctactcttcactgggtttggctcaatggaggaattggtgctcctattgtacaggactttgcaccccgtgtaattgtgatgtatatgattgctcttcttgctttcctattctacatttccaaagtcccagagcggtactttccaggacaactaaactacctcggatcaagccaccaaatatggcatatccttgcagtagtgatgttatattggtggcatcagtcaacagtgtatgtcatgcagtacagacatagcaagccttgtcctgactatgtttcacatttgtgaattagaatcaggaacgaagattcagggaatgtctgtcacatcttatggcatcccacctggacagaatatccgatttgaagattgtgattgacttccgtaaaactgtacaactctccatttggcagtgcttacgtgaagtaccaaaacctaaaataaaccaagcagagtagctgacttgtaagaaaactgctctgcctggtgaacttcagcatagaagagtgggctccaccttagattttccaccagcaagaggacaacagtctatcactcttaaacaataaacaggtacctcctgctgaggaaaagttaggttccaggctgcaagttaccacaatccaagtgatgatgttacatgtgtaacttgcctgaatgagaaatgaaaggaacagaaccaaaaggatcttctggaggatggttatgtggagcagaaagtgagtctacattcttatctgaggatgctctctcctcgagcctatctgcaaaaataagatgaaacgaaataaaaaatgaaatgaaataaaaa

SEQ ID NO: 169187 - DNA, 2644 bp, Homo sapiens
  Payload ID: 13303
  Gene Symbol: PAQR4
  Gene Name: progestin and adipoQ receptor family member IV
  Uniprot ID: Q8N4S7
  ENST ID: ENST00000293978
  CDS Start-End: 406-1110
ccggccggcgggaactaggagcctgggcggagcctggcgtcccctcccgcgtccggccgcgcccgtcctcctggctgcagagagactaccggccaccgccgccgccgccgccgcgagctgtccctgcggcgcgtctgccttggcggagccgaccgcagtgcgctcaggcgtccggtgcgtccccagcctccgccccggcgcgggggcgacggactcgcgcgtgcgcagcgccggaggggcgcgggctgggaccccctagccagcgcgtgcgccgatcgagcgcagggcgatgggtgggcgccgggcgccgggcgccaggcagtgatgggccttcccgcgctgcggccccactgaggaggaggctcggggacagcaggagcacgggctgcccgcgcggtgcggaccatggcgttcctggccgggccgcgcctgctggactgggccagctcgccgccgcacctgcagttcaataagttcgtgctgaccgggtaccggcccgccagcagcggctcgggctgcctgcgcagcctcttctacctgcacaacgaactgggcaacatctacacgcacggctccgtgctctatcacctctttatgtgccaccaagggggcagcgctgtgtacgcccggctcctcgccctggacatgtgtggggtctgccttgtcaacacccttggggccctgcccatcatccactgcaccctggcctgcaggccctggctgcgcccggctgccctggtgggctacactgtgttgtcgggtgtggccggctggcgtgctctcaccgccccctccaccagtgctcggctccgggcatttggatggcaggctgctgcccgcctactggtatttggggcccggggagtgggtctgggttcaggggctccaggctccctgccctgctacctgcgcatggacgcactggcgctgcttgggggactggtaaatgtagcccgtctgcccgagcgctggggacctggccgctttgactactggggcaactcccaccagatcatgcacctgctgagcgtgggctccatcctgcagctgcacgccggcgtcgtgcccgacctgctctgggctgcccaccacgcctgtccccgggactgagctgccatgccagcctgcccacagcagcctcctagagttagcaacaccaggtgttcctcccaactcgtctgcaaggggctggctccttggatgcttccagctcatgagatgtctcagcaggagccctgttcacccgttcttccctgtggactgacctcttccacccacgccgtggcgctccaacttccttccctgccttttccctccaagctcctattttactgtgtcagctggaaggaaacctttccctcttgggacctctttaccctctgtgacctgtggggttagaccagagagggactctggggtcacgtcttgctctgagagttcaagtcctgccaggccgccagcccagagcctcctcaccctatcctgttcctcccaccaggcctgtggccagtcttcctgatctccatctttctgccctgcataccagccctcccagcagccacaagcttgcccgccctggctccctctgcccagagactatggagtaaggcattcaggacaaaaggaccaagggggcgtggacccgtcttgtaccagctggccacaggcacaagggctgcagctgcttcttccaggaaactgacacagggagctcagcggcctcagatcctgggacccctgggccgtgcctgccctccaccttgagtgccatactcccaacagctccaggtacccaccgggggatgtgcctgctcaggaaacctctttgctccacacagcatggggcttcagctgctggcccaaggccaggagcgctgggttctgcagcagggctcagcctcaggggcgttaagaccctggatgacatcaataaagggacaggaagggccatgttgccacatgagcaagcttgggtgctcccaaggttcaaatactttttattagacacggccaggcagagaagaccatgggagttcccgaggggccccagctttcaagggcgacgggagagacacaggataaaaggttaaaagtgcagaggcagagtctggggctcaggttgggtctagggtgtcctcaaacaggctgaggaggttccgaggctcaaaggaggggaaggagccccgaggaggctctgagttgatgtcacttaggtccagggcatccctgggaggagagagtagtgacactcaggatccaaaagctagccctgcccaccccagcccctggacctgcttacctgggtgtgcacctgctccggggggtggaggtgctccccacagtccgggccaggacagcctcaggggagagtgaaggcctgcaggagggcaggcgagacaaggagggtgtccagggctagggagtgccggatgaaaccagctctgtccctgtgcaggctccaggctcccgcctgacaaacaggcagggagccacagtcagggacaataaaaacttggtgcactctgaaagcagcacttggacagccttcaaagtccttccatctggctgcactccaaggccccctctgtccttttcagaacacatggacttggaggcagatttgaaataaacttttagtaaatgt

SEQ ID NO: 169188 - DNA, 2793 bp, Homo sapiens
  Payload ID: 13303
  Gene Symbol: PAQR4
  Gene Name: progestin and adipoQ receptor family member IV
  Uniprot ID: Q8N4S7
  ENST ID: ENST00000318782
  CDS Start-End: 431-1252
aggagcccggcgcgcgaaacgctggccggccggcgggaactaggagcctgggcggagcctggcgtcccctcccgcgtccggccgcgcccgtcctcctggctgcagagagactaccggccaccgccgccgccgccgccgcgagctgtccctgcggcgcgtctgccttggcggagccgaccgcagtgcgctcaggcgtccggtgcgtccccagcctccgccccggcgcgggggcgacggactcgcgcgtgcgcagcgccggaggggcgcgggctgggaccccctagccagcgcgtgcgccgatcgagcgcagggcgatgggtgggcgccgggcgccgggcgccaggcagtgatgggccttcccgcgctgcggccccactgaggaggaggctcggggacagcaggagcacgggctgcccgcgcggtgcggaccatggcgttcctggccgggccgcgcctgctggactgggccagctcgccgccgcacctgcagttcaataagttcgtgctgaccgggtaccggcccgccagcagcggctcgggctgcctgcgcagcctcttctacctgcacaacgaactgggcaacatctacacgcacgggctggccctgctgggcttcctggtgctggtgccaatgaccatgccctggggtcagctgggcaaggatggctggctgggaggcacacattgcgtggcctgccttgcaccccctgcaggctccgtgctctatcacctctttatgtgccaccaagggggcagcgctgtgtacgcccggctcctcgccctggacatgtgtggggtctgccttgtcaacacccttggggccctgcccatcatccactgcaccctggcctgcaggccctggctgcgcccggctgccctggtgggctacactgtgttgtcgggtgtggccggctggcgtgctctcaccgccccctccaccagtgctcggctccgggcatttggatggcaggctgctgcccgcctactggtatttggggcccggggagtgggtctgggttcaggggctccaggctccctgccctgctacctgcgcatggacgcactggcgctgcttgggggactggtaaatgtagcccgtctgcccgagcgctggggacctggccgctttgactactggggcaactcccaccagatcatgcacctgctgagcgtgggctccatcctgcagctgcacgccggcgtcgtgcccgacctgctctgggctgcccaccacgcctgtccccgggactgagctgccatgccagcctgcccacagcagcctcctagagttagcaacaccaggtgttcctcccaactcgtctgcaaggggctggctccttggatgcttccagctcatgagatgtctcagcaggagccctgttcacccgttcttccctgtggactgacctcttccacccacgccgtggcgctccaacttccttccctgccttttccctccaagctcctattttactgtgtcagctggaaggaaacctttccctcttgggacctctttaccctctgtgacctgtggggttagaccagagagggactctggggtcacgtcttgctctgagagttcaagtcctgccaggccgccagcccagagcctcctcaccctatcctgttcctcccaccaggcctgtggccagtcttcctgatctccatctttctgccctgcataccagccctcccagcagccacaagcttgcccgccctggctccctctgcccagagactatggagtaaggcattcaggacaaaaggaccaagggggcgtggacccgtcttgtaccagctggccacaggcacaagggctgcagctgcttcttccaggaaactgacacagggagctcagcggcctcagatcctgggacccctgggccgtgcctgccctccaccttgagtgccatactcccaacagctccaggtacccaccgggggatgtgcctgctcaggaaacctctttgctccacacagcatggggcttcagctgctggcccaaggccaggagcgctgggttctgcagcagggctcagcctcaggggcgttaagaccctggatgacatcaataaagggacaggaagggccatgttgccacatgagcaagcttgggtgctcccaaggttcaaatactttttattagacacggccaggcagagaagaccatgggagttcccgaggggccccagctttcaagggcgacgggagagacacaggataaaaggttaaaagtgcagaggcagagtctggggctcaggttgggtctagggtgtcctcaaacaggctgaggaggttccgaggctcaaaggaggggaaggagccccgaggaggctctgagttgatgtcacttaggtccagggcatccctgggaggagagagtagtgacactcaggatccaaaagctagccctgcccaccccagcccctggacctgcttacctgggtgtgcacctgctccggggggtggaggtgctccccacagtccgggccaggacagcctcaggggagagtgaaggcctgcaggagggcaggcgagacaaggagggtgtccagggctagggagtgccggatgaaaccagctctgtccctgtgcaggctccaggctcccgcctgacaaacaggcagggagccacagtcagggacaataaaaacttggtgcactctgaaagcagcacttggacagccttcaaagtccttccatctggctgcactccaaggccccctctgtccttttcagaacacatggacttggaggcagatttgaaataaacttttagtaaatgtaagcctt

SEQ ID NO: 169189 - DNA, 869 bp, Homo sapiens
  Payload ID: 13303
  Gene Symbol: PAQR4
  Gene Name: progestin and adipoQ receptor family member IV
  ENST ID: ENST00000574988
  CDS Start-End: 215-835
gataagtaaccagtgccaaaagccttttgcccagggcctgtctctggccaaggccaggccgccaactggatgacagcattacctggacctgtcttgccctgtcctgtgttgtgtctgaaccgtggtccccttgaggatgtgactgaaactatctggtagatgactgtctccctccctagggctggccctgctgggcttcctggtgctggtgccaatgaccatgccctggggtcagctgggcaaggatggctggctgggaggcacacattgcgtggcctgccttgcaccccctgcaggctccgtgctctatcacctctttatgtgccaccaagggggcagcgctgtgtacgcccggctcctcgccctggacatgtgtggggtctgccttgtcaacacccttggggccctgcccatcatccactgcaccctggcctgcaggccctggctgcgcccggctgccctggtgggctacactgtgttgtcgggtgtggccggctggcgtgctctcaccgccccctccaccagtgctcggctccgggcatttggatggcaggctgctgcccgcctactggtatttggggcccggggagtgggtctgggttcaggggctccaggctccctgccctgctacctgcgcatggacgcactggcgctgcttgggggactggtaaatgtagcccgtctgcccgagcgctggggacctggccgctttgactactggggcaactcccaccagatcatgcacctgctgagcgtgggctccatcctgcagctgcacgccggcgtcgtgcccgacctgctctgggctgcccaccacgcctgtccccgggactgagctgccatgccagcctgcccacagcagcctccta

SEQ ID NO: 169190 - DNA, 2251 bp, Homo sapiens
  Payload ID: 13303
  Gene Symbol: PAQR4
  Gene Name: progestin and adipoQ receptor family member IV
  ENST ID: ENST00000572687
  CDS Start-End: 118-717
gatgggtgggcgccgggcgccgggcgccaggcagtgatgggccttcccgcgctgcggccccactgaggaggaggctcggggacagcaggagcacgggctgcccgcgcggtgcggaccatggcgttcctggccgggccgcgcctgctggactgggccagctcgccgccgcacctgcagttcaataagttcgtgctgaccgggtaccggcccgccagcagcggctcgggctgcctgcgcagcctcttctacctgcacaacgaactgggcaacatctacacgcacggggccctgcccatcatccactgcaccctggcctgcaggccctggctgcgcccggctgccctggtgggctacactgtgttgtcgggtgtggccggctggcgtgctctcaccgccccctccaccagtgctcggctccgggcatttggatggcaggctgctgcccgcctactggtatttggggcccggggagtgggtctgggttcaggggctccaggctccctgccctgctacctgcgcatggacgcactggcgctgcttgggggactggtaaatgtagcccgtctgcccgagcgctggggacctggccgctttgactactggggcaactcccaccagatcatgcacctgctgagcgtgggctccatcctgcagctgcacgccggcgtcgtgcccgacctgctctgggctgcccaccacgcctgtccccgggactgagctgccatgccagcctgcccacagcagcctcctagagttagcaacaccaggtgttcctcccaactcgtctgcaaggggctggctccttggatgcttccagctcatgagatgtctcagcaggagccctgttcacccgttcttccctgtggactgacctcttccacccacgccgtggcgctccaacttccttccctgccttttccctccaagctcctattttactgtgtcagctggaaggaaacctttccctcttgggacctctttaccctctgtgacctgtggggttagaccagagagggactctggggtcacgtcttgctctgagagttcaagtcctgccaggccgccagcccagagcctcctcaccctatcctgttcctcccaccaggcctgtggccagtcttcctgatctccatctttctgccctgcataccagccctcccagcagccacaagcttgcccgccctggctccctctgcccagagactatggagtaaggcattcaggacaaaaggaccaagggggcgtggacccgtcttgtaccagctggccacaggcacaagggctgcagctgcttcttccaggaaactgacacagggagctcagcggcctcagatcctgggacccctgggccgtgcctgccctccaccttgagtgccatactcccaacagctccaggtacccaccgggggatgtgcctgctcaggaaacctctttgctccacacagcatggggcttcagctgctggcccaaggccaggagcgctgggttctgcagcagggctcagcctcaggggcgttaagaccctggatgacatcaataaagggacaggaagggccatgttgccacatgagcaagcttgggtgctcccaaggttcaaatactttttattagacacggccaggcagagaagaccatgggagttcccgaggggccccagctttcaagggcgacgggagagacacaggataaaaggttaaaagtgcagaggcagagtctggggctcaggttgggtctagggtgtcctcaaacaggctgaggaggttccgaggctcaaaggaggggaaggagccccgaggaggctctgagttgatgtcacttaggtccagggcatccctgggaggagagagtagtgacactcaggatccaaaagctagccctgcccaccccagcccctggacctgcttacctgggtgtgcacctgctccggggggtggaggtgctccccacagtccgggccaggacagcctcaggggagagtgaaggcctgcaggagggcaggcgagacaaggagggtgtccagggctagggagtgccggatgaaaccagctctgtccctgtgcaggctccaggctcccgcctgacaaacaggcagggagccacagtcagggacaataaaaacttggtgcactctgaaagcagcacttggacagccttcaaagtccttccatctggctgcactccaaggccccctctgtccttttcagaacacatggacttggaggcagatttgaaataaacttttagtaaatgt

SEQ ID NO: 169191 - DNA, 842 bp, Homo sapiens
  Payload ID: 13303
  Gene Symbol: PAQR4
  Gene Name: progestin and adipoQ receptor family member IV
  ENST ID: ENST00000576565
  CDS Start-End: 139-759
tggctgcagagagactaccggccaccgccgccgccgccgccgcgagctgtccctgcggcgcgtctgccttggcggagccgaccgcagtgcgctcaggcgtccgggctggccctgctgggcttcctggtgctggtgccaatgaccatgccctggggtcagctgggcaaggatggctggctgggaggcacacattgcgtggcctgccttgcaccccctgcaggctccgtgctctatcacctctttatgtgccaccaagggggcagcgctgtgtacgcccggctcctcgccctggacatgtgtggggtctgccttgtcaacacccttggggccctgcccatcatccactgcaccctggcctgcaggccctggctgcgcccggctgccctggtgggctacactgtgttgtcgggtgtggccggctggcgtgctctcaccgccccctccaccagtgctcggctccgggcatttggatggcaggctgctgcccgcctactggtatttggggcccggggagtgggtctgggttcaggggctccaggctccctgccctgctacctgcgcatggacgcactggcgctgcttgggggactggtaaatgtagcccgtctgcccgagcgctggggacctggccgctttgactactggggcaactcccaccagatcatgcacctgctgagcgtgggctccatcctgcagctgcacgccggcgtcgtgcccgacctgctctgggctgcccaccacgcctgtccccgggactgagctgccatgccagcctgcccacagcagcctcctagagttagcaacaccaggtgttcctcccaactcgtctgcaaggggctggc

SEQ ID NO: 169192 - DNA, 2452 bp, Homo sapiens
  Payload ID: 13304
  Gene Symbol: PAQR9
  Gene Name: progestin and adipoQ receptor family member IX
  Uniprot ID: Q6ZVX9
  ENST ID: ENST00000340634
  CDS Start-End: 347-1480
cgatgcccagtcaccgctgccgcgctgccgccgcagtcagccgcgccgccgccgctgccgcagcgcgggcggccgcgcgccggtagcaggggcttggcgaggaagccgctgagcctcgcgcgctccgcgctcctggcggtcgcagcgctgcctattaattgattctcttattgatttatttaatttttaggagcggctgctcggaggcacgggtcttctcctaaacctgcagcgacgcccccggcgtgggcacaaaggctccgacggcggccggcgggggctgcccagcgcccgggagccggcgccagaggtcgcctgcgcgcgccctagccgagccccgggcaccatgccgcggcgcctgcagccccggggcgcgggcacaaaaggccctccggccccggccccggcagcttcgggggccgcccggaactcccactctgccgcctcccgggaccccccagcgtctgccaagccgctgctgcgctgggacgaggtgcccgacgacttcgtggagtgcttcatcctgtcgggctaccggcgtctgccgtgcacggcccaggagtgcctagcctcggtgctgaagcctaccaacgagacgctcaacttctggacgcacttcatcccgctgctgctgttcctgagcaagttctgccgtctgttcttcctgagcggcggcgacgtgcccttccaccacccgtggctgctaccgttgtggtgctacgcgtcgggagtgctgctgaccttcgccatgagctgcacggcgcacgtgttcagctgcctgtcgctgcgtctgcgcgccgccttcttctacctggactacgcgtccatcagctactacggcttcggcagcacggtggcctactactactacctgttgccaggcctcagcttgctggatgccagagtcatgactccatacttgcagcagcgcctgggctggcacgtggactgcacgcgccttatcgccgcctaccgcgccctggtgctgcctgtggccttcgtgctggcggtggcttgcactgtggcctgctgcaagagccgtaccgactggtgtacctacccgttcgcgctgcgcaccttcgtcttcgtcatgccgctcagcatggcctgccccattatgctcgagagctggctcttcgacctgcgtggggagaaccccacactcttcgtgcacttctaccgccgctacttctggctggtggtggccgccttcttcaacgtgagcaagatccccgagcgcatccagccgggtcttttcgacattatcggccacagccaccagctcttccacatcttcaccttcctcagcatctacgaccaggtgtactacgtagaagagggcctgcgccagttcctccaggcgccgcctgccgcacccactttctcgggtactgtgggctacatgctgctgctggtggtctgcctggggctggtaatcaggaagttcctaaacagctccgaattctgcagtaaaaagtgagcctccgccttggaggagactactggttcgcccatctgtttggagtttctgttgttgctattgttggtttgttttcaaatttcattgtgttttcttctttgctcaaggaaggtgctgcaaaaccatagggaaaaagttcactgctacaaagggatcccaacccactggaggctttgaagtagggaggttggcaggggtggtcaagcgggagggagatagtcacttgttcttgcccctggaaaaaattcaggtgatgtctttgacatccagggatttctcaaaggcagtgagtaaaatcccaaataaagccccaaagagtttgcttttccaatcatctgtgccattggtaataaggagtagcccctgtgaggtcaggtacacagtaaagagggtaaatagaatccttgggaacttctgtttcagtctgaggaatgcttggatttgtcaaaagaatggagctttgtaggaaacaggcacaaagacgcaaacccagggcttaacctgctagaaaatgcatggaatgtgaacacaagttaattatttcaaaatgtttttcagatgttatttaaatagtaatatatacattgatttttcataatttatcaaagcctgtggtacgcactgaattttctttgtcacatagttttgaatttcacagccttctgcattgcatacacttgaactggacatcaggggaagctgcttgagagttctcaattactttcttaaacagtgttttctgaaggcgtgtgtcatgatacaactgtgaattctaccttagggactctggttaaactattggtgaggagctcgagtggtttgtatagaccccagatttttgtttactttaatgtattccacaaaacccatcctggtttttgttagtttgttttgtttttaatctttttttttccttctctacttatttaaattgccactggaataaatgtgccttttgaagcaaagtccaaa

SEQ ID NO: 169193 - DNA, 1824 bp, Homo sapiens
  Payload ID: 13304
  Gene Symbol: PAQR9
  Gene Name: progestin and adipoQ receptor family member IX
  ENST ID: ENST00000492509
  CDS Start-End: 1-439
gagctggctcttcgacctgcgtggggagaaccccacactcttcgtgcacttctaccgccgctacttctggctggtggtggccgccttcttcaacgtgagcaagatccccgagcgcatccagccgggtcttttcgacattatcggccacagccaccagctcttccacatcttcaccttcctcagcatctacgaccaggtgtactacgtagaagagggcctgcgccagttcctccaggcgccgcctgccgcacccactttctcgggtactgtgggctacatgctgctgctggtggtctgcctggggctggtaatcaggaagttcctaaacagctccgaattctgcagtaaaaagttctgccaaggggacaaatcacggaagattggattggaacaaaaagcagcagaaggcagctcatcagaaggttcccatttcctgtaatgaaagaatattgactgaggacttaagagtttccagtatgggatgtaaggagcttagaagttgtcactccatcttaacaagtaaaaagctgaactgaaaaatcaacaactcttcttgggtccatcagagacatgaagtcacagagcaaactgctgccccccaaaattggagagacataacaggtagacacagagaatcacaatttaacagagcaggaacccacaagaagaaatttctgcaagaaccagtaccaagttcttttgttccctgtacatcatgactagtttccaacaaaaaattacaaggcttaccaaaagacaaaaaacacagtttgaagaaacagagcaagcatgagaacaggctcagatatgacagggatgttggaattatcaggttgggaatttaaaataattatgctaaaggttctaatggaaaaataaacaatatgcaagaaccaacagataacgtacaaagagatgaaagttctgagaaaaaaatcaagcataaatgctagaaatcaagaacattgtgacatgaagaatgctttgatgggctcattactaggctagaccctgctgagtaaagaatcagcttgaggctatgtcactagaaacttctaaaactgaaaaacaaagaaaaaaagactagaaaaaaatcagaagagaatattcaagaaccgtggggcaattacaaaaggtgtaacctacacttaatgggaatacaaaaagaagaaagggagaggggaacagaaggatcaaataaacacccactcaaactctgcagcttgaaaggaaatgatattccacatagagacaagacttttgaattactttctctcttccctttctcagaagtccactatcagtttctgacctccaaaaacttttttcttaagagctgaaaaaattcctaaaagaaatggaagatggaagatttaaggaaactgattaactttgcaatttataaataaattttaagccataggattaataagaggtttcacatcctgcctgctcccataatgtccattctctctatcttgatactttgcagttgtaaaaatatatgtggaaaactgaaaggtgggcagaagtgaacatttattagtacaaaatgtaattctctaagagctactttactacttcaggatgacctgagtgaagctaatggcctagtttttactccagctcttattaattcagtgattgactgcattagttcatccctacctcactgtctatctgttttgagggtaggatctataaatatcagtttagagttctctcagattcttactttagttacacagaaatgtcataaagtacaaaaggaaacaggtttaaggaaataaataattctacagatacaggtaataagccaactat

SEQ ID NO: 169194 - DNA, 348 bp, Homo sapiens
  Payload ID: 13304
  Gene Symbol: PAQR9
  Gene Name: progestin and adipoQ receptor family member IX
  ENST ID: ENST00000498470
  CDS Start-End: 1-117
gtaatcaggaagttcctaaacagctccgaattctgcagtaaaaagttctgccaaggggacaaatcacggaagattggattggaacaaaaagcagcagaaggcagtctcctctgctgactttcatgcctgacatcaattttctcaaagagtgaagatagagcatctataccggtatagctgaaggactttggtcagtggcttcctggttctgccactttctgtcagctttcctgctcaatttagagacattctaattcttgttcagaaaaccttgagtccactcctgtaattcttctagtgagtttgtaagccaaccaatgcctactaataaatcccctttagcaccaa

SEQ ID NO: 169195 - DNA, 4943 bp, Homo sapiens
  Payload ID: 13305
  Gene Symbol: PAQR5
  Gene Name: progestin and adipoQ receptor family member V
  Uniprot ID: Q9NXK6
  ENST ID: ENST00000340965
  CDS Start-End: 132-1124
tgctgtcctctttcagggaagcggcacagcaccagctaggcagagacgccccaggccatgttagagctttgagtgaggcctggtaacagggaggcgctgtcacctactggccttgccaatccagctccaagatgctgagcctgaagctccccaggctgtttagcatagaccagataccccaggtgttccatgagcaaggcatcctgttcggctaccgccatccacagagttctgccactgcctgcatcctcagccttttccaaatgaccaatgagactctcaacatttggactcacttgctgcccttctggttctttgcatggaggtttgtgactgcactgtatatgacagacatcaagaatgacagctactcctggcccatgcttgtgtacatgtgcaccagctgcgtgtacccacttgtgtccagctgtgcgcacaccttcagctctatgtccaagaatgcccggcacatttgctacttcctggactatggtgccgtcaacctcttcagcctgggctcagccattgcctactctgcatacacgttcccggatgcgctcatgtgcaccactttccatgactactacgtggccctggctgtactgaacaccatcctcagcacaggcctctcctgctactccaggtttcttgaaatccagaagcccagactctgtaaggtgattcgtgtcctcgcctttgcttatccgtacacctgggactccctccccatcttctacaggctattcctgttcccaggggagagtgcacaaaatgaagccacctcgtaccaccagaagcacatgatcatgaccctcctggcctctttcttgtactctgcacatctgccagaacgcctagcccctggacgctttgactacatcggtcacagtcaccagctgtttcacgtgtgtgtgatcctggccacgcacatgcagatggaagccatacttctggacaagactctgaggaaggaatggctcctggccacctccaagcccttctctttctctcagatagctggagccatacttctgtgcatcatcttcagcctcagcaacataatttatttctcagctgctctgtatcggattcccaagccagaattacataaaaaagaaacatgactcagaccataagcttttcatgccagatgtcaacattaagctgcaacatcctaaccaccataagccggaggtggttacagcttatcatggcctaaaatattcataatggttggtgtcttttgaatgaattcatgtcaaaaatgttattcagctggggaaatttctctaaatgtacactgattctgtgtgtgtgattttaaaaggagaatatggttcaagcaagtccttgttaaggcaaactattgatatttcattaattttaaatttacttaaaatgtggttttaaattctatttaaacatttggattaagcatattactctggagctttgtattattctttaaaaatgaatcttgcttcatttgatgaatttcatgtcacaaagcttctctcaagagctctcgtagtggcctgtcaaccactttcggagaatgagccaggtcagtcactgggaggacctgtgaaagaaagttggtcactgagtgccttggggactggcaaaacattccagaatgaagagagctgtctggggagagcccttcttcccttctccacctagtgaagggagaacagaaggggagtcctctcttcccacaagtccattctgccttcaaagtgtaagttctcatgtcattatggatttggagtttgtcagtttttttcttaaaagtccacagcggggtgtcatgtgttctgttatgttctgttttctggttgccagtttgatctgcaaagtatttttcagtgcaggtaaaatgtgttaaaccataagagttgactgagttaatcccaattggttgtgctcatatgccaccttttaaaccaatggaaattgctatatttggggatgtcatacatttgatattgcttcagcatttcaaatatgttgcaaaatttagtatccatatgcataagaagttaatcaccttgccagtggggtggtcacatatagtgttctcaagctttactgtgaatcagaaacatccagtaagcttgtgacaaatgcagactcctagggaaaaccagggggttctgcttcactaggttaaatgtaggttttgtagaggagatctgcactggagcaagtctcccagatgattctaatacaggagggccagaggccaaacttgaagaactgctggtgttacatgttccaaaaggcattagacctatcagctttgtttcgcctgatctcaagttttagcaactcaccaactaaggcgtaacctcattttatgttccagcgttttctactctgaatagttctaaaacactgagcattttctcatttgttgcattactgattaaagttcagtatttcatggtgttttcagggaacacagaaatgcggatgcaaaacaacttttgacagaggcccatcaaacccagatctgcacttggtaatgacttaggggggcttcctcacaatgcaggatcctctttgctgactcaggaatactccatattttagactactgcctctaccattaactagcccagacatttgaatggccttgtaaacagctcactgtctaatactcgaaggacaagtaacaatttatattggatgagagtggtcaagaaatatgatttcgttagttttattatctgtttacttcctctggggaaggcagactgataaaattatatgggctggtaaatttttggtacattaattgcaagctgcatgacaaaatttgtttttctggcaacaatctgacattattagtggaattccacaccaacagggcttgtgagcttccatttcatcttactgtaacttcaattttatggcaaaaaaaggtacaaagtttaaatacccctttctagtaatgccaaagacatacagtgttttacattctctcctttataggtaacaaaataatgtttagctcagtaagtactgaaataatgagtgaccaatttgaaggatttttagattatttaatctttgcttatgttgctttttcacatgcttaatgatggaaatgaaatgttaaatcaacaaaataagatccagtgtttcataacatttttataagtttggtaaactttagtcccattatatacttttggggacagtgttataaatcagaattttacgacagtttgcagaacactgatttgaaagcttcctatgcaaaatgagaaggggttcaaatatattaattatcattaagtattaaataataggcattagatgtctaatgtgagtataatttcatccaagccatctcagaaagtctaaaaggttggcagggggtcagctgaagacctcactggagtgggtcttaatttttaaaaagtgtctcactacatttaagacatgtgacacattcccattggtaacaattgctcaccatggcattgtctcaaaaaagactatggtggggagggtggcacattcctaatgggatgtacctctccccactccccttgcttgagaagcactactcaaaaatttaccagaccttacaactgtgataaaacttgaatgtgtatgatgaataaggccattcagttaactttacctccctttacccattgaaggggttccttttccattgctcagtttttagaaaataattctcatcttttttctaaagaaatgaatttgtggctggtctgaaggtagtgagttagctcaattgattgttcgcagtcagttatagatcaagctccttgttctactcttcccctcttctcactactgcacttgactagtcttaaaacaaagaaagaacgaatgaatgaatgaatctgtggctggatgcagtggctcatgcctgtaatcccagcactttgggaggctgaagtgggaggactgcttgggcccaagaattcaggaccagtctgggcaacagagccagacactgtctctataaaaaaaagttaaaactagctggttgtggtggtgcacacctgtggtcccagctactgtggagggtgatgtgggaggattgcttgaacccaggagttggatgctgcagtgagctatgattgcgccattgcgctccagactgggcaacagggcaagaccctgcctcaaaaaaaaaaaaaaaagaatttgtaattgttggtaggatgttatgggaaatttagaggtcttctgagtataaagtggtttaaatatttggtctgctgaagtctttctggaagtgttgttccccctgctgccccgcccagtagaaacttgctcatatgagaggttctgaggtaggtgcggtgtagtagaatggcattgtcagatatgttcaagaaacccttcatttgacactattttgtaccttatggtaccctttaacattttttaattaaaaaaaatattttttgagacagggtcttgttctgttgcccaggctggagtgtagtgttgcaatcttggctcactgcaacctctgcctgacaggcttcagtgatctttccacctcagcctcctgagtagctgggactacaggtgcatgccaccaagcctggctaactttttgtagagatagggttttgccatgctgcccaggctggcttagaattcctgaattcaagtgatttgtctgcctcaggctcccaaagtgctgggattacaggcatgagccacactgcacccagtccatgctaccctttttatatgaaacacctattaacacggtacaacaacacttcaaaacatattatttgaatttcggcctctgattttctagtcaacaatccattaaggcaaagacctgtttccaaactcagatgttctccaacttacactaatgtctggttttcttgaactatgtgagagaaaaaaataaacagaatttatttattatcata

SEQ ID NO: 169196 - DNA, 5337 bp, Homo sapiens
  Payload ID: 13305
  Gene Symbol: PAQR5
  Gene Name: progestin and adipoQ receptor family member V
  Uniprot ID: Q9NXK6
  ENST ID: ENST00000395407
  CDS Start-End: 387-1379
gggcccgcgagtccggggtcgccgcagcccgggaggagtgtctggtctccggcctgcctgtgctgtccccgcgccctgtccactggactcccgagacccttggaacccaggacaccattggagaaactgggcattttaccaaggatttgactggaatggcatgcttcctttaaagatgaaagttgacttttagagccaattaaagccctttggggaatctggcctcataccttgtccacacagagttcctgtacaaggttcctgacctgtgggaagcggcacagcaccagctaggcagagacgccccaggccatgttagagctttgagtgaggcctggtaacagggaggcgctgtcacctactggccttgccaatccagctccaagatgctgagcctgaagctccccaggctgtttagcatagaccagataccccaggtgttccatgagcaaggcatcctgttcggctaccgccatccacagagttctgccactgcctgcatcctcagccttttccaaatgaccaatgagactctcaacatttggactcacttgctgcccttctggttctttgcatggaggtttgtgactgcactgtatatgacagacatcaagaatgacagctactcctggcccatgcttgtgtacatgtgcaccagctgcgtgtacccacttgtgtccagctgtgcgcacaccttcagctctatgtccaagaatgcccggcacatttgctacttcctggactatggtgccgtcaacctcttcagcctgggctcagccattgcctactctgcatacacgttcccggatgcgctcatgtgcaccactttccatgactactacgtggccctggctgtactgaacaccatcctcagcacaggcctctcctgctactccaggtttcttgaaatccagaagcccagactctgtaaggtgattcgtgtcctcgcctttgcttatccgtacacctgggactccctccccatcttctacaggctattcctgttcccaggggagagtgcacaaaatgaagccacctcgtaccaccagaagcacatgatcatgaccctcctggcctctttcttgtactctgcacatctgccagaacgcctagcccctggacgctttgactacatcggtcacagtcaccagctgtttcacgtgtgtgtgatcctggccacgcacatgcagatggaagccatacttctggacaagactctgaggaaggaatggctcctggccacctccaagcccttctctttctctcagatagctggagccatacttctgtgcatcatcttcagcctcagcaacataatttatttctcagctgctctgtatcggattcccaagccagaattacataaaaaagaaacatgactcagaccataagcttttcatgccagatgtcaacattaagctgcaacatcctaaccaccataagccggaggtggttacagcttatcatggcctaaaatattcataatggttggtgtcttttgaatgaattcatgtcaaaaatgttattcagctggggaaatttctctaaatgtacactgattctgtgtgtgtgattttaaaaggagaatatggttcaagcaagtccttgttaaggcaaactattgatatttcattaattttaaatttacttaaaatgtggttttaaattctatttaaacatttggattaagcatattactctggagctttgtattattctttaaaaatgaatcttgcttcatttgatgaatttcatgtcacaaagcttctctcaagagctctcgtagtggcctgtcaaccactttcggagaatgagccaggtcagtcactgggaggacctgtgaaagaaagttggtcactgagtgccttggggactggcaaaacattccagaatgaagagagctgtctggggagagcccttcttcccttctccacctagtgaagggagaacagaaggggagtcctctcttcccacaagtccattctgccttcaaagtgtaagttctcatgtcattatggatttggagtttgtcagtttttttcttaaaagtccacagcggggtgtcatgtgttctgttatgttctgttttctggttgccagtttgatctgcaaagtatttttcagtgcaggtaaaatgtgttaaaccataagagttgactgagttaatcccaattggttgtgctcatatgccaccttttaaaccaatggaaattgctatatttggggatgtcatacatttgatattgcttcagcatttcaaatatgttgcaaaatttagtatccatatgcataagaagttaatcaccttgccagtggggtggtcacatatagtgttctcaagctttactgtgaatcagaaacatccagtaagcttgtgacaaatgcagactcctagggaaaaccagggggttctgcttcactaggttaaatgtaggttttgtagaggagatctgcactggagcaagtctcccagatgattctaatacaggagggccagaggccaaacttgaagaactgctggtgttacatgttccaaaaggcattagacctatcagctttgtttcgcctgatctcaagttttagcaactcaccaactaaggcgtaacctcattttatgttccagcgttttctactctgaatagttctaaaacactgagcattttctcatttgttgcattactgattaaagttcagtatttcatggtgttttcagggaacacagaaatgcggatgcaaaacaacttttgacagaggcccatcaaacccagatctgcacttggtaatgacttaggggggcttcctcacaatgcaggatcctctttgctgactcaggaatactccatattttagactactgcctctaccattaactagcccagacatttgaatggccttgtaaacagctcactgtctaatactcgaaggacaagtaacaatttatattggatgagagtggtcaagaaatatgatttcgttagttttattatctgtttacttcctctggggaaggcagactgataaaattatatgggctggtaaatttttggtacattaattgcaagctgcatgacaaaatttgtttttctggcaacaatctgacattattagtggaattccacaccaacagggcttgtgagcttccatttcatcttactgtaacttcaattttatggcaaaaaaaggtacaaagtttaaatacccctttctagtaatgccaaagacatacagtgttttacattctctcctttataggtaacaaaataatgtttagctcagtaagtactgaaataatgagtgaccaatttgaaggatttttagattatttaatctttgcttatgttgctttttcacatgcttaatgatggaaatgaaatgttaaatcaacaaaataagatccagtgtttcataacatttttataagtttggtaaactttagtcccattatatacttttggggacagtgttataaatcagaattttacgacagtttgcagaacactgatttgaaagcttcctatgcaaaatgagaaggggttcaaatatattaattatcattaagtattaaataataggcattagatgtctaatgtgagtataatttcatccaagccatctcagaaagtctaaaaggttggcagggggtcagctgaagacctcactggagtgggtcttaatttttaaaaagtgtctcactacatttaagacatgtgacacattcccattggtaacaattgctcaccatggcattgtctcaaaaaagactatggtggggagggtggcacattcctaatgggatgtacctctccccactccccttgcttgagaagcactactcaaaaatttaccagaccttacaactgtgataaaacttgaatgtgtatgatgaataaggccattcagttaactttacctccctttacccattgaaggggttccttttccattgctcagtttttagaaaataattctcatcttttttctaaagaaatgaatttgtggctggtctgaaggtagtgagttagctcaattgattgttcgcagtcagttatagatcaagctccttgttctactcttcccctcttctcactactgcacttgactagtcttaaaacaaagaaagaacgaatgaatgaatgaatctgtggctggatgcagtggctcatgcctgtaatcccagcactttgggaggctgaagtgggaggactgcttgggcccaagaattcaggaccagtctgggcaacagagccagacactgtctctataaaaaaaagttaaaactagctggttgtggtggtgcacacctgtggtcccagctactgtggagggtgatgtgggaggattgcttgaacccaggagttggatgctgcagtgagctatgattgcgccattgcgctccagactgggcaacagggcaagaccctgcctcaaaaaaaaaaaaaaaagaatttgtaattgttggtaggatgttatgggaaatttagaggtcttctgagtataaagtggtttaaatatttggtctgctgaagtctttctggaagtgttgttccccctgctgccccgcccagtagaaacttgctcatatgagaggttctgaggtaggtgcggtgtagtagaatggcattgtcagatatgttcaagaaacccttcatttgacactattttgtaccttatggtaccctttaacattttttaattaaaaaaaatattttttgagacagggtcttgttctgttgcccaggctggagtgtagtgttgcaatcttggctcactgcaacctctgcctgacaggcttcagtgatctttccacctcagcctcctgagtagctgggactacaggtgcatgccaccaagcctggctaactttttgtagagatagggttttgccatgctgcccaggctggcttagaattcctgaattcaagtgatttgtctgcctcaggctcccaaagtgctgggattacaggcatgagccacactgcacccagtccatgctaccctttttatatgaaacacctattaacacggtacaacaacacttcaaaacatattatttgaatttcggcctctgattttctagtcaacaatccattaaggcaaagacctgtttccaaactcagatgttctccaacttacactaatgtctggttttcttgaactatgtgagagaaaaaaataaacagaatttatttattatcataaagtcatcctgtttgccacttaatttggttatgttttatctaccacactgcaaatatgttaattcaccatgagaaacagatccctgtacacatgtgtatcagtaaatcattcaatgaatagttagtgcttaggatgtat

SEQ ID NO: 169197 - DNA, 728 bp, Homo sapiens
  Payload ID: 13305
  Gene Symbol: PAQR5
  Gene Name: progestin and adipoQ receptor family member V
  ENST ID: ENST00000558684
  CDS Start-End: 348-728
cgcgagtccggggtcgccgcagcccgggaggagtgtctggtctccggcctgcctgtgctgtccccgcgccctgtccactggactcccgagacccttggaacccaggacaccattggagaaactgggcattttaccaaggatttgactggaatggcatgcttcctttaaagatgaaagttgacttttagagccaattaaagccctttggggaatctggcctcataccttgtccacacagagttcctgtacaaggttcctgacctgtggtgttccatgagcaaggcatcctgttcggctaccgccatccacagagttctgccactgcctgcatcctcagccttttccaaatgaccaatgagactctcaacatttggactcacttgctgcccttctggttctttgcatggaggtttgtgactgcactgtatatgacagacatcaagaatgacagctactcctggcccatgcttgtgtacatgtgcaccagctgcgtgtacccacttgtgtccagctgtgcgcacaccttcagctctatgtccaagaatgcccggcacatttgctacttcctggactatggtgccgtcaacctcttcagcctgggctcagccattgcctactctgcatacacgttcccggatgcgctcatgtgcaccactttccatgactactacgtggccctggctgtactgaacaccatcctcagcacaggcctctcctgctactccagg

SEQ ID NO: 169198 - DNA, 2347 bp, Homo sapiens
  Payload ID: 13305
  Gene Symbol: PAQR5
  Gene Name: progestin and adipoQ receptor family member V
  Uniprot ID: Q9NXK6
  ENST ID: ENST00000561153
  CDS Start-End: 673-1665
agcttaacaagaccatggcctctggacccgcgatcagctcgctgtgtggtcctgagcagccacccaacatctctgggccttggattcctacctggcctttcttctggatgcatcatttttgcctttaggtatctggaccattcccccccatggatgataaagtctttgcttcacaccctcaggattaccttaaaggcctgaaaagaacagaggaggagtctgaggaggtgaattccagccgtgctcttgcaggctggctgggcagtgtgctggggaggagagggagcctctggctgggcctcctccaccgggcctggtgtgctgggaacaccccgcattgtcccaaggcctcagatttgactttcaaagggaaaacagctctcctgataaaggacaccattggagaaactgggcattttaccaaggatttgactggaatggcatgcttcctttaaagatgaaagttgacttttagagccaattaaagccctttggggaatctggcctcataccttgtccacacagagttcctgtacaaggttcctgacctgtggtaaggaagcggcacagcaccagctaggcagagacgccccaggccatgttagagctttgagtgaggcctggtaacagggaggcgctgtcacctactggccttgccaatccagctccaagatgctgagcctgaagctccccaggctgtttagcatagaccagataccccaggtgttccatgagcaaggcatcctgttcggctaccgccatccacagagttctgccactgcctgcatcctcagccttttccaaatgaccaatgagactctcaacatttggactcacttgctgcccttctggttctttgcatggaggtttgtgactgcactgtatatgacagacatcaagaatgacagctactcctggcccatgcttgtgtacatgtgcaccagctgcgtgtacccacttgtgtccagctgtgcgcacaccttcagctctatgtccaagaatgcccggcacatttgctacttcctggactatggtgccgtcaacctcttcagcctgggctcagccattgcctactctgcatacacgttcccggatgcgctcatgtgcaccactttccatgactactacgtggccctggctgtactgaacaccatcctcagcacaggcctctcctgctactccaggtttcttgaaatccagaagcccagactctgtaaggtgattcgtgtcctcgcctttgcttatccgtacacctgggactccctccccatcttctacaggctattcctgttcccaggggagagtgcacaaaatgaagccacctcgtaccaccagaagcacatgatcatgaccctcctggcctctttcttgtactctgcacatctgccagaacgcctagcccctggacgctttgactacatcggtcacagtcaccagctgtttcacgtgtgtgtgatcctggccacgcacatgcagatggaagccatacttctggacaagactctgaggaaggaatggctcctggccacctccaagcccttctctttctctcagatagctggagccatacttctgtgcatcatcttcagcctcagcaacataatttatttctcagctgctctgtatcggattcccaagccagaattacataaaaaagaaacatgactcagaccataagcttttcatgccagatgtcaacattaagctgcaacatcctaaccaccataagccggaggtggttacagcttatcatggcctaaaatattcataatggttggtgtcttttgaatgaattcatgtcaaaaatgttattcagctggggaaatttctctaaatgtacactgattctgtgtgtgtgattttaaaaggagaatatggttcaagcaagtccttgttaaggcaaactattgatatttcattaattttaaatttacttaaaatgtggttttaaattctatttaaacatttggattaagcatattactctggagctttgtattattctttaaaaatgaatcttgcttcatttgatgaatttcatgtcacaaagcttctctcaagagctctcgtagtggcctgtcaaccactttcggagaatgagccaggtcagtcactgggaggacctgtgaaagaaagttggtcactgagtgccttggggactggcaaaacattccagaatgaagagagctgtctggggagagcccttcttcccttctccacctagtgaagggagaacagaaggggagtcctctcttcccacaagtccattctgccttcaaagtgtaagttctcatgtcattatggatttggagtttgtcagtttttttcttaaaagtccacagcgggg

SEQ ID NO: 169199 - DNA, 1908 bp, Homo sapiens
  Payload ID: 13306
  Gene Symbol: PAQR6
  Gene Name: progestin and adipoQ receptor family member VI
  Uniprot ID: Q6TCH4
  ENST ID: ENST00000292291
  CDS Start-End: 160-1194
actccccgcccaggcctggcccgcctgcctggccactcttcctccatcagcctggctggcagcagccttggactccgcccgtggagccctgggcctgttgacccaccagcttaggagcacccaccaagctctgggtcaacgtggaggtaccaggccaccatgctcagtctcaagctgccccaacttcttcaagtccaccaggtcccccgggtgttctgggaagatggcatcatgtctggctaccgccgccccaccagctcggctttggactgtgtcctcagctccttccagatgaccaacgagacggtcaacatctggactcacttcctgcccacctggtacttcctgtggcggctcctggcgctggcgggcggccccggcttccgtgcggagccgtaccactggccgctgctggtcttcctgctgcccgcctgcctctaccccttcgcgtcgtgctgcgcgcacaccttcagctccatgtcgccccgcatgcgccacatctgctacttcctcgactacggcgcgctcagcctctacagtctgggctgcgccttcccctatgccgcctactccatgccggcctcctggctgcacggccacctgcaccagttctttgtgcctgccgccgcactcaactccttcctgtgcaccggcctctcctgctactcccgtttcctggagctggaaagccctgggctcagtaaggtcctccgcacaggagccttcgcctatccattcctgttcgacaacctcccactcttttatcggctcgggctgtgctggggcaggggccacggctgtgggcaggaggccctgagcaccagccatggctaccatctcttctgcgcgctgctcactggcttcctcttcgcctcccacctgcctgaaaggctggcaccaggacgctttgattacatcggccacagccaccagttattccacatctgtgcagtgctgggcacccacttccagctggaggcagtgctggctgatatgggatcacgcagagcctggctggccacacaggaacctgccctgggcctggcaggcacagtggccacactggtcttggctgcagctgggaacctactcattattgctgctttcacagccaccctgcttcgggcccccagtacatgccctctgctgcagggtggcccactggaggggggtacccaggccaaacaacagtgaggccccatccctgaccctgtcctggagggggcagaggccaggccccagtgctgacgaggagcccagatttgggcctaatcaggtggggacgcatctcagcctggaaccaacaggggctgaggagagagggcacaggagagagggcagagaagaggaggggtgtctagggggactggcagagtgtgagagggaccgtgagggggctcttgatgggagtggaagaagtgctgagggtctgagaggggagatgcatgcgtgtccaggctgaagatgcccctatattctgtcaaaggttggcggggggaggtgttggggtcctttcatctggctccgtttctggtgcttctggaagtctctgctcagcacagggaagaactaacacgactaacctaggcctaccctgaatgcttcttgctaaccaggccgagaggccacacacttgcccccccatccccacaaaccaggtaatgccagtttgccagcagctatttgcctatagagatgagtctgtcctggtcataactgtgtgctcaaggtgtccaggcttttgggggtgggcctatctgggtgcattatggatggtttggtggattgaggtgtggggaggagggtcctaggctagagggggtatccctagttagactttgggaagccaccttcaacgttttctggaacaaggcaggtacaaataaaaaaataaaactttggaaagca

SEQ ID NO: 169200 - DNA, 2117 bp, Homo sapiens
  Payload ID: 13306
  Gene Symbol: PAQR6
  Gene Name: progestin and adipoQ receptor family member VI
  Uniprot ID: Q6TCH4
  ENST ID: ENST00000335852
  CDS Start-End: 617-1672
ttcctccatcagcctggctggcagcagccttggactccgcccgtggagccctgggcctgttgacccaccagcttaggagcacccaccaagctctgggtaaggaagctcaccttctggggctcttctgggaaaatagaggtcaacgtggaggtaccaggccaccatgctcagtctcaagctgccccaacttcttcaagtccaccaggtcccccgggtgttctgggaagatggcatcatgtctggctaccgccgccccaccagctcggctttggactgtgtcctcagctccttccagatgaccaacgagacggtcaacatctggactcacttcctgcccacctggtgaggggaggctccgccccaggccgcggccttgagctcagagggggtacccaggcgggcagggaccgtccaggcccacgggctgcagcggcagtcgcgggggtccgcggcggcctgagcacgcgcccgccgcaggtacttcctgtggcggctcctggcgctggcgggcggccccggcttccgtgcggagccgtaccactggccgctgctggtcttcctgctgcccgcctgcctctaccccttcgcgtcgtgctgcgcgcacaccttcagctccatgtcgccccgcatgcgccacatctgctacttcctcgactacggcgcgctcagcctctacagtctgggctgcgccttcccctatgccgcctactccatgccggcctcctggctgcacggccacctgcaccagttctttgtgcctgccgccgcactcaactccttcctgtgcaccggcctctcctgctactcccgtttcctggagctggaaagccctgggctcagtaaggtcctccgcacaggagccttcgcctatccattcctgttcgacaacctcccactcttttatcggctcgggctgtgctggggcaggggccacggctgtgggcaggaggccctgagcaccagccatggctaccatctcttctgcgcgctgctcactggcttcctcttcgcctcccacctgcctgaaaggctggcaccaggacgctttgattacatcggtgagggcacgcctggcccggcccgggaagaggcaggggcagatgccttcccagagcacagaatgaactgggccacagccaccagttattccacatctgtgcagtgctgggcacccacttccagctggaggcagtgctggctgatatgggatcacgcagagcctggctggccacacaggaacctgccctgggcctggcaggcacagtggccacactggtcttggctgcagctgggaacctactcattattgctgctttcacagccaccctgcttcgggcccccagtacatgccctctgctgcagggtggcccactggaggggggtacccaggccaaacaacagtgaggccccatccctgaccctgtcctggagggggcagaggccaggccccagtgctgacgaggagcccagatttgggcctaatcaggtggggacgcatctcagcctggaaccaacaggggctgaggagagagggcacaggagagagggcagagaagaggaggggtgtctagggggactggcagagtgtgagagggaccgtgagggggctcttgatgggagtggaagaagtgctgagggtctgagaggggagatgcatgcgtgtccaggctgaagatgcccctatattctgtcaaaggttggcggggggaggtgttggggtcctttcatctggctccgtttctggtgcttctggaagtctctgctcagcacagggaagaactaacacgactaacctaggcctaccctgaatgcttcttgctaaccaggccgagaggccacacacttgcccccccatccccacaaaccaggtaatgccagtttgccagcagctatttgcctatagagatgagtctgtcctggtcataactgtgtgctcaaggtgtccaggcttttgggggtgggcctatctgggtgcattatggatggtttggtggattgaggtgtggggaggagggtcctaggctagagggggtatccctagttagactttgggaagccaccttcaacgttttctggaacaaggcaggtacaaataaaaaaataaaactttggaaagc

SEQ ID NO: 169201 - DNA, 1799 bp, Homo sapiens
  Payload ID: 13306
  Gene Symbol: PAQR6
  Gene Name: progestin and adipoQ receptor family member VI
  ENST ID: ENST00000340183
  CDS Start-End: 1-1092
actcttcctccatcagcctggctggcagcagccttggactccgcccgtggagccctgggcctgttgacccaccagcttaggagcacccaccaagctctgggtgttctgggaagatggcatcatgtctggctaccgccgccccaccagctcggctttggactgtgtcctcagctccttccagatgaccaacgagacggtcaacatctggactcacttcctgcccacctggtgaggggaggctccgccccaggccgcggccttgagctcagagggggtacccaggcgggcagggaccgtccaggcccacgggctgcagcggcagtcgcgggggtccgcggcggcctgagcacgcgcccgccgcaggtacttcctgtggcggctcctggcgctggcgggcggccccggcttccgtgcggagccgtaccactggccgctgctggtcttcctgctgcccgcctgcctctaccccttcgcgtcgtgctgcgcgcacaccttcagctccatgtcgccccgcatgcgccacatctgctacttcctcgactacggcgcgctcagcctctacagtctggtttcctggagctggaaagccctgggctcagtaaggtcctccgcacaggagccttcgcctatccattcctgttcgacaacctcccactcttttatcggctcgggctgtgctggggcaggggccacggctgtgggcaggaggccctgagcaccagccatggctaccatctcttctgcgcgctgctcactggcttcctcttcgcctcccacctgcctgaaaggctggcaccaggacgctttgattacatcggccacagccaccagttattccacatctgtgcagtgctgggcacccacttccagctggaggcagtgctggctgatatgggatcacgcagagcctggctggccacacaggaacctgccctgggcctggcaggcacagtggccacactggtcttggctgcagctgggaacctactcattattgctgctttcacagccaccctgcttcgggcccccagtacatgccctctgctgcagggtggcccactggaggggggtacccaggccaaacaacagtgaggccccatccctgaccctgtcctggagggggcagaggccaggccccagtgctgacgaggagcccagatttgggcctaatcaggtggggacgcatctcagcctggaaccaacaggggctgaggagagagggcacaggagagagggcagagaagaggaggggtgtctagggggactggcagagtgtgagagggaccgtgagggggctcttgatgggagtggaagaagtgctgagggtctgagaggggagatgcatgcgtgtccaggctgaagatgcccctatattctgtcaaaggttggcggggggaggtgttggggtcctttcatctggctccgtttctggtgcttctggaagtctctgctcagcacagggaagaactaacacgactaacctaggcctaccctgaatgcttcttgctaaccaggccgagaggccacacacttgcccccccatccccacaaaccaggtaatgccagtttgccagcagctatttgcctatagagatgagtctgtcctggtcataactgtgtgctcaaggtgtccaggcttttgggggtgggcctatctgggtgcattatggatggtttggtggattgaggtgtggggaggagggtcctaggctagagggggtatccctagttagactttgggaagccaccttcaacgttttctggaacaaggcaggtacaaataaaaaaataaaactttg

SEQ ID NO: 169202 - DNA, 2143 bp, Homo sapiens
  Payload ID: 13306
  Gene Symbol: PAQR6
  Gene Name: progestin and adipoQ receptor family member VI
  Uniprot ID: Q6TCH4
  ENST ID: ENST00000356983
  CDS Start-End: 310-1335
tgttccctggctcccctttgtctccccactccccgcccaggcctggcccgcctgcctggccactcttcctccatcagcctggctggcagcagccttggactccgcccgtggagccctgggcctgttgacccaccagcttaggagcacccaccaagctctggcagggtctccagcacccatctcgggcagaggctgggggagtgactgctggtgcaagccccaaagtgcatgcggcaaaaacatggatgcagagctggtggcaagaagaggggctaagttatagagtcaacgtggaggtaccaggccaccatgctcagtctcaagctgccccaacttcttcaagtccaccaggtgttctgggaagatggcatcatgtctggctaccgccgccccaccagctcggctttggactgtgtcctcagctccttccagatgaccaacgagacggtcaacatctggactcacttcctgcccacctggtacttcctgtggcggctcctggcgctggcgggcggccccggcttccgtgcggagccgtaccactggccgctgctggtcttcctgctgcccgcctgcctctaccccttcgcgtcgtgctgcgcgcacaccttcagctccatgtcgccccgcatgcgccacatctgctacttcctcgactacggcgcgctcagcctctacagtctgggctgcgccttcccctatgccgcctactccatgccggcctcctggctgcacggccacctgcaccagttctttgtgcctgccgccgcactcaactccttcctgtgcaccggcctctcctgctactcccgtttcctggagctggaaagccctgggctcagtaaggtcctccgcacaggagccttcgcctatccattcctgttcgacaacctcccactcttttatcggctcgggctgtgctggggcaggggccacggctgtgggcaggaggccctgagcaccagccatggctaccatctcttctgcgcgctgctcactggcttcctcttcgcctcccacctgcctgaaaggctggcaccaggacgctttgattacatcggccacagccaccagttattccacatctgtgcagtgctgggcacccacttccagctggaggcagtgctggctgatatgggatcacgcagagcctggctggccacacaggaacctgccctgggcctggcaggcacagtggccacactggtcttggctgcagctgggaacctactcattattgctgctttcacagccaccctgcttcgggcccccagtacatgccctctgctgcagggtggcccactggaggggggtacccaggccaaacaacagtgaggccccatccctgaccctgtcctggagggggcagaggccaggccccagtgctgacgaggagcccagatttgggcctaatcaggtggggacgcatctcagcctggaaccaacaggggctgaggagagagggcacaggagagagggcagagaagaggaggggtgtctagggggactggcagagtgtgagagggaccgtgagggggctcttgatgggagtggaagaagtgctgagggtctgagaggggagatgcatgcgtgtccaggctgaagatgcccctatattctgtcaaaggttggcggggggaggtgttggggtcctttcatctggctccgtttctggtgcttctggaagtctctgctcagcacagggaagaactaacacgactaacctaggcctaccctgaatgcttcttgctaaccaggccgagaggccacacacttgcccccccatccccacaaaccaggtaatgccagtttgccagcagctatttgcctatagagatgagtctgtcctggtcataactgtgtgctcaaggtgtccaggcttttgggggtgggcctatctgggtgcattatggatggtttggtggattgaggtgtggggaggagggtcctaggctagagggggtatccctagttagactttgggaagccaccttcaacgttttctggaacaaggcaggtacaaataaaaaaataaaactttggaaagcactttctagaactgaagaaggtaaaacctcctcacccccatcctcctgacacctccctcccacactccataaactggacagactcacaggcccac

SEQ ID NO: 169203 - DNA, 1765 bp, Homo sapiens
  Payload ID: 13306
  Gene Symbol: PAQR6
  Gene Name: progestin and adipoQ receptor family member VI
  Uniprot ID: Q6TCH4
  ENST ID: ENST00000368270
  CDS Start-End: 97-1059
cagcagccttggactccgcccgtggagccctgggcctgttgacccaccagcttaggagcacccaccaagctctgggtgttctgggaagatggcatcatgtctggctaccgccgccccaccagctcggctttggactgtgtcctcagctccttccagatgaccaacgagacggtcaacatctggactcacttcctgcccacctggtacttcctgtggcggctcctggcgctggcgggcggccccggcttccgtgcggagccgtaccactggccgctgctggtcttcctgctgcccgcctgcctctaccccttcgcgtcgtgctgcgcgcacaccttcagctccatgtcgccccgcatgcgccacatctgctacttcctcgactacggcgcgctcagcctctacagtctgggctgcgccttcccctatgccgcctactccatgccggcctcctggctgcacggccacctgcaccagttctttgtgcctgccgccgcactcaactccttcctgtgcaccggcctctcctgctactcccgtttcctggagctggaaagccctgggctcagtaaggtcctccgcacaggagccttcgcctatccattcctgttcgacaacctcccactcttttatcggctcgggctgtgctggggcaggggccacggctgtgggcaggaggccctgagcaccagccatggctaccatctcttctgcgcgctgctcactggcttcctcttcgcctcccacctgcctgaaaggctggcaccaggacgctttgattacatcggccacagccaccagttattccacatctgtgcagtgctgggcacccacttccagctggaggcagtgctggctgatatgggatcacgcagagcctggctggccacacaggaacctgccctgggcctggcaggcacagtggccacactggtcttggctgcagctgggaacctactcattattgctgctttcacagccaccctgcttcgggcccccagtacatgccctctgctgcagggtggcccactggaggggggtacccaggccaaacaacagtgaggccccatccctgaccctgtcctggagggggcagaggccaggccccagtgctgacgaggagcccagatttgggcctaatcaggtggggacgcatctcagcctggaaccaacaggggctgaggagagagggcacaggagagagggcagagaagaggaggggtgtctagggggactggcagagtgtgagagggaccgtgagggggctcttgatgggagtggaagaagtgctgagggtctgagaggggagatgcatgcgtgtccaggctgaagatgcccctatattctgtcaaaggttggcggggggaggtgttggggtcctttcatctggctccgtttctggtgcttctggaagtctctgctcagcacagggaagaactaacacgactaacctaggcctaccctgaatgcttcttgctaaccaggccgagaggccacacacttgcccccccatccccacaaaccaggtaatgccagtttgccagcagctatttgcctatagagatgagtctgtcctggtcataactgtgtgctcaaggtgtccaggcttttgggggtgggcctatctgggtgcattatggatggtttggtggattgaggtgtggggaggagggtcctaggctagagggggtatccctagttagactttgggaagccaccttcaacgttttctggaacaaggcaggtacaaataaaaaaataaaacttt

SEQ ID NO: 169204 - DNA, 1729 bp, Homo sapiens
  Payload ID: 13306
  Gene Symbol: PAQR6
  Gene Name: progestin and adipoQ receptor family member VI
  ENST ID: ENST00000540423
  CDS Start-End: 554-1189
tgttccctggctcccctttgtctccccactccccgcccaggcctggcccgcctgcctggccactcttcctccatcagcctggctggcagcagccttggactccgcccgtggagccctgggcctgttgacccaccagcttaggagcacccaccaagctctgggtgttctgggaagatggcatcatgtctggctaccgccgccccaccagctcggctttggactgtgtcctcagctccttccagatgaccaacgagacggtcaacatctggactcacttcctgcccacctggtacttcctgtggcggctcctggcgctggcgggcggccccggcttccgtgcggagccgtaccactggccgctgctggtcttcctgctgcccgcctgcctctaccccttcgcgtcgtgctgcgcgcacaccttcagctccatgtcgccccgcatgcgccacatctgctacttcctcgactacggcgcgctcagcctctacagtctggctcgggctgtgctggggcaggggccacggctgtgggcaggaggccctgagcaccagccatggctaccatctcttctgcgcgctgctcactggcttcctcttcgcctcccacctgcctgaaaggctggcaccaggacgctttgattacatcggccacagccaccagttattccacatctgtgcagtgctgggcacccacttccagctggaggcagtgctggctgatatgggatcacgcagagcctggctggccacacaggaacctgccctgggcctggcaggcacagtggccacactggtcttggctgcagctgggaacctactcattattgctgctttcacagccaccctgcttcgggcccccagtacatgccctctgctgcagggtggcccactggaggggggtacccaggccaaacaacagtgaggccccatccctgaccctgtcctggagggggcagaggccaggccccagtgctgacgaggagcccagatttgggcctaatcaggtggggacgcatctcagcctggaaccaacaggggctgaggagagagggcacaggagagagggcagagaagaggaggggtgtctagggggactggcagagtgtgagagggaccgtgagggggctcttgatgggagtggaagaagtgctgagggtctgagaggggagatgcatgcgtgtccaggctgaagatgcccctatattctgtcaaaggttggcggggggaggtgttggggtcctttcatctggctccgtttctggtgcttctggaagtctctgctcagcacagggaagaactaacacgactaacctaggcctaccctgaatgcttcttgctaaccaggccgagaggccacacacttgcccccccatccccacaaaccaggtaatgccagtttgccagcagctatttgcctatagagatgagtctgtcctggtcataactgtgtgctcaaggtgtccaggcttttgggggtgggcctatctgggtgcattatggatggtttggtggattgaggtgtggggaggagggtcctaggctagagggggtatccctagttagactttgggaagccaccttcaacgttttctggaacaaggcaggtacaaataaaaaaataaaactttggaaagcactttctagaactgaagaaggtaaaacctcctcacccccatcctcctgacacctccctcccacactccataaactggacagactcacaggcccac

SEQ ID NO: 169205 - DNA, 1599 bp, Homo sapiens
  Payload ID: 13306
  Gene Symbol: PAQR6
  Gene Name: progestin and adipoQ receptor family member VI
  ENST ID: ENST00000613336
  CDS Start-End: 424-1059
tgttccctggctcccctttgtctccccactccccgcccaggcctggcccgcctgcctggccactcttcctccatcagcctggctggcagcagccttggactccgcccgtggagccctgggcctgttgacccaccagcttaggagcacccaccaagctctgggtcaacgtggaggtaccaggccaccatgctcagtctcaagctgccccaacttcttcaagtccaccaggtcccccgggtgttctgggaagatggcatcatgtctggctaccgccgccccaccagctcggctttggactgtgtcctcagctccttccagatgaccaacgagacggtcaacatctggactcacttcctgcccacctgctcgggctgtgctggggcaggggccacggctgtgggcaggaggccctgagcaccagccatggctaccatctcttctgcgcgctgctcactggcttcctcttcgcctcccacctgcctgaaaggctggcaccaggacgctttgattacatcggccacagccaccagttattccacatctgtgcagtgctgggcacccacttccagctggaggcagtgctggctgatatgggatcacgcagagcctggctggccacacaggaacctgccctgggcctggcaggcacagtggccacactggtcttggctgcagctgggaacctactcattattgctgctttcacagccaccctgcttcgggcccccagtacatgccctctgctgcagggtggcccactggaggggggtacccaggccaaacaacagtgaggccccatccctgaccctgtcctggagggggcagaggccaggccccagtgctgacgaggagcccagatttgggcctaatcaggtggggacgcatctcagcctggaaccaacaggggctgaggagagagggcacaggagagagggcagagaagaggaggggtgtctagggggactggcagagtgtgagagggaccgtgagggggctcttgatgggagtggaagaagtgctgagggtctgagaggggagatgcatgcgtgtccaggctgaagatgcccctatattctgtcaaaggttggcggggggaggtgttggggtcctttcatctggctccgtttctggtgcttctggaagtctctgctcagcacagggaagaactaacacgactaacctaggcctaccctgaatgcttcttgctaaccaggccgagaggccacacacttgcccccccatccccacaaaccaggtaatgccagtttgccagcagctatttgcctatagagatgagtctgtcctggtcataactgtgtgctcaaggtgtccaggcttttgggggtgggcctatctgggtgcattatggatggtttggtggattgaggtgtggggaggagggtcctaggctagagggggtatccctagttagactttgggaagccaccttcaacgttttctggaacaaggcaggtacaaataaaaaaataaaactttggaaagcactttctagaactgaagaaggtaaaacctcctcacccccatcctcctgacacctccctcccacactccataaactggacagactcacaggcccac

SEQ ID NO: 169206 - DNA, 2037 bp, Homo sapiens
  Payload ID: 13306
  Gene Symbol: PAQR6
  Gene Name: progestin and adipoQ receptor family member VI
  ENST ID: ENST00000612424
  CDS Start-End: 646-1497
tgttccctggctcccctttgtctccccactccccgcccaggcctggcccgcctgcctggccactcttcctccatcagcctggctggcagcagccttggactccgcccgtggagccctgggcctgttgacccaccagcttaggagcacccaccaagctctgggtgttctgggaagatggcatcatgtctggctaccgccgccccaccagctcggctttggactgtgtcctcagctccttccagatgaccaacgagacggtcaacatctggactcacttcctgcccacctggtgaggggaggctccgccccaggccgcggccttgagctcagagggggtacccaggcgggcagggaccgtccaggcccacgggctgcagcggcagtcgcgggggtccgcggcggcctgagcacgcgcccgccgcaggtacttcctgtggcggctcctggcgctggcgggcggccccggcttccgtgcggagccgtaccactggccgctgctggtcttcctgctgcccgcctgcctctaccccttcgcgtcgtgctgcgcgcacaccttcagctccatgtcgccccgcatgcgccacatctgctacttcctcgactacggcgcgctcagcctctacagtctgggctgcgccttcccctatgccgcctactccatgccggcctcctggctgcacggccacctgcaccagttctttgtgcctgccgccgcactcaactccttcctgtgcaccggcctctcctgctactcccgtttcctggagctggaaagccctgggctcagtaaggtcctccgcacaggagccttcgcctatccattcctgttcgacaacctcccactcttttatcgggctggcaccaggacgctttgattacatcggtgagggcacgcctggcccggcccgggaagaggcaggggcagatgccttcccagagcacagaatgaactgggccacagccaccagttattccacatctgtgcagtgctgggcacccacttccagctggaggcagtgctggctgatatgggatcacgcagagcctggctggccacacaggaacctgccctgggcctggcaggcacagtggccacactggtcttggctgcagctgggaacctactcattattgctgctttcacagccaccctgcttcgggcccccagtacatgccctctgctgcagggtggcccactggaggggggtacccaggccaaacaacagtgaggccccatccctgaccctgtcctggagggggcagaggccaggccccagtgctgacgaggagcccagatttgggcctaatcaggtggggacgcatctcagcctggaaccaacaggggctgaggagagagggcacaggagagagggcagagaagaggaggggtgtctagggggactggcagagtgtgagagggaccgtgagggggctcttgatgggagtggaagaagtgctgagggtctgagaggggagatgcatgcgtgtccaggctgaagatgcccctatattctgtcaaaggttggcggggggaggtgttggggtcctttcatctggctccgtttctggtgcttctggaagtctctgctcagcacagggaagaactaacacgactaacctaggcctaccctgaatgcttcttgctaaccaggccgagaggccacacacttgcccccccatccccacaaaccaggtaatgccagtttgccagcagctatttgcctatagagatgagtctgtcctggtcataactgtgtgctcaaggtgtccaggcttttgggggtgggcctatctgggtgcattatggatggtttggtggattgaggtgtggggaggagggtcctaggctagagggggtatccctagttagactttgggaagccaccttcaacgttttctggaacaaggcaggtacaaataaaaaaataaaactttggaaagcactttctagaactgaagaaggtaaaacctcctcacccccatcctcctgacacctccctcccacactccataaactggacagactcacaggcccac

SEQ ID NO: 169207 - DNA, 1961 bp, Homo sapiens
  Payload ID: 13306
  Gene Symbol: PAQR6
  Gene Name: progestin and adipoQ receptor family member VI
  ENST ID: ENST00000623241
  CDS Start-End: 786-1421
tgttccctggctcccctttgtctccccactccccgcccaggcctggcccgcctgcctggccactcttcctccatcagcctggctggcagcagccttggactccgcccgtggagccctgggcctgttgacccaccagcttaggagcacccaccaagctctgggtgttctgggaagatggcatcatgtctggctaccgccgccccaccagctcggctttggactgtgtcctcagctccttccagatgaccaacgagacggtcaacatctggactcacttcctgcccacctggtgaggggaggctccgccccaggccgcggccttgagctcagagggggtacccaggcgggcagggaccgtccaggcccacgggctgcagcggcagtcgcgggggtccgcggcggcctgagcacgcgcccgccgcaggtacttcctgtggcggctcctggcgctggcgggcggccccggcttccgtgcggagccgtaccactggccgctgctggtcttcctgctgcccgcctgcctctaccccttcgcgtcgtgctgcgcgcacaccttcagctccatgtcgccccgcatgcgccacatctgctacttcctcgactacggcgcgctcagcctctacagtctggtttcctggagctggaaagccctgggctcagtaaggtcctccgcacaggagccttcgcctatccattcctgttcgacaacctcccactcttttatcggctcgggctgtgctggggcaggggccacggctgtgggcaggaggccctgagcaccagccatggctaccatctcttctgcgcgctgctcactggcttcctcttcgcctcccacctgcctgaaaggctggcaccaggacgctttgattacatcggccacagccaccagttattccacatctgtgcagtgctgggcacccacttccagctggaggcagtgctggctgatatgggatcacgcagagcctggctggccacacaggaacctgccctgggcctggcaggcacagtggccacactggtcttggctgcagctgggaacctactcattattgctgctttcacagccaccctgcttcgggcccccagtacatgccctctgctgcagggtggcccactggaggggggtacccaggccaaacaacagtgaggccccatccctgaccctgtcctggagggggcagaggccaggccccagtgctgacgaggagcccagatttgggcctaatcaggtggggacgcatctcagcctggaaccaacaggggctgaggagagagggcacaggagagagggcagagaagaggaggggtgtctagggggactggcagagtgtgagagggaccgtgagggggctcttgatgggagtggaagaagtgctgagggtctgagaggggagatgcatgcgtgtccaggctgaagatgcccctatattctgtcaaaggttggcggggggaggtgttggggtcctttcatctggctccgtttctggtgcttctggaagtctctgctcagcacagggaagaactaacacgactaacctaggcctaccctgaatgcttcttgctaaccaggccgagaggccacacacttgcccccccatccccacaaaccaggtaatgccagtttgccagcagctatttgcctatagagatgagtctgtcctggtcataactgtgtgctcaaggtgtccaggcttttgggggtgggcctatctgggtgcattatggatggtttggtggattgaggtgtggggaggagggtcctaggctagagggggtatccctagttagactttgggaagccaccttcaacgttttctggaacaaggcaggtacaaataaaaaaataaaactttggaaagcactttctagaactgaagaaggtaaaacctcctcacccccatcctcctgacacctccctcccacactccataaactggacagactcacaggcccac

SEQ ID NO: 169208 - DNA, 3297 bp, Homo sapiens
  Payload ID: 13307
  Gene Symbol: PAQR7
  Gene Name: progestin and adipoQ receptor family member VII
  Uniprot ID: Q86WK9
  ENST ID: ENST00000374296
  CDS Start-End: 668-1708
tgaattcaaaacagttactctgaatggtctttgctaagaacaatttaatgattaagtaaggtcagtgtccttggaagtccaaactctagccagatttccctggtctacacccctagggataaggtaaatgtttaagcacacagtgaacttcctgaggcccccaaatctaatggaactagctattgagggctaaaagaggatggtttttttagaaaactcgaagcaaatctctcaggctggggatatttcaaagactactactattattattaataacaattgcaatatttgttgagtccctaaatgaagctaaaactttgttctaataaatttaatctttacagcaacctatgaggtagataatattgtcattcccatgagggagctaaggatcagagaaggtaagtcacttgtctaaggtcacatagctagcatgttatgcaatcaggagtcaaacctggtttgtctgaatctgaagtccatctgctctgtgcacttttataccgtctgctttttcctttattcctaaccttcttccattctgattcccactgagtagtggacaggaaccactgaagtttgcctgacaccatcaaccaggccctagtcacctggctttgcctttgccctgctgtgtgatcttagctccctgcccaggcccacagccatggccatggcccagaaactcagccacctcctgccgagtctgcggcaggtcatccaggagcctcagctatctctgcagccagagcctgtcttcacggtggatcgagctgaggtgccgccgctcttctggaagccgtacatctatgcgggctaccggccgctgcatcagacctggcgcttctatttccgcacgctgttccagcagcacaacgaggccgtgaatgtctggacccacctgctggcggccctggtactgctgctgcggctggccctctttgtggagaccgtggacttctggggagacccacacgccctgcccctcttcatcattgtccttgcctctttcacctacctctccttcagtgccttggctcacctcctgcaggccaagtctgagttctggcattacagcttcttcttcctggactatgtgggggtggccgtgtaccagtttggcagtgccttggcacacttctactatgctatcgagcccgcctggcatgcccaggtgcaggctgtttttctgcccatggctgcctttctcgcctggctttcctgcattggctcctgctataacaagtacatccagaaaccaggcctgctgggccgcacatgccaggaggtgccctccgtcctggcctacgcactggacattagtcctgtggtgcatcgtatcttcgtgtcctccgaccccaccacggatgatccagctcttctctaccacaagtgccaggtggtcttctttctgctggctgctgccttcttctctaccttcatgcccgagcgctggttccctggcagctgccatgtcttcgggcagggccaccaacttttccacatcttcttggtgctgtgcacgctggctcagctggaggctgtggcactggactatgaggcccgacggcccatctatgagcctctgcacacgcactggcctcacaacttttctggcctcttcctgctcacggtgggcagcagcatcctcactgcattcctcctgagccagctggtacagcgcaaacttgatcagaagaccaagtgaagggggatggcatctggtagggagggaggtatagttgggggacaggggtctgggtttggctccaggtgggaacaaggcctggtaaagttgtttgtgtctggcccacagtgactctctgtgcacgactcaactgccaagggcatcactggccaattcttggatttagggattggctaggagttgctggggtccactcctgggcctgccccagctccttgcccagggagagggaaagagttaacggtgtgggccactccagcttgcccttccactgccactcactggggtgaggctgggggtcagcttggtgaggattggggcttctagattgtctaggcaggaggtgaaacttaggccagagtcagatttgagctgagccaggggaggccttggcaacctacttctactcagatttcattgctggatgcggaaggggtaggcccaaaatatatacaggatcttactgtcccttgaagcccagccacaagtgttggagctgcagagagaccccaaaggtagtagattgtgccagatacaaatgggtcccatccagtgcttcatactccttcagtcactatcccagacagtgagccccagatctcctagctctggcttctgtgtcccacacggcctgttcccagcttctctcctggttcccttgttacggattcatttatccattcagtgtttcctgggcctctgctcagaggcaggtcaccactgggccctgtggatcaatgcaagatgacaaaggctttttttttttttttttttttttttttttttgaggagtttcgctcttgttggctaggctggagtaaaatggtgcgatctcggctcactgcacctccgcctcccaggttcaagcgattttcctgcctcagcctcccgagtagctggggttacaggcatgcaccaccatgcctggctaattttctgtatttttagtagagacggggtttctccatgttggtcaggctggtcttgaactcctgacctcaggtgatctgcccgtctcggcctcccaaagtgctgggattaccggcatgagccactgcgcctggccgacaaaggctttgatatcagaatgaactgtcaagggaggtgctggagagggattaacctgtgctgcctgggaccctcagggtcttaggttggggagtgtgaataggagtttgcagatggagaataggaagggcattccaggcagagggaaacctgtgcagagaccaagaggtgtggaaggaaaagtggggttggggctgggtggtctggattatggcctggatgcaataaagtactgtgacagtagccacctctttgttttttgtctcctgtttccgggaggggcccctgctcacattactggaggttttccggaggaagctggggcccctgggagtggacacagggtgcagggagcagttcttgttttatctttgctgggggatggggttggggccttatataccatatctatatatacaaaatttgtttggcaagggagtgggcggcagttttattactaaagttttataagtagttaaaataatgtgtttaaaatatgataatcccactttatgatctga

SEQ ID NO: 169209 - DNA, 4655 bp, Homo sapiens
  Payload ID: 13308
  Gene Symbol: PAQR8
  Gene Name: progestin and adipoQ receptor family member VIII
  Uniprot ID: Q8TEZ7
  ENST ID: ENST00000360726
  CDS Start-End: 178-1242
cccgatgttgagtctccgaatccaagcccggaaggggggacgacggggtctcttgcctgctgtgtactgcttttactgccagaaatgttctcctcacctgggagccagttggctgccaacactgagttgcataccctgtcctgagggcgcggcacggagtgcatgcgggccgctgccatgacgaccgccatcttggagcgcctgagcaccctgtcggtcagcgggcagcagctgcgccgcctgcccaagatcctggaggatgggcttcccaagatgccttgcactgtcccagaaacggatgtgccccagctcttccgggagccttacatccgcaccggctaccgccccacggggcacgagtggcgctactacttcttcagcctctttcagaaacacaacgaggtggtcaacgtctggacccatttactggcagccctggccgtcctcttgcgattctgggcctttgccgaggctgaggccttgccatgggcgtctacccactccctgcctctgctcctcttcatcctgtcgtcaatcacttacctcacctgcagccttctggcccacctgctgcagtccaagtcagagctctcccactacaccttctactttgtggactatgttggcgtgagcgtttaccaatatggcagtgctttggctcatttcttctacagctctgaccaggcctggtatgaccggttctggcttttcttcttgccagcagctgccttctgtggctggttatcttgtgctggctgttgctatgccaaatatcgttaccggaggccttatccagtcatgaggaagatctgtcaagtggtgccagcaggtctggcttttatcctagacatcagccctgtggcacaccgtgtggcgctctgtcacctggctggctgccaggagcaagcagcctggtaccacaccctccagatcctcttcttcctggttagcgcttatttcttctcctgccccgtgcctgagaagtacttcccgggttcctgtgacatcgtgggccatgggcatcagatcttccatgcatttctgtccatctgtacgctctcccagctggaggccatcctcctggactaccaggggcggcaggagatcttcctgcagcgccatggacccctatctgtccacatggcctgcctctccttcttcttcctggctgcctgcagtgctgccaccgcagcccttctgaggcacaaagtcaaggccagactgaccaagaaagattcctgaggctggcaagtggggcaacgtgtggaggaagcccctcataatttggagaaaacttgatacaatagaagctgacttttaaggcattggcttttaaattaatacatatatccaaggatatgttatagctgcagtgtttgaaagccaaaggatttaagagttttgttgttgttaataaaaggaatactccttttccttttggatcatagcttaacaaggcacaggaagggaagggatcttgactaagattcatgagacattgaattaaggagaatcatcttcatgcctgaaaatttagcaaaattccgactatggcctccaggggcaattcctaaaagctgaatggataataaaattggactggaaagtaagtaggtggctggtcctcaccctgttggaatggctatcctactatgctgttctttggtaatggaataaattgacccaaggaccgaatttcatttggatttcaaattgtccagagtggaaaagccttcaagatgacatgatgaattactcagttcatctgatttctggtccctcctttctcgacaactataatactaacccttttctcaggataactgtctacacctggcagttttctctgacgtgctgttcactcacatccctaccttgcatggtaatataaaggactaggaagcagtcatacttccaggaaatgcttggattcatgtggacattcaggaagcttattctcatataatactaatctaaacagtactagaaattacagtgccaagagccaccaggaggcccagccaataagcatagatactatatggtatcatgggacccatctattttttaccagtggactacaggattacttgagagttatcagggctgcctaacagaccaggagatctgggggttgcaccagggaatcgccatatttgaccagcatgttttaaaagctcttggtaggattagttggttctaaggatccctctagggacctcattatttcaagaggaacccaaagtccagcctcctacatagatgctgccccacgaaggacccacaaaactaacctagttcagggttctcaggcaggcagttctgcttcagcttagagcagaacccataaaatactcaagtactgggataggcaagcatgtgtgtttactgtggattggtccctgaaggctcctttgggtgagaacatgtgaaccaggcaccctggtttgtttggagcattgctgcccagaagcttctatgggataggtggtgcttgggattgatgtgttgtggccatgcagccctccctgaggattgacttctgcactaatccagtgaaggaggctgtgtcaaaagaagggctcagaagccctcttttcagaggcaatgattcctgtcagtatgaggtcccttagttactaaaaagggacatgatttaactccagtttgatgaacctcctccgagtttactttattgtcttcaaatcttttgttttcttcctttttgtgagatttgtgggttttgtgccttataaatggaaatgtatgaacacaatatatgctcatgtagaattttctgttctgggttattgggataagaaaaaatatatattgctcttcaactagtgaatgaaagaaacttcagaaagctagaattgcttatcaatcaaaagactttctcaatctattttggccacaaacaaacatattcaactgaagctttccaataatctttatatcaagaaagcatgcgtcttgtcagctacattgttttcttagatggatttctcctgttaatcctcaaatatctgaacttctgtgttacccaagtgtcttatacaagcttctggtgtctaggacaaatttatggcaaataaaattagcaaaactgaactgggttgaactgaacaagaggatgggggaattgtgcaaatacgttgttagtagaaggtcaatttaaaatagggactagaaattatttgaagttttctttattacggattcaaagacttattttgaaagttggaaggagaagggagggaagagagcagaagggaagaaggtgtaagtcaagctcttgaatataactggtggtattgtgggcagagatctttagttcaaatccacgtattttttaaaagagagaaccggaggtagagcaatgatcagatgggtgcacagaccagtgccaatctgaacattgttaatggcctgtgacatgatgagcacaggaacaggcatgaagatattgccatacaattttaatttatacaagtattggcccctcaagtggttggaaattttttttttaatctctttttctgagacagggtcttactctgtcgcccaggctggagtgcagtgatgcaatcacggctcactgcagcctcgacctccccagctcaagcaatcctcccacctcagcctcctaagtacctggtactacaggcgcgtgccaccacacctggctaatttttgcattttttgtagagacagggttttgccacgttgcttaggctggtcttgaactcctgaactcaagtgatccgcccacctcagcctcccaaagtgttgggattacagacattagccatcacgcctgccctagaaacagttttttaataggagatatttgagaggcattgaggtaggagactctatgacatgccctcagaatatcagaatcttcttagaaataaactaggaaatgcagatgtttttaactactcagacttttgaggaattaatccttttaaaacatttttgttaaagttagtgtatcagtaagaaacagacctagtttaaaaggaataatcaacaattttataaaggagatggcttattcaaccatagcccctccaacatatctactggaaattctgctggttaactttatctctctctctcttaatttagactttcaacctatgaaaatgtaaatacctttgaaaaaactaaactatcagtcatttacatcctctcatgaatgaaatgcagtgtagggagaggagatggcaggacacagcaaacaggacacatttgcctgcttctctcttgcctaattcttcctgacctgtatttactgatgcttaataatacttgtaagactctaggggttcatttcccatttcagcggaaagtacttcactcaacaacaatattctcaagagtcttctactggaagctagaaagaaataggaatttaagtccatagaatgaaggtagttattcctgcctgtgttgcccacctgttcacaaaaagtacctttatgcttgaaaacattaggttctttggttactgcactgtagtttcaaatggatcctccagatggcattcatgtcttactcagaaagggcactgccattgtccccaaggcttctgtctactaattctattggtcttgtgttttgcttgcttggcaaaaaaaaaaaaa

SEQ ID NO: 169210 - DNA, 4738 bp, Homo sapiens
  Payload ID: 13308
  Gene Symbol: PAQR8
  Gene Name: progestin and adipoQ receptor family member VIII
  Uniprot ID: Q8TEZ7
  ENST ID: ENST00000442253
  CDS Start-End: 175-1239
cccgagccgagcccgccgcggtcacagccacccgcgggaagctcgtggccgggaccccgaggcgggagcgcgggctgggccgggctgggctacgcgcacgggctcggccgccgcccctgccggttgcataccctgtcctgagggcgcggcacggagtgcatgcgggccgctgccatgacgaccgccatcttggagcgcctgagcaccctgtcggtcagcgggcagcagctgcgccgcctgcccaagatcctggaggatgggcttcccaagatgccttgcactgtcccagaaacggatgtgccccagctcttccgggagccttacatccgcaccggctaccgccccacggggcacgagtggcgctactacttcttcagcctctttcagaaacacaacgaggtggtcaacgtctggacccatttactggcagccctggccgtcctcttgcgattctgggcctttgccgaggctgaggccttgccatgggcgtctacccactccctgcctctgctcctcttcatcctgtcgtcaatcacttacctcacctgcagccttctggcccacctgctgcagtccaagtcagagctctcccactacaccttctactttgtggactatgttggcgtgagcgtttaccaatatggcagtgctttggctcatttcttctacagctctgaccaggcctggtatgaccggttctggcttttcttcttgccagcagctgccttctgtggctggttatcttgtgctggctgttgctatgccaaatatcgttaccggaggccttatccagtcatgaggaagatctgtcaagtggtgccagcaggtctggcttttatcctagacatcagccctgtggcacaccgtgtggcgctctgtcacctggctggctgccaggagcaagcagcctggtaccacaccctccagatcctcttcttcctggttagcgcttatttcttctcctgccccgtgcctgagaagtacttcccgggttcctgtgacatcgtgggccatgggcatcagatcttccatgcatttctgtccatctgtacgctctcccagctggaggccatcctcctggactaccaggggcggcaggagatcttcctgcagcgccatggacccctatctgtccacatggcctgcctctccttcttcttcctggctgcctgcagtgctgccaccgcagcccttctgaggcacaaagtcaaggccagactgaccaagaaagattcctgaggctggcaagtggggcaacgtgtggaggaagcccctcataatttggagaaaacttgatacaatagaagctgacttttaaggcattggcttttaaattaatacatatatccaaggatatgttatagctgcagtgtttgaaagccaaaggatttaagagttttgttgttgttaataaaaggaatactccttttccttttggatcatagcttaacaaggcacaggaagggaagggatcttgactaagattcatgagacattgaattaaggagaatcatcttcatgcctgaaaatttagcaaaattccgactatggcctccaggggcaattcctaaaagctgaatggataataaaattggactggaaagtaagtaggtggctggtcctcaccctgttggaatggctatcctactatgctgttctttggtaatggaataaattgacccaaggaccgaatttcatttggatttcaaattgtccagagtggaaaagccttcaagatgacatgatgaattactcagttcatctgatttctggtccctcctttctcgacaactataatactaacccttttctcaggataactgtctacacctggcagttttctctgacgtgctgttcactcacatccctaccttgcatggtaatataaaggactaggaagcagtcatacttccaggaaatgcttggattcatgtggacattcaggaagcttattctcatataatactaatctaaacagtactagaaattacagtgccaagagccaccaggaggcccagccaataagcatagatactatatggtatcatgggacccatctattttttaccagtggactacaggattacttgagagttatcagggctgcctaacagaccaggagatctgggggttgcaccagggaatcgccatatttgaccagcatgttttaaaagctcttggtaggattagttggttctaaggatccctctagggacctcattatttcaagaggaacccaaagtccagcctcctacatagatgctgccccacgaaggacccacaaaactaacctagttcagggttctcaggcaggcagttctgcttcagcttagagcagaacccataaaatactcaagtactgggataggcaagcatgtgtgtttactgtggattggtccctgaaggctcctttgggtgagaacatgtgaaccaggcaccctggtttgtttggagcattgctgcccagaagcttctatgggataggtggtgcttgggattgatgtgttgtggccatgcagccctccctgaggattgacttctgcactaatccagtgaaggaggctgtgtcaaaagaagggctcagaagccctcttttcagaggcaatgattcctgtcagtatgaggtcccttagttactaaaaagggacatgatttaactccagtttgatgaacctcctccgagtttactttattgtcttcaaatcttttgttttcttcctttttgtgagatttgtgggttttgtgccttataaatggaaatgtatgaacacaatatatgctcatgtagaattttctgttctgggttattgggataagaaaaaatatatattgctcttcaactagtgaatgaaagaaacttcagaaagctagaattgcttatcaatcaaaagactttctcaatctattttggccacaaacaaacatattcaactgaagctttccaataatctttatatcaagaaagcatgcgtcttgtcagctacattgttttcttagatggatttctcctgttaatcctcaaatatctgaacttctgtgttacccaagtgtcttatacaagcttctggtgtctaggacaaatttatggcaaataaaattagcaaaactgaactgggttgaactgaacaagaggatgggggaattgtgcaaatacgttgttagtagaaggtcaatttaaaatagggactagaaattatttgaagttttctttattacggattcaaagacttattttgaaagttggaaggagaagggagggaagagagcagaagggaagaaggtgtaagtcaagctcttgaatataactggtggtattgtgggcagagatctttagttcaaatccacgtattttttaaaagagagaaccggaggtagagcaatgatcagatgggtgcacagaccagtgccaatctgaacattgttaatggcctgtgacatgatgagcacaggaacaggcatgaagatattgccatacaattttaatttatacaagtattggcccctcaagtggttggaaattttttttttaatctctttttctgagacagggtcttactctgtcgcccaggctggagtgcagtgatgcaatcacggctcactgcagcctcgacctccccagctcaagcaatcctcccacctcagcctcctaagtacctggtactacaggcgcgtgccaccacacctggctaatttttgcattttttgtagagacagggttttgccacgttgcttaggctggtcttgaactcctgaactcaagtgatccgcccacctcagcctcccaaagtgttgggattacagacattagccatcacgcctgccctagaaacagttttttaataggagatatttgagaggcattgaggtaggagactctatgacatgccctcagaatatcagaatcttcttagaaataaactaggaaatgcagatgtttttaactactcagacttttgaggaattaatccttttaaaacatttttgttaaagttagtgtatcagtaagaaacagacctagtttaaaaggaataatcaacaattttataaaggagatggcttattcaaccatagcccctccaacatatctactggaaattctgctggttaactttatctctctctctcttaatttagactttcaacctatgaaaatgtaaatacctttgaaaaaactaaactatcagtcatttacatcctctcatgaatgaaatgcagtgtagggagaggagatggcaggacacagcaaacaggacacatttgcctgcttctctcttgcctaattcttcctgacctgtatttactgatgcttaataatacttgtaagactctaggggttcatttcccatttcagcggaaagtacttcactcaacaacaatattctcaagagtcttctactggaagctagaaagaaataggaatttaagtccatagaatgaaggtagttattcctgcctgtgttgcccacctgttcacaaaaagtacctttatgcttgaaaacattaggttctttggttactgcactgtagtttcaaatggatcctccagatggcattcatgtcttactcagaaagggcactgccattgtccccaaggcttctgtctactaattctattggtcttgtgttttgcttgcttggcaaaaaaaaaaaaaaaaaaaaaaaaaaaaaaaatggagctattttctgtctatataaatctacttatatgaataaccattaaagtgattttgtatatgca

SEQ ID NO: 169211 - DNA, 582 bp, Homo sapiens
  Payload ID: 13308
  Gene Symbol: PAQR8
  Gene Name: progestin and adipoQ receptor family member VIII
  ENST ID: ENST00000512121
  CDS Start-End: 247-582
aattgatcatccaacttcttaactgtctttttctcatggtaaaataccgagaacattgtgggtgaggagcaagtcgggaggtggaacccacccccgcaccctgcctccaatagattgtatgtgtgggtcgctattgctgggacccacgaaggctgtggattgaggacacagggtagaagtgggatcttctgcaggttgcataccctgtcctgagggcgcggcacggagtgcatgcgggccgctgccatgacgaccgccatcttggagcgcctgagcaccctgtcggtcagcgggcagcagctgcgccgcctgcccaagatcctggaggatgggcttcccaagatgccttgcactgtcccagaaacggatgtgccccagctcttccgggagccttacatccgcaccggctaccgccccacggggcacgagtggcgctactacttcttcagcctctttcagaaacacaacgaggtggtcaacgtctggacccatttactggcagccctggccgtcctcttgcgattctgggcctttgccgaggctgaggccttgccatgggcgtctacccactccctgcctctg

SEQ ID NO: 169212 - DNA, 2114 bp, Homo sapiens
  Payload ID: 13309
  Gene Symbol: PDCD1
  Gene Name: programmed cell death 1
  Uniprot ID: Q15116
  ENST ID: ENST00000334409
  CDS Start-End: 71-937
acagtttcccttccgctcacctccgcctgagcagtggagaaggcggcactctggtggggctgctccaggcatgcagatcccacaggcgccctggccagtcgtctgggcggtgctacaactgggctggcggccaggatggttcttagactccccagacaggccctggaacccccccaccttctccccagccctgctcgtggtgaccgaaggggacaacgccaccttcacctgcagcttctccaacacatcggagagcttcgtgctaaactggtaccgcatgagccccagcaaccagacggacaagctggccgccttccccgaggaccgcagccagcccggccaggactgccgcttccgtgtcacacaactgcccaacgggcgtgacttccacatgagcgtggtcagggcccggcgcaatgacagcggcacctacctctgtggggccatctccctggcccccaaggcgcagatcaaagagagcctgcgggcagagctcagggtgacagagagaagggcagaagtgcccacagcccaccccagcccctcacccaggccagccggccagttccaaaccctggtggttggtgtcgtgggcggcctgctgggcagcctggtgctgctagtctgggtcctggccgtcatctgctcccgggccgcacgagggacaataggagccaggcgcaccggccagcccctgaaggaggacccctcagccgtgcctgtgttctctgtggactatggggagctggatttccagtggcgagagaagaccccggagccccccgtgccctgtgtccctgagcagacggagtatgccaccattgtctttcctagcggaatgggcacctcatcccccgcccgcaggggctcagctgacggccctcggagtgcccagccactgaggcctgaggatggacactgctcttggcccctctgaccggcttccttggccaccagtgttctgcagaccctccaccatgagcccgggtcagcgcatttcctcaggagaagcaggcagggtgcaggccattgcaggccgtccaggggctgagctgcctgggggcgaccggggctccagcctgcacctgcaccaggcacagccccaccacaggactcatgtctcaatgcccacagtgagcccaggcagcaggtgtcaccgtcccctacagggagggccagatgcagtcactgcttcaggtcctgccagcacagagctgcctgcgtccagctccctgaatctctgctgctgctgctgctgctgctgctgctgcctgcggcccggggctgaaggcgccgtggccctgcctgacgccccggagcctcctgcctgaacttgggggctggttggagatggccttggagcagccaaggtgcccctggcagtggcatcccgaaacgccctggacgcagggcccaagactgggcacaggagtgggaggtacatggggctggggactccccaggagttatctgctccctgcaggcctagagaagtttcagggaaggtcagaagagctcctggctgtggtgggcagggcaggaaacccctccacctttacacatgcccaggcagcacctcaggccctttgtggggcagggaagctgaggcagtaagcgggcaggcagagctggaggcctttcaggcccagccagcactctggcctcctgccgccgcattccaccccagcccctcacaccactcgggagagggacatcctacggtcccaaggtcaggagggcagggctggggttgactcaggcccctcccagctgtggccacctgggtgttgggagggcagaagtgcaggcacctagggccccccatgtgcccaccctgggagctctccttggaacccattcctgaaattatttaaaggggttggccgggctcccaccagggcctgggtgggaaggtacaggcgttcccccggggcctagtacccccgccgtggcctatccactcctcacatccacacactgcacccccactcctggggcagggccaccagcatccaggcggccagcaggcacctgagtggctgggacaagggatcccccttccctgtggttctattatattataattataattaaatatgagagcatgctaagga

SEQ ID NO: 169213 - DNA, 366 bp, Homo sapiens
  Payload ID: 13309
  Gene Symbol: PDCD1
  Gene Name: programmed cell death 1
  ENST ID: ENST00000343705
  CDS Start-End: 1-366
caacacatcggagagcttcgtgctaaactggtaccgcatgagccccagcaaccagacggacaagctggccgccttccccgaggaccgcagccagcccggccaggactgccgcttccgtgtcacacaactgcccaacgggcgtgacttccacatgagcgtggtcagggcccggcgcaatgacagcggcacctacctctgtggggccatctccctggcccccaaggcgcagatcaaagagagcctgcgggcagagctcagggtgacagggacaataggagccaggcgcaccggccagcccctgaaggaggacccctcagccgtgcctgtgttctctgtggactatggggagctggatttccagtggcg

SEQ ID NO: 169214 - DNA, 1019 bp, Homo sapiens
  Payload ID: 13309
  Gene Symbol: PDCD1
  Gene Name: programmed cell death 1
  ENST ID: ENST00000418831
  CDS Start-End: 28-228
cggcactctggtggggctgctccaggcatgcagatcccacaggcgccctggccagtcgtctgggcggtgctacaactgggctggcggccaggatggttcttagactccccagacaggccctggaacccccccaccttctccccagccctgctcgtggtgaccgaaggggacaacgccaccttcacctgcagcttctccaacacatcggagagcttcgtgctaaactgagagaagggcagaagtgcccacagcccaccccagcccctcacccaggccagccggccagttccaaaccctggtggttggtgtcgtgggcggcctgctgggcagcctggtgctgctagtctgggtcctggccgtcatctgctcccgggccgcacgagggacaataggagccaggcgcaccggccagcccctgaaggaggacccctcagccgtgcctgtgttctctgtggactatggggagctggatttccagtggcgagagaagaccccggagccccccgtgccctgtgtccctgagcagacggagtatgccaccattgtctttcctagcggaatgggcacctcatcccccgcccgcaggggctcagctgacggccctcggagtgcccagccactgaggcctgaggatggacactgctcttggcccctctgaccggcttccttggccaccagtgttctgcagaccctccaccatgagcccgggtcagcgcatttcctcaggagaagcaggcagggtgcaggccattgcaggccgtccaggggctgagctgcctgggggcgaccggggctccagcctgcacctgcaccaggcacagccccaccacaggactcatgtctcaatgcccacagtgagcccaggcagcaggtgtcaccgtcccctacagggagggccagatgcagtcactgcttcaggtcctgccagcacagagctgcctgcgtccagctccctgaatctctgctgctgctgctgctgctgctgctgctgcctgcggcccggggctgaaggcgccgtg

SEQ ID NO: 169215 - DNA, 2114 bp, Homo sapiens; identical to SEQ ID NO: 169212
  Payload ID: 13309
  Gene Symbol: PDCD1
  Gene Name: programmed cell death 1
  Uniprot ID: Q15116
  ENST ID: ENST00000618185
  CDS Start-End: 71-937

SEQ ID NO: 169216 - DNA, 1019 bp, Homo sapiens; identical to SEQ ID NO: 169214
  Payload ID: 13309
  Gene Symbol: PDCD1
  Gene Name: programmed cell death 1
  ENST ID: ENST00000630560
  CDS Start-End: 28-228

SEQ ID NO: 169217 - DNA, 366 bp, Homo sapiens; identical to SEQ ID NO: 169213
  Payload ID: 13309
  Gene Symbol: PDCD1
  Gene Name: programmed cell death 1
  ENST ID: ENST00000630230
  CDS Start-End: 1-366

SEQ ID NO: 169218 - DNA, 2365 bp, Homo sapiens
  Payload ID: 13310
  Gene Symbol: PDCD1LG2
  Gene Name: programmed cell death 1 ligand 2
  Uniprot ID: Q9BQ51
  ENST ID: ENST00000397747
  CDS Start-End: 249-1070
ttttcttctcttgaatatatcttaacgccaaattttgagtgcttttttgttacccatcctcatatgtcccagctagaaagaatcctgggttggagctactgcatgttgattgttttgtttttccttttggctgttcattttggtggctactataaggaaatctaacacaaacagcaactgttttttgttgtttacttttgcatctttacttgtggagctgtggcaagtcctcatatcaaatacagaacatgatcttcctcctgctaatgttgagcctggaattgcagcttcaccagatagcagctttattcacagtgacagtccctaaggaactgtacataatagagcatggcagcaatgtgaccctggaatgcaactttgacactggaagtcatgtgaaccttggagcaataacagccagtttgcaaaaggtggaaaatgatacatccccacaccgtgaaagagccactttgctggaggagcagctgcccctagggaaggcctcgttccacatacctcaagtccaagtgagggacgaaggacagtaccaatgcataatcatctatggggtcgcctgggactacaagtacctgactctgaaagtcaaagcttcctacaggaaaataaacactcacatcctaaaggttccagaaacagatgaggtagagctcacctgccaggctacaggttatcctctggcagaagtatcctggccaaacgtcagcgttcctgccaacaccagccactccaggacccctgaaggcctctaccaggtcaccagtgttctgcgcctaaagccaccccctggcagaaacttcagctgtgtgttctggaatactcacgtgagggaacttactttggccagcattgaccttcaaagtcagatggaacccaggacccatccaacttggctgcttcacattttcatccccttctgcatcattgctttcattttcatagccacagtgatagccctaagaaaacaactctgtcaaaagctgtattcttcaaaagacacaacaaaaagacctgtcaccacaacaaagagggaagtgaacagtgctatctgaacctgtggtcttgggagccagggtgacctgatatgacatctaaagaagcttctggactctgaacaagaattcggtggcctgcagagcttgccatttgcacttttcaaatgcctttggatgacccagcactttaatctgaaacctgcaacaagactagccaacacctggccatgaaacttgccccttcactgatctggactcacctctggagcctatggctttaagcaagcactactgcactttacagaattaccccactggatcctggacccacagaattccttcaggatccttcttgctgccagactgaaagcaaaaggaattatttcccctcaagttttctaagtgatttccaaaagcagaggtgtgtggaaatttccagtaacagaaacagatgggttgccaatagagttattttttatctatagcttcctctgggtactagaagaggctattgagactatgagctcacagacagggcttcgcacaaactcaaatcataattgacatgttttatggattactggaatcttgatagcataatgaagttgttctaattaacagagagcatttaaatatacactaagtgcacaaattgtggagtaaagtcatcaagctctgtttttgaggtctaagtcacaaagcatttgttttaacctgtaatggcaccatgtttaatggtggttttttttttgaactacatctttcctttaaaaattattggtttctttttatttgtttttaccttagaaatcaattatatacagtcaaaaatatttgatatgctcatacgttgtatctgcagcaatttcagataagtagctaaaatggccaaagccccaaactaagcctccttttctggccctcaatatgactttaaatttgacttttcagtgcctcagtttgcacatctgtaatacagcaatgctaagtagtcaaggcctttgataattggcactatggaaatcctgcaagatcccactacatatgtgtggagcagaagggtaactcggctacagtaacagcttaattttgttaaatttgttctttatactggagccatgaagctcagagcattagctgacccttgaactattcaaatgggcacattagctagtataacagacttacataggtgggcctaaagcaagctccttaactgagcaaaatttggggcttatgagaatgaaagggtgtgaaattgactaacagacaaatcatacatctcagtttctcaattctcatgtaaatcagagaatgcctttaaagaataaaactcaattgttattcttcaa

SEQ ID NO: 169219 - DNA, 2067 bp, Homo sapiens
  Payload ID: 13311
  Gene Symbol: PDCD10
  Gene Name: programmed cell death 10
  Uniprot ID: Q9BUL8
  ENST ID: ENST00000392750
  CDS Start-End: 419-1057
aagtcagtgcctcagttgctggtaaggtgtagctgttctgtcccagtccccgtagctctgcaccgagcagaagaggtctagggtcacgcaggggccatggctgaggcacttgggcttggttctggcaggcggagcggacggggctgagagcggggccctacgggcggaagaggagcactggaagaaggaagagacaaatgttggggtctacggattcagttccagtttaatgatgtggccctctaaggagataattttgccttaaacagaaagacttgaccctcttaggtgtcatacctaagatcagtgtgttttttgtgtccaattcttttatcaccaaaaaagagaagaaatattgcagtgaatgaagattcctctgcattttagcactgctttttcaactgtagttggcttttgaatgaggatgacaatggaagagatgaagaatgaagctgagaccacatccatggtttctatgcccctctatgcagtcatgtatcctgtgtttaatgagctagaacgagtaaatctgtctgcagcccagacactgagagccgctttcatcaaggctgaaaaagaaaatccaggtctcacacaagacatcattatgaaaattttagagaaaaaaagcgtggaagttaacttcacggagtcccttcttcgtatggcagctgatgatgtagaagagtatatgattgaacgaccagagccagaattccaagacctaaacgaaaaggcacgagcacttaaacaaattctcagtaagatcccagatgagatcaatgacagagtgaggtttctgcagacaatcaaggatatagctagtgcaataaaagaacttcttgatacagtgaataatgtcttcaagaaatatcaataccagaaccgcagggcacttgaacaccaaaagaaagaatttgtaaagtactccaaaagtttcagtgatactctgaaaacgtattttaaagatggcaaggcaataaatgtgttcgtaagtgccaaccgactaattcatcaaaccaacttaatacttcagaccttcaaaactgtggcctgaaagttgtatatgttaagagatgtacttctcagtggcagtattgaactgcctttatctgtaaattttaaagtttgactgtataaattatcagtccctcctgaagggatctaatccaggatgttgaatgggattattgccatcttacaccatatttttgtaaaatgtagcttaatcataatctcacactgaagattttgcatcacttttgctattatcattcttttaagaattataagccaaaagaatttacgccttaatgtgtcattatataacattccttaaaagaattgtaaatattggtgtttgtttctgacattttaacttgaaagcgatatgctgcaagataatgtatttaacaatatttggtggcaaatattcaataaatagtttacatctgttaaacatttctttacttgaaaaaatgcatatatatatgtgtgtatatatatatatatatatatatatatgaacagaagaccaagacaacttggtgtaatgtctaaaaaacttctaatgggagcttatcagcagtttatcaaataataaagcaagaatttctatttttgtccttaatcactttggacacagagtagtcaatggaaatatttttgttaattacttataaggtactgagtatttttatatgatttccaacctgttttaaacgacttatgagtaagagatagcattttctagtgtttttgcactataatgccactttttgaactcttgtgacaaatgtagatttgactcttaaaaattaagcctttcgtatactgggccctcataagctttgcacaattttttcccaaaaaatagccacaattaatagtaatttgaagctatatcaacggttggattgaaattgtcatgagtgttaatattatatacactcttcaactaggtacagttttatttcaccatagagaagttttaaggaaattatgtatcaagtgttcatgttaagtggtttcatttttcaattataaaataaagggaaaaaatcagaa

SEQ ID NO: 169220 - DNA, 849 bp, Homo sapiens
  Payload ID: 13311
  Gene Symbol: PDCD10
  Gene Name: programmed cell death 10
  ENST ID: ENST00000475915
  CDS Start-End: 242-849
ggcggatgtgcctggggtggggtcctttgaaggtgtggcttcggaccgagagctttctcctctaaatcttggtctcttgtttggaagtgactaacagcattttggcatgagaaagccctaaaaagatcagtgtgttttttgtgtccaattcttttatcaccaaaaaagagaagaaatattgcagtgaatgaagattcctctgcattttagcactgctttttcaactgtagttggcttttgaatgaggatgacaatggaagagatgaagaatgaagctgagaccacatccatggtttctatgcccctctatgcagtcatgtatcctgtgtttaatgagctagaacgagtaaatctgtctgcagcccagacactgagagccgctttcatcaaggctgaaaaagaaaatccaggtctcacacaagacatcattatgaaaattttagagaaaaaaagcgtggaagttaacttcacggagtcccttcttcgtatggcagctgatgatgtagaagagtatatgattgaacgaccagagccagaattccaagacctaaacgaaaaggcacgagcacttaaacaaattctcagtaagatcccagatgagatcaatgacagagtgaggtttctgcagacaatcaaggatatagctagtgcaataaaagaacttcttgatacagtgaataatgtcttcaagaaatatcaataccagaaccgcagggcacttgaacaccaaaagaaagaatttgtaaagtactccaaaagtttcagtgatactctgaaaacgtattttaaagatggcaaggcaataaatgtgttcgtaagtgccaaccgactaattcatcaaaccaactt

SEQ ID NO: 169221 - DNA, 1026 bp, Homo sapiens
  Payload ID: 13311
  Gene Symbol: PDCD10
  Gene Name: programmed cell death 10
  Uniprot ID: Q9BUL8
  ENST ID: ENST00000470131
  CDS Start-End: 336-974
gggtccttccggcgtcgccggagtgaattgatccgggagttgaagagggctgcaaggtgggaagtgaagtcagtgcctcagttgctgaggagcactggaagaaggaagagacaaatgttggggtctacggattcagttccagtttaatgatgtggccctctaaggagataattttgccttaaacagaaagacttgaccctcttaggtgtcatacctaagatcagtgtgttttttgtgtccaattcttttatcaccaaaaaagagaagaaatattgcagtgaatgaagattcctctgcattttagcactgctttttcaactgtagttggcttttgaatgaggatgacaatggaagagatgaagaatgaagctgagaccacatccatggtttctatgcccctctatgcagtcatgtatcctgtgtttaatgagctagaacgagtaaatctgtctgcagcccagacactgagagccgctttcatcaaggctgaaaaagaaaatccaggtctcacacaagacatcattatgaaaattttagagaaaaaaagcgtggaagttaacttcacggagtcccttcttcgtatggcagctgatgatgtagaagagtatatgattgaacgaccagagccagaattccaagacctaaacgaaaaggcacgagcacttaaacaaattctcagtaagatcccagatgagatcaatgacagagtgaggtttctgcagacaatcaaggatatagctagtgcaataaaagaacttcttgatacagtgaataatgtcttcaagaaatatcaataccagaaccgcagggcacttgaacaccaaaagaaagaatttgtaaagtactccaaaagtttcagtgatactctgaaaacgtattttaaagatggcaaggcaataaatgtgttcgtaagtgccaaccgactaattcatcaaaccaacttaatacttcagaccttcaaaactgtggcctgaaagttgtatatgttaagagatgtacttctcagtggcagtattgaactgcctt

SEQ ID NO: 169222 - DNA, 814 bp, Homo sapiens
  Payload ID: 13311
  Gene Symbol: PDCD10
  Gene Name: programmed cell death 10
  ENST ID: ENST00000492396
  CDS Start-End: 171-620
ctagctttctcctctaaatcttggtctcttgtttggaagtgactaacagcattttggcatgagaaagccctaaaaagctagaacgagtaaatctgtctgcagcccagacactgagagccgctttcatcaaggctgaaaaagaaaatccaggtctcacacaagacatcattatgaaaattttagagaaaaaaagcgtggaagttaacttcacggagtcccttcttcgtatggcagctgatgatgtagaagagtatatgattgaacgaccagagccagaattccaagacctaaacgaaaaggcacgagcacttaaacaaattctcagtaagatcccagatgagatcaatgacagagtgaggtttctgcagacaatcaaggatatagctagtgcaataaaagaacttcttgatacagtgaataatgtcttcaagaaatatcaataccagaaccgcagggcacttgaacaccaaaagaaagaatttgtaaagtactccaaaagtttcagtgatactctgaaaacgtattttaaagatggcaaggcaataaatgtgttcgtaagtgccaaccgactaattcatcaaaccaacttaatacttcagaccttcaaaactgtggcctgaaagttgtatatgttaagagatgtacttctcagtggcagtattgaactgcctttatctgtaaattttaaagtttgactgtataaattatcagtccctcctgaagggatctaatccaggatgttgaatgggattattgccatcttacaccatatttttgtaaaatgtagcttaatcataatctcacactgaagatt

SEQ ID NO: 169223 - DNA, 764 bp, Homo sapiens
  Payload ID: 13311
  Gene Symbol: PDCD10
  Gene Name: programmed cell death 10
  ENST ID: ENST00000471885
  CDS Start-End: 196-756
gaagagggctgcaaggtgggaagtgaagtcagtgcctcagttgctgaaagacttgaccctcttaggtgtcatacctaagatcagtgtgttttttgtgtccaattcttttatcaccaaaaaagagaagaaatattgcagtgaatgaagattcctctgcattttagcactgctttttcaactgtagttggcttttgaatgaggatgacaatggaagagatgaagaatgaagctgagaccacatccatggtttctatgcccctctatgcagtcatgtatcctgtgtttaatgagctagaacgagtaaatctgtctgcagcccagacactgagagccgctttcatcaaggctgaaaaagaaaatccaggtctcacacaagacatcattatgaaaattttagagaaaaaaagcgtggaagttaacttcacggagtcccttcttcgtatggcagctgatgatgtagaagagtatatgattgaacgaccagagccagaattccaagacctaaacgaaaaggcacgagcacttaaacaaattctcagtaagatcccagatgagatcaatgacagagtgaggtttctgcagacaatcaaggatatagctagtgcaataaaagaacttcttgatacagtgaataatgtcttcaagaaatatcaataccagaaccgcagggcacttgaacaccaaaagaaagaatttgtaaagtactccaaaagtttcagtgatactctgaaaacgtattttaaagatggcaagtaagtactgta

SEQ ID NO: 169224 - DNA, 585 bp, Homo sapiens
  Payload ID: 13311
  Gene Symbol: PDCD10
  Gene Name: programmed cell death 10
  ENST ID: ENST00000464360
  CDS Start-End: 349-585
gaagtgaagtcagtgcctcagttgctgaggagcactggaagaaggaagagacaaatgttggggtctacggattcagttccagtttaatgatgtggccctctaaggagataattttgccttaaacagaaagacttgaccctcttaggtgtcatacctaagctttctcctctaaatcttggtctcttgtttggaagtgactaacagcattttggcatgagaaagccctaaaaagatcagtgtgttttttgtgtccaattcttttatcaccaaaaaagagaagaaatattgcagtgaatgaagattcctctgcattttagcactgctttttcaactgtagttggcttttgaatgaggatgacaatggaagagatgaagaatgaagctgagaccacatccatggtttctatgcccctctatgcagtcatgtatcctgtgtttaatgagctagaacgagtaaatctgtctgcagcccagacactgagagccgctttcatcaaggctgaaaaagaaaatccaggtctcacacaagacatcattatgaaaattttagagaaaaaaagcgtggaagttaacttcacggagtcc

SEQ ID NO: 169225 - DNA, 1360 bp, Homo sapiens
  Payload ID: 13311
  Gene Symbol: PDCD10
  Gene Name: programmed cell death 10
  Uniprot ID: Q9BUL8
  ENST ID: ENST00000473645
  CDS Start-End: 324-962
gcacgactccggctgggcaggattccggacaacgcctggttcctcttgggtccttccggcgtcgccggagtgaattgatccgggagttgaagagggctgcaaggtgggaagtgaagtcagtgcctcagttgctgctttctcctctaaatcttggtctcttgtttggaagtgactaacagcattttggcatgagaaagccctaaaaagatcagtgtgttttttgtgtccaattcttttatcaccaaaaaagagaagaaatattgcagtgaatgaagattcctctgcattttagcactgctttttcaactgtagttggcttttgaatgaggatgacaatggaagagatgaagaatgaagctgagaccacatccatggtttctatgcccctctatgcagtcatgtatcctgtgtttaatgagctagaacgagtaaatctgtctgcagcccagacactgagagccgctttcatcaaggctgaaaaagaaaatccaggtctcacacaagacatcattatgaaaattttagagaaaaaaagcgtggaagttaacttcacggagtcccttcttcgtatggcagctgatgatgtagaagagtatatgattgaacgaccagagccagaattccaagacctaaacgaaaaggcacgagcacttaaacaaattctcagtaagatcccagatgagatcaatgacagagtgaggtttctgcagacaatcaaggatatagctagtgcaataaaagaacttcttgatacagtgaataatgtcttcaagaaatatcaataccagaaccgcagggcacttgaacaccaaaagaaagaatttgtaaagtactccaaaagtttcagtgatactctgaaaacgtattttaaagatggcaaggcaataaatgtgttcgtaagtgccaaccgactaattcatcaaaccaacttaatacttcagaccttcaaaactgtggcctgaaagttgtatatgttaagagatgtacttctcagtggcagtattgaactgcctttatctgtaaattttaaagtttgactgtataaattatcagtccctcctgaagggatctaatccaggatgttgaatgggattattgccatcttacaccatatttttgtaaaatgtagcttaatcataatctcacactgaagattttgcatcacttttgctattatcattcttttaagaattataagccaaaagaatttacgccttaatgtgtcattatataacattccttaaaagaattgtaaatattggtgtttgtttctgacattttaacttgaaagcgatatgctgcaagataatgtatttaacaatatttggtggcaaatattcaataaatagtttacatctgt

SEQ ID NO: 169226 - DNA, 686 bp, Homo sapiens
  Payload ID: 13311
  Gene Symbol: PDCD10
  Gene Name: programmed cell death 10
  ENST ID: ENST00000492139
  CDS Start-End: 285-686
gtgggaagtgaagtcagtgcctcagttgctgggaagaggagcactggaagaaggaagagacaaatgttggggtctacggattcagttccagtttaatgatgtggccctctaaggagataattttgccttaaacagaaagacttgaccctcttaggtgtcatacctaagatcagtgtgttttttgtgtccaattcttttatcaccaaaaaagagaagaaatattgcagtgaatgaagattcctctgcattttagcactgctttttcaactgtagttggcttttgaatgaggatgacaatggaagagatgaagaatgaagctgagaccacatccatggtttctatgcccctctatgcagtcatgtatcctgtgtttaatgagctagaacgagtaaatctgtctgcagcccagacactgagagccgctttcatcaaggctgaaaaagaaaatccaggtctcacacaagacatcattatgaaaattttagagaaaaaaagcgtggaagttaacttcacggagtcccttcttcgtatggcagctgatgatgtagaagagtatatgattgaacgaccagagccagaattccaagacctaaacgaaaaggcacgagcacttaaacaaattctcagtaagatcccagatgagatcaatgacagagtgaggtttctgcagacaatcaaggatata

SEQ ID NO: 169227 - DNA, 934 bp, Homo sapiens
  Payload ID: 13311
  Gene Symbol: PDCD10
  Gene Name: programmed cell death 10
  Uniprot ID: Q9BUL8
  ENST ID: ENST00000461494
  CDS Start-End: 230-868
aggttggcccctggtgccccgggagaggggacagggcggatgtgcctggggtggggtcctttgaaggtgtggcttcggaccgagaggtgaggctgctgttttccccctgctttatcagtgtgttttttgtgtccaattcttttatcaccaaaaaagagaagaaatattgcagtgaatgaagattcctctgcattttagcactgctttttcaactgtagttggcttttgaatgaggatgacaatggaagagatgaagaatgaagctgagaccacatccatggtttctatgcccctctatgcagtcatgtatcctgtgtttaatgagctagaacgagtaaatctgtctgcagcccagacactgagagccgctttcatcaaggctgaaaaagaaaatccaggtctcacacaagacatcattatgaaaattttagagaaaaaaagcgtggaagttaacttcacggagtcccttcttcgtatggcagctgatgatgtagaagagtatatgattgaacgaccagagccagaattccaagacctaaacgaaaaggcacgagcacttaaacaaattctcagtaagatcccagatgagatcaatgacagagtgaggtttctgcagacaatcaaggatatagctagtgcaataaaagaacttcttgatacagtgaataatgtcttcaagaaatatcaataccagaaccgcagggcacttgaacaccaaaagaaagaatttgtaaagtactccaaaagtttcagtgatactctgaaaacgtattttaaagatggcaaggcaataaatgtgttcgtaagtgccaaccgactaattcatcaaaccaacttaatacttcagaccttcaaaactgtggcctgaaagttgtatatgttaagagatgtacttctcagtggcagtattgaactgcctttatctgtaaatttt

SEQ ID NO: 169228 - DNA, 716 bp, Homo sapiens
  Payload ID: 13311
  Gene Symbol: PDCD10
  Gene Name: programmed cell death 10
  ENST ID: ENST00000487947
  CDS Start-End: 141-701
gaaggtgtggcttcggaccgagagatcagtgtgttttttgtgtccaattcttttatcaccaaaaaagagaagaaatattgcagtgaatgaagattcctctgcattttagcactgctttttcaactgtagttggcttttgaatgaggatgacaatggaagagatgaagaatgaagctgagaccacatccatggtttctatgcccctctatgcagtcatgtatcctgtgtttaatgagctagaacgagtaaatctgtctgcagcccagacactgagagccgctttcatcaaggctgaaaaagaaaatccaggtctcacacaagacatcattatgaaaattttagagaaaaaaagcgtggaagttaacttcacggagtcccttcttcgtatggcagctgatgatgtagaagagtatatgattgaacgaccagagccagaattccaagacctaaacgaaaaggcacgagcacttaaacaaattctcagtaagatcccagatgagatcaatgacagagtgaggtttctgcagacaatcaaggatatagctagtgcaataaaagaacttcttgatacagtgaataatgtcttcaagaaatatcaataccagaaccgcagggcacttgaacaccaaaagaaagaatttgtaaagtactccaaaagtttcagtgatactctgaaaacgtattttaaagatggcaagtaagtactgtaatttatc

SEQ ID NO: 169229 - DNA, 430 bp, Homo sapiens
  Payload ID: 13311
  Gene Symbol: PDCD10
  Gene Name: programmed cell death 10
  ENST ID: ENST00000479121
  CDS Start-End: 1-367
gcccctctatgcagtcatgtatcctgtgtttaatgagctagaacgagtaaatctgtctgcagcccagacactgagagccgctttcatcaaggctgaaaaagaaaatccaggtctcacacaagacatcattatgaaaattttagagaaaaaaagcgtggaagttaacttcacggagtcccttcttcgtatggcagctgatgatgtagaagagtatatgattgaacgaccagagccagaattccaagacctaaacgaaaaggcacgagcacttaaacaaattctcagtaagatcccagatgagatcaatgacagagtgaggtttctgcagacaatcaagcacttgaacaccaaaagaaagaatttgtaaagtactccaaaagtttcagtgatactctgaaaacgtattttaaagatggcaagtaagtactgt

SEQ ID NO: 169230 - DNA, 715 bp, Homo sapiens
  Payload ID: 13311
  Gene Symbol: PDCD10
  Gene Name: programmed cell death 10
  ENST ID: ENST00000462725
  CDS Start-End: 276-715
gggacagggcggatgtgcctggggtggggtcctttgaaggtgtggcttcggaccgagaggtgaggctgctgttttccccctgctttctttctcctctaaatcttggtctcttgtttggaagtgactaacagcattttggcatgagaaagccctaaaaagatcagtgtgttttttgtgtccaattcttttatcaccaaaaaagagaagaaatattgcagtgaatgaagattcctctgcattttagcactgctttttcaactgtagttggcttttgaatgaggatgacaatggaagagatgaagaatgaagctgagaccacatccatggtttctatgcccctctatgcagtcatgtatcctgtgtttaatgagctagaacgagtaaatctgtctgcagcccagacactgagagccgctttcatcaaggctgaaaaagaaaatccaggtctcacacaagacatcattatgaaaattttagagaaaaaaagcgtggaagttaacttcacggagtcccttcttcgtatggcagctgatgatgtagaagagtatatgattgaacgaccagagccagaattccaagacctaaacgaaaaggcacgagcacttaaacaaattctcagtaagatcccagatgagatcaatgacagagtgaggtttctgcagacaatcaaggatatagctagtgcaataaaagaacttcttgatacagtgaataa

SEQ ID NO: 169231 - DNA, 757 bp, Homo sapiens
  Payload ID: 13311
  Gene Symbol: PDCD10
  Gene Name: programmed cell death 10
  ENST ID: ENST00000494502
  CDS Start-End: 248-427
gatccgggagttgaagagggctgcaaggtgggaagtgaagtcagtgcctcagttgctgctttctcctctaaatcttggtctcttgtttggaagtgactaacagcattttggcatgagaaagccctaaaaagatcagtgtgttttttgtgtccaattcttttatcaccaaaaaagagaagaaatattgcagtgaatgaagattcctctgcattttagcactgctttttcaactgtagttggcttttgaatgaggatgacaatggaagagatgaagaatgaagctgagaccacatccatggtttctatgcccctctatgcagtcatgtatcctgtgtttaatgagctagaacgagtaaatctgtctgcagcccagacactgagagccgctttcatcaagggcaaaaaggaaagaaaatcatcagcataatgattaaaattggcaggcatcctacaggaaacaaacatcaagtgtgattacagaatttactgggaaaaactgaaatctgaagattaactctggctttggctgaaaaagaaaatccaggtctcacacaagacatcattatgaaaattttagagaaaaaaagcgtggaagttaacttcacggagtcccttcttcgtatggcagctgatgatgtagaagagtatatgattgaacgaccagagccagaattccaagacctaaacgaaaaggcacgagcacttaaacaaattctcagtaagatcccagatgagatcaatgacagagtgaggtttc

SEQ ID NO: 169232 - DNA, 1276 bp, Homo sapiens
  Payload ID: 13311
  Gene Symbol: PDCD10
  Gene Name: programmed cell death 10
  Uniprot ID: Q9BUL8
  ENST ID: ENST00000497056
  CDS Start-End: 242-880
cggctgggcaggattccggacaacgcctggttcctcttgggtccttccggcgtcgccggagtgaattgatccgggagttgaagagggctgcaaggtgggaagtgaagtcagtgcctcagttgctgatcagtgtgttttttgtgtccaattcttttatcaccaaaaaagagaagaaatattgcagtgaatgaagattcctctgcattttagcactgctttttcaactgtagttggcttttgaatgaggatgacaatggaagagatgaagaatgaagctgagaccacatccatggtttctatgcccctctatgcagtcatgtatcctgtgtttaatgagctagaacgagtaaatctgtctgcagcccagacactgagagccgctttcatcaaggctgaaaaagaaaatccaggtctcacacaagacatcattatgaaaattttagagaaaaaaagcgtggaagttaacttcacggagtcccttcttcgtatggcagctgatgatgtagaagagtatatgattgaacgaccagagccagaattccaagacctaaacgaaaaggcacgagcacttaaacaaattctcagtaagatcccagatgagatcaatgacagagtgaggtttctgcagacaatcaaggatatagctagtgcaataaaagaacttcttgatacagtgaataatgtcttcaagaaatatcaataccagaaccgcagggcacttgaacaccaaaagaaagaatttgtaaagtactccaaaagtttcagtgatactctgaaaacgtattttaaagatggcaaggcaataaatgtgttcgtaagtgccaaccgactaattcatcaaaccaacttaatacttcagaccttcaaaactgtggcctgaaagttgtatatgttaagagatgtacttctcagtggcagtattgaactgcctttatctgtaaattttaaagtttgactgtataaattatcagtccctcctgaagggatctaatccaggatgttgaatgggattattgccatcttacaccatatttttgtaaaatgtagcttaatcataatctcacactgaagattttgcatcacttttgctattatcattcttttaagaattataagccaaaagaatttacgccttaatgtgtcattatataacattccttaaaagaattgtaaatattggtgtttgtttctgacattttaacttgaaagcgatatgctgcaagataatgtatttaacaatatttggtggcaaatattcaataaatagtttacatct

SEQ ID NO: 169233 - DNA, 6453 bp, Homo sapiens
  Payload ID: 13312
  Gene Symbol: PDCD11
  Gene Name: programmed cell death 11
  Uniprot ID: Q14690
  ENST ID: ENST00000369797
  CDS Start-End: 95-5710
ggactgtgggtatcctggtctccgcgtgtgtgagtaccgcggcgcgaggttagtggtagctgggtgcagacgccgtggcgctggagacccaaacatggcaaacctggaagaaagcttcccccgaggaggtacaagaaagatccacaaaccagagaaagctttccagcagtcagttgaacaagacaacttatttgatatttctactgaagagggatccaccaaaagaaaaaagagccagaaggggccagcaaaaacaaaaaagttgaaaatcgaaaagagagaaagcagcaagtccgcaagagagaagtttgaaatccttagtgttgagtccctgtgtgagggaatgcgtattttgggttgcgtgaaagaggtgaatgaactggaactggtgattagtctccccaatggcctccagggctttgtgcaagtcactgaaatctgtgatgcctacaccaaaaagctgaatgagcaggtgacacaagaacaacctctgaaggacctacttcacttgcctgaacttttctcacctggaatgctggtaagatgtgtggtgagcagtctgggcatcacagacaggggcaagaagagtgtcaagctgtctctgaaccccaaaaatgtcaacagagtgctgagtgctgaggccctgaagcctggcatgctacttacaggtaccgtatccagcctggaagaccatggctacctagtggacattggtgttgatgggaccagagcttttctgccactgctgaaagcccaggagtacatcagacagaagaacaaaggtgctaaactaaaggtgggtcagtacctgaactgcattgttgaaaaggtgaaaggcaacggaggagttgttagtctgtctgttggtcactcagaggtttctacggccattgctactgaacagcagagctggaaccttaataacttgctaccaggactggtggtcaaagctcaggtacagaaggtgactccatttggccttacgctaaacttcctcacattcttcacgggcgtggttgactttatgcacctggatcccaagaaagctggaacatatttctcaaatcaggcagtgagggcctgcatcctttgcgtccatcctcgaaccagagttgtgcacctgagcctgcgccccatcttcctacagcctggacgcccactcacccgactctcttgccagaaccttggagcagtgctggatgatgttcctgtccagggttttttcaaaaaggctggggccacctttaggctgaaggatggggttctggcctatgcccggctcagccatctctctgattctaagaacgtcttcaatcctgaggccttcaagccagggaacactcacaagtgtagaattattgactacagccaaatggatgaactggccttgctctctctacgaacgtctattattgaagctcagtaccttagatatcatgacatcgaacctggggcagtggtaaagggcacagtgctaaccataaagtcatatgggatgctggtgaaggtgggcgagcagatgaggggcctggtacctcccatgcacctggctgacatcctgatgaagaatccggagaagaagtaccacatcggggatgaggtcaagtgccgggttttgctttgtgaccctgaagccaagaagctgatgatgaccctgaaaaaaaccctgattgagtccaaactacctgtcattacctgctatgccgatgccaagcctggtctgcagacacatggcttcatcatcagggtcaaggactatggctgcattgtgaagttctacaacaatgtgcagggactggtgcccaagcatgagctcagtactgagtatatccctgacccggagagagttttttacactggccaggtggtgaaggttgtcgtattgaactgtgagccatccaaagagaggatgctcttatccttcaagctgtcgagtgatccagagccaaagaaagagcctgcaggacacagtcagaagaaaggaaaagccattaacattgggcagttggtagatgtgaaggttttagagaagaccaaagatgggctggaggtggctgtcctgccccacaacatccgtgctttcctccccacatctcatctgtcggaccacgttgccaacggcccattgttacatcattggctccaggcaggtgacatccttcaccgagtcctgtgtctgagccagagcgaggggcgtgttcttctttgcaggaagccagccttggtctccacagtagaaggtggccaggatcccaagaacttctcagaaatccatcctggaatgctgctcattggttttgtgaagagcatcaaggactatggcgtgttcatccagttcccctcaggtcttagcggactggccccaaaagctatcatgagtgacaaatttgtgacctccacaagtgaccactttgttgagggccagacagtagcggcaaaggtgaccaatgtggatgaggagaagcagcggatgctgctgtcactgcggctgtcggactgtggtctgggggacttggctatcaccagcctcctcctcctgaatcagtgcctggaggagctgcagggcgtgcgcagccttatgagcaaccgagactctgtgttgatccagacgctggccgagatgaccccaggaatgttccttgacctagtggtgcaggaggtgttggaagatggctctgtggtattcagtgggggtccagtgcccgacctggtcctgaaagccagcagataccatcgcgcagggcaggaggtggaatctgggcagaaaaagaaggttgttatcttaaatgttgatcttttgaagttggaagtgcacgtttcccttcaccaggacttggtgaatagaaaagctagaaagctgaggaaaggcagcgaacaccaggcgattgtgcagcacttggagaagtcctttgccattgcctccttggtagagacgggccacctggcagctttctccctgacctctcacctcaacgacaccttccgctttgactcagagaaattgcaggtgggacagggtgtctccctaaccctcaagaccacagaaccaggagtgactggccttcttttggctgtggaggggccggctgccaagaggaccatgaggccgacccagaaggactctgagacagttgatgaggatgaagaagtggatccagctctgactgtagggaccataaagaagcacaccctctccatcggggacatggtcacagggactgtcaagtccattaagcctacccatgtggttgtgactctggaagatggcattattggctgtatccatgcctcccacattctagatgatgttccagagggcacctctcctactaccaagctgaaggttgggaagacggtcactgcccgagtgattggcgggcgagacatgaagacattcaagtatctcccaataagtcaccccagattcgttcgaaccatcccggagctgagtgttcggccaagtgagctggaggatggccacactgctcttaacactcactctgttagccccatggagaagattaaacagtaccaggccggccagactgttacttgcttcttaaagaaatacaatgtggtgaagaaatggcttgaggtggagattgccccagacatccgggggagaattcccttattgctcacttctctgagcttcaaggttctgaagcatccagataagaagttccgggttggccaggccctgagggccaccgttgttggcccagattcctccaagaccctcttatgtctgtccctcacaggtcctcacaagcttgaggaaggggaagtggccatgggccgagtggtgaaggtgactcccaacgaggggctgaccgtctccttcccctttgggaagataggaacagtcagtatatttcacatgagtgactcctactccgagacgcccctggaagacttcgtcccccagaaggttgtcagatgttacatcctgtccactgcagacaacgtattgactttgtcgctgcgatcatccagaacaaacccggagacgaaaagcaaagtagaagatccagagattaactccatccaggacattaaggaagggcagcttctgaggggctatgtagggtccatccagccacacggtgtgttctttcgccttggcccctccgttgtgggtttggctcggtactcccatgtctcccagcacagcccgtccaagaaagccctttataacaaacacctccctgaagggaagctgctcacagccagggtcctacgccttaaccaccagaagaacctggtagagctgtctttcctccccggagacactgggaagccagacgtgctttctgcttccttggaagggcaacttacaaagcaagaggagaggaaaacagaggctgaggagagagaccaaaaaggggaaaagaaaaatcagaaaaggaacgagaagaagaaccagaaggggcaggaggaggtggagatgcccagcaaggagaagcaacagccccagaagccacaggcgcagaagcggggcgggcgggagtgccgggagtctgggagtgagcaggaaagagtgagcaagaagccaaagaaagccggcctgtcagaggaggacgacagccttgtggacgtgtactatcgggagggaaaagaggaggcagaagagacgaatgtgctgcccaaggagaagcaaaccaagccagcagaagcgccccggctgcagctgtcttcaggcttcgcttggaatgtgggactagactctctgaccccggccttgccacctctagcagagagctcagacagcgaggaggatgagaagccacaccaagccacgataaagaaaagcaagaaagaaagggagttggagaagcagaaggcagagaaggaactgtcccgcattgaggaggcgctgatggatcctgggcggcagccagagtccgcggatgattttgaccgactggtgctgagctcccccaacagctccattctgtggctgcagtacatggctttccacctgcaggccacggagatcgagaaggcccgtgccgtggctgagagggcccttaagaccatctccttcagagaggagcaggagaagctgaacgtgtgggtggctctgctgaacctggagaacatgtacggctctcaggagtccctgaccaaggtctttgagcgagccgtgcagtacaacgagcctctcaaagtctttctccacctggctgacatctacgccaagtcagagaaattccaggaagctggtgaactctacaaccggatgctgaagcgtttccggcaggagaaagctgtgtggatcaaatacggcgccttccttctgcggaggagccaggctgcagccagtcaccgcgtgctgcagcgagccctggagtgcctgcctagcaaggagcatgtggatgtcattgccaagtttgcccagcttgagtttcagctgggggatgcagagcgggccaaagccatttttgagaacacgctgagcacctacccaaagcgcacagatgtctggtcggtctatatcgacatgaccatcaagcacggcagccagaaggacgtccgggacatctttgagcgggtcattcatctgagcttggcccccaagagaatgaagttcttcttcaagcgctacctggactacgagaagcagcatggcactgagaaggatgtgcaggcagtcaaggccaaggccctggagtatgtggaggccaagagctcagtgctagaggactagtggcaggctggctctgtgggacactgtcaacaatgggccagcccggccccgcctcgagtgcctgggcactcggaaaactgttacctcaggactctatttaaatgctgctttttctgcagcacgcttggggaaatcctgtcaggatgaaaaggaagttgagattttttaaatccctcttcgcttgctttattttcagtaccaacttgttatctttttccttatctgaggctacctggggattgtgggcagcaggcccctggactcccagaaatgctgagggtccctcttccaggggagttccctggggagcaagagtagaggggctattcccgagggtcctgtggtcagggtcctgctttgtccctggcaggctgtcagtccagctggagggggtcagtaggctccagggagtgggccctcccctccgatcttggagtctctgggtgttccttcagcctcagcctcactggtaccttctgccctttaggggaggctatgagtctgggacaggaggacaaattcagagcccagagggggaaatggagaaacctgggctgctgaggaaagccacgggtgttggcgtgaactgatgatgtctcatcccacgcccactatggccacattacctaacctctccatatctgggctattcaaggtcttggaggccagcacagacccagctagttgttgaagccagttcttttttgtcttggtcatgagggaattaaacgttttctctggca

SEQ ID NO: 169234 - DNA, 732 bp, Homo sapiens
  Payload ID: 13312
  Gene Symbol: PDCD11
  Gene Name: programmed cell death 11
  ENST ID: ENST00000493610
  CDS Start-End: 93-209
actgtgggtatcctggtctccgcgtgtgtgagtaccgcggcgcgaggttagtggtagctgggtgcagacgccgtggcgctggagacccaaacatggcaaacctggaagaaagcttcccccgaggaggtacaagaaagatccacaaaccagagaaagctttccagcagtcagttgaacaagacaacttatttgatgtctgtattatgtaatcttttcaactgtactgtgaagcactgattgcaattccatgatgaggaacagtgtcttgctctgtcgcccaggctgaagtgcagtgttgtgatctcagctcactgcaacctccacttcttggttcaagcaattctcctgtatcagcctcccgagtacctgggactatagatttctactgaagagggatccaccaaaagaaaaaagagccagaaggggccagcaaaaacaaaaaagttgaaaatcgaaaagagagaaagcagcaagtccgcaagagagaagtttgaaatccttagtgttgagtccctgtgtgagggaatgcgtattttgggttgcgtgaaagaggtgaatgaactggaactggtgattagtctccccaatggcctccagggctttgtgcaagtcactgaaatctgtgatgcctacaccaaaaagctgaatgagcaggtgacacaagaacaacctctgaaggacctacttcacttgcctgaacttttctcacctggaatgctggtaagatgtgtg

SEQ ID NO: 169235 - DNA, 1118 bp, Homo sapiens
  Payload ID: 13313
  Gene Symbol: PDCD2
  Gene Name: programmed cell death 2
  ENST ID: ENST00000167218
  CDS Start-End: 65-730
cggcgcccgatttccgccttccgacccagctgtgggctgcgccccacgccagcccgcgccccgcatggctgccgccggggccaggcctgtggagctgggcttcgccgagtcggcgccggcgtggcgactgcgcagcgagcagttccccagcaaggtgggcgggcggccggcatggctgggcgcggccgggctgccggggccccaggccctggcctgcgagctgtgcggccgcccgctctccttcctgctgcaggtgtatgcgccgctgcctggccgcccggacgccttccaccgctgcatcttcctcttctgctgccgcgagcagccgtgctgtgccggcctgcgagtttttaggaatcaactacccaggaaaaacgatttttactcatatgagccaccttctgagaatcctcccccagaaacaggagaatcagtgtgtctccagcttaagtctggtgctcatctctgcagggtttgtggctgtttaggccccaaaacgtgctccagatgccacaaagcatattactgcagcaaggagcatcagaccctagactggagattgggacataagcaggcttgtgcacaaccagatcatctggaccatataattccagaccacaacttcctttttccagaatttgaaattgtaatagaaacagaagatgagattatgcctgaggttgtggaaaaggaagattactcagagattatagggagcatggattcttagatatggcagaggtattgcccccatctggatttctggtgaaaatattcctcaagaaaaggatattccagattgcccctgtggtgccaagagaatattggaattccaggtcatgcctcagctcctaaactacctgaaggctgacagactgggcaagagcattgactggggcatcctggctgtcttcacctgtgctgagagctgcagcttgggtactggctatacagaagaatttgtgtggaagcaggatgtaacagatacaccgtaaaggcatcttaaagccttgaaaaatgttaataatcttttataccttgcaattccatttctgggattttatcctaaggaaatacttataccaaaaatagaggtgcagagatgttgacagattgct

SEQ ID NO: 169236 - DNA, 936 bp, Homo sapiens
  Payload ID: 13313
  Gene Symbol: PDCD2
  Gene Name: programmed cell death 2
  Uniprot ID: Q16342
  ENST ID: ENST00000392090
  CDS Start-End: 1-936
atggctgccgccggggccaggcctgtggagctgggcttcgccgagtcggcgccggcgtggcgactgcgcagcgagcagttccccagcaaggtgtatgcgccgctgcctggccgcccggacgccttccaccgctgcatcttcctcttctgctgccgcgagcagccgtgctgtgccggcctgcgagtttttaggaatcaactacccaggaaaaacgatttttactcatatgagccaccttctgagaatcctcccccagaaacaggagaatcagtgtgtctccagcttaagtctggtgctcatctctgcagggtttgtggctgtttaggccccaaaacgtgctccagatgccacaaagcatattactgcagcaaggagcatcagaccctagactggagattgggacataagcaggcttgtgcacaaccagatcatctggaccatataattccagaccacaacttcctttttccagaatttgaaattgtaatagaaacagaagatgagattatgcctgaggttgtggaaaaggaagattactcagagattatagggagcatgggtgaagcacttgaggaagaactggattccatggcaaaacatgaatccagggaagataaaatttttcagaagtttaaaactcagatagcccttgaaccagaacagattcttagatatggcagaggtattgcccccatctggatttctggtgaaaatattcctcaagaaaaggatattccagattgcccctgtggtgccaagagaatattggaattccaggtcatgcctcagctcctaaactacctgaaggctgacagactgggcaagagcattgactggggcatcctggctgtcttcacctgtgctgagagctgcagcttgggtactggctatacagaagaatttgtgtggaagcaggatgtaacagatacaccgtaa

SEQ ID NO: 169237 - DNA, 1897 bp, Homo sapiens
  Payload ID: 13313
  Gene Symbol: PDCD2
  Gene Name: programmed cell death 2
  Uniprot ID: Q16342
  ENST ID: ENST00000443345
  CDS Start-End: 74-661
cttccggcccggcgcccgatttccgccttccgacccagctgtgggctgcgccccacgccagcccgcgccccgcatggctgccgccggggccaggcctgtggagctgggcttcgccgagtcggcgccggcgtggcgactgcgcagcgagcagttccccagcaaggtgtatgcgccgctgcctggccgcccggacgccttccaccgctgcatcttcctcttctgctgccgcgagcagccgtgctgtgccggcctgcgagtttttaggaatcaactacccaggaaaaacgatttttactcatatgagccaccttctgagaatcctcccccagaaacaggagaatcagtgtgtctccagcttaagtctggtgctcatctctgcagggtttgtggctgtttaggccccaaaacgtgctccagatgccacaaagcatattactgcagcaaggagcatcagaccctagactggagattgggacataagcaggcttgtgcacaaccagatcatctggaccatataattccagaccacaacttcctttttccagaatttgaaattgtaatagaaacagaagatgagattatgcctgaggttgtggaaaaggaagattactcagagattatagggagcatgggtaagcagtttcaggacttcattcattaagtggttaaacataatacttggaagaaagggctccatgtgcctagaagagaggtactgagaggaagactcactttggaggctgtagcatacaattttcagatattgcctcaggtaaaaatatacttcctggactttgttttctgacacataagaggtgtgttctgctccctgtaaagacaagggtgggtatccagatggtcccatgagtagggctgcacaagatgctggaggcttggtaagttcctctgggtcgcagatcggtttctcgggtcgggatagtgtgagtgcctagcacagtgtcgggcacgcagaagggccccttaaaagtttctctttcatctggccagttttagatacacaattttgtcagtttacttacagtgcatactcttgggtagtacttgtgctgaccaagtatcttagaggcttattttattatagtagccaacatttatccagcacttaccttatataaagggctgtttgtgcatgagctcattaaaatcgtgacagcagaccaatgagtgagaaactgccccattttgaaggtgaggaaattgaggttctgggtataactttctttggtcacataatattaaattttacaatttgagccttgagccatacacaaaaccaccacaaaattagatttatagactcaaaatgaaaacatcagcttactggtttgtagttcataccagtcatacattccaaaacatgttttgagtcttactctgtgcctgaccttgtgcttgataacagggatataatgggaagcaacactccagtggtcagatgctcacagtcttatggaggagcccaaataatatctggggaagttaaagtccatataatgactgataagagtacaatacaggtgccatgggaacacgtgacatcactgaagactgcctggaaggggccgcgcgtgtgttcatgcctatacgataaacatgatacataatgaaaatgcttatctttaggagaaaggagagcctagagtagcaggatcaaggatgaaagctggacttcaaatatgccttgttagtgtaaatgtgactgtggaactgtatgagtattttaagattatggagtaaagtaagttttaaaaagcagtccctaatcatcaaaagtaaaaaactcttgatgtagtcatataaccacactaagaactcttccaggtgacttcaaaacataggacagtacatctctagtagaatatgccctgagaatgaa

SEQ ID NO: 169238 - DNA, 2657 bp, Homo sapiens
  Payload ID: 13313
  Gene Symbol: PDCD2
  Gene Name: programmed cell death 2
  Uniprot ID: Q16342
  ENST ID: ENST00000453163
  CDS Start-End: 32-718
gggctgcgccccacgccagcccgcgccccgcatggctgccgccggggccaggcctgtggagctgggcttcgccgagtcggcgccggcgtggcgactgcgcagcgagcagttccccagcaaggtgggcgggcggccggcatggctgggcgcggccgggctgccggggccccaggccctggcctgcgagctgtgcggccgcccgctctccttcctgctgcaggtgtatgcgccgctgcctggccgcccggacgccttccaccgctgcatcttcctcttctgctgccgcgagcagccgtgctgtgccggcctgcgagtttttaggaatcaactacccaggaaaaacgatttttactcatatgagccaccttctgagaatcctcccccagaaacaggagaatcagtgtgtctccagcttaagtctggtgctcatctctgcagggtttgtggctgtttaggccccaaaacgtgctccagatgccacaaagcatattactgcagcaaggagcatcagaccctagactggagattgggacataagcaggcttgtgcacaaccagatcatctggaccatataattccagaccacaacttcctttttccagaatttgaaattgtaatagaaacagaagatgagattatgcctgaggttgtggaaaaggaagattactcagagattatagggagcatgggtaagcagtttcaggacttcattcattaagtggttaaacataatacttggaagaaagggctccatgtgcctagaagagaggtactgagaggaagactcactttggaggctgtagcatacaattttcagatattgcctcaggtaaaaatatacttcctggactttgttttctgacacataagaggtgtgttctgctccctgtaaagacaagggtgggtatccagatggtcccatgagtagggctgcacaagatgctggaggcttggtaagttcctctgggtcgcagatcggtttctcgggtcgggatagtgtgagtgcctagcacagtgtcgggcacgcagaagggccccttaaaagtttctctttcatctggccagttttagatacacaattttgtcagtttacttacagtgcatactcttgggtagtacttgtgctgaccaagtatcttagaggcttattttattatagtagccaacatttatccagcacttaccttatataaagggctgtttgtgcatgagctcattaaaatcgtgacagcagaccaatgagtgagaaactgccccattttgaaggtgaggaaattgaggttctgggtataactttctttggtcacataatattaaattttacaatttgagccttgagccatacacaaaaccaccacaaaattagatttatagactcaaaatgaaaacatcagcttactggtttgtagttcataccagtcatacattccaaaacatgttttgagtcttactctgtgcctgaccttgtgcttgataacagggatataatgggaagcaacactccagtggtcagatgctcacagtcttatggaggagcccaaataatatctggggaagttaaagtccatataatgactgataagagtacaatacaggtgccatgggaacacgtgacatcactgaagactgcctggaaggggccgcgcgtgtgttcatgcctatacgataaacatgatacataatgaaaatgcttatctttaggagaaaggagagcctagagtagcaggatcaaggatgaaagctggacttcaaatatgccttgttagtgtaaatgtgactgtggaactgtatgagtattttaagattatggagtaaagtaagttttaaaaagcagtccctaatcatcaaaagtaaaaaactcttgatgtagtcatataaccacactaagaactcttccaggtgacttcaaaacataggacagtacatctctagtagaatatgccctgagaatgaaaagaatgtaacagtgttagtattttgaataaacatgttattactagactgttgcttttattttgagatggttgtgtgtgtattggggggaaaggaaacgagtaattatgttggtgttactgagaactgagatgttgggcgtaggaggaagataatgttgattgtgtctacgtaccatttctctctaaaaggaactccaggctctttggagaggtggttgattccagaactaggtcaggaaacgttcatataatgtgggaacatggtcatatcaaagattaaggataaggattactagggccatgtcagaactcaagcaacatgaaaaggctcctgcttgcaaaagatggacagtttgaacatccacaaggacgctaactgcatcagatatgtttaatgggttcaaaatgatactttaaaaaaactcagtaatcatctttataggatacttgggaacagactcattttcaaattggtaaataaaaggaaagagtttgccttcgaggggtacataacttaattatgaatgaagtgatatgtgtggaatttacttcagagtaatggaggtggaagtggcagagaaaggaaacactggacttgatagtgttgaaactgattaatgatatgtggcggttcattatagtatttccacttttctgtatgtccaaaattttctaaaataaaaggagaattgaatagaaaaa

SEQ ID NO: 169239 - DNA, 445 bp, Homo sapiens
  Payload ID: 13313
  Gene Symbol: PDCD2
  Gene Name: programmed cell death 2
  ENST ID: ENST00000539212
  CDS Start-End: 1-123
ttcctgctgcaggtgtatgcgccgctgcctggccgcccggacgccttccaccgctgcatcttcctcttctgctgccgcgagcagccgtgctgtgccggcctgcgagggtttgtggctgtttaggccccaaaacgtgctccagatgccacaaagcatattactgcagcaaggagcatcagaccctagactggagattgggacataagcaggcttgtgcacaaccagatcatctggaccatataattccagaccacaacttcctttttccagaatttgaaattgtaatagaaacagaagatgagattatgcctgaggttgtggaaaaggaagattactcagagattatagggagcatggattcttagatatggcagaggtattgcccccatctggatttctggtgaaaatattcctcaagaaaaggatattccagattgcccctgtg

SEQ ID NO: 169240 - DNA, 3378 bp, Homo sapiens
  Payload ID: 13313
  Gene Symbol: PDCD2
  Gene Name: programmed cell death 2
  Uniprot ID: Q16342
  ENST ID: ENST00000541970
  CDS Start-End: 80-1114
tcttgccttccggcccggcgcccgatttccgccttccgacccagctgtgggctgcgccccacgccagcccgcgccccgcatggctgccgccggggccaggcctgtggagctgggcttcgccgagtcggcgccggcgtggcgactgcgcagcgagcagttccccagcaaggtgggcgggcggccggcatggctgggcgcggccgggctgccggggccccaggccctggcctgcgagctgtgcggccgcccgctctccttcctgctgcaggtgtatgcgccgctgcctggccgcccggacgccttccaccgctgcatcttcctcttctgctgccgcgagcagccgtgctgtgccggcctgcgagtttttaggaatcaactacccaggaaaaacgatttttactcatatgagccaccttctgagaatcctcccccagaaacaggagaatcagtgtgtctccagcttaagtctggtgctcatctctgcagggtttgtggctgtttaggccccaaaacgtgctccagatgccacaaagcatattactgcagcaaggagcatcagaccctagactggagattgggacataagcaggcttgtgcacaaccagatcatctggaccatataattccagaccacaacttcctttttccagaatttgaaattgtaatagaaacagaagatgagattatgcctgaggttgtggaaaaggaagattactcagagattatagggagcatgggtgaagcacttgaggaagaactggattccatggcaaaacatgaatccagggaagataaaatttttcagaagtttaaaactcagatagcccttgaaccagaacagattcttagatatggcagaggtattgcccccatctggatttctggtgaaaatattcctcaagaaaaggatattccagattgcccctgtggtgccaagagaatattggaattccaggtcatgcctcagctcctaaactacctgaaggctgacagactgggcaagagcattgactggggcatcctggctgtcttcacctgtgctgagagctgcagcttgggtactggctatacagaagaatttgtgtggaagcaggatgtaacagatacaccgtaaaggcatcttaaagccttgaaaaatgttaataatcttttataccttgcaattccatttctgggattttatcctaaggaaatacttataccaaaaatagaggtgcagagatgttgacagattgcttacacagtgtctacttattagtgaaacaaaagtgtccagtgacagggaattaaataaattttggtacatccacagaggaaggctacacagtcttaattataacacctatattgacaacagacataccattataggtggtattcatggtatgatcctattcttgtaaaaatatttgtatgtatgcacagaaatctgcaaagatgtacacttagtgaactggttaccaacgaatggtgggactaactaaaatggtctttttacttatatgtgcatttctttttataataaaaatgggttatatgcctaatgaagtcaaaccatctcactctgagcatttcccaccctaggtttttaaaacacaaaaatacttaggtaaaactcccaacaaacttgtctgatcattagctgattatcacaggctctagtatgtactggaagcccagaatatttgagaaataccaaacctcaggttggtgagtatgatgaacaggaaacccagtaattctgaagcagcagtatcacagttggcaggatgaggaacaacagtggctttgtgatcacagaactggaatttaaagaggctggaccttcagaactgatcttggtcagccagcggccctgcttacagatgagacactgaaaggcaaaaggcgatggtcttccctttccgtgtcagcattgtatacaggttccctatcgcacatacaagggttatggaatgtaagccaaaataagggtctggcctaggaggcagcagcctgaggaaaggaaggccctgaagtcagttttcaaagggctgacccttggcctattatgtttctgatacatctgtttaagcaagcggctcctaagactacactaaggtttcttccatcccctagcagctcacagttgacaattcccagttctctcagcaccagtgatgcctgcccttaagacacattgctgttgatcagtgcttgaatactgacggctaattctgataaatttctcaggcttatttccttaatctacattggctcacattgtcccctaacacatccctgttaactgaaatgcattgccaccataaatcctcacgttttcataggtaacatcacttgctaatgtaattgtctacttggctattttatttgtaatttaaaaagttctgtcctagtagtccatattatataagtatacatatgcaatttgtattaattgtataagatagttatacatagcaccatatgggaaactgcagtatggagtttctcccatggggaggttatcagctacttaagagctagaggatactagtttcgaacctgggatggctaaatctatgaaaatcacctataactatggtgtcacagccctgtggctactggagtaagttgtcatcaactagtgacaagagctggtcgcaacacttagtaggaagcacagtggcataaggaaacctggactagtggggcctttatatctaaaattatgtattattccttataggcagaatctgtaagtacgttatgactgctaatgacttttaaagcaaacatgttaacgatctttctatggtaaaaactgttatttggggacatcaccagatgatgtggacattcttgcaggtattttggcatacccaggcaagctgtcattggtgtatattccagttaacctctggagatgatcgtaacagtttacagggcctttccatttgggatggatatatcaagagggagacaaactggtccaaatcaccagaaagaaaatctcacagcaccgacttggcatctgtgttaaaaaatagcaactatatttaaaataaactgtacaacataaaaaatttaaattaaaaaatgcattaagcaagttgcctttagaaatgtgaagacattttaaaacactacaagataatgagcaagtctcacctacataatcatggctccacagacggtgccagtccatgcatccaccatttctcaacacctacaaagttttaagatctgcttggttcagatactgtccagccacagcagctccctctgctgtagagagcagcatattcagctttgcctttttatttcagatactgaatatcctttggcaatttcagatatcacagcaaaaaaaaaaaaagttccaagtgtttttggcaa

SEQ ID NO: 169241 - DNA, 1082 bp, Homo sapiens
  Payload ID: 13313
  Gene Symbol: PDCD2
  Gene Name: programmed cell death 2
  ENST ID: ENST00000542896
  CDS Start-End: 32-928
gggctgcgccccacgccagcccgcgccccgcatggctgccgccggggccaggcctgtggagctgggcttcgccgagtcggcgccggcgtggcgactgcgcagcgagcagttccccagcaaggtgggcgggcggccggcatggctgggcgcggccgggctgccggggccccaggccctggcctgcgagctgtgcggccgcccgctctccttcctgctgcaggtgtatgcgccgctgcctggccgcccggacgccttccaccgctgcatcttcctcttctgctgccgcgagcagccgtgctgtgccggcctgcgagtttttaggaatcaactacccaggaaaaacgatttttactcatatgagccaccttctgagaatcctcccccagaaacaggagaatcagtgtgtctccagcttaagtctggtgctcatctctgcagggtttgtggctgtttaggccccaaaacgtgctccagatgccacaaagcatattactgcagcaaggagcatcagaccctagactggagattgggacataagcaggcttgtgcacaaccagatcatctggaccatataattccagaccacaacttcctttttccagaatttgaaattgtaatagaaacagaagatgagattatgcctgaggttgtggaaaaggaagattactcagagattatagggagcatgggtgaagcacttgaggaagaactggattccatggcaaaacatgaatccagggaagataaaatttttcagaagtttaaaactcagatagcccttgaaccagaacagattcttagatatggcagaggtattgcccccatctggatttctggtgaaaatattcctcaagaaaaggatattccagattgcccctgtggtgccaagagaatattggaattccagttttcagacacggtctattgactgacttctgtgacaatgaggatatctacactgctctccacctccagtgtggttatgtcattattattagtgcctctgttaacttttgttattttaaataatgtataccttcctttcttgttctagtaattaaagtctttgactatatacttta

SEQ ID NO: 169242 - DNA, 582 bp, Homo sapiens
  Payload ID: 13313
  Gene Symbol: PDCD2
  Gene Name: programmed cell death 2
  ENST ID: ENST00000544755
  CDS Start-End: 1-140
gcggccgcccgctctccttcctgctgcaggtgtatgcgccgctgcctggccgcccggacgccttccaccgctgcatcttcctcttctgctgccgcgagcagccgtgctgtgccggcctgcgagggtttgtggctgtttaggccccaaaacgtgctccagatgccacaaagcatattactgcagcaaggagcatcagaccctagactggagattgggacataagcaggcttgtgcacaaccagatcatctggaccatataattccagaccacaacttcctttttccagaatttgaaattgtaatagaaacagaagatgagattatgcctgaggttgtggaaaaggaagattactcagagattatagggagcatgggtaagcagtttcaggacttcattcattaagtggttaaacataatacttggaagaaagggctccatgtgcctagaagagaggtactgagaggaagactcactttggaggctgtagcatacaattttcagatattgcctcaggtaaaaatatacttcctggactttgttttctgacacataagaggtgtgttctgctccctgtaaagaca

SEQ ID NO: 169243 - DNA, 1114 bp, Homo sapiens
  Payload ID: 13313
  Gene Symbol: PDCD2
  Gene Name: programmed cell death 2
  Uniprot ID: Q16342
  ENST ID: ENST00000537445
  CDS Start-End: 35-601
tgtgggctgcgccccacgccagcccgcgccccgcatggctgccgccggggccaggcctgtggagctgggcttcgccgagtcggcgccggcgtggcgactgcgcagcgagcagttccccagcaaggtgtatgcgccgctgcctggccgcccggacgccttccaccgctgcatcttcctcttctgctgccgcgagcagccgtgctgtgccggcctgcgagtttttaggaatcaactacccaggaaaaacgatttttactcatatgagccaccttctgagaatcctcccccagaaacaggagaatcagtgtgtctccagcttaagtctggtgctcatctctgcagggtttgtggctgtttaggccccaaaacgtgctccagatgccacaaagcatattactgcagcaaggagcatcagaccctagactggagattgggacataagcaggcttgtgcacaaccagatcatctggaccatataattccagaccacaacttcctttttccagaatttgaaattgtaatagaaacagaagatgagattatgcctgaggttgtggaaaaggaagattactcagagattatagggagcatggggatataatgggaagcaacactccagtggtcagatgctcacagtcttatggaggagcccaaataatatctggggaagttaaagtccatataatgactgataagagtacaatacaggtgccatgggaacacgtgacatcactgaagactgcctggaaggggccgcgcgtgtgttcatgcctatacgataaacatgatacataatgaaaatgcttatctttaggagaaaggagagcctagagtagcaggatcaaggatgaaagctggacttcaaatatgccttgttagtgtaaatgtgactgtggaactgtatgagtattttaagattatggagtaaagtaagttttaaaaagcagtccctaatcatcaaaagtaaaaaactcttgatgtagtcatataaccacactaagaactcttccaggtgacttcaaaacataggacagtacatctctagtagaatatgccctgagaatgaaaagaatgtaacagtgttagtattttgaataaacatgttattactaga

SEQ ID NO: 169244 - DNA, 710 bp, Homo sapiens
  Payload ID: 13313
  Gene Symbol: PDCD2
  Gene Name: programmed cell death 2
  ENST ID: ENST00000544866
  CDS Start-End: 1-108
tatgcgccgctgcctggccgcccggacgccttccaccgctgcatcttcctcttctgctgccgcgagcagccgtgctgtgccggcctgcgagggtttgtggctgtttaggccccaaaacgtgctccagatgccacaaagcatattactgcagcaaggagcatcagaccctagactggagattgggacataagcaggcttgtgcacaaccagatcatctggaccatataattccagaccacaacttcctttttccagaatttgaaattgtaatagaaacagaagatgagattatgcctgaggttgtggaaaaggaagattactcagagattatagggagcatgggtgaagcacttgaggaagaactggattccatggcaaaacatgaatccagggaagataaaatttttcagaagtttaaaactcagatagcccttgaaccagaacagattcttagatatggcagaggtattgcccccatctggatttctggtgaaaatattcctcaagaaaaggatattccagattgcccctgtggtgccaagagaatattggaattccagttttcagacacggtctattgactgacttctgtgacaatgaggatatctacactgctctccacctccagtgtggttatgtcattattattagtgcctctgttaacttttgttattttaaataatgtataccttcctttcttgttctagtaa

SEQ ID NO: 169245 - DNA, 900 bp, Homo sapiens
  Payload ID: 13313
  Gene Symbol: PDCD2
  Gene Name: programmed cell death 2
  ENST ID: ENST00000545869
  CDS Start-End: 25-324
gccccacgccagcccgcgccccgcatggctgccgccggggccaggcctgtggagctgggcttcgccgagtcggcgccggcgtggcgactgcgcagcgagcagttccccagcaaggtgggcgggcggccggcatggctgggcgcggccgggctgccggggccccaggccctggcctgcgagctgtgcggccgcccgctctccttcctgctgcaggtgtatgcgccgctgcctggccgcccggacgccttccaccgctgcatcttcctcttctgctgccgcgagcagccgtgctgtgccggcctgcgagggtttgtggctgtttaggccccaaaacgtgctccagatgccacaaagcatattactgcagcaaggagcatcagaccctagactggagattgggacataagcaggcttgtgcacaaccagatcatctggaccatataattccagaccacaacttcctttttccagaatttgaaattgtaatagaaacagaagatgagattatgcctgaggttgtggaaaaggaagattactcagagattatagggagcatgggtgaagcacttgaggaagaactggattccatggcaaaacatgaatccagggaagataaaatttttcagaagtttaaaactcagatagcccttgaaccagaacagattcttagatatggcagaggtattgcccccatctggatttctggtgaaaatattcctcaagaaaaggatattccagattgcccctgtggtgccaagagaatattggaattccaggtcatgcctcagctcctaaactacctgaaggctgacagactgggcaagagcattgactggggcatcctggctgtcttcacctgtgctgagagctgcagcttgggtactggctatacagaagaat

SEQ ID NO: 169246 - DNA, 560 bp, Homo sapiens
  Payload ID: 13313
  Gene Symbol: PDCD2
  Gene Name: programmed cell death 2
  ENST ID: ENST00000538195
  CDS Start-End: 496-560
agggggacggcggcaagcaccgctgccgccccagcctcagagctccctctccgcgctgccccaggagcaccttctcccgggcccttccaggatgtgctcatttttgctacataagcttctaactgtgcccacgcgcattggtaacccccagcttttaatcagtgggtaccagtttttaggaatcaactacccaggaaaaacgatttttactcatatgagccaccttctgagaatcctcccccagaaacaggagaatcagtgtgtctccagcttaagtctggtgctcatctctgcagggtttgtggctgtttaggccccaaaacgtgctccagatgccacaaagcatattactgcagcaaggagcatcagaccctagactggagattgggacataagcaggcttgtgcacaaccagatcatctggaccatataattccagaccacaacttcctttttccagaatttgaaattgtaatagaaacagaagatgagattatgcctgaggttgtggaaaaggaagattactcagagattatagggagcatgggtgaagcacttga

SEQ ID NO: 169247 - DNA, 1164 bp, Homo sapiens
  Payload ID: 13313
  Gene Symbol: PDCD2
  Gene Name: programmed cell death 2
  ENST ID: ENST00000544336
  CDS Start-End: 112-411
tccgcctcctgtcctccggaaaggtgcccgcctcttgccttccggcccggcgcccgatttccgccttccgacccagctgtgggctgcgccccacgccagcccgcgccccgcatggctgccgccggggccaggcctgtggagctgggcttcgccgagtcggcgccggcgtggcgactgcgcagcgagcagttccccagcaaggtgggcgggcggccggcatggctgggcgcggccgggctgccggggccccaggccctggcctgcgagctgtgcggccgcccgctctccttcctgctgcaggtgtatgcgccgctgcctggccgcccggacgccttccaccgctgcatcttcctcttctgctgccgcgagcagccgtgctgtgccggcctgcgagggtttgtggctgtttaggccccaaaacgtgctccagatgccacaaagcatattactgcagcaaggagcatcagaccctagactggagattgggacataagcaggcttgtgcacaaccagatcatctggaccatataattccagaccacaacttcctttttccagaatttgaaattgtaatagaaacagaagatgagattatgcctgaggttgtggaaaaggaagattactcagagattatagggagcatggggatataatgggaagcaacactccagtggtcagatgctcacagtcttatggaggagcccaaataatatctggggaagttaaagtccatataatgactgataagagtacaatacaggtgccatgggaacacgtgacatcactgaagactgcctggaaggggccgcgcgtgtgttcatgcctatacgataaacatgatacataatgaaaatgcttatctttaggagaaaggagagcctagagtagcaggatcaaggatgaaagctggacttcaaatatgccttgttagtgtaaatgtgactgtggaactgtatgagtattttaagattatggagtaaagtaagttttaaaaagcagtccctaatcatcaaaagtaaaaaactcttgatgtagtcatataaccacactaagaactcttccaggtgacttcaaaacataggacagtacatctctagtagaatatgccctgagaatgaaaagaatgtaacagtgttagtattttgaataaacatgttattacta

SEQ ID NO: 169248 - DNA, 1287 bp, Homo sapiens
  Payload ID: 13313
  Gene Symbol: PDCD2
  Gene Name: programmed cell death 2
  ENST ID: ENST00000614056
  CDS Start-End: 112-777
tccgcctcctgtcctccggaaaggtgcccgcctcttgccttccggcccggcgcccgatttccgccttccgacccagctgtgggctgcgccccacgccagcccgcgccccgcatggctgccgccggggccaggcctgtggagctgggcttcgccgagtcggcgccggcgtggcgactgcgcagcgagcagttccccagcaaggtgggcgggcggccggcatggctgggcgcggccgggctgccggggccccaggccctggcctgcgagctgtgcggccgcccgctctccttcctgctgcaggtgtatgcgccgctgcctggccgcccggacgccttccaccgctgcatcttcctcttctgctgccgcgagcagccgtgctgtgccggcctgcgagtttttaggaatcaactacccaggaaaaacgatttttactcatatgagccaccttctgagaatcctcccccagaaacaggagaatcagtgtgtctccagcttaagtctggtgctcatctctgcagggtttgtggctgtttaggccccaaaacgtgctccagatgccacaaagcatattactgcagcaaggagcatcagaccctagactggagattgggacataagcaggcttgtgcacaaccagatcatctggaccatataattccagaccacaacttcctttttccagaatttgaaattgtaatagaaacagaagatgagattatgcctgaggttgtggaaaaggaagattactcagagattatagggagcatggggatataatgggaagcaacactccagtggtcagatgctcacagtcttatggaggagcccaaataatatctggggaagttaaagtccatataatgactgataagagtacaatacaggtgccatgggaacacgtgacatcactgaagactgcctggaaggggccgcgcgtgtgttcatgcctatacgataaacatgatacataatgaaaatgcttatctttaggagaaaggagagcctagagtagcaggatcaaggatgaaagctggacttcaaatatgccttgttagtgtaaatgtgactgtggaactgtatgagtattttaagattatggagtaaagtaagttttaaaaagcagtccctaatcatcaaaagtaaaaaactcttgatgtagtcatataaccacactaagaactcttccaggtgacttcaaaacataggacagtacatctctagtagaatatgccctgagaatgaaaagaatgtaacagtgttagtattttgaataaacatgttattact

SEQ ID NO: 169249 - DNA, 1171 bp, Homo sapiens
  Payload ID: 13314
  Gene Symbol: PDCD2L
  Gene Name: programmed cell death 2-like
  Uniprot ID: Q9BRP1
  ENST ID: ENST00000246535
  CDS Start-End: 48-1124
cagagaggccgccgtagtttgcgttttcacctggtcgcccggcggccatggcggccgttctgaagccggtgctgctgggccttcgagatgcgccggtgcacggcagccccacagggccgggtgcctggactgctagcaagctgggcggcattccggatgctctgcccaccgtggctgcgcccaggcccgtgtgtcagcgctgcgggcagccgctcgctctggtcgtgcaggtgtattgcccgctggaaggctccccgtttcaccgtctgctgcacgtgttcgcgtgcgcctgccccggctgtagcaccggcggtgcgcgcagctggaaggtgttccgctcccagtgcctgcaggtgccagagagagaggcgcaggacgctcagaaacagggaaacagccttgcagctgaggactggtgtgaaggtgctgatgactggggaagtgatactgaggaggggccttcaccacagtttaccttggattttgggaatgatgccagcagtgccaaagacgtagactggactgctcggctccaagacctccgcctgcaggatgctgtcctgggtgctgcccatcctgtgcctcctgggctgccgctcttcctgccctactacatctgtgttgcagatgaggatgattacagggactttgtcaacctggatcatgcccacagccttctgagggactatcagcagagagaaggcattgccatggatcagttgctttcccaaagccttcctaatgatggtgatgaaaaatatgagaagaccataattaaaagtggagatcagacgttttacaaattcatgaagcgaattgctgcttgtcaggagcagattttgaggtattcctggagtggagagccactctttttgacctgccctacatcagaagtcaccgagctcccagcctgcagccagtgtggaggccaaaggatatttgagtttcagcttatgccagcactggtcagcatgctcaagagtgctaatttaggtctttctgtggaatttggaacaattctagtttacacatgtgagaagagttgctggcccccaaatcatcagactcccatggaagaattttgtattatacaagaagacccagatgaattattgtttaagtagagcatttccttttattaatataaattaaaacaaatgtttacatccaa

SEQ ID NO: 169250 - DNA, 492 bp, Homo sapiens
  Payload ID: 13314
  Gene Symbol: PDCD2L
  Gene Name: programmed cell death 2-like
  ENST ID: ENST00000587065
  CDS Start-End: 274-444
agtcccagagctgctccaggggtgtcctttccagcgggctggggcgggccggcgggctggagtcggggtgcagccctcacggccctttgtcttcaccccgaagctggaaggtgttccgctcccagtgcctgcaggtgccagagagagaggcgcaggacgctcaggtattcctggagtggagagccactctttttgacctgccctacatcagaagtcaccgagctcccagcctgcagccagtgtggaggccaaaggatatttgagtttcagcttatgccagcactggtcagcatgctcaagagtgctaatttaggtctttctgtggaatttggaacaattctagtttacacatgtgagaagagttgctggcccccaaatcatcagactcccatggaagaattttgtattatacaagaagacccagatgaattattgtttaagtagagcatttccttttattaatataaattaaaacaaatgtttacatccaaa

SEQ ID NO: 169251 - DNA, 3602 bp, Homo sapiens
  Payload ID: 13315
  Gene Symbol: PDCD4
  Gene Name: programmed cell death 4 (neoplastic transformation inhibitor)
  Uniprot ID: Q53EL6
  ENST ID: ENST00000280154
  CDS Start-End: 275-1684
agctccggctccgccgccacgattggccagccgaccacccggcctcggccaataagcgccgccctctcgcccccgtgttactgggtagaagaaaacaaaaacaaacagagcgagaagggccagagactctccgaggcggcggcagagacagaagagcggggtcggggccggctgaccaggaacctgggcgagcagcggcgggggcccgagggattctgaaggaagatttccattaggtaatttgtttaatcagtgcaagcgaaattaagggaaaatggatgtagaaaatgagcagatactgaatgtaaaccctgcagatcctgataacttaagtgactctctcttttccggtgatgaagaaaatgctgggactgaggaaataaagaatgaaataaatggaaattggatttcagcatcctccattaacgaagctagaattaatgccaaggcaaaaaggcgactaaggaaaaactcatcccgggactctggcagaggcgattcggtcagcgacagtgggagtgacgcccttagaagtggattaactgtgccaaccagtccaaagggaaggttgctggataggcgatccagatctgggaaaggaaggggactaccaaagaaaggtggtgcaggaggcaaaggtgtctggggtacacctggacaggtgtatgatgtggaggaggtggatgtgaaagatcctaactatgatgatgaccaggagaactgtgtttatgaaactgtagttttgcctttggatgaaagggcatttgagaagactttaacaccaatcatacaggaatattttgagcatggagatactaatgaagttgcggaaatgttaagagatttaaatcttggtgaaatgaaaagtggagtaccagtgttggcagtatccttagcattggaggggaaggctagtcatagagagatgacatctaagcttctttctgacctttgtgggacagtaatgagcacaactgatgtggaaaaatcatttgataaattgttgaaagatctacctgaattagcactggatactcctagagcaccacagttggtgggccagtttattgctagagctgttggagatggaattttatgtaatacctatattgatagttacaaaggaactgtagattgtgtgcaggctagagctgctctggataaggctaccgtgcttctgagtatgtctaaaggtggaaagcgtaaagatagtgtgtggggctctggaggtgggcagcaatctgtcaatcaccttgttaaagagattgatatgctgctgaaagaatatttactctctggagacatatctgaagctgaacattgccttaaggaactggaagtacctcattttcaccatgagcttgtatatgaagctattataatggttttagagtcaactggagaaagtacatttaagatgattttggatttattaaagtccctttggaagtcttctaccattactgtagaccaaatgaaaagaggttatgagagaatttacaatgaaattccggacattaatctggatgtcccacattcatactctgtgctggagcggtttgtagaagaatgttttcaggctggaataatttccaaacaactcagagatctttgtccttcaaggggcagaaagcgttttgtaagcgaaggagatggaggtcgtcttaaaccagagagctactgaatataagaactcttgcagtcttagatgttataaaaatatatatctgaattgtaagagttgttagcacaagttttttttttttttttttttaagcacttgttttgggtacaaggcatttctgacattttataaacctacatttaaggggaatttttaaaggaaatgttttttcttttttttttgtttttcgagggggcaaggagggacagaaaagtaacctcttcttaagtggaatattctaataagctaccttttgtaagtgccatgtttattatctaatcattccaagttttgcattgatgtctgactgccactcctttctttcaaggacagtgttttttgtagtaaaatcactggtttatacaaagctttatttagggggtaaagttaagctgctaaaaccccatgttggctgctgctgttgagatactgtgctttgggagtaaaaaaagaaagttatttctttgtcttaaagaatttttaaaaaattagtcatgagacttattcatctttccagggaacatactgattggtcttaaaagactagacagttaagtaaaaggtggctggaacatctatttttctacaaaactggaaaaatgaacctggttctagaagaatgtacaccaaaataaaacatgtgaagcagtattgattctttattgggagtacatttttttaggtctcttaaactttaatttcacacagtaaattttgaatctcataaggaagcatatttgaacctagtcaatttaatcttagtgttcccttgaaaactttttttccctacaaaattttaagtgaaaaatacaatagtaaattaagattacactggggaaaaaaatgcaggtatcactttactccattgttatctgacctagagcttaattaagttttagaaatatgtaataccttccatcattccatcatccttaaattctgttaccaaataatggctaatgttacaaaaagttatactccagagacccaaagcttgacatttacctaatgtatgagaaaatattaccaattaacaataaagaatgatcatatttttaacctcttttacatagcctaataactcagcaaggcctcaacgtctgtgctaatttaaactgccaaatattgactgcagcaaacaagaattatattcagaatttatgagggtactgttaggagtatactgcttacaggtttagatatagtctgttagaattaaaaccaagtttagtgttcatatttacctcatgggctttatcaagcccatattacctcagcttatatatagttaccatttttaggtttttaattgtttgacacttggatgataaatgcagtcattttattctcaagtgcttaaaattaatgtaattaaaagcttagctgactacagaataggtgagggtttcttaaaaatgagatttaagggctgggcacggtggctcatgcctgtaatcccagcactttgggaggccgaggtgggcggatcacttgaggttgggagttcatgaccagcttgaccaacatgaagaaaccctgtctctattaaaaatacaaaagtagccaggcatggtggcgcatgcgtgtaatcccagctacttgggaggctgaggcaggagaattgcttgaacctgggaggcagaggttgcagtgagtcgagatggtgccattgctctcgtttgggcaacaagagtgaaactcttgtctcaaaaaaaaaaaaaaatgaggtttaagacagttttgtcattactggtgggatctggtcacacaagatagcattaaacgtgacatggcacataaaattggttaaaaaattttgttttttaattacgtaatgtaaaagcccaacaaacactttatgcaagattggaatgtatcttcaaattcagatttaataaacatgtaaagatcctctgta

SEQ ID NO: 169252 - DNA, 3697 bp, Homo sapiens
  Payload ID: 13315
  Gene Symbol: PDCD4
  Gene Name: programmed cell death 4 (neoplastic transformation inhibitor)
  Uniprot ID: Q53EL6
  ENST ID: ENST00000393104
  CDS Start-End: 404-1780
cttttcctcctcagctccggctccgccgccacgattggccagccgaccacccggcctcggccaataagcgccgccctctcgcccccgtgttactgggtagaagaaaacaaaaacaaacagagcgagaagggccagagactctccgaggcggcggcagagacagaagagcggggtcggggccggctgaccaggaacctgggcgagcagcggcgggggcccgagggattctgaaggaagatttccattaggtaatttgtttaatcagtgcaagcgaaattaagggaaaatggatgtagaaaatgagcagatactgaatgtaaaccctgcagggtattttccctaattctccatggtgcttcaatagcatgttattatcataaaaatgaacagttttgtggaatagatgaccaaatatcctgataacttaagtgactctctcttttccggtgatgaagaaaatgctgggactgaggaaataaagaatgaaataaatggaaattggatttcagcatcctccattaacgaagctagaattaatgccaaggcaaaaaggcgactaaggaaaaactcatcccgggactctggcagaggcgattcggtcagcgacagtgggagtgacgcccttagaagtggattaactgtgccaaccagtccaaagggaaggttgctggataggcgatccagatctgggaaaggaaggggactaccaaagaaaggtggtgcaggaggcaaaggtgtctggggtacacctggacaggtgtatgatgtggaggaggtggatgtgaaagatcctaactatgatgatgaccaggagaactgtgtttatgaaactgtagttttgcctttggatgaaagggcatttgagaagactttaacaccaatcatacaggaatattttgagcatggagatactaatgaagttgcggaaatgttaagagatttaaatcttggtgaaatgaaaagtggagtaccagtgttggcagtatccttagcattggaggggaaggctagtcatagagagatgacatctaagcttctttctgacctttgtgggacagtaatgagcacaactgatgtggaaaaatcatttgataaattgttgaaagatctacctgaattagcactggatactcctagagcaccacagttggtgggccagtttattgctagagctgttggagatggaattttatgtaatacctatattgatagttacaaaggaactgtagattgtgtgcaggctagagctgctctggataaggctaccgtgcttctgagtatgtctaaaggtggaaagcgtaaagatagtgtgtggggctctggaggtgggcagcaatctgtcaatcaccttgttaaagagattgatatgctgctgaaagaatatttactctctggagacatatctgaagctgaacattgccttaaggaactggaagtacctcattttcaccatgagcttgtatatgaagctattataatggttttagagtcaactggagaaagtacatttaagatgattttggatttattaaagtccctttggaagtcttctaccattactgtagaccaaatgaaaagaggttatgagagaatttacaatgaaattccggacattaatctggatgtcccacattcatactctgtgctggagcggtttgtagaagaatgttttcaggctggaataatttccaaacaactcagagatctttgtccttcaaggggcagaaagcgttttgtaagcgaaggagatggaggtcgtcttaaaccagagagctactgaatataagaactcttgcagtcttagatgttataaaaatatatatctgaattgtaagagttgttagcacaagttttttttttttttttttttaagcacttgttttgggtacaaggcatttctgacattttataaacctacatttaaggggaatttttaaaggaaatgttttttcttttttttttgtttttcgagggggcaaggagggacagaaaagtaacctcttcttaagtggaatattctaataagctaccttttgtaagtgccatgtttattatctaatcattccaagttttgcattgatgtctgactgccactcctttctttcaaggacagtgttttttgtagtaaaatcactggtttatacaaagctttatttagggggtaaagttaagctgctaaaaccccatgttggctgctgctgttgagatactgtgctttgggagtaaaaaaagaaagttatttctttgtcttaaagaatttttaaaaaattagtcatgagacttattcatctttccagggaacatactgattggtcttaaaagactagacagttaagtaaaaggtggctggaacatctatttttctacaaaactggaaaaatgaacctggttctagaagaatgtacaccaaaataaaacatgtgaagcagtattgattctttattgggagtacatttttttaggtctcttaaactttaatttcacacagtaaattttgaatctcataaggaagcatatttgaacctagtcaatttaatcttagtgttcccttgaaaactttttttccctacaaaattttaagtgaaaaatacaatagtaaattaagattacactggggaaaaaaatgcaggtatcactttactccattgttatctgacctagagcttaattaagttttagaaatatgtaataccttccatcattccatcatccttaaattctgttaccaaataatggctaatgttacaaaaagttatactccagagacccaaagcttgacatttacctaatgtatgagaaaatattaccaattaacaataaagaatgatcatatttttaacctcttttacatagcctaataactcagcaaggcctcaacgtctgtgctaatttaaactgccaaatattgactgcagcaaacaagaattatattcagaatttatgagggtactgttaggagtatactgcttacaggtttagatatagtctgttagaattaaaaccaagtttagtgttcatatttacctcatgggctttatcaagcccatattacctcagcttatatatagttaccatttttaggtttttaattgtttgacacttggatgataaatgcagtcattttattctcaagtgcttaaaattaatgtaattaaaagcttagctgactacagaataggtgagggtttcttaaaaatgagatttaagggctgggcacggtggctcatgcctgtaatcccagcactttgggaggccgaggtgggcggatcacttgaggttgggagttcatgaccagcttgaccaacatgaagaaaccctgtctctattaaaaatacaaaagtagccaggcatggtggcgcatgcgtgtaatcccagctacttgggaggctgaggcaggagaattgcttgaacctgggaggcagaggttgcagtgagtcgagatggtgccattgctctcgtttgggcaacaagagtgaaactcttgtctcaaaaaaaaaaaaaaatgaggtttaagacagttttgtcattactggtgggatctggtcacacaagatagcattaaacgtgacatggcacataaaattggttaaaaaattttgttttttaattacgtaatgtaaaagcccaacaaacactttatgcaagattggaatgtatcttcaaattcagatttaataaacatgtaaagatcctctgt

SEQ ID NO: 169253 - DNA, 819 bp, Homo sapiens
  Payload ID: 13315
  Gene Symbol: PDCD4
  Gene Name: programmed cell death 4 (neoplastic transformation inhibitor)
  ENST ID: ENST00000444997
  CDS Start-End: 127-819
cagaagagcggggtcggggccggctgaccaggaacctgggcgagcagcggcgggggcccgagggattctgaaggaagatttccattaggtaatttgtttaatcagtgcaagcgaaattaagggaaaatggatgtagaaaatgagcagatactgaatgtaaaccctgcagaaaatgctgggactgaggaaataaagaatgaaataaatggaaattggatttcagcatcctccattaacgaagctagaattaatgccaaggcaaaaaggcgactaaggaaaaactcatcccgggactctggcagaggcgattcggtcagcgacagtgggagtgacgcccttagaagtggattaactgtgccaaccagtccaaagggaaggttgctggataggcgatccagatctgggaaaggaaggggactaccaaagaaaggtggtgcaggaggcaaaggtgtctggggtacacctggacaggtgtatgatgtggaggaggtggatgtgaaagatcctaactatgatgatgaccaggagaactgtgtttatgaaactgtagttttgcctttggatgaaagggcatttgagaagactttaacaccaatcatacaggaatattttgagcatggagatactaatgaagttgcggaaatgttaagagatttaaatcttggtgaaatgaaaagtggagtaccagtgttggcagtatccttagcattggaggggaaggctagtcatagagagatgacatctaagcttctttctgacctttgtgggacagtaatgagcacaactgatgtggaaaaatcatttgataaattgttgaaa

SEQ ID NO: 169254 - DNA, 558 bp, Homo sapiens
  Payload ID: 13316
  Gene Symbol: PDCD5
  Gene Name: programmed cell death 5
  ENST ID: ENST00000221784
  CDS Start-End: 61-228
cgcgctcgcgccgaggggctgcgagagtgaccgcggctgctccagcgctgacgccgagccatggcggacgaggagcttgaggcgctgaggagacagaggctggccgagctgcaggccaaacacggggatcctggtgatgcggcccaacaggaagcaaagcacagcagaaatgagaaacagtatcttagcccaagttctggatcagtcggcccgggccaggttaagtaacttagcacttgtaaagcctgaaaaaactaaagcagtagagaattaccttatacagatggcaagatatggacaactaagtgagaaggtatcagaacaaggtttaatagaaatccttaaaaaagtaagccaacaaacagaaaagacaacaacagtgaaattcaacagaagaaaagtaatggactctgatgaagatgacgattattgaactacaagtgctcacagactagaacttaacggaacaagtctaggacagaagttaagatctgattatttactttgtttattgtctatatgccttttaaaaaaataaacttgttatgcaaaataaaa

SEQ ID NO: 169255 - DNA, 154 bp, Homo sapiens
  Payload ID: 13316
  Gene Symbol: PDCD5
  Gene Name: programmed cell death 5
  ENST ID: ENST00000379316
  CDS Start-End: 6-128
gagccatggcggacgaggagcttgaggcgctgaggagacagaggctggccgagctgcaggccaaacacggggatcctggtgatgcggcccaacaggaagcaaagcacagttcaacagaagaaaagtaatggactctgatgaagatgacgattat

SEQ ID NO: 169256 - DNA, 699 bp, Homo sapiens
  Payload ID: 13316
  Gene Symbol: PDCD5
  Gene Name: programmed cell death 5
  Uniprot ID: O14737
  ENST ID: ENST00000590247
  CDS Start-End: 195-572
ccgtgcgcccaagctcgaccgcctgaaatcggggaatcgggcctctgccggcgccctggcagcggcgcggggcgtggctccgggctggattggtggcgcctgggccccgcgagcgcctgcgcagtggtcaaggccgcgctcgcgccgaggggctgcgagagtgaccgcggctgctccagcgctgacgccgagccatggcggacgaggagcttgaggcgctgaggagacagaggctggccgagctgcaggccaaacacggggatcctggtgatgcggcccaacaggaagcaaagcacagggaagcagaaatgagaaacagtatcttagcccaagttctggatcagtcggcccgggccaggttaagtaacttagcacttgtaaagcctgaaaaaactaaagcagtagagaattaccttatacagatggcaagatatggacaactaagtgagaaggtatcagaacaaggtttaatagaaatccttaaaaaagtaagccaacaaacagaaaagacaacaacagtgaaattcaacagaagaaaagtaatggactctgatgaagatgacgattattgaactacaagtgctcacagactagaacttaacggaacaagtctaggacagaagttaagatctgattatttactttgtttattgtctatatgccttttaaaaaaataaacttgttatgcaaaataaaaca

SEQ ID NO: 169257 - DNA, 601 bp, Homo sapiens
  Payload ID: 13316
  Gene Symbol: PDCD5
  Gene Name: programmed cell death 5
  ENST ID: ENST00000586035
  CDS Start-End: 224-487
gggggccgccacgtgcgggacctgccctggcgttggggtgtggggtcccctagcctggagcgggctcgtcctggcgggcctggatccaagcacaatctcagcttttggagccagcagccggaccgaattcagtttttccggagttcagttgttatgacccaagtttagccgacaggatcctggtgatgcggcccaacaggaagcaaagcacagggaagcagaaatgagaaacagtatcttagcccaagttctggatcagtcggcccgggccaggttaagtaacttagcacttgtaaagcctgaaaaaactaaagcagtagagaattaccttatacagatggcaagatatggacaactaagtgagaaggtatcagaacaaggtttaatagaaatccttaaaaaagtaagccaacaaacagaaaagacaacaacagtgaaattcaacagaagaaaagtaatggactctgatgaagatgacgattattgaactacaagtgctcacagactagaacttaacggaacaagtctaggacagaagttaagatctgattatttactttgtttattgtctatatgccttttaaaaaaataaacttgttat

SEQ ID NO: 169258 - DNA, 468 bp, Homo sapiens
  Payload ID: 13316
  Gene Symbol: PDCD5
  Gene Name: programmed cell death 5
  ENST ID: ENST00000592786
  CDS Start-End: 31-228
ccgcggctgctccagcgctgacgccgagccatggcggacgaggagcttgaggcgctgaggagacagaggctggccgagctgcaggccaaacacggggatcctggtgatgcggcccaacaggaagcaaagcacagggaagcagaaatgagaaacagtatcttagcccaagttctggatcagtcggcccgggccaggtgtatcagaacaaggtttaatagaaatccttaaaaaagtaagccaacaaacagaaaagacaacaacagtgaaattcaacagaagaaaagtaatggactctgatgaagatgacgattattgaactacaagtgctcacagactagaacttaacggaacaagtctaggacagaagttaagatctgattatttactttgtttattgtctatatgccttttaaaaaaataaacttgttatgcaaaataaaacatttgggtaagttgttttagtatcat

SEQ ID NO: 169259 - DNA, 1799 bp, Homo sapiens
  Payload ID: 13316
  Gene Symbol: PDCD5
  Gene Name: programmed cell death 5
  Uniprot ID: O14737
  ENST ID: ENST00000419343
  CDS Start-End: 62-451
ccgcgctcgcgccgaggggctgcgagagtgaccgcggctgctccagcgctgacgccgagccatggcggacgaggagcttgaggcgctgaggagacagaggctggccgagctgcaggccaaacacggggatcctggtgatgcggcccaacaggaagcaaagcacagggaagcagaaatgagaaacagtatcttagcccaagttctggatcagtcggcccgggccaggttaagtaacttagcacttgtaaagcctgaaaaaactaaagcagtagagaattaccttatacagatggcaagatatggacaactaagtgagaaggtaagcttagacagccttgaggaactttactgttacctgctttatcaaaacatggcttcaaaaggtcagctgcatcttcactggattacagaattcttgctgactctcagaagaaattgttggagagaatagtcatacctactttaaaagagaataaattgcctttcctaaattcctctgcttcgctcctttcctggcgttgctctggaaccttgttggtgtctgtgacccaatgactgttagggtcagctagcttcaattgcccctgcactggaagcaaggtttgtcagtaacaccaattaaaatactaccagtgtaagtagaaggtgtgttttgcagatgagaaggtgctaagatgccttgcttatgttctctgtgttgctgtaataccatgaggggtatgttgtggcaaacctggcctttgagatcaagacgaaccccacctgccctgagaagccgtctgctaccaccacagcctacccgaattggtcctgtcccctaaacccctcacactgagaactgcttgtgtgggagagagctggttgggttgatcttttccgagtgtgacttacctccttcaaggggatgtttaagcttctcgggcagaagtggtgtgtctattcctgacaccaaacaccgtggtatatgtggttgtcacactcagctagtgatgataaaggtgttcttaaatatgttagctttcagttttcctgaggaagcaattttatggatacttccccctccttctcaagtgaggaatagcagagcaaattttatttggaacttaaaccaatagttataaccaatagtttcaacctcctgcctcaccactgcttccttcctgagctctttccccacacctcaaaaagagtacaaagtgattccatctgcagaggtaaattctttgtttaaaaaagtactgtttttcttatcttttctggttctcctaggtatcagaacaaggtttaatagaaatccttaaaaaagtaagccaacaaacagaaaagacaacaacagtgaaagtaagtgtccccagatgcttgtggcaaatgaaaagatggatactttaaagattaatgttgagtatacatctaccacacatatttttcagcccagagacattttccttttgtcaaacacgtgaaagtttggggagaaaggctgaatctgttgggggagggttctaatttttataggctcttgactccattcccacccttttagttcacgctaagttgctttaaagacacaaatgtcttgctaaaattggtagaaatcttttctcggaaaatctgagttatgctttattagaaatgttctgacactcatttaattttcctcccagttcaacagaagaaaagtaatggactctgatgaagatgacgattattgaactacaagtgctcacagactagaacttaacggaacaagtctaggacagaagttaagatctgattatttactttgtttattgtctata

SEQ ID NO: 169260 - DNA, 1135 bp, Homo sapiens
  Payload ID: 13317
  Gene Symbol: PDCD6
  Gene Name: programmed cell death 6
  Uniprot ID: O75340
  ENST ID: ENST00000264933
  CDS Start-End: 101-676
gataatgccaggccctgcccccggcagaggcggaagcggagtcggcctgagaggtctctcgtcgctgcaggcgcctcagcccagccgcgtgccttggcccatggccgcctactcttaccgccccggccctggggccggccctgggcctgctgcaggcgcggcgctgccggaccagagcttcctgtggaacgttttccagagggtcgataaagacaggagtggagtgatatcagacaccgagcttcagcaagctctctccaacggcacgtggactccctttaatccagtgactgtcaggtcgatcatatccatgtttgaccgtgagaacaaggccggcgtgaacttcagcgagttcacgggtgtgtggaagtacatcacggactggcagaacgtcttccgcacgtacgaccgggacaactccgggatgatcgataagaacgagctgaagcaggccctctcaggtttcggctaccggctctctgaccagttccacgacatcctcattcgaaagtttgacaggcagggacgggggcagattgccttcgacgacttcatccagggctgcatcgtcctgcagaggttgacggatatattcagacgttacgacacggatcaggacggctggattcaggtgtcgtacgaacagtacctgtccatggtcttcagtatcgtatgaccctggcctctcgtgaagagcagcacaacatggaaagagccaaaatgtcacagttcctatctgtgagggaatggagcacaggtgcagttagatgctgttcttcctttagattttgtcacgtggggacccagctgtacatatgtggataagctgattaatggttttgcaactgtaatagtagctgtatcgttctaatgcagacattggatttggtgactgtctcattgtgccatgaggtaaatgtaatgtttcaggcattctgcttgcaaaaaaatctatcatgtgcttttctagatgtctctggttctatagtgcaaatgcttttattagccaataggaattttaaaataacatggaacttacacaaaaggcttttcatgtgccttacttttttaaaaaggagtttattgtattcattggaatatgtgacgtaagcaataaagggaatgttagacgtgt

SEQ ID NO: 169261 - DNA, 672 bp, Homo sapiens
  Payload ID: 13317
  Gene Symbol: PDCD6
  Gene Name: programmed cell death 6
  Uniprot ID: O75340
  ENST ID: ENST00000505221
  CDS Start-End: 75-284
gaggcggaagcggagtcggcctgagaggtctctcgtcgctgcaggcgcctcagcccagccgcgtgccttggcccatggccgcctactcttaccgccccggccctggggccggccctgggcctgctgcaggcgcggcgctgccggaccagagcttcctgtggaacgttttccagagggtcgataaagacaggagtggagtgatatcagacaccgagcttcagcaagctctctccaacggcacgtggactccctttaatccagtgactgtcaggtcgatcatataggttgacggatatattcagacgttacgacacggatcaggacggctggattcaggtgtcgtacgaacagtacctgtccatggtcttcagtatcgtatgaccctggcctctcgtgaagagcagcacaacatggaaagagccaaaatgtcacagttcctatctgtgagggaatggagcacaggtgcagttagatgctgttcttcctttagattttgtcacgtggggacccagctgtacatatgtggataagctgattaatggttttgcaactgtaatagtagctgtatcgttctaatgcagacattggatttggtgactgtctcattgtgccatgaggtaaatgtaatgtttcaggcattctgcttgcaaaaaaatctatcatgtgcttttc

SEQ ID NO: 169262 - DNA, 1156 bp, Homo sapiens
  Payload ID: 13317
  Gene Symbol: PDCD6
  Gene Name: programmed cell death 6
  ENST ID: ENST00000509581
  CDS Start-End: 65-232
cggagtcggcctgagaggtctctcgtcgctgcaggcgcctcagcccagccgcgtgccttggcccatggccgcctactcttaccgccccggccctggggccggccctgggcctgctgcaggcgcggcgctgccggaccagagcttcctgtggaacgttttccagagggtcgataaagacaggagtggagtgatatcagacaccgagcttcagcaagctctctccaacggatgaagccccacccgcccttcaggatgccagccttggcaacattgtgagaccctgtttctacaaaaagtaaatgagtgtagtggtgcacgcctgtattcccagctacttgggaggctgagatgggaagatcacttgagcctgggaggttgaggctgcattgagctgagatcaagccacggcactccagcctgggagacagagcgaaaccccatctcaaaaaaacaaagaaagtggatgcgcgctgctcctgccattggatcatcgcagcatttttcttttctctgatatgcacctttttcctcatcgtgggggctcacgttttcatagttccctctcactactaggttgtgagctgcgtgaaggaaggttcatagttgtgttgtatgtacaggcacacaaaatttgtccttggataaacacatatcctcttccttcttctctctgaatttctttattttaagaaaaaaattagagatggagtctcactgtcttgctcaggctggtctcaaactcctaggctcaagtgatcctcctgcctcagcctatactaatatgaattcctatactaatatgattgaaattagtttgatttctataataattgtgctcccagattgggcttctgttttgatagtagaactaaattattaggctatttcaagaaattaatatattactggtagaaaaactgaagctacaaaatggcctggtttctcacttcagttaaatttgtgcttctgagtgcttgtattctaggtgaaaccacactgagaaggtatttgtggcccatacactgattccttcatgagacttgtttgcacaggagagctgctaaaaattactgctctcagggaggtctgtggtgaacaggtatgaagaagaagactgttctctgcccttctttttgcaataaaatgttccaaacta

SEQ ID NO: 169263 - DNA, 1088 bp, Homo sapiens
  Payload ID: 13317
  Gene Symbol: PDCD6
  Gene Name: programmed cell death 6
  Uniprot ID: O75340
  ENST ID: ENST00000507528
  CDS Start-End: 65-634
cggagtcggcctgagaggtctctcgtcgctgcaggcgcctcagcccagccgcgtgccttggcccatggccgcctactcttaccgccccggccctggggccggccctgggcctgctgcaggcgcggcgctgccggaccagagcttcctgtggaacgttttccagagggtcgataaagacaggagtggagtgatatcagacaccgagcttcagcaagctctctccaacggcacgtggactccctttaatccagtgactgtcaggtcgatcatatccatgtttgaccgtgagaacaaggccggcgtgaacttcagcgagttcacgggtgtgtggaagtacatcacggactggcagaacgtcttccgcacgtacgaccgggacaactccgggatgatcgataagaacgagctgaagcaggccctctcaggctaccggctctctgaccagttccacgacatcctcattcgaaagtttgacaggcagggacgggggcagattgccttcgacgacttcatccagggctgcatcgtcctgcagaggttgacggatatattcagacgttacgacacggatcaggacggctggattcaggtgtcgtacgaacagtacctgtccatggtcttcagtatcgtatgaccctggcctctcgtgaagagcagcacaacatggaaagagccaaaatgtcacagttcctatctgtgagggaatggagcacaggtgcagttagatgctgttcttcctttagattttgtcacgtggggacccagctgtacatatgtggataagctgattaatggttttgcaactgtaatagtagctgtatcgttctaatgcagacattggatttggtgactgtctcattgtgccatgaggtaaatgtaatgtttcaggcattctgcttgcaaaaaaatctatcatgtgcttttctagatgtctctggttctatagtgcaaatgcttttattagccaataggaattttaaaataacatggaacttacacaaaaggcttttcatgtgccttacttttttaaaaaggagtttattgtattcattggaatatgtgacgtaagcaataaagggaatgttaga

SEQ ID NO: 169264 - DNA, 1484 bp, Homo sapiens
  Payload ID: 13317
  Gene Symbol: PDCD6
  Gene Name: programmed cell death 6
  ENST ID: ENST00000505526
  CDS Start-End: 61-180
gtcggcctgagaggtctctcgtcgctgcaggcgcctcagcccagccgcgtgccttggcccatggccgcctactcttaccgccccggccctggggccggccctgggcctgctgcaggcgcggcgctgccggaccagagcttcctgtggaacgttttccagaggcacgtggactccctttaatccagtgactgtcaggtcgatcatatccatgtttgaccgtgagaacaaggccggcgtgaacttcagcgagttcacgggtgtgtggaagtacatcacggactggcagaacgtcttccgcacgtacgaccgggacaactccgggatgatcgataagaacgagctgaagcaggccctctcaggtttcggctaccggctctctgaccagttccacgacatcctcattcgaaagtttgacaggcagggacgggggcagattgccttcgacgacttcatccagggctgcatcgtcctgcaggtgacggaatggcttcacgtgggtttgtggtggtggtgggaggggcttgcttgccagcgtgatgcacctgaccttcaatctaaggagctgggcatgtgtagaattagtttttggagcttataaaagtgagtctcatctttggagaagtagccggttagtgaagtgtggacaaacatgttttcctccccttggaaatggcacagagcagcccatctgcaagacgtggtttttcagtatccggtgggttatttacatgtatgttctggtgttgtggttttttttgttttttgttttgttttgttttgttttgagaccgagtctcgctctgtcacccagacgggagtgcagtggcacgatcccggctcactcccacctctgcgtcccgggtttaagcaattctcctgcctcagcctccccagtagctgggattacaggtgacacccagctaatttttgtatttttagtagagacgggattttgccatgttggccaggctgatctcaaactcctgacctcaagtaatccgcccaccttagcctcccaaagtgctaggattacagacatgagccaccatgcctggccaactatggtgtatttttacaaaaacttttattctgagaaaatgggcacgttttctgttgtggtcatcactgtgtcctgccgtctgtgtgtgaggtcagctgtggagcctgtggtcgctcaggccgccctcagtggggtctccgagctcttcccgtgcactccagtgtctgcaggagctggtaatgcaccctgacctgcaaggcaagctccttggtggtgtctctcctgctgggctctctttgagacccacgggagatggagagcagggctcaggggacccgcctgggagctccacacagacctctgctgctgtttgcaggtggtgatccaggtctctacccaggttcctcaaggtcctgtcttgttggccttggaattcagtgagagataggaacagcatggggtttttagaaataatgtggaaatt

SEQ ID NO: 169265 - DNA, 486 bp, Homo sapiens
  Payload ID: 13317
  Gene Symbol: PDCD6
  Gene Name: programmed cell death 6
  ENST ID: ENST00000507473
  CDS Start-End: 1-315
gtcgataaagacaggagtggagtgatatcagacaccgagcttcagcaagctctctccaacggcacgtggactccctttaatccagtgactgtcaggtcgatcatatgctaccggctctctgaccagttccacgacatcctcattcgaaagtttgacaggcagggacgggggcagattgccttcgacgacttcatccagggctgcatcgtcctgcagaggttgacggatatattcagacgttacgacacggatcaggacggctggattcaggtgtcgtacgaacagtacctgtccatggtcttcagtatcgtatgaccctggcctctcgtgaagagcagcacaacatggaaagagccaaaatgtcacagttcctatctgtgagggaatggagcacaggtgcagttagatgctgttcttcctttagattttgtcacgtggggacccagctgtacatatgtggataagctgattaatggttttgcaact

SEQ ID NO: 169266 - DNA, 458 bp, Homo sapiens
  Payload ID: 13317
  Gene Symbol: PDCD6
  Gene Name: programmed cell death 6
  ENST ID: ENST00000506909
  CDS Start-End: 52-273
agaggtctctcgtcgctgcaggcgcctcagcccagccgcgtgccttggcccatggccgcctactcttaccgccccggccctggggccggccctgggcctgctgcaggcgcggcgctgccggaccagagcttcctgtggaacgttttccagagggtcgataaagacaggagtggagtgatatcagacaccgagcttcagcaagctctctccaacggcacgtggactccctttaatccagtgactgtcaggtcgatcatatgccgaggacgatgatcccgccgggggagtgcacgtacgcgggccggaagcggaggaggcccctgcagaaacagaggcccgccgtgggggcagagaagtccaacccctccaagcgacaccgggaccgcctcaacgccgagttggaccacctggccagcctgctgccgttcccgcctgacatcatctccaagctggacaag

SEQ ID NO: 169267 - DNA, 931 bp, Homo sapiens
  Payload ID: 13317
  Gene Symbol: PDCD6
  Gene Name: programmed cell death 6
  ENST ID: ENST00000618970
  CDS Start-End: 101-472
gataatgccaggccctgcccccggcagaggcggaagcggagtcggcctgagaggtctctcgtcgctgcaggcgcctcagcccagccgcgtgccttggcccatggccgcctactcttaccgccccggccctggggccggccctgggcctgctgcaggcgcggcgctgccggaccagagcttcctgtggaacgttttccagagggtcgataaagacaggagtggagtgatatcagacaccgagcttcagcaagctctctccaacggctaccggctctctgaccagttccacgacatcctcattcgaaagtttgacaggcagggacgggggcagattgccttcgacgacttcatccagggctgcatcgtcctgcagaggttgacggatatattcagacgttacgacacggatcaggacggctggattcaggtgtcgtacgaacagtacctgtccatggtcttcagtatcgtatgaccctggcctctcgtgaagagcagcacaacatggaaagagccaaaatgtcacagttcctatctgtgagggaatggagcacaggtgcagttagatgctgttcttcctttagattttgtcacgtggggacccagctgtacatatgtggataagctgattaatggttttgcaactgtaatagtagctgtatcgttctaatgcagacattggatttggtgactgtctcattgtgccatgaggtaaatgtaatgtttcaggcattctgcttgcaaaaaaatctatcatgtgcttttctagatgtctctggttctatagtgcaaatgcttttattagccaataggaattttaaaataacatggaacttacacaaaaggcttttcatgtgccttacttttttaaaaaggagtttattgtattcattggaatatgtgacgtaagcaataaagggaatgttagacgtgt

SEQ ID NO: 169268 - DNA, 1050 bp, Homo sapiens
  Payload ID: 13317
  Gene Symbol: PDCD6
  Gene Name: programmed cell death 6
  ENST ID: ENST00000614778
  CDS Start-End: 226-591
gataatgccaggccctgcccccggcagaggcggaagcggagtcggcctgagaggtctctcgtcgctgcaggcgcggcgctgccggaccagagcttcctgtggaacgttttccagagggtcgataaagacaggagtggagtgatatcagacaccgagcttcagcaagctctctccaacggcacgtggactccctttaatccagtgactgtcaggtcgatcatatccatgtttgaccgtgagaacaaggccggcgtgaacttcagcgagttcacgggtgtgtggaagtacatcacggactggcagaacgtcttccgcacgtacgaccgggacaactccgggatgatcgataagaacgagctgaagcaggccctctcaggtttcggctaccggctctctgaccagttccacgacatcctcattcgaaagtttgacaggcagggacgggggcagattgccttcgacgacttcatccagggctgcatcgtcctgcagaggttgacggatatattcagacgttacgacacggatcaggacggctggattcaggtgtcgtacgaacagtacctgtccatggtcttcagtatcgtatgaccctggcctctcgtgaagagcagcacaacatggaaagagccaaaatgtcacagttcctatctgtgagggaatggagcacaggtgcagttagatgctgttcttcctttagattttgtcacgtggggacccagctgtacatatgtggataagctgattaatggttttgcaactgtaatagtagctgtatcgttctaatgcagacattggatttggtgactgtctcattgtgccatgaggtaaatgtaatgtttcaggcattctgcttgcaaaaaaatctatcatgtgcttttctagatgtctctggttctatagtgcaaatgcttttattagccaataggaattttaaaataacatggaacttacacaaaaggcttttcatgtgccttacttttttaaaaaggagtttattgtattcattggaatatgtgacgtaagcaataaagggaatgttagacgtgt

SEQ ID NO: 169269 - DNA, 1073 bp, Homo sapiens
  Payload ID: 13317
  Gene Symbol: PDCD6
  Gene Name: programmed cell death 6
  ENST ID: ENST00000628729
  CDS Start-End: 101-220
gataatgccaggccctgcccccggcagaggcggaagcggagtcggcctgagaggtctctcgtcgctgcaggcgcctcagcccagccgcgtgccttggcccatggccgcctactcttaccgccccggccctggggccggccctgggcctgctgcaggcgcggcgctgccggaccagagcttcctgtggaacgttttccagaggcacgtggactccctttaatccagtgactgtcaggtcgatcatatccatgtttgaccgtgagaacaaggccggcgtgaacttcagcgagttcacgggtgtgtggaagtacatcacggactggcagaacgtcttccgcacgtacgaccgggacaactccgggatgatcgataagaacgagctgaagcaggccctctcaggtttcggctaccggctctctgaccagttccacgacatcctcattcgaaagtttgacaggcagggacgggggcagattgccttcgacgacttcatccagggctgcatcgtcctgcagaggttgacggatatattcagacgttacgacacggatcaggacggctggattcaggtgtcgtacgaacagtacctgtccatggtcttcagtatcgtatgaccctggcctctcgtgaagagcagcacaacatggaaagagccaaaatgtcacagttcctatctgtgagggaatggagcacaggtgcagttagatgctgttcttcctttagattttgtcacgtggggacccagctgtacatatgtggataagctgattaatggttttgcaactgtaatagtagctgtatcgttctaatgcagacattggatttggtgactgtctcattgtgccatgaggtaaatgtaatgtttcaggcattctgcttgcaaaaaaatctatcatgtgcttttctagatgtctctggttctatagtgcaaatgcttttattagccaataggaattttaaaataacatggaacttacacaaaaggcttttcatgtgccttacttttttaaaaaggagtttattgtattcattggaatatgtgacgtaagcaataaagggaatgttagacgtgt

SEQ ID NO: 169270 - DNA, 6161 bp, Homo sapiens
  Payload ID: 13318
  Gene Symbol: PDCD6IP
  Gene Name: programmed cell death 6 interacting protein
  Uniprot ID: Q8WUM4
  ENST ID: ENST00000307296
  CDS Start-End: 378-2984
agtacttctccggggggttgttcgagtggaggaatactcttacgtgaaagtgctcagtacaccactgcggcaggaaggaggaagggaagaattccagatggggagaaagtaatattttgcagcacagtacagggtaaactgggtccaggtgggcgtagccgccgcgacaccttcacgtgaccgcggacagcttaaggaccccgcatccagtgcgcctgcgctggagctcccggaagttgccggacccggaacgcaggcggagcgcaagtctgtcagccagtcagtccgccagtccgccagcccagtacctctctctcctcggccctcgtaagctgtccgcggtctgtttggcccgaacggcggcggaggcgctgatcatggcgacattcatctcggtgcagctgaaaaagacctcagaggtggacctggccaagccgctggtgaagttcatccagcagacttacccaagcggcggggaagagcaggcccagtactgccgcgcggcggaggagctcagcaagctgcgccgcgccgcagtcggtcgtccgctggacaagcacgagggcgcgctcgagacgctcctgagatattatgatcagatttgttctattgaacccaaattcccattttctgaaaatcagatctgcttgacatttacctggaaggatgctttcgataaaggttcactttttggaggctctgtaaaactggctcttgcaagcttaggatatgaaaagagctgtgtgttgttcaattgtgcagccttagctagccaaattgcagcagaacagaacctggataatgatgaaggattgaaaatcgctgctaaacattaccagtttgctagtggtgcctttttacatattaaagagacggttttatctgccttaagtcgagagccgaccgtggacatatctccagatactgttgggaccctcagtcttattatgctggcacaggctcaagaagtattttttttaaaagccacaagagataaaatgaaagatgccatcatagctaaattggctaatcaggctgcagattattttggtgatgctttcaaacagtgtcaatacaaagatactctccccaaggaggtgttccctgtcttggctgcaaagcactgtatcatgcaggccaatgctgagtaccatcagtctatcctggcaaaacagcagaagaaatttggagaagaaattgcaaggttacagcatgcagcagaactgattaaaacagtggcatctcgctatgatgaatatgttaatgtgaaggatttttctgacaaaatcaatcgtgcccttgctgcagcaaagaaggataatgacttcatttatcatgatcgagttccagaccttaaagatctagatcctattggcaaagccacacttgtgaaatctaccccggtcaatgtacccatcagtcagaaatttactgatctgtttgagaagatggttcccgtgtcagtacagcagtctttggctgcctataatcagaggaaagccgatttggttaacagatcaattgctcagatgagagaagccaccactttggcaaatggggtgctagcttcccttaatcttccagcagcaattgaagatgtgtctggagacactgtacctcagtctatattgactaaatccagatctgtgattgaacagggaggcatccagactgttgatcagttgattaaagaactgcctgaattactgcaacgaaatagagaaatcctagatgagtcattaaggttgttggatgaagaagaagcaaccgataatgatttaagagcaaaatttaaggaacgttggcaaaggacaccatccaatgaactgtataagcctttaagagcagagggaaccaacttcagaacagttttagataaagctgtgcaggcagatggacaagtgaaagaatgttaccagtctcatcgtgacaccatcgtgcttttgtgtaagccagagcctgagctgaatgctgccatcccttctgctaatccagcaaagaccatgcagggcagtgaggttgtaaatgtcttaaaatccttattgtcaaatcttgatgaagtaaagaaggaaagagagggtctggagaatgacttgaaatctgtgaattttgacatgacaagcaagtttttgacagccctggctcaagatggtgtgataaatgaagaagctctttctgttactgaactagatcgagtctatggaggtcttacaactaaagtccaagaatctctaaagaaacaggagggacttcttaaaaatattcaggtctcacatcaggaattttcaaaaatgaaacaatctaataatgaagctaacttaagagaagaagttttgaagaatttagctactgcatatgacaactttgttgaacttgtagctaatttgaaggaaggcacaaagttttacaatgagttgactgaaatcctggtcaggttccagaacaaatgcagtgatatagtttttgcacggaagacagaaagagatgaactcttaaaggacttgcaacaaagcattgccagagaacctagtgctccttcaattcctacacctgcgtatcagtcctcaccagcaggaggacatgcaccaactcctccaactccagcgccaagaaccatgccgcctactaagccccagcccccagccaggcctccaccacctgtgcttccagcaaatcgagctccttctgctactgctccatctccagtgggggctgggactgctgcgccagctccatcacaaacgcctggctcagctcctcctccacaggcgcagggaccaccctatcccacctatccaggatatcctgggtattgccaaatgcccatgcccatgggctataatccttatgcgtatggccagtataatatgccatatccaccagtgtatcaccagagtcctggacaggctccatacccgggaccccagcagccttcataccccttccctcagcccccacagcagtcttactatccacagcagtaatatgtctgctcagcagctcagctgattcagatcagagggaaagaaataccaaccctgcaataagtgtactaaactctacgctctggttaatgtaatgtactctcctggactgaatgcagtgtataatttctgtctacagctagaagctgtgccccagttccacatttgattacacatgtgagatttgctgctgttgcagtataaacactaggtataataggatttgaaattgcattacagttcataaaaattgaaaatgagaaattaaacctgcaagtgaaacatttgaaacgattatactttctacataagacatggttgggacatcagatacttacaaagatggtttaagtatggatactagagaaaattaagttttctttctctttggtttattgatttggtttaatttccattatgctattttgcataatcaaggcactgtaaatcttataattttaaaataaattacttaagaacagttgtcattgttatgttttgttattgattctcattactgtctaattttttttctggtattagtctcattttgtatgtatataagttaaacagatactgtttttaagtgcatgaatagtacaagttattatcaaggatgttttacagggaaatcaaaagaatattatcatactttatctttcgtatgctgattagtaaacgatttttgacatttattttagaaagtcctataatgtggaagaaacaaacagttgctaccaaagattcttcaaataaacatacaaataaatgtgtatatttaatgttttattgttagcttctccagaaaattgatgcaaattctggtaataattcttgcattttttccccataacctggttaaaataaatacgccattggcaatacttcataatgtaatggaattgtttggggaacacttactgtaccctctcatcctttttccaccttactgtgttaacttagtgacatttaatgcccaatatgtatgaatagatctaagccatttaattttttttccttaaagattggagtattttataattcaaggagcatacaaaacaatggttgggaacatatgccaattatggaataggctatgtatttaatattaatctctgccattaggatatctactcactgtataaacctcagtaaaaatagtgaagacatgcatcatggaatgagaaaatgagaaaggaatgagttgtctaacatcacagtgggatctgttttttgtgaggttcatttctgaacacattaggcatatgagcagatttccagtgaatctatttatgtttattttctgagtttcaacgctgaccttttcttgcattattgtttcattttaatgatagtgttacttgtcccactgttgttttcattgagtttggatttatattttaaatgttcgaatgaaagtatgattgtaaaagggagtgaattggtttaaaaatatatgtatattttaaactttgttgtgtgtaggaaacatgaaggcatgttaattcaatataaatgacctttgatttcatggaatattaaagttggtttaaagtccaatagttaaaccttagcaaaaatagctttttacttcatcagttgctaagatttaatactttggattcatcaaagtgtgacatgggcttgtttgacttctgtaagtggcatttaagttccacattcttattacttgaggtactttatactaacataagacagtgagagttagaggtattacaagttgctagtttataatgtcttactaatgcagaaacaaggaaaaaagcaaaattggcctgaatattctcttggggaaagagggcaccaaagaaaagggtaagtgcatctgagggccaaaagagatgtataagccttttagcccattccccatgctgggcctgctcacagagccacaggaagatcattcagaaactaggaaaggaggcccccacagctgatcctgccacagcacacctgactcactcggctctgttagtgtaaccttttaaatgtagcaacacaaaccctttccctcttgtcagttcactcatcctttggtttctttttaatcacctgtgtctgggcacagacaatcacaataaatgcagccctttattactgttaaggatcatactgttggtttggagttggaagggtactactctgtgattcaggtgtgttgtacccatatttataattaggctttattatcttcctaaatcaaggaaaggaaatcatccccagaccatttatgctgagctttggaatactattttaaactggattgtacttaaataatgaagctctgcatagaggaactagtcagaagtggggaaaacactgtctaatttttatcagtctggtataaagtattgatctaagagaactctccctgtgccccttggtctttattctcaattaagaaaaacagtcacatgtcacgacaaaccaatcaatctttatgagatattcctgtatccataccccagcttgtttgcaatttataaacctccccttcaaaactaaggagttgcagaaaaaaatggatttcacagagccttgtgtccctaaagttctgtcccagtcagcagtctttatagtccaaacagattataaaaaatgttttccatttgaactttacagtttgcaaaagtgcttttatacattttctaatttcagaaacaggataatttgttaagtgggtttcagtttgctaatagggattttttgtgttttgttttttaattttcagcatctcttgaagaatcttgctacagccaaatggcatctcactttttaaagacgtttgcaattattagttgattcacagtacagaacaaggtataaaggaaaaaaccctgctaggtagtgttataattgctagattaaaaatagactagaacaggttcattttaagatttacttggaagagcaaagaaggaaaaattatatttttaaagaaagagaatattcaggctttatttctggtatgaagtttatattttttaaaaaaatcctatattatcacaccagagattttagattcttttctggttagaaacattgctggtagttggattatatttttattgtattcatttatcttagggggaacattgtaaagaaacaaaaaggtccagatgaatgtatgctagaaataaaagttgaaagattctt

SEQ ID NO: 169271 - DNA, 587 bp, Homo sapiens
  Payload ID: 13318
  Gene Symbol: PDCD6IP
  Gene Name: programmed cell death 6 interacting protein
  ENST ID: ENST00000435909
  CDS Start-End: 119-337
gagcgcaagtctgtcagccagtcagtccgccagtccgccagcccagtacctctctctcctcggccctcgtaagctgtccgcggtctgtttggcccgaacggcggcggaggcgctgatcatggcgacattcatctcggtgcagctgaaaaagacctcagaggtggacctggccaagccgctggtgaagttcatccagcagacttacccaagcggcggggaagagcaggcccagtactgccgcgcggcggaggagctcagcaagctgcgccgcgccgcagtcggtcgtccgctggacaagcacgagggcgcgctcgagacgctcctgagatctgcttgacatttacctggaaggatgctttcgataaaggttcactttttggaggctctgtaaaactggctcttgcaagcttaggatatgaaaagagctgtgtgttgttcaattgtgcagccttagctagccaaattgcagcagaacagaacctggataatgatgaaggattgaaaatcgctgctaaacattaccagtttgctagtggtgcctttttacatattaaagagacggttttatctgccttaagtcgagagcc

SEQ ID NO: 169272 - DNA, 582 bp, Homo sapiens
  Payload ID: 13318
  Gene Symbol: PDCD6IP
  Gene Name: programmed cell death 6 interacting protein
  ENST ID: ENST00000430877
  CDS Start-End: 109-345
ctgtcagccagtcagtccgccagtccgccagcccagtacctctctctcctcggccctcgtaagctgtccgcggtctgtttggcccgaacggcggcggaggcgctgatcatggcgacattcatctcggtgcagctgaaaaagacctcagaggtggacctggccaagccgctggtgaagttcatccagcagacttacccaagcggcggggaagagcaggcccagtactgccgcgcggcggaggagctcagcaagctgcgccgcgccgcagtcggtcgtccgctggacaagcacgagggcgcgctcgagacgctcctgaggctggtctcgaactctgggctcaagtgatccacctgcctcagcctcccagagtgctaggattacaggcgtgatctgctgtgcctggccctttcagatattatgatcagatttgttctattgaacccaaattcccattttctgaaaatcagatctgcttgacatttacctggaaggatgctttcgataaaggttcactttttggaggctctgtaaaactggctcttgcaagcttaggatatgaaaagagctgtgtgttgttcaatt

SEQ ID NO: 169273 - DNA, 566 bp, Homo sapiens
  Payload ID: 13318
  Gene Symbol: PDCD6IP
  Gene Name: programmed cell death 6 interacting protein
  ENST ID: ENST00000413073
  CDS Start-End: 107-566
gtcagccagtcagtccgccagtccgccagcccagtacctctctctcctcggccctcgtaagctgtccgcggtctgtttggcccgaacggcggcggaggcgctgatcatggcgacattcatctcggtgcagctgaaaaagacctcagaggtggacctggccaagccgctggtgaagttcatccagcagacttacccaagcggcggggaagagcaggcccagtactgccgcgcggcggaggagctcagcaagctgcgccgcgccgcagtcggtcgtccgctggacaagcacgagggcgcgctcgagacgctcctgagatattatgatcagatttgttctattgaacccaaattcccattttctgaaaatcagaacctggataatgatgaaggattgaaaatcgctgctaaacattaccagtttgctagtggtgcctttttacatattaaagagacggttttatctgccttaagtcgagagccgaccgtggacatatctccagatactgttgggaccctcagtcttattatgctggcacaggctcaagaagtattttttttaaaagcca

SEQ ID NO: 169274 - DNA, 5962 bp, Homo sapiens
  Payload ID: 13318
  Gene Symbol: PDCD6IP
  Gene Name: programmed cell death 6 interacting protein
  Uniprot ID: Q8WUM4
  ENST ID: ENST00000457054
  CDS Start-End: 159-2780
gctggagctcccggaagttgccggacccggaacgcaggcggagcgcaagtctgtcagccagtcagtccgccagtccgccagcccagtacctctctctcctcggccctcgtaagctgtccgcggtctgtttggcccgaacggcggcggaggcgctgatcatggcgacattcatctcggtgcagctgaaaaagacctcagaggtggacctggccaagccgctggtgaagttcatccagcagacttacccaagcggcggggaagagcaggcccagtactgccgcgcggcggaggagctcagcaagctgcgccgcgccgcagtcggtcgtccgctggacaagcacgagggcgcgctcgagacgctcctgagatattatgatcagatttgttctattgaacccaaattcccattttctgaaaatcagatctgcttgacatttacctggaaggatgctttcgataaaggttcactttttggaggctctgtaaaactggctcttgcaagcttaggatatgaaaagagctgtgtgttgttcaattgtgcagccttagctagccaaattgcagcagaacagaacctggataatgatgaaggattgaaaatcgctgctaaacattaccagtttgctagtggtgcctttttacatattaaagagacggttttatctgccttaagtcgagagccgaccgtggacatatctccagatactgttgggaccctcagtcttattatgctggcacaggctcaagaagtattttttttaaaagccacaagagataaaatgaaagatgccatcatagctaaattggctaatcaggctgcagattattttggtgatgctttcaaacagtgtcaatacaaagatactctccccaagtatttttatttccaggaggtgttccctgtcttggctgcaaagcactgtatcatgcaggccaatgctgagtaccatcagtctatcctggcaaaacagcagaagaaatttggagaagaaattgcaaggttacagcatgcagcagaactgattaaaacagtggcatctcgctatgatgaatatgttaatgtgaaggatttttctgacaaaatcaatcgtgcccttgctgcagcaaagaaggataatgacttcatttatcatgatcgagttccagaccttaaagatctagatcctattggcaaagccacacttgtgaaatctaccccggtcaatgtacccatcagtcagaaatttactgatctgtttgagaagatggttcccgtgtcagtacagcagtctttggctgcctataatcagaggaaagccgatttggttaacagatcaattgctcagatgagagaagccaccactttggcaaatggggtgctagcttcccttaatcttccagcagcaattgaagatgtgtctggagacactgtacctcagtctatattgactaaatccagatctgtgattgaacagggaggcatccagactgttgatcagttgattaaagaactgcctgaattactgcaacgaaatagagaaatcctagatgagtcattaaggttgttggatgaagaagaagcaaccgataatgatttaagagcaaaatttaaggaacgttggcaaaggacaccatccaatgaactgtataagcctttaagagcagagggaaccaacttcagaacagttttagataaagctgtgcaggcagatggacaagtgaaagaatgttaccagtctcatcgtgacaccatcgtgcttttgtgtaagccagagcctgagctgaatgctgccatcccttctgctaatccagcaaagaccatgcagggcagtgaggttgtaaatgtcttaaaatccttattgtcaaatcttgatgaagtaaagaaggaaagagagggtctggagaatgacttgaaatctgtgaattttgacatgacaagcaagtttttgacagccctggctcaagatggtgtgataaatgaagaagctctttctgttactgaactagatcgagtctatggaggtcttacaactaaagtccaagaatctctaaagaaacaggagggacttcttaaaaatattcaggtctcacatcaggaattttcaaaaatgaaacaatctaataatgaagctaacttaagagaagaagttttgaagaatttagctactgcatatgacaactttgttgaacttgtagctaatttgaaggaaggcacaaagttttacaatgagttgactgaaatcctggtcaggttccagaacaaatgcagtgatatagtttttgcacggaagacagaaagagatgaactcttaaaggacttgcaacaaagcattgccagagaacctagtgctccttcaattcctacacctgcgtatcagtcctcaccagcaggaggacatgcaccaactcctccaactccagcgccaagaaccatgccgcctactaagccccagcccccagccaggcctccaccacctgtgcttccagcaaatcgagctccttctgctactgctccatctccagtgggggctgggactgctgcgccagctccatcacaaacgcctggctcagctcctcctccacaggcgcagggaccaccctatcccacctatccaggatatcctgggtattgccaaatgcccatgcccatgggctataatccttatgcgtatggccagtataatatgccatatccaccagtgtatcaccagagtcctggacaggctccatacccgggaccccagcagccttcataccccttccctcagcccccacagcagtcttactatccacagcagtaatatgtctgctcagcagctcagctgattcagatcagagggaaagaaataccaaccctgcaataagtgtactaaactctacgctctggttaatgtaatgtactctcctggactgaatgcagtgtataatttctgtctacagctagaagctgtgccccagttccacatttgattacacatgtgagatttgctgctgttgcagtataaacactaggtataataggatttgaaattgcattacagttcataaaaattgaaaatgagaaattaaacctgcaagtgaaacatttgaaacgattatactttctacataagacatggttgggacatcagatacttacaaagatggtttaagtatggatactagagaaaattaagttttctttctctttggtttattgatttggtttaatttccattatgctattttgcataatcaaggcactgtaaatcttataattttaaaataaattacttaagaacagttgtcattgttatgttttgttattgattctcattactgtctaattttttttctggtattagtctcattttgtatgtatataagttaaacagatactgtttttaagtgcatgaatagtacaagttattatcaaggatgttttacagggaaatcaaaagaatattatcatactttatctttcgtatgctgattagtaaacgatttttgacatttattttagaaagtcctataatgtggaagaaacaaacagttgctaccaaagattcttcaaataaacatacaaataaatgtgtatatttaatgttttattgttagcttctccagaaaattgatgcaaattctggtaataattcttgcattttttccccataacctggttaaaataaatacgccattggcaatacttcataatgtaatggaattgtttggggaacacttactgtaccctctcatcctttttccaccttactgtgttaacttagtgacatttaatgcccaatatgtatgaatagatctaagccatttaattttttttccttaaagattggagtattttataattcaaggagcatacaaaacaatggttgggaacatatgccaattatggaataggctatgtatttaatattaatctctgccattaggatatctactcactgtataaacctcagtaaaaatagtgaagacatgcatcatggaatgagaaaatgagaaaggaatgagttgtctaacatcacagtgggatctgttttttgtgaggttcatttctgaacacattaggcatatgagcagatttccagtgaatctatttatgtttattttctgagtttcaacgctgaccttttcttgcattattgtttcattttaatgatagtgttacttgtcccactgttgttttcattgagtttggatttatattttaaatgttcgaatgaaagtatgattgtaaaagggagtgaattggtttaaaaatatatgtatattttaaactttgttgtgtgtaggaaacatgaaggcatgttaattcaatataaatgacctttgatttcatggaatattaaagttggtttaaagtccaatagttaaaccttagcaaaaatagctttttacttcatcagttgctaagatttaatactttggattcatcaaagtgtgacatgggcttgtttgacttctgtaagtggcatttaagttccacattcttattacttgaggtactttatactaacataagacagtgagagttagaggtattacaagttgctagtttataatgtcttactaatgcagaaacaaggaaaaaagcaaaattggcctgaatattctcttggggaaagagggcaccaaagaaaagggtaagtgcatctgagggccaaaagagatgtataagccttttagcccattccccatgctgggcctgctcacagagccacaggaagatcattcagaaactaggaaaggaggcccccacagctgatcctgccacagcacacctgactcactcggctctgttagtgtaaccttttaaatgtagcaacacaaaccctttccctcttgtcagttcactcatcctttggtttctttttaatcacctgtgtctgggcacagacaatcacaataaatgcagccctttattactgttaaggatcatactgttggtttggagttggaagggtactactctgtgattcaggtgtgttgtacccatatttataattaggctttattatcttcctaaatcaaggaaaggaaatcatccccagaccatttatgctgagctttggaatactattttaaactggattgtacttaaataatgaagctctgcatagaggaactagtcagaagtggggaaaacactgtctaatttttatcagtctggtataaagtattgatctaagagaactctccctgtgccccttggtctttattctcaattaagaaaaacagtcacatgtcacgacaaaccaatcaatctttatgagatattcctgtatccataccccagcttgtttgcaatttataaacctccccttcaaaactaaggagttgcagaaaaaaatggatttcacagagccttgtgtccctaaagttctgtcccagtcagcagtctttatagtccaaacagattataaaaaatgttttccatttgaactttacagtttgcaaaagtgcttttatacattttctaatttcagaaacaggataatttgttaagtgggtttcagtttgctaatagggattttttgtgttttgttttttaattttcagcatctcttgaagaatcttgctacagccaaatggcatctcactttttaaagacgtttgcaattattagttgattcacagtacagaacaaggtataaaggaaaaaaccctgctaggtagtgttataattgctagattaaaaatagactagaacaggttcattttaagatttacttggaagagcaaagaaggaaaaattatatttttaaagaaagagaatattcaggctttatttctggtatgaagtttatattttttaaaaaaatcctatattatcacaccagagattttagattcttttctggttagaaacattgctggtagttggattatatttttattgtattcatttatcttagggggaacattgtaaagaaacaaaaaggtccagatgaatgtatgctagaaataaaagttgaaagattcttacttc

SEQ ID NO: 169275 - DNA, 842 bp, Homo sapiens
  Payload ID: 13318
  Gene Symbol: PDCD6IP
  Gene Name: programmed cell death 6 interacting protein
  ENST ID: ENST00000412887
  CDS Start-End: 55-342
cgagagccgaccgtggacatatctccagatactgttgggaccctcagtcttattatgctggcacaggctcaagaagtattttttttaaaagccacaagagataaaatgaaagatgccatcatagctaaattggctaatcaggctgcagattattttggtgatgctttcaaacagtgtcaatacaaagatactctccccaaggaggtgttccctgtcttggctgcaaagcactgtatcatgcaggccaatgctgagtaccatcagtctatcctggcaaaacagcagaagaaatttggagaagaaattgcaaggttacagatccaccctttcactgagagttaggccgtttgaggttcctgccttcatgtgaaggagtgaaagagcatgcagcagaactgattaaaacagtggcatctcgctatgatgaatatgttaatgtgaaggatttttctgacaaaatcaatcgtgcccttgctgcagcaaagaaggataatgacttcatttatcatgatcgagttccagaccttaaagatctagatcctattggcaaagccacacttgtgaaatctaccccggtcaatgtacccatcagtcagaaatttactgatctgtttgagaagatggttcccgtgtcagtacagcagtctttggctgcctataatcagaggaaagccgatttggttaacagatcaattgctcagatgagagaagccaccactttggcaaatggtcattaaggttgttggatgaagaagaagcaaccgataatgatttaagagcaaaatttaaggaacgttggcaaaggacaccatccaatgaactgtataagcctttaagagcag

SEQ ID NO: 169276 - DNA, 2851 bp, Homo sapiens
  Payload ID: 13319
  Gene Symbol: PDCD7
  Gene Name: programmed cell death 7
  Uniprot ID: Q8N8D1
  ENST ID: ENST00000204549
  CDS Start-End: 56-1513
ctcatgaggagccactcagattcctgtcacttctcaaagcatctccgtcgtgaacatggccctgccaccattcttcggccagggtcgcccaggcccaccgcccccgcagccgccgcctcctgctcctttcggctgtccgccaccgccgctgccctccccggctttcccgccgcctctcccccagcggcccggcccttttccgggggcctccgcccccttccttcagcctccgctggctctgcagccccgagcctccgcggaggcctcccgcggcggaggcggcgctggcgccttctacccggtgccaccaccgccgctgcctcctccgccgccccagtgtcggcccttcccggggaccgacgccggcgagcggccgcggccaccgcctcccggcccggggccgccctggagcccgcggtggcctgaggcgccgccgccgccggccgacgtgctcggggatgcggccctccaacgcctgcgcgaccggcagtggctggaggcggtgttcgggaccccgcggcgggcaggctgtccggtgccccagcgcacgcatgccgggcccagccttggcgaagtgcgcgcgcgattgctccgggctctgcgcctggtgcggcggctgcgcggcctgagccaggccctgcgcgaggccgaagccgacggcgcggcctgggtcctgctgtactcccagaccgcgccgctgcgcgcggaactggccgagcggctacagccgttgacccaggctgcctatgtgggcgaggcgcggaggaggctggagagggtccggcgccgccggctgcggcttcgcgagagggcccgggaacgcgaggccgagcgggaggcagaggccgcgcgggcagtggaacgcgagcaggagattgaccgctggagggtgaagtgtgtgcaggaggtggaggagaagaagcgggagcaggaactcaaagcagccgctgatggcgtactatctgaagtgaggaaaaaacaagcagataccaaaagaatggtggacattctacgggctttggagaaattgaggaaactgaggaaagaggctgcagcgaggaaaggggtctgtcctccagcctcagcagatgagacttttacgcatcatcttcagcgactgagaaaactcattaaaaagcgctctgaactgtatgaagctgaagagagagccctcagagttatgctagaaggagaacaagaggaagagaggaaaagagaattagaaaagaaacaaagaaaagaaaaagagaaaattttacttcagaaacgtgaaattgagtccaagttgtttggggatccagatgagttcccacttgctcacctcttggagcctttccgacagtattatctccaagccgagcactccctgccagcgctcatccagatcaggcatgattgggatcagtacctggtgccatccgatcatcccaaaggcaacttcgttccccaaggatgggtccttcccccgctccccagcaacgacatctgggcaactgctgttaagctgcattagtaaagatgctccaggagtgtggtccagccagcgctctttccagctgtaaatattagcgatggtgccatcttttgctgtagactaaactgcaacttctaaattccatgtggcattcccctaccctgaagttatgctttccttctgtgctctgtgctggccagaggtgcctcttgaatcagattaatgtggtttttcaggaaaggacttaggtgaactgaggtttttaccacaggcagtgaatgaccttggttcaccaaatttgcctctgttttgaggggcttggtccagagtgacttgttaatttactctaacttccttgtgtgttgatgggtaagtacactcaaacactgaatacaggtgtgtgatgggtagatttcacagcccttctactaatagtgagtgtgaaggcaagcttgatgcaaaacctcctgacctttcctacctgaagagccctttgacttctaggaagaaaggtcaaaaatgttatcttcagttgtgttaatcccagttttagtgcagcttaggaggctgctagttaggaagatggcagtggctgtaggctgggttgccagaaaagatggtggcctagtcttattattcagatggagaacttagaaaacctgaagagtacccaaattggattgtattttaatggacaatggctgtattttttccatgttagaaggatcctaatgaaagcacctgttatttttaagtttctaagggtctagttgttcagaatccccaaggatatttccctaacctcactcagtcacattgtaggagccagtgtagctatggaattatcttaggaactcaagcttctaaaactatccatgtagtcaaatctaggggaaaaagcaaataaaaatagtaaaatttggccgggcacagtggctcacgcctgtaatcccaacactttgggaggccgaggcgggccgatcacgaggtcaggagatcaaggccatcctggctaacacggtgaaaccctgtctctactaaaaatacaaaaaaatattagctgggcgtaggtggtgcacacctgtagtcccagctactggggaggctgaggcaggagaatggtgtaaaacccaggaggcagagcttgcagtgagccgagatcgcgccacggcactccagcctgggagacagagcaagactccgtctcaaaaaaaaaaaaagtaaaatttattttttatattcattaataaatgctgttgtgcttggagatgatcactcatataacatgtcatttttttggttctgttttggtttggtttttgccaattattttgttatatttccaaaaaactaaataaaaatcatttttatttttta

SEQ ID NO: 169277 - DNA, 309 bp, Homo sapiens
  Payload ID: 13319
  Gene Symbol: PDCD7
  Gene Name: programmed cell death 7
  ENST ID: ENST00000560313
  CDS Start-End: 1-309
gagcaggaactcaaagcagccgctgatggcgtactatctgaagtgaggaaaaaacaagcagataccaaaagaatggtggacattctacgggctttggagaaattgaggaaactgaggaaagaggctgcagcgaggaaagatgagttcccacttgctcacctcttggagcctttccgacagtattatctccaagccgagcactccctgccagcgctcatccagatcaggcatgattgggatcagtacctggtgccatccgatcatcccaaaggcaacttcgttccccaaggatgggtccttcccccgctc

SEQ ID NO: 169278 - DNA, 630 bp, Homo sapiens
  Payload ID: 13320
  Gene Symbol: PRCD
  Gene Name: progressive rod-cone degeneration
  Uniprot ID: Q00LT1
  ENST ID: ENST00000586148
  CDS Start-End: 53-217
cgcctgtggccttctgcagacttggcctgggaggggatggggcagctgcgccatgtgcaccacccttttcctgctcagcaccctggccatgctctggcgccgccgatttgccaaccgagtccaaccagagcccagcgacgtggatggggcagctaggggcagcagcttggatgcggaccctcagtcctcaggcagggagaaagaacctctgaagtaagccctcacctctgcaggtggggctcaggcccagagactgggatcagctggctcaggcaggtcctggttcgtcccctagcccaggaggatgctgtgggagctgcagcagcggcaagagggagaatggggggaagcagcactagagaaggtagacgcctccctctcagcccgggacctgccagtctccccttcccccaggccctgggtgtgggctcctgagcaggacctggctgggcctggcagaaagagcagacgtgctcgctgctctcggacgggcttccttccctctgagttcctgaggctcctctgagggactgctgagcctgagaaagcctaggatgagggacttgctgggtccaccaggctaattctggggcagccagcagcccaggcaagaggcaggaataagtaagg

SEQ ID NO: 169279 - DNA, 462 bp, Homo sapiens
  Payload ID: 13320
  Gene Symbol: PRCD
  Gene Name: progressive rod-cone degeneration
  Uniprot ID: Q00LT1
  ENST ID: ENST00000592014
  CDS Start-End: 110-274
aaccgcaggacagacggcagtggctcctgagagctggctggggccattttggcccctcgcctgtggccttctgcagacttggcctgggaggggatggggcagctgcgccatgtgcaccacccttttcctgctcagcaccctggccatgctctggcgccgccgatttgccaaccgagtccaaccagagcccagcgacgtggatggggcagctaggggcagcagcttggatgcggaccctcagtcctcaggcagggagaaagaacctctgaagtaagccctcacctctgcaggtggggctcaggcccagagactgggatcagctggctcaggcagctcaggtcctggttcgtcccctagcccaggaggatgctgtgggagctgcagcagcggcaagagggagaatggggggaagcagcactagagaagttcccagagctcatcctgtcactggctgctctgctg

SEQ ID NO: 169280 - DNA, 1832 bp, Homo sapiens
  Payload ID: 13321
  Gene Symbol: PHB
  Gene Name: prohibitin
  Uniprot ID: P35232
  ENST ID: ENST00000300408
  CDS Start-End: 74-892
agtatgtgtggttggggaattcatgtggaggtcagagtggaagcaggtgtgagagggtccagcagaaggaaacatggctgccaaagtgtttgagtccattggcaagtttggcctggccttagctgttgcaggaggcgtggtgaactctgccttatataatgtggatgctgggcacagagctgtcatctttgaccgattccgtggagtgcaggacattgtggtaggggaagggactcattttctcatcccgtgggtacagaaaccaattatctttgactgccgttctcgaccacgtaatgtgccagtcatcactggtagcaaagatttacagaatgtcaacatcacactgcgcatcctcttccggcctgtcgccagccagcttcctcgcatcttcaccagcatcggagaggactatgatgagcgtgtgctgccgtccatcacaactgagatcctcaagtcagtggtggctcgctttgatgctggagaactaatcacccagagagagctggtctccaggcaggtgagcgacgaccttacagagcgagccgccacctttgggctcatcctggatgacgtgtccttgacacatctgaccttcgggaaggagttcacagaagcggtggaagccaaacaggtggctcagcaggaagcagagagggccagatttgtggtggaaaaggctgagcaacagaaaaaggcggccatcatctctgctgagggcgactccaaggcagctgagctgattgccaactcactggccactgcaggggatggcctgatcgagctgcgcaagctggaagctgcagaggacatcgcgtaccagctctcacgctctcggaacatcacctacctgccagcggggcagtccgtgctcctccagctgccccagtgagggcccaccctgcctgcacctccgcgggctgactgggccacagccccgatgattcttaacacagccttccttctgctcccaccccagaaatcactgtgaaatttcatgattggcttaaagtgaaggaaataaaggtaaaatcacttcagatctctaattagtctatcaaatgaaactctttcattcttctcacatccatctacttttttatccacctccctaccaaaaattgccaagtgcctatgcaaaccagctttaggtcccaattcggggcctgctggagttccggcctgggcaccagcatttggcagcacgcaggcggggcagtatgtgatggactggggagcacaggtgtctgcctagatccacgtgtggcctccgtcctgtcactgatggaaggtttgcggatgagggcatgtgcggctgaactgagaaggcaggcctccgtcttcccagcggttcctgtgcagatgctgctgaagagaggtgccggggaggggcagagaggaagtggtctgtctgttaccataagtctgattctctttaactgtgtgaccagcggaaacaggtgtgtgtgaactgggcacagattgaagaatctgcccctgttgaggtgggtgggcctgactgttgccccccagggtcctaaaacttggatggacttgtatagtgagagaggaggcctggaccgagatgtgagtcctgttgaagacttcctctctaccccccaccttggtccctctcagatacccagtggaattccaacttgaaggattgcatcctgctggggctgaacatgcctgccaaagacgtgtccgacctacgttcctggccccctcattcagagactgcccttctcacgggctctatgcctgcactgggaaggaaacaaatgtgtataaactgctgtcaataaatgacacccagaccttccggctca

SEQ ID NO: 169281 - DNA, 907 bp, Homo sapiens
  Payload ID: 13321
  Gene Symbol: PHB
  Gene Name: prohibitin
  ENST ID: ENST00000419140
  CDS Start-End: 170-907
gcgcagtatgtgtggttggggaattcatgtggaggtcagagtggaagcagttatcttggccccaggatgtcatccagctcctgcttccataagaagcatgtcgttcttaatacacgatgttgacaagcagtatggtgaggaggtgtgagagggtccagcagaaggaaacatggctgccaaagtgtttgagtccattggcaagtttggcctggccttagctgttgcaggaggcgtggtgaactctgccttatataatgtggatgctgggcacagagctgtcatctttgaccgattccgtggagtgcaggacattgtggtaggggaagggactcattttctcatcccgtgggtacagaaaccaattatctttgactgccgttctcgaccacgtaatgtgccagtcatcactggtagcaaagatttacagaatgtcaacatcacactgcgcatcctcttccggcctgtcgccagccagcttcctcgcatcttcaccagcatcggagaggactatgatgagcgtgtgctgccgtccatcacaactgagatcctcaagtcagtggtggctcgctttgatgctggagaactaatcacccagagagagctggtctccaggcaggtgagcgacgaccttacagagcgagccgccacctttgggctcatcctggatgacgtgtccttgacacatctgaccttcgggaaggagttcacagaagcggtggaagccaaacaggtggctcagcaggaagcagagagggccagatttgtggtggaaaaggctgagcaacagaaaaaggcggccatcatctctgctgagggcgactccaaggcagctgagctgattgccaactcactggccactgcaggggatggcctgatcgagctgcgcaagctggaagctgcagaggac

SEQ ID NO: 169282 - DNA, 732 bp, Homo sapiens
  Payload ID: 13321
  Gene Symbol: PHB
  Gene Name: prohibitin
  ENST ID: ENST00000446735
  CDS Start-End: 129-732
cagagtggaagcaggtgagaatggagggggcggcaaaggctcgtttctgggcatctctgcagtcctcctctgctccatgatgtgcactttgggcgaggagagtgtgagagggtccagcagaaggaaacatggctgccaaagtgtttgagtccattggcaagtttggcctggccttagctgttgcaggaggcgtggtgaactctgccttatataatgtggatgctgggcacagagctgtcatctttgaccgattccgtggagtgcaggacattgtggtaggggaagggactcattttctcatcccgtgggtacagaaaccaattatctttgactgccgttctcgaccacgtaatgtgccagtcatcactggtagcaaagatttacagaatgtcaacatcacactgcgcatcctcttccggcctgtcgccagccagcttcctcgcatcttcaccagcatcggagaggactatgatgagcgtgtgctgccgtccatcacaactgagatcctcaagtcagtggtggctcgctttgatgctggagaactaatcacccagagagagctggtctccaggcaggtgagcgacgaccttacagagcgagccgccacctttgggctcatcctggatgacgtgtccttgacacatctgaccttcgggaaggagttcacagaagcggtggaagccaaacaggtggctcagcaggaagcagagagggccagatttgtggtggaaa

SEQ ID NO: 169283 - DNA, 534 bp, Homo sapiens
  Payload ID: 13321
  Gene Symbol: PHB
  Gene Name: prohibitin
  ENST ID: ENST00000434917
  CDS Start-End: 161-534
tgtgtggttggggaattcatgtggaggtcagagtggaagcaggtgagaatggagggggcggcaaaggctcgtttctgggcatctctgcagtcctcctctgctccatgatgtgcactttgggcgaggagagtgcgtgtgagagggtccagcagaaggaaacatggctgccaaagtgtttgagtccattggcaagtttggcctggccttagctgttgcaggaggcgtggtgaactctgccttatataatgtggatgctgggcacagagctgtcatctttgaccgattccgtggagtgcaggacattgtggtaggggaagggactcattttctcatcccgtgggtacagaaaccaattatctttgactgccgttctcgaccacgtaatgtgccagtcatcactggtagcaaagatttacagaatgtcaacatcacactgcgcatcctcttccggcctgtcgccagccagcttcctcgcatcttcaccagcatcggagaggactatgatgagcgtgtgctgccgtccatcacaactga

SEQ ID NO: 169284 - DNA, 694 bp, Homo sapiens
  Payload ID: 13321
  Gene Symbol: PHB
  Gene Name: prohibitin
  ENST ID: ENST00000512041
  CDS Start-End: 89-694
ctgggcatctctgcagtcctcctctgctccatgatgtgcactttgggcgaggagagtgcgtgtgtgagagggtccagcagaaggaaacatggctgccaaagtgtttgagtccattggcaagtttggcctggccttagctgttgcaggaggcgtggtgaactctgccttatataatgtggatgctgggcacagagctgtcatctttgaccgattccgtggagtgcaggacattgtggtaggggaagggactcattttctcatcccgtgggtacagaaaccaattatctttgactgccgttctcgaccacgtaatgtgccagtcatcactggtagcaaagatttacagaatgtcaacatcacactgcgcatcctcttccggcctgtcgccagccagcttcctcgcatcttcaccagcatcggagaggactatgatgagcgtgtgctgccgtccatcacaactgagatcctcaagtcagtggtggctcgctttgatgctggagaactaatcacccagagagagctggtctccaggcaggtgagcgacgaccttacagagcgagccgccacctttgggctcatcctggatgacgtgtccttgacacatctgaccttcgggaaggagttcacagaagcggtggaagccaaacaggtggctcagcaggaagcagagagggccagatttgtggtggaaaag

SEQ ID NO: 169285 - DNA, 1509 bp, Homo sapiens
  Payload ID: 13321
  Gene Symbol: PHB
  Gene Name: prohibitin
  Uniprot ID: P35232
  ENST ID: ENST00000511832
  CDS Start-End: 99-566
gggcggggcagaggagctcatgcgcagtatgtgtggttggggaattcatgtggaggtcagagtggaagcaggtgtgagagggtccagcagaaggaaacatggctgccaaagtgtttgagtccattggcaagtttggcctggccttagctgttgcaggaggcgtggtgaactctgccttatataatgtggatgctgggcacagagctgtcatctttgaccgattccgtggagtgcaggacattgtggtaggggaagggactcattttctcatcccgtgggtacagaaaccaattatctttgactgccgttctcgaccacgtaatgtgccagtcatcactggtagcaaagatttacagaatgtcaacatcacactgcgcatcctcttccggcctgtcgccagccagcttcctcgcatcttcaccagcatcggagaggactatgatgagcgtgtgctgccgtccatcacaactgagatcctcaagtcagtggtggctcgctttgatgctggagaactaatcacctacctgccagcggggcagtccgtgctcctccagctgccccagtgagggcccaccctgcctgcacctccgcgggctgactgggccacagccccgatgattcttaacacagccttccttctgctcccaccccagaaatcactgtgaaatttcatgattggcttaaagtgaaggaaataaaggtaaaatcacttcagatctctaattagtctatcaaatgaaactctttcattcttctcacatccatctacttttttatccacctccctaccaaaaattgccaagtgcctatgcaaaccagctttaggtcccaattcggggcctgctggagttccggcctgggcaccagcatttggcagcacgcaggcggggcagtatgtgatggactggggagcacaggtgtctgcctagatccacgtgtggcctccgtcctgtcactgatggaaggtttgcggatgagggcatgtgcggctgaactgagaaggcaggcctccgtcttcccagcggttcctgtgcagatgctgctgaagagaggtgccggggaggggcagagaggaagtggtctgtctgttaccataagtctgattctctttaactgtgtgaccagcggaaacaggtgtgtgtgaactgggcacagattgaagaatctgcccctgttgaggtgggtgggcctgactgttgccccccagggtcctaaaacttggatggacttgtatagtgagagaggaggcctggaccgagatgtgagtcctgttgaagacttcctctctaccccccaccttggtccctctcagatacccagtggaattccaacttgaaggattgcatcctgctggggctgaacatgcctgccaaagacgtgtccgacctacgttcctggccccctcattcagagactgcccttctcacgggctctatgcctgcactgggaaggaaacaaatgtgtataaactgctgtcaataaatgacacccagaccttccggctcagcc

SEQ ID NO: 169286 - DNA, 796 bp, Homo sapiens
  Payload ID: 13321
  Gene Symbol: PHB
  Gene Name: prohibitin
  ENST ID: ENST00000504124
  CDS Start-End: 147-796
atgtggaggtcagagtggaagcaggtgagaatggagggggcggcaaaggctcgtttctgggcatctctgcagtcctcctctgctccatgatgtgcactttgggcgaggagagtgcgtgcgtgtgagagggtccagcagaaggaaacatggctgccaaagtgtttgagtccattggcaagtttggcctggccttagctgttgcaggaggcgtggtgaactctgccttatataatgtggatgctgggcacagagctgtcatctttgaccgattccgtggagtgcaggacattgtggtaggggaagggactcattttctcatcccgtgggtacagaaaccaattatctttgactgccgttctcgaccacgtaatgtgccagtcatcactggtagcaaagatttacagaatgtcaacatcacactgcgcatcctcttccggcctgtcgccagccagcttcctcgcatcttcaccagcatcggagaggactatgatgagcgtgtgctgccgtccatcacaactgagatcctcaagtcagtggtggctcgctttgatgctggagaactaatcacccagagagagctggtctccaggcaggtgagcgacgaccttacagagcgagccgccacctttgggctcatcctggatgacgtgtccttgacacatctgaccttcgggaaggagttcacagaagcggtggaagccaaacaggtggctcagcaggaagcagagagggccagatttgtggtggaaaaggctgagcaacagaaaaaggcggccatcatctctgctgagggcga

SEQ ID NO: 169287 - DNA, 1952 bp, Homo sapiens
  Payload ID: 13321
  Gene Symbol: PHB
  Gene Name: prohibitin
  Uniprot ID: P35232
  ENST ID: ENST00000614445
  CDS Start-End: 191-1009
gggcggggcagaggagctcatgcgcagtatgtgtggttggggaattcatgtggaggtcagagtggaagcagttatcttggccccaggatgtcatccagctcctgcttccataagaagcatgtcgttcttaatacacgatgttgacaagcagtatggtgaggaggtgtgagagggtccagcagaaggaaacatggctgccaaagtgtttgagtccattggcaagtttggcctggccttagctgttgcaggaggcgtggtgaactctgccttatataatgtggatgctgggcacagagctgtcatctttgaccgattccgtggagtgcaggacattgtggtaggggaagggactcattttctcatcccgtgggtacagaaaccaattatctttgactgccgttctcgaccacgtaatgtgccagtcatcactggtagcaaagatttacagaatgtcaacatcacactgcgcatcctcttccggcctgtcgccagccagcttcctcgcatcttcaccagcatcggagaggactatgatgagcgtgtgctgccgtccatcacaactgagatcctcaagtcagtggtggctcgctttgatgctggagaactaatcacccagagagagctggtctccaggcaggtgagcgacgaccttacagagcgagccgccacctttgggctcatcctggatgacgtgtccttgacacatctgaccttcgggaaggagttcacagaagcggtggaagccaaacaggtggctcagcaggaagcagagagggccagatttgtggtggaaaaggctgagcaacagaaaaaggcggccatcatctctgctgagggcgactccaaggcagctgagctgattgccaactcactggccactgcaggggatggcctgatcgagctgcgcaagctggaagctgcagaggacatcgcgtaccagctctcacgctctcggaacatcacctacctgccagcggggcagtccgtgctcctccagctgccccagtgagggcccaccctgcctgcacctccgcgggctgactgggccacagccccgatgattcttaacacagccttccttctgctcccaccccagaaatcactgtgaaatttcatgattggcttaaagtgaaggaaataaaggtaaaatcacttcagatctctaattagtctatcaaatgaaactctttcattcttctcacatccatctacttttttatccacctccctaccaaaaattgccaagtgcctatgcaaaccagctttaggtcccaattcggggcctgctggagttccggcctgggcaccagcatttggcagcacgcaggcggggcagtatgtgatggactggggagcacaggtgtctgcctagatccacgtgtggcctccgtcctgtcactgatggaaggtttgcggatgagggcatgtgcggctgaactgagaaggcaggcctccgtcttcccagcggttcctgtgcagatgctgctgaagagaggtgccggggaggggcagagaggaagtggtctgtctgttaccataagtctgattctctttaactgtgtgaccagcggaaacaggtgtgtgtgaactgggcacagattgaagaatctgcccctgttgaggtgggtgggcctgactgttgccccccagggtcctaaaacttggatggacttgtatagtgagagaggaggcctggaccgagatgtgagtcctgttgaagacttcctctctaccccccaccttggtccctctcagatacccagtggaattccaacttgaaggattgcatcctgctggggctgaacatgcctgccaaagacgtgtccgacctacgttcctggccccctcattcagagactgcccttctcacgggctctatgcctgcactgggaaggaaacaaatgtgtataaactgctgtcaataaatgacacccagaccttccggctcagcc

SEQ ID NO: 169288 - DNA, 1908 bp, Homo sapiens
  Payload ID: 13321
  Gene Symbol: PHB
  Gene Name: prohibitin
  Uniprot ID: P35232
  ENST ID: ENST00000617874
  CDS Start-End: 147-965
atgtggaggtcagagtggaagcaggtgagaatggagggggcggcaaaggctcgtttctgggcatctctgcagtcctcctctgctccatgatgtgcactttgggcgaggagagtgcgtgcgtgtgagagggtccagcagaaggaaacatggctgccaaagtgtttgagtccattggcaagtttggcctggccttagctgttgcaggaggcgtggtgaactctgccttatataatgtggatgctgggcacagagctgtcatctttgaccgattccgtggagtgcaggacattgtggtaggggaagggactcattttctcatcccgtgggtacagaaaccaattatctttgactgccgttctcgaccacgtaatgtgccagtcatcactggtagcaaagatttacagaatgtcaacatcacactgcgcatcctcttccggcctgtcgccagccagcttcctcgcatcttcaccagcatcggagaggactatgatgagcgtgtgctgccgtccatcacaactgagatcctcaagtcagtggtggctcgctttgatgctggagaactaatcacccagagagagctggtctccaggcaggtgagcgacgaccttacagagcgagccgccacctttgggctcatcctggatgacgtgtccttgacacatctgaccttcgggaaggagttcacagaagcggtggaagccaaacaggtggctcagcaggaagcagagagggccagatttgtggtggaaaaggctgagcaacagaaaaaggcggccatcatctctgctgagggcgactccaaggcagctgagctgattgccaactcactggccactgcaggggatggcctgatcgagctgcgcaagctggaagctgcagaggacatcgcgtaccagctctcacgctctcggaacatcacctacctgccagcggggcagtccgtgctcctccagctgccccagtgagggcccaccctgcctgcacctccgcgggctgactgggccacagccccgatgattcttaacacagccttccttctgctcccaccccagaaatcactgtgaaatttcatgattggcttaaagtgaaggaaataaaggtaaaatcacttcagatctctaattagtctatcaaatgaaactctttcattcttctcacatccatctacttttttatccacctccctaccaaaaattgccaagtgcctatgcaaaccagctttaggtcccaattcggggcctgctggagttccggcctgggcaccagcatttggcagcacgcaggcggggcagtatgtgatggactggggagcacaggtgtctgcctagatccacgtgtggcctccgtcctgtcactgatggaaggtttgcggatgagggcatgtgcggctgaactgagaaggcaggcctccgtcttcccagcggttcctgtgcagatgctgctgaagagaggtgccggggaggggcagagaggaagtggtctgtctgttaccataagtctgattctctttaactgtgtgaccagcggaaacaggtgtgtgtgaactgggcacagattgaagaatctgcccctgttgaggtgggtgggcctgactgttgccccccagggtcctaaaacttggatggacttgtatagtgagagaggaggcctggaccgagatgtgagtcctgttgaagacttcctctctaccccccaccttggtccctctcagatacccagtggaattccaacttgaaggattgcatcctgctggggctgaacatgcctgccaaagacgtgtccgacctacgttcctggccccctcattcagagactgcccttctcacgggctctatgcctgcactgggaaggaaacaaatgtgtataaactgctgtcaataaatgacacccagaccttccggctcagcc

SEQ ID NO: 169289 - DNA, 1308 bp, Homo sapiens
  Payload ID: 13322
  Gene Symbol: PHB2
  Gene Name: prohibitin 2
  ENST ID: ENST00000399433
  CDS Start-End: 81-977
gcagtacctaagccggagcggggtagaggcgggccggcacccccttctgacctccagtgccgccggcctcaagatcagacatggcccagaacttgaaggacttggcgggacggctgcccgccgggccccggggcatgggcacggccctgaagctgttgctgggggccggcgccgtggcctacggtgtgcgcgaatctgtgttcaccgtggaaggcgggcacagagccatcttcttcaatcggatcggtggagtgcagcaggacactatcctggccgagggccttcacttcaggatcccttggttccagtaccccattatctatgacattcgggccagacctcgaaaaatctcctcccctacaggctccaaagacctacagatggtgaatatctccctgcgagtgttgtctcgacccaatgctcaggagcttcctagcatgtaccagcgcctagggctggactacgaggaacgagtgttgccgtccattgtcaacgaggtgctcaagagtgtggtggccaagttcaatgcctcacagctgatcacccagcgggcccaggtatccctgttgatccgccgggagctgacagagagggccaaggacttcagcctcatcctggatgatgtggccatcacagagctgagctttagccgagagtacacagctgctgtagaagccaaacaagtggcccagcaggaggcccagcgggcccaattcttggtagaaaaagcaaagcaggaacagcggcagaaaattgtgcaggccgagggtgaggccgaggctgccaagatgcttggagaagcactgagcaagaaccctggctacatcaaacttcgcaagattcgagcagcccagaatatctccaagacgatcgccacatcacagaatcgtatctatctcacagctgacaaccttgtgctgaacctacaggatgaaagtttcaccaggagtgacagcctcatcaagggtaagaaatgagcctagtcaccaagaactccacccccagaggaagtggatctgcttctccagtttttgaggagccagccaggggtccagcacagccctaccccgccccagtatcatgcgatggtcccccacaccggttccctgaacccctcttggattaaggaagactgaagactagccccttttctggggaattactttcctcctccctgtgttaactggggctgttggggacagtgcgtgatttctcagtgatttcctacagtgttgttccctccctcaaggctgggaggagataaacaccaacccaggaattctcaataaatttttattacttaacctg

SEQ ID NO: 169290 - DNA, 996 bp, Homo sapiens
  Payload ID: 13322
  Gene Symbol: PHB2
  Gene Name: prohibitin 2
  Uniprot ID: Q99623
  ENST ID: ENST00000440277
  CDS Start-End: 211-996
tccgtatgcgcgattcctgtgcgcgaagttcgggtccgtagtgggctaagggggagggtttcaaagggagcgcacttccgctgccctttctttcgccagccttacgggcccgaaccctcgtgtgaagggtgcagtacctaagccggagcggggtagaggcgggccggcacccccttctgacctccagtgccgccggcctcaagatcagacatggcccagaacttgaaggacttggcgggacggctgcccgccgggccccggggcatgggcacggccctgaagctgttgctgggggccggcgccgtggcctacggtgtgcgcgaatctgtgttcaccgtggaaggcgggcacagagccatcttcttcaatcggatcggtggagtgcagcaggacactatcctggccgagggccttcacttcaggatcccttggttccagtaccccattatctatgacattcgggccagacctcgaaaaatctcctcccctacaggctccaaagacctacagatggtgaatatctccctgcgagtgttgtctcgacccaatgctcaggagcttcctagcatgtaccagcgcctagggctggactacgaggaacgagtgttgccgtccattgtcaacgaggtgctcaagagtgtggtggccaagttcaatgcctcacagctgatcacccagcgggcccaggtatccctgttgatccgccgggagctgacagagagggccaaggacttcagcctcatcctggatgatgtggccatcacagagctgagctttagccgagagtacacagctgctgtagaagccaaacaagtggcactgagcaagaaccctggctacatcaaacttcgcaagattcgagcagcccagaatatctccaagacgatcgccacatcacagaatcgtatctatctcacagctgacaaccttgtgctgaacctacaggatgaaagtttcaccaggggaagtgacagcctcatcaagggtaagaaatga

SEQ ID NO: 169291 - DNA, 872 bp, Homo sapiens
  Payload ID: 13322
  Gene Symbol: PHB2
  Gene Name: prohibitin 2
  ENST ID: ENST00000544888
  CDS Start-End: 138-476
acttccgctgccctttctttcgccagccttacgggcccgaaccctcgtgtgaagggtgcagtacctaagccggagcggggtagaggcgggccggcacccccttctgacctccagtgccgccggcctcaagatcagacatggcccagaacttgaaggacttggcgggacggctgcccgccgggccccggggcatgggcacggccctgaagctgttgctgggggccggcgccgtggcctacggtgtgcgcgaatctgtgttcaccgtggaaggcgggcacagagccatcttcttcaatcggatcggtggagtgcagcaggacactatcctggccgagggccttcacttcaggatcccttggttccagtaccccattatctatgacattcgggccagacctcgaaaaatctcctcccctacagatggtgaatatctccctgcgagtgttgtctcgacccaatgctcaggagcttcctagcatgtaccagcgcctagggctggactacgaggaacgagtgttgccgtccattgtcaacgaggtgctcaagagtgtggtggccaagttcaatgcctcacagctgatcacccagcgggcccaggtatccctgttgatccgccgggagctgacagagagggccaaggacttcagcctcatcctggatgatgtggccatcacagagctgagctttagccgagagtacacagctgctgtagaagccaaacaagtgggtgagtcgcaagagccgtggggtgagggcttctgagatgcaggaggaggaaagactccatgggtggggctcctgacccaggacagggtctccctgactctctcccaccacagcccagcaggaggcccagcgggcccaattcttgg

SEQ ID NO: 169292 - DNA, 858 bp, Homo sapiens
  Payload ID: 13322
  Gene Symbol: PHB2
  Gene Name: prohibitin 2
  ENST ID: ENST00000546111
  CDS Start-End: 209-472
cgtatgcgcgattcctgtgcgcgaagttcgggtccgtagtgggctaagggggagggtttcaaagggagcgcacttccgctgccctttctttcgccagccttacgggcccgaaccctcgtgtgaagggtgcagtacctaagccggagcggggtagaggcgggccggcacccccttctgacctccagtgccgccggcctcaagatcagacatggcccagaacttgaaggacttggcgggacggctgcccgccgggccccggggcatgggcacggccctgaagctgttgctgggggccggcgccgtggcctacggtgtgcgcgaatctgtgttcaccgtggaaggcgggcacagagccatcttcttcaatcggatcggtggagtgcagcaggacactatcctggccgagggccttcacttcagatcgccacatcacagaatcgtatctatctcacagctgacaaccttgtgctgaacctacaggatgaaagtttcaccagtgacagcctcatcaagggtaagaaatgagcctagtcaccaagaactccacccccagaggaagtggatctgcttctccagtttttgaggagccagccaggggtccagcacagccctaccccgccccagtatcatgcgatggtcccccacaccggttccctgaacccctcttggattaaggaagactgaagactagccccttttctggggaattactttcctcctccctgtgttaactggggctgttggggacagtgcgtgatttctcagtgatttcctacagtgttgttccctccctcaaggctgggaggagataaacaccaacccaggaattctcaataaatttttattacttaacctgaa

SEQ ID NO: 169293 - DNA, 739 bp, Homo sapiens
  Payload ID: 13322
  Gene Symbol: PHB2
  Gene Name: prohibitin 2
  ENST ID: ENST00000536316
  CDS Start-End: 100-739
gaaccctcgtgtgaagggtgcagtacctaagccggagcggggtagaggcgggccggcacccccttctgacctccagtgccgccggcctcaagatcagacatggcccagaacttgaaggacttggcgggacggctgcccgccgggccccggggcatgggcacggccctgaagctgttgctgggggccggcgccgtggcctacggtgtgcgcgaatctgtgttcaccgtggaaggcgggcacagagccatcttcttcaatcggatcggtggagtgcagcaggacactatcctggccgagggccttcacttcagggtagtgccaggctgtacaccattgcacagggcatacagggaggaacatgaaggagaaaatgcttgggaaagggtgtttggccttgaccagccactgctgacctcaatctcagacctacagatggtgaatatctccctgcgagtgttgtctcgacccaatgctcaggagcttcctagcatgtaccagcgcctagggctggactacgaggaacgagtgttgccgtccattgtcaacgaggtgctcaagagtgtggtggccaagttcaatgcctcacagctgatcacccagcgggcccaggtatccctgttgatccgccgggagctgacagagagggccaaggacttcagcctcatcctggatgatgtggccatcacagagctgagctttagccgagagtacacagctgctgtagaagccaaacaagtgg

SEQ ID NO: 169294 - DNA, 1138 bp, Homo sapiens
  Payload ID: 13322
  Gene Symbol: PHB2
  Gene Name: prohibitin 2
  ENST ID: ENST00000542912
  CDS Start-End: 107-910
cgggcccgaaccctcgtgtgaagggtgcagtacctaagccggagcggggtagaggcgggccggcacccccttctgacctccagtgccgccggcctcaagatcagacatggcccagaacttgaaggacttggcgggacggctgcccgccgggccccggggcatgggcacggccctgaagctgttgctgggggccggcgccgtggcctacggtgtgcgcgaatctgtgttcaccgtggaaggcgggcacagagccatcttcttcaatcggatcggtggagtgcagcaggacactatcctggccgagggccttcacttcaggatcccttggttccagtaccccattatctatgacattcgggccagacctcgaaaaatctcctcccctacaggctccaaagacctacagatggtgaatatctccctgcgagtgttgtctcgacccaatgctcaggagcttcctagcatgtaccagcgcctagggctggactacgaggaacgagtgttgccgtccattgtcaacgaggtgctcaagagtgtggtggccaagttcaatgcctcacagctgatcacccagcgggcccaggtatccctgttgatccgccgggagctgacagagagggccaaggacttcagcctcatcctggatgatgtggccatcacagagctgagctttagccgagagtacacagctgctgtagaagccaaacaagtggcccagcaggaggcccagcgggcccaattcttggtagaaaaagcaaagcaggaacagcggcagaaaattgtgcaggccgagggtgaggccgaggctgccaagatgcttggagaagcactgagcaagaaccctggctacatcaaacttcgcaagattcgagcagcccagaatatctccaagacgcctcatcaagggtaagaaatgagcctagtcaccaagaactccacccccagaggaagtggatctgcttctccagtttttgaggagccagccaggggtccagcacagccctaccccgccccagtatcatgcgatggtcccccacaccggttccctgaacccctcttggattaaggaagactgaagactagccccttttctggggaattactttcctcctccctgtgttaactggggctgttgggg

SEQ ID NO: 169295 - DNA, 908 bp, Homo sapiens
  Payload ID: 13322
  Gene Symbol: PHB2
  Gene Name: prohibitin 2
  ENST ID: ENST00000545167
  CDS Start-End: 125-908
tttctttcgccagccttacgggcccgaaccctcgtgtgaagggtgcagtacctaagccggagcggggtagaggcgggccggcacccccttctgacctccagtgccgccggcctcaagatcagacatggcccagaacttgaaggacttggcgggacggctgcccgccgggccccggggcatgggcacggccctgaagctgttgctgggggccggcgccgtggcctacggtgtgcgcgaatctgtgttcaccgtggaaggcgggcacagagccatcttcttcaatcggatcggtggagtgcagcaggacactatcctggccgagggccttcacttcagtgggtgctgcgagaacctccagcagcatacaaactgttgttttccagagggacaagagaatctctccttgtctgtggtcgtggagaggagcaggccaaaaaacgcgtggatcccttggttccagtaccccattatctatgacattcgggccagacctcgaaaaatctcctcccctacaggctccaaagacctacagatggtgaatatctccctgcgagtgttgtctcgacccaatgctcaggagcttcctagcatgtaccagcgcctagggctggactacgaggaacgagtgttgccgtccattgtcaacgaggtgctcaagagtgtggtggccaagttcaatgcctcacagctgatcacccagcgggcccaggtatccctgttgatccgccgggagctgacagagagggccaaggacttcagcctcatcctggatgatgtggccatcacagagctgagctttagccgagagtacacagctgctgtagaagccaaacaagtggcccagcaggaggcccagcgggcccaattcttggtagaaaaagcaaagcaggaacagcggcagaaaattg

SEQ ID NO: 169296 - DNA, 1515 bp, Homo sapiens
  Payload ID: 13322
  Gene Symbol: PHB2
  Gene Name: prohibitin 2
  Uniprot ID: Q99623
  ENST ID: ENST00000535923
  CDS Start-End: 283-1182
aggaaatggagatgacttgctgtcttgcgctgccctccctgggagggcagccttccagaaaggggcgggacttccgtatgcgcgattcctgtgcgcgaagttcgggtccgtagtgggctaagggggagggtttcaaagggagcgcacttccgctgccctttctttcgccagccttacgggcccgaaccctcgtgtgaagggtgcagtacctaagccggagcggggtagaggcgggccggcacccccttctgacctccagtgccgccggcctcaagatcagacatggcccagaacttgaaggacttggcgggacggctgcccgccgggccccggggcatgggcacggccctgaagctgttgctgggggccggcgccgtggcctacggtgtgcgcgaatctgtgttcaccgtggaaggcgggcacagagccatcttcttcaatcggatcggtggagtgcagcaggacactatcctggccgagggccttcacttcaggatcccttggttccagtaccccattatctatgacattcgggccagacctcgaaaaatctcctcccctacaggctccaaagacctacagatggtgaatatctccctgcgagtgttgtctcgacccaatgctcaggagcttcctagcatgtaccagcgcctagggctggactacgaggaacgagtgttgccgtccattgtcaacgaggtgctcaagagtgtggtggccaagttcaatgcctcacagctgatcacccagcgggcccaggtatccctgttgatccgccgggagctgacagagagggccaaggacttcagcctcatcctggatgatgtggccatcacagagctgagctttagccgagagtacacagctgctgtagaagccaaacaagtggcccagcaggaggcccagcgggcccaattcttggtagaaaaagcaaagcaggaacagcggcagaaaattgtgcaggccgagggtgaggccgaggctgccaagatgcttggagaagcactgagcaagaaccctggctacatcaaacttcgcaagattcgagcagcccagaatatctccaagacgatcgccacatcacagaatcgtatctatctcacagctgacaaccttgtgctgaacctacaggatgaaagtttcaccaggggaagtgacagcctcatcaagggtaagaaatgagcctagtcaccaagaactccacccccagaggaagtggatctgcttctccagtttttgaggagccagccaggggtccagcacagccctaccccgccccagtatcatgcgatggtcccccacaccggttccctgaacccctcttggattaaggaagactgaagactagccccttttctggggaattactttcctcctccctgtgttaactggggctgttggggacagtgcgtgatttctcagtgatttcctacagtgttgttccctccctcaaggctgggaggagataaacaccaacccaggaattctcaataaatttttattacttaacctgaa

SEQ ID NO: 169297 - DNA, 309 bp, Homo sapiens
  Payload ID: 13322
  Gene Symbol: PHB2
  Gene Name: prohibitin 2
  ENST ID: ENST00000545555
  CDS Start-End: 1-309
ggatgatgtggccatcacagagctgagctttagccgagagtacacagctgctgtagaagccaaacaacccagaggaggactggagcaagggagtgtggtaaggacagggccagggattgagacctgcccttgcgtgtaccttaaccctcctcaccttggagaagcactgagcaagaaccctggctacatcaaacttcgcaagattcgagcagcccagaatatctccaagacgatcgccacatcacagaatcgtatctatctcacagctgacaaccttgtgctgaacctacaggatgaaagtttcaccag

SEQ ID NO: 169298 - DNA, 1338 bp, Homo sapiens
  Payload ID: 13323
  Gene Symbol: PROK1
  Gene Name: prokineticin 1
  Uniprot ID: P58294
  ENST ID: ENST00000271331
  CDS Start-End: 18-335
cttcaccccaagtgaccatgagaggtgccacgcgagtctcaatcatgctcctcctagtaactgtgtctgactgtgctgtgatcacaggggcctgtgagcgggatgtccagtgtggggcaggcacctgctgtgccatcagcctgtggcttcgagggctgcggatgtgcaccccgctggggcgggaaggcgaggagtgccaccccggcagccacaaggtccccttcttcaggaaacgcaagcaccacacctgtccttgcttgcccaacctgctgtgctccaggttcccggacggcaggtaccgctgctccatggacttgaagaacatcaatttttaggcgcttgcctggtctcaggatacccaccatccttttcctgagcacagcctggatttttatttctgccatgaaacccagctcccatgactctcccagtccctacactgactaccctgatctctcttgtctagtacgcacatatgcacacaggcagacatacctcccatcatgacatggtccccaggctggcctgaggatgtcacagcttgaggctgtggtgtgaaaggtggccagcctggttctcttccctgctcaggctgccagagaggtggtaaatggcagaaaggacattccccctcccctccccaggtgacctgctctctttcctgggccctgcccctctccccacatgtatccctcggtctgaattagacattcctgggcacaggctcttgggtgcattgctcagagtcccaggtcctggcctgaccctcaggcccttcacgtgaggtctgtgaggaccaatttgtgggtagttcatcttccctcgattggttaactccttagtttcagaccacagactcaagattggctcttcccagagggcagcagacagtcaccccaaggcaggtgtagggagcccagggaggccaatcagccccctgaagactctggtcccagtcagcctgtggcttgtggcctgtgacctgtgaccttctgccagaattgtcatgcctctgaggccccctcttaccacactttaccagttaaccactgaagcccccaattcccacagcttttccattaaaatgcaaatggtggtggttcaatctaatctgatattgacatattagaaggcaattagggtgtttccttaaacaactcctttccaaggatcagccctgagagcaggttggtgactttgaggagggcagtcctctgtccagattggggtgggagcaagggacagggagcagggcaggggctgaaaggggcactgattcagaccagggaggcaactacacaccaacctgctggctttagaataaaagcaccaactgaa

SEQ ID NO: 169299 - DNA, 1549 bp, Homo sapiens
  Payload ID: 13324
  Gene Symbol: PROK2
  Gene Name: prokineticin 2
  Uniprot ID: Q9HC23
  ENST ID: ENST00000353065
  CDS Start-End: 155-481
gccggcgtgagtcacggcggggctagcctttataacggcccggaggctcgcgggagccgccgcgcccgtccgcccgccgctccgcgctccacccagcgcacccgggccccgcgcccccaactgcctccggcggccgcccagtcccgagggcgccatgaggagcctgtgctgcgccccactcctgctcctcttgctgctgccgccgctgctgctcacgccccgcgctggggacgccgccgtgatcaccggggcttgtgacaaggactcccaatgtggtggaggcatgtgctgtgctgtcagtatctgggtcaagagcataaggatttgcacacctatgggcaaactgggagacagctgccatccactgactcgtaaagttccattttttgggcggaggatgcatcacacttgcccatgtctgccaggcttggcctgtttacggacttcatttaaccgatttatttgtttagcccaaaagtaatcgctctggagtagaaaccaaatgtgaatagccacatcttacctgtaaagtcttacttgtgattgtgccaaacaaaaaatgtgccagaaagaaatgctcttgcttcctcaactttccaagtaacatttttatctttgatttgtaaatgatttttttttttttttatcgaaagagaattttacttttggatagaaatatgaagtgtaaggcattatggaactggttcttatttccctgtttgtgttttggtttgatttggcttttttcttaaatgtcaaaaacgtacccattttcacaaaaatgaggaaaataagaatttgatattttgttagaaaaacttttttttttttttctcaccaccccaagccccatttgtgccctgccacacaaatacacctacagcttttggtcccttgcctcttccacctcaaagaatttcaaggctcttaccttactttatttttgtccatttctcttccctcctcttgcattttaaagtggagggtttgtctctttgagtttgatggcagaatcactgatgggaatccagctttttgctggcatttaaatagtgaaaagagtgtatatgtgaacttgacactccaaactcctgtcatggcacggaagctaggagtgctgctggacccttcctaaacctgtcactcaagaggacttcagctctgctgttgggctggtgtgtggacagaaggaatggaaagccaaattaatttagtccagatttctaggtttgggtttttctaaaaataaaagattacatttacttcttttactttttataaagttttttttccttagtctcctacttagagatattctagaaaatgtcacttgaagaggaagtatttattttaatctggcacaacactaattaccatttttaaagcagtattaagttgtaatttaaaccttgtttgtaactgaaaggtcgattgtaatggattgccgtttgtacctgtatcagtattgctgtgtaaaaattctgtatcagaataataacagtactgtatatcatttgatttattttaatattatatccttatttttgtc

SEQ ID NO: 169300 - DNA, 1022 bp, Homo sapiens
  Payload ID: 13324
  Gene Symbol: PROK2
  Gene Name: prokineticin 2
  Uniprot ID: Q9HC23
  ENST ID: ENST00000295619
  CDS Start-End: 10-399
gagggcgccatgaggagcctgtgctgcgccccactcctgctcctcttgctgctgccgccgctgctgctcacgccccgcgctggggacgccgccgtgatcaccggggcttgtgacaaggactcccaatgtggtggaggcatgtgctgtgctgtcagtatctgggtcaagagcataaggatttgcacacctatgggcaaactgggagacagctgccatccactgactcgtaaaaacaattttggaaatggaaggcaggaaagaagaaagaggaagagaagcaaaaggaaaaaggaggttccattttttgggcggaggatgcatcacacttgcccatgtctgccaggcttggcctgtttacggacttcatttaaccgatttatttgtttagcccaaaagtaatcgctctggagtagaaaccaaatgtgaatagccacatcttacctgtaaagtcttacttgtgattgtgccaaacaaaaaatgtgccagaaagaaatgctcttgcttcctcaactttccaagtaacatttttatctttgatttgtaaatgatttttttttttttttatcgaaagagaattttacttttggatagaaatatgaagtgtaaggcattatggaactggttcttatttccctgtttgtgttttggtttgatttggcttttttcttaaatgtcaaaaacgtacccattttcacaaaaatgaggaaaataagaatttgatattttgttagaaaaacttttttttttttttctcaccaccccaagccccatttgtgccctgccacacaaatacacctacagcttttggtcccttgcctcttccacctcaaagaatttcaaggctcttaccttactttatttttgtccatttctcttccctcctcttgcattttaaagtggagggtttgtctctttgagtttgatggcagaatcactgatgggaatccagctttttgctggcatttaaatagtgaaaagagtgtatatgtgaacttgacactccaaactcctgtcatggcacg

SEQ ID NO: 169301 - DNA, 4273 bp, Homo sapiens
  Payload ID: 13325
  Gene Symbol: PROKR1
  Gene Name: prokineticin receptor 1
  Uniprot ID: Q8TCW9
  ENST ID: ENST00000303786
  CDS Start-End: 421-1602
acgcctcgccaagagcccgcacctcggcgcctcacggccaccggaggcggggacagggagtccggcgcgggccgggtcgggggatctgcagcggcggcgcgaaggtaactcccccgccagagccgggaaagagccccgagcagaggaggaagggagcggggacctgcccttcgcctgccggcttctggaagaagcgtctcctgatccggccccggaataagaaacccggaccttgcctgccgggctccgcgatgccgcaggtttagaatggagctcagataccataccccaaagatgctggcagagacattctgactcattaagggagagctggctgatagcagagaggggtgacatcagccttgcagacattgccctggggaattctgagcagtgttgctcacagcaccacctggccagatggagaccaccatggggttcatggatgacaatgccaccaacacttccaccagcttcctttctgtgctcaaccctcatggagcccatgccacttccttcccattcaacttcagctacagcgactatgatatgcctttggatgaagatgaggatgtgaccaattccaggacgttctttgctgccaagattgtcattgggatggccctggtgggcatcatgctggtctgcggcattggaaacttcatctttatcgctgccctggtccgctacaagaaactgcgcaacctcaccaacctgctcatcgccaacctggccatctctgacttcctggtggccattgtctgctgcccctttgagatggactactatgtggtgcgccagctctcctgggagcacggccacgtcctgtgcacctctgtcaactacctgcgcactgtctctctctatgtctccaccaatgccctgctggccatcgccattgacaggtatctggctattgtccatccgctgagaccacggatgaagtgccaaacagccactggcctgattgccttggtgtggacggtgtccatcctgatcgccatcccttccgcctacttcaccaccgagacggtcctcgtcattgtcaagagccaggaaaagatcttctgcggccagatctggcctgtggaccagcagctctactacaagtcctacttcctctttatctttggcatagaattcgtgggccccgtggtcaccatgaccctgtgctatgccaggatctcccgggagctctggttcaaggcggtccctggattccagacagagcagatccgcaagaggctgcgctgccgcaggaagacggtcctggtgctcatgtgcatcctcaccgcctacgtgctatgctgggcgcccttctacggcttcaccatcgtgcgcgacttcttccccaccgtgtttgtgaaggagaagcactacctcactgccttctacatcgtcgagtgcatcgccatgagcaacagcatgatcaacactctgtgcttcgtgaccgtcaagaacgacaccgtcaagtacttcaaaaagatcatgttgctccactggaaggcttcttacaatggcggtaagtccagtgcagacctggacctcaagacaattgggatgcctgccaccgaagaggtggactgcatcagactaaaataaccccctggactttgcaaagtttaaacacaaagcagggtcctgtggacactgactagtgtgcttggatgcacatcaacctggaactttttgtttgctgcagagggtaaagtaaatggaccactctgtgagcaatgttttcaaggagctcagagtttctaaaatgcatgtgaccagacactatcaacagtggcatttgctgaatgtctaatttacacgccagtaggtactggtaaaacctatatatgttgatgacatttagttggcaaaatgaaattggaattaaaccaaggaaaatgtggtggtgtagatagaaataagggagtttccacaaaagaactggagtaggtatctaggattgcagtacatgtgttcgtagtgtgagagtatctctgggactattcttgcactggacttcatgcctaacatttgcaaggctggagcaagaatacgaaagggactctaggctccttctgtagcccttatcctctcatctttcatggcgaggggccttgcatgcatgtgcacggacatcccagtattcatggccaagttctgtgcaaactcttcctcccacactgctctatggccaccctcaggcccagggctctgcacataggtggtaaggctcttcatcagaaggactggcttggcgaagaagacacatagaccctggatgccatttggacagggaattatggggttctgggtacctggagtaagtccagagggggaagcctggattcagggtaagcatgtcccctggctccatggactttttgccttcagtgagaagggagatgcaagtggaggagactcagaacgggaaggcaaaactggaagcatgcagggctcaatgcagctcaggtgtggcaggggctcaggctctccaggtatacagatgataccgttcccacctgttatttcatttggaccaattaggcttccccttaagtccttcccttccctctcacgcctccatgcttgtgaagcatagaatctttgaaaatggacacaatacctcctggatgtggccttcattcatttttctgttttcaccagctctcaaatgtgagtgatgaagagttccctcctaaccagacagcatggtaaggtatcctcatcgatatgatttgagggcaagatatccttattactggcacctgaatcccatcctagtctttgttcctttggattaagacttgctttgcttctaaaataggggtcctcttaggagggataagccacacgtttctagtcctcagcgtgaatgaagtcatgtgatccagtggcaggggatgcaggtcagatgcatcttccagaagtctgggcacccaggaaagaaggggacacacagataggtagtgtcagaccaaacaatgagcttcagtgaccccataggttgttgaagactcatcccactttctaacctgcctcctttgtttgatgttttgagttttggagtttggtattttggagttggaagatctgagagccagacttgactctgtcaactgtgtagccctgggcaaagcctctccgaggggacaaaggtaacacctttgtccttctgtggtaccttctgtgatacctgtgataccttctgactgagtggctatgagaagccaatgagacaatacgtgggagatgccttcaaccacacaagttatcaaaaggatgggctaggaactacgtgtagtgcgcctggacaagaaaaacctcttactttggcttgtgtatccagaaacctggccgtctccacttttatttttctttgtgtaaattattcctttgtgcttcataacagtgctgtatgcattatgtgcctaatgacatggttgtgcaaacaaggtcatgagatttgctggtagacgcataaaggaaagggtggctgagtctccggttagaagatgagtttaggggtttggatactccagaatcggagtatctttgtgatactagaagtgctgatcatcttcccatgactgttcccagccagcatgaatctgggcaatggaatagttgtttctcagtctgtttttattctcacgagtgtgtaggctacagcgtggacttgtctttttcttatttaactctagagcagcgcacttacaaggttatttaagtggcacctgtatgacatgttcccctccaaatatagtcaactccttattttgggcagcaaagtttattttgtatagttactttatttccctgaaagacacattacaaaaacctatttatttcttcccatttatcacccagtagacttaccctacaatttaatcagaatgctcttggagagtaaaattaattaaaatattagcctaaatcaaaaatgcattggagggccatttttattttttatataagatcatatattgcattctaaaatctggaaggttagcttttgtattaaaaagttaaaaatgatacaatttattgtcattatgttcaccgctttcattaagaatgctaaacaagagttgattgtattaaacaggagctttttatatgcggcaaccaaagcccactctgcttttcagcctaaaatgtatcaatttttcactcaactatctgtgttacttccaaatattagtgtctgcttgtaattttgtagtgaatgagggtgttgtgttgttatcaagtgaaatgaaaatacttggatatacag

SEQ ID NO: 169302 - DNA, 1155 bp, Homo sapiens
  Payload ID: 13326
  Gene Symbol: PROKR2
  Gene Name: prokineticin receptor 2
  Uniprot ID: Q8NFJ6
  ENST ID: ENST00000217270
  CDS Start-End: 1-1155
atggcagcccagaatggaaacaccagtttcacacccaactttaatccaccccaagaccatgcctcctccctctcctttaacttcagttatggtgattatgacctccctatggatgaggatgaggacatgaccaagacccggaccttcttcgcagccaagatcgtcattggcattgcactggcaggcatcatgctggtctgcggcatcggtaactttgtctttatcgctgccctcacccgctataagaagttgcgcaacctcaccaatctgctcattgccaacctggccatctccgacttcctggtggccatcatctgctgccccttcgagatggactactacgtggtacggcagctctcctgggagcatggccacgtgctctgtgcctccgtcaactacctgcgcaccgtctccctctacgtctccaccaatgccttgctggccattgccattgacagatatctcgccatcgttcaccccttgaaaccacggatgaattatcaaacggcctccttcctgatcgccttggtctggatggtgtccattctcattgccatcccatcggcttactttgcaacagaaacggtcctctttattgtcaagagccaggagaagatcttctgtggccagatctggcctgtggatcagcagctctactacaagtcctacttcctcttcatctttggtgtcgagttcgtgggccctgtggtcaccatgaccctgtgctatgccaggatctcccgggagctctggttcaaggcagtccctgggttccagacggagcagattcgcaagcggctgcgctgccgcaggaagacggtcctggtgctcatgtgcattctcacggcctatgtgctgtgctgggcacccttctacggtttcaccatcgttcgtgacttcttccccactgtgttcgtgaaggaaaagcactacctcactgccttctacgtggtcgagtgcatcgccatgagcaacagcatgatcaacaccgtgtgcttcgtgacggtcaagaacaacaccatgaagtacttcaagaagatgatgctgctgcactggcgtccctcccagcgggggagcaagtccagtgctgaccttgacctcagaaccaacggggtgcccaccacagaagaggtggactgtatcaggctgaagtga

SEQ ID NO: 169303 - DNA, 1354 bp, Homo sapiens
  Payload ID: 13327
  Gene Symbol: PRL
  Gene Name: prolactin
  Uniprot ID: P01236
  ENST ID: ENST00000306482
  CDS Start-End: 520-1203
atccttattctatatctcttggtatttagtgtaaaaattttaaaatctttacctagcaatcttgaggaagaaacttgataactgataatacatgagattgttacctaagtgaaatataatcctatatattcaacaaactttagagaaataagataaattttaaagtaaatgacttctgtagttttatagatcctccaaaccaatctagtctcagatctcaccttcatcatttctctcatttccttttggcctaattaatcaaaatccttcctagaatgttcatttctggccagtatgtcttcctgaatatgaataagaaataaaataccatttgatgtttgaaattatgggggtaatctcaatgacggaaatagatgaccaggaaaagggaaacgaatgcctgattcattatattcatgaagatatcaaaggtttataaagccaatatctgggaaagagaaaaccgtgagacttccagatcttctctggtgaagtgtgtttcctgcaacgatcacgaacatgaacatcaaaggatcgccatggaaagggtccctcctgctgctgctggtgtcaaacctgctcctgtgccagagcgtggcccccttgcccatctgtcccggcggggctgcccgatgccaggtgacccttcgagacctgtttgaccgcgccgtcgtcctgtcccactacatccataacctctcctcagaaatgttcagcgaattcgataaacggtatacccatggccgggggttcattaccaaggccatcaacagctgccacacttcttcccttgccacccccgaagacaaggagcaagcccaacagatgaatcaaaaagactttctgagcctgatagtcagcatattgcgatcctggaatgagcctctgtatcatctggtcacggaagtacgtggtatgcaagaagccccggaggctatcctatccaaagctgtagagattgaggagcaaaccaaacggcttctagagggcatggagctgatagtcagccaggttcatcctgaaaccaaagaaaatgagatctaccctgtctggtcgggacttccatccctgcagatggctgatgaagagtctcgcctttctgcttattataacctgctccactgcctacgcagggattcacataaaatcgacaattatctcaagctcctgaagtgccgaatcatccacaacaacaactgctaagcccacatccatttcatctatttctgagaaggtccttaatgatccgttccattgcaagcttcttttagttgtatctcttttgaatccatgcttgggtgtaacaggtctcctcttaaaaaataaaaactgactccttagagacatcaaaatc

SEQ ID NO: 169304 - DNA, 1268 bp, Homo sapiens
  Payload ID: 13327
  Gene Symbol: PRL
  Gene Name: prolactin
  ENST ID: ENST00000615510
  CDS Start-End: 520-1110
atccttattctatatctcttggtatttagtgtaaaaattttaaaatctttacctagcaatcttgaggaagaaacttgataactgataatacatgagattgttacctaagtgaaatataatcctatatattcaacaaactttagagaaataagataaattttaaagtaaatgacttctgtagttttatagatcctccaaaccaatctagtctcagatctcaccttcatcatttctctcatttccttttggcctaattaatcaaaatccttcctagaatgttcatttctggccagtatgtcttcctgaatatgaataagaaataaaataccatttgatgtttgaaattatgggggtaatctcaatgacggaaatagatgaccaggaaaagggaaacgaatgcctgattcattatattcatgaagatatcaaaggtttataaagccaatatctgggaaagagaaaaccgtgagacttccagatcttctctggtgaagtgtgtttcctgcaacgatcacgaacatgaacatcaaaggatcgccatggaaagggtccctcctgctgctgctggtgtcaaacctgctcctgtcccactacatccataacctctcctcagaaatgttcagcgaattcgataaacggtatacccatggccgggggttcattaccaaggccatcaacagctgccacacttcttcccttgccacccccgaagacaaggagcaagcccaacagatgaatcaaaaagactttctgagcctgatagtcagcatattgcgatcctggaatgagcctctgtatcatctggtcacggaagtacgtggtatgcaagaagccccggaggctatcctatccaaagctgtagagattgaggagcaaaccaaacggcttctagagggcatggagctgatagtcagccaggttcatcctgaaaccaaagaaaatgagatctaccctgtctggtcgggacttccatccctgcagatggctgatgaagagtctcgcctttctgcttattataacctgctccactgcctacgcagggattcacataaaatcgacaattatctcaagctcctgaagtgccgaatcatccacaacaacaactgctaagcccacatccatttcatctatttctgagaaggtccttaatgatccgttccattgcaagcttcttttagttgtatctcttttgaatccatgcttgggtgtaacaggtctcctcttaaaaaataaaaactgactccttagagacatcaaaatctaaaatg

SEQ ID NO: 169305 - DNA, 1364 bp, Homo sapiens
  Payload ID: 13327
  Gene Symbol: PRL
  Gene Name: prolactin
  ENST ID: ENST00000617911
  CDS Start-End: 520-1206
atccttattctatatctcttggtatttagtgtaaaaattttaaaatctttacctagcaatcttgaggaagaaacttgataactgataatacatgagattgttacctaagtgaaatataatcctatatattcaacaaactttagagaaataagataaattttaaagtaaatgacttctgtagttttatagatcctccaaaccaatctagtctcagatctcaccttcatcatttctctcatttccttttggcctaattaatcaaaatccttcctagaatgttcatttctggccagtatgtcttcctgaatatgaataagaaataaaataccatttgatgtttgaaattatgggggtaatctcaatgacggaaatagatgaccaggaaaagggaaacgaatgcctgattcattatattcatgaagatatcaaaggtttataaagccaatatctgggaaagagaaaaccgtgagacttccagatcttctctggtgaagtgtgtttcctgcaacgatcacgaacatgaacatcaaaggatcgccatggaaagcagggtccctcctgctgctgctggtgtcaaacctgctcctgtgccagagcgtggcccccttgcccatctgtcccggcggggctgcccgatgccaggtgacccttcgagacctgtttgaccgcgccgtcgtcctgtcccactacatccataacctctcctcagaaatgttcagcgaattcgataaacggtatacccatggccgggggttcattaccaaggccatcaacagctgccacacttcttcccttgccacccccgaagacaaggagcaagcccaacagatgaatcaaaaagactttctgagcctgatagtcagcatattgcgatcctggaatgagcctctgtatcatctggtcacggaagtacgtggtatgcaagaagccccggaggctatcctatccaaagctgtagagattgaggagcaaaccaaacggcttctagagggcatggagctgatagtcagccaggttcatcctgaaaccaaagaaaatgagatctaccctgtctggtcgggacttccatccctgcagatggctgatgaagagtctcgcctttctgcttattataacctgctccactgcctacgcagggattcacataaaatcgacaattatctcaagctcctgaagtgccgaatcatccacaacaacaactgctaagcccacatccatttcatctatttctgagaaggtccttaatgatccgttccattgcaagcttcttttagttgtatctcttttgaatccatgcttgggtgtaacaggtctcctcttaaaaaataaaaactgactccttagagacatcaaaatctaaaatg

SEQ ID NO: 169306 - DNA, 1679 bp, Homo sapiens
  Payload ID: 13328
  Gene Symbol: PRLR
  Gene Name: prolactin receptor
  Uniprot ID: P16471
  ENST ID: ENST00000231423
  CDS Start-End: 18-1148
aagagaaggcagccaacatgaaggaaaatgtggcatctgcaaccgttttcactctgctactttttctcaacacctgccttctgaatggacagttacctcctggaaaacctgagatctttaaatgtcgttctcccaataaggaaacattcacctgctggtggaggcctgggacagatggaggacttcctaccaattattcactgacttaccacagggaaggagagacactcatgcatgaatgtccagactacataaccggtggccccaactcctgccactttggcaagcagtacacctccatgtggaggacatacatcatgatggtcaatgccactaaccagatgggaagcagtttctcggatgaactttatgtggacgtgacttacatagttcagccagaccctcctttggagctggctgtggaagtaaaacagccagaagacagaaaaccctacctgtggattaaatggtctccacctaccctgattgacttaaaaactggttggttcacgctcctgtatgaaattcgattaaaacccgagaaagcagctgagtgggagatccattttgctgggcagcaaacagagtttaagattctcagcctacatccaggacagaaataccttgtccaggttcgctgcaaaccagaccatggatactggagtgcatggagtccagcgaccttcattcagatacctagtgacttcaccatgaatgatacaaccgtgtggatctctgtggctgtcctttctgctgtcatctgtttgattattgtctgggcagtggctttgaagggctatagcatggtgacctgcatctttccgccagttcctgggccaaaaataaaaggatttgatgctcatctgttggagaagggcaagtctgaagaactactgagtgccttgggatgccaagactttcctcccacttctgactatgaggacttgctggtggagtatttagaagtagatgatagtgaggaccagcatctaatgtcagtccattcaaaagaacacccaagtcaaggtgaccccttgatgttgggtgcctctcattacaaaaatctcaaatcttacagaccaagaaaaatctcaagtcaaggaagacttgcggtgttcacaaaggcaacattgaccacagtccagtagagctgaagagcatataccagaattcaggaactcaacattttctcccctctgtccaaccacaggacagactgtgcaccccagggagatgctgtgtgtccactggcctcactgacttggattactcctgcagcacgtgaccagccagctcatatgatcactccctactgcccccaaagcagaattgactgggagctggaaacccacacaaaaagggacaattatattgaatgtaacatactccctctgcttacctagtgccttcacctcctatgggcatttggagtaaaaggttgttatgcaggtgtttgtgaaggatgtggccaagtcagttgtctcccttacagggtgacccaagattaatgatatctacccatccccagtccctcgaccccctagttgcaatcagctttgtcactgtcccccttaggcactgccatgtaaagcacgtggtcccccattctgaagcagtgggaaacctagaagagatgtactcttcgcaacctggttggatcttaaaaacatggttctaac

SEQ ID NO: 169307 - DNA, 1297 bp, Homo sapiens
  Payload ID: 13328
  Gene Symbol: PRLR
  Gene Name: prolactin receptor
  Uniprot ID: P16471
  ENST ID: ENST00000310101
  CDS Start-End: 1-1050
atgaaggaaaatgtggcatctgcaaccgttttcactctgctactttttctcaacacctgccttctgaatggacagttacctcctggaaaacctgagatctttaaatgtcgttctcccaataaggaaacattcacctgctggtggaggcctgggacagatggaggacttcctaccaattattcactgacttaccacagggaaggagagacactcatgcatgaatgtccagactacataaccggtggccccaactcctgccactttggcaagcagtacacctccatgtggaggacatacatcatgatggtcaatgccactaaccagatgggaagcagtttctcggatgaactttatgtggacgtgacttacatagttcagccagaccctcctttggagctggctgtggaagtaaaacagccagaagacagaaaaccctacctgtggattaaatggtctccacctaccctgattgacttaaaaactggttggttcacgctcctgtatgaaattcgattaaaacccgagaaagcagctgagtgggagatccattttgctgggcagcaaacagagtttaagattctcagcctacatccaggacagaaataccttgtccaggttcgctgcaaaccagaccatggatactggagtgcatggagtccagcgaccttcattcagatacctagtgacttcaccatgaatgatacaaccgtgtggatctctgtggctgtcctttctgctgtcatctgtttgattattgtctgggcagtggctttgaagggctatagcatggtgacctgcatctttccgccagttcctgggccaaaaataaaaggatttgatgctcatctgttggagaagggcaagtctgaagaactactgagtgccttgggatgccaagactttcctcccacttctgactatgaggacttgctggtggagtatttagaagtagatgatagtgaggaccagcatctaatgtcagtccattcaaaagaacacccaagtcaagagagagaacagcggcaagcccaagaagcccgggactcctgagaacaataaggagtatgccaaggtgtccggggtcatggataacaacatcctggtgttggtgccagatccacatgctaaaaacgtggcttgctttgaagaatcagccaaagaggccccaccatcacttgaacagaatcaagctgagaaagccctggccaacttcactgcaacatcaagcaagtgcaggctccagctgggtggtttggattacctggatcccgcatgttttacacactcctttcactga

SEQ ID NO: 169308 - DNA, 1339 bp, Homo sapiens
  Payload ID: 13328
  Gene Symbol: PRLR
  Gene Name: prolactin receptor
  Uniprot ID: P16471
  ENST ID: ENST00000348262
  CDS Start-End: 18-824
aagagaaggcagccaacatgaaggaaaatgtggcatctgcaaccgttttcactctgctactttttctcaacacctgccttctgaatggacagttacctcctggaaaacctgagatctttaaatgtcgttctcccaataaggaaacattcacctgctggtggaggcctgggacagatggaggacttcctaccaattattcactgacttaccacagggaaggagagacactcatgcatgaatgtccagactacataaccggtggccccaactcctgccactttggcaagcagtacacctccatgtggaggacatacatcatgatggtcaatgccactaaccagatgggaagcagtttctcggatgaactttatgtggacgtgacttacatagttcagccagaccctcctttggagctggctgtggaagtaaaacagccagaagacagaaaaccctacctgtggattaaatggtctccacctaccctgattgacttaaaaactggttggttcacgctcctgtatgaaattcgattaaaacccgagaaagcagctgagtgggagatccattttgctgggcagcaaacagagtttaagattctcagcctacatccaggacagaaataccttgtccaggttcgctgcaaaccagaccatggatactggagtgcatggagtccagcgaccttcattcagatacctagtggtgaccccttgatgttgggtgcctctcattacaaaaatctcaaatcttacagaccaagaaaaatctcaagtcaaggaagacttgcggtgttcacaaaggcaacattgaccacagtccagtagagctgaagagcatataccagaattcaggaactcaacattttctcccctctgtccaaccacaggacagactgtgcaccccagggagatgctgtgtgtccactggcctcactgacttggattactcctgcagcacgtgaccagccagctcatatgatcactccctactgcccccaaagcagaattgactgggagctggaaacccacacaaaaagggacaattatattgaatgtaacatactccctctgcttacctagtgccttcacctcctatgggcatttggagtaaaaggttgttatgcaggtgtttgtgaaggatgtggccaagtcagttgtctcccttacagggtgacccaagattaatgatatctacccatccccagtccctcgaccccctagttgcaatcagctttgtcactgtcccccttaggcactgccatgtaaagcacgtggtcccccattctgaagcagtgggaaacctagaagagatgtactcttcgcaacctggttggatctta

SEQ ID NO: 169309 - DNA, 1206 bp, Homo sapiens
  Payload ID: 13328
  Gene Symbol: PRLR
  Gene Name: prolactin receptor
  ENST ID: ENST00000397391
  CDS Start-End: 18-122
aagagaaggcagccaacatgaaggaaaatgtggcatctgcaaccgttttcactctgctactttttctcaacacctgccttctgaatgagagacactcatgcatgaatgtccagactacataaccggtggccccaactcctgccactttggcaagcagtacacctccatgtggaggacatacatcatgatggtcaatgccactaaccagatgggaagcagtttctcggatgaactttatgtggacgtgacttacatagttcagccagaccctcctttggagctggctgtggaagtaaaacagccagaagacagaaaaccctacctgtggattaaatggtctccacctaccctgattgacttaaaaactggttggttcacgctcctgtatgaaattcgattaaaacccgagaaagcagctgagtgggagatccattttgctgggcagcaaacagagtttaagattctcagcctacatccaggacagaaataccttgtccaggttcgctgcaaaccagaccatggatactggagtgcatggagtccagcgaccttcattcagatacctagtggtgaccccttgatgttgggtgcctctcattacaaaaatctcaaatcttacagaccaagaaaaatctcaagtcaaggaagacttgcggtgttcacaaaggcaacattgaccacagtccagtagagctgaagagcatataccagaattcaggaactcaacattttctcccctctgtccaaccacaggacagactgtgcaccccagggagatgctgtgtgtccactggcctcactgacttggattactcctgcagcacgtgaccagccagctcatatgatcactccctactgcccccaaagcagaattgactgggagctggaaacccacacaaaaagggacaattatattgaatgtaacatactccctctgcttacctagtgccttcacctcctatgggcatttggagtaaaaggttgttatgcaggtgtttgtgaaggatgtggccaagtcagttgtctcccttacagggtgacccaagattaatgatatctacccatccccagtccctcgaccccctagttgcaatcagctttgtcactgtcccccttaggcactgccatgtaaagcacgtggtcccccattctgaagcagtgggaaacctagaagagatgtactcttcgcaacctggttggatctta

SEQ ID NO: 169310 - DNA, 581 bp, Homo sapiens
  Payload ID: 13328
  Gene Symbol: PRLR
  Gene Name: prolactin receptor
  ENST ID: ENST00000515839
  CDS Start-End: 479-581
acagagccaccgggctggggaccggggagcggaggctgaaatccccagacgccggttttctgggctgggctttctgccttactcactccttctccctctttctggattttaccgaccgttcgcgaaacagctttccacacaatggagcttcatgtcctcgtgcaggaagtactcatcgactgatgtggcagactttgctccctggcaaaagttgtaaaaggatgactgcgtagagccacagcattctccttgtcagtgtaggaaatgcagaggaggatttacctccggcacttgcctctaagacacctaataaagatgaggaaggctccagcctgaagcgtgggtgaggtgtccagctgcccaaaggcgacagctaaagaactctcctattcatggaggcgaacactgaggatgctttccacatgaaccctgaagtgaacttctgatacatttcctgcagcaagagaaggcagccaacatgaaggaaaatgtggcatctgcaaccgttttcactctgctactttttctcaacacctgccttctgaatggacagttacctcctggaaaacctgagatcttta

SEQ ID NO: 169311 - DNA, 568 bp, Homo sapiens
  Payload ID: 13328
  Gene Symbol: PRLR
  Gene Name: prolactin receptor
  ENST ID: ENST00000503330
  CDS Start-End: 261-568
agcaaaggtgaggcagctgtgtctccctctggctgccttttctcccctcctctctcaccagaagccaacgcgtacacgctgagtggagaggccgcgaggacaagacagtgggacatgcgtgtgctggggaagtcgagaagcaggacaggaggcagctaaagaactctcctattcatggaggcgaacactgaggatgctttccacatgaaccctgaagtgaacttctgatacatttcctgcagcaagagaaggcagccaacatgaaggaaaatgtggcatctgcaaccgttttcactctgctactttttctcaacacctgccttctgaatggacagttacctcctggaaaacctgagatctttaaatgtcgttctcccaataaggaaacattcacctgctggtggaggcctgggacagatggaggacttcctaccaattattcactgacttaccacagggaaggagagacactcatgcatgaatgtccagactacataaccggtggccccaactcctgccactttggcaagcagtacacctccatgtggaggacatacatcatgatggt

SEQ ID NO: 169312 - DNA, 1566 bp, Homo sapiens
  Payload ID: 13328
  Gene Symbol: PRLR
  Gene Name: prolactin receptor
  Uniprot ID: P16471
  ENST ID: ENST00000511486
  CDS Start-End: 1-1566
atgaaggaaaatgtggcatctgcaaccgttttcactctgctactttttctcaacacctgccttctgaatgttcagccagaccctcctttggagctggctgtggaagtaaaacagccagaagacagaaaaccctacctgtggattaaatggtctccacctaccctgattgacttaaaaactggttggttcacgctcctgtatgaaattcgattaaaacccgagaaagcagctgagtgggagatccattttgctgggcagcaaacagagtttaagattctcagcctacatccaggacagaaataccttgtccaggttcgctgcaaaccagaccatggatactggagtgcatggagtccagcgaccttcattcagatacctagtgacttcaccatgaatgatacaaccgtgtggatctctgtggctgtcctttctgctgtcatctgtttgattattgtctgggcagtggctttgaagggctatagcatggtgacctgcatctttccgccagttcctgggccaaaaataaaaggatttgatgctcatctgttggagaagggcaagtctgaagaactactgagtgccttgggatgccaagactttcctcccacttctgactatgaggacttgctggtggagtatttagaagtagatgatagtgaggaccagcatctaatgtcagtccattcaaaagaacacccaagtcaaggtatgaaacccacatacctggatcctgacactgactcaggccgggggagctgtgacagcccttcccttttgtctgaaaagtgtgaggaaccccaggccaatccctccacattctatgatcctgaggtcattgagaagccagagaatcctgaaacaacccacacctgggacccccagtgcataagcatggaaggcaaaatcccctattttcatgctggtggatccaaatgttcaacatggcccttaccacagcccagccagcacaaccccagatcctcttaccacaatattactgatgtgtgtgagctggctgtgggccctgcaggtgcaccggccactctgttgaatgaagcaggtaaagatgctttaaaatcctctcaaaccattaagtctagagaagagggaaaggcaacccagcagagggaggtagaaagcttccattctgagactgaccaggatacgccctggctgctgccccaggagaaaaccccctttggctccgctaaacccttggattatgtggagattcacaaggtcaacaaagatggtgcattatcattgctaccaaaacagagagagaacagcggcaagcccaagaagcccgggactcctgagaacaataaggagtatgccaaggtgtccggggtcatggataacaacatcctggtgttggtgccagatccacatgctaaaaacgtggcttgctttgaagaatcagccaaagaggccccaccatcacttgaacagaatcaagctgagaaagccctggccaacttcactgcaacatcaagcaagtgcaggctccagctgggtggtttggattacctggatcccgcatgttttacacactcctttcactga

SEQ ID NO: 169313 - DNA, 583 bp, Homo sapiens
  Payload ID: 13328
  Gene Symbol: PRLR
  Gene Name: prolactin receptor
  ENST ID: ENST00000504500
  CDS Start-End: 398-583
attttaccgaccgttcgcgaaacagctttccacacaatggagcttcatgtcctcgtgcaggaagtactcatcgactgatgtggcagactttgctccctggcaaaagtcttacggataccaagtcccatgcctgccagcttgcacctgttaagtcatgtgatacttaggaaatgtacacatcaccccagtgcagaggcctttatccacttcccttcattttgcctggattgttgctgtgagtgagaaataaatgacatgaaatgatcatgtatatcactgtcttcagaggatgctaaagaactctcctattcatggaggcgaacactgaggatgctttccacatgaaccctgaagtgaacttctgatacatttcctgcagcaagagaaggcagccaacatgaaggaaaatgtggcatctgcaaccgttttcactctgctactttttctcaacacctgccttctgaatggacagttacctcctggaaaacctgagatctttaaatgtcgttctcccaataaggaaacattcacctgctggtggaggcctgggacagatggaggacttcctaccaattattcactg

SEQ ID NO: 169314 - DNA, 1440 bp, Homo sapiens
  Payload ID: 13328
  Gene Symbol: PRLR
  Gene Name: prolactin receptor
  Uniprot ID: P16471
  ENST ID: ENST00000514088
  CDS Start-End: 106-912
ctaaagaactctcctattcatggaggcgaacactgaggatgctttccacatgaaccctgaagtgaacttctgatacatttcctgcagcaagagaaggcagccaacatgaaggaaaatgtggcatctgcaaccgttttcactctgctactttttctcaacacctgccttctgaatggacagttacctcctggaaaacctgagatctttaaatgtcgttctcccaataaggaaacattcacctgctggtggaggcctgggacagatggaggacttcctaccaattattcactgacttaccacagggaaggagagacactcatgcatgaatgtccagactacataaccggtggccccaactcctgccactttggcaagcagtacacctccatgtggaggacatacatcatgatggtcaatgccactaaccagatgggaagcagtttctcggatgaactttatgtggacgtgacttacatagttcagccagaccctcctttggagctggctgtggaagtaaaacagccagaagacagaaaaccctacctgtggattaaatggtctccacctaccctgattgacttaaaaactggttggttcacgctcctgtatgaaattcgattaaaacccgagaaagcagctgagtgggagatccattttgctgggcagcaaacagagtttaagattctcagcctacatccaggacagaaataccttgtccaggttcgctgcaaaccagaccatggatactggagtgcatggagtccagcgaccttcattcagatacctagtggtgaccccttgatgttgggtgcctctcattacaaaaatctcaaatcttacagaccaagaaaaatctcaagtcaaggaagacttgcggtgttcacaaaggcaacattgaccacagtccagtagagctgaagagcatataccagaattcaggaactcaacattttctcccctctgtccaaccacaggacagactgtgcaccccagggagatgctgtgtgtccactggcctcactgacttggattactcctgcagcacgtgaccagccagctcatatgatcactccctactgcccccaaagcagaattgactgggagctggaaacccacacaaaaagggacaattatattgaatgtaacatactccctctgcttacctagtgccttcacctcctatgggcatttggagtaaaaggttgttatgcaggtgtttgtgaaggatgtggccaagtcagttgtctcccttacagggtgacccaagattaatgatatctacccatccccagtccctcgaccccctagttgcaatcagctttgtcactgtcccccttaggcactgccatgtaaagcacgtggtcccccattctgaagcagtgggaaacctagaagagatgtactcttcgcaacctggttggatcttaaaaacatggttct

SEQ ID NO: 169315 - DNA, 588 bp, Homo sapiens
  Payload ID: 13328
  Gene Symbol: PRLR
  Gene Name: prolactin receptor
  ENST ID: ENST00000514206
  CDS Start-End: 228-588
cttattcctcctgctttgctgaaaccacagctgccttgaatcgagccattttgattctgccgcaaatgagctgtaaaccaaatcaagccacatcaaacaaatccaaccaccatcaaaagcaactaaagaactctcctattcatggaggcgaacactgaggatgctttccacatgaaccctgaagtgaacttctgatacatttcctgcagcaagagaaggcagccaacatgaaggaaaatgtggcatctgcaaccgttttcactctgctactttttctcaacacctgccttctgaatggacagttacctcctggaaaacctgagatctttaaatgtcgttctcccaataaggaaacattcacctgctggtggaggcctgggacagatggaggacttcctaccaattattcactgacttaccacagggaaggagagacactcatgcatgaatgtccagactacataaccggtggccccaactcctgccactttggcaagcagtacacctccatgtggaggacatacatcatgatggtcaatgccactaaccagatgggaagcagtttctcggatgaactttatgtggacg

SEQ ID NO: 169316 - DNA, 1525 bp, Homo sapiens
  Payload ID: 13328
  Gene Symbol: PRLR
  Gene Name: prolactin receptor
  Uniprot ID: P16471
  ENST ID: ENST00000513753
  CDS Start-End: 18-884
aagagaaggcagccaacatgaaggaaaatgtggcatctgcaaccgttttcactctgctactttttctcaacacctgccttctgaatggacagttacctcctggaaaacctgagatctttaaatgtcgttctcccaataaggaaacattcacctgctggtggaggcctgggacagatggaggacttcctaccaattattcactgacttaccacagggaaggagagacactcatgcatgaatgtccagactacataaccggtggccccaactcctgccactttggcaagcagtacacctccatgtggaggacatacatcatgatggtcaatgccactaaccagatgggaagcagtttctcggatgaactttatgtggacgtgacttacatagttcagccagaccctcctttggagctggctgtggaagtaaaacagccagaagacagaaaaccctacctgtggattaaatggtctccacctaccctgattgacttaaaaactggttggttcacgctcctgtatgaaattcgattaaaacccgagaaagcagctgagtgggagatccattttgctgggcagcaaacagagtttaagattctcagcctacatccaggacagaaataccttgtccaggttcgctgcaaaccagaccatggatactggagtgcatggagtccagcgaccttcattcagatacctagtgacttcaccatgaatgatacaaccgtgtggatctctgtggctgtcctttctgctgtcatctgtttgattattgtctgggcagtggctttgaagggctatagcatggtgacctgcatctttccgccagttcctgggccaaaaataaaaggatttgatgctcatctgttggaggtgaccccttgatgttgggtgcctctcattacaaaaatctcaaatcttacagaccaagaaaaatctcaagtcaaggaagacttgcggtgttcacaaaggcaacattgaccacagtccagtagagctgaagagcatataccagaattcaggaactcaacattttctcccctctgtccaaccacaggacagactgtgcaccccagggagatgctgtgtgtccactggcctcactgacttggattactcctgcagcacgtgaccagccagctcatatgatcactccctactgcccccaaagcagaattgactgggagctggaaacccacacaaaaagggacaattatattgaatgtaacatactccctctgcttacctagtgccttcacctcctatgggcatttggagtaaaaggttgttatgcaggtgtttgtgaaggatgtggccaagtcagttgtctcccttacagggtgacccaagattaatgatatctacccatccccagtccctcgaccccctagttgcaatcagctttgtcactgtcccccttaggcactgccatgtaaagcacgtggtcccccattctgaagcagtgggaaacctagaagagatgtactcttcgcaacctggttggatcttaaaaacatggttctaac

SEQ ID NO: 169317 - DNA, 1610 bp, Homo sapiens
  Payload ID: 13328
  Gene Symbol: PRLR
  Gene Name: prolactin receptor
  Uniprot ID: P16471
  ENST ID: ENST00000509140
  CDS Start-End: 106-972
ctaaagaactctcctattcatggaggcgaacactgaggatgctttccacatgaaccctgaagtgaacttctgatacatttcctgcagcaagagaaggcagccaacatgaaggaaaatgtggcatctgcaaccgttttcactctgctactttttctcaacacctgccttctgaatggacagttacctcctggaaaacctgagatctttaaatgtcgttctcccaataaggaaacattcacctgctggtggaggcctgggacagatggaggacttcctaccaattattcactgacttaccacagggaaggagagacactcatgcatgaatgtccagactacataaccggtggccccaactcctgccactttggcaagcagtacacctccatgtggaggacatacatcatgatggtcaatgccactaaccagatgggaagcagtttctcggatgaactttatgtggacgtgacttacatagttcagccagaccctcctttggagctggctgtggaagtaaaacagccagaagacagaaaaccctacctgtggattaaatggtctccacctaccctgattgacttaaaaactggttggttcacgctcctgtatgaaattcgattaaaacccgagaaagcagctgagtgggagatccattttgctgggcagcaaacagagtttaagattctcagcctacatccaggacagaaataccttgtccaggttcgctgcaaaccagaccatggatactggagtgcatggagtccagcgaccttcattcagatacctagtgacttcaccatgaatgatacaaccgtgtggatctctgtggctgtcctttctgctgtcatctgtttgattattgtctgggcagtggctttgaagggctatagcatggtgacctgcatctttccgccagttcctgggccaaaaataaaaggatttgatgctcatctgttggaggtgaccccttgatgttgggtgcctctcattacaaaaatctcaaatcttacagaccaagaaaaatctcaagtcaaggaagacttgcggtgttcacaaaggcaacattgaccacagtccagtagagctgaagagcatataccagaattcaggaactcaacattttctcccctctgtccaaccacaggacagactgtgcaccccagggagatgctgtgtgtccactggcctcactgacttggattactcctgcagcacgtgaccagccagctcatatgatcactccctactgcccccaaagcagaattgactgggagctggaaacccacacaaaaagggacaattatattgaatgtaacatactccctctgcttacctagtgccttcacctcctatgggcatttggagtaaaaggttgttatgcaggtgtttgtgaaggatgtggccaagtcagttgtctcccttacagggtgacccaagattaatgatatctacccatccccagtccctcgaccccctagttgcaatcagctttgtcactgtcccccttaggcactgccatgtaaagcacgtggtcccccattctgaagcagtgggaaacctagaagagatgtactcttcgcaacctggttggatcttaaaaacatggttct

SEQ ID NO: 169318 - DNA, 579 bp, Homo sapiens
  Payload ID: 13328
  Gene Symbol: PRLR
  Gene Name: prolactin receptor
  ENST ID: ENST00000509839
  CDS Start-End: 246-579
agtccttggagtgaactgggagacaaggaggctgctttggcatggagctgagaacatctctagatcgcactggaaggcagagagaggccagacagggaactctgaagagctgccacagcctgtgccagggtgacatcaggctaaagaactctcctattcatggaggcgaacactgaggatgctttccacatgaaccctgaagtgaacttctgatacatttcctgcagcaagagaaggcagccaacatgaaggaaaatgtggcatctgcaaccgttttcactctgctactttttctcaacacctgccttctgaatggacagttacctcctggaaaacctgagatctttaaatgtcgttctcccaataaggaaacattcacctgctggtggaggcctgggacagatggaggacttcctaccaattattcactgacttaccacagggaaggagagacactcatgcatgaatgtccagactacataaccggtggccccaactcctgccactttggcaagcagtacacctccatgtggaggacatacatcatgatggtcaatgccactaaccagatgggaagca

SEQ ID NO: 169319 - DNA, 1934 bp, Homo sapiens
  Payload ID: 13328
  Gene Symbol: PRLR
  Gene Name: prolactin receptor
  ENST ID: ENST00000508107
  CDS Start-End: 248-349
gctttctgccttactcactccttctccctctttctggattttaccgaccgttcgcgaaacagctttccacacaatggagcttcatgtcctcgtgcaggaagtactcatcgactgatgtggcagactttgctccctggcaaaactaaagaactctcctattcatggaggcgaacactgaggatgctttccacatgaaccctgaagtgaacttctgatacatttcctgcagcaagagaaggcagccaacatgaaggaaaatgtggcatctgcaaccgttttcactctgctactttttctcaacacctgccttctgaatgatccattttgctgggcagcaaacagagtttaagattctcagcctacatccaggacagaaataccttgtccaggttcgctgcaaaccagaccatggatactggagtgcatggagtccagcgaccttcattcagatacctagtgacttcaccatgaatgatacaaccgtgtggatctctgtggctgtcctttctgctgtcatctgtttgattattgtctgggcagtggctttgaagggctatagcatggtgacctgcatctttccgccagttcctgggccaaaaataaaaggatttgatgctcatctgttggagaagggcaagtctgaagaactactgagtgccttgggatgccaagactttcctcccacttctgactatgaggacttgctggtggagtatttagaagtagatgatagtgaggaccagcatctaatgtcagtccattcaaaagaacacccaagtcaaggtatgaaacccacatacctggatcctgacactgactcaggccgggggagctgtgacagcccttcccttttgtctgaaaagtgtgaggaaccccaggccaatccctccacattctatgatcctgaggtcattgagaagccagagaatcctgaaacaacccacacctgggacccccagtgcataagcatggaaggcaaaatcccctattttcatgctggtggatccaaatgttcaacatggcccttaccacagcccagccagcacaaccccagatcctcttaccacaatattactgatgtgtgtgagctggctgtgggccctgcaggtgcaccggccactctgttgaatgaagcaggtaaagatgctttaaaatcctctcaaaccattaagtctagagaagagggaaaggcaacccagcagagggaggtagaaagcttccattctgagactgaccaggatacgccctggctgctgccccaggagaaaaccccctttggctccgctaaacccttggattatgtggagattcacaaggtcaacaaagatggtgcattatcattgctaccaaaacagagagagaacagcggcaagcccaagaagcccgggactcctgagaacaataaggagtatgccaaggtgtccggggtcatggataacaacatcctggtgttggtgccagatccacatgctaaaaacgtggcttgctttgaagaatcagccaaagaggccccaccatcacttgaacagaatcaagctgagaaagccctggccaacttcactgcaacatcaagcaagtgcaggctccagctgggtggtttggattacctggatcccgcatgttttacacactcctttcactgatagcttgactaatggaatgattggttaaaatgtgatttttcttcaggtaacactacagagtacgtgaaatgctcaagaatgtagtcagactgacactactaaagctcccagctcctttcatgctccatttttaaccacttgcctctttctccagcagctgattccagaacaaatcattatgtttcctaactgtgatttgtagatttactttttgctgttagttataaaactatgtgttcaatgaaataaaagcacactgcttagtattcttgagggacaatgccaataggt

SEQ ID NO: 169320 - DNA, 1764 bp, Homo sapiens
  Payload ID: 13328
  Gene Symbol: PRLR
  Gene Name: prolactin receptor
  Uniprot ID: P16471
  ENST ID: ENST00000542609
  CDS Start-End: 106-1236
ctaaagaactctcctattcatggaggcgaacactgaggatgctttccacatgaaccctgaagtgaacttctgatacatttcctgcagcaagagaaggcagccaacatgaaggaaaatgtggcatctgcaaccgttttcactctgctactttttctcaacacctgccttctgaatggacagttacctcctggaaaacctgagatctttaaatgtcgttctcccaataaggaaacattcacctgctggtggaggcctgggacagatggaggacttcctaccaattattcactgacttaccacagggaaggagagacactcatgcatgaatgtccagactacataaccggtggccccaactcctgccactttggcaagcagtacacctccatgtggaggacatacatcatgatggtcaatgccactaaccagatgggaagcagtttctcggatgaactttatgtggacgtgacttacatagttcagccagaccctcctttggagctggctgtggaagtaaaacagccagaagacagaaaaccctacctgtggattaaatggtctccacctaccctgattgacttaaaaactggttggttcacgctcctgtatgaaattcgattaaaacccgagaaagcagctgagtgggagatccattttgctgggcagcaaacagagtttaagattctcagcctacatccaggacagaaataccttgtccaggttcgctgcaaaccagaccatggatactggagtgcatggagtccagcgaccttcattcagatacctagtgacttcaccatgaatgatacaaccgtgtggatctctgtggctgtcctttctgctgtcatctgtttgattattgtctgggcagtggctttgaagggctatagcatggtgacctgcatctttccgccagttcctgggccaaaaataaaaggatttgatgctcatctgttggagaagggcaagtctgaagaactactgagtgccttgggatgccaagactttcctcccacttctgactatgaggacttgctggtggagtatttagaagtagatgatagtgaggaccagcatctaatgtcagtccattcaaaagaacacccaagtcaaggtgaccccttgatgttgggtgcctctcattacaaaaatctcaaatcttacagaccaagaaaaatctcaagtcaaggaagacttgcggtgttcacaaaggcaacattgaccacagtccagtagagctgaagagcatataccagaattcaggaactcaacattttctcccctctgtccaaccacaggacagactgtgcaccccagggagatgctgtgtgtccactggcctcactgacttggattactcctgcagcacgtgaccagccagctcatatgatcactccctactgcccccaaagcagaattgactgggagctggaaacccacacaaaaagggacaattatattgaatgtaacatactccctctgcttacctagtgccttcacctcctatgggcatttggagtaaaaggttgttatgcaggtgtttgtgaaggatgtggccaagtcagttgtctcccttacagggtgacccaagattaatgatatctacccatccccagtccctcgaccccctagttgcaatcagctttgtcactgtcccccttaggcactgccatgtaaagcacgtggtcccccattctgaagcagtgggaaacctagaagagatgtactcttcgcaacctggttggatcttaaaaacatggttct

SEQ ID NO: 169321 - DNA, 1376 bp, Homo sapiens
  Payload ID: 13328
  Gene Symbol: PRLR
  Gene Name: prolactin receptor
  ENST ID: ENST00000618625
  CDS Start-End: 18-122
aagagaaggcagccaacatgaaggaaaatgtggcatctgcaaccgttttcactctgctactttttctcaacacctgccttctgaatgagagacactcatgcatgaatgtccagactacataaccggtggccccaactcctgccactttggcaagcagtacacctccatgtggaggacatacatcatgatggtcaatgccactaaccagatgggaagcagtttctcggatgaactttatgtggacgtgacttacatagttcagccagaccctcctttggagctggctgtggaagtaaaacagccagaagacagaaaaccctacctgtggattaaatggtctccacctaccctgattgacttaaaaactggttggttcacgctcctgtatgaaattcgattaaaacccgagaaagcagctgagtgggagatccattttgctgggcagcaaacagagtttaagattctcagcctacatccaggacagaaataccttgtccaggttcgctgcaaaccagaccatggatactggagtgcatggagtccagcgaccttcattcagatacctagtgacttcaccatgaatgatacaaccgtgtggatctctgtggctgtcctttctgctgtcatctgtttgattattgtctgggcagtggctttgaagggctatagcatggtgacctgcatctttccgccagttcctgggccaaaaataaaaggatttgatgctcatctgttggaggtgaccccttgatgttgggtgcctctcattacaaaaatctcaaatcttacagaccaagaaaaatctcaagtcaaggaagacttgcggtgttcacaaaggcaacattgaccacagtccagtagagctgaagagcatataccagaattcaggaactcaacattttctcccctctgtccaaccacaggacagactgtgcaccccagggagatgctgtgtgtccactggcctcactgacttggattactcctgcagcacgtgaccagccagctcatatgatcactccctactgcccccaaagcagaattgactgggagctggaaacccacacaaaaagggacaattatattgaatgtaacatactccctctgcttacctagtgccttcacctcctatgggcatttggagtaaaaggttgttatgcaggtgtttgtgaaggatgtggccaagtcagttgtctcccttacagggtgacccaagattaatgatatctacccatccccagtccctcgaccccctagttgcaatcagctttgtcactgtcccccttaggcactgccatgtaaagcacgtggtcccccattctgaagcagtgggaaacctagaagagatgtactcttcgcaacctggttggatctta

SEQ ID NO: 169322 - DNA, 11063 bp, Homo sapiens
  Payload ID: 13328
  Gene Symbol: PRLR
  Gene Name: prolactin receptor
  Uniprot ID: P16471
  ENST ID: ENST00000620785
  CDS Start-End: 106-1671
ctaaagaactctcctattcatggaggcgaacactgaggatgctttccacatgaaccctgaagtgaacttctgatacatttcctgcagcaagagaaggcagccaacatgaaggaaaatgtggcatctgcaaccgttttcactctgctactttttctcaacacctgccttctgaatgttcagccagaccctcctttggagctggctgtggaagtaaaacagccagaagacagaaaaccctacctgtggattaaatggtctccacctaccctgattgacttaaaaactggttggttcacgctcctgtatgaaattcgattaaaacccgagaaagcagctgagtgggagatccattttgctgggcagcaaacagagtttaagattctcagcctacatccaggacagaaataccttgtccaggttcgctgcaaaccagaccatggatactggagtgcatggagtccagcgaccttcattcagatacctagtgacttcaccatgaatgatacaaccgtgtggatctctgtggctgtcctttctgctgtcatctgtttgattattgtctgggcagtggctttgaagggctatagcatggtgacctgcatctttccgccagttcctgggccaaaaataaaaggatttgatgctcatctgttggagaagggcaagtctgaagaactactgagtgccttgggatgccaagactttcctcccacttctgactatgaggacttgctggtggagtatttagaagtagatgatagtgaggaccagcatctaatgtcagtccattcaaaagaacacccaagtcaaggtatgaaacccacatacctggatcctgacactgactcaggccgggggagctgtgacagcccttcccttttgtctgaaaagtgtgaggaaccccaggccaatccctccacattctatgatcctgaggtcattgagaagccagagaatcctgaaacaacccacacctgggacccccagtgcataagcatggaaggcaaaatcccctattttcatgctggtggatccaaatgttcaacatggcccttaccacagcccagccagcacaaccccagatcctcttaccacaatattactgatgtgtgtgagctggctgtgggccctgcaggtgcaccggccactctgttgaatgaagcaggtaaagatgctttaaaatcctctcaaaccattaagtctagagaagagggaaaggcaacccagcagagggaggtagaaagcttccattctgagactgaccaggatacgccctggctgctgccccaggagaaaaccccctttggctccgctaaacccttggattatgtggagattcacaaggtcaacaaagatggtgcattatcattgctaccaaaacagagagagaacagcggcaagcccaagaagcccgggactcctgagaacaataaggagtatgccaaggtgtccggggtcatggataacaacatcctggtgttggtgccagatccacatgctaaaaacgtggcttgctttgaagaatcagccaaagaggccccaccatcacttgaacagaatcaagctgagaaagccctggccaacttcactgcaacatcaagcaagtgcaggctccagctgggtggtttggattacctggatcccgcatgttttacacactcctttcactgatagcttgactaatggaatgattggttaaaatgtgatttttcttcaggtaacactacagagtacgtgaaatgctcaagaatgtagtcagactgacactactaaagctcccagctcctttcatgctccatttttaaccacttgcctctttctccagcagctgattccagaacaaatcattatgtttcctaactgtgatttgtagatttactttttgctgttagttataaaactatgtgttcaatgaaataaaagcacactgcttagtattcttgagggacaatgccaataggtatatcctctggaaaaggctttcatgatttggcatgggacagacggaaatgaaattgtcaaaattgtttaccatagaaagatgacaaaagaaaattttccacataggaaaatgccatgaaaattgcttttgaaaaacaactgcataacctttacactcctcgtccattttattaggattacccaaatataaccatttaaagaaagaatgcattccagaacaaattgtttacataagttcctataccttactgacacattgctgatatgcaagtaagaaataatgcctccaattttttcttaaaatagtttagatatgttaagcatggattttccccctaaattctactctaaagcttctataaaatatagtttggaaataaaaatgttcttacacaaggggcaaatgaatttcatgtgaatccctttaggatgttttcctccttcatttcagcatgatagataatttattatacaccttagtctttccttagttaaaaaaaaattccctaaagactaacttgaaaagaaaaccacagcaggatgctaatggaattactgccttactgtacatacaaattctactttaatataaacccataagtttaactgtatttttgaagactatttttctatgacttaggtaaaataaaagactattttctattttcccagtacagctgtttatgtattcagtgggtacagtattttctgctgcaaggttataatgtgtatttacagtacatagtagtatataaagttcccgtttgtggagtaaaatgccataccaacccaaagcccactgtgaaatatgaagtgaatgacaaaattcagttttcaacgcaatatagtatagtttatctgattcttttgatctccaggacactttaaacaactgctaccaccaccaccaacctagggatttaggattctccacagaccagaaattatttctcctttgagtttcaggctcctctgggactcctgttcatcaatgggtgaatcttcctaaagctaccataaaaagggagggcgacgatttctaacagctgtttaaaagagagaggttttgcttttgtgagaaatcttgggccacaaaaaaattttaagcaaagccaggagttagtgtctctctgaagtaaattcaattgcaaaatcttggcagaggcagaaatggctcatatcagaagtgtccaaataaaagttctgggaaactaggtatttgcttcccagagcaatgggaatagctccaaaggtcagagtaaggtaatgagaatctcccggtcaattccagtgccaggcttcctgaaagaagtcaaagcttggatcctcattttaaagggcgcatccatgactcatctagcagcccctctctatttttcccttcacttgatggtaaatccattctatatgtccatttactagctggacatagagaacttgagctcacctctgggagttaaatattccaccccaactatcccatattgatagcaactggactcagaggtccccctcctgtttgaaagtgaacacattgccaatgttttgagaatggcaaaagcaatagatacgaagctccatttttctaatatataaacaatatcatgtgagtaagggaagcgtgtgggaaagttgtccaagctcattcagtcccctaaatcctcgatactttaactgtctgagaaccaactgcataggcatcacctgggcagtgtttgaaaattccatttgcagaatcttaagcatcagaatctgcattttactaagatccccaaatgattcaattgcacactgaagtttgagaagcattgttctagacaaccatttccactaaaggttattttagttcatagtaacaatcctcttttggaaaggacagatcaagtctgtttgacttgcaatgaacaacactgcatgtaagcaggcaaaaaaagaaacatatcagtagtttaagattcacattatgctgaatcttatatgaattcacataaaagaatgacctgcaaaactacgcacaacttctgaaaggccaaggaatataatctaccttgagagacattaaccaaagacagtcaccctcaaagccaatgcagactaaatctttcctaacatagtctattctctaagaatagagaagatatgtatcagtcactcttatagtctgaaaacctaaacataaaagtaatctgcttttgacatataattttgtataatacgtatgaaaaaatgtgacagctaaggacttgaattaaatccctaaaaaacaattagccactcattaggccaagactttaattctatgatcaattagcactgtttatctgaattaagcttttttgtggtctaacaaaaagtttttttgtggtctatcaaggagacagctgttcaaatggaaggatacatgtggggcaggggggcggtgaagagacctagattctggtcctaactgctttgccttggagagattaattcccccctctaagcctcagtttcctctgaagatgttggaccagataacctctaaggtcctttgaaactgactccttgattccatgactcactgaatatttttctgcaaagataatcccaaccaatgccttctatcctaatctaacaaaaaattgctcttcatcatagaaatacaaagtaatcttcagtgatgtgctctttatactttgctttttaaaccgtccattccagttggtcttaatatattgcacaagtattttataagtgaaatgtgtacagaatcatattctaagattatgtgcaaatatatgtgtagaaagaggcatttaaaaaaagaggcaggagattgagaagagacatattgaatgaggcactaatctttagaaaaatgatcttttactgaatcaagccatgctcattccttgctgaatccaacagccccaaatctcttttcttatatttggctgttaatttttttccttgcaccatcctagattgttaacaaccattgcacagttggctcatgtatccttacactctgagttataataagttgtatttttataaacaaatacctaaatattcaagttttaaggcgcatggaaactgaatctaggcaacgggtgatttgtgtagcttacaacctgaacagcaagatgttccaattcattctaacagatgtgtataagcacaagttatatcagctgtgtcagatatttaacagatcctacatttattagctatataacagactctacattttcctaagtgcctaagaccaatcctggtagtcacttaagtacaaaagactcactttaactggcttggtctgaaggggtcaatcctttactgcctgtacaagatctgggcagttttgctctgtgtcttgtgatgacccagctgaatgtgaaaagcctatgagttattgagcaaccagaggtccctgcattccaagttgcagtttagctctggggaaactctggctttctctttcctcaagtgtccaccactgcccatcatttgcagaaagacttggccctgcctttagcaacttccctatctccttagagtagacaagaaagaaacagatttgtgcacattttacaaagtgccttcctctatttttttttaaagttttcattttgcaaggaaaaatgtattgattagaaagtaacatttgccttatagggattatatatatatatagatatagatatagatatgtatgaatggagagatgagaagaagccagaaagggcacaacaaaatggtctaagggccaaccagcaatgttcagtgaatgtttacgtattgtttaattgaatcaacacagagctgttgtgaatagtgtgacttactttgcctgataagaaattgaggctggctgtgatttggggataaacctgccaccctgtgatttgagactctccataccaaaacttattgatacatttttgaatgtcattggcttacatgcctaaacctgaagagaacaatgcatgcacattggaactttgtacacaaacagaaaaatataaatgactttgaattaccatcccaagcattgctaacgtagatgtgccattgacgaaagtctcatgtgttcttgagtgaacaaatttccttttcttcctttttggctcaagcacaataatgctgtcactgagacagtgactgagcactcaatgtccaagactaaatcacatcaccacgactaagtaggcactatgtcctgggatgagtcttttaaactctggccatcaggttccttacttgttaaataagtaggttggcctaaaaggtttctaagacctctcatgatctaggtaaaatccagggtttcaggtcagtgtccctggtgcagtgcaagaaagccttgctgacacacccttggcctgaagcagtgagcacatgagattgtgtgacaacgcttcagagaaaaacagagatctgttcctccaactcagattgatttaacatccttgcttctccttttccttcctggctttacatatttgtagggtttttactccttctccagagcctactattttcctaagagttagtagcaaccataggatccacaagaaatgaaattattcatcaacaatgactttggcactgcaaaagactgagtcaaaggttaaatcagtcacacagatatccaaggccaagttgaagatcacaagtatatcccatttagagatttgcatacttagagattaagcccatgttcattaattatttagttaattcaaaagccattaataaatccatgcccagcctacgcaacatagtaagacccagtctctacaaaaattttaaaaattagccagccatggtgacacgtacctgtagtcctagacacttgggaaggtgaagccagaggattgcttgagcccaggaggtcgaggctgcagtgaaccgtgattgtgtcactgcactccagcctgggtgagagagcaagaccttgtctcaataaataaacccaagttacttcgatgactagatactggaggtctgaaggagaagctttaaaaatacagattgattgcttcagagaaatcctatttataattatgatctgaacttattctatgattagcaaatatatcatctgaaaataaaacaggagttctctccccagacttttgtttttcaggatggtgagttttggtctgggaccctcatggcacccattttgataaaaggaaaaagatagtaaaacaggaaataggaagtttccagagatttgggcatctcaggattccatgaaatgctgagactaacccactaaatccaaattttattggctatggtaaatctaaatctgttcagtgttctgaacagattttatgagtttatgtctaagagtttatgtctaagagaggtacataattcacaaacactatcatgctggcagctgttttgtccacatcaattcccttgatttaatgctctgatttcaatttagaaagtactgagacatgtaaagtctcaaaataggaaaaacctatcctgtttataaggtgtggtcaataaatagaccacagataatcttagtctattaattaactctcagatcatcttagactattaattaacattctgcttgctgctgattaaaaagaaaaaaaccctaaaaccttcagcaactgaagtagtaatataaaaaataacctttaatagttatggtcaaattacgcttcacttggataaacctcaaaatgtagtctgagtttttttgtgcacacttcacaaatcctgggggaaaaatcttttttccacgttatctgaaaaactatatggcgaagataccgctgaaaaataatttgttttatgaaattcctgaaaagctaattttgaattttttaaagtaactacctcccttttgtgtcctaatgtccttccttcaaagctgcttatagtttagaaatgaaagatgtcatgtctcatgctttgactggttttcggtggcatatttgatgtatttgccaagtggcattactgactttacagtaactgttacattattttgtactatattgctttatgtggttcaaaaatagtatatgccatattgaaatatgtaatcctcatgttgtgaaactcatcatgtaatacaaatgaaaatcattacttaataacttacaatttatccatatgtagtttcaatatgattgtgtctatgactgtaaaacaaaactgaaaaaatatgtaatgtatttctgttgaaagcgtgaatgtactaattttttcctaatctttgtctagaagaaagattctatgtcattcattgtacagctgctctggggtgttacacatttaaagtacaatccaacagttgtttgaaagtcagcctctcggctttgtttcatgtgactgctgacacttctcaagtgttctttgcataatgaggctggattttgtgcttcatcgttcattttaaacaattgaaaagtctcatgtggaaaccaaagcaatctagaaccagcctgttgggtgactgtgtcttctgtaaagccatattgaagtgaagttatacataatagcataaggttccacattttcaaagctaccactacctctgcttttcctctttccctagaaaatgccaagcaaaattccccaacactaagtgagaaattagaagtaattgttttataattaagttgctgggttttttttttaacaccttctaattcatcactttgtagggttatgcaagagtttctgaataaccattcttacatgtttatattttataaaaaccggctgcaagaaagattcagaaagaatacttagtaagtcatcatatgaaaaaccaacaaaaccatagagtgcagattttttcctaactataagtcacctcatagttgtccaaagccatgataatgatatctcttacaaattgacttctgtaacccccctagaaataacccttttccttatttgattttagtcatcaaacatagtatgatatgggaaaagtcagccatttaccagaaattatcttattttgattttaaaaactcatttctatatgtagttattgtaatgtctatttttttagacttaaagatttatagaagactatagttatctgatttgttattttgcatttttcattctgtaaatctttgcttatggcacattgtgctctctgttttccatggttttattcatttatctcctcctattttgaggggacaacatgggtagttaaatctttgtcaatagtattggagataacactaactgctattatcataacatcttcatttttactgcatgccaaaaccaatgcctgccaaacaaaatcttagacatcccaatataatatgttagttatatttctattcacatcattattgaaaatacccagctcagtgcctggcttaataaatgtttaattcccttacctactcttgctctatttttttatttgaaatggagatgagcaaaataacacattcatggctgaagcaattttttggacatttcttgttaccaaaagatctataatcaggacattgtttatgtaagttggacaaaaaaaattcttcccctttatgtccacccttcctatgattgcaagacaaaatttccctcctttacctcatccctataacatgggaggctgagaaaaatgaggggagatggaaccagatacaaggagatccaataagagaagcttatttaaatattgtgaaataaaggaagaaccaaagcatttttttaagtggggaatccttttgaacagttattatttatccatattattaacaacatcttttctgacaaaatccatcagatgaagtgtaaatggataatcttttaatggatctaaacctagaaagtttcacttactgttcatgtccgtgttccagaattgtgaaatggtgtgtggttttgctttccaagttcttctctgcctcctcttaattctctaattccatgtcttacagaagaatgagaaatttctttcttacttgagtatcatgctctaaaaaacttggcttcagtcacagaaacgctggctctcctgtgcttatattgaagccaactgcctttaattcttgggccctcttatatttttaaggtgcaaaatttgaagtctcagtcaccagacacaggttctatacaattaatgatgagctggagaagtaatatgtagctaatttttcaaaagcattgaatatactttccggaaagaaaacagaaattaaatattgccacatcttgccagaatcccatctgacaccttaactttgtcaggtttcctacaacttgctaatcaagttttatacattctaaatctccccagtttctttggggctggaagatgcaacttccatttaatagaaactttgaaatcttggggtaagggagcagtggggggactagggagaaggataagaaatagaattattgaaaagcccccaccagggaccttcctggccagaatatgcagagtaattcctgctggcttcacctttgaaagtccctcgaaactatgcagatgaaactgagtctgtttttgatattgtcagatgtattctaccttggaagtcccaacacctaaactggaattcttgtatttacatctcctccactgtcccccacaccacccctcaattcctgctgcccctgctaatgttaagcatttttctcttgttatcatcaggttcacattaaaaacagatacttacaaactgacttgaagcacagatacttttacgaatgtgataaaatattttcttaagaaaaggaaagaggatgtgggtcaaataaaacaccgcatggatgttgattggtgaatactggtgtaagaaaagggagctcaggaatttttattactgtatttgtaaatgagtttgaaggaatttgtaaatgccactggtacatttttaaggtgacacatttgctccttataaagttattaaaaattacagggtaagcttaaatgacgtttgccagtagttttactttatataatcaatattgatattgttgctgaactatgtaactttatgatgcatttttcagtcccttttcagagcaaatgcttttgcaatggtagtaatgtttagtttaaattgacttaataaattattacctgagcaatggtt

SEQ ID NO: 169323 - DNA, 11688 bp, Homo sapiens
  Payload ID: 13328
  Gene Symbol: PRLR
  Gene Name: prolactin receptor
  Uniprot ID: P16471
  ENST ID: ENST00000618457
  CDS Start-End: 428-2296
atgctgaagaaaatcactgttttgcctccagcaaggaacataaatgttgcaacactgactcctcctctcatgaagaaagagtgaacaagtgcaccgagttgagcttcttctcacagagccaccgggctggggaccggggagcggaggctgaaatccccagacgccggttttctgggctgggctttctgccttactcactccttctccctctttctggattttaccgaccgttcgcgaaacagctttccacacaatggagcttcatgtcctcgtgcaggaagtactcatcgactgatgtggcagactttgctccctggcaaaactaaagaactctcctattcatggaggcgaacactgaggatgctttccacatgaaccctgaagtgaacttctgatacatttcctgcagcaagagaaggcagccaacatgaaggaaaatgtggcatctgcaaccgttttcactctgctactttttctcaacacctgccttctgaatggacagttacctcctggaaaacctgagatctttaaatgtcgttctcccaataaggaaacattcacctgctggtggaggcctgggacagatggaggacttcctaccaattattcactgacttaccacagggaaggagagacactcatgcatgaatgtccagactacataaccggtggccccaactcctgccactttggcaagcagtacacctccatgtggaggacatacatcatgatggtcaatgccactaaccagatgggaagcagtttctcggatgaactttatgtggacgtgacttacatagttcagccagaccctcctttggagctggctgtggaagtaaaacagccagaagacagaaaaccctacctgtggattaaatggtctccacctaccctgattgacttaaaaactggttggttcacgctcctgtatgaaattcgattaaaacccgagaaagcagctgagtgggagatccattttgctgggcagcaaacagagtttaagattctcagcctacatccaggacagaaataccttgtccaggttcgctgcaaaccagaccatggatactggagtgcatggagtccagcgaccttcattcagatacctagtgacttcaccatgaatgatacaaccgtgtggatctctgtggctgtcctttctgctgtcatctgtttgattattgtctgggcagtggctttgaagggctatagcatggtgacctgcatctttccgccagttcctgggccaaaaataaaaggatttgatgctcatctgttggagaagggcaagtctgaagaactactgagtgccttgggatgccaagactttcctcccacttctgactatgaggacttgctggtggagtatttagaagtagatgatagtgaggaccagcatctaatgtcagtccattcaaaagaacacccaagtcaaggtatgaaacccacatacctggatcctgacactgactcaggccgggggagctgtgacagcccttcccttttgtctgaaaagtgtgaggaaccccaggccaatccctccacattctatgatcctgaggtcattgagaagccagagaatcctgaaacaacccacacctgggacccccagtgcataagcatggaaggcaaaatcccctattttcatgctggtggatccaaatgttcaacatggcccttaccacagcccagccagcacaaccccagatcctcttaccacaatattactgatgtgtgtgagctggctgtgggccctgcaggtgcaccggccactctgttgaatgaagcaggtaaagatgctttaaaatcctctcaaaccattaagtctagagaagagggaaaggcaacccagcagagggaggtagaaagcttccattctgagactgaccaggatacgccctggctgctgccccaggagaaaaccccctttggctccgctaaacccttggattatgtggagattcacaaggtcaacaaagatggtgcattatcattgctaccaaaacagagagagaacagcggcaagcccaagaagcccgggactcctgagaacaataaggagtatgccaaggtgtccggggtcatggataacaacatcctggtgttggtgccagatccacatgctaaaaacgtggcttgctttgaagaatcagccaaagaggccccaccatcacttgaacagaatcaagctgagaaagccctggccaacttcactgcaacatcaagcaagtgcaggctccagctgggtggtttggattacctggatcccgcatgttttacacactcctttcactgatagcttgactaatggaatgattggttaaaatgtgatttttcttcaggtaacactacagagtacgtgaaatgctcaagaatgtagtcagactgacactactaaagctcccagctcctttcatgctccatttttaaccacttgcctctttctccagcagctgattccagaacaaatcattatgtttcctaactgtgatttgtagatttactttttgctgttagttataaaactatgtgttcaatgaaataaaagcacactgcttagtattcttgagggacaatgccaataggtatatcctctggaaaaggctttcatgatttggcatgggacagacggaaatgaaattgtcaaaattgtttaccatagaaagatgacaaaagaaaattttccacataggaaaatgccatgaaaattgcttttgaaaaacaactgcataacctttacactcctcgtccattttattaggattacccaaatataaccatttaaagaaagaatgcattccagaacaaattgtttacataagttcctataccttactgacacattgctgatatgcaagtaagaaataatgcctccaattttttcttaaaatagtttagatatgttaagcatggattttccccctaaattctactctaaagcttctataaaatatagtttggaaataaaaatgttcttacacaaggggcaaatgaatttcatgtgaatccctttaggatgttttcctccttcatttcagcatgatagataatttattatacaccttagtctttccttagttaaaaaaaaattccctaaagactaacttgaaaagaaaaccacagcaggatgctaatggaattactgccttactgtacatacaaattctactttaatataaacccataagtttaactgtatttttgaagactatttttctatgacttaggtaaaataaaagactattttctattttcccagtacagctgtttatgtattcagtgggtacagtattttctgctgcaaggttataatgtgtatttacagtacatagtagtatataaagttcccgtttgtggagtaaaatgccataccaacccaaagcccactgtgaaatatgaagtgaatgacaaaattcagttttcaacgcaatatagtatagtttatctgattcttttgatctccaggacactttaaacaactgctaccaccaccaccaacctagggatttaggattctccacagaccagaaattatttctcctttgagtttcaggctcctctgggactcctgttcatcaatgggtgaatcttcctaaagctaccataaaaagggagggcgacgatttctaacagctgtttaaaagagagaggttttgcttttgtgagaaatcttgggccacaaaaaaattttaagcaaagccaggagttagtgtctctctgaagtaaattcaattgcaaaatcttggcagaggcagaaatggctcatatcagaagtgtccaaataaaagttctgggaaactaggtatttgcttcccagagcaatgggaatagctccaaaggtcagagtaaggtaatgagaatctcccggtcaattccagtgccaggcttcctgaaagaagtcaaagcttggatcctcattttaaagggcgcatccatgactcatctagcagcccctctctatttttcccttcacttgatggtaaatccattctatatgtccatttactagctggacatagagaacttgagctcacctctgggagttaaatattccaccccaactatcccatattgatagcaactggactcagaggtccccctcctgtttgaaagtgaacacattgccaatgttttgagaatggcaaaagcaatagatacgaagctccatttttctaatatataaacaatatcatgtgagtaagggaagcgtgtgggaaagttgtccaagctcattcagtcccctaaatcctcgatactttaactgtctgagaaccaactgcataggcatcacctgggcagtgtttgaaaattccatttgcagaatcttaagcatcagaatctgcattttactaagatccccaaatgattcaattgcacactgaagtttgagaagcattgttctagacaaccatttccactaaaggttattttagttcatagtaacaatcctcttttggaaaggacagatcaagtctgtttgacttgcaatgaacaacactgcatgtaagcaggcaaaaaaagaaacatatcagtagtttaagattcacattatgctgaatcttatatgaattcacataaaagaatgacctgcaaaactacgcacaacttctgaaaggccaaggaatataatctaccttgagagacattaaccaaagacagtcaccctcaaagccaatgcagactaaatctttcctaacatagtctattctctaagaatagagaagatatgtatcagtcactcttatagtctgaaaacctaaacataaaagtaatctgcttttgacatataattttgtataatacgtatgaaaaaatgtgacagctaaggacttgaattaaatccctaaaaaacaattagccactcattaggccaagactttaattctatgatcaattagcactgtttatctgaattaagcttttttgtggtctaacaaaaagtttttttgtggtctatcaaggagacagctgttcaaatggaaggatacatgtggggcaggggggcggtgaagagacctagattctggtcctaactgctttgccttggagagattaattcccccctctaagcctcagtttcctctgaagatgttggaccagataacctctaaggtcctttgaaactgactccttgattccatgactcactgaatatttttctgcaaagataatcccaaccaatgccttctatcctaatctaacaaaaaattgctcttcatcatagaaatacaaagtaatcttcagtgatgtgctctttatactttgctttttaaaccgtccattccagttggtcttaatatattgcacaagtattttataagtgaaatgtgtacagaatcatattctaagattatgtgcaaatatatgtgtagaaagaggcatttaaaaaaagaggcaggagattgagaagagacatattgaatgaggcactaatctttagaaaaatgatcttttactgaatcaagccatgctcattccttgctgaatccaacagccccaaatctcttttcttatatttggctgttaatttttttccttgcaccatcctagattgttaacaaccattgcacagttggctcatgtatccttacactctgagttataataagttgtatttttataaacaaatacctaaatattcaagttttaaggcgcatggaaactgaatctaggcaacgggtgatttgtgtagcttacaacctgaacagcaagatgttccaattcattctaacagatgtgtataagcacaagttatatcagctgtgtcagatatttaacagatcctacatttattagctatataacagactctacattttcctaagtgcctaagaccaatcctggtagtcacttaagtacaaaagactcactttaactggcttggtctgaaggggtcaatcctttactgcctgtacaagatctgggcagttttgctctgtgtcttgtgatgacccagctgaatgtgaaaagcctatgagttattgagcaaccagaggtccctgcattccaagttgcagtttagctctggggaaactctggctttctctttcctcaagtgtccaccactgcccatcatttgcagaaagacttggccctgcctttagcaacttccctatctccttagagtagacaagaaagaaacagatttgtgcacattttacaaagtgccttcctctatttttttttaaagttttcattttgcaaggaaaaatgtattgattagaaagtaacatttgccttatagggattatatatatatatagatatagatatagatatgtatgaatggagagatgagaagaagccagaaagggcacaacaaaatggtctaagggccaaccagcaatgttcagtgaatgtttacgtattgtttaattgaatcaacacagagctgttgtgaatagtgtgacttactttgcctgataagaaattgaggctggctgtgatttggggataaacctgccaccctgtgatttgagactctccataccaaaacttattgatacatttttgaatgtcattggcttacatgcctaaacctgaagagaacaatgcatgcacattggaactttgtacacaaacagaaaaatataaatgactttgaattaccatcccaagcattgctaacgtagatgtgccattgacgaaagtctcatgtgttcttgagtgaacaaatttccttttcttcctttttggctcaagcacaataatgctgtcactgagacagtgactgagcactcaatgtccaagactaaatcacatcaccacgactaagtaggcactatgtcctgggatgagtcttttaaactctggccatcaggttccttacttgttaaataagtaggttggcctaaaaggtttctaagacctctcatgatctaggtaaaatccagggtttcaggtcagtgtccctggtgcagtgcaagaaagccttgctgacacacccttggcctgaagcagtgagcacatgagattgtgtgacaacgcttcagagaaaaacagagatctgttcctccaactcagattgatttaacatccttgcttctccttttccttcctggctttacatatttgtagggtttttactccttctccagagcctactattttcctaagagttagtagcaaccataggatccacaagaaatgaaattattcatcaacaatgactttggcactgcaaaagactgagtcaaaggttaaatcagtcacacagatatccaaggccaagttgaagatcacaagtatatcccatttagagatttgcatacttagagattaagcccatgttcattaattatttagttaattcaaaagccattaataaatccatgcccagcctacgcaacatagtaagacccagtctctacaaaaattttaaaaattagccagccatggtgacacgtacctgtagtcctagacacttgggaaggtgaagccagaggattgcttgagcccaggaggtcgaggctgcagtgaaccgtgattgtgtcactgcactccagcctgggtgagagagcaagaccttgtctcaataaataaacccaagttacttcgatgactagatactggaggtctgaaggagaagctttaaaaatacagattgattgcttcagagaaatcctatttataattatgatctgaacttattctatgattagcaaatatatcatctgaaaataaaacaggagttctctccccagacttttgtttttcaggatggtgagttttggtctgggaccctcatggcacccattttgataaaaggaaaaagatagtaaaacaggaaataggaagtttccagagatttgggcatctcaggattccatgaaatgctgagactaacccactaaatccaaattttattggctatggtaaatctaaatctgttcagtgttctgaacagattttatgagtttatgtctaagagtttatgtctaagagaggtacataattcacaaacactatcatgctggcagctgttttgtccacatcaattcccttgatttaatgctctgatttcaatttagaaagtactgagacatgtaaagtctcaaaataggaaaaacctatcctgtttataaggtgtggtcaataaatagaccacagataatcttagtctattaattaactctcagatcatcttagactattaattaacattctgcttgctgctgattaaaaagaaaaaaaccctaaaaccttcagcaactgaagtagtaatataaaaaataacctttaatagttatggtcaaattacgcttcacttggataaacctcaaaatgtagtctgagtttttttgtgcacacttcacaaatcctgggggaaaaatcttttttccacgttatctgaaaaactatatggcgaagataccgctgaaaaataatttgttttatgaaattcctgaaaagctaattttgaattttttaaagtaactacctcccttttgtgtcctaatgtccttccttcaaagctgcttatagtttagaaatgaaagatgtcatgtctcatgctttgactggttttcggtggcatatttgatgtatttgccaagtggcattactgactttacagtaactgttacattattttgtactatattgctttatgtggttcaaaaatagtatatgccatattgaaatatgtaatcctcatgttgtgaaactcatcatgtaatacaaatgaaaatcattacttaataacttacaatttatccatatgtagtttcaatatgattgtgtctatgactgtaaaacaaaactgaaaaaatatgtaatgtatttctgttgaaagcgtgaatgtactaattttttcctaatctttgtctagaagaaagattctatgtcattcattgtacagctgctctggggtgttacacatttaaagtacaatccaacagttgtttgaaagtcagcctctcggctttgtttcatgtgactgctgacacttctcaagtgttctttgcataatgaggctggattttgtgcttcatcgttcattttaaacaattgaaaagtctcatgtggaaaccaaagcaatctagaaccagcctgttgggtgactgtgtcttctgtaaagccatattgaagtgaagttatacataatagcataaggttccacattttcaaagctaccactacctctgcttttcctctttccctagaaaatgccaagcaaaattccccaacactaagtgagaaattagaagtaattgttttataattaagttgctgggttttttttttaacaccttctaattcatcactttgtagggttatgcaagagtttctgaataaccattcttacatgtttatattttataaaaaccggctgcaagaaagattcagaaagaatacttagtaagtcatcatatgaaaaaccaacaaaaccatagagtgcagattttttcctaactataagtcacctcatagttgtccaaagccatgataatgatatctcttacaaattgacttctgtaacccccctagaaataacccttttccttatttgattttagtcatcaaacatagtatgatatgggaaaagtcagccatttaccagaaattatcttattttgattttaaaaactcatttctatatgtagttattgtaatgtctatttttttagacttaaagatttatagaagactatagttatctgatttgttattttgcatttttcattctgtaaatctttgcttatggcacattgtgctctctgttttccatggttttattcatttatctcctcctattttgaggggacaacatgggtagttaaatctttgtcaatagtattggagataacactaactgctattatcataacatcttcatttttactgcatgccaaaaccaatgcctgccaaacaaaatcttagacatcccaatataatatgttagttatatttctattcacatcattattgaaaatacccagctcagtgcctggcttaataaatgtttaattcccttacctactcttgctctatttttttatttgaaatggagatgagcaaaataacacattcatggctgaagcaattttttggacatttcttgttaccaaaagatctataatcaggacattgtttatgtaagttggacaaaaaaaattcttcccctttatgtccacccttcctatgattgcaagacaaaatttccctcctttacctcatccctataacatgggaggctgagaaaaatgaggggagatggaaccagatacaaggagatccaataagagaagcttatttaaatattgtgaaataaaggaagaaccaaagcatttttttaagtggggaatccttttgaacagttattatttatccatattattaacaacatcttttctgacaaaatccatcagatgaagtgtaaatggataatcttttaatggatctaaacctagaaagtttcacttactgttcatgtccgtgttccagaattgtgaaatggtgtgtggttttgctttccaagttcttctctgcctcctcttaattctctaattccatgtcttacagaagaatgagaaatttctttcttacttgagtatcatgctctaaaaaacttggcttcagtcacagaaacgctggctctcctgtgcttatattgaagccaactgcctttaattcttgggccctcttatatttttaaggtgcaaaatttgaagtctcagtcaccagacacaggttctatacaattaatgatgagctggagaagtaatatgtagctaatttttcaaaagcattgaatatactttccggaaagaaaacagaaattaaatattgccacatcttgccagaatcccatctgacaccttaactttgtcaggtttcctacaacttgctaatcaagttttatacattctaaatctccccagtttctttggggctggaagatgcaacttccatttaatagaaactttgaaatcttggggtaagggagcagtggggggactagggagaaggataagaaatagaattattgaaaagcccccaccagggaccttcctggccagaatatgcagagtaattcctgctggcttcacctttgaaagtccctcgaaactatgcagatgaaactgagtctgtttttgatattgtcagatgtattctaccttggaagtcccaacacctaaactggaattcttgtatttacatctcctccactgtcccccacaccacccctcaattcctgctgcccctgctaatgttaagcatttttctcttgttatcatcaggttcacattaaaaacagatacttacaaactgacttgaagcacagatacttttacgaatgtgataaaatattttcttaagaaaaggaaagaggatgtgggtcaaataaaacaccgcatggatgttgattggtgaatactggtgtaagaaaagggagctcaggaatttttattactgtatttgtaaatgagtttgaaggaatttgtaaatgccactggtacatttttaaggtgacacatttgctccttataaagttattaaaaattacagggtaagcttaaatgacgtttgccagtagttttactttatataatcaatattgatattgttgctgaactatgtaactttatgatgcatttttcagtcccttttcagagcaaatgcttttgcaatggtagtaatgtttagtttaaattgacttaataaattattacctgagcaatggtt

SEQ ID NO: 169324 - DNA, 1402 bp, Homo sapiens
  Payload ID: 13328
  Gene Symbol: PRLR
  Gene Name: prolactin receptor
  Uniprot ID: P16471
  ENST ID: ENST00000619676
  CDS Start-End: 106-1155
ctaaagaactctcctattcatggaggcgaacactgaggatgctttccacatgaaccctgaagtgaacttctgatacatttcctgcagcaagagaaggcagccaacatgaaggaaaatgtggcatctgcaaccgttttcactctgctactttttctcaacacctgccttctgaatggacagttacctcctggaaaacctgagatctttaaatgtcgttctcccaataaggaaacattcacctgctggtggaggcctgggacagatggaggacttcctaccaattattcactgacttaccacagggaaggagagacactcatgcatgaatgtccagactacataaccggtggccccaactcctgccactttggcaagcagtacacctccatgtggaggacatacatcatgatggtcaatgccactaaccagatgggaagcagtttctcggatgaactttatgtggacgtgacttacatagttcagccagaccctcctttggagctggctgtggaagtaaaacagccagaagacagaaaaccctacctgtggattaaatggtctccacctaccctgattgacttaaaaactggttggttcacgctcctgtatgaaattcgattaaaacccgagaaagcagctgagtgggagatccattttgctgggcagcaaacagagtttaagattctcagcctacatccaggacagaaataccttgtccaggttcgctgcaaaccagaccatggatactggagtgcatggagtccagcgaccttcattcagatacctagtgacttcaccatgaatgatacaaccgtgtggatctctgtggctgtcctttctgctgtcatctgtttgattattgtctgggcagtggctttgaagggctatagcatggtgacctgcatctttccgccagttcctgggccaaaaataaaaggatttgatgctcatctgttggagaagggcaagtctgaagaactactgagtgccttgggatgccaagactttcctcccacttctgactatgaggacttgctggtggagtatttagaagtagatgatagtgaggaccagcatctaatgtcagtccattcaaaagaacacccaagtcaagagagagaacagcggcaagcccaagaagcccgggactcctgagaacaataaggagtatgccaaggtgtccggggtcatggataacaacatcctggtgttggtgccagatccacatgctaaaaacgtggcttgctttgaagaatcagccaaagaggccccaccatcacttgaacagaatcaagctgagaaagccctggccaacttcactgcaacatcaagcaagtgcaggctccagctgggtggtttggattacctggatcccgcatgttttacacactcctttcactga

SEQ ID NO: 169325 - DNA, 2166 bp, Homo sapiens
  Payload ID: 13329
  Gene Symbol: PREB
  Gene Name: prolactin regulatory element binding
  Uniprot ID: Q9HCU5
  ENST ID: ENST00000260643
  CDS Start-End: 255-1508
gcctgcgcggagggagccgcgagacaggtgcgcatgcgcagtgcgcgtctgcgagaccgacttggacggagccgagctgaggctcggcttcctgctgatggtcagggttttggcaactccccggtgtgagaggggtagggagtgctcccggcggcgacggggccgagttcaccagccgccggggcagtagtcgaaggcccggcgcggcatgtcctgggtgccgcggtgcgggcagtgaacgcgcgccgggcgggatgggccggcgccgggcgccagagctgtaccgggctccgttcccgttgtacgcgcttcaggtcgaccccagcactgggctgctcatcgctgcgggcggaggaggcgccgccaagacaggcataaagaatggcgtgcactttctgcagctagagctgattaatgggcgcttgagtgcctccttgctgcactcccatgacacagagacacgggccaccatgaacttggcactggctggtgacatccttgctgcagggcaggatgcccactgtcagctcctgcgcttccaggcacatcaacagcagggcaacaaggcagagaaggccggttccaaggagcaggggcctcgacaaaggaagggagcagccccagcagagaagaaatgtggagcggaaacccagcacgaggggctagaactcagggtagagaatttgcaggcggtgcagacagactttagctccgatccactgcagaaagttgtgtgcttcaaccacgataataccctgcttgccactggaggaacagatggctacgtccgtgtctggaaggtgcccagcctggagaaggttctggagttcaaagcccacgaaggggagattgaagacctggctttagggcctgatggcaagttggtaaccgtgggccgggaccttaaggcctctgtgtggcagaaggatcagctggtgacacagctgcactggcaagaaaatggacccaccttttccagcacaccttaccgctaccaggcctgcaggtttgggcaggttccagaccagcctgctggcctgcgactcttcacagtgcaaattccccacaagcgcctgcgccagccccctccctgctacctcacagcctgggatggctccaacttcttgccccttcggaccaagtcctgtggccatgaagtcgtctcctgcctcgatgtcagtgaatccggcaccttcctaggcctgggcacagtcactggctctgttgccatctacatagctttctctctccagtgcctctactacgtgagggaggcccatggcattgtggtgacggatgtggcctttctacctgagaagggtcgtggtccagagctccttgggtcccatgaaactgccctgttctctgtggctgtggacagtcgttgccagctgcatctgttgccctcacggcggagtgttcctgtgtggctcctgctcctgctgtgtgtcgggcttattattgtgaccatcctgctgctccagagtgcctttccaggtttcctttagcttccctgcttcctgggaatcaggagcctggacactgccatctctagagcagagtggaggcctggactccctttgctcactccattcgggtccacagctgaggttgccgctgacaagatgaatgggcactgcctgcccttctagtgaaaaggcttggctatggccctgtgtgactccaggtcccaggaaccttgccttcgtcatctgtggatccatccagaacagcggtatctgaagcccaggccatactccctgcctcctttcttctgcctaccagaggctccagagttgagcttgtccttatctagaaacatgtgaagatgcccaagagcctggaggcactgctgtccttcctgcagaaacagtttctcctcctcccctcagccttgtggccagttcctcttcacatgaagcccctggcatttgctggggaagggactggcctggtacttgctgttagggcaggaaggggcaaaaggaagacttgggtagtaatctgggggttcagatgggtagcactaagccagctggcctaaagatgcaataagttcctaggtagtctacccttaccttgaggaatgggaaaatgaacctcagcccattaggcaggaaaagttgatatttaataaacaaggaaagagtgaactgagaccccaaa

SEQ ID NO: 169326 - DNA, 1910 bp, Homo sapiens
  Payload ID: 13329
  Gene Symbol: PREB
  Gene Name: prolactin regulatory element binding
  ENST ID: ENST00000406567
  CDS Start-End: 192-1271
ggacggagccgagctgaggctcggcttcctgctgatggtcagggttttggcaactccccggtgtgagaggggtagggagtgctcccggcggcgacggggccgagttcaccagccgccggggcagtagtcgaaggcccggcgcggcatgtcctgggtgccgcggtgcgggcagtgaacgcgcgccgggcgggatgggccggcgccgggcgccagagctgtaccgggctccgttcccgttgtacgcgcttcaggtcgaccccagcactgggctgctcatcgctgcgggcggaggaggcgccgccaagacaggcataaagaatggcgtgcactttctgcagctagagctgattaatgggcgcttgagtgcctccttgctgcactcccatgacacagagacacgggccaccatgaacttggcactggctggtgacatccttgctgcagggcaggatgcccactgtcagctcctgcgcttccaggcacatcaacagcagggcaacaaggcagagaaggccggttccaaggagcaggggcctcgacaaaggaagggagcagccccagcagagaagaaatgtggagcggaaacccagcacgaggggctagaactcagggtagagaatttgcaggcggtgcagacagactttagctccgatccactgcagaaagttgtgtgcttcaaccacgataataccctgcttgccactggaggaacagatggctacgtccgtgtctggaaggtgcccagcctggagaaggttctggagttcaaagcccacgaaggggagattgaagacctggctttagggcctgatggcaagttggtaaccgtgggccgggaccttaaggcctctgtgtggcagaaggatcagctggtgacacagctgcactggcaagaaaatggacccaccttttccagcacaccttaccgctaccaggcctgcagtgaatccggcaccttcctaggcctgggcacagtcactggctctgttgccatctacatagctttctctctccagtgcctctactacgtgagggaggcccatggcattgtggtgacggatgtggcctttctacctgagaagggtcgtggtccagagctccttgggtcccatgaaactgccctgttctctgtggctgtggacagtcgttgccagctgcatctgttgccctcacggcggagtgttcctgtgtggctcctgctcctgctgtgtgtcgggcttattattgtgaccatcctgctgctccagagtgcctttccaggtttcctttagcttccctgcttcctgggaatcaggagcctggacactgccatctctagagcagagtggaggcctggactccctttgctcactccattcgggtccacagctgaggttgccgctgacaagatgaatgggcactgcctgcccttctagtgaaaaggcttggctatggccctgtgtgactccaggtcccaggaaccttgccttcgtcatctgtggatccatccagaacagcggtatctgaagcccaggccatactccctgcctcctttcttctgcctaccagaggctccagagttgagcttgtccttatctagaaacatgtgaagatgcccaagagcctggaggcactgctgtccttcctgcagaaacagtttctcctcctcccctcagccttgtggccagttcctcttcacatgaagcccctggcatttgctggggaagggactggcctggtacttgctgttagggcaggaaggggcaaaaggaagacttgggtagtaatctgggggttcagatgggtagcactaagccagctggcctaaagatgcaataagttcctaggtagtctacccttaccttgaggaatgggaaaatgaacctcagcccattaggcaggaaaagttgatatttaataaacaaggaaag

SEQ ID NO: 169327 - DNA, 351 bp, Homo sapiens
  Payload ID: 13329
  Gene Symbol: PREB
  Gene Name: prolactin regulatory element binding
  ENST ID: ENST00000441451
  CDS Start-End: 1-69
gtcgtctcctgcctcgatgtcaggtgtgagacattgctgccttggctagtgaatccggcaccttcctaggcctgggcacagtcactggctctgttgccatctacatagctttctctctccagtgcctctactacgtgagggaggcccatggcattgtggtgacggatgtggcctttctacctgagaagggtcgtggtccagagctccttgggtcccatgaaactgccctgttctctgtggctgtggacagtcgttgccagctgcatctgttgccctcacggcggagtgttcctgtgtggctcctgctcctgctgtgtgtcgggcttattattgtgaccatcctgctgctcc

SEQ ID NO: 169328 - DNA, 1105 bp, Homo sapiens
  Payload ID: 13329
  Gene Symbol: PREB
  Gene Name: prolactin regulatory element binding
  ENST ID: ENST00000456259
  CDS Start-End: 1-529
ccagcctgctggcctgcgactcttcacagtgcaaattccccacaagcgcctgcgccagccccctccctgctacctcacagcctgggatggctccaacttcttgccccttcggaccaagtcctgtggccatgaagtcgtctcctgcctcgatgtcagtgaatccggcaccttcctaggcctgggcacagtcactggctctgttgccatctacatagctttctctctccagtgcctctactacgtgagggaggcccatggcattgtggtgacggatgtggcctttctacctgagaagggtcgtggtccagagctccttgggtcccatgaaactgccctgttctctgtggctgtggacagtcgttgccagctgcatctgttgccctcacgggagtgttcctgtgtggctcctgctcctgctgtgtgtcgggcttattattgtgaccatcctgctgctccagagtgcctttccaggtttcctttagcttccctgcttcctgggaatcaggagcctggacactgccatctctagagcagagtggaggcctggactccctttgctcactccattcgggtccacagctgaggttgccgctgacaagatgaatgggcactgcctgcccttctagtgaaaaggcttggctatggccctgtgtgactccaggtcccaggaaccttgccttcgtcatctgtggatccatccagaacagcggtatctgaagcccaggccatactccctgcctcctttcttctgcctaccagaggctccagagttgagcttgtccttatctagaaacatgtgaagatgcccaagagcctggaggcactgctgtccttcctgcagaaacagtttctcctcctcccctcagccttgtggccagttcctcttcacatgaagcccctggcatttgctggggaagggactggcctggtacttgctgttagggcaggaaggggcaaaaggaagacttgggtagtaatctgggggttcagatgggtagcactaagccagctggcctaaagatgcaataagttcctaggtagtctacccttaccttgaggaatgggaaaatgaacctcagcccattaggcaggaaaagttgatatt

SEQ ID NO: 169329 - DNA, 615 bp, Homo sapiens
  Payload ID: 13329
  Gene Symbol: PREB
  Gene Name: prolactin regulatory element binding
  ENST ID: ENST00000430533
  CDS Start-End: 1-319
ccgctaccaggcctgcaggtttgggcaggttccagaccagcctgctggcctgcgactcttcacagtgcaaattccccacaagcgcctgcgccagccccctccctgctacctcacagcctgggatggctccaacttcttgccccttcggaccaagtcctgtggccatgaagtcgtctcctgcctcgatgtcagtgaatccggcaccttcctaggcctgggcacagtcactggctctgttgccatctacatagctttctctctccagggagtgttcctgtgtggctcctgctcctgctgtgtgtcgggcttattattgtgaccatcctgctgctccagagtgcctttccaggtttcctttagcttccctgcttcctgggaatcaggagcctggacactgccatctctagagcagagtggaggcctggactccctttgctcactccattcgggtccacagctgaggttgccgctgacaagatgaatgggcactgcctgcccttctagtgaaaaggcttggctatggccctgtgtgactccaggtcccaggaaccttgccttcgtcatctgtggatccatccagaacagcggtatctgaagcccaggccatactccctg

SEQ ID NO: 169330 - DNA, 2030 bp, Homo sapiens
  Payload ID: 13329
  Gene Symbol: PREB
  Gene Name: prolactin regulatory element binding
  ENST ID: ENST00000444452
  CDS Start-End: 195-347
cttggacggagccgagctgaggctcggcttcctgctgatggtcagggttttggcaactccccggtgtgagaggggtagggagtgctcccggcggcgacggggccgagttcaccagccgccggggcagtagtcgaaggcccggcgcggcatgtcctgggtgccgcggtgcgggcagtgaacgcgcgccgggcgggatgggccggcgccgggcgccagagctgtaccgggctccgttcccgttgtacgcgcttcaggtcgaccccagcactgggctgctcatcgctgcgggcggaggaggcgccgccaagacaggcataaagaatggcgtgagacacgggccaccatgaacttggcactggctggtgacatccttgctgcagggcaggatgcccactgtcagctcctgcgcttccaggcacatcaacagcagggcaacaaggcagagaaggccggttccaaggagcaggggcctcgacaaaggaagggagcagccccagcagagaagaaatgtggagcggaaacccagcacgaggggctagaactcagggtagagaatttgcaggcggtgcagacagactttagctccgatccactgcagaaagttgtgtgcttcaaccacgataataccctgcttgccactggaggaacagatggctacgtccgtgtctggaaggtgcccagcctggagaaggttctggagttcaaagcccacgaaggggagattgaagacctggctttagggcctgatggcaagttggtaaccgtgggccgggaccttaaggcctctgtgtggcagaaggatcagctggtgacacagctgcactggcaagaaaatggacccaccttttccagcacaccttaccgctaccaggcctgcaggtttgggcaggttccagaccagcctgctggcctgcgactcttcacagtgcaaattccccacaagcgcctgcgccagccccctccctgctacctcacagcctgggatggctccaacttcttgccccttcggaccaagtcctgtggccatgaagtcgtctcctgcctcgatgtcagtgaatccggcaccttcctaggcctgggcacagtcactggctctgttgccatctacatagctttctctctccagtgcctctactacgtgagggaggcccatggcattgtggtgacggatgtggcctttctacctgagaagggtcgtggtccagagctccttgggtcccatgaaactgccctgttctctgtggctgtggacagtcgttgccagctgcatctgttgccctcacggcggagtgttcctgtgtggctcctgctcctgctgtgtgtcgggcttattattgtgaccatcctgctgctccagagtgcctttccaggtttcctttagcttccctgcttcctgggaatcaggagcctggacactgccatctctagagcagagtggaggcctggactccctttgctcactccattcgggtccacagctgaggttgccgctgacaagatgaatgggcactgcctgcccttctagtgaaaaggcttggctatggccctgtgtgactccaggtcccaggaaccttgccttcgtcatctgtggatccatccagaacagcggtatctgaagcccaggccatactccctgcctcctttcttctgcctaccagaggctccagagttgagcttgtccttatctagaaacatgtgaagatgcccaagagcctggaggcactgctgtccttcctgcagaaacagtttctcctcctcccctcagccttgtggccagttcctcttcacatgaagcccctggcatttgctggggaagggactggcctggtacttgctgttagggcaggaaggggcaaaaggaagacttgggtagtaatctgggggttcagatgggtagcactaagccagctggcctaaagatgcaataagttcctaggtagtctacccttaccttgaggaatgggaaaatgaacctcagcccattaggcaggaaaagttgatatttaataaacaaggaaagagtgaactga

SEQ ID NO: 169331 - DNA, 264 bp, Homo sapiens
  Payload ID: 13330
  Gene Symbol: PRLH
  Gene Name: prolactin releasing hormone
  Uniprot ID: P81277
  ENST ID: ENST00000165524
  CDS Start-End: 1-264
atgaaggtgctgagggcctggctcctgtgcctgctgatgctgggcctggccctgcggggagctgcaagtcgtacccatcggcactccatggagatccgcacccctgacatcaatcctgcctggtacgccagtcgcgggatcaggcctgtgggccgcttcggtcggaggagggcaaccctgggggacgtccccaagcctggcctgcgaccccggctgacctgcttccccctggaaggcggtgctatgtcgtcccaggatggctga

SEQ ID NO: 169332 - DNA, 5446 bp, Homo sapiens
  Payload ID: 13331
  Gene Symbol: PRLHR
  Gene Name: prolactin releasing hormone receptor
  Uniprot ID: P49683
  ENST ID: ENST00000239032
  CDS Start-End: 191-1303
gaggggaggcgctcccagtccctctaagaagctgctagcccactgggaaacatttggatccgttcagctcccgcggagaagcgagaccggatcaccgacgtgggcagaggactaccgagggccagcagaaattctgccccttcttcccgcgagtgctttcccgctctccaaaccccactcccaggtggccatggcctcatcgaccactcggggccccagggtttctgacttattttctgggctgccgccggcggtcacaactcccgccaaccagagcgcagaggcctcggcgggcaacgggtcggtggctggcgcggacgctccagccgtcacgcccttccagagcctgcagctggtgcatcagctgaaggggctgatcgtgctgctctacagcgtcgtggtggtcgtggggctggtgggcaactgcctgctggtgctggtgatcgcgcgggtgcgccggctgcacaacgtgacgaacttcctcatcggcaacctggccttgtccgacgtgctcatgtgcaccgcctgcgtgccgctcacgctggcctatgccttcgagccacgcggctgggtgttcggcggcggcctgtgccacctggtcttcttcctgcagccggtcaccgtctatgtgtcggtgttcacgctcaccaccatcgcagtggaccgctacgtcgtgctggtgcacccgctgaggcggcgcatctcgctgcgcctcagcgcctacgctgtgctggccatctgggcgctgtccgcggtgctggcgctgcccgccgccgtgcacacctatcacgtggagctcaagccgcacgacgtgcgcctctgcgaggagttctggggctcccaggagcgccagcgccagctctacgcctgggggctgctgctggtcacctacctgctccctctgctggtcatcctcctgtcttacgtccgggtgtcagtgaagctccgcaaccgcgtggtgccgggctgcgtgacccagagccaggccgactgggaccgcgctcggcgccggcgcaccttctgcttgctggtggtgatcgtggtggtgttcgccgtctgctggctgccgctgcacgtcttcaacctgctgcgggacctcgacccccacgccatcgacccttacgcctttgggctggtgcagctgctctgccactggctcgccatgagttcggcctgctacaaccccttcatctacgcctggctgcacgacagcttccgcgaggagctgcgcaaactgttggtcgcttggccccgcaagatagccccccatggccagaatatgaccgtcagcgtggtcatctgatgccacttagccaggccttggtcaaggagctccacttcaactggcctcctagggcaccactcgaggtcaatctggtgcttattctcagcaccagagctagctaagccaacatagggcaacatttccagcccagccctcttgtccggctgtctgtcttgtccttgtgtgtttgtaaaatgttaagcgggctttggtgagagtcttgctctttgcttgggggaggccaaagagagggaagaggatttcttatttcttctttatgcccttgaaggacaaacaaaactttttctccacgttcagaaaagtatttcagaaccacgattgccttcctggcgtcccctcctcctgctcgttggtgaaatgaacaatatgaatgggatttaaaaggaatgcattgggcttggtaaagattttcagtttgcctttagaaaaaggacccagctgagagtaccatgatattgcttagtccatttgaacccttgcattcctagaatttcaggtaaatatgtattaaaactctacatctaggatttcagcatttcctgagtaagacctttatatgccaaaagggtttcgttttaaaaccacttgagtttatagtacaaaaacacctacaagctccctttagaaaggtcttgctattgtttctcccctttcctccccaactactatttaaaaatgatgagacgaattagtcaatgaagagatagataaataaagaggaaaaggtccaattcacttaagaggtcattcaattgtacctaaggacagacatcctctgtgtatgtgtgtttgtgtatgtgtgtgtatgtgtgggtacacattcagtgtttgccacaaagtgggcactcaaatatttggttttctgaatactcaatgtaaactgtgtagcgtggcattctcctgcagtctctaattgctcacttgcaacagatcaacagctgtcatctgactgctcagcacctgctctgtagtgattcttggaacatgatcaacccagaaatcaaggaccggcagaagtttacttaaggacagaacagaagaataagctaccacccacatgatgtgtagatcaaacactaattacctccagggttaagggaaaaggtgaagactgtggagcatgataccaggctgataatcatcaccttaacctcctgtgagttctgtaaatgaggacaagtgccttgggacaaaggtctccacactgttggaaaagcaacttgggcagtgagggcaggagtcttgggaaatgatacataatatccagctgtcagatcagcctctgtgttcccagtaactcagtcaccatctgtagggttcaactactttcccagctcactgaacacaagaatcactgtttcacctcctcctgcttctcttattcagaaataagctcaattcattcattaaaatgtgccctaaaaggaaaggaaagagggatgatatgggaatgacaagggttcaatcctattacattcatgtcaacaaccatggtgggagtgggagtgatcacggttgggctggttggcataggaatctttagtagttacagggctagactttttgcacacagtaaagggtaggaaaggctggcttgggagaaaggaaaaggcaggcaaagatgggtatggaggttacctctggcaatggtgctaaatgaacttgagcttcatccgtggattggagaacaaagaacctgtgtgctaatagtgcaacccacccctgccccagataagctcatctcccaggcatcccgaggactggctcctgtgcttccagcagctatattacttgggaggctcagggccagacatttctcatttcctcagagagttcctttgatggtcatgtgtggagagtgtagatggtagaggggaaggagagggattatttggggagggatctgattcatcgtcggctctttgttggaaggtttgaatcactggttctcaaccctggctgctcctagaatcacctggggaacttttttttctttttgtaattgatgtctgggctctcctcccaagagtctagttgatttgagatggtgcctggacactagcattttccaaagcacttcaggggattttaatgtgcaaccaagattaagcaccttaagaattatcctttctagggctgggcatggtggcttacacctgtaatcccagcattttgggggaccgaggcaggcagatcacaaggtcaggagtttgagaccagcctggccaacgtgttgaaaccctgtctctacttaaaatacaaaaattagccaggcgtggtggcgcacgcctgtaatcccagctactcgggaggctgaggcaggagaattgcttgaacccagggaggcagaggttgcagtgagctgagattgtgccagtgtactccaacctgggtgacagaacaagactccatctcggggtggggggtgggggcgggaatcctctttctaatgaatctcagaaacatccgaatgaagctttagttgtacctgccaaaggtgttaataatttggagctgaatttgacggtgttacatgccatacttagagaatactcttttagtcttcaggcaataccagctcaatcacaaagaggcaaattattgaaatcagaatatatagggattcgttcaacagtttacttacatatttcttatgtatcagtccaatcaattcagaaggaatatcatcattcaaccttaggtcaattgtattataaagttacataccatggccaggtaccatggctcacatctataattccaaaactttgggagaccgaagagggagaattgcttgagcccaggagttcaagaccagcctgggaaatatggcaaaactccatctctacaaaaaatagccggacgtggtggtgcacacctgtggtcccagctacttgggacacaaaggcaggaggatcacttgagcctgggaggatcactgggctgcagtgagctatcattacaccactgcactccagtctcagtgacagagcaaaatctagtctcaaaaaaacaaaaaaaacaaaaacaacaaaaaacaacaaaaaacaaatttacataccatgaattattttaaatcctggttgtcagggtgttagaaaaagtgctccttgattagcttaagtttatatcaactatgaaaaacaagcatctccattaattactagaaaagctgccactggtttctgtcatgcctacaacttaagtttgaaacacttacatggactttataaagagcttaaagaggttggagaattagattgtgcttataaacatctttacatattatgaaaatcagcaacggaacagcaattaattcttacaacatctgaaatgtgttgtggactagtttataaatcaaaccgaatttcaaaaaaatcagaggtgagtcccagagagaactgcgtaggactgtaggtagaaaattttatttaataattcattttggttaatatcaagcatctaagatgtatacacagtcctcttcctgcaaggagtaatacaggcagtcaggctgggaactgagccaacttggtacttggcagcagcccttctcaaggctgatgggaggttctgtaatcctctttgcaagctttgtcaccaggtcacacttttggcagccaatcaatagatttatctcattaaactggcagaagagtgtttcaatgcatgctccaacagctacctggaaatagcaattgtgagagatgctaaggtaaggatattccagttcctataaccgtctgattttttgtccttgtgaattttcaatctgctgttttactgggatagctaagttccaggtttattttctcaggtaggctcacccacgacctctgtcctgtggtttgcattcctgaacatctgttagtctttcaaatgcaaggcacaaaactaacctcaagagtgtggctagatctgggagtgaacacagggcctgtccctcacagacgagaggtcaggagcacctttgtttcccaaggcaggttcttgattgatttaccttcatgcgttgatgtctttgctatgtgtgtaaaatgcatgtgttgctgaatcacatgtgaagctctacatgctggggtttatactgtgtttggcatgttgtgggagctcaataaatactaaatcagttgcacagtc

SEQ ID NO: 169333 - DNA, 585 bp, Homo sapiens
  Payload ID: 13332
  Gene Symbol: PIP
  Gene Name: prolactin-induced protein
  Uniprot ID: P12273
  ENST ID: ENST00000291009
  CDS Start-End: 41-481
accacttctctgggacacattgccttctgttttctccagcatgcgcttgctccagctcctgttcagggccagccctgccaccctgctcctggttctctgcctgcagttgggggccaacaaagctcaggacaacactcggaagatcataataaagaattttgacattcccaagtcagtacgtccaaatgacgaagtcactgcagtgcttgcagttcaaacagaattgaaagaatgcatggtggttaaaacttacctcattagcagcatccctctacaaggtgcatttaactataagtatactgcctgcctatgtgacgacaatccaaaaaccttctactgggacttttacaccaacagaactgtgcaaattgcagccgtcgttgatgttattcgggaattaggcatctgccctgatgatgctgctgtaatccccatcaaaaacaaccggttttatactattgaaatcctaaaggtagaataatggaagccctgtctgtttgccacacccaggtgatttcctctaaagaaacttggctggaatttctgctgtggtctataaaataaacttcttaacatgcttctcca

SEQ ID NO: 169334 - DNA, 1344 bp, Homo sapiens
  Payload ID: 13333
  Gene Symbol: PCNA
  Gene Name: proliferating cell nuclear antigen
  Uniprot ID: P12004
  ENST ID: ENST00000379143
  CDS Start-End: 229-1014
gggctggacagcgtggtgacgtcgcaacgcggcgcagggtgagagcgcgcgcttgcggacgcggcggcattaaacggttgcaggcgtagcagagtggtcgttgtctttctaggtctcagccggtcgtcgcgacgttcgcccgctcgctctgaggctcctgaagccgaaaccagctagactttcctccttcccgcctgcctgtagcggcgttgttgccactccgccaccatgttcgaggcgcgcctggtccagggctccatcctcaagaaggtgttggaggcactcaaggacctcatcaacgaggcctgctgggatattagctccagcggtgtaaacctgcagagcatggactcgtcccacgtctctttggtgcagctcaccctgcggtctgagggcttcgacacctaccgctgcgaccgcaacctggccatgggcgtgaacctcaccagtatgtccaaaatactaaaatgcgccggcaatgaagatatcattacactaagggccgaagataacgcggataccttggcgctagtatttgaagcaccaaaccaggagaaagtttcagactatgaaatgaagttgatggatttagatgttgaacaacttggaattccagaacaggagtacagctgtgtagtaaagatgccttctggtgaatttgcacgtatatgccgagatctcagccatattggagatgctgttgtaatttcctgtgcaaaagacggagtgaaattttctgcaagtggagaacttggaaatggaaacattaaattgtcacagacaagtaatgtcgataaagaggaggaagctgttaccatagagatgaatgaaccagttcaactaacttttgcactgaggtacctgaacttctttacaaaagccactccactctcttcaacggtgacactcagtatgtctgcagatgtaccccttgttgtagagtataaaattgcggatatgggacacttaaaatactacttggctcccaagatcgaggatgaagaaggatcttaggcattcttaaaattcaagaaaataaaactaagctctttgagaactgcttctaagatgccagcatatactgaagtcttttctgtcaccaaatttgtacctctaagtacatatgtagatattgttttctgtaaataacctatttttttctctattctctgcaatttgtttaaagaataaagtccaaagtcagatctggtctagttaacctagaagtatttttgtctcttagaaatacttgtgatttttataatacaaaagggtcttgactctaaatgcagttttaagaattgtttttgaatttaaataaagttacttgaatttcaaacatca

SEQ ID NO: 169335 - DNA, 1359 bp, Homo sapiens
  Payload ID: 13333
  Gene Symbol: PCNA
  Gene Name: proliferating cell nuclear antigen
  Uniprot ID: P12004
  ENST ID: ENST00000379160
  CDS Start-End: 244-1029
ccgcggatggccggagctggcgccctggttctggaggtaaccggttactgagggcgagaagcgccacccggaggctctagcctgacaaatgcttgctgacctgggccagagctcttcccttacgcaagtctcagccggtcgtcgcgacgttcgcccgctcgctctgaggctcctgaagccgaaaccagctagactttcctccttcccgcctgcctgtagcggcgttgttgccactccgccaccatgttcgaggcgcgcctggtccagggctccatcctcaagaaggtgttggaggcactcaaggacctcatcaacgaggcctgctgggatattagctccagcggtgtaaacctgcagagcatggactcgtcccacgtctctttggtgcagctcaccctgcggtctgagggcttcgacacctaccgctgcgaccgcaacctggccatgggcgtgaacctcaccagtatgtccaaaatactaaaatgcgccggcaatgaagatatcattacactaagggccgaagataacgcggataccttggcgctagtatttgaagcaccaaaccaggagaaagtttcagactatgaaatgaagttgatggatttagatgttgaacaacttggaattccagaacaggagtacagctgtgtagtaaagatgccttctggtgaatttgcacgtatatgccgagatctcagccatattggagatgctgttgtaatttcctgtgcaaaagacggagtgaaattttctgcaagtggagaacttggaaatggaaacattaaattgtcacagacaagtaatgtcgataaagaggaggaagctgttaccatagagatgaatgaaccagttcaactaacttttgcactgaggtacctgaacttctttacaaaagccactccactctcttcaacggtgacactcagtatgtctgcagatgtaccccttgttgtagagtataaaattgcggatatgggacacttaaaatactacttggctcccaagatcgaggatgaagaaggatcttaggcattcttaaaattcaagaaaataaaactaagctctttgagaactgcttctaagatgccagcatatactgaagtcttttctgtcaccaaatttgtacctctaagtacatatgtagatattgttttctgtaaataacctatttttttctctattctctgcaatttgtttaaagaataaagtccaaagtcagatctggtctagttaacctagaagtatttttgtctcttagaaatacttgtgatttttataatacaaaagggtcttgactctaaatgcagttttaagaattgtttttgaatttaaataaagttacttgaatttcaaacatca

SEQ ID NO: 169336 - DNA, 2577 bp, Homo sapiens
  Payload ID: 13334
  Gene Symbol: PA2G4
  Gene Name: proliferation-associated 2G4, 38kDa
  Uniprot ID: Q9UQ80
  ENST ID: ENST00000303305
  CDS Start-End: 420-1604
gtttttccgggagagaccacgcttcccctcaagctccccaacggctccgccttcccgccggagcctgacccttcccagagtgcccggcgattccggcgtgcgaggcccttggagggcaaggccccagggcctggcttaggagcgcgagaggcaggctgggaattgtagttcgaaggccctcgagagcggctagagtctggcggccgagaggactagttgtcccagcgtgccctgcgcctcagcccgcgcgctcgcagcttctcgctctcgcctgcctgcccgctcccttgcttgctcgcgctttcgctcgccctctcctcgaggatcgaggggactctgaccacagcctgtggctgggaagggagacagaggcggcggcggctcaggggaaacgaggctgcagtggtggtagtaggaagatgtcgggcgaggacgagcaacaggagcaaactatcgctgaggacctggtcgtgaccaagtataagatggggggcgacatcgccaacagggtacttcggtccttggtggaagcatctagctcaggtgtgtcggtactgagcctgtgtgagaaaggtgatgccatgattatggaagaaacagggaaaatcttcaagaaagaaaaggaaatgaagaaaggtattgcttttcccaccagcatttcggtaaataactgtgtatgtcacttctcccctttgaagagcgaccaggattatattctcaaggaaggtgacttggtaaaaattgaccttggggtccatgtggatggcttcatcgctaatgtagctcacacttttgtggttgatgtagctcaggggacccaagtaacagggaggaaagcagatgttattaaggcagctcacctttgtgctgaagctgccctacgcctggtcaaacctggaaatcagaacacacaagtgacagaagcctggaacaaagttgcccactcatttaactgcacgccaatagaaggtatgctgtcacaccagttgaagcagcatgtcatcgatggagaaaaaaccattatccagaatcccacagaccagcagaagaaggaccatgaaaaagctgaatttgaggtacatgaagtatatgctgtggatgttctcgtcagctcaggagagggcaaggccaaggatgcaggacagagaaccactatttacaaacgagacccctctaaacagtatggactgaaaatgaaaacttcacgtgccttcttcagtgaggtggaaaggcgttttgatgccatgccgtttactttaagagcatttgaagatgagaagaaggctcggatgggtgtggtggagtgcgccaaacatgaactgctgcaaccatttaatgttctctatgagaaggagggtgaatttgttgcccagtttaaatttacagttctgctcatgcccaatggccccatgcggataaccagtggtcccttcgagcctgacctctacaagtctgagatggaggtccaggatgcagagctaaaggccctcctccagagttctgcaagtcgaaaaacccagaaaaagaaaaaaaagaaggcctccaagactgcagagaatgccaccagtggggaaacattagaagaaaatgaagctggggactgaggtgggtcccatctccccagcttgctgctcctgcctcatccccttcccaccaaaccccagactctgtgaagtgcagttcttctccacctaggaccgccagcagagcggggggatctccctgcccccaccccagttccccaacccactcccttccaacaacaaccagctccaactgactctggtcttgggaggtgaggcttcccaaccacggaagactactttaaatgaaaaaaagaaattgaataataaaatcaggagtcaaaattcatcgtcttcaagcccctctttctagccttttctactactctctgcttggtcaaggtttgtgccccactacagaacagggctaaattagccaccaccactgaaaactcagccgaatttttttataccactctgatgtcagcattttttccatctgtttggggctttttcctcttttttccattctccccaaatattttatctggcttcaaaattaagaggattatttttcagattgtttttattcagtgtggccgattcctcatctgattcaggctgtccagtcaggcccctcccattttaggagctggagccttcatttatgaagagattctcatctatgaaatggatcctcatttgtaaatcttttttcttccattttcacaaagctgtaaagaaataatccatctcaaccttaccctttttctctggagtcagtggggtctttcctcgctccatcttacacagacctgagctggaagctcaactggttttgttccctgtttgaaatattgtgatctccctcccatgaaagaaaaaccaagaaccagaggcgtagactgactgaagacacaactcctggctttctgaagctatggacttggattggattgctgggggtttgtagagaaaggtgacaaatttcagtacctctggcatgctgtcccaggaaactagggctcccactaacttatgaggtttttaaaca

SEQ ID NO: 169337 - DNA, 694 bp, Homo sapiens
  Payload ID: 13334
  Gene Symbol: PA2G4
  Gene Name: proliferation-associated 2G4, 38kDa
  ENST ID: ENST00000551061
  CDS Start-End: 501-694
tatagattgagattcctaacacctaattagagtgtctgagaaaggaatgcggtaacatttaacagtgcatcggcttcgagtcagcaattctgtctaccttcttgtccctgatgcctataaatttcatctagtctttgcgtgtatgtggggataccatggcaagaaccctctgaagttcataactctgtcctgtcacaccaaaggtagcatctttggaaagtctgaggccttgcctagggagatggattgtatatacccagttgtcacataatgtaaggaagagaagggaatgttgacctttcagcctcagggcaatggcaccagggagtattatggaaactcttaaattcaacttccaggtattccttgggtggtaactagacaatgaatacatacaaggctgacatgatgggattctgtcctcaggggtacttcggtccttggtggaagcatctagctcaggtgtgtcggtactgagcctgtgtgagaaaggtgatgccatgattatggaagaaacagggaaaatcttcaagaaagaaaaggaaatgaagaaaggtattgcttttcccaccagcatttcggtaaataactgtgtatgtcacttctcccctttgaagagcgaccaggattatattctcaaggaaggtgacttggtaaaaattgaccttggggtccatgtggatggcttcatcgc

SEQ ID NO: 169338 - DNA, 687 bp, Homo sapiens
  Payload ID: 13334
  Gene Symbol: PA2G4
  Gene Name: proliferation-associated 2G4, 38kDa
  ENST ID: ENST00000553057
  CDS Start-End: 126-687
tgagctactgaggggcccgcaccggtccgctgggcacggcgtggtgggaagacccggtgtcgcgcctgggacctgagcgggcaggcccaggctgaagtctatggaggtgcgggtcggcgaccaggatgagcgcagagaggggaccctggcaggctccgacccgaggccgtttgttaggaggggtacttcggtccttggtggaagcatctagctcaggtgtgtcggtactgagcctgtgtgagaaaggtgatgccatgattatggaagaaacagggaaaatcttcaagaaagaaaaggaaatgaagaaaggtattgcttttcccaccagcatttcggtaaataactgtgtatgtcacttctcccctttgaagagcgaccaggattatattctcaaggaaggtgacttggtaaaaattgaccttggggtccatgtggatggcttcatcgctaatgtagctcacacttttgtggttgatgtagctcaggggacccaagtaacagggaggaaagcagatgttattaaggcagctcacctttgtgctgaagctgccctacgcctggtcaaacctggaaatcagaacacacaagtgacagaagcctggaacaaagttgcccactcatttaactgcacgccaatagaaggtatgctgtcacaccagttgaagcagcatgtcatcgatggagaaa

SEQ ID NO: 169339 - DNA, 1085 bp, Homo sapiens
  Payload ID: 13334
  Gene Symbol: PA2G4
  Gene Name: proliferation-associated 2G4, 38kDa
  ENST ID: ENST00000552766
  CDS Start-End: 202-1056
gtcccagcgtgccctgcgcctcagcccgcgcgctcgcagcttctcgctctcgcctgcctgcccgctcccttgcttgctcgcgctttcgctcgccctctcctcgaggatcgaggggactctgaccacagcctgtggctgggaagggagacagaggcggcggcggctcaggggaaacgaggctgcagtggtggtagtaggaagatgtcgggcgaggacgagcaacaggagcaaactatcgctgaggacctggtcgtgaccaagtataagatggggggcgacatcgccaacagggtacttcggtccttggtggaagcatctagctcaggtgtgtcggtactgagcctgtgtgagaaaggtgatgccatgattatggaagaaacagggaaaatcttcaagaaagaaaaggaaatgaagaaaggtattgcttttcccaccagcatttcggtaaataactgtgtatgtcacttctcccctttgaagagcgaccaggattatattctcaaggaaggtgacttggtaaaaattgaccttggggtccatgtggatggcttcatcgctaatgtagctcacacttttgtggttgatgtagctcaggggacccaagtaacagggaggaaagcagatgttattaaggcagctcacctttgtgctgaagctgccctacgcctggtcaaacctggaaatcagaacacacaagtgacagaagcctggaacaaagttgcccactcatttaactgcacgccaatagaaggtatgctgtcacaccagttgaagcagcatgtcatcgatggagaaaaaaccattatccagaatcccacagaccagcagaagaaggaccatgaaaaagctgaatttgaggtacatgaagtatatgctgtggatgttctcgtcagctcaggagagggcaaggccaaggatgcaggacagagaaccactatttacaaacgagacccctctaaacagtatggactgaaaatgaaaacttcacgtgccttcttcagtgaggtggaaaggcgttttgatgccatgtttttaaacacattgaaaatgacatgacattaaaataaatttggatttgctcataa

SEQ ID NO: 169340 - DNA, 5168 bp, Homo sapiens
  Payload ID: 13335
  Gene Symbol: PROSER1
  Gene Name: proline and serine rich 1
  Uniprot ID: Q86XN7
  ENST ID: ENST00000352251
  CDS Start-End: 835-3669
ccaagctggcggcgcagtgttgagtttacttgggcgcgactggctttattgtaggtccccatgagctggtgggggctgtaggggtaaccaggcagggcgtctggcgctgttggggctgcgtttttccggagtccccctatgcgaggccgtgcccctcttcgcccggctcctggtgctccccagccgccggcccgctcccggaagctgcagcagctggtaacaaagagcctgccgggccgcctgctgccggggccgaggtatccaggagtcgggcggagcggctggggatgagcgcgagccggaccatgcgtccgggttcgcggcggtgagggtcgcggccggcggccgaggcgcaggtgcgggtcgagagaccggcgcctccctccccgccgcccgtggactctgagcgcaggtgtttctactctgccggccgctccacctgggaaagcgccttcaagagctacctctggcggcacctggccctcagctgcagggaaaccgcactcaaacctgccgccgagcccgggtttttctgcaaaactcagaggacctggctcttgcccgaggtgccctgaaccattgtgtgaataagctggggaagcctgactggagtgttttttctttttaataaaaagagtttttctgaatctcaatttttagaaattttttttgcgaagtttgcaatactctctacctcttcgcatcctctcttgctcgtggagtctttttcctcctcagctataaatattttttactatcggcggagcagaccagggatgaacgtcttttaattgcaagtataactgttaaaaccacgtcgggatagtagtcaagatggataaaaagtcctttgaaatggtgctggatgaaattagaaaggctgttttgacagaatacaaattaaaagcaattgaatatgtgcatggatacttttctagtgaacaggtggttgatttgctgagatatttttcctgggccgagccccagttgaaggcaatgaaagcattacagcataaaatggtggctgtccagccaacagaagtggtcaatatactcaactgtttcactttcagtaaagacaaactagttgctcttgaactgttagcctcgaacattattgatgcacagaattctcgtcctattgaagatttattcagggtaaatatgtctgagaagaaacggtgcaagagaatacttgaacaggctttcaaggggggctgcaaagctcctcatgctatgatatcttcttgtggaacaatcccaggaaatccatatcccaaaggaagacctagccgcataaatggaattttcccaggaactcctttgaaaaaagatggtgaagaatgtactaacgaaggcaaaggaatagctgcacgaattcttgggccatccaaaccacctccttcaacatataatccacataaacctgttccttatccgatacctccatgccgaccacatgcaactattgcaccaagtgcttataacaatgcaggtctggtaccattagcgaatgtcatagctccacctccacctccatatactcctaatcctgtaggaacagagaatgaagacctttcgaatccgtcaaaacctatacagaatcaaacattttccaccccagcaagtcaactcttttctcctcatggttctaatccttcaacacctgctgcaactcctgttcctactgcatccccagtcaaggcaattaatcatccatcagcatcagcagctgccaccgtttctggaatgaacctgctgaatactgtccttcctgtgttcccagggcaggtctcctcagccgttcacacacctcagccatcaataccaaacccaacagttatcagaaccccttcattgcccactgcacctgttacatccatccacagtacaaccaccactcctgttccttccattttttctggcctagtgtcactgccaggtccttctgccactcctaccgcagccactcctaccccaggacctacaccacggtccactcttggttccagtgaagcatttgcttctacttctgcacctttcactagcctccccttttccaccagctcttctgctgcttctaccagcaacccaaattctgcttcattgtcatcagtttttgcagggctccctttgcccttaccaccaacatcccaaggcctatccaacccgactcctgtaattgctggtggctctactcccagcgttgccggtccacttggtgtgaacagtcctcttttgtctgcgttaaaaggttttctgacatccaatgacaccaatttaatcaactcctctgctttatcctctgctgtcacaagtgggctggcttcactatcttctcttactcttcagaactctgactcttctgcttcagcccctaacaagtgctatgccccatcagccatccctaccccacagaggacttccactccagggttggccctgttcccaggcctgccgtctcccgtggctaactcaacttccactcccctgacattgcctgtacagtctcctttagccactgctgcatcagcttccacgtcagtgccagttagctgtggctcctcagcctcccttttgcgtggcccccacccaggtacctcagatctgcatatttcatctacccctgctgcaacaactcttcctgttatgatcaaaactgagcccacaagtcctactccctcggccttcaaaggtccatctcattctgggaatccctctcatggcactttaggtttgtcagggacattgggccgtgcatatacttcaacatccgtgcccatcagtttatctgcttgccttaatcctgcattgtcaggtctctccagcttgagtactcctttaaatggttcaaatcctctttcctctatttcccttccaccacatggttcctccactcccattgcaccagtattcactgctcttccttcttttacttctttgaccaacaattttcctttaactggcaacccatctcttaatccgtcagtatctctcccagggtcattaatagccacctcatctaccgctgccacctccacatctctccctcatcctagctcaacggcagctgttctctcagggctttctgcttcagcaccagtctcagcagcacctttccccctcaacctgtccactgctgttccctcacttttctctgttactcaaggacctctgtcatcttcaaatccctcctatccaggcttttctgtctctaataccccaagcgttacccctgctcttccctcattcccggggctgcaggcgccctctacagtcgcagctgtcacaccactacctgtggctgccacagccccatccccagctccagtcctcccaggattcgcctcagcattcagttccaatttcaactccgctcttgttgcacaagccggtttatcatctggacttcaagctgcaggcagttctgtttttccaggccttttgtccctcccgggtatccctgggtttcctcagaatccttcacaatcatccttgcaagaattacagcataatgcggctgcgcagtcagcattgttacagcaggtccattcagcttcggctctggaaagctatccagctcagcctgatgggtttcctagttatccttcagcgccaggaacaccattttctttgcaaccaagcctgtcccagagtgggtggcagtgaatacttttaacttttattctccttcagagcaacatcagaattgcctgagaactgcaatgaacaatctgacaaatgtgaagctggccaaaagtcggaaaatgagaatgagggtaatcctggagaaattgtgacaacaatttgaaaattgtggttgcattttaaagtgtgaacactcccctatgtaaatatgctgacaataaattgtatggagaatggtatttaaaaagtgtttggagacttttcacctgtcctataaaattttgaattgtgtatgtgatctacatagaaagaatattaaagagtaggttgaactctttatagccgaatacagccttaaatatgcttgtatagcatccactggcagaagtaatagttgtgcctcagacttgggggttgcatgtggccctgggggagttactacccttggtatgcatgagcggttcctattagcatcagtgggaactcagtactctgtatgtatccacaaaagggaacttgagacccacagttattcttaatttctgatattaacaaccgtacatactgctgaatttaactcaaaatatttcaggtaagtgaaagtggtgcttaatgtagactatagaatgactttcaggtgttttcaactgaaagtatatatccagaactgcatccttatagaaatacaagtaagacttaggataatttgccttcaaaacagttttcctaatctcagcagtatccagtgagtgaagaacacttgactgactcttgggccacctctgttacttactgtactatggaagctcctggtgaatgtttacaattatgggatgtagtatttctatttgtactttaagtcaaatgcttatatgaaatatgtgacaacaaatagagaagactggctctgttagtaattatgcagtatgtactctatttaaggatctgtggtagtataacatgagtgaatgtcattaattttgaagtaataactgccacatgtgggaagtaggggagtaaggagaatgaattccaatctgtgattaaaagtgtaaactatagactctactgtagtacatttcaggatctagaagttttacttttataaagatggtgtccggaagatgttgctaatgtattttacttcaacatagggaacaaactttttaagtatattaataaacctgtatggttagtttttaacagttttttaaaataaactatggatatgacaaatattctgtgttttactaagtgcttggataggctttctaattttgtatacgtgctagagttaattattgaacatttttatccaaatttagttgtaactctgtttatactactgattgctcattcgtttaaatgatattttaatgtaaaagtcataaccaacatatgaacagacagatttatgtctttaaacacagaatgtaagctatagtttaatctgataccagttgctggaagttgccatttgtttttcttaaatctatacccataaaacttcttttaagatt

SEQ ID NO: 169341 - DNA, 898 bp, Homo sapiens
  Payload ID: 13335
  Gene Symbol: PROSER1
  Gene Name: proline and serine rich 1
  ENST ID: ENST00000418503
  CDS Start-End: 596-898
cctgctgccggggccgaggtatccaggagtcgggcggagcggctggggatgagcgcgagccggaccatgcgtccgggttcgcggcggtgagggtcgcggccggcggccgaggcgcaggtgcgggtcgagagaccggcgcctccctccccgccgcccgtggactctgagcgcaggtgtttctactctgccggccgctccacctgggaaagcgccttcaagagctacctctggcggcacctggccctcagctgcagggaaaccgcactcaaacctgccgccgagcccgggtttttctgcaaaactcagaggacctggctcttgcccgaggtgccctgaaccattgtgtgaataagctggggaagcctgactggagtgttttttctttttaataaaaagagtttttctgaatctcaatttttagaaattttttttgcgaagtttgcaatactctctacctcttcgcatcctctcttgctcgtggagtctttttcctcctcagctataaatattttttactatcggcggagcagaccagggatgaacgtcttttaattgcaagtataactgttaaaaccacgtcgggatagtagtcaagatggataaaaagtcctttgaaatggtgctggatgaaattagaaaggtggttgatttgctgagatatttttcctgggccgagccccagttgaaggcaatgaaagcattacagcataaaatggtggctgtccagccaacagaagtggtcaatatactcaactgtttcactttcagtaaagacaaactagttgctcttgaactgttagcctcgaacattattgatgcacagaattctcgtcctattgaagatttattcagggtaaatatgtctgagaagaaacggtgcaagagaatacttgaacag

SEQ ID NO: 169342 - DNA, 5102 bp, Homo sapiens
  Payload ID: 13335
  Gene Symbol: PROSER1
  Gene Name: proline and serine rich 1
  Uniprot ID: Q86XN7
  ENST ID: ENST00000625998
  CDS Start-End: 835-3603
ccaagctggcggcgcagtgttgagtttacttgggcgcgactggctttattgtaggtccccatgagctggtgggggctgtaggggtaaccaggcagggcgtctggcgctgttggggctgcgtttttccggagtccccctatgcgaggccgtgcccctcttcgcccggctcctggtgctccccagccgccggcccgctcccggaagctgcagcagctggtaacaaagagcctgccgggccgcctgctgccggggccgaggtatccaggagtcgggcggagcggctggggatgagcgcgagccggaccatgcgtccgggttcgcggcggtgagggtcgcggccggcggccgaggcgcaggtgcgggtcgagagaccggcgcctccctccccgccgcccgtggactctgagcgcaggtgtttctactctgccggccgctccacctgggaaagcgccttcaagagctacctctggcggcacctggccctcagctgcagggaaaccgcactcaaacctgccgccgagcccgggtttttctgcaaaactcagaggacctggctcttgcccgaggtgccctgaaccattgtgtgaataagctggggaagcctgactggagtgttttttctttttaataaaaagagtttttctgaatctcaatttttagaaattttttttgcgaagtttgcaatactctctacctcttcgcatcctctcttgctcgtggagtctttttcctcctcagctataaatattttttactatcggcggagcagaccagggatgaacgtcttttaattgcaagtataactgttaaaaccacgtcgggatagtagtcaagatggataaaaagtcctttgaaatggtgctggatgaaattagaaaggtggttgatttgctgagatatttttcctgggccgagccccagttgaaggcaatgaaagcattacagcataaaatggtggctgtccagccaacagaagtggtcaatatactcaactgtttcactttcagtaaagacaaactagttgctcttgaactgttagcctcgaacattattgatgcacagaattctcgtcctattgaagatttattcagggtaaatatgtctgagaagaaacggtgcaagagaatacttgaacaggctttcaaggggggctgcaaagctcctcatgctatgatatcttcttgtggaacaatcccaggaaatccatatcccaaaggaagacctagccgcataaatggaattttcccaggaactcctttgaaaaaagatggtgaagaatgtactaacgaaggcaaaggaatagctgcacgaattcttgggccatccaaaccacctccttcaacatataatccacataaacctgttccttatccgatacctccatgccgaccacatgcaactattgcaccaagtgcttataacaatgcaggtctggtaccattagcgaatgtcatagctccacctccacctccatatactcctaatcctgtaggaacagagaatgaagacctttcgaatccgtcaaaacctatacagaatcaaacattttccaccccagcaagtcaactcttttctcctcatggttctaatccttcaacacctgctgcaactcctgttcctactgcatccccagtcaaggcaattaatcatccatcagcatcagcagctgccaccgtttctggaatgaacctgctgaatactgtccttcctgtgttcccagggcaggtctcctcagccgttcacacacctcagccatcaataccaaacccaacagttatcagaaccccttcattgcccactgcacctgttacatccatccacagtacaaccaccactcctgttccttccattttttctggcctagtgtcactgccaggtccttctgccactcctaccgcagccactcctaccccaggacctacaccacggtccactcttggttccagtgaagcatttgcttctacttctgcacctttcactagcctccccttttccaccagctcttctgctgcttctaccagcaacccaaattctgcttcattgtcatcagtttttgcagggctccctttgcccttaccaccaacatcccaaggcctatccaacccgactcctgtaattgctggtggctctactcccagcgttgccggtccacttggtgtgaacagtcctcttttgtctgcgttaaaaggttttctgacatccaatgacaccaatttaatcaactcctctgctttatcctctgctgtcacaagtgggctggcttcactatcttctcttactcttcagaactctgactcttctgcttcagcccctaacaagtgctatgccccatcagccatccctaccccacagaggacttccactccagggttggccctgttcccaggcctgccgtctcccgtggctaactcaacttccactcccctgacattgcctgtacagtctcctttagccactgctgcatcagcttccacgtcagtgccagttagctgtggctcctcagcctcccttttgcgtggcccccacccaggtacctcagatctgcatatttcatctacccctgctgcaacaactcttcctgttatgatcaaaactgagcccacaagtcctactccctcggccttcaaaggtccatctcattctgggaatccctctcatggcactttaggtttgtcagggacattgggccgtgcatatacttcaacatccgtgcccatcagtttatctgcttgccttaatcctgcattgtcaggtctctccagcttgagtactcctttaaatggttcaaatcctctttcctctatttcccttccaccacatggttcctccactcccattgcaccagtattcactgctcttccttcttttacttctttgaccaacaattttcctttaactggcaacccatctcttaatccgtcagtatctctcccagggtcattaatagccacctcatctaccgctgccacctccacatctctccctcatcctagctcaacggcagctgttctctcagggctttctgcttcagcaccagtctcagcagcacctttccccctcaacctgtccactgctgttccctcacttttctctgttactcaaggacctctgtcatcttcaaatccctcctatccaggcttttctgtctctaataccccaagcgttacccctgctcttccctcattcccggggctgcaggcgccctctacagtcgcagctgtcacaccactacctgtggctgccacagccccatccccagctccagtcctcccaggattcgcctcagcattcagttccaatttcaactccgctcttgttgcacaagccggtttatcatctggacttcaagctgcaggcagttctgtttttccaggccttttgtccctcccgggtatccctgggtttcctcagaatccttcacaatcatccttgcaagaattacagcataatgcggctgcgcagtcagcattgttacagcaggtccattcagcttcggctctggaaagctatccagctcagcctgatgggtttcctagttatccttcagcgccaggaacaccattttctttgcaaccaagcctgtcccagagtgggtggcagtgaatacttttaacttttattctccttcagagcaacatcagaattgcctgagaactgcaatgaacaatctgacaaatgtgaagctggccaaaagtcggaaaatgagaatgagggtaatcctggagaaattgtgacaacaatttgaaaattgtggttgcattttaaagtgtgaacactcccctatgtaaatatgctgacaataaattgtatggagaatggtatttaaaaagtgtttggagacttttcacctgtcctataaaattttgaattgtgtatgtgatctacatagaaagaatattaaagagtaggttgaactctttatagccgaatacagccttaaatatgcttgtatagcatccactggcagaagtaatagttgtgcctcagacttgggggttgcatgtggccctgggggagttactacccttggtatgcatgagcggttcctattagcatcagtgggaactcagtactctgtatgtatccacaaaagggaacttgagacccacagttattcttaatttctgatattaacaaccgtacatactgctgaatttaactcaaaatatttcaggtaagtgaaagtggtgcttaatgtagactatagaatgactttcaggtgttttcaactgaaagtatatatccagaactgcatccttatagaaatacaagtaagacttaggataatttgccttcaaaacagttttcctaatctcagcagtatccagtgagtgaagaacacttgactgactcttgggccacctctgttacttactgtactatggaagctcctggtgaatgtttacaattatgggatgtagtatttctatttgtactttaagtcaaatgcttatatgaaatatgtgacaacaaatagagaagactggctctgttagtaattatgcagtatgtactctatttaaggatctgtggtagtataacatgagtgaatgtcattaattttgaagtaataactgccacatgtgggaagtaggggagtaaggagaatgaattccaatctgtgattaaaagtgtaaactatagactctactgtagtacatttcaggatctagaagttttacttttataaagatggtgtccggaagatgttgctaatgtattttacttcaacatagggaacaaactttttaagtatattaataaacctgtatggttagtttttaacagttttttaaaataaactatggatatgacaaatattctgtgttttactaagtgcttggataggctttctaattttgtatacgtgctagagttaattattgaacatttttatccaaatttagttgtaactctgtttatactactgattgctcattcgtttaaatgatattttaatgtaaaagtcataaccaacatatgaacagacagatttatgtctttaaacacagaatgtaagctatagtttaatctgataccagttgctggaagttgccatttgtttttcttaaatctatacccataaaacttcttttaagatt

SEQ ID NO: 169343 - DNA, 3333 bp, Homo sapiens
  Payload ID: 13336
  Gene Symbol: PROSER2
  Gene Name: proline and serine rich 2
  Uniprot ID: Q86WR7
  ENST ID: ENST00000277570
  CDS Start-End: 155-1462
gggcggcggcgtgagggctccgggtcgctggcggcgtggacacctgagtcccggggtaggggtctcccgcgaggagtgagctgttgccgcagaatgggctgctggctcctgccctgcttcctgtgatcgagccggccctgaggactctgtggagatgcctgtaacccaccggaaatcagacgcatctgacatgaactcagacacgtcccccagctgcaggctccgagccttcagcagaggcggcagcctggagagtcgaagcagcagctctcgctccagaagcttcactttggatgatgagagcctgaagtacctcacccatgaggaaaaggatgtgctcctgttttttgaagagacgattgactccctagacgaggactttgaggagccagtgctgtgcgatggaggagtgtgctgcctctgctccccgtctctggaggagagcacctccagtccctccgagcctgaagatgtcatcgacttagtgcagccagcacctggcgccggggaagccgagggccttccagaggggacccaggcagcagggcctgcacctgctgggaaggagcacaggaaacaagatgctgagactcctccacctccagaccccccggctcccgagacccttcttgcgccaccacccctgcctagcacccccgatccccccaggagggagctgcgcgccccctccccgccggtggagcaccccagactcctgcgctctgttcccacgcccctcgttatggcgcagaagatttccgagaggatggcggggaacgaagccctctcgcccacctccccgttcagggagggccggcccggggagtggaggacacctgccgcccgggggccccgcagtggagaccctggcccggggcccagccacccggcgcagcccaaggcaccccgcttccccagcaacatcatcgtcaccaacggcgcggcccgggagccccgcaggaccctgtccagggcggccgtcagcgtgcaggagcgcagggcgcaggtgttggccaccatccacggccacgccggcgccttccccgccgcgggggacgccggcgagggggccccagggggcggctcctccccggagcgggtggcgcgtggccggggcctgccgggccccgctgagagtctccgggcagggggtcaggctccgcggggcccggcgctggccaacggcttcccaagtgcgcacgaggccctgaagagcgcacccagctccttcgcgcccgctgggaagtccctctgcttccgccctggcccggccctgcccagcacgcgggcccgtcagagcttccccgggccccggcagcccaacggcgcccaggactggcgccgcgcagactccctgccccggccccagggcatcaccgtgcagttcgcgggccgcggctcctcggaggaggcgcgcagggaggccctgcggaagctggggctgctcagggagagttcgtgagggccgcgcgggctccagtccaccccgtttctccccaccctgaagagagggtgaaagagtcgctgcacccaggagctgtttggtctaaaatggaagtgacagcgggagcccctgccctctgtggcacatcggagtctagaggtgcctggctggggcctcctggctgagcacgcaccgcaagctccagccaccggcacagagaactcttccctaaaggaatctggccgagggcttgtctcccttttcccaagaactgagagagagagaataacctgttagacccataggtttccgtgatgtgtaaatgccatcttttgggggttgggaggagtaggactggtctgattatcattcttgagtctcatctaccctcttctcgaagtacatgacatgaaagttcagatcccttccactcaggattctcgccgccttttctaagaaaataataaaaaaaaatgcttgtttcattttttaatgtcttaatatacttgcttttgtttttgaagggtgaggcatcatggtactttgcttttgtttcttgacgtactttagtttgcccagttttgttttttactgaaaactgaaatgaaacctttagatattgagttttgggagtgaaatggaaaggtggtaattttgagaaagcaagtctcatcagactctgaggtctgggacgtgtgcgtgagcctgtgtttgtgtgtgtatgtttttagatacgtacgtgtcaacacatacatgcataggtatcctgtgtgtccacatgcatcattattatataaatagaaacttctgaacaccctcctaagtcactacaggatgccagcgcttcctattcttgggtagacagagccacctcagcatcctgatggatgatacaagaaattgttacttcctagtatggaagtgtcttaaggacacgtctccatgatattttggtgaaccaaaagtgctttatcctcaacaaaatgttcctctgttcccagttaaagtaatattccctgcttccaagtaagcaagactgttcactaaagaaggaactttttagaaaactaatctcctttatcatccaattttagttctgcatgttccgaggtagccagtcaacagaaggaagcaaaagattcttaaagatccaccgactgtcatgttccacaagcaagatctcagggtagggaaaaaccagtgaatgaggttacacagcaggaaaagaaccggtttcctcccagactatgtcttacacgctgagttatgccacaagcgttatcatcaaaactatttaaggctggagtcttagacctctaaaaatagacaggaagggctgccctgagcagtgacacctttgtgtttttatgtctccgccagcgccgtaacagagcctgtttctttcccgttgagtattacttaaattcaggcttaaatgtgctatgaagggcatttttcatagtatcccatttgccttgtaagttatataaagtgcatgattataattttttccttagaaatgcaatatttagtttcatccagctcttatgaataataacctcatagattcctgatcttaatttaaataggtgctttaattttacagctttcaaaagtagttactgtaaattttactcctgttaatgctggattggtttaaaggatttataagggctgtgtttgctctttacaaggcaagatgccatacagtgttcaataatagaaggtcttgatacaaccgacattttaaatattctttatacatgaggactgcatctttttcactgaccctatgatttcactgtgagtagggtgaactggactgcatattagtttatttgttgccataatcacatttttgaaaaataaatttaagagttttttcttaa

SEQ ID NO: 169344 - DNA, 1232 bp, Homo sapiens
  Payload ID: 13336
  Gene Symbol: PROSER2
  Gene Name: proline and serine rich 2
  ENST ID: ENST00000379200
  CDS Start-End: 44-763
ggagcaccccagactcctgcgctctgttcccacgcccctcgttatggcgcagaagatttccgagaggatggcggggaacgaagccctctcgcccacctccccgttcagggagggccggcccggggagtggaggacacctgccgcccgggggccccgcagtggagaccctggcccggggcccagccacccggcgcagcccaaggcaccccgcttccccagcaacatcatcgtcaccaacggcgcggcccgggagccccgcaggaccctgtccagggcggccgtcagcgtgcaggagcgcagggcgcaggtgttggccaccatccacggccacgccggcgccttccccgccgcgggggacgccggcgagggggccccagggggcggctcctccccggagcgggtggcgcgtggccggggcctgccgggccccgctgagagtctccgggcagggggtcaggctccgcggggcccggcgctggccaacggcttcccaagtgcgcacgaggccctgaagagcgcacccagctccttcgcgcccgctgggaagtccctctgcttccgccctggcccggccctgcccagcacgcgggcccgtcagagcttccccgggccccggcagcccaacggcgcccaggactggcgccgcgcagactccctgccccggccccagggcatcaccgtgcagttcgcgggccgcggctcctcggaggaggcgcgcagggaggccctgcggaagctggggctgctcagggagagttcgtgagggccgcgcgggctccagtccaccccgtttctccccaccctgaagagagggtgaaagagtcgctgcacccaggagctgtttggtctaaaatggaagtgacagcgggagcccctgccctctgtggcacatcggagtctagaggtgcctggctggggcctcctggctgagcacgcaccgcaagctccagccaccggcacagagaactcttccctaaaggaatctggccgagggcttgtctcccttttcccaagaactgagagagagagaataacctgttagacccataggtttccgtgatgtgtaaatgccatcttttgggggttgggaggagtaggactggtctgattatcattcttgagtctcatctaccctcttctcgaagtacatgacatgaaagttcagatcccttccactcaggattctcgccgccttttctaagaaaataataaaaaaaaatgcttgtttcatt

SEQ ID NO: 169345 - DNA, 476 bp, Homo sapiens
  Payload ID: 13336
  Gene Symbol: PROSER2
  Gene Name: proline and serine rich 2
  ENST ID: ENST00000444604
  CDS Start-End: 222-476
ccaatcagatgtctggtcaagattgttttcaggtgagattttactttaggaaaatctggttttggtatctttttcagtgatggcgaaccgacactaggaaacttcttccctcgaggcctgttaaaacccagcctctctaggagtgagctgttgccgcagaatgggctgctggctcctgccctgcttcctgtgatcgagccggccctgaggactctgtggagatgcctgtaacccaccggaaatcagacgcatctgacatgaactcagacacgtcccccagctgcaggctccgagccttcagcagaggcggcagcctggagagtcgaagcagcagctctcgctccagaagcttcactttggatgatgagagcctgaagtacctcacccatgaggaaaaggatgtgctcctgttttttgaagagacgattgactccctagacgaggactttgaggagccagtgctgtgcgatggagga

SEQ ID NO: 169346 - DNA, 1646 bp, Homo sapiens
  Payload ID: 13336
  Gene Symbol: PROSER2
  Gene Name: proline and serine rich 2
  Uniprot ID: Q86WR7
  ENST ID: ENST00000622831
  CDS Start-End: 155-1180
gggcggcggcgtgagggctccgggtcgctggcggcgtggacacctgagtcccggggtaggggtctcccgcgaggagtgagctgttgccgcagaatgggctgctggctcctgccctgcttcctgtgatcgagccggccctgaggactctgtggagatgcctgtaacccaccggaaatcagacgcatctgacatgaactcagacacgtcccccagctgcaggctccgagccttcagcagaggcggcagcctggagagtcgaagcagcagctctcgctccagaagcttcactttggatgatgagagcctgaagtacctcacccatgaggaaaaggatgtgctcctgttttttgaagagacgattgactccctagacgaggactttgaggagccagtgctgtgcgatggaggagtgtgctgcctctgctccccgtctctggaggagagcacctccagtccctccgagcctgaagatgtcatcgacttagtgcagccagcacctggcgccggggaagccgagggccttccagaggggacccaggcagcagggcctgcacctgctgggaaggagcacaggaaacaagatgctgagactcctccacctccagaccccccggctcccgagacccttcttgcgccaccacccctgcctagcacccccgatccccccaggagggagctgcgcgccccctccccgccggtggagcaccccagactcctgcgctctgttcccacgcccctcgttatggcgcagaagatttccgagaggatggcggggaacgaagccctctcgcccacctccccgttcagggagggccggcccggggagtggaggacacctgccgcccgggggccccgcagtggagaccctggcccggggcccagccacccggcgctggccaacggcttcccaagtgcgcacgaggccctgaagagcgcacccagctccttcgcgcccgctgggaagtccctctgcttccgccctggcccggccctgcccagcacgcgggcccgtcagagcttccccgggccccggcagcccaacggcgcccaggactggcgccgcgcagactccctgccccggccccagggcatcaccgtgcagttcgcgggccgcggctcctcggaggaggcgcgcagggaggccctgcggaagctggggctgctcagggagagttcgtgagggccgcgcgggctccagtccaccccgtttctccccaccctgaagagagggtgaaagagtcgctgcacccaggagctgtttggtctaaaatggaagtgacagcgggagcccctgccctctgtggcacatcggagtctagaggtgcctggctggggcctcctggctgagcacgcaccgcaagctccagccaccggcacagagaactcttccctaaaggaatctggccgagggcttgtctcccttttcccaagaactgagagagagagaataacctgttagacccataggtttccgtgatgtgtaaatgccatcttttgggggttgggaggagtaggactggtctgattatcattcttgagtctcatctaccctcttctcgaagtacatgacatgaaagttcagatcccttccactcaggattctcgccgccttttctaagaaaataataaaaaaaaatgcttgtttc

SEQ ID NO: 169347 - DNA, 826 bp, Homo sapiens
  Payload ID: 13337
  Gene Symbol: PROSER3
  Gene Name: proline and serine rich 3
  ENST ID: ENST00000301165
  CDS Start-End: 61-826
gcgcgcggggcctgttgggtgaaggagcagagcggccggaagcgcggagggagccgcgggatggaccgcagcctgccagttttctccattcaagatagtccctttggagatgcgcccctgggtcgaagccactactggccatcccagagccagacctggtgtcccaagaccctgagcccatccaggtctcagagatccaggctcccacaagctcccaaggctctagccacaggtcccaactcccctgagctgtttgaggagtcctggccatccagttcagggaccccctccctgcccagcaccactgagggacagatgtgggcctccccagcacccaccctgattgacagcggggactccgtggtggccaagtatataaacaggttccgccaggctcagcccaccagtcgagaggagcgccagcctgcaggcccaaccccagctgacttttggtggctgcagtctgactctccagaccccagcagtcaaagtgcagcaggagccaacaaaccagaaggaagaccccatacagctgtccctactgcggtcaacgtgaccagtgcatcccatgctgtggctccccttcaggaaataaagcagaacctccacacatggaactcatccctgctggacctggagacgctgagcctacagagcagagctgccaggctgctcaaacgcagcaaagcctccatctcctcctcctcctccctcagccccagcgatgccagcacttcctcattccccaccagctctgatggcctctctcccttctcggagaccttcatccctgactccagcaagggccttggccccagggcacccg

SEQ ID NO: 169348 - DNA, 2149 bp, Homo sapiens
  Payload ID: 13337
  Gene Symbol: PROSER3
  Gene Name: proline and serine rich 3
  Uniprot ID: Q2NL68
  ENST ID: ENST00000396908
  CDS Start-End: 64-1506
gatgcgcgcggggcctgttgggtgaaggagcagagcggccggaagcgcggagggagccgcgggatggaccgcagcctgccagttttctccattcaagatagtccctttggagatgcgcccctgggtcgaagccactactggccatcccagagccagacctggtgtcccaagaccctgagcccatccaggtctcagagatccaggctcccacaagctcccaaggctctagccacaggtcccaactcccctgagctgtttgaggagtcctggccatccagttcagggaccccctccctgcccagcaccactgagggacagatgtgggcctccccagcacccaccctgattgacagcggggactccgtggtggccaagtatataaacaggttccgccaggctcagcccaccagtcgagaggagcgccagcctgcaggcccaaccccagctgacttttggtggctgcagtctgactctccagaccccagcagtcaaagtgcagcagcaggagccaacaaaccagaaggaagaccccatacagctgtccctactgcggtcaacgtgaccagtgcatcccatgctgtggctccccttcaggaaataaagcagaacctccacacatggaactcatccctgctggacctggagacgctgagcctacagagcagagctgccaggctgctcaaacgcagcaaagcctccatctcctcctcctcctccctcagccccagcgatgccagcacttcctcattccccaccagctctgatggcctctctcccttctcggagaccttcatccctgactccagcaagggccttggccccagggcacccgcatccccggcaccagcccaggcccagacccccacccctgctccagccccagcctcctcccaagcaccccttcggccagaggatgacattctgtaccagtggcggcagcggcggaagcttgaacaggctcagggaagcaagggtgacagagcttgggtgccgcctctgacccctgccctccgcacgttggccgagtctctgaaagccaaggccttgccgcccgcagcggggtcagtgatacggaagagcgaagccactccttcccctggagcctgcctgcagcccgaggtcccactctctccagctgagcaggcaaccacagtcaaggcctcgccgccagccttccaggtggggtctccggaggccctggccccgcccccgcccgctgctgaccacgccccctcggaggccctgcttgcccaggccgccctgctgctgcaggctgcagaagactccgacggcagcgagttccaggacgatcccgtgctgcaggtgctaagagcccatagggcagagctgagtcggcagaaaagggaagcggatgcccgattatcgttcctgttggaccaggctgaagacctgggatcttggtcccctccagccgggtcgccccctaggtccccaaggaggctgctaagaagggaaggagattccctggaggccagaagactttgaattgtacagattctattttacccagtgaggctctttttttttttttcatacagttactggttatctgtgagaaaggggttgtttggaaaggccaaggggtcatgccaatttaaggaaatgccccccatcctccgctgccccatggctctgccctgccccccaccccttcctgaccacggaaacaagatctcctttctggttatatcttccttggggcagagggagtttcagacaagacttctggcaagactgggacccaccttatctggcttcactcaggagccctggctcaaatggaccaaaggactgccctccacggaggaagctactagggtcatcagagtgttggatgatggtcaggctatagcccacacatgcttgagcagcagcagcatctggtgcagctgacccctccctccttgaagcactttctctccctgcttccagcccttctctctgcacctctctggtcaggcctagtcactagcccagcatgtcaactttggcatgacccagggccatggcgttgacatctctatctgcacccacccataggtgctcttgtctagcttaatgactctaaaccccgtctctattctgataatcctcaaatttctgtctgtaacctagacctggccacgaa

SEQ ID NO: 169349 - DNA, 579 bp, Homo sapiens
  Payload ID: 13337
  Gene Symbol: PROSER3
  Gene Name: proline and serine rich 3
  ENST ID: ENST00000444637
  CDS Start-End: 321-579
aagcgacggagatgcgcgcggggcctgttgggtgaaggagcagagcggccggaagcgcggagggagccgcgggatggaccgcagttttctccattcaagatagtccctttggagatgcgcccctgggtcgaagccactactggccatcccagagccagacctggtgtcccaagaccctgagcccatccaggtctcagagatccaggctcccacaagctcccaaggctctagccacaggtcccaactcccctgagctgtttgaggagtcctggccatccagttcagggaccccctccctgcccagcaccactgagggacagatgtgggcctccccagcacccaccctgattgacagcggggactccgtggtggccaagtatataaacaggttccgccaggctcagcccaccagtcgagaggagcgccagcctgcaggcccaaccccagctgacttttggtggctgcagtctgactctccagaccccagcagtcaaagtgcagcaggagccaacaaaccagaaggaagaccccatacagctgtccctactgcggtcaacgtgaccagtgcatcccatgctg

SEQ ID NO: 169350 - DNA, 387 bp, Homo sapiens
  Payload ID: 13337
  Gene Symbol: PROSER3
  Gene Name: proline and serine rich 3
  ENST ID: ENST00000539771
  CDS Start-End: 1-158
ccattcaagatagtccctttggagatgcgcccctgggtcgaagccactactggccatcccagagccagacctggtgtcccaaggtatataaacaggttccgccaggctcagcccaccagtcgagaggagcgccagcctgcaggcccaaccccagctgacttttggtggctgcagtctgactctccagaccccagcagtcaaagtgcagcaggagccaacaaaccagaaggaagaccccatacagctgtccctactgcggtcaacgtgaccagtgcatcccatgctgtggctccccttcaggaaataaagcaggtgacatccccattcactccctcccttgggtgcctgaactgacaacaccagccctaggacagaattagaagatca

SEQ ID NO: 169351 - DNA, 772 bp, Homo sapiens
  Payload ID: 13337
  Gene Symbol: PROSER3
  Gene Name: proline and serine rich 3
  Uniprot ID: Q2NL68
  ENST ID: ENST00000537459
  CDS Start-End: 23-607
gaagcgcggagggagccgcgggatggaccgcagcctgccagttttctccattcaagatagtccctttggagatgcgcccctgggtcgaagccactactggccatcccagagccagacctggtgtcccaagaccctgagcccatccaggtctcagagatccaggctcccacaagctcccaaggctctagccacaggtcccaactcccctgagctgtttgaggagtcctggccatccagttcagggaccccctccctgcccagcaccactgagggacagatgtgggcctccccagcacccaccctgattgacagcggggactccgtggtggccaagtatataaacaggttccgccaggctcagcccaccagtcgagaggagcgccagcctgcaggcccaaccccagctgacttttggtggctgcagtctgactctccagaccccagcagtcaaagtgcagcagcaggagccaacaaaccagaaggaagaccccatacagctgtccctactgcggtcaacgtgaccagtgcatcccatgctgtggctccccttcaggaaataaagcaggtgacatccccattcactccctcccttgggtgcctgaactgacaacaccagccctaggacagaattagaagatcaggagcagtggctcacacctgtaatcccagcactttgggaggccaaggtgagaggactgcttgaggccaggagttcaagaccagcttgggtgacatggtgagattctgcctctactaaaaaaaaaaaaaaaaa

SEQ ID NO: 169352 - DNA, 612 bp, Homo sapiens
  Payload ID: 13337
  Gene Symbol: PROSER3
  Gene Name: proline and serine rich 3
  ENST ID: ENST00000545674
  CDS Start-End: 332-612
ttgtctggttctgccctcctctaatgtccccctccccagggctgcggcgaaaccacgtgctgcctgaaccccactttcctcttgcagcctgccagttttctccattcaagatagtccctttggagatgcgcccctgggtcgaagccactactggccatcccagagccagacctggtgtcccaagaccctgagcccatccaggtctcagagatccaggctcccacaagctcccaaggctctagccacaggtcccaactcccctgagctgtttgaggagtcctggccatccagttcagggaccccctccctgcccagcaccactgagggacagatgtgggcctccccagcacccaccctgattgacagcggggactccgtggtggccaagtatataaacaggttccgccaggctcagcccaccagtcgagaggagcgccagcctgcaggcccaaccccagctgacttttggtggctgcagtctgactctccagaccccagcagtcaaagtgcagcaggagccaacaaaccagaaggaagaccccatacagctgtccctactgcggtcaacgtgaccagtgcatcccatgctgtggctccccttcaggaaataaa

SEQ ID NO: 169353 - DNA, 1266 bp, Homo sapiens
  Payload ID: 13337
  Gene Symbol: PROSER3
  Gene Name: proline and serine rich 3
  Uniprot ID: Q2NL68
  ENST ID: ENST00000536950
  CDS Start-End: 38-619
ggagcagagcggccggaagcgcggagggagccgcgggatggaccgcagcctgccagttttctccattcaagatagtccctttggagatgcgcccctgggtcgaagccactactggccatcccagagccagacctggtgtcccaagaccctgagcccatccaggtctcagagatccaggctcccacaagctcccaaggctctagccacaggtcccaactcccctgagctgtttgaggagtcctggccatccagttcagggaccccctccctgcccagcaccactgagggacagatgtgggcctccccagcacccaccctgattgacagcggggactccgtggtggccaagtatataaacaggttccgccaggctcagcccaccagtcgagaggagcgccagcctgcaggcccaaccccagctgacttttggtggctgcagtctgactctccagaccccagcagtcaaagtgcagcaggagccaacaaaccagaaggaagaccccatacagctgtccctactgcggtcaacgtgaccagtgcatcccatgctgtggctccccttcaggaaataaagcaggtgacatccccattcactccctcccttgggtgcctgaactgacaacaccagccctaggacagaattagaagatcaggagcagtggctcacacctgtaatcccagcactttgggaggccaaggtgagaggactgcttgaggccaggagttcaagaccagcttgggtgacatggtgagattctgcctctactaaaaaaaaaaaaaaaaagagagagagagagagaaccaggtgtggtggtatgtacctgtaatcccagctacttgagagcctgaggctggaggatggcttgagcctaggagttcaaggctgctgtgagctatgatcatgccactgcactccagcctgggcagtagagcaagaccctgtctctatttaaaaaaaaaaaaaaaaaaaaagcctgggcaccgtggctcatgcctataatcccagcactttggtaggctgaggcaggcagatcacgaggtcaggagttcaggaccagcctgaccaacatggtgaaaccccgtctctactaaaaatacaaaaattagccgggcgtggtggtacacacctgtaatcccagctactcaggagcctgaggcaggagaattgcttgaacccgggagacggaggttgcagtgagccaagatagcgccagcgcactccagcctggcgacagcaagactccatctcaaaaaaaaaaaaaaaag

SEQ ID NO: 169354 - DNA, 650 bp, Homo sapiens
  Payload ID: 13337
  Gene Symbol: PROSER3
  Gene Name: proline and serine rich 3
  ENST ID: ENST00000421853
  CDS Start-End: 19-303
cgcggagggagccgcgggatggaccgcaggtatataaacaggttccgccaggctcagcccaccagtcgagaggagcgccagcctgcaggcccaaccccagctgacttttggtggctgcagtctgactctccagaccccagcagtcaaagtgcagcagcaggagccaacaaaccagaaggaagaccccatacagctgtccctactgcggtcaacgtgaccagtgcatcccatgctgtggctccccttcaggaaataaagcaggtgacatccccattcactccctcccttgggtgcctgaactgacaacaccagccctaggacagaattagaagatcaggagcagtggctcacacctgtaatcccagcactttgggaggccaaggtgagaggactgcttgaggccaggagttcaagaccagcttgggtgacatggtgagattctgcctctactaaaaaaaaaaaaaaaaagagagagagagagagaaccaggtgtggtggtatgtacctgtaatcccagctacttgagagcctgaggctggaggatggcttgagcctaggagttcaaggctgctgtgagctatgatcatgccactgcactccagcctgggcagtagagcaagaccctgtctctatttaaaaaaaaaaaaaaa

SEQ ID NO: 169355 - DNA, 732 bp, Homo sapiens
  Payload ID: 13337
  Gene Symbol: PROSER3
  Gene Name: proline and serine rich 3
  ENST ID: ENST00000601095
  CDS Start-End: 1-503
cccagagccagacctggtgtcccaagaccctgagcccatccaggtctcagagatccaggctcccacaagctcccaaggctctagccacaggtcccaactcccctgagctgtttgaggagtcctggccatccagttcagggaccccctccctgcccagcaccactgagggacagatgtgggcctccccagcacccaccctgattgacagcggggactccgtggtggccaagtatataaacaggttccgccaggctcagcccaccagtcgagaggagcgccagcctgcaggcccaaccccagctgacttttggtggctgcagtctgactctccagaccccagcagtcaaagtgcagcagcaggagccaacaaaccagaaggaagaccccatacagctgtccctactgcggtcaacgtgaccagtgcatcccatgctgtggctccccttcaggaaataaagcaggtgacatccccattcactccctcccttgggtgcctgaactgacaacaccagccctaggacagaattagaagatcaggagcagtggctcacacctgtaatcccagcactttgggaggccaagaacctccacacatggaactcatccctgctggacctggagacgctgagcctacagagcagagctgccaggctgctcaaacgcagcaaagcctccatctcctcctcctcctccctcagccccagcgatgccagcacttcctcattccccacc

SEQ ID NO: 169356 - DNA, 461 bp, Homo sapiens
  Payload ID: 13337
  Gene Symbol: PROSER3
  Gene Name: proline and serine rich 3
  ENST ID: ENST00000542134
  CDS Start-End: 1-273
tggccatccagttcagggaccccctccctgcccagcaccactgagggacagatgtgggcctccccagcacccaccctgattgacagcggggactccgtggtggccaagtatataaacaggttccgccaggctcagcccaccagtcgagaggagcgccagcctgcaggcccaaccccagctgacttttggtggctgcagtctgactctccagaccccagcagtcaaagtgcagcaggtacctctttcagtgccatccactactcccacccctaaacctttgctgatcaatgcccccagcagccactcctcctggccctcatacctcaactggggcttctcagcaggagccaacaaaccagaaggaagaccccatacagctgtccctactgcggtcaacgtgaccagtgcatcccatgctgtggctccccttcaggaaataaagcaggtgacatccccattca

SEQ ID NO: 169357 - DNA, 3606 bp, Homo sapiens
  Payload ID: 13337
  Gene Symbol: PROSER3
  Gene Name: proline and serine rich 3
  ENST ID: ENST00000620918
  CDS Start-End: 33-1007
agagcggccggaagcgcggagggagccgcgggatggaccgcagcctgccagttttctccattcaagatagtccctttggagatgcgcccctgggtcgaagccactactggccatcccagagccagacctggtgtcccaagaccctgagcccatccaggtctcagagatccaggctcccacaagctcccaaggctctagccacaggtcccaactcccctgagctgtttgaggagtcctggccatccagttcagggaccccctccctgcccagcaccactgagggacagatgtgggcctccccagcacccaccctgattgacagcggggactccgtggtggccaagtatataaacaggttccgccaggctcagcccaccagtcgagaggagcgccagcctgcaggcccaaccccagctgacttttggtggctgcagtctgactctccagaccccagcagtcaaagtgcagcaggagccaacaaaccagaaggaagaccccatacagctgtccctactgcggtcaacgtgaccagtgcatcccatgctgtggctccccttcaggaaataaagcagaacctccacacatggaactcatccctgctggacctggagacgctgagcctacagagcagagctgccaggctgctcaaacgcagccccagcgatgccagcacttcctcattccccaccagctctgatggcctctctcccttctcggagaccttcatccctgactccagcaagggccttggccccagggcacccgcatccccggcaccagcccaggcccagacccccacccctgctccagccccagcctcctcccaagcaccccttcggccagaggatgacattctgtaccagtggcggcagcggcggaagcttgaacaggctcagggaagcaagggtgacagagcttgggtgccgcctctgacccctgccctccgcacgttggtgagccgagggagggaggagcctggggggagctggaggaggggctgggtctgagggggactgaggaccctccaccctctctctctctgtctcagatctctcttatctgtctacagacctctcctgctccagtggagaccctcagttctctggggacccagcctaaccatgtcccactgtggagcagtgtggcccagcctggtccaccagaggccttctatgtggagaggcctccttttccctcagtgtcctctccacacatcttttgggcccccagctcccacgggttcttctgggccccacagtctgggccttgggtatcccttggggctgttcctcccacgcagcaggcctccaccctagcacatctgggctctaccctcgcgcccccggcttccctggcctccaccctcgaacccccggcctccaccccagctcccctggcctccacccttgcacccccagcctccaccccggctcccctggcctgtacccctgcacctccagcctccaccctcgcatccccagctgtcccccagggcctgcccatccctgacccaagcagctgtgcccagcctaagagcctggggcccaagtctcggaggagcagagcccctcgcccagaggctgccgagcaagtccctgcagctggccagggacctggccctcagctcaggggtgtcctgggccaggtagtggcagctcggctgttccctgacagcctggaggacacgcctcctcacttcgagggcccccctccacccaaggctggatctccgaaagtccaggccacacaaccccaaaccaaggtcactccccctccatctgaatcccagtgtcgggccaaggccgagtctctgaaagccaaggccttgccgcccgcagcggggtcagtgatacggaagagcgaagccactccttcccctggagcctgcctgcagcccgaggtcccactctctccagctgagcaggcaaccacagtcaaggcctcgccgccagccttccaggtggggtctccggaggccctggccccgcccccgcccgctgctgaccacgccccctcggaggccctgcttgcccaggccgccctgctgctgcaggctgcagaagactccgacggcagcgagttccaggacgatcccgtgctgcaggtgctaagagcccatagggcagagctgagtcggcagaaaagggaagcggatgcccgattatcgttcctgttggaccaggctgaagacctgggatcttggtcccctccagccgggtcgccccctaggtccccaaggaggctgctaagaagggaaggagattccctggaggccagaagactttgaattgtacagattctattttacccagtgaggctctttttttttttttcatacagttactggttatctgtgagaaaggggttgtttggaaaggccaaggggtcatgccaatttaaggaaatgccccccatcctccgctgccccatggctctgccctgccccccaccccttcctgaccacggaaacaagatctcctttctggttatatcttccttggggcagagggagtttcagacaagacttctggcaagactgggacccaccttatctggcttcactcaggagccctggctcaaatggaccaaaggactgccctccacggaggaagctactagggtcatcagagtgttggatgatggtcaggctatagcccacacatgcttgagcagcagcagcatctggtgcagctgacccctccctccttgaagcactttctctccctgcttccagcccttctctctgcacctctctggtcaggcctagtcactagcccagcatgtcaactttggcatgacccagggccatggcgttgacatctctatctgcacccacccataggtgctcttgtctagcttaatgactctaaaccccgtctctattctgataatcctcaaatttctgtctgtaacctagacctggccacgaaaccttgggctcctacctcattaccatttctacccaagggtttaaaagacatctcaaattccataggtcctaaatggagtttccaatctttccccctaggcgtgcctctccccagcttctttttttttttttttttggatggagtctagctctgtcacccaggctggagtgccatagtgtgatctcggctcactgcaagcttcgcctcccgggttcacgccattctcctgcctcagcctcccgagtagctgggactacaggtgcccgccaccacggtcggctaattttttttgtatttttagtagagacggggtttcactgtgttagccaggatggtcttggtctcctgacctcgtgatccacccgcctcggcctcccaaagtgctgggattgcaggcgtgagccaccgtgctgggccccccctccccaactttcttcggctctgtcctttgccgctcagaccaaaaaccttagagttgtctttgacttctgtctttcccttccacccacagttaaccaggaaatcctgccatctccgcctttattttattttattttttgagatggagtttcacccttgttgcccaggctgtagtacaatggcatgatctcggctcacggcaacctccacctcccgggttcaagcgattctcctgcctcagccttctgagtagctg

SEQ ID NO: 169358 - DNA, 1985 bp, Homo sapiens
  Payload ID: 13338
  Gene Symbol: PRODH
  Gene Name: proline dehydrogenase (oxidase) 1
  ENST ID: ENST00000334029
  CDS Start-End: 114-1592
gctgaagtgccagggtgcttgtgaagtctaagcccttgtctggcatttgtcaggaatataggctgctgtatgtttccaggaaacttctaggacagaggctattcaacaagctcatgaagatgaccttctatgggcattttgtagccggggaggaccaggagtccatccagcccctgcttcggcactacagggccttcggtgtcagcgccatcctggactatggagtggaggaggacctgagccccgaggaggcagagcacaaggagatggagtcctgcacctcagctgcggagagggatggcagtggcacgaataagcgggacaagcaataccaggcccactgggccttcggggaccgcaggaatggtgtcatcagtgcccgcacctacttctacgccaatgaggccaagtgcgacagccacatggagacattcttgcgctgcatcgaagcctcaggtagagtcagcgatgacggcttcatagccattaagctcacagcactggggagaccccagtttctgctgcagttctcagaggtgctggccaagtggaggtgcttctttcaccaaatggctgtggagcaagggcaggcgggcctggctgccatggacaccaagctggaggtggcggtgctgcaggaaagtgtcgcaaagttgggcatcgcatccagggctgagattgaggactggttcacggcagagaccctgggagtgtctggcaccatggacctgctggactggagcagcctcatcgacagcaggaccaagctgtccaagcacttggtagtccccaacgcacagacaggacagctggagcccctgctgtcccggttcactgaggaggaggagctacagatgaccaggatgctacagcggatggatgtcctggccaagaaagccacagagatgggcgtgcggctgatggtggatgccgagcagacctacttccagccggccatcagccgcctgacgctggagatgcagcggaagttcaatgtggagaagccgctcatcttcaacacataccagtgctacctcaaggatgcctatgacaatgtgaccctggacgtggagctggctcgccgtgagggctggtgttttggggccaagctggtgcggggcgcatacctggcccaggagcgagcccgtgcggcagagatcggctatgaggaccccatcaaccccacgtacgaggccaccaacgccatgtaccacaggtgcctggactacgtgttggaggagctgaagcacaacgccaaggccaaggtgatggtggcctcccacaatgaggacacagtgcgctttgcactgcgcaggatggaggagctgggcctgcatcctgctgaccaccgggtgtactttggacagctgctaggcatgtgtgaccagatcagcttcccgctgggccaggccggctaccccgtgtacaagtacgtgccctatggccccgtgatggaggtgctgccctacttgtcccgccgtgccctggagaacagcagcctcatgaagggcacccatcgggagcggcagctgctgtggctggagctcttgaggcggctccgaactggcaacctcttccatcgccctgcctagcacccgccagcacacccttagcctccagcaccccccgcccccgcccaggccatcaccacagctgcagccaaccccatcctcacacagattcaccttttttcaccccacacttgcagagctgctggaggtgaggtcaggtgcctcccagccctgcccagagtatgggcactcaggtgtgggccgaacctgatacctgcctgggacagccactggaaacttttgggaactctcctcgaatgtgtgggcccaaggcccccacctctgtgacccccatgtccttggacctagaggattgtccaccttctgccaaggccagcccacacagcccgagccccttggggagcagtggccgggctggggaggcctgcctggtcaataaaccactgttcctgc

SEQ ID NO: 169359 - DNA, 2462 bp, Homo sapiens
  Payload ID: 13338
  Gene Symbol: PRODH
  Gene Name: proline dehydrogenase (oxidase) 1
  Uniprot ID: O43272
  ENST ID: ENST00000357068
  CDS Start-End: 267-2069
ggtctcactctgttgctgtcttcacggagagcaggagcagaggctttgagaagccagtgggccttggcctcagccctgccggcagagggtccccaccatgcagctgaagtgccagggtgcttgtgaagtctaagcccttgtctggcatttgtcaggaatatagggtgaggcctctgggaccgagcggggcggggcggggcggggcggggcggggcgggaccaacagcgcacacttaagcggcccgggcgggtaccgccgtcccgccatggctctgaggcgcgccctgcccgcgctgcgcccctgcattccccgcttcgtcccgctgtccacggcgccggcctcccgcgagcagcccgcagcgggcccagcggccgtgccaggaggtgggtcggccacggcagtgcggccgccggtgcccgccgtggacttcggcaacgcgcaggaggcgtaccgcagccggcgaacctgggagctggcgcggagcctgctggtgctgcgcttgtgcgcctggcccgcgctgctggcgcgccacgagcagctgctgtatgtttccaggaaacttctaggacagaggctattcaacaagctcatgaagatgaccttctatgggcattttgtagccggggaggaccaggagtccatccagcccctgcttcggcactacagggccttcggtgtcagcgccatcctggactatggagtggaggaggacctgagccccgaggaggcagagcacaaggagatggagtcctgcacctcagctgcggagagggatggcagtggcacgaataagcgggacaagcaataccaggcccactgggccttcggggaccgcaggaatggtgtcatcagtgcccgcacctacttctacgccaatgaggccaagtgcgacagccacatggagacattcttgcgctgcatcgaagcctcaggtagagtcagcgatgacggcttcatagccattaagctcacagcactggggagaccccagtttctgctgcagttctcagaggtgctggccaagtggaggtgcttctttcaccaaatggctgtggagcaagggcaggcgggcctggctgccatggacaccaagctggaggtggcggtgctgcaggaaagtgtcgcaaagttgggcatcgcatccagggctgagattgaggactggttcacggcagagaccctgggagtgtctggcaccatggacctgctggactggagcagcctcatcgacagcaggaccaagctgtccaagcacttggtagtccccaacgcacagacaggacagctggagcccctgctgtcccggttcactgaggaggaggagctacagatgaccaggatgctacagcggatggatgtcctggccaagaaagccacagagatgggcgtgcggctgatggtggatgccgagcagacctacttccagccggccatcagccgcctgacgctggagatgcagcggaagttcaatgtggagaagccgctcatcttcaacacataccagtgctacctcaaggatgcctatgacaatgtgaccctggacgtggagctggctcgccgtgagggctggtgttttggggccaagctggtgcggggcgcatacctggcccaggagcgagcccgtgcggcagagatcggctatgaggaccccatcaaccccacgtacgaggccaccaacgccatgtaccacaggtgcctggactacgtgttggaggagctgaagcacaacgccaaggccaaggtgatggtggcctcccacaatgaggacacagtgcgctttgcactgcgcaggatggaggagctgggcctgcatcctgctgaccaccgggtgtactttggacagctgctaggcatgtgtgaccagatcagcttcccgctgggccaggccggctaccccgtgtacaagtacgtgccctatggccccgtgatggaggtgctgccctacttgtcccgccgtgccctggagaacagcagcctcatgaagggcacccatcgggagcggcagctgctgtggctggagctcttgaggcggctccgaactggcaacctcttccatcgccctgcctagcacccgccagcacacccttagcctccagcaccccccgcccccgcccaggccatcaccacagctgcagccaaccccatcctcacacagattcaccttttttcaccccacacttgcagagctgctggaggtgaggtcaggtgcctcccagccctgcccagagtatgggcactcaggtgtgggccgaacctgatacctgcctgggacagccactggaaacttttgggaactctcctcgaatgtgtgggcccaaggcccccacctctgtgacccccatgtccttggacctagaggattgtccaccttctgccaaggccagcccacacagcccgagccccttggggagcagtggccgggctggggaggcctgcctggtcaataaaccactgttcctgc

SEQ ID NO: 169360 - DNA, 594 bp, Homo sapiens
  Payload ID: 13338
  Gene Symbol: PRODH
  Gene Name: proline dehydrogenase (oxidase) 1
  ENST ID: ENST00000450579
  CDS Start-End: 190-594
gggccagtcgtgcagaagccatgcccaccttgtggccgggatggagtggggactaggaaggcaccagccggggaggaccaggagtccatccagcccctgcttcggcactacagggccttcggtgtcagcgccatcctggactatggagtggaggaggacctgagccccgaggaggcagagcacaaggagatggagtcctgcacctcagctgcggagagggatggcagtggcacgaataagcgggacaagcaataccaggcccactgggccttcggggaccgcaggaatggtgtcatcagtgcccgcacctacttctacgccaatgaggccaagtgcgacagccacatggagacattcttgcgctgcatcgaagcctcaggtagagtcagcgatgacggcttcatagccattaagctcacagcactggggagaccccagtttctgctgcagttctcagaggtgctggccaagtggaggtgcttctttcaccaaatggctgtggagcaagggcaggcgggcctggctgccatggacaccaagctggaggtggcggtgctgcaggaaagtgtcgcaaagttgggcatcgcatccagg

SEQ ID NO: 169361 - DNA, 553 bp, Homo sapiens
  Payload ID: 13338
  Gene Symbol: PRODH
  Gene Name: proline dehydrogenase (oxidase) 1
  ENST ID: ENST00000438924
  CDS Start-End: 1-553
cggtgcccgccgtggacttcggcaacgcgcaggaggcgtaccgcagccggcgaacctgggagctggcgcggagcctgctggtgctgcgcttgtgcgcctggcccgcgctgctggcgcgccacgagcaggtcctgcacctcagctgcggagagggatggcagtggcacgaataagcgggacaagcaataccaggcccactgggccttcggggaccgcaggaatggtgtcatcagtgcccgcacctacttctacgccaatgaggccaagtgcgacagccacatggagacattcttgcgctgcatcgaagcctcagctgcagttctcagaggtgctggccaagtggaggtgcttctttcaccaaatggctgtggagcaagggcaggcgggcctggctgccatggacaccaagctggaggtggcggtgctgcaggaaagtgtcgcaaagttgggcatcgcatccagggctgagattgaggactggttcacggcagagaccctgggagtgtctggcaccatggacctgctggactggagcagcctcatcgacagcagg

SEQ ID NO: 169362 - DNA, 2034 bp, Homo sapiens
  Payload ID: 13338
  Gene Symbol: PRODH
  Gene Name: proline dehydrogenase (oxidase) 1
  ENST ID: ENST00000420436
  CDS Start-End: 162-1640
cgtcccgccatggctctgaggcgcgccctgcccgcgctgcgcccctgcattccccgcttcgtcccgctgtccacggcgccggcctcccgcgagcagcccgcagcgggcccagcggccgtgccaggaggaaacttctaggacagaggctattcaacaagctcatgaagatgaccttctatgggcattttgtagccggggaggaccaggagtccatccagcccctgcttcggcactacagggccttcggtgtcagcgccatcctggactatggagtggaggaggacctgagccccgaggaggcagagcacaaggagatggagtcctgcacctcagctgcggagagggatggcagtggcacgaataagcgggacaagcaataccaggcccactgggccttcggggaccgcaggaatggtgtcatcagtgcccgcacctacttctacgccaatgaggccaagtgcgacagccacatggagacattcttgcgctgcatcgaagcctcaggtagagtcagcgatgacggcttcatagccattaagctcacagcactggggagaccccagtttctgctgcagttctcagaggtgctggccaagtggaggtgcttctttcaccaaatggctgtggagcaagggcaggcgggcctggctgccatggacaccaagctggaggtggcggtgctgcaggaaagtgtcgcaaagttgggcatcgcatccagggctgagattgaggactggttcacggcagagaccctgggagtgtctggcaccatggacctgctggactggagcagcctcatcgacagcaggaccaagctgtccaagcacttggtagtccccaacgcacagacaggacagctggagcccctgctgtcccggttcactgaggaggaggagctacagatgaccaggatgctacagcggatggatgtcctggccaagaaagccacagagatgggcgtgcggctgatggtggatgccgagcagacctacttccagccggccatcagccgcctgacgctggagatgcagcggaagttcaatgtggagaagccgctcatcttcaacacataccagtgctacctcaaggatgcctatgacaatgtgaccctggacgtggagctggctcgccgtgagggctggtgttttggggccaagctggtgcggggcgcatacctggcccaggagcgagcccgtgcggcagagatcggctatgaggaccccatcaaccccacgtacgaggccaccaacgccatgtaccacaggtgcctggactacgtgttggaggagctgaagcacaacgccaaggccaaggtgatggtggcctcccacaatgaggacacagtgcgctttgcactgcgcaggatggaggagctgggcctgcatcctgctgaccaccgggtgtactttggacagctgctaggcatgtgtgaccagatcagcttcccgctgggccaggccggctaccccgtgtacaagtacgtgccctatggccccgtgatggaggtgctgccctacttgtcccgccgtgccctggagaacagcagcctcatgaagggcacccatcgggagcggcagctgctgtggctggagctcttgaggcggctccgaactggcaacctcttccatcgccctgcctagcacccgccagcacacccttagcctccagcaccccccgcccccgcccaggccatcaccacagctgcagccaaccccatcctcacacagattcaccttttttcaccccacacttgcagagctgctggaggtgaggtcaggtgcctcccagccctgcccagagtatgggcactcaggtgtgggccgaacctgatacctgcctgggacagccactggaaacttttgggaactctcctcgaatgtgtgggcccaaggcccccacctctgtgacccccatgtccttggacctagaggattgtccaccttctgccaaggccagcccacacagcccgagccccttggggagcagtggccgggctggggaggcctgcctggtcaataaaccactgttcctgca

SEQ ID NO: 169363 - DNA, 491 bp, Homo sapiens
  Payload ID: 13338
  Gene Symbol: PRODH
  Gene Name: proline dehydrogenase (oxidase) 1
  ENST ID: ENST00000457083
  CDS Start-End: 1-491
cccgcgctgcgcccctgcattccccgcttcgtcccgctgtccacggcgccggcctcccgcgagcagcccgcagcgggcccagcggccgtgccaggaggtgggtcggccacggcagtgcggccgccggtgcccgccgtggacttcggcaacgcgcaggaggcgtaccgcagccggcgaacctgggagctggcgcggagcctgctggtgctgcgcttgtgcgcctggcccgcgctgctggcgcgccacgagcaggtcctgcacctcagctgcggagagggatggcagtggcacgaataagcgggacaagcaataccaggcccactgggccttcggggaccgcaggaatggtgtcatcagtgcccgcacctacttctacgccaatgaggccaagtgcgacagccacatggagacattcttgcgctgcatcgaagcctcagctgcagttctcagaggtgctggccaagtggaggtgcttctttcaccaaatggct

SEQ ID NO: 169364 - DNA, 2405 bp, Homo sapiens
  Payload ID: 13338
  Gene Symbol: PRODH
  Gene Name: proline dehydrogenase (oxidase) 1
  ENST ID: ENST00000610940
  CDS Start-End: 205-2007
ggtctcactctgttgctgtcttcacggagagcaggagcagaggctttgagaagccagtgggccttggcctcagccctgccggcagagggtccccaccatgcagctgaagtgccagggtgcttgtgaagtctaagcccttgtctggcatttgtcaggaatataggcgcacacttaagcggcccgggcgggtaccgccgtcccgccatggctctgaggcgcgccctgcccgcgctgcgcccctgcattccccgcttcgtcccgctgtccacggcgccggcctcccgcgagcagcccgcagcgggcccagcggccgtgccaggaggtgggtcggccacggcagtgcggccgccggtgcccgccgtggacttcggcaacgcgcaggaggcgtaccgcagccggcgaacctgggagctggcgcggagcctgctggtgctgcgcttgtgcgcctggcccgcgctgctggcgcgccacgagcagctgctgtatgtttccaggaaacttctaggacagaggctattcaacaagctcatgaagatgaccttctatgggcattttgtagccggggaggaccaggagtccatccagcccctgcttcggcactacagggccttcggtgtcagcgccatcctggactatggagtggaggaggacctgagccccgaggaggcagagcacaaggagatggagtcctgcacctcagctgcggagagggatggcagtggcacgaataagcgggacaagcaataccaggcccactgggccttcggggaccgcaggaatggtgtcatcagtgcccgcacctacttctacgccaatgaggccaagtgcgacagccacatggagacattcttgcgctgcatcgaagcctcaggtagagtcagcgatgacggcttcatagccattaagctcacagcactggggagaccccagtttctgctgcagttctcagaggtgctggccaagtggaggtgcttctttcaccaaatggctgtggagcaagggcaggcgggcctggctgccatggacaccaagctggaggtggcggtgctgcaggaaagtgtcgcaaagttgggcatcgcatccagggctgagattgaggactggttcacggcagagaccctgggagtgtctggcaccatggacctgctggactggagcagcctcatcgacagcaggaccaagctgtccaagcacttggtagtccccaacgcacagacaggacagctggagcccctgctgtcccggttcactgaggaggaggagctacagatgaccaggatgctacagcggatggatgtcctggccaagaaagccacagagatgggcgtgcggctgatggtggatgccgagcagacctacttccagccggccatcagccgcctgacgctggagatgcagcggaagttcaatgtggagaagccgctcatcttcaacacataccagtgctacctcaaggatgcctatgacaatgtgaccctggacgtggagctggctcgccgtgagggctggtgttttggggccaagctggtgcggggcgcatacctggcccaggagcgagcccgtgcggcagagatcggctatgaggaccccatcaaccccacgtacgaggccaccaacgccatgtaccacaggtgcctggactacgtgttggaggagctgaagcacaacgccaaggccaaggtgatggtggcctcccacaatgaggacacagtgcgctttgcactgcgcaggatggaggagctgggcctgcatcctgctgaccaccgggtgtactttggacagctgctaggcatgtgtgaccagatcagcttcccgctgggccaggccggctaccccgtgtacaagtacgtgccctatggccccgtgatggaggtgctgccctacttgtcccgccgtgccctggagaacagcagcctcatgaagggcacccatcgggagcggcagctgctgtggctggagctcttgaggcggctccgaactggcaacctcttccatcgccctgcctagcacccgccagcacacccttagcctccagcaccccccgcccccgcccaggccatcaccacagctgcagccaaccccatcctcacacagattcaccttttttcaccccacacttgcagagctgctggaggtgaggtcaggtgcctcccagccctgcccagagtatgggcactcaggtgtgggccgaacctgatacctgcctgggacagccactggaaacttttgggaactctcctcgaatgtgtgggcccaaggcccccacctctgtgacccccatgtccttggacctagaggattgtccaccttctgccaaggccagcccacacagcccgagccccttggggagcagtggccgggctggggaggcctgcctggtcaataaaccactgttcctgcagctg

SEQ ID NO: 169365 - DNA, 1677 bp, Homo sapiens
  Payload ID: 13339
  Gene Symbol: PRODH2
  Gene Name: proline dehydrogenase (oxidase) 2
  Uniprot ID: Q9UF12
  ENST ID: ENST00000301175
  CDS Start-End: 19-1629
tagagatggggtctcactatgtcgcccagggtagtctcaaactcctcggtcttggcctcccaaagtgttgggattacaaacgtgagaaccgtattttcaaatgtattcaataacactacagcgtttccaattttaagaggaagcaattgccacaaaatcactgcccctggtctgggcaaggggcagttggtgaacttgctgcctccagagaaccttccctggtgtggaggcagccagggacccaggatgctccggacctgttacgtgctctgttcccaagctggtcccccctccaggggctggcagtccctgagctttgatggcggggccttccaccttaagggcacaggagagctgacacgggccttgctggttctccggctgtgtgcctggcccccactcgtcactcacgggctgttgctccaggcctggtctcggcgactcctgggctcccggctctcaggcgcatttctccgagcatccgtctatgggcagtttgtggctggtgagacagcagaggaggtgaagggctgcgtgcagcagctgcggaccctcagcctccgaccactgctggcagtgcccactgaggaggagccggactctgctgccaagagtggtgaggcgtggtatgaggggaacctcggtgctatgctgcggtgtgtggacctgtcacggggcctcctggagccccccagcctggctgaggccagcctcatgcagctgaaggtgacggcgctgaccagtactcggctctgtaaggagctagcctcgtgggtcagaaggccaggagcctccttggagctgagccccgagaggctggctgaagctatggactctgggcagaacctccaggtctcctgcctcaatgctgagcagaaccagcacctccgggcctccctcagccgcctgcatcgggtggcacagtatgcccgggcccagcacgtgcggctcctggtggatgcggagtacacctcactgaaccctgcgctctcgctgctggtggctgccctggctgtgcgctggaacagcccgggtgaaggcgggccctgggtgtggaacacctaccaggcctgtctaaaggacacattcgagcggctggggagggatgcagaggctgcgcacagggccggcctggccttcggagtgaagctggtacgaggtgcatatctggacaaggagagagcggtggcccagctccatgggatggaagaccccactcagcctgactatgaggccaccagtcagagttacagccgctgcctggaactgatgctgacgcacgtggcccgccatggccccatgtgccacctcatggtggcttcccacaatgaggaatctgttcgccaggcaaccaagcgcatgtgggagctgggcattcctctggatgggactgtctgtttcggacaacttctgggcatgtgtgaccacgtctctctagcactggggcaggccggctatgtagtgtataagtccattccctatggctccttggaggaggtaatcccctacctgatccggagggcccaggagaaccggagcgtgcttcagggtgcccgcagggaacaggagctgctcagccaagaactgtggcggcggctgctgccaggatgccgaaggataccccactagcacccctgagggggtcatgtggtcaataaaagtccttaggtgctgcct

SEQ ID NO: 169366 - DNA, 567 bp, Homo sapiens
  Payload ID: 13339
  Gene Symbol: PRODH2
  Gene Name: proline dehydrogenase (oxidase) 2
  ENST ID: ENST00000588266
  CDS Start-End: 1-359
acagcccgggtgaaggcgggccctgggtgtggaacacctaccaggcctgtctaaaggacacattcgagcggctggggagggatgcagaggctgcgcacagggccggcctggccttcggagtgaagctggtacgaggtgcatatctggacaaggagagagcggtggcccagctccatgggatggaagaccccactcagcctgactatgaggccaccagtcagagttacagccgctgcctggaactgatgctgacgcacgtggcccgccatggccccatgtgccacctcatggtggcttcccacaatgaggaatctgttcgccaggcaaccaagcgggcaggccggctatgtagtgtataagtccattccctatggctccttggaggaggtaatcccctacctgatccggagggcccaggagaaccggagcgtgcttcagggtgcccgcagggaacaggagctgctcagccaagaactgtggcggcggctgctgccaggatgccgaaggataccccactagcacccctgagggggtcatgtggtcaataaaagtccttaggtgctgcct

SEQ ID NO: 169367 - DNA, 612 bp, Homo sapiens
  Payload ID: 13339
  Gene Symbol: PRODH2
  Gene Name: proline dehydrogenase (oxidase) 2
  ENST ID: ENST00000589835
  CDS Start-End: 1-222
gaggccaccagtcagagttacagccgctgcctggaactgatgctgacgcacgtggcccgccatggccccatgtgccacctcatggtggcttcccacaatgaggaatctgttcgccaggcaaccaagcgcatgtgggagctgggcattcctctggatgggactgtctgtttcggacaacttctgggcatgtgtgaccacgtctctctagcactgggtatgtgaatggctcccccacccccatcaagccccaggccttactccctcccagccagagcccttctcctattcccaaccaaggcccagcctccagatccttccagagagatctgtcattccagtgtctgtgggccttccaaggctgtgtctctgtgtctgccgtctgtcatttctgctggttcttgatcatggtgtattatttcttgtgtgttttgttatctttactgtgctgctcctcagggcctgacaccaggtaattaatgtttccttctgccaggtgctaagcagaacgaaatcactttatcctaaattcatagcttgaggtttcttgaaacaccccactggcacaaatttgagctgcaaatacataagggggttaacccatagccccaactt

SEQ ID NO: 169368 - DNA, 2332 bp, Homo sapiens
  Payload ID: 13340
  Gene Symbol: PRR11
  Gene Name: proline rich 11
  Uniprot ID: Q96HE9
  ENST ID: ENST00000262293
  CDS Start-End: 313-1395
accagagcttccaccgacagcagaggggacgtaacacaccttctttcccctccggctttccttccccttctctcccgccttctccttattcataccagaagcgcctcagctctgattggctggagctctgtgctatctcagccaatcacaagccgggctgtgctcctacaccatccgaagagcgaatcgtgcagagaccgtgtctacgattggcctctccctgacaaggatttaattttgaatttttctttatggcgtgggagaggccacagcccggactccatcgactcccccggctcttagactaaaatcatgcccaagttcaaacaacgaagacgaaagctaaaagccaaagccgaaagattattcaaaaaaaaagaagcctctcactttcagtccaagctaattacacctcctcctccaccaccctcaccagaaagagtcggtatttcttcaatagatatatctcaaagcagaagctggctaacatcatcctggaacttcaattttcctaacatcagagatgcaataaaactttggacaaatagagtatggtctatatacagctggtgccagaactgcataacccagagtttagaagtattgaaagacaccatctttccatctcgtatctgccaccgagaactttacagtgtaaaacaacagttttgcattttggaaagtaaattatgcaagctccaggaagcactgaagaccatctcagaaagttcttcctgtccaagctgtggtcaaacatgtcacatgagtggtaaacttacaaatgtgcctgcctgcgttctgatcacccctggagactccaaagctgtgcttcctcccacactgccacagccagccagccattttcctcctcctcctccacctccacctctgccacctcctccaccaccactagcacctgtgttgctcagaaaacccagtctcgctaaagcacttcaggctggaccattaaaaaaagatggacccatgcagataacagttaaagatctgctgactgtaaaattaaagaagacacagagtttagatgaaaagaggaagcttataccatcgccgaaagcacggaatccactagttaccgtctctgacttgcagcatgttaccctgaaacctaactccaaagtgttatcgactcgagttacaaacgtcttaatcactcctggaaaaagtcagatggatctgcggaaactgcttagaaaagtcgatgtagagaggagcccaggtggaacccctcttaccaataaggaaaatatggaaacaggaacaggactgactccagtgatgacgcaggccttaaggagaaagtttcagctggctcaccctagaagcccaactccaactctgccactttctacaagcagctttgatgaacaaaactgatgccaactctgcctcactccatgagatgatccataacaaatacagataaaaacacccagctgggtgcagtggctcacacctgtaatcccagcactttgggaggctgaggcaggtggatcacctgaggtcaggagtttgagaccagcctggccaacatggtgaaactccttccccactaaaaatacagaaattagctgggcatagtggcgggtgcctgtaatcccagctatgcgggaggctaaggcaggagaattgcttgaacccaagaggcagaggttgcagtgagccaagatcgcgtcattgcactccagcctgagcaacaagagcaaaacaaaaacaaacaaacaaacaaaaaaaacccacccaaatccttttttttaatgtagtagggtttatatagatatactaatataattgcatttggagaattagagtatgtatggagcccacacatactgtgatataaagtgtatatacagatatttggatattttctagtttgcatgatgattaagagaaccagatgggaaaatacaatctccaaagtgatgtttatcctggaattacccaatttagattagagaggttgttcaaatttaactagataactctagtttgtactgtataggtgcagttatgacagtaaaaaaatagcctcttggctcatacctgtaatcccaccactttgggaggccaaggtgggaggattgcttgagcccaggaattcaagactagcctgggcaacataatacagggagaccccgtttctattaaaaatacaaaaatcagccagctgtggtgacacatgcctatagtcccagctacttaggaagctgagaagggaggatcacttgaggctgtagtgcactataattatgcctgtgaatagccactctactccagcctgggcaacatagcaagaccccatctctaaaaa

SEQ ID NO: 169369 - DNA, 536 bp, Homo sapiens
  Payload ID: 13340
  Gene Symbol: PRR11
  Gene Name: proline rich 11
  ENST ID: ENST00000582995
  CDS Start-End: 103-536
ctttatggcgtgggagaggccacagcccggactccatcgactcccccggctcttagactatttctcgctctgtgttccaggctggagtacagtggcgcagtcatgggtcactgcagcctcaagctcctgtgctcacgtgagcctcccgcctcacccttcagagtggctaggactatagaaatcatgcccaagttcaaacaacgaagacgaaagctaaaagccaaagccgaaagattattcaaaaaaaaagaagcctctcactttcagtccaagctaattacacctcctcctccaccaccctcaccagaaagagtcggtatttcttcaatagatatatctcaaagcagaagctggctaacatcatcctggaacttcaattttcctaacatcagagatgcaataaaactttggacaaatagagtatggtctatatacagctggtgccagaactgcataacccagagtttagaagtattgaaagacaccatctttccatctcgtatctgccaccgagaactttacagtgtaaaacaaca

SEQ ID NO: 169370 - DNA, 1641 bp, Homo sapiens
  Payload ID: 13340
  Gene Symbol: PRR11
  Gene Name: proline rich 11
  Uniprot ID: Q96HE9
  ENST ID: ENST00000580177
  CDS Start-End: 55-1137
gggagaggccacagcccggactccatcgactcccccggctcttagactaaaatcatgcccaagttcaaacaacgaagacgaaagctaaaagccaaagccgaaagattattcaaaaaaaaagaagcctctcactttcagtccaagctaattacacctcctcctccaccaccctcaccagaaagagtcggtatttcttcaatagatatatctcaaagcagaagctggctaacatcatcctggaacttcaattttcctaacatcagagatgcaataaaactttggacaaatagagtatggtctatatacagctggtgccagaactgcataacccagagtttagaagtattgaaagacaccatctttccatctcgtatctgccaccgagaactttacagtgtaaaacaacagttttgcattttggaaagtaaattatgcaagctccaggaagcactgaagaccatctcagaaagttcttcctgtccaagctgtggtcaaacatgtcacatgagtggtaaacttacaaatgtgcctgcctgcgttctgatcacccctggagactccaaagctgtgcttcctcccacactgccacagccagccagccattttcctcctcctcctccacctccacctctgccacctcctccaccaccactagcacctgtgttgctcagaaaacccagtctcgctaaagcacttcaggctggaccattaaaaaaagatggacccatgcagataacagttaaagatctgctgactgtaaaattaaagaagacacagagtttagatgaaaagaggaagcttataccatcgccgaaagcacggaatccactagttaccgtctctgacttgcagcatgttaccctgaaacctaactccaaagtgttatcgactcgagttacaaacgtcttaatcactcctggaaaaagtcagatggatctgcggaaactgcttagaaaagtcgatgtagagaggagcccaggtggaacccctcttaccaataaggaaaatatggaaacaggaacaggactgactccagtgatgacgcaggccttaaggagaaagtttcagctggctcaccctagaagcccaactccaactctgccactttctacaagcagctttgatgaacaaaactgatgccaactctgcctcactccatgagatgatccataacaaatacagataaaaacacccagctgggtgcagtggctcacacctgtaatcccagcactttgggaggctgaggcaggtgatccacccatctcagcctcccaaagtgctgagattacaggcgtgagccaccacgcccggccagagatccacatctatatttataacacatttatggatgaaaattaaacaggtgtccgggtgcggttactcatgcctgtaatccgagcacttgtggaggccgaggcaggcggattacttgaggtcaggacttcgaaaccagcctggccaacatggtgaaatcccatctctactaaaaatacaaaattagccaggtgtggtgtcacgcacctgtagtcccagttacttgaacctgggaggcagaggttgcagtgagccgagattgcaacactgccactccagcctgggtgacagagcaagagaccctgtctcaaaaaaaaaaaaaaaaaa

SEQ ID NO: 169371 - DNA, 232 bp, Homo sapiens
  Payload ID: 13340
  Gene Symbol: PRR11
  Gene Name: proline rich 11
  ENST ID: ENST00000582004
  CDS Start-End: 1-160
aaaaagtcagatggatctgcggaaactgcttagaaaagtcgatgtagagaggagcccaggtggaacccctcttaccaataaggaaaatatggaaacaggaacaggactgactccagtgatgacgcaggccttaaggagaaagtttcaggtaaccctttaggaaaagaatattggttcctttgcttgaaaataatttggcctggtgtggtggctcatgactgtaatcctaaca

SEQ ID NO: 169372 - DNA, 860 bp, Homo sapiens
  Payload ID: 13340
  Gene Symbol: PRR11
  Gene Name: proline rich 11
  ENST ID: ENST00000578777
  CDS Start-End: 264-860
aattttgaatttttctttatggcgtgggagaggccacagcccggactccatcgactcccccggctcttagactatttctcgctctgtgttccaggctggagtacagtggcgcagtcatgggtcactgcagcctcaagctcctgtgctcacgtgagcctcccgcctcacccttcagagtggctaggactatagagacattgttgctgaagccctctgtcctgtccttctgcggcagtcttcactggctgtgagcctcagaaatcatgcccaagttcaaacaacgaagacgaaagctaaaagccaaagccgaaagattattcaaaaaaaaagaagcctctcactttcagtccaagctaattacacctcctcctccaccaccctcaccagaaagagtcggtatttcttcaatagatatatctcaaagcagaagctggctaacatcatcctggaacttcaattttcctaacatcagagatgcaataaaactttggacaaatagagtatggtctatatacagctggtgccagaactgcataacccagagtttagaagtattgaaagacaccatctttccatctcgtatctgccaccgagaactttacagtgtaaaacaacagttttgcattttggaaagtaaattatgcaagctccaggaagcactgaagaccatctcagaaagttcttcctgtccaagctgtggtcaaacatgtcacatgagtggtaaacttacaaatgtgcctgcctgcgttctgatcacccctggagactccaaagctgtgcttcctcccacactgccacagccagccagccattttcctcctcctcctccacctccacctctgccacctcctccaccacca

SEQ ID NO: 169373 - DNA, 2334 bp, Homo sapiens
  Payload ID: 13340
  Gene Symbol: PRR11
  Gene Name: proline rich 11
  Uniprot ID: Q96HE9
  ENST ID: ENST00000578542
  CDS Start-End: 66-1148
ctttatggcgtgggagaggccacagcccggactccatcgactcccccggctcttagactaaaatcatgcccaagttcaaacaacgaagacgaaagctaaaagccaaagccgaaagattattcaaaaaaaaagaagcctctcactttcagtccaagctaattacacctcctcctccaccaccctcaccagaaagagtcggtatttcttcaatagatatatctcaaagcagaagctggctaacatcatcctggaacttcaattttcctaacatcagagatgcaataaaactttggacaaatagagtatggtctatatacagctggtgccagaactgcataacccagagtttagaagtattgaaagacaccatctttccatctcgtatctgccaccgagaactttacagtgtaaaacaacagttttgcattttggaaagtaaattatgcaagctccaggaagcactgaagaccatctcagaaagttcttcctgtccaagctgtggtcaaacatgtcacatgagtggtaaacttacaaatgtgcctgcctgcgttctgatcacccctggagactccaaagctgtgcttcctcccacactgccacagccagccagccattttcctcctcctcctccacctccacctctgccacctcctccaccaccactagcacctgtgttgctcagaaaacccagtctcgctaaagcacttcaggctggaccattaaaaaaagatggacccatgcagataacagttaaagatctgctgactgtaaaattaaagaagacacagagtttagatgaaaagaggaagcttataccatcgccgaaagcacggaatccactagttaccgtctctgacttgcagcatgttaccctgaaacctaactccaaagtgttatcgactcgagttacaaacgtcttaatcactcctggaaaaagtcagatggatctgcggaaactgcttagaaaagtcgatgtagagaggagcccaggtggaacccctcttaccaataaggaaaatatggaaacaggaacaggactgactccagtgatgacgcaggccttaaggagaaagtttcagctggctcaccctagaagcccaactccaactctgccactttctacaagcagctttgatgaacaaaactgatgccaactctgcctcactccatgagatgatccataacaaatacagataaaaacacccagctgggtgcagtggctcacacctgtaatcccagcactttgggaggctgaggcaggtggatcacctgaggtcaggacttcgaaaccagcctggccaacatggtgaaatcccatctctactaaaaatacaaaattagccaggtgtggtgtcacgcacctgtagtcccagttacttgaacctgggaggcagaggttgcagtgagccgagattgcaacactgccactccagcctgggtgacagagcaagagaccctgtctcaaaaaaaaaaaaaaaaaattaaatgggtagtgacgttaagagatatatatcagcttctagtaaaagtttttttttttaaacctgctagctacatttacattatgtaaaaataaagggaataatcactgagaataaagcagttgagtatttataacaataatattttatggggcgcttataatgtttataatattgtaaaccactgtgtactctattcatttaatgctaaatgacttgaccattcttgtgggataagagatcattaaaaaaatgctagggccgggcaccatggctcacgcctgtaatcccaggactttaggaggccaaggcaggtggatgacttgagctcaggagtttgagaccagcctgggcaacatgatgaaaactccgtctctaccaaaaatcaaaaaaattagccaggtgtgatgttgtgtgcctgtagtcccagctacttgtgaggctgaggtgggaggatggtttgggccccggaggtagaggttgcagtgagctgagattgtgccactgtattccatcctgggcaacagagccagaccctgcctcaaaaaaaaaaaaaaaaaaaaaaaaggcctggcacagtggctcacgcctgtaatcccagcactttgggaggctgaggcgggcaaaacacttgaggtcagacgtttgagaccagcctggccaacatggtgaaaccccgtctctaccaaaaataaaaataaaaattatccaggcgtggtggcatgtgcctatagccccagctactcaggaagctaaagcacgagaattatgtgcatcctggaggtgaaggttgcagtgagccaagatcacaccactccactccagtctggacaacagagtgagaccctgtgtc

SEQ ID NO: 169374 - DNA, 199 bp, Homo sapiens
  Payload ID: 13340
  Gene Symbol: PRR11
  Gene Name: proline rich 11
  ENST ID: ENST00000577457
  CDS Start-End: 133-199
tctttatggcgtgggagaggccacagcccggactccatcgactcccccggctcttagactaagacattgttgctgaagccctctgtcctgtccttctgcggcagtcttcactggctgtgagcctcagaaatcatgcccaagttcaaacaacgaagacgaaagctaaaagccaaagccgaaagattattcaaaaaaaaag

SEQ ID NO: 169375 - DNA, 1623 bp, Homo sapiens
  Payload ID: 13340
  Gene Symbol: PRR11
  Gene Name: proline rich 11
  Uniprot ID: Q96HE9
  ENST ID: ENST00000614081
  CDS Start-End: 55-1137
gggagaggccacagcccggactccatcgactcccccggctcttagactaaaatcatgcccaagttcaaacaacgaagacgaaagctaaaagccaaagccgaaagattattcaaaaaaaaagaagcctctcactttcagtccaagctaattacacctcctcctccaccaccctcaccagaaagagtcggtatttcttcaatagatatatctcaaagcagaagctggctaacatcatcctggaacttcaattttcctaacatcagagatgcaataaaactttggacaaatagagtatggtctatatacagctggtgccagaactgcataacccagagtttagaagtattgaaagacaccatctttccatctcgtatctgccaccgagaactttacagtgtaaaacaacagttttgcattttggaaagtaaattatgcaagctccaggaagcactgaagaccatctcagaaagttcttcctgtccaagctgtggtcaaacatgtcacatgagtggtaaacttacaaatgtgcctgcctgcgttctgatcacccctggagactccaaagctgtgcttcctcccacactgccacagccagccagccattttcctcctcctcctccacctccacctctgccacctcctccaccaccactagcacctgtgttgctcagaaaacccagtctcgctaaagcacttcaggctggaccattaaaaaaagatggacccatgcagataacagttaaagatctgctgactgtaaaattaaagaagacacagagtttagatgaaaagaggaagcttataccatcgccgaaagcacggaatccactagttaccgtctctgacttgcagcatgttaccctgaaacctaactccaaagtgttatcgactcgagttacaaacgtcttaatcactcctggaaaaagtcagatggatctgcggaaactgcttagaaaagtcgatgtagagaggagcccaggtggaacccctcttaccaataaggaaaatatggaaacaggaacaggactgactccagtgatgacgcaggccttaaggagaaagtttcagctggctcaccctagaagcccaactccaactctgccactttctacaagcagctttgatgaacaaaactgatgccaactctgcctcactccatgagatgatccataacaaatacagataaaaacacccagctgggtgcagtggctcacacctgtaatcccagcactttgggaggctgaggcaggtgatccacccatctcagcctcccaaagtgctgagattacaggcgtgagccaccacgcccggccagagatccacatctatatttataacacatttatggatgaaaattaaacaggtgtccgggtgcggttactcatgcctgtaatccgagcacttgtggaggccgaggcaggcggattacttgaggtcaggacttcgaaaccagcctggccaacatggtgaaatcccatctctactaaaaatacaaaattagccaggtgtggtgtcacgcacctgtagtcccagttacttgaacctgggaggcagaggttgcagtgagccgagattgcaacactgccactccagcctgggtgacagagcaagagaccctgtctc

SEQ ID NO: 169376 - DNA, 6955 bp, Homo sapiens
  Payload ID: 13341
  Gene Symbol: PRR12
  Gene Name: proline rich 12
  Uniprot ID: Q9ULL5
  ENST ID: ENST00000418929
  CDS Start-End: 13-6123
cgcggccaattcatggacaggaactaccccagcgccggcttcggggacccgctcggcgccggggcgggatggagttacgagaggtcagcgaaagctagcttggtttatggcagctccaggacctcgcaccccgagacggacatcttacaccgccaggcctatgcggccccccacccactgcaaagctatgccaccaaccaccacccggcaggcctctctggactcttcgacactggcctccaccacgcgggctcagcagggcccgacgcctccgtcatgaaccttatctcggccctggaatcccggggcccccagcctggcccctccgcctcctctctcctctcccagttccgcagtccttcctggcaaacagccatgcacacgccaggccccacggagctcttcatctcgggtgccctgccgggttccagcacctttccgtcctcatctgccctgtcggcttaccaacacccggcttccttcggcagccgccccttcccagtgccctcgtccctcagcctccaggaccccccattcagccctccagctaacgggctcctgtcccctcatgacgtgctgcacctgaagccctcgcaggcacccacggtgccctcttcactgggcttcgagcgcctggcagggggcggtgtcttggggccagctggtctcggtccagcccagacccccccttaccgccctggccccccagacccaccaccacctcctcgccacctcccaactcagttcaacctgctggcttcctcttccgctgccgccgccgctgccgagcagtcctccccacagctctataacttctcgggtgctgccccgggcccaccgccgcctgagcgggccctgccacgccaggacacggtcatcaagcactaccagcggccagccagtgcccagcccccaccacccccgccaccagcccatgcgctccagcactatctgagctgtggaggcagctacccctccatgggccaccgggccaacctggcctgcagccccctgggtggtggggagccctccccgggtgctggggagcctagcaaggctggtcccagcggagccacggctggggcatctggccgggccacgggccctgaggcagcagggggcggtggggctgggggtggtggtggaggttaccgccccatcattcagtcgcctgggtacaagacgggcaaaggtggttatggagcagctgccgggggtgccaccaggccccccccaccccgttcgaccgccacccccaaatgtcagagcctgggtgggccagcagccgcctatgccactgggaaggcctctggggctggaggggcagggggccaggcttattcccccggtcagcctcaagggcttctgggaccccaggcctacgggcaagggtttggaggggggcaggcacaggacttgagcaaagcccccagctactcagggggccccccacagccccccagcggcccccctcctcctggcctggccacatgtcagagctactccccggaccagctgcaggggcagctgtatggggtgcagggcgagccatacccagggccagccgcccactcccaggggctgcccacagccagcccctcgctcagctacagtaccggccattccccagcgctctcgggccatgggggtggctggggacccagctccctgggaggcggcggtgaggccagcccatctcacatcattcgtccgctccagtcaccgcctgccaccggccgtccacctggagtcggctctccaggagcccctggcaaatacctgagctcagtcttggcctcagcgcctttcctggcacctccgggagctggcagctatgcagccggagcaggtggctacaagggcaagggggatggctcggagctgctggcgggcccaggtgggcctcctgcggagcgcacagaggatgaggagttccttatccagcacctcttgcaggcgcccagccctcctcggacctcaggggcggacggcttggtgggcgaggacggggcagcagatgcctctaagggacttggggggagtggcggggccgggggaccaccgggtacaccctacgagttggccaaggaagacccccagaggtaccacctgcagagtgtcatccgcaccagtgccagcctggatgagggtgccactgcggcactggagctgggcctggggaggctgaaggagaagaagaaagggccagagcggggtggcgagacccccgaggggctggccacctctgttgtccactacggggcaggcgccaaggagctgggggccttcttgcaaaagagccctccgcccccacctcccacggcccagtctacccagcccactccccatggcctccttctggaggccgggggccctgacctcccactggtgctgcctccgcctcccccccagctgctcccctcggtcctcagccatgcccccagtccctctcccagcgcctccaaagtcggcgtccacctccttgagccagccacccgcgatggggcaccccagccacctccaccgccacccccgcctccaccacccatgcccctgcagctcgaggcccacctccgcagccatggcctggagcccgcggcccccagcccccgcctgcgacccgaggagagcctggatccgccaggcgccatgcaggaattgctcggggctctggagccgctgcccccggcgcctggggatactggcgtaggcccaccaaactcggagggcaaggatcccgcaggcgcctaccgcagccccagcccgcaaggcaccaaggcgccgcgtttcgtgccgctcacctccatctgcttccctgactccttgctccaagacgaggagcgcagcttcttccccaccatggaggagatgttcggtggaggggccgcggacgactacggcaaggccgggccacctgaggacgagggggaccccaaggctggcgctgggccaccccccggcccccctgcttatgatccctatgggccctactgtcctggccgggcgtcgggagccgggcccgagacaccgggcctgggcctggaccccaacaaaccgcctgaactgccctccacggtcaacgccgagccgctgggcctgatccagagtggcccccaccaggcggcgccaccacccccgcctccgccaccgccgcctcccgcgccggcctccgaacccaagggtggcctcacctcgcccatcttctgctctaccaagccaaagaagctgctcaagacatcctccttccacctgctgcggcgccgcgacccacccttccagacccccaagaagctgtacgcccaggagtacgagttcgaggcggacgaggacaaggccgatgttcccgccgacatccgcctcaacccccggcgcttgcctgacctggtctccagctgccgctcccgtccggccctctcgccactgggggacatcgacttctgcccacccaacccaggacccgatggcccccggcgccgtggccgcaagcccacgaaggcgaaacgtgatgggccaccccggccacgggggaggccccggatccgccccctggaggtcccgaccactgcggggcccgcctcggcctccacgcccaccgatggcgccaagaaaccccggggccggggccgaggccggggtcgaaaggctgaggaggcagggggcacccggttggagcccctgaagccacttaagatcaagctgtctgtgcccaaggctggcgagggtctgggaacctcatcgggtgatgccatatcaggcactgaccacaacagcctggactcgagcctgactcgggagaagatcgaggccaagattaaggaggtggaggagaagcagccggagatgaagtcgggtttcatggcctccttcttggacttcctcaagtcaggcaagcgccacccaccactctaccaggcgggcctgacgcctccgctcagccctcccaagagtgtgccaccctctgtgccagcccgaggcctgcagccccagccccctgccacccctgctgtgccacatcccccaccttccggagcctttgggcttgggggcgccctggaggctgcagagagtgagggtctggggcttggctgcccttcaccctgcaagcggcttgatgaggagctgaagcggaacctcgagacgctgccctccttctcctcggatgaggaagactctgtcgccaagaaccgagacctgcaggagagcatctcctccgccatctctgccctcgatgacccaccccttgctgggccaaaagacacttccaccccagatgggccgcccttggcccccgcggctgcagttccagggccaccccctcttccggggctccccagtgccaacagcaatggcactcccgagcccccgctgctggaggagaaacccccacccactccacctcctgccccgactcctcagcctcagcctccgccaccccctccgccgccacagccagccctgccctcgccacccccgctggtggcccccacgcccagctcaccaccgccaccgccgctgccgccgccacctccaccagccatgccctcgcctccaccaccacccccaccagccgctgccccactggctgctcctcctgaggagcccgccgccccgtctcccgaagaccccgagctgccggacacccggcccctgcatctggccaaaaagcaggagacggcggcagtgtgtggggagacggacgaggaggccggcgagagtggcggagagggcatcttccgggaacgggacgagttcgtcatccgtgctgaggacatcccttccctcaagctggcgttgcagacggggcgtgaacccccacccatctggcgagtccagaaggcccttctgcagaaattcactccggagatcaaggacggccagaggcagttttgtgccaccagtaattatttggggtattttggggatgcaaaaaatcggtaccagcgcctctatgtaaagttcctggaaaatgtcaataagaaggactacgtgagggtctgtgctcggaaaccctggcatcggcccccagtgccagtcagacgctctgggcaggccaagaaccccgtatctgctgggggtagctctgcacctccccctaaggccccagcaccacctcccaagcctgagacccctgaaaagacgacatctgagaagcccccagagcagactcctgagacggccatgcctgagccccctgcccccgagaagccctccctcctgcggcctgttgagaaggaaaaggagaaggagaaggtgacacgtggagagcggccattgcggggtgagcgggccaccagcggacggcagacacggccagagcggagtctcgccacgggacaacctgccacatcccggctgcccaaagcccggcctaccaaggtgaaggctgaaccgccccctaagaagaggaagaaatggctgaaggaggcaggcggcaacgctacagcaggcgggggcccaccaggcagctcctcggactcggagtcctcccctggagcccccagcgaggacgagcgggcagtacctgggcgtctgctcaaaaccagggcgatgcgggagatgtaccggagctacgtggagatgttggtgagcacagcacttgacccagacatgatccaggccctggaggacacgcatgacgagctgtacctgccccccatgcggaagatagacggcctgctgaatgagcacaagaagaaagtcctgaagcggctgtcgctaagcccagccctgcaggatgctctgcacacgttcccacagctgcaagtggagcagagtggggagggctctccggaagagggggctgtgcggctgcggcctgctggggaaccctacaaccgcaagacgctcagcaagctcaagaggagcgtggtcagagcccaggagttcaaggttgagctggaaaagtcgggatactatacactctaccattcgctccaccactataaataccacaccttcctgcgctgccgggaccagaccctggccatcgagggcggcgccgaggacctgggccaggaggaggtggtccagcagtgcatgcggaaccagccgtggctggaacagctctttgactccttcagtgacctgctggcccaagcacaggcccacagccgctgcgggtgaccccgccccagcttgtgaggggggcgcctcctccatgaaccgagaattgggacagaaccgtgtcctcaggagctaacacctgggctccatcgccggggaaagggggtcatgggtcagggtgtgtctgtgctgccccctccagggcagggttcaaagtccgactccccccctctcccaagccccctccactccctccccattcctcccactgttcggtgtacagagaaattatttatatatatgtataaatgtctatttagtaacggtttccctctccccttgccccgaccccccctccacagccacagcccccgccccctccaccttgtacataatgtataggaaaagtctatgtatggctggggggggtggggtggcttcagagagctgggggaccccttccccccaagtcccccctgcaggccaagatctttgctaaaggccattccctccgcagggcatttggcgtcgggtgggaggggaaaacgcatcttgttaattatttttaatcttatttattgtacatacctggggcaggggcttggggaggtggaggggggagaagggtcccctctctctgcccctcccactccttttctacggcgatttgtctgtgtctggcccccacccactgcccatcccccattgttgtctggatgtggttctattttttatcggtctcctttcccctcctccccgttctcgcccccgccccaccccctgctcccactaccctttgtctcttgctctttcttgggcttctgtacaactcaacttgtatacactgtgtacacacaaccagccaaacgaaaacccaacggcaaacacttta

SEQ ID NO: 169377 - DNA, 4479 bp, Homo sapiens
  Payload ID: 13341
  Gene Symbol: PRR12
  Gene Name: proline rich 12
  Uniprot ID: Q9ULL5
  ENST ID: ENST00000615927
  CDS Start-End: 1-3648
atggagcagctgccgggggtgccaccaggccccccccaccccgttcgaccgccacccccgcctccaccacccatgcccctgcagctcgaggcccacctccgcagccatggcctggagcccgcggcccccagcccccgcctgcgacccgaggagagcctggatccgccaggcgccatgcaggaattgctcggggctctggagccgctgcccccggcgcctggggatactggcgtaggcccaccaaactcggagggcaaggatcccgcaggcgcctaccgcagccccagcccgcaaggcaccaaggcgccgcgtttcgtgccgctcacctccatctgcttccctgactccttgctccaagacgaggagcgcagcttcttccccaccatggaggagatgttcggtggaggggccgcggacgactacggcaaggccgggccacctgaggacgagggggaccccaaggctggcgctgggccaccccccggcccccctgcttatgatccctatgggccctactgtcctggccgggcgtcgggagccgggcccgagacaccgggcctgggcctggaccccaacaaaccgcctgaactgccctccacggtcaacgccgagccgctgggcctgatccagagtggcccccaccaggcggcgccaccacccccgcctccgccaccgccgcctcccgcgccggcctccgaacccaagggtggcctcacctcgcccatcttctgctctaccaagccaaagaagctgctcaagacatcctccttccacctgctgcggcgccgcgacccacccttccagacccccaagaagctgtacgcccaggagtacgagttcgaggcggacgaggacaaggccgatgttcccgccgacatccgcctcaacccccggcgcttgcctgacctggtctccagctgccgctcccgtccggccctctcgccactgggggacatcgacttctgcccacccaacccaggacccgatggcccccggcgccgtggccgcaagcccacgaaggcgaaacgtgatgggccaccccggccacgggggaggccccggatccgccccctggaggtcccgaccactgcggggcccgcctcggcctccacgcccaccgatggcgccaagaaaccccggggccggggccgaggccggggtcgaaaggctgaggaggcagggggcacccggttggagcccctgaagccacttaagatcaagctgtctgtgcccaaggctggcgagggtctgggaacctcatcgggtgatgccatatcaggcactgaccacaacagcctggactcgagcctgactcgggagaagatcgaggccaagattaaggaggtggaggagaagcagccggagatgaagtcgggtttcatggcctccttcttggacttcctcaagtcaggcaagcgccacccaccactctaccaggcgggcctgacgcctccgctcagccctcccaagagtgtgccaccctctgtgccagcccgaggcctgcagccccagccccctgccacccctgctgtgccacatcccccaccttccggagcctttgggcttgggggcgccctggaggctgcagagagtgagggtctggggcttggctgcccttcaccctgcaagcggcttgatgaggagctgaagcggaacctcgagacgctgccctccttctcctcggatgaggaagactctgtcgccaagaaccgagacctgcaggagagcatctcctccgccatctctgccctcgatgacccaccccttgctgggccaaaagacacttccaccccagatgggccgcccttggcccccgcggctgcagttccagggccaccccctcttccggggctccccagtgccaacagcaatggcactcccgagcccccgctgctggaggagaaacccccacccactccacctcctgccccgactcctcagcctcagcctccgccaccccctccgccgccacagccagccctgccctcgccacccccgctggtggcccccacgcccagctcaccaccgccaccgccgctgccgccgccacctccaccagccatgccctcgcctccaccaccacccccaccagccgctgccccactggctgctcctcctgaggagcccgccgccccgtctcccgaagaccccgagctgccggacacccggcccctgcatctggccaaaaagcaggagacggcggcagtgtgtggggagacggacgaggaggccggcgagagtggcggagagggcatcttccgggaacgggacgagttcgtcatccgtgctgaggacatcccttccctcaagctggcgttgcagacggggcgtgaacccccacccatctggcgagtccagaaggcccttctgcagaaattcactccggagatcaaggacggccagaggcagttttgtgccaccagtaattatttggggtattttggggatgcaaaaaatcggtaccagcgcctctatgtaaagttcctggaaaatgtcaataagaaggactacgtgagggtctgtgctcggaaaccctggcatcggcccccagtgccagtcagacgctctgggcaggccaagaaccccgtatctgctgggggtagctctgcacctccccctaaggccccagcaccacctcccaagcctgagacccctgaaaagacgacatctgagaagcccccagagcagactcctgagacggccatgcctgagccccctgcccccgagaagccctccctcctgcggcctgttgagaaggaaaaggagaaggagaaggtgacacgtggagagcggccattgcggggtgagcgggccaccagcggacggcagacacggccagagcggagtctcgccacgggacaacctgccacatcccggctgcccaaagcccggcctaccaaggtgaaggctgaaccgccccctaagaagaggaagaaatggctgaaggaggcaggcggcaacgctacagcaggcgggggcccaccaggcagctcctcggactcggagtcctcccctggagcccccagcgaggacgagcgggcagtacctgggcgtctgctcaaaaccagggcgatgcgggagatgtaccggagctacgtggagatgttggtgagcacagcacttgacccagacatgatccaggccctggaggacacgcatgacgagctgtacctgccccccatgcggaagatagacggcctgctgaatgagcacaagaagaaagtcctgaagcggctgtcgctaagcccagccctgcaggatgctctgcacacgttcccacagctgcaagtggagcagagtggggagggctctccggaagagggggctgtgcggctgcggcctgctggggaaccctacaaccgcaagacgctcagcaagctcaagaggagcgtggtcagagcccaggagttcaaggttgagctggaaaagtcgggatactatacactctaccattcgctccaccactataaataccacaccttcctgcgctgccgggaccagaccctggccatcgagggcggcgccgaggacctgggccaggaggaggtggtccagcagtgcatgcggaaccagccgtggctggaacagctctttgactccttcagtgacctgctggcccaagcacaggcccacagccgctgcgggtgaccccgccccagcttgtgaggggggcgcctcctccatgaaccgagaattgggacagaaccgtgtcctcaggagctaacacctgggctccatcgccggggaaagggggtcatgggtcagggtgtgtctgtgctgccccctccagggcagggttcaaagtccgactccccccctctcccaagccccctccactccctccccattcctcccactgttcggtgtacagagaaattatttatatatatgtataaatgtctatttagtaacggtttccctctccccttgccccgaccccccctccacagccacagcccccgccccctccaccttgtacataatgtataggaaaagtctatgtatggctggggggggtggggtggcttcagagagctgggggaccccttccccccaagtcccccctgcaggccaagatctttgctaaaggccattccctccgcagggcatttggcgtcgggtgggaggggaaaacgcatcttgttaattatttttaatcttatttattgtacatacctggggcaggggcttggggaggtggaggggggagaagggtcccctctctctgcccctcccactccttttctacggcgatttgtctgtgtctggcccccacccactgcccatcccccattgttgtctggatgtggttctattttttatcggtctcctttcccctcctccccgttctcgcccccgccccaccccctgctcccactaccctttgtctcttgctctttcttgggcttctgtacaactcaacttgtatacactgtgtacacacaaccagccaaacgaaaacccaacggcaaacacttt

SEQ ID NO: 169378 - DNA, 927 bp, Homo sapiens
  Payload ID: 13342
  Gene Symbol: PRR13
  Gene Name: proline rich 13
  Uniprot ID: Q9NZ81
  ENST ID: ENST00000379786
  CDS Start-End: 52-348
gaacgcagcaagcccaggcggcggtggaaaggctggaggacacacctaaacatgtggaatcccaatgccggtgggccccctcatcctgtgccacagccagggtatccaggatgccaaccgttgggtccctaccctcctccatacccaccgcctgcccctggaatccctcctgtgaatcccttggctcctggcatggttggaccagcagtgatagtagacaagaagatgcagaagaaaatgaagaaagctcataaaaagatgcacaagcaccaaaagcaccacaagtaccacaagcatggcaagcattcctcctcttcctcctcctcttccagcagtgattctgactgaatacaggccctggacccttccctcaagtctcaccagttctgctctcccatcaagcttcagatgccatgttgtactgggggaatgtagcccttgtgctccccaccccctacctccacctgagcctcaccctgctgttgagccctgagtggctaggggaaatgggaagaggattgccatggcctggccatcttgttgctgcttggttagatcatatagctaatgaattaggcaggggagctattttttgaagatgatgaactaaatgttgaagacaagtttgagatctgtaaaatgtgattttttacttccacttataatacttgtgattggggaggtttgtggaaattcaattatgatgaaaaacctatcttttttgtaatgttggcatacttggggaatttagtggcaaatacattccccagcaggccttttgttggttgcactaactgcaaggttgctgggaagtagagtccatttggttgatgagctttgactgcggttttggaaccttacctctcctccttagcccaatatgctgtcttgggtcctattcaaataaagttatttctcctggtctca

SEQ ID NO: 169379 - DNA, 1229 bp, Homo sapiens
  Payload ID: 13342
  Gene Symbol: PRR13
  Gene Name: proline rich 13
  Uniprot ID: Q9NZ81
  ENST ID: ENST00000429243
  CDS Start-End: 209-655
agagcaaccgtttcctcctcagtcggaccagagtgattgattagtttgttgtctaatcatcagtcgagcggccacataattaccaattaggcagtagcagaggcgggtgccgaagcacggggtctgggtgactaggaagagccgagactgcgaaggagaacgcagcaagcccaggcggcggtggaaaggctggaggacacacctaaacatgtggaatcccaatgccgggcagccagggccaaatccatatccccccaatattgggtgccctggaggttccaatcctgcccacccaccacctattaatccaccctttcccccaggcccctgtcctcctcccccaggagctccccatggcaatccagctttccccccaggtgggccccctcatcctgtgccacagccagggtatccaggatgccaaccgttgggtccctaccctcctccatacccaccgcctgcccctggaatccctcctgtgaatcccttggctcctggcatggttggaccagcagtgatagtagacaagaagatgcagaagaaaatgaagaaagctcataaaaagatgcacaagcaccaaaagcaccacaagtaccacaagcatggcaagcattcctcctcttcctcctcctcttccagcagtgattctgactgaatacaggccctggacccttccctcaagtctcaccagttctgctctcccatcaagcttcagatgccatgttgtactgggggaatgtagcccttgtgctccccaccccctacctccacctgagcctcaccctgctgttgagccctgagtggctaggggaaatgggaagaggattgccatggcctggccatcttgttgctgcttggttagatcatatagctaatgaattaggcaggggagctattttttgaagatgatgaactaaatgttgaagacaagtttgagatctgtaaaatgtgattttttacttccacttataatacttgtgattggggaggtttgtggaaattcaattatgatgaaaaacctatcttttttgtaatgttggcatacttggggaatttagtggcaaatacattccccagcaggccttttgttggttgcactaactgcaaggttgctgggaagtagagtccatttggttgatgagctttgactgcggttttggaaccttacctctcctccttagcccaatatgctgtcttgggtcctattcaaataaagttatttctcctgg

SEQ ID NO: 169380 - DNA, 261 bp, Homo sapiens
  Payload ID: 13342
  Gene Symbol: PRR13
  Gene Name: proline rich 13
  ENST ID: ENST00000551945
  CDS Start-End: 97-261
cgcagcaagcccaggcggcggtggaaaggtgatggggtatctggattccataggtttttccttttccccttgctaggctggaggacacacctaaacatgtggaatcccaatgccgggcagccagggccaaatccatatccccccaatattgggtgccctggaggttccaatcctgcccacccaccacctattaatccaccctttcccccaggcccctgtcctcctcccccaggagctccccatggcaatccagctttcccc

SEQ ID NO: 169381 - DNA, 688 bp, Homo sapiens
  Payload ID: 13342
  Gene Symbol: PRR13
  Gene Name: proline rich 13
  ENST ID: ENST00000547368
  CDS Start-End: 41-529
gaaggagaacgcagcaagcccaggcggcggtggaaaggtgatggggtatctggattccataggctggaggacacacctaaacatgtggaatcccaatgccgggcagccagggccaaatccatatccccccaatattgggtgccctggaggttccaatcctgcccacccaccacctattaatccaccctttcccccaggcccctgtcctcctcccccaggagctccccatggcaatccagctttccccccaggtgggccccctcatcctgtgccacagccagggtatccaggatgccaaccgttgggtccctaccctcctccatacccaccgcctgcccctggaatccctcctgtgaatcccttggctcctggcatggttggaccagcagtgatagtagacaagaagatgcagaagaaaatgaagaaagctcataaaaagatgcacaagcaccaaaagcaccacaagtaccacaagcatggcaagcattcctcctcttcctcctcctcttccagcagtgattctgactgaatacaggccctggacccttccctcaagtctcaccagttctgctctcccatcaagcttcagatgccatgttgtactgggggaatgtagcccttgtgctccccaccccctacctccacctgagcctcaccctgctgttgagccctgagtggctaggggaaa

SEQ ID NO: 169382 - DNA, 755 bp, Homo sapiens
  Payload ID: 13342
  Gene Symbol: PRR13
  Gene Name: proline rich 13
  Uniprot ID: Q9NZ81
  ENST ID: ENST00000549135
  CDS Start-End: 53-499
tttcttatgtggaagttgtggtagttctccaggctggaggacacacctaaacatgtggaatcccaatgccgggcagccagggccaaatccatatccccccaatattgggtgccctggaggttccaatcctgcccacccaccacctattaatccaccctttcccccaggcccctgtcctcctcccccaggagctccccatggcaatccagctttccccccaggtgggccccctcatcctgtgccacagccagggtatccaggatgccaaccgttgggtccctaccctcctccatacccaccgcctgcccctggaatccctcctgtgaatcccttggctcctggcatggttggaccagcagtgatagtagacaagaagatgcagaagaaaatgaagaaagctcataaaaagatgcacaagcaccaaaagcaccacaagtaccacaagcatggcaagcattcctcctcttcctcctcctcttccagcagtgattctgactgaatacaggccctggacccttccctcaagtctcaccagttctgctctcccatcaagcttcagatgccatgttgtactgggggaatgtagcccttgtgctccccaccccctacctccacctgagcctcaccctgctgttgagccctgagtggctaggggaaatgggaagaggattgccatggcctggccatcttgttgctgcttggttagatcatatagctaatgaattaggcaggggagctattttttgaagatgatg

SEQ ID NO: 169383 - DNA, 786 bp, Homo sapiens
  Payload ID: 13342
  Gene Symbol: PRR13
  Gene Name: proline rich 13
  ENST ID: ENST00000549740
  CDS Start-End: 67-522
cgagactgcgaaggagaacgcagcaagcccaggcggcggtggaaaggctggaggacacacctaaacatgtggaatcccaatgccgggcagccagggccaaatccatatccccccaatattgggtgccctggaggttccaatcctgcccacccaccacctattaatccaccctttcccccaggcccctgtcctcctcccccaggagctccccatggcaatccagctttccccccaggtgggccccctcatcctgtgccacagccagggtatccaggatgccaaccgttgggtccctaccctcctccatacccaccgcctgcccctggaatccctcctgtgaatcccttggctcctggcatggttggaccagcagtgatagtagacaagaagatgcagaagaaaatgaagaaagctcataaaaagatgcacaagcaccaaaagcaccacaagtaccacaagcatggcaaggtcagtaccctctggagactggctagggaaggagtcccccctcagagggactaggtaggcaggggttgggtgagggggattcacattctgtggacgtgagggatgacaattgtgtcgctctggtagatgattcttcctttttataaaagattgctactgggaagaatctgattatcttgaaaataaacatcaggcttctcctatctggggggagttagggtgagccttagaatggattttagaatcaaaagccaaatcttttctgccctactctcccagaacttttgctcccctcccgccaggtgcatattctagcaa

SEQ ID NO: 169384 - DNA, 838 bp, Homo sapiens
  Payload ID: 13342
  Gene Symbol: PRR13
  Gene Name: proline rich 13
  Uniprot ID: Q9NZ81
  ENST ID: ENST00000549581
  CDS Start-End: 65-361
agactgcgaaggagaacgcagcaagcccaggcggcggtggaaaggctggaggacacacctaaacatgtggaatcccaatgccggtgggccccctcatcctgtgccacagccagggtatccaggatgccaaccgttgggtccctaccctcctccatacccaccgcctgcccctggaatccctcctgtgaatcccttggctcctggcatggttggaccagcagtgatagtagacaagaagatgcagaagaaaatgaagaaagctcataaaaagatgcacaagcaccaaaagcaccacaagtaccacaagcatggcaagcattcctcctcttcctcctcctcttccagcagtgattctgactgaatacaggccctggacccttccctcaagtctcaccagttctgctctcccatcaagcttcagatgccatgttgtactgggggaatgtagcccttgtgctccccaccccctacctccacctgagcctcaccctgctgttgagccctgagtggctaggggaaatgggaagaggattgccatggcctggccatcttgttgctgcttggttagatcatatagctaatgaattaggcaggggagctattttttgaagatgatgaactaaatgttgaagacaagtttgagatctgtaaaatgtgattttttacttccacttataatacttgtgattggggaggtttgtggaaattcaattatgatgaaaaacctatcttttttgtaatgttggcatacttggggaatttagtggcaaatacattccccagcaggccttttgttggttgcactaactgcaaggttgctgggaagtagagtccattt

SEQ ID NO: 169385 - DNA, 1009 bp, Homo sapiens
  Payload ID: 13342
  Gene Symbol: PRR13
  Gene Name: proline rich 13
  ENST ID: ENST00000551003
  CDS Start-End: 82-432
gtgactaggaagagccgagactgcgaaggagaacgcagcaagcccaggcggcggtggaaaggctggaggacacacctaaacatgtggaatcccaatgccggcccctgtcctcctcccccaggagctccccatggcaatccagctttccccccaggtgggccccctcatcctgtgccacagccagggtatccaggatgccaaccgttgggtccctaccctcctccatacccaccgcctgcccctggaatccctcctgtgaatcccttggctcctggcatggttggaccagcagtgatagtagacaagaagatgcagaagaaaatgaagaaagctcataaaaagatgcacaagcaccaaaagcaccacaagtaccacaagcatggcaagcattcctcctcttcctcctcctcttccagcagtgattctgactgaatacaggccctggacccttccctcaagtctcaccagttctgctctcccatcaagcttcagatgccatgttgtactgggggaatgtagcccttgtgctccccaccccctacctccacctgagcctcaccctgctgttgagccctgagtggctaggggaaatgggaagaggattgccatggcctggccatcttgttgctgcttggttagatcatatagctaatgaattaggcaggggagctattttttgaagatgatgaactaaatgttgaagacaagtttgagatctgtaaaatgtgattttttacttccacttataatacttgtgattggggaggtttgtggaaattcaattatgatgaaaaacctatcttttttgtaatgttggcatacttggggaatttagtggcaaatacattccccagcaggccttttgttggttgcactaactgcaaggttgctgggaagtagagtccatttggttgatgagctttgactgcggttttggaaccttacctctcctccttagcccaatatgctgtcttgggtcctattcaaataaagttatttctcctggtct

SEQ ID NO: 169386 - DNA, 625 bp, Homo sapiens
  Payload ID: 13342
  Gene Symbol: PRR13
  Gene Name: proline rich 13
  Uniprot ID: Q9NZ81
  ENST ID: ENST00000549924
  CDS Start-End: 144-590
acataattaccaattaggcagtagcagaggcgggtgccgaagcacggggtctgggtgactaggaagagccgagactgcgaaggagaacgcagcaagcccaggcggcggtggaaaggtgatggggctggaggacacacctaaacatgtggaatcccaatgccgggcagccagggccaaatccatatccccccaatattgggtgccctggaggttccaatcctgcccacccaccacctattaatccaccctttcccccaggcccctgtcctcctcccccaggagctccccatggcaatccagctttccccccaggtgggccccctcatcctgtgccacagccagggtatccaggatgccaaccgttgggtccctaccctcctccatacccaccgcctgcccctggaatccctcctgtgaatcccttggctcctggcatggttggaccagcagtgatagtagacaagaagatgcagaagaaaatgaagaaagctcataaaaagatgcacaagcaccaaaagcaccacaagtaccacaagcatggcaagcattcctcctcttcctcctcctcttccagcagtgattctgactgaatacaggccctggacccttccctcaagtctcacca

SEQ ID NO: 169387 - DNA, 755 bp, Homo sapiens
  Payload ID: 13342
  Gene Symbol: PRR13
  Gene Name: proline rich 13
  ENST ID: ENST00000549068
  CDS Start-End: 69-245
gccgagactgcgaaggagaacgcagcaagcccaggcggcggtggaaaggctggaggacacacctaaacatgtggaatcccaatgccgccagggtatccaggatgccaaccgttgggtccctaccctcctccatacccaccgcctgcccctggaatccctcctgtgaatcccttggctcctggcatggttggaccagcagtgatagtagacaagaagatgcagaagaaaatgaagaaagctcataaaaagatgcacaagcaccaaaagcaccacaagtaccacaagcatggcaagcattcctcctcttcctcctcctcttccagcagtgattctgactgaatacaggccctggacccttccctcaagtctcaccagttctgctctcccatcaagcttcagatgccatgttgtactgggggaatgtagcccttgtgctccccaccccctacctccacctgagcctcaccctgctgttgagccctgagtggctaggggaaatgggaagaggattgccatggcctggccatcttgttgctgcttggttagatcatatagctaatgaattaggcaggggagctattttttgaagatgatgaactaaatgttgaagacaagtttgagatctgtaaaatgtgattttttacttccacttataatacttgtgattggggaggtttgtggaaattcaattatgatgaaaaacctatcttttttgtaatgttggcatacttggggaatttagtggcaaatacatt

SEQ ID NO: 169388 - DNA, 810 bp, Homo sapiens
  Payload ID: 13342
  Gene Symbol: PRR13
  Gene Name: proline rich 13
  ENST ID: ENST00000546581
  CDS Start-End: 66-224
gagactgcgaaggagaacgcagcaagcccaggcggcggtggaaaggctggaggacacacctaaacatgtggaatcccaatgccgtgatagtagacaagaagatgcagaagaaaatgaagaaagctcataaaaagatgcacaagcaccaaaagcaccacaagtaccacaagcatggcaagcattcctcctcttcctcctcctcttccagcagtgattctgactgaatacaggccctggacccttccctcaagtctcaccagttctgctctcccatcaagcttcagatgccatgttgtactgggggaatgtagcccttgtgctccccaccccctacctccacctgagcctcaccctgctgttgagccctgagtggctaggggaaatgggaagaggattgccatggcctggccatcttgttgctgcttggttagatcatatagctaatgaattaggcaggggagctattttttgaagatgatgaactaaatgttgaagacaagtttgagatctgtaaaatgtgattttttacttccacttataatacttgtgattggggaggtttgtggaaattcaattatgatgaaaaacctatcttttttgtaatgttggcatacttggggaatttagtggcaaatacattccccagcaggccttttgttggttgcactaactgcaaggttgctgggaagtagagtccatttggttgatgagctttgactgcggttttggaaccttacctctcctccttagcccaatatgctgtcttgggtcctattcaaataaagttatttctcctggtctcagctcacc

SEQ ID NO: 169389 - DNA, 2198 bp, Homo sapiens
  Payload ID: 13343
  Gene Symbol: PRR14
  Gene Name: proline rich 14
  Uniprot ID: Q9BWN1
  ENST ID: ENST00000300835
  CDS Start-End: 312-2069
gaaggaaacttctgaaccatctggtcccgggccgggggagaccgctgggcggggacgcgaggagggaaggggcgtctgtgggcgggacctcccgggattggagtgaagagggtatctgcttgacagtggatccctggggatctacgctgagttcggagatgctccagctcgggccgcccctgtctgagcggagctttgcggcgctgaagcttacaggggaaggaaaagcctcgcccggcgtctgattggcggaaccgcgctgccgcagcctgggattccccagggacccccccggagccgccgcgtctcccatggacttgcccggggactccagcccgcctggccagccgcgtctgtgccgccagcctctgactcgagcattatggggagccaggagcccgaaacggccgaggctgcagctcccgggggccccttctcccctggaaaaggcctctcggcgggtcctggccgtggtgctagaagatgtcatggctgttcacatggtccccgtggtgccctcaaagcagacctccataccacagcaccacagctaccatcaggatcctgtccacaggcagccgcctgcctcgccaccccggcaggccgggtggtcctcgcaggccaggcctcccgaccctctgtgtttgtgtcgcgagcccttgagccgcatccaccggacctcttccaccctgaggcggcgatcaaggacaacccctggcccagaggagggcccttcacaaaaggtggaccgggccccccagcccaccctggtggtgatgctggaagacatcgccagtcctagaccccccgctgagggcttcattgatgagacccccaacttcatcatcccagcacaaagagctgagcccatgaggatagttcgccagccaacgcctccacctggggacctagaacccccattccagccatctgctctgcctgcagaccctctggagagcccaccaacagccccagatcctgctctggagctcccatccaccccaccaccgtccagccttttacgcccccgcctcagtccctggggcttggccccgctcttccgttccgtccgctccaagctggagagctttgctgacatcttcctcacgcccaacaaaaccccacagcccccacccccgtcccccccaatgaagctggagttgaagatcgccatctcagaggccgagcagtctggggctgctgagggcactgcgtctgtcagcccccggcccccaatccgccagtggcgaactcaggaccacaataccccagcacttctccctaagccctctctgggccgaagctactcctgccctgatctggggccccctggcccaggtacctgcacctggccacctgctccaccccaaccaagccgaccacggccgcggcggcacactgtgggtggtggggaaatggcccgagccccgccaccccctcggccctgtctccggaaagaggtcttccctctcggaggagtgggagcctccccttctctcaccacatcttgctcgtccacggcatccacttccttctccgaaccagcagaacccaggttgggttcaaccaaagggaaggagccaagagcctcaaaggaccaggtgctttcagaacctgagaccaagaccatgggaaaggtttctcgattcagaatacgcagaacaccagcccgtcctcagctaaaccttacaccaatgggactgcctcgaccaatcaggttgaacaagaaggagttcagcttggaagaaatttacaccaacaagaattaccaatcacccacaaccaggaggacctttgagaccatctttgaggaaccccgggagcgcaatgggactctgattttcaccagctcaaggaagctccggcgggctgtggaatttcgggacagcagccttcctcgatcacgaagaccgtcccgtggggtccgggctgcagggggcaggactgttcctcccaatgtggcccccagccctgatgtgggccccctgctccagcagcggctggaggagctagatgccttgctcctggaggaagaaacagtagatcgggagcagccccactggacctaggtgccccatctgttggtcatccatcctgaagggacaggaaacctcccaggcagttatttttttttctctatatttctagtaaagttttcgatatgtttctgattcttttgtatctctagctgagtttaa

SEQ ID NO: 169390 - DNA, 2316 bp, Homo sapiens
  Payload ID: 13343
  Gene Symbol: PRR14
  Gene Name: proline rich 14
  Uniprot ID: Q9BWN1
  ENST ID: ENST00000542965
  CDS Start-End: 457-2214
atggagtattgctttggagtcctcggccactcgctgggagaggaggaggatcgcagagggatccagcggaaatagcctcccaggaccgggatccccgtggatcccgggggatctcggggcataatctgcagggacaaaggcctcgggaggctcgggccgcgggagaactggggccgctgcattctgggttctggcggcaggtgccaggcagggcgcgagtgatccgctgatcgaggcggtggcagcgggaggacacccgctccgggcgaccggccgggggcgccctttcgcgccccagggctgcggccgctgggctacggggagccgcgggcggaccatgaagggcggagccccagggaaggggccggccctcaccccccgctcccccgctccccccttaccccaggccgcagcctgggattccccagggacccccccggagccgccgcgtctcccatggacttgcccggggactccagcccgcctggccagccgcgtctgtgccgccagcctctgactcgagcattatggggagccaggagcccgaaacggccgaggctgcagctcccgggggccccttctcccctggaaaaggcctctcggcgggtcctggccgtggtgctagaagatgtcatggctgttcacatggtccccgtggtgccctcaaagcagacctccataccacagcaccacagctaccatcaggatcctgtccacaggcagccgcctgcctcgccaccccggcaggccgggtggtcctcgcaggccaggcctcccgaccctctgtgtttgtgtcgcgagcccttgagccgcatccaccggacctcttccaccctgaggcggcgatcaaggacaacccctggcccagaggagggcccttcacaaaaggtggaccgggccccccagcccaccctggtggtgatgctggaagacatcgccagtcctagaccccccgctgagggcttcattgatgagacccccaacttcatcatcccagcacaaagagctgagcccatgaggatagttcgccagccaacgcctccacctggggacctagaacccccattccagccatctgctctgcctgcagaccctctggagagcccaccaacagccccagatcctgctctggagctcccatccaccccaccaccgtccagccttttacgcccccgcctcagtccctggggcttggccccgctcttccgttccgtccgctccaagctggagagctttgctgacatcttcctcacgcccaacaaaaccccacagcccccacccccgtcccccccaatgaagctggagttgaagatcgccatctcagaggccgagcagtctggggctgctgagggcactgcgtctgtcagcccccggcccccaatccgccagtggcgaactcaggaccacaataccccagcacttctccctaagccctctctgggccgaagctactcctgccctgatctggggccccctggcccaggtacctgcacctggccacctgctccaccccaaccaagccgaccacggccgcggcggcacactgtgggtggtggggaaatggcccgagccccgccaccccctcggccctgtctccggaaagaggtcttccctctcggaggagtgggagcctccccttctctcaccacatcttgctcgtccacggcatccacttccttctccgaaccagcagaacccaggttgggttcaaccaaagggaaggagccaagagcctcaaaggaccaggtgctttcagaacctgagaccaagaccatgggaaaggtttctcgattcagaatacgcagaacaccagcccgtcctcagctaaaccttacaccaatgggactgcctcgaccaatcaggttgaacaagaaggagttcagcttggaagaaatttacaccaacaagaattaccaatcacccacaaccaggaggacctttgagaccatctttgaggaaccccgggagcgcaatgggactctgattttcaccagctcaaggaagctccggcgggctgtggaatttcgggacagcagccttcctcgatcacgaagaccgtcccgtggggtccgggctgcagggggcaggactgttcctcccaatgtggcccccagccctgatgtgggccccctgctccagcagcggctggaggagctagatgccttgctcctggaggaagaaacagtagatcgggagcagccccactggacctaggtgccccatctgttggtcatccatcctgaagggacaggaaacctcccaggcagttatttttttttctctatatttctagtaaagttttcgatatgtttctga

SEQ ID NO: 169391 - DNA, 856 bp, Homo sapiens
  Payload ID: 13343
  Gene Symbol: PRR14
  Gene Name: proline rich 14
  ENST ID: ENST00000568754
  CDS Start-End: 129-856
gcagcgttgggtaagcttggtttttaaaggagccggaggtgggagctgcggaagacccgggatccacgggaggcggcggccgcagcctgggattccccagggacccccccggagccgccgcgtctcccatggacttgcccggggactccagcccgcctggccagccgcgtctgtgccgccagcctctgactcgagcattatggggagccaggagcccgaaacggccgaggctgcagctcccgggggccccttctcccctggaaaaggcctctcggcgggtcctggccgtggtgctagaagatgtcatggctgttcacatggtccccgtggtgccctcaaagcagacctccataccacagcaccacagctaccatcaggatcctgtccacaggcagccgcctgcctcgccaccccggcaggccgggtggtcctcgcaggccaggcctcccgaccctctgtgtttgtgtcgcgagcccttgagccgcatccaccggacctcttccaccctgaggcggcgatcaaggacaacccctggcccagaggagggcccttcacaaaaggtggaccgggccccccagcccaccctggtggtgatgctggaagacatcgccagtcctagaccccccgctgagggcttcattgatgagacccccaacttcatcatcccagcacaaagagctgagcccatgaggatagttcgccagccaacgcctccacctggggacctagaacccccattccagccatctgctctgcctgcagaccctctggagagcccaccaacagccccagatcctgctctggagctcccatccaccccaccaccgtccagccttttacgcccccgcctcagtcc

SEQ ID NO: 169392 - DNA, 528 bp, Homo sapiens
  Payload ID: 13343
  Gene Symbol: PRR14
  Gene Name: proline rich 14
  ENST ID: ENST00000569864
  CDS Start-End: 215-528
ggaagacccgggatccacgggaggcggcgtggatccctggggatctacgctgagttcggagatgctccagctcgggccgcccctgtctgagcggagctttgcggcgctgaagcttacaggggaaggaaaagcctcgcccggcgtctgattggcggaaccgcgctgccgcagcctgggattccccagggacccccccggagccgccgcgtctcccatggacttgcccggggactccagcccgcctggccagccgcgtctgtgccgccagcctctgactcgagcattatggggagccaggagcccgaaacggccgaggctgcagctcccgggggccccttctcccctggaaaaggcctctcggcgggtcctggccgtggtgctagaagatgtcatggctgttcacatggtccccgtggtgccctcaaagcagacctccataccacagcaccacagctaccatcaggatcctgtccacaggcagccgcctgcctcgccaccccggcaggccgggtggtcctcgcaggccag

SEQ ID NO: 169393 - DNA, 10826 bp, Homo sapiens
  Payload ID: 13344
  Gene Symbol: PRR14L
  Gene Name: proline rich 14-like
  Uniprot ID: Q5THK1
  ENST ID: ENST00000327423
  CDS Start-End: 191-6646
gagacgaagaggtggcggcggccggagcgcccccggcctctgtcggctccgtaggctcaggtagacctggcgacgacggggctgcagctgcaggggctgagctggctgggcaagcgcgggccgcggaggaggtctcaggggtgaatcatttgatgtaaaagacttgactccataatctgcatctgtcctaatgctgtcatctggagtagagactcagccagttccacttgattcctccatgtctgccgtggtacaggaattatactctgaactcccagtaagtgtctccagagagcttcatgctgaccctgagccaagtgtgattccagatgtaaaacctggagcctcaagctctcttttaagtcagaatagggcattgcccttggagctgcagaggactcatgtggagagttgttgtgaagaaacctatgagaccttggatcatgggagtgagcctgggcgatgtgggctagtggactccacagcaggaggttctgtggcatctgggatcttggatagggcaaagagaagcgagagcatggagccaaaggtcttcagagatccagggggccaggcaggaattataagagaaccctctgagggagcaaaggaagatccacatcaacattccacagctgctgaagaaaagactagcccgagtcaggaggatctcctgatgcagtccagcaaagaactttcacatgtggacctccctgaagattttctaaggagcaaagaaggaaatgtacagattacagctgaaactctgctaaaatccgccgaagtacaaggtatgaaggtcaatgggactaagacggataataatgaaggacacaaaaatggcaatgtgagtaaagatctctcagctggatgcggtgaattccaagaagtagacaaaatcatgaccagtgatgaggtttcagaaaccagcacattagttaccccagaacctttaacctttgtggaccctgtattaacagaagcaactcctaaagaaaaagaatgtgaagaattaaaaagttgtccttggttgtcattaccaggaaacagtgccatttctaatgtggacaatgggaaggaagagttgtgtaaaccaaacctggtctgtgaagcagatgacaatcaccaacagcttcatggccaccataatgaacaacccagttctacacatgatagtcccacagccacaagccctttgaaagaaaattctgaagtttcatgtttcacatcagacttgtctggtccagaatccagaacaatatccttagaaaactgtggttttgaaggtggtggtttgctaaagagatctgctgaaaagacagacagttcttatttttataggggggatgatcaagggaagaacttggcttctagagaagaaaatgaggaacggcttttgattcctaggagtgaaagaggtggaccttttctttttaatgccagggaaccagaaaaggagattagtggtcgttgttctggtgaaaaagagcctgttgtttctccaaaggaaaatatccacaataactgcattcaagacagtctccatacagggaactctagttctttaatgcccaattcttttactgaagccacagaagtaatgttaaataaaaatgatttgaaaattactgtacacgttcaaggtaacttgacaaaccctgaggaccataaagaaacttttactaatatgagccatcctggtggacactctgaagaaagcagtttttcctccttgatgcagattgaagaggcaggacagacaacccctgtagagcccaatatattaagtaaatctttttacactaaagactgtaactccttagtcagcatccagagaaatctggaaggcaacacccagttaaatgaagcatcatgtaatgattttctgtttgaaagaaaatccattgtgagtttaatgccagaggatcaaataagtcctgtaagtgaggtattaaaacccaagcaaggtactgctctgttgctaccatccccagaatttgattacagacctgagtcagaaaaagttatacagacctcacatgatgatattccacttttagatgaacagagcatagcctgtgagatgaatgaactttcttgtaccaatgaactggttgtaaacaaagtagaaagtgaatgtgttttaaatcaacaagtgtcccttaattctcaagaacatgcaaatttgccaactgactctctactgcatttaaacaaagagatgcctttagcaacaggcagagatgcccatcagagccatcaccctccattagagggtagagcagatgtcattgctgatatacaaaccattcccattcagacaaaaataaaagacatctctccaccaggtaaccaaacctgtggtgcctcttcaaactgtcccaccttaaacatcaaaccagtaagcctagagagaaaaaaggaaatggctgattcaggaacaaaagctctacattccaggctgcgctcaaataagagagaagcagctggctttcctcaagtggtctctgtcatagaatgtcacagcgttcaatctcaggatatctctagctgtcatcgtgtaagaaaaaatgtatcccaggaaaacatgtgttctgcttctgctgctttcaagtccagcaaaatcagcctgcaagttgataactctttgataacaaaatatgaaaatgcatttcagcaccgtgatcactgctgccaaggaacaggacactctgtggaaaaaagcagctgtaaagtgagttacacatcacaggaaagggaacttgatgggaaagaaacgaatggcagccttccaggagataagatcagaaacaaaatggtagcaggcttgttaaatagtggaatttcaaacaaaaccattcacacctccagtagcatcaaactcagtgaggaagggctggaaggaaaggagcaggatgtatccaaagaaactgtattttgtaagtataacatctctgatcatgctatacaagaactaaaccagactgtaaacattccaggtcctgaaaaagtgttggaccagtctcctactgttatgttctccagttttaaaaatgtaaaatcagttgaaacactcgatcagaaggcagatgaagtccttgactgtcagagtaaccaaaacagaccagatgaatgcaaaagtgaaggtcagtcagccaaggagatgctaagtagtgaccagagagagactgtcaccgagcctcacggggaggtaaaccacaaccaaaaggatctgctggtcagctcaggcagtaataactcactaccttgtggtagtccaaagaaatgcaatttgaaaggagcctttgtcaagatgtctggttgtgatgagtccacagaaggtatggtagacatcgtctacacggactgtagtaataagcttgcagaaggtgtgctggacgtgaaggcatctaatctactggattgtggtgcaaggcaagagaaactggcatttcaagaggactccaggagtaccttgtctcggagagaactggatgctgcacatacaggaacaactggtcaggattcagatttcccagttactgctgcttctacagtggactttctcaaaataaaaaaatcatgtgaagaaaacgtatgcagatctttaaaagactgtgaaatggaaaagtgtccagactcttgtgcccatgagatggagtctgttgcagatcatgaaccaaataaaagaatattgggcagagtaaatttgtctttaaatgatagccattatggacagcaagataaaggaacatctctcagagaaacacaagaaatgactgaaggatcaagactagaaccaaactctgagtttggcaaagaaagtacctttggaatttcctcaaaagagtcgatgtcttgccatgatgaaagctctgtttccctaagaagcctgaaatccattgaaataatgccttctcaagaaaattcagaaactaatgttaacagtgaagaaactgacctgaaaaatctttgtaaaccaaaagatggtgaaatgctttgtgaaaatgtaaaggactgcacagtccttcctgagatgaaggaaatagtatcaagagattggagtaattctagtgacagagacagcgtatgtacctgtgtggaaaagaatgcttgcaaagcttgtcaccctcacgagaattcctctgacagacatttgcctttgacagtgaaaacagatattaaagtgaaaggagaagaaaccgaagagcatcagaggggacgactgggttacttaactgttggggagcaatctgaggagttggttaccagagaaactggcgatggcgatcccgtgagcaacatctctcagacccattttaaatgccgggggatacttaatcatgctgaaaaacagcagagccctgaggttttggactacatgttgcagaaagaagagaaatatatacgtcaacaaaaagcacatacgatatcgcaacagtgcatatcatctagtctgttgttagatgatgcacaaaatcagaaccaaccgaaggctgacaaagatgagtccaccatgatcaatgaaatcaccctagcaaagctggccaaggacagcattgtggcacagactcagaagttagaagaccagaaggaggaaaggttacatcatccattaaggaaggacactgagtcatgcacaagtccttgccttcttggtgcccctcggaaagcacaagacccctcctctgctgggtgtgatcaaatacatggtgcctttgcgaagaaaggagttcttcccttaaagaagcagccccatcgaacttgtaagaaagtttcctatcaggagcaaatcattgttgggagaaaaataggtaaaatcagaagttctgcctttttaaagagttcttccaatcccatccccacaaaagcgcacagacttctcagtttgtgtactctgtctgcacctacacgattagaacctgaaacagcacctaccaagagcttggttagtcacataccaaagcagatgtctacaccgtgccatcccttgaggagcctgaattttaggaagactaccaaagaatcagccttactaaacaagctgtccatccttgcctccaaactggccccagccatgaagactcagaagctaagataccgacggtgttcctctgaacttcttccaatggctaaaagctacaagcgcctcagatataaaagactcctggacggattttcatccagcacagagcagctgaatccatatttggcagctagtggatgggataagaggcctaacagtaagcccatggcactttattctctcgaatccatcaagatgaccttcatagatttgagcaacaagatgccgtccctgctgtttggttctgaaatcttcccagtatcctttcatgtgaaatcatccagctcagattgcacgactgagtcctcaaggacttttcctgagcactgtgctccggcaaggcttgccttaggagaggccctccagtgcccgtctcaacctcccaagtggaccttttctttcttcttgtcccacggttgccctgggatggcaacattcagggaagacactggcgtccatagtcagacccacactcaggctcctccccagcctccagctcctctccaagactatggaggcactgccatagtccagaccagagcagactgctctgtccttggccttcacacacttctagcactttgttccccaggatgttaccgaatctggacaaaaaaacggagcttctccagccacatgcctaccatgcagaggctcttcatgacccagtttacacagggcctgaaagggttacggtctccagcctccatagcagacaaggtcttctgttctctgccctactcggtgggcagagtcctatccatttggagccagcatggtccttctgtctgctccttcgaaatctcttctcttcattcccctcactgcaagcggcaaccaagtctgggcaccacaagcagccacaccatgttaccatatgtgcctcttccaggcatggaagctacatataacaccagcggcagtcagacgaggctggagcctccattccctgccttggtaccaaagtcttgcttggtagcagaatcagctgtcagcaagctcctgctttcagcctctgagttccaggttcgtggattggatgagctggatggtgtgaaagcagcatgcccctgcccacagagcagccccccagaacagaaagaggctgagccagagaagaggccaaagaaagtctcacagattcgcatccggaaaaccattcctaggccagatcctaatcttacccccatgggccttcctcgacccaaaaggttaaagaagaaggagtttagtttagaagagatatataccaacaagaattataaatctcctcctgcaaacaggtgtttagagaccatctttgaggaacccaaggaacgaaatggtacactaatctcaatcagccaacagaagaggaagcgagttctagaatttcaggattttacagtcccgcgaaagaggagagctcgaggcaaagtcaaggtggcaggcagctttaccagggcccagaaggcagctgtgcagagtcgagagctggatgctcttttgatacagaaactaatggaactggagaccttctttgccaaggaagaggagcaggaacaatcatcaggctgttgagaagcgattcagtttgagggtctcaattttagggtttttttgttttgttttgtttttgggttttttttttttttttggacctccttggaaaaggttgcctaattttgccctaccgccaaaccactcaaaaatgcacagtccatgaatttttacctatttcaaggtgcaacctttttagaaactggtgaaggagggtcctctacttttactgctgagtatagaacctcaggaatgctccctttctcctggaaatggacctgaacgacatccagccacctcctcagtctctgccatccacaggaggaagcagcagcctatcttcagtaacactaggattccaaggacacacaggatttgcacgtccatatgaaagttccgctttgtttacggtggtgctagaccaagattattagaaacgtggcctagggagggggacctggcgtcctgtcctgtgtggtctcactggctcatttcagtagttgaggaaagatgagctgttgtgttttcttatcttttgtctgcccaggacctattgatgtgagtgtatgtgagagtgtttgtgtgtgtgtggctttttcccatcgttttctcccctctgtgactgggtcactagtgccagaggagcccgtccaggccccattcgaagtaagttgcactttttaatgttgtggtgtggattattttcatttgttttattttcttttttgttgttgtttttgtactattattgctgcatgtgtggagcctttaaatgtgattttaaaacatttttttaaggagaaaaacaatacatgtcttaagaatacatgataggcatttgacccagttgatcgctgcatggaagagacatttttcctattcatgtgtttcaggcaatcccttccccatctccagcttctagtgtaactcattagagggagcactttttttcatctgggttctcattcttgcccaccaaatacatgtatttattttagtgatttaagtaagagcaggtttctctcccgatcattgaaaaactactatggttgggtgtggtcttaatggtttttatctgaaatggtgttaggtaacaaaattgagtacaacggcttgggcagtgatacaggctgacccacagtatttgtggctttccaggcagcccgcttcaagtgtggggagagagtcggggtcatgtttcagacccagagatgtgttcctgcagtgggatctcaaaaatccccagccagccttctttgagggccacctcattgtactctgggctcctacgtcacatctaccggaactgtcaaatgctggagttagccgagtttctgggtttgtgcctgcaggagtctgtgggcagagggatgctgtgggtcagcagcctcgaggtcttgttccttttccactgaagtcctgtgtgtccatatcctgctccccttcccctccttctctaggggtttctctttctctctcaaaacaagagtttagagaattaacattccatggctagtgagtgggatgcaaaagtcatcgtcaggacaccagcatcacctcttcatatcctcctgggagccactggcatggagcagccgccgatgggaaccgtcagagttctagggacatttccaagtcagtctattagagaagagtgagtggcacgtcctggaatgttggccaactctcctaggtttcttttgcttccccatttgctagtggatggggagatgggttgggggtggggggtctctatgtgccttgcttttgcaggttgacagtctatgccacactggagcagaaaaactgacatgagccagagggaaaagtgtgccacggctatgttctaggcccactgcctcagacatagcattgagacgagtgaaatacacacttggtcatccacggaggcttccaaggccatggccaaatacagttagaagagagccaggcttccgtaccagctctgaatgatgctaaccagattctgtcattctacatccactttgcccagactgtatagacacgacctatgtttcacctcaatacctctcccttcctgggacagggttcttagacactaaatgcttctctctgacttttttgcttaagggagtgggatgagtagtacattttgcccttgtccaggcatgtttaaggagctcctactggacaggttgcagactagcagtgagtcaacagagccctgtttgccagctctgttgccagtatagatgcagtgatgtggcggctatgtttcccagagacaacagtgggcacagctatagtgtcaccaacatggcagagatagtttcaactgtgcctgttacaggtgtggcactcgaaggaccagaagcagcggtttggaacatgggtaactgggagcagaggactggaagaaacagagctgggctccttccctgtcctgacaatgtaggagaggagttgttgtgaggccagccctgcccgtcgttgaaattctggacctaccctctagctaggtcccttcccctgctccaaagttgagaagggggccccactgcaaacttgaaattacttacctgaaggtgatgtatatacctaggctccagctgcgctcagccacacctgtcttaacattcagtttcggcactgagccagctgcagtgttgtcaggggtccccaggcccgtggtccctaaccacgatgggacatggtaatcggctgctggcacaccacctgcccagagctacaggaggtctggttctggggtggagttggtacagtttctgagtatgggaacttccctccccaagtggtgggaagttacagttaactacagcttactcaactatcacttccagaggtttagtgtttttaatatgggaaagaggagaaatctcaggtctaatcagggttctgcccatcagcttttcactgaaactttcaactgtgttttgttttttgtttttttttccatctttcagtttctagctgtgtttgccttctccctccgcgttccctcctctttttttgcttttggtctcctttccagcttcatgtctccatgagttcagctgtacctcatctcctgttaaagcagatcatgtccactttttcttactgaccttactctaagctacagtagctgagggaggtacggtgaagacatgtagcgtttgccttattcggagcctgaggagcccagaaacccatgctgtgaatcccaaaactcagcgctcctcaagagctgtgaaaatcatgatactttgtcacaattttgcctgaaagggtctttggcacgggctccagagccaacctgaggtccattccagatcccactatctgggcgtgagacctcccccgtggctccttccttgcccactgagccaagagcagcagggagcgtacaggacgggagcagcagatccaaggccgcggtgcagccaatgaatgcacggccgtcgctccgtctccaggctggaattccgtctcataatcaatgccatgtacattaagatctgcgaaagaccaacttttaggcagtgatacttttctcccattccctggggtggggggagtatgcagttggtgctttctgtaattcccttgttctgttttgtttctgtaagcttttcccctggtgtcatggaaaggacttcttaaataaccacattgtgggtggctgtatccaaagtttaaataattggccagaagtgcagagtatcctttcctggattcgtgtcagaaaagggctccttgccacaactgaacttactgtataaaaacctggctagggagatttaattttactaaaattacagtttaatgttaccgtctagccacaaatcaagcagcaaaagctattttgatgatgaaagggggtccccgttgagctggccatctagtgcagtgtgctctcagattccatgtttgttgattgtgtgtcttcacaagcccctctctggtgctgaattggatttgaattcttggtgagaggcctcagcatctccttgggctggtctgggccagtaaaaatagctgcctgacatgtttatatattatcatggtcagtagttcaatgaaatttgtacatttttggtaacattggtatacatgatgcccctgcagttccttttctgtttggtagtttgtgactctaagatttccactgttatgtgtgttaatttatgaaaataaatttttttgaaaacctttcaaa

SEQ ID NO: 169394 - DNA, 1849 bp, Homo sapiens
  Payload ID: 13344
  Gene Symbol: PRR14L
  Gene Name: proline rich 14-like
  ENST ID: ENST00000330495
  CDS Start-End: 1-1357
gaccttcatagatttgagcaacaagatgccgtccctgctgtttggttctgaaatcttcccagtatcctttcatgtgaaatcatccagctcagattgcacgactgagtcctcaaggacttttcctgagcactgtgctccggcaaggcttgccttaggagaggccctccagtgcccgtctcaacctcccaagtggaccttttctttcttcttgtcccacggttgccctgggatggcaacattcagggaagacactggcgtccatagtcagacccacactcaggctcctccccagcctccagctcctctccaagactatggaggcactgccatagtccagaccagagcagactgctctgtccttggccttcacacacttctagcactttgttccccaggatgttaccgaatctggacaaaaaaacggagcttctccagccacatgcctaccatgcagaggctcttcatgacccagtttacacagggcctgaaagggttacggtctccagcctccatagcagacaaggtcttctgttctctgccctactcggtgggcagagtcctatccatttggagccagcatggtccttctgtctgctccttcgaaatctcttctcttcattcccctcactgcaagcggcaaccaagtctgggcaccacaagcagccacaccatgttaccatatgtgcctcttccaggcatggaagctacatataacaccagcggcagtcagacgaggctggagcctccattccctgccttggtaccaaagtcttgcttggtagcagaatcagctgtcagcaagctcctgctttcagcctctgagttccaggttcgtggattggatgagctggatggtgtgaaagcagcatgcccctgcccacagagcagccccccagaacagaaagaggctgagccagagaagaggccaaagaaagtctcacagattcgcatccggaaaaccattcctaggccagatcctaatcttacccccatgggccttcctcgacccaaaaggttaaagaagaaggagtttagtttagaagagatatataccaacaagaattataaatctcctcctgcaaacagggacctggattctagctgcccgagcactgacagcgaaaccgggcacttcctggtattcggatatgcgcagcgccaagcgcagccgcacccactgctggcctcacgccgtctgattggctgcagctctccggaggggcggggccatccgagaagctatccatattggaggaggctgctagtcctttgctggtacctgccgggctggagagcggggagggtcacgtggttaagactcgccacgtgggccgggcgcggtgactcaagcctgtaatcccagcactttgggaggcagaggcgggcggatcacttgagacaggcctggccaacctggtgactctactaaaaatacaaaaaattagccgggagtggtggcgcgcgcctgtaatcccagctactcgggaagctgaggcagaagaatcgcttgaactcgggagactgtaggtgccgtgagccgaggtcgcgccactgcactccagcctgggagaaagactcgcctaagcagtttctctcttttcttttgcatttttaatcttagacttttggagatgttgaaatggtcgctgaaacactgcaaacacagggatgggggacagatcccaaagtatagcagctactcatgagtcccagcgcccctcctgtccttcccctactgctgcctaagtggtcttcctaaaacacaagtttgcacttgtcagaaccactccttaagatctctcatgggttgccctcgtctccaaataaagatactaaccactgagctggc

SEQ ID NO: 169395 - DNA, 2841 bp, Homo sapiens
  Payload ID: 13344
  Gene Symbol: PRR14L
  Gene Name: proline rich 14-like
  ENST ID: ENST00000431684
  CDS Start-End: 1-2028
aaagtgaaaggagaagaaaccgaagagcatcagaggggacgactgggttacttaactgttggggagcaatctgaggagttggttaccagagaaactggcgatggcgatcccgtgagcaacatctctcagacccattttaaatgccgggggatacttaatcatgctgaaaaacagcagagccctgaggttttggactacatgttgcagaaagaagagaaatatatacgtcaacaaaaagcacatacgatatcgcaacagtgcatatcatctagtctgttgttagatgatgcacaaaatcagaaccaaccgaaggctgacaaagatgagtccaccatgatcaatgaaatcaccctagcaaagctggccaaggacagcattgtggcacagactcagaagttagaagaccagaaggaggaaaggttacatcatccattaaggaaggacactgagtcatgcacaagtccttgccttcttggtgcccctcggaaagcacaagacccctcctctgctgggtgtgatcaaatacatggtgcctttgcgaagaaaggagttcttcccttaaagaagcagccccatcgaacttgtaagaaagtttcctatcaggagcaaatcattgttgggagaaaaataggtaaaatcagaagttctgcctttttaaagagttcttccaatcccatccccacaaaagcgcacagacttctcagtttgtgtactctgtctgcacctacacgattagaacctgaaacagcacctaccaagagcttggttagtcacataccaaagcagatgtctacaccgtgccatcccttgaggagcctgaattttaggaagactaccaaagaatcagccttactaaacaagctgtccatccttgcctccaaactggccccagccatgaagactcagaagctaagataccgacggtgttcctctgaacttcttccaatggctaaaagctacaagcgcctcagatataaaagactcctggacggattttcatccagcacagagcagctgaatccatatttggcagctagtggatgggataagaggcctaacagtaagcccatggcactttattctctcgaatccatcaagatgaccttcatagatttgagcaacaagatgccgtccctgctgtttggttctgaaatcttcccagtatcctttcatgtgaaatcatccagctcagattgcacgactgagtcctcaaggacttttcctgagcactgtgctccggcaaggcttgccttaggagaggccctccagtgcccgtctcaacctcccaagtggaccttttctttcttcttgtcccacggttgccctgggatggcaacattcagggaagacactggcgtccatagtcagacccacactcaggctcctccccagcctccagctcctctccaagactatggaggcactgccatagtccagaccagagcagactgctctgtccttggccttcacacacttctagcactttgttccccaggatgttaccgaatctggacaaaaaaacggagcttctccagccacatgcctaccatgcagaggctcttcatgacccagtttacacagggcctgaaagggttacggtctccagcctccatagcagacaaggtcttctgttctctgccctactcggtgggcagagtcctatccatttggagccagcatggtccttctgtctgctccttcgaaatctcttctcttcattcccctcactgcaagcggcaaccaagtctgggcaccacaagcagccacaccatgttaccatatgtgcctcttccaggcatggaagctacatataacaccagcggcagtcagacgaggctggagcctccattccctgccttggtaccaaagtcttgcttggtagcagaatcagctgtcagcaagctcctgctttcagcctctgagttccaggttcgtggattggatgagctggatggtgtgaaagcagcatgcccctgcccacagagcagccccccagaacagaaagaggttaaagaagaaggagtttagtttagaagagatatataccaacaagaattataaatctcctcctgcaaacaggtgtttagagaccatctttgaggaacccaaggaacgaaatggtacactaatctcaatcagccaacagaagaggaagcgagttctagaatttcaggattttacagtcccgcgaaagaggagagctcgaggcaaagtcaaggtggcaggcagctttaccagggcccagaaggcagctgtgcagagtcgagagctggatgctcttttgatacagaaactaatggaactggagaccttctttgccaaggaagaggagcaggaacaatcatcaggctgttgagaagcgattcagtttgagggtctcaattttagggtttttttgttttgttttgtttttgggttttttttttttttttggacctccttggaaaaggttgcctaattttgccctaccgccaaaccactcaaaaatgcacagtccatgaatttttacctatttcaaggtgcaacctttttagaaactggtgaaggagggtcctctacttttactgctgagtatagaacctcaggaatgctccctttctcctggaaatggacctgaacgacatccagccacctcctcagtctctgccatccacaggaggaagcagcagcctatcttcagtaacactaggattccaaggacacacaggatttgcacgtccatatgaaagttccgctttgtttacggtggtgctagaccaagattattagaaacgtggcctagggagggggacctggcgtcctgtcctgtgtggtctcactggctcatttcagtagttgagg

SEQ ID NO: 169396 - DNA, 3308 bp, Homo sapiens
  Payload ID: 13344
  Gene Symbol: PRR14L
  Gene Name: proline rich 14-like
  ENST ID: ENST00000432485
  CDS Start-End: 1-625
ggagcctccattccctgccttggtaccaaagtcttgcttggtagcagaatcagctgtcagcaagctcctgctttcagcctctgagttccaggttcgtggattggatgagctggatggtgtgaaagcagcatgcccctgcccacagagcagccccccagaacagaaagaggctgagccagagaagaggccaaagaaagtctcacagattcgcatccggaaaaccattcctaggccagatcctaatcttacccccatgggccttcctcgacccaaaaggttaaagaagaaggagtttagtttagaagagatatataccaacaagaattataaatctcctcctgcaaacaggtgtttagagaccatctttgaggaacccaaggaacgaaatggtacactaatctcaatcagccaacagaagaggaagcgagttctagaatttcaggattttacagtcccgcgaaagaggagagctcgaggcaaagtcaaggtggcaggcagctttaccagggcccagaaggcagctgtgcagagtcgagagctggatgctcttttgatacagaaactaatggaactggagaccttctttgccaaggaagaggagcaggaacaatcatcaggctgttgagaagcgattcagtttgagggtctcaattttagggtttttttgttttgttttgtttttgggttttttttttttttttggacctccttggaaaaggttgcctaattttgccctaccgccaaaccactcaaaaatgcacagtccatgaatttttacctatttcaaggtgcaacctttttagaaactggtgaaggagggtcctctacttttactgctgagtatagaacctcaggaatgctccctttctcctggaaatggacctgaacgacatccagccacctcctcagtctctgccatccacaggaggaagcagcagcctatcttcagtaacactaggattccaaggacacacaggatttgcacgtccatatgaaagttccgctttgtttacggtggtgctagaccaagattattagaaacgtggcctagggagggggacctggcgtcctgtcctgtgtggtctcactggctcatttcagtagttgaggaaagatgagctgttgtgttttcttatcttttgtctgcccaggacctattgatgtgagtgtatgtgagagtgtttgtgtgtgtgtggctttttcccatcgttttctcccctctgtgactgggtcactagtgccagaggagcccgtccaggccccattcgaagtaagttgcactttttaatgttgtggtgtggattattttcatttgttttattttcttttttgttgttgtttttgtactattattgctgcatgtgtggagcctttaaatgtgattttaaaacatttttttaaggagaaaaacaatacatgtcttaagaatacatgataggcatttgacccagttgatcgctgcatggaagagacatttttcctattcatgtgtttcaggcaatcccttccccatctccagcttctagtgtaactcattagagggagcactttttttcatctgggttctcattcttgcccaccaaatacatgtatttattttagtgatttaagtaagagcaggtttctctcccgatcattgaaaaactactatggttgggtgtggtcttaatggtttttatctgaaatggtgttaggtaacaaaattgagtacaacggcttgggcagtgatacaggctgacccacagtatttgtggctttccaggcagcccgcttcaagtgtggggagagagtcggggtcatgtttcagacccagagatgtgttcctgcagtgggatctcaaaaatccccagccagccttctttgagggccacctcattgtactctgggctcctacgtcacatctaccggaactgtcaaatgctggagttagccgagtttctgggtttgtgcctgcaggagtctgtgggcagagggatgctgtgggtcagcagcctcgaggtcttgttccttttccactgaagtcctgtgtgtccatatcctgctccccttcccctccttctctaggggtttctctttctctctcaaaacaagagtttagagaattaacattccatggctagtgagtgggatgcaaaagtcatcgtcaggacaccagcatcacctcttcatatcctcctgggagccactggcatggagcagccgccgatgggaaccgtcagagttctagggacatttccaagtcagtctattagagaagagtgagtggcacgtcctggaatgttggccaactctcctaggtttcttttgcttccccatttgctagtggatggggagatgggttgggggtggggggtctctatgtgccttgcttttgcaggttgacagtctatgccacactggagcagaaaaactgacatgagccagagggaaaagtgtgccacggctatgttctaggcccactgcctcagacatagcattgagacgagtgaaatacacacttggtcatccacggaggcttccaaggccgcggtgcagccaatgaatgcacggccgtcgctccgtctccaggctggaattccgtctcataatcaatgccatgtacattaagatctgcgaaagaccaacttttaggcagtgatacttttctcccattccctggggtggggggagtatgcagttggtgctttctgtaattcccttgttctgttttgtttctgtaagcttttcccctggtgtcatggaaaggacttcttaaataaccacattgtgggtggctgtatccaaagtttaaataattggccagaagtgcagagtatcctttcctggattcgtgtcagaaaagggctccttgccacaactgaacttactgtataaaaacctggctagggagatttaattttactaaaattacagtttaatgttaccgtctagccacaaatcaagcagcaaaagctattttgatgatgaaagggggtccccgttgagctggccatctagtgcagtgtgctctcagattccatgtttgttgattgtgtgtcttcacaagcccctctctggtgctgaattggatttgaattcttggtgagaggcctcagcatctccttgggctggtctgggccagtaaaaatagctgcctgacatgtttatatattatcatggtcagtagttcaatgaaatttgtacatttttggtaacattggtatacatgatgcccctgcagttccttttctgtttggtagtttgtgactctaagatttccactgttatgtgtgttaatttatgaaaataaatttttttgaaaacctttc

SEQ ID NO: 169397 - DNA, 661 bp, Homo sapiens
  Payload ID: 13344
  Gene Symbol: PRR14L
  Gene Name: proline rich 14-like
  ENST ID: ENST00000412743
  CDS Start-End: 121-661
gggaccatagagacgaagaggtggcggcggccggagcgcccccggcctctgtcggctccgtaggctcagggtgaatcatttgatgtaaaagacttgactccataatctgcatctgtcctaatgctgtcatctggagtagagactcagccagttccacttgattcctccatgtctgccgtggtacaggaattatactctgaactcccagtaagtgtctccagagagcttcatgctgaccctgagccaagtgtgattccagatgtaaaacctggagcctcaagctctcttttaagtcagaatagggcattgcccttggagctgcagaggactcatgtggagagttgttgtgaagaaacctatgagaccttggatcatgggagtgagcctgggcgatgtgggctagtggactccacagcaggaggttctgtggcatctgggatcttggatagggcaaagagaagcgagagcatggagccaaaggtcttcagagatccagggggccaggcaggaattataagagaaccctctgagggagcaaaggaagatccacatcaacattccacagctgctgaagaaaagactagcccgagtcaggaggatctcctgatgcagtccagcaaagaactttcacatgtggacctccctgaagattttctaagga

SEQ ID NO: 169398 - DNA, 1678 bp, Homo sapiens
  Payload ID: 13345
  Gene Symbol: PRR15
  Gene Name: proline rich 15
  Uniprot ID: Q8IV56
  ENST ID: ENST00000319694
  CDS Start-End: 713-1102
gtggcagcggtgaccgcctcctgggttattttcttttctcccccagctgccccagggttctggtttcccgaatcacttggcaaataaccagcaggtgggcagatgtcttttttgcgttcctacggacgcgtaggcaagttcgatgcgccggagtgaacagccagggtcccatctctcagccggctcccgggcggtgctagcagggaagagggacgcgccggcgaatgaaacactactagcccggaaagccgccctggaccttccacccgggcagcgagtctggcggcccctcgccgccgccccctccgaccagaacagactgcgctgcgagccccgggcttccgccgcagcgcgcagcaattggaggtgccagaggagaccagcagcagcacttgatttagctgggctgcgggaattccgacctgtacactttccagaagcctgatctctccaagtccgcgcccagggactcgagccccggcttccaggttgacccgagcgcgcccccttcgtgctctcggccgcgttcaccgcgcgaggcctccgggtcctgttaagcccgagcagcacaggccgctgcctcagcatccaccccgcagcccacgtgtggcaagccggggaaggggtggagtgaacggccggagaccacgtggagaaaggggccgctttggcccttccatctgggtgccgggagcccctaggccctccggccatggccgacagcggcgatgctggcagctccggcccctggtggaaatcgctcaccaacagcagaaagaaaagcaaggaagccgcagtgggggtgccgcctcccgcccagcccgctcccggggagcccacgccacctgcgccgcccagcccggactggaccagcagctcccgggagaaccagcaccccaatctcctcgggggcgccggcgagccccccaaaccagacaagttatacggggacaaatccggcagcagccgccgcaatttgaagatctcgcgctccggccgctttaaggagaagaggaaagtgcgcgccacgctgctcccggaggcgggcaggtccccggaggaggcaggctttcctggtgacccccacgaggacaagcagtagccccaatagcctgcgcgctccaggactgcctacccagcactaccccaaacccccagttccaaacccgagacttcaggcccgcccccttacgcgttgtctcattccaccaaattcagaatatttacacaatgccttcatgattttatttttctggaaattgaagtgtcaattgggttctcaatatttcatgactccaaggatgcattaaatatttatttgtggtaagagaagatacctgccgcggaggagggtggcataattatttttttttcaaaaagctattctggggccctggccccctggctcctgtcacagctcagcttgaactctgtagcctctcaaatgaagaaggtggctgttatttaggactctgtggaaagcaaatcacagtgctgtttttaatgcctgagaaatgcactttaggggtagacttataccttaagtgaaggagtgggggaggaagaagcattcttaagtagaagcattttaaaataaggcaggattgcttttaatgttaaactacaaaactgtacagcctattttagtgtggactattaaaacccttgcactgtaagg

SEQ ID NO: 169399 - DNA, 503 bp, Homo sapiens
  Payload ID: 13345
  Gene Symbol: PRR15
  Gene Name: proline rich 15
  ENST ID: ENST00000450427
  CDS Start-End: 450-503
agtaaaaggaagaattaggatggcggttttcaagggaagttaagtctagacatgcttctttgaaagtcacaaggcagaagtggtcaaaagtagaatttaaaagaaccaaaacaaatatcataagcttgtccttctctcctactgggatataaattctcctaagtatctcatcgaaaaggctcctgggacgaaagtcgatgggggcaaatcttggagggaaatttcgtgactgtttgaccatggactaattaataccgttcacctgtagagaggatgcacttggttcccagcgccctcctcccagcacaggccgctgcctcagcatccaccccgcagcccacgtgtggcaagccggggaaggggtggagtgaacggccggagaccacgtggagaaaggggccgctttggcccttccatctgggtgccgggagcccctaggccctccggccatggccgacagcggcgatgctggcagctccggcccctggtggaaatcgctcacc

SEQ ID NO: 169400 - DNA, 1519 bp, Homo sapiens
  Payload ID: 13346
  Gene Symbol: PRR15L
  Gene Name: proline rich 15-like
  Uniprot ID: Q9BU68
  ENST ID: ENST00000300557
  CDS Start-End: 252-563
gactccaggagctgcagcagagcaggtaacagctcttgcacctgtttctcttgcacctgacgtgcagctgctcctacccacctctcctggctgagccttgcctgatacagcagcccggaggcaccacttgcttcccgagtctcaccctcccaggcagctcctacactcaactgcttctctaggaaaggtctcacctccagcctggagcagtcgggattacagaaagccccatccttggcttagggagcgccatgacgactgaaattggttggtggaagctgactttcctccggaaaaagaaatccactcccaaagtgctgtatgagatccctgacacctatgcccaaacagagggagatgcagaacccccgaggcctgacgctggaggccccaacagcgactttaacacccgcctggagaagattgtggacaagagcacaaagggcaagcacgtcaaggtctccaactcaggacgcttcaaggagaagaagaaagtgagagccacgctggcagagaaccctaacctctttgatgatcacgaggaaggacggtcatcaaagtgaagggctgaggagggtgctagcacctcttggctccctgccatcagccagatctgagacaggaccttgccacgctggcctctttggccatagctgaagctgtggggccagttgatacctgctggcaggaaatggctgttttttaggtttgtatttatgtgccgccacttttgtaaggcctgggagatcccagggtcctccaccctccccctgaccacatacaaaggcactctagttcaagagtgaaaagtctcacccaggaggaacagccctccttgaagcaatggcagggccagcagggaggtgggcatggcagggaatggagagagtgagccagacagacttcacctccttactggacacagggtcaagggcgagtttcaattgctgctccctttactttctctacctgtgactactccctggaccaatcctgaggagggcacattttccagaagccacgtgataggggctggtttctgtggagccagaggcagagacactgaacttgagctcacctcctaacaccggcagtaaacttcctggaactttgccctcaggtgcggaggggacagaggaccctggcactctgttagggtgctgtagaagactagattgatggtagtttggcctgttagttcctgttttggccatgacttttgcagatggcaagtcacacaccctcaaagggaagctacacgggccaaatcgggggagtgggtggggaattttctcctctccctttcctactataatagtatttaagacatatcagctccagagatgagtcctggagccttgaattttgtttaacaaaataattgtaggtttctctctgtaataacaacgctggaaaggcagagaacctcttttatgctcatgtcttgcatttattgagatgactgtttctcatgcctttatgttccttcatgtaagtaaagtggacctttgtgctcaaa

SEQ ID NO: 169401 - DNA, 1826 bp, Homo sapiens
  Payload ID: 13347
  Gene Symbol: PRR16
  Gene Name: proline rich 16
  Uniprot ID: Q569H4
  ENST ID: ENST00000379551
  CDS Start-End: 358-1203
gccgcccggccgagcgcggagcgcagccactcgccgctgcccagggagcgcccaagatgtggggggaccggggcggcagcggccgtagcagcgccagggacgggggcacgcagcagcctccgctcgcccgcctgtcctgacctgcctcgcttgcccccaaagaatgtcagccaagtccaaggggaacccctcctcgtcctgtccagccgagggaccgccggcagcctccaaaaccaaggtgaaggaacagatcaagatcatcgtggaggatttggaattagtcctgggcgacctgaaggacgtggccaaggaacttaaggagatgaagtcccactctgttgcccaggctagagtgcaatggcacaatctgggctcactgcaacctctgcctcccaggttcaagctattctcctgcctcagcctgcctcagtgcgccactacgcctgggtggttgaccagattgacaccctgacctctgacctacagctggaggatgagatgactgacagctccaaaacggacacgctgaatagtagctcaagtggcacaacagcctccagcctagagaagatcaaagtgcaggctaatgcaccgcttattaaacccccagcacacccgtctgctatcctcacggtcctgagaaagccaaaccctccaccacctcctccaaggttgacacctgtgaagtgtgaagaccccaaaagggtggttccaactgccaatcctgtaaaaaccaatggcacccttctacgaaatggaggcttaccaggtggacctaacaaaattccaaatggagatatctgctgcatacccaacagtaacttggacaaggctccagtccagcttctgatgcatagacctgaaaaagacagatgtccccaggcagggcctcgagaacgagttcggtttaatgaaaaagtacagtaccatggctattgtcctgactgtgatacccggtataacataaaaaacagggaggtccacttacacagtgaacctgtccacccaccgggaaagattcctcaccaaggccctcccctccctcctacaccccatctccctcctttcccactagaaaatgggggaatgggaataagccacagtaacagcttcccccctatcagacctgcaactgtgcctcctcccactgcaccaaaaccacagaagacgatcttgaggaagtcaaccactacaaccgtgtgatgtatgccattaaaaaaattgtttttttaattttctatattataaacataaaataagtaatgagcactttctactcaagcaataaaaagcccaaatatattaatcctgcattcagcaaagtggcataaaaatcacctggtaagtatgcagcacattgcttatatcctgggtatgcattattttaaatgttgtatcattaaaaacctcagaatgatgaaaaatatgaatgatgcattgtttttgcaattgacctatgacaaactgtgaacctgcagatttcacctattttgatttactataagagctgggatttgattcattttatttatgcctaagtcatctatgcattaacatgtcatattcttaactttgatctaatgctttttactaggaaattttaatactgaaggactattttattatttttttctaaagatgtttgtcactagtttttcattattaaatgctgaggccaataccaagaagtttattttctatattatacaattatgaattacatgctcagctatatatgtaataaaatactttggtctgtggaaatattgttaaatcaataaacaatagtaaataatgacaaaagcaaatgttcctcagaattaaaa

SEQ ID NO: 169402 - DNA, 1747 bp, Homo sapiens
  Payload ID: 13347
  Gene Symbol: PRR16
  Gene Name: proline rich 16
  Uniprot ID: Q569H4
  ENST ID: ENST00000407149
  CDS Start-End: 210-1124
gagccgagcgccgcgtctcgggagttgatggcagcaccactgtgcggccgcccggccgagcgcggagcgcagccactcgccgctgcccagggagcgcccaagatgtggggggaccggggcggcagcggccgtagcagcgccagggacgggggcacgcagcagcctccgctcgcccgcctgtcctgacctgcctcgcttgcccccaaagaatgtcagccaagtccaaggggaacccctcctcgtcctgtccagccgagggaccgccggcagcctccaaaaccaaggtgaaggaacagatcaagatcatcgtggaggatttggaattagtcctgggcgacctgaaggacgtggccaaggaacttaaggaggtggttgaccagattgacaccctgacctctgacctacagctggaggatgagatgactgacagctccaaaacggacacgctgaatagtagctcaagtggcacaacagcctccagcctagagaagatcaaagtgcaggctaatgcaccgcttattaaacccccagcacacccgtctgctatcctcacggtcctgagaaagccaaaccctccaccacctcctccaaggttgacacctgtgaagtgtgaagaccccaaaagggtggttccaactgccaatcctgtaaaaaccaatggcacccttctacgaaatggaggcttaccaggtggacctaacaaaattccaaatggagatatctgctgcatacccaacagtaacttggacaaggctccagtccagcttctgatgcatagacctgaaaaagacagatgtccccaggcagggcctcgagaacgagttcggtttaatgaaaaagtacagtaccatggctattgtcctgactgtgatacccggtataacataaaaaacagggaggtccacttacacagtgaacctgtccacccaccgggaaagattcctcaccaaggccctcccctccctcctacaccccatctccctcctttcccactagaaaatgggggaatgggaataagccacagtaacagcttcccccctatcagacctgcaactgtgcctcctcccactgcaccaaaaccacagaagacgatcttgaggaagtcaaccactacaaccgtgtgatgtatgccattaaaaaaattgtttttttaattttctatattataaacataaaataagtaatgagcactttctactcaagcaataaaaagcccaaatatattaatcctgcattcagcaaagtggcataaaaatcacctggtaagtatgcagcacattgcttatatcctgggtatgcattattttaaatgttgtatcattaaaaacctcagaatgatgaaaaatatgaatgatgcattgtttttgcaattgacctatgacaaactgtgaacctgcagatttcacctattttgatttactataagagctgggatttgattcattttatttatgcctaagtcatctatgcattaacatgtcatattcttaactttgatctaatgctttttactaggaaattttaatactgaaggactattttattatttttttctaaagatgtttgtcactagtttttcattattaaatgctgaggccaataccaagaagtttattttctatattatacaattatgaattacatgctcagctatatatgtaataaaatactttggtctgtggaaatattgttaaatcaataaacaatagtaaataatgacaaaagcaaatgttcctcagaattaaaa

SEQ ID NO: 169403 - DNA, 1152 bp, Homo sapiens
  Payload ID: 13347
  Gene Symbol: PRR16
  Gene Name: proline rich 16
  ENST ID: ENST00000446965
  CDS Start-End: 181-936
ggaaacagtgctgcaggcatacagtgacaacaggacatcaggaaatgcccaagaagtttgttaggtgctgtgtcatgaatcaagtcttcattttaatgtgttctaattgttgtaaaacaagagggaatggtatttggaatttagctatatttatcttctcaatcaaattctacttcagaggtggttgaccagattgacaccctgacctctgacctacagctggaggatgagatgactgacagctccaaaacggacacgctgaatagtagctcaagtggcacaacagcctccagcctagagaagatcaaagtgcaggctaatgcaccgcttattaaacccccagcacacccgtctgctatcctcacggtcctgagaaagccaaaccctccaccacctcctccaaggttgacacctgtgaagtgtgaagaccccaaaagggtggttccaactgccaatcctgtaaaaaccaatggcacccttctacgaaatggaggcttaccaggtggacctaacaaaattccaaatggagatatctgctgcatacccaacagtaacttggacaaggctccagtccagcttctgatgcatagacctgaaaaagacagatgtccccaggcagggcctcgagaacgagttcggtttaatgaaaaagtacagtaccatggctattgtcctgactgtgatacccggtataacataaaaaacagggaggtccacttacacagtgaacctgtccacccaccgggaaagattcctcaccaaggccctcccctccctcctacaccccatctccctcctttcccactagaaaatgggggaatgggaataagccacagtaacagcttcccccctatcagacctgcaactgtgcctcctcccactgcaccaaaaccacagaagacgatcttgaggaagtcaaccactacaaccgtgtgatgtatgccattaaaaaaattgtttttttaattttctatattataaacataaaataagtaatgagcactttctactcaagcaataaaaagcccaaatatattaatcctgcattcagcaaagtggcataaaaatcacctggtaagtatgcagcacattgcttatatcctgggtatgcattattttaaatgttgtatcattaaaaacctcagaatgatg

SEQ ID NO: 169404 - DNA, 559 bp, Homo sapiens
  Payload ID: 13347
  Gene Symbol: PRR16
  Gene Name: proline rich 16
  ENST ID: ENST00000509923
  CDS Start-End: 133-559
ggctgccggcggcgtcgcggagctggtagcagagtcccagcgcgccgctcactactgaatggggtcctggtgcggttctcggtggttgaccagattgacaccctgacctctgacctacagctggaggatgagatgactgacagctccaaaacggacacgctgaatagtagctcaagtggcacaacagcctccagcctagagaagatcaaagtgcaggctaatgcaccgcttattaaacccccagcacacccgtctgctatcctcacggtcctgagaaagccaaaccctccaccacctcctccaaggttgacacctgtgaagtgtgaagaccccaaaagggtggttccaactgccaatcctgtaaaaaccaatggcacccttctacgaaatggaggcttaccaggtggacctaacaaaattccaaatggagatatctgctgcatacccaacagtaacttggacaaggctccagtccagcttctgatgcatagacctgaaaaagacagatgtccccaggcagggcctcgagaacgagttcggtttaatgaaaaagtacagt

SEQ ID NO: 169405 - DNA, 1298 bp, Homo sapiens
  Payload ID: 13347
  Gene Symbol: PRR16
  Gene Name: proline rich 16
  Uniprot ID: Q569H4
  ENST ID: ENST00000505123
  CDS Start-End: 373-1077
agcatgtctggtatccagcttttaatccgtaatgccaggcactcccaaataaaaggaaccaatcaactgatgcatgcattctctagcaggtcattccagaagctccattacctactcccacctccccacatgatgaaacagggaaacagtgctgcaggcatacagtgacaacaggacatcaggaaatgcccaagaagtttgttaggtgctgtgtcatgaatcaagtcttcattttaatgtgttctaattgttgtaaaacaagagggaatggtatttggaatttagctatatttatcttctcaatcaaattctacttcagaggtggttgaccagattgacaccctgacctctgacctacagctggaggatgagatgactgacagctccaaaacggacacgctgaatagtagctcaagtggcacaacagcctccagcctagagaagatcaaagtgcaggctaatgcaccgcttattaaacccccagcacacccgtctgctatcctcacggtcctgagaaagccaaaccctccaccacctcctccaaggttgacacctgtgaagtgtgaagaccccaaaagggtggttccaactgccaatcctgtaaaaaccaatggcacccttctacgaaatggaggcttaccaggtggacctaacaaaattccaaatggagatatctgctgcatacccaacagtaacttggacaaggctccagtccagcttctgatgcatagacctgaaaaagacagatgtccccaggcagggcctcgagaacgagttcggtttaatgaaaaagtacagtaccatggctattgtcctgactgtgatacccggtataacataaaaaacagggaggtccacttacacagtgaacctgtccacccaccgggaaagattcctcaccaaggccctcccctccctcctacaccccatctccctcctttcccactagaaaatgggggaatgggaataagccacagtaacagcttcccccctatcagacctgcaactgtgcctcctcccactgcaccaaaaccacagaagacgatcttgaggaagtcaaccactacaaccgtgtgatgtatgccattaaaaaaattgtttttttaattttctatattataaacataaaataagtaatgagcactttctactcaagcaataaaaagcccaaatatattaatcctgcattcagcaaagtggcataaaaatcacctggtaagtatgcagcacattgcttatatcctgggtatgcattattttaaatgttgtatcattaaaaacctcagaatgatgaaaaa

SEQ ID NO: 169406 - DNA, 3084 bp, Homo sapiens
  Payload ID: 13348
  Gene Symbol: PRR18
  Gene Name: proline rich 18
  Uniprot ID: Q8N4B5
  ENST ID: ENST00000322583
  CDS Start-End: 242-1129
gcgggaggcggttcctgcagggtccagtcccgggagcacccccaggaggaggggagggtgggagcgcctctctttgagtccccgggtttggtcgctgggatgtgaggaagccggagaggccgcggctggacgcaggtgggtgtggaggggccgcccggactgcggggacccgctccgcgcacagtggctgagcgcccgcctctctttccaggggctgaggatccggcggctcggctgcactatgcccttcccgcccatgccgccgccgcccgcccccgccccgggggcccaagccgcgcgccagttaccccggaggccctgcgccgcgggggacaagaagaagaggcccccacagcggcccgaggggctcctctccagctcctggccctccgccacgctcaagaggccgccggcccggcgcggccccggcctggacaggacgcagccgccggcccctccgggcgtctccccccaggccttgcccagccgcgcgcgggccccagccacgtgcgccccgccccggccggcaggctccggccacagcccagcgaggaccacctatgcggcgacctcggcggggacggggaccaccgccgcgggcacctcctcgggggcggggccttgtccagactccgctgcgcgcttctgcctgaatctcacccccgaggccgtcctggtcatccagaagcgtcatctggagaagcagctgctggcgcggccccgcaggcccttcccctcaccctcggccgaacccaggcgcctactcgccccgtgtctcccggctagggccgcgggcccgcggaggggcggccccgccagcgaccccgacgcaccccccaccgccggccagggccgccgcgcgcctccgcccggcgcccagctgctgcacggcggcctgcaggttccccagctcagcccgcggcccggggccctgcggccgatgctcaaggtgtcgctgctcaacgagcggcacaggtacgacgacgtggagtacgaggaggagccagaggcggtggacgagggcctggtacgcaagtgcacggagtggctgcgcggcgtggagtccgcggctgccgcgcggggccgggcgggggccctggactcacggcggcacctgagcacgctgtgagcccagcgggcctgcggggacaggccaggcctgatcccacctcacttcctgcacgcgccactccgcctaggggccctcgggggagaccgcaggctcctctggccgccagcgcccactttcgggacaccagtgcgcaagctggcccacgtggggcgcagccagactcgcccgacggccacggcccccctcctgccctcgccagccggcagcccgggcctttctcgttcacaccggtggtatctaccccagatgcctgcctctgcccccactctggcctcctcttggcatcgccgagcatccatgcagttcgtggggaattaagcaactgagaaaatgcctcttggtgccccgacccccagggttcgtctaggtcccagagaccctctgcctggaggcgggccttccccagggctacatctgcacgccccgtggtgtcaccctcagccggcgccgggcaccctggacagtgcggtgggcgatggcccaggtgggtggccgcgacggtggcctcctgcagagctgggacccggtcctacattcgtgattttgttttctcccaagtcagaaaaatgttgagggtattagacatccctgaaactcagttaaccgaatttccagtctccaaagcggaagggtaggcatcgccaggcgctggtgagccctggtcaatgagcgcttccatggaaaccgctcggctgattacattttttctgtgtattatttgaatagagagtaaagctcctccgctgtttcgtaaccatatcctttcccccgctaactggaggctgatttctacatatttcttccatgtatctgagaatatctaactagaaggatgagaaggaaataaaatgttataatcagataaggctggttataaaagagtaatgtattacctcaatttttgactgactttgtaaaagccaataactggtttaatgtttatcttgatagactttaaatgtatcaagtcttaattgtattttaaattgaagccttacatttttaaaacagattttgtatttttcttgtggaggtctttgctctaataacacacacacactgtctctctctctctctctctctaattctaggcacacatttagttagatgtgaagcatttaattcattgggagctaggtcagctgccagatgagttgcaaaaacagaaaaaaacctacccattgaataacttctttgaatttggagataagttttcttttacttaaaatgaatatattaattctagaggggcaaaactagcaatgcttatgcaagtgacggtgctgctcttgttccacccccacccagatggtctctgagtgcgccgtcctgggcagggcacacggtctggagctgagagggtggagcaagagtgcactgactccgagccgagggcaggagtggctcaacttggtctcgtcttgcacttagtgcaaataccaataattaagatgcctagacttctgcccttggtcacagtaacaacaacattttgaagacttttccctggtggcatcctagagggaccgactttctgcagcctctgtcttccaagctgagcttctgctgcagtgtggctgtcactgcacctgtgtgtctccctgacgtccctgtcagctgcttcattttgatttcctttcttctcccgccctttctgtaggctctgtcccagcatctcctgttcttaactggccacaatacaacactaagcgcatttttagtaatttgtatttattaaatagagtttgtgggccttgttctctactttaaaagcagatgagtggaacatttatgtttccctggtcaatgagcttcaataaaaaacaaacagaaaaaaggttttacacgtgacacatgatatcttttcattgctgttaaggacattttgagaaagttttctaagtcgctatgctccaatttcttaatgcttaaataaaagagaaattcagtga

SEQ ID NO: 169407 - DNA, 580 bp, Homo sapiens
  Payload ID: 13348
  Gene Symbol: PRR18
  Gene Name: proline rich 18
  ENST ID: ENST00000529616
  CDS Start-End: 231-580
gccggcccggcccgcgtctcagctgtggggacccgggggcgccgcgactcgcccacagtcggacggcgggaggcggttcctgcagggtccagtcccgggagcacccccaggaggaggggagggtgggagcgcctctctttgagtccccgggtttggtcgctgggatgtgaggaagccggagaggccgcggctggacgcaggggctgaggatccggcggctcggctgcactatgcccttcccgcccatgccgccgccgcccgcccccgccccgggggcccaagccgcgcgccagttaccccggaggccctgcgccgcgggggacaagaagaagaggcccccacagcggcccgaggggctcctctccagctcctggccctccgccacgctcaagaggccgccggcccggcgcggccccggcctggacaggacgcagccgccggcccctccgggcgtctccccccaggccttgcccagccgcgcgcgggccccagccacgtgcgccccgccccggccggcaggctccggccacagcccagcgaggaccacctatgcggcgacctcggcggggacggggaccac

SEQ ID NO: 169408 - DNA, 1530 bp, Homo sapiens
  Payload ID: 13349
  Gene Symbol: PRR19
  Gene Name: proline rich 19
  Uniprot ID: A6NJB7
  ENST ID: ENST00000341747
  CDS Start-End: 379-1449
agtttcccaatcaggtagtgagagtggcacgaaccagccgttctcctgagccaccccccgcgcccccggactcctcaatatcccaggtgggaacgctcaccagggacatccagcgcccgtcgccctgtacgtcctgcaccggcgtgggcttgctggctgggttctcctctccactcatcttggcgccgcagctcctgcaggatgagcgagtcgggtcggcccgggagtgttccgaacggagctggctccgccacgcccactcctacccctcgcggcaacaaaggaccgtcccaacgctagcacacccgcggaggacgaaggccgatacagggcgccgcctcctctccagggacggaagccttcacttaggaggacaccatggatacccagggaccagtctcccagccttttcagcagcctgagaaacctggtcgtgtccgtcgtcggaagactaggcgggaacgtaacaaggccctggtgggcagccgccggccattagcccaccacgatcctcctgtggccattcgggatccacctgtggtccctactgcctccaagctcgtggtcataacccagggccggctgagccgggagcaccggggtctcttcaaccacgaggtgaaatccctagatgttgcaaggctgcttagcagtgggaccctggtgccaggcagccccacactccccgccaagccctccccaagcccaggcagggcccaggaaccagccccacggtccagggacaaagagaaccaggtgcctggaggttcgggcccaggcccacccagttccccagagttgtctggcgtggggcagctgctggcagagctgcagtgtcagctgagtttgccacaggccttcccccggaggaacctgattcaggatgccagggatgccatcgtgcacaccttgcaggcctgtcatggttgtgtgcctgaccttgccctggtgcttcggggctgccagccacccttgccaggggccaagcctggggtctctgagagaaagatgacacccttctggattaatagccctgatcaagtcccagagcaggagaggcaaaggaagcaacaagggacaaaggagttcaccttccccatgccctacacctccagcatgcccactgcgcacagggggagtctggcaccgccaagaggtccctggccaccatactttccctcactgtcttcgccatctggaacagcctggggtcccccaacagcgtttgacttgttaaaaagcatctggctggtagccacgccaccccctcctcggccctggggggttggcctccctcagcccctgcctcagccttcatcacccctgttgccccgaacctctgtcctggactggagccccagccccccttccccactgcccagcctctcctgggtagtagcccagagcagtccggaagcctggtcttttccacccatgagactgtactgaggagaggctgaggctagggctggggacagatatcttgtactcccagtgacctcaataaagtacttttcatggtcctcttga

SEQ ID NO: 169409 - DNA, 1956 bp, Homo sapiens
  Payload ID: 13349
  Gene Symbol: PRR19
  Gene Name: proline rich 19
  Uniprot ID: A6NJB7
  ENST ID: ENST00000499536
  CDS Start-End: 812-1882
cctagcctcaagcgatactcccgcctcagcctcccaaagtgctaggattacagatttgagccaccatgcctggcctcatctggtcattctaaatagtattcccaccacaccccaaaacatctccctattcacttgttttgttttgttttgtttttgagatggagtctcactctattgcccagactgaagtgcagtggcacaatcgtgactcactgcaacttctgccttctgggttcaagcaattctcctgcctcagcctcctgagtagctgggattacaggcgtgcaccaccatgcccagctaattttttttttttttgagatggagtcttgctctgttgcccaggctggagtgcaatggcatgatctcagctcaccgcaacctccacctcctgggttcaagtgattctcctgcctcagcctcttgagtagctggaattacaggtgcatgccaccacgtctggctaatttttgtatttttagtagagatggggtttcactatgttggccaggctggtctcgaactcctgacctcaggtaatctgcctgccttggcctcccaaagtactaggattataggtatgggccactgcggctggccaatttttgtattttcagtaaagacagcattttgccatgttggctaggctggtctaaagtgacctggcctaagtgatcggcctgccttggcctaccccagtgttggtattacaggcataagccaccgcgcccagccctccctattcactttgctactccccttgacttatctgcatgctgatggccaccctatctttatattccaggacaccatggatacccagggaccagtctcccagccttttcagcagcctgagaaacctggtcgtgtccgtcgtcggaagactaggcgggaacgtaacaaggccctggtgggcagccgccggccattagcccaccacgatcctcctgtggccattcgggatccacctgtggtccctactgcctccaagctcgtggtcataacccagggccggctgagccgggagcaccggggtctcttcaaccacgaggtgaaatccctagatgttgcaaggctgcttagcagtgggaccctggtgccaggcagccccacactccccgccaagccctccccaagcccaggcagggcccaggaaccagccccacggtccagggacaaagagaaccaggtgcctggaggttcgggcccaggcccacccagttccccagagttgtctggcgtggggcagctgctggcagagctgcagtgtcagctgagtttgccacaggccttcccccggaggaacctgattcaggatgccagggatgccatcgtgcacaccttgcaggcctgtcatggttgtgtgcctgaccttgccctggtgcttcggggctgccagccacccttgccaggggccaagcctggggtctctgagagaaagatgacacccttctggattaatagccctgatcaagtcccagagcaggagaggcaaaggaagcaacaagggacaaaggagttcaccttccccatgccctacacctccagcatgcccactgcgcacagggggagtctggcaccgccaagaggtccctggccaccatactttccctcactgtcttcgccatctggaacagcctggggtcccccaacagcgtttgacttgttaaaaagcatctggctggtagccacgccaccccctcctcggccctggggggttggcctccctcagcccctgcctcagccttcatcacccctgttgccccgaacctctgtcctggactggagccccagccccccttccccactgcccagcctctcctgggtagtagcccagagcagtccggaagcctggtcttttccacccatgagactgtactgaggagaggctgaggctagggctggggacagatatcttgtactcccagtgacctcaataaagtacttttcatggtc

SEQ ID NO: 169410 - DNA, 746 bp, Homo sapiens
  Payload ID: 13349
  Gene Symbol: PRR19
  Gene Name: proline rich 19
  ENST ID: ENST00000595750
  CDS Start-End: 128-746
gagcccgaggcccggaacagcgccaggtgacttcgagagctggggtcaccgcggaaaagaagccattgcgccccacagctacgtgaagtgggaagggccggggttcgttggggcgagagaggacaccatggatacccagggaccagtctcccagccttttcagcagcctgagaaacctggtcgtgtccgtcgtcggaagactaggcgggaacgtaacaaggccctggtgggcagccgccggccattagcccaccacgatcctcctgtggccattcgggatccacctgtggtccctactgcctccaagctcgtggtcataacccagggccggctgagccgggagcaccggggtctcttcaaccacgaggtgaaatccctagatgttgcaaggctgcttagcagtgggaccctggtgccaggcagccccacactccccgccaagccctccccaagcccaggcagggcccaggaaccagccccacggtccagggacaaagagaaccaggtgcctggaggttcgggcccaggcccacccagttccccagagttgtctggcgtggggcagctgctggcagagctgcagtgtcagctgagtttgccacaggccttcccccggaggaacctgattcaggatgccagggatgccatcgtgcacaccttgcaggcctgtcatggttgtgtgcctgaccttgccctggtgcttcggggctgccagccacccttgccaggggccaagcctggggtct

SEQ ID NO: 169411 - DNA, 1641 bp, Homo sapiens
  Payload ID: 13349
  Gene Symbol: PRR19
  Gene Name: proline rich 19
  Uniprot ID: A6NJB7
  ENST ID: ENST00000598490
  CDS Start-End: 413-1120
tgctcccttaggcagcgcctcctcaactgccctcagtttcccaatcaggtagtgagagtggcacgaaccagccgttctcctgagccaccccccgcgcccccggactcctcaatatcccaggtgggaacgctcaccagggacatccagcgcccgtcgccctgtacgtcctgcaccggcgtgggcttgctggctgggttctcctctccactcatcttggcgccgcagctcctgcaggatgagcgagtcgggtcggcccgggagtgttccgaacggagctggctccgccacgcccactcctacccctcgcggcaacaaaggaccgtcccaacgctagcacacccgcggaggacgaaggccgatacagggcgccgcctcctctccagggacggaagccttcacttaggaggacaccatggatacccagggaccagtctcccagccttttcagcagcctgagaaacctggtcgtgtccgtcgtcggaagactaggcgggaacgtaacaaggccctggtgggcagccgccggccattagcccaccacgatcctcctgtggccattcgggatccacctgtggtccctactgcctccaagctcgtggtcataacccagggccggctgagccgggagcaccggggtctcttcaaccacgaggtgaaatccctagatgttgcaaggctgcttagcagtgggaccctggtgccaggcagccccacactccccgccaagccctccccaagcccaggcagggcccaggaaccagccccacggtccagggacaaagagaaccaggtgcctggaggttcgggcccaggcccacccagttccccagagttgtctggcgtggggcagctgctggcagagctgcagtgtcagctgagtttgccacaggccttcccccggaggaacctgattcaggatgccagggatgccatcgtgcacaccttgcaggcctgtcatggttgtgtgcctgaccttgccctggtgcttcggggctgccagccacccttgccaggtgagcgtccctcctgcccctgtactcccctttcctttgtcggctctagctcagctagcctctatgcttctttcctctgtgccaggggccaagcctggggtctctgagagaaagatgacacccttctggattaatagccctgatcaagtcccagagcaggagaggcaaaggaagcaacaagggacaaaggagttcaccttccccatgccctacacctccagcatgcccactgcgcacagggggagtctggcaccgccaagaggtccctggccaccatactttccctcactgtcttcgccatctggaacagcctggggtcccccaacagcgtttgacttgttaaaaagcatctggctggtagccacgccaccccctcctcggccctggggggttggcctccctcagcccctgcctcagccttcatcacccctgttgccccgaacctctgtcctggactggagccccagccccccttccccactgcccagcctctcctgggtagtagcccagagcagtccggaagcctggtcttttccacccatgagactgtactgaggagaggctgaggctagggctggggacagatatcttgtactcccagtgacctcaataaagtacttttcatggt

SEQ ID NO: 169412 - DNA, 1847 bp, Homo sapiens
  Payload ID: 13350
  Gene Symbol: PRR20A
  Gene Name: proline rich 20A
  Uniprot ID: P86496
  ENST ID: ENST00000377931
  CDS Start-End: 234-899
atataagagggacggcgctcggcctccagcagtcggctttctgctgggctcggagccagaacctgctgcgtgctccctccagactccctggctgcgggtggactacctcagagctacagcggtgaacctgtggacacctccgactcctcgggcctctcttcgtcgaagagtctcctaattttcagatctccggagccagctgtgggaagatcagcccctcccgccgattgctcatggaggaaccaaggccttcgaagcgacttcgctccatggcccctaatcaagcctcaggtgggcctcctccagagccaggctgctgtgttgcggaccctgaaggctccgtggaagcagatgggcccgcacagccagcccaacccgcaaaacccatcgcttacgtgaaacccttcagacggcagcccccagctcgcccagagtcaccccctcctgcagagagaggccggcgccggggaggaagccggcggccagggcgaggccgtggcagaagggctgggccccgcggggacgctggccagagacagggggcagaaggcttgatggcaccggacgtgcacatccaactggaccaccatggagagccaggccaccagggggaaccggaaatcacggagaccgcagccttctccctttctgaaacaggtcctccgcctggaactgtgcaggaaggccctggccccgacgtggcgcaacctgagctggggtttcaggagccgcccgctgctcctgggcctcaggctgttgactggcaacccgtcttgaccctctatccctgcatcgggtttagggctctgggtgactcagcggttttacaagtcattcaaaccccccagggcacctacgtgcaaggggtcccagtgttcctcaccgacattgcgtattgaccactatctgccacccacgttgttcccagcctcccttccttccacctggacgttccccccagccccacttctgctccactcctcccccgactggacctgaagcctgagcttcccctgaacttggagtacgcaacttacaacatgcaagctgccaaacaccctttctgtacaaggcgattggaatggaactgtcatgtacagtgaaagtacacgtcacgtttttcagccaagaagaagccaacccagacaacctggaagaagtgggatgcaacaaggatcactaagcatggaaattaggaaactgtattcttaagtccagagaagtacgattctggaaaaaggattgatgacctagaattaaaattccagaagacactcatatagacatgtgggacatgcgaaaactcagaaggagctagaagttactaaagtgcttctctagtgcctggagacgatagactggctgaatataagagcaataaaaatctagactgacacatttttaagtctcaacgtgggtaccctttgggaaccactaaatgaattggaatagaaggtaaaatttcaaacagattgaggaaaaaggggatcaaaggacatgtgacgaatcagacaaaaggtgttggggtgggggggggggcggttaacggaagcaaggagagtgcatgactcactggaaccgctaaaccaggaatcagtaatttgacggcagtgtccttggcttcctcctggctttaatgggaatattttgaatgtttcaccattaaccaagatgttggctgtaggtgtctcttagatgtttaagttgagttagttcccatcttttcagagtttgataaatgttgtattatgaacttttgtattttgtattttattaggtaggctgttgttggctggttttcactcctttgtaaacgtccaaataaaatacagataactttttacatc

SEQ ID NO: 169413 - DNA, 1847 bp, Homo sapiens; identical to SEQ ID NO: 169412
  Payload ID: 13351
  Gene Symbol: PRR20B
  Gene Name: proline rich 20B
  Uniprot ID: P86481
  ENST ID: ENST00000377930
  CDS Start-End: 234-899

SEQ ID NO: 169414 - DNA, 1847 bp, Homo sapiens; identical to SEQ ID NO: 169412
  Payload ID: 13352
  Gene Symbol: PRR20C
  Gene Name: proline rich 20C
  Uniprot ID: P86479
  ENST ID: ENST00000544357
  CDS Start-End: 234-899

SEQ ID NO: 169415 - DNA, 1847 bp, Homo sapiens; identical to SEQ ID NO: 169412
  Payload ID: 13352
  Gene Symbol: PRR20C
  Gene Name: proline rich 20C
  Uniprot ID: P86479
  ENST ID: ENST00000614894
  CDS Start-End: 234-899

SEQ ID NO: 169416 - DNA, 1847 bp, Homo sapiens; identical to SEQ ID NO: 169412
  Payload ID: 13353
  Gene Symbol: PRR20D
  Gene Name: proline rich 20D
  Uniprot ID: P86480
  ENST ID: ENST00000452123
  CDS Start-End: 234-899

SEQ ID NO: 169417 - DNA, 1847 bp, Homo sapiens; identical to SEQ ID NO: 169412
  Payload ID: 13354
  Gene Symbol: PRR20E
  Gene Name: proline rich 20E
  Uniprot ID: P86478
  ENST ID: ENST00000434815
  CDS Start-End: 234-899

SEQ ID NO: 169418 - DNA, 1170 bp, Homo sapiens
  Payload ID: 13355
  Gene Symbol: PRR21
  Gene Name: proline rich 21
  Uniprot ID: Q8WXC7
  ENST ID: ENST00000408934
  CDS Start-End: 1-1170
atgcatgcctgttcatccacagctcttcatccacggcccttcatccacggcttttcattcacaacttttcttcaacagctcttcccccacggctcatccacggctcttcacccatggcccttcatccacggctcttcacccatggcccttcatccacggctcttcacccacggcccttcatccacggctcttcacccatgtcccttcacccacggctcttcacccatgtcccttcatccacggctcttcacccacagtccttcatccatgcctcttcacccacggcccttcgtccatgcctcttcacccacggcccttcgtccatgcctcttcacccacggcccttcgtccatgcctcttcacccacggcccttcgtccatgcctcttcacccacggcccttcctccatgcctcttcacccacggcccttcctccatgcctcttcacccacggcccttcctccatgcctcttcacccacggcccttcctccatgcctcttcacccacggcccttcctccatgcctcttcacccacggcccttcgtccatgcctcttcacccacggcccttcgtccatgcctcttcacccacggcccttcgtccatgcctcttcacccacggcccttcgtccatgcctcttcacccacggcccttcctccatgcctcttcacccacggcccttcctccatgcctcttcacccacggcccttcgtccatgcctcttcacccacggcccttcgtccatgcctcttcacccacggcccttcgtccatgcctcttcacccacggcccttcctccatgcctcttcacccacggcccttcgtccatgcctcttcacccacggcccttcctccatgcctcttcacccacggcccttcgtccatgcctcttcacccacggcccttcgtccatgcctcttcacccacggcccttcgtccatgcctcttcacccacggcccttcgtccatgcctcttcatccacgtctcttcacccacggcccttcatccatgcctcttcatccaagtctcttcatctacgcctcttcagccacagctcttgcctggtgggcttctcacagcagggcaatgtcttgctgctgtctgccagggccaccttcaacacctgtcttcttgtttctaacatgtactttctaataatctcttactaa

SEQ ID NO: 169419 - DNA, 1392 bp, Homo sapiens
  Payload ID: 13356
  Gene Symbol: PRR22
  Gene Name: proline rich 22
  Uniprot ID: Q8IZ63
  ENST ID: ENST00000419421
  CDS Start-End: 106-1374
aggcaaacagaaccccaccaggttctcagcctgttctccggttgggccacttgcactcccactgccgccctcctggcctgtctggaccgggccccccgctgccccatgcagcaccccaaaccgttctgtgcccctgcagctccccaggaaggtttcagcccgcagagtctggagggggctgaggtgctgggcaaccagcctgctcccacctgtgccgagcctcctcccgctatgggctccttgaacctgtatcatcccccagacccagagaaagaggtgtttccagccccaccagcaggtttccagatggccccatgcgggtgcttcttcgacccccgcatctatcggatcgagtggaccacccccgacctgggccagtcagccctgtataagctggcagcaagcagcggggggccagcgggggtcccctccgccccaggcagctacctcctggagcctcagccctacctcaaggccccggggctgcctccatacccccactaccagcaggcacccggggggccccagtttctcttgccctacttcccgcctgagggccccgggccagaggctctgggttttgtgggggacgcagggcccgccgccttcgtggagctgcccctaccgcccctagaggaaggcccggccccgctgccacccccaccccccaaggagaacaagccgccccctgtactcatcacgctgcctgcagagcccacactgcccccagacgcctacagccacctccagggtcacctcggccacttccctgggcccgaacccctggccttccccgtcaaggagctgcagggcagtggggcccgacctggggtgcccctgtacccaccgggcctcagcgagctcaaggtggccgaggtcaaggagggggccctgctgggagcaggcaaggccaaggcccccaagacggccagagctttggcactgcctgacaaggttctgctggaggacgccatgaagctcttcgactgcctgccaggcgcctctgagcctgagggtaccctgtgcgaggtccctgggccggccctgcctgacagcagtggtgggaactcagccgatgacatccgctcgctgtgcctgcccgaggagctgctgtcctttgactacagcgtgcctgagatcctggacaccgtgtccaacgttgactacttcttcaacttcaaggcgctcgacgaggagcagccgccccacccggggccccctgccaccaacaccccggcccccattctgtctggcaagagaaaggcctcgacggccaagaagggaaagccgggaaggaaggccaggcagccggcaggcccagccagcgccactcccccggggcccagggaggacctgggagccaccccgcattaaagcacatttgacctttca

SEQ ID NO: 169420 - DNA, 1640 bp, Homo sapiens
  Payload ID: 13356
  Gene Symbol: PRR22
  Gene Name: proline rich 22
  ENST ID: ENST00000390672
  CDS Start-End: 1-248
gtctggagggggctgaggtgctgggcaaccagcctgctcccacctgtgccgagcctcctcccgctatgggtacgatcgggtgggtgggagcacctgctggagagggttcaggggcccacccgcctaagggccctacccacctgggcacctttgtccacaggctccttgaacctgtatcatcccccagacccagagaaagaggtgtttccagccccaccagcaggtaccggcctcccctgagcccttgacgaggctgggagtgggtttgagtgtgcaggcccatcttgcccctgccccgtccctaagtgggagcctgaaggcatggcctctgctccccatgcttcacacaggtcccccagatgagccccaaagacaagctctgtgtcatccatcacccagccagggccccaaagcaatatctatgtcgtcccccaaaggggccccccaatggcaaggttcttgtggcatctcccaaacaggcccccaggcttgggctgggcccctcaggcagcagctgctctcagggcacccgcctgccgcccacaggtttccagatggccccatgcgggtgcttcttcgacccccgcatctatcggatcgagtggaccacccccgacctgggccagtcagccctgtataagctggcagcaagcagcggggggccagcgggggtcccctccgccccaggcagctacctcctggagcctcagccctacctcaaggccccggggctgcctccatacccccactaccagcaggcacccggggggccccagtttctcttgccctacttcccgcctgagggccccgggccagaggctctgggttttgtgggggacgcagggcccgccgccttcgtggagctgcccctaccgcccctagaggaaggcccggccccgctgccacccccaccccccaaggagaacaagccgccccctgtactcatcacgctgcctgcagagcccacactgcccccagacgcctacagccacctccagggtcacctcggccacttccctgggcccgaacccctggccttccccgtcaaggagctgcagggcagtggggcccgacctggggtgcccctgtacccaccgggcctcagcgagctcaaggtggccgaggtcaaggagggggccctgctgggagcaggcaaggccaaggcccccaagacggccagagctttggcactgcctgacaaggttctgctggaggacgccatgaagctcttcgactgcctgccaggcgcctctgagcctgagggtaccctgtgcgaggtccctgggccggccctgcctgacagcagtggtgggaactcagccgatgacatccgctcgctgtgcctgcccgaggagctgctgtcctttgactacagcgtgcctgagatcctggacaccgtgtccaacgttgactacttcttcaacttcaaggcgctcgacgaggagcagccgccccacccggggccccctgccaccaacaccccggcccccattctgtctggcaagagaaaggcctcgacggccaagaagggaaagccgggaaggaaggccaggcagccggcaggcccagccagcgccactcccccggggcccagggaggacctgggagccaccccgcattaaagcacatttgacctttca

SEQ ID NO: 169421 - DNA, 1587 bp, Homo sapiens
  Payload ID: 13357
  Gene Symbol: PRR23D1
  Gene Name: proline rich 23 domain containing 1
  Uniprot ID: E9PI22
  ENST ID: ENST00000533250
  CDS Start-End: 178-1017
catttgaccggtcccaggccaggacacactcttccatgctctggctgtgctgtgctagaggctgataatttttctccaggtagagtaaaagatcaaggcacgaactatatagatttacagaaaataggccaaagattgagatttttttgacacaagcaagtccagagaacttttaccatgtatggttaccggcgcttaagaagccccagagattcccagacagaaccgcagaatgacaatgaaggagagaccagtttggctaccacacaaatgaatccacccaaacgtcgccaagtggagcagggtcccagtacaggtgcaaaaaaaccctcaatttcaggagctccacacctgaattcataccagtccctggaacttccccagaatcagcaggattctggcactgaggagctcatgatagtcctggaacaagggacagaagtgaggttgagcctggaagaggtcatcctcatcttggccccagagacagtgctgcagctgaccctggagaacacagtccttgtgattgtccctgagcatgtcctgaggtcagaagatggcctgcagtcccctgtgcagatccagtacatcataccttccgttgatgacttcagcttggagttccatgctcaagatggagacatctcagacatgagaagagagaatgtgcctttttcacctgcagaagaagggaaggcagcacccctgtatcagcagcccttgatgataccccaagcaaaccacatggctgggatcagcccttctttcctagtaaccccattgtgcattccacgctgtcgggcagccttcccccaatgctaccctctaccacccacacctagtcctgtgggacgccctagaccagccgactccagtttcagcctgcatggtatggagctcttgtgcacctcctccctcagacctatgcccccttcaccaagtcctggtccccaggtctatcacagggttcaccataggcctcccagcagggcacggagatgtctctttaggaagtgatttaacccaagagccaccccctgcattgataggtcagagattgtccagatccttagtcagtgcattctctgaaatgtggagagaaagtaatttgaccacttgcttgccctttgctgttccccatcatcaaccactgtcttcaacagcggagggtcccagatgctgcagggagggggagaactgcagggagttcaaataaaacattcacatttcacttcacacacactgtcccttagactttctcttcctatttaagcacatacatccaaccacactcaatcaaatccctgactgctccatgtgagagttctgcttccagcatgacgtggtctgaaagttcatctgaagacagctgctcactcccgggggctaacaccgccccttgcatgctgatgtccttgtagtcattggtctgatgccacaataaataattcctaaggctgatgctctatttctgccctgagactctcccctttttctccaagctgtgccccattccttgtcttagtccaggttccctacactccccaggccaatgcttttgaataaatcttgacgtcattgaatgaa

SEQ ID NO: 169422 - DNA, 1587 bp, Homo sapiens; identical to SEQ ID NO: 169421
  Payload ID: 13357
  Gene Symbol: PRR23D1
  Gene Name: proline rich 23 domain containing 1
  Uniprot ID: E9PI22
  ENST ID: ENST00000610320
  CDS Start-End: 178-1017

SEQ ID NO: 169423 - DNA, 1587 bp, Homo sapiens; identical to SEQ ID NO: 169421
  Payload ID: 13358
  Gene Symbol: PRR23D2
  Gene Name: proline rich 23 domain containing 2
  Uniprot ID: P0DMB1
  ENST ID: ENST00000528972
  CDS Start-End: 178-1017

SEQ ID NO: 169424 - DNA, 801 bp, Homo sapiens
  Payload ID: 13359
  Gene Symbol: PRR23A
  Gene Name: proline rich 23A
  Uniprot ID: A6NEV1
  ENST ID: ENST00000383163
  CDS Start-End: 1-801
atgggcagccggccccgcagccccagcgccttccctgcgccctggtggggacagcagccaggaggacccggccctgccaagcgcctccgattggaggagcccgcgggccccgaaccccgcgtggcgcccagcctggaagacccggcgggtaccccggccgtgggcgcgctcacctccatagtggtcctggccgcgggctgtgccctgcgtgtgcccctggacgacgtcgacctggtgctggagctcccgccaacgtcgatcctgcgagtgtctctcgatggacacaccctcatcctgatcccagaggtcctcctgagctctgtcgacgaacgctcaggagcgcaggacgactcgtctgctgggctggaagtggacgttttcctgggcgctctcagggaggacgtcgtcgttgagcaggaagtcttctgcgcatctgtcccagagatcgccgcccaggaagaggcctacgaggaggacgcggaccccgagtttccggagctccagatggactccgcagccggctcagccgctgggctctactcctccgccagaagtatgttcagcccctaccgggagggccccatcccagaaccctgtgctctggcccccaaccccagttcagagggacactctccaggccccttcttcgacccggaattccgccttctggagcctgtccccagctcacctctccaacctctacctccctctccgcgcgtggggagtccaggtccccacgcgcacccgccgctcccgaaacgccctccgtgcaaggcccgcagacgactgttccaggaatga

SEQ ID NO: 169425 - DNA, 1896 bp, Homo sapiens
  Payload ID: 13360
  Gene Symbol: PRR23B
  Gene Name: proline rich 23B
  Uniprot ID: Q6ZRT6
  ENST ID: ENST00000329447
  CDS Start-End: 266-1063
gtctgcatcaggaaggcccaagggtccaacgagctaagctgagcccggtggccggcgaggcaccaccagcagcccagactacggtcccccaggaggcgccccgggagctccgaggactcgccccgcgtcgcgcggtcctgcgccccgctcgtcccaaccagcctcccctaccaccgacatctgttacttcaaagaggacttcaccgccgcgctccccacgtccgctgctaggcccaggagcgccgtccacagcgccgtcgaggcgatggtcagccggccccgcagccccagcgccttccctgctccctggtggggacagcagccaggaggacccggccctgccaagcgcctccgattggaggagcccgcgggccccgaaccccgcgcggcacccagcctggaagacccggcgggggacccggccgtggacgcgctcacctccatagtggtcctggccgcgggctgtgccctgcgtgtgcccctggacgacgtcgacctggtgctggagcccgcaccaacgtcgatcctgcgagtgtctctcggtggacacaccctcatcctgatcccagaggtcctcctgagctccgtcgacgaacgctcaggagcgcagcacgactcgtctgccgggctggaagtggacgttttcctgggcgctgtcagggaggacgtcgtcgtcgagctggaattctgcgcatctgtcccagagatcgccgcccaggaagaggcctacgaggaggacgcggaccccgagttcccggagctccggatggactccccaaccggctcagccgctgggctctacccctcctctagaagtatgttcatcccctaccgggagggccccatcccagaaccctgtgctctggcccccaaccccagttcagagagacgttctccacgccccatctttgacctggaattccgccttctggagcctgtccccagctcacctctccaacctctacctccctctccgtgcgtggggagtccaggtccccacgcgcgctcgccgctcccggaacgccctccgtgcaaggcccggagacgcctgttccaggcatagacccccacccccacgtacacacaacaatcctggccgctctgctggaggccctctaggattgcgggaatctctcacattgagtatccaacaacctggaaattgggcaccgcgtgttcggacaattgctttttcgctgcacactaccgatagtaggagatgaagacgtcagcaagaaaaggtatattctagacctcatctttaaatagaaaatctgcgcaaggataccagaaaatgtgtccagatttctgggcttctttacaaggtcatattcagatcccttcattctccctcgttttgcatcagttgtttctctcaaattccagtctttctccagcatcatactgccactcccgtttctccccaaaccaagaaatcaccagatctcttacgttgttagttaccttgcatttttttcccatgaattttggaagacttagccatggcttttcttggggtttttccaactgctctccaaggaaactgccaaatagtatgcttactatacaagactgtatgttgcttcttcctaggaaccccttatcctgctgaagttttcttctagtcttctaattctaaatgaaaatttgtgttgaattttatcagatgttttcagcatgcattgtgttatgtatttttttttaatttgttaatctggtgatttcacccaatggaaagtgtttgcattcctgctattccacattattttataccttttaaaatctaccctgagttttttctcatgtaaaccaaacttctaacttttaaaatgttagtttattactgtagttgcctcatatttttatataggagataaaagattactggtaaagctg

SEQ ID NO: 169426 - DNA, 2791 bp, Homo sapiens
  Payload ID: 13361
  Gene Symbol: PRR23C
  Gene Name: proline rich 23C
  Uniprot ID: Q6ZRP0
  ENST ID: ENST00000413199
  CDS Start-End: 273-1061
aacataattggctttgcagtgcgcatccgggtctgcgtcaggaaggcccaagtttccatcgcgcgaggctgagccacacagcgtgcgaggttcccccagcagcagcaccgactccgatctccgggaggcgcccccagagctccgaggactcgccccgcgtcgcgcggtcctgccgacacctgttacctcaaagaggacttcgccgccccgagccccccgcacccacgtcccctgccaggcccaggagcgccgtccgcagcgccgtcgaggtgatgggcagccggccctgcagccccagcgcctgccttgcgccctggtggggacagcagccaggaggaccaggccctgccaagcgcagccgattggaggagcccgcgggccccgaatcccgagcggcgcccagcccggaagacccggcggggaccccggccgtggacgcgctcacctccatggtggtcctggacgcgggctgtgccctgcgtgtgcccctggaggacgtcgacctggtgctggagctcgcgccaatgtcggtcctgcgagtgtctcttggtggacacaccctcatcgtgatccccgaggtcctcctgagctccgtcgacgaatgctcaggagcgcagggcgactggtctgccggcctggaagtggacgttttcctgggcgctcacggggaagacgtcgtcgtcgagcaggaagtctgcgcatctgtcccagagatcgctgccgaggaagaggcctacgaggaggacgcggactctgagttcccggagctctggatggactccgcagccggctcagccgctgggctctacccctccgctagaagtatgttcagcccctaccgggagggccccatccgagggccctgtgctctggcccccaaccccagttcagagagacgctctccacgccccatcttcgacctggaattccatcttctggagcctgtccccagctcacctctccaacctctacctccctctccgagtccaggtccccacgcgcgcccggagctcccagagcgccctccgtgcaaggtccgaagacgcctgttccaggaatgagttgcctcccacaatcccttgccaccctgctgggctccaggagaccgtctcctgatagccgttgtgtgtatgttgcgcaacctacaaggatctcggagagtggataacggatagatgcttttttgatacaggctgcgttgcagaattctggatcagtggctgacttagaaagtctggaaaaaaaagatcctcctcctcagcataaaaatacgctagttgaaatacagtctactttcagactgtgagattgctgcttcgggcctgttttgtttggaagtcacccctaggcagctccattccccctggttttgctttgaacctcagttccagcacatttctctaaaaatccgccctttccccagcacgttaccatggcacaccttttctcccaagttaatttactacatttattttgtttaatgggttttggccctagtctctgggctagtttatgacgaccttctcaacatggaatttttccctatggtggcctgagcccttttgggtgatcttgcacatagttgtacctggacaaatgtttgttgtttgcaaaacagaccgaactgggaataatgatcatgtaccctcctttttttcatgattggtttagcaaattgtttatgttattgggctttatttcccccctaactcttagagccagctcttttccattcatttcttcttctatgtttttaatataattattttatcctggaaaagcttataattctaagactctgtgtgtgtatgtgtgtgtgtgttgtttgtttgtttgttttttgagacaagagtttcactcttgttgcctaggctggagtgcaatggcacaatctcagctcactgcaacctttgcctcccaggttcaagcaattctcccgcctcagcctcccaggtagctgggatcacaggcatgcgccaccacacacgactaattttgtatttttagtagagacggggtttcaccatgttggccaggctggtctcgaactcctgacttcaggtgatccatccacctcagcctcccaaagtgctgggattacaggcacgagccatcgcacccagccggaaataatttgtttcttaggttgatgtatcaaatgcaattactgaatttctttaatggtgtatgtgtagattctcaattgattgattgattgattgataaaaacaatatctccaaataatgagaatattgtcttttttgacaagcttcatacatcttatttttctttaatcttttatattggacattacttcaagtccagattgaacagtatggttaatatgggcattcctgttttatgccttgtgttaatgcttctaaattttaccataaagtatgatctttacatggttgttagataacccttaatctattgaagcagttaattttcagtctttcagatcatgaaaaactgttgaatttttgctttgtttttgcctgttactacaaagatgttatcaagttgttttaaatgttgacatttaattatttgtgtgtatacaataatacaatacaatagctagatggaacctttgggccacaagagtacgtacagaaacctggcaagagcgctaatgagaccaggctttgggcttcagggatttaaaacaattggatgctttatgaggacttgagaagacacaagtggaaggagaaaggcagtaactgtagggtgcatttaaggttttaaatgttaaaaattaaagaaacttttttttctgtatgc

SEQ ID NO: 169427 - DNA, 1209 bp, Homo sapiens
  Payload ID: 13362
  Gene Symbol: PRR25
  Gene Name: proline rich 25
  Uniprot ID: Q96S07
  ENST ID: ENST00000301698
  CDS Start-End: 1-1209
atggcccgaactgaccagaagcccccgtgcagaggtggctgctggggacagccaggtcaccccaacacgggtggggcagctgcacaccccacttaccaccccatgggtcacaggcctcgaacgtgcatcctgctacgtggagaccagaccacaggtggccaagctccgtctcgggaaataagcctggggccctgggcggccggcactcacttcctggctatctctaccaccccatggggcaggaagacacccgcctgcatttctgagctcccaaccagctcaggaacagcgcagccgctcgcaaatgcagtgtgcgaggtacagaccgttccagggcctggcctgcgcccacagggaactcctgccatgcgggccccttctcacaaggggacaccgcccacccccaacccctggggcccagagcagccccagaacagacacaagcatcccaaaaagggggtcactgggggcccctcgccgccgcctcctgccgcctcccgatatggccaaacacccgggcgcgagccccgcgtgcaggcgccgggcctgggcccctgtggccgtcccgccagcggccgtcttctgtccctgcatttagagaagggggatggcaaagggacccgccagcggatccctcttacagatgctgccgtgggcggcgaccgcacagacatcccctctgctattgctgcgggaccggcaaggacgccggaccgacacggcctccccatccctgggtccaccccgactcccatggtggggagcggccggcttggagcccctgtgggacggagtggaggtggagcaagtgcccggagctctcggccatcatgtgcgaatgttttgctccgtgctgacgcctccctcggcaccgtcctgtctgtgttgtggactgggcagctctcacggggttgggcgcttctgcccccgggggacgctggccggcatctggagacgtctgtgatctccgctggtgttgccgcaggcatctggctggtggagcccggggaggccgcccaggaccctgcgacccgcaggaccgccccgccgcggaggacggccagccccgaacccccagcgcccggggcacccctgcctgcctgccctgggcggatccccggggccgcgcggttcgggccgcgctcctgcccgctggggtctcccgccgtcctcgccgtcaccaccgggtggagccacaggtccgtgtga

SEQ ID NO: 169428 - DNA, 7250 bp, Homo sapiens
  Payload ID: 13363
  Gene Symbol: PRR26
  Gene Name: proline rich 26
  ENST ID: ENST00000381489
  CDS Start-End: 35-631
aggagagaaaatagcttgacacctcctgcggcccatggagtcctcccgttgggacaaggaccccccaggagagagaagaccccagcagagtcaacactggaggtcctgcggggtgggtggtgctggggaggccacacggggagggctgttccctgttcccttcccctcaggagacagctggcccgaggtgacacagcactggatgcgatttcagggccagggaccatggtgcccggggctgtggaccacgccagcccacagccactgcaagccccagaccggggctgtggataacgccagcccacggcagccacacgccccagaccaacacgagaagaacgcaggccgacaacatcttcatctatggagcctggcctgtcccccgtggctccacagcataccgcacatcaaaggcacgattctctccgaagccctcagtggcttcctagtatctgacagaagaaccaaaactgtggcaggcctgcgatggctgtggttgaggaaagaggccacacccacagccagcagaaccacactcagcagcagcctagccccacgtggaagaggcgtgaacactctcgggagaggtggatgtacgctaatggttctcagctccgacctctgtgattaacagaacatgctgattggttttatctgaacgtcacacaaaagggtttctatgtccaggaaagactctaaacactctggaccctgctggggcagatggtgaccgtgacccagtgataccactctccagtgggcagcctggtctgcagagggggagatccctggggcagccctacctcagcatgggtgagtttctgttgcaattctatgtccagtgtaaataaactgtggaaaactgggagatggtacaagaaagcaaggatgccaactaaatgaatagaaagatctacaagggaaggctgagatcagctgaaataggattgggaaagtaaaggcctggctggaacttcgtaatggcttttgaggctcgggaacagggacagtagctgccctgtccatcccaggagagaacagacggacatggctggaaagcacttccctgactaaaagtgtctttaaaaagggagatctcagaatctccttccctggaatgctttaacccttcatggaacacagcagaaattccacagccctgcatcccaggaagcagggacaggacagcagcttccagcacacagaagcatttagaggcataagtagctacgcaaagacagcaggagccgtgcctcgaaaaggctgagatgtctgagaaataaagttgtacgcggatttacgcctgggcaggttgaaatgcgtgtgccatgacagatccggaagcttgtctactcgaaggtccacatccaggtatgtttcacagtcatcacaactagattttcagaaatttaaaactcctaatgaagaaacacaaacctgcacgtctcacgccaccacttaaggcagcggctctcaagcaggggcgattctactgggaggagggatgctgatggcaccagagggtgggaagcagggatctgacgcttagcaccgcaggtgccaaggacggcctcctccccacaagggctccgggaggccacaccagagggtgggaggcaggggtgacgctcagcactgcaggcaccgaggacagcctcctcccaggaggaaaaaacaaagacgggaaaaaacaaaggctccccacaagggctccagggggccacaccagagggtgggaggcaggggtgacactcagcaccgcaggcaccgaggacggcctcccacaaaggctcctctgggccagagcatccgtagtgccaaggggaaaagcccggacacaaaggatccagtgttttcaacgttgctcagggtatctccacacagaaactcccatctgccttttgtgcaaactctggggtcttgcaatcgataaacgttcacaagacacaacacgtgaacctaacaattctcttttgctccaggagagagaaaagaaggaatggtttggggagattcaccgaaattctgtgagttcttgactaaaaatcaccaagtccgctgtgttctgttatcagcagtcctgggtaggcccagacccacctcacccccagcgggacccaggaaaggctttaaacctcaaacgtcccttttcgtaacactggctgtttcatgtggttaataaatcatccaataaaatgacacacataagcccagttatacactcgacacattaacactattgatcattgttatatgtccgggttaatcaacattacaatgctacagagaaatcattggtactaagagttgtaaggatgattttttaaaatttatgtatctcaattttttatactgttactttttacattttaaaaaatgtatattctgaaatatttttgatattttaaaatgttaatgtatcaagcattttaaaatgaaccaaatatatatctacaaatatatagggaatttttaaataaatatcagggtagaaggaattaaaactcctaacttaatactaaatagacgggaaaaaacaaagtagagagttctcacagactcctgaaggaatatatagtaataaagctcaaaaagtacattaaaacctttataacgatgttttaattaccaactaacaagaaaatatctactgaatcgcgactagcagatacccaggtctgttcagcacctgtactctcccctaggtctgctgaggaacagatcaattctgttggagttgaccttgaaatttaaaaaaacaaaacaaaacaaaacaaaaacagctttaaagatttaaatttcctgaataaaacagaaaataaaaataacacttctgcacctgtgagttctcttgaccctaatttattttttgctttggatggttcataaaatatacatatataccttaaccgtgctttatattatatactagtgattgttaattcattattaacctcactctacagctaaattctaacactaatcatggtggcatcattaggacattgttctaggtggtgcttttttaactgaaaagaaaaacgggggataggtaataaataattatgtaatctaaagaaaaagttttaattgtgtgagtccagtaacgcgatcatctagcatggaaaatattttcagtagttccaggaaacttcacataagaaacactaaataaattctaagttcagtatatgagttagagacatttccaaaaggaaagcacacacagttggttgggagcgcctggattttctctagcaaaagactcgtggaatccatgctttcgccgccacgtgacgaggcacacgcggactgggacatcgtcctccaccctccagaaccaaacgctacgcgaaaccacagcgccagattcccacactggaaaatccctgagcaaagactcacgtgactcctcctcagccgctttcccaaaacaaaacacatcaatcaaacgaacccgatgaaatatacgagatcgaaaggaaaacaagagccaggcttatctcttacaggaacactccataaatcttacactgaattcactcatccttccacacaatctgctgataagaggtaaataatcaagtggaaatcactcaaagaagcgctttcctcccccaacagacgccgaagtctttgccgtggcacttatggggtgctctaacttctcagcgctggccgtcaccaacgcaggccggcagcaccctggaaaggcccaggtcccgcagctctccctccacgcgtggctacggtggaggaacgaagagcagctgtgagttcgtgggaaagaagggctatctggaataatacgagtccgggtgacatatgtaattgtgagtttttgttttctccgaactggccttattattattaattattccttcagcacctaccgggaaagcgagaagaaagcaaagggcatcactccctacccacgaaagactcacaacatccctggaaaagcaacgaggcgaacggctggtctgcgttcagagctggtgaggagcagggagaagaatccagagcgtccccgcctccctccctcaccgccctcccgcactgatgtgaacacgggagtaacaccgcgcgtggggaatccactggcacccagagcccggcccgcggcagcagaatcacccaagactgagatcctgtggcctgagtcggggccggggaaaccaagcctgcaggactccgggagcagccggtttctgcacacaggtaacatagaactgggggtaagcaaagccacgaggtcggcccgtggcctgtctgcccgtggcctgtctgcccgtggcctgtctgcccgtggcctgtctgcgcacagctattaaaagttcaataaacgtggtggcagcagctgaactggctaccacaggacgcagctggggtctggacgtgggcctgggggctggtggaaggcacgtgtgttgaggcgtgtactcagggcctgcctacttccccaggcctacggggacagatgtagctccccaggaaataccacaggcagaccccggccggcaagctgccccaagaagcagtgcgcctcccaaaatcagaagcagctaagctgacccccacctcatgtgaaagagccaggcaccagggagagggcacccacccagtctcctaatcataacagacattcacagcaacaccacgaaaaagaaactactgctctgacctggaaaaatgaaatttaaaacagaaaacacacaggttgtaactaaaaggcagacggaccaggtgcggtggttcatgcctgtaatcccaacaccttggaaggccgaggcaggcggatgacatgaggtcaggagttcaagaccagcctggccagcatggtgaaaccccatccctactaataatacaaaaactagccagacgtggtggcaggcacctgtaatcccagctactcaggactgggaggaggcgcaggatgacgacgagagagagacgagagaggcagatggcccacggcaggctgagcacaggacctggctgaggcctcctggggaggggcagaggcaaacatgctgctgcttctaggctactcgggaggacgcacgctcagaaggggctgcacggcaggacttgctgaggagcagtcacgtggatgcccccgcctctcacaacgcacacactgacaacatgcaactcacatacaacacaacatgcatgtacaatgtactcatacaacatatacaacactgacaacacacaacacacacaacacatgcaacctatacaacacatacccaatatatgctactcacaacacaatatgcatttataacacactcatacaacacatacccaatgcatgcaactcacaacacaacacgtacgtacaacacatacacacatacagcacacgtaacacatacaacacaacacacatgtacaatgcactcatacagcacacacaactcataacatgcacatacaacacacaacactcatacaaaacaacatacacaactcacaacatgcacatacaatgcactcatacaacacaacacatacaacatacatgcaactcacaacatacacatacaacacactcatacagcacatgtacaacacatgcaactcacattcaacacgacatacacgtaccacacacaacacacgcaactcacaacacaacatgcatgtacaacactcatacaacacaacactcatacaacatacagacaacacatgcaactcacaacacaacatacacatacaacacactcatacaacacacacaacacatgcaactcacgcacaacacaacatgcacaacacaacatacaacatatacaacacaacactcatacaacatatatgtgtattgcatacacataatacatgcaactcacaacacaacatacacatacaacacactcatacaacacatgcaactcacaacacaatatgcacgtacaacacactcatacaacatacaacatataacacatacaacatacaacacatgcaactcaacacaaatacatgtacaaggcactcacacaacacacaacactgatacaacatacaacacatggaactcacaaacacgtacagcacactcatacaacatacaacccatacaacatacaatacatgcaactcatacaacatacacatacaacactcatacaacacacattcatacaacacaacactcatacaacatacaaaacatacaactcacaaatacatgtacaacacactcatacaacacataacactcaaacatacaatgaatgcaactcaacacaacatgcacatacaacacacatacaacccatgccactcacatacaacacaacacgctcatacaacacattcatacaacacatactgtacagattctaagtatgaaatagaaaacagcacatgcacagtttctaaagtatgacaaaagcttttttcaagaaggtcatccaacatccaaactggtaacatgtcctcattttcagctgctgttcagattcaagcatgtttatcatctgctccatgaattacaataatatagcataaacccttttttcattttacacccactttggtgtggggtgctccaaaacaggggccaggagcctcagtcatccctcggaacaaaacacaactcacactcagaggccaggaagggaactcggggggcgacacacactctctcatctgcagagctctgcttcaattactttacatgtaaccgcggctggaacggggttggtgacggtacagacacggcaaactgaggagaaattggcaggtggagaaagatcagccagaatccaaggaaaaatgctgagcattttccacaaatagttcacacaacggacaatagttgggctactgaaagtttattgagaggggtcttgctccaaagaaaaagttctttcccaaggttatcaaagactcacagcagaccccggcccccaacacaccatctgcagagggcctgttagtcaaaaagaagacaagacagaagcaagggggtgcggggggaggagagcaagaggggaccgagaactcggaaccaagtgatgggcagacactgaatgcctgactccagggttatcgcctcagaaaacaagtccgtttaagcccgtggtaacagtgttagcgctttcactgaacctgcactcaacactggagaacctccctgcattatgaagatgagccgaaaaataacattaattcacaatgtagagtgatgattcagccacagaaaataaaactgatataatccactacaa

SEQ ID NO: 169429 - DNA, 2251 bp, Homo sapiens
  Payload ID: 13363
  Gene Symbol: PRR26
  Gene Name: proline rich 26
  Uniprot ID: Q8N8Z3
  ENST ID: ENST00000441152
  CDS Start-End: 164-829
aacacatcaaaacggaaaaggaaatgtaagcagtgtttgccgtccaaagttcacatcaacaattccttattaggaaggcaattctgagcctttcctcctgcatctgggagctgccagcaacccagttccaggagagaaaatagcttgacacctcctgcggcccatggagtcctcccgttgggacaaggaccccccaggagagagaagaccccagcagagtcaacactggagggccagggaccatggtgcccggggctgtggaccacgccagcccacagccactgcaagccccagaccggggctgtggataacgccagcccacggcagccacacgccccagaccaacacgagaagaacgcaggccgacaacatcttcatctatgaatcctggctgatccaccatggaacccagatgtcctcagttctgcctcagcccccacttgtgagaggtccgtggcataacacaaactccccctgggattcgtgggcctcacgggggaagctgagggtgtgtccatgcaggaccccgaggctacacagctctggctgtttctcttccaaagccggcactgccctctctccatctctcccggtgccagggctcaggccccagcccccgtttctgcagaagcccctttccatcctagcccctgccacccctcctgctcttgtctctcccacacctcccaaactctctcctggccagctctcgccacactcagtcaatgtccactgggggcctcaggggcacctccacctgcccaggtctgggaccaccgtcctccacgcatatctacagaccctgtcctcacctgcatcacaccaatgatggcgtcacagcgtgggttccggtcaccagtcggcctcccccaccaacgtggactccttacaagcagagccaccaacgtggacacgatcccatcaggaaccacctacttttgcatccccagcactgtgctcaggtcccagggaggccccagcaaactgtggaacaaccaaactcgtgactgaatgaacaagtatgttaagtcgttaagtaaaaatagcagaagacttagtagaatgtatgagtaacaattacaattatatgaaaatccgtatccacgtgaaggtattatgcaaaaaaagcttaactttgtttcagtgcctttccagttaaatgttgttaagcagtatttcccccaaaaggtgcatcttttataaaacaagaacgcaaggctctgaggccaactttgaacatttatttgagtgaattcacgtcccccaaattttccgtatcccaaaatctggacttttgctaaatggtgcccttagcacaggagtctctccaaggaagtggcctgagctgagagggggcctggcatcgcccacccaggtcatcagtcatcatcagcagcagctgcggcatgagagagatggtgtggggcgaaaccaatggggaaactacaaaagaaaccacctgctactgcaaacggcctcgctgtactcagggagtcggttccaggaccccatggacaccaaatccaggcacactcacgccccacaagtggacctgccgaacctgcgtgtacagagtcggccctccgacacacgtttcacatggcaggaacactgtattttctccctgagtttggttgaaaaaattcacatataagttgacccacaaagctcaagcttgtgtggtacaagagtcaactgtatgcaattgacactgattcctaccaacgatatccaaatcttagcatgagcagcacgataaacagaatgagcaaaattcaaaaactaaagcagcgtttttcctgcaagtgggcgcactgcgtatcccctgcgggaaagaccacgctggctgctgaccaaactccactggcatcttcctccatcctgagggcatcttcctcggcatcttcctccatcgacagcagcctgggctcacctcccagcccgaggctgagaactgagttccagtcccggggtggggtggcgggggggcgcactgtgcaccctcccagctctcctccaccccttccctcaggctggcccaagaatagcctggacaatcacctgctggggacaccgggctgcccctcctccgcccacagcctcaggccacctgtctcatccgtgaccgagaaacggagctgcagtgggaggcgggacatgctgggatctacccatggccaggccaagctgcgccaatcactcaagcttcactttgatcacttgctctaccaaataaaacagaacaaaataa

SEQ ID NO: 169430 - DNA, 3127 bp, Homo sapiens
  Payload ID: 13364
  Gene Symbol: PRR27
  Gene Name: proline rich 27
  Uniprot ID: Q6MZM9
  ENST ID: ENST00000344526
  CDS Start-End: 190-849
ctgttaaggtatacagacagtagttaaatagcagggccaactattctgttaagggtcttcctagacagactaaaaaagccatgtattctttcgtttctctctaaaagaagaaaaatataatttaaaaatacattgcgtattttctaaaacaataaatttatagtgttaatattcatagggtcaatcaaaatgaagcttctcctttgggcctgcattgtatgtgttgcttttgcaaggaagagacggttccccttcattggtgaggatgacaatgacgatggtcacccacttcatccatctctgaatattccttatggcatacggaatttaccacctcctctttattatcgcccagtgaatacagtccccagttaccctgggaatacttacactgacacagggttaccttcgtatccctggattctaacttctcctggattcccctatgtctatcacatccgtggttttcccttagctactcagttgaatgttcctcctctccctcctaggggtttcccgtttgtccctccttcaaggtttttttcagcagctgcagcacccgctgccccacctattgcagctgagcctgctgcagctgcacctcttacagccacacctgtagcagctgagcctgctgcaggggcccctgttgcagctgagcctgctgcagaggcacctgttggagctgagcctgctgcagaggcacctgttgcagctgagcctgctgcagaggcacctgttggagtggagccagctgcagaggaaccttcaccagctgagcctgctacagccaagcctgctgccccagaacctcacccttctccctctcttgaacaggcaaatcagtgaaattctctagaagagtaccatgggttcatttctatactgatgcagaaataagtgaaatctacaaaagttttctttcttttccaaagactatttcattctgttgtattcagagtattcatctcactacattgatttgtttgtggtagtttttccttggacttaatttatattgaaaaaacattgataattaaataaataaaatagataatttagaccaatggtgataaggtctggatgaaaactacgctatggaggactgaaatggcaatcattcagcctagcctggagtctgattatacagctactataggatgatgttagtattggttttgagtgcaataggttttttcctaaacaaacatattttgtagtcaatgaactttttgtcacaaaacagtaaaacatctgtgtttaacctatggtaaacaacatgttaatgaactatgctatccatgacttaatggacagttcaaatgtgacatctacagtttttcatttctcttttatgccagcacacaatcaattcatcaccaattgtcatttgatttacttcaaaaaatatacccccaaatcctaatacttctaaccttctccactgcatctagccaactctagctattgtcatccctaacagaaatggaggaatagcctctttttttttttttttttttgagacgaagtctcacactgttgcacggctgtagtgcaatggtgccaactcagctcactgcaacttccacctcccgggttcaagtgattctcctgcctcagcctcctgagtagccgggattacaggtgtgtgccaccacgcctggctaattttttgtaatttagtacagacaggggttccctatgttggccaggatggtcttgatctcctgacctcatgatctgtccgcctcggcctcccaaagtgctgggaatacaggcgtgagccaccgtgccctgccagaatagcctattaaccagtctacctgcttccacttttcctccaccctgatcacatacacacatgcattatccactgagcagtcacaatcagatgttaaaccaaacattattcagataagatctctgaaaagcctctgatactttctcttttaaaatggaatatattctaaacacctctccaaggacacaagacttaccttgtctaactaatgacttttctaacttcattccctatcattctccatcttgccccatgctcctcatgcagcagcttttttttttttttcctttttcaaatatgttggttttgatcttatccaagaacctttgccctgatgtatgaatgactaactgcttttctacttcgggggtctcatatagaaatcctgcttcagaatactcttccctgagcactctatctaaataaatccctcttctgcaacccagtgctttttgttctattactgacttcttttccttgtagaagttactattactgctttttacctttttatttatttgtgtattgtctttgttgttgccctcatcttatctccacaaaaatatatgctccataaaaacaggcatttctgtgtcttattcagcactttatcagggcctataacaatgcctgggacatattcagtgaccagtgaatatttttggaaggaaagaaaagaagaaagaatgaagtaacaaacaaagaatgaaggaagaaaaaatttttacaaacattcaacatatttttattttgaaataattttgtatttttccctatatcctacattggatcagaatattactgttatgtatagccatgaggacatggtctcaaaaaatgagaaactttcttagacagtaaaattgttaacttgagatgtttgcttccatcttctagagccaagtaggatctaactttaatttgacttagccaataatctgaaactattatagtatctgtctttcacagatacatgcaatattcacttctaaatatttaatgataaatttgtaatcatacatgatagtcaattttaatgattatgttgtcaaaattcaggctttttgtgtgaattgaagacttaaagaagaatttgtaaatatgactgtataagaaacaacagaaagatgaagatgaaccgaaatagaaatatcaagaggctacaaagtcttagcaaattataattgctaatggtacattatgtggtgtttagtatcacatttagaatgtagtcatttgttaagtttttcatggggtaaaagaaagaatttattccaagaaaattttggaattttaaaaataaacatgacatcttatcatgagaaa

SEQ ID NO: 169431 - DNA, 4784 bp, Homo sapiens
  Payload ID: 13364
  Gene Symbol: PRR27
  Gene Name: proline rich 27
  ENST ID: ENST00000509633
  CDS Start-End: 134-214
cttcctagacagactaaaaaagccatgtattctttcgtttctctctaaaagaagaaaaatataatttaaaaatacattgcgtattttctaaaacaataaatttatagtgttaatattcatagggtcaatcaaaatgaagcttctcctttgggcctgcattgtatgtgttgcttttgcaaggaagaatgctggattgggcttcctatggctgtgaagtgccattgctggagagacggttccccttcattggtgaggatgacaatgacgatggtcacccacttcatccatctctgaatattccttatggcatacggaatttaccacctcctctttattatcgcccagtgaatacagtccccagttaccctgggaatacttacactgacacagggttaccttcgtatccctggattctaacttctcctggattcccctatgtctatcacatccgtggttttcccttagctactcagttgaatgttcctcctctccctcctaggggtttcccgtttgtccctccttcaaggtttttttcagcagctgcagcacccgctgccccacctattgcagctgagcctgctgcagctgcacctcttacagccacacctgtagcagctgagcctgctgcaggggcccctgttgcagctgagcctgctgcagaggcacctgttggagctgagcctgctgcagaggcacctgttgcagctgagcctgctgcagaggcacctgttggagtggagccagctgcagaggaaccttcaccagctgagcctgctacagccaagcctgctgccccagaacctcacccttctccctctcttgaacaggcaaatcagtgaaattctctagaagagtaccatgggttcatttctatactgatgcagaaataagtgaaatctacaaaagttttctttcttttccaaagactatttcattctgttgtattcagagtattcatctcactacattgatttgtttgtggtagtttttccttggacttaatttatattgaaaaaacattgataattaaataaataaaatagataatttagaccaatggtgataaggtctggatgaaaactacgctatggaggactgaaatggcaatcattcagcctagcctggagtctgattatacagctactataggatgatgttagtattggttttgagtgcaataggttttttcctaaacaaacatattttgtagtcaatgaactttttgtcacaaaacagtaaaacatctgtgtttaacctatggtaaacaacatgttaatgaactatgctatccatgacttaatggacagttcaaatgtgacatctacagtttttcatttctcttttatgccagcacacaatcaattcatcaccaattgtcatttgatttacttcaaaaaatatacccccaaatcctaatacttctaaccttctccactgcatctagccaactctagctattgtcatccctaacagaaatggaggaatagcctctttttttttttttttttttgagacgaagtctcacactgttgcacggctgtagtgcaatggtgccaactcagctcactgcaacttccacctcccgggttcaagtgattctcctgcctcagcctcctgagtagccgggattacaggtgtgtgccaccacgcctggctaattttttgtaatttagtacagacaggggttccctatgttggccaggatggtcttgatctcctgacctcatgatctgtccgcctcggcctcccaaagtgctgggaatacaggcgtgagccaccgtgccctgccagaatagcctattaaccagtctacctgcttccacttttcctccaccctgatcacatacacacatgcattatccactgagcagtcacaatcagatgttaaaccaaacattattcagataagatctctgaaaagcctctgatactttctcttttaaaatggaatatattctaaacacctctccaaggacacaagacttaccttgtctaactaatgacttttctaacttcattccctatcattctccatcttgccccatgctcctcatgcagcagcttttttttttttttcctttttcaaatatgttggttttgatcttatccaagaacctttgccctgatgtatgaatgactaactgcttttctacttcgggggtctcatatagaaatcctgcttcagaatactcttccctgagcactctatctaaataaatccctcttctgcaacccagtgctttttgttctattactgacttcttttccttgtagaagttactattactgctttttacctttttatttatttgtgtattgtctttgttgttgccctcatcttatctccacaaaaatatatgctccataaaaacaggcatttctgtgtcttattcagcactttatcagggcctataacaatgcctgggacatattcagtgaccagtgaatatttttggaaggaaagaaaagaagaaagaatgaagtaacaaacaaagaatgaaggaagaaaaaatttttacaaacattcaacatatttttattttgaaataattttgtatttttccctatatcctacattggatcagaatattactgttatgtatagccatgaggacatggtctcaaaaaatgagaaactttcttagacagtaaaattgttaacttgagatgtttgcttccatcttctagagccaagtaggatctaactttaatttgacttagccaataatctgaaactattatagtatctgtctttcacagatacatgcaatattcacttctaaatatttaatgataaatttgtaatcatacatgatagtcaattttaatgattatgttgtcaaaattcaggctttttgtgtgaattgaagacttaaagaagaatttgtaaatatgactgtataagaaacaacagaaagatgaagatgaaccgaaatagaaatatcaagaggctacaaagtcttagcaaattataattgctaatggtacattatgtggtgtttagtatcacatttagaatgtagtcatttgttaagtttttcatggggtaaaagaaagaatttattccaagaaaattttggaattttaaaaataaacatgacatcttatcatgagaaacatttacagtttttgcttttactacaagatactgtgaaatgttctgctctgtcagttgtgaaagtatgaaatttaagtctatcactacaataatattttgtttttagtgttcatttttttcctcctgactacattgagatgagttagattgagtgaaaggtaaacactaacatttgaattgaggtaatttccactgtggaaaacaaactgttgttagtaaacaggcatcagctttgagacacagaaaagtcatccaaaccagaagattgggaacttcctcaattactttgtcttccatttattgcattcaattagtcaaaaatgttgttaattatacattttaaagactatttttggtaaggtctatgacacattcaaaatactacatacaagtttgtattatcataaataatccaaaagaaaacatacatgtaaccaccaccatctggaaatttcacactaaattataaaacatttccatcactgcatgtattgtttaatgtcgctttatgaatccaccttcttccttatctgtagagttaaaaactacttagtggattagggtaattcattctacttttaaaaatgatttttccacctctaatgtattctataaaataatattgttcacttttgcctatttttgagctttttatagaaaaatgctactgcgaaattattttgagtcatatcttttgatcgatattaagatacatttgcagagttttgtatgtgtgtttatatccatcttacataattctttactgtatagcgttccctttagccactggaaaatgatataatgtcattgcttacagaaggtgactgattcttattcagtgctactttctacagacaggtaactattcgcatttacgattaagaaatgttcacaccttcacactggtatcaactgcaacaaccactatacttctccagtgattgccagatggcccactatacatcctttcttctatttctttcttttgtggccagaaagtcaggacctcaaagaggtataagtttgtgtgtataattccctggcttttttctaaaattttagtatgcatttatgtggcacttaatatataaaagagttttatgagttttaaaaatgtatataaacaagacatataataaatggtatgtcatttcacaatttactatttttactcaacatttatatttctgagacttttcacatttttgaatgtattcatagtttcactttaattgatgtttgccatgaaagatcaaatatatcacattttatttgactaaaaagtaaactatatttcctacattatgctatagaacttatagactaatttaagttaattataggccttatctcagacctttgcaagtagcctgaataaaacttttcattatttatattatcacatgcatatatgtgtgtatgtatatatgtgtgcatgtgcatgcatagtaaaaatcttaacccaaaactgaaataaaaaattataagagaaaatactattttccaccaatatcacaatggataatcttttttaaatgactacatatgtcgataagttacaaaatccatatatgagtatgacaccaataagaacattttctctaaccattttgaatacgaataaccatggattctaatagcaaacattattaaaatattattgaaa

SEQ ID NO: 169432 - DNA, 641 bp, Homo sapiens
  Payload ID: 13364
  Gene Symbol: PRR27
  Gene Name: proline rich 27
  ENST ID: ENST00000512173
  CDS Start-End: 1-185
ctgcagaggcacctgttggagctgagcctgctgcagaggcacctgttgcagctgagcctgctgcagaggcacctgttggagtggagccagctgcagaggaaccttcaccagctgagcctgctacagccaagcctgctgccccagaacctcacccttctccctctcttgaacaggcaaatcagtgaaattctctagaagagtaccatgggttcatttctatactgatgcagaaataagtgaaatctacaaaagttttctttcttttccaaagactatttcattctgttgtattcagagtattcatctcactacattgatttgtttgtggtagtttttccttggacttaatttatattgaaaaaacattgataattaaataaataaaatagataatttagaccaatggtgataaggtctggatgaaaactacgctatggaggactgaaatggcaatcattcagcctagcctggagtctgattatacagctactataggatgataaggtgactgattcttattcagtgctactttctacagacagtggggagatgtttgatgcaactgtgattcattcagtgaagagcatttaaatgaccatgaatatgatcaaaacaacgttcatattaaacacctaactata

SEQ ID NO: 169433 - DNA, 3007 bp, Homo sapiens
  Payload ID: 13364
  Gene Symbol: PRR27
  Gene Name: proline rich 27
  Uniprot ID: Q6MZM9
  ENST ID: ENST00000502294
  CDS Start-End: 74-733
gaggcacattgtccacgtcaagaccaagagctgcatccactagtttgcaccctggaaacaagggtcaatcaaaatgaagcttctcctttgggcctgcattgtatgtgttgcttttgcaaggaagagacggttccccttcattggtgaggatgacaatgacgatggtcacccacttcatccatctctgaatattccttatggcatacggaatttaccacctcctctttattatcgcccagtgaatacagtccccagttaccctgggaatacttacactgacacagggttaccttcgtatccctggattctaacttctcctggattcccctatgtctatcacatccgtggttttcccttagctactcagttgaatgttcctcctctccctcctaggggtttcccgtttgtccctccttcaaggtttttttcagcagctgcagcacccgctgccccacctattgcagctgagcctgctgcagctgcacctcttacagccacacctgtagcagctgagcctgctgcaggggcccctgttgcagctgagcctgctgcagaggcacctgttggagctgagcctgctgcagaggcacctgttgcagctgagcctgctgcagaggcacctgttggagtggagccagctgcagaggaaccttcaccagctgagcctgctacagccaagcctgctgccccagaacctcacccttctccctctcttgaacaggcaaatcagtgaaattctctagaagagtaccatgggttcatttctatactgatgcagaaataagtgaaatctacaaaagttttctttcttttccaaagactatttcattctgttgtattcagagtattcatctcactacattgatttgtttgtggtagtttttccttggacttaatttatattgaaaaaacattgataattaaataaataaaatagataatttagaccaatggtgataaggtctggatgaaaactacgctatggaggactgaaatggcaatcattcagcctagcctggagtctgattatacagctactataggatgatgttagtattggttttgagtgcaataggttttttcctaaacaaacatattttgtagtcaatgaactttttgtcacaaaacagtaaaacatctgtgtttaacctatggtaaacaacatgttaatgaactatgctatccatgacttaatggacagttcaaatgtgacatctacagtttttcatttctcttttatgccagcacacaatcaattcatcaccaattgtcatttgatttacttcaaaaaatatacccccaaatcctaatacttctaaccttctccactgcatctagccaactctagctattgtcatccctaacagaaatggaggaatagcctctttttttttttttttttttgagacgaagtctcacactgttgcacggctgtagtgcaatggtgccaactcagctcactgcaacttccacctcccgggttcaagtgattctcctgcctcagcctcctgagtagccgggattacaggtgtgtgccaccacgcctggctaattttttgtaatttagtacagacaggggttccctatgttggccaggatggtcttgatctcctgacctcatgatctgtccgcctcggcctcccaaagtgctgggaatacaggcgtgagccaccgtgccctgccagaatagcctattaaccagtctacctgcttccacttttcctccaccctgatcacatacacacatgcattatccactgagcagtcacaatcagatgttaaaccaaacattattcagataagatctctgaaaagcctctgatactttctcttttaaaatggaatatattctaaacacctctccaaggacacaagacttaccttgtctaactaatgacttttctaacttcattccctatcattctccatcttgccccatgctcctcatgcagcagcttttttttttttttcctttttcaaatatgttggttttgatcttatccaagaacctttgccctgatgtatgaatgactaactgcttttctacttcgggggtctcatatagaaatcctgcttcagaatactcttccctgagcactctatctaaataaatccctcttctgcaacccagtgctttttgttctattactgacttcttttccttgtagaagttactattactgctttttacctttttatttatttgtgtattgtctttgttgttgccctcatcttatctccacaaaaatatatgctccataaaaacaggcatttctgtgtcttattcagcactttatcagggcctataacaatgcctgggacatattcagtgaccagtgaatatttttggaaggaaagaaaagaagaaagaatgaagtaacaaacaaagaatgaaggaagaaaaaatttttacaaacattcaacatatttttattttgaaataattttgtatttttccctatatcctacattggatcagaatattactgttatgtatagccatgaggacatggtctcaaaaaatgagaaactttcttagacagtaaaattgttaacttgagatgtttgcttccatcttctagagccaagtaggatctaactttaatttgacttagccaataatctgaaactattatagtatctgtctttcacagatacatgcaatattcacttctaaatatttaatgataaatttgtaatcatacatgatagtcaattttaatgattatgttgtcaaaattcaggctttttgtgtgaattgaagacttaaagaagaatttgtaaatatgactgtataagaaacaacagaaagatgaagatgaaccgaaatagaaatatcaagaggctacaaagtcttagcaaattataattgctaatggtacattatgtggtgtttagtatcacatttagaatgtagtcatttgttaagtttttcatggggtaaaagaaagaatttattccaagaaaattttggaattttaaaaataaacatgacatcttatcatga

SEQ ID NO: 169434 - DNA, 3007 bp, Homo sapiens; identical to SEQ ID NO: 169433
  Payload ID: 13364
  Gene Symbol: PRR27
  Gene Name: Proline rich 27
  ENST ID: ENST00000634530
  CDS Start-End: 74-733

SEQ ID NO: 169435 - DNA, 3127 bp, Homo sapiens; identical to SEQ ID NO: 169430
  Payload ID: 13364
  Gene Symbol: PRR27
  Gene Name: Proline rich 27
  ENST ID: ENST00000634325
  CDS Start-End: 190-849

SEQ ID NO: 169436 - DNA, 641 bp, Homo sapiens; identical to SEQ ID NO: 169432
  Payload ID: 13364
  Gene Symbol: PRR27
  Gene Name: Proline rich 27
  ENST ID: ENST00000634747
  CDS Start-End: 1-185

SEQ ID NO: 169437 - DNA, 4784 bp, Homo sapiens; identical to SEQ ID NO: 169431
  Payload ID: 13364
  Gene Symbol: PRR27
  Gene Name: Proline rich 27
  ENST ID: ENST00000635689
  CDS Start-End: 134-214

SEQ ID NO: 169438 - DNA, 1266 bp, Homo sapiens
  Payload ID: 13365
  Gene Symbol: PRR29
  Gene Name: proline rich 29
  Uniprot ID: P0C7W0
  ENST ID: ENST00000425164
  CDS Start-End: 15-725
aaccggcgccagccatggcctctggggcgggcggaagctggggtcgctccccaccgcagagcgcagtcccgacgccctgggtcaccttcctgcagcccctctcgtgggccgtcccacctgcgcccccgcagccaggccgcgtgaaggaagacctgctggaactgatgatgctgcagaacgcgcagatgcaccagctgctgctgagtcgcctggtggctggagcgctgcagccccggcctgcctcgccctgccctcaggtctacctggaggttccacaggaagagcctgaggaggaggaggaggagatggacgtgcgggagaaagggcctttggtgtttcaccaccactacttgccctatttgatgccctccccgggtgccctgctgccctggccagcccccttcttccccacccctgcttgtcagccctacttgcaggacgtgcccaggattcagcactgtcctgcctccagggaaagggagactactatgatgccgagagcctcctatgaggacagaccccggccctgggaactgcaccagcttcctgctctggatacagccccggagccgcctcctgcacctctcttgtcgactccccggtgcccatggctggcagtccttctcactccctcaacctcagccaggccctcttctcctggggaaatcagtccctgccccacgccaatgagttcctggacgggccggatctgtgctgttgtgtaagagctccctagagcaccacccaggcccttgaagccacgtcagcccgcctctgccccactgcttcctgcctggagcagggggaggcctgggaacagagcccccaccctctctccctcacccctctctctgggatgatgaggtctccttccagcctagtaatggagcaagaggggagggggggattccttctgctttccacagctttgaaggcccctttgaggtggctggaggggcccagagtggtcggggagagactttgctgggcagcgcccctgagcagagtcagttcgctgggccccccacccctcatcccaggaagcagctctgttggcagaaaggagaggtcagagctttgtcctgctgtggccaggagtggcctgaggtctcctggggccaggtgggaacagtgtgtcctctgccccctgggccagggtgtgtttcccccaccctccctcagtagcaatgagctactcgggccagatgggggcctgttgcatgggctgggaggcccctgtgaaggagagggtggggagggaggcat

SEQ ID NO: 169439 - DNA, 3127 bp, Homo sapiens
  Payload ID: 13365
  Gene Symbol: PRR29
  Gene Name: proline rich 29
  Uniprot ID: P0C7W0
  ENST ID: ENST00000412177
  CDS Start-End: 15-584
aaccggcgccagccatggcctctggggcgggcggaagctggggtcgctccccaccgcagagcgcagtcccgacgccctgggtcaccttcctgcagcccctctcgtgggccgtcccacctgcgcccccgcagccaggccgcgtgaaggaagacctgctggaactgatgatgctgcagaacgcgcagatgcaccagctgctgctgagtcgcctggtggctggagcgctgcagccccggcctgcctcgccctgccctcaggtctacctggaggttccacaggaagagcctgaggaggaggaggaggagatggacgtgcgggagaaagggcctttggtgtttcaccaccactacttgccctatttgatgccctccccgggtgccctgctgccctggccagcccccttcttccccacccctgcttgtcagccctacttgcaggacgtgcccaggattcagcactgtcctgcctccagggaaagggaggtgagagctgtgcccccacccccaccccccagtgccacagggactgtgggtgctgatgtacccccggcttcagactactatgatgccgagagcctcctatgaggacagaccccggccctgggaactgcaccagcttcctgctctggatacagccccggagccgcctcctgcacctctcttgtcgactccccggtgcccatggctggcagtccttctcactccctcaacctcagccaggccctcttctcctggggaaatcagtccctgccccacgccaatgagttcctggacgggccggatctgtgctgttgtgtaagagctccctagagcaccacccaggcccttgaagccacgtcagcccgcctctgccccactgcttcctgcctggagcagggggaggcctgggaacagagcccccaccctctctccctcacccctctctctgggatgatgaggtctccttccagcctagtaatggagcaagaggggagggggggattccttctgctttccacagctttgaaggcccctttgaggtggctggaggggcccagagtggtcggggagagactttgctgggcagcgcccctgagcagagtcagttcgctgggccccccacccctcatcccaggaagcagctctgttggcagaaaggagaggtcagagctttgtcctgctgtggccaggagtggcctgaggtctcctggggccaggtgggaacagtgtgtcctctgccccctgggccagggtgtgtttcccccaccctccctcagtagcaatgagctactcgggccagatgggggcctgttgcatgggctgggaggcccctgtgaaggagagggtggggagggaggcatctagggagaggggtcccccatggtggctcccctccctggccattgttatcccaggaggagacactgtgggcacagggctaagtccaggtgtttgtattcgggctagaaaaggcaatgtcccaagtctctgctgcctgtcacagtccttcagccagggctggacctcaaccctgaggagtcacactgagttccagtgaccaccgtggtggtggccatgccactcatggttgctatggccggaaggcctggggcagcctcctccaagccgctcgcaccccgtaggtgcccatccgctgctggcgcaagtgctggccgaagatgaagcagagcaggacagatgtcacgaacagggacagcaacaccgacaccaccgtgactatgatgaccatctggctgtccgacacaggctctggggagggagggggcaagggtcttagacgtcctgtgatcccagttaccagggaccaaaagggagtggaagtccacccccaacccagacccccagaccccgccgcccgctcatgcatccagcagtcaccccagttgcagagatgagtggtgaatggtgtctgcattaaaattattatctggaaaaaaggtggcccagggctcaggctaccagctggacttctgtgtggctgtgagggcagatgtccccttgtcagcagccatgggaccagtgtgtagctgctggacaccgtggcctggagggtggcatggtcccagccaagccccttcttgggcagagctgagtgaacttcatgccaggctccctgtgtgccggccgtccagggtcaccaagcagcagagctctggggacctcagtgggggcagtcaggccaaacttctcattgtggaggggagccaaggccagggagagccgtcaaggtcatggggcttgatggtggccgaggaactagttgacctctcccgacctctggagcagttgaggtccaagctggggacttggaaagaacttcagggaagagggagagtaagagggaagcctcaggatgaagggtgggctcctgggtgtttgcttcccaagtgggactcaagatttttcttcccccgaggggctgaaagtgacttatcactcccaactccatccacggatcccccctcaccatagatctccaacatcttcggggctgagtgtttgtgaaagatgttgccaccgcgagacatcaagtccagcacagccaggcaggagaagttgcggtggccatcctctctgtcagccgtgctgttgaatgtggctgtggcctcctgcggagcaggggctgccttcccgaaggtctcatagtgcagagtctcattgccacggaacaggaagagggtgaggctgtccaggggctccacggtgggcaccctgcactcaatggtgaaggacttgcccacagccaccaaagtgggttgcagtgtcaggatgacctgccttggaggctctgcaggggacaaaggagggaggtctggtcaggatgggggtgcagtcccagcagcctccccctggccagggccatctcctgtcaccatggtgttccacggttggggaggaggtggcctggccggctccagtgcagagaggaagagggcagcagttgaggatggaggctggactgtgtggtagttttacagacatgatggtttccggtgaccaggtgtctacaaggacaaggttcagaaattgtacagccaactggaaagatataaaagtttgggtctgtctcctctccttcagaaatgaaatataaatttcaaacattaaacagttgggtgatcacgttg

SEQ ID NO: 169440 - DNA, 458 bp, Homo sapiens
  Payload ID: 13365
  Gene Symbol: PRR29
  Gene Name: proline rich 29
  ENST ID: ENST00000580752
  CDS Start-End: 11-124
ggcgccagccatggcctctggggcgggcggaagctggggtcgctccccaccgcagagcgcagtcccgacggagagctgtgcccccacccccaccccccagtgccacagggactgtgggtgctgatgtacccccggcttcagactactatgatgccgagagcctcctatgaggacagaccccggccctgggaactgcaccagcttcctgctctggatacagccccggagccgcctcctgcacctctcttgtcgactccccggtgcccatggctggcagtccttctcactccctcaacctcagccaggccctcttctcctggggaaatcagtccctgccccacgccaatgagttcctggacgggccggatctgtgctgttgtgtaagagctccctagagcaccacccaggcccttgaagccacgtcagcccgcctctgccccactgcttcctgcctggag

SEQ ID NO: 169441 - DNA, 1052 bp, Homo sapiens
  Payload ID: 13365
  Gene Symbol: PRR29
  Gene Name: proline rich 29
  Uniprot ID: P0C7W0
  ENST ID: ENST00000579184
  CDS Start-End: 15-563
aaccggcgccagccatggcctctggggcgggcggaagctggggtcgctccccaccgcagagcgcagtcccgacgcccctctcgtgggccgtcccacctgcgcccccgcagccaggccgcgtgaaggaagacctgctggaactgatgatgctgcagaacgcgcagatgcaccagctgctgctgagtcgcctggtggctggagcgctgcagccccggcctgcctcgccctgccctcaggtctacctggaggttccacaggaagagcctgaggaggaggaggaggagatggacgtgcgggagaaagggcctttggtgtttcaccaccactacttgccctatttgatgccctccccgggtgccctgctgccctggccagcccccttcttccccacccctgcttgtcagccctacttgcaggacgtgcccaggattcagcactgtcctgcctccagggaaagggaggtgagagctgtgcccccacccccaccccccagtgccacagggactgtgggtgctgatgtacccccggcttcagactactatgatgccgagagcctcctatgaggacagaccccggccctgggaactgcaccagcttcctgctctggatacagccccggagccgcctcctgcacctctcttgtcgactccccggtgcccatggctggcagtccttctcactccctcaacctcagccaggccctcttctcctggggaaatcagtccctgccccacgccaatgagttcctggacgggccggatctgtgctgttgtgtaagagctccctagagcaccacccaggcccttgaagccacgtcagcccgcctctgccccactgcttcctgcctggagcagggggaggcctgggaacagagcccccaccctctctccctcacccctctctctgggatgatgaggtctccttccagcctagtaatggagcaagaggggagggggggattccttctgctttccacagctttgaaggcccctttgaggtggctggaggggcccagagtggtcggggagagactttgctgggcagcgcccctg

SEQ ID NO: 169442 - DNA, 478 bp, Homo sapiens
  Payload ID: 13365
  Gene Symbol: PRR29
  Gene Name: proline rich 29
  ENST ID: ENST00000583891
  CDS Start-End: 11-478
ggcgccagccatggcctctggggcgggcggaagctggggtcgctccccaccgcagagcgcagtcccgacgcccctctcgtgggccgtcccacctgcgcccccgcagccaggccgcgtgaaggaagacctgctggaactgatgatgctgcagaacgcgcagatgcaccagctgctgctgagtcgcctggtggctggagcgctgcagccccggcctgcctcgccctgccctcaggtctacctggaggttccacaggaagagcctgaggaggaggaggaggagatggacgtgcgggagaaagggcctttggtgtttcaccaccactacttgccctatttgatgccctccccgggtgccctgctgccctggccagcccccttcttccccacccctgcttgtcagccctacttgcaggacgtgcccaggattcagcactgtcctgcctccagggaaagggagactactatgatgccgagagcc

SEQ ID NO: 169443 - DNA, 565 bp, Homo sapiens
  Payload ID: 13365
  Gene Symbol: PRR29
  Gene Name: proline rich 29
  Uniprot ID: P0C7W0
  ENST ID: ENST00000577953
  CDS Start-End: 15-311
aaccggcgccagccatggcctctggggcgggcggaagctggggtcgctccccaccgcagagcgcagtcccgacgccctgggtcaccttcctgcagcccctctcgtgggccgtcccacctgcgcccccgcagccaggccgcgtgaaggaagacctgctggaactgatgatgctgcagaacgcgcagatgcaccagctgctgctgagtcgcctggtggctggagcgctgcagccccggcctgcctcgccctgccctcaggagagctgtgcccccacccccaccccccagtgccacagggactgtgggtgctgatgtacccccggcttcagactactatgatgccgagagcctcctatgaggacagaccccggccctgggaactgcaccagcttcctgctctggatacagccccggagccgcctcctgcacctctcttgtcgactccccggtgcccatggctggcagtccttctcactccctcaacctcagccaggccctcttctcctggggaaatcagtccctgccccacgccaatgagttcctggacgggccggatctgtgctgtt

SEQ ID NO: 169444 - DNA, 967 bp, Homo sapiens
  Payload ID: 13365
  Gene Symbol: PRR29
  Gene Name: proline rich 29
  ENST ID: ENST00000582540
  CDS Start-End: 92-508
aaccggcgccagccatggcctctggggcgggcggaagctggggtcgctccccaccgcagagcgcagtcccgacgacctgctggaactgatgatgctgcagaacgcgcagatgcaccagctgctgctgagtcgcctggtggctggagcgctgcagccccggcctgcctcgccctgccctcaggtctacctggaggttccacaggaagagcctgaggaggaggaggaggagatggacgtgcgggagaaagggcctttggtgtttcaccaccactacttgccctatttgatgccctccccgggtgccctgctgccctggccagcccccttcttccccacccctgcttgtcagccctacttgcaggacgtgcccaggattcagcactgtcctgcctccagggaaagggaggtgagagctgtgcccccacccccaccccccagtgccacagggactgtgggtgctgatgtacccccggcttcagactactatgatgccgagagcctcctatgaggacagaccccggccctgggaactgcaccagcttcctgctctggatacagccccggagccgcctcctgcacctctcttgtcgactccccggtgcccatggctggcagtccttctcactccctcaacctcagccaggccctcttctcctggggaaatcagtccctgccccacgccaatgagttcctggacgggccggatctgtgctgttgtgtaagagctccctagagcaccacccaggcccttgaagccacgtcagcccgcctctgccccactgcttcctgcctggagcagggggaggcctgggaacagagcccccaccctctctccctcacccctctctctgggatgatgaggtctccttccagcctagtaatggagcaagaggggagggggggattccttctgctttccacagctttgaaggcccctttgaggtggctggaggggcccagagtggtc

SEQ ID NO: 169445 - DNA, 1797 bp, Homo sapiens
  Payload ID: 13366
  Gene Symbol: PRR3
  Gene Name: proline rich 3
  Uniprot ID: P79522
  ENST ID: ENST00000376557
  CDS Start-End: 66-569
agaatccccgcgtgccccttcctcactaccctccaaatcccgctgcagccattgccgcagacacgatgccgaaacgaaagaagcagaatcatcaccagccaccgacacagcagcagcccccgctgcccgagcgggaagagactggagatgaggaggatgggagtcccatcgctcttcacagaggtcctccaggatcaaggggaccactgattccaccactgctgagtctcccacctcctccttggggtagaggcccaattcggagagggcttggccccaggtctagcccatatggtcgtggttggtggggagtcaatgcagaacctccttttccggggccaggccatgggggtcccaccaggggaagctttcacaaggaacagagaaaccctcgaaggctcaaaagctggtctcttatcaagaatacctgcccgcccaaggatgacccccaggttatggaagacaaatccgaccgccctgtctgccgacattttgccaaaaagggccactgtcgatatgaggacctctgtgccttctaccatccaggcgtcaatggacctcctctgtgagactgtgccttcccatccaggctggaaggagctctctgtgacctagcggccatttatttctctgtagccctatgatggctactgtgaggctcttctaacaccctcagtcagtgacacacccatcccatccaccacttcccccgtgtggggtccagagtggtgttgcatcactggtgcgcggcatacgcgctttcttctgatccagcctgtagagactcgcctttgggacccatctttgcttcctttcagttgcctcctggatcttctttcccgtcatcaaatgactgctgaacaggaaacctctttggtgctgtttcttgtgcatctgtccacctgttccccagtattgccctcaattcctgagagccctggagcggtttcctaccattcccttcttttagctgcttgttttaagtcctttttatgtgacattccctacccccaatgttgtcagctgcttgtgaaactcagccaggttgtctaacctggggtcaagtttgggtgactggtgcagagttacttcctaaaaggccactctccctgcctttggatttcatagtttctctgtcagtagcatgatccccaccgctatggtctatctatgatcaccgtgctttgtgaaactgtgcatccccttgtagcctttctcagtgtccgtggcatttttgtgacttcccagcactagaataagttttcctgccaaaatgagtgaggcgcttggtgccctctggactttcccacttcccaacatgggagaattgtgaactttccatcagactgcctccctggccctccccattcttctcctgttggttattctgagtctgacacagacccatgacatgtcttataaagcctccaatggctttatcctacctagatcccttccagcccattttaattagactatgtcattgtgaggccaccagtccattcatttgaattctgtgaatctccaccttgcctatctttgggtagaagctggacagtactgttgccctcttccaatcctcttcccctacatccctggcactggttgttttctgtgaaaacagcagtgaacaggttcagttttgaactggccctgaggaaatgggtcaggagttgtattggcaagagggaggggtgagagctgttggagaactgagaatgaggttttttttttttttttctttttaactttttttatattagtaataaatgcagtggaaaccagcattttatttaa

SEQ ID NO: 169446 - DNA, 2254 bp, Homo sapiens
  Payload ID: 13366
  Gene Symbol: PRR3
  Gene Name: proline rich 3
  Uniprot ID: P79522
  ENST ID: ENST00000376560
  CDS Start-End: 460-1026
aacccaagcgggacaaggacttttggggggaggtcaaagggcacgaagttgtgcctgcagctgttaccatagtaaccgaggaccggatgtggcgatcttacggtgcgacagtcctcttctcaggccctctggcccgagagcctgttgactctgtgacacactctgaggagctggttgtggtgttttccagcgagggaagaaaagagtaattttttcaaagcatttatagaaacgcagcaaagggaaggtgtgaggttgccgccatgcctggcagagacggagggaggcagttggctccggaatgcggccgccgcagatgttctccgcaaccttccggaagtggaatggcgggagcctcagcattgctgcccaccgaccccccggaagcggaaacagaatccccgcgtgccccttcctcactaccctccaaatcccgctgcagccattgccgcagacacgatgccgaaacgaaagaagcagaatcatcaccagccaccgacacagcagcagcccccgctgcccgagcgggaagagactggagatgaggaggatgggagtcccatcggaccacccagccttctgggccctccccccatggccaatggaaaacctggcgaccctaagtcagctcttcacagaggtcctccaggatcaaggggaccactgattccaccactgctgagtctcccacctcctccttggggtagaggcccaattcggagagggcttggccccaggtctagcccatatggtcgtggttggtggggagtcaatgcagaacctccttttccggggccaggccatgggggtcccaccaggggaagctttcacaaggaacagagaaaccctcgaaggctcaaaagctggtctcttatcaagaatacctgcccgcccaaggatgacccccaggttatggaagacaaatccgaccgccctgtctgccgacattttgccaaaaagggccactgtcgatatgaggacctctgtgccttctaccatccaggcgtcaatggacctcctctgtgagactgtgccttcccatccaggctggaaggagctctctgtgacctagcggccatttatttctctgtagccctatgatggctactgtgaggctcttctaacaccctcagtcagtgacacacccatcccatccaccacttcccccgtgtggggtccagagtggtgttgcatcactggtgcgcggcatacgcgctttcttctgatccagcctgtagagactcgcctttgggacccatctttgcttcctttcagttgcctcctggatcttctttcccgtcatcaaatgactgctgaacaggaaacctctttggtgctgtttcttgtgcatctgtccacctgttccccagtattgccctcaattcctgagagccctggagcggtttcctaccattcccttcttttagctgcttgttttaagtcctttttatgtgacattccctacccccaatgttgtcagctgcttgtgaaactcagccaggttgtctaacctggggtcaagtttgggtgactggtgcagagttacttcctaaaaggccactctccctgcctttggatttcatagtttctctgtcagtagcatgatccccaccgctatggtctatctatgatcaccgtgctttgtgaaactgtgcatccccttgtagcctttctcagtgtccgtggcatttttgtgacttcccagcactagaataagttttcctgccaaaatgagtgaggcgcttggtgccctctggactttcccacttcccaacatgggagaattgtgaactttccatcagactgcctccctggccctccccattcttctcctgttggttattctgagtctgacacagacccatgacatgtcttataaagcctccaatggctttatcctacctagatcccttccagcccattttaattagactatgtcattgtgaggccaccagtccattcatttgaattctgtgaatctccaccttgcctatctttgggtagaagctggacagtactgttgccctcttccaatcctcttcccctacatccctggcactggttgttttctgtgaaaacagcagtgaacaggttcagttttgaactggccctgaggaaatgggtcaggagttgtattggcaagagggaggggtgagagctgttggagaactgagaatgaggttttttttttttttttctttttaactttttttatattagtaataaatgcagtggaaaccagcattttatttaa

SEQ ID NO: 169447 - DNA, 2254 bp, Homo sapiens
  Payload ID: 13366
  Gene Symbol: PRR3
  Gene Name: proline rich 3
  Uniprot ID: P79522
  ENST ID: ENST00000383592
  CDS Start-End: 460-1026
aacccaagcgggacaaggacttttggggggaggtcaaagggcacgaagttgtgcctgcagctgttaccatagtaaccgaggaccggatgtggcgatcttacggtgcgacagtcctcttctcaggccctctggcccgagagcctgttgactctgtgacacactctgaggagctggttgtggtgttttccagcgagggaagaaaagagtaattttttcaaagcatttatagaaacgcagcaaagggaaggtgtgaggttgccgccatgcctggcagagacggagggaggcagttggctccggaatgcggccgccgcagatgttctccgcaaccttccggaagtggaatggcgggagcctcagcattgctgcccaccgaccccccggaagcggaaacagaatccccgcgtgccccttcctcactaccctccaaatcccgctgcagccattgccgcagacacgatgccgaaacgaaagaagcagaatcatcaccagccaccgacacagcagcagcccccgctgcccgagcgggaagagactggagatgaggaggatgggagtcccatcggaccacccagccttctgggccctccccccatggccaatggaaaacctggcgaccctaagtcagctcttcacagaggtcctccaggatcaaggggaccactgattccaccactgctgagtctcccacctcctccttggggtagaggcccaattcggagagggcttggccccaggtctagcccatatggtcgtggttggtggggagtcaatgcagaacctccttttccggggccaggccatgggggtcccaccaggggaagctttcacaaggaacagagaaaccctcgaaggctcaaaagctggtctcttatcaagaatacctgcccgcccaaggatgacccccaggttatggaagacaaatccgaccgccctgtctgccgacattttgccaaaaagggccactgtcgatatgaggacctctgtgccttctaccacccaggcgtcaatggacctcctctgtgagactgtgccttcccatccaggctggaaggagctctctgtgacctagcggccatttatttctctgtagccctatgatggctactgtgaggctcttctaacaccctcagtcagtgacacacccatcccatccaccacttcccccgtgtggggtccagagtggtgttgcatcactggtgcgcggcatacgcgctttcttctgatccagcctgtagagactcgccttcgggacccatctttgcttcctttcagttgcctcctggatcttctttcccgtcatcaaatgactgctgaacaggaaacctctttggtgctgtttcttgtgcatctgtccacctgttccccagtattgccctcaattcctgagagccctggagcggtttcctaccattcccttcttttagctgcttgttttaagtcctttttatgtgacattccctacccccaatgttgtcagctgcttgtgaaactcagccaggttgtctaacctggggtcaagtttgggtgactggtgcagagttacttcctaaaaggccactctccctgcctttggatttcatagtttctctgtcagtagcatgatccccaccgctatggtctatctatgatcaccgtgctttgtgaaactgtgcatccccttgtagcctttctcagtgtccgtggcatttttgtgacttcccagcactagaataagttttcctgccaaaatgagtgaggcgcttggtgccctctggactttcccacttcccaacatgggagaattgtgaactttccatcagactgcctccctggccctccccattcttctcctgttggttattctgagtctgacacagacccatgacatgtcttataaagcctccaatggctttatcctacctagatcccttccagcccattttaattagactatgtcattgtgaggccaccagtccattcatttgaattctgtgaatctccaccttgcctatctttgggtagaagctggacagtactgttgccctcttccaatcctcttcccctacatccctggcactggttgttttctgtgaaaacagcagtgaacaggttcagttttgaactggccctgaggaaatgggtcaggagttgtattggcaagagggaggggtgagagctgttggagaactgagaatgaggttttttttttttttttctttttaactttttttatattagtaataaatgcagtggaaaccagcattttatttaa

SEQ ID NO: 169448 - DNA, 2254 bp, Homo sapiens; identical to SEQ ID NO: 169447
  Payload ID: 13366
  Gene Symbol: PRR3
  Gene Name: proline rich 3
  Uniprot ID: P79522
  ENST ID: ENST00000454399
  CDS Start-End: 460-1026

SEQ ID NO: 169449 - DNA, 1797 bp, Homo sapiens; identical to SEQ ID NO: 169445
  Payload ID: 13366
  Gene Symbol: PRR3
  Gene Name: proline rich 3
  Uniprot ID: P79522
  ENST ID: ENST00000444972
  CDS Start-End: 66-569

SEQ ID NO: 169450 - DNA, 2254 bp, Homo sapiens; identical to SEQ ID NO: 169447
  Payload ID: 13366
  Gene Symbol: PRR3
  Gene Name: proline rich 3
  Uniprot ID: P79522
  ENST ID: ENST00000432371
  CDS Start-End: 460-1026

SEQ ID NO: 169451 - DNA, 2254 bp, Homo sapiens; identical to SEQ ID NO: 169446
  Payload ID: 13366
  Gene Symbol: PRR3
  Gene Name: proline rich 3
  Uniprot ID: P79522
  ENST ID: ENST00000449754
  CDS Start-End: 460-1026

SEQ ID NO: 169452 - DNA, 1797 bp, Homo sapiens
  Payload ID: 13366
  Gene Symbol: PRR3
  Gene Name: proline rich 3
  Uniprot ID: P79522
  ENST ID: ENST00000422639
  CDS Start-End: 66-569
agaatccccgcgtgccccttcctcactaccctccaaatcccgctgcagccattgccgcagacacgatgccgaaacgaaagaagcagaatcatcaccagccaccgacacagcagcagcccccgctgcccgagcgggaagagactggagatgaggaggatgggagtcccatcgctcttcacagaggtcctccaggatcaaggggaccactgattccaccactgctgagtctcccacctcctccttggggtagaggcccaattcggagagggcttggccccaggtctagcccatatggtcgtggttggtggggagtcaatgcagaacctccttttccggggccaggccatgggggtcccaccaggggaagctttcacaaggaacagagaaaccctcgaaggctcaaaagctggtctcttatcaagaatacctgcccgcccaaggatgacccccaggttatggaagacaaatccgaccgccctgtctgccgacattttgccaaaaagggccactgtcgatatgaggacctctgtgccttctaccacccaggcgtcaatggacctcctctgtgagactgtgccttcccatccaggctggaaggagctctctgtgacctagcggccatttatttctctgtagccctatgatggctactgtgaggctcttctaacaccctcagtcagtgacacacccatcccatccaccacttcccccgtgtggggtccagagtggtgttgcatcactggtgcgcggcatacgcgctttcttctgatccagcctgtagagactcgccttcgggacccatctttgcttcctttcagttgcctcctggatcttctttcccgtcatcaaatgactgctgaacaggaaacctctttggtgctgtttcttgtgcatctgtccacctgttccccagtattgccctcaattcctgagagccctggagcggtttcctaccattcccttcttttagctgcttgttttaagtcctttttatgtgacattccctacccccaatgttgtcagctgcttgtgaaactcagccaggttgtctaacctggggtcaagtttgggtgactggtgcagagttacttcctaaaaggccactctccctgcctttggatttcatagtttctctgtcagtagcatgatccccaccgctatggtctatctatgatcaccgtgctttgtgaaactgtgcatccccttgtagcctttctcagtgtccgtggcatttttgtgacttcccagcactagaataagttttcctgccaaaatgagtgaggcgcttggtgccctctggactttcccacttcccaacatgggagaattgtgaactttccatcagactgcctccctggccctccccattcttctcctgttggttattctgagtctgacacagacccatgacatgtcttataaagcctccaatggctttatcctacctagatcccttccagcccattttaattagactatgtcattgtgaggccaccagtccattcatttgaattctgtgaatctccaccttgcctatctttgggtagaagctggacagtactgttgccctcttccaatcctcttcccctacatccctggcactggttgttttctgtgaaaacagcagtgaacaggttcagttttgaactggccctgaggaaatgggtcaggagttgtattggcaagagggaggggtgagagctgttggagaactgagaatgaggttttttttttttttttctttttaactttttttatattagtaataaatgcagtggaaaccagcattttatttaa

SEQ ID NO: 169453 - DNA, 1797 bp, Homo sapiens; identical to SEQ ID NO: 169452
  Payload ID: 13366
  Gene Symbol: PRR3
  Gene Name: proline rich 3
  Uniprot ID: P79522
  ENST ID: ENST00000442290
  CDS Start-End: 66-569

SEQ ID NO: 169454 - DNA, 2254 bp, Homo sapiens; identical to SEQ ID NO: 169446
  Payload ID: 13366
  Gene Symbol: PRR3
  Gene Name: proline rich 3
  Uniprot ID: P79522
  ENST ID: ENST00000427729
  CDS Start-End: 460-1026

SEQ ID NO: 169455 - DNA, 1797 bp, Homo sapiens; identical to SEQ ID NO: 169452
  Payload ID: 13366
  Gene Symbol: PRR3
  Gene Name: proline rich 3
  Uniprot ID: P79522
  ENST ID: ENST00000418065
  CDS Start-End: 66-569

SEQ ID NO: 169456 - DNA, 1797 bp, Homo sapiens; identical to SEQ ID NO: 169445
  Payload ID: 13366
  Gene Symbol: PRR3
  Gene Name: proline rich 3
  Uniprot ID: P79522
  ENST ID: ENST00000436805
  CDS Start-End: 66-569

SEQ ID NO: 169457 - DNA, 1797 bp, Homo sapiens; identical to SEQ ID NO: 169452
  Payload ID: 13366
  Gene Symbol: PRR3
  Gene Name: proline rich 3
  Uniprot ID: P79522
  ENST ID: ENST00000422140
  CDS Start-End: 66-569

SEQ ID NO: 169458 - DNA, 2254 bp, Homo sapiens; identical to SEQ ID NO: 169447
  Payload ID: 13366
  Gene Symbol: PRR3
  Gene Name: proline rich 3
  Uniprot ID: P79522
  ENST ID: ENST00000453232
  CDS Start-End: 460-1026

SEQ ID NO: 169459 - DNA, 2008 bp, Homo sapiens
  Payload ID: 13367
  Gene Symbol: PRR30
  Gene Name: proline rich 30
  Uniprot ID: Q53SZ7
  ENST ID: ENST00000335524
  CDS Start-End: 527-1765
agctcccattggggtcggcgaacctggtgccaccccttagacaaagtcccagtctcccagaggcttttaccagctggccccattccttctgctgctgggtataataaggtcctctcaacgctgaagtgcctgtgaaacacagcccagaggagttctcattggtcctatgggctttgtcttcctctctgccccacccagataatcgctgctgcccctccactcccaagatgcagctgtgattctccatccccacacatccctcatcaatggttgactgcaaagaagtgagaagccaagcttagattcatgctcatgcctgaacaccctgagagcctggtgctggagggctgggtatccccttggcctgccaccagcacctgcacccacaccaggctggagccacgctctgcgcacagaaggtggccttgatttctcaggcacagctgacctcagagatactggtcctgactctgccaggtctcttatccctagtcttgttgccccagttccttctggattcaaggcgatgttgcctcaaaacaaggaccaggtgctgccacagacctcagtgctccctgggcgccccacttggggcttctcacaacttgtggactcctctcctcacaacctacagcctctctctccccatcagggcctccctccctctcaaccaccgttctcttccactcagtcccgtcgtccctcctcccctccaccagcatccccctctcctggcttccaattcggctcttgtgactcaaattctgactttgctccacatccctattctccctctctcccaagttcccctactttctttcaccagaactacctctctctcccccgtccacgtgcatcctctccctccaaccactggctgtacccctctccccctctgaccccttccttttctccctcccagcctcagaactcctcccttccccactcaccttgccagtccccttcccaccccgaggaactgcatagctccacactcacttccccaggccccagcccaccttctcataggctccactctaacaggcagacatggcgctggcatcagtacagggacactgggtccgggtcccctggagtggtggagagatgcgtgccaagcgagaaggatcctgcacagttcagggacccaggggccctggcccaggccctggtggtccagctggggcaccgccgcatcgcacacgacctgcggctactgcttttgcagcacctgtggctaggcagaaccggccaggccccagtcgtggagtatcctatatgcctggtgtgcctccggccccgcagcccctcctgccccctccccaggtacaggactggaccccggctgcttgctttccctcaactactgccctgtgtgcagggccaggaatctgggccactccggataggcatcggcttcggcctccgcctgcctcagggccaggccagggccttgcatctgctgcccgagaaaaggccgaaggaagcagggcctcagggcaaggctactcaggcctgtgggcatcaattgccagcatctcagcctccagcagctcaggcccgggccgacccagtcccaggcacaccctcccagaccaggagcttcaggtctgcaggccttcaatcaccaaactccccacgatgtttctccgggcctccacctcgggcaccaaaacaggtcactacctccctgaagcccaggccttgccctggcccaaagaggccagtttctctggagctcattctccaaaagtcatcagtctagttccagagccacggaggccccctggaacaccccctccaaacccaaccctcccaaccaggccccagatctcggggagtccccgagacaccctgaagggctggctggccggaggtcaggtgtgttctcctgctctgaaccctgggagccccttgtggagtctgctgtctccaggctgaagaggaccaagggcaccaaggccccattcagccctccgtgtatctaataaagtctgaccctgtgaaa

SEQ ID NO: 169460 - DNA, 832 bp, Homo sapiens
  Payload ID: 13367
  Gene Symbol: PRR30
  Gene Name: proline rich 30
  ENST ID: ENST00000432962
  CDS Start-End: 520-832
attggggtcggcgaacctggtgccaccccttagacaaagtcccagtctcccagaggcttttaccagctggccccattccttctgctgctgggtataataaggtcctctcaacgctgaagtgcctgtgaaacacagcccagaggagttctcattggtcctatgggctttgtcttcctctctgccccacccagataatcgctgctgcccctccactcccaagatgcagctgtgattctccatccccacacatccctcatcaatggttgactgcaaagaagtgagaagccaagcttagattcatgctcatgcctgaacaccctgagagcctggtgctggagggctgggtatccccttggcctgccaccagcacctgcacccacaccaggctggagccacgctctgcgcacagaaggtggccttgatttctcaggcacagctgacctcagagatactggtcctgactctgccaggtctcttatccctagtcttgttgccccagttccttctggattcaaggcgatgttgcctcaaaacaaggaccaggcagacatggcgctggcatcagtacagggacactgggtccgggtcccctggagtggtggagagatgcgtgccaagcgagaaggatcctgcacagttcagggacccaggggccctggcccaggccctggtggtccagctggggcaccgccgcatcgcacacgacctgcggctactgcttttgcagcacctgtggctaggcagaaccggccaggccccagtcgtggagtatcctatatgcctggtgtgcctccggccccgcagcccctcctgccccctccccaggtacagg

SEQ ID NO: 169461 - DNA, 1228 bp, Homo sapiens
  Payload ID: 13368
  Gene Symbol: PRR32
  Gene Name: proline rich 32
  Uniprot ID: B1ATL7
  ENST ID: ENST00000371125
  CDS Start-End: 81-977
gtcatttctccagacctagctggcctgttcagtgggttatctccaccacctcaggaaagctattctgatcaaatttcttcatggcttgtattgaaaacgtccttggagggcacgccccttcacccttggtagtatctgtggacaaaaatgggaaccaggagctgcaccacgacatgcccctgcaatgtctgagttccaagccagaggatgacgcagagccctggggtcaacctcaagtaccgctgagaccttccgtcaatgtgctgactgatctggatagcaagcaactggagtggccctctgaaagaacaggatcctgcattcctcttcatagcttgagagctcatagacacccctacgggccaccacctgctgttgcagaagagtccctagcaacagcagaagtaaacagctctgatgcactggcaggctggaggcaggagggacaggatgctattaatgtgtcctgggaagtctctggcggccctcctgcactgatagtagggggcacaaaggtcaacaatgggggcactgagagaggcagtaataacgcaaggttgcatgtagctttgccacaaggtaaagggttctttccacccaggggcccacaagtgagaggcccttcacatattcccacccttagatcagggatagtaatggaggtgccgcccggaaatacacgaatagcctgcagaggaaagctggctcatgtttctttcccactcaggggcccatgccaccccatgcataattggccaaggcctatcccgttgtcttccagtactccaggtttaccttcttgctctactgttcattgtttcatccctcctcgacctccgattttcaatccctttctcactatgcctcttccttttgctcctcctccgatatttggtcctccactgccttcttattttgcccatttccattctgggggaatgccagctcctgcatcacccaacagagagcacagctgatggcaaaaaggaaggatgaaaaaagggttgtggaaagaggtgaaagttattcatttatgcttttatatttgaaaccttgtaccctcccacactctgtttagcactaatgtgccctacttgaaaccacgtaccctcccacactctgtttagcactaatgtgccctatttgaaaccttgtaccctaccacactctgtttagcacaaatgtgccctacatactggagattaaataaagattgtgaagtctgaaa

SEQ ID NO: 169462 - DNA, 1710 bp, Homo sapiens
  Payload ID: 13369
  Gene Symbol: PRR33
  Gene Name: proline rich 33
  Uniprot ID: A8MZF0
  ENST ID: ENST00000391480
  CDS Start-End: 271-1710
ggaggcaggttctagccccatccctggagggactcggcctctgtggcctcatttctacactagggtgatggtggggccaccccaaagtccccaaggcacagtcgagctcagcatgtccctggcaggttctgggtgctcaggaagcagaatactcaggcctccacacccctggccccaggtcctccttggaccacaggagacacaggcctcccacctcaggagggaggagggctggcctgaccactgtccctcccaccctaggacacagtcatgctcatatcggctgcgtcgatggcacccgaggtgtgcggcccaagcctccagggaacccctggacccccaccgcccctgctgcccaagccagggaaggacaacttgcgtttgcagaagctcctgaggaaggcagcccggaagaagatgatgggaggcacacacctcgctccacccagggccttccgcacctccctgtcccccgtgagtgaggccagccatgaccaggaggtcacagccccgcacgctgctgagggcccgcaccccgccgaagccccacgccttcctgaagccccacgccccgccgaggctccccgcatggtggctgccctaccccgctccccgcacacccccatcatccaccacgtggcatcacccctgcagaagtccacgttctccatcggcctcacccagcgcaggattctagctgctcaattcagggccatggggccccaggttgtagcctcggccccagaacctacccggccccccagtggcttcgtccctgtctctgggggtgggggcacccacgtcacccaggtgcacatccagctggcaccatccccacacaatgggacccctgagcctcccaggacagccccagaagtgggatccaacagccaggatggagatgccaccccaagtccccccagggcccagcccctggtcccagtggctcacatccgcccactgcccaccacagtccaggctgccagtcccttgcctgaggagccccctgtaccacggccgccacccggcttccaggcctcagtgcccagagaggctagtgccagggttgtggtgcccatagccccgacctgccgctcgctggagtcctcaccgcacagcctggtccccatgggccctggcagagagcacctggaggagcccccgatggctggccccgccgctgaggccgagcgagtgtccagccctgcctgggcctcatcccctaccccaccatcaggccctcacccatgccctgtccccaaagttgcacccaagccccggctcagtggctggacgtggctcaagaagcagctgctggaggaggccccagagcctccgtgcccagagccgcggcagagcctggagccagaggtgcccacccccacagagcaggaggtgcctgcccccacagagcaggaggtgcccgccctcaccgcaccccgggcccccgcctcccggacctccaggatgtgggatgccgtgctgtaccgcatgtcagtggcggaggcccaagggcgcctggcagggcccagcggtggggagcacaccccagccagcctcacccgcctgcccttcctgtaccggcctcgcttcaacgcccggaagctgcaggaggccacccggccccctcccacagtccgctccatcctggagctgagcccccagcccaagaacttcaaccgcacagcgactggctggaggctccagtga

SEQ ID NO: 169463 - DNA, 2817 bp, Homo sapiens
  Payload ID: 13370
  Gene Symbol: PRR34
  Gene Name: proline rich 34
  Uniprot ID: Q9NV39
  ENST ID: ENST00000396008
  CDS Start-End: 52-468
acacgcgtcctcccctcggcggggaggccggctaggggcaggcgggcagcgatgcctgcgtcggccacagctgcctggcactgccctcctttgtgcctgcctcctctgccagcctccgctccaacctccccccccaaccccgcaacgaggcctgctcctgggcccggccgcagggcccgttgcccacagagcgcccaccctgcgcccacccggggtgccctcaccttctgggcccctggctcctggcctcgggtcctgctggtgcccaggtcgcccggccccgtcctccgtgctccgcgtttgccccaccctgctgcccgagctcggcggcgagcctggcacggtgccaggctgcctgggagcccagcccgggcagggcgaactttccagcgagggttggtctcaaactcctgggctcatgcaatcttcctgcctcggcctcccaatgtgctggaattacaggtatgagctaccgcgctcagcccaaacccagggctcttaaccaccctactatgtactgtgctggcccccggtcaagggagagaactcacgtcaggcaaaaatgttttacagagaggcagctaagtcttttccacagtggatgacacagtccccctcacaaaccaccccacagatccaaccccaaggaactctgcttctacgtgtgcccttggggcaagggatgcaaagcaccaggcgatggagctcagaggatggcactcttccagagagctgtgtgtctctgggaaagctaacacacctctctgagcctgttgctacagctttaccatcagcgatgtgactgcaagccttctcagctgcctgtcagcagatgcacaggcctgtgcacagagctctgcggagaccacgccgacatcgccgcacacccaccctcctgctcatgggacagaccattcacacctgcttcaccaccagccacaggcttgtcggaaggagcagactcttctccacggacaagccactgcccctttgagggcctcagcttccttaccctatgagatgaggaaacagatcttcacttgccacaggacttggggggatgaaaaggtaacctccgtaaagctgcccctggtgtggggaagccaccccatagatgacattgcccgccctccccctaggcccagagctctacagagtcctcaagctggtgtccctccaggctaaaacacttccaccccctgggcagtgcactacagggtggtggggaaggggccatctgtggaagaaacacagggcctggcctggggtcctgggcaagacctctgtgacctcagtttccccagatccctccaggtgtgaccttgtagatggcctctattctggattcacagctgctgaggaggaggaagaggacactgaaggcattccttcagtcccctggggaggttcagatgctcagactccctgataccacctttcctgggcagaataaagtccccaagatgtccaagccctaatccctggagcctgggaaagtgttacctcccagaccaaagggactttgtaggtgtgtgattgagttgaagatctgcagtgagagggtagcctggattagccacgtgtgcccaaaagcagagactccttcccagccgtggtcagagacagaacaaggggacgctgctggctttaaagacggaagaagggacgaggagccaaggagtgcaagtgccgccagaggccagaaaaggcaagggatggatttttcccctggagttccaggaggaaccagccctgccaacacctggattttagttctgggaccccacctcagacatctgacccccttgactgtaaggtaataaatgtgcgttgcttaagccactgagtcagccataagttgttacatggctgccacaggaaactaacaggccctcccctctggccccaacatgcccagctgcctgtgaaggggaagaaggatggcacaaggcacggccctcatcgatgtgttcacacaccttgctcccctactgagctggccctggggctgcagacctgatccctgctctcaggagccttcgccagctgagagacgcccgcagagcctcccctccactgcggaggctcgaaccttccctcctgctgctgctgccccatcctctcctcttcctcctgctgctgtttgttgagtgctccctgtgagtaggcaccaggctagtgtcctcctcccaaccccagcctcataggctcagcggtcaggccacccgagcagtcacattgtagacccctgaatcctgcccatggtttggcaggacaaagggccttttctgcttcagagtcacaaatgtgtcctcctcacaataagggtggcatggaggtccctgggccagtgcctcagcctattgagcctggggtccttgtctgtacagggggatgaaggtagcacctcacagatggcgataaacccagccagtgcagggcaggcagtcagcgctccaaactcgcttcaagtctttgcctatgctgccaatcaagtcagctgtgggaagagtcaggtttttctcttgaaagtcagggccgggcacggtggctcatgcctgtaatcccagcactttgggaggctgaggtgggtagatcacaaggtcaggagaccgagaccatcctggctaacacagtgaaaccctgtctctactaaaaatacaaaaaattagccgggcatggtggcacgcacctgtagtcccacctacttgggaggctgaggcaggagaatcacttgaacctgggaggcagaggtttgcagtgaaccgagatcacgccactgcactccagccctggacgacagtgagactctatctc

SEQ ID NO: 169464 - DNA, 2216 bp, Homo sapiens
  Payload ID: 13371
  Gene Symbol: PRR35
  Gene Name: proline rich 35
  Uniprot ID: P0CG20
  ENST ID: ENST00000409413
  CDS Start-End: 280-1995
gggacgcgggcggcggcggaggctgcgggagtcgctgccgctcgagggaccgcggacccgggaggtccggctcccggcgccgggcctcagtttcccccacgggagccgcatcccacccccagagccccagcgcgtccgcggggtccgagtcgcggccggcgcggggcggggaggggcgggaagtttgcgccctacacgcggcctcgcagacttggcggctccgctcccggccgggcgcaggtggccatggtgcccggccctgcctcatagcaggctgccatgtcgcgggaggcgggctcatgccgcgtgggcacaggggcgagggcgcggtctcggaagcccaagaagccacactacatcccgcggccctggggcaaaccctacaactacaaatgcttccagtgccccttcacctgcctggagaagtcacacctctacaaccacatgaagtacagcctctgcaaggactccctgtccctgctgctagactccccagactgggcgtgccgccgtggctccaccacgcctaggccccacgcacccaccccagaccgccctggggagtccgaccccggcaggcaaccccagggagcacggcccacaggtgctgcccccgcgcctgacctcgtggtcgccgacatccactccctgcactgtggcggaggccccaagtccagggccaaggggtccccagggccaccaccccctgtggctagggccacccggaagggtcccggccccagtgggctcctgcctgagtcgtggaagccggggatgggaggggacccaaggggcgtgggtgcgggggacatggcctcagcaggccctgagggcagcgtcccctgctatcccccgcctgccccaggggagttccctgaggcccacagcctccacctgtctctgctgggcgtcaactacccgctcagccccggcctcttctcctacttggggccctcactggccgctgcagcccatgtgcccttcctggcctcggccagccccctgctgcccccggccacggccttcccagccgtgcagccccctcagcgccccaccccggccccccgcctgtactacccgctgcttctggagcacactctggggctgccagcaggcaaagctgcccttgccaaggcccctgtctcccccaggagcccctctgggactccggctcctggcctgctgaaggtgccagttccagggctggggccctggccccgagtcacccccagggacccagggcaggagggggagctggagcgggcagcccagagtgaccccaggaggaggctgtccctgggaagcaggctggagcttccgaaggcatcccccagcctgacaaggttctgttcccggagcagcctgcccaccggctcctctgtgatgctgtggcctgaggacggggatccaggcggccctgagacccccggccctgagggccccctccccctgcagccacggggcccagtgccaggaagcccggagcatgtgggcgaggacctgacccgagccctcggtgactacgccagggtggagcagcgcctgggacagttggggcccgcggggggcctggccccgagacccctgcgggagcagctgggcaagatccgcctggagctgctcaccattcaccaggcgctggagcaggccgtgaggccgccagacgcacccctcgacctctctgtgaaacgtgcgcccgccaaggggccccaggctcttggagaggcgtgggggcggcccgagctgggtcccgtgttgaccgggggcacccccgagccacccggcatgctgggccctgcagcgccccaacccttctctggccacaccaccaagtgtgaggccgactccagcgtcccacccccagggctccccctcgcagccccagatgaccctgtcattcctggcagtggctggggcacctgtgttgcgacgaggagttcccagacccctgaggctgtctgtggcctgcagagcccccagggcgccgaggtctgacctgcagcgcctgaggtctgactgtctctgcctgcagcatgccggcccctctcctgcagcccctgcccctcacctgcctgggacctgccccgcctccgcatgcatgtggatagacccccacgggccgtggccaacgcttgtccctggggccacacagggacactggaggtcacagttatttattgatcacaattgtggacattaaaacagaaactgttcac

SEQ ID NO: 169465 - DNA, 4456 bp, Homo sapiens
  Payload ID: 13372
  Gene Symbol: PRR36
  Gene Name: proline rich 36
  Uniprot ID: Q9H6K5
  ENST ID: ENST00000618550
  CDS Start-End: 102-4142
ctcgcctcctcgccgctggcggccaccgcgtcgctccggcccgggccccaccccaggcgactctgtgaggagcggccggaggccggaggcggaggtgcaagatggacaacaagagagacaaggcgaaggcaggggccgccgcgcggacgccggctgctcgcgctcctggacttctgacccccaggcccccaggctctcctcgaccccctcccccagtaactcccgcagccctccgagttctgggagctgcgggagcagtggggcgaaagcctctggcagagcgagcggggggcatcggcggggccactattcccgagtctgctccccgagcgggaccaacgcggagtgctgggacaagttcccgaaaccctgcctccaggcccccagcctctgggagaggggagagagctcctcctgccaagaacaccagcccaggccctgtttctagcccagggcgtgccagcgggaccaccaggccaggccctcttggccagaagggactccggatctcagcggaggaaactgtggccagaggaaaagctacagaggctcccaaaaggagtgccctcagcgctggggcacggagagacacttccgggcctaccccaggaaccccgtccccggccatggcccgtcggtcccgggctgcgggcaccgaggtggggctcccccggccagctccgagtgcccggccacggcccccgacagagggcccccggaaatcagtgagcagcgcctcggagcacagtaccaccgagccaagcccggctgccaggaggcggcccagcgccggtgggggtctccagaggccggcctcgcgctccctgagctccagcgccacccctctctcctccccagcccgttctgggccctcagcccgcggaacacccagggctcctgcgcatccctcgcagcccaagccgaaaggactgcaggctctgcgaccccctcaggtcacacccccaaggaaggacgcagccccagcactaggaccgctttcttcctctcctttggccacaccctctccatcgggtaccaaggcaagacccgtaccgcctcccgacaatgcagccactcccctgccagccacgctccctccctctccaccggtaacgccccctccgccagccgctctccaaagtcaggccccgcccaccctgccggccacgccccactcgtcgagccttacctgtcagttggccacgccccttcctctagcccctccttctccctctgctccaccttctctgcagaccctcccctctccaccagccacgcccccctcgcaagttccacccacacagctgattatgtcctttccagaagcaggcgtctcttccctggccacagccgcttttgtggcttcagtctctccatcagtttcatcccctctgcagagtatgccccccacccaagctaatccagcgttgccctctcttccgactctcctctctcccttggccacacctcctctgtcagccatgtctcctctacaaggccctgtttctccggcaacatctctggggaattcggcttttcccctggccgcactccctcagccaggcctttctgctctgaccacgccccctccgcaggccagtccttccccgtctccgccctctctccaggccacgccccacactctggccactcttcctctgcaggactctcctcttctggccacattgcctctgcaggcctctccctctcctttgaccacagtctctctgcaggatcctcctctagtttctccctctcttttggcctcaccgcctctgcaggctccgccccacccacaggccccaccttctatgactacgccccctatgcaggccccgccctctctccagaccattcccccaatacaggtcccacattctctgacctcaccgtctctgcaggcacctccctctcctctggctttgtcctctctgcaggccacaacttctttgggctcacccactctgcaggccacacattctttcctgacaatgtcccctaggcaaacccaagcttctttgatctcaccttctcggccggcctctactccccctgattcaccccctctgcaggcccctctttcccttcctgcctcaccccctctgcagacttctctctctcctgctgtctcacccctaagctcacccctgaccatacaccctctgcaggcgctatcttctctggcctcccactctcctcaggcacctctctcttccctgatcatgccccctctggagacccaatcttccctagccccaccctctctgcagacacctcctgcttccctgaccacaccccctctggagaacctaccttctctagccccgcctcctctgcagacagcttctgctcccctgaccacaccccctctggagaacctaccttctctagccccgcctcctctgcagacagcttctgctcccctgaccacaccccatctggagactccaccttgtccagccccatgccctctgcaagcaccaccttcgccattgaccacgccccctccggagacgccctcttccatagccacgcctcctccacaggccccacctgctctggcctcaccccctttgcagggcctgccctctccccctctgtctcctttggccacgccccctccacaggccccacctgccctggccttgcctcctctgcaggcccctccctctccccctgcctcaccccctctgtctcctttggccacaccctctccacaggccccaaatgctctggcagtgcaccttctgcaggcccctttctctccccctccctcacccccagtgcaggcccctttctctccccctgcctcacccccagtgtctccttcggccacgcccccttcacaggccccaccctctctagccgcacctcctctgcaggtcccaccctctccccctgcctctcccccaatgtctccttcagccacgccccctccacaggccccaccccctctcgctgcgcctcctctgcaggtcccaccctctccccctgcctctcccccaatgtctccttcggccacgccccctccacgggtcccaccccttcttgccgctcctcctctgcaggtcccgccctctccccctgcctcactcccaatgtctcctttggctaagccccctccacaggccccacctgctctggccacacctcctctgcaggcccttccctctccgcctgcctcattccctgggcaggcccctttctcaccctctgcctcactcccaatgtctcctttggccacgcctcctccacaggccccacctgttctggcagcgccccttctgcaggtccctccctctccccctgcctcacccaccctgcaggccccacgccgccccccgaccccgggtccggatacctccgtctcgggcccacggctgaccctggcgttggcccccggcccgccgccgccgccctcgcgcagcccgtccagcacgctgagcggcccagacctggccggccacagcagcagcgccacgagcacgccagaggagctgcgtggctacgacagcgggcccgagggcggtgccgcagcctccccgccccccgacgcagagctcgccgcttgccacccggctgcctggagtcgaggccccgctccgccgctggctttccgcggagccccaggtgcgcccctgccgtggcctcccgctaccggaccgggctctgctgacggtctgtgcaccatctacgagactgaagggcccgagtcggcgacccccgcccctggcgcactggatccggggcccagtcccggcacgagcggtgggaaggcggcggctggggccggggccggggcgtcctcgcggagcccgaagcaggcgcgcctgggcgagctgccactgggggcgctgcaggcgagcgtcgtgcagcacctgctgagccggacgctgctgctggcggctgccgagggtgccgcgggcggcagcggcgggggcccaggaggtgcggagggtggtggcgtcacagggggcgcccgggctgcactcagcgacgccgaactcggccgctgggccgaactactgtctcccctggacgagtcccgtgccagcatcacctcggtcaccagcttctctccggacgacgtggcctccccgcagggtgactggaccgtggtggaggtggagaccttccactgagccagaccacagccccgcctgctacaccccacccctgccttaggatccgcccctccgggtacgccgtttgttttagaccccgcctccactgccctggagccccgctgggtggattagtcttagctccctagagcctgagcctttggcctcggaggctcgggacctacccacagctttgacctaggcccgcccctcgagctccgcccctttggcctaggacacgccccgtttccccgagtcccgccccgtgtgcagtgtattgcccaccccgcacagcctgagtttgcaataaaactgggacactgggacttgca

SEQ ID NO: 169466 - DNA, 1261 bp, Homo sapiens
  Payload ID: 13372
  Gene Symbol: PRR36
  Gene Name: proline rich 36
  ENST ID: ENST00000615988
  CDS Start-End: 1-826
ctctcctcgaccccctcccccagtaactcccgcagccctccgagttctgggagctgcgggagcagtggggcgaaagcctctggcagagcgagcggggggcatcggcggggccactattcccgagtctgctccccgagcgggaccaacgcggagtgctgggacaagttcccgaaaccctgcctccaggcccccagcctctgggagaggggagagagctcctcctgccaagaacaccagcccaggccctgtttctagcccagggcgtgccagcgggaccaccaggccaggccctcttggccagaagggactccggatctcagcggaggaaactgtggccagaggaaaagctacagaggctcccaaaaggagtgccctcagcgctggggcacggagagcccgttctgggccctcagcccgcggaacacccagggctcctgcgcatccctcgcagcccaagccgaaaggactgcaggctctgcgaccccctcaggtcacacccccaaggaaggacgcagccccagcactaggaccgctttcttcctctcctttggccacaccctctccatcgggtaccaagcccgtccagcacgctgagcggcccagacctggccggccacagcagcagcgccacgagcacgccagaggagctgcgtggctacgacagcgggcccgagggcggtgccgcagcctccccgccccccgacgcagagctcgccgcttgccacccggctgcctggagtcgaggccccgctccgccgctggctttccgcggagccccaggtgcgcccctgccgtggcctcccgctaccggaccgggctctgctgacggtctgtgcaccatctacgagactgaagggcccgagtcggcgacccccgcccctggcgcactggatccggggcccagtcccggcacgagcggtgggaaggcggcggctggggccggggccggggcgtcctcgcggagcccgaagcaggcgcgcctgggcgagctgccactgggggcgctgcaggcgagcgtcgtgcagcacctgctgagccggacgctgctgctggcggctgccgagggtgccgcgggcggcagcggcgggggcccaggaggtgcggagggtggtggcgtcacagggggcgcccgggctgcactcagcgacgccgaactcggccgctgggccgaactactgtctcccctggacgagtcccgtgccagcatcacctcggtcaccagcttctctccggacgacgtggcctccccgcagggtgactg

SEQ ID NO: 169467 - DNA, 563 bp, Homo sapiens
  Payload ID: 13373
  Gene Symbol: PRR4
  Gene Name: proline rich 4 (lacrimal)
  Uniprot ID: Q16378
  ENST ID: ENST00000228811
  CDS Start-End: 39-443
aacgcagagttgggagcaactccagagcctccttcaagatgctgctggtcctgctctcagtggtccttctggctctgagctcagctcagagcacagataatgatgtgaactatgaagactttactttcaccataccagatgtagaggactcaagtcagagaccagatcagggaccccagagacctcctcctgaaggactcctacctagaccccctggtgatagtggtaaccaagatgatggtcctcagcagagaccaccaaaaccaggaggccatcaccgccatcctcccccacctccttttcaaaatcagcaacgaccaccccgacgaggacaccgtcaactctctctaccccgatttccttctgtcagcctgcaggaagcatcatcattcttccagagggacagaccagcaagacatccccaggagcaaccactctggtaatctagaattcagtggcagaaaataaataagaagataacttccttcagaaagccatgacattgaaataatgtggtcataactctttcttcagtataccaataaaatattaatagcatgcaa

SEQ ID NO: 169468 - DNA, 326 bp, Homo sapiens
  Payload ID: 13373
  Gene Symbol: PRR4
  Gene Name: proline rich 4 (lacrimal)
  Uniprot ID: Q16378
  ENST ID: ENST00000544994
  CDS Start-End: 34-231
agagttgggagcaactccagagcctccttcaagatgctgctggtcctgctctcagtggtccttctggctctgagctcagctcagagcacagataatgatgtgaactatgaagactttactttcaccataccagcctgcaggaagcatcatcattcttccagagggacagaccagcaagacatccccaggagcaaccactctggtaatctagaattcagtggcagaaaataaataagaagataacttccttcagaaagccatgacattgaaataatgtggtcataactctttcttcagtataccaataaaatattaatagcatgcaa

SEQ ID NO: 169469 - DNA, 388 bp, Homo sapiens
  Payload ID: 13373
  Gene Symbol: PRR4
  Gene Name: proline rich 4 (lacrimal)
  ENST ID: ENST00000540107
  CDS Start-End: 39-275
aacgcagagttgggagcaactccagagcctccttcaagatgctgctggtcctgctctcagtggtccttctggctctgagctcagctcagagcacagataatgatgtgaactatgaagactttactttcaccataccagcaacgaccaccccgacgaggacaccgtcaactctctctaccccgatttccttctgtcagcctgcaggaagcatcatcattcttccagagggacagaccagcaagacatccccaggagcaaccactctggtaatctagaattcagtggcagaaaataaataagaagataacttccttcagaaagccatgacattgaaataatgtggtcataactctttcttcagtataccaataaaatattaatagcatgc

SEQ ID NO: 169470 - DNA, 563 bp, Homo sapiens; identical to SEQ ID NO: 169467
  Payload ID: 13373
  Gene Symbol: PRR4
  Gene Name: proline rich 4 (lacrimal)
  Uniprot ID: Q16378
  ENST ID: ENST00000574424
  CDS Start-End: 39-443

SEQ ID NO: 169471 - DNA, 388 bp, Homo sapiens; identical to SEQ ID NO: 169469
  Payload ID: 13373
  Gene Symbol: PRR4
  Gene Name: proline rich 4 (lacrimal)
  ENST ID: ENST00000574037
  CDS Start-End: 39-275

SEQ ID NO: 169472 - DNA, 326 bp, Homo sapiens; identical to SEQ ID NO: 169468
  Payload ID: 13373
  Gene Symbol: PRR4
  Gene Name: proline rich 4 (lacrimal)
  Uniprot ID: Q16378
  ENST ID: ENST00000576999
  CDS Start-End: 34-231

SEQ ID NO: 169473 - DNA, 563 bp, Homo sapiens; identical to SEQ ID NO: 169467
  Payload ID: 13373
  Gene Symbol: PRR4
  Gene Name: proline rich 4 (lacrimal)
  Uniprot ID: Q16378
  ENST ID: ENST00000614435
  CDS Start-End: 39-443

SEQ ID NO: 169474 - DNA, 889 bp, Homo sapiens
  Payload ID: 13373
  Gene Symbol: PRR4
  Gene Name: proline rich 4 (lacrimal)
  ENST ID: ENST00000535024
  CDS Start-End: 326-769
gggagtcggccatcatgctggccccggaggccgttagcttagtcatggctctaaatatgtacctgcaatcggatgttgaggatcaccgagcccgcgacgtagaagtacgggaagttcatgcgcagctgccaggccagctcgaagaaggcgagcagggtgcgggagagccccttgcagaagacgccgtacgaggttctccagcatttggctcaaggccccaagggcacatgtgacaagaaggcgccagctttttaaacattggaagttcttctgtgtcagttctgtgacagaacatttacttaacacatcatgaaggctagtttggatgtggaggggaatagactccatctatccatatgagctgctgcagaagaatattttgcctgctggaacctgctgtatctactcaagagtggaagttttcacagatgtgaactatgaagactttactttcaccataccagatgtagaggactcaagtcagagaccagatcagggaccccagagacctcctcctgaaggactcctacctagaccccctggtgatagtggtaaccaagatgatggtcctcagcagagaccaccaaaaccaggaggccatcaccgccatcctcccccacctccttttcaaaatcagcaacgaccaccccgacgaggacaccgtcaactctctctaccccgatttccttctgtcagcctgcaggaagcatcatcattcttccagagggacagaccagcaagacatccccaggagcaaccactctggtaatctagaattcagtggcagaaaataaataagaagataacttccttcagaaagccatgacattgaaataatgtggtcataactctttcttcagtataccaataaaatattaatagcatgcaa

SEQ ID NO: 169475 - DNA, 603 bp, Homo sapiens
  Payload ID: 13373
  Gene Symbol: PRR4
  Gene Name: proline rich 4 (lacrimal)
  ENST ID: ENST00000613368
  CDS Start-End: 39-539
agcacaaagttgggagtgacaccagagcctcctgcaagatgcttctgattctgctgtcagtggccctgctggccttcagctcagctcaggatttaaatgaagatgtcagccaggaagatgttcccctcgtaatatcagatggaggagactctgagcagttcctagatgaggagcgtcagggaccacctttgggaggacagcaatctcaaccctctgctggtgatgggaaccaggatgatggccctcagcagggaccaccccaacaaggaggccagcagcaacaaggtccaccacctcctcagggaaagccacaaggaccaccccaacagggaggccatccccctcctcctcaaggaaggccacaaggaccaccccaacagggaggccatccccgtcctcctcgaggaaggccacaaggaccaccccaacagggaggccatcagcaaggtcctcccccacctcctcctggaaagccccagggaccacctccccaagggggccgcccacaaggacctccacaggggcagtctcctcagtaatctaggattcaatgacaggaagtgaataagaagataacagtgtttcaaatgccgtgaaacatgg

SEQ ID NO: 169476 - DNA, 326 bp, Homo sapiens; identical to SEQ ID NO: 169468
  Payload ID: 13373
  Gene Symbol: PRR4
  Gene Name: proline rich 4 (lacrimal)
  Uniprot ID: Q16378
  ENST ID: ENST00000632373
  CDS Start-End: 34-231

SEQ ID NO: 169477 - DNA, 889 bp, Homo sapiens
  Payload ID: 13373
  Gene Symbol: PRR4
  Gene Name: proline rich 4 (lacrimal)
  ENST ID: ENST00000631790
  CDS Start-End: 326-769
gggagtcggccatcatgctggccccggaggccgttagcttagtcatggctctaaatatgtacctgcaatcggatgttgaggatcaccgagcccgcgacgtagaagtacgggaagttcatgcgcagctgccaggccagctcgaagaaggcgagcagggtgcgggagagccccttgcagaagacgccgtacgaggttctccagcatttggctcaaggccccaagggcacatgtgacaagaaggcgccggctttttaaacattggaagttcttctgtgtcagttctgtgacagaacatttacttaacacatcatgaaggctagtttggatgtggaggggaatagactccatctatccatatgagctgctgcagaagaatattttgcctgctggaacctgctgtatctactcaagagtggaagttttcacagatgtgaactatgaagactttactttcaccataccagatgtagaggactcaagtcagagaccagatcagggaccccagagacctcctcctgaaggactcctacctagaccccctggtgatagtggtaaccaagatgatggtcctcagcagagaccaccaaaaccaggaggccatcaccgccatcctcccccacctccttttcaaaatcagcaacgaccaccccgacgaggacaccgtcaactctctctaccccgatttccttctgtcagcctgcaggaagcatcatcattcttccagagggacagaccagcaagacatccccaggagcaaccactctggtaatctagaattcagtggcagaaaataaataagaagataacttccttcagaaagccatgacattgaaataatgtggtcataactctttcttcagtataccaataaaatattaatagcatgcaa

SEQ ID NO: 169478 - DNA, 388 bp, Homo sapiens; identical to SEQ ID NO: 169469
  Payload ID: 13373
  Gene Symbol: PRR4
  Gene Name: proline rich 4 (lacrimal)
  ENST ID: ENST00000633483
  CDS Start-End: 39-275

SEQ ID NO: 169479 - DNA, 1767 bp, Homo sapiens
  Payload ID: 13374
  Gene Symbol: PRR5
  Gene Name: proline rich 5 (renal)
  Uniprot ID: P85299
  ENST ID: ENST00000006251
  CDS Start-End: 195-1334
attcggctgcccccaaggccaggcatccagtgtgcttagtgctgagcagggtttcagagctcacccccaggagggtgcagacctcagccaaggtcgcagagcagaggagacccgtgggctgggattccacctgtgcccaccctggcagcatcccacctcctgagtcctctcggcacccagcaaggttgaagttcatgagttcgcccagcctcagtgacctgggcaagagagagccggccgccgccgcggacgagcggggcacgcagcagcgccgggcctgcgccaacgccacctggaacagcatccacaacggggtgatcgccgtcttccagcgcaaggggctgcccgaccaggagctcttcagcctcaacgagggcgtccggcagctgttgaagacagagctggggtccttcttcacggagtacctgcagaaccagctgctgacaaaaggcatggtgatccttcgggacaagattcgcttctatgagggacagaagctgctggactcactggcagagacctgggacttcttcttcagtgacgtgctgcccatgctgcaggccatcttctacccggtgcagggcaaggagccatcggtgcgccagctggccctgctgcacttccggaatgccatcaccctcagtgtgaagctagaggatgcgctggcccgggcccatgcccgtgtgccccctgccatcgtgcagatgctgctggtgctgcagggggtacatgagtccaggggcgtgactgaggactacctgcgcctggagacgctggtccagaaggtggtgtcgccatacctgggcacctacggcctccactccagcgaggggcccttcacccattcctgcatcctggaaaagcgcctcctccgccgctcccgctcgggggacgtgctggccaagaaccctgtggtgcgctccaagagctacaacacgcctctgctgaaccccgtgcaggagcacgaggcggagggcgcggcggccggcggtaccagcatccgcaggcactctgtgtcggagatgacgtcctgccccgagcctcagggcttctccgacccgcccggccagggccccaccgggaccttcaggtcctccccggcgccccactcagggccctgccccagcagactgtaccccacgacccagccccctgagcagggcttggatcccacccgcagctccctgccccgctccagcccggagaacctggtggaccagatcctggagtccgtggactcggattctgaagggattttcattgactttggccggggccggggctctggcatgtccgacttggagggctctgggggccggcagagtgtcgtgtgaggcctcacagctggccttgagtttttactgacacgtccctgtgtgcgggggtgtccatgtggcgtgtgtgtgagtgagacttttttactgcgtcccgtcccgccagccctatcggcctcgtcactggccttggtcactttgtatttctgtcttggttggaaataccatcagccttccttgctcggcccaggtctgtttcaggcatctgagtcggcgtttacccaggggccgggccagagacgggggtcggccgctcgctcccacgctcctcctgccccagccctctggtgtccacacctgcccacagagaatgtaaacccagtgggctctgcccacgccgggccccaaagtgaccagactccagcacacctgtctcctcctgcctggggtggccatggggatggaagggggtggaataaaacctgtcaacctg

SEQ ID NO: 169480 - DNA, 1878 bp, Homo sapiens
  Payload ID: 13374
  Gene Symbol: PRR5
  Gene Name: proline rich 5 (renal)
  Uniprot ID: P85299
  ENST ID: ENST00000336985
  CDS Start-End: 278-1444
gcccccggcctccgtttgcgccgggtctgtgctggccgcgcgcctggcgctccacgctgagcctctccgtgcaatgattaacccggcggggcggccggcgcgggacccgagacggaggcgcggggccggggcgggaccccgcaggaccgctcggcttcctgctctcgccggagtttccgcgtagagggcgcatcgccggcccggggcccttggtgcggcgtggcgcagggcgcggcgtggggcgcgcgtgggcgcggcgcaggcggcccgggtcaccatgaggactctccgcaggttgaagttcatgagttcgcccagcctcagtgacctgggcaagagagagccggccgccgccgcggacgagcggggcacgcagcagcgccgggcctgcgccaacgccacctggaacagcatccacaacggggtgatcgccgtcttccagcgcaaggggctgcccgaccaggagctcttcagcctcaacgagggcgtccggcagctgttgaagacagagctggggtccttcttcacggagtacctgcagaaccagctgctgacaaaaggcatggtgatccttcgggacaagattcgcttctatgagggacagaagctgctggactcactggcagagacctgggacttcttcttcagtgacgtgctgcccatgctgcaggccatcttctacccggtgcagggcaaggagccatcggtgcgccagctggccctgctgcacttccggaatgccatcaccctcagtgtgaagctagaggatgcgctggcccgggcccatgcccgtgtgccccctgccatcgtgcagatgctgctggtgctgcagggggtacatgagtccaggggcgtgactgaggactacctgcgcctggagacgctggtccagaaggtggtgtcgccatacctgggcacctacggcctccactccagcgaggggcccttcacccattcctgcatcctggaaaagcgcctcctccgccgctcccgctcgggggacgtgctggccaagaaccctgtggtgcgctccaagagctacaacacgcctctgctgaaccccgtgcaggagcacgaggcggagggcgcggcggccggcggtaccagcatccgcaggcactctgtgtcggagatgacgtcctgccccgagcctcagggcttctccgacccgcccggccagggccccaccgggaccttcaggtcctccccggcgccccactcagggccctgccccagcagactgtaccccacgacccagccccctgagcagggcttggatcccacccgcagctccctgccccgctccagcccggagaacctggtggaccagatcctggagtccgtggactcggattctgaagggattttcattgactttggccggggccggggctctggcatgtccgacttggagggctctgggggccggcagagtgtcgtgtgaggcctcacagctggccttgagtttttactgacacgtccctgtgtgcgggggtgtccatgtggcgtgtgtgtgagtgagacttttttactgcgtcccgtcccgccagccctatcggcctcgtcactggccttggtcactttgtatttctgtcttggttggaaataccatcagccttccttgctcggcccaggtctgtttcaggcatctgagtcggcgtttacccaggggccgggccagagacgggggtcggccgctcgctcccacgctcctcctgccccagccctctggtgtccacacctgcccacagagaatgtaaacccagtgggctctgcccacgccgggccccaaagtgaccagactccagcacacctgtctcctcctgcctggggtggccatggggatggaagggggtggaataaaacctgtcaacctgg

SEQ ID NO: 169481 - DNA, 789 bp, Homo sapiens
  Payload ID: 13374
  Gene Symbol: PRR5
  Gene Name: proline rich 5 (renal)
  ENST ID: ENST00000403696
  CDS Start-End: 258-789
ccgggtctgtgctggccgcgcgcctggcgctccacgctgagcctctccgtgcaatgattaacccggcggggcggccggcgcgggacccgagacggaggcgcggggccggggcgggaccccgcaggaccgctcggcttcctgctctcgccggagtttccgcgtagagggcgcatcgccggcccggggcccttggtgcggcgtggcgcagggcgcggcgtggggcgcgcgtgggcgcggcgcaggcggcccgggtcaccatgaggactctccgcaggttgaagttcatgagttcgcccagcctcagtgacctgggcaagagagagccggccgccgccgcggacgagcggggcacgcagcagcgccgggcctgcgccaacgccacctggaacagcatccacaacggggtgatcgccgtcttccagcgcaaggggctgcccgaccaggagctcttcagcctcaacgagggcgtccggcagctgttgaagacagagctggggtccttcttcacggagtacctgcagaaccagctgctgacaaaaggcatggtgatccttcgggacaagattcgcttctatgagggcatctgcccgcgccagtcaggcccagtggtgatggcccccatgcccacaggacagaagctgctggactcactggcagagacctgggacttcttcttcagtgacgtgctgcccatgctgcaggccatcttctacccggtgcagggcaaggagccatcggtgcgccagctggccctgctgcacttccggaatgccatcaccctcagtgtga

SEQ ID NO: 169482 - DNA, 2279 bp, Homo sapiens
  Payload ID: 13374
  Gene Symbol: PRR5
  Gene Name: proline rich 5 (renal)
  Uniprot ID: P85299
  ENST ID: ENST00000403581
  CDS Start-End: 610-1845
agtgtgcttagtgctgagcagggtttcagagctcacccccaggagggtgcagacctcagccaaggtcgcagagcagaggagacccgtgggctgggattccacctgtgcccaccctggcagcatcccacctcctgagtcctctcggcacccagcaagagtcccttcagtgacttcgagcgtgcattgagagcccagtaacactggggggcaactgccacaaagacacagcctcagccaggcgcagtgactcatgcctgtaatcccagcaccttgggaggccaaggcttgtggatcacctgaggtcaggagtttgagaccagccggaccaacatggagaaaccccatctctactaaaaatacaaaaaaattagctaggcattgtggcgcatgcctgtaatcccggctactcgggaggctgagggaggagaagcacttgaacccaggaggcgcggttgcagtgagccgagatcgccccattgcactccagcctgggcaacaagagcgaaactccatctcaaaataataataataacaataatagtaagactcagcctccccgctctgggacactcagtctgatggggcaggctggtcagaagacatagagccatggtgtgtttggaactttcacagagggaagcctggggctcgggaagcccggaaaagatgccggcgcagcctgagggcttgtacaggttgaagttcatgagttcgcccagcctcagtgacctgggcaagagagagccggccgccgccgcggacgagcggggcacgcagcagcgccgggcctgcgccaacgccacctggaacagcatccacaacggggtgatcgccgtcttccagcgcaaggggctgcccgaccaggagctcttcagcctcaacgagggcgtccggcagctgttgaagacagagctggggtccttcttcacggagtacctgcagaaccagctgctgacaaaaggcatggtgatccttcgggacaagattcgcttctatgagggacagaagctgctggactcactggcagagacctgggacttcttcttcagtgacgtgctgcccatgctgcaggccatcttctacccggtgcagggcaaggagccatcggtgcgccagctggccctgctgcacttccggaatgccatcaccctcagtgtgaagctagaggatgcgctggcccgggcccatgcccgtgtgccccctgccatcgtgcagatgctgctggtgctgcagggggtacatgagtccaggggcgtgactgaggactacctgcgcctggagacgctggtccagaaggtggtgtcgccatacctgggcacctacggcctccactccagcgaggggcccttcacccattcctgcatcctggaaaagcgcctcctccgccgctcccgctcgggggacgtgctggccaagaaccctgtggtgcgctccaagagctacaacacgcctctgctgaaccccgtgcaggagcacgaggcggagggcgcggcggccggcggtaccagcatccgcaggcactctgtgtcggagatgacgtcctgccccgagcctcagggcttctccgacccgcccggccagggccccaccgggaccttcaggtcctccccggcgccccactcagggccctgccccagcagactgtaccccacgacccagccccctgagcagggcttggatcccacccgcagctccctgccccgctccagcccggagaacctggtggaccagatcctggagtccgtggactcggattctgaagggattttcattgactttggccggggccggggctctggcatgtccgacttggagggctctgggggccggcagagtgtcgtgtgaggcctcacagctggccttgagtttttactgacacgtccctgtgtgcgggggtgtccatgtggcgtgtgtgtgagtgagacttttttactgcgtcccgtcccgccagccctatcggcctcgtcactggccttggtcactttgtatttctgtcttggttggaaataccatcagccttccttgctcggcccaggtctgtttcaggcatctgagtcggcgtttacccaggggccgggccagagacgggggtcggccgctcgctcccacgctcctcctgccccagccctctggtgtccacacctgcccacagagaatgtaaacccagtgggctctgcccacgccgggccccaaagtgaccagactccagcacacctgtctcctcctgcctggggtggccatggggatggaagggggtggaataaaacctgtcaacctgg

SEQ ID NO: 169483 - DNA, 1430 bp, Homo sapiens
  Payload ID: 13374
  Gene Symbol: PRR5
  Gene Name: proline rich 5 (renal)
  ENST ID: ENST00000432916
  CDS Start-End: 17-358
ccgcaggttgaagttcatgagttcgcccagcctcagtgacctgggcaagagagagccggccgccgccgcggacgagcggggcacgcagcagcgccgggcctgcgccaacgccacctggaacagcatccacaacggggtgatcgccgtcttccagcgcaaggggctgcccgaccaggagctcttcagcctcaacgagggcgtccggcagctgttgaagacagagctggggtccttcttcacggagtacctgcagaaccagctgctgacaaaaggcatggtgatccttcgggacaagattcgcttctatgaggaagctgctggactcactggcagagacctgggacttcttcttcagtgacgtgctgcccatgctgcaggccatcttctacccggtgcagggcaaggagccatcggtgcgccagctggccctgctgcacttccggaatgccatcaccctcagtgtgaagctagaggatgcgctggcccgggcccatgcccgtgtgccccctgccatcgtgcagatgctgctggtgctgcagaaaagcgcctcctccgccgctcccgctcgggggacgtgctggccaagaaccctgtggtgcgctccaagagctacaacacgcctctgctgaaccccgtgcaggagcacgaggcggagggcgcggcggccggcggtaccagcatccgcaggcactctgtgtcggagatgacgtcctgccccgagcctcagggcttctccgacccgcccggccagggccccaccgggaccttcaggtcctccccggcgccccactcagggccctgccccagcagactgtaccccacgacccagccccctgagcagggcttggatcccacccgcagctccctgccccgctccagcccggagaacctggtggaccagatcctggagtccgtggactcggattctgaagggattttcattgactttggccggggccggggctctggcatgtccgacttggagggctctgggggccggcagagtgtcgtgtgaggcctcacagctggccttgagtttttactgacacgtccctgtgtgcgggggtgtccatgtggcgtgtgtgtgagtgagacttttttactgcgtcccgtcccgccagccctatcggcctcgtcactggccttggtcactttgtatttctgtcttggttggaaataccatcagccttccttgctcggcccaggtctgtttcaggcatctgagtcggcgtttacccaggggccgggccagagacgggggtcggccgctcgctcccacgctcctcctgccccagccctctggtgtccacacctgcccacagagaatgtaaacccagtgggctctgcccacgccgggccccaaagtgaccagactccagcacacctgtctcctcctgcctggggtggccatggggatggaagggggtgga

SEQ ID NO: 169484 - DNA, 905 bp, Homo sapiens
  Payload ID: 13374
  Gene Symbol: PRR5
  Gene Name: proline rich 5 (renal)
  ENST ID: ENST00000432186
  CDS Start-End: 104-905
ctccgcggccccctcccccggccccgggctccggctccggctccggctctggctctgcgcggtggcagcggcggcggcggcgcggggaccgaggttgaagttcatgagttcgcccagcctcagtgacctgggcaagagagagccggccgccgccgcggacgagcggggcacgcagcagcgccgggcctgcgccaacgccacctggaacagcatccacaacggggtgatcgccgtcttccagcgcaaggggctgcccgaccaggagctcttcagcctcaacgagggcgtccggcagctgttgaagacagagctggggtccttcttcacggagtacctgcagaaccagctgctgacaaaaggcatggtgatccttcgggacaagattcgcttctatgagggacagaagctgctggactcactggcagagacctgggacttcttcttcagtgacgtgctgcccatgctgcaggccatcttctacccggtgcagggcaaggagccatcggtgcgccagctggccctgctgcacttccggaatgccatcaccctcagtgtgaagctagaggatgcgctggcccgggcccatgcccgtgtgccccctgccatcgtgcagatgctgctggtgctgcagggggtacatgagtccaggggcgtgactgaggactacctgcgcctggagacgctggtccagaaggtggtgtcgccatacctgggcacctacggcctccactccagcgaggggcccttcacccattcctgcatcctggaaaagcgcctcctccgccgctcccgctcgggggacgtgctggccaagaaccctgtggtgcgctccaagagctacaacacgcctctgctgaaccccgtgcaggagcacgaggcggagggcgcggcggccggcggtacca

SEQ ID NO: 169485 - DNA, 1612 bp, Homo sapiens
  Payload ID: 13374
  Gene Symbol: PRR5
  Gene Name: proline rich 5 (renal)
  ENST ID: ENST00000431834
  CDS Start-End: 257-625
cgggtctgtgctggccgcgcgcctggcgctccacgctgagcctctccgtgcaatgattaacccggcggggcggccggcgcgggacccgagacggaggcgcggggccggggcgggaccccgcaggaccgctcggcttcctgctctcgccggagtttccgcgtagagggcgcatcgccggcccggggcccttggtgcggcgtggcgcagggcgcggcgtggggcgcgcgtgggcgcggcgcaggcggcccgggtcaccatgaggactctccgcaggttgaagttcatgagttcgcccagcctcagtgacctgggcaagagagagccggccgccgccgcggacgagcggggcacgcagcagcgccgggcctgcgccaacgccacctggaacagcatccacaacggggtgatcgccgtcttccagcgcaaggggctgcccgaccaggagctcttcagcctcaacgagggcgtccggcagctgttgaagacagagctggggtccttcttcacggagtacctgcagaaccagctgctgacaaaaggcatggtgatccttcgggacaagattcgcttctatgaggaagctgctggactcactggcagagacctgggacttcttcttcagtgacgtgctgcccatgctgcaggccatcttctacccggtgcagggcaaggagccatcggtgcgccagctggccctgctgcacttccggaatgccatcaccctcagtgtgaagctagaggatgcgctggcccgggcccatgcccgtgtgccccctgccatcgtgcagatgctgctggtgctgcagggggtacatgagtccaggggcgtgactgaggactacctgcgcctggagacgctggtccagaaggtggtgtcgccatacctgggcacctacggcctccactccagcgaggggcccttcacccattcctgcatcctggaaaagcgcctcctccgccgctcccgctcgggggacgtgctggccaagaaccctgtggtgcgctccaagagctacaacacgcctctgctgaaccccgtgcaggagcacgaggcggagggcgcggcggccggcggtaccagcatccgcaggcactctgtgtcggagatgacgtcctgccccgagcctcagggcttctccgacccgcccggccagggccccaccgggaccttcaggtcctccccggcgccccactcagggccctgccccagcagactgtaccccacgacccagccccctgagcagggcttggatcccacccgcagctccctgccccgctccagcccggagaacctggtggaccagatcctggagtccgtggactcggattctgaagggattttcattgactttggccggggccggggctctggcatgtccgacttggagggctctgggggccggcagagtgtcgtgtgaggcctcacagctggccttgagtttttactgacacgtccctgtgtgcgggggtgtccatgtggcgtgtgtgtgagtgagacttttttactgcgtcccgtcccgccagccctatcggcctcgtcactggccttggtcactttgtatttctgtcttggttggaaataccatcagccttccttgctcggcccaggtct

SEQ ID NO: 169486 - DNA, 881 bp, Homo sapiens
  Payload ID: 13374
  Gene Symbol: PRR5
  Gene Name: proline rich 5 (renal)
  ENST ID: ENST00000457960
  CDS Start-End: 203-881
ccgggtctgtgctggccgcgcgcctggcgctccacgctgagcctctccgtgcaatgattaacccggcggggcggccggcgcgggacccgagacggaggcgcggggccggggcgggaccccgcaggaccgctcggcttcctgctctcgccggagtttccgcgtagagggcgcatcgccggcccggggcccttggttgaagttcatgagttcgcccagcctcagtgacctgggcaagagagagccggccgccgccgcggacgagcggggcacgcagcagcgccgggcctgcgccaacgccacctggaacagcatccacaacggggtgatcgccgtcttccagcgcaaggggctgcccgaccaggagctcttcagcctcaacgagggcgtccggcagctgttgaagacagagctggggtccttcttcacggagtacctgcagaaccagctgctgacaaaaggcatggtgatccttcgggacaagattcgcttctatgagggacagaagctgctggactcactggcagagacctgggacttcttcttcagtgacgtgctgcccatgctgcaggccatcttctacccggtgcagggcaaggagccatcggtgcgccagctggccctgctgcacttccggaatgccatcaccctcagtgtgaagctagaggatgcgctggcccgggcccatgcccgtgtgccccctgccatcgtgcagatgctgctggtgctgcagggggtacatgagtccaggggcgtgactgaggactacctgcgcctggagacgctggtccagaaggtggtgtcgccatacctgggcacctacggcctccactccagcgaggggcccttcacccattcctgcatcctggaaaagcgcctcctcc

SEQ ID NO: 169487 - DNA, 1726 bp, Homo sapiens
  Payload ID: 13374
  Gene Symbol: PRR5
  Gene Name: proline rich 5 (renal)
  Uniprot ID: P85299
  ENST ID: ENST00000617066
  CDS Start-End: 411-1292
agccccccagctccggcggacccgggtgggcgtgcccgcggacccgcttgccgcacttaggcgagtctcccctgcagcgccccgagtccctgggggctgcggcggctgcgggcgcccccgcgcgggcccgaggggcgggacgcggcggagcggggcggggcggggcctccgcggccccctcccccggccccgggctccggctccggctccggctctggctctgcgcggtggcagcggcggcggcggcgcggggaccgagcatccacaacggggtgatcgccgtcttccagcgcaaggggctgcccgaccaggagctcttcagcctcaacgagggcgtccggcagctgttgaagacagagctggggtccttcttcacggagtacctgcagaaccagctgctgacaaaaggcatggtgatccttcgggacaagattcgcttctatgagggacagaagctgctggactcactggcagagacctgggacttcttcttcagtgacgtgctgcccatgctgcaggccatcttctacccggtgcagggcaaggagccatcggtgcgccagctggccctgctgcacttccggaatgccatcaccctcagtgtgaagctagaggatgcgctggcccgggcccatgcccgtgtgccccctgccatcgtgcagatgctgctggtgctgcagggggtacatgagtccaggggcgtgactgaggactacctgcgcctggagacgctggtccagaaggtggtgtcgccatacctgggcacctacggcctccactccagcgaggggcccttcacccattcctgcatcctggaaaagcgcctcctccgccgctcccgctcgggggacgtgctggccaagaaccctgtggtgcgctccaagagctacaacacgcctctgctgaaccccgtgcaggagcacgaggcggagggcgcggcggccggcggtaccagcatccgcaggcactctgtgtcggagatgacgtcctgccccgagcctcagggcttctccgacccgcccggccagggccccaccgggaccttcaggtcctccccggcgccccactcagggccctgccccagcagactgtaccccacgacccagccccctgagcagggcttggatcccacccgcagctccctgccccgctccagcccggagaacctggtggaccagatcctggagtccgtggactcggattctgaagggattttcattgactttggccggggccggggctctggcatgtccgacttggagggctctgggggccggcagagtgtcgtgtgaggcctcacagctggccttgagtttttactgacacgtccctgtgtgcgggggtgtccatgtggcgtgtgtgtgagtgagacttttttactgcgtcccgtcccgccagccctatcggcctcgtcactggccttggtcactttgtatttctgtcttggttggaaataccatcagccttccttgctcggcccaggtctgtttcaggcatctgagtcggcgtttacccaggggccgggccagagacgggggtcggccgctcgctcccacgctcctcctgccccagccctctggtgtccacacctgcccacagagaatgtaaacccagtgggctctgcccacgccgggccccaaagtgaccagactccagcacacctgtctcctcctgcctggggtggccatggggatggaagggggtggaataaaacctgtcaacctgg

SEQ ID NO: 169488 - DNA, 1843 bp, Homo sapiens
  Payload ID: 13374
  Gene Symbol: PRR5
  Gene Name: proline rich 5 (renal)
  Uniprot ID: P85299
  ENST ID: ENST00000611394
  CDS Start-End: 270-1409
agccccccagctccggcggacccgggtgggcgtgcccgcggacccgcttgccgcacttaggcgagtctcccctgcagcgccccgagtccctgggggctgcggcggctgcgggcgcccccgcgcgggcccgaggggcgggacgcggcggagcggggcggggcggggcctccgcggccccctcccccggccccgggctccggctccggctccggctctggctctgcgcggtggcagcggcggcggcggcgcggggaccgaggttgaagttcatgagttcgcccagcctcagtgacctgggcaagagagagccggccgccgccgcggacgagcggggcacgcagcagcgccgggcctgcgccaacgccacctggaacagcatccacaacggggtgatcgccgtcttccagcgcaaggggctgcccgaccaggagctcttcagcctcaacgagggcgtccggcagctgttgaagacagagctggggtccttcttcacggagtacctgcagaaccagctgctgacaaaaggcatggtgatccttcgggacaagattcgcttctatgagggacagaagctgctggactcactggcagagacctgggacttcttcttcagtgacgtgctgcccatgctgcaggccatcttctacccggtgcagggcaaggagccatcggtgcgccagctggccctgctgcacttccggaatgccatcaccctcagtgtgaagctagaggatgcgctggcccgggcccatgcccgtgtgccccctgccatcgtgcagatgctgctggtgctgcagggggtacatgagtccaggggcgtgactgaggactacctgcgcctggagacgctggtccagaaggtggtgtcgccatacctgggcacctacggcctccactccagcgaggggcccttcacccattcctgcatcctggaaaagcgcctcctccgccgctcccgctcgggggacgtgctggccaagaaccctgtggtgcgctccaagagctacaacacgcctctgctgaaccccgtgcaggagcacgaggcggagggcgcggcggccggcggtaccagcatccgcaggcactctgtgtcggagatgacgtcctgccccgagcctcagggcttctccgacccgcccggccagggccccaccgggaccttcaggtcctccccggcgccccactcagggccctgccccagcagactgtaccccacgacccagccccctgagcagggcttggatcccacccgcagctccctgccccgctccagcccggagaacctggtggaccagatcctggagtccgtggactcggattctgaagggattttcattgactttggccggggccggggctctggcatgtccgacttggagggctctgggggccggcagagtgtcgtgtgaggcctcacagctggccttgagtttttactgacacgtccctgtgtgcgggggtgtccatgtggcgtgtgtgtgagtgagacttttttactgcgtcccgtcccgccagccctatcggcctcgtcactggccttggtcactttgtatttctgtcttggttggaaataccatcagccttccttgctcggcccaggtctgtttcaggcatctgagtcggcgtttacccaggggccgggccagagacgggggtcggccgctcgctcccacgctcctcctgccccagccctctggtgtccacacctgcccacagagaatgtaaacccagtgggctctgcccacgccgggccccaaagtgaccagactccagcacacctgtctcctcctgcctggggtggccatggggatggaagggggtggaataaaacctgtcaacctgg

SEQ ID NO: 169489 - DNA, 1900 bp, Homo sapiens
  Payload ID: 13374
  Gene Symbol: PRR5
  Gene Name: proline rich 5 (renal)
  Uniprot ID: P85299
  ENST ID: ENST00000624862
  CDS Start-End: 585-1466
caggaaggggtgctctgtgggcttggaggatgcaggcgccttcctggggactgctctgtgagcagtgataaaatatttatcagccagcagctgggcttccctgcatagggtgcagtcgggggcagctcccacccgagcctgcagcctgagttctgctgagtcatgggggagcccagtgagccgcctgccctcaagctcctgggccccctctgccctttggccatgtgaacgcctcctaatgtgtaagccattcggctgcccccaaggccaggcatccagtgtgcttagtgctgagcagggtttcagagctcacccccaggagggtgcagacctcagccaaggtcgcagagcagaggagacccgtgggctgggattccacctgtgcccaccctggcagcatcccacctcctgagtcctctcggcacccagcaagcatccacaacggggtgatcgccgtcttccagcgcaaggggctgcccgaccaggagctcttcagcctcaacgagggcgtccggcagctgttgaagacagagctggggtccttcttcacggagtacctgcagaaccagctgctgacaaaaggcatggtgatccttcgggacaagattcgcttctatgagggacagaagctgctggactcactggcagagacctgggacttcttcttcagtgacgtgctgcccatgctgcaggccatcttctacccggtgcagggcaaggagccatcggtgcgccagctggccctgctgcacttccggaatgccatcaccctcagtgtgaagctagaggatgcgctggcccgggcccatgcccgtgtgccccctgccatcgtgcagatgctgctggtgctgcagggggtacatgagtccaggggcgtgactgaggactacctgcgcctggagacgctggtccagaaggtggtgtcgccatacctgggcacctacggcctccactccagcgaggggcccttcacccattcctgcatcctggaaaagcgcctcctccgccgctcccgctcgggggacgtgctggccaagaaccctgtggtgcgctccaagagctacaacacgcctctgctgaaccccgtgcaggagcacgaggcggagggcgcggcggccggcggtaccagcatccgcaggcactctgtgtcggagatgacgtcctgccccgagcctcagggcttctccgacccgcccggccagggccccaccgggaccttcaggtcctccccggcgccccactcagggccctgccccagcagactgtaccccacgacccagccccctgagcagggcttggatcccacccgcagctccctgccccgctccagcccggagaacctggtggaccagatcctggagtccgtggactcggattctgaagggattttcattgactttggccggggccggggctctggcatgtccgacttggagggctctgggggccggcagagtgtcgtgtgaggcctcacagctggccttgagtttttactgacacgtccctgtgtgcgggggtgtccatgtggcgtgtgtgtgagtgagacttttttactgcgtcccgtcccgccagccctatcggcctcgtcactggccttggtcactttgtatttctgtcttggttggaaataccatcagccttccttgctcggcccaggtctgtttcaggcatctgagtcggcgtttacccaggggccgggccagagacgggggtcggccgctcgctcccacgctcctcctgccccagccctctggtgtccacacctgcccacagagaatgtaaacccagtgggctctgcccacgccgggccccaaagtgaccagactccagcacacctgtctcctcctgcctggggtggccatggggatggaagggggtggaataaaacctgtcaacctgg

SEQ ID NO: 169490 - DNA, 3930 bp, Homo sapiens
  Payload ID: 13375
  Gene Symbol: PRR5L
  Gene Name: proline rich 5 like
  Uniprot ID: Q6MZQ0
  ENST ID: ENST00000378867
  CDS Start-End: 356-1462
ggggcagctgggccgggggcgggggtcggctgcagatctcccgttgtgtgagagaaacgcaagcacggagctcccttgacctgctgcatcctcctcggcaattttttttttttaagtcaaaaagcttggatttcctgaaattgttgaactggatgcgcgcggagtctggggcggaggcgagcggcgggtgtgcgcgactcggggtgattcacgccggggaccccaaggaggtgttggctacgtttgtggttttaagaaagcctgagggcctgaaggcagcccctggagaagccctttccgagggcattcggaaccttctggtcctagaggtgaagctgaactgtcaccaggacttatgacccgcggcttcgctcccattctgcccgtcgagttccacaagatgggctccttccgcaggcctagaccgcgcttcatgagctcccccgtgctcagcgaccttccccgattccaagcagctcggcaggctctgcagctgagctccagctcagcctggaacagcgttcagactgctgtgatcaacgttttcaaagggggtggcttgcaaagcaacgagctctatgccctgaacgaaaacatcaggcggctgttgaagagtgaacttggatcattcattacagactattttcagaaccagcttcttgcaaaaggactgttctttgtggaggagaagatcaagctgtgtgaaggtgaaaatcgcattgaggttctggctgaagtctgggaccacttcttcactgagactctccctaccctgcaggcaatattttatccagttcagggccaggagctgactatccgccagatctccctgctgggcttccgagacctagtcttgctgaaggtgaagctgggtgacctgctgctgctggcccagtccaagctgccctcgtccattgtccagatgttgctcatcctgcagagtgttcacgagcccacaggcccaagtgagagttatttgcaactggaggagctggtgaagcaagtggtttctcctttcctcggcatcagcggggaccgtagcttctcaggccccacgtacacgctggccaggcggcactccagggtccggcccaaggtgactgtcctgaactatgcctccccgataaccgcagtcagccggccactgaatgagatggtcttgaccccactgacagagcaggagggggaagcctacctggagaagtgtggcagcgtgcggcggcacacggtggccaatgcccactcggacatccagctgctggccatggccaccatgatgcactcgggcctgggggaggaggccagcagtgagaacaagtgcctgctcctgccacccagcttccccccgccccaccggcagtgctccagtgagcccaacatcactgacaaccctgacggactggaggagggggccaggggcagccaggagggctcggagctgaactgtgcttccctcagctgagtcgccacccctgggcctttccatctcctgttttgcaaccaggatgaggacccctccatctccgtggattactgaggggggctcttgctttatgcgatgctgccttatttcctttagggtactgtcctggtcaaaatgacctaaggggaaaccgttgttgtaaacctctttattttggtgactgtgaccacttctttgtagccaccaattgtagtgaccagttgcctaatggtcactttctgactccagccttgccagcctgactcagatcctcatctctgggcctttctccctccgatgttggactgcctgatgctcccaatgacatatccaatgctcctggcatttctggagcaggaggttgtcaggacaacacatataaccaccaaggatgtgttggcctttggagttcccctttaggttcctagtgatgtggaggtttatgggtgaaaaattagtggagagggaactcctctcccccattttgtgtagagtgaaaatagcctgaagcccctactcagcagggctctgggaatgtgccttccttattttagtttcagaattgctgggaaagttaccccactggtgggtgaggatctatcctcaacctacatccagatcctatgtgctgcttgcacagaggcctttggcttttgacccaggagggccgcgaggctggagctgccctgtctttcattgagccttagcatttccctctcaggcttcctctcaagctcaaggaactcacccccagataagaagctggtgcctcttgtctctctcatttcagaaacggactttctcatcatgctttcctatggtgggtatgaggggccagctgataccaaccaactggcctgtatctatctatctggatttgacttgaatttttaaaatgtgtatcgtttaaaaaaaaaaatgtttgcaaattttgcacataggatcttgcactgttcattttcagtggggtgagtcttcacactaaaaacacaagcagagctcctgggaaaagagactggaagtggttcaggataaagagatccatggtgggcagggctgttaggtcacagagctctagaagcagctggacttgaacccacaatggcttgtgtaaattcgtaaatttcatggtttctaggaaaagctgcattggggtggggagacccagtttgcctcataggcagaggattctccaggaagcatggaaaatggaatgtttccatgctttacagtgctgggagagaggggagatgtgggcaggaccttttggaaggatgtttattctctgtggttaaagaaatgctgagaatttctagcatgtgaagcacttgggggcagcaggccttggcacggtgctgcatccttctactgctccctccaggtctgggggcttttatccaccttgaatccctatcctcctctttgtagttgtcggtctcactgataacagctccagaaaaaaagacaaggctccccctctgacccttcctgttggtatttatgaaatctcaaagagatgagccaccttggcttccaatatggcaagagggtgctgggagaaggtgaagatcagtctaagctgccacggtgatgagaccttctcattatgtaactcttgatggcatttcccttctgagtgaagatttgaaatatgattgattagaattgtgctcttgatggctgggaatttagaaattttattttaagagttatttcattttcatcctaagagtgatgggagagaaatgtccaaaagagatctgctgatctgctgagagtttcaaacaaacaaaaaaataatctctatgtatgtgttggataaagtctacagactgactaacatgcattagcaaatggagcatcagtaggtagcaacatgataatttatgtaactgatagcttctgtccttattagtacacttaacatttgagactagtatttattgatccaggcaaagtaattaattaatcatgcttgggcttactttttcagtttgtaaggttaagcatatgtgcatgcgtgcgtgtgtatataaatgccttttccatatcttaaatgtccctgatgaggagagcagtcatcaattaaatatataagctcttaaaatgagaatggaagtgtcagtatagacccagtgtacttaagtgctgatgactgttagccagtttacaactttttaccatcgatgtacacatttgatatttgtgcagtaaatagactgtacctataaaaaattttattgatgtttatggtcatgttagctatcagagagctattggagtgagagctgaggtgtccttaaccactttttctctcctagattcattttcattatttatgctaggattttcttatggttgacatttgatgacaggaagcaatcatgactcttcaagtgagctcacagaaacctttcatgttgtctgtttccaaaatggattcaataaacaacattttgtccatgtta

SEQ ID NO: 169491 - DNA, 577 bp, Homo sapiens
  Payload ID: 13375
  Gene Symbol: PRR5L
  Gene Name: proline rich 5 like
  ENST ID: ENST00000530252
  CDS Start-End: 429-577
aacgtgtcaccagcccggctgtgggagctccgcggccgaagcgtttgttgactcgcgctggagaggaaccgaggctggacgggaccccatctgagggcagagctgggggaggagggagggacggagggagggagagctgggcagagcgcgacggggagaaccatccaggtcgctcatttctctccggtgagaaaacttcctcgggaagaccggaaactttttcctaggcgcgcggagtctggggcggaggcgagcggcgggtgtgcgcgactcggggtgattcacgccggggaccccaaggaggtgttggctacgtttgtggttttaagaaagcctgagggcctgaaggcagcccctggagaagccctttccgagggcattcggaaccttctggtcctagaggtgaagctgaactgtcaccaggacttatgacccgcggcttcgctcccattctgcccgtcgagttccacaagatgggctccttccgcaggcctagaccgcgcttcatgagctcccccgtgctcagcgaccttccccgattccaagcagctcggcaggctctgcagctgagctccag

SEQ ID NO: 169492 - DNA, 592 bp, Homo sapiens
  Payload ID: 13375
  Gene Symbol: PRR5L
  Gene Name: proline rich 5 like
  ENST ID: ENST00000526728
  CDS Start-End: 366-592
accagagactcctgccttccattggcgaaccggtcaccggctccgtcctgaaaacagaacttgctccgagtgataagaggcaattcggacataaagagaaacatcaagggcatgagtgcacagaggaaagaccatgtgacggcatggctacaaggcagccatctgtaaaccaaggagagagaccccaaaggaaatcaaccctgctgacaccttgatcgtggacttctagcctccagaactgtgttggctacgtttgtggttttaagaaagcctgagggcctgaaggcagcccctggagaagccctttccgagggcattcggaaccttctggtcctagaggtgaagctgaactgtcaccaggacttatgacccgcggcttcgctcccattctgcccgtcgagttccacaagatgggctccttccgcaggcctagaccgcgcttcatgagctcccccgtgctcagcgaccttccccgattccaagcagctcggcaggctctgcagctgagctccagctcagcctggaacagcgttcagactgctgtgatcaacgttttcaaagggggtggcttgcaaagcaacgagctctatgc

SEQ ID NO: 169493 - DNA, 554 bp, Homo sapiens
  Payload ID: 13375
  Gene Symbol: PRR5L
  Gene Name: proline rich 5 like
  ENST ID: ENST00000530050
  CDS Start-End: 329-554
attttccttgaggccgccgcccggggtgggaccaggctgtgtgcttgctaactgtgcttcaggaatccgctctgggatgccttcctgtctggcaaaaggggttacccccagttctacccagtccctgtcctcggtcacatgctgccgccgcctcttcccccgcggtgccgggagcccgcgttttgtttgtcagcagttaggcggtgttggctacgtttgtggttttaagaaagcctgagggcctgaaggcagcccctggagaagccctttccgagggcattcggaaccttctggtcctagaggtgaagctgaactgtcaccaggacttatgacccgcggcttcgctcccattctgcccgtcgagttccacaagatgggctccttccgcaggcctagaccgcgcttcatgagctcccccgtgctcagcgaccttccccgattccaagcagctcggcaggctctgcagctgagctccagctcagcctggaacagcgttcagactgctgtgatcaacgttttcaaagggggtggcttgcaaagcaacgagctctatg

SEQ ID NO: 169494 - DNA, 548 bp, Homo sapiens
  Payload ID: 13375
  Gene Symbol: PRR5L
  Gene Name: proline rich 5 like
  ENST ID: ENST00000524380
  CDS Start-End: 404-548
agttgctgaaggggaggaggagtgagatggggtgaagcgcgcggagtctggggcggaggcgagcggcgggtgtgcgcgactcggggtgattcacgccggggaccccaaggagaagaggcaattcggacataaagagaaacatcaagggcatgagtgcacagaggaaagaccatgtgacggcatggctacaaggcagccatctgtaaaccaaggagagagaccccaaaggaaatcaaccctgctgacaccttgatcgtggacttctagcctccagaactgtgttggctacgtttgtggttttaagaaagcctgagggcctgaaggcagcccctggagaagccctttccgagggcattcggaaccttctggtcctagaggtgaagctgaactgtcaccaggacttatgacccgcggcttcgctcccattctgcccgtcgagttccacaagatgggctccttccgcaggcctagaccgcgcttcatgagctcccccgtgctcagcgaccttccccgattccaagcagctcggcaggctctgcagctgagct

SEQ ID NO: 169495 - DNA, 544 bp, Homo sapiens
  Payload ID: 13375
  Gene Symbol: PRR5L
  Gene Name: proline rich 5 like
  ENST ID: ENST00000527172
  CDS Start-End: 402-544
acatttattgtgcccaagacttttgtgggctctctgccaggaaagggcaggtcattgaatgggccctgggaaaaatgatgtctgagcttctctccagttctcagagaaagaagaggcaattcggacataaagagaaacatcaagggcatgagtgcacagaggaaagaccatgtgacggcatggctacaaggcagccatctgtaaaccaaggagagagaccccaaaggaaatcaaccctgctgacaccttgatcgtggacttctagcctccagaactgtgttggctacgtttgtggttttaagaaagcctgagggcctgaaggcagcccctggagaagccctttccgagggcattcggaaccttctggtcctagaggtgaagctgaactgtcaccaggacttatgacccgcggcttcgctcccattctgcccgtcgagttccacaagatgggctccttccgcaggcctagaccgcgcttcatgagctcccccgtgctcagcgaccttccccgattccaagcagctcggcaggctctgcagctgag

SEQ ID NO: 169496 - DNA, 572 bp, Homo sapiens
  Payload ID: 13375
  Gene Symbol: PRR5L
  Gene Name: proline rich 5 like
  ENST ID: ENST00000532121
  CDS Start-End: 324-572
ggaacctggcactagaatgtgagcaaaaaagaggcaattctgctgacttcagagaagcttccttgcagaaggaatctgaaacacgagcaactctctggggaggatgagaagctcttctacaaggaggaggaaaacataccttaggctatatggctgctgggaatccaggttaaaatgtttaaccctggagaaaaagaggtgttggctacgtttgtggttttaagaaagcctgagggcctgaaggcagcccctggagaagccctttccgagggcattcggaaccttctggtcctagaggtgaagctgaactgtcaccaggacttatgacccgcggcttcgctcccattctgcccgtcgagttccacaagatgggctccttccgcaggcctagaccgcgcttcatgagctcccccgtgctcagcgaccttccccgattccaagcagctcggcaggctctgcagctgagctccagctcagcctggaacagcgttcagactgctgtgatcaacgttttcaaagggggtggcttgcaaagcaacgagctctatgccctgaacgaaaacatcaggcgg

SEQ ID NO: 169497 - DNA, 2291 bp, Homo sapiens
  Payload ID: 13375
  Gene Symbol: PRR5L
  Gene Name: proline rich 5 like
  Uniprot ID: Q6MZQ0
  ENST ID: ENST00000530639
  CDS Start-End: 277-1383
agtcttcaggccccaggtcagtgagtggcaagccaggcccagagatctctgcgcccgttggaacatccccttctcgggaggctggaaggccatggtcattcacctctccccagcaaggtgggacctgccctggaagaagaaaccagaccaggtgttggctacgtttgtggttttaagaaagcctgagggcctgaaggcagcccctggagaagccctttccgagggcattcggaaccttctggtcctagaggtgaagctgaactgtcaccaggacttatgacccgcggcttcgctcccattctgcccgtcgagttccacaagatgggctccttccgcaggcctagaccgcgcttcatgagctcccccgtgctcagcgaccttccccgattccaagcagctcggcaggctctgcagctgagctccagctcagcctggaacagcgttcagactgctgtgatcaacgttttcaaagggggtggcttgcaaagcaacgagctctatgccctgaacgaaaacatcaggcggctgttgaagagtgaacttggatcattcattacagactattttcagaaccagcttcttgcaaaaggactgttctttgtggaggagaagatcaagctgtgtgaaggtgaaaatcgcattgaggttctggctgaagtctgggaccacttcttcactgagactctccctaccctgcaggcaatattttatccagttcagggccaggagctgactatccgccagatctccctgctgggcttccgagacctagtcttgctgaaggtgaagctgggtgacctgctgctgctggcccagtccaagctgccctcgtccattgtccagatgttgctcatcctgcagagtgttcacgagcccacaggcccaagtgagagttatttgcaactggaggagctggtgaagcaagtggtttctcctttcctcggcatcagcggggaccgtagcttctcaggccccacgtacacgctggccaggcggcactccagggtccggcccaaggtgactgtcctgaactatgcctccccgataaccgcagtcagccggccactgaatgagatggtcttgaccccactgacagagcaggagggggaagcctacctggagaagtgtggcagcgtgcggcggcacacggtggccaatgcccactcggacatccagctgctggccatggccaccatgatgcactcgggcctgggggaggaggccagcagtgagaacaagtgcctgctcctgccacccagcttccccccgccccaccggcagtgctccagtgagcccaacatcactgacaaccctgacggactggaggagggggccaggggcagccaggagggctcggagctgaactgtgcttccctcagctgagtcgccacccctgggcctttccatctcctgttttgcaaccaggatgaggacccctccatctccgtggattactgaggggggctcttgctttatgcgatgctgccttatttcctttagggtactgtcctggtcaaaatgacctaaggggaaaccgttgttgtaaacctctttattttggtgactgtgaccacttctttgtagccaccaattgtagtgaccagttgcctaatggtcactttctgactccagccttgccagcctgactcagatcctcatctctgggcctttctccctccgatgttggactgcctgatgctcccaatgacatatccaatgctcctggcatttctggagcaggaggttgtcaggacaacacatataaccaccaaggatgtgttggcctttggagttcccctttaggttcctagtgatgtggaggtttatgggtgaaaaattagtggagagggaactcctctcccccattttgtgtagagtgaaaatagcctgaagcccctactcagcagggctctgggaatgtgccttccttattttagtttcagaattgctgggaaagttaccccactggtgggtgaggatctatcctcaacctacatccagatcctatgtgctgcttgcacagaggcctttggcttttgacccaggagggccgcgaggctggagctgccctgtctttcattgagccttagcatttccctctcaggcttcctctcaagctcaaggaactcacccccagataagaagctggtgcctcttgtctctctcatttcagaaacggactttctcatcatgctttcctatggtgggtatgaggggccagctgataccaaccaactggcctgtatctatctatctggatttgacttgaatttttaaaatgtgtatcgttt

SEQ ID NO: 169498 - DNA, 740 bp, Homo sapiens
  Payload ID: 13375
  Gene Symbol: PRR5L
  Gene Name: proline rich 5 like
  Uniprot ID: Q6MZQ0
  ENST ID: ENST00000527487
  CDS Start-End: 58-675
cgagggcattcggaaccttctggtcctagaggtgaagctgaactgtcaccaggacttatgacccgcggcttcgctcccattctgcccgtcgagttccacaagatgggctccttccgcaggcctagaccgcgcttcatgagctcccccgtgctcagcgaccttccccgattccaagcagctcggcaggctctgcagctgagctccagctcagcctggaacagcgttcagactgctgtgatcaacgttttcaaagggggtggcttgcaaagcaacgagctctatgccctgaacgaaaacatcaggcggctgttgaagagtgaacttggatcattcattacagactattttcagaaccagcttcttgcaaaaggactgttctttgtggaggagaagatcaagctgtgtgaaggtgaaaatcgcattgaggttctggctgaagtctgggaccacttcttcactgagactctccctaccctgcaggcaatattttatccagttcagggccaggagctgactatccgccagatctccctgctgggcttccgagacctagtcttgctgaaggtgaagctgggtgacctgctgctgctggcccagtccaagctgccctcgtccattgtccagatgttgctcatcctgcagccaggcggcactccagggtccggcccaaggtgactgtcctgaactatgcctccccgataaccgcagtcagccggccactgaatgagatggtcttgacc

SEQ ID NO: 169499 - DNA, 783 bp, Homo sapiens
  Payload ID: 13375
  Gene Symbol: PRR5L
  Gene Name: proline rich 5 like
  ENST ID: ENST00000526679
  CDS Start-End: 542-783
tttccctttaggccactcttgtcaatgctcccaacggcctcctccttcctccctgtgctgctctggggaggtctcttggctctgcccggcagtaggaacagtggagacaaagacagcttcacattctcttcagctgtcaggattgagagtggcggattcgggaggagaaaaatgagtcagtggcaactcgttgtgtgtgactgtgcagtttatctgagtccgcgggagccatagtcgtaggctgaaaatgacccttatttaagagaggctgagtgcgtggttgtggctgcccaggcgctttgctggactaggcagcctgggaacactaactgagaagtggacggggacaggagccagcctgcggtcctcagtgtcttacagtttcctggagaagtggatgtttcggcaggaagatggtgttggctacgtttgtggttttaagaaagcctgagggcctgaaggcagcccctggagaagccctttccgagggcattcggaaccttctggtcctagaggtgaagctgaactgtcaccaggacttatgacccgcggcttcgctcccattctgcccgtcgagttccacaagatgggctccttccgcaggcctagaccgcgcttcatgagctcccccgtgctcagcgaccttccccgattccaagcagctcggcaggctctgcagctgagctccagctcagcctggaacagcgttcagactgctgtgatcaacgttttcaaagggggtggcttgcaaagcaacgagctctatgccctgaacgaaaacat

SEQ ID NO: 169500 - DNA, 805 bp, Homo sapiens
  Payload ID: 13375
  Gene Symbol: PRR5L
  Gene Name: proline rich 5 like
  ENST ID: ENST00000526682
  CDS Start-End: 616-805
cgtaagatgagagaggagggaaacgtgtcaccagcccggctgtgggagctccgcggccgaagcgtttgttgactcgcgctggagaggaaccgaggctggacgggaccccatctgagggcagagctgggggaggagggagggacggagggagggagagctgggcagagcgcgacggggagaaccatccaggtcgctcatttctctccggtgagaaaacttcctcgggaagaccggaaactttttcctaggcgcgcggagtctggggcggaggcgagcggcgggtgtgcgcgactcggggtgattcacgccggggaccccaaggagaagaggcaattcggacataaagagaaacatcaagggcatgagtgcacagaggaaagaccatgtgacggcatggctacaaggcagccatctgtaaaccaaggagagagaccccaaaggaaatcaaccctgctgacaccttgatcgtggacttctagcctccagaactgtgttggctacgtttgtggttttaagaaagcctgagggcctgaaggcagcccctggagaagccctttccgagggcattcggaaccttctggtcctagaggtgaagctgaactgtcaccaggacttatgacccgcggcttcgctcccattctgcccgtcgagttccacaagatgggctccttccgcaggcctagaccgcgcttcatgagctcccccgtgctcagcgaccttccccgattccaagcagctcggcaggctctgcagctgagctccagctcagcctggaacagcgttcagactgctgtgatcaacgttt

SEQ ID NO: 169501 - DNA, 1480 bp, Homo sapiens
  Payload ID: 13376
  Gene Symbol: PRR7
  Gene Name: proline rich 7 (synaptic)
  Uniprot ID: Q8TB68
  ENST ID: ENST00000323249
  CDS Start-End: 491-1315
gcgcgcgccccgcgcctccagcccagcgctcggagccgctttcgctgccactgtctgctcccccgggccgccgccgcctccccccgcaggcccggggctctgtccgctgggcccgcgctgctcgccccgagccaggagaacgagctcgaggaggatgcctgggcccggtgcaaggttccccctctcacccgcagctgtggagaggaggaagcggaactagagatgcccatctggagtgagtgcaggaccaggtcccgcgcggccccgggtgaggcacgcccgcgcgcccgccggcgccatgggaaggagcgggcgccgctgctgtcccccgccggcgcgcgcacgacttgagacctgccacgggcagcccccggccgcgggtccccgagtgacgctggcggcacctgagagtgtggcgcgggcccggggccacgcagcggagcccagtgtccagtgaagcgtctgaggacccgccgcccgtgccgccgccatggtgatgtcccagggcacctacacgttcctcacgtgcttcgccggcttctggctcatctggggtctcatcgtcctgctctgctgcttctgcagcttcctgcgccgccgcctcaaacggcgccaggaggagcgactgcgcgagcagaacctgcgcgccctagagctggagcccctcgaactcgagggcagtctggccgggagccccccgggcctggcgccgccgcagccaccaccacaccgtagccgcctggaggcgccggctcacgcgcactcgcatccgcacgtgcacgtgcacccgctgctgcaccacgggcccgcgcagccgcacgcgcacgcgcacccacacccgcaccaccacgcgctcccgcacccgccgcctacgcacctgtcggtgccgccacggccctggagctacccgcgccaagcggaatcggacatgtccaaaccaccgtgttacgaagaggcggtgctgatggcagagccgccgccgccctatagcgaggtgctcacggacacgcgcggcctctaccgcaagatcgtcacgcccttcctgagtcgccgcgacagcgcggagaagcaggagcagccgcctcccagctacaagccgctcttcctggaccggggctacacctcggcgctgcacctgcccagcgcccctcggcccgcgccgccctgcccagccctctgcctgcaggccgaccgtggccgccgggtcttccccagctggaccgactcagagctcagcagccgcgagcccctggagcacggagcttggcgtctgccggtctccatccccttgttcgggaggactacagccgtatagaggggcgcccggcgccccgggccccaccggcggactcctggcctgactgcggggctttttaaatgcttccctggactgcggggaggggcggggggagggagggatttcttatcccgtttgttacattttgaggataataaaggtgtgtgatctggtttggtacaa

SEQ ID NO: 169502 - DNA, 1345 bp, Homo sapiens
  Payload ID: 13376
  Gene Symbol: PRR7
  Gene Name: proline rich 7 (synaptic)
  Uniprot ID: Q8TB68
  ENST ID: ENST00000502922
  CDS Start-End: 374-1198
gagccgctttcgctgccactgtctgctcccccgggccgccgccgcctccccccgcaggcccggggctctgtccgctgggcccgcgctgctcgccccgagccaggagaacgagctcgaggaggatgcctgggcccgtcccgcgcggccccgggtgaggcacgcccgcgcgcccgccggcgccatgggaaggagcgggcgccgctgctgtcccccgccggcgcgcgcacgacttgagacctgccacgggcagcccccggccgcgggtccccgagtgacgctggcggcacctgagagtgtggcgcgggcccggggccacgcagcggagcccagtgtccagtgaagcgtctgaggacccgccgcccgtgccgccgccatggtgatgtcccagggcacctacacgttcctcacgtgcttcgccggcttctggctcatctggggtctcatcgtcctgctctgctgcttctgcagcttcctgcgccgccgcctcaaacggcgccaggaggagcgactgcgcgagcagaacctgcgcgccctagagctggagcccctcgaactcgagggcagtctggccgggagccccccgggcctggcgccgccgcagccaccaccacaccgtagccgcctggaggcgccggctcacgcgcactcgcatccgcacgtgcacgtgcacccgctgctgcaccacgggcccgcgcagccgcacgcgcacgcgcacccacacccgcaccaccacgcgctcccgcacccgccgcctacgcacctgtcggtgccgccacggccctggagctacccgcgccaagcggaatcggacatgtccaaaccaccgtgttacgaagaggcggtgctgatggcagagccgccgccgccctatagcgaggtgctcacggacacgcgcggcctctaccgcaagatcgtcacgcccttcctgagtcgccgcgacagcgcggagaagcaggagcagccgcctcccagctacaagccgctcttcctggaccggggctacacctcggcgctgcacctgcccagcgcccctcggcccgcgccgccctgcccagccctctgcctgcaggccgaccgtggccgccgggtcttccccagctggaccgactcagagctcagcagccgcgagcccctggagcacggagcttggcgtctgccggtctccatccccttgttcgggaggactacagccgtatagaggggcgcccggcgccccgggccccaccggcggactcctggcctgactgcggggctttttaaatgcttccctggactgcggggaggggcggggggagggagggatttcttatcccgtttgttacattttgaggataataaaggtgtg

SEQ ID NO: 169503 - DNA, 1285 bp, Homo sapiens
  Payload ID: 13376
  Gene Symbol: PRR7
  Gene Name: proline rich 7 (synaptic)
  Uniprot ID: Q8TB68
  ENST ID: ENST00000510492
  CDS Start-End: 314-1138
cctgctctgtgagacctgtgttgagtgctctgcatccattatctcctaatttttttttacaacagttgcgcaaggtcccgcgcggccccgggtgaggcacgcccgcgcgcccgccggcgccatgggaaggagcgggcgccgctgctgtcccccgccggcgcgcgcacgacttgagacctgccacgggcagcccccggccgcgggtccccgagtgacgctggcggcacctgagagtgtggcgcgggcccggggccacgcagcggagcccagtgtccagtgaagcgtctgaggacccgccgcccgtgccgccgccatggtgatgtcccagggcacctacacgttcctcacgtgcttcgccggcttctggctcatctggggtctcatcgtcctgctctgctgcttctgcagcttcctgcgccgccgcctcaaacggcgccaggaggagcgactgcgcgagcagaacctgcgcgccctagagctggagcccctcgaactcgagggcagtctggccgggagccccccgggcctggcgccgccgcagccaccaccacaccgtagccgcctggaggcgccggctcacgcgcactcgcatccgcacgtgcacgtgcacccgctgctgcaccacgggcccgcgcagccgcacgcgcacgcgcacccacacccgcaccaccacgcgctcccgcacccgccgcctacgcacctgtcggtgccgccacggccctggagctacccgcgccaagcggaatcggacatgtccaaaccaccgtgttacgaagaggcggtgctgatggcagagccgccgccgccctatagcgaggtgctcacggacacgcgcggcctctaccgcaagatcgtcacgcccttcctgagtcgccgcgacagcgcggagaagcaggagcagccgcctcccagctacaagccgctcttcctggaccggggctacacctcggcgctgcacctgcccagcgcccctcggcccgcgccgccctgcccagccctctgcctgcaggccgaccgtggccgccgggtcttccccagctggaccgactcagagctcagcagccgcgagcccctggagcacggagcttggcgtctgccggtctccatccccttgttcgggaggactacagccgtatagaggggcgcccggcgccccgggccccaccggcggactcctggcctgactgcggggctttttaaatgcttccctggactgcggggaggggcggggggagggagggatttcttatcccgtttgttacattttgaggataataaaggtgtg

SEQ ID NO: 169504 - DNA, 993 bp, Homo sapiens
  Payload ID: 13376
  Gene Symbol: PRR7
  Gene Name: proline rich 7 (synaptic)
  ENST ID: ENST00000507881
  CDS Start-End: 458-993
acggggacctggacatgtgtgtgctctccgagctgagctgtgtgcgcgtccgggttctcgacctcagctgcctggctgtgcatccagcgtgcacgaccggtgtggcctgggctccagcctggagtgtggaccgggtcggccggcgtgtgcctcccctgtgagggtgccctggcgggtgtgagcccggcgggctggagaaccgggtctcggcgccgcaggtcccgcgcggccccgggtgaggcacgcccgcgcgcccgccggcgccatgggaaggagcgggcgccgctgctgtcccccgccggcgcgcgcacgacttgagacctgccacgggcagcccccggccgcgggtccccgagtgacgctggcggcacctgagagtgtggcgcgggcccggggccacgcagcggagcccagtgtccagtgaagcgtctgaggacccgccgcccgtgccgccgccatggtgatgtcccagggcacctacacgttcctcacgtgcttcgccggcttctggctcatctggggtctcatcgtcctgctctgctgcttctgcagcttcctgcgccgccgcctcaaacggcgccaggaggagcgactgcgcgagcagaacctgcgcgccctagagctggagcccctcgaactcgagggcagtctggccgggagccccccgggcctggcgccgccgcagccaccaccacaccgtagccgcctggaggcgccggctcacgcgcactcgcatccgcacgtgcacgtgcacccgctgctgcaccacgggcccgcgcagccgcacgcgcacgcgcacccacacccgcaccaccacgcgctcccgcacccgccgcctacgcacctgtcggtgccgccacggccctggagctacccgcgccaagcggaatcggacatgtccaaaccaccgtgttacgaagaggcggtgctgatggcagagccgccgccgccctatagcgaggtgctcacggacacgcgcggcctctaccgcaa

SEQ ID NO: 169505 - DNA, 1229 bp, Homo sapiens
  Payload ID: 13377
  Gene Symbol: PRR9
  Gene Name: proline rich 9
  Uniprot ID: Q5T870
  ENST ID: ENST00000368744
  CDS Start-End: 57-407
agtccacagcctttgttgagtcttgttgaagatcaggctctgcaaatcaccctaggatgtccttcagtgagcagcagtgcaagcagccatgtgtgccccctccatgcctcccaaagacccaggagcagtgccaagcaaaggctgaggaggtgtgcctccccacatgccagcacccctgccaagataagtgtctagtgcaggcccaggaggtatgtctttctcagtgccaggaatcaagtcaagaaaaatgcccacagcaaggccaagagccatacctacctccatgccaagaccagtgtccacctcagtgtgcagagccatgccaggagctattccagacaaaatgtgtggaggtttgcccacagaaagtccaggagaagtgctcatcccctggcaagggaaagtagctgctcatatgtcatctgggttcaagaagatggccagcagatgaaaccctgaccccagcccacgctctggtgaccttcttctgtgggtacctctgtgtgcaatgtaccttcttgcctcctggcttccttagcattccaggacttggtctgtgtctctgaagacagttctttctgtatttcatcaccctctgtgaataagcattgttctcagcagtctgatggaaggtctcaaatgtaggaatggtgtggttgtcagggaagaccacagaagcctagcacagcttccttggtgcaaaaattcacccagctctgggtgtgtaacagccaaggataccttcattcatctttcagagtttcaggctctcaaataagcctcaaaacaaactgaattctgatggactttccacttatcaccaccaccaccacctccaccaccaccaccaccacaggtgttgagacaaagcggcttgcggtgtttcaaaaatcaaaaatttggtgattttgtctctgtacactaaaaagaacagcaaattattgaactttgaaatgttggttgtgcttttttaaaatgaaccgaaagtatgtaaacgattgaatccaaacaaccagaagggaaagataagatggatgtttggtgcccttgtcaatctctgtgcttcatagctggtctaatgtgggcccttagttctcaccatgtacactctttagagatgtgatttgtgtctgtgtgatgcaggctggtctgttctccagcttccttgccttcttctccctggtgaaggtaaaatacataataaagctgatcctaaggctgatatctga

SEQ ID NO: 169506 - DNA, 4493 bp, Homo sapiens
  Payload ID: 13378
  Gene Symbol: PRRG1
  Gene Name: proline rich Gla (G-carboxyglutamic acid) 1
  Uniprot ID: O14668
  ENST ID: ENST00000378628
  CDS Start-End: 163-819
tctttccacctcccttccagtccgctcccggttcctggctccagctaggctcggcagaaataggagcgcgcaggcgcgacgtgcggctcgcagaacggcgagtagcggagcgggacccgctggaatcatcatccagggacgtgccagaaaccacaagaaaacatggggagggttttcctcacgggagaaaaagccaattccatattaaaacgctacccaagagctaatgggttttttgaagaaataagacagggcaacattgagcgtgagtgcaaagaagaattctgtacatttgaagaagcaagagaagcttttgaaaataatgaaaaaactaaggagttttggagcacctacacaaaagcgcaacaaggggagagtaaccgaggaagtgactggtttcagttttaccttacctttccgttaatctttggcctcttcattatcctccttgtcattttcctaatctggagatgcttcctaagaaacaaaactcgtagacagacagtgactgaaggccacattcctttccctcagcaccttaatattatcaccccaccccccccaccagatgaagtgtttgacagcagtggattgtctccaggctttctgggatatgtagttgggcgctcagattccgtctctactcgcctgtccaattgtgatcccccgccaacctatgaggaagccactggccaagtgaacctgcagaggagtgaaacagaacctcatttagacccacccccagagtatgaggacatagtcaactccaactcagccagtgccattcctatggtgcctgtggtcaccaccatcaaatgaagctgcaaacttctttttactctaatcatttttaaaatactaatggaagaactttctagcactttaccactacataaatgttcattgacttattttattggactcttaccgcataccacttcacacttgttttattttctttagttttgtttcttgttatagaatcattatccatgctcatttttgctaggggaaatatatgaagagggaaaacatactaatgggggtctttctgtgatgtgatgagacatacatgtaagtgtatatatgtgtgtataggcatatatacgtgtgtatgcatcaacacagtatatgtaaaactgtcttaaaaatccattaacttctacctaaatcacctggaaggagagcattactcaccaaaattgcaaaacaagggtatcaagaatttgtgtaatagccagtgacatgctgtagatttttgcaaactggatgtacttagcatgttttctaattctgactggcttttgttaacttgataattcttcatctaccttaaaaagaaaaaaattacacatagtcattcttgatgttataaatagagaaaaagtgtgtgtgagcaataatgcataagctactgataacttgcttacagcagatagcaataaggtatttggtggcattcggcttgttttgtaatagggattttttttttggttgaccactcccccacacttccaaaattaaacagtgttttcttagcatcttgaatatctcctgcggtgtatattaacatcttgatgagacagatttccaggcaacaaaataatttctaaaatggatatatgtgtggattaatgacaggcagtaaatacccattactcctttactcatagctggtaaaattattcccactgttttattgccttttactgtacgttctacactctgtcctactcccacagaattttcaagcccttaagagtttagttaaaataaaatttttgaaattattgtcttaatatttttatataggctgatgtctttgcctcaagattgttaggaggtaattttccattgaattatcaactgtgatttttatattgccctccaagtggtagaagaagattgcaaagtccatgttatgctaggtgcacaataaatctagtaatagccccacacagatctcatcattgttgctacttccttttgtattttcatcaggtatttttttaactgtagggtttttacttttttcttggagcagagagaacaggctgtaaatgggttgccaacataagctggctgagaaataaaagaaaacaagacagttgttcataaagtttcattttgtatgcactgatggcaaattcattaggtcagttaagggaaatatttgtaccacttccaaacttttcagcgttggataaaatgattgatgaggcaggcagaaggaatgtaggtttcaggtgtgtcatttcctgctgcttccagctccatccctacagactcctccccgagtcctgccctggaaccaaaggaaggaggaacactgaggggaatcctgaagtaggagtcagatgacctgaactcagatctccctctatcacatgcttgccaccactgtaccttgagcaagaatcatatctgaccctcaacctcctcaactctaaaatggggataacatcatttgtcctgcacttctctaagggctttacaaggatcaaataagatggtgtgtatgtaagaaatttgtaaaatgtgaagagctatctacactaagttcgtaatgttattattattgtgcttcatggagaattttcccctctgttttcctaaattgtatgagagctttcacacagtgagaaatagagcaggctgccccataaatgggtaacatattcctaatctgagtgtgtgggctgttagagaacccctgccatgctctggtctgttctgaaactgtgccaactgaaagatgatagtccacacagcacaaacaggtttaagcaaatgatagaaagggaagtaaggcgtgtgtgctagttaataggtttagtagcttttatggactaaaaatgattgattgtatcttgaccctggtctcagaaatgacatttttacttttgccatgagtacacatcagatatctttggcttctatttaaagctaaaggtagaagtgtttgatccagtgaactgtgtatgtatgtgtggggtttttttctttatttttaaatgaaaattaagacaccttttgtgtggacatgtttttgtctttaatgtcaggctttagattagaccagcagttttcaaagtatggccaatggacccctgggttccttgagagcctttcaggggggactatgagatcaaaatatttttattataatgtgaagacattgtcttttcactctatctcaaaaaaagtgttgcaaatgtaaaacattgccatcttctcacaaatctctttttttgtttttgaaaatatggccatttttcataaaatgttatttgtgttagcatgtaatgggtttactatgtttaaataagttaatactttaaaaattttcaggtttttttagtatggtgaatattgatagatataaacctcatgaacaaaagtactttggcatccagattctcaataaatgttaagagcgtaagtgtaagggggtccagagaccaaaagttttagagctacaggattagacataggagcaggatattctgttagtgtgatttcttgcaactttattttacattttaaactgctgatattggatataatgctgctttttagagacacctaaattgcagtatcagaatgaatgttgatgtttgaagccaaaaagccaaatgcttaaactgatcaatgactgtagctttttagactgttggtcaaagaacattctacttcacagtaatagctctatcagccacagatctcatggtggctgttgcatgataatgataggataaacaaaataccactgtcttcaagaaacattatcttaggtttgtttgtttggtttgagtttgatttggcttttatattttttaaaatcccttttgctaccccatctggttttataaactgagtttcttagcattcgttaaaattaaggggtttgtttggaataatatatattttttatgcttttgtctttcttacctgattgatattacattcacctttgattgttttttaaaagtttatttttacagaatatatttagtacctttcttaaggagtaactgaattgaatcaaccagtttgcatttaaataaaagaacaggctcagtggtcttcctgtagaatggtttacatgcctgcatgtgcagtagttgtgtctggaatcctagaattggcactttctgcctccttgctctaaatgtcacaaaaaattatacttccttaaagtaaatgtaatgatttcttcttttcctattgaccagtacagatagatatgttgtgtttgcttcatttttaatgatgacttcaagattgatgatgtgatccaataactgtggaggtagctttaacttggttctgtgtaaatagtatgtattttattataatatttctcattttaagatgcttggtttacattaaattatggtatttaactatttttatgtttatactaggtagggtctttcttatgtttctgtgtttttggtatgctaaataaagctatttttaaacccaagaga

SEQ ID NO: 169507 - DNA, 4481 bp, Homo sapiens
  Payload ID: 13378
  Gene Symbol: PRRG1
  Gene Name: proline rich Gla (G-carboxyglutamic acid) 1
  Uniprot ID: O14668
  ENST ID: ENST00000449135
  CDS Start-End: 157-813
gcgagtagcggagcgggacccgctgatgctcaccccatttagagaaagaaatccacctccccaaccccaatcaagaacctgctattgtatatcatcatagagccagattacctagggaatcatcatccagggacgtgccagaaaccacaagaaaacatggggagggttttcctcacgggagaaaaagccaattccatattaaaacgctacccaagagctaatgggttttttgaagaaataagacagggcaacattgagcgtgagtgcaaagaagaattctgtacatttgaagaagcaagagaagcttttgaaaataatgaaaaaactaaggagttttggagcacctacacaaaagcgcaacaaggggagagtaaccgaggaagtgactggtttcagttttaccttacctttccgttaatctttggcctcttcattatcctccttgtcattttcctaatctggagatgcttcctaagaaacaaaactcgtagacagacagtgactgaaggccacattcctttccctcagcaccttaatattatcaccccaccccccccaccagatgaagtgtttgacagcagtggattgtctccaggctttctgggatatgtagttgggcgctcagattccgtctctactcgcctgtccaattgtgatcccccgccaacctatgaggaagccactggccaagtgaacctgcagaggagtgaaacagaacctcatttagacccacccccagagtatgaggacatagtcaactccaactcagccagtgccattcctatggtgcctgtggtcaccaccatcaaatgaagctgcaaacttctttttactctaatcatttttaaaatactaatggaagaactttctagcactttaccactacataaatgttcattgacttattttattggactcttaccgcataccacttcacacttgttttattttctttagttttgtttcttgttatagaatcattatccatgctcatttttgctaggggaaatatatgaagagggaaaacatactaatgggggtctttctgtgatgtgatgagacatacatgtaagtgtatatatgtgtgtataggcatatatacgtgtgtatgcatcaacacagtatatgtaaaactgtcttaaaaatccattaacttctacctaaatcacctggaaggagagcattactcaccaaaattgcaaaacaagggtatcaagaatttgtgtaatagccagtgacatgctgtagatttttgcaaactggatgtacttagcatgttttctaattctgactggcttttgttaacttgataattcttcatctaccttaaaaagaaaaaaattacacatagtcattcttgatgttataaatagagaaaaagtgtgtgtgagcaataatgcataagctactgataacttgcttacagcagatagcaataaggtatttggtggcattcggcttgttttgtaatagggattttttttttggttgaccactcccccacacttccaaaattaaacagtgttttcttagcatcttgaatatctcctgcggtgtatattaacatcttgatgagacagatttccaggcaacaaaataatttctaaaatggatatatgtgtggattaatgacaggcagtaaatacccattactcctttactcatagctggtaaaattattcccactgttttattgccttttactgtacgttctacactctgtcctactcccacagaattttcaagcccttaagagtttagttaaaataaaatttttgaaattattgtcttaatatttttatataggctgatgtctttgcctcaagattgttaggaggtaattttccattgaattatcaactgtgatttttatattgccctccaagtggtagaagaagattgcaaagtccatgttatgctaggtgcacaataaatctagtaatagccccacacagatctcatcattgttgctacttccttttgtattttcatcaggtatttttttaactgtagggtttttacttttttcttggagcagagagaacaggctgtaaatgggttgccaacataagctggctgagaaataaaagaaaacaagacagttgttcataaagtttcattttgtatgcactgatggcaaattcattaggtcagttaagggaaatatttgtaccacttccaaacttttcagcgttggataaaatgattgatgaggcaggcagaaggaatgtaggtttcaggtgtgtcatttcctgctgcttccagctccatccctacagactcctccccgagtcctgccctggaaccaaaggaaggaggaacactgaggggaatcctgaagtaggagtcagatgacctgaactcagatctccctctatcacatgcttgccaccactgtaccttgagcaagaatcatatctgaccctcaacctcctcaactctaaaatggggataacatcatttgtcctgcacttctctaagggctttacaaggatcaaataagatggtgtgtatgtaagaaatttgtaaaatgtgaagagctatctacactaagttcgtaatgttattattattgtgcttcatggagaattttcccctctgttttcctaaattgtatgagagctttcacacagtgagaaatagagcaggctgccccataaatgggtaacatattcctaatctgagtgtgtgggctgttagagaacccctgccatgctctggtctgttctgaaactgtgccaactgaaagatgatagtccacacagcacaaacaggtttaagcaaatgatagaaagggaagtaaggcgtgtgtgctagttaataggtttagtagcttttatggactaaaaatgattgattgtatcttgaccctggtctcagaaatgacatttttacttttgccatgagtacacatcagatatctttggcttctatttaaagctaaaggtagaagtgtttgatccagtgaactgtgtatgtatgtgtggggtttttttctttatttttaaatgaaaattaagacaccttttgtgtggacatgtttttgtctttaatgtcaggctttagattagaccagcagttttcaaagtatggccaatggacccctgggttccttgagagcctttcaggggggactatgagatcaaaatatttttattataatgtgaagacattgtcttttcactctatctcaaaaaaagtgttgcaaatgtaaaacattgccatcttctcacaaatctctttttttgtttttgaaaatatggccatttttcataaaatgttatttgtgttagcatgtaatgggtttactatgtttaaataagttaatactttaaaaattttcaggtttttttagtatggtgaatattgatagatataaacctcatgaacaaaagtactttggcatccagattctcaataaatgttaagagcgtaagtgtaagggggtccagagaccaaaagttttagagctacaggattagacataggagcaggatattctgttagtgtgatttcttgcaactttattttacattttaaactgctgatattggatataatgctgctttttagagacacctaaattgcagtatcagaatgaatgttgatgtttgaagccaaaaagccaaatgcttaaactgatcaatgactgtagctttttagactgttggtcaaagaacattctacttcacagtaatagctctatcagccacagatctcatggtggctgttgcatgataatgataggataaacaaaataccactgtcttcaagaaacattatcttaggtttgtttgtttggtttgagtttgatttggcttttatattttttaaaatcccttttgctaccccatctggttttataaactgagtttcttagcattcgttaaaattaaggggtttgtttggaataatatatattttttatgcttttgtctttcttacctgattgatattacattcacctttgattgttttttaaaagtttatttttacagaatatatttagtacctttcttaaggagtaactgaattgaatcaaccagtttgcatttaaataaaagaacaggctcagtggtcttcctgtagaatggtttacatgcctgcatgtgcagtagttgtgtctggaatcctagaattggcactttctgcctccttgctctaaatgtcacaaaaaattatacttccttaaagtaaatgtaatgatttcttcttttcctattgaccagtacagatagatatgttgtgtttgcttcatttttaatgatgacttcaagattgatgatgtgatccaataactgtggaggtagctttaacttggttctgtgtaaatagtatgtattttattataatatttctcattttaagatgcttggtttacattaaattatggtatttaactatttttatgtttatactaggtagggtctttcttatgtttctgtgtttttggtatgctaaataaagctatttttaaaccc

SEQ ID NO: 169508 - DNA, 628 bp, Homo sapiens
  Payload ID: 13378
  Gene Symbol: PRRG1
  Gene Name: proline rich Gla (G-carboxyglutamic acid) 1
  ENST ID: ENST00000466533
  CDS Start-End: 182-628
agaaataggagcgcgcaggcgcgacgtgcggctcgcagaacggcgagtagcggagcgggacccgctgtgagtgtggcggccgcgctgggttcctagctggggaaacgtgatccaggcgaagcgccccaggaaggattgggggaatcatcatccagggacgtgccagaaaccacaagaaaacatggggagggttttcctcacgggagaaaaagccaattccatattaaaacgctacccaagagctaatgggttttttgaagaaataagacagggcaacattgagcgtgagtgcaaagaagaattctgtacatttgaagaagcaagagaagcttttgaaaataatgaaaaaactaaggagttttggagcacctacacaaaagcgcaacaaggggagagtaaccgaggaagtgactggtttcagttttaccttacctttccgttaatctttggcctcttcattatcctccttgtcattttcctaatctggagatgcttcctaagaaacaaaactcgtagacagacagtgactgaaggccacattcctttccctcagcaccttaatattatcaccccaccccccccaccagatgaagtgtttgacagcagtggattgtctccaggctttctg

SEQ ID NO: 169509 - DNA, 1663 bp, Homo sapiens
  Payload ID: 13378
  Gene Symbol: PRRG1
  Gene Name: proline rich Gla (G-carboxyglutamic acid) 1
  Uniprot ID: O14668
  ENST ID: ENST00000463135
  CDS Start-End: 59-307
gcggagcgggacccgctggaatcatcatccagggacgtgccagaaaccacaagaaaacatggggagggttttcctcacgggagaaaaagccaattccatattaaaacgctacccaagagctaatgggttttttgaagaaataagacagggcaacattgagcgtgagtgcaaagaagaattctgtacatttgaagaagcaagagaagcttttgaaaataatgaaaaaactggtcttgttctgttgccaaggctggagtgcagctgtgaacatggctcattgcagcctcaacttcctgtgcccaagtgatcctcccatctcagcctcccaagtaggtgggaaccacaggtgcatgccaccatgcctggctaatttaaaaaacaaaattatgtgcagacaaggtcccaccatgttgcctaggctggtctcaaactcctggactcaagtgatcctcctaccttggcctcccaaagtgctgggatttataggtgtgagacaccatgcccggccatctattttaaaatatttaaactcaaggcaaactctagacaaaacagaactaaatctggaaggagctattataccagaaacaagaaaatgttaccaaaaatatcaaattgatattctcagaatttaagaaaacaataggtttgtaaaatgagaagaagctattacagaggggaccaattaggggataagagaaagtccttggacattagaaatgttactgcaaaactaaaaactggacacaggtcagacagtgcagagttcactgggttgcacatggaacatagtactcattctcctccctgcccacttccactgaaaaggaatgcatccctccccagataatggacccaaatacccacttccggccctttccgccattagccatccgccttcagccagctactactaccacagctcccgcctgcctgctcaccacatcccaaggtgcctgccatggccaccaccccagtgttgcaggtgcgtcagaactaccaccccaactgcgaggccgctgtcaacaaccacgtcaacctggagttgcatgcttcctacgtgtacctgtccatggccttctacttcgaccgggacaatgcggccctggagcactttagccgctacttcctgcgccagttgcacaagaagagggagcacgtccaggagctgatgaggctgcagaaccagcacagtggctgcatctgctttcacgacatcaggaagccagagcgtcaagactgggagagcaggctcgaggccatggagtgcgccttccacctggagaagagtgtcaaccagagcctcctggagctacaccagctggccatggagaaaggtgacccccagctatgcgacttcctggagagccacttcctgaaccagcaggtcaaggccatcaaaaagctgggtgactacctgagcaacctgtgcaagacgtgagccccagaagcaggcctggcagagtacctgtttgacaagctcaccctgggcggcagcgaggaagacacctgagccaagatgggccccacagccacggtgtgccttccctgggtcaggccaccaggcgggggcgtgcatgttgccctttcagaacgttctcttcaatttttttcctttcagtgttaccattattggcaataaagttatctgttctcaaagcaa

SEQ ID NO: 169510 - DNA, 582 bp, Homo sapiens
  Payload ID: 13378
  Gene Symbol: PRRG1
  Gene Name: proline rich Gla (G-carboxyglutamic acid) 1
  ENST ID: ENST00000484460
  CDS Start-End: 239-582
gcagaacggcgagtagcggagcgggacccgctgtgagtgtggcggccgcgctgggttcctagctggggaaacgtgatccaggcgaagcgccccaggaaggattggggatgctcaccccatttagagaaagaaatccacctccccaaccccaatcaagaacctgctattgtatatcatcatagagccagattacctagggaatcatcatccagggacgtgccagaaaccacaagaaaacatggggagggttttcctcacgggagaaaaagccaattccatattaaaacgctacccaagagctaatgggttttttgaagaaataagacagggcaacattgagcgtgagtgcaaagaagaattctgtacatttgaagaagcaagagaagcttttgaaaataatgaaaaaactaaggagttttggagcacctacacaaaagcgcaacaaggggagagtaaccgaggaagtgactggtttcagttttaccttacctttccgttaatctttggcctcttcattatcctccttgtcattttcctaatctggagatgcttcctaagaaacaaaactcgtagacagacagt

SEQ ID NO: 169511 - DNA, 4509 bp, Homo sapiens
  Payload ID: 13378
  Gene Symbol: PRRG1
  Gene Name: proline rich Gla (G-carboxyglutamic acid) 1
  Uniprot ID: O14668
  ENST ID: ENST00000543642
  CDS Start-End: 182-838
agaaataggagcgcgcaggcgcgacgtgcggctcgcagaacggcgagtagcggagcgggacccgctgtgagtgtggcggccgcgctgggttcctagctggggaaacgtgatccaggcgaagcgccccaggaaggattgggggaatcatcatccagggacgtgccagaaaccacaagaaaacatggggagggttttcctcacgggagaaaaagccaattccatattaaaacgctacccaagagctaatgggttttttgaagaaataagacagggcaacattgagcgtgagtgcaaagaagaattctgtacatttgaagaagcaagagaagcttttgaaaataatgaaaaaactaaggagttttggagcacctacacaaaagcgcaacaaggggagagtaaccgaggaagtgactggtttcagttttaccttacctttccgttaatctttggcctcttcattatcctccttgtcattttcctaatctggagatgcttcctaagaaacaaaactcgtagacagacagtgactgaaggccacattcctttccctcagcaccttaatattatcaccccaccccccccaccagatgaagtgtttgacagcagtggattgtctccaggctttctgggatatgtagttgggcgctcagattccgtctctactcgcctgtccaattgtgatcccccgccaacctatgaggaagccactggccaagtgaacctgcagaggagtgaaacagaacctcatttagacccacccccagagtatgaggacatagtcaactccaactcagccagtgccattcctatggtgcctgtggtcaccaccatcaaatgaagctgcaaacttctttttactctaatcatttttaaaatactaatggaagaactttctagcactttaccactacataaatgttcattgacttattttattggactcttaccgcataccacttcacacttgttttattttctttagttttgtttcttgttatagaatcattatccatgctcatttttgctaggggaaatatatgaagagggaaaacatactaatgggggtctttctgtgatgtgatgagacatacatgtaagtgtatatatgtgtgtataggcatatatacgtgtgtatgcatcaacacagtatatgtaaaactgtcttaaaaatccattaacttctacctaaatcacctggaaggagagcattactcaccaaaattgcaaaacaagggtatcaagaatttgtgtaatagccagtgacatgctgtagatttttgcaaactggatgtacttagcatgttttctaattctgactggcttttgttaacttgataattcttcatctaccttaaaaagaaaaaaattacacatagtcattcttgatgttataaatagagaaaaagtgtgtgtgagcaataatgcataagctactgataacttgcttacagcagatagcaataaggtatttggtggcattcggcttgttttgtaatagggattttttttttggttgaccactcccccacacttccaaaattaaacagtgttttcttagcatcttgaatatctcctgcggtgtatattaacatcttgatgagacagatttccaggcaacaaaataatttctaaaatggatatatgtgtggattaatgacaggcagtaaatacccattactcctttactcatagctggtaaaattattcccactgttttattgccttttactgtacgttctacactctgtcctactcccacagaattttcaagcccttaagagtttagttaaaataaaatttttgaaattattgtcttaatatttttatataggctgatgtctttgcctcaagattgttaggaggtaattttccattgaattatcaactgtgatttttatattgccctccaagtggtagaagaagattgcaaagtccatgttatgctaggtgcacaataaatctagtaatagccccacacagatctcatcattgttgctacttccttttgtattttcatcaggtatttttttaactgtagggtttttacttttttcttggagcagagagaacaggctgtaaatgggttgccaacataagctggctgagaaataaaagaaaacaagacagttgttcataaagtttcattttgtatgcactgatggcaaattcattaggtcagttaagggaaatatttgtaccacttccaaacttttcagcgttggataaaatgattgatgaggcaggcagaaggaatgtaggtttcaggtgtgtcatttcctgctgcttccagctccatccctacagactcctccccgagtcctgccctggaaccaaaggaaggaggaacactgaggggaatcctgaagtaggagtcagatgacctgaactcagatctccctctatcacatgcttgccaccactgtaccttgagcaagaatcatatctgaccctcaacctcctcaactctaaaatggggataacatcatttgtcctgcacttctctaagggctttacaaggatcaaataagatggtgtgtatgtaagaaatttgtaaaatgtgaagagctatctacactaagttcgtaatgttattattattgtgcttcatggagaattttcccctctgttttcctaaattgtatgagagctttcacacagtgagaaatagagcaggctgccccataaatgggtaacatattcctaatctgagtgtgtgggctgttagagaacccctgccatgctctggtctgttctgaaactgtgccaactgaaagatgatagtccacacagcacaaacaggtttaagcaaatgatagaaagggaagtaaggcgtgtgtgctagttaataggtttagtagcttttatggactaaaaatgattgattgtatcttgaccctggtctcagaaatgacatttttacttttgccatgagtacacatcagatatctttggcttctatttaaagctaaaggtagaagtgtttgatccagtgaactgtgtatgtatgtgtggggtttttttctttatttttaaatgaaaattaagacaccttttgtgtggacatgtttttgtctttaatgtcaggctttagattagaccagcagttttcaaagtatggccaatggacccctgggttccttgagagcctttcaggggggactatgagatcaaaatatttttattataatgtgaagacattgtcttttcactctatctcaaaaaaagtgttgcaaatgtaaaacattgccatcttctcacaaatctctttttttgtttttgaaaatatggccatttttcataaaatgttatttgtgttagcatgtaatgggtttactatgtttaaataagttaatactttaaaaattttcaggtttttttagtatggtgaatattgatagatataaacctcatgaacaaaagtactttggcatccagattctcaataaatgttaagagcgtaagtgtaagggggtccagagaccaaaagttttagagctacaggattagacataggagcaggatattctgttagtgtgatttcttgcaactttattttacattttaaactgctgatattggatataatgctgctttttagagacacctaaattgcagtatcagaatgaatgttgatgtttgaagccaaaaagccaaatgcttaaactgatcaatgactgtagctttttagactgttggtcaaagaacattctacttcacagtaatagctctatcagccacagatctcatggtggctgttgcatgataatgataggataaacaaaataccactgtcttcaagaaacattatcttaggtttgtttgtttggtttgagtttgatttggcttttatattttttaaaatcccttttgctaccccatctggttttataaactgagtttcttagcattcgttaaaattaaggggtttgtttggaataatatatattttttatgcttttgtctttcttacctgattgatattacattcacctttgattgttttttaaaagtttatttttacagaatatatttagtacctttcttaaggagtaactgaattgaatcaaccagtttgcatttaaataaaagaacaggctcagtggtcttcctgtagaatggtttacatgcctgcatgtgcagtagttgtgtctggaatcctagaattggcactttctgcctccttgctctaaatgtcacaaaaaattatacttccttaaagtaaatgtaatgatttcttcttttcctattgaccagtacagatagatatgttgtgtttgcttcatttttaatgatgacttcaagattgatgatgtgatccaataactgtggaggtagctttaacttggttctgtgtaaatagtatgtattttattataatatttctcattttaagatgcttggtttacattaaattatggtatttaactatttttatgtttatactaggtagggtctttcttatgtttctgtgtttttggtatgctaaataaagctatttttaaacccaag

SEQ ID NO: 169512 - DNA, 4600 bp, Homo sapiens
  Payload ID: 13378
  Gene Symbol: PRRG1
  Gene Name: proline rich Gla (G-carboxyglutamic acid) 1
  Uniprot ID: O14668
  ENST ID: ENST00000542554
  CDS Start-End: 273-929
agaaataggagcgcgcaggcgcgacgtgcggctcgcagaacggcgagtagcggagcgggacccgctgtgagtgtggcggccgcgctgggttcctagctggggaaacgtgatccaggcgaagcgccccaggaaggattggggatgctcaccccatttagagaaagaaatccacctccccaaccccaatcaagaacctgctattgtatatcatcatagagccagattacctagggaatcatcatccagggacgtgccagaaaccacaagaaaacatggggagggttttcctcacgggagaaaaagccaattccatattaaaacgctacccaagagctaatgggttttttgaagaaataagacagggcaacattgagcgtgagtgcaaagaagaattctgtacatttgaagaagcaagagaagcttttgaaaataatgaaaaaactaaggagttttggagcacctacacaaaagcgcaacaaggggagagtaaccgaggaagtgactggtttcagttttaccttacctttccgttaatctttggcctcttcattatcctccttgtcattttcctaatctggagatgcttcctaagaaacaaaactcgtagacagacagtgactgaaggccacattcctttccctcagcaccttaatattatcaccccaccccccccaccagatgaagtgtttgacagcagtggattgtctccaggctttctgggatatgtagttgggcgctcagattccgtctctactcgcctgtccaattgtgatcccccgccaacctatgaggaagccactggccaagtgaacctgcagaggagtgaaacagaacctcatttagacccacccccagagtatgaggacatagtcaactccaactcagccagtgccattcctatggtgcctgtggtcaccaccatcaaatgaagctgcaaacttctttttactctaatcatttttaaaatactaatggaagaactttctagcactttaccactacataaatgttcattgacttattttattggactcttaccgcataccacttcacacttgttttattttctttagttttgtttcttgttatagaatcattatccatgctcatttttgctaggggaaatatatgaagagggaaaacatactaatgggggtctttctgtgatgtgatgagacatacatgtaagtgtatatatgtgtgtataggcatatatacgtgtgtatgcatcaacacagtatatgtaaaactgtcttaaaaatccattaacttctacctaaatcacctggaaggagagcattactcaccaaaattgcaaaacaagggtatcaagaatttgtgtaatagccagtgacatgctgtagatttttgcaaactggatgtacttagcatgttttctaattctgactggcttttgttaacttgataattcttcatctaccttaaaaagaaaaaaattacacatagtcattcttgatgttataaatagagaaaaagtgtgtgtgagcaataatgcataagctactgataacttgcttacagcagatagcaataaggtatttggtggcattcggcttgttttgtaatagggattttttttttggttgaccactcccccacacttccaaaattaaacagtgttttcttagcatcttgaatatctcctgcggtgtatattaacatcttgatgagacagatttccaggcaacaaaataatttctaaaatggatatatgtgtggattaatgacaggcagtaaatacccattactcctttactcatagctggtaaaattattcccactgttttattgccttttactgtacgttctacactctgtcctactcccacagaattttcaagcccttaagagtttagttaaaataaaatttttgaaattattgtcttaatatttttatataggctgatgtctttgcctcaagattgttaggaggtaattttccattgaattatcaactgtgatttttatattgccctccaagtggtagaagaagattgcaaagtccatgttatgctaggtgcacaataaatctagtaatagccccacacagatctcatcattgttgctacttccttttgtattttcatcaggtatttttttaactgtagggtttttacttttttcttggagcagagagaacaggctgtaaatgggttgccaacataagctggctgagaaataaaagaaaacaagacagttgttcataaagtttcattttgtatgcactgatggcaaattcattaggtcagttaagggaaatatttgtaccacttccaaacttttcagcgttggataaaatgattgatgaggcaggcagaaggaatgtaggtttcaggtgtgtcatttcctgctgcttccagctccatccctacagactcctccccgagtcctgccctggaaccaaaggaaggaggaacactgaggggaatcctgaagtaggagtcagatgacctgaactcagatctccctctatcacatgcttgccaccactgtaccttgagcaagaatcatatctgaccctcaacctcctcaactctaaaatggggataacatcatttgtcctgcacttctctaagggctttacaaggatcaaataagatggtgtgtatgtaagaaatttgtaaaatgtgaagagctatctacactaagttcgtaatgttattattattgtgcttcatggagaattttcccctctgttttcctaaattgtatgagagctttcacacagtgagaaatagagcaggctgccccataaatgggtaacatattcctaatctgagtgtgtgggctgttagagaacccctgccatgctctggtctgttctgaaactgtgccaactgaaagatgatagtccacacagcacaaacaggtttaagcaaatgatagaaagggaagtaaggcgtgtgtgctagttaataggtttagtagcttttatggactaaaaatgattgattgtatcttgaccctggtctcagaaatgacatttttacttttgccatgagtacacatcagatatctttggcttctatttaaagctaaaggtagaagtgtttgatccagtgaactgtgtatgtatgtgtggggtttttttctttatttttaaatgaaaattaagacaccttttgtgtggacatgtttttgtctttaatgtcaggctttagattagaccagcagttttcaaagtatggccaatggacccctgggttccttgagagcctttcaggggggactatgagatcaaaatatttttattataatgtgaagacattgtcttttcactctatctcaaaaaaagtgttgcaaatgtaaaacattgccatcttctcacaaatctctttttttgtttttgaaaatatggccatttttcataaaatgttatttgtgttagcatgtaatgggtttactatgtttaaataagttaatactttaaaaattttcaggtttttttagtatggtgaatattgatagatataaacctcatgaacaaaagtactttggcatccagattctcaataaatgttaagagcgtaagtgtaagggggtccagagaccaaaagttttagagctacaggattagacataggagcaggatattctgttagtgtgatttcttgcaactttattttacattttaaactgctgatattggatataatgctgctttttagagacacctaaattgcagtatcagaatgaatgttgatgtttgaagccaaaaagccaaatgcttaaactgatcaatgactgtagctttttagactgttggtcaaagaacattctacttcacagtaatagctctatcagccacagatctcatggtggctgttgcatgataatgataggataaacaaaataccactgtcttcaagaaacattatcttaggtttgtttgtttggtttgagtttgatttggcttttatattttttaaaatcccttttgctaccccatctggttttataaactgagtttcttagcattcgttaaaattaaggggtttgtttggaataatatatattttttatgcttttgtctttcttacctgattgatattacattcacctttgattgttttttaaaagtttatttttacagaatatatttagtacctttcttaaggagtaactgaattgaatcaaccagtttgcatttaaataaaagaacaggctcagtggtcttcctgtagaatggtttacatgcctgcatgtgcagtagttgtgtctggaatcctagaattggcactttctgcctccttgctctaaatgtcacaaaaaattatacttccttaaagtaaatgtaatgatttcttcttttcctattgaccagtacagatagatatgttgtgtttgcttcatttttaatgatgacttcaagattgatgatgtgatccaataactgtggaggtagctttaacttggttctgtgtaaatagtatgtattttattataatatttctcattttaagatgcttggtttacattaaattatggtatttaactatttttatgtttatactaggtagggtctttcttatgtttctgtgtttttggtatgctaaataaagctatttttaaacccaag

SEQ ID NO: 169513 - DNA, 1404 bp, Homo sapiens
  Payload ID: 13379
  Gene Symbol: PRRG2
  Gene Name: proline rich Gla (G-carboxyglutamic acid) 2
  Uniprot ID: O14669
  ENST ID: ENST00000246794
  CDS Start-End: 170-778
acctgccagaaacggggatcaggcctggttaccgggagtggggcgcccctcctccttatcccctcccctcttccctgtcccctttcacagctggctgtagctggccaaggagttctcgattaaagaggaaggggcagtgctcacatttctgggcaggtgtctggaaaatatgaggggccacccctctctgctgctgctatatatggcattaaccacctgcctggatacttcacccagtgaggagacagaccaagaagtcttcctgggtcccccagaggcccagagcttcctgagtagccatacccggattccaagagccaaccactgggacctggagctgctcacaccagggaacctggaacgggagtgtctggaagagaggtgttcctgggaagaggccagggagtattttgaggacaacactctcacggagcgcttttgggagagctacatctacaatggcaaaggagggcgtggacgagtggatgtggccagcctggctgtggggctgacaggtggcatcctgctcattgtcctggccggcctgggagccttttggtatctgcgctggcgacagcaccgaggccagcagccctgtccccaagaggccgggctcattagccctctgagtcctttgaaccctctgggcccaccgacgcccctgcctccacccccacccccacccccaggcctccccacctatgagcaggcgctggcagcctctggggtacacgacgcacctccacccccctacaccagcctcaggaggcctcactgaagagctgctttcgagacccggctctccgaaccgtgcccctgattcataccggattccggaagccgctaggcctcatagacgccgaagctggacttggagtggggaatggtgggagtaggggtcatccggcccgaggcctgccctggcacacgcgtttccgccgcgtatggatatacacatgttttcggcaacgtgttcccgtgtcctggcccctcacgggcccccacactctcctgaccgtgagggcactggtcagttccgcccccgtggtaggcagacgcgcggggaaattcggacccaggagcccagccccggctgtgccatcttgtgtatgggcagatatgacctgacagccccctccagtgccacagggtacgcacacgcagagccccgcctgtgcacacgcgtgtcttcgtgcactccccgtgcggtacaggggcacttcgtaacccagggaaagggcggggggcatatttgcaagcgcgctcggtgcgggcaggctcgcattgcacccagggagctggagttgagctgttcccctaaataaaaacccttcggaaaggagaccaaaaaaagcagaaataatgcaaaaaataataatgaaatgaactgcgatcccgggcgca

SEQ ID NO: 169514 - DNA, 435 bp, Homo sapiens
  Payload ID: 13379
  Gene Symbol: PRRG2
  Gene Name: proline rich Gla (G-carboxyglutamic acid) 2
  ENST ID: ENST00000596877
  CDS Start-End: 140-435
ttgcggaagtgcctcgcctggcttgctcaagtcctctcttctctttctctctccggaaacctggctgtagctggccaaggagttctcgattaaagaggaaggggcagtgctcacatttctgggcaggtgtctggaaaatatgaggggccacccctctctgctgctgctatatatggcattaaccacctgcctggatacttcacccagtgaggagacagaccaagaagtcttcctgggtcccccagaggcccagagcttcctgagtagccatacccggattccaagagccaaccactgggacctggagctgctcacaccagggaacctggaacgggagtgtctggaagagaggtgttcctgggaagaggccagggagtattttgaggacaacactctcacggagcgcttttgggagagctacatctacaatggcaa

SEQ ID NO: 169515 - DNA, 1538 bp, Homo sapiens
  Payload ID: 13379
  Gene Symbol: PRRG2
  Gene Name: proline rich Gla (G-carboxyglutamic acid) 2
  ENST ID: ENST00000597121
  CDS Start-End: 148-438
gcctggttaccgggagtggggcgcccctcctccttatcccctcccctcttccctgtcccctttcacagctggctgtagctggccaaggagttctcgattaaagaggaaggggcagtgctcacatttctgggcaggtgtctggaaaatatgaggggccacccctctctgctgctgctatatatggcattaaccacctgcctggatacttcacccagtgaggagacagaccaagtccttcctcttccaggagtccaggacccagccccttcctccttcagacccaggaatctggattcccagcccctgctccttcctccaggaccccactgctttccatccccctatgactccagccctagggaccctccatttttctgtccctcatgtctttgggtccagaagtcttcctgggtcccccagaggcccagagcttcctgagtagccatacccggattccaagagccaaccactgggacctggagctgctcacaccagggaacctggaacgggagtgtctggaagagaggtgttcctgggaagaggccagggagtattttgaggacaacactctcacggagcgcttttgggagagctacatctacaatggcaaaggagggcgtggacgagtggatgtggccagcctggctgtggggctgacaggtggcatcctgctcattgtcctggccggcctgggagccttttggtatctgcgctggcgacagcaccgaggccagcagccctgtccccaagaggccgggctcattagccctctgagtcctttgaaccctctgggcccaccgacgcccctgcctccacccccacccccacccccaggcctccccacctatgagcaggcgctggcagcctctggggtacacgacgcacctccacccccctacaccagcctcaggaggcctcactgaagagctgctttcgagacccggctctccgaaccgtgcccctgattcataccggattccggaagccgctaggcctcatagacgccgaagctggacttggagtggggaatggtgggagtaggggtcatccggcccgaggcctgccctggcacacgcgtttccgccgcgtatggatatacacatgttttcggcaacgtgttcccgtgtcctggcccctcacgggcccccacactctcctgaccgtgagggcactggtcagttccgcccccgtggtaggcagacgcgcggggaaattcggacccaggagcccagccccggctgtgccatcttgtgtatgggcagatatgacctgacagccccctccagtgccacagggtacgcacacgcagagccccgcctgtgcacacgcgtgtcttcgtgcactccccgtgcggtacaggggcacttcgtaacccagggaaagggcggggggcatatttgcaagcgcgctcggtgcgggcaggctcgcattgcacccagggagctggagttgagctgttcccctaaataaaaacccttcggaaaggagaccaaaaaaagcagaaataatgcaaaaaataataatgaaatgaactgcga

SEQ ID NO: 169516 - DNA, 5977 bp, Homo sapiens
  Payload ID: 13380
  Gene Symbol: PRRG3
  Gene Name: proline rich Gla (G-carboxyglutamic acid) 3 (transmembrane)
  Uniprot ID: Q9BZD7
  ENST ID: ENST00000370353
  CDS Start-End: 391-1086
tagttgtgaattctggtcctgccactgtcactgttgatttgcttaaccttgtctgagcccgtctctctgggctgtatctcctcatctatctctgaggtcctttccaattggaagttgcaaagattcattgaggggagcaaggaaggaggagcctcagcctttaggagctttcctttttaaaagaaaaaggtcaacccttggttcttatagatgctcagaacatgttcttgggggaaaacgctgaaaggtttgctttgggccctactgggcctggggaggtctctggagaagagcttggggcagaatgagaagcagcggaagccatgggtggctgcatggaggacgacgcaccccacaagagaagtgagaccctgcagctgagggagcatcatggcagtgtttctggaggccaaggatgcccattcggtcctgaaacgattccctcgtgccaatgagttcctggaggagctgcgccagggcaccatcgagcgagagtgcatggaggagatctgcagctacgaggaggtcaaggaagtgtttgagaacaaagagaaaacgatggagttctggaaagggtacccaaatgcagtctactctgtccgagacccctcgcagagctcagatgccatgtatgtggtggtaccccttctgggggtggcactgctgattgtcatcgccttgttcatcatctggaggtgccagctgcagaaagcgacccgtcaccacccctcctatgctcagaaccggtacctagccagtcgcgccgggcacaccctcccccgggtcatggtgtaccggggtactgtgcatagccaaggggagccttctgggcaccgagaggcagcgaacagcccccaggtggtgctggggcccagtcgggggggcaggaccacagtccggctagagagcaccctctacctccctgagctctctctctccagactgtccagcaccacccctcccccctcctacgaggaggtgactgcgccccaagagagcagcagtgaggaggccagcgtgtcttacagtgacccacccccaaagtacgaggagatagtggccgccaaccctggcgctgacaagtagtgggacgtttgtgccctgtcctggatgaacgcctctttccgaggtctcctattttctttttaactttttaaagactgtgccaccacaaaacagccttagcctccttgttgccaaataattccctaactgtggagttttaggaagtcagttgtcagagacaggtggggagggtgggggtagggaccacgcatgagtcgaagcccccgggaagagccaaaggccaaagtgcccaactctttgggatgacccccaagcctccaacatcctgtctttccatcaggaactggcttctcttatgccaaaggaataaccccattgagttgattgtggccagaatgtccacaggcctggcctgggggctgtgggactggctggaggcctgcctgtgtctagagctctgggcctcaggggtaagggaaggaagccagcctttcagcaccccttaccctccacagttctgtgatttctgtccttgcttacatttggaggacagggacaaggactgagcaaaaacaaaatgaaaaaatcatgacaaataaataattaacacaatagaacaaaactctagcacccgggccgttcataggaggccaagggaaatttatcacatggatctgtgatgtccgcctcccctaaaacctgtccccacactcctggaaggaggacagggtgtgtgaaggatgagggccagagggctgggtggcagagtttcctcttccacattgaccaaggggcccacgtggactctgccattcagtttctagtgtgcttgtctctccagacatgtggaccagctgtgttcaaaccactacccactggcatgagcctactttttgcgaatggtgcattgaaattgaacttcagattgaggatttctccttaacgatggtgcgcatctcaggagaagatcctaaagtgtcccttttaaaacatttatttgtggagaagcccgtggcctggggttgaaggcccatatggggtttgctctgctgttgccaggtgccagtctgttttcagtgaggctttggacagcagtggggcagaaggcacctgccctttaactgtcagtgaccatgctagacactgttgataccacctccccctacttccgtctccatcctcctgacctcaacaccaaaccatttctcctctgtggtgctttaaaaattgtagcaaatttttgtgtggtgcaagaatgcatggcctgcgtctattggcaaccacagcaatttaaaatccactgagctgacaagcttttttctgtcaaaatatctctctaaggcagacattgggactcatttccttgaatgcagccctgccttcaggccacagaggacttctggaggctgctctagccctgaggacttgccctgggacgtgcttccagttagaaggcttgtgtccctaccccagtgaggccaccagcttggaccactccaccctgtggctggggttttccatccttccccctacctcacaggcccgttggaggctgactgagcaaatgcctgcgaagtgcttgaattgccggggagccagcgaggtttgccttaggaagagtcttctagaaaggtgtaggttataagggagcagtcttagctgaggccctcatatgcctctgatgttgagtctccacttggagagtcaatctcccgtcagttgaccctttccatcctctcgtcctccctttccagagctccctgatgccagagatgctggtgaatgcaggtgacattctacctttcgtttccttgtctttccctcccctgggccttcagcattgcactcctgcccttcatcacaaaggggtttttggcttaagaggcccctgctttttccatgttgggggacctggggaagcctgaagctcggggctagccctggctctcccagtatttcttcaagtaggtgccagagtgtgacctgggagcaggtgagaagaaacttatcccaatatgtctactcagttagcacagagccaggcatgagctccactgatcagagccaaagggagtttgccaagaaatgcccgctgcctttggcatctgagttgcagctgggtggtaatgggagagagcaggaagaggcccaaggcctggcccatggagggcaacatgtgtccttcaggggctgaggacaggccgtgggaagagtcacaggaggttgcttaaggcctgtgatgttcggttcagatgcttcatggtgttctgccaggtggggttgcaccacggtctctgggatggtttctgcagcacattgtagaaaaaagactgtacagcacacagcaggcatcactccttgcgatgcacacttggattttatgaatgccctgtacatatcttttcaaactctgtgtttgtatggaggtggatttgatacaatgctgactctttcgtggctacatttttgctgtttttggacttctatgtgtgtgtgtgtgtgtgtgtgtgtgtgtatctatgtgtgcacgttgccttttctcattgcttatctgaaacaatagccggtgtgcagctatatttgtaccaggagggatccggtctgaaaagaggaatgtcacctcccctcgcagggctgagtagcctgatgacagggccctgagcaaggaaacgtggcattaactatattggacacccaacccccaaagttgtcactgtttgcctccttgaaaaaggctttggaagaagacaaagcagctccattctgcaggtctccaccctatgcaacccccgctcacacgcccttttggcatggtgcccctggcccaggcttctgttctgtgggtgtcagcagctgaaagaaatctgagtactcctgggcatggttttttttttttttttttttttttttttttttttttttttttttttttttttttttgtgtgtgtgtgtgtgtgtgtgtgtgtgtgtgtgtgtgtgtatggaaagatgtgtgactattgactttgggtatcgcgggactagttaattagatgtttttcatttttcaaaaagaaaaggttttaaaaattttcttgaaatgtgactgtcacttgttttcaaccaaaaactttttaagattttttaaaagaaaaatcgaaatcctgtccctcccccgcttcccatcgcctccggttttcaaaatgaaagcacaagtgcaagagtggggtgcacaggtgcctggcgtgtacacaccacccacacagctgcgtccagccctggctgagggagacgcagtgctgagcagtcagccccgggaggcctctttttcaacttccaatcccactgccatgaatgtgaattccttagggtgcttccaaaaacaggagtctgcctgatctgttggacattgcctttttggtagcccgaatatgaggaattcaggacaggaaagtgtctttttgtcaagtagtcagagccggatgcttcccctctcccagtgggtggagcatcgcaacccccagccagagttgatcttttgacaacccagtgacatcccatgagaaggaagaaaaaaaattcaacactgcctctagattgttattttgtccaagagagagatcatggagagagtctctctcgctcacggaggctctgtctttctaggagtatgtgtgtgtgctgtctcatgtgtggacactcacagttgaggctgagatggatatcttggcagcagagctgctggtctaggtggcttttcagcttgacaagtaatgaagctccatttcaggacttcatcgattccgaaacaagcacagccccccaccccccgccacggaactctactaatactaatcactataattagctaatttaaaagtacggtaatcagactgcttgcaactattttaaaagcccattaatttgaagcccactacttcagaacttcgagaaaatcacaacttaagacaattcacagtagctgtgattctggctacataaaaatatttgaaatattcttccctttagtcaatgttcagggtcttttgtgtaagagaaatccagtttaaaatgagtacccttttcaaagaaaaggctcaagatattaaggatcccttcaccgtgccttcagctttgcagttcagcacttctcgtatgtacagggtgatctcttgttctctctccatcacagggatgttggatattgcagcctttcactctactccgttatttatcctgtgaataacatagtttgtgaactagactgcaatttaaactaatacacatgatgtatctttctaaatattctgtaaagcagatgcttcgctgtcagactggccgctccatcattcgcctccaaatattcaaacgtgggagcttttcctttcagactgtgggcagcgagtctctctctagcaagaatttatctgacaaacatacccaaatagcacaccctctcaagctcaatgcctcaacagttgtttcactgtactgatatctgactgctgaacagtgcctgcccttcacccacccccagcccgagcattaacacagatcttcaggattgggacaaatcccccagctgcttttgcctctcaatccatctcccctcatcgataccaatttcccaggcctgaacacatctgttattttgctctgacattgtgaatttgtgacagtggaaaccctgatatgtgcaactgagcttatagaaataattactgtgaaatggattaattttgataccactttaaactgtgcttgtattcatgtgttgacccttgtcagctgggaaatctgtacattcagtatatgtcagcatttcattggagcctgggggcaacagacaaacttgcttctgatttctctctctctctctttctttttataattgttgaatttggctgttacattttgtctccttctttacaagaaaacaataataataaagagcaaatggcatccacttgaa

SEQ ID NO: 169517 - DNA, 650 bp, Homo sapiens
  Payload ID: 13380
  Gene Symbol: PRRG3
  Gene Name: proline rich Gla (G-carboxyglutamic acid) 3 (transmembrane)
  ENST ID: ENST00000370354
  CDS Start-End: 98-406
ggcgcagcagcgaggtggcgggctgcgtgcgcaaacagggcggccgccttctgggcccggagaacgagaagtgagaccctgcagctgagggagcatcatggcaggcctcagtagggctctctcctcagtgtttctggaggccaaggatgcccattcggtcctgaaacgattccctcgtgccaatgagttcctggaggagctgcgccagggcaccatcgagcgagagtgcatggaggagatctgcagctacgaggaggtcaaggaagtgtttgagaacaaagagaaaacggcatgtaccaccctggggctggttctgggagtaggagtagcctcaggaatagcaagaacaggccctggtaatgcagaccaatcagaagcaaggaaagacacccagcctaaggcatagccactagggccatcacggagcagataaaatggagttctggaaagggtacccaaatgcagtctactctgtccgagacccctcgcagagctcagatgccatgtatgtggtggtaccccttctgggggtggcactgctgattgtcatcgccttgttcatcatctggaggtgccagctgcagaaagcgacccgtcaccacccctcctatgctcagaaccggtacctagccagtcgcgccgggcacacc

SEQ ID NO: 169518 - DNA, 379 bp, Homo sapiens
  Payload ID: 13380
  Gene Symbol: PRRG3
  Gene Name: proline rich Gla (G-carboxyglutamic acid) 3 (transmembrane)
  ENST ID: ENST00000448324
  CDS Start-End: 1-276
gacccctcgcagagctcagatgccatgtatgtggtggtaccccttctgggggtggcactgctgattgtcatcgccttgttcatcatctggaggtgccagctgcagaaagcgacccgtcaccacccctcctatgctcagaaccgcagatgcttcgctgtcagactggccgctccatcattcgcctccaaatattcaaacgtgggagcttttcctttcagactgtgggcagcgagtctctctctagcaagaatttatctgacaaacatacccaaatagcacaccctctcaagctcaatgcctcaacagttgtttcactgtactgatatctgactgctgaacagtgcctgcccttcacccacccccagcccgagcattaaca

SEQ ID NO: 169519 - DNA, 339 bp, Homo sapiens
  Payload ID: 13380
  Gene Symbol: PRRG3
  Gene Name: proline rich Gla (G-carboxyglutamic acid) 3 (transmembrane)
  ENST ID: ENST00000448726
  CDS Start-End: 184-339
gcagcgcgacgattgcggcctggcgatcggggcactgcggtcgtggcgcgcgaggcgcggggcgcgaggccagccctggaacggcggggtgtggggggcgggcagctgcggagcccccagaggaaagcaggggcaggcaggggggtgccgagagaagtgagaccctgcagctgagggagcatcatggcagtgtttctggaggccaaggatgcccattcggtcctgaaacgattccctcgtgccaatgagttcctggaggagctgcgccagggcaccatcgagcgagagtgcatggaggagatctgcagctacgaggaggtcaaggaagtgtttgagaac

SEQ ID NO: 169520 - DNA, 1303 bp, Homo sapiens
  Payload ID: 13380
  Gene Symbol: PRRG3
  Gene Name: proline rich Gla (G-carboxyglutamic acid) 3 (transmembrane)
  Uniprot ID: Q9BZD7
  ENST ID: ENST00000538575
  CDS Start-End: 50-745
aggcaggggggtgccgagagaagtgagaccctgcagctgagggagcatcatggcagtgtttctggaggccaaggatgcccattcggtcctgaaacgattccctcgtgccaatgagttcctggaggagctgcgccagggcaccatcgagcgagagtgcatggaggagatctgcagctacgaggaggtcaaggaagtgtttgagaacaaagagaaaacgatggagttctggaaagggtacccaaatgcagtctactctgtccgagacccctcgcagagctcagatgccatgtatgtggtggtaccccttctgggggtggcactgctgattgtcatcgccttgttcatcatctggaggtgccagctgcagaaagcgacccgtcaccacccctcctatgctcagaaccggtacctagccagtcgcgccgggcacaccctcccccgggtcatggtgtaccggggtactgtgcatagccaaggggagccttctgggcaccgagaggcagcgaacagcccccaggtggtgctggggcccagtcgggggggcaggaccacagtccggctagagagcaccctctacctccctgagctctctctctccagactgtccagcaccacccctcccccctcctacgaggaggtgactgcgccccaagagagcagcagtgaggaggccagcgtgtcttacagtgacccacccccaaagtacgaggagatagtggccgccaaccctggcgctgacaagtagtgggacgtttgtgccctgtcctggatgaacgcctctttccgaggtctcctattttctttttaactttttaaagactgtgccaccacaaaacagccttagcctccttgttgccaaataattccctaactgtggagttttaggaagtcagttgtcagagacaggtggggagggtgggggtagggaccacgcatgagtcgaagcccccgggaagagccaaaggccaaagtgcccaactctttgggatgacccccaagcctccaacatcctgtctttccatcaggaactggcttctcttatgccaaaggaataaccccattgagttgattgtggccagaatgtccacaggcctggcctgggggctgtgggactggctggaggcctgcctgtgtctagagctctgggcctcaggggtaagggaaggaagccagcctttcagcaccccttaccctccacagttctgtgatttctgtccttgcttacatttggaggacagggacaaggactgagcaaaaacaaaatgaaaaaatcatgacaaataaataattaacacaatagaac

SEQ ID NO: 169521 - DNA, 5530 bp, Homo sapiens
  Payload ID: 13381
  Gene Symbol: PRRG4
  Gene Name: proline rich Gla (G-carboxyglutamic acid) 4 (transmembrane)
  Uniprot ID: Q9BZD6
  ENST ID: ENST00000257836
  CDS Start-End: 254-934
cccggaccgaggcaggacctcaccccgcgcgtgttccccgggcgcccctctgcgaaccccaggcccttcccaggtttgcgcgcgggggccatccagaccctgcggagagcgaggcccggagcgtcgccgaggtttgagggcgccggagaccgagggcctggcggccgaaggaaccgccccaagaagagcctctggcccgggggctgctggaacatgtgcggggggacacagtttgtttgacagttgccagactatgtttacgcttctggttctactcagccaactgcccacagttaccctggggtttcctcattgcgcaagaggtccaaaggcttctaagcatgcgggagaagaagtgtttacatcaaaagaagaagcaaactttttcatacatagacgccttctgtataatagatttgatctggagctcttcactcccggcaacctagaaagagagtgcaatgaagaactttgcaattatgaggaagccagagagatttttgtggatgaagataaaacgattgcattttggcaggaatattcagctaaaggaccaaccacaaaatcagatggcaacagagagaaaatagatgttatgggccttctgactggattaattgctgctggagtatttttggttatttttggattacttggctactatctttgtatcactaagtgtaataggctacaacatccatgctcttcagccgtctatgaaagggggaggcacactccctccatcattttcagaagacctgaggaggctgccttgtctccattgccgccttctgtggaggatgcaggattaccttcttatgaacaggcagtggcgctgaccagaaaacacagtgtttcaccaccaccaccatatcctgggcacacaaaaggatttagggtatttaaaaaatctatgtctctcccatctcactgactaccttgtcattttggtataagaaatttgtgttatttgataggccgggcatggtggctcatgcctgtaatcccagcactttgggaggccaggagttcgagaccagcctggccaacatggtgaaacccggtctctactaaaaattcaaaaattacctaggcgtcatggggcatgcctgtagtcccacctacttgggaggctgaagcaggagaattgctcgaacctgggaggcagaggttgcagtaagctgagatcacgccactgcattccagcctgggcgacagagcaagactccatctcaaaaataaaataaaaaaagaaagaaagaaaagaagaagaaaagagaagaaggagaaggagatgaaggaggaggaggaggagaaggagaagaagaagaagaagaagaccacaaaagacatgactatccaactttttatgacaaactgcaaggaataaaggaagaataagtccatgtactgtaccacagaagttctgtctgcatcttggacctgaacttgatcattatcagcttgataagagactttttgactctatatccttgcagttaagaagaaagcacttttttgtaatgtttgttttaatggttcaaaaaaaatctttcttataaagagcataggtagaattagtgaactctttggatcctttgtacagataaaggttatagatttcttgtgttgaatattaaaaaagcaaggatgtctaaccattaagattatccaaagtcaggctgggcgcagtggctcacgcctgtaatcccagcactttgggagggataggtgggcggatcacctgaggtcaggagtttgagaccagcctggccaacatggcaaaaccccgtctctacaaaaatacaaaagaaattagccagacatgatggcgggtgcctctaatcccagctactggggaggctgaggtgggagaatcgcttgaactcgggaggtggaggttgtagtgaggcgagattgtgccattgcactccaacctgggcgacagagtgagactccatctcaaaaaaaaaaaaaaaaaaaaagattatccaaaaagatattggacctactctttcttaggatttttttggcggggggttagaaatacttcacagaatttgacatttcagtataaatctgtgaccttaatataatcacttggttttatatgttaaattattgcacagcagtcatcatattttgcagagtttagttcttaactcttgctgtcagtcatgttttattataggtagtggggtcagtagttttcttcttctaaaaaatactatttgctatgaagttagttcttcagaagatacaagtttgcaatgaaaaggatttgcaagggttgttatgctatcaaataaacagacctaaaatctaggagacactagaacttaatgaagttgcccctgttactgattagtaaatactcccatcttcgttgcaaaattatctctctgtataactacatatgattattttgaaatttgttaaacttcataagtaatagtttgagaatgtggaaaaagtaatttgcttttctgctcttaaaataatattgattaatgttaccagaaaccttttgcatctcttaatatgtctgaacacaaaaggaaaacaccataatcatataaacccattctttgtctcttcttctaaatcatatgtataaccagtttttccttaagaatgtagcagcatataagctataaatttctggagtatatgcacacaaatttatctgggtgggtatgtaggtatatgtgagtttgtttcctcttccaggagctcaagaaataacatactcctgaaaaatagaatagaaatttctgtgctttatgtttttgccaggctattacattttcttatcatttaggatcacttataaaatgatcattgtttattttgttttataatttttacaggagtgagactgcaaacccacatgtttgatagttcctaccaaattaaaagtttagaaagcataaatcatattacagtgcatatgtgagtgtatgtctctcttttaagatgcatcatcttaaggcagataaaagtaagtccttaatcattacagactgccaaagactttatccttttagattctcagtctctttgttgcttgttgcaaataaatcatctagcaacatttacatttaattaggaaatctaacttgcttttaaaagttacccacgttgcatataaaaatcttgctattccttgtgtcttggctttacataagcacttttgctcatgtgactttgcactttgcacttattttaatcctctttaaagggctacaggcaaattctactttgccataatcacactaaggcatggaagaacaacttgcccagaatctagcaggttggtgacaactgggtttagaatgagtgagcacacttttctagtcccatgtcatgcctataaaattacactgcctcgaattatgaaattcagggatcttgtacataattctaagtttgggacagaaatttacaagcatttctcatatatacatacatttatatatgtacatgttacatatatttagatgtattctcatatacatatgaaaatatttatgatgaatagaattataagatatgtatgtatcttgcactgaatcataatttgaaatatttcatgaattcatttacttctattgactcccaaaattctaactgcaagctagcttcagaacctgtgagaaccccaccccacccaagcagctgcctagatttgtctactgctatcattttgtgtaaagcagttgctctaacttgaatgagtctagaattcatcattaagattgtgatatttatagagcatccaatgtggagatcatgatactttaaatataaaaaggaaaatatgatagaactgttattgacaaatgcttataatgattgaagggaaagtatctcaacattgtatcagtcacatatatttctgttgctttcaccattttctattcctgttgtaagtttggtggtagatttagttttgtttggtttatctgttttgtttgtgttttgtctcctggcaattgattagtgttaatcattaaatctattttgacacaaggttttatatataattagatcagttttccactttattacaattaagaaatgagtaaaatatggatataaaaggagaattggattgaaaagacaaatacacatttacaaggtcatacctttggtaggacagacaattccatatagaatattctcttttgataatgaaaaaaattaaagagagcacaaactttgactatgtcaaagtatttttatttttaattttttgagacaaggtcttgctctgctacccaggctggagtgcagtggtgcaatcacaactcactgtagcctgaacttcggggctcaagcaatcctcccacctcagcctcctaagtagctgggaccacaggtgcacctcggtacacctggctaatttttgtgttttttgtagagacagggtttcaccatgttgcccatgctggtctctaactcctgagctcaaggaatccacccacctcggcctcccaaagtgctgggattacaggcatgagccaccacactggactgctgtgtcaaagttttgcatcttttttttttttttttccagaaggagtctcactttgtcacccaggctggagtgcagtggagtgatcatggctcactgcaacctccgcctcccaggttcaaggatttctcctgcctcagcctcctgagtagctgcattacaggcacctgccagcacgccttgcaaatttttgtatttttagtggagatggggttttgccatgttggccaggctggtctcaaactcctgacctcaggtgatccgcccgcctcagcctcccaaagggctgggattacaggcgtgagccactgtgcctggccccaagttttgcatcttttaatgccctctgaacaaatacatagagaaaactctcagaacaattaaaacctgcagagcaacagtgtcctccatgtcttaggtttcaagtttgcctctaaaattctaatccatatttttctacttctcagataatttatgtgtgtgtactcttcctagacgtacaagagactttttaatgctaaatatttgtcagtgcttaacaaaaactcaatttcacattactcatattgtttttgttttaattgaatgtgaattaaatttttattagttatttgatttggaatgttatgtatgccattaacactattaggggaatctctagcatttctgtatttttaaagaatttgattcttttgtagattctgcctgtgtggtcattttaaaacatgtgtgacatatatcagtaccttcattcttctatattttgtgtctcctccaacctccaactttttttgttttttgaaaaatgtttctctaacacctcaacagtttaaggtaatttagtacacatatatcagtatttttgtgatctgaaaaagcaacccattttctaaattcatatttttcctaaaactttactatgtttttattttaagaggtttcctgttatatacactttttacacatgcaaataaactttataccaagtgagta

SEQ ID NO: 169522 - DNA, 1080 bp, Homo sapiens
  Payload ID: 13382
  Gene Symbol: PRIMA1
  Gene Name: proline rich membrane anchor 1
  Uniprot ID: Q86XR5
  ENST ID: ENST00000316227
  CDS Start-End: 42-416
ctcctgacagttcgccccaggagcgggcgccgctggccgagatgctcctccgggacttggtgctgcgccgtggctgctgctggtcctcgctgctgctgcactgcgcgctccacccgctctggggcttcgtgcaggtgacgcatggtgagccccagaagtcctgctccaaagtgactgacagctgccgacacgtctgccagtgccggccccctcccccgctgcccccgccgcccccacccccgccacctcccagactcctctccgccccagctcccaactctacctcttgccccactgaggaaagctggtggtcggggctggtgatcatcattgccgtatgctgtgcctccctggtgtttctgactgtgcttgtcatcatttgctacaaagccataaaaaggaaccatgccatctagggagccctctgtggccatctctgcctggaccagggtggaaatgcctcttcttggtttaatgagaccagcctcagctgactcacagagctgcagagccaggctgggtcctaacaactctctctagcatttccggagccccacggggcacgcgttaggaaaccactgagaaaagacgaaaatggcaccagcgttgctgagtatcccatgagtgcttcgcagagcaacaaaggagtagacgtgaacaacgcagtggtgtgagtctgcaggccctggacccgctggccagagggacaccttggtggcactggtggacatgggaaagcaggtggacatgagctaaccctgagcttgtccaggacttcattgcctcacaggccctgagcctcccgaaggagaaaccattgtcttcccaggcttgcccctggtcagcctgcgggcccaggcagctcggacaccaggctgagcccggcgcagcacctgggcagtgtccccaccccaggccctccacatcctcctccctgtctggtgtctggtctgtcgactgcccccagctgctgtctaaagcatgcgcactggcgaagccagagggatctgtctttctactgtggcagggaggcttccccctttagccaaaagaaagatggtccggagcccactccctgcc

SEQ ID NO: 169523 - DNA, 3711 bp, Homo sapiens
  Payload ID: 13382
  Gene Symbol: PRIMA1
  Gene Name: proline rich membrane anchor 1
  Uniprot ID: Q86XR5
  ENST ID: ENST00000393140
  CDS Start-End: 104-565
agagctgccgcggggggaacgcggacctcttttccccgagcccagggtcggctggggccgccgccaggcaagttcgccccaggagcgggcgccgctggccgagatgctcctccgggacttggtgctgcgccgtggctgctgctggtcctcgctgctgctgcactgcgcgctccacccgctctggggcttcgtgcaggtgacgcatggtgagccccagaagtcctgctccaaagtgactgacagctgccgacacgtctgccagtgccggccccctcccccgctgcccccgccgcccccacccccgccacctcccagactcctctccgccccagctcccaactctacctcttgccccactgaggaaagctggtggtcggggctggtgatcatcattgccgtatgctgtgcctccctggtgtttctgactgtgcttgtcatcatttgctacaaagccataaaaaggaaaccactgagaaaagacgaaaatggcaccagcgttgctgagtatcccatgagtgcttcgcagagcaacaaaggagtagacgtgaacaacgcagtggtgtgagtctgcaggccctggacccgctggccagagggacaccttggtggcactggtggacatgggaaagcaggtggacatgagctaaccctgagcttgtccaggacttcattgcctcacaggccctgagcctcccgaaggagaaaccattgtcttcccaggcttgcccctggtcagcctgcgggcccaggcagctcggacaccaggctgagcccggcgcagcacctgggcagtgtccccaccccaggccctccacatcctcctccctgtctggtgtctggtctgtcgactgcccccagctgctgtctaaagcatgcgcactggcgaagccagagggatctgtctttctactgtggcagggaggcttccccctttagccaaaagaaagatggtccggagcccactccctgccggaaaacctctcctcctcccaggaagcctgcctgctccactgttcacattctcaacagaagccatcggcacagccagcagacagacgtcccctttcaaaggtgcttcccacacatctgttcatcgccccatctgcagttgttgtcaatcttcagggcctgccttctccctcctatccccactgacaccctacaccctaggctcctgactgcctgccatggagggctgtgagtccagcctgcagaatcccctcctgagcagacacaggagtgcgtttacactcgggggcagtgtctggccttccgggggcaaaacgactcactgaacccgcagcccagggccactgggcaagggcagaggccactgcacctgtcctcagactcatccccacacttgaccccataggaactgatgcatctgtgtgagccaggccctgccttagtcagcagaggccactacttgtgccaaatccactgtgggcctgctgtaccaggctgatgctggccaggcgctggatgtcccccacagtcccctgaggcctgactgttgtactcaggccctctcccagagtcctccatcatctccccattttaccctaccccgagccccagtcgccaagaaggaggtgttgttcttccagggtcttcctttcaatgtctgtttccacagtctcatgctatagaagcgctgagccctccagcgtggttggaggatcaagggatgaaatgggacaggaggagaggggtcctccaggctggtgacccctgccctgttggcctgtctcccaagtggcagccttccctgtgggccacatcaggaaacccacggagacagggtgattttgcatctcctggaaaatgagtgggacactcctggccccctggctctccccaccacccctacatatgtgctcagaaggagcccaatgcattgaatggttccactgtcgagccctctaagacctggtttgcctcctaaacctccagtgtgctcctctgataggtgtttaagctacaggtgagactttgaagtccagagaagacagacacacctgaaaaccggtccccatttgggccgaaccttaaaaagcccattgtcccagagtcctagtgcccacggagctgtctgtgtgtcattgtcctgcccaggtcatcaggtgtgggctgaggacaggcccagggcataccctcccataaaggggttttcttctttcctcatttccttctatttgaggacttgtttggggtttagatttgaattttgcttcccctggacacctgggcatcagcatagtgccaccccctgctcctgacctggccagtacttcacagtgctcttgaggtgcggagccagctgacaaataggccagagggtgtgggccagcagcaggttaaagggggaaacccagcagaccccaccccagggcactctcccctactgccttcagccttctggtgcctgttgaacccccaagctgtgccctaagcagacccctgggcaggaccctagccctaagcacacaccaccctgtgctgcaaccatgagaaagtgcccatgccttgggctgtccagaagctcaggagtgatcagagggcaccttctctaagaggggaggttcctggctaagggaccatggagtggtgggcagcctgaaggggctgggcacagcccagctttgcgcacactcgcctggtcccatcattccctaccttggcttaaacctaggaggcctggattttgcagttagcctaatcttccagccccaggcgaggctccctggtgaggaatcagctgagccatcaccacgttttggggcctgtatcctcttccctgagccgctgacgcatccagggctctagtctgcacataaattccctctcagctgggcttgtaaaatcccttctcaccccagttagcaaaaatcaagggaagagcctagtttttttaaaagattcacttaatatccaccccccacctcaagcccaagaccgcccattcaaaaaacaagtatacggcacagcaagggagacccactagattttgagcttacagagacataagggtacttaaaaccctgccggcctagtatttgagcttagaacttttatttaaaatgagccggcagtctctagacacacaccgatcctcaggctagtccgagccctgaggtcaagaatgaaatgcacttcccttctcattttctcaaatagatcttttccagccgtctcacagttgaccccaactttggaactcagatcataggatctcccagaggtttcaggtgttcctaagaagcttctaaaggaagttttggaagaaagactaataggtgtaaacatataaacatatatattatatatagctatatatatttaaagagatctctacatatatatatatatataaatacaactactgtactctctgcatctgtacaaagtatgagttaaactgcccaggtagtgtgagatacgtaatgcatgaatgtgaatatcctgaaatctgccttcttagcaacgtgccgcgtgtactggagagaggacagttgctcctgggagttctctcaatgggcaaatgtacaagttgatgccgtcttatccaccaacaagccattaaggttggtttcctgctgagacttttgtaccggaagcgagaccggcagcactgggggtgtccatatgccacttatgaggaagaaagcaccatgacttttttattttcaataaaaatatagagatgtc

SEQ ID NO: 169524 - DNA, 3649 bp, Homo sapiens
  Payload ID: 13382
  Gene Symbol: PRIMA1
  Gene Name: proline rich membrane anchor 1
  Uniprot ID: Q86XR5
  ENST ID: ENST00000393143
  CDS Start-End: 42-503
ctcctgacagttcgccccaggagcgggcgccgctggccgagatgctcctccgggacttggtgctgcgccgtggctgctgctggtcctcgctgctgctgcactgcgcgctccacccgctctggggcttcgtgcaggtgacgcatggtgagccccagaagtcctgctccaaagtgactgacagctgccgacacgtctgccagtgccggccccctcccccgctgcccccgccgcccccacccccgccacctcccagactcctctccgccccagctcccaactctacctcttgccccactgaggaaagctggtggtcggggctggtgatcatcattgccgtatgctgtgcctccctggtgtttctgactgtgcttgtcatcatttgctacaaagccataaaaaggaaaccactgagaaaagacgaaaatggcaccagcgttgctgagtatcccatgagtgcttcgcagagcaacaaaggagtagacgtgaacaacgcagtggtgtgagtctgcaggccctggacccgctggccagagggacaccttggtggcactggtggacatgggaaagcaggtggacatgagctaaccctgagcttgtccaggacttcattgcctcacaggccctgagcctcccgaaggagaaaccattgtcttcccaggcttgcccctggtcagcctgcgggcccaggcagctcggacaccaggctgagcccggcgcagcacctgggcagtgtccccaccccaggccctccacatcctcctccctgtctggtgtctggtctgtcgactgcccccagctgctgtctaaagcatgcgcactggcgaagccagagggatctgtctttctactgtggcagggaggcttccccctttagccaaaagaaagatggtccggagcccactccctgccggaaaacctctcctcctcccaggaagcctgcctgctccactgttcacattctcaacagaagccatcggcacagccagcagacagacgtcccctttcaaaggtgcttcccacacatctgttcatcgccccatctgcagttgttgtcaatcttcagggcctgccttctccctcctatccccactgacaccctacaccctaggctcctgactgcctgccatggagggctgtgagtccagcctgcagaatcccctcctgagcagacacaggagtgcgtttacactcgggggcagtgtctggccttccgggggcaaaacgactcactgaacccgcagcccagggccactgggcaagggcagaggccactgcacctgtcctcagactcatccccacacttgaccccataggaactgatgcatctgtgtgagccaggccctgccttagtcagcagaggccactacttgtgccaaatccactgtgggcctgctgtaccaggctgatgctggccaggcgctggatgtcccccacagtcccctgaggcctgactgttgtactcaggccctctcccagagtcctccatcatctccccattttaccctaccccgagccccagtcgccaagaaggaggtgttgttcttccagggtcttcctttcaatgtctgtttccacagtctcatgctatagaagcgctgagccctccagcgtggttggaggatcaagggatgaaatgggacaggaggagaggggtcctccaggctggtgacccctgccctgttggcctgtctcccaagtggcagccttccctgtgggccacatcaggaaacccacggagacagggtgattttgcatctcctggaaaatgagtgggacactcctggccccctggctctccccaccacccctacatatgtgctcagaaggagcccaatgcattgaatggttccactgtcgagccctctaagacctggtttgcctcctaaacctccagtgtgctcctctgataggtgtttaagctacaggtgagactttgaagtccagagaagacagacacacctgaaaaccggtccccatttgggccgaaccttaaaaagcccattgtcccagagtcctagtgcccacggagctgtctgtgtgtcattgtcctgcccaggtcatcaggtgtgggctgaggacaggcccagggcataccctcccataaaggggttttcttctttcctcatttccttctatttgaggacttgtttggggtttagatttgaattttgcttcccctggacacctgggcatcagcatagtgccaccccctgctcctgacctggccagtacttcacagtgctcttgaggtgcggagccagctgacaaataggccagagggtgtgggccagcagcaggttaaagggggaaacccagcagaccccaccccagggcactctcccctactgccttcagccttctggtgcctgttgaacccccaagctgtgccctaagcagacccctgggcaggaccctagccctaagcacacaccaccctgtgctgcaaccatgagaaagtgcccatgccttgggctgtccagaagctcaggagtgatcagagggcaccttctctaagaggggaggttcctggctaagggaccatggagtggtgggcagcctgaaggggctgggcacagcccagctttgcgcacactcgcctggtcccatcattccctaccttggcttaaacctaggaggcctggattttgcagttagcctaatcttccagccccaggcgaggctccctggtgaggaatcagctgagccatcaccacgttttggggcctgtatcctcttccctgagccgctgacgcatccagggctctagtctgcacataaattccctctcagctgggcttgtaaaatcccttctcaccccagttagcaaaaatcaagggaagagcctagtttttttaaaagattcacttaatatccaccccccacctcaagcccaagaccgcccattcaaaaaacaagtatacggcacagcaagggagacccactagattttgagcttacagagacataagggtacttaaaaccctgccggcctagtatttgagcttagaacttttatttaaaatgagccggcagtctctagacacacaccgatcctcaggctagtccgagccctgaggtcaagaatgaaatgcacttcccttctcattttctcaaatagatcttttccagccgtctcacagttgaccccaactttggaactcagatcataggatctcccagaggtttcaggtgttcctaagaagcttctaaaggaagttttggaagaaagactaataggtgtaaacatataaacatatatattatatatagctatatatatttaaagagatctctacatatatatatatatataaatacaactactgtactctctgcatctgtacaaagtatgagttaaactgcccaggtagtgtgagatacgtaatgcatgaatgtgaatatcctgaaatctgccttcttagcaacgtgccgcgtgtactggagagaggacagttgctcctgggagttctctcaatgggcaaatgtacaagttgatgccgtcttatccaccaacaagccattaaggttggtttcctgctgagacttttgtaccggaagcgagaccggcagcactgggggtgtccatatgccacttatgaggaagaaagcaccatgacttttttattttcaataaaaatatagagatgtc

SEQ ID NO: 169525 - DNA, 1081 bp, Homo sapiens
  Payload ID: 13382
  Gene Symbol: PRIMA1
  Gene Name: proline rich membrane anchor 1
  Uniprot ID: Q86XR5
  ENST ID: ENST00000477603
  CDS Start-End: 43-417
cgccaggcaagttcgccccaggagcgggcgccgctggccgagatgctcctccgggacttggtgctgcgccgtggctgctgctggtcctcgctgctgctgcactgcgcgctccacccgctctggggcttcgtgcaggtgacgcatggtgagccccagaagtcctgctccaaagtgactgacagctgccgacacgtctgccagtgccggccccctcccccgctgcccccgccgcccccacccccgccacctcccagactcctctccgccccagctcccaactctacctcttgccccactgaggaaagctggtggtcggggctggtgatcatcattgccgtatgctgtgcctccctggtgtttctgactgtgcttgtcatcatttgctacaaagccataaaaaggaaccatgccatctagggagccctctgtggccatctctgcctggaccagggtggaaatgcctcttcttggtttaatgagaccagcctcagctgactcacagagctgcagagccaggctgggtcctaacaactctctctagcatttccggagccccacggggcacgcgttaggaaaccactgagaaaagacgaaaatggcaccagcgttgctgagtatcccatgagtgcttcgcagagcaacaaaggagtagacgtgaacaacgcagtggtgtgagtctgcaggccctggacccgctggccagagggacaccttggtggcactggtggacatgggaaagcaggtggacatgagctaaccctgagcttgtccaggacttcattgcctcacaggccctgagcctcccgaaggagaaaccattgtcttcccaggcttgcccctggtcagcctgcgggcccaggcagctcggacaccaggctgagcccggcgcagcacctgggcagtgtccccaccccaggccctccacatcctcctccctgtctggtgtctggtctgtcgactgcccccagctgctgtctaaagcatgcgcactggcgaagccagagggatctgtctttctactgtggcagggaggcttccccctttagccaaaagaaagatggtccggagcccactccctgcc

SEQ ID NO: 169526 - DNA, 3649 bp, Homo sapiens; identical to SEQ ID NO: 169524
  Payload ID: 13382
  Gene Symbol: PRIMA1
  Gene Name: proline rich membrane anchor 1
  Uniprot ID: Q86XR5
  ENST ID: ENST00000611347
  CDS Start-End: 42-503

SEQ ID NO: 169527 - DNA, 1080 bp, Homo sapiens; identical to SEQ ID NO: 169522
  Payload ID: 13382
  Gene Symbol: PRIMA1
  Gene Name: proline rich membrane anchor 1
  Uniprot ID: Q86XR5
  ENST ID: ENST00000617019
  CDS Start-End: 42-416

SEQ ID NO: 169528 - DNA, 1081 bp, Homo sapiens; identical to SEQ ID NO: 169525
  Payload ID: 13382
  Gene Symbol: PRIMA1
  Gene Name: proline rich membrane anchor 1
  Uniprot ID: Q86XR5
  ENST ID: ENST00000627063
  CDS Start-End: 43-417

SEQ ID NO: 169529 - DNA, 3711 bp, Homo sapiens; identical to SEQ ID NO: 169523
  Payload ID: 13382
  Gene Symbol: PRIMA1
  Gene Name: proline rich membrane anchor 1
  Uniprot ID: Q86XR5
  ENST ID: ENST00000629961
  CDS Start-End: 104-565

SEQ ID NO: 169530 - DNA, 1040 bp, Homo sapiens
  Payload ID: 13383
  Gene Symbol: PROL1
  Gene Name: proline rich, lacrimal 1
  Uniprot ID: Q99935
  ENST ID: ENST00000399575
  CDS Start-End: 175-921
aactccaataaaaatccagacagaggtatttaagaagaaaggcttttctatcaaagttctttctcttcttggacttttaaattgtggctacctaaattgagtatctggcaagagtaagattaagcagtaatttgttccaaagaagaatcttctaccaaggagcaactttaaagaatgaaattaactttcttcttgggcctgttggctcttatttcatgtttcacacccagtgagagtcaaagattctccagaagaccatatctacctggccagctgccaccacctccactctacaggccaagatgggttccaccaagtcccccacctccctatgactcaagacttaattcaccactttctcttccctttgtcccagggcgagttccaccatcttctttctctcgatttagccaagcagtcattctatctcaactctttccattggaatctattagacaacctcgactctttccgggttatccaaacctacatttcccactaagaccttactatgtaggacctattaggatattaaaacccccatttcctcctattcctttttttcttgctatttaccttcctatctctaaccctgagccccaaataaacatcaccaccgcagatacaacaatcaccacaaatccccccaccactgcaacagcaaccaccagcacttccacaaaacccacaatgacgatcagctcctcaacagtacctatctcttcaacaccagagcctgccacctccatatcagcagcaacccccgcagcatctactgaaaatactactcaaattctcgccaaccgtcctcacacagtattgctcaatgccactgtccaagttacgacttccaaccaaactatattaagcagcccagcctttaaaagtttttggcaaaaactctttgccatttttggttgaacatgcaataaatgatattttccaaactgctctgatatcttagaagaaataaactgcaatgattttgatggaaccaaccctgatctaaccagcacactaaataaagtatttgagcaata

SEQ ID NO: 169531 - DNA, 944 bp, Homo sapiens
  Payload ID: 13383
  Gene Symbol: PROL1
  Gene Name: proline rich, lacrimal 1
  ENST ID: ENST00000615728
  CDS Start-End: 81-683
aattgagtatctggcaagagtaagattaagcagtaatttgttccaaagaagaatcttctaccaaggagcaactttaaagaatgaaattaactttcttcttgggcctgttggctcttatttcatgtttcacacccagtgagagtcaaagattctccagaagaccatatctacctggccagctgccaccacctccactctacaggccaagatgggttccaccaagtcccccacctccctatgactcaagacttaattcaccactttctcttccctttgtcccagggcgagttccaccatcttctttctctcgatttagccaagcagtcattctatctcaactctttccattggaatctattagacaacctcgactctttccgggttatccaaacctacatttcccactaagaccttactatgtaggacctattaggatattaaaacccccatttcctcctattcctttttttcttgctatttaccttcctatctctaaccctgagccccaaataaacatcaccaccgcagatacaacaatcaccacaaatccccccaccactgcaacagcaacccagcacttccacaaaacccacaatgacgatcagctcctcaacagtacctatctcttcaacaccagagcctgccacctccatatcagcagcaacccccgcagcatctactgaaaatactactcaaattctcgccaaccgtcctcacacagtattgctcaatgccactgtccaagttacgacttccaaccaaactatattaagcagcccagcctttaaaagtttttggcaaaaactctttgccatttttggttgaacatgcaataaatgatattttccaaactgctctgatatcttagaagaaataaactgcaatgattttgatggaaccaaccctgatctaaccagcacactaaataaagtatttgagcaata

SEQ ID NO: 169532 - DNA, 878 bp, Homo sapiens
  Payload ID: 13384
  Gene Symbol: PRORY
  Gene Name: proline rich, Y-linked
  Uniprot ID: Q9H606
  ENST ID: ENST00000382764
  CDS Start-End: 98-646
acaggaggacaaggactcaggggtctgctggtccatctctgcaccttgaaacagcagctggggcaccagaagtaacccttacagccaacaccatgtgatgatgaggaggagtccatctgggttaaagagcccacgtgtgagccaaggcaggaaaccccgggatccagaaagccttctgtttttgcgatgctgcctgggatcggagccgcacaacctgtcctcattgctctctccggaggccgggcaggaacctctgccaaagcttctacctcagccgctggcaggccatgcggcctggggcattcacggagttccaacgagtctgttactggctggggagtgctggggccagggcatggccgtgcccgctgatcctcctcctgcctctccatatcggacttctcctcgaccaccacctggaccactgccacgatatcgtccacagcagcaccttctcctccccctagggcgcctccacgctctgtgccctggctgtcctctccagcagagcctccaatttgaacggggtacactgtccgctccacgtctgtggtcatggatgaagctggaaaccatcatactaagcaaactatcacaaggacagaaaaccaaacaccgcatgttctcactgataagtgagagttgaacaatgagaacacatggacacagggcagggaacatcacccaccgaggccggtcgcgggggtggggggttgagggagggatagcatttggagaaatacctaatgtaaatgacgagttgataggggcagcaaacaaacatggaacatgtatccctatgttacaaacctgcacgttgtgtacatgtaccctagaacttacaggataataaaacaaaaaaaaaaaaaaagaaaaaa

SEQ ID NO: 169533 - DNA, 2558 bp, Homo sapiens
  Payload ID: 13385
  Gene Symbol: PROSC
  Gene Name: proline synthetase co-transcribed homolog (bacterial)
  Uniprot ID: O94903
  ENST ID: ENST00000328195
  CDS Start-End: 68-895
cggaaccggaagatggtgtgagccacgggctgccgggggcctggggctcggcgtcggtccccgggggatgtggagagctggcagcatgtcggccgagctgggagtcgggtgcgcattgcgggcggtgaacgagcgcgtgcagcaggctgtggcgcggcggccgcgggatctcccagccatccagccccggctagtggcggtcagcaaaaccaaacctgcagacatggtgatcgaggcctatggacatgggcagcgcacttttggcgagaactacgttcaggaactgctagaaaaagcatcaaatcccaaaattctgtctttgtgtcctgagatcaaatggcacttcattggccacctacagaaacaaaatgtcaacaaattgatggctgtccccaatctcttcatgctggaaacagtggattctgtgaagttggcagacaaagtgaacagttcctggcagagaaaaggttctcctgaaaggttaaaggttatggtccagattaacaccagcggagaagagagtaaacatggccttccaccttcagagaccatagccatcgtggagcacataaacgccaagtgtcctaacctggagtttgtggggctgatgaccataggaagctttgggcatgatcttagtcaaggaccaaatccagacttccagctgttattgtccctccgggaggagctgtgtaaaaagctgaacatccctgctgaccaggttgagctgagcatgggcatgtccgcggatttccagcatgcggttgaagtaggatctacaaatgtccgaataggaagcacgatttttggagagcgggattactcaaagaaacccaccccggacaagtgcgcagcagacgtgaaggccccgctggaggtggcacaggagcactgagccagggaatactgagagcactaactatgcactaacctagattttcatttcgatattccctgtgtcccagcgcagtcctgctctcctgtgacctgtggagagcactaatgatcacgtgtgttgatggaaaccatctgtgcttagtctctgacataggaagcttgcttcaggcaatggctttggattgagtttgagaaattcaaacatttctgcagaacagataccaaatcaatagctaggaatcatgttcaatattgaattctgcccaggagcatgaactgatccatgaatgccttttccaggttaaaatttggtcactgatgcctataatcgtggaagtcagagggattcccctttttcatctcattttaataggaaaattccttatggttaacatctccctacaaactcctactacgtcgtctaaattgctgctctggaataaggtgatttctgcccccagattcttccctagccggtagatacgtgaagatattcccaactgtggaatggcagtgtaggtagcttcaggaaatggctcaggttaattctcaaaacacaaattgttgctggccaggcatggtgactcatgcctgtaatcccagcaatttgggagacagaggcggaaggatcacctgagcctaggagttcaagaccagcctcagcaacagcaggagccccaccccccgtctctacaaaaaaatttaaaaattaactgggcatggtggctgaggtggaagaatggaagaatcacttgagcccaggagtttgaggctgcagtgagctatgattgcaccactgtactcctgccttaaaaaaaaaaaaaaaatcccaatagtccatgaaggctttgatctcttgggaagttcttcatagatgctgtcacatttcttaaagcaaccttttaatatgcagataataccccccaacttttttagagacagcctgtctcttaaaaaaaaaattaatttggtagtgagagcttgtgtcactgccactctgttttatccctgaaattaaaggataacataaggaggacttgggcctttctgacatcatcctgaagagacaggactttgcgtttttcctctgggacctacagtgatgagaatttaatgattatctcctccactataatcctctttagggtgattttttaaatcaaaacccagtgaatctcattactcctaagaaacgaaagattccttcaaagccttttcaggcacatggtttcaacaaagcctggctttgacattccttgtcctgaggagcactttccaggcatagttacagcttccccactgtatttacaagccagaattgtgcaactcttctggatcattaataaagtagcaagatcctcaaaaaacccaaaaacaccattctctaatagtcatgacaaatggcttcagtatggcttgttttttattttccagatggctttttctcttattttttgaagccccagtctttgattttacaggtaactttcaaaacatcatgatgctgccaaatgtacttttgtaaacttaaacattatgattcctgtattatttcagtgagagctacagtgtgatatttcagagtctattaaataaaaatgtgagtttgaattacaccatctgtgccaattacaaagcaattaaaagatttattttttatg

SEQ ID NO: 169534 - DNA, 516 bp, Homo sapiens
  Payload ID: 13385
  Gene Symbol: PROSC
  Gene Name: proline synthetase co-transcribed homolog (bacterial)
  ENST ID: ENST00000523358
  CDS Start-End: 61-516
ggaagatggtgtgagccacgggctgccgggggcctggggctcggcgtcggtccccgggggatgtggagagctggcagcatgtcggccgagctgggagtcgggtgcgcattgcgggcggtgaacgagcgcgtgcagcaggctgtggcgcggcggccgcgggatctcccagccatccagccccggctagtggcggtcagcaaaaccaaacctgcagacatggtgatcgaggcctatggacatgggcagcgcacttttggcgagaactacgttcaggaactgctagaaaaagcatcaaatcccaaaattctgtctttgtgtcctgagatcaaatggcacttcattggccacctacagaaacaaaatgtcaacaaattgatggctgtccccaatctcttcatgctggaaacagtggattctgtgaagttggcagacaaagtgaacagttcctggcagagaaaaggttctcctgaaaggttaaaggttatggtccagattaacaccagcggagaagagagt

SEQ ID NO: 169535 - DNA, 569 bp, Homo sapiens
  Payload ID: 13385
  Gene Symbol: PROSC
  Gene Name: proline synthetase co-transcribed homolog (bacterial)
  ENST ID: ENST00000523187
  CDS Start-End: 159-569
ggaagatggtgtgagccacgggctgccgggggcctggggctcggcgtcggtccccgggggatgtggagagctggcagcatgtcggccgagctgggagtcgggatctcccagccatccagccccggctagtggcggtcagcaaaaccaaacctgcagacatggtgatcgaggcctatggacatgggcagcgcacttttggcgagaactacgttcaggaactgctagaaaaagcatcaaatcccaaaattctgtctttgtgtcctgagatcaaatggcacttcattggccacctacagaaacaaaatgtcaacaaattgatggctgtccccaatctcttcatgctggaaacagtggattctgtgaagttggcagacaaagtgaacagttcctggcagagaaaaggttctcctgaaaggttaaaggttatggtccagattaacaccagcggagaagagagtaaacatggccttccaccttcagagaccatagccatcgtggagcacataaacgccaagtgtcctaacctggagtttgtggggctgatgaccataggaagctttgggcatgat

SEQ ID NO: 169536 - DNA, 558 bp, Homo sapiens
  Payload ID: 13385
  Gene Symbol: PROSC
  Gene Name: proline synthetase co-transcribed homolog (bacterial)
  ENST ID: ENST00000518036
  CDS Start-End: 51-275
gtgagccacgggctgccgggggcctggggctcggcgtcggtccccgggggatgtggagagctggcagcatgtcggccgagctgggagtcgggtgcgcattgcgggcggtgaacgagcgcgtgcagcaggctgtggcgcggcggccgcgggatctcccagccatccagccccggctagtggcggtcagcaaaaccaaacctgcagacatggtgatcgaggcctatggacatgggcagcgcacttttggcgagaactacgtaagagccctttcctgaagccctttggaagcatcatgattgccaggcttctgacttgttctgttttgaccttttaggttcaggaactgctagaaaaagcatcaaatcccaaaattctgtctttgtgtcctgagatcaaatggcacttcattggccacctacagaaacaaaatgtcaacaaattgatggctgtccccaatctcttcatgctggaaacagtggattctgtgaagttggcagacaaagtgaacagttcctggcagagaaaaggttctcctgaaaggttaaaggttatggtcca

SEQ ID NO: 169537 - DNA, 384 bp, Homo sapiens
  Payload ID: 13385
  Gene Symbol: PROSC
  Gene Name: proline synthetase co-transcribed homolog (bacterial)
  ENST ID: ENST00000523521
  CDS Start-End: 1-384
attctgtctttgtgtcctgagatcaaatggcacttcattggccacctacagaaacaaaatgtcaacaaattgatggctgtccccaatctcttcatgctggaaacagtggattctgtgaagttggcagacaaagtgaacagttcctggcagagaaaaggttctcctgaaaggttaaaggttatggtccagattaacaccagcggagaagagatatacctgttttctgtttcttttcttgaaggtaaacatggccttccaccttcagagaccatagccatcgtggagcacataaacgccaagtgtcctaacctggagtttgtggggctgatgaccataggaagctttgggcatgatcttagtcaaggaccaaatccagacttccag

SEQ ID NO: 169538 - DNA, 3673 bp, Homo sapiens
  Payload ID: 13386
  Gene Symbol: PELP1
  Gene Name: proline, glutamate and leucine rich protein 1
  ENST ID: ENST00000301396
  CDS Start-End: 77-3619
acaggcagcctcatccgccatcactccgggaaccgagcaccccgctgcctcggcgcccaggctgctctctccgcgcatgctccttcccagcttgagcccgcgagtccagcctgccttcactcagtgcgcaagaccgcagccccctccccacgccccctccccagtaggcggccgtcgcggtgtgtttgcgtcatcgcgccacgccaccactggaacccgggggaagatggcggcagccgttctgagtgggccctctgcgggctccgcggctggggttcctggcgggaccgggggtctctcggcagtgagctcgggcccgcggctccgcctgctgctgctggagagtgtttctggtttgctgcaacctcgaacggggtctgccgttgctccggtgcatcccccaaaccgctcggccccacatttgcccgggctcatgtgcctattgcggctgcatgggtcggtgggcggggcccagaacctttcagctcttggggcattggtgagtctcagtaatgcacgtctcagttccatcaaaactcggtttgagggcctgtgtctgctgtccctgctggtaggggagagccccacagagctattccagcagcactgtgtgtcttggcttcggagcattcagcaggtgttacagacccaggacccgcctgccacaatggagctggccgtggctgtcctgagggacctcctccgatatgcagcccagctgcctgcactgttccgggacatctccatgaaccacctccctggccttctcacctccctgctgggcctcaggccagagtgtgagcagtcagcattggaaggaatgaaggcttgtatgacctatttccctcgggcttgtggttctctcaaaggcaagctggcctcattttttctgtctagggtggatgccttgagccctcagctccaacagttggcctgtgagtgttattcccggctgccctctttaggggctggcttttcccaaggcctgaagcacaccgagagctgggagcaggagctacacagtctgctggcctcactgcacaccctgctgggggccctgtacgagggagcagagactgctcctgtgcagaatgaaggccctggggtggagatgctgctgtcctcagaagatggtgatgcccatgtccttctccagcttcggcagaggttttcgggactggcccgctgcctagggctcatgctcagctctgagtttggagctcccgtgtccgtccctgtgcaggaaatcctggatttcatctgccggaccctcagcgtcagtagcaagaatattagcttgcatggagatggtcccctgcggctgctgctgctgccctctatccaccttgaggccttggacctgctgtctgcactcatcctcgcgtgtggaagccggctcttgcgctttgggatcctgatcggccgcctgcttccccaggtcctcaattcctggagcatcggtagagattccctctctccaggccaggagaggccttacagcacggttcggaccaaggtgtatgcgatattagagctgtgggtgcaggtttgtggggcctcggcgggaatgcttcagggaggagcctctggagaggccctgctcacccacctgctcagcgacatctccccgccagctgatgcccttaagctgcgtagcccgcgggggagccctgatgggagtttgcagactgggaagcctagcgcccccaagaagctaaagctggatgtgggggaagctatggccccgccaagccaccggaaaggggatagcaatgccaacagcgacgtgtgtgcggctgcactcagaggcctcagccggaccatcctcatgtgtgggcctctcatcaaggaggagactcacaggagactgcatgacctggtcctccccctggtcatgggtgtacagcagggtgaggtcctaggcagctccccgtacacgagctcccgctgccgccgtgaactctactgcctgctgctggcgctgctgctggccccgtctcctcgctgcccacctcctcttgcctgtgccctgcaagccttctccctcggccagcgagaagatagccttgaggtctcctctttctgctcagaagcactggtgacctgtgctgctctgacccacccccgggttcctcccctgcagcccatgggccccacctgccccacacctgctccagttccccctcctgaggccccatcgcccttcagggccccaccgttccatcctccgggccccatgccctcagtgggctccatgccctcagcaggccccatgccttcagcaggccccatgccctcagcaggccctgtgccctcggcacgccctggacctcccaccacagccaaccacctaggcctttctgtcccaggcctagtgtctgtccctccccggcttcttcctggccctgagaaccaccgggcaggctcaaatgaggaccccatccttgcccctagtgggactcccccacctactatacccccagatgaaacttttggggggagagtgcccagaccagcctttgtccactatgacaaggaggaggcatctgatgtggagatctccttggaaagtgactctgatgacagcgtggtgatcgtgcccgaggggcttccccccctgccacccccaccaccctcaggtgccacaccaccccctatagcccccactgggccaccaacagcctcccctcctgtgccagcgaaggaggagcctgaagaacttcctgcagccccagggcctctcccgccacccccacctccgccgccgcctgttcctggtcctgtgacgctccctccaccccagttggtccctgaagggactcctggtgggggaggacccccagccctggaagaggatttgacagttattaatatcaacagcagtgatgaagaggaggaggaagaggaagaagaggaagaagaagaagaggaagaagaggaagaggaggaagactttgaggaagaggaagaggatgaagaggaatattttgaagaggaagaagaggaggaagaagagtttgaggaagaatttgaggaagaagaaggtgagttagaggaagaagaagaagaggaggatgaggaggaggaagaagaactggaagaggtggaagacctggagtttggcacagcaggaggggaggtagaagaaggtgcacctccacccccaaccctgcctccagctctgcctccccctgagtctcccccaaaggtgcagccagaacccgaacctgaacccgggctgcttttggaagtggaggagccagggacggaggaggagcgtggggctgacacagctcccaccctggcccctgaagcgctcccctcccagggagaggtggagagggaaggggaaagccctgcggcagggccccctccccaggagcttgttgaagaagagccctctgctcccccaaccctgttggaagaggagactgaggatgggagtgacaaggtgcagcccccaccagagacacctgcagaagaagagatggagacagagacagaggccgaagctctccaggaaaaggagcaggatgacacagctgccatgctggccgacttcatcgattgtccccctgatgatgagaagccaccacctcccacagagcctgactcctagccatcttctgcaccccactctttgtttccaataaagttatgtccttagatagcg

SEQ ID NO: 169539 - DNA, 3524 bp, Homo sapiens
  Payload ID: 13386
  Gene Symbol: PELP1
  Gene Name: proline, glutamate and leucine rich protein 1
  ENST ID: ENST00000436683
  CDS Start-End: 750-3470
acaggcagcctcatccgccatcactccgggaaccgagcaccccgctgcctcggcgcccaggctgctctctccgcgcatgctccttcccagcttgagcccgcgagtccagcctgccttcactcagtgcgcaagaccgcagccccctccccacgccccctccccagtaggcggccgtcgcggtgtgtttgcgtcatcgcgccacgccaccactggaacccgggggaagatggcggcagccgttctgagtgggccctctgcgggctccgcggctggggttcctggcgggaccgggggtctctcggcagtgagctcgggcccgcggctccgcctgctgctgctggagagtgtttctggtttgctgcaacctcgaacggggtctgccgttgctccggtgcatcccccaaaccgctcggccccacatttgcccgggctcatgtgcctattgcggctgcatgggtcggtgggcggggcccagaacctttcagctcttggggcattggtgagtctcagtaatgcacgtctcagttccatcaaaactcggtttgagggcctgtgtctgctgtccctgctggtaggggagagccccacagagctattccagcagcactgtgtgtcttggcttcggagcattcagcaggtgttacagtatccgtgtctccacaccctcttttctgccaggtagtggcttggatggtcagactgacattaaccgtggcattcctcagaagacccaggacccgcctgccacaatggagctggccgtggctgtcctgagggacctcctccgatatgcagcccagctgcctgcactgttccgggacatctccatgaaccacctccctggccttctcacctccctgctgggcctcaggccagagtgtgagcagtcagcattggaaggaatgaaggcttgtatgacctatttccctcgggcttgtggttctctcaaaggcaagctggcctcattttttctgtctagggtggatgccttgagccctcagctccaacagttggcctgtgagtgttattcccggctgccctctttaggggctggcttttcccaaggcctgaagcacaccgagagctgggagcaggagctacacagtctgctggcctcactgcacaccctgctgggggccctgtacgagggagcagagactgctcctgtgcagaatgaaggccctggggtggagatgctgctgtcctcagaagatggtgatgcccatgtccttctccagcttcggcagaggttttcgggactggcccgctgcctagggctcatgctcagctctgagtttggagctcccgtgtccgtccctgtgcaggaaatcctggatttcatctgccggaccctcagcgtcagtagcaagaatattagcttgcatggagatggtcccctgcggctgctgctgctgccctctatccaccttgaggccttggacctgctgtctgcactcatcctcgcgtgtggaagccggctcttgcgctttgggatcctgatcggccgcctgcttccccaggtcctcaattcctggagcatcggtagagattccctctctccaggccaggagaggccttacagcacggttcggaccaaggtgtatgcgatattagagctgtgggtgcaggtttgtggggcctcggcgggaatgcttcagggaggagcctctggagaggccctgctcacccacctgctcagcgacatctccccgccagctgatgcccttaagctgcgtagcccgcgggggagccctgatgggagtttgcagactgggaagcctagcgcccccaagaagctaaagctggatgtgggggaagctatggccccgccaagccaccggaaaggggatagcaatgccaacagcgacgtgtgtgcggctgcactcagaggcctcagccggaccatcctcatgtgtgggcctctcatcaaggaggagactcacaggagactgcatgacctggtcctccccctggtcatgggtgtacagcagggtgaggtcctaggcagctccccgtacacgagctcccgctgccgccgtgaactctactgcctgctgctggcgctgctgctggccccgtctcctcgctgcccacctcctcttgcctgtgccctgcaagccttctccctcggccagcgagaagatagccttgaggtctcctctttctgctcagaagcactggtgacctgtgctgctctgacccacccccgggttcctcccctgcagcccatgggccccacctgccccacacctgctccagttccccctcctgaggccccatcgcccttcagggccccaccgttccatcctccgggccccatgccctcagtgggctccatgccctcagcaggccccatgccttcagcaggccccatgccctcagcaggccctgtgccctcggcacgccctggacctcccaccacagccaaccacctaggcctttctgtcccaggcctagtgtctgtccctccccggcttcttcctggccctgagaaccaccgggcaggctcaaatgaggaccccatccttgcccctagtgggactcccccacctactatacccccagatgaaacttttggggggagagtgcccagaccagcctttgtccactatgacaaggaggaggcatctgatgtggagatctccttggaaagtgactctgatgacagcgtggtgatcgtgcccgaggggcttccccccctgccacccccaccaccctcaggtgccacaccaccccctatagcccccactgggccaccaacagcctcccctcctgtgccagcgaaggaggagcctgaagaacttcctgcagccccagggcctctcccgccacccccacctccgccgccgcctgttcctggtcctgtgacgctccctccaccccagttggtccctgaagggactcctggtgggggaggacccccagccctggaagaggatttgacagttattaatatcaacagcagtgatgaagaggaggaggaagaggaagaagaggaagaagaagaagaggaagaagaggaagaggaggaagactttgaggaagaggaagaggatgaagaggaatattttgaagaggaagaagaggaggaagaagagtttgaggaagaatttgaggaagaagaaggtgagttagaggaagaagaagaagaggaggatgaggaggaggaagaagaactggaagaggtggagagggaaggggaaagccctgcggcagggccccctccccaggagcttgttgaagaagagccctctgctcccccaaccctgttggaagaggagactgaggatgggagtgacaaggtgcagcccccaccagagacacctgcagaagaagagatggagacagagacagaggccgaagctctccaggaaaaggagcaggatgacacagctgccatgctggccgacttcatcgattgtccccctgatgatgagaagccaccacctcccacagagcctgactcctagccatcttctgcaccccactctttgtttccaataaagttatgtccttagatagcg

SEQ ID NO: 169540 - DNA, 442 bp, Homo sapiens
  Payload ID: 13386
  Gene Symbol: PELP1
  Gene Name: proline, glutamate and leucine rich protein 1
  ENST ID: ENST00000575101
  CDS Start-End: 1-442
ggcagccgttctgagtgggccctctgcgggctccgcggctggggttcctggcgggaccgggggtctctcggcagtgagctcgggcccgcggctccgcctgctgctgctggagagtgtttctggtttgctgcaacctcgaacggggtctgccgttgctccggtgcatcccccaaaccgctcggccccacatttgcccgggctcatgtgcctattgcggctgcatgggtcggtgggcggggcccagaacctttcagctcttggggcattggtgagtctcagtaatgcacgtctcagttccatcaaaactcggtttgagggcctgtgtctgctgtccctgctggtaggggagagccccacagagctattccagcagcactgtgtgtcttggcttcggagcattcagcaggtgttacagggcaagctggcctcattttttctgtct

SEQ ID NO: 169541 - DNA, 5272 bp, Homo sapiens
  Payload ID: 13386
  Gene Symbol: PELP1
  Gene Name: proline, glutamate and leucine rich protein 1
  ENST ID: ENST00000572293
  CDS Start-End: 65-3607
atccgccatcactccgggaaccgagcaccccgctgcctcggcgcccaggctgctctctccgcgcatgctccttcccagcttgagcccgcgagtccagcctgccttcactcagtgcgcaagaccgcagccccctccccacgccccctccccagtaggcggccgtcgcggtgtgtttgcgtcatcgcgccacgccaccactggaacccgggggaagatggcggcagccgttctgagtgggccctctgcgggctccgcggctggggttcctggcgggaccgggggtctctcggcagtgagctcgggcccgcggctccgcctgctgctgctggagagtgtttctggtttgctgcaacctcgaacggggtctgccgttgctccggtgcatcccccaaaccgctcggccccacatttgcccgggctcatgtgcctattgcggctgcatgggtcggtgggcggggcccagaacctttcagctcttggggcattggtgagtctcagtaatgcacgtctcagttccatcaaaactcggtttgagggcctgtgtctgctgtccctgctggtaggggagagccccacagagctattccagcagcactgtgtgtcttggcttcggagcattcagcaggtgttacagacccaggacccgcctgccacaatggagctggccgtggctgtcctgagggacctcctccgatatgcagcccagctgcctgcactgttccgggacatctccatgaaccacctccctggccttctcacctccctgctgggcctcaggccagagtgtgagcagtcagcattggaaggaatgaaggcttgtatgacctatttccctcgggcttgtggttctctcaaaggcaagctggcctcattttttctgtctagggtggatgccttgagccctcagctccaacagttggcctgtgagtgttattcccggctgccctctttaggggctggcttttcccaaggcctgaagcacaccgagagctgggagcaggagctacacagtctgctggcctcactgcacaccctgctgggggccctgtacgagggagcagagactgctcctgtgcagaatgaaggccctggggtggagatgctgctgtcctcagaagatggtgatgcccatgtccttctccagcttcggcagaggttttcgggactggcccgctgcctagggctcatgctcagctctgagtttggagctcccgtgtccgtccctgtgcaggaaatcctggatttcatctgccggaccctcagcgtcagtagcaagaatattagcttgcatggagatggtcccctgcggctgctgctgctgccctctatccaccttgaggccttggacctgctgtctgcactcatcctcgcgtgtggaagccggctcttgcgctttgggatcctgatcggccgcctgcttccccaggtcctcaattcctggagcatcggtagagattccctctctccaggccaggagaggccttacagcacggttcggaccaaggtgtatgcgatattagagctgtgggtgcaggtttgtggggcctcggcgggaatgcttcagggaggagcctctggagaggccctgctcacccacctgctcagcgacatctccccgccagctgatgcccttaagctgcgtagcccgcgggggagccctgatgggagtttgcagactgggaagcctagcgcccccaagaagctaaagctggatgtgggggaagctatggccccgccaagccaccggaaaggggatagcaatgccaacagcgacgtgtgtgcggctgcactcagaggcctcagccggaccatcctcatgtgtgggcctctcatcaaggaggagactcacaggagactgcatgacctggtcctccccctggtcatgggtgtacagcagggtgaggtcctaggcagctccccgtacacgagctcccgctgccgccgtgaactctactgcctgctgctggcgctgctgctggccccgtctcctcgctgcccacctcctcttgcctgtgccctgcaagccttctccctcggccagcgagaagatagccttgaggtctcctctttctgctcagaagcactggtgacctgtgctgctctgacccacccccgggttcctcccctgcagcccatgggccccacctgccccacacctgctccagttccccctcctgaggccccatcgcccttcagggccccaccgttccatcctccgggccccatgccctcagtgggctccatgccctcagcaggccccatgccttcagcaggccccatgccctcagcaggccctgtgccctcggcacgccctggacctcccaccacagccaaccacctaggcctttctgtcccaggcctagtgtctgtccctccccggcttcttcctggccctgagaaccaccgggcaggctcaaatgaggaccccatccttgcccctagtgggactcccccacctactatacccccagatgaaacttttggggggagagtgcccagaccagcctttgtccactatgacaaggaggaggcatctgatgtggagatctccttggaaagtgactctgatgacagcgtggtgatcgtgcccgaggggcttccccccctgccacccccaccaccctcaggtgccacaccaccccctatagcccccactgggccaccaacagcctcccctcctgtgccagcgaaggaggagcctgaagaacttcctgcagccccagggcctctcccgccacccccacctccgccgccgcctgttcctggtcctgtgacgctccctccaccccagttggtccctgaagggactcctggtgggggaggacccccagccctggaagaggatttgacagttattaatatcaacagcagtgatgaagaggaggaggaagaggaagaagaggaagaagaagaagaggaagaagaggaagaggaggaagactttgaggaagaggaagaggatgaagaggaatattttgaagaggaagaagaggaggaagaagagtttgaggaagaatttgaggaagaagaaggtgagttagaggaagaagaagaagaggaggatgaggaggaggaagaagaactggaagaggtggaagacctggagtttggcacagcaggaggggaggtagaagaaggtgcacctccacccccaaccctgcctccagctctgcctccccctgagtctcccccaaaggtgcagccagaacccgaacctgaacccgggctgcttttggaagtggaggagccagggacggaggaggagcgtggggctgacacagctcccaccctggcccctgaagcgctcccctcccagggagaggtggagagggaaggggaaagccctgcggcagggccccctccccaggagcttgttgaagaagagccctctgctcccccaaccctgttggaagaggagactgaggatgggagtgacaaggtgcagcccccaccagagacacctgcagaagaagagatggagacagagacagaggccgaagctctccaggaaaaggagcaggatgacacagctgccatgctggccgacttcatcgattgtccccctgatgatgagaagccaccacctcccacagagcctgactcctagccatcttctgcaccccactctttgtttccaataaagttatgtccttagatagcgactgctgcttctgccttttgccacacctgggtccccagccagaagctcaagtgtctgctgggcttttcagggtgtccatagtattccccagatgtctccatagctgtcctctttttgacgatccagagaggaacaactgacattggtgtaatggactgtcccatcactcagcacgatggtgtcagaattgtaggattctggctggatgctaaacgtgcagaattgtgtgtagggttaagaatgaggagttatagagacacagccctgctttcgtgtttgtattcggggtgggaaatgtgtggagaatgcatcctagtgagtggacctgtgtcaacacccacatgcccacacgcatgcgtgctcagccccttggtctgaaagggcaggctgagtgattgctcagtctatggaagtttaggaaattaggaaaaggtgtggagcagtttagtcattgaattctgggaaatttggaccttaccccaagatgaaagggtgtccgtagtgggtacgttgggaatgacctctgttttggggctagtcctcctaatgacagttcccctcacagctccctggcaggagtttgataagctcaccccaggccttcctgctcactcttgaggtgtggatatttcccacccagtgtcttttcttttctttttttttttgagatggactcctgctctgtcgcccaggctggagtgcagtggcatggtctcagctcactgcaacctctgcctcccaggttcaagcaattctctgcctcagcctcctgagtagctgggattacaggcgcctgccactgcctggctaatttttgtatttttagtagaggtggggtttcaccatgttggccaggctggtcttgaactcctgagctcatggtccacctgccttggactcccaaagtgctgggatcacaagcatgagacaccgcacctgactgtcccagtgtcttttctttaagcactaatcctattctaggccttgctgggatggacgtgtgaggatgaaccgagagatgtgtctgtgagagggtaccaagattggtgggcttgaactaggggccccgtggttttttttgctcagtcagttgaatcatgaacgtaagtaaagtgccttcgcaatgcagaagagggagtcatttctcccaacatgtatcctgaagagccctttgaggaggtggcatttgagctaatttttggaaacttcagtaggattttaaaaagttacccctcaacttgttttcgaaataaacagaaaagtgagaacagtataatagataacctttgcctagatttgccaattaacatttagtcatgttaactcttatccctataaactgcgtatctacatgtagacatgtatctatattacacccatatatctgtctaatctatacatctgtagttatacacatttcttttttcatgggaccacgtgaaagtaagctgtagacaccgtggcccttcccatcccagattctttaacatgaattatcttctaagataagaatgtttttctgcacaatcctgataccattatcaaacctaagaaaaataacagtaatccagtgataattgtgatattaaaattttcctattaattcctaaa

SEQ ID NO: 169542 - DNA, 902 bp, Homo sapiens
  Payload ID: 13386
  Gene Symbol: PELP1
  Gene Name: proline, glutamate and leucine rich protein 1
  ENST ID: ENST00000570571
  CDS Start-End: 1-902
ctcggcagtgagctcgggcccgcggctccgcctgctgctgctggagagtgtttctggtttgctgcaacctcgaacggggtctgccgttgctccggtgcatcccccaaaccgctcggccccacatttgcccgggctcatgtgcctattgcggctgcatgggtcggtgggcggggcccagaacctttcagctcttggggcattggtgagtctcagtaatgcacgtctcagttccatcaaaactcggtttgagggcctgtgtctgctgtccctgctggtaggggagagccccacagagctattccagcagcactgtgtgtcttggcttcggagcattcagcaggtgttacagacccaggacccgcctgccacaatggagctggccgtggctgtcctgagggacctcctccgatatgcagcccagctgcctgcactgttccgggacatctccatgaaccacctccctggccttctcacctccctgctgggcctcaggccagagtgtgagcagtcagcattggaaggaatgaaggcttgtatgacctatttccctcgggcttgtggttctctcaaaggcaagctggcctcattttttctgtctagggtggatgccttgagccctcagctccaacagttggcctctcctgtgcagaatgaaggccctggggtggagatgctgctgtcctcagaagatggtgatgcccatgtccttctccagcttcggcagaggttttcgggactggcccgctgcctagggctcatgctcagctctgagtttggagctcccgtgtccgtccctgtgcaggaaatcctggatttcatctgccggaccctcagcgtcagtagcaagaatattagcttgcatggagatggtcccctgcggctgctgctgctgccctctatcc

SEQ ID NO: 169543 - DNA, 3280 bp, Homo sapiens
  Payload ID: 13386
  Gene Symbol: PELP1
  Gene Name: proline, glutamate and leucine rich protein 1
  ENST ID: ENST00000575329
  CDS Start-End: 1-469
aacccgggggaagatggcggcagccgttctgagtgggccctctgcgggctccgcggctggggttcctggcgggaccgggggtctctcggcagtgagctcgggcccgcggctccgcctgctgctgctggagagtgtttctggtttgctgcaacctcgaacggggtctgccgttgctccggtgcatcccccaaaccgctcggccccacatttgcccgggctcatgtgcctattgcggctgcatgggtcggtgggcggggcccagaacctttcagctcttggggcattggtgagtctcagtaatgcacgtctcagttccatcaaaactcggtttgagggcctgtgtctgctgtccctgctggtaggggagagccccacagagctattccagcagcactgtgtgtcttggcttcggagcattcagcaggtgttacagtatccgtgtctccacaccctcttttctgccaggtagtggcttggatggtcagactgacattaaccgtggcattcctcagaagacccaggacccgcctgccacaatggagctggccgtggctgtcctgagggacctcctccgatatgcagcccagctgcctgcactgttccgggacatctccatgaaccacctccctggccttctcacctccctgctgggcctcaggccagagtgtgagcagtcagcattggaaggaatgaaggcttgtatgacctatttccctcgggcttgtggttctctcaaaggcaagctggcctcattttttctgtctagggtggatgccttgagccctcagctccaacagttggcctgtgagtgttattcccggctgccctctttaggggctggcttttcccaaggcctgaagcacaccgagagctgggagcaggagctacacagtctgctggcctcactgcacaccctgctgggggccctgtacgagggagcagagactgctcctgtgcagaatgaaggccctggggtggagatgctgctgtcctcagaagatggtgatgcccatgtccttctccagcttcggcagaggttttcgggactggcccgctgcctagggctcatgctcagctctgagtttggagctcccgtgtccgtccctgtgcaggaaatcctggatttcatctgccggaccctcagcgtcagtagcaagaatattagcttgcatggagatggtcccctgcggctgctgctgctgccctctatccaccttgaggccttggacctgctgtctgcactcatcctcgcgtgtggaagccggctcttgcgctttgggatcctgatcggccgcctgcttccccaggtcctcaattcctggagcatcggtagagattccctctctccaggccaggagaggccttacagcacggttcggaccaaggtgtatgcgatattagagctgtgggtgcaggtttgtggggcctcggcgggaatgcttcagggaggagcctctggagaggccctgctcacccacctgctcagcgacatctccccgccagctgatgcccttaagctgcgtagcccgcgggggagccctgatgggagtttgcagactgggaagcctagcgcccccaagaagctaaagctggatgtgggggaagctatggccccgccaagccaccggaaaggggatagcaatgccaacagcgacgtgtgtgcggctgcactcagaggcctcagccggaccatcctcatgtgtgggcctctcatcaaggaggagactcacaggagactgcatgacctggtcctccccctggtcatgggtgtacagcagggtgaggtcctaggcagctccccgtacacgagctcccgctgccgccgtgaactctactgcctgctgctggcgctgctgctggccccgtctcctcgctgcccacctcctcttgcctgtgccctgcaagccttctccctcggccagcgagaagatagccttgaggtctcctctttctgctcagaagcactggtgacctgtgctgctctgacccacccccgggttcctcccctgcagcccatgggccccacctgccccacacctgctccagttccccctcctgaggccccatcgcccttcagggccccaccgttccatcctccgggccccatgccctcagtgggctccatgccctcagcaggccccatgccttcagcaggccccatgccctcagcaggccctgtgccctcggcacgccctggacctcccaccacagccaaccacctaggcctttctgtcccaggcctagtgtctgtccctccccggcttcttcctggccctgagaaccaccgggcaggctcaaatgaggaccccatccttgcccctagtgggactcccccacctactatacccccagatgaaacttttggggggagagtgcccagaccagcctttgtccactatgacaaggaggaggcatctgatgtggagatctccttggaaagtgactctgatgacagcgtggtgatcgtgcccgaggggcttccccccctgccacccccaccaccctcaggtgccacaccaccccctatagcccccactgggccaccaacagcctcccctcctgtgccagcgaaggaggagcctgaagaacttcctgcagccccagggcctctcccgccacccccacctccgccgccgcctgttcctggtcctgtgacgctccctccaccccagttggtccctgaagggactcctggtgggggaggacccccagccctggaagaggatttgacagttattaatatcaacagcagtgatgaagaggaggaggaagaggaagaagaggaagaagaagaagaggaagaagaggaagaggaggaagactttgaggaagaggaagaggatgaagaggaatattttgaagaggaagaagaggaggaagaagagtttgaggaagaatttgaggaagaagaaggtgagttagaggaagaagaagaagaggaggatgaggaggaggaagaagaactggaagaggtggagagggaaggggaaagccctgcggcagggccccctccccaggagcttgttgaagaagagccctctgctcccccaaccctgttggaagaggagactgaggatgggagtgacaaggtgcagcccccaccagagacacctgcagaagaagagatggagacagagacagaggccgaagctctccaggaaaaggagcaggatgacacagctgccatgctggccgacttcatcgattgtccccctgatgatgagaagccaccacctcccacagagcctgactcctagccatcttctgcaccccactcttt

SEQ ID NO: 169544 - DNA, 567 bp, Homo sapiens
  Payload ID: 13386
  Gene Symbol: PELP1
  Gene Name: proline, glutamate and leucine rich protein 1
  ENST ID: ENST00000570387
  CDS Start-End: 269-567
ataatggatgagttcagtgtccattcagcaagcatttatggatgtctcctattaggtgctgcccagacatatagagaacctttcagctcttggggcattggtgagtctcagtaatgcacgtctcagttccatcaaaactcggtttgagggcctgtgtctgctgtccctgctggtaggggagagccccacagagctattccagcagcactgtgtgtcttggcttcggagcattcagcaggtgttacagacccaggacccgcctgccacaatggagctggccgtggctgtcctgagggacctcctccgatatgcagcccagctgcctgcactgttccgggacatctccatgaaccacctccctggccttctcacctccctgctgggcctcaggccagagtgtgagcagtcagcattggaaggaatgaaggcttgtatgacctatttccctcgggcttgtggttctctcaaaggcaagctggcctcattttttctgtctagggtggatgccttgagccctcagctccaacagttggcctgtgagtgttattcccggctgccctctttagg

SEQ ID NO: 169545 - DNA, 3465 bp, Homo sapiens
  Payload ID: 13386
  Gene Symbol: PELP1
  Gene Name: proline, glutamate and leucine rich protein 1
  Uniprot ID: Q8IZL8
  ENST ID: ENST00000574876
  CDS Start-End: 19-3411
actggaacccgggggaagatggcggcagccgttctgagtgggccctctgcgggctccgcggctggggttcctggcgggaccgggggtctctcggcagtgagctcgggcccgcggctccgcctgctgctgctggagagtgtttctggtttgctgcaacctcgaacggggtctgccgttgctccggtgcatcccccaaaccgctcggccccacatttgcccgggctcatgtgcctattgcggctgcatgggtcggtgggcggggcccagaacctttcagctcttggggcattggtgagtctcagtaatgcacgtctcagttccatcaaaactcggtttgagggcctgtgtctgctgtccctgctggtaggggagagccccacagagctattccagcagcactgtgtgtcttggcttcggagcattcagcaggtgttacagacccaggacccgcctgccacaatggagctggccgtggctgtcctgagggacctcctccgatatgcagcccagctgcctgcactgttccgggacatctccatgaaccacctccctggccttctcacctccctgctgggcctcaggccagagtgtgagcagtcagcattggaaggaatgaaggcttgtatgacctatttccctcgggcttgtggttctctcaaaggcaagctggcctcattttttctgtctagggtggatgccttgagccctcagctccaacagttggcctgtgagtgttattcccggctgccctctttaggggctggcttttcccaaggcctgaagcacaccgagagctgggagcaggagctacacagtctgctggcctcactgcacaccctgctgggggccctgtacgagggagcagagactgctcctgtgcagaatgaaggccctggggtggagatgctgctgtcctcagaagatggtgatgcccatgtccttctccagcttcggcagaggttttcgggactggcccgctgcctagggctcatgctcagctctgagtttggagctcccgtgtccgtccctgtgcaggaaatcctggatttcatctgccggaccctcagcgtcagtagcaagaatattagcttgcatggagatggtcccctgcggctgctgctgctgccctctatccaccttgaggccttggacctgctgtctgcactcatcctcgcgtgtggaagccggctcttgcgctttgggatcctgatcggccgcctgcttccccaggtcctcaattcctggagcatcggtagagattccctctctccaggccaggagaggccttacagcacggttcggaccaaggtgtatgcgatattagagctgtgggtgcaggtttgtggggcctcggcgggaatgcttcagggaggagcctctggagaggccctgctcacccacctgctcagcgacatctccccgccagctgatgcccttaagctgcgtagcccgcgggggagccctgatgggagtttgcagactgggaagcctagcgcccccaagaagctaaagctggatgtgggggaagctatggccccgccaagccaccggaaaggggatagcaatgccaacagcgacgtgtgtgcggctgcactcagaggcctcagccggaccatcctcatgtgtgggcctctcatcaaggaggagactcacaggagactgcatgacctggtcctccccctggtcatgggtgtacagcagggtgaggtcctaggcagctccccgtacacgagctcccgctgccgccgtgaactctactgcctgctgctggcgctgctgctggccccgtctcctcgctgcccacctcctcttgcctgtgccctgcaagccttctccctcggccagcgagaagatagccttgaggtctcctctttctgctcagaagcactggtgacctgtgctgctctgacccacccccgggttcctcccctgcagcccatgggccccacctgccccacacctgctccagttccccctcctgaggccccatcgcccttcagggccccaccgttccatcctccgggccccatgccctcagtgggctccatgccctcagcaggccccatgccttcagcaggccccatgccctcagcaggccctgtgccctcggcacgccctggacctcccaccacagccaaccacctaggcctttctgtcccaggcctagtgtctgtccctccccggcttcttcctggccctgagaaccaccgggcaggctcaaatgaggaccccatccttgcccctagtgggactcccccacctactatacccccagatgaaacttttggggggagagtgcccagaccagcctttgtccactatgacaaggaggaggcatctgatgtggagatctccttggaaagtgactctgatgacagcgtggtgatcgtgcccgaggggcttccccccctgccacccccaccaccctcaggtgccacaccaccccctatagcccccactgggccaccaacagcctcccctcctgtgccagcgaaggaggagcctgaagaacttcctgcagccccagggcctctcccgccacccccacctccgccgccgcctgttcctggtcctgtgacgctccctccaccccagttggtccctgaagggactcctggtgggggaggacccccagccctggaagaggatttgacagttattaatatcaacagcagtgatgaagaggaggaggaagaggaagaagaggaagaagaagaagaggaagaagaggaagaggaggaagactttgaggaagaggaagaggatgaagaggaatattttgaagaggaagaagaggaggaagaagagtttgaggaagaatttgaggaagaagaaggtgagttagaggaagaagaagaagaggaggatgaggaggaggaagaagaactggaagaggtggaagacctggagtttggcacagcaggaggggaggtagaagaaggtgcacctccacccccaaccctgcctccagctctgcctccccctgagtctcccccaaaggtgcagccagaacccgaacctgaacccgggctgcttttggaagtggaggagccagggacggaggaggagcgtggggctgacacagctcccaccctggcccctgaagcgctcccctcccagggagaggtggagagggaaggggaaagccctgcggcagggccccctccccaggagcttgttgaagaagagccctctgctcccccaaccctgttggaagaggagactgaggatgggagtgacaaggtgcagcccccaccagagacacctgcagaagaagagatggagacagagacagaggccgaagctctccaggaaaaggagcaggatgacacagctgccatgctggccgacttcatcgattgtccccctgatgatgagaagccaccacctcccacagagcctgactcctagccatcttctgcaccccactctttgtttccaataaagttatgtccttagatagcg

SEQ ID NO: 169546 - DNA, 5747 bp, Homo sapiens
  Payload ID: 13387
  Gene Symbol: PRELP
  Gene Name: proline/arginine-rich end leucine-rich repeat protein
  Uniprot ID: P51888
  ENST ID: ENST00000343110
  CDS Start-End: 128-1276
ctgggagatcagatcttctagctggctctctgctgccacagctccgccgaagggagggggtggaagaggaggactaaactcagagctgagaggagaggcaggtgtgtgcaggtgcatcacctggatcatgaggtcacccctctgctggctcctcccacttctcatcttggcctcagtggcccaaggccagccaacaagacgaccaagacccgggactgggcccgggcgcagacccaggcccaggcccaggcccacacccagctttcctcagcctgatgaaccagcagagccaacagacctgcctcctcccctccctccaggccctccatctatcttccctgactgtccccgcgaatgctactgcccccctgatttcccatctgccctctactgtgatagccgcaacctgcgaaaggtccctgtcatcccgccccgcatccattacctctatctccagaacaacttcatcactgagctcccggtggagtccttccagaatgccacaggcctgcgatggattaacctggacaacaaccgaatccgcaagatagaccagagggtgctggagaaactgcccggcctggtgttcctctacatggagaagaaccagttggaagaggtcccctcggccctgccccggaacctggagcagctgaggctgagccagaaccacatctccagaatcccgcctggtgtcttcagcaagctggagaacctgctgctcctggatctccagcacaacaggctgagcgacggcgtcttcaagcccgacaccttccatggcctcaagaacctcatgcagctcaacctggcccacaacatcctgagaaagatgccgcccagggtccccaccgccattcaccagctctacctggacagtaacaagattgagaccatccctaacggatacttcaagagctttcccaatcttgccttcattcggcttaactacaacaagctgacagacaggggactccccaagaactcctttaatatctccaacctgcttgtgctccacctgtcccacaacaggatcagcagtgtgcccgccatcaacaacaggctggaacacctgtacctcaacaacaatagcatcgagaaaatcaacggaacccagatttgccccaacgacctagtggcgttccatgacttctcctcggacctggagaacgtgccacacctgcgctacctgcggctggatggaaactacttgaagccgcccatcccgctggacctcatgatgtgcttccgcctcctgcagtccgtggtcatctaggccctactccgccaccggatctgctctgaccgcacttgaaggctggggcccaggcacctgtgccggccattcgttttctctctctccctttctttctcccagctttgcctcccttatcccaccctcgaggcagggaaaagccatctattcttctgcagcctcaggagcgagacttcaaggactcagtttggttccacccagttgaaagacacccagtgcacacccaaactcctggccttctgtggtttccctttgctccagaaacacagatgtgtctaaagacttggtgtccccttctctctcctcccccacccgccactcctgggtacatctgggccgtggactatctgatcttggtcctggccgagcaaacagcccggaggtaaggttcagaaagtccccctggggactcctccatcttcggcagctctggctcaaagaggccgagaaacccagttctcctgggccaaggatcccttctggcaaagctgctgctccgccgcttggttccccggcaccagacatcgccctggccctgctggcccgggtatcgggaaggaggagcgagggaatgacggaggtagggtgcagggtcagggctcccgcaggggcctgcatctggccagcaggacacagggatgcgcagggcgcccccttctgttccagggtgaacatagcacacgccctcctggctgggcctcaggaggaacagccaaggagaagaatggcccaaggaactaggaagcagccatgggagaggggaagggttcaagcccgggatgggcccgcgtgacgtcgatgggtcctgcggcccccttgcccaacctcgggtttagggaggagggttcacagtgtttttgtgggggcgggggaaggaagaggcagccccgcccccgccatctgttctccatcagtgtgcgcggcccagccatttccaccctcgggaggcggctcctgagaaacagggaggaaggggcggagcacctggacgtctcccagaagcccctccacgtttgaaaatgcgcctcctcctcggagacagacgcatcggtgccacctagtggctggtgggagtaacagctggtcccagtcttgcgcctggccctcttcctggggtgattttcctcggtggaggaggcccgtggggtcccaacacggaagagccatgggccgtgtgcatggtgtcgctctcctctagggtctagcgggcacaaacgtccccaggctgggctcattcccatcgtgagtgagcccaggtgaggacatagtcggctcccgtttgttgtaggcccttcccaggtgccttctcagctccctcatctgtaaaccgaggaggtggataagatgctcccggccgggcgcggtggctcacgcctgtaatcccagcactttgggaggccgaggcgggcagattattgcctgagctcaggagttcgaaaccaccctgggcaacatggtgaaacccccgtctctactaaaatacaaaaaaattagccaggcatagtggcgcgcgcctataatcccagctactgggaggctgaggcgggagaatcgcttgagccggggaggcggaggttgcagtgaggcgagattgtgccactgcactccagcttgggcgacagagtgagactccgtctcaaaaaagaaaaaaaaaagatgctcctctgaggtccctccggcgctcatgttccgagtctgcagctccacactttaaatcatactcgaatgcaggacaagtcctaaatatttgccccttcccttgcagtaatttattttctgtatggactgtccctcccccagaggcttccccaccctccattgcctggcccaggtgagcagcttggcaggtctccaagtggaacccggtccagacagggctgcctcgacttcacctttccccctaacttcctccaagggatgctgccccttctcagccccctgcgtgtgtatattggtgggaggcatagaggatggatgttctagaaatgagtaagacacagtgcccacccccaagttaggatgaaaaaagttccagaggtttttaagaaattggattaagctgggtccctaacttcaagaaattcccattatgctccttctcacctttcttttttgctaattatggaaaatagggcccatttcatcatagcctccttcccccgtgctccactacaatcgccgcattctttctagctgcagctggtttcttcaaggctcctgcttaaagtccacacgttattatggccgaaagcaacctggtgcttcggcctggataagagccccttctgcatcttattcacagcttgcagcctcagcccctttgatgaggccctcaggggagaggtcattaccttgatcctgcaaacccagactcgttgagcagcaacgcaatcaccatcatcccactgcccaatctagaatatgtctgctctcctttgctctctgcagctgtaagccagaggggattcaaggtaaataggctttacaggctcccctcctccaaacacacacagaatgggctggtttctttcaagtttaaaaaaagcccccttctccatgcacaagttcattccctccatgctgtcgtcatcgacatatacaggtgtgtacgtaggtgtatgtgtgtactctgcacgtatatctcttctgtcttgaagaccctgttaactttgtgaaataacttccacatttcaacacacttcacagtacaggaaataaagtaatatgaaaaacaccctgcgtgaactcaacggtgtgaacaggtcaagaataacacttcaaagtcatcttgccagccaggcgtggtggatcacgcctgtaatcccagcactctgggaggccaaagcgggcagatcacctgaggtcaggagttcaagaccagcctggccaacatagtgaaaccccttgtttactcaaaatacaaaaattggctgggtgcggtggtacatgcctgtagtcccagctacttgggaggctgaggcaggagaattgcttgaaccctggaggcagaagttgcagtgagccgagatcgcaccactgcactccagcctaggagacaaaacgagacttcatttaaaaaaaataaaaataaaaataaaaataaagtcatcttgccacccaccccctaccattgagccaccatgcccagccccaaagcctcttaattgctctaacaagatgagtggggaaaagattatactcttaagaaattcctacgaaagctatccaaaagccttttctttcctcttttcttattatttttaaatagaggcagggtctcattatgttgcccaggctggtctggaactcctggcctcaagtgatcctcccaccttggcctccccagagtgctgggattacacacgtgagtcaccatgcccagccccaaagccatttcttgaagaatttctcgcaaactcacaaccctcatgaaaaattaatcctcagttccacgagactgcccacccacagacaaaaaaatatatatattcctaaagtcggaccagaaatctgacagctgcctttgaaacccaaagcctcgggttctttcaagctacatgtactaaattgtcgaaggtctcccaggagctctgtactgaggcagacacagaaagacacaaaacggtcgtctttcctgcccaagtaaagcttacagactaactggggagatgtagtgtgcatacaaaacagtaaaagagccatctcaaggacagagagcatagaccaagtcatctggaatggtctacatgccatgcggaagtccaccgaagggttagaacagggtgtcccagactctctcttctgagggaaggttggttgcaaaagtgggattcatgaccctcccaggctacaccatcttctttagaatgagaactgccaggtgacgccctcgctgctcctacctggctactaaacatcgacttcggttcacttcacggatgttcagtggatatcggtcacatgccaggtccccagctacgcattcaaggatggataatatacatagcagcacatccttgaggaactcataccttggtaaagggaaagaaatccatgaatggatacctctgtgtcctaagtgtttgtaataatgctgtgtgtcaggcctctgagcccaagctaagccatcatatcccctgtgacctgcatgtgcacatccagacggctggttcctaccttaactgatgatattccaccacaaaagaagtgaaaatggctggtccctgccttaactgatgacattaccttgtgaaattccttctcctggctcatcctggctcaaaagctcccccactgaacaccttgcaacccccacccctggccaccagagaacaaccccctttgactgtaattttccattacctacccacatcttataaaatggccccatccctatctcccttcgctgactcttttcggactcagcccgcctgcacccaggtgaaataaacagccttgttgctcacacaaa

SEQ ID NO: 169547 - DNA, 436 bp, Homo sapiens
  Payload ID: 13388
  Gene Symbol: PHGR1
  Gene Name: proline/histidine/glycine-rich 1
  Uniprot ID: C9JFL3
  ENST ID: ENST00000448599
  CDS Start-End: 57-305
agacttcctgcccctgctctgcactctcaggtattccctgctcttactccaaaaagatggacccaggtccgaaggggcactgccactgtggggggcatggccatcctccaggtcactgcgggccaccccctggccatggcccagggccctgcgggccacccccccaccatggtccagggccctgcgggccaccccctggccatggcccagggccctgcgggccacccccccaccatggtccagggccctgcgggcctccccctggccatggcccaggtcacccaccccctggtccacatcactgaggaagtagaagaaaacaggacacaagatggcaagcctgagagaattgcccagctgacctggaatgaggcctaaaccacaatcttctcttcctaataaacagcctcctagaggccacattctattctttaaa

SEQ ID NO: 169548 - DNA, 1710 bp, Homo sapiens
  Payload ID: 13389
  Gene Symbol: PSRC1
  Gene Name: proline/serine-rich coiled-coil 1
  Uniprot ID: Q6PGN9
  ENST ID: ENST00000369903
  CDS Start-End: 141-1142
agaaagcctgttgcgtggaagataaggcggcgcgggaagtggacacaggctgcgagccttgggcagaatggatacctgaggaaaggtatggtttctctccagctcagatctaactggactctcgctcctgctggctggacatggaggatttggaggaagatgtaaggtttattgtggatgagaccttggactttggggggctgtcaccatctgacagccgtgaggaggaagacataacagtgttggtgactccagagaaaccacttcgacggggcctctcccaccgaagtgacccaaatgcagtggcacctgccccccagggtgtgaggctcagcctaggccccctcagtccagagaagctggaggagatcctcgatgaggccaaccggctggccgctcagctggagcagtgtgccctgcaggatcgggagagcgcaggcgagggcctggggcctcgccgagtgaagcccagtcctcggcgggagacctttgtgctgaaggatagtcctgtccgagacctgctgcccactgtgaactctttgacgcggagcaccccctccccaagcagcctgacgcctcgactccggagtaatgataggaaggggtcagtcagggctctccgggctacatctggaaagaggccctccaacatgaagagggagtcacccacttgcaatctgttccctgcatccaaaagcccagcatcttctcctcttacccgatcgactcccccagtccgggggagagccgggcccagtgggagagcagcagccagcccacccacccccatcagatccgtcctggccccacagccttctaccagcaactctcaacgcctgccccggccgcagggagcagctgctaaatcttccagtcaactgcccattccctcggccatccccaggcctgccagccgaatgccactcaccagccggagtgtgccacctggcagaggtgccctacctccggattctctgtcaactcgaaaagggcttccaagaccaagcactgcaggacacagagtgcgggaaagtggacacaaggttcctgtttcccagcgactaaatcttcctgtcatgggtgccactcgcagcaatctgcagccccccaggaaagtggcagtcccaggacctaccaggtaaagagatcaggacagcaagcaagacttcagtagcaaaccactacagtcagtacctggactcgcctctacccagcagaccctgactccagcagattctggcccagggacaggaggaagagatgccaccagggctggtctcccaggagtagagaccatgggaaatggggtggattaggattgagctggagaagacttaaactctctgggttgaaagaagattaggggaaaagaggtcaccttccagcagtgaaatgaacaaatagaagatgagaagtacaggcaagtggtttgtctttatccacccccactgttgtggtcagccccagagaattttatcttcttccttggcattggttcactggacatttccacgtgagcggcctccgtagctaacctccctgccctctgaggagccatcttcctgaatcgcattctctactggactctggcctgcttggagaggtggcagcaggcacctggtcttcagaaattgtttcctgtgaattctgtgactcctaataggccagtttgtgataagcttactctatgagtcttcatttttctaaaat

SEQ ID NO: 169549 - DNA, 1584 bp, Homo sapiens
  Payload ID: 13389
  Gene Symbol: PSRC1
  Gene Name: proline/serine-rich coiled-coil 1
  Uniprot ID: Q6PGN9
  ENST ID: ENST00000369904
  CDS Start-End: 87-1019
ctgttgcgtggaagataaggcggcgcgggaagtggacacagggtgggctggagatctaactggactctcgctcctgctggctggacatggaggatttggaggaagatgtaaggtttattgtggatgagaccttggactttggggggctgtcaccatctgacagccgtgaggaggaagacataacagtgttggtgactccagagaaaccacttcgacggggcctctcccaccgaagtgacccaaatgcagtggcacctgccccccagggtgtgaggctcagcctaggccccctcagtccagagaagctggaggagatcctcgatgaggccaaccggctggccgctcagctggagcagtgtgccctgcaggatcgggagagcgcaggcgagggcctggggcctcgccgagtgaagcccagtcctcggcgggagacctttgtgctgaaggatagtcctgtccgagacctgctgcccactgtgaactctttgacgcggagcaccccctccccaagcagcctgacgcctcgactccggagtaatgataggaaggggtcagtcagggctctccgggctacatctggaaagaggccctccaacatgaagagggagtcacccacttgcaatctgttccctgcatccaaaagcccagcatcttctcctcttacccgatcgactcccccagtccgggggagagccgggcccagtgggagagcagcagccagtgaggagaccagagcagccaagttgcgggcctgccagccgaatgccactcaccagccggagtgtgccacctggcagaggtgccctacctccggattctctgtcaactcgaaaagggcttccaagaccaagcactgcaggacacagagtgcgggaaagtggacacaaggttcctgtttcccagcgactaaatcttcctgtcatgggtgccactcgcagcaatctgcagccccccaggaaagtggcagtcccaggacctaccaggtaaagagatcaggacagcaagcaagacttcagtagcaaaccactacagtcagtacctggactcgcctctacccagcagaccctgactccagcagattctggcccagggacaggaggaagagatgccaccagggctggtctcccaggagtagagaccatgggaaatggggtggattaggattgagctggagaagacttaaactctctgggttgaaagaagattaggggaaaagaggtcaccttccagcagtgaaatgaacaaatagaagatgagaagtacaggcaagtggtttgtctttatccacccccactgttgtggtcagccccagagaattttatcttcttccttggcattggttcactggacatttccacgtgagcggcctccgtagctaacctccctgccctctgaggagccatcttcctgaatcgcattctctactggactctggcctgcttggagaggtggcagcaggcacctggtcttcagaaattgtttcctgtgaattctgtgactcctaataggccagtttgtgataagcttactctatgagtcttcatttttctaaaataaagtgaatgtatttttatattctctgta

SEQ ID NO: 169550 - DNA, 1717 bp, Homo sapiens
  Payload ID: 13389
  Gene Symbol: PSRC1
  Gene Name: proline/serine-rich coiled-coil 1
  Uniprot ID: Q6PGN9
  ENST ID: ENST00000369907
  CDS Start-End: 119-1120
ctgattcccgggactaggttgcgggagaaagcctgttgcgtggaagataaggcggcgcgggaagtggacacagggtgggctggagatctaactggactctcgctcctgctggctggacatggaggatttggaggaagatgtaaggtttattgtggatgagaccttggactttggggggctgtcaccatctgacagccgtgaggaggaagacataacagtgttggtgactccagagaaaccacttcgacggggcctctcccaccgaagtgacccaaatgcagtggcacctgccccccagggtgtgaggctcagcctaggccccctcagtccagagaagctggaggagatcctcgatgaggccaaccggctggccgctcagctggagcagtgtgccctgcaggatcgggagagcgcaggcgagggcctggggcctcgccgagtgaagcccagtcctcggcgggagacctttgtgctgaaggatagtcctgtccgagacctgctgcccactgtgaactctttgacgcggagcaccccctccccaagcagcctgacgcctcgactccggagtaatgataggaaggggtcagtcagggctctccgggctacatctggaaagaggccctccaacatgaagagggagtcacccacttgcaatctgttccctgcatccaaaagcccagcatcttctcctcttacccgatcgactcccccagtccgggggagagccgggcccagtgggagagcagcagccagcccacccacccccatcagatccgtcctggccccacagccttctaccagcaactctcaacgcctgccccggccgcagggagcagctgctaaatcttccagtcaactgcccattccctcggccatccccaggcctgccagccgaatgccactcaccagccggagtgtgccacctggcagaggtgccctacctccggattctctgtcaactcgaaaagggcttccaagaccaagcactgcaggacacagagtgcgggaaagtggacacaaggttcctgtttcccagcgactaaatcttcctgtcatgggtgccactcgcagcaatctgcagccccccaggaaagtggcagtcccaggacctaccaggtaaagagatcaggacagcaagcaagacttcagtagcaaaccactacagtcagtacctggactcgcctctacccagcagaccctgactccagcagattctggcccagggacaggaggaagagatgccaccagggctggtctcccaggagtagagaccatgggaaatggggtggattaggattgagctggagaagacttaaactctctgggttgaaagaagattaggggaaaagaggtcaccttccagcagtgaaatgaacaaatagaagatgagaagtacaggcaagtggtttgtctttatccacccccactgttgtggtcagccccagagaattttatcttcttccttggcattggttcactggacatttccacgtgagcggcctccgtagctaacctccctgccctctgaggagccatcttcctgaatcgcattctctactggactctggcctgcttggagaggtggcagcaggcacctggtcttcagaaattgtttcctgtgaattctgtgactcctaataggccagtttgtgataagcttactctatgagtcttcatttttctaaaataaagtgaatgtatttttatattctctgta

SEQ ID NO: 169551 - DNA, 1742 bp, Homo sapiens
  Payload ID: 13389
  Gene Symbol: PSRC1
  Gene Name: proline/serine-rich coiled-coil 1
  Uniprot ID: Q6PGN9
  ENST ID: ENST00000369909
  CDS Start-End: 145-1146
aggagccccgccccctcggagctgattcccgggactaggttgcgggagaaagcctgttgcgtggaagataaggcggcgcgggaagtggacacagggtgggctggagctcagatctaactggactctcgctcctgctggctggacatggaggatttggaggaagatgtaaggtttattgtggatgagaccttggactttggggggctgtcaccatctgacagccgtgaggaggaagacataacagtgttggtgactccagagaaaccacttcgacggggcctctcccaccgaagtgacccaaatgcagtggcacctgccccccagggtgtgaggctcagcctaggccccctcagtccagagaagctggaggagatcctcgatgaggccaaccggctggccgctcagctggagcagtgtgccctgcaggatcgggagagcgcaggcgagggcctggggcctcgccgagtgaagcccagtcctcggcgggagacctttgtgctgaaggatagtcctgtccgagacctgctgcccactgtgaactctttgacgcggagcaccccctccccaagcagcctgacgcctcgactccggagtaatgataggaaggggtcagtcagggctctccgggctacatctggaaagaggccctccaacatgaagagggagtcacccacttgcaatctgttccctgcatccaaaagcccagcatcttctcctcttacccgatcgactcccccagtccgggggagagccgggcccagtgggagagcagcagccagcccacccacccccatcagatccgtcctggccccacagccttctaccagcaactctcaacgcctgccccggccgcagggagcagctgctaaatcttccagtcaactgcccattccctcggccatccccaggcctgccagccgaatgccactcaccagccggagtgtgccacctggcagaggtgccctacctccggattctctgtcaactcgaaaagggcttccaagaccaagcactgcaggacacagagtgcgggaaagtggacacaaggttcctgtttcccagcgactaaatcttcctgtcatgggtgccactcgcagcaatctgcagccccccaggaaagtggcagtcccaggacctaccaggtaaagagatcaggacagcaagcaagacttcagtagcaaaccactacagtcagtacctggactcgcctctacccagcagaccctgactccagcagattctggcccagggacaggaggaagagatgccaccagggctggtctcccaggagtagagaccatgggaaatggggtggattaggattgagctggagaagacttaaactctctgggttgaaagaagattaggggaaaagaggtcaccttccagcagtgaaatgaacaaatagaagatgagaagtacaggcaagtggtttgtctttatccacccccactgttgtggtcagccccagagaattttatcttcttccttggcattggttcactggacatttccacgtgagcggcctccgtagctaacctccctgccctctgaggagccatcttcctgaatcgcattctctactggactctggcctgcttggagaggtggcagcaggcacctggtcttcagaaattgtttcctgtgaattctgtgactcctaataggccagtttgtgataagcttactctatgagtcttcatttttctaaaataaagtgaatgtatttttatattctctgt

SEQ ID NO: 169552 - DNA, 1730 bp, Homo sapiens
  Payload ID: 13389
  Gene Symbol: PSRC1
  Gene Name: proline/serine-rich coiled-coil 1
  Uniprot ID: Q6PGN9
  ENST ID: ENST00000409267
  CDS Start-End: 132-1133
gggagaaagcctgttgcgtggaagataaggcggcgcgggaagtggacacagggtgggctggaggtgtgcttcgcgtgtgatgccaggggagtggaaagatctaactggactctcgctcctgctggctggacatggaggatttggaggaagatgtaaggtttattgtggatgagaccttggactttggggggctgtcaccatctgacagccgtgaggaggaagacataacagtgttggtgactccagagaaaccacttcgacggggcctctcccaccgaagtgacccaaatgcagtggcacctgccccccagggtgtgaggctcagcctaggccccctcagtccagagaagctggaggagatcctcgatgaggccaaccggctggccgctcagctggagcagtgtgccctgcaggatcgggagagcgcaggcgagggcctggggcctcgccgagtgaagcccagtcctcggcgggagacctttgtgctgaaggatagtcctgtccgagacctgctgcccactgtgaactctttgacgcggagcaccccctccccaagcagcctgacgcctcgactccggagtaatgataggaaggggtcagtcagggctctccgggctacatctggaaagaggccctccaacatgaagagggagtcacccacttgcaatctgttccctgcatccaaaagcccagcatcttctcctcttacccgatcgactcccccagtccgggggagagccgggcccagtgggagagcagcagccagcccacccacccccatcagatccgtcctggccccacagccttctaccagcaactctcaacgcctgccccggccgcagggagcagctgctaaatcttccagtcaactgcccattccctcggccatccccaggcctgccagccgaatgccactcaccagccggagtgtgccacctggcagaggtgccctacctccggattctctgtcaactcgaaaagggcttccaagaccaagcactgcaggacacagagtgcgggaaagtggacacaaggttcctgtttcccagcgactaaatcttcctgtcatgggtgccactcgcagcaatctgcagccccccaggaaagtggcagtcccaggacctaccaggtaaagagatcaggacagcaagcaagacttcagtagcaaaccactacagtcagtacctggactcgcctctacccagcagaccctgactccagcagattctggcccagggacaggaggaagagatgccaccagggctggtctcccaggagtagagaccatgggaaatggggtggattaggattgagctggagaagacttaaactctctgggttgaaagaagattaggggaaaagaggtcaccttccagcagtgaaatgaacaaatagaagatgagaagtacaggcaagtggtttgtctttatccacccccactgttgtggtcagccccagagaattttatcttcttccttggcattggttcactggacatttccacgtgagcggcctccgtagctaacctccctgccctctgaggagccatcttcctgaatcgcattctctactggactctggcctgcttggagaggtggcagcaggcacctggtcttcagaaattgtttcctgtgaattctgtgactcctaataggccagtttgtgataagcttactctatgagtcttcatttttctaaaataaagtgaatgtatttttatattctctgta

SEQ ID NO: 169553 - DNA, 835 bp, Homo sapiens
  Payload ID: 13389
  Gene Symbol: PSRC1
  Gene Name: proline/serine-rich coiled-coil 1
  ENST ID: ENST00000429031
  CDS Start-End: 141-835
agaaagcctgttgcgtggaagataaggcggcgcgggaagtggacacaggctgcgagccttgggcagaatggatacctgaggaaaggtatggtttctctccagctcagatctaactggactctcgctcctgctggctggacatggaggatttggaggaagatgtaaggtttattgtggatgagaccttggactttggggggctgtcaccatctgacagccgtgaggaggaagacataacagtgttggtgactccagagaaaccacttcgacggggcctctcccaccgaagtgacccaaatgcagtggcacctgccccccagggtgtgaggctcagcctaggccccctcagtccagagaagctggaggagatcctcgatgaggccaaccggctggccgctcagctggagcagtgtgccctgcaggatcgggagagcgcaggcgagggcctggggcctcgccgagtgaagcccagtcctcggcgggagacctttgtgctgaaggatagtcctgtccgagacctgctgcccactgtgaactctttgacgcggagcaccccctccccaagcagcctgacgcctcgactccggagtaatgataggaaggggtcagtcagggctctccgggctacatctggaaagaggccctccaacatgaagagggagtcacccacttgcaatctgttccctgcatccaaaagcccagcatcttctcctcttacccgatcgactcccccagtccgggggagagccgggcccagtgggagagcagcagccagcccacccacccccatcagatccgtcctggccccacagccttctaccagcaactctcaacg

SEQ ID NO: 169554 - DNA, 1040 bp, Homo sapiens
  Payload ID: 13389
  Gene Symbol: PSRC1
  Gene Name: proline/serine-rich coiled-coil 1
  ENST ID: ENST00000418914
  CDS Start-End: 425-1040
agaaagcctgttgcgtggaagataaggcggcgcgggaagtggacacagggtgggctggaggtgtgcttcgcgtgtgatgccaggggagtggaaaggtggcttggggagtgcagaaccctgaggatagtggcggggaggaagatggggcgtgcaggccgcccccagtgaggagaggccaggatgcagggcggctccagggcaatctgggcagttgggggagccctccgtatcgttcccggaggtagcaggagtagctgtgcgggaggtgccactcctgggcgcttgctttgcctccagcatgacccccgaccctggcttgcaccctgaatctagctgcgagccttgggcagaatggatacctgaggaaaggtatggtttctctccagctcagatctaactggactctcgctcctgctggctggacatggaggatttggaggaagatgtaaggtttattgtggatgagaccttggactttggggggctgtcaccatctgacagccgtgaggaggaagacataacagtgttggtgactccagagaaaccacttcgacggggcctctcccaccgaagtgacccaaatgcagtggcacctgccccccagggtgtgaggctcagcctaggccccctcagtccagagaagctggaggagatcctcgatgaggccaaccggctggccgctcagctggagcagtgtgccctgcaggatcgggagagcgcaggcgagggcctggggcctcgccgagtgaagcccagtcctcggcgggagacctttgtgctgaaggatagtcctgtccgagacctgctgcccactgtgaactctttgacgcggagcaccccctccccaagcagcctgacgcctcgactccggagtaatgataggaaggggtcagtcagggctctccgggctacatctggaaagaggccctccaacatgaagagggagtcacccacttgcaatctgttccctgcatccaaaagcccagcatcttctcctcttacccgatcgactcccccagtccgggggagagccgggccca

SEQ ID NO: 169555 - DNA, 1826 bp, Homo sapiens
  Payload ID: 13389
  Gene Symbol: PSRC1
  Gene Name: proline/serine-rich coiled-coil 1
  Uniprot ID: Q6PGN9
  ENST ID: ENST00000409138
  CDS Start-End: 147-1238
gggcctgagagattcgaaaggagccccgccccctcggagctgattcccgggactaggttgcgggagaaagcctgttgcgtggaagataaggcggcgcgggaagtggacacaggatctaactggactctcgctcctgctggctggacatggaggatttggaggaagatgtaaggtttattgtggatgagaccttggactttggggggctgtcaccatctgacagccgtgaggaggaagacataacagtgttggtgactccagagaaaccacttcgacggggcctctcccaccgaagtgacccaaatgcagtggcacctgccccccagggtgtgaggctcagcctaggccccctcagtccagagaagctggaggagatcctcgatgaggccaaccggctggccgctcagctggagcagtgtgccctgcaggatcgggagagcgcaggcgagggcctggggcctcgccgagtgaagcccagtcctcggcgggagacctttgtgctgaaggatagtcctgtccgagacctgctgcccactgtgaactctttgacgcggagcaccccctccccaagcagcctgacgcctcgactccggagtaatgataggaaggggtcagtcagggctctccgggctacatctggaaagaggccctccaacatgaagagggagtcacccacttgcaatctgttccctgcatccaaaagcccagcatcttctcctcttacccgatcgactcccccagtccgggggagagccgggcccagtgggagagcagcagccagtgaggagaccagagcagccaagttgcgggtgagtgggagtggggagtttgtgggattgaccctgaaatttctccacccctctccaccaggcccacccacccccatcagatccgtcctggccccacagccttctaccagcaactctcaacgcctgccccggccgcagggagcagctgctaaatcttccagtcaactgcccattccctcggccatccccaggcctgccagccgaatgccactcaccagccggagtgtgccacctggcagaggtgccctacctccggattctctgtcaactcgaaaagggcttccaagaccaagcactgcaggacacagagtgcgggaaagtggacacaaggttcctgtttcccagcgactaaatcttcctgtcatgggtgccactcgcagcaatctgcagccccccaggaaagtggcagtcccaggacctaccaggtaaagagatcaggacagcaagcaagacttcagtagcaaaccactacagtcagtacctggactcgcctctacccagcagaccctgactccagcagattctggcccagggacaggaggaagagatgccaccagggctggtctcccaggagtagagaccatgggaaatggggtggattaggattgagctggagaagacttaaactctctgggttgaaagaagattaggggaaaagaggtcaccttccagcagtgaaatgaacaaatagaagatgagaagtacaggcaagtggtttgtctttatccacccccactgttgtggtcagccccagagaattttatcttcttccttggcattggttcactggacatttccacgtgagcggcctccgtagctaacctccctgccctctgaggagccatcttcctgaatcgcattctctactggactctggcctgcttggagaggtggcagcaggcacctggtcttcagaaattgtttcctgtgaattctgtgactcctaataggccagtttgtgataagcttactctatgagtcttcatttttctaaaataaagtgaatgtatttttata

SEQ ID NO: 169556 - DNA, 366 bp, Homo sapiens
  Payload ID: 13389
  Gene Symbol: PSRC1
  Gene Name: proline/serine-rich coiled-coil 1
  ENST ID: ENST00000474126
  CDS Start-End: 1-366
gaaggggtcagtcagggctctccgggctacatctggaaagaggccctccaacatgaagagggagtcacccacttgcaatctgttccctgcatccaaaagcccagcatcttctcctcttacccgatcgactcccccagtccgggggagagccgggcccagtgggagagcagcagccagtgaggagaccagagcagccaagttgcggggagcagctgctaaatcttccagtcaactgcccattccctcggccatccccaggcctgccagccgaatgccactcaccagccggagtgtgccacctggcagaggtgccctacctccggattctctgtcaactcgaaaagggcttccaagaccaagcactgc

SEQ ID NO: 169557 - DNA, 1044 bp, Homo sapiens
  Payload ID: 13390
  Gene Symbol: PRAP1
  Gene Name: proline-rich acidic protein 1
  ENST ID: ENST00000368554
  CDS Start-End: 23-955
cctctacctccaggacgtgatcatgcaggtggccgacgtgcctgagaagcccagggtgcccgcgtttgcctgccaggtggccggctgctgccaggtgttcgatgccctggacgactacgagcaccactaccacacgctgcacggaaatgtttgctccttttgcaagcgggccttcccttccggacacctgctggacgcccacatcctggagtggcacgattcgctcttccagatcctgtctgagaggcaggacatgtatcagtgcttggtagaaggctgcacagagaagttcaagaccagcagagaccggaaggatcacatggtgaggatgcacctgtaccccgcggacttccggtttgataagccaaagaaaagcagaagcccagcctcagcagaagccccaggggacagtggagagcggtcagaaggggaggccatggaaatctgctctgagcctgtggcagcctcccctgcaccggcaggtgagaggcggatctacagacataggctcctcctggtcaccagcctggtggttgtgctgctgtgggaggcaggtgcagtcccagcacccaaggtccctatcaagatgcaagtcaaacactggccctcagagcaggacccagagaaggcctggggcgcccgtgtggtggagcctccggagaaggacgaccagctggtggtgctgttccctgtccagaagccgaaactcttgaccaccgaggagaagccacgaggtcagggcaggggccccatccttccaggcaccaaggcctggatggagaccgaggacaccctgggccatgtcctgagtcccgagcccgaccatgacagcctgtaccaccctccgcctgaggaggaccagggcgaggagaggccccggttgtgggtgatgccaaatcaccaggtgctcctgggaccggaggaagaccaagaccacatctaccacccccagtagggctccaggggccatcactgcccccgccctgtcccaaggcccaggctgttgggactgggaccctccctaccctgccccagctagacaaa

SEQ ID NO: 169558 - DNA, 971 bp, Homo sapiens
  Payload ID: 13390
  Gene Symbol: PRAP1
  Gene Name: proline-rich acidic protein 1
  Uniprot ID: Q96NZ9
  ENST ID: ENST00000433452
  CDS Start-End: 273-728
tcttcctcagtcgtgtggcaggccctgagcaggcagctgggtgtccccgctcagatccaggcccgagtgggctgggcggctgcagagccagtcacctgagctacccagggtgggatccctggccccgacctctgtcctgacacgccccaagcggcagcaacaaagccccaattggcctgggcctgggcaggaggagctgggccgggtgccagatactgggatcagccactgcagctccctgagcactctctacagagacgcggaccccagacatgaggaggctcctcctggtcaccagcctggtggttgtgctgctgtgggaggcaggtgcagtcccagcacccaaggtccctatcaagatgcaagtcaaacactggccctcagagcaggacccagagaaggcctggggcgcccgtgtggtggagcctccggagaaggacgaccagctggtggtgctgttccctgtccagaagccgaaactcttgaccaccgaggagaagccacgaggtcagggcaggggccccatccttccaggcaccaaggcctggatggagaccgaggacaccctgggccatgtcctgagtcccgagcccgaccatgacagcctgtaccaccctccgcctgaggaggaccagggcgaggagaggccccggttgtgggtgatgccaaatcaccaggtgctcctgggaccggaggaagaccaagaccacatctaccacccccagtagggctccaggggccatcactgcccccgccctgtcccaaggcccaggctgttgggactgggaccctccctaccctgccccagctagacaaataaaccccagcaggccgggcgcggtggctcacctctgtaatcccagcacttttagaggccgaggcaggcggatcacctgaaatcaggagttccagaccagcctgggcaacatggtgaaaccccgtctctactaaaaatacaaaaattagccggg

SEQ ID NO: 169559 - DNA, 587 bp, Homo sapiens
  Payload ID: 13390
  Gene Symbol: PRAP1
  Gene Name: proline-rich acidic protein 1
  Uniprot ID: Q96NZ9
  ENST ID: ENST00000463201
  CDS Start-End: 51-479
cagccactgcagctccctgagcactctctacagagacgcggaccccagacatgaggaggctcctcctggtcaccagcctggtggttgtgctgctgtgggaggcaggtgcagtcccagcacccaaggtccctatcaagatgcaagtcaaacactggccctcagagcaggacccagagaaggcctggggcgcccgtgtggtggagcctccggagaaggacgaccagctggtggtgctgttccctgtccagaagccgaaactcttgaccaccgaggagaagccacgaggcaccaaggcctggatggagaccgaggacaccctgggccatgtcctgagtcccgagcccgaccatgacagcctgtaccaccctccgcctgaggaggaccagggcgaggagaggccccggttgtgggtgatgccaaatcaccaggtgctcctgggaccggaggaagaccaagaccacatctaccacccccagtagggctccaggggccatcactgcccccgccctgtcccaaggcccaggctgttgggactgggaccctccctaccctgccccagctagacaaataaaccccagcaggccggg

SEQ ID NO: 169560 - DNA, 5122 bp, Homo sapiens
  Payload ID: 13391
  Gene Symbol: PROB1
  Gene Name: proline-rich basic protein 1
  Uniprot ID: E7EW31
  ENST ID: ENST00000434752
  CDS Start-End: 633-3680
gccctgaggagtcagggaagcctctagcggtgctcctcactctactgaaggggatcaggaagagtgtaactggggtcaagaaaggtggtgtgtgcacccttaagagctctagctgaggccagcaatggcaatgggggtcccctgcagtgatgctaaggcacccggggctgaggggaagatgaaattgctggccctacctgagtctcctggcctgaaggtctggttcacccgctcacagcctgaactgcacacagcagtgcctgacttcaggcggatccctgctgggcttcagtttcctcacctgtgataggtggagttgggcctaactcctggctccaaggctttgaaagttgggcctgccattccctcacctgcctgtcagccaaagcttggagcccaccccaggtactccggcttgtgcctgagaagggggttagttgggcatgggggctggacagggaagggtgcagggcccaggtcttttctgctgccggcgccgctggctcaggagtggacgcggccgctttaaggcgcggtgacccccacggcatcctcgggcggggcggggacagtgccggcgccaccagcggaggcgaatgcgagggagatagtgcacggcgtccggccccaccatgctgaccgcgctcgccccgccagccctgcctgggatcccgaggcagctgcccacggcccccgcgcggcgccaggactcctccggttcgtcaggctcctactacacggctccaggttctccggagcccccggacgttgggccggacgcgaaaggcccagcgaattggccctgggtggctcctgggcggggggcgggcgcgcagcctcgcctgtccgtcagcgcccagaatagccgccagcggcacgggcccggctcgggtttcccgcgaggcccaggttccggcccacggccaccccagccccagctgcgcacgctgccgtcgggggagatggaagtcatcttcggcgtcggacccctgttcggctgctccggcgcagacgatcgcgaggcgcaacaacagttcacggagccggccttcatcagccccttgccgccggggccagcgtctcccgccgcggtcccacgccagtcccaggtccccgatggtggctcccgctgggccacctacctagagctgcggccccgtgggccaagtcctgccgccccagcgcagttcgagtgtgtggaggtggctctggaggagggcgccgcgcccgccaggccccggacagtgcccaagcgtcagatcgagctgcgcccccggccccagagtcccccaagggcggccggcgcgccgcgcccccggctgctcctgcgcaccggttccctggacgagtcgctgggccccctgcaggccgccgcgggcttcgtgcagacggcgttggccagaaaactgagccccgaggccccggccccgagcagcgccaccttcgggtccacggggcggtcggaacctgagacccgggaaacggcccgcagcacccacgtggtcctggagaaggctaagtctcggccacttcgcgtacgagataattcggcccccgccaaggccccgaggccgtggcccagcctccgcgagcgcgcgattcggcgcgacaagcctgcgcccgggacggagccgctgggtcctgttagttccagcatcttccttcagtcagaggagaagatccaggaggcgcggaagactcggttcccgcgagaggcgccggatcgaactgttcagagggcacggagtccgccttttgagtgtaggatcccctcggaggttccgagtagggctgtgaggccaaggagcccgtccccgccacggcagactccaaatggggctgtacggggtcctcgctgcccgtcgccccagaacctgtccccgtgggatcggactactcggagggtgagtagcccattgttccctgaagcctcctccgagtgggaaaatcaaaatcctgccgtcgaggaaactgtcagcaggagaagcccttcccctccgatcctttcccagtggaatcagtgtgttgctggggaaaggagcccgtccctcgaagccccttccctgtgggagattccacattcggcagtcgcggatgcggtggagccacgtagcagcccgtccccgccggccttcttcccgtgggaggctccagatcgtcctattggaacttggggcccatctccccaagagacatgggatcccatggggccgggctcatcgatagcatttactcaggaagctcagaatgggttaactcaggaggagttggcaccgcctacaccgtccgcacccggcactccagaaccaacagagatgcagagtccatccacgcgggaaatttcagatcttgcctttggagggagtcagcagtccccagaggtagcagcacccgagccgcccggcagccaccctgtgggcaccctggacgcggataagtgcccggaagtcttgggtcctggagaggcggcctcgggacgcccgcgcatggccattccgcggcctcgagacgtgcgcaagttggtgaagaccacgtacgcgccaggcttcccggcaggagcacaaggctctgggctgcctgcgcctcctgccgacccctgcggggaggagggcggcgaatccaagacgcaagagccgccagcactggggccccccgccccggctcactacacttccgttttcatcaaggattttctaccggtggtgccgcacccctacgagcctcctgaaccgtccttcgacacggtcgcccgggacgcctcacagcccaacggggtcctgcggcggagggcagagaacagcacggcgaagcccttcaagcgcacagagatccgcctgcctggggccctggccttgggtcgccggcccgaggtaacctcgcgagtgcgagcgcgcggccctggaggagagaacagggatgtagaggcccagcgcctggtccccgacggcgacggtcggaccagccctctaggcggcgcccgcagctcatcccagcgctcccccgtagggccagcaggggtccgatcgccccgccccggctcccctcagatgcaagccagcccgagccctgggatagcacccaaaccgaagacaccacctacggcccccgagcccgcggctgccgtccaggcgccactcccgcgggagcccctggcgttggcgggcaggacggccccagcccagccccgcgctgcctcggcgcctcccacggaccggtccccgcaaagcccctcccagggagcgcgcaggcagcccggggccgcgcccctggggaaggtcttggtggaccccgagagcggccgctactactttgtggaggcgccgcggcagcctcggctgcgggtgctcttcgaccctgagagtgggcagtacgtggaggtgttgctgccgccctcgtctcccgggccgccccaccgcgtctacacccctctggccctggggctcggcctctacccgcccgcctatgggcctatacccagcctctctctgccaccgtccccgggcccgcaggccctcggcagcccccagctaccctgggtctctgaggcagggcccctggacgggacctactacctgccggtgagcgggacccccaaccccgcacctcctctgctcctctgtgcgccgccctccagctcaggtcccacccagcccggcaagggttcattgttcccgctgtgaggccccgggccgatccccatggagttggagcccttggatgcctgggaggttctggcatccaagcccctaccctcctctccttccgtcgcctctgtctttaacccatcccagtcagtcgtcggacaggaagtgatcttcagagaatgaatctgagccccgaggctggtggagctggagtcacccaggaagtggctgcctacttcctcccccaacaaaattatgtatccctttcccaggcattcccagggcgtggtgtggtgtggtgtgtgggtgtgtgtatatgtgtatatgcgggcaagcaaatagggaaagtgaggcatccctgggcttgtccccaggagccgatcagaggaggtgctgtggctgccgtggggcagcaggaacgggagcagcaggagacagggcggggaactgtctgccctccctgatggtgggcccagctgaggtgaggctggccagtgcccctggtgaggtggcaggaaggactctggctgtcgagtctgctcttaggaagaggagctgagctttggccctggaggttactggggggaaagtggccagtacagcccaggccaggctggctccgagaaagagctaaggcgggggacagcaggtggaggcaaagcaaggaatacagggagggcctgggttgggggttagcctggaacttggggtgggaagatggggagcctggccctcagagctgagctgactcatttttgggccaggggtggggcttcagtcccccaccccctacatcgggagtaggtgaaatggtcatcaggaagctctgagaagagggagggttgggctcttgtcccacaggagcctcttgacccctctgtgtggccagaaggtgggttagggccagcagtagaagcgatacccctggtggagtatccagagggatctgaagctcttggcaggttccactccccagtaacagatgtggcaacaatggccagagaggggctggccctacagaccagtcacagcaagggacagggcccagagcctgcacttcagttgccctgagattccaggagcctctgagggagatgaggggggtctgcatgaggtgggaggtggtgtgcgtgggggtctgtatatagttctgaaccggaaatggctggcccttgccagcctggtgtgtgatgtgatgagtttgggaaggacagtttccatgagaagcagtggcagggatggggatggatgccttcgttgttccaggcctgtcagggggcccaggtccctagcagtccctgccctctgccctggactggaagctgactaggagagctacgaatcagaacaactggccattttctagctggagatgccagctccgatggcatggagggccctggggccaccccaggtgtctttacctcatcctggtgtgtaataaatcactgaccatggagccatcatggctgaaataa

SEQ ID NO: 169561 - DNA, 4699 bp, Homo sapiens
  Payload ID: 13392
  Gene Symbol: PRRC1
  Gene Name: proline-rich coiled-coil 1
  Uniprot ID: Q96M27
  ENST ID: ENST00000296666
  CDS Start-End: 189-1526
gcagccgcaggagcatgcgccgcccgtggccatcttgtaggcggggacacgccgaggtaacttccagggtgcgccttcgttgtcttctccaagctgtagttctacgtcccgacctccctatcataccacactcttcagcgaccacgcaggcactttcccggtccccagtataccataattgaagaaaaatgatggaagagagtggaatagagacaacaccacctgggactcctccaccaaatcctgcagggctggctgctactgctatgtcttctacccctgttccattagcggcaaccagttctttttcttctccaaatgtatcctccatggagtccttcccaccactcgcatactctactcctcagccgccccttcctcctgtgaggccttcagcaccattaccttttgtgcctcctcctgcagttccttctgtcccaccacttgttacttctatgccacctcctgtttctccatcaactgctgctgccttcggtaatcctcctgtatctcacttcccaccttcaacttctgccccaaacactcttttacctgcacccccttcgggtcctcctatatcaggattttctgttggttcaacttatgacattacaaggggacatgctgggagagctccccagacacccctgatgccatcattttctgcaccttcaggaacaggtcttttgccaactcctattactcagcaagccagtttgacatctctggcacagggaactggaaccacatcagccattactttcccagaggagcaagaagaccctagaattactagaggtcaggatgaagcatctgctggtggaatctggggttttattaagggtgtggctgggaatcctatggtgaagtctgtgcttgataagacaaaacattcagtagaaagcatgattacaacgctggaccctggcatggctccctatatcaaatctggaggtgaactggatattgtagtgacctcaaataaagaagtaaaagttgctgctgtccgagatgccttccaggaggtctttggcttagctgtggttgtaggggaagctggacagtccaatattgccccacaaccagtgggctatgcagctggattaaaaggtgctcaggaacggatagatagcttgcgtcgaactggggtgatccatgaaaaacagacagctgtgtcagtagaaaacttcattgcagaattgctgcctgacaaatggtttgacattggttgtttggtggttgaagatcctgtccatggcattcatctagaaacatttacacaagccacaccagtgcctttggaatttgtacagcaggctcaaagtctaactccccaggactataatctgaggtggtcaggccttttggtgacagtgggtgaagtcctggaaaagagtttactgaatgtcagccggactgattggcacatggcatttactgggatgtcccgtcggcagatgatctacagtgcagccagagcgatagcgggcatgtataaacagcgcctgccacccaggacagtgtgagaggagacctacctgggagactgagactttcccccacttttagcttgatgttaaagaagtggttgtaccttcctaaatcgaatagtctaaatgaatccagtagtttttatcattttcctgtagcctgcaatttttctttctctagaaaggcatcatgtcattccaggagacaaaaagaaacaaatcctttttatagtcataccatttcacctatcatagtactcaaaaaagaaaatatacaaatctatttacagcacaatttaatataccagatttataaggtggaaattcatgtgcagagacatttaacttaatgccatgtacttgattattttgttctttaaagaagacattattaaagaacatgttggttgaatgtttataaaagcatgatttgctttggcttcatctcttttctgtcagtctttgactacttttgtatgtgcacacgatctcagggctggtgctgagcagcctgctcaacagtcactataagacacctacttgtcgggagatgttccacatttctgtgcatgttttcagtaatatgggccaaaataatggaattgattattttcctttttggccatcacgtacacatgtaatctggaaaatcatacctttgtcaattttaaacataacttttggcatttcccagatttatactatgaacattggggtaatacattttattttttcattgctatatgacagctaaggggcaaatgattcaagtatattttaaatcagaagtattcaaattatttttgtataatactgttcagtacttccaagaataagctctgacaacagccattgtttctgcttccactcatattctctacacattttaatacagaaatttttgagagggggttactttattgcttgtgggttagtatgtctcttacttcaattaaggttacttatttggtttgccttaagcattacttttttaactttgtgccatttggtctttactttttatggatgttttcaaagaaactattttatattcaatctagtttatttagtctactgtatttctatttcgtggaagccttttcccctcaaataatatattatatcatttttggacttatataaatgataattaaataaatttttttcttaatactgttggactttgtatatacaagttcaaataactttttcgaagatagtttcttatataaatgtaatttaatttttttactcttctatacagttctttagatgtaaaagaattagcacaatctctggcagttttataaaagctgttgaagctcttgtcctgcactgtctttaggtatcataggtatcaggtttgctttgtgttaatgccacttcaagtcattatttggtttctgctatttttttacctgaggataagaagaatgaatattaaatttgaatattaaatatatgttactttccaagcactgtataatgactgttcagtgaatatcagacttccgtgtcattaaaagtcatgagagacagcacagagaggttataggttgccttggtgtacttttgtccaggagtaacagggacagaatactttctttctttccttcaagtacaagaaggctttctctaccatttgcgtctacactttattttaaaagctatccttttctagtagtattttatcatggcaatggcatgatgacaacaacagtctttcattacagactgaagggaagcatgtccttacttaaaatagttctgctactttccctcctattataaggaaatcttacagattctaaaaataccttaatttttctttgatttttattttaccaagtcacaaatgtctttttgatgttttgagaattgttctcatagaatcacaaatactgacatttcattagatgattattttcctagaatccccaaagagcagtggcagtccatggcttggttgaagctagaaattttcctgcccctggtgacctggtaagcctcctgctcggaaccgtgtgagtgggtgaggaagatgagagatggtcagatggaagagagaaatacatgaactgctctggcctctctggttctgttcttggcccagagtttttgaaaagcagcggagcatgactgacttcacatgctcagctttctcagccttttgtttattttgttgtccttagatttccctgttgtaaaaggggcaagaaaagtaactcatcatctctaacacaccatggcagcttagccaggtagtcttagtggtggtgtttaggcataagatatgctgatcatcagtctcaggccacagtttccttcactaatcgtccagcttgagtgttctgttctcttcctgcccatttccttgaacctcctgctctagccttggcggagggagagtgctatttgcttttgttctccctctgtcttaggaaaagccatctttaatatagttcttcaccactgttggggttgttttgtgattttttttttcttccgaagaactcctggttgttattggattttgtattttaatacaaattattgaattttataagcttgtacacaatatttaattagtgtgaaaggaaacaaagaatgcaggaaaaataatttaatatcaacctcagttgacaaggtgctcagattattcaattcgggatcctccttttgttaggtttttgagacaaccctagacctaaactgtgtcacagacttctgaatgtttaggcagtgctagtaatttcctcgtaatgattctgttattactttcctattctttattcctctttcttctgaagattaatgaagttgaaaattgaggtggataaatacaaaaaggtagtgtgatagtataagtatctaagtgcagatgaaagtgtgttatatacatccattcaaaattatgcaagttagtaattactcagggttaactaaattactttaatatgctgttgaatctactctgttccttggctagaaaaaattataaacaggactttgtagtttgggaagccaaattgataatattctatgttctaaaagttgggctatacataaattattaagaaatatggatttttattcccaggatatggtgttcattttatgatattacgcaggatgatgtattgagtaaaatcagttttgtaaatatgtaaatatgtcataaataaacaatgctttgacttatttccaaa

SEQ ID NO: 169562 - DNA, 5504 bp, Homo sapiens
  Payload ID: 13392
  Gene Symbol: PRRC1
  Gene Name: proline-rich coiled-coil 1
  Uniprot ID: Q96M27
  ENST ID: ENST00000442138
  CDS Start-End: 147-1403
ggggacacgccgaggtaacttccagggtgcgccttcgttgtcttctccaagctgtagttctacgtcccgacctccctatcataccacactcttcagcgaccacgcaggcactttcccggtccccagtataccataattgaagaaaaatgatggaagagagtggaatagagacaacaccacctgggactcctccaccaaatcctgcagggctggctgctactgctatgtcttctacccctgttccattagcggcaaccagttctttttcttctccaaatgtatcctccatggagtccttcccaccactcgcatactctactcctcagccgccccttcctcctgtgaggccttcagcaccattaccttttgtgcctcctcctgcagttccttctgtcccaccacttgttacttctatgccacctcctgtttctccatcaactgctgctgccttcggtaatcctcctgtatctcacttcccaccttcaacttctgccccaaacactcttttacctgcacccccttcgggtcctcctatatcaggattttctgttggttcaacttatgacattacaaggggacatgctgggagagctccccagacacccctgatgccatcattttctgcaccttcaggaacaggtcttttgccaactcctattactcagcaagccagtttgacatctctggcacagggaactggaaccacatcagccattactttcccagaggagcaagaagaccctagaattactagaggtcaggatgaagcatctgctggtggaatctggggttttattaagggtgtggctgggaatcctatggtgaagtctgtgcttgataagacaaaacattcagtagaaagcatgattacaacgctggaccctggcatggctccctatatcaaatctggaggtgaactggatattgtagtgacctcaaataaagaagtaaaagttgctgctgtccgagatgccttccaggaggtctttggcttagctgtggttgtaggggaagctggacagtccaatattgccccacaaccagtgggctatgcagctggattaaaaggtgctcaggaacggatagatagcttgcgtcgaactggggtgatccatgaaaaacagacagctgtgtcagtagaaaacttcattgcagaattgctgcctgacaaatggtttgacattggttgtttggtggttgaagatcctgtccatggcattcatctagaaacatttacacaagccacaccagtgcctttggaatttgtacagcaggttggttttctcctttgctttttcattatgctccagagaaacttacactattgttttcagaataaaaatttgttcggtttttttgttagaaatatgttcttgattttgtttcagtcatttttcttttagtatttttctttgctttttaatttcctgatccttccatgttgttttagtaccttcctccttttgttttccaggtgtctttgaaaggtaatacattacatggttaatcattatttctctcatttttttctttgtttttactctgagttctggaaaagatttaccttttctagttgttttatgtccgcctttcgtttgctttcccttttatctcacatttcatttccactgttatctccatttcccttttccttgattgattgtcctcctgttcatctttagtgaaatcaacattagaaaccttataggcacgtgtctttaggtttttggctgaaaaatggacctaatagtgtacctatccacacagtttccaggagaatgtaagtataaatgataatccttattcctctttttttttttttttggtgtgttttctctaatcctttcatgaacaaaatggaatataaatatatacttgcattggaatctctgtgctcttaagtggtattctattgacttttttctgtcaatttcataaaatttttgttacagttgtagtttgtacattgttaaatatcatttcaaaactgcctttcaaacttatttgggacatgaagacatttgagaatctaagaaaactattgggctgtctcccaagaaaaatgcgtgtatgtgtactttcatagaactttggcatatgtgttcacataatccctaaaagtaacctctggcctacttattacagtttagaaagggggctaagaattgatgcttggaatttgaaattttactgaaacttttatttataccgtaatttcttttcataagttcaagaaaacctttttatagatattaacattacactcatttcaatatgaaggtgattaaaagactgtaagtgaatactatgcatactgttatgccaataaattagaaaaattaggtgaaagagtggattttctaggaaaatagaagttttgccatagttaagagtattaggttgaaccaaatgacgttgttgcctttgatggtcagaaatagttatatattgtcagtttcatatgattcagcttaattgaagcattaaaatggaagaactttatgtaactaaaaaaaaaaaaatcactgagtaccaatggtgttacaagtgagttctacaaaatgttcagagatgatttgctgtatgaggtatcaaaaatagaggtagagagttttccagttcattctgtgagactagcctcttttaactttaaatgaaattatagtccaaagaactaaatgtcaaaaccattggtaaaattaataaataaaattcagaaatgtattagatgaacattgtatcctgaccatgaaaaatttgtcccaagaacagcagaatggttcaacaatagtaaatttatgtaattcagtacatgaacatctgcattgaaaggagaaaaaagattttgataagagttgaaggtatttgctagaaataatcatactaatagctcttagtattagacgggtatgtgtgtactacaaaatcaaagcaaacttcagatctaataaataaaacactgaaaacgttataattatgaggatgctcctgtcactgccactgttaacattgctgtagatctggggtcagcaaacagtggctcacagccaaatctggcctgtcatctttttgtaattaagtttattggaacacacccatgccagtttgcttacttattgtttatagctgcttttgtactatagcagcagaaatgaatagttgcaacagagaatgtctggcccacaaagcctaaaatatttaccatctggctcttttcagaaaaagtttgctgacccctgtgttagatatctgaccattgcaaaggacaatttttatgttgtttttaggaatatatactggaaagaagtagacatgaaagaatgaagtggactcgtgtgtaccagtaccaaaagatagctattacatattgctgagtaaaagtcaaaaacagcacatctagtatgatcccatttactagcaggcgtgtgtatgtgtgtgctttaaaattttaataagaatagggaaaaaggcctggaaagataacacagcaaactgttaatagtggttaattctgaataatggtatttaaagggtgttatttgctttttactttgctttttattctgtttgttttattttgtgtcatttggttttaaaatttagaagatacaaaactgtgtgcattgaaatgtcttctttttatcctcagctattcagctctcctccctgtttctttttattcattctaaaatgttttatgcttttttattgttggaattttttaatttaaggtaatggaaatcagcccttcaggtaattagaattatcagtatatattagtaaaaatctggaaataaatttcatacaatttgtacttgttaaacttaaatataaatgattcctcacccccataaaaaaccccagctgttctggatttttgccaataatatagaataccttgtttctaaaaagtgtggtccttggcttaacatcataagcagcacctagaaatttgttaaaatgcagattctcgggtcctaacacaggactagtgaatcaggagctgcattttaacaagatattcaggggattcataggcatgccataatttgagaagcacagtgttactggtgtctctgaggacgttagtagtatatctgctgtttctctttgaaatatagtgaaatactgatactgtagtatacacattggaagagagtacttagagcaggggttcccaagtgctggactgtttgcatcagattgacttggaagctattttacgtacgtaatactgtactgtttctcttggaaccagctgtagagtttccaattcagttatcttggtgtctcagttatcttagtgggatgtgagaaactggatatcgttaaaaaagaaaaaagaaacaagagctcctcaggtgattgtaatacatggcacatttggtagtcatgtataactgtatagatccgttctagatgtggctatacttctctggactatacctaacaccctaaaacagaaaaaccacatcagtcttggatatcaagcaatgagtttattcttctgtcattcctttgtagatgaataaatgatttgaataggagcaaatatgagttgggtcaattaggaatgttgcatcagtggttgatgttgtccaggactggatattacttgatacatattaacatgtgaatcacatttccagagagaatttccataattgagcaattcttttctgaatggatttaagccttaattttcagttttcctctttctggttgaaattttactactataaaagataactttagcactgattttagtaccaatcttattattaacctgaagtgacacttaatttagaactagaactcaaaccttccgactgttagcctcgttaatggggatattttttaaaaaatagatgtgtgtaatgttacattgattgtgttctagccttgtaagttgatatagttggcagcctagctgtatttctcagagtttgtcataatctatatttaaaataacatgaaacactttgaaatgtcacttatagctagttccaatgatatttttaaatgtattataagtaatatcaatttcatctttccacaggctcaaagtctaactccccaggactataatctgaggtggtcaggccttttggtgacagtgggtgaagtcctggaaaagagtttactgaatgtcagccggactgattggcacatggcatttactgggatgtcccgtcggcagatgatctacagtgcagccagagcgatagcgggcatgtataaacagcgcctgccacccaggacagtgtgagaggagacctacctgggagactgagactttcccccacttttagcttgatgttaaagaagtggttgtaccttcctaaatcgaatagtctaaatgaatccagtagtttttatcattttcctgtagcctgcaatttttctttctctagaaaggcatcatgtcattccaggagacaaaaagaaacaaatcctttttatagtcataccatttcacctatcatagtactcaaaaaagaaaa

SEQ ID NO: 169563 - DNA, 2726 bp, Homo sapiens
  Payload ID: 13392
  Gene Symbol: PRRC1
  Gene Name: proline-rich coiled-coil 1
  Uniprot ID: Q96M27
  ENST ID: ENST00000512635
  CDS Start-End: 142-1530
cacgccgaggtaacttccagggtgcgccttcgttgtcttctccaagctgtagttctacgtcccgacctccctatcataccacactcttcagcgaccacgcaggcactttcccggtccccagtataccataattgaagaaaaatgatggaagagagtggaatagagacaacaccacctgggactcctccaccaaatcctgcagggctggctgctactgctatgtcttctacccctgttccattagcggcaaccagttctttttcttctccaaatgtatcctccatggagtccttcccaccactcgcatactctactcctcagccgccccttcctcctgtgaggccttcagcaccattaccttttgtgcctcctcctgcagttccttctgtcccaccacttgttacttctatgccacctcctgtttctccatcaactgctgctgccttcggtaatcctcctgtatctcacttcccaccttcaacttctgccccaaacactcttttacctgcacccccttcgggtcctcctatatcaggattttctgttggttcaacttatgacattacaaggggacatgctgggagagctccccagacacccctgatgccatcattttctgcaccttcaggaacaggtcttttgccaactcctattactcagcaagccagtttgacatctctggcacagggaactggaaccacatcagccattactttcccagaggagcaagaagaccctagaattactagaggtcaggatgaagcatctgctggtggaatctggggttttattaagggtgtggctgggaatcctatggtgaagtctgtgcttgataagacaaaacattcagtagaaagcatgattacaacgctggaccctggcatggctccctatatcaaatctggaggtgaactggatattgtagtgacctcaaataaagaagtaaaagttgctgctgtccgagatgccttccaggaggtctttggcttagctgtggttgtaggggaagctggacagtccaatattgccccacaaccagtgggctatgcagctggattaaaaggtgctcaggaacggatagatagcttgcgtcgaactggggtgatccatgaaaaacagacagctgtgtcagtagaaaacttcattgcagaattgctgcctgacaaatggtttgacattggttgtttggtggttgaagatcctgtccatggcattcatctagaaacatttacacaagccacaccagtgcctttggaatttgtacagcaggctcaaagtctaactccccaggactataatctgaggtggtcaggccttttggtgacagtgggtgaagtcctggaaaagagtttactgaatgtcagccggactgattggcacatggcatttactgggatgtcccgtcggcagatgatctacagtgcagccagagcgatagcggatgattattttcctagaatccccaaagagcagtggcagtccatggcttggttgaagctagaaattttcctgcccctggtgacctggtaagcctcctgctcggaaccgtgtgagtgggtgaggaagatgagagatggtcagatggaagagagaaatacatgaactgctctggcctctctggttctgttcttggcccagagtttttgaaaagcagcggagcatgactgacttcacatgctcagctttctcagccttttgtttattttgttgtccttagatttccctgttgtaaaaggggcaagaaaagtaactcatcatctctaacacaccatggcagcttagccaggtagtcttagtggtggtgtttaggcataagatatgctgatcatcagtctcaggccacagtttccttcactaatcgtccagcttgagtgttctgttctcttcctgcccatttccttgaacctcctgctctagccttggcggagggagagtgctatttgcttttgttctccctctgtcttaggaaaagccatctttaatatagttcttcaccactgttggggttgttttgtgattttttttttcttccgaagaactcctggttgttattggattttgtattttaatacaaattattgaattttataagcttgtacacaatatttaattagtgtgaaaggaaacaaagaatgcaggaaaaataatttaatatcaacctcagttgacaaggtgctcagattattcaattcgggatcctccttttgttaggtttttgagacaaccctagacctaaactgtgtcacagacttctgaatgtttaggcagtgctagtaatttcctcgtaatgattctgttattactttcctattctttattcctctttcttctgaagattaatgaagttgaaaattgaggtggataaatacaaaaaggtagtgtgatagtataagtatctaagtgcagatgaaagtgtgttatatacatccattcaaaattatgcaagttagtaattactcagggttaactaaattactttaatatgctgttgaatctactctgttccttggctagaaaaaattataaacaggactttgtagtttgggaagccaaattgataatattctatgttctaaaagttgggctatacataaattattaagaaatatggatttttattcccaggatatggtgttcattttatgatattacgcaggatgatgtattgagtaaaatcagttttgtaaatatgtaaatatgtcataaataaacaatgctttgactta

SEQ ID NO: 169564 - DNA, 6861 bp, Homo sapiens
  Payload ID: 13393
  Gene Symbol: PRRC2A
  Gene Name: proline-rich coiled-coil 2A
  Uniprot ID: P48634
  ENST ID: ENST00000376007
  CDS Start-End: 203-6676
gggctcagccgcggagtgagcgagggagacgggaggagccgaacccggcgccatccgccgccatcctcccccgccccaccgccatcccgtcccggggagcccctaggcccgggtcccggatccccgcgcacccggccaggctctggcacgttttgggggaggtgcctgcaggacccaacatactcaatgagcttccagcgcaatgtccgatcgctcggggccgactgccaagggaaaggatggaaagaagtattcctcgctcaacctgtttgatacgtataagggcaagtccttagagatccagaaacccgctgttgcccctcgccatggcctgcagagtctcgggaaagttgccattgcccggcgtatgccacctccagccaaccttccaagcctgaaagccgagaacaaaggcaatgaccccaatgtctcactagtgccaaaagacggaacaggatgggcaagcaaacaggagcagtccgaccccaagagttccgatgcctcaaccgctcagccgccggaatcgcagccactgccggcttcacagacgcctgcctccaaccagccgaaacgacccccagcagcccccgagaacactcctttggttccaagcggggtaaagtcctgggcacaagccagcgtcacccatggagcacatggagatggtggaagggcatcaagcctactgtcacgattctctcgagaggaatttccgaccctgcaggcggctggcgaccaggacaaggctgccaaggaaagggagtctgccgaacagtcgtctgggcccggaccaagcctccgcccccaaaattctacaacttggagggacggaggtgggcgtggccctgatgagctggagggcccggactccaaacttcatcatggtcatgatccccggggtgggctacagccttcaggcccaccccagttccctccctaccgcggaatgatgccgcctttcatgtatcccccatatctcccgttccctccgccctatggaccccaggggccttaccgataccccactcctgatgggcccagccgttttccccgtgtggcgggcccccgaggctcagggccaccaatgcgcttagtagagcctgtgggtcgtccctctattctcaaagaggataatctcaaagagtttgatcagttggatcaggagaatgatgatggttgggcaggggcccatgaagaggttgactacactgaaaagctcaagttcagcgatgaggaagatgggcgagactctgatgaggagggtgctgagggccacagggattcccaatcagcttctggtgaggaacggccccctgaagcagatggcaaaaagggcaactcccccaacagcgaaccgcccactcctaagacggcctgggcagaaacctctcggcctccagagacagagccgggacctcctgccccaaagcctcccctacccccacctcaccggggccccgccgggaactggggcccccctggggactacccagatcgtgggggtcctccctgcaagcccccagcacctgaagatgaggatgaggcatggcggcagcgacgaaagcagtcgtcatctgagatttccctggcagtggagcgggcccggcgacggcgagaagaagaggagcggcgcatgcaagaagagcgccgggcagcctgtgctgagaagctcaagcgactcgatgaaaagtttggggcacctgacaagcggctcaaagcagagcctgctgccccacctgctgccccttctaccccagctccaccacctgcagtccctaaagaactccctgcacctccagctccacctccagcatcagccccaacaccagagacagaacctgaagagccagcacaggcccctcctgcccaatctactcctactccaggtgtggctgcggctcccactctggtgagtggtggtggcagtaccagtagcaccagcagtggcagcttcgaagccagcccagtggaaccacaactgccctcaaaagagggtcctgaaccaccagaagaggttcctcctcctaccacacccccagttccaaaggtggaacccaagggtgatgggattggtcccacccgccagccccctagtcagggcttgggctaccccaaatatcagaagtcgttgcctcctcgtttccagcggcagcagcaggagcagctcctgaagcagcagcagcagcaccagtggcagcagcatcaacagggctctgcccctcctaccccagtgcccccatcaccaccacagcctgtgaccctgggggctgtgccagctccacaggctccacccccgccccccaaggccctgtacccaggtgctctgggccggcccccacccatgcccccaatgaactttgatccccgatggatgatgattcctccttatgtggacccccggctcctccagggtcgtccccctctagacttctaccctcctggtgtgcatccctctggcctagttccccgagagcgttcagacagtgggggctcaagctcagagccatttgaccgtcatgcacctgctatgttacgggaacggggcactccaccggtggatccaaagttggcctgggtaggagatgtcttcaccgccacacccgctgaaccccgcccacttacctcacctctgcgccaggctgcggatgaggatgacaaggggatgaggagcgagactcctccagtacctcccccaccaccctatctggccagttatccaggctttcctgagaatggagcccctgggcccccaatctctcgctttcctctggaggaaccagggccccgtccactcccctggcccccaggcagtgatgaagtggccaagatacaaactccaccacccaagaaggagccccctaaggaggagactgcacagctgacggggccagaagcaggccgaaagcctgcccgcggagtcgggagtggaggccagggccccccaccaccacgcagagagagtcgcacagagacccgctggggccctcgtccagggagcagtcgtcgtggaatccctccagaggagccaggggccccaccccgccgggctgggcctataaagaaacctccaccacctacaaaagtagaagagctgcctcccaagcccctcgaacagggggatgaaacccccaaacccccaaagccagacccactcaagataaccaaggggaagctagggggccccaaggagaccccacccaatggaaatctttcccctgccccaaggcttcggagggactattcgtatgaaagagtgggtcctacctcttgccggggtcggggccgaggcgagtattttgccagagggaggggttttcgggggacctatgggggacgagggcggggagcccgaagccgggaattccgcagttaccgagagtttcgaggagatgatgggcgtggaggtgggacagggggaccaaaccaccctcctgctccccgaggccgcactgccagcgagacacggagcgagggttcagagtatgaggaaatccccaagcggcgccggcagcggggctcagaaacaggcagcgagacccatgagagtgatctggctccttcagacaaggaggctcccacacccaaggagggaacactcacccaggtccctctcgctcccccaccaccaggagccccaccttcaccagccccagcccgcttcactgcccggggtgggcgagtcttcactcccagaggggtgccatctcgccggggccgaggaggagggaggccccctcctcaagtttgcccaggctggagccctccagccaagtctctggctcccaagaaacctcccacaggccctttgccaccaagtaaggagcctttgaaagagaagttgatcccagggcctctgtcccctgtggcgcgcggaggcagcaatggaggtagcaatgtgggcatggaagatggggagcgaccccgaaggaggcgacatgggagggctcagcagcaggataaaccgcctcgtttccggaggctgaagcaggaacgggagaatgccgcaagggggtctgagggcaagccctccctaacccttccagcctccgctcctggacctgaggaggccctcacaacagtcacagtggccccagcacctcgccgggcagctgccaagtctcctgatctgtcaaaccagaactcagaccaagccaatgaggaatgggagactgcatcagagagcagtgacttcaccagtgagcgccgaggggacaaagaggcacccccaccagtactgctgacacccaaggctgtgggaactcctgggggaggtggaggtggagccgtaccaggtatttcagccatgtcccgcggagatctgagccagagagccaaggatttgagtaaacggagcttctcaagtcagcggccaggcatggaacggcagaatcggcgccctggcccagggggcaaggctggcagcagtggcagcagcagtggaggaggcggtgggggtcctggaggaaggaccgggccaggacgaggcgacaagaggagctggccctctcccaagaaccgaagtcgtcctccagaggagcgtcccccggggcttcccctgcctcccccacctcccagcagttctgctgtcttccgcctggaccaagttatccacagcaaccctgctggcatccaacaggctctggcccagcttagtagccgtcaagggagtgtaactgcaccagggggtcatccaaggcacaagcctgggcttccccaagcccctcagggcccctctcctaggcccccaacccgatacgagccccagagggtcaacagcggcctcagttctgacccccactttgaggagccggggccaatggtgagaggggtgggtgggactcctcgggactctgccggggttagtccctttccccctaaacgtcgggagcggcctcccagaaaaccagagctgctacaggaggaatctttgccacctcctcatagctctggattcttgggctctaagcctgagggcccaggccctcaggcagagtccagagatacaggcacagaggccctgacccctcacatctggaaccgtttacatactgccactagccgaaagagttaccggcccagctccatggagccttggatggagcccctgagtccttttgaggatgtggctggcacagaaatgagtcagtctgacagtggggtggacctgagtggggattctcaggtgtcatcaggtccctgcagccagcgaagttcccctgatggaggactcaagggggcagcagagggaccccccaagaggcctggaggctcctcacccctgaatgctgttccttgtgagggtccacctggctctgaacctcctaggagaccaccacctgccccccacgatggggacagaaaggagctgccccgggagcagcctctgccccctggccccattggcacagaacgatcacagcgtacagaccgaggcacagagcctggccccattcggccatcccatcgacctggtcccccagtccagtttggcactagtgacaaggactcagacttacgcctagtggtaggagacagcttgaaagcagagaaggagctaacagcatcagtcactgaggccattcctgtatcacgagactgggagctgcttcccagtgctgctgcctctgctgagccacaatccaagaacctggattctgggcactgtgtcccggagcccagctcctcaggccagcgcctgtatcctgaggttttctatggcagtgctgggccttccagttctcagatctctgggggagccatggactctcaattacatccaaacagtggaggcttccgccctgggacaccctcactgcacccttacagatcacagcccctatacctaccccccggcccagcccctccctcagcactgctctctgggttagctctcaagggccagtttctggatttctccacaatgcaagctacagagctggggaagttgccggctggaggagttctctaccctccaccttccttcctctactctccggctttctgccccagtcctttgcctgacacatcgttgcttcaggtacgccaggatctgccatccccttcggatttttattctactcctctgcagcctggtggccaaagtggctttctcccttcaggggctcctgcccagcagatgcttctacccatggtagactcacagctgcctgtggtgaactttggctccctgccgccagcaccacctcctgccccacctcccctttctctgttacctgtgggccctgctctgcagccccccagcctggctgtgcggcccccacctgctcctgctactcgggtgctgccttcacctgccaggcccttccccgctagcttggggcgagcagagctgcatccagtggaactaaagccgttccaggattatcaaaaactgagcagcaaccttgggggacctggatcatcacggactcccccaactggaaggtccttctctggcctcaattcccgtctcaaggccacgccttccacctacagtggagtcttccgcacccagcgcgtcgacctttaccagcaggcctccccaccagatgccctgcgctggatacctaagccttgggagcggacagggccgccacctcgagaagggccctcccgacgggcagaggagcctgggtcccgaggggacaaggagcctgggttgcccccaccccgctgagggagttcctcttgccccctacccccggggcttgtatatagattataaatatataagggggaaaggggtgggcggggaggggttctggggctggggcctcacttcccctcctcccccttcccctggtcccctgtccctggggctgtttgttaaaaaagagtaataaaaggatttaaaaaaaaaaa

SEQ ID NO: 169565 - DNA, 6893 bp, Homo sapiens
  Payload ID: 13393
  Gene Symbol: PRRC2A
  Gene Name: proline-rich coiled-coil 2A
  Uniprot ID: P48634
  ENST ID: ENST00000376033
  CDS Start-End: 235-6708
cagccgcggagtgagcgagggagacgggaggagccgaacccggcgccatccgccgccatcctcccccgccccaccgccatcccgtcccggggagcccctaggcccgggtcccggatccccgcgcacccggccaggggacagagactgagacacttgctgtctggcccacaggctctggcacgttttgggggaggtgcctgcaggacccaacatactcaatgagcttccagcgcaatgtccgatcgctcggggccgactgccaagggaaaggatggaaagaagtattcctcgctcaacctgtttgatacgtataagggcaagtccttagagatccagaaacccgctgttgcccctcgccatggcctgcagagtctcgggaaagttgccattgcccggcgtatgccacctccagccaaccttccaagcctgaaagccgagaacaaaggcaatgaccccaatgtctcactagtgccaaaagacggaacaggatgggcaagcaaacaggagcagtccgaccccaagagttccgatgcctcaaccgctcagccgccggaatcgcagccactgccggcttcacagacgcctgcctccaaccagccgaaacgacccccagcagcccccgagaacactcctttggttccaagcggggtaaagtcctgggcacaagccagcgtcacccatggagcacatggagatggtggaagggcatcaagcctactgtcacgattctctcgagaggaatttccgaccctgcaggcggctggcgaccaggacaaggctgccaaggaaagggagtctgccgaacagtcgtctgggcccggaccaagcctccgcccccaaaattctacaacttggagggacggaggtgggcgtggccctgatgagctggagggcccggactccaaacttcatcatggtcatgatccccggggtgggctacagccttcaggcccaccccagttccctccctaccgcggaatgatgccgcctttcatgtatcccccatatctcccgttccctccgccctatggaccccaggggccttaccgataccccactcctgatgggcccagccgttttccccgtgtggcgggcccccgaggctcagggccaccaatgcgcttagtagagcctgtgggtcgtccctctattctcaaagaggataatctcaaagagtttgatcagttggatcaggagaatgatgatggttgggcaggggcccatgaagaggttgactacactgaaaagctcaagttcagcgatgaggaagatgggcgagactctgatgaggagggtgctgagggccacagggattcccaatcagcttctggtgaggaacggccccctgaagcagatggcaaaaagggcaactcccccaacagcgaaccgcccactcctaagacggcctgggcagaaacctctcggcctccagagacagagccgggacctcctgccccaaagcctcccctacccccacctcaccggggccccgccgggaactggggcccccctggggactacccagatcgtgggggtcctccctgcaagcccccagcacctgaagatgaggatgaggcatggcggcagcgacgaaagcagtcgtcatctgagatttccctggcagtggagcgggcccggcgacggcgagaagaagaggagcggcgcatgcaagaagagcgccgggcagcctgtgctgagaagctcaagcgactcgatgaaaagtttggggcacctgacaagcggctcaaagcagagcctgctgccccacctgctgccccttctaccccagctccaccacctgcagtccctaaagaactccctgcacctccagctccacctccagcatcagccccaacaccagagacagaacctgaagagccagcacaggcccctcctgcccaatctactcctactccaggtgtggctgcggctcccactctggtgagtggtggtggcagtaccagtagcaccagcagtggcagcttcgaagccagcccagtggaaccacaactgccctcaaaagagggtcctgaaccaccagaagaggttcctcctcctaccacacccccagttccaaaggtggaacccaagggtgatgggattggtcccacccgccagccccctagtcagggcttgggctaccccaaatatcagaagtcgttgcctcctcgtttccagcggcagcagcaggagcagctcctgaagcagcagcagcagcaccagtggcagcagcatcaacagggctctgcccctcctaccccagtgcccccatcaccaccacagcctgtgaccctgggggctgtgccagctccacaggctccacccccgccccccaaggccctgtacccaggtgctctgggccggcccccacccatgcccccaatgaactttgatccccgatggatgatgattcctccttatgtggacccccggctcctccagggtcgtccccctctagacttctaccctcctggtgtgcatccctctggcctagttccccgagagcgttcagacagtgggggctcaagctcagagccatttgaccgtcatgcacctgctatgttacgggaacggggcactccaccggtggatccaaagttggcctgggtaggagatgtcttcaccgccacacccgctgaaccccgcccacttacctcacctctgcgccaggctgcggatgaggatgacaaggggatgaggagcgagactcctccagtacctcccccaccaccctatctggccagttatccaggctttcctgagaatggagcccctgggcccccaatctctcgctttcctctggaggaaccagggccccgtccactcccctggcccccaggcagtgatgaagtggccaagatacaaactccaccacccaagaaggagccccctaaggaggagactgcacagctgacggggccagaagcaggccgaaagcctgcccgcggagtcgggagtggaggccagggccccccaccaccacgcagagagagtcgcacagagacccgctggggccctcgtccagggagcagtcgtcgtggaatccctccagaggagccaggggccccaccccgccgggctgggcctataaagaaacctccaccacctacaaaagtagaagagctgcctcccaagcccctcgaacagggggatgaaacccccaaacccccaaagccagacccactcaagataaccaaggggaagctagggggccccaaggagaccccacccaatggaaatctttcccctgccccaaggcttcggagggactattcgtatgaaagagtgggtcctacctcttgccggggtcggggccgaggcgagtattttgccagagggaggggttttcgggggacctatgggggacgagggcggggagcccgaagccgggaattccgcagttaccgagagtttcgaggagatgatgggcgtggaggtgggacagggggaccaaaccaccctcctgctccccgaggccgcactgccagcgagacacggagcgagggttcagagtatgaggaaatccccaagcggcgccggcagcggggctcagaaacaggcagcgagacccatgagagtgatctggctccttcagacaaggaggctcccacacccaaggagggaacactcacccaggtccctctcgctcccccaccaccaggagccccaccttcaccagccccagcccgcttcactgcccggggtgggcgagtcttcactcccagaggggtgccatctcgccggggccgaggaggagggaggccccctcctcaagtttgcccaggctggagccctccagccaagtctctggctcccaagaaacctcccacaggccctttgccaccaagtaaggagcctttgaaagagaagttgatcccagggcctctgtcccctgtggcgcgcggaggcagcaatggaggtagcaatgtgggcatggaagatggggagcgaccccgaaggaggcgacatgggagggctcagcagcaggataaaccgcctcgtttccggaggctgaagcaggaacgggagaatgccgcaagggggtctgagggcaagccctccctaacccttccagcctccgctcctggacctgaggaggccctcacaacagtcacagtggccccagcacctcgccgggcagctgccaagtctcctgatctgtcaaaccagaactcagaccaagccaatgaggaatgggagactgcatcagagagcagtgacttcaccagtgagcgccgaggggacaaagaggcacccccaccagtactgctgacacccaaggctgtgggaactcctgggggaggtggaggtggagccgtaccaggtatttcagccatgtcccgcggagatctgagccagagagccaaggatttgagtaaacggagcttctcaagtcagcggccaggcatggaacggcagaatcggcgccctggcccagggggcaaggctggcagcagtggcagcagcagtggaggaggcggtgggggtcctggaggaaggaccgggccaggacgaggcgacaagaggagctggccctctcccaagaaccgaagtcgtcctccagaggagcgtcccccggggcttcccctgcctcccccacctcccagcagttctgctgtcttccgcctggaccaagttatccacagcaaccctgctggcatccaacaggctctggcccagcttagtagccgtcaagggagtgtaactgcaccagggggtcatccaaggcacaagcctgggcttccccaagcccctcagggcccctctcctaggcccccaacccgatacgagccccagagggtcaacagcggcctcagttctgacccccactttgaggagccggggccaatggtgagaggggtgggtgggactcctcgggactctgccggggttagtccctttccccctaaacgtcgggagcggcctcccagaaaaccagagctgctacaggaggaatctttgccacctcctcatagctctggattcttgggctctaagcctgagggcccaggccctcaggcagagtccagagatacaggcacagaggccctgacccctcacatctggaaccgtttacatactgccactagccgaaagagttaccggcccagctccatggagccttggatggagcccctgagtccttttgaggatgtggctggcacagaaatgagtcagtctgacagtggggtggacctgagtggggattctcaggtgtcatcaggtccctgcagccagcgaagttcccctgatggaggactcaagggggcagcagagggaccccccaagaggcctggaggctcctcacccctgaatgctgttccttgtgagggtccacctggctctgaacctcctaggagaccaccacctgccccccacgatggggacagaaaggagctgccccgggagcagcctctgccccctggccccattggcacagaacgatcacagcgtacagaccgaggcacagagcctggccccattcggccatcccatcgacctggtcccccagtccagtttggcactagtgacaaggactcagacttacgcctagtggtaggagacagcttgaaagcagagaaggagctaacagcatcagtcactgaggccattcctgtatcacgagactgggagctgcttcccagtgctgctgcctctgctgagccacaatccaagaacctggattctgggcactgtgtcccggagcccagctcctcaggccagcgcctgtatcctgaggttttctatggcagtgctgggccttccagttctcagatctctgggggagccatggactctcaattacatccaaacagtggaggcttccgccctgggacaccctcactgcacccttacagatcacagcccctatacctaccccccggcccagcccctccctcagcactgctctctgggttagctctcaagggccagtttctggatttctccacaatgcaagctacagagctggggaagttgccggctggaggagttctctaccctccaccttccttcctctactctccggctttctgccccagtcctttgcctgacacatcgttgcttcaggtacgccaggatctgccatccccttcggatttttattctactcctctgcagcctggtggccaaagtggctttctcccttcaggggctcctgcccagcagatgcttctacccatggtagactcacagctgcctgtggtgaactttggctccctgccgccagcaccacctcctgccccacctcccctttctctgttacctgtgggccctgctctgcagccccccagcctggctgtgcggcccccacctgctcctgctactcgggtgctgccttcacctgccaggcccttccccgctagcttggggcgagcagagctgcatccagtggaactaaagccgttccaggattatcaaaaactgagcagcaaccttgggggacctggatcatcacggactcccccaactggaaggtccttctctggcctcaattcccgtctcaaggccacgccttccacctacagtggagtcttccgcacccagcgcgtcgacctttaccagcaggcctccccaccagatgccctgcgctggatacctaagccttgggagcggacagggccgccacctcgagaagggccctcccgacgggcagaggagcctgggtcccgaggggacaaggagcctgggttgcccccaccccgctgagggagttcctcttgccccctacccccggggcttgtatatagattataaatatataagggggaaaggggtgggcggggaggggttctggggctggggcctcacttcccctcctcccccttcccctggtcccctgtccctggggctgtttgttaaaaaagagtaataaaaggatttaaaaaaaaaaa

SEQ ID NO: 169566 - DNA, 6893 bp, Homo sapiens
  Payload ID: 13393
  Gene Symbol: PRRC2A
  Gene Name: proline-rich coiled-coil 2A
  Uniprot ID: P48634
  ENST ID: ENST00000383455
  CDS Start-End: 235-6708
cagccgcggagtgagcgagggagacgggaggagccgaacccggcgccatccgccgccatcctcccccgccccaccgccatcccgtcccggggagcccctaggcccgggtcccggatccccgcgcacccggccaggggacagagactgagacacttgctgtctggcccacaggctctggcacgttttgggggaggtgcctgcaggacccaacatactcaatgagcttccagcgcaatgtccgatcgctcggggccgactgccaagggaaaggatggaaagaagtattcctcgctcaacctgtttgatacgtataagggcaagtccttagagatccagaaacccgctgttgcccctcgccatggcctgcagagtctcgggaaagttgccattgcccggcgtatgccacctccagccaaccttccaagcctgaaagccgagaacaaaggcaatgaccccaatgtctcactagtgccaaaagacggaacaggatgggcaagcaaacaggagcagtccgaccccaagagttccgatgcctcaaccgctcagccgccggaatcgcagccactgccggcttcacagacgcctgcctccaaccagccgaaacgacccccagcagcccccgagaacactcctttggttccaagcggggtaaagtcctgggcacaagccagcgtcacccatggagcacatggagatggtggaagggcatcaagcctactgtcacgattctctcgagaggaatttccgaccctgcaggcggctggcgaccaggacaaggctgccaaggaaagggagtctgccgaacagtcgtctgggcccggaccaagcctccgcccccaaaattctacaacttggagggacggaggtgggcgtggccctgatgagctggagggcccggactccaaacttcatcatggtcatgatccccggggtgggctacagccttcaggcccaccccagttccctccctaccgcggaatgatgccgcctttcatgtatcccccatatctcccgttccctccgccctatggaccccaggggccttaccgataccccactcctgatgggcccagccgttttccccgtgtggcgggcccccgaggctcagggccaccaatgcgcttagtagagcctgtgggtcgtccctctattctcaaagaggataatctcaaagagtttgatcagttggatcaggagaatgatgatggttgggcaggggcccatgaagaggttgactacactgaaaagctcaagttcagcgatgaggaagatgggcgagactctgatgaggagggagctgagggccacagggattcccaatcagcttctggtgaggaacggccccctgaagcagatggcaaaaagggcaactcccccaacagcgaaccgcccactcctaagacggcctgggcagaaacctctcggcctccagagacagagccgggacctcctgccccaaagcctcccctacccccacctcaccggggccccgccgggaactggggcccccctggggactacccagatcgtgggggtcctccctgcaagcccccagcacctgaagatgaggatgaggcatggcggcagcgacgaaagcagtcgtcatctgagatttccctggcagtggagcgggcccggcgacggcgagaagaagaggagcggcgcatgcaagaagagcgccgggcagcctgtgctgagaagctcaagcgactcgatgaaaagtttggggcacctgacaagcggctcaaagcagagcctgctgccccacctgctgccccttctaccccagctccaccacctgcagtccctaaagaactccctgcacctccagctccacctccagcatcagccccaacaccagagaaagaacctgaagagccagcacaggcccctcctgcccaatctactcctactccaggtgtggctgcggctcccactctggtgagtggtggtggcagtaccagtagcaccagcagtggcagcttcgaagccagcccagtggaaccacaactgccctcaaaagagggtcctgaaccaccagaagaggttcctcctcctaccacacccccagttccaaaggtggaacccaagggtgatgggattggtcccacccgccagccccctagtcagggcttgggctaccccaaatatcagaagtcgttgcctcctcgtttccagcggcagcagcaggagcagctcctgaagcagcagcagcagcaccagtggcagcagcatcaacagggctctgcccctcctaccccagtgcccccatcaccaccacagcctgtgaccctgggggctgtgccagctccacaggctccacccccgccccccaaggccctgtacccaggtgctctgggccggcccccacccatgcccccaatgaactttgatccccgatggatgatgattcctccttatgtggacccccggctcctccagggtcgtccccctctagacttctaccctcctggtgtgcatccctctggcctagttccccgagagcgttcagacagtgggggctcaagctcagagccatttgaccgtcatgcacctgctatgttacgggaacggggcactccaccggtggatccaaagttggcctgggtgggagatgtcttcaccgccacacccgctgaaccccgcccacttacctcacctctgcgccaggctgcggatgaggatgacaaggggatgaggagcgagactcctccagtacctcccccaccaccctatctggccagttatccaggctttcctgagaatggagcccctgggcccccaatctctcgctttcctctggaggaaccagggccccgtccactcccctggcccccaggcagtgatgaagtggccaagatacaaactccaccacccaagaaggagccccctaaggaggagactgcacagctgacggggccagaagcaggccgaaagcctgcccgcggagtcgggagtggaggccagggccccccaccaccacgcagagagagtcgcacagagacccgctggggccctcgtccagggagcagtcgtcgtggaatccctccagaggagccaggggccccaccccgccgggctgggcctataaagaaacctccaccacctacaaaagtagaagagctgcctcccaagcccctcgaacagggggatgaaacccccaaacccccaaagccagacccactcaagataaccaaggggaagctagggggccccaaggagaccccacccaatggaaatctttcccctgccccaaggcttcggagggactattcgtatgaaagagtgggtcctacctcttgccggggtcggggccgaggcgagtattttgccagagggaggggttttcgggggacctatgggggacgagggcggggagcccgaagccgggaattccgcagttaccgagagtttcgaggagatgatgggcgtggaggtgggacagggggaccaaaccaccctcctgctccccgaggccgcactgccagcgagacacggagcgagggttcagagtatgaggaaatccccaagcggcgccggcagcggggctcagaaacaggcagcgagacccatgagagtgatctggctccttcagacaaggaggctcccacacccaaggagggaacactcacccaggtccctctcgctcccccaccaccaggagccccaccttcaccagccccagcccgcttcactgcccggggtgggcgagtcttcactcccagaggggtgccatctcgccggggccgaggaggagggaggccccctcctcaagtttgcccaggctggagccctccagccaagtctctggctcccaagaaacctcccacaggccctttgccaccaagtaaggagcctttgaaagagaagttgatcccagggcctctgtcccctgtggcgcgcggaggcagcaatggaggtagcaatgtgggcatggaagatggggagcgaccccgaaggaggcgacatgggagggctcagcagcaggataaaccgcctcgtttccggaggctgaagcaggaacgggagaatgccgcaagggggtctgagggcaagccctccctaacccttccagcctccgctcctggacctgaggaggccctcacaacagtcacagtggccccagcacctcgccgggcagctgccaagtctcctgatctgtcaaaccagaactcagaccaagccaatgaggaatgggagactgcatcagagagcagtgacttcaccagtgagcgccgaggggacaaagaggcacccccaccagtactgctgacacccaaggctgtgggaactcctgggggaggtggaggtggagccgtaccaggtatttcagccatgtcccgcggagatctgagccagagagccaaggatttgagtaaacggagcttctcaagtcagcggccaggcatggaacggcagaatcggcgccctggcccagggggcaaggctggcagcagtggcagcagcagtggaggaggcggtgggggtcctggaggaaggaccgggccaggacgaggcgacaagaggagctggccctctcccaagaaccgaagtcgtcctccagaggagcgtcccccggggcttcccctgcctcccccacctcccagcagttctgctgtcttccgcctggaccaagttatccacagcaaccctgctggcatccaacaggctctggcccagcttagtagccgtcaagggagtgtaactgcaccagggggtcatccaaggcacaagcctgggcctccccaagcccctcagggcccctctcctaggcccccaacccgatacgagccccagagggtcaacagcggcctcagttctgacccccactttgaggagccggggccaatggtgagaggggtgggtgggactcctcgggactctgccggggttagtccctttccccctaaacgtcgggagcggcctcccagaaaaccagagctgctacaggaggaatctttgccacctcctcatagctctggattcttgggctctaagcctgagggcccaggccctcaggcagagtccagagatacaggcacagaggccctgacccctcacatctggaaccgtttacatactgccactagccgaaagagttaccggcccagctccatggagccttggatggagcccctgagtccttttgaggatgtggctggcacagaaatgagtcagtctgacagtggggtggacctgagtggggattctcaggtgtcatcaggtccctgcagccagcgaagttcccctgatggaggactcaagggggcagcagagggaccccccaagaggcctggaggctcctcacccctgaatgctgttccttgtgagggtccacctggctctgaacctcctaggagaccaccacctgccccccacgatggggacagaaaggagctgccccgggagcagcctctgccccctggccccattggcacagaacgatcacagcatacagaccgaggcacagagcctggccccattcggccatcccatcgacctggtcccccagtccagtttggcactagtgacaaggactcagacttacgcctagtggtaggagacagcttgaaagcagagaaggagctaacagcatcagtcactgaggccattcctgtatcacgagactgggagctgcttcccagtgctgctgcctctgctgagccacaatccaagaacctggattctgggcactgtgtcccggagcccagctcctcaggccagcgcctgtatcctgaggttttctatggcagtgctgggccttccagttctcagatctctgggggagccatggactctcagttacatccaaacagtggaggcttccgccctgggacaccctcactgcacccttacagatcacagcccctatacctaccccccggcccagcccctccctcagcactgctctctggggtagctctcaagggccagtttctggatttctccacaatgcaagctacagagctggggaagttgccggctggaggagttctctaccctccaccttccttcctctactctccggctttctgccccagtcctttgcctgacacatcgttgcttcaggtacgccaggatctgccatccccttcggatttttattctactcctctgcagcctggtggccaaagtggctttctcccttcaggggctcctgcccagcagatgcttctacccatggtagactcacagctgcctgtggtgaactttggctccctgccgccagcaccacctcctgccccaccttccctttctctgttacctgtgggccctgctctgcagccccccagcctggctgtgcggcccccacctgctcctgctactcgggtgctgccttcacctgccaggcccttccccgctagcttggggcgagcagagctgcatccagtggaactaaagccgttccaggattatcaaaaactgagcagcaaccttgggggacctggatcatcacggactcccccaactggaaggtccttctctggcctcaattcccgtctcaaggccacgccttccacctacagtggagtcttccgcacccagcgcgtcgacctttaccagcaggcctccccaccagatgccctgcgctggatacctaagccttgggagcggacagggccgccacctcgagaagggccctcccgacgggcagaggagcctgggtcccgaggggacaaggagcctgggttgcccccaccccgctgagggagttcctcttgccccctacccccggggcttgtatatagattataaatatataagggggaaaggggtgggcggggaggggttctggggctggggcctcacttcccctcctcccccttcccctggtcccctgtccctggggctgtttgttaaaaaagagtaataaaaggatttaaaaaaaaaaa

SEQ ID NO: 169567 - DNA, 6861 bp, Homo sapiens
  Payload ID: 13393
  Gene Symbol: PRRC2A
  Gene Name: proline-rich coiled-coil 2A
  Uniprot ID: P48634
  ENST ID: ENST00000383464
  CDS Start-End: 203-6676
gggctcagccgcggagtgagcgagggagacgggaggagccgaacccggcgccatccgccgccatcctcccccgccccaccgccatcccgtcccggggagcccctaggcccgggtcccggatccccgcgcacccggccaggctctggcacgttttgggggaggtgcctgcaggacccaacatactcaatgagcttccagcgcaatgtccgatcgctcggggccgactgccaagggaaaggatggaaagaagtattcctcgctcaacctgtttgatacgtataagggcaagtccttagagatccagaaacccgctgttgcccctcgccatggcctgcagagtctcgggaaagttgccattgcccggcgtatgccacctccagccaaccttccaagcctgaaagccgagaacaaaggcaatgaccccaatgtctcactagtgccaaaagacggaacaggatgggcaagcaaacaggagcagtccgaccccaagagttccgatgcctcaaccgctcagccgccggaatcgcagccactgccggcttcacagacgcctgcctccaaccagccgaaacgacccccagcagcccccgagaacactcctttggttccaagcggggtaaagtcctgggcacaagccagcgtcacccatggagcacatggagatggtggaagggcatcaagcctactgtcacgattctctcgagaggaatttccgaccctgcaggcggctggcgaccaggacaaggctgccaaggaaagggagtctgccgaacagtcgtctgggcccggaccaagcctccgcccccaaaattctacaacttggagggacggaggtgggcgtggccctgatgagctggagggcccggactccaaacttcatcatggtcatgatccccggggtgggctacagccttcaggcccaccccagttccctccctaccgcggaatgatgccgcctttcatgtatcccccatatctcccgttccctccgccctatggaccccaggggccttaccgataccccactcctgatgggcccagccgttttccccgtgtggcgggcccccgaggctcagggccaccaatgcgcttagtagagcctgtgggtcgtccctctattctcaaagaggataatctcaaagagtttgatcagttggatcaggagaatgatgatggttgggcaggggcccatgaagaggttgactacactgaaaagctcaagttcagcgatgaggaagatgggcgagactctgatgaggagggagctgagggccacagggattcccaatcagcttctggtgaggaacggccccctgaagcagatggcaaaaagggcaactcccccaacagcgaaccgcccactcctaagacggcctgggcagaaacctctcggcctccagagacagagccgggacctcctgccccaaagcctcccctacccccacctcaccggggccccgccgggaactggggcccccctggggactacccagatcgtgggggtcctccctgcaagcccccagcacctgaagatgaggatgaggcatggcggcagcgacgaaagcagtcgtcatctgagatttccctggcagtggagcgggcccggcgacggcgagaagaagaggagcggcgcatgcaagaagagcgccgggcagcctgtgctgagaagctcaagcgactcgatgaaaagtttggggcacctgacaagcggctcaaagcagagcctgctgccccacctgctgccccttctaccccagctccaccacctgcagtccctaaagaactccctgcacctccagctccacctccagcatcagccccaacaccagagaaagaacctgaagagccagcacaggcccctcctgcccaatctactcctactccaggtgtggctgcggctcccactctggtgagtggtggtggcagtaccagtagcaccagcagtggcagcttcgaagccagcccagtggaaccacaactgccctcaaaagagggtcctgaaccaccagaagaggttcctcctcctaccacacccccagttccaaaggtggaacccaagggtgatgggattggtcccacccgccagccccctagtcagggcttgggctaccccaaatatcagaagtcgttgcctcctcgtttccagcggcagcagcaggagcagctcctgaagcagcagcagcagcaccagtggcagcagcatcaacagggctctgcccctcctaccccagtgcccccatcaccaccacagcctgtgaccctgggggctgtgccagctccacaggctccacccccgccccccaaggccctgtacccaggtgctctgggccggcccccacccatgcccccaatgaactttgatccccgatggatgatgattcctccttatgtggacccccggctcctccagggtcgtccccctctagacttctaccctcctggtgtgcatccctctggcctagttccccgagagcgttcagacagtgggggctcaagctcagagccatttgaccgtcatgcacctgctatgttacgggaacggggcactccaccggtggatccaaagttggcctgggtgggagatgtcttcaccgccacacccgctgaaccccgcccacttacctcacctctgcgccaggctgcggatgaggatgacaaggggatgaggagcgagactcctccagtacctcccccaccaccctatctggccagttatccaggctttcctgagaatggagcccctgggcccccaatctctcgctttcctctggaggaaccagggccccgtccactcccctggcccccaggcagtgatgaagtggccaagatacaaactccaccacccaagaaggagccccctaaggaggagactgcacagctgacggggccagaagcaggccgaaagcctgcccgcggagtcgggagtggaggccagggccccccaccaccacgcagagagagtcgcacagagacccgctggggccctcgtccagggagcagtcgtcgtggaatccctccagaggagccaggggccccaccccgccgggctgggcctataaagaaacctccaccacctacaaaagtagaagagctgcctcccaagcccctcgaacagggggatgaaacccccaaacccccaaagccagacccactcaagataaccaaggggaagctagggggccccaaggagaccccacccaatggaaatctttcccctgccccaaggcttcggagggactattcgtatgaaagagtgggtcctacctcttgccggggtcggggccgaggcgagtattttgccagagggaggggttttcgggggacctatgggggacgagggcggggagcccgaagccgggaattccgcagttaccgagagtttcgaggagatgatgggcgtggaggtgggacagggggaccaaaccaccctcctgctccccgaggccgcactgccagcgagacacggagcgagggttcagagtatgaggaaatccccaagcggcgccggcagcggggctcagaaacaggcagcgagacccatgagagtgatctggctccttcagacaaggaggctcccacacccaaggagggaacactcacccaggtccctctcgctcccccaccaccaggagccccaccttcaccagccccagcccgcttcactgcccggggtgggcgagtcttcactcccagaggggtgccatctcgccggggccgaggaggagggaggccccctcctcaagtttgcccaggctggagccctccagccaagtctctggctcccaagaaacctcccacaggccctttgccaccaagtaaggagcctttgaaagagaagttgatcccagggcctctgtcccctgtggcgcgcggaggcagcaatggaggtagcaatgtgggcatggaagatggggagcgaccccgaaggaggcgacatgggagggctcagcagcaggataaaccgcctcgtttccggaggctgaagcaggaacgggagaatgccgcaagggggtctgagggcaagccctccctaacccttccagcctccgctcctggacctgaggaggccctcacaacagtcacagtggccccagcacctcgccgggcagctgccaagtctcctgatctgtcaaaccagaactcagaccaagccaatgaggaatgggagactgcatcagagagcagtgacttcaccagtgagcgccgaggggacaaagaggcacccccaccagtactgctgacacccaaggctgtgggaactcctgggggaggtggaggtggagccgtaccaggtatttcagccatgtcccgcggagatctgagccagagagccaaggatttgagtaaacggagcttctcaagtcagcggccaggcatggaacggcagaatcggcgccctggcccagggggcaaggctggcagcagtggcagcagcagtggaggaggcggtgggggtcctggaggaaggaccgggccaggacgaggcgacaagaggagctggccctctcccaagaaccgaagtcgtcctccagaggagcgtcccccggggcttcccctgcctcccccacctcccagcagttctgctgtcttccgcctggaccaagttatccacagcaaccctgctggcatccaacaggctctggcccagcttagtagccgtcaagggagtgtaactgcaccagggggtcatccaaggcacaagcctgggcctccccaagcccctcagggcccctctcctaggcccccaacccgatacgagccccagagggtcaacagcggcctcagttctgacccccactttgaggagccggggccaatggtgagaggggtgggtgggactcctcgggactctgccggggttagtccctttccccctaaacgtcgggagcggcctcccagaaaaccagagctgctacaggaggaatctttgccacctcctcatagctctggattcttgggctctaagcctgagggcccaggccctcaggcagagtccagagatacaggcacagaggccctgacccctcacatctggaaccgtttacatactgccactagccgaaagagttaccggcccagctccatggagccttggatggagcccctgagtccttttgaggatgtggctggcacagaaatgagtcagtctgacagtggggtggacctgagtggggattctcaggtgtcatcaggtccctgcagccagcgaagttcccctgatggaggactcaagggggcagcagagggaccccccaagaggcctggaggctcctcacccctgaatgctgttccttgtgagggtccacctggctctgaacctcctaggagaccaccacctgccccccacgatggggacagaaaggagctgccccgggagcagcctctgccccctggccccattggcacagaacgatcacagcatacagaccgaggcacagagcctggccccattcggccatcccatcgacctggtcccccagtccagtttggcactagtgacaaggactcagacttacgcctagtggtaggagacagcttgaaagcagagaaggagctaacagcatcagtcactgaggccattcctgtatcacgagactgggagctgcttcccagtgctgctgcctctgctgagccacaatccaagaacctggattctgggcactgtgtcccggagcccagctcctcaggccagcgcctgtatcctgaggttttctatggcagtgctgggccttccagttctcagatctctgggggagccatggactctcagttacatccaaacagtggaggcttccgccctgggacaccctcactgcacccttacagatcacagcccctatacctaccccccggcccagcccctccctcagcactgctctctggggtagctctcaagggccagtttctggatttctccacaatgcaagctacagagctggggaagttgccggctggaggagttctctaccctccaccttccttcctctactctccggctttctgccccagtcctttgcctgacacatcgttgcttcaggtacgccaggatctgccatccccttcggatttttattctactcctctgcagcctggtggccaaagtggctttctcccttcaggggctcctgcccagcagatgcttctacccatggtagactcacagctgcctgtggtgaactttggctccctgccgccagcaccacctcctgccccaccttccctttctctgttacctgtgggccctgctctgcagccccccagcctggctgtgcggcccccacctgctcctgctactcgggtgctgccttcacctgccaggcccttccccgctagcttggggcgagcagagctgcatccagtggaactaaagccgttccaggattatcaaaaactgagcagcaaccttgggggacctggatcatcacggactcccccaactggaaggtccttctctggcctcaattcccgtctcaaggccacgccttccacctacagtggagtcttccgcacccagcgcgtcgacctttaccagcaggcctccccaccagatgccctgcgctggatacctaagccttgggagcggacagggccgccacctcgagaagggccctcccgacgggcagaggagcctgggtcccgaggggacaaggagcctgggttgcccccaccccgctgagggagttcctcttgccccctacccccggggcttgtatatagattataaatatataagggggaaaggggtgggcggggaggggttctggggctggggcctcacttcccctcctcccccttcccctggtcccctgtccctggggctgtttgttaaaaaagagtaataaaaggatttaaaaaaaaaaa

SEQ ID NO: 169568 - DNA, 6861 bp, Homo sapiens
  Payload ID: 13393
  Gene Symbol: PRRC2A
  Gene Name: proline-rich coiled-coil 2A
  Uniprot ID: P48634
  ENST ID: ENST00000454306
  CDS Start-End: 203-6676
gggctcagccgcggagtgagcgagggagacgggaggagccgaacccggcgccatccgccgccatcctcccccgccccaccgccatcccgtcccggggagcccctaggcccgggtcccggatccccgcgcacccggccaggctctggcacgttttgggggaggtgcctgcaggacccaacatactcaatgagcttccagcgcaatgtccgatcgctcggggccgactgccaagggaaaggatggaaagaagtattcctcgctcaacctgtttgatacgtataagggcaagtccttagagatccagaaacccgctgttgcccctcgccatggcctgcagagtctcgggaaagttgccattgcccggcgtatgccacctccagccaaccttccaagcctgaaagccgagaacaaaggcaatgaccccaatgtctcactagtgccaaaagacggaacaggatgggcaagcaaacaggagcagtccgaccccaagagttccgatgcctcaaccgctcagccgccggaatcgcagccactgccggcttcacagacgcctgcctccaaccagccgaaacgacccccagcagcccccgagaacactcctttggttccaagcggggtaaagtcctgggcacaagccagcgtcacccatggagcacatggagatggtggaagggcatcaagcctactgtcacgattctctcgagaggaatttccgaccctgcaggcggctggcgaccaggacaaggctgccaaggaaagggagtctgccgaacagtcgtctgggcccggaccaagcctccgcccccaaaattctacaacttggagggacggaggtgggcgtggccctgatgagctggagggcccggactccaaacttcatcatggtcatgatccccggggtgggctacagccttcaggcccaccccagttccctccctaccgcggaatgatgccgcctttcatgtatcccccatatctcccgttccctccgccctatggaccccaggggccttaccgataccccactcctgatgggcccagccgttttccccgtgtggcgggcccccgaggctcagggccaccaatgcgcttagtagagcctgtgggtcgtccctctattctcaaagaggataatctcaaagagtttgatcagttggatcaggagaatgatgatggttgggcaggggcccatgaagaggttgactacactgaaaagctcaagttcagcgatgaggaagatgggcgagactctgatgaggagggagctgagggccacagggattcccaatcagcttctggtgaggaacggccccctgaagcagatggcaaaaagggcaactcccccaacagcgaaccgcccactcctaagacggcctgggcagaaacctctcggcctccagagacagagccgggacctcctgccccaaagcctcccctacccccacctcaccggggccccgccgggaactggggcccccctggggactacccagatcgtgggggtcctccctgcaagcccccagcacctgaagatgaggatgaggcatggcggcagcgacgaaagcagtcgtcatctgagatttccctggcagtggagcgggcccggcgacggcgagaagaagaggagcggcgcatgcaagaagagcgccgggcagcctgtgctgagaagctcaagcgactcgatgaaaagtttggggcacctgacaagcggctcaaagcagagcctgctgccccacctgctgccccttctaccccagctccaccacctgcagtccctaaagaactccctgcacctccagctccacctccagcatcagccccaacaccagagaaagaacctgaagagccagcacaggcccctcctgcccaatctactcctactccaggtgtggctgcggctcccactctggtgagtggtggtggcagtaccagtagcaccagcagtggcagcttcgaagccagcccagtggaaccacaactgccctcaaaagagggtcctgaaccaccagaagaggttcctcctcctaccacacccccagttccaaaggtggaacccaagggtgatgggattggtcccacccgccagccccctagtcagggcttgggctaccccaaatatcagaagtcgttgcctcctcgtttccagcggcagcagcaggagcagctcctgaagcagcagcagcagcaccagtggcagcagcatcaacagggctctgcccctcctaccccagtgcccccatcaccaccacagcctgtgaccctgggggctgtgccagctccacaggctccacccccgccccccaaggccctgtacccaggtgctctgggccggcccccacccatgcccccaatgaactttgatccccgatggatgatgattcctccttatgtggacccccggctcctccagggtcgtccccctctagacttctaccctcctggtgtgcatccctctggcctagttccccgagagcgttcagacagtgggggctcaagctcagagccatttgaccgtcatgcacctgctatgttacgggaacggggcactccaccggtggatccaaagttggcctgggtaggagatgtcttcaccgccacacccgctgaaccccgcccacttacctcacctctgcgccaggctgcggatgaggatgacaaggggatgaggagcgagactcctccagtacctcccccaccaccctatctggccagttatccaggctttcctgagaatggagcccctgggcccccaatctctcgctttcctctggaggaaccagggccccgtccactcccctggcccccaggcagtgatgaagtggccaagatacaaactccaccacccaagaaggagccccctaaggaggagactgcacagctgacggggccagaagcaggccgaaagcctgcccgcggagtcgggagtggaggccagggccccccaccaccacgcagagagagtcgcacagagacccgctggggccctcgtccagggagcagtcgtcgtggaatccctccagaggagccaggggccccaccccgccgggctgggcctataaagaaacctccaccacctacaaaagtagaagagctgcctcccaagcccctcgaacagggggatgaaacccccaaacccccaaagccagacccactcaagataaccaaggggaagctagggggccccaaggagaccccacccaatggaaatctttcccctgccccaaggcttcggagggactattcgtatgaaagagtgggtcctacctcttgccggggtcggggccgaggcgagtattttgccagagggaggggttttcgggggacctatgggggacgagggcggggagcccgaagccgggaattccgcagttaccgagagtttcgaggagatgatgggcgtggaggtgggacagggggaccaaaccaccctcctgctccccgaggccgcactgccagcgagacacggagcgagggttcagagtatgaggaaatccccaagcggcgccggcagcggggctcagaaacaggcagcgagacccatgagagtgatctggctccttcagacaaggaggctcccacacccaaggagggaacactcacccaggtccctctcgctcccccaccaccaggagccccaccttcaccagccccagcccgcttcactgcccggggtgggcgagtcttcactcccagaggggtgccatctcgccggggccgaggaggagggaggccccctcctcaagtttgcccaggctggagccctccagccaagtctctggctcccaagaaacctcccacaggccctttgccaccaagtaaggagcctttgaaagagaagttgatcccagggcctctgtcccctgtggcgcgcggaggcagcaatggaggtagcaatgtgggcatggaagatggggagcgaccccgaaggaggcgacatgggagggctcagcagcaggataaaccgcctcgtttccggaggctgaagcaggaacgggagaatgccgcaagggggtctgagggcaagccctccctaacccttccagcctccgctcctggacctgaggaggccctcacaacagtcacagtggccccagcacctcgccgggcagctgccaagtctcctgatctgtcaaaccagaactcagaccaagccaatgaggaatgggagactgcatcagagagcagtgacttcaccagtgagcgccgaggggacaaagaggcacccccaccagtactgctgacacccaaggctgtgggaactcctgggggaggtggaggtggagccgtaccaggtatttcagccatgtcccgcggagatctgagccagagagccaaggatttgagtaaacggagcttctcaagtcagcggccaggcatggaacggcagaatcggcgccctggcccagggggcaaggctggcagcagtggcagcagcagtggaggaggcggtgggggtcctggaggaaggaccgggccaggacgaggcgacaagaggagctggccctctcccaagaaccgaagtcgtcctccagaggagcgtcccccggggcttcccctgcctcccccacctcccagcagttctgctgtcttccgcctggaccaagttatccacagcaaccctgctggcatccaacaggctctggcccagcttagtagccgtcaagggagtgtaactgcaccagggggtcatccaaggcacaagcctgggcctccccaagcccctcagggcccctctcctaggcccccaacccgatacgagccccagagggtcaacagcggcctcagttctgacccccactttgaggagccggggccaatggtgagaggggtgggtgggactcctcgggactctgccggggttagtccctttccccctaaacgtcgggagcggcctcccagaaaaccagagctgctacaggaggaatctttgccacctcctcatagctctggattcttgggctctaagcctgagggcccaggccctcaggcagagtccagagatacaggcacagaggccctgacccctcacatctggaaccgtttacatactgccactagccgaaagagttaccggcccagctccatggagccttggatggagcccctgagtccttttgaggatgtggctggcacagaaatgagtcagtctgacagtggggtggacctgagtggggattctcaggtgtcatcaggtccctgcagccagcgaagttcccctgatggaggactcaagggggcagcagagggaccccccaagaggcctggaggctcctcacccctgaatgctgttccttgtgagggtccacctggctctgaacctcctaggagaccaccacctgccccccacgatggggacagaaaggagctgccccgggagcagcctctgccccctggccccattggcacagaacgatcacagcgtacagaccgaggcacagagcctggccccattcggccatcccatcgacctggtcccccagtccagtttggcactagtgacaaggactcagacttacgcctagtggtaggagacagcttgaaagcagagaaggagctaacagcatcagtcactgaggccattcctgtatcacgagactgggagctgcttcccagtgctgctgcctctgctgagccacaatccaagaacctggattctgggcactgtgtcccggagcccagctcctcaggccagcgcctgtatcctgaggttttctatggcagtgctgggccttccagttctcagatctctgggggagccatggactctcaattacatccaaacagtggaggcttccgccctgggacaccctcactgcacccttacagatcacagcccctatacctacccccgggcccagcccctccctcagcactgctctctggggtagctctcaagggccagtttctggatttctccacaatgcaagctacagagctggggaagttgccggctggaggagttctctaccctccaccttccttcctctactctccggctttctgccccagtcctttgcctgacacatcgttgcttcaggtacgccaggatctgccatccccttcggatttttattctactcctctgcagcctggtggccaaagtggatttctcccttcaggggctcctgcccagcagatgcttctacccatggtagactcacagctgcctgtggtgaactttggctccctgccgccagcaccacctcctgccccacctcccctttctctgttacctgtgggccctgctctgcagccccccagcctggctgtgcggcccccacctgctcctgctactcgggtgctgccttcacctgccaggcccttccccgctagcttggggcgagcagagctgcatccagtggaactaaagccgttccaggattatcaaaaactgagcagcaaccttgggggacctggatcatcacggactcccccaactggaaggtccttctctggcctcaattcccgtctcaaggccacgccttccacctacagtggagtcttccgcacccagcgcgtcgacctttaccagcaggcctccccaccagatgccctgcgctggatacctaagccttgggagcggacagggccgccacctcgagaagggccctcccgacgggcagaggagcctgggtcccgaggggacaaggagcctgggttgcccccaccccgctgagggagttcctcttgccccctacccccggggcttgtatatagattataaatatataagggggaaaggggtgggcggggaggggttgtggggctggggcctcacttcccctcctcccccttcccctggtcccctgtccctggggctgtttgttaaaaaagagtaataaaaggatttaaaaaaaaaaa

SEQ ID NO: 169569 - DNA, 6893 bp, Homo sapiens
  Payload ID: 13393
  Gene Symbol: PRRC2A
  Gene Name: proline-rich coiled-coil 2A
  Uniprot ID: P48634
  ENST ID: ENST00000428775
  CDS Start-End: 235-6708
cagccgcggagtgagcgagggagacgggaggagccgaacccggcgccatccgccgccatcctcccccgccccaccgccatcccgtcccggggagcccctaggcccgggtcccggatccccgcgcacccggccaggggacagagactgagacacttgctgtctggcccacaggctctggcacgttttgggggaggtgcctgcaggacccaacatactcaatgagcttccagcgcaatgtccgatcgctcggggccgactgccaagggaaaggatggaaagaagtattcctcgctcaacctgtttgatacgtataagggcaagtccttagagatccagaaacccgctgttgcccctcgccatggcctgcagagtctcgggaaagttgccattgcccggcgtatgccacctccagccaaccttccaagcctgaaagccgagaacaaaggcaatgaccccaatgtctcactagtgccaaaagacggaacaggatgggcaagcaaacaggagcagtccgaccccaagagttccgatgcctcaaccgctcagccgccggaatcgcagccactgccggcttcacagacgcctgcctccaaccagccgaaacgacccccagcagcccccgagaacactcctttggttccaagcggggtaaagtcctgggcacaagccagcgtcacccatggagcacatggagatggtggaagggcatcaagcctactgtcacgattctctcgagaggaatttccgaccctgcaggcggctggcgaccaggacaaggctgccaaggaaagggagtctgccgaacagtcgtctgggcccggaccaagcctccgcccccaaaattctacaacttggagggacggaggtgggcgtggccctgatgagctggagggcccggactccaaacttcatcatggtcatgatccccggggtgggctacagccttcaggcccaccccagttccctccctaccgcggaatgatgccgcctttcatgtatcccccatatctcccgttccctccgccctatggaccccaggggccttaccgataccccactcctgatgggcccagccgttttccccgtgtggcgggcccccgaggctcagggccaccaatgcgcttagtagagcctgtgggtcgtccctctattctcaaagaggataatctcaaagagtttgatcagttggatcaggagaatgatgatggttgggcaggggcccatgaagaggttgactacactgaaaagctcaagttcagcgatgaggaagatgggcgagactctgatgaggagggagctgagggccacagggattcccaatcagcttctggtgaggaacggccccctgaagcagatggcaaaaagggcaactcccccaacagcgaaccgcccactcctaagacggcctgggcagaaacctctcggcctccagagacagagccgggacctcctgccccaaagcctcccctacccccacctcaccggggccccgccgggaactggggcccccctggggactacccagatcgtgggggtcctccctgcaagcccccagcacctgaagatgaggatgaggcatggcggcagcgacgaaagcagtcgtcatctgagatttccctggcagtggagcgggcccggcgacggcgagaagaagaggagcggcgcatgcaagaagagcgccgggcagcctgtgctgagaagctcaagcgactcgatgaaaagtttggggcacctgacaagcggctcaaagcagagcctgctgccccacctgctgccccttctaccccagctccaccacctgcagtccctaaagaactccctgcacctccagctccacctccagcatcagccccaacaccagagaaagaacctgaagagccagcacaggcccctcctgcccaatctactcctactccaggtgtggctgcggctcccactctggtgagtggtggtggcagtaccagtagcaccagcagtggcagcttcgaagccagcccagtggaaccacaactgccctcaaaagagggtcctgaaccaccagaagaggttcctcctcctaccacacccccagttccaaaggtggaacccaagggtgatgggattggtcccacccgccagccccctagtcagggcttgggctaccccaaatatcagaagtcgttgcctcctcgtttccagcggcagcagcaggagcagctcctgaagcagcagcagcagcaccagtggcagcagcatcaacagggctctgcccctcctaccccagtgcccccatcaccaccacagcctgtgaccctgggggctgtgccagctccacaggctccacccccgccccccaaggccctgtacccaggtgctctgggccggcccccacccatgcccccaatgaactttgatccccgatggatgatgattcctccttatgtggacccccggctcctccagggtcgtccccctctagacttctaccctcctggtgtgcatccctctggcctagttccccgagagcgttcagacagtgggggctcaagctcagagccatttgaccgtcatgcacctgctatgttacgggaacggggcactccaccggtggatccaaagttggcctgggtgggagatgtcttcaccgccacacccgctgaaccccgcccacttacctcacctctgcgccaggctgcggatgaggatgacaaggggatgaggagcgagactcctccagtacctcccccaccaccctatctggccagttatccaggctttcctgagaatggagcccctgggcccccaatctctcgctttcctctggaggaaccagggccccgtccactcccctggcccccaggcagtgatgaagtggccaagatacaaactccaccacccaagaaggagccccctaaggaggagactgcacagctgacggggccagaagcaggccgaaagcctgcccgcggagtcgggagtggaggccagggccccccaccaccacgcagagagagtcgcacagagacccgctggggccctcgtccagggagcagtcgtcgtggaatccctccagaggagccaggggccccaccccgccgggctgggcctataaagaaacctccaccacctacaaaagtagaagagctgcctcccaagcccctcgaacagggggatgaaacccccaaacccccaaagccagacccactcaagataaccaaggggaagctagggggccccaaggagaccccacccaatggaaatctttcccctgccccaaggcttcggagggactattcgtatgaaagagtgggtcctacctcttgccggggtcggggccgaggcgagtattttgccagagggaggggttttcgggggacctatgggggacgagggcggggagcccgaagccgggaattccgcagttaccgagagtttcgaggagatgatgggcgtggaggtgggacagggggaccaaaccaccctcctgctccccgaggccgcactgccagcgagacacggagcgagggttcagagtatgaggaaatccccaagcggcgccggcagcggggctcagaaacaggcagcgagacccatgagagtgatctggctccttcagacaaggaggctcccacacccaaggagggaacactcacccaggtccctctcgctcccccaccaccaggagccccaccttcaccagccccagcccgcttcactgcccggggtgggcgagtcttcactcccagaggggtgccatctcgccggggccgaggaggagggaggccccctcctcaagtttgcccaggctggagccctccagccaagtctctggctcccaagaaacctcccacaggccctttgccaccaagtaaggagcctttgaaagagaagttgatcccagggcctctgtcccctgtggcgcgcggaggcagcaatggaggtagcaatgtgggcatggaagatggggagcgaccccgaaggaggcgacatgggagggctcagcagcaggataaaccgcctcgtttccggaggctgaagcaggaacgggagaatgccgcaagggggtctgagggcaagccctccctaacccttccagcctccgctcctggacctgaggaggccctcacaacagtcacagtggccccagcacctcgccgggcagctgccaagtctcctgatctgtcaaaccagaactcagaccaagccaatgaggaatgggagactgcatcagagagcagtgacttcaccagtgagcgccgaggggacaaagaggcacccccaccagtactgctgacacccaaggctgtgggaactcctgggggaggtggaggtggagccgtaccaggtatttcagccatgtcccgcggagatctgagccagagagccaaggatttgagtaaacggagcttctcaagtcagcggccaggcatggaacggcagaatcggcgccctggcccagggggcaaggctggcagcagtggcagcagcagtggaggaggcggtgggggtcctggaggaaggaccgggccaggacgaggcgacaagaggagctggccctctcccaagaaccgaagtcgtcctccagaggagcgtcccccggggcttcccctgcctcccccacctcccagcagttctgctgtcttccgcctggaccaagttatccacagcaaccctgctggcatccaacaggctctggcccagcttagtagccgtcaagggagtgtaactgcaccagggggtcatccaaggcacaagcctgggcctccccaagcccctcagggcccctctcctaggcccccaacccgatacgagccccagagggtcaacagcggcctcagttctgacccccactttgaggagccggggccaatggtgagaggggtgggtgggactcctcgggactctgccggggttagtccctttccccctaaacgtcgggagcggcctcccagaaaaccagagctgctacaggaggaatctttgccacctcctcatagctctggattcttgggctctaagcctgagggcccaggccctcaggcagagtccagagatacaggcacagaggccctgacccctcacatctggaaccgtttacatactgccactagccgaaagagttaccggcccagctccatggagccttggatggagcccctgagtccttttgaggatgtggctggcacagaaatgagtcagtctgacagtggggtggacctgagtggggattctcaggtgtcatcaggtccctgcagccagcgaagttcccctgatggaggactcaagggggcagcagagggaccccccaagaggcctggaggctcctcacccctgaatgctgttccttgtgagggtccacctggctctgaacctcctaggagaccaccacctgccccccacgatggggacagaaaggagctgccccgggagcagcctctgccccctggccccattggcacagaacgatcacagcatacagaccgaggcacagagcctggccccattcggccatcccatcgacctggtcccccagtccagtttggcactagtgacaaggactcagacttacgcctagtggtaggagacagcttgaaagcagagaaggagctaacagcatcagtcactgaggccattcctgtatcacgagactgggagctgcttcccagtgctgctgcctctgctgagccacaatccaagaacctggattctgggcactgtgtcccggagcccagctcctcaggccagcgcctgtatcctgaggttttctatggcagtgctgggccttccagttctcagatctctgggggagccatggactctcagttacatccaaacagtggaggcttccgccctgggacaccctcactgcacccttacagatcacagcccctatacctaccccccggcccagcccctccctcagcactgctctctggggtagctctcaagggccagtttctggatttctccacaatgcaagctacagagctggggaagttgccggctggaggagttctctaccctccaccttccttcctctactctccggctttctgccccagtcctttgcctgacacatcgttgcttcaggtacgccaggatctgccatccccttcggatttttattctactcctctgcagcctggtggccaaagtggctttctcccttcaggggctcctgcccagcagatgcttctacccatggtagactcacagctgcctgtggtgaactttggctccctgccgccagcaccacctcctgccccaccttccctttctctgttacctgtgggccctgctctgcagccccccagcctggctgtgcggcccccacctgctcctgctactcgggtgctgccttcacctgccaggcccttccccgctagcttggggcgagcagagctgcatccagtggaactaaagccgttccaggattatcaaaaactgagcagcaaccttgggggacctggatcatcacggactcccccaactggaaggtccttctctggcctcaattcccgtctcaaggccacgccttccacctacagtggagtcttccgcacccagcgcgtcgacctttaccagcaggcctccccaccagatgccctgcgctggatacctaagccttgggagcggacagggccgccacctcgagaagggccctcccgacgggcagaggagcctgggtcccgaggggacaaggagcctgggttgcccccaccccgctgagggagttcctcttgccccctacccccggggcttgtatatagattataaatatataagggggaaaggggtgggcggggaggggttgtggggctggggcctcacttcccctcctcccccttcccctggtcccctgtccctggggctgtttgttaaaaaagagtaataaaaggatttaaaaaaaaaaa

SEQ ID NO: 169570 - DNA, 6861 bp, Homo sapiens
  Payload ID: 13393
  Gene Symbol: PRRC2A
  Gene Name: proline-rich coiled-coil 2A
  Uniprot ID: P48634
  ENST ID: ENST00000458561
  CDS Start-End: 203-6676
gggctcagccgcggagtgagcgagggagacgggaggagccgaacccggcgccatccgccgccatcctcccccgccccaccgccatcccgtcccggggagcccctaggcccgggtcccggatccccgcgcacccggccaggctctggcacgttttgggggaggtgcctgcaggacccaacatactcaatgagcttccagcgcaatgtccgatcgctcggggccgactgccaagggaaaggatggaaagaagtattcctcgctcaacctgtttgatacgtataagggcaagtccttagagatccagaaacccgctgttgcccctcgccatggcctgcagagtctcgggaaagttgccattgcccggcgtatgccacctccagccaaccttccaagcctgaaagccgagaacaaaggcaatgaccccaatgtctcactagtgccaaaagacggaacaggatgggcaagcaaacaggagcagtccgaccccaagagttccgatgcctcaaccgctcagccgccggaatcgcagccactgccggcttcacagacgcctgcctccaaccagccgaaacgacccccagcagcccccgagaacactcctttggttccaagcggggtaaagtcctgggcacaagccagcgtcacccatggagcacatggagatggtggaagggcatcaagcctactgtcacgattctctcgagaggaatttccgaccctgcaggcggctggcgaccaggacaaggctgccaaggaaagggagtctgccgaacagtcgtctgggcccggaccaagcctccgcccccaaaattctacaacttggagggacggaggtgggcgtggccctgatgagctggagggcccggactccaaacttcatcatggtcatgatccccggggtgggctacagccttcaggcccaccccagttccctccctaccgcggaatgatgccgcctttcatgtatcccccatatctcccgttccctccgccctatggaccccaggggccttaccgataccccactcctgatgggcccagccgttttccccgtgtggcgggcccccgaggctcagggccaccaatgcgcttagtagagcctgtgggtcgtccctctattctcaaagaggataatctcaaagagtttgatcagttggatcaggagaatgatgatggttgggcaggggcccatgaagaggttgactacactgaaaagctcaagttcagcgatgaggaagatgggcgagactctgatgaggagggagctgagggccacagggattcccaatcagcttctggtgaggaacggccccctgaagcagatggcaaaaagggcaactcccccaacagcgaaccgcccactcctaagacggcctgggcagaaacctctcggcctccagagacagagccgggacctcctgccccaaagcctcccctacccccacctcaccggggccccgccgggaactggggcccccctggggactacccagatcgtgggggtcctccctgcaagcccccagcacctgaagatgaggatgaggcatggcggcagcgacgaaagcagtcgtcatctgagatttccctggcagtggagcgggcccggcgacggcgagaagaagaggagcggcgcatgcaagaagagcgccgggcagcctgtgctgagaagctcaagcgactcgatgaaaagtttggggcacctgacaagcggctcaaagcagagcctgctgccccacctgctgccccttctaccccagctccaccacctgcagtccctaaagaactccctgcacctccagctccacctccagcatcagccccaacaccagagacagaacctgaagagccagcacaggcccctcctgcccaatctactcctactccaggtgtggctgcggctcccactctggtgagtggtggtggcagtaccagtagcaccagcagtggcagcttcgaagccagcccagtggaaccacaactgccctcaaaagagggtcctgaaccaccagaagaggttcctcctcctaccacacccccagttccaaaggtggaacccaagggtgatgggattggtcccacccgccagccccctagtcagggcttgggctaccccaaatatcagaagtcgttgcctcctcgtttccagcggcagcagcaggagcagctcctgaagcagcagcagcagcaccagtggcagcagcatcaacagggctctgcccctcctaccccagtgcccccatcaccaccacagcctgtgaccctgggggctgtgccagctccacaggctccacccccgccccccaaggccctgtacccaggtgctctgggccggcccccacccatgcccccaatgaactttgatccccgatggatgatgattcctccttatgtggacccccggctcctccagggtcgtccccctctagacttctaccctcctggtgtgcatccctctggcctagttccccgagagcgttcagacagtgggggctcaagctcagagccatttgaccgtcatgcacctgctatgttacgggaacggggcactccaccggtggatccaaagttggcctgggtaggagatgtcttcaccgccacacccgctgaaccccgcccacttacctcacctctgcgccaggctgcggatgaggatgacaaggggatgaggagcgagactcctccagtacctcccccaccaccctatctggccagttatccaggctttcctgagaatggagcccctgggcccccaatctctcgctttcctctggaggaaccagggccccgtccactcccctggcccccaggcagtgatgaagtggccaagatacaaactccaccacccaagaaggagccccctaaggaggagactgcacagctgacggggccagaagcaggccgaaagcctgcccgcggagtcgggagtggaggccagggccccccaccaccacgcagagagagtcgcacagagacccgctggggccctcgtccagggagcagtcgtcgtggaatccctccagaggagccaggggccccaccccgccgggctgggcctataaagaaacctccaccacctacaaaagtagaagagctgcctcccaagcccctcgaacagggggatgaaacccccaaacccccaaagccagacccactcaagataaccaaggggaagctagggggccccaaggagaccccacccaatggaaatctttcccctgccccaaggcttcggagggactattcgtatgaaagagtgggtcctacctcttgccggggtcggggccgaggcgagtattttgccagagggaggggttttcgggggacctatgggggacgagggcggggagcccgaagccgggaattccgcagttaccgagagtttcgaggagatgatgggcgtggaggtgggacagggggaccaaaccaccctcctgctccccgaggccgcactgccagcgagacacggagcgagggttcagagtatgaggaaatccccaagcggcgccggcagcggggctcagaaacaggcagcgagacccatgagagtgatctggctccttcagacaaggaggctcccacacccaaggagggaacactcacccaggtccctctcgctcccccaccaccaggagccccaccttcaccagccccagcccgcttcactgcccggggtgggcgagtcttcactcccagaggggtgccatctcgccggggccgaggaggagggaggccccctcctcaagtttgcccaggctggagccctccagccaagtctctggctcccaagaaacctcccacaggccctttgccaccaagtaaggagcctttgaaagagaagttgatcccagggcctctgtcccctgtggcgcgcggaggcagcaatggaggtagcaatgtgggcatggaagatggggagcgaccccgaaggaggcgacatgggagggctcagcagcaggataaaccgcctcgtttccggaggctgaagcaggaacgggagaatgccgcaagggggtctgagggcaagccctccctaacccttccagcctccgctcctggacctgaggaggccctcacaacagtcacagtggccccagcacctcgccgggcagctgccaagtctcctgatctgtcaaaccagaactcagaccaagccaatgaggaatgggagactgcatcagagagcagtgacttcaccagtgagcgccgaggggacaaagaggcacccccaccagtactgctgacacccaaggctgtgggaactcctgggggaggtggaggtggagccgtaccaggtatttcagccatgtcccgcggagatctgagccagagagccaaggatttgagtaaacggagcttctcaagtcagcggccaggcatggaacggcagaatcggcgccctggcccagggggcaaggctggcagcagtggcagcagcagtggaggaggcggtgggggtcctggaggaaggaccgggccaggacgaggcgacaagaggagctggccctctcccaagaaccgaagtcgtcctccagaggagcgtcccccggggcttcccctgcctcccccacctcccagcagttctgctgtcttccgcctggaccaagttatccacagcaaccctgctggcatccaacaggctctggcccagcttagtagccgtcaagggagtgtaactgcaccagggggtcatccaaggcacaagcctgggcttccccaagcccctcagggcccctctcctaggcccccaacccgatacgagccccagagggtcaacagcggcctcagttctgacccccactttgaggagccggggccaatggtgagaggggtgggtgggactcctcgggactctgccggggttagtccctttccccctaaacgtcgggagcggcctcccagaaaaccagagctgctacaggaggaatctttgccacctcctcatagctctggattcttgggctctaagcctgagggcccaggccctcaggcagagtccagagatacaggcacagaggccctgacccctcacatctggaaccgtttacatactgccactagccgaaagagttaccggcccagctccatggagccttggatggagcccctgagtccttttgaggatgtggctggcacagaaatgagtcagtctgacagtggggtggacctgagtggggattctcaggtgtcatcaggtccctgcagccagcgaagttcccctgatggaggactcaagggggcagcagagggaccccccaagaggcctggaggctcctcacccctgaatgctgttccttgtgagggtccacctggctctgaacctcctaggagaccaccacctgccccccacgatggggacagaaaggagctgccccgggagcagcctctgccccctggccccattggcacagaacgatcacagcgtacagaccgaggcacagagcctggccccattcggccatcccatcgacctggtcccccagtccagtttggcactagtgacaaggactcagacttacgcctagtggtaggagacagcttgaaagcagagaaggagctaacagcatcagtcactgaggccattcctgtatcacgagactgggagctgcttcccagtgctgctgcctctgctgagccacaatccaagaacctggattctgggcactgtgtcccggagcccagctcctcaggccagcgcctgtatcctgaggttttctatggcagtgctgggccttccagttctcagatctctgggggagccatggactctcaattacatccaaacagtggaggcttccgccctgggacaccctcactgcacccttacagatcacagcccctatacctaccccccggcccagcccctccctcagcactgctctctggggtagctctcaagggccagtttctggatttctccacaatgcaagctacagagctggggaagttgccggctggaggagttctctaccctccaccttccttcctctactctccggctttctgccccagtcctttgcctgacacatcgttgcttcaggtacgccaggatctgccatccccttcggatttttattctactcctctgcagcctggtggccaaagtggctttctcccttcaggggctcctgcccagcagatgcttctacccatggtagactcacagctgcctgtggtgaactttggctccctgccgccagcaccacctcctgccccacctcccctttctctgttacctgtgggccctgctctgcagccccccagcctggctgtgcggcccccacctgctcctgctactcgggtgctgccttcacctgccaggcccttccccgctagcttggggcgagcagagctgcatccagtggaactaaagccgttccaggattatcaaaaactgagcagcaaccttgggggacctggatcatcacggactcccccaactggaaggtccttctctggcctcaattcccgtctcaaggccacgccttccacctacagtggagtcttccgcacccagcgcgtcgacctttaccagcaggcctccccaccagatgccctgcgctggatacctaagccttgggagcggacagggccgccacctcgagaagggccctcccgacgggcagaggagcctgggtcccgaggggacaaggagcctgggttgcccccaccccgctgagggagttcctcttgccccctacccccggggcttgtatatagattataaatatataagggggaaaggggtgggcggggaggggttgtggggctggggcctcacttcccctcctcccccttcccctggtcccctgtccctggggctgtttgttaaaaaagagtaataaaaggatttaaaaaaaaaaa

SEQ ID NO: 169571 - DNA, 6861 bp, Homo sapiens
  Payload ID: 13393
  Gene Symbol: PRRC2A
  Gene Name: proline-rich coiled-coil 2A
  Uniprot ID: P48634
  ENST ID: ENST00000439762
  CDS Start-End: 203-6676
gggctcagccgcggagtgagcgagggagacgggaggagccgaacccggcgccatccgccgccatcctcccccgccccaccgccatcccgtcccggggagcccctaggcccgggtcccggatccccgcgcacccggccaggctctggcacgttttgggggaggtgcctgcaggacccaacatactcaatgagcttccagcgcaatgtccgatcgctcggggccgactgccaagggaaaggatggaaagaagtattcctcgctcaacctgtttgatacgtataagggcaagtccttagagatccagaaacccgctgttgcccctcgccatggcctgcagagtctcgggaaagttgccattgcccggcgtatgccacctccagccaaccttccaagcctgaaagccgagaacaaaggcaatgaccccaatgtctcactagtgccaaaagacggaacaggatgggcaagcaaacaggagcagtccgaccccaagagttccgatgcctcaaccgctcagccgctggaatcgcagccactgccggcttcacagacgcctgcctccaaccagccgaaacgacccccagcagcccccgagaacactcctttggttccaagcggggtaaagtcctgggcacaagccagcgtcacccatggagcacatggagatggtggaagggcatcaagcctactgtcacgattctctcgagaggaatttccgaccctgcaggcggctggcgaccaggacaaggctgccaaggaaagggagtctgccgaacagtcgtctgggcccggaccaagcctccgcccccaaaattctacaacttggagggacggaggtgggcgtggccctgatgagctggagggcccggactccaaacttcatcatggtcatgatccccggggtgggctacagccttcaggcccaccccagttccctccctaccgcggaatgatgccgcctttcatgtatcccccatatctcccgttccctccgccctatggaccccaggggccttaccgataccccactcctgatgggcccagccgttttccccgtgtggcgggcccccgaggctcagggccaccaatgcgcttagtagagcctgtgggtcgtccctctattctcaaagaggataatctcaaagagtttgatcagttggatcaggagaatgatgatggttgggcaggggcccatgaagaggttgactacactgaaaagctcaagttcagcgatgaggaagatgggcgagactctgatgaggagggagctgagggccacagggattcccaatcagcttctggtgaggaacggccccctgaagcagatggcaaaaagggcaactcccccaacagcgaaccgcccactcctaagacggcctgggcagaaacctctcggcctccagagacagagccgggacctcctgccccaaagcctcccctacccccacctcaccggggccccgccgggaactggggcccccctggggactacccagatcgtgggggtcctccctgcaagcccccagcacctgaagatgaggatgaggcatggcggcagcgacgaaagcagtcgtcatctgagatttccctggcagtggagcgggcccggcgacggcgagaagaagaggagcggcgcatgcaagaagagcgccgggcagcctgtgctgagaagctcaagcgactcgatgaaaagtttggggcacctgacaagcggctcaaagcagagcctgctgccccacctgctgccccttctaccccagctccaccacctgcagtccctaaagaactccctgcacctccagctccacctccagcatcagccccaacaccagagaaagaacctgaagagccagcacaggcccctcctgcccaatctactcctactccaggtgtggctgcggctcccactctggtgagtggtggtggcagtaccagtagcaccagcagtggcagcttcgaagccagcccagtggaaccacaactgccctcaaaagagggtcctgaaccaccagaagaggttcctcctcctaccacacccccagttccaaaggtggaacccaagggtgatgggattggtcccacccgccagccccctagtcagggcttgggctaccccaaatatcagaagtcgttgcctcctcgtttccagcggcagcagcaggagcagctcctgaagcagcagcagcagcaccagtggcagcagcatcaacagggctctgcccctcctaccccagtgcccccatcaccaccacagcctgtgaccctgggggctgtgccagctccacaggctccacccccgccccccaaggccctgtacccaggtgctctgggccggcccccacccatgcccccaatgaactttgatccccgatggatgatgattcctccttatgtggacccccggctcctccagggtcgtccccctctagacttctaccctcctggtgtgcatccctctggcctagttccccgagagcgttcagacagtgggggctcaagctcagagccatttgaccgtcatgcacctgctatgttacgggaacggggcactccaccggtggatccaaagttggcctgggtaggagatgtcttcaccgccacacccgctgaaccccgcccacttacctcacctctgcgccaggctgcggatgaggatgacaaggggatgaggagcgagactcctccagtacctcccccaccaccctatctggccagttatccaggctttcctgagaatggagcccctgggcccccaatctctcgctttcctctggaggaaccagggccccgtccactcccctggcccccaggcagtgatgaagtggccaagatacaaactccaccacccaagaaggagccccctaaggaggagactgcacagctgacggggccagaagcaggccgaaagcctgcccgcggagtcgggagtggaggccagggccccccaccaccacgcagagagagtcgcacagagacccgctggggccctcgtccagggagcagtcgtcgtggaatccctccagaggagccaggggccccaccccgccgggctgggcctataaagaaacctccaccacctacaaaagtagaagagctgcctcccaagcccctcgaacagggggatgaaacccccaaacccccaaagccagacccactcaagataaccaaggggaagctagggggccccaaggagaccccacccaatggaaatctttcccctgccccaaggcttcggagggactattcgtatgaaagagtgggtcctacctcttgccggggtcggggccgaggcgagtattttgccagagggaggggttttcgggggacctatgggggacgagggcggggagcccgaagccgggaattccgcagttaccgagagtttcgaggagatgatgggcgtggaggtgggacagggggaccaaaccaccctcctgctccccgaggccgcactgccagcgagacacggagcgagggttcagagtatgaggaaatccccaagcggcgccggcagcggggctcagaaacaggcagcgagacccatgagagtgatctggctccttcagacaaggaggctcccacacccaaggagggaacactcacccaggtccctctcgctcccccaccaccaggagccccaccttcaccagccccagcccgcttcactgcccggggtgggcgagtcttcactcccagaggggtgccatctcgccggggccgaggaggagggaggccccctcctcaagtttgcccaggctggagccctccagccaagtctctggctcccaagaaacctcccacaggccctttgccaccaagtaaggagcctttgaaagagaagttgatcccagggcctctgtcccctgtggcgcgcggaggcagcaatggaggtagcaatgtgggcatggaagatggggagcgaccccgaaggaggcgacatgggagggctcagcagcaggataaaccgcctcgtttccggaggctgaagcaggaacgggagaatgccgcaagggggtctgagggcaagccctccctaacccttccagcctccgctcctggacctgaggaggccctcacaacagtcacagtggccccagcacctcgccgggcagctgccaagtctcctgatctgtcaaaccagaactcagaccaagccaatgaggaatgggagactgcatcagagagcagtgacttcaccagtgagcgccgaggggacaaagaggcacccccaccagtactgctgacacccaaggctgtgggaactcctgggggaggtggaggtggagccgtaccaggtatttcagccatgtcccgcggagatctgagccagagagccaaggatttgagtaaacggagcttctcaagtcagcggccaggcatggaacggcagaatcggcgccctggcccagggggcaaggctggcagcagtggcagcagcagtggaggaggcggtgggggtcctggaggaaggaccgggccaggacgaggcgacaagaggagctggccctctcccaagaaccgaagtcgtcctccagaggagcgtcccccggggcttcccctgcctcccccacctcccagcagttctgctgtcttccgcctggaccaagttatccacagcaaccctgctggcatccaacaggctctggcccagcttagtagccgtcaagggagtgtaactgcaccagggggtcatccaaggcacaagcctgggcctccccaagcccctcagggcccctctcctaggcccccaacccgatacgagccccagagggtcaacagcggcctcagttctgacccccactttgaggagccggggccaatggtgagaggggtgggtgggactcctcgggactctgccggggttagtccctttccccctaaacgtcgggagcggcctcccagaaaaccagagctgctacaggaggaatctttgccacctcctcatagctctggattcttgggctctaagcctgagggcccaggccctcaggcagagtccagagatacaggcacagaggccctgacccctcacatctggaaccgtttacatactgccactagccgaaagagttaccggcccagctccatggagccttggatggagcccctgagtccttttgaggatgtggctggcacagaaatgagtcagtctgacagtggggtggacctgagtggggattctcaggtgtcatcaggtccctgcagccagcgaagttcccctgatggaggactcaagggggcagcagagggaccccccaagaggcctggaggctcctcacccctgaatgctgttccttgtgagggtccacctggctctgaacctcctaggagaccaccacctgccccccacgatggggacagaaaggagctgccccgggagcagcctctgccccctggccccattggcacagaacgatcacagcgtacagaccgaggcacagagcctggccccattcggccatcccatcgacctggtcccccagtccagtttggcactagtgacaaggactcagacttacgcctagtggtaggagacagcttgaaagcagagaaggagctaacagcatcagtcactgaggccattcctgtatcacgagactgggagctgcttcccagtgctgctgcctctgctgagccacaatccaagaacctggattctgggcactgtgtcccggagcccagctcctcaggccagcgcctgtatcctgaggttttctatggcagtgctgggccttccagttctcagatctctgggggagccatggactctcaattacatccaaacagtggaggcttccgccctgggacaccctcactgcacccttacagatcacagcccctatacctaccccccggcccagcccctccctcagcactgctctctggggtagctctcaagggccagtttctggatttctccacaatgcaagctacagagctggggaagttgccggctggaggagttctctaccctccaccttccttcctctactctccggctttctgccccagtcctttgcctgacacatcgttgcttcaggtacgccaggatctgccatccccttcggatttttattctactcctctgcagcctggtggccaaagtggctttctcccttcaggggctcctgcccagcagatgcttctacccatggtagactcacagctgcctgtggtgaactttggctccctgccgccagcaccacctcctgccccacctcccctttctctgttacctgtgggccctgctctgcagccccccagcctggctgtgcggcccccacctgctcctgctactcgggtgctgccttcacctgccaggcccttccccgctagcttggggcgagcagagctgcatccagtggaactaaagccgttccaggattatcaaaaactgagcagcaaccttgggggacctggatcatcacggactcccccaactggaaggtccttctctggcctcaattcccgtctcaaggccacgccttccacctacagtggagtcttccgcacccagcgcgtcgacctttaccagcaggcctccccaccagatgccctgcgctggatacctaagccttgggagcggacagggccgccacctcgagaagggccctcccgacgggcagaggagcctgggtcccgaggggacaaggagcctgggttgcccccaccccgctgagggagttcctcttgccccctacccccggggcttgtatatagattataaatatataagggggaaaggggtgggcggggaggggttgtggggctggggcctcacttcccctcctcccccttcccctggtcccctgtccctggggctgtttgttaaaaaagagtaataaaaggatttaaaaaaaaaaa

SEQ ID NO: 169572 - DNA, 6893 bp, Homo sapiens
  Payload ID: 13393
  Gene Symbol: PRRC2A
  Gene Name: proline-rich coiled-coil 2A
  Uniprot ID: P48634
  ENST ID: ENST00000414956
  CDS Start-End: 235-6708
cagccgcggagtgagcgagggagacgggaggagccgaacccggcgccatccgccgccatcctcccccgccccaccgccatcccgtcccggggagcccctaggcccgggtcccggatccccgcgcacccggccaggggacagagactgagacacttgctgtctggcccacaggctctggcacgttttgggggaggtgcctgcaggacccaacatactcaatgagcttccagcgcaatgtccgatcgctcggggccgactgccaagggaaaggatggaaagaagtattcctcgctcaacctgtttgatacgtataagggcaagtccttagagatccagaaacccgctgttgcccctcgccatggcctgcagagtctcgggaaagttgccattgcccggcgtatgccacctccagccaaccttccaagcctgaaagccgagaacaaaggcaatgaccccaatgtctcactagtgccaaaagacggaacaggatgggcaagcaaacaggagcagtccgaccccaagagttccgatgcctcaaccgctcagccgccggaatcgcagccactgccggcttcacagacgcctgcctccaaccagccgaaacgacccccagcagcccccgagaacactcctttggttccaagcggggtaaagtcctgggcacaagccagcgtcacccatggagcacatggagatggtggaagggcatcaagcctactgtcacgattctctcgagaggaatttccgaccctgcaggcggctggcgaccaggacaaggctgccaaggaaagggagtctgccgaacagtcgtctgggcccggaccaagcctccgcccccaaaattctacaacttggagggacggaggtgggcgtggccctgatgagctggagggcccggactccaaacttcatcatggtcatgatccccggggtgggctacagccttcaggcccaccccagttccctccctaccgcggaatgatgccgcctttcatgtatcccccatatctcccgttccctccgccctatggaccccaggggccttaccgataccccactcctgatgggcccagccgttttccccgtgtggcgggcccccgaggctcagggccaccaatgcgcttagtagagcctgtgggtcgtccctctattctcaaagaggataatctcaaagagtttgatcagttggatcaggagaatgatgatggttgggcaggggcccatgaagaggttgactacactgaaaagctcaagttcagcgatgaggaagatgggcgagactctgatgaggagggagctgagggccacagggattcccaatcagcttctggtgaggaacggccccctgaagcagatggcaaaaagggcaactcccccaacagcgaaccgcccactcctaagacggcctgggcagaaacctctcggcctccagagacagagccgggacctcctgccccaaagcctcccctacccccacctcaccggggccccgccgggaactggggcccccctggggactacccagatcgtgggggtcctccctgcaagcccccagcacctgaagatgaggatgaggcatggcggcagcgacgaaagcagtcgtcatctgagatttccctggcagtggagcgggcccggcgacggcgagaagaagaggagcggcgcatgcaagaagagcgccgggcagcctgtgctgagaagctcaagcgactcgatgaaaagtttggggcacctgacaagcggctcaaagcagagcctgctgccccacctgctgccccttctaccccagctccaccacctgcagtccctaaagaactccctgcacctccagctccacctccagcatcagccccaacaccagagacagaacctgaagagccagcacaggcccctcctgcccaatctactcctactccaggtgtggctgcggctcccactctggtgagtggtggtggcagtaccagtagcaccagcagtggcagcttcgaagccagcccagtggaaccacaactgccctcaaaagagggtcctgaaccaccagaagaggttcctcctcctaccacacccccagttccaaaggtggaacccaagggtgatgggattggtcccacccgccagccccctagtcagggcttgggctaccccaaatatcagaagtcgttgcctcctcgtttccagcggcagcagcaggagcagctcctgaagcagcagcagcagcaccagtggcagcagcatcaacagggctctgcccctcctaccccagtgcccccatcaccaccacagcctgtgaccctgggggctgtgccagctccacaggctccacccccgccccccaaggccctgtacccaggtgctctgggccggcccccacccatgcccccaatgaactttgatccccgatggatgatgattcctccttatgtggacccccggctcctccagggtcgtccccctctagacttctaccctcctggtgtgcatccctctggcctagttccccgagagcgttcagacagtgggggctcaagctcagagccatttgaccgtcatgcacctgctatgttacgggaacggggcactccaccggtggatccaaagttggcctgggtaggagatgtcttcaccgccacacccgctgaaccccgcccacttacctcacctctgcgccaggctgcggatgaggatgacaaggggatgaggagcgagactcctccagtacctcccccaccaccctatctggccagttatccaggctttcctgagaatggagcccctgggcccccaatctctcgctttcctctggaggaaccagggccccgtccactcccctggcccccaggcagtgatgaagtggccaagatacaaactccaccacccaagaaggagccccctaaggaggagactgcacagctgacggggccagaagcaggccgaaagcctgcccgcggagtcgggagtggaggccagggccccccaccaccacgcagagagagtcgcacagagacccgctggggccctcgtccagggagcagtcgtcgtggaatccctccagaggagccaggggccccaccccgccgggctgggcctataaagaaacctccaccacctacaaaagtagaagagctgcctcccaagcccctcgaacagggggatgaaacccccaaacccccaaagccagacccactcaagataaccaaggggaagctagggggccccaaggagaccccacccaatggaaatctttcccctgccccaaggcttcggagggactattcgtatgaaagagtgggtcctacctcttgccggggtcggggccgaggcgagtattttgccagagggaggggttttcgggggacctatgggggacgagggcggggagcccgaagccgggaattccgcagttaccgagagtttcgaggagatgatgggcgtggaggtgggacagggggaccaaaccaccctcctgctccccgaggccgcactgccagcgagacacggagcgagggttcagagtatgaggaaatccccaagcggcgccggcagcggggctcagaaacaggcagcgagacccatgagagtgatctggctccttcagacaaggaggctcccacacccaaggagggaacactcacccaggtccctctcgctcccccaccaccaggagccccaccttcaccagccccagcccgcttcactgcccggggtgggcgagtcttcactcccagaggggtgccatctcgccggggccgaggaggagggaggccccctcctcaagtttgcccaggctggagccctccagccaagtctctggctcccaagaaacctcccacaggccctttgccaccaagtaaggagcctttgaaagagaagttgatcccagggcctctgtcccctgtggcgcgcggaggcagcaatggaggtagcaatgtgggcatggaagatggggagcgaccccgaaggaggcgacatgggagggctcagcagcaggataaaccgcctcgtttccggaggctgaagcaggaacgggagaatgccgcaagggggtctgagggcaagccctccctaacccttccagcctccgctcctggacctgaggaggccctcacaacagtcacagtggccccagcacctcgccgggcagctgccaagtctcctgatctgtcaaaccagaactcagaccaagccaatgaggaatgggagactgcatcagagagcagtgacttcaccagtgagcgccgaggggacaaagaggcacccccaccagtactgctgacacccaaggctgtgggaactcctgggggaggtggaggtggagccgtaccaggtatttcagccatgtcccgcggagatctgagccagagagccaaggatttgagtaaacggagcttctcaagtcagcggccaggcatggaacggcagaatcggcgccctggcccagggggcaaggctggcagcagtggcagcagcagtggaggaggcggtgggggtcctggaggaaggaccgggccaggacgaggcgacaagaggagctggccctctcccaagaaccgaagtcgtcctccagaggagcgtcccccggggcttcccctgcctcccccacctcccagcagttctgctgtcttccgcctggaccaagttatccacagcaaccctgctggcatccaacaggctctggcccagcttagtagccgtcaagggagtgtaactgcaccagggggtcatccaaggcacaagcctgggcttccccaagcccctcagggcccctctcctaggcccccaacccgatacgagccccagagggtcaacagcggcctcagttctgacccccactttgaggagccggggccaatggtgagaggggtgggtgggactcctcgggactctgccggggttagtccctttccccctaaacgtcgggagcggcctcccagaaaaccagagctgctacaggaggaatctttgccacctcctcatagctctggattcttgggctctaagcctgagggcccaggccctcaggcagagtccagagatacaggcacagaggccctgacccctcacatctggaaccgtttacatactgccactagccgaaagagttaccggcccagctccatggagccttggatggagcccctgagtccttttgaggatgtggctggcacagaaatgagtcagtctgacagtggggtggacctgagtggggattctcaggtgtcatcaggtccctgcagccagcgaagttcccctgatggaggactcaagggggcagcagagggaccccccaagaggcctggaggctcctcacccctgaatgctgttccttgtgagggtccacctggctctgaacctcctaggagaccaccacctgccccccacgatggggacagaaaggagctgccccgggagcagcctctgccccctggccccattggcacagaacgatcacagcgtacagaccgaggcacagagcctggccccattcggccatcccatcgacctggtcccccagtccagtttggcactagtgacaaggactcagacttacgcctagtggtaggagacagcttgaaagcagagaaggagctaacagcatcagtcactgaggccattcctgtatcacgagactgggagctgcttcccagtgctgctgcctctgctgagccacaatccaagaacctggattctgggcactgtgtcccggagcccagctcctcaggccagcgcctgtatcctgaggttttctatggcagtgctgggccttccagttctcagatctctgggggagccatggactctcaattacatccaaacagtggaggcttccgccctgggacaccctcactgcacccttacagatcacagcccctatacctaccccccggcccagcccctccctcagcactgctctctggggtagctctcaagggccagtttctggatttctccacaatgcaagctacagagctggggaagttgccggctggaggagttctctaccctccaccttccttcctctactctccggctttctgccccagtcctttgcctgacacatcgttgcttcaggtacgccaggatctgccatccccttcggatttttattctactcctctgcagcctggtggccaaagtggctttctcccttcaggggctcctgcccagcagatgcttctacccatggtagactcacagctgcctgtggtgaactttggctccctgccgccagcaccacctcctgccccacctcccctttctctgttacctgtgggccctgctctgcagccccccagcctggctgtgcggcccccacctgctcctgctactcgggtgctgccttcacctgccaggcccttccccgctagcttggggcgagcagagctgcatccagtggaactaaagccgttccaggattatcaaaaactgagcagcaaccttgggggacctggatcatcacggactcccccaactggaaggtccttctctggcctcaattcccgtctcaaggccacgccttccacctacagtggagtcttccgcacccagcgcgtcgacctttaccagcaggcctccccaccagatgccctgcgctggatacctaagccttgggagcggacagggccgccacctcgagaagggccctcccgacgggcagaggagcctgggtcccgaggggacaaggagcctgggttgcccccaccccgctgagggagttcctcttgccccctacccccggggcttgtatatagattataaatatataagggggaaaggggtgggcggggaggggttgtggggctggggcctcacttcccctcctcccccttcccctggtcccctgtccctggggctgtttgttaaaaaagagtaataaaaggatttaaaaaaaaaaa

SEQ ID NO: 169573 - DNA, 6893 bp, Homo sapiens
  Payload ID: 13393
  Gene Symbol: PRRC2A
  Gene Name: proline-rich coiled-coil 2A
  Uniprot ID: P48634
  ENST ID: ENST00000432252
  CDS Start-End: 235-6708
cagccgcggagtgagcgagggagacgggaggagccgaacccggcgccatccgccgccatcctcccccgccccaccgccatcccgtcccggggagcccctaggcccgggtcccggatccccgcgcacccggccaggggacagagactgagacacttgctgtctggcccacaggctctggcacgttttgggggaggtgcctgcaggacccaacatactcaatgagcttccagcgcaatgtccgatcgctcggggccgactgccaagggaaaggatggaaagaagtattcctcgctcaacctgtttgatacgtataagggcaagtccttagagatccagaaacccgctgttgcccctcgccatggcctgcagagtctcgggaaagttgccattgcccggcgtatgccacctccagccaaccttccaagcctgaaagccgagaacaaaggcaatgaccccaatgtctcactagtgccaaaagacggaacaggatgggcaagcaaacaggagcagtccgaccccaagagttccgatgcctcaaccgctcagccgccggaatcgcagccactgccggcttcacagacgcctgcctccaaccagccgaaacgacccccagcagcccccgagaacactcctttggttccaagcggggtaaagtcctgggcacaagccagcgtcacccatggagcacatggagatggtggaagggcatcaagcctactgtcacgattctctcgagaggaatttccgaccctgcaggcggctggcgaccaggacaaggctgccaaggaaagggagtctgccgaacagtcgtctgggcccggaccaagcctccgcccccaaaattctacaacttggagggacggaggtgggcgtggccctgatgagctggagggcccggactccaaacttcatcatggtcatgatccccggggtgggctacagccttcaggcccaccccagttccctccctaccgcggaatgatgccgcctttcatgtatcccccatatctcccgttccctccgccctatggaccccaggggccttaccgataccccactcctgatgggcccagccgttttccccgtgtggcgggcccccgaggctcagggccaccaatgcgcttagtagagcctgtgggtcgtccctctattctcaaagaggataatctcaaagagtttgatcagttggatcaggagaatgatgatggttgggcaggggcccatgaagaggttgactacactgaaaagctcaagttcagcgatgaggaagatgggcgagactctgatgaggagggagctgagggccacagggattcccaatcagcttctggtgaggaacggccccctgaagcagatggcaaaaagggcaactcccccaacagcgaaccgcccactcctaagacggcctgggcagaaacctctcggcctccagagacagagccgggacctcctgccccaaagcctcccctacccccacctcaccggggccccgccgggaactggggcccccctggggactacccagatcgtgggggtcctccctgcaagcccccagcacctgaagatgaggatgaggcatggcggcagcgacgaaagcagtcgtcatctgagatttccctggcagtggagcgggcccggcgacggcgagaagaagaggagcggcgcatgcaagaagagcgccgggcagcctgtgctgagaagctcaagcgactcgatgaaaagtttggggcacctgacaagcggctcaaagcagagcctgctgccccacctgctgccccttctaccccagctccaccacctgcagtccctaaagaactccctgcacctccagctccacctccagcatcagccccaacaccagagaaagaacctgaagagccagcacaggcccctcctgcccaatctactcctactccaggtgtggctgcggctcccactctggtgagtggtggtggcagtaccagtagcaccagcagtggcagcttcgaagccagcccagtggaaccacaactgccctcaaaagagggtcctgaaccaccagaagaggttcctcctcctaccacacccccagttccaaaggtggaacccaagggtgatgggattggtcccacccgccagccccctagtcagggcttgggctaccccaaatatcagaagtcgttgcctcctcgtttccagcggcagcagcaggagcagctcctgaagcagcagcagcagcaccagtggcagcagcatcaacagggctctgcccctcctaccccagtgcccccatcaccaccacagcctgtgaccctgggggctgtgccagctccacaggctccacccccgccccccaaggccctgtacccaggtgctctgggccggcccccacccatgcccccaatgaactttgatccccgatggatgatgattcctccttatgtggacccccggctcctccagggtcgtccccctctagacttctaccctcctggtgtgcatccctctggcctagttccccgagagcgttcagacagtgggggctcaagctcagagccatttgaccgtcatgcacctgctatgttacgggaacggggcactccaccggtggatccaaagttggcctgggtaggagatgtcttcaccgccacacccgctgaaccccgcccacttacctcacctctgcgccaggctgcggatgaggatgacaaggggatgaggagcgagactcctccagtacctcccccaccaccctatctggccagttatccaggctttcctgagaatggagcccctgggcccccaatctctcgctttcctctggaggaaccagggccccgtccactcccctggcccccaggcagtgatgaagtggccaagatacaaactccaccacccaagaaggagccccctaaggaggagactgcacagctgacggggccagaagcaggccgaaagcctgcccgcggagtcgggagtggaggccagggccccccaccaccacgcagagagagtcgcacagagacccgctggggccctcgtccagggagcagtcgtcgtggaatccctccagaggagccaggggccccaccccgccgggctgggcctataaagaaacctccaccacctacaaaagtagaagagctgcctcccaagcccctcgaacagggggatgaaacccccaaacccccaaagccagacccactcaagataaccaaggggaagctagggggccccaaggagaccccacccaatggaaatctttcccctgccccaaggcttcggagggactattcgtatgaaagagtgggtcctacctcttgccggggtcggggccgaggcgagtattttgccagagggaggggttttcgggggacctatgggggacgagggcggggagcccgaagccgggaattccgcagttaccgagagtttcgaggagatgatgggcgtggaggtgggacagggggaccaaaccaccctcctgctccccgaggccgcactgccagcgagacacggagcgagggttcagagtatgaggaaatccccaagcggcgccggcagcggggctcagaaacaggcagcgagacccatgagagtgatctggctccttcagacaaggaggctcccacacccaaggagggaacactcacccaggtccctctcgctcccccaccaccaggagccccaccttcaccagccccagcccgcttcactgcccggggtgggcgagtcttcactcccagaggggtgccatctcgccggggccgaggaggagggaggccccctcctcaagtttgcccaggctggagccctccagccaagtctctggctcccaagaaacctcccacaggccctttgccaccaagtaaggagcctttgaaagagaagttgatcccagggcctctgtcccctgtggcgcgcggaggcagcaatggaggtagcaatgtgggcatggaagatggggagcgaccccgaaggaggcgacatgggagggctcagcagcaggataaaccgcctcgtttccggaggctgaagcaggaacgggagaatgccgcaagggggtctgagggcaagccctccctaacccttccagcctccgctcctggacctgaggaggccctcacaacagtcacagtggccccagcacctcgccgggcagctgccaagtctcctgatctgtcaaaccagaactcagaccaagccaatgaggaatgggagactgcatcagagagcagtgacttcaccagtgagcgccgaggggacaaagaggcacccccaccagtactgctgacacccaaggctgtgggaactcctgggggaggtggaggtggagccgtaccaggtatttcagccatgtcccgcggagatctgagccagagagccaaggatttgagtaaacggagcttctcaagtcagcggccaggcatggaacggcagaatcggcgccctggcccagggggcaaggctggcagcagtggcagcagcagtggaggaggcggtgggggtcctggaggaaggaccgggccaggacgaggcgacaagaggagctggccctctcccaagaaccgaagtcgtcctccagaggagcgtcccccggggcttcccctgcctcccccacctcccagcagttctgctgtcttccgcctggaccaagttatccacagcaaccctgctggcatccaacaggctctggcccagcttagtagccgtcaagggagtgtaactgcaccagggggtcatccaaggcacaagcctgggcctccccaagcccctcagggcccctctcctaggcccccaacccgatacgagccccagagggtcaacagcggcctcagttctgacccccactttgaggagccggggccaatggtgagaggggtgggtgggactcctcgggactctgccggggttagtccctttccccctaaacgtcgggagcggcctcccagaaaaccagagctgctacaggaggaatctttgccacctcctcatagctctggattcttgggctctaagcctgagggcccaggccctcaggcagagtccagagatacaggcacagaggccctgacccctcacatctggaaccgtttacatactgccactagccgaaagagttaccggcccagctccatggagccttggatggagcccctgagtccttttgaggatgtggctggcacagaaatgagtcagtctgacagtggggtggacctgagtggggattctcaggtgtcatcaggtccctgcagccagcgaagttcccctgatggaggactcaagggggcagcagagggaccccccaagaggcctggaggctcctcacccctgaatgctgttccttgtgagggtccacctggctctgaacctcctaggagaccaccacctgccccccacgatggggacagaaaggagctgccccgggagcagcctctgccccctggccccattggcacagaacgatcacagcgtacagaccgaggcacagagcctggccccattcggccatcccatcgacctggtcccccagtccagtttggcactagtgacaaggactcagacttacgcctagtggtaggagacagcttgaaagcagagaaggagctaacagcatcagtcactgaggccattcctgtatcacgagactgggagctgcttcccagtgctgctgcctctgctgagccacaatccaagaacctggattctgggcactgtgtcccggagcccagctcctcaggccagcgcctgtatcctgaggttttctatggcagtgctgggccttccagttctcagatctctgggggagccatggactctcaattacatccaaacagtggaggcttccgccctgggacaccctcactgcacccttacagatcacagcccctatacctacccccgggcccagcccctccctcagcactgctctctggggtagctctcaagggccagtttctggatttctccacaatgcaagctacagagctggggaagttgccggctggaggagttctctaccctccaccttccttcctctactctccggctttctgccccagtcctttgcctgacacatcgttgcttcaggtacgccaggatctgccatccccttcggatttttattctactcctctgcagcctggtggccaaagtggatttctcccttcaggggctcctgcccagcagatgcttctacccatggtagactcacagctgcctgtggtgaactttggctccctgccgccagcaccacctcctgccccacctcccctttctctgttacctgtgggccctgctctgcagccccccagcctggctgtgcggcccccacctgctcctgctactcgggtgctgccttcacctgccaggcccttccccgctagcttggggcgagcagagctgcatccagtggaactaaagccgttccaggattatcaaaaactgagcagcaaccttgggggacctggatcatcacggactcccccaactggaaggtccttctctggcctcaattcccgtctcaaggccacgccttccacctacagtggagtcttccgcacccagcgcgtcgacctttaccagcaggcctccccaccagatgccctgcgctggatacctaagccttgggagcggacagggccgccacctcgagaagggccctcccgacgggcagaggagcctgggtcccgaggggacaaggagcctgggttgcccccaccccgctgagggagttcctcttgccccctacccccggggcttgtatatagattataaatatataagggggaaaggggtgggcggggaggggttgtggggctggggcctcacttcccctcctcccccttcccctggtcccctgtccctggggctgtttgttaaaaaagagtaataaaaggatttaaaaaaaaaaa

SEQ ID NO: 169574 - DNA, 6861 bp, Homo sapiens
  Payload ID: 13393
  Gene Symbol: PRRC2A
  Gene Name: proline-rich coiled-coil 2A
  Uniprot ID: P48634
  ENST ID: ENST00000435971
  CDS Start-End: 203-6676
gggctcagccgcggagtgagcgagggagacgggaggagccgaacccggcgccatccgccgccatcctcccccgccccaccgccatcccgtcccggggagcccctaggcccgggtcccggatccccgcgcacccggccaggctctggcacgttttgggggaggtgcctgcaggacccaacatactcaatgagcttccagcgcaatgtccgatcgctcggggccgactgccaagggaaaggatggaaagaagtattcctcgctcaacctgtttgatacgtataagggcaagtccttagagatccagaaacccgctgttgcccctcgccatggcctgcagagtctcgggaaagttgccattgcccggcgtatgccacctccagccaaccttccaagcctgaaagccgagaacaaaggcaatgaccccaatgtctcactagtgccaaaagacggaacaggatgggcaagcaaacaggagcagtccgaccccaagagttccgatgcctcaaccgctcagccgccggaatcgcagccactgccggcttcacagacgcctgcctccaaccagccgaaacgacccccagcagcccccgagaacactcctttggttccaagcggggtaaagtcctgggcacaagccagcgtcacccatggagcacatggagatggtggaagggcatcaagcctactgtcacgattctctcgagaggaatttccgaccctgcaggcggctggcgaccaggacaaggctgccaaggaaagggagtctgccgaacagtcgtctgggcccggaccaagcctccgcccccaaaattctacaacttggagggacggaggtgggcgtggccctgatgagctggagggcccggactccaaacttcatcatggtcatgatccccggggtgggctacagccttcaggcccaccccagttccctccctaccgcggaatgatgccgcctttcatgtatcccccatatctcccgttccctccgccctatggaccccaggggccttaccgataccccactcctgatgggcccagccgttttccccgtgtggcgggcccccgaggctcagggccaccaatgcgcttagtagagcctgtgggtcgtccctctattctcaaagaggataatctcaaagagtttgatcagttggatcaggagaatgatgatggttgggcaggggcccatgaagaggttgactacactgaaaagctcaagttcagcgatgaggaagatgggcgagactctgatgaggagggagctgagggccacagggattcccaatcagcttctggtgaggaacggccccctgaagcagatggcaaaaagggcaactcccccaacagcgaaccgcccactcctaagacggcctgggcagaaacctctcggcctccagagacagagccgggacctcctgccccaaagcctcccctacccccacctcaccggggccccgccgggaactggggcccccctggggactacccagatcgtgggggtcctccctgcaagcccccagcacctgaagatgaggatgaggcatggcggcagcgacgaaagcagtcgtcatctgagatttccctggcagtggagcgggcccggcgacggcgagaagaagaggagcggcgcatgcaagaagagcgccgggcagcctgtgctgagaagctcaagcgactcgatgaaaagtttggggcacctgacaagcggctcaaagcagagcctgctgccccacctgctgccccttctaccccagctccaccacctgcagtccctaaagaactccctgcacctccagctccacctccagcatcagccccaacaccagagaaagaacctgaagagccagcacaggcccctcctgcccaatctactcctactccaggtgtggctgcggctcccactctggtgagtggtggtggcagtaccagtagcaccagcagtggcagcttcgaagccagcccagtggaaccacaactgccctcaaaagagggtcctgaaccaccagaagaggttcctcctcctaccacacccccagttccaaaggtggaacccaagggtgatgggattggtcccacccgccagccccctagtcagggcttgggctaccccaaatatcagaagtcgttgcctcctcgtttccagcggcagcagcaggagcagctcctgaagcagcagcagcagcaccagtggcagcagcatcaacagggctctgcccctcctaccccagtgcccccatcaccaccacagcctgtgaccctgggggctgtgccagctccacaggctccacccccgccccccaaggccctgtacccaggtgctctgggccggcccccacccatgcccccaatgaactttgatccccgatggatgatgattcctccttatgtggacccccggctcctccagggtcgtccccctctagacttctaccctcctggtgtgcatccctctggcctagttccccgagagcgttcagacagtgggggctcaagctcagagccatttgaccgtcatgcacctgctatgttacgggaacggggcactccaccggtggatccaaagttggcctgggtgggagatgtcttcaccgccacacccgctgaaccccgcccacttacctcacctctgcgccaggctgcggatgaggatgacaaggggatgaggagcgagactcctccagtacctcccccaccaccctatctggccagttatccaggctttcctgagaatggagcccctgggcccccaatctctcgctttcctctggaggaaccagggccccgtccactcccctggcccccaggcagtgatgaagtggccaagatacaaactccaccacccaagaaggagccccctaaggaggagactgcacagctgacggggccagaagcaggccgaaagcctgcccgcggagtcgggagtggaggccagggccccccaccaccacgcagagagagtcgcacagagacccgctggggccctcgtccagggagcagtcgtcgtggaatccctccagaggagccaggggccccaccccgccgggctgggcctataaagaaacctccaccacctacaaaagtagaagagctgcctcccaagcccctcgaacagggggatgaaacccccaaacccccaaagccagacccactcaagataaccaaggggaagctagggggccccaaggagaccccacccaatggaaatctttcccctgccccaaggcttcggagggactattcgtatgaaagagtgggtcctacctcttgccggggtcggggccgaggcgagtattttgccagagggaggggttttcgggggacctatgggggacgagggcggggagcccgaagccgggaattccgcagttaccgagagtttcgaggagatgatgggcgtggaggtgggacagggggaccaaaccaccctcctgctccccgaggccgcactgccagcgagacacggagcgagggttcagagtatgaggaaatccccaagcggcgccggcagcggggctcagaaacaggcagcgagacccatgagagtgatctggctccttcagacaaggaggctcccacacccaaggagggaacactcacccaggtccctctcgctcccccaccaccaggagccccaccttcaccagccccagcccgcttcactgcccggggtgggcgagtcttcactcccagaggggtgccatctcgccggggccgaggaggagggaggccccctcctcaagtttgcccaggctggagccctccagccaagtctctggctcccaagaaacctcccacaggccctttgccaccaagtaaggagcctttgaaagagaagttgatcccagggcctctgtcccctgtggcgcgcggaggcagcaatggaggtagcaatgtgggcatggaagatggggagcgaccccgaaggaggcgacatgggagggctcagcagcaggataaaccgcctcgtttccggaggctgaagcaggaacgggagaatgccgcaagggggtctgagggcaagccctccctaacccttccagcctccgctcctggacctgaggaggccctcacaacagtcacagtggccccagcacctcgccgggcagctgccaagtctcctgatctgtcaaaccagaactcagaccaagccaatgaggaatgggagactgcatcagagagcagtgacttcaccagtgagcgccgaggggacaaagaggcacccccaccagtactgctgacacccaaggctgtgggaactcctgggggaggtggaggtggagccgtaccaggtatttcagccatgtcccgcggagatctgagccagagagccaaggatttgagtaaacggagcttctcaagtcagcggccaggcatggaacggcagaatcggcgccctggcccagggggcaaggctggcagcagtggcagcagcagtggaggaggcggtgggggtcctggaggaaggaccgggccaggacgaggcgacaagaggagctggccctctcccaagaaccgaagtcgtcctccagaggagcgtcccccggggcttcccctgcctcccccacctcccagcagttctgctgtcttccgcctggaccaagttatccacagcaaccctgctggcatccaacaggctctggcccagcttagtagccgtcaagggagtgtaactgcaccagggggtcatccaaggcacaagcctgggcctccccaagcccctcagggcccctctcctaggcccccaacccgatacgagccccagagggtcaacagcggcctcagttctgacccccactttgaggagccggggccaatggtgagaggggtgggtgggactcctcgggactctgccggggttagtccctttccccctaaacgtcgggagcggcctcccagaaaaccagagctgctacaggaggaatctttgccacctcctcatagctctggattcttgggctctaagcctgagggcccaggccctcaggcagagtccagagatacaggcacagaggccctgacccctcacatctggaaccgtttacatactgccactagccgaaagagttaccggcccagctccatggagccttggatggagcccctgagtccttttgaggatgtggctggcacagaaatgagtcagtctgacagtggggtggacctgagtggggattctcaggtgtcatcaggtccctgcagccagcgaagttcccctgatggaggactcaagggggcagcagagggaccccccaagaggcctggaggctcctcacccctgaatgctgttccttgtgagggtccacctggctctgaacctcctaggagaccaccacctgccccccacgatggggacagaaaggagctgccccgggagcagcctctgccccctggccccattggcacagaacgatcacagcatacagaccgaggcacagagcctggccccattcggccatcccatcgacctggtcccccagtccagtttggcactagtgacaaggactcagacttacgcctagtggtaggagacagcttgaaagcagagaaggagctaacagcatcagtcactgaggccattcctgtatcacgagactgggagctgcttcccagtgctgctgcctctgctgagccacaatccaagaacctggattctgggcactgtgtcccggagcccagctcctcaggccagcgcctgtatcctgaggttttctatggcagtgctgggccttccagttctcagatctctgggggagccatggactctcagttacatccaaacagtggaggcttccgccctgggacaccctcactgcacccttacagatcacagcccctatacctaccccccggcccagcccctccctcagcactgctctctggggtagctctcaagggccagtttctggatttctccacaatgcaagctacagagctggggaagttgccggctggaggagttctctaccctccaccttccttcctctactctccggctttctgccccagtcctttgcctgacacatcgttgcttcaggtacgccaggatctgccatccccttcggatttttattctactcctctgcagcctggtggccaaagtggctttctcccttcaggggctcctgcccagcagatgcttctacccatggtagactcacagctgcctgtggtgaactttggctccctgccgccagcaccacctcctgccccaccttccctttctctgttacctgtgggccctgctctgcagccccccagcctggctgtgcggcccccacctgctcctgctactcgggtgctgccttcacctgccaggcccttccccgctagcttggggcgagcagagctgcatccagtggaactaaagccgttccaggattatcaaaaactgagcagcaaccttgggggacctggatcatcacggactcccccaactggaaggtccttctctggcctcaattcccgtctcaaggccacgccttccacctacagtggagtcttccgcacccagcgcgtcgacctttaccagcaggcctccccaccagatgccctgcgctggatacctaagccttgggagcggacagggccgccacctcgagaagggccctcccgacgggcagaggagcctgggtcccgaggggacaaggagcctgggttgcccccaccccgctgagggagttcctcttgccccctacccccggggcttgtatatagattataaatatataagggggaaaggggtgggcggggaggggttgtggggctggggcctcacttcccctcctcccccttcccctggtcccctgtccctggggctgtttgttaaaaaagagtaataaaaggatttaaaaaaaaaaa

SEQ ID NO: 169575 - DNA, 6861 bp, Homo sapiens; identical to SEQ ID NO: 169567
  Payload ID: 13393
  Gene Symbol: PRRC2A
  Gene Name: proline-rich coiled-coil 2A
  Uniprot ID: P48634
  ENST ID: ENST00000430737
  CDS Start-End: 203-6676

SEQ ID NO: 169576 - DNA, 6893 bp, Homo sapiens
  Payload ID: 13393
  Gene Symbol: PRRC2A
  Gene Name: proline-rich coiled-coil 2A
  Uniprot ID: P48634
  ENST ID: ENST00000416335
  CDS Start-End: 235-6708
cagccgcggagtgagcgagggagacgggaggagccgaacccggcgccatccgccgccatcctcccccgccccaccgccatcccgtcccggggagcccctaggcccgggtcccggatccccgcgcacccggccaggggacagagactgagacacttgctgtctggcccacaggctctggcacgttttgggggaggtgcctgcaggacccaacatactcaatgagcttccagcgcaatgtccgatcgctcggggccgactgccaagggaaaggatggaaagaagtattcctcgctcaacctgtttgatacgtataagggcaagtccttagagatccagaaacccgctgttgcccctcgccatggcctgcagagtctcgggaaagttgccattgcccggcgtatgccacctccagccaaccttccaagcctgaaagccgagaacaaaggcaatgaccccaatgtctcactagtgccaaaagacggaacaggatgggcaagcaaacaggagcagtccgaccccaagagttccgatgcctcaaccgctcagccgctggaatcgcagccactgccggcttcacagacgcctgcctccaaccagccgaaacgacccccagcagcccccgagaacactcctttggttccaagcggggtaaagtcctgggcacaagccagcgtcacccatggagcacatggagatggtggaagggcatcaagcctactgtcacgattctctcgagaggaatttccgaccctgcaggcggctggcgaccaggacaaggctgccaaggaaagggagtctgccgaacagtcgtctgggcccggaccaagcctccgcccccaaaattctacaacttggagggacggaggtgggcgtggccctgatgagctggagggcccggactccaaacttcatcatggtcatgatccccggggtgggctacagccttcaggcccaccccagttccctccctaccgcggaatgatgccgcctttcatgtatcccccatatctcccgttccctccgccctatggaccccaggggccttaccgataccccactcctgatgggcccagccgttttccccgtgtggcgggcccccgaggctcagggccaccaatgcgcttagtagagcctgtgggtcgtccctctattctcaaagaggataatctcaaagagtttgatcagttggatcaggagaatgatgatggttgggcaggggcccatgaagaggttgactacactgaaaagctcaagttcagcgatgaggaagatgggcgagactctgatgaggagggagctgagggccacagggattcccaatcagcttctggtgaggaacggccccctgaagcagatggcaaaaagggcaactcccccaacagcgaaccgcccactcctaagacggcctgggcagaaacctctcggcctccagagacagagccgggacctcctgccccaaagcctcccctacccccacctcaccggggccccgccgggaactggggcccccctggggactacccagatcgtgggggtcctccctgcaagcccccagcacctgaagatgaggatgaggcatggcggcagcgacgaaagcagtcgtcatctgagatttccctggcagtggagcgggcccggcgacggcgagaagaagaggagcggcgcatgcaagaagagcgccgggcagcctgtgctgagaagctcaagcgactcgatgaaaagtttggggcacctgacaagcggctcaaagcagagcctgctgccccacctgctgccccttctaccccagctccaccacctgcagtccctaaagaactccctgcacctccagctccacctccagcatcagccccaacaccagagaaagaacctgaagagccagcacaggcccctcctgcccaatctactcctactccaggtgtggctgcggctcccactctggtgagtggtggtggcagtaccagtagcaccagcagtggcagcttcgaagccagcccagtggaaccacaactgccctcaaaagagggtcctgaaccaccagaagaggttcctcctcctaccacacccccagttccaaaggtggaacccaagggtgatgggattggtcccacccgccagccccctagtcagggcttgggctaccccaaatatcagaagtcgttgcctcctcgtttccagcggcagcagcaggagcagctcctgaagcagcagcagcagcaccagtggcagcagcatcaacagggctctgcccctcctaccccagtgcccccatcaccaccacagcctgtgaccctgggggctgtgccagctccacaggctccacccccgccccccaaggccctgtacccaggtgctctgggccggcccccacccatgcccccaatgaactttgatccccgatggatgatgattcctccttatgtggacccccggctcctccagggtcgtccccctctagacttctaccctcctggtgtgcatccctctggcctagttccccgagagcgttcagacagtgggggctcaagctcagagccatttgaccgtcatgcacctgctatgttacgggaacggggcactccaccggtggatccaaagttggcctgggtaggagatgtcttcaccgccacacccgctgaaccccgcccacttacctcacctctgcgccaggctgcggatgaggatgacaaggggatgaggagcgagactcctccagtacctcccccaccaccctatctggccagttatccaggctttcctgagaatggagcccctgggcccccaatctctcgctttcctctggaggaaccagggccccgtccactcccctggcccccaggcagtgatgaagtggccaagatacaaactccaccacccaagaaggagccccctaaggaggagactgcacagctgacggggccagaagcaggccgaaagcctgcccgcggagtcgggagtggaggccagggccccccaccaccacgcagagagagtcgcacagagacccgctggggccctcgtccagggagcagtcgtcgtggaatccctccagaggagccaggggccccaccccgccgggctgggcctataaagaaacctccaccacctacaaaagtagaagagctgcctcccaagcccctcgaacagggggatgaaacccccaaacccccaaagccagacccactcaagataaccaaggggaagctagggggccccaaggagaccccacccaatggaaatctttcccctgccccaaggcttcggagggactattcgtatgaaagagtgggtcctacctcttgccggggtcggggccgaggcgagtattttgccagagggaggggttttcgggggacctatgggggacgagggcggggagcccgaagccgggaattccgcagttaccgagagtttcgaggagatgatgggcgtggaggtgggacagggggaccaaaccaccctcctgctccccgaggccgcactgccagcgagacacggagcgagggttcagagtatgaggaaatccccaagcggcgccggcagcggggctcagaaacaggcagcgagacccatgagagtgatctggctccttcagacaaggaggctcccacacccaaggagggaacactcacccaggtccctctcgctcccccaccaccaggagccccaccttcaccagccccagcccgcttcactgcccggggtgggcgagtcttcactcccagaggggtgccatctcgccggggccgaggaggagggaggccccctcctcaagtttgcccaggctggagccctccagccaagtctctggctcccaagaaacctcccacaggccctttgccaccaagtaaggagcctttgaaagagaagttgatcccagggcctctgtcccctgtggcgcgcggaggcagcaatggaggtagcaatgtgggcatggaagatggggagcgaccccgaaggaggcgacatgggagggctcagcagcaggataaaccgcctcgtttccggaggctgaagcaggaacgggagaatgccgcaagggggtctgagggcaagccctccctaacccttccagcctccgctcctggacctgaggaggccctcacaacagtcacagtggccccagcacctcgccgggcagctgccaagtctcctgatctgtcaaaccagaactcagaccaagccaatgaggaatgggagactgcatcagagagcagtgacttcaccagtgagcgccgaggggacaaagaggcacccccaccagtactgctgacacccaaggctgtgggaactcctgggggaggtggaggtggagccgtaccaggtatttcagccatgtcccgcggagatctgagccagagagccaaggatttgagtaaacggagcttctcaagtcagcggccaggcatggaacggcagaatcggcgccctggcccagggggcaaggctggcagcagtggcagcagcagtggaggaggcggtgggggtcctggaggaaggaccgggccaggacgaggcgacaagaggagctggccctctcccaagaaccgaagtcgtcctccagaggagcgtcccccggggcttcccctgcctcccccacctcccagcagttctgctgtcttccgcctggaccaagttatccacagcaaccctgctggcatccaacaggctctggcccagcttagtagccgtcaagggagtgtaactgcaccagggggtcatccaaggcacaagcctgggcctccccaagcccctcagggcccctctcctaggcccccaacccgatacgagccccagagggtcaacagcggcctcagttctgacccccactttgaggagccggggccaatggtgagaggggtgggtgggactcctcgggactctgccggggttagtccctttccccctaaacgtcgggagcggcctcccagaaaaccagagctgctacaggaggaatctttgccacctcctcatagctctggattcttgggctctaagcctgagggcccaggccctcaggcagagtccagagatacaggcacagaggccctgacccctcacatctggaaccgtttacatactgccactagccgaaagagttaccggcccagctccatggagccttggatggagcccctgagtccttttgaggatgtggctggcacagaaatgagtcagtctgacagtggggtggacctgagtggggattctcaggtgtcatcaggtccctgcagccagcgaagttcccctgatggaggactcaagggggcagcagagggaccccccaagaggcctggaggctcctcacccctgaatgctgttccttgtgagggtccacctggctctgaacctcctaggagaccaccacctgccccccacgatggggacagaaaggagctgccccgggagcagcctctgccccctggccccattggcacagaacgatcacagcgtacagaccgaggcacagagcctggccccattcggccatcccatcgacctggtcccccagtccagtttggcactagtgacaaggactcagacttacgcctagtggtaggagacagcttgaaagcagagaaggagctaacagcatcagtcactgaggccattcctgtatcacgagactgggagctgcttcccagtgctgctgcctctgctgagccacaatccaagaacctggattctgggcactgtgtcccggagcccagctcctcaggccagcgcctgtatcctgaggttttctatggcagtgctgggccttccagttctcagatctctgggggagccatggactctcaattacatccaaacagtggaggcttccgccctgggacaccctcactgcacccttacagatcacagcccctatacctaccccccggcccagcccctccctcagcactgctctctggggtagctctcaagggccagtttctggatttctccacaatgcaagctacagagctggggaagttgccggctggaggagttctctaccctccaccttccttcctctactctccggctttctgccccagtcctttgcctgacacatcgttgcttcaggtacgccaggatctgccatccccttcggatttttattctactcctctgcagcctggtggccaaagtggctttctcccttcaggggctcctgcccagcagatgcttctacccatggtagactcacagctgcctgtggtgaactttggctccctgccgccagcaccacctcctgccccacctcccctttctctgttacctgtgggccctgctctgcagccccccagcctggctgtgcggcccccacctgctcctgctactcgggtgctgccttcacctgccaggcccttccccgctagcttggggcgagcagagctgcatccagtggaactaaagccgttccaggattatcaaaaactgagcagcaaccttgggggacctggatcatcacggactcccccaactggaaggtccttctctggcctcaattcccgtctcaaggccacgccttccacctacagtggagtcttccgcacccagcgcgtcgacctttaccagcaggcctccccaccagatgccctgcgctggatacctaagccttgggagcggacagggccgccacctcgagaagggccctcccgacgggcagaggagcctgggtcccgaggggacaaggagcctgggttgcccccaccccgctgagggagttcctcttgccccctacccccggggcttgtatatagattataaatatataagggggaaaggggtgggcggggaggggttgtggggctggggcctcacttcccctcctcccccttcccctggtcccctgtccctggggctgtttgttaaaaaagagtaataaaaggatttaaaaaaaaaaa

SEQ ID NO: 169577 - DNA, 6893 bp, Homo sapiens; identical to SEQ ID NO: 169566
  Payload ID: 13393
  Gene Symbol: PRRC2A
  Gene Name: proline-rich coiled-coil 2A
  Uniprot ID: P48634
  ENST ID: ENST00000422962
  CDS Start-End: 235-6708

SEQ ID NO: 169578 - DNA, 4950 bp, Homo sapiens
  Payload ID: 13394
  Gene Symbol: PRRC2B
  Gene Name: proline-rich coiled-coil 2B
  ENST ID: ENST00000320547
  CDS Start-End: 1-535
cagatctcaggtgtacatgcaccccagcctgtcaccgcccagcaccatgatcctctctgggggcacagccttgaagcctccatactcggcgttcccaggcatgcagcccttggagatggtgaagccgcagtctggctcaccctaccagcccatgagcgggaaccaagccctggtctacgagggccagctcagccaggctgctggcctgggtgcctcccagatgttggactcccagctcccacagctgaccatgccactgcctcggtacggctccgggcagcagccactgatcctgccccagtctattcagctgccacctgggcagagcctctccgttggggccccccgaaggattcctccgcccgggtcccagccgccagtcctgaacaccagcagagagccctctcagatggagatgaaaggcttccactttgccgacagtaaacagaatgtcccttcaggaggccccgtgccatcgccacagacctacaggcaaaacaacgagtggatgagaaacccagcctgggagccgtgaagctgcaggaggccccctcggctgcctcccagatgaagcgaaccggagcgatcaagcctcgggctgtcaaagtggaggagagtaaggcctgacagtgcctggctgccacctcgcctctccctactgaggacggtgccgccatgcggcctcgacacagccgacactcgggagcctcaccagatccaccgtccaaatgcgtggcccagactgagagacctccctcctctccactcccgaaagctccgttgtcaaccagcttgcacccgtggatatatggcattgacccgcttgctttgatacgaaacaaaaaagcagacgactccttcatcccatctgctcctaccgtgactgtggagtgacgcctcctgtgcagtgcagatttgccctccctgcctcctccctgtcctgccgcgcagccagggcgccttctcagcagtgcttccggcccagccgcccatccctaggcacagtgatttggcagcagggtcattttactttgaggctttttgttttaaaatgtagccaaggtttttacaaaggggaaaggaaaagaaaacaaaaacgcaagctccatgtgtatagctgaacttttatatgtttcttgccagcccctccgctcccttccatctctagcctctgtcctgtttagtttgatacgtcactgcagtaccttaagaggtgactcttaagaatgcatcccctcctgattcctcagctggttcacccttgaggttatttgcaaaaagaaaaggaggttcttgagggcaccgattgcgagcattctggtgcctggctccccgcctgggaagcgatggggtgctcagagcagcaggcaggttgggggagggggggggtcatagttgggttccagctcctggcttgatgagcccagggcgcttacaggcagcccatgaagttgatgacagttttagcatgagaatcacacagggtccctgtcctgggctcctctaaagccagtggatgtgctgggcaccagagacaaatcatggagatggctgctggtggctcccaggttggcccagatggggtgagctgacataccacaggcccatcccaggccccgtgggctctgcttctggggctccataccctgccctgcaggggtgctgtgtttttcacacatttctttccctgaagccttctgtaacctgtcattttccttccttcctcttccggagcctgctgctttctctggacctgtctccacctcccacacagctcatcgtgaacaccacttggtgatggagggagtggacccgtgtgtggtccccaagtgaggccactgggagtttgtccttttcctcctttgcttcactcccagcagcagacccaggttgtcaggacaggagggcctgagctaagcagtaggcatcagtctcgtttgtcttcagacggcgggggcaggtccagggtgaggctgggtggagggctgaccaaggtccaaagggcctgcgcagcctccgggagggcagcttctccagccagaggcttgtgtgagccatcgtgtgctgggcttgtttttaagtaagaaacaaggaaatcactccagattctgtcattccaaggaaagggaaggggacagttcaggtttctcagctgttcttaggggtcactgagcgtctacctcctcctccagaggaggctggctcagaacacctagaggagggggccggggatgcaccccccaccagaggctgccttcagcgtctcacgggtgcaggacagcgctcaggcttgggctctaagctctgtgtctagtgtagaacatggggaaggagcatcttaggaactgctgaagtaacttcttactgctctcacaattctaaggaagcgggagaacggcctcctaccaacagcgcccaccccagagctgcctgggaaagggcagttttactgaaaggtgctttactgttcacctgcatctttcagcagctcccctcctgccctcacctggtcttttccctctttatcccaagcctttatgcttgagtcccttccccaggggctgcccacccgacagttccaggcattccctacctgagcttcttgtctgcttttccttctcccactgcaagcggctgcttgtggggcctgggatgagccctctctgtccccaccggccctccttgccaagccattcctgggtgagttcaggcctgcgggagccacacattcatctccacctggacacttgagccgcatggccagacccctcccacctgatgcggtggtgcgtgtgatttgtcaaaagaaagccttctggatgctgttaagatgtacccttcaggtgaacctggtatcagacccacagtacttgctgtttgagaaaaaataaaaacaaaaaggtcacctgttctccagcccttttctcttacctggtatttccttcctttctcctcccccaccccaaataaaaaaacaaaaaacactagaatttatttatatgtattgatgttgtaggtctaggtgaaaaaaaaagaagtaaatgtttcactgctctatttatatataatgtctgaattaattctgtgcaggaaaggccaggaaattgcatgtgaagttcggtgcagtcaccacctgtgtgtgacctgagctgcagtctcttcgctgagatgcaggttttaaatgagacttggggggctgagggcaggcctcaggcctcccagcgccccaacccctccttggtctaatgaaatgcagttcttagtgcagagatgttttaaggtgcaatatatctcttcctttcccgtggttttagagccaagctcaaggtagtaggacgtagggtcttattttgttttcaaacccccatcctcagagcgcagatacatgcagaggcttctgccaggataccacggggccttagtgggaacaggtggagaccagcacttccctttcctgctgctgaggtagggattggggggtcagaacccactcacttttgcctgttaaagttgccctcctgacgctggcagctctgccttggtcactggggatgcggctcgttgctcagccaccagtggccttgcggtattgtccaccatccactagagtgggatgaagtccagagtgtgggtatacatctcagatgcccatctacccactggggacttcaatgccagctgcatttggtttggttttcttaactgttggcttctccccacagcgttttttgtttttttttaaacattcatattgttttcaaacttggaattcatagacactctggctctaggttccttaagggggaaaacaaaagatgactttatttcacattcaagaaaatcagttcagttccaaagctgtggtccttccagccacttctagggacactggggaaccttgttaaacgttgacatcagtgctctccagccgtgctgtcaccctcctatcttctggatctgccttcgcgatggtcagtgacagcttctggaagctgagcacacacaggtgcacagccatgctgtggtctggcctgctacggcagcatggcagctctggtggagccttctcccttgccatttggttcccctgtgccaagtagctgcaggctgcccctcaaatcttcatttgtcccttttcacttcctgcagaacaagcctgggttagagggtctgctggaaatggcctttgaagaccaaggataccaggatgtgtgcactctgtcgtgttctgtgatgaatgggaaacgtaggcttccagaaagccagctctcttctgaaatgtgacggacctaagcaggaagtcatccaggacaggagtggctcagtgttggggatggacgctgtcgcccagccatgctccaccagggccaccaatgtgtagttggctggtggtcttcgggcatgtgagacctgctcttcactgtttccaccccacttggtggcctccaggatggtagtggcaccctcagagccccatcttcagcatgttctgaagcctcagagtggaaattcctgctaaggctctgtgtggacgcctttctcccgtgatctaaaggggacactgtactcaagcttttgacctcatgccttgtgtagtaaaaaaggatttgggggttttgtttggttcctgagagggttgtgttttgtttttgtttccttttgtttatgttttggcctttcctctttgtctttccatgtagaccagatatttgaaagggcagacgatggctagaggtgtaatgtgcagcttgtttatacggtattttgggaaacttaccttggatgggaaatcgaatcgtggattcaccaggccggtgctggcacactcaccctcgccctttccctccggttcagtacctattgtttctcctttcaaatatgtgattgtactagctctttccatatgaaagaattctccttatttaaataaaaaaagtttaaaaagataaa

SEQ ID NO: 169579 - DNA, 11042 bp, Homo sapiens
  Payload ID: 13394
  Gene Symbol: PRRC2B
  Gene Name: proline-rich coiled-coil 2B
  Uniprot ID: Q5JSZ5
  ENST ID: ENST00000357304
  CDS Start-End: 56-6745
gcagatcgggagcggtgccgagaaaaatttccttactagatgacatttcatcgcaatgtccgatcgtttggggcaaattaccaagggcaaggatgggaaaagcaagtactcgactctcagcctgtttgataagtataaaggaaaatcagtagacgcgattagatcctcagttattcctagacatggcttacagagtcttgggaaagttgctgcagcccggcgcatgccaccgcctgcaaacctgccaagcttgaagtctgaaaacaaaggaaacgaccccaacatcgtgatagtacccaaggacgggacgggatgggcaaacaagcaggatcagcaagacccaaagagttccagtgcgacggcctctcagccgccggagtcgctgccgcagccgggtttgcagaaatctgtctccaatttgcagaaaccgacacagtcaatcagtcaggagaatacaaattcagtgccaggtggaccaaagtcatgggcacagctgaatggaaagccagtaggacacgaaggtggtttaaggggctcaagccgactgttatccttctctcccgaggaatttccgacgctgaaagcagctggagggcaggacaaggctggcaaagaaaagggcgtcttagatctgtcgtatgggccaggaccaagcctccgccctcagaatgtgacaagctggagggagggcggtgggcgacacataatttctgccacgtctctgagcacctccccaactgagctgggcagcaggaactcgagtacgggagatggagccccctcctcggcatgtaccagcgattctaaggacccctctctccgcccggctcagcctgtccgaaaaggggcttcacagttcatgggaaatgtataccacccacctacataccatgacatgcttcctgcttttatgtgttcgccgaagtcatcagaaaaccagggtacagtggaacgaggctcttttccccttcctcagctccgccttgaacctcgagttccttttagacagttccagatgaatgaccaagacggaaaagaaaacaggctgggattgtctcgcccactccgcccactaaggcagctggtggagcgggcaccacggcccaccattatcaatgcggaaaacctgaagggccttgacgatctggacgccgatgccgatgatggctgggcaggcctccatgaagaagtggactattctgagaaactgaagttcagtgatgatgaagaggaggaagaagttgtgaaggacggcaggccaaagtggaacagttgggaccctaggaggcagcggcagttgtcaatgagctctgcagacagtgcggacgctaagcggactcgagaggaagggaaggactgggctgaagcagtgggtgcgtcccgtgtggtccgaaaggcgccagaccctcagccaccgcccaggaagcttcatggctgggcaccaggccctgactaccagaagtcatcaatgggcagcatgttccggcaacagtccatcgaggacaaggaggacaagcccccaccaaggcagaagttcattcagtcagagatgtccgaggcggtggagcgagcccgaaagcgccgggaagaagaggagcgccgagcccgggaggagaggctggccgcctgtgctgccaaactcaagcagctggaccagaagtgtaagcaggcacgaaaggcaggtgaggcccggaagcaggcagagaaggaagtgccctggtctccaagtgctgagaaggcatctccccaggaaaacggccctgctgtccacaaaggctccccagaattccctgcccaagagacccccaccacattcccagaagaggcacccacagtgtccccagcagtggcacagagcaacagcagtgaggaagaggccagagaggctgggtcccctgcacaggagttcaagtatcagaagtcccttcctccccgattccagcgccagcagcagcaacaacagcaggagcagctgtacaagatgcagcactggcagccggtgtaccccccgccgtcccacccccagcgcaccttttacccacaccacccccagatgttgggcttcgatcccaggtggatgatgatgccttcctacatggacccacgtatcacgcccactcggaccccggtggacttctacccctccgccctgcatccctcaggactgatgaagcccatgatgccccaggagtccctcaatgggacaggctgtcgctctgaggatcagaactgtgtgcccccactccaagaaagaaaagtgacccccatcgactcaccccctgtgtggagcccagagggctacatggcactgcagagcaagggctacccgctcccgcacccgaagtcgagtgacaccttggctatggacatgcgtgtcaggaatgaaagctctttctctgcctcactcggaagggcagggggcgtaagtgctcagcgcgatctctttgaggagagaggggaggagtacttgagtgcttttgacaagaaggcccaagcagactttgacagctgtatctcttctcaaagaataggccaggagcttttgtttccaccccaagaaaatgttcaggatgcaggtgctcctgggggtcacacccaaaacctcaggtgttccccattggagcctgactttgtcccagatgagaaaaagccagagtgtggcagttgggatgttagccaccagccagagaccgctgacacagcccatggtgttgagcgggagacaccccgggaggggacggcctttaacatctcctcctgggacaagaacgggagccccaacaaacagccatcctcggagcctgaatggactcccgagccccggagctccagcagccagcacccggagcagacgggcaggacccggaggtcgggacccatcaagaaaccagtcctgaaagccctcaaggtggaagacaaggagaaggagcttgagaagattaagcaggagctaggggaggagagtacccggctggccaaggagaaggagcagagccccacggcagaaaaggatgaggacgaagagaacgatgcctctctggccaactcctccaccaccactttggaggacaaaggccctggccatgccacttttggccgcgaggccaccaaatttgaagaggaggagaaacctgacaaggcctgggaagccagacccccacgagagtccagcgatgttccccccatgaagagaaataactggatctttattgatgaggagcaagcctttggggtcagaggacaggcccggggccggggccgtggtttcagagagttcacttttcgtggtcggcctgctggcggaaatgggagcggcctctgtggtgggggggtcctgggggcccgcagcatctactgcagcagtcagcgcagcggccgtggccggggcctgcgagagtttgcgcggccagaggactgccccagagccaagccccgacggagagttgccagtgagacccatagcgagggctcagagtatgaagaacttcccaagcgccgccggcagaggggctccgagaacgggaatgaaggctcgctcctggagagggaggagagcaccttgaagaagggcgactgcagagattcttggcggtccaacaaggggtgctctgaggaccacagcggtctagatgccaagagccgaggccctcgggcctttgggcgagccctccctccccggctgagcaattgcgggtatggacggagaaccttcgtctccaaagagtcaccccactggcagagcaaaagtccaggcagctcttggcaggaatatggcccttccgacacatgcggatcccggcgacctacagacagagactatgtcccagattcctacagacaccctgacgcatttggtggccggggctttgaggacagccgcgcggaggacaagagatccttcttccaagatgaacacgtggcagattctgaaaatgcagagaaccggcccttcaggagaaggcgccccccacgccaagataagccccctcgattccggcgcctccggcaagagcgggagtccctgggcctgtggggacccgaggaggagccccacctgctggcaggtcagtggccaggcaggcccaaactgtgttctggggacaagagtggcactgtgggccgcaggtcccctgagctctcctaccagaactcctccgatcacgccaatgaggagtgggagacggcctccgaaagcagcgacttcagcgagcggcgggagcggcgggaaggccctgggtccgagcccgactcccaggtggatggtggcctgtcgggggctagtttgggtgagaagaaggagctggccaagaggagcttctccagtcagagacccgtggttgacagacagagccgaaagctggagccgggagggtttggggagaagcccgttaggccaggtggtggtgacacctcccctcgctatgagagccaacagaatgggacgcctttgaaagtgaaaagatccccagacgaggccttgcctggaggtcttagtggctgcagcagtgggagtggccactccccctatgccctggagcgggcagcccatgccagtgctgaccttcccgaagcctccagtaaaaaggcagagaaggaggccaagttggctgctccgagggcaggtgaacagggagaggccatgaaacagtttgacctgaactatggaagtgccatcattgaaaattgcgggtccagccccggggaggagagtgaggtgggttctatggtgggcgaaggcttcatcgaagtcctgaccaagaagcagcgccgcctgctggaggaagagagaagaaagaaggagcaggccgtgcaggtgcctgtcaaaggtcgaggcctttcctcccgtattcctcctcgatttgcaaaaaagcagaacaacttatgtctggagcaaggtgacgtgaccgtgcctggcagcagcctgggcactgagatctgggagagcagcagccaggctctccctgtgcaggccccagccaacgactcctggaggaaagctgtcactgccttcagcagcaccgagactggctctgcggagcagggttttaagagcagccagggagatagtggcgttgacttgagtgccgagtctcgggagtcgtctgcgacctcctcgcagcgcagctccccatatgggactctgaagccagaggagatgagcgggcccggcctggcggaacccaaggccgacagccacaaggagcaggctccaaagccatctgagcagaaggattcagaacaaggctctggacagagcaaggagcacagaccaggacccatcggcaacgagcgttctctgaaaaacagaaagggctcggagggggccgagcggctgcaaggggctgtcgtcccgcctgttaacggggtggagattcacgtggactccgtgctgcctgtgccacccattgaatttggagtcagtccaaaagactccgatttcagcttgccacctggttctgcctctggtcctactgggagtccagttgttaaacttcaggatgccttggccagtaatgcagggttaacacagagtatccccatcctgcggcgggaccatcacatccagagggccatcggtctctccccaatgtccttccccaccgccgaccttactctgaagatggagtctgcgcgcaaggcttgggaaaactcccccagtttgccggagcagagctctccaggcggcgctggctcaggcatccagcctccatcctctgtgggtgcctccagcggggtcaactacagctccttcggtggagtgtccatgccacccatgcctgtggcctctgtagcaccttctgcttctatgccaggcagccacctcccgcccctgtacctggatggccatgtgtttgcaagtcagccccggctggttcctcaaacgatacctcagcagcagagttaccaacaggccgccgctgcccagcagatcccgatctcccttcacacatctctgcaggcacaagctcagcttggactgaggggtgggcttcctgtgtcccagtcccaggagatcttcagctccttgcagcccttcagatctcaggtgtacatgcaccccagcctgtcaccgcccagcaccatgatcctctctgggggcacagccttgaagcctccatactcggcgttcccaggcatgcagcccttggagatggtgaagccgcagtctggctcaccctaccagcccatgagcgggaaccaagccctggtctacgagggccagctcagccaggctgctggcctgggtgcctcccagatgttggactcccagctcccacagctgaccatgccactgcctcggtacggctccgggcagcagccactgatcctgccccagtctattcagctgccacctgggcagagcctctccgttggggccccccgaaggattcctccgcccgggtcccagccgccagtcctgaacaccagcagagagccctctcagatggagatgaaaggcttccactttgccgacagtaaacagaatgtcccttcaggaggccccgtgccatcgccacagacctacaggcctagctctgctagccccagtgggaagccctctggatcagcagttaacatgggctctgtgcagggacactacgtgcaacaggcaaaacaacgagtggatgagaaacccagcctgggagccgtgaagctgcaggaggccccctcggctgcctcccagatgaagcgaaccggagcgatcaagcctcgggctgtcaaagtggaggagagtaaggcctgacagtgcctggctgccacctcgcctctccctactgaggacggtgccgccatgcggcctcgacacagccgacactcgggagcctcaccagatccaccgtccaaatgcgtggcccagactgagagacctccctcctctccactcccgaaagctccgttgtcaaccagcttgcacccgtggatatatggcattgacccgcttgctttgatacgaaacaaaaaagcagacgactccttcatcccatctgctcctaccgtgactgtggagtgacgcctcctgtgcagtgcagatttgccctccctgcctcctccctgtcctgccgcgcagccagggcgccttctcagcagtgcttccggcccagccgcccatccctaggcacagtgatttggcagcagggtcattttactttgaggctttttgttttaaaatgtagccaaggtttttacaaaggggaaaggaaaagaaaacaaaaacgcaagctccatgtgtatagctgaacttttatatgtttcttgccagcccctccgctcccttccatctctagcctctgtcctgtttagtttgatacgtcactgcagtaccttaagaggtgactcttaagaatgcatcccctcctgattcctcagctggttcacccttgaggttatttgcaaaaagaaaaggaggttcttgagggcaccgattgcgagcattctggtgcctggctccccgcctgggaagcgatggggtgctcagagcagcaggcaggttgggggagggggggggtcatagttgggttccagctcctggcttgatgagcccagggcgcttacaggcagcccatgaagttgatgacagttttagcatgagaatcacacagggtccctgtcctgggctcctctaaagccagtggatgtgctgggcaccagagacaaatcatggagatggctgctggtggctcccaggttggcccagatggggtgagctgacataccacaggcccatcccaggccccgtgggctctgcttctggggctccataccctgccctgcaggggtgctgtgtttttcacacatttctttccctgaagccttctgtaacctgtcattttccttccttcctcttccggagcctgctgctttctctggacctgtctccacctcccacacagctcatcgtgaacaccacttggtgatggagggagtggacccgtgtgtggtccccaagtgaggccactgggagtttgtccttttcctcctttgcttcactcccagcagcagacccaggttgtcaggacaggagggcctgagctaagcagtaggcatcagtctcgtttgtcttcagacggcgggggcaggtccagggtgaggctgggtggagggctgaccaaggtccaaagggcctgcgcagcctccgggagggcagcttctccagccagaggcttgtgtgagccatcgtgtgctgggcttgtttttaagtaagaaacaaggaaatcactccagattctgtcattccaaggaaagggaaggggacagttcaggtttctcagctgttcttaggggtcactgagcgtctacctcctcctccagaggaggctggctcagaacacctagaggagggggccggggatgcaccccccaccagaggctgccttcagcgtctcacgggtgcaggacagcgctcaggcttgggctctaagctctgtgtctagtgtagaacatggggaaggagcatcttaggaactgctgaagtaacttcttactgctctcacaattctaaggaagcgggagaacggcctcctaccaacagcgcccaccccagagctgcctgggaaagggcagttttactgaaaggtgctttactgttcacctgcatctttcagcagctcccctcctgccctcacctggtcttttccctctttatcccaagcctttatgcttgagtcccttccccaggggctgcccacccgacagttccaggcattccctacctgagcttcttgtctgcttttccttctcccactgcaagcggctgcttgtggggcctgggatgagccctctctgtccccaccggccctccttgccaagccattcctgggtgagttcaggcctgcgggagccacacattcatctccacctggacacttgagccgcatggccagacccctcccacctgatgcggtggtgcgtgtgatttgtcaaaagaaagccttctggatgctgttaagatgtacccttcaggtgaacctggtatcagacccacagtacttgctgtttgagaaaaaataaaaacaaaaaggtcacctgttctccagcccttttctcttacctggtatttccttcctttctcctcccccaccccaaataaaaaaacaaaaaacactagaatttatttatatgtattgatgttgtaggtctaggtgaaaaaaaaagaagtaaatgtttcactgctctatttatatataatgtctgaattaattctgtgcaggaaaggccaggaaattgcatgtgaagttcggtgcagtcaccacctgtgtgtgacctgagctgcagtctcttcgctgagatgcaggttttaaatgagacttggggggctgagggcaggcctcaggcctcccagcgccccaacccctccttggtctaatgaaatgcagttcttagtgcagagatgttttaaggtgcaatatatctcttcctttcccgtggttttagagccaagctcaaggtagtaggacgtagggtcttattttgttttcaaacccccatcctcagagcgcagatacatgcagaggcttctgccaggataccacggggccttagtgggaacaggtggagaccagcacttccctttcctgctgctgaggtagggattggggggtcagaacccactcacttttgcctgttaaagttgccctcctgacgctggcagctctgccttggtcactggggatgcggctcgttgctcagccaccagtggccttgcggtattgtccaccatccactagagtgggatgaagtccagagtgtgggtatacatctcagatgcccatctacccactggggacttcaatgccagctgcatttggtttggttttcttaactgttggcttctccccacagcgttttttgtttttttttaaacattcatattgttttcaaacttggaattcatagacactctggctctaggttccttaagggggaaaacaaaagatgactttatttcacattcaagaaaatcagttcagttccaaagctgtggtccttccagccacttctagggacactggggaaccttgttaaacgttgacatcagtgctctccagccgtgctgtcaccctcctatcttctggatctgccttcgcgatggtcagtgacagcttctggaagctgagcacacacaggtgcacagccatgctgtggtctggcctgctacggcagcatggcagctctggtggagccttctcccttgccatttggttcccctgtgccaagtagctgcaggctgcccctcaaatcttcatttgtcccttttcacttcctgcagaacaagcctgggttagagggtctgctggaaatggcctttgaagaccaaggataccaggatgtgtgcactctgtcgtgttctgtgatgaatgggaaacgtaggcttccagaaagccagctctcttctgaaatgtgacggacctaagcaggaagtcatccaggacaggagtggctcagtgttggggatggacgctgtcgcccagccatgctccaccagggccaccaatgtgtagttggctggtggtcttcgggcatgtgagacctgctcttcactgtttccaccccacttggtggcctccaggatggtagtggcaccctcagagccccatcttcagcatgttctgaagcctcagagtggaaattcctgctaaggctctgtgtggacgcctttctcccgtgatctaaaggggacactgtactcaagcttttgacctcatgccttgtgtagtaaaaaaggatttgggggttttgtttggttcctgagagggttgtgttttgtttttgtttccttttgtttatgttttggcctttcctctttgtctttccatgtagaccagatatttgaaagggcagacgatggctagaggtgtaatgtgcagcttgtttatacggtattttgggaaacttaccttggatgggaaatcgaatcgtggattcaccaggccggtgctggcacactcaccctcgccctttccctccggttcagtacctattgtttctcctttcaaatatgtgattgtactagctctttccatatgaaagaattctccttattt

SEQ ID NO: 169580 - DNA, 9157 bp, Homo sapiens
  Payload ID: 13394
  Gene Symbol: PRRC2B
  Gene Name: proline-rich coiled-coil 2B
  Uniprot ID: Q5JSZ5
  ENST ID: ENST00000405995
  CDS Start-End: 227-4834
gcgccgaggctccaccgcgcagcgacgagcgagcccgggaggagggagggagcgagcgagcgagcagcccgcgccgccgcctcgcaatccgccgccatcccgccgcccccgtgcccgaccgccgcccgactgccatcgcccggcccggccgcgcccgcggaaccagaccaggcagatcgggagcggtgccgagaaaaatttccttactagatgacatttcatcgcaatgtccgatcgtttggggcaaattaccaagggcaaggatgggaaaagcaagtactcgactctcagcctgtttgataagtataaaggaaaatcagtagacgcgattagatcctcagttattcctagacatggcttacagagtcttgggaaagttgctgcagcccggcgcatgccaccgcctgcaaacctgccaagcttgaagtctgaaaacaaaggaaacgaccccaacatcgtgatagtacccaaggacgggacgggatgggcaaacaagcaggatcagcaagacccaaagagttccagtgcgacggcctctcagccgccggagtcgctgccgcagccgggtttgcagaaatctgtctccaatttgcagaaaccgacacagtcaatcagtcaggagaatacaaattcagtgccaggtggaccaaagtcatgggcacagctgaatggaaagccagtaggacacgaaggtggtttaaggggctcaagccgactgttatccttctctcccgaggaatttccgacgctgaaagcagctggagggcaggacaaggctggcaaagaaaagggcgtcttagatctgtcgtatgggccaggaccaagcctccgccctcagaatgtgacaagctggagggagggcggtgggcgacacataatttctgccacgtctctgagcacctccccaactgagctgggcagcaggaactcgagtacgggagatggagccccctcctcggcatgtaccagcgattctaaggacccctctctccgcccggctcagcctgtccgaaaaggggcttcacagttcatgggaaatgtataccacccacctacataccatgacatgcttcctgcttttatgtgttcgccgaagtcatcagaaaaccagggtacagtggaacgaggctcttttccccttcctcagctccgccttgaacctcgagttccttttagacagttccagatgaatgaccaagacggaaaagaaaacaggctgggattgtctcgcccactccgcccactaaggcagctggtggagcgggcaccacggcccaccattatcaatgcggaaaacctgaagggccttgacgatctggacgccgatgccgatgatggctgggcaggcctccatgaagaagtggactattctgagaaactgaagttcagtgatgatgaagaggaggaagaagttgtgaaggacggcaggccaaagtggaacagttgggaccctaggaggcagcggcagttgtcaatgagctctgcagacagtgcggacgctaagcggactcgagaggaagggaaggactgggctgaagcagtgggtgcgtcccgtgtggtccgaaaggcgccagaccctcagccaccgcccaggaagcttcatggctgggcaccaggccctgactaccagaagtcatcaatgggcagcatgttccggcaacagtccatcgaggacaaggaggacaagcccccaccaaggcagaagttcattcagtcagagatgtccgaggcggtggagcgagcccgaaagcgccgggaagaagaggagcgccgagcccgggaggagaggctggccgcctgtgctgccaaactcaagcagctggaccagaagtgtaagcaggcacgaaaggcaggtgaggcccggaagcaggcagagaaggaagtgccctggtctccaagtgctgagaaggcatctccccaggaaaacggccctgctgtccacaaaggctccccagaattccctgcccaagagacccccaccacattcccagaagaggcacccacagtgtccccagcagtggcacagagcaacagcagtgaggaagaggccagagaggctgggtcccctgcacaggagttcaagtatcagaagtcccttcctccccgattccagcgccagcagcagcaacaacagcaggagcagctgtacaagatgcagcactggcagccggtgtaccccccgccgtcccacccccagcgcaccttttacccacaccacccccagatgttgggcttcgatcccaggtggatgatgatgccttcctacatggacccacgtatcacgcccactcggaccccggtggacttctacccctccgccctgcatccctcaggactgatgaagcccatgatgccccaggagtccctcaatgggacaggctgtcgctctgaggatcagaactgtgtgcccccactccaagaaagaaaagtgacccccatcgactcaccccctgtgtggagcccagagggctacatggcactgcagagcaagggctacccgctcccgcacccgaagtcgagtgacaccttggctatggacatgcgtgtcagatccccagacgaggccttgcctggaggtcttagtggctgcagcagtgggagtggccactccccctatgccctggagcgggcagcccatgccagtgctgaccttcccgaagcctccagtaaaaaggcagagaaggaggccaagttggctgctccgagggcaggtgaacagggagaggccatgaaacagtttgacctgaactatggaagtgccatcattgaaaattgcgggtccagccccggggaggagagtgaggtgggttctatggtgggcgaaggcttcatcgaagtcctgaccaagaagcagcgccgcctgctggaggaagagagaagaaagaaggagcaggccgtgcaggtgcctgtcaaaggtcgaggcctttcctcccgtattcctcctcgatttgcaaaaaagcagaacaacttatgtctggagcaaggtgacgtgaccgtgcctggcagcagcctgggcactgagatctgggagagcagcagccaggctctccctgtgcaggccccagccaacgactcctggaggaaagctgtcactgccttcagcagcaccgagactggctctgcggagcagggttttaagagcagccagggagatagtggcgttgacttgagtgccgagtctcgggagtcgtctgcgacctcctcgcagcgcagctccccatatgggactctgaagccagaggagatgagcgggcccggcctggcggaacccaaggccgacagccacaaggagcaggctccaaagccatctgagcagaaggattcagaacaaggctctggacagagcaaggagcacagaccaggacccatcggcaacgagcgttctctgaaaaacagaaagggctcggagggggccgagcggctgcaaggggctgtcgtcccgcctgttaacggggtggagattcacgtggactccgtgctgcctgtgccacccattgaatttggagtcagtccaaaagactccgatttcagcttgccacctggttctgcctctggtcctactgggagtccagttgttaaacttcaggatgccttggccagtaatgcagggttaacacagagtatccccatcctgcggcgggaccatcacatccagagggccatcggtctctccccaatgtccttccccaccgccgaccttactctgaagatggagtctgcgcgcaaggcttgggaaaactcccccagtttgccggagcagagctctccaggcggcgctggctcaggcatccagcctccatcctctgtgggtgcctccagcggggtcaactacagctccttcggtggagtgtccatgccacccatgcctgtggcctctgtagcaccttctgcttctatgccaggcagccacctcccgcccctgtacctggatggccatgtgtttgcaagtcagccccggctggttcctcaaacgatacctcagcagcagagttaccaacaggccgccgctgcccagcagatcccgatctcccttcacacatctctgcaggcacaagctcagcttggactgaggggtgggcttcctgtgtcccagtcccaggagatcttcagctccttgcagcccttcagatctcaggtgtacatgcaccccagcctgtcaccgcccagcaccatgatcctctctgggggcacagccttgaagcctccatactcggcgttcccaggcatgcagcccttggagatggtgaagccgcagtctggctcaccctaccagcccatgagcgggaaccaagccctggtctacgagggccagctcagccaggctgctggcctgggtgcctcccagatgttggactcccagctcccacagctgaccatgccactgcctcggtacggctccgggcagcagccactgatcctgccccagtctattcagctgccacctgggcagagcctctccgttggggccccccgaaggattcctccgcccgggtcccagccgccagtcctgaacaccagcagagagccctctcagatggagatgaaaggcttccactttgccgacagtaaacagaatgtcccttcaggaggccccgtgccatcgccacagacctacaggcctagctctgctagccccagtgggaagccctctggatcagcagttaacatgggctctgtgcagggacactacgtgcaacaggcaaaacaacgagtggatgagaaacccagcctgggagccgtgaagctgcaggaggccccctcggctgcctcccagatgaagcgaaccggagcgatcaagcctcgggctgtcaaagtggaggagagtaaggcctgacagtgcctggctgccacctcgcctctccctactgaggacggtgccgccatgcggcctcgacacagccgacactcgggagcctcaccagatccaccgtccaaatgcgtggcccagactgagagacctccctcctctccactcccgaaagctccgttgtcaaccagcttgcacccgtggatatatggcattgacccgcttgctttgatacgaaacaaaaaagcagacgactccttcatcccatctgctcctaccgtgactgtggagtgacgcctcctgtgcagtgcagatttgccctccctgcctcctccctgtcctgccgcgcagccagggcgccttctcagcagtgcttccggcccagccgcccatccctaggcacagtgatttggcagcagggtcattttactttgaggctttttgttttaaaatgtagccaaggtttttacaaaggggaaaggaaaagaaaacaaaaacgcaagctccatgtgtatagctgaacttttatatgtttcttgccagcccctccgctcccttccatctctagcctctgtcctgtttagtttgatacgtcactgcagtaccttaagaggtgactcttaagaatgcatcccctcctgattcctcagctggttcacccttgaggttatttgcaaaaagaaaaggaggttcttgagggcaccgattgcgagcattctggtgcctggctccccgcctgggaagcgatggggtgctcagagcagcaggcaggttgggggagggggggggtcatagttgggttccagctcctggcttgatgagcccagggcgcttacaggcagcccatgaagttgatgacagttttagcatgagaatcacacagggtccctgtcctgggctcctctaaagccagtggatgtgctgggcaccagagacaaatcatggagatggctgctggtggctcccaggttggcccagatggggtgagctgacataccacaggcccatcccaggccccgtgggctctgcttctggggctccataccctgccctgcaggggtgctgtgtttttcacacatttctttccctgaagccttctgtaacctgtcattttccttccttcctcttccggagcctgctgctttctctggacctgtctccacctcccacacagctcatcgtgaacaccacttggtgatggagggagtggacccgtgtgtggtccccaagtgaggccactgggagtttgtccttttcctcctttgcttcactcccagcagcagacccaggttgtcaggacaggagggcctgagctaagcagtaggcatcagtctcgtttgtcttcagacggcgggggcaggtccagggtgaggctgggtggagggctgaccaaggtccaaagggcctgcgcagcctccgggagggcagcttctccagccagaggcttgtgtgagccatcgtgtgctgggcttgtttttaagtaagaaacaaggaaatcactccagattctgtcattccaaggaaagggaaggggacagttcaggtttctcagctgttcttaggggtcactgagcgtctacctcctcctccagaggaggctggctcagaacacctagaggagggggccggggatgcaccccccaccagaggctgccttcagcgtctcacgggtgcaggacagcgctcaggcttgggctctaagctctgtgtctagtgtagaacatggggaaggagcatcttaggaactgctgaagtaacttcttactgctctcacaattctaaggaagcgggagaacggcctcctaccaacagcgcccaccccagagctgcctgggaaagggcagttttactgaaaggtgctttactgttcacctgcatctttcagcagctcccctcctgccctcacctggtcttttccctctttatcccaagcctttatgcttgagtcccttccccaggggctgcccacccgacagttccaggcattccctacctgagcttcttgtctgcttttccttctcccactgcaagcggctgcttgtggggcctgggatgagccctctctgtccccaccggccctccttgccaagccattcctgggtgagttcaggcctgcgggagccacacattcatctccacctggacacttgagccgcatggccagacccctcccacctgatgcggtggtgcgtgtgatttgtcaaaagaaagccttctggatgctgttaagatgtacccttcaggtgaacctggtatcagacccacagtacttgctgtttgagaaaaaataaaaacaaaaaggtcacctgttctccagcccttttctcttacctggtatttccttcctttctcctcccccaccccaaataaaaaaacaaaaaacactagaatttatttatatgtattgatgttgtaggtctaggtgaaaaaaaaagaagtaaatgtttcactgctctatttatatataatgtctgaattaattctgtgcaggaaaggccaggaaattgcatgtgaagttcggtgcagtcaccacctgtgtgtgacctgagctgcagtctcttcgctgagatgcaggttttaaatgagacttggggggctgagggcaggcctcaggcctcccagcgccccaacccctccttggtctaatgaaatgcagttcttagtgcagagatgttttaaggtgcaatatatctcttcctttcccgtggttttagagccaagctcaaggtagtaggacgtagggtcttattttgttttcaaacccccatcctcagagcgcagatacatgcagaggcttctgccaggataccacggggccttagtgggaacaggtggagaccagcacttccctttcctgctgctgaggtagggattggggggtcagaacccactcacttttgcctgttaaagttgccctcctgacgctggcagctctgccttggtcactggggatgcggctcgttgctcagccaccagtggccttgcggtattgtccaccatccactagagtgggatgaagtccagagtgtgggtatacatctcagatgcccatctacccactggggacttcaatgccagctgcatttggtttggttttcttaactgttggcttctccccacagcgttttttgtttttttttaaacattcatattgttttcaaacttggaattcatagacactctggctctaggttccttaagggggaaaacaaaagatgactttatttcacattcaagaaaatcagttcagttccaaagctgtggtccttccagccacttctagggacactggggaaccttgttaaacgttgacatcagtgctctccagccgtgctgtcaccctcctatcttctggatctgccttcgcgatggtcagtgacagcttctggaagctgagcacacacaggtgcacagccatgctgtggtctggcctgctacggcagcatggcagctctggtggagccttctcccttgccatttggttcccctgtgccaagtagctgcaggctgcccctcaaatcttcatttgtcccttttcacttcctgcagaacaagcctgggttagagggtctgctggaaatggcctttgaagaccaaggataccaggatgtgtgcactctgtcgtgttctgtgatgaatgggaaacgtaggcttccagaaagccagctctcttctgaaatgtgacggacctaagcaggaagtcatccaggacaggagtggctcagtgttggggatggacgctgtcgcccagccatgctccaccagggccaccaatgtgtagttggctggtggtcttcgggcatgtgagacctgctcttcactgtttccaccccacttggtggcctccaggatggtagtggcaccctcagagccccatcttcagcatgttctgaagcctcagagtggaaattcctgctaaggctctgtgtggacgcctttctcccgtgatctaaaggggacactgtactcaagcttttgacctcatgccttgtgtagtaaaaaaggatttgggggttttgtttggttcctgagagggttgtgttttgtttttgtttccttttgtttatgttttggcctttcctctttgtctttccatgtagaccagatatttgaaagggcagacgatggctagaggtgtaatgtgcagcttgtttatacggtattttgggaaacttaccttggatgggaaatcgaatcgtggattcaccaggccggtgctggcacactcaccctcgccctttccctccggttcagtacctattgtttctcctttcaaatatgtgattgtactagctctttccatatgaaagaattctccttatttaaataaaaaaagtttaaaaagataaa

SEQ ID NO: 169581 - DNA, 1762 bp, Homo sapiens
  Payload ID: 13394
  Gene Symbol: PRRC2B
  Gene Name: proline-rich coiled-coil 2B
  ENST ID: ENST00000451855
  CDS Start-End: 1-1762
tggccggggctttgaggacagccgcgcggaggacaagagatccttcttccaagatgaacacgtggcagattctgaaaatgcagagaaccggcccttcaggagaaggcgccccccacgccaagataagccccctcgattccggcgcctccggcaagagcgggagtccctgggcctgtggggacccgaggaggagccccacctgctggcaggtcagtggccaggcaggcccaaactgtgttctggggacaagagtggcactgtgggccgcaggtcccctgagctctcctaccagaactcctccgatcacgccaatgaggagtgggagacggcctccgaaagcagcgacttcagcgagcggcgggagcggcgggaaggccctgggtccgagcccgactcccaggtggatggtggcctgtcgggggctagtttgggtgagaagaaggagctggccaagaggagcttctccagtcagagacccgtggttgacagacagagccgaaagctggagccgggagggtttggggagaagcccgttaggccaggtggtggtgacacctcccctcgctatgagagccaacagaatgggacgcctttgaaagtgaaaagatccccagacgaggccttgcctggaggtcttagtggctgcagcagtgggagtggccactccccctatgccctggagcgggcagcccatgccagtgctgaccttcccgaagcctccagtaaaaaggcagagaaggaggccaagttggctgctccgagggcaggtgaacagggagaggccatgaaacagtttgacctgaactatggaagtgccatcattgaaaattgcgggtccagccccggggaggagagtgaggtgggttctatggtgggcgaaggcttcatcgaagtcctgaccaagaagcagcgccgcctgctggaggaagagagaagaaagaaggagcaggccgtgcaggtgcctgtcaaaggtcgaggcctttcctcccgtattcctcctcgatttgcaaaaaagcagaacaacttatgtctggagcaaggtgacgtgaccgtgcctggcagcagcctgggcactgagatctgggagagcagcagccaggctctccctgtgcaggccccagccaacgactcctggaggaaagctgtcactgccttcagcagcaccgagactggctctgcggagggttttaagagcagccagggagatagtggcgttgacttgagtgccgagtctcgggagtcgtctgcgacctcctcgcagcgcagctccccatatgggactctgaagccagaggagatgagcgggcccggcctggcggaacccaaggccgacagccacaaggagcaggctccaaagccatctgagcagaaggattcagaacaaggctctggacagagcaaggagcacagaccaggacccatcggcaacgagcgttctctgaaaaacagaaagggctcggagggggccgagcggctgcaaggggctgtcgtcccgcctgttaacggggtggagattcacgtggactccgtgctgcctgtgccacccattgaatttggagtcagtccaaaagactccgatttcagcttgccacctggttctgcctctggtcctactgggagtccagttgttaaacttcaggatgccttggccagtaatgcagggttaacacagagtatccccatcctgcggcgggaccatcacatccagagggccatcggtctctccccaatgtccttccccaccgccgaccttactctgaag

SEQ ID NO: 169582 - DNA, 535 bp, Homo sapiens
  Payload ID: 13394
  Gene Symbol: PRRC2B
  Gene Name: proline-rich coiled-coil 2B
  ENST ID: ENST00000422467
  CDS Start-End: 1-535
tgtgaaggacggcaggccaaagtgaagtcatcaatgggcagcatgttccggcaacagtccatcgaggacaaggaggacaagcccccaccaaggcagaagttcattcagtcagagatgtccgaggcggtggagcgagcccgaaagcgccgggaagaagaggagcgccgagcccgggaggagaggctggccgcctgtgctgccaaactcaagcagctggaccagaagtgtaagcaggcacgaaaggcaggtgaggcccggaagcaggcagagaaggaagtgccctggtctccaagtgctgagaaggcatctccccaggaaaacggccctgctgtccacaaaggctccccagaattccctgcccaagagacccccaccacattcccagaagaggcacccacagtgtccccagcagtggcacagagcaacagcagtgaggaagaggccagagaggctgggtcccctgcacaggagttcaagtatcagaagtcccttcctccccgattccagcgccagcagcagcaacaacagcaggagc

SEQ ID NO: 169583 - DNA, 899 bp, Homo sapiens
  Payload ID: 13394
  Gene Symbol: PRRC2B
  Gene Name: proline-rich coiled-coil 2B
  Uniprot ID: Q5JSZ5
  ENST ID: ENST00000458550
  CDS Start-End: 1-807
atgccacccatgcctgtggcctctgtagcaccttctgcttctatgccaggcagccacctcccgcccctgtacctggatggccatgtgtttgcaagtcagccccggctggttcctcaaacgatacctcagcagcagagttaccaacaggccgccgctgcccagcagatcccgatctcccttcacacatctctgcaggcacaagctcagcttggactgaggggtgggcttcctgtgtcccagtcccaggagatcttcagctccttgcagcccttcagatctcaggtgtacatgcaccccagcctgtcaccgcccagcaccatgatcctctctgggggcacagccttgaagcctccatactcggcgttcccaggcatgcagcccttggagatggtgaagccgcagtctggctcaccctaccagcccatgagcgggaaccaagccctggtctacgagggccagctcagccaggctgctggcctgggtgcctcccagatgttggactcccagctcccacagctgaccatgccactgcctcggtacggctccgggcagcagccactgatcctgccccagtctattcagctgccacctgggcagagcctctccgttggggccccccgaaggattcctccgcccgggtcccagccgccagtcctgaacaccagcagagagccctctcagatggagatgaaaggcttccactttgccgacagtaaacagaatgtcccttcaggaggccccgtgccatcgccacagacctacaggcaaaacaacgagtggatgagaaacccagcctgggagccgtgaagctgcaggaggccccctcggctgcctcccagatgaagcgaaccggagcgatcaagcctcgggctgtcaaagtggaggagagtaaggcctga

SEQ ID NO: 169584 - DNA, 525 bp, Homo sapiens
  Payload ID: 13394
  Gene Symbol: PRRC2B
  Gene Name: proline-rich coiled-coil 2B
  ENST ID: ENST00000456307
  CDS Start-End: 1-525
gaaagaaaagtgacccccatcgactcaccccctgtgtggagcccagagggctacatggcactgcagagcaagggctacccgctcccgcacccgaagtcgagtgacaccttggctatggacatgcgtgtcaggaatgaaagctctttctctgcctcactcggaagggcagggggcgtaagtgctcagcgcgatctctttgaggagagaggggaggagtacttgagtgcttttgacaagaaggcccaagcagactttgacagctgtatctcttctcaaagaataggccaggagcttttgtttccaccccaagaaaatgttcaggatgcaggtgctcctgggggtcacacccaaaacctcaggtgttccccattggagcctgactttgtcccagatgagaaaaagccagagtgtggcagttgggatgttagccaccagccagagaccgctgacacagcccatggtgttgagcgggagacaccccgggaggggacggcctttaacatctcctcctgggacaagaacggg

SEQ ID NO: 169585 - DNA, 10355 bp, Homo sapiens
  Payload ID: 13395
  Gene Symbol: PRRC2C
  Gene Name: proline-rich coiled-coil 2C
  Uniprot ID: Q9Y520
  ENST ID: ENST00000338920
  CDS Start-End: 238-8691
ctcgctccccctcggaaagctgcgaaagtgctttggcggtttgtccatccgcagcttcggcttttccagtctggtggcccttccggccacccctttaaccccagctttccctcccccttctttcgatcagagatcggcggagaccctcgaagtgcgcaaacttgacactcaccctgaccggactggggttttaaggggtgtggcaggaggttttggactcgatgagtttccaccgaaatgtcggagaagtcaggccagagcacaaaagcaaaggatgggaaaaagtatgcaacactcagtttatttaatacttacaaggggaaatcattagaaacacagaaaaccacagctcgacatggattacagagtcttggaaaagtcggtatttcacggcgtatgcctccacctgctaacctcccaagtcttaaagcagaaaacaaaggcaatgatcctaatgtaaacattgtacctaaagatggcacagggtgggcatcaaaacaagagcaacatgaagaagaaaaaacaccagaagtgccaccagcacagccaaaacctggggttgcagctcccccagaagtagcacctgctcccaaatcatgggccagtaacaagcaaggtgggcaaggagatggaatccaagtgaatagtcagtttcagcaagaatttcccagcctgcaggcagctggggatcaggaaaaaaaagaaaaggaaacaaatgatgacaactatggacctggacccagtttacgtccaccaaatgttgcttgttggagagatggtggtaaggctgctggctcaccttcgtcatctgatcaagatgaaaagctccctggccaggatgaaagcacagctggaacatcagagcaaaatgatatcctcaaagtggtggaaaagaggatagcttgtggtcctccacaggctaaactgaatggacagcaggctgctctcgcttcccagtatagagctatgatgcctccttatatgttccaacagtatccgaggatgacatatcctcctctacatggtcccatgagattcccaccttctttatctgaaacaaacaaaggccttcgaggaagaggcccacctccttcatgggcctctgagcctgaacgcccatccattcttagtgcatcagaactgaaggagcttgataaatttgataacctagatgctgaagctgatgaaggttgggcaggtgctcagatggaagtagattatacagagcaactgaatttcagtgatgatgatgaacaaggaagtaacagtcctaaagagaataacagtgaggatcaaggttcaaaagcctctgaaaacaacgaaaacaaaaaagaaacagatgaagtttccaacactaaatcatcttcccaaatacctgcccaaccatcagtagcaaaagttccctatgggaaaggaccttcatttaatcaggaacgtggaacatcttcacatctgccaccacctccaaagttgcttgcacagcagcatccacctccagatcgacaggcagtacctggaagaccaggcccctttccctccaagcagcaagtagctgatgaagatgaaatatggaagcaaagacgaagacaacaatcagaaatttctgcagcagtagaacgtgctcgtaaacggcgtgaagaggaagagcgaagaatggaagaacaaaggaaggcagcttgtgcggagaaactgaaacgattggatgagaagcttggcatcctggaaaaacaaccatctccagaggaaattagggaaagggagcgagaaaaagaacgggagcgtgagaaagaacttgaaaaagaacaagaacaggagcgagagaaggagagggaaaaagacagagagagacagcaggaaaaggagaaagagctggagaaggagcaggaaaaacaaagagaaatggagaaagaaagaaagcaagaaaaagaaaaagaactagaacggcagaaagaaaaggaaaaagaactacaaaagatgaaagaacaagaaaaggaatgtgagctggagaaggaaagggaaaaattagaggagaaaattgaacccagagaacctaatttagagcccatggtagaaaaacaagaaagtgaaaacagctgtaataaagaggaggaacccgttttcactagacaagacagcaatcgcagtgaaaaggaagccacaccagtggtgcatgaaacagaaccagaatcagggtctcaacctcggccggctgtattatctggctatttcaaacagtttcagaagtctttacctccacgattccagcggcagcaggaacagatgaaacagcagcagtggcagcagcagcaacagcaaggtgtacttccacagactgttccttcacaaccgtccagtagtactgtccctcctccaccacacagacctctttatcagcctatgcagcctcatcctcagcatttggcttctatgggttttgatccaaggtggctcatgatgcagtcctacatggatcctcgaatgatgtcaggaagacctgctatggatattccacccattcatcctggaatgattcctcctaaaccattaatgagaagagaccagatggaagggtcaccgaacagttctgagtcatttgagcatatagctcgatctgcaagagatcacgcaatttccctttctgagcctcgtatgctgtgggggtcagatccctatcctcatgctgagcctcaacaagcaactactcccaaagcaacagaagagcctgaggatgtaaggtctgaagctgcgttggaccaggaacagattactgctgcttattctgtagaacataatcaattagaggctcacccaaaggcagactttatcagagaatcaagtgaggcacaagtacaaaagtttttaagcagatctgtggaagatgttagacctcaccatactgatgcaaataatcagtctgcttgttttgaagcacctgatcaaaagaccttatccgctcctcaagaggagcggatttcagctgtagaaagtcagccttcccggaaaagaagtgtttcccatggatctaaccatacgcaaaaaccagacgagcagagaagtgaaccatctgcaggcattcctaaagtaaccagcagatgcattgattcaaaagaaccaatagaaaggccagaggagaaaccaaaaaaggaaggctttatacgatcttctgaaggaccaaaacctgaaaaagtatataaatctaaatcagaaactcgttggggcccacgaccaagctctaacagaagggaagaagttaatgatagacctgtgagaagatcaggtcccattaaaaaacctgtacttagagatatgaaagaggaacgggaacagaggaaggagaaagaaggagaaaaggccgaaaaggtcactgaaaaagtagttgtaaagcctgaaaagacggaaaagaaggatcttcctcctcccccaccaccacctcagccaccagcaccaattcagccacagtcagttccaccaccaattcaaccagaagcagagaaatttccttcaacagaaactgcaactttggctcaaaaaccatctcaggatactgagaagcctctggaacctgtgagtactgttcaggtagagcctgcagttaagactgtaaaccaacagactatggcagcaccagtagtcaaagaagaaaaacaacctgagaaagtcatcagcaaagaccttgttatagagaggcctcgaccagattcaagaccagcagttaaaaaagaatcaactttgcctcccaggacctattggaaagaagctagagagagagattggtttccagatcaaggatacagaggtcgaggccgaggtgaatattactccagaggtcgaagctatagaggttcttatggagggcgtggcaggggtggtaggggacacactcgagattatcctcagtatagagacaataagccaagagcagagcatataccctcagggcctctcagacagcgagaagaaagtgaaacacggagtgagagctctgattttgaagttgtccccaaaagaagacgacagcggggttcagagactgacacagacagtgaaattcatgaaagtgcaagtgacaaggacagtttaagtaaaggcaaacttcccaaaagagaggaacggcctgaaaacaaaaaacctgtaaagcctcattcttctttcaagcctgataatcatgttcgaatagataatagactgctagaaaagccttatgtaagggatgacgataaagctaaaccaggctttcttcctaaaggagagcctacaaggagaggcagagggggaacattcaggcgtggtggaagggatcctggaggccgtccatcacgcccttccactttacgaagaccagcttatcgggacaatcagtggaacccaaggcagtcagaagttcctaaaccagaagatggagagccgccaagaagacatgagcagtttattcctatagcagcagataaacgacctccaaaatttgagcgaaaatttgacccagctagagaaaggcctcgaaggcagcgtcctactcgaccaccaaggcaagacaagccacctcgatttagacggctaagagagagggaggctgcttcaaaatcaaatgaggtggtagcagtgcccacaaatggcacagttaataatgtggctcaagaaccagttaatactcttggggatatttccgggaataagacaccagatttatctaatcagaactcttcagatcaggcaaatgaagaatgggaaacagcttctgaaagcagtgatttcaatgagaggcgagagagggatgaaaaaaaaaatgctgacttgaatgcacaaacagttgtaaaggttggagagaatgttctacctccaaagagggaaattgcaaagagaagtttttctagtcagagaccagtagatcgtcagaatcgacgtggcaacaatggtccacccaaatcaggaaggaatttctcaggtcctagaaatgaaaggagaagtggcccaccatcaaaaagtgggaagagagggccatttgatgaccagcctgcaggcacaactggggttgacctcatcaatggcagctctgcacaccatcaggaaggagtacctaatggtacaggacaaaagaactccaaagattctactgggaaaaaaagagaagaccccaaaccaggccctaaaaaaccaaaagagaaagtggatgctctatcacagtttgatctcaacaattatgcaagtgttgttataattgatgatcatcctgaagtaacagtaattgaagatccccagtcaaatttgaatgatgatggttttactgaagtggtatccaaaaaacaacaaaaacgtttacaggatgaagaacgccgaaagaaggaagaacaagtcatacaggtctggaacaaaaagaatgcaaatgaaaaaggaagaagccagacttctaagcttcctccaagatttgccaaaaaacaggctacagggatccagcaagcacagtcttcagcctcagttccacctctagcttcggctccacttccaccttcaacctcagcttcagttccagcctcaacctcagctccacttccggcaaccttaactccagttccagcctcaacctcagctccggttccagcctcaactttagctccagttctggcctcaacctcagctccagttccagcctcacccttagctccagtttcagcctcagcctcagtctcagcttcagttccagcctctacttcagctgcagctataacctcttcttcagctccagcctcagccccagctccaacccccatccttgcctcagtttcaaccccagcttctgtcaccattcttgcctcagcctcaattcccattcttgcttcagccctagcatcaacttcagctccaacgccagccccagcagcctcttccccagctgccccagtcatcacagcaccaactatcccagcctcagccccaactgcctcagtcccacttgcccctgcctcagcttcagccccagccccagcccctaccccagtctcagccccaaatcctgccccacctgccccagcccagactcaggcacagacccacaaaccagtccagaatccactacagactacatctcagtcttcaaaacaaccaccaccatcaattaggctgccttcagctcaaacacctaatggcacagattatgtagcctcaggaaaatccatccagaccccacagtcacatggcactctgacagctgaattatgggataacaaggtggccccaccagctgtgctgaatgatatctctaagaaattaggtcccattagtccaccacagccaccttcagtcagtgcatggaataagcccttaacatcgtttggatcagctccttcatcagagggagcgaagaatggtcaagaaagtggactcgaaattggaactgacacaattcagtttggtgctccagcctcaaatggaaatgaaaatgaagttgttcctgtgctttcggaaaaatctgctgacaaaatacctgaacctaaagaacagcggcagaagcagccacgagcaggacctatcaaagcccagaagcttccagatttgagtccagtagaaaacaaagaacacaaacctggtcccattggaaaggaacgttcattaaaaaatagaaaagtaaaagatgcccaacaggtggagccagaaggacaagagaaaccaagcccagctacagtcagaagcacagatcctgtcacgacaaaggagactaaagcagtctcagaaatgtctactgaaataggaacaatgatctcggtatcatctgcagaatatggtactaatgcaaaggagtctgtaacagactatactacaccctcttcttctttgcctaacaccgtggctactaataatacaaagatggaggatactttggttaataatgtgcccctgcccaacacccttcccctccctaagagggagactatacaacagagctccagcctaacttcagttcctcccactactttcagcctcaccttcaagatggagtctgcacgcaaagcatgggagaattctccaaatgtaagggaaaaggggtctccagtaacttccacagcacctccaattgcaactggagtcagcagtagtgccagtggaccaagcactgctaattacaattcgttctcaagtgcatccatgccccagattcctgttgcttcagtcactcctacagcatcactatcaggagctggtacatacactacctcttctttgagcacaaaatctacaaccacatcggaccctccaaatatttgtaaagtgaaacctcagcagttacagacaagcagcctgccttctgcaagtcatttttcacagttaagctgtatgccttcccttattgcccagcagcaacagaatccgcaagtttatgtgtctcagtctgcagcagctcaaatcccagccttctatatggacacaagtcatttattcaatacccaacatgcacgattggctccgccatccttggctcaacaacagggtttccaaccaggtctctctcagccaacttcagttcagcagattccaatccctatttatgcaccactgcaagggcagcatcaagcccaactgagtttgggggctggccctgctgtttcccaggctcaggaattgttcagctcctcacttcaaccatatagatctcagccagcttttatgcaaagcagtttatcccagccatctgtggtcctttctggtactgctattcacaactttccaactgtccaacaccaagaacttgccaaggcacaatccggtcttgcctttcagcaaacatcaaatactcagcccattcctatattgtatgaacatcaactggggcaggcatcaggactaggaggttcccagctgattgacacacatcttctccaggccagagcaaatcttacccaggcctcaaatctttattctggacaagtacaacagcctggtcagacaaatttttataacactgcccagtcaccaagtgctctccagcaggttacagtacctttaccagcatcgcagctttccttgcctaattttggatctacagggcaacctctaattgctttgcctcagactcttcagcccccattacagcataccactccccaagcacaggctcagagtctgagtcgtcctgcacaagtaagccagcctttcagaggattaattcctgctggaacacagcatagcatgattgcaaccacaggaaaaatgtctgaaatggaactaaaagcctttggaagtggcattgatataaaaccaggcacacctccaatcgctggtagaagcaccacaccaacatctagtcccttccgggctacttctacaagtccgaacagccagtccagcaaaatgaacagcattgtctaccagaagcagttccagtcagcccctgccactgtgagaatgacacaaccatttcctacacagtttgcaccccaggcaaagcagagagcagaggttcttcagtccacgcaacggttcttctctgaacagcaacagagcaaacagataggaggaggcaaagcccagaaagtggacagtgattcaagtaaacctcctgaaacactgaccgaccctcctggggtctgtcaggaaaaagtagaagaaaagccaccccctgcaccctccatagccaccaaacctgttagaactggaccaatcaaacctcaggcgatcaaaaccgaagaaacaaaatcttaaaggctatggtttattgcaggggattgggaggggggcgggaaaacatggagaattaagtcagataatgctggcagccaaaggggcaaaatggcctgtgacattatcctgttcagagcttggagatgtacaagggacataggagcaatttacactgacacacagctgctgtaccagtgaaaacgaggctttgcaagcttgtacctactatataacatgtgcttggttgatggccatgcatcttcagtcagaatttatatataaatgtatgcacccatttttttgagtgcatataatttagacctaaaaatccttatgattagatgaaacaccaaaaatataaggaaaataacacagcagaggaatagctcagcctgaacagtgtgatggtcccagctactacatcagatgcggtttttttgctcccttatgttcttcggatatggttatggcatttgtaggcttggaggtaaagaactgaagataactggtgctggatagaggagccttattttttattatggcagcttgctatttttataacatggtgattgagttgaacacaatcaaagtacagtagtaactgatgtccccttcttcctggatgaatgagcagataaatattgatgtcagcatccttgaaccatatcaaagtgagcagtgtttggctactgcttctatttgaaatggtgctgtgttttggttgtggtctgaagctttgaagcgctacttagcatctcctttcttccatggagctctcacgattcaaacatgacagatttggtaaaatgctggttaggttgagtcttccttgcccccactcagtcatctttgtatgaatcccatgatttgggggtttttttctttttttttttataccagtttttagctggtgtttatgaagaacagtgagtacctagaactgtgccactaattaaaggaaatcctaagaaggtgcatttctttacagagctgtgtcatgccatcctttgggccctctgctggaaaagtagaatcaagtctcaaataatgcctttttaattgtatcctctagtattatagatataggacagtactgtatcatacctctgtgaatgtaaaatatcttgtacctgctttatgatacgtagtagtgaccgtgctttatcagagctgtttttaatgatgttattctagaatgttttctttccagatgatgattcagaagctaattttaaaaaacggtgccaggtaccacaacagtaacagaactttgcaattttctggggttttgttttttacctttttccccccttttttttaaatggagtgtgctggatgtctctataattttattcagatgactgcagaacctggaaaagctgttgctgctattgatgcataacatactgctattggtctttttatataaatatatatatatatatacatatatatatataatttgaatttttggaaactttagctgtgctgtcaactttggaaaaagtatcccggtttactgtgttgagttggcattgtacagaaattaacagccatattggtctagaaacgttaaacttaatttttttccatttgtacaggggtaacgcactgtattaaatatgtaaggtcttatctacatgggtttgattacagaaactaataaagtattctctaaataatga

SEQ ID NO: 169586 - DNA, 10366 bp, Homo sapiens
  Payload ID: 13395
  Gene Symbol: PRRC2C
  Gene Name: proline-rich coiled-coil 2C
  ENST ID: ENST00000367742
  CDS Start-End: 243-8702
gctcgctcgctccccctcggaaagctgcgaaagtgctttggcggtttgtccatccgcagcttcggcttttccagtctggtggcccttccggccacccctttaaccccagctttccctcccccttctttcgatcagagatcggcggagaccctcgaagtgcgcaaacttgacactcaccctgaccggactggggttttaaggggtgtggcaggaggttttggactcgatgagtttccaccgaaatgtcggagaagtcaggccagagcacaaaagcaaaggatgggaaaaagtatgcaacactcagtttatttaatacttacaaggggaaatcattagaaacacagaaaaccacagttgcagctcgacatggattacagagtcttggaaaagtcggtatttcacggcgtatgcctccacctgctaacctcccaagtcttaaagcagaaaacaaaggcaatgatcctaatgtaaacattgtacctaaagatggcacagggtgggcatcaaaacaagagcaacatgaagaagaaaaaacaccagaagtgccaccagcacagccaaaacctggggttgcagctcccccagaagtagcacctgctcccaaatcatgggccagtaacaagcaaggtgggcaaggagatggaatccaagtgaatagtcagtttcagcaagaatttcccagcctgcaggcagctggggatcaggaaaaaaaagaaaaggaaacaaatgatgacaactatggacctggacccagtttacgtccaccaaatgttgcttgttggagagatggtggtaaggctgctggctcaccttcgtcatctgatcaagatgaaaagctccctggccaggatgaaagcacagctggaacatcagagcaaaatgatatcctcaaagtggtggaaaagaggatagcttgtggtcctccacaggctaaactgaatggacagcaggctgctctcgcttcccagtatagagctatgatgcctccttatatgttccaacagtatccgaggatgacatatcctcctctacatggtcccatgagattcccaccttctttatctgaaacaaacaaaggccttcgaggaagaggcccacctccttcatgggcctctgagcctgaacgcccatccattcttagtgcatcagaactgaaggagcttgataaatttgataacctagatgctgaagctgatgaaggttgggcaggtgctcagatggaagtagattatacagagcaactgaatttcagtgatgatgatgaacaaggaagtaacagtcctaaagagaataacagtgaggatcaaggttcaaaagcctctgaaaacaacgaaaacaaaaaagaaacagatgaagtttccaacactaaatcatcttcccaaatacctgcccaaccatcagtagcaaaagttccctatgggaaaggaccttcatttaatcaggaacgtggaacatcttcacatctgccaccacctccaaagttgcttgcacagcagcatccacctccagatcgacaggcagtacctggaagaccaggcccctttccctccaagcagcaagtagctgatgaagatgaaatatggaagcaaagacgaagacaacaatcagaaatttctgcagcagtagaacgtgctcgtaaacggcgtgaagaggaagagcgaagaatggaagaacaaaggaaggcagcttgtgcggagaaactgaaacgattggatgagaagcttggcatcctggaaaaacaaccatctccagaggaaattagggaaagggagcgagaaaaagaacgggagcgtgagaaagaacttgaaaaagaacaagaacaggagcgagagaaggagagggaaaaagacagagagagacagcaggaaaaggagaaagagctggagaaggagcaggaaaaacaaagagaaatggagaaagaaagaaagcaagaaaaagaaaaagaactagaacggcagaaagaaaaggaaaaagaactacaaaagatgaaagaacaagaaaaggaatgtgagctggagaaggaaagggaaaaattagaggagaaaattgaacccagagaacctaatttagagcccatggtagaaaaacaagaaagtgaaaacagctgtaataaagaggaggaacccgttttcactagacaagacagcaatcgcagtgaaaaggaagccacaccagtggtgcatgaaacagaaccagaatcagggtctcaacctcggccggctgtattatctggctatttcaaacagtttcagaagtctttacctccacgattccagcggcagcaggaacagatgaaacagcagcagtggcagcagcagcaacagcaaggtgtacttccacagactgttccttcacaaccgtccagtagtactgtccctcctccaccacacagacctctttatcagcctatgcagcctcatcctcagcatttggcttctatgggttttgatccaaggtggctcatgatgcagtcctacatggatcctcgaatgatgtcaggaagacctgctatggatattccacccattcatcctggaatgattcctcctaaaccattaatgagaagagaccagatggaagggtcaccgaacagttctgagtcatttgagcatatagctcgatctgcaagagatcacgcaatttccctttctgagcctcgtatgctgtgggggtcagatccctatcctcatgctgagcctcaacaagcaactactcccaaagcaacagaagagcctgaggatgtaaggtctgaagctgcgttggaccaggaacagattactgctgcttattctgtagaacataatcaattagaggctcacccaaaggcagactttatcagagaatcaagtgaggcacaagtacaaaagtttttaagcagatctgtggaagatgttagacctcaccatactgatgcaaataatcagtctgcttgttttgaagcacctgatcaaaagaccttatccgctcctcaagaggagcggatttcagctgtagaaagtcagccttcccggaaaagaagtgtttcccatggatctaaccatacgcaaaaaccagacgagcagagaagtgaaccatctgcaggcattcctaaagtaaccagcagatgcattgattcaaaagaaccaatagaaaggccagaggagaaaccaaaaaaggaaggctttatacgatcttctgaaggaccaaaacctgaaaaagtatataaatctaaatcagaaactcgttggggcccacgaccaagctctaacagaagggaagaagttaatgatagacctgtgagaagatcaggtcccattaaaaaacctgtacttagagatatgaaagaggaacgggaacagaggaaggagaaagaaggagaaaaggccgaaaaggtcactgaaaaagtagttgtaaagcctgaaaagacggaaaagaaggatcttcctcctcccccaccaccacctcagccaccagcaccaattcagccacagtcagttccaccaccaattcaaccagaagcagagaaatttccttcaacagaaactgcaactttggctcaaaaaccatctcaggatactgagaagcctctggaacctgtgagtactgttcaggtagagcctgcagttaagactgtaaaccaacagactatggcagcaccagtagtcaaagaagaaaaacaacctgagaaagtcatcagcaaagaccttgttatagagaggcctcgaccagattcaagaccagcagttaaaaaagaatcaactttgcctcccaggacctattggaaagaagctagagagagagattggtttccagatcaaggatacagaggtcgaggccgaggtgaatattactccagaggtcgaagctatagaggttcttatggagggcgtggcaggggtggtaggggacacactcgagattatcctcagtatagagacaataagccaagagcagagcatataccctcagggcctctcagacagcgagaagaaagtgaaacacggagtgagagctctgattttgaagttgtccccaaaagaagacgacagcggggttcagagactgacacagacagtgaaattcatgaaagtgcaagtgacaaggacagtttaagtaaaggcaaacttcccaaaagagaggaacggcctgaaaacaaaaaacctgtaaagcctcattcttctttcaagcctgataatcatgttcgaatagataatagactgctagaaaagccttatgtaagggatgacgataaagctaaaccaggctttcttcctaaaggagagcctacaaggagaggcagagggggaacattcaggcgtggtggaagggatcctggaggccgtccatcacgcccttccactttacgaagaccagcttatcgggacaatcagtggaacccaaggcagtcagaagttcctaaaccagaagatggagagccgccaagaagacatgagcagtttattcctatagcagcagataaacgacctccaaaatttgagcgaaaatttgacccagctagagaaaggcctcgaaggcagcgtcctactcgaccaccaaggcaagacaagccacctcgatttagacggctaagagagagggaggctgcttcaaaatcaaatgaggtggtagcagtgcccacaaatggcacagttaataatgtggctcaagaaccagttaatactcttggggatatttccgggaataagacaccagatttatctaatcagaactcttcagatcaggcaaatgaagaatgggaaacagcttctgaaagcagtgatttcaatgagaggcgagagagggatgaaaaaaaaaatgctgacttgaatgcacaaacagttgtaaaggttggagagaatgttctacctccaaagagggaaattgcaaagagaagtttttctagtcagagaccagtagatcgtcagaatcgacgtggcaacaatggtccacccaaatcaggaaggaatttctcaggtcctagaaatgaaaggagaagtggcccaccatcaaaaagtgggaagagagggccatttgatgaccagcctgcaggcacaactggggttgacctcatcaatggcagctctgcacaccatcaggaaggagtacctaatggtacaggacaaaagaactccaaagattctactgggaaaaaaagagaagaccccaaaccaggccctaaaaaaccaaaagagaaagtggatgctctatcacagtttgatctcaacaattatgcaagtgttgttataattgatgatcatcctgaagtaacagtaattgaagatccccagtcaaatttgaatgatgatggttttactgaagtggtatccaaaaaacaacaaaaacgtttacaggatgaagaacgccgaaagaaggaagaacaagtcatacaggtctggaacaaaaagaatgcaaatgaaaaaggaagaagccagacttctaagcttcctccaagatttgccaaaaaacaggctacagggatccagcaagcacagtcttcagcctcagttccacctctagcttcggctccacttccaccttcaacctcagcttcagttccagcctcaacctcagctccacttccggcaaccttaactccagttccagcctcaacctcagctccggttccagcctcaactttagctccagttctggcctcaacctcagctccagttccagcctcacccttagctccagtttcagcctcagcctcagtctcagcttcagttccagcctctacttcagctgcagctataacctcttcttcagctccagcctcagccccagctccaacccccatccttgcctcagtttcaaccccagcttctgtcaccattcttgcctcagcctcaattcccattcttgcttcagccctagcatcaacttcagctccaacgccagccccagcagcctcttccccagctgccccagtcatcacagcaccaactatcccagcctcagccccaactgcctcagtcccacttgcccctgcctcagcttcagccccagccccagcccctaccccagtctcagccccaaatcctgccccacctgccccagcccagactcaggcacagacccacaaaccagtccagaatccactacagactacatctcagtcttcaaaacaaccaccaccatcaattaggctgccttcagctcaaacacctaatggcacagattatgtagcctcaggaaaatccatccagaccccacagtcacatggcactctgacagctgaattatgggataacaaggtggccccaccagctgtgctgaatgatatctctaagaaattaggtcccattagtccaccacagccaccttcagtcagtgcatggaataagcccttaacatcgtttggatcagctccttcatcagagggagcgaagaatggtcaagaaagtggactcgaaattggaactgacacaattcagtttggtgctccagcctcaaatggaaatgaaaatgaagttgttcctgtgctttcggaaaaatctgctgacaaaatacctgaacctaaagaacagcggcagaagcagccacgagcaggacctatcaaagcccagaagcttccagatttgagtccagtagaaaacaaagaacacaaacctggtcccattggaaaggaacgttcattaaaaaatagaaaagtaaaagatgcccaacaggtggagccagaaggacaagagaaaccaagcccagctacagtcagaagcacagatcctgtcacgacaaaggagactaaagcagtctcagaaatgtctactgaaataggaacaatgatctcggtatcatctgcagaatatggtactaatgcaaaggagtctgtaacagactatactacaccctcttcttctttgcctaacaccgtggctactaataatacaaagatggaggatactttggttaataatgtgcccctgcccaacacccttcccctccctaagagggagactatacaacagagctccagcctaacttcagttcctcccactactttcagcctcaccttcaagatggagtctgcacgcaaagcatgggagaattctccaaatgtaagggaaaaggggtctccagtaacttccacagcacctccaattgcaactggagtcagcagtagtgccagtggaccaagcactgctaattacaattcgttctcaagtgcatccatgccccagattcctgttgcttcagtcactcctacagcatcactatcaggagctggtacatacactacctcttctttgagcacaaaatctacaaccacatcggaccctccaaatatttgtaaagtgaaacctcagcagttacagacaagcagcctgccttctgcaagtcatttttcacagttaagctgtatgccttcccttattgcccagcagcaacagaatccgcaagtttatgtgtctcagtctgcagcagctcaaatcccagccttctatatggacacaagtcatttattcaatacccaacatgcacgattggctccgccatccttggctcaacaacagggtttccaaccaggtctctctcagccaacttcagttcagcagattccaatccctatttatgcaccactgcaagggcagcatcaagcccaactgagtttgggggctggccctgctgtttcccaggctcaggaattgttcagctcctcacttcaaccatatagatctcagccagcttttatgcaaagcagtttatcccagccatctgtggtcctttctggtactgctattcacaactttccaactgtccaacaccaagaacttgccaaggcacaatccggtcttgcctttcagcaaacatcaaatactcagcccattcctatattgtatgaacatcaactggggcaggcatcaggactaggaggttcccagctgattgacacacatcttctccaggccagagcaaatcttacccaggcctcaaatctttattctggacaagtacaacagcctggtcagacaaatttttataacactgcccagtcaccaagtgctctccagcaggttacagtacctttaccagcatcgcagctttccttgcctaattttggatctacagggcaacctctaattgctttgcctcagactcttcagcccccattacagcataccactccccaagcacaggctcagagtctgagtcgtcctgcacaagtaagccagcctttcagaggattaattcctgctggaacacagcatagcatgattgcaaccacaggaaaaatgtctgaaatggaactaaaagcctttggaagtggcattgatataaaaccaggcacacctccaatcgctggtagaagcaccacaccaacatctagtcccttccgggctacttctacaagtccgaacagccagtccagcaaaatgaacagcattgtctaccagaagcagttccagtcagcccctgccactgtgagaatgacacaaccatttcctacacagtttgcaccccaggcaaagcagagagcagaggttcttcagtccacgcaacggttcttctctgaacagcaacagagcaaacagataggaggaggcaaagcccagaaagtggacagtgattcaagtaaacctcctgaaacactgaccgaccctcctggggtctgtcaggaaaaagtagaagaaaagccaccccctgcaccctccatagccaccaaacctgttagaactggaccaatcaaacctcaggcgatcaaaaccgaagaaacaaaatcttaaaggctatggtttattgcaggggattgggaggggggcgggaaaacatggagaattaagtcagataatgctggcagccaaaggggcaaaatggcctgtgacattatcctgttcagagcttggagatgtacaagggacataggagcaatttacactgacacacagctgctgtaccagtgaaaacgaggctttgcaagcttgtacctactatataacatgtgcttggttgatggccatgcatcttcagtcagaatttatatataaatgtatgcacccatttttttgagtgcatataatttagacctaaaaatccttatgattagatgaaacaccaaaaatataaggaaaataacacagcagaggaatagctcagcctgaacagtgtgatggtcccagctactacatcagatgcggtttttttgctcccttatgttcttcggatatggttatggcatttgtaggcttggaggtaaagaactgaagataactggtgctggatagaggagccttattttttattatggcagcttgctatttttataacatggtgattgagttgaacacaatcaaagtacagtagtaactgatgtccccttcttcctggatgaatgagcagataaatattgatgtcagcatccttgaaccatatcaaagtgagcagtgtttggctactgcttctatttgaaatggtgctgtgttttggttgtggtctgaagctttgaagcgctacttagcatctcctttcttccatggagctctcacgattcaaacatgacagatttggtaaaatgctggttaggttgagtcttccttgcccccactcagtcatctttgtatgaatcccatgatttgggggtttttttctttttttttttataccagtttttagctggtgtttatgaagaacagtgagtacctagaactgtgccactaattaaaggaaatcctaagaaggtgcatttctttacagagctgtgtcatgccatcctttgggccctctgctggaaaagtagaatcaagtctcaaataatgcctttttaattgtatcctctagtattatagatataggacagtactgtatcatacctctgtgaatgtaaaatatcttgtacctgctttatgatacgtagtagtgaccgtgctttatcagagctgtttttaatgatgttattctagaatgttttctttccagatgatgattcagaagctaattttaaaaaacggtgccaggtaccacaacagtaacagaactttgcaattttctggggttttgttttttacctttttccccccttttttttaaatggagtgtgctggatgtctctataattttattcagatgactgcagaacctggaaaagctgttgctgctattgatgcataacatactgctattggtctttttatataaatatatatatatatatacatatatatatataatttgaatttttggaaactttagctgtgctgtcaactttggaaaaagtatcccggtttactgtgttgagttggcattgtacagaaattaacagccatattggtctagaaacgttaaacttaatttttttccatttgtacaggggtaacgcactgtattaaatatgtaaggtcttatctacatgggtttgattacagaaactaataaagtattctctaaataatga

SEQ ID NO: 169587 - DNA, 1919 bp, Homo sapiens
  Payload ID: 13395
  Gene Symbol: PRRC2C
  Gene Name: proline-rich coiled-coil 2C
  ENST ID: ENST00000392078
  CDS Start-End: 968-1864
gctcgctcgctccccctcggaaagctgcgaaagtgctttggcggtttgtccatccgcagcttcggcttttccagtctggtggcccttccggccacccctttaaccccagctttccctcccccttctttcgatcagagatcggcggagaccctcgaagtgcgcaaacttgacactcaccctgaccggactggggttttaaggggtgtggcaggaggttttggactcgatgagtttccaccgaaatgtcggagaagtcaggccagagcacaaaagcaaaggatgggaaaaagtatgcaacactcagtttatttaatacttacaaggggaaatcattagaaacacagaaaaccacagttgcagctcgacatggattacagagtcttggaaaagtcggtatttcacggcgtatgcctccacctgctaacctcccaagtcttaaagcagaaaacaaaggcaatgatcctaatgtaaacattgtacctaaagatggcacagggtgggcatcaaaacaagagcaacatgaagaagaaaaaacaccagaagtgccaccagcacagccaaaacctggggttgcagctcccccagaagtagcacctgctcccaaatcatgggccagtaacaagcaaggaatccaagtgaatagtcagtttcagcaagaatttcccagcctgcaggcagctggggatcaggaaaaaaaagaaaaggaaacaaatgatgacaactatggacctggacccagtttacgtccaccaaactagatgttgcttgttggagagatggtggtaaggctgctggctcaccttcgtcatctgatcaagatgaaaagctccctggccaggatgaaagcacagctggaacatcagagcaaaatgatatcctcaaagtggtggaaaagaggatagcttgtggtcctccacaggctaaactgaatggacagcaggctgctctcgcttcccagtatagagctatgatgcctccttatatgttccaacagtatccgaggatgacatatcctcctctacatggtcccatgagattcccaccttctttatctgaaacaaacaaaggccttcgaggaagaggcccacctccttcatgggcctctgagcctgaacgcccatccattcttagtgcatcagaactgaaggagcttgataaatttgataacctagatgctgaagctgatgaaggttgggcaggtgctcagatggaagtagattatacagagcaactgaatttcagtgatgatgatgaacaaggaagtaacagtcctaaagagaataacagtgaggatcaaggttcaaaagcctctgaaaacaacgaaaacaaaaaagaaacagatgaagtttccaacactaaatcatcttcccaaatacctgcccaaccatcagtagcaaaagttccctatgggaaaggaccttcatttaatcaggaacgtggaacatcttcacatctgccaccacctccaaagttgcttgcacagcagcatccacctccagatcgacaggcagtacctggaagaccaggcccctttccctccaagcagcaagtagctgatgaagatgaaatatggaagcaaagacgaagacaacaatcagaaatttctgcagcagtagaacgtgctcgtaaacggcgtgaagaggaagagcgaagaatggaagaacaaaggaaggcagcttgtgcggagaaactgaaacgattggatgagaagcttggcatcctggaaaaacaaccatctccagaggaaattagggaaagggagcgagaaaaagaacgggagcgtgagaaagaacttgaaaaagaacaagaacaggagcgagagaaggagagggaaaaagacagagagagacagcaggaaaaggagaaagagctggagaaggagcaggaaaaacaaagagaaatggagaaagaaagaaagc

SEQ ID NO: 169588 - DNA, 10175 bp, Homo sapiens
  Payload ID: 13395
  Gene Symbol: PRRC2C
  Gene Name: proline-rich coiled-coil 2C
  Uniprot ID: Q9Y520
  ENST ID: ENST00000426496
  CDS Start-End: 58-8511
gactggggttttaaggggtgtggcaggaggttttggactcgatgagtttccaccgaaatgtcggagaagtcaggccagagcacaaaagcaaaggatgggaaaaagtatgcaacactcagtttatttaatacttacaaggggaaatcattagaaacacagaaaaccacagctcgacatggattacagagtcttggaaaagtcggtatttcacggcgtatgcctccacctgctaacctcccaagtcttaaagcagaaaacaaaggcaatgatcctaatgtaaacattgtacctaaagatggcacagggtgggcatcaaaacaagagcaacatgaagaagaaaaaacaccagaagtgccaccagcacagccaaaacctggggttgcagctcccccagaagtagcacctgctcccaaatcatgggccagtaacaagcaaggtgggcaaggagatggaatccaagtgaatagtcagtttcagcaagaatttcccagcctgcaggcagctggggatcaggaaaaaaaagaaaaggaaacaaatgatgacaactatggacctggacccagtttacgtccaccaaatgttgcttgttggagagatggtggtaaggctgctggctcaccttcgtcatctgatcaagatgaaaagctccctggccaggatgaaagcacagctggaacatcagagcaaaatgatatcctcaaagtggtggaaaagaggatagcttgtggtcctccacaggctaaactgaatggacagcaggctgctctcgcttcccagtatagagctatgatgcctccttatatgttccaacagtatccgaggatgacatatcctcctctacatggtcccatgagattcccaccttctttatctgaaacaaacaaaggccttcgaggaagaggcccacctccttcatgggcctctgagcctgaacgcccatccattcttagtgcatcagaactgaaggagcttgataaatttgataacctagatgctgaagctgatgaaggttgggcaggtgctcagatggaagtagattatacagagcaactgaatttcagtgatgatgatgaacaaggaagtaacagtcctaaagagaataacagtgaggatcaaggttcaaaagcctctgaaaacaacgaaaacaaaaaagaaacagatgaagtttccaacactaaatcatcttcccaaatacctgcccaaccatcagtagcaaaagttccctatgggaaaggaccttcatttaatcaggaacgtggaacatcttcacatctgccaccacctccaaagttgcttgcacagcagcatccacctccagatcgacaggcagtacctggaagaccaggcccctttccctccaagcagcaagtagctgatgaagatgaaatatggaagcaaagacgaagacaacaatcagaaatttctgcagcagtagaacgtgctcgtaaacggcgtgaagaggaagagcgaagaatggaagaacaaaggaaggcagcttgtgcggagaaactgaaacgattggatgagaagcttggcatcctggaaaaacaaccatctccagaggaaattagggaaagggagcgagaaaaagaacgggagcgtgagaaagaacttgaaaaagaacaagaacaggagcgagagaaggagagggaaaaagacagagagagacagcaggaaaaggagaaagagctggagaaggagcaggaaaaacaaagagaaatggagaaagaaagaaagcaagaaaaagaaaaagaactagaacggcagaaagaaaaggaaaaagaactacaaaagatgaaagaacaagaaaaggaatgtgagctggagaaggaaagggaaaaattagaggagaaaattgaacccagagaacctaatttagagcccatggtagaaaaacaagaaagtgaaaacagctgtaataaagaggaggaacccgttttcactagacaagacagcaatcgcagtgaaaaggaagccacaccagtggtgcatgaaacagaaccagaatcagggtctcaacctcggccggctgtattatctggctatttcaaacagtttcagaagtctttacctccacgattccagcggcagcaggaacagatgaaacagcagcagtggcagcagcagcaacagcaaggtgtacttccacagactgttccttcacaaccgtccagtagtactgtccctcctccaccacacagacctctttatcagcctatgcagcctcatcctcagcatttggcttctatgggttttgatccaaggtggctcatgatgcagtcctacatggatcctcgaatgatgtcaggaagacctgctatggatattccacccattcatcctggaatgattcctcctaaaccattaatgagaagagaccagatggaagggtcaccgaacagttctgagtcatttgagcatatagctcgatctgcaagagatcacgcaatttccctttctgagcctcgtatgctgtgggggtcagatccctatcctcatgctgagcctcaacaagcaactactcccaaagcaacagaagagcctgaggatgtaaggtctgaagctgcgttggaccaggaacagattactgctgcttattctgtagaacataatcaattagaggctcacccaaaggcagactttatcagagaatcaagtgaggcacaagtacaaaagtttttaagcagatctgtggaagatgttagacctcaccatactgatgcaaataatcagtctgcttgttttgaagcacctgatcaaaagaccttatccgctcctcaagaggagcggatttcagctgtagaaagtcagccttcccggaaaagaagtgtttcccatggatctaaccatacgcaaaaaccagacgagcagagaagtgaaccatctgcaggcattcctaaagtaaccagcagatgcattgattcaaaagaaccaatagaaaggccagaggagaaaccaaaaaaggaaggctttatacgatcttctgaaggaccaaaacctgaaaaagtatataaatctaaatcagaaactcgttggggcccacgaccaagctctaacagaagggaagaagttaatgatagacctgtgagaagatcaggtcccattaaaaaacctgtacttagagatatgaaagaggaacgggaacagaggaaggagaaagaaggagaaaaggccgaaaaggtcactgaaaaagtagttgtaaagcctgaaaagacggaaaagaaggatcttcctcctcccccaccaccacctcagccaccagcaccaattcagccacagtcagttccaccaccaattcaaccagaagcagagaaatttccttcaacagaaactgcaactttggctcaaaaaccatctcaggatactgagaagcctctggaacctgtgagtactgttcaggtagagcctgcagttaagactgtaaaccaacagactatggcagcaccagtagtcaaagaagaaaaacaacctgagaaagtcatcagcaaagaccttgttatagagaggcctcgaccagattcaagaccagcagttaaaaaagaatcaactttgcctcccaggacctattggaaagaagctagagagagagattggtttccagatcaaggatacagaggtcgaggccgaggtgaatattactccagaggtcgaagctatagaggttcttatggagggcgtggcaggggtggtaggggacacactcgagattatcctcagtatagagacaataagccaagagcagagcatataccctcagggcctctcagacagcgagaagaaagtgaaacacggagtgagagctctgattttgaagttgtccccaaaagaagacgacagcggggttcagagactgacacagacagtgaaattcatgaaagtgcaagtgacaaggacagtttaagtaaaggcaaacttcccaaaagagaggaacggcctgaaaacaaaaaacctgtaaagcctcattcttctttcaagcctgataatcatgttcgaatagataatagactgctagaaaagccttatgtaagggatgacgataaagctaaaccaggctttcttcctaaaggagagcctacaaggagaggcagagggggaacattcaggcgtggtggaagggatcctggaggccgtccatcacgcccttccactttacgaagaccagcttatcgggacaatcagtggaacccaaggcagtcagaagttcctaaaccagaagatggagagccgccaagaagacatgagcagtttattcctatagcagcagataaacgacctccaaaatttgagcgaaaatttgacccagctagagaaaggcctcgaaggcagcgtcctactcgaccaccaaggcaagacaagccacctcgatttagacggctaagagagagggaggctgcttcaaaatcaaatgaggtggtagcagtgcccacaaatggcacagttaataatgtggctcaagaaccagttaatactcttggggatatttccgggaataagacaccagatttatctaatcagaactcttcagatcaggcaaatgaagaatgggaaacagcttctgaaagcagtgatttcaatgagaggcgagagagggatgaaaaaaaaaatgctgacttgaatgcacaaacagttgtaaaggttggagagaatgttctacctccaaagagggaaattgcaaagagaagtttttctagtcagagaccagtagatcgtcagaatcgacgtggcaacaatggtccacccaaatcaggaaggaatttctcaggtcctagaaatgaaaggagaagtggcccaccatcaaaaagtgggaagagagggccatttgatgaccagcctgcaggcacaactggggttgacctcatcaatggcagctctgcacaccatcaggaaggagtacctaatggtacaggacaaaagaactccaaagattctactgggaaaaaaagagaagaccccaaaccaggccctaaaaaaccaaaagagaaagtggatgctctatcacagtttgatctcaacaattatgcaagtgttgttataattgatgatcatcctgaagtaacagtaattgaagatccccagtcaaatttgaatgatgatggttttactgaagtggtatccaaaaaacaacaaaaacgtttacaggatgaagaacgccgaaagaaggaagaacaagtcatacaggtctggaacaaaaagaatgcaaatgaaaaaggaagaagccagacttctaagcttcctccaagatttgccaaaaaacaggctacagggatccagcaagcacagtcttcagcctcagttccacctctagcttcggctccacttccaccttcaacctcagcttcagttccagcctcaacctcagctccacttccggcaaccttaactccagttccagcctcaacctcagctccggttccagcctcaactttagctccagttctggcctcaacctcagctccagttccagcctcacccttagctccagtttcagcctcagcctcagtctcagcttcagttccagcctctacttcagctgcagctataacctcttcttcagctccagcctcagccccagctccaacccccatccttgcctcagtttcaaccccagcttctgtcaccattcttgcctcagcctcaattcccattcttgcttcagccctagcatcaacttcagctccaacgccagccccagcagcctcttccccagctgccccagtcatcacagcaccaactatcccagcctcagccccaactgcctcagtcccacttgcccctgcctcagcttcagccccagccccagcccctaccccagtctcagccccaaatcctgccccacctgccccagcccagactcaggcacagacccacaaaccagtccagaatccactacagactacatctcagtcttcaaaacaaccaccaccatcaattaggctgccttcagctcaaacacctaatggcacagattatgtagcctcaggaaaatccatccagaccccacagtcacatggcactctgacagctgaattatgggataacaaggtggccccaccagctgtgctgaatgatatctctaagaaattaggtcccattagtccaccacagccaccttcagtcagtgcatggaataagcccttaacatcgtttggatcagctccttcatcagagggagcgaagaatggtcaagaaagtggactcgaaattggaactgacacaattcagtttggtgctccagcctcaaatggaaatgaaaatgaagttgttcctgtgctttcggaaaaatctgctgacaaaatacctgaacctaaagaacagcggcagaagcagccacgagcaggacctatcaaagcccagaagcttccagatttgagtccagtagaaaacaaagaacacaaacctggtcccattggaaaggaacgttcattaaaaaatagaaaagtaaaagatgcccaacaggtggagccagaaggacaagagaaaccaagcccagctacagtcagaagcacagatcctgtcacgacaaaggagactaaagcagtctcagaaatgtctactgaaataggaacaatgatctcggtatcatctgcagaatatggtactaatgcaaaggagtctgtaacagactatactacaccctcttcttctttgcctaacaccgtggctactaataatacaaagatggaggatactttggttaataatgtgcccctgcccaacacccttcccctccctaagagggagactatacaacagagctccagcctaacttcagttcctcccactactttcagcctcaccttcaagatggagtctgcacgcaaagcatgggagaattctccaaatgtaagggaaaaggggtctccagtaacttccacagcacctccaattgcaactggagtcagcagtagtgccagtggaccaagcactgctaattacaattcgttctcaagtgcatccatgccccagattcctgttgcttcagtcactcctacagcatcactatcaggagctggtacatacactacctcttctttgagcacaaaatctacaaccacatcggaccctccaaatatttgtaaagtgaaacctcagcagttacagacaagcagcctgccttctgcaagtcatttttcacagttaagctgtatgccttcccttattgcccagcagcaacagaatccgcaagtttatgtgtctcagtctgcagcagctcaaatcccagccttctatatggacacaagtcatttattcaatacccaacatgcacgattggctccgccatccttggctcaacaacagggtttccaaccaggtctctctcagccaacttcagttcagcagattccaatccctatttatgcaccactgcaagggcagcatcaagcccaactgagtttgggggctggccctgctgtttcccaggctcaggaattgttcagctcctcacttcaaccatatagatctcagccagcttttatgcaaagcagtttatcccagccatctgtggtcctttctggtactgctattcacaactttccaactgtccaacaccaagaacttgccaaggcacaatccggtcttgcctttcagcaaacatcaaatactcagcccattcctatattgtatgaacatcaactggggcaggcatcaggactaggaggttcccagctgattgacacacatcttctccaggccagagcaaatcttacccaggcctcaaatctttattctggacaagtacaacagcctggtcagacaaatttttataacactgcccagtcaccaagtgctctccagcaggttacagtacctttaccagcatcgcagctttccttgcctaattttggatctacagggcaacctctaattgctttgcctcagactcttcagcccccattacagcataccactccccaagcacaggctcagagtctgagtcgtcctgcacaagtaagccagcctttcagaggattaattcctgctggaacacagcatagcatgattgcaaccacaggaaaaatgtctgaaatggaactaaaagcctttggaagtggcattgatataaaaccaggcacacctccaatcgctggtagaagcaccacaccaacatctagtcccttccgggctacttctacaagtccgaacagccagtccagcaaaatgaacagcattgtctaccagaagcagttccagtcagcccctgccactgtgagaatgacacaaccatttcctacacagtttgcaccccaggcaaagcagagagcagaggttcttcagtccacgcaacggttcttctctgaacagcaacagagcaaacagataggaggaggcaaagcccagaaagtggacagtgattcaagtaaacctcctgaaacactgaccgaccctcctggggtctgtcaggaaaaagtagaagaaaagccaccccctgcaccctccatagccaccaaacctgttagaactggaccaatcaaacctcaggcgatcaaaaccgaagaaacaaaatcttaaaggctatggtttattgcaggggattgggaggggggcgggaaaacatggagaattaagtcagataatgctggcagccaaaggggcaaaatggcctgtgacattatcctgttcagagcttggagatgtacaagggacataggagcaatttacactgacacacagctgctgtaccagtgaaaacgaggctttgcaagcttgtacctactatataacatgtgcttggttgatggccatgcatcttcagtcagaatttatatataaatgtatgcacccatttttttgagtgcatataatttagacctaaaaatccttatgattagatgaaacaccaaaaatataaggaaaataacacagcagaggaatagctcagcctgaacagtgtgatggtcccagctactacatcagatgcggtttttttgctcccttatgttcttcggatatggttatggcatttgtaggcttggaggtaaagaactgaagataactggtgctggatagaggagccttattttttattatggcagcttgctatttttataacatggtgattgagttgaacacaatcaaagtacagtagtaactgatgtccccttcttcctggatgaatgagcagataaatattgatgtcagcatccttgaaccatatcaaagtgagcagtgtttggctactgcttctatttgaaatggtgctgtgttttggttgtggtctgaagctttgaagcgctacttagcatctcctttcttccatggagctctcacgattcaaacatgacagatttggtaaaatgctggttaggttgagtcttccttgcccccactcagtcatctttgtatgaatcccatgatttgggggtttttttctttttttttttataccagtttttagctggtgtttatgaagaacagtgagtacctagaactgtgccactaattaaaggaaatcctaagaaggtgcatttctttacagagctgtgtcatgccatcctttgggccctctgctggaaaagtagaatcaagtctcaaataatgcctttttaattgtatcctctagtattatagatataggacagtactgtatcatacctctgtgaatgtaaaatatcttgtacctgctttatgatacgtagtagtgaccgtgctttatcagagctgtttttaatgatgttattctagaatgttttctttccagatgatgattcagaagctaattttaaaaaacggtgccaggtaccacaacagtaacagaactttgcaattttctggggttttgttttttacctttttccccccttttttttaaatggagtgtgctggatgtctctataattttattcagatgactgcagaacctggaaaagctgttgctgctattgatgcataacatactgctattggtctttttatataaatatatatatatatatacatatatatatataatttgaatttttggaaactttagctgtgctgtcaactttggaaaaagtatcccggtttactgtgttgagttggcattgtacagaaattaacagccatattggtctagaaacgttaaacttaatttttttccatttgtacaggggtaacgcactgtattaaatatgtaaggtcttatctacatgggtttgattacagaaactaataaagtattctctaaataatga

SEQ ID NO: 169589 - DNA, 5566 bp, Homo sapiens
  Payload ID: 13395
  Gene Symbol: PRRC2C
  Gene Name: proline-rich coiled-coil 2C
  ENST ID: ENST00000495585
  CDS Start-End: 1-3902
tagcagtgcccacaaatggcacagttaataatgtggctcaagaaccagttaatactcttggggatatttccgggaataagacaccagatttatctaatcagaactcttcagatcaggcaaatgaagaatgggaaacagcttctgaaagcagtgatttcaatgagaggcgagagagggatgaaaaaaaaaatgctgacttgaatgcacaaacagttgtaaaggttggagagaatgttctacctccaaagagggaaattgcaaagagaagtttttctagtcagagaccagtagatcgtcagaatcgacgtggcaacaatggtccacccaaatcaggaaggaatttctcaggtcctagaaatgaaaggagaagtggcccaccatcaaaaagtgggaagagagggccatttgatgaccagcctgcaggcacaactggggttgacctcatcaatggcagctctgcacaccatcaggaaggagtacctaatggtacaggacaaaagaactccaaagattctactgggaaaaaaagagaagaccccaaaccaggccctaaaaaaccaaaagagaaagtggatgctctatcacagtttgatctcaacaattatgcaagtgttgttataattgatgatcatcctgaagtaacagtaattgaagatccccagtcaaatttgaatgatgatggttttactgaagtggtatccaaaaaacaacaaaaacgtttacaggatgaagaacgccgaaagaaggaagaacaagtcatacaggtctggaacaaaaagaatgcaaatgaaaaaggaagaagccagacttctaagcttcctccaagatttgccaaaaaacaggctacagggatccagcaagcacagtcttcagcctcagttccacctctagcttcggctccacttccaccttcaacctcagcttcagttccagcctcaacctcagctccacttccggcaaccttaactccagttccagcctcaacctcagctccggttccagcctcaactttagctccagttctggcctcaacctcagctccagttccagcctcacccttagctccagtttcagcctcagcctcagtctcagcttcagttccagcctctacttcagctgcagctataacctcttcttcagctccagcctcagccccagctccaacccccatccttgcctcagtttcaaccccagcttctgtcaccattcttgcctcagcctcaattcccattcttgcttcagccctagcatcaacttcagctccaacgccagccccagcagcctcttccccagctgccccagtcatcacagcaccaactatcccagcctcagccccaactgcctcagtcccacttgcccctgcctcagcttcagccccagccccagcccctaccccagtctcagccccaaatcctgccccacctgccccagcccagactcaggcacagacccacaaaccagtccagaatccactacagactacatctcagtcttcaaaacaaccaccaccatcaattaggctgccttcagctcaaacacctaatggcacagattatgtagcctcaggaaaatccatccagaccccacagtcacatggcactctgacagctgaattatgggataacaaggtggccccaccagctgtgctgaatgatatctctaagaaattaggtcccattagtccaccacagccaccttcagtcagtgcatggaataagcccttaacatcgtttggatcagctccttcatcagagggagcgaagaatggtcaagaaagtggactcgaaattggaactgacacaattcagtttggtgctccagcctcaaatggaaatgaaaatgaagttgttcctgtgctttcggaaaaatctgctgacaaaatacctgaacctaaagaacagcggcagaagcagccacgagcaggacctatcaaagcccagaagcttccagatttgagtccagtagaaaacaaagaacacaaacctggtcccattggaaaggaacgttcattaaaaaatagaaaagtaaaagatgcccaacaggtggagccagaaggacaagagaaaccaagcccagctacagtcagaagcacagatcctgtcacgacaaaggagactaaagcagtctcagaaatgtctactgaaataggaacaatgatctcggtatcatctgcagaatatggtactaatgcaaagatggagtctgcacgcaaagcatgggagaattctccaaatgtaagggaaaaggggtctccagtaacttccacagcacctccaattgcaactggagtcagcagtagtgccagtggaccaagcactgctaattacaattcgttctcaagtgcatccatgccccagattcctgttgcttcagtcactcctacagcatcactatcaggagctggtacatacactacctcttctttgagcacaaaatctacaaccacatcggaccctccaaatatttgtaaagtgaaacctcagcagttacagacaagcagcctgccttctgcaagtcatttttcacagttaagctgtatgccttcccttattgcccagcagcaacagaatccgcaagtttatgtgtctcagtctgcagcagctcaaatcccagccttctatatggacacaagtcatttattcaatacccaacatgcacgattggctccgccatccttggctcaacaacagggtttccaaccaggtctctctcagccaacttcagttcagcagattccaatccctatttatgcaccactgcaagggcagcatcaagcccaactgagtttgggggctggccctgctgtttcccaggctcaggaattgttcagctcctcacttcaaccatatagatctcagccagcttttatgcaaagcagtttatcccagccatctgtggtcctttctggtactgctattcacaactttccaactgtccaacaccaagaacttgccaaggcacaatccggtcttgcctttcagcaaacatcaaatactcagcccattcctatattgtatgaacatcaactggggcaggcatcaggactaggaggttcccagctgattgacacacatcttctccaggccagagcaaatcttacccaggcctcaaatctttattctggacaagtacaacagcctggtcagacaaatttttataacactgcccagtcaccaagtgctctccagcaggttacagtacctttaccagcatcgcagctttccttgcctaattttggatctacagggcaacctctaattgctttgcctcagactcttcagcccccattacagcataccactccccaagcacaggctcagagtctgagtcgtcctgcacaagtaagccagcctttcagaggattaattcctgctggaacacagcatagcatgattgcaaccacaggaaaaatgtctgaaatggaactaaaagcctttggaagtggcattgatataaaaccaggcacacctccaatcgctggtagaagcaccacaccaacatctagtcccttccgggctacttctacaagtccgaacagccagtccagcaaaatgaacagcattgtctaccagaagcagttccagtcagcccctgccactgtgagaatgacacaaccatttcctacacagtttgcaccccaggcaaagcagagagcagaggttcttcagtccacgcaacggttcttctctgaacagcaacagagcaaacagataggaggaggcaaagcccagaaagtggacagtgattcaagtaaacctcctgaaacactgaccgaccctcctggggtctgtcaggaaaaagtagaagaaaagccaccccctgcaccctccatagccaccaaacctgttagaactggaccaatcaaacctcaggcgatcaaaaccgaagaaacaaaatcttaaaggctatggtttattgcaggggattgggaggggggcgggaaaacatggagaattaagtcagataatgctggcagccaaaggggcaaaatggcctgtgacattatcctgttcagagcttggagatgtacaagggacataggagcaatttacactgacacacagctgctgtaccagtgaaaacgaggctttgcaagcttgtacctactatataacatgtgcttggttgatggccatgcatcttcagtcagaatttatatataaatgtatgcacccatttttttgagtgcatataatttagacctaaaaatccttatgattagatgaaacaccaaaaatataaggaaaataacacagcagaggaatagctcagcctgaacagtgtgatggtcccagctactacatcagatgcggtttttttgctcccttatgttcttcggatatggttatggcatttgtaggcttggaggtaaagaactgaagataactggtgctggatagaggagccttattttttattatggcagcttgctatttttataacatggtgattgagttgaacacaatcaaagtacagtagtaactgatgtccccttcttcctggatgaatgagcagataaatattgatgtcagcatccttgaaccatatcaaagtgagcagtgtttggctactgcttctatttgaaatggtgctgtgttttggttgtggtctgaagctttgaagcgctacttagcatctcctttcttccatggagctctcacgattcaaacatgacagatttggtaaaatgctggttaggttgagtcttccttgcccccactcagtcatctttgtatgaatcccatgatttgggggtttttttctttttttttttataccagtttttagctggtgtttatgaagaacagtgagtacctagaactgtgccactaattaaaggaaatcctaagaaggtgcatttctttacagagctgtgtcatgccatcctttgggccctctgctggaaaagtagaatcaagtctcaaataatgcctttttaattgtatcctctagtattatagatataggacagtactgtatcatacctctgtgaatgtaaaatatcttgtacctgctttatgatacgtagtagtgaccgtgctttatcagagctgtttttaatgatgttattctagaatgttttctttccagatgatgattcagaagctaattttaaaaaacggtgccaggtaccacaacagtaacagaactttgcaattttctggggttttgttttttacctttttccccccttttttttaaatggagtgtgctggatgtctctataattttattcagatgactgcagaacctggaaaagctgttgctgctattgatgcataacatactgctattggtctttttatataaatatatatatatatatacatatatatatataatttgaatttttggaaactttagctgtgctgtcaactttggaaaaagtatcccggtttactgtgttgagttggcattgtacagaaattaacagccatattggtctagaaacgttaaacttaatttttttccatttgtacaggggtaacgcactgtattaaatatgtaaggtcttatctacatgggtttgattacagaaactaataaagtattctctaaataatga

SEQ ID NO: 169590 - DNA, 2065 bp, Homo sapiens
  Payload ID: 13396
  Gene Symbol: PNRC1
  Gene Name: proline-rich nuclear receptor coactivator 1
  Uniprot ID: Q12796
  ENST ID: ENST00000336032
  CDS Start-End: 118-1101
tgttccgcgatcttctcaggctctcctagcagcatccatcgccgccaccctatcttcactggcttcattcaccttctccttctctcttcgttgctgagcgacaagcttcctagcgctatgactgtcgtctccgtcccgcagcgggagccgctcgtcctgggtggccgccttgcgccgcttggcttttcctcccgaggttactttggggccctcccgatggtgaccacggctccgcctcctttaccccggatcccggacccccgggcactgcccccgaccctcttcctccctcatttcctagggggagatggcccgtgtctgaccccccagcctcgcgctccagcagctctgcccaaccgcagcctcgccgtggcgggaggcactcctcgggcagcgccgaagaagcggcgaaagaagaaggtgcgggccagccccgcagggcagctgcccagccgcttccaccagtaccagcagcaccggccgagtctggagggcggccggagccccgcgaccggcccgagcggagcgcaggaggtcccgggcccggccgccgccttggccccgagtcctgcagccgcagccggcacggagggagccagccccgaccttgccccgctgcggcccgcggctcccggccaaacccccctcaggaaagaggttttaaaatcaaagatgggaaaatcggagaaaattgcccttccccatggccagcttgttcatggtatacacttgtatgagcaaccaaagataaacagacagaaaagcaaatataacttgccactaaccaagatcacctctgcaaaaagaaatgaaaacaacttttggcaggattctgtttcatctgacagaattcagaagcaggaaaaaaagccttttaaaaataccgagaacattaaaaattcgcatttgaagaaatcagcatttctaactgaagtgagccaaaaggaaaattatgctggggcaaagtttagtgatccaccttctcctagtgttcttccaaagcctcctagtcactggatgggaagcactgttgaaaattccaaccaaaacagggagctgatggcagtacacttaaaaacgctcctcaaagttcaaacttagatttcagatttcagtatgtgtgtaaaacataatttttcccatatccctggactcttgagaaaattggtacagaaatggaaatttgccttgttgcaacatacaattgcaaaagatgagtttaaaaaattacatacaaacagcttgtattatattttatattttgtaaatactgtataccatgtattatgtgtatattgttcatacttgagaggtatattatagttttgttatgaaagtatgtattttgccctgcccacattgcaggtgttttgtatatatacaatggataaattttaagtgtgtgctaaggcacatggaagaccgattttatttgcacaaggtactgagatttttttcaagaaacagctgtcaaatctcaaggtgaagatctaaatgtgaacagtttactaatgcactactgaagtttaaatctgtggcacaatcaatgtaagcatggggtttgtttctctaaattgatttgtaatctgaaattactgaacaactcctattcccatttttgctaaactcaatttctggttttggtatatatccattccagcttaatgcctctaattttaatgccaacaaaattggttgtaatcaaattttaaaataataataatttggcccccccttttaaaatagtcttgactctttgtgtgtgactgtttctcatgtttgaatgtgtgactaggagatgattttgtgtggttggatttttttgacttctactttactggctgagtgtgagccgccatgcctggccataatctacattttcttaccaggagcagcattgaggtttttgagcatagtacttgactactctagaggctgagacgggagcatctcttgagcctgagaagtggagattgcaattgagctaggatcaggccactgcactccagcctgggtaacagacgctgtctcaaaaaaaaggccaagagaaagtaagggagacaga

SEQ ID NO: 169591 - DNA, 1345 bp, Homo sapiens
  Payload ID: 13396
  Gene Symbol: PNRC1
  Gene Name: proline-rich nuclear receptor coactivator 1
  ENST ID: ENST00000354922
  CDS Start-End: 916-1344
ggcgaggccgggtgggggcagctggggaaggactgggcccggctttcggcctcccggctatcgggagccccagtcctagtcggtgaaacgcggagacggcctctaacgtcccgccgtagggggtggagtgggctccgagcggctgggtttcgtttggttggagttgtgccaaaatgtgaggtgcccggtgtgggacgcgcagtccagttggggctctgcccgcctcgggcctgacctacttagtggttccaagttaagagttggcaggagccgcacaaaactgattttattacttttgccactgtggtacttcgtgttagtgtgtccagagtaagttttcagaagagttagcaattgaattgacttagcccgtctgattgcagtgctattgcattaggataaaatggatagaagtttaaataggattaagtctacgaaatgatttcaaagtcttgtcagaataacgttttatggacttaagttcaatgacttaatcttcgtaataatgaaatgaaaaagttcccgttatttagtgaagaatgttgcattgaattagagatttgcggtttatctgtgcccttgggaaaaaatttgcccaccttgtttctttaaattatcgtctcaatgtctcccttttaaaattccacgacttttgaaatatccgtgattacctaaaagcttttgtgcttgtttcctggcctgttttctagaacaggtactaactagggagctctggcagtgaaccttattgacgtggaaagttgtggtcctctttcgtgtcgtgtcttgcttactaccgcgttacaagtgttggtagtgcagtgatctagtggattaccttacgcttttccatcctttcaagacttcctataaggcccacttaagttgggaaagattaaggttttaaaatcaaagatgggaaaatcggagaaaattgcccttccccatggccagcttgttcatggtatacacttgtatgagcaaccaaagataaacagacagaaaagcaaatataacttgccactaaccaagatcacctctgcaaaaagaaatgaaaacaacttttggcaggattctgtttcatctgacagaattcagaagcaggaaaaaaagccttttaaaaataccgagaacattaaaaattcgcatttgaagaaatcagcatttctaactgaagtgagccaaaaggaaaattatgctggggcaaagtttagtgatccaccttctcctagtgttcttccaaagcctcctagtcactggatgggaagcactgttgaaaattccaaccaaaacagggagctgatggcagtacacttaaaaacgctcctcaaagttcaaacttaga

SEQ ID NO: 169592 - DNA, 816 bp, Homo sapiens
  Payload ID: 13396
  Gene Symbol: PNRC1
  Gene Name: proline-rich nuclear receptor coactivator 1
  ENST ID: ENST00000369472
  CDS Start-End: 239-667
gttgctgcgccgccaccgcccgagtcatgttccgcgatcttctcaggctctcctagcagcatccatcgccgccaccctatcttcactggcttcattcaccttctccttctctcttcgttgctgagcgacaagcttcctagcgctatgactgtcgtctccgtcccgcagcgggagccgctcgtcctgggtggccgccttgcgccgcttggcttttcctcccgaggttttaaaatcaaagatgggaaaatcggagaaaattgcccttccccatggccagcttgttcatggtatacacttgtatgagcaaccaaagataaacagacagaaaagcaaatataacttgccactaaccaagatcacctctgcaaaaagaaatgaaaacaacttttggcaggattctgtttcatctgacagaattcagaagcaggaaaaaaagccttttaaaaataccgagaacattaaaaattcgcatttgaagaaatcagcatttctaactgaagtgagccaaaaggaaaattatgctggggcaaagtttagtgatccaccttctcctagtgttcttccaaagcctcctagtcactggatgggaagcactgttgaaaattccaaccaaaacagggagctgatggcagtacacttaaaaacgctcctcaaagttcaaacttagatttcagatttcagtatgtgtgtaaaacataatttttcccatatccctggactcttgagaaaattggtacagaaatggaaatttgccttgttgcaacatacaattgcaaaagatgagtttaaaaaattacatacaaacagcttgtatta

SEQ ID NO: 169593 - DNA, 2416 bp, Homo sapiens
  Payload ID: 13397
  Gene Symbol: PNRC2
  Gene Name: proline-rich nuclear receptor coactivator 2
  Uniprot ID: Q9NPJ4
  ENST ID: ENST00000334351
  CDS Start-End: 412-831
ctgccgactccattttgtcggtagaggcagaaggagaaggtcgggttgtagaagctggggtggccggcagctcgctcatcggtgttcgtgggctttgtcggtccgtgcctcgtctctccctggaaagggagggaggcttcgacgtcgagagggagccgctgccgcgttagttccgagcttgaagtcactaggacttctctcaaacttgtgtgctgaggagactcagatgttggcctcagctcctaggctgaactcagcagatcggcccatgaaaacttctgtattgagacaaaggaagggatctgtcagaaagcaacacttgttatcttgggcttggcagcaaggaagaggacaggtagtggagatcctgcaatctgaaaagcagactgaaaggtgacaaagaagctgaagatgggtggtggagagaggtataacattccagcccctcaatctagaaatgttagtaagaaccaacaacagcttaacagacagaagaccaaggaacagaattcccagatgaagattgttcataagaaaaaagaaagaggacatggttataactcatcagcagctgcctggcaggccatgcaaaatggggggaagaacaaaaattttccaaataatcaaagttggaattctagcttatcaggtcccaggttactttttaaatctcaagctaatcagaactatgctggtgccaaatttagtgagccgccatcaccaagtgttcttcccaaaccaccaagccactgggtccctgtttcctttaatccttcagataaggaaataatgacatttcaacttaaaaccttacttaaagtacaggtataaaataagacaaatgtttaaatttagttatgttcacggatagttgtcaattggtctgaaacaaattcgctagggaatctatttgtgtagaactaattaatgtaaaaaaaatagaccatctcgtgttgtgtgcactgtgatataatggtagtatcagtgcaacttaaactaatgattgtacttgatattaagtgttctcaactgagtaacttttaagtggaaaccaagtttagatttggggagtggtaaaggaatcagctttttctattgttaggggaagacagtaatttatcattcatggaccagtagattgttgaaagttggtgaatcggattataagcttctagctaacacaaggattcagaattaggtaaacatctgaaggtttagtatattagaaacacccaaaccagtaatatgctaacctgatgcactgctgaaagaaaatgtgaatttttcgtaataattgcattttagtgaattgtacagtgggtggaaagggcatttggagctcattagaatgagacatagtacaccccaatggccctgtttattaaatgtagtggattaagtgtctgtcaacaaatacaccaaaaccattttttatagaaacagtatttaatggtcactcaatagctttcaaaatacatttttgtattacagcactgcacaagctattctaatagtgctctggcctcatcattcctgcaaagcttgctttggggagttggataatgtgaaaattttaagtacctaggggagaaagagccatgtaaatatctgtaataaacttgtagcatatgtaaagttttcttggcctttatcttacaaaaatggagtattttagtatgaatttgctgaatgtaagaccgtggactgttttttataatatggcctaattttaaaggtccaaaataacttgtttttaaagtttgcccttgtgctaaagtgccagtgtatgtatgttatacttgatttggttgtaaactatatttcaaagtaaaccctagtgtaataagttttataactaaaaaggtttaagctgctaaaactatttttaagagatgtgaaatgcagtatgggactatctttttttcctcctctaagcccaaagattaactagagtccctccaaccttatagattgttggctttcacaatcttataacctaggatacaggtagtttcgagtatggtgccagtgatgttttgtttttgtttggtcaaggggtaggtgcaacccaatggaccacttatgcaaaagatgtaaactcttgcataatacattgataacatgttttgccaactttaaatgcttaaacataagcgaaaccagtagcaagtatgtgggtcagcttaaaaattttgattgttaatgccctattttctaatttggcacctcttgatgcctaagcaggtaagcagatgcctaagctgtatttctccaaataaatcaagatgaagtactgcccaagttaaatattgatagcctaaagacaagtttatgtagtacttaatgtacatgatatgaatgtgaagcataaaattaaataaaatttttccccattggcttggttttattttaaaaa

SEQ ID NO: 169594 - DNA, 814 bp, Homo sapiens
  Payload ID: 13397
  Gene Symbol: PNRC2
  Gene Name: proline-rich nuclear receptor coactivator 2
  Uniprot ID: Q9NPJ4
  ENST ID: ENST00000374468
  CDS Start-End: 392-811
gtcggtagaggcagaaggagaaggtcgggttgtagaagctggggtggccggcagctcgctcatcggtgttcgtgggctttgtcggtccgtgcctcgtctctccctggaaagggagggaggcttcgacgtcgagagggagccgctgccgcgttagttccgagcttgaagtcagacttctctcaaacttgtgtgctgaggagactcagatgttggcctcagctcctaggctgaactcagcagatcggcccatgaaaacttctgtattgagacaaaggaagggatctgtcagaaagcaacacttgttatcttgggcttggcagcaaggaagaggacaggtagtggagatcctgcaatctgaaaagcagactgaaaggtgacaaagaagctgaagatgggtggtggagagaggtataacattccagcccctcaatctagaaatgttagtaagaaccaacaacagcttaacagacagaagaccaaggaacagaattcccagatgaagattgttcataagaaaaaagaaagaggacatggttataactcatcagcagctgcctggcaggccatgcaaaatggggggaagaacaaaaattttccaaataatcaaagttggaattctagcttatcaggtcccaggttactttttaaatctcaagctaatcagaactatgctggtgccaaatttagtgagccgccatcaccaagtgttcttcccaaaccaccaagccactgggtccctgtttcctttaatccttcagataaggaaataatgacatttcaacttaaaaccttacttaaagtacaggtataaaat

SEQ ID NO: 169595 - DNA, 171 bp, Homo sapiens
  Payload ID: 13397
  Gene Symbol: PNRC2
  Gene Name: proline-rich nuclear receptor coactivator 2
  ENST ID: ENST00000579103
  CDS Start-End: 1-171
atgttggcctcagctcctaggctgaactcagcagatcggcccatgaaaacttctgtattgagacaaaggaagggatctgtcagaaagcaacacttgttatcttgggcttggcagcaaggaagaggacaggtagtggagatcctgcaatctgaaaagcagactgaaaggtga

SEQ ID NO: 169596 - DNA, 380 bp, Homo sapiens
  Payload ID: 13397
  Gene Symbol: PNRC2
  Gene Name: proline-rich nuclear receptor coactivator 2
  ENST ID: ENST00000471915
  CDS Start-End: 373-380
tgggtggggagagctgcagccacaggaaacggtaacacggcgcgtaaagggctctaattgaacttaaggaccaatggggccaccaagcaggaagtgactgacttgcccgcgtgtgtctgaaccgccttcacagggaggcaacttttgactaggacttctctcaaacttgtgtgctgaggagactcagatgttggcctcagctcctaggctgaactcagcagatcggcccatgaaaacttctgtattgagacaaaggaagggatctgtcagaaagcaacacttgttatcttgggcttggcagcaaggaagaggacaggtagtggagatcctgcaatctgaaaagcagactgaaaggtgacaaagaagctgaagatgggtgg

SEQ ID NO: 169597 - DNA, 775 bp, Homo sapiens
  Payload ID: 13398
  Gene Symbol: PRB1
  Gene Name: proline-rich protein BstNI subfamily 1
  ENST ID: ENST00000500254
  CDS Start-End: 39-635
agcacagagttgggagtgactccagagcctcctgcaagatgctgttgattctgctgtcagtggccttgctggccctgagctcagctcagaacttaaatgaagatgtcagccaggaagaatctccctccctaatagcaggaaatccacaaggaccatccccacaaggaggcaacaagccccagggccccccacctcctccaggaaagccacaaggaccacccccacaaggaggcaacaaacctcaaggtcccccacctccaggaaagccacaaggaccacccccacaaggggacaagtcccgaagtccccgatctcctccaggaaaaccacaaggaccacccccacaaggaggaaagccacaaggaccacccccacaaggaggcaacaaacctcaaggtcccccacctccaggaaagccacaaggaccacccgcacaaggaggcagcaagtcccaaagtgcccgatctcctccaggaaagccacaaggaccaccccaacaagaaggcaacaatcctcaaggtcccccacctccagcaggaggcaatccccagcagcctcaggcacctcctgctggacagccccagggaccaccacgccctcctcaagggggcagaccttccagacctccccagtgacagcctccccagtcatctaggattcaatgacaggaagtgaataagaagatgagagtgattcaaatgattcaaattccatgacattggaaaaaggtcatcatagctctaacttcaatataccaataaaataatcagcttgc

SEQ ID NO: 169598 - DNA, 1170 bp, Homo sapiens
  Payload ID: 13398
  Gene Symbol: PRB1
  Gene Name: proline-rich protein BstNI subfamily 1
  ENST ID: ENST00000546254
  CDS Start-End: 38-1030
gcacagagttgggagtgactccagagcctcctgcaagatgctgttgattctgctgtcagtggccttgctggccctgagctcagctcagaacttaaatgaagatgtcagccaggaagaatctccctccctaatagcaggaaatccacaaggaccatccccacaaggaggcaacaagccccagggccccccacctcctccaggaaagccacaaggaccacccccacaaggaggcaacaaacctcaaggtcccccacctccaggaaagccacaaggaccacccccacaaggggacaagtcccgaagtccccgatctcctccaggaaaaccacaaggaccacccccacaaggaggtaaccagccccaaggtcccccacctcctccaggaaagccacaaggaccacccccacaaggaggcaacagacctcaaggtcccccacctccaggaaagccacaaggaccacccccacaaggagacaagtcccgaagtccctctcctccaggaaagccacaaggaccacccccacaaggaggtaaccaaccccaaggtcccccacctcctccaggaaagccacaaggaccacccccacaaggaggcaagaaacctcagggtcccccacctccaggaaagccacaaggaccacccccacaaggagacaagtcccgaagttcccaatctcctccaggaaagccacaaggaccacccccacaaggaggcaaccagccccaaggtcccccacctcctccaggaaagccacaaggaccacccccacaaggaggcaacaaacctcaaggtcccccacctccaggaaagccacaaggaccacccgcacaaggaggcagcaagtcccaaagtgcccgatctcctccaggaaagccacaaggaccaccccaacaagaaggcaacaatcctcaaggtcccccacctccagcaggaggcaatccccagcagcctcaggcacctcctgctggacagccccagggaccaccacgccctcctcaagggggcagaccttccagacctccccagtgacagcctccccagtcatctaggattcaatgacaggaagtgaataagaagatgagagtgattcaaatgattcaaattccatgacattggaaaaaggtcatcatagctctaacttcaatataccaataaaataatcagcttgc

SEQ ID NO: 169599 - DNA, 710 bp, Homo sapiens
  Payload ID: 13398
  Gene Symbol: PRB1
  Gene Name: proline-rich protein BstNI subfamily 1
  ENST ID: ENST00000545626
  CDS Start-End: 34-570
agagttgggagtgactccagagcctcctgcaagatgctgttgattctgctgtcagtggccttgctggccctgagctcagctcagaacttaaatgaagatgtcagccaggaagaatctccctccctaatagcaggaaatccacaaggaccatccccacaaggaggcaacaagccccagggccccccacctcctccaggaaagccacaaggaccacccccacaaggaggcaacaaacctcaaggtcccccacctccaggaaagccacaaggaccacccccacaaggggacaagtcccgaagtccccgatctcctccaggaaaaccacaaggaccacccccacaaggaggaaagccacaaggaccacccgcacaaggaggcagcaagtcccaaagtgcccgatctcctccaggaaagccacaaggaccaccccaacaagaaggcaacaatcctcaaggtcccccacctccagcaggaggcaatccccagcagcctcaggcacctcctgctggacagccccagggaccaccacgccctcctcaagggggcagaccttccagacctccccagtgacagcctccccagtcatctaggattcaatgacaggaagtgaataagaagatgagagtgattcaaatgattcaaattccatgacattggaaaaaggtcatcatagctctaacttcaatataccaataaaataatcagcttgc

SEQ ID NO: 169600 - DNA, 1428 bp, Homo sapiens
  Payload ID: 13398
  Gene Symbol: PRB1
  Gene Name: proline-rich protein BstNI subfamily 1
  ENST ID: ENST00000612920
  CDS Start-End: 36-1286
acagagttgggagtgactccagagcctcctgcaagatgctgttgattctgctgtcagtggccctgctggccctgagctcagctcagaacttaaatgaagatgtcagccaggaagaatctccctccctaatagcaggaaatccacaaggagcacccccacaaggaggcaacaaacctcaaggtcccccatctcctccaggaaagccacaaggaccacccccacaaggaggcaaccagcctcaaggtcccccacctcctccaggaaagccacaaggaccacccccacaaggaggcaacaaacctcaaggtcccccacctccaggaaagccacaaggaccacccccacaaggagacaagtcccgaagtccccgatctcctccaggaaagccacaaggaccacccccacaaggaggcaaccagcctcaaggtcctccacctcctccaggaaagccacaaggaccacccccacaaggaggcaacaaacctcaaggtcccccacctccaggaaagccacaaggaccacccccacaaggagacaacaagtcccgaagttctcgatctcctccaggaaagccacaaggaccacccccacaaggaggcaaccagccccaaggtcccccacctcctccaggaaagccacaaggaccacccccacaaggaggcaacaaacctcaaggtcccccacctccaggaaagccacaaggaccacccccacaaggagacaacaagtcccgaagtgcccgatctcctccaggaaagccacaaggaccacccccacaaggaggcaaccagccccaaggtcccccacctcctccaggaaagccacaaggaccacccccacaaggaggcaacaaacctcaaggtcccccacctccaggaaagccacaaggaccacccccacaaggaggcagcaagtcccgaagttctcgatctcctccaggaaagccacaaggaccacccccacaaggaggcaaccagcctcaaggtcccccacctcctccaggaaagccacaaggaccacccccacaaggaggcaacaaacctcaaggtcccccacctccaggaaagccacaaggaccacccccacaaggaggcagcaagtcccgaagtgcccgatctcctccaggaaagccacaaggaccaccccaacaagaaggcaacaatcctcaaggtcccccacctccagcaggaggcaatccccagcagcctcaggcacctcctgctggacagccccagggaccaccacgccctcctcaagggggcagaccttccagacctccccagtgacagcctccccagtcatctaggattcaatgacaggaagtgaataagaagatgagagtgattcaaatgattcaaattccatgacattggaaaaaggtcatcatagctctaacttcaatataccaataaaataatcagcttgcaa

SEQ ID NO: 169601 - DNA, 1170 bp, Homo sapiens; identical to SEQ ID NO: 169598
  Payload ID: 13398
  Gene Symbol: PRB1
  Gene Name: proline-rich protein BstNI subfamily 1
  ENST ID: ENST00000622081
  CDS Start-End: 38-1030

SEQ ID NO: 169602 - DNA, 1179 bp, Homo sapiens
  Payload ID: 13398
  Gene Symbol: PRB1
  Gene Name: proline-rich protein BstNI subfamily 1
  ENST ID: ENST00000615646
  CDS Start-End: 38-1039
gcacagagttgggagtgactccagagcctcctgcaagatgctgttgattctgctgtcagtggccctgctggccctgagctcagctcagaacttaaatgaagatgtcagccaggaagaatctccctccctaatagcaggaaagccacaaggaccacccccacaaggaggcaaccagccccaaggtcccccacctcctccaggaaagccacaaggaccacccccacaaggaggcaacaaacctcaaggtcccccacctccaggaaagccacaaggaccacccccacaaggagacaacaagtcccgaagtgcccgatctcctccaggaaagccacaaggaccacccccacaaggaggcaaccagcctcaaggtcccccacctcctccaggaaagccacaaggaccacccccacaaggaggcaacaaacctcaaggtcccccacctccaggaaagccacaaggaccacccccacaaggagacaagtcccgaagtccccgatctcctccaggaaagccacaaggaccacccccacaaggaggcaaccagccccaaggtcccccacctcctccaggaaagccacaaggaccacccccacaaggaggcaacaaacctcaaggtcccccacctccaggaaagccacaaggaccacccccacaaggagacaacaagtcccgaagtgcccgatctcctccaggaaagccacaaggaccacccccacaaggaggcaaccagccccaaggtcccccacctcctccaggaaagccacaaggaccacccccacaaggaggcaacaaacctcaaggtcccccacctccaggaaagccacaaggaccacccccacaaggaggcagcaagtcccgaagtgcccgatctcctccaggaaagccacaaggaccaccccaacaagaaggcaacaatcctcaaggtcccccacctccagcaggaggcaatccccagcagcctcaggcacctcctgctggacagccccagggaccaccacgccctcctcaagggggcagaccttccagacctccccagtgacagcctccccagtcatctaggattcaatgacaggaagtgaataagaagatgagagtgattcaaatgattcaaattccatgacattggaaaaaggtcatcatagctctaacttcaatataccaataaaataatcagcttgc

SEQ ID NO: 169603 - DNA, 710 bp, Homo sapiens
  Payload ID: 13398
  Gene Symbol: PRB1
  Gene Name: proline-rich protein BstNI subfamily 1
  ENST ID: ENST00000620127
  CDS Start-End: 34-570
agagttgggagtgactccagagcctcctgcaagatgctgttgattctgctgtcagtggccctgctggccctgagctcagctcagaacttaaatgaagatgtcagccaggaagaatctccctccctaatagcaggaaagccacaaggaccacccccacaaggaggcaaccagcctcaaggtcccccacctcctccaggaaagccacaaggaccacccccacaaggaggcaacaaacctcaaggtcccccacctccaggaaagccacaaggaccacccccacaaggagacaagtcccgaagtccccgatctcctccaggaaagccacaaggaccacccccacaaggaggaaagccacaaggaccacccccacaaggaggcagcaagtcccgaagtgcccgatctcctccaggaaagccacaaggaccaccccaacaagaaggcaacaatcctcaaggtcccccacctccagcaggaggcaatccccagcagcctcaggcacctcctgctggacagccccagggaccaccacgccctcctcaagggggcagaccttccagacctccccagtgacagcctccccagtcatctaggattcaatgacaggaagtgaataagaagatgagagtgattcaaatgattcaaattccatgacattggaaaaaggtcatcatagctctaacttcaatataccaataaaataatcagcttgc

SEQ ID NO: 169604 - DNA, 1173 bp, Homo sapiens
  Payload ID: 13398
  Gene Symbol: PRB1
  Gene Name: proline-rich protein BstNI subfamily 1
  ENST ID: ENST00000240636
  CDS Start-End: 38-493
gcacagagttgggagtgactccagagcctcctgcaagatgctgttgattctgctgtcagtggccttgctggccctgagctcagctcagaacttaaatgaagatgtcagccaggaagaatctccctccctaatagcaggaaatccacaaggaccatccccacaaggaggcaacaagccccagggccccccacctcctccaggaaagccacaaggaccacccccacaaggaggcaacaaacctcaaggtcccccacctccaggaaagccacaaggaccacccccacaaggggacaagtcccgaagtccccgatctcctccaggaaaaccacaaggaccacccccacaaggaggtaaccagccccaaggtcccccacctcctccaggaaagccacaaggaccacccccacaaggaggcaacagacctcaaggtcccccacctccaggaaagccacaaggaccacccccacaaggagacaagtcccgaagtccctgatctcctccaggaaagccacaaggaccacccccacaaggaggtaaccaaccccaaggtcccccacctcctccaggaaagccacaaggaccacccccacaaggaggcaagaaacctcagggtcccccacctccaggaaagccacaaggaccacccccacaaggagacaagtcccgaagttcccaatctcctccaggaaagccacaaggaccacccccacaaggaggcaaccagccccaaggtcccccacctcctccaggaaagccacaaggaccacccccacaaggaggcaacaaacctcaaggtcccccacctccaggaaagccacaaggaccacccgcacaaggaggcagcaagtcccaaagtgcccgatctcctccaggaaagccacaaggaccaccccaacaagaaggcaacaatcctcaaggtcccccacctccagcaggaggcaatccccagcagcctcaggcacctcctgctggacagccccagggaccaccacgccctcctcaagggggcagaccttccagacctccccagtgacagcctccccagtcatctaggattcaatgacaggaagtgaataagaagatgagagtgattcaaatgattcaaattccatgacattggaaaaaggtcatcatagctctaacttcaatataccaataaaataatcagcttgc

SEQ ID NO: 169605 - DNA, 1920 bp, Homo sapiens
  Payload ID: 13398
  Gene Symbol: PRB1
  Gene Name: proline-rich protein BstNI subfamily 1
  ENST ID: ENST00000625471
  CDS Start-End: 38-1780
gcacagagttgggagtgactccagagcctcctgcaagatgctgttgattctgctgtcagtggccctgctggccctgagctcagctcagaacttaaatgaagatgtcagccaggaagaatctccctccctaatagcaggaaagccacaaggaccacccccacaaggaggcaaccagcctcaaggtcccccacctcctccaggaaagccacaaggaccacccccacaaggaggcaacaaacctcaaggtcccccacctccaggaaagccacaaggaccacccccacaaggagacaagtcccgaagtccccgatctcctccaggaaagccacaaggaccacccccacaaggaggcaaccagcctcaaggtcctccacctcctccaggaaagccacaaggaccacccccacaaggaggcaacaaacctcaaggtcccccacctccaggaaagccacaaggaccacccccacaaggagacaacaagtcccgaagttctcgatctcctccaggaaagccacaaggaccacccccacaaggaggcaaccagccccaaggtcccccacctcctccaggaaagccacaaggaccacccccacaaggaggcaacaaacctcaaggtcccccacctccaggaaagccacaaggaccacccccacaaggagacaacaagtcccgaagtgcccgatctcctccaggaaagccacaaggaccacccccacaaggaggcaaccagcctcaaggtcccccacctcctccaggaaagccacaaggaccacccccacaaggaggcaacaaacctcaaggtcccccacctccaggaaagccacaaggaccacccccacaaggagacaagtcccgaagtccccgatctcctccaggaaagccacaaggaccacccccacaaggaggcaaccagcctcaaggtcctccacctcctccaggaaagccacaaggaccacccccacaaggaggcaacaaacctcaaggtcccccacctccaggaaagccacaaggaccacccccacaaggagacaacaagtcccgaagttctcgatctcctccaggaaagccacaaggaccacccccacaaggaggcaaccagccccaaggtcccccacctcctccaggaaagccacaaggaccacccccacaaggaggcaacaaacctcaaggtcccccacctccaggaaagccacaaggaccacccccacaaggagacaacaagtcccgaagtgcccgatctcctccaggaaagccacaaggaccacccccacaaggaggcaaccagccccaaggtcccccacctcctccaggaaagccacaaggaccacccccacaaggaggcaacaaacctcaaggtcccccacctccaggaaagccacaaggaccacccccacaaggaggcagcaagtcccgaagttctcgatctcctccaggaaagccacaaggaccacccccacaaggaggcaaccagcctcaaggtcccccacctcctccaggaaagccacaaggaccacccccacaaggaggcaacaaacctcaaggtcccccacctccaggaaagccacaaggaccacccccacaaggaggcagcaagtcccgaagtgcccgatctcctccaggaaagccacaaggaccaccccaacaagaaggcaacaatcctcaaggtcccccacctccagcaggaggcaatccccagcagcctcaggcacctcctgctggacagccccagggaccaccacgccctcctcaagggggcagaccttccagacctccccagtgacagcctccccagtcatctaggattcaatgacaggaagtgaataagaagatgagagtgattcaaatgattcaaattccatgacattggaaaaaggtcatcatagctctaacttcaatataccaataaaataatcagcttgc

SEQ ID NO: 169606 - DNA, 762 bp, Homo sapiens
  Payload ID: 13398
  Gene Symbol: PRB1
  Gene Name: proline-rich protein BstNI subfamily 1
  ENST ID: ENST00000628976
  CDS Start-End: 26-622
gagtgactccagagcctcctgcaagatgctgttgattctgctgtcagtggccctgctggccctgagctcagctcagaacttaaatgaagatgtcagccaggaagaatctccctccctaatagcaggaaagccacaaggaccacccccacaaggaggcaaccagcctcaaggtcccccacctcctccaggaaagccacaaggaccacccccacaaggaggcaacaaacctcaaggtcccccacctccaggaaagccacaaggaccacccccacaaggagacaagtcccgaagtccccgatctcctccaggaaagccacaaggaccacccccacaaggaggaaagccacaaggaccacccccacaaggaggcaacaaacctcaaggtcccccacctccaggaaagccacaaggaccacccccacaaggaggcagcaagtcccgaagtgcccgatctcctccaggaaagccacaaggaccaccccaacaagaaggcaacaatcctcaaggtcccccacctccagcaggaggcaatccccagcagcctcaggcacctcctgctggacagccccagggaccaccacgccctcctcaagggggcagaccttccagacctccccagtgacagcctccccagtcatctaggattcaatgacaggaagtgaataagaagatgagagtgattcaaatgattcaaattccatgacattggaaaaaggtcatcatagctctaacttcaatataccaataaaataatcagcttgc

SEQ ID NO: 169607 - DNA, 710 bp, Homo sapiens; identical to SEQ ID NO: 169599
  Payload ID: 13398
  Gene Symbol: PRB1
  Gene Name: proline-rich protein BstNI subfamily 1
  ENST ID: ENST00000632933
  CDS Start-End: 34-570

SEQ ID NO: 169608 - DNA, 775 bp, Homo sapiens; identical to SEQ ID NO: 169597
  Payload ID: 13398
  Gene Symbol: PRB1
  Gene Name: proline-rich protein BstNI subfamily 1
  ENST ID: ENST00000633958
  CDS Start-End: 39-635

SEQ ID NO: 169609 - DNA, 1429 bp, Homo sapiens
  Payload ID: 13399
  Gene Symbol: PRB2
  Gene Name: proline-rich protein BstNI subfamily 2
  Uniprot ID: P02812
  ENST ID: ENST00000389362
  CDS Start-End: 37-1287
cacagagttgggagtgactccagagcctcctgcaagatgctgttgattctgctgtcagtggccttgctggccctgagctcagctcagaacttaaatgaagatgtcagccaggaagaatctccctccctaatagcaggaaatccacaaggagcacccccacaaggaggcaacaaacctcaaggtcccccatctcctccaggaaagccacaaggaccacccccacaaggaggcaaccagcctcaaggtcccccacctcctccaggaaagccacaaggaccacccccacaaggaggcaacaaacctcaaggtcccccacctccaggaaagccacaaggaccacccccacaaggagacaagtcccgaagtccccgatctcctccaggaaagccacaaggaccacccccacaaggaggcaaccagcctcaaggtcctccacctcctccaggaaagccacaaggaccacccccacaaggaggcaacaaacctcaaggtcccccacctccaggaaagccacaaggaccacccccacaaggagacaacaagtcccgaagttctcgatctcctccaggaaagccacaaggaccacccccacaaggaggcaaccagccccaaggtcccccacctcctccaggaaagccacaaggaccacccccacaaggaggcaacaaacctcaaggtcccccacctccaggaaagccacaaggaccacccccacaaggagacaacaagtcccaaagtgcccgatctcctccaggaaagccacaaggaccacccccacaaggaggcaaccagccccaaggtcccccacctcctccaggaaagccacaaggaccacccccacaaggaggcaacaaacctcaaggtcccccacctccaggaaagccacaaggaccacccccacaaggaggcagcaagtcccgaagttctcgatctcctccaggaaagccacaaggaccacccccacaaggaggcaaccagcctcaaggtcccccacctcctccaggaaagccacaaggaccacccccacaaggaggcaacaaacctcaaggtcccccacctccaggaaagccacaaggaccacccccacaaggaggcagcaagtcccgaagtgcccgatctcctccaggaaagccacaaggaccaccccaacaagaaggcaacaatcctcaaggtcccccacctccagcaggaggcaatccccagcagcctcaggcacctcctgctggacagccccagggaccaccacgccctcctcaagggggcagaccttccagacctccccagtgacagcctccccagtcatctaggattcaatgacaggaagtgaataagaagatgagagtgattcaaatgattcaaatgccatgacattggaaaaaggtcatcatagctctaacttctgtataccaataaaataattagcttgcaa

SEQ ID NO: 169610 - DNA, 100 bp, Homo sapiens
  Payload ID: 13399
  Gene Symbol: PRB2
  Gene Name: proline-rich protein BstNI subfamily 2
  ENST ID: ENST00000565533
  CDS Start-End: 37-100
cacagagttgggagtgactccagagcctcctgcaagatgctgttgattctgctgtcagtggccttgctggccctgagctcagctcagaacttaaatgaag

SEQ ID NO: 169611 - DNA, 1091 bp, Homo sapiens
  Payload ID: 13400
  Gene Symbol: PRB3
  Gene Name: proline-rich protein BstNI subfamily 3
  Uniprot ID: Q04118
  ENST ID: ENST00000381842
  CDS Start-End: 39-968
agcacagagttgggagtgactccagagcctccagcaagatgctactgattctgctgtcggtggccctgctggccctgagctcagctcagagcttaaatgaagatgtcagccaggaagaatctccctccgtaatatcaggaaagccagaaggacgacgcccacaaggaggaaaccagccccaacgtaccccacctcctccaggaaagccagaaggacgacccccacaaggaggcaaccagtcccaaggtcccccacctcgtccaggaaagccagaaggaccacccccacaaggaggaaaccagtcccaaggtcccccacctcgtccgggaaagccagaaggacaacccccacaaggaggaaaccagtcccaaggtcccccacctcgtccgggaaagccagaaggaccacccccacaaggaggaaaccagtcccaaggtcccccgcctcgtccgggaaagccagaaggaccacccccacaaggaggaaaccagtcccaaggtcccccgcctcgtccgggaaagccagaaggaccacccccacaaggaggaaaccagtcccaaggtcccccgcctcatccgggaaagccagaaggaccacccccacaaggaggaaaccagtcccaaggtcccccacctcgtccgggaaagccagaaggaccacccccacaaggaggaaaccagtcccaaggtcccccacctcgtccaggaaagccagaaggaccaccttcacaaggaggcaacaaacctcaaggtcccccacctcatccaggaaagccacaaggaccacccccacaagaaggtaacaaacctcaacgtccccctcctccaggaaggccacaaggaccacccccaccaggaggcaatccccagcagcctctgccacctcccgctggaaagccccagggaccacctccacctcctcaagggggcagaccacacagacctccccagggacagcctccccagtaatcaaggttcaatgacaggaagtgaacaagaagatgacagtgattcaaatgattcaaatgccatgacattggaagaaggtggtcatagctctacctttaatataccaataaaataaacagctta

SEQ ID NO: 169612 - DNA, 1283 bp, Homo sapiens
  Payload ID: 13400
  Gene Symbol: PRB3
  Gene Name: proline-rich protein BstNI subfamily 3
  ENST ID: ENST00000538488
  CDS Start-End: 137-1192
agaacccagtctctggggtggtgaggcccacccagtgtggagctcaaaggtgccactgttctgctcctctttataaagggagctgccatggttctcccagcacagagttgggagtgactccagagcctccagcaagatgctactgattctgctgtcggtggccctgctggccctgagctcagctcagagcttaaatgaagatgtcagccaggaagaatctccctccgtaatatcaggaaagccagaaggacgacgcccacaaggaggaaaccagccccaacgtaccccacctcctccaggaaagccagaaggacgacccccacaaggaggcaaccagtcccaaggtcccccacctcgtccaggaaagccagaaggaccacccccacaaggaggaaaccagtcccaaggtcccccacctcgtccgggaaagccagaaggacaacccccacaaggaggaaaccagtcccaaggtcccccacctcgtccgggaaagccagaaggaccacccccacaaggaggaaaccagtcccaaggtcccccgcctcgtccgggaaagccagaaggaccacccccacaaggaggaaaccagtcccaaggtcccccgcctcgtccgggaaagccagaaggaccacccccacaaggaggaaaccagtcccaaggtcccccgcctcatccgggaaagccagaaggaccacccccacaaggaggaaaccagtcccaaggtcccccacctcgtccgggaaagccagaaggaccacccccacaaggaggaaaccagtcccaaggtcccccacctcgtccgggaaagccagaaggaccacccccacaaggaggcaacaaacctcaaggtcccccacctcgtccaggaaagccagaaggaccacccccacaaggaggaaaccagtcccaaggtcccccacctcgtccaggaaagccagaaggaccaccttcacaaggaggcaacaaacctcaaggtcccccacctcatccaggaaagccacaaggaccacccccacaagaaggtaacaaacctcaacgtccccctcctccaggaaggccacaaggaccacccccaccaggaggcaatccccagcagcctctgccacctcccgctggaaagccccagggaccacctccacctcctcaagggggcagaccacacagacctccccagggacagcctccccagtaatcaaggttcaatgacaggaagtgaacaagaagatgacagtgattcaaatgattcaaatgccatgacattggaagaaggtggtcatagctct

SEQ ID NO: 169613 - DNA, 1091 bp, Homo sapiens; identical to SEQ ID NO: 169611
  Payload ID: 13400
  Gene Symbol: PRB3
  Gene Name: proline-rich protein BstNI subfamily 3
  ENST ID: ENST00000617491
  CDS Start-End: 39-968

SEQ ID NO: 169614 - DNA, 1058 bp, Homo sapiens
  Payload ID: 13400
  Gene Symbol: PRB3
  Gene Name: proline-rich protein BstNI subfamily 3
  ENST ID: ENST00000617030
  CDS Start-End: 39-968
agcacagagttgggagtgactccagagcctccagcaagatgctactgattctgctgtcggtggccctgctggccctgagctcagctcagagcttaaatgaagatgtcagccaggaagaatctccctccgtaatatcaggaaagccagaaggacgacgcccacaaggaggaaaccagccccaacgtaccccacctcctccaggaaagccagaaggacgacccccacaaggaggcaaccagtcccaaggtcccccacctcgtccaggaaagccagaaggaccacccccacaaggaggaaaccagtcccaaggtcccccacctcgtccgggaaagccagaaggacaacccccacaaggaggaaaccagtcccaaggtcccccacctcgtccgggaaagccagaaggaccacccccacaaggaggaaaccagtcccaaggtcccccgcctcgtccgggaaagccagaaggaccacccccacaaggaggaaaccagtcccaaggtcccccgcctcatccgggaaagccagaaggaccacccccacaaggaggaaaccagtcccaaggtcccccacctcgtccgggaaagccagaaggaccacccccacaaggaggaaaccagtcccaaggtcccccacctcgtccgggaaagccagaaggaccacccccacaaggaggaaaccagtcccaaggtcccccacctcgtccaggaaagccagaaggaccaccttcacaaggaggcaacaaacctcaaggtcccccacctcatccaggaaagccacaaggaccacccccacaagaaggtaacaaacctcaacgtccccctcctccaggaaggccacaaggaccacccccaccaggaggcaatccccagcagcctctgccacctcccgctggaaagccccagggaccacctccacctcctcaagggggcagaccacacagacctccccagggacagcctccccagtaatcaaggttcaatgacaggaagtgaacaagaagatgacagtgattcaaatgattcaaatgccatgacattggaagaaggtggtcatagctc

SEQ ID NO: 169615 - DNA, 1283 bp, Homo sapiens; identical to SEQ ID NO: 169612
  Payload ID: 13400
  Gene Symbol: PRB3
  Gene Name: proline-rich protein BstNI subfamily 3
  ENST ID: ENST00000632935
  CDS Start-End: 137-1192

SEQ ID NO: 169616 - DNA, 916 bp, Homo sapiens
  Payload ID: 13401
  Gene Symbol: PRB4
  Gene Name: proline-rich protein BstNI subfamily 4
  ENST ID: ENST00000279575
  CDS Start-End: 38-781
gcacagagttgggagtgactccagagcctccagcgagatgctgctgattctgctgtcagtggccctgctggccctgagctcagctgagagttcaagtgaagatgtcagccaggaagaatctctcttcctaatatcaggaaagccagaaggacgacgcccacaaggaggaaaccagccccaacgtcccccacctcctccaggaaagccacaaggaccacccccacaaggaggaaaccagtcccaaggtcccccacctcctccaggaaagccagaaggacgacccccacaaggaggcaaccagtcccaaggtcccccacctcatccaggaaagccagaaagaccacccccacaaggaggaaaccagtcccaaggtaccccacctcctccaggaaagccagaaagaccacccccacaaggaggcaaccagtcccaccgtcccccacctcctccaggaaagccagaaagaccacccccacaaggaggtaaccagtcccaaggtcccccacctcatccaggaaagccagaaggaccacccccacaggaaggaaacaagtcccgaagtgcccgatctcctccaggaaagccacaaggaccaccccaacaagaaggcaacaagcctcaaggtcccccacctcctggaaagccacaaggcccacccccagcaggaggcaatccccagcagcctcaggcacctcctgctggaaagccccaggggccacctccacctcctcaagggggcaggccacccagacctgcccagggacaacagcctccccagtaatctaggattcaatgacaggaagtgaataagaagatatcagtgaattcaaataattcaattgctacaaatgccgtgacattggaacaaggtcatcatagctctaactttaatataccaataaaataatcagcttgc

SEQ ID NO: 169617 - DNA, 586 bp, Homo sapiens
  Payload ID: 13401
  Gene Symbol: PRB4
  Gene Name: proline-rich protein BstNI subfamily 4
  ENST ID: ENST00000445719
  CDS Start-End: 38-574
gcacagagttgggagtgactccagagcctccagcgagatgctgctgattctgctgtcagtggccctgctggccctgagctcagctgagagttcaagtgaagatgtcagccaggaagaatctctcttcctaatatcaggaaagccagaaggacgacgcccacaaggaggaaaccagccccaacgtcccccacctcctccaggaaagccacaaggaccacccccacaaggaggaaaccagtcccaaggtcccccacctcctccaggaaagccagaaggacgacccccacaaggaggcaaccagtcccaaggtcccccacctcatccaggaaagccagaaagaccacccccacaaggaggaaaccagtcccaaggaaagccacaaggaccaccccaacaagaaggcaacaagcctcaaggtcccccacctcctggaaagccacaaggcccacccccagcaggaggcaatccccagcagcctcaggcacctcctgctggaaagccccaggggccacctccacctcctcaagggggcaggccacccagacctgcccagggacaacagcctccccagtaatctaggattcaa

SEQ ID NO: 169618 - DNA, 796 bp, Homo sapiens
  Payload ID: 13401
  Gene Symbol: PRB4
  Gene Name: proline-rich protein BstNI subfamily 4
  ENST ID: ENST00000535904
  CDS Start-End: 35-778
cagagttgggagtgactccagagcctccagcgagatgctgctgattctgctgtcagtggccctgctggccctgagctcagctgagagttcaagtgaagatgtcagccaggaagaatctctcttcctaatatcaggaaagccagaaggacgacgcccacaaggaggaaaccagccccaacgtcccccacctcctccaggaaagccacaaggaccacccccacaaggaggaaaccagtcccaaggtcccccacctcctccaggaaagccagaaggacgacccccacaaggaggcaaccagtcccaaggtcccccacctcatccaggaaagccagaaagaccacccccacaaggaggaaaccagtcccaaggtaccccacctcctccaggaaagccagaaagaccacccccacaaggaggcaaccagtcccaccgtcccccacctcctccaggaaagccagaaagaccacccccacaaggaggtaaccagtcccaaggtcccccacctcatccaggaaagccagaaggaccacccccacaggaaggaaacaagtcccgaagtgcccgatctcctccaggaaagccacaaggaccaccccaacaagaaggcaacaagcctcaaggtcccccacctcctggaaagccacaaggcccacccccagcaggaggcaatccccagcagcctcaggcacctcctgctggaaagccccaggggccacctccacctcctcaagggggcaggccacccagacctgcccagggacaacagcctccccagtaatctaggattcaatgacag

SEQ ID NO: 169619 - DNA, 916 bp, Homo sapiens; identical to SEQ ID NO: 169616
  Payload ID: 13401
  Gene Symbol: PRB4
  Gene Name: proline-rich protein BstNI subfamily 4
  ENST ID: ENST00000619196
  CDS Start-End: 38-781

SEQ ID NO: 169620 - DNA, 709 bp, Homo sapiens
  Payload ID: 13401
  Gene Symbol: PRB4
  Gene Name: proline-rich protein BstNI subfamily 4
  ENST ID: ENST00000621732
  CDS Start-End: 38-574
gcacagagttgggagtgactccagagcctccagcgagatgctgctgattctgctgtcagtggccctgctggccctgagctcagctgagagttcaagtgaagatgtcagccaggaagaatctctcttcctaatatcaggaaagccagaaggacgacgcccacaaggaggaaaccagccccaacgtcccccacctcctccaggaaagccacaaggaccacccccacaaggaggaaaccagtcccaaggtcccccacctcctccaggaaagccagaaggacgacccccacaaggaggcaaccagtcccaaggtcccccacctcatccaggaaagccagaaagaccacccccacaaggaggaaaccagtcccaaggaaagccacaaggaccaccccaacaagaaggcaacaagcctcaaggtcccccacctcctggaaagccacaaggcccacccccagcaggaggcaatccccagcagcctcaggcacctcctgctggaaagccccaggggccacctccacctcctcaagggggcaggccacccagacctgcccagggacaacagcctccccagtaatctaggattcaatgacaggaagtgaataagaagatatcagtgaattcaaataattcaattgctacaaatgccgtgacattggaacaaggtcatcatagctctaactttaatataccaataaaataatcagcttgc

SEQ ID NO: 169621 - DNA, 912 bp, Homo sapiens
  Payload ID: 13401
  Gene Symbol: PRB4
  Gene Name: proline-rich protein BstNI subfamily 4
  ENST ID: ENST00000610506
  CDS Start-End: 23-829
tgactccagagcctcctgcaagatgctgttgattctgctgtcagtggccttgctggccctgagctcagctcagaacttaaatgaagatgtcagccaggaagaatctccctccctaatagcaggaaaaccacaaggaccacccccacaaggaggtaaccagccccaaggtcccccacctcctccaggaaagccacaaggaccacccccacaaggaggcaaccagccccaaggtcccccacctcctccaggaaagccagaaggacgacgcccacaaggaggaaaccagccccaacgtcccccacctcctccaggaaagccacaaggaccacccccacaaggaggaaaccagtcccaaggtcccccacctcctccaggaaagccagaaggacgacccccacaaggaggcaaccagtcccaaggtcccccacctcatccaggaaagccagaaagaccacccccacaaggaggcaaccagtcccaccgtcccccacctcctccaggaaagccagaaagaccacccccacaaggaggtaaccagtcccaaggtcccccacctcatccaggaaagccagaaggaccacccccacaggaaggaaacaagtcccgaagtgcccgatctcctccaggaaagccacaaggaccaccccaacaagaaggcaacaagcctcaaggtcccccacctcctggaaagccacaaggcccacccccagcaggaggcaatccccagcagcctcaggcacctcctgctggaaagccccaggggccacctccacctcctcaagggggcaggccacccagacctgcccagggacaacagcctccccagtaatctaggattcaatgacaggaagtgaataagaagatatcagtgaattcaaataattcaattgctacaaatgccgtgacattgga

SEQ ID NO: 169622 - DNA, 796 bp, Homo sapiens; identical to SEQ ID NO: 169618
  Payload ID: 13401
  Gene Symbol: PRB4
  Gene Name: proline-rich protein BstNI subfamily 4
  ENST ID: ENST00000634055
  CDS Start-End: 35-778

SEQ ID NO: 169623 - DNA, 586 bp, Homo sapiens; identical to SEQ ID NO: 169617
  Payload ID: 13401
  Gene Symbol: PRB4
  Gene Name: proline-rich protein BstNI subfamily 4
  ENST ID: ENST00000632467
  CDS Start-End: 38-574

SEQ ID NO: 169624 - DNA, 603 bp, Homo sapiens; identical to SEQ ID NO: 169475
  Payload ID: 13402
  Gene Symbol: PRH1
  Gene Name: proline-rich protein HaeIII subfamily 1
  ENST ID: ENST00000428168
  CDS Start-End: 39-539

SEQ ID NO: 169625 - DNA, 710 bp, Homo sapiens
  Payload ID: 13402
  Gene Symbol: PRH1
  Gene Name: proline-rich protein HaeIII subfamily 1
  ENST ID: ENST00000543626
  CDS Start-End: 37-600
cacaaagttgggagtgacaccagagcctcctgcaagatgcttctgattctgctgtcagtggccctgctggccttcagctcagctcaggatttaaatgaagatgtcagccaggaagatgttcccctcgtaatatcagatggaggagactctgagcagttcctagatgaggagcgtcagggaccacctttgggaggacagcaatctcaaccctctgctggtgatgggaaccaggatgatggccctcagcagggaccaccccaacaaggaggccagcagcaacaaggtccaccacctcctcagggaaagccacaaggaccaccccaacaaggaggccagcagcaacaaggtccaccacctcctcagggaaagccacaaggaccaccccaacagggaggccatccccctcctcctcaaggaaggccacaaggaccaccccaacagggaggccatccccgtcctcctcgaggaaggccacaaggaccaccccaacagggaggccatcagcaaggtcctcccccacctcctcctggaaagccccagggaccacctccccaagggggccgcccacaaggacctccacaggggcagtctcctcagtaatctaggattcaatgacaggaagtgaataagaagataacagtgtttcaaatgccgtgaaacatggcatcatgctctaacttcagtataccaataaaacaatcagcttgcaa

SEQ ID NO: 169626 - DNA, 603 bp, Homo sapiens; identical to SEQ ID NO: 169475
  Payload ID: 13402
  Gene Symbol: PRH1
  Gene Name: proline-rich protein HaeIII subfamily 1
  ENST ID: ENST00000543480
  CDS Start-End: 39-539

SEQ ID NO: 169627 - DNA, 675 bp, Homo sapiens
  Payload ID: 13402
  Gene Symbol: PRH1
  Gene Name: proline-rich protein HaeIII subfamily 1
  ENST ID: ENST00000538332
  CDS Start-End: 1-423
ggaccacctttgggaggacagcaatctcaaccctctgctggtgatgggaaccaggatgatggccctcagcagggaccaccccaacaaggaggccagcagcaacaaggtccaccacctcctcagggaaagccacaaggaccaccccaacaaggaggccagcagcaacaaggtccaccacctcctcagggaaagccacaaggaccaccccaacagggaggccatccccctcctcctcaaggaaggccacaaggaccaccccaacagggaggccatccccgtcctcctcgaggaaggccacaaggaccaccccaacagggaggccatcagcaaggtcctcccccacctcctcctggaaagccccagggaccacctccccaagggggccgcccacaaggacctccacaggggcagtctcctcagtaatctaggattcaatgacagggaatctcagtctttgaggagattttaatctcacatgcaaattcagtggcttagtcagcttccccaccctgcaacttcttcctacaaacttcctagaggaagaccatcagcctggagactattcgctgtaaagattataacggtgagaataagctctaaaataaaacttcttgttgtgctttacctgacttttctgaagcaaggacacccattctcccagaaaacccaaaggaa

SEQ ID NO: 169628 - DNA, 837 bp, Homo sapiens
  Payload ID: 13402
  Gene Symbol: PRH1
  Gene Name: proline-rich protein HaeIII subfamily 1
  ENST ID: ENST00000539853
  CDS Start-End: 297-824
aggttctccagcatttggctcaaggccccaagggcacatgtgacaagaaggcgccagctttttaaacattggaagttcttctgtgtcagttctgtgacagaacatttacttaacacatcatgaaggctagtttggatgtggaggggaatagactccatctatccatatgagctgctgcagaagaatattttgcctgctggaacctgctgtatctactcaagagtggaagttttcacagggagctgacacgtttctcccagcacaaagttgggagtgacaccagagcctcctgcaagatgcttctgattctgctgtcagtggccctgctggccttcagctcagctcaggatttaaatgaagatggaggagactctgagcagttcctagatgaggagcgtcagggaccacctttgggaggacagcaatctcaaccctctgctggtgatgggaaccaggatgatggccctcagcagggaccaccccaacaaggaggccagcagcaacaaggtccaccacctcctcagggaaagccacaaggaccaccccaacaaggaggccagcagcaacaaggtccaccacctcctcagggaaagccacaaggaccaccccaacagggaggccatccccctcctcctcaaggaaggccacaaggaccaccccaacagggaggccatccccgtcctcctcgaggaaggccacaaggaccaccccaacagggaggccatcagcaaggtcctcccccacctcctcctggaaagccccagggaccacctccccaagggggccgcccacaaggacctccacaggggcagtctcctcagtaatctaggattcaat

SEQ ID NO: 169629 - DNA, 675 bp, Homo sapiens; identical to SEQ ID NO: 169627
  Payload ID: 13402
  Gene Symbol: PRH1
  Gene Name: proline-rich protein HaeIII subfamily 1
  ENST ID: ENST00000633939
  CDS Start-End: 1-423

SEQ ID NO: 169630 - DNA, 837 bp, Homo sapiens
  Payload ID: 13402
  Gene Symbol: PRH1
  Gene Name: proline-rich protein HaeIII subfamily 1
  ENST ID: ENST00000633091
  CDS Start-End: 297-824
aggttctccagcatttggctcaaggccccaagggcacatgtgacaagaaggcgccggctttttaaacattggaagttcttctgtgtcagttctgtgacagaacatttacttaacacatcatgaaggctagtttggatgtggaggggaatagactccatctatccatatgagctgctgcagaagaatattttgcctgctggaacctgctgtatctactcaagagtggaagttttcacagggagctgacacgtttctcccagcacaaagttgggagtgacaccagagcctcctgcaagatgcttctgattctgctgtcagtggccctgctggccttcagctcagctcaggatttaaatgaagatggaggagactctgagcagttcctagatgaggagcgtcagggaccacctttgggaggacagcaatctcaaccctctgctggtgatgggaaccaggatgatggccctcagcagggaccaccccaacaaggaggccagcagcaacaaggtccaccacctcctcagggaaagccacaaggaccaccccaacaaggaggccagcagcaacaaggtccaccacctcctcagggaaagccacaaggaccaccccaacagggaggccatccccctcctcctcaaggaaggccacaaggaccaccccaacagggaggccatccccgtcctcctcgaggaaggccacaaggaccaccccaacagggaggccatcagcaaggtcctcccccacctcctcctggaaagccccagggaccacctccccaagggggccgcccacaaggacctccacaggggcagtctcctcagtaatctaggattcaat

SEQ ID NO: 169631 - DNA, 710 bp, Homo sapiens; identical to SEQ ID NO: 169625
  Payload ID: 13402
  Gene Symbol: PRH1
  Gene Name: proline-rich protein HaeIII subfamily 1
  ENST ID: ENST00000633511
  CDS Start-End: 37-600

SEQ ID NO: 169632 - DNA, 641 bp, Homo sapiens
  Payload ID: 13403
  Gene Symbol: PRH2
  Gene Name: proline-rich protein HaeIII subfamily 2
  Uniprot ID: P02810
  ENST ID: ENST00000381847
  CDS Start-End: 39-539
agcataaagttgggagtgacaccagagccttctgcaagatgcttctgattctgctgtcagtggccctgctggccttcagctcagctcaggacttagatgaagatgtcagccaagaagacgttcccttggtaatatcagatggaggagactctgagcagttcatagatgaggagcgtcagggaccacctttgggaggacagcaatctcaaccctctgctggtgatgggaaccagaatgatggccctcagcagggaccaccccaacaaggaggccagcagcaacaaggtccaccacctcctcagggaaagccacaaggaccaccccaacagggaggccatccccctcctcctcaaggaaggccacaaggaccaccccaacagggaggccatccccgtcctcctcgaggaaggccacaaggaccaccccaacagggaggccatcagcaaggtcctcccccacctcctcctggaaagccccagggaccacctccccaagggggccgcccacaaggacctccacaggggcagtctcctcagtaatctaggattcaatgataggtatgattccagtttattatccatcaaaggctccaactgctacagttctccaacttcattgtgccagtgaatctattgaaaagc

SEQ ID NO: 169633 - DNA, 673 bp, Homo sapiens
  Payload ID: 13403
  Gene Symbol: PRH2
  Gene Name: proline-rich protein HaeIII subfamily 2
  Uniprot ID: P02810
  ENST ID: ENST00000396400
  CDS Start-End: 39-539
agcataaagttgggagtgacaccagagccttctgcaagatgcttctgattctgctgtcagtggccctgctggccttcagctcagctcaggacttagatgaagatgtcagccaagaagacgttcccttggtaatatcagatggaggagactctgagcagttcatagatgaggagcgtcagggaccacctttgggaggacagcaatctcaaccctctgctggtgatgggaaccagaatgatggccctcagcagggaccaccccaacaaggaggccagcagcaacaaggtccaccacctcctcagggaaagccacaaggaccaccccaacagggaggccatccccctcctcctcaaggaaggccacaaggaccaccccaacagggaggccatccccgtcctcctcgaggaaggccacaaggaccaccccaacagggaggccatcagcaaggtcctcccccacctcctcctggaaagccccagggaccacctccccaagggggccgcccacaaggacctccacaggggcagtctcctcagtaatctaggattcaatgataggaagtgaataagaagatgacagtgtttcaaatgccttgaaacataatgtgatcatgctctaacttcaatataccaataaaataatcagcttgcaatttctgattatagcatctcct

SEQ ID NO: 169634 - DNA, 673 bp, Homo sapiens; identical to SEQ ID NO: 169633
  Payload ID: 13403
  Gene Symbol: PRH2
  Gene Name: proline-rich protein HaeIII subfamily 2
  Uniprot ID: P02810
  ENST ID: ENST00000572141
  CDS Start-End: 39-539

SEQ ID NO: 169635 - DNA, 641 bp, Homo sapiens; identical to SEQ ID NO: 169632
  Payload ID: 13403
  Gene Symbol: PRH2
  Gene Name: proline-rich protein HaeIII subfamily 2
  Uniprot ID: P02810
  ENST ID: ENST00000575657
  CDS Start-End: 39-539

SEQ ID NO: 169636 - DNA, 641 bp, Homo sapiens; identical to SEQ ID NO: 169632
  Payload ID: 13403
  Gene Symbol: PRH2
  Gene Name: proline-rich protein HaeIII subfamily 2
  Uniprot ID: P02810
  ENST ID: ENST00000622570
  CDS Start-End: 39-539

SEQ ID NO: 169637 - DNA, 673 bp, Homo sapiens; identical to SEQ ID NO: 169633
  Payload ID: 13403
  Gene Symbol: PRH2
  Gene Name: proline-rich protein HaeIII subfamily 2
  Uniprot ID: P02810
  ENST ID: ENST00000622848
  CDS Start-End: 39-539

SEQ ID NO: 169638 - DNA, 1909 bp, Homo sapiens
  Payload ID: 13404
  Gene Symbol: PRRT1
  Gene Name: proline-rich transmembrane protein 1
  Uniprot ID: Q99946
  ENST ID: ENST00000211413
  CDS Start-End: 126-1046
cgccgctgccttcatctctccatctctgcgctgctgccggctgcgccatccagcacccagactccagcaccggccgaggacccccactccggctgcagggaccctgtcccagcgagaccgcaggcatgtcatccgaaaagtcaggactcccagactcagtccctcacacttctccgccgccctacaatgcccctcagcctccagccgaacccccagccccaccgccacaggcagccccttcctcacaccatcaccaccaccaccactaccatcagtctggcaccgccaccctcccgcgcttaggggcagggggcctggcctcttccgcggccaccgctcagcgcggtccctcctcctctgccacgctgccgaggcccccccaccacgcccctcccggccctgctgccggggcacccccacccggctgcgctaccttgccccgcatgccacccgacccttacctgcaggagactcgcttcgagggcccacttcccccgccgccgcccgctgccgccgccccgcccccgccggcgccagcccagactgcccaggcccctggcttcgtggtgcccacgcacgcggggactgtgggcacgctgccgctggggggctacgtagcgcccggataccccctgcagctgcagccttgcactgcttacgtgccggtctacccggtgggcacgccatatgcaggcgggaccccggggggaacaggagtgacctccactctccccccgccgccccagggcccagggctggccctactggagccgaggcgcccgccacacgactacatgcccatcgcggtgctgaccaccatctgttgcttctggcctactggcatcattgccatcttcaaggccgtgcaggtgcgcacggccttggcccgcggagacatggtgtcggccgagatcgcttcacgcgaggcccggaacttctccttcatctccctggccgtgggcatcgcggccatggtgctctgtaccatcctcaccgtagtcatcatcatcgccgcgcagcaccacgagaactactgggatccctaaaaacgcccctggtccggccccactctgcgcccctcgatctcccaggctctttctgcagtcataccgcggacccaatgggcgccctgcacacccgtttctggggccgtcagacttggatacatcgtaaactccgcctccacggaacgtctcgccttgcgagcaagctcggaatccagttcctcaggaacccctccaaaacccacacccccagggacgccgctttccgggatcccggccaaacgccggaccctcagtcgctccaggccccctcaccctcaaagtgtagcgcccccaaccgagcaacctcggtttggtccctaaaaccccgcctcctctataagcaccgccccagctctgacaaaaccccgcctccaggtcggcaggctccgccttcttttcttctccgcggggtgattcagtccagtgattgggtttgtggctccaggcctcgcccacagacggacagacccctccctttcttccggcaaaaggaccgagccctggggtagtaaggcccccacactcctgttttttgcaagtacatttttgtccctcctccacccaggtatctgcctattttcttgctaatcccagaacctttccttttgctttttttaaggacatttgggaagttcctggtgtaggacccttctccctgggataagaaacctgcctgtaaacgctctgtaaatactcccttccacccatcccagcccctgggcagccgggcagaagggaatccaggctatggacctcccaagtccccgctccccgctcccctcggcggccccgccttgttctgatctgtgtgtgagtgtgtgtgaacttctgaaagacaatattaaagagacttagttgattta

SEQ ID NO: 169639 - DNA, 1726 bp, Homo sapiens
  Payload ID: 13404
  Gene Symbol: PRRT1
  Gene Name: proline-rich transmembrane protein 1
  Uniprot ID: Q99946
  ENST ID: ENST00000375150
  CDS Start-End: 186-863
atctgactctgtggagcctgggactggtttcagcgagagcctctgtactgctctgtagtctctgctaggacatggacgaaaagggacgcagccgggagagcgactgccccagtcccacccgcctcgcctggtctagcctccgtgtttccatgacaactccaaaggaacccaaactgggggcttgaatgccgggcacccagactccagcaccggccgaggacccccactccggctgcagggaccctgtcccagcgagaccgcaggcatgtcatccgaaaagtcaggagactcgcttcgagggcccacttcccccgccgccgcccgctgccgccgccccgcccccgccggcgccagcccagactgcccaggcccctggcttcgtggtgcccacgcacgcggggactgtgggcacgctgccgctggggggctacgtagcgcccggataccccctgcagctgcagccttgcactgcttacgtgccggtctacccggtgggcacgccatatgcaggcgggaccccggggggaacaggagtgacctccactctccccccgccgccccagggcccagggctggccctactggagccgaggcgcccgccacacgactacatgcccatcgcggtgctgaccaccatctgttgcttctggcctactggcatcattgccatcttcaaggccgtgcaggtgcgcacggccttggcccgcggagacatggtgtcggccgagatcgcttcacgcgaggcccggaacttctccttcatctccctggccgtgggcatcgcggccatggtgctctgtaccatcctcaccgtagtcatcatcatcgccgcgcagcaccacgagaactactgggatccctaaaaacgcccctggtccggccccactctgcgcccctcgatctcccaggctctttctgcagtcataccgcggacccaatgggcgccctgcacacccgtttctggggccgtcagacttggatacatcgtaaactccgcctccacggaacgtctcgccttgcgagcaagctcggaatccagttcctcaggaacccctccaaaacccacacccccagggacgccgctttccgggatcccggccaaacgccggaccctcagtcgctccaggccccctcaccctcaaagtgtagcgcccccaaccgagcaacctcggtttggtccctaaaaccccgcctcctctataagcaccgccccagctctgacaaaaccccgcctccaggtcggcaggctccgccttcttttcttctccgcggggtgattcagtccagtgattgggtttgtggctccaggcctcgcccacagacggacagacccctccctttcttccggcaaaaggaccgagccctggggtagtaaggcccccacactcctgttttttgcaagtacatttttgtccctcctccacccaggtatctgcctattttcttgctaatcccagaacctttccttttgctttttttaaggacatttgggaagttcctggtgtaggacccttctccctgggataagaaacctgcctgtaaacgctctgtaaatactcccttccacccatcccagcccctgggcagccgggcagaagggaatccaggctatggacctcccaagtccccgctccccgctcccctcggcggccccgccttgttctgatctgtgtgtgagtgtgtgtgaacttctgaaagacaatattaaagagacttagttgattta

SEQ ID NO: 169640 - DNA, 1726 bp, Homo sapiens
  Payload ID: 13404
  Gene Symbol: PRRT1
  Gene Name: proline-rich transmembrane protein 1
  Uniprot ID: Q99946
  ENST ID: ENST00000383309
  CDS Start-End: 186-863
atctgactctgtggagcctgggactggtttcagcgagagcctctgtactgctctgtagtctctgctaggacatggacgaaaagggacgcagccgggagagcgactgccccagtcccacccgcctcgcctggtctagcctccgtgtttccatgacaactccaaaggagcccaaactgggggcttgaatgccgggcacccagactccagcaccggccgaggacccccactccggctgcagggaccctgtcccagcgagaccgcaggcatgtcatccgaaaagtcaggagactcgcttcgagggcccacttcccccgccgccgcccgctgccgccgccccgcccccgccggcgccagcccagactgcccaggcccctggcttcgtggtgcccacgcacgcggggactgtgggcacgctgccgctggggggctacgtagcgcccggataccccctgcagctgcagccttgcactgcttacgtgccggtctacccggtgggcacgccatatgcaggcgggaccccggggggaacaggagtgacctccactctccccccgccgccccagggcccagggctggccctactggagccgaggcgcccgccacacgactacatgcccatcgcggtgctgaccaccatctgttgcttctggcctactggcatcattgccatcttcaaggccgtgcaggtgcgcacggccttggcccgcggagacatggtgtcggccgagatcgcttcacgcgaggcccggaacttctccttcatctccctggccgtgggcatcgcggccatggtgctctgtaccatcctcaccgtagtcatcatcatcgccgcgcagcaccacgagaactactgggatccctaaaaacgcccctggtccggccccactctgcgcccctcgatctcccaggctctttctgcagtcataccgcggacccaatgggcgccctgcacacccgtttctggggccgtcagacttggatacatcgtaaactccgcctccacggaacgtctcgccttgcgagcaagctcggaatccagttcctcaggaacccctccaaaacccacacccccagggacgccgctttccgggatcccggccaaacgccggaccctcagtcgctccaggccccctcaccctcaaagtgtagcgcccccaaccgagcaacctcggtttggtccctaaaaccccgcctcctctataagcaccgccccagctctgacaaaaccccgcctccaggtcggcaggctccgccttcttttcttctccgcggggtgattcagtccagtgattgggtttgtggctccaggcctcgcccacagacggacagacccctccctttcttccggcaaaaggaccgagccctggggtagtaaggcccccacactcctgttttttgcaagtacatttttgtccctcctccacccaggtatctgcctattttcttgctaatcccagaacctttccttttgctttttttaaggacatttgggaagttcctggtgtaggacccttctccctgggataagaaacctgcctgtaaacgctctgtaaatactcccttccacccatcccagcccctgggcagccgggcagaagggaatccaggctatggacctcccaagtccccgctccccgctcccctcggcggccccgccttgttctgatctgtgtgtgagtgtgtgtgaacttctgaaagacaatattaaagagacttagttgattta

SEQ ID NO: 169641 - DNA, 1909 bp, Homo sapiens; identical to SEQ ID NO: 169638
  Payload ID: 13404
  Gene Symbol: PRRT1
  Gene Name: proline-rich transmembrane protein 1
  Uniprot ID: Q99946
  ENST ID: ENST00000454112
  CDS Start-End: 126-1046

SEQ ID NO: 169642 - DNA, 497 bp, Homo sapiens
  Payload ID: 13404
  Gene Symbol: PRRT1
  Gene Name: proline-rich transmembrane protein 1
  ENST ID: ENST00000439937
  CDS Start-End: 310-497
agcgttcgggggacttgttctctaggtccaggatcttcctaatgcatcgcctcagccatgaacaacgcggagttctttaatacccgtgagcagcagcccaggccccttgaagagtgcagactcccacctggcctgggcgtctggctccgcagcagaacacgaagtttgcattccccaaggggcggccagggggcggaccagggaaaggtagtcctctgcattttgccgtgtgctggtcccacccgcctcgcctggtctagcctccgtgtttccatgacaactccaaaggagcccaaactgggggcttgaatgccgggcacccagactccagcaccggccgaggacccccactccggctgcagggaccctgtcccagcgagaccgcaggcatgtcatccgaaaagtcaggagactcgcttcgagggcccacttcccccgccgccgcccgctgccgccgccccgcccccgccggcgccagcccagactgcccaggcccc

SEQ ID NO: 169643 - DNA, 497 bp, Homo sapiens
  Payload ID: 13404
  Gene Symbol: PRRT1
  Gene Name: proline-rich transmembrane protein 1
  ENST ID: ENST00000457819
  CDS Start-End: 310-497
agcgttcgggggacttgttctctaggtccaggatcttcctaatgcatcgcctcagccatgaacaacgcggagttctttaatacccgtgagcagcagcccaggccccttgaagagtgcagactcccacctggcctgggcgtctggctccgcagcaggacacgaagtttgcattccccaaggggcggccagggggcggaccagggaaaggtagtcctctgcattttgccgtgtgctggtcccacccgcctcgcctggtctagcctccgtgtttccatgacaactccaaaggagcccaaactgggggcttgaatgccgggcacccagactccagcaccggccgaggacccccactccggctgcagggaccctgtcccagcgagaccgcaggcatgtcatccgaaaagtcaggagactcgcttcgagggcccacttcccccgccgccgcccgctgccgccgccccgcccccgccggcgccagcccagactgcccaggcccc

SEQ ID NO: 169644 - DNA, 497 bp, Homo sapiens; identical to SEQ ID NO: 169642
  Payload ID: 13404
  Gene Symbol: PRRT1
  Gene Name: proline-rich transmembrane protein 1
  ENST ID: ENST00000425067
  CDS Start-End: 310-497

SEQ ID NO: 169645 - DNA, 1726 bp, Homo sapiens; identical to SEQ ID NO: 169640
  Payload ID: 13404
  Gene Symbol: PRRT1
  Gene Name: proline-rich transmembrane protein 1
  Uniprot ID: Q99946
  ENST ID: ENST00000452030
  CDS Start-End: 186-863

SEQ ID NO: 169646 - DNA, 497 bp, Homo sapiens; identical to SEQ ID NO: 169642
  Payload ID: 13404
  Gene Symbol: PRRT1
  Gene Name: proline-rich transmembrane protein 1
  ENST ID: ENST00000419839
  CDS Start-End: 310-497

SEQ ID NO: 169647 - DNA, 497 bp, Homo sapiens
  Payload ID: 13404
  Gene Symbol: PRRT1
  Gene Name: proline-rich transmembrane protein 1
  ENST ID: ENST00000428778
  CDS Start-End: 310-497
agcgttcgggggacttgttctctaggtccaggatcttcctaatgcatcgcctcagccatgaacaacgcggagttctttaatacccgtgagcagcagcccaggccccttgaagagtgcagactcccacctggcctgggcgtctggctccgcagcagaacacgaagtttgcattccccaaggggcggccagggggcggaccagggaaaggtagtcctctgcattttgccgtgtgctggtcccacccgcctcgcctggtctagcctccgtgtttccatgacaactccaaaggaacccaaactgggggcttgaatgccgggcacccagactccagcaccggccgaggacccccactccggctgcagggaccctgtcccagcgagaccgcaggcatgtcatccgaaaagtcaggagactcgcttcgagggcccacttcccccgccgccgcccgctgccgccgccccgcccccgccggcgccagcccagactgcccaggcccc

SEQ ID NO: 169648 - DNA, 1726 bp, Homo sapiens; identical to SEQ ID NO: 169640
  Payload ID: 13404
  Gene Symbol: PRRT1
  Gene Name: proline-rich transmembrane protein 1
  Uniprot ID: Q99946
  ENST ID: ENST00000445122
  CDS Start-End: 186-863

SEQ ID NO: 169649 - DNA, 1909 bp, Homo sapiens; identical to SEQ ID NO: 169638
  Payload ID: 13404
  Gene Symbol: PRRT1
  Gene Name: proline-rich transmembrane protein 1
  Uniprot ID: Q99946
  ENST ID: ENST00000419655
  CDS Start-End: 126-1046

SEQ ID NO: 169650 - DNA, 1909 bp, Homo sapiens; identical to SEQ ID NO: 169638
  Payload ID: 13404
  Gene Symbol: PRRT1
  Gene Name: proline-rich transmembrane protein 1
  Uniprot ID: Q99946
  ENST ID: ENST00000456814
  CDS Start-End: 126-1046

SEQ ID NO: 169651 - DNA, 1909 bp, Homo sapiens; identical to SEQ ID NO: 169638
  Payload ID: 13404
  Gene Symbol: PRRT1
  Gene Name: proline-rich transmembrane protein 1
  Uniprot ID: Q99946
  ENST ID: ENST00000458719
  CDS Start-End: 126-1046

SEQ ID NO: 169652 - DNA, 1909 bp, Homo sapiens; identical to SEQ ID NO: 169638
  Payload ID: 13404
  Gene Symbol: PRRT1
  Gene Name: proline-rich transmembrane protein 1
  Uniprot ID: Q99946
  ENST ID: ENST00000451329
  CDS Start-End: 126-1046

SEQ ID NO: 169653 - DNA, 1909 bp, Homo sapiens; identical to SEQ ID NO: 169638
  Payload ID: 13404
  Gene Symbol: PRRT1
  Gene Name: proline-rich transmembrane protein 1
  Uniprot ID: Q99946
  ENST ID: ENST00000444466
  CDS Start-End: 126-1046

SEQ ID NO: 169654 - DNA, 1726 bp, Homo sapiens; identical to SEQ ID NO: 169640
  Payload ID: 13404
  Gene Symbol: PRRT1
  Gene Name: proline-rich transmembrane protein 1
  Uniprot ID: Q99946
  ENST ID: ENST00000423671
  CDS Start-End: 186-863

SEQ ID NO: 169655 - DNA, 1726 bp, Homo sapiens; identical to SEQ ID NO: 169640
  Payload ID: 13404
  Gene Symbol: PRRT1
  Gene Name: proline-rich transmembrane protein 1
  Uniprot ID: Q99946
  ENST ID: ENST00000418753
  CDS Start-End: 186-863

SEQ ID NO: 169656 - DNA, 1726 bp, Homo sapiens; identical to SEQ ID NO: 169640
  Payload ID: 13404
  Gene Symbol: PRRT1
  Gene Name: proline-rich transmembrane protein 1
  Uniprot ID: Q99946
  ENST ID: ENST00000441129
  CDS Start-End: 186-863

SEQ ID NO: 169657 - DNA, 497 bp, Homo sapiens; identical to SEQ ID NO: 169642
  Payload ID: 13404
  Gene Symbol: PRRT1
  Gene Name: proline-rich transmembrane protein 1
  ENST ID: ENST00000423003
  CDS Start-End: 310-497

SEQ ID NO: 169658 - DNA, 1909 bp, Homo sapiens; identical to SEQ ID NO: 169638
  Payload ID: 13404
  Gene Symbol: PRRT1
  Gene Name: proline-rich transmembrane protein 1
  Uniprot ID: Q99946
  ENST ID: ENST00000414687
  CDS Start-End: 126-1046

SEQ ID NO: 169659 - DNA, 497 bp, Homo sapiens; identical to SEQ ID NO: 169643
  Payload ID: 13404
  Gene Symbol: PRRT1
  Gene Name: proline-rich transmembrane protein 1
  ENST ID: ENST00000444218
  CDS Start-End: 310-497

SEQ ID NO: 169660 - DNA, 1726 bp, Homo sapiens; identical to SEQ ID NO: 169640
  Payload ID: 13404
  Gene Symbol: PRRT1
  Gene Name: proline-rich transmembrane protein 1
  Uniprot ID: Q99946
  ENST ID: ENST00000425739
  CDS Start-End: 186-863

SEQ ID NO: 169661 - DNA, 497 bp, Homo sapiens; identical to SEQ ID NO: 169642
  Payload ID: 13404
  Gene Symbol: PRRT1
  Gene Name: proline-rich transmembrane protein 1
  ENST ID: ENST00000437574
  CDS Start-End: 310-497

SEQ ID NO: 169662 - DNA, 3002 bp, Homo sapiens
  Payload ID: 13405
  Gene Symbol: PRRT2
  Gene Name: proline-rich transmembrane protein 2
  Uniprot ID: Q7Z6L0
  ENST ID: ENST00000300797
  CDS Start-End: 177-1076
ctagctgacttgctccctcccgggctgcggctgctgcaaaagccagcagcggcagcgggagctgtccggaggccggcgtcgaggtgagacccgggcagactgaggctgcggggtttgccgctgtctctgctattccatcctccccataggggctctctcccctctcccatctcaagatggcagccagcagctctgagatctctgagatgaagggggttgaggagagtcccaaggttccaggcgaagggcctggccattctgaagctgaaactggccctccccaggtcctagcaggggtaccagaccagccagaggccccgcagccaggtccaaacaccactgcggcccctgtggactcagggcccaaggctgggctggctccagaaaccacagagaccccggctggggcctcagaaacagcccaggccacagacctcagcttaagcccaggaggggaatcaaaggccaactgcagccccgaagacccatgccaagaaacagtgtccaaaccagaagtgagcaaagaggccactgcagaccaggggtccaggctggagtctgcagccccacctgaaccagccccagagcctgctccccaaccagacccccggccagattcccagcctacccccaagccagcccttcaaccagagctccctacccaggaggaccccacccctgagattctgtctgagagtgtaggggaaaagcaagagaatggggcagtggtgcccctgcaggctggtgatggggaagagggcccagcccctgagcctcactcaccaccctcaaaaaaatcccccccagccaatggggcccccccccgagtgctgcagcagctggttgaggaggatcgaatgagaagggcacacagtgggcatccaggatctccccgaggtagcctgagccgccaccccagctcccagttggcaggtcctggggtggaggggggtgaaggcacccagaaacctcgggactacatcatccttgccatcctgtcctgcttctgccccatgtggcctgtcaacatcgtggccttcgcttatgctgtcatggtgagccccatgggaccctagcccaggcctgctgtggctcccagcttcccgccagcgctgcaatagagcctctggagtaatcatgccttccttcccctctcctctctgcatggatcccacctccccaattccagggcctttgtttgcctctccctaggacctaaccctctgagccaccactgccctgcccctttgggtgggagggatatggaaacacgtgtcacacagcctcgctgacctgtgccctcctccccctgccccttcactcctccttcctcccttacccgccatctatggggctggcctctctctcttctggatgacttttccacctgatcccttctgggctggcttctcctgaccccggctatgtgcctccacccctcgccctaaccccagtcccggaacagcctgcagcagggggacgtggacggggcccagcgtctgggccgggtagccaagctcttaagcatcgtggcgctggtggggggagtcctcatcatcatcgcctcctgcgtcatcaacttaggcggtgagtgggggcttgggacaggcaggggaggaatggaagggttggcaagggcagctttactaacccctgcccctgctctctcctgtctgtcctccttacctctcctttgtctctccttgtctccccctccccccgtctgtccttccctctcctctcccacagtgtataagtgaggggctctgccccgcatcccaagacttttcttcctgttgggagctgccttgggcccatccctcccctggggggagcccaactgatggccctggcccccacccctaaggaccaagggagcctgagcggccttgtttacagcttctgtcctgctcctgcatcttgccaggctcctctgccaactgtaggcctgcctcatccctgcactggttccaacctccctgcactaatgcctgcatcccctccggcctcttggccccctatccctgcacttctggaaacctccctgcactctggaaacctccctgaacacctccccaactctgcgctctcagcctccctgcatctctcctggcctccctgcacttcttccagccccccaaattctctggacctccaccctggccgcctcctcccaactttcattgtcttggcatctctcaaccctcagtcctctcttccttcccttctttatcatctcccctttcctctccacgtcccgcccccttcctcttcctgcctcctcatctcccttaagcatcctcttctccaacctcccgtcaccgtttactctgcaaaattgacagcacttagacgaggcttgggggcagggagcagtgttgggagagggctccccaaccccaggctcggactgttctctgctgggaccacccagggtcggacacccaagggtgcctggcaggtcgcagagttggcaagccgggcctcgtatggggactcgggtgagggtggcgagtactggttccgaacgcacgcaggggagaagggagggacgcggcgctgacccttccaggtcagctggagttgacccgcccacctgggcttttcaaccccagtccgcgagtttctttcttgaaggtgtgggggctagattcattcacgtgcttcgtaatgaaataatccaaaaaataggaccaaagcgcccactggcaggagcgagggcggggcgccgcgctctataattattttctaagatgatgggggaggtttgttgcacgcgacagcccgctgaggaggcggggaccgagctacaacgcggttcggatttggcgggggtttttttccttaaaaaaaaaaaaaaaaaaaaaaaaaaagtctgggggaagaaaaaaactaaaattcttaaaaaaaaaaaaaaaaggctattatcaaactgatttctccctttttgtatgccggatgctgcatgagtctgaaacaccaataaacggagactgcatgag

SEQ ID NO: 169663 - DNA, 2567 bp, Homo sapiens
  Payload ID: 13405
  Gene Symbol: PRRT2
  Gene Name: proline-rich transmembrane protein 2
  Uniprot ID: Q7Z6L0
  ENST ID: ENST00000358758
  CDS Start-End: 302-1324
gtaacgcgtggctcccttgggctggcgggaggggccggaggctcgcgaggggcgggggcggcgacggcggcggagcgtaggggaggggaccggagaggaggggatgagcacacgggagaggagaagagggagacccgccgcctccctccctccctagctgacttgctccctcccgggctgcggctgctgcaaaagccagcagcggcagcgggagctgtccggaggccggcgtcgagggtttgccgctgtctctgctattccatcctccccataggggctctctcccctctcccatctcaagatggcagccagcagctctgagatctctgagatgaagggggttgaggagagtcccaaggttccaggcgaagggcctggccattctgaagctgaaactggccctccccaggtcctagcaggggtaccagaccagccagaggccccgcagccaggtccaaacaccactgcggcccctgtggactcagggcccaaggctgggctggctccagaaaccacagagaccccggctggggcctcagaaacagcccaggccacagacctcagcttaagcccaggaggggaatcaaaggccaactgcagccccgaagacccatgccaagaaacagtgtccaaaccagaagtgagcaaagaggccactgcagaccaggggtccaggctggagtctgcagccccacctgaaccagccccagagcctgctccccaaccagacccccggccagattcccagcctacccccaagccagcccttcaaccagagctccctacccaggaggaccccacccctgagattctgtctgagagtgtaggggaaaagcaagagaatggggcagtggtgcccctgcaggctggtgatggggaagagggcccagcccctgagcctcactcaccaccctcaaaaaaatcccccccagccaatggggcccccccccgagtgctgcagcagctggttgaggaggatcgaatgagaagggcacacagtgggcatccaggatctccccgaggtagcctgagccgccaccccagctcccagttggcaggtcctggggtggaggggggtgaaggcacccagaaacctcgggactacatcatccttgccatcctgtcctgcttctgccccatgtggcctgtcaacatcgtggccttcgcttatgctgtcatgtcccggaacagcctgcagcagggggacgtggacggggcccagcgtctgggccgggtagccaagctcttaagcatcgtggcgctggtggggggagtcctcatcatcatcgcctcctgcgtcatcaacttaggcgtgtataagtgaggggctctgccccgcatcccaagacttttcttcctgttgggagctgccttgggcccatccctcccctggggggagcccaactgatggccctggcccccacccctaaggaccaagggagcctgagcggccttgtttacagcttctgtcctgctcctgcatcttgccaggctcctctgccaactgtaggcctgcctcatccctgcactggttccaacctccctgcactaatgcctgcatcccctccggcctcttggccccctatccctgcacttctggaaacctccctgcactctggaaacctccctgaacacctccccaactctgcgctctcagcctccctgcatctctcctggcctccctgcacttcttccagccccccaaattctctggacctccaccctggccgcctcctcccaactttcattgtcttggcatctctcaaccctcagtcctctcttccttcccttctttatcatctcccctttcctctccacgtcccgcccccttcctcttcctgcctcctcatctcccttaagcatcctcttctccaacctcccgtcaccgtttactctgcaaaattgacagcacttagacgaggcttgggggcagggagcagtgttgggagagggctccccaaccccaggctcggactgttctctgctgggaccacccagggtcggacacccaagggtgcctggcaggtcgcagagttggcaagccgggcctcgtatggggactcgggtgagggtggcgagtactggttccgaacgcacgcaggggagaagggagggacgcggcgctgacccttccaggtcagctggagttgacccgcccacctgggcttttcaaccccagtccgcgagtttctttcttgaaggtgtgggggctagattcattcacgtgcttcgtaatgaaataatccaaaaaataggaccaaagcgcccactggcaggagcgagggcggggcgccgcgctctataattattttctaagatgatgggggaggtttgttgcacgcgacagcccgctgaggaggcggggaccgagctacaacgcggttcggatttggcgggggtttttttccttaaaaaaaaaaaaaaaaaaaaaaaaaaagtctgggggaagaaaaaaactaaaattcttaaaaaaaaaaaaaaaaggctattatcaaactgatttctccctttttgtatgccggatgctgcatgagtctgaaacaccaataaacggagactgcatgaga

SEQ ID NO: 169664 - DNA, 564 bp, Homo sapiens
  Payload ID: 13405
  Gene Symbol: PRRT2
  Gene Name: proline-rich transmembrane protein 2
  ENST ID: ENST00000562148
  CDS Start-End: 247-564
atcttccttgccctcctgctcgtagagacgcctccacccggtcctgcctgtctcactggtcccgtctcctcgcagaaccctctccgtttcccccaaatccccgtctcttccaggaatcccggtgaccgttggcgggaggggccggggacttaagaaggaggcgtctctcctggaggcgcgcggtttgccgctgtctctgctattccatcctccccataggggctctctcccctctcccatctcaagatggcagccagcagctctgagatctctgagatgaagggggttgaggagagtcccaaggttccaggcgaagggcctggccattctgaagctgaaactggccctccccaggtcctagcaggggtaccagaccagccagaggccccgcagccaggtccaaacaccactgcggcccctgtggactcagggcccaaggctgggctggctccagaaaccacagagaccccggctggggcctcagaaacagcccaggccacagacctcagcttaagcccaggaggggaatcaaaggccaactgcagccccgaagacccatgccaa

SEQ ID NO: 169665 - DNA, 1470 bp, Homo sapiens
  Payload ID: 13405
  Gene Symbol: PRRT2
  Gene Name: proline-rich transmembrane protein 2
  Uniprot ID: Q7Z6L0
  ENST ID: ENST00000567659
  CDS Start-End: 199-1383
atgagcacacgggagaggagaagagggagacccgccgcctccctccctccctagctgacttgctccctcccgggctgcggctgctgcaaaagccagcagcggcagcgggagctgtccggaggccggcgtcgagggtttgccgctgtctctgctattccatcctccccataggggctctctcccctctcccatctcaagatggcagccagcagctctgagatctctgagatgaagggggttgaggagagtcccaaggttccaggcgaagggcctggccattctgaagctgaaactggccctccccaggtcctagcaggggtaccagaccagccagaggccccgcagccaggtccaaacaccactgcggcccctgtggactcagggcccaaggctgggctggctccagaaaccacagagaccccggctggggcctcagaaacagcccaggccacagacctcagcttaagcccaggaggggaatcaaaggccaactgcagccccgaagacccatgccaagaaacagtgtccaaaccagaagtgagcaaagaggccactgcagaccaggggtccaggctggagtctgcagccccacctgaaccagccccagagcctgctccccaaccagacccccggccagattcccagcctacccccaagccagcccttcaaccagagctccctacccaggaggaccccacccctgagattctgtctgagagtgtaggggaaaagcaagagaatggggcagtggtgcccctgcaggctggtgatggggaagagggcccagcccctgagcctcactcaccaccctcaaaaaaatcccccccagccaatggggcccccccccgagtgctgcagcagctggttgaggaggatcgaatgagaagggcacacagtgggcatccaggatctccccgaggtagcctgagccgccaccccagctcccagttggcaggtcctggggtggaggggggtgaaggcacccagaaacctcgggactacatcatccttgccatcctgtcctgcttctgccccatgtggcctgtcaacatcgtggccttcgcttatgctgtcatgtcccggaacagcctgcagcagggggacgtggacggggcccagcgtctgggccgggtagccaagctcttaagcatcgtggcgctggtggggggagtcctcatcatcatcgcctcctgcgtcatcaacttaggcggtgagtgggggcttgggacaggcaggggaggaatggaagggttggcaagggcagctttactaacccctgcccctgctctctcctgtctgtcctccttacctctcctttgtctctccttgtctccccctccccccgtctgtccttccctctcctctcccacagtgtataagtgaggggctctgccccgcatcccaagacttttcttcctgttgggagctgccttgggcccatccctcccctggggggagcccaactgatgg

SEQ ID NO: 169666 - DNA, 2403 bp, Homo sapiens
  Payload ID: 13405
  Gene Symbol: PRRT2
  Gene Name: proline-rich transmembrane protein 2
  Uniprot ID: Q7Z6L0
  ENST ID: ENST00000572820
  CDS Start-End: 127-1149
ggcagcgggagctgtccggaggccggcgtcgaggtgagacccgggcagactgaggctgcggggtttgccgctgtctctgctattccatcctccccataggggctctctcccctctcccatctcaagatggcagccagcagctctgagatctctgagatgaagggggttgaggagagtcccaaggttccaggcgaagggcctggccattctgaagctgaaactggccctccccaggtcctagcaggggtaccagaccagccagaggccccgcagccaggtccaaacaccactgcggcccctgtggactcagggcccaaggctgggctggctccagaaaccacagagaccccggctggggcctcagaaacagcccaggccacagacctcagcttaagcccaggaggggaatcaaaggccaactgcagccccgaagacccatgccaagaaacagtgtccaaaccagaagtgagcaaagaggccactgcagaccaggggtccaggctggagtctgcagccccacctgaaccagccccagagcctgctccccaaccagacccccggccagattcccagcctacccccaagccagcccttcaaccagagctccctacccaggaggaccccacccctgagattctgtctgagagtgtaggggaaaagcaagagaatggggcagtggtgcccctgcaggctggtgatggggaagagggcccagcccctgagcctcactcaccaccctcaaaaaaatcccccccagccaatggggcccccccccgagtgctgcagcagctggttgaggaggatcgaatgagaagggcacacagtgggcatccaggatctccccgaggtagcctgagccgccaccccagctcccagttggcaggtcctggggtggaggggggtgaaggcacccagaaacctcgggactacatcatccttgccatcctgtcctgcttctgccccatgtggcctgtcaacatcgtggccttcgcttatgctgtcatgtcccggaacagcctgcagcagggggacgtggacggggcccagcgtctgggccgggtagccaagctcttaagcatcgtggcgctggtggggggagtcctcatcatcatcgcctcctgcgtcatcaacttaggcgtgtataagtgaggggctctgccccgcatcccaagacttttcttcctgttgggagctgccttgggcccatccctcccctggggggagcccaactgatggccctggcccccacccctaaggaccaagggagcctgagcggccttgtttacagcttctgtcctgctcctgcatcttgccaggctcctctgccaactgtaggcctgcctcatccctgcactggttccaacctccctgcactaatgcctgcatcccctccggcctcttggccccctatccctgcacttctggaaacctccctgcactctggaaacctccctgaacacctccccaactctgcgctctcagcctccctgcatctctcctggcctccctgcacttcttccagccccccaaattctctggacctccaccctggccgcctcctcccaactttcattgtcttggcatctctcaaccctcagtcctctcttccttcccttctttatcatctcccctttcctctccacgtcccgcccccttcctcttcctgcctcctcatctcccttaagcatcctcttctccaacctcccgtcaccgtttactctgcaaaattgacagcacttagacgaggcttgggggcagggagcagtgttgggagagggctccccaaccccaggctcggactgttctctgctgggaccacccagggtcggacacccaagggtgcctggcaggtcgcagagttggcaagccgggcctcgtatggggactcgggtgagggtggcgagtactggttccgaacgcacgcaggggagaagggagggacgcggcgctgacccttccaggtcagctggagttgacccgcccacctgggcttttcaaccccagtccgcgagtttctttcttgaaggtgtgggggctagattcattcacgtgcttcgtaatgaaataatccaaaaaataggaccaaagcgcccactggcaggagcgagggcggggcgccgcgctctataattattttctaagatgatgggggaggtttgttgcacgcgacagcccgctgaggaggcggggaccgagctacaacgcggttcggatttggcgggggtttttttccttaaaaaaaaaaaaaaaaaaaaaaaaaaagtctgggggaagaaaaaaactaaaattcttaaaaaaaaaaaaaaaaggctattatcaaactgatttctccctttttgtatgccggatgctgcatgagtctgaaacaccaataaacggagactgcatgagactcgcctccaa

SEQ ID NO: 169667 - DNA, 3368 bp, Homo sapiens
  Payload ID: 13406
  Gene Symbol: PRRT3
  Gene Name: proline-rich transmembrane protein 3
  Uniprot ID: Q5FWE3
  ENST ID: ENST00000295984
  CDS Start-End: 111-3056
gcgatcggctgcagggacgcgcgcaaggtgaacacgggggctgcggcgcgcaggctcatccagtgaggactggaaggtgggggctttaggcccaggcatcggagtagaccatggcctccagcccatggggctgtgtatgtggccttctgctgttgctgctgccactcctggggactggccctgccctggggaggggctttcccaggccacttgaaaactccgaaatccctatgatccctggagcccaccccaagggctctgtgggctcagagccccaggcctttgacgtgttcccggagaaccccagagctgacagtcacaggaactctgatgtccgccacgcccctgctgaagagatgcctgagaagcctgtagcctctccccttggcccagccctgtacgggcccaaagcagcacaaggagctcagagagaacgactcccagtaactgatgacctccagatggctcaaggaccaagctcccacggctggacaggacctctggactcacaagagcttctgcagcaagaagcagtggctccccacccagtgggccaccctcatctcactttcatccccacaactcccagacgtcaactcagggtagccacagttcctccctccctgcagcatgaaggccaagagggacagtggccacctagagatgagggtctgaaggccaaaactaagagcagggtcccacccacttctccctcagaccaccagggcccaccccacacccttgtttcccactcaggtactgtcaagaggccagtgctggaaggacagggtgggtttgaggaacacttgcaggaggcagctcaaggtccccacttcacccagcaggatccagcagcccctgatgttggctcagtacccccagttgaggtggtgtactctcaggagccaggggcccagccagacttggcattggccagaagccttcctcctgctgaggagctgccggttgagacccccaagagggctggcgctgaggtgtcctgggaagtcagctccccaggtcccccgcccaagcaggctgaccttcctgacgctaaggattcaccaggaccccagcccacggatccacccgcctcagaggctcctgatcggccgtctaagccagagagagcagcaatgaatggagcagaccccatctccccccagcgggtgagaggagctgtggaggccccaggcacccccaagtctctcatccctggtccctcagaccctggcccagctgtaaaccgaacagagagccccatgggggccctgcagccagatgaagccgaggagtggccggggcgcccccaaagccatcccccagcacccccagtccaggccccctcgacgtcacgccggggcctcattcgagtcaccacgcagcgagccctgggccagcctccccctccggagcccaccgccagctccatggcttcagccccagcctccagccccccagccaacgccactgcacccccgctacgctggggcccccttcggcgggtcctgagcttctcctgggagctgcacgtctacggggtgggggtactctttctgctgcccgcgttgttggcgctggctgcgctggcagccgccccagcagggccccggctggcattggtggccgcggtgctggtgctcgtggcttcggcgctgcgatccgcctacatgcttaccgacccttacggctcgcaggcgcggctgggcgttcgcgggggcctggtgctctacaacctgcccttccccttgctgcttacggcgctggcagccctgactctgctcggcctgggcgcggggctgccgccaccgctgcaaaacccactcctgctgggagcagtggcgctggtgcatggtgtagggttgctcgcgacagacctgctgtccacatggtctgtgctcaacctcctgacgcagggcttgtcgtgcgcctggggcgcggccgtggctctgggcacgctctgcctgtgccgtcgccgcctgctggacggcccacggggctgggatgccagcccgggccctcggctgttggctgtggcgggcgcgctggggctgctggctagcggcttgcagctggcggctgcgctctggctgtacccgggcccaggccgcgtgggccgcttctcgtgggcctggtggggtgtccacttctggctgcgcctcctggagctgacatgggcgctcgccctggcgttggccgcggtggctgccgcgagacccaggccgcccacggagcacgcttgctgggctaagctgatgcgtctggcgtgcccggcgccgtcaggaaagagcgaggtgccggagcgacccaataactgctatgcagggcccagcaacgttggtgcaggcagcttggacatcagcaagagcctcatccgcaacccggcggagagtgggcagctggccacgcccagttcaggcgcctggggctcggctgcgtcgttgggtcgcggaccccagggtggcccgggactgtcccgcaacggtgtgggaccggcgccatcgctgagcgagctggatctgcggccgccatcgcccatcaacctgagccgcagcatcgacgccgcgctcttccgcgagcacctagtgcgagacagtgtgttccagcgctgcggcctccgcggcctggcctccccgccgcctggaggcgctctgcggccgcgccggggcagccatcccaaagccgagctcgacgacgctggctcctcgctcctccgcggccgctgcaggtcgctcagcgacgtgcgcgtgcgcgggccggtcccacagcacgtagtggaagcacccgacggggcagccgctgcggcttctggcagctccctcgacagcttctccaggggttcactcaagatcagttggaacccctggcgccacgggctgtcatcagtggacagtctgcccctagatgagttgcccagcacggtacagctactgcctgccccgaccccagcccctgattctaccgccgctcggcagggggacggccagggagaggtccagccgcgcggcaagcctggggaatcccgcagcgcctccagtgataccatcgagctttgaagagcggtcctgacgcagggccaggaccctgcccgatgcccacatggcatggcctactgggacagttgagcctttaaaaaatgggcatcctggccaggcgcggtggctcacgccaggaatcccagcactttgggaggccgagccggcattttgcacagaggccgtgtcttatgcggaatacagggtgggtgtgcatggattcgggcatgaagaacagggagcaggtgccccagactccccaacgtggagtgatgagcctcgcttgtctagattgtcctctttgtgccaaagaaataaacccttaggacttgg

SEQ ID NO: 169668 - DNA, 3761 bp, Homo sapiens
  Payload ID: 13406
  Gene Symbol: PRRT3
  Gene Name: proline-rich transmembrane protein 3
  Uniprot ID: Q5FWE3
  ENST ID: ENST00000412055
  CDS Start-End: 131-3076
atctcggaggatgcggcgcggcgatcggctgcagggacgcgcgcaaggtgaacacgggggctgcggcgcgcaggctcatccagtgaggactggaaggtgggggctttaggcccaggcatcggagtagaccatggcctccagcccatggggctgtgtatgtggccttctgctgttgctgctgccactcctggggactggccctgccctggggaggggctttcccaggccacttgaaaactccgaaatccctatgatccctggagcccaccccaagggctctgtgggctcagagccccaggcctttgacgtgttcccggagaaccccagagctgacagtcacaggaactctgatgtccgccacgcccctgctgaagagatgcctgagaagcctgtagcctctccccttggcccagccctgtacgggcccaaagcagcacaaggagctcagagagaacgactcccagtaactgatgacctccagatggctcaaggaccaagctcccacggctggacaggacctctggactcacaagagcttctgcagcaagaagcagtggctccccacccagtgggccaccctcatctcactttcatccccacaactcccagacgtcaactcagggtagccacagttcctccctccctgcagcatgaaggccaagagggacagtggccacctagagatgagggtctgaaggccaaaactaagagcagggtcccacccacttctccctcagaccaccagggcccaccccacacccttgtttcccactcaggtactgtcaagaggccagtgctggaaggacagggtgggtttgaggaacacttgcaggaggcagctcaaggtccccacttcacccagcaggatccagcagcccctgatgttggctcagtacccccagttgaggtggtgtactctcaggagccaggggcccagccagacttggcattggccagaagccttcctcctgctgaggagctgccggttgagacccccaagagggctggcgctgaggtgtcctgggaagtcagctccccaggtcccccgcccaagcaggctgaccttcctgacgctaaggattcaccaggaccccagcccacggatccacccgcctcagaggctcctgatcggccgtctaagccagagagagcagcaatgaatggagcagaccccatctccccccagcgggtgagaggagctgtggaggccccaggcacccccaagtctctcatccctggtccctcagaccctggcccagctgtaaaccgaacagagagccccatgggggccctgcagccagatgaagccgaggagtggccggggcgcccccaaagccatcccccagcacccccagtccaggccccctcgacgtcacgccggggcctcattcgagtcaccacgcagcgagccctgggccagcctccccctccggagcccaccgccagctccatggcttcagccccagcctccagccccccagccaacgccactgcacccccgctacgctggggcccccttcggcgggtcctgagcttctcctgggagctgcacgtctacggggtgggggtactctttctgctgcccgcgttgttggcgctggctgcgctggcagccgccccagcagggccccggctggcattggtggccgcggtgctggtgctcgtggcttcggcgctgcgatccgcctacatgcttaccgacccttacggctcgcaggcgcggctgggcgttcgcgggggcctggtgctctacaacctgcccttccccttgctgcttacggcgctggcagccctgactctgctcggcctgggcgcggggctgccgccaccgctgcaaaacccactcctgctgggagcagtggcgctggtgcatggtgtagggttgctcgcgacagacctgctgtccacatggtctgtgctcaacctcctgacgcagggcttgtcgtgcgcctggggcgcggccgtggctctgggcacgctctgcctgtgccgtcgccgcctgctggacggcccacggggctgggatgccagcccgggccctcggctgttggctgtggcgggcgcgctggggctgctggctagcggcttgcagctggcggctgcgctctggctgtacccgggcccaggccgcgtgggccgcttctcgtgggcctggtggggtgtccacttctggctgcgcctcctggagctgacatgggcgctcgccctggcgttggccgcggtggctgccgcgagacccaggccgcccacggagcacgcttgctgggctaagctgatgcgtctggcgtgcccggcgccgtcaggaaagagcgaggtgccggagcgacccaataactgctatgcagggcccagcaacgttggtgcaggcagcttggacatcagcaagagcctcatccgcaacccggcggagagtgggcagctggccacgcccagttcaggcgcctggggctcggctgcgtcgttgggtcgcggaccccagggtggcccgggactgtcccgcaacggtgtgggaccggcgccatcgctgagcgagctggatctgcggccgccatcgcccatcaacctgagccgcagcatcgacgccgcgctcttccgcgagcacctagtgcgagacagtgtgttccagcgctgcggcctccgcggcctggcctccccgccgcctggaggcgctctgcggccgcgccggggcagccatcccaaagccgagctcgacgacgctggctcctcgctcctccgcggccgctgcaggtcgctcagcgacgtgcgcgtgcgcgggccggtcccacagcacgtagtggaagcacccgacggggcagccgctgcggcttctggcagctccctcgacagcttctccaggggttcactcaagatcagttggaacccctggcgccacgggctgtcatcagtggacagtctgcccctagatgagttgcccagcacggtacagctactgcctgccccgaccccagcccctgattctaccgccgctcggcagggggacggccagggagaggtccagccgcgcggcaagcctggggaatcccgcagcgcctccagtgataccatcgagctttgaagagcggtcctgacgcagggccaggaccctgcccgatgcccacatggcatggcctactgggacagttgagcctttaaaaaatgggcatcctggccaggcgcggtggctcacgccaggaatcccagcactttgggaggccgaggtgggtggaacacgaggtcaggagttcgagatcagcctcctggtctcgaacatagcgaaaccctcgtctctactaaaaatacaaaaaaattagccaggtggcacacgcctgtagtcccagctactcgggaggctgaggcgggagaattgcttgaacagggaggcagaggttgcagtgagccgagaccacgccattgcactccagcctgggtgacaagagtgagactccgtctcaaaaaaaaaaaaaaaaaaaaaaaaaaaaaaggcatccccaggcctctctacctgacggcaacccccgggggacagccaggtttgaactcaccccacccccatgccgttttttgcttttaatatttctatttttttttcagccggcattttgcacagaggccgtgtcttatgcggaatacagggtgggtgtgcatggattcgggcatgaagaacagggagcaggtgccccagactccccaacgtggagtgatgagcctcgcttgtctagattgtcctctttgtgccaaagaaataaacccttaggacttgg

SEQ ID NO: 169669 - DNA, 1475 bp, Homo sapiens
  Payload ID: 13406
  Gene Symbol: PRRT3
  Gene Name: proline-rich transmembrane protein 3
  Uniprot ID: Q5FWE3
  ENST ID: ENST00000411976
  CDS Start-End: 127-1392
cggaggatgcggcgcggcgatcggctgcagggacgcgcgcaaggtgaacacgggggctgcggcgcgcaggctcatccagtgaggactggaaggtgggggctttaggcccaggcatcggagtagaccatggcctccagcccatggggctgtgtatgtggccttctgctgttgctgctgccactcctggggactggccctgccctggggaggggctttcccaggccacttgaaaactccgaaatccctatgatccctggagcccaccccaagggctctgtgggctcagagccccaggcctttgacgtgttcccggagaaccccagagctgacagtcacaggaactctgatgtccgccacgcccctgctgaagagatgcctgagaagcctgtagcctctccccttggcccagccctgtacgggcccaaagcagcacaaggagctcagagagaacgactcccagtaactgatgacctccagatggctcaaggaccaagctcccacggctggacaggacctctggactcacaagagcttctgcagcaagaagcagtggctccccacccagtgggccaccctcatctcactttcatccccacaactcccagacgtcaactcagggtagccacagttcctccctccctgcagcatgaaggccaagagggacagtggccacctagagatgagggtctgaaggccaaaactaagagcagggtcccacccacttctccctcagaccaccagggcccaccccacacccttgtttcccactcaggtactgtcaagaggccagtgctggaaggacagggtgggtttgaggaacacttgcaggaggcagctcaaggtccccacttcacccagcaggatccagcagcccctgatgttggctcagtacccccagttgaggtggtgtactctcaggagccaggggcccagccagacttggcattggccagaagccttcctcctgctgaggagctgccggttgagacccccaagagggctggcgctgaggtgtcctgggaagtcagctccccaggtcccccgcccaagcaggctgaccttcctgacgctaaggattcaccaggaccccagcccacggatccacccgcctcagaggctcctgatcggccgtctaagccagagagagcagcaatgaatggagcagaccccatctccccccagcgggtgagaggagctgtggaggccccaggcacccccaagtctctcatccctggtccctcagaccctggcccagctgtaaaccgaacagagagccccatgggggccctgcagccaggtgagagcatggctggggtgtggggagagggagtgctctgtctagtaactgagaacctctgttggggatgtatgggggcggagggtggggaatgaatggagacaatcacctccttaaaggagttgcccagggcctccttcaaacaacctaggataataaattcatactcactgggaaa

SEQ ID NO: 169670 - DNA, 3544 bp, Homo sapiens
  Payload ID: 13407
  Gene Symbol: PRRT4
  Gene Name: proline-rich transmembrane protein 4
  Uniprot ID: C9JH25
  ENST ID: ENST00000446477
  CDS Start-End: 315-3014
cggctgccgcggagccccggcgcgggcggcttcgccggggagcgaggctcggagccaggaggcggcgccgctgggagggagcgcggagtgcggagtgcggagcgcggggcctggccgcccgcctgagagaagcggtgagataccacgaagcgttgcccagctgggcgccagggccgccacgaccgccccttttcggaggctcggcgaggagacctgcctgcgggagagaccccggggagcaggaccttcctcctcaaaagctgctgaacaactgagtccctgcccaccaaggccacccgaagccaggtggggccatggccaggcatggctgtctagggctgggactgttctgctgcgtcctgtttgctgctactgtgggcccccagcccaccccctccatcccaggtgcccctgccaccactttgacccccgtacctcaaagtgaggcctctatgctgtctctcaacctgggacttaacttcaaattccatcttcggggacctgctgctgtctgggggagcccagtcacagagacccagccactctctcttgggccaggccaggagccaggggaagaggtggccagtgggctgaggactgaccccctttgggaattgctggtgggctcctcagggaactctctcactgagtggggctccaccgaaggtggctcaaagccccgggcctcctccctgcttccggagtccacatcccggcgctctgggcccagcgatgggcccactgccccctatcagcccaggaggagcactgtgacctgggacactgctctgatggtgacagcacttccatccagtgctcccaggccccaccagagcgagctggagctgaagtttgacatggcactgagagcaggtgcagcccccacgcttgggcatcgaacgctgcccctgctgcccagcctgcgggccagcctggcagagattgctgggcgcctgggaccctttggattctttggcactactctgtccccactccggaacttctccggcctgagccccccaggtgaaactacatccacaagctctgcctctggagtttcgggttctctggggttccttggtaccactctgtccctgcccccatactccctggagaggaagctctccagcccaagtcctctggacccagctgcttccctaagttttgcctcgattgcaacaacatcattagaccccacagtccccatctctggcccagatgacctctctcctcccgccagcctcgggaacccttcggggcagccagagtgtgggccagggtcctgcagcgtgggagaattgcctgaacgcgaggggcagcctcccgaggcgccgaggcccctctttttcctgaccctggaggccgactgggcagaggccagggctcgctgggggctggcctgggaggcccacgtgtacggggtaggcgcgctcttcggcctggttgccttgctggcgctgctggctctggccctcttgccctggcggtgcccgcccggcgccccctgcctggcgctgctggacctgctgctgctgtcggccgggaccacgcgggccttcccgctcttctacgacgcctatgggcacagggatcgactgcccgcgctcgcctggctgctgctgcaggaccttccgctgccctgcttggctgccggcctggggctggcctgcctgctgctggcccggccgcgcccgccgcggtgccccaccggcctggctgcgctgctgctcctggggctggggctggcggccgccgccgccctcgggagcgccgcgcatcgcccgctgcggcccctgcggctcgcctcgcgcgggctgcacgcctttctcgccgctttcctttccgggctgctgctggcgctctcctgctggggcgggcggcggcggcgggccggggcgcccctgggagggtcgggcttcaagggcgccacacccctgccgcaggggcgcagccccttcgcccctcgggagtcctggcggcgcgcggcgcgcacggccccggtggcgggcaccttcgggctgctgagcggagccctgcagggctatgaggtgctgcacgccctgggctacggcggccaatccggcctggaagggccctggccctggtgggccttccagctaggcctgcgcctgggcgaggtgggcgtcgcgctcccgttggcgctgctgggcctctacccggcgctctgcagtcctcgcgtgccgccgcgctgctgggccaagctcttccgcttgtccccgggccacgcggctccgctgctgccgggaggctgggtcactgggcccccagacaaggagcccctggggagcgccatcgctcgcggggacgcggagctgctgcagctgtgcgcgctggcagggccaggcccagacctcctactccagggcggaggttgccggggcttcgaaggcgcggcggccaacccggccccgtccccggcttcctctccctgcagcgattacaccgtggacttccgcccgccctccccaatcaacctgcgacgcagcatcgaggaggccctctgcagcgaggccctgcttgcgcctggcctcttccagggccctgccttcgaggacgctctgcctgggctcggactctaccgcaccgcctcgctggggaccgggggcagggccagtgagagatcaggggaggcctctggccccgctgcgcccccggagctcccctcccctggggcttggcccgcaggcagcagcgtctcatctggctcgttctgcggactctcgcgggacagctcgtccatgctgctgtgttccagccccgacaggcccccgcgctgccctctggtctgcgtcctcagtcccccgcggccctcaggaagcagccccagcctcccggcctcaggatcctaccaggccctgtccccaccctctcgcgactccccagagcctgcttctgagctgcaggccgaggaggccttgctgcaggagcagttcctggacgcctgccgacagatcgacgagctgagcgtgggcagcgacaccatagacctgtgaagaggtggccaccttgctaccctgcgatatgcccctttctggcgcctgccctgcccgagacctgcacactgtaatccttccccaatcctccctggctcagatacctctccagattccttccccatccaggggtccctgggtgggtgggtcagcagccaggctctatcgattgggaatcagtgccaccttctctggagccctgggtgctgatgccctcagctgcaaatctaggttggcaggggtcccattttccttggcattcaccagcaataaagctccaaggtgctccactcctgaccaccactccccactctggtgctgagtgagaggggctgtcctcagaggaccctgggacctgcctcaggcccccctacccacctctgccatgcctaggaatcccacccctgtgtgaatgggactccctttcctccatgtgacacccacaggggtccatgacccatctaggagactttatagcagttgggtgggaggggaatgctcttaatttatcaataaaatattttcagagg

SEQ ID NO: 169671 - DNA, 1789 bp, Homo sapiens
  Payload ID: 13407
  Gene Symbol: PRRT4
  Gene Name: proline-rich transmembrane protein 4
  ENST ID: ENST00000480290
  CDS Start-End: 1-1258
ctcaaagccccgggcctcctccctgcttccggagtccacatcccggcgctctgggcccagcgatgggcccactgccccctatcagcccaggaggagcactgtgacctgggacactgctctgatggtgacagcacttccatccagtgctcccaggccccaccagagcgagctggagctgaagtttgacatggcactgagagcaggtgcagcccccacgcttgggcatcgaacgctgcccctgctgcccagcctgcgggccagcctggcagagattgctgggcgcctgggaccctttggattctttggcactactctgtccccactccggaacttctccggcctgagccccccaggtgaaactacatccacaagctctgcctctggagtttcgggttctctggggttccttggtaccactctgtccctgcccccatactccctggagaggaagctctccagcccaatcctcgcgtgccgccgcgctgctgggccaagctcttccgcttgtccccgggccacgcggctccgctgctgccgggaggctgggtcactgggcccccagacaaggagcccctggggagcgccatcgctcgcggggacgcggagctgctgcagctgtgcgcgctggcagggccaggcccagacctcctactccagggcggaggttgccggggcttcgaaggcgcggcggccaacccggccccgtccccggcttcctctccctgcagcgattacaccgtggacttccgcccgccctccccaatcaacctgcgacgcagcatcgaggaggccctctgcagcgaggccctgcttgcgcctggcctcttccagggccctgccttcgaggacgctctgcctgggctcggactctaccgcaccgcctcgctggggaccgggggcagggccagtgagagatcaggggaggcctctggccccgctgcgcccccggagctcccctcccctggggcttggcccgcaggcagcagcgtctcatctggctcgttctgcggactctcgcgggacagctcgtccatgctgctgtgttccagccccgacaggcccccgcgctgccctctggtctgcgtcctcagtcccccgcggccctcaggaagcagccccagcctcccggcctcaggatcctaccaggccctgtccccaccctctcgcgactccccagagcctgcttctgagctgcaggccgaggaggccttgctgcaggagcagttcctggacgcctgccgacagatcgacgagctgagcgtgggcagcgacaccatagacctgtgaagaggtggccaccttgctaccctgcgatatgcccctttctggcgcctgccctgcccgagacctgcacactgtaatccttccccaatcctccctggctcagatacctctccagattccttccccatccaggggtccctgggtgggtgggtcagcagccaggctctatcgattgggaatcagtgccaccttctctggagccctgggtgctgatgccctcagctgcaaatctaggttggcaggggtcccattttccttggcattcaccagcaataaagctccaaggtgctccactcctgaccaccactccccactctggtgctgagtgagaggggctgtcctcagaggaccctgggacctgcctcaggcccccctacccacctctgccatgcctaggaatcccacccctgtgtgaatgggactccctttcctccatgtgacacccacaggggtccatgacccatctaggagactttatagcagttgggtgggaggggaatgctct

SEQ ID NO: 169672 - DNA, 814 bp, Homo sapiens
  Payload ID: 13407
  Gene Symbol: PRRT4
  Gene Name: proline-rich transmembrane protein 4
  ENST ID: ENST00000495931
  CDS Start-End: 198-814
cggctgccgcggagccccggcgcgggcggcttcgccggggagcgaggctcggagccaggaggcggcgccgctgggagggagcgcggagtgcggagtgcggagcgcggggcctggccgcccgcctggaccttcctcctcaaaagctgctgaacaactgagtccctgcccaccaaggccacccgaagccaggtggggccatggccaggcatggctgtctagggctgggactgttctgctgcgtcctgtttgctgctactgtgggcccccagcccaccccctccatcccaggtgcccctgccaccactttgacccccgtacctcaaagtgaggcctctatgctgtctctcaacctgggacttaacttcaaattccatcttcggggacctgctgctgtctgggggagcccagtcacagagacccagccactctctcttgggccaggccaggagccaggggaagaggtggccagtgggctgaggactgaccccctttgggaattgctggtgggctcctcagggaactctctcactgagtggggctccaccgaaggtggctcaaagccccgggcctcctccctgcttccggagtccacatcccggcgctctgggcccagcgatgggcccactgccccctatcagcccaggaggagcactgtgacctgggacactgctctgatggtgacagcacttccatccagtgctcccaggccccaccagagcgagctggagctgaagtttgacatggcactgagagcaggtgcagcccccacgcttgggcatcgaacgctgcccctgctgcccagcctgcgggccag

SEQ ID NO: 169673 - DNA, 1887 bp, Homo sapiens
  Payload ID: 13407
  Gene Symbol: PRRT4
  Gene Name: proline-rich transmembrane protein 4
  ENST ID: ENST00000489517
  CDS Start-End: 449-1887
tgccgcggagccccggcgcgggcggcttcgccggggagcgaggctcggagccaggaggcggcgccgctgggagggagcgcggagtgcggagtgcggagcgcggggcctggccgcccgcctggtgagagcgctgcgggccggggctgggccgggggcggctcaggggcagcggggcggcgaggctgcggtctctggactaggcgaggggccgccgggggctggaggtccggatcttcagtcggggcgctgggcacaacagagagaagcggtgagataccacgaagcgttgcccagctgggcgccagggccgccacgaccgccccttttcggaggctcggcgaggagacctgcctgcgggagagaccccggggagcaggaccttcctcctcaaaagctgctgaacaactgagtccctgcccaccaaggccacccgaagccaggtggggccatggccaggcatggctgtctagggctgggactgttctgctgcgtcctgtttgctgctactgtgggcccccagcccaccccctccatcccaggtgcccctgccaccactttgacccccgtacctcaaagtgaggcctctatgctgtctctcaacctgggacttaacttcaaattccatcttcggggacctgctgctgtctgggggagcccagtcacagagacccagccactctctcttgggccaggccaggagccaggggaagaggtggccagtgggctgaggactgaccccctttgggaattgctggtgggctcctcagggaactctctcactgagtggggctccaccgaaggtggctcaaagccccgggcctcctccctgcttccggagtccacatcccggcgctctgggcccagcgatgggcccactgccccctatcagcccaggaggagcactgtgacctgggacactgctctgatggtgacagcacttccatccagtgctcccaggccccaccagagcgagctggagctgaagtttgacatggcactgagagcaggtgcagcccccacgcttgggcatcgaacgctgcccctgctgcccagcctgcgggccagcctggcagagattgctgggcgcctgggaccctttggattctttggcactactctgtccccactccggaacttctccggcctgagccccccaggtgaaactacatccacaagctctgcctctggagtttcgggttctctggggttccttggtaccactctgtccctgcccccatactccctggagaggaagctctccagcccaagtcctctggacccagctgcttccctaagttttgcctcgattgcaacaacatcattagaccccacagtccccatctctggcccagatgacctctctcctcccgccagcctcgggaacccttcggggcagccagagtgtgggccagggtcctgcagcgtgggagaattgcctgaacgcgaggggcagcctcccgaggcgccgaggcccctctttttcctgaccctggaggccgactgggcagaggccagggctcgctgggggctggcctgggaggcccacgtgtacggggtaggcgcgctcttcggcctggttgccttgctggcgctgctggctctggccctcttgccctggcggtgcccgcccggcgccccctgcctggcgctgctggacctgctgctgctgtcggccgggaccacgcgggccttcccgctcttctacgacgcctatgggcacagggatcgactgcccgcgctcgcctggctgctgctgcaggaccttccgctgccctgcttggctgccggcctggggctggcctgcctgctgctggcccggccgcgcccgccgcggtgccccaccggcctggctgcgctgctgctcctggggctggggctggcggccgc

SEQ ID NO: 169674 - DNA, 2313 bp, Homo sapiens
  Payload ID: 13407
  Gene Symbol: PRRT4
  Gene Name: proline-rich transmembrane protein 4
  Uniprot ID: C9JH25
  ENST ID: ENST00000489835
  CDS Start-End: 117-1406
cgcggagtgcggagtgcggagcgcggggcctggccgcccgcctggaccttcctcctcaaaagctgctgaacaactgagtccctgcccaccaaggccacccgaagccaggtggggccatggccaggcatggctgtctagggctgggactgttctgctgcgtcctgtttgctgctactgtgggcccccagcccaccccctccatcccaggtgcccctgccaccactttgacccccgtacctcaaagtgaggcctctatgctgtctctcaacctgggacttaacttcaaattccatcttcggggacctgctgctgtctgggggagcccagtcacagagacccagccactctctcttgggccaggccaggagccaggggaagaggtggccagtgggctgaggactgaccccctttgggaattgctggtgggctcctcagggaactctctcactgagtggggctccaccgaaggtggctcaaagccccgggcctcctccctgcttccggagtccacatcccggcgctctgggcccagcgatgggcccactgccccctatcagcccaggaggagcactgtgacctgggacactgctctgatggtgacagcacttccatccagtgctcccaggccccaccagagcgagctggagctgaagtttgacatggcactgagagcaggtgcagcccccacgcttgggcatcgaacgctgcccctgctgcccagcctgcgggccagcctggcagagattgctgggcgcctgggaccctttggattctttggcactactctgtccccactccggaacttctccggcctgagccccccaggtgaaactacatccacaagctctgcctctggagtttcgggttctctggggttccttggtaccactctgtccctgcccccatactccctggagaggaagctctccagcccaagtcctctggacccagctgcttccctaagttttgcctcgattgcaacaacatcattagaccccacagtccccatctctggcccagatgacctctctcctcccgccagcctcgggaacccttcggggcagccagagtgtgggccagggtcctgcagcgtgggagaattgcctgaacgcgaggggcagcctcccgaggcgccgaggcccctctttttcctgaccctggaggccgactgggcagaggccagggctcgctgggggctggcctgggaggcccacgtgtacgggcgattacaccgtggacttccgcccgccctccccaatcaacctgcgacgcagcatcgaggaggccctctgcagcgaggccctgcttgcgcctggcctcttccagggccctgccttcgaggacgctctgcctgggctcggactctaccgcaccgcctcgctggggaccgggggcagggccagtgagagatcaggggaggcctctggccccgctgcgcccccggagctcccctcccctggggcttggcccgcaggcagcagcgtctcatctggctcgttctgcggactctcgcgggacagctcgtccatgctgctgtgttccagccccgacaggcccccgcgctgccctctggtctgcgtcctcagtcccccgcggccctcaggaagcagccccagcctcccggcctcaggatcctaccaggccctgtccccaccctctcgcgactccccagagcctgcttctgagctgcaggccgaggaggccttgctgcaggagcagttcctggacgcctgccgacagatcgacgagctgagcgtgggcagcgacaccatagacctgtgaagaggtggccaccttgctaccctgcgatatgcccctttctggcgcctgccctgcccgagacctgcacactgtaatccttccccaatcctccctggctcagatacctctccagattccttccccatccaggggtccctgggtgggtgggtcagcagccaggctctatcgattgggaatcagtgccaccttctctggagccctgggtgctgatgccctcagctgcaaatctaggttggcaggggtcccattttccttggcattcaccagcaataaagctccaaggtgctccactcctgaccaccactccccactctggtgctgagtgagaggggctgtcctcagaggaccctgggacctgcctcaggcccccctacccacctctgccatgcctaggaatcccacccctgtgtgaatgggactccctttcctccatgtgacacccacaggggtccatgacccatctaggagactttatagcagttgggtgggaggggaatgctcttaatttatcaataaaatattttcagagga

SEQ ID NO: 169675 - DNA, 883 bp, Homo sapiens
  Payload ID: 13407
  Gene Symbol: PRRT4
  Gene Name: proline-rich transmembrane protein 4
  ENST ID: ENST00000464607
  CDS Start-End: 259-883
aggaggcggcgccgctgggagggagcgcggagtgcggagtgcggagcgcggggcctggccgcccgcctgagagaagcggtgagataccacgaagcgttgcccagctgggcgccagggccgccacgaccgccccttttcggaggctcggcgaggagacctgcctgcgggagagaccccggggagcaggaccttcctcctcaaaagctgctgaacaactgagtccctgcccaccaaggccacccgaagccaggtggggccatggccaggcatggctgtctagggctgggactgttctgctgcgtcctgtttgctgctactgtgggcccccagcccaccccctccatcccaggtgcccctgccaccactttgacccccgtacctcaaagtgaggcctctatgctgtctctcaacctgggacttaacttcaaattccatcttcggggacctgctgctgtctgggggagcccagtcacagagacccagccactctctcttgggccaggccaggagccaggggaagaggtggccagtgggctgaggactgaccccctttgggaattgctggtgggctcctcagggaactctctcactgagtggggctccaccgaaggtggctcaaagccccgggcctcctccctgcttccggagtccacatcccggcgctctgggcccagcgatgggcccactgccccctatcagcccaggaggagcactgtgacctgggacactgctctgatggtgacagcacttccatccagtgctcccaggccccaccagagcgagctggagctgaagtttgacatggcactgagagcaggtgcagcccccacgcttgggcatcgaacgctgcccctgctgcccagcctgcgggccagcctggcag

SEQ ID NO: 169676 - DNA, 2897 bp, Homo sapiens
  Payload ID: 13407
  Gene Symbol: PRRT4
  Gene Name: proline-rich transmembrane protein 4
  Uniprot ID: C9JH25
  ENST ID: ENST00000535159
  CDS Start-End: 198-2897
cggctgccgcggagccccggcgcgggcggcttcgccggggagcgaggctcggagccaggaggcggcgccgctgggagggagcgcggagtgcggagtgcggagcgcggggcctggccgcccgcctggaccttcctcctcaaaagctgctgaacaactgagtccctgcccaccaaggccacccgaagccaggtggggccatggccaggcatggctgtctagggctgggactgttctgctgcgtcctgtttgctgctactgtgggcccccagcccaccccctccatcccaggtgcccctgccaccactttgacccccgtacctcaaagtgaggcctctatgctgtctctcaacctgggacttaacttcaaattccatcttcggggacctgctgctgtctgggggagcccagtcacagagacccagccactctctcttgggccaggccaggagccaggggaagaggtggccagtgggctgaggactgaccccctttgggaattgctggtgggctcctcagggaactctctcactgagtggggctccaccgaaggtggctcaaagccccgggcctcctccctgcttccggagtccacatcccggcgctctgggcccagcgatgggcccactgccccctatcagcccaggaggagcactgtgacctgggacactgctctgatggtgacagcacttccatccagtgctcccaggccccaccagagcgagctggagctgaagtttgacatggcactgagagcaggtgcagcccccacgcttgggcatcgaacgctgcccctgctgcccagcctgcgggccagcctggcagagattgctgggcgcctgggaccctttggattctttggcactactctgtccccactccggaacttctccggcctgagccccccaggtgaaactacatccacaagctctgcctctggagtttcgggttctctggggttccttggtaccactctgtccctgcccccatactccctggagaggaagctctccagcccaagtcctctggacccagctgcttccctaagttttgcctcgattgcaacaacatcattagaccccacagtccccatctctggcccagatgacctctctcctcccgccagcctcgggaacccttcggggcagccagagtgtgggccagggtcctgcagcgtgggagaattgcctgaacgcgaggggcagcctcccgaggcgccgaggcccctctttttcctgaccctggaggccgactgggcagaggccagggctcgctgggggctggcctgggaggcccacgtgtacggggtaggcgcgctcttcggcctggttgccttgctggcgctgctggctctggccctcttgccctggcggtgcccgcccggcgccccctgcctggcgctgctggacctgctgctgctgtcggccgggaccacgcgggccttcccgctcttctacgacgcctatgggcacagggatcgactgcccgcgctcgcctggctgctgctgcaggaccttccgctgccctgcttggctgccggcctggggctggcctgcctgctgctggcccggccgcgcccgccgcggtgccccaccggcctggctgcgctgctgctcctggggctggggctggcggccgccgccgccctcgggagcgccgcgcatcgcccgctgcggcccctgcggctcgcctcgcgcgggctgcacgcctttctcgccgctttcctttccgggctgctgctggcgctctcctgctggggcgggcggcggcggcgggccggggcgcccctgggagggtcgggcttcaagggcgccacacccctgccgcaggggcgcagccccttcgcccctcgggagtcctggcggcgcgcggcgcgcacggccccggtggcgggcaccttcgggctgctgagcggagccctgcagggctatgaggtgctgcacgccctgggctacggcggccaatccggcctggaagggccctggccctggtgggccttccagctaggcctgcgcctgggcgaggtgggcgtcgcgctcccgttggcgctgctgggcctctacccggcgctctgcagtcctcgcgtgccgccgcgctgctgggccaagctcttccgcttgtccccgggccacgcggctccgctgctgccgggaggctgggtcactgggcccccagacaaggagcccctggggagcgccatcgctcgcggggacgcggagctgctgcagctgtgcgcgctggcagggccaggcccagacctcctactccagggcggaggttgccggggcttcgaaggcgcggcggccaacccggccccgtccccggcttcctctccctgcagcgattacaccgtggacttccgcccgccctccccaatcaacctgcgacgcagcatcgaggaggccctctgcagcgaggccctgcttgcgcctggcctcttccagggccctgccttcgaggacgctctgcctgggctcggactctaccgcaccgcctcgctggggaccgggggcagggccagtgagagatcaggggaggcctctggccccgctgcgcccccggagctcccctcccctggggcttggcccgcaggcagcagcgtctcatctggctcgttctgcggactctcgcgggacagctcgtccatgctgctgtgttccagccccgacaggcccccgcgctgccctctggtctgcgtcctcagtcccccgcggccctcaggaagcagccccagcctcccggcctcaggatcctaccaggccctgtccccaccctctcgcgactccccagagcctgcttctgagctgcaggccgaggaggccttgctgcaggagcagttcctggacgcctgccgacagatcgacgagctgagcgtgggcagcgacaccatagacctgtga

SEQ ID NO: 169677 - DNA, 1840 bp, Homo sapiens
  Payload ID: 13408
  Gene Symbol: PSTPIP1
  Gene Name: proline-serine-threonine phosphatase interacting protein 1
  ENST ID: ENST00000379595
  CDS Start-End: 444-1685
ttcctgcgcaggcctcgggctgcctgcctgcctgcctgcctggcccggcccgagctccagcctgcctcttccactggccactgcctcccacccagggctggcatccctgctccctgccctgggtcccagactgtgtcctccatcaccgcagggtcggtgaggggctgggctggacaccagggcccgccctcccatcactgagctccactccttcctcattttgctgctgattctagccccaaacaaaacaggttgagctttttcctcccctcagaagctcctctctggctcgtggctgccttctgagtgttgcagacggcgccggccgggaaggggggcctgggccagccctgccaggactgggacgctgctgctggcgcctggccctccatcaggccagcctgtggcaggagagtgagctttgccgcggcagacgcctgaggatgatgccccagctgcagttcaaagatgccttttggtgcagggacttcacagcccacacgggctacgaggtgctgctgcagcggcttctggatggcaggaagatgtgcaaagacatggaggagctactgaggcagagggcccaggcggaggagcggtacgggaaggagctggtgcagatcgcacggaaggcaggtggccagacggagatcaactccctgagggcctcctttgactccttgaagcagcaaatggagaatgtgggcagctcacacatccagctggccctgaccctgcgtgaggagctgcggagtctcgaggagtttcgtgagaggcagaaggagcagaggaagaagtatgaggccgtcatggaccgggtccagaagagcaagctgtcgctctacaagaaggccatggagtccaagaagacatacgagcagaagtgccgggacgcggacgacgcggagcaggccttcgagcgcattagcgccaacggccaccagaagcaggtggagaagagtcagaacaaagccaggcagtgcaaggactcggccaccgaggcagagcgggtatacaggcagagcattgcgcagctggagaaggtccgggctgagtgggagcaggagcaccggaccacctgtgaggcctttcagctgcaagagtttgaccggctgaccattctccgcaacgccctgtgggtgcacagcaaccagctctccatgcagtgtgtcaaggatgatgagctctacgaggaagtgcggctgacgctggaaggctgcagcatagacgccgacatcgacagtttcatccaggccaagagcacgggcacagagccccccgctccggtgccctaccagaactattacgatcgggaggtcaccccgctgaccagcagccctggcatacagccgtcctgcggcatgataaagaggttctctggactgctgcacggaagtcccaagaccacttcgttggcagcttctgctgagaccctgacccccacccccgagcggaatgagggtgtctacacagccatcgcagtgcaggagatacagggaaacccggcctcaccagcccaggagtaccgggcgctctacgattatacagcgcagaacccagatgagctggacctgtccgcgggagacatcctggaggtgatcctggaaggggaggatggctggtggactgtggagaggaacgggcagcgtggcttcgtccctggttcctacctggagaagctttgaggaagggccaggagccccttcggacctgccctgccagtggagccagcagtgcccccagcactgtccccaccttgctagggcccagaaccaagcgtcccccagccccgagagggagcctgtcgtctcccagggaataaaggagtgcgttctgttct

SEQ ID NO: 169678 - DNA, 1349 bp, Homo sapiens
  Payload ID: 13408
  Gene Symbol: PSTPIP1
  Gene Name: proline-serine-threonine phosphatase interacting protein 1
  Uniprot ID: O43586
  ENST ID: ENST00000559295
  CDS Start-End: 1-1194
atgatgccccagctgcagttcaaagatgccttttggtgcagggacttcacagcccacacgggctacgaggtgctgctgcagcggcttctggatggcaggaagatgtgcaaagacatggaggagctactgaggcagagggcccaggcggaggagcggtacgggaaggagctggtgcagatcgcacggaaggcaggtggccagacggagatcaactccctgagggcctcctttgactccttgaagcagcaaatggagaatgtgggcagctcacacatccagctggccctgaccctgcgtgaggagctgcggagtctcgaggagtttcgtgagaggcagaaggagcagaggaagaagtatgaggccgtcatggaccgggtccagaagagcaagctgtcgctctacaagaaggccatggagtccaagaagacatacgagcagaagtgccgggacgcggacgacgcggagcaggccttcgagcgcattagcgccaacggccaccagaagcaggtggagaagagtcagaacaaagccaggcagtgcaaggactcggccaccgaggcagagcgggtatacaggcagagcattgcgcagctggagaaggtccgggctgagtgggagcaggagcaccggaccacctgtgaggcctttcagctgcaagagtttgaccggctgaccattctccgcaacgccctgtgggtgcacagcaaccagctctccatgcagtgtgtcaaggatgatgagctctacgaggaagtgcggctgacgctggaaggctgcagcatagacgccgacatcgacagtttcatccaggccaagagcacgggcacagagccccccggtgaggtccggcttgcggacagcgcagcctctaggttctctggactgctgcacggaagtcccaagaccacttcgttggcagcttctgctgcgtccacagagaccctgacccccacccccgagcggaatgagggtgtctacacagccatcgcagtgcaggagatacagggaaacccggcctcaccagcccaggagtaccgggcgctctacgattatacagcgcagaacccagatgagctggacctgtccgcgggagacatcctggaggtgatcctggaaggggaggatggctggtggactgtggagaggaacgggcagcgtggcttcgtccctggttcctacctggagaagctttgaggaagggccaggagccccttcggacctgccctgccagtggagccagcagtgcccccagcactgtccccaccttgctagggcccagaaccaagcgtcccccagccccgagagggagcctgtcgtctcccagggaataaaggagtgcgttctgttct

SEQ ID NO: 169679 - DNA, 1896 bp, Homo sapiens
  Payload ID: 13408
  Gene Symbol: PSTPIP1
  Gene Name: proline-serine-threonine phosphatase interacting protein 1
  Uniprot ID: O43586
  ENST ID: ENST00000558012
  CDS Start-End: 490-1740
tgtgggcgagggccctgtgcctgccccgggggaggttgcacaaaccttcctgcgcaggcctcgggctgcctgcctgcctgcctgcctggcccggcccgagctccagcctgcctcttccactggccactgcctcccacccagggctggcatccctgctccctgccctgggtcccagactgtgtcctccatcaccgcagggtcggtgaggggctgggctggacaccagggcccgccctcccatcactgagctccactccttcctcattttgctgctgattctagccccaaacaaaacaggttgagctttttcctcccctcagaagctcctctctggctcgtggctgccttctgagtgttgcagacggcgccggccgggaaggggggcctgggccagccctgccaggactgggacgctgctgctggcgcctggccctccatcaggccagcctgtggcaggagagtgagctttgccgcggcagacgcctgaggatgatgccccagctgcagttcaaagatgccttttggtgcagggacttcacagcccacacgggctacgaggtgctgctgcagcggcttctggatggcaggaagatgtgcaaagacatggaggagctactgaggcagagggcccaggcggaggagcggtacgggaaggagctggtgcagatcgcacggaaggcaggtggccagacggagatcaactccctgagggcctcctttgactccttgaagcagcaaatggagaatgtgggcagctcacacatccagctggccctgaccctgcgtgaggagctgcggagtctcgaggagtttcgtgagaggcagaaggagcagaggaagaagtatgaggccgtcatggaccgggtccagaagagcaagctgtcgctctacaagaaggccatggagtccaagaagacatacgagcagaagtgccgggacgcggacgacgcggagcaggccttcgagcgcattagcgccaacggccaccagaagcaggtggagaagagtcagaacaaagccaggcagtgcaaggactcggccaccgaggcagagcgggtatacaggcagagcattgcgcagctggagaaggtccgggctgagtgggagcaggagcaccggaccacctgtgaggcctttcagctgcaagagtttgaccggctgaccattctccgcaacgccctgtgggtgcacagcaaccagctctccatgcagtgtgtcaaggatgatgagctctacgaggaagtgcggctgacgctggaaggctgcagcatagacgccgacatcgacagtttcatccaggccaagagcacgggcacagagccccccgctccggtgccctaccagaactattacgatcgggaggtcaccccgctgaccagcagccctggcatacagccgtcctgcggcatgataaagaggttctctggactgctgcacggaagtcccaagaccacttcgttggcagcttctgctgcgtccacagagaccctgacccccacccccgagcggaatgagggtgtctacacagccatcgcagtgcaggagatacagggaaacccggcctcaccagcccaggagtaccgggcgctctacgattatacagcgcagaacccagatgagctggacctgtccgcgggagacatcctggaggtgatcctggaaggggaggatggctggtggactgtggagaggaacgggcagcgtggcttcgtccctggttcctacctggagaagctttgaggaagggccaggagccccttcggacctgccctgccagtggagccagcagtgcccccagcactgtccccaccttgctagggcccagaaccaagcgtcccccagccccgagagggagcctgtcgtctcccagggaataaaggagtgcgttctgttctc

SEQ ID NO: 169680 - DNA, 556 bp, Homo sapiens
  Payload ID: 13408
  Gene Symbol: PSTPIP1
  Gene Name: proline-serine-threonine phosphatase interacting protein 1
  ENST ID: ENST00000558870
  CDS Start-End: 1-400
tgacgctggaaggctgcagcatagacgccgacatcgacagtttcatccaggccaagagcacgggcacagagccccccggttctctggactgctgcacggaagtcccaagaccacttcgttggcagcttctgctgcgtccacagagaccctgacccccacccccgagcggaatgagggtgtctacacagccatcgcagtgcaggagatacagggaaacccggcctcaccagcccaggagtaccgggcgctctacgattatacagcgcagaacccagatgagctggacctgtccgcgggagacatcctggaggtgatcctggaaggggaggatggctggtggactgtggagaggaacgggcagcgtggcttcgtccctggttcctacctggagaagctttgaggaagggccaggagccccttcggacctgccctgccagtggagccagcagtgcccccagcactgtccccaccttgctagggcccagaaccaagcgtcccccagccccgagagggagcctgtcgtctcccagggaataaaggagtgcgttctgttctc

SEQ ID NO: 169681 - DNA, 1715 bp, Homo sapiens
  Payload ID: 13408
  Gene Symbol: PSTPIP1
  Gene Name: proline-serine-threonine phosphatase interacting protein 1
  ENST ID: ENST00000559785
  CDS Start-End: 111-1364
accttgcctctgtgtgctcacagccccccagagcacagctgtgtctgctcccagactatgggctccttgagggcaggacctggtttgggtcccagagcagccagggtttgatgaatgacagatgccctagacctggaagctcctctctggctcgtggctgccttctgagtgttgcagacggcgccggccgggaaggggggcctgggccagccctgccaggactgggacgctgctgctggcgcctggccctccatcaggccagcctgtggcaggagagtgagctttgccgcggcagacgcctgaggatgatgccccagctgcagttcaaagatgccttttggtgcagggacttcacagcccacacgggctacgaggtgctgctgcagcggcttctggatggcaggaagatgtgcaaagacatggaggagctactgaggcagagggcccaggcggaggagcggtacgggaaggagctggtgcagatcgcacggaaggcaggtggccagacggagatcaactccctgagggcctcctttgactccttgaagcagcaaatggagaatgtgggcagctcacacatccagctggccctgaccctgcgtgaggagctgcggagtctcgaggagtttcgtgagaggcagaaggagcagaggaagaagtatgaggccgtcatggaccgggtccagaagagcaagctgtcgctctacaagaaggccatggagtccaagaagacatacgagcagaagtgccgggacgcggacgacgcggagcaggccttcgagcgcattagcgccaacggccaccagaagcaggtggagaagagtcagaacaaagccaggcagtgcaaggactcggccaccgaggcagagcgggtatacaggcagagcattgcgcagctggagaaggtccgggctgagtgggagcaggagcaccggaccacctgtgaggcctttcagctgcaagagtttgaccggctgaccattctccgcaacgccctgtgggtgcacagcaaccagctctccatgcagtgtgtcaaggatgatgagctctacgaggaagtgcggctgacgctggaaggctgcagcatagacgccgacatcgacagtttcatccaggccaagagcacgggcacagagccccccggtgaggtccggcttgcggacagcgcagcctctagctccggtgccctaccagaactattacgatcgggaggtcaccccgctgaccagcagccctggcatacagccgtcctgcggcatgataaagaggttctctggactgctgcacggaagtcccaagaccacttcgttggcagcttctgctgcgtccacagagaccctgacccccacccccgagcggaatgagggtgtctacacagccatcgcagtgcaggagatacagggaaacccggcctcaccagcccaggagtaccgggcgctctacgattatacagcgcagaacccagatgagctggacctgtccgcgggagacatcctggaggtgatcctggaaggggaggatggctggtggactgtggagaggaacgggcagcgtggcttcgtccctggttcctacctggagaagctttgaggaagggccaggagccccttcggacctgccctgccagtggagccagcagtgcccccagcactgtccccaccttgctagggcccagaaccaagcgtcccccagccccgagagggagcctgtcgtct

SEQ ID NO: 169682 - DNA, 611 bp, Homo sapiens
  Payload ID: 13408
  Gene Symbol: PSTPIP1
  Gene Name: proline-serine-threonine phosphatase interacting protein 1
  ENST ID: ENST00000559859
  CDS Start-End: 177-611
acttcctcggaacatcccagtccttgtgacagtagctcactcggccacagcccctgccagcagcccaaagctctgagcgggggactgggcgggatcctggagcctgcagcctctggggacttgagcacggcggtcacagcctgcagggcctctcgctgctttctgactcctcccgaatggccagctgcagggacttcacagcccacacgggctacgaggtgctgctgcagcggcttctggatggcaggaagatgtgcaaagacatggaggagctactgaggcagagggcccaggcggaggagcggtacgggaaggagctggtgcagatcgcacggaaggcaggtggccagacggagatcaactccctgagggcctcctttgactccttgaagcagcaaatggagaatgtgggcagctcacacatccagctggccctgaccctgcgtgaggagctgcggagtctcgaggagtttcgtgagaggcagaaggagcagaggaagaagtatgaggccgtcatggaccgggtccagaagagcaagctgtcgctctacaagaaggccatggagtccaagaagacatacgagcagaagtgccgggacgcggacgacgcg

SEQ ID NO: 169683 - DNA, 656 bp, Homo sapiens
  Payload ID: 13408
  Gene Symbol: PSTPIP1
  Gene Name: proline-serine-threonine phosphatase interacting protein 1
  ENST ID: ENST00000558407
  CDS Start-End: 130-656
caccagcatggccctccatccggggctgccctggctggacagccccccagagcacagctgtgtctgctcccagactatgggctccttgagggcaggacctggtttgggtcccagagcagccagggtttgatgaatgacagatgccctagacctggaagctcctctctggctcgtggctgccttctgagtgttgcagacggcgccggccgggaaggggggcctgggccagccctgccaggactgggacgctgctgctggcgcctggccctccatcaggccagcctgtggcaggagagtgagctttgccgcggcagacgcctgaggatgatgccccagctgcagttcaaagatgccttttggtgcagggacttcacagcccacacgggctacgaggtgctgctgcagcggcttctggatggcaggaagatgtgcaaagacatggaggagctactgaggcagagggcccaggcggaggagcggtacgggaaggagctggtgcagatcgcacggaaggcaggtggccagacggagatcaactccctgagggcctcctttgactccttgaagcagcaaatggagaatgtgggcagctcacacatccagctggccctgaccctgcgtgaggagctgcggagtctcgaggagtttcgtgagag

SEQ ID NO: 169684 - DNA, 781 bp, Homo sapiens
  Payload ID: 13408
  Gene Symbol: PSTPIP1
  Gene Name: proline-serine-threonine phosphatase interacting protein 1
  ENST ID: ENST00000559161
  CDS Start-End: 156-781
ctcgtggctgccttctgagtgttgcagacggcgccggccgggaaggggggcctgggccagccctgccaggactgggacgctgctgctggcgcctggccctccatcaggccagcctgtggcaggagagtgagctttgccgcggcagacgcctgaggatgatgccccagctgcagttcaaagatgccttttggtgcagggacttcacagcccacacgggctacgaggtgctgctgcagcggcttctggatggcaggaagatgtgcaaagacatggaggagctactgaggcagagggcccaggcggaggagcggtacgggaaggagctggtgcagatcgcacggaaggcaggtggccagacggagatcaactccctgagggcctcctttgactccttgaagcagcaaatggagaatgtgggcagctcacacatccagctggccctgaccctgcgtgaggagctgcggagtctcgaggagtttcgtgagaggcagaaggagcagaggaagaagtatgaggccgtcatggaccgggtccagaagagcaagctgtcgctctacaagaaggccatggagtccaagaagacatacgagcagaagtgccgggacgcggacgacgcggagcaggccttcgagcgcattagcgccaacggccaccagaagcagagtcagaacaaagccaggcagtgcaaggactcggccaccgaggcagagcgggtatacaggcagagcattgcgcagctggagaaggtccgggctgagtgggagcaggagcaccggaccac

SEQ ID NO: 169685 - DNA, 756 bp, Homo sapiens
  Payload ID: 13408
  Gene Symbol: PSTPIP1
  Gene Name: proline-serine-threonine phosphatase interacting protein 1
  ENST ID: ENST00000559856
  CDS Start-End: 1-756
gcccaggcggaggagcggtacgggaaggagctggtgcagatcgcacggaaggcaggtggccagacggagatcaactccctgagggcctcctttgactccttgaagcagcaaatggagaatgtgggcagctcacacatccagctggccctgaccctgcgtgaggagctgcggagtctcgaggagtttcgtgagaggcagaaggagcagaggaagaagggcatggctgtcccgagacagagtgactgcatggaagtgaagtccccatcatgggagtatgaggccgtcatggaccgggtccagaagagcaagctgtcgctctacaagaaggccatggagtccaagaagacatacgagcagaagtgccgggacgcggacgacgcggagcaggccttcgagcgcattagcgccaacggccaccagaagcaggtggagaagagtcagaacaaagccaggcagtgcaaggactcggccaccgaggcagagcgggtatacaggcagagcattgcgcagctggagaaggtccgggctgagtgggagcaggagcaccggaccacctgtgaggcctttcagctgcaagagtttgaccggctgaccattctccgcaacgccctgtgggtgcacagcaaccagctctccatgcagtgtgtcaaggatgatgagctctacgaggaagtgcggctgacgctggaaggctgcagcatagacgccgacatcgacagtttcatccaggccaagagcacgggcacagagcccccc

SEQ ID NO: 169686 - DNA, 1678 bp, Homo sapiens
  Payload ID: 13408
  Gene Symbol: PSTPIP1
  Gene Name: proline-serine-threonine phosphatase interacting protein 1
  ENST ID: ENST00000559750
  CDS Start-End: 403-813
ggcccggcccgagctccagcctgcctcttccactggccactgcctcccacccagggctggcatccctgctccctgccctgggtcccagactgtgtcctccatcaccgcagggtcggtgaggggctgggctggacaccagggcccgccctcccatcactgagctccactccttcctcattttgctgctgattctagccccaaacaaaacaggttgagctttttcctcccctcagaagctcctctctggctcgtggctgccttctgagtgttgcagacggcgccggccgggaaggggggcctgggccagccctgccaggactgggacgctgctgctggcgcctggccctccatcaggccagcctgtggcaggagagtgagctttgccgcggcagacgcctgaggatgatgccccagctgcagttcaaagatgccttttggtgcagggacttcacagcccacacgggctacgaggtgctgctgcagcggcttctggatggcaggaagatgtgcaaagacatggaggagctactgaggcagagggcccaggcggaggagcggtacgggaaggagctggtgcagatcgcacggaaggcaggtggccagacggagatcaactccctgagggcctcctttgactccttgaagcagcaaatggagaatgtgggcagctcacacatccagctggccctgaccctgcgtgaggagctgcggagtctcgaggagtttcgtgagaggcagaaggagcagaggaagaaggggagcctcccgaggccgcggccctcggctcagaacctcgtgtcccctgcagtatgaggccgtcatggaccgggtccagaagagcaagctgtcgctctacaagaaggccatggagtccaagaagacatacgagcagaagtgccgggacgcggacgacgcggagcaggccttcgagcgcattagcgccaacggccaccagaagcaggtggagaagagtcagaacaaagccaggcagtgcaaggactcggccaccgaggcagagcgggtatacaggcagagcattgcgcagctggagaaggtccgggctgagtgggagcaggagcaccggaccacctgtgaggcctttcagctgcaagagtttgaccggctgaccattctccgcaacgccctgtgggtgcacagcaaccagctctccatgcagtgtgtcaaggatgatgaggtgggggctgagggccttggtgtggggtaaggtagggcagcctctaggcagcaaagcacccaggtccatctgagccggtcaacaagcacctggtcctctgtgatccaagcctggccccaggggtctcaggcctcagcagctcagcctttgcccccagaaccccaagacaggagctcagtaccacacagggccatggcttctctgcctggaagatgatgactctgtggttcccctgacttcctccttatgcctcagagccacagagcacctgccccctctgccggggatgggaggggaggtggacacagctgtcagaggttggcagaagctggaggaccgtggctgctctgctctaggcctggtgcttgcaggagccgaggcgcagtccttcctctgctccccacatctccagggtgtcctggttccccttactgagcccaacctgctgggtgggtcctccccagcagagagggcccccagcca

SEQ ID NO: 169687 - DNA, 1962 bp, Homo sapiens
  Payload ID: 13408
  Gene Symbol: PSTPIP1
  Gene Name: proline-serine-threonine phosphatase interacting protein 1
  ENST ID: ENST00000560223
  CDS Start-End: 453-569
gcacaaaccttcctgcgcaggcctcgggctgcctgcctgcctgcctgcctggcccggcccgagctccagcctgcctcttccactggccactgcctcccacccagggctggcatccctgctccctgccctgggtcccagactgtgtcctccatcaccgcagggtcggtgaggggctgggctggacaccagggcccgccctcccatcactgagctccactccttcctcattttgctgctgattctagccccaaacaaaacaggttgagctttttcctcccctcagaagctcctctctggctcgtggctgccttctgagtgttgcagacggcgccggccgggaaggggggcctgggccagccctgccaggactgggacgctgctgctggcgcctggccctccatcaggccagcctgtggcaggagagtgagctttgccgcggcagacgcctgaggatgatgccccagctgcagttcaaagatgccttttgggcctcccaaagtgctgggattacaagtgtgagccaccgcgcccgactggcaatagaacactttgaggactgcagtcactgaagcagaagggattcccttcttggtcacctcctgaacaattgcccattgacctggaccagctctgagcccactctcctaggcatcaggacatcagactacaggtggtaggaagacccagaacagctgaggatggttcagtgcagggacttcacagcccacacgggctacgaggtgctgctgcagcggcttctggatggcaggaagatgtgcaaagacatggaggagctactgaggcagagggcccaggcggaggagcggtacgggaaggagctggtgcagatcgcacggaaggcaggtggccagacggagatcaactccctgagggcctcctttgactccttgaagcagcaaatggagaatgtgggcagctcacacatccagctggccctgaccctgcgtgaggagctgcggagtctcgaggagtttcgtgagaggcagaaggagcagaggaagaagtatgaggccgtcatggaccgggtccagaagagcaagctgtcgctctacaagaaggccatggagtccaagaagacatacgagcagaagtgccgggacgcggacgacgcggagcaggccttcgagcgcattagcgccaacggccaccagaagcaggtggagaagagtcagaacaaagccaggcagtgcaaggactcggccaccgaggcagagcgggtatacaggcagagcattgcgcagctggagaaggtccgggctgagtgggagcaggagcaccggaccacctgtgaggcctttcagctgcaagagtttgaccggctgaccattctccgcaacgccctgtgggtgcacagcaaccagctctccatgcagtgtgtcaaggatgatgagctctacgaggaagtgcggctgacgctggaaggctgcagcatagacgccgacatcgacagtttcatccaggccaagagcacgggcacagagccccccgctccggtgccctaccagaactattacgatcgggaggtcaccccgctgaccagcagccctggcatacagccgtcctgcggcatgataaagaggttctctggactgctgcacggaagtcccaagaccacttcgttggcagcttctgctgcgtccacagagaccctgacccccacccccgagcggaatgagggtgtctacacagccatcgcagtgcaggagatacagggaaacccggcctcaccagcccaggagtaccgggcgctctacgattatacagcgcagaacccagatgagctggacctgtccgcgggagacatcctggaggtgatcctggaaggggaggatggctggtggactgtggagaggaacgggcagcgtggcttcgtccctggttcctacctggagaagctttgaggaagggccaggagccccttcggacctgccctgccagtgg

SEQ ID NO: 169688 - DNA, 966 bp, Homo sapiens
  Payload ID: 13408
  Gene Symbol: PSTPIP1
  Gene Name: proline-serine-threonine phosphatase interacting protein 1
  ENST ID: ENST00000560796
  CDS Start-End: 419-724
tctctggctcgtggctgccttctgagtgttgcagacggcgccggccgggaaggggggcctgggccagccctgccaggactgggacgctgctgctggcgcctggccctccatcaggccagcctgtggcaggagagtgagctttgccgcggcagacgcctgaggatgatgccccagctgcagttcaaagatgccttttggtacagatgagatttcaccatgttggcctggctggtctcgaactcctgacctcagatgatccacccgcctcagccttccaaagtgctgggattacaggcgtgagccgccgcgcccagcactacatttcacttttgttatattctgcaaatatttgtgcagggacttcacagcccacacgggctacgaggtgctgctgcagcggcttctggatggcaggaagatgtgcaaagacatggaggagctactgaggcagagggcccaggcggaggagcggtacgggaaggagctggtgcagatcgcacggaaggcaggtggccagacggagatcaactccctgagggcctcctttgactccttgaagcagcaaatggagaatgtgggcagctcacacatccagctggccctgaccctgcgtgaggagctgcggagtctcgaggagtttcgtgagaggcagaaggagcagaggaagaagagccaggagaggtgctgcgcctcatcccagggacactccgtcctcttggcctaggggagcctcccgaggccgcggccctcggctcagaacctcgtgtcccctgcagtatgaggccgtcatggaccgggtccagaagagcaagctgtcgctctacaagaaggccatggagtccaagaagacatacgagcagaagtgccgggacgcggacgacgcggagcaggccttcgagcgcattagcgccaacggccaccagaagcaggtggagaagagtcagaacaaagccaggcagtgcaagg

SEQ ID NO: 169689 - DNA, 3000 bp, Homo sapiens
  Payload ID: 13409
  Gene Symbol: PSTPIP2
  Gene Name: proline-serine-threonine phosphatase interacting protein 2
  Uniprot ID: Q9H939
  ENST ID: ENST00000409746
  CDS Start-End: 73-1077
agtggcagtcaggcctccccgctctgtgctacctgcggcccggctctcctccgcgcccccactcgcgctgcgatgacgcgctcactgttcaagggaaacttttggagtgcagacatcctcagcaccatcggctatgacaacattatccaacatctgaacaatggccgcaagaactgcaaagagtttgaagactttctaaaagaaagggcagcaattgaagagaggtatggcaaagatctgctcaacctctctaggaagaagccgtgtggacagtctgaaatcaacaccctgaagcgggcccttgaagtcttcaagcagcaagtagacaatgtggcacaatgtcacattcagcttgcacagagtttaagagaagaggccaggaagatggaagaattcagggaaaagcaaaaactacaacgaaaaaagacagagctcataatggatgctatccataaacaaaagagcttacaattcaagaaaaccatggatgcaaagaagaactatgagcagaaatgccgggacaaagatgaggcagaacaggccgtcagccggagtgccaacctggtgaacccgaagcaacaagaaaagctttttgtgaaactggcaacttcaaagaccgcagtagaggactcagacaaagcatacatgctgcacatcggcaccctggataaggtccgagaagagtggcagagtgagcacatcaaggcctgcgaggcatttgaggctcaagaatgtgaacgaataaacttcttccggaatgcattgtggttacatgtgaatcagctgtcacaacaatgtgtcaccagtgatgaaatgtacgaacaagtccgaaagagtttagaaatgtgcagcattcagagggacattgaatactttgtgaatcaacgcaaaactggacagattccaccagcacccatcatgtatgagaatttctactcctcccagaagaatgcagtcccagcaggaaaggctacagggcctaacttggcaaggagaggacccctcccaattcctaaaagctcaccagatgatcccaattactctttggttgatgactacagtttgctctatcagtaaaatcaatgaaaccagagctttttccggctagtgcttctgtgatatggaaagggcacccagagcagcaggacctatagccacgttatgtcagcaatgaagactttgaagtgaacccttgctataattttttagagatttaaaatttatggtagacatttaggacaacataagcaagtagagttctgcagttttttgaagtttacaaattgccccattctgaagaattattctttcccagttactcaggttatgaatgaattaggttttcaacatgggaagcatgaaatccacttctggatttggagcatccacttgaggagcagaggtggcagcagaggattctgagccaccaactgcagtagtggctcctttggctttgggcagcctggctgtggagtttccacggcgacacacagcctcagtggtgcaagatttaaaattaccttcctttttggctggaagacttagaagccgcctgatcatactttctcattttacagatgaggaaataaagcctacaagtgtgaaattaatttccttacagttttcctagctgatgagggacagaaccagaactagagcctgagcccaacccacatcactattcttctaacccttcctgaagttgtgatgctcatgctgaaatttaagatgccaaatatttttgccagcactttttcagttgggagaatcaccagggtttaaatgtcagatttatttttatgtggatccctgtgtatgctgaactacagagcatgatgtttaatctaatttaaggagccactgattgtaaaacatgccattattttatgttgcactaagaaggtggggtcgaggagttgccaataaacttgggacagactattgatggccaagcccatctgaatttaagatgctaaagtatgaaaaaaatacatcttagaatcaatgaaataccatattttgattccattcctcaagataattttagagttataaaaccagtcctcaattttgggtcttcacagagaatctttcccttgctagaccccagaattttaaatgcatccgtcttacactttcacaaatatttgggttttcctttttcactcacaaacagcagggaggtcatgtactttttgtacaacacctgtgcactatgagaaaatggtaccttttagttattgacaagttaaaatagcactctcagtttttcagtattacagagagcaaatagtttcctctcctgctctgtgcagtagcttttccagaactatggacaaattgatcagaagaagattgattatttcctcatctttttttcttttttttgagacagagtctctctctgtcccccaggctgaagtgcagcggcatgatctcagctcactgcaacctctgcctcccgggttcaagtgattctcctgcctcagcctcctgagtagctgggattacaggcacccaccaccacacctggctaattttttgtatttttagtaaagacagggttttaccatgttggtcaggctggtctcaaactcctgacctcaggtgatccacctgcctcggcctcccaaagtgctgggattacaggcgtgagccactgcgcccggcctatttccccacctttcgtgtaaggtgctactgaacatgacagcttcttgtcatgacaggaaacttgcatcagttggatatccttttgagaaactgaattttgcaaagggccaaatttccccaaactgaacgggctcaggaaatgttcctttacactcagaacattctattttaagtatattatttattgttggcagttcctcagggatttcccttttctctgtattggtcagtgtagttgatgtaaaaccgttttgtggatggaaaatatttttattttattgctcttttagtttggtaggttaaataaaggttcttggtaatttggga

SEQ ID NO: 169690 - DNA, 2900 bp, Homo sapiens
  Payload ID: 13409
  Gene Symbol: PSTPIP2
  Gene Name: proline-serine-threonine phosphatase interacting protein 2
  Uniprot ID: Q9H939
  ENST ID: ENST00000589328
  CDS Start-End: 70-1008
ggcagtcaggcctccccgctctgtgctacctgcggcccggctctcctccgcgcccccactcgcgctgcgatgacgcgctcactgttcaagggaaacttttggagtgcagacatcctcagcaccatcggctatgacaacattatccaacatctgaacaatggccgcaagaactgcaaagagtttgaagactttctaaaagaaagggcagcaattgaagagaggtatggcaaagatctgctcaacctctctaggaagaagccgtgtggacagtctgaaatcaacaccctgaagcgggcccttgaagtcttcaagcagcaagtagacaatgtggcacaatgtcacattcagcttgcacagagtttaagagaagaggccaggaagatggaagaattcagggaaaagcaaaaactacaacgaaaaaagacagagctcataatggatgctatccataaacaaaagagcttacaattcaagaaaaccatggatgcaaagaagaactatgagcagaaatgccgggacaaagatgaggcagaacaggccgtcagccggagtgccaacctggtgaacccgaagcaacaagaaaagctttttgtgaaactggcaacttcaaagaccgcagtagaggactcagacaaagcatacatgctgcacatcggcaccctggataaggtccgagaagagtggcagagtgagcacatcaaggcctgcgaggcatttgaggctcaagaatgtgaacgaataaacttcttccggaatgcattgtggttacatgtgaatcagctgtcacaacaatgtgtcaccagtgatgaacacccatcatgtatgagaatttctactcctcccagaagaatgcagtcccagcaggaaaggctacagggcctaacttggcaaggagaggacccctcccaattcctaaaagctcaccagatgatcccaattactctttggttgatgactacagtttgctctatcagtaaaatcaatgaaaccagagctttttccggctagtgcttctgtgatatggaaagggcacccagagcagcaggacctatagccacgttatgtcagcaatgaagactttgaagtgaacccttgctataattttttagagatttaaaatttatggtagacatttaggacaacataagcaagtagagttctgcagttttttgaagtttacaaattgccccattctgaagaattattctttcccagttactcaggttatgaatgaattaggttttcaacatgggaagcatgaaatccacttctggatttggagcatccacttgaggagcagaggtggcagcagaggattctgagccaccaactgcagtagtggctcctttggctttgggcagcctggctgtggagtttccacggcgacacacagcctcagtggtgcaagatttaaaattaccttcctttttggctggaagacttagaagccgcctgatcatactttctcattttacagatgaggaaataaagcctacaagtgtgaaattaatttccttacagttttcctagctgatgagggacagaaccagaactagagcctgagcccaacccacatcactattcttctaacccttcctgaagttgtgatgctcatgctgaaatttaagatgccaaatatttttgccagcactttttcagttgggagaatcaccagggtttaaatgtcagatttatttttatgtggatccctgtgtatgctgaactacagagcatgatgtttaatctaatttaaggagccactgattgtaaaacatgccattattttatgttgcactaagaaggtggggtcgaggagttgccaataaacttgggacagactattgatggccaagcccatctgaatttaagatgctaaagtatgaaaaaaatacatcttagaatcaatgaaataccatattttgattccattcctcaagataattttagagttataaaaccagtcctcaattttgggtcttcacagagaatctttcccttgctagaccccagaattttaaatgcatccgtcttacactttcacaaatatttgggttttcctttttcactcacaaacagcagggaggtcatgtactttttgtacaacacctgtgcactatgagaaaatggtaccttttagttattgacaagttaaaatagcactctcagtttttcagtattacagagagcaaatagtttcctctcctgctctgtgcagtagcttttccagaactatggacaaattgatcagaagaagattgattatttcctcatctttttttcttttttttgagacagagtctctctctgtcccccaggctgaagtgcagcggcatgatctcagctcactgcaacctctgcctcccgggttcaagtgattctcctgcctcagcctcctgagtagctgggattacaggcacccaccaccacacctggctaattttttgtatttttagtaaagacagggttttaccatgttggtcaggctggtctcaaactcctgacctcaggtgatccacctgcctcggcctcccaaagtgctgggattacaggcgtgagccactgcgcccggcctatttccccacctttcgtgtaaggtgctactgaacatgacagcttcttgtcatgacaggaaacttgcatcagttggatatccttttgagaaactgaattttgcaaagggccaaatttccccaaactgaacgggctcaggaaatgttcctttacactcagaacattctattttaagtatattatttattgttggcagttcctcagggatttcccttttctctgtattggtcagtgtagttgatgtaaaaccgttttgtggatggaaaatatttttattttattgctcttttagtttggtaggttaaataaaggttcttggtaatttggga

SEQ ID NO: 169691 - DNA, 2993 bp, Homo sapiens
  Payload ID: 13410
  Gene Symbol: P3H1
  Gene Name: prolyl 3-hydroxylase 1
  Uniprot ID: Q32P28
  ENST ID: ENST00000236040
  CDS Start-End: 42-2456
ggtggcgggtggctggcggttccgttaggtctgagggagcgatggcggtacgcgcgttgaagctgctgaccacactgctggctgtcgtggccgctgcctcccaagccgaggtcgagtccgaggcaggatggggcatggtgacgcctgatctgctcttcgccgaggggaccgcagcctacgcgcgcggggactggcccggggtggtcctgagcatggaacgggcgctgcgctcccgggcagccctccgcgcccttcgcctgcgctgccgcacccagtgtgccgccgacttcccgtgggagctggaccccgactggtcccccagcccggcccaggcctcgggcgccgccgccctgcgcgacctgagcttcttcgggggccttctgcgtcgcgctgcctgcctgcgccgctgcctcgggccgccggccgcccactcgctcagcgaagagatggagctggagttccgcaagcggagcccctacaactacctgcaggtcgcctacttcaagatcaacaagttggagaaagctgttgctgcagcacacaccttcttcgtgggcaatcctgagcacatggaaatgcagcagaacctagactattaccaaaccatgtctggagtgaaggaggccgacttcaaggatcttgagactcaaccccatatgcaagaatttcgactgggagtgcgactctactcagaggaacagccacaggaagctgtgccccacctagaggcggcgctgcaagaatactttgtggcctatgaggagtgccgtgccctctgcgaagggccctatgactacgatggctacaactaccttgagtacaacgctgacctcttccaggccatcacagatcattacatccaggtcctcaactgtaagcagaactgtgtcacggagcttgcttcccacccaagtcgagagaagccctttgaagacttcctcccatcgcattataattatctgcagtttgcctactataacattgggaattatacacaggctgttgaatgtgccaagacctatcttctcttcttccccaatgacgaggtgatgaaccaaaatttggcctattatgcagctatgcttggagaagaacacaccagatccatcggcccccgtgagagtgccaaggagtaccgacagcgaagcctactggaaaaagaactgcttttcttcgcttatgatgtttttggaattccctttgtggatccggattcatggactccagaagaagtgattcccaagagattgcaagagaaacagaagtcagaacgggaaacagccgtacgcatctcccaggagattgggaaccttatgaaggaaatcgagacccttgtggaagagaagaccaaggagtcactggatgtgagcagactgacccgggaaggtggccccctgctgtatgaaggcatcagtctcaccatgaactccaaactcctgaatggttcccagcgggtggtgatggacggcgtaatctctgaccacgagtgtcaggagctgcagagactgaccaatgtggcagcaacctcaggagatggctaccggggtcagacctccccacatactcccaatgaaaagttctatggtgtcactgtcttcaaagccctcaagctggggcaagaaggcaaagttcctctgcagagtgcccacctgtactacaacgtgacggagaaggtgcggcgcatcatggagtcctacttccgcctggatacgcccctctacttttcctactctcatctggtgtgccgcactgccatcgaagaggtccaggcagagaggaaggatgatagtcatccagtccacgtggacaactgcatcctgaatgccgagaccctcgtgtgtgtcaaagagcccccagcctacaccttccgcgactacagcgccatcctttacctaaatggggacttcgatggcggaaacttttatttcactgaactggatgccaagaccgtgacggcagaggtgcagcctcagtgtggaagagccgtgggattctcttcaggcactgaaaacccacatggagtgaaggctgtcaccagggggcagcgctgtgccatcgccctgtggttcaccctggaccctcgacacagcgagcgggtgagagcagctcgagcgggtgagagcagctggtgctgtggtgacccgttcccagagcgcccttggtttgcctttctcttccccaaatcccattgccagtggctgagacacgaaaggagcacttgggacaccagctccaacgccctgtcattatggtcacattgccttgtcctccctgggcctgctgtgaacgggatccaggtggggaaagaggtcaagacagggagcgatgctgagttcttggttccctccttgggccccacttcagctgtccttttccagagagtaggacctgctgggaaggagatgagcctggggccattaaggaaccttccttgtcccctgggaagtagcagctgagagatagcgagtgtctggagcggaggcctctctgaatgggcaggggtttgtccttgcaggacagggtgcaggcagatgacctggtgaagatgctcttcagcccagaagagatggacctctcccaggagcagcccctggatgcccagcagggcccccccgaacctgcacaagagtctctctcaggcagtgaatcgaagcccaaggatgagctatgacagcgtccaggtcagacggatgggtgactagacccatggagaggaactcttctgcactctgagctggccagcccctcggggctgcagagcagtgagcctacatctgccactcagccgaggggaccctgctcacagccttctacatggtgctactgctcttggagtggacatgaccagacaccgcaccccctggatctggctgagggctcaggacacaggcccagccacccccaggggcctccacaggccgctgcatgacagcgatacagtacttaagtgtctgtgtagacaaccaaagaataaatgattcatggtttttttt

SEQ ID NO: 169692 - DNA, 2585 bp, Homo sapiens
  Payload ID: 13410
  Gene Symbol: P3H1
  Gene Name: prolyl 3-hydroxylase 1
  Uniprot ID: Q32P28
  ENST ID: ENST00000296388
  CDS Start-End: 53-2263
actccggccttggtggcgggtggctggcggttccgttaggtctgagggagcgatggcggtacgcgcgttgaagctgctgaccacactgctggctgtcgtggccgctgcctcccaagccgaggtcgagtccgaggcaggatggggcatggtgacgcctgatctgctcttcgccgaggggaccgcagcctacgcgcgcggggactggcccggggtggtcctgagcatggaacgggcgctgcgctcccgggcagccctccgcgcccttcgcctgcgctgccgcacccagtgtgccgccgacttcccgtgggagctggaccccgactggtcccccagcccggcccaggcctcgggcgccgccgccctgcgcgacctgagcttcttcgggggccttctgcgtcgcgctgcctgcctgcgccgctgcctcgggccgccggccgcccactcgctcagcgaagagatggagctggagttccgcaagcggagcccctacaactacctgcaggtcgcctacttcaagatcaacaagttggagaaagctgttgctgcagcacacaccttcttcgtgggcaatcctgagcacatggaaatgcagcagaacctagactattaccaaaccatgtctggagtgaaggaggccgacttcaaggatcttgagactcaaccccatatgcaagaatttcgactgggagtgcgactctactcagaggaacagccacaggaagctgtgccccacctagaggcggcgctgcaagaatactttgtggcctatgaggagtgccgtgccctctgcgaagggccctatgactacgatggctacaactaccttgagtacaacgctgacctcttccaggccatcacagatcattacatccaggtcctcaactgtaagcagaactgtgtcacggagcttgcttcccacccaagtcgagagaagccctttgaagacttcctcccatcgcattataattatctgcagtttgcctactataacattgggaattatacacaggctgttgaatgtgccaagacctatcttctcttcttccccaatgacgaggtgatgaaccaaaatttggcctattatgcagctatgcttggagaagaacacaccagatccatcggcccccgtgagagtgccaaggagtaccgacagcgaagcctactggaaaaagaactgcttttcttcgcttatgatgtttttggaattccctttgtggatccggattcatggactccagaagaagtgattcccaagagattgcaagagaaacagaagtcagaacgggaaacagccgtacgcatctcccaggagattgggaaccttatgaaggaaatcgagacccttgtggaagagaagaccaaggagtcactggatgtgagcagactgacccgggaaggtggccccctgctgtatgaaggcatcagtctcaccatgaactccaaactcctgaatggttcccagcgggtggtgatggacggcgtaatctctgaccacgagtgtcaggagctgcagagactgaccaatgtggcagcaacctcaggagatggctaccggggtcagacctccccacatactcccaatgaaaagttctatggtgtcactgtcttcaaagccctcaagctggggcaagaaggcaaagttcctctgcagagtgcccacctgtactacaacgtgacggagaaggtgcggcgcatcatggagtcctacttccgcctggatacgcccctctacttttcctactctcatctggtgtgccgcactgccatcgaagaggtccaggcagagaggaaggatgatagtcatccagtccacgtggacaactgcatcctgaatgccgagaccctcgtgtgtgtcaaagagcccccagcctacaccttccgcgactacagcgccatcctttacctaaatggggacttcgatggcggaaacttttatttcactgaactggatgccaagaccgtgacggcagaggtgcagcctcagtgtggaagagccgtgggattctcttcaggcactgaaaacccacatggagtgaaggctgtcaccagggggcagcgctgtgccatcgccctgtggttcaccctggaccctcgacacagcgagcgggacagggtgcaggcagatgacctggtgaagatgctcttcagcccagaagagatggacctctcccaggagcagcccctggatgcccagcagggcccccccgaacctgcacaagagtctctctcaggcagtgaatcgaagcccaaggatgagctatgacagcgtccaggtcagacggatgggtgactagacccatggagaggaactcttctgcactctgagctggccagcccctcggggctgcagagcagtgagcctacatctgccactcagccgaggggaccctgctcacagccttctacatggtgctactgctcttggagtggacatgaccagacaccgcaccccctggatctggctgagggctcaggacacaggcccagccacccccaggggcctccacaggccgctgcatgacagcgatacagtacttaagtgtctgtgtagacaaccaaagaataaatgattcatggtttttttt

SEQ ID NO: 169693 - DNA, 654 bp, Homo sapiens
  Payload ID: 13410
  Gene Symbol: P3H1
  Gene Name: prolyl 3-hydroxylase 1
  ENST ID: ENST00000372526
  CDS Start-End: 32-654
ggctggcggttccgttaggtctgagggagcgatggcggtacgcgcgttgaagctgctgaccacactgctggctgtcgtggccgctgcctcccaagccgaggtcgagtccgaggcaggatggggcatggtgacgcctgatctgctcttcgccgaggggaccgcagcctacgcgcgcggggactggcccggggtggtcctgagcatggaacgggcgctgcgctcccgggcagccctccgcgcccttcgcctgcgctgccgcacccagtgtgccgccgacttcccgtgggagctggaccccgactggtcccccagcccggcccaggcctcgggcgccgccgccctgcgcgacctgagcttcttcgggggccttctgcgtcgcgctgcctgcctgcgccgctgcctcgggccgccggccgcccactcgctcagcgaagagatggagctggagttccgcaagcggagcccctacaactacctgcaggtcgcctacttcaaggatcttgagactcaaccccatatgcaagaatttcgactgggagtgcgactctactcagaggaacagccacaggaagctgtgccccacctagaggcggcgctgcaagaatactttgtggcctatgaggagtgccgtgccctctgcgaagggccctatga

SEQ ID NO: 169694 - DNA, 2705 bp, Homo sapiens
  Payload ID: 13410
  Gene Symbol: P3H1
  Gene Name: prolyl 3-hydroxylase 1
  Uniprot ID: Q32P28
  ENST ID: ENST00000397054
  CDS Start-End: 114-2207
atgcgccgcccggcttggaaggtggggcttcgcccgggggcgggccttcgccgggggtaggactccggccttggtggcgggtggctggcggttccgttaggtctgagggagcgatggcggtacgcgcgttgaagctgctgaccacactgctggctgtcgtggccgctgcctcccaagccgaggtcgagtccgaggcaggatggggcatggtgacgcctgatctgctcttcgccgaggggaccgcagcctacgcgcgcggggactggcccggggtggtcctgagcatggaacgggcgctgcgctcccgggcagccctccgcgcccttcgcctgcgctgccgcacccagtgtgccgccgacttcccgtgggagctggaccccgactggtcccccagcccggcccaggcctcgggcgccgccgccctgcgcgacctgagcttcttcgggggccttctgcgtcgcgctgcctgcctgcgccgctgcctcgggccgccggccgcccactcgctcagcgaagagatggagctggagttccgcaagcggagcccctacaactacctgcaggtcgcctacttcaagatcaacaagttggagaaagctgttgctgcagcacacaccttcttcgtgggcaatcctgagcacatggaaatgcagcagaacctagactattaccaaaccatgtctggagtgaaggaggccgacttcaaggatcttgagactcaaccccatatgcaagaatttcgactgggagtgcgactctactcagaggaacagccacaggaagctgtgccccacctagaggcggcgctgcaagaatactttgtggcctatgaggagtgccgtgccctctgcgaagggccctatgactacgatggctacaactaccttgagtacaacgctgacctcttccaggccatcacagatcattacatccaggtcctcaactgtaagcagaactgtgtcacggagcttgcttcccacccaagtcgagagaagccctttgaagacttcctcccatcgcattataattatctgcagtttgcctactataacattgggaattatacacaggctgttgaatgtgccaagacctatcttctcttcttccccaatgacgaggtgatgaaccaaaatttggcctattatgcagctatgcttggagaagaacacaccagatccatcggcccccgtgagagtgccaaggagtaccgacagcgaagcctactggaaaaagaactgcttttcttcgcttatgatgtttttggaattccctttgtggatccggattcatggactccagaagaagtgattcccaagagattgcaagagaaacagaagtcagaacgggaaacagccgtacgcatctcccaggagattgggaaccttatgaaggaaatcgagacccttgtggaagagaagaccaaggagtcactggatgtgagcagactgacccgggaaggtggccccctgctgtatgaaggcatcagtctcaccatgaactccaaactcctgaatggttcccagcgggtggtgatggacggcgtaatctctgaccacgagtgtcaggagctgcagagactgaccaatgtggcagcaacctcaggagatggctaccggggtcagacctccccacatactcccaatgaaaagttctatggtgtcactgtcttcaaagccctcaagctggggcaagaaggcaaagttcctctgcagagtgcccacctgtactacaacgtgacggagaaggtgcggcgcatcatggagtcctacttccgcctggatacgcccctctacttttcctactctcatctggtgtgccgcactgccatcgaagaggtccaggcagagaggaaggatgatagtcatccagtccacgtggacaactgcatcctgaatgccgagaccctcgtgtgtgtcaaagagcccccagcctacaccttccgcgactacagcgccatcctttacctaaatggggacttcgatggcggaaacttttatttcactgaactggatgccaagaccgtgacggcagaggtgcagcctcagtgtggaagagccgtgggattctcttcaggcactgaaaacccacatggagtgaaggctgtcaccagggggcagcgctgtgccatcgccctgtggttcaccctggaccctcgacacagcgagcgggtgagagcagctcgagcgggacagggtgcaggcagatgacctggtgaagatgctcttcagcccagaagagatggacctctcccaggagcagcccctggatgcccagcagggcccccccgaacctgcacaagagtctctctcaggcagtgaatcgaagcccaaggatgagctatgacagcgtccaggtcagacggatgggtgactagacccatggagaggaactcttctgcactctgagctggccagcccctcggggctgcagagcagtgagcctacatctgccactcagccgaggggaccctgctcacagccttctacatggtgctactgctcttggagtggacatgaccagacaccgcaccccctggatctggctgagggctcaggacacaggcccagccacccccaggggcctccacaggccgctgcatgacagcgatacagtacttaagtgtctgtgtagacaaccaaagaataaatgattcatggttttttttacttggtttgttcagacaatggaaatttgcccattctgtc

SEQ ID NO: 169695 - DNA, 836 bp, Homo sapiens
  Payload ID: 13410
  Gene Symbol: P3H1
  Gene Name: prolyl 3-hydroxylase 1
  ENST ID: ENST00000431412
  CDS Start-End: 1-667
gactccagaagaagtgattcccaagagattgcaagagaaacagaagtcagaacgggaaacagccgtacgcatctcccaggagattgggaaccttatgaaggaaatcgagacccttgtggaagagaagaccaaggagtcactggatgtgagcagactgacccgggaaggtggccccctgctgtatgaaggcatcagtctcaccatgaactccaaactcctgaatggttcccagcgggtggtgatggacggcgtaatctctgaccacgagtgtcaggagctgcagagactgaccaatgtggcagcaacctcaggagatggctaccggggtcagacctccccacatactcccaatgaaaagttctatggtgtcactgtcttcaaagccctcaagttccatgtggctggggaagcctcacaatcatggtggaaggcaaagaggagcaagtcacatcttacatggatggcagcaggcaaagagagaacttctgcagctggggcaagaaggcaaagttcctctgcagagtgcccacctgtactacaacgtgacggagaaggtgcggcgcatcatggagtcctacttccgcctggatacgcccctctacttttcctactctcatctggtgtgccgcactgccatcgaagaggtccaggcagagaggaaggatgatagtcatccagtccacgtggacaactgcatcctgaatgccgagaccctcgtgtgtgtcaaagagcccccagcctacaccttccgcgactacagcgccatcctttacctaaatggggacttcgatggcggaaacttttatttcactgaactggatgccaagaccgtgacg

SEQ ID NO: 169696 - DNA, 3509 bp, Homo sapiens
  Payload ID: 13411
  Gene Symbol: P3H2
  Gene Name: prolyl 3-hydroxylase 2
  Uniprot ID: Q8IVL5
  ENST ID: ENST00000319332
  CDS Start-End: 199-2325
cctttaagagcggctggccaggcacggcctccgcctctcagtacgcggagcgccggcggtcacctggggctcgcggagcggccagatcgcggcggagtcggcgcgcttccccgagggaaggtgggagaggggacccggacgcgaggtgccccgaagccctctcgagcgtaaccgtcccgcgcctctctgaggcggaggatgcgggagcgcatctgggcgccgccgctgctgctgctgctgccgctgctactgccgccgccactgtggggcggccccccggacagcccacgccgggagctggagctggagcccgggcctctgcagcccttcgacctgctctacgccagcggcgcggccgcctactacagcggagactacgagcgagcggtgcgcgacttggaagcggcgctgcgcagccaccggcgcctgcgggaaatccgcacgcgctgtgcccgccactgcgcggcgcgccacccgctcccgcccccgccccccggcgagggccccggcgctgagctgccccttttccgctccttgttggggcgggcgcgctgttatcgcagctgtgagacccagcgcctcgggggccccgcatcccgccaccgcgtcagcgaggatgtgcgcagcgacttccagcgcagagtgccctacaactacctgcagcgggcctacatcaagcttaaccagctcgaaaaagcagtggaagcagctcacacatttttcgtggctaaccctgagcacatggaaatgcagcagaacattgagaattacagggcgacagctggtgttgaagcattgcagttggtagacagagaagccaagccacacatggagagttacaatgcaggagttaaacattatgaggctgatgactttgagatggctatcaggcacttcgaacaagccttaagagaatatttcgttgaagatacagaatgccggaccctatgtgaggggcctcagagatttgaagaatatgagtatttagggtataaggctggtctgtatgaagctattgcagatcactacatgcaggtgcttgtttgtcagcatgaatgtgtgagggaacttgccacccgccctggccgcctctctcccatcgagaattttcttcctctgcactatgattacctacagtttgcctactatcgagttggtgagtatgtgaaagccctggagtgtgccaaagcctatcttctatgccatccagatgatgaggatgtcctagacaatgtggattactatgagagtctgctggatgatagcattgacccggcatccattgaggccagagaggatttaacaatgtttgtgaaacgtcataagctggagtctgagctgataaaatcagctgcagaaggtctggggttttcatacactgaaccgaattattggatcagatatggaggacgacaggatgagaatcgggtcccttcaggagtgaacgtagagggagcagaagttcatggattctcaatgggaaaaaagctatcacccaagatagatcgagacctaagagaaggtggtcctctactctatgagaacatcacattcgtctacaactcggagcagctgaacgggactcagcgggttctcctggataacgtcctgtcggaagaacagtgccgggagctccacagcgtggccagtggaatcatgcttgttggtgatggatacagaggaaaaacttcaccccatacacccaatgaaaagtttgaaggtgcaactgtcctgaaagcactcaaatctggttatgaaggtcgagtcccactgaagagcgctcgtctgttttatgacatcagcgaaaaggctcgaaggattgtagaatcttattttatgctgaactcaactctgtatttttcctatacacacatggtctgccgaacagccctgtctggtcagcaggatagaagaaatgacctcagtcatcccatccatgctgacaactgtttgttggatccagaggccaacgaatgctggaaggagcctcctgcttacacatttcgagactatagtgctctcctatatatgaatgatgactttgaaggaggagaattcatattcacagagatggatgctaagactgtgactgcctctataaaaccaaaatgtgggcgcatgatcagcttctcatctggaggagagaaccctcatggggtgaaggcagtcaccaagggaaagaggtgtgctgtggctctgtggttcaccttggacccactttatagagaattggagcgaatacaggctgatgaagtgattgcaattctggatcaagaacagcaagggaagcatgaactgaatatcaaccctaaagatgagctataaaaatgagaaagaatgttctatcaaatatttatttaaattgttaatcttatgagaacctttttatttttgtacagagccatggtataaattaacaggttaatgtcagtcatcagatcttccttctcttcctaaggatgcttgtgttgcctcaatctatcaatctatctttcttgttttgggttgttttctctctctctctctctctctctcttcttagagacatggtctaaccatgttgtctaggatatagggcagtggctattcacagatgtgatgatagcacactggagcctcaaactcttaggctcaggcgatccttcaagcctcccggggagctgggaccacaggcacgtgccaccacacccagctctctttcttggtttttcatcatttcatgtatctatcaaagcccagttcacctcctcccccaaacacacacacacacacacacacacacacacacacacacaattaagttgctgcaaattcaaaagcttagagagaataagcttcttggtggtgaaactacaactctcacgtgtgctccagttctaaaattaacctgtgcctggtctctgaagccctttcttgctctgtgcctttcagccacatccttaggtgctaacggccatgagctccgactctccaaagtgagctccactttgggtctgaggagcccctggcagagtccacgctgcctcaggtatcatgggcgtaatgatcacccaggctccgggagatctcatggatgattactgtatgagacagaggggacttcagtctttccagggccttggtggaatttttggctctggtgttttcgccagacaataaacttacactggaagctttgattcaccctccacagtactccagaaaggactgtcctataagttgtacactttaaaaggtcatgtagaggttgtagtagaatggcttttcaccctggtgactttggaagaaactcttgaatactgcctgcatccgggcaccatggccaggttgcctaggagtggggtccactgatgaaaagaggtgttttgtacttacataagaaaaataaatttctgattgattttaaccgtcatctgcttatattttgggggcccctcctcattgctgctatccagcacacagatttgtgcttgtgtctgatttgtttaataaagggaggcttattttaa

SEQ ID NO: 169697 - DNA, 544 bp, Homo sapiens
  Payload ID: 13411
  Gene Symbol: P3H2
  Gene Name: prolyl 3-hydroxylase 2
  ENST ID: ENST00000444866
  CDS Start-End: 133-544
tccacagcctggctccctctcaaccttcccagtcctatcttccccaactctgccgccttccagccaaagcttaaccagctcgaaaaagcagtggaagcagctcacacatttttcgtggctaaccctgagcacatggaaatgcagcagaacattgagaattacagggcgacagctggtgttgaagcattgcagttggtagacagagaagccaagccacacatggagagttacaatgcaggagttaaacattatgaggctgatgactttgagatggctatcaggcacttcgaacaagccttaagagaatatttcgttgaagatacagaatgccggaccctatgtgaggggcctcagagatttgaagaatatgagtatttagggtataaggctggtctgtatgaagctattgcagatcactacatgcaggtgcttgtttgtcagcatgaatgtgtgagggaacttgccacccgccctggccgcctctctcccatcgagaattttcttcctctgcactatgattacctacagtttgcctactatcgag

SEQ ID NO: 169698 - DNA, 609 bp, Homo sapiens
  Payload ID: 13411
  Gene Symbol: P3H2
  Gene Name: prolyl 3-hydroxylase 2
  ENST ID: ENST00000426003
  CDS Start-End: 206-609
agctcctcctgcctccaaaggttctctgggccctgtaaaaccacgggctgcacaggaaaggcaggctatatattgttcttcccctggcccagcgccctgatccaatgcccggacacacatccacaccaagttggacgaaaagcttaaccagctcgaaaaagcagtggaagcagctcacacatttttcgtggctaaccctgagcacatggaaatgcagcagaacattgagaattacagggcgacagctggtgttgaagcattgcagttggtagacagagaagccaagccacacatggagagttacaatgcaggagttaaacattatgaggctgatgactttgagatggctatcaggcacttcgaacaagccttaagagaatatttcgttgaagatacagaatgccggaccctatgtgaggggcctcagagatttgaagaatatgagtatttagggtataaggctggtctgtatgaagctattgcagatcactacatgcaggtgcttgtttgtcagcatgaatgtgtgagggaacttgccacccgccctggccgcctctctcccatcgagaattttcttcctctgcactatgattacctacagtttgccta

SEQ ID NO: 169699 - DNA, 2963 bp, Homo sapiens
  Payload ID: 13411
  Gene Symbol: P3H2
  Gene Name: prolyl 3-hydroxylase 2
  Uniprot ID: Q8IVL5
  ENST ID: ENST00000427335
  CDS Start-End: 299-1882
agaagaccacagaaatgcctccaggaggcaggctgggatccagggtccaaccaatattcttgtgagagtgtgaagccaaggaacacgaaagaggggaacaccttggctaagaatgtattcgtgacagaggagaaggggaggaacaggaagcctccagctagtcgtttggaatctggcaaccatttctgtcagctttctcattcctagattgatgcagattgcttaattccttgagcttaaccagctcgaaaaagcagtggaagcagctcacacatttttcgtggctaaccctgagcacatggaaatgcagcagaacattgagaattacagggcgacagctggtgttgaagcattgcagttggtagacagagaagccaagccacacatggagagttacaatgcaggagttaaacattatgaggctgatgactttgagatggctatcaggcacttcgaacaagccttaagagaatatttcgttgaagatacagaatgccggaccctatgtgaggggcctcagagatttgaagaatatgagtatttagggtataaggctggtctgtatgaagctattgcagatcactacatgcaggtgcttgtttgtcagcatgaatgtgtgagggaacttgccacccgccctggccgcctctctcccatcgagaattttcttcctctgcactatgattacctacagtttgcctactatcgagttggtgagtatgtgaaagccctggagtgtgccaaagcctatcttctatgccatccagatgatgaggatgtcctagacaatgtggattactatgagagtctgctggatgatagcattgacccggcatccattgaggccagagaggatttaacaatgtttgtgaaacgtcataagctggagtctgagctgataaaatcagctgcagaaggtctggggttttcatacactgaaccgaattattggatcagatatggaggacgacaggatgagaatcgggtcccttcaggagtgaacgtagagggagcagaagttcatggattctcaatgggaaaaaagctatcacccaagatagatcgagacctaagagaaggtggtcctctactctatgagaacatcacattcgtctacaactcggagcagctgaacgggactcagcgggttctcctggataacgtcctgtcggaagaacagtgccgggagctccacagcgtggccagtggaatcatgcttgttggtgatggatacagaggaaaaacttcaccccatacacccaatgaaaagtttgaaggtgcaactgtcctgaaagcactcaaatctggttatgaaggtcgagtcccactgaagagcgctcgtctgttttatgacatcagcgaaaaggctcgaaggattgtagaatcttattttatgctgaactcaactctgtatttttcctatacacacatggtctgccgaacagccctgtctggtcagcaggatagaagaaatgacctcagtcatcccatccatgctgacaactgtttgttggatccagaggccaacgaatgctggaaggagcctcctgcttacacatttcgagactatagtgctctcctatatatgaatgatgactttgaaggaggagaattcatattcacagagatggatgctaagactgtgactgcctctataaaaccaaaatgtgggcgcatgatcagcttctcatctggaggagagaaccctcatggggtgaaggcagtcaccaagggaaagaggtgtgctgtggctctgtggttcaccttggacccactttatagagaattggagcgaatacaggctgatgaagtgattgcaattctggatcaagaacagcaagggaagcatgaactgaatatcaaccctaaagatgagctataaaaatgagaaagaatgttctatcaaatatttatttaaattgttaatcttatgagaacctttttatttttgtacagagccatggtataaattaacaggttaatgtcagtcatcagatcttccttctcttcctaaggatgcttgtgttgcctcaatctatcaatctatctttcttgttttgggttgttttctctctctctctctctctctctcttcttagagacatggtctaaccatgttgtctaggatatagggcagtggctattcacagatgtgatgatagcacactggagcctcaaactcttaggctcaggcgatccttcaagcctcccggggagctgggaccacaggcacgtgccaccacacccagctctctttcttggtttttcatcatttcatgtatctatcaaagcccagttcacctcctcccccaaacacacacacacacacacacacacacacacacacacacaattaagttgctgcaaattcaaaagcttagagagaataagcttcttggtggtgaaactacaactctcacgtgtgctccagttctaaaattaacctgtgcctggtctctgaagccctttcttgctctgtgcctttcagccacatccttaggtgctaacggccatgagctccgactctccaaagtgagctccactttgggtctgaggagcccctggcagagtccacgctgcctcaggtatcatgggcgtaatgatcacccaggctccgggagatctcatggatgattactgtatgagacagaggggacttcagtctttccagggccttggtggaatttttggctctggtgttttcgccagacaataaacttacactggaagctttgattcaccctccacagtactccagaaaggactgtcctataagttgtacactttaaaaggtcatgtagaggttgtagtagaatggcttttcaccctggtgactttggaagaaactcttgaatactgcctgcatccgggcaccatggccaggttgcctaggagtggggtccactgatgaaaagaggtgttttgtacttacataagaaaaataaatttctgattgattttaa

SEQ ID NO: 169700 - DNA, 2632 bp, Homo sapiens
  Payload ID: 13412
  Gene Symbol: P3H3
  Gene Name: prolyl 3-hydroxylase 3
  Uniprot ID: Q8IVL6
  ENST ID: ENST00000290510
  CDS Start-End: 32-2242
tttcccctcggctgccggcggctccgacatcatgctccggctcctccggccgctgctgctactgctgctgctgcctcccccggggtcccctgagccccccggcctgacccagctgtccccgggggcgcccccgcaggcccccgacttgctctacgctgacgggctgcgcgcctacgcggccggggcttgggcgccggccgtggcgctgctgcgggaggcgctgcggagccaggcggcgctgggccgggtgcggctggattgcggggcgagctgcgcggccgatccgggcgccgcgctccccgccgtgcttctcggggccccggagcccgactccgggccgggacccacgcaggggtcctgggagcgacagcttctccgtgcagcgctccgccgcgcagactgcctgacccagtgcgcagcacggaggctgggccccgggggcgcggcgcggcttcgcgtggggagcgcgctccgggacgccttccgccgtcgggagccctacaactacctgcagagggcctattaccagttgaagaagctggatctggcagctgcggcagcacacaccttctttgtagcaaaccccatgcacctgcagatgcgggaggacatggctaagtacagacgaatgtcgggagttcggccccagagcttccgggacctggagacgcccccacactgggcagcctatgacactggcctggagctactggggcgccaggaggcaggactggcactgcccaggctagaggaggctcttcaggggagcctggcccagatggagagctgccgtgctgactgtgaggggcctgaggagcagcagggggctgaagaagaggaggatggggctgcgagccaggggggcctctatgaggccattgcaggacactggattcaggtcctgcagtgccggcaacgctgtgtgggggaaacagccacacgccctggtcgcagcttccctgtcccagacttccttcccaaccagctgaggcggctacatgaggcccatgctcaggtgggcaatctgtcccaggctatagaaaatgtcctgagtgtcctgctcttctacccggaggatgaggctgccaagagggctctgaaccagtaccaggcccagctgggagagccgagacctggcctcggacccagagaggacatccagcgcttcatcctccgatccctgggggagaagaggcagctctactatgccatggagcacctggggaccagcttcaaggatcctgacccctggacccctgcagctctcatccctgaggcacttagagaaaagctcagagaggatcaagagaagaggccttgggaccatgagcccgtgaagccaaagcccttgacctactggaaggatgtccttctcctggagggtgtgaccttgacccaggattccaggcagctgaatgggtcggagcgggcggtgttggatgggctgctcaccccagccgagtgtggggtgctgctgcagctggctaaggatgcagctggggctggagccaggtctggctatcgtggtcgccgctcccctcacaccccccatgaacgcttcgaggggctcacggtgcttaaggctgcgcagctggcccgggctgggacagtgggcagtcagggtgctaagctgcttctggaggtgagcgagcgggtgcggaccttgacccaggcctacttctccccggaacggcccctgcatctgtccttcacccacctggtgtgccgcagcgccatagaaggagagcaagagcagcgcatggacctgagtcacccagtgcacgcagacaactgcgtcctggaccctgacacgggagagtgctggcgggagcccccagcctacacctatcgggactacagcggactcctctacctcaacgatgacttccagggtggggacctgttcttcacggagcccaacgccctcactgtcacggctcgggtgcgtcctcgctgtgggcgccttgtggccttcagctccggtgtcgagaatccccatggggtgtgggccgtgactcggggacggcgctgtgccctggcactgtggcacacgtgggcacctgagcacagggagcaggagtggatagaagccaaagaactgctgcaggagtcacaggaggaggaggaagaggaagaggaagaaatgcccagcaaagacccttccccagagccccctagccgcaggcaccagagggtccaagacaagactggaagggcacctcgggttcgggaggagctgtgagtggctgagccagctccttgaggatgtggccacttgacttgtggaaggccatcttgatgccaggacacacaggaagcccctgtgtgacatcaggagcagaacagcaagctctctgtccctgcacccccaccatcttggggacctacaagggcctggactcagaggacagtgcacaggctagcctggagctcaccaggcctggggagctgggacggggccccgctgccggacctgcagccctggacagatggggaacactgtgcctccctgaacagaaatggcaggggaggaggctgatgctttaaatgaagaggatggtggggttgggaggtataaccctgctcctctctcccagtctgtgcaataaaggtcgtgaagatctctcagcca

SEQ ID NO: 169701 - DNA, 2791 bp, Homo sapiens
  Payload ID: 13413
  Gene Symbol: P3H4
  Gene Name: prolyl 3-hydroxylase family member 4 (non-enzymatic)
  Uniprot ID: Q92791
  ENST ID: ENST00000355468
  CDS Start-End: 468-1781
tctttcgcgggcacttcgaattctagtcccctccaggtgggtggtgaagccgcggagtgtgagaggcatctccgtgctcatccgtgaccccagctgtactccaagggaaggcatctccagggaagagcagcttggtcccgcaaaagctggactgaaagaaggactttgtgacttgggatgtgacgggcacggagatggagtggggggtggtggcagcgcaaggtgtgcaggtgacagcaggggacacccccaaggcaggagcccgggccgacggagaggacttaacgacactatcggaccctctgggaaaagaggggagacgtcgtgacccaggccccgccccaccttgccgcctcgtgcccggcgctaagacccagcgggcgcgccgcccgcccggggcccggccctgtccccttccgtccgcggggcagccagctcagctccggagagccggcggcgcggcgggcatggctcgggtggcgtgggggctgctgtggttgctgctgggcagcgccggggcgcagtacgagaagtacagcttccggggcttcccgcccgaggacctgatgccgctggccgcggcgtacgggcacgctctggagcagtacgagggagagagctggcgcgagagcgcgcgctacctggaggcggcgctgcggctgcaccggctcctgcgcgacagcgaggccttctgccacgccaactgcagcggccccgcgcccgcggccaagcccgatcccgacggcggccgcgcagacgagtgggcctgcgagctgcggctcttcggccgcgtcctggagcgagccgcctgcctgcggcgctgcaagcggacgctgcccgccttccaggtgccctacccgccgcggcagctgctgcgtgacttccagagccgcctgccctaccagtacctgcactacgcgctgttcaaggctaaccggctggagaaggcggtggcggcggcctacaccttcctccagaggaacccgaagcacgagctgaccgccaagtatctcaactactatcaggggatgctggacgtcgccgacgagtccctcacggacctagaggcccagccctacgaggccgtgttcctccgggctgtgaagctctacaacagcggggatttccgcagcagcacggaggacatggagcgggccttgtcagagtacctggcagtctttgcccggtgcctggccggctgtgaaggggcccatgagcaggtggacttcaaggacttctacccggccatagcagatctctttgcagagtccctgcagtgcaaggtggactgtgaggccaatttgacccccaatgtgggtggctacttcgtggacaagttcgtggccaccatgtaccactacctgcagtttgcctactataagttgaatgatgtgcgccaggctgcccgcagcgccgccagctacatgctcttcgaccccaaggacagcgtcatgcagcagaacctggtgtattaccggttccaccgggctcgctggggcctggaagaggaggacttccagccccgggaggaggccatgctctaccacaaccagaccgccgagctgcgggagctgctggagttcacccacatgtacctgcagtcagatgatgagatggagctggaggagacagaaccgcccctggagcctgaggatgccctatctgacgccgagtttgagggggagggtgactacgaggagggcatgtatgctgactggtggcaggagccggatgccaagggtgacgaggccgaggctgagccagagcctgaactcgcatgagaaggggacaccccacaccgctcaagcttgggaagcctggtgccgatggccccaccctcaccagcctgggcagcagcaagaactatttattaaaaacttaagatgggccaggtgcggtggctcacacctgtaatcccagcattttgggaggccaaggtgggtggatcacttgaggccaggagttcaagaccagcctggccaacatgatgagacctccgtctctactaaaatacataaattagccgggtgtggtggcaggcgcctgaaatcccagctactcaagaggctgaggcaggagaatcgcttgaacctgggaggcaaaggttgcagtgaactgagattgcgccaccgcactccagcctgggcgacagagcgagactccatctttaaaaaaaaacaagacgggccggcacggtggctcacgcctgtaatcccagcactgagaggccgatcacttgaggtcaggagttcaagaccagcctggccaacatggtgaaaccccatctctactaaaaaatacaaaaattagccaggcatggtggcacacacctgtaatcgtagctgaggcaggagaatcgcctgaacccaggaggcggagcttgcagtgagccgagatcgtgccactgcactccagcctgggcgacagagtgagactccatctcaaaaaaaaaaaaaaaaacttaagatggacacagctgactggacccccatcctgcctcacccatgggtgctgcaccccagacccatcctgccacttctatgtctctggaccacaggatggtggtggcattgcaggttggcaagtgggctgatggggtccgccctcctcactgctgagctcctcacctggacagtctcctggacaaggagtttccagctgctggctggagtctcaggccaaattgcagagggtcctccagggtcctgaagagcactggactaagagtctagtggttccagggccctgaccagtaggtgctcaataaatgtttgttgttgaatgagtcata

SEQ ID NO: 169702 - DNA, 2601 bp, Homo sapiens
  Payload ID: 13413
  Gene Symbol: P3H4
  Gene Name: prolyl 3-hydroxylase family member 4 (non-enzymatic)
  Uniprot ID: Q92791
  ENST ID: ENST00000393928
  CDS Start-End: 285-1598
gcttcctgggcttcccatctctggcgggaagcgctccccgacgcattctctacctaggggacacccccaaggcaggagcccgggccgacggagaggacttaacgacactatcggaccctctgggaaaagaggggagacgtcgtgacccaggccccgccccaccttgccgcctcgtgcccggcgctaagacccagcgggcgcgccgcccgcccggggcccggccctgtccccttccgtccgcggggcagccagctcagctccggagagccggcggcgcggcgggcatggctcgggtggcgtgggggctgctgtggttgctgctgggcagcgccggggcgcagtacgagaagtacagcttccggggcttcccgcccgaggacctgatgccgctggccgcggcgtacgggcacgctctggagcagtacgagggagagagctggcgcgagagcgcgcgctacctggaggcggcgctgcggctgcaccggctcctgcgcgacagcgaggccttctgccacgccaactgcagcggccccgcgcccgcggccaagcccgatcccgacggcggccgcgcagacgagtgggcctgcgagctgcggctcttcggccgcgtcctggagcgagccgcctgcctgcggcgctgcaagcggacgctgcccgccttccaggtgccctacccgccgcggcagctgctgcgtgacttccagagccgcctgccctaccagtacctgcactacgcgctgttcaaggctaaccggctggagaaggcggtggcggcggcctacaccttcctccagaggaacccgaagcacgagctgaccgccaagtatctcaactactatcaggggatgctggacgtcgccgacgagtccctcacggacctagaggcccagccctacgaggccgtgttcctccgggctgtgaagctctacaacagcggggatttccgcagcagcacggaggacatggagcgggccttgtcagagtacctggcagtctttgcccggtgcctggccggctgtgaaggggcccatgagcaggtggacttcaaggacttctacccggccatagcagatctctttgcagagtccctgcagtgcaaggtggactgtgaggccaatttgacccccaatgtgggtggctacttcgtggacaagttcgtggccaccatgtaccactacctgcagtttgcctactataagttgaatgatgtgcgccaggctgcccgcagcgccgccagctacatgctcttcgaccccaaggacagcgtcatgcagcagaacctggtgtattaccggttccaccgggctcgctggggcctggaagaggaggacttccagccccgggaggaggccatgctctaccacaaccagaccgccgagctgcgggagctgctggagttcacccacatgtacctgcagtcagatgatgagatggagctggaggagacagaaccgcccctggagcctgaggatgccctatctgacgccgagtttgagggggagggtgactacgaggagggcatgtatgctgactggtggcaggagccggatgccaagggtgacgaggccgaggctgagccagagcctgaactcgcatgagaaggggacaccccacaccgctcaagcttgggaagcctggtgccgatggccccaccctcaccagcctgggcagcagcaagaactatttattaaaaacttaagatgggccaggtgcggtggctcacacctgtaatcccagcattttgggaggccaaggtgggtggatcacttgaggccaggagttcaagaccagcctggccaacatgatgagacctccgtctctactaaaatacataaattagccgggtgtggtggcaggcgcctgaaatcccagctactcaagaggctgaggcaggagaatcgcttgaacctgggaggcaaaggttgcagtgaactgagattgcgccaccgcactccagcctgggcgacagagcgagactccatctttaaaaaaaaacaagacgggccggcacggtggctcacgcctgtaatcccagcactgagaggccgatcacttgaggtcaggagttcaagaccagcctggccaacatggtgaaaccccatctctactaaaaaatacaaaaattagccaggcatggtggcacacacctgtaatcgtagctgaggcaggagaatcgcctgaacccaggaggcggagcttgcagtgagccgagatcgtgccactgcactccagcctgggcgacagagtgagactccatctcaaaaaaaaaaaaaaaaacttaagatggacacagctgactggacccccatcctgcctcacccatgggtgctgcaccccagacccatcctgccacttctatgtctctggaccacaggatggtggtggcattgcaggttggcaagtgggctgatggggtccgccctcctcactgctgagctcctcacctggacagtctcctggacaaggagtttccagctgctggctggagtctcaggccaaattgcagagggtcctccagggtcctgaagagcactggactaagagtctagtggttccagggccctgaccagtaggtgctcaataaatgtttgttgttgaatg

SEQ ID NO: 169703 - DNA, 571 bp, Homo sapiens
  Payload ID: 13413
  Gene Symbol: P3H4
  Gene Name: prolyl 3-hydroxylase family member 4 (non-enzymatic)
  ENST ID: ENST00000465097
  CDS Start-End: 1-221
agctgcgggagctgctggagttcacccacatgtacctgcagtcagatgatgagatggagctggaggagacagaaccgcccctggagcctgaggatgccctatctgacgccgagtttgagggggagggtgactacgaggagggcatgtatgctgactggtggcaggagccggatgccaagggtgacgaggccgaggctgagccagagcctgaactcgcatgagaaggggacaccccacaccgctcaagcttgggaagcctggtgccgatggccccaccctcaccagcctgggcagcagcaagaactatttattaaaaacttaagatgggccaggtgcggtggctcacacctgtaatcccagcattttgggaggccaaggtgggtggatcacttgaggccaggagttcaagaccagcctggccaacatgatgagacctccgtctctactaaaatacataaattagccgggcatggtggcacacacctgtaatcgtagctgaggcaggagaatcgcctgaacccaggaggcggagcttgcagtgagccgagatcgtgccactgcactccagcct

SEQ ID NO: 169704 - DNA, 505 bp, Homo sapiens
  Payload ID: 13413
  Gene Symbol: P3H4
  Gene Name: prolyl 3-hydroxylase family member 4 (non-enzymatic)
  ENST ID: ENST00000590496
  CDS Start-End: 251-505
ttctttcgcgggcacttcgaattctagtcccctccaggcaggagcccgggccgacggagaggacttaacgacactatcggaccctctgggaaaagaggggagacgtcgtgacccaggccccgccccaccttgccgcctcgtgcccggcgctaagacccagcgggcgcgccgcccgcccggggcccggccctgtccccttccgtccgcggggcagccagctcagctccggagagccggcggcgcggcgggcatggctcgggtggcgtgggggctgctgtggttgctgctgggcagcgccggggcgcagtacgagaagtacagcttccggggcttcccgcccgaggacctgatgccgctggccgcggcgtacgggcacgctctggagcagtacgagggagagagctggcgcgagagcgcgcgctacctggaggcggcgctgcggctgcaccggctcctgcgcgacagcgaggccttctgccacgccaactgcagcggccccgcgccc

SEQ ID NO: 169705 - DNA, 662 bp, Homo sapiens
  Payload ID: 13413
  Gene Symbol: P3H4
  Gene Name: prolyl 3-hydroxylase family member 4 (non-enzymatic)
  ENST ID: ENST00000592026
  CDS Start-End: 1-662
gcaagcggacgctgcccgccttccaggtgccctacccgccgcggcagctgctgcgtgacttccagagccgcctgccctaccagtacctgcactacgcgctgttcaaggctaaccggctggagaaggcggtggcggcggcctacaccttcctccagaggaacccgaagcacgagctgaccgccaagtatctcaactactatcaggggatgctggacgtcgccgacgagtccctcacggacctagaggcccagccctacgaggccgtgttcctccgggctgtgaagctctacaacagcggggatttccgcagcagcacggaggacatggagcgggccttgtcagagtacctggcagtctttgcccggtgcctggccggctgtgaaggggcccatgagcaggtggacttcaaggacttctacccggccatagcagtgaatgatgtgcgccaggctgcccgcagcgccgccagctacatgctcttcgaccccaaggacagcgtcatgcagcagaacctggtgtattaccggttccaccgggctcgctggggcctggaagaggaggacttccagccccgggaggaggccatgctctaccacaaccagaccgccgagctgcgggagctgctggagttcacccacatgtacctgcagtcagatgatgag

SEQ ID NO: 169706 - DNA, 2844 bp, Homo sapiens
  Payload ID: 13414
  Gene Symbol: P4HA1
  Gene Name: prolyl 4-hydroxylase, alpha polypeptide I
  Uniprot ID: P13674
  ENST ID: ENST00000263556
  CDS Start-End: 242-1846
ggggcgctggtgtgatcgagctcacgtagcgagggctgcagtcgcctcctccctggcgctgccatcgcggcctagaggttataaaagggctaacgggctccctctgctgcccagtcgcgccgccagcgggctgagggtaggaagtagccgctccgagtggaggcgactgggggctgaagagcgcgccgccctctcgtcccactttccaggtgtgtgatcctgtaaaattaaatcttccaagatgatctggtatatattaattataggaattctgcttccccagtctttggctcatccaggcttttttacttcaattggtcagatgactgatttgatccatactgagaaagatctggtgacttctctgaaagattatattaaggcagaagaggacaagttagaacaaataaaaaaatgggcagagaagttagatcggctaactagtacagcgacaaaagatccagaaggatttgttgggcatccagtaaatgcattcaaattaatgaaacgtctgaatactgagtggagtgagttggagaatctggtccttaaggatatgtcagatggctttatctctaacctaaccattcagagacagtactttcctaatgatgaagatcaggttggggcagccaaagctctgttacgtctccaggatacctacaatttggatacagataccatctcaaagggtaatcttccaggagtgaaacacaaatcttttctaacggctgaggactgctttgagttgggcaaagtggcctatacagaagcagattattaccatacggaactgtggatggaacaagccctaaggcaactggatgaaggcgagatttctaccatagataaagtctctgttctagattatttgagctatgcggtatatcagcagggagacctggataaggcacttttgctcacaaagaagcttcttgaactagatcctgaacatcagagagctaatggtaacttaaaatattttgagtatataatggctaaagaaaaagatgtcaataagtctgcttcagatgaccaatctgatcagaaaactacaccaaagaaaaaaggggttgctgtggattacctgccagagagacagaagtacgaaatgctgtgccgtggggagggtatcaaaatgacccctcggagacagaaaaaactcttttgccgctaccatgatggaaaccgtaatcctaaatttattctggctccagctaaacaggaggatgaatgggacaagcctcgtattattcgcttccatgatattatttctgatgcagaaattgaaatcgtcaaagacctagcaaaaccaaggctgagccgagctacagtacatgaccctgagactggaaaattgaccacagcacagtacagagtatctaagagtgcctggctctctggctatgaaaatcctgtggtgtctcgaattaatatgagaatacaagatctaacaggactagatgtttccacagcagaggaattacaggtagcaaattatggagttggaggacagtatgaaccccattttgactttgcacggaaagatgagccagatgctttcaaagagctggggacaggaaatagaattgctacatggctgttttatatgagtgatgtgtctgcaggaggagccactgtttttcctgaagttggagctagtgtttggcccaaaaaaggaactgctgttttctggtataatctgtttgccagtggagaaggagattatagtacacggcatgcagcctgtccagtgctagttggcaacaaatgggtatccaataaatggctccatgaacgtggacaagaatttcgaagaccttgtacgttgtcagaattggaatgacaaacaggcttccctttttctcctattgttgtactcttatgtgtctgatatacacatttcctagtcttaactttcaggagtttacaattgactaacactccatgattgattcagtcatgaacctcatcccatgtttcatctgtggacaattgcttactttgtgggttcttttaaaagtaacacgaaatcatcatattgcataaaaccttaaagttctgttggtatcacagaagacaaggcagagtttaaagtgaggaattttatatttaaagaactttttggttggataaaaacataatttgagcatccagttttagtatttcactacatctcagttggtgggtgttaagctagaatgggctgtgtgataggaaacaaatgccttacagatgtgcctaggtgttctgtttacctagtgtcttactctgttttctggatctgaagactagtaataaactaggacactaactgggttccatgtgattgccctttcatatgatcttctaagttgatttttttcctcccaagtcttttttaaagaaagtatactgtattttaccaaccccctctcttttcttttagctcctctgtggtgaattaaacgtacttgagttaaaatatttcgattttttttttttttttaatggaaagtcctgcataacaacactgggccttcttaactaaaatgctcaccacttagcctgtttttttatcccttttttaaaatgacagatgattttgttcaggaattttgctgtttttcttagtgctaataccttgcctcttattcctgctacagcagggtggtaatattggcattctgattaaatactgtgccttaggagactggaagtttaaaaatgtacaagtcctttcagtgatgagggaattgattttttttaaaagtctttttcttagaaagccaaaatgtttgtttttttaagattctgaaatgtgttgtgacaacaatgacctatttatgatcttaaatctttttt

SEQ ID NO: 169707 - DNA, 2727 bp, Homo sapiens
  Payload ID: 13414
  Gene Symbol: P4HA1
  Gene Name: prolyl 4-hydroxylase, alpha polypeptide I
  Uniprot ID: P13674
  ENST ID: ENST00000307116
  CDS Start-End: 118-1722
agcgggctgagggtaggaagtagccgctccgagtggaggcgactgggggctgaagagcgcgccgccctctcgtcccactttccaggtgtgtgatcctgtaaaattaaatcttccaagatgatctggtatatattaattataggaattctgcttccccagtctttggctcatccaggcttttttacttcaattggtcagatgactgatttgatccatactgagaaagatctggtgacttctctgaaagattatattaaggcagaagaggacaagttagaacaaataaaaaaatgggcagagaagttagatcggctaactagtacagcgacaaaagatccagaaggatttgttgggcatccagtaaatgcattcaaattaatgaaacgtctgaatactgagtggagtgagttggagaatctggtccttaaggatatgtcagatggctttatctctaacctaaccattcagagacagtactttcctaatgatgaagatcaggttggggcagccaaagctctgttacgtctccaggatacctacaatttggatacagataccatctcaaagggtaatcttccaggagtgaaacacaaatcttttctaacggctgaggactgctttgagttgggcaaagtggcctatacagaagcagattattaccatacggaactgtggatggaacaagccctaaggcaactggatgaaggcgagatttctaccatagataaagtctctgttctagattatttgagctatgcggtatatcagcagggagacctggataaggcacttttgctcacaaagaagcttcttgaactagatcctgaacatcagagagctaatggtaacttaaaatattttgagtatataatggctaaagaaaaagatgtcaataagtctgcttcagatgaccaatctgatcagaaaactacaccaaagaaaaaaggggttgctgtggattacctgccagagagacagaagtacgaaatgctgtgccgtggggagggtatcaaaatgacccctcggagacagaaaaaactcttttgccgctaccatgatggaaaccgtaatcctaaatttattctggctccagctaaacaggaggatgaatgggacaagcctcgtattattcgcttccatgatattatttctgatgcagaaattgaaatcgtcaaagacctagcaaaaccaaggctgaggcgagccaccatttcaaacccaataacaggagacttggagacggtacattacagaattagcaaaagtgcctggctctctggctatgaaaatcctgtggtgtctcgaattaatatgagaatacaagatctaacaggactagatgtttccacagcagaggaattacaggtagcaaattatggagttggaggacagtatgaaccccattttgactttgcacggaaagatgagccagatgctttcaaagagctggggacaggaaatagaattgctacatggctgttttatatgagtgatgtgtctgcaggaggagccactgtttttcctgaagttggagctagtgtttggcccaaaaaaggaactgctgttttctggtataatctgtttgccagtggagaaggagattatagtacacggcatgcagcctgtccagtgctagttggcaacaaatgggtatccaataaatggctccatgaacgtggacaagaatttcgaagaccttgtacgttgtcagaattggaatgacaaacaggcttccctttttctcctattgttgtactcttatgtgtctgatatacacatttcctagtcttaactttcaggagtttacaattgactaacactccatgattgattcagtcatgaacctcatcccatgtttcatctgtggacaattgcttactttgtgggttcttttaaaagtaacacgaaatcatcatattgcataaaaccttaaagttctgttggtatcacagaagacaaggcagagtttaaagtgaggaattttatatttaaagaactttttggttggataaaaacataatttgagcatccagttttagtatttcactacatctcagttggtgggtgttaagctagaatgggctgtgtgataggaaacaaatgccttacagatgtgcctaggtgttctgtttacctagtgtcttactctgttttctggatctgaagactagtaataaactaggacactaactgggttccatgtgattgccctttcatatgatcttctaagttgatttttttcctcccaagtcttttttaaagaaagtatactgtattttaccaaccccctctcttttcttttagctcctctgtggtgaattaaacgtacttgagttaaaatatttcgattttttttttttttttaatggaaagtcctgcataacaacactgggccttcttaactaaaatgctcaccacttagcctgtttttttatcccttttttaaaatgacagatgattttgttcaggaattttgctgtttttcttagtgctaataccttgcctcttattcctgctacagcagggtggtaatattggcattctgattaaatactgtgccttaggagactggaagtttaaaaatgtacaagtcctttcagtgatgagggaattgattttttttaaaagtctttttcttagaaagccaaaatgtttgtttttttaagattctgaaatgtgttgtgacaacaatgacctatttatgatcttaaatcttttttaaaaaaa

SEQ ID NO: 169708 - DNA, 2727 bp, Homo sapiens
  Payload ID: 13414
  Gene Symbol: P4HA1
  Gene Name: prolyl 4-hydroxylase, alpha polypeptide I
  Uniprot ID: P13674
  ENST ID: ENST00000373008
  CDS Start-End: 118-1722
agcgggctgagggtaggaagtagccgctccgagtggaggcgactgggggctgaagagcgcgccgccctctcgtcccactttccaggtgtgtgatcctgtaaaattaaatcttccaagatgatctggtatatattaattataggaattctgcttccccagtctttggctcatccaggcttttttacttcaattggtcagatgactgatttgatccatactgagaaagatctggtgacttctctgaaagattatattaaggcagaagaggacaagttagaacaaataaaaaaatgggcagagaagttagatcggctaactagtacagcgacaaaagatccagaaggatttgttgggcatccagtaaatgcattcaaattaatgaaacgtctgaatactgagtggagtgagttggagaatctggtccttaaggatatgtcagatggctttatctctaacctaaccattcagagacagtactttcctaatgatgaagatcaggttggggcagccaaagctctgttacgtctccaggatacctacaatttggatacagataccatctcaaagggtaatcttccaggagtgaaacacaaatcttttctaacggctgaggactgctttgagttgggcaaagtggcctatacagaagcagattattaccatacggaactgtggatggaacaagccctaaggcaactggatgaaggcgagatttctaccatagataaagtctctgttctagattatttgagctatgcggtatatcagcagggagacctggataaggcacttttgctcacaaagaagcttcttgaactagatcctgaacatcagagagctaatggtaacttaaaatattttgagtatataatggctaaagaaaaagatgtcaataagtctgcttcagatgaccaatctgatcagaaaactacaccaaagaaaaaaggggttgctgtggattacctgccagagagacagaagtacgaaatgctgtgccgtggggagggtatcaaaatgacccctcggagacagaaaaaactcttttgccgctaccatgatggaaaccgtaatcctaaatttattctggctccagctaaacaggaggatgaatgggacaagcctcgtattattcgcttccatgatattatttctgatgcagaaattgaaatcgtcaaagacctagcaaaaccaaggctgagccgagctacagtacatgaccctgagactggaaaattgaccacagcacagtacagagtatctaagagtgcctggctctctggctatgaaaatcctgtggtgtctcgaattaatatgagaatacaagatctaacaggactagatgtttccacagcagaggaattacaggtagcaaattatggagttggaggacagtatgaaccccattttgactttgcacggaaagatgagccagatgctttcaaagagctggggacaggaaatagaattgctacatggctgttttatatgagtgatgtgtctgcaggaggagccactgtttttcctgaagttggagctagtgtttggcccaaaaaaggaactgctgttttctggtataatctgtttgccagtggagaaggagattatagtacacggcatgcagcctgtccagtgctagttggcaacaaatgggtatccaataaatggctccatgaacgtggacaagaatttcgaagaccttgtacgttgtcagaattggaatgacaaacaggcttccctttttctcctattgttgtactcttatgtgtctgatatacacatttcctagtcttaactttcaggagtttacaattgactaacactccatgattgattcagtcatgaacctcatcccatgtttcatctgtggacaattgcttactttgtgggttcttttaaaagtaacacgaaatcatcatattgcataaaaccttaaagttctgttggtatcacagaagacaaggcagagtttaaagtgaggaattttatatttaaagaactttttggttggataaaaacataatttgagcatccagttttagtatttcactacatctcagttggtgggtgttaagctagaatgggctgtgtgataggaaacaaatgccttacagatgtgcctaggtgttctgtttacctagtgtcttactctgttttctggatctgaagactagtaataaactaggacactaactgggttccatgtgattgccctttcatatgatcttctaagttgatttttttcctcccaagtcttttttaaagaaagtatactgtattttaccaaccccctctcttttcttttagctcctctgtggtgaattaaacgtacttgagttaaaatatttcgattttttttttttttttaatggaaagtcctgcataacaacactgggccttcttaactaaaatgctcaccacttagcctgtttttttatcccttttttaaaatgacagatgattttgttcaggaattttgctgtttttcttagtgctaataccttgcctcttattcctgctacagcagggtggtaatattggcattctgattaaatactgtgccttaggagactggaagtttaaaaatgtacaagtcctttcagtgatgagggaattgattttttttaaaagtctttttcttagaaagccaaaatgtttgtttttttaagattctgaaatgtgttgtgacaacaatgacctatttatgatcttaaatcttttttaaaaaaa

SEQ ID NO: 169709 - DNA, 2844 bp, Homo sapiens
  Payload ID: 13414
  Gene Symbol: P4HA1
  Gene Name: prolyl 4-hydroxylase, alpha polypeptide I
  Uniprot ID: P13674
  ENST ID: ENST00000394890
  CDS Start-End: 242-1846
ggggcgctggtgtgatcgagctcacgtagcgagggctgcagtcgcctcctccctggcgctgccatcgcggcctagaggttataaaagggctaacgggctccctctgctgcccagtcgcgccgccagcgggctgagggtaggaagtagccgctccgagtggaggcgactgggggctgaagagcgcgccgccctctcgtcccactttccaggtgtgtgatcctgtaaaattaaatcttccaagatgatctggtatatattaattataggaattctgcttccccagtctttggctcatccaggcttttttacttcaattggtcagatgactgatttgatccatactgagaaagatctggtgacttctctgaaagattatattaaggcagaagaggacaagttagaacaaataaaaaaatgggcagagaagttagatcggctaactagtacagcgacaaaagatccagaaggatttgttgggcatccagtaaatgcattcaaattaatgaaacgtctgaatactgagtggagtgagttggagaatctggtccttaaggatatgtcagatggctttatctctaacctaaccattcagagacagtactttcctaatgatgaagatcaggttggggcagccaaagctctgttacgtctccaggatacctacaatttggatacagataccatctcaaagggtaatcttccaggagtgaaacacaaatcttttctaacggctgaggactgctttgagttgggcaaagtggcctatacagaagcagattattaccatacggaactgtggatggaacaagccctaaggcaactggatgaaggcgagatttctaccatagataaagtctctgttctagattatttgagctatgcggtatatcagcagggagacctggataaggcacttttgctcacaaagaagcttcttgaactagatcctgaacatcagagagctaatggtaacttaaaatattttgagtatataatggctaaagaaaaagatgtcaataagtctgcttcagatgaccaatctgatcagaaaactacaccaaagaaaaaaggggttgctgtggattacctgccagagagacagaagtacgaaatgctgtgccgtggggagggtatcaaaatgacccctcggagacagaaaaaactcttttgccgctaccatgatggaaaccgtaatcctaaatttattctggctccagctaaacaggaggatgaatgggacaagcctcgtattattcgcttccatgatattatttctgatgcagaaattgaaatcgtcaaagacctagcaaaaccaaggctgaggcgagccaccatttcaaacccaataacaggagacttggagacggtacattacagaattagcaaaagtgcctggctctctggctatgaaaatcctgtggtgtctcgaattaatatgagaatacaagatctaacaggactagatgtttccacagcagaggaattacaggtagcaaattatggagttggaggacagtatgaaccccattttgactttgcacggaaagatgagccagatgctttcaaagagctggggacaggaaatagaattgctacatggctgttttatatgagtgatgtgtctgcaggaggagccactgtttttcctgaagttggagctagtgtttggcccaaaaaaggaactgctgttttctggtataatctgtttgccagtggagaaggagattatagtacacggcatgcagcctgtccagtgctagttggcaacaaatgggtatccaataaatggctccatgaacgtggacaagaatttcgaagaccttgtacgttgtcagaattggaatgacaaacaggcttccctttttctcctattgttgtactcttatgtgtctgatatacacatttcctagtcttaactttcaggagtttacaattgactaacactccatgattgattcagtcatgaacctcatcccatgtttcatctgtggacaattgcttactttgtgggttcttttaaaagtaacacgaaatcatcatattgcataaaaccttaaagttctgttggtatcacagaagacaaggcagagtttaaagtgaggaattttatatttaaagaactttttggttggataaaaacataatttgagcatccagttttagtatttcactacatctcagttggtgggtgttaagctagaatgggctgtgtgataggaaacaaatgccttacagatgtgcctaggtgttctgtttacctagtgtcttactctgttttctggatctgaagactagtaataaactaggacactaactgggttccatgtgattgccctttcatatgatcttctaagttgatttttttcctcccaagtcttttttaaagaaagtatactgtattttaccaaccccctctcttttcttttagctcctctgtggtgaattaaacgtacttgagttaaaatatttcgattttttttttttttttaatggaaagtcctgcataacaacactgggccttcttaactaaaatgctcaccacttagcctgtttttttatcccttttttaaaatgacagatgattttgttcaggaattttgctgtttttcttagtgctaataccttgcctcttattcctgctacagcagggtggtaatattggcattctgattaaatactgtgccttaggagactggaagtttaaaaatgtacaagtcctttcagtgatgagggaattgattttttttaaaagtctttttcttagaaagccaaaatgtttgtttttttaagattctgaaatgtgttgtgacaacaatgacctatttatgatcttaaatctttttt

SEQ ID NO: 169710 - DNA, 2790 bp, Homo sapiens
  Payload ID: 13414
  Gene Symbol: P4HA1
  Gene Name: prolyl 4-hydroxylase, alpha polypeptide I
  Uniprot ID: P13674
  ENST ID: ENST00000440381
  CDS Start-End: 242-1792
ggggcgctggtgtgatcgagctcacgtagcgagggctgcagtcgcctcctccctggcgctgccatcgcggcctagaggttataaaagggctaacgggctccctctgctgcccagtcgcgccgccagcgggctgagggtaggaagtagccgctccgagtggaggcgactgggggctgaagagcgcgccgccctctcgtcccactttccaggtgtgtgatcctgtaaaattaaatcttccaagatgatctggtatatattaattataggaattctgcttccccagtctttggctcatccaggcttttttacttcaattggtcagatgactgatttgatccatactgagaaagatctggtgacttctctgaaagattatattaaggcagaagaggacaagttagaacaaataaaaaaatgggcagagaagttagatcggctaactagtacagcgacaaaagatccagaaggatttgttgggcatccagtaaatgcattcaaattaatgaaacgtctgaatactgagtggagtgagttggagaatctggtccttaaggatatgtcagatggctttatctctaacctaaccattcagagacagtactttcctaatgatgaagatcaggttggggcagccaaagctctgttacgtctccaggatacctacaatttggatacagataccatctcaaagggtaatcttccaggagtgaaacacaaatcttttctaacggctgaggactgctttgagttgggcaaagtggcctatacagaagcagattattaccatacggaactgtggatggaacaagccctaaggcaactggatgaaggcgagatttctaccatagataaagtctctgttctagattatttgagctatgcggtatatcagcagggagacctggataaggcacttttgctcacaaagaagcttcttgaactagatcctgaacatcagagagctaatggtaacttaaaatattttgagtatataatggctaaagaaaaagatgtcaataagtctgcttcagatgaccaatctgatcagaaaactacaccaaagaaaaaaggggttgctgtggattacctgccagagagacagaagtacgaaatgctgtgccgtggggagggtatcaaaatgacccctcggagacagaaaaaactcttttgccgctaccatgatggaaaccgtaatcctaaatttattctggctccagctaaacaggaggatgaatgggacaagcctcgtattattcgcttccatgatattatttctgatgcagaaattgaaatcgtcaaagacctagcaaaaccaaggctgagccgagctacagtacatgaccctgagactggaaaattgaccacagcacagtacagagtatctaagagtgcctggctctctggctatgaaaatcctgtggtgtctcgaattaatatgagaatacaagatctaacaggactagatgtttccacagcagaggaattacagaaagatgagccagatgctttcaaagagctggggacaggaaatagaattgctacatggctgttttatatgagtgatgtgtctgcaggaggagccactgtttttcctgaagttggagctagtgtttggcccaaaaaaggaactgctgttttctggtataatctgtttgccagtggagaaggagattatagtacacggcatgcagcctgtccagtgctagttggcaacaaatgggtatccaataaatggctccatgaacgtggacaagaatttcgaagaccttgtacgttgtcagaattggaatgacaaacaggcttccctttttctcctattgttgtactcttatgtgtctgatatacacatttcctagtcttaactttcaggagtttacaattgactaacactccatgattgattcagtcatgaacctcatcccatgtttcatctgtggacaattgcttactttgtgggttcttttaaaagtaacacgaaatcatcatattgcataaaaccttaaagttctgttggtatcacagaagacaaggcagagtttaaagtgaggaattttatatttaaagaactttttggttggataaaaacataatttgagcatccagttttagtatttcactacatctcagttggtgggtgttaagctagaatgggctgtgtgataggaaacaaatgccttacagatgtgcctaggtgttctgtttacctagtgtcttactctgttttctggatctgaagactagtaataaactaggacactaactgggttccatgtgattgccctttcatatgatcttctaagttgatttttttcctcccaagtcttttttaaagaaagtatactgtattttaccaaccccctctcttttcttttagctcctctgtggtgaattaaacgtacttgagttaaaatatttcgattttttttttttttttaatggaaagtcctgcataacaacactgggccttcttaactaaaatgctcaccacttagcctgtttttttatcccttttttaaaatgacagatgattttgttcaggaattttgctgtttttcttagtgctaataccttgcctcttattcctgctacagcagggtggtaatattggcattctgattaaatactgtgccttaggagactggaagtttaaaaatgtacaagtcctttcagtgatgagggaattgattttttttaaaagtctttttcttagaaagccaaaatgtttgtttttttaagattctgaaatgtgttgtgacaacaatgacctatttatgatcttaaatctttttt

SEQ ID NO: 169711 - DNA, 2230 bp, Homo sapiens
  Payload ID: 13415
  Gene Symbol: P4HA2
  Gene Name: prolyl 4-hydroxylase, alpha polypeptide II
  Uniprot ID: O15460
  ENST ID: ENST00000166534
  CDS Start-End: 223-1830
ggaggcgccgagctgaccgggcgacgccgcgggaggttctggaaacgccgggagctgcgagtgtccagctgcggagacccgtgataattcgttaactaattcaacaaacgggacccttctgtgtgccagaaaccgcaagcagttgctaacccagtgggacaggcggattggaagagcgggaaggtcctggcccagagcagtgtgacacttccctctgtgaccatgaaactctgggtgtctgcattgctgatggcctggtttggtgtcctgagctgtgtgcaggccgaattcttcacctctattgggcacatgactgacctgatttatgcagagaaagagctggtgcagtctctgaaagagtacatccttgtggaggaagccaagctttccaagattaagagctgggccaacaaaatggaagccttgactagcaagtcagctgctgatgctgagggctacctggctcaccctgtgaatgcctacaaactggtgaagcggctaaacacagactggcctgcgctggaggaccttgtcctgcaggactcagctgcaggttttatcgccaacctctctgtgcagcggcagttcttccccactgatgaggacgagataggagctgccaaagccctgatgagacttcaggacacatacaggctggacccaggcacaatttccagaggggaacttccaggaaccaagtaccaggcaatgctgagtgtggatgactgctttgggatgggccgctcggcctacaatgaaggggactattatcatacggtgttgtggatggagcaggtgctaaagcagcttgatgccggggaggaggccaccacaaccaagtcacaggtgctggactacctcagctatgctgtcttccagttgggtgatctgcaccgtgccctggagctcacccgccgcctgctctcccttgacccaagccacgaacgagctggagggaatctgcggtactttgagcagttattggaggaagagagagaaaaaacgttaacaaatcagacagaagctgagctagcaaccccagaaggcatctatgagaggcctgtggactacctgcctgagagggatgtttacgagagcctctgtcgtggggagggtgtcaaactgacaccccgtagacagaagaggcttttctgtaggtaccaccatggcaacagggccccacagctgctcattgcccccttcaaagaggaggacgagtgggacagcccgcacatcgtcaggtactacgatgtcatgtctgatgaggaaatcgagaggatcaaggagatcgcaaaacctaaacttgcacgagccaccgttcgtgatcccaagacaggagtcctcactgtcgccagctaccgggtttccaaaagctcctggctagaggaagatgatgaccctgttgtggcccgagtaaatcgtcggatgcagcatatcacagggttaacagtaaagactgcagaattgttacaggttgcaaattatggagtgggaggacagtatgaaccgcacttcgacttctctaggaatgatgagcgagatactttcaagcatttagggacggggaatcgtgtggctactttcttaaactacatgagtgatgtagaagctggtggtgccaccgtcttccctgatctgggggctgcaatttggcctaagaagggtacagctgtgttctggtacaacctcttgcggagcggggaaggtgactaccgaacaagacatgctgcctgccctgtgcttgtgggctgcaagtgggtctccaataagtggttccatgaacgaggacaggagttcttgagaccttgtggatcaacagaagttgactgacatccttttctgtccttccccttcctggtccttcagcccatgtcaacgtgacagacacctttgtatgttcctttgtatgttcctatcaggctgatttttggagaaatgaatgtttgtctggagcagagggagaccatactagggcgactcctgtgtgactgaagtcccagcccttccattcagcctgtgccatccctggccccaaggctaggatcaaagtggctgcagcagagttagctgtctagcgcctagcaaggtgcctttgtacctcaggtgttttaggtgtgagatgtttcagtgaaccaaagttctgataccttgtttacatgtttgtttttatggcatttctatctattgtggctttaccaaaaaataaaatgtccctaccagaagccttaaa

SEQ ID NO: 169712 - DNA, 2313 bp, Homo sapiens
  Payload ID: 13415
  Gene Symbol: P4HA2
  Gene Name: prolyl 4-hydroxylase, alpha polypeptide II
  Uniprot ID: O15460
  ENST ID: ENST00000360568
  CDS Start-End: 312-1913
atgaagggcgcgggcggccagctccggctccggctccggctccggctcccgcgaggccgggtagcctgggcgttcccaggggtcgcagaggacggcgaaccccggcggagccaccggagctggggaccaggacgcaggcaggcgtgtggagcgtgaggtggggacgtggcggcggctcaagtgggcggagccccggcagcggcccgaggcggagtcgccaagggaggaggcgccgagctgaccgggcgacgccgcgggaggttctggaaacgccgggagctgcgagtgtccagacacttccctctgtgaccatgaaactctgggtgtctgcattgctgatggcctggtttggtgtcctgagctgtgtgcaggccgaattcttcacctctattgggcacatgactgacctgatttatgcagagaaagagctggtgcagtctctgaaagagtacatccttgtggaggaagccaagctttccaagattaagagctgggccaacaaaatggaagccttgactagcaagtcagctgctgatgctgagggctacctggctcaccctgtgaatgcctacaaactggtgaagcggctaaacacagactggcctgcgctggaggaccttgtcctgcaggactcagctgcaggttttatcgccaacctctctgtgcagcggcagttcttccccactgatgaggacgagataggagctgccaaagccctgatgagacttcaggacacatacaggctggacccaggcacaatttccagaggggaacttccaggaaccaagtaccaggcaatgctgagtgtggatgactgctttgggatgggccgctcggcctacaatgaaggggactattatcatacggtgttgtggatggagcaggtgctaaagcagcttgatgccggggaggaggccaccacaaccaagtcacaggtgctggactacctcagctatgctgtcttccagttgggtgatctgcaccgtgccctggagctcacccgccgcctgctctcccttgacccaagccacgaacgagctggagggaatctgcggtactttgagcagttattggaggaagagagagaaaaaacgttaacaaatcagacagaagctgagctagcaaccccagaaggcatctatgagaggcctgtggactacctgcctgagagggatgtttacgagagcctctgtcgtggggagggtgtcaaactgacaccccgtagacagaagaggcttttctgtaggtaccaccatggcaacagggccccacagctgctcattgcccccttcaaagaggaggacgagtgggacagcccgcacatcgtcaggtactacgatgtcatgtctgatgaggaaatcgagaggatcaaggagatcgcaaaacctaaacttgcacgagccaccgttcgtgatcccaagacaggagtcctcactgtcgccagctaccgggtttccaaaagctcctggctagaggaagatgatgaccctgttgtggcccgagtaaatcgtcggatgcagcatatcacagggttaacagtaaagactgcagaattgttacaggttgcaaattatggagtgggaggacagtatgaaccgcacttcgacttctctaggcgaccttttgacagcggcctcaaaacagaggggaataggttagcgacgtttcttaactacatgagtgatgtagaagctggtggtgccaccgtcttccctgatctgggggctgcaatttggcctaagaagggtacagctgtgttctggtacaacctcttgcggagcggggaaggtgactaccgaacaagacatgctgcctgccctgtgcttgtgggctgcaagtgggtctccaataagtggttccatgaacgaggacaggagttcttgagaccttgtggatcaacagaagttgactgacatccttttctgtccttccccttcctggtccttcagcccatgtcaacgtgacagacacctttgtatgttcctttgtatgttcctatcaggctgatttttggagaaatgaatgtttgtctggagcagagggagaccatactagggcgactcctgtgtgactgaagtcccagcccttccattcagcctgtgccatccctggccccaaggctaggatcaaagtggctgcagcagagttagctgtctagcgcctagcaaggtgcctttgtacctcaggtgttttaggtgtgagatgtttcagtgaaccaaagttctgataccttgtttacatgtttgtttttatggcatttctatctattgtggctttaccaaaaaataaaatgtccctaccagaagccttaaa

SEQ ID NO: 169713 - DNA, 2223 bp, Homo sapiens
  Payload ID: 13415
  Gene Symbol: P4HA2
  Gene Name: prolyl 4-hydroxylase, alpha polypeptide II
  Uniprot ID: O15460
  ENST ID: ENST00000379086
  CDS Start-End: 222-1823
ctggaaacgccgggagctgcgagtgtccagacatccttgtggaaccagcgttgtttttccttggcagctgcggagacccgtgataattcgttaactaattcaacaaacgggacccttctgtgtgccagaaaccgcaagcagttgctaacccagtgggacaggcggattggaagagcgggaaggtcctggcccagagcagtgtgacacttccctctgtgaccatgaaactctgggtgtctgcattgctgatggcctggtttggtgtcctgagctgtgtgcaggccgaattcttcacctctattgggcacatgactgacctgatttatgcagagaaagagctggtgcagtctctgaaagagtacatccttgtggaggaagccaagctttccaagattaagagctgggccaacaaaatggaagccttgactagcaagtcagctgctgatgctgagggctacctggctcaccctgtgaatgcctacaaactggtgaagcggctaaacacagactggcctgcgctggaggaccttgtcctgcaggactcagctgcaggttttatcgccaacctctctgtgcagcggcagttcttccccactgatgaggacgagataggagctgccaaagccctgatgagacttcaggacacatacaggctggacccaggcacaatttccagaggggaacttccaggaaccaagtaccaggcaatgctgagtgtggatgactgctttgggatgggccgctcggcctacaatgaaggggactattatcatacggtgttgtggatggagcaggtgctaaagcagcttgatgccggggaggaggccaccacaaccaagtcacaggtgctggactacctcagctatgctgtcttccagttgggtgatctgcaccgtgccctggagctcacccgccgcctgctctcccttgacccaagccacgaacgagctggagggaatctgcggtactttgagcagttattggaggaagagagagaaaaaacgttaacaaatcagacagaagctgagctagcaaccccagaaggcatctatgagaggcctgtggactacctgcctgagagggatgtttacgagagcctctgtcgtggggagggtgtcaaactgacaccccgtagacagaagaggcttttctgtaggtaccaccatggcaacagggccccacagctgctcattgcccccttcaaagaggaggacgagtgggacagcccgcacatcgtcaggtactacgatgtcatgtctgatgaggaaatcgagaggatcaaggagatcgcaaaacctaaacttgcacgagccaccgttcgtgatcccaagacaggagtcctcactgtcgccagctaccgggtttccaaaagctcctggctagaggaagatgatgaccctgttgtggcccgagtaaatcgtcggatgcagcatatcacagggttaacagtaaagactgcagaattgttacaggttgcaaattatggagtgggaggacagtatgaaccgcacttcgacttctctaggcgaccttttgacagcggcctcaaaacagaggggaataggttagcgacgtttcttaactacatgagtgatgtagaagctggtggtgccaccgtcttccctgatctgggggctgcaatttggcctaagaagggtacagctgtgttctggtacaacctcttgcggagcggggaaggtgactaccgaacaagacatgctgcctgccctgtgcttgtgggctgcaagtgggtctccaataagtggttccatgaacgaggacaggagttcttgagaccttgtggatcaacagaagttgactgacatccttttctgtccttccccttcctggtccttcagcccatgtcaacgtgacagacacctttgtatgttcctttgtatgttcctatcaggctgatttttggagaaatgaatgtttgtctggagcagagggagaccatactagggcgactcctgtgtgactgaagtcccagcccttccattcagcctgtgccatccctggccccaaggctaggatcaaagtggctgcagcagagttagctgtctagcgcctagcaaggtgcctttgtacctcaggtgttttaggtgtgagatgtttcagtgaaccaaagttctgataccttgtttacatgtttgtttttatggcatttctatctattgtggctttaccaaaaaataaaatgtccctaccagaagccttaaa

SEQ ID NO: 169714 - DNA, 2563 bp, Homo sapiens
  Payload ID: 13415
  Gene Symbol: P4HA2
  Gene Name: prolyl 4-hydroxylase, alpha polypeptide II
  Uniprot ID: O15460
  ENST ID: ENST00000379100
  CDS Start-End: 565-2166
agcgttgtttttccttggcagctgcggagacccgtgataattcgttaactaattcaacaaacgggacccttctgtgtgccagaaaccgcaagcagttgctaacccagtgggacaggcggattggaagagcgggaaggtcctggcccagagcagtgtggtgagcgctgtgctggaagggaatgcgggcagtgggtacttggtagagcactgactgcctccggccagaggacttcccggaggaggtgacccatgagctggagtggtcagaggaaggctggcaaaagggcatcgtggacagaggaacagcctatgtgagtgggagcagagaccttggccaatgccattccttatggccttgtagtggaagcaaggtgatggggaaggaacactgtaggggatagctgtccacggacgctgtctacaagaccctggagtgagataacgtgcctggtactgtgccctgcatgtgtaagatgcccagttgaccttcgcagcaggagcctggatcagggcacttcctgcctcaggtattgctggacagcccagacacttccctctgtgaccatgaaactctgggtgtctgcattgctgatggcctggtttggtgtcctgagctgtgtgcaggccgaattcttcacctctattgggcacatgactgacctgatttatgcagagaaagagctggtgcagtctctgaaagagtacatccttgtggaggaagccaagctttccaagattaagagctgggccaacaaaatggaagccttgactagcaagtcagctgctgatgctgagggctacctggctcaccctgtgaatgcctacaaactggtgaagcggctaaacacagactggcctgcgctggaggaccttgtcctgcaggactcagctgcaggttttatcgccaacctctctgtgcagcggcagttcttccccactgatgaggacgagataggagctgccaaagccctgatgagacttcaggacacatacaggctggacccaggcacaatttccagaggggaacttccaggaaccaagtaccaggcaatgctgagtgtggatgactgctttgggatgggccgctcggcctacaatgaaggggactattatcatacggtgttgtggatggagcaggtgctaaagcagcttgatgccggggaggaggccaccacaaccaagtcacaggtgctggactacctcagctatgctgtcttccagttgggtgatctgcaccgtgccctggagctcacccgccgcctgctctcccttgacccaagccacgaacgagctggagggaatctgcggtactttgagcagttattggaggaagagagagaaaaaacgttaacaaatcagacagaagctgagctagcaaccccagaaggcatctatgagaggcctgtggactacctgcctgagagggatgtttacgagagcctctgtcgtggggagggtgtcaaactgacaccccgtagacagaagaggcttttctgtaggtaccaccatggcaacagggccccacagctgctcattgcccccttcaaagaggaggacgagtgggacagcccgcacatcgtcaggtactacgatgtcatgtctgatgaggaaatcgagaggatcaaggagatcgcaaaacctaaacttgcacgagccaccgttcgtgatcccaagacaggagtcctcactgtcgccagctaccgggtttccaaaagctcctggctagaggaagatgatgaccctgttgtggcccgagtaaatcgtcggatgcagcatatcacagggttaacagtaaagactgcagaattgttacaggttgcaaattatggagtgggaggacagtatgaaccgcacttcgacttctctaggcgaccttttgacagcggcctcaaaacagaggggaataggttagcgacgtttcttaactacatgagtgatgtagaagctggtggtgccaccgtcttccctgatctgggggctgcaatttggcctaagaagggtacagctgtgttctggtacaacctcttgcggagcggggaaggtgactaccgaacaagacatgctgcctgccctgtgcttgtgggctgcaagtgggtctccaataagtggttccatgaacgaggacaggagttcttgagaccttgtggatcaacagaagttgactgacatccttttctgtccttccccttcctggtccttcagcccatgtcaacgtgacagacacctttgtatgttcctttgtatgttcctatcaggctgatttttggagaaatgaatgtttgtctggagcagagggagaccatactagggcgactcctgtgtgactgaagtcccagcccttccattcagcctgtgccatccctggccccaaggctaggatcaaagtggctgcagcagagttagctgtctagcgcctagcaaggtgcctttgtacctcaggtgttttaggtgtgagatgtttcagtgaaccaaagttctgataccttgtttacatgtttgtttttatggcatttctatctattgtggctttaccaaaaaataaaatgtccctaccagaagcctt

SEQ ID NO: 169715 - DNA, 2569 bp, Homo sapiens
  Payload ID: 13415
  Gene Symbol: P4HA2
  Gene Name: prolyl 4-hydroxylase, alpha polypeptide II
  Uniprot ID: O15460
  ENST ID: ENST00000379104
  CDS Start-End: 565-2172
agcgttgtttttccttggcagctgcggagacccgtgataattcgttaactaattcaacaaacgggacccttctgtgtgccagaaaccgcaagcagttgctaacccagtgggacaggcggattggaagagcgggaaggtcctggcccagagcagtgtggtgagcgctgtgctggaagggaatgcgggcagtgggtacttggtagagcactgactgcctccggccagaggacttcccggaggaggtgacccatgagctggagtggtcagaggaaggctggcaaaagggcatcgtggacagaggaacagcctatgtgagtgggagcagagaccttggccaatgccattccttatggccttgtagtggaagcaaggtgatggggaaggaacactgtaggggatagctgtccacggacgctgtctacaagaccctggagtgagataacgtgcctggtactgtgccctgcatgtgtaagatgcccagttgaccttcgcagcaggagcctggatcagggcacttcctgcctcaggtattgctggacagcccagacacttccctctgtgaccatgaaactctgggtgtctgcattgctgatggcctggtttggtgtcctgagctgtgtgcaggccgaattcttcacctctattgggcacatgactgacctgatttatgcagagaaagagctggtgcagtctctgaaagagtacatccttgtggaggaagccaagctttccaagattaagagctgggccaacaaaatggaagccttgactagcaagtcagctgctgatgctgagggctacctggctcaccctgtgaatgcctacaaactggtgaagcggctaaacacagactggcctgcgctggaggaccttgtcctgcaggactcagctgcaggttttatcgccaacctctctgtgcagcggcagttcttccccactgatgaggacgagataggagctgccaaagccctgatgagacttcaggacacatacaggctggacccaggcacaatttccagaggggaacttccaggaaccaagtaccaggcaatgctgagtgtggatgactgctttgggatgggccgctcggcctacaatgaaggggactattatcatacggtgttgtggatggagcaggtgctaaagcagcttgatgccggggaggaggccaccacaaccaagtcacaggtgctggactacctcagctatgctgtcttccagttgggtgatctgcaccgtgccctggagctcacccgccgcctgctctcccttgacccaagccacgaacgagctggagggaatctgcggtactttgagcagttattggaggaagagagagaaaaaacgttaacaaatcagacagaagctgagctagcaaccccagaaggcatctatgagaggcctgtggactacctgcctgagagggatgtttacgagagcctctgtcgtggggagggtgtcaaactgacaccccgtagacagaagaggcttttctgtaggtaccaccatggcaacagggccccacagctgctcattgcccccttcaaagaggaggacgagtgggacagcccgcacatcgtcaggtactacgatgtcatgtctgatgaggaaatcgagaggatcaaggagatcgcaaaacctaaacttgcacgagccaccgttcgtgatcccaagacaggagtcctcactgtcgccagctaccgggtttccaaaagctcctggctagaggaagatgatgaccctgttgtggcccgagtaaatcgtcggatgcagcatatcacagggttaacagtaaagactgcagaattgttacaggttgcaaattatggagtgggaggacagtatgaaccgcacttcgacttctctaggaatgatgagcgagatactttcaagcatttagggacggggaatcgtgtggctactttcttaaactacatgagtgatgtagaagctggtggtgccaccgtcttccctgatctgggggctgcaatttggcctaagaagggtacagctgtgttctggtacaacctcttgcggagcggggaaggtgactaccgaacaagacatgctgcctgccctgtgcttgtgggctgcaagtgggtctccaataagtggttccatgaacgaggacaggagttcttgagaccttgtggatcaacagaagttgactgacatccttttctgtccttccccttcctggtccttcagcccatgtcaacgtgacagacacctttgtatgttcctttgtatgttcctatcaggctgatttttggagaaatgaatgtttgtctggagcagagggagaccatactagggcgactcctgtgtgactgaagtcccagcccttccattcagcctgtgccatccctggccccaaggctaggatcaaagtggctgcagcagagttagctgtctagcgcctagcaaggtgcctttgtacctcaggtgttttaggtgtgagatgtttcagtgaaccaaagttctgataccttgtttacatgtttgtttttatggcatttctatctattgtggctttaccaaaaaataaaatgtccctaccagaagcctt

SEQ ID NO: 169716 - DNA, 568 bp, Homo sapiens
  Payload ID: 13415
  Gene Symbol: P4HA2
  Gene Name: prolyl 4-hydroxylase, alpha polypeptide II
  ENST ID: ENST00000395164
  CDS Start-End: 66-568
gcatttgggttgcagctgggagcttggcagagattctgcctgatgagacacttccctctgtgaccatgaaactctgggtgtctgcattgctgatggcctggtttggtgtcctgagctgtgtgcaggccgaattcttcacctctattgggcacatgactgacctgatttatgcagagaaagagctggtgcagtctctgaaagagtacatccttgtggaggaagccaagctttccaagattaagagctgggccaacaaaatggaagccttgactagcaagtcagctgctgatgctgagggctacctggctcaccctgtgaatgcctacaaactggtgaagcggctaaacacagactggcctgcgctggaggaccttgtcctgcaggactcagctgcaggttttatcgccaacctctctgtgcagcggcagttcttccccactgatgaggacgagataggagctgccaaagccctgatgagacttcaggacacatacaggctggacccaggcacaatttccagaggggaacttccaggaaccaagtaccaggcaatgctgagtgtggatga

SEQ ID NO: 169717 - DNA, 3349 bp, Homo sapiens
  Payload ID: 13415
  Gene Symbol: P4HA2
  Gene Name: prolyl 4-hydroxylase, alpha polypeptide II
  Uniprot ID: O15460
  ENST ID: ENST00000401867
  CDS Start-End: 570-2177
aaacgccgggagctgcgagtgtccagctgcggagacccgtgataattcgttaactaattcaacaaacgggacccttctgtgtgccagaaaccgcaagcagttgctaacccagtgggacaggcggattggaagagcgggaaggtcctggcccagagcagtgtggtgagcgctgtgctggaagggaatgcgggcagtgggtacttggtagagcactgactgcctccggccagaggacttcccggaggaggtgacccatgagctggagtggtcagaggaaggctggcaaaagggcatcgtggacagaggaacagcctatgtgagtgggagcagagaccttggccaatgccattccttatggccttgtagtggaagcaaggtgatggggaaggaacactgtaggggatagctgtccacggacgctgtctacaagaccctggagtgagataacgtgcctggtactgtgccctgcatgtgtaagatgcccagttgaccttcgcagcaggagcctggatcagggcacttcctgcctcaggtattgctggacagcccagacacttccctctgtgaccatgaaactctgggtgtctgcattgctgatggcctggtttggtgtcctgagctgtgtgcaggccgaattcttcacctctattgggcacatgactgacctgatttatgcagagaaagagctggtgcagtctctgaaagagtacatccttgtggaggaagccaagctttccaagattaagagctgggccaacaaaatggaagccttgactagcaagtcagctgctgatgctgagggctacctggctcaccctgtgaatgcctacaaactggtgaagcggctaaacacagactggcctgcgctggaggaccttgtcctgcaggactcagctgcaggttttatcgccaacctctctgtgcagcggcagttcttccccactgatgaggacgagataggagctgccaaagccctgatgagacttcaggacacatacaggctggacccaggcacaatttccagaggggaacttccaggaaccaagtaccaggcaatgctgagtgtggatgactgctttgggatgggccgctcggcctacaatgaaggggactattatcatacggtgttgtggatggagcaggtgctaaagcagcttgatgccggggaggaggccaccacaaccaagtcacaggtgctggactacctcagctatgctgtcttccagttgggtgatctgcaccgtgccctggagctcacccgccgcctgctctcccttgacccaagccacgaacgagctggagggaatctgcggtactttgagcagttattggaggaagagagagaaaaaacgttaacaaatcagacagaagctgagctagcaaccccagaaggcatctatgagaggcctgtggactacctgcctgagagggatgtttacgagagcctctgtcgtggggagggtgtcaaactgacaccccgtagacagaagaggcttttctgtaggtaccaccatggcaacagggccccacagctgctcattgcccccttcaaagaggaggacgagtgggacagcccgcacatcgtcaggtactacgatgtcatgtctgatgaggaaatcgagaggatcaaggagatcgcaaaacctaaacttgcacgagccaccgttcgtgatcccaagacaggagtcctcactgtcgccagctaccgggtttccaaaagctcctggctagaggaagatgatgaccctgttgtggcccgagtaaatcgtcggatgcagcatatcacagggttaacagtaaagactgcagaattgttacaggttgcaaattatggagtgggaggacagtatgaaccgcacttcgacttctctaggaatgatgagcgagatactttcaagcatttagggacggggaatcgtgtggctactttcttaaactacatgagtgatgtagaagctggtggtgccaccgtcttccctgatctgggggctgcaatttggcctaagaagggtacagctgtgttctggtacaacctcttgcggagcggggaaggtgactaccgaacaagacatgctgcctgccctgtgcttgtgggctgcaagtgggtctccaataagtggttccatgaacgaggacaggagttcttgagaccttgtggatcaacagaagttgactgacatccttttctgtccttccccttcctggtccttcagcccatgtcaacgtgacagacacctttgtatgttcctttgtatgttcctatcaggctgatttttggagaaatgaatgtttgtctggagcagagggagaccatactagggcgactcctgtgtgactgaagtcccagcccttccattcagcctgtgccatccctggccccaaggctaggatcaaagtggctgcagcagagttagctgtctagcgcctagcaaggtgcctttgtacctcaggtgttttaggtgtgagatgtttcagtgaaccaaagttctgataccttgtttacatgtttgtttttatggcatttctatctattgtggctttaccaaaaaataaaatgtccctaccagaagccttaaagagccttacttggagtatttttaagactggaagcttttaccaggttcatcatttcctatgcatcaccttcatgcaggcagagtctggataatgaatgctttagcagcaaaaaagcatcttgggtcttggatttcagacctggtttcaacacttgtgttccctctaagtgtcagtgtccttttctggaaagtagggtaaatagtttctctttgtctcccagagaacatagcacatgtgttcatgattgtaatgctgttataatgtgtacttcatttttaaattttgagataagaattgttcatgatacacagatgtatacttaaaaaaatatgaaggtgagcaggagcacctgtgtcaacaccaagttagaaaagagaacgttttcaagtcagtacctcaggagccccttgggaacccctcctagatcacatctccttcactgcccccagcactttggagataaatcattgtctcatgatgtgtggtactcattcctttgcttgtctttatagttttaccatctatgattagatccctaaataagtagttattctgttttccctgattttgaacttttactaatagaatgagagtaaatatttttgggtatgtggcttcttttgttcaacattgttttaagattcatccgtgttgcttgtgtagctgtaatttgttttaatctttatagtacattcagttttgttaatgcttattgtaggactgtaccataatacaggcagcatgctgctgataaacactggaattgatttca

SEQ ID NO: 169718 - DNA, 1023 bp, Homo sapiens
  Payload ID: 13415
  Gene Symbol: P4HA2
  Gene Name: prolyl 4-hydroxylase, alpha polypeptide II
  ENST ID: ENST00000417528
  CDS Start-End: 411-1023
tccaggtgagcgccccgcccgctcagccgccagatcaaccttagcgctggggcgcgggctggggtcgccaggcggtgcgttctgcccgcgcggggctgagagttaggggccggggccggatccggggccgggggtcgcgccgctagccgccagcagcgcagtccgggccgccaccctgcaccctccgccctgtttctgcacccgtctgggttcttgtgccgccgcccgcaagccttcccgagctcagggtggtgagctgcggagacccgtgataattcgttaactaattcaacaaacgggacccttctgtgtgccagaaaccgcaagcagttgctaacccagtgggacaggcggattggaagagcgggaaggtcctggcccagagcagtgtgacacttccctctgtgaccatgaaactctgggtgtctgcattgctgatggcctggtttggtgtcctgagctgtgtgcaggccgaattcttcacctctattgggcacatgactgacctgatttatgcagagaaagagctggtgcagtctctgaaagagtacatccttgtggaggaagccaagctttccaagattaagagctgggccaacaaaatggaagccttgactagcaagtcagctgctgatgctgagggctacctggctcaccctgtgaatgcctacaaactggtgaagcggctaaacacagactggcctgcgctggaggaccttgtcctgcaggactcagctgcaggttttatcgccaacctctctgtgcagcggcagttcttccccactgatgaggacgagataggagctgccaaagccctgatgagacttcaggacacatacaggctggacccaggcacaatttccagaggggaacttccaggaaccaagtaccaggcaatgctgagtgtggatgactgctttgggatgggccgctcggcctacaatgaaggggactattatcatacggtgttgtggatggagcaggtgctaaagcagcttgatgccggggaggaggccaccacaa

SEQ ID NO: 169719 - DNA, 724 bp, Homo sapiens
  Payload ID: 13415
  Gene Symbol: P4HA2
  Gene Name: prolyl 4-hydroxylase, alpha polypeptide II
  ENST ID: ENST00000431054
  CDS Start-End: 17-724
gttgtgaaaatcggaaatgaaaagacagttggtgacaaactcctttctccatcacctccttattggacagaaacgacccaggaatgcgcctcgcacacttccctctgtgaccatgaaactctgggtgtctgcattgctgatggcctggtttggtgtcctgagctgtgtgcaggccgaattcttcacctctattgggcacatgactgacctgatttatgcagagaaagagctggtgcagtctctgaaagagtacatccttgtggaggaagccaagctttccaagattaagagctgggccaacaaaatggaagccttgactagcaagtcagctgctgatgctgagggctacctggctcaccctgtgaatgcctacaaactggtgaagcggctaaacacagactggcctgcgctggaggaccttgtcctgcaggactcagctgcaggttttatcgccaacctctctgtgcagcggcagttcttccccactgatgaggacgagataggagctgccaaagccctgatgagacttcaggacacatacaggctggacccaggcacaatttccagaggggaacttccaggaaccaagtaccaggcaatgctgagtgtggatgactgctttgggatgggccgctcggcctacaatgaaggggactattatcatacggtgttgtggatggagcaggtgctaaagcagcttgatgccggggaggaggccaccaca

SEQ ID NO: 169720 - DNA, 582 bp, Homo sapiens
  Payload ID: 13415
  Gene Symbol: P4HA2
  Gene Name: prolyl 4-hydroxylase, alpha polypeptide II
  ENST ID: ENST00000416053
  CDS Start-End: 278-582
cgtaatgaccaatgtttgacccctagatgccaagatattcatcagcaagatctttaaacaatgcctgtagaatagaaaactcttcataaagatgcttatttaacctctccagtggtcacgagtcttggcaagaaagtctgaagacgggaccagctgcacatgttttaccctaagagcttgctatataaaggatactttctggaaggctggttggtgtgaggattcagtcttgcagccactcgagacatcacttctgttcacacttccctctgtgaccatgaaactctgggtgtctgcattgctgatggcctggtttggtgtcctgagctgtgtgcaggccgaattcttcacctctattgggcacatgactgacctgatttatgcagagaaagagctggtgcagtctctgaaagagtacatccttgtggaggaagccaagctttccaagattaagagctgggccaacaaaatggaagccttgactagcaagtcagctgctgatgctgagggctacctggctcaccctgtgaatgcctacaaactggtgaagcggctaaacacagactggcctgcgctggagga

SEQ ID NO: 169721 - DNA, 427 bp, Homo sapiens
  Payload ID: 13415
  Gene Symbol: P4HA2
  Gene Name: prolyl 4-hydroxylase, alpha polypeptide II
  ENST ID: ENST00000428841
  CDS Start-End: 276-427
aggcagggaaatccgtcagcctccagggacgctctccctacagccccggcgaggggatcgggtcgtggcgacctctccagacgcccaggggctgggcaggagggcgggccaaggcccgcagctgcggagacccgtgataattcgttaactaattcaacaaacgggacccttctgtgtgccagaaaccgcaagcagttgctaacccagtgggacaggcggattggaagagcgggaaggtcctggcccagagcagtgtgacacttccctctgtgaccatgaaactctgggtgtctgcattgctgatggcctggtttggtgtcctgagctgtgtgcaggccgaattcttcacctctattgggcacatgactgacctgatttatgcagagaaagagctggtgcagtctctgaaagagtacatccttgtgga

SEQ ID NO: 169722 - DNA, 751 bp, Homo sapiens
  Payload ID: 13415
  Gene Symbol: P4HA2
  Gene Name: prolyl 4-hydroxylase, alpha polypeptide II
  ENST ID: ENST00000428369
  CDS Start-End: 312-751
tattggctaagcccgttctgcaccctcccaagggctgggagtcctaggtcttgtccgggcagggtccagcttggagcccattagatgggccattggatcagaaagtcttttctcccccagacatccttgtggaaccagcgttgtttttccttggcagctgcggagacccgtgataattcgttaactaattcaacaaacgggacccttctgtgtgccagaaaccgcaagcagttgctaacccagtgggacaggcggattggaagagcgggaaggtcctggcccagagcagtgtgacacttccctctgtgaccatgaaactctgggtgtctgcattgctgatggcctggtttggtgtcctgagctgtgtgcaggccgaattcttcacctctattgggcacatgactgacctgatttatgcagagaaagagctggtgcagtctctgaaagagtacatccttgtggaggaagccaagctttccaagattaagagctgggccaacaaaatggaagccttgactagcaagtcagctgctgatgctgagggctacctggctcaccctgtgaatgcctacaaactggtgaagcggctaaacacagactggcctgcgctggaggaccttgtcctgcaggactcagctgcaggttttatcgccaacctctctgtgcagcggcagttcttccccactgatgaggacgagataggagctgccaaagccctgatgagacttcaggacacatacaggctggaccc

SEQ ID NO: 169723 - DNA, 568 bp, Homo sapiens
  Payload ID: 13415
  Gene Symbol: P4HA2
  Gene Name: prolyl 4-hydroxylase, alpha polypeptide II
  ENST ID: ENST00000418055
  CDS Start-End: 225-568
gacgccgcgggaggttctggaaacgccgggagctgcgagtgtccagctgcggagacccgtgataattcgttaactaattcaacaaacgggacccttctgtgtgccagaaaccgcaagcagttgctaacccagtgggacaggcggattggaagagcgggaaggtcctggcccagagcagtgtgtgattgtcattgaatgcctttcagacacttccctctgtgaccatgaaactctgggtgtctgcattgctgatggcctggtttggtgtcctgagctgtgtgcaggccgaattcttcacctctattgggcacatgactgacctgatttatgcagagaaagagctggtgcagtctctgaaagagtacatccttgtggaggaagccaagctttccaagattaagagctgggccaacaaaatggaagccttgactagcaagtcagctgctgatgctgagggctacctggctcaccctgtgaatgcctacaaactggtgaagcggctaaacacagactggcctgcgctggaggaccttgtcctgcaggactcagctgcaggttttatcgccaa

SEQ ID NO: 169724 - DNA, 866 bp, Homo sapiens
  Payload ID: 13415
  Gene Symbol: P4HA2
  Gene Name: prolyl 4-hydroxylase, alpha polypeptide II
  ENST ID: ENST00000439698
  CDS Start-End: 315-866
ctcactgcagcctcgaactcctgggctcaaggggtcctcccacctcagccttctgagtagtttggactataggtgcatgccgccacagctggctattttttttttcatttttattttttctagagagggggtctcgctatgttgcccagtggtcacgagtcttggcaagaaagtctgaagacgggaccagctgcacatgttttaccctaagagcttgctatataaaggatactttctggaaggctggttggtgtgaggattcagtcttgcagccactcgagacatcacttctgttcacacttccctctgtgaccatgaaactctgggtgtctgcattgctgatggcctggtttggtgtcctgagctgtgtgcaggccgaattcttcacctctattgggcacatgactgacctgatttatgcagagaaagagctggtgcagtctctgaaagagtacatccttgtggaggaagccaagctttccaagattaagagctgggccaacaaaatggaagccttgactagcaagtcagctgctgatgctgagggctacctggctcaccctgtgaatgcctacaaactggtgaagcggctaaacacagactggcctgcgctggaggaccttgtcctgcaggactcagctgcaggttttatcgccaacctctctgtgcagcggcagttcttccccactgatgaggacgagataggagctgccaaagccctgatgagacttcaggacacatacaggctggacccaggcacaatttccagaggggaacttccaggaaccaagtaccaggcaatgctgagtgtggatgactgctttgggatgggccgctcggcctacaatgaaggggactattatcat

SEQ ID NO: 169725 - DNA, 819 bp, Homo sapiens
  Payload ID: 13415
  Gene Symbol: P4HA2
  Gene Name: prolyl 4-hydroxylase, alpha polypeptide II
  ENST ID: ENST00000453286
  CDS Start-End: 359-819
gggcgacgccgcgggaggttctggaaacgccgggagctgcgagtgtccagctgcggagacccgtgataattcgttaactaattcaacaaacgggacccttctgtgtgccagaaaccgcaagcagttgctaacccagtgggacaggcggattggaagagcgggaaggtcctggcccagagcagtgtggtgagcgctgtgctggaagggaatgcgggcagtgggtacttggtagagcactgactgcctccggccagaggacttcccggaggaggtgacccatgagctggagtggtcagaggaaggctggcaaaagggcatcgtggacagaggaacagcctatacacttccctctgtgaccatgaaactctgggtgtctgcattgctgatggcctggtttggtgtcctgagctgtgtgcaggccgaattcttcacctctattgggcacatgactgacctgatttatgcagagaaagagctggtgcagtctctgaaagagtacatccttgtggaggaagccaagctttccaagattaagagctgggccaacaaaatggaagccttgactagcaagtcagctgctgatgctgagggctacctggctcaccctgtgaatgcctacaaactggtgaagcggctaaacacagactggcctgcgctggaggaccttgtcctgcaggactcagctgcaggttttatcgccaacctctctgtgcagcggcagttcttccccactgatgaggacgagataggagctgccaaagccctgatgagacttcaggacacatacaggctggacccaggcacaatttccagagggga

SEQ ID NO: 169726 - DNA, 2274 bp, Homo sapiens
  Payload ID: 13416
  Gene Symbol: P4HA3
  Gene Name: prolyl 4-hydroxylase, alpha polypeptide III
  Uniprot ID: Q7Z4N8
  ENST ID: ENST00000331597
  CDS Start-End: 47-1681
gccgcgcggccaggactgtctgaggggaagttcgcgagcgctggctatgggtcctggggcgcggctggcggcgctgctggcggtgctggcgctcgggacaggagacccagaaagggctgcggctcggggcgacacgttctcggcgctgaccagcgtggcgcgcgccctggcgcccgagcgccggctgctggggctgctgaggcggtacctgcgcggggaggaggcgcggctgcgggacctgactagattctacgacaaggtactttctttgcatgaggattcaacaacccctgtggctaaccctctgcttgcatttactctcatcaaacgcctgcagtctgactggaggaatgtggtacatagtctggaggccagtgagaacatccgagctctgaaggatggctatgagaaggtggagcaagaccttccagcctttgaggaccttgagggagcagcaagggccctgatgcggctgcaggacgtgtacatgctcaatgtgaaaggcctggcccgaggtgtctttcagagagtcactggctctgccatcactgacctgtacagccccaaacggctcttttctctcacaggggatgactgcttccaagttggcaaggtggcctatgacatgggggattattaccatgccattccatggctggaggaggctgtcagtctcttccgaggatcttacggagagtggaagacagaggatgaggcaagtctagaagatgccttggatcacttggcctttgcttatttccgggcaggaaatgtttcgtgtgccctcagcctctctcgggagtttcttctctacagcccagataataagaggatggccaggaatgtcttgaaatatgaaaggctcttggcagagagccccaaccacgtggtagctgaggctgtcatccagaggcccaatataccccacctgcagaccagagacacctacgaggggctatgtcagaccctgggttcccagcccactctctaccagatccctagcctctactgttcctatgagaccaattccaacgcctacctgctgctccagcccatccggaaggaggtcatccacctggagccctacattgctctctaccatgacttcgtcagtgactcagaggctcagaaaattagagaacttgcagaaccatggctacagaggtcagtggtggcatcaggggagaagcagttacaagtggagtaccgcatcagcaaaagtgcctggctgaaggacactgttgacccaaaactggtgaccctcaaccaccgcattgctgccctcacaggccttgatgtccggcctccctatgcagagtatctgcaggtggtgaactatggcatcggaggacactatgagcctcactttgaccatgctacgtcaccaagcagccccctctacagaatgaagtcaggaaaccgagttgcaacatttatgatctatctgagctcggtggaagctggaggagccacagccttcatctatgccaacctcagcgtgcctgtggttaggaatgcagcactgttttggtggaacctgcacaggagtggtgaaggggacagtgacacacttcatgctggctgtcctgtcctggtgggagataagtgggtggccaacaagtggatacatgagtatggacaggaattccgcagaccctgcagctccagccctgaagactgaactgttggcagagagaagctggtggagtcctgtggctttccagagaagccaggagccaaaagctggggtaggagaggagaaagcagagcagcctcctggaagaaggccttgtcagctttgtctgtgcctcgcaaatcagaggcaagggagaggttgttaccaggggacactgagaatgtacatttgatctgccccagccacggaagtcagagtaggatgcacagtacaaaggaggggggagtggaggcctgagagggaagtttctggagttcagatactctctgttgggaacaggacatctcaacagtctcaggttcgatcagtgggtcttttggcactttgaaccttgaccacagggaccaagaagtggcaatgaggacacctgcaggaggggctagcctgactcccagaactttaagactttctccccactgccttctgctgcagcccaagcagggagtgtccccctcccagaagcatatcccagatgagtggtacattatataaggattttttttaagttgaaaacaactttcttttctttttgtatgatggttttttaacacagtcattaaaaatgtttataaatcatt

SEQ ID NO: 169727 - DNA, 2248 bp, Homo sapiens
  Payload ID: 13416
  Gene Symbol: P4HA3
  Gene Name: prolyl 4-hydroxylase, alpha polypeptide III
  Uniprot ID: Q7Z4N8
  ENST ID: ENST00000427714
  CDS Start-End: 30-1844
gtctgaggggaagttcgcgagcgctggctatgggtcctggggcgcggctggcggcgctgctggcggtgctggcgctcgggacaggagacccagaaagggctgcggctcggggcgacacgttctcggcgctgaccagcgtggcgcgcgccctggcgcccgagcgccggctgctggggctgctgaggcggtacctgcgcggggaggaggcgcggctgcgggacctgactagattctacgacaaggtactttctttgcatgaggattcaacaacccctgtggctaaccctctgcttgcatttactctcatcaaacgcctgcagtctgactggaggaatgtggtacatagtctggaggccagtgagaacatccgagctctgaaggatggctatgagaaggtggagcaagaccttccagcctttgaggaccttgagggagcagcaagggccctgatgcggctgcaggacgtgtacatgctcaatgtgaaaggcctggcccgaggtgtctttcagagagtcactggctctgccatcactgacctgtacagccccaaacggctcttttctctcacaggggatgactgcttccaagttggcaaggtggcctatgacatgggggattattaccatgccattccatggctggaggaggctgtcagtctcttccgaggatcttacggagagtggaagacagaggatgaggcaagtctagaagatgccttggatcacttggcctttgcttatttccgggcaggaaatgtttcgtgtgccctcagcctctctcgggagtttcttctctacagcccagataataagaggatggccaggaatgtcttgaaatatgaaaggctcttggcagagagccccaaccacgtggtagctgaggctgtcatccagaggcccaatataccccacctgcagaccagagacacctacgaggggctatgtcagaccctgggttcccagcccactctctaccagatccctagcctctactgttcctatgagaccaattccaacgcctacctgctgctccagcccatccggaaggaggtcatccacctggagccctacattgctctctaccatgacttcgtcagtgactcagaggctcagaaaattagagaacttgcagaaccatggctacagaggtcagtggtggcatcaggggagaagcagttacaagtggagtaccgcatcagcaaaagtgcctggctgaaggacactgttgacccaaaactggtgaccctcaaccaccgcattgctgccctcacaggccttgatgtccggcctccctatgcagagtatctgcaggtggtgaactatggcatcggaggacactatgagcctcactttgaccatgctacgtcaccaagcagccccctctacagaatgaagtcaggaaaccgagttgcaacatttatgatctatctgagctcggtggaagctggaggagccacagccttcatctatgccaacctcagcgtgcctgtggttaggcactgttttggtggaacctgcacaggagtggtgaaggggacagtgacacacttcatgctggctgtcctgtcctggtgggagataagtgggtggccaacaagtggatacatgagtatggacaggaattccgcagaccctgcagctccagccctgaagactgaactgttggcagagagaagctggtggagtcctgtggctttccagagaagccaggagccaaaagctggggtaggagaggagaaagcagagcagcctcctggaagaaggccttgtcagctttgtctgtgcctcgcaaatcagaggcaagggagaggttgttaccaggggacactgagaatgtacatttgatctgccccagccacggaagtcagagtaggatgcacagtacaaaggaggggggagtggaggcctgagagggaagtttctggagttcagatactctctgttgggaacaggacatctcaacagtctcaggttcgatcagtgggtcttttggcactttgaaccttgaccacagggaccaagaagtggcaatgaggacacctgcaggaggggctagcctgactcccagaactttaagactttctccccactgccttctgctgcagcccaagcagggagtgtccccctcccagaagcatatcccagatgagtggtacattatataaggattttttttaagttgaaaacaactttcttttctttttgtatgatggttttttaacacagtcattaaaaatgtttataaatca

SEQ ID NO: 169728 - DNA, 2045 bp, Homo sapiens
  Payload ID: 13416
  Gene Symbol: P4HA3
  Gene Name: prolyl 4-hydroxylase, alpha polypeptide III
  ENST ID: ENST00000525968
  CDS Start-End: 14-328
gcgagcgctggctatgggtcctggggcgcggctggcggcgctgctggcggtgctggcgctcgggacaggagacccagaaagggctgcggctcggggcgacacgttctcggcgctgaccagcgtggcgcgcgccctggcgcccgagcgccggctgctggggctgctgaggcggtacctgcgcggggaggaggcgcggctgcgggacctgactagattctacgacaaggtactttctttgcatgaggattcaacaacccctgtggctaaccctctgcttgcatttactctcatcaaacgcctgcagtctgactggaggaatgtgctctgaaggatggctatgagaaggtggagcaagaccttccagcctttgaggaccttgagggagcagcaagggccctgatgcggctgcaggacgtgtacatgctcaatgtgaaaggcctggcccgaggtgtctttcagagagtcactggctctgccatcactgacctgtacagccccaaacggctcttttctctcacaggggatgactgcttccaagttggcaaggtggcctatgacatgggggattattaccatgccattccatggctggaggaggctgtcagtctcttccgaggatcttacggagagtggaagacagaggatgaggcaagtctagaagatgccttggatcacttggcctttgcttatttccgggcaggaaatgtttcgtgtgccctcagcctctctcgggagtttcttctctacagcccagataataagaggatggccaggaatgtcttgaaatatgaaaggctcttggcagagagccccaaccacgtggtagctgaggctgtcatccagaggcccaatataccccacctgcagaccagagacacctacgaggggctatgtcagaccctgggttcccagcccactctctaccagatccctagcctctactgttcctatgagaccaattccaacgcctacctgctgctccagcccatccggaaggaggtcatccacctggagccctacattgctctctaccatgacttcgtcagtgactcagaggctcagaaaattagagaacttgcagaaccatggctacagaggtcagtggtggcatcaggggagaagcagttacaagtggagtaccgcatcagcaaaagtcaccaagcagccccctctacagaatgaagtcaggaaaccgagttgcaacatttatgatctatctgagctcggtggaagctggaggagccacagccttcatctatgccaacctcagcgtgcctgtggttaggaatgcagcactgttttggtggaacctgcacaggagtggtgaaggggacagtgacacacttcatgctggctgtcctgtcctggtgggagataagtgggtggccaacaagtggatacatgagtatggacaggaattccgcagaccctgcagctccagccctgaagactgaactgttggcagagagaagctggtggagtcctgtggctttccagagaagccaggagccaaaagctggggtaggagaggagaaagcagagcagcctcctggaagaaggccttgtcagctttgtctgtgcctcgcaaatcagaggcaagggagaggttgttaccaggggacactgagaatgtacatttgatctgccccagccacggaagtcagagtaggatgcacagtacaaaggaggggggagtggaggcctgagagggaagtttctggagttcagatactctctgttgggaacaggacatctcaacagtctcaggttcgatcagtgggtcttttggcactttgaaccttgaccacagggaccaagaagtggcaatgaggacacctgcaggaggggctagcctgactcccagaactttaagactttctccccactgccttctgctgcagcccaagcagggagtgtccccctcccagaagcatatcccagatgagtggtacattatataaggattttttttaagttgaaaacaactttcttttctttttgtatgatggttttttaacacagtcattaaaaatgtttataaatca

SEQ ID NO: 169729 - DNA, 549 bp, Homo sapiens
  Payload ID: 13416
  Gene Symbol: P4HA3
  Gene Name: prolyl 4-hydroxylase, alpha polypeptide III
  ENST ID: ENST00000532689
  CDS Start-End: 1-186
agcgtgcctgtggttaggaatgcagcactgttttggtggaacctgcacaggagtggtgaaggggacagtgacacacttcatgctggctgtcctgtcctggtgggagataagtgggtggccaacaagtggatacatgagtatggacaggaattccgcagaccctgcagctccagccctgaagactgaactgttggcagagagaagctggtggagtcctgtggctttccagagaagccaggagccaaaagctgggtcttgaaatgcaaataaggaaccacttcacacttcctaggatggatacaattaaaaaacagaaaataagtgtcactacggatgtgaagaaactggaactctcatgcgttgctggtgggaatgtgaaatggtgcagccactgtggaaaacagattggtgatttctcagaaagataaacatagaactgtcatctgacccagttattccactcccaggtatgtatctgaaagaatggaatgatagctgtacacccatggtcatagcagctttattcacaatcgtcaaaaggtggaagca

SEQ ID NO: 169730 - DNA, 2627 bp, Homo sapiens
  Payload ID: 13416
  Gene Symbol: P4HA3
  Gene Name: prolyl 4-hydroxylase, alpha polypeptide III
  Uniprot ID: Q7Z4N8
  ENST ID: ENST00000524388
  CDS Start-End: 21-794
gaagttcgcgagcgctggctatgggtcctggggcgcggctggcggcgctgctggcggtgctggcgctcgggacaggagacccagaaagggctgcggctcggggcgacacgttctcggcgctgaccagcgtggcgcgcgccctggcgcccgagcgccggctgctggggctgctgaggcggtacctgcgcggggaggaggcgcggctgcgggacctgactagattctacgacaaggtactttctttgcatgaggattcaacaacccctgtggctaaccctctgcttgcatttactctcatcaaacgcctgcagtctgactggaggaatgtggtacatagtctggaggccagtgagaacatccgagctctgaaggatggctatgagaaggtggagcaagaccttccagcctttgaggaccttgagggagcagcaagggccctgatgcggctgcaggacgtgtacatgctcaatgtgaaaggcctggcccgaggtgtctttcagagagtcactggctctgccatcactgacctgtacagccccaaacggctcttttctctcacaggggatgactgcttccaagttggcaaggtggcctatgacatgggggattattaccatgccattccatggctggaggaggctgtcagtctcttccgaggatcttacggagagtggaagacagaggatgaggcaagtctagaagatgccttggatcacttggcctttgcttatttccgggcaggaaatgtttcgtgtgccctcagcctctctcgggagtttcttctctacaggtgatggttgtggttagaagcacactgggctcctcagagaaagatgctttgggagcattagaacaattcagcatctccttctgagatgcattgagagtcatgcaaagaggccagcaggccacgggtagctctgccaatgcatggggcatcttgcagccaaagtgggtacaaacaggcccagataataagaggatggccaggaatgtcttgaaatatgaaaggctcttggcagagagccccaaccacgtggtagctgaggctgtcatccagaggcccaatataccccacctgcagaccagagacacctacgaggggctatgtcagaccctgggttcccagcccactctctaccagatccctagcctctactgttcctatgagaccaattccaacgcctacctgctgctccagcccatccggaaggaggtcatccacctggagccctacattgctctctaccatgacttcgtcagtgactcagaggctcagaaaattagagaacttgcagaaccatggctacagaggtcagtggtggcatcaggggagaagcagttacaagtggagtaccgcatcagcaaaagtgcctggctgaaggacactgttgacccaaaactggtgaccctcaaccaccgcattgctgccctcacaggccttgatgtccggcctccctatgcagagtatctgcaggtggtgaactatggcatcggaggacactatgagcctcactttgaccatgctacgtcaccaagcagccccctctacagaatgaagtcaggaaaccgagttgcaacatttatgatctatctgagctcggtggaagctggaggagccacagccttcatctatgccaacctcagcgtgcctgtggttaggaatgcagcactgttttggtggaacctgcacaggagtggtgaaggggacagtgacacacttcatgctggctgtcctgtcctggtgggagataagtgggtggccaacaagtggatacatgagtatggacaggaattccgcagaccctgcagctccagccctgaagactgaactgttggcagagagaagctggtggagtcctgtggctttccagagaagccaggagccaaaagctgggtcttgaaatgcaaataaggaaccacttcacacttcctaggatggatacaattaaaaaacagaaaataagtgtcactacggatgtgaagaaactggaactctcatgcgttgctggtgggaatgtgaaatggtgcagccactgtggaaaacagattggtgatttctcagaaagataaacatagaactgtcatctgacccagttattccactcccagattaagaagactaaagctgaggcaagtcagataacttgcccagagtcaaaaaattactggaaaagcagtattcaaaactcagttttccgaacttcagagaccttacttttaccatcttaccatgctgtcttctaaacaggtatttatacctttttatatctggattatcttgagcctttccctttcctaaaacttctaacaataagaaaaatactggccagctgcagtggctcacacctataatcttcgcactctgggaggccaaggcaggtggatcacttgaggtcaggagcttgagaccagcctggccaaaatggtgaaactccatctctactaaaaatacaaaaattagctgggcgtggtggtgcatgcctgtaatcccactactggggtgggtgaggcccggaactgcttcaacctgggaggtagaggttgcagtgagccgagattggtcccaccgcactccagcctgggcaacagagtgagactccaattcaaaaaaaaaaaaaaaaaaa

SEQ ID NO: 169731 - DNA, 2603 bp, Homo sapiens
  Payload ID: 13417
  Gene Symbol: P4HB
  Gene Name: prolyl 4-hydroxylase, beta polypeptide
  Uniprot ID: P07237
  ENST ID: ENST00000331483
  CDS Start-End: 224-1750
gtgtccaatccgagagcggcaaagacgagcctcgaagtccgccggccaatcgaaggcgggccccagcggcgcgtgcgcgccgcggccagcgcgcgcgggcgggggggcaggcgcgccccggacccaggatttataaaggcgaggccgggaccggcgcgcgctctcgtcgcccccgctgtcccggcggcgccaaccgaagcgccccgcctgatccgtgtccgacatgctgcgccgcgctctgctgtgcctggccgtggccgccctggtgcgcgccgacgcccccgaggaggaggaccacgtcctggtgctgcggaaaagcaacttcgcggaggcgctggcggcccacaagtacctgctggtggagttctatgccccttggtgtggccactgcaaggctctggcccctgagtatgccaaagccgctgggaagctgaaggcagaaggttccgagatcaggttggccaaggtggacgccacggaggagtctgacctggcccagcagtacggcgtgcgcggctatcccaccatcaagttcttcaggaatggagacacggcttcccccaaggaatatacagctggcagagaggctgatgacatcgtgaactggctgaagaagcgcacgggcccggctgccaccaccctgcctgacggcgcagctgcagagtccttggtggagtccagcgaggtggctgtcatcggcttcttcaaggacgtggagtcggactctgccaagcagtttttgcaggcagcagaggccatcgatgacataccatttgggatcacttccaacagtgacgtgttctccaaataccagctcgacaaagatggggttgtcctctttaagaagtttgatgaaggccggaacaactttgaaggggaggtcaccaaggagaacctgctggactttatcaaacacaaccagctgccccttgtcatcgagttcaccgagcagacagccccgaagatttttggaggtgaaatcaagactcacatcctgctgttcttgcccaagagtgtgtctgactatgacggcaaactgagcaacttcaaaacagcagccgagagcttcaagggcaagatcctgttcatcttcatcgacagcgaccacaccgacaaccagcgcatcctcgagttctttggcctgaagaaggaagagtgcccggccgtgcgcctcatcaccctggaggaggagatgaccaagtacaagcccgaatcggaggagctgacggcagagaggatcacagagttctgccaccgcttcctggagggcaaaatcaagccccacctgatgagccaggagctgccggaggactgggacaagcagcctgtcaaggtgcttgttgggaagaactttgaagacgtggcttttgatgagaaaaaaaacgtctttgtggagttctatgccccatggtgtggtcactgcaaacagttggctcccatttgggataaactgggagagacgtacaaggaccatgagaacatcgtcatcgccaagatggactcgactgccaacgaggtggaggccgtcaaagtgcacagcttccccacactcaagttctttcctgccagtgccgacaggacggtcattgattacaacggggaacgcacgctggatggttttaagaaattcctggagagcggtggccaggatggggcaggggatgatgacgatctcgaggacctggaagaagcagaggagccagacatggaggaagacgatgatcagaaagctgtgaaagatgaactgtaatacgcaaagccagacccgggcgctgccgagacccctcgggggctgcacacccagcagcagcgcacgcctccgaagcctgcggcctcgcttgaaggagggcgtcgccggaaacccagggaacctctctgaagtgacacctcacccctacacaccgtccgttcacccccgtctcttccttctgcttttcggtttttggaaagggatccatctccaggcagcccaccctggtggggcttgtttcctgaaaccatgatgtactttttcatacatgagtctgtccagagtgcttgctaccgtgttcggagtctcgctgcctccctcccgcgggaggtttctcctctttttgaaaattccgtctgtgggatttttagacatttttcgacatcagggtatttgttccaccttggccaggcctcctcggagaagcttgtcccccgtgtgggagggacggagccggactggacatggtcactcagtaccgcctgcagtgtcgccatgactgatcatggctcttgcatttttgggtaaatggagacttccggatcctgtcagggtgtcccccatgcctggaagaggagctggtggctgccagccctggggcccggcacaggcctgggccttccccttccctcaagccagggctcctcctcctgtcgtgggctcattgtgaccactggcctctctacagcacggcctgtggcctgttcaaggcagaaccacgacccttgactcccgggtggggaggtggccaaggatgctggagctgaatcagacgctgacagttcttcaggcatttctatttcacaatcgaattgaacacattggccaaataaagttgaaattttaccacctg

SEQ ID NO: 169732 - DNA, 1669 bp, Homo sapiens
  Payload ID: 13417
  Gene Symbol: P4HB
  Gene Name: prolyl 4-hydroxylase, beta polypeptide
  ENST ID: ENST00000415593
  CDS Start-End: 1-823
ctttgaaggggaggtcaccaaggagaacctgctggactttatcaaacacaaccagctgccccttgtcatcgagttcaccgagcagagtgtgtctgactatgacggcaaactgagcaacttcaaaacagcagccgagagcttcaagggcaagatcctgttcatcttcatcgacagcgaccacaccgacaaccagcgcatcctcgagttctttggcctgaagaaggaagagtgcccggccgtgcgcctcatcaccctggaggaggagatgaccaagtacaagcccgaatcggaggagctgacggcagagaggatcacagagttctgccaccgcttcctggagggcaaaatcaagccccacctgatgagccaggagctgccggaggactgggacaagcagcctgtcaaggtgcttgttgggaagaactttgaagacgtggcttttgatgagaaaaaaaacgtctttgtggagttctatgccccatggtgtggtcactgcaaacagttggctcccatttgggataaactgggagagacgtacaaggaccatgagaacatcgtcatcgccaagatggactcgactgccaacgaggtggaggccgtcaaagtgcacagcttccccacactcaagttctttcctgccagtgccgacaggacggtcattgattacaacggggaacgcacgctggatggttttaagaaattcctggagagcggtggccaggatggggcaggggatgatgacgatctcgaggacctggaagaagcagaggagccagacatggaggaagacgatgatcagaaagctgtgaaagatgaactgtaatacgcaaagccagacccgggcgctgccgagacccctcgggggctgcacacccagcagcagcgcacgcctccgaagcctgcggcctcgcttgaaggagggcgtcgccggaaacccagggaacctctctgaagtgacacctcacccctacacaccgtccgttcacccccgtctcttccttctgcttttcggtttttggaaagggatccatctccaggcagcccaccctggtggggcttgtttcctgaaaccatgatgtactttttcatacatgagtctgtccagagtgcttgctaccgtgttcggagtctcgctgcctccctcccgcgggaggtttctcctctttttgaaaattccgtctgtgggatttttagacatttttcgacatcagggtatttgttccaccttggccaggcctcctcggagaagcttgtcccccgtgtgggagggacggagccggactggacatggtcactcagtaccgcctgcagtgtcgccatgactgatcatggctcttgcatttttgggtaaatggagacttccggatcctgtcagggtgtcccccatgcctggaagaggagctggtggctgccagccctggggcccggcacaggcctgggccttccccttccctcaagccagggctcctcctcctgtcgtgggctcattgtgaccactggcctctctacagcacggcctgtggcctgttcaaggcagaaccacgacccttgactcccgggtggggaggtggccaaggatgctggagctgaatcagacgctgacagttcttcaggcatttctatttcacaatcgaattgaacacattggccaaataaagttgaaatttta

SEQ ID NO: 169733 - DNA, 1502 bp, Homo sapiens
  Payload ID: 13417
  Gene Symbol: P4HB
  Gene Name: prolyl 4-hydroxylase, beta polypeptide
  ENST ID: ENST00000439918
  CDS Start-End: 90-1484
aaaggcgaggccgggaccggcgcgcgctctcgtcgcccccgctgtcccggcggcgccaaccgaagcgccccgcctgatccgtgtccgacatgctgcgccgcgctctgctgtgcctggccgtggccgccctggtgcgcgccgacgcccccgaggaggaggaccacgtcctggtgctgcggaaaagcaacttcgcggaggcgctggcggcccacaagtacctgctggtggagttctatgccccttggtgtggccactgcaaggctctggcccctgagtatgccaaagccgctgggaagctgaaggcagaaggttccgagatcaggttggccaaggtggacgccacggaggagtctgacctggcccagcagtacggcgtgcgcggctatcccaccatcaagttcttcaggaatggagacacggcttcccccaaggaatatacaggtgacgtggagtcggactctgccaagcagtttttgcaggcagcagaggccatcgatgacataccatttgggatcacttccaacagtgacgtgttctccaaataccagctcgacaaagatggggttgtcctctttaagaagtttgatgaaggccggaacaactttgaaggggaggtcaccaaggagaacctgctggactttatcaaacacaaccagctgccccttgtcatcgagttcaccgagcagacagccccgaagatttttggaggtgaaatcaagactcacatcctgctgttcttgcccaagagtgtgtctgactatgacggcaaactgagcaacttcaaaacagcagccgagagcttcaagggcaagatcctgttcatcttcatcgacagcgaccacaccgacaaccagcgcatcctcgagttctttggcctgaagaaggaagagtgcccggccgtgcgcctcatcaccctggaggaggagatgaccaagtacaagcccgaatcggaggagctgacggcagagaggatcacagagttctgccaccgcttcctggagggcaaaatcaagccccacctgatgagccaggagctgccggaggactgggacaagcagcctgtcaaggtgcttgttgggaagaactttgaagacgtggcttttgatgagaaaaaaaacgtctttgtggagttctatgccccatggtgtggtcactgcaaacagttggctcccatttgggataaactgggagagacgtacaaggaccatgagaacatcgtcatcgccaagatggactcgactgccaacgaggtggaggccgtcaaagtgcacagcttccccacactcaagttctttcctgccagtgccgacaggacggtcattgattacaacggggaacgcacgctggatggttttaagaaattcctggagagcggtggccaggatggggcaggggatgatgacgatctcgaggacctggaagaagcagaggagccagacatggaggaagacgatgatcagaaagctgtgaaagatgaactgtaatacgcaaagccagacccg

SEQ ID NO: 169734 - DNA, 505 bp, Homo sapiens
  Payload ID: 13417
  Gene Symbol: P4HB
  Gene Name: prolyl 4-hydroxylase, beta polypeptide
  ENST ID: ENST00000571617
  CDS Start-End: 62-505
ctcgtcgcccccgctgtcccggcggcgccaaccgaagcgccccgcctgatccgtgtccgacatgctgcgccgcgctctgctgtgcctggccgtggccgccctggtgcgcgccgacgcccccgaggaggaggaccacgtcctggtgctgcggaaaagcaacttcgcggaggcgctggcggcccacaagtacctgctggtggagttctatgccccttggtgtggccactgcaaggctctggcccctgagtatgccaaagccgctgggaagctgaaggcagaaggttccgagatcaggttggccaagatggactcgactgccaacgaggtggaggccgtcaaagtgcacagcttccccacactcaagttctttcctgccagtgccgacaggacggtcattgattacaacggggaacgcacgctggatggttttaagaaattcctggagagcggtggccaggatggggcaggggatgatgacgatctcgaggacctggaagaagcagag

SEQ ID NO: 169735 - DNA, 2453 bp, Homo sapiens
  Payload ID: 13417
  Gene Symbol: P4HB
  Gene Name: prolyl 4-hydroxylase, beta polypeptide
  ENST ID: ENST00000575069
  CDS Start-End: 96-260
atttataaaggcgaggccgggaccggcgcgcgctctcgtcgcccccgctgtcccggcggcgccaaccgaagcgccccgcctgatccgtgtccgacatgctgcgccgcgctctgctgtgcctggccgtggccgccctggtgcgcgccgacgcccccgaggaggaggaccacgtcctggtgctgcggaaaagcaacttcgcggaggcgctggcggcccacaaatgccccttggtgtggccactgcaaggctctggcccctgagtatgccaaagccgctgggaagctgaaggcagaaggttccgagatcaggttggccaaggtggacgccacggaggagtctgacctggcccagcagtacggcgtgcgcggctatcccaccatcaagttcttcaggaatggagacacggcttcccccaaggaatatacagctggcagagaggctgatgacatcgtgaactggctgaagaagcgcacgggcccggctgccaccaccctgcctgacggcgcagctgcagagtccttggtggagtccagcgaggtggctgtcatcggcttcttcaaggacgtggagtcggactctgccaagcagtttttgcaggcagcagaggccatcgatgacataccatttgggatcacttccaacagtgacgtgttctccaaataccagctcgacaaagatggggttgtcctctttaagaagtttgatgaaggccggaacaactttgaaggggaggtcaccaaggagaacctgctggactttatcaaacacaaccagctgccccttgtcatcgagttcaccgagcagacagccccgaagatttttggaggtgaaatcaagactcacatcctgctgttcttgcccaagagtgtgtctgactatgacggcaaactgagcaacttcaaaacagcagccgagagcttcaagggcaagatcctgttcatcttcatcgacagcgaccacaccgacaaccagcgcatcctcgagttctttggcctgaagaaggaagagtgcccggccgtgcgcctcatcaccctggaggaggagatgaccaagtacaagcccgaatcggaggagctgacggcagagaggatcacagagttctgccaccgcttcctggagggcaaaatcaagccccacctgatgagccaggagctgccggaggactgggacaagcagcctgtcaaggtgcttgttgggaagaactttgaagacgtggcttttgatgagaaaaaaaacgtctttgtggagttctatgccccatggtgtggtcactgcaaacagttggctcccatttgggataaactgggagagacgtacaaggaccatgagaacatcgtcatcgccaagatggactcgactgccaacgaggtggaggccgtcaaagtgcacagcttccccacactcaagttctttcctgccagtgccgacaggacggtcattgattacaacggggaacgcacgctggatggttttaagaaattcctggagagcggtggccaggatggggcaggggatgatgacgatctcgaggacctggaagaagcagaggagccagacatggaggaagacgatgatcagaaagctgtgaaagatgaactgtaatacgcaaagccagacccgggcgctgccgagacccctcgggggctgcacacccagcagcagcgcacgcctccgaagcctgcggcctcgcttgaaggagggcgtcgccggaaacccagggaacctctctgaagtgacacctcacccctacacaccgtccgttcacccccgtctcttccttctgcttttcggtttttggaaagggatccatctccaggcagcccaccctggtggggcttgtttcctgaaaccatgatgtactttttcatacatgagtctgtccagagtgcttgctaccgtgttcggagtctcgctgcctccctcccgcgggaggtttctcctctttttgaaaattccgtctgtgggatttttagacatttttcgacatcagggtatttgttccaccttggccaggcctcctcggagaagcttgtcccccgtgtgggagggacggagccggactggacatggtcactcagtaccgcctgcagtgtcgccatgactgatcatggctcttgcatttttgggtaaatggagacttccggatcctgtcagggtgtcccccatgcctggaagaggagctggtggctgccagccctggggcccggcacaggcctgggccttccccttccctcaagccagggctcctcctcctgtcgtgggctcattgtgaccactggcctctctacagcacggcctgtggcctgttcaaggcagaaccacgacccttgactcccgggtggggaggtggccaaggatgctggagctgaatcagacgctgacagttcttcaggcatttctatttcacaatcgaattgaacacattggccaaataaagttgaaattttaccacc

SEQ ID NO: 169736 - DNA, 688 bp, Homo sapiens
  Payload ID: 13417
  Gene Symbol: P4HB
  Gene Name: prolyl 4-hydroxylase, beta polypeptide
  ENST ID: ENST00000573778
  CDS Start-End: 65-688
gctctcgtcgcccccgctgtcccggcggcgccaaccgaagcgccccgcctgatccgtgtccgacatgctgcgccgcgctctgctgtgcctggccgtggccgccctggtgcgcgccgacgcccccgaggaggaggaccacgtcctggtgctgcggaaaagcaacttcgcggaggcgctggcggcccacaagtacctgctggtggagttctctggcagagaggctgatgacatcgtgaactggctgaagaagcgcacgggcccggctgccaccaccctgcctgacggcgcagctgcagagtccttggtggagtccagcgaggtggctgtcatcggcttcttcaaggacgtggagtcggactctgccaagcagtttttgcaggcagcagaggccatcgatgacataccatttgggatcacttccaacagtgacgtgttctccaaataccagctcgacaaagatggggttgtcctctttaagaagtttgatgaaggccggaacaactttgaaggggaggtcaccaaggagaacctgctggactttatcaaacacaaccagctgccccttgtcatcgagttcaccgagcagacagccccgaagatttttggaggtgaaatcaagactcacatcctgctgttcttgcccaagagtgtgtctgactatgacggcaaactgagcaacttcaaaaca

SEQ ID NO: 169737 - DNA, 943 bp, Homo sapiens
  Payload ID: 13417
  Gene Symbol: P4HB
  Gene Name: prolyl 4-hydroxylase, beta polypeptide
  ENST ID: ENST00000576380
  CDS Start-End: 343-943
ccggcggcgccaaccgaagcgccccgcctgatccgtgtccgacatgctgcgccgcgctctgctgtgcctggccgtggccgccctggtgcgcgccgacgcccccgaggaggaggaccacgtcctggtgctgcggaaaagcaacttcgcggaggcgctggcggcccacaaatgccccttggtgtggccactgcaaggctctggcccctgagtatgccaaagccgctgggaagctgaaggcagaaggttccgagatcaggttggccaaggtggacgccacggaggagtctgacctggcccagcagtacggcgtgcgcggctatcccaccatcaagttcttcaggaatggagacacggcttcccccaaggaatatacaggacgtggagtcggactctgccaagcagtttttgcaggcagcagaggccatcgatgacataccatttgggatcacttccaacagtgacgtgttctccaaataccagctcgacaaagatggggttgtcctctttaagaagtttgatgaaggccggaacaactttgaaggggaggtcaccaaggagaacctgctggactttatcaaacacaaccagctgccccttgtcatcgagttcaccgagcagacagccccgaagatttttggaggtgaaatcaagactcacatcctgctgttcttgcccaagagtgtgtctgactatgacggcaaactgagcaacttcaaaacagcagccgagagcttcaagggcaagatcctgttcatcttcatcgacagcgaccacaccgacaaccagcgcatcctcgagttctttggcctgaagaaggaagagtgcccggccgtgcgcctcatcaccctggaggaggagatgaccaagtacaagcccgaatcggaggagctgacggcagagaggatcacagagttctgccaccgcttcctggagggcaaaatca

SEQ ID NO: 169738 - DNA, 571 bp, Homo sapiens
  Payload ID: 13417
  Gene Symbol: P4HB
  Gene Name: prolyl 4-hydroxylase, beta polypeptide
  ENST ID: ENST00000574914
  CDS Start-End: 103-571
acccaggatttataaaggcgaggccgggaccggcgcgcgctctcgtcgcccccgctgtcccggcggcgccaaccgaagcgccccgcctgatccgtgtccgacatgctgcgccgcgctctgctgtgcctggccgtggccgccctggtgcgcgccgacgcccccgaggaggaggaccacgtcctggtgctgcggaaaagcaacttcgcggaggcgctggcggcccacaagtacctgctggtggacgccacggaggagtctgacctggcccagcagtacggcgtgcgcggctatcccaccatcaagttcttcaggaatggagacacggcttcccccaaggaatatacagctggcagagaggctgatgacatcgtgaactggctgaagaagcgcacgggcccggctgccaccaccctgcctgacggcgcagctgcagagtccttggtggagtccagcgaggtggctgtcatcggcttcttcaaggacgtggagtcggactctgccaagcagtttttgcaggcagcagaggccatcgatgacataccatttgggatcacttccaacagtgacgtgt

SEQ ID NO: 169739 - DNA, 571 bp, Homo sapiens
  Payload ID: 13417
  Gene Symbol: P4HB
  Gene Name: prolyl 4-hydroxylase, beta polypeptide
  ENST ID: ENST00000576541
  CDS Start-End: 8-571
gtccgacatgctgcgccgcgctctgctgtgcctggccgtggccgccctggtgcgcgccgacgcccccgaggaggaggaccacgtcctggtgctgcggaaaagcaacttcgcggaggcgctggcggcccacaagtacctgctggtggagttctatgccccttggtgtggccactgcaaggctctggcccctgagtatgccaaagccgctgggaagctgaaggcagaaggttccgagatcaggttggccaaggtggacgccacggaggagtctgacctggcccagcagtacggcgtgcgcggctatcccaccatcaagttcttcaggaatggagacacggcttcccccaaggaatatacagctgcagagtccttggtggagtccagcgaggtggctgtcatcggcttcttcaaggacgtggagtcggactctgccaagcagtttttgcaggcagcagaggccatcgatgacataccatttgggatcacttccaacagtgacgtgttctccaaataccagctcgacaaagatggggttgtcctctttaagaagtttgatgaaggccggaacaac

SEQ ID NO: 169740 - DNA, 353 bp, Homo sapiens
  Payload ID: 13417
  Gene Symbol: P4HB
  Gene Name: prolyl 4-hydroxylase, beta polypeptide
  ENST ID: ENST00000570907
  CDS Start-End: 3-353
gaatggagacacggcttcccccaaggaatatacagtttgatgaaggccggaacaactttgaaggggaggtcaccaaggagaacctgctggactttatcaaacacaaccagctgccccttgtcatcgagttcaccgagcagacagccccgaagatttttggaggtgaaatcaagactcacatcctgctgttcttgcccaagagtgtgtctgactatgacggcaaactgagcaacttcaaaacagcagccgagagcttcaagggcaagatcctgttcatcttcatcgacagcgaccacaccgacaaccagcgcatcctcgagttctttggcctgaagaaggaagagtgcccggcc

SEQ ID NO: 169741 - DNA, 439 bp, Homo sapiens
  Payload ID: 13417
  Gene Symbol: P4HB
  Gene Name: prolyl 4-hydroxylase, beta polypeptide
  ENST ID: ENST00000576390
  CDS Start-End: 65-385
gctctcgtcgcccccgctgtcccggcggcgccaaccgaagcgccccgcctgatccgtgtccgacatgctgcgccgcgctctgctgtgcctggccgtggccgccctggtgcgcgccgacgcccccgaggaggaggaccacgtcctggtgctgcggaaaagcaacttcgcggaggcgctggcggcccacaagtacctgctggtggagttctatgccccttggtgtggccactgcaaggctctggcccctgagtatgccaaagccgctgggaagctgaaggcagaaggttccgagatcaggcctcctcggagaagcttgtcccccgtgtgggagggacggagccggactggacatggtcactcagtaccgcctgcagtgtcgccatgactgatcatggctcttgcatttttgggtaaatggagacttccggatcctgtcagg

SEQ ID NO: 169742 - DNA, 562 bp, Homo sapiens
  Payload ID: 13417
  Gene Symbol: P4HB
  Gene Name: prolyl 4-hydroxylase, beta polypeptide
  ENST ID: ENST00000576052
  CDS Start-End: 63-562
tctcgtcgcccccgctgtcccggcggcgccaaccgaagcgccccgcctgatccgtgtccgacatgctgcgccgcgctctgctgtgcctggccgtggccgccctggtgcgcgccgacgcccccgaggaggaggaccacgtcctggtgctgcggaaaagcaacttcgcggaggcgctggcggcccacaagtacctgctggtggagttctatgccccttggtgtggccactgcaaggctctggcccctgagtatgccaaagccgctgggaagctgaaggcagaaggttccgagatcaggttggccaaggtggacgccacggaggagtctgacctggcccagcagtacggcgtgcgcggctatcccaccatcaagttcttcaggaatggagacacggcttcccccaaggaatatacaggttttgatgaaggccggaacaactttgaaggggaggtcaccaaggagaacctgctggactttatcaaacacaaccagctgccccttgtcatcgagttcaccgagcagacagccccgaagatttttggaggtgaaatcaagactcacat

SEQ ID NO: 169743 - DNA, 2268 bp, Homo sapiens
  Payload ID: 13418
  Gene Symbol: P4HTM
  Gene Name: prolyl 4-hydroxylase, transmembrane (endoplasmic reticulum)
  Uniprot ID: Q9NXG6
  ENST ID: ENST00000343546
  CDS Start-End: 369-2060
gatacttttcccggaggcaagagggcgtcttcacgcaggcaccgagaagctcccactagtgtatgccttaatggtgccgctcttgtccgcgtctacgcttgggaccttggcttctgacttggagagtgtacagctctgcccgacggcaacccagcttgggaagagaagccccagcgtgggctggggctcaaggcgcaggaaggccgagcccggcgcggacgcaggcggctccgggcgggctcagcacccccaggcaccgtctcctagtgaccgcggcgctcgcgggcctggcggccgttgtccgggcgactgcgcagcgcgggcacccccgcggcccctcccctgggcgcgcgcgcgacctgggtgccatggcggcagcggcggtgacaggccagcggcctgagaccgcggcggccgaggaggcctcgaggccgcagtgggcgccgccagaccactgccaggctcaggcggcggccgggctgggcgacggcgaggacgcaccggtgcgtccgctgtgcaagccccgcggcatctgctcgcgcgcctacttcctggtgctgatggtgttcgtgcacctgtacctgggtaacgtgctggcgctgctgctcttcgtgcactacagcaacggcgacgaaagcagcgatcccgggccccaacaccgtgcccagggccccgggcccgagcccaccttaggtcccctcacccggctggagggcatcaaggtggggcacgagcgtaaggtccagctggtcaccgacagggatcacttcatccgaaccctcagcctcaagccgctgctcttcgaaatccccggcttcctgactgatgaagagtgtcggctcatcatccatctggcgcagatgaaggggttacagcgcagccagatcctgcctactgaagagtatgaagaggcaatgagcactatgcaggtcagccagctggacctcttccggctgctggaccagaaccgtgatgggcaccttcagctccgtgaggttctggcccagactcgcctgggaaatggatggtggatgactccagagagcattcaggagatgtacgccgcgatcaaggctgaccctgatggtgacggagtgctgagtctgcaggagttctccaacatggaccttcgggacttccacaagtacatgaggagccacaaggcagagtccagtgagctggtgcggaacagccaccatacctggctctaccagggtgagggtgcccaccacatcatgcgtgccatccgccagagggtgctgcgcctcactcgcctgtcgcctgagatcgtggagctcagcgagccgctgcaggttgttcgatatggtgaggggggccactaccatgcccacgtggacagtgggcctgtgtacccagagaccatctgctcccataccaagctggtagccaacgagtctgtacccttcgagacctcctgccggcaagtatctcccaactgggggctgccttcaatcctcagaccaggaacacccatgacacaggcacagccctgcactgtgggcgtgccccttggcatggggccaggagatcactgggttatcccggtaagcccctgggagcatccacaactggggacctgctcagtgccccccctgccttacagctacatgacagtgctgttttatttgaacaacgtcactggtgggggcgagactgttttccctgtagcagataacagaacctacgatgaaatgagtctgattcaggatgacgtggacctccgtgacacacggaggcactgtgacaagggaaacctgcgtgtcaagccccaacagggcacagcagtcttctggtacaactacctgcctgatgggcaaggttgggtgggtgacgtagacgactactcgctgcacgggggctgcctggtcacgcgcggcaccaagtggattgccaacaactggattaatgtggaccccagccgagcgcggcaagcgctgttccaacaggagatggcccgccttgcccgagaagggggcaccgactcacagcccgagtgggctctggaccgggcctaccgcgatgcgcgcgtggaactctgagggaagagttagccccggttcccagccgcgggtcgccagttgcccaagatcaggggtccggctgtccttctgtcctgctgcagactaaaggtctggccaatgtcttgccccaccccgccagccgcgatacggcgcagttcctatattcatgttatttattgtgtactgactccatctgccccgtcaaataaaaaaccacaaggttcga

SEQ ID NO: 169744 - DNA, 2127 bp, Homo sapiens
  Payload ID: 13418
  Gene Symbol: P4HTM
  Gene Name: prolyl 4-hydroxylase, transmembrane (endoplasmic reticulum)
  Uniprot ID: Q9NXG6
  ENST ID: ENST00000383729
  CDS Start-End: 372-1880
gacgatacttttcccggaggcaagagggcgtcttcacgcaggcaccgagaagctcccactagtgtatgccttaatggtgccgctcttgtccgcgtctacgcttgggaccttggcttctgacttggagagtgtacagctctgcccgacggcaacccagcttgggaagagaagccccagcgtgggctggggctcaaggcgcaggaaggccgagcccggcgcggacgcaggcggctccgggcgggctcagcacccccaggcaccgtctcctagtgaccgcggcgctcgcgggcctggcggccgttgtccgggcgactgcgcagcgcgggcacccccgcggcccctcccctgggcgcgcgcgcgacctgggtgccatggcggcagcggcggtgacaggccagcggcctgagaccgcggcggccgaggaggcctcgaggccgcagtgggcgccgccagaccactgccaggctcaggcggcggccgggctgggcgacggcgaggacgcaccggtgcgtccgctgtgcaagccccgcggcatctgctcgcgcgcctacttcctggtgctgatggtgttcgtgcacctgtacctgggtaacgtgctggcgctgctgctcttcgtgcactacagcaacggcgacgaaagcagcgatcccgggccccaacaccgtgcccagggccccgggcccgagcccaccttaggtcccctcacccggctggagggcatcaaggtggggcacgagcgtaaggtccagctggtcaccgacagggatcacttcatccgaaccctcagcctcaagccgctgctcttcgaaatccccggcttcctgactgatgaagagtgtcggctcatcatccatctggcgcagatgaaggggttacagcgcagccagatcctgcctactgaagagtatgaagaggcaatgagcactatgcaggtcagccagctggacctcttccggctgctggaccagaaccgtgatgggcaccttcagctccgtgaggttctggcccagactcgcctgggaaatggatggtggatgactccagagagcattcaggagatgtacgccgcgatcaaggctgaccctgatggtgacggagtgctgagtctgcaggagttctccaacatggaccttcgggacttccacaagtacatgaggagccacaaggcagagtccagtgagctggtgcggaacagccaccatacctggctctaccagggtgagggtgcccaccacatcatgcgtgccatccgccagagggtgctgcgcctcactcgcctgtcgcctgagatcgtggagctcagcgagccgctgcaggttgttcgatatggtgaggggggccactaccatgcccacgtggacagtgggcctgtgtacccagagaccatctgctcccataccaagctggtagccaacgagtctgtacccttcgagacctcctgccgctacatgacagtgctgttttatttgaacaacgtcactggtgggggcgagactgttttccctgtagcagataacagaacctacgatgaaatgagtctgattcaggatgacgtggacctccgtgacacacggaggcactgtgacaagggaaacctgcgtgtcaagccccaacagggcacagcagtcttctggtacaactacctgcctgatgggcaaggttgggtgggtgacgtagacgactactcgctgcacgggggctgcctggtcacgcgcggcaccaagtggattgccaacaactggattaatgtggaccccagccgagcgcggcaagcgctgttccaacaggagatggcccgccttgcccgagaagggggcaccgactcacagcccgagtgggctctggaccgggcctaccgcgatgcgcgcgtggaactctgagggaagagttagccccggttcccagccgcgggtcgccagttgcccaagatcaggggtccggctgtccttctgtcctgctgcagactaaaggtctggccaatgtcttgccccaccccgccagccgcgatacggcgcagttcctatattcatgttatttattgtgtactgactccatctgccccgtcaaataaaaaaccacaaggttcgagccgccgggcccgacaaactccgggtcggcgaaacagag

SEQ ID NO: 169745 - DNA, 678 bp, Homo sapiens
  Payload ID: 13418
  Gene Symbol: P4HTM
  Gene Name: prolyl 4-hydroxylase, transmembrane (endoplasmic reticulum)
  ENST ID: ENST00000444213
  CDS Start-End: 1-678
gtgcaagccccgcggcatctgctcgcgcgcctacttcctggtgctgatggtgttcgtgcacctgtacctgggtaacgtgctggcgctgctgctcttcgtgcactacagcaacggcgacgaaagcagcgatcccgggccccaacaccgtgcccagggccccgggcccgagcccaccttaggtcccctcacccggctggagggcatcaaggtggggcacgagcgtaaggtccagctggtcaccgacagggatcacttcatccgaaccctcagcctcaagccgctgctcttcgaaatccccggcttcctgactgatgaagagtgtcggctcatcatccatctggcgcagatgaaggggttacagcgcagccagatcctgcctactgaagagtatgaagaggcaatgagcactatgcaggttctggcccagactcgcctgggaaatggatggtggatgactccagagagcattcaggagatgtacgccgcgatcaaggctgaccctgatggtgacggagtgctgagtctgcaggagttctccaacatggaccttcgggacttccacaagtacatgaggagccacaaggcagagtccagtgagctggtgcggaacagccaccatacctggctctaccagggtgagggtgcccaccacatcatgcgtgccatccgccagaggtg

SEQ ID NO: 169746 - DNA, 681 bp, Homo sapiens
  Payload ID: 13418
  Gene Symbol: P4HTM
  Gene Name: prolyl 4-hydroxylase, transmembrane (endoplasmic reticulum)
  ENST ID: ENST00000491739
  CDS Start-End: 1-473
tcatcatccatctggcgcagatgaaggggttacagcgcagccagatcctgcctactgaagagtatgaagaggcaatgagcactatgcaggtcagccagctggacctcttccggctgctggaccagaaccgtgatgggcaccttcagctccgtgaggttctggcccagactcgcctgggaaatggatggtggatgactccagagagcattcaggagatgtacgccgcgatcaaggctgaccctgatggtgacggttgggtgggtgacgtagacgactactcgctgcacgggggctgcctggtcacgcgcggcaccaagtggattgccaacaactggattaatgtggaccccagccgagcgcggcaagcgctgttccaacaggagatggcccgccttgcccgagaagggggcaccgactcacagcccgagtgggctctggaccgggcctaccgcgatgcgcgcgtggaactctgagggaagagttagccccggttcccagccgcgggtcgccagttgcccaagatcaggggtccggctgtccttctgtcctgctgcagactaaaggtctggccaatgtcttgccccaccccgccagccgcgatacggcgcagttcctatattcatgttatttattgtgtactgactccatctgccccgtcaaataaaaaaccacaaggttcga

SEQ ID NO: 169747 - DNA, 598 bp, Homo sapiens
  Payload ID: 13418
  Gene Symbol: P4HTM
  Gene Name: prolyl 4-hydroxylase, transmembrane (endoplasmic reticulum)
  ENST ID: ENST00000472796
  CDS Start-End: 1-267
gaggttctggcccagactcgcctgggaaatggatggtggatgactccagagagcattcaggagatgtacgccgcgatcaaggctgaccctgatggtgacggagtgctgagtctgcaggagttctccaacatggaccttcgggacttccacaagtacatgaggagccacaaggcagagtccagtgagctggtgcggaacagccaccatacctggctctaccagggtgagggtgcccaccacatcatgcgtgccatccgccagaggtgagcacctgaagctgttctcactggagcagggggagaagactgggcagggcctccacagaagtccttgtctggggccaagaggacagaatggattaacccatttgggattaagttccatttgttagaccaggattgggacccactgaaagacaggcaattaacaaaggcaaattagccctccttgcaggcacacaatgggcaactggggttagatagagattgagcacttctttctgattagataaatgacctcttatctttgaccccttatctgaccccgtcacagcaggaaaagggtttttaaataaacaactttcttccagggaggagga

SEQ ID NO: 169748 - DNA, 651 bp, Homo sapiens
  Payload ID: 13418
  Gene Symbol: P4HTM
  Gene Name: prolyl 4-hydroxylase, transmembrane (endoplasmic reticulum)
  ENST ID: ENST00000475629
  CDS Start-End: 1-420
gaccactgccaggctcaggcggcggccgggctgggcgacggcgaggacgcaccggtgcgtccgctgtgcaagccccgcggcatctgctcgcgcgcctacttcctggtgctgatggtgttcgtgcacctgtacctgggtaacgtgctggcgctgctgctcttcgtgcactacagcaacggcgacgaaagcagcgatcccgggccccaacaccgtgcccagggccccgggcccgagcccaccttaggtcccctcacccggctggagggcatcaaggtggggcacgagcgtaaggtccagctggtcaccgacagggatcacttcatccgaaccctcagcctcaagccgctgctcttcgcatcaccagtgtcaccagcagccacagcccctgctccatcactgccttctgtgccttggccttaatgaactgaggttgagggttttatagggctgttcctgcacccagggagccaacagaggagatcctgcaggggtttgcacagctccgaggtgcccggacccacctggtgaggccccaacatgctgactgggctgtttgtttttgattagcacacagcaggggactgtagaggctggaggcacctccactgggcttgcagattactggcacctaataaactgaagaaacctggg

SEQ ID NO: 169749 - DNA, 2905 bp, Homo sapiens
  Payload ID: 13419
  Gene Symbol: PREP
  Gene Name: prolyl endopeptidase
  Uniprot ID: P48147
  ENST ID: ENST00000369110
  CDS Start-End: 194-2326
ctgctttctgcacgtcctcgccgccgcgccgccagtccgtttgtgctagctctggccgtgagccggccgcccgctgccgccggccgccccgcagctgcctgcgccccagccgcgcctcgcggccagcccggctagctcaggtccgctcccggagcccgcgcccctccacgctgccccctgcctgtccccggccatgctgtcccttcagtaccccgacgtgtaccgcgacgagaccgccgtacaggattatcatggtcataaaatttgtgacccttacgcctggcttgaagaccccgacagtgaacagactaaggcctttgtggaggcccagaataagattactgtgccatttcttgagcagtgtcccatcagaggtttatacaaagagagaatgactgaactatatgattatcccaagtatagttgccacttcaagaaaggaaaacggtatttttatttttacaatacaggtttgcagaaccagcgagtattatatgtacaggattccttagagggtgaggccagagtgttcctggaccccaacatactgtctgacgatggcacagtggcactccgaggttatgcgttcagcgaagatggtgaatattttgcctatggtctgagtgccagtggctcagactgggtgacaatcaagttcatgaaagttgatggtgccaaagagcttccagatgtgcttgaaagagtcaagttcagctgtatggcctggacccatgatgggaagggaatgttctacaactcataccctcaacaggatggaaaaagtgatggcacagagacatctaccaatctccaccaaaagctctactaccatgtcttgggaaccgatcagtcagaagatattttgtgtgctgagtttcctgatgaacctaaatggatgggtggagctgagttatctgatgatggccgctatgtcttgttatcaataagggaaggatgtgatccagtaaaccgactctggtactgtgacctacagcaggaatccagtggcatcgcgggaatcctgaagtgggtaaaactgattgacaactttgaaggggaatatgactacgtgaccaatgaggggacggtgttcacattcaagacgaatcgccagtctcccaactatcgcgtgatcaacattgacttcagggatcctgaagagtctaagtggaaagtacttgttcctgagcatgagaaagatgtcttagaatggatagcttgtgtcaggtccaacttcttggtcttatgctacctccatgacgtcaagaacattctgcagctccatgacctgactactggtgctctccttaagaccttcccgctcgatgtcggcagcattgtagggtacagcggtcagaagaaggacactgaaatcttctatcagtttacttcctttttatctccaggtatcatttatcactgtgatcttaccaaagaggagctggagccaagagttttccgagaggtgaccgtaaaaggaattgatgcttctgattaccagacagtccagattttctaccctagcaaggatggtacgaagattccaatgttcattgtgcataaaaaaggcataaaattggatggctctcatccagctttcttatatggctatggcggcttcaacatatccatcacacccaactacagtgtttccaggcttatttttgtgagacacatgggtggtatcctggcagtggccaacatcagaggaggtggcgaatatggagagacgtggcataaaggtggtatcttggccaacaaacaaaactgctttgatgactttcagtgtgctgctgagtatctgatcaaggaaggttacacatctcccaagaggctgactattaatggaggttcaaatggaggcctcttagtggctgcttgtgcaaatcagagacctgacctctttggttgtgttattgcccaagttggagtaatggacatgctgaagtttcataaatataccatcggccatgcttggaccactgattatgggtgctcggacagcaaacaacactttgaatggcttgtcaaatactctccattgcataatgtgaagttaccagaagcagatgacatccagtacccgtccatgctgctcctcactgctgaccatgatgaccgcgtggtcccgcttcactccctgaagttcattgccacccttcagtacatcgtgggccgcagcaggaagcaaagcaaccccctgcttatccacgtggacaccaaggcgggccacggggcggggaagcccacagccaaagtgatagaggaagtctcagacatgtttgcgttcatcgcgcggtgcctgaacgtcgactggattccataaacagttttcgtgcttcctcctgacagcgacagaaaacctcaagggctttcccacgttgacaccaagaaaccactgggcataatgcttccccacgggaacattattcctgcactcacaggctacagttgaacagaactgccgtgggaattttatcttttttaggcttctcctttttagcaaggccttggtgtttctttttccaccctgtctaggcacatgtggttttttggtgttttttttaagggcatgttgggataaatagctaaatggcaacaaacacattgtgaatattagattgctgaattaaggatcatagtcgggcatacttatctatatccataacctctatatctttaaataaatgtgagaactgttctcatggagaagacttctttgcaacaataataaatgttatttaagaatgacaggcttttacttccggtttcttcatattgaggggcaactccagaagtggagttttctgtgagaataaagcatttcacctttctgcaacaagttagttttcaagcagttaagtcatagaatgtttgttagctttgaaaataagttgttcatcca

SEQ ID NO: 169750 - DNA, 961 bp, Homo sapiens
  Payload ID: 13419
  Gene Symbol: PREP
  Gene Name: prolyl endopeptidase
  ENST ID: ENST00000448705
  CDS Start-End: 1-137
gtatcatttatcactgtgatcttaccaaagaggagctggagccaagagttttccgagaggtgaccgtaaaaggaattgatgcttctgattaccagacagtccagctccccaagggtactgagtcttccagaaactgaatcactggttgattgatgatgacgaagaatgtctctgttcctttgcaatgagaggtcaccaatagggcaccaggtgtttatcaaggcccctcccacctggagggctggaccacacaggccacagattaggaatcagaacattgtttgtgaaggaagatgagaataaagagcgctggatgttccccacaatgtttctgtgaaactagggcattattatagcttggtgaattacccttcaattgtctagaaatggtctagatgataggctacatctagatcatgaataaagctttgtttactaaaacaggtggtgggctggatttggtgtagagctatgatttatcagcccctgttctacatcagcagttggcaaactggcctcctgttttattggagaacacatgcccatttgtttacatattgcctgtggttgctttggcacttagagtggttgcaacagaaactctatgtcccagaaggcctgaaatatttaatatatggcctttaagaaaaagtttgcagaatcttcatctatgtaaatagcatttaaaagtacaacattcttgatagacatacagggccgagaagacatacagggtcaagaagctctgtcagacaggcctgaaatccacgtggggcaagtcatttaacctttctgccacagttttttcaactgtaaagtagagattgatagtatctgttttttaggattcctgtgggattattaagagataaggtatattcaagatctggcaatagaatataatctatttttttcaatcaacgttagaaataaatgtaacagacttttagtttcctattta

SEQ ID NO: 169751 - DNA, 3672 bp, Homo sapiens
  Payload ID: 13420
  Gene Symbol: PREPL
  Gene Name: prolyl endopeptidase-like
  Uniprot ID: Q4J6C6
  ENST ID: ENST00000260648
  CDS Start-End: 960-3143
gaagaaactgaggcccggagacacagttaagtgtaggagctaagacctcaacccaggtctctctgactcttaactacttattagcaatcaaggttaataaaagctacctcctgacaaaccagagatggccttacattttatttgtgcatcttgcaggggttttttgttgtttttaattaaagcgctaaatacctttttaacattaaaaatccgaagttgagtatgtccagtatttggaaccgaaccaaattggattttttgctatacagcttactgtacaagtgacctggaacagttgcttagaacctcccacagccacagtttggcaacctgtaaaatgtgcatggtaatatctactttattaagtccatataaaatttaaattagacaaacaagataaaagcacctggcagttagttaacactcaacaataattaatcttccctcccccacctttattaaataattaggcttttccagtttatcttccacatatataccaaagatacgttcataattatgtaagaccaaagggctttttaccttttacagccctgagttcctgagataccccattaagtctgtgtacttatttgcaaatttatattttgtttcttgttttgttttttgttttagtttaacccctatgtgtgccagagtcagtgctgcatagtttgagcctgataggattaactttacaaatgagacatttaagtcacatctgccaagaattatgatttgaatgaaactttaacttacacaggtttttagatttagttagcctaagttatcagctgtctgaagttattcataacctaagtggggcatggccctgaaaaggagggatgagaactgctgatcttagttactctgagaacccactactctgtaatcatacctataaaatcattcgtgtgctggcagccccaaaaggagcataaaccagggactttgatatcatgcagcagaagaccaaattatttctccaagctttgaagtatagtattcctcaccttggaaaatgcatgcagaaacagcatttgaatcactataacttcgctgatcattgttacaatagaataaaattgaaaaaatatcacctaaccaagtgtcttcagaataaacccaagatatcagagttagcaagaaacatcccaagtcggagcttctcatgtaaggatcttcagcctgttaaacaagaaaacgaaaaaccccttccagaaaacatggatgcatttgaaaaagtgagaacaaaattagaaacacagccacaagaagaatatgaaatcatcaatgtggaagttaaacatggtggttttgtttattaccaagaaggttgttgcttggttcgttccaaagatgaagaagcagacaatgataattatgaagttttattcaatttggaggaacttaagttagaccagcccttcattgattgtatcagagttgctccagatgaaaaatatgtggctgccaagataagaactgaagattctgaagcatctacctgtgtaattataaagctcagcgatcagcccgtaatggaagcttctttcccgaatgtgtccagttttgaatgggtaaaggacgaggaagatgaagatgttttattctacaccttccagaggaaccttcgctgtcatgacgtatatcgagccacttttggtgataacaaacgtaatgaacgcttttacacagaaaaagacccaagctactttgttttcctttatcttacaaaagacagtcgtttcctcaccataaatattatgaacaagactacttctgaagtgtggttgatagatggcctgagcccttgggacccaccagtacttatccagaagcgaatacatggggtcctttactatgttgaacacagagatgatgaattatacattctcactaatgttggagaacctacagaatttaagctaatgagaacagcggctgatacccctgcaattatgaattgggatttattttttacaatgaagagaaatacaaaagtgatagacttggacatgtttaaggatcactgtgttctatttctgaagcacagcaatctcctttatgttaatgtgattggtctggctgatgattcagttcggtctctaaagctccctccttgggcctgtggattcataatggatacaaattctgacccaaagaactgcccctttcaactttgctctccaatacgtcccccaaaatattacacatacaagtttgcagaaggcaaactgtttgaggaaactgggcatgaagacccaatcacaaagactagtcgcgttttacgtctagaagccaaaagcaaggatggaaaattagtgccaatgactgttttccacaaaactgactctgaggacttgcagaagaaacctctcttggtacatgtatatggagcttatggaatggatttgaaaatgaatttcaggcctgagaggcgggtcctggtggatgatggatggatattagcatactgccatgttcgaggtggtggtgagttaggcctccagtggcacgctgatggccgcctaactaaaaaactcaatggccttgctgatttagaggcttgcattaagacgcttcatggccaaggcttttctcagccaagtctaacaaccctgactgctttcagtgctggaggggtgcttgcaggagcattgtgtaattctaatccagagctggtgagagcggtgactttggaggcacctttcttggatgttctcaacaccatgatggacactacacttcctctgacattagaagaattagaagaatgggggaatccttcatctgatgaaaaacacaagaactacataaaacgttactgtccctatcaaaatattaaacctcagcattatccttcaattcacataacggcatatgaaaacgatgaacgggtacctctgaaaggaattgtaagttatactgagaaactcaaggaagccatcgcggagcatgctaaggacacaggtgaaggctatcagacccctaatattattctagatattcagcctggaggcaatcatgtaattgaggattctcacaaaaagattacagcccaaattaaattcctgtacgaggaacttggacttgacagcaccagtgttttcgaggatcttaagaaatacctgaaattctgaaacactgcattcaactgggaattggaaacacactgaaatatttcatagtcttacttccaattgagttagcaaaaaaaaaattaataacttgagacttttaagttattaattttttaaaatgtgcttctccatctaaattttgcttagtctacatctcacttgcttatactattctctccattgatgcacatgcccattaacctaggaaagtaattttcaaatcatgctccttagaaggatgtggagtagagggaagggaaggattggtgatagcagagctccaggcctcccttccagtcagaacagttgagcagtttacaaattagtgtcctgcctctttgctagcaaatgcttttagacactgtggcagtgagtcatcctctaatttctatgactgcattttaagggaaaagataaaattcttccccttaaaattcgttaaagtttttgaataatctggggtcctaatgtgttctggtcatccctgattgatgctatctgaataaagttataagctcctataagccat

SEQ ID NO: 169752 - DNA, 2315 bp, Homo sapiens
  Payload ID: 13420
  Gene Symbol: PREPL
  Gene Name: prolyl endopeptidase-like
  Uniprot ID: Q4J6C6
  ENST ID: ENST00000378511
  CDS Start-End: 35-2032
cccaaaaggagcataaaccagggactttgatatcatgcagcagaagaccaaattatttctccaagctttgaagtatagtattcctcaccttggaaaatgcatgcagaaacagcatttgaatcactataacttcgctgatcattgttacaatagaataaaattgaaaaaatatcacctaaccaagtgtcttcagaataaacccaagatatcagagttagcaagaaacatcccaagtcggagcttctcatgtaaggatcttcagcctgttaaacaagaaaacgaaaaaccccttccagaaaacatggatgcatttgaaaaagtgagaacaaaattagaaacacagccacaagaagaatatgaaatcatcaatgtggaagttaaacatggtggttttgtttattaccaagaaggttgttgcttggttcgttccaaagatgaagaagcagacaatgataattatgaagttttattcaatttggaggaacttaagttagaccagcccttcattgattgtatcagagttgctccagatgaaaaatatgtggctgccaagataagaactgaagattctgaagcatctacctgtgtaattataaagctcagcgatcagcccgtaatggaagcttctttcccgaatgtgtccagttttgaatgggtaaaggacgaggaagatgaagatgttttattctacaccttccagaggaaccttcgctgtcatgacgtatatcgagccacttttggtgataacaaacgtaatgaacgcttttacacagaaaaagacccaagctactttgttttcctttatcttacaaaagacagtcgtttcctcaccataaatattatgaacaagactacttctgaagtgtggttgatagatggcctgagcccttgggacccaccagtacttatccagaagcgaatacatggggtcctttactatgttgaacacagagatgatgaattatacattctcactaatgttggagaacctacagaatttaagctccctccttgggcctgtggattcataatggatacaaattctgacccaaagaactgcccctttcaactttgctctccaatacgtcccccaaaatattacacatacaagtttgcagaaggcaaactgtttgaggaaactgggcatgaagacccaatcacaaagactagtcgcgttttacgtctagaagccaaaagcaaggatggaaaattagtgccaatgactgttttccacaaaactgactctgaggacttgcagaagaaacctctcttggtacatgtatatggagcttatggaatggatttgaaaatgaatttcaggcctgagaggcgggtcctggtggatgatggatggatattagcatactgccatgttcgaggtggtggtgagttaggcctccagtggcacgctgatggccgcctaactaaaaaactcaatggccttgctgatttagaggcttgcattaagacgcttcatggccaaggcttttctcagccaagtctaacaaccctgactgctttcagtgctggaggggtgcttgcaggagcattgtgtaattctaatccagagctggtgagagcggtgactttggaggcacctttcttggatgttctcaacaccatgatggacactacacttcctctgacattagaagaattagaagaatgggggaatccttcatctgatgaaaaacacaagaactacataaaacgttactgtccctatcaaaatattaaacctcagcattatccttcaattcacataacggcatatgaaaacgatgaacgggtacctctgaaaggaattgtaagttatactgagaaactcaaggaagccatcgcggagcatgctaaggacacaggtgaaggctatcagacccctaatattattctagatattcagcctggaggcaatcatgtaattgaggattctcacaaaaagattacagcccaaattaaattcctgtacgaggaacttggacttgacagcaccagtgttttcgaggatcttaagaaatacctgaaattctgaaacactgcattcaactgggaattggaaacacactgaaatatttcatagtcttacttccaattgagttagcaaaaaaaaaattaataacttgagacttttaagttattaattttttaaaatgtgcttctccatctaaattttgcttagtctacatctcacttgcttatactattctctccattgatgcacatgcccattaacctaggaaagtaattttcaaatcatgctccttagaaggatgtggagtagagggaagggaaggattggtgatagcagagctcca

SEQ ID NO: 169753 - DNA, 2308 bp, Homo sapiens
  Payload ID: 13420
  Gene Symbol: PREPL
  Gene Name: prolyl endopeptidase-like
  Uniprot ID: Q4J6C6
  ENST ID: ENST00000378520
  CDS Start-End: 35-2020
cccaaaaggagcataaaccagggactttgatatcatgcagcagaagaccaaattatttctccaagctttgaagtatagtattcctcaccttggaaaatgcatgcagaaacagcatttgaatcactataacttcgctgatcattgttacaatagaataaaattgaaaaaatatcacctaaccaagtgtcttcagaataaacccaagatatcagagttagcaagaaacatcccaagtcggagcttctcatgtaaggatcttcagcctgttaaacaagaaaacgaaaaaccccttccagaaaacatggatgcatttgaaaaagtgagaacaaaattagaaacacagccacaagaagaatatgaaatcatcaatgtggaagttaaacatggtggttttgtttattaccaagaaggttgttgcttggttcgttccaaagatgaagaagcagacaatgataattatgaagttttattcaatttggaggaacttaagttagaccagcccttcattgattgtatcagagttgctccagatgaaaaatatgtggctgccaagataagaactgaagattctgaagcatctacctgtgtaattataaagctcagcgatcagcccgtaatggaagcttctttcccgaatgtgtccagttttgaatgggtaaaggacgaggaagatgaagatgttttattctacaccttccagaggaaccttcgctgtcatgacgtatatcgagccacttttggtgataacaaacgtaatgaacgcttttacacagaaaaagacccaagctactttgttttcctttatcttacaaaagacagtcgtttcctcaccataaatattatgaacaagactacttctgaagtgtggttgatagatggcctgagcccttgggacccaccagtacttatccagaagcgaatacatggggtcctttactatgttgaacacagagatgatgaattatacattctcactaatgttggagaacctacagaatttaagctaatgagaacagcggctgatacccctgcaattatgaattgggatttattttttacaatgaagagaaatacaaaagtgatagacttggacatgtttaaggatcactgtgttctatttctgaagcacagcaatctcctttatgttaatgtgattggtctggctgatgattcagttcggtctctaaaggatggaaaattagtgccaatgactgttttccacaaaactgactctgaggacttgcagaagaaacctctcttggtacatgtatatggagcttatggaatggatttgaaaatgaatttcaggcctgagaggcgggtcctggtggatgatggatggatattagcatactgccatgttcgaggtggtggtgagttaggcctccagtggcacgctgatggccgcctaactaaaaaactcaatggccttgctgatttagaggcttgcattaagacgcttcatggccaaggcttttctcagccaagtctaacaaccctgactgctttcagtgctggaggggtgcttgcaggagcattgtgtaattctaatccagagctggtgagagcggtgactttggaggcacctttcttggatgttctcaacaccatgatggacactacacttcctctgacattagaagaattagaagaatgggggaatccttcatctgatgaaaaacacaagaactacataaaacgttactgtccctatcaaaatattaaacctcagcattatccttcaattcacataacggcatatgaaaacgatgaacgggtacctctgaaaggaattgtaagttatactgagaaactcaaggaagccatcgcggagcatgctaaggacacaggtgaaggctatcagacccctaatattattctagatattcagcctggaggcaatcatgtaattgaggattctcacaaaaagattacagcccaaattaaattcctgtacgaggaacttggacttgacagcaccagtgttttcgaggatcttaagaaatacctgaaattctgaaacactgcattcaactgggaattggaaacacactgaaatatttcatagtcttacttccaattgagttagcaaaaaaaaaattaataacttgagacttttaagttattaattttttaaaatgtgcttctccatctaaattttgcttagtctacatctcacttgcttatactattctctccattgatgcacatgcccattaacctaggaaagtaattttcaaatcatgctccttagaaggatgtggagtagagggaagggaaggattggtgatagcagagctccaggcct

SEQ ID NO: 169754 - DNA, 3080 bp, Homo sapiens
  Payload ID: 13420
  Gene Symbol: PREPL
  Gene Name: prolyl endopeptidase-like
  Uniprot ID: Q4J6C6
  ENST ID: ENST00000410081
  CDS Start-End: 463-2646
cattcttgctggtagccatcttgagtgagggcggaccagaggatgagagagctgtggcagggctactggaacgctgtccctcattgttttagccttctgtgcttcatctcgagctcagaagactagcgaagaacgaaaagtcttatatatttcgagactaaagaacccaggaacccaagaagactccttgaccacaacaaagatggcgaaatctgcctgttgctcgtgctagattgaggttacgtagattggcgtgctgcaaaccagctctaggcggctctgggtaagttgtcgttctgtgggctgcggaacgcagacttcggctggacttgcctgcggtgacacctgctcccctctgagagcttcaggttctccggcctgccttcactggtttgtgtccagagccggactgattctctcaatttgcccccaaaaggagcataaaccagggactttgatatcatgcagcagaagaccaaattatttctccaagctttgaagtatagtattcctcaccttggaaaatgcatgcagaaacagcatttgaatcactataacttcgctgatcattgttacaatagaataaaattgaaaaaatatcacctaaccaagtgtcttcagaataaacccaagatatcagagttagcaagaaacatcccaagtcggagcttctcatgtaaggatcttcagcctgttaaacaagaaaacgaaaaaccccttccagaaaacatggatgcatttgaaaaagtgagaacaaaattagaaacacagccacaagaagaatatgaaatcatcaatgtggaagttaaacatggtggttttgtttattaccaagaaggttgttgcttggttcgttccaaagatgaagaagcagacaatgataattatgaagttttattcaatttggaggaacttaagttagaccagcccttcattgattgtatcagagttgctccagatgaaaaatatgtggctgccaagataagaactgaagattctgaagcatctacctgtgtaattataaagctcagcgatcagcccgtaatggaagcttctttcccgaatgtgtccagttttgaatgggtaaaggacgaggaagatgaagatgttttattctacaccttccagaggaaccttcgctgtcatgacgtatatcgagccacttttggtgataacaaacgtaatgaacgcttttacacagaaaaagacccaagctactttgttttcctttatcttacaaaagacagtcgtttcctcaccataaatattatgaacaagactacttctgaagtgtggttgatagatggcctgagcccttgggacccaccagtacttatccagaagcgaatacatggggtcctttactatgttgaacacagagatgatgaattatacattctcactaatgttggagaacctacagaatttaagctaatgagaacagcggctgatacccctgcaattatgaattgggatttattttttacaatgaagagaaatacaaaagtgatagacttggacatgtttaaggatcactgtgttctatttctgaagcacagcaatctcctttatgttaatgtgattggtctggctgatgattcagttcggtctctaaagctccctccttgggcctgtggattcataatggatacaaattctgacccaaagaactgcccctttcaactttgctctccaatacgtcccccaaaatattacacatacaagtttgcagaaggcaaactgtttgaggaaactgggcatgaagacccaatcacaaagactagtcgcgttttacgtctagaagccaaaagcaaggatggaaaattagtgccaatgactgttttccacaaaactgactctgaggacttgcagaagaaacctctcttggtacatgtatatggagcttatggaatggatttgaaaatgaatttcaggcctgagaggcgggtcctggtggatgatggatggatattagcatactgccatgttcgaggtggtggtgagttaggcctccagtggcacgctgatggccgcctaactaaaaaactcaatggccttgctgatttagaggcttgcattaagacgcttcatggccaaggcttttctcagccaagtctaacaaccctgactgctttcagtgctggaggggtgcttgcaggagcattgtgtaattctaatccagagctggtgagagcggtgactttggaggcacctttcttggatgttctcaacaccatgatggacactacacttcctctgacattagaagaattagaagaatgggggaatccttcatctgatgaaaaacacaagaactacataaaacgttactgtccctatcaaaatattaaacctcagcattatccttcaattcacataacggcatatgaaaacgatgaacgggtacctctgaaaggaattgtaagttatactgagaaactcaaggaagccatcgcggagcatgctaaggacacaggtgaaggctatcagacccctaatattattctagatattcagcctggaggcaatcatgtaattgaggattctcacaaaaagattacagcccaaattaaattcctgtacgaggaacttggacttgacagcaccagtgttttcgaggatcttaagaaatacctgaaattctgaaacactgcattcaactgggaattggaaacacactgaaatatttcatagtcttacttccaattgagttagcaaaaaaaaaattaataacttgagacttttaagttattaattttttaaaatgtgcttctccatctaaattttgcttagtctacatctcacttgcttatactattctctccattgatgcacatgcccattaacctaggaaagtaattttcaaatcatgctccttagaaggatgtggagtagagggaagggaaggattggtgatagcagagctccaggcctcccttccagtcagaacagttgagcagtttacaaattagtgtcctgcctctttgctagcaaatgcttttagacactgtggcagtgagtcatcctctaatttctatgactgcattttaagggaaaagataaaattcttccccttaaaa

SEQ ID NO: 169755 - DNA, 5212 bp, Homo sapiens
  Payload ID: 13420
  Gene Symbol: PREPL
  Gene Name: prolyl endopeptidase-like
  Uniprot ID: Q4J6C6
  ENST ID: ENST00000409936
  CDS Start-End: 439-2622
gcagacttcggctggacttgcctgcggtgacacctgctcccctctgagagcttcaggttctccggcctgccttcactggtttgtgtccagagccggactgattctctcaatttgctttaacccctatgtgtgccagagtcagtgctgcatagtttgagcctgataggattaactttacaaatgagacatttaagtcacatctgccaagaattatgatttgaatgaaactttaacttacacaggtttttagatttagttagcctaagttatcagctgtctgaagttattcataacctaagtggggcatggccctgaaaaggagggatgagaactgctgatcttagttactctgagaacccactactctgtaatcatacctataaaatcattcgtgtgctggcagccccaaaaggagcataaaccagggactttgatatcatgcagcagaagaccaaattatttctccaagctttgaagtatagtattcctcaccttggaaaatgcatgcagaaacagcatttgaatcactataacttcgctgatcattgttacaatagaataaaattgaaaaaatatcacctaaccaagtgtcttcagaataaacccaagatatcagagttagcaagaaacatcccaagtcggagcttctcatgtaaggatcttcagcctgttaaacaagaaaacgaaaaaccccttccagaaaacatggatgcatttgaaaaagtgagaacaaaattagaaacacagccacaagaagaatatgaaatcatcaatgtggaagttaaacatggtggttttgtttattaccaagaaggttgttgcttggttcgttccaaagatgaagaagcagacaatgataattatgaagttttattcaatttggaggaacttaagttagaccagcccttcattgattgtatcagagttgctccagatgaaaaatatgtggctgccaagataagaactgaagattctgaagcatctacctgtgtaattataaagctcagcgatcagcccgtaatggaagcttctttcccgaatgtgtccagttttgaatgggtaaaggacgaggaagatgaagatgttttattctacaccttccagaggaaccttcgctgtcatgacgtatatcgagccacttttggtgataacaaacgtaatgaacgcttttacacagaaaaagacccaagctactttgttttcctttatcttacaaaagacagtcgtttcctcaccataaatattatgaacaagactacttctgaagtgtggttgatagatggcctgagcccttgggacccaccagtacttatccagaagcgaatacatggggtcctttactatgttgaacacagagatgatgaattatacattctcactaatgttggagaacctacagaatttaagctaatgagaacagcggctgatacccctgcaattatgaattgggatttattttttacaatgaagagaaatacaaaagtgatagacttggacatgtttaaggatcactgtgttctatttctgaagcacagcaatctcctttatgttaatgtgattggtctggctgatgattcagttcggtctctaaagctccctccttgggcctgtggattcataatggatacaaattctgacccaaagaactgcccctttcaactttgctctccaatacgtcccccaaaatattacacatacaagtttgcagaaggcaaactgtttgaggaaactgggcatgaagacccaatcacaaagactagtcgcgttttacgtctagaagccaaaagcaaggatggaaaattagtgccaatgactgttttccacaaaactgactctgaggacttgcagaagaaacctctcttggtacatgtatatggagcttatggaatggatttgaaaatgaatttcaggcctgagaggcgggtcctggtggatgatggatggatattagcatactgccatgttcgaggtggtggtgagttaggcctccagtggcacgctgatggccgcctaactaaaaaactcaatggccttgctgatttagaggcttgcattaagacgcttcatggccaaggcttttctcagccaagtctaacaaccctgactgctttcagtgctggaggggtgcttgcaggagcattgtgtaattctaatccagagctggtgagagcggtgactttggaggcacctttcttggatgttctcaacaccatgatggacactacacttcctctgacattagaagaattagaagaatgggggaatccttcatctgatgaaaaacacaagaactacataaaacgttactgtccctatcaaaatattaaacctcagcattatccttcaattcacataacggcatatgaaaacgatgaacgggtacctctgaaaggaattgtaagttatactgagaaactcaaggaagccatcgcggagcatgctaaggacacaggtgaaggctatcagacccctaatattattctagatattcagcctggaggcaatcatgtaattgaggattctcacaaaaagattacagcccaaattaaattcctgtacgaggaacttggacttgacagcaccagtgttttcgaggatcttaagaaatacctgaaattctgaaacactgcattcaactgggaattggaaacacactgaaatatttcatagtcttacttccaattgagttagcaaaaaaaaaattaataacttgagacttttaagttattaattttttaaaatgtgcttctccatctaaattttgcttagtctacatctcacttgcttatactattctctccattgatgcacatgcccattaacctaggaaagtaattttcaaatcatgctccttagaaggatgtggagtagagggaagggaaggattggtgatagcagagctccaggcctcccttccagtcagaacagttgagcagtttacaaattagtgtcctgcctctttgctagcaaatgcttttagacactgtggcagtgagtcatcctctaatttctatgactgcattttaagggaaaagataaaattcttccccttaaaattcgttaaagtttttgaataatctggggtcctaatgtgttctggtcatccctgattgatgctatctgaataaagttataagctcctataagccataatttacttttaaacattttatttttttcaaaacatttgagaacctttcttaaagcagttacattcaagctacagaaatatcgaagaattaatgattgttcaccaagcagcatgctgtacatgaagctattacaaatgcttacaatcccactgaaatgccagtgtcttcatctcttcataaaggtgcctaacacgaggtatacagtatgttcagtacactggaatagcatgctcgattggaaacaaagcatctatctctgaaagctgtttggcgatgaaggagattcttcgtgttgtgttcaaagatgagtccctctcccttgtccagaaaaatgccacttgtatcaactttactgcctttgtcggcagaattggtacttaaccttattctcattttagcgggaaggcccgaaatcatattatgtagatttaacagtgttgattctccaaaattcagaaccacgataaagattctgtcgatgccatccagctctcttgtgtacacaacatagtggctgtcattcctcaaatggcaaaaccagcccctgttgaggagtagctcattggcatgaagtagacttaaatcttgatataacttcaaagccgatctgggctgagtcttttggacctatttttttaaaaaagtatttacgtaagtgtttgattctaagaattgtttgtaagtatttttaatatattgtaaggagttatttacccaaaacacttgctccaattttgccccttataattgccaaattgtaagcatcaataagtaggtaagaacaatttatataaaaactgatagaaatgacaaattcggggtttcggcttgtctgggagtcaataagtacgcacagtgctctgctacattgtagagtttctgtagagatcaaatttgactccactttaggagtcccaaagcaaatgtccatgtctaagatgaatatttaacttgcatagtcattctgtgctatattgtaactgccagatggccagaaagaaggcaacagtggactcagacttctgaggaatttgggtttgttcccctttgtagactaatgtgtaggttgctgttgtgcgaagatcgtgtaactttagcagacatgtatttcttgcacagctaatagaagacaaagttgaaaaaaaggatgcaaaataaaaagctgcctaaggtgaaagttagaaattgtagacttttttttaccataatagtatgtgttcattaaagatgatttgggtttattttacagctatataaaacataatttgatgatgtacttctaacctttcaagcattttctgttattgactatataatatagcctccataaatgtttttaatgacaatattctgttgaacggttgtaccatactcagccatgccctttcattttgacgatagtgtttctaatattttgtatttttattcccctccccccatttttgtattacttaagatagattatcagaaagacagttactttgtcaaagagtatgggcacttgatacataatgccaaattattcttcataagagctgttgccaaatcagtgataatgttcatttaattgtattcttgccagccatgtttactggggtgatagttgttattgtggttgttattgttctttaggggtaggttcccaatatgtggtctttaaataattatctaatggtgtttaaaaagatgtttattctgtttgtcaggtacaaagatatttatgatacatgtatgacttgtctaagttattaacattttctctagccttaggtaatgcatgaaagcacatgtttcagtgccactcacataagaagtgcccggtaagtgttagctattattgtctacttgagttactactttctaaaagtatgttgaagtctttttctgtaattgcagatttgttgattttgcatttgagtattttctatattttgaagctgttagatgcgtagtcatgatttttggtggaatgttttatcaatttttgaaaattgcctttgtctcatataatgcttttcatattgaactatattttgtctgctattaaatacttccaagcc

SEQ ID NO: 169756 - DNA, 3030 bp, Homo sapiens
  Payload ID: 13420
  Gene Symbol: PREPL
  Gene Name: prolyl endopeptidase-like
  Uniprot ID: Q4J6C6
  ENST ID: ENST00000409272
  CDS Start-End: 318-2501
attcttgctggtagccatcttgagtgagggcggaccagaggatgagagagctgtggcagggctactggaacgctgtccctcattgttttagccttctgtgcttcatctcgagctcagaagactagcgaagaacgaaaagtcttatatatttcgagactaaagaacccaggaacccaagaagactccttgaccacaacaaagatggcgaaatctgcctgttgctcgtgctagattgaggttacgtagattggcgtgctgcaaaccagctctaggcggctctggccccaaaaggagcataaaccagggactttgatatcatgcagcagaagaccaaattatttctccaagctttgaagtatagtattcctcaccttggaaaatgcatgcagaaacagcatttgaatcactataacttcgctgatcattgttacaatagaataaaattgaaaaaatatcacctaaccaagtgtcttcagaataaacccaagatatcagagttagcaagaaacatcccaagtcggagcttctcatgtaaggatcttcagcctgttaaacaagaaaacgaaaaaccccttccagaaaacatggatgcatttgaaaaagtgagaacaaaattagaaacacagccacaagaagaatatgaaatcatcaatgtggaagttaaacatggtggttttgtttattaccaagaaggttgttgcttggttcgttccaaagatgaagaagcagacaatgataattatgaagttttattcaatttggaggaacttaagttagaccagcccttcattgattgtatcagagttgctccagatgaaaaatatgtggctgccaagataagaactgaagattctgaagcatctacctgtgtaattataaagctcagcgatcagcccgtaatggaagcttctttcccgaatgtgtccagttttgaatgggtaaaggacgaggaagatgaagatgttttattctacaccttccagaggaaccttcgctgtcatgacgtatatcgagccacttttggtgataacaaacgtaatgaacgcttttacacagaaaaagacccaagctactttgttttcctttatcttacaaaagacagtcgtttcctcaccataaatattatgaacaagactacttctgaagtgtggttgatagatggcctgagcccttgggacccaccagtacttatccagaagcgaatacatggggtcctttactatgttgaacacagagatgatgaattatacattctcactaatgttggagaacctacagaatttaagctaatgagaacagcggctgatacccctgcaattatgaattgggatttattttttacaatgaagagaaatacaaaagtgatagacttggacatgtttaaggatcactgtgttctatttctgaagcacagcaatctcctttatgttaatgtgattggtctggctgatgattcagttcggtctctaaagctccctccttgggcctgtggattcataatggatacaaattctgacccaaagaactgcccctttcaactttgctctccaatacgtcccccaaaatattacacatacaagtttgcagaaggcaaactgtttgaggaaactgggcatgaagacccaatcacaaagactagtcgcgttttacgtctagaagccaaaagcaaggatggaaaattagtgccaatgactgttttccacaaaactgactctgaggacttgcagaagaaacctctcttggtacatgtatatggagcttatggaatggatttgaaaatgaatttcaggcctgagaggcgggtcctggtggatgatggatggatattagcatactgccatgttcgaggtggtggtgagttaggcctccagtggcacgctgatggccgcctaactaaaaaactcaatggccttgctgatttagaggcttgcattaagacgcttcatggccaaggcttttctcagccaagtctaacaaccctgactgctttcagtgctggaggggtgcttgcaggagcattgtgtaattctaatccagagctggtgagagcggtgactttggaggcacctttcttggatgttctcaacaccatgatggacactacacttcctctgacattagaagaattagaagaatgggggaatccttcatctgatgaaaaacacaagaactacataaaacgttactgtccctatcaaaatattaaacctcagcattatccttcaattcacataacggcatatgaaaacgatgaacgggtacctctgaaaggaattgtaagttatactgagaaactcaaggaagccatcgcggagcatgctaaggacacaggtgaaggctatcagacccctaatattattctagatattcagcctggaggcaatcatgtaattgaggattctcacaaaaagattacagcccaaattaaattcctgtacgaggaacttggacttgacagcaccagtgttttcgaggatcttaagaaatacctgaaattctgaaacactgcattcaactgggaattggaaacacactgaaatatttcatagtcttacttccaattgagttagcaaaaaaaaaattaataacttgagacttttaagttattaattttttaaaatgtgcttctccatctaaattttgcttagtctacatctcacttgcttatactattctctccattgatgcacatgcccattaacctaggaaagtaattttcaaatcatgctccttagaaggatgtggagtagagggaagggaaggattggtgatagcagagctccaggcctcccttccagtcagaacagttgagcagtttacaaattagtgtcctgcctctttgctagcaaatgcttttagacactgtggcagtgagtcatcctctaatttctatgactgcattttaagggaaaagataaaattcttccccttaaaattcgttaaagtttttgaataatctggggtcctaatgtgttctggtcatccctgattgatgctatctgaataaagttataagctcctataagccat

SEQ ID NO: 169757 - DNA, 4725 bp, Homo sapiens
  Payload ID: 13420
  Gene Symbol: PREPL
  Gene Name: prolyl endopeptidase-like
  Uniprot ID: Q4J6C6
  ENST ID: ENST00000409411
  CDS Start-End: 216-2132
aaaccagctctaggcggctctgggtaagttgtcgttctgtgggctgcggaacgcagacttcggctggacttgcctgcggtgacacctgctcccctctgagagcttcaggttctccggcctgccttcactggtttgtgtccagagccggactgattctctcaatttgcgatcttcagcctgttaaacaagaaaacgaaaaaccccttccagaaaacatggatgcatttgaaaaagtgagaacaaaattagaaacacagccacaagaagaatatgaaatcatcaatgtggaagttaaacatggtggttttgtttattaccaagaaggttgttgcttggttcgttccaaagatgaagaagcagacaatgataattatgaagttttattcaatttggaggaacttaagttagaccagcccttcattgattgtatcagagttgctccagatgaaaaatatgtggctgccaagataagaactgaagattctgaagcatctacctgtgtaattataaagctcagcgatcagcccgtaatggaagcttctttcccgaatgtgtccagttttgaatgggtaaaggacgaggaagatgaagatgttttattctacaccttccagaggaaccttcgctgtcatgacgtatatcgagccacttttggtgataacaaacgtaatgaacgcttttacacagaaaaagacccaagctactttgttttcctttatcttacaaaagacagtcgtttcctcaccataaatattatgaacaagactacttctgaagtgtggttgatagatggcctgagcccttgggacccaccagtacttatccagaagcgaatacatggggtcctttactatgttgaacacagagatgatgaattatacattctcactaatgttggagaacctacagaatttaagctaatgagaacagcggctgatacccctgcaattatgaattgggatttattttttacaatgaagagaaatacaaaagtgatagacttggacatgtttaaggatcactgtgttctatttctgaagcacagcaatctcctttatgttaatgtgattggtctggctgatgattcagttcggtctctaaagctccctccttgggcctgtggattcataatggatacaaattctgacccaaagaactgcccctttcaactttgctctccaatacgtcccccaaaatattacacatacaagtttgcagaaggcaaactgtttgaggaaactgggcatgaagacccaatcacaaagactagtcgcgttttacgtctagaagccaaaagcaaggatggaaaattagtgccaatgactgttttccacaaaactgactctgaggacttgcagaagaaacctctcttggtacatgtatatggagcttatggaatggatttgaaaatgaatttcaggcctgagaggcgggtcctggtggatgatggatggatattagcatactgccatgttcgaggtggtggtgagttaggcctccagtggcacgctgatggccgcctaactaaaaaactcaatggccttgctgatttagaggcttgcattaagacgcttcatggccaaggcttttctcagccaagtctaacaaccctgactgctttcagtgctggaggggtgcttgcaggagcattgtgtaattctaatccagagctggtgagagcggtgactttggaggcacctttcttggatgttctcaacaccatgatggacactacacttcctctgacattagaagaattagaagaatgggggaatccttcatctgatgaaaaacacaagaactacataaaacgttactgtccctatcaaaatattaaacctcagcattatccttcaattcacataacggcatatgaaaacgatgaacgggtacctctgaaaggaattgtaagttatactgagaaactcaaggaagccatcgcggagcatgctaaggacacaggtgaaggctatcagacccctaatattattctagatattcagcctggaggcaatcatgtaattgaggattctcacaaaaagattacagcccaaattaaattcctgtacgaggaacttggacttgacagcaccagtgttttcgaggatcttaagaaatacctgaaattctgaaacactgcattcaactgggaattggaaacacactgaaatatttcatagtcttacttccaattgagttagcaaaaaaaaaattaataacttgagacttttaagttattaattttttaaaatgtgcttctccatctaaattttgcttagtctacatctcacttgcttatactattctctccattgatgcacatgcccattaacctaggaaagtaattttcaaatcatgctccttagaaggatgtggagtagagggaagggaaggattggtgatagcagagctccaggcctcccttccagtcagaacagttgagcagtttacaaattagtgtcctgcctctttgctagcaaatgcttttagacactgtggcagtgagtcatcctctaatttctatgactgcattttaagggaaaagataaaattcttccccttaaaattcgttaaagtttttgaataatctggggtcctaatgtgttctggtcatccctgattgatgctatctgaataaagttataagctcctataagccataatttacttttaaacattttatttttttcaaaacatttgagaacctttcttaaagcagttacattcaagctacagaaatatcgaagaattaatgattgttcaccaagcagcatgctgtacatgaagctattacaaatgcttacaatcccactgaaatgccagtgtcttcatctcttcataaaggtgcctaacacgaggtatacagtatgttcagtacactggaatagcatgctcgattggaaacaaagcatctatctctgaaagctgtttggcgatgaaggagattcttcgtgttgtgttcaaagatgagtccctctcccttgtccagaaaaatgccacttgtatcaactttactgcctttgtcggcagaattggtacttaaccttattctcattttagcgggaaggcccgaaatcatattatgtagatttaacagtgttgattctccaaaattcagaaccacgataaagattctgtcgatgccatccagctctcttgtgtacacaacatagtggctgtcattcctcaaatggcaaaaccagcccctgttgaggagtagctcattggcatgaagtagacttaaatcttgatataacttcaaagccgatctgggctgagtcttttggacctatttttttaaaaaagtatttacgtaagtgtttgattctaagaattgtttgtaagtatttttaatatattgtaaggagttatttacccaaaacacttgctccaattttgccccttataattgccaaattgtaagcatcaataagtaggtaagaacaatttatataaaaactgatagaaatgacaaattcggggtttcggcttgtctgggagtcaataagtacgcacagtgctctgctacattgtagagtttctgtagagatcaaatttgactccactttaggagtcccaaagcaaatgtccatgtctaagatgaatatttaacttgcatagtcattctgtgctatattgtaactgccagatggccagaaagaaggcaacagtggactcagacttctgaggaatttgggtttgttcccctttgtagactaatgtgtaggttgctgttgtgcgaagatcgtgtaactttagcagacatgtatttcttgcacagctaatagaagacaaagttgaaaaaaaggatgcaaaataaaaagctgcctaaggtgaaagttagaaattgtagacttttttttaccataatagtatgtgttcattaaagatgatttgggtttattttacagctatataaaacataatttgatgatgtacttctaacctttcaagcattttctgttattgactatataatatagcctccataaatgtttttaatgacaatattctgttgaacggttgtaccatactcagccatgccctttcattttgacgatagtgtttctaatattttgtatttttattcccctccccccatttttgtattacttaagatagattatcagaaagacagttactttgtcaaagagtatgggcacttgatacataatgccaaattattcttcataagagctgttgccaaatcagtgataatgttcatttaattgtattcttgccagccatgtttactggggtgatagttgttattgtggttgttattgttctttaggggtaggttcccaatatgtggtctttaaataattatctaatggtgtttaaaaagatgtttattctgtttgtcaggtacaaagatatttatgatacatgtatgacttgtctaagttattaacattttctctagccttaggtaatgcatgaaagcacatgtttcagtgccactcacataagaagtgcccggtaagtgttagctattattgtctacttgagttactactttctaaaagtatgttgaagtctttttctgtaattgcagatttgttgattttgcatttgagtattttctatattttgaagctgttagatgcgtagtcatgatttttggtggaatgttttatcaatttttgaaaattgcctttgtctcatataatgcttttcatattgaactatattttgtctgctattaaatacttccaagcctga

SEQ ID NO: 169758 - DNA, 4703 bp, Homo sapiens
  Payload ID: 13420
  Gene Symbol: PREPL
  Gene Name: prolyl endopeptidase-like
  Uniprot ID: Q4J6C6
  ENST ID: ENST00000409957
  CDS Start-End: 194-2110
agattggcgtgctgcaaaccagctctaggcggctctgggtaagttgtcgttctgtgggctgcggaacgcagacttcggctggacttgcctgcggtgacacctgctcccctctgagagcttcaggttctccggcctgccttcactggatcttcagcctgttaaacaagaaaacgaaaaaccccttccagaaaacatggatgcatttgaaaaagtgagaacaaaattagaaacacagccacaagaagaatatgaaatcatcaatgtggaagttaaacatggtggttttgtttattaccaagaaggttgttgcttggttcgttccaaagatgaagaagcagacaatgataattatgaagttttattcaatttggaggaacttaagttagaccagcccttcattgattgtatcagagttgctccagatgaaaaatatgtggctgccaagataagaactgaagattctgaagcatctacctgtgtaattataaagctcagcgatcagcccgtaatggaagcttctttcccgaatgtgtccagttttgaatgggtaaaggacgaggaagatgaagatgttttattctacaccttccagaggaaccttcgctgtcatgacgtatatcgagccacttttggtgataacaaacgtaatgaacgcttttacacagaaaaagacccaagctactttgttttcctttatcttacaaaagacagtcgtttcctcaccataaatattatgaacaagactacttctgaagtgtggttgatagatggcctgagcccttgggacccaccagtacttatccagaagcgaatacatggggtcctttactatgttgaacacagagatgatgaattatacattctcactaatgttggagaacctacagaatttaagctaatgagaacagcggctgatacccctgcaattatgaattgggatttattttttacaatgaagagaaatacaaaagtgatagacttggacatgtttaaggatcactgtgttctatttctgaagcacagcaatctcctttatgttaatgtgattggtctggctgatgattcagttcggtctctaaagctccctccttgggcctgtggattcataatggatacaaattctgacccaaagaactgcccctttcaactttgctctccaatacgtcccccaaaatattacacatacaagtttgcagaaggcaaactgtttgaggaaactgggcatgaagacccaatcacaaagactagtcgcgttttacgtctagaagccaaaagcaaggatggaaaattagtgccaatgactgttttccacaaaactgactctgaggacttgcagaagaaacctctcttggtacatgtatatggagcttatggaatggatttgaaaatgaatttcaggcctgagaggcgggtcctggtggatgatggatggatattagcatactgccatgttcgaggtggtggtgagttaggcctccagtggcacgctgatggccgcctaactaaaaaactcaatggccttgctgatttagaggcttgcattaagacgcttcatggccaaggcttttctcagccaagtctaacaaccctgactgctttcagtgctggaggggtgcttgcaggagcattgtgtaattctaatccagagctggtgagagcggtgactttggaggcacctttcttggatgttctcaacaccatgatggacactacacttcctctgacattagaagaattagaagaatgggggaatccttcatctgatgaaaaacacaagaactacataaaacgttactgtccctatcaaaatattaaacctcagcattatccttcaattcacataacggcatatgaaaacgatgaacgggtacctctgaaaggaattgtaagttatactgagaaactcaaggaagccatcgcggagcatgctaaggacacaggtgaaggctatcagacccctaatattattctagatattcagcctggaggcaatcatgtaattgaggattctcacaaaaagattacagcccaaattaaattcctgtacgaggaacttggacttgacagcaccagtgttttcgaggatcttaagaaatacctgaaattctgaaacactgcattcaactgggaattggaaacacactgaaatatttcatagtcttacttccaattgagttagcaaaaaaaaaattaataacttgagacttttaagttattaattttttaaaatgtgcttctccatctaaattttgcttagtctacatctcacttgcttatactattctctccattgatgcacatgcccattaacctaggaaagtaattttcaaatcatgctccttagaaggatgtggagtagagggaagggaaggattggtgatagcagagctccaggcctcccttccagtcagaacagttgagcagtttacaaattagtgtcctgcctctttgctagcaaatgcttttagacactgtggcagtgagtcatcctctaatttctatgactgcattttaagggaaaagataaaattcttccccttaaaattcgttaaagtttttgaataatctggggtcctaatgtgttctggtcatccctgattgatgctatctgaataaagttataagctcctataagccataatttacttttaaacattttatttttttcaaaacatttgagaacctttcttaaagcagttacattcaagctacagaaatatcgaagaattaatgattgttcaccaagcagcatgctgtacatgaagctattacaaatgcttacaatcccactgaaatgccagtgtcttcatctcttcataaaggtgcctaacacgaggtatacagtatgttcagtacactggaatagcatgctcgattggaaacaaagcatctatctctgaaagctgtttggcgatgaaggagattcttcgtgttgtgttcaaagatgagtccctctcccttgtccagaaaaatgccacttgtatcaactttactgcctttgtcggcagaattggtacttaaccttattctcattttagcgggaaggcccgaaatcatattatgtagatttaacagtgttgattctccaaaattcagaaccacgataaagattctgtcgatgccatccagctctcttgtgtacacaacatagtggctgtcattcctcaaatggcaaaaccagcccctgttgaggagtagctcattggcatgaagtagacttaaatcttgatataacttcaaagccgatctgggctgagtcttttggacctatttttttaaaaaagtatttacgtaagtgtttgattctaagaattgtttgtaagtatttttaatatattgtaaggagttatttacccaaaacacttgctccaattttgccccttataattgccaaattgtaagcatcaataagtaggtaagaacaatttatataaaaactgatagaaatgacaaattcggggtttcggcttgtctgggagtcaataagtacgcacagtgctctgctacattgtagagtttctgtagagatcaaatttgactccactttaggagtcccaaagcaaatgtccatgtctaagatgaatatttaacttgcatagtcattctgtgctatattgtaactgccagatggccagaaagaaggcaacagtggactcagacttctgaggaatttgggtttgttcccctttgtagactaatgtgtaggttgctgttgtgcgaagatcgtgtaactttagcagacatgtatttcttgcacagctaatagaagacaaagttgaaaaaaaggatgcaaaataaaaagctgcctaaggtgaaagttagaaattgtagacttttttttaccataatagtatgtgttcattaaagatgatttgggtttattttacagctatataaaacataatttgatgatgtacttctaacctttcaagcattttctgttattgactatataatatagcctccataaatgtttttaatgacaatattctgttgaacggttgtaccatactcagccatgccctttcattttgacgatagtgtttctaatattttgtatttttattcccctccccccatttttgtattacttaagatagattatcagaaagacagttactttgtcaaagagtatgggcacttgatacataatgccaaattattcttcataagagctgttgccaaatcagtgataatgttcatttaattgtattcttgccagccatgtttactggggtgatagttgttattgtggttgttattgttctttaggggtaggttcccaatatgtggtctttaaataattatctaatggtgtttaaaaagatgtttattctgtttgtcaggtacaaagatatttatgatacatgtatgacttgtctaagttattaacattttctctagccttaggtaatgcatgaaagcacatgtttcagtgccactcacataagaagtgcccggtaagtgttagctattattgtctacttgagttactactttctaaaagtatgttgaagtctttttctgtaattgcagatttgttgattttgcatttgagtattttctatattttgaagctgttagatgcgtagtcatgatttttggtggaatgttttatcaatttttgaaaattgcctttgtctcatataatgcttttcatattgaactatattttgtctgctattaaatacttccaagcctga

SEQ ID NO: 169759 - DNA, 583 bp, Homo sapiens
  Payload ID: 13420
  Gene Symbol: PREPL
  Gene Name: prolyl endopeptidase-like
  ENST ID: ENST00000444696
  CDS Start-End: 1-213
gaatgggggaatccttcatctgatgaaaaacacaagaactacataaaacgttactgtccctatcaaaatattaaacctcagcattatccttcaattcacataacggcatatgaaaacgatgaacgggtacctctgaaaggaattgtaagttatactgagaaactcaaggaagccatcgcggagcatgctaaggacacaggtgaaggtgcctaacacgaggtatacagtatgttcagtacactggaatagcatgctcgattggaaacaaagcatctatctctgaaagctgtttggcgatgaaggagattcttcgtgttgtgttcaaagatgagtccctctcccttgtccagaaaaatgccacttgtatcaactttactgcctttgtcggcagaattggtacttaaccttattctcattttagcgggaaggcccgaaatcatattatgtagatttaacagtgttgattctccaaaattcagaaccacgataaagattctgtcgatgccatccagctctcttgtgtacacaacatagtggctgtcattcctcaaatggcaaaaccagcccctgttgaggagtagct

SEQ ID NO: 169760 - DNA, 5657 bp, Homo sapiens
  Payload ID: 13420
  Gene Symbol: PREPL
  Gene Name: prolyl endopeptidase-like
  Uniprot ID: Q4J6C6
  ENST ID: ENST00000425263
  CDS Start-End: 960-3143
gaagaaactgaggcccggagacacagttaagtgtaggagctaagacctcaacccaggtctctctgactcttaactacttattagcaatcaaggttaataaaagctacctcctgacaaaccagagatggccttacattttatttgtgcatcttgcaggggttttttgttgtttttaattaaagcgctaaatacctttttaacattaaaaatccgaagttgagtatgtccagtatttggaaccgaaccaaattggattttttgctatacagcttactgtacaagtgacctggaacagttgcttagaacctcccacagccacagtttggcaacctgtaaaatgtgcatggtaatatctactttattaagtccatataaaatttaaattagacaaacaagataaaagcacctggcagttagttaacactcaacaataattaatcttccctcccccacctttattaaataattaggcttttccagtttatcttccacatatataccaaagatacgttcataattatgtaagaccaaagggctttttaccttttacagccctgagttcctgagataccccattaagtctgtgtacttatttgcaaatttatattttgtttcttgttttgttttttgttttagtttaacccctatgtgtgccagagtcagtgctgcatagtttgagcctgataggattaactttacaaatgagacatttaagtcacatctgccaagaattatgatttgaatgaaactttaacttacacaggtttttagatttagttagcctaagttatcagctgtctgaagttattcataacctaagtggggcatggccctgaaaaggagggatgagaactgctgatcttagttactctgagaacccactactctgtaatcatacctataaaatcattcgtgtgctggcagccccaaaaggagcataaaccagggactttgatatcatgcagcagaagaccaaattatttctccaagctttgaagtatagtattcctcaccttggaaaatgcatgcagaaacagcatttgaatcactataacttcgctgatcattgttacaatagaataaaattgaaaaaatatcacctaaccaagtgtcttcagaataaacccaagatatcagagttagcaagaaacatcccaagtcggagcttctcatgtaaggatcttcagcctgttaaacaagaaaacgaaaaaccccttccagaaaacatggatgcatttgaaaaagtgagaacaaaattagaaacacagccacaagaagaatatgaaatcatcaatgtggaagttaaacatggtggttttgtttattaccaagaaggttgttgcttggttcgttccaaagatgaagaagcagacaatgataattatgaagttttattcaatttggaggaacttaagttagaccagcccttcattgattgtatcagagttgctccagatgaaaaatatgtggctgccaagataagaactgaagattctgaagcatctacctgtgtaattataaagctcagcgatcagcccgtaatggaagcttctttcccgaatgtgtccagttttgaatgggtaaaggacgaggaagatgaagatgttttattctacaccttccagaggaaccttcgctgtcatgacgtatatcgagccacttttggtgataacaaacgtaatgaacgcttttacacagaaaaagacccaagctactttgttttcctttatcttacaaaagacagtcgtttcctcaccataaatattatgaacaagactacttctgaagtgtggttgatagatggcctgagcccttgggacccaccagtacttatccagaagcgaatacatggggtcctttactatgttgaacacagagatgatgaattatacattctcactaatgttggagaacctacagaatttaagctaatgagaacagcggctgatacccctgcaattatgaattgggatttattttttacaatgaagagaaatacaaaagtgatagacttggacatgtttaaggatcactgtgttctatttctgaagcacagcaatctcctttatgttaatgtgattggtctggctgatgattcagttcggtctctaaagctccctccttgggcctgtggattcataatggatacaaattctgacccaaagaactgcccctttcaactttgctctccaatacgtcccccaaaatattacacatacaagtttgcagaaggcaaactgtttgaggaaactgggcatgaagacccaatcacaaagactagtcgcgttttacgtctagaagccaaaagcaaggatggaaaattagtgccaatgactgttttccacaaaactgactctgaggacttgcagaagaaacctctcttggtacatgtatatggagcttatggaatggatttgaaaatgaatttcaggcctgagaggcgggtcctggtggatgatggatggatattagcatactgccatgttcgaggtggtggtgagttaggcctccagtggcacgctgatggccgcctaactaaaaaactcaatggccttgctgatttagaggcttgcattaagacgcttcatggccaaggcttttctcagccaagtctaacaaccctgactgctttcagtgctggaggggtgcttgcaggagcattgtgtaattctaatccagagctggtgagagcggtgactttggaggcacctttcttggatgttctcaacaccatgatggacactacacttcctctgacattagaagaattagaagaatgggggaatccttcatctgatgaaaaacacaagaactacataaaacgttactgtccctatcaaaatattaaacctcagcattatccttcaattcacataacggcatatgaaaacgatgaacgggtacctctgaaaggaattgtaagttatactgagaaactcaaggaagccatcgcggagcatgctaaggacacaggtgaaggctatcagacccctaatattattctagatattcagcctggaggcaatcatgtaattgaggattctcacaaaaagattacagcccaaattaaattcctgtacgaggaacttggacttgacagcaccagtgttttcgaggatcttaagaaatacctgaaattctgaaacactgcattcaactgggaattggaaacacactgaaatatttcatagtcttacttccaattgagttagcaaaaaaaaaattaataacttgagacttttaagttattaattttttaaaatgtgcttctccatctaaattttgcttagtctacatctcacttgcttatactattctctccattgatgcacatgcccattaacctaggaaagtaattttcaaatcatgctccttagaaggatgtggagtagagggaagggaaggattggtgatagcagagctccaggcctcccttccagtcagaacagttgagcagtttacaaattagtgtcctgcctctttgctagcaaatgcttttagacactgtggcagtgagtcatcctctaatttctatgactgcattttaagggaaaagataaaattcttccccttaaaattcgttaaagtttttgaataatctggggtcctaatgtgttctggtcatccctgattgatgctatctgaataaagttataagctcctataagccataatttacttttaaacattttatttttttcaaaacatttgagaacctttcttaaagcagttacattcaagctacagaaatatcgaagaattaatgattgttcaccaagcagcatgctgtacatgaagctattacaaatgcttacaatcccactgaaatgccagtgtcttcatctcttcataaaggtgcctaacacgaggtatacagtatgttcagtacactggaatagcatgctcgattggaaacaaagcatctatctctgaaagctgtttggcgatgaaggagattcttcgtgttgtgttcaaagatgagtccctctcccttgtccagaaaaatgccacttgtatcaactttactgcctttgtcggcagaattggtacttaaccttattctcattttagcgggaaggcccgaaatcatattatgtagatttaacagtgttgattctccaaaattcagaaccacgataaagattctgtcgatgccatccagctctcttgtgtacacaacatagtggctgtcattcctcaaatggcaaaaccagcccctgttgaggagtagctcattggcatgaagtagacttaaatcttgatataacttcaaagccgatctgggctgagtcttttggacctatttttttaaaaaagtatttacgtaagtgtttgattctaagaattgtttgtaagtatttttaatatattgtaaggagttatttacccaaaacacttgctccaattttgccccttataattgccaaattgtaagcatcaataagtaggtaagaacaatttatataaaaactgatagaaatgacaaattcggggtttcggcttgtctgggagtcaataagtacgcacagtgctctgctacattgtagagtttctgtagagatcaaatttgactccactttaggagtcccaaagcaaatgtccatgtctaagatgaatatttaacttgcatagtcattctgtgctatattgtaactgccagatggccagaaagaaggcaacagtggactcagacttctgaggaatttgggtttgttcccctttgtagactaatgtgtaggttgctgttgtgcgaagatcgtgtaactttagcagacatgtatttcttgcacagctaatagaagacaaagttgaaaaaaaggatgcaaaataaaaagctgcctaaggtgaaagttagaaattgtagacttttttttaccataatagtatgtgttcattaaagatgatttgggtttattttacagctatataaaacataatttgatgatgtacttctaacctttcaagcattttctgttattgactatataatatagcctccataaatgtttttaatgacaatattctgttgaacggttgtaccatactcagccatgccctttcattttgacgatagtgtttctaatattttgtatttttattcccctccccccatttttgtattacttaagatagattatcagaaagacagttactttgtcaaagagtatgggcacttgatacataatgccaaattattcttcataagagctgttgccaaatcagtgataatgttcatttaattgtattcttgccagccatgtttactggggtgatagttgttattgtggttgttattgttctttaggggtaggttcccaatatgtggtctttaaataattatctaatggtgtttaaaaagatgtttattctgtttgtcaggtacaaagatatttatgatacatgtatgacttgtctaagttattaacattttctctagccttaggtaatgcatgaaagcacatgtttcagtgccactcacataagaagtgcccgtacgttctggacaagcccctggatcaatttttcagcacactaattagcacttatgttctattttatttcattgtttgacagtcttttatacttctgagagatctaatcacttcttgaaagaatgtcaaggagctccattaaacagcaatctactgggggtattt

SEQ ID NO: 169761 - DNA, 660 bp, Homo sapiens
  Payload ID: 13420
  Gene Symbol: PREPL
  Gene Name: prolyl endopeptidase-like
  ENST ID: ENST00000438314
  CDS Start-End: 208-660
cagacttcggctggacttgcctgcggtgacacctgctcccctctgagagcttcaggttctccggcctgccttcactggtttgtgtccagagccggactgattctctcaatttgcatgaagaaactgaggcccggagacacagttaagtgtaggagctaagacctcaacccagccccaaaaggagcataaaccagggactttgatatcatgcagcagaagaccaaattatttctccaagctttgaagtatagtattcctcaccttggaaaatgcatgcagaaacagcatttgaatcactataacttcgctgatcattgttacaatagaataaaattgaaaaaatatcacctaaccaagtgtcttcagaataaacccaagatatcagagttagcaagaaacatcccaagtcggagcttctcatgtaaggatcttcagcctgttaaacaagaaaacgaaaaaccccttccagaaaacatggatgcatttgaaaaagtgagaacaaaattagaaacacagccacaagaagaatatgaaatcatcaatgtggaagttaaacatggtggttttgtttattaccaagaaggttgttgcttggttcgttccaaagatgaagaagcagacaatgataattatgaagttttattcaatttggaggaactt

SEQ ID NO: 169762 - DNA, 602 bp, Homo sapiens
  Payload ID: 13420
  Gene Symbol: PREPL
  Gene Name: prolyl endopeptidase-like
  ENST ID: ENST00000420756
  CDS Start-End: 1-362
acataaaacgttactgtccctatcaaaatattaaacctcagcattatccttcaattcacataacggcatatgaaaacgatgaacgggtacctctgaaaggaattgtaagttatactgagaaactcaaggaagccatcgcggagcatgctaaggacacaggtgaaggctatcagacccctaatattattctagatattcagcctggaggcaatcatgtaattgaggattctcacaaaaaggtatgttatcaaggccctctcagtggacagattcccgaactagatacatgttgttttcacattttcagtggttgcagcaggtttatgacaaagccacttcacaaatgtcctatctatgggtgagacccaggaggggagggagggacactgtgtcaatcaagagaaatgtctctctcttgtacttgatacgtgagctctgttaaagaaaataatttaatcttaattgttggaagccttctgcctctctctcgaatgaaagtattcttgccataaattgctgacttcacggttaggtaaagatggatagataaagagaagcttaaacagtggcattttactacaaaggccttctatttaattttt

SEQ ID NO: 169763 - DNA, 6273 bp, Homo sapiens
  Payload ID: 13420
  Gene Symbol: PREPL
  Gene Name: prolyl endopeptidase-like
  Uniprot ID: Q4J6C6
  ENST ID: ENST00000426481
  CDS Start-End: 960-3143
gaagaaactgaggcccggagacacagttaagtgtaggagctaagacctcaacccaggtctctctgactcttaactacttattagcaatcaaggttaataaaagctacctcctgacaaaccagagatggccttacattttatttgtgcatcttgcaggggttttttgttgtttttaattaaagcgctaaatacctttttaacattaaaaatccgaagttgagtatgtccagtatttggaaccgaaccaaattggattttttgctatacagcttactgtacaagtgacctggaacagttgcttagaacctcccacagccacagtttggcaacctgtaaaatgtgcatggtaatatctactttattaagtccatataaaatttaaattagacaaacaagataaaagcacctggcagttagttaacactcaacaataattaatcttccctcccccacctttattaaataattaggcttttccagtttatcttccacatatataccaaagatacgttcataattatgtaagaccaaagggctttttaccttttacagccctgagttcctgagataccccattaagtctgtgtacttatttgcaaatttatattttgtttcttgttttgttttttgttttagtttaacccctatgtgtgccagagtcagtgctgcatagtttgagcctgataggattaactttacaaatgagacatttaagtcacatctgccaagaattatgatttgaatgaaactttaacttacacaggtttttagatttagttagcctaagttatcagctgtctgaagttattcataacctaagtggggcatggccctgaaaaggagggatgagaactgctgatcttagttactctgagaacccactactctgtaatcatacctataaaatcattcgtgtgctggcagccccaaaaggagcataaaccagggactttgatatcatgcagcagaagaccaaattatttctccaagctttgaagtatagtattcctcaccttggaaaatgcatgcagaaacagcatttgaatcactataacttcgctgatcattgttacaatagaataaaattgaaaaaatatcacctaaccaagtgtcttcagaataaacccaagatatcagagttagcaagaaacatcccaagtcggagcttctcatgtaaggatcttcagcctgttaaacaagaaaacgaaaaaccccttccagaaaacatggatgcatttgaaaaagtgagaacaaaattagaaacacagccacaagaagaatatgaaatcatcaatgtggaagttaaacatggtggttttgtttattaccaagaaggttgttgcttggttcgttccaaagatgaagaagcagacaatgataattatgaagttttattcaatttggaggaacttaagttagaccagcccttcattgattgtatcagagttgctccagatgaaaaatatgtggctgccaagataagaactgaagattctgaagcatctacctgtgtaattataaagctcagcgatcagcccgtaatggaagcttctttcccgaatgtgtccagttttgaatgggtaaaggacgaggaagatgaagatgttttattctacaccttccagaggaaccttcgctgtcatgacgtatatcgagccacttttggtgataacaaacgtaatgaacgcttttacacagaaaaagacccaagctactttgttttcctttatcttacaaaagacagtcgtttcctcaccataaatattatgaacaagactacttctgaagtgtggttgatagatggcctgagcccttgggacccaccagtacttatccagaagcgaatacatggggtcctttactatgttgaacacagagatgatgaattatacattctcactaatgttggagaacctacagaatttaagctaatgagaacagcggctgatacccctgcaattatgaattgggatttattttttacaatgaagagaaatacaaaagtgatagacttggacatgtttaaggatcactgtgttctatttctgaagcacagcaatctcctttatgttaatgtgattggtctggctgatgattcagttcggtctctaaagctccctccttgggcctgtggattcataatggatacaaattctgacccaaagaactgcccctttcaactttgctctccaatacgtcccccaaaatattacacatacaagtttgcagaaggcaaactgtttgaggaaactgggcatgaagacccaatcacaaagactagtcgcgttttacgtctagaagccaaaagcaaggatggaaaattagtgccaatgactgttttccacaaaactgactctgaggacttgcagaagaaacctctcttggtacatgtatatggagcttatggaatggatttgaaaatgaatttcaggcctgagaggcgggtcctggtggatgatggatggatattagcatactgccatgttcgaggtggtggtgagttaggcctccagtggcacgctgatggccgcctaactaaaaaactcaatggccttgctgatttagaggcttgcattaagacgcttcatggccaaggcttttctcagccaagtctaacaaccctgactgctttcagtgctggaggggtgcttgcaggagcattgtgtaattctaatccagagctggtgagagcggtgactttggaggcacctttcttggatgttctcaacaccatgatggacactacacttcctctgacattagaagaattagaagaatgggggaatccttcatctgatgaaaaacacaagaactacataaaacgttactgtccctatcaaaatattaaacctcagcattatccttcaattcacataacggcatatgaaaacgatgaacgggtacctctgaaaggaattgtaagttatactgagaaactcaaggaagccatcgcggagcatgctaaggacacaggtgaaggctatcagacccctaatattattctagatattcagcctggaggcaatcatgtaattgaggattctcacaaaaagattacagcccaaattaaattcctgtacgaggaacttggacttgacagcaccagtgttttcgaggatcttaagaaatacctgaaattctgaaacactgcattcaactgggaattggaaacacactgaaatatttcatagtcttacttccaattgagttagcaaaaaaaaaattaataacttgagacttttaagttattaattttttaaaatgtgcttctccatctaaattttgcttagtctacatctcacttgcttatactattctctccattgatgcacatgcccattaacctaggaaagtaattttcaaatcatgctccttagaaggatgtggagtagagggaagggaaggattggtgatagcagagctccaggcctcccttccagtcagaacagttgagcagtttacaaattagtgtcctgcctctttgctagcaaatgcttttagacactgtggcagtgagtcatcctctaatttctatgactgcattttaagggaaaagataaaattcttccccttaaaattcgttaaagtttttgaataatctggggtcctaatgtgttctggtcatccctgattgatgctatctgaataaagttataagctcctataagccataatttacttttaaacattttatttttttcaaaacatttgagaacctttcttaaagcagttacattcaagctacagaaatatcgaagaattaatgattgttcaccaagcagcatgctgtacatgaagctattacaaatgcttacaatcccactgaaatgccagtgtcttcatctcttcataaaggtgcctaacacgaggtatacagtatgttcagtacactggaatagcatgctcgattggaaacaaagcatctatctctgaaagctgtttggcgatgaaggagattcttcgtgttgtgttcaaagatgagtccctctcccttgtccagaaaaatgccacttgtatcaactttactgcctttgtcggcagaattggtacttaaccttattctcattttagcgggaaggcccgaaatcatattatgtagatttaacagtgttgattctccaaaattcagaaccacgataaagattctgtcgatgccatccagctctcttgtgtacacaacatagtggctgtcattcctcaaatggcaaaaccagcccctgttgaggagtagctcattggcatgaagtagacttaaatcttgatataacttcaaagccgatctgggctgagtcttttggacctatttttttaaaaaagtatttacgtaagtgtttgattctaagaattgtttgtaagtatttttaatatattgtaaggagttatttacccaaaacacttgctccaattttgccccttataattgccaaattgtaagcatcaataagtaggtaagaacaatttatataaaaactgatagaaatgacaaattcggggtttcggcttgtctgggagtcaataagtacgcacagtgctctgctacattgtagagtttctgtagagatcaaatttgactccactttaggagtcccaaagcaaatgtccatgtctaagatgaatatttaacttgcatagtcattctgtgctatattgtaactgccagatggccagaaagaaggcaacagtggactcagacttctgaggaatttgggtttgttcccctttgtagactaatgtgtaggttgctgttgtgcgaagatcgtgtaactttagcagacatgtatttcttgcacagctaatagaagacaaagttgaaaaaaaggatgcaaaataaaaagctgcctaaggtgaaagttagaaattgtagacttttttttaccataatagtatgtgttcattaaagatgatttgggtttattttacagctatataaaacataatttgatgatgtacttctaacctttcaagcattttctgttattgactatataatatagcctccataaatgtttttaatgacaatattctgttgaacggttgtaccatactcagccatgccctttcattttgacgatagtgtttctaatattttgtatttttattcccctccccccatttttgtattacttaagatagattatcagaaagacagttactttgtcaaagagtatgggcacttgatacataatgccaaattattcttcataagagctgttgccaaatcagtgataatgttcatttaattgtattcttgccagccatgtttactggggtgatagttgttattgtggttgttattgttctttaggggtaggttcccaatatgtggtctttaaataattatctaatggtgtttaaaaagatgtttattctgtttgtcaggtacaaagatatttatgatacatgtatgacttgtctaagttattaacattttctctagccttaggtaatgcatgaaagcacatgtttcagtgccactcacataagaagtgcccggccaggcaaggtggctcaggcccgtaatcctagcactttgggaggcaaggcagacagatcaccagaggtcaggagttcaagaccagcctggccaacatggtgaaacaccatctctactaaaaaatacagaaattacccgggcataatgacgtgcacctgtaatcccagctacttgggaggctgcagcaggagaatcacttgaacccaggaagcagaggctgcagtgtgccgagatcacgccactgcactcgagcatgggtgacggagcaagactgtctcaaaaaaaaaaaaaaacagtgttgagatcctttaagtattattgtgcacatgtgcaaatatttctaagtattaggaatggaattattaggtcaaaagataacttcattttttgtgtttatagctatagctgggttgcaagctttctattatttgcttgctatatcttcattttaattctttgtgttttatgttagtgtttcttatgtctgtttttgttatctgagtggttttatcttttaataggctaatttaacccattcatatttgtaattattgtattatttagacataattcggaagccctattttatttgtagttatactattgtttagggtttttttctattaagctttttgttggattgactgtataatttttttcttctagtattctttgaaaatttgaaaattgttatattttatgtctagtgttctttgaaaataattctttgaaaattatttttatgtcctaattttaccattaaaattatgaccacttga

SEQ ID NO: 169764 - DNA, 6049 bp, Homo sapiens
  Payload ID: 13420
  Gene Symbol: PREPL
  Gene Name: prolyl endopeptidase-like
  Uniprot ID: Q4J6C6
  ENST ID: ENST00000541738
  CDS Start-End: 388-2304
atttccggtactcgcatctccttggcaaccagggccgagctgtcacgccattgcaccattcttgctggtagccatcttgagtgagggcggaccagaggatgagagagctgtggcagggctactggaacgctgtccctcattgttttagccttctgtgcttcatctcgagctcagaagactagcgaagaacgaaaagtcttatatatttcgagactaaagaacccaggaacccaagaagactccttgaccacaacaaagatggcgaaatctgcctgttgctcgtgctagattgaggttacgtagattggcgtgctgcaaaccagctctaggcggctctgggatcttcagcctgttaaacaagaaaacgaaaaaccccttccagaaaacatggatgcatttgaaaaagtgagaacaaaattagaaacacagccacaagaagaatatgaaatcatcaatgtggaagttaaacatggtggttttgtttattaccaagaaggttgttgcttggttcgttccaaagatgaagaagcagacaatgataattatgaagttttattcaatttggaggaacttaagttagaccagcccttcattgattgtatcagagttgctccagatgaaaaatatgtggctgccaagataagaactgaagattctgaagcatctacctgtgtaattataaagctcagcgatcagcccgtaatggaagcttctttcccgaatgtgtccagttttgaatgggtaaaggacgaggaagatgaagatgttttattctacaccttccagaggaaccttcgctgtcatgacgtatatcgagccacttttggtgataacaaacgtaatgaacgcttttacacagaaaaagacccaagctactttgttttcctttatcttacaaaagacagtcgtttcctcaccataaatattatgaacaagactacttctgaagtgtggttgatagatggcctgagcccttgggacccaccagtacttatccagaagcgaatacatggggtcctttactatgttgaacacagagatgatgaattatacattctcactaatgttggagaacctacagaatttaagctaatgagaacagcggctgatacccctgcaattatgaattgggatttattttttacaatgaagagaaatacaaaagtgatagacttggacatgtttaaggatcactgtgttctatttctgaagcacagcaatctcctttatgttaatgtgattggtctggctgatgattcagttcggtctctaaagctccctccttgggcctgtggattcataatggatacaaattctgacccaaagaactgcccctttcaactttgctctccaatacgtcccccaaaatattacacatacaagtttgcagaaggcaaactgtttgaggaaactgggcatgaagacccaatcacaaagactagtcgcgttttacgtctagaagccaaaagcaaggatggaaaattagtgccaatgactgttttccacaaaactgactctgaggacttgcagaagaaacctctcttggtacatgtatatggagcttatggaatggatttgaaaatgaatttcaggcctgagaggcgggtcctggtggatgatggatggatattagcatactgccatgttcgaggtggtggtgagttaggcctccagtggcacgctgatggccgcctaactaaaaaactcaatggccttgctgatttagaggcttgcattaagacgcttcatggccaaggcttttctcagccaagtctaacaaccctgactgctttcagtgctggaggggtgcttgcaggagcattgtgtaattctaatccagagctggtgagagcggtgactttggaggcacctttcttggatgttctcaacaccatgatggacactacacttcctctgacattagaagaattagaagaatgggggaatccttcatctgatgaaaaacacaagaactacataaaacgttactgtccctatcaaaatattaaacctcagcattatccttcaattcacataacggcatatgaaaacgatgaacgggtacctctgaaaggaattgtaagttatactgagaaactcaaggaagccatcgcggagcatgctaaggacacaggtgaaggctatcagacccctaatattattctagatattcagcctggaggcaatcatgtaattgaggattctcacaaaaagattacagcccaaattaaattcctgtacgaggaacttggacttgacagcaccagtgttttcgaggatcttaagaaatacctgaaattctgaaacactgcattcaactgggaattggaaacacactgaaatatttcatagtcttacttccaattgagttagcaaaaaaaaaattaataacttgagacttttaagttattaattttttaaaatgtgcttctccatctaaattttgcttagtctacatctcacttgcttatactattctctccattgatgcacatgcccattaacctaggaaagtaattttcaaatcatgctccttagaaggatgtggagtagagggaagggaaggattggtgatagcagagctccaggcctcccttccagtcagaacagttgagcagtttacaaattagtgtcctgcctctttgctagcaaatgcttttagacactgtggcagtgagtcatcctctaatttctatgactgcattttaagggaaaagataaaattcttccccttaaaattcgttaaagtttttgaataatctggggtcctaatgtgttctggtcatccctgattgatgctatctgaataaagttataagctcctataagccataatttacttttaaacattttatttttttcaaaacatttgagaacctttcttaaagcagttacattcaagctacagaaatatcgaagaattaatgattgttcaccaagcagcatgctgtacatgaagctattacaaatgcttacaatcccactgaaatgccagtgtcttcatctcttcataaaggtgcctaacacgaggtatacagtatgttcagtacactggaatagcatgctcgattggaaacaaagcatctatctctgaaagctgtttggcgatgaaggagattcttcgtgttgtgttcaaagatgagtccctctcccttgtccagaaaaatgccacttgtatcaactttactgcctttgtcggcagaattggtacttaaccttattctcattttagcgggaaggcccgaaatcatattatgtagatttaacagtgttgattctccaaaattcagaaccacgataaagattctgtcgatgccatccagctctcttgtgtacacaacatagtggctgtcattcctcaaatggcaaaaccagcccctgttgaggagtagctcattggcatgaagtagacttaaatcttgatataacttcaaagccgatctgggctgagtcttttggacctatttttttaaaaaagtatttacgtaagtgtttgattctaagaattgtttgtaagtatttttaatatattgtaaggagttatttacccaaaacacttgctccaattttgccccttataattgccaaattgtaagcatcaataagtaggtaagaacaatttatataaaaactgatagaaatgacaaattcggggtttcggcttgtctgggagtcaataagtacgcacagtgctctgctacattgtagagtttctgtagagatcaaatttgactccactttaggagtcccaaagcaaatgtccatgtctaagatgaatatttaacttgcatagtcattctgtgctatattgtaactgccagatggccagaaagaaggcaacagtggactcagacttctgaggaatttgggtttgttcccctttgtagactaatgtgtaggttgctgttgtgcgaagatcgtgtaactttagcagacatgtatttcttgcacagctaatagaagacaaagttgaaaaaaaggatgcaaaataaaaagctgcctaaggtgaaagttagaaattgtagacttttttttaccataatagtatgtgttcattaaagatgatttgggtttattttacagctatataaaacataatttgatgatgtacttctaacctttcaagcattttctgttattgactatataatatagcctccataaatgtttttaatgacaatattctgttgaacggttgtaccatactcagccatgccctttcattttgacgatagtgtttctaatattttgtatttttattcccctccccccatttttgtattacttaagatagattatcagaaagacagttactttgtcaaagagtatgggcacttgatacataatgccaaattattcttcataagagctgttgccaaatcagtgataatgttcatttaattgtattcttgccagccatgtttactggggtgatagttgttattgtggttgttattgttctttaggggtaggttcccaatatgtggtctttaaataattatctaatggtgtttaaaaagatgtttattctgtttgtcaggtacaaagatatttatgatacatgtatgacttgtctaagttattaacattttctctagccttaggtaatgcatgaaagcacatgtttcagtgccactcacataagaagtgcccggtaagtgttagctattattgtctacttgagttactactttctaaaagtatgttgaagtctttttctgtaattgcagatttgttgattttgcatttgagtattttctatattttgaagctgttagatgcgtagtcatgatttttggtggaatgttttatcaatttttgaaaattgcctttgtctcatataatgcttttcatattgaactatattttgtctgctattaaatacttccaagcctgatttttgtaattttattttttattcaattacaagaatacatactataaaaaggttttcttcaacacctttccatagcttcacagttcccctcagagacaggcactatatgttcttttgtttttaatgtatcatatgtttgcataggcacagaatgtatcatttcatatgtttatatatttttctttacacagttggtgatatgttaccattctatactttattgaatacctgtttgaaatggtctcatatcaatgtatatagaactgtcatttttaaaagctgcatactgggcccatagttgatagaactggttttctgttgataaaatatttaaatcatttcttgtgtcttctattaaaaacaaattttgcaggccaggcaaggtggctcaggcccgtaatcctagcactttgggaggcaaggcagacagatcaccagaggtcaggagttcaagaccagcctggccaacatggtgaaacaccatctctactaaaaaatacagaaattacccgggcataatgacgtgcacctgtaatcccagctacttgggaggctgcagcaggagaatcacttgaacccaggaagcagaggctgcagtgtgccgagatcacgccactgcactcgagcatgggtgacggagcaagactgtctcaaaaaaaaaaaaaaacagtgttgagatcctttaagtattattgtgcacatgtgcaaatatttctaagtattaggaatggaattattaggtcaaaagataacttcattttttgtgtttatagctatagctgggttgcaagctttctattatttgcttgctatatcttcattttaattctttgtgttttatgttagtgtttcttatgtctgtttttgttatctgagtggttttatcttttaataggctaatttaacccattcatatttgtaattattgtattatttagacataattcggaagccctattttatttgtagttatactattgtttagggtttttttctattaagctttttgttggattgactgtataatttttttcttctagtattctttgaaaatttgaaaattgttatattttatgtctagtgttctttgaaaataattctttgaaaattatttttatgtcctaattttaccattaaaattatgaccacttg

SEQ ID NO: 169765 - DNA, 3090 bp, Homo sapiens
  Payload ID: 13421
  Gene Symbol: PRCP
  Gene Name: prolylcarboxypeptidase (angiotensinase C)
  Uniprot ID: P42785
  ENST ID: ENST00000313010
  CDS Start-End: 196-1686
ctcggggatgggggcggagtggctgtggtgacctggcttgggcggcgtctctgaggagctggctggctttgggtttcccctgggaggagctgttttgcggcgggcggagctgcaggctgggcagggcttagcctgtgcgcttctgctggcctccttttcgccctcccacccgcactgcagtctccagcctgagccatgggccgccgagccctcctgctcctgcttctgtcttttctggcgccctgggccaccatagccctccggccggccttaagggccctcggcagcctacacttgccaaccaaccccacatccctcccggctgtagccaagaactattcggttctctacttccaacagaaggttgatcattttggatttaatactgtgaaaacttttaatcagcggtacctagtagctgataaatactggaagaaaaatggtggatcaatacttttctacactggtaatgaaggggacattatctggttttgtaataacacggggttcatgtgggatgtggctgaggaactgaaagctatgttggtgtttgctgaacatcgatactatggagagtctctcccctttggtgacaactcattcaaggattccagacacttgaatttcctgacatcagaacaagctctggctgattttgcagagttaatcaaacacttgaaaagaacaatcccaggagctgaaaatcaacctgtcattgccataggaggctcctatggtggcatgcttgccgcctggtttaggatgaaatatcctcatatggtagttggagctcttgcagcttctgcccctatctggcagtttgaggatttagtaccttgtggtgtatttatgaagatcgtaactacagattttaggaaaagcggtccacattgttcagagagcatccacaggtcctgggatgccattaatcgactctcaaatactggcagtggtttgcagtggcttactggagcccttcacttatgcagcccattaacttctcaggacatccaacatttgaaagactggatctctgaaacctgggtgaatctggcaatggtggactatccttatgcctctaactttttacagcctttgcctgcttggcctatcaaggtagtgtgccagtatttgaaaaatcccaatgtatctgattcactgctgctgcagaatattttccaagctctgaatgtatattacaattattcgggccaggtgaaatgcctgaatatttcagagacagcaactagcagtctgggaacactgggttggagctatcaggcctgcacagaagtagtcatgcccttttgtactaatggtgtcgatgacatgtttgaacctcactcatggaacttaaaggaactttctgatgactgttttcaacagtggggtgtgagaccaaggccctcctggatcactactatgtatggaggcaaaaacattagttcacacacaaacattgttttcagcaatggtgaactagacccctggtcaggaggtggagtaactaaggatatcacagacactctggttgcagtcaccatctcagagggggcccaccacttagatctccgcaccaagaatgccttggatcctatgtctgtgctgttagcccgctccttggaagttagacatatgaagaattggatcagagatttctatgacagtgcgggaaagcagcactgagaaacttttgattgttttcaatttcttcttttatgttcacaccaccacattcccattcactttgattttctacatgtaattaccttcttttgtttatcattagatttgatggggccaaagttgagatagaatagagggtgatgacggtaagagcaagtgtcccatgaatgtgatttcctgggttctcactgtctttgcaccacgtctaggaagaatcttcttgatagctctcccacaccatcagtggccctcataactggagtagagttcctggttgcttttcataagagggagagttactttctttgtatctctgcaagcagagatttctctttggttttgaggttgaagtgtctttggcccatttgtaagtccccatccctaccctacacaaagtaaaagcagaagatagataaaaaatgatgtaattgcagctggtaggatgtctggtgccaatccaggaagtgagagccatttcttttgtaccggatttaatgactttgaactgtgctgtaaataaataatacagctggaccttatacctgtgtgttgcttctgaagctcacttcaactccggctgatggaaatgctgtgtgcactgggcttagctgtttttggaaagtcctttaattttttctcttccacttggcagcttttcttagttctgggatgttggccactgtggtactgccagtaagaaatctggcctttttctgctccatttctctttgtttctaaggtcagttttaatttgtttgaattctgccagtttaggaaaatgactctgttttgtctttttaaatctgagcaagctttatgctgtagtcactaattatatttcagtaagaagcctttaaaaattgatgaatcagctattccaaaagtagaatatagtaatattcagcttttaaatttttaaaattttattttctgatagttgttactgctgtcattaaaaccagaagtgttagacactaacaggcaggtgcacaagaacttttctgtatgacttccaaaagacaagctgactaattcatgcaggcagcatatttgacattaataaatggccaagccattcctatttccaaggggttggcttctttcaagcagttcttacactgagacctttcttcagagagcttttctaggataacaaatagggttggatcaaaacctttcagggacacagagagacagagagagagagactaacagtttctactctgttgaaagatttcttcctccttgtttcttttcattttctctcaataatttttttttcttcaccctgccttgggaacattttctgcttttaaaaaactgtaccttgagcttgatcatttttatggcattttttttttttaagggcatatatagagttcattcttgggatggaaagctgaa

SEQ ID NO: 169766 - DNA, 2120 bp, Homo sapiens
  Payload ID: 13421
  Gene Symbol: PRCP
  Gene Name: prolylcarboxypeptidase (angiotensinase C)
  Uniprot ID: P42785
  ENST ID: ENST00000393399
  CDS Start-End: 29-1582
acccgcactgcagtctccagcctgagccatgggccgccgagccctcctgctcctgcttctgtcttttctggcgccctgggccaccatagccctccggccggccttaagggccctcggcagcctacacttgccaaccaaccccacatccctcccggctgtagccaagaactattcggttctctacttccaacagaaggcccttgctgctgggcagttgcacatatgtattatccaactaaatcattacaagactcctctggttgatcattttggatttaatactgtgaaaacttttaatcagcggtacctagtagctgataaatactggaagaaaaatggtggatcaatacttttctacactggtaatgaaggggacattatctggttttgtaataacacggggttcatgtgggatgtggctgaggaactgaaagctatgttggtgtttgctgaacatcgatactatggagagtctctcccctttggtgacaactcattcaaggattccagacacttgaatttcctgacatcagaacaagctctggctgattttgcagagttaatcaaacacttgaaaagaacaatcccaggagctgaaaatcaacctgtcattgccataggaggctcctatggtggcatgcttgccgcctggtttaggatgaaatatcctcatatggtagttggagctcttgcagcttctgcccctatctggcagtttgaggatttagtaccttgtggtgtatttatgaagatcgtaactacagattttaggaaaagcggtccacattgttcagagagcatccacaggtcctgggatgccattaatcgactctcaaatactggcagtggtttgcagtggcttactggagcccttcacttatgcagcccattaacttctcaggacatccaacatttgaaagactggatctctgaaacctgggtgaatctggcaatggtggactatccttatgcctctaactttttacagcctttgcctgcttggcctatcaaggtagtgtgccagtatttgaaaaatcccaatgtatctgattcactgctgctgcagaatattttccaagctctgaatgtatattacaattattcgggccaggtgaaatgcctgaatatttcagagacagcaactagcagtctgggaacactgggttggagctatcaggcctgcacagaagtagtcatgcccttttgtactaatggtgtcgatgacatgtttgaacctcactcatggaacttaaaggaactttctgatgactgttttcaacagtggggtgtgagaccaaggccctcctggatcactactatgtatggaggcaaaaacattagttcacacacaaacattgttttcagcaatggtgaactagacccctggtcaggaggtggagtaactaaggatatcacagacactctggttgcagtcaccatctcagagggggcccaccacttagatctccgcaccaagaatgccttggatcctatgtctgtgctgttagcccgctccttggaagttagacatatgaagaattggatcagagatttctatgacagtgcgggaaagcagcactgagaaacttttgattgttttcaatttcttcttttatgttcacaccaccacattcccattcactttgattttctacatgtaattaccttcttttgtttatcattagatttgatggggccaaagttgagatagaatagagggtgatgacggtaagagcaagtgtcccatgaatgtgatttcctgggttctcactgtctttgcaccacgtctaggaagaatcttcttgatagctctcccacaccatcagtggccctcataactggagtagagttcctggttgcttttcataagagggagagttactttctttgtatctctgcaagcagagatttctctttggttttgaggttgaagtgtctttggcccatttgtaagtccccatccctaccctacacaaagtaaaagcagaagatagataaaaaatgatgtaattgcagctggtaggatgtctggtgccaatccaggaagtgagagccatttcttttgtaccggatttaatgactttgaactgtgctgtaaataaataatacagctggacctt

SEQ ID NO: 169767 - DNA, 546 bp, Homo sapiens
  Payload ID: 13421
  Gene Symbol: PRCP
  Gene Name: prolylcarboxypeptidase (angiotensinase C)
  ENST ID: ENST00000531128
  CDS Start-End: 104-546
ttactcagagccaatcagaagaaggcgccgcagagggtggagcttagcgaggaaatcctacaagcatctggaaacgaccattttcgtcaaactgcgggggttcatgtgggatgtggctgaggaactgaaagctatgttggtgtttgctgaacatcgatactatggagagtctctcccctttggtgacaactcattcaaggattccagacacttgaatttcctgacatcagaacaagctctggctgattttgcagagttaatcaaacacttgaaaagaacaatcccaggagctgaaaatcaacctgtcattgccataggaggctcctatggtggcatgcttgccgcctggtttaggatgaaatatcctcatatggtagttggagctcttgcagcttctgcccctatctggcagtttgaggatttagtaccttgtggtgtatttatgaagatcgtaactacagattttaggaaaagcggtccacattgttcagagagcatccacaggtcctgggatgccattaatcgactctcaaatactggcagtgg

SEQ ID NO: 169768 - DNA, 354 bp, Homo sapiens
  Payload ID: 13421
  Gene Symbol: PRCP
  Gene Name: prolylcarboxypeptidase (angiotensinase C)
  ENST ID: ENST00000533126
  CDS Start-End: 226-354
ggagcttcgctgagcctcctgggcgtagggttcccgggaaagtgtggagtgagccgcagcgccctggggtctggcggggttgatcattttggatttaatactgtgaaaacttttaatcagcggtacctagtagctgataaatactggaagaaaaatggtggatcaatacttttctacactggtaatgaaggggacattatctggttttgtaataacacggggttcatgtgggatgtggctgaggaactgaaagctatgttggtgtttgctgaacatcgatactatggagagtctctcccctttggtgacaactcattcaaggattccagacacttgaatttcctgacatcagaa

SEQ ID NO: 169769 - DNA, 783 bp, Homo sapiens
  Payload ID: 13421
  Gene Symbol: PRCP
  Gene Name: prolylcarboxypeptidase (angiotensinase C)
  ENST ID: ENST00000534631
  CDS Start-End: 206-783
gagggtggagcttagcgaggaaatcctacaagcatctggaaacgaccattttcgtcaaactgcgggtagagtctttctccccgacaggtggatcagtagtacagtccgtaaaattggttttggagcttcgctgagcctcctgggcgtagggttcccgggaaagtgtggagtgagccgcagcgccctggggtctggcggggggttcatgtgggatgtggctgaggaactgaaagctatgttggtgtttgctgaacatcgatactatggagagtctctcccctttggtgacaactcattcaaggattccagacacttgaatttcctgacatcagaacaagctctggctgattttgcagagttaatcaaacacttgaaaagaacaatcccaggagctgaaaatcaacctgtcattgccataggaggctcctatggtggcatgcttgccgcctggtttaggatgaaatatcctcatatggtagttggagctcttgcagcttctgcccctatctggcagtttgaggatttagtaccttgtggtgtatttatgaagatcgtaactacagattttaggaaaagcggtccacattgttcagagagcatccacaggtcctgggatgccattaatcgactctcaaatactggcagtggtttgcagtggcttactggagcccttcacttatgcagcccattaacttctcaggacatccaacatttgaaagactggatctctgaaacctgggtgaatctggcaatggtggactatccttatgcctctaacttttt

SEQ ID NO: 169770 - DNA, 936 bp, Homo sapiens
  Payload ID: 13421
  Gene Symbol: PRCP
  Gene Name: prolylcarboxypeptidase (angiotensinase C)
  ENST ID: ENST00000531801
  CDS Start-End: 236-936
agagggtggagcttagcgaggaaatcctacaagcatctggaaacgaccattttcgtcaaactgcgggtagagtctttctccccgacaggttgatcattttggatttaatactgtgaaaacttttaatcagcggtacctagtagctgataaatactggaagaaaaatggtggatcaatacttttctacactggtaatgaaggggacattatctggttttgtaataacacggggttcatgtgggatgtggctgaggaactgaaagctatgttggtgtttgctgaacatcgatactatggagagtctctcccctttggtgacaactcattcaaggattccagacacttgaatttcctgacatcagaacaagctctggctgattttgcagagttaatcaaacacttgaaaagaacaatcccaggagctgaaaatcaacctgtcattgccataggaggctcctatggtggcatgcttgccgcctggtttaggatgaaatatcctcatatggtagttggagctcttgcagcttctgcccctatctggcagtttgaggatttagtaccttgtggtgtatttatgaagatcgtaactacagattttaggaaaagcggtccacattgttcagagagcatccacaggtcctgggatgccattaatcgactctcaaatactggcagtggtttgcagtggcttactggagcccttcacttatgcagcccattaacttctcaggacatccaacatttgaaagactggatctctgaaacctgggtgaatctggcaatggtggactatccttatgcctctaactttttacagcctttgcctgcttggcctatcaaggtagtgtgccagtatttgaaaaatcccaatgtatctgattcactgctgctgcagaatattttccaagctctgaatgtatattacaattattcggg

SEQ ID NO: 169771 - DNA, 737 bp, Homo sapiens
  Payload ID: 13421
  Gene Symbol: PRCP
  Gene Name: prolylcarboxypeptidase (angiotensinase C)
  ENST ID: ENST00000534396
  CDS Start-End: 302-737
gctcctcaagcgcggccagaatggacggcgaggccgaggaggcaccgagagcgagcgacgctgcgcgggctgccagcatgctgtcacctctcaatatgatcttataagaaagtagaggccatggagatacaatatctacttcacgggattttatgttgatcattttggatttaatactgtgaaaacttttaatcagcggtacctagtagctgataaatactggaagaaaaatggtggatcaatacttttctacactggtaatgaaggggacattatctggttttgtaataacacggggttcatgtgggatgtggctgaggaactgaaagctatgttggtgtttgctgaacatcgatactatggagagtctctcccctttggtgacaactcattcaaggattccagacacttgaatttcctgacatcagaacaagctctggctgattttgcagagttaatcaaacacttgaaaagaacaatcccaggagctgaaaatcaacctgtcattgccataggaggctcctatggtggcatgcttgccgcctggtttaggatgaaatatcctcatatggtagttggagctcttgcagcttctgcccctatctggcagtttgaggatttagtaccttgtggtgtatttatgaagatcgtaactacagattttaggaaaagcggtccacattgttcagagagcatccacaggtcctgggatgccattaatcgactctcaaatactg

SEQ ID NO: 169772 - DNA, 611 bp, Homo sapiens
  Payload ID: 13421
  Gene Symbol: PRCP
  Gene Name: prolylcarboxypeptidase (angiotensinase C)
  ENST ID: ENST00000529671
  CDS Start-End: 121-611
gagatgatgcgtgtgcctccctgcctcgtgatacactggcctgtagtgaaccttcaataaattgtcatggtagctgttattgccgttacgtaggatttgcggaaggcaggaggtgtcgcaatggaattgcggtggccagggcagggtttggtggtgatgataatggttgatcattttggatttaatactgtgaaaacttttaatcagcggtacctagtagctgataaatactggaagaaaaatggtggatcaatacttttctacactggtaatgaaggggacattatctggttttgtaataacacggggttcatgtgggatgtggctgaggaactgaaagctatgttggtgtttgctgaacatcgatactatggagagtctctcccctttggtgacaactcattcaaggattccagacacttgaatttcctgacatcagaacaagctctggctgattttgcagagttaatcaaacacttgaaaagaacaatcccaggagctgaaaatcaacctgtcattgccataggaggctcctatggtggcatgcttgccgcctggtttaggatgaaatatcctcatatggtagttggagctcttgcagcttctgcccc

SEQ ID NO: 169773 - DNA, 491 bp, Homo sapiens
  Payload ID: 13421
  Gene Symbol: PRCP
  Gene Name: prolylcarboxypeptidase (angiotensinase C)
  ENST ID: ENST00000528082
  CDS Start-End: 193-491
gcttcgctgagcctcctgggcgtagggttcccgggaaagtgtggagttgatcattttggatttaatactgtgaaaacttttaatcagcggtacctagtagctgataaatactggaagaaaaatggtggatcaatacttttctacactggtaatgaaggggacattatctggttttgtaataacacggggttcatgtgggatgtggctgaggaactgaaagctatgttggtgtttgctgaacatcgatactatggagagtctctcccctttggtgacaactcattcaaggattccagacacttgaatttcctgacatcagaacaagctctggctgattttgcagagttaatcaaacacttgaaaagaacaatcccaggagctgaaaatcaacctgtcattgccataggaggctcctatggtggcatgcttgccgcctggtttaggatgaaatatcctcatatggtagttggagctcttgcagcttctgcccc

SEQ ID NO: 169774 - DNA, 574 bp, Homo sapiens
  Payload ID: 13421
  Gene Symbol: PRCP
  Gene Name: prolylcarboxypeptidase (angiotensinase C)
  ENST ID: ENST00000534264
  CDS Start-End: 496-574
agattcccgttctgttattctgtgaaaccacagaggctgccttgtctcttttctccttttggtgtgactttcattttatgtgaaggccacagggtaacttaccctgtccagtgatttttccagtttccattctcttgtattataggcaggtagctgttcctgcctccactaggcactactctgacaggcactgtggcagaacttaaggtttgctggggtatctctgttctcgaaagtggtggaaaggaagagatattcagtgtaggaacagttctgaagaactgactagaggcagatcatagaagagcagatcctggcccatccgcagccccagagaccttcctttacataccaaaatgttccagtgcacattcactgctggacattaatttgttgagaggcagcatcacacagtggtcgagagtgaaggcttcagtcagatagacaaggtttgaatgctgattttgccactttgctgtgtgactttaggggttcatgtgggatgtggctgaggaactgaaagctatgttggtgtttgctgaacatcgatactatggagagtctctcccctttg

SEQ ID NO: 169775 - DNA, 845 bp, Homo sapiens
  Payload ID: 13421
  Gene Symbol: PRCP
  Gene Name: prolylcarboxypeptidase (angiotensinase C)
  ENST ID: ENST00000527444
  CDS Start-End: 296-845
caatcgaatctcccgcgtccttttccgccggaagtaacgctttggctctgattactcagagccaatcagaagaaggcgccgcagagggtggagcttagcgaggaaatcctacaagcatctggaaacgaccattttcgtcaaactgcgggttgatcattttggatttaatactgtgaaaacttttaatcagcggtacctagtagctgataaatactggaagaaaaatggtggatcaatacttttctacactggtaatgaaggggacattatctggttttgtaataacacggggttcatgtgggatgtggctgaggaactgaaagctatgttggtgtttgctgaacatcgatactatggagagtctctcccctttggtgacaactcattcaaggattccagacacttgaatttcctgacatcagaacaagctctggctgattttgcagagttaatcaaacacttgaaaagaacaatcccaggagctgaaaatcaacctgtcattgccataggaggctcctatggtggcatgcttgccgcctggtttaggatgaaatatcctcatatggtagttggagctcttgcagcttctgcccctatctggcagtttgaggatttagtaccttgtggtgtatttatgaagatcgtaactacagattttaggaaaagcggtccacattgttcagagagcatccacaggtcctgggatgccattaatcgactctcaaatactggcagtggtttgcagtggcttactggagcccttcacttatgcagcccattaacttctcaggacatccaacatttgaaagactggatctctgaaacctgggtgaatctggcaatgg

SEQ ID NO: 169776 - DNA, 525 bp, Homo sapiens
  Payload ID: 13421
  Gene Symbol: PRCP
  Gene Name: prolylcarboxypeptidase (angiotensinase C)
  ENST ID: ENST00000532809
  CDS Start-End: 177-525
gtcgcaatggaattgcggtggccagggcagggtttggtggtgatgataatggtagggatattgggtgacctgaaggacaggtgggcttcgggggcgctatagataaagcatgggctacagcgatgagttaggaagaggccctagcatgataagggcagacttggggtgtgaccgcaatgaaggttgatcattttggatttaatactgtgaaaacttttaatcagcggtacctagtagctgataaatactggaagaaaaatggtggatcaatacttttctacactggtaatgaaggggacattatctggttttgtaataacacggggttcatgtgggatgtggctgaggaactgaaagctatgttggtgtttgctgaacatcgatactatggagagtctctcccctttggtgacaactcattcaaggattccagacacttgaatttcctgacatcagaacaagctctggctgattttgcagagttaatcaaacacttgaaaagaacaatcccaggagctgaaaatc

SEQ ID NO: 169777 - DNA, 2347 bp, Homo sapiens
  Payload ID: 13422
  Gene Symbol: PARS2
  Gene Name: prolyl-tRNA synthetase 2, mitochondrial (putative)
  Uniprot ID: Q7L3T8
  ENST ID: ENST00000371279
  CDS Start-End: 84-1511
gcgcgctggcccggcacggcggtggtcttgcgggaggcgtgggctgggattgcggtgcctgtgcttcccggtgccagggtgtcatggaagggctgctgacaagatgcagagcattgcccgccctggccacctgcagccgccagctctctgggtatgttccttgcaggtttcaccactgtgccccaagaagagggcggcgcctgctgctgtctcgtgtgttccagccacagaaccttcgggaagaccgggtgctctccctgcaggacaaatctgatgacctgacctgtaagagccagcggctgatgctgcaggtgggcctgatctacccagcaagccccggctgttaccacctcctgccatataccgtccgtgccatggagaagctcgtgcgagtgatagaccaggagatgcaggccatcgggggccagaaagtcaacatgcccagcctcagcccggcagagctctggcaagccaccaaccggtgggacttgatgggcaaagagctgctaagacttagagacaggcatggcaaggaatactgcttaggaccaactcacgaggaagccattacggccttaattgcctcccagaagaaactgtcctacaagcagcttcccttcctgctgtaccaagtgacaaggaagtttcgggatgagcccaggccccgctttggtcttctccgtggccgagagttttacatgaaggatatgtacacctttgactcctccccagaggctgcccagcagacctacagcctggtgtgtgatgcctactgcagcctgttcaacaagctagggctgccatttgtcaaggtccaggccgatgtgggcaccatcgggggcacagtgtctcatgagttccagctcccagtggatattggagaggaccggcttgccatctgtccccgctgcagcttctcagccaacatggagacactagacttgtcacaaatgaactgccctgcttgccagggcccattgactaaaaccaaaggcattgaggtggggcacacattttacctgggtaccaagtactcatccattttcaatgcccagtttaccaatgtctgtggcaaaccaaccctggctgaaatggggtgctatggcttgggtgtgacacggatcttggctgctgccattgaagtcctctctacagaagactgtgtccgctggcccagcctactggccccttaccaagcctgcctcatcccccctaagaagggcagtaaggagcaggcggcctccgagctcatagggcagctgtacgaccacatcacagaggcagtgcctcagcttcacggggaggtgctcctggacgacaggacccatctgaccatcggaaacagactgaaagatgccaacaagtttggctacccctttgtgataatcgctggcaagagggccctggaggaccctgcacattttgaggtttggtgtcagaacactggtgaggtggccttcctcaccaaagatggagtcatggatttactgaccccagtgcagactgtctaaatgcccccagcccacccctgcccccatttgcagccttggtgttcgttctaacactgcattttcctacacccctttcctggactgctctctccagaaacagcacagctcatggagggtgagatcatgttagggaaatcaatttttatctagtcatttgttcagattatttgtatttaaagtcattaacttgatccctttctccagactggccatgccgccatatacctttccttttgtattccattgtggaagcttctaggaggctgagaagcaggagatccaagctccagtcctgggtgttaccctgaggggggaagtcacttcccttctctcagctgagtttttcacgtgtaagatgagaatggctgatggctgagagcccaccaaccttccccaccccgtatcagtttgaccacgggccttttgctacattctatccagagagcaggcctgccagcccctctccactgagaagttgggctgagagtatggggaaaagaatcaagagacctgactgccgccaactcactagtgacttagatacatcccctccccctgctggggcctcagtttccccatctgtaacttgagaaaatagaactagatctgtaaagtctggaactagatctgtaacgtccttataggtgtcactagggggttccatgagaggtgtgtgacaggcagtctgattcctctcattctccatagtctgtttcctggaaagtcgatgtaattaactgatggcccaaaaactacctcaagagacctggccctgttaagacggcttaaccactgagatcccgttctattgatttaataaagtcaaactattggaa

SEQ ID NO: 169778 - DNA, 766 bp, Homo sapiens
  Payload ID: 13423
  Gene Symbol: PMCH
  Gene Name: pro-melanin-concentrating hormone
  Uniprot ID: P20382
  ENST ID: ENST00000329406
  CDS Start-End: 76-573
cgtttaccaagcaggctgacagagaaatttttcattttctttcttgtttgactgtatgcaaacatcaaactaagaatggcaaaaatgaatctctcttcctatatattaatactaactttttctttgttttctcaaggtattttactttcagcatccaagtccataagaaatttagatgatgacatggtatttaatacattcaggttggggaaaggctttcagaaggaagacactgcagaaaaatcagttattgctccttccctggaacaatataaaaatgatgagagcagtttcatgaacgaagaggaaaataaagtttcaaagaacacaggctccaaacataatttcttaaatcatggtctgccactgaatctggctataaaaccttatcttgcactaaaaggatctgtagctttcccagctgagaatggagttcagaatactgaatcaacacaagaaaagagagaaattggggatgaagaaaactcagctaaatttcctataggaaggagagattttgacatgctcagatgtatgctgggaagagtctaccgaccttgttggcaagtctgatacctgttggtccacatcatcttttcagaagaaaataaaagcatttaattgccaatgggaggagaagcccatactgctactataacttgtgtatgttaaatgtctgttttaaaagaaagtagtgttaagatgtatcagtaactgaaatgatatgctttctctgtgcattaaactttgtgaaaattctgcataa

SEQ ID NO: 169779 - DNA, 3977 bp, Homo sapiens
  Payload ID: 13424
  Gene Symbol: PROM1
  Gene Name: prominin 1
  Uniprot ID: O43490
  ENST ID: ENST00000447510
  CDS Start-End: 213-2810
ggatggtgccttgagtgaatgacccccttggagaacattcttccgcatccctcgcctcaagccagcctcagacagaaaactgaagattcagcagatccagtgcttcctgctcctcttctgcccaggaacacgcttgccttccccaaggcttccagaagctctgaggcaggaggcaccaagttctacctcatgtttggaggatcttgctagctatggccctcgtactcggctccctgttgctgctggggctgtgcgggaactccttttcaggagggcagccttcatccacagatgctcctaaggcttggaattatgaattgcctgcaacaaattatgagacccaagactcccataaagctggacccattggcattctctttgaactagtgcatatctttctctatgtggtacagccgcgtgatttcccagaagatactttgagaaaattcttacagaaggcatatgaatccaaaattgattatgacaagccagaaactgtaatcttaggtctaaagattgtctactatgaagcagggattattctatgctgtgtcctggggctgctgtttattattctgatgcctctggtggggtatttcttttgtatgtgtcgttgctgtaacaaatgtggtggagaaatgcaccagcgacagaaggaaaatgggcccttcctgaggaaatgctttgcaatctccctgttggtgatttgtataataataagcattggcatcttctatggttttgtggcaaatcaccaggtaagaacccggatcaaaaggagtcggaaactggcagatagcaatttcaaggacttgcgaactctcttgaatgaaactccagagcaaatcaaatatatattggcccagtacaacactaccaaggacaaggcgttcacagatctgaacagtatcaattcagtgctaggaggcggaattcttgaccgactgagacccaacatcatccctgttcttgatgagattaagtccatggcaacagcgatcaaggagaccaaagaggcgttggagaacatgaacagcaccttgaagagcttgcaccaacaaagtacacagcttagcagcagtctgaccagcgtgaaaactagcctgcggtcatctctcaatgaccctctgtgcttggtgcatccatcaagtgaaacctgcaacagcatcagattgtctctaagccagctgaatagcaaccctgaactgaggcagcttccacccgtggatgcagaacttgacaacgttaataacgttcttaggacagatttggatggcctggtccaacagggctatcaatcccttaatgatatacctgacagagtacaacgccaaaccacgactgtcgtagcaggtatcaaaagggtcttgaattccattggttcagatatcgacaatgtaactcagcgtcttcctattcaggatatactctcagcattctctgtttatgttaataacactgaaagttacatccacagaaatttacctacattggaagagtatgattcatactggtggctgggtggcctggtcatctgctctctgctgaccctcatcgtgattttttactacctgggcttactgtgtggcgtgtgcggctatgacaggcatgccaccccgaccacccgaggctgtgtctccaacaccggaggcgtcttcctcatggttggagttggattaagtttcctcttttgctggatattgatgatcattgtggttcttacctttgtctttggtgcaaatgtggaaaaactgatctgtgaaccttacacgagcaaggaattattccgggttttggatacaccctacttactaaatgaagactgggaatactatctctctgggaagctatttaataaatcaaaaatgaagctcacttttgaacaagtttacagtgactgcaaaaaaaatagaggcacttacggcactcttcacctgcagaacagcttcaatatcagtgaacatctcaacattaatgagcatactggaagcataagcagtgaattggaaagtctgaaggtaaatcttaatatctttctgttgggtgcagcaggaagaaaaaaccttcaggattttgctgcttgtggaatagacagaatgaattatgacagctacttggctcagactggtaaatcccccgcaggagtgaatcttttatcatttgcatatgatctagaagcaaaagcaaacagtttgcccccaggaaatttgaggaactccctgaaaagagatgcacaaactattaaaacaattcaccagcaacgagtccttcctatagaacaatcactgagcactctataccaaagcgtcaagatacttcaacgcacagggaatggattgttggagagagtaactaggattctagcttctctggattttgctcagaacttcatcacaaacaatacttcctctgttattattgaggaaactaagaagtatgggagaacaataataggatattttgaacattatctgcagtggatcgagttctctatcagtgagaaagtggcatcgtgcaaacctgtggccaccgctctagatactgctgttgatgtctttctgtgtagctacattatcgaccccttgaatttgttttggtttggcataggaaaagctactgtatttttacttccggctctaatttttgcggtaaaactggctaagtactatcgtcgaatggattcggaggacgtgtacgatgatgttgaaactatacccatgaaaaatatggaaaatggtaataatggttatcataaagatcatgtatatggtattcacaatcctgttatgacaagcccatcacaacattgatagctgatgttgaaactgcttgagcatcaggatactcaaagtggaaaggatcacagatttttggtagtttctgggtctacaaggactttccaaatccaggagcaacgccagtggcaacgtagtgactcaggcgggcaccaaggcaacggcaccattggtctctgggtagtgctttaagaatgaacacaatcacgttatagtccatggtccatcactattcaaggatgactccctcccttcctgtctatttttgttttttacttttttacactgagtttctatttagacactacaacatatggggtgtttgttcccattggatgcatttctatcaaaactctatcaaatgtgatggctagattctaacatattgccatgtgtggagtgtgctgaacacacaccagtttacaggaaagatgcattttgtgtacagtaaacggtgtatataccttttgttaccacagagttttttaaacaaatgagtattataggactttcttctaaatgagctaaataagtcaccattgacttcttggtgctgttgaaaataatccattttcactaaaagtgtgtgaaacctacagcatattcttcacgcagagattttcatctattatactttatcaaagattggccatgttccacttggaaatggcatgcaaaagcaatcatagagaaacctgcgtaactccatctgacaaattcaaaagagagagagagatcttgagagagaaatgctgttcgttcaaaagtggagttgttttaacagatgccaattacggtgtacagtttaacagagttttctgttgcattacgataaacattaattggagtgcagctaacatgagtatcatcagactagtatcaagtgttctaaaatgaaatatgagaagatcctgtcacaattcttagatctggtgtccagcatggatgaaacctttgagtttggtccctaaatttgcatgaaagcacaaggtaaatattcatttgcttcaggagtttcatgttggatctgtcattatcaaaagtgatcagcaatgaagaactggtcggacaaaatttaacgttgatgtaatgaaattccagatgtaggcattccccccaggtcttttcatgtgcagattgcagttctgattcatttgaataaaaaggaacttggaaaacatg

SEQ ID NO: 169780 - DNA, 567 bp, Homo sapiens
  Payload ID: 13424
  Gene Symbol: PROM1
  Gene Name: prominin 1
  ENST ID: ENST00000508940
  CDS Start-End: 447-567
agaggaactgcggggagagcgtggtggtgccggtgcccgtccaacccaaactttttagtctgagtggtggcccgcgacgccccgcttgggtcttctttccatccactggggatgggggcgggggtgggggtagccggcggccgtggttccggagcgggagtcggaggtgagtgtgcgaactggaccggggccccagagacttcggactcgctctcggggagaacggtgaccgagggatggtgccttgagtgaatgacccccttggagaacattcttccgcatccctcgcctcaagccagcctcagacagaaaactgaagattcagcagatccagtgcttcctgctcctcttctgcccaggaacacgcttgccttccccaaggcttccagaagctctgaggcaggaggcaccaagttctacctcatgtttggaggatcttgctagctatggccctcgtactcggctccctgttgctgctggggctgtgcgggaactccttttcaggagggcagccttcatccacagatgctcctaaggcttggaattatgaattgcctgcaacaaatt

SEQ ID NO: 169781 - DNA, 568 bp, Homo sapiens
  Payload ID: 13424
  Gene Symbol: PROM1
  Gene Name: prominin 1
  ENST ID: ENST00000514967
  CDS Start-End: 526-568
attcttttgtgtcccgcagctcgcgagaggcttccgcccagaagggagctaggcctggagggggcttggcctggaggtggtttggagggagggcactgaagggacagtgtcttgatgtcatagttagatcttggactttgaaggcaaactagtgggtttgactcttggccacatggttaatcacctgtgaccttgggcaagtcaccagaatcctctctgtgtcagtttcctcatctgcaaaatggaataatgccttaaacaaggaggaccttgtttctatctatgaagcatggagaacagtgcctggaagataggatggtgccttgagtgaatgacccccttggagaacattcttccgcatccctcgcctcaagccagcctcagacagaaaactgaagattcagcagatccagtgcttcctgctcctcttctgcccaggaacacgcttgccttccccaaggcttccagaagctctgaggcaggaggcaccaagttctacctcatgtttggaggatcttgctagctatggccctcgtactcggctccctgttgctgctggggctgtgcg

SEQ ID NO: 169782 - DNA, 622 bp, Homo sapiens
  Payload ID: 13424
  Gene Symbol: PROM1
  Gene Name: prominin 1
  ENST ID: ENST00000503884
  CDS Start-End: 1-197
ctgttgatgtctttctgtgtagctacattatcgaccccttgaatttgttttggtttggcataggaaaagctactgtatttttacttccggctctaatttttgcggtaaaactggctaagtactatcgtcgaatggattcggaggacgtgtacgatgatgttgaaactatacccatgaaaaacccatcacaacattgatagctgatgttgaaactgcttgagcatcaggatactcaaagtggaaaggatcacagatttttggtagtttctgggtctacaaggactttccaaatccaggagcaacgccagtggcaacgtagtgactcaggcgggcaccaaggcaacggcaccattggtctctgggtttggcaccacttcttggaagcttcctctgctccccacctggggtgatgccctcttctggaaggctctcactgctacacacacagtggctgccgaagctcagcctggctttagttccagccctactaggtcttctcaggactcaggatatccaggtggaaggaaggctgtgccagagttgcaagcaagtttatcggagtatcgccatgaagttcgtcccctgcctcctgctggtgaccttgtcctgcctggggactttg

SEQ ID NO: 169783 - DNA, 1595 bp, Homo sapiens
  Payload ID: 13424
  Gene Symbol: PROM1
  Gene Name: prominin 1
  ENST ID: ENST00000511153
  CDS Start-End: 1-163
ccaagactcccataaagctggacccattggcattctctttgaactagtgcatatctttctctatgtggtacagccgcgtgatttcccagaagatgagaacacaaaggcccagataggagaagcctgctcatttaagaccctgcagccaaatgagagctggtaggataacgaagccagaaagaggacaaggggaatttttgcctgggaggttatctcagcacacaagtgatcctcctgcctcagcctcctgagtagctggaactgtagacgtaagccaccatgaccagcctaatttatcaagaatgatactttgagaaaattcttacagaaggcatatgaatccaaaattgattatgacaagattgtctactatgaagcagggattattctatgctgtgtcctggggctgctgtttattattctgatgcctctggtggggtatttcttttgtatgtgtcgttgctgtaacaaatgtggtggagaaatgcaccagcgacagaaggaaaatgggcccttcctgaggaaatgctttgcaatctccctgttggtgatttgtataataataagcattggcatcttctatggttttgtggcaaatcaccaggtaagaacccggatcaaaaggagtcggaaactggcagatagcaatttcaaggacttgcgaactctcttgaatgaaactccagagcaaatcaaatatatattggcccagtacaacactaccaaggacaaggcgttcacagatctgaacagtatcaattcagtgctaggaggcggaattcttgaccgactgagacccaacatcatccctgttcttgatgagattaagtccatggcaacagcgatcaaggagaccaaagaggcgttggagaacatgaacagcaccttgaagagcttgcaccaacaaagtacacagcttagcagcagtctgaccagcgtgaaaactagcctgcggtcatctctcaatgaccctctgtgcttggtgcatccatcaagtgaaacctgcaacagcatcagattgtctctaagccagctgaatagcaaccctgaactgaggcagcttccacccgtggatgcagaacttgacaacgttaataacgttcttaggacagatttggatggcctggtccaacagggctatcaatcccttaatgatatacctgacagagtacaacgccaaaccacgactgtcgtagcaggtatcaaaagggtcttgaattccattggttcagatatcgacaatgtaactcagcgtcttcctattcaggatatactctcagcattctctgtttatgttaataacactgaaagttacatccacagaaatttacctacattggaagagtatgattcatactggtggctgggtggcctggtcatctgctctctgctgaccctcatcgtgattttttactacctgggcttactgtgtggcgtgtgcggctatgacaggcatgccaccccgaccacccgaggctgtgtctccaacaccggaggcgtcttcctcatggtgtgaaggaagtaagccaaactgtgaagaaatcatcatgaagagggaggtgttttgcagtattagttatgatagtgaagcactg

SEQ ID NO: 169784 - DNA, 581 bp, Homo sapiens
  Payload ID: 13424
  Gene Symbol: PROM1
  Gene Name: prominin 1
  ENST ID: ENST00000513946
  CDS Start-End: 1-280
tgaacattatctgcagtggatcgagttctctatcagtgagaaagtggcatcgtgcaaacctgtggccaccgctctagatactgctgttgatgtctttctgtgtagctacattatcgaccccttgaatttgttttggtttggcataggaaaagctactgtatttttacttccggctctaatttttgcggtaaaactggctaagtactatcgtcgaatggattcggaggacgtgtacgatgatgttgaaactatacccatgaaaaacccatcacaacattgatagctgatgttgaaactgcttgagcatcaggatactcaaagtggaaaggatcacagatttttggtagtttctgggtctacaaggactttccaaatccaggagcaacgccagtggcaacgtagtgactcaggcgggcaccaaggcaacggcaccattggtctctgggtagtgctttaagaatgaacacaatcacgttatagtccatggtccatcactattcaaggatgactccctcccttcctgtctatttttgttttttacttttttacactgagtttctatttagacactacaacatatg

SEQ ID NO: 169785 - DNA, 551 bp, Homo sapiens
  Payload ID: 13424
  Gene Symbol: PROM1
  Gene Name: prominin 1
  ENST ID: ENST00000508322
  CDS Start-End: 379-551
agaggaactgcggggagagcgtggtggtgccggtgcccgtccaacccaaactttttagtctgagtggtggcccgcgacgccccgcttgggtcttctttccatccactggggatgggggcgggggtgggggtagccggcggccgtggttccggagcgggagtcggagggatggtgccttgagtgaatgacccccttggagaacattcttccgcatccctcgcctcaagccagcctcagacagaaaactgaagattcagcagatccagtgcttcctgctcctcttctgcccaggaacacgcttgccttccccaaggcttccagaagctctgaggcaggaggcaccaagttctacctcatgtttggaggatcttgctagctatggccctcgtactcggctccctgttgctgctggggctgtgcgggaactccttttcaggagggcagccttcatccacagatgctcctaaggcttggaattatgaattgcctgcaacaaattatgagacccaagactcccataaagctggacccattggcattctctttgaact

SEQ ID NO: 169786 - DNA, 4349 bp, Homo sapiens
  Payload ID: 13424
  Gene Symbol: PROM1
  Gene Name: prominin 1
  Uniprot ID: O43490
  ENST ID: ENST00000505450
  CDS Start-End: 614-3184
ctgctgcacactaaggatccaaatgattgtttttttgttttttgttttgttttgttttgttttgttttgttttaaattgcattgggattaggcaacagaagggtctaatgcggccgggatgagacaggagagtttttaggagggtagctgcattctaagtaagggactctgcggggggaaaagaggcgcaagcgttgcaagaagggagtgcagggggttgagcaggcacctctacaggaaatggatgctgtccaggtgctggtgggcgccccagggctacgtggcgaagcagctcagccggtccaatcagagtgcgtccagggctcgggtttcgcgatctttaagtgactgaggcagatccccacgcggcacctggccatgctctcagctctcccgccgcgggatggtgccttgagtgaatgacccccttggagaacattcttccgcatccctcgcctcaagccagcctcagacagaaaactgaagattcagcagatccagtgcttcctgctcctcttctgcccaggaacacgcttgccttccccaaggcttccagaagctctgaggcaggaggcaccaagttctacctcatgtttggaggatcttgctagctatggccctcgtactcggctccctgttgctgctggggctgtgcgggaactccttttcaggagggcagccttcatccacagatgctcctaaggcttggaattatgaattgcctgcaacaaattatgagacccaagactcccataaagctggacccattggcattctctttgaactagtgcatatctttctctatgtggtacagccgcgtgatttcccagaagatactttgagaaaattcttacagaaggcatatgaatccaaaattgattatgacaagattgtctactatgaagcagggattattctatgctgtgtcctggggctgctgtttattattctgatgcctctggtggggtatttcttttgtatgtgtcgttgctgtaacaaatgtggtggagaaatgcaccagcgacagaaggaaaatgggcccttcctgaggaaatgctttgcaatctccctgttggtgatttgtataataataagcattggcatcttctatggttttgtggcaaatcaccaggtaagaacccggatcaaaaggagtcggaaactggcagatagcaatttcaaggacttgcgaactctcttgaatgaaactccagagcaaatcaaatatatattggcccagtacaacactaccaaggacaaggcgttcacagatctgaacagtatcaattcagtgctaggaggcggaattcttgaccgactgagacccaacatcatccctgttcttgatgagattaagtccatggcaacagcgatcaaggagaccaaagaggcgttggagaacatgaacagcaccttgaagagcttgcaccaacaaagtacacagcttagcagcagtctgaccagcgtgaaaactagcctgcggtcatctctcaatgaccctctgtgcttggtgcatccatcaagtgaaacctgcaacagcatcagattgtctctaagccagctgaatagcaaccctgaactgaggcagcttccacccgtggatgcagaacttgacaacgttaataacgttcttaggacagatttggatggcctggtccaacagggctatcaatcccttaatgatatacctgacagagtacaacgccaaaccacgactgtcgtagcaggtatcaaaagggtcttgaattccattggttcagatatcgacaatgtaactcagcgtcttcctattcaggatatactctcagcattctctgtttatgttaataacactgaaagttacatccacagaaatttacctacattggaagagtatgattcatactggtggctgggtggcctggtcatctgctctctgctgaccctcatcgtgattttttactacctgggcttactgtgtggcgtgtgcggctatgacaggcatgccaccccgaccacccgaggctgtgtctccaacaccggaggcgtcttcctcatggttggagttggattaagtttcctcttttgctggatattgatgatcattgtggttcttacctttgtctttggtgcaaatgtggaaaaactgatctgtgaaccttacacgagcaaggaattattccgggttttggatacaccctacttactaaatgaagactgggaatactatctctctgggaagctatttaataaatcaaaaatgaagctcacttttgaacaagtttacagtgactgcaaaaaaaatagaggcacttacggcactcttcacctgcagaacagcttcaatatcagtgaacatctcaacattaatgagcatactggaagcataagcagtgaattggaaagtctgaaggtaaatcttaatatctttctgttgggtgcagcaggaagaaaaaaccttcaggattttgctgcttgtggaatagacagaatgaattatgacagctacttggctcagactggtaaatcccccgcaggagtgaatcttttatcatttgcatatgatctagaagcaaaagcaaacagtttgcccccaggaaatttgaggaactccctgaaaagagatgcacaaactattaaaacaattcaccagcaacgagtccttcctatagaacaatcactgagcactctataccaaagcgtcaagatacttcaacgcacagggaatggattgttggagagagtaactaggattctagcttctctggattttgctcagaacttcatcacaaacaatacttcctctgttattattgaggaaactaagaagtatgggagaacaataataggatattttgaacattatctgcagtggatcgagttctctatcagtgagaaagtggcatcgtgcaaacctgtggccaccgctctagatactgctgttgatgtctttctgtgtagctacattatcgaccccttgaatttgttttggtttggcataggaaaagctactgtatttttacttccggctctaatttttgcggtaaaactggctaagtactatcgtcgaatggattcggaggacgtgtacgatgatgttgaaactatacccatgaaaaatatggaaaatggtaataatggttatcataaagatcatgtatatggtattcacaatcctgttatgacaagcccatcacaacattgatagctgatgttgaaactgcttgagcatcaggatactcaaagtggaaaggatcacagatttttggtagtttctgggtctacaaggactttccaaatccaggagcaacgccagtggcaacgtagtgactcaggcgggcaccaaggcaacggcaccattggtctctgggtagtgctttaagaatgaacacaatcacgttatagtccatggtccatcactattcaaggatgactccctcccttcctgtctatttttgttttttacttttttacactgagtttctatttagacactacaacatatggggtgtttgttcccattggatgcatttctatcaaaactctatcaaatgtgatggctagattctaacatattgccatgtgtggagtgtgctgaacacacaccagtttacaggaaagatgcattttgtgtacagtaaacggtgtatataccttttgttaccacagagttttttaaacaaatgagtattataggactttcttctaaatgagctaaataagtcaccattgacttcttggtgctgttgaaaataatccattttcactaaaagtgtgtgaaacctacagcatattcttcacgcagagattttcatctattatactttatcaaagattggccatgttccacttggaaatggcatgcaaaagcaatcatagagaaacctgcgtaactccatctgacaaattcaaaagagagagagagatcttgagagagaaatgctgttcgttcaaaagtggagttgttttaacagatgccaattacggtgtacagtttaacagagttttctgttgcattacgataaacattaattggagtgcagctaacatgagtatcatcagactagtatcaagtgttctaaaatgaaatatgagaagatcctgtcacaattcttagatctggtgtccagcatggatgaaacctttgagtttggtccctaaatttgcatgaaagcacaaggtaaatattcatttgcttcaggagtttcatgttggatctgtcattatcaaaagtgatcagcaatgaagaactggtcggacaaaatttaacgttgatgtaatgaaattccagatgtaggcattccccccaggtcttttcatgtgcagattgcagttctgattcatttgaataaaaaggaacttggaaaaca

SEQ ID NO: 169787 - DNA, 4006 bp, Homo sapiens
  Payload ID: 13424
  Gene Symbol: PROM1
  Gene Name: prominin 1
  Uniprot ID: O43490
  ENST ID: ENST00000510224
  CDS Start-End: 250-2847
gactagggcgggagcaggagcgggagccgggtgcacgggatggtgccttgagtgaatgacccccttggagaacattcttccgcatccctcgcctcaagccagcctcagacagaaaactgaagattcagcagatccagtgcttcctgctcctcttctgcccaggaacacgcttgccttccccaaggcttccagaagctctgaggcaggaggcaccaagttctacctcatgtttggaggatcttgctagctatggccctcgtactcggctccctgttgctgctggggctgtgcgggaactccttttcaggagggcagccttcatccacagatgctcctaaggcttggaattatgaattgcctgcaacaaattatgagacccaagactcccataaagctggacccattggcattctctttgaactagtgcatatctttctctatgtggtacagccgcgtgatttcccagaagatactttgagaaaattcttacagaaggcatatgaatccaaaattgattatgacaagccagaaactgtaatcttaggtctaaagattgtctactatgaagcagggattattctatgctgtgtcctggggctgctgtttattattctgatgcctctggtggggtatttcttttgtatgtgtcgttgctgtaacaaatgtggtggagaaatgcaccagcgacagaaggaaaatgggcccttcctgaggaaatgctttgcaatctccctgttggtgatttgtataataataagcattggcatcttctatggttttgtggcaaatcaccaggtaagaacccggatcaaaaggagtcggaaactggcagatagcaatttcaaggacttgcgaactctcttgaatgaaactccagagcaaatcaaatatatattggcccagtacaacactaccaaggacaaggcgttcacagatctgaacagtatcaattcagtgctaggaggcggaattcttgaccgactgagacccaacatcatccctgttcttgatgagattaagtccatggcaacagcgatcaaggagaccaaagaggcgttggagaacatgaacagcaccttgaagagcttgcaccaacaaagtacacagcttagcagcagtctgaccagcgtgaaaactagcctgcggtcatctctcaatgaccctctgtgcttggtgcatccatcaagtgaaacctgcaacagcatcagattgtctctaagccagctgaatagcaaccctgaactgaggcagcttccacccgtggatgcagaacttgacaacgttaataacgttcttaggacagatttggatggcctggtccaacagggctatcaatcccttaatgatatacctgacagagtacaacgccaaaccacgactgtcgtagcaggtatcaaaagggtcttgaattccattggttcagatatcgacaatgtaactcagcgtcttcctattcaggatatactctcagcattctctgtttatgttaataacactgaaagttacatccacagaaatttacctacattggaagagtatgattcatactggtggctgggtggcctggtcatctgctctctgctgaccctcatcgtgattttttactacctgggcttactgtgtggcgtgtgcggctatgacaggcatgccaccccgaccacccgaggctgtgtctccaacaccggaggcgtcttcctcatggttggagttggattaagtttcctcttttgctggatattgatgatcattgtggttcttacctttgtctttggtgcaaatgtggaaaaactgatctgtgaaccttacacgagcaaggaattattccgggttttggatacaccctacttactaaatgaagactgggaatactatctctctgggaagctatttaataaatcaaaaatgaagctcacttttgaacaagtttacagtgactgcaaaaaaaatagaggcacttacggcactcttcacctgcagaacagcttcaatatcagtgaacatctcaacattaatgagcatactggaagcataagcagtgaattggaaagtctgaaggtaaatcttaatatctttctgttgggtgcagcaggaagaaaaaaccttcaggattttgctgcttgtggaatagacagaatgaattatgacagctacttggctcagactggtaaatcccccgcaggagtgaatcttttatcatttgcatatgatctagaagcaaaagcaaacagtttgcccccaggaaatttgaggaactccctgaaaagagatgcacaaactattaaaacaattcaccagcaacgagtccttcctatagaacaatcactgagcactctataccaaagcgtcaagatacttcaacgcacagggaatggattgttggagagagtaactaggattctagcttctctggattttgctcagaacttcatcacaaacaatacttcctctgttattattgaggaaactaagaagtatgggagaacaataataggatattttgaacattatctgcagtggatcgagttctctatcagtgagaaagtggcatcgtgcaaacctgtggccaccgctctagatactgctgttgatgtctttctgtgtagctacattatcgaccccttgaatttgttttggtttggcataggaaaagctactgtatttttacttccggctctaatttttgcggtaaaactggctaagtactatcgtcgaatggattcggaggacgtgtacgatgatgttgaaactatacccatgaaaaatatggaaaatggtaataatggttatcataaagatcatgtatatggtattcacaatcctgttatgacaagcccatcacaacattgatagctgatgttgaaactgcttgagcatcaggatactcaaagtggaaaggatcacagatttttggtagtttctgggtctacaaggactttccaaatccaggagcaacgccagtggcaacgtagtgactcaggcgggcaccaaggcaacggcaccattggtctctgggtagtgctttaagaatgaacacaatcacgttatagtccatggtccatcactattcaaggatgactccctcccttcctgtctatttttgttttttacttttttacactgagtttctatttagacactacaacatatggggtgtttgttcccattggatgcatttctatcaaaactctatcaaatgtgatggctagattctaacatattgccatgtgtggagtgtgctgaacacacaccagtttacaggaaagatgcattttgtgtacagtaaacggtgtatataccttttgttaccacagagttttttaaacaaatgagtattataggactttcttctaaatgagctaaataagtcaccattgacttcttggtgctgttgaaaataatccattttcactaaaagtgtgtgaaacctacagcatattcttcacgcagagattttcatctattatactttatcaaagattggccatgttccacttggaaatggcatgcaaaagcaatcatagagaaacctgcgtaactccatctgacaaattcaaaagagagagagagatcttgagagagaaatgctgttcgttcaaaagtggagttgttttaacagatgccaattacggtgtacagtttaacagagttttctgttgcattacgataaacattaattggagtgcagctaacatgagtatcatcagactagtatcaagtgttctaaaatgaaatatgagaagatcctgtcacaattcttagatctggtgtccagcatggatgaaacctttgagtttggtccctaaatttgcatgaaagcacaaggtaaatattcatttgcttcaggagtttcatgttggatctgtcattatcaaaagtgatcagcaatgaagaactggtcggacaaaatttaacgttgatgtaatgaaattccagatgtaggcattccccccaggtcttttcatgtgcagattgcagttctgattcatttgaataaaaaggaacttgg

SEQ ID NO: 169788 - DNA, 4014 bp, Homo sapiens
  Payload ID: 13424
  Gene Symbol: PROM1
  Gene Name: prominin 1
  Uniprot ID: O43490
  ENST ID: ENST00000508167
  CDS Start-End: 281-2851
ggcgagctaagggaagggcggcggcagcggtgactagggcgggagcaggagcgggagccgggtgcacgggatggtgccttgagtgaatgacccccttggagaacattcttccgcatccctcgcctcaagccagcctcagacagaaaactgaagattcagcagatccagtgcttcctgctcctcttctgcccaggaacacgcttgccttccccaaggcttccagaagctctgaggcaggaggcaccaagttctacctcatgtttggaggatcttgctagctatggccctcgtactcggctccctgttgctgctggggctgtgcgggaactccttttcaggagggcagccttcatccacagatgctcctaaggcttggaattatgaattgcctgcaacaaattatgagacccaagactcccataaagctggacccattggcattctctttgaactagtgcatatctttctctatgtggtacagccgcgtgatttcccagaagatactttgagaaaattcttacagaaggcatatgaatccaaaattgattatgacaagattgtctactatgaagcagggattattctatgctgtgtcctggggctgctgtttattattctgatgcctctggtggggtatttcttttgtatgtgtcgttgctgtaacaaatgtggtggagaaatgcaccagcgacagaaggaaaatgggcccttcctgaggaaatgctttgcaatctccctgttggtgatttgtataataataagcattggcatcttctatggttttgtggcaaatcaccaggtaagaacccggatcaaaaggagtcggaaactggcagatagcaatttcaaggacttgcgaactctcttgaatgaaactccagagcaaatcaaatatatattggcccagtacaacactaccaaggacaaggcgttcacagatctgaacagtatcaattcagtgctaggaggcggaattcttgaccgactgagacccaacatcatccctgttcttgatgagattaagtccatggcaacagcgatcaaggagaccaaagaggcgttggagaacatgaacagcaccttgaagagcttgcaccaacaaagtacacagcttagcagcagtctgaccagcgtgaaaactagcctgcggtcatctctcaatgaccctctgtgcttggtgcatccatcaagtgaaacctgcaacagcatcagattgtctctaagccagctgaatagcaaccctgaactgaggcagcttccacccgtggatgcagaacttgacaacgttaataacgttcttaggacagatttggatggcctggtccaacagggctatcaatcccttaatgatatacctgacagagtacaacgccaaaccacgactgtcgtagcaggtatcaaaagggtcttgaattccattggttcagatatcgacaatgtaactcagcgtcttcctattcaggatatactctcagcattctctgtttatgttaataacactgaaagttacatccacagaaatttacctacattggaagagtatgattcatactggtggctgggtggcctggtcatctgctctctgctgaccctcatcgtgattttttactacctgggcttactgtgtggcgtgtgcggctatgacaggcatgccaccccgaccacccgaggctgtgtctccaacaccggaggcgtcttcctcatggttggagttggattaagtttcctcttttgctggatattgatgatcattgtggttcttacctttgtctttggtgcaaatgtggaaaaactgatctgtgaaccttacacgagcaaggaattattccgggttttggatacaccctacttactaaatgaagactgggaatactatctctctgggaagctatttaataaatcaaaaatgaagctcacttttgaacaagtttacagtgactgcaaaaaaaatagaggcacttacggcactcttcacctgcagaacagcttcaatatcagtgaacatctcaacattaatgagcatactggaagcataagcagtgaattggaaagtctgaaggtaaatcttaatatctttctgttgggtgcagcaggaagaaaaaaccttcaggattttgctgcttgtggaatagacagaatgaattatgacagctacttggctcagactggtaaatcccccgcaggagtgaatcttttatcatttgcatatgatctagaagcaaaagcaaacagtttgcccccaggaaatttgaggaactccctgaaaagagatgcacaaactattaaaacaattcaccagcaacgagtccttcctatagaacaatcactgagcactctataccaaagcgtcaagatacttcaacgcacagggaatggattgttggagagagtaactaggattctagcttctctggattttgctcagaacttcatcacaaacaatacttcctctgttattattgaggaaactaagaagtatgggagaacaataataggatattttgaacattatctgcagtggatcgagttctctatcagtgagaaagtggcatcgtgcaaacctgtggccaccgctctagatactgctgttgatgtctttctgtgtagctacattatcgaccccttgaatttgttttggtttggcataggaaaagctactgtatttttacttccggctctaatttttgcggtaaaactggctaagtactatcgtcgaatggattcggaggacgtgtacgatgatgttgaaactatacccatgaaaaatatggaaaatggtaataatggttatcataaagatcatgtatatggtattcacaatcctgttatgacaagcccatcacaacattgatagctgatgttgaaactgcttgagcatcaggatactcaaagtggaaaggatcacagatttttggtagtttctgggtctacaaggactttccaaatccaggagcaacgccagtggcaacgtagtgactcaggcgggcaccaaggcaacggcaccattggtctctgggtagtgctttaagaatgaacacaatcacgttatagtccatggtccatcactattcaaggatgactccctcccttcctgtctatttttgttttttacttttttacactgagtttctatttagacactacaacatatggggtgtttgttcccattggatgcatttctatcaaaactctatcaaatgtgatggctagattctaacatattgccatgtgtggagtgtgctgaacacacaccagtttacaggaaagatgcattttgtgtacagtaaacggtgtatataccttttgttaccacagagttttttaaacaaatgagtattataggactttcttctaaatgagctaaataagtcaccattgacttcttggtgctgttgaaaataatccattttcactaaaagtgtgtgaaacctacagcatattcttcacgcagagattttcatctattatactttatcaaagattggccatgttccacttggaaatggcatgcaaaagcaatcatagagaaacctgcgtaactccatctgacaaattcaaaagagagagagagatcttgagagagaaatgctgttcgttcaaaagtggagttgttttaacagatgccaattacggtgtacagtttaacagagttttctgttgcattacgataaacattaattggagtgcagctaacatgagtatcatcagactagtatcaagtgttctaaaatgaaatatgagaagatcctgtcacaattcttagatctggtgtccagcatggatgaaacctttgagtttggtccctaaatttgcatgaaagcacaaggtaaatattcatttgcttcaggagtttcatgttggatctgtcattatcaaaagtgatcagcaatgaagaactggtcggacaaaatttaacgttgatgtaatgaaattccagatgtaggcattccccccaggtcttttcatgtgcagattgcagttctgattcatttgaataaaaaggaacttggaaaa

SEQ ID NO: 169789 - DNA, 3908 bp, Homo sapiens
  Payload ID: 13424
  Gene Symbol: PROM1
  Gene Name: prominin 1
  Uniprot ID: O43490
  ENST ID: ENST00000540805
  CDS Start-End: 213-2741
ggatggtgccttgagtgaatgacccccttggagaacattcttccgcatccctcgcctcaagccagcctcagacagaaaactgaagattcagcagatccagtgcttcctgctcctcttctgcccaggaacacgcttgccttccccaaggcttccagaagctctgaggcaggaggcaccaagttctacctcatgtttggaggatcttgctagctatggccctcgtactcggctccctgttgctgctggggctgtgcgggaactccttttcaggagggcagccttcatccacagatgctcctaaggcttggaattatgaattgcctgcaacaaattatgagacccaagactcccataaagctggacccattggcattctctttgaactagtgcatatctttctctatgtggtacagccgcgtgatttcccagaagatactttgagaaaattcttacagaaggcatatgaatccaaaattgattatgacaagccagaaactgtaatcttaggtctaaagattgtctactatgaagcagggattattctatgctgtgtcctggggctgctgtttattattctgatgcctctggtggggtatttcttttgtatgtgtcgttgctgtaacaaatgtggtggagaaatgcaccagcgacagaaggaaaatgggcccttcctgaggaaatgctttgcaatctccctgttggtgatttgtataataataagcattggcatcttctatggttttgtggcaaatcaccaggtaagaacccggatcaaaaggagtcggaaactggcagatagcaatttcaaggacttgcgaactctcttgaatgaaactccagagcaaatcaaatatatattggcccagtacaacactaccaaggacaaggcgttcacagatctgaacagtatcaattcagtgctaggaggcggaattcttgaccgactgagacccaacatcatccctgttcttgatgagattaagtccatggcaacagcgatcaaggagaccaaagaggcgttggagaacatgaacagcaccttgaagagcttgcaccaacaaagtacacagcttagcagcagtctgaccagcgtgaaaactagcctgcggtcatctctcaatgaccctctgtgcttggtgcatccatcaagtgaaacctgcaacagcatcagattgtctctaagccagctgaatagcaaccctgaactgaggcagcttccacccgtggatgcagaacttgacaacgttaataacgttcttaggacagatttggatggcctggtccaacagggctatcaatcccttaatgatatacctgacagagtacaacgccaaaccacgactgtcgtagcaggtatcaaaagggtcttgaattccattggttcagatatcgacaatgtaactcagcgtcttcctattcaggatatactctcagcattctctgtttatgttaataacactgaaagttacatccacagaaatttacctacattggaagagtatgattcatactggtggctgggtggcctggtcatctgctctctgctgaccctcatcgtgattttttactacctgggcttactgtgtggcgtgtgcggctatgacaggcatgccaccccgaccacccgaggctgtgtctccaacaccggaggcgtcttcctcatggttggagttggattaagtttcctcttttgctggatattgatgatcattgtggttcttacctttgtctttggtgcaaatgtggaaaaactgatctgtgaaccttacacgagcaaggaattattccgggttttggatacaccctacttactaaatgaagactgggaatactatctctctgggaagctatttaataaatcaaaaatgaagctcacttttgaacaagtttacagtgactgcaaaaaaaatagaggcacttacggcactcttcacctgcagaacagcttcaatatcagtgaacatctcaacattaatgagcatactggaagcataagcagtgaattggaaagtctgaaggtaaatcttaatatctttctgttgggtgcagcaggaagaaaaaaccttcaggattttgctgcttgtggaatagacagaatgaattatgacagctacttggctcagactggtaaatcccccgcaggagtgaatcttttatcatttgcatatgatctagaagcaaaagcaaacagtttgcccccaggaaatttgaggaactccctgaaaagagatgcacaaactattaaaacaattcaccagcaacgagtccttcctatagaacaatcactgagcactctataccaaagcgtcaagatacttcaacgcacagggaatggattgttggagagagtaactaggattctagcttctctggattttgctcagaacttcatcacaaacaatacttcctctgttattattgaggaaactaagaagtatgggagaacaataataggatattttgaacattatctgcagtggatcgagttctctatcagtgagaaagtggcatcgtgcaaacctgtggccaccgctctagatactgctgttgatgtctttctgtgtagctacattatcgaccccttgaatttgttttggtttggcataggaaaagctactgtatttttacttccggctctaatttttgcggtaaaactggctaagtactatcgtcgaatggattcggaggacgtgtacgatgatgttgaaactatacccatgaaaaacccatcacaacattgatagctgatgttgaaactgcttgagcatcaggatactcaaagtggaaaggatcacagatttttggtagtttctgggtctacaaggactttccaaatccaggagcaacgccagtggcaacgtagtgactcaggcgggcaccaaggcaacggcaccattggtctctgggtagtgctttaagaatgaacacaatcacgttatagtccatggtccatcactattcaaggatgactccctcccttcctgtctatttttgttttttacttttttacactgagtttctatttagacactacaacatatggggtgtttgttcccattggatgcatttctatcaaaactctatcaaatgtgatggctagattctaacatattgccatgtgtggagtgtgctgaacacacaccagtttacaggaaagatgcattttgtgtacagtaaacggtgtatataccttttgttaccacagagttttttaaacaaatgagtattataggactttcttctaaatgagctaaataagtcaccattgacttcttggtgctgttgaaaataatccattttcactaaaagtgtgtgaaacctacagcatattcttcacgcagagattttcatctattatactttatcaaagattggccatgttccacttggaaatggcatgcaaaagcaatcatagagaaacctgcgtaactccatctgacaaattcaaaagagagagagagatcttgagagagaaatgctgttcgttcaaaagtggagttgttttaacagatgccaattacggtgtacagtttaacagagttttctgttgcattacgataaacattaattggagtgcagctaacatgagtatcatcagactagtatcaagtgttctaaaatgaaatatgagaagatcctgtcacaattcttagatctggtgtccagcatggatgaaacctttgagtttggtccctaaatttgcatgaaagcacaaggtaaatattcatttgcttcaggagtttcatgttggatctgtcattatcaaaagtgatcagcaatgaagaactggtcggacaaaatttaacgttgatgtaatgaaattccagatgtaggcattccccccaggtcttttcatgtgcagattgcagttctgattcatttgaataaaaaggaacttggaaaacatg

SEQ ID NO: 169790 - DNA, 3884 bp, Homo sapiens
  Payload ID: 13424
  Gene Symbol: PROM1
  Gene Name: prominin 1
  Uniprot ID: O43490
  ENST ID: ENST00000539194
  CDS Start-End: 213-2717
ggatggtgccttgagtgaatgacccccttggagaacattcttccgcatccctcgcctcaagccagcctcagacagaaaactgaagattcagcagatccagtgcttcctgctcctcttctgcccaggaacacgcttgccttccccaaggcttccagaagctctgaggcaggaggcaccaagttctacctcatgtttggaggatcttgctagctatggccctcgtactcggctccctgttgctgctggggctgtgcgggaactccttttcaggagggcagccttcatccacagatgctcctaaggcttggaattatgaattgcctgcaacaaattatgagacccaagactcccataaagctggacccattggcattctctttgaactagtgcatatctttctctatgtggtacagccgcgtgatttcccagaagatactttgagaaaattcttacagaaggcatatgaatccaaaattgattatgacaagccagaaactgtaatcttaggtctaaagattgtctactatgaagcagggattattctatgctgtgtcctggggctgctgtttattattctgatgcctctggtggggtatttcttttgtatgtgtcgttgctgtaacaaatgtggtggagaaatgcaccagcgacagaaggaaaatgggcccttcctgaggaaatgctttgcaatctccctgttggtgatttgtataataataagcattggcatcttctatggttttgtggcaaatcaccaggtaagaacccggatcaaaaggagtcggaaactggcagatagcaatttcaaggacttgcgaactctcttgaatgaaactccagagcaaatcaaatatatattggcccagtacaacactaccaaggacaaggcgttcacagatctgaacagtatcaattcagtgctaggaggcggaattcttgaccgactgagacccaacatcatccctgttcttgatgagattaagtccatggcaacagcgatcaaggagaccaaagaggcgttggagaacatgaacagcaccttgaagagcttgcaccaacaaagtacacagcttagcagcagtctgaccagcgtgaaaactagcctgcggtcatctctcaatgaccctctgtgcttggtgcatccatcaagtgaaacctgcaacagcatcagattgtctctaagccagctgaatagcaaccctgaactgaggcagcttccacccgtggatgcagaacttgacaacgttaataacgttcttaggacagatttggatggcctggtccaacagggctatcaatcccttaatgatatacctgacagagtacaacgccaaaccacgactgtcgtagcaggtatcaaaagggtcttgaattccattggttcagatatcgacaatgtaactcagcgtcttcctattcaggatatactctcagcattctctgtttatgttaataacactgaaagttacatccacagaaatttacctacattggaagagtatgattcatactggtggctgggtggcctggtcatctgctctctgctgaccctcatcgtgattttttactacctgggcttactgtgtggcgtgtgcggctatgacaggcatgccaccccgaccacccgaggctgtgtctccaacaccggaggcgtcttcctcatggttggagttggattaagtttcctcttttgctggatattgatgatcattgtggttcttacctttgtctttggtgcaaatgtggaaaaactgatctgtgaaccttacacgagcaaggaattattccgggttttggatacaccctacttactaaatgaagactgggaatactatctctctgggaagctatttaataaatcaaaaatgaagctcacttttgaacaagtttacagtgactgcaaaaaaaatagaggcacttacggcactcttcacctgcagaacagcttcaatatcagtgaacatctcaacattaatgagcatactggaagcataagcagtgaattggaaagtctgaaggtaaatcttaatatctttctgttgggtgcagcaggaagaaaaaaccttcaggattttgctgcttgtggaatagacagaatgaattatgacagctacttggctcagactggtaaatcccccgcaggagtgaatcttttatcatttgcatatgatctagaagcaaaagcaaacagtttgcccccaggaaatttgaggaactccctgaaaagagatgcacaaactattaaaacaattcaccagcaacgagtccttcctatagaacaatcactgagcactctataccaaagcgtcaagatacttcaacgcacagggaatggattgttggagagagtaactaggattctagcttctctggattttgctcagaacttcatcacaaacaatacttcctctgttattattgaggaaactaagaagtatgggagaacaataataggatattttgaacattatctgcagtggatcgagttctctatcagtgagaaagtggcatcgtgcaaacctgtggccaccgctctagatactgctgttgatgtctttctgtgtagctacattatcgaccccttgaatttgttttggtttggcataggaaaagctactgtatttttacttccggctctaatttttgcggtaaaactggctaagtactatcgtcgaatggattcggaggacgtgtacgatgacccatcacaacattgatagctgatgttgaaactgcttgagcatcaggatactcaaagtggaaaggatcacagatttttggtagtttctgggtctacaaggactttccaaatccaggagcaacgccagtggcaacgtagtgactcaggcgggcaccaaggcaacggcaccattggtctctgggtagtgctttaagaatgaacacaatcacgttatagtccatggtccatcactattcaaggatgactccctcccttcctgtctatttttgttttttacttttttacactgagtttctatttagacactacaacatatggggtgtttgttcccattggatgcatttctatcaaaactctatcaaatgtgatggctagattctaacatattgccatgtgtggagtgtgctgaacacacaccagtttacaggaaagatgcattttgtgtacagtaaacggtgtatataccttttgttaccacagagttttttaaacaaatgagtattataggactttcttctaaatgagctaaataagtcaccattgacttcttggtgctgttgaaaataatccattttcactaaaagtgtgtgaaacctacagcatattcttcacgcagagattttcatctattatactttatcaaagattggccatgttccacttggaaatggcatgcaaaagcaatcatagagaaacctgcgtaactccatctgacaaattcaaaagagagagagagatcttgagagagaaatgctgttcgttcaaaagtggagttgttttaacagatgccaattacggtgtacagtttaacagagttttctgttgcattacgataaacattaattggagtgcagctaacatgagtatcatcagactagtatcaagtgttctaaaatgaaatatgagaagatcctgtcacaattcttagatctggtgtccagcatggatgaaacctttgagtttggtccctaaatttgcatgaaagcacaaggtaaatattcatttgcttcaggagtttcatgttggatctgtcattatcaaaagtgatcagcaatgaagaactggtcggacaaaatttaacgttgatgtaatgaaattccagatgtaggcattccccccaggtcttttcatgtgcagattgcagttctgattcatttgaataaaaaggaacttggaaaacatg

SEQ ID NO: 169791 - DNA, 4728 bp, Homo sapiens
  Payload ID: 13425
  Gene Symbol: PROM2
  Gene Name: prominin 2
  Uniprot ID: Q8N271
  ENST ID: ENST00000317620
  CDS Start-End: 134-2638
gctcaggaacccaaacctgtcgggcaggttttgagagctgtggagagagggacagaggctggagaaggatgtatggcctgccctgggcttgtctgttccctcctgagcctgagccccttaccttcctgaccccatgaagcacacactggctctgctggctcccctgctgggcctgggcctggggctggccctgagtcagctggctgcaggggccacagactgcaagttccttggcccggcagagcacctgacattcaccccagcagccagggcccggtggctggcccctcgagttcgtgcgccaggactcctggactccctctatggcaccgtgcgccgcttcctctcggtggtgcagctcaatcctttcccttcagagttggtaaaggccctactgaatgagctggcctccgtgaaggtgaatgaggtggtgcggtacgaggcgggctacgtggtatgcgctgtgatcgcgggcctctacctgctgctggtgcccactgccgggctttgcttctgctgctgccgctgccaccggcgctgcgggggacgagtgaagacagagcacaaggcgctggcctgtgagcgcgcggccctcatggtcttcctgctgctgaccaccctcttgctgctgattggtgtggtctgtgcctttgtcaccaaccagcgcacgcatgaacagatgggccccagcatcgaggccatgcctgagaccctgctcagcctctggggcctggtctctgatgtcccccaagagctgcaggccgtggcacagcaattctccctgccccaggagcaagtctcagaggagctggatggtgttggtgtgagcattgggagcgcgatccacactcagctcaggagctccgtgtaccccttgctggcggccgtgggcagtttgggccaggtcctgcaggtctccgtgcaccacctgcaaaccttgaatgctacagtggtagagctgcaggccgggcagcaggacctggagccagccatccgggaacaccgggaccgcctccttgagctgctgcaggaggccaggtgccagggagattgtgcaggggccctgagctgggcccgcaccctggagctgggtgctgacttcagccaggtgccctctgtggaccatgtcctgcaccagctaaaaggtgtccccgaggccaacttctccagcatggtccaggaggagaacagcaccttcaacgcccttccagccctggctgccatgcagacatccagcgtggtgcaagagctgaagaaggcagtggcccagcagccggaaggggtgaggacactggctgaagggttcccgggcttggaggcagcttcccgctgggcccaggcactgcaggaggtggaggagagcagccgcccctacctgcaggaggtgcagagatacgagacctacaggtggatcgtgggctgcgtgctgtgctccgtggtcctattcgtggtgctctgcaacctgctgggcctcaatctgggcatctggggcctgtctgccagggacgaccccagccacccagaagccaagggcgaggctggagcccgcttcctcatggcaggtgtgggcctcagcttcctctttgctgcacccctcatcctcctggtgttcgccaccttcctggtgggtggcaacgtgcagacgctggtgtgccagagctgggagaacggcgagctctttgagtttgcagacaccccagggaacctgcccccgtccatgaacctgtcgcaacttcttggcctgaggaagaacatcagcatccaccaagcctatcagcagtgcaaggaaggggcagcgctctggacagtcctgcagctcaacgactcctacgacctggaggagcacctggatatcaaccagtataccaacaagctacggcaggagttgcagagcctgaaagtagacacacagagcctggacctgctgagctcagccgcccgccgggacctggaggccctgcagagcagtgggcttcagcgcatccactaccccgacttcctcgttcagatccagaggcccgtggtgaagaccagcatggagcagctggcccaggagctgcaaggactggcccaggcccaagacaattctgtgctggggcagcggctgcaggaggaggcccaaggactcagaaaccttcaccaggagaaggtcgtcccccagcagagccttgtggcaaagctcaacctcagcgtcagggccctggagtcctctgccccgaatctccagctggagacctcagatgtcctagccaatgtcacctacctgaaaggagagctgcctgcctgggcagccaggatcctgaggaatgtgagtgagtgtttcctggcccgggagatgggctacttctcccagtacgtggcctgggtgagagaggaggtgactcagcgcattgccacctgccagcccctctccggagccctggacaacagccgtgtgatcctgtgtgacatgatggctgacccctggaatgccttctggttctgcctggcatggtgcaccttcttcctgatccccagcatcatctttgccgtcaagacctccaaatacttccgtcctatccggaaacgcctcagctccaccagctctgaggagactcagctcttccacatcccccgggttacctccctgaagctgtagggccttgtggggtgaggtgaccctgaggctgcctgtcctcccctttgatttagcctgggccacaggacttcggtagctcttgccccagagcccaggctggcatccaggcctggactgtccccagttccggcttacctggccccaccttgcctgctcctttccacccctttctgctcacgacccccatcattcacgctcagaatcacatgggacttctgtgcagctgcagagccagcaagtccctccaggtgtcaccccttacccccatgctggtggcatcctcacaggaagagcctgttctccacctgctggagcctggaccctggggtgggacagaggcctcgtccaaccccactccccttcccgtgtgtcttccccctgccaagcctccccctgccaagcctccccctgcccctctctgagcccctcgccccccacaccgtcctcatctggcctcccccctggcccccacttccctcttatgcccttcctggccctttgcttcctcccttagtcccctcttcaccatatctccactgctaccttgctggccccagagaccaccctgcccaaccaaaccactcaggtaacgccactaatcaggcaggggccaccatggcctaggtctgggctggctgcaggccctgcctcatggcctctgagccctccactgccccagggccttgggccctctgcagatctcatccaggatttattggtgtccagtggggtgagggaggcctgtctgaaggccgagcctccctgcctgcacccaagttagaaatgggggtaccagcacttagcttctctctgagtgctggctcccaaggaagggacctgggacctgggccacagtgggggcttgcccttacctcttcagaaggaagcatcttccacagcccccacccaactttcttaggagtgatctggtggccagaacaggattttgcacggccccttttatcctgcgcatgtggcctagggtcatccccagcccatccctgtgtcagccctgagtgctggacactgcgttccagaaatgaggaagaggagagagaagagatggacagacctcagatccattaaagtgttctcacttccctgagacttggttctgggtccttaaaaccaggtttcctaggctgggaccctgtacatagttggtgtttaatgagtgtttatggagaggagagttctaaggtcacctctggctgcaggcatccagggattattccagcaatctgcaggtagggagtgggtcccagcctgggagcctgctgtcaggagcaggcagacctggactcacagcctggctgtgatgcttgttcgctcagcttctccatttatgagatggggagaatagtcacagcctcctcaaagggttgtgaaaatcaaatgtgataatttgtggaaagcccttagcagtggcctggcacaaaacaaatgctcagtggatggaagctgcctattattattgtcgttgttgttgtttgccatgactgctctgggccgggggtagagctagcatccgggcatgtacgagggaagagggaggcaggcctctattcaaaggcagaaattcctttaagattgtggtctgctgggtttcagggagtgtctgtgttgtttgtttttgtttgtttgtttgttttgagacagggtctcgctctgtcacccaggctggagtgtagtggtgcagtcttggctcactgcaacctccacctcctgggctcaagcgattctcatgcctcagcctcccgagtagctgggactacaggtgtgtgccactatgcctggctaatttttgtattttttgtagagacggggttttgccatgttgcccaggctggaagtgtctatgtttaactgcatcttataaaccagcaacaagttttctactgggaattagaatggtgcatacacaatgtattattatcactgtcagatgagcatgcttgaatgtagcatgactgcctctttttgcttttcctagaggttttttttttgcttgttactcatctgttgacctacctgggggaagtagcacccttgcatttcaaaaataaaattgatggcattacaaatggaat

SEQ ID NO: 169792 - DNA, 3824 bp, Homo sapiens
  Payload ID: 13425
  Gene Symbol: PROM2
  Gene Name: prominin 2
  Uniprot ID: Q8N271
  ENST ID: ENST00000317668
  CDS Start-End: 134-2638
gctcaggaacccaaacctgtcgggcaggttttgagagctgtggagagagggacagaggctggagaaggatgtatggcctgccctgggcttgtctgttccctcctgagcctgagccccttaccttcctgaccccatgaagcacacactggctctgctggctcccctgctgggcctgggcctggggctggccctgagtcagctggctgcaggggccacagactgcaagttccttggcccggcagagcacctgacattcaccccagcagccagggcccggtggctggcccctcgagttcgtgcgccaggactcctggactccctctatggcaccgtgcgccgcttcctctcggtggtgcagctcaatcctttcccttcagagttggtaaaggccctactgaatgagctggcctccgtgaaggtgaatgaggtggtgcggtacgaggcgggctacgtggtatgcgctgtgatcgcgggcctctacctgctgctggtgcccactgccgggctttgcttctgctgctgccgctgccaccggcgctgcgggggacgagtgaagacagagcacaaggcgctggcctgtgagcgcgcggccctcatggtcttcctgctgctgaccaccctcttgctgctgattggtgtggtctgtgcctttgtcaccaaccagcgcacgcatgaacagatgggccccagcatcgaggccatgcctgagaccctgctcagcctctggggcctggtctctgatgtcccccaagagctgcaggccgtggcacagcaattctccctgccccaggagcaagtctcagaggagctggatggtgttggtgtgagcattgggagcgcgatccacactcagctcaggagctccgtgtaccccttgctggcggccgtgggcagtttgggccaggtcctgcaggtctccgtgcaccacctgcaaaccttgaatgctacagtggtagagctgcaggccgggcagcaggacctggagccagccatccgggaacaccgggaccgcctccttgagctgctgcaggaggccaggtgccagggagattgtgcaggggccctgagctgggcccgcaccctggagctgggtgctgacttcagccaggtgccctctgtggaccatgtcctgcaccagctaaaaggtgtccccgaggccaacttctccagcatggtccaggaggagaacagcaccttcaacgcccttccagccctggctgccatgcagacatccagcgtggtgcaagagctgaagaaggcagtggcccagcagccggaaggggtgaggacactggctgaagggttcccgggcttggaggcagcttcccgctgggcccaggcactgcaggaggtggaggagagcagccgcccctacctgcaggaggtgcagagatacgagacctacaggtggatcgtgggctgcgtgctgtgctccgtggtcctattcgtggtgctctgcaacctgctgggcctcaatctgggcatctggggcctgtctgccagggacgaccccagccacccagaagccaagggcgaggctggagcccgcttcctcatggcaggtgtgggcctcagcttcctctttgctgcacccctcatcctcctggtgttcgccaccttcctggtgggtggcaacgtgcagacgctggtgtgccagagctgggagaacggcgagctctttgagtttgcagacaccccagggaacctgcccccgtccatgaacctgtcgcaacttcttggcctgaggaagaacatcagcatccaccaagcctatcagcagtgcaaggaaggggcagcgctctggacagtcctgcagctcaacgactcctacgacctggaggagcacctggatatcaaccagtataccaacaagctacggcaggagttgcagagcctgaaagtagacacacagagcctggacctgctgagctcagccgcccgccgggacctggaggccctgcagagcagtgggcttcagcgcatccactaccccgacttcctcgttcagatccagaggcccgtggtgaagaccagcatggagcagctggcccaggagctgcaaggactggcccaggcccaagacaattctgtgctggggcagcggctgcaggaggaggcccaaggactcagaaaccttcaccaggagaaggtcgtcccccagcagagccttgtggcaaagctcaacctcagcgtcagggccctggagtcctctgccccgaatctccagctggagacctcagatgtcctagccaatgtcacctacctgaaaggagagctgcctgcctgggcagccaggatcctgaggaatgtgagtgagtgtttcctggcccgggagatgggctacttctcccagtacgtggcctgggtgagagaggaggtgactcagcgcattgccacctgccagcccctctccggagccctggacaacagccgtgtgatcctgtgtgacatgatggctgacccctggaatgccttctggttctgcctggcatggtgcaccttcttcctgatccccagcatcatctttgccgtcaagacctccaaatacttccgtcctatccggaaacgcctcagctccaccagctctgaggagactcagctcttccacatcccccgggttacctccctgaagctgtagggccttgtgggagtgatctggtggccagaacaggattttgcacggccccttttatcctgcgcatgtggcctagggtcatccccagcccatccctgtgtcagccctgagtgctggacactgcgttccagaaatgaggaagaggagagagaagagatggacagacctcagatccattaaagtgttctcacttccctgagacttggttctgggtccttaaaaccaggtttcctaggctgggaccctgtacatagttggtgtttaatgagtgtttatggagaggagagttctaaggtcacctctggctgcaggcatccagggattattccagcaatctgcaggtagggagtgggtcccagcctgggagcctgctgtcaggagcaggcagacctggactcacagcctggctgtgatgcttgttcgctcagcttctccatttatgagatggggagaatagtcacagcctcctcaaagggttgtgaaaatcaaatgtgataatttgtggaaagcccttagcagtggcctggcacaaaacaaatgctcagtggatggaagctgcctattattattgtcgttgttgttgtttgccatgactgctctgggccgggggtagagctagcatccgggcatgtacgagggaagagggaggcaggcctctattcaaaggcagaaattcctttaagattgtggtctgctgggtttcagggagtgtctgtgttgtttgtttttgtttgtttgtttgttttgagacagggtctcgctctgtcacccaggctggagtgtagtggtgcagtcttggctcactgcaacctccacctcctgggctcaagcgattctcatgcctcagcctcccgagtagctgggactacaggtgtgtgccactatgcctggctaatttttgtattttttgtagagacggggttttgccatgttgcccaggctggaagtgtctatgtttaactgcatcttataaaccagcaacaagttttctactgggaattagaatggtgcatacacaatgtattattatcactgtcagatgagcatgcttgaatgtagcatgactgcctctttttgcttttcctagaggttttttttttgcttgttactcatctgttgacctacctgggggaagtagcacccttgcatttcaaaaataaaattgatggcattacaaatggaatagaaa

SEQ ID NO: 169793 - DNA, 2922 bp, Homo sapiens
  Payload ID: 13425
  Gene Symbol: PROM2
  Gene Name: prominin 2
  Uniprot ID: Q8N271
  ENST ID: ENST00000403131
  CDS Start-End: 134-2638
gctcaggaacccaaacctgtcgggcaggttttgagagctgtggagagagggacagaggctggagaaggatgtatggcctgccctgggcttgtctgttccctcctgagcctgagccccttaccttcctgaccccatgaagcacacactggctctgctggctcccctgctgggcctgggcctggggctggccctgagtcagctggctgcaggggccacagactgcaagttccttggcccggcagagcacctgacattcaccccagcagccagggcccggtggctggcccctcgagttcgtgcgccaggactcctggactccctctatggcaccgtgcgccgcttcctctcggtggtgcagctcaatcctttcccttcagagttggtaaaggccctactgaatgagctggcctccgtgaaggtgaatgaggtggtgcggtacgaggcgggctacgtggtatgcgctgtgatcgcgggcctctacctgctgctggtgcccactgccgggctttgcttctgctgctgccgctgccaccggcgctgcgggggacgagtgaagacagagcacaaggcgctggcctgtgagcgcgcggccctcatggtcttcctgctgctgaccaccctcttgctgctgattggtgtggtctgtgcctttgtcaccaaccagcgcacgcatgaacagatgggccccagcatcgaggccatgcctgagaccctgctcagcctctggggcctggtctctgatgtcccccaagagctgcaggccgtggcacagcaattctccctgccccaggagcaagtctcagaggagctggatggtgttggtgtgagcattgggagcgcgatccacactcagctcaggagctccgtgtaccccttgctggcggccgtgggcagtttgggccaggtcctgcaggtctccgtgcaccacctgcaaaccttgaatgctacagtggtagagctgcaggccgggcagcaggacctggagccagccatccgggaacaccgggaccgcctccttgagctgctgcaggaggccaggtgccagggagattgtgcaggggccctgagctgggcccgcaccctggagctgggtgctgacttcagccaggtgccctctgtggaccatgtcctgcaccagctaaaaggtgtccccgaggccaacttctccagcatggtccaggaggagaacagcaccttcaacgcccttccagccctggctgccatgcagacatccagcgtggtgcaagagctgaagaaggcagtggcccagcagccggaaggggtgaggacactggctgaagggttcccgggcttggaggcagcttcccgctgggcccaggcactgcaggaggtggaggagagcagccgcccctacctgcaggaggtgcagagatacgagacctacaggtggatcgtgggctgcgtgctgtgctccgtggtcctattcgtggtgctctgcaacctgctgggcctcaatctgggcatctggggcctgtctgccagggacgaccccagccacccagaagccaagggcgaggctggagcccgcttcctcatggcaggtgtgggcctcagcttcctctttgctgcacccctcatcctcctggtgttcgccaccttcctggtgggtggcaacgtgcagacgctggtgtgccagagctgggagaacggcgagctctttgagtttgcagacaccccagggaacctgcccccgtccatgaacctgtcgcaacttcttggcctgaggaagaacatcagcatccaccaagcctatcagcagtgcaaggaaggggcagcgctctggacagtcctgcagctcaacgactcctacgacctggaggagcacctggatatcaaccagtataccaacaagctacggcaggagttgcagagcctgaaagtagacacacagagcctggacctgctgagctcagccgcccgccgggacctggaggccctgcagagcagtgggcttcagcgcatccactaccccgacttcctcgttcagatccagaggcccgtggtgaagaccagcatggagcagctggcccaggagctgcaaggactggcccaggcccaagacaattctgtgctggggcagcggctgcaggaggaggcccaaggactcagaaaccttcaccaggagaaggtcgtcccccagcagagccttgtggcaaagctcaacctcagcgtcagggccctggagtcctctgccccgaatctccagctggagacctcagatgtcctagccaatgtcacctacctgaaaggagagctgcctgcctgggcagccaggatcctgaggaatgtgagtgagtgtttcctggcccgggagatgggctacttctcccagtacgtggcctgggtgagagaggaggtgactcagcgcattgccacctgccagcccctctccggagccctggacaacagccgtgtgatcctgtgtgacatgatggctgacccctggaatgccttctggttctgcctggcatggtgcaccttcttcctgatccccagcatcatctttgccgtcaagacctccaaatacttccgtcctatccggaaacgcctcagctccaccagctctgaggagactcagctcttccacatcccccgggttacctccctgaagctgtagggccttgtggagacggggttttgccatgttgcccaggctggaagtgtctatgtttaactgcatcttataaaccagcaacaagttttctactgggaattagaatggtgcatacacaatgtattattatcactgtcagatgagcatgcttgaatgtagcatgactgcctctttttgcttttcctagaggttttttttttgcttgttactcatctgttgacctacctgggggaagtagcacccttgcatttcaaaaataaaattgatggcattacaaatggaataga

SEQ ID NO: 169794 - DNA, 3767 bp, Homo sapiens
  Payload ID: 13425
  Gene Symbol: PROM2
  Gene Name: prominin 2
  ENST ID: ENST00000431567
  CDS Start-End: 86-595
gggacagaggctggagaaggatgtatggcctgccctgggcttgtctgttccctcctgagcctgagccccttaccttcctgaccccatgaagcacacactggctctgctggctcccctgctgggcctgggcctggggctggccctgagtcagctggctgcaggggccacagactgcaagttccttggcccggcagagcacctgacattcaccccagcagccagggcccggtggctggcccctcgagttcgtgcgccaggactcctggactccctctatggcaccgtgcgccgcttcctctcggtggtgcagctcaatcctttcccttcagagttggtaaaggccctactgaatgagctggcctccgtgaaggtgaatgaggcagaagccagggctgggcagtgggggtcgggtcacccctcatgccctgctgcctgcccaggtggtgcggtacgaggcgggctacgtggtatgcgctgtgatcgcgggcctctacctgctgctggtgcccactgccgggctttgcttctgctgctgccgctgccaccggcgctgcgggggacgagtgaagacagagcacaaggcgctggcctgtgagcgcgcggccctcatggtcttcctgctgctgaccaccctcttgctgctgattggtgtggtctgtgcctttgtcaccaaccagcgcacgcatgaacagatgggccccagcatcgaggccatgcctgagaccctgctcagcctctggggcctggtctctgatgtcccccaagagctgcaggccgtggcacagcaattctccctgccccaggagcaagtctcagaggagctggatggtgttggtgtgagcattgggagcgcgatccacactcagctcaggagctccgtgtaccccttgctggcggccgtgggcagtttgggccaggtcctgcaggtctccgtgcaccacctgcaaaccttgaatgctacagtggtagagctgcaggccgggcagcaggacctggagccagccatccgggaacaccgggaccgcctccttgagctgctgcaggaggccaggtgccctctgtggaccatgtcctgcaccagctaaaaggtgtccccgaggccaacttctccagcatggtccaggaggagaacagcaccttcaacgcccttccagccctggctgccatgcagacatccagcgtggtgcaagagctgaagaaggcagtggcccagcagccggaaggggtgaggacactggctgaagggttcccgggcttggaggcagcttcccgctgggcccaggcactgcaggaggtggaggagagcagccgcccctacctgcaggaggtgcagagatacgagacctacaggtggatcgtgggctgcgtgctgtgctccgtggtcctattcgtggtgctctgcaacctgctgggcctcaatctgggcatctggggcctgtctgccagggacgaccccagccacccagaagccaagggcgaggctggagcccgcttcctcatggcaggtgtgggcctcagcttcctctttgctgcacccctcatcctcctggtgttcgccaccttcctggtgggtggcaacgtgcagacgctggtgtgccagagctgggagaacggcgagctctttgagtttgcagacaccccagggaacctgcccccgtccatgaacctgtcgcaacttcttggcctgaggaagaacatcagcatccaccaagcctatcagcagtgcaaggaaggggcagcgctctggacagtcctgcagctcaacgactcctacgacctggaggagcacctggatatcaaccagtataccaacaagctacggcaggagttgcagagcctgaaagtagacacacagagcctggacctgctgagctcagccgcccgccgggacctggaggccctgcagagcagtgggcttcagcgcatccactaccccgacttcctcgttcagatccagaggcccgtggtgaagaccagcatggagcagctggcccaggagctgcaaggactggcccaggcccaagacaattctgtgctggggcagcggctgcaggaggaggcccaaggactcagaaaccttcaccaggagaaggtcgtcccccagcagagccttgtggcaaagctcaacctcagcgtcagggccctggagtcctctgccccgaatctccagctggagacctcagatgtcctagccaatgtcacctacctgaaaggagagctgcctgcctgggcagccaggatcctgaggaatgtgagtgagtgtttcctggcccgggagatgggctacttctcccagtacgtggcctgggtgagagaggaggtgactcagcgcattgccacctgccagcccctctccggagccctggacaacagccgtgtgatcctgtgtgacatgatggctgacccctggaatgccttctggttctgcctggcatggtgcaccttcttcctgatccccagcatcatctttgccgtcaagacctccaaatacttccgtcctatccggaaacgcctcagctccaccagctctgaggagactcagctcttccacatcccccgggttacctccctgaagctgtagggccttgtgggagtgatctggtggccagaacaggattttgcacggccccttttatcctgcgcatgtggcctagggtcatccccagcccatccctgtgtcagccctgagtgctggacactgcgttccagaaatgaggaagaggagagagaagagatggacagacctcagatccattaaagtgttctcacttccctgagacttggttctgggtccttaaaaccaggtttcctaggctgggaccctgtacatagttggtgtttaatgagtgtttatggagaggagagttctaaggtcacctctggctgcaggcatccagggattattccagcaatctgcaggtagggagtgggtcccagcctgggagcctgctgtcaggagcaggcagacctggactcacagcctggctgtgatgcttgttcgctcagcttctccatttatgagatggggagaatagtcacagcctcctcaaagggttgtgaaaatcaaatgtgataatttgtggaaagcccttagcagtggcctggcacaaaacaaatgctcagtggatggaagctgcctattattattgtcgttgttgttgtttgccatgactgctctgggccgggggtagagctagcatccgggcatgtacgagggaagagggaggcaggcctctattcaaaggcagaaattcctttaagattgtggtctgctgggtttcagggagtgtctgtgttgtttgtttttgtttgtttgtttgttttgagacagggtctcgctctgtcacccaggctggagtgtagtggtgcagtcttggctcactgcaacctccacctcctgggctcaagcgattctcatgcctcagcctcccgagtagctgggactacaggtgtgtgccactatgcctggctaatttttgtattttttgtagagacggggttttgccatgttgcccaggctggaagtgtctatgtttaactgcatcttataaaccagcaacaagttttctactgggaattagaatggtgcatacacaatgtattattatcactgtcagatgagcatgcttgaatgtagcatgactgcctctttttgcttttcctagaggttttttttttgcttgttactcatctgttgacctacctgggggaagtagcacccttgcatttcaaaaataaaattgatggcattacaaatggaatagaaa

SEQ ID NO: 169795 - DNA, 4508 bp, Homo sapiens
  Payload ID: 13426
  Gene Symbol: PML
  Gene Name: promyelocytic leukemia
  Uniprot ID: P29590
  ENST ID: ENST00000268058
  CDS Start-End: 97-2745
gctcaagggactcagccaactggctcacgcctccccttcagcttctcttcacgcactccaagatctaaaccgagaatcgaaactaagctggggtccatggagcctgcacccgcccgatctccgaggccccagcaggaccccgcccggccccaggagcccaccatgcctccccccgagaccccctctgaaggccgccagcccagccccagccccagccctacagagcgagcccccgcttcggaggaggagttccagtttctgcgctgccagcaatgccaggcggaagccaagtgcccgaagctgctgccttgtctgcacacgctgtgctcaggatgcctggaggcgtcgggcatgcagtgccccatctgccaggcgccctggcccctaggtgcagacacacccgccctggataacgtctttttcgagagtctgcagcggcgcctgtcggtgtaccggcagattgtggatgcgcaggctgtgtgcacccgctgcaaagagtcggccgacttctggtgctttgagtgcgagcagctcctctgcgccaagtgcttcgaggcacaccagtggttcctcaagcacgaggcccggcccctagcagagctgcgcaaccagtcggtgcgtgagttcctggacggcacccgcaagaccaacaacatcttctgctccaaccccaaccaccgcacccctacgctgaccagcatctactgccgaggatgttccaagccgctgtgctgctcgtgcgcgctccttgacagcagccacagtgagctcaagtgcgacatcagcgcagagatccagcagcgacaggaggagctggacgccatgacgcaggcgctgcaggagcaggatagtgcctttggcgcggttcacgcgcagatgcacgcggccgtcggccagctgggccgcgcgcgtgccgagaccgaggagctgatccgcgagcgcgtgcgccaggtggtagctcacgtgcgggctcaggagcgcgagctgctggaggctgtggacgcgcggtaccagcgcgactacgaggagatggccagtcggctgggccgcctggatgctgtgctgcagcgcatccgcacgggcagcgcgctggtgcagaggatgaagtgctacgcctcggaccaggaggtgctggacatgcacggtttcctgcgccaggcgctctgccgcctgcgccaggaggagccccagagcctgcaagctgccgtgcgcaccgatggcttcgacgagttcaaggtgcgcctgcaggacctcagctcttgcatcacccaggggaaagatgcagctgtatccaagaaagccagcccagaggctgccagcactcccagggaccctattgacgttgacctgcccgaggaggcagagagagtgaaggcccaggttcaggccctggggctggctgaagcccagcctatggctgtggtacagtcagtgcccggggcacaccccgtgccagtgtacgccttctccatcaaaggcccttcctatggagaggatgtctccaatacaacgacagcccagaagaggaagtgcagccagacccagtgccccaggaaggtcatcaagatggagtctgaggaggggaaggaggcaaggttggctcggagctccccggagcagcccaggcccagcacctccaaggcagtctcaccaccccacctggatggaccgcctagccccaggagccccgtcataggaagtgaggtcttcctgcccaacagcaaccacgtggccagtggcgccggggaggcagaggaacgcgttgtggtgatcagcagctcggaagactcagatgccgaaaactcgtcctcccgagagctggatgacagcagcagtgagtccagtgacctccagctggaaggccccagcaccctcagggtcctggacgagaaccttgctgacccccaagcagaagacagacctctggttttctttgacctcaagattgacaatgaaacccagaagattagccagctggctgcggtgaaccgggaaagcaagttccgcgtggtcatccagcctgaagccttcttcagcatctactccaaggccgtgtccctggaggtggggctgcagcacttcctcagctttctgagctccatgcgccgccctatcttggcctgctacaagctgtgggggcctggcctcccaaacttcttccgggccctggaggacattaacaggctgtgggaattccaggaggccatctcgggcttcctggctgccctgcctctcatccgggagcgtgtgcccggggccagcagcttcaaactcaagaacctggcccagacctacctggcgagaaacatgagcgagcgcagcgccatggctgccgtgctggccatgcgtgacctgtgccgcctcctcgaggtctccccgggcccccagctggcccagcatgtctaccccttcagtagcctgcagtgctttgcctccctgcagcccctggtgcaggcagctgtgctgccccgggctgaggcccgcctcctggccctacacaacgtgagcttcatggagctgctgagtgcacaccgccgtgaccggcaggggggcctgaagaagtacagccgctatctaagcctgcagaccaccacgttgccccctgcccagcctgctttcaacctgcaggctctgggcacctactttgaaggcctgttggagggtccggcgctggcacgggcagaaggagtctccaccccacttgctggccgtggcttggcagagagggcctcccagcagagctgagaggagggggtgaccagcttggagtctctggtgggcagagagggatggggtccctgagccaggccccacccatcacagcattcccaggtcctggtacccagccctcagttgtcatttggttcagaatcagttccctttctctgggaccaaatttcccttctctaaacatcctacagagaaggttccaaagctgagcacccatcaccctaggtgtgcaccagactcctattagcccctccttccaggagctagaaccagggaggtcctgagtgaggaaggcatgacctctgggctctctaggtggccctggtcttgccccatccatcccacctgccactaccttgggtgtccttacagctctgccctgaccccagcccctgcccctggacacctgctgacagctcccacacagaacagtctgaggtgatgctggctacagccctggcagcccatggcaactcaaagtgccttccaaaccaaactgcccctcatgaggttagggtcccccaccctccacctgcccagaggccaactctgttcccttctcctttcatcccagaggggcctcatcagcaaagacagaaactgatgttccatgcatgtccctgcttccaaagcctgaccttccaaagcttgcttccttcctcctggctgcacagacacctctgcttggccacagctttgctctttggtcctcaggccaccagacccctcacagcatggcccttggctcttcctgcactgccctcaccctcagccgtcccaaggagtgcccagcactactcagcatgtagtccaggacctgcggcatcagcatcccctgggagcttcttagaaatgcagacctgtgggctctaccacaggcctctggaatcagaatcttcagggtggggcccagcagtctgtgttttaacaggttctcccggtgatgctggtgcatgctcaagtttgagaaccgctgctctcatagactgctcctccaaggggaagcagtgtggaacagcagagaaagtcccgtccctatctctgactgtgcagtgagtgtggcctaggaacaggtcccttcctaagctctagtgtccccatctgtaaaatgggctgattggcctccacggtcagagcggccatctggctgtgccatcctgcatttttaggaatggaaagcaggcctctgaggcagtggacaggaagacttctcatccttgaattctagctcccattccaaactgttagtccccaaccttgtggtcacatcagaggtcaacagcagaacagaggcaggtcagggttgtccgctctgattagcagaacgacagccccttcctcctcctccctccttcccatccctactcattagctccctgctcctgggatgcttcccaagcagcccaggcctctagcctccatggctgatgacctcagctttcacactggtgaagtctgtgtacccatactgcagccccatcccatggggcccctgaagacccactgaggaattccgtagggtcttgttcccacgaccggagtgctggctctcacagtgaattttgatgcatttaaaataagattctgatgccagactgttaaaacaggcgctggttctgaagcaccgatggaaacagattgatgcagatggaaggaggaagggagactgggcccactgatttccagccccaccatgtgtgctgttttcagatgtgattgaggggtgttctgccctgcctccactgtcacagcctttaataaagatgtgaatcttgaaa

SEQ ID NO: 169796 - DNA, 3029 bp, Homo sapiens
  Payload ID: 13426
  Gene Symbol: PML
  Gene Name: promyelocytic leukemia
  Uniprot ID: P29590
  ENST ID: ENST00000268059
  CDS Start-End: 97-2586
gctcaagggactcagccaactggctcacgcctccccttcagcttctcttcacgcactccaagatctaaaccgagaatcgaaactaagctggggtccatggagcctgcacccgcccgatctccgaggccccagcaggaccccgcccggccccaggagcccaccatgcctccccccgagaccccctctgaaggccgccagcccagccccagccccagccctacagagcgagcccccgcttcggaggaggagttccagtttctgcgctgccagcaatgccaggcggaagccaagtgcccgaagctgctgccttgtctgcacacgctgtgctcaggatgcctggaggcgtcgggcatgcagtgccccatctgccaggcgccctggcccctaggtgcagacacacccgccctggataacgtctttttcgagagtctgcagcggcgcctgtcggtgtaccggcagattgtggatgcgcaggctgtgtgcacccgctgcaaagagtcggccgacttctggtgctttgagtgcgagcagctcctctgcgccaagtgcttcgaggcacaccagtggttcctcaagcacgaggcccggcccctagcagagctgcgcaaccagtcggtgcgtgagttcctggacggcacccgcaagaccaacaacatcttctgctccaaccccaaccaccgcacccctacgctgaccagcatctactgccgaggatgttccaagccgctgtgctgctcgtgcgcgctccttgacagcagccacagtgagctcaagtgcgacatcagcgcagagatccagcagcgacaggaggagctggacgccatgacgcaggcgctgcaggagcaggatagtgcctttggcgcggttcacgcgcagatgcacgcggccgtcggccagctgggccgcgcgcgtgccgagaccgaggagctgatccgcgagcgcgtgcgccaggtggtagctcacgtgcgggctcaggagcgcgagctgctggaggctgtggacgcgcggtaccagcgcgactacgaggagatggccagtcggctgggccgcctggatgctgtgctgcagcgcatccgcacgggcagcgcgctggtgcagaggatgaagtgctacgcctcggaccaggaggtgctggacatgcacggtttcctgcgccaggcgctctgccgcctgcgccaggaggagccccagagcctgcaagctgccgtgcgcaccgatggcttcgacgagttcaaggtgcgcctgcaggacctcagctcttgcatcacccaggggaaagatgcagctgtatccaagaaagccagcccagaggctgccagcactcccagggaccctattgacgttgacctgcccgaggaggcagagagagtgaaggcccaggttcaggccctggggctggctgaagcccagcctatggctgtggtacagtcagtgcccggggcacaccccgtgccagtgtacgccttctccatcaaaggcccttcctatggagaggatgtctccaatacaacgacagcccagaagaggaagtgcagccagacccagtgccccaggaaggtcatcaagatggagtctgaggaggggaaggaggcaaggttggctcggagctccccggagcagcccaggcccagcacctccaaggcagtctcaccaccccacctggatggaccgcctagccccaggagccccgtcataggaagtgaggtcttcctgcccaacagcaaccacgtggccagtggcgccggggaggcagaggaacgcgttgtggtgatcagcagctcggaagactcagatgccgaaaactcgtgcatggagcccatggagaccgccgagccacagtcctcgccagcccactcctcgccagcccactcctcgccagcccactcctcgccagtccagtctctgctgagagcacaaggagcctccagcctgccctgtggcacataccaccccccagcttggcctccccaccagcccgctgagcaggctgccacccccgatgctgagcctcacagcgagcctcctgatcaccaggagcgccctgccgtccaccgtgggatccgctacctgttgtacagagcacagagagccatccgccttcgccatgccctccgcttgcaccctcaattgcatcgggcccctattcggacttggtctccccatgtggtccaagccagcactcctgccatcacagggcccctcaaccatcctgccaatgcccaggaacatcctgcccagctgcaaaggggcatcagcccaccccaccggatacgaggggctgtgcgatcccgcagccgctccctccggggctcctcccatttatcccagtggctcaacaacttttttgccctccccttctcctccatggcttcccagcttgacatgtcttccgtggtgggggcaggggaaagcagagcccagactcttggagcaggtgttccccctggggactctgtcagaggctccatggaggcctctcaagtccaagtgcctctggaagcctctccaattacattcccaccaccctgtgccccagaaaggccccccatcagcccagtcccaggcgcccgtcaagcaggcctctgagagtgctacccttctcttgtaaccttgcagccaacacccctgcccggcccctgagctgcctcctccagcccatgctcttacaggccctgcacagagtagcactcattaattcttggttaaggaatgaatcaacgaatgaatggctatgcatggacctctgggcagggagacctgggtcttctctggctgagaggggaaggctaaggcatggctgagattcaagccaccattccaggcctctttgcccaagaaagaaacttctgtcacccttgcactctcctgtattctgagtccctggccaatagcacagccttccatgccccgacccccaccccaagcctctccactaggcctctgccaggatctaagcccatgagcacagggactggctatcccaagacctggcagatgtggctgctcaataaacacttgttgaaccatca

SEQ ID NO: 169797 - DNA, 2885 bp, Homo sapiens
  Payload ID: 13426
  Gene Symbol: PML
  Gene Name: promyelocytic leukemia
  Uniprot ID: P29590
  ENST ID: ENST00000354026
  CDS Start-End: 97-2442
gctcaagggactcagccaactggctcacgcctccccttcagcttctcttcacgcactccaagatctaaaccgagaatcgaaactaagctggggtccatggagcctgcacccgcccgatctccgaggccccagcaggaccccgcccggccccaggagcccaccatgcctccccccgagaccccctctgaaggccgccagcccagccccagccccagccctacagagcgagcccccgcttcggaggaggagttccagtttctgcgctgccagcaatgccaggcggaagccaagtgcccgaagctgctgccttgtctgcacacgctgtgctcaggatgcctggaggcgtcgggcatgcagtgccccatctgccaggcgccctggcccctaggtgcagacacacccgccctggataacgtctttttcgagagtctgcagcggcgcctgtcggtgtaccggcagattgtggatgcgcaggctgtgtgcacccgctgcaaagagtcggccgacttctggtgctttgagtgcgagcagctcctctgcgccaagtgcttcgaggcacaccagtggttcctcaagcacgaggcccggcccctagcagagctgcgcaaccagtcggtgcgtgagttcctggacggcacccgcaagaccaacaacatcttctgctccaaccccaaccaccgcacccctacgctgaccagcatctactgccgaggatgttccaagccgctgtgctgctcgtgcgcgctccttgacagcagccacagtgagctcaagtgcgacatcagcgcagagatccagcagcgacaggaggagctggacgccatgacgcaggcgctgcaggagcaggatagtgcctttggcgcggttcacgcgcagatgcacgcggccgtcggccagctgggccgcgcgcgtgccgagaccgaggagctgatccgcgagcgcgtgcgccaggtggtagctcacgtgcgggctcaggagcgcgagctgctggaggctgtggacgcgcggtaccagcgcgactacgaggagatggccagtcggctgggccgcctggatgctgtgctgcagcgcatccgcacgggcagcgcgctggtgcagaggatgaagtgctacgcctcggaccaggaggtgctggacatgcacggtttcctgcgccaggcgctctgccgcctgcgccaggaggagccccagagcctgcaagctgccgtgcgcaccgatggcttcgacgagttcaaggtgcgcctgcaggacctcagctcttgcatcacccaggggaaagatgcagctgtatccaagaaagccagcccagaggctgccagcactcccagggaccctattgacgttgacctggatgtctccaatacaacgacagcccagaagaggaagtgcagccagacccagtgccccaggaaggtcatcaagatggagtctgaggaggggaaggaggcaaggttggctcggagctccccggagcagcccaggcccagcacctccaaggcagtctcaccaccccacctggatggaccgcctagccccaggagccccgtcataggaagtgaggtcttcctgcccaacagcaaccacgtggccagtggcgccggggaggcagaggaacgcgttgtggtgatcagcagctcggaagactcagatgccgaaaactcgtgcatggagcccatggagaccgccgagccacagtcctcgccagcccactcctcgccagcccactcctcgccagcccactcctcgccagtccagtctctgctgagagcacaaggagcctccagcctgccctgtggcacataccaccccccagcttggcctccccaccagcccgctgagcaggctgccacccccgatgctgagcctcacagcgagcctcctgatcaccaggagcgccctgccgtccaccgtgggatccgctacctgttgtacagagcacagagagccatccgccttcgccatgccctccgcttgcaccctcaattgcatcgggcccctattcggacttggtctccccatgtggtccaagccagcactcctgccatcacagggcccctcaaccatcctgccaatgcccaggaacatcctgcccagctgcaaaggggcatcagcccaccccaccggatacgaggggctgtgcgatcccgcagccgctccctccggggctcctcccatttatcccagtggctcaacaacttttttgccctccccttctcctccatggcttcccagcttgacatgtcttccgtggtgggggcaggggaaagcagagcccagactcttggagcaggtgttccccctggggactctgtcagaggctccatggaggcctctcaagtccaagtgcctctggaagcctctccaattacattcccaccaccctgtgccccagaaaggccccccatcagcccagtcccaggcgcccgtcaagcaggcctctgagagtgctacccttctcttgtaaccttgcagccaacacccctgcccggcccctgagctgcctcctccagcccatgctcttacaggccctgcacagagtagcactcattaattcttggttaaggaatgaatcaacgaatgaatggctatgcatggacctctgggcagggagacctgggtcttctctggctgagaggggaaggctaaggcatggctgagattcaagccaccattccaggcctctttgcccaagaaagaaacttctgtcacccttgcactctcctgtattctgagtccctggccaatagcacagccttccatgccccgacccccaccccaagcctctccactaggcctctgccaggatctaagcccatgagcacagggactggctatcccaagacctggcagatgtggctgctcaataaacacttgttgaaccatca

SEQ ID NO: 169798 - DNA, 1726 bp, Homo sapiens
  Payload ID: 13426
  Gene Symbol: PML
  Gene Name: promyelocytic leukemia
  Uniprot ID: P29590
  ENST ID: ENST00000359928
  CDS Start-End: 70-1341
cgcctccccttcagcttctcttcacgcactccaagatctaaaccgagaatcgaaactaagctggggtccatggagcctgcacccgcccgatctccgaggccccagcaggaccccgcccggccccaggagcccaccatgcctccccccgagaccccctctgaaggccgccagcccagccccagccccagccctacagagcgagcccccgcttcggaggaggagttccagtttctgcgctgccagcaatgccaggcggaagccaagtgcccgaagctgctgccttgtctgcacacgctgtgctcaggatgcctggaggcgtcgggcatgcagtgccccatctgccaggcgccctggcccctaggtgcagacacacccgccctggataacgtctttttcgagagtctgcagcggcgcctgtcggtgtaccggcagattgtggatgcgcaggctgtgtgcacccgctgcaaagagtcggccgacttctggtgctttgagtgcgagcagctcctctgcgccaagtgcttcgaggcacaccagtggttcctcaagcacgaggcccggcccctagcagagctgcgcaaccagtcggtgcgtgagttcctggacggcacccgcaagaccaacaacatcttctgctccaaccccaaccaccgcacccctacgctgaccagcatctactgccgaggatgttccaagccgctgtgctgctcgtgcgcgctccttgacagcagccacagtgagctcaagtgcgacatcagcgcagagatccagcagcgacaggaggagctggacgccatgacgcaggcgctgcaggagcaggatagtgcctttggcgcggttcacgcgcagatgcacgcggccgtcggccagctgggccgcgcgcgtgccgagaccgaggagctgatccgcgagcgcgtgcgccaggtggtagctcacgtgcgggctcaggagcgcgagctgctggaggctgtggacgcgcggtaccagcgcgactacgaggagatggccagtcggctgggccgcctggatgctgtgctgcagcgcatccgcacgggcagcgcgctggtgcagaggatgaagtgctacgcctcggaccaggaggtgctggacatgcacggtttcctgcgccaggcgctctgccgcctgcgccaggaggagccccagagcctgcaagctgccgtgcgcaccgatggcttcgacgagttcaaggtgcgcctgcaggacctcagctcttgcatcacccaggggaaagatgcagctgtatccaagaaagccagcccagaggctgccagcactcccagggaccctattgacgttgacctgaggaacgcgttgtggtgatcagcagctcggaagactcagatgccgaaaactcgtcctcccgagagctggatgacagcagcagtgagtccagtgacctccagctggaaggccccagcaccctcagggtcctggacgagaaccttgctgacccccaagcagaagacagacctctggttttctttgacctcaagattgacaatgaaagtgggttctcctggggctacccccacccctttctaatttagtctctgagtcccaaaaagaagtgcaggcagagccatctgccaggcccaggagagctctgagctctggccaacaactgcagccaggctgggcagagcactccggctcacctgggctcctggcgtgtcatttgctggcttgaataaagatgtccgcctta

SEQ ID NO: 169799 - DNA, 1738 bp, Homo sapiens
  Payload ID: 13426
  Gene Symbol: PML
  Gene Name: promyelocytic leukemia
  Uniprot ID: P29590
  ENST ID: ENST00000395132
  CDS Start-End: 97-1404
gctcaagggactcagccaactggctcacgcctccccttcagcttctcttcacgcactccaagatctaaaccgagaatcgaaactaagctggggtccatggagcctgcacccgcccgatctccgaggccccagcaggaccccgcccggccccaggagcccaccatgcctccccccgagaccccctctgaaggccgccagcccagccccagccccagccctacagagcgagcccccgcttcggaggaggagttccagtttctgcgctgccagcaatgccaggcggaagccaagtgcccgaagctgctgccttgtctgcacacgctgtgctcaggatgcctggaggcgtcgggcatgcagtgccccatctgccaggcgccctggcccctaggtgcagacacacccgccctggataacgtctttttcgagagtctgcagcggcgcctgtcggtgtaccggcagattgtggatgcgcaggctgtgtgcacccgctgcaaagagtcggccgacttctggtgctttgagtgcgagcagctcctctgcgccaagtgcttcgaggcacaccagtggttcctcaagcacgaggcccggcccctagcagagctgcgcaaccagtcggtgcgtgagttcctggacggcacccgcaagaccaacaacatcttctgctccaaccccaaccaccgcacccctacgctgaccagcatctactgccgaggatgttccaagccgctgtgctgctcgtgcgcgctccttgacagcagccacagtgagctcaagtgcgacatcagcgcagagatccagcagcgacaggaggagctggacgccatgacgcaggcgctgcaggagcaggatagtgcctttggcgcggttcacgcgcagatgcacgcggccgtcggccagctgggccgcgcgcgtgccgagaccgaggagctgatccgcgagcgcgtgcgccaggtggtagctcacgtgcgggctcaggagcgcgagctgctggaggctgtggacgcgcggtaccagcgcgactacgaggagatggccagtcggctgggccgcctggatgctgtgctgcagcgcatccgcacgggcagcgcgctggtgcagaggatgaagtgctacgcctcggaccaggaggtgctggacatgcacggtttcctgcgccaggcgctctgccgcctgcgccaggaggagccccagagcctgcaagctgccgtgcgcaccgatggcttcgacgagttcaaggtgcgcctgcaggacctcagctcttgcatcacccaggggaaagatgcagctgtatccaagaaagccagcccagaggctgccagcactcccagggaccctattgacgttgacctgctgcctcctccagcccatgctcttacaggccctgcacagagtagcactcattaattcttggttaaggaatgaatcaacgaatgaatggctatgcatggacctctgggcagggagacctgggtcttctctggctgagaggggaaggctaaggcatggctgagattcaagccaccattccaggcctctttgcccaagaaagaaacttctgtcacccttgcactctcctgtattctgagtccctggccaatagcacagccttccatgccccgacccccaccccaagcctctccactaggcctctgccaggatctaagcccatgagcacagggactggctatcccaagacctggcagatgtggctgctcaataaacacttgttgaaccatca

SEQ ID NO: 169800 - DNA, 2199 bp, Homo sapiens
  Payload ID: 13426
  Gene Symbol: PML
  Gene Name: promyelocytic leukemia
  Uniprot ID: P29590
  ENST ID: ENST00000395135
  CDS Start-End: 141-2042
ctctccagaggcgggccctgagccggcacctcccctttcggacagctcaagggactcagccaactggctcacgcctccccttcagcttctcttcacgcactccaagatctaaaccgagaatcgaaactaagctggggtccatggagcctgcacccgcccgatctccgaggccccagcaggaccccgcccggccccaggagcccaccatgcctccccccgagaccccctctgaaggccgccagcccagccccagccccagccctacagagcgagcccccgcttcggaggaggagttccagtttctgcgctgccagcaatgccaggcggaagccaagtgcccgaagctgctgccttgtctgcacacgctgtgctcaggatgcctggaggcgtcgggcatgcagtgccccatctgccaggcgccctggcccctaggtgcagacacacccgccctggataacgtctttttcgagagtctgcagcggcgcctgtcggtgtaccggcagattgtggatgcgcaggctgtgtgcacccgctgcaaagagtcggccgacttctggtgctttgagtgcgagcagctcctctgcgccaagtgcttcgaggcacaccagtggttcctcaagcacgaggcccggcccctagcagagctgcgcaaccagtcggtgcgtgagttcctggacggcacccgcaagaccaacaacatcttctgctccaaccccaaccaccgcacccctacgctgaccagcatctactgccgaggatgttccaagccgctgtgctgctcgtgcgcgctccttgacagcagccacagtgagctcaagtgcgacatcagcgcagagatccagcagcgacaggaggagctggacgccatgacgcaggcgctgcaggagcaggatagtgcctttggcgcggttcacgcgcagatgcacgcggccgtcggccagctgggccgcgcgcgtgccgagaccgaggagctgatccgcgagcgcgtgcgccaggtggtagctcacgtgcgggctcaggagcgcgagctgctggaggctgtggacgcgcggtaccagcgcgactacgaggagatggccagtcggctgggccgcctggatgctgtgctgcagcgcatccgcacgggcagcgcgctggtgcagaggatgaagtgctacgcctcggaccaggaggtgctggacatgcacggtttcctgcgccaggcgctctgccgcctgcgccaggaggagccccagagcctgcaagctgccgtgcgcaccgatggcttcgacgagttcaaggtgcgcctgcaggacctcagctcttgcatcacccaggggaaagatgcagctgtatccaagaaagccagcccagaggctgccagcactcccagggaccctattgacgttgacctgcccgaggaggcagagagagtgaaggcccaggttcaggccctggggctggctgaagcccagcctatggctgtggtacagtcagtgcccggggcacaccccgtgccagtgtacgccttctccatcaaaggcccttcctatggagaggatgtctccaatacaacgacagcccagaagaggaagtgcagccagacccagtgccccaggaaggtcatcaagatggagtctgaggaggggaaggaggcaaggttggctcggagctccccggagcagcccaggcccagcacctccaaggcagtctcaccaccccacctggatggaccgcctagccccaggagccccgtcataggaagtgaggtcttcctgcccaacagcaaccacgtggccagtggcgccggggaggcagaggaacgcgttgtggtgatcagcagctcggaagactcagatgccgaaaactcgtcctcccgagagctggatgacagcagcagtgagtccagtgacctccagctggaaggccccagcaccctcagggtcctggacgagaaccttgctgacccccaagcagaagacagacctctggttttctttgacctcaagattgacaatgaaagtgggttctcctggggctacccccacccctttctaatttagtctctgagtcccaaaaagaagtgcaggcagagccatctgccaggcccaggagagctctgagctctggccaacaactgcagccaggctgggcagagcactccggctcacctgggctcctggcgtgtcatttgctggcttgaataaagatgtccgcctt

SEQ ID NO: 169801 - DNA, 3010 bp, Homo sapiens
  Payload ID: 13426
  Gene Symbol: PML
  Gene Name: promyelocytic leukemia
  Uniprot ID: P29590
  ENST ID: ENST00000436891
  CDS Start-End: 70-1752
cgcctccccttcagcttctcttcacgcactccaagatctaaaccgagaatcgaaactaagctggggtccatggagcctgcacccgcccgatctccgaggccccagcaggaccccgcccggccccaggagcccaccatgcctccccccgagaccccctctgaaggccgccagcccagccccagccccagccctacagagcgagcccccgcttcggaggaggagttccagtttctgcgctgccagcaatgccaggcggaagccaagtgcccgaagctgctgccttgtctgcacacgctgtgctcaggatgcctggaggcgtcgggcatgcagtgccccatctgccaggcgccctggcccctaggtgcagacacacccgccctggataacgtctttttcgagagtctgcagcggcgcctgtcggtgtaccggcagattgtggatgcgcaggctgtgtgcacccgctgcaaagagtcggccgacttctggtgctttgagtgcgagcagctcctctgcgccaagtgcttcgaggcacaccagtggttcctcaagcacgaggcccggcccctagcagagctgcgcaaccagtcggtgcgtgagttcctggacggcacccgcaagaccaacaacatcttctgctccaaccccaaccaccgcacccctacgctgaccagcatctactgccgaggatgttccaagccgctgtgctgctcgtgcgcgctccttgacagcagccacagtgagctcaagtgcgacatcagcgcagagatccagcagcgacaggaggagctggacgccatgacgcaggcgctgcaggagcaggatagtgcctttggcgcggttcacgcgcagatgcacgcggccgtcggccagctgggccgcgcgcgtgccgagaccgaggagctgatccgcgagcgcgtgcgccaggtggtagctcacgtgcgggctcaggagcgcgagctgctggaggctgtggacgcgcggtaccagcgcgactacgaggagatggccagtcggctgggccgcctggatgctgtgctgcagcgcatccgcacgggcagcgcgctggtgcagaggatgaagtgctacgcctcggaccaggaggtgctggacatgcacggtttcctgcgccaggcgctctgccgcctgcgccaggaggagccccagagcctgcaagctgccgtgcgcaccgatggcttcgacgagttcaaggtgcgcctgcaggacctcagctcttgcatcacccaggggaaagatgcagctgtatccaagaaagccagcccagaggctgccagcactcccagggaccctattgacgttgacctgcccgaggaggcagagagagtgaaggcccaggttcaggccctggggctggctgaagcccagcctatggctgtggtacagtcagtgcccggggcacaccccgtgccagtgtacgccttctccatcaaaggcccttcctatggagaggatgtctccaatacaacgacagcccagaagaggaagtgcagccagacccagtgccccaggaaggtcatcaagatggagtctgaggaggggaaggaggcaaggttggctcggagctccccggagcagcccaggcccagcacctccaaggcagtctcaccaccccacctggatggaccgcctagccccaggagccccgtcataggaagtgaggtcttcctgcccaacagcaaccacgtggccagtggcgccggggaggcaggtagggagaggaacgcgttgtggtgatcagcagctcggaagactcagatgccgaaaactcgtgcatggagcccatggagaccgccgagccacagtcctcgccagcccactcctcgccagcccactcctcgccagcccactcctcgccagtccagtctctgctgagagcacaaggagcctccagcctgccctgtggcacataccaccccccagcttggcctccccaccagcccgctgagcaggctgccacccccgatgctgagcctcacagcgagcctcctgatcaccaggagcgccctgccgtccaccgtgggatccgctacctgttgtacagagcacagagagccatccgccttcgccatgccctccgcttgcaccctcaattgcatcgggcccctattcggacttggtctccccatgtggtccaagccagcactcctgccatcacagggcccctcaaccatcctgccaatgcccaggaacatcctgcccagctgcaaaggggcatcagcccaccccaccggatacgaggggctgtgcgatcccgcagccgctccctccggggctcctcccatttatcccagtggctcaacaacttttttgccctccccttctcctccatggcttcccagcttgacatgtcttccgtggtgggggcaggggaaagcagagcccagactcttggagcaggtgttccccctggggactctgtcagaggctccatggaggcctctcaagtccaagtgcctctggaagcctctccaattacattcccaccaccctgtgccccagaaaggccccccatcagcccagtcccaggcgcccgtcaagcaggcctctgagagtgctacccttctcttgtaaccttgcagccaacacccctgcccggcccctgagctgcctcctccagcccatgctcttacaggccctgcacagagtagcactcattaattcttggttaaggaatgaatcaacgaatgaatggctatgcatggacctctgggcagggagacctgggtcttctctggctgagaggggaaggctaaggcatggctgagattcaagccaccattccaggcctctttgcccaagaaagaaacttctgtcacccttgcactctcctgtattctgagtccctggccaatagcacagccttccatgccccgacccccaccccaagcctctccactaggcctctgccaggatctaagcccatgagcacagggactggctatcccaagacctggcagatgtggctgctcaataaacacttgttgaaccatca

SEQ ID NO: 169802 - DNA, 3643 bp, Homo sapiens
  Payload ID: 13426
  Gene Symbol: PML
  Gene Name: promyelocytic leukemia
  Uniprot ID: P29590
  ENST ID: ENST00000435786
  CDS Start-End: 70-1905
cgcctccccttcagcttctcttcacgcactccaagatctaaaccgagaatcgaaactaagctggggtccatggagcctgcacccgcccgatctccgaggccccagcaggaccccgcccggccccaggagcccaccatgcctccccccgagaccccctctgaaggccgccagcccagccccagccccagccctacagagcgagcccccgcttcggaggaggagttccagtttctgcgctgccagcaatgccaggcggaagccaagtgcccgaagctgctgccttgtctgcacacgctgtgctcaggatgcctggaggcgtcgggcatgcagtgccccatctgccaggcgccctggcccctaggtgcagacacacccgccctggataacgtctttttcgagagtctgcagcggcgcctgtcggtgtaccggcagattgtggatgcgcaggctgtgtgcacccgctgcaaagagtcggccgacttctggtgctttgagtgcgagcagctcctctgcgccaagtgcttcgaggcacaccagtggttcctcaagcacgaggcccggcccctagcagagctgcgcaaccagtcggtgcgtgagttcctggacggcacccgcaagaccaacaacatcttctgctccaaccccaaccaccgcacccctacgctgaccagcatctactgccgaggatgttccaagccgctgtgctgctcgtgcgcgctccttgacagcagccacagtgagctcaagtgcgacatcagcgcagagatccagcagcgacaggaggagctggacgccatgacgcaggcgctgcaggagcaggatagtgcctttggcgcggttcacgcgcagatgcacgcggccgtcggccagctgggccgcgcgcgtgccgagaccgaggagctgatccgcgagcgcgtgcgccaggtggtagctcacgtgcgggctcaggagcgcgagctgctggaggctgtggacgcgcggtaccagcgcgactacgaggagatggccagtcggctgggccgcctggatgctgtgctgcagcgcatccgcacgggcagcgcgctggtgcagaggatgaagtgctacgcctcggaccaggaggtgctggacatgcacggtttcctgcgccaggcgctctgccgcctgcgccaggaggagccccagagcctgcaagctgccgtgcgcaccgatggcttcgacgagttcaaggtgcgcctgcaggacctcagctcttgcatcacccaggggaaagatgcagctgtatccaagaaagccagcccagaggctgccagcactcccagggaccctattgacgttgacctgcccgaggaggcagagagagtgaaggcccaggttcaggccctggggctggctgaagcccagcctatggctgtggtacagtcagtgcccggggcacaccccgtgccagtgtacgccttctccatcaaaggcccttcctatggagaggatgtctccaatacaacgacagcccagaagaggaagtgcagccagacccagtgccccaggaaggtcatcaagatggagtctgaggaggggaaggaggcaaggttggctcggagctccccggagcagcccaggcccagcacctccaaggcagtctcaccaccccacctggatggaccgcctagccccaggagccccgtcataggaagtgaggtcttcctgcccaacagcaaccacgtggccagtggcgccggggaggcagaggaacgcgttgtggtgatcagcagctcggaagactcagatgccgaaaactcggtgagtggcccagaagttcagcccaggactcctgcctccccccatttcaggtcccagggggcacagccacagcaggtgactctcagacttgccttgcgcctggggaattttccagtgaggcattgagtcccaagctgtgctgaggacagtctccaaatgacagctgcatgcctggaccaccccagccctcccactacaccagggccaggagctcttctgaaatgctgatagcatgtgtccagagccctgtctcttttctggaatgtccaagacctttgtctggagcttccttatgcattttctgtcctctaagtcctcagtgaggagggctggacaagaatccattccttggtttattacagccagtgggggccagtgaaggggtgtcaggccacagggcagctatataggggccaaacaagtgaggtttgactccatccatgtagaaagatatataaatccattccacagtgaaacaggtggcctcgtgggtagtgacccttctgtccctagaggtttattactagaggctggactatcacctgtccaggggaaaaggggatctgaatagagtgaaaggttggactgggtggcccctgaggtctcttccagccctcagtctgaggttctgtattggaaagtgcatggagcccatggagaccgccgagccacagtcctcgccagcccactcctcgccagcccactcctcgccagcccactcctcgccagtccagtctctgctgagagcacaaggagcctccagcctgccctgtggcacataccaccccccagcttggcctccccaccagcccgctgagcaggctgccacccccgatgctgagcctcacagcgagcctcctgatcaccaggagcgccctgccgtccaccgtgggatccgctacctgttgtacagagcacagagagccatccgccttcgccatgccctccgcttgcaccctcaattgcatcgggcccctattcggacttggtctccccatgtggtccaagccagcactcctgccatcacagggcccctcaaccatcctgccaatgcccaggaacatcctgcccagctgcaaaggggcatcagcccaccccaccggatacgaggggctgtgcgatcccgcagccgctccctccggggctcctcccatttatcccagtggctcaacaacttttttgccctccccttctcctccatggcttcccagcttgacatgtcttccgtggtgggggcaggggaaagcagagcccagactcttggagcaggtgttccccctggggactctgtcagaggctccatggaggcctctcaagtccaagtgcctctggaagcctctccaattacattcccaccaccctgtgccccagaaaggccccccatcagcccagtcccaggcgcccgtcaagcaggcctctgagagtgctacccttctcttgtaaccttgcagccaacacccctgcccggcccctgagctgcctcctccagcccatgctcttacaggccctgcacagagtagcactcattaattcttggttaaggaatgaatcaacgaatgaatggctatgcatggacctctgggcagggagacctgggtcttctctggctgagaggggaaggctaaggcatggctgagattcaagccaccattccaggcctctttgcccaagaaagaaacttctgtcacccttgcactctcctgtattctgagtccctggccaatagcacagccttccatgccccgacccccaccccaagcctctccactaggcctctgccaggatctaagcccatgagcacagggactggctatcccaagacctggcagatgtggctgctcaataaacacttgttgaaccatca

SEQ ID NO: 169803 - DNA, 2251 bp, Homo sapiens
  Payload ID: 13426
  Gene Symbol: PML
  Gene Name: promyelocytic leukemia
  Uniprot ID: P29590
  ENST ID: ENST00000569477
  CDS Start-End: 83-2008
gccaactggctcacgcctccccttcagcttctcttcacgcactccaagatctaaaccgagaatcgaaactaagctggggtccatggagcctgcacccgcccgatctccgaggccccagcaggaccccgcccggccccaggagcccaccatgcctccccccgagaccccctctgaaggccgccagcccagccccagccccagccctacagagcgagcccccgcttcggaggaggagttccagtttctgcgctgccagcaatgccaggcggaagccaagtgcccgaagctgctgccttgtctgcacacgctgtgctcaggatgcctggaggcgtcgggcatgcagtgccccatctgccaggcgccctggcccctaggtgcagacacacccgccctggataacgtctttttcgagagtctgcagcggcgcctgtcggtgtaccggcagattgtggatgcgcaggctgtgtgcacccgctgcaaagagtcggccgacttctggtgctttgagtgcgagcagctcctctgcgccaagtgcttcgaggcacaccagtggttcctcaagcacgaggcccggcccctagcagagctgcgcaaccagtcggtgcgtgagttcctggacggcacccgcaagaccaacaacatcttctgctccaaccccaaccaccgcacccctacgctgaccagcatctactgccgaggatgttccaagccgctgtgctgctcgtgcgcgctccttgacagcagccacagtgagctcaagtgcgacatcagcgcagagatccagcagcgacaggaggagctggacgccatgacgcaggcgctgcaggagcaggatagtgcctttggcgcggttcacgcgcagatgcacgcggccgtcggccagctgggccgcgcgcgtgccgagaccgaggagctgatccgcgagcgcgtgcgccaggtggtagctcacgtgcgggctcaggagcgcgagctgctggaggctgtggacgcgcggtaccagcgcgactacgaggagatggccagtcggctgggccgcctggatgctgtgctgcagcgcatccgcacgggcagcgcgctggtgcagaggatgaagtgctacgcctcggaccaggaggtgctggacatgcacggtttcctgcgccaggcgctctgccgcctgcgccaggaggagccccagagcctgcaagctgccgtgcgcaccgatggcttcgacgagttcaaggtgcgcctgcaggacctcagctcttgcatcacccaggggaaagatgcagctgtatccaagaaagccagcccagaggctgccagcactcccagggaccctattgacgttgacctgcccgaggaggcagagagagtgaaggcccaggttcaggccctggggctggctgaagcccagcctatggctgtggtacagtcagtgcccggggcacaccccgtgccagtgtacgccttctccatcaaaggcccttcctatggagaggatgtctccaatacaacgacagcccagaagaggaagtgcagccagacccagtgccccaggaaggtcatcaagatggagtctgaggaggggaaggaggcaaggttggctcggagctccccggagcagcccaggcccagcacctccaaggcagtctcaccaccccacctggatggaccgcctagccccaggagccccgtcataggaagtgaggtcttcctgcccaacagcaaccacgtggccagtggcgccggggaggcagaggaacgcgttgtggtgatcagcagctcggaagactcagatgccgaaaactcggtctcttccagccctcagtctgaggttctgtattggaaagtgcatggagcccatggagaccgccgagccacagtcctcgccagcccactcctcgccagcccactcctcgccagcccactcctcgccagtccagtctctgctgagagcacaaggagcctccagcctgccctgtggcacataccaccccccagcttggcctccccaccagcccgctgagcaggctgccacccccgatgctgagcctcacagcgagcctcctgatcaccaggagcgccctgccgtccaccgtgggatccgctacctgttgtacagagcacagagagccatccgccttcgccatgccctccgcttgcaccctcaattgcatcgggcccctattcggacttggtctccccatgtggtccaagccagcactcctgccatcacagggcccctcaaccatcctgccaatgcccagga

SEQ ID NO: 169804 - DNA, 5393 bp, Homo sapiens
  Payload ID: 13426
  Gene Symbol: PML
  Gene Name: promyelocytic leukemia
  Uniprot ID: P29590
  ENST ID: ENST00000565898
  CDS Start-End: 85-2589
cagccaactggctcacgcctccccttcagcttctcttcacgcactccaagatctaaaccgagaatcgaaactaagctggggtccatggagcctgcacccgcccgatctccgaggccccagcaggaccccgcccggccccaggagcccaccatgcctccccccgagaccccctctgaaggccgccagcccagccccagccccagccctacagagcgagcccccgcttcggaggaggagttccagtttctgcgctgccagcaatgccaggcggaagccaagtgcccgaagctgctgccttgtctgcacacgctgtgctcaggatgcctggaggcgtcgggcatgcagtgccccatctgccaggcgccctggcccctaggtgcagacacacccgccctggataacgtctttttcgagagtctgcagcggcgcctgtcggtgtaccggcagattgtggatgcgcaggctgtgtgcacccgctgcaaagagtcggccgacttctggtgctttgagtgcgagcagctcctctgcgccaagtgcttcgaggcacaccagtggttcctcaagcacgaggcccggcccctagcagagctgcgcaaccagtcggtgcgtgagttcctggacggcacccgcaagaccaacaacatcttctgctccaaccccaaccaccgcacccctacgctgaccagcatctactgccgaggatgttccaagccgctgtgctgctcgtgcgcgctccttgacagcagccacagtgagctcaagtgcgacatcagcgcagagatccagcagcgacaggaggagctggacgccatgacgcaggcgctgcaggagcaggatagtgcctttggcgcggttcacgcgcagatgcacgcggccgtcggccagctgggccgcgcgcgtgccgagaccgaggagctgatccgcgagcgcgtgcgccaggtggtagctcacgtgcgggctcaggagcgcgagctgctggaggctgtggacgcgcggtaccagcgcgactacgaggagatggccagtcggctgggccgcctggatgctgtgctgcagcgcatccgcacgggcagcgcgctggtgcagaggatgaagtgctacgcctcggaccaggaggtgctggacatgcacggtttcctgcgccaggcgctctgccgcctgcgccaggaggagccccagagcctgcaagctgccgtgcgcaccgatggcttcgacgagttcaaggtgcgcctgcaggacctcagctcttgcatcacccaggggaaagatgcagctgtatccaagaaagccagcccagaggctgccagcactcccagggaccctattgacgttgacctggatgtctccaatacaacgacagcccagaagaggaagtgcagccagacccagtgccccaggaaggtcatcaagatggagtctgaggaggggaaggaggcaaggttggctcggagctccccggagcagcccaggcccagcacctccaaggcagtctcaccaccccacctggatggaccgcctagccccaggagccccgtcataggaagtgaggtcttcctgcccaacagcaaccacgtggccagtggcgccggggaggcagaggaacgcgttgtggtgatcagcagctcggaagactcagatgccgaaaactcgtcctcccgagagctggatgacagcagcagtgagtccagtgacctccagctggaaggccccagcaccctcagggtcctggacgagaaccttgctgacccccaagcagaagacagacctctggttttctttgacctcaagattgacaatgaaacccagaagattagccagctggctgcggtgaaccgggaaagcaagttccgcgtggtcatccagcctgaagccttcttcagcatctactccaaggccgtgtccctggaggtggggctgcagcacttcctcagctttctgagctccatgcgccgccctatcttggcctgctacaagctgtgggggcctggcctcccaaacttcttccgggccctggaggacattaacaggctgtgggaattccaggaggccatctcgggcttcctggctgccctgcctctcatccgggagcgtgtgcccggggccagcagcttcaaactcaagaacctggcccagacctacctggcgagaaacatgagcgagcgcagcgccatggctgccgtgctggccatgcgtgacctgtgccgcctcctcgaggtctccccgggcccccagctggcccagcatgtctaccccttcagtagcctgcagtgctttgcctccctgcagcccctggtgcaggcagctgtgctgccccgggctgaggcccgcctcctggccctacacaacgtgagcttcatggagctgctgagtgcacaccgccgtgaccggcaggggggcctgaagaagtacagccgctatctaagcctgcagaccaccacgttgccccctgcccagcctgctttcaacctgcaggctctgggcacctactttgaaggcctgttggagggtccggcgctggcacgggcagaaggagtctccaccccacttgctggccgtggcttggcagagagggcctcccagcagagctgagaggagggggtgaccagcttggagtctctggtgggcagagagggatggggtccctgagccaggccccacccatcacagcattcccaggtcctggtacccagccctcagttgtcatttggttcagaatcagttccctttctctgggaccaaatttcccttctctaaacatcctacagagaaggttccaaagctgagcacccatcaccctaggtgtgcaccagactcctattagcccctccttccaggagctagaaccagggaggtcctgagtgaggaaggcatgacctctgggctctctaggtggccctggtcttgccccatccatcccacctgccactaccttgggtgtccttacagctctgccctgaccccagcccctgcccctggacacctgctgacagctcccacacagaacagtctgaggtgatgctggctacagccctggcagcccatggcaactcaaagtgccttccaaaccaaactgcccctcatgaggttagggtcccccaccctccacctgcccagaggccaactctgttcccttctcctttcatcccagaggggcctcatcagcaaagacagaaactgatgttccatgcatgtccctgcttccaaagcctgaccttccaaagcttgcttccttcctcctggctgcacagacacctctgcttggccacagctttgctctttggtcctcaggccaccagacccctcacagcatggcccttggctcttcctgcactgccctcaccctcagccgtcccaaggagtgcccagcactactcagcatgtagtccaggacctgcggcatcagcatcccctgggagcttcttagaaatgcagacctgtgggctctaccacaggcctctggaatcagaatcttcagggtggggcccagcagtctgtgttttaacaggttctcccggtgatgctggtgcatgctcaagtttgagaaccgctgctctcatagactgctcctccaaggggaagcagtgtggaacagcagagaaagtcccgtccctatctctgactgtgcagtgagtgtggcctaggaacaggtcccttcctaagctctagtgtccccatctgtaaaatgggctgattggcctccacggtcagagcggccatctggctgtgccatcctgcatttttaggaatggaaagcaggcctctgaggcagtggacaggaagacttctcatccttgaattctagctcccattccaaactgttagtccccaaccttgtggtcacatcagaggtcaacagcagaacagaggcaggtcagggttgtccgctctgattagcagaacgacagccccttcctcctcctccctccttcccatccctactcattagctccctgctcctgggatgcttcccaagcagcccaggcctctagcctccatggctgatgacctcagctttcacactggtgaagtctgtgtacccatactgcagccccatcccatggggcccctgaagacccactgaggaattccgtagggtcttgttcccacgaccggagtgctggctctcacagtgaattttgatgcatttaaaataagattctgatgccagactgttaaaacaggcgctggttctgaagcaccgatggaaacagattgatgcagatggaaggaggaagggagactgggcccactgatttccagccccaccatgtgtgctgttttcagatgtgattgaggggtgttctgccctgcctccactgtcacagcctttaataaagatgtgaatcttgaaagcctgatgctccaatcacagactctgctcagcatccccagaggaaccactgagaagccttttgcctggataggagggggctctcccaggcataggcttgtggccacttgcccagcacaactgtgttttgtggggcgtcttttaggacttagcagagctgagagccctttgttgctcaatgctgtgagccttaagcatgtgaatccccccacatgacaagtggggagacccagggtaggctttcctttggatcatctccaaatgggagtgccatgtggcaggaaagaagcaccgatttcaagaattacttcctagagaaagtcaggaactagagaccagagtctgcaggaactttgccactgcccttcactggctaatcctgtacttctctctgtgttccttgagtgacaggtggtaaaacccttaaaaagggaggtgtgggaggcccaggactttggtaacaggtgatgaatgtgttgtcttggccatcacaggtggagcttcagttagtacccgagggattcccctggcacaagcattataggaattagtccaccactggcgtgggtgagcagccaggtaatgggaattgatcagtgccaccacccttgaccccaactaccatcccagatgcccagattccagtcctggagttttattctctcagcttgatcctttgaccaagaagatccagtcccaatatgtcacctgtgcttcatctttggactatatctcaggtgtttacgtgtcaactaatgggagcttactgggttagaagtcaggacactgagtttcaatcctcacttagtagtctgtggccctctttggcacattaacctccctccttgatcctcaggctgcacctctggcaaatgggagaatgcggctccttttgacttcaagggatctttgtgggaaccaatgagaaaatgtgtgtgaagatagctttttggtatattttaaaagtgcacaaatttaagatcttactgctttataaagtgctttatgaattataggaaaataaacacattttagatcttag

SEQ ID NO: 169805 - DNA, 1404 bp, Homo sapiens
  Payload ID: 13426
  Gene Symbol: PML
  Gene Name: promyelocytic leukemia
  Uniprot ID: P29590
  ENST ID: ENST00000567543
  CDS Start-End: 70-1341
cgcctccccttcagcttctcttcacgcactccaagatctaaaccgagaatcgaaactaagctggggtccatggagcctgcacccgcccgatctccgaggccccagcaggaccccgcccggccccaggagcccaccatgcctccccccgagaccccctctgaaggccgccagcccagccccagccccagccctacagagcgagcccccgcttcggaggaggagttccagtttctgcgctgccagcaatgccaggcggaagccaagtgcccgaagctgctgccttgtctgcacacgctgtgctcaggatgcctggaggcgtcgggcatgcagtgccccatctgccaggcgccctggcccctaggtgcagacacacccgccctggataacgtctttttcgagagtctgcagcggcgcctgtcggtgtaccggcagattgtggatgcgcaggctgtgtgcacccgctgcaaagagtcggccgacttctggtgctttgagtgcgagcagctcctctgcgccaagtgcttcgaggcacaccagtggttcctcaagcacgaggcccggcccctagcagagctgcgcaaccagtcggtgcgtgagttcctggacggcacccgcaagaccaacaacatcttctgctccaaccccaaccaccgcacccctacgctgaccagcatctactgccgaggatgttccaagccgctgtgctgctcgtgcgcgctccttgacagcagccacagtgagctcaagtgcgacatcagcgcagagatccagcagcgacaggaggagctggacgccatgacgcaggcgctgcaggagcaggatagtgcctttggcgcggttcacgcgcagatgcacgcggccgtcggccagctgggccgcgcgcgtgccgagaccgaggagctgatccgcgagcgcgtgcgccaggtggtagctcacgtgcgggctcaggagcgcgagctgctggaggctgtggacgcgcggtaccagcgcgactacgaggagatggccagtcggctgggccgcctggatgctgtgctgcagcgcatccgcacgggcagcgcgctggtgcagaggatgaagtgctacgcctcggaccaggaggtgctggacatgcacggtttcctgcgccaggcgctctgccgcctgcgccaggaggagccccagagcctgcaagctgccgtgcgcaccgatggcttcgacgagttcaaggtgcgcctgcaggacctcagctcttgcatcacccaggggaaagatgcagctgtatccaagaaagccagcccagaggctgccagcactcccagggaccctattgacgttgacctgaggaacgcgttgtggtgatcagcagctcggaagactcagatgccgaaaactcggtgagtggcccagaagttcagcccagga

SEQ ID NO: 169806 - DNA, 2232 bp, Homo sapiens
  Payload ID: 13426
  Gene Symbol: PML
  Gene Name: promyelocytic leukemia
  ENST ID: ENST00000562086
  CDS Start-End: 1-333
agcccagaggctgccagcactcccagggaccctattgacgttgacctggatgtctccaatacaacgacagcccagaagaggaagtgcagccagacccagtgccccaggaaggtcatcaagatggagtctgaggaggggaaggaggcaaggttggctcggagctccccggagcagcccaggcccagcacctccaaggcagtctcaccaccccacctggatggaccgcctagccccaggagccccgtcataggaagtgaggtcttcctgcccaacagcaaccacgtggccagtggcgccggggaggcaggtagggagaggaacgcgttgtggtgatcagcagctcggaagactcagatgccgaaaactcggtgagtggcccagaagttcagcccaggactcctgcctccccccatttcaggtcccagggggcacagccacagcaggtgactctcagacttgccttgcgcctggggaattttccagtgaggcattgagtcccaagctgtgctgaggacagtctccaaatgacagctgcatgcctggaccaccccagccctcccactacaccagggccaggagctcttctgaaatgctgatagcatgtgtccagagccctgtctcttttctggaatgtccaagacctttgtctggagcttccttatgcattttctgtcctctaagtcctcagtgaggagggctggacaagaatccattccttggtttattacagccagtgggggccagtgaaggggtgtcaggccacagggcagctatataggggccaaacaagtgaggtttgactccatccatgtagaaagatatataaatccattccacagtgaaacaggtggcctcgtgggtagtgacccttctgtccctagaggtttattactagaggctggactatcacctgtccaggggaaaaggggatctgaatagagtgaaaggttggactgggtggcccctgaggtctcttccagccctcagtctgaggttctgtattggaaagtgcatggagcccatggagaccgccgagccacagtcctcgccagcccactcctcgccagcccactcctcgccagcccactcctcgccagtccagtctctgctgagagcacaaggagcctccagcctgccctgtggcacataccaccccccagcttggcctccccaccagcccgctgagcaggctgccacccccgatgctgagcctcacagcgagcctcctgatcaccaggagcgccctgccgtccaccgtgggatccgctacctgttgtacagagcacagagagccatccgccttcgccatgccctccgcttgcaccctcaattgcatcgggcccctattcggacttggtctccccatgtggtccaagccagcactcctgccatcacagggcccctcaaccatcctgccaatgcccaggaacatcctgcccagctgcaaaggggcatcagcccaccccaccggatacgaggggctgtgcgatcccgcagccgctccctccggggctcctcccatttatcccagtggctcaacaacttttttgccctccccttctcctccatggcttcccagcttgacatgtcttccgtggtgggggcaggggaaagcagagcccagactcttggagcaggtgttccccctggggactctgtcagaggctccatggaggcctctcaagtccaagtgcctctggaagcctctccaattacattcccaccaccctgtgccccagaaaggccccccatcagcccagtcccaggcgcccgtcaagcaggcctctgagagtgctacccttctcttgtaaccttgcagccaacacccctgcccggcccctgagctgcctcctccagcccatgctcttacaggccctgcacagagtagcactcattaattcttggttaaggaatgaatcaacgaatgaatggctatgcatggacctctgggcagggagacctgggtcttctctggctgagaggggaaggctaaggcatggctgagattcaagccaccattccaggcctctttgcccaagaaagaaacttctgtcacccttgcactctcctgtattctgagtccctggccaatagcacagccttccatgccccgacccccaccccaagcctctccactaggcctctgccaggatctaagcccatgagcacagggactggctatcccaagacctggcagatgtggctgctcaataaacacttgttgaaccatca

SEQ ID NO: 169807 - DNA, 2148 bp, Homo sapiens
  Payload ID: 13426
  Gene Symbol: PML
  Gene Name: promyelocytic leukemia
  Uniprot ID: P29590
  ENST ID: ENST00000569965
  CDS Start-End: 81-1763
caactggctcacgcctccccttcagcttctcttcacgcactccaagatctaaaccgagaatcgaaactaagctggggtccatggagcctgcacccgcccgatctccgaggccccagcaggaccccgcccggccccaggagcccaccatgcctccccccgagaccccctctgaaggccgccagcccagccccagccccagccctacagagcgagcccccgcttcggaggaggagttccagtttctgcgctgccagcaatgccaggcggaagccaagtgcccgaagctgctgccttgtctgcacacgctgtgctcaggatgcctggaggcgtcgggcatgcagtgccccatctgccaggcgccctggcccctaggtgcagacacacccgccctggataacgtctttttcgagagtctgcagcggcgcctgtcggtgtaccggcagattgtggatgcgcaggctgtgtgcacccgctgcaaagagtcggccgacttctggtgctttgagtgcgagcagctcctctgcgccaagtgcttcgaggcacaccagtggttcctcaagcacgaggcccggcccctagcagagctgcgcaaccagtcggtgcgtgagttcctggacggcacccgcaagaccaacaacatcttctgctccaaccccaaccaccgcacccctacgctgaccagcatctactgccgaggatgttccaagccgctgtgctgctcgtgcgcgctccttgacagcagccacagtgagctcaagtgcgacatcagcgcagagatccagcagcgacaggaggagctggacgccatgacgcaggcgctgcaggagcaggatagtgcctttggcgcggttcacgcgcagatgcacgcggccgtcggccagctgggccgcgcgcgtgccgagaccgaggagctgatccgcgagcgcgtgcgccaggtggtagctcacgtgcgggctcaggagcgcgagctgctggaggctgtggacgcgcggtaccagcgcgactacgaggagatggccagtcggctgggccgcctggatgctgtgctgcagcgcatccgcacgggcagcgcgctggtgcagaggatgaagtgctacgcctcggaccaggaggtgctggacatgcacggtttcctgcgccaggcgctctgccgcctgcgccaggaggagccccagagcctgcaagctgccgtgcgcaccgatggcttcgacgagttcaaggtgcgcctgcaggacctcagctcttgcatcacccaggggaaagatgcagctgtatccaagaaagccagcccagaggctgccagcactcccagggaccctattgacgttgacctgcccgaggaggcagagagagtgaaggcccaggttcaggccctggggctggctgaagcccagcctatggctgtggtacagtcagtgcccggggcacaccccgtgccagtgtacgccttctccatcaaaggcccttcctatggagaggatgtctccaatacaacgacagcccagaagaggaagtgcagccagacccagtgccccaggaaggtcatcaagatggagtctgaggaggggaaggaggcaaggttggctcggagctccccggagcagcccaggcccagcacctccaaggcagtctcaccaccccacctggatggaccgcctagccccaggagccccgtcataggaagtgaggtcttcctgcccaacagcaaccacgtggccagtggcgccggggaggcaggtagggagaggaacgcgttgtggtgatcagcagctcggaagactcagatgccgaaaactcgtcctcccgagagctggatgacagcagcagtgagtccagtgacctccagctggaaggccccagcaccctcagggtcctggacgagaaccttgctgacccccaagcagaagacagacctctggttttctttgacctcaagattgacaatgaaagtgggttctcctggggctacccccacccctttctaatttagtctctgagtcccaaaaagaagtgcaggcagagccatctgccaggcccaggagagctctgagctctggccaacaactgcagccaggctgggcagagcactccggctcacctgggctcctggcgtgtcatttgctggcttgaataaagatgtccgcctta

SEQ ID NO: 169808 - DNA, 783 bp, Homo sapiens
  Payload ID: 13426
  Gene Symbol: PML
  Gene Name: promyelocytic leukemia
  ENST ID: ENST00000565239
  CDS Start-End: 1-721
cagcgcagagatccagcagcgacaggaggagctggacgccatgacgcaggcgctgcaggagcaggatagtgcctttggcgcggttcacgcgcagatgcacgcggccgtcggccagctgggccgcgcgcgtgccgagaccgaggagctgatccgcgagcgcgtgcgccaggtggtagctcacgtgcgggctcaggagcgcgagctgctggaggctgtggacgcgcggtaccagcgcgactacgaggagatggccagtcggctgggccgcctggatgctgtgctgcagcgcatccgcacgggcagcgcgctggtgcagaggatgaagtgctacgcctcggaccaggaggtgctggacatgcacggtttcctgcgccaggcgctctgccgcctgcgccaggaggagccccagagcctgcaagctgccgtgcgcaccgatggcttcgacgagttcaaggtgcgcctgcaggacctcagctcttgcatcacccaggggaaagatgcagctgtatccaagaaagccagcccagaggctgccagcactcccagggaccctattgacgttgacctgcccgaggaggcagagagagtgaaggcccaggttcaggccctggggctggctgaagcccagcctatggctgtggtacagtcagtgcccggggcacaccccgtgccagtgtacgccttctccatcaaaggccctgcacagagtagcactcattaattcttggttaaggaatgaatcaacgaatgaatggctatgcatggacctctgggcagggagac

SEQ ID NO: 169809 - DNA, 1985 bp, Homo sapiens
  Payload ID: 13426
  Gene Symbol: PML
  Gene Name: promyelocytic leukemia
  Uniprot ID: P29590
  ENST ID: ENST00000564428
  CDS Start-End: 70-1827
cgcctccccttcagcttctcttcacgcactccaagatctaaaccgagaatcgaaactaagctggggtccatggagcctgcacccgcccgatctccgaggccccagcaggaccccgcccggccccaggagcccaccatgcctccccccgagaccccctctgaaggccgccagcccagccccagccccagccctacagagcgagcccccgcttcggaggaggagttccagtttctgcgctgccagcaatgccaggcggaagccaagtgcccgaagctgctgccttgtctgcacacgctgtgctcaggatgcctggaggcgtcgggcatgcagtgccccatctgccaggcgccctggcccctaggtgcagacacacccgccctggataacgtctttttcgagagtctgcagcggcgcctgtcggtgtaccggcagattgtggatgcgcaggctgtgtgcacccgctgcaaagagtcggccgacttctggtgctttgagtgcgagcagctcctctgcgccaagtgcttcgaggcacaccagtggttcctcaagcacgaggcccggcccctagcagagctgcgcaaccagtcggtgcgtgagttcctggacggcacccgcaagaccaacaacatcttctgctccaaccccaaccaccgcacccctacgctgaccagcatctactgccgaggatgttccaagccgctgtgctgctcgtgcgcgctccttgacagcagccacagtgagctcaagtgcgacatcagcgcagagatccagcagcgacaggaggagctggacgccatgacgcaggcgctgcaggagcaggatagtgcctttggcgcggttcacgcgcagatgcacgcggccgtcggccagctgggccgcgcgcgtgccgagaccgaggagctgatccgcgagcgcgtgcgccaggtggtagctcacgtgcgggctcaggagcgcgagctgctggaggctgtggacgcgcggtaccagcgcgactacgaggagatggccagtcggctgggccgcctggatgctgtgctgcagcgcatccgcacgggcagcgcgctggtgcagaggatgaagtgctacgcctcggaccaggaggtgctggacatgcacggtttcctgcgccaggcgctctgccgcctgcgccaggaggagccccagagcctgcaagctgccgtgcgcaccgatggcttcgacgagttcaaggtgcgcctgcaggacctcagctcttgcatcacccaggggaaagatgcagctgtatccaagaaagccagcccagaggctgccagcactcccagggaccctattgacgttgacctggatgtctccaatacaacgacagcccagaagaggaagtgcagccagacccagtgccccaggaaggtcatcaagatggagtctgaggaggggaaggaggcaaggttggctcggagctccccggagcagcccaggcccagcacctccaaggcagtctcaccaccccacctggatggaccgcctagccccaggagccccgtcataggaagtgaggtcttcctgcccaacagcaaccacgtggccagtggcgccggggaggcagaggaacgcgttgtggtgatcagcagctcggaagactcagatgccgaaaactcgtcctcccgagagctggatgacagcagcagtgagtccagtgacctccagctggaaggccccagcaccctcagggtcctggacgagaaccttgctgacccccaagcagaagacagacctctggttttctttgacctcaagattgacaatgaaagtgggttctcctggggctacccccacccctttctaatttagtctctgagtcccaaaaagaagtgcaggcagagccatctgccaggcccaggagagctctgagctctggccaacaactgcagccaggctgggcagagcactccggctcacctgggctcctggcgtgtcatttgctggcttgaataaagatgtccgcctta

SEQ ID NO: 169810 - DNA, 4502 bp, Homo sapiens
  Payload ID: 13426
  Gene Symbol: PML
  Gene Name: promyelocytic leukemia
  ENST ID: ENST00000563500
  CDS Start-End: 11-1717
gctggggtccatggagcctgcacccgcccgatctccgaggccccagcaggaccccgcccggccccaggagcccaccatgcctccccccgagaccccctctgaaggccgccagcccagccccagccccagccctacagagcgagcccccgcttcggaggaggagttccagtttctgcgctgccagcaatgccaggcggaagccaagtgcccgaagctgctgccttgtctgcacacgctgtgctcaggatgcctggaggcgtcgggcatgcagtgccccatctgccaggcgccctggcccctaggtgcagacacacccgccctggataacgtctttttcgagagtctgcagcggcgcctgtcggtgtaccggcagattgtggatgcgcaggctgtgtgcacccgctgcaaagagtcggccgacttctggtgctttgagtgcgagcagctcctctgcgccaagtgcttcgaggcacaccagtggttcctcaagcacgaggcccggcccctagcagagctgcgcaaccagtcggtgcgtgagttcctggacggcacccgcaagaccaacaacatcttctgctccaaccccaaccaccgcacccctacgctgaccagcatctactgccgaggatgttccaagccgctgtgctgctcgtgcgcgctccttgacagcagccacagtgagctcaagtgcgacatcagcgcagagatccagcagcgacaggaggagctggacgccatgacgcaggcgctgcaggagcaggatagtgcctttggcgcggttcacgcgcagatgcacgcggccgtcggccagctgggccgcgcgcgtgccgagaccgaggagctgatccgcgagcgcgtgcgccaggtggtagctcacgtgcgggctcaggagcgcgagctgctggaggctgtggacgcgcggtaccagcgcgactacgaggagatggccagtcggctgggccgcctggatgctgtgctgcagcgcatccgcacgggcagcgcgctggtgcagaggatgaagtgctacgcctcggaccaggaggtgctggacatgcacggtttcctgcgccaggcgctctgccgcctgcgccaggaggagccccagagcctgcaagctgccgtgcgcaccgatggcttcgacgagttcaaggtgcgcctgcaggacctcagctcttgcatcacccaggggaaagatgcagctgtatccaagaaagccagcccagaggctgccagcactcccagggaccctattgacgttgacctggatgtctccaatacaacgacagcccagaagaggaagtgcagccagacccagtgccccaggaaggtcatcaagatggagtctgaggaggggaaggaggcaaggttggctcggagctccccggagcagcccaggcccagcacctccaaggcagtctcaccaccccacctggatggaccgcctagccccaggagccccgtcataggaagtgaggtcttcctgcccaacagcaaccacgtggccagtggcgccggggaggcaggtagggaggtgggtagggcagtggcctgggtgctgcccgccagggtctgggcggtgcccctcttctgtattttggccccatccagaaagcccaaagccaacaggagtcccttattcccactgaataagatagggaaagttcacagtgtgcgtgggggtgagagtggacacagtttaccatgtgttttgccatgattgaggtgtggggagcctgacaggctaaaatgcacagttctatgagtcctttctcccaaacactactgtgcctttgcacagggcaggtctccacaagaagtttgttggctgatgcctagcatactcccagagagggcttgggcataccataacaggaaactggactccccatgaccttaactctgctctctcagtctacacccatcatttccccaagtgtttctgcaaaggccacctacctaagtatctcatttgtcagagttatcttctatgaacactgccaggcaggtagtcagttgggcaggagttgaggtcaacccagaggaatctggaacaagagagttctaaggatctgcttcacccagagtacagctttgttcctcattctgactgagccctagccttggtcacacactgagcactgactgatattccttacccacaaatgctattggtaatcgatgggttttgattaactaaatgaagcgtcttttaactctagacatcccagctcatggagctgagaatggggacagtgtgcttctttaggattgcagaaggttccagaccaggtagcagttgtcaggcctcctgtacagggggcaaattctgaattctgggcagataacttaattgaatattcatagataaggcacagcaagaaattatggaaacccatttgtgaattactcaaatccaaatgcaaagcagagtcacattggcacacacagtggctgttcccgtccccctgcagggcatccgtttcccccagccgactggcctgcaaggattcccataggtgcacacccacacccctcccagcatgcatcctaggcagttcataatgcatctccccttccccgtttcagaggaacgcgttgtggtgatcagcagctcggaagactcagatgccgaaaactcggtgagtggcccagaagttcagcccaggactcctgcctccccccatttcaggtcccagggggcacagccacagcaggtgactctcagacttgccttgcgcctggggaattttccagtgaggcattgagtcccaagctgtgctgaggacagtctccaaatgacagctgcatgcctggaccaccccagccctcccactacaccagggccaggagctcttctgaaatgctgatagcatgtgtccagagccctgtctcttttctggaatgtccaagacctttgtctggagcttccttatgcattttctgtcctctaagtcctcagtgaggagggctggacaagaatccattccttggtttattacagccagtgggggccagtgaaggggtgtcaggccacagggcagctatataggggccaaacaagtgaggtttgactccatccatgtagaaagatatataaatccattccacagtgaaacaggtggcctcgtgggtagtgacccttctgtccctagaggtttattactagaggctggactatcacctgtccaggggaaaaggggatctgaatagagtgaaaggttggactgggtggcccctgaggtctcttccagccctcagtctgaggttctgtattggaaagtgcatggagcccatggagaccgccgagccacagtcctcgccagcccactcctcgccagcccactcctcgccagcccactcctcgccagtccagtctctgctgagagcacaaggagcctccagcctgccctgtggcacataccaccccccagcttggcctccccaccagcccgctgagcaggctgccacccccgatgctgagcctcacagcgagcctcctgatcaccaggagcgccctgccgtccaccgtgggatccgctacctgttgtacagagcacagagagccatccgccttcgccatgccctccgcttgcaccctcaattgcatcgggcccctattcggacttggtctccccatgtggtccaagccagcactcctgccatcacagggcccctcaaccatcctgccaatgcccaggaacatcctgcccagctgcaaaggggcatcagcccaccccaccggatacgaggggctgtgcgatcccgcagccgctccctccggggctcctcccatttatcccagtggctcaacaacttttttgccctccccttctcctccatggcttcccagcttgacatgtcttccgtggtgggggcaggggaaagcagagcccagactcttggagcaggtgttccccctggggactctgtcagaggctccatggaggcctctcaagtccaagtgcctctggaagcctctccaattacattcccaccaccctgtgccccagaaaggccccccatcagcccagtcccaggcgcccgtcaagcaggcctctgagagtgctacccttctcttgtaaccttgcagccaacacccctgcccggcccctgagctgcctcctccagcccatgctcttacaggccctgcacagagtagcactcattaattcttggttaaggaatgaatcaacgaatgaatggctatgcatggacctctgggcagggagacctgggtcttctctggctgagaggggaaggctaaggcatggctgagattcaagccaccattccaggcctctttgcccaagaaagaaacttctgtcacccttgcactctcctgtattctgagtccctggccaatagcacagccttccatgccccgacccccaccccaagcctctccactaggcctctgccaggatctaagcccatgagcacagggactggctatcccaagacctggcagatgtggctgctcaataaacacttgttgaaccatc

SEQ ID NO: 169811 - DNA, 2042 bp, Homo sapiens
  Payload ID: 13426
  Gene Symbol: PML
  Gene Name: promyelocytic leukemia
  ENST ID: ENST00000567606
  CDS Start-End: 1-784
tgcctttggcgcggttcacgcgcagatgcacgcggccgtcggccagctgggccgcgcgcgtgccgagaccgaggagctgatccgcgagcgcgtgcgccaggtggtagctcacgtgcgggctcaggagcgcgagctgctggaggctgtggacgcgcggtaccagcgcgactacgaggagatggccagtcggctgggccgcctggatgctgtgctgcagcgcatccgcacgggcagcgcgctggtgcagaggatgaagtgctacgcctcggaccaggaggtgctggacatgcacggtttcctgcgccaggcgctctgccgcctgcgccaggaggagccccagagcctgcaagctgccgtgcgcaccgatggcttcgacgagttcaaggtgcgcctgcaggacctcagctcttgcatcacccaggggaaagatgcagctgtatccaagaaagccagcccagaggctgccagcactcccagggaccctattgacgttgacctggatgtctccaatacaacgacagcccagaagaggaagtgcagccagacccagtgccccaggaaggtcatcaagatggagtctgaggaggggaaggaggcaaggttggctcggagctccccggagcagcccaggcccagcacctccaaggcagtctcaccaccccacctggatggaccgcctagccccaggagccccgtcataggaagtgaggtcttcctgcccaacagcaaccacgtggccagtggcgccggggaggcaggtagggagaggaacgcgttgtggtgatcagcagctcggaagactcagatgccgaaaactcgtgcatggagcccatggagaccgccgagccacagtcctcgccagcccactcctcgccagcccactcctcgccagcccactcctcgccagtccagtctctgctgagagcacaaggagcctccagcctgccctgtggcacataccaccccccagcttggcctccccaccagcccgctgagcaggctgccacccccgatgctgagcctcacagcgagcctcctgatcaccaggagcgccctgccgtccaccgtgggatccgctacctgttgtacagagcacagagagccatccgccttcgccatgccctccgcttgcaccctcaattgcatcgggcccctattcggacttggtctccccatgtggtccaagccagcactcctgccatcacagggcccctcaaccatcctgccaatgcccaggaacatcctgcccagctgcaaaggggcatcagcccaccccaccggatacgaggggctgtgcgatcccgcagccgctccctccggggctcctcccatttatcccagtggctcaacaacttttttgccctccccttctcctccatggcttcccagcttgacatgtcttccgtggtgggggcaggggaaagcagagcccagactcttggagcaggtgttccccctggggactctgtcagaggctccatggaggcctctcaagtccaagtgcctctggaagcctctccaattacattcccaccaccctgtgccccagaaaggccccccatcagcccagtcccaggcgcccgtcaagcaggcctctgagagtgctacccttctcttgtaaccttgcagccaacacccctgcccggcccctgagctgcctcctccagcccatgctcttacaggccctgcacagagtagcactcattaattcttggttaaggaatgaatcaacgaatgaatggctatgcatggacctctgggcagggagacctgggtcttctctggctgagaggggaaggctaaggcatggctgagattcaagccaccattccaggcctctttgcccaagaaagaaacttctgtcacccttgcactctcctgtattctgagtccctggccaatagcacagccttccatgccccgacccccaccccaagcctctccactaggcctctgccaggatctaagcccatgagcacagggactggctatcccaagacctggcagatgtggctgctcaataaacacttgttgaaccatca

SEQ ID NO: 169812 - DNA, 834 bp, Homo sapiens
  Payload ID: 13426
  Gene Symbol: PML
  Gene Name: promyelocytic leukemia
  ENST ID: ENST00000566068
  CDS Start-End: 1-653
gccgcctgcgccaggaggagccccagagcctgcaagctgccgtgcgcaccgatggcttcgacgagttcaaggtgcgcctgcaggacctcagctcttgcatcacccaggggaaagatgcagctgtatccaagaaagccagcccagaggctgccagcactcccagggaccctattgacgttgacctgcccgaggaggcagagagagtgaaggcccaggttcaggccctggggctggctgaagcccagcctatggctgtggtacagtcagtgcccggggcacaccccgtgccagtgtacgccttctccatcaaaggcccttcctatggagaggatgtctccaatacaacgacagcccagaagaggaagtgcagccagacccagtgccccaggaaggtcatcaagatggagtctgaggaggggaaggaggcaaggttggctcggagctccccggagcagcccaggcccagcacctccaaggcagtctcaccaccccacctggatggaccgcctagccccaggagccccgtcataggaagtgaggtcttcctgcccaacagcaaccacgtggccagtggcgccggggaggcagaggaacgcgttgtggtgatcagcagctcggaagactcagatgccgaaaactcgccctcagtctgaggttctgtattggaaagtgcatggagcccatggagaccgccgagccacagtcctcgccagcccactcctcgccagcccactcctcgccagcccactcctcgccagtccagtctctgctgagagcacaaggagcctccagcctgccctgtggcacataccaccccccagcttggcctcccca

SEQ ID NO: 169813 - DNA, 1074 bp, Homo sapiens
  Payload ID: 13427
  Gene Symbol: POMC
  Gene Name: proopiomelanocortin
  Uniprot ID: P01189
  ENST ID: ENST00000264708
  CDS Start-End: 175-978
ggaggggaagaagagccgcgaccgagagaggccgccgagcgtccccgccctcagagagcagcctcccgagacaggcacttgctggattctccaaaagtatctgcagtggctgttccaccaggaggggtcccaccaatcttgtttgcttctgcagagcctcagcctgcctggaagatgccgagatcgtgctgcagccgctcgggggccctgttgctggccttgctgcttcaggcctccatggaagtgcgtggctggtgcctggagagcagccagtgtcaggacctcaccacggaaagcaacctgctggagtgcatccgggcctgcaagcccgacctctcggccgagactcccatgttcccgggaaatggcgacgagcagcctctgaccgagaacccccggaagtacgtcatgggccacttccgctgggaccgattcggccgccgcaacagcagcagcagcggcagcagcggcgcagggcagaagcgcgaggacgtctcagcgggcgaagactgcggcccgctgcctgagggcggccccgagccccgcagcgatggtgccaagccgggcccgcgcgagggcaagcgctcctactccatggagcacttccgctggggcaagccggtgggcaagaagcggcgcccagtgaaggtgtaccctaacggcgccgaggacgagtcggccgaggccttccccctggagttcaagagggagctgactggccagcgactccgggagggagatggccccgacggccctgccgatgacggcgcaggggcccaggccgacctggagcacagcctgctggtggcggccgagaagaaggacgagggcccctacaggatggagcacttccgctggggcagcccgcccaaggacaagcgctacggcggtttcatgacctccgagaagagccagacgcccctggtgacgctgttcaaaaacgccatcatcaagaacgcctacaagaagggcgagtgagggcacagcggggccccagggctaccctcccccaggaggtcgaccccaaagccccttgctctcccctgccctgctgccgcctcccagcctgggggg

SEQ ID NO: 169814 - DNA, 1295 bp, Homo sapiens
  Payload ID: 13427
  Gene Symbol: POMC
  Gene Name: proopiomelanocortin
  Uniprot ID: P01189
  ENST ID: ENST00000380794
  CDS Start-End: 264-1067
ccttcccctggcccggggagctgctccttgtgctgccgggaaggtcaaagtcccgcgcccaccaggagagctcggcaagtatataaggacagaggagcgcgggaccaagcggcggcgaaggaggggaagaagagccgcgaccgagagaggccgccgagcgtccccgccctcagagagcagcctcccgagacaggcacttgctggattctccaaaagtatctgcagtggctgttccaccaggagagcctcagcctgcctggaagatgccgagatcgtgctgcagccgctcgggggccctgttgctggccttgctgcttcaggcctccatggaagtgcgtggctggtgcctggagagcagccagtgtcaggacctcaccacggaaagcaacctgctggagtgcatccgggcctgcaagcccgacctctcggccgagactcccatgttcccgggaaatggcgacgagcagcctctgaccgagaacccccggaagtacgtcatgggccacttccgctgggaccgattcggccgccgcaacagcagcagcagcggcagcagcggcgcagggcagaagcgcgaggacgtctcagcgggcgaagactgcggcccgctgcctgagggcggccccgagccccgcagcgatggtgccaagccgggcccgcgcgagggcaagcgctcctactccatggagcacttccgctggggcaagccggtgggcaagaagcggcgcccagtgaaggtgtaccctaacggcgccgaggacgagtcggccgaggccttccccctggagttcaagagggagctgactggccagcgactccgggagggagatggccccgacggccctgccgatgacggcgcaggggcccaggccgacctggagcacagcctgctggtggcggccgagaagaaggacgagggcccctacaggatggagcacttccgctggggcagcccgcccaaggacaagcgctacggcggtttcatgacctccgagaagagccagacgcccctggtgacgctgttcaaaaacgccatcatcaagaacgcctacaagaagggcgagtgagggcacagcggggccccagggctaccctcccccaggaggtcgaccccaaagccccttgctctcccctgccctgctgccgcctcccagcctggggggtcgtggcagataatcagcctcttaaagctgcctgtagttaggaaataaaacctttcaaatttcacatccacctctgactttgaatgtaaactgtgtgaataaagtaaaaatacgtagccgtcaaataacagc

SEQ ID NO: 169815 - DNA, 959 bp, Homo sapiens
  Payload ID: 13427
  Gene Symbol: POMC
  Gene Name: proopiomelanocortin
  Uniprot ID: P01189
  ENST ID: ENST00000395826
  CDS Start-End: 128-931
ggacagaggagcgcgggaccaagcggcggcgaaggaggggaagaagagccgcgaccgagagaggccgccgagcgtccccgccctcagagagcagcctcccgagacagagcctcagcctgcctggaagatgccgagatcgtgctgcagccgctcgggggccctgttgctggccttgctgcttcaggcctccatggaagtgcgtggctggtgcctggagagcagccagtgtcaggacctcaccacggaaagcaacctgctggagtgcatccgggcctgcaagcccgacctctcggccgagactcccatgttcccgggaaatggcgacgagcagcctctgaccgagaacccccggaagtacgtcatgggccacttccgctgggaccgattcggccgccgcaacagcagcagcagcggcagcagcggcgcagggcagaagcgcgaggacgtctcagcgggcgaagactgcggcccgctgcctgagggcggccccgagccccgcagcgatggtgccaagccgggcccgcgcgagggcaagcgctcctactccatggagcacttccgctggggcaagccggtgggcaagaagcggcgcccagtgaaggtgtaccctaacggcgccgaggacgagtcggccgaggccttccccctggagttcaagagggagctgactggccagcgactccgggagggagatggccccgacggccctgccgatgacggcgcaggggcccaggccgacctggagcacagcctgctggtggcggccgagaagaaggacgagggcccctacaggatggagcacttccgctggggcagcccgcccaaggacaagcgctacggcggtttcatgacctccgagaagagccagacgcccctggtgacgctgttcaaaaacgccatcatcaagaacgcctacaagaagggcgagtgagggcacagcggggccccagggctaccct

SEQ ID NO: 169816 - DNA, 1426 bp, Homo sapiens
  Payload ID: 13427
  Gene Symbol: POMC
  Gene Name: proopiomelanocortin
  Uniprot ID: P01189
  ENST ID: ENST00000405623
  CDS Start-End: 457-1260
acctcagaggctgcccggcctgccccacacgggggtgctaagcctcccgcccgttctaagcggagacccaacgccatccataattaagttcttcctgagggcgagcggccaggtgcgccttcggcaggacagtgctaattccagcccctttccagcgcgtctccccgcgctcgtcccccgtctggaagcccccctcccacgccccgcggccccccttcccctggcccggggagctgctccttgtgctgccgggaaggtcaaagtcccgcgcccaccaggagagctcggcaagtatataaggacagaggagcgcgggaccaagcggcggcgaaggaggggaagaagagccgcgaccgagagaggccgccgagcgtccccgccctcagagagcagcctcccgagacaggggtcccaccaatcttgtttgcttctgcagagcctcagcctgcctggaagatgccgagatcgtgctgcagccgctcgggggccctgttgctggccttgctgcttcaggcctccatggaagtgcgtggctggtgcctggagagcagccagtgtcaggacctcaccacggaaagcaacctgctggagtgcatccgggcctgcaagcccgacctctcggccgagactcccatgttcccgggaaatggcgacgagcagcctctgaccgagaacccccggaagtacgtcatgggccacttccgctgggaccgattcggccgccgcaacagcagcagcagcggcagcagcggcgcagggcagaagcgcgaggacgtctcagcgggcgaagactgcggcccgctgcctgagggcggccccgagccccgcagcgatggtgccaagccgggcccgcgcgagggcaagcgctcctactccatggagcacttccgctggggcaagccggtgggcaagaagcggcgcccagtgaaggtgtaccctaacggcgccgaggacgagtcggccgaggccttccccctggagttcaagagggagctgactggccagcgactccgggagggagatggccccgacggccctgccgatgacggcgcaggggcccaggccgacctggagcacagcctgctggtggcggccgagaagaaggacgagggcccctacaggatggagcacttccgctggggcagcccgcccaaggacaagcgctacggcggtttcatgacctccgagaagagccagacgcccctggtgacgctgttcaaaaacgccatcatcaagaacgcctacaagaagggcgagtgagggcacagcggggccccagggctaccctcccccaggaggtcgaccccaaagccccttgctctcccctgccctgctgccgcctcccagcctggggggtcgtggcagataatcagcctcttaaagctgcctgtagttaggaaataaaacctttcaaatttcacatcca

SEQ ID NO: 169817 - DNA, 883 bp, Homo sapiens
  Payload ID: 13427
  Gene Symbol: POMC
  Gene Name: proopiomelanocortin
  ENST ID: ENST00000449220
  CDS Start-End: 145-883
ggaggggaagaagagccgcgaccgagagaggccgccgagcgtccccgccctcagagagcagcctcccgagacaggcacttgctggattctccaaaagtatctgcagtggctgttccaccaggagagcctcagcctgcctggaagatgccgagatcgtgctgcagccgctcgggggccctgttgctggccttgctgcttcaggcctccatggaagtgcgtggctggtgcctggagagcagccagtgtcaggacctcaccacggaaagcaacctgctggagtgcatccgggcctgcaagcccgacctctcggccgagactcccatgttcccgggaaatggcgacgagcagcctctgaccgagaacccccggaagtacgtcatgggccacttccgctgggaccgattcggccgccgcaacagcagcagcagcggcagcagcggcgcagggcagaagcgcgaggacgtctcagcgggcgaagactgcggcccgctgcctgagggcggccccgagccccgcagcgatggtgccaagccgggcccgcgcgagggcaagcgctcctactccatggagcacttccgctggggcaagccggtgggcaagaagcggcgcccagtgaaggtgtaccctaacggcgccgaggacgagtcggccgaggccttccccctggagttcaagagggagctgactggccagcgactccgggagggagatggccccgacggccctgccgatgacggcgcaggggcccaggccgacctggagcacagcctgctggtggcggccgagaagaaggacgagggcccctacaggatggagcacttccgctggggcagcccgcccaaggacaagcgctacggcggtttcatgacctccgagaagagcc

SEQ ID NO: 169818 - DNA, 1464 bp, Homo sapiens
  Payload ID: 13428
  Gene Symbol: PROP1
  Gene Name: PROP paired-like homeobox 1
  Uniprot ID: O75360
  ENST ID: ENST00000308304
  CDS Start-End: 310-990
gcatcccggtggggagaagggccaggcagagaaaagtagtcagaaacagagcaacaggtgaggctgaggcaggagattgagctgacactcaagccaaggaagggggaattaggaaacaattagaaaaaaagtaaagacagtgaaaaagtcagagacagctgcctgcacctacacacacattcagagacagagtcccagagggtggcatacacagagggagaaggggagggaacaggtgtggagaggagctgcggaagcagagaaatctcaagtcagagattcagggacacttggtccccgtggcgagccatggaagcagaaaggaggcgccaggctgagaagccaaagaaggggcgagtcggcagcaacctgttgcctgagagacacccggccactgggaccccgaccaccacggtggactcgagtgctccaccctgcagaaggctccctggtgcaggaggggggagatcaaggttctccccgcaaggaggacagaggggccgcccgcactcccggcgccgccaccgcaccaccttcagcccagtgcagttggaacagctggagtcagcctttgggaggaaccagtaccccgacatctgggcccgagagagtcttgcccgggacactggcctcagtgaggcccgaatccaggtctggttccagaaccgcagagctaagcaacggaagcaagagcgctcactgcttcagcctctggcccatctgtctcctgccgccttttccagcttcttgccagagtccactgcttgcccctattcttacgcagcaccaccaccaccagtgacctgcttccctcacccctacagccatgccctcccttcccagccctccacaggaggcgcctttgctttgtcacaccagtctgaggactggtaccctaccttgcacccagcccctgccggccatctgccctgccccccaccccctcccatgctccccctcagccttgagccatccaagtcctggaactgaggtcaaacaagtaccaccaaggtgatccccagcctgcggccctcgtgaaaagacaagaaaatggggtggcttcctttccatctatgggtgaagcagatgcatggtgagggtcagctcagcgattagaaatttaaaaatgggagatcatggtgaattctcactggggtgattagtggaggaagtctggggaggtgagctactggaagagacagggcaagatgcctcggtggagctgcctgctgaagggtgatattgatgaagacagttgctggtgagtggagatgattgaagggctaggaggtgagggccttcattaattgagatcacgattgaagaagatcccagctctttctggctgatttcagtaaggcttctgacttaagagtctacctatacatcccttccccattgcccaccccgccatctcaatcagtcactgacttttgtttattctgtcctagaaatacctttttt

SEQ ID NO: 169819 - DNA, 1333 bp, Homo sapiens
  Payload ID: 13428
  Gene Symbol: PROP1
  Gene Name: PROP paired-like homeobox 1
  ENST ID: ENST00000614006
  CDS Start-End: 179-859
taaagacagtgaaaaagtcagagacagctgcctgcacctacacacacattcagagacagagtcccagagggtggcatacacagagggagaaggggagggaacaggtgtggagaggagctgcggaagcagagaaatctcaagtcagagattcagggacacttggtccccgtggcgagccatggaagcagaaaggaggcgccaggccgagaagccaaagaaggggcgagtcggcagcagcctgttgcctgagagacacccggccactgggaccccgaccaccacggtggactcgagtgctccaccctgcagaaggctccctggtgcaggaggggggagatcaaggttctccccgcaaggaggacagaggggccgcccgcactcccggcgccgccaccgcaccaccttcagcccagtgcagttggaacagctggagtcagcctttgggaggaaccagtaccccgacatctgggcccgagagagtcttgcccgggacactggcctcagtgaggcccgaatccaggtctggttccagaaccgcagagctaagcaacggaagcaagagcgctcactgcttcagcctctggcccatctgtctcctgccgccttttccagcttcttgccagagtccactgcttgcccctattcttacgcagcaccaccaccaccagtgacctgcttccctcacccctacagccatgccctcccttcccagccctccacaggaggcgcctttgctttgtcacaccagtctgaggactggtaccctaccttgcacccagcccctgccggccatctgccctgccccccaccccctcccatgctccccctcagccttgagccatccaagtcctggaactgaggtcaaacaagtaccaccaaggtgatccccagcctgcggccctcgtgaaaagacaagaaaatggggtggcttcctttccatctatgggtgaagcagatgcatggtgagggtcagctcagtgattagaaatttaaaaatgggagatcatggtgaattctcactggggtgattagtggaggaagtctggggaggtgagctactggaagagacagggcaagatgcctcggtggagctgcctgctgaagggtgatattgatgaagacagttgctggtgagtggagatgattgaagggctaggaggtgagggccttcattaattgagatcacgattgaagaagatcccagctctttctggctgatttcagtaaggcttctgacttaagagtctacctatacatcccttccccattgcccaccccgccatctcaatcagtcactgacttttgtttattctgtcctagaaatacctttttt

SEQ ID NO: 169820 - DNA, 813 bp, Homo sapiens
  Payload ID: 13428
  Gene Symbol: PROP1
  Gene Name: PROP paired-like homeobox 1
  ENST ID: ENST00000629850
  CDS Start-End: 1-339
gtctggttccagaaccgcagagctaagcaacggaagcaagagcgctcactgcttcagcctctggcccatctgtctcctgccgccttttccagcttcttgccagagtccactgcttgcccctattcttacgcagcaccaccaccaccagtgacctgcttccctcacccctacagccatgccctcccttcccagccctccacaggaggcgcctttgctttgtcacaccagtctgaggactggtaccctaccttgcacccagcccctgccggccatctgccctgccccccaccccctcccatgctccccctcagccttgagccatccaagtcctggaactgaggtcaaacaagtaccaccaaggtgatccccagcctgcggccctcgtgaaaagacaagaaaatggggtggcttcctttccatctatgggtgaagcagatgcatggtgagggtcagctcagcgattagaaatttaaaaatgggagatcatggtgaattctcactggggtgattagtggaggaagtctggggaggtgagctactggaagagacagggcaagatgcctcggtggagctgcctgctgaagggtgatattgatgaagacagttgctggtgagtggagatgattgaagggctaggaggtgagggccttcattaattgagatcacgattgaagaagatcccagctctttctggctgatttcagtaaggcttctgacttaagagtctacctatacatcccttccccattgcccaccccgccatctcaatcagtcactgacttttgtttattctgtcctagaaatacctttttt

SEQ ID NO: 169821 - DNA, 2418 bp, Homo sapiens
  Payload ID: 13429
  Gene Symbol: PCCA
  Gene Name: propionyl CoA carboxylase, alpha polypeptide
  Uniprot ID: P05165
  ENST ID: ENST00000376279
  CDS Start-End: 107-2152
ggcatcgggtttctggctcgtgatttgccggagctcctgcgctccccttctccaccccctccggctgtgtgagaggtcagcagaggggcggtctgcggggacaacaatggcggggttctgggtcgggacagcaccgctggtcgctgccggacggcgtgggcggtggccgccgcagcagctgatgctgagcgcggcgctgcggaccctgaagcatgttctgtactattcaagacagtgcttaatggtgtcccgtaatcttggttcagtgggatatgatcctaatgaaaaaacttttgataaaattcttgttgctaatagaggagaaattgcatgtcgggttattagaacttgcaagaagatgggcattaagacagttgccatccacagtgatgttgatgctagttctgttcatgtgaaaatggcggatgaggctgtctgtgttggcccagctcccaccagtaaaagctacctcaacatggatgccatcatggaagccattaagaaaaccagggcccaagctgtacatccaggttatggattcctttcagaaaacaaagaatttgccagatgtttggcagcagaagatgtcgttttcattggacctgacacacatgctattcaagccatgggcgacaagattgaaagcaaattattagctaagaaagcagaggttaatacaatccctggctttgatggagtagtcaaggatgcagaagaagctgtcagaattgcaagggaaattggctaccctgtcatgatcaaggcctcagcaggtggtggtgggaaaggcatgcgcattgcttgggatgatgaagagaccagggatggttttagattgtcatctcaagaagctgcttctagttttggcgatgatagactactaatagaaaaatttattgataatcctcgtcatatagaaatccaggttctaggtgataaacatgggaatgctttatggcttaatgaaagagagtgctcaattcagagaagaaatcagaaggtggtggaggaagcaccaagcatttttttggatgcggagactcgaagagcgatgggagaacaagctgtagctcttgccagagcagtaaaatattcctctgctgggaccgtggagttccttgtggactctaagaagaatttttatttcttggaaatgaatacaagactccaggttgagcatcctgtcacagaatgcattactggcctggacctagtccaggaaatgatccgtgttgctaagggctaccctctcaggcacaaacaagctgatattcgcatcaacggctgggcagttgaatgtcgggtttatgctgaggacccctacaagtcttttggtttaccatctattgggagattgtctcagtaccaagaaccgttacatctacctggtgtccgagtggacagtggcatccaaccaggaagtgatattagcatttattatgatcctatgatttcaaaactaatcacatatggctctgatagaactgaggcactgaagagaatggcagatgcactggataactatgttattcgaggtgttacacataatattgcattacttcgagaggtgataatcaactcacgctttgtaaaaggagacatcagcactaaatttctctccgatgtgtatcctgatggcttcaaaggacacatgctaaccaagagtgagaagaaccagttattggcaatagcatcatcattgtttgtggcattccagttaagagcacaacattttcaagaaaattcaagaatgcctgttattaaaccagacatagccaactgggagctctcagtaaaattgcatgataaagttcataccgtagtagcatcaaacaatgggtcagtgttctcggtggaagttgatgggtcgaaactaaatgtgaccagcacgtggaacctggcttcgcccttattgtctgtcagcgttgatggcactcagaggactgtccagtgtctttctcgagaagcaggtggaaacatgagcattcagtttcttggtacagtggtagcagaaggtcaagaaatttgtgtgattgaagccatgaaaatgcagaatagtatgacagctgggaaaactggcacggtgaaatctgtgcactgtcaagctggagacacagttggagaaggggatctgctcgtggagctggaatgaaggatttataacctttcagtcatcacccaatttaattagccatttgcatgatgctttcacacacaattgattcaagcattatacaggaacacccctgtgcagctacgtttacgtcgtcatttattccacagagtcaagaccaatattctgccaaaaaatcaccaatggaaattttcattgatataaatacttgtacatatgatttgtacttctgctgtgagattccctagtgtcaaaattaaatcaataaaactgagcatttgtct

SEQ ID NO: 169822 - DNA, 2494 bp, Homo sapiens
  Payload ID: 13429
  Gene Symbol: PCCA
  Gene Name: propionyl CoA carboxylase, alpha polypeptide
  Uniprot ID: P05165
  ENST ID: ENST00000376285
  CDS Start-End: 39-2225
gtgagaggtcagcagaggggcggtctgcggggacaacaatggcggggttctgggtcgggacagcaccgctggtcgctgccggacggcgtgggcggtggccgccgcagcagctgatgctgagcgcggcgctgcggaccctgaagcatgttctgtactattcaagacagtgcttaatggtgtcccgtaatcttggttcagtgggatatgatcctaatgaaaaaacttttgataaaattcttgttgctaatagaggagaaattgcatgtcgggttattagaacttgcaagaagatgggcattaagacagttgccatccacagtgatgttgatgctagttctgttcatgtgaaaatggcggatgaggctgtctgtgttggcccagctcccaccagtaaaagctacctcaacatggatgccatcatggaagccattaagaaaaccagggcccaagctgtacatccaggttatggattcctttcagaaaacaaagaatttgccagatgtttggcagcagaagatgtcgttttcattggacctgacacacatgctattcaagccatgggcgacaagattgaaagcaaattattagctaagaaagcagaggttaatacaatccctggctttgatggagtagtcaaggatgcagaagaagctgtcagaattgcaagggaaattggctaccctgtcatgatcaaggcctcagcaggtggtggtgggaaaggcatgcgcattgcttgggatgatgaagagaccagggatggttttagattgtcatctcaagaagctgcttctagttttggcgatgatagactactaatagaaaaatttattgataatcctcgtcatatagaaatccaggttctaggtgataaacatgggaatgctttatggcttaatgaaagagagtgctcaattcagagaagaaatcagaaggtggtggaggaagcaccaagcatttttttggatgcggagactcgaagagcgatgggagaacaagctgtagctcttgccagagcagtaaaatattcctctgctgggaccgtggagttccttgtggactctaagaagaatttttatttcttggaaatgaatacaagactccaggttgagcatcctgtcacagaatgcattactggcctggacctagtccaggaaatgatccgtgttgctaagggctaccctctcaggcacaaacaagctgatattcgcatcaacggctgggcagttgaatgtcgggtttatgctgaggacccctacaagtcttttggtttaccatctattgggagattgtctcagtaccaagaaccgttacatctacctggtgtccgagtggacagtggcatccaaccaggaagtgatattagcatttattatgatcctatgatttcaaaactaatcacatatggctctgatagaactgaggcactgaagagaatggcagatgcactggataactatgttattcgaggtgttacacataatattgcattacttcgagaggtgataatcaactcacgctttgtaaaaggagacatcagcactaaatttctctccgatgtgtatcctgatggcttcaaaggacacatgctaaccaagagtgagaagaaccagttattggcaatagcatcatcattgtttgtggcattccagttaagagcacaacattttcaagaaaattcaagaatgcctgttattaaaccagacatagccaactgggagctctcagtaaaattgcatgataaagttcataccgtagtagcatcaaacaatgggtcagtgttctcggtggaagttgatgggtcgaaactaaatgtgaccagcacgtggaacctggcttcgcccttattgtctgtcagcgttgatggcactcagaggactgtccagtgtctttctcgagaagcaggtggaaacatgagcattcagtttcttggtacagtgtacaaggtgaatatcttaaccagacttgccgcagaattgaacaaatttatgctggaaaaagtgactgaggacacaagcagtgttctgcgttccccgatgcccggagtggtggtggccgtctctgtcaagcctggagacgcggtagcagaaggtcaagaaatttgtgtgattgaagccatgaaaatgcagaatagtatgacagctgggaaaactggcacggtgaaatctgtgcactgtcaagctggagacacagttggagaaggggatctgctcgtggagctggaatgaaggatttataacctttcagtcatcacccaatttaattagccatttgcatgatgctttcacacacaattgattcaagcattatacaggaacacccctgtgcagctacgtttacgtcgtcatttattccacagagtcaagaccaatattctgccaaaaaatcaccaatggaaattttcattgatataaatacttgtacatatgatttgtacttctgctgtgagattccctagtgtcaaaattaaatcaataaaactgagcatttgtctaaa

SEQ ID NO: 169823 - DNA, 2481 bp, Homo sapiens
  Payload ID: 13429
  Gene Symbol: PCCA
  Gene Name: propionyl CoA carboxylase, alpha polypeptide
  Uniprot ID: P05165
  ENST ID: ENST00000376286
  CDS Start-End: 107-2215
ggcatcgggtttctggctcgtgatttgccggagctcctgcgctccccttctccaccccctccggctgtgtgagaggtcagcagaggggcggtctgcggggacaacaatggcggggttctgggtcgggacagcaccgctggtcgctgccggacggcgtgggcggtggccgccgcagcagctgatgctgagcgcggcgctgcggaccctgaagacttttgataaaattcttgttgctaatagaggagaaattgcatgtcgggttattagaacttgcaagaagatgggcattaagacagttgccatccacagtgatgttgatgctagttctgttcatgtgaaaatggcggatgaggctgtctgtgttggcccagctcccaccagtaaaagctacctcaacatggatgccatcatggaagccattaagaaaaccagggcccaagctgtacatccaggttatggattcctttcagaaaacaaagaatttgccagatgtttggcagcagaagatgtcgttttcattggacctgacacacatgctattcaagccatgggcgacaagattgaaagcaaattattagctaagaaagcagaggttaatacaatccctggctttgatggagtagtcaaggatgcagaagaagctgtcagaattgcaagggaaattggctaccctgtcatgatcaaggcctcagcaggtggtggtgggaaaggcatgcgcattgcttgggatgatgaagagaccagggatggttttagattgtcatctcaagaagctgcttctagttttggcgatgatagactactaatagaaaaatttattgataatcctcgtcatatagaaatccaggttctaggtgataaacatgggaatgctttatggcttaatgaaagagagtgctcaattcagagaagaaatcagaaggtggtggaggaagcaccaagcatttttttggatgcggagactcgaagagcgatgggagaacaagctgtagctcttgccagagcagtaaaatattcctctgctgggaccgtggagttccttgtggactctaagaagaatttttatttcttggaaatgaatacaagactccaggttgagcatcctgtcacagaatgcattactggcctggacctagtccaggaaatgatccgtgttgctaagggctaccctctcaggcacaaacaagctgatattcgcatcaacggctgggcagttgaatgtcgggtttatgctgaggacccctacaagtcttttggtttaccatctattgggagattgtctcagtaccaagaaccgttacatctacctggtgtccgagtggacagtggcatccaaccaggaagtgatattagcatttattatgatcctatgatttcaaaactaatcacatatggctctgatagaactgaggcactgaagagaatggcagatgcactggataactatgttattcgaggtgttacacataatattgcattacttcgagaggtgataatcaactcacgctttgtaaaaggagacatcagcactaaatttctctccgatgtgtatcctgatggcttcaaaggacacatgctaaccaagagtgagaagaaccagttattggcaatagcatcatcattgtttgtggcattccagttaagagcacaacattttcaagaaaattcaagaatgcctgttattaaaccagacatagccaactgggagctctcagtaaaattgcatgataaagttcataccgtagtagcatcaaacaatgggtcagtgttctcggtggaagttgatgggtcgaaactaaatgtgaccagcacgtggaacctggcttcgcccttattgtctgtcagcgttgatggcactcagaggactgtccagtgtctttctcgagaagcaggtggaaacatgagcattcagtttcttggtacagtgtacaaggtgaatatcttaaccagacttgccgcagaattgaacaaatttatgctggaaaaagtgactgaggacacaagcagtgttctgcgttccccgatgcccggagtggtggtggccgtctctgtcaagcctggagacgcggtagcagaaggtcaagaaatttgtgtgattgaagccatgaaaatgcagaatagtatgacagctgggaaaactggcacggtgaaatctgtgcactgtcaagctggagacacagttggagaaggggatctgctcgtggagctggaatgaaggatttataacctttcagtcatcacccaatttaattagccatttgcatgatgctttcacacacaattgattcaagcattatacaggaacacccctgtgcagctacgtttacgtcgtcatttattccacagagtcaagaccaatattctgccaaaaaatcaccaatggaaattttcattgatataaatacttgtacatatgatttgtacttctgctgtgagattccctagtgtcaaaattaaatcaataaaactgagcatttgtct

SEQ ID NO: 169824 - DNA, 669 bp, Homo sapiens
  Payload ID: 13429
  Gene Symbol: PCCA
  Gene Name: propionyl CoA carboxylase, alpha polypeptide
  ENST ID: ENST00000458283
  CDS Start-End: 1-403
aatgcctgttattaaaccagacatagccaactgggagctctcagtaaaattgcatgataaagttcataccgtagtagcatcaaacaatgggtcagtgttctcggtggaagttgatgggtcgaaactaaatgtgaccagcacgtggaacctggcttcgcccttattgtctgtcagcgttgatggcactcagaggactgtccagtgtctttctcgagaagcaggtggaaacatgagcattcagtttcttggtacagtggtagcagaaggtcaagaaatttgtgtgattgaagccatgaaaatgcagaatagtatgacagctgggaaaactggcacggtgaaatctgtgcactgtcaagctggagacacagttggagaaggggatctgctcgtggagctggaatgaaggatttataacctttcagtcatcacccaatttaattagccatttgcatgatgctttcacacacaattgattcaagcattatacaggaacacccctgtgcagctacgtttacgtcgtcatttattccacagagtcaagaccaatattctgccaaaaaatcaccaatggaaattttcattgatataaatacttgtacatatgatttgtacttctgctgtgagattccctagtgtcaaaattaaatcaataaaactgagcatttgtct

SEQ ID NO: 169825 - DNA, 447 bp, Homo sapiens
  Payload ID: 13429
  Gene Symbol: PCCA
  Gene Name: propionyl CoA carboxylase, alpha polypeptide
  ENST ID: ENST00000424527
  CDS Start-End: 1-447
ggaggaatctacttttaccatggaaggaaaggtgttacacataatattgcattacttcgagaggtgataatcaactcacgctttgtaaaaggagacatcagcactaaatttctctccgatgtgtatcctgatggcttcaaaggacacatgctaaccaagagtgagaagaaccagttattggcaatagcatcatcattgtttgtggcattccagttaagagcacaacattttcaagaaaattcaagaatgcctgttattaaaccagacatagccaactgggagctctcagtaaaattgcatgataaagttcataccgtagtagcatcaaacaatgggtcagtgttctcggtggaagttgatgggtcgaaactaaatgtgaccagcacgtggaacctggcttcgcccttattgtctgtcagcgttgatggcactcagaggactgtccag

SEQ ID NO: 169826 - DNA, 602 bp, Homo sapiens
  Payload ID: 13429
  Gene Symbol: PCCA
  Gene Name: propionyl CoA carboxylase, alpha polypeptide
  ENST ID: ENST00000428969
  CDS Start-End: 1-336
tacaaggtgaatatcttaaccagacttgccgcagaattgaacaaatttatgctggaaaaagtgactgaggacacaagcagtgttctgcgttccccgatgcccggagtggtggtggccgtctctgtcaagcctggagacgcggcaacctcgagtctgtctgtagagatctgcctattctggacatttcaggtagcagaaggtcaagaaatttgtgtgattgaagccatgaaaatgcagaatagtatgacagctgggaaaactggcacggtgaaatctgtgcactgtcaagctggagacacagttggagaaggggatctgctcgtggagctggaatgaaggatttataacctttcagtcatcacccaatttaattagccatttgcatgatgctttcacacacaattgattcaagcattatacaggaacacccctgtgcagctacgtttacgtcgtcatttattccacagagtcaagaccaatattctgccaaaaaatcaccaatggaaattttcattgatataaatacttgtacatatgatttgtacttctgctgtgagattccctagtgtcaaaattaaatcaataaaactgagcatttgtct

SEQ ID NO: 169827 - DNA, 418 bp, Homo sapiens
  Payload ID: 13429
  Gene Symbol: PCCA
  Gene Name: propionyl CoA carboxylase, alpha polypeptide
  ENST ID: ENST00000443601
  CDS Start-End: 1-418
agaacatcagtttatgtcctgaaatatgttttcagaaaatagaaagccaagtatatttcgtccgagtggacagtggcatccaaccaggaagtgatattagcatttattatgatcctatgatttcaaaactaatcacatatggctctgatagaactgaggcactgaagagaatggcagatgcactggataactatgttattcgaggtgttacacataatattgcattacttcgagaggtgataatcaactcacgctttgtaaaaggagacatcagcactaaatttctctccgatgtgtatcctgatggcttcaaaggacacatgctaaccaagagtgagaagaaccagttattggcaatagcatcatcattgtttgtggcattccagttaagagcacaacattttcaagaaaattcaag

SEQ ID NO: 169828 - DNA, 397 bp, Homo sapiens
  Payload ID: 13429
  Gene Symbol: PCCA
  Gene Name: propionyl CoA carboxylase, alpha polypeptide
  ENST ID: ENST00000413170
  CDS Start-End: 1-253
caactgggagctctcagtaaaattgcatgataaagttcataccgtagtagcatcaaacaatgggtcagtgttctcggtggaagttgatgggtcgaaactaaatgtgaccagcacgtggaacctggcttcgcccttattgtctgtcagcgttgatggcactcagaggactgtccagtgtctttctcgagaagcaggtggaaacatgagcattcagtttcttggtacagtgccctggagaaagcttctggattgactgtgagaagcttggcagaaggtgctgcggcctggtggctggctcagcaggaggcctgggattgaaagctctcggtttgtacaagctcttttggatttgtaacacttttattttaaatctccaataaatgtaaatattttggtc

SEQ ID NO: 169829 - DNA, 1833 bp, Homo sapiens
  Payload ID: 13430
  Gene Symbol: PCCB
  Gene Name: propionyl CoA carboxylase, beta polypeptide
  Uniprot ID: P05166
  ENST ID: ENST00000251654
  CDS Start-End: 71-1690
agcgccgtacccacgctttagcacatgcgtactcaggtgcgccggtaggggacgcgccggcacagcaaaaatggcggcggcattacgggtggcggcggtcggggcaaggctcagcgttctggcgagcggtctccgcgccgcggtccgcagcctttgcagccaggccacctctgttaacgaacgcatcgaaaacaagcgccggaccgcgctgctgggagggggccaacgccgtattgacgcgcagcacaagcgaggaaagctaacagccagggagaggatcagtctcttgctggaccctggcagctttgttgagagcgacatgtttgtggaacacagatgtgcagattttggaatggctgctgataagaataagtttcctggagacagcgtggtcactggacgaggccgaatcaatggaagattggtttatgtcttcagtcaggattttacagtttttggaggcagtctgtcaggagcacatgcccaaaagatctgcaaaatcatggaccaggccataacggtgggggctccagtgattgggctgaatgactctgggggagcacggatccaagaaggagtggagtctttggctggctatgcagacatctttctgaggaatgttacggcatccggagtcatccctcagatttctctgatcatgggcccatgtgctggtggggccgtctactccccagccctaacagacttcacgttcatggtaaaggacacctcctacctgttcatcactggccctgatgttgtgaagtctgtcaccaatgaggatgttacccaggaggagctcggtggtgccaagacccacaccaccatgtcaggtgtggcccacagagcttttgaaaatgatgttgatgccttgtgtaatctccgggatttcttcaactacctgcccctgagcagtcaggacccggctcccgtccgtgagtgccacgatcccagtgaccgtctggttcctgagcttgacacaattgtccctttggaatcaaccaaagcctacaacatggtggacatcatacactctgttgttgatgagcgtgaattttttgagatcatgcccaattatgccaagaacatcattgttggttttgcaagaatgaatgggaggactgttggaattgttggcaaccaacctaaggtggcctcaggatgcttggatattaattcatctgtgaaaggggctcgttttgtcagattctgtgatgcattcaatattccactcatcacttttgttgatgtccctggctttctacctggcacagcacaggaatacgggggcatcatccggcatggtgccaagcttctctacgcatttgctgaggcaactgtacccaaagtcacagtcatcaccaggaaggcctatggaggtgcctatgatgtcatgagctctaagcacctttgtggtgataccaactatgcctggcccaccgcagagattgcagtcatgggagcaaagggcgctgtggagatcatcttcaaagggcatgagaatgtggaagctgctcaggcagagtacatcgagaagtttgccaaccctttccctgcagcagtgcgagggtttgtggatgacatcatccaaccttcttccacacgtgcccgaatctgctgtgacctggatgtcttggccagcaagaaggtacaacgtccttggagaaaacatgcaaatattccattgtaaacaaatcaaaggaaaagaaaccaagaactgaattactgtctgcccattcacatcccattcctgccttttgcaatcatgaaacctgggaatccaaatagttggataacttagaataactaagtttattaaattctagaaagatc

SEQ ID NO: 169830 - DNA, 1436 bp, Homo sapiens
  Payload ID: 13430
  Gene Symbol: PCCB
  Gene Name: propionyl CoA carboxylase, beta polypeptide
  ENST ID: ENST00000482086
  CDS Start-End: 22-1293
ggacgcgccggcacagcaaaaatggcggcggcattacgggtggcggcggtcggggcaaggctcagcgttctggcgagcggtctccgcgccgcggtccgcagcctttgcagccaggccataacggtgggggctccagtgattgggctgaatgactctgggggagcacggatccaagaaggagtggagtctttggctggctatgcagacatctttctgaggaatgttacggcatccggagtcatccctcagatttctctgatcatgggcccatgtgctggtggggccgtctactccccagccctaacagacttcacgttcatggtaaaggacacctcctacctgttcatcactggccctgatgttgtgaagtctgtcaccaatgaggatgttacccaggaggagctcggtggtgccaagacccacaccaccatgtcaggtgtggcccacagagcttttgaaaatgatgttgatgccttgtgtaatctccgggatttcttcaactacctgcccctgagcagtcaggacccggctcccgtccgtgagtgccacgatcccagtgaccgtctggttcctgagcttgacacaattgtccctttggaatcaaccaaagcctacaacatggtggacatcatacactctgttgttgatgagcgtgaattttttgagatcatgcccaattatgccaagaacatcattgttggttttgcaagaatgaatgggaggactgttggaattgttggcaaccaacctaaggtggcctcaggatgcttggatattaattcatctgtgaaaggggctcgttttgtcagattctgtgatgcattcaatattccactcatcacttttgttgatgtccctggctttctacctggcacagcacaggaatacgggggcatcatccggcatggtgccaagcttctctacgcatttgctgaggcaactgtacccaaagtcacagtcatcaccaggaaggcctatggaggtgcctatgatgtcatgagctctaagcacctttgtggtgataccaactatgcctggcccaccgcagagattgcagtcatgggagcaaagggcgctgtggagatcatcttcaaagggcatgagaatgtggaagctgctcaggcagagtacatcgagaagtttgccaaccctttccctgcagcagtgcgagggtttgtggatgacatcatccaaccttcttccacacgtgcccgaatctgctgtgacctggatgtcttggccagcaagaaggtacaacgtccttggagaaaacatgcaaatattccattgtaaacaaatcaaaggaaaagaaaccaagaactgaattactgtctgcccattcacatcccattcctgccttttgcaatcatgaaacctgggaatccaaatagttggataacttagaataactaagtttattaaattctagaaagatc

SEQ ID NO: 169831 - DNA, 6090 bp, Homo sapiens
  Payload ID: 13430
  Gene Symbol: PCCB
  Gene Name: propionyl CoA carboxylase, beta polypeptide
  ENST ID: ENST00000471595
  CDS Start-End: 19-1671
cgcgccggcacagcaaaaatggcggcggcattacgggtggcggcggtcggggcaaggctcagcgttctggcgagcggtctccgcgccgcggtccgcagcctttgcagccaggccacctctgttaacgaacgcatcgaaaacaagcgccggaccgcgctgctgggagggggccaacgccgtattgacgcgcagcacaagcgaggaaagctaacagccagggagaggatcagtctcttgctggaccctggcagctttgttgagagcgacatgtttgtggaacacagatgtgcagattttggaatggctgctgataagaataagtttcctggagacagcgtggtcactggacgaggccgaatcaatggaagattggtttatgtcttcagtcaggattttacagtttttggaggcagtctgtcaggagcacatgcccaaaagatctgcaaaatcatggaccaggccataacggtgggggctccagtgattgggctgaatgactctgggggagcacggatccaagaaggagtggagtctttggctggctatgcagacatctttctgaggaatgttacggcatccggagtcatccctcagatttctctgatcatgggcccatgtgctggtggggccgtctactccccagccctaacagacttcacgttcatggtaaaggacacctcctacctgttcatcactggccctgatgttgtgaagtctgtcaccaatgaggatgttacccaggaggagctcggtggtgccaagacccacaccaccatgtcaggtgtggcccacagagcttttgaaaatgatgttgatgccttgtgtaatctccgggatttcttcaactacctgcccctgagcagtcaggacccggctcccgtccgtgagtgccacgatcccagtgaccgtctggttcctgagcttgacacaattgtccctttggaatcaaccaaagcctacaacatggtggacatcatacactctgttgttgatgagcgtgaattttttgagatcatgcccaattatgccaagaacatcattgttggttttgcaagaatgaatgggaggactgttggaattgttggcaaccaacctaaggtggcctcaggatgcttggatattaattcatctgtgaaaggggctcgttttgtcagattctgtgatgcattcaatattccactcatcacttttgttgatgtccctggctttctacctggcacagcacaggaatacgggggcatcatccggcatggtgccaagcttctctacgcatttgctgaggcaactgtacccaaagtcacagtcatcaccaggaaggcctatggaggtgcctatgatgtcatgagctctaagcacctttgtggtgataccaactatgcctggcccaccgcagagattgcagtcatgggagcaaagggcgctgtggagatcatcttcaaagggcatgagaatgtggaagctgctcaggcagagtacatcgagaagtttgccaaccctttccctgcagcagtgcgagggtttgtggatgacatcatccaaccttcttccacacgtgcccgaatctgctgtgacctggatgtcttggccagcaagaaggtaagagtccaagaagtgtttcaccaggttgtgcagtctggacaccgagatggtagaggggctgtaagatggtagaggaaccagctcaggagagcagctgggctagcagctttacggaagccttggatggtggggaaactcccgtacagaaactcagctggtcaaagaaactcaaagccacaagaccttggaagctttgtcaagtggaccagcctccatggaccacggaataccttgagagtaatgacagttgagtgttctcttgtgtgggaatgccttccccagctggtgccctcaccttaaagggaaaaagaaaatacactgaattttgtaaatgggaaatacttgggtccactgagctgatagctgacaagtgtctgtctttaaactgagagcagataatatggtgagctgtggtgtaggaagcactgctagggtcttgctggtcctgccccgccttgtgttaatccagttcctcctgagctacacagctgacaagtggtgaagctgggatttgaactcagatgggtttgaccccagccaagcctgtgttctgatcatttcaaagtactaccactcagctgatgaggaaggtgagatggacttctaagggttggcctaagagtaggggtgagggaggttggtggtctgttcccctgggcttgtcttaacccagaaagctactacatttagacagctttcctatctcccgcatgattctcttgcaaagcagtaccaacagatggccagtcatctttttgagttgctagagtaatggggagcacatccacaatacacccttctaatgcttgttagaaagtgcttttgttgcaaagttcttctagcttctttttttgaccctgtcttggtctccccagcccaactttctgcctctggttgcactgatactttgtcctggtgctggtgcttaagatgtggtctgctcagccaaagaagtctgtgaaggatactcacccacatgtggagttgatgaatcagccctcttcacctattcaacagatgtgactgttttgtctttctggttccaaaggatttctggagagctatgactttacccttttagaagtattggtcctcatactctgtgcacctctgatgtcagcatgggatttctacaattccaagcaggagttgcagccacttgataggcagtgcctcagtctggggcctctgtggaatccagctggcatattccagccaatgtggcagcctcaatagttagttaagttttgaccatgtccctactgtcctgggtggtgaaaatactccctttatgtgtccttgggagcagaaagatgctcttcaaaaagtggtgcctgatggagatctccacagaacaagacactcagaagggcagggatagaatcttacctgagcttggtctagtatgaaaagcctaaggctgggtgcgatggcccatgccctgtaatcccagcactttgggaggccaaggcaggtggattgcttgagctcagttcatgaccggcctgggcaacatggtgaaagcctgtctctactaaaaatacaaaacttagctgggcgtggtggtgggtgcctgtaattccagctacttgagagcctgaggcaggagaatctcttgaaccccagaggcggaggttgctgtgagctgagatcacaccattgtactccagcctgggtgacagaccgagaccctgtcttcacttaccgccccccccccccccccgaaaaaaaaaaggcaagcctgagtggcatcaaacctttgtttcccatgaatatactagtccctgcttgatggactgttacctgggaacaggggcaaacagggagttacagtcaagccacaaatgggagatttgcaagcctgacccaagcctgaaagtgctcatctagtctcatactcttgtaaccatctagatgagctgttacagaccatccttaaatgaccttccttccttggctgtctggaaagcttgcttgctgatttgtctcccacacctttgccttttttgcataggcatattaggccatttaaggaactcaccccctattgccagacccatgaagtgtgtagggtatgacttcttaaagaaagagtgaggaggtctaatgccaagagaaactttttaagacagtctggctctgttacctagattggagtgcagtagtggtgcaatcttggctcactgcaacaacctccaccttgtgggctcaagccatcctcctaccttagcctcacgagtagctggtgtgcgccatcatacgcagctaatttttgtattttttgtagaggagttttaccatgctacccaggctggtctcgaactcttgagctcaagtgatccactcaccttggccttccaaagtgctgggattacaggcgtgagccaccatgcctggctgaaaacttcatttctgtagctgcattgactctatgtggtcttcaaaagggcactgccagggtgcaattatgcatgtaagcccagagtctcaagccgtgaggacccatgctacaggccagtggatgggtgttccctgaatgcctcatgcaaaactcagtttgcaagagactccctcttaaaccacagatgacttggcctacacacactccagagaaatctaaggaatgaaagaaagtgagctattcctaaattctgctttcttaaaaaaaattaaaaagccaaaacaacaaaaccaccaactcactaataaggttaacttgctgccatttaacagattatcagaaattgcaaactctctcaagagccacaggacagaaaatcatctctttaaagccatacctggtagaaacaataggatgactaccacaagcctgattttgaatagtttattaaaggaaaggtgaagcatcagtttcaaattgtacaaaaggaaaaaaaacctcatattgcaaatgtacaatttacagaattactagcaaaaccaatcaaggagacaccgaaaatacaaaaatttgattgacttcaaactgaactggaaacccattggagtagatatttagcctttttgtgtggcatggtagtctacaattctgtcagcatctgttttccatacaagactgtcacgcaaaggatcaatttgtgcatgtgccagggcacctcatggcttgctccctggccaaaaccacaggcaggcagggctggggtggacagtccagtcattcctgcaccttcacttccagtgaagcccacaattctgggagaaagtgaggccccagctcccctaactggagcccaagaattgctgaattagcagagaagatatttttggtgaccaggtttttttcagaactgtacaaatgttgagaaaaatgttttgtgtctttactaaaaggatgaataaaatcatccatcatcatcttgctttcccgcacaaaagatgatcactgggtgtgcagaattttaaaaaatgtttttcgtatttgataaaaagggaaagcctcatgattctgttgcagctactttaaaaaccagcccagaaacagctgtggatgaattggtttggaaattctgaggcttactttagaaatcagaaaggaagagagagactaagtggggtttttaaaacaatagcagcaagtcataaaagtctaggcagaatgtaactctaaaccattgtagactgtcctgaagattcataatttctttccccaaaagaattattcttaatatgcacatttaacactgaaatgtagctgtaattcaaggtaagcttaggaacttcaccctctaagcacagacttctatgcagcacatacttctataatcagtaaacttaattcacaaaattagcgcataagggtattaagtgcatgggaagtaaacacagttatgttacacttaaaattacttttgaatgattgataaaggatttcttcatgattgattatcttaagaaaatggaagtctgtgtaacttgaatttggcagggcatgaaataagtggtaaaaacagcaaactgataacttgagaatcattttcgttttactgagaatactttatttgctggtagaagttgctaaaaatgcacagaacaaataccaatagaaaatgcactgtatttgaatctccctagtctatataaaatgaacggtgtacagcatctgttggaaaaatggctgcatggacatttcttattttatgcccacttataaataaaaataaaccttttattcaagagtatataaaatctgggaattcatatccatatccacagagggtgtgtggtttttggcagagatgtactatgtcagaatttcatcttagcttgtcaatgttctgctccttcattatttgtgttccacaaaggtcaaccaaatccagtgaactccaaaacactcttcgcaattaggatgagctgcttactcataggtttaataaaaatggttagcttttaaaacataaaaaggcaaaatgttaaaacggtttttaaattgtacaacaggaaaataaagttaaaaatatgttttttttt

SEQ ID NO: 169832 - DNA, 1683 bp, Homo sapiens
  Payload ID: 13430
  Gene Symbol: PCCB
  Gene Name: propionyl CoA carboxylase, beta polypeptide
  ENST ID: ENST00000484181
  CDS Start-End: 22-1239
ggacgcgccggcacagcaaaaatggcggcggcattacgggtggcggcggtcggggcaaggctcagcgttctggcgagcggtctccgcgccgcggtccgcagcctttgcagccaggccacctctgttaacgaacgcatcgaaaacaagcgccggaccgcgctgctgggagggggccaacgccgtattgacgcgcagcacaagcgaggaaagctaacagccagggagaggatcagtctcttgctggaccctggcagctttgttgagagcgacatgtttgtggaacacagatgtgcagattttggaatggctgctgataagaataagtttcctggagacagcgtggtcactggacgaggccgaatcaatggaagattggtttatgtcttcagtcaggattttacagtttttggaggcagtctgtcaggagcacatgcccaaaagatctgcaaaatcatggaccaggccataacggtgggggctccagtgattgggctgaatgactctgggggagcacggatccaagaaggagtggagtctttggctggctatgcagacatctttctgaggaatgttacggcatccggagtcatccctcagatttctctgatcatgggcccatgtgctggtggggccgtctactccccagccctaacagacttcacgttcatggtaaaggacacctcctacctgttcatcactggccctgatgttgtgaagtctgtcaccaatgaggatgttacccaggaggagctcggtggtgccaagacccacaccaccatgtcaggtgtggcccacagagcttttgaaaatgatgttgatgccttgtgtaatctccgggatttcttcaactacctgcccctgagcagtcaggacccggctcccgtccgtgagtgccacgatcccagtgaccgtctggttcctgagcttgacacaattgtccctttggaatcaaccaaagcctacaacatggtggacatcatacactctgttgttgatgagcgtgaattttttgagatcatgcccaattatgccaagaacatcattgttggttttgcaagaatgaatgggaggactgttggaattgttggcaaccaacctaaggtggcctcaggatgcttggatattaattcatctgtgaaaggggctcgttttgtcagattctgtgatgcattcaatattccactcatcacttttgttgatgtccctggctttctacctggcctatggaggtgcctatgatgtcatgagctctaagcacctttgtggtgataccaactatgcctggcccaccgcagagattgcagtcatgggagcaaagggcgctgtggagatcatcttcaaagggcatgagaatgtggaagctgctcaggcagagtacatcgagaagtttgccaaccctttccctgcagcagtgcgagggtttgtggatgacatcatccaaccttcttccacacgtgcccgaatctgctgtgacctggatgtcttggccagcaagaaggtacaacgtccttggagaaaacatgcaaatattccattgtaaacaaatcaaaggaaaagaaaccaagaactgaattactgtctgcccattcacatcccattcctgccttttgcaatcatgaaacctgggaatccaaatagttggataacttagaataactaagtttattaaattctagaaagatc

SEQ ID NO: 169833 - DNA, 547 bp, Homo sapiens
  Payload ID: 13430
  Gene Symbol: PCCB
  Gene Name: propionyl CoA carboxylase, beta polypeptide
  ENST ID: ENST00000494742
  CDS Start-End: 294-547
acaggggataggatagtaggagaaggagaagcccacagaggaggcaggagaagaaccaggaagtagcgtgtccttgaggtgggagctgggagcagtagggaccctcgtgaggtgaggtgtgcttctgtaggtctccctagaaaaaacctgtgtcagatccttcactaagcctgctttagtttccaccacctgcttctgcattctttttatggctccttaggtctccaggaaagctaacagccagggagaggatcagtctcttgctggaccctggcagctttgttgagagcgacatgtttgtggaacacagatgtgcagattttggaatggctgctgataagaataagtttcctggagacagcgtggtcactggacgaggccgaatcaatggaagattggtttatgtcttcagtcaggattttacagtttttggaggcagtctgtcaggagcacatgcccaaaagatctgcaaaatcatggaccaggccataacggtgggggctccagtgattgggctgaatgactctgggggagcacggatccaaga

SEQ ID NO: 169834 - DNA, 1613 bp, Homo sapiens
  Payload ID: 13430
  Gene Symbol: PCCB
  Gene Name: propionyl CoA carboxylase, beta polypeptide
  ENST ID: ENST00000490504
  CDS Start-End: 22-1470
ggacgcgccggcacagcaaaaatggcggcggcattacgggtggcggcggtcggggcaaggctcagcgttctggcgagcggtctccgcgccgcggtccgcagcctttgcagccaggccacctctgttaacgaacgcatcgaaaacaagcgccggaccgcgctgctgggagggggccaacgccgtattgacgcgcagcacaagcgaggaaagctaacagccagggagaggatcagtctcttgctggaccctggcagctttgttgagagcgacatgtttgtggaacacagatgtgcagattttggaatggctgctgataagaataagtttcctggagacagcgtggtcactggacgaggccgaatcaatggaagattggtttatgtcttcagtcagaggaatgttacggcatccggagtcatccctcagatttctctgatcatgggcccatgtgctggtggggccgtctactccccagccctaacagacttcacgttcatggtaaaggacacctcctacctgttcatcactggccctgatgttgtgaagtctgtcaccaatgaggatgttacccaggaggagctcggtggtgccaagacccacaccaccatgtcaggtgtggcccacagagcttttgaaaatgatgttgatgccttgtgtaatctccgggatttcttcaactacctgcccctgagcagtcaggacccggctcccgtccgtgagtgccacgatcccagtgaccgtctggttcctgagcttgacacaattgtccctttggaatcaaccaaagcctacaacatggtggacatcatacactctgttgttgatgagcgtgaattttttgagatcatgcccaattatgccaagaacatcattgttggttttgcaagaatgaatgggaggactgttggaattgttggcaaccaacctaaggtggcctcaggatgcttggatattaattcatctgtgaaaggggctcgttttgtcagattctgtgatgcattcaatattccactcatcacttttgttgatgtccctggctttctacctggcacagcacaggaatacgggggcatcatccggcatggtgccaagcttctctacgcatttgctgaggcaactgtacccaaagtcacagtcatcaccaggaaggcctatggaggtgcctatgatgtcatgagctctaagcacctttgtggtgataccaactatgcctggcccaccgcagagattgcagtcatgggagcaaagggcgctgtggagatcatcttcaaagggcatgagaatgtggaagctgctcaggcagagtacatcgagaagtttgccaaccctttccctgcagcagtgcgagggtttgtggatgacatcatccaaccttcttccacacgtgcccgaatctgctgtgacctggatgtcttggccagcaagaaggtacaacgtccttggagaaaacatgcaaatattccattgtaaacaaatcaaaggaaaagaaaccaagaactgaattactgtctgcccattcacatcccattcctgccttttgcaatcatgaaacctgggaatccaaatagttggataacttagaataactaagtttattaaattctagaaagatc

SEQ ID NO: 169835 - DNA, 1841 bp, Homo sapiens
  Payload ID: 13430
  Gene Symbol: PCCB
  Gene Name: propionyl CoA carboxylase, beta polypeptide
  Uniprot ID: P05166
  ENST ID: ENST00000469217
  CDS Start-End: 18-1697
gcgccggcacagcaaaaatggcggcggcattacgggtggcggcggtcggggcaaggctcagcgttctggcgagcggtctccgcgccgcggtccgcagcctttgcagccaggccacctctgttaacgaacgcatcgaaaacaagcgccggaccgcgctgctgggagggggccaacgccgtattgacgcgcagcacaagcgaggaaagctaacagccagggagaggatcagtctcttgctggaccctggcagctttgttgagagcgacatgtttgtggaacacagatgtgcagattttggaatggctgctgataagaataagtttcctggagacagcgtggtcactggacgaggccgaatcaatggaagattggtttatgtcttcagtcagcaaataataggctgggcacagtggctcccgcttgtcatctcagcactttgggaggccgaggattttacagtttttggaggcagtctgtcaggagcacatgcccaaaagatctgcaaaatcatggaccaggccataacggtgggggctccagtgattgggctgaatgactctgggggagcacggatccaagaaggagtggagtctttggctggctatgcagacatctttctgaggaatgttacggcatccggagtcatccctcagatttctctgatcatgggcccatgtgctggtggggccgtctactccccagccctaacagacttcacgttcatggtaaaggacacctcctacctgttcatcactggccctgatgttgtgaagtctgtcaccaatgaggatgttacccaggaggagctcggtggtgccaagacccacaccaccatgtcaggtgtggcccacagagcttttgaaaatgatgttgatgccttgtgtaatctccgggatttcttcaactacctgcccctgagcagtcaggacccggctcccgtccgtgagtgccacgatcccagtgaccgtctggttcctgagcttgacacaattgtccctttggaatcaaccaaagcctacaacatggtggacatcatacactctgttgttgatgagcgtgaattttttgagatcatgcccaattatgccaagaacatcattgttggttttgcaagaatgaatgggaggactgttggaattgttggcaaccaacctaaggtggcctcaggatgcttggatattaattcatctgtgaaaggggctcgttttgtcagattctgtgatgcattcaatattccactcatcacttttgttgatgtccctggctttctacctggcacagcacaggaatacgggggcatcatccggcatggtgccaagcttctctacgcatttgctgaggcaactgtacccaaagtcacagtcatcaccaggaaggcctatggaggtgcctatgatgtcatgagctctaagcacctttgtggtgataccaactatgcctggcccaccgcagagattgcagtcatgggagcaaagggcgctgtggagatcatcttcaaagggcatgagaatgtggaagctgctcaggcagagtacatcgagaagtttgccaaccctttccctgcagcagtgcgagggtttgtggatgacatcatccaaccttcttccacacgtgcccgaatctgctgtgacctggatgtcttggccagcaagaaggtacaacgtccttggagaaaacatgcaaatattccattgtaaacaaatcaaaggaaaagaaaccaagaactgaattactgtctgcccattcacatcccattcctgccttttgcaatcatgaaacctgggaatccaaatagttggataacttagaataactaagtttattaaattctagaaagatct

SEQ ID NO: 169836 - DNA, 1877 bp, Homo sapiens
  Payload ID: 13430
  Gene Symbol: PCCB
  Gene Name: propionyl CoA carboxylase, beta polypeptide
  ENST ID: ENST00000468777
  CDS Start-End: 22-1734
ggacgcgccggcacagcaaaaatggcggcggcattacgggtggcggcggtcggggcaaggctcagcgttctggcgagcggtctccgcgccgcggtccgcagcctttgcagccaggccacctctgttaacgaacgcatcgaaaacaagcgccggaccgcgctgctgggagggggccaacgccgtattgacgcgcagcacaagcgaggaaagctaacagccagggagaggatcagtctcttgctggaccctggcagctttgttgagagcgacatgtttgtggaacacagatgtgcagattttggaatggctgctgataagaataagtttcctggagacagcgtggtcactggacgaggccgaatcaatggaagattggtttatgtcttcagtcagatacgggcttctgccatgtcgcccaggctggtctcagactcctggactcaagccatccacctgccttggcctcccaaagtgttgggattacaggattttacagtttttggaggcagtctgtcaggagcacatgcccaaaagatctgcaaaatcatggaccaggccataacggtgggggctccagtgattgggctgaatgactctgggggagcacggatccaagaaggagtggagtctttggctggctatgcagacatctttctgaggaatgttacggcatccggagtcatccctcagatttctctgatcatgggcccatgtgctggtggggccgtctactccccagccctaacagacttcacgttcatggtaaaggacacctcctacctgttcatcactggccctgatgttgtgaagtctgtcaccaatgaggatgttacccaggaggagctcggtggtgccaagacccacaccaccatgtcaggtgtggcccacagagcttttgaaaatgatgttgatgccttgtgtaatctccgggatttcttcaactacctgcccctgagcagtcaggacccggctcccgtccgtgagtgccacgatcccagtgaccgtctggttcctgagcttgacacaattgtccctttggaatcaaccaaagcctacaacatggtggacatcatacactctgttgttgatgagcgtgaattttttgagatcatgcccaattatgccaagaacatcattgttggttttgcaagaatgaatgggaggactgttggaattgttggcaaccaacctaaggtggcctcaggatgcttggatattaattcatctgtgaaaggggctcgttttgtcagattctgtgatgcattcaatattccactcatcacttttgttgatgtccctggctttctacctggcacagcacaggaatacgggggcatcatccggcatggtgccaagcttctctacgcatttgctgaggcaactgtacccaaagtcacagtcatcaccaggaaggcctatggaggtgcctatgatgtcatgagctctaagcacctttgtggtgataccaactatgcctggcccaccgcagagattgcagtcatgggagcaaagggcgctgtggagatcatcttcaaagggcatgagaatgtggaagctgctcaggcagagtacatcgagaagtttgccaaccctttccctgcagcagtgcgagggtttgtggatgacatcatccaaccttcttccacacgtgcccgaatctgctgtgacctggatgtcttggccagcaagaaggtacaacgtccttggagaaaacatgcaaatattccattgtaaacaaatcaaaggaaaagaaaccaagaactgaattactgtctgcccattcacatcccattcctgccttttgcaatcatgaaacctgggaatccaaatagttggataacttagaataactaagtttattaaattctagaaagatc

SEQ ID NO: 169837 - DNA, 582 bp, Homo sapiens
  Payload ID: 13430
  Gene Symbol: PCCB
  Gene Name: propionyl CoA carboxylase, beta polypeptide
  ENST ID: ENST00000465423
  CDS Start-End: 8-582
agcaaaaatggcggcggcattacgggtggcggcggtcggggcaaggctcagcgttctggcgagcggtctccgcgccgcggtccgcagcctttgcagccaggccacctctgttaacgaacgcatcgaaaacaagcgccggaccgcgctgctgggagggggccaacgccgtattgacgcgcagcacaagcgagctagagtgcagcagctcactgcaacttctgcttcccagcttcaagcaattctcctgcctcagcctccagagtacctggggttacagggaaagctaacagccagggagaggatcagtctcttgctggaccctggcagctttgttgagagcgacatgtttgtggaacacagatgtgcagattttggaatggctgctgataagaataagtttcctggagacagcgtggtcactggacgaggccgaatcaatggaagattggtttatgtcttcagtcaggattttacagtttttggaggcagtctgtcaggagcacatgcccaaaagatctgcaaaatcatggaccaggccataacggtgggggctccagtgattgggctgaatgactctggggg

SEQ ID NO: 169838 - DNA, 534 bp, Homo sapiens
  Payload ID: 13430
  Gene Symbol: PCCB
  Gene Name: propionyl CoA carboxylase, beta polypeptide
  ENST ID: ENST00000459873
  CDS Start-End: 134-534
gatagtaggagaaggagaagcccacagaggaggcaggagaagaaccaggaagtagcgtgtccttgagggaaagctaacagccagggagaggatcagtctcttgctggaccctggcagctttgttgagagcgacatgtttgtggaacacagatgtgcagattttggaatggctgctgataagaataagtttcctggagacagcgtggtcactggacgaggccgaatcaatggaagattggtttatgtcttcagtcaggattttacagtttttggaggcagtctgtcaggagcacatgcccaaaagatctgcaaaatcatggaccaggccataacggtgggggctccagtgattgggctgaatgactctgggggagcacggatccaagaaggagtggagtctttggctggctatgcagacatctttctgaggaatgttacggcatccggagtcatccctcagatttctctgatcatgggcccatgtgctggtggggccgtctactccccagccctaacagacttcacgttcatggt

SEQ ID NO: 169839 - DNA, 488 bp, Homo sapiens
  Payload ID: 13430
  Gene Symbol: PCCB
  Gene Name: propionyl CoA carboxylase, beta polypeptide
  ENST ID: ENST00000462542
  CDS Start-End: 1-488
gagaatccagctggccttcagagataagctgggcggcccattttggagagggaaagctaacagccagggagaggatcagtctcttgctggaccctggcagctttgttgagagcgacatgtttgtggaacacagatgtgcagattttggaatggctgctgataagaataagtttcctggagacagcgtggtcactggacgaggccgaatcaatggaagattggtttatgtcttcagtcaggattttacagtttttggaggcagtctgtcaggagcacatgcccaaaagatctgcaaaatcatggaccaggccataacggtgggggctccagtgattgggctgaatgactctgggggagcacggatccaagaaggagtggagtctttggctggctatgcagacatctttctgaggaatgttacggcatccggagtcatccctcagatttctctgatcatgggcccatgtgctggtggggccgtctactcc

SEQ ID NO: 169840 - DNA, 1844 bp, Homo sapiens
  Payload ID: 13430
  Gene Symbol: PCCB
  Gene Name: propionyl CoA carboxylase, beta polypeptide
  ENST ID: ENST00000466072
  CDS Start-End: 22-1701
ggacgcgccggcacagcaaaaatggcggcggcattacgggtggcggcggtcggggcaaggctcagcgttctggcgagcggtctccgcgccgcggtccgcagcctttgcagccaggccacctctgttaacgaacgcatcgaaaacaagcgccggaccgcgctgctgggagggggccaacgccgtattgacgcgcagcacaagcgaggaaagctaacagccagggagaggatcagtctcttgctggaccctggcagctttgttgagagcgacatgtttgtggaacacagatgtgcagattttggaatggctgctgataagaataagtttcctggagacagcgtggtcactggacgaggccgaatcaatggaagattggtttatgtcttcagtcaggattttacagtttttggaggcagtctgtcaggagcacatgcccaaaagatctgcaaaatcatggaccaggccataacggtgggggctccagtgattgggctgaatgactctgggggagcacggatccaagaaggagtggagtctttggctggctatgcagacatctttctgaggaatgttacggcatccggagtcatccctcagatttctctgatcatgggcccatgtgctggtggggccgtctactccccagccctaacagacttcacgttcatggtaaaggacacctcctacctgttcatcactggccctgatgttgtgaagtctgtcaccaatgaggatgttacccaggaggagctcggtggtgccaagacccacaccaccatgtcaggtgtggcccacagagcttttgaaaatgatgttgatgccttgtgtaatctccgggatttcttcaactacctgcccctgagcagtcaggacccggctcccgtccgtgagtgccacgatcccagtgaccgtctggttcctgagcttgacacaattgtccctttggaatcaaccaaagcctacaacatggtggacatcatacactctgttgttgatgagcgtgaattttttgagatcatgcccaattatgccaagaacatcattgttggttttgcaagaatgaatgggaggactgttggaattgttggcaaccaacctaaggtggcctcagattccatttcctttactccttggaactatgctaggaggcagtatcgtccctactttgcaggatgcttggatattaattcatctgtgaaaggggctcgttttgtcagattctgtgatgcattcaatattccactcatcacttttgttgatgtccctggctttctacctggcacagcacaggaatacgggggcatcatccggcatggtgccaagcttctctacgcatttgctgaggcaactgtacccaaagtcacagtcatcaccaggaaggcctatggaggtgcctatgatgtcatgagctctaagcacctttgtggtgataccaactatgcctggcccaccgcagagattgcagtcatgggagcaaagggcgctgtggagatcatcttcaaagggcatgagaatgtggaagctgctcaggcagagtacatcgagaagtttgccaaccctttccctgcagcagtgcgagggtttgtggatgacatcatccaaccttcttccacacgtgcccgaatctgctgtgacctggatgtcttggccagcaagaaggtacaacgtccttggagaaaacatgcaaatattccattgtaaacaaatcaaaggaaaagaaaccaagaactgaattactgtctgcccattcacatcccattcctgccttttgcaatcatgaaacctgggaatccaaatagttggataacttagaataactaagtttattaaattctagaaagatc

SEQ ID NO: 169841 - DNA, 1715 bp, Homo sapiens
  Payload ID: 13430
  Gene Symbol: PCCB
  Gene Name: propionyl CoA carboxylase, beta polypeptide
  ENST ID: ENST00000462637
  CDS Start-End: 22-1572
ggacgcgccggcacagcaaaaatggcggcggcattacgggtggcggcggtcggggcaaggctcagcgttctggcgagcggtctccgcgccgcggtccgcagcctttgcagccaggccacctctgttaacgaacgcatcgaaaacaagcgccggaccgcgctgctgggagggggccaacgccgtattgacgcgcagcacaagcgaggaaagctaacagccagggagaggatcagtctcttgctggaccctggcagctttgttgagagcgacatgtttgtggaacacagatgtgcagattttggaatggctgctgataagaataaggattttacagtttttggaggcagtctgtcaggagcacatgcccaaaagatctgcaaaatcatggaccaggccataacggtgggggctccagtgattgggctgaatgactctgggggagcacggatccaagaaggagtggagtctttggctggctatgcagacatctttctgaggaatgttacggcatccggagtcatccctcagatttctctgatcatgggcccatgtgctggtggggccgtctactccccagccctaacagacttcacgttcatggtaaaggacacctcctacctgttcatcactggccctgatgttgtgaagtctgtcaccaatgaggatgttacccaggaggagctcggtggtgccaagacccacaccaccatgtcaggtgtggcccacagagcttttgaaaatgatgttgatgccttgtgtaatctccgggatttcttcaactacctgcccctgagcagtcaggacccggctcccgtccgtgagtgccacgatcccagtgaccgtctggttcctgagcttgacacaattgtccctttggaatcaaccaaagcctacaacatggtggacatcatacactctgttgttgatgagcgtgaattttttgagatcatgcccaattatgccaagaacatcattgttggttttgcaagaatgaatgggaggactgttggaattgttggcaaccaacctaaggtggcctcaggatgcttggatattaattcatctgtgaaaggggctcgttttgtcagattctgtgatgcattcaatattccactcatcacttttgttgatgtccctggctttctacctggcacagcacaggaatacgggggcatcatccggcatggtgccaagcttctctacgcatttgctgaggcaactgtacccaaagtcacagtcatcaccaggaaggcctatggaggtgcctatgatgtcatgagctctaagcacctttgtggtgataccaactatgcctggcccaccgcagagattgcagtcatgggagcaaagggcgctgtggagatcatcttcaaagggcatgagaatgtggaagctgctcaggcagagtacatcgagaagtttgccaaccctttccctgcagcagtgcgagggtttgtggatgacatcatccaaccttcttccacacgtgcccgaatctgctgtgacctggatgtcttggccagcaagaaggtacaacgtccttggagaaaacatgcaaatattccattgtaaacaaatcaaaggaaaagaaaccaagaactgaattactgtctgcccattcacatcccattcctgccttttgcaatcatgaaacctgggaatccaaatagttggataacttagaataactaagtttattaaattctagaaagatc

SEQ ID NO: 169842 - DNA, 1727 bp, Homo sapiens
  Payload ID: 13430
  Gene Symbol: PCCB
  Gene Name: propionyl CoA carboxylase, beta polypeptide
  ENST ID: ENST00000483687
  CDS Start-End: 22-1584
ggacgcgccggcacagcaaaaatggcggcggcattacgggtggcggcggtcggggcaaggctcagcgttctggcgagcggtctccgcgccgcggtccgcagcctttgcagccaggccacctctgttaacgaacgcatcgaaaacaagcgccggaccgcgctgctgggagggggccaacgccgtattgacgcgcagcacaagcgaggaaagctaacagccagggagaggatcagtctcttgctggaccctggcagctttgttgagagcgacatgtttgtggaacacagatgtgcagattttggaatggctgctgataagaataagtttcctggagacagcgtggtcactggacgaggccgaatcaatggaagattggtttatgtcttcagtcagatcatggaccaggccataacggtgggggctccagtgattgggctgaatgactctgggggagcacggatccaagaaggagtggagtctttggctggctatgcagacatctttctgaggaatgttacggcatccggagtcatccctcagatttctctgatcatgggcccatgtgctggtggggccgtctactccccagccctaacagacttcacgttcatggtaaaggacacctcctacctgttcatcactggccctgatgttgtgaagtctgtcaccaatgaggatgttacccaggaggagctcggtggtgccaagacccacaccaccatgtcaggtgtggcccacagagcttttgaaaatgatgttgatgccttgtgtaatctccgggatttcttcaactacctgcccctgagcagtcaggacccggctcccgtccgtgagtgccacgatcccagtgaccgtctggttcctgagcttgacacaattgtccctttggaatcaaccaaagcctacaacatggtggacatcatacactctgttgttgatgagcgtgaattttttgagatcatgcccaattatgccaagaacatcattgttggttttgcaagaatgaatgggaggactgttggaattgttggcaaccaacctaaggtggcctcaggatgcttggatattaattcatctgtgaaaggggctcgttttgtcagattctgtgatgcattcaatattccactcatcacttttgttgatgtccctggctttctacctggcacagcacaggaatacgggggcatcatccggcatggtgccaagcttctctacgcatttgctgaggcaactgtacccaaagtcacagtcatcaccaggaaggcctatggaggtgcctatgatgtcatgagctctaagcacctttgtggtgataccaactatgcctggcccaccgcagagattgcagtcatgggagcaaagggcgctgtggagatcatcttcaaagggcatgagaatgtggaagctgctcaggcagagtacatcgagaagtttgccaaccctttccctgcagcagtgcgagggtttgtggatgacatcatccaaccttcttccacacgtgcccgaatctgctgtgacctggatgtcttggccagcaagaaggtacaacgtccttggagaaaacatgcaaatattccattgtaaacaaatcaaaggaaaagaaaccaagaactgaattactgtctgcccattcacatcccattcctgccttttgcaatcatgaaacctgggaatccaaatagttggataacttagaataactaagtttattaaattctagaaagatc

SEQ ID NO: 169843 - DNA, 4502 bp, Homo sapiens
  Payload ID: 13430
  Gene Symbol: PCCB
  Gene Name: propionyl CoA carboxylase, beta polypeptide
  ENST ID: ENST00000478469
  CDS Start-End: 2-913
aatggcggcggcattacgggtggcggcggtcggggcaaggctcagcgttctggcgagcggtctccgcgccgcggtccgcagcctttgcagccaggccacctctgttaacgaacgcatcgaaaacaagcgccggaccgcgctgctgggagggggccaacgccgtattgacgcgcagcacaagcgaggaaagctaacagccagggagaggatcagtctcttgctggaccctggcagctttgttgagagcgacatgtttgtggaacacagatgtgcagattttggaatggctgctgataagaataagtttcctggagacagcgtggtcactggacgaggccgaatcaatggaagattggtttatgtcttcagtcaggattttacagtttttggaggcagtctgtcaggagcacatgcccaaaagatctgcaaaatcatggaccaggccataacggtgggggctccagtgattgggctgaatgactctgggggagcacggatccaagaaggagtggagtctttggctggctatgcagacatctttctgaggaatgttacggcatccggagtcatccctcagatttctctgatcatgggcccatgtgctggtggggccgtctactccccagccctaacagacttcacgttcatggtaaaggacacctcctacctgttcatcactggccctgatgttgtgaagtctgtcaccaatgaggatgttacccaggaggagctcggtggtgccaagacccacaccaccatgtcaggtgtggcccacagagcttttgaaaatgatgttgatgccttgtgtaatctccgggatttcttcaactacctgcccctgagcagtcaggacccggctcccgtccgtgagtgccacgatcccagcccaactttctgcctctggttgcactgatactttgtcctggtgctggtgcttaagatgtggtctgctcagccaaagaagtctgtgaaggatactcacccacatgtggagttgatgaatcagccctcttcacctattcaacagatgtgactgttttgtctttctggttccaaaggatttctggagagctatgactttacccttttagaagtattggtcctcatactctgtgcacctctgatgtcagcatgggatttctacaattccaagcaggagttgcagccacttgataggcagtgcctcagtctggggcctctgtggaatccagctggcatattccagccaatgtggcagcctcaatagttagttaagttttgaccatgtccctactgtcctgggtggtgaaaatactccctttatgtgtccttgggagcagaaagatgctcttcaaaaagtggtgcctgatggagatctccacagaacaagacactcagaagggcagggatagaatcttacctgagcttggtctagtatgaaaagcctaaggctgggtgcgatggcccatgccctgtaatcccagcactttgggaggccaaggcaggtggattgcttgagctcagttcatgaccggcctgggcaacatggtgaaagcctgtctctactaaaaatacaaaacttagctgggcgtggtggtgggtgcctgtaattccagctacttgagagcctgaggcaggagaatctcttgaaccccagaggcggaggttgctgtgagctgagatcacaccattgtactccagcctgggtgacagaccgagaccctgtcttcacttaccgccccccccccccccccgaaaaaaaaaaggcaagcctgagtggcatcaaacctttgtttcccatgaatatactagtccctgcttgatggactgttacctgggaacaggggcaaacagggagttacagtcaagccacaaatgggagatttgcaagcctgacccaagcctgaaagtgctcatctagtctcatactcttgtaaccatctagatgagctgttacagaccatccttaaatgaccttccttccttggctgtctggaaagcttgcttgctgatttgtctcccacacctttgccttttttgcataggcatattaggccatttaaggaactcaccccctattgccagacccatgaagtgtgtagggtatgacttcttaaagaaagagtgaggaggtctaatgccaagagaaactttttaagacagtctggctctgttacctagattggagtgcagtagtggtgcaatcttggctcactgcaacaacctccaccttgtgggctcaagccatcctcctaccttagcctcacgagtagctggtgtgcgccatcatacgcagctaatttttgtattttttgtagaggagttttaccatgctacccaggctggtctcgaactcttgagctcaagtgatccactcaccttggccttccaaagtgctgggattacaggcgtgagccaccatgcctggctgaaaacttcatttctgtagctgcattgactctatgtggtcttcaaaagggcactgccagggtgcaattatgcatgtaagcccagagtctcaagccgtgaggacccatgctacaggccagtggatgggtgttccctgaatgcctcatgcaaaactcagtttgcaagagactccctcttaaaccacagatgacttggcctacacacactccagagaaatctaaggaatgaaagaaagtgagctattcctaaattctgctttcttaaaaaaaattaaaaagccaaaacaacaaaaccaccaactcactaataaggttaacttgctgccatttaacagattatcagaaattgcaaactctctcaagagccacaggacagaaaatcatctctttaaagccatacctggtagaaacaataggatgactaccacaagcctgattttgaatagtttattaaaggaaaggtgaagcatcagtttcaaattgtacaaaaggaaaaaaaacctcatattgcaaatgtacaatttacagaattactagcaaaaccaatcaaggagacaccgaaaatacaaaaatttgattgacttcaaactgaactggaaacccattggagtagatatttagcctttttgtgtggcatggtagtctacaattctgtcagcatctgttttccatacaagactgtcacgcaaaggatcaatttgtgcatgtgccagggcacctcatggcttgctccctggccaaaaccacaggcaggcagggctggggtggacagtccagtcattcctgcaccttcacttccagtgaagcccacaattctgggagaaagtgaggccccagctcccctaactggagcccaagaattgctgaattagcagagaagatatttttggtgaccaggtttttttcagaactgtacaaatgttgagaaaaatgttttgtgtctttactaaaaggatgaataaaatcatccatcatcatcttgctttcccgcacaaaagatgatcactgggtgtgcagaattttaaaaaatgtttttcgtatttgataaaaagggaaagcctcatgattctgttgcagctactttaaaaaccagcccagaaacagctgtggatgaattggtttggaaattctgaggcttactttagaaatcagaaaggaagagagagactaagtggggtttttaaaacaatagcagcaagtcataaaagtctaggcagaatgtaactctaaaccattgtagactgtcctgaagattcataatttctttccccaaaagaattattcttaatatgcacatttaacactgaaatgtagctgtaattcaaggtaagcttaggaacttcaccctctaagcacagacttctatgcagcacatacttctataatcagtaaacttaattcacaaaattagcgcataagggtattaagtgcatgggaagtaaacacagttatgttacacttaaaattacttttgaatgattgataaaggatttcttcatgattgattatcttaagaaaatggaagtctgtgtaacttgaatttggcagggcatgaaataagtggtaaaaacagcaaactgataacttgagaatcattttcgttttactgagaatactttatttgctggtagaagttgctaaaaatgcacagaacaaataccaatagaaaatgcactgtatttgaatctccctagtctatataaaatgaacggtgtacagcatctgttggaaaaatggctgcatggacatttcttattttatgcccacttataaataaaaataaaccttttattcaagagtatataaaatctgggaattcatatccatatccacagagggtgtgtggtttttggcagagatgtactatgtcagaatttcatcttagcttgtcaatgttctgctccttcattatttgtgttccacaaaggtcaaccaaatccagtgaactccaaaacactcttcgcaattaggatgagctgcttactcataggtttaataaaaatggttagcttttaaaacataaaaaggcaaaatgttaaaacggtttttaaattgtacaacaggaaaataaagttaaaaatatgttttttttta

SEQ ID NO: 169844 - DNA, 715 bp, Homo sapiens
  Payload ID: 13431
  Gene Symbol: PPBP
  Gene Name: pro-platelet basic protein (chemokine (C-X-C motif) ligand 7)
  Uniprot ID: P02775
  ENST ID: ENST00000296028
  CDS Start-End: 95-481
agaagccacttatctgcagacttgtaggcagcaactcaccctcactcagaggtcttctggttctggaaacaactctagctcagccttctccaccatgagcctcagacttgataccaccccttcctgtaacagtgcgagaccacttcatgccttgcaggtgctgctgcttctgtcattgctgctgactgctctggcttcctccaccaaaggacaaactaagagaaacttggcgaaaggcaaagaggaaagtctagacagtgacttgtatgctgaactccgctgcatgtgtataaagacaacctctggaattcatcccaaaaacatccaaagtttggaagtgatcgggaaaggaacccattgcaaccaagtcgaagtgatagccacactgaaggatgggaggaaaatctgcctggacccagatgctcccagaatcaagaaaattgtacagaaaaaattggcaggtgatgaatctgctgattaatttgttctgtttctgccaaacttctttaactcccaggaagggtagaattttgaaaccttgattttctagagttctcatttattcaggatacctattcttactgtattaaaatttggatatgtgtttcattctgtctcaaaaatcacattttattctgagaaggttggttaaaagatggcagaaagaagatgaaaataaataagcctggtttcaaccctctaattcttgcctaaa

SEQ ID NO: 169845 - DNA, 5086 bp, Homo sapiens
  Payload ID: 13432
  Gene Symbol: PCSK1
  Gene Name: proprotein convertase subtilisin/kexin type 1
  Uniprot ID: P29120
  ENST ID: ENST00000311106
  CDS Start-End: 239-2500
tttccattctggctgggaagggctggggctccactcagcctggagaccgaagcgcttcactgagcgctcgccgccgcccagcctctcctctcgcgcctcctagctcttcgcagagcaaccaggagccaggagtggtctagagcccgagggtgggaagggggagtctgtctggcttttctcctatcttgcttctttttcctcttcccttcccactcttgttcaagcgagtgtgtgagctatggagcgaagagcctggagtctgcagtgcactgctttcgtcctcttttgcgcttggtgtgcactgaacagtgcaaaagcgaaaaggcaatttgtcaatgaatgggcagcggagatccccgggggcccggaagcagcctcggccatcgccgaggagctgggctatgaccttttgggtcagattggttcacttgaaaatcactacttattcaaacataaaaaccaccccagaaggtctcgaaggagtgcctttcatatcactaagagattatctgatgatgatcgtgtgatatgggctgaacaacagtatgaaaaagaaagaagtaaacgttcagctctaagggactcagcactaaatctcttcaatgatcccatgtggaatcagcaatggtacttgcaagataccaggatgacggcagccctgcccaagctggaccttcatgtgatacctgtttggcaaaaaggcattacgggcaaaggagttgttatcaccgtactggatgatggtttggagtggaatcacacggacatttatgccaactatgatccagaggctagctatgattttaatgataatgaccatgatccatttccccgatatgatcccacaaacgagaacaaacacgggaccagatgtgcaggagaaattgccatgcaagcaaataatcacaaatgcggggttggagttgcatacaattccaaagttggaggcataagaatgctggatggcattgtgacggatgctattgaggccagttcaattggattcaatcctggacacgtggatatttacagtgcaagctggggccctaatgatgatgggaaaactgtggaggggcctggccggctagcccagaaggcttttgaatatggtgtcaaacaggggagacaggggaaggggtccatcttcgtctgggcttcgggaaacggggggcgtcagggagataattgtgactgtgatggctacacagacagcatctacaccatctccatcagcagtgcctcccagcaaggcctatccccctggtacgctgagaagtgctcctccacactggccacctcttacagcagcggagattacaccgaccagagaatcacgagcgctgacctgcacaatgactgcacggagacgcacacaggcacctcggcctctgcacctctggctgctggcatcttcgctctggccctggaagcaaacccaaatctcacctggcgagatatgcagcacctggttgtctggacctctgagtatgacccgctggccaataaccctggatggaaaaagaatggagcaggcttgatggtgaatagtcgatttggatttggcttgctaaatgccaaagctctggtggatttagctgaccccaggacctggaggagcgtgcctgagaagaaagagtgtgttgtaaaggacaatgactttgagcccagagccctgaaagctaatggagaagttatcattgaaattccaacaagagcttgtgaaggacaagaaaatgctatcaagtccctggagcatgtacaatttgaagcaacaattgaatattcccgaagaggagaccttcatgtcacacttacttctgctgctggaactagcactgtgctcttggctgaaagagaacgggatacatctcctaatggctttaagaattgggacttcatgtctgttcacacatggggagagaaccctataggtacttggactttgagaattacagacatgtctggaagaattcaaaatgaaggaagaattgtgaactggaagctgattttgcacgggacctcttctcagccagagcatatgaagcagcctcgtgtgtacacgtcctacaacactgttcagaatgacagaagaggggtggagaagatggtggatccaggggaggagcagcccacacaagagaaccctaaggagaacaccctggtgtccaaaagccccagcagcagcagcgtagggggccggagggatgagttggaggagggagccccttcccaggccatgctgcgactcctgcaaagtgctttcagtaaaaactcaccgccaaagcaatcaccaaagaagtccccaagtgcaaagctcaacatcccttatgaaaacttctacgaagccctggaaaagctgaacaaaccttcccagcttaaagactctgaagacagtctgtataatgactatgttgatgttttttataacactaaaccttacaagcacagagacgaccggctgcttcaagctctggtggacattctgaatgaggaaaattaaaataagtgtgtggtcccaagttggaaatattcatgcttcttccttaccctgcgattttgcctgtgtctgaagtggttgttttgtcatgaattcttatgcttataatatcctttgtggcaccttttctttttctccctaaactgtacatgtgaaggggatgagctcaagcaggaagttcaacttccagaattgatcataggtatttcaaaacacatctttcctgtctgcacaagtgaagtgttttgttctttctggagtcacagttgacaaaaagctcttacactacattagaacactgcattagagcccatttcaattctcaaaagaaaaggcaaaacctgggatatcaattaatttgaaaacataatctgcaaagaatgagaaggagtcagaaactgtttctgtagcttgttccctgtcttgtccatgtggttcttcaaattttgatgccaagaaagtatttggtaggcctaatgaaggagttcactgtaagactcattccctagatctttctattccaaagtgccactcattcctgtagtcaaaatctggtcatgttggtcaaaagctggattatttagatctagaaacagatcttgaaatctgaatgctctggtttgagcaattttcgaacattctttgcctggtgcactgtgtctgtggtgccagaggcgtccgtggatccagaggtggttatgactcgtgctgcatgcctggtctttcctctgtttctccttctgaaagttttctatacctgtctcctttctcagccacaaaataaatgttgggagaaatgatatataccactttcccagaaaaaaaaaaacttacacttgggacttggcaaattcctagtcacaatttttttcagcagtaacaggaaaccacttatcacatggagacctaatgtaataatagaaaaatactcataatagggagaaaccaagagaagttttgtttttgtttttttccaactgtgttcattagaacagcgtgttctaagtatttgaaactgaatgtttattccttgatactaaaagttcttctccaatcctatcactgatagtgtccaaattctcaccaaattgctcctaagcttcaaatcagaagcagaaactggcaggccatggaccttaattgtccctcaggtagattttgtttggtatgcagaatgtttttaaaatatgagtggttattgaaaatatgatgtttcacataaaacctcattctcggacccatctttgctcatggcaacagttagctggagctgagtagcagctgcctgattagatgactctcagtccccatggcaccctgctccatgttacctagagcaggcacttgattccttgctgggcagtatccaataggcatttgattttgcccactcctacactaagcgaatgtgtacaaagtgtaaatgcattaggaaaaacaaactacccgcatcttctgttaggcaggatctgtacaataataattatgagtttgcttatgtaatctcacctcacctggatgatcactaatactaattcatttattactaaccttctggcttccttctctcaatatgcttacaaagtctccagtcacctacaatgctggctttctcccactgagtttgctgtttgcaatttttccatgaagtttgaacttcataaggtaattcatggcattgaactggttcatgaaaagaacactagagtctgtcatttgctttggcttgaagtatggttggtaacacaaattttcacctgctcttctaccatttgaatttgtgtagagggtgtttgcagagcaatgcccgtaatgcttagagaatgttctcctaaaagacttgcggaatcactctgtccttggaagtttcatatattgtttgatatgaagtgttagatagaatttccaatattggagcatatcaaaaagtattaaaactaaaaaggaccagagaattcttagattggcccggaaaggccaataaagagttagaatgaaaactcattacttttccattcccaatctagtgctagatgtataaatctttcttttgattcttcctaacaaaatattttctgggttaaaaccccagccaactcattgggttgtagccaaaggttcactctcaagaagctttaatatttaaataaaatcatattgaatgtttccaacctggagtataatattcagatataaaacagttttgtcagtctttcttagtgcctgtgtggatttttgtgaaaatgtcaaagagaaaacttatatactatttcccttgaaattttaaactatattttctttacaggtatttataatataccaatgcttttatcaaacagaattttaaagagcataataaattatattaaagaaccaaaagttttcctgagaataagaaagtttcacccaataaaatatttttgaaaggcatgttcctctgtcaatgaaaaaaagtacatgtatgtgttgtgatattaaaagtgacatttgtctaatagcctaatacaacatgtagctgagtttaacatgtgtggtcttggtattcttaagggaacttccacattatacatttgatgtattgaccagaat

SEQ ID NO: 169846 - DNA, 2234 bp, Homo sapiens
  Payload ID: 13432
  Gene Symbol: PCSK1
  Gene Name: proprotein convertase subtilisin/kexin type 1
  Uniprot ID: P29120
  ENST ID: ENST00000508626
  CDS Start-End: 40-2160
cggccagtcccactgcagggtcgagatgccgaactgactatggggaagggatctatttctttcttgttcttcagccaaattggttcacttgaaaatcactacttattcaaacataaaaaccaccccagaaggtctcgaaggagtgcctttcatatcactaagagattatctgatgatgatcgtgtgatatgggctgaacaacagtatgaaaaagaaagaagtaaacgttcagctctaagggactcagcactaaatctcttcaatgatcccatgtggaatcagcaatggtacttgcaagataccaggatgacggcagccctgcccaagctggaccttcatgtgatacctgtttggcaaaaaggcattacgggcaaaggagttgttatcaccgtactggatgatggtttggagtggaatcacacggacatttatgccaactatgatccagaggctagctatgattttaatgataatgaccatgatccatttccccgatatgatcccacaaacgagaacaaacacgggaccagatgtgcaggagaaattgccatgcaagcaaataatcacaaatgcggggttggagttgcatacaattccaaagttggaggcataagaatgctggatggcattgtgacggatgctattgaggccagttcaattggattcaatcctggacacgtggatatttacagtgcaagctggggccctaatgatgatgggaaaactgtggaggggcctggccggctagcccagaaggcttttgaatatggtgtcaaacaggggagacaggggaaggggtccatcttcgtctgggcttcgggaaacggggggcgtcagggagataattgtgactgtgatggctacacagacagcatctacaccatctccatcagcagtgcctcccagcaaggcctatccccctggtacgctgagaagtgctcctccacactggccacctcttacagcagcggagattacaccgaccagagaatcacgagcgctgacctgcacaatgactgcacggagacgcacacaggcacctcggcctctgcacctctggctgctggcatcttcgctctggccctggaagcaaacccaaatctcacctggcgagatatgcagcacctggttgtctggacctctgagtatgacccgctggccaataaccctggatggaaaaagaatggagcaggcttgatggtgaatagtcgatttggatttggcttgctaaatgccaaagctctggtggatttagctgaccccaggacctggaggagcgtgcctgagaagaaagagtgtgttgtaaaggacaatgactttgagcccagagccctgaaagctaatggagaagttatcattgaaattccaacaagagcttgtgaaggacaagaaaatgctatcaagtccctggagcatgtacaatttgaagcaacaattgaatattcccgaagaggagaccttcatgtcacacttacttctgctgctggaactagcactgtgctcttggctgaaagagaacgggatacatctcctaatggctttaagaattgggacttcatgtctgttcacacatggggagagaaccctataggtacttggactttgagaattacagacatgtctggaagaattcaaaatgaaggaagaattgtgaactggaagctgattttgcacgggacctcttctcagccagagcatatgaagcagcctcgtgtgtacacgtcctacaacactgttcagaatgacagaagaggggtggagaagatggtggatccaggggaggagcagcccacacaagagaaccctaaggagaacaccctggtgtccaaaagccccagcagcagcagcgtagggggccggagggatgagttggaggagggagccccttcccaggccatgctgcgactcctgcaaagtgctttcagtaaaaactcaccgccaaagcaatcaccaaagaagtccccaagtgcaaagctcaacatcccttatgaaaacttctacgaagccctggaaaagctgaacaaaccttcccagcttaaagactctgaagacagtctgtataatgactatgttgatgttttttataacactaaaccttacaagcacagagacgaccggctgcttcaagctctggtggacattctgaatgaggaaaattaaaataagtgtgtggtcccaagttggaaatattcatgcttcttccttaccctgcgattttgcctgtgtctgaagtg

SEQ ID NO: 169847 - DNA, 565 bp, Homo sapiens
  Payload ID: 13432
  Gene Symbol: PCSK1
  Gene Name: proprotein convertase subtilisin/kexin type 1
  ENST ID: ENST00000509190
  CDS Start-End: 93-565
ttttatgggaaagtaatggcacagctccagctcagcaccaaagtgaagagctctactgaggcacaatggaaagtcgagcgagtgtgtgagctatggagcgaagagcctggagtctgcagtgcactgctttcgtcctcttttgcgcttggtgtgcactgaacagtgcaaaagcgaaaaggcaatttgtcaatgaatgggcagcggagatccccgggggcccggaagcagcctcggccatcgccgaggagctgggctatgaccttttgggtcagattggttcacttgaaaatcactacttattcaaacataaaaaccaccccagaaggtctcgaaggagtgcctttcatatcactaagagattatctgatgatgatcgtgtgatatgggctgaacaacagtatgaaaaagaaagaagtaaacgttcagctctaagggactcagcactaaatctcttcaatgatcccatgtggaatcagcaatggtacttgcaagataccaggatgacggcagccctgcccaagctggaccttcatgtgatacctgtttggcaaaaaggcattacggg

SEQ ID NO: 169848 - DNA, 1050 bp, Homo sapiens
  Payload ID: 13433
  Gene Symbol: PCSK1N
  Gene Name: proprotein convertase subtilisin/kexin type 1 inhibitor
  Uniprot ID: Q9UHG2
  ENST ID: ENST00000218230
  CDS Start-End: 102-884
ggcgtgcgcagccgcagagcgccgcagcctcgccagctcgccccggcactgcgcacttgccagccagtccgcccgtccggagcccggctcgctggggcagcatggcggggtcgccgctgctctgggggccgcgggccgggggcgtcggccttttggtgctgctgctgctcggcctgtttcggccgccccccgcgctctgcgcgcggccggtaaaggagccccgcggcctaagcgcagcgtctccgcccttggctgagactggcgctcctcgccgcttccggcggtcagtgccccgaggtgaggcggcgggggcggtgcaggagctggcgcgggcgctggcgcatctgctggaggccgaacgtcaggagcgggcgcgggccgaggcgcaggaggctgaggatcagcaggcgcgcgtcctggcgcagctgctgcgcgtctggggcgccccccgcaactctgatccggctctgggcctggacgacgaccccgacgcgcctgcagcgcagctcgctcgcgctctgctccgcgcccgccttgaccctgccgccctagcagcccagcttgtccccgcgcccgtccccgccgcggcgctccgaccccggcccccggtctacgacgacggccccgcgggcccggatgctgaggaggcaggcgacgagacacccgacgtggaccccgagctgttgaggtacttgctgggacggattcttgcgggaagcgcggactccgagggggtggcagccccgcgccgcctccgccgtgccgccgaccacgatgtgggctctgagctgccccctgagggcgtgctgggggcgctgctgcgtgtgaaacgcctagagaccccggcgccccaggtgcctgcacgccgcctcttgccaccctgagcactgcccggatcccgtgcaccctgggacccagaagtgcccccgccatcccgccaccaggactgctccccgccagcacgtccagagcaacttaccccggccagccagccctctcacccgaggatccctaccccctggccccacaataaacatgatctgaagcagc

SEQ ID NO: 169849 - DNA, 4740 bp, Homo sapiens
  Payload ID: 13434
  Gene Symbol: PCSK2
  Gene Name: proprotein convertase subtilisin/kexin type 2
  Uniprot ID: P16519
  ENST ID: ENST00000262545
  CDS Start-End: 316-2232
gaggaggagctgaaaatgcagatttagcatcaagcacagacctacactcgctctttctctccggtacacacagctccccacattcgcacccctgcccgcgcgccgggccgcctgactgcacggcttcccctccagccagatgctggagaacacacactgattcgctgctttccaagaccctgttcagtctctttctctatacaaagatttttttaaaaactatatataagaattctttatttgcaccctccctccgagtcccctgctccgccagcctgcgcgcctcctagcaccacttttcactcccaaagaaggatgaagggtggttgtgtctcccagtggaaggcggccgccgggttcctcttctgtgtcatggtttttgcatctgctgagcgaccggtcttcacgaatcattttcttgtggagttgcataaagggggagaggacaaagctcgccaagttgcagcagaacacggctttggagtccgaaagcttccctttgctgaaggtctgtaccacttttatcacaatggccttgcaaaggccaagagaagacgcagcctacaccacaagcagcagctggagagagaccccagggtaaagatggctttgcagcaggaaggatttgaccgaaaaaagcgaggttacagagacatcaatgagatcgacatcaacatgaacgatcctctttttacaaagcagtggtatctgatcaatactgggcaagctgatggcactcctggccttgatttgaatgtggctgaagcctgggagctgggatacacagggaaaggtgttaccattggaattatggatgatgggattgactatctccacccggacctggcctccaactataatgccgaagcaagttacgacttcagcagcaacgacccctatccttaccctcggtacacagatgactggtttaacagccacgggacccgatgtgcaggagaagtttctgctgccgccaacaacaatatctgtggagttggagtagcatacaactccaaggttgcaggcatccggatgctggaccagccattcatgacagacatcatcgaggcctcctccatcagtcatatgccacagctgattgacatctacagcgccagctggggccccacagacaacggcaagacagtggatgggccccgggagctcacgctgcaggccatggccgatggcgtgaacaagggccgcggcggcaaaggcagcatctacgtgtgggcctccggggacggcggcagctatgacgactgcaactgcgacggctacgcctccagcatgtggaccatctccatcaactcagccatcaacgacggcaggactgccctgtacgacgagagctgctcttccaccttggcttccaccttcagcaacgggaggaaaaggaaccccgaggccggtgtggcaaccacagatttgtacggcaactgcactctgaggcattctgggacatctgcagctgcccccgaggcagctggtgtgtttgcactggctctggaggctaacctgggtctgacctggcgggacatgcagcatctgactgtgctcacctccaaacggaaccagcttcacgacgaggtccatcagtggcggcgcaatggggtcggcctggaatttaatcacctctttggctacggggtccttgatgcaggtgccatggtgaaaatggctaaagactggaaaaccgtgcctgagagattccactgtgtgggaggctccgtgcaggaccctgagaaaataccatccactggcaagttggtgctgacactcacaaccgacgcctgtgaggggaaggaaaattttgtccgctacctggagcatgtccaggctgtcatcacggtcaacgcaaccagaagaggagacctgaacatcaacatgacttcccctatgggcaccaagtccattttgctgagccggcgtccaagggatgacgactccaaggtgggctttgacaagtggcctttcatgaccactcacacgtggggggaagacgcccgaggcacctggaccctggagctgggatttgtcggcagcgccccgcagaagggggtgctgaaggagtggaccctgatgctgcatggcactcagagtgccccgtacatcgaccaggtggtgcgggattaccagtccaagttggccatgtccaagaaagaggagctggaggaagagctggacgaagccgtggagagaagcctgaaaagcatccttaacaagaactagcgctgcacatccgcctttcccaccgccctccctccccagctccgcctctgtcctcgctccacgtttcaggcaggcacctagcaattccatcacccgtacaggcaattccgtcttcttaatctgaagcttcactcactgtcaatgattattttcattacaatggaaacaatcttttttactctatgccccaaatatagcgttcccaacaacatccatgtcctatgtgtgactctaaattctttatttctgtcattcaaatgggtgatatcctgaaaaaaaaaaaaaaaaaaaaactgggacagctttcccctcatttttttttttgtttctgagaaaagaacgtattttaaaagccacatagagtgactccaagaacaattgtccatggtctcaaacaaggggctgttacataacaagaaaatcaaagctgaggacagggtgtgagcgccacatctctgaaagcacaggagacactgtgctataaatcctttggggagcgatgttttgaatttagtgagatttaccagggatgtagattaaggtgatgtgattcaaaagatgccattcatagagagccctagttactgcatggggaaagagatccaggaagcatgagtgctggatattttactaccaatgccaagataattcactctactcagccggcgtggcaaatataaaacttacagagcgtggctgtgctctcaccagctgctgctctgagttatgttaaaatccgctagagcagcccaaatttttctcagtttgtatagagttcatcccagccccaattttctggggctcctcacatagctacccaaaagagaaaaaaaattaagacaagcctggcaacacacctggtgaagagtagtttactagcttttcaaacaagaatgtcccttttcctaagtcactttgaggtgtctcaatctgatctgagtgagaggcgacaggagtatttttttttttttacagctttacacacacagatgtgggctttgatttccaagtaatataatggaagagaaatctcatactcccccacagtttgatgtcattaatgtgttgggaaaaaggcctctgtcccggaagagtcatgggaggtgaaaggggcacgtttgaagatgcgagcgctatcttcacatagttctccagttgtatggagcctcttctgccaagagagggccatgcaattcatcccagaggaacctgaggcctgaaggaggtgagagaagacctctgtgaggaaagcacacagtcaccttctcggcaactaagcagtccctgagaccatttaacatgcaacccgaaggttatggtcaatcccaaaagtcaccactccattcccaactagacattaccaaagtgacctacccagagattgcttctcatccccagtcccaatgcacatccattcccaagaaatgctttgtcttcagcctctccaggcaccatctcccttcctgtgggagcagagagcttagcctggagcacctttccttcaagccagcaacacagagcactaggttcaattccctgaaggtggccactttaagagagaaatctgaaaaccccatttgctttcttttctcccatattggcatggatttctgtcttctctaacaccttgtgaccttctctatatcatgctttaaagtgtaataatatgattttttaaaagaaatttattacttgttgcaaaggtctttttaaaccagtttagatttcaagaaaaaataaatggaaatcatcgaaaattcatttcacattaatggtctaaaaataaaccaaaggacattatgtgtgcatgtgtgtataagtgcacacagaaatatatatacatatgtagactatatacatgtgtgtatatatgtgtatatatacatacacttgtataaatgtatatacacatatacctataatgtgtgtatgtgtatttattgaagaaacagataccatactcatttctaaaagaatattcagagaatatcaagatgattctggctgaaaaaggccagtggaaattcaggtgaaaatgttcatcaattcccattgcatcacctctgtaatttttcagctctctgtataaacattaaatgtcttatatagcagcaaaaatataaaatagttgtccatattttcacaggtgtggtgtaatttataaaattagaaagcaacttatcagctacttaagagaaatggcaagttttgatatgagtatacaatatataaaaatatatatagtgctatatatataaatatttggtctctatttcattttttgcatcagtattaatactaaaatatgtctcgctagtgatgtttttatgatatccctgatcctaactgaagagacagttatttatagtcatttattttaaaaaatgaaaataagtgaataataattaggttaacattgttgctccctgtgacaaaattttataagcaaatttcaaaagacatgttgtaaattaggaggctcaacaataaaacattatgctccagaaa

SEQ ID NO: 169850 - DNA, 4674 bp, Homo sapiens
  Payload ID: 13434
  Gene Symbol: PCSK2
  Gene Name: proprotein convertase subtilisin/kexin type 2
  Uniprot ID: P16519
  ENST ID: ENST00000377899
  CDS Start-End: 307-2166
aactagcaccctcgctgtccttgtgcagtggaacgtccccaggtctgagaatgcacctcccgccgtgtccaccccggccgcgtctctcctgaaggcagatcttggaggtgcagccaggactcctagaggagcctcctccagtcaccatcgcgggtggggcgagccgggtctcctgctgggcttcccagccgcttcgctccggacctgcctggagcctacaaaaaacaagggctcgtccttgcactctcgccccccatggatcacccctagaagtggaaggcggccgccgggttcctcttctgtgtcatggtttttgcatctgctgagcgaccggtcttcacgaatcattttcttgtggagttgcataaagggggagaggacaaagctcgccaagttgcagcagaacacggctttggagtccgaaagcttccctttgctgaaggtctgtaccacttttatcacaatggccttgcaaaggccaagagaagacgcagcctacaccacaagcagcagctggagagagaccccagggtaaagatggctttgcagcaggaaggatttgaccgaaaaaagcgaggttacagagacatcaatgagatcgacatcaacatgaacgatcctctttttacaaagcagtggtatctgatcaatactgggcaagctgatggcactcctggccttgatttgaatgtggctgaagcctgggagctgggatacacagggaaaggtgttaccattggaattatggatgatgggattgactatctccacccggacctggcctccaactataatgccgaagcaagttacgacttcagcagcaacgacccctatccttaccctcggtacacagatgactggtttaacagccacgggacccgatgtgcaggagaagtttctgctgccgccaacaacaatatctgtggagttggagtagcatacaactccaaggttgcaggcatccggatgctggaccagccattcatgacagacatcatcgaggcctcctccatcagtcatatgccacagctgattgacatctacagcgccagctggggccccacagacaacggcaagacagtggatgggccccgggagctcacgctgcaggccatggccgatggcgtgaacaagggccgcggcggcaaaggcagcatctacgtgtgggcctccggggacggcggcagctatgacgactgcaactgcgacggctacgcctccagcatgtggaccatctccatcaactcagccatcaacgacggcaggactgccctgtacgacgagagctgctcttccaccttggcttccaccttcagcaacgggaggaaaaggaaccccgaggccggtgtggcaaccacagatttgtacggcaactgcactctgaggcattctgggacatctgcagctgcccccgaggcagctggtgtgtttgcactggctctggaggctaacctgggtctgacctggcgggacatgcagcatctgactgtgctcacctccaaacggaaccagcttcacgacgaggtccatcagtggcggcgcaatggggtcggcctggaatttaatcacctctttggctacggggtccttgatgcaggtgccatggtgaaaatggctaaagactggaaaaccgtgcctgagagattccactgtgtgggaggctccgtgcaggaccctgagaaaataccatccactggcaagttggtgctgacactcacaaccgacgcctgtgaggggaaggaaaattttgtccgctacctggagcatgtccaggctgtcatcacggtcaacgcaaccagaagaggagacctgaacatcaacatgacttcccctatgggcaccaagtccattttgctgagccggcgtccaagggatgacgactccaaggtgggctttgacaagtggcctttcatgaccactcacacgtggggggaagacgcccgaggcacctggaccctggagctgggatttgtcggcagcgccccgcagaagggggtgctgaaggagtggaccctgatgctgcatggcactcagagtgccccgtacatcgaccaggtggtgcgggattaccagtccaagttggccatgtccaagaaagaggagctggaggaagagctggacgaagccgtggagagaagcctgaaaagcatccttaacaagaactagcgctgcacatccgcctttcccaccgccctccctccccagctccgcctctgtcctcgctccacgtttcaggcaggcacctagcaattccatcacccgtacaggcaattccgtcttcttaatctgaagcttcactcactgtcaatgattattttcattacaatggaaacaatcttttttactctatgccccaaatatagcgttcccaacaacatccatgtcctatgtgtgactctaaattctttatttctgtcattcaaatgggtgatatcctgaaaaaaaaaaaaaaaaaaaaactgggacagctttcccctcatttttttttttgtttctgagaaaagaacgtattttaaaagccacatagagtgactccaagaacaattgtccatggtctcaaacaaggggctgttacataacaagaaaatcaaagctgaggacagggtgtgagcgccacatctctgaaagcacaggagacactgtgctataaatcctttggggagcgatgttttgaatttagtgagatttaccagggatgtagattaaggtgatgtgattcaaaagatgccattcatagagagccctagttactgcatggggaaagagatccaggaagcatgagtgctggatattttactaccaatgccaagataattcactctactcagccggcgtggcaaatataaaacttacagagcgtggctgtgctctcaccagctgctgctctgagttatgttaaaatccgctagagcagcccaaatttttctcagtttgtatagagttcatcccagccccaattttctggggctcctcacatagctacccaaaagagaaaaaaaattaagacaagcctggcaacacacctggtgaagagtagtttactagcttttcaaacaagaatgtcccttttcctaagtcactttgaggtgtctcaatctgatctgagtgagaggcgacaggagtatttttttttttttacagctttacacacacagatgtgggctttgatttccaagtaatataatggaagagaaatctcatactcccccacagtttgatgtcattaatgtgttgggaaaaaggcctctgtcccggaagagtcatgggaggtgaaaggggcacgtttgaagatgcgagcgctatcttcacatagttctccagttgtatggagcctcttctgccaagagagggccatgcaattcatcccagaggaacctgaggcctgaaggaggtgagagaagacctctgtgaggaaagcacacagtcaccttctcggcaactaagcagtccctgagaccatttaacatgcaacccgaaggttatggtcaatcccaaaagtcaccactccattcccaactagacattaccaaagtgacctacccagagattgcttctcatccccagtcccaatgcacatccattcccaagaaatgctttgtcttcagcctctccaggcaccatctcccttcctgtgggagcagagagcttagcctggagcacctttccttcaagccagcaacacagagcactaggttcaattccctgaaggtggccactttaagagagaaatctgaaaaccccatttgctttcttttctcccatattggcatggatttctgtcttctctaacaccttgtgaccttctctatatcatgctttaaagtgtaataatatgattttttaaaagaaatttattacttgttgcaaaggtctttttaaaccagtttagatttcaagaaaaaataaatggaaatcatcgaaaattcatttcacattaatggtctaaaaataaaccaaaggacattatgtgtgcatgtgtgtataagtgcacacagaaatatatatacatatgtagactatatacatgtgtgtatatatgtgtatatatacatacacttgtataaatgtatatacacatatacctataatgtgtgtatgtgtatttattgaagaaacagataccatactcatttctaaaagaatattcagagaatatcaagatgattctggctgaaaaaggccagtggaaattcaggtgaaaatgttcatcaattcccattgcatcacctctgtaatttttcagctctctgtataaacattaaatgtcttatatagcagcaaaaatataaaatagttgtccatattttcacaggtgtggtgtaatttataaaattagaaagcaacttatcagctacttaagagaaatggcaagttttgatatgagtatacaatatataaaaatatatatagtgctatatatataaatatttggtctctatttcattttttgcatcagtattaatactaaaatatgtctcgctagtgatgtttttatgatatccctgatcctaactgaagagacagttatttatagtcatttattttaaaaaatgaaaataagtgaataataattaggttaacattgttgctccctgtgacaaaattttataagcaaatttcaaaagacatgttgtaaattaggaggctcaacaataaaacattatgctccagaaa

SEQ ID NO: 169851 - DNA, 2275 bp, Homo sapiens
  Payload ID: 13434
  Gene Symbol: PCSK2
  Gene Name: proprotein convertase subtilisin/kexin type 2
  Uniprot ID: P16519
  ENST ID: ENST00000536609
  CDS Start-End: 251-2062
acacacagctccccacattcgcacccctgcccgcgcgccgggccgcctgactgcacggcttcccctccagccagatgctggagaacacacactgattcgctgctttccaagaccctgttcagtctctttctctatacaaagatttttttaaaaactatatataagaattctttatttgcaccctccctccgagtcccctgctccgccagcctgcgcgcctcctagcaccacttttcactcccaaagaaggatgaagggtggttgtgtctcccagtggaaggcggccgccgggttcctcttctgtgtcatggtttttgcatctgctgagcgaccggtcttcacgaatcattttcttgtggagttgcataaagggggagaggacaaagctcgccaagttgcagcagaacacggctttggagtccgaaaggtaaagatggctttgcagcaggaaggatttgaccgaaaaaagcgaggttacagagacatcaatgagatcgacatcaacatgaacgatcctctttttacaaagcagtggtatctgatcaatactgggcaagctgatggcactcctggccttgatttgaatgtggctgaagcctgggagctgggatacacagggaaaggtgttaccattggaattatggatgatgggattgactatctccacccggacctggcctccaactataatgccgaagcaagttacgacttcagcagcaacgacccctatccttaccctcggtacacagatgactggtttaacagccacgggacccgatgtgcaggagaagtttctgctgccgccaacaacaatatctgtggagttggagtagcatacaactccaaggttgcaggcatccggatgctggaccagccattcatgacagacatcatcgaggcctcctccatcagtcatatgccacagctgattgacatctacagcgccagctggggccccacagacaacggcaagacagtggatgggccccgggagctcacgctgcaggccatggccgatggcgtgaacaagggccgcggcggcaaaggcagcatctacgtgtgggcctccggggacggcggcagctatgacgactgcaactgcgacggctacgcctccagcatgtggaccatctccatcaactcagccatcaacgacggcaggactgccctgtacgacgagagctgctcttccaccttggcttccaccttcagcaacgggaggaaaaggaaccccgaggccggtgtggcaaccacagatttgtacggcaactgcactctgaggcattctgggacatctgcagctgcccccgaggcagctggtgtgtttgcactggctctggaggctaacctgggtctgacctggcgggacatgcagcatctgactgtgctcacctccaaacggaaccagcttcacgacgaggtccatcagtggcggcgcaatggggtcggcctggaatttaatcacctctttggctacggggtccttgatgcaggtgccatggtgaaaatggctaaagactggaaaaccgtgcctgagagattccactgtgtgggaggctccgtgcaggaccctgagaaaataccatccactggcaagttggtgctgacactcacaaccgacgcctgtgaggggaaggaaaattttgtccgctacctggagcatgtccaggctgtcatcacggtcaacgcaaccagaagaggagacctgaacatcaacatgacttcccctatgggcaccaagtccattttgctgagccggcgtccaagggatgacgactccaaggtgggctttgacaagtggcctttcatgaccactcacacgtggggggaagacgcccgaggcacctggaccctggagctgggatttgtcggcagcgccccgcagaagggggtgctgaaggagtggaccctgatgctgcatggcactcagagtgccccgtacatcgaccaggtggtgcgggattaccagtccaagttggccatgtccaagaaagaggagctggaggaagagctggacgaagccgtggagagaagcctgaaaagcatccttaacaagaactagcgctgcacatccgcctttcccaccgccctccctccccagctccgcctctgtcctcgctccacgtttcaggcaggcacctagcaattccatcacccgtacaggcaattccgtcttcttaatctgaagcttcactcactgtcaatgattattttcattacaatggaaacaatcttttttactctatgccccaaatatagcgttcccaacaacatc

SEQ ID NO: 169852 - DNA, 2661 bp, Homo sapiens
  Payload ID: 13435
  Gene Symbol: PCSK4
  Gene Name: proprotein convertase subtilisin/kexin type 4
  Uniprot ID: Q6UW60
  ENST ID: ENST00000300954
  CDS Start-End: 63-2330
cccactcggcggtttggcgggagggaggggatttgcgcaggccccgctcccgccccgcctccatgcggcccgccccgattgcgctgtggctgcgcctggtcttggccctggcccttgtccgcccccgggctgtggggtgggccccggtccgagcccccatctatgtcagcagctgggccgtccaggtgtcccagggtaaccgggaggtcgagcgcctggcacgcaaattcggcttcgtcaacctggggccgatcttccctgacgggcagtactttcacctgcggcaccggggcgtggtccagcagtccctgaccccgcactggggccaccgcctgcacctgaagaaaaaccccaaggtgcagtggttccagcagcagacgctgcagcggcgggtgaaacgctctgtcgtggtgcccacggacccctggttctccaagcagtggtacatgaacagcgaggcccaaccagacctgagcatcctgcaggcctggagtcaggggctgtcaggccagggcatcgtggtctctgtgctggacgatggcatcgagaaggaccacccggacctctgggccaactacgaccccctggccagctatgacttcaatgactacgacccggacccccagccccgctacacccccagcaaagagaaccggcacgggacccgctgtgctggggaggtggccgcgatggccaacaatggcttctgtggtgtgggggtcgctttcaacgcccgaatcggaggcgtacggatgctggacggtaccatcaccgatgtcatcgaggcccagtcgctgagcctgcagccgcagcacatccacatttacagcgccagctggggtcccgaggacgacggccgcacggtggacggccccggcatcctcacccgcgaggccttccggcgtggtgtgaccaagggccgcggcgggctgggcacgctcttcatctgggcctcgggcaacggcggcctgcactacgacaactgcaactgcgacggctacaccaacagcatccacacgctttccgtgggcagcaccacccagcagggccgcgtgccctggtacagcgaagcctgcgcctccaccctcaccaccacctacagcagcggcgtggccaccgacccccagatcgtcaccacggacctgcatcacgggtgcacagaccagcacacgggcacctcggcctcagccccactggcggccggcatgatcgccctagcgctggaggccaacccgttcctgacgtggagagacatgcagcacctggtggtccgcgcgtccaagccggcgcacctgcaggccgaggactggaggaccaacggcgtggggcgccaagtgagccatcactacggatacgggctgctggacgccgggctgctggtggacaccgcccgcacctggctgcccacccagccgcagaggaagtgcgccgtccgggtccagagccgccccacccccatcctgccgctgatctacatcagggaaaacgtatcggcctgcgccggcctccacaactccatccgctcgctggagcacgtgcaggcgcagctgacgctgtcctacagccggcgcggagacctggagatctcgctcaccagccccatgggcacgcgctccacactcgtggccatacgacccttggacgtcagcactgaaggctacaacaactgggtcttcatgtccacccacttctgggatgagaacccacagggcgtgtggaccctgggcctagagaacaagggctactatttcaacacggggacgttgtaccgctacacgctgctgctctatgggacggccgaggacatgacagcgcggcctacaggcccccaggtgaccagcagcgcgtgtgtgcagcgggacacagaggggctgtgccaggcgtgtgacggccccgcctacatcctgggacagctctgcctggcctactgccccccgcggttcttcaaccacacaaggctggtgaccgctgggcctgggcacacggcggcgcccgcgctgagggtctgctccagctgccatgcctcctgctacacctgccgcggcggctccccgagggactgcacctcctgtcccccatcctccacgctggaccagcagcagggctcctgcatgggacccaccacccccgacagccgcccccggcttagagctgccgcctgtccccaccaccgctgcccagcctcggccatggtgctgagcctcctggccgtgaccctcggaggccccgtcctctgcggcatgtccatggacctcccactatacgcctggctctcccgtgccagggccacccccaccaaaccccaggtctggctgccagctggaacctgaagttgtcagctcagaaagcgaccttgcccccgcctgggtccctgacaggcactgctgccatgctgcctccccaggctggccccagaggagcgagcaccagcacccgacgcctggcctgccagggatgggccccgtggaaccccgaagcctggcgggagagagagagagagaagtctcctctgcattttgggtttgggcgggagtgggctggggggagaggctggagcaccccaaaagccaggggaaagtggagggagagaaacgtgacactgtccgcctcgggcaccgcgtccaacctcagagtttgcaaataaaggttgcttagaaggtg

SEQ ID NO: 169853 - DNA, 2358 bp, Homo sapiens
  Payload ID: 13435
  Gene Symbol: PCSK4
  Gene Name: proprotein convertase subtilisin/kexin type 4
  ENST ID: ENST00000591201
  CDS Start-End: 1-955
cccgattgcgctgtggctgcgcctggtcttggccctggcccttgtccgcccccgggctgtggggtgggccccggtccgagcccccatctatgtcagcagctgggccgtccaggtgtcccagggtaaccgggaggtcgagcgcctggcacgcaaattcggcttcgtcaacctggggccgatcttccctgacgggcagtactttcacctgcggcaccggggcgtggtccagcagtccctgaccccgcactggggccaccgcctgcacctgaagaaaaaccccaaggtgcagtggttccagcagcagacgctgcagcggcgggtgaaacgctctgtcgtggtgcccacggacccctggttctccaagcagtggtacatgaacagcgaggcccaaccagacctgagcatcctgcaggcctggagtcaggggctgtcaggccagggcatcgtggtctctgtgctggacgatggcatcgagaaggaccacccggacctctgggccaactacgaccccctggccagctatgacttcaatgactacgacccggacccccagccccgctacacccccagcaaagagaaccggcgtacggatgctggacggtaccatcaccgatgtcatcgaggcccagtcgctgagcctgcagccgcagcacatccacatttacagcgccagctggggtcccgaggacgacggccgcacggtggacggccccggcatcctcacccgcgaggccttccggcgtggtgtgaccaagcatccacacgctttccgtgggcagcaccacccagcagggccgcgtgccctggtacagcgaagcctgcgcctccaccctcaccaccacctacagcagcggcgtggccaccgacccccagatcgtcaccacggacctgcatcacgggtgcacagaccagcacacgggcacctcggcctcagccccactggcggccggcatgatcgccctagcgctggaggccaacccgttcctgacgtggagagacatgcagcacctggtggtccgcgcgtccaagccggcgcacctgcaggccgaggactggaggaccaacggcgtggggcgccaagtgagccatcactacggatacgggctgctggacgccgggctgctggtggacaccgcccgcacctggctgcccacccagccgcagaggaagtgcgccgtccgggtccagagccgccccacccccatcctgccgctgatctacatcagggaaaacgtatcggcctgcgccggcctccacaactccatccgctcgctggagcacgtgcaggcgcagctgacgctgtcctacagccggcgcggagacctggagatctcgctcaccagccccatgggcacgcgctccacactcgtggccatacgacccttggacgtcagcactgaaggctacaacaactgggtcttcatgtccacccacttctgggatgagaacccacagggcgtgtggaccctgggcctagagaacaagggctactatttcaacacggggacgttgtaccgctacacgctgctgctctatgggacggccgaggacatgacagcgcggcctacaggcccccagcgtgtgacggccccgcctacatcctgggacagctctgcctggcctactgccccccgcggttcttcaaccacacaaggctggtgaccgctgggcctgggcacacggcggcgcccgcgctgagggtctgctccagctgccatgcctcctgctacacctgccgcggcggctccccgagggactgcacctcctgtcccccatcctccacgctggaccagcagcagggctcctgcatgggacccaccacccccgacagccgcccccggcttagagctgccgcctgtccccaccaccgctgcccagcctcggccatggtgctgagcctcctggccgtgaccctcggaggccccgtcctctgcggcatgtccatggacctcccactatacgcctggctctcccgtgccagggccacccccaccaaaccccaggtctggctgccagctggaacctgaagttgtcagctcagaaagcgaccttgcccccgcctgggtccctgacaggcactgctgccatgctgcctccccaggctggccccagaggagcgagcaccagcacccgacgcctggcctgccagggatgggccccgtggaaccccgaagcctggcgggagagagagagagagaagtctcctctgcattttgggtttgggcgggagtgggctggggggagaggctggagcaccccaaaagccaggggaaagtggagggagagaaacgtgacactgtccgcctcgggcaccgcgtccaacctcagagtttgcaaataaaggttgcttagaaggtg

SEQ ID NO: 169854 - DNA, 720 bp, Homo sapiens
  Payload ID: 13435
  Gene Symbol: PCSK4
  Gene Name: proprotein convertase subtilisin/kexin type 4
  ENST ID: ENST00000588671
  CDS Start-End: 32-720
tttgcgcaggccccgctcccgccccgcctccatgcggcccgccccgattgcgctgtggctgcgcctggtcttggccctggcccttgtccgcccccgggctgtggggtgggccccggtccgagcccccatctatgtcagcagctgggccgtccaggtgtcccagggtaaccgggaggtcgagcgcctggcacgcaaattcggcttcgtcaacctggggccgatcttccctgacgggcagtactttcacctgcggcaccggggcgtggtccagcagtccctgaccccgcactggggccaccgcctgcacctgaagaaaaaccccaaggtgcagtggttccagcagcagacgctgcagcggcgggtgaaacgctctgtcgtggtgcccacggacccctggttctccaagcagtggtacatgaacagcgaggcccaaccagacctgagcatcctgcaggcctggagtcaggggctgtcaggccagggcatcgtggtctctgtgctggacgatggcatcgagaaggaccacccggacctctgggccaactacgaccccctggccagctatgacttcaatgactacgacccggacccccagccccgctacacccccagcaaagagaaccggcgtacggatgctggacggtaccatcaccgatgtcatcgaggcccagtcgctgagcctgcagccgcagcacatccacatttacagcgccagctggg

SEQ ID NO: 169855 - DNA, 5756 bp, Homo sapiens
  Payload ID: 13436
  Gene Symbol: PCSK5
  Gene Name: proprotein convertase subtilisin/kexin type 5
  Uniprot ID: Q92824
  ENST ID: ENST00000376752
  CDS Start-End: 478-3219
cggagggagcgctgggagcgagcaagcgagcgtttggagcccgggccagcagagggggcgcccggtcgctgcctgtaccgctcccgctggtcatctccgccgcgctcgggggccccgggaggagcgagaccgagtcggagagtccgggagccaagccgggcgaaacccaactgcggaggacgcccgccccactcagcctcctcctgcgtccgagccggggagcatcgccgagcgccccacgggccggagagctgggagcacaggtcccggcagccccagggatggtctaggagccggcgtaaggctcgctgctctgctccctgccggggctagccgcctcctgccgatcgcccggggctgcgagctgcggcggcccggggctgctcgccgggcggcgcaggccggagaagttagttgtgcgcgcccttagtgcgcggaaccagccagcgagcgagggagcagcgaggcgccgggaccatgggctgggggagccgctgctgctgcccgggacgtttggacctgctgtgcgtgctggcgctgctcgggggctgcctgctccccgtgtgtcggacgcgcgtctacaccaaccactgggcagtcaaaatcgccgggggcttcccggaggccaaccgtatcgccagcaagtacggattcatcaacataggacagataggggccctgaaggactactaccacttctaccatagcaggacgattaaaaggtcagttatctcgagcagagggacccacagtttcatttcaatggaaccaaaggtggaatggatccaacagcaagtggtaaaaaagcggacaaagagggattatgacttcagtcgtgcccagtctacctatttcaatgatcccaagtggcccagcatgtggtatatgcactgcagtgacaatacacatccctgccagtctgacatgaatatcgaaggagcctggaagagaggctacacgggaaagaacattgtggtcactatcctggatgacggaattgagagaacccatccagatctgatgcaaaactacgatgctctggcaagttgcgacgtgaatgggaatgacttggacccaatgcctcgttatgatgcaagcaacgagaacaagcatgggactcgctgtgctggagaagtggcagccgctgcaaacaattcgcactgcacagtcggaattgctttcaacgccaagatcggaggagtgcgaatgctggacggagatgtcacggacatggttgaagcaaaatcagttagcttcaacccccagcacgtgcacatttacagcgccagctggggcccggatgatgatggcaagactgtggacggaccagcccccctcacccggcaagcctttgaaaacggcgttagaatggggcggagaggcctcggctctgtgtttgtttgggcatctggaaatggtggaaggagcaaagaccactgctcctgtgatggctacaccaacagcatctacaccatctccatcagcagcactgcagaaagcggaaagaaaccttggtacctggaagagtgttcatccacgctggccacaacctacagcagcggggagtcctacgataagaaaatcatcactacagatctgaggcagcgttgcacggacaaccacactgggacgtcagcctcagcccccatggctgcaggcatcattgcgctggccctggaagccaatccgtttctgacctggagagacgtacagcatgttattgtcaggacttcccgtgcgggacatttgaacgctaatgactggaaaaccaatgctgctggttttaaggtgagccatctttatggatttggactgatggacgcagaagccatggtgatggaggcagagaagtggaccaccgttccccggcagcacgtgtgtgtggagagcacagaccgacaaatcaagacaatccgccctaacagtgcagtgcgctccatctacaaagcttcaggctgctcggataaccccaaccgccatgtcaactacctggagcacgtcgttgtgcgcatcaccatcacccaccccaggagaggagacctggccatctacctgacctcgccctctggaactaggtctcagcttttggccaacaggctatttgatcactccatggaaggattcaaaaactgggagttcatgaccattcattgctggggagaaagagctgctggtgactgggtccttgaagtttatgatactccctctcagctaaggaactttaagactccaggtaaattgaaagaatggtctttggtcctctacggcacctccgtgcagccatattcaccaaccaatgaatttccgaaagtggaacggttccgctatagccgagttgaagaccccacagacgactatggcacagaggattatgcaggtccctgcgaccctgagtgcagtgaggttggctgtgacgggccaggaccagaccactgcaatgactgtttgcactactactacaagctgaaaaacaataccaggatctgtgtctccagctgcccccctggccactaccacgccgacaagaagcgctgcaggaagtgtgcccccaactgtgagtcctgctttgggagccatggtgaccaatgcatgtcctgcaaatatggatactttctgaatgaagaaaccaacagctgtgttactcactgccctgatgggtcatatcaggataccaagaaaaatctttgccggaaatgcagtgaaaactgcaagacatgtactgaattccataactgtacagaatgtagggatgggttaagcctgcagggatcccggtgctctgtctcctgtgaagatggacggtatttcaacggccaggactgccagccctgccaccgcttctgcgccacttgtgctggggcaggagctgatgggtgcattaactgcacagagggctacttcatggaggatgggagatgcgtgcagagctgtagtatcagctattactttgaccactcttcagagaatggatacaaatcctgcaaaaaatgtgatatcagttgtttgacgtgcaatggcccaggattcaagaactgtacaagctgccctagtgggtatctcttagacttaggaatgtgtcaaatgggagccatttgcaaggatgcaacggaagagtcctgggcggaaggaggcttctgtatgcttgtgaaaaagaacaatctgtgccaacggaaggttcttcaacaactttgctgcaaaacatgtacatttcaaggctgagcagccatcttagatttctttgttcctgtagacttatagattattccatattattaaaaagaaaaaagccaaaaagaaaaaaaaaaaaagcaagccacctctctctttcttttcttgctctctttttctttctctctctctcaagtttgtgcagggagatggtgaactgttttgtcagaacttaaatggaaaaaaaaataaaactacaacaagcctaccttttataactgggtgtttagtgctaaacagccagaaccacagagacagtattgtatgaccaaagcatttgatgccaaaatttgacgttaaagtaatgatttgatttcctgccctggttttgaaggtccatttttttcccttttgcattgacttgcttgtttcccctttgaaacacctaaaaatacctttccaaaacatcgcgagagcatacatagacaaaaatgaaatagaaagctcttgcatgcttgagtccaccattgggggaaatgacagaaaactggacctgagggcattaggaacatcctacagagttgtgtttagtgtcgtttgccatggtatttcacagtgaaacatggatactctccacacatcatttacttcatgctgtgtacttatgtactggtttttgcattttactcacttgataagtctgctccactggtttcatcagatagacttgctgctactggcttttccattgtagattgggttattttacacgcagttcgccaaatgggattgctctgtatagtcaaattggtgatggacagatggacagaatgcagaggtacatagatgagctgaggctgatccagctcccctgaaattcagagtgttaactttgtagaccctgcacaatctcttggtgctatctagccattacccccattttttttttaaaggccatctgaaattccatttgtcatggtgggaagcattttggatatgatgcaggaaatctcttcctggagtcaaaagttcccaagaggtcctgtatttttaagaaatggaatttatttaaataatatttaagcttgtgcccatgttggccgggcaacttttttcaatggtgcttattagaagaagttttttcatcttgtcattttaagaaaataaaactggaaattgaatatgggtggcatgattgtacccttttagttctcttatttttctactcctctgtccctctataactatgccatactattatatgctggtccactgaatgctgagatgatctgttttttggggttttttttttttaagaaatattttcactggttttctgtgactctctaaacacttcatcgaaactagaagactgaattatgaggaaactatttggattagtggccagaaacgatgaaatcttatagatcttttgacagtttctctgtttaggggagcctagactgatatcaagtttcttcatatcaaagcttcattggtgacctcatttgctttacaagtgaccagccatcttgcaggcttcatgcttctgagagccttacttagaagatgctgctggagtcacagctgaggagaggaatactatcaacatggactatcctgggaaagagctaggaagtagatgctgaggtccccatccaaacagcaagctaggaaaaagcctgccttgaaaatatttctagacatcaaagataacttacaacccaaagtgaataataagtaaatagtctgatgaccctcttaatagcattgcaattgtattgaatcacataatgattcataagtaactagggaaccaactgattttgctaagcagtcttccccttataacaccacaggcccttctgacacacaaaaaaatgaaagttaatcctgggtacagcatacagttttacatttaaacgcacagtcttacgtggacaaatgcaagcacaagcctaaagcaaggtcaagcagatggcaaaaccgaatttgcctgcaaagaaatctatttaactgaatcagcccataatatttgaggcacgaggttactgtgattgataggaaagataaaaatgatgtctgtttttgtagacgaataaccatcaacatgacaacaaaattcattggggtctaccagcgtgcattccatttcccactgaccatgcaggtgcacgtcgcggaaatactggtttaactactagtgtgttactgcctcatttatctacataacattattaactagaacataatgctttcaaagtttaagttaatgttatatattatgtataaatatatatattcataatgagatatatgtaatggatagtacaaagtttggagactcaacaaatgctctaaccttctagagacaaaagtcctatttctgttttcttttgtctttttattttcaattagtgacccattgttaaatccaaatccacttttactgaaaaatactgtacatgtgtaaaatgttcagttgtttttttgtaaaatatagtagaacggttgtaactgatactggccaaaatcaatgttattccatattttattttttctattaaattaacctaagttcctgttta

SEQ ID NO: 169856 - DNA, 2845 bp, Homo sapiens
  Payload ID: 13436
  Gene Symbol: PCSK5
  Gene Name: proprotein convertase subtilisin/kexin type 5
  ENST ID: ENST00000376767
  CDS Start-End: 513-2585
attgccactcagaatcctcgcgcgctgctcggagccggagggagcgctgggagcgagcaagcgagcgtttggagcccgggccagcagagggggcgcccggtcgctgcctgtaccgctcccgctggtcatctccgccgcgctcgggggccccgggaggagcgagaccgagtcggagagtccgggagccaagccgggcgaaacccaactgcggaggacgcccgccccactcagcctcctcctgcgtccgagccggggagcatcgccgagcgccccacgggccggagagctgggagcacaggtcccggcagccccagggatggtctaggagccggcgtaaggctcgctgctctgctccctgccggggctagccgcctcctgccgatcgcccggggctgcgagctgcggcggcccggggctgctcgccgggcggcgcaggccggagaagttagttgtgcgcgcccttagtgcgcggaaccagccagcgagcgagggagcagcgaggcgccgggaccatgggctgggggagccgctgctgctgcccgggacgtttggacctgctgtgcgtgctggcgctgctcgggggctgcctgctccccgtgtgtcggacgcgcgtctacaccaaccactgggcagtcaaaatcgccgggggcttcccggaggccaaccgtatcgccagcaagtacggattcatcaacataggacagataggggccctgaaggactactaccacttctaccatagcaggacgattaaaaggtcagttatctcgagcagagggacccacagtttcatttcaatggaaccaaaggtggaatggatccaacagcaagtggtaaaaaagcggacaaagagggattatgacttcagtcgtgcccagtctacctatttcaatgatcccaagtggcccagcatgtggtatatgcactgcagtgacaatacacatccctgccagtctgacatgaatatcgaaggagcctggaagagaggctacacgggaaagaacattgtggtcactatcctggatgacggaattgagagaacccatccagatctgatgcaaaactacgatgctctggcaagttgcgacgtgaatgggaatgacttggacccaatgcctcgttatgatgcaagcaacgagaacaagcatgggactcgctgtgctggagaagtggcagccgctgcaaacaattcgcactgcacagtcggaattgctttcaacgccaagatcggaggagtgcgaatgctggacggagatgtcacggacatggttgaagcaaaatcagttagcttcaacccccagcacgtgcacatttacagcgccagctggggcccggatgatgatggcaagactgtggacggaccagcccccctcacccggcaagcctttgaaaacggcgttagaatggggcggagaggcctcggctctgtgtttgtttgggcatctggaaatggtggaaggagcaaagaccactgctcctgtgatggctacaccaacagcatctacaccatctccatcagcagcactgcagaaagcggaaagaaaccttggtacctggaagagtgttcatccacgctggccacaacctacagcagcggggagtcctacgataagaaaatcatcactacagatctgaggcagcgttgcacggacaaccacactgggacgtcagcctcagcccccatggctgcaggcatcattgcgctggccctggaagccaatccgtttctgacctggagagacgtacagcatgttattgtcaggacttcccgtgcgggacatttgaacgctaatgactggaaaaccaatgctgctggttttaaggtgagccatctttatggatttggactgatggacgcagaagccatggtgatggaggcagagaagtggaccaccgttccccggcagcacgtgtgtgtggagagcacagaccgacaaatcaagacaatccgccctaacagtgcagtgcgctccatctacaaagcttcaggctgctcggataaccccaaccgccatgtcaactacctggagcacgtcgttgtgcgcatcaccatcacccaccccaggagaggagacctggccatctacctgacctcgccctctggaactaggtctcagcttttggccaacaggctatttgatcactccatggaaggattcaaaaactgggagttcatgaccattcattgctggggagaaagagctgctggtgactgggtccttgaagtttatgatactccctctcagctaaggaactttaagactccaggtaaattgaaagaatggtctttggtcctctacggcacctccgtgcagccatattcaccaaccaatgaatttccgaaagtggaacggttccgctatagccgagttgaagaccccacagacgactatggcacagaggattatgcaggtgagctggcttccagtgggacacaggctaaaaagaggcagctcatgcatcatcccaccacatgggagaacagaatggaatggaatggaatgaaatggaatggaatgaaatggaatggaatggaatggaatggaatggaatggaatcgaatcgaatcgaatcgaatagaatagaatagaatagaacagaacagaatagaatagaacagaacaatctactacccatattctgacatattttcttccccttaaatatttgtgtgtgtatatcagtgcactcatatattcaaatatccatatgtgttatctgcaaagctaatagtccatattgcgattgtaccataatatagttaatctgtaatctgggacatattgttcgcttacagaattttacactattttaaacacggtttggataaacatcattatttatc

SEQ ID NO: 169857 - DNA, 503 bp, Homo sapiens
  Payload ID: 13436
  Gene Symbol: PCSK5
  Gene Name: proprotein convertase subtilisin/kexin type 5
  ENST ID: ENST00000455778
  CDS Start-End: 1-306
tgccagccctgccaccgcttctgcgccacttgtgctggggcaggagctgatgggtgcattaactgcacagagggctacttcatggaggatgggagatgcgtgcagagctgtagtatcagctattactttgaccactcttcagagaatggatacaaatcctgcaaaaaatgtgatatcagttgtttgacgtgcaatggcccaggattcaagaactgtacaagctgccctagtgggtatctcttagacttaggaatgtgtcaaatgggagccatttgcaaggatgtttctctgtttaggggagcctagactgatatcaagtttcttcatatcaaagcttcattggtgacctcatttgctttacaagtgaccagccatcttgcaggcttcatgcttctgagagccttacttagaagatgctgctggagtcacagctgaggagaggaatactatcaacatggactatcctgggaaagagctaggaagtagatgctgaggtccccatc

SEQ ID NO: 169858 - DNA, 4731 bp, Homo sapiens
  Payload ID: 13436
  Gene Symbol: PCSK5
  Gene Name: proprotein convertase subtilisin/kexin type 5
  ENST ID: ENST00000424854
  CDS Start-End: 1-4683
aacagcatctacaccatctccatcagcagcactgcagaaagcggaaagaaaccttggtacctggaagagtgttcatccacgctggccacaacctacagcagcggggagtcctacgataagaaaatcatcactacagatctgaggcagcgttgcacggacaaccacactgggacgtcagcctcagcccccatggctgcaggcatcattgcgctggccctggaagccaatccgtttctgacctggagagacgtacagcatgttattgtcaggacttcccgtgcgggacatttgaacgctaatgactggaaaaccaatgctgctggttttaaggtgagccatctttatggatttggactgatggacgcagaagccatggtgatggaggcagagaagtggaccaccgttccccggcagcacgtgtgtgtggagagcacagaccgacaaatcaagacaatccgccctaacagtgcagtgcgctccatctacaaagcttcaggctgctcggataaccccaaccgccatgtcaactacctggagcacgtcgttgtgcgcatcaccatcacccaccccaggagaggagacctggccatctacctgacctcgccctctggaactaggtctcagcttttggccaacaggctatttgatcactccatggaaggattcaaaaactgggagttcatgaccattcattgctggggagaaagagctgctggtgactgggtccttgaagtttatgatactccctctcagctaaggaactttaagactccaggtaaattgaaagaatggtctttggtcctctacggcacctccgtgcagccatattcaccaaccaatgaatttccgaaagtggaacggttccgctatagccgagttgaagaccccacagacgactatggcacagaggattatgcaggtccctgcgaccctgagtgcagtgaggttggctgtgacgggccaggaccagaccactgcaatgactgtttgcactactactacaagctgaaaaacaataccaggatctgtgtctccagctgcccccctggccactaccacgccgacaagaagcgctgcaggaagtgtgcccccaactgtgagtcctgctttgggagccatggtgaccaatgcatgtcctgcaaatatggatactttctgaatgaagaaaccaacagctgtgttactcactgccctgatgggtcatatcaggataccaagaaaaatctttgccggaaatgcagtgaaaactgcaagacatgtactgaattccataactgtacagaatgtagggatgggttaagcctgcagggatcccggtgctctgtctcctgtgaagatggacggtatttcaacggccaggactgccagccctgccaccgcttctgcgccacttgtgctggggcaggagctgatgggtgcattaactgcacagagggctacttcatggaggatgggagatgcgtgcagagctgtagtatcagctattactttgaccactcttcagagaatggatacaaatcctgcaaaaaatgtgatatcagttgtttgacgtgcaatggcccaggattcaagaactgtacaagctgccctagtgggtatctcttagacttaggaatgtgtcaaatgggagccatttgcaaggatggagaatatgttgatgagcatggccactgccagacctgtgaggcctcatgtgccaagtgccagggaccaacccaggaagactgcactacctgccccatgacaaggatttttgatgatggccgctgtgtttcgaactgcccctcatggaaatttgaatttgagaaccaatgccatccatgccaccacacctgccagagatgccaaggaagtggccctacccactgcacctcctgtggagcagacaactatggccgagagcacttcctgtaccagggagagtgtggagatagctgcccagagggccactatgccactgaggggaacacctgcctgccctgcccagacaactgtgagctttgccacagcgtgcatgtctgcacaagatgcatgaagggctacttcatagcgcccaccaaccacacatgccagaagttagagtgtggacaaggtgaagtccaagacccagactatgaagaatgtgtcccttgtgaagaaggatgtctgggatgcagcttggatgatccaggaacatgtacatcttgcgctatggggtattacaggtttgatcaccattgttataaaacctgtcctgagaagacctacagtgaggaagtggaatgcaaggcgtgtgatagtaactgtggcagctgtgaccagaatgggtgttactggtgtgaagagggcttctttctcttaggtggcagttgtgtgaggaaatgtggtcctggattctatggtgaccaagaaatgggagaatgtgagtcctgccaccgagcatgcgaaacctgcacaggccctggtcatgacgagtgcagcagctgccaggaaggactgcagctgctgcgtgggatgtgcgtgcatgccaccaagacccaggaggagggcaaattctggaatgaagctgtgtccactgcaaacctatctgtggtgaagagcctgctgcaggagcgacgaaggtggaaagttcaaatcaaaagagatattttgagaaaactccagccttgtcattcttcttgtaaaacctgcaatggatctgcaactctgtgcacttcatgtcccaaaggtgcatatcttctggctcaggcctgtgtttcctcctgtccccaaggcacatggccttccgtaaggagtgggagctgcgagaactgtacggaggcctgtgccatctgctctggagccgatctttgcaaaaaatgccagatgcagccgggccaccctctcttcctccatgaaggcaggtgctactccaagtgcccggagggctcttatgcagaagacggcatatgtgaacgctgtagctctccttgcagaacatgtgaaggaaacgccaccaactgccattcttgtgaaggaggccacgtcctgcaccacggagtgtgccaggaaaactgccccgagaggcacgtggctgtgaagggggtatgcaagcattgcccagagatgtgtcaggactgcatccatgagaaaacatgcaaagagtgcacgcctgagttcttcctgcacgatgatatgtgccaccagtcctgtccccgtggcttctatgcagactcgcgccactgtgtcccctgccataaagactgtctggagtgcagtggccccaaagccgacgactgcgagctctgtcttgagagttcctgggtcctctatgatggactgtgcttggaggagtgtccagcaggaacctattatgaaaaggagactaaggagtgcagagattgccacaagtcctgcttgacctgctcatcatctgggacctgcaccacctgtcagaaaggcctgatcatgaaccctcgtgggagctgcatggccaacgagaagtgctcaccctccgagtactgggatgaggatgctcccgggtgcaagccctgccatgttaagtgcttccactgcatggggccggcggaggaccagtgtcaaacatgccccatgaacagccttcttctcaacacaacctgtgtgaaggactgcccagagggctattatgccgatgaggacagcaaccggtgtgcccactgccacagctcttgcaggacatgtgaagggagacacagcaggcagtgccactcctgccgaccgggctggttccagctaggaaaagagtgcctgctccagtgcagggaaggatattacgcagacaactccactggccggtgtgagaggtgcaacaggagctgcaaggggtgccagggcccacggcccacagactgcctgtcttgcgatagatttttctttctgctccgctccaaaggagagtgtcatcgctcctgcccagaccattactatgtagagcaaagcacacagacctgtgagagatgccatccgacttgtgatcaatgcaaaggaaaaggagcgttgaattgtttatcctgtgtgtggagttaccacctcatgggagggatctgcacctcggactgtcttgtgggggaatacagagtgggagagggagagaagtttaactgtgaaaaatgccacgagagctgcatggaatgcaagggaccaggggccaagaactgcaccttgtgccctgccaacctggtgctgcacatggacgacagccactgcctccactgctgcaacacctctgatccccccagtgcccaggagtgctgtgactgccaggacaccacggacgaatgcatccttcgaacaagcaaggttaggcctgcaactgagcatttcaagacagctctgttcatcacctcctccatgatgctggtgcttctgctcggggcagctgtggtagtgtggaagaaatctcgtggccgagtccagccagcagcaaaggccggctatgaaaaactggccgaccccaacaagtcttactcctcctataagagcagctatagagagagcaccagctttgaagaggatcaggtgattgagtacagggatcgggactatgatgaggatgatgatgatgacatcgtctacatgggccaggatggcacagtctaccggaaatttaaatatgggctgctggatgacgatgacatagatgagctggaatatgatgacgagagttactcctactaccagtaaacaggcactcccccaccaacaccaccattccactctcaggcatgcctg

SEQ ID NO: 169859 - DNA, 9538 bp, Homo sapiens
  Payload ID: 13436
  Gene Symbol: PCSK5
  Gene Name: proprotein convertase subtilisin/kexin type 5
  Uniprot ID: Q92824
  ENST ID: ENST00000545128
  CDS Start-End: 539-6121
atttatgcagagcaggagctgctgccattgccactcagaatcctcgcgcgctgctcggagccggagggagcgctgggagcgagcaagcgagcgtttggagcccgggccagcagagggggcgcccggtcgctgcctgtaccgctcccgctggtcatctccgccgcgctcgggggccccgggaggagcgagaccgagtcggagagtccgggagccaagccgggcgaaacccaactgcggaggacgcccgccccactcagcctcctcctgcgtccgagccggggagcatcgccgagcgccccacgggccggagagctgggagcacaggtcccggcagccccagggatggtctaggagccggcgtaaggctcgctgctctgctccctgccggggctagccgcctcctgccgatcgcccggggctgcgagctgcggcggcccggggctgctcgccgggcggcgcaggccggagaagttagttgtgcgcgcccttagtgcgcggaaccagccagcgagcgagggagcagcgaggcgccgggaccatgggctgggggagccgctgctgctgcccgggacgtttggacctgctgtgcgtgctggcgctgctcgggggctgcctgctccccgtgtgtcggacgcgcgtctacaccaaccactgggcagtcaaaatcgccgggggcttcccggaggccaaccgtatcgccagcaagtacggattcatcaacataggacagataggggccctgaaggactactaccacttctaccatagcaggacgattaaaaggtcagttatctcgagcagagggacccacagtttcatttcaatggaaccaaaggtggaatggatccaacagcaagtggtaaaaaagcggacaaagagggattatgacttcagtcgtgcccagtctacctatttcaatgatcccaagtggcccagcatgtggtatatgcactgcagtgacaatacacatccctgccagtctgacatgaatatcgaaggagcctggaagagaggctacacgggaaagaacattgtggtcactatcctggatgacggaattgagagaacccatccagatctgatgcaaaactacgatgctctggcaagttgcgacgtgaatgggaatgacttggacccaatgcctcgttatgatgcaagcaacgagaacaagcatgggactcgctgtgctggagaagtggcagccgctgcaaacaattcgcactgcacagtcggaattgctttcaacgccaagatcggaggagtgcgaatgctggacggagatgtcacggacatggttgaagcaaaatcagttagcttcaacccccagcacgtgcacatttacagcgccagctggggcccggatgatgatggcaagactgtggacggaccagcccccctcacccggcaagcctttgaaaacggcgttagaatggggcggagaggcctcggctctgtgtttgtttgggcatctggaaatggtggaaggagcaaagaccactgctcctgtgatggctacaccaacagcatctacaccatctccatcagcagcactgcagaaagcggaaagaaaccttggtacctggaagagtgttcatccacgctggccacaacctacagcagcggggagtcctacgataagaaaatcatcactacagatctgaggcagcgttgcacggacaaccacactgggacgtcagcctcagcccccatggctgcaggcatcattgcgctggccctggaagccaatccgtttctgacctggagagacgtacagcatgttattgtcaggacttcccgtgcgggacatttgaacgctaatgactggaaaaccaatgctgctggttttaaggtgagccatctttatggatttggactgatggacgcagaagccatggtgatggaggcagagaagtggaccaccgttccccggcagcacgtgtgtgtggagagcacagaccgacaaatcaagacaatccgccctaacagtgcagtgcgctccatctacaaagcttcaggctgctcggataaccccaaccgccatgtcaactacctggagcacgtcgttgtgcgcatcaccatcacccaccccaggagaggagacctggccatctacctgacctcgccctctggaactaggtctcagcttttggccaacaggctatttgatcactccatggaaggattcaaaaactgggagttcatgaccattcattgctggggagaaagagctgctggtgactgggtccttgaagtttatgatactccctctcagctaaggaactttaagactccaggtaaattgaaagaatggtctttggtcctctacggcacctccgtgcagccatattcaccaaccaatgaatttccgaaagtggaacggttccgctatagccgagttgaagaccccacagacgactatggcacagaggattatgcaggtccctgcgaccctgagtgcagtgaggttggctgtgacgggccaggaccagaccactgcaatgactgtttgcactactactacaagctgaaaaacaataccaggatctgtgtctccagctgcccccctggccactaccacgccgacaagaagcgctgcaggaagtgtgcccccaactgtgagtcctgctttgggagccatggtgaccaatgcatgtcctgcaaatatggatactttctgaatgaagaaaccaacagctgtgttactcactgccctgatgggtcatatcaggataccaagaaaaatctttgccggaaatgcagtgaaaactgcaagacatgtactgaattccataactgtacagaatgtagggatgggttaagcctgcagggatcccggtgctctgtctcctgtgaagatggacggtatttcaacggccaggactgccagccctgccaccgcttctgcgccacttgtgctggggcaggagctgatgggtgcattaactgcacagagggctacttcatggaggatgggagatgcgtgcagagctgtagtatcagctattactttgaccactcttcagagaatggatacaaatcctgcaaaaaatgtgatatcagttgtttgacgtgcaatggcccaggattcaagaactgtacaagctgccctagtgggtatctcttagacttaggaatgtgtcaaatgggagccatttgcaaggatggagaatatgttgatgagcatggccactgccagacctgtgaggcctcatgtgccaagtgccagggaccaacccaggaagactgcactacctgccccatgacaaggatttttgatgatggccgctgtgtttcgaactgcccctcatggaaatttgaatttgagaaccaatgccatccatgccaccacacctgccagagatgccaaggaagtggccctacccactgcacctcctgtggagcagacaactatggccgagagcacttcctgtaccagggagagtgtggagatagctgcccagagggccactatgccactgaggggaacacctgcctgccctgcccagacaactgtgagctttgccacagcgtgcatgtctgcacaagatgcatgaagggctacttcatagcgcccaccaaccacacatgccagaagttagagtgtggacaaggtgaagtccaagacccagactatgaagaatgtgtcccttgtgaagaaggatgtctgggatgcagcttggatgatccaggaacatgtacatcttgcgctatggggtattacaggtttgatcaccattgttataaaacctgtcctgagaagacctacagtgaggaagtggaatgcaaggcgtgtgatagtaactgtggcagctgtgaccagaatgggtgttactggtgtgaagagggcttctttctcttaggtggcagttgtgtgaggaaatgtggtcctggattctatggtgaccaagaaatgggagaatgtgagtcctgccaccgagcatgcgaaacctgcacaggccctggtcatgacgagtgcagcagctgccaggaaggactgcagctgctgcgtgggatgtgcgtgcatgccaccaagacccaggaggagggcaaattctggaatgatattttgagaaaactccagccttgtcattcttcttgtaaaacctgcaatggatctgcaactctgtgcacttcatgtcccaaaggtgcatatcttctggctcaggcctgtgtttcctcctgtccccaaggcacatggccttccgtaaggagtgggagctgcgagaactgtacggaggcctgtgccatctgctctggagccgatctttgcaaaaaatgccagatgcagccgggccaccctctcttcctccatgaaggcaggtgctactccaagtgcccggagggctcttatgcagaagacggcatatgtgaacgctgtagctctccttgcagaacatgtgaaggaaacgccaccaactgccattcttgtgaaggaggccacgtcctgcaccacggagtgtgccaggaaaactgccccgagaggcacgtggctgtgaagggggtatgcaagcattgcccagagatgtgtcaggactgcatccatgagaaaacatgcaaagagtgcacgcctgagttcttcctgcacgatgatatgtgccaccagtcctgtccccgtggcttctatgcagactcgcgccactgtgtcccctgccataaagactgtctggagtgcagtggccccaaagccgacgactgcgagctctgtcttgagagttcctgggtcctctatgatggactgtgcttggaggagtgtccagcaggaacctattatgaaaaggagactaaggagtgcagagattgccacaagtcctgcttgacctgctcatcatctgggacctgcaccacctgtcagaaaggcctgatcatgaaccctcgtgggagctgcatggccaacgagaagtgctcaccctccgagtactgggatgaggatgctcccgggtgcaagccctgccatgttaagtgcttccactgcatggggccggcggaggaccagtgtcaaacatgccccatgaacagccttcttctcaacacaacctgtgtgaaggactgcccagagggctattatgccgatgaggacagcaaccggtgtgcccactgccacagctcttgcaggacatgtgaagggagacacagcaggcagtgccactcctgccgaccgggctggttccagctaggaaaagagtgcctgctccagtgcagggaaggatattacgcagacaactccactggccggtgtgagaggtgcaacaggagctgcaaggggtgccagggcccacggcccacagactgcctgtcttgcgatagatttttctttctgctccgctccaaaggagagtgtcatcgctcctgcccagaccattactatgtagagcaaagcacacagacctgtgagagatgccatccgacttgtgatcaatgcaaaggaaaaggagcgttgaattgtttatcctgtgtgtggagttaccacctcatgggagggatctgcacctcggactgtcttgtgggggaatacagagtgggagagggagagaagtttaactgtgaaaaatgccacgagagctgcatggaatgcaagggaccaggggccaagaactgcaccttgtgccctgccaacctggtgctgcacatggacgacagccactgcctccactgctgcaacacctctgatccccccagtgcccaggagtgctgtgactgccaggacaccacggacgaatgcatccttcgaacaagcaaggttaggcctgcaactgagcatttcaagacagctctgttcatcacctcctccatgatgctggtgcttctgctcggggcagctgtggtagtgtggaagaaatctcgtggccgagtccagccagcagcaaaggccggctatgaaaaactggccgaccccaacaagtcttactcctcctataagagcagctatagagagagcaccagctttgaagaggatcaggtgattgagtacagggatcgggactatgatgaggatgatgatgatgacatcgtctacatgggccaggatggcacagtctaccggaaatttaaatatgggctgctggatgacgatgacatagatgagctggaatatgatgacgagagttactcctactaccagtaaacaggcactcccccaccaacaccaccattccactctcaggcatgcctgtgagcatcactgtttttggttttatccccacaccaggctgatgtgtgagtttttctatttgtcttctttaaccatgagtccaaccagaatatgtaagaatgatgaaatactttgttcttcttttgagtggctaaactcaattaacagttcctgttcaaccgtaattgaagagcaaggataaaattcagaggcattttcctcaaaataatgtgttaagacacaaaaatgaaggaagtgaaaacaaatgagatttgtacaaactcttctatgtgattttaaaaaaaggacagcagatctatagaaattctgtttccgagctgcattgtggaggtgtctgctgcctcctggtattctaatttttctttatctaattttggggataatggaggtacaaaggagttgttggtttggtggtgtttttcttccctttagctgtctttaggcagaaatttgttttgtaagggccaagaaaagagggctcttatcaattgactccaggccacccctggtgagcagaagagaccacctgggctgggctgctcaggacctacttgagataagggaagaaaagagaaggtgcatcatagctgaggagccatgaggtcaccccaggccctagttcctccgcaggaatccagagtcacaacaattctaaaggcagagcaagcccagcgagaaagaaataactgaatttccaggaactgcactctcatgattttctgggtacttttcgcctgggagacatcagctaagacatcgaataataaaagaaaaatggcagtgttaacctaacataaaatggaataaaatgacaaacacttcatccgctctaaaaaattcagagctttccttcatcaacaacccatcacaaaaccgtggactctcaatagaaagagttggaatagagtctaacatggaaaaaaaaaaatcccaatatgctgctcacaagctgtactctagctgctgaccagccttccagcactgctcatcactatgatttttgtttctagacttcctaggcttccttttttccattcttctgtcaagtgtattcttggattcatgcaactgaggacagtttttgtccagattgtaacacagagaagggctcttgctatgcaaaatgatgttggcagggtcttacagatttccttgtcaaaatagaccttacaggcagtactagaaatggagcaccagaaagcaaaaatgacattttcagagaatgatgataattataatctattgcacacctactaccagataacaagctaagtaattcccccccaaaaatgccccacttatccattttggtacttaccatactcccatgaggttggtattgctattattctgttcttgtaggaaacctgaggcttacaagaggttaggtaactagtccaaggtcatgcaaagctcaacaaaattcaagaaaaaagaatgatcaccctaaagcgtgtgttcttataactatgctactgaaataaggtgggaaaataagcatcctaaatataattaaagtcatgcctattgttttagtctataatatcaatgttatctttactaaattcatggattttctttttttaacataatgtatcactgacacagaaaatctttatgaagaagtcttcagtttactaaaggcttgtgcttctttagaggaaagctcttaaaacagggttgacaaacagtctctggaaagagccagctagtaagtacattaggctttcttggccagaaagtctctgtcataaccactcagctctgctattatagcatgaatgcagctggtacataacggatgggtgagctgtgcttcaataaaaccttatttatggacactgacatttgaaattcaggtaattttcacatattataaaattttattcttcttttgatttttttcaaccttttaaaatttaaaaatgcaaaagctattctcagttcacagcattacaagaacaggtggtgggtcagatttggccaacaggctgtactttgctgactttatctttaaaacagttttcagagatcatacatgtacatgtatgatatgcctccaaaaattttgatcatttaaaattatctccttggccaggcgtggtggctcatacctctaatcctagcactttgggagactgaggcaggcagatcacctgaagtcaggagtttgataccagcttagccaacatggtgaaaccccatttctactaaaaatacaataaaaatctgggcatgttggtgcacacctgtaatcccagctactcaggaggctgaggcaggcaaatcacttgagcccgggaggcagaggttgcagtgagcggagatggcaccattgcactccagcctgggtgacagagcaagactccatctcaaaaaataagtaactaactaactaactaaataaataaataaataaaattatctccttgccaggactgctggctcatgcctgtaatcccagcactctgggaggctaaggcaggaggattgctgacccaccacctgttcttgagcccaggagttcgacatcagccttggacaacatagtgagactcccgtgtctacaaaaaatttaaaaattagccaggcatggtggcaagtgtctgtagtctcagctactcaggaggctaaggtggaaggatcacttgaacccgggaggtcgaggctgcagtgagctgtgatcttgctattgcacttcagcctgaatgacagagctaagaccctgactcaaaataaataaataacattatctcttcaaaatgtatctgaagccctgatagttctactttcaattcttagaaacatataaaaatatatgcatgatagccatcatatcaatggaagactttctcacctctgtggttgcagttagcttacaaaaacgagcaattttgcttatactgtgttgttcatcttccttgttaattctaaagctctgatagactgagtttgacatttctttctgtaaactggaaattgttttctatgaaaaaaaaactctatgatacacagttaaagattggttgaggttgagatgaacttcaatactaagaaaaattgtggtgttcctctgtgtggcctgcaatgaaaagaaggctcatgcttgtgtattgaggtttgacatctttccttctttgtttttagtcatgcaacgtcattcttagatggcttttgaatactatgctaatgactatctaaatagataaatatgtgattggaaaacaaagtcaccttttagttttctacttggaaatattaagagaatccttgtagactggaaacacaccaaaaggctgggtaaagcatgggaggttccagttaatagaaagtaattttaaaattggaaataaaattaaatcaagacca

SEQ ID NO: 169860 - DNA, 2309 bp, Homo sapiens
  Payload ID: 13437
  Gene Symbol: PCSK6
  Gene Name: proprotein convertase subtilisin/kexin type 6
  ENST ID: ENST00000331826
  CDS Start-End: 315-2309
tcgcgggccgaggacgcctctggggcggcaccgcgtcccgagagccccagaagtcggcggggaagttcccccggtggggggcgtttcgggcctcccggacggctctcggccccggagcccggtcgcaggagcgcgggcccgggggcgggaacgcgccgcggccgcctcctcctccccggctcccgcccgcggcggtgttggcggcggcggtggcggcggcggcggcgcttccccggcgcggagcggctttaaaaggcggcactccaccccccggcgcactcgcagctcgggcgccgcgcgagcctgtcgccgctatgcctccgcgcgcgccgcctgcgcccgggccccggccgccgccccgggccgccgccgccaccgacaccgccgcgggcgcggggggcgcggggggcgcggggggcgccggcgggcccgggttccggccgctcgcgccgcgtccctggcgctggctgctgctgctggcgctgcctgccgcctgctccgcgcccccgccgcgccccgtctacaccaaccactgggcggtgcaagtgctgggcggcccggccgaggcggaccgcgtggcggcggcgcacgggtacctcaacttgggccagattggaaacctggaagattactaccatttttatcacagcaaaacctttaaaagatcaaccttgagtagcagaggccctcacaccttcctcagaatggacccccaggtgaaatggctccagcaacaggaagtgaaacgaagggtgaagagacaggtgcgaagtgacccgcaggccctttacttcaacgaccccatttggtccaacatgtggtacctgcattgtggcgacaagaacagtcgctgccggtcggaaatgaatgtccaggcagcgtggaagaggggctacacaggaaaaaacgtggtggtcaccatccttgatgatggcatagagagaaatcaccctgacctggccccaaattatgattcctacgccagctacgacgtgaacggcaatgattatgacccatctccacgatatgatgccagcaatgaaaataaacacggcactcgttgtgcgggagaagttgctgcttcagcaaacaattcctactgcatcgtgggcatagcgtacaatgccaaaataggaggcatccgcatgctggacggcgatgtcacagatgtggtcgaggcaaagtcgctgggcatcagacccaactacatcgacatttacagtgccagctgggggccggacgacgacggcaagacggtggacgggcccggccgactggctaagcaggctttcgagtatggcattaaaaagggccggcagggcctgggctccattttcgtctgggcatctgggaatggcgggagagagggggactactgctcgtgcgatggctacaccaacagcatctacaccatctccgtcagcagcgccaccgagaatggctacaagccctggtacctggaagagtgtgcctccaccctggccaccacctacagcagtggggccttttatgagcgaaaaatcgtcaccacggatctgcgtcagcgctgtaccgatggccacactgggacctcagtctctgcccccatggtggcgggcatcatcgccttggctctagaagcaaacagccagttaacctggagggacgtccagcacctgctagtgaagacatcccggccggcccacctgaaagcgagcgactggaaagtgaacggcgcgggtcataaagttagccatttctatggatttggtttggtggacgcagaagctctcgttgtggaggcaaagaagtggacagcagtgccatcgcagcacatgtgtgtggccgcctcggacaagagacccaggagcatccccttagtgcaggtgctgcggactacggccctgaccagcgcctgcgcggagcactcggaccagcgggtggtctacttggagcacgtggtggttcgcacctccatctcacacccacgccgaggagacctccagatctacctggtttctccctcgggaaccaagtctcaacttctggcaaagaggttgctggatctttccaatgaagggtttacaaactgggaattcatgactgtccactgctggggagaaaaggctgaagggcagtggaccttggaaatccaagatctgccatcccaggtccgcaacccggagaagcaaggtgatcttgagactcctgttgcaaatcaactgaccacagaagagaggttcgtttccacactctcgattctgttccattggtctgtatatctatcttggagtcagtaccatattgttttgatcactgtagctttgtag

SEQ ID NO: 169861 - DNA, 3723 bp, Homo sapiens
  Payload ID: 13437
  Gene Symbol: PCSK6
  Gene Name: proprotein convertase subtilisin/kexin type 6
  ENST ID: ENST00000398185
  CDS Start-End: 1-2394
cagattggaaacctggaagattactaccatttttatcacagcaaaacctttaaaagatcaaccttgagtagcagaggccctcacaccttcctcagaatggacccccaggtgaaatggctccagcaacaggaagtgaaacgaagggtgaagagacaggtgcgaagtgacccgcaggccctttacttcaacgaccccatttggtccaacatgtggtacctgcattgtggcgacaagaacagtcgctgccggtcggaaatgaatgtccaggcagcgtggaagaggggctacacaggaaaaaacgtggtggtcaccatccttgatgatggcatagagagaaatcaccctgacctggccccaaattatgattcctacgccagctacgacgtgaacggcaatgattatgacccatctccacgatatgatgccagcaatgaaaataaacacggcactcgttgtgcgggagaagttgctgcttcagcaaacaattcctactgcatcgtgggcatagcgtacaatgccaaaataggaggcatccgcatgctggacggcgatgtcacagatgtggtcgaggcaaagtcgctgggcatcagacccaactacatcgacatttacagtgccagctgggggccggacgacgacggcaagacggtggacgggcccggccgactggctaagcaggctttcgagtatggcattaaaaagggccggcagggcctgggctccattttcgtctgggcatctgggaatggcgggagagagggggactactgctcgtgcgatggctacaccaacagcatctacaccatctccgtcagcagcgccaccgagaatggctacaagccctggtacctggaagagtgtgcctccaccctggccaccacctacagcagtggggccttttatgagcgaaaaatcgtcaccacggatctgcgtcagcgctgtaccgatggccacactgggacctcagtctctgcccccatggtggcgggcatcatcgccttggctctagaagcaaagagcatccccttagtgcaggtgctgcggactacggccctgaccagcgcctgcgcggagcactcggaccagcgggtggtctacttggagcacgtggtggttcgcacctccatctcacacccacgccgaggagacctccagatctacctggtttctccctcgggaaccaagtctcaacttctggcaaagaggttgctggatctttccaatgaagggtttacaaactgggaattcatgactgtccactgctggggagaaaaggctgaagggcagtggaccttggaaatccaagatctgccatcccaggtccgcaacccggagaagcaagggaagttgaaagaatggagcctcatactgtatggcacagcagagcacccgtaccacaccttcagtgcccatcagtcccgctcgcggatgctggagctctcagccccagagctggagccacccaaggctgccctgtcaccctcccaggtggaagttcctgaagatgaggaagattacacagctcaatccaccccaggctctgctaatattttacagaccagtgtgtgccatccggagtgtggtgacaaaggctgtgatggccccaatgcagaccagtgcttgaactgcgtccacttcagcctggggagtgtcaagaccagcaggaagtgcgtgagtgtgtgccccttgggctactttggggacacagcagcaagacgctgtcgccggtgccacaaggggtgtgagacctgctccagcagagctgcgacgcagtgcctgtcttgccgccgcgggttctatcaccaccaggagatgaacacctgtgtgaccctctgtcctgcaggattttatgctgatgaaagtcagaaaaattgccttaaatgccacccaagctgtaaaaagtgcgtggatgaacctgagaaatgtactgtctgtaaagaaggattcagccttgcacggggcagctgcattcctgactgtgagccaggcacctactttgactcagagctgatcagatgtggggaatgccatcacacctgcggaacctgcgtggggccaggcagagaagagtgcattcactgtgcgaaaaacttccacttccacgactggaagtgtgtgccagcctgtggtgagggcttctacccagaagagatgccgggcttgccccacaaagtgtgtcgaaggtgtgacgagaactgcttgagctgtgcaggctccagcaggaactgtagcaggtgtaagacgggcttcacacagctggggacctcctgcatcaccaaccacacgtgcagcaacgctgacgagacattctgcgagatggtgaagtccaaccggctgtgcgaacggaagctcttcattcagttctgctgccgcacgtgcctcctggccgggtaagggtgcctagctgcccacagagggcaggcactcccatccatccatccgtccaccttcctccagactgtcggccagagtctgtttcaggagcggcgccctgcacctgacagctttatctccccaggagcagcatctctgagcacccaagccaggtgggtggtggctcttaaggaggtgttcctaaaatggtgatatcctctcaaatgctgcttgttggctccagtcttccgacaaactaacaggaacaaaatgaattctgggaatccacagctctggctttggagcagcttctgggaccataagtttactgaatcttcaagaccaaagcagaaaagaaaggcgcttggcatcacacatcactcttctccccgtgcttttctgcggctgtgtagtaaatctccccggcccagctggcgaaccctgggccatcctcacatgtgacaaagggccagcagtctacctgctcgttgcctgccactgagcagtctggggacggtttggtcagactataaataagataggtttgagggcataaaatgtatgaccactggggccggagtatctatttctacatagtcagctacttctgaaactgcagcagtggcttagaaagtccaattccaaagccagaccagaagattctatcccccgcagcgctctcctttgagcaagccgagctctccttgttaccgtgttctgtctgtgtcttcaggagtctcatggcctgaacgaccacctcgacctgatgcagagccttctgaggagaggcaacaggaggcattctgtggccagccaaaaggtaccccgatggccaagcaattcctctgaacaaaatgtaaagccagccatgcattgttaatcatccatcacttcccattttatggaattgcttttaaaatacatttggcctctgcccttcagaagactcgtttttaaggtggaaactcctgtgtctgtgtatattacaagcctacatgacacagttggatttattctgccaaacctgtgtaggcattttataagctacatgttctaatttttaccgatgttaattattttgacaaatatttcatatattttcattgaaatgcacagatctgcttgatcaattcccttgaatagggaagtaacatttgccttaaattttttcgacctcgtctttctccatattgtcctgctcccctgtttgacgacagtgcatttgccttgtcacctgtgagctggagagaacccagatgttgtttattgaatctacaactctgaaagagaaatcaatgaagcaagtacaatgttaaccctaaattaataaaagagttaacatcccatggc

SEQ ID NO: 169862 - DNA, 3868 bp, Homo sapiens
  Payload ID: 13437
  Gene Symbol: PCSK6
  Gene Name: proprotein convertase subtilisin/kexin type 6
  ENST ID: ENST00000558864
  CDS Start-End: 1-232
gggcttgccccacaaagtgtgtcgaaggtgtgacgagaactgcttgagctgtgcaggctccagcaggaactgtagcaggtgtaagacgggcttcacacagctggggacctcctgcatcaccaaccacacgtgcagcaacggggacatttggcaacgtctggagacattttgggttgtcacaactggaaggatgtactcacatccagtgggtggaggccaggaatgctgctaagcaccctgcaatgcacagcagcccccatgacaaagaactgtccagaccaaaatgtcaatagtgccgaggttgagaaattccggccaaaagaaatggaatcaaaaaagaaaattgtttgcaacttcatagagataccctcaatgaataaaaccacatatggtttgacttctgtccctgttcctatgctgaagggaaacttgtacaactttccctttttaaagtaaagagataccaccccactcttttttttttttaaacacagcaacagaagggccccaagttaaaaccagctctccagcctaaggactccacctggtggtcctctctggaattaaatgaagttgaggttttattttgtttaattttttcattattcagttattttgtttaacatttttagttattttgtttaaatttttagttattttaacttttaagttattttatttcttagttattttaacttgttattttaatttttttagttattttaactttttaaagttattttaattctttagttattttgtttaacttttttagtttttttagttaaacaaaagttgcagtgaccggggcaggtgtgatggctcaggcctgtaatcccagcactttgggaggccgaggcagggacagggggcaggggaaatcacttcttaggtcaggagctcaagaccagcctggcaaacatgacaaaaccccgtctctactaaaaatataaaaatcagccaggcatggtggcgagcgcctgtaatcccagctacttgagaggctgaggcacgagaatcacttgaacctcatgttattcctcatgaggcggaggttgcagtgagccgagattccgccactgtactccagcctgggcaacagagcgagactccatctcagaaaacaaagaagttccaagtacaatacaaagaaattccctcccaatttgagagtaagttgccgatataccctatgaccgccccccccccgccaatacttcagtgggtatttcctatgaacaacgacattctccggcacagccatcagactcaggaaattaacatcggtatgttattaccatcaaccctctgactgaattctagttctgccagttgtcccaataaagttcttagcaaaatggtctggtttagaaacacacttttcacttagtcatcatgtctctttaatgttcttccatctggaacagttcctcagtctccttgcctcatgatgtggaagcttttaaagactataggccagttatttgtaggctgcccttcgctgtgcacttgtctgagggttcctcacgttttgagtcaagtcatgcatctttgacacgaatctcacaggctgattctgtgttctgtctgcattctagcagggagtacacgatctgttccattattggtgatgttaacgatcattggttagagttttcttccgggctatgaagtgatgcctgccaaagcatatccactaccaccgctgttcaacattgtgctaaagatcccagccagtgtaacagggcaaaaaatacagaaccagtataataattggaaaggaggaaataaaactatcttttttttttttttttttttttttttttgagaccgagtctcactctgttgcccaggctggagtgcaatggcatgatcttcactcactgcaacctccgcctccctgattcaagtgattctcgtgcctcagcctcccaagtagctgggattacaggtacgtgccaccacacccggctaatttttgtatttttagtagaggcggggtttcaccatgttggccaggctggtctcaaactcctgacctcaggtgacccacccacctcagcctcccatagtgctgggattacaggcgtgagccaccacgcccagccaactatcattattctcaaatagcatggttatgtatgtagaaaatccacaagaatggttacagataaacttaagtaaatttcacaagatcgctggatgtaacgccaatatacaaaaatctgctgtatttaaatatatcaaactaatgattagaaaatggagtttttaaacaaaaggtactatttacagtagcatcaaaatctatcaaatatctagacaatctagtaaaggatatacaaggccttgacacaaaatctgcaggatgctgctgaaattaaagagtgcctcaataaatgtagggctataatatgcccattgattggaatacttcatattgtaaagatattaattctctccaaattcttctacagatccaacacactacaaatcaaatcatgggtgctttttcacatatatctataatttatgttcacatgcaaaggattagaataatcagataactactagataatctgagaaaaaaatgggagctttttttgagggacaaataccaagtctttttctaaagcttgtattctgcaaggatagctgactaaacccatggaaaagaacagctagttcagaagcagaggccctcacatatttggacacttgatttttgaaaagagctgctctgcagagcagtgggggagaagatggtcttttcaataaatggtgctgggtccaccaaatatccatatggggaaaaatatatcttcttccctaccttagactatgcacaaaaatctaggccagagagactgcagatctaaatggacaaggtggaagaagaaagcttttagaagaaaatataattttggagtaggcaaaagtttctcacagcgtactcgaaaactattagctgtatagggaacggttcataaatcagactgtattaaaatgaagaacctctattcatcaaaagataccattaagagagtgaaaacccaagccacagggggaagatactcactacagacatagctcacaaggttcctattgaaaaaatataaagagctcctacaaatcagtttaaaaataaagcccaatagaaaaatgggcaaaacacctaagcagacacttcattaaagaggttatccaaacaaacataaatatattttttaaagttctcaattgtgttagtaattagggaaatacagttaaaaccacaatttcataccattacctatctaccagaatggctaagattaaaaagacaatactaaacgttagcaaggagtttaagttggcaaccactttggaaaactatgtcctacttaagctgaacataagtaagccctatgacccagtaattccatccctgggagtatatcagtatatgtgttcacataaagatatatattattgagtttgtaggtacactatttataatataaaagagtgaaaattacccaaatgttcatcaacagcagaatggataagtaaattgtaaaacatccacaatgaaataccatattacagtgagaatagattaactacatctacacacaaacataatgtttagcaaaaaatatgcaaggtacttcatttgcataaatacaaaactagataaagcaaatctatacaagatggcaggataatggttacccttggggcaagggtggtgactagatgaagacaggaggagggcttctggaatgtggcaatgtcctgttcttacgaggatgctagttggttgggtgtgttcagtttgcattcttctatatgtatatcatacttcaataaaagttcaaggagaatc

SEQ ID NO: 169863 - DNA, 1035 bp, Homo sapiens
  Payload ID: 13437
  Gene Symbol: PCSK6
  Gene Name: proprotein convertase subtilisin/kexin type 6
  ENST ID: ENST00000559417
  CDS Start-End: 1-1035
tgggcggcccggccgaggcggaccgcgtggcggcggcgcacgggtacctcaacttgggccagattggaaacctggaagattactaccatttttatcacagcaaaacctttaaaagatcaaccttgagtagcagaggccctcacaccttcctcagaatggacccccaggtgaaatggctccagcaacaggaagtgaaacgaagggtgaagagacaggtgcgaagtgacccgcaggccctttacttcaacgaccccatttggtccaacatgtggtacctggattcctacgccagctacgacgtgaacggcaatgattatgacccatctccacgatatgatgccagcaatgaaaataaacacggcactcgttgtgcgggagaagttgctgcttcagcaaacaattcctactgcatcgtgggcatagcgtacaatgccaaaataggaggcatccgcatgctggacggcgatgtcacagatgtggtcgaggcaaagtcgctgggcatcagacccaactacatcgacatttacagtgccagctgggggccggacgacgacggcaagacggtggacgggcccggccgactggctaagcaggctttcgagtatggcattaaaaagggccggcagggcctgggctccattttcgtctgggcatctgggaatggcgggagagagggggactactgctcgtgcgatggctacaccaacagcatctacaccatctccgtcagcagcgccaccgagaatggctacaagccctggtacctggaagagtgtgcctccaccctggccaccacctacagcagtggggccttttatgagcgaaaaatcgtcaccacggatctgcgtcagcgctgtaccgatggccacactgggacctcagtctctgcccccatggtggcgggcatcatcgccttggctctagaagcaaacagccagttaacctggagggacgtccagcacctgctagtgaagacatcccggccggcccacctgaaagcgagcgactggaaagtgaacggcgcgggtcataaag

SEQ ID NO: 169864 - DNA, 379 bp, Homo sapiens
  Payload ID: 13437
  Gene Symbol: PCSK6
  Gene Name: proprotein convertase subtilisin/kexin type 6
  ENST ID: ENST00000559605
  CDS Start-End: 1-379
gagcactcggaccagcgggtggtctacttggagcacgtggtggttcgcacctccatctcacacccacgccgaggagacctccagatctacctggtttctccctcgggaaccaagtctcaacttctggcaaagaggtggaagttcctgaagatgaggaagattacacaggtgtgtgccatccggagtgtggtgacaaaggctgtgatggccccaatgcagaccagtgcttgaactgcgtccacttcagcctggggagtgtcaagaccagcaggaagtgcgtgagtgtgtgccccttgggctactttggggacacagcagcaagacgctgtcgccggtgccacaaggggtgtgagacctgctccagcagagctgcgacgca

SEQ ID NO: 169865 - DNA, 543 bp, Homo sapiens
  Payload ID: 13437
  Gene Symbol: PCSK6
  Gene Name: proprotein convertase subtilisin/kexin type 6
  ENST ID: ENST00000558951
  CDS Start-End: 1-378
gctgaagggcagtggaccttggaaatccaagatctgccatcccaggtccgcaacccggagaagcaagggaagttgaaagaatggagcctcatactgtatggcacagcagagcacccgtaccacaccttcagtgcccatcagtcccgctcgcggatgctggagctctcagccccagagctggagccacccaaggctgccctgtcaccctcccaggtggaagttcctgaagatgaggaagattacacagctcaatccaccccaggctctgctaatattttacagaccagggacatttggcaacgtctggagacattttgggttgtcacaactggaaggatgtactcacatccagtgggtggaggccaggaatgctgctaagcaccctgcaatgcacagcagcccccatgacaaagaactgtccagaccaaaatgtcaatagtgccgaggttgagaaattccggccaaaagaaatggaatcaaaaaagaaaattgtttgcaacttcatagagataccctcaatgaataaaaccacatatggtttga

SEQ ID NO: 169866 - DNA, 3336 bp, Homo sapiens
  Payload ID: 13437
  Gene Symbol: PCSK6
  Gene Name: proprotein convertase subtilisin/kexin type 6
  Uniprot ID: P29122
  ENST ID: ENST00000611967
  CDS Start-End: 28-1986
cgggcgccgcgcgagcctgtcgccgctatgcctccgcgcgcgccgcctgcgcccgggccccggccgccgccccgggccgccgccgccaccgacaccgccgcgggcgcggggggcgcggggggcgcggggggcgccggcgggcccgggttccggccgctcgcgccgcgtccctggcgctggctgctgctgctggcgctgcctgccgcctgctccgcgcccccgccgcgccccgtctacaccaaccactgggcggtgcaagtgctgggcggcccggccgaggcggaccgcgtggcggcggcgcacgggtacctcaacttgggccagattggaaacctggaagattactaccatttttatcacagcaaaacctttaaaagatcaaccttgagtagcagaggccctcacaccttcctcagaatggacccccaggtgaaatggctccagcaacaggaagtgaaacgaagggtgaagagacaggtgcgaagtgacccgcaggccctttacttcaacgaccccatttggtccaacatgtggtacctgcattgtggcgacaagaacagtcgctgccggtcggaaatgaatgtccaggcagcgtggaagaggggctacacaggaaaaaacgtggtggtcaccatccttgatgatggcatagagagaaatcaccctgacctggccccaaattatgattcctacgccagctacgacgtgaacggcaatgattatgacccatctccacgatatgatgccagcaatgaaaataaacacggcactcgttgtgcgggagaagttgctgcttcagcaaacaattcctactgcatcgtgggcatagcgtacaatgccaaaataggaggcatccgcatgctggacggcgatgtcacagatgtggtcgaggcaaagtcgctgggcatcagacccaactacatcgacatttacagtgccagctgggggccggacgacgacggcaagacggtggacgggcccggccgactggctaagcaggctttcgagtatggcattaaaaagggccggcagggcctgggctccattttcgtctgggcatctgggaatggcgggagagagggggactactgctcgtgcgatggctacaccaacagcatctacaccatctccgtcagcagcgccaccgagaatggctacaagccctggtacctggaagagtgtgcctccaccctggccaccacctacagcagtggggccttttatgagcgaaaaatcgtcaccacggatctgcgtcagcgctgtaccgatggccacactgggacctcagtctctgcccccatggtggcgggcatcatcgccttggctctagaagcaaacagccagttaacctggagggacgtccagcacctgctagtgaagacatcccggccggcccacctgaaagcgagcgactggaaagtgaacggcgcgggtcataaagttagccatttctatggatttggtttggtggacgcagaagctctcgttgtggaggcaaagaagtggacagcagtgccatcgcagcacatgtgtgtggccgcctcggacaagagacccaggagcatccccttagtgcaggtgctgcggactacggccctgaccagcgcctgcgcggagcactcggaccagcgggtggtctacttggagcacgtggtggttcgcacctccatctcacacccacgccgaggagacctccagatctacctggtttctccctcgggaaccaagtctcaacttctggcaaagaggttgctggatctttccaatgaagggtttacaaactgggaattcatgactgtccactgctggggagaaaaggctgaagggcagtggaccttggaaatccaagatctgccatcccaggtccgcaacccggagaagcaaggtgatcttgagactcctgttgcaaatcaactgaccacagaagagagggaacctggactaaaacacgtgttccggtggcagattgaacaagagctttggtaatctctgtgaaatactgcagagggacagatgaccaaagccaccacatttagaactttggctgcctttggaagtccagagctggatctctcagctcccgcccccagaggctcagcactttggacatggctcacaaacagttgttgattgactgcatgaatgcgtgtgcgtgcaagcatgaaccttgtttaaatcaagagcttacataattttaaccagttctgtcttcagctgtacatactcagtaaaatgtttaatgaaggggaagagattagtctcttctgtgtgaccatgttttccctttattcatcctaaaaagttccatgaattcttgatttcctttcagtggccctttcaacaatgtcttttttcccaagagcataactgttctcattttattgctagccatcttgatctgtgttttattgacatctcttttgagctaatcttcatttctaagataagagttgagattttgcaatctgtgttcgatggctcaatctatcctgtgcttgatgctagaaaggaagacagatttaaagcacatgccttctgtgccggctttcaagtttgtcactaaactctcatttctggaaagtgcaattatagagtatcactcccacttccttggaaacagagctgaagaacttggcacactctccaaacagtcaccatacacactgttgtcaaaaagttccatttttaaccccatttgcattaatattgcagtcaatctctttacctccttttctctttcacggggccgtgacagtgacgcctttccccaaaactctcctcgtttgagaaaaaaagaagtatgtatccccacttatctcggggagaaatgcaaccaactgctgctgtgcacatttatgaatcacagtattgtttagtcggttctgtatctccagtagaaagcataacaaaaagatgacctttgtctcacctcatagctaatttttgcaaataaaatactaaacattgatgaaaatgaaaatgacagatctgaggaagagggagagctctcttgaaacccctttcccagatttgccctcagttttaggaatgaggtacgcttgggcattcctgttgcctgcatggttcggcattctggcagccaggttcgccccagaatagataagtgtgtttgattttcgaacatttgactttattacctatttccagaaacacttcgtgttcaaactacgtctctacaggcatttctacttggtctttttctcccctgacatttcacagagtcctaactgtgctgcatgtataacttgttctttctttttgttacttgcatagcaagcatgtttctatgtcattaaatatcctttgtaagcagca

SEQ ID NO: 169867 - DNA, 2921 bp, Homo sapiens
  Payload ID: 13437
  Gene Symbol: PCSK6
  Gene Name: proprotein convertase subtilisin/kexin type 6
  Uniprot ID: P29122
  ENST ID: ENST00000615296
  CDS Start-End: 28-1899
cgggcgccgcgcgagcctgtcgccgctatgcctccgcgcgcgccgcctgcgcccgggccccggccgccgccccgggccgccgccgccaccgacaccgccgcgggcgcggggggcgcggggggcgcggggggcgccggcgggcccgggttccggccgctcgcgccgcgtccctggcgctggctgctgctgctggcgctgcctgccgcctgctccgcgcccccgccgcgccccgtctacaccaaccactgggcggtgcaagtgctgggcggcccggccgaggcggaccgcgtggcggcggcgcacgggtacctcaacttgggccagattggaaacctggaagattactaccatttttatcacagcaaaacctttaaaagatcaaccttgagtagcagaggccctcacaccttcctcagaatggacccccaggtgaaatggctccagcaacaggaagtgaaacgaagggtgaagagacaggtgcgaagtgacccgcaggccctttacttcaacgaccccatttggtccaacatgtggtacctgcattgtggcgacaagaacagtcgctgccggtcggaaatgaatgtccaggcagcgtggaagaggggctacacaggaaaaaacgtggtggtcaccatccttgatgatggcatagagagaaatcaccctgacctggccccaaattatgattcctacgccagctacgacgtgaacggcaatgattatgacccatctccacgatatgatgccagcaatgaaaataaacacggcactcgttgtgcgggagaagttgctgcttcagcaaacaattcctactgcatcgtgggcatagcgtacaatgccaaaataggaggcatccgcatgctggacggcgatgtcacagatgtggtcgaggcaaagtcgctgggcatcagacccaactacatcgacatttacagtgccagctgggggccggacgacgacggcaagacggtggacgggcccggccgactggctaagcaggctttcgagtatggcattaaaaagggccggcagggcctgggctccattttcgtctgggcatctgggaatggcgggagagagggggactactgctcgtgcgatggctacaccaacagcatctacaccatctccgtcagcagcgccaccgagaatggctacaagccctggtacctggaagagtgtgcctccaccctggccaccacctacagcagtggggccttttatgagcgaaaaatcgtcaccacggatctgcgtcagcgctgtaccgatggccacactgggacctcagtctctgcccccatggtggcgggcatcatcgccttggctctagaagcaaacagccagttaacctggagggacgtccagcacctgctagtgaagacatcccggccggcccacctgaaagcgagcgactggaaagtgaacggcgcgggtcataaagttagccatttctatggatttggtttggtggacgcagaagctctcgttgtggaggcaaagaagtggacagcagtgccatcgcagcacatgtgtgtggccgcctcggacaagagacccaggagcatccccttagtgcaggtgctgcggactacggccctgaccagcgcctgcgcggagcactcggaccagcgggtggtctacttggagcacgtggtggttcgcacctccatctcacacccacgccgaggagacctccagatctacctggtttctccctcgggaaccaagtctcaacttctggcaaagaggttgctggatctttccaatgaagggtttacaaactgggaattcatgactgtccactgctggggagaaaaggctgaagggcagtggaccttggaaatccaagatctgccatcccaggtccgcaacccggagaagcaagggaacctggactaaaacacgtgttccggtggcagattgaacaagagctttggtaatctctgtgaaatactgcagagggacagatgaccaaagccaccacatttagaactttggctgcctttggaagtccagagctggatctctcagctcccgcccccagaggctcagcactttggacatggctcacaaacagttgttgattgactgcatgaatgcgtgtgcgtgcaagcatgaaccttgtttaaatcaagagcttacataattttaaccagttctgtcttcagctgtacatactcagtaaaatgtttaatgaaggggaagagattagtctcttctgtgtgaccatgttttccctttattcatcctaaaaagttccatgaattcttgatttcctttcagtggccctttcaacaatgtcttttttcccaagagcataactgttctcattttattgctagccatcttgatctgtgttttattgacatctcttttgagctaatcttcatttctaagataagagttgagattttgcaatctgtgttcgatggctcaatctatcctgtgcttgatgctagaaaggaagacagatttaaagcacatgccttctgtgccggctttcaagtttgtcactaaactctcatttctggaaagtgcaattatagagtatcactcccacttccttggaaacagagctgaagaacttggcacactctccaaacagtcaccatacacactgttgtcaaaaagttccatttttaaccccatttgcattaatattgcagtcaatctctttacctccttttctctttcacggggccgtgacagtgacgcctttccccaaaactctcctcgtttgagaaaaaaagaagtatgtatccccacttatctcggggagaaatgcaaccaactgctgctgtgcacatttatgaatcacagtattgtttagtcggttctgtatctccagtagaaagcataacaaaaagatgacctttgtctcacctcatagctaatttttgcaaataaaatactaaacattg

SEQ ID NO: 169868 - DNA, 4269 bp, Homo sapiens
  Payload ID: 13437
  Gene Symbol: PCSK6
  Gene Name: proprotein convertase subtilisin/kexin type 6
  Uniprot ID: P29122
  ENST ID: ENST00000618548
  CDS Start-End: 75-2945
gagcggctttaaaaggcggcactccaccccccggcgcactcgcagctcgggcgccgcgcgagcctgtcgccgctatgcctccgcgcgcgccgcctgcgcccgggccccggccgccgccccgggccgccgccgccaccgacaccgccgcgggcgcggggggcgcggggggcgcggggggcgccggcgggcccgggttccggccgctcgcgccgcgtccctggcgctggctgctgctgctggcgctgcctgccgcctgctccgcgcccccgccgcgccccgtctacaccaaccactgggcggtgcaagtgctgggcggcccggccgaggcggaccgcgtggcggcggcgcacgggtacctcaacttgggccagattggaaacctggaagattactaccatttttatcacagcaaaacctttaaaagatcaaccttgagtagcagaggccctcacaccttcctcagaatggacccccaggtgaaatggctccagcaacaggaagtgaaacgaagggtgaagagacaggtgcgaagtgacccgcaggccctttacttcaacgaccccatttggtccaacatgtggtacctgcattgtggcgacaagaacagtcgctgccggtcggaaatgaatgtccaggcagcgtggaagaggggctacacaggaaaaaacgtggtggtcaccatccttgatgatggcatagagagaaatcaccctgacctggccccaaattatgattcctacgccagctacgacgtgaacggcaatgattatgacccatctccacgatatgatgccagcaatgaaaataaacacggcactcgttgtgcgggagaagttgctgcttcagcaaacaattcctactgcatcgtgggcatagcgtacaatgccaaaataggaggcatccgcatgctggacggcgatgtcacagatgtggtcgaggcaaagtcgctgggcatcagacccaactacatcgacatttacagtgccagctgggggccggacgacgacggcaagacggtggacgggcccggccgactggctaagcaggctttcgagtatggcattaaaaagggccggcagggcctgggctccattttcgtctgggcatctgggaatggcgggagagagggggactactgctcgtgcgatggctacaccaacagcatctacaccatctccgtcagcagcgccaccgagaatggctacaagccctggtacctggaagagtgtgcctccaccctggccaccacctacagcagtggggccttttatgagcgaaaaatcgtcaccacggatctgcgtcagcgctgtaccgatggccacactgggacctcagtctctgcccccatggtggcgggcatcatcgccttggctctagaagcaaacagccagttaacctggagggacgtccagcacctgctagtgaagacatcccggccggcccacctgaaagcgagcgactggaaagtgaacggcgcgggtcataaagttagccatttctatggatttggtttggtggacgcagaagctctcgttgtggaggcaaagaagtggacagcagtgccatcgcagcacatgtgtgtggccgcctcggacaagagacccaggagcatccccttagtgcaggtgctgcggactacggccctgaccagcgcctgcgcggagcactcggaccagcgggtggtctacttggagcacgtggtggttcgcacctccatctcacacccacgccgaggagacctccagatctacctggtttctccctcgggaaccaagtctcaacttctggcaaagaggttgctggatctttccaatgaagggtttacaaactgggaattcatgactgtccactgctggggagaaaaggctgaagggcagtggaccttggaaatccaagatctgccatcccaggtccgcaacccggagaagcaagggaagttgaaagaatggagcctcatactgtatggcacagcagagcacccgtaccacaccttcagtgcccatcagtcccgctcgcggatgctggagctctcagccccagagctggagccacccaaggctgccctgtcaccctcccaggtggaagttcctgaagatgaggaagattacacaggtgtgtgccatccggagtgtggtgacaaaggctgtgatggccccaatgcagaccagtgcttgaactgcgtccacttcagcctggggagtgtcaagaccagcaggaagtgcgtgagtgtgtgccccttgggctactttggggacacagcagcaagacgctgtcgccggtgccacaaggggtgtgagacctgctccagcagagctgcgacgcagtgcctgtcttgccgccgcgggttctatcaccaccaggagatgaacacctgtgtgaccctctgtcctgcaggattttatgctgatgaaagtcagaaaaattgccttaaatgccacccaagctgtaaaaagtgcgtggatgaacctgagaaatgtactgtctgtaaagaaggattcagccttgcacggggcagctgcattcctgactgtgagccaggcacctactttgactcagagctgatcagatgtggggaatgccatcacacctgcggaacctgcgtggggccaggcagagaagagtgcattcactgtgcgaaaaacttccacttccacgactggaagtgtgtgccagcctgtggtgagggcttctacccagaagagatgccgggcttgccccacaaagtgtgtcgaaggtgtgacgagaactgcttgagctgtgcaggctccagcaggaactgtagcaggtgtaagacgggcttcacacagctggggacctcctgcatcaccaaccacacgtgcagcaacgctgacgagacattctgcgagatggtgaagtccaaccggctgtgcgaacggaagctcttcattcagttctgctgccgcacgtgcctcctggccgggtaagggtgcctagctgcccacagagggcaggcactcccatccatccatccgtccaccttcctccagactgtcggccagagtctgtttcaggagcggcgccctgcacctgacagctttatctccccaggagcagcatctctgagcacccaagccaggtgggtggtggctcttaaggaggtgttcctaaaatggtgatatcctctcaaatgctgcttgttggctccagtcttccgacaaactaacaggaacaaaatgaattctgggaatccacagctctggctttggagcagcttctgggaccataagtttactgaatcttcaagaccaaagcagaaaagaaaggcgcttggcatcacacatcactcttctccccgtgcttttctgcggctgtgtagtaaatctccccggcccagctggcgaaccctgggccatcctcacatgtgacaaagggccagcagtctacctgctcgttgcctgccactgagcagtctggggacggtttggtcagactataaataagataggtttgagggcataaaatgtatgaccactggggccggagtatctatttctacatagtcagctacttctgaaactgcagcagtggcttagaaagtccaattccaaagccagaccagaagattctatcccccgcagcgctctcctttgagcaagccgagctctccttgttaccgtgttctgtctgtgtcttcaggagtctcatggcctgaacgaccacctcgacctgatgcagagccttctgaggagaggcaacaggaggcattctgtggccagccaaaaggtaccccgatggccaagcaattcctctgaacaaaatgtaaagccagccatgcattgttaatcatccatcacttcccattttatggaattgcttttaaaatacatttggcctctgcccttcagaagactcgtttttaaggtggaaactcctgtgtctgtgtatattacaagcctacatgacacagttggatttattctgccaaacctgtgtaggcattttataagctacatgttctaatttttaccgatgttaattattttgacaaatatttcatatattttcattgaaatgcacagatctgcttgatcaattcccttgaatagggaagtaacatttgccttaaattttttcgacctcgtctttctccatattgtcctgctcccctgtttgacgacagtgcatttgccttgtcacctgtgagctggagagaacccagatgttgtttattgaatctacaactctgaaagagaaatcaatgaagcaagtacaatgttaaccctaaattaataaaagagttaacatccc

SEQ ID NO: 169869 - DNA, 3132 bp, Homo sapiens
  Payload ID: 13437
  Gene Symbol: PCSK6
  Gene Name: proprotein convertase subtilisin/kexin type 6
  ENST ID: ENST00000622483
  CDS Start-End: 75-3002
gagcggctttaaaaggcggcactccaccccccggcgcactcgcagctcgggcgccgcgcgagcctgtcgccgctatgcctccgcgcgcgccgcctgcgcccgggccccggccgccgccccgggccgccgccgccaccgacaccgccgcgggcgcggggggcgcggggggcgcggggggcgccggcgggcccgggttccggccgctcgcgccgcgtccctggcgctggctgctgctgctggcgctgcctgccgcctgctccgcgcccccgccgcgccccgtctacaccaaccactgggcggtgcaagtgctgggcggcccggccgaggcggaccgcgtggcggcggcgcacgggtacctcaacttgggccagattggaaacctggaagattactaccatttttatcacagcaaaacctttaaaagatcaaccttgagtagcagaggccctcacaccttcctcagaatggacccccaggtgaaatggctccagcaacaggaagtgaaacgaagggtgaagagacaggtgcgaagtgacccgcaggccctttacttcaacgaccccatttggtccaacatgtggtacctgcattgtggcgacaagaacagtcgctgccggtcggaaatgaatgtccaggcagcgtggaagaggggctacacaggaaaaaacgtggtggtcaccatccttgatgatggcatagagagaaatcaccctgacctggccccaaattatgattcctacgccagctacgacgtgaacggcaatgattatgacccatctccacgatatgatgccagcaatgaaaataaacacggcactcgttgtgcgggagaagttgctgcttcagcaaacaattcctactgcatcgtgggcatagcgtacaatgccaaaataggaggcatccgcatgctggacggcgatgtcacagatgtggtcgaggcaaagtcgctgggcatcagacccaactacatcgacatttacagtgccagctgggggccggacgacgacggcaagacggtggacgggcccggccgactggctaagcaggctttcgagtatggcattaaaaagggccggcagggcctgggctccattttcgtctgggcatctgggaatggcgggagagagggggactactgctcgtgcgatggctacaccaacagcatctacaccatctccgtcagcagcgccaccgagaatggctacaagccctggtacctggaagagtgtgcctccaccctggccaccacctacagcagtggggccttttatgagcgaaaaatcgtcaccacggatctgcgtcagcgctgtaccgatggccacactgggacctcagtctctgcccccatggtggcgggcatcatcgccttggctctagaagcaaacagccagttaacctggagggacgtccagcacctgctagtgaagacatcccggccggcccacctgaaagcgagcgactggaaagtgaacggcgcgggtcataaagttagccatttctatggatttggtttggtggacgcagaagctctcgttgtggaggcaaagaagtggacagcagtgccatcgcagcacatgtgtgtggccgcctcggacaagagacccaggagcatccccttagtgcaggtgctgcggactacggccctgaccagcgcctgcgcggagcactcggaccagcgggtggtctacttggagcacgtggtggttcgcacctccatctcacacccacgccgaggagacctccagatctacctggtttctccctcgggaaccaagtctcaacttctggcaaagaggttgctggatctttccaatgaagggtttacaaactgggaattcatgactgtccactgctggggagaaaaggctgaagggcagtggaccttggaaatccaagatctgccatcccaggtccgcaacccggagaagcaagggaagttgaaagaatggagcctcatactgtatggcacagcagagcacccgtaccacaccttcagtgcccatcagtcccgctcgcggatgctggagctctcagccccagagctggagccacccaaggctgccctgtcaccctcccaggtggaagttcctgaagatgaggaagattacacagctcaatccaccccaggctctgctaatattttacagaccagtgtgtgccatccggagtgtggtgacaaaggctgtgatggccccaatgcagaccagtgcttgaactgcgtccacttcagcctggggagtgtcaagaccagcaggaagtgcgtgagtgtgtgccccttgggctactttggggacacagcagcaagacgctgtcgccggtgccacaaggggtgtgagacctgctccagcagagctgcgacgcagtgcctgtcttgccgccgcgggttctatcaccaccaggagatgaacacctgtgtgaccctctgtcctgcaggattttatgctgatgaaagtcagaaaaattgccttaaatgccacccaagctgtaaaaagtgcgtggatgaacctgagaaatgtactgtctgtaaagaaggattcagccttgcacggggcagctgcattcctgactgtgagccaggcacctactttgactcagagctgatcagatgtggggaatgccatcacacctgcggaacctgcgtggggccaggcagagaagagtgcattcactgtgcgaaaaacttccacttccacgactggaagtgtgtgccagcctgtggtgagggcttctacccagaagagatgccgggcttgccccacaaagtgtgtcgaaggtacggtcctcctggcggggaacggcaggcagctgtgtccagcaaaggagtgcctggagggcagagtctggcagcatcttccccaggggccggggagggcatgttgcatcaccccactgtggacaggagcccatttacagagctgctgaggggccttcgtccctttgttcactggatgcatatttgttgggtccctgctgtgggcagacaccgtgcagcagcgggataagatgggaagcagaatagcaaggtgctcacaccccattggtggactacgcgggacgtccctgcccatgtcgcgctcagcatgcatcctttgcactgtcgataatcagagaaaccatgttttgggttaaaaa

SEQ ID NO: 169870 - DNA, 4409 bp, Homo sapiens
  Payload ID: 13437
  Gene Symbol: PCSK6
  Gene Name: proprotein convertase subtilisin/kexin type 6
  Uniprot ID: P29122
  ENST ID: ENST00000611716
  CDS Start-End: 170-3079
cgggaacgcgccgcggccgcctcctcctccccggctcccgcccgcggcggtgttggcggcggcggtggcggcggcggcggcgcttccccggcgcggagcggctttaaaaggcggcactccaccccccggcgcactcgcagctcgggcgccgcgcgagcctgtcgccgctatgcctccgcgcgcgccgcctgcgcccgggccccggccgccgccccgggccgccgccgccaccgacaccgccgcgggcgcggggggcgcggggggcgcggggggcgccggcgggcccgggttccggccgctcgcgccgcgtccctggcgctggctgctgctgctggcgctgcctgccgcctgctccgcgcccccgccgcgccccgtctacaccaaccactgggcggtgcaagtgctgggcggcccggccgaggcggaccgcgtggcggcggcgcacgggtacctcaacttgggccagattggaaacctggaagattactaccatttttatcacagcaaaacctttaaaagatcaaccttgagtagcagaggccctcacaccttcctcagaatggacccccaggtgaaatggctccagcaacaggaagtgaaacgaagggtgaagagacaggtgcgaagtgacccgcaggccctttacttcaacgaccccatttggtccaacatgtggtacctgcattgtggcgacaagaacagtcgctgccggtcggaaatgaatgtccaggcagcgtggaagaggggctacacaggaaaaaacgtggtggtcaccatccttgatgatggcatagagagaaatcaccctgacctggccccaaattatgattcctacgccagctacgacgtgaacggcaatgattatgacccatctccacgatatgatgccagcaatgaaaataaacacggcactcgttgtgcgggagaagttgctgcttcagcaaacaattcctactgcatcgtgggcatagcgtacaatgccaaaataggaggcatccgcatgctggacggcgatgtcacagatgtggtcgaggcaaagtcgctgggcatcagacccaactacatcgacatttacagtgccagctgggggccggacgacgacggcaagacggtggacgggcccggccgactggctaagcaggctttcgagtatggcattaaaaagggccggcagggcctgggctccattttcgtctgggcatctgggaatggcgggagagagggggactactgctcgtgcgatggctacaccaacagcatctacaccatctccgtcagcagcgccaccgagaatggctacaagccctggtacctggaagagtgtgcctccaccctggccaccacctacagcagtggggccttttatgagcgaaaaatcgtcaccacggatctgcgtcagcgctgtaccgatggccacactgggacctcagtctctgcccccatggtggcgggcatcatcgccttggctctagaagcaaacagccagttaacctggagggacgtccagcacctgctagtgaagacatcccggccggcccacctgaaagcgagcgactggaaagtgaacggcgcgggtcataaagttagccatttctatggatttggtttggtggacgcagaagctctcgttgtggaggcaaagaagtggacagcagtgccatcgcagcacatgtgtgtggccgcctcggacaagagacccaggagcatccccttagtgcaggtgctgcggactacggccctgaccagcgcctgcgcggagcactcggaccagcgggtggtctacttggagcacgtggtggttcgcacctccatctcacacccacgccgaggagacctccagatctacctggtttctccctcgggaaccaagtctcaacttctggcaaagaggttgctggatctttccaatgaagggtttacaaactgggaattcatgactgtccactgctggggagaaaaggctgaagggcagtggaccttggaaatccaagatctgccatcccaggtccgcaacccggagaagcaagggaagttgaaagaatggagcctcatactgtatggcacagcagagcacccgtaccacaccttcagtgcccatcagtcccgctcgcggatgctggagctctcagccccagagctggagccacccaaggctgccctgtcaccctcccaggtggaagttcctgaagatgaggaagattacacagctcaatccaccccaggctctgctaatattttacagaccagtgtgtgccatccggagtgtggtgacaaaggctgtgatggccccaatgcagaccagtgcttgaactgcgtccacttcagcctggggagtgtcaagaccagcaggaagtgcgtgagtgtgtgccccttgggctactttggggacacagcagcaagacgctgtcgccggtgccacaaggggtgtgagacctgctccagcagagctgcgacgcagtgcctgtcttgccgccgcgggttctatcaccaccaggagatgaacacctgtgtgaccctctgtcctgcaggattttatgctgatgaaagtcagaaaaattgccttaaatgccacccaagctgtaaaaagtgcgtggatgaacctgagaaatgtactgtctgtaaagaaggattcagccttgcacggggcagctgcattcctgactgtgagccaggcacctactttgactcagagctgatcagatgtggggaatgccatcacacctgcggaacctgcgtggggccaggcagagaagagtgcattcactgtgcgaaaaacttccacttccacgactggaagtgtgtgccagcctgtggtgagggcttctacccagaagagatgccgggcttgccccacaaagtgtgtcgaaggtgtgacgagaactgcttgagctgtgcaggctccagcaggaactgtagcaggtgtaagacgggcttcacacagctggggacctcctgcatcaccaaccacacgtgcagcaacgctgacgagacattctgcgagatggtgaagtccaaccggctgtgcgaacggaagctcttcattcagttctgctgccgcacgtgcctcctggccgggtaagggtgcctagctgcccacagagggcaggcactcccatccatccatccgtccaccttcctccagactgtcggccagagtctgtttcaggagcggcgccctgcacctgacagctttatctccccaggagcagcatctctgagcacccaagccaggtgggtggtggctcttaaggaggtgttcctaaaatggtgatatcctctcaaatgctgcttgttggctccagtcttccgacaaactaacaggaacaaaatgaattctgggaatccacagctctggctttggagcagcttctgggaccataagtttactgaatcttcaagaccaaagcagaaaagaaaggcgcttggcatcacacatcactcttctccccgtgcttttctgcggctgtgtagtaaatctccccggcccagctggcgaaccctgggccatcctcacatgtgacaaagggccagcagtctacctgctcgttgcctgccactgagcagtctggggacggtttggtcagactataaataagataggtttgagggcataaaatgtatgaccactggggccggagtatctatttctacatagtcagctacttctgaaactgcagcagtggcttagaaagtccaattccaaagccagaccagaagattctatcccccgcagcgctctcctttgagcaagccgagctctccttgttaccgtgttctgtctgtgtcttcaggagtctcatggcctgaacgaccacctcgacctgatgcagagccttctgaggagaggcaacaggaggcattctgtggccagccaaaaggtaccccgatggccaagcaattcctctgaacaaaatgtaaagccagccatgcattgttaatcatccatcacttcccattttatggaattgcttttaaaatacatttggcctctgcccttcagaagactcgtttttaaggtggaaactcctgtgtctgtgtatattacaagcctacatgacacagttggatttattctgccaaacctgtgtaggcattttataagctacatgttctaatttttaccgatgttaattattttgacaaatatttcatatattttcattgaaatgcacagatctgcttgatcaattcccttgaatagggaagtaacatttgccttaaattttttcgacctcgtctttctccatattgtcctgctcccctgtttgacgacagtgcatttgccttgtcacctgtgagctggagagaacccagatgttgtttattgaatctacaactctgaaagagaaatcaatgaagcaagtacaatgttaaccctaaattaataaaagagttaacatcccatggca

SEQ ID NO: 169871 - DNA, 3093 bp, Homo sapiens
  Payload ID: 13437
  Gene Symbol: PCSK6
  Gene Name: proprotein convertase subtilisin/kexin type 6
  ENST ID: ENST00000619160
  CDS Start-End: 75-2963
gagcggctttaaaaggcggcactccaccccccggcgcactcgcagctcgggcgccgcgcgagcctgtcgccgctatgcctccgcgcgcgccgcctgcgcccgggccccggccgccgccccgggccgccgccgccaccgacaccgccgcgggcgcggggggcgcggggggcgcggggggcgccggcgggcccgggttccggccgctcgcgccgcgtccctggcgctggctgctgctgctggcgctgcctgccgcctgctccgcgcccccgccgcgccccgtctacaccaaccactgggcggtgcaagtgctgggcggcccggccgaggcggaccgcgtggcggcggcgcacgggtacctcaacttgggccagattggaaacctggaagattactaccatttttatcacagcaaaacctttaaaagatcaaccttgagtagcagaggccctcacaccttcctcagaatggacccccaggtgaaatggctccagcaacaggaagtgaaacgaagggtgaagagacaggtgcgaagtgacccgcaggccctttacttcaacgaccccatttggtccaacatgtggtacctgcattgtggcgacaagaacagtcgctgccggtcggaaatgaatgtccaggcagcgtggaagaggggctacacaggaaaaaacgtggtggtcaccatccttgatgatggcatagagagaaatcaccctgacctggccccaaattatgattcctacgccagctacgacgtgaacggcaatgattatgacccatctccacgatatgatgccagcaatgaaaataaacacggcactcgttgtgcgggagaagttgctgcttcagcaaacaattcctactgcatcgtgggcatagcgtacaatgccaaaataggaggcatccgcatgctggacggcgatgtcacagatgtggtcgaggcaaagtcgctgggcatcagacccaactacatcgacatttacagtgccagctgggggccggacgacgacggcaagacggtggacgggcccggccgactggctaagcaggctttcgagtatggcattaaaaagggccggcagggcctgggctccattttcgtctgggcatctgggaatggcgggagagagggggactactgctcgtgcgatggctacaccaacagcatctacaccatctccgtcagcagcgccaccgagaatggctacaagccctggtacctggaagagtgtgcctccaccctggccaccacctacagcagtggggccttttatgagcgaaaaatcgtcaccacggatctgcgtcagcgctgtaccgatggccacactgggacctcagtctctgcccccatggtggcgggcatcatcgccttggctctagaagcaaacagccagttaacctggagggacgtccagcacctgctagtgaagacatcccggccggcccacctgaaagcgagcgactggaaagtgaacggcgcgggtcataaagttagccatttctatggatttggtttggtggacgcagaagctctcgttgtggaggcaaagaagtggacagcagtgccatcgcagcacatgtgtgtggccgcctcggacaagagacccaggagcatccccttagtgcaggtgctgcggactacggccctgaccagcgcctgcgcggagcactcggaccagcgggtggtctacttggagcacgtggtggttcgcacctccatctcacacccacgccgaggagacctccagatctacctggtttctccctcgggaaccaagtctcaacttctggcaaagaggttgctggatctttccaatgaagggtttacaaactgggaattcatgactgtccactgctggggagaaaaggctgaagggcagtggaccttggaaatccaagatctgccatcccaggtccgcaacccggagaagcaagggaagttgaaagaatggagcctcatactgtatggcacagcagagcacccgtaccacaccttcagtgcccatcagtcccgctcgcggatgctggagctctcagccccagagctggagccacccaaggctgccctgtcaccctcccaggtggaagttcctgaagatgaggaagattacacaggtgtgtgccatccggagtgtggtgacaaaggctgtgatggccccaatgcagaccagtgcttgaactgcgtccacttcagcctggggagtgtcaagaccagcaggaagtgcgtgagtgtgtgccccttgggctactttggggacacagcagcaagacgctgtcgccggtgccacaaggggtgtgagacctgctccagcagagctgcgacgcagtgcctgtcttgccgccgcgggttctatcaccaccaggagatgaacacctgtgtgaccctctgtcctgcaggattttatgctgatgaaagtcagaaaaattgccttaaatgccacccaagctgtaaaaagtgcgtggatgaacctgagaaatgtactgtctgtaaagaaggattcagccttgcacggggcagctgcattcctgactgtgagccaggcacctactttgactcagagctgatcagatgtggggaatgccatcacacctgcggaacctgcgtggggccaggcagagaagagtgcattcactgtgcgaaaaacttccacttccacgactggaagtgtgtgccagcctgtggtgagggcttctacccagaagagatgccgggcttgccccacaaagtgtgtcgaaggtacggtcctcctggcggggaacggcaggcagctgtgtccagcaaaggagtgcctggagggcagagtctggcagcatcttccccaggggccggggagggcatgttgcatcaccccactgtggacaggagcccatttacagagctgctgaggggccttcgtccctttgttcactggatgcatatttgttgggtccctgctgtgggcagacaccgtgcagcagcgggataagatgggaagcagaatagcaaggtgctcacaccccattggtggactacgcgggacgtccctgcccatgtcgcgctcagcatgcatcctttgcactgtcgataatcagagaaaccatgttttgggttaaaaa

SEQ ID NO: 169872 - DNA, 462 bp, Homo sapiens
  Payload ID: 13437
  Gene Symbol: PCSK6
  Gene Name: proprotein convertase subtilisin/kexin type 6
  ENST ID: ENST00000621185
  CDS Start-End: 1-428
ccctgaccagcgcctgcgcggagcactcggaccagcgggtggtctacttggagcacgtggtggttcgcacctccatctcacacccacgccgaggagacctccagatctacctggtttctccctcgggaaccaagtctcaacttctggcaaagaggttgctggatctttccaatgaagggtttacaaactgggaattcatgactgtccactgctggggagaaaaggctgaagggcagtggaccttggaaatccaagatctgccatcccaggtccgcaacccggagaagcaaggtgatcttgagactcctgttgcaaatcaactgaccacagaagagaggttcgtttccacactctcgattctgttccattggtctgtatatctatcttggagtcagtaccatattgttttgatcactgtagctttgtagtaagttttgaaataagaaagtgcgagtcctccaa

SEQ ID NO: 169873 - DNA, 1210 bp, Homo sapiens
  Payload ID: 13437
  Gene Symbol: PCSK6
  Gene Name: proprotein convertase subtilisin/kexin type 6
  ENST ID: ENST00000632686
  CDS Start-End: 151-1077
gagaacaacttcctgtgtcactgctgcagcggtgagaacaacttcctgtgtcactgctgcagcgggaagttgaaagaatggagcctcatactgtatggcacagcagagcacccgtaccacaccttcagtgcccatcagtcccgctcgcggatgctggagctctcagccccagagctggagccacccaaggctgccctgtcaccctcccaggtggaagttcctgaagatgaggaagattacacaggtgtgtgccatccggagtgtggtgacaaaggctgtgatggccccaatgcagaccagtgcttgaactgcgtccacttcagcctggggagtgtcaagaccagcaggaagtgcgtgagtgtgtgccccttgggctactttggggacacagcagcaagacgctgtcgccggtgccacaaggggtgtgagacctgctccagcagagctgcgacgcagtgcctgtcttgccgccgcgggttctatcaccaccaggagatgaacacctgtgtgaccctctgtcctgcaggattttatgctgatgaaagtcagaaaaattgccttaaatgccacccaagctgtaaaaagtgcgtggatgaacctgagaaatgtactgtctgtaaagaaggattcagccttgcacggggcagctgcattcctgactgtgagccaggcacctactttgactcagagctgatcagatgtggggaatgccatcacacctgcggaacctgcgtggggccaggcagagaagagtgcattcactgtgcgaaaaacttccacttccacgactggaagtgtgtgccagcctgtggtgagggcttctacccagaagagatgccgggcttgccccacaaagtgtgtcgaaggtgtgacgagaactgcttgagctgtgcaggctccagcaggaactgtagcaggtgtaagacgggcttcacacagctggggacctcctgcatcaccaaccacacgtgcagcaacgctgacgagacattctgcgagatggtgaagtccaaccggctgtgcgaacggaagctcttcattcagttctgctgccgcacgtgcctcctggccgggtaagggtgcctagctgcccacagagggcaggcactcccatccatccatccgtccaccttcctccagactgtcggccagagtctgtttcaggagcggcgccctgcacctgacagctttatctccccaggagcagcat

SEQ ID NO: 169874 - DNA, 4649 bp, Homo sapiens
  Payload ID: 13438
  Gene Symbol: PCSK7
  Gene Name: proprotein convertase subtilisin/kexin type 7
  Uniprot ID: Q16549
  ENST ID: ENST00000320934
  CDS Start-End: 632-2989
gatgctgcgggagacccctgagatacaagtggactctcccggggcgcggggaagaagggagagccgactgcgagaaggaaggcgacctgggtgggcaggatcccctctgggaagattacagggacagtcggggccatggcggtcagaaggagaagagcaacgagtggcttttaaaggtcggaaccgaaatgccctttacagaggacgccatgaaggagagccttctgaagagggaccatgtggaagatgccccgaggactcggggaggcggagcccgcgggttcagcccccagcgcccgcacggcccctgcctgcgtaggccgcccgcgggagccggaccccgggcgccggttgctgtggcccgcgggggtcgccgggccgcaggcgccgcgctgattggctgcgccgcgggcggaagtgatgctgctgtcactgctcctccggctcccgggaagccgcgagtttccgcagggaggcggcggcagctgcggcggggccggtctgtagcctttgctgagtcaacactactcacagtgaaagtgatgccttttctccatttgcacaacatgagtgtgacgtggttagccagaccaggagctcaacctcatgtagaatccagtccactgctctgatgccgaaggggaggcagaaagtgccacacttggatgcccccctgggcctgcccacctgcctctggctggaattagccgggctcttcttactggttccctgggtcatgggcctggcagggacaggtgggcctgatggccagggcacaggggggccgagctgggctgtgcacctggaaagcctggaaggtgacggggaggaagagactctggagcagcaggcggatgccttggcccaggcagcagggctggtgaatgctggacgcatcggagagcttcaggggcactacctctttgtccagcctgctgggcacaggccggccctggaggtggaggccatccggcagcaggtggaggctgtgttggctgggcatgaagctgtgcgctggcactcagagcagaggctgctaaggcgggccaagcgcagcgtccacttcaacgaccccaagtacccgcagcaatggcacctgaataaccgacggagcccgggcagggacatcaacgtgacgggtgtgtgggaacgcaatgtgactgggcgaggggtgacggtggtggtagtggatgacggagtggaacacaccatccaggacattgcacccaactatagccctgagggtagctatgacctcaactctaatgaccctgaccccatgccccacccggatgtggagaatggcaaccaccatggcacgcgatgtgcaggagagatcgcggctgtgcccaacaacagcttctgtgccgtgggcgtggcctacgggagccgcatcgcaggtatccgggtactggatggacctctcacagacagcatggaggcagtggcgttcaacaagcactatcagatcaatgacatctacagctgcagctggggaccagatgacgatgggaagacagtggatggcccccatcagcttggaaaggctgccttacaacatggggtgattgctggtcgccagggctttgggagcatctttgtggtagccagtggcaacggaggccaacacaacgacaactgcaactacgatggctacgccaactccatctacaccgtcaccataggagctgtggatgaggagggacgcatgcctttctatgcagaagaatgtgcctccatgctggcagtcaccttcagtggtggggacaagatgcttcggagcattgtgaccactgactgggaccttcagaagggcactggctgcactgagggccacacagggacctcagctgcagcgcctctggcagctggcatgatagccttaatgctgcaggtgcggccctgcctcacgtggcgtgacgtccagcacatcattgtcttcacagccacccggtatgaggatcgccgtgcagagtgggtcaccaacgaggcaggcttcagccatagccaccagcacggtttcggcctcctcaacgcctggaggctcgtgaatgcagccaagatctggacatctgtcccttacttagcatcctacgtcagtcccgtgttaaaagaaaacaaggcgattccgcagtccccccgttccctggaggtcctgtggaatgtcagcaggatggacctggagatgtcagggctgaagaccctggagcatgtggcagtgacagtctccatcactcacccacggcgcggcagcttggagctgaagctgttctgccccagtggcatgatgtccctcatcggcgccccccgcagcatggactcggatcccaacggcttcaatgactggaccttctccactgtgcgatgctggggggagagagcccgagggacctacaggcttgtcatcagggatgtcggggatgagtcattccaggtcggcatcctccggcaatggcagctgaccctatatggctctgtgtggagtgcagtagacatcagggacagacaaaggctgttagagagtgccatgagtggaaaatacctgcacgatgacttcgccctgccctgcccaccggggctgaaaattcctgaggaagatggttacaccatcacccccaacaccctcaagaccctggtgctggtaggctgtttcaccgtcttctggactgtttactacatgctggaagtatatttgagccagaggaatgtggcttccaatcaagtttgtaggagtggaccctgccactggccccatcggagccggaaagccaaggaggaagggacagagctagaatcagtgccactttgcagcagcaaggatccagacgaagtggaaacagagagcaggggccctcccaccacctctgacctccttgccccagacctgctggagcaaggggactggagcctgtcccagaacaagagcgccctggactgccctcatcagcacctagacgtaccgcacgggaaggaggagcagatctgctgacctcagggcctgacagtgtgggacaggctcttctttcccaaaattagggagctcttgacagaaagcagttctgatgcttacatctggaatctgaggcatcctctgactccactcaaagagggtgagggccttcttaagatacaaatggtggaggattgctgccagagaagtctggtcagagccacagggtctgcctccagccaaacgggagcttttggtgagaaggtgttggacaggggattggcgcccccctttggtttggcctccatcctcatctctcttgggccaagccagctgcctaggtcccccaagcatgggggaccccttcccacatataagttgagaaggtgcctgccatagccaggagcgcatctcaatggaaacatcactggggtcacttgggaagaggacttcggggtagaggctgggaggagcccctggacatgcctgtcctgaaagcggctgcctccattatccattcccaagatgcctgatcagaaaccaaccatgaatgaacccctggctccttcaccacccccacgattggtatgatgctgccggcacagctgggatacacacggctcccccaggcctgagctgcttcactagggaatcctgcggcaggactgcagagcagatggcagatgcacatgttggaggagagagccttgggagccactgccactccagtcctgccaccaccctgtcttcctctgcaagtgctcagggaaatggccttcccgccggaggccagctatctgcctgacaggctgtgactcttctctcaaccttggccttctcccctcttctgagctagttggttgaattttttttaatgcttaagatttgtttttctcttttcacagcaacattttcttgaatttttttctgcacagcttttccaaaataaaaaccttccaaacaattctgccactcgcaatctctcctttcctctgtctccccaaagccactgcatgctgctgagtggctcctttttcccttcggtccccaagattcactctcctgttctatggcctgtttcctctgaaagaatctgactgtcctggaatcttggcacatgaagggtccttcagaggacggcagccaggaacacatacaagcccgagatgcctgcctgtcccctgcgcagatctgaaaccataacaaaagtgaccagggcaaatcaaactctgccagccaggcctgagaaaagattgattttttttttttttttttgagttccaaccccaaaaatattccaggacaagatagggggcaggctgggctggttcttcttcaatgggcttttgccgccaaggaggacagtggacttggcccacatccaggctacccccagcccgcttctcccctgcttagcccagggaggagacagtagaggtgatgggggcagccgggagggaggggccaaggcagtgatgctttcgggtaagaagttgggctgaggctgggggcacagggaggagctgcccaggtgcagttaccattgctcagtgacagagcctcaaagcttggccagggctgaaggtaccacacgggtgtgggtgaggcaggctaagcgggatggctgcagccaaggagctgggggagggccgggctcagggctagccctctccgctctaactgatgatctgccgaggtc

SEQ ID NO: 169875 - DNA, 1312 bp, Homo sapiens
  Payload ID: 13438
  Gene Symbol: PCSK7
  Gene Name: proprotein convertase subtilisin/kexin type 7
  ENST ID: ENST00000525027
  CDS Start-End: 397-1312
ctctgctaaagaacagtcacgatgcagccagtagtttgtggaagcgatgtgtgctttgagccctgtgggtggcaacaggggttgctcgcagtgcctgtgagcaactggacctcctgctggattagctggtgtcgtgaggattggctgtcttgctgtgggaggccatccgctggtgttagtgctggcccacactccacctgggggcttatccctgttggtcagggataaatgtgaacaaaaagagaagatcaaatgtttcacaatttaaaaggcatggcttagggacttccagggggaacacatggatggctcagcatctccctctcagattcctgcagttaccagctctttgatctcttccatatcctttttctttgtctgcagtccactgctctgatgccgaaggggaggcagaaagtgccacacttggatgcccccctgggcctgcccacctgcctctggctggaattagccgggctcttcttactggttccctgggtcatgggcctggcagggacaggtgggcctgatggccagggcacaggggggccgagctgggctgtgcacctggaaagcctggaaggtgacggggaggaagagactctggagcagcaggcggatgccttggcccaggcagcagggctggtgaatgctggacgcatcggagagcttcaggggcactacctctttgtccagcctgctgggcacaggccggccctggaggtggaggccatccggcagcaggtggaggctgtgttggctgggcatgaagctgtgcgctggcactcagagcagaggctgctaaggcgggccaagcgcagcgtccacttcaacgaccccaagtacccgcagcaatggcacctgaataaccgacggagcccgggcagggacatcaacgtgacgggtgtgtgggaacgcaatgtgactgggcgaggggtgacggtggtggtagtggatgacggagtggaacacaccatccaggacattgcacccaactatagccctgagggtagctatgacctcaactctaatgaccctgaccccatgccccacccggatgtggagaatggcaaccaccatggcacgcgatgtgcaggagagatcgcggctgtgcccaacaacagcttctgtgccgtgggcgtggcctacgggagccgcatcgcaggtatccgggtactggatggacctctcacagacagcatggaggcagtggcgttcaacaagcactatcagatcaatgacatctacagctgcagctggggaccagatgacgatgggaagacagtggatggcccccatcagcttggaaagg

SEQ ID NO: 169876 - DNA, 583 bp, Homo sapiens
  Payload ID: 13438
  Gene Symbol: PCSK7
  Gene Name: proprotein convertase subtilisin/kexin type 7
  ENST ID: ENST00000530269
  CDS Start-End: 309-583
gatgctgcgggagacccctgagatacaagtggactctcccggggcgcggggaagaagggagagccgactgcgagaaggaaggcgacctgggtgggcaggatcccctctgggaagattacagggacagtcggggccatggcggtcagaaggagaagagcaacgagtggcttttaaaggtctgtagcctttgctgagtcaacactactcacagtgaaagtgatgccttttctccatttgcacaacatgagtgtgacgtggttagccagaccaggagctcaacctcatgtagaatccagtccactgctctgatgccgaaggggaggcagaaagtgccacacttggatgcccccctgggcctgcccacctgcctctggctggaattagccgggctcttcttactggttccctgggtcatgggcctggcagggacaggtgggcctgatggccagggcacaggggggccgagctgggctgtgcacctggaaagcctggaaggtgacggggaggaagagactctggagcagcaggcggatgccttggcccaggcagcagggctggtgaatgctggacgcatcggagagct

SEQ ID NO: 169877 - DNA, 553 bp, Homo sapiens
  Payload ID: 13438
  Gene Symbol: PCSK7
  Gene Name: proprotein convertase subtilisin/kexin type 7
  ENST ID: ENST00000524507
  CDS Start-End: 215-553
ataatgtgggtgctaatgaggagaggggcacattgcacggagcgatcgaggccgacggagggagaatcgggaaactgacccggtctgtagcctttgctgagtcaacactactcacagtgaaagtgatgccttttctccatttgcacaacatgagtgtgacgtggttagccagaccaggagctcaacctcatgtagaatccagtccactgctctgatgccgaaggggaggcagaaagtgccacacttggatgcccccctgggcctgcccacctgcctctggctggaattagccgggctcttcttactggttccctgggtcatgggcctggcagggacaggtgggcctgatggccagggcacaggggggccgagctgggctgtgcacctggaaagcctggaaggtgacggggaggaagagactctggagcagcaggcggatgccttggcccaggcagcagggctggtgaatgctggacgcatcggagagcttcaggggcactacctctttgtccagcctgctgggcacaggccggccctggaggtggaggccatc

SEQ ID NO: 169878 - DNA, 549 bp, Homo sapiens
  Payload ID: 13438
  Gene Symbol: PCSK7
  Gene Name: proprotein convertase subtilisin/kexin type 7
  ENST ID: ENST00000532301
  CDS Start-End: 272-549
gaagccgcgagtttccgcagggaggcggcggcagctgcggcggggccgagccgcttgggtgtgtatctgagtactaagccctgccccagggtggacccagtggagagcaaaggcttttaaaggagcccagccaccataggtctgtagcctttgctgagtcaacactactcacagtgaaagtgatgccttttctccatttgcacaacatgagtgtgacgtggttagccagaccaggagctcaacctcatgtagaatccagtccactgctctgatgccgaaggggaggcagaaagtgccacacttggatgcccccctgggcctgcccacctgcctctggctggaattagccgggctcttcttactggttccctgggtcatgggcctggcagggacaggtgggcctgatggccagggcacaggggggccgagctgggctgtgcacctggaaagcctggaaggtgacggggaggaagagactctggagcagcaggcggatgccttggcccaggcagcagggctggtgaatgctggacgcatcggagagcttca

SEQ ID NO: 169879 - DNA, 3332 bp, Homo sapiens
  Payload ID: 13438
  Gene Symbol: PCSK7
  Gene Name: proprotein convertase subtilisin/kexin type 7
  ENST ID: ENST00000540028
  CDS Start-End: 202-1977
cactgctcctccggctcccgggaagccgcgagtttccgcagggaggcggcggcagctgcggcggggccggtctgtagcctttgctgagtcaacactactcacagtgaaagtgatgccttttctccatttgcacaacatgagtgtgacgtggttagccagaccaggagctcaacctcatgtagaatccagtccactgctctgatgccgaaggggaggcagaaagtgccacacttggatgcccccctgggcctgcccacctgcctctggctggaattagccgggctcttcttactggttccctgggtcatgggcctggcagggacaggtgggcctgatggccagggcacaggggggccgagctgggctgtgcacctggaaagcctggaaggtgacggggaggaagagactctggagcagcaggcggatgccttggcccaggcagcagggctggtgaatgctggacgcatcggagagcttcaggggcactacctctttgtccagcctgctgggcacaggccggccctggaggtggaggccatccggcagcaggtggaggctgtgttggctgggcatgaagctgtgcgctggcactcagagcagaggctgctaaggcgggccaagcgcagcgtccacttcaacgaccccaagtacccgcagcaatggcacctgaataaccgacggagcccgggcagggacatcaacgtgacgggtgtgtgggaacgcaatgtgactgggcgaggggtgacggtggtggtagtggatgacggagtggaacacaccatccaggacattgcacccaactatagccctgagggtagctatgacctcaactctaatgaccctgaccccatgccccacccggatgtggagaatggcaaccaccatggcacgcgatgtgcaggagagatcgcggctgtgcccaacaacagcttctgtgccgtgggcgtggcctacgggagccgcatcgcaggtatccgggtactggatggacctctcacagacagcatggaggcagtggcgttcaacaagcactatcagatcaatgacatctacagctgcagctggggaccagatgacgatgggaagacagtggatggcccccatcagcttggaaaggctgccttacaacatggggtgattgctggtcgccagggctttgggagcatctttgtggtagccagtggcaacggaggccaacacaacgacaactgcaactacgatggctacgccaactccatctacaccgtcaccataggagctgtggatgaggagggacgcatgcctttctatgcagaagaatgtgcctccatgctggcagtcaccttcagtggtggggacaagatgcttcggagcattgtgaccactgactgggaccttcagaagggcactggctgcactgagggccacacagggacctcagctgcagcgcctctggcagctggcatgatagccttaatgctgcaggtgcggccctgcctcacgtggcgtgacgtccagcacatcattgtcttcacagccacccggtatgaggatcgccgtgcagagtgggtcaccaacgaggcaggcttcagccatagccaccagcacggtttcggcctcctcaacgcctggaggctcgtgaatgcagccaagatctggacatctgtcccttacttagcatcctacgtcagtcccgtgttaaaagaaaacaaggcgattccgcagtccccccgttccctggaggtcctgtggaatgtcagcaggatggacctggagatgtcagggctgaagaccctggagcatgtggcagtgacagtctccatcactcacccacggcgcggcagcttggagctgaagctgttctgccccagtggcatgatgtccctcatcggcgccccccgcagcatggactcatggctctgtgtggagtgcagtagacatcagggacagacaaaggctgttagagagtgccatgagtggaaaatacctgcacgatgacttcgccctgccctgcccaccggggctgaaaattcctgaggaagatggttacaccatcacccccaacaccctcaagaccctggtgctggtaggctgtttcaccgtcttctggactgtttactacatgctggaagtatatttgagccagaggaatgtggcttccaatcaagtttgtaggagtggaccctgccactggccccatcggagccggaaagccaaggaggaagggacagagctagaatcagtgccactttgcagcagcaaggatccagacgaagtggaaacagagagcaggggccctcccaccacctctgacctccttgccccagacctgctggagcaaggggactggagcctgtcccagaacaagagcgccctggactgccctcatcagcacctagacgtaccgcacgggaaggaggagcagatctgctgacctcagggcctgacagtgtgggacaggctcttctttcccaaaattagggagctcttgacagaaagcagttctgatgcttacatctggaatctgaggcatcctctgactccactcaaagagggtgagggccttcttaagatacaaatggtggaggattgctgccagagaagtctggtcagagccacagggtctgcctccagccaaacgggagcttttggtgagaaggtgttggacaggggattggcgcccccctttggtttggcctccatcctcatctctcttgggccaagccagctgcctaggtcccccaagcatgggggaccccttcccacatataagttgagaaggtgcctgccatagccaggagcgcatctcaatggaaacatcactggggtcacttgggaagaggacttcggggtagaggctgggaggagcccctggacatgcctgtcctgaaagcggctgcctccattatccattcccaagatgcctgatcagaaaccaaccatgaatgaacccctggctccttcaccacccccacgattggtatgatgctgccggcacagctgggatacacacggctcccccaggcctgagctgcttcactagggaatcctgcggcaggactgcagagcagatggcagatgcacatgttggaggagagagccttgggagccactgccactccagtcctgccaccaccctgtcttcctctgcaagtgctcagggaaatggccttcccgccggaggccagctatctgcctgacaggctgtgactcttctctcaaccttggccttctcccctcttctgagctagttggttgaattttttttaatgcttaagatttgtttttctcttttcacagcaacattttcttgaatttttttctgcacagcttttccaaaataaaaaccttcc

SEQ ID NO: 169880 - DNA, 3637 bp, Homo sapiens
  Payload ID: 13439
  Gene Symbol: PCSK9
  Gene Name: proprotein convertase subtilisin/kexin type 9
  Uniprot ID: Q8NBP7
  ENST ID: ENST00000302118
  CDS Start-End: 291-2369
agcgacgtcgaggcgctcatggttgcaggcgggcgccgccgttcagttcagggtctgagcctggaggagtgagccaggcagtgagactggctcgggcgggccgggacgcgtcgttgcagcagcggctcccagctcccagccaggattccgcgcgccccttcacgcgccctgctcctgaacttcagctcctgcacagtcctccccaccgcaaggctcaaggcgccgccggcgtggaccgcgcacggcctctaggtctcctcgccaggacagcaacctctcccctggccctcatgggcaccgtcagctccaggcggtcctggtggccgctgccactgctgctgctgctgctgctgctcctgggtcccgcgggcgcccgtgcgcaggaggacgaggacggcgactacgaggagctggtgctagccttgcgttccgaggaggacggcctggccgaagcacccgagcacggaaccacagccaccttccaccgctgcgccaaggatccgtggaggttgcctggcacctacgtggtggtgctgaaggaggagacccacctctcgcagtcagagcgcactgcccgccgcctgcaggcccaggctgcccgccggggatacctcaccaagatcctgcatgtcttccatggccttcttcctggcttcctggtgaagatgagtggcgacctgctggagctggccttgaagttgccccatgtcgactacatcgaggaggactcctctgtctttgcccagagcatcccgtggaacctggagcggattacccctccacggtaccgggcggatgaataccagccccccgacggaggcagcctggtggaggtgtatctcctagacaccagcatacagagtgaccaccgggaaatcgagggcagggtcatggtcaccgacttcgagaatgtgcccgaggaggacgggacccgcttccacagacaggccagcaagtgtgacagtcatggcacccacctggcaggggtggtcagcggccgggatgccggcgtggccaagggtgccagcatgcgcagcctgcgcgtgctcaactgccaagggaagggcacggttagcggcaccctcataggcctggagtttattcggaaaagccagctggtccagcctgtggggccactggtggtgctgctgcccctggcgggtgggtacagccgcgtcctcaacgccgcctgccagcgcctggcgagggctggggtcgtgctggtcaccgctgccggcaacttccgggacgatgcctgcctctactccccagcctcagctcccgaggtcatcacagttggggccaccaatgcccaagaccagccggtgaccctggggactttggggaccaactttggccgctgtgtggacctctttgccccaggggaggacatcattggtgcctccagcgactgcagcacctgctttgtgtcacagagtgggacatcacaggctgctgcccacgtggctggcattgcagccatgatgctgtctgccgagccggagctcaccctggccgagttgaggcagagactgatccacttctctgccaaagatgtcatcaatgaggcctggttccctgaggaccagcgggtactgacccccaacctggtggccgccctgccccccagcacccatggggcaggttggcagctgttttgcaggactgtatggtcagcacactcggggcctacacggatggccacagccgtcgcccgctgcgccccagatgaggagctgctgagctgctccagtttctccaggagtgggaagcggcggggcgagcgcatggaggcccaagggggcaagctggtctgccgggcccacaacgcttttgggggtgagggtgtctacgccattgccaggtgctgcctgctaccccaggccaactgcagcgtccacacagctccaccagctgaggccagcatggggacccgtgtccactgccaccaacagggccacgtcctcacaggctgcagctcccactgggaggtggaggaccttggcacccacaagccgcctgtgctgaggccacgaggtcagcccaaccagtgcgtgggccacagggaggccagcatccacgcttcctgctgccatgccccaggtctggaatgcaaagtcaaggagcatggaatcccggcccctcaggagcaggtgaccgtggcctgcgaggagggctggaccctgactggctgcagtgccctccctgggacctcccacgtcctgggggcctacgccgtagacaacacgtgtgtagtcaggagccgggacgtcagcactacaggcagcaccagcgaaggggccgtgacagccgttgccatctgctgccggagccggcacctggcgcaggcctcccaggagctccagtgacagccccatcccaggatgggtgtctggggagggtcaagggctggggctgagctttaaaatggttccgacttgtccctctctcagccctccatggcctggcacgaggggatggggatgcttccgcctttccggggctgctggcctggcccttgagtggggcagcctccttgcctggaactcactcactctgggtgcctcctccccaggtggaggtgccaggaagctccctccctcactgtggggcatttcaccattcaaacaggtcgagctgtgctcgggtgctgccagctgctcccaatgtgccgatgtccgtgggcagaatgacttttattgagctcttgttccgtgccaggcattcaatcctcaggtctccaccaaggaggcaggattcttcccatggataggggagggggcggtaggggctgcagggacaaacatcgttggggggtgagtgtgaaaggtgctgatggccctcatctccagctaactgtggagaagcccctgggggctccctgattaatggaggcttagctttctggatggcatctagccagaggctggagacaggtgcgcccctggtggtcacaggctgtgccttggtttcctgagccacctttactctgctctatgccaggctgtgctagcaacacccaaaggtggcctgcggggagccatcacctaggactgactcggcagtgtgcagtggtgcatgcactgtctcagccaacccgctccactacccggcagggtacacattcgcacccctacttcacagaggaagaaacctggaaccagagggggcgtgcctgccaagctcacacagcaggaactgagccagaaacgcagattgggctggctctgaagccaagcctcttcttacttcacccggctgggctcctcatttttacgggtaacagtgaggctgggaaggggaacacagaccaggaagctcggtgagtgatggcagaacgatgcctgcaggcatggaactttttccgttatcacccaggcctgattcactggcctggcggagatgcttctaaggcatggtcgggggagagggccaacaactgtccctccttgagcaccagccccacccaagcaagcagacatttatcttttgggtctgtcctctctgttgcctttttacagccaacttttctagacctgttttgcttttgtaacttgaagatatttattctgggttttgtagcatttttattaatatggtgactttttaaaataaaaacaaacaaacgttgtcctaa

SEQ ID NO: 169881 - DNA, 2830 bp, Homo sapiens
  Payload ID: 13440
  Gene Symbol: PSAP
  Gene Name: prosaposin
  ENST ID: ENST00000394934
  CDS Start-End: 105-1688
ggggttagcgcctgcgctctggacggctttggggcagggcagatttatatctgcgggggatcagctgacgctccgcattgcagactgcggagtcagacggcgctatgtacgccctcttcctcctggccagcctcctgggcgcggctctagccggcccggtccttggactgaaagaatgcaccaggggctcggcagtgtggtgccagaatgtgaagacggcgtccgactgcggggcagtgaagcactgcctgcagaccgtttggaacaagccaacagtgaaatcccttccctgcgacatatgcaaagacgttgtcaccgcagctggtgatatgctgaaggacaatgccactgaggaggagatccttgtttacttggagaagacctgtgactggcttccgaaaccgaacatgtctgcttcatgcaaggagatagtggactcctacctccctgtcatcctggacatcattaaaggagaaatgagccgtcctggggaggtgtgctctgctctcaacctctgcgagtctctccagaagcacctagcagagctgaatcaccagaagcagctggagtccaataagatcccagagctggacatgactgaggtggtggcccccttcatggccaacatccctctcctcctctaccctcaggacggcccccgcagcaagccccagccaaaggataatggggacgtttgccaggactgcattcagatggtgactgacatccagactgctgtacggaccaactccacctttgtccaggccttggtggaacatgtcaaggaggagtgtgaccgcctgggccctggcatggccgacatatgcaagaactatatcagccagtattctgaaattgctatccagatgatgatgcacatgtctcttcagcaacccaaggagatctgtgcgctggttgggttctgtgatgaggtgaaagagatgcccatgcagactctggtccccgccaaagtggcctccaagaatgtcatccctgccctggaactggtggagcccattaagaagcacgaggtcccagcaaagtctgatgtttactgtgaggtgtgtgaattcctggtgaaggaggtgaccaagctgattgacaacaacaagactgagaaagaaatactcgacgcttttgacaaaatgtgctcgaagctgccgaagtccctgtcggaagagtgccaggaggtggtggacacgtacggcagctccatcctgtccatcctgctggaggaggtcagccctgagctggtgtgcagcatgctgcacctctgctctggcacgcggctgcctgcactgaccgttcacgtgactcagccaaaggacggtggcttctgcgaagtgtgcaagaagctggtgggttatttggatcgcaacctggagaaaaacagcaccaagcaggagatcctggctgctcttgagaaaggctgcagcttcctgccagacccttaccagaagcagtgtgatcagtttgtggcagagtacgagcccgtgctgatcgagatcctggtggaggtgatggatccttccttcgtgtgcttgaaaattggagcctgcccctcggcccataagcccttgttgggaactgagaagtgtatatggggcccaagctactggtgccagaacacagagacagcagcccagtgcaatgctgtcgagcattgcaaacgccatgtgtggaactaggaggaggaatattccatcttggcagaaaccacagcattggtttttttctacttgtgtgtctgggggaatgaacgcacagatctgtttgactttgttataaaaatagggctcccccacctcccccatttctgtgtcctttattgtagcattgctgtctgcaagggagcccctagcccctggcagacatagctgcttcagtgccccttttctctctgctagatggatgttgatgcactggaggtcttttagcctgcccttgcatggcgcctgctggaggaggagagagctctgctggcatgagccacagtttcttgactggaggccatcaaccctcttggttgaggccttgttctgagccctgacatgtgcttgggcactggtgggcctgggcttctgaggtggcctcctgccctgatcagggaccctccccgctttcctgggcctctcagttgaacaaagcagcaaaacaaaggcagttttatatgaaagattagaagcctggaataatcaggctttttaaatgatgtaattcccactgtaatagcatagggattttggaagcagctgctggtggcttgggacatcagtggggccaagggttctctgtccctggttcaactgtgatttggctttcccgtgtctttcctggtgatgccttgtttggggttctgtgggtttgggtgggaagagggccatctgcctgaatgtaacctgctagctctccgaaggccctgcgggcctggcttgtgtgagcgtgtggacagtggtggccgcgctgtgcctgctcgtgttgcctacatgtccctggctgttgaggcgctgcttcagcctgcacccctcccttgtctcatagatgctccttttgaccttttcaaataaatatggatggcgagctcctaggcctctggcttcctggtagagggcggcatgccgaagggtctgctgggtgtggattggatgctggggtgtgggggttggaagctgtctgtggcccacttgggcacccacgcttctgtccacttctggttgccaggagacagcaagcaaagccagcaggacatgaagttgctattaaatggacttcgtgatttttgttttgcactaaagtttctgtgatttaacaataaaattctgttagccag

SEQ ID NO: 169882 - DNA, 2872 bp, Homo sapiens
  Payload ID: 13440
  Gene Symbol: PSAP
  Gene Name: prosaposin
  Uniprot ID: P07602
  ENST ID: ENST00000394936
  CDS Start-End: 155-1729
agaggcgctgagtcagggcgctgttgagctcgggcaggcccggatggggcggggttagcgcctgcgctctggacggctttggggcagggcagatttatatctgcgggggatcagctgacgctccgcattgcagactgcggagtcagacggcgctatgtacgccctcttcctcctggccagcctcctgggcgcggctctagccggcccggtccttggactgaaagaatgcaccaggggctcggcagtgtggtgccagaatgtgaagacggcgtccgactgcggggcagtgaagcactgcctgcagaccgtttggaacaagccaacagtgaaatcccttccctgcgacatatgcaaagacgttgtcaccgcagctggtgatatgctgaaggacaatgccactgaggaggagatccttgtttacttggagaagacctgtgactggcttccgaaaccgaacatgtctgcttcatgcaaggagatagtggactcctacctccctgtcatcctggacatcattaaaggagaaatgagccgtcctggggaggtgtgctctgctctcaacctctgcgagtctctccagaagcacctagcagagctgaatcaccagaagcagctggagtccaataagatcccagagctggacatgactgaggtggtggcccccttcatggccaacatccctctcctcctctaccctcaggacggcccccgcagcaagccccagccaaaggataatggggacgtttgccaggactgcattcagatggtgactgacatccagactgctgtacggaccaactccacctttgtccaggccttggtggaacatgtcaaggaggagtgtgaccgcctgggccctggcatggccgacatatgcaagaactatatcagccagtattctgaaattgctatccagatgatgatgcacatgcaacccaaggagatctgtgcgctggttgggttctgtgatgaggtgaaagagatgcccatgcagactctggtccccgccaaagtggcctccaagaatgtcatccctgccctggaactggtggagcccattaagaagcacgaggtcccagcaaagtctgatgtttactgtgaggtgtgtgaattcctggtgaaggaggtgaccaagctgattgacaacaacaagactgagaaagaaatactcgacgcttttgacaaaatgtgctcgaagctgccgaagtccctgtcggaagagtgccaggaggtggtggacacgtacggcagctccatcctgtccatcctgctggaggaggtcagccctgagctggtgtgcagcatgctgcacctctgctctggcacgcggctgcctgcactgaccgttcacgtgactcagccaaaggacggtggcttctgcgaagtgtgcaagaagctggtgggttatttggatcgcaacctggagaaaaacagcaccaagcaggagatcctggctgctcttgagaaaggctgcagcttcctgccagacccttaccagaagcagtgtgatcagtttgtggcagagtacgagcccgtgctgatcgagatcctggtggaggtgatggatccttccttcgtgtgcttgaaaattggagcctgcccctcggcccataagcccttgttgggaactgagaagtgtatatggggcccaagctactggtgccagaacacagagacagcagcccagtgcaatgctgtcgagcattgcaaacgccatgtgtggaactaggaggaggaatattccatcttggcagaaaccacagcattggtttttttctacttgtgtgtctgggggaatgaacgcacagatctgtttgactttgttataaaaatagggctcccccacctcccccatttctgtgtcctttattgtagcattgctgtctgcaagggagcccctagcccctggcagacatagctgcttcagtgccccttttctctctgctagatggatgttgatgcactggaggtcttttagcctgcccttgcatggcgcctgctggaggaggagagagctctgctggcatgagccacagtttcttgactggaggccatcaaccctcttggttgaggccttgttctgagccctgacatgtgcttgggcactggtgggcctgggcttctgaggtggcctcctgccctgatcagggaccctccccgctttcctgggcctctcagttgaacaaagcagcaaaacaaaggcagttttatatgaaagattagaagcctggaataatcaggctttttaaatgatgtaattcccactgtaatagcatagggattttggaagcagctgctggtggcttgggacatcagtggggccaagggttctctgtccctggttcaactgtgatttggctttcccgtgtctttcctggtgatgccttgtttggggttctgtgggtttgggtgggaagagggccatctgcctgaatgtaacctgctagctctccgaaggccctgcgggcctggcttgtgtgagcgtgtggacagtggtggccgcgctgtgcctgctcgtgttgcctacatgtccctggctgttgaggcgctgcttcagcctgcacccctcccttgtctcatagatgctccttttgaccttttcaaataaatatggatggcgagctcctaggcctctggcttcctggtagagggcggcatgccgaagggtctgctgggtgtggattggatgctggggtgtgggggttggaagctgtctgtggcccacttgggcacccacgcttctgtccacttctggttgccaggagacagcaagcaaagccagcaggacatgaagttgctattaaatggacttcgtgatttttgttttgcactaaagtttctgtgatttaacaataaaattctgttagccaga

SEQ ID NO: 169883 - DNA, 1969 bp, Homo sapiens
  Payload ID: 13440
  Gene Symbol: PSAP
  Gene Name: prosaposin
  ENST ID: ENST00000610929
  CDS Start-End: 105-827
ggggttagcgcctgcgctctggacggctttggggcagggcagatttatatctgcgggggatcagctgacgctccgcattgcagactgcggagtcagacggcgctatgtacgccctcttcctcctggccagcctcctgggcgcggctctagccggcccggtccttggactgaaagaatgcaccaggggctcggcagtgtggtgccagaatgtgaagacggcgtccgactgcggggcagtgaagcactgcctgcagaccgtttggaacaagccaacagtgaaatcccttccctgcgacatatgcaaagacgttgtcaccgcagctggtgatatgctgaaggacaatgccactgaggaggagatccttgtttacttggaggtcagccctgagctggtgtgcagcatgctgcacctctgctctggcacgcggctgcctgcactgaccgttcacgtgactcagccaaaggacggtggcttctgcgaagtgtgcaagaagctggtgggttatttggatcgcaacctggagaaaaacagcaccaagcaggagatcctggctgctcttgagaaaggctgcagcttcctgccagacccttaccagaagcagtgtgatcagtttgtggcagagtacgagcccgtgctgatcgagatcctggtggaggtgatggatccttccttcgtgtgcttgaaaattggagcctgcccctcggcccataagcccttgttgggaactgagaagtgtatatggggcccaagctactggtgccagaacacagagacagcagcccagtgcaatgctgtcgagcattgcaaacgccatgtgtggaactaggaggaggaatattccatcttggcagaaaccacagcattggtttttttctacttgtgtgtctgggggaatgaacgcacagatctgtttgactttgttataaaaatagggctcccccacctcccccatttctgtgtcctttattgtagcattgctgtctgcaagggagcccctagcccctggcagacatagctgcttcagtgccccttttctctctgctagatggatgttgatgcactggaggtcttttagcctgcccttgcatggcgcctgctggaggaggagagagctctgctggcatgagccacagtttcttgactggaggccatcaaccctcttggttgaggccttgttctgagccctgacatgtgcttgggcactggtgggcctgggcttctgaggtggcctcctgccctgatcagggaccctccccgctttcctgggcctctcagttgaacaaagcagcaaaacaaaggcagttttatatgaaagattagaagcctggaataatcaggctttttaaatgatgtaattcccactgtaatagcatagggattttggaagcagctgctggtggcttgggacatcagtggggccaagggttctctgtccctggttcaactgtgatttggctttcccgtgtctttcctggtgatgccttgtttggggttctgtgggtttgggtgggaagagggccatctgcctgaatgtaacctgctagctctccgaaggccctgcgggcctggcttgtgtgagcgtgtggacagtggtggccgcgctgtgcctgctcgtgttgcctacatgtccctggctgttgaggcgctgcttcagcctgcacccctcccttgtctcatagatgctccttttgaccttttcaaataaatatggatggcgagctcctaggcctctggcttcctggtagagggcggcatgccgaagggtctgctgggtgtggattggatgctggggtgtgggggttggaagctgtctgtggcccacttgggcacccacgcttctgtccacttctggttgccaggagacagcaagcaaagccagcaggacatgaagttgctattaaatggacttcgtgatttttgttttgcactaaagtttctgtgatttaacaataaaattctgttagccag

SEQ ID NO: 169884 - DNA, 500 bp, Homo sapiens
  Payload ID: 13440
  Gene Symbol: PSAP
  Gene Name: prosaposin
  ENST ID: ENST00000633965
  CDS Start-End: 1-500
ctgcattcagatggtgactgacatccagactgctgtacggaccaactccacctttgtccaggccttggtggaacatgtcaaggaggagtgtgaccgcctgggccctggcatggccgacatatgcaagaactatatcagccagtattctgaaattgctatccagatgatgatgcacatgcaggatcagcaacccaaggagatctgtgcgctggttgggttctgtgatgaggtgaaagagatgcccatgcagactctggtccccgccaaagtggcctccaagaatgtcatccctgccctggaactggtggagcccattaagaagcacgaggtcccagcaaagtctgatgtttactgtgaggtgtgtgaattcctggtgaaggaggtgaccaagctgattgacaacaacaagactgagaaagaaatactcgacgcttttgacaaaatgtgctcgaagctgccgaagtccctgtcggaagagtgccaggaggtggtggacacgt

SEQ ID NO: 169885 - DNA, 2688 bp, Homo sapiens
  Payload ID: 13441
  Gene Symbol: PSAPL1
  Gene Name: prosaposin-like 1 (gene/pseudogene)
  Uniprot ID: Q6NUJ1
  ENST ID: ENST00000319098
  CDS Start-End: 67-1632
aggagagccaggtttatagcagcagccactgctgggtactctggagccagagagtccctgggcagcatgctgtgtgccctgctcctcctgcccagcctcctgggggccaccagggccagccccacctcaggcccccaggagtgtgcaaagggctccacggtgtggtgtcaggatctgcagacagctgccaggtgcggggctgtggggtactgccaaggggccgtatggaacaaacccaccgcgaagtctctgccctgcgacgtatgccaggacatagcagccgccgctggcaatgggctgaaccctgacgccacggagtctgacatcctggctttggtgatgaagacctgtgagtggctccccagccaggagtcttcagccggatgcaagtggatggtggatgcccacagttcggccatcctgagcatgctccgtggggccccggacagtgccccggcacaggtgtgcacagcgctcagcctctgtgagccgctgcagaggcacctggccaccctgaggccactctccaaagaggacacctttgaggctgtggctccgttcatggccaatgggccccttaccttccacccccgccaggcgcctgaaggagctctgtgccaagactgtgtacggcaggtctcccgactccaggaggctgtccggtccaacttgaccttggccgacttgaacatccaggagcagtgtgagtccttggggcctggcctggccgtcctctgcaagaactacctcttccagttttttgtccctgctgaccaagcactgaggcttctccccccgcaggagctctgcaggaaggggggattctgtgaggagctaggggcacctgcccgtttgactcaagtagtggccatggacggggtcccctccctggagctggggttgccaaggaaacagagcgagatgcagatgaaggccggtgtgacctgtgaggtgtgcatgaacgtggtgcagaagctggaccactggctcatgtccaacagctctgagctcatgatcacccatgccctggagcgcgtgtgctcggtaatgcctgcctctatcacgaaggagtgcatcatcttggtggacacctacagcccctccttggtgcagcttgtggccaaaatcaccccagagaaggtgtgcaagttcatccgtctgtgtggcaaccggaggcgggcccgggcagtccatgatgcctatgccatcgtgccgtccccagagtgggacgcggagaaccagggcagcttctgcaatgggtgcaagaggctgctcacggtgtcctcccacaacttggagagcaagagcaccaagcgagacatcctggtggccttcaagggtggctgcagcatcctgccgctgccctatatgatccagtgcaagcacttcgtcacccagtacgagcccgtgctcattgagagtctcaaggacatgatggaccccgtggctgtgtgcaagaaggtgggggcctgccacggccccaggaccccactgctgggcaccgaccagtgtgccctgggcccaagcttctggtgcaggagccaggaggccgccaagctgtgcaacgctgtgcaacactgccagaagcatgtatggaaagagatgcacctccacgctggggaacacgcgtgaccgtggctgccagagacccagagcctgctagcgaggcccatgaggtgggtgctttccccatccccatttcacaaatgaaaaactgaagctctgaggagggaggctgggaaggagcagagctgaagttcaaaaccaagtattcctgatcccgaaagcctctctcttaacaacggtgccgcacagctttgcccttgaaagcatctctactggaccggaacacactcatgtgccccgctccctgacccagccaaggctgccctctcatctccaaggctgagatgttgccggtggtcccatgagagcctgcccatgggctcaggtgcccctttaccttctgctggatggacatctggctgtgagccaggctggggtcatggccggggtgagcggaggcaggggtggacggaggcttcgagggcccatcactagtagggtcattacctcttgccaacagccgggggtgggagtctgggtctcgctcaggccagagcttctcaacctggagtccctgggggtggctgccaaaggtgtgtatgacaagcacgtatccctggacatttccggggagaggtctggggctttggtcacattctccaagggctgctgggcttcggagcagtccccccccatgtctcagccactacagggtccctctctctccttgcaccccagaccctccgctgccctggtaatgagcagaaggaaagtcttggggtgtgctcaaagtcaggagagcaaaatatgccaggcaaaagctcccgggaaaagccggaggagtctggggtggccaccgggatgtggagcagcgagggcaaagacggtgaacacagccctccagctgtctgagcctcagttttctaatctgtagaatggggatgatcatacctgcctcacaagaatgttgagacaattcacagagacgttctggagcccctttcccccgagaccggcattcatgagtctgctgggaccagaaaacccatctcaggggcccagcggggcacccaggagagtctggcggtgcaagcgctgtataaaccacaagcgttctccaaa

SEQ ID NO: 169886 - DNA, 8170 bp, Homo sapiens
  Payload ID: 13442
  Gene Symbol: PROX1
  Gene Name: prospero homeobox 1
  Uniprot ID: Q92786
  ENST ID: ENST00000261454
  CDS Start-End: 289-2502
cccctcgtgagtccctccccttttccagaatcacttgcactgtcttgttcttgaatgagaaaggaagaaaagagcctcccattactcagacccgtgtaaacattattccccccaggagaaaatggtgttattcaaatgaatcataataaaatagcctctaaacagtttctaagcgggagcctccgtggaactcagcgctccgctcctcccagttcctaagaggtcccgggattcttgagctgtgcccagctgacgagcttttgaagatggcacaataaccgtccagtgatgcctgaccatgacagcacagccctcttaagccggcaaaccaagaggagaagagttgacattggagtgaaaaggacggtagggacagcatctgcattttttgctaaggcaagagcaacgttttttagtgccatgaatccccaaggttctgagcaggatgttgagtattcagtggtgcagcatgcagatggggaaaagtcaaatgtactccgcaagctgctgaagagggcgaactcgtatgaagatgccatgatgccttttccaggagcaaccataatttcccagctgttgaaaaataacatgaacaaaaatggtggcacggagcccagtttccaagccagcggtctctctagtacaggctccgaagtacatcaggaggatatatgcagcaactcttcaagagacagccccccagagtgtctttccccttttggcaggcctactatgagccagtttgatatggatcgcttatgtgatgagcacctgagagcaaagcgcgcccgggttgagaatataattcggggtatgagccattcccccagtgtggcattaaggggcaatgaaaatgaaagagagatggccccgcagtctgtgagtccccgagaaagttacagagaaaacaaacgcaagcaaaagcttccccagcagcagcaacagagtttccagcagctggtttcagcccgaaaagaacagaagcgagaggagcgccgacagctgaaacagcagctggaggacatgcagaaacagctgcgccagctgcaggaaaagttctaccaaatctatgacagcactgattcggaaaatgatgaagatggtaacctgtctgaagacagcatgcgctcggagatcctggatgccagggcccaggactctgtcggaaggtcagataatgagatgtgcgagctagacccaggacagtttattgaccgagctcgagccctgatcagagagcaggaaatggctgaaaacaagccgaagcgagaaggcaacaacaaagaaagagaccatgggccaaactccttacaaccggaaggcaaacatttggctgagaccttgaaacaggaactgaacactgccatgtcgcaagttgtggacactgtggtcaaagtcttttcggccaagccctcccgccaggttcctcaggtcttcccacctctccagatcccccaggccagatttgcagtcaatggggaaaaccacaatttccacaccgccaaccagcgcctgcagtgctttggcgacgtcatcattccgaaccccctggacacctttggcaatgtgcagatggccagttccactgaccagacagaagcactgcccctggttgtccgcaaaaactcctctgaccagtctgcctccggccctgccgctggcggccaccaccagcccctgcaccagtcgcctctctctgccaccacgggcttcaccacgtccaccttccgccaccccttcccccttcccttgatggcctatccatttcagagcccattaggtgctccctccggctccttctctggaaaagacagagcctctcctgaatccttagacttaactagggataccacgagtctgaggaccaagatgtcatctcaccacctgagccaccacccttgttcaccagcacacccgcccagcaccgccgaagggctctccttgtcgctcataaagtccgagtgcggcgatcttcaagatatgtctgaaatatcaccttattcgggaagtgcaatgcaggaaggattgtcacccaatcacttgaaaaaagcaaagctcatgtttttttatacccgttatcccagctccaatatgctgaagacctacttctccgacgtaaagttcaacagatgcattacctctcagctcatcaagtggtttagcaatttccgtgagttttactacattcagatggagaagtacgcacgtcaagccatcaacgatggggtcaccagtactgaagagctgtctataaccagagactgtgagctgtacagggctctgaacatgcactacaataaagcaaatgactttgaggttccagagagattcctggaagttgctcagatcacattacgggagtttttcaatgccattatcgcaggcaaagatgttgatccttcctggaagaaggccatatacaaggtcatctgcaagctggatagtgaagtccctgagattttcaaatccccgaactgcctacaagagctgcttcatgagtagaaatttcaacaactctttttgaatgtatgaagagtagcagtcccctttggatgtccaagttatatgtgtctagattttgatttcatatatatgtgtatgggaggcatggatatgttatgaaatcagctggtaattcctcctcatcacgtttctctcattttcttttgttttccattgcaaggggatggttgttttctttctgcctttagtttgcttttgcccaaggcccttaacatttggacacttaaaatagggttaattttcagggaaaaagaatgttggcgtgtgtaaagtctctattagcaatgaagggaatttgttaacgatgcatccacttgattgatgacttattgcaaatggcggttggctgaggaaaacccatgacacagcacaactctacagacagtgatgtgtctcttgtttctactgctaagaaggtctgaaaatttaatgaaaccacttcatacatttaagtattttgtttggtttgaactcaatcagtagcttttccttacatgtttaaaaataattccaatgacagatgagcagctcacttttccaaagtaccccaaaaggccaaattaaaaaagaaaaataatcactctcaagccttgtctaagaaaagaggcaaactctgaaagtcgtaccagtttcttctggaggcaaagcaattttgcacaaaaccagctctctcaagatgagactagaaattcatacctggtcttgtagccacctctctaaacttgaaaataggttcttcttcataagtgagcttacatcattcttcataaagaaaaatcctataacttgttatcatttttgcttcagatactaaaaggcactaagtttccaatttacgctgctcaactttgtttatatgcttaaaaggattctgtttacttaacaattttttcccctaaaatactattttctgaatacttccttccagtaaggaataaaggaaagcccaacttggccataaaattcttgcctacactagaagtttgttgacagccattagctgacttgatcgtcatctcctaagaggaacacatatattttcacaagcaattccacactatcctgatgggtatgcaaagtggtgacagtctaactcagtgtttcttcattttaggtataacattttaaagcaattgataatgcctcttccaattcagaagctagtattgaccaaaatgtgagaagagtgtatagcataggaaaatttggggttaacccaaaagacacaattccagcacacataagaaagctagctgctattttatgctttcttccatggttctcctcttttttcccttttatttttccctgtttttcaatgatgtacagtgttccctacttgcattgaaaaaactcgtatggcattcacactttttttcttaggtgggtttttgtgtccagatgcagtaagaattcattgttcatcctaaaactgttttccagacccttccttccccttaggtaatttgatatacacctcctaaaatgacacagtaacaaatctggtatttagaacatatagaacataaatgccattttttaattcaactttaataagaattacatttgactttggagaatacaggtcttgacccatgtgactgactagctgacccgatcgctgtaatttaacgtcatttataaattctgctgatggacaggaatgtatgaactcaattattgtcagcacaaagccttaaaacctgctgactttaaattaaatggtgcagtcctatgatgccctgcaccatccaggggactaacagggcctcgcagtgtagacagagggtgcagccacacgggcgggggcaccagccacctcactctgcacccgcggcctcacacatctcccagctcacactctactaatgcacagagtcattagatccaatttgttatttttctcacttgctttaaaaaaaagcagtttggataatcatgacattggaataaagtgggaaggaaaaattccatcagcacaaaatagggaagtaatcccaacttgtagtcacagttttctgactggctttgttttaaaagaggatggcagtccttgttcgtgtcagtgtgccactgggtttttgctgttccgtgtaattcatatcaactttgtgttgccatttgcaaggtaaaaggcaaagctgtagtgtattcacctatgtagacagattgctagatatctttttgatctggggcgagttcaatattgattccagacttatttggatttttttagtattattttcccctccctttctaatttaaatagacaaattaagcaaaagtgtgtgttcacaaccaaatgttgatgcccttatctactgataatatcctctcaatgttcactgaggcatagaaattatttcagagtagaaattgcagcatgaggataaactcacctctttgttctgaaaatagaactttatcactatgctttccggtggttttcccttttacaatcgaaatcttgtgcctcccaagtgcattggaaaatgacaaaagcctgtctctccaaattcctatttaacagtttgattttttttttttaatcaccatctttcaaatcttagctcaactctcaccaagtgaaaattggctacttgggagaaagttaactttctatggtgggatggtgaaggatgagggacagtttacataggaaaagaaaaaaaaaagtctaaagtccatgttgaaaaaccacactaccacttattttctgctaaccctaaattatttttgcgtatacgcttgaggttatagtctgtgcctagacctaaaatgcaccagcgggggggattttaaaaaatccttcaaaataccagttttttcccaacaagtacaattgttcttgtgccttctgtggctttcgatttcatctttttgactttatttccaattactacagctgcaataaacactagattttttttctggctgtttgacataacgttgatagctatgcatattttgtgtctttttaaaacaaagcgggagaatacgtttttgaagaagagaatttttagaacagtttgataccgcaaattattttttcctcaattgtttgagcagcattcgagttttgaaaattcttgtagaagccaattttttgtaactgtggtgcaaatcttgtgttttcttagcctaatgaaaagtagtatagaagcaatatttcataccatgtgctatatatgtgtgcgcagatgtgtgaacataaaatcacatacacacatatacacacatgtaaaaatatacatatatatatatgcgtgtgaagtggaaagcttaccttttcctatctagatttaagaacctattttagacatttgttatgttttgtgaaaagaatgttctatttgcaacaaaacatttaattcttactgtatctctggctgtttaatgaggacgtttcacattaaatggtaaaacacatggaagatgttagaatgtagtaattatttaagtaaacgttcacccacatattcctgaagtttgctttgtgcctccgagtattatttaattaaagaagtgttttatgtttgcagaatctttgtcactgtactagggatgtgggtgaatatcatttaaaaaaatttaaaacaacaaaaaaaaagcaaaacagaaacactaaagcaagaggggaacttttataaagcaatgtaaatatttaacctcatggctgtcattatgtaagacatgagattttaataaataactacattctcacgacatctgttgaatttactaggaacactacagtgactgtatagacagttgaaagcattcttgaaaatcctgctctctccttttaaaagttaacaatctcttttatcagatgtcaagggcaagggtaatgcagtttctgtaaatttatgaaatttctttttctatgtacatgaagacatttagtaagtaacacccccccttcccatgcgcacatgtgcgcatacacacacacacacacacacacacacacacaaacacacacactgtcataaagctaatgatttggggactttaaaaaataggatgtcctccaggaacaatcataaatttatgaaagaaagagtagtttacagactcccctgaaagaagcagtgtatatgtgaagacagtgcaaaaatctctttgccatgtatattatagcgtattcattggtgtgaatagtacaaatgtttccttctggtacaaactctgtgtttgcaaatttacaagaagcattgttttcaaaaagctccccttaaaaaatgtaactggtttatatgagtaagcagttaccgtattgcacttaaatgttatgttgaaggaaatgcagttttgttttctgtagatctgttggttgtaaaccatctataaaactaaagctaaaatgctcatattcagagctgggatcaaaactggtatttaacctttgcatcttcttataattatccttctaagaatataacagaatgtggaagtgtctggactttgagtcttttcaactgagccttctctcaaatctgacaccccctcagaatgcacaaacataagcagaaaaggcaaacaagcttaccttcttttgtgaaaacgtattcattctgtatttttttaaatattcaattcccctaaaaatggggagaaaatattttaaaattgtatattacgacttcaaatttagaactaagaaaaaaatgtatttgggattggtctcagcgctacctagaagaatcaaaggtcatggcttccctcaatattgtcccagccatttctcatatgtatatagtataaaccgtgacaaaacactgcctttatattatttagcaatatgttgtaaatagcattattaagctcttttttgtaataaagaccctttgatttgaatatagtacaataactgaactgataaagtcaatttttgatttttgtttgttttttttagctagaggcaatttcaattgtgaatttttgttgttgtctattgttctgaagactttgcataatttattggtttaatttatcctaatttatttgatgaaggtgtacaattttgtattaccaaggatgtactgtaatattaattgatatgataaacacaatgagactccctgtccatattaaaaagaaaataaaaaggtgcagtagacaattgattttaaaggaaaagttaaaaaaattagtttggcagctactaaattttaaaacaggaaaaaaaaaagttgttgtggggagggtgggaaaggggttttactttgtgtgttttaagcttttgtatactctccaaacttttaccttttgctttgtaccacttaaaggatacagtagtccaattgccttgtgtgccttccatctcctcttaaactgaatgtatgtgcagtatatatgcaagcttgtgcaaaataaaatatacattacaagctcagtgccgtttgattttcttaaagaaagagtgacttttaatttttggacctgtatccaattgtaggacagtaggctagttgtgccagtaatgtcaagtatggagattttctttcactacaattcttcattctgttagcctaacgtgcagctcctagaaacaacctcttttactttagatgcttggaataattgcttggatttctctctctgaaacatctttcaggcttaactttatttagccctgaaactt

SEQ ID NO: 169887 - DNA, 8240 bp, Homo sapiens
  Payload ID: 13442
  Gene Symbol: PROX1
  Gene Name: prospero homeobox 1
  Uniprot ID: Q92786
  ENST ID: ENST00000366958
  CDS Start-End: 609-2822
aagtaaatcttgttgtggagcggagccctcagctgagggagcgctctgaaataatacaccattgcagccggggaaagcagagcggcgcaaaagagctctcgccgggtccgcctgctccctctccgcttcgctcctcttctcttctttacccttctcctctctcctcctctgctgctctctcctctcctcccgctcttctctctcctcctctcctgctctctcctcttcccttagctcctcttcttttcttctcctcttcttccctctcctcgcctctcccctgctcctcttctctcgtctcccctcccctcccgcctctctctcccctctccctctcccactcgccccgctcgctcgctcgctgtcgcacagactcaccgtcccttgtccaattatcatattcatcacccgcaagatatcaccgtgtgtgcactcgcgtgttttcctctctctgccgggggaaaaaaaagagagagagagagatagagagagagagagagagagagagagagaggctcggtcccactgctccctgcaccgcggtcccgggattcttgagctgtgcccagctgacgagcttttgaagatggcacaataaccgtccagtgatgcctgaccatgacagcacagccctcttaagccggcaaaccaagaggagaagagttgacattggagtgaaaaggacggtagggacagcatctgcattttttgctaaggcaagagcaacgttttttagtgccatgaatccccaaggttctgagcaggatgttgagtattcagtggtgcagcatgcagatggggaaaagtcaaatgtactccgcaagctgctgaagagggcgaactcgtatgaagatgccatgatgccttttccaggagcaaccataatttcccagctgttgaaaaataacatgaacaaaaatggtggcacggagcccagtttccaagccagcggtctctctagtacaggctccgaagtacatcaggaggatatatgcagcaactcttcaagagacagccccccagagtgtctttccccttttggcaggcctactatgagccagtttgatatggatcgcttatgtgatgagcacctgagagcaaagcgcgcccgggttgagaatataattcggggtatgagccattcccccagtgtggcattaaggggcaatgaaaatgaaagagagatggccccgcagtctgtgagtccccgagaaagttacagagaaaacaaacgcaagcaaaagcttccccagcagcagcaacagagtttccagcagctggtttcagcccgaaaagaacagaagcgagaggagcgccgacagctgaaacagcagctggaggacatgcagaaacagctgcgccagctgcaggaaaagttctaccaaatctatgacagcactgattcggaaaatgatgaagatggtaacctgtctgaagacagcatgcgctcggagatcctggatgccagggcccaggactctgtcggaaggtcagataatgagatgtgcgagctagacccaggacagtttattgaccgagctcgagccctgatcagagagcaggaaatggctgaaaacaagccgaagcgagaaggcaacaacaaagaaagagaccatgggccaaactccttacaaccggaaggcaaacatttggctgagaccttgaaacaggaactgaacactgccatgtcgcaagttgtggacactgtggtcaaagtcttttcggccaagccctcccgccaggttcctcaggtcttcccacctctccagatcccccaggccagatttgcagtcaatggggaaaaccacaatttccacaccgccaaccagcgcctgcagtgctttggcgacgtcatcattccgaaccccctggacacctttggcaatgtgcagatggccagttccactgaccagacagaagcactgcccctggttgtccgcaaaaactcctctgaccagtctgcctccggccctgccgctggcggccaccaccagcccctgcaccagtcgcctctctctgccaccacgggcttcaccacgtccaccttccgccaccccttcccccttcccttgatggcctatccatttcagagcccattaggtgctccctccggctccttctctggaaaagacagagcctctcctgaatccttagacttaactagggataccacgagtctgaggaccaagatgtcatctcaccacctgagccaccacccttgttcaccagcacacccgcccagcaccgccgaagggctctccttgtcgctcataaagtccgagtgcggcgatcttcaagatatgtctgaaatatcaccttattcgggaagtgcaatgcaggaaggattgtcacccaatcacttgaaaaaagcaaagctcatgtttttttatacccgttatcccagctccaatatgctgaagacctacttctccgacgtaaagttcaacagatgcattacctctcagctcatcaagtggtttagcaatttccgtgagttttactacattcagatggagaagtacgcacgtcaagccatcaacgatggggtcaccagtactgaagagctgtctataaccagagactgtgagctgtacagggctctgaacatgcactacaataaagcaaatgactttgaggttccagagagattcctggaagttgctcagatcacattacgggagtttttcaatgccattatcgcaggcaaagatgttgatccttcctggaagaaggccatatacaaggtcatctgcaagctggatagtgaagtccctgagattttcaaatccccgaactgcctacaagagctgcttcatgagtagaaatttcaacaactctttttgaatgtatgaagagtagcagtcccctttggatgtccaagttatatgtgtctagattttgatttcatatatatgtgtatgggaggcatggatatgttatgaaatcagctggtaattcctcctcatcacgtttctctcattttcttttgttttccattgcaaggggatggttgttttctttctgcctttagtttgcttttgcccaaggcccttaacatttggacacttaaaatagggttaattttcagggaaaaagaatgttggcgtgtgtaaagtctctattagcaatgaagggaatttgttaacgatgcatccacttgattgatgacttattgcaaatggcggttggctgaggaaaacccatgacacagcacaactctacagacagtgatgtgtctcttgtttctactgctaagaaggtctgaaaatttaatgaaaccacttcatacatttaagtattttgtttggtttgaactcaatcagtagcttttccttacatgtttaaaaataattccaatgacagatgagcagctcacttttccaaagtaccccaaaaggccaaattaaaaaagaaaaataatcactctcaagccttgtctaagaaaagaggcaaactctgaaagtcgtaccagtttcttctggaggcaaagcaattttgcacaaaaccagctctctcaagatgagactagaaattcatacctggtcttgtagccacctctctaaacttgaaaataggttcttcttcataagtgagcttacatcattcttcataaagaaaaatcctataacttgttatcatttttgcttcagatactaaaaggcactaagtttccaatttacgctgctcaactttgtttatatgcttaaaaggattctgtttacttaacaattttttcccctaaaatactattttctgaatacttccttccagtaaggaataaaggaaagcccaacttggccataaaattcttgcctacactagaagtttgttgacagccattagctgacttgatcgtcatctcctaagaggaacacatatattttcacaagcaattccacactatcctgatgggtatgcaaagtggtgacagtctaactcagtgtttcttcattttaggtataacattttaaagcaattgataatgcctcttccaattcagaagctagtattgaccaaaatgtgagaagagtgtatagcataggaaaatttggggttaacccaaaagacacaattccagcacacataagaaagctagctgctattttatgctttcttccatggttctcctcttttttcccttttatttttccctgtttttcaatgatgtacagtgttccctacttgcattgaaaaaactcgtatggcattcacactttttttcttaggtgggtttttgtgtccagatgcagtaagaattcattgttcatcctaaaactgttttccagacccttccttccccttaggtaatttgatatacacctcctaaaatgacacagtaacaaatctggtatttagaacatatagaacataaatgccattttttaattcaactttaataagaattacatttgactttggagaatacaggtcttgacccatgtgactgactagctgacccgatcgctgtaatttaacgtcatttataaattctgctgatggacaggaatgtatgaactcaattattgtcagcacaaagccttaaaacctgctgactttaaattaaatggtgcagtcctatgatgccctgcaccatccaggggactaacagggcctcgcagtgtagacagagggtgcagccacacgggcgggggcaccagccacctcactctgcacccgcggcctcacacatctcccagctcacactctactaatgcacagagtcattagatccaatttgttatttttctcacttgctttaaaaaaaagcagtttggataatcatgacattggaataaagtgggaaggaaaaattccatcagcacaaaatagggaagtaatcccaacttgtagtcacagttttctgactggctttgttttaaaagaggatggcagtccttgttcgtgtcagtgtgccactgggtttttgctgttccgtgtaattcatatcaactttgtgttgccatttgcaaggtaaaaggcaaagctgtagtgtattcacctatgtagacagattgctagatatctttttgatctggggcgagttcaatattgattccagacttatttggatttttttagtattattttcccctccctttctaatttaaatagacaaattaagcaaaagtgtgtgttcacaaccaaatgttgatgcccttatctactgataatatcctctcaatgttcactgaggcatagaaattatttcagagtagaaattgcagcatgaggataaactcacctctttgttctgaaaatagaactttatcactatgctttccggtggttttcccttttacaatcgaaatcttgtgcctcccaagtgcattggaaaatgacaaaagcctgtctctccaaattcctatttaacagtttgattttttttttttaatcaccatctttcaaatcttagctcaactctcaccaagtgaaaattggctacttgggagaaagttaactttctatggtgggatggtgaaggatgagggacagtttacataggaaaagaaaaaaaaaagtctaaagtccatgttgaaaaaccacactaccacttattttctgctaaccctaaattatttttgcgtatacgcttgaggttatagtctgtgcctagacctaaaatgcaccagcgggggggattttaaaaaatccttcaaaataccagttttttcccaacaagtacaattgttcttgtgccttctgtggctttcgatttcatctttttgactttatttccaattactacagctgcaataaacactagattttttttctggctgtttgacataacgttgatagctatgcatattttgtgtctttttaaaacaaagcgggagaatacgtttttgaagaagagaatttttagaacagtttgataccgcaaattattttttcctcaattgtttgagcagcattcgagttttgaaaattcttgtagaagccaattttttgtaactgtggtgcaaatcttgtgttttcttagcctaatgaaaagtagtatagaagcaatatttcataccatgtgctatatatgtgtgcgcagatgtgtgaacataaaatcacatacacacatatacacacatgtaaaaatatacatatatatatatgcgtgtgaagtggaaagcttaccttttcctatctagatttaagaacctattttagacatttgttatgttttgtgaaaagaatgttctatttgcaacaaaacatttaattcttactgtatctctggctgtttaatgaggacgtttcacattaaatggtaaaacacatggaagatgttagaatgtagtaattatttaagtaaacgttcacccacatattcctgaagtttgctttgtgcctccgagtattatttaattaaagaagtgttttatgtttgcagaatctttgtcactgtactagggatgtgggtgaatatcatttaaaaaaatttaaaacaacaaaaaaaaagcaaaacagaaacactaaagcaagaggggaacttttataaagcaatgtaaatatttaacctcatggctgtcattatgtaagacatgagattttaataaataactacattctcacgacatctgttgaatttactaggaacactacagtgactgtatagacagttgaaagcattcttgaaaatcctgctctctccttttaaaagttaacaatctcttttatcagatgtcaagggcaagggtaatgcagtttctgtaaatttatgaaatttctttttctatgtacatgaagacatttagtaagtaacacccccccttcccatgcgcacatgtgcgcatacacacacacacacacacacacacacacacaaacacacacactgtcataaagctaatgatttggggactttaaaaaataggatgtcctccaggaacaatcataaatttatgaaagaaagagtagtttacagactcccctgaaagaagcagtgtatatgtgaagacagtgcaaaaatctctttgccatgtatattatagcgtattcattggtgtgaatagtacaaatgtttccttctggtacaaactctgtgtttgcaaatttacaagaagcattgttttcaaaaagctccccttaaaaaatgtaactggtttatatgagtaagcagttaccgtattgcacttaaatgttatgttgaaggaaatgcagttttgttttctgtagatctgttggttgtaaaccatctataaaactaaagctaaaatgctcatattcagagctgggatcaaaactggtatttaacctttgcatcttcttataattatccttctaagaatataacagaatgtggaagtgtctggactttgagtcttttcaactgagccttctctcaaatctgacaccccctcagaatgcacaaacataagcagaaaaggcaaacaagcttaccttcttttgtgaaaacgtattcattctgtatttttttaaatattcaattcccctaaaaatggggagaaaatattttaaaattgtatattacgacttcaaatttagaactaagaaaaaaatgtatttgggattggtctcagcgctacctagaagaatcaaaggtcatggcttccctcaatattgtcccagccatttctcatatgtatatagtataaaccgtgacaaaacactgcctttatattatttagcaatatgttgtaaatagcattattaagctcttttttgtaataaagaccctttgatttgaatatagtacaataactgaactgataaagtcaatttttgatttttgtttgttttttttagctagaggcaatttcaattgtgaatttttgttgttgtctattgttctgaagactttgcataatttattggtttaatttatcctaatttatttgatgaaggtgtacaattttgtattaccaaggatgtactgtaatattaattgatatgataaacacaatgagactccctgtccatattaaaaagaaaataaaaaggtgcagtagacaattgattttaaaggaaaagttaaaaaaattagtttggcagctactaaattttaaaacaggaaaaaaaaaagttgttgtggggagggtgggaaaggggttttactttgtgtgttttaagcttttgtatactctccaaacttttaccttttgctttgtaccacttaaaggatacagtagtccaattgccttgtgtgccttccatctcctcttaaactgaatgtatgtgcagtatatatgcaagcttgtgcaaaataaaatatacattacaagctc

SEQ ID NO: 169888 - DNA, 3075 bp, Homo sapiens
  Payload ID: 13442
  Gene Symbol: PROX1
  Gene Name: prospero homeobox 1
  Uniprot ID: Q92786
  ENST ID: ENST00000435016
  CDS Start-End: 273-2486
ccccttttccagaatcacttgcactgtcttgttcttgaatgagaaaggaagaaaagagcctcccattactcagacccgtgtaaacattattccccccaggagaaaatggtgttattcaaatgaatcataataaaatagcctctaaacagtttctaagcgggagcctccgtggaactcagcgctccgctcctcccagttcctaagaggtcccgggattcttgagctgtgcccagctgacgagcttttgaagatggcacaataaccgtccagtgatgcctgaccatgacagcacagccctcttaagccggcaaaccaagaggagaagagttgacattggagtgaaaaggacggtagggacagcatctgcattttttgctaaggcaagagcaacgttttttagtgccatgaatccccaaggttctgagcaggatgttgagtattcagtggtgcagcatgcagatggggaaaagtcaaatgtactccgcaagctgctgaagagggcgaactcgtatgaagatgccatgatgccttttccaggagcaaccataatttcccagctgttgaaaaataacatgaacaaaaatggtggcacggagcccagtttccaagccagcggtctctctagtacaggctccgaagtacatcaggaggatatatgcagcaactcttcaagagacagccccccagagtgtctttccccttttggcaggcctactatgagccagtttgatatggatcgcttatgtgatgagcacctgagagcaaagcgcgcccgggttgagaatataattcggggtatgagccattcccccagtgtggcattaaggggcaatgaaaatgaaagagagatggccccgcagtctgtgagtccccgagaaagttacagagaaaacaaacgcaagcaaaagcttccccagcagcagcaacagagtttccagcagctggtttcagcccgaaaagaacagaagcgagaggagcgccgacagctgaaacagcagctggaggacatgcagaaacagctgcgccagctgcaggaaaagttctaccaaatctatgacagcactgattcggaaaatgatgaagatggtaacctgtctgaagacagcatgcgctcggagatcctggatgccagggcccaggactctgtcggaaggtcagataatgagatgtgcgagctagacccaggacagtttattgaccgagctcgagccctgatcagagagcaggaaatggctgaaaacaagccgaagcgagaaggcaacaacaaagaaagagaccatgggccaaactccttacaaccggaaggcaaacatttggctgagaccttgaaacaggaactgaacactgccatgtcgcaagttgtggacactgtggtcaaagtcttttcggccaagccctcccgccaggttcctcaggtcttcccacctctccagatcccccaggccagatttgcagtcaatggggaaaaccacaatttccacaccgccaaccagcgcctgcagtgctttggcgacgtcatcattccgaaccccctggacacctttggcaatgtgcagatggccagttccactgaccagacagaagcactgcccctggttgtccgcaaaaactcctctgaccagtctgcctccggccctgccgctggcggccaccaccagcccctgcaccagtcgcctctctctgccaccacgggcttcaccacgtccaccttccgccaccccttcccccttcccttgatggcctatccatttcagagcccattaggtgctccctccggctccttctctggaaaagacagagcctctcctgaatccttagacttaactagggataccacgagtctgaggaccaagatgtcatctcaccacctgagccaccacccttgttcaccagcacacccgcccagcaccgccgaagggctctccttgtcgctcataaagtccgagtgcggcgatcttcaagatatgtctgaaatatcaccttattcgggaagtgcaatgcaggaaggattgtcacccaatcacttgaaaaaagcaaagctcatgtttttttatacccgttatcccagctccaatatgctgaagacctacttctccgacgtaaagttcaacagatgcattacctctcagctcatcaagtggtttagcaatttccgtgagttttactacattcagatggagaagtacgcacgtcaagccatcaacgatggggtcaccagtactgaagagctgtctataaccagagactgtgagctgtacagggctctgaacatgcactacaataaagcaaatgactttgaggttccagagagattcctggaagttgctcagatcacattacgggagtttttcaatgccattatcgcaggcaaagatgttgatccttcctggaagaaggccatatacaaggtcatctgcaagctggatagtgaagtccctgagattttcaaatccccgaactgcctacaagagctgcttcatgagtagaaatttcaacaactctttttgaatgtatgaagagtagcagtcccctttggatgtccaagttatatgtgtctagattttgatttcatatatatgtgtatgggaggcatggatatgttatgaaatcagctggtaattcctcctcatcacgtttctctcattttcttttgttttccattgcaaggggatggttgttttctttctgcctttagtttgcttttgcccaaggcccttaacatttggacacttaaaatagggttaattttcagggaaaaagaatgttggcgtgtgtaaagtctctattagcaatgaagggaatttgttaacgatgcatccacttgattgatgacttattgcaaatggcggttggctgaggaaaacccatgacacagcacaactctacagacagtgatgtgtctcttgtttctactgctaagaaggtctgaaaatttaatgaaaccacttcatacatttaagtattttgtttggtttgaactcaatcagtagcttttccttacatgtttaaaaataattccaatgacagatgagcagctcacttttccaaagtaccccaaaaggccaaattaaaaaa

SEQ ID NO: 169889 - DNA, 900 bp, Homo sapiens
  Payload ID: 13442
  Gene Symbol: PROX1
  Gene Name: prospero homeobox 1
  ENST ID: ENST00000471129
  CDS Start-End: 211-900
ctggagaggagattcccagccttcctgcccaacccgaaacttttccaacacacgcaggcgtattcctcgcaggattcggcggtcccgagtcgcagtcagggaggaggctcgggaagcacacgtgccctggcacactggaggagggtcccgggattcttgagctgtgcccagctgacgagcttttgaagatggcacaataaccgtccagtgatgcctgaccatgacagcacagccctcttaagccggcaaaccaagaggagaagagttgacattggagtgaaaaggacggtagggacagcatctgcattttttgctaaggcaagagcaacgttttttagtgccatgaatccccaaggttctgagcaggatgttgagtattcagtggtgcagcatgcagatggggaaaagtcaaatgtactccgcaagctgctgaagagggcgaactcgtatgaagatgccatgatgccttttccaggagcaaccataatttcccagctgttgaaaaataacatgaacaaaaatggtggcacggagcccagtttccaagccagcggtctctctagtacaggctccgaagtacatcaggaggatatatgcagcaactcttcaagagacagccccccagagtgtctttccccttttggcaggcctactatgagccagtttgatatggatcgcttatgtgatgagcacctgagagcaaagcgcgcccgggttgagaatataattcggggtatgagccattcccccagtgtggcattaaggggcaatgaaaatgaaagagagatggccccgcagtctgtgagtccccgagaaagttacagagaaaacaaacgcaagcaaaagcttccccagcagcagcaacagagtttccagcagctggtttcagcccgaaaagaa

SEQ ID NO: 169890 - DNA, 8498 bp, Homo sapiens
  Payload ID: 13442
  Gene Symbol: PROX1
  Gene Name: prospero homeobox 1
  Uniprot ID: Q92786
  ENST ID: ENST00000498508
  CDS Start-End: 617-2830
gtgtcttaaagtaaatcttgttgtggagcggagccctcagctgagggagcgctctgaaataatacaccattgcagccggggaaagcagagcggcgcaaaagagctctcgccgggtccgcctgctccctctccgcttcgctcctcttctcttctttacccttctcctctctcctcctctgctgctctctcctctcctcccgctcttctctctcctcctctcctgctctctcctcttcccttagctcctcttcttttcttctcctcttcttccctctcctcgcctctcccctgctcctcttctctcgtctcccctcccctcccgcctctctctcccctctccctctcccactcgccccgctcgctcgctcgctgtcgcacagactcaccgtcccttgtccaattatcatattcatcacccgcaagatatcaccgtgtgtgcactcgcgtgttttcctctctctgccgggggaaaaaaaagagagagagagagatagagagagagagagagagagagagagagaggctcggtcccactgctccctgcaccgcggtcccgggattcttgagctgtgcccagctgacgagcttttgaagatggcacaataaccgtccagtgatgcctgaccatgacagcacagccctcttaagccggcaaaccaagaggagaagagttgacattggagtgaaaaggacggtagggacagcatctgcattttttgctaaggcaagagcaacgttttttagtgccatgaatccccaaggttctgagcaggatgttgagtattcagtggtgcagcatgcagatggggaaaagtcaaatgtactccgcaagctgctgaagagggcgaactcgtatgaagatgccatgatgccttttccaggagcaaccataatttcccagctgttgaaaaataacatgaacaaaaatggtggcacggagcccagtttccaagccagcggtctctctagtacaggctccgaagtacatcaggaggatatatgcagcaactcttcaagagacagccccccagagtgtctttccccttttggcaggcctactatgagccagtttgatatggatcgcttatgtgatgagcacctgagagcaaagcgcgcccgggttgagaatataattcggggtatgagccattcccccagtgtggcattaaggggcaatgaaaatgaaagagagatggccccgcagtctgtgagtccccgagaaagttacagagaaaacaaacgcaagcaaaagcttccccagcagcagcaacagagtttccagcagctggtttcagcccgaaaagaacagaagcgagaggagcgccgacagctgaaacagcagctggaggacatgcagaaacagctgcgccagctgcaggaaaagttctaccaaatctatgacagcactgattcggaaaatgatgaagatggtaacctgtctgaagacagcatgcgctcggagatcctggatgccagggcccaggactctgtcggaaggtcagataatgagatgtgcgagctagacccaggacagtttattgaccgagctcgagccctgatcagagagcaggaaatggctgaaaacaagccgaagcgagaaggcaacaacaaagaaagagaccatgggccaaactccttacaaccggaaggcaaacatttggctgagaccttgaaacaggaactgaacactgccatgtcgcaagttgtggacactgtggtcaaagtcttttcggccaagccctcccgccaggttcctcaggtcttcccacctctccagatcccccaggccagatttgcagtcaatggggaaaaccacaatttccacaccgccaaccagcgcctgcagtgctttggcgacgtcatcattccgaaccccctggacacctttggcaatgtgcagatggccagttccactgaccagacagaagcactgcccctggttgtccgcaaaaactcctctgaccagtctgcctccggccctgccgctggcggccaccaccagcccctgcaccagtcgcctctctctgccaccacgggcttcaccacgtccaccttccgccaccccttcccccttcccttgatggcctatccatttcagagcccattaggtgctccctccggctccttctctggaaaagacagagcctctcctgaatccttagacttaactagggataccacgagtctgaggaccaagatgtcatctcaccacctgagccaccacccttgttcaccagcacacccgcccagcaccgccgaagggctctccttgtcgctcataaagtccgagtgcggcgatcttcaagatatgtctgaaatatcaccttattcgggaagtgcaatgcaggaaggattgtcacccaatcacttgaaaaaagcaaagctcatgtttttttatacccgttatcccagctccaatatgctgaagacctacttctccgacgtaaagttcaacagatgcattacctctcagctcatcaagtggtttagcaatttccgtgagttttactacattcagatggagaagtacgcacgtcaagccatcaacgatggggtcaccagtactgaagagctgtctataaccagagactgtgagctgtacagggctctgaacatgcactacaataaagcaaatgactttgaggttccagagagattcctggaagttgctcagatcacattacgggagtttttcaatgccattatcgcaggcaaagatgttgatccttcctggaagaaggccatatacaaggtcatctgcaagctggatagtgaagtccctgagattttcaaatccccgaactgcctacaagagctgcttcatgagtagaaatttcaacaactctttttgaatgtatgaagagtagcagtcccctttggatgtccaagttatatgtgtctagattttgatttcatatatatgtgtatgggaggcatggatatgttatgaaatcagctggtaattcctcctcatcacgtttctctcattttcttttgttttccattgcaaggggatggttgttttctttctgcctttagtttgcttttgcccaaggcccttaacatttggacacttaaaatagggttaattttcagggaaaaagaatgttggcgtgtgtaaagtctctattagcaatgaagggaatttgttaacgatgcatccacttgattgatgacttattgcaaatggcggttggctgaggaaaacccatgacacagcacaactctacagacagtgatgtgtctcttgtttctactgctaagaaggtctgaaaatttaatgaaaccacttcatacatttaagtattttgtttggtttgaactcaatcagtagcttttccttacatgtttaaaaataattccaatgacagatgagcagctcacttttccaaagtaccccaaaaggccaaattaaaaaagaaaaataatcactctcaagccttgtctaagaaaagaggcaaactctgaaagtcgtaccagtttcttctggaggcaaagcaattttgcacaaaaccagctctctcaagatgagactagaaattcatacctggtcttgtagccacctctctaaacttgaaaataggttcttcttcataagtgagcttacatcattcttcataaagaaaaatcctataacttgttatcatttttgcttcagatactaaaaggcactaagtttccaatttacgctgctcaactttgtttatatgcttaaaaggattctgtttacttaacaattttttcccctaaaatactattttctgaatacttccttccagtaaggaataaaggaaagcccaacttggccataaaattcttgcctacactagaagtttgttgacagccattagctgacttgatcgtcatctcctaagaggaacacatatattttcacaagcaattccacactatcctgatgggtatgcaaagtggtgacagtctaactcagtgtttcttcattttaggtataacattttaaagcaattgataatgcctcttccaattcagaagctagtattgaccaaaatgtgagaagagtgtatagcataggaaaatttggggttaacccaaaagacacaattccagcacacataagaaagctagctgctattttatgctttcttccatggttctcctcttttttcccttttatttttccctgtttttcaatgatgtacagtgttccctacttgcattgaaaaaactcgtatggcattcacactttttttcttaggtgggtttttgtgtccagatgcagtaagaattcattgttcatcctaaaactgttttccagacccttccttccccttaggtaatttgatatacacctcctaaaatgacacagtaacaaatctggtatttagaacatatagaacataaatgccattttttaattcaactttaataagaattacatttgactttggagaatacaggtcttgacccatgtgactgactagctgacccgatcgctgtaatttaacgtcatttataaattctgctgatggacaggaatgtatgaactcaattattgtcagcacaaagccttaaaacctgctgactttaaattaaatggtgcagtcctatgatgccctgcaccatccaggggactaacagggcctcgcagtgtagacagagggtgcagccacacgggcgggggcaccagccacctcactctgcacccgcggcctcacacatctcccagctcacactctactaatgcacagagtcattagatccaatttgttatttttctcacttgctttaaaaaaaagcagtttggataatcatgacattggaataaagtgggaaggaaaaattccatcagcacaaaatagggaagtaatcccaacttgtagtcacagttttctgactggctttgttttaaaagaggatggcagtccttgttcgtgtcagtgtgccactgggtttttgctgttccgtgtaattcatatcaactttgtgttgccatttgcaaggtaaaaggcaaagctgtagtgtattcacctatgtagacagattgctagatatctttttgatctggggcgagttcaatattgattccagacttatttggatttttttagtattattttcccctccctttctaatttaaatagacaaattaagcaaaagtgtgtgttcacaaccaaatgttgatgcccttatctactgataatatcctctcaatgttcactgaggcatagaaattatttcagagtagaaattgcagcatgaggataaactcacctctttgttctgaaaatagaactttatcactatgctttccggtggttttcccttttacaatcgaaatcttgtgcctcccaagtgcattggaaaatgacaaaagcctgtctctccaaattcctatttaacagtttgattttttttttttaatcaccatctttcaaatcttagctcaactctcaccaagtgaaaattggctacttgggagaaagttaactttctatggtgggatggtgaaggatgagggacagtttacataggaaaagaaaaaaaaaagtctaaagtccatgttgaaaaaccacactaccacttattttctgctaaccctaaattatttttgcgtatacgcttgaggttatagtctgtgcctagacctaaaatgcaccagcgggggggattttaaaaaatccttcaaaataccagttttttcccaacaagtacaattgttcttgtgccttctgtggctttcgatttcatctttttgactttatttccaattactacagctgcaataaacactagattttttttctggctgtttgacataacgttgatagctatgcatattttgtgtctttttaaaacaaagcgggagaatacgtttttgaagaagagaatttttagaacagtttgataccgcaaattattttttcctcaattgtttgagcagcattcgagttttgaaaattcttgtagaagccaattttttgtaactgtggtgcaaatcttgtgttttcttagcctaatgaaaagtagtatagaagcaatatttcataccatgtgctatatatgtgtgcgcagatgtgtgaacataaaatcacatacacacatatacacacatgtaaaaatatacatatatatatatgcgtgtgaagtggaaagcttaccttttcctatctagatttaagaacctattttagacatttgttatgttttgtgaaaagaatgttctatttgcaacaaaacatttaattcttactgtatctctggctgtttaatgaggacgtttcacattaaatggtaaaacacatggaagatgttagaatgtagtaattatttaagtaaacgttcacccacatattcctgaagtttgctttgtgcctccgagtattatttaattaaagaagtgttttatgtttgcagaatctttgtcactgtactagggatgtgggtgaatatcatttaaaaaaatttaaaacaacaaaaaaaaagcaaaacagaaacactaaagcaagaggggaacttttataaagcaatgtaaatatttaacctcatggctgtcattatgtaagacatgagattttaataaataactacattctcacgacatctgttgaatttactaggaacactacagtgactgtatagacagttgaaagcattcttgaaaatcctgctctctccttttaaaagttaacaatctcttttatcagatgtcaagggcaagggtaatgcagtttctgtaaatttatgaaatttctttttctatgtacatgaagacatttagtaagtaacacccccccttcccatgcgcacatgtgcgcatacacacacacacacacacacacacacacacaaacacacacactgtcataaagctaatgatttggggactttaaaaaataggatgtcctccaggaacaatcataaatttatgaaagaaagagtagtttacagactcccctgaaagaagcagtgtatatgtgaagacagtgcaaaaatctctttgccatgtatattatagcgtattcattggtgtgaatagtacaaatgtttccttctggtacaaactctgtgtttgcaaatttacaagaagcattgttttcaaaaagctccccttaaaaaatgtaactggtttatatgagtaagcagttaccgtattgcacttaaatgttatgttgaaggaaatgcagttttgttttctgtagatctgttggttgtaaaccatctataaaactaaagctaaaatgctcatattcagagctgggatcaaaactggtatttaacctttgcatcttcttataattatccttctaagaatataacagaatgtggaagtgtctggactttgagtcttttcaactgagccttctctcaaatctgacaccccctcagaatgcacaaacataagcagaaaaggcaaacaagcttaccttcttttgtgaaaacgtattcattctgtatttttttaaatattcaattcccctaaaaatggggagaaaatattttaaaattgtatattacgacttcaaatttagaactaagaaaaaaatgtatttgggattggtctcagcgctacctagaagaatcaaaggtcatggcttccctcaatattgtcccagccatttctcatatgtatatagtataaaccgtgacaaaacactgcctttatattatttagcaatatgttgtaaatagcattattaagctcttttttgtaataaagaccctttgatttgaatatagtacaataactgaactgataaagtcaatttttgatttttgtttgttttttttagctagaggcaatttcaattgtgaatttttgttgttgtctattgttctgaagactttgcataatttattggtttaatttatcctaatttatttgatgaaggtgtacaattttgtattaccaaggatgtactgtaatattaattgatatgataaacacaatgagactccctgtccatattaaaaagaaaataaaaaggtgcagtagacaattgattttaaaggaaaagttaaaaaaattagtttggcagctactaaattttaaaacaggaaaaaaaaaagttgttgtggggagggtgggaaaggggttttactttgtgtgttttaagcttttgtatactctccaaacttttaccttttgctttgtaccacttaaaggatacagtagtccaattgccttgtgtgccttccatctcctcttaaactgaatgtatgtgcagtatatatgcaagcttgtgcaaaataaaatatacattacaagctcagtgccgtttgattttcttaaagaaagagtgacttttaatttttggacctgtatccaattgtaggacagtaggctagttgtgccagtaatgtcaagtatggagattttctttcactacaattcttcattctgttagcctaacgtgcagctcctagaaacaacctcttttactttagatgcttggaataattgcttggatttctctctctgaaacatctttcaggcttaactttatttagccctgaaactt

SEQ ID NO: 169891 - DNA, 560 bp, Homo sapiens
  Payload ID: 13442
  Gene Symbol: PROX1
  Gene Name: prospero homeobox 1
  ENST ID: ENST00000607425
  CDS Start-End: 132-560
gttactccccctgctgaagctgaaggttggtggagtgatggagcgtggggatggtaaaggaggaggtcccgggattcttgagctgtgcccagctgacgagcttttgaagatggcacaataaccgtccagtgatgcctgaccatgacagcacagccctcttaagccggcaaaccaagaggagaagagttgacattggagtgaaaaggacggtagggacagcatctgcattttttgctaaggcaagagcaacgttttttagtgccatgaatccccaaggttctgagcaggatgttgagtattcagtggtgcagcatgcagatggggaaaagtcaaatgtactccgcaagctgctgaagagggcgaactcgtatgaagatgccatgatgccttttccaggagcaaccataatttcccagctgttgaaaaataacatgaacaaaaatggtggcacggagcccagtttccaagccagcggtctctctagtacaggctccgaagtacatcaggaggatatatgcagcaactcttcaagagacagccccccagagtgtctttcccct

SEQ ID NO: 169892 - DNA, 3878 bp, Homo sapiens
  Payload ID: 13443
  Gene Symbol: PROX2
  Gene Name: prospero homeobox 2
  ENST ID: ENST00000556489
  CDS Start-End: 1-1779
atggatccaaactccatcttgctttctcctcagccccagatctgctcccacctagcagaagcttgtacggaaggcgagagaagctcatcccctccagagctggatagagactccccgtttccctggagtcaggtccccagctccagccctacagaccccgaatggtttggtgatgagcacatccaggcaaagagggccagagtggagaccattgtccgaggcatgtgtctctccccgaatcctctggtgccaggcaatgcgcaagctggggtcagcccacgctgcccaaagaaggcccgagagaggaagaggaagcagaaccttcccacaccgcaaggcctcctgatgccagcccctgcctgggaccagggcaacaggaaggggggccctcgtgtgagagaacaacttcatctgctgaagcaacagctaagacatctgcaagagcacatcctacaggctgccaagcccagggacacagctcaggggccaggaggctgtggcacggggaaaggccctctgagtgcaaagcaggggaatggctgtgggcctcgcccctgggttgtggacggtgaccaccagcaaggtaccagcaaggacctctctggggcagaaaaacaccaagagtctgagaagcccagtttccttccttctggagcaccagcttcactagagattctgaggaaagagctgaccagggcagtgtcccaggctgtggactcggtattacaaaaggtactattggatccaccaggccacctgactcagctgggcagaagcttccaggggcaggtggcagagggtagaagcgagccctcacctcctgtgggaggggcctgtaaagatccacttgctttggctgccttgcccaggagggtccagctacaagctggggtcccagtaggaaatttatcactggccaagcgtctagattctcctaggtaccctatccctccaagaatgacccccaaaccctgtcaggatcccccagcaaactttcccttgactgcaccttcccacatccaggaaaatcagattcttagccagctactgggtcatagatacaacaatggccattggagtagcagtcctccccaggactcatcttcccagaggcacccctcctcagagcctgccctacgaccttggagaactactaagccgcaaccattggtcctgagccagcagcagtgtcccttgcctttcacctctgcccatctggaaagtctaccccttcttccctcggtgaagatggaacagagaggcctgcatgctgtcatggaggcactgcctttctctttggtccacatccaggagggtctaaaccctggtcacttgaagaaggccaaactaatgtttttcttcacacgatatcccagctccaacctcctgaaggtttattttcctgatgttcagttcaaccgctgcattacctcccagatgatcaagtggttcagcaactttcgtgagttttattacatccaaatggaaaaatctgcccggcaagcaatttcagatggtgtcacaaatcccaaaatgctggtggttctccgcaattcagaactttttcaagctctcaatatgcactacaacaagggaaatgactttgaggttccagattgcttcttggaaattgccagcttgacgttacaggagttcttcagggctgtctccgcagggagagactcagatccttcctggaagaaacccatttataaaattatttcgaaactggacagtgacatcccagagatattcaaatcttccagctatccccagtagctgtttcggggttaagatcccacaacgtgaggagtgactggctagggtttcctgggtttgtcttaaagggcaatttagctgtagtcatataaaaagggcacaaggaaatctcctctatcaaaacaggtactattaccattttgatcatttatttccctttccagaatcatcagaaatttaactataaaatgtactaactatattggtgtattggtagtatattgtaaaaggaacacaagtttccaatcagaagacttgaagctcaactccattgtttccaggtgttgtgaccctgggaacttcctggtatctctgtatctgtaaaatgaggttgttaaggattaaaggacagtatgtcctatgcaatgtcattcacacacaaatgtcagttttttgagcccctctttcagataaggttatcttatttggggtttttacaaattgctgtttttagtcacctaattataaagcgccatctatttgctagatactttcacatactttaagcttttcaccctgaaaagtagttattatcatcatttaaaagatgaccaaacagaagctttagaactgcaaggtaactcgccaaagcctatgaggctaggacatctgggttgatagggacagtcaggagcctggaggaaccaagactttctgatgcccaactgcatgctggacccatctcctgcagctaactcaggatctcaagcaggaccccacccctagtaagcatccagcgctgacagggcaccgtcacctgacaactcctgcccagcacttaggagcacttcaccgcccaagatttctgctgatcatttcagcaaactcaagacaaactttatgcaggacttgagtgttgctgtttattcacatttgtctgctggaagagtttatcagctggataatgcaaatagtctccagctgaccattgcaattggtgccccaacctcatatatgcagaagaagctgaacttcagactgtgaaaggtagaaagggccttaggagatcatctggcccatgctgcttaaattgggaaggaagaaccgcagtccagacaggaggcttgcacaggctgtgcacagccttgcagatgataaatggcataactgggacaaatgcagcatcacacagaaatggaaattctcccactccataacaaaattacagtccatggctgaccttccactgatgaaggaattcatgaaatcaacatttccccctgctgctggcccagcacaattgtgacccactcttgagtatataggcaaggcatgtacaaagctgagtaactgcatctgtcttctaagctagtcaggatcaagtctttgtaagcactgccaaaggtacgccgggtggggtggggtgggggtaatacacagctcgggctttgtagtcctgataaggggtgtctgtgagttcattagcttctttcctgtctatataaaacaagtttcatattcggctactcaacttccataatttttctggtggggtgttgctggagcagatgagataaaatccctaaactattactagaactatcagcataaaaagtatgaaagatgaattttcctttgaattttctcttcaaacagctgaaaggaaaaacaaaacagacttagcccaaacccatctttacaggctaaaggttaagtgccctccagtacatccaattgcactcagaagatctttgccctattttcacaaaaatgaaggaatctgccaaacctaagttttaaacacaggcaagcatggagtgctctgagcaagggcaatcagttttctgtgtccggacatagtagaagaaccctctatccagagtgacattacatacctaagttagacatacaggggaaacaagttcacatgactgtccaatagagagcagcccttcttctgtcccaaacctgaaattcattagtgtgtgtttaaagactgagccaagtcacctccagggcagtgaaccttgtctcagggaccaatgagatgaaatgtacaagctcaaattgaaaacatttgtgtactgcagtctttccaggaagtgttctctaaccactgagctaaacacagaagaatgtataaatatgtatgctctgcc

SEQ ID NO: 169893 - DNA, 3359 bp, Homo sapiens
  Payload ID: 13443
  Gene Symbol: PROX2
  Gene Name: prospero homeobox 2
  Uniprot ID: Q3B8N5
  ENST ID: ENST00000556084
  CDS Start-End: 1-1098
atggatccaaactccatcttgctttctcctcagccccagatctgctcccacctagcagaagcttgtacggaaggcgagagaagctcatcccctccagagctggatagagactccccgtttccctggagtcaggtccccagctccagccctacagaccccgaatggtttggtgatgagcacatccaggcaaagagggccagagtggagaccattgtccgaggcatgtgtctctccccgaatcctctggtgccaggcaatgcgcaagctggggtcagcccacgctgcccaaagaaggcccgagagaggaagaggaagcagaaccttcccacaccgcaaggcctcctgatgccagcccctgcctgggaccagggcaacaggaaggggggccctcgtgtgagagaacaacttcatctgctgaagcaacagctaagacatctgcaagagcacatcctacaggctgccaagcccagggacacagctcaggggccaggaggctgtggcacggggaaaggccctctgagtgcaaagcaggggaatggctgtgggcctcgcccctgggttgtggacggtgaccaccagcaaggtaccagcaaggacctctctggggcagaaaaacaccaagagtctgagaagcccagtttccttccttctggagcaccagcttcactagagattctgaggaaagagctgaccagggcagtgtcccaggctgtggactcggtattacaaaagttcaaccgctgcattacctcccagatgatcaagtggttcagcaactttcgtgagttttattacatccaaatggaaaaatctgcccggcaagcaatttcagatggtgtcacaaatcccaaaatgctggtggttctccgcaattcagaactttttcaagctctcaatatgcactacaacaagggaaatgactttgaggttccagattgcttcttggaaattgccagcttgacgttacaggagttcttcagggctgtctccgcagggagagactcagatccttcctggaagaaacccatttataaaattatttcgaaactggacagtgacatcccagagatattcaaatcttccagctatccccagtagctgtttcggggttaagatcccacaacgtgaggagtgactggctagggtttcctgggtttgtcttaaagggcaatttagctgtagtcatataaaaagggcacaaggaaatctcctctatcaaaacaggtactattaccattttgatcatttatttccctttccagaatcatcagaaatttaactataaaatgtactaactatattggtgtattggtagtatattgtaaaaggaacacaagtttccaatcagaagacttgaagctcaactccattgtttccaggtgttgtgaccctgggaacttcctggtatctctgtatctgtaaaatgaggttgttaaggattaaaggacagtatgtcctatgcaatgtcattcacacacaaatgtcagttttttgagcccctctttcagataaggttatcttatttggggtttttacaaattgctgtttttagtcacctaattataaagcgccatctatttgctagatactttcacatactttaagcttttcaccctgaaaagtagttattatcatcatttaaaagatgaccaaacagaagctttagaactgcaaggtaactcgccaaagcctatgaggctaggacatctgggttgatagggacagtcaggagcctggaggaaccaagactttctgatgcccaactgcatgctggacccatctcctgcagctaactcaggatctcaagcaggaccccacccctagtaagcatccagcgctgacagggcaccgtcacctgacaactcctgcccagcacttaggagcacttcaccgcccaagatttctgctgatcatttcagcaaactcaagacaaactttatgcaggacttgagtgttgctgtttattcacatttgtctgctggaagagtttatcagctggataatgcaaatagtctccagctgaccattgcaattggtgccccaacctcatatatgcagaagaagctgaacttcagactgtgaaaggtagaaagggccttaggagatcatctggcccatgctgcttaaattgggaaggaagaaccgcagtccagacaggaggcttgcacaggctgtgcacagccttgcagatgataaatggcataactgggacaaatgcagcatcacacagaaatggaaattctcccactccataacaaaattacagtccatggctgaccttccactgatgaaggaattcatgaaatcaacatttccccctgctgctggcccagcacaattgtgacccactcttgagtatataggcaaggcatgtacaaagctgagtaactgcatctgtcttctaagctagtcaggatcaagtctttgtaagcactgccaaaggtacgccgggtggggtggggtgggggtaatacacagctcgggctttgtagtcctgataaggggtgtctgtgagttcattagcttctttcctgtctatataaaacaagtttcatattcggctactcaacttccataatttttctggtggggtgttgctggagcagatgagataaaatccctaaactattactagaactatcagcataaaaagtatgaaagatgaattttcctttgaattttctcttcaaacagctgaaaggaaaaacaaaacagacttagcccaaacccatctttacaggctaaaggttaagtgccctccagtacatccaattgcactcagaagatctttgccctattttcacaaaaatgaaggaatctgccaaacctaagttttaaacacaggcaagcatggagtgctctgagcaagggcaatcagttttctgtgtccggacatagtagaagaaccctctatccagagtgacattacatacctaagttagacatacaggggaaacaagttcacatgactgtccaatagagagcagcccttcttctgtcccaaacctgaaattcattagtgtgtgtttaaagactgagccaagtcacctccagggcagtgaaccttgtctcagggaccaatgagatgaaatgtacaagctcaaattgaaaacatttgtgtactgcagtctttccaggaagtgttctctaaccactgagctaaacacagaagaatgtataaatatgtatgctctgccaacagaagaattctatttgattataattttctgtttctatcaagtgcgtatccctctctgttggaaacacatggagtgtaagctgagtgggttattattttagcaatcatactttgccaaagatctggtcattttttccactaaggtatatgagggcactat

SEQ ID NO: 169894 - DNA, 550 bp, Homo sapiens
  Payload ID: 13443
  Gene Symbol: PROX2
  Gene Name: prospero homeobox 2
  ENST ID: ENST00000619947
  CDS Start-End: 527-550
atagacccacagggagaaaggctgccatgtaggaggtgatctgtgcaggtgatgatgccacagacactggctgttccttttcagctcatgccccggtgctctaacacaaagctgaaaggagacaacacacaacttctctcagacagggtcttactttgttgcccaggctggaatgcagtggctattcattggcatgatcgtagcacactacagctttgaactcctgggctcaagcagtcttcccacctcagcttcctgagtagctgagactacagactgcctgttccaggagggcagactatgctgatcttgctcactccatgagcccagaagaaggcccgacacacagcaggagtctgcccaggaggttcatgagccctggcatcccagaatctgaatccttcctcagtgacagtggctctttacccttctaagtgcagaggaggaagcccagcgcattctgggtgcacttccagctgaggaaataaggaggaggaattcctgaagccctgaacaagtgcctgggatggatccaaactccatcttgctt

SEQ ID NO: 169895 - DNA, 2942 bp, Homo sapiens
  Payload ID: 13444
  Gene Symbol: PTGDR
  Gene Name: prostaglandin D2 receptor (DP)
  Uniprot ID: Q13258
  ENST ID: ENST00000306051
  CDS Start-End: 103-1182
cgcccgagccgcgcgcggagctgccgggggctccttagcacccgggcgccggggccctcgcccttccgcagccttcactccagccctctgctcccgcacgccatgaagtcgccgttctaccgctgccagaacaccacctctgtggaaaaaggcaactcggcggtgatgggcggggtgctcttcagcaccggcctcctgggcaacctgctggccctggggctgctggcgcgctcggggctggggtggtgctcgcggcgtccactgcgcccgctgccctcggtcttctacatgctggtgtgtggcctgacggtcaccgacttgctgggcaagtgcctcctaagcccggtggtgctggctgcctacgctcagaaccggagtctgcgggtgcttgcgcccgcattggacaactcgttgtgccaagccttcgccttcttcatgtccttctttgggctctcctcgacactgcaactcctggccatggcactggagtgctggctctccctagggcaccctttcttctaccgacggcacatcaccctgcgcctgggcgcactggtggccccggtggtgagcgccttctccctggctttctgcgcgctacctttcatgggcttcgggaagttcgtgcagtactgccccggcacctggtgctttatccagatggtccacgaggagggctcgctgtcggtgctggggtactctgtgctctactccagcctcatggcgctgctggtcctcgccaccgtgctgtgcaacctcggcgccatgcgcaacctctatgcgatgcaccggcggctgcagcggcacccgcgctcctgcaccagggactgtgccgagccgcgcgcggacgggagggaagcgtcccctcagcccctggaggagctggatcacctcctgctgctggcgctgatgaccgtgctcttcactatgtgttctctgcccgtaatttatcgcgcttactatggagcatttaaggatgtcaaggagaaaaacaggacctctgaagaagcagaagacctccgagccttgcgatttctatctgtgatttcaattgtggacccttggatttttatcattttcagatctccagtatttcggatattttttcacaagattttcattagacctcttaggtacaggagccggtgcagcaattccactaacatggaatccagtctgtgacagtgtttttcactctgtggtaagctgaggaatatgtcacattttcagtcaaagaaccatgattaaaaaaaaaaagacaacttacaatttaaatccttaaaagttacctcccataacaaaagcatgtatatgtattttcaaaagtatttgatatcttaacaatgtgttaccattctatagtcatgaaccccttcagtgcattttcatttttttattaacagcaactaaaattttatatattgtaaccagtgttaaaagtcttaaaaaacaatggtattaattgtccctacatttgtgcttggtggccctattttttttttttagagaggccttgagacatacaggtcttttaaaatacagtagaaacaccactgtttacgattatacgatggacattcataaaaagcataatttcttaccctattcattttttggtgaaacctgattcattgattttatatcattgccgatgtttagttcatttctttgccaattgatctaagcatagcctgaattatgatgttcctcagagaagtgaggtgggaaatatgaccaggtcaggcagttggaggggcttccccagccaccatcggggagtacttgctgcctcaggtggagacctgaagctgtaactagatgcagagcaagatatgactatagcccacaacccaaagaagcaaaaattcgtttttatcttttgaaatccagtttcttttgtattgagtcaagggtgtcagtaggaatcaaaagttgggggtgggttgcaaaatgttctttcagtttttagaacctccattttataaaagaattatcctatcaatggattctttagtggaaggatttatgcttctttgaaaaccagtgtgtgactcactgtagagccatgtttactgtttgactgtgtggcacaggggggcatttggcacagcaaaaagcccacccaggacttagcctcagttgacgatagtaacaatggccttaacatctaccttaacagctacctattacagccgtattctgctgtccgtggagacggtaagatcttaggttccaagattttacttcaaattacaccttcaaaactggagcagcatatagccgaaaaggagcacaactgagcactttaatagtaatttaaaagttttcaagggtcagcaatatgatgactgaaagggaaaagtggaggaaacgcagctgcaactgaagcggagactctaaacccagcttgcaggtaagagctttcacctttggtaaaagaacagctggggaggttcaaggggtttcagcatctctggagttcctttgtatctgacaatctcaggactccaaggtgcaaagcctgctgcatttgcgtgatctcaagacctccagccagaagtcccttccaaatataagagtactcatgtttatttatttccaactgagcagcaacctcctttgtttcacttatgttttttccagtatctgagataatataaagctgggtaattttttatgtaattttttggtatagcaaaactgtgaaaaagccaaattaggcatacaaggagtatgatttaacagtatgacatgatgaaaaaaatacagttgtttttgaaatttaacttttgtttgtaccttcaatgtgtaagtacatgcatgttttattgtcagaggaagaacatgttttttgtattctttttttggagaggtgtgttaggataattgtccagttaatttgaaaaggccccagatgaatcaataaatataattttatagta

SEQ ID NO: 169896 - DNA, 1216 bp, Homo sapiens
  Payload ID: 13444
  Gene Symbol: PTGDR
  Gene Name: prostaglandin D2 receptor (DP)
  Uniprot ID: Q13258
  ENST ID: ENST00000553372
  CDS Start-End: 4-894
gccatgaagtcgccgttctaccgctgccagaacaccacctctgtggaaaaaggcaactcggcggtgatgggcggggtgctcttcagcaccggcctcctgggcaacctgctggccctggggctgctggcgcgctcggggctggggtggtgctcgcggcgtccactgcgcccgctgccctcggtcttctacatgctggtgtgtggcctgacggtcaccgacttgctgggcaagtgcctcctaagcccggtggtgctggctgcctacgctcagaaccggagtctgcgggtgcttgcgcccgcattggacaactcgttgtgccaagccttcgccttcttcatgtccttctttgggctctcctcgacactgcaactcctggccatggcactggagtgctggctctccctagggcaccctttcttctaccgacggcacatcaccctgcgcctgggcgcactggtggccccggtggtgagcgccttctccctggctttctgcgcgctacctttcatgggcttcgggaagttcgtgcagtactgccccggcacctggtgctttatccagatggtccacgaggagggctcgctgtcggtgctggggtactctgtgctctactccagcctcatggcgctgctggtcctcgccaccgtgctgtgcaacctcggcgccatgcgcaacctctatgcgatgcaccggcggctgcagcggcacccgcgctcctgcaccagggactgtgccgagccgcgcgcggacgggagggaagcgtcccctcagcccctggaggagctggatcacctcctgctgctggcgctgatgaccgtgctcttcactatgtgttctctgcccgtaattgcatttgttcctggagtccccgccaagacacctgggagtaggtgaggcttgaggaaacattttcagtgctgctcctctcctttctcccaagtatcgcgcttactatggagcatttaaggatgtcaaggagaaaaacaggacctctgaagaagcagaagacctccgagccttgcgatttctatctgtgatttcaattgtggacccttggatttttatcattttcagatctccagtatttcggatattttttcacaagattttcattagacctcttaggtacaggagccggtgcagcaattccactaacatggaatccagtctgtgacagtgtttttcactctgtggtaagctgaggaatatgtcacat

SEQ ID NO: 169897 - DNA, 2895 bp, Homo sapiens
  Payload ID: 13445
  Gene Symbol: PTGDR2
  Gene Name: prostaglandin D2 receptor 2
  Uniprot ID: Q9Y5Y4
  ENST ID: ENST00000332539
  CDS Start-End: 113-1300
cagcctccctctcccacctctgtctgcccgctgcctcttgtctagctgctgtcaggagctgactgcctccagggctggaatcctgtgctccctctgtgcccagagccccacgatgtcggccaacgccacactgaagccactctgccccatcctggagcagatgagccgtctccagagccacagcaacaccagcatccgctacatcgaccacgcggccgtgctgctgcacgggctggcctcgctgctgggcctggtggagaatggagtcatcctcttcgtggtgggctgccgcatgcgccagaccgtggtcaccacctgggtgctgcacctggcgctgtccgacctgttggcctctgcttccctgcccttcttcacctacttcttggccgtgggccactcgtgggagctgggcaccaccttctgcaaactgcactcctccatcttctttctcaacatgttcgccagcggcttcctgctcagcgccatcagcctggaccgctgcctgcaggtggtgcggccggtgtgggcgcagaaccaccgcaccgtggccgcggcgcacaaagtctgcctggtgctttgggcactagcggtgctcaacacggtgccctatttcgtgttccgggacaccatctcgcggctggacgggcgcattatgtgctactacaatgtgctgctcctgaacccggggcctgaccgcgatgccacgtgcaactcgcggcaggtggccctggccgtcagcaagttcctgctggccttcctggtgccgctggcgatcatcgcctcgagccacgcggccgtgagcctgcggttgcagcaccgcggccgccggcggccaggccgcttcgtgcgcctggtggcggccgtcgtggccgccttcgcgctctgctgggggccctaccacgtgttcagcctgctggaggcgcgggcgcacgcaaacccggggctgcggccgctcgtgtggcgcgggctgcccttcgtcaccagcctggccttcttcaacagcgtggccaacccggtgctctacgtgctcacctgccccgacatgctgcgcaagctgcggcgctcgctgcgcacggtgctggagagcgtgctggtggacgacagcgagctgggtggcgcgggaagcagccgccgccgccgcacctcctccaccgcccgctcggcctcccctttagctctctgcagccgcccggaggaaccgcggggccccgcgcgtctcctcggctggctgctgggcagctgcgcagcgtccccgcagacgggccccctgaaccgggcgctgagcagcacctcgagttagaacccggcccacgtagggcggcactcacacgcgaaagtatcaccagggtgccgcggttcaattcgatatccggactcctgccgcagtgatcaaagtccgaggggcgggacccaggcacctgcattttaaagcgccccgggagactctgaatctttttcagaaacagtgagttaaagcagtgcttctcaaaccttgatgtgcctgtgaatcacctaggggtcttgttaagtgcagtctgatccaggaggccggggccgggtactgagagtctgcacttaacaagctcccaggccgagaagccagtgcggcaggttcacaggcgaggcctggagtaacacaaagtgaaactcataatagacttcccactctagggcagtggagtcggaagggcacacggggtgcgtctccccggagttcagttttaccagatgatgggggaggggggaaggagttttatgttaaaccatccatgtatttttggagaagagagaggaaaggtttgagaagcactgttccagcctgccctcttcatttagccaatgcttactgcgctagacgcttcatcccacaatcttaaggggcagcttctattagccagtctttacagctgagcacattctggctcagggaggttaagtgacttgcccagtttcagggctaacgaccacagggtctgcactctaaccctaggcatcacatgctcaatgactctctggtgagcgaggacattctctgacctactcgagggacttaagatgctaccttgtgacccagcactgcccaaagtgcttccaaggcagaagcagcaggggatggcgtggtcaagcactcgggaaacctggggctaatcaaatccaatgggggaaatgactaaaagtcttcggtcgttagaagttgaatgggcacagcaactctaagactacagcacacgtcatttcttagctaagcggaccagcctccctgtcggcctggtgttctgtgggatccctctgggcactggtaatcccaagatctgtgcagccccgcctccaggccacatggggctgggcagctaccatttcccttttgcggatgggaggggtaacttgcacctctgacctatcacttccactgcaccccgtctcattcctccacctgccgtggacttggggtcagagactgctgtgtttgagctctgcagcccagggaccgaaaagttggtgtcaatgaattttgcttggtggatgaaatgtcagtggaagaagcagatgagaaactcttgagatcttggtcctgtgttttttctgccaccaaaggccagggtcactgaaggcctggcccacagcaggtgctgagcaaagggaacagtgaggtgcccagctagctgcagagccaccctgtgttgacacctcgcccctgctccctcccatcccttccccctttactcatagcacttcccccattggacacgtggtgcattttgcttgtttattatgttttctctccatcagaatgaaagctcctcgagggcagggactttggtctattgtctgtatttgccggtgcctaggattgtgcctgtatgcaacaggcactcaataaatatttttgctgta

SEQ ID NO: 169898 - DNA, 807 bp, Homo sapiens
  Payload ID: 13446
  Gene Symbol: PTGDS
  Gene Name: prostaglandin D2 synthase 21kDa (brain)
  Uniprot ID: P41222
  ENST ID: ENST00000371625
  CDS Start-End: 75-647
ctcctcctgcacacctccctcgctctcccacaccactggcaccaggccccggacacccgctctgctgcaggagaatggctactcatcacacactgtggatgggactggccctgctgggggtgctgggcgacctgcaggcagcaccggaggcccaggtctccgtgcagcccaacttccagcaggacaagttcctggggcgctggttcagcgcgggcctcgcctccaactcgagctggctccgggagaagaaggcggcgttgtccatgtgcaagtctgtggtggcccctgccacggatggtggcctcaacctgacctccaccttcctcaggaaaaaccagtgtgagacccgaaccatgctgctgcagcccgcggggtccctcggctcctacagctaccggagtccccactggggcagcacctactccgtgtcagtggtggagaccgactacgaccagtacgcgctgctgtacagccagggcagcaagggccctggcgaggacttccgcatggccaccctctacagccgaacccagacccccagggctgagttaaaggagaaattcaccgccttctgcaaggcccagggcttcacagaggataccattgtcttcctgccccaaaccgataagtgcatgacggaacaataggactccccagggctgaagctgggatcccggccagccaggtgacccccacgctctggatgtctctgctctgttccttccccgagcccctgccccggctccccgccaaagcaaccctgcccactcaggcttcatcctgcacaataaactccggaagcaagtc

SEQ ID NO: 169899 - DNA, 661 bp, Homo sapiens
  Payload ID: 13446
  Gene Symbol: PTGDS
  Gene Name: prostaglandin D2 synthase 21kDa (brain)
  ENST ID: ENST00000457950
  CDS Start-End: 75-661
ctcctcctgcacacctccctcgctctcccacaccactggcaccaggccccggacacccgctctgctgcaggagaatggctactcatcacacactgtggatgggactggccctgctgggggtgctgggcgacctgcaggcagcaccggaggcccaggtctccgtgcagcccaacttccagcaggacaagttcctggggcgctggttcagcgcgggcctcgcctccaactcgagctggctccgggagaagaaggcggcgttgtccatgtgcaagtctgtggtggcccctgccacggatggtggcctcaacctgacctccaccttcctcaggaaaaaccagtgtgagacccgaaccatgctgctgcagcccgcggggtccctcggctcctacagctaccggagtccccgtgagtggggcctccaccggccccctgggcccagcctgggggcgacacttgccgggacgactctgggccagccccctgccgcggagatccatggggtgggagactggggcagcacctactccgtgtcagtggtggagaccgactacgaccagtacgcgctgctgtacagccagggcagcaagggccctggcgaggacttccgcatggccaccctctacagccgaacccagacccccagggctgagttaaaggagaa

SEQ ID NO: 169900 - DNA, 370 bp, Homo sapiens
  Payload ID: 13446
  Gene Symbol: PTGDS
  Gene Name: prostaglandin D2 synthase 21kDa (brain)
  ENST ID: ENST00000444903
  CDS Start-End: 1-187
aggataccattgtcttcctgccccaaaccgtgcccagggagaggtgggaggtgatgggggatctgtgcagtttgggggctcagtcaagacgagctctgcgttacgggaggaacaggaagcccagtgggaaaattggcctaagtctggggttctgacgacagcccctggcttctttcttggcagataagtgcatgacggaacaataggactccccagggctgaagctgggatcccggccagccaggtgacccccacgctctggatgtctctgctctgttccttccccgagcccctgccccggctccccgccaaagcaaccctgcccactcaggcttcatcctgcacaataaactccggaagcaagtcagta

SEQ ID NO: 169901 - DNA, 553 bp, Homo sapiens
  Payload ID: 13446
  Gene Symbol: PTGDS
  Gene Name: prostaglandin D2 synthase 21kDa (brain)
  ENST ID: ENST00000446677
  CDS Start-End: 1-375
gtggtggcccctgccacggatggtggcctcaacctgacctccaccttcctcaggaaaaaccagtgtgagacccgaaccatgctgctgcagcccgcggggtccctcggctcctacagctaccggagtccccactggggcagcacctactccgtgtcagtggtggagaccgactacgaccagtacgcgctgctgtacagccagggcagcaagggccctggcgaggacttccgcatggccaccctctacagccgaacccagacccccagggctgagttaaaggagaaattcaccgccttctgcaaggcccagggcttcacagaggataccattgtcttcctgccccaaaccgcccctggcttctttcttggcagataagtgcatgacggaacaataggactccccagggctgaagctgggatcccggccagccaggtgacccccacgctctggatgtctctgctctgttccttccccgagcccctgccccggctccccgccaaagcaaccctgcccactcaggcttcatcctgcacaataaactccggaagcaagt

SEQ ID NO: 169902 - DNA, 989 bp, Homo sapiens
  Payload ID: 13446
  Gene Symbol: PTGDS
  Gene Name: prostaglandin D2 synthase 21kDa (brain)
  Uniprot ID: P41222
  ENST ID: ENST00000471521
  CDS Start-End: 62-634
cctccctcgctctcccacaccactggcaccaggccccggacacccgctctgctgcaggagaatggctactcatcacacactgtggatgggactggccctgctgggggtgctgggcgacctgcaggcagcaccggaggcccaggtctccgtgcagcccaacttccagcaggacaagttcctggggcgctggttcagcgcgggcctcgcctccaactcgagctggctccgggagaagaaggcggcgttgtccatgtgcaagtctgtggtggcccctgccacggatggtggcctcaacctgacctccaccttcctcaggaaaaaccagtgtgagacccgaaccatgctgctgcagcccgcggggtccctcggctcctacagctaccggagtccccactggggcagcacctactccgtgtcagtggtggagaccgactacgaccagtacgcgctgctgtacagccagggcagcaagggccctggcgaggacttccgcatggccaccctctacagccgaacccagacccccagggctgagttaaaggagaaattcaccgccttctgcaaggcccagggcttcacagaggataccattgtcttcctgccccaaaccgataagtgcatgacggaacaatagttccagggcacctggtacatggtcggggtggtgtcagatgaccaggacttcctggactccaaggacaccatgaagatggctgtggtcttagtgacccccttggggaatggtgacctggccctcaagtttggataccccacgccccatggcgggtgccagaaaatggacacgaccttcaccgagggtgctgtaccggggcagttcagcaacccagctcgagcgcccgagctgtttcccgaaggcgcccagaagatgcagctactggcgccccaagtgggcctgagccccagccagggcgtcctgctgccgaagtcggaccagtgtgcgggcgcgctctcccgggtgagtagaccat

SEQ ID NO: 169903 - DNA, 1421 bp, Homo sapiens
  Payload ID: 13447
  Gene Symbol: PTGER1
  Gene Name: prostaglandin E receptor 1 (subtype EP1), 42kDa
  Uniprot ID: P34995
  ENST ID: ENST00000292513
  CDS Start-End: 119-1327
ggaagagggagggaggaagcggcttgccggagagccagggcgcagtgggcggcagggctgagcggccggtgatggggaccccacatcccaggcagtgccggcacccctggcgcctgacatgagcccttgcgggcccctcaacctgagcctggcgggcgaggcgaccacatgcgcggcgccctgggtccccaacacgtcggccgtgccgccgtcgggcgcttcgcccgcgctgcccatcttctccatgacgctgggcgccgtgtccaacctgctggcgctggcgctgctggcgcaggccgcgggccgcctgcgacgccgccgctcggccgccaccttcctgctgttcgtggccagcctgctggccaccgacctggcgggccacgtgatcccgggcgcgctggtgctgcgtctgtacactgcggggcgcgctccggccggcggggcctgccacttcctgggcggctgcatggtcttcttcggcctgtgcccgctgctgctgggctgtggcatggccgtggagcgctgcgtgggcgtcacgcggccgctgctccacgccgcgcgggtctcggtcgcccgcgcgcgcctggcgctggccgcggtggccgcggtggccttggccgtggcgctgctgccgctggcgcgcgtgggccgctatgagctgcagtacccgggcacgtggtgcttcatcggcctgggtcccccgggcggctggcgccaggcactgcttgctggcctcttcgccagcctcggcctggtcgcgctcctcgccgcgctggtgtgcaacacgctcagcggcctggccctgctacgcgcccgctggcgacgccgctcccgacggcctcccccggcctcaggccccgacagccggcgtcgctggggggcgcacggaccccgctcggcctccgcctcgtccgcctcgtccatcgcttcggcctccaccttctttggcggctctcggagcagcggctcggcacgcagagctcgcgcccacgacgtggagatggtgggccagcttgtcggtatcatggtggtgtcgtgcatctgctggagcccaatgctggtgttggtggcgctggccgtcggcggctggagctctacctccctgcagcggccactgttcctggccgtgcgccttgcctcctggaaccagatcctggacccttgggtgtacatcctactgcgccaggccgtgctgcgccaactgcttcgcctcttgcccccgagggccggagccaagggcggccccgcggggctgggcctaacaccgagcgcctgggaggccagctcgctgcgcagctcccggcacagcggcctcagccacttctaagcacaaccagaggcccaacgactaagccagcccaccctgggctgggcccaggtgcgcggcgcagagcctttgggaataaaaagccattctgcga

SEQ ID NO: 169904 - DNA, 2383 bp, Homo sapiens
  Payload ID: 13448
  Gene Symbol: PTGER2
  Gene Name: prostaglandin E receptor 2 (subtype EP2), 53kDa
  Uniprot ID: P43116
  ENST ID: ENST00000245457
  CDS Start-End: 155-1231
gccgccgtcggcgcgctgggtgcgggaagggggctctggatttcggtccctcccctttttcctctgagtctcggaacgctccggctctcagaccctcttcctcccaggtaaaggccgggagaggagggcgcatctcttttccaggcaccccaccatgggcaatgcctccaatgactcccagtctgaggactgcgagacgcgacagtggcttcccccaggcgaaagcccagccatcagctccgtcatgttctcggccggggtgctggggaacctcatagcactggcgctgctggcgcgccgctggcggggggacgtggggtgcagcgccggccgcaggagctccctctccttgttccacgtgctggtgaccgagctggtgttcaccgacctgctcgggacctgcctcatcagcccagtggtactggcttcgtacgcgcggaaccagaccctggtggcactggcgcccgagagccgcgcgtgcacctacttcgctttcgccatgaccttcttcagcctggccacgatgctcatgctcttcgccatggccctggagcgctacctctcgatcgggcacccctacttctaccagcgccgcgtctcgcgctccgggggcctggccgtgctgcctgtcatctatgcagtctccctgctcttctgctcgctgccgctgctggactatgggcagtacgtccagtactgccccgggacctggtgcttcatccggcacgggcggaccgcttacctgcagctgtacgccaccctgctgctgcttctcattgtctcggtgctcgcctgcaacttcagtgtcattctcaacctcatccgcatgcaccgccgaagccggagaagccgctgcggaccttccctgggcagtggccggggcggccccggggcccgcaggagaggggaaagggtgtccatggcggaggagacggaccacctcattctcctggctatcatgaccatcaccttcgccgtctgctccttgcctttcacgatttttgcatatatgaatgaaacctcttcccgaaaggaaaaatgggacctccaagctcttaggtttttatcaattaattcaataattgacccttgggtctttgccatccttaggcctcctgttctgagactaatgcgttcagtcctctgttgtcggatttcattaagaacacaagatgcaacacaaacttcctgttctacacagtcagatgccagtaaacaggctgacctttgaggtcagtagtttaaaagttcttagttatatagcatctggaagatcattttgaaattgttccttggagaaatgaaaacagtgtgtaaacaaaatgaagctgccctaataaaaaggagtatacaaacatttaagctgtggtcaaggctacagatgtgctgacaaggcacttcatgtaaagtgtcagaaggagctacaaaacctaccctcagtgagcatggtacttggcctttggaggaacaatcggctgcattgaagatccagctgcctattgatttaagctttcctgttgaatgacaaagtatgtggttttgtaatttgtttgaaaccccaaacagtgactgtactttctattttaatcttgctactaccgttatacacatatagtgtacagccagaccagattaaacttcatatgtaatctctaggaagtcaatatgtggaagcaaccaagcctgctgtcttgtgatcacttagcgaaccctttatttgaacaatgaagttgaaaatcataggcaccttttactgtgatgtttgtgtatgtgggagtactctcatcactacagtattactcttacaagagtggactcagtgggttaacatcagttttgtttactcatcctccaggaactgcaggtcaagttgtcaggttatttattttataatgtccatatgctaatagtgatcaagaagactttaggaatggttctctcaacaagaaataatagaaatgtctcaaggcagttaattctcattaatactctttatttatcctatttctgggggaggatgtacgtggccatgtatgaagccaaatattaggcttaaaaactgaaaaatctggttcattcttcagatatactggaacccttttaaagttgatattggggccatgagtaaaatagattttataagatgactgtgttgtaccaaaattcatctgtctatattttatttagggaacatggtttgactcatcttatatgggaaaccatgtagcagtgagtcatatcttaatatatttctaaatgtttggcatgtaaatgtaaactcagcatcaaaatatttcagtgaatttgcactgtttaatcatagttactgtgtaaactcatctgaaatgttacaaaaataaactataaaacaaaaatttgaaaa

SEQ ID NO: 169905 - DNA, 643 bp, Homo sapiens
  Payload ID: 13448
  Gene Symbol: PTGER2
  Gene Name: prostaglandin E receptor 2 (subtype EP2), 53kDa
  ENST ID: ENST00000557436
  CDS Start-End: 277-588
ggccggcgcgggtaggcgcgggagcctcgagcgccgctcggatgcagcagccgagccgccactcggcgcgcggcgggagacccagggcaagccgccgtcggcgcgctgggtgcgggaagggggctctggatttcggtccctcccctttttcctctgagtctcggaacgctccggctctcagaccctcttcctcccagccggagaagccgctgcggaccttccctgggcagtggccggggcggccccggggcccgcaggagaggggaaagggtgtccatggcggaggagacggaccacctcattctcctggctatcatgaccatcaccttcgccgtctgctccttgcctttcacgatttttgcatatatgaatgaaacctcttcccgaaaggaaaaatgggacctccaagctcttaggtttttatcaattaattcaataattgacccttgggtctttgccatccttaggcctcctgttctgagactaatgcgttcagtcctctgttgtcggatttcattaagaacacaagatgcaacacaaacttcctgttctacacagtcagatgccagtaaacaggctgacctttgaggtcagtagtttaaaagttcttagttatatagcatctggaagatcattttgaaat

SEQ ID NO: 169906 - DNA, 1404 bp, Homo sapiens
  Payload ID: 13449
  Gene Symbol: PTGER3
  Gene Name: prostaglandin E receptor 3 (subtype EP3)
  Uniprot ID: P43115
  ENST ID: ENST00000351052
  CDS Start-End: 232-1404
accagaggtttcccagagaggaaggcgtggctccctcccgggccagtgagccctggcgccgccgcggccgcggtcccagcagcggagtagggcggcggctgcgccccgcaccatggggggcagcccagccccagccgcggtaaacgccgacctccgccgccgcccgcgccgcgtctgccccctcccgctgcggctctctggacgccatcccctcctcacctcgaagccaacatgaaggagacccggggctacggaggggatgcccccttctgcacccgcctcaaccactcctacacaggcatgtgggcgcccgagcgttccgccgaggcgcggggcaacctcacgcgccctccagggtctggcgaggattgcggatcggtgtccgtggccttcccgatcaccatgctgctcactggtttcgtgggcaacgcactggccatgctgctcgtgtcgcgcagctaccggcgccgggagagcaagcgcaagaagtccttcctgctgtgcatcggctggctggcgctcaccgacctggtcgggcagcttctcaccaccccggtcgtcatcgtcgtgtacctgtccaagcagcgttgggagcacatcgacccgtcggggcggctctgcacctttttcgggctgaccatgactgttttcgggctctcctcgttgttcatcgccagcgccatggccgtcgagcgggcgctggccatcagggcgccgcactggtatgcgagccacatgaagacgcgtgccacccgcgctgtgctgctcggcgtgtggctggccgtgctcgccttcgccctgctgccggtgctgggcgtgggccagtacaccgtccagtggcccgggacgtggtgcttcatcagcaccgggcgagggggcaacgggactagctcttcgcataactggggcaaccttttcttcgcctctgcctttgccttcctggggctcttggcgctgacagtcaccttttcctgcaacctggccaccattaaggccctggtgtcccgctgccgggccaaggccacggcatctcagtccagtgcccagtggggccgcatcacgaccgagacggccattcagcttatggggatcatgtgcgtgctgtcggtctgctggtctccgctcctgataatgatgttgaaaatgatcttcaatcagacatcagttgagcactgcaagacacacacggagaagcagaaagaatgcaacttcttcttaatagctgttcgcctggcttcactgaaccagatcttggatccttgggtttacctgctgttaagaaagatccttcttcgaaagttttgccagatcaggtaccacacaaacaactatgcatccagctccacctccttaccctgccagtgttcctcaaccttgatgtggagcgaccatttggaaaggtga

SEQ ID NO: 169907 - DNA, 2333 bp, Homo sapiens
  Payload ID: 13449
  Gene Symbol: PTGER3
  Gene Name: prostaglandin E receptor 3 (subtype EP3)
  Uniprot ID: P43115
  ENST ID: ENST00000306666
  CDS Start-End: 212-1384
gaaggcgtggctccctcccgggccagtgagccctggcgccgccgcggccgcggtcccagcagcggagtagggcggcggctgcgccccgcaccatggggggcagcccagccccagccgcggtaaacgccgacctccgccgccgcccgcgccgcgtctgccccctcccgctgcggctctctggacgccatcccctcctcacctcgaagccaacatgaaggagacccggggctacggaggggatgcccccttctgcacccgcctcaaccactcctacacaggcatgtgggcgcccgagcgttccgccgaggcgcggggcaacctcacgcgccctccagggtctggcgaggattgcggatcggtgtccgtggccttcccgatcaccatgctgctcactggtttcgtgggcaacgcactggccatgctgctcgtgtcgcgcagctaccggcgccgggagagcaagcgcaagaagtccttcctgctgtgcatcggctggctggcgctcaccgacctggtcgggcagcttctcaccaccccggtcgtcatcgtcgtgtacctgtccaagcagcgttgggagcacatcgacccgtcggggcggctctgcacctttttcgggctgaccatgactgttttcgggctctcctcgttgttcatcgccagcgccatggccgtcgagcgggcgctggccatcagggcgccgcactggtatgcgagccacatgaagacgcgtgccacccgcgctgtgctgctcggcgtgtggctggccgtgctcgccttcgccctgctgccggtgctgggcgtgggccagtacaccgtccagtggcccgggacgtggtgcttcatcagcaccgggcgagggggcaacgggactagctcttcgcataactggggcaaccttttcttcgcctctgcctttgccttcctggggctcttggcgctgacagtcaccttttcctgcaacctggccaccattaaggccctggtgtcccgctgccgggccaaggccacggcatctcagtccagtgcccagtggggccgcatcacgaccgagacggccattcagcttatggggatcatgtgcgtgctgtcggtctgctggtctccgctcctgataatgatgttgaaaatgatcttcaatcagacatcagttgagcactgcaagacacacacggagaagcagaaagaatgcaacttcttcttaatagctgttcgcctggcttcactgaaccagatcttggatccttgggtttacctgctgttaagaaagatccttcttcgaaagttttgccagatcaggtaccacacaaacaactatgcatccagctccacctccttaccctgccagtgttcctcaaccttgatgtggagcgaccatttggaaagataatgaaagaacggagttggacattttattgcaattcctgcttccctgaatttgcatatttcttcccacctgagaaggataattatatattttaatttggattatttcttcatttttatctttttattttaatgattgttttgtcagtaatacccatggagatcaactttattattataatccatgcctctgaatattagattggtttcttggatgggattttgaatatgcatttaagaagttgggaagaatttcacagatgatgattggaggaaaagtgatgaaaagaaagacctgtgttccaggagttttctccaacttcaaacctttacgtgaatcttaaccaaagtggacatctttacatttcatgatagcttgcttttgcaatatgagtttgaaaaatcagtataagcttatgatggtgaaaagtcaacatattgagagtgataattcaattaataggatatgaacttaacgacatataaaagcaaatgagggcaggagggaatcgtgacaaaaaatatttgtgcccaattatgattaatgttttagagatgttgtgtccctgtgggcttagcatggaactaaaagttcctaagtctcaattctagttatgtgtcatttagtaactcaggaatctgcttaattgttatttctaagcttttgatgacaaaggagtgatgcagctaagggcatccttggagtgtcataaaaaacaaatttgaggttgaatgattagctgcgcagttagagtgataaaaaaatccaggtaggccttctgattcaccatgaccaagtcaggatttcttaatatttcttttctggcagcatatacaaaggcaaaattaataaataacagttgttgaataacaaactttattacgtttttataaaataaaagaatctattttgtctgtattaaaataaaaaactttgtggacttctaaaagat

SEQ ID NO: 169908 - DNA, 1470 bp, Homo sapiens
  Payload ID: 13449
  Gene Symbol: PTGER3
  Gene Name: prostaglandin E receptor 3 (subtype EP3)
  ENST ID: ENST00000354608
  CDS Start-End: 232-1470
accagaggtttcccagagaggaaggcgtggctccctcccgggccagtgagccctggcgccgccgcggccgcggtcccagcagcggagtagggcggcggctgcgccccgcaccatggggggcagcccagccccagccgcggtaaacgccgacctccgccgccgcccgcgccgcgtctgccccctcccgctgcggctctctggacgccatcccctcctcacctcgaagccaacatgaaggagacccggggctacggaggggatgcccccttctgcacccgcctcaaccactcctacacaggcatgtgggcgcccgagcgttccgccgaggcgcggggcaacctcacgcgccctccagggtctggcgaggattgcggatcggtgtccgtggccttcccgatcaccatgctgctcactggtttcgtgggcaacgcactggccatgctgctcgtgtcgcgcagctaccggcgccgggagagcaagcgcaagaagtccttcctgctgtgcatcggctggctggcgctcaccgacctggtcgggcagcttctcaccaccccggtcgtcatcgtcgtgtacctgtccaagcagcgttgggagcacatcgacccgtcggggcggctctgcacctttttcgggctgaccatgactgttttcgggctctcctcgttgttcatcgccagcgccatggccgtcgagcgggcgctggccatcagggcgccgcactggtatgcgagccacatgaagacgcgtgccacccgcgctgtgctgctcggcgtgtggctggccgtgctcgccttcgccctgctgccggtgctgggcgtgggccagtacaccgtccagtggcccgggacgtggtgcttcatcagcaccgggcgagggggcaacgggactagctcttcgcataactggggcaaccttttcttcgcctctgcctttgccttcctggggctcttggcgctgacagtcaccttttcctgcaacctggccaccattaaggccctggtgtcccgctgccgggccaaggccacggcatctcagtccagtgcccagtggggccgcatcacgaccgagacggccattcagcttatggggatcatgtgcgtgctgtcggtctgctggtctccgctcctgataatgatgttgaaaatgatcttcaatcagacatcagttgagcactgcaagacacacacggagaagcagaaagaatgcaacttcttcttaatagctgttcgcctggcttcactgaaccagatcttggatccttgggtttacctgctgttaagaaagatccttcttcgaaagttttgccagttgaagaaacaaaagttgagatcaaagatagggtcttactctgtcccgaaggctagagtgccatggtgtgatcataactcgttgcagcctcagcctcctggcttaaaatatatattcatctcccaggttcaagctattctcctgcctcagcctcccaagtag

SEQ ID NO: 169909 - DNA, 1943 bp, Homo sapiens
  Payload ID: 13449
  Gene Symbol: PTGER3
  Gene Name: prostaglandin E receptor 3 (subtype EP3)
  Uniprot ID: P43115
  ENST ID: ENST00000356595
  CDS Start-End: 212-1468
gaaggcgtggctccctcccgggccagtgagccctggcgccgccgcggccgcggtcccagcagcggagtagggcggcggctgcgccccgcaccatggggggcagcccagccccagccgcggtaaacgccgacctccgccgccgcccgcgccgcgtctgccccctcccgctgcggctctctggacgccatcccctcctcacctcgaagccaacatgaaggagacccggggctacggaggggatgcccccttctgcacccgcctcaaccactcctacacaggcatgtgggcgcccgagcgttccgccgaggcgcggggcaacctcacgcgccctccagggtctggcgaggattgcggatcggtgtccgtggccttcccgatcaccatgctgctcactggtttcgtgggcaacgcactggccatgctgctcgtgtcgcgcagctaccggcgccgggagagcaagcgcaagaagtccttcctgctgtgcatcggctggctggcgctcaccgacctggtcgggcagcttctcaccaccccggtcgtcatcgtcgtgtacctgtccaagcagcgttgggagcacatcgacccgtcggggcggctctgcacctttttcgggctgaccatgactgttttcgggctctcctcgttgttcatcgccagcgccatggccgtcgagcgggcgctggccatcagggcgccgcactggtatgcgagccacatgaagacgcgtgccacccgcgctgtgctgctcggcgtgtggctggccgtgctcgccttcgccctgctgccggtgctgggcgtgggccagtacaccgtccagtggcccgggacgtggtgcttcatcagcaccgggcgagggggcaacgggactagctcttcgcataactggggcaaccttttcttcgcctctgcctttgccttcctggggctcttggcgctgacagtcaccttttcctgcaacctggccaccattaaggccctggtgtcccgctgccgggccaaggccacggcatctcagtccagtgcccagtggggccgcatcacgaccgagacggccattcagcttatggggatcatgtgcgtgctgtcggtctgctggtctccgctcctgataatgatgttgaaaatgatcttcaatcagacatcagttgagcactgcaagacacacacggagaagcagaaagaatgcaacttcttcttaatagctgttcgcctggcttcactgaaccagatcttggatccttgggtttacctgctgttaagaaagatccttcttcgaaagttttgccagatgagaaaaagaagactcagagagcaattaatctgcagtttgcagaactctcagatacagagggcaactgcacattgtgggcaagtacaaacctatcgtgtgctgaacagagaagaaatggaggtactcgtgagcagcattaatgtgtacaccagaatctcaacagtaaagacagaataacatgaagaaaataactacaggagtgctgtgttttaaaaaagcaagctcctccagctgagtttgtgactctaatccctgcttattttgagcactttccatgtgttgattgactcggaaaggtgggagattaccagcaagccaggtcatttgggcaaacatgggcatatttttagcaaagctgaacaaactggttggtcactcgaactacccaatttagacttatagtaagaatagcacatggttcagaattgccaagactgctgctttagtcaacagaaattttttcatatgcatgctggtaatgcagtgcatctctggaagaaatgcaagagtattttaacatttggtccagaagaaatatgtaaagggtgtttgtagaatttgatgccctcttcagtgacataaggttatgggtttgtgaatggaaaatctgttatttgttcaggttattaaaacacattctaattcaacatca

SEQ ID NO: 169910 - DNA, 6982 bp, Homo sapiens
  Payload ID: 13449
  Gene Symbol: PTGER3
  Gene Name: prostaglandin E receptor 3 (subtype EP3)
  Uniprot ID: P43115
  ENST ID: ENST00000370924
  CDS Start-End: 232-1398
accagaggtttcccagagaggaaggcgtggctccctcccgggccagtgagccctggcgccgccgcggccgcggtcccagcagcggagtagggcggcggctgcgccccgcaccatggggggcagcccagccccagccgcggtaaacgccgacctccgccgccgcccgcgccgcgtctgccccctcccgctgcggctctctggacgccatcccctcctcacctcgaagccaacatgaaggagacccggggctacggaggggatgcccccttctgcacccgcctcaaccactcctacacaggcatgtgggcgcccgagcgttccgccgaggcgcggggcaacctcacgcgccctccagggtctggcgaggattgcggatcggtgtccgtggccttcccgatcaccatgctgctcactggtttcgtgggcaacgcactggccatgctgctcgtgtcgcgcagctaccggcgccgggagagcaagcgcaagaagtccttcctgctgtgcatcggctggctggcgctcaccgacctggtcgggcagcttctcaccaccccggtcgtcatcgtcgtgtacctgtccaagcagcgttgggagcacatcgacccgtcggggcggctctgcacctttttcgggctgaccatgactgttttcgggctctcctcgttgttcatcgccagcgccatggccgtcgagcgggcgctggccatcagggcgccgcactggtatgcgagccacatgaagacgcgtgccacccgcgctgtgctgctcggcgtgtggctggccgtgctcgccttcgccctgctgccggtgctgggcgtgggccagtacaccgtccagtggcccgggacgtggtgcttcatcagcaccgggcgagggggcaacgggactagctcttcgcataactggggcaaccttttcttcgcctctgcctttgccttcctggggctcttggcgctgacagtcaccttttcctgcaacctggccaccattaaggccctggtgtcccgctgccgggccaaggccacggcatctcagtccagtgcccagtggggccgcatcacgaccgagacggccattcagcttatggggatcatgtgcgtgctgtcggtctgctggtctccgctcctgataatgatgttgaaaatgatcttcaatcagacatcagttgagcactgcaagacacacacggagaagcagaaagaatgcaacttcttcttaatagctgttcgcctggcttcactgaaccagatcttggatccttgggtttacctgctgttaagaaagatccttcttcgaaagttttgccaggtagcaaatgctgtctccagctgctctaatgatggacagaaagggcagcctatctcattatctaatgaaataatacagacagaagcatgaaagaaaacacttaacttgcatgtgcacagcttttggtaacaaatatcgctaaaccttactgtgaatttaggcatctctggcatgccactgtttatgcattgaagtggaatttttggtataaagctaaatggtcttagaagcatagaaaatccctatgtgccaaaagtagtgaaacacaaacaaaggaaaatatattaataacagtctagtgtttttgttgagtctgccattcgtagctgaatatgtgattaattatgtgatgaaaacattttttataaatgatcttggtctattggggagcggggatagttaatattccagtacactgaatacatgaggaatttaaccacatacatcattgaagacaagggatagcagtttgtttttattcaaagacattgctgtgttctctttcattgcctctctcgctttctgtcacttttttcctccttacattaaagaaaagtttaattacagttaaaaatgtataatgtatttataatattcatcgataccattattcaaatattgctcaatacagcaaattagctcctaacctaacaaagtttaagtttacttggattgataattaggtttactctttatctgaataagaaccaattccatttgtttgaaatatggagtttgtgactacccaaattgctaattattctttcttttgaatatattttacatttctatgagcctaaggaagattcatgaaactgacctatgagagtcgtgaagtggtttttcagaatgctatgtaaggaccgatttgagcactaactataggtactctgaatatatatttcccttgattattcaccaaaagtgttccccagtctttgactctttaaattccaatactgattccaaaacaaataaatattttgaagactcaatgaatactttccatattttggcctatttatataagaaagttaataacattgacccttcacagctcttctgcctgctcctcaaagtggctctatctaaatatttattactaaaatgtttttcctacagtctacatgaatacaaacctcaatagctaagcttgacgtatttgtgcacaagtagatcactacattaagttttgggaattgcacttcttaaaaatgtctccccaccaaacatagtaatcctgtagttatgcctacacaaagcttgccatattctttggtgcattcattttgtaaacccattaactttttattgtgaagattttcatttgcagtttcttgcactgcttttctagttttttaaaagcttgagatttatttatacttcttgtagtaactgcatatttctgtgtgtgtttagtggtaaagaattaattttgataggtacaatatgtctatcagattgatatatacaccagcctatgtcaattggggctaattattttaaatgaccatgtcaaattgaatttggagacaaaatctgttgagagtgcttatgtaattaatgatggttctactaatctaaattttggaaaaggtgataaatagactatactaaaatctctctatgccatagaattggattatcctgtaggtcatctcattgggtataagacaaaactacctactttttttcaaaagtgcactgaaatcacataataaagaggctttacctcttggttggtcctgtgaccctaagttctagtcagatagacacagaggcaatgtgaatttgagtggcatgagcatgattaggttattccttccagcatctagtatagcacctggaatatagaaactgtctaatacatatttattcagtgaatcaatgagcagaagtttgccaggacagtacacattggcaaggcacataccatatgattgaagtgcttcatgccattacagtccatcaggctgataaagtgaattatttctgattatttaattacagaaatatgaatttatcttcaagggtgtagtgtcatactgctgtacaacacagtgctttatttatactaataatttaggagactgatacttccaaatgatagtggacattactatcacaagaatatcacttttcatcaaactgcaaaaatacagaaaggcaaaaaacctgacacttattcttaactgcaaattaaattcctgcccaggggatatattttaggaggggatgaatggcagcttttgtgttttttttaacaagcttgaaagggaggtggaaaacaaagaaattatgtaaatggcatatgagttttattatctaggcattcgttagtatggggaaacctgataagaaatgaaaatcccaaatgatttcagccttttcatgatggttgaggttagatttcagagatgtacagagactagagcggtggttagaaagaggatatatgtagtcacagcagaaagacgtgtctaagtttaattttattggctttcaagttcactcatgtatacttagtttgtccatacatatgtctaatcaggaaaaatgcatgtatagattatgacaattcctgaattttgaagtattggttaaaagacaattaaaggccaagaaaaccatggtggaagaagtaagcgaatgaaatgtagaaatatatgtaaaattagcaagtgtcaattttaccaagtagtgttgattttccaaacaatgaatttatatactatgctgagtcacagagaagaatgatcacatgttacttaatgagagcagtttacttttcaaataaaataggtatgatgaatgtcttaaaaatatcttgaagttgaagaaacaaaaatgagttatctcaatatttaccaagttaacctagtgctgtatatatcccaagatattttaggtaaatgtaagtgtttaatcatgccagatttaaactagtctgaaatatagggtatacatatatttctacttacatttctttattttatgaaatatccgaccatgttgcagaaaataatgcaaaacctcatgtaagttaactatgaaagatcctgtgagcacattggcattgagtgacagacaaactaaaaactggcaaacagtattttaataagggggtcactctgtggcagtattctaatattggattttcaagtagattaggctttttatttattcaacgctttttataattttgttctttttgactccaaattattggtcagctttcaaccttctccacatcagcaatcactaatagttcttttggttgagatcaactcagaaaaagaaaatagaaaacttttgttctttgaaattttagacatgcataatatctatttattttcataatttaaccccaaaagcttctcctgcaatacacaggattctaggagctgaatgacacagggagactacagagtatttattattacaaacacataaaaagcctaacttgaagaattaaaatttctattttttatctgtataacaagtacaaaccatcaacaatgacaaattttcacagctgcttgtttattgcttgttttatatgtttacatatctcaaaatctgttaaaactgaggtctaaaaaatgtgcagaattgtgcaactgtggcctagtccataagacttttctgagttgcaacaaagtgctgacaaagtgacagatgtctgtgatgtttcatgacataggttatgatcgagccaatttacaaaatttaataaccaacctaaactcacatacatatttgttaagaagctgacatcagttcagtattgtaaggaaactaactaggtggtgatgatgataaaagaattagggaaaatattttatttgatatattcccttttataattcctaaaatgaagattctatttaagggttataatttatataagtttagtcatataccattacattatgataccataagcagagtgcattatgattctctagaaatataattcaatcagatatgtattatatttatttatgtcacacattttctttactgagaataaaaattatcttattttcagaagctttgtatcaatcagtttcatgtaataagcaacccagatatctactagattatgtatttcttcatttgaaactacactgttttctcctagtccccttgactctactgtgcttatccattctttcacagaaagaaagtaacagacataattcctgttgatgaggctgggattgtttttaagaggagagataataacttcatatttttaaagtgccagtagcctaatatgtgaaacagatcagaatctgttgtgtagtaagtctgctttgttgaagaatttattatgggagtaaagataagaaggaaagagatcaccatcagaaacaagtcagccttttcatgcttttttgagcatttttggagatgattccacttctcaagttattatcatttgtgcatctcttcaatgctattgttaaatgctttagaattagaatattttgatcctttaattaaagtaagccaaacgtctaggcaaaaacagccaatcattaaactttaatagtaattcaaatatagatttctcatacagttttccatgtctgtagaaatcaaagttgtaatgttaagcagagggaaatgcgtgtgatttactaatacacttcaacgttctacttttgaaaggatactcatgtgggtggggcagagaacatagaaaaagatatgatggaaaacctgtccattttctacctgttaaccttcatcattttgtgccaggccctggaagcaaagagaggaagggaccgactgcatttatctttgaacacttgagcatcagtagtactactgagtggccaggggtcttgtctgtcaaagcaaatgataagttcactcaggccattattgactgctgaactctcttccttcccaactcttccttgaaagagaaaaaaatactttgccttcttgctctccttatcaaatgtttttgtacaaatagtgtaagcctgtttaagcaaaccaattaaaataggcactgattattttgatctgtttgtaacaaatgaatgtaagtactatttacatggtgtgcctaggaggagctgaaatcattggcactttaatccatattgtaaagatcagtatcaaaagcatagtgttcttcacctctcctcctcagcatccatctctatatacttgattaaatggaaaagtctcttttatcacctctatgtaaagttttatgggtagttatcgtcagtgtatttaaatatatcttctagtatgttttaaaggctggtcttcaatactgtggagacaaaaaataaaagagcgtatgaaaagtacgttagacttttgctggcattcaagtcatggctagtctgtgtatttaataaatgtgtgttatttatgtcgtgtttgtcaatggaaaataaagttgaatattctgaaatgtcgctgtgttttcttcctgatgtcaactcacgtcaggaatactttacctataactatgttaagtattttgctgaaatcccatttgatgtgctttgtcaaataatagcacaatgtaatgcaacagccccatgctatctggaaaaattagatcattttgttttatattccataatcatgtgcataacaaattattgttgatttaatataaatatgagagttgctcttt

SEQ ID NO: 169911 - DNA, 1914 bp, Homo sapiens
  Payload ID: 13449
  Gene Symbol: PTGER3
  Gene Name: prostaglandin E receptor 3 (subtype EP3)
  Uniprot ID: P43115
  ENST ID: ENST00000370931
  CDS Start-End: 212-1384
gaaggcgtggctccctcccgggccagtgagccctggcgccgccgcggccgcggtcccagcagcggagtagggcggcggctgcgccccgcaccatggggggcagcccagccccagccgcggtaaacgccgacctccgccgccgcccgcgccgcgtctgccccctcccgctgcggctctctggacgccatcccctcctcacctcgaagccaacatgaaggagacccggggctacggaggggatgcccccttctgcacccgcctcaaccactcctacacaggcatgtgggcgcccgagcgttccgccgaggcgcggggcaacctcacgcgccctccagggtctggcgaggattgcggatcggtgtccgtggccttcccgatcaccatgctgctcactggtttcgtgggcaacgcactggccatgctgctcgtgtcgcgcagctaccggcgccgggagagcaagcgcaagaagtccttcctgctgtgcatcggctggctggcgctcaccgacctggtcgggcagcttctcaccaccccggtcgtcatcgtcgtgtacctgtccaagcagcgttgggagcacatcgacccgtcggggcggctctgcacctttttcgggctgaccatgactgttttcgggctctcctcgttgttcatcgccagcgccatggccgtcgagcgggcgctggccatcagggcgccgcactggtatgcgagccacatgaagacgcgtgccacccgcgctgtgctgctcggcgtgtggctggccgtgctcgccttcgccctgctgccggtgctgggcgtgggccagtacaccgtccagtggcccgggacgtggtgcttcatcagcaccgggcgagggggcaacgggactagctcttcgcataactggggcaaccttttcttcgcctctgcctttgccttcctggggctcttggcgctgacagtcaccttttcctgcaacctggccaccattaaggccctggtgtcccgctgccgggccaaggccacggcatctcagtccagtgcccagtggggccgcatcacgaccgagacggccattcagcttatggggatcatgtgcgtgctgtcggtctgctggtctccgctcctgataatgatgttgaaaatgatcttcaatcagacatcagttgagcactgcaagacacacacggagaagcagaaagaatgcaacttcttcttaatagctgttcgcctggcttcactgaaccagatcttggatccttgggtttacctgctgttaagaaagatccttcttcgaaagttttgccagatcaggtaccacacaaacaactatgcatccagctccacctccttaccctgccagtgttcctcaaccttgatgtggagcgaccatttggaaagatgagaaaaagaagactcagagagcaagaggaattttggggaaattaaaacctgcctttctgccaggatcacatcactggaagctccatgactctctttttgtaaaagaaaaaaaaatcacagaaacacccacctcccaaactattctcttttacttcttcccccaagcccacccccaaatataactgttatccagaagctgttatgtcctgtttccatacatgtttttgtacttttactatatctacatacatcaattaaacttatgtcctattgttttgtgaatttatatttgcgtatacattatcatatgtaaaatttgcatttttttattgaaaattatgtttcttgagatttatccacattgaaacatggagctctaaatcgttaattttaaccgctatagagtattccataatttgaataaagcataatttgtttgtacaatctcccgccaagggaaaattatttccacactcatcatgacaaggagcactgcaaaaataaaaataaaaattacattcatacatgttt

SEQ ID NO: 169912 - DNA, 1841 bp, Homo sapiens
  Payload ID: 13449
  Gene Symbol: PTGER3
  Gene Name: prostaglandin E receptor 3 (subtype EP3)
  ENST ID: ENST00000370932
  CDS Start-End: 232-1398
accagaggtttcccagagaggaaggcgtggctccctcccgggccagtgagccctggcgccgccgcggccgcggtcccagcagcggagtagggcggcggctgcgccccgcaccatggggggcagcccagccccagccgcggtaaacgccgacctccgccgccgcccgcgccgcgtctgccccctcccgctgcggctctctggacgccatcccctcctcacctcgaagccaacatgaaggagacccggggctacggaggggatgcccccttctgcacccgcctcaaccactcctacacaggcatgtgggcgcccgagcgttccgccgaggcgcggggcaacctcacgcgccctccagggtctggcgaggattgcggatcggtgtccgtggccttcccgatcaccatgctgctcactggtttcgtgggcaacgcactggccatgctgctcgtgtcgcgcagctaccggcgccgggagagcaagcgcaagaagtccttcctgctgtgcatcggctggctggcgctcaccgacctggtcgggcagcttctcaccaccccggtcgtcatcgtcgtgtacctgtccaagcagcgttgggagcacatcgacccgtcggggcggctctgcacctttttcgggctgaccatgactgttttcgggctctcctcgttgttcatcgccagcgccatggccgtcgagcgggcgctggccatcagggcgccgcactggtatgcgagccacatgaagacgcgtgccacccgcgctgtgctgctcggcgtgtggctggccgtgctcgccttcgccctgctgccggtgctgggcgtgggccagtacaccgtccagtggcccgggacgtggtgcttcatcagcaccgggcgagggggcaacgggactagctcttcgcataactggggcaaccttttcttcgcctctgcctttgccttcctggggctcttggcgctgacagtcaccttttcctgcaacctggccaccattaaggccctggtgtcccgctgccgggccaaggccacggcatctcagtccagtgcccagtggggccgcatcacgaccgagacggccattcagcttatggggatcatgtgcgtgctgtcggtctgctggtctccgctcctgataatgatgttgaaaatgatcttcaatcagacatcagttgagcactgcaagacacacacggagaagcagaaagaatgcaacttcttcttaatagctgttcgcctggcttcactgaaccagatcttggatccttgggtttacctgctgttaagaaagatccttcttcgaaagttttgccaggtagcaaatgctgtctcgttttccaggaggaattttggggaaattaaaacctgcctttctgccaggatcacatcactggaagctccatgactctctttttgtaaaagaaaaaaaaatcacagaaacacccacctcccaaactattctcttttacttcttcccccaagcccacccccaaatataactgttatccagaagctgttatgtcctgtttccatacatgtttttgtacttttactatatctacatacatcaattaaacttatgtcctattgttttgtgaatttatatttgcgtatacattatcatatgtaaaatttgcatttttttattgaaaattatgtttcttgagatttatccacattgaaacatggagctctaaatcgttaattttaaccgctatagagtattccataatttgaataaagcataatttgtttgtacaatctcccgccaagggaaaattatttccacactcatcatgacaaggagcactgcaaaaataaaaataaaaattacattcatacatgttt

SEQ ID NO: 169913 - DNA, 1447 bp, Homo sapiens
  Payload ID: 13449
  Gene Symbol: PTGER3
  Gene Name: prostaglandin E receptor 3 (subtype EP3)
  Uniprot ID: P43115
  ENST ID: ENST00000460330
  CDS Start-End: 57-1181
tgccccctcccgctgcggctctctggacgccatcccctcctcacctcgaagccaacatgaaggagacccggggctacggaggggatgcccccttctgcacccgcctcaaccactcctacacaggcatgtgggcgcccgagcgttccgccgaggcgcggggcaacctcacgcgccctccagggtctggcgaggattgcggatcggtgtccgtggccttcccgatcaccatgctgctcactggtttcgtgggcaacgcactggccatgctgctcgtgtcgcgcagctaccggcgccgggagagcaagcgcaagaagtccttcctgctgtgcatcggctggctggcgctcaccgacctggtcgggcagcttctcaccaccccggtcgtcatcgtcgtgtacctgtccaagcagcgttgggagcacatcgacccgtcggggcggctctgcacctttttcgggctgaccatgactgttttcgggctctcctcgttgttcatcgccagcgccatggccgtcgagcgggcgctggccatcagggcgccgcactggtatgcgagccacatgaagacgcgtgccacccgcgctgtgctgctcggcgtgtggctggccgtgctcgccttcgccctgctgccggtgctgggcgtgggccagtacaccgtccagtggcccgggacgtggtgcttcatcagcaccgggcgagggggcaacgggactagctcttcgcataactggggcaaccttttcttcgcctctgcctttgccttcctggggctcttggcgctgacagtcaccttttcctgcaacctggccaccattaaggccctggtgtcccgctgccgggccaaggccacggcatctcagtccagtgcccagtggggccgcatcacgaccgagacggccattcagcttatggggatcatgtgcgtgctgtcggtctgctggtctccgctcctgataatgatgttgaaaatgatcttcaatcagacatcagttgagcactgcaagacacacacggagaagcagaaagaatgcaacttcttcttaatagctgttcgcctggcttcactgaaccagatcttggatccttgggtttacctgctgttaagaaagatccttcttcgaaagttttgccagatgagaaaaagaagactcagagagcaagaggaattttggggaaattaaaacctgcctttctgccaggatcacatcactggaagctccatgactctctttttgtaaaagaaaaaaaaatcacagaaacacccacctcccaaactattctcttttacttcttcccccaagcccacccccaaatataactgttatccagaagctgttatgtcctgtttccatacatgtttttgtacttttactatatctacatacatcaattaaacttatgtcctattgttttgtgaatttatatttgcgtatacattatcatatgt

SEQ ID NO: 169914 - DNA, 1895 bp, Homo sapiens
  Payload ID: 13449
  Gene Symbol: PTGER3
  Gene Name: prostaglandin E receptor 3 (subtype EP3)
  Uniprot ID: P43115
  ENST ID: ENST00000479353
  CDS Start-End: 232-1413
accagaggtttcccagagaggaaggcgtggctccctcccgggccagtgagccctggcgccgccgcggccgcggtcccagcagcggagtagggcggcggctgcgccccgcaccatggggggcagcccagccccagccgcggtaaacgccgacctccgccgccgcccgcgccgcgtctgccccctcccgctgcggctctctggacgccatcccctcctcacctcgaagccaacatgaaggagacccggggctacggaggggatgcccccttctgcacccgcctcaaccactcctacacaggcatgtgggcgcccgagcgttccgccgaggcgcggggcaacctcacgcgccctccagggtctggcgaggattgcggatcggtgtccgtggccttcccgatcaccatgctgctcactggtttcgtgggcaacgcactggccatgctgctcgtgtcgcgcagctaccggcgccgggagagcaagcgcaagaagtccttcctgctgtgcatcggctggctggcgctcaccgacctggtcgggcagcttctcaccaccccggtcgtcatcgtcgtgtacctgtccaagcagcgttgggagcacatcgacccgtcggggcggctctgcacctttttcgggctgaccatgactgttttcgggctctcctcgttgttcatcgccagcgccatggccgtcgagcgggcgctggccatcagggcgccgcactggtatgcgagccacatgaagacgcgtgccacccgcgctgtgctgctcggcgtgtggctggccgtgctcgccttcgccctgctgccggtgctgggcgtgggccagtacaccgtccagtggcccgggacgtggtgcttcatcagcaccgggcgagggggcaacgggactagctcttcgcataactggggcaaccttttcttcgcctctgcctttgccttcctggggctcttggcgctgacagtcaccttttcctgcaacctggccaccattaaggccctggtgtcccgctgccgggccaaggccacggcatctcagtccagtgcccagtggggccgcatcacgaccgagacggccattcagcttatggggatcatgtgcgtgctgtcggtctgctggtctccgctcctgataatgatgttgaaaatgatcttcaatcagacatcagttgagcactgcaagacacacacggagaagcagaaagaatgcaacttcttcttaatagctgttcgcctggcttcactgaaccagatcttggatccttgggtttacctgctgttaagaaagatccttcttcgaaagttttgccaggagatggggcctgatggaaggtgtttttgtcatgcatggaggcaggtccccaggacttggtgcagttctcatgatagagaaccctgcagtgtccagctaagctgatgacttgaagataaatctgcctaaccctgggatgaagtatctgtgaactattttgacagcagatgaggaattttggggaaattaaaacctgcctttctgccaggatcacatcactggaagctccatgactctctttttgtaaaagaaaaaaaaatcacagaaacacccacctcccaaactattctcttttacttcttcccccaagcccacccccaaatataactgttatccagaagctgttatgtcctgtttccatacatgtttttgtacttttactatatctacatacatcaattaaacttatgtcctattgttttgtgaatttatatttgcgtatacattatcatatgtaaaatttgcatttttttattgaaaattatgtttcttgagatttatccacattgaaacatggagctctaaatcgttaattttaaccgctatagagtattccataatttgaataaagcataatttgtttgtac

SEQ ID NO: 169915 - DNA, 1971 bp, Homo sapiens
  Payload ID: 13449
  Gene Symbol: PTGER3
  Gene Name: prostaglandin E receptor 3 (subtype EP3)
  ENST ID: ENST00000497146
  CDS Start-End: 212-1489
gaaggcgtggctccctcccgggccagtgagccctggcgccgccgcggccgcggtcccagcagcggagtagggcggcggctgcgccccgcaccatggggggcagcccagccccagccgcggtaaacgccgacctccgccgccgcccgcgccgcgtctgccccctcccgctgcggctctctggacgccatcccctcctcacctcgaagccaacatgaaggagacccggggctacggaggggatgcccccttctgcacccgcctcaaccactcctacacaggcatgtgggcgcccgagcgttccgccgaggcgcggggcaacctcacgcgccctccagggtctggcgaggattgcggatcggtgtccgtggccttcccgatcaccatgctgctcactggtttcgtgggcaacgcactggccatgctgctcgtgtcgcgcagctaccggcgccgggagagcaagcgcaagaagtccttcctgctgtgcatcggctggctggcgctcaccgacctggtcgggcagcttctcaccaccccggtcgtcatcgtcgtgtacctgtccaagcagcgttgggagcacatcgacccgtcggggcggctctgcacctttttcgggctgaccatgactgttttcgggctctcctcgttgttcatcgccagcgccatggccgtcgagcgggcgctggccatcagggcgccgcactggtatgcgagccacatgaagacgcgtgccacccgcgctgtgctgctcggcgtgtggctggccgtgctcgccttcgccctgctgccggtgctgggcgtgggccagtacaccgtccagtggcccgggacgtggtgcttcatcagcaccgggcgagggggcaacgggactagctcttcgcataactggggcaaccttttcttcgcctctgcctttgccttcctggggctcttggcgctgacagtcaccttttcctgcaacctggccaccattaaggccctggtgtcccgctgccgggccaaggccacggcatctcagtccagtgcccagtggggccgcatcacgaccgagacggccattcagcttatggggatcatgtgcgtgctgtcggtctgctggtctccgctcctgataatgatgttgaaaatgatcttcaatcagacatcagttgagcactgcaagacacacacggagaagcagaaagaatgcaacttcttcttaatagctgttcgcctggcttcactgaaccagatcttggatccttgggtttacctgctgttaagaaagatccttcttcgaaagttttgccagatgagaaaaagaagactcagagagcaagctcctcttcttcccacctctactgtgattgatccttcaaggttctgtgctcagcccttccgttggttcttggatttgtcctttcccgccatgtcttcatcacatccacaacttccactaacacttgcgagcttcaaacttcttagagaaccctgcagtgtccagctaagctgatgacttgaagataaatctgcctaaccctgggatgaagtatctgtgaactattttgacagcagatgaggaattttggggaaattaaaacctgcctttctgccaggatcacatcactggaagctccatgactctctttttgtaaaagaaaaaaaaatcacagaaacacccacctcccaaactattctcttttacttcttcccccaagcccacccccaaatataactgttatccagaagctgttatgtcctgtttccatacatgtttttgtacttttactatatctacatacatcaattaaacttatgtcctattgttttgtgaatttatatttgcgtatacattatcatatgtaaaatttgcatttttttattgaaaattatgtttcttgagatttatccacattgaaacatggagctctaaatcgttaattttaaccgctatagagtattccataatttgaataaagcataatttgtttgtac

SEQ ID NO: 169916 - DNA, 1922 bp, Homo sapiens
  Payload ID: 13449
  Gene Symbol: PTGER3
  Gene Name: prostaglandin E receptor 3 (subtype EP3)
  ENST ID: ENST00000361210
  CDS Start-End: 232-1440
accagaggtttcccagagaggaaggcgtggctccctcccgggccagtgagccctggcgccgccgcggccgcggtcccagcagcggagtagggcggcggctgcgccccgcaccatggggggcagcccagccccagccgcggtaaacgccgacctccgccgccgcccgcgccgcgtctgccccctcccgctgcggctctctggacgccatcccctcctcacctcgaagccaacatgaaggagacccggggctacggaggggatgcccccttctgcacccgcctcaaccactcctacacaggcatgtgggcgcccgagcgttccgccgaggcgcggggcaacctcacgcgccctccagggtctggcgaggattgcggatcggtgtccgtggccttcccgatcaccatgctgctcactggtttcgtgggcaacgcactggccatgctgctcgtgtcgcgcagctaccggcgccgggagagcaagcgcaagaagtccttcctgctgtgcatcggctggctggcgctcaccgacctggtcgggcagcttctcaccaccccggtcgtcatcgtcgtgtacctgtccaagcagcgttgggagcacatcgacccgtcggggcggctctgcacctttttcgggctgaccatgactgttttcgggctctcctcgttgttcatcgccagcgccatggccgtcgagcgggcgctggccatcagggcgccgcactggtatgcgagccacatgaagacgcgtgccacccgcgctgtgctgctcggcgtgtggctggccgtgctcgccttcgccctgctgccggtgctgggcgtgggccagtacaccgtccagtggcccgggacgtggtgcttcatcagcaccgggcgagggggcaacgggactagctcttcgcataactggggcaaccttttcttcgcctctgcctttgccttcctggggctcttggcgctgacagtcaccttttcctgcaacctggccaccattaaggccctggtgtcccgctgccgggccaaggccacggcatctcagtccagtgcccagtggggccgcatcacgaccgagacggccattcagcttatggggatcatgtgcgtgctgtcggtctgctggtctccgctcctgataatgatgttgaaaatgatcttcaatcagacatcagttgagcactgcaagacacacacggagaagcagaaagaatgcaacttcttcttaatagctgttcgcctggcttcactgaaccagatcttggatccttgggtttacctgctgttaagaaagatccttcttcgaaagttttgccagatgagaaaaagaagactcagagagcaagagatggggcctgatggaaggtgtttttgtcatgcatggaggcaggtccccaggacttggtgcagttctcatgatagagaaccctgcagtgtccagctaagctgatgacttgaagataaatctgcctaaccctgggatgaagtatctgtgaactattttgacagcagatgaggaattttggggaaattaaaacctgcctttctgccaggatcacatcactggaagctccatgactctctttttgtaaaagaaaaaaaaatcacagaaacacccacctcccaaactattctcttttacttcttcccccaagcccacccccaaatataactgttatccagaagctgttatgtcctgtttccatacatgtttttgtacttttactatatctacatacatcaattaaacttatgtcctattgttttgtgaatttatatttgcgtatacattatcatatgtaaaatttgcatttttttattgaaaattatgtttcttgagatttatccacattgaaacatggagctctaaatcgttaattttaaccgctatagagtattccataatttgaataaagcataatttgtttgtac

SEQ ID NO: 169917 - DNA, 1815 bp, Homo sapiens
  Payload ID: 13449
  Gene Symbol: PTGER3
  Gene Name: prostaglandin E receptor 3 (subtype EP3)
  Uniprot ID: P43115
  ENST ID: ENST00000628037
  CDS Start-End: 232-1329
accagaggtttcccagagaggaaggcgtggctccctcccgggccagtgagccctggcgccgccgcggccgcggtcccagcagcggagtagggcggcggctgcgccccgcaccatggggggcagcccagccccagccgcggtaaacgccgacctccgccgccgcccgcgccgcgtctgccccctcccgctgcggctctctggacgccatcccctcctcacctcgaagccaacatgaaggagacccggggctacggaggggatgcccccttctgcacccgcctcaaccactcctacacaggcatgtgggcgcccgagcgttccgccgaggcgcggggcaacctcacgcgccctccagggtctggcgaggattgcggatcggtgtccgtggccttcccgatcaccatgctgctcactggtttcgtgggcaacgcactggccatgctgctcgtgtcgcgcagctaccggcgccgggagagcaagcgcaagaagtccttcctgctgtgcatcggctggctggcgctcaccgacctggtcgggcagcttctcaccaccccggtcgtcatcgtcgtgtacctgtccaagcagcgttgggagcacatcgacccgtcggggcggctctgcacctttttcgggctgaccatgactgttttcgggctctcctcgttgttcatcgccagcgccatggccgtcgagcgggcgctggccatcagggcgccgcactggtatgcgagccacatgaagacgcgtgccacccgcgctgtgctgctcggcgtgtggctggccgtgctcgccttcgccctgctgccggtgctgggcgtgggccagtacaccgtccagtggcccgggacgtggtgcttcatcagcaccgggcgagggggcaacgggactagctcttcgcataactggggcaaccttttcttcgcctctgcctttgccttcctggggctcttggcgctgacagtcaccttttcctgcaacctggccaccattaaggccctggtgtcccgctgccgggccaaggccacggcatctcagtccagtgcccagtggggccgcatcacgaccgagacggccattcagcttatggggatcatgtgcgtgctgtcggtctgctggtctccgctcctgataatgatgttgaaaatgatcttcaatcagacatcagttgagcactgcaagacacacacggagaagcagaaagaatgcaacttcttcttaatagctgttcgcctggcttcactgaaccagatcttggatccttgggtttacctgctgttaagaaagatccttcttcgaaagttttgccaggaggaattttggggaaattaaaacctgcctttctgccaggatcacatcactggaagctccatgactctctttttgtaaaagaaaaaaaaatcacagaaacacccacctcccaaactattctcttttacttcttcccccaagcccacccccaaatataactgttatccagaagctgttatgtcctgtttccatacatgtttttgtacttttactatatctacatacatcaattaaacttatgtcctattgttttgtgaatttatatttgcgtatacattatcatatgtaaaatttgcatttttttattgaaaattatgtttcttgagatttatccacattgaaacatggagctctaaatcgttaattttaaccgctatagagtattccataatttgaataaagcataatttgtttgtacaatctcccgccaagggaaaattatttccacactcatcatgacaaggagcactgcaaaaataaaaataaaaattacattcatacatgttt

SEQ ID NO: 169918 - DNA, 3848 bp, Homo sapiens
  Payload ID: 13450
  Gene Symbol: PTGER4
  Gene Name: prostaglandin E receptor 4 (subtype EP4)
  Uniprot ID: P35408
  ENST ID: ENST00000302472
  CDS Start-End: 1025-2491
aaaacaactgccctctcttccacgatctagatgttgcggcccgcggacaggaggttcaagaaatagtacactccgagcggcaggcagcgaggcggaaacggtcgccggtttcagtggtggccccactggaagccgagttcaggagcggctaagcggtcgccggggaaagcaccggggcttcccagggtcccctccgagttcccactccgcacctccgagggcgtgaaaaccacgggagccgccccaccccgcgcgcccagccccgccccagcccagacaccgccccccgccagtcttccctgcggcgcccagggaggacgcgctccgcccccttccaatccggccaatgggcgcccgggcagcgcgcggtttgcctccgcctccgccagggaaacttggaggaggagaaaagtttgtacagagggtggaaaggcgagagcggagctccaagcccggcagcccgagaggaagatgaacagccccaggccagagcctctggcagagtggaccccgagccgcccccaggtagccaggagcggcctcagcggcagccgcaaactccagtagccgcccgtgctgcccgtggctggggcggagggcagccagagctggggaccaaggctccgcgccacctgcgcgcacagcctcacacctgaacgctgtcctcccgcagacgagaccggcgggcactgcaaagctgggactcgtctttgaaggaaaaaaaatagcgagtaagaaatccagcaccattcttcactgacccatcccgctgcacctcttgtttcccaagtttttgaaagctggcaactctgacctcggtgtccaaaaatcgacagccactgagaccggctttgagaagccgaagatttggcagtttccagactgagcaggacaaggtgaaagcaggttggaggcgggtccaggacatctgagggctgaccctgggggctcgtgaggctgccaccgctgctgccgctacagacccagccttgcactccaaggctgcgcaccgccagccactatcatgtccactcccggggtcaattcgtccgcctccttgagccccgaccggctgaacagcccagtgaccatcccggcggtgatgttcatcttcggggtggtgggcaacctggtggccatcgtggtgctgtgcaagtcgcgcaaggagcagaaggagacgaccttctacacgctggtatgtgggctggctgtcaccgacctgttgggcactttgttggtgagcccggtgaccatcgccacgtacatgaagggccaatggcccgggggccagccgctgtgcgagtacagcaccttcattctgctcttcttcagcctgtccggcctcagcatcatctgcgccatgagtgtcgagcgctacctggccatcaaccatgcctatttctacagccactacgtggacaagcgattggcgggcctcacgctctttgcagtctatgcgtccaacgtgctcttttgcgcgctgcccaacatgggtctcggtagctcgcggctgcagtacccagacacctggtgcttcatcgactggaccaccaacgtgacggcgcacgccgcctactcctacatgtacgcgggcttcagctccttcctcattctcgccaccgtcctctgcaacgtgcttgtgtgcggcgcgctgctccgcatgcaccgccagttcatgcgccgcacctcgctgggcaccgagcagcaccacgcggccgcggccgcctcggttgcctcccggggccaccccgctgcctccccagccttgccgcgcctcagcgactttcggcgccgccggagcttccgccgcatcgcgggcgccgagatccagatggtcatcttactcattgccacctccctggtggtgctcatctgctccatcccgctcgtggtgcgagtattcgtcaaccagttatatcagccaagtttggagcgagaagtcagtaaaaatccagatttgcaggccatccgaattgcttctgtgaaccccatcctagacccctggatatatatcctcctgagaaagacagtgctcagtaaagcaatagagaagatcaaatgcctcttctgccgcattggcgggtcccgcagggagcgctccggacagcactgctcagacagtcaaaggacatcttctgccatgtcaggccactctcgctccttcatctcccgggagctgaaggagatcagcagtacatctcagaccctcctgccagacctctcactgccagacctcagtgaaaatggccttggaggcaggaatttgcttccaggtgtgcctggcatgggcctggcccaggaagacaccacctcactgaggactttgcgaatatcagagacctcagactcttcacagggtcaggactcagagagtgtcttactggtggatgaggctggtgggagcggcagggctgggcctgcccctaaggggagctccctgcaagtcacatttcccagtgaaacactgaacttatcagaaaaatgtatataataggcaaggaaagaaatacagtactgtttctggacccttataaaatcctgtgcaatagacacatacatgtcacatttagctgtgctcagaagggctatcatcatcctacaactcacattagagaacatcctggcttttgagcacttttcaaacaatcaagttgactcacgtgggtcctgaggcctgcagcacgtcggatgctaccccactatgacagaggattgtggtcacaacttgatggctgcgaagacctaccctccgtttttctactagataggaggatggtagaagtttggctgctgtcataacatccagagctttgtcgtatttggcacacagcagaggcccagatattagaaaggctctattccaataaactatgaggactgccttatggatgatttaagtgtctcactaaagcatgaaatgtgaatttttattgttgtacatacgatttaaggtatttaaagtattttcttctctgtgagaaggtttattgttaatacaaggtataataaaattatcgcaacccctctccttccagtataaccagctgaagttgcagatgttagatatttttcataaacaagttcgagtcaaagttgaaaattcatagtaagattgatatctataaaatagatataaatttttaagagaaagaatttagtattatcaaagggataaagaaaaaaatactatttaagatgtgaaaattacagtccaaaatactgttctttccaggctatgtataaaatacatagtgaaaattgtttagtgatattacatttatttatccagaaaactgtgatttcaggagaacctaacatgctggtgaatattttcaactttttccctcactaattggtacttttaaaaacataacataaattttttgaagtctttaataaataacccataattgaagtgtataatataaaaaattttaaaaatctaagcagcttattgtttctctgaaagtgtgtgtagttttactttcctaaggaattaccaagaatatcctttaaaatttaaaaggatggcaagttgcatcagaaagctttattttgagatgtaaaaagattcccaaacgtggttacattagccattcatgtatgtcagaagtgcagaattggggcacttaatggtcaccttgtaacagttttgtgtaactcccagtgatgctgtacacatatttgaagggtctttctcaaagaaatattaagcatgttttgttgctcagtgtttttgtgaattgcttggttgtaattaaattctgagcctgatattgatatggttttaagaagcagttgtaccaagtgaaattattttggagattataataaatatatacattcaa

SEQ ID NO: 169919 - DNA, 1774 bp, Homo sapiens
  Payload ID: 13451
  Gene Symbol: PTGES
  Gene Name: prostaglandin E synthase
  Uniprot ID: O14684
  ENST ID: ENST00000340607
  CDS Start-End: 36-494
tgatcacacccacagttgagctgcgctggccagagatgcctgcccacagcctggtgatgagcagcccggccctcccggccttcctgctctgcagcacgctgctggtcatcaagatgtacgtggtggccatcatcacgggccaagtgaggctgcggaagaaggcctttgccaaccccgaggatgccctgagacacggaggcccccagtattgcaggagcgaccccgacgtggaacgctgcctcagggcccaccggaacgacatggagaccatctaccccttccttttcctgggcttcgtctactcctttctgggtcctaacccttttgtcgcctggatgcacttcctggtcttcctcgtgggccgtgtggcacacaccgtggcctacctggggaagctgcgggcacccatccgctccgtgacctacaccctggcccagctcccctgcgcctccatggctctgcagatcctctgggaagcggcccgccacctgtgaccagcagctgatgcctccttggccaccagaccatgggccaagagccgccgtggctatacctggggacttgatgttccttccagattgtggtgggccctgagtcctggtttcctggcagcctgctgcgcgtgtgggtctctgggcacagtgggcctgtgtgtgtgcccgtgtgtgtgtatgtgtgtgtgtatgtttcttagccccttggattcctgcacgaagtggctgatgggaaccatttcaagacagattgtgaagattgatagaaaatccttcagctaaagtaacagagcatcaaaaacatcactccctctccctccctaacagtgaaaagagagaagggagactctatttaagattcccaaacctaatgatcatctgaatcccgggctaagaatgcagacttttcagactgaccccagaaattctggcccagccaatctagaggcaagcctggccatctgtatttttttttttccaagacagagtcttgctctgttgcccaagctggagtgaagtggtacaatctggctcactgcagcctccgcctcccgggttcaagcgattctcccgcctcagcctcctgagtagctgggattacaggcgcgtatcaccatacccagctaatttttgtatttttagtagagacgggttcaccatgttgcccaggagggtctcgaactcctggcctcaagtgatccaccggcctcggcctcccaaagtgctgggatgacaggcatgaatcactgtgctcagccaccatctggagttttaaaaggctcccatgtgagtccctgtgatggccaggccaggggacccctgccagttctctgtggaagcaaggctggggtcttgggttcctgtatggtggaagctgggtgagccaaggacagggctggctcctctgcccccgctgacgcttcccttgccgttggctttggatgtctttgctgcagtcttctctctggctcaggtgtgggtgggaggggcccacaggaagctcagccttctcctcccaaggtttgagtccctccaaagggcagtgggtggaggaccgggagctttgggtgaccagccactcaaaggaactttctggtcccttcagtatcttcaaggtttggaaactgcaaatgtccccttgatggggaatccgtgtgtgtgtgtgtgtgtgtgtgtgtgtgtgtgtgtgtgtgtgtgtgttttctcctagacccgtgacctgagatgtgtgatttttagtcattaaatggaagtgtctgccagctgggcccagcacctcg

SEQ ID NO: 169920 - DNA, 1614 bp, Homo sapiens
  Payload ID: 13452
  Gene Symbol: PTGES2
  Gene Name: prostaglandin E synthase 2
  ENST ID: ENST00000277462
  CDS Start-End: 603-1163
ctctcgggcgccgggcggggccatcccggggctgtccgcggagacgcctatgcggtggaggctccgggcttcagctagggcgggggagcccagcagaaggaccgagcagcctggcaccccactttgccatcctctccctggaaatctcggggtcggcgggccggccgcttcgcgtgggcgaaatcagagacacgtggtttccaaggccccttcggctctccctgtccagccgcctgcagctgaccctgtaccagtacaagacgtgtcccttctgcagcaaggtccgagccttcctcgacttccatgccctgccctaccaggtggtggaggtgaaccctgtgcgcagggctgagatcaagttctcctcctacagaaaggtgcccatcctggtggcccaggaaggagaaagctcgggacggcagatatgaaatgcctggcacagtgcttggggtctagtatgtagcttccagaacccaccctgcccctctacctgggaggccaaatggcaacaactaaatgactcctctgtcatcatcagcgccctcaagacctacctggtgtcggggcagcccctggaagagatcatcacctactacccagccatgaaggctgtgaacgagcagggcaaggaggtgaccgagttcggcaataagtactggctcatgctcaacgagaaggaggcccagcaagtgtatggtgggaaggaggccaggacggaggagatgaagtggcggcagtgggcggacgactggctggtgcacctgatctcccccaatgtgtaccgcacgcccaccgaggctctggcgtcctttgactacattgtccgcgagggcaagttcggagccgtggagggtgccgtggccaagtacatgggtgcagcggccatgtacctcatcagcaagcgactcaagagcaggcaccgcctccaggacaacgtgcgcgaggacctctatgaggctgctgacaagtgggtggctgctgtgggcaaggaccggcccttcatggggggccagaagccgaatctcgctgatttggcggtgtatggcgtgctgcgtgtgatggaggggctggatgcgttcgatgacctgatgcagcacacgcacatccagccctggtacctgcgggtggagagggccatcaccgaggcctccccagcgcactgaatgtccccgcgcagagcagagggaaggcagcggaagacgccagctgccagggcctggggccactgggccagcgcctggcgatactggttgggggcaggatcattctgccccttgtccacgcacccccaccagccctctcgcttctaacacagggcacctgctggggctcagggatgttagggacgagttccagccctgccactgccctggggcgacccctccctgtccctgcctccctgctctgccgcccctcttcctggaccctcagtggctgtcccatggctacatcctgtgggtgggggccctcgacaggacagcaggacggtttgttttcagtggaatcccatccctgggttcccctggttcccactcttcccaagcctcccgggactgggacatgtttgcaataaaggaaaggtttgtggcgcctgtcatggcaggcatctcatgg

SEQ ID NO: 169921 - DNA, 2331 bp, Homo sapiens
  Payload ID: 13452
  Gene Symbol: PTGES2
  Gene Name: prostaglandin E synthase 2
  Uniprot ID: Q9H7Z7
  ENST ID: ENST00000338961
  CDS Start-End: 746-1879
ctctcgggcgccgggcggggccatcccggggctgtccgcggagacgcctatgcggtggaggctccgggcttcagctagggcgggggagcccagcagaaggaccgagcagcctggcaccccactttgccatcctctccctggaaatctcggggtcggcgggccggccgcttcgcgtgggcgaaatcagagacacgtggtttccaaggccccttcgggttcgggaaaattttatggttcgggtcacagtaggaagcggacaatgaggcgggagggcagagagaaccgcaacacctggtgccgggtcgggtcgtttccggggctttcagtggccggaagtcgcggcgcctgtactgactctaggaagggctggagttgttttgaatgggcgcccgtaagagaggtgggcaagtacgtgttacagacggccacgccgccctttaggcggtcaaggtggggcgaggagacgttcgcccccctgcagtcggccgggtcactacccaagagcctttggaggcggaagcatggaacggtctgcaaacgttcccgagcgggcctctgcggctctggcgggcgtttcgaacttgggcgccgggcacacgcccagtcccgagagcgctgagggttcccttagcgtcgccctcaccccggccaacccgcggggcgccagagtcctggccctttaaacgccgcgcgtgcctcggcgtcttcgtttcgcgcgcccgcccgcggcgccggcggagcgaacatggacccggctgcgcgggtggtgcgggcgctgtggcctggtgggtgcgccttggcctggaggctgggaggccgcccccagccgctgctacccacgcagagccgggctggcttcgcgggggcggcgggcggcccgagccccgtggctgcagctcgtaaggggagcccgcggctgctgggagctgcggcgctggccctggggggagccctggggctgtaccacacggcgcggtggcacctgcgcgcccaggacctccacgcagagcgctcagccgcgcagctctccctgtccagccgcctgcagctgaccctgtaccagtacaagacgtgtcccttctgcagcaaggtccgagccttcctcgacttccatgccctgccctaccaggtggtggaggtgaaccctgtgcgcagggctgagatcaagttctcctcctacagaaaggtgcccatcctggtggcccaggaaggagaaagctcgcaacaactaaatgactcctctgtcatcatcagcgccctcaagacctacctggtgtcggggcagcccctggaagagatcatcacctactacccagccatgaaggctgtgaacgagcagggcaaggaggtgaccgagttcggcaataagtactggctcatgctcaacgagaaggaggcccagcaagtgtatggtgggaaggaggccaggacggaggagatgaagtggcggcagtgggcggacgactggctggtgcacctgatctcccccaatgtgtaccgcacgcccaccgaggctctggcgtcctttgactacattgtccgcgagggcaagttcggagccgtggagggtgccgtggccaagtacatgggtgcagcggccatgtacctcatcagcaagcgactcaagagcaggcaccgcctccaggacaacgtgcgcgaggacctctatgaggctgctgacaagtgggtggctgctgtgggcaaggaccggcccttcatggggggccagaagccgaatctcgctgatttggcggtgtatggcgtgctgcgtgtgatggaggggctggatgcgttcgatgacctgatgcagcacacgcacatccagccctggtacctgcgggtggagagggccatcaccgaggcctccccagcgcactgaatgtccccgcgcagagcagagggaaggcagcggaagacgccagctgccagggcctggggccactgggccagcgcctggcgatactggttgggggcaggatcattctgccccttgtccacgcacccccaccagccctctcgcttctaacacagggcacctgctggggctcagggatgttagggacgagttccagccctgccactgccctggggcgacccctccctgtccctgcctccctgctctgccgcccctcttcctggaccctcagtggctgtcccatggctacatcctgtgggtgggggccctcgacaggacagcaggacggtttgttttcagtggaatcccatccctgggttcccctggttcccactcttcccaagcctcccgggactgggacatgtttgcaataaaggaaaggtttgtggcgcctgtcatggcaggcatctcatgga

SEQ ID NO: 169922 - DNA, 803 bp, Homo sapiens
  Payload ID: 13452
  Gene Symbol: PTGES2
  Gene Name: prostaglandin E synthase 2
  ENST ID: ENST00000449878
  CDS Start-End: 8-803
agcgaacatggacccggctgcgcgggtggtgcgggcgctgtggcctggtgggtgcgccttggcctggaggctgggaggccgcccccagccgctgctacccacgcagagccgggctggcttcgcgggggcggcgggcggcccgagccccgtggctgcagctcgtaaggggagcccgcggctgctgggagctgcggcgctggccctggggggagccctggggctgtaccacacggcgcggtggcacctgcgcgcccaggacctccacgcagagcgctcagccgcgcaggtggtggaggtgaaccctgtgcgcagggctgagatcaagttctcctcctacagaaaggtgcccatcctggtggcccaggaaggagaaagctcgcaacaactaaatgactcctctgtcatcatcagcgccctcaagacctacctggtgtcggggcagcccctggaagagatcatcacctactacccagccatgaaggctgtgaacgagcagggcaaggaggtgaccgagttcggcaataagtactggctcatgctcaacgagaaggaggcccagcaagtgtatggtgggaaggaggccaggacggaggagatgaagtggcggcagtgggcggacgactggctggtgcacctgatctcccccaatgtgtaccgcacgcccaccgaggctctggcgtcctttgactacattgtccgcgagggcaagttcggagccgtggagggtgccgtggccaagtacatgggtgcagcggccatgtacctcatcagcaagcgactcaagagcaggcaccgcctccagg

SEQ ID NO: 169923 - DNA, 1344 bp, Homo sapiens
  Payload ID: 13452
  Gene Symbol: PTGES2
  Gene Name: prostaglandin E synthase 2
  ENST ID: ENST00000617202
  CDS Start-End: 333-893
agagagaaccgcaacacctggtgccgggtcgggtcgtttccggggctttcagtggccggaagtcgcggcgcctgtactgactctaggaagggctggagttgttttgaatgggcgcccgtaagagaggtgggcaactctccctgtccagccgcctgcagctgaccctgtaccagtacaagacgtgtcccttctgcagcaagaaaggtgcccatcctggtggcccaggaaggagaaagctcgcaacaactaaatgactcctctgtcatcatcagcgccctcaagacctacctggtgtcgggcccctggaagagatcatcacctactacccagccatgaaggctgtgaacgagcagggcaaggaggtgaccgagttcggcaataagtactggctcatgctcaacgagaaggaggcccagcaagtgtatggtgggaaggaggccaggacggaggagatgaagtggcggcagtgggcggacgactggctggtgcacctgatctcccccaatgtgtaccgcacgcccaccgaggctctggcgtcctttgactacattgtccgcgagggcaagttcggagccgtggagggtgccgtggccaagtacatgggtgcagcggccatgtacctcatcagcaagcgactcaagagcaggcaccgcctccaggacaacgtgcgcgaggacctctatgaggctgctgacaagtgggtggctgctgtgggcaaggaccggcccttcatggggggccagaagccgaatctcgctgatttggcggtgtatggcgtgctgcgtgtgatggaggggctggatgcgttcgatgacctgatgcagcacacgcacatccagccctggtacctgcgggtggagagggccatcaccgaggcctccccagcgcactgaatgtccccgcgcagagcagagggaaggcagcggaagacgccagctgccagggcctggggccactgggccagcgcctggcgatactggttgggggcaggatcattctgccccttgtccacgcacccccaccagccctctcgcttctaacacagggcacctgctggggctcagggatgttagggacgagttccagccctgccactgccctggggcgacccctccctgtccctgcctccctgctctgccgcccctcttcctggaccctcagtggctgtcccatggctacatcctgtgggtgggggccctcgacaggacagcaggacggtttgttttcagtggaatcccatccctgggttcccctggttcccactcttcccaagcctcccgggactgggacatgtttgcaataaaggaaaggtttgtggcgcctgtcatggcaggcatctcatgg

SEQ ID NO: 169924 - DNA, 1920 bp, Homo sapiens
  Payload ID: 13453
  Gene Symbol: PTGES3
  Gene Name: prostaglandin E synthase 3 (cytosolic)
  Uniprot ID: Q15185
  ENST ID: ENST00000262033
  CDS Start-End: 302-784
ccagccgccgcccggcctcaccacccctcgtttgcacgcacgcacgttcattctccgtcctcgcgccccttttcctacactttcctcttctccccgaccggaggagccgctctttccgcgcggtgcattctggggcccgaggtcgagcccgccgctgccgccgtcgcctgagggaagcgagaagaggccgcgaccggagagaaaaagcggagtcgccaccggagagaagtcgactccctagcagcagccgccgccagagaggcccgcccaccagttcgcccgtccccctgccccgttcacaatgcagcctgcttctgcaaagtggtacgatcgaagggactatgtcttcattgaattttgtgttgaagacagtaaggatgttaatgtaaattttgaaaaatccaaacttacattcagttgtctcggaggaagtgataattttaagcatttaaatgaaattgatctttttcactgtattgatccaaatgattccaagcataaaagaacggacagatcaattttatgttgtttacgaaaaggagaatctggccagtcatggccaaggttaacaaaagaaagggcaaagcttaattggcttagtgtcgacttcaataattggaaagactgggaagatgattcagatgaagacatgtctaattttgatcgtttctctgagatgatgaacaacatgggtggtgatgaggatgtagatttaccagaagtagatggagcagatgatgattcacaagacagtgatgatgaaaaaatgccagatctggagtaaggaatattgtcatcacctggattttgagaaagaaaaataacttctctgcaagatttcataattgagagaattcctgagttgatagctctaaaggcagatatgctgtatttgcctactttaacccatttttcaacctgtttgttttttaaaaggcttcactaagggttgatatgtaccattgtatggggcaattttaagtcagctaaggcaataaccttatgcatgaacatttcccagactttcatgaagctgttgaggtcctaggcaattaatgcagcagttgcgataaataaaaacatctcacctaagtctccttttcttcataacatagatactgacatgataggaagctctcagcttagggaaagagaataaattttagattatagaacatggattcaaaagtgactggaacaaattggctgacaccttactggtaacctgctattcttctggtgttatccttcaggattgttccactaaaatttatttttcaaaaaatttacttcacattattctatgtaagtgatgacttgtcagtgttccaggtgtatcttagctaaaactagagaatgccctaacttagatggtttttgaagcctatacaattggtattgtttgacccttaagcttttacatctcttagcatggaggacgaagaaagctgtacattgttgcttgagagtctgtacatttagtccagatttgtatttgcactgtcagtatggcaaatgagtgaaaaatgtttaatacactattggattttttatttcctttttttgattcagcttatacccgggctgaaaacctcaatttatgttcatgacagtggggatttttttaaatgtctacattctttctaataaactgttggaagacttcttggctgtccttttaagtgtctggcttactgtaatttttatgtatttaccatttactggaatggagtttatttgaggaagaatttgggattattcctctgtttgaaaaaagaggcttgctgtaatgtcacaggaaaccttttaaaagtggatctgtaatagcatattgtagatgcactttgcagcagttggaaaagaaagtgttgtgtgatttgattgaaataaaactaaatgtgttgtcctcctaaatctttg

SEQ ID NO: 169925 - DNA, 957 bp, Homo sapiens
  Payload ID: 13453
  Gene Symbol: PTGES3
  Gene Name: prostaglandin E synthase 3 (cytosolic)
  ENST ID: ENST00000456859
  CDS Start-End: 377-751
tagaaagccgcgccggagcccaaaaacaaggactgcgcacgcgcggcggcaaggcccgggcattttgctgcgtcaccagccgccgcccggcctcaccacccctcgtttgcacgcacgcacgttcattctccgtcctcgcgccccttttcctacactttcctcttctccccgaccggaggagccgctctttccgcgcggtgcattctggggcccgaggtcgagcccgccgctgccgccgtcgcctgagggaagcgagaagaggccgcgaccggagagaaaaagcggagtcgccaccggagagaagtcgactccctagcagcagccgccgccagagaggcccgcccaccagttcgcccgtccccctgccccgttcacaatgcagcctgcttctgcaaagtggtacgatcgaagggactatgtcttcattgaattttgtgttgaagacagtaaggatgttaatgtaaattttgaaaaatccaaacttacattcagttgtttacgaaaaggagaatctggccagtcatggccaaggttaacaaaagaaagggcaaagcttaattggcttagtgtcgacttcaataattggaaagactgggaagatgattcagatgaagacatgtctaattttgatcgtttctctgagatgatgaacaacatgggtggtgatgaggatgtagatttaccagaagtagatggagcagatgatgattcacaagacagtgatgatgaaaaaatgccagatctggagtaaggaatattgtcatcacctggattttgagaaagaaaaataacttctctgcaagatttcataattgagagaattcctgagttgatagctctaaaggcagatatgctgtatttgcctactttaacccatttttcaacctgtttgttttttaaaaggcttcactaagggttgatatgtaccattgtatggggcaattttaagtcagctaa

SEQ ID NO: 169926 - DNA, 941 bp, Homo sapiens
  Payload ID: 13453
  Gene Symbol: PTGES3
  Gene Name: prostaglandin E synthase 3 (cytosolic)
  Uniprot ID: Q15185
  ENST ID: ENST00000436399
  CDS Start-End: 164-547
gaggtcgagcccgccgctgccgccgtcgcctgagggaagcgagaagaggccgcgaccggagagaaaaagcggagtcgccaccggagagaagtcgactccctagcagcagccgccgccagagaggcccgcccaccagttcgcccgtccccctgccccgttcacaatgcagcctgcttctgcaaagtggtacgatcgaagggactatgtcttcattgaattttgtgttgaagacagtaaggatgttaatgtaaattttgaaaaatccaaacttacattcagttgtctcggaggaagtgataattttaagcatttaaatgaaattgatctttttcactgtattgatccaaatcttaattggcttagtgtcgacttcaataattggaaagactgggaagatgattcagatgaagacatgtctaattttgatcgtttctctgagatgatgaacaacatgggtggtgatgaggatgtagatttaccagaagtagatggagcagatgatgattcacaagacagtgatgatgaaaaaatgccagatctggagtaaggaatattgtcatcacctggattttgagaaagaaaaataacttctctgcaagatttcataattgagagaattcctgagttgatagctctaaaggcagatatgctgtatttgcctactttaacccatttttcaacctgtttgttttttaaaaggcttcactaagggttgatatgtaccattgtatggggcaattttaagtcagctaaggcaataaccttatgcatgaacatttcccagactttcatgaagctgttgaggtcctaggcaattaatgcagcagttgcgataaataaaaacatctcacctaagtctccttttcttcataacatagatactgacatgataggaagctctcagcttagggaaagagaataaattttagattatagaacat

SEQ ID NO: 169927 - DNA, 1547 bp, Homo sapiens
  Payload ID: 13453
  Gene Symbol: PTGES3
  Gene Name: prostaglandin E synthase 3 (cytosolic)
  Uniprot ID: Q15185
  ENST ID: ENST00000414274
  CDS Start-End: 289-681
ggcctcaccacccctcgtttgcacgcacgcacgttcattctccgtcctcgcgccccttttcctacactttcctcttctccccgaccggaggagccgctctttccgcgcggtgcattctggggcccgaggtcgagcccgccgctgccgccgtcgcctgagggaagcgagaagaggccgcgaccggagagaaaaagcggagtcgccaccggagagaagtcgactccctagcagcagccgccgccagagaggcccgcccaccagttcgcccgtccccctgccccgttcacaatgcagcctgcttctgcaaagtggtacgatcgaagggactatgtcttcattgaattttgtgttgaagacagtaaggatgttaatgtaaattttgaaaaatccaaacttacattcagttgtctcggaggaagtgataattttaagcatttaaatgaaattgatctttttcactgtattgatccaaatgattccaagcataaaagaacggacagatcaattttatgttgtttacgaaaaggagaatctggccagtcatggccaaggttaacaaaagaaagggcaaagatgatgaacaacatgggtggtgatgaggatgtagatttaccagaagtagatggagcagatgatgattcacaagacagtgatgatgaaaaaatgccagatctggagtaaggaatattgtcatcacctggattttgagaaagaaaaataacttctctgcaagatttcataattgagagaattcctgagttgatagctctaaaggcagatatgctgtatttgcctactttaacccatttttcaacctgtttgttttttaaaaggcttcactaagggttgatatgtaccattgtatggggcaattttaagtcagctaaggcaataaccttatgcatgaacatttcccagactttcatgaagctgttgaggtcctaggcaattaatgcagcagttgcgataaataaaaacatctcacctaagtctccttttcttcataacatagatactgacatgataggaagctctcagcttagggaaagagaataaattttagattatagaacatggattcaaaagtgactggaacaaattggctgacaccttactggtaacctgctattcttctggtgttatccttcaggattgttccactaaaatttatttttcaaaaaatttacttcacattattctatgtaagtgatgacttgtcagtgttccaggtgtatcttagctaaaactagagaatgccctaacttagatggtttttgaagcctatacaattggtattgtttgacccttaagcttttacatctcttagcatggaggacgaagaaagctgtacattgttgcttgagagtctgtacatttagtccagatttgtatttgcactgtcagtatggcaaatgagtgaaaaatgtttaatacactattggattttttatttcctttttttgattcagcttatacccgggctgaaaacctcaatttatgttcatgacagtggggatttttttaaatgtctacattctttctaataa

SEQ ID NO: 169928 - DNA, 1017 bp, Homo sapiens
  Payload ID: 13453
  Gene Symbol: PTGES3
  Gene Name: prostaglandin E synthase 3 (cytosolic)
  Uniprot ID: Q15185
  ENST ID: ENST00000448157
  CDS Start-End: 286-705
ctcaccacccctcgtttgcacgcacgcacgttcattctccgtcctcgcgccccttttcctacactttcctcttctccccgaccggaggagccgctctttccgcgcggtgcattctggggcccgaggtcgagcccgccgctgccgccgtcgcctgagggaagcgagaagaggccgcgaccggagagaaaaagcggagtcgccaccggagagaagtcgactccctagcagcagccgccgccagagaggcccgcccaccagttcgcccgtccccctgccccgttcacaatgcagcctgcttctgcaaagtggtacgatcgaagggactatgtcttcattgaattttgtgttgaagacagtaaggatgttaatgtaaattttgaaaaatccaaacttacattcagttgtctcggaggaagtgataattttaagcatttaaatgaaattgatctttttcactgtattgatccaaatgattccaagcataaaagaacggacagatcaattttatgttgtttacgaaaaggagaatctggccagtcatggccaaggttaacaaaagaaagggcaaagcttaattggcttagtgtcgacttcaataattggaaagactgggaagatgattcagatgaagacatgtctaattttgatcgtttctctgaggattcacaagacagtgatgatgaaaaaatgccagatctggagtaaggaatattgtcatcacctggattttgagaaagaaaaataacttctctgcaagatttcataattgagagaattcctgagttgatagctctaaaggcagatatgctgtatttgcctactttaacccatttttcaacctgtttgttttttaaaaggcttcactaagggttgatatgtaccattgtatggggcaattttaagtcagctaaggcaataaccttatgcatgaacatttcccagactttcatgaagctgttgaggtcctaggcaattaatgcagcagttgcgataaataaaaacatctcacctaagtct

SEQ ID NO: 169929 - DNA, 2077 bp, Homo sapiens
  Payload ID: 13453
  Gene Symbol: PTGES3
  Gene Name: prostaglandin E synthase 3 (cytosolic)
  ENST ID: ENST00000614328
  CDS Start-End: 447-941
gctgggaggccccgccctttccgtagatatctctagaaagccgcgccggagcccaaaaacaaggactgcgcacgcgcggcggcaaggcccgggcattttgctgcgtcaccagccgccgcccggcctcaccacccctcgtttgcacgcacgcacgttcattctccgtcctcgcgccccttttcctacactttcctcttctccccgaccggaggagccgctctttccgcgcggtgcattctggggcccgaggtcgagcccgccgctgccgccgtcgcctgagggaagcgagaagaggccgcgaccggagagaaaaagcggagtcgccaccggagagaagtcgactccctagcagcagccgccgccagagaggcccgcccaccagttcgcccgtccccctgccccgttcacaatactccattcagaagagagaagaggggagtgactttatgtctttggaaaagcagcctgcttctgcaaagtggtacgatcgaagggactatgtcttcattgaattttgtgttgaagacagtaaggatgttaatgtaaattttgaaaaatccaaacttacattcagttgtctcggaggaagtgataattttaagcatttaaatgaaattgatctttttcactgtattgatccaaatgattccaagcataaaagaacggacagatcaattttatgttgtttacgaaaaggagaatctggccagtcatggccaaggttaacaaaagaaagggcaaagcttaattggcttagtgtcgacttcaataattggaaagactgggaagatgattcagatgaagacatgtctaattttgatcgtttctctgagatgatgaacaacatgggtggtgatgaggatgtagatttaccagaagtagatggagcagatgatgattcacaagacagtgatgatgaaaaaatgccagatctggagtaaggaatattgtcatcacctggattttgagaaagaaaaataacttctctgcaagatttcataattgagagaattcctgagttgatagctctaaaggcagatatgctgtatttgcctactttaacccatttttcaacctgtttgttttttaaaaggcttcactaagggttgatatgtaccattgtatggggcaattttaagtcagctaaggcaataaccttatgcatgaacatttcccagactttcatgaagctgttgaggtcctaggcaattaatgcagcagttgcgataaataaaaacatctcacctaagtctccttttcttcataacatagatactgacatgataggaagctctcagcttagggaaagagaataaattttagattatagaacatggattcaaaagtgactggaacaaattggctgacaccttactggtaacctgctattcttctggtgttatccttcaggattgttccactaaaatttatttttcaaaaaatttacttcacattattctatgtaagtgatgacttgtcagtgttccaggtgtatcttagctaaaactagagaatgccctaacttagatggtttttgaagcctatacaattggtattgtttgacccttaagcttttacatctcttagcatggaggacgaagaaagctgtacattgttgcttgagagtctgtacatttagtccagatttgtatttgcactgtcagtatggcaaatgagtgaaaaatgtttaatacactattggattttttatttcctttttttgattcagcttatacccgggctgaaaacctcaatttatgttcatgacagtggggatttttttaaatgtctacattctttctaataaactgttggaagacttcttggctgtccttttaagtgtctggcttactgtaatttttatgtatttaccatttactggaatggagtttatttgaggaagaatttgggattattcctctgtttgaaaaaagaggcttgctgtaatgtcacaggaaaccttttaaaagtggatctgtaatagcatattgtagatgcactttgcagcagttggaaaagaaagtgttgtgtgatttgattgaaataaaactaaatgtgttgtcctcctaaatctttg

SEQ ID NO: 169930 - DNA, 1781 bp, Homo sapiens
  Payload ID: 13454
  Gene Symbol: PTGES3L
  Gene Name: prostaglandin E synthase 3 (cytosolic)-like
  ENST ID: ENST00000409446
  CDS Start-End: 252-737
aggacaataatgttttattgagcgcctattgtgaatcagacactgagcagtaagcgtcggagaaacaggtgaatgataccggggaaaagtcattccctgtgtgtagcgtctagggcagcctttgccctggttccagcagatgggttgtctcttcatagtctatgcatttctgaagaccccacggtgaagggctgcaaggatgaagctgtcccagagtatctccagagtgcagatcccttggctgccaggtcatgttctctcttcctctcaactgctctcccgaccatataaggagaggcagctgctgggggcgtccccaggatctaaagatagcggcccctgcctggaactctaaatgccaccctggagcgggagccgcaatggcacgctgcaagaatgccgatggagtggagttgtacaatgagattgagttctatgccaaagtgaactccaaggactcccaggataagcgctcttcccgctctattacttgttttgtgagaaaatggaaggaaaaggtggcctggccgcggcttaccaaggaggatatcaagccagtgtggctgtctgtggactttgataactggagagactgggaaggggatgaagagatggagctggctcatgtggaacattatgcagagcttttgaagaaggtcagcaccaagagacctccacctgccatggatgatttggatgatgattctgacagtgctgatgatgcaacaagtaattaactttctgtgacgcaaagctgggaaggcagctgtggctattttccagttgttctagaaagctagcgcctaggcctttgtcagcgctttggctgtgcaccaagttcttctgagatctctgaactttcctagaagctctttattaagggtcgtccttcaagcttgtcttcctcctaggcacttgactatggctccacatcagatgcagggtcggggaggggtagactggtagggcttctgatttcttactgattggtttctaatctctgtgtttaggccacttgattatttgagtatgtgtgtgtatgtggcaaaacaaaagccaaagaagaatgcagattatagaaatctctactatgtgtgcatatggggcaaagcaaaaagccaaagaagaaacagattataataaatctctaggaactgttctctgtctgtttccttcttgtacttattcctcctggtggcaagcctcttctccctctagtaaccaagctggggtgcttcctcttgcccagatttgtgctctgatttcttacagctaattctgtcatctctagaaccagccacttcagcttcctgcacactctagaaatctctttatactttttttttttttttccgagatggagtcttgctctgtcgcccaggctggagtgcagtggtgcagtctctgttcactgcaacctccaccttctgggttcaagcaattctcctgcctcagcctcccaagtagatgggactacagatgtgcaccaccaggcccagctaatttttgtatttttagcagagatggggtttcaccatgttggccaggctggtctcgaactcctgacctcaagtaatccacccacctcagcctcccaaagtgctaggattacatgtatgagccaccacacccggccctctttatacttttaaaactgattgttactctagttaatgtctatgtttatttgtccaacagctattctatttgtccataaacttttttgagtgcctaatatgtacagttgactgtaacttaaacaaaataaatgcattgcctat

SEQ ID NO: 169931 - DNA, 1446 bp, Homo sapiens
  Payload ID: 13454
  Gene Symbol: PTGES3L
  Gene Name: prostaglandin E synthase 3 (cytosolic)-like
  ENST ID: ENST00000424284
  CDS Start-End: 1-386
ggcagcacgcccggaccttgtggtacgacaggcccagctgcaagaatgccgatggagtggagttgtacaatgagattgagttctatgccaaagtgaactccaaggactcccaggataagcgctcttcccgctctattacttgttttgtgagaaaatggaaggaaaaggtggcctggccgcggcttaccaaggaggatatcaagccagtgtggctgtctgtggactttgataactggagagactgggaaggggatgaagagatggagctggctcatgtggaacattatgcagagcttttgaagaaggtcagcaccaagagacctccacctgccatggatgatttggatgatgattctgacagtgctgatgatgcaacaagtaattaactttctgtgacgcaaagctgggaaggcagctgtggctattttccagttgttctagaaagctagcgcctaggcctttgtcagcgctttggctgtgcaccaagttcttctgagatctctgaactttcctagaagctctttattaagggtcgtccttcaagcttgtcttcctcctaggcacttgactatggctccacatcagatgcagggtcggggaggggtagactggtagggcttctgatttcttactgattggtttctaatctctgtgtttaggccacttgattatttgagtatgtgtgtgtatgtggcaaaacaaaagccaaagaagaatgcagattatagaaatctctactatgtgtgcatatggggcaaagcaaaaagccaaagaagaaacagattataataaatctctaggaactgttctctgtctgtttccttcttgtacttattcctcctggtggcaagcctcttctccctctagtaaccaagctggggtgcttcctcttgcccagatttgtgctctgatttcttacagctaattctgtcatctctagaaccagccacttcagcttcctgcacactctagaaatctctttatactttttttttttttttccgagatggagtcttgctctgtcgcccaggctggagtgcagtggtgcagtctctgttcactgcaacctccaccttctgggttcaagcaattctcctgcctcagcctcccaagtagatgggactacagatgtgcaccaccaggcccagctaatttttgtatttttagcagagatggggtttcaccatgttggccaggctggtctcgaactcctgacctcaagtaatccacccacctcagcctcccaaagtgctaggattacatgtatgagccaccacacccggccctctttatacttttaaaactgattgttactctagttaatgtctatgtttatttgtccaacagctattctatttgtccataaacttttttgagtgcctaatatgtacagttgactgtaacttaaacaaaataaatgcattgcctatagactttgctcttgaa

SEQ ID NO: 169932 - DNA, 557 bp, Homo sapiens
  Payload ID: 13454
  Gene Symbol: PTGES3L
  Gene Name: prostaglandin E synthase 3 (cytosolic)-like
  ENST ID: ENST00000451885
  CDS Start-End: 1-399
aaatgccaccctggagcgggagccgcaatggcacggcagcacgcccggaccttgtggtacgacaggcccaggtatgtgttcatggagttttgtgttgaggacagcaccgatgtccacgtgcttattgaggatcaccgcattgtgttcagctgcaagaatgccgatggagtggagttgtacaatgagattgagttctatgccaaagtgaactccaagccagtgtggctgtctgtggactttgataactggagagactgggaaggggatgaagagatggagctggctcatgtggaacattatgcagagcttttgaagaaggtcagcaccaagagacctccacctgccatggatgatttggatgatgattctgacagtgctgatgatgcaacaagtaattaactttctgtgacgcaaagctgggaaggcagctgtggctattttccagttgttctagaaagctagcgcctaggcctttgtcagcgctttggctgtgcaccaagttcttctgagatctctgaactttcctagaagctctttattaagggtcgtccttcaag

SEQ ID NO: 169933 - DNA, 855 bp, Homo sapiens
  Payload ID: 13454
  Gene Symbol: PTGES3L
  Gene Name: prostaglandin E synthase 3 (cytosolic)-like
  ENST ID: ENST00000591916
  CDS Start-End: 1-494
gccaccctggagcgggagccgcaatggcacggcagcacgcccggaccttgtggtacgacaggcccaggtatgtgttcatggagttttgtgttgaggacagcaccgatgtccacgtgcttattgaggatcaccgcattgtgttcagctgcaagaatgccgatggagtggagttgtacaatgagattgagttctatgccaaagtgaactccaaggactcccaggataagcgctcttcccgctctattacttgttttgtgagaaaatggaaggaaaaggtggcctggccgcggcttaccaaggaggatatcaagccagtgtggctgtctgtggactttgataactggagagactgggaaggggatgaagagatggagctggctcatgtggaacattatgcagagcttttgaagaaggtcagcaccaagagacctccacctgccatggatgatttggatgatgattctgacagtgctgatgatgcaacaagtaattaactttctgtgacgcaaagctgggaaggcagctgtggctattttccagttgttctagaaagctagcgcctaggcctttgtcagcgctttggctgtgcaccaagttcttctgagatctctgaactttcctagaagctctttattaagggtcgtccttcaagcttgtcttcctcctaggcacttgactatggctccacatcagatgcagggtcggggaggggtagactggtagggcttctgatttcttactgattggtttctaatctctgtgtttaggccacttgattatttgagtatgtgtgtgtatgtggcaaaacaaaagccaaagaagaatgcagattatagaaatctctactatgtgtgc

SEQ ID NO: 169934 - DNA, 4450 bp, Homo sapiens
  Payload ID: 13455
  Gene Symbol: PTGFR
  Gene Name: prostaglandin F receptor (FP)
  Uniprot ID: P43088
  ENST ID: ENST00000370756
  CDS Start-End: 238-1131
gtgcgcggaggggacgagcggctggaccacagccggcgcccgatcaggatctccgcgctgggatcggtggaacttgaggcagcggcggcgcggggcgccatggcacaccgagcggctccgtcttctgctcctcagagagcccggctggcggcctgggatgacaagatgtctggactgcaatcctgcacagttttgagagggagatgacttgagtggttggcttttatctccacaacaatgtccatgaacaattccaaacagctagtgtctcctgcagctgcgcttctttcaaacacaacctgccagacggaaaaccggctttccgtatttttttcagtaatcttcatgacagtgggaatcttgtcaaacagccttgccatcgccattctcatgaaggcatatcagagatttagacagaagtccaaggcatcgtttctgcttttggccagtggcctggtaatcactgatttctttggccatctcatcaatggagccatagcagtatttgtatatgcttctgataaagaatggatccgctttgaccaatcaaatgtcctttgcagtatttttggtatctgcatggtgttttctggtctgtgcccacttcttctaggcagtgtgatggccattgagcggtgtattggagtcacaaaaccaatatttcattctacgaaaattacatccaaacatgtgaaaatgatgttaagtggtgtgtgcttgtttgctgttttcatagctttgctgcccatccttggacatcgagactataaaattcaggcgtcgaggacctggtgtttctacaacacagaagacatcaaagactgggaagatagattttatcttctacttttttcttttctggggctcttagcccttggtgtttcattgttgtgcaatgcaatcacaggaattacacttttaagagttaaatttaaaagtcagcagcacagacaaggcagatctcatcatttggaaatggtaatccagctcctggcgataatgtgtgtctcctgtatttgttggagcccatttctgggatacagaataattttgaatgggaaagagaaatataaagtatatgaagagcaaagtgatttcttacataggttacaatggccaacattggaataaatggaaatcattctctggaaacctgtgaaacaacactttttgctctccgaatggcaacatggaatcaaatcttagatccttgggtatatattcttctacgaaaggctgtccttaagaatctctataagcttgccagtcaatgctgtggagtgcatgtcatcagcttacatatttgggagcttagttccattaaaaattccttaaaggttgctgctatttctgagtcaccagttgcagagaaatcagcaagcacctagcttaataggacagtaaatctgtgtggggctagaacaaaattaagacatgtttggcaatatttcagttagttaaatacctgtagcctaactggaaaattcaggcttcatcatgtagtttgaagatactattgtcagattcaggttttgaaatttgtcaaataaacaggataactgtacatttttcacttgtttttgccaatgggaggtagacacaataaaataatgccatgggagtcacactgaaagcaattttgagcttatctgtcttatttatgctttgagtgaatcatctgttgaggtctaatgcctttacttggcctatttgccagagaacatcttaatgcagcctgcatagtgaaatggttattttgagatcaccgctctgtagctaacccttataaactaggctcagtaaaataaagcactcttattttttgatctggcctattttgcccctcattgtgtagcctcaattaacacatgcatggtcatgacacccagaattcatgatggtttgttataacaacctctgcatattccaggtctggcagacaggttgcctgaccctgcaatcctatctagaatgggcccattcttgtcatatttgacaaataggactgcctacatttattattatgaaggtcgattgttgttggaagtgttttttcatgtcatagattagcaattttcaaataattattttttctctgaaaattttgtgtgtgattgcacaataaataatttttagagaaacaaaggctctttctcagcacattgatgggcaactagaattacagcagtttcaaaactctaccatggataatgcaaacaaaccgaagctacatgccaatgataggtgcaaagaatattggcaaaaggtgctttaccttgagccattatttgtgtcagagaacaaaagaaacagaatcaatatataaaattcaaagactatctgcagctagtgtgtttcttctttacacacatatacacacagacatcagaaaattctgttgagagcaggttcattaaatttgtaagatggcatattctaaagcctgtgctaccagtactaagaggggaagactggcaatttgccaagcacttggggattattataacaattaactaggagatcaagagataataatctctccccaaattttccaataataattgagactttttctttgcttgtttgtgtaattcaaccaaaagaatttcaatacccattcaaattgtcctaggtctatcagaaattagggaaggtagtcctgctttataataggaaaatgtatttctgtataagagttctttgctttcattaacttggattcatttaaaaattaatcttccctgttaggctgatttcagattctctaggaaatctgtgtaagtaaccagaagacctttcagatggtttatttgctttcagcagagaatttatttcatacagttacttaagagtgttgatgtcttgtgaacagagatataaggaaccattctccatccttccttatcatgctgggtacaatgcttctatgaatatttccatgtattttgactggggagaggcatggagaagaaactctcattcaggggctccaggatccttctccttgaggcttctaaataaatggcagaattcttgctgtattgccatgatgtcaccctggccatgtgtactgacttgaggagatcttgcaacatggccatgtgcaaggctttaaggagtgagagagatgtgtacatatcttaggagggttatctatgttatctgagtatatgtttgggtaaccaaattggtcttaaaaatgatgttaacccaagaagtagacatcaaaaattaaaaaaaaaaaaaggaatgtgttttcattgttttaagtttttcttctgagtaaaacaaaattatagaaaacaaatgcaacaatgtgcacatctgacttaagagtttcatttctgttattatatgtgttgcatgtagcttggcgatttactgtgtaatgaataatagactggaacatctaccaataactttcacataaatgttcaaaatagaagtgtattttttcaggtttctggaaataaatagtaaaataaatggcacaaatagtttcaataaatttaccaatttgagtgttttcagctctatttcaaaactcataactaatcttcagaattactgaatttccttttgaactgggtaaggcattatccaagcaacttcacatactatttaaacatgatttctcggtaattatatattctgggcaaataacataaacatgtcaggatttttacaggtgttagtgaatttttctaaaaagatgagacaaaagcaaaaatatcacacataggtttttatgactatgaatacaaagataatgctgattcacaattagctatgggtaagtccaaaacatcagaccttttactgatgggttaactaggtgaaagaaatgggcccttatttttttttttccctagaggcagaaagttacttctaatgatctatatagctaaaacgaaaaatacctgaaagttaatacatacatatgtagatatattttgttatgtgataaatgtttcttgtttgcacacttttggacttgagaaatctgcttttgttttgtgcctactctgagtttagaacccaaataagaggacttgttaaatatagagtgtactttttgttaaaactattgctagcttcacctgtataccatcattgttccaaattaaataactgttttgggtcagaatataaatgctgggaatatacattttattacttcttaatctgggtgtcaaagattttaccacctggtaaataatgttggacttcaacttgttactggcacattttaatagtagatgaaacatgtttttcttggttatgtgaataaatgtatgttgtgctcttcatacttgttggattgtatagagattaaatagtgatatgtatattttgttgtttgctttggtatgcaactcatgtaattttagtgctttgactagcttaaaacttcaaacaagtaattttataataaagttggactaatgtt

SEQ ID NO: 169935 - DNA, 4379 bp, Homo sapiens
  Payload ID: 13455
  Gene Symbol: PTGFR
  Gene Name: prostaglandin F receptor (FP)
  Uniprot ID: P43088
  ENST ID: ENST00000370757
  CDS Start-End: 238-1317
gtgcgcggaggggacgagcggctggaccacagccggcgcccgatcaggatctccgcgctgggatcggtggaacttgaggcagcggcggcgcggggcgccatggcacaccgagcggctccgtcttctgctcctcagagagcccggctggcggcctgggatgacaagatgtctggactgcaatcctgcacagttttgagagggagatgacttgagtggttggcttttatctccacaacaatgtccatgaacaattccaaacagctagtgtctcctgcagctgcgcttctttcaaacacaacctgccagacggaaaaccggctttccgtatttttttcagtaatcttcatgacagtgggaatcttgtcaaacagccttgccatcgccattctcatgaaggcatatcagagatttagacagaagtccaaggcatcgtttctgcttttggccagtggcctggtaatcactgatttctttggccatctcatcaatggagccatagcagtatttgtatatgcttctgataaagaatggatccgctttgaccaatcaaatgtcctttgcagtatttttggtatctgcatggtgttttctggtctgtgcccacttcttctaggcagtgtgatggccattgagcggtgtattggagtcacaaaaccaatatttcattctacgaaaattacatccaaacatgtgaaaatgatgttaagtggtgtgtgcttgtttgctgttttcatagctttgctgcccatccttggacatcgagactataaaattcaggcgtcgaggacctggtgtttctacaacacagaagacatcaaagactgggaagatagattttatcttctacttttttcttttctggggctcttagcccttggtgtttcattgttgtgcaatgcaatcacaggaattacacttttaagagttaaatttaaaagtcagcagcacagacaaggcagatctcatcatttggaaatggtaatccagctcctggcgataatgtgtgtctcctgtatttgttggagcccatttctggttacaatggccaacattggaataaatggaaatcattctctggaaacctgtgaaacaacactttttgctctccgaatggcaacatggaatcaaatcttagatccttgggtatatattcttctacgaaaggctgtccttaagaatctctataagcttgccagtcaatgctgtggagtgcatgtcatcagcttacatatttgggagcttagttccattaaaaattccttaaaggttgctgctatttctgagtcaccagttgcagagaaatcagcaagcacctagcttaataggacagtaaatctgtgtggggctagaacaaaattaagacatgtttggcaatatttcagttagttaaatacctgtagcctaactggaaaattcaggcttcatcatgtagtttgaagatactattgtcagattcaggttttgaaatttgtcaaataaacaggataactgtacatttttcacttgtttttgccaatgggaggtagacacaataaaataatgccatgggagtcacactgaaagcaattttgagcttatctgtcttatttatgctttgagtgaatcatctgttgaggtctaatgcctttacttggcctatttgccagagaacatcttaatgcagcctgcatagtgaaatggttattttgagatcaccgctctgtagctaacccttataaactaggctcagtaaaataaagcactcttattttttgatctggcctattttgcccctcattgtgtagcctcaattaacacatgcatggtcatgacacccagaattcatgatggtttgttataacaacctctgcatattccaggtctggcagacaggttgcctgaccctgcaatcctatctagaatgggcccattcttgtcatatttgacaaataggactgcctacatttattattatgaaggtcgattgttgttggaagtgttttttcatgtcatagattagcaattttcaaataattattttttctctgaaaattttgtgtgtgattgcacaataaataatttttagagaaacaaaggctctttctcagcacattgatgggcaactagaattacagcagtttcaaaactctaccatggataatgcaaacaaaccgaagctacatgccaatgataggtgcaaagaatattggcaaaaggtgctttaccttgagccattatttgtgtcagagaacaaaagaaacagaatcaatatataaaattcaaagactatctgcagctagtgtgtttcttctttacacacatatacacacagacatcagaaaattctgttgagagcaggttcattaaatttgtaagatggcatattctaaagcctgtgctaccagtactaagaggggaagactggcaatttgccaagcacttggggattattataacaattaactaggagatcaagagataataatctctccccaaattttccaataataattgagactttttctttgcttgtttgtgtaattcaaccaaaagaatttcaatacccattcaaattgtcctaggtctatcagaaattagggaaggtagtcctgctttataataggaaaatgtatttctgtataagagttctttgctttcattaacttggattcatttaaaaattaatcttccctgttaggctgatttcagattctctaggaaatctgtgtaagtaaccagaagacctttcagatggtttatttgctttcagcagagaatttatttcatacagttacttaagagtgttgatgtcttgtgaacagagatataaggaaccattctccatccttccttatcatgctgggtacaatgcttctatgaatatttccatgtattttgactggggagaggcatggagaagaaactctcattcaggggctccaggatccttctccttgaggcttctaaataaatggcagaattcttgctgtattgccatgatgtcaccctggccatgtgtactgacttgaggagatcttgcaacatggccatgtgcaaggctttaaggagtgagagagatgtgtacatatcttaggagggttatctatgttatctgagtatatgtttgggtaaccaaattggtcttaaaaatgatgttaacccaagaagtagacatcaaaaattaaaaaaaaaaaaaggaatgtgttttcattgttttaagtttttcttctgagtaaaacaaaattatagaaaacaaatgcaacaatgtgcacatctgacttaagagtttcatttctgttattatatgtgttgcatgtagcttggcgatttactgtgtaatgaataatagactggaacatctaccaataactttcacataaatgttcaaaatagaagtgtattttttcaggtttctggaaataaatagtaaaataaatggcacaaatagtttcaataaatttaccaatttgagtgttttcagctctatttcaaaactcataactaatcttcagaattactgaatttccttttgaactgggtaaggcattatccaagcaacttcacatactatttaaacatgatttctcggtaattatatattctgggcaaataacataaacatgtcaggatttttacaggtgttagtgaatttttctaaaaagatgagacaaaagcaaaaatatcacacataggtttttatgactatgaatacaaagataatgctgattcacaattagctatgggtaagtccaaaacatcagaccttttactgatgggttaactaggtgaaagaaatgggcccttatttttttttttccctagaggcagaaagttacttctaatgatctatatagctaaaacgaaaaatacctgaaagttaatacatacatatgtagatatattttgttatgtgataaatgtttcttgtttgcacacttttggacttgagaaatctgcttttgttttgtgcctactctgagtttagaacccaaataagaggacttgttaaatatagagtgtactttttgttaaaactattgctagcttcacctgtataccatcattgttccaaattaaataactgttttgggtcagaatataaatgctgggaatatacattttattacttcttaatctgggtgtcaaagattttaccacctggtaaataatgttggacttcaacttgttactggcacattttaatagtagatgaaacatgtttttcttggttatgtgaataaatgtatgttgtgctcttcatacttgttggattgtatagagattaaatagtgatatgtatattttgttgtttgctttggtatgcaactcatgtaattttagtgctttgactagcttaaaacttcaaacaagtaattttataataaagttggactaatgtt

SEQ ID NO: 169936 - DNA, 4337 bp, Homo sapiens
  Payload ID: 13455
  Gene Symbol: PTGFR
  Gene Name: prostaglandin F receptor (FP)
  Uniprot ID: P43088
  ENST ID: ENST00000370758
  CDS Start-End: 196-1275
catgaggaaatgtagctgtatgcctggagggatctacagccagaccagccaactcagcctggttaagaacacctgttgaagaactagtgcaggcgtttggaggacataggacactctggccatatgtctggactgcaatcctgcacagttttgagagggagatgacttgagtggttggcttttatctccacaacaatgtccatgaacaattccaaacagctagtgtctcctgcagctgcgcttctttcaaacacaacctgccagacggaaaaccggctttccgtatttttttcagtaatcttcatgacagtgggaatcttgtcaaacagccttgccatcgccattctcatgaaggcatatcagagatttagacagaagtccaaggcatcgtttctgcttttggccagtggcctggtaatcactgatttctttggccatctcatcaatggagccatagcagtatttgtatatgcttctgataaagaatggatccgctttgaccaatcaaatgtcctttgcagtatttttggtatctgcatggtgttttctggtctgtgcccacttcttctaggcagtgtgatggccattgagcggtgtattggagtcacaaaaccaatatttcattctacgaaaattacatccaaacatgtgaaaatgatgttaagtggtgtgtgcttgtttgctgttttcatagctttgctgcccatccttggacatcgagactataaaattcaggcgtcgaggacctggtgtttctacaacacagaagacatcaaagactgggaagatagattttatcttctacttttttcttttctggggctcttagcccttggtgtttcattgttgtgcaatgcaatcacaggaattacacttttaagagttaaatttaaaagtcagcagcacagacaaggcagatctcatcatttggaaatggtaatccagctcctggcgataatgtgtgtctcctgtatttgttggagcccatttctggttacaatggccaacattggaataaatggaaatcattctctggaaacctgtgaaacaacactttttgctctccgaatggcaacatggaatcaaatcttagatccttgggtatatattcttctacgaaaggctgtccttaagaatctctataagcttgccagtcaatgctgtggagtgcatgtcatcagcttacatatttgggagcttagttccattaaaaattccttaaaggttgctgctatttctgagtcaccagttgcagagaaatcagcaagcacctagcttaataggacagtaaatctgtgtggggctagaacaaaattaagacatgtttggcaatatttcagttagttaaatacctgtagcctaactggaaaattcaggcttcatcatgtagtttgaagatactattgtcagattcaggttttgaaatttgtcaaataaacaggataactgtacatttttcacttgtttttgccaatgggaggtagacacaataaaataatgccatgggagtcacactgaaagcaattttgagcttatctgtcttatttatgctttgagtgaatcatctgttgaggtctaatgcctttacttggcctatttgccagagaacatcttaatgcagcctgcatagtgaaatggttattttgagatcaccgctctgtagctaacccttataaactaggctcagtaaaataaagcactcttattttttgatctggcctattttgcccctcattgtgtagcctcaattaacacatgcatggtcatgacacccagaattcatgatggtttgttataacaacctctgcatattccaggtctggcagacaggttgcctgaccctgcaatcctatctagaatgggcccattcttgtcatatttgacaaataggactgcctacatttattattatgaaggtcgattgttgttggaagtgttttttcatgtcatagattagcaattttcaaataattattttttctctgaaaattttgtgtgtgattgcacaataaataatttttagagaaacaaaggctctttctcagcacattgatgggcaactagaattacagcagtttcaaaactctaccatggataatgcaaacaaaccgaagctacatgccaatgataggtgcaaagaatattggcaaaaggtgctttaccttgagccattatttgtgtcagagaacaaaagaaacagaatcaatatataaaattcaaagactatctgcagctagtgtgtttcttctttacacacatatacacacagacatcagaaaattctgttgagagcaggttcattaaatttgtaagatggcatattctaaagcctgtgctaccagtactaagaggggaagactggcaatttgccaagcacttggggattattataacaattaactaggagatcaagagataataatctctccccaaattttccaataataattgagactttttctttgcttgtttgtgtaattcaaccaaaagaatttcaatacccattcaaattgtcctaggtctatcagaaattagggaaggtagtcctgctttataataggaaaatgtatttctgtataagagttctttgctttcattaacttggattcatttaaaaattaatcttccctgttaggctgatttcagattctctaggaaatctgtgtaagtaaccagaagacctttcagatggtttatttgctttcagcagagaatttatttcatacagttacttaagagtgttgatgtcttgtgaacagagatataaggaaccattctccatccttccttatcatgctgggtacaatgcttctatgaatatttccatgtattttgactggggagaggcatggagaagaaactctcattcaggggctccaggatccttctccttgaggcttctaaataaatggcagaattcttgctgtattgccatgatgtcaccctggccatgtgtactgacttgaggagatcttgcaacatggccatgtgcaaggctttaaggagtgagagagatgtgtacatatcttaggagggttatctatgttatctgagtatatgtttgggtaaccaaattggtcttaaaaatgatgttaacccaagaagtagacatcaaaaattaaaaaaaaaaaaaggaatgtgttttcattgttttaagtttttcttctgagtaaaacaaaattatagaaaacaaatgcaacaatgtgcacatctgacttaagagtttcatttctgttattatatgtgttgcatgtagcttggcgatttactgtgtaatgaataatagactggaacatctaccaataactttcacataaatgttcaaaatagaagtgtattttttcaggtttctggaaataaatagtaaaataaatggcacaaatagtttcaataaatttaccaatttgagtgttttcagctctatttcaaaactcataactaatcttcagaattactgaatttccttttgaactgggtaaggcattatccaagcaacttcacatactatttaaacatgatttctcggtaattatatattctgggcaaataacataaacatgtcaggatttttacaggtgttagtgaatttttctaaaaagatgagacaaaagcaaaaatatcacacataggtttttatgactatgaatacaaagataatgctgattcacaattagctatgggtaagtccaaaacatcagaccttttactgatgggttaactaggtgaaagaaatgggcccttatttttttttttccctagaggcagaaagttacttctaatgatctatatagctaaaacgaaaaatacctgaaagttaatacatacatatgtagatatattttgttatgtgataaatgtttcttgtttgcacacttttggacttgagaaatctgcttttgttttgtgcctactctgagtttagaacccaaataagaggacttgttaaatatagagtgtactttttgttaaaactattgctagcttcacctgtataccatcattgttccaaattaaataactgttttgggtcagaatataaatgctgggaatatacattttattacttcttaatctgggtgtcaaagattttaccacctggtaaataatgttggacttcaacttgttactggcacattttaatagtagatgaaacatgtttttcttggttatgtgaataaatgtatgttgtgctcttcatacttgttggattgtatagagattaaatagtgatatgtatattttgttgtttgctttggtatgcaactcatgtaattttagtgctttgactagcttaaaacttcaaacaagtaattttataataaagttggactaatgtt

SEQ ID NO: 169937 - DNA, 1852 bp, Homo sapiens
  Payload ID: 13455
  Gene Symbol: PTGFR
  Gene Name: prostaglandin F receptor (FP)
  ENST ID: ENST00000497923
  CDS Start-End: 238-1131
gtgcgcggaggggacgagcggctggaccacagccggcgcccgatcaggatctccgcgctgggatcggtggaacttgaggcagcggcggcgcggggcgccatggcacaccgagcggctccgtcttctgctcctcagagagcccggctggcggcctgggatgacaagatgtctggactgcaatcctgcacagttttgagagggagatgacttgagtggttggcttttatctccacaacaatgtccatgaacaattccaaacagctagtgtctcctgcagctgcgcttctttcaaacacaacctgccagacggaaaaccggctttccgtatttttttcagtaatcttcatgacagtgggaatcttgtcaaacagccttgccatcgccattctcatgaaggcatatcagagatttagacagaagtccaaggcatcgtttctgcttttggccagtggcctggtaatcactgatttctttggccatctcatcaatggagccatagcagtatttgtatatgcttctgataaagaatggatccgctttgaccaatcaaatgtcctttgcagtatttttggtatctgcatggtgttttctggtctgtgcccacttcttctaggcagtgtgatggccattgagcggtgtattggagtcacaaaaccaatatttcattctacgaaaattacatccaaacatgtgaaaatgatgttaagtggtgtgtgcttgtttgctgttttcatagctttgctgcccatccttggacatcgagactataaaattcaggcgtcgaggacctggtgtttctacaacacagaagacatcaaagactgggaagatagattttatcttctacttttttcttttctggggctcttagcccttggtgtttcattgttgtgcaatgcaatcacaggaattacacttttaagagttaaatttaaaagtcagcagcacagacaaggcagatctcatcatttggaaatggtaatccagctcctggcgataatgtgtgtctcctgtatttgttggagcccatttctgggatacagaataattttgaatgggaaagagaaatataaagtatatgaagagcaaagtgatttcttacatagcgataagacactcaacgagaaatgacagaaaaacaaggtgtggatggagaggcaacatgaaagtggatcaaacaacttatacatgggtgctggctcagacgtgacacctgaggctccagaactggaagtttatgccgtcaagttacaatggccaacattggaataaatggaaatcattctctggaaacctgtgaaacaacactttttgctctccgaatggcaacatggaatcaaatcttagatccttgggtatatattcttctacgaaaggctgtccttaagaatctctataagcttgccagtcaatgctgtggagtgcatgtcatcagcttacatatttgggagcttagttccattaaaaattccttaaaggttgctgctatttctgagtcaccagttgcagagaaatcagcaagcacctagcttaataggacagtaaatctgtgtggggctagaacaaaattaagacatgtttggcaatatttcagttagttaaatacctgtagcctaactggaaaattcaggcttcatcatgtagtttgaagatactattgtcagattcaggttttgaaatttgtcaaataaacaggataactgtacatttttcacttgtttttgccaatgggaggtagacacaataaaataatgccatgggagtcacactgaaagcaattttgagcttatctgtcttatttatgctttgagtgaatcatctgttgaggtctaatgcctttacttggcctatt

SEQ ID NO: 169938 - DNA, 6178 bp, Homo sapiens
  Payload ID: 13456
  Gene Symbol: PTGFRN
  Gene Name: prostaglandin F2 receptor inhibitor
  Uniprot ID: Q9P2B2
  ENST ID: ENST00000393203
  CDS Start-End: 148-2787
gatttatcggctcgcgaggagagcggagcaggcgcgcggcccaggcggaggagcgccgactctggagcagccggagctggaagaggaggaggaggagaggcggcggggaaggaggaggagggggagagtcgctcccgccgggcgagcatggggcgcctggcctcgaggccgctgctgctggcgctcctgtcgttggctctttgccgagggcgtgtggtgagagtccccacagcgaccctggttcgagtggtgggcactgagctggtcatcccctgcaacgtcagtgactatgatggccccagcgagcaaaactttgactggagcttctcatctttggggagcagctttgtggagcttgcaagcacctgggaggtggggttcccagcccagctgtaccaggagcggctgcagaggggcgagatcctgttaaggcggactgccaacgacgccgtggagctccacataaagaacgtccagccttcagaccaaggccactacaaatgttcaacccccagcacagatgccactgtccagggaaactatgaggacacagtgcaggttaaagtgctggccgactccctgcacgtgggccccagcgcgcggcccccgccgagcctgagcctgcgggagggggagcccttcgagctgcgctgcaccgccgcctccgcctcgccgctgcacacgcacctggcgctgctgtgggaggtgcaccgcggcccggccaggcggagcgtcctcgccctgacccacgagggcaggttccacccgggcctggggtacgagcagcgctaccacagtggggacgtgcgcctcgacaccgtgggcagcgacgcctaccgcctctcagtgtcccgggctctgtctgccgaccagggctcctacaggtgtatcgtcagcgagtggatcgccgagcagggcaactggcaggaaatccaagaaaaggccgtggaagttgccaccgtggtgatccagccatcagttctgcgagcagctgtgcccaagaatgtgtctgtggctgaaggaaaggaactggacctgacctgtaacatcacaacagaccgagccgatgacgtccggcccgaggtgacgtggtccttcagcaggatgcctgacagcaccctacctggctcccgcgtgttggcgcggcttgaccgtgattccctggtgcacagctcgcctcatgttgctttgagtcatgtggatgcacgctcctaccatttactggttcgggatgttagcaaagaaaactctggctactattactgccacgtgtccctgtgggcacccggacacaacaggagctggcacaaagtggcagaggccgtgtcttccccagctggtgtgggtgtgacctggctagaaccagactaccaggtgtacctgaatgcttccaaggtccccgggtttgcggatgaccccacagagctggcatgccgggtggtggacacgaagagtggggaggcgaatgtccgattcacggtttcgtggtactacaggatgaaccggcgcagcgacaatgtggtgaccagcgagctgcttgcagtcatggacggggactggacgctaaaatatggagagaggagcaagcagcgggcccaggatggagactttattttttctaaggaacatacagacacgttcaatttccggatccaaaggactacagaggaagacagaggcaattattactgtgttgtgtctgcctggaccaaacagcggaacaacagctgggtgaaaagcaaggatgtcttctccaagcctgttaacatattttgggcattagaagattccgtgcttgtggtgaaggcgaggcagccaaagcctttctttgctgccggaaatacatttgagatgacttgcaaagtatcttccaagaatattaagtcgccacgctactctgttctcatcatggctgagaagcctgtcggcgacctctccagtcccaatgaaacgaagtacatcatctctctggaccaggattctgtggtgaagctggagaattggacagatgcatcacgggtggatggcgttgttttagaaaaagtgcaggaggatgagttccgctatcgaatgtaccagactcaggtctcagacgcagggctgtaccgctgcatggtgacagcctggtctcctgtcaggggcagcctttggcgagaagcagcaaccagtctctccaatcctattgagatagacttccaaacctcaggtcctatatttaatgcttctgtgcattcagacacaccatcagtaattcggggagatctgatcaaattgttctgtatcatcactgtcgagggagcagcactggatccagatgacatggcctttgatgtgtcctggtttgcggtgcactcttttggcctggacaaggctcctgtgctcctgtcttccctggatcggaagggcatcgtgaccacctcccggagggactggaagagcgacctcagcctggagcgcgtgagtgtgctggaattcttgctgcaagtgcatggctccgaggaccaggactttggcaactactactgttccgtgactccatgggtgaagtcaccaacaggttcctggcagaaggaggcagagatccactccaagcccgtttttataactgtgaagatggatgtgctgaacgccttcaagtatcccttgctgatcggcgtcggtctgtccacggtcatcgggctcctgtcctgtctcatcgggtactgcagctcccactggtgttgtaagaaggaggttcaggagacacggcgcgagcgccgcaggctcatgtcgatggagatggactaggctggcccgggaggggagtgacagagggacgttctaggagcaattggggcaagaagaggacagtgatattttaaaacaaagtgtgttacactaaaaaccagtcctctctaatctcaggtgggacttggcgctctctcttttctgcatgtcaagttctgagcgcggacatgtttaccagcacacggctcttcttcccacggcactttctgatgtaacaatcgagtgtgtgttttcccaactgcagctttttaatggttaaccttcatctaattttttttctcccactggtttatagatcctctgacttgtgtgtgtttatagcttttgtttcgcggggttgtggtgaggaaggggtgatggcatgcggagttctttatcttcagtgagaatgtgcctgcccgcctgagagccagcttccgcgttggaggcacgtgttcagagagctgctgagcgccaccctctacccggctgacagacaacacagacctgtgccgaaggctaatttgtggcttttacgaccctaccccaccccctgttttcaggggtttagactacatttgaaatccaaacttggagtatataacttcttattgagcccaactgctttttttttttttttttttgcttctctgccccttttccatttcttttgtatttgttttctgtgagagcactgaaatggcagccctggaatctacaatttggctctccactgagcaccttatcttgccaccttagccttaagaatgaatatgaagaaaaatacacagccacctctgtccagggcagtaagaagggctgcaaggaaggggaggatggggacaaggaaaggatcagatacctgctccagtagttgtgaggccactgtgtctcaggggactccaggaggagcagaagagggatcccacgaagttattcttacgcagctggggccaggagggtcagagtggtgccaggtgcaagttaggctaaagaagccaccactattcctctctcttgcccattgtggggggcaaaggcattggtcaccaagagtcttgcagggggacccacagatatgccatgtccttcacacgtgcttgggctccttaacctgaaggcaaattgctacttgcaagactgactgacttcaaggaatcagaaattacctagaagcaccatgttttttctatgaccttttcagtccttcaggtcattttaaggtccactgcagggggttagtgagaaagggtatactttgtggtatgttttgctttcctaatagggacatgaaggaaacccagcaatttgctgttatgtgaatggcctgtagagcagagtcaagagcggtgtgctttgcccgactgctcccatcaggaataggagagtagacagagatcttccacatcccaggcttctgctgctgctttaaaagctctgtccttggagcctcccgctccctgaagtgtctcgccccctgcacagcactggcctttcggaagcatcccagtagggttttctgaggctcgctggtgactcatgccctaattgcaatcctctgcttttatcttgactttgaaggatctaacactgctctctcttccaaaggggaaaaaaagattcatttgttttgagcaataaactaatacaaaatgatggccattcatgtgcagctctttgtcaccatgggccggatgagttgtgctcctcctggctcaccatttccccctgctcccccacagccggttctgcacttatcaccgagtcgcccctggaagcagattcccattgagttttccccaccaaggggaccatgcacatggtagaaacattagattctgcattgacagtagcctttccttggcccgggcctgtggtgggaagacgggcaacaagtataccccaccagggcctgagtgactagaggaagaggacgaggccttgttggcactagatttgggtattttctgcatgtcataacatatcctaactgctatttcagaagaggcagcttgtaggtgattgtacaagtgagaattaaagagagaacagatatttaaacaggtgctgtattagtaacagccagtgccctttcagcccttgcatctattaaaaggagattcaggattttattggcacaggcccttcttagtaggaagaaagggtgcttagctttggacctgaccgggtgtgtgtaaaaccatggactgagtcacagcagacactcgatggtggtaaatgtgatgggtgcttacacactgtaccttttcctttcatactgatgctgcagttcagggctggagttgttaaggcattgacctccacccacctgccccatgtccactgggctgcccaagctgcatgtcacctgagggctggcaggaaggggcgagaaatcccagggcattgtaccaaggacctagttccttctagggatataaatttccaggaatgtgtatttttaatgtggtgagatgcactcttttgttgtaccaaatagggctccccaccccacccctgcgacaagtgctcttctagaacaggttcctaccagcagcactggtgtgaatgaaagagagacccagccgcgtctcacacaggtggaattgcacttcttaacaaaaaggaactttataaaagtttgggattttttttcctaatcataaaaatagccccagaaagagcctaagctatgttcagatagaagcctcgaaattcctgtaaattgtttactttatgatgtttacatacacgtttcactttgaaaaaaaatgcaaatcgactttttaacaactgttgagatgtttcatgggacagtagaactctgactcaccaactgggctaaattttaatttaaaaatgtatttatttgagtgtctttccccccctcaccctcaccatctgaggggctccctgagatcttggtagaggaggcccctcctgcccagaccttcgtttgtttccccggtggcccttgcttcttgctttgcagactgcctgcagccatgattttgtcactgacatctgtgagccaaagactgagcctttttggcaggaataataagcaatactacacaacttgctactttcagaaaacttttttttagcttcaccgatgacaacagaggaagaagggaactgggatttgggtaagttctcctccactgtttgaccaaattctcagtgataaatatgtgtgcagatccctagaagagaaaacgctgactttctttttaagtgtggcacataaggatctgcagaattttccgtagacaaagaaaggatcttgtgtatttttgtccatatccaatgttatatgaactaattgtattgttttatactgtgaccacaaatattatgcaatgcaccatttgttttttatttcattaaaggaagtttaatttaaattgaa

SEQ ID NO: 169939 - DNA, 2107 bp, Homo sapiens
  Payload ID: 13457
  Gene Symbol: PTGIR
  Gene Name: prostaglandin I2 (prostacyclin) receptor (IP)
  Uniprot ID: P43119
  ENST ID: ENST00000291294
  CDS Start-End: 135-1295
acggagggaggagggaaggagaagctgacacacagaccgacacaggcagcgagagacacgaggagcaaagcaagtgaaggcacagacgcacgggacaggagagcctgggcaagactggagagcccagacctgggatggcggattcgtgcaggaacctcacctacgtgcggggctcggtggggccggccaccagcaccctgatgttcgtggccggtgtggtgggcaacgggctggccctgggcatcctgagcgcacggcgaccggcgcgcccctcggccttcgcggtgctggtgaccggactggcggccaccgacctgctgggcaccagcttcctgagcccggccgtgttcgtggcctatgcgcgcaacagctccctgctgggcctggcccgaggcggccccgccctgtgcgatgccttcgccttcgccatgaccttcttcggcctggcgtccatgctcatcctctttgccatggccgtggagcgctgcctggcgctgagccacccctacctctacgcgcagctggacgggccccgctgcgcccgcctggcgctgccagccatctacgccttctgcgtcctcttctgcgcgctgcccctgctgggcctgggccaacaccagcagtactgccccggcagctggtgcttcctccgcatgcgctgggcccagccgggcggcgccgccttctcgctggcctacgccggcctggtggccctgctggtggctgccatcttcctctgcaacggctcggtcaccctcagcctctgccgcatgtaccgccagcagaagcgccaccagggctctctgggtccacggccgcgcaccggagaggacgaggtggaccacctgatcctgctggccctcatgacagtggtcatggccgtgtgctccctgcctctcacgatccgctgcttcacccaggctgtcgcccctgacagcagcagtgagatgggggacctccttgccttccgcttctacgccttcaaccccatcctggacccctgggtcttcatccttttccgcaaggctgtcttccagcgactcaagctctgggtctgctgcctgtgcctcgggcctgcccacggagactcgcagacacccctttcccagctcgcctcagggaggagggacccaagggccccctctgctcctgtgggaaaggaggggagctgcgtgcctttgtcggcttggggcgaggggcaggtggagcccttgcctcccacacagcagtccagcggcagcgccgtgggaacgtcgtccaaagcagaagccagcgtcgcctgctccctctgctgacatttcaagctgaccctgtgatctctgccctgtcttcgggcgacaggagccagaaaatcagggacatggctgatggctgcggatgctggaaccttggcccccaaactctggggccgatcagctgctgtttctcctgcggcagggcagtcgctgctggctctgggaagagagtgagggacagaggaaacgtttatcctggagtgcagaaagaatggttctctcaaaataaccagtggcctggccgacctgctctggccctggattccccatccatctcattgtctaaatatttagaaggcggagaagttcccagaggcttctgtacagtcaggtctgctctggtctgggtgctggctccaatctgcgtccacttaggaggcccaactgcccaccccaagtccccaggggatggccctccccctctaccaagccactccaagagccagcccctttctgctccacaaaaaccacagttattggaaaagctccctgccttcccttgccgctggtcccccaccaggcttgggagccctggcatcccaaaggggcaacgggaggaaggggaggctgctgcattgtgggtgatgacgtaggacatgtgcttggtacaaaaagggcctgagacattccacctagcttgactggctgcaagatgagaactgggggggtgcaggtggtggggagacagatggagaagctggcagatgaagggtgggggctgcggatcccagggactgccccagaacacaaacctaagtcctgtgcctgtccccagggtcctgaataaataaaagcctccttgcagagcctga

SEQ ID NO: 169940 - DNA, 1009 bp, Homo sapiens
  Payload ID: 13457
  Gene Symbol: PTGIR
  Gene Name: prostaglandin I2 (prostacyclin) receptor (IP)
  ENST ID: ENST00000596260
  CDS Start-End: 54-944
acagacgcacgggacaggagagcctgggcaagactggagagcccagacctgggatggcggattcgtgcaggaacctcacctacgtgcggggctcggtggggccggccaccagcaccctgatgttcgtggccggtgtggtgggcaacgggctggccctgggcatcctgagcgcacggcgaccggcgcgcccctcggccttcgcggtgctggtgaccggactggcggccaccgacctgctgggcaccagcttcctgagcccggccgtgttcgtggcctatgcgcgcaacagctccctgctgggcctggcccgaggcggccccgccctgtgcgatgccttcgccttcgccatgaccttcttcggcctggcgtccatgctcatcctctttgccatggccgtggagcgctgcctggcgctgagccacccctacctctacgcgcagctggacgggccccgctgcgcccgcctggcgctgccagccatctacgccttctgcgtcctcttctgcgcgctgcccctgctgggcctgggccaacaccagcagtactgccccggcagctggtgcttcctccgcatgcgctgggcccagccgggcggcgccgccttctcgctggcctacgccggcctggtggccctgctggtggctgccatcttcctctgcaacggctcggtcaccctcagcctctgccgcatgtaccgccagcagaagcgccaccagggctctctgggtccacggccgcgcaccggagaggacgaggtggaccacctgatcctgctggccctcatgacagtggtcatggccgtgtgctccctgcctctcacgcatgtagaaaggccgaggcaggaccggatgcggtggctcacacctgtaatcccagcactttgggaggccgaggccggcggatcatttgaggtcaggagttcgagaccagtctggccaacatgatgaaaccctgtctctactaaaaatacaacaaataaataaataaaaagtagccggacgtagtggca

SEQ ID NO: 169941 - DNA, 699 bp, Homo sapiens
  Payload ID: 13457
  Gene Symbol: PTGIR
  Gene Name: prostaglandin I2 (prostacyclin) receptor (IP)
  ENST ID: ENST00000594275
  CDS Start-End: 155-586
cagcgagagacacgaggagcaaagcaagtgaaggcacagacgcacgggacaggagagcctgggcaagactggagagaagcgccaccagggctctctgggtccacggccgcgcaccggagaggacgaggtggaccacctgatcctgctggccctcatgacagtggtcatggccgtgtgctccctgcctctcacgatccgctgcttcacccaggctgtcgcccctgacagcagcagtgagatgggggacctccttgccttccgcttctacgccttcaaccccatcctggacccctgggtcttcatccttttccgcaaggctgtcttccagcgactcaagctctgggtctgctgcctgtgcctcgggcctgcccacggagactcgcagacacccctttcccagctcgcctcagggaggagggacccaagggccccctctgctcctgtgggaaaggaggggagctgcgtgcctttgtcggcttggggcgaggggcaggtggagcccttgcctcccacacagcagtccagcggcagcgccgtgggaacgtcgtccaaagcagaagccagcgtcgcctgctccctctgctgacatttcaagctgaccctgtgatctctgccctgtcttcgggcgacaggagccagaaaatcagggacatggctgatggctgcggatgctggaaccttggcccccaaactctgggg

SEQ ID NO: 169942 - DNA, 775 bp, Homo sapiens
  Payload ID: 13457
  Gene Symbol: PTGIR
  Gene Name: prostaglandin I2 (prostacyclin) receptor (IP)
  ENST ID: ENST00000597185
  CDS Start-End: 315-662
cagcgagagacacgaggagcaaagcaagtgaaggcacagacgcacgggacaggagagcctgggcaagactggagaggtgcggtgaggggctggggatgcagcaacacagagcaggagcagatacatttgttacttagtctttatcttatctccttcccctctgacatgtcacccctacctcatccctggtaagcaagtgggaggagggagccagggtggggaggctgaggactcctgggtgctccttgacgccctcaccctgccctcagatccgctgcttcacccaggctgtcgcccctgacagcagcagtgagatgggggacctccttgccttccgcttctacgccttcaaccccatcctggacccctgggtcttcatccttttccgcaaggctgtcttccagcgactcaagctctgggtctgctgcctgtgcctcgggcctgcccacggagactcgcagacacccctttcccagctcgcctcagggaggagggacccaagggccccctctgctcctgtgggaaaggaggggagctgcgtgcctttgtcggcttggggcgaggggcaggtggagcccttgcctcccacacagcagtccagcggcagcgccgtgggaacgtcgtccaaagcagaagccagcgtcgcctgctccctctgctgacatttcaagctgaccctgtgatctctgccctgtcttcgggcgacaggagccagaaaatcagggacatggctgatggctgcggatgctggaaccttggcccccaaactctgggg

SEQ ID NO: 169943 - DNA, 724 bp, Homo sapiens
  Payload ID: 13457
  Gene Symbol: PTGIR
  Gene Name: prostaglandin I2 (prostacyclin) receptor (IP)
  ENST ID: ENST00000598865
  CDS Start-End: 87-611
cagcgagagacacgaggagcaaagcaagtgaaggcacagacgcacgggacaggagagcctgggcaagactggagagcctctgccgcatgtaccgccagcagaagcgccaccagggctctctgggtccacggccgcgcaccggagaggacgaggtggaccacctgatcctgctggccctcatgacagtggtcatggccgtgtgctccctgcctctcacgatccgctgcttcacccaggctgtcgcccctgacagcagcagtgagatgggggacctccttgccttccgcttctacgccttcaaccccatcctggacccctgggtcttcatccttttccgcaaggctgtcttccagcgactcaagctctgggtctgctgcctgtgcctcgggcctgcccacggagactcgcagacacccctttcccagctcgcctcagggaggagggacccaagggccccctctgctcctgtgggaaaggaggggagctgcgtgcctttgtcggcttggggcgaggggcaggtggagcccttgcctcccacacagcagtccagcggcagcgccgtgggaacgtcgtccaaagcagaagccagcgtcgcctgctccctctgctgacatttcaagctgaccctgtgatctctgccctgtcttcgggcgacaggagccagaaaatcagggacatggctgatggctgcggatgctggaaccttggcccccaaactctgggg

SEQ ID NO: 169944 - DNA, 5579 bp, Homo sapiens
  Payload ID: 13458
  Gene Symbol: PTGIS
  Gene Name: prostaglandin I2 (prostacyclin) synthase
  Uniprot ID: Q16647
  ENST ID: ENST00000244043
  CDS Start-End: 31-1533
gccagccccgccagccccgccagccccgcgatggcttgggccgcgctcctcggcctcctggccgcactgttgctgctgctgctactgagccgccgccgcacgcggcgacctggtgagcctcccctggacctgggcagcatcccctggttggggtatgccttggactttggaaaagatgctgccagcttcctcacgaggatgaaggagaagcacggtgacatctttactatactggttgggggcaggtatgtcaccgttctcctggacccacactcctacgacgcggtggtgtgggagcctcgcaccaggctcgacttccatgcctatgccatcttcctcatggagaggatttttgatgtgcagcttccacattacagccccagtgatgaaaaggccaggatgaaactgactcttctccacagagagctccaggcactcacagaagccatgtataccaacctccatgcagtgctgttgggcgatgctacagaagcaggcagtggctggcacgagatgggtctcctcgacttctcctacagcttcctgctcagagccggctacctgactctttacggaattgaggcgctgccacgcacccatgaaagccaggcccaggaccgcgtccactcagctgatgtcttccacacctttcgccagctcgaccggctgctccccaaactggcccgtggctccctgtcagtgggggacaaggaccacatgtgcagtgtcaaaagtcgcctgtggaagctgctatccccagccaggctggccaggcgggcccaccggagcaaatggctggagagttacctgctgcacctggaggagatgggtgtgtcagaggagatgcaggcacgggccctggtgctgcagctgtgggccacacaggggaatatgggtcccgctgccttctggctcctgctcttccttctcaagaatcctgaagccctggctgctgtccgcggagagctcgagagtatcctttggcaagcggagcagcctgtctcgcagacgaccactctcccacagaaggttctagacagcacacctgtgcttgatagcgtgctgagtgagagcctcaggcttacagctgcccccttcatcacccgcgaggttgtggtggacctggccatgcccatggcagacgggcgagaattcaacctgcgacgtggtgaccgcctcctcctcttccccttcctgagcccccagagagacccagaaatctacacagacccagaggtatttaaatacaaccgattcctgaaccctgacggatcagagaagaaagacttttacaaggatgggaaacggctgaagaattacaacatgccctggggggcggggcacaatcactgcctggggaggagttatgcggtcaacagcatcaaacaatttgtgttccttgtgctggtgcacttggacttggagctgatcaacgcagatgtggagatccctgagtttgacctcagcaggtacggcttcggtctgatgcagccggaacacgacgtgcccgtccgctaccgcatccgcccatgacacagggagcagatggatccacgtgctcgcctctgcccagcctgccccagcctgccccagcctcccagctttctgtgtgcacagttggcccgggtgcaggtgctagcattaccacttccctgcttttctcccagaaggctgggtccaggggagggaaaagctaagagggtgaacaaagaaaagacattgaaagctctatggattatccactgcaaagttttctttccaaaatcaggctttgtctgctcccaattcacctcgttactctcacctcgtgatatccacaaatgctattcagataaggcagaactaggagtcttcactgctctgcccccaactcccggaggtgtcaccttcctagttcttatgagctagcatggcccgggccttatccagtcaaagcggatgctggccacagaaaggccactcaggatgtcctttgtgtccattgatgtcattcagcagtcagtcccccaataatccttaaactagctaaaaccaaaggagtcccttagaagatctgcttccctggggccccatttgccagattgccccattgctcacactacttgagaaaatgcaggagagcttcccccaaggctgatgcattcccggtgcagaacaggggcaccctccaaacactgggctctgaggagtggagttctctgttctagagtgacaggcaccagatgggatgggctttctcagtgtcagcactcaggtagggagctaaggaagacacagcccagacaagatggctggaaggagccagccaggactccttagactgatcaagccaaaaaagaaggtgccgatttcatgcattctagtgcagaagccccaactgtgatcacgatccagtctgcagacgtgttttgtttggacttcacttaaaaaaatgccttagttgttatcatctttgggagagttcattcaaaatgtccagcttctcttgaaaacttggtatatctggccacactgggctcacattcccaagggtaactcttggccagagctgagtggcagccgcctcccttatgcaggacatgtgctctcggcttcaccagggttctgaccgggtctgcttctgcattcacagcgcctcctggacctgaaggcatctgagtgtgagaccctgttctaactcttagaagtgacattgtaagaggtggtggggaccagctaattggtccaacccagcctgagtgcaccaccctttgaacaaatgtatcagtgatgaaaatttgcctttgccccggcttgcctgtaatcccagcactttgggaggccgaggtgggcggatcacttgaggtcgggagttcaagaccagcctggccaacatggcgaaaccccgtctctactaaacataaaaaaattagtcaggtgtggcggtgcgtgcctgtaatcccagctattcaggaggctgaggcaccagaattgcttgaacccaggaggtggaggttgcagtgaactgagactgcgccacggcactccagcctgggcgacagagcaagactctgtctcaataaataaataattaattaaaataaaaaacagcttaaagagaaaaatggcctgcaaaccttttttatgatgctatttttattaatataaagtcctgtttattgagaccctttaaatgcctgcgagagaccctacagacagtatgtctactcctcacagcatctctatgaagagaaggagggttgtgcccacttcatagatgagaaaactgagaggtgaggtgacttgcctggggccacatagctcataagctgtagaactctgcaggcagatttactgtcccaggagcaaatgctggatgagcaactcctgttctttgggctcaaggggactggtgatgggacaattcttctcgacttcaggagctgacagagccagaggcacctaaacttgggtacatcttgtaagacacataatgaggtccctctagctttagctggagggagataaaagaaccccagacctctgaatgtcccagaggctagtctcttctcagagcagcactggggtttgggggcttccctgggcctcagcctccaggcacccccaggattcccagagagacgctgtgattggcaggaggcaggatatccccagggaaacccatcttcacgcctgggtgacccccactgccgcctccttcttaactctgcaggaaatcagagctggcagcctccagtgggaggacagagccggtttccgtggcaaccctcagctgcctcatcgtggctgggaagggaaggaagcaagccggcagaaatagctatggaaggtcttgcgcaggctgcaaccctggtgtgctgggcgaaaacccttatgactccccccttccaaatcaggctgggttgtcactgagactagattctcacctgccttcaaagaagggccaattccctttaaaggtcgcacctccttggaaccacagtcattagtgaattacactcaaggaaaagatgtgctcccaccaggcagctccagctgttacctgagatactgaagtgcagctcaggagacgattatttaaacctgcccttgttttaatcgttatttttctctttaaaaaaaatagaagctataaagaaaagagggagagatgagtgggttagctacctgctatgcgctagttaggaagttacctggatgccattgtatttcttcatcccttgcttaagaatcaaaattactggacatatgttaggaatactctttctttctttctttctttttaagctcagtggcaagaatgaaatactctttttttttttttttttttgagatggagtctcgctctgctgcccaggctagagtgcagtggcgtgatctcggctcactgcaagctctgcctcccgtgttcacaccattctcctgcctcagcctcctgagtagctgggactacaggcacccgccaccacacccggctaatttttggatttttagtagagatgggatttcaccgtattagccaggatggtcttgatctcctgagctcgtgatctgcccgcctcggcctcccaaagtgctgggattacaggtgtgagccaccgcgcccagccaagaataaaatactcttaagttgatctaatgaagtgtttccttaccattgtgattattgttactattatttgctatattttaatattgttgtttaccaaatattctcctttaaacagactcgctttttaaacttttttttttttttttgagacggagtttcacgcttattgcccaggctggagtgcaatggcacgatctcagctcaccacaacctccacctcctgggtttaagcaatgcttctgcctcagcttcccaagtagctgagattacaggcgcacaccaccacgcccaactgatttttgtatttttagtagagacggggtttccccatgttggtcaggctggtctcgaactcctgacctcgtgatttgcctgcctgggcctcccaaagtgctaggattacaggcatgagccaccatgcccggcctaaactttgtttttaaaatgaactttttttccccccaattgctgccaatagtggataacatgtatcactcactgccaaaaatagaaagtgaccatgaaaaataaattcgctggggaagggggctccatgctggtgtggccaaggctgagagctctctcttctctgttacaaaacgagataagcaagtgttagaattgccttaaggccacactggcatctccctgaccttctccagggacagaagcaggagtaagtttctcatcccatgggcgaccagggccatctcctcccaccagtggcccccactcacagggagctggcaatgccctacctgcctgttctccagatggagaaacaggctctgagatttcacaggtcttgcccaaagtcattgattttgatgattaaaaagaataaacacagtgtttcctgagtagcagtgattgttatgccttgctattttaataaagattctattttcgtataacattgtcaagtggaaacatgctgaaatctattaaaccatctttgtttgtggaa

SEQ ID NO: 169945 - DNA, 1223 bp, Homo sapiens
  Payload ID: 13459
  Gene Symbol: PTGR1
  Gene Name: prostaglandin reductase 1
  Uniprot ID: Q14914
  ENST ID: ENST00000309195
  CDS Start-End: 80-1069
gttccttggagagcttggagccgcgcgccggagggaataggaaagcttggttacaacccgggacacccggagcttcaggatggttcgtactaagacatggaccctgaagaagcactttgttggctatcctactaatagtgactttgagttgaagacagctgagctcccacccttaaaaaatggagaggtcctgcttgaagctttgttcctcaccgtggatccctacatgagagtggcagccaaaagattgaaggaaggtgatacaatgatggggcagcaagtggccaaagttgtggaaagtaaaaatgtagccctaccaaaaggaactattgtactggcttctccaggctggacaacgcactccatttctgatgggaaagatctggaaaagctgctgacagagtggccagacacaataccactgtctttggctctggggacagttggcatgccaggcctgactgcctactttggcctacttgaaatctgtggtgtgaagggtggagaaacagtgatggttaatgcagcagctggagctgtgggctcagtcgtggggcagattgcaaagctcaagggctgcaaagttgttggagcagtagggtctgatgaaaaggttgcctaccttcaaaagcttggatttgatgtcgtctttaactacaagacggtagagtctttggaagaaaccttgaagaaagcgtctcctgatggttatgattgttattttgataatgtaggtggagagttttcaaacactgttatcggccagatgaagaaatttggaaggattgccatatgtggagccatctctacatataacagaaccggcccacttcccccaggcccacccccagagattgttatctatcaggagcttcgcatggaagcttttgtcgtctaccgctggcaaggagatgcccgccaaaaagctctgaaggacttgctgaaatgggtcttagagggtaaaatccagtacaaggaatatatcattgaaggatttgaaaacatgccagctgcatttatgggaatgctgaaaggagataatttggggaagacaatagtgaaagcatgaaaaagaggacacatggaatctggaggccatttagatgattagttaatttgtttttcaccatttagcaaaaatgtatactaccttaaatgtcttaagaaatagtactcataatgagtttgagctacttaataaaatacatttaagtggtatgtaa

SEQ ID NO: 169946 - DNA, 2298 bp, Homo sapiens
  Payload ID: 13459
  Gene Symbol: PTGR1
  Gene Name: prostaglandin reductase 1
  ENST ID: ENST00000374324
  CDS Start-End: 11-232
gagcttcaggatggttcgtactaagacatggaccctgaagaagcactttgttggctatcctactaatagtgactttgagttgaagacagctgagctcccacccttaaaaaatggagaggtcctgcttgaagctttgttcctcaccgtggatccctacatgagagtggcagccaaaagattgaaggaaggtgatacaatgatggggcagcaagtggccaaccagttattataataccattggtagaaatcgtctatggatctttactggaatttcagtgaccttacagatttatttagaggaaactgacatctttacaatttctctctccaaacacaagagttgtggaaagtaaaaatgtagccctaccaaaaggaactattgtactggcttctccaggctggacaacgcactccatttctgatgggaaagatctggaaaagctgctgacagagtggccagacacaataccactgtctttggctctggggacagttggcatgccaggcctgactgcctactttggcctacttgaaatctgtggtgtgaagggtggagaaacagtgatggttaatgcagcagctggagctgtgggctcagtcgtggggcagattgcaaagctcaagggctgcaaagttgttggagcagtagggtctgatgaaaaggttgcctaccttcaaaagcttggatttgatgtcgtctttaactacaagacggtagagtctttggaagaaaccttgaagaaagcgtctcctgatggttatgattgttattttgataatgtaggtggagagttttcaaacactgttatcggccagatgaagaaatttggaaggattgccatatgtggagccatctctacatataacagaaccggcccacttcccccaggcccacccccagagattgttatctatcaggagcttcgcatggaagcttttgtcgtctaccgctggcaaggagatgcccgccaaaaagctctgaaggacttgctgaaatgggtcttagagcttccctactttgtaattgactgacttcaagcaaataatcttgtctataaatccatgaagagtgctaagccatcactggaatacattagcgaaaaacttgtatcaggtaactcaggtctctatataagaccccttaaaaaaatctgaaaatgtaaattagttcccattagtaggctgtgccttgtaggagaaagagaaatgaagaccctttctcactaacatgaacccttccttcccacactcccagataaaggttaaacacatgttaaaagaaccttggcttaaaggggagacagattattagactgtcctgccatttatatttcctgaataggacctgcctcttcaggggccagaggtaatgaagggtgctcttttctctgtctatttgtacctcctctgagatcattgtgttattaaactttactatgcatcttatttagaaattgcttaatcgctctgggcacggtggctcacgcctgtaatcccagcactttgggaggccgaggcaggcagatcacgaggtcaggagatcgagaccatcctggctaacacggtgaagccctgtccctactaaaaatacaaaacaattagccgggcatggtggtgagcacctgtagtcccagctagtcgggaggctgaggcaggagaatggcatgaacctgggaggcggagcttgcagtgagccaagatcgcggcactgcactccagcctgggcaacagagcgagactctgtctcaaaaaaaaaaaaaagaaagaaaaagagattgcttaatcactgccttatgacatttcgcactatgatccgacacctattatttcttcttaggtgtactttgtaatcttttttacatgtactgtgtaagtggatcttgccccaccttgacttcaagttcatggaggacaggacttccatctcttattttcaaggtttccaatgatgtacctgataaatttgttgctaggatgagaacagtatatcattgagaatattaaattaagttttaaaatttgttgttgctttgatacagggtaaaatccagtacaaggaatatatcattgaaggatttgaaaacatgccagctgcatttatgggaatgctgaaaggagataatttggggaagacaatagtgaaagcatgaaaaagaggacacatggaatctggaggccatttagatgattagttaatttgtttttcaccatttagcaaaaatgtatactaccttaaatgtcttaagaaatagtactcataatgagtttgagctacttaataaaatacatttaagtggt

SEQ ID NO: 169947 - DNA, 1407 bp, Homo sapiens
  Payload ID: 13459
  Gene Symbol: PTGR1
  Gene Name: prostaglandin reductase 1
  Uniprot ID: Q14914
  ENST ID: ENST00000407693
  CDS Start-End: 264-1253
atgcacacatacgcgcgcgcacatgcacataggcacacagagatacgcgcacacacacacacaaacgcactcagatttcccggaccctggttttcctcctgtgaccctttcggggccgggctctcaccctaaagaagcagccccgccctggggtggccccaccctctcttgggacctgtcataagtcggaccccgggcgcccggctgcgcagtcccagccgccttccccaggcagtggaaccttcgggctcctgagcttcaggatggttcgtactaagacatggaccctgaagaagcactttgttggctatcctactaatagtgactttgagttgaagacagctgagctcccacccttaaaaaatggagaggtcctgcttgaagctttgttcctcaccgtggatccctacatgagagtggcagccaaaagattgaaggaaggtgatacaatgatggggcagcaagtggccaaagttgtggaaagtaaaaatgtagccctaccaaaaggaactattgtactggcttctccaggctggacaacgcactccatttctgatgggaaagatctggaaaagctgctgacagagtggccagacacaataccactgtctttggctctggggacagttggcatgccaggcctgactgcctactttggcctacttgaaatctgtggtgtgaagggtggagaaacagtgatggttaatgcagcagctggagctgtgggctcagtcgtggggcagattgcaaagctcaagggctgcaaagttgttggagcagtagggtctgatgaaaaggttgcctaccttcaaaagcttggatttgatgtcgtctttaactacaagacggtagagtctttggaagaaaccttgaagaaagcgtctcctgatggttatgattgttattttgataatgtaggtggagagttttcaaacactgttatcggccagatgaagaaatttggaaggattgccatatgtggagccatctctacatataacagaaccggcccacttcccccaggcccacccccagagattgttatctatcaggagcttcgcatggaagcttttgtcgtctaccgctggcaaggagatgcccgccaaaaagctctgaaggacttgctgaaatgggtcttagagggtaaaatccagtacaaggaatatatcattgaaggatttgaaaacatgccagctgcatttatgggaatgctgaaaggagataatttggggaagacaatagtgaaagcatgaaaaagaggacacatggaatctggaggccatttagatgattagttaatttgtttttcaccatttagcaaaaatgtatactaccttaaatgtcttaagaaatagtactcataatgagtttgagctacttaataaaatacatttaagtggtatgtaa

SEQ ID NO: 169948 - DNA, 461 bp, Homo sapiens
  Payload ID: 13459
  Gene Symbol: PTGR1
  Gene Name: prostaglandin reductase 1
  ENST ID: ENST00000422125
  CDS Start-End: 104-461
accctctcttgggacctgtcataagtcggaccccgggcgcccggctgcgcagtcccagccgccttccccaggcagtggaaccttcgggctcctgagcttcaggatggttcgtactaagacatggaccctgaagaagcactttgttggctatcctactaatagtgactttgagttgaagacagctgagctcccacccttaaaaaatggagaggtcctgcttgaagctttgttcctcaccgtggatccctacatgagagttgtggaaagtaaaaatgtagccctaccaaaaggaactattgtactggcttctccaggctggacaacgcactccatttctgatgggaaagatctggaaaagctgctgacagagtggccagacacaataccactgtctttggctctggggacagttggcatgccaggcctgactgcctactttggcctacttgaaatctgtggtg

SEQ ID NO: 169949 - DNA, 1094 bp, Homo sapiens
  Payload ID: 13459
  Gene Symbol: PTGR1
  Gene Name: prostaglandin reductase 1
  ENST ID: ENST00000466771
  CDS Start-End: 1-357
caaaagcttggatttgatgtcgtctttaactacaagacggtagagtctttggaagaaaccttgaagaaagcgtctcctgatggttatgattgttattttgataatgtaggtggagagttttcaaacactgttatcggccagatgaagaaatttggaaggattgccatatgtggagccatctctacatataacagaaccggcccacttcccccaggcccacccccagagattgttatctatcaggagcttcgcatggaagcttttgtcgtctaccgctggcaaggagatgcccgccaaaaagctctgaaggacttgctgaaatgggtcttagagcttccctactttgtaattgactgacttcaagcaaataatcttgtctataaatccatgaagagtgctaagccatcactggaatacattagcgaaaaacttgtatcagggtaaaatccagtacaaggaatatatcattgaaggatttgaaaacatgccagctgcatttatgggaatgctgaaaggagataatttggggaagacaatagtgaaagcatgaaaaagaggacacatggaatctggaggccatttagatgattagttaatttgtttttcaccatttagcaaaaatgtatactaccttaaatgtcttaagaaatagtactcataatgagtttgagctacttaataaaatacatttaagtggtatgtaattagtgatggaggatggaagtttcaaagtcaacaacaaccagtcacctcactgttcactacagcttcttctgagttgtggtagaaaataatggctttgaagtgtgaaaattttccaaacactgtatgttttcattcataagtgggagctgaacaatgagaacacatggacatagggaggggaacaacacacgctggggcctgtggaagccggggtgagggagggagagcatcaggataaatagctaatgccttcgggggctaatacctaggtgatgggttgacaggtgaagcaaaccatcatggcacacgtttacctatgtaacaaacctgcacattccacacaattatcccggaactgaaaataaaataaaattaaattaaaaaaaaaa

SEQ ID NO: 169950 - DNA, 1220 bp, Homo sapiens
  Payload ID: 13459
  Gene Symbol: PTGR1
  Gene Name: prostaglandin reductase 1
  Uniprot ID: Q14914
  ENST ID: ENST00000538962
  CDS Start-End: 264-1169
atgcacacatacgcgcgcgcacatgcacataggcacacagagatacgcgcacacacacacacaaacgcactcagatttcccggaccctggttttcctcctgtgaccctttcggggccgggctctcaccctaaagaagcagccccgccctggggtggccccaccctctcttgggacctgtcataagtcggaccccgggcgcccggctgcgcagtcccagccgccttccccaggcagtggaaccttcgggctcctgagcttcaggatggttcgtactaagacatggaccctgaagaagcactttgttggctatcctactaatagtgactttgagttgaagacagctgagctcccacccttaaaaaatggagaggtcctgcttgaagctttgttcctcaccgtggatccctacatgagagtggcagccaaaagattgaaggaaggtgatacaatgatggggcagcaagtggccaaagttgtggaaagtaaaaatgtagccctaccaaaaggaactattgtactggcttctccaggctggacaacgcactccatttctgatgggaaagatctggaaaagctgctgacagagtggccagacacaataccactgtctttggctctggggacagttggcatgccaggcctgactgcctactttggcctacttgaaatctgtggtgtgaagggtggagaaacagtgatggttaatgcagcagctggagctgtgggctcagtcgtggggcagattgcaaagctcaagggctgcaaagttgttggagcagtagggtctgatgaaaaggttgcctaccttcaaaagcttggatttgatgtcgtctttaactacaagacggtagagtctttggaagaaaccttgaagaaagcgtctcctgatggttatgattgttattttgataatgtaggtggagagttttcaaacactgttatcggccagatgaagaaatttggaaggattgccatatgtggagccatctctacatataacagaaccggcccacttcccccaggcccacccccagagattgttatctatcaggagcttcgcatggaagcttttgtcgtctaccgctggcaaggagatgcccgccaaaaagctctgaaggacttgctgaaatgggtcttagagatcaaaagagaaaatgaagaagattgaagcttcaaagcagaaaaatgaagggaatatgtatcattcaccattacctta

SEQ ID NO: 169951 - DNA, 2559 bp, Homo sapiens
  Payload ID: 13460
  Gene Symbol: PTGR2
  Gene Name: prostaglandin reductase 2
  Uniprot ID: Q8N8N7
  ENST ID: ENST00000267568
  CDS Start-End: 222-1277
agtgacgcgcgagcggctcccgcgactgtggctcccgaagctgcttcgggccccagcggtgaggaagaagactctcaaccagggtgacttctaggcgtcctcccggagctaccggggacactggcgttattgcccgcaacactgagatagggaatgctcgagaaacagaagcaggagtattttatacagaaatcttgtgaaaccactgcccaaccagagcaatgattgttcaaagagtggtattgaattctcgacctggaaaaaatggtaatccagtggcagagaatttccgaatggaagaagtctatttaccagataatattaatgaaggacaagtacaagttagaactctttatctttctgtggatccttacatgcgttgtagaatgaatgaagacactggcactgattatataacaccttggcagctatctcaagtcgttgatggaggaggtattggaattatagaagaaagcaaacacacaaatttgactaaaggcgattttgtgacttctttctattggccctggcaaaccaaggttattctggatggaaatagccttgaaaaggtagacccacaacttgtggatggacacctttcatattttcttggagctataggtatgcctggtttgacttccttgattgggatacaggaaaaaggtcatataactgctggatctaataagacaatggttgtcagtggggccgcaggtgcctgtggatctgtggctgggcagattggccatttcttaggttgttccagagtggtgggaatttgtggaacacatgagaaatgcatcctcttgacctcagaactgggctttgatgctgcaattaattataaaaaagacaatgtggcagaacagctccgtgaatcatgcccagctggagtggatgtttattttgacaatgttggtggtaacatcagtgatacagtgataagtcagatgaatgagaacagccacatcatcctgtgtggtcaaatttctcagtacaacaaagatgtgccttatcctcccccgctatcccctgctatagaggcaatccagaaagaaagaaacatcacaagggaaagatttctggtattaaattataaagacaaatttgagcctggcattctacagctgagtcagtggtttaaagaaggaaagctaaagattaaagagacggtaataaatgggttggaaaacatgggagctgcattccagtccatgatgacaggaggtaacattggaaagcagatagtttgcatttcagaagaaatctctttgtaattgctgtaaatgtcatcaaggcaatcatagatttcttttccattttgcatattttcaaagatatgttaaaaaatccttagactatacatagctcttgatttaaatgtgatcataggtgttatttttagttgcatagggtatttgatacaatcattaatggatcatacacaataggtttttaaaaattaataacttttagtaattacttttattaatttaaaatagaacgcttgagaggcactttgtaaagatttgttaaactggaaacgttttacatgatctgatacaaccattaatgaatcatacacaataggttttttaaaattaatattaataacttttattaatttaaaatagaatgcttaaaataaaatagaatgcttgagaggcactgagtaaagatttgttgaactggaaatgttttacatgattcttaaactgaaacttggtgtaaaaatagaattgagatggcctttttttcacattgtagactgaaaagagacttaatggtatgatgtgtacatagggactgggggcaggattgggggtttcggagcttgtgtaacagtttttgggataggagaccagcggttttgggttgggattagtatgggaagataaataacttaggttggttaagttgacaagatttactccagaggatcatctctttgtatttgccaaataatttactgtatagcctaaaaactccatatatattgagaaaagcatatgtttattttaggttagcaggcacatactgtcaagttgtaaagattgagagggcaaacagatgtaaacatcacttgtaggtgattaaaaagattgacagccgggcctgatgtctcaagcctgtaatcctagcactttgggaggcagaggcgggcagatcacttgaggtcaggagttcaagaccagcctggccaacacggtgaaaccccatctctctaaaaatacaaaaattagctgggcgtggtggcacacgcctgtaatcccagctactcaggaggctgaggctggagaatcatttgaacctgggagggggaggttgccgtgagctgagcttgcaccattgcactccagcctgggcgacaagagtgaaattccatctcaaaaaacaaaaacagattgacaacaaagacagtttcagaaaatgacaggactgggcaaattaacaaatgtttgtaaacatgaatgttcaggaactactgatgtacctcaaaagtttgttttattaattgtactcaaccctcgcagaacagtaaaactgaagattattgtt

SEQ ID NO: 169952 - DNA, 1351 bp, Homo sapiens
  Payload ID: 13460
  Gene Symbol: PTGR2
  Gene Name: prostaglandin reductase 2
  ENST ID: ENST00000553813
  CDS Start-End: 296-949
ggaaaaaatggtaatccagtggcagagaatttccgaatggaagaagtctatttaccagataatattaatgaaggacaagtacaagttagaactctttatctttctgtggatccttacatgcgttgtagaatgaatgaagacactggcactgattatataacaccttggcagctatctcaagtcgttgatggaggaggtattggaattatagaagaaagcaaacacacaaatttgactaaaggtagacccacaacttgtggatggacacctttcatattttcttggagctataggtatgcctggtttgacttccttgattgggatacaggaaaaaggtcatataactgctggatctaataagacaatggttgtcagtggggccgcaggtgcctgtggatctgtggctgggcagattggccatttcttaggttgttccagagtggtgggaatttgtggaacacatgagaaatgcatcctcttgacctcagaactgggctttgatgctgcaattaattataaaaaagacaatgtggcagaacagctccgtgaatcatgcccagctggagtggatgtttattttgacaatgttggtggtaacatcagtgatacagtgataagtcagatgaatgagaacagccacatcatcctgtgtggtcaaatttctcagtacaacaaagatgtgccttatcctcccccgctatcccctgctatagaggcaatccagaaagaaagaaacatcacaagggaaagatttctggtattaaattataaagacaaatttgagcctggcattctacagctgagtcagtggtttaaagaaggaaagctaaagattaaagagacggtaataaatgggttggaaaacatgggagctgcattccagtccatgatgacaggaggtaacattggaaagcagatagtttgcatttcagaagaaatctctttgtaattgctgtaaatgtcatcaaggcaatcatagatttcttttccattttgcatattttcaaagatatgttaaaaaatccttagactatacatagctcttgatttaaatgtgatcataggtgttatttttagttgcatagggtatttgatacaatcattaatggatcatacacaataggtttttaaaaattaataacttttagtaattacttttattaatttaaaatagaacgcttgagaggcactttgtaaagatttgttaaactggaaacgttttacatgatctgatacaaccattaatgaatcatacacaataggttttttaaaattaatattaataacttttattaatttaaaatagaatgcttaaaataaaatagaatgcttgagaggcactgagtaaaga

SEQ ID NO: 169953 - DNA, 2543 bp, Homo sapiens
  Payload ID: 13460
  Gene Symbol: PTGR2
  Gene Name: prostaglandin reductase 2
  Uniprot ID: Q8N8N7
  ENST ID: ENST00000555228
  CDS Start-End: 209-1264
ctgcggtcagagggccgaggcctgggggcgagctggggtcgtgcagtacagcctctttccggcaaatcacgcgagatttcgttcacccgggctccacagggtcagtgacgcgcgagcggctcccgcgactgtggctcccgaagctgcttcgggccccagcggagtattttatacagaaatcttgtgaaaccactgcccaaccagagcaatgattgttcaaagagtggtattgaattctcgacctggaaaaaatggtaatccagtggcagagaatttccgaatggaagaagtctatttaccagataatattaatgaaggacaagtacaagttagaactctttatctttctgtggatccttacatgcgttgtagaatgaatgaagacactggcactgattatataacaccttggcagctatctcaagtcgttgatggaggaggtattggaattatagaagaaagcaaacacacaaatttgactaaaggcgattttgtgacttctttctattggccctggcaaaccaaggttattctggatggaaatagccttgaaaaggtagacccacaacttgtggatggacacctttcatattttcttggagctataggtatgcctggtttgacttccttgattgggatacaggaaaaaggtcatataactgctggatctaataagacaatggttgtcagtggggccgcaggtgcctgtggatctgtggctgggcagattggccatttcttaggttgttccagagtggtgggaatttgtggaacacatgagaaatgcatcctcttgacctcagaactgggctttgatgctgcaattaattataaaaaagacaatgtggcagaacagctccgtgaatcatgcccagctggagtggatgtttattttgacaatgttggtggtaacatcagtgatacagtgataagtcagatgaatgagaacagccacatcatcctgtgtggtcaaatttctcagtacaacaaagatgtgccttatcctcccccgctatcccctgctatagaggcaatccagaaagaaagaaacatcacaagggaaagatttctggtattaaattataaagacaaatttgagcctggcattctacagctgagtcagtggtttaaagaaggaaagctaaagattaaagagacggtaataaatgggttggaaaacatgggagctgcattccagtccatgatgacaggaggtaacattggaaagcagatagtttgcatttcagaagaaatctctttgtaattgctgtaaatgtcatcaaggcaatcatagatttcttttccattttgcatattttcaaagatatgttaaaaaatccttagactatacatagctcttgatttaaatgtgatcataggtgttatttttagttgcatagggtatttgatacaatcattaatggatcatacacaataggtttttaaaaattaataacttttagtaattacttttattaatttaaaatagaacgcttgagaggcactttgtaaagatttgttaaactggaaacgttttacatgatctgatacaaccattaatgaatcatacacaataggttttttaaaattaatattaataacttttattaatttaaaatagaatgcttaaaataaaatagaatgcttgagaggcactgagtaaagatttgttgaactggaaatgttttacatgattcttaaactgaaacttggtgtaaaaatagaattgagatggcctttttttcacattgtagactgaaaagagacttaatggtatgatgtgtacatagggactgggggcaggattgggggtttcggagcttgtgtaacagtttttgggataggagaccagcggttttgggttgggattagtatgggaagataaataacttaggttggttaagttgacaagatttactccagaggatcatctctttgtatttgccaaataatttactgtatagcctaaaaactccatatatattgagaaaagcatatgtttattttaggttagcaggcacatactgtcaagttgtaaagattgagagggcaaacagatgtaaacatcacttgtaggtgattaaaaagattgacagccgggcctgatgtctcaagcctgtaatcctagcactttgggaggcagaggcgggcagatcacttgaggtcaggagttcaagaccagcctggccaacacggtgaaaccccatctctctaaaaatacaaaaattagctgggcgtggtggcacacgcctgtaatcccagctactcaggaggctgaggctggagaatcatttgaacctgggagggggaggttgccgtgagctgagcttgcaccattgcactccagcctgggcgacaagagtgaaattccatctcaaaaaacaaaaacagattgacaacaaagacagtttcagaaaatgacaggactgggcaaattaacaaatgtttgtaaacatgaatgttcaggaactactgatgtacctcaaaagtttgttttattaattgtactcaaccctcgcagaacagtaaaactgaagattatt

SEQ ID NO: 169954 - DNA, 3851 bp, Homo sapiens
  Payload ID: 13460
  Gene Symbol: PTGR2
  Gene Name: prostaglandin reductase 2
  Uniprot ID: Q8N8N7
  ENST ID: ENST00000555661
  CDS Start-End: 146-1201
gcggtcagagggccgaggcctgggggcgagctggggtcgtgcagtacagcctctttccggcaaatcacgcgagatttcgttcacccgggctccacagggagtattttatacagaaatcttgtgaaaccactgcccaaccagagcaatgattgttcaaagagtggtattgaattctcgacctggaaaaaatggtaatccagtggcagagaatttccgaatggaagaagtctatttaccagataatattaatgaaggacaagtacaagttagaactctttatctttctgtggatccttacatgcgttgtagaatgaatgaagacactggcactgattatataacaccttggcagctatctcaagtcgttgatggaggaggtattggaattatagaagaaagcaaacacacaaatttgactaaaggcgattttgtgacttctttctattggccctggcaaaccaaggttattctggatggaaatagccttgaaaaggtagacccacaacttgtggatggacacctttcatattttcttggagctataggtatgcctggtttgacttccttgattgggatacaggaaaaaggtcatataactgctggatctaataagacaatggttgtcagtggggccgcaggtgcctgtggatctgtggctgggcagattggccatttcttaggttgttccagagtggtgggaatttgtggaacacatgagaaatgcatcctcttgacctcagaactgggctttgatgctgcaattaattataaaaaagacaatgtggcagaacagctccgtgaatcatgcccagctggagtggatgtttattttgacaatgttggtggtaacatcagtgatacagtgataagtcagatgaatgagaacagccacatcatcctgtgtggtcaaatttctcagtacaacaaagatgtgccttatcctcccccgctatcccctgctatagaggcaatccagaaagaaagaaacatcacaagggaaagatttctggtattaaattataaagacaaatttgagcctggcattctacagctgagtcagtggtttaaagaaggaaagctaaagattaaagagacggtaataaatgggttggaaaacatgggagctgcattccagtccatgatgacaggaggtaacattggaaagcagatagtttgcatttcagaagaaatctctttgtaattgctgtaaatgtcatcaaggcaatcatagatttcttttccattttgcatattttcaaagatatgttaaaaaatccttagactatacatagctcttgatttaaatgtgatcataggtgttatttttagttgcatagggtatttgatacaatcattaatggatcatacacaataggtttttaaaaattaataacttttagtaattacttttattaatttaaaatagaacgcttgagaggcactttgtaaagatttgttaaactggaaacgttttacatgatctgatacaaccattaatgaatcatacacaataggttttttaaaattaatattaataacttttattaatttaaaatagaatgcttaaaataaaatagaatgcttgagaggcactgagtaaagatttgttgaactggaaatgttttacatgattcttaaactgaaacttggtgtaaaaatagaattgagatggcctttttttcacattgtagactgaaaagagacttaatggtatgatgtgtacatagggactgggggcaggattgggggtttcggagcttgtgtaacagtttttgggataggagaccagcggttttgggttgggattagtatgggaagataaataacttaggttggttaagttgacaagatttactccagaggatcatctctttgtatttgccaaataatttactgtatagcctaaaaactccatatatattgagaaaagcatatgtttattttaggttagcaggcacatactgtcaagttgtaaagattgagagggcaaacagatgtaaacatcacttgtaggtgattaaaaagattgacagccgggcctgatgtctcaagcctgtaatcctagcactttgggaggcagaggcgggcagatcacttgaggtcaggagttcaagaccagcctggccaacacggtgaaaccccatctctctaaaaatacaaaaattagctgggcgtggtggcacacgcctgtaatcccagctactcaggaggctgaggctggagaatcatttgaacctgggagggggaggttgccgtgagctgagcttgcaccattgcactccagcctgggcgacaagagtgaaattccatctcaaaaaacaaaaacagattgacaacaaagacagtttcagaaaatgacaggactgggcaaattaacaaatgtttgtaaacatgaatgttcaggaactactgatgtacctcaaaagtttgttttattaattgtactcaaccctcgcagaacagtaaaactgaagattattgtttctgaatgttttggcttatgattgtctacacactgccaatatacttttgtatgcaacatttgtaataagtagattcaaactgtgttggtaatcagcctccccagttttcgtgagtggcccttttttgttacttttcctggaccatttcatcgcctgagggggtttcacttttctctgtatgttgctaactcccaaatctccatctgtatttctgacctctttcttgagcactggacctttacctccaagtaaatatcctcaactctggattgcatcttatactctgcttttttcttttcttttcttttttgagatggagtcttgctcagtcgcccggcgtgcagcggcacgatctcggctcactgcaacctccgcctcccgggttcaagcgattctcctgcctcagcctcccgagtagctaggattacaggcgcgtgccaccacgcccggctaatttttgtgtttttagtagagacgggttttcacggcgttacccaggatggtctcgatctcctgacctcgtgatccgcccaccttagcctcccaaagtgctgggattaaaggcgtgagccacggagtccggcctactctgcttttctaaagtggaattatcttcctctgaaatgtttctcctttattttaaatcaccattagtaatttgtgtacccaaacctgtcatcaaggcttatctttaaccttgaaaatgcctttttaaagagaactcctttaattcccacggttgagtctctcattcttccgcacgcaaatattttaaaataagtaatttcaagaagtcagtcaaactcacaaagctttaacaaggtggcatccagcttggaagtcaagtgttcaagcccgcagtcgggacatccaagagctctttacatcctaattacaacacggaacccagactcactgcataccccgtcccgtatataatgcaaaacttgattctgcaagttcctttctcgggcggtgaaacttcgaaggtcctctccatggagacctttgataaatgtttaagcagtgatcttttctttcgcgtttgcctccattgcaacgcctccgctgatgggaaaaactactccctccgctactgcggggtggcagtgacgtcaacgaattagctgacctgttttttcgggcttcgcggacataggagtcccgaaggccgagagtgagtgagtgagtgggagcggggcggctgcggctcctcctgtccggggcggagccctgcgtcgcgggcctggggaggccccgccagcacccttgacgtctgggtcccgagcagtgcggcagccacacgacactgaggcgagcgagtgggtgtgtgcgtggggggtcagccaaacttcctgtcccgcgctc

SEQ ID NO: 169955 - DNA, 2328 bp, Homo sapiens
  Payload ID: 13461
  Gene Symbol: PTGS1
  Gene Name: prostaglandin-endoperoxide synthase 1 (prostaglandin G/H synthase and cyclooxygenase)
  Uniprot ID: P23219
  ENST ID: ENST00000223423
  CDS Start-End: 6-1694
gcgccatgagccggagtctcttgctctggttcttgctgttcctgctcctgctcccgccgctccccgtcctgctcgcggacccaggggcgcccacgccagtgaatccctgttgttactatccatgccagcaccagggcatctgtgtccgcttcggccttgaccgctaccagtgtgactgcacccgcacgggctattccggccccaactgcaccatccctggcctgtggacctggctccggaattcactgcggcccagcccctctttcacccacttcctgctcactcacgggcgctggttctgggagtttgtcaatgccaccttcatccgagagatgctcatgcgcctggtactcacagtgcgctccaaccttatccccagtccccccacctacaactcagcacatgactacatcagctgggagtctttctccaacgtgagctattacactcgtattctgccctctgtgcctaaagattgccccacacccatgggaaccaaagggaagaagcagttgccagatgcccagctcctggcccgccgcttcctgctcaggaggaagttcatacctgacccccaaggcaccaacctcatgtttgccttctttgcacaacacttcacccaccagttcttcaaaacttctggcaagatgggtcctggcttcaccaaggccttgggccatggggtagacctcggccacatttatggagacaatctggagcgtcagtatcaactgcggctctttaaggatgggaaactcaagtaccaggtgctggatggagaaatgtacccgccctcggtagaagaggcgcctgtgttgatgcactacccccgaggcatcccgccccagagccagatggctgtgggccaggaggtgtttgggctgcttcctgggctcatgctgtatgccacgctctggctacgtgagcacaaccgtgtgtgtgacctgctgaaggctgagcaccccacctggggcgatgagcagcttttccagacgacccgcctcatcctcataggggagaccatcaagattgtcatcgaggagtacgtgcagcagctgagtggctatttcctgcagctgaaatttgacccagagctgctgttcggtgtccagttccaataccgcaaccgcattgccatggagttcaaccatctctaccactggcaccccctcatgcctgactccttcaagatcggtgggggcaggaacatggaccaccacatcctgcatgtggctgtggatgtcatcagggagtctcgggagatgcggctgcagcccttcaatgagtaccgcaagaggtttggcatgaaaccctacacctccttccaggagctcgtaggagagaaggagatggcagcagagttggaggaattgtatggagacattgatgcgttggagttctaccctggactgcttcttgaaaagtgccatccaaactctatctttggggagagtatgatagagattggggctcccttttccctcaagggtctcctagggaatcccatctgttctccggagtactggaagccgagcacatttggcggcgaggtgggctttaacattgtcaagacggccacactgaagaagctggtctgcctcaacaccaagacctgtccctacgtttccttccgtgtgccggatgccagtcaggatgatgggcctgctgtggagcgaccatccacagagctctgaggggcaggaaagcagcattctggaggggagagctttgtgcttgtcattccagagtgctgaggccagggctgatggtcttaaatgctcattttctggtttggcatggtgagtgttggggttgacatttagaactttaagtctcacccattatctggaatattgtgattctgtttattcttccagaatgctgaactccttgttagcccttcagattgttaggagtggttctcatttggtctgccagaatactgggttcttagttgacaacctagaatgtcagatttctggttgatttgtaacacagtcattctaggatgtggagctactgatgaaatctgctagaaagttagggggttcttattttgcattccagaatcttgactttctgattggtgattcaaagtgttgtgttcctggctgatgatccagaacagtggctcgtatcccaaatctgtcagcatctggctgtctagaatgtggatttgattcattttcctgttcagtgagatatcatagagacggagatcctaaggtccaacaagaatgcattccctgaatctgtgcctgcactgagagggcaaggaagtggggtgttcttcttgggacccccactaagaccctggtctgaggatgt

SEQ ID NO: 169956 - DNA, 4964 bp, Homo sapiens
  Payload ID: 13461
  Gene Symbol: PTGS1
  Gene Name: prostaglandin-endoperoxide synthase 1 (prostaglandin G/H synthase and cyclooxygenase)
  Uniprot ID: P23219
  ENST ID: ENST00000362012
  CDS Start-End: 6-1805
gcgccatgagccggagtctcttgctctggttcttgctgttcctgctcctgctcccgccgctccccgtcctgctcgcggacccaggggcgcccacgccagtgaatccctgttgttactatccatgccagcaccagggcatctgtgtccgcttcggccttgaccgctaccagtgtgactgcacccgcacgggctattccggccccaactgcaccatccctggcctgtggacctggctccggaattcactgcggcccagcccctctttcacccacttcctgctcactcacgggcgctggttctgggagtttgtcaatgccaccttcatccgagagatgctcatgcgcctggtactcacagtgcgctccaaccttatccccagtccccccacctacaactcagcacatgactacatcagctgggagtctttctccaacgtgagctattacactcgtattctgccctctgtgcctaaagattgccccacacccatgggaaccaaagggaagaagcagttgccagatgcccagctcctggcccgccgcttcctgctcaggaggaagttcatacctgacccccaaggcaccaacctcatgtttgccttctttgcacaacacttcacccaccagttcttcaaaacttctggcaagatgggtcctggcttcaccaaggccttgggccatggggtagacctcggccacatttatggagacaatctggagcgtcagtatcaactgcggctctttaaggatgggaaactcaagtaccaggtgctggatggagaaatgtacccgccctcggtagaagaggcgcctgtgttgatgcactacccccgaggcatcccgccccagagccagatggctgtgggccaggaggtgtttgggctgcttcctgggctcatgctgtatgccacgctctggctacgtgagcacaaccgtgtgtgtgacctgctgaaggctgagcaccccacctggggcgatgagcagcttttccagacgacccgcctcatcctcataggggagaccatcaagattgtcatcgaggagtacgtgcagcagctgagtggctatttcctgcagctgaaatttgacccagagctgctgttcggtgtccagttccaataccgcaaccgcattgccatggagttcaaccatctctaccactggcaccccctcatgcctgactccttcaaggtgggctcccaggagtacagctacgagcagttcttgttcaacacctccatgttggtggactatggggttgaggccctggtggatgccttctctcgccagattgctggccggatcggtgggggcaggaacatggaccaccacatcctgcatgtggctgtggatgtcatcagggagtctcgggagatgcggctgcagcccttcaatgagtaccgcaagaggtttggcatgaaaccctacacctccttccaggagctcgtaggagagaaggagatggcagcagagttggaggaattgtatggagacattgatgcgttggagttctaccctggactgcttcttgaaaagtgccatccaaactctatctttggggagagtatgatagagattggggctcccttttccctcaagggtctcctagggaatcccatctgttctccggagtactggaagccgagcacatttggcggcgaggtgggctttaacattgtcaagacggccacactgaagaagctggtctgcctcaacaccaagacctgtccctacgtttccttccgtgtgccggatgccagtcaggatgatgggcctgctgtggagcgaccatccacagagctctgaggggcaggaaagcagcattctggaggggagagctttgtgcttgtcattccagagtgctgaggccagggctgatggtcttaaatgctcattttctggtttggcatggtgagtgttggggttgacatttagaactttaagtctcacccattatctggaatattgtgattctgtttattcttccagaatgctgaactccttgttagcccttcagattgttaggagtggttctcatttggtctgccagaatactgggttcttagttgacaacctagaatgtcagatttctggttgatttgtaacacagtcattctaggatgtggagctactgatgaaatctgctagaaagttagggggttcttattttgcattccagaatcttgactttctgattggtgattcaaagtgttgtgttcctggctgatgatccagaacagtggctcgtatcccaaatctgtcagcatctggctgtctagaatgtggatttgattcattttcctgttcagtgagatatcatagagacggagatcctaaggtccaacaagaatgcattccctgaatctgtgcctgcactgagagggcaaggaagtggggtgttcttcttgggacccccactaagaccctggtctgaggatgtagagagaacaggtgggctgtattcacgccattggttggaagctaccagagctctatccccatccaggtcttgactcatggcagctgtttctcatgaagctaataaaattcgctttctaaagttacctgttatatatctcttttggtcccatcctctaaagcagaggcaacactggaacatggctagcctttcttgtagccatggctgggcgtgctagaggttgcagcatgagactttctgctgggatccttgggcccatcactgtatagacatgctaccactggtacttcctttctccctgcgggccaggcactgcccttttcaggaagctctcttaaaatacccattgccccagacctggaagatataacattcagttcccaccatctgattaaaacaacttcctcccttacagagcatacaacagagggggcacccggggaggagagcacatactgtgttccaatttcacgcttttaattctcatttgttctcacaccaacagtgtgaagtgcgtggtataatctccatttcaaaaccaaggaagcagcctcagagtggtcgagtgacacacctcacgcaggctgagtccagagcttgtgctcctcttgattcctggtttgactcagttccaggcctgatcttgcctgtctggctcagggtcaaagacagaatggtggagtgtagcctccacctgatattcaggctactcattcagtcccaaatatgtattttcctaagtgtttactatgtgccagttcctgtaacaggtgtggggacacagcagtgagtaatcaatacagacaaggttctgcccttatggagctcacactccagtggcagacaaacagaccataaataaggaaacgatgaaataagatatatacaaggtgagtgtgacttcccttctaaccccctctgctctgtcctcccctattgcgctctcaagaccagagacccaacagcagtgatctcagggcagacagccctccactccagctctgagacccttttctcaggacctctgtaggcagcagagagagaggacagaggggtaagatgaggggttgagggaaggttcttcatgatccacactttgggcttagtatttctcaggaagagctatggcccagaaacaacaggggaaactagagttcggtctgacagtccttggggttaagtctcctgtcttatggtccagaaactcctgtttctccttagttggctggaaactgctcccatcattccttctggcctctgctgaatgcagggaatgcaatccttccctgctcttgcagttgctctgacgtagaaagatccttcgggtgctggaagtctccatgaagagcttgtgtcctgtcctttcttgcagattctatttcccctcttctgctaatacctcttactttgcttgagaatcctctcctttcttattaatttcagtcttggtggttctatcaggggtgcattctggccaaggggtgggcctgtgaatcaatcctgggcaatcagacaccctctccttaaaaactggcccgtggagactgagatcactgactctgactcatccccacagctggctctgacaagatggtccatttgttcctgcttccgagatccccagggcagcctggatccctgcccttctcaagactttagcttttccttccatccggtggcctattccaggaattcctcttttgcttaaatcagttggagtttgtgtctgttgcttgtaatcaagcctttatggctgctgggctgagtgacacaagcactttaatggcctggagggacttttaatcagtgaagatgcaatcagacaagtgttttggaaagagcaccctcgagaagggtggatgacagggcagagcaggaaggacaggaagctggcagaacggaggaggctgcagccgtggtccaaccaggagctgatggcagctggggctaggggaagggctttgagggtggaaggatgggatgggttccagaggtattcctctcttaaatgcaagtgcctagattaggtagactttgcttagtattgacaactgcacatgaaagttttgcaaagggaaacaggctaaatgcaccaagaaagcttcttcagagtgaagaatcttaatgcttgtaatttaaacatttgttcctggagttttgatttggtggatgtgatggttggttttatttgtcagtttggttgggctatagcacacagttatttaatcaaacagtaatctaggtgtggctgtgaaggtattttgtagatgtgattaacatctacaatcagttgactttaagtgaaagagattacttaaataatttgggtgagctgcacctgattagttgaaaggcctcaagaacaaacactgcagtttcctggaaaagaagaaactttgcctcaagactatagccatcgactcctgcctgagtttccagcctgctagtctgccctatggatttgaagtttgccaaccccaacaattgtgtgaattaatttctaaaaataaagctatatacagcca

SEQ ID NO: 169957 - DNA, 4987 bp, Homo sapiens
  Payload ID: 13461
  Gene Symbol: PTGS1
  Gene Name: prostaglandin-endoperoxide synthase 1 (prostaglandin G/H synthase and cyclooxygenase)
  Uniprot ID: P23219
  ENST ID: ENST00000373698
  CDS Start-End: 357-1829
agcttgtggctcttctgcctgccgaggcagagctctagggccatggcgggaggccttccggctccacctcagacagctgttgagggcctggaagatgagggactccttttggtcaggctggagtgaatccctgttgttactatccatgccagcaccagggcatctgtgtccgcttcggccttgaccgctaccagtgtgactgcacccgcacgggctattccggccccaactgcaccatccctggcctgtggacctggctccggaattcactgcggcccagcccctctttcacccacttcctgctcactcacgggcgctggttctgggagtttgtcaatgccaccttcatccgagagatgctcatgcgcctggtactcacagtgcgctccaaccttatccccagtccccccacctacaactcagcacatgactacatcagctgggagtctttctccaacgtgagctattacactcgtattctgccctctgtgcctaaagattgccccacacccatgggaaccaaagggaagaagcagttgccagatgcccagctcctggcccgccgcttcctgctcaggaggaagttcatacctgacccccaaggcaccaacctcatgtttgccttctttgcacaacacttcacccaccagttcttcaaaacttctggcaagatgggtcctggcttcaccaaggccttgggccatggggtagacctcggccacatttatggagacaatctggagcgtcagtatcaactgcggctctttaaggatgggaaactcaagtaccaggtgctggatggagaaatgtacccgccctcggtagaagaggcgcctgtgttgatgcactacccccgaggcatcccgccccagagccagatggctgtgggccaggaggtgtttgggctgcttcctgggctcatgctgtatgccacgctctggctacgtgagcacaaccgtgtgtgtgacctgctgaaggctgagcaccccacctggggcgatgagcagcttttccagacgacccgcctcatcctcataggggagaccatcaagattgtcatcgaggagtacgtgcagcagctgagtggctatttcctgcagctgaaatttgacccagagctgctgttcggtgtccagttccaataccgcaaccgcattgccatggagttcaaccatctctaccactggcaccccctcatgcctgactccttcaaggtgggctcccaggagtacagctacgagcagttcttgttcaacacctccatgttggtggactatggggttgaggccctggtggatgccttctctcgccagattgctggccggatcggtgggggcaggaacatggaccaccacatcctgcatgtggctgtggatgtcatcagggagtctcgggagatgcggctgcagcccttcaatgagtaccgcaagaggtttggcatgaaaccctacacctccttccaggagctcgtaggagagaaggagatggcagcagagttggaggaattgtatggagacattgatgcgttggagttctaccctggactgcttcttgaaaagtgccatccaaactctatctttggggagagtatgatagagattggggctcccttttccctcaagggtctcctagggaatcccatctgttctccggagtactggaagccgagcacatttggcggcgaggtgggctttaacattgtcaagacggccacactgaagaagctggtctgcctcaacaccaagacctgtccctacgtttccttccgtgtgccggatgccagtcaggatgatgggcctgctgtggagcgaccatccacagagctctgaggggcaggaaagcagcattctggaggggagagctttgtgcttgtcattccagagtgctgaggccagggctgatggtcttaaatgctcattttctggtttggcatggtgagtgttggggttgacatttagaactttaagtctcacccattatctggaatattgtgattctgtttattcttccagaatgctgaactccttgttagcccttcagattgttaggagtggttctcatttggtctgccagaatactgggttcttagttgacaacctagaatgtcagatttctggttgatttgtaacacagtcattctaggatgtggagctactgatgaaatctgctagaaagttagggggttcttattttgcattccagaatcttgactttctgattggtgattcaaagtgttgtgttcctggctgatgatccagaacagtggctcgtatcccaaatctgtcagcatctggctgtctagaatgtggatttgattcattttcctgttcagtgagatatcatagagacggagatcctaaggtccaacaagaatgcattccctgaatctgtgcctgcactgagagggcaaggaagtggggtgttcttcttgggacccccactaagaccctggtctgaggatgtagagagaacaggtgggctgtattcacgccattggttggaagctaccagagctctatccccatccaggtcttgactcatggcagctgtttctcatgaagctaataaaattcgctttctaaagttacctgttatatatctcttttggtcccatcctctaaagcagaggcaacactggaacatggctagcctttcttgtagccatggctgggcgtgctagaggttgcagcatgagactttctgctgggatccttgggcccatcactgtatagacatgctaccactggtacttcctttctccctgcgggccaggcactgcccttttcaggaagctctcttaaaatacccattgccccagacctggaagatataacattcagttcccaccatctgattaaaacaacttcctcccttacagagcatacaacagagggggcacccggggaggagagcacatactgtgttccaatttcacgcttttaattctcatttgttctcacaccaacagtgtgaagtgcgtggtataatctccatttcaaaaccaaggaagcagcctcagagtggtcgagtgacacacctcacgcaggctgagtccagagcttgtgctcctcttgattcctggtttgactcagttccaggcctgatcttgcctgtctggctcagggtcaaagacagaatggtggagtgtagcctccacctgatattcaggctactcattcagtcccaaatatgtattttcctaagtgtttactatgtgccagttcctgtaacaggtgtggggacacagcagtgagtaatcaatacagacaaggttctgcccttatggagctcacactccagtggcagacaaacagaccataaataaggaaacgatgaaataagatatatacaaggtgagtgtgacttcccttctaaccccctctgctctgtcctcccctattgcgctctcaagaccagagacccaacagcagtgatctcagggcagacagccctccactccagctctgagacccttttctcaggacctctgtaggcagcagagagagaggacagaggggtaagatgaggggttgagggaaggttcttcatgatccacactttgggcttagtatttctcaggaagagctatggcccagaaacaacaggggaaactagagttcggtctgacagtccttggggttaagtctcctgtcttatggtccagaaactcctgtttctccttagttggctggaaactgctcccatcattccttctggcctctgctgaatgcagggaatgcaatccttccctgctcttgcagttgctctgacgtagaaagatccttcgggtgctggaagtctccatgaagagcttgtgtcctgtcctttcttgcagattctatttcccctcttctgctaatacctcttactttgcttgagaatcctctcctttcttattaatttcagtcttggtggttctatcaggggtgcattctggccaaggggtgggcctgtgaatcaatcctgggcaatcagacaccctctccttaaaaactggcccgtggagactgagatcactgactctgactcatccccacagctggctctgacaagatggtccatttgttcctgcttccgagatccccagggcagcctggatccctgcccttctcaagactttagcttttccttccatccggtggcctattccaggaattcctcttttgcttaaatcagttggagtttgtgtctgttgcttgtaatcaagcctttatggctgctgggctgagtgacacaagcactttaatggcctggagggacttttaatcagtgaagatgcaatcagacaagtgttttggaaagagcaccctcgagaagggtggatgacagggcagagcaggaaggacaggaagctggcagaacggaggaggctgcagccgtggtccaaccaggagctgatggcagctggggctaggggaagggctttgagggtggaaggatgggatgggttccagaggtattcctctcttaaatgcaagtgcctagattaggtagactttgcttagtattgacaactgcacatgaaagttttgcaaagggaaacaggctaaatgcaccaagaaagcttcttcagagtgaagaatcttaatgcttgtaatttaaacatttgttcctggagttttgatttggtggatgtgatggttggttttatttgtcagtttggttgggctatagcacacagttatttaatcaaacagtaatctaggtgtggctgtgaaggtattttgtagatgtgattaacatctacaatcagttgactttaagtgaaagagattacttaaataatttgggtgagctgcacctgattagttgaaaggcctcaagaacaaacactgcagtttcctggaaaagaagaaactttgcctcaagactatagccatcgactcctgcctgagtttccagcctgctagtctgccctatggatttgaagtttgccaaccccaacaattgtgtgaattaatttctaaaaataaagctatatacagcc

SEQ ID NO: 169958 - DNA, 468 bp, Homo sapiens
  Payload ID: 13461
  Gene Symbol: PTGS1
  Gene Name: prostaglandin-endoperoxide synthase 1 (prostaglandin G/H synthase and cyclooxygenase)
  ENST ID: ENST00000426608
  CDS Start-End: 1-468
agtctcttgctctggttcttgctgttcctgctcctgctcccgccgctccccgtcctgctcgcggacccaggggcgcccacgccagctggcctgtggacctggctccggaattcactgcggcccagcccctctttcacccacttcctgctcactcacgggcgctggttctgggagtttgtcaatgccaccttcatccgagagatgctcatgcgcctggtactcacagtgcgctccaaccttatccccagtccccccacctacaactcagcacatgactacatcagctgggagtctttctccaacttcttcaaaacttctggcaagatgggtcctggcttcaccaaggccttgggccatggggtagacctcggccacatttatggagacaatctggagcgtcagtatcaactgcggctctttaaggatgggaaactcaagtaccaggtgctggatggagaaatgtacccg

SEQ ID NO: 169959 - DNA, 5375 bp, Homo sapiens
  Payload ID: 13461
  Gene Symbol: PTGS1
  Gene Name: prostaglandin-endoperoxide synthase 1 (prostaglandin G/H synthase and cyclooxygenase)
  Uniprot ID: P23219
  ENST ID: ENST00000540753
  CDS Start-End: 604-2217
agtagtgagtttctcatctaggaaaccatcagcaggccaggctggactgccccatttctagccccctttcttctctgcagactgccctgtttctagccccttttcttctctacccttttctgtagagtgcgttagacccattttacagaaggggactctgagaccctttcttctctgcggggcagggtatgtggttcagacgagccgcttccatccccagttctgtccctaagccctgggtgacctcagcattgagcatcgtctctgagcctcagtttcctgtctatatctagtgccaccaggcatcagaaacggagtctcttgctctggttcttgctgttcctgctcctgctcccgccgctccccgtcctgctcgcggacccaggggcgcccacgccaggggcctctttgggaggaagccgcaggcaccaagggaaatgagttccctttctccagcctctaaccgtctgggaacccatcctgattcccattgccagtggagaaggtctcccctggtgaagacttcgggagaacatgggagatggaaatacatttaggagccgggatgcttcatctggggtttaagagatccccattgagcaaatgaggaaaccgaggctcatgaatccctgttgttactatccatgccagcaccagggcatctgtgtccgcttcggccttgaccgctaccagtgtgactgcacccgcacgggctattccggccccaactgcaccatccctggcctgtggacctggctccggaattcactgcggcccagcccctctttcacccacttcctgctcactcacgggcgctggttctgggagtttgtcaatgccaccttcatccgagagatgctcatgcgcctggtactcacagtgcgctccaaccttatccccagtccccccacctacaactcagcacatgactacatcagctgggagtctttctccaacgtgagctattacactcgtattctgccctctgtgcctaaagattgccccacacccatgggaaccaaagggaagaagcagttgccagatgcccagctcctggcccgccgcttcctgctcaggaggaagttcatacctgacccccaaggcaccaacctcatgtttgccttctttgcacaacacttcacccaccagttcttcaaaacttctggcaagatgggtcctggcttcaccaaggccttgggccatggggtagacctcggccacatttatggagacaatctggagcgtcagtatcaactgcggctctttaaggatgggaaactcaagtaccaggtgctggatggagaaatgtacccgccctcggtagaagaggcgcctgtgttgatgcactacccccgaggcatcccgccccagagccagatggctgtgggccaggaggtgtttgggctgcttcctgggctcatgctgtatgccacgctctggctacgtgagcacaaccgtgtgtgtgacctgctgaaggctgagcaccccacctggggcgatgagcagcttttccagacgacccgcctcatcctcataggggagaccatcaagattgtcatcgaggagtacgtgcagcagctgagtggctatttcctgcagctgaaatttgacccagagctgctgttcggtgtccagttccaataccgcaaccgcattgccatggagttcaaccatctctaccactggcaccccctcatgcctgactccttcaagatcggtgggggcaggaacatggaccaccacatcctgcatgtggctgtggatgtcatcagggagtctcgggagatgcggctgcagcccttcaatgagtaccgcaagaggtttggcatgaaaccctacacctccttccaggagctcgtaggagagaaggagatggcagcagagttggaggaattgtatggagacattgatgcgttggagttctaccctggactgcttcttgaaaagtgccatccaaactctatctttggggagagtatgatagagattggggctcccttttccctcaagggtctcctagggaatcccatctgttctccggagtactggaagccgagcacatttggcggcgaggtgggctttaacattgtcaagacggccacactgaagaagctggtctgcctcaacaccaagacctgtccctacgtttccttccgtgtgccggatgccagtcaggatgatgggcctgctgtggagcgaccatccacagagctctgaggggcaggaaagcagcattctggaggggagagctttgtgcttgtcattccagagtgctgaggccagggctgatggtcttaaatgctcattttctggtttggcatggtgagtgttggggttgacatttagaactttaagtctcacccattatctggaatattgtgattctgtttattcttccagaatgctgaactccttgttagcccttcagattgttaggagtggttctcatttggtctgccagaatactgggttcttagttgacaacctagaatgtcagatttctggttgatttgtaacacagtcattctaggatgtggagctactgatgaaatctgctagaaagttagggggttcttattttgcattccagaatcttgactttctgattggtgattcaaagtgttgtgttcctggctgatgatccagaacagtggctcgtatcccaaatctgtcagcatctggctgtctagaatgtggatttgattcattttcctgttcagtgagatatcatagagacggagatcctaaggtccaacaagaatgcattccctgaatctgtgcctgcactgagagggcaaggaagtggggtgttcttcttgggacccccactaagaccctggtctgaggatgtagagagaacaggtgggctgtattcacgccattggttggaagctaccagagctctatccccatccaggtcttgactcatggcagctgtttctcatgaagctaataaaattcgctttctaaagttacctgttatatatctcttttggtcccatcctctaaagcagaggcaacactggaacatggctagcctttcttgtagccatggctgggcgtgctagaggttgcagcatgagactttctgctgggatccttgggcccatcactgtatagacatgctaccactggtacttcctttctccctgcgggccaggcactgcccttttcaggaagctctcttaaaatacccattgccccagacctggaagatataacattcagttcccaccatctgattaaaacaacttcctcccttacagagcatacaacagagggggcacccggggaggagagcacatactgtgttccaatttcacgcttttaattctcatttgttctcacaccaacagtgtgaagtgcgtggtataatctccatttcaaaaccaaggaagcagcctcagagtggtcgagtgacacacctcacgcaggctgagtccagagcttgtgctcctcttgattcctggtttgactcagttccaggcctgatcttgcctgtctggctcagggtcaaagacagaatggtggagtgtagcctccacctgatattcaggctactcattcagtcccaaatatgtattttcctaagtgtttactatgtgccagttcctgtaacaggtgtggggacacagcagtgagtaatcaatacagacaaggttctgcccttatggagctcacactccagtggcagacaaacagaccataaataaggaaacgatgaaataagatatatacaaggtgagtgtgacttcccttctaaccccctctgctctgtcctcccctattgcgctctcaagaccagagacccaacagcagtgatctcagggcagacagccctccactccagctctgagacccttttctcaggacctctgtaggcagcagagagagaggacagaggggtaagatgaggggttgagggaaggttcttcatgatccacactttgggcttagtatttctcaggaagagctatggcccagaaacaacaggggaaactagagttcggtctgacagtccttggggttaagtctcctgtcttatggtccagaaactcctgtttctccttagttggctggaaactgctcccatcattccttctggcctctgctgaatgcagggaatgcaatccttccctgctcttgcagttgctctgacgtagaaagatccttcgggtgctggaagtctccatgaagagcttgtgtcctgtcctttcttgcagattctatttcccctcttctgctaatacctcttactttgcttgagaatcctctcctttcttattaatttcagtcttggtggttctatcaggggtgcattctggccaaggggtgggcctgtgaatcaatcctgggcaatcagacaccctctccttaaaaactggcccgtggagactgagatcactgactctgactcatccccacagctggctctgacaagatggtccatttgttcctgcttccgagatccccagggcagcctggatccctgcccttctcaagactttagcttttccttccatccggtggcctattccaggaattcctcttttgcttaaatcagttggagtttgtgtctgttgcttgtaatcaagcctttatggctgctgggctgagtgacacaagcactttaatggcctggagggacttttaatcagtgaagatgcaatcagacaagtgttttggaaagagcaccctcgagaagggtggatgacagggcagagcaggaaggacaggaagctggcagaacggaggaggctgcagccgtggtccaaccaggagctgatggcagctggggctaggggaagggctttgagggtggaaggatgggatgggttccagaggtattcctctcttaaatgcaagtgcctagattaggtagactttgcttagtattgacaactgcacatgaaagttttgcaaagggaaacaggctaaatgcaccaagaaagcttcttcagagtgaagaatcttaatgcttgtaatttaaacatttgttcctggagttttgatttggtggatgtgatggttggttttatttgtcagtttggttgggctatagcacacagttatttaatcaaacagtaatctaggtgtggctgtgaaggtattttgtagatgtgattaacatctacaatcagttgactttaagtgaaagagattacttaaataatttgggtgagctgcacctgattagttgaaaggcctcaagaacaaacactgcagtttcctggaaaagaagaaactttgcctcaagactatagccatcgactcctgcctgagtttccagcctgctagtctgccctatggatttgaagtttgccaaccccaacaattgtgtgaattaatttctaaaaataaagctatatacagcc

SEQ ID NO: 169960 - DNA, 5051 bp, Homo sapiens
  Payload ID: 13461
  Gene Symbol: PTGS1
  Gene Name: prostaglandin-endoperoxide synthase 1 (prostaglandin G/H synthase and cyclooxygenase)
  Uniprot ID: P23219
  ENST ID: ENST00000619306
  CDS Start-End: 1-1893
atgagccgtgagtgcgaccccggtgcccggtggggaattttcttggcctcctggtggagccttgaatgccagctcagcccctcatctctctcctctgcagggagtctcttgctctggttcttgctgttcctgctcctgctcccgccgctccccgtcctgctcgcggacccaggggcgcccacgccagtgaatccctgttgttactatccatgccagcaccagggcatctgtgtccgcttcggccttgaccgctaccagtgtgactgcacccgcacgggctattccggccccaactgcaccatccctggcctgtggacctggctccggaattcactgcggcccagcccctctttcacccacttcctgctcactcacgggcgctggttctgggagtttgtcaatgccaccttcatccgagagatgctcatgcgcctggtactcacagtgcgctccaaccttatccccagtccccccacctacaactcagcacatgactacatcagctgggagtctttctccaacgtgagctattacactcgtattctgccctctgtgcctaaagattgccccacacccatgggaaccaaagggaagaagcagttgccagatgcccagctcctggcccgccgcttcctgctcaggaggaagttcatacctgacccccaaggcaccaacctcatgtttgccttctttgcacaacacttcacccaccagttcttcaaaacttctggcaagatgggtcctggcttcaccaaggccttgggccatggggtagacctcggccacatttatggagacaatctggagcgtcagtatcaactgcggctctttaaggatgggaaactcaagtaccaggtgctggatggagaaatgtacccgccctcggtagaagaggcgcctgtgttgatgcactacccccgaggcatcccgccccagagccagatggctgtgggccaggaggtgtttgggctgcttcctgggctcatgctgtatgccacgctctggctacgtgagcacaaccgtgtgtgtgacctgctgaaggctgagcaccccacctggggcgatgagcagcttttccagacgacccgcctcatcctcataggggagaccatcaagattgtcatcgaggagtacgtgcagcagctgagtggctatttcctgcagctgaaatttgacccagagctgctgttcggtgtccagttccaataccgcaaccgcattgccatggagttcaaccatctctaccactggcaccccctcatgcctgactccttcaaggtgggctcccaggagtacagctacgagcagttcttgttcaacacctccatgttggtggactatggggttgaggccctggtggatgccttctctcgccagattgctggccggatcggtgggggcaggaacatggaccaccacatcctgcatgtggctgtggatgtcatcagggagtctcgggagatgcggctgcagcccttcaatgagtaccgcaagaggtttggcatgaaaccctacacctccttccaggagctcgtaggagagaaggagatggcagcagagttggaggaattgtatggagacattgatgcgttggagttctaccctggactgcttcttgaaaagtgccatccaaactctatctttggggagagtatgatagagattggggctcccttttccctcaagggtctcctagggaatcccatctgttctccggagtactggaagccgagcacatttggcggcgaggtgggctttaacattgtcaagacggccacactgaagaagctggtctgcctcaacaccaagacctgtccctacgtttccttccgtgtgccggatgccagtcaggatgatgggcctgctgtggagcgaccatccacagagctctgaggggcaggaaagcagcattctggaggggagagctttgtgcttgtcattccagagtgctgaggccagggctgatggtcttaaatgctcattttctggtttggcatggtgagtgttggggttgacatttagaactttaagtctcacccattatctggaatattgtgattctgtttattcttccagaatgctgaactccttgttagcccttcagattgttaggagtggttctcatttggtctgccagaatactgggttcttagttgacaacctagaatgtcagatttctggttgatttgtaacacagtcattctaggatgtggagctactgatgaaatctgctagaaagttagggggttcttattttgcattccagaatcttgactttctgattggtgattcaaagtgttgtgttcctggctgatgatccagaacagtggctcgtatcccaaatctgtcagcatctggctgtctagaatgtggatttgattcattttcctgttcagtgagatatcatagagacggagatcctaaggtccaacaagaatgcattccctgaatctgtgcctgcactgagagggcaaggaagtggggtgttcttcttgggacccccactaagaccctggtctgaggatgtagagagaacaggtgggctgtattcacgccattggttggaagctaccagagctctatccccatccaggtcttgactcatggcagctgtttctcatgaagctaataaaattcgctttctaaagttacctgttatatatctcttttggtcccatcctctaaagcagaggcaacactggaacatggctagcctttcttgtagccatggctgggcgtgctagaggttgcagcatgagactttctgctgggatccttgggcccatcactgtatagacatgctaccactggtacttcctttctccctgcgggccaggcactgcccttttcaggaagctctcttaaaatacccattgccccagacctggaagatataacattcagttcccaccatctgattaaaacaacttcctcccttacagagcatacaacagagggggcacccggggaggagagcacatactgtgttccaatttcacgcttttaattctcatttgttctcacaccaacagtgtgaagtgcgtggtataatctccatttcaaaaccaaggaagcagcctcagagtggtcgagtgacacacctcacgcaggctgagtccagagcttgtgctcctcttgattcctggtttgactcagttccaggcctgatcttgcctgtctggctcagggtcaaagacagaatggtggagtgtagcctccacctgatattcaggctactcattcagtcccaaatatgtattttcctaagtgtttactatgtgccagttcctgtaacaggtgtggggacacagcagtgagtaatcaatacagacaaggttctgcccttatggagctcacactccagtggcagacaaacagaccataaataaggaaacgatgaaataagatatatacaaggtgagtgtgacttcccttctaaccccctctgctctgtcctcccctattgcgctctcaagaccagagacccaacagcagtgatctcagggcagacagccctccactccagctctgagacccttttctcaggacctctgtaggcagcagagagagaggacagaggggtaagatgaggggttgagggaaggttcttcatgatccacactttgggcttagtatttctcaggaagagctatggcccagaaacaacaggggaaactagagttcggtctgacagtccttggggttaagtctcctgtcttatggtccagaaactcctgtttctccttagttggctggaaactgctcccatcattccttctggcctctgctgaatgcagggaatgcaatccttccctgctcttgcagttgctctgacgtagaaagatccttcgggtgctggaagtctccatgaagagcttgtgtcctgtcctttcttgcagattctatttcccctcttctgctaatacctcttactttgcttgagaatcctctcctttcttattaatttcagtcttggtggttctatcaggggtgcattctggccaaggggtgggcctgtgaatcaatcctgggcaatcagacaccctctccttaaaaactggcccgtggagactgagatcactgactctgactcatccccacagctggctctgacaagatggtccatttgttcctgcttccgagatccccagggcagcctggatccctgcccttctcaagactttagcttttccttccatccggtggcctattccaggaattcctcttttgcttaaatcagttggagtttgtgtctgttgcttgtaatcaagcctttatggctgctgggctgagtgacacaagcactttaatggcctggagggacttttaatcagtgaagatgcaatcagacaagtgttttggaaagagcaccctcgagaagggtggatgacagggcagagcaggaaggacaggaagctggcagaacggaggaggctgcagccgtggtccaaccaggagctgatggcagctggggctaggggaagggctttgagggtggaaggatgggatgggttccagaggtattcctctcttaaatgcaagtgcctagattaggtagactttgcttagtattgacaactgcacatgaaagttttgcaaagggaaacaggctaaatgcaccaagaaagcttcttcagagtgaagaatcttaatgcttgtaatttaaacatttgttcctggagttttgatttggtggatgtgatggttggttttatttgtcagtttggttgggctatagcacacagttatttaatcaaacagtaatctaggtgtggctgtgaaggtattttgtagatgtgattaacatctacaatcagttgactttaagtgaaagagattacttaaataatttgggtgagctgcacctgattagttgaaaggcctcaagaacaaacactgcagtttcctggaaaagaagaaactttgcctcaagactatagccatcgactcctgcctgagtttccagcctgctagtctgccctatggatttgaagtttgccaaccccaacaattgtgtgaattaatttctaaaaataaagctatatacagcc

SEQ ID NO: 169961 - DNA, 4894 bp, Homo sapiens
  Payload ID: 13461
  Gene Symbol: PTGS1
  Gene Name: prostaglandin-endoperoxide synthase 1 (prostaglandin G/H synthase and cyclooxygenase)
  ENST ID: ENST00000614910
  CDS Start-End: 81-1736
atgggctggagctccgggcagtgtgcgaggcgcacgcacaggagcctgcactctgcgtcccgcaccccagcagccgcgccatgagccggagtctcttgctctggttcttgctgttcctgctcctgctcccgccgctccccgtcctgctcgcggacccaggggcgcccacgccagtgaatccctgttgttactatccatgccagcaccagggcatctgtgtccgcttcggccttgaccgctaccagtgtgactgcacccgcacgggctattccggccccaactgcaccatccctggcctgtggacctggctccggaattcactgcggcccagcccctctttcacccacttcctgctcactcacgggcgctggttctgggagtttgtcaatgccaccttcatccgagagatgctcatgcgcctggtactcacagggaagaagcagttgccagatgcccagctcctggcccgccgcttcctgctcaggaggaagttcatacctgacccccaaggcaccaacctcatgtttgccttctttgcacaacacttcacccaccagttcttcaaaacttctggcaagatgggtcctggcttcaccaaggccttgggccatggggtagacctcggccacatttatggagacaatctggagcgtcagtatcaactgcggctctttaaggatgggaaactcaagtaccaggtgctggatggagaaatgtacccgccctcggtagaagaggcgcctgtgttgatgcactacccccgaggcatcccgccccagagccagatggctgtgggccaggaggtgtttgggctgcttcctgggctcatgctgtatgccacgctctggctacgtgagcacaaccgtgtgtgtgacctgctgaaggctgagcaccccacctggggcgatgagcagcttttccagacgacccgcctcatcctcataggggagaccatcaagattgtcatcgaggagtacgtgcagcagctgagtggctatttcctgcagctgaaatttgacccagagctgctgttcggtgtccagttccaataccgcaaccgcattgccatggagttcaaccatctctaccactggcaccccctcatgcctgactccttcaaggtgggctcccaggagtacagctacgagcagttcttgttcaacacctccatgttggtggactatggggttgaggccctggtggatgccttctctcgccagattgctggccggatcggtgggggcaggaacatggaccaccacatcctgcatgtggctgtggatgtcatcagggagtctcgggagatgcggctgcagcccttcaatgagtaccgcaagaggtttggcatgaaaccctacacctccttccaggagctcgtaggagagaaggagatggcagcagagttggaggaattgtatggagacattgatgcgttggagttctaccctggactgcttcttgaaaagtgccatccaaactctatctttggggagagtatgatagagattggggctcccttttccctcaagggtctcctagggaatcccatctgttctccggagtactggaagccgagcacatttggcggcgaggtgggctttaacattgtcaagacggccacactgaagaagctggtctgcctcaacaccaagacctgtccctacgtttccttccgtgtgccggatgccagtcaggatgatgggcctgctgtggagcgaccatccacagagctctgaggggcaggaaagcagcattctggaggggagagctttgtgcttgtcattccagagtgctgaggccagggctgatggtcttaaatgctcattttctggtttggcatggtgagtgttggggttgacatttagaactttaagtctcacccattatctggaatattgtgattctgtttattcttccagaatgctgaactccttgttagcccttcagattgttaggagtggttctcatttggtctgccagaatactgggttcttagttgacaacctagaatgtcagatttctggttgatttgtaacacagtcattctaggatgtggagctactgatgaaatctgctagaaagttagggggttcttattttgcattccagaatcttgactttctgattggtgattcaaagtgttgtgttcctggctgatgatccagaacagtggctcgtatcccaaatctgtcagcatctggctgtctagaatgtggatttgattcattttcctgttcagtgagatatcatagagacggagatcctaaggtccaacaagaatgcattccctgaatctgtgcctgcactgagagggcaaggaagtggggtgttcttcttgggacccccactaagaccctggtctgaggatgtagagagaacaggtgggctgtattcacgccattggttggaagctaccagagctctatccccatccaggtcttgactcatggcagctgtttctcatgaagctaataaaattcgctttctaaagttacctgttatatatctcttttggtcccatcctctaaagcagaggcaacactggaacatggctagcctttcttgtagccatggctgggcgtgctagaggttgcagcatgagactttctgctgggatccttgggcccatcactgtatagacatgctaccactggtacttcctttctccctgcgggccaggcactgcccttttcaggaagctctcttaaaatacccattgccccagacctggaagatataacattcagttcccaccatctgattaaaacaacttcctcccttacagagcatacaacagagggggcacccggggaggagagcacatactgtgttccaatttcacgcttttaattctcatttgttctcacaccaacagtgtgaagtgcgtggtataatctccatttcaaaaccaaggaagcagcctcagagtggtcgagtgacacacctcacgcaggctgagtccagagcttgtgctcctcttgattcctggtttgactcagttccaggcctgatcttgcctgtctggctcagggtcaaagacagaatggtggagtgtagcctccacctgatattcaggctactcattcagtcccaaatatgtattttcctaagtgtttactatgtgccagttcctgtaacaggtgtggggacacagcagtgagtaatcaatacagacaaggttctgcccttatggagctcacactccagtggcagacaaacagaccataaataaggaaacgatgaaataagatatatacaaggtgagtgtgacttcccttctaaccccctctgctctgtcctcccctattgcgctctcaagaccagagacccaacagcagtgatctcagggcagacagccctccactccagctctgagacccttttctcaggacctctgtaggcagcagagagagaggacagaggggtaagatgaggggttgagggaaggttcttcatgatccacactttgggcttagtatttctcaggaagagctatggcccagaaacaacaggggaaactagagttcggtctgacagtccttggggttaagtctcctgtcttatggtccagaaactcctgtttctccttagttggctggaaactgctcccatcattccttctggcctctgctgaatgcagggaatgcaatccttccctgctcttgcagttgctctgacgtagaaagatccttcgggtgctggaagtctccatgaagagcttgtgtcctgtcctttcttgcagattctatttcccctcttctgctaatacctcttactttgcttgagaatcctctcctttcttattaatttcagtcttggtggttctatcaggggtgcattctggccaaggggtgggcctgtgaatcaatcctgggcaatcagacaccctctccttaaaaactggcccgtggagactgagatcactgactctgactcatccccacagctggctctgacaagatggtccatttgttcctgcttccgagatccccagggcagcctggatccctgcccttctcaagactttagcttttccttccatccggtggcctattccaggaattcctcttttgcttaaatcagttggagtttgtgtctgttgcttgtaatcaagcctttatggctgctgggctgagtgacacaagcactttaatggcctggagggacttttaatcagtgaagatgcaatcagacaagtgttttggaaagagcaccctcgagaagggtggatgacagggcagagcaggaaggacaggaagctggcagaacggaggaggctgcagccgtggtccaaccaggagctgatggcagctggggctaggggaagggctttgagggtggaaggatgggatgggttccagaggtattcctctcttaaatgcaagtgcctagattaggtagactttgcttagtattgacaactgcacatgaaagttttgcaaagggaaacaggctaaatgcaccaagaaagcttcttcagagtgaagaatcttaatgcttgtaatttaaacatttgttcctggagttttgatttggtggatgtgatggttggttttatttgtcagtttggttgggctatagcacacagttatttaatcaaacagtaatctaggtgtggctgtgaaggtattttgtagatgtgattaacatctacaatcagttgactttaagtgaaagagattacttaaataatttgggtgagctgcacctgattagttgaaaggcctcaagaacaaacactgcagtttcctggaaaagaagaaactttgcctcaagactatagccatcgactcctgcctgagtttccagcctgctagtctgccctatggatttgaagtttgccaaccccaacaattgtgtgaattaatttctaaaaataaagctatatacagcc

SEQ ID NO: 169962 - DNA, 4514 bp, Homo sapiens
  Payload ID: 13462
  Gene Symbol: PTGS2
  Gene Name: prostaglandin-endoperoxide synthase 2 (prostaglandin G/H synthase and cyclooxygenase)
  Uniprot ID: P35354
  ENST ID: ENST00000367468
  CDS Start-End: 138-1952
gaccaattgtcatacgacttgcagtgagcgtcaggagcacgtccaggaactcctcagcagcgcctccttcagctccacagccagacgccctcagacagcaaagcctacccccgcgccgcgccctgcccgccgctgcgatgctcgcccgcgccctgctgctgtgcgcggtcctggcgctcagccatacagcaaatccttgctgttcccacccatgtcaaaaccgaggtgtatgtatgagtgtgggatttgaccagtataagtgcgattgtacccggacaggattctatggagaaaactgctcaacaccggaatttttgacaagaataaaattatttctgaaacccactccaaacacagtgcactacatacttacccacttcaagggattttggaacgttgtgaataacattcccttccttcgaaatgcaattatgagttatgtgttgacatccagatcacatttgattgacagtccaccaacttacaatgctgactatggctacaaaagctgggaagccttctctaacctctcctattatactagagcccttcctcctgtgcctgatgattgcccgactcccttgggtgtcaaaggtaaaaagcagcttcctgattcaaatgagattgtggaaaaattgcttctaagaagaaagttcatccctgatccccagggctcaaacatgatgtttgcattctttgcccagcacttcacgcatcagtttttcaagacagatcataagcgagggccagctttcaccaacgggctgggccatggggtggacttaaatcatatttacggtgaaactctggctagacagcgtaaactgcgccttttcaaggatggaaaaatgaaatatcagataattgatggagagatgtatcctcccacagtcaaagatactcaggcagagatgatctaccctcctcaagtccctgagcatctacggtttgctgtggggcaggaggtctttggtctggtgcctggtctgatgatgtatgccacaatctggctgcgggaacacaacagagtatgcgatgtgcttaaacaggagcatcctgaatggggtgatgagcagttgttccagacaagcaggctaatactgataggagagactattaagattgtgattgaagattatgtgcaacacttgagtggctatcacttcaaactgaaatttgacccagaactacttttcaacaaacaattccagtaccaaaatcgtattgctgctgaatttaacaccctctatcactggcatccccttctgcctgacacctttcaaattcatgaccagaaatacaactatcaacagtttatctacaacaactctatattgctggaacatggaattacccagtttgttgaatcattcaccaggcaaattgctggcagggttgctggtggtaggaatgttccacccgcagtacagaaagtatcacaggcttccattgaccagagcaggcagatgaaataccagtcttttaatgagtaccgcaaacgctttatgctgaagccctatgaatcatttgaagaacttacaggagaaaaggaaatgtctgcagagttggaagcactctatggtgacatcgatgctgtggagctgtatcctgcccttctggtagaaaagcctcggccagatgccatctttggtgaaaccatggtagaagttggagcaccattctccttgaaaggacttatgggtaatgttatatgttctcctgcctactggaagccaagcacttttggtggagaagtgggttttcaaatcatcaacactgcctcaattcagtctctcatctgcaataacgtgaagggctgtccctttacttcattcagtgttccagatccagagctcattaaaacagtcaccatcaatgcaagttcttcccgctccggactagatgatatcaatcccacagtactactaaaagaacgttcgactgaactgtagaagtctaatgatcatatttatttatttatatgaaccatgtctattaatttaattatttaataatatttatattaaactccttatgttacttaacatcttctgtaacagaagtcagtactcctgttgcggagaaaggagtcatacttgtgaagacttttatgtcactactctaaagattttgctgttgctgttaagtttggaaaacagtttttattctgttttataaaccagagagaaatgagttttgacgtctttttacttgaatttcaacttatattataagaacgaaagtaaagatgtttgaatacttaaacactgtcacaagatggcaaaatgctgaaagtttttacactgtcgatgtttccaatgcatcttccatgatgcattagaagtaactaatgtttgaaattttaaagtacttttggttatttttctgtcatcaaacaaaaacaggtatcagtgcattattaaatgaatatttaaattagacattaccagtaatttcatgtctactttttaaaatcagcaatgaaacaataatttgaaatttctaaattcatagggtagaatcacctgtaaaagcttgtttgatttcttaaagttattaaacttgtacatataccaaaaagaagctgtcttggatttaaatctgtaaaatcagtagaaattttactacaattgcttgttaaaatattttataagtgatgttcctttttcaccaagagtataaacctttttagtgtgactgttaaaacttccttttaaatcaaaatgccaaatttattaaggtggtggagccactgcagtgttatcttaaaataagaatattttgttgagatattccagaatttgtttatatggctggtaacatgtaaaatctatatcagcaaaagggtctacctttaaaataagcaataacaaagaagaaaaccaaattattgttcaaatttaggtttaaacttttgaagcaaacttttttttatccttgtgcactgcaggcctggtactcagattttgctatgaggttaatgaagtaccaagctgtgcttgaataatgatatgttttctcagattttctgttgtacagtttaatttagcagtccatatcacattgcaaaagtagcaatgacctcataaaatacctcttcaaaatgcttaaattcatttcacacattaattttatctcagtcttgaagccaattcagtaggtgcattggaatcaagcctggctacctgcatgctgttccttttcttttcttcttttagccattttgctaagagacacagtcttctcatcacttcgtttctcctattttgttttactagttttaagatcagagttcactttctttggactctgcctatattttcttacctgaacttttgcaagttttcaggtaaacctcagctcaggactgctatttagctcctcttaagaagattaaaagagaaaaaaaaaggcccttttaaaaatagtatacacttattttaagtgaaaagcagagaattttatttatagctaattttagctatctgtaaccaagatggatgcaaagaggctagtgcctcagagagaactgtacggggtttgtgactggaaaaagttacgttcccattctaattaatgccctttcttatttaaaaacaaaaccaaatgatatctaagtagttctcagcaataataataatgacgataatacttcttttccacatctcattgtcactgacatttaatggtactgtatattacttaatttattgaagattattatttatgtcttattaggacactatggttataaactgtgtttaagcctacaatcattgatttttttttgttatgtcacaatcagtatattttctttggggttacctctctgaatattatgtaaacaatccaaagaaatgattgtattaagatttgtgaataaatttttagaaatctgattggcatattgagatatttaaggttgaatgtttgtccttaggataggcctatgtgctagcccacaaagaatattgtctcattagcctgaatgtgccataagactgaccttttaaaatgttttgagggatctgtggatgcttcgttaatttgttcagccacaatttattgagaaaatattctgtgtcaagcactgtgggttttaatatttttaaatcaaacgctgattacagataatagtatttatataaataattgaaaaaaattttcttttgggaagagggagaaaatgaaataaatatcattaaagataactcaggagaatcttctttacaattttacgtttagaatgtttaaggttaagaaagaaatagtcaatatgcttgtataaaacactgttcactgttttttttaaaaaaaaaacttgatttgttattaacattgatctgctgacaaaacctgggaatttgggttgtgtatgcgaatgtttcagtgcctcagacaaatgtgtatttaacttatgtaaaagataagtctggaaataaatgtctgtttatttttgtactatttaaaaattgacagatcttttctgaagataaactttgattgtttctata

SEQ ID NO: 169963 - DNA, 1705 bp, Homo sapiens
  Payload ID: 13462
  Gene Symbol: PTGS2
  Gene Name: prostaglandin-endoperoxide synthase 2 (prostaglandin G/H synthase and cyclooxygenase)
  ENST ID: ENST00000559627
  CDS Start-End: 1-492
atgctcgcccgcgccctgctgctgtgcgcggtcctggcgctcagccatacagcaaatccttgctgttcccacccatgtcaaaaccgaggtgtatgtatgagtgtgggatttgaccagtataagtgcgattgtacccggacaggattctatggagaaaactgctcaacaccggaatttttgacaagaataaaattatttctgaaacccactccaaacacagtgcactacatacttacccacttcaagggattttggaacgttgtgaataacattcccttccttcgaaatgcaattatgagttatgtgttgacatccagatcacatttgattgacagtccaccaacttacaatgctgactatggctacaaaagctgggaagccttctctaacctctcctattatactagagcccttcctcctgtgcctgatgattgcccgactcccttgggtgtcaaagcacttcacgcatcagtttttcaagacagatcataagcgagggccagctttcaccaacgggctgggccatggggtggacttaaatcatatttacggtgaaactctggctagacagcgtaaactgcgccttttcaaggatggaaaaatgaaatatcagataattgatggagagatgtatcctcccacagtcaaagatactcaggcagagatgatctaccctcctcaagtccctgagcatctacggtttgctgtggggcaggaggtctttggtctggtgcctggtctgatgatgtatgccacaatctggctgcgggaacacaacagagtatgcgatgtgcttaaacaggagcatcctgaatggggtgatgagcagttgttccagacaagcaggctaatactgataggagagactattaagattgtgattgaagattatgtgcaacacttgagtggctatcacttcaaactgaaatttgacccagaactacttttcaacaaacaattccagtaccaaaatcgtattgctgctgaatttaacaccctctatcactggcatccccttctgcctgacacctttcaaattcatgaccagaaatacaactatcaacagtttatctacaacaactctatattgctggaacatggaattacccagtttgttgaatcattcaccaggcaaattgctggcagggttgctggtggtaggaatgttccacccgcagtacagaaagtatcacaggcttccattgaccagagcaggcagatgaaataccagtcttttaatgagtaccgcaaacgctttatgctgaagccctatgaatcatttgaagaacttacaggagaaaaggaaatgtctgcagagttggaagcactctatggtgacatcgatgctgtggagctgtatcctgcccttctggtagaaaagcctcggccagatgccatctttggtgaaaccatggtagaagttggagcaccattctccttgaaaggacttatgggtaatgttatatgttctcctgcctactggaagccaagcacttttggtggagaagtgggttttcaaatcatcaacactgcctcaattcagtctctcatctgcaataacgtgaagggctgtccctttacttcattcagtgttccagatccagagctcattaaaacagtcaccatcaatgcaagttcttcccgctccggactagatgatatcaatcccacagtactactaaaagaacgttcgactgaactgtag

SEQ ID NO: 169964 - DNA, 2506 bp, Homo sapiens
  Payload ID: 13463
  Gene Symbol: PBOV1
  Gene Name: prostate and breast cancer overexpressed 1
  Uniprot ID: Q9GZY1
  ENST ID: ENST00000527246
  CDS Start-End: 97-504
gaccttaaatatatcgaggtggctaattgatgtataataatttacaaaattattcttctatgctacagagctacaattcaatttacagtagtaaatatgagggccttcttaaggaaccagaaatatgaggatatgcacaatattattcacattttacagatcagaaaattgaggcacagattaagtaacttcccaaggctaccaggcattctagctccagaaactgtgctcttaccattctgctacaaggtatttcgaaaaaaagaaaaagtaaaaagaagtcaaaaggcaacagagttcattgattattccatagaacagtcacaccatgcaattctcacacccttgcagacacacttgaccatgaaaggttcctcaatgaaatgttcctcattatcttcagaagccatattattcacattgactttgcagttaactcagaccctaggtctggaatgctgtcttctctacttatccaaaactatacatccacagatcatataaactctcagccctgctgcaaagcctttccagaaaaataaaaatggttgaaaaggcaattctgctaccaatgactgtttaagcccagccaagtaactgaaccattccaacttcaatttacttatgaaaagaatttgatgatgtaggaggttatttcaattctaaaatacaaacccatgttgatctttctcaatcttgaactcatagattattatctattatctcaatttagtttgttatttatcctagtgggccattaaaaactaccacatgtgtttctgtctctccattagtcaataactaaactaacgagcaattagtaagccatgtgccagatgctccgctaggcaccagagggataaaaacaatacttatagtataccactaattttcgcttagtaactagtgaaatgttcaagtcatgcctgagtcaagagttgaggagacattacaatgtgtaatggaaaccaaggaaagtgaaactttggataagtggggactagtgtatttatatatttaattgatttctgactctatcattggcctccaaacacagattgtgtttttctttggttttgttttcttcactatgggatcttctgtgcccagcacagtgcctgacacatagaaaacaatcaaatatttgctgaataaatgattaaaaaatcagagaactttcccattctgtttggatctatagaacatccagagtaagtgatgagggcctctgcatttatatgcgcttaaattaagattatgtgagaaaagtttaaagacacttagtagagtgattttgaaatatagtaaacacttggaaatggtggtgctttaaaaagatattaatagataatatgaaaatctccatctcaaaaataatgcataaactatttaaaggaaaatcacatctccaggctttcaatgtttgttcattactttttcatatatttttaccatctgctgaaggcagtcatatcaaagggtaaagaaagatgggaggaaaactcagtaagaattatattagtctgtttgcaaagtagaaaaagattctcatcactcaaccttatgagcaggaagagggaaggctgtttgagaaccatttacttagcagaaccacatattttagacacttccctgcattaactgcacaaacaatatgtttgcaaacttgttagatcaacctccaacaacgacacattcaggagttaaatatttttcatcaaacattggatttttccttaacgctagagattgctacaaatcttctgaagggtctcaatggcttcaggctaagaagagatttctccctgttataagcagcaagacaaattagccatttcactctcaaacttcactaatgatcacattctttccaaaaggaactctagaagaccaaatgccccgagttaagaacatcaaaactaaccatctgaagaaacttcccaagtgtaagactctgccattaaaacattaccgagaggggactcaaacagtctttcttcctttgtcgtgtttcttgctcccagaccaaggcactgacgacagtactgatacataatttaaaagcacactcccttccactttgtaataccagaactctaattggacaccctgaagcttaggactaccagccatacaaatagtaaactctgtccacgattcactcatctgtgtattttctatagatgtttactaggcgtttgttatataaaaataccccggccaggcacggtggctcacgcctgtaatcccagcactttgggaggtgggtggatcacctgaggtcgggagttcgagaccagcctgaccagcatggtggaacccccatctctactaaaaacacaaaaaattagccgggcgtggtggcacatgcctgtaatcccagctactcaggaggctgaggcggagaattgcttgaacccggaaggtggaggttgcggtgagctgagattgcactattgcactccagcctgggcaacaggagtaaaactcccccccacccaaaaaa

SEQ ID NO: 169965 - DNA, 1527 bp, Homo sapiens
  Payload ID: 13464
  Gene Symbol: PATE1
  Gene Name: prostate and testis expressed 1
  Uniprot ID: Q8WXA2
  ENST ID: ENST00000305738
  CDS Start-End: 13-393
cctctttccaaaatggacaagtccctcttgctggaactccccatcctgctctgctgctttagggcattatctggatcactttcaatgagaaatgatgcagtcaatgaaatagttgctgtgaaaaacaattttcctgtgatagaaattgttcagtgtaggatgtgccacctccagttcccaggagaaaagtgctccagaggaagaggaatatgcacagcaacaacagaagaggcctgcatggttggaaggatgttcaaaagggatggtaatccctggttaaccttcatgggctgcctaaagaactgtgctgatgtgaaaggcataaggtggagtgtctatttggtgaacttcaggtgctgcaggagccatgacctgtgcaatgaagacctttagaagttaatggttcttctgtgactccaatttctgggtgaggttgttgcctcagcctcttcacaatgactttctaaaaaaaatcacacacacacacacacacactacagaagaggattgcaaacacatggctccatcttctgcacacgaaaggaaagtccctctccttttctacagtctctgtcacgccccttaaaataagtaaataaataaccttgagagaaagaacaagatcaatatatcctgcaggttgctacaaacccttgtgctttcactgtatagccagttcattcagaaaaggaggaaagggtagtttaatttcaaaaaagaatcccttcctctttcctctgctgctttccttccttctgtggcagggtattttaatatatttttcaaatttttttcctttctgtgttatccttcttatcccactccaaagaaagcacataactgtggcctgaagggatggggagtagcaacataaaaagaagtggctcaagtcttcttggagtttgttcatgaatgctgatcccagggtgaggagaagattgggacatagaaaggaaactgcatcagaaacatgaacagagaaagattgtctgccttctagaatcagatctgtttggggctgggggttggagaataaaagcaggagaagtctatgggattctagaaatagtacctgcatccagcttccctgccaaactcacaaggagacatcaacctctagacagggaacagcttcaggatacttccaggagacagagccaccagcagcaaaacaaatattcccatgcctggagcatggcatagaggaagctgagaaatgtggggtctgaggaagccatttgagtctggccactagacatctcatcagccacttgtgtgaagagatgccccatgaccccagatgcctctcccacccttacctccatctcacacacttgagcttgccactctgtataattctaacatcctggagaaaaatggcagtttgaccgaacctgttcacaagggtagaggctgatttctaacgaaacttgtagaatgaagcctggaaagagtgatgaattatattatattatataaaaataataataaaaatataaagaaagctacctttcttctatacccaaa

SEQ ID NO: 169966 - DNA, 457 bp, Homo sapiens
  Payload ID: 13464
  Gene Symbol: PATE1
  Gene Name: prostate and testis expressed 1
  Uniprot ID: Q8WXA2
  ENST ID: ENST00000437148
  CDS Start-End: 9-353
tttccaaaatggacaagtccctcttgctggaactccccatcctgctctgctgctttagggcattatctggatcactttcaatgagaaatgatgcagtgatagaaattgttcagtgtaggatgtgccacctccagttcccaggagaaaagtgctccagaggaagaggaatatgcacagcaacaacagaagaggcctgcatggttggaaggatgttcaaaagggatggtaatccctggttaaccttcatgggctgcctaaagaactgtgctgatgtgaaaggcataaggtggagtgtctatttggtgaacttcaggtgctgcaggagccatgacctgtgcaatgaagacctttagaagttaatggttcttctgtgactccaatttctgggtgaggttgttgcctcagcctcttcacaatgactttctaaaaaaaatcacacacacacacacacacacta

SEQ ID NO: 169967 - DNA, 1657 bp, Homo sapiens
  Payload ID: 13465
  Gene Symbol: PATE2
  Gene Name: prostate and testis expressed 2
  Uniprot ID: Q6UY27
  ENST ID: ENST00000358524
  CDS Start-End: 47-388
caacttgctccttccacaggaagctgcacctgacagaagctccaggatgcttgttctctttctcctgggcacagtctttctgctctgcccatattggggtgaacttcatgaccctataaaagcgactgaaataatgtgttatgaatgtaaaaaatatcatcttgggttatgctatggtgtcatgacatcctgctccctgaagcataaacagtcctgtgcagttgagaacttttacatccttacaaggaaagggcagagcatgtatcattattcaaaactgtcgtgtatgaccagctgtgaggacatcaacttcctggggttcacgaagagggtagagctcatctgttgtgatcatagtaactactgcaacctccctgagggagtttagttctacgtctctcctggattttgggttctttttcaaccactacgctctttttctcttccctgaacctgaattttgctctcctcttctatgcattggtagagagtgagaaagccagctcatagtgaaaagacaagcaggcataaggagacgcagtgtggacagcggagcctattgatgatggagcactagactcactctttgcacatccctgtcgctaacaggtgggaggggttttgctctccttacgtgatactgccatgaataagctcagacttggtcatttattatctcctgtatgaaaatgtgaacacttgggccataataatctccaatttgtactgagaattctgtgactatcctctatcctcatctacacacacactcctctccgttggaattctctttggattagccctgacactttctggcactgtccttttctgcccgtgggttctggagagggctaaccccagcttcccagtgtgttggcagcatgggccaagtctttctctgatagagctcttgggggaacctcagggcagaaaaaaaaaaactgaacagacatagggatgagcatcaaagaaaacttcagggggcatttcaactggtaaaaactaagatctgagaaataacttgctgtgggtggaattggcttgaattatcattgccctggctggccaggcagccttgggcacatggttgaactaggtgattggattgggaacagagtgtttttttaaggatggctagtcaggttcttctcatgggactgagcaaacaaaatgctgataatgtggcaggtggtgtagtagttgaagataataggatgtaaatagataccatgaggtagtgttcaagtaacagagtgccctgtgtaagaggaagttatgagtttgcagaaagtgtgagaaaggtagcatatatgggtaacagtggtgggaagagaagaaggaagacacagaaacagataggaagagaaactgagtagcattgatgttggagcacacctgtggccaaggtggcacattttccttggatacacactaaccctggtgtttctgtccttataaggctgactgcaccctagatgacgggttgatgggtgcagcaaaccaccatggcacatgtatacctatgtaacaaacctgcatgctgcactttctttcatgtatcccagaacttaaagtaaaataaaaaaataaataaataaataaaggccagaaaaattggccaaaaaatctgaatagaaaaagatatacagatagtaaa

SEQ ID NO: 169968 - DNA, 738 bp, Homo sapiens
  Payload ID: 13465
  Gene Symbol: PATE2
  Gene Name: prostate and testis expressed 2
  Uniprot ID: Q6UY27
  ENST ID: ENST00000436890
  CDS Start-End: 38-250
ccttccacaggaagctgcacctgacagaagctccaggatgcttgttctctttctcctgggcacagtctttctgctctgcccatattggggtgaacttcatgaccctataaaagggcagagcatgtatcattattcaaaactgtcgtgtatgaccagctgtgaggacatcaacttcctggggttcacgaagagggtagagctcatctgttgtgatcatagtaactactgcaacctccctgagggagtttagttctacgtctctcctggattttgggttctttttcaaccactacgctctttttctcttccctgaacctgaattttgctctcctcttctatgcattggtagagagtgagaaagccagctcatagtgaaaagacaagcaggcataaggagacgcagtgtggacagcggagcctattgatgatggagcactagactcactctttgcacatccctgtcgctaacaggtgggaggggttttgctctccttacgtgatactgccatgaataagctcagacttggtcatttattatctcctgtatgaaaatgtgaacacttgggccataataatctccaatttgtactgagaattctgtgactatcctctatcctcatctacacacacactcctctccgttggaattctctttggattagccctgacactttctggcactgtccttttctgcccgtgggttctggagagggctaaccccagcttcccagtgtgttg

SEQ ID NO: 169969 - DNA, 1336 bp, Homo sapiens
  Payload ID: 13466
  Gene Symbol: PATE3
  Gene Name: prostate and testis expressed 3
  Uniprot ID: B3GLJ2
  ENST ID: ENST00000445202
  CDS Start-End: 42-338
ccctagcttctttttcctgcacaagggatttccgggtcaggatgaacaaacacttcttgttcctcttcctcctttactgcctcattgtggcagtgacatcacttcagtgcataacatgccaccttcgcacacggacagaccgctgtagaagaggctttggtgtctgtactgctcagaagggcgaggcatgcatgctcttaaggatttaccagcgcaatactctccagatatcatacatggtgtgtcagaaattctgcagagacatgacatttgatctcaggaatcggacttatgttcatacatgctgcaactacaattactgtaactttaaactctaagatatttgccctcctgaggtctcgctttggaatgtccccaatgttgctcatccttcacactctgctggcccttgcttcccttccgtgtctgtcctgacaatacccctgccctcgcattaacctaagaagactaaactagtgtgatcctttctggtgtcttcagcttggcttctccctcagtcagagaatagtggttctgaacaatggatttcttctattattgggattattggcatggccatattccaagaaacctgccccaagagttcctgtacagtaaaatttaaagcaggaacattctagaatcttaatttgcttaactagttcaggtacactagaaagccttcagctaaaaattcacaatatttttatctaaaattcccatgtatccggagaatgactaagcagaaatagcaattaaatggatgatggatactgaagatttttctctacggacaccaagttatttctaccagcaggcagtgcccacttcaaactcaaccattgtgattttcttggcatttacaaactacatccttacactgttattaggagatagcaaacaaggatcttcccggcctctgtgacattcaccgagctctcacacagccactgctactcctatcgagatgtacattcaaggtacatcagaactctcatttcttccccttcctttcctaaaccttctctcttcctttccccctttgccattcacctttactatcacctcccacctccattatcacctccccattgccacacaacctctccctgtagagaggcaggaggtccttcgaagctttgccccatgcgtcagatggcacctgaggcatataacctagggtgggctgcctttcaggatccgtcatcaaagggagtcaaacatagtcaagataccatctaccctgtacagctttcttgagacttgggggcctgggtcaaagagatttgtctgtcccttgctgcccatctttaagtaataaaccgacttcacataa

SEQ ID NO: 169970 - DNA, 1983 bp, Homo sapiens
  Payload ID: 13467
  Gene Symbol: PATE4
  Gene Name: prostate and testis expressed 4
  Uniprot ID: P0C8F1
  ENST ID: ENST00000457514
  CDS Start-End: 45-341
aatacctcactcagcacaccgtctgtcacccaaacaagcatccaatgaggaaaatgaacacactgctccttgtgagcttatcttttctctacctcaaagaggttatgggtctgaagtgtaatacctgcatatacacagaaggatggaagtgtatggcaggccgaggcacttgcattgcaaaagaaaatgagttatgttcaacaacagcctatttcaggggagacaaacatatgtactcaacacatatgtgtaagtataagtgccgggaagaggagtcctccaaaagaggcctgttgagagtgacactgtgctgtgacagaaacttctgtaatgtcttctaatggagcttaggaacttgcagaggatcatctgatcaagatccagaatcaagaccaaccaacatgaactgttttatttcccacaccaaattccacactggcctaagatcccagagagagctgcaggggctgtcctcattgcaatgaaggggctccccacaccccacctccaccactagattcctaaaatcatgagcattgaaacaaaatcctccatgagctatgcttattcttttgtcttctactcctgatttctgatttctatcccttgtaggctaaataatggacccccaaatatttctacatcctaatctctggaacctgtgaatgttaccttacatggcaaaagggactttgaaaatgtgattaaggatcttgagaaggggaggttatcttgcattatctgggggggccctaagtggaatcaaaatgcaaaatgcaataagatgcaagtaaagggagatatgacaaagaagaggaaaagatgatgtgataatggaagcagagattggagccatgtgctttgaagatggaggaataggccataagctaaaactaggaggccactagaagctgaaaaagtcaaggaaataggttctcccctcagagcctccagaaaccagccctgctgacaccttgatttaagccctgtaagactcattttggatgtctggcctccagaactctaagcgggtgtggttttcagccacaaagtgtgtattgttttaagccactaagtttgcaataatttattatagcagcaatgggaaactaatacaatccaaataaacttctaggaattcaaatcattggtaagcctgagtacccaggggccagtctaggtgacaacagtatccaccgctcagggcttacagtgacctgcaggaagagaggaataacagagcacatgctatgaataaatgtggagatcaatttgtggattttaaacttcatgacatgctgcagataatcctttaggtgtatctgtggtaaatggtgccttgctatgttctgaagcaatcaaacatgatgtcctaatagctcaatttatcagttcctcattagcttgtgtactcactgaaattcttttagcagttaatgtccttgtattagtctgttttcatgctgctgataaggacatacccacgactgggcaatttacgaaagaaaggggtttatcggacttacagttccacgtggctggggaagcctcacaatcatggcagaaggtaaaaggcatgtctcacatagtgacagacaagagaagagagattgtgcaggaaaactctcccttataataaccatcagatcttgtgagacttactcactatcacgagaatagcacaggaaaaacctgcccccatgattcaattacctcccaccggtccctcccacaacacgtgggaattgaagatgaaatttgggtggggacacagccaaaccatatcagtccccttcttaaaactctcctctctagctcctatgactgtacatttgtagttctcccacctctctgaagaatcctctgtgagggtctctggggactttgttttgatttgttattgtttttatattcagtctttaacctatgtgaagccacctttgtaatactgccttaagtaaagatccagtattatttttctcc

SEQ ID NO: 169971 - DNA, 897 bp, Homo sapiens
  Payload ID: 13467
  Gene Symbol: PATE4
  Gene Name: prostate and testis expressed 4
  ENST ID: ENST00000534411
  CDS Start-End: 45-224
aatacctcactcagcacaccgtctgtcacccaaacaagcatccaatgaggaaaatgaacacactgctccttgtgagcttatcttttctctacctcaaagagggagacaaacatatgtactcaacacatatgtgtaagtataagtgccgggaagaggagtcctccaaaagaggcctgttgagagtgacactgtgctgtgacagaaacttctgtaatgtcttctaatggagcttaggaacttgcagaggatcatctgatcaagatccagaatcaagaccaaccaacatgaactgttttatttcccacaccaaattccacactggcctaagatcccagagagagctgcaggggctgtcctcattgcaatgaaggggctccccacaccccacctccaccactagattcctaaaatcatgagcattgaaacaaaatcctccatgagctatgcttattcttttgtcttctactcctgatttctgatttctatcccttgtaggctaaataatggacccccaaatatttctacatcctaatctctggaacctgtgaatgttaccttacatggcaaaagggactttgaaaatgtgattaaggatcttgagaaggggaggttatcttgcattatctgggggggccctaagtggaatcaaaatgcaaaatgcaataagatgcaagtaaagggagatatgacaaagaagaggaaaagatgatgtgataatggaagcagagattggagccatgtgctttgaagatggaggaataggccataagctaaaactaggaggccactagaagctgaaaaagtcaaggaaataggttctcccctcagagcctccagaaaccagccctgctgacaccttgatttaagccctgtaagactcattttggatgtctggcc

SEQ ID NO: 169972 - DNA, 5011 bp, Homo sapiens
  Payload ID: 13468
  Gene Symbol: PARM1
  Gene Name: prostate androgen-regulated mucin-like protein 1
  Uniprot ID: Q6UWI2
  ENST ID: ENST00000307428
  CDS Start-End: 213-1145
agaagagcgcggagcaccggagggcacgcagctgacggagctgcgctgcgttcgcctcgtttgcctcgcgccctccactggagctgttcgcgcctcccggctcccaccgcagcccacccggcagaggagtcgctaccagcgcccagtgcgctctgtcagtccgcaaactccttgccgcccgccccgggctgggcaccaaataccaggctaccatggtctacaagactctcttcgctctttgcatcttaactgcaggatggagggtacagagtctgcctacatcagctcctttgtctgtttctcttccgacaaacattgtaccaccgaccaccatctggactagctctccacaaaacactgatgcagacactgcctccccatccaacggcactcacaacaactcggtgctcccagttacagcatcagccccaacatctctgcttcctaagaacatttccatagagtccagagaagaggagatcaccagcccaggttcgaattgggaaggcacaaacacagacccctcaccttctgggttctcgtcaacaagcggtggagtccacttaacaaccacgttggaggaacacagctcgggcactcctgaagcaggcgtggcagctacactgtcgcagtccgctgctgagcctcccacactcatctcccctcaagctccagcctcatcaccctcatccctatcaacctcaccacctgaggtcttttctgcctccgttactaccaaccatagctccactgtgaccagcacccaacccactggagctccaactgcaccagagtccccgacagaggagtccagctctgaccacacacccacttcacatgccacagctgagccagtaccccaggagaaaacacccccaacaactgtgtcaggcaaagtgatgtgtgagctcatagacatggagaccaccaccacctttcccagggtgatcatgcaggaagtagaacatgcattaagttcaggcagcatcgccgccattaccgtgacagtcattgccgtggtgctgctggtgtttggagttgcagcctacctaaaaatcaggcattcctcctatggaagacttttggacgaccatgactacgggtcctggggaaactacaacaaccctctgtacgatgactcctaacaatggaatatggcctgggatgaggattaactgttctttatttataagtgcttatccagtagaattaataagtacctgatgcgcattgaacgacaatcttaagccctgttttgttggtatggttgtttttgttttcctccctctcctctggctgctacaacttcccctttctggtacaagaagaaccattctttaaaggtgagtggaggctgatttgcagctgaagtgggccagccttgcaccagccaggccagaccaccatggtgaaggcttctttccccactgcaggacccactttgagaaggaccgaggaggaggatttgggttgttttgttaggggttactttcaggggaacatttcatttgtgttatttcttaaacttctatttaggaaattacattaagtattaatgaggggaaaggaaatgagctctacgaggatttcaccctgcatgggagagagcagggttttctcagattcctttttaatctctatttatctggttgtttctgacaggatgctgcctgcttggctctacaagctggaaagcagcttcttagctgcctaattaatgaaagatgaaaataggaagtgccctggagggggccagcaggtcacggggcagaatctctcaggttgctgtgggatctcagtgtgcccctacctgttctcccctccaggccacctgtctctgtaaaggatgtctgctctgttcaaaaggcagctgggatcccagcccacaagtgatcagcagagttgcatttccaaagaaaaaggctatgagatgagctgagttatagagagaaagggagaggcatgtacggtgtggggaagtggaagagaagctggcgggggagaaggaggctaacctgcactgagtacttcattaggacaagtgagaatcagctattgataatggccagagatatccacagcttggaggagcccagagaccgtttgctttatacccacacagcaactggtccactgctttactgtctgttggataatggctgtaaaatgtttaaaaacaaaacaaaacaaaaaagaggcactagtctatctgcaattactcaacgaggcattttcataggaaacagactatgattaatccatttattcttcccacacacttaccttactaagtctttgctttaataaatgagcaaccctgggtatagtcttaaaattctgcacaataaattttgagaaagaattgttcctctttgtaggtatctgtgtattgcaatcattctcaaccaggaggtgattttgccccctgactccaccccagggacattcaaaaatgtctggtgacagttttcattgtcatgacttgggggtgctactagaagccaggaatgctgccaaacattctaccatgcacagcacaacctacaacagcaaagaatcatccaccccaaaatatcagtagtgccgagattgagaaaccctgatttatcacaatgcccactgtgacagaacaagacactcacagattagtgatacgttttatttttaacaaaatgaaatgatgtgttaagtttttatttccaaagtgtttagtttattggctgatgggttgttcttggtatgcatggtgacctttttatttctgtgtgcttcctagagagctttatttcatggcgacaactctgtcttcttgtaacagctgatattagcaagcagcatcttatgtcctgatttcatatagtagaaaacaaacattgggtccgacttcaaaatgtgttgtattgtcctacagtgtcataaagaacctgaaaatgaacttttgtttctaaagttggaccttgctgccatgactgtttagtttacagaaacttgaccccggctcatcctgtctctggctgtggcccggcaaagcactgaaaacccctctggtctcagagacagtaggggcagtgccactttctacaacctgccaacccacacactggagtaattctgaaaaaaattattcctaaactctctaagtgtggacggagaatgagcaagccccagaagtattttacaaccagagtgggtaatgaggagggggcttactggaatcgtcatatctctgaatattgaaaacaacaactaaaaaagtggaccttctcagaaaaaaagggcagcaaatgaccaagggcgccccttctggccgtgcttggcttgagtaactgtctctctttccccacccccatcacagggctttcagtttggcaaaggaaaagcagataaaaacagaacattccatatgtttctttctccatcggccaaaaacattttgacacaatgtttgtgaaacacctttggagaggtgcacttctgaatgctgcctctgccgtaaatcctggggcaagggatcagcctcttcccaggaaccatcgccttctataaaccgtgaactcaagcaggcattttttttttcttaccgaaaggctgctattgtgcaagggcacataatgggtctgttgctcttattggcttccaaatgtgcatggcaaagagagagatgtgggcctagagcagatatattcagcaaggtgacagcttcccataacaattctaacacttcttatcttatgtgagaataaaatatttaagggttgaaccttattttgccaaatgtatcttttctgcttttgaattgggcagaagattttagcaactatattctacaaatgttacttataacacacacacacacatctgaaatatatgccgaaaattgacgtctttgacctcagggagagcacctgtccaggtctgcctaaaggaaatggctccagtgggtctaaacaaccacatcctatccatggataggtctagtcataacactttagagagaatgtcagagcaggagggaggcaagccgcctcttctcggccatcgactgcagatgatgaaagagcgggattcaactttgttttcttttcctgtggccccagtgaaacctcctgccctccctgcacgtctgtgtcttcatttctaaaatgggggtgatgctttcatattgacctcaccccatactacctcacagatgtgttgtgaggattaataaaattatgtctatggtattttcagtttctggagaaaaatacttatagacagtttaactattacatagatatataagtgatctcagtttcttgtttgctgtgatactaatgtgttgttttaacttattccataaaatgacagttgtgtcctagccacatcagacagctatctaagctctggactacccctttgtgcagctgaatcactgcagggttgaccatgcctggtgccacagccatggtttccatttctagatgaaaggatggcctaggacataggtctcaaagactcttggatcagaatcaggagattagggaaaacaggatggatacctgagcactaacagcagtagacgtagacctctgtcctttaccatctgaggtcttctggattctttgtggggttaattttgatttgatgtcatctgtttgcccttcatcttgcttgcaagtgtgcatggttcaatccctcacatccaggaaatgaattttgcaattgggccagatgctaatttgcacgttgattcaccttctttgcctttaagccttttttttcttttttttttttttggcaaatgaatgtaccatttcaactttgattttaatagtgctagttgatattggtaataatgctaaccaagagatcaatgccagatttttctcttggggtaagttagctgaagtcatttaaagatggaaaggtgggaaaattctttgatatttgatgtcattgtatccacatttgttgtaagacatattgcataccaattataattatatcaattaaagttgataaaagcttc

SEQ ID NO: 169973 - DNA, 4308 bp, Homo sapiens
  Payload ID: 13468
  Gene Symbol: PARM1
  Gene Name: prostate androgen-regulated mucin-like protein 1
  ENST ID: ENST00000513238
  CDS Start-End: 234-440
ctcgggcggctgggatggagcagaagagcgcggagcaccggagggcacgcagctgacggagctgcgctgcgttcgcctcgtttgcctcgcgccctccactggagctgttcgcgcctcccggctcccaccgcagcccacccggcagaggagtcgctaccagcgcccagtgcgctctgtcagtccgcaaactccttgccgcccgccccgggctgggcaccaaataccaggctaccatggtctacaagactctcttcgctctttgcatcttaactgcaggcagcatcgccgccattaccgtgacagtcattgccgtggtgctgctggtgtttggagttgcagcctacctaaaaatcaggcattcctcctatggaagacttttggacgaccatgactacgggtcctggggaaactacaacaaccctctgtacgatgactcctaacaatggaatatggcctgggatgaggattaactgttctttatttataagtgcttatccagtagaattaataagtacctgatgcgcattgaacgacaatcttaagccctgttttgttggtatggttgtttttgttttcctccctctcctctggctgctacaacttcccctttctggtacaagaagaaccattctttaaaggtgagtggaggctgatttgcagctgaagtgggccagccttgcaccagccaggccagaccaccatggtgaaggcttctttccccactgcaggacccactttgagaaggaccgaggaggaggatttgggttgttttgttaggggttactttcaggggaacatttcatttgtgttatttcttaaacttctatttaggaaattacattaagtattaatgaggggaaaggaaatgagctctacgaggatttcaccctgcatgggagagagcagggttttctcagattcctttttaatctctatttatctggttgtttctgacaggatgctgcctgcttggctctacaagctggaaagcagcttcttagctgcctaattaatgaaagatgaaaataggaagtgccctggagggggccagcaggtcacggggcagaatctctcaggttgctgtgggatctcagtgtgcccctacctgttctcccctccaggccacctgtctctgtaaaggatgtctgctctgttcaaaaggcagctgggatcccagcccacaagtgatcagcagagttgcatttccaaagaaaaaggctatgagatgagctgagttatagagagaaagggagaggcatgtacggtgtggggaagtggaagagaagctggcgggggagaaggaggctaacctgcactgagtacttcattaggacaagtgagaatcagctattgataatggccagagatatccacagcttggaggagcccagagaccgtttgctttatacccacacagcaactggtccactgctttactgtctgttggataatggctgtaaaatgtttaaaaacaaaacaaaacaaaaaagaggcactagtctatctgcaattactcaacgaggcattttcataggaaacagactatgattaatccatttattcttcccacacacttaccttactaagtctttgctttaataaatgagcaaccctgggtatagtcttaaaattctgcacaataaattttgagaaagaattgttcctctttgtaggtatctgtgtattgcaatcattctcaaccaggaggtgattttgccccctgactccaccccagggacattcaaaaatgtctggtgacagttttcattgtcatgacttgggggtgctactagaagccaggaatgctgccaaacattctaccatgcacagcacaacctacaacagcaaagaatcatccaccccaaaatatcagtagtgccgagattgagaaaccctgatttatcacaatgcccactgtgacagaacaagacactcacagattagtgatacgttttatttttaacaaaatgaaatgatgtgttaagtttttatttccaaagtgtttagtttattggctgatgggttgttcttggtatgcatggtgacctttttatttctgtgtgcttcctagagagctttatttcatggcgacaactctgtcttcttgtaacagctgatattagcaagcagcatcttatgtcctgatttcatatagtagaaaacaaacattgggtccgacttcaaaatgtgttgtattgtcctacagtgtcataaagaacctgaaaatgaacttttgtttctaaagttggaccttgctgccatgactgtttagtttacagaaacttgaccccggctcatcctgtctctggctgtggcccggcaaagcactgaaaacccctctggtctcagagacagtaggggcagtgccactttctacaacctgccaacccacacactggagtaattctgaaaaaaattattcctaaactctctaagtgtggacggagaatgagcaagccccagaagtattttacaaccagagtgggtaatgaggagggggcttactggaatcgtcatatctctgaatattgaaaacaacaactaaaaaagtggaccttctcagaaaaaaagggcagcaaatgaccaagggcgccccttctggccgtgcttggcttgagtaactgtctctctttccccacccccatcacagggctttcagtttggcaaaggaaaagcagataaaaacagaacattccatatgtttctttctccatcggccaaaaacattttgacacaatgtttgtgaaacacctttggagaggtgcacttctgaatgctgcctctgccgtaaatcctggggcaagggatcagcctcttcccaggaaccatcgccttctataaaccgtgaactcaagcaggcattttttttttcttaccgaaaggctgctattgtgcaagggcacataatgggtctgttgctcttattggcttccaaatgtgcatggcaaagagagagatgtgggcctagagcagatatattcagcaaggtgacagcttcccataacaattctaacacttcttatcttatgtgagaataaaatatttaagggttgaaccttattttgccaaatgtatcttttctgcttttgaattgggcagaagattttagcaactatattctacaaatgttacttataacacacacacacacatctgaaatatatgccgaaaattgacgtctttgacctcagggagagcacctgtccaggtctgcctaaaggaaatggctccagtgggtctaaacaaccacatcctatccatggataggtctagtcataacactttagagagaatgtcagagcaggagggaggcaagccgcctcttctcggccatcgactgcagatgatgaaagagcgggattcaactttgttttcttttcctgtggccccagtgaaacctcctgccctccctgcacgtctgtgtcttcatttctaaaatgggggtgatgctttcatattgacctcaccccatactacctcacagatgtgttgtgaggattaataaaattatgtctatggtattttcagtttctggagaaaaatacttatagacagtttaactattacatagatatataagtgatctcagtttcttgtttgctgtgatactaatgtgttgttttaacttattccataaaatgacagttgtgtcctagccacatcagacagctatctaagctctggactacccctttgtgcagctgaatcactgcagggttgaccatgcctggtgccacagccatggtttccatttctagatgaaaggatggcctaggacataggtctcaaagactcttggatcagaatcaggagattagggaaaacaggatggatacctgagcactaacagcagtagacgtagacctctgtcctttaccatctgaggtcttctggattctttgtggggttaattttgatttgatgtcatctgtttgcccttcatcttgcttgcaagtgtgcatggttcaatccctcacatccaggaaatgaattttgcaattgggccagatgctaatttgcacgttgattcaccttctttgcctttaagccttttttttcttttttttttttttggcaaatgaatgtaccatttcaactttgattttaatagtgctagttgatattggtaataatgctaaccaagagatcaatgccagatttttctcttggggtaagttagctgaagtcatttaaagatggaaaggtgggaaaattctttgatatttgatgtcattgtatccacatttgttgtaagacatattgcataccaattataattatatcaattaaagttgataaaagcttcca

SEQ ID NO: 169974 - DNA, 386 bp, Homo sapiens
  Payload ID: 13469
  Gene Symbol: PRAC1
  Gene Name: prostate cancer susceptibility candidate 1
  Uniprot ID: Q96KF2
  ENST ID: ENST00000290294
  CDS Start-End: 131-304
ccgtccttcctctcctagcctaaggcgtgcaaacagagcgccactgggaggctgaaacctttaggccgatgcttgcttgcaaggtcaggcaagctggattctggtccccacctttgcagagagaacagcgatgttgtgcgcccatttctcagatcaaggaccggcccatcttactacctccaagagtgcttttctctctaataagaaaacatctactttgaaacatctactgggcgagaccaggagtgatggctcagcctgtaattctggaatttcgggaggccgaggcaggaagattccttgagcacaggagttccagaccagcctgggcaatgtagcaagacgctgtctctatttatacaataaaatttttttaaaaaaggaaa

SEQ ID NO: 169975 - DNA, 577 bp, Homo sapiens
  Payload ID: 13470
  Gene Symbol: PRAC2
  Gene Name: prostate cancer susceptibility candidate 2
  Uniprot ID: D3DTV9
  ENST ID: ENST00000422730
  CDS Start-End: 230-502
ggcccggggccgctcccgagctttctcccctcttccctggagagcgactgttcgggagggtgagaatggtataaatttcaaaaacaacgaaaccttcttttgccccctccgcagcagtcgcctccgggctttattgcaagtttacggttccatacaagtaaatccgaaaaaaagtgtgtgtgggggggtccacaccactaattattatggcgaggaagataaagaagacatggacagaaggcggatggctctgcggcctggctcccgcagaccgaccgccttcttcttccattcgagatggctcgtaccgaacctccttgccttcttcctgggtctctcgggggctggaccaatacatctgccgatgccctggccgaatggcaggcgacatcgggtcctggacccccacacgcagctcagtacccacgaggccccaggccgctggaagcctgtagctccgcggacgatgaaagcctgcccgcaggttctcctggagtggtgagcctctgtcggaagggggcgcccacgtctttttaatggtcctaacacaccagtggaataaatctctaagattcca

SEQ ID NO: 169976 - DNA, 504 bp, Homo sapiens
  Payload ID: 13470
  Gene Symbol: PRAC2
  Gene Name: prostate cancer susceptibility candidate 2
  ENST ID: ENST00000432056
  CDS Start-End: 14-436
taaaacccgaaagatggagcctcaggttcgcgctctgcgttgcgggtgctggaaccgagattcaaaaagagcttccggaggttccatacaagtaaatccgaaaaaaagtgtgtgtgggggggtccacaccactaattattatggcgaggaagataaagaagacatggacagaaggcggatggctctgcggcctggctcccgcagaccgaccgccttcttcttccattcgagatggctcgtaccgaacctccttgccttcttcctgggtctctcgggggctggaccaatacatctgccgatgccctggccgaatggcaggcgacatcgggtcctggacccccacacgcagctcagtacccacgaggccccaggccgctggaagcctgtagctccgcggacgatgaaagcctgcccgcaggttctcctggagtggtgagcctctgtcggaagggggcgcccacgtctttttaatggtcctaacacaccagtggaataaatctctaa

SEQ ID NO: 169977 - DNA, 1020 bp, Homo sapiens
  Payload ID: 13471
  Gene Symbol: PSCA
  Gene Name: prostate stem cell antigen
  Uniprot ID: O43653
  ENST ID: ENST00000301258
  CDS Start-End: 84-428
atttgaggccatataaagtcacctgaggccctctccaccacagcccaccagtgaccacgaaggctgtgctgcttgccctgttgatggcaggcttggccctgcagccaggcactgccctgctgtgctactcctgcaaagcccaggtgagcaacgaggactgcctgcaggtggagaactgcacccagctgggggagcagtgctggaccgcgcgcatccgcgcagttggcctcctgaccgtcatcagcaaaggctgcagcttgaactgcgtggatgactcacaggactactacgtgggcaagaagaacatcacgtgctgtgacaccgacttgtgcaacgccagcggggcccatgccctgcagccggctgctgccatccttgcgctgctccctgcactcggcctgctgctctggggacccggccagctctaggctctggggggccccgctgcagcccacactgggtgtggtgccccaggcctctgtgccactcctcacacacccggcccagtgggagcctgtcctggttcctgaggcacatcctaacgcaagtctgaccatgtatgtctgcgcccctgtcccccaccctgaccctcccatggccctctccaggactcccacccggcagatcggctctattgacacagatccgcctgcagatggcccctccaaccctctctgctgctgtttccatggcccagcattctccacccttaaccctgtgctcaggcacctcttcccccaggaagccttccctgcccaccccatctatgacttgagccaggtctggtccgtggtgtcccccgcacccagcaggggacaggcactcaggagggcccggtaaaggctgagatgaagtggactgagtagaactggaggacaggagtcgacgtgagttcctgggagtctccagagatggggcctggaggcctggaggaaggggccaggcctcacattcgtggggctccctgaatggcagcctcagcacagcgtaggcccttaataaacacctgttggataagcc

SEQ ID NO: 169978 - DNA, 551 bp, Homo sapiens
  Payload ID: 13471
  Gene Symbol: PSCA
  Gene Name: prostate stem cell antigen
  ENST ID: ENST00000513264
  CDS Start-End: 83-247
tttgaggccatataaagtcacctgaggccctctccaccacagcccaccagtgaccacgaaggctgtgctgcttgccctgttgatggcaggcttggccctgcagccaggcactgccctgctgtgctactcctgcaaagcccaggtgagcaacgaggactgcctgcaggtggagaactgcacccagctgggggagcagtgctggaccgcgcgcatccgtgagtggggggacgacagccgccaggcctaggtctctgccactgaactattaatctttctggccatctgtccgcatctgtgtgctgttttccttccacctgtccccgacccgtcccgcacctgcacccccaacaatcacccagcatctgtccctccagccatcctcctccatctgccactcctccactcatctgtccctccccatcctccatcttccactcctccacccatctgtccctccccatccctgagctcacttactcactcaccccatttctgacgctcagcgggtggtccatctgcctcggacatctggatagggctgagaccagggc

SEQ ID NO: 169979 - DNA, 4627 bp, Homo sapiens
  Payload ID: 13472
  Gene Symbol: PMEPA1
  Gene Name: prostate transmembrane protein, androgen induced 1
  Uniprot ID: Q969W9
  ENST ID: ENST00000265626
  CDS Start-End: 255-968
ctgaacctccctctgggctgggcacgcttggactcctccaaagagcttggaccagcctgagccacatccctgggcttgacttctccagaacaagcctcctggtctttctgggagagctctggcagcatcactgtgcctgtgcagggagagcgggaacccacttcctgcaccggctttctctgagttcttcaggatgaattcgctctggtctagcggagctggagtttgttcagatcatcatcatcgtggtggtgatgatggtgatggtggtggtgatcacgtgcctgctgagccactacaagctgtctgcacggtccttcatcagccggcacagccaggggcggaggagagaagatgccctgtcctcagaaggatgcctgtggccctcggagagcacagtgtcaggcaacggaatcccagagccgcaggtctacgccccgcctcggcccaccgaccgcctggccgtgccgcccttcgcccagcgggagcgcttccaccgcttccagcccacctatccgtacctgcagcacgagatcgacctgccacccaccatctcgctgtcagacggggaggagcccccaccctaccagggcccctgcaccctccagcttcgggaccccgagcagcagctggaactgaaccgggagtcggtgcgcgcacccccaaacagaaccatcttcgacagtgacctgatggatagtgccaggctgggcggcccctgcccccccagcagtaactcgggcatcagcgccacgtgctacggcagcggcgggcgcatggaggggccgccgcccacctacagcgaggtcatcggccactacccggggtcctccttccagcaccagcagagcagtgggccgccctccttgctggaggggacccggctccaccacacacacatcgcgcccctagagagcgcagccatctggagcaaagagaaggataaacagaaaggacaccctctctagggtccccaggggggccgggctggggctgcgtaggtgaaaaggcagaacactccgcgcttcttagaagaggagtgagaggaaggcggggggcgcagcaacgcatcgtgtggccctcccctcccacctccctgtgtataaatatttacatgtgatgtctggtctgaatgcacaagctaagagagcttgcaaaaaaaaaaagaaaaaagaaaaaaaaaaaccacgtttctttgttgagctgtgtcttgaaggcaaaagaaaaaaaatttctacagtagtctttcttgtttctagttgagctgcgtgcgtgaatgcttattttcttttgtttatgataatttcacttaactttaaagacatatttgcacaaaacctttgtttaaagatctgcaatattatatatataaatatatataagataagagaaactgtatgtgcgagggcaggagtatttttgtattagaagaggcctattaaaaaaaaaagttgttttctgaactagaagaggaaaaaaatggcaatttttgagtgccaagtcagaaagtgtgtattaccttgtaaagaaaaaaattacaaagcaggggtttagagttatttatataaatgttgagattttgcactattttttaatataaatatgtcagtgcttgcttgatggaaacttctcttgtgtctgttgagactttaagggagaaatgtcggaatttcagagtcgcctgacggcagagggtgagcccccgtggagtctgcagagaggccttggccaggagcggcgggctttcccgaggggccactgtccctgcagagtggatgcttctgcctagtgacaggttatcaccacgttatatattccctaccgaaggagacaccttttcccccctgacccagaacagcctttaaatcacaagcaaaataggaaagttaaccacggaggcaccgagttccaggtagtggttttgcctttcccaaaaatgaaaataaactgttaccgaaggaattagtttttcctcttcttttttccaactgtgaaggtccccgtggggtggagcatggtgcccctcacaagccgcagcggctggtgcccgggctaccagggacatgccagagggctcgatgacttgtctctgcagggcgctttggtggttgttcagctggctaaaggttcaccggtgaaggcaggtgcggtaactgccgcactggaccctaggaagccccaggtattcgcaatctgacctcctcctgtctgtttcccttcacggatcaattctcacttaagaggccaataaacaacccaacatgaaaaggtgacaagcctgggtttctcccaggataggtgaaagggttaaaatgagtaaagcagttgagcaaacaccaacccgagcttcgggcgcagaattcttcaccttctcttcccctttccatctcctttccccgcggaaacaacgcttcccttctggtgtgtctgttgatctgtgttttcatttacatctctcttagactccgctcttgttctccaggttttcaccagatagatttggggttggcgggacctgctggtgacgtgcaggtgaaggacaggaaggggcatgtgagcgtaaatagaggtgaccagaggagagcatgaggggtggggctttgggacccaccggggccagtggctggagcttgacgtctttcctccccatgggggtgggagggcccccagctggaagagcagactcccagctgctaccccctcccttcccatgggagtggctttccattttgggcagaatgctgactagtagactaacataaaagatataaaaggcaataactattgtttgtgagcaacttttttataacttccaaaacaaaaacctgagcacagttttgaagttctagccactcgagctcatgcatgtgaaacgtgtgctttacgaaggtggcagctgacagacgtgggctctgcatgccgccagcctagtagaaagttctcgttcattggcaacagcagaacctgcctctccgtgaagtcgtcagcctaaaatttgtttctctcttgaagaggattctttgaaaaggtcctgcagagaaatcagtacaggttatcccgaaaggtacaaggacgcacttgtaaagatgattaaaacgtatctttcctttatgtgacgcgtctctagtgccttactgaagaagcagtgacactcccgtcgctcggtgaggacgttcccggacagtgcctcactcacctgggactggtatcccctcccagggtccaccaagggctcctgcttttcagacaccccatcatcctcgcgcgtcctcaccctgtctctaccagggaggtgcctagcttggtgaggttactcctgctcctccaacctttttttgccaaggtttgtacacgactcccatctaggctgaaaacctagaagtggaccttgtgtgtgtgcatggtgtcagcccaaagccaggctgagacagtcctcatatcctcttgagccaaactgtttgggtctcgttgcttcatggtatggtctggatttgtgggaatggctttgcgtgagaaaggggaggagagtggttgctgccctcagccggcttgaggacagagcctgtccctctcatgacaactcagtgttgaagcccagtgtcctcagcttcatgtccagtggatggcagaagttcatggggtagtggcctctcaaaggctgggcgcatcccaagacagccagcaggttgtctctggaaacgaccagagttaagctctcggcttctctgctgagggtgcaccctttcctctagatggtagttgtcacgttatctttgaaaactcttggactgctcctgaggaggccctcttttccagtaggaagttagatgggggttctcagaagtggctgattggaaggggacaagcttcgtttcaggggtctgccgttccatcctggttcagagaaggccgagcgtggctttctctagccttgtcactgtctccctgcctgtcaatcaccacctttcctccagaggaggaaaattatctcccctgcaaagcccggttctacacagatttcacaaattgtgctaagaaccgtccgtgttctcagaaagcccagtgtttttgcaaagaatgaaaagggaccccatatgtagcaaaaatcagggctgggggagagccgggttcattccctgtcctcattggtcgtccctatgaattgtacgtttcagagaaattttttttcctatgtgcaacacgaagcttccagaaccataaaatatcccgtcgataaggaaagaaaatgtcgttgttgttgtttttctggaaactgcttgaaatcttgctgtactatagagctcagaaggacacagcccgtcctcccctgcctgcctgattccatggctgttgtgctgattccaatgctttcacgttggttcctggcgtgggaactgctctcctttgcagccccatttcccaagctctgttcaagttaaacttatgtaagctttccgtggcatgcggggcgcgcacccacgtccccgctgcgtaagactctgtatttggatgccaatccacaggcctgaagaaactgcttgttgtgtatcagtaatcattagtggcaatgatgacattctgaaaagctgcaatacttatacaataaattttacaattctttggaatg

SEQ ID NO: 169980 - DNA, 4546 bp, Homo sapiens
  Payload ID: 13472
  Gene Symbol: PMEPA1
  Gene Name: prostate transmembrane protein, androgen induced 1
  Uniprot ID: Q969W9
  ENST ID: ENST00000347215
  CDS Start-End: 127-885
acgcgagttcccgtctttcctggtcgtcctccttgggttcgggtgaaagcgcttgggggttcagtgggccatgatccccgagctgctggagaactgaaggcggacagtctcctgcgaaaccaggcaatggcggagctggagtttgttcagatcatcatcatcgtggtggtgatgatggtgatggtggtggtgatcacgtgcctgctgagccactacaagctgtctgcacggtccttcatcagccggcacagccaggggcggaggagagaagatgccctgtcctcagaaggatgcctgtggccctcggagagcacagtgtcaggcaacggaatcccagagccgcaggtctacgccccgcctcggcccaccgaccgcctggccgtgccgcccttcgcccagcgggagcgcttccaccgcttccagcccacctatccgtacctgcagcacgagatcgacctgccacccaccatctcgctgtcagacggggaggagcccccaccctaccagggcccctgcaccctccagcttcgggaccccgagcagcagctggaactgaaccgggagtcggtgcgcgcacccccaaacagaaccatcttcgacagtgacctgatggatagtgccaggctgggcggcccctgcccccccagcagtaactcgggcatcagcgccacgtgctacggcagcggcgggcgcatggaggggccgccgcccacctacagcgaggtcatcggccactacccggggtcctccttccagcaccagcagagcagtgggccgccctccttgctggaggggacccggctccaccacacacacatcgcgcccctagagagcgcagccatctggagcaaagagaaggataaacagaaaggacaccctctctagggtccccaggggggccgggctggggctgcgtaggtgaaaaggcagaacactccgcgcttcttagaagaggagtgagaggaaggcggggggcgcagcaacgcatcgtgtggccctcccctcccacctccctgtgtataaatatttacatgtgatgtctggtctgaatgcacaagctaagagagcttgcaaaaaaaaaaagaaaaaagaaaaaaaaaaaccacgtttctttgttgagctgtgtcttgaaggcaaaagaaaaaaaatttctacagtagtctttcttgtttctagttgagctgcgtgcgtgaatgcttattttcttttgtttatgataatttcacttaactttaaagacatatttgcacaaaacctttgtttaaagatctgcaatattatatatataaatatatataagataagagaaactgtatgtgcgagggcaggagtatttttgtattagaagaggcctattaaaaaaaaaagttgttttctgaactagaagaggaaaaaaatggcaatttttgagtgccaagtcagaaagtgtgtattaccttgtaaagaaaaaaattacaaagcaggggtttagagttatttatataaatgttgagattttgcactattttttaatataaatatgtcagtgcttgcttgatggaaacttctcttgtgtctgttgagactttaagggagaaatgtcggaatttcagagtcgcctgacggcagagggtgagcccccgtggagtctgcagagaggccttggccaggagcggcgggctttcccgaggggccactgtccctgcagagtggatgcttctgcctagtgacaggttatcaccacgttatatattccctaccgaaggagacaccttttcccccctgacccagaacagcctttaaatcacaagcaaaataggaaagttaaccacggaggcaccgagttccaggtagtggttttgcctttcccaaaaatgaaaataaactgttaccgaaggaattagtttttcctcttcttttttccaactgtgaaggtccccgtggggtggagcatggtgcccctcacaagccgcagcggctggtgcccgggctaccagggacatgccagagggctcgatgacttgtctctgcagggcgctttggtggttgttcagctggctaaaggttcaccggtgaaggcaggtgcggtaactgccgcactggaccctaggaagccccaggtattcgcaatctgacctcctcctgtctgtttcccttcacggatcaattctcacttaagaggccaataaacaacccaacatgaaaaggtgacaagcctgggtttctcccaggataggtgaaagggttaaaatgagtaaagcagttgagcaaacaccaacccgagcttcgggcgcagaattcttcaccttctcttcccctttccatctcctttccccgcggaaacaacgcttcccttctggtgtgtctgttgatctgtgttttcatttacatctctcttagactccgctcttgttctccaggttttcaccagatagatttggggttggcgggacctgctggtgacgtgcaggtgaaggacaggaaggggcatgtgagcgtaaatagaggtgaccagaggagagcatgaggggtggggctttgggacccaccggggccagtggctggagcttgacgtctttcctccccatgggggtgggagggcccccagctggaagagcagactcccagctgctaccccctcccttcccatgggagtggctttccattttgggcagaatgctgactagtagactaacataaaagatataaaaggcaataactattgtttgtgagcaacttttttataacttccaaaacaaaaacctgagcacagttttgaagttctagccactcgagctcatgcatgtgaaacgtgtgctttacgaaggtggcagctgacagacgtgggctctgcatgccgccagcctagtagaaagttctcgttcattggcaacagcagaacctgcctctccgtgaagtcgtcagcctaaaatttgtttctctcttgaagaggattctttgaaaaggtcctgcagagaaatcagtacaggttatcccgaaaggtacaaggacgcacttgtaaagatgattaaaacgtatctttcctttatgtgacgcgtctctagtgccttactgaagaagcagtgacactcccgtcgctcggtgaggacgttcccggacagtgcctcactcacctgggactggtatcccctcccagggtccaccaagggctcctgcttttcagacaccccatcatcctcgcgcgtcctcaccctgtctctaccagggaggtgcctagcttggtgaggttactcctgctcctccaacctttttttgccaaggtttgtacacgactcccatctaggctgaaaacctagaagtggaccttgtgtgtgtgcatggtgtcagcccaaagccaggctgagacagtcctcatatcctcttgagccaaactgtttgggtctcgttgcttcatggtatggtctggatttgtgggaatggctttgcgtgagaaaggggaggagagtggttgctgccctcagccggcttgaggacagagcctgtccctctcatgacaactcagtgttgaagcccagtgtcctcagcttcatgtccagtggatggcagaagttcatggggtagtggcctctcaaaggctgggcgcatcccaagacagccagcaggttgtctctggaaacgaccagagttaagctctcggcttctctgctgagggtgcaccctttcctctagatggtagttgtcacgttatctttgaaaactcttggactgctcctgaggaggccctcttttccagtaggaagttagatgggggttctcagaagtggctgattggaaggggacaagcttcgtttcaggggtctgccgttccatcctggttcagagaaggccgagcgtggctttctctagccttgtcactgtctccctgcctgtcaatcaccacctttcctccagaggaggaaaattatctcccctgcaaagcccggttctacacagatttcacaaattgtgctaagaaccgtccgtgttctcagaaagcccagtgtttttgcaaagaatgaaaagggaccccatatgtagcaaaaatcagggctgggggagagccgggttcattccctgtcctcattggtcgtccctatgaattgtacgtttcagagaaattttttttcctatgtgcaacacgaagcttccagaaccataaaatatcccgtcgataaggaaagaaaatgtcgttgttgttgtttttctggaaactgcttgaaatcttgctgtactatagagctcagaaggacacagcccgtcctcccctgcctgcctgattccatggctgttgtgctgattccaatgctttcacgttggttcctggcgtgggaactgctctcctttgcagccccatttcccaagctctgttcaagttaaacttatgtaagctttccgtggcatgcggggcgcgcacccacgtccccgctgcgtaagactctgtatttggatgccaatccacaggcctgaagaaactgcttgttgtgtatcagtaatcattagtggcaatgatgacattctgaaaagctgcaatacttatacaataaattttacaattctttggaatgag

SEQ ID NO: 169981 - DNA, 4845 bp, Homo sapiens
  Payload ID: 13472
  Gene Symbol: PMEPA1
  Gene Name: prostate transmembrane protein, androgen induced 1
  Uniprot ID: Q969W9
  ENST ID: ENST00000341744
  CDS Start-End: 321-1184
ggaaagctagcggcagaggctcagccccggcggcagcgcgcgccccgctgccagcccattttccggacgccacccgcgggcactgccgacgcccccggggctgccgaggggaggccgggggggcgcagcggagcgcggtcccgcgcactgagccccgcggcgccccgggaacttggcggcgacccgagcccggcgagccggggcgcgcctcccccgccgcgcgcctcctgcatgcggggccccagctccgggcgccggccggagccccccccggccgcccccgagccccccgcgccccgcgccgcgccgccgcgccgtccatgcaccgcttgatgggggtcaacagcaccgccgccgccgccgccgggcagcccaatgtctcctgcacgtgcaactgcaaacgctctttgttccagagcatggagatcacggagctggagtttgttcagatcatcatcatcgtggtggtgatgatggtgatggtggtggtgatcacgtgcctgctgagccactacaagctgtctgcacggtccttcatcagccggcacagccaggggcggaggagagaagatgccctgtcctcagaaggatgcctgtggccctcggagagcacagtgtcaggcaacggaatcccagagccgcaggtctacgccccgcctcggcccaccgaccgcctggccgtgccgcccttcgcccagcgggagcgcttccaccgcttccagcccacctatccgtacctgcagcacgagatcgacctgccacccaccatctcgctgtcagacggggaggagcccccaccctaccagggcccctgcaccctccagcttcgggaccccgagcagcagctggaactgaaccgggagtcggtgcgcgcacccccaaacagaaccatcttcgacagtgacctgatggatagtgccaggctgggcggcccctgcccccccagcagtaactcgggcatcagcgccacgtgctacggcagcggcgggcgcatggaggggccgccgcccacctacagcgaggtcatcggccactacccggggtcctccttccagcaccagcagagcagtgggccgccctccttgctggaggggacccggctccaccacacacacatcgcgcccctagagagcgcagccatctggagcaaagagaaggataaacagaaaggacaccctctctagggtccccaggggggccgggctggggctgcgtaggtgaaaaggcagaacactccgcgcttcttagaagaggagtgagaggaaggcggggggcgcagcaacgcatcgtgtggccctcccctcccacctccctgtgtataaatatttacatgtgatgtctggtctgaatgcacaagctaagagagcttgcaaaaaaaaaaagaaaaaagaaaaaaaaaaaccacgtttctttgttgagctgtgtcttgaaggcaaaagaaaaaaaatttctacagtagtctttcttgtttctagttgagctgcgtgcgtgaatgcttattttcttttgtttatgataatttcacttaactttaaagacatatttgcacaaaacctttgtttaaagatctgcaatattatatatataaatatatataagataagagaaactgtatgtgcgagggcaggagtatttttgtattagaagaggcctattaaaaaaaaaagttgttttctgaactagaagaggaaaaaaatggcaatttttgagtgccaagtcagaaagtgtgtattaccttgtaaagaaaaaaattacaaagcaggggtttagagttatttatataaatgttgagattttgcactattttttaatataaatatgtcagtgcttgcttgatggaaacttctcttgtgtctgttgagactttaagggagaaatgtcggaatttcagagtcgcctgacggcagagggtgagcccccgtggagtctgcagagaggccttggccaggagcggcgggctttcccgaggggccactgtccctgcagagtggatgcttctgcctagtgacaggttatcaccacgttatatattccctaccgaaggagacaccttttcccccctgacccagaacagcctttaaatcacaagcaaaataggaaagttaaccacggaggcaccgagttccaggtagtggttttgcctttcccaaaaatgaaaataaactgttaccgaaggaattagtttttcctcttcttttttccaactgtgaaggtccccgtggggtggagcatggtgcccctcacaagccgcagcggctggtgcccgggctaccagggacatgccagagggctcgatgacttgtctctgcagggcgctttggtggttgttcagctggctaaaggttcaccggtgaaggcaggtgcggtaactgccgcactggaccctaggaagccccaggtattcgcaatctgacctcctcctgtctgtttcccttcacggatcaattctcacttaagaggccaataaacaacccaacatgaaaaggtgacaagcctgggtttctcccaggataggtgaaagggttaaaatgagtaaagcagttgagcaaacaccaacccgagcttcgggcgcagaattcttcaccttctcttcccctttccatctcctttccccgcggaaacaacgcttcccttctggtgtgtctgttgatctgtgttttcatttacatctctcttagactccgctcttgttctccaggttttcaccagatagatttggggttggcgggacctgctggtgacgtgcaggtgaaggacaggaaggggcatgtgagcgtaaatagaggtgaccagaggagagcatgaggggtggggctttgggacccaccggggccagtggctggagcttgacgtctttcctccccatgggggtgggagggcccccagctggaagagcagactcccagctgctaccccctcccttcccatgggagtggctttccattttgggcagaatgctgactagtagactaacataaaagatataaaaggcaataactattgtttgtgagcaacttttttataacttccaaaacaaaaacctgagcacagttttgaagttctagccactcgagctcatgcatgtgaaacgtgtgctttacgaaggtggcagctgacagacgtgggctctgcatgccgccagcctagtagaaagttctcgttcattggcaacagcagaacctgcctctccgtgaagtcgtcagcctaaaatttgtttctctcttgaagaggattctttgaaaaggtcctgcagagaaatcagtacaggttatcccgaaaggtacaaggacgcacttgtaaagatgattaaaacgtatctttcctttatgtgacgcgtctctagtgccttactgaagaagcagtgacactcccgtcgctcggtgaggacgttcccggacagtgcctcactcacctgggactggtatcccctcccagggtccaccaagggctcctgcttttcagacaccccatcatcctcgcgcgtcctcaccctgtctctaccagggaggtgcctagcttggtgaggttactcctgctcctccaacctttttttgccaaggtttgtacacgactcccatctaggctgaaaacctagaagtggaccttgtgtgtgtgcatggtgtcagcccaaagccaggctgagacagtcctcatatcctcttgagccaaactgtttgggtctcgttgcttcatggtatggtctggatttgtgggaatggctttgcgtgagaaaggggaggagagtggttgctgccctcagccggcttgaggacagagcctgtccctctcatgacaactcagtgttgaagcccagtgtcctcagcttcatgtccagtggatggcagaagttcatggggtagtggcctctcaaaggctgggcgcatcccaagacagccagcaggttgtctctggaaacgaccagagttaagctctcggcttctctgctgagggtgcaccctttcctctagatggtagttgtcacgttatctttgaaaactcttggactgctcctgaggaggccctcttttccagtaggaagttagatgggggttctcagaagtggctgattggaaggggacaagcttcgtttcaggggtctgccgttccatcctggttcagagaaggccgagcgtggctttctctagccttgtcactgtctccctgcctgtcaatcaccacctttcctccagaggaggaaaattatctcccctgcaaagcccggttctacacagatttcacaaattgtgctaagaaccgtccgtgttctcagaaagcccagtgtttttgcaaagaatgaaaagggaccccatatgtagcaaaaatcagggctgggggagagccgggttcattccctgtcctcattggtcgtccctatgaattgtacgtttcagagaaattttttttcctatgtgcaacacgaagcttccagaaccataaaatatcccgtcgataaggaaagaaaatgtcgttgttgttgtttttctggaaactgcttgaaatcttgctgtactatagagctcagaaggacacagcccgtcctcccctgcctgcctgattccatggctgttgtgctgattccaatgctttcacgttggttcctggcgtgggaactgctctcctttgcagccccatttcccaagctctgttcaagttaaacttatgtaagctttccgtggcatgcggggcgcgcacccacgtccccgctgcgtaagactctgtatttggatgccaatccacaggcctgaagaaactgcttgttgtgtatcagtaatcattagtggcaatgatgacattctgaaaagctgcaatacttatacaataaattttacaattctttggaatgag

SEQ ID NO: 169982 - DNA, 800 bp, Homo sapiens
  Payload ID: 13472
  Gene Symbol: PMEPA1
  Gene Name: prostate transmembrane protein, androgen induced 1
  Uniprot ID: Q969W9
  ENST ID: ENST00000395814
  CDS Start-End: 71-784
ttggaacgagggctgcgggcaccagtgagcggagctggagtttgttcagatcatcatcatcgtggtggtgatgatggtgatggtggtggtgatcacgtgcctgctgagccactacaagctgtctgcacggtccttcatcagccggcacagccaggggcggaggagagaagatgccctgtcctcagaaggatgcctgtggccctcggagagcacagtgtcaggcaacggaatcccagagccgcaggtctacgccccgcctcggcccaccgaccgcctggccgtgccgcccttcgcccagcgggagcgcttccaccgcttccagcccacctatccgtacctgcagcacgagatcgacctgccacccaccatctcgctgtcagacggggaggagcccccaccctaccagggcccctgcaccctccagcttcgggaccccgagcagcagctggaactgaaccgggagtcggtgcgcgcacccccaaacagaaccatcttcgacagtgacctgatggatagtgccaggctgggcggcccctgcccccccagcagtaactcgggcatcagcgccacgtgctacggcagcggcgggcgcatggaggggccgccgcccacctacagcgaggtcatcggccactacccggggtcctccttccagcaccagcagagcagtgggccgccctccttgctggaggggacccggctccaccacacacacatcgcgcccctagagagcgcagccatctggagcaaagagaaggataaacagaaaggacaccctctctagggtccccaggggggcc

SEQ ID NO: 169983 - DNA, 4519 bp, Homo sapiens
  Payload ID: 13472
  Gene Symbol: PMEPA1
  Gene Name: prostate transmembrane protein, androgen induced 1
  Uniprot ID: Q969W9
  ENST ID: ENST00000395816
  CDS Start-End: 145-858
tggtcgtcctccttgggttcgggtgaaagcgcttgggggttcagtgggccatgatccccgagctgctggagaactgaaggcggacagtctcctgcgaaaccagcggagctggagtttgttcagatcatcatcatcgtggtggtgatgatggtgatggtggtggtgatcacgtgcctgctgagccactacaagctgtctgcacggtccttcatcagccggcacagccaggggcggaggagagaagatgccctgtcctcagaaggatgcctgtggccctcggagagcacagtgtcaggcaacggaatcccagagccgcaggtctacgccccgcctcggcccaccgaccgcctggccgtgccgcccttcgcccagcgggagcgcttccaccgcttccagcccacctatccgtacctgcagcacgagatcgacctgccacccaccatctcgctgtcagacggggaggagcccccaccctaccagggcccctgcaccctccagcttcgggaccccgagcagcagctggaactgaaccgggagtcggtgcgcgcacccccaaacagaaccatcttcgacagtgacctgatggatagtgccaggctgggcggcccctgcccccccagcagtaactcgggcatcagcgccacgtgctacggcagcggcgggcgcatggaggggccgccgcccacctacagcgaggtcatcggccactacccggggtcctccttccagcaccagcagagcagtgggccgccctccttgctggaggggacccggctccaccacacacacatcgcgcccctagagagcgcagccatctggagcaaagagaaggataaacagaaaggacaccctctctagggtccccaggggggccgggctggggctgcgtaggtgaaaaggcagaacactccgcgcttcttagaagaggagtgagaggaaggcggggggcgcagcaacgcatcgtgtggccctcccctcccacctccctgtgtataaatatttacatgtgatgtctggtctgaatgcacaagctaagagagcttgcaaaaaaaaaaagaaaaaagaaaaaaaaaaaccacgtttctttgttgagctgtgtcttgaaggcaaaagaaaaaaaatttctacagtagtctttcttgtttctagttgagctgcgtgcgtgaatgcttattttcttttgtttatgataatttcacttaactttaaagacatatttgcacaaaacctttgtttaaagatctgcaatattatatatataaatatatataagataagagaaactgtatgtgcgagggcaggagtatttttgtattagaagaggcctattaaaaaaaaaagttgttttctgaactagaagaggaaaaaaatggcaatttttgagtgccaagtcagaaagtgtgtattaccttgtaaagaaaaaaattacaaagcaggggtttagagttatttatataaatgttgagattttgcactattttttaatataaatatgtcagtgcttgcttgatggaaacttctcttgtgtctgttgagactttaagggagaaatgtcggaatttcagagtcgcctgacggcagagggtgagcccccgtggagtctgcagagaggccttggccaggagcggcgggctttcccgaggggccactgtccctgcagagtggatgcttctgcctagtgacaggttatcaccacgttatatattccctaccgaaggagacaccttttcccccctgacccagaacagcctttaaatcacaagcaaaataggaaagttaaccacggaggcaccgagttccaggtagtggttttgcctttcccaaaaatgaaaataaactgttaccgaaggaattagtttttcctcttcttttttccaactgtgaaggtccccgtggggtggagcatggtgcccctcacaagccgcagcggctggtgcccgggctaccagggacatgccagagggctcgatgacttgtctctgcagggcgctttggtggttgttcagctggctaaaggttcaccggtgaaggcaggtgcggtaactgccgcactggaccctaggaagccccaggtattcgcaatctgacctcctcctgtctgtttcccttcacggatcaattctcacttaagaggccaataaacaacccaacatgaaaaggtgacaagcctgggtttctcccaggataggtgaaagggttaaaatgagtaaagcagttgagcaaacaccaacccgagcttcgggcgcagaattcttcaccttctcttcccctttccatctcctttccccgcggaaacaacgcttcccttctggtgtgtctgttgatctgtgttttcatttacatctctcttagactccgctcttgttctccaggttttcaccagatagatttggggttggcgggacctgctggtgacgtgcaggtgaaggacaggaaggggcatgtgagcgtaaatagaggtgaccagaggagagcatgaggggtggggctttgggacccaccggggccagtggctggagcttgacgtctttcctccccatgggggtgggagggcccccagctggaagagcagactcccagctgctaccccctcccttcccatgggagtggctttccattttgggcagaatgctgactagtagactaacataaaagatataaaaggcaataactattgtttgtgagcaacttttttataacttccaaaacaaaaacctgagcacagttttgaagttctagccactcgagctcatgcatgtgaaacgtgtgctttacgaaggtggcagctgacagacgtgggctctgcatgccgccagcctagtagaaagttctcgttcattggcaacagcagaacctgcctctccgtgaagtcgtcagcctaaaatttgtttctctcttgaagaggattctttgaaaaggtcctgcagagaaatcagtacaggttatcccgaaaggtacaaggacgcacttgtaaagatgattaaaacgtatctttcctttatgtgacgcgtctctagtgccttactgaagaagcagtgacactcccgtcgctcggtgaggacgttcccggacagtgcctcactcacctgggactggtatcccctcccagggtccaccaagggctcctgcttttcagacaccccatcatcctcgcgcgtcctcaccctgtctctaccagggaggtgcctagcttggtgaggttactcctgctcctccaacctttttttgccaaggtttgtacacgactcccatctaggctgaaaacctagaagtggaccttgtgtgtgtgcatggtgtcagcccaaagccaggctgagacagtcctcatatcctcttgagccaaactgtttgggtctcgttgcttcatggtatggtctggatttgtgggaatggctttgcgtgagaaaggggaggagagtggttgctgccctcagccggcttgaggacagagcctgtccctctcatgacaactcagtgttgaagcccagtgtcctcagcttcatgtccagtggatggcagaagttcatggggtagtggcctctcaaaggctgggcgcatcccaagacagccagcaggttgtctctggaaacgaccagagttaagctctcggcttctctgctgagggtgcaccctttcctctagatggtagttgtcacgttatctttgaaaactcttggactgctcctgaggaggccctcttttccagtaggaagttagatgggggttctcagaagtggctgattggaaggggacaagcttcgtttcaggggtctgccgttccatcctggttcagagaaggccgagcgtggctttctctagccttgtcactgtctccctgcctgtcaatcaccacctttcctccagaggaggaaaattatctcccctgcaaagcccggttctacacagatttcacaaattgtgctaagaaccgtccgtgttctcagaaagcccagtgtttttgcaaagaatgaaaagggaccccatatgtagcaaaaatcagggctgggggagagccgggttcattccctgtcctcattggtcgtccctatgaattgtacgtttcagagaaattttttttcctatgtgcaacacgaagcttccagaaccataaaatatcccgtcgataaggaaagaaaatgtcgttgttgttgtttttctggaaactgcttgaaatcttgctgtactatagagctcagaaggacacagcccgtcctcccctgcctgcctgattccatggctgttgtgctgattccaatgctttcacgttggttcctggcgtgggaactgctctcctttgcagccccatttcccaagctctgttcaagttaaacttatgtaagctttccgtggcatgcggggcgcgcacccacgtccccgctgcgtaagactctgtatttggatgccaatccacaggcctgaagaaactgcttgttgtgtatcagtaatcattagtggcaatgatgacattctgaaaagctgcaatacttatacaataaattttacaattctttggaatgag

SEQ ID NO: 169984 - DNA, 859 bp, Homo sapiens
  Payload ID: 13472
  Gene Symbol: PMEPA1
  Gene Name: prostate transmembrane protein, androgen induced 1
  ENST ID: ENST00000395819
  CDS Start-End: 179-859
gcgcactgagccccgcggcgccccgggaacttggcggcgacccgagcccggcgagccggggcgcgcctcccccgccgcgcgcctcctgcatgcggggccccagctccgggcgccggccggagccccccccggccgcccccgagccccccgcgccccgcgccgcgccgccgcgccgtccatgcaccgcttgatgggggtcaacagcaccgccgccgccgccgccgggcagcccaatgtctcctgcacgtgcaactgcaaacgctctttgttccagagcatggagatcagttgtcatggattcccagtatgcaagtcgcatcagcatcaggagtggaagagtctctgctggtccttaaggtctccaggaggggccagttccatcactggctttgggagcatgaaagtgacaaatccagccatgaatttgcctgagtgtcagtggttaagaatacaaaaagcggagctggagtttgttcagatcatcatcatcgtggtggtgatgatggtgatggtggtggtgatcacgtgcctgctgagccactacaagctgtctgcacggtccttcatcagccggcacagccaggggcggaggagagaagatgccctgtcctcagaaggatgcctgtggccctcggagagcacagtgtcaggcaacggaatcccagagccgcaggtctacgccccgcctcggcccaccgaccgcctggccgtgccgcccttcgcccagcgggagcgcttccaccgcttccagcccacctatccgtacctgcagcacgagatcgacctgccacccaccatctcgctgtcagacggggaggagcccccaccctaccagggcccctgcaccctccagcttcgg

SEQ ID NO: 169985 - DNA, 831 bp, Homo sapiens
  Payload ID: 13472
  Gene Symbol: PMEPA1
  Gene Name: prostate transmembrane protein, androgen induced 1
  ENST ID: ENST00000414037
  CDS Start-End: 207-831
ctctccaggcccctgccacctgtttgcacatgaccctctacacccgccatagcaatggagaccccgcctcctgctacagttaattaatccttcttttttgcttcacaataaaaatagcatggctcttctgattgtaaaaagtgatatacactccttatttaacgaaaaattcaaagaatttgataaatgacaggcgaaaagtcaaaatgcctgcaattccagcacatggagcggagctggagtttgttcagatcatcatcatcgtggtggtgatgatggtgatggtggtggtgatcacgtgcctgctgagccactacaagctgtctgcacggtccttcatcagccggcacagccaggggcggaggagagaagatgccctgtcctcagaaggatgcctgtggccctcggagagcacagtgtcaggcaacggaatcccagagccgcaggtctacgccccgcctcggcccaccgaccgcctggccgtgccgcccttcgcccagcgggagcgcttccaccgcttccagcccacctatccgtacctgcagcacgagatcgacctgccacccaccatctcgctgtcagacggggaggagcccccaccctaccagggcccctgcaccctccagcttcgggaccccgagcagcagctggaactgaaccgggagtcggtgcgcgcacccccaaacagaaccatcttcgacagtgacctgatggatagtgccaggctgggcggcccctgcccccccagcagtaactcgggcatcagcgccacgtgctacggcagcggcgggcgcatggaggggccgccgcccacctacagcgaggtcatcg

SEQ ID NO: 169986 - DNA, 1875 bp, Homo sapiens
  Payload ID: 13473
  Gene Symbol: PTOV1
  Gene Name: prostate tumor overexpressed 1
  Uniprot ID: Q86YD1
  ENST ID: ENST00000391842
  CDS Start-End: 171-1421
agtggttcggccgcggcgaccccactccggcggcgcgtcccccgagcttggtacggctcagcccgtctcccccgaagccgcgcgcccgcgcccgcgcccctcagtcggtggagcccgcagccccccttgtggcccgcggcagctccccgcccgctcggcccgcgcccgccatggtccgtccgcgccgtgccccgtaccgctccggcgccgggggccccctcgggggtcgcggccgccctccgcggcccctcgtggtgcgcgccgtccgctcgcgctcctggcctgccagcccccgaggcccgcagcctccgcggatccgggcccgctcggcccctcccatggaaggtgctcgggtcttcggggcactgggtcccatcggtccctcctcacctgggctcaccctcgggggtctggccgtgagcgagcaccggctcagcaacaagctgctggcttggagcggcgtcctcgagtggcaggagaagcgcagaccctactctgactccactgcaaagctgaagcggaccctgccctgccaagcctacgtgaaccaaggcgagaacctggagaccgaccagtggccgcagaagctgatcatgcagctgatccctcagcagctgctgaccaccctgggccccctgttccggaactcccagttggcacagttccacttcaccaacagagactgcgactcgctcaaggggctctgccgcatcatgggcaacggcttcgcgggctgcatgctgttcccccacatctccccctgtgaggtgcgcgtgctcatgctcctgtactcgtccaagaagaagatcttcatgggcctcatcccctacgaccagagcggcttcgtcagtgccatccggcaggtcatcaccacccgcaagcaggcagtgggacctggtggtgtcaactcaggcccagtccagatcgtcaacaacaagtttctggcatggagtggtgtcatggagtggcaggagcccaggcctgagcccaacagtcggtccaagaggtggctgccatcccacgtctacgtgaaccagggggagatcctgaggaccgagcagtggccaaggaagctgtacatgcagctcatcccgcagcagctgctgaccaccctagtgccgctgttccggaactcgcgcctggtccagttccacttcaccaaggacctggagacactgaagagcctgtgccggatcatggacaatggcttcgccggctgcgtgcacttttcctacaaagcatcgtgtgagatccgcgtgcttatgctcctgtactcttcagagaagaaaatcttcattggcctcatcccccatgaccagggcaactttgtcaacggcatccggcgtgtcattgccaaccagcagcaggtcctgcagcggaacctggagcaggagcaacagcaacgagggatgggggggtagtggttaccccgggctgggcccctccaggagtcacagatgaggcccccgcagagactggtgagtggtgaccctgtcatgtacaggagggaccctggggcatgtggggggggtggggttgggaaagaagcagggcgaccttggccttggggagagcagagcagagggagaggcagcagtcccagcggtcctaggctgtcgggaaactgcagcccagcctcagggccatgggaggtggtatccaggcctgggtggggccaggcctctgctcacagggatgtggggtcagtgcttgggagcctgtggccagcagcccccactgcacccctgcccccaggtgacacgcttctgagcaggggcccctggggacttcaactgcccagcaacatggaggatggtgtcctgaggcctccaaggacggtccccacccctctacgtttccccaataaagcctttt

SEQ ID NO: 169987 - DNA, 327 bp, Homo sapiens
  Payload ID: 13473
  Gene Symbol: PTOV1
  Gene Name: prostate tumor overexpressed 1
  ENST ID: ENST00000597730
  CDS Start-End: 1-129
caggtcctgcagcggaacctggagcaggagcaacagcaacgaggggtgaggtggccggcctccagggctgctcagtctccctccacccccgctgcctgctcaccactggcctctgatttctcgccgtagatgggggggtagtggttaccccgggctgggcccctccaggagtcacagatgaggcccccgcagagactggtgacacgcttctgagcaggggcccctggggacttcaactgcccagcaacatggaggatggtgtcctgaggcctccaaggacggtccccacccctctacgtttccccaataaagccttttaaaaacctg

SEQ ID NO: 169988 - DNA, 1577 bp, Homo sapiens
  Payload ID: 13473
  Gene Symbol: PTOV1
  Gene Name: prostate tumor overexpressed 1
  Uniprot ID: Q86YD1
  ENST ID: ENST00000599732
  CDS Start-End: 139-1389
gcgcgtcccccgagcttggtacggctcagcccgtctcccccgaagccgcgcgcccgcgcccgcgcccctcagtcggtggagcccgcagccccccttgtggcccgcggcagctccccgcccgctcggcccgcgcccgccatggtccgtccgcgccgtgccccgtaccgctccggcgccgggggccccctcgggggtcgcggccgccctccgcggcccctcgtggtgcgcgccgtccgctcgcgctcctggcctgccagcccccgaggcccgcagcctccgcggatccgggcccgctcggcccctcccatggaaggtgctcgggtcttcggggcactgggtcccatcggtccctcctcacctgggctcaccctcgggggtctggccgtgagcgagcaccggctcagcaacaagctgctggcttggagcggcgtcctcgagtggcaggagaagcgcagaccctactctgactccactgcaaagctgaagcggaccctgccctgccaagcctacgtgaaccaaggcgagaacctggagaccgaccagtggccgcagaagctgatcatgcagctgatccctcagcagctgctgaccaccctgggccccctgttccggaactcccagttggcacagttccacttcaccaacagagactgcgactcgctcaaggggctctgccgcatcatgggcaacggcttcgcgggctgcatgctgttcccccacatctccccctgtgaggtgcgcgtgctcatgctcctgtactcgtccaagaagaagatcttcatgggcctcatcccctacgaccagagcggcttcgtcagtgccatccggcaggtcatcaccacccgcaagcaggcagtgggacctggtggtgtcaactcaggcccagtccagatcgtcaacaacaagtttctggcatggagtggtgtcatggagtggcaggagcccaggcctgagcccaacagtcggtccaagaggtggctgccatcccacgtctacgtgaaccagggggagatcctgaggaccgagcagtggccaaggaagctgtacatgcagctcatcccgcagcagctgctgaccaccctagtgccgctgttccggaactcgcgcctggtccagttccacttcaccaaggacctggagacactgaagagcctgtgccggatcatggacaatggcttcgccggctgcgtgcacttttcctacaaagcatcgtgtgagatccgcgtgcttatgctcctgtactcttcagagaagaaaatcttcattggcctcatcccccatgaccagggcaactttgtcaacggcatccggcgtgtcattgccaaccagcagcaggtcctgcagcggaacctggagcaggagcaacagcaacgagggatgggggggtagtggttaccccgggctgggcccctccaggagtcacagatgaggcccccgcagagactggtgacacgcttctgagcaggggcccctggggacttcaactgcccagcaacatggaggatggtgtcctgaggcctccaaggacggtccccacccctctacgtttccccaataaagccttttaaaaacctgcc

SEQ ID NO: 169989 - DNA, 1413 bp, Homo sapiens
  Payload ID: 13473
  Gene Symbol: PTOV1
  Gene Name: prostate tumor overexpressed 1
  ENST ID: ENST00000601638
  CDS Start-End: 54-1208
ttccctgatgtattttggcgcggtctcctggctctgcgggcccagggctccggatgaggtctcccgccgtcccgacccccgcaaggggccagcttggtgtcgccttcgttcttctgccaccccattcggaaggtgctcgggtcttcggggcactgggtcccatcggtccctcctcacctgggctcaccctcgggggtctggccgtgagcgagcaccggctcagcaacaagctgctggcttggagcggcgtcctcgagtggcaggagaagcgcagaccctactctgactccactgcaaagctgaagcggaccctgccctgccaagcctacgtgaaccaaggcgagaacctggagaccgaccagtggccgcagaagctgatcatgcagctgatccctcagcagctgctgaccaccctgggccccctgttccggaactcccagttggcacagttccacttcaccaacagagactgcgactcgctcaaggggctctgccgcatcatgggcaacggcttcgcgggctgcatgctgttcccccacatctccccctgtgaggtgcgcgtgctcatgctcctgtactcgtccaagaagaagatcttcatgggcctcatcccctacgaccagagcggcttcgtcagtgccatccggcaggtcatcaccacccgcaagcaggcagtgggacctggtggtgtcaactcaggcccagtccagatcgtcaacaacaagtttctggcatggagtggtgtcatggagtggcaggagcccaggcctgagcccaacagtcggtccaagaggtggctgccatcccacgtctacgtgaaccagggggagatcctgaggaccgagcagtggccaaggaagctgtacatgcagctcatcccgcagcagctgctgaccaccctagtgccgctgttccggaactcgcgcctggtccagttccacttcaccaaggacctggagacactgaagagcctgtgccggatcatggacaatggcttcgccggctgcgtgcacttttcctacaaagcatcgtgtgagatccgcgtgcttatgctcctgtactcttcagagaagaaaatcttcattggcctcatcccccatgaccagggcaactttgtcaacggcatccggcgtgtcattgccaaccagcagcaggtcctgcagcggaacctggagcaggagcaacagcaacgagggatgggggggtagtggttaccccgggctgggcccctccaggagtcacagatgaggcccccgcagagactgtgcttgggagcctgtggccagcagcccccactgcacccctgcccccaggtgacacgcttctgagcaggggcccctggggacttcaactgcccagcaacatggaggatggtgtcctgaggcctccaaggacggtccccacccctctacg

SEQ ID NO: 169990 - DNA, 522 bp, Homo sapiens
  Payload ID: 13473
  Gene Symbol: PTOV1
  Gene Name: prostate tumor overexpressed 1
  ENST ID: ENST00000601093
  CDS Start-End: 1-336
aggcctgagcccaacagtcggtccaagaggtggctgccatcccacgtctacgtgaaccagggggagatcctgaggaccgagcagtggccaaggaagctgtacatgcagctcatcccgcagcagctgctgaccaccctagtgccgctgttccggaactcgcgcctggtccagttccacttcaccaaggacctggagacactgaagagcctgtgccggatcatggacaatggcttcggcaactttgtcaacggcatccggcgtgtcattgccaaccagcagcaggtcctgcagcggaacctggagcaggagcaacagcaacgagggatgggggggtagtggttaccccgggctgggcccctccaggagtcacagatgaggcccccgcagagactggtgacacgcttctgagcaggggcccctggggacttcaactgcccagcaacatggaggatggtgtcctgaggcctccaaggacggtccccacccctctacgtttccccaataaagccttttaaaaacctg

SEQ ID NO: 169991 - DNA, 995 bp, Homo sapiens
  Payload ID: 13473
  Gene Symbol: PTOV1
  Gene Name: prostate tumor overexpressed 1
  ENST ID: ENST00000594151
  CDS Start-End: 147-995
agctgtctcaggctcgggtgcaatccgtaccctcagtgggttccctttcagtgggttcctttgtccccaggcccattattccgtcctcccctcttccctgatgtattttggcgcggtctcctggctctgcgggcccagggctccggatgaggtctcccgccgtcccgacccccgcaaggggccagcttggtgtcgccttcgttcttctgccaccccattcggtaggggctcccgttcccgccacgccccctgaagttgtggctcgcgcgtcttcccaggactcccccgcgccggagaggcccgcaggaccgccgagcccacactccgctcccgcccgggccccgctcccccgcgccgccttggaaggtgctcgggtcttcggggcactgggtcccatcggtccctcctcacctgggctcaccctcgggggtctggccgtgagcgagcaccggctcagcaacaagctgctggcttggagcggcgtcctcgagtggcaggagaagcgcagaccctactctgactccactgcaaagctgaagcggaccctgccctgccaagcctacgtgaaccaaggcgagaacctggagaccgaccagtggccgcagaagctgatcatgcagctgatccctcagcagctgctgaccaccctgggccccctgttccggaactcccagttggcacagttccacttcaccaacagagactgcgactcgctcaaggggctctgccgcatcatgggcaacggcttcgcgggctgcatgctgttcccccacatctccccctgtgaggtgcgcgtgctcatgctcctgtactcgtccaagaagaagatcttcatgggcctcatcccctacgaccagagcggcttcgtcagtgccatccggcaggtcatcaccacccgcaagcaggcagtgggacctggtggtgtcaactcaggcccagtccagatcgtcaacaacaagtttctggcatggagtggtgtcatggagtggcaggag

SEQ ID NO: 169992 - DNA, 1480 bp, Homo sapiens
  Payload ID: 13473
  Gene Symbol: PTOV1
  Gene Name: prostate tumor overexpressed 1
  ENST ID: ENST00000601612
  CDS Start-End: 147-860
agctgtctcaggctcgggtgcaatccgtaccctcagtgggttccctttcagtgggttcctttgtccccaggcccattattccgtcctcccctcttccctgatgtattttggcgcggtctcctggctctgcgggcccagggctccggatgaggtctcccgccgtcccgacccccgcaaggggccagcttggtgtcgccttcgttcttctgccaccccattcggaaggtgctcgggtcttcggggcactgggtcccatcggtccctcctcacctgggctcaccctcgggggtctggccgtgagcgagcaccggctcagcaacaagctgctggcttggagcggcgtcctcgagtggcaggagaagcgcagaccctactctgactccactgcaaagctgaagcggaccctgccctgccaagcctacgtgaaccaaggcgagaacctggagaccgaccagtggccgcagaagctgatcatgcagctgatccctcagcagctgctgaccaccctgggccccctgttccggaactcccagttggcacagttccacttcaccaacagagactgcgactcgctcaaggggctctgccgcatcatgggcaacggcttcgcgggctgcatgctgttcccccacatctccccctgtgaggtgcgcgtgctcatgctcctgtactcgtccaagaagaagatcttcatgggcctcatcccctacgaccagagcggcttcgtcagtgccatccggcaggtcatcaccacccgcaagcaggcagtgggacctggtggtgtcaactcaggcccagtccagatcgtcaacaacaagtttctggcatggagtggtgtcatggagtggcaggaggcctgagcccaacagtcggtccaagaggtggctgccatcccacgtctacgtgaaccagggggagatcctgaggaccgagcagtggccaaggaagctgtacatgcagctcatcccgcagcagctgctgaccaccctagtgccgctgttccggaactcgcgcctggtccagttccacttcaccaaggacctggagacactgaagagcctgtgccggatcatggacaatggcttcgccggctgcgtgcacttttcctacaaagcatcgtgtgagatccgcgtgcttatgctcctgtactcttcagagaagaaaatcttcattggcctcatcccccatgaccagggcaactttgtcaacggcatccggcgtgtcattgccaaccagcagcaggtcctgcagcggaacctggagcaggagcaacagcaacgagggatgggggggtagtggttaccccgggctgggcccctccaggagtcacagatgaggcccccgcagagactggtgacacgcttctgagcaggggcccctggggacttcaactgcccagcaacatggaggatggtgtcctgaggcctccaaggacggtccccacccctctacgtttccccaataaagccttttaaaaacc

SEQ ID NO: 169993 - DNA, 426 bp, Homo sapiens
  Payload ID: 13473
  Gene Symbol: PTOV1
  Gene Name: prostate tumor overexpressed 1
  ENST ID: ENST00000600793
  CDS Start-End: 1-426
gaaggtgctcgggtcttcggggcactgggtcccatcggtccctcctcacctgggctcaccctcgggggtctggccgtgagcgagcaccggctcagcaacaagctgctggcttggagcggcgtcctcgagtggcaggagaagcgcagaccctactctgactccactgcaaagctgaagcggaccctgccctgccaagcctacgtgaaccaaggcgagaacctggagaccgaccagtggccgcagaagctgatcatgcagctgatccctcagcagctgctggcgggctgcatgctgttcccccacatctccccctgtgaggtgcgcgtgctcatgctcctgtactcgtccaagaagaagatcttcatgggcctcatcccctacgaccagagcggcttcgtcagtgccatccggcaggtcatcaccacc

SEQ ID NO: 169994 - DNA, 1443 bp, Homo sapiens
  Payload ID: 13473
  Gene Symbol: PTOV1
  Gene Name: prostate tumor overexpressed 1
  ENST ID: ENST00000600603
  CDS Start-End: 128-1252
gcaatccgtaccctcagtgggttccctttcagtgggttcctttgtccccaggcccattattccgtcctcccctcttccctgatgtattttggcgcggtctcctggctctgcgggcccagggctccggatgaggtctcccgccgtcccgacccccgcaaggggccagcttggtgtcgccttcgttcttctgccaccccattcggaaggtgctcgggtcttcggggcactgggtcccatcggtccctcctcacctgggctcaccctcgggggtctggccgtgagcgagcaccggctcagcaacaagctgctggcttggagcggcgtcctcgagtggcaggagaagcgcagaccctactctgactccactgcaaagctgaagcggaccctgccctgccaagcctacgtgaaccaaggcgagaacctggagaccgaccagtggccgcagaagctgatcatgcagctgatccctcagcagctgctgaccaccctgggccccctgttccggaactcccagttggcacagttccacttcaccaacagagactgcgactcgctcaaggggctctgccgcatcatgggcaacggcttcgcgggctgcatgctgttcccccacatctccccctgtgaggtgcgcgtgctcatgctcctgtactcgtccaagaagaagatcttcatgggcctcatcccctacgaccagagcggcttcgtcagtgccatccggcaggtcatcaccacccgcaagcaggcagtgggacctggtggtgtcaactcaggcccagtccagatcgtcaacaacaagtttctggcatggagtggtgtcatggagtggcaggagcccaggcctgagcccaacagtcggtccaagaggtggctgccatcccacgtctacgtgaaccagggggagatcctgaggaccgagcagtggccaaggaagctgtacatgcagctcatcccgcagcagctgctgaccaccctagtgccgctgttccggaactcgcgcctggtccagttccacttcaccaaggacctggagacactgaagagcctgtgccggatcatggacaatggcttcagaagaaaatcttcattggcctcatcccccatgaccagggcaactttgtcaacggcatccggcgtgtcattgccaaccagcagcaggtcctgcagcggaacctggagcaggagcaacagcaacgagggatgggggggtagtggttaccccgggctgggcccctccaggagtcacagatgaggcccccgcagagactgtgcttgggagcctgtggccagcagcccccactgcacccctgcccccaggtgacacgcttctgagcaggggcccctggggacttcaactgcccagcaacatggaggatggtgtcctgaggcctccaaggacggtccccacccctctacgtttccccaataaagccttttaaaaac

SEQ ID NO: 169995 - DNA, 1587 bp, Homo sapiens
  Payload ID: 13473
  Gene Symbol: PTOV1
  Gene Name: prostate tumor overexpressed 1
  Uniprot ID: Q86YD1
  ENST ID: ENST00000601675
  CDS Start-End: 105-1355
ctcccccgaagccgcgcgcccgcgcccgcgcccctcagtcggtggagcccgcagccccccttgtggcccgcggcagctccccgcccgctcggcccgcgcccgccatggtccgtccgcgccgtgccccgtaccgctccggcgccgggggccccctcgggggtcgcggccgccctccgcggcccctcgtggtgcgcgccgtccgctcgcgctcctggcctgccagcccccgaggcccgcagcctccgcggatccgggcccgctcggcccctcccatggaaggtgctcgggtcttcggggcactgggtcccatcggtccctcctcacctgggctcaccctcgggggtctggccgtgagcgagcaccggctcagcaacaagctgctggcttggagcggcgtcctcgagtggcaggagaagcgcagaccctactctgactccactgcaaagctgaagcggaccctgccctgccaagcctacgtgaaccaaggcgagaacctggagaccgaccagtggccgcagaagctgatcatgcagctgatccctcagcagctgctgaccaccctgggccccctgttccggaactcccagttggcacagttccacttcaccaacagagactgcgactcgctcaaggggctctgccgcatcatgggcaacggcttcgcgggctgcatgctgttcccccacatctccccctgtgaggtgcgcgtgctcatgctcctgtactcgtccaagaagaagatcttcatgggcctcatcccctacgaccagagcggcttcgtcagtgccatccggcaggtcatcaccacccgcaagcaggcagtgggacctggtggtgtcaactcaggcccagtccagatcgtcaacaacaagtttctggcatggagtggtgtcatggagtggcaggagcccaggcctgagcccaacagtcggtccaagaggtggctgccatcccacgtctacgtgaaccagggggagatcctgaggaccgagcagtggccaaggaagctgtacatgcagctcatcccgcagcagctgctgaccaccctagtgccgctgttccggaactcgcgcctggtccagttccacttcaccaaggacctggagacactgaagagcctgtgccggatcatggacaatggcttcgccggctgcgtgcacttttcctacaaagcatcgtgtgagatccgcgtgcttatgctcctgtactcttcagagaagaaaatcttcattggcctcatcccccatgaccagggcaactttgtcaacggcatccggcgtgtcattgccaaccagcagcaggtcctgcagcggaacctggagcaggagcaacagcaacgagggatgggggggtagtggttaccccgggctgggcccctccaggagtcacagatgaggcccccgcagagactgtgcttgggagcctgtggccagcagcccccactgcacccctgcccccaggtgacacgcttctgagcaggggcccctggggacttcaactgcccagcaacatggaggatggtgtcctgaggcctccaaggacggtccccacccctctacgtttccccaataaagccttttaaaaacc

SEQ ID NO: 169996 - DNA, 424 bp, Homo sapiens
  Payload ID: 13474
  Gene Symbol: PRM1
  Gene Name: protamine 1
  Uniprot ID: P04553
  ENST ID: ENST00000312511
  CDS Start-End: 113-268
gcagagctggcccctgactcacagcccacagagttccacctgctcacaggttggctggctcagccaaggtggtgccctgctctgagcattcaggccaagcccatcctgcaccatggccaggtacagatgctgtcgcagccagagccggagcagatattaccgccagagacaaagaagtcgcagacgaaggaggcggagctgccagacacggaggagagccatgaggtgctgccgccccaggtacagaccgcgatgtagaagacactaattgcacaaaatagcacatccaccaaactcctgcctgagaatgttaccagacttcaagatcctcttgccacatcttgaaaatgccaccatccaataaaaatcaggagcctgctaaggaacaatgccgcctgtcaataaatgttgaaaagtcatccca

SEQ ID NO: 169997 - DNA, 680 bp, Homo sapiens
  Payload ID: 13475
  Gene Symbol: PRM2
  Gene Name: protamine 2
  Uniprot ID: P04554
  ENST ID: ENST00000241808
  CDS Start-End: 111-419
agaccagaccaacagtaacaccaagggcaggtgggcaggcctccgccctcctcccctactccagggcccactgcagcctcagcccaggagccaccagatctcccaacaccatggtccgataccgcgtgaggagcctgagcgaacgctcgcacgaggtgtacaggcagcagttgcatgggcaagagcaaggacaccacggccaagaggagcaagggctgagcccggagcacgtcgaggtctacgagaggacccatggccagtctcactataggcgcagacactgctctcgaaggaggctgcaccggatccacaggcggcagcatcgctcctgcagaaggcgcaaaagacgctcctgcaggcaccggaggaggcatcgcagaggctgcagaaccaggaagagaacatgcagaaggcactaagcttcctgggcccctcacccccagctggaaattaagaaaaagtcgcccgaaacaccaagtgaggccatagcaattcccctacatcaaatgctcaagcccccagctggaagttaagagaaagtcacctgcccaagaaacaccgagtgaggccatagcaactcccctacatcaaatgctcaagccctgagttgccgccgagaagcccacaagatctgagtgaaacgagcaaaagtcacctgcccaataaagcttgacaagaca

SEQ ID NO: 169998 - DNA, 723 bp, Homo sapiens
  Payload ID: 13475
  Gene Symbol: PRM2
  Gene Name: protamine 2
  Uniprot ID: P04554
  ENST ID: ENST00000435245
  CDS Start-End: 111-533
agaccagaccaacagtaacaccaagggcaggtgggcaggcctccgccctcctcccctactccagggcccactgcagcctcagcccaggagccaccagatctcccaacaccatggtccgataccgcgtgaggagcctgagcgaacgctcgcacgaggtgtacaggcagcagttgcatgggcaagagcaaggacaccacggccaagaggagcaagggctgagcccggagcacgtcgaggtctacgagaggacccatggccagtctcactataggcgcagacactgctctcgaaggaggctgcaccggatccacaggcggcagcatcgctcctgcagaaggcgcaaaagacgctcctgcaggcaccggaggaggcatcgcagagagtccctaggtgaccccctcaaccagaactttctttcccaaaaggctgcagaaccaggaagagaacatgcagaaggcactaagcttcctgggcccctcacccccagctggaaattaagaaaaagtcgcccgaaacaccaagtgaggccatagcaattcccctacatcaaatgctcaagcccccagctggaagttaagagaaagtcacctgcccaagaaacaccgagtgaggccatagcaactcccctacatcaaatgctcaagccctgagttgccgccgagaagcccacaagatctgagtgaaacgagcaaaagtcacctgcccaataaagcttgacaagac

SEQ ID NO: 169999 - DNA, 424 bp, Homo sapiens
  Payload ID: 13476
  Gene Symbol: PRM3
  Gene Name: protamine 3
  Uniprot ID: Q9NNZ6
  ENST ID: ENST00000327157
  CDS Start-End: 47-358
acccaccgcctcacctccttgcccagagagacaggcaacgtagaccatgggttcccgctgtgccaagctcaacacaggccagagcccaggccacagcccaggccacagcacgggccatggccggggccacgaatcctccatgaaaaagctcatggcctgtgtgagtcaggataacttctccttgtcatcagcgggcgaggaagaggaggaagaggaggaggagggggaagaggaggagaaagaagagctgccggtgcagggcaagctgctgctgctggagcctgagcggcaggaggagggccacaaggacaacgccgaggcccagcagagccccgagcccaagcggacaccctcctgacccgcaacgaaggcccaggaagggacgcccactgctgctccggcgacagtgttcagagaagagtca

SEQ ID NO: 170000 - DNA, 1293 bp, Homo sapiens
  Payload ID: 13477
  Gene Symbol: PRSS22
  Gene Name: Protease, serine 22
  ENST ID: ENST00000634299
  CDS Start-End: 1-936
gtaggggccctggggttgagagacttgagagtctccctgggcactggagggctagaggttcctcaccaccagaaaggggctggggtgagaggggcctgtgggaagccccagcagctgaaccgggttgtgggcggcgaggacagcactgacagcgagtggccctggatcgtgagcatccagaagaatgggacccaccactgcgcaggttctctgctcaccagccgctgggtgatcactgctgcccactgtttcaaggagtatgtcaacctgaacaaaccatacctgttctctgtgctgctgggggcctggcagctggggaaccctggctctcggtcccagaaggtgggtgttgcctgggtggagccccaccctgtgtattcctggaaggaaggtgcctgtgcagacattgccctggtgcgtctcgagcgctccatacagttctcagagcgggtcctgcccatctgcctacctgatgcctctatccacctccctccaaacacccactgctggatctcaggctgggggagcatccaagatggagttcccttgccccaccctcagaccctgcagaagctgaaggttcctatcatcgactcggaagtctgcagccatctgtactggcggggagcaggacagggacccatcactgaggacatgctgtgtgccggctacttggagggggagcgggatgcttgtctgggcgactccgggggccccctcatgtgccaggtggacggcgcctggctgctggccggcatcatcagctggggcgagggctgtgccgagcgcaacaggcccggggtctacatcagcctctctgcgcaccgctcctgggtggagaagatcgtgcaaggggtgcagctccgcgggcgcgctcaggggggtggggccctcagggcaccgagccagggctctggggccgccgcgcgctcctagggcgcagcgggacgcggggctcggatctgaaaggcggccagatccagatctggatctggatctgcggcggcctcgggcggtttcccccgccgtaaataggctcatctacctctgggggcccggacggctgctgcggaaaggaaaccccctccccgacccgcccgacggcctcaggccccgcctccaaggcatcaggccccgcccaacggcctcatgtccccgcccccacgacttccggccccgcccccgggccccaccgcttttgtgtatataaatgttaatgatttttataggtatttgtaaccctgcccacatatcttatttattcctccaatttcaataaattatttattctcc

SEQ ID NO: 170001 - DNA, 972 bp, Homo sapiens
  Payload ID: 13477
  Gene Symbol: PRSS22
  Gene Name: Protease, serine 22
  ENST ID: ENST00000634552
  CDS Start-End: 1-972
tgggctgtgggcaaagcttggggtgcaggcctagggattgggattccgggggtgggttgtaggaagttggagattcccccagcctgtgggaagccccagcagctgaaccgggttgtgggcggcgaggacagcactgacagcgagtggccctggatcgtgagcatccagaagaatgggacccaccactgcgcaggttctctgctcaccagccgctgggtgatcactgctgcccactgtttcaaggacaacctgaacaaaccatacctgttctctgtgctgctgggggcctggcagctggggaaccctggctctcggtcccagaaggtgggtgttgcctgggtggagccccaccctgtgtattcctggaaggaaggtgcctgtgcagacattgccctggtgcgtctcgagcgctccatacagttctcagagcgggtcctgcccatctgcctacctgatgcctctatccacctccctccaaacacccactgctggatctcaggctgggggagcatccaagatggagttcccttgccccaccctcagaccctgcagaagctgaaggttcctatcatcgactcggaagtctgcagccatctgtactggcggggagcaggacagggacccatcactgaggacatgctgtgtgccggctacttggagggggagcgggatgcttgtctgggcgactccgggggccccctcatgtgccaggtggacggcgcctggctgctggccggcatcatcagctggggcgagggctgtgccgagcgcaacaggcccggggtctacatcagcctctctgcgcaccgctcctgggctctgccccactgctctgtgccgccaggccagccctctcctgcccctcgtcttcctctttttcctctcctctccctgctcctgtcctgtttctcctccttgtcaactctcattctccgaccctcagttttgtgggtgcctgtccctttaccccat

SEQ ID NO: 170002 - DNA, 1349 bp, Homo sapiens
  Payload ID: 13477
  Gene Symbol: PRSS22
  Gene Name: Protease, serine 22
  ENST ID: ENST00000634511
  CDS Start-End: 39-992
ctctcgagcctgctgcctgctcccccgccccaccagccatggtggtttctggagcgcccccagccctgggtgggggctgtctcggcaccttcacctccctgctgctgctggcgtcgacagccatcctcaatgcggccaggatacctgttcccccagcctgtgggaagccccagcagctgaaccgggttgtgggcggcgaggacagcactgacagcgagtggccctggatcgtgagcatccagaagaatgggacccaccactgcgcaggttctctgctcaccagccgctgggtgatcactgctgcccactgtttcaaggacaacctgaacaaaccatacctgttctctgtgctgctgggggcctggcagctggggaaccctggctctcggtcccagaaggtgggtgttgcctgggtggagccccaccctgtgtattcctggaaggaaggtgcctgtgcagacattgccctggtgcgtctcgagcgctccatacagttctcagagcgggtcctgcccatctgcctacctgatgcctctatccacctccctccaaacacccactgctggatctcaggctgggggagcatccaagatggagttcccttgccccaccctcagaccctgcagaagctgaaggttcctatcatcgactcggaagtctgcagccatctgtactggcggggagcaggacagggacccatcactgaggacatgctgtgtgccggctacttggagggggagcgggatgcttgtctgggcgactccgggggccccctcatgtgccaggtggacggcgcctggctgctggccggcatcatcagctggggcgagggctgtgccgagcgcaacaggcccggggtctacatcagcctctctgcgcaccgctcctgggtggagaagatcgtgcaaggggtgcagctccgcgggcgcgctcaggggggtggggccctcagggcaccgagccagggctctggggccgccgcgcgctcctagggcgcagcgggacgcggggctcggatctgaaaggcggccagatccagatctggatctggatctgcggcggcctcgggcggtttcccccgccgtaaataggctcatctacctctgggggcccggacggctgctgcggaaaggaaaccccctccccgacccgcccgacggcctcaggccccgcctccaaggcatcaggccccgcccaacggcctcatgtccccgcccccacgacttccggccccgcccccgggccccaccgcttttgtgtatataaatgttaatgatttttataggtatttgtaaccctgcccacatatcttatttattcctccaatttcaataaattatttattctcc

SEQ ID NO: 170003 - DNA, 1130 bp, Homo sapiens
  Payload ID: 13478
  Gene Symbol: PRSS27
  Gene Name: protease, serine 27
  Uniprot ID: Q9BQR3
  ENST ID: ENST00000302641
  CDS Start-End: 56-928
ccaacgcttctgccaccgccgaccacggccctgcgccccagccaggcctgaggacatgaggcggccggcggcggtgccgctcctgctgctgctgtgttttgggtctcagagggccaaggcagcaacagcctgtggtcgccccaggatgctgaaccgaatggtgggcgggcaggacacgcaggagggcgagtggccctggcaagtcagcatccagcgcaacggaagccacttctgcgggggcagcctcatcgcggagcagtgggtcctgacggctgcgcactgcttccgcaacacctctgagacgtccctgtaccaggtcctgctgggggcaaggcagctagtgcagccgggaccacacgctatgtatgcccgggtgaggcaggtggagagcaaccccctgtaccagggcacggcctccagcgctgacgtggccctggtggagctggaggcaccagtgcccttcaccaattacatcctccccgtgtgcctgcctgacccctcggtgatctttgagacgggcatgaactgctgggtcactggctggggcagccccagtgaggaagacctcctgcccgaaccgcggatcctgcagaaactcgctgtgcccatcatcgacacacccaagtgcaacctgctctacagcaaagacaccgagtttggctaccaacccaaaaccatcaagaatgacatgctgtgcgccggcttcgaggagggcaagaaggatgcctgcaagggcgactcgggcggccccctggtgtgcctcgtgggtcagtcgtggctgcaggcgggggtgatcagctggggtgagggctgtgcccgccagaaccgcccaggtgtctacatccgtgtcaccgcccaccacaactggatccatcggatcatccccaaactgcagttccagccagcgaggttgggcggccagaagtgagacccccggggccaggagccccttgagcagagctctgcacccagcctgcccgcccacaccatcctgctggtcctcccagcgctgctgttgcacctgtgagccccaccagactcatttgtaaatagcgctccttcctcccctctcaaatacccttattttatttatgtttctcccaataaaaacccagcctgtgtgccagctg

SEQ ID NO: 170004 - DNA, 1297 bp, Homo sapiens
  Payload ID: 13478
  Gene Symbol: PRSS27
  Gene Name: protease, serine 27
  ENST ID: ENST00000565903
  CDS Start-End: 392-514
ctgtctcaaaaaattaaaaaaaataataataataataatgaatgaagctggacggacttcgcgtgcaccgcggtcagctcggggtctgctggggggtctgggtcagctcagggtccaggaaccgaggccaacggcaccccgtgctgcgctggggtgaggggtctgccctggggtctcggggttcagggctaggtcacggaggagtcggctctgggcgcttccttcctgaggagaggagctgggcaggccgggccgacgggttgggccgcatagccgggcctgtgctcatctccagcataaaactccacttcatggagcctgcacctcgctcgtgctccaacgcttctgccaccgccgaccacggccctgcgccccagccaggcctgaggacatgaggcggccggcggcggtgccgctcctgctgctgctgtgttttgggtctcagagggccaaggcagcaacagcacctctgagacgtccctgtaccaggtcctgctgggggcaaggcagctagtgcagccgggaccacacgctatgtatgcccgggtgaggcaggtggagagcaaccccctgtaccagggcacggcctccagcgctgacgtggccctggtggagctggaggcaccagtgcccttcaccaattacatcctccccgtgtgcctgcctgacccctcggtgatctttgagacgggcatgaactgctgggtcactggctggggcagccccagtgaggaagacctcctgcccgaaccgcggatcctgcagaaactcgctgtgcccatcatcgacacacccaagtgcaacctgctctacagcaaagacaccgagtttggctaccaacccaaaaccatcaagaatgacatgctgtgcgccggcttcgaggagggcaagaaggatgcctgcaagggcgactcgggcggccccctggtgtgcctcgtgggtcagtcgtggctgcaggcgggggtgatcagctggggtgagggctgtgcccgccagaaccgcccaggtgtctacatccgtgtcaccgcccaccacaactggatccatcggatcatccccaaactgcagttccagccagcgaggttgggcggccagaagtgagacccccggggccaggagccccttgagcagagctctgcacccagcctgcccgcccacaccatcctgctggtcctcccagcgctgctgttgcacctgtgagccccaccagactcatttgtaaatagcgctccttcctcccctctcaaatacccttattttatttatgtttctcccaataaaaacccagcctgtgtgc

SEQ ID NO: 170005 - DNA, 1363 bp, Homo sapiens
  Payload ID: 13478
  Gene Symbol: PRSS27
  Gene Name: protease, serine 27
  ENST ID: ENST00000562249
  CDS Start-End: 392-514
ctgtctcaaaaaattaaaaaaaataataataataataatgaatgaagctggacggacttcgcgtgcaccgcggtcagctcggggtctgctggggggtctgggtcagctcagggtccaggaaccgaggccaacggcaccccgtgctgcgctggggtgaggggtctgccctggggtctcggggttcagggctaggtcacggaggagtcggctctgggcgcttccttcctgaggagaggagctgggcaggccgggccgacgggttgggccgcatagccgggcctgtgctcatctccagcataaaactccacttcatggagcctgcacctcgctcgtgctccaacgcttctgccaccgccgaccacggccctgcgccccagccaggcctgaggacatgaggcggccggcggcggtgccgctcctgctgctgctgtgttttgggtctcagagggccaaggcagcaacagcacctctgagacgtccctgtaccaggtcctgctgggggcaaggcagctagtgcagccgggaccacacgctatgtatgcccgggtgaggcaggtggagagcaaccccctgtaccagggcacggcctccagcgctgacgtggccctggtggagctggaggcaccagtgcccttcaccaattacatcctccccgtgtgcctgcctgacccctcggtgatctttgagacgggcatgaactgctgggtcactggctggggcagccccagtgaggaagacctcctgcccgaaccgcggatcctgcagaaactcgctgtgcccatcatcgacacacccaagtgcaacctgctctacagcaaagacaccgagtttggctaccaacccaaaaccatcaagaatgacatgctgtgcgccggcttcgaggagggcaagaaggatgcctgcaaggtgggagcaatgtggtgtccatggggactcagtccccaccgccaggcccagggcagggtgggatcatgccccgctccatgggctatgcattcaaccagctgagcagcttgttttgaaaaggcagattccagggccgggtgtggtggctcacgcctgtaatcccagcactttgggaggccaaggagggtggatcacaaggtcaggagatggagaccatcctggctaacacagtgaaaccccatctctactaaaaatacaaaaaattagccaggcgtggtggtgggcgcctgtagtcccagctacttgggaggctgaggcaggagaatggcgcgaacctgggaggcggagcttgcagtgagccgagatcgcgccagtgcactccagcctgggccacagagcaagactccgtctcaataaaaaaaaaaaagaaaaagcagattcctggaccccaccccag

SEQ ID NO: 170006 - DNA, 800 bp, Homo sapiens
  Payload ID: 13479
  Gene Symbol: PRSS1
  Gene Name: protease, serine, 1 (trypsin 1)
  Uniprot ID: P07477
  ENST ID: ENST00000311737
  CDS Start-End: 7-750
accaccatgaatccactcctgatccttacctttgtggcagctgctcttgctgccccctttgatgatgatgacaagatcgttgggggctacaactgtgaggagaattctgtcccctaccaggtgtccctgaattctggctaccacttctgtggtggctccctcatcaacgaacagtgggtggtatcagcaggccactgctacaagtcccgcatccaggtgagactgggagagcacaacatcgaagtcctggaggggaatgagcagttcatcaatgcagccaagatcatccgccacccccaatacgacaggaagactctgaacaatgacatcatgttaatcaagctctcctcacgtgcagtaatcaacgcccgcgtgtccaccatctctctgcccaccgcccctccagccactggcacgaagtgcctcatctctggctggggcaacactgcgagctctggcgccgactacccagacgagctgcagtgcctggatgctcctgtgctgagccaggctaagtgtgaagcctcctaccctggaaagattaccagcaacatgttctgtgtgggcttccttgagggaggcaaggattcatgtcagggtgattctggtggccctgtggtctgcaatggacagctccaaggagttgtctcctggggtgatggctgtgcccagaagaacaagcctggagtctacaccaaggtctacaactatgtgaaatggattaagaacaccatagctgccaatagctaaagcccccagtatctcttcagtctctataccaataaagtgaccctgttctc

SEQ ID NO: 170007 - DNA, 803 bp, Homo sapiens
  Payload ID: 13479
  Gene Symbol: PRSS1
  Gene Name: protease, serine, 1 (trypsin 1)
  ENST ID: ENST00000486171
  CDS Start-End: 18-803
aggcacactctaccaccatgaatccactcctgatccttacctttgtggcagctgctcttgctgccccctttgatgatgatgacaagatcgttgggggctacaactgtgaggagaattctgtcccctaccaggtgtccctgaattctggctaccacttctgtggtggctccctcatcaacgaacagtgggtggtatcagcaggccactgctacaagtcggcaattaagtcaaaattttcaggaagagggtgtgaatatcaccgcatccaggtgagactgggagagcacaacatcgaagtcctggaggggaatgagcagttcatcaatgcagccaagatcatccgccacccccaatacgacaggaagactctgaacaatgacatcatgttaatcaagctctcctcacgtgcagtaatcaacgcccgcgtgtccaccatctctctgcccaccgcccctccagccactggcacgaagtgcctcatctctggctggggcaacactgcgagctctggcgccgactacccagacgagctgcagtgcctggatgctcctgtgctgagccaggctaagtgtgaagcctcctaccctggaaagattaccagcaacatgttctgtgtgggcttccttgagggaggcaaggattcatgtcagggtgattctggtggccctgtggtctgcaatggacagctccaaggagttgtctcctggggtgatggctgtgcccagaagaacaagcctggagtctacaccaaggtctacaactatgtgaaatggattaagaacaccatagctgccaatagctaa

SEQ ID NO: 170008 - DNA, 626 bp, Homo sapiens
  Payload ID: 13479
  Gene Symbol: PRSS1
  Gene Name: protease, serine, 1 (trypsin 1)
  ENST ID: ENST00000492062
  CDS Start-End: 1-429
tccctcatcaacgaacagtgggtggtatcagcaggccactgctacaagtcccgcatccaggtgagactgggagagcacaacatcgaagtcctggaggggaatgagcagttcatcaatgcagccaagatcatccgccacccccaatacgacaggaagactctgaacaatgacatcatgttaatcaagctctcctcacgtgcagtaatcaacgcccgcgtgtccaccatctctctgcccaccgcccctccagccactggcacgaagtgcctcatctctggctggggcaacactgcgagctctggcgccgactacccagacgagctgcagtgcctggatgctcctgtgctgagccaggctaagtgtgaagcctcctaccctggaaagattaccagcaacatgttctgtgtgggcttccttgagggagggtgattctggtggccctgtggtctgcaatggacagctccaaggagttgtctcctggggtgatggctgtgcccagaagaacaagcctggagtctacaccaaggtctacaactatgtgaaatggattaagaacaccatagctgccaatagctaaagcccccagtatctcttcagtctctataccaataaagtgaccctgttct

SEQ ID NO: 170009 - DNA, 787 bp, Homo sapiens
  Payload ID: 13479
  Gene Symbol: PRSS1
  Gene Name: protease, serine, 1 (trypsin 1)
  ENST ID: ENST00000622109
  CDS Start-End: 18-731
aggcacactctaccaccatgaatccactcctgatccttacctttgtggcagctgctcttgctgccccctttgatgatgatgacaagatcgttgggggctacaactgtgaggagaattctgtcccctaccaggtgtccctgaattctggctaccacttctgtggtggctccctcatcaacgaacagtgggtggtatcagcaggccactgctacaagtcccgcatccaggtgagactgggagagcacaacatcaatgcagccaagatcatccgccacccccaatacgacaggaagactctgaacaatgacatcatgttaatcaagctctcctcacgtgcagtaatcaacgcccgcgtgtccaccatctctctgcccaccgcccctccagccactggcacgaagtgcctcatctctggctggggcaacactgcgagctctggcgccgactacccagacgagctgcagtgcctggatgctcctgtgctgagccaggctaagtgtgaagcctcctaccctggaaagattaccagcaacatgttctgtgtgggcttccttgagggaggcaaggattcatgtcagggtgattctggtggccctgtggtctgcaatggacagctccaaggagttgtctcctggggtgatggctgtgcccagaagaacaagcctggagtctacaccaaggtctacaactatgtgaaatggattaagaacaccatagctgccaatagctaaagcccccagtatctcttcagtctctataccaataaagtgaccctgttctcactgtc

SEQ ID NO: 170010 - DNA, 800 bp, Homo sapiens; identical to SEQ ID NO: 170006
  Payload ID: 13479
  Gene Symbol: PRSS1
  Gene Name: protease, serine, 1 (trypsin 1)
  Uniprot ID: P07477
  ENST ID: ENST00000616256
  CDS Start-End: 7-750

SEQ ID NO: 170011 - DNA, 802 bp, Homo sapiens
  Payload ID: 13479
  Gene Symbol: PRSS1
  Gene Name: protease, serine, 1 (trypsin 1)
  ENST ID: ENST00000612126
  CDS Start-End: 7-750
accaccatgaatccactcctgatccttacctttgtggcagctgctcttgctgccccctttgatgatgatgacaagatcgttgggggctacaactgtgaggagaattctgtcccctaccaggtgtccctgaattctggctaccacttctgtggtggctccctcatcaacgaacagtgggtggtatcagcaggccactgctacaagtcccgcatccaggtgagactgggagagcacaacatcgaagtcctggaggggaatgagcagttcatcaatgcagccaagatcatccgccacccccaatacgacaggaagactctgaacaatgacatcatgttaatcaagctctcctcacgtgcagtaatcaacgcccgcgtgtccaccatctctctgcccaccgcccctccagccactggcacgaagtgcctcatctctggctggggcaacactgcgagctctggcgccgactacccagacgagctgcagtgcctggatgctcctgtgctgagccaggctaagtgtgaagcctcctaccctggaaagattaccagcaacatgttctgtgtgggcttccttgagggaggcaaggattcatgtcagggtgactctggtggccctgtggtctgcaacggacagctccaaggagttgtctcctggggctatggctgtgcccagaagaacaggcctggagtctacaccaaggtctacaactatgtggactggattaaggacaccatagctgccaacagctaaagcctctggtacctctgcagtctctataccaataaagtgaccttgctttcac

SEQ ID NO: 170012 - DNA, 787 bp, Homo sapiens; identical to SEQ ID NO: 170009
  Payload ID: 13479
  Gene Symbol: PRSS1
  Gene Name: protease, serine, 1 (trypsin 1)
  ENST ID: ENST00000619214
  CDS Start-End: 18-731

SEQ ID NO: 170013 - DNA, 803 bp, Homo sapiens; identical to SEQ ID NO: 170007
  Payload ID: 13479
  Gene Symbol: PRSS1
  Gene Name: protease, serine, 1 (trypsin 1)
  ENST ID: ENST00000633245
  CDS Start-End: 18-803

SEQ ID NO: 170014 - DNA, 626 bp, Homo sapiens; identical to SEQ ID NO: 170008
  Payload ID: 13479
  Gene Symbol: PRSS1
  Gene Name: protease, serine, 1 (trypsin 1)
  ENST ID: ENST00000633149
  CDS Start-End: 1-429

SEQ ID NO: 170015 - DNA, 4809 bp, Homo sapiens
  Payload ID: 13480
  Gene Symbol: PRSS12
  Gene Name: protease, serine, 12 (neurotrypsin, motopsin)
  Uniprot ID: P56730
  ENST ID: ENST00000296498
  CDS Start-End: 284-2911
gctgcgtccgcgccttctcttttccggtcctctccgccggccggggctcggctgagctccagatttccccacccgcggccgccgccaggggacaggagccgaggcgcggcagggcaccagcggcgggaggcaaggttggggaggcgagggcggtccgcgtgcgggggcgggagggggctgggggattcgagggacgcggcagccccgcccccgccccctcctcttctccgctccaagcccgagaagctggggagcatggaccagaccccgcagcgctggcaccatgacgctcgcccgcttcgtgctagccctgatgttaggggcgctccccgaagtggtcggctttgattctgtcctcaatgattccctccaccacagccaccgccattcgccccctgcgggtccgcactacccctattaccttcccacccagcagcggcccccgaggacgcgtccgccgccgcctctcccgcgcttcccgcgccccccgcgggcgctccctgcccagcgcccgcacgccctccaggccgggcacacgccccggccgcacccctggggctgccccgccggcgagccatgggtcagcgtgacggacttcggcgccccgtgtctgcggtgggcggaggtgccacccttcctggagcggtcgcccccagcgagctgggctcagctgcgaggacagcgccacaacttttgtcggagccccgacggcgcgggcagaccctggtgtttctacggagacgcccgtggcaaggtggactggggctactgcgactgcagacacggatcagtacgacttcgtggcggcaaaaatgagtttgaaggcacagtggaagtatatgcaagtggagtttggggcactgtctgtagcagccactgggatgattctgatgcatcagtcatttgtcaccagctgcagctgggaggaaaaggaatagcaaaacaaaccccgttttctggactgggccttattcccatttattggagcaatgtccgttgccgaggagatgaagaaaatatactgctttgtgaaaaagacatctggcagggtggggtgtgtcctcagaagatggcagctgctgtcacgtgtagcttttcccatggcccaacgttccccatcattcgccttgctggaggcagcagtgtgcatgaaggccgggtggagctctaccatgctggccagtggggaaccgtttgtgatgaccaatgggatgatgccgatgcagaagtgatctgcaggcagctgggcctcagtggcattgccaaagcatggcatcaggcatattttggggaagggtctggcccagttatgttggatgaagtacgctgcactgggaatgagctttcaattgagcagtgtccaaagagctcctggggagagcataactgtggccataaagaagatgctggagtgtcctgtacccctctaacagatggggtcatcagacttgcaggtgggaaaggcagccatgagggtcgcttggaggtatattacagaggccagtggggaactgtctgtgatgatggctggactgagctgaatacatacgtggtttgtcgacaattgggatttaaatatggtaaacaagcatctgccaaccattttgaagaaagcacagggcccatatggttggatgacgtcagctgctcaggaaaggaaaccagatttcttcagtgttccaggcgacagtggggaaggcatgactgcagccaccgcgaagatgttagcattgcctgctaccctggcggcgagggacacaggctctctctgggttttcctgtcagactgatggatggagaaaataagaaagaaggacgagtggaggtttttatcaatggccagtggggaacaatctgtgatgatggatggactgataaggatgcagctgtgatctgtcgtcagcttggctacaagggtcctgccagagcaagaaccatggcttactttggagaaggaaaaggacccatccatgtggataatgtgaagtgcacaggaaatgagaggtccttggctgactgtatcaagcaagatattggaagacacaactgccgccacagtgaagatgcaggagttatttgtgattattttggcaagaaggcctcaggtaacagtaataaagagtccctctcatctgtttgtggcttgagattactgcaccgtcggcagaagcggatcattggtgggaaaaattctttaaggggtggttggccttggcaggtttccctccggctgaagtcatcccatggagatggcaggctcctctgcggggctacgctcctgagtagctgctgggtcctcacagcagcacactgtttcaagaggtatggcaacagcactaggagctatgctgttagggttggagattatcatactctggtaccagaggagtttgaggaagaaattggagttcaacagattgtgattcatcgggagtatcgacccgaccgcagtgattatgacatagccctggttagattacaaggaccagaagagcaatgtgccagattcagcagccatgttttgccagcctgtttaccactctggagagagaggccacagaaaacagcatccaactgttacataacaggatggggtgacacaggacgagcctattcaagaacactacaacaagcagccattcccttacttcctaaaaggttttgtgaagaacgttataagggtcggtttacagggagaatgctttgtgctggaaacctccatgaacacaaacgcgtggacagctgccagggagacagcggaggaccactcatgtgtgaacggcccggagagagctgggtggtgtatggggtgacctcctgggggtatggctgtggagtcaaggattctcctggtgtttataccaaagtctcagcctttgtaccttggataaaaagtgtcaccaaactgtaattcttcatggaaacttcaaagcagcatttaaacaaatggaaaactttgaacccccactattagcactcagcagagatgacaacaaatggcaagatctgtttttgctttgtgttgtggtaaaaaattgtgtaccccctgctgcttttgagaaatttgtgaacattttcagaggcctcagtgtagtggaagtgataatccttaaatgaacattttctaccctaatttcactggagtgacttattctaagcctcatctatcccctacctatttctcaaaatcattctatgctgattttacaaaagatcatttttacatttgaactgagaaccccttttaattgaatcagtggtgtctgaaatcatattaaatacccacatttgacataaatgcggtaccctttactacactcatgagtggcatatttatgcttaggtcttttcaaaagacttgacaagaaatcttcatattctctgtagcctttgtcaagtgaggaaatcagtggttaaagaattccactataaacttttaggcctgaataggagtagtaaagcctcaaggacatctgcctgtcacaatatattctcaaagtgatctgatatttggaaacaagtatccttgttgagtaccaagtgctacagaaaccataagataaaaatactttctacctacagcgtataaactagcaaaatttgaaaggatttctggtaactaaatgccagctggacatacaacctattttatccaacacattaacatatctactatatttgcttttaacaagcacctcatcatagtccacgttccccgaccatgatgtaagagtgccacccactgacacttccctgtaactgacttatacctgcaggttttcccaagcccaacctgatacaatccaatcttaaaatatactagtcaaaatgctttcctggcctacacattgaaaagttctaatacatacagcagttataacatatgccaggcactgcattaggcagctttgcacatcactgacaatttgcaaaaggccagtaaatcttatggtagtagcccttgttttcaaatgggggaaaacaggcttgcctcaaagtgagaccagttggtgaaactgattccaaactccagaaaaaatgctgatttttttccccatggttctcctacctaaatgattggtttccctatggctatttctccaagagttaagggatagctgcttaactatgcacctttacagaacattcttagcagtaatgctcaaatttaaaaggcacactcaagatacttccatgtcatggatccttccccaggtcccagtagtataaatatagggaagaggttagcatgaacttacaaattgttttaagtaatcctcttgaatgccagtcattaaaggactttgcccttctacatcaaattacatccttttcacaaatccccatttctgtaataactggtgcaaacctaaaggtgctttatagttttactactttgcagatttgcaatgctgcatataatgcagaagagcattaaaaacttttgtaaaaactcatgattttgataaacttttaaagtagcgtttatatgtaaatagaactacacatggcacacacacttgcacaagggcttcagaaaaacgtgcaatataggtgagaaaaatgtctattgaaactttctcacaggctgcccttataattaaactagtgttggggcaagcaacatctgtttcaagtagatcagggactagcaaacctaaaaggcagcaagcagcctgcagtttgctcaatccttaagaatacatggttcatacaacatgcttttactatgtcttaagtgtgacttttgaaagatacaagtgttctgtgcatatttgtgtaaataaatacataattttccaccttgta

SEQ ID NO: 170016 - DNA, 2716 bp, Homo sapiens
  Payload ID: 13481
  Gene Symbol: PRSS16
  Gene Name: protease, serine, 16 (thymus)
  Uniprot ID: Q9NQE7
  ENST ID: ENST00000230582
  CDS Start-End: 16-1560
agagtcccgaacaccatggccgtctggcttgcccagtggctgggccctctgctcttggtttccctctggggactcttggctccagcctcccttcttaggcgcctgggtgagcacattcagcagtttcaggagagctctgcccagggcctgggcctgagcctggggccaggtgctgcagccctcccaaaagtggggtggctggagcaactgctggaccccttcaacgtgtccgacagacgatccttcctacagcgttactgggtgaatgaccaacattgggttggccaggatggacccatattcctgcatctagggggtgagggcagccttgggcctggctcagtgatgagaggccatcccgcagccttggccccagcctggggcgccctggtgataagcctggaacacagattttatggcctgagtatacctgctggaggcctggaaatggcccagctccgcttcttgtccagccgccttgcgctggctgatgtggtctctgcccgcctggcactttcccgcctctttaacatctcctcctccagcccctggatctgcttcggaggctcctatgccggctccttggccgcctgggcccggctgaagttcccccatctcattttcgcgtcggtcgcctcctccgccccggtgcgggccgtgctggatttctccgagtataatgacgtggtatcccgaagcctaatgagcaccgcgatcggcgggtccctggagtgccgggcggcggtgtccgtcgccttcgctgaagtggagcggcggctgcgctcgggtggggcggctcaagcagcattgcggacggagctgagcgcttgcgggcccctgggccgcgctgaaaaccaggcggagctgttgggggcgctgcaggcactggtgggaggtgtagtgcagtatgatgggcagacgggagcgccgctaagcgtgcgacagctctgcggacttctcctcgggggcgggggcaaccgcagccactccacgccctactgcgggcttcgtcgggcggtgcagattgtcttgcacagcctgggccagaagtgtttaagcttttcccgagcagagacagtggcacagctgaggagcacagaacctcaactgtctggtgtgggtgaccggcagtggttgtatcagacatgtaccgagttcggcttctatgtcacctgtgagaatcccagatgtcctttctcccagctcccagcactgccctcccagctagacctatgtgagcaggtgtttgggctctcagccttgtcagtagcccaggctgtggctcagacgaactcctactacggtggccagacccctggggctaacaaagtgctgtttgttaatggggacacagacccctggcatgtgctaagtgtaacacaggctttaggatcctcagaatcaactcttcttatccgcactggctcccactgcttggacatggcacctgagaggccctcagactcccccagcctccgcctagggcgccagaacatcttccagcagctacagacctggctcaagctggcaaaggagagccagattaagggtgaagtctgaatctcataccctttccactccctgcatggtcacctcagtcctggacatacttgttcactgaacaaaagaaagcagcttgttttgaaagaagaaactcccaggaattggaattcagcacctgttccgcacgtaattggcatgtgtctgcaaacatccttattcccaacttaaagtgctttattgcagagagttatggaaatataagtggatgattattctcattgtaaatattggtattttgaatgttaaatgtcaaacaaatgtgacttatgctggtgccctcgccctgctgatcagattctggttcaaattctgccactccagctcctgggttaggggctttgctgtaagtttctttttctggactttagatcctgaacctgtccttgcttctcagtttctctcactgtacccctttccctcagtctcttcctctctctttcccctgtcactatttgtctttctaatctccttctgtttctctgaatatcttcatttctatctctgtgtttctgtctatttctctgtttatctttctgtccttcaatctgtgtttttgtttctggctctccgtcagtgtctttttctctcctctctctcttgctctgccatggctatttccactgctctatttctgactctcatttttggtctctgtgtgtctcctagtcactttctttctcactctgtctctgtctctatttctgtctctcctctgctgtgtcctcaatctctctgtctccctgaggctctatttctgtctctcctctgctgtgtcctcaatctctctgtctccctgaggctctatttctgtctctgatgctcttcttctgtgtctctatttctcttcctgtcacttaatcttttccttctctatctctcttatttagtcttccttccacacccttcactcaccatcttttcccacaatcaaatatcactccctggtacttccagcttccaactctagggattcatgattctggtggagattccttcttccagggcctgggaggatagggctaatcccaagggtgcctgcttaggctatgttagctgtgacaggaacctgccatagatttgcactgttctttcctaaagatcaattattttcagcaataaatacttctcagctttttgtatgtctttgtatgca

SEQ ID NO: 170017 - DNA, 1464 bp, Homo sapiens
  Payload ID: 13481
  Gene Symbol: PRSS16
  Gene Name: protease, serine, 16 (thymus)
  ENST ID: ENST00000454665
  CDS Start-End: 38-475
aaaggtcctcctgggggagaacagagtcccgaacaccatggccgtctggcttgcccagtggctgggccctctgctcttggtttccctctggggactcttggctccagcctcccttcttaggcgcctgggtgagcacattcagcagtttcaggagagctctgcccagggcctgggcctgagcctggggccaggtgctgcagccctcccaaaagtggggtggctggagcaactgctggaccccttcaacgtgtccgacagacgatccttcctacagcgttactgggtgaatgaccaacattgggttggccaggatggacccatattcctgcatctagggggtgagggcagccttgggcctggctcagtgatgagagattgtcttgcacagcctgggccagaagtgtttaagcttttcccgagcagagacagtggcacagctgaggagcacagaacctcaactgtctggtgtgggtgaccggcagtggttgtatcagacatgtaccgagttcggcttctatgtcacctgtgagaatcccagatgtcctttctcccagctcccagcactgccctcccagctagacctatgtgagcaggtgtttgggctctcagccttgtcagtagcccaggctgtggctcagacgaactcctactacggtggccagacccctggggctaacaaagtgctgtttgttaatggggacacagacccctggcatgtgctaagtgtaacacaggctttaggatcctcagaatcaactcttcttatccgcactggctcccactgcttggacatggcacctgagaggccctcagactcccccagcctccgcctagggcgccagaacatcttccagcagctacagacctggctcaagctggcaaaggagagccagattaagggtgaagtctgaatctcataccctttccactccctgcatggtcacctcagtcctggacatacttgttcactgaacaaaagaaagcagcttgttttgaaagaagaaactcccaggaattggaattcagcacctgttccgcacgtaattggcatgtgtctgcaaacatccttattcccaacttaaagtgctttattgcagagagttatggaaatataagtggatgattattctcattgtaaatattggtattttgaatgttaaatgtcaaacaaatgtgacttatgctggtgccctcgccctgctgatcagattctggttcaaattctgccactccagctcctgggttaggggctttgctgtaagtttctttttctggactttagatcctgaacctgtccttgcttctcagtttctctcactgtacccctttccctcagtctcttcctctctctttcccctgtcactatttgtctttctaatctccttctgtttctctgaatatcttcatttctatctctgtgtttctgtctatttctctgtttatctttctgtccttcaatctgtg

SEQ ID NO: 170018 - DNA, 1949 bp, Homo sapiens
  Payload ID: 13481
  Gene Symbol: PRSS16
  Gene Name: protease, serine, 16 (thymus)
  ENST ID: ENST00000421826
  CDS Start-End: 38-811
aaaggtcctcctgggggagaacagagtcccgaacaccatggccgtctggcttgcccagtggctgggccctctgctcttggtttccctctggggactcttggctccagcctcccttcttaggcgcctgggtgagcacattcagcagtttcaggagagctctgcccagggcctgggcctgagcctggggccaggtgctgcagccctcccaaaagtggggtggctggagcaactgctggaccccttcaacgtgtccgacagacgatccttcctacagattgtcttgcacagcctgggccagaagtgtttaagcttttcccgagcagagacagtggcacagctgaggagcacagaacctcaactgtctggtgtgggtgaccggcagtggttgtatcagacatgtaccgagttcggcttctatgtcacctgtgagaatcccagatgtcctttctcccagctcccagcactgccctcccagctagacctatgtgagcaggtgtttgggctctcagccttgtcagtagcccaggctgtggctcagacgaactcctactacggtggccagacccctggggctaacaaagtgctgtttgttaatggggacacagacccctggcatgtgctaagtgtaacacaggctttaggatcctcagaatcaactcttcttatccgcactggctcccactgcttggacatggcacctgagaggccctcagactcccccagcctccgcctagggcgccagaacatcttccagcagctacagacctggctcaagctggcaaaggagagccagattaagggtgaagtctgaatctcataccctttccactccctgcatggtcacctcagtcctggacatacttgttcactgaacaaaagaaagcagcttgttttgaaagaagaaactcccaggaattggaattcagcacctgttccgcacgtaattggcatgtgtctgcaaacatccttattcccaacttaaagtgctttattgcagagagttatggaaatataagtggatgattattctcattgtaaatattggtattttgaatgttaaatgtcaaacaaatgtgacttatgctggtgccctcgccctgctgatcagattctggttcaaattctgccactccagctcctgggttaggggctttgctgtaagtttctttttctggactttagatcctgaacctgtccttgcttctcagtttctctcactgtacccctttccctcagtctcttcctctctctttcccctgtcactatttgtctttctaatctccttctgtttctctgaatatcttcatttctatctctgtgtttctgtctatttctctgtttatctttctgtccttcaatctgtgtttttgtttctggctctccgtcagtgtctttttctctcctctctctcttgctctgccatggctatttccactgctctatttctgactctcatttttggtctctgtgtgtctcctagtcactttctttctcactctgtctctgtctctatttctgtctctcctctgctgtgtcctcaatctctctgtctccctgaggctctatttctgtctctcctctgctgtgtcctcaatctctctgtctccctgaggctctatttctgtctctgatgctcttcttctgtgtctctatttctcttcctgtcacttaatcttttccttctctatctctcttatttagtcttccttccacacccttcactcaccatcttttcccacaatcaaatatcactccctggtacttccagcttccaactctagggattcatgattctggtggagattccttcttccagggcctgggaggatagggctaatcccaagggtgcctgcttaggctatgttagctgtgacaggaacctgccatagatttgcactgttctttcctaaagatcaattattttcagcaataaatacttctcagctttt

SEQ ID NO: 170019 - DNA, 560 bp, Homo sapiens
  Payload ID: 13481
  Gene Symbol: PRSS16
  Gene Name: protease, serine, 16 (thymus)
  ENST ID: ENST00000468930
  CDS Start-End: 8-286
gaacaccatggccgtctggcttgcccagtggctgggccctctgctcttggtttccctctggggactcttggctccagcctcccttcttaggcgcctgggtgagcacattcagcagtttcaggagagctctgcccagggcctgggcctgagcctggggccaggtgctgcagccctcccaaaagtggggtggctggagcaactgctggaccccttcaacgtgtccgacagacgatccttcctacaggccatcccgcagccttggccccagcctggggcgccctggtgataagcctggaacacagattttatggcctgagtatacctgctggaggcctggaaatggcccagctccgcttcttgtccagccgccttgcattgtcttgcacagcctgggccagaagtgtttaagcttttcccgagcagagacagtggcacagctgaggagcacagaacctcaactgtctggtgtgggtgaccggcagtggttgtatcagacatgtaccgagttcggcttctatgtcacctgtgagaatcccagatgtcctttctcccagctccca

SEQ ID NO: 170020 - DNA, 414 bp, Homo sapiens
  Payload ID: 13481
  Gene Symbol: PRSS16
  Gene Name: protease, serine, 16 (thymus)
  ENST ID: ENST00000485993
  CDS Start-End: 1-414
agtgatgagaggccatcccgcagccttggccccagcctggggcgccctggtgataagcctggaacacagattttatggcctgagtatacctgctggaggcctggaaatggcccagctccgcttcttgtccagccgccttgcgctggctgatgtggtctctgcccgcctggcactttcccgcctctttaacatctcctcctccagcccctggatctgcttcggaggctcctatgccggctccttggccgcctgggcccggctgaagattgtcttgcacagcctgggccagaagtgtttaagcttttcccgagcagagacagtggcacagctgaggagcacagaacctcaactgtctggtgtgggtgaccggcagtggttgtatcagacatgtaccgagttcggcttctatgtcac

SEQ ID NO: 170021 - DNA, 558 bp, Homo sapiens
  Payload ID: 13481
  Gene Symbol: PRSS16
  Gene Name: protease, serine, 16 (thymus)
  ENST ID: ENST00000466364
  CDS Start-End: 8-307
gaacaccatggccgtctggcttgcccagtggctgggccctctgctcttggtttccctctggggactcttggctccagcctcccttcttaggcgcctgggtgagcacattcagcagtttcaggagagctctgcccagggcctgggcctgagcctggggccaggtgctgcagccctcccaaaagtggggtggctggagcaactgctggaccccttcaacgtgtccgacagacgatccttcctacagatgtcacctgtgagaatcccagatgtcctttctcccagctcccagcactgccctcccagctagacctatgtgagcaggtgtttgggctctcagccttgtcagtagcccaggctgtggctcagacgaactcctactacggtggccagacccctggggctaacaaagtgctgtttgttaatggggacacagacccctggcatgtgctaagtgtaacacaggctttaggatcctcagaatcaactcttcttatccgcactggctcccactgcttggacatggcacctgagaggccctcagactcccccagcctccgc

SEQ ID NO: 170022 - DNA, 623 bp, Homo sapiens
  Payload ID: 13481
  Gene Symbol: PRSS16
  Gene Name: protease, serine, 16 (thymus)
  ENST ID: ENST00000470870
  CDS Start-End: 8-508
gaacaccatggccgtctggcttgcccagtggctgggccctctgctcttggtttccctctggggactcttggctccagcctcccttcttaggcgcctgggtgagcacattcagcagtttcaggagagctctgcccagggcctgggcctgagcctggggccaggtgctgcagccctcccaaaagtggggtggctggagcaactgctggaccccttcaacgtgtccgacagacgatccttcctacagcgttactgggtgaatgaccaacattgggttggccaggatggacccatattcctgcatctagggggtgagggcagccttgggcctggctcagtgatgagaggccatcccgcagccttggccccagcctggggcgccctggtgataagcctggaacacagattttatggcctgagtatacctgctggaggcctggaaatggcccagctccgcttcttgtccagccgccttgcattgtcttgcacagcctgggccagaagtgtttaagcttttcccgagcagagacagtggcacagctgaggagcacagaacctcaactgtctggtgtgggtgaccggcagtggttgtatcagacatgtaccgagttcggcttctatgtcac

SEQ ID NO: 170023 - DNA, 492 bp, Homo sapiens
  Payload ID: 13481
  Gene Symbol: PRSS16
  Gene Name: protease, serine, 16 (thymus)
  ENST ID: ENST00000475106
  CDS Start-End: 1-492
agtgatgagaggccatcccgcagccttggccccagcctggggcgccctggtgataagcctggaacacagattttatggcctgagtatacctgctggaggcctggaaatggcccagctccgcttcttgtccagccgccttgcgctggctgatgtggtctctgcccgcctggcactttcccgcctctttaacatctcctcctccagcccctggatctgcttcggaggctcctatgccggctccttggccgcctgggcccggctgaagttcccccatctcattttcgcgtcggtcgcctcctccgccccggtgcgggccgtgctggatttctccgagtataatgacattgtcttgcacagcctgggccagaagtgtttaagcttttcccgagcagagacagtggcacagctgaggagcacagaacctcaactgtctggtgtgggtgaccggcagtggttgtatcagacatgtaccgagttcggcttctatgtcac

SEQ ID NO: 170024 - DNA, 806 bp, Homo sapiens
  Payload ID: 13482
  Gene Symbol: PRSS2
  Gene Name: protease, serine, 2 (trypsin 2)
  ENST ID: ENST00000633114
  CDS Start-End: 7-756
accaccatgaatccactcctgatccttacctttgtggcagctgctcttgctgccccctttgatgatgatgacaagatcgttgggggctacaactgtgaggagaattctgtcccctaccaggtgtccctgaattctggctaccacttctgtggtggctccctcatcaacgaacagtgggtggtatcagcaggccactgctacaagtcccgcatccaggtgagactgggagagcacaacatcgaagtcctggaggggaatgagcagttcatcaatgcagccaagatcatccgccacccccaatacgacaggaagactctgaacaatgacaatgacatcctgctgatcaagctctcctcacctgccgtcatcaattcccgcgtgtccgccatctctctgcccactgcccctccagctgctggcaccgagtccctcatctccggctggggcaacactctgagttctggtgccgactacccagacgagctgcagtgcctggatgctcctgtgctgagccaggctgagtgtgaagcctcctaccctggaaagattaccaacaacatgttctgtgtgggcttcctcgagggaggcaaggattcctgccagggtgattctggtggccctgtggtctccaatggagagctccaaggaattgtctcctggggctatggctgtgcccagaagaacaggcctggagtctacaccaaggtctacaactatgtggactggattaaggacaccatagctgccaacagctaaagcccctggtccctctgcagtctctataccaataaagtgaccctgctctc

SEQ ID NO: 170025 - DNA, 795 bp, Homo sapiens
  Payload ID: 13482
  Gene Symbol: PRSS2
  Gene Name: protease, serine, 2 (trypsin 2)
  Uniprot ID: P07478
  ENST ID: ENST00000632112
  CDS Start-End: 1-744
atgaatctacttctgatccttacctttgttgcagctgctgttgctgccccctttgatgatgatgacaagatcgttgggggctacatctgtgaggagaattctgtcccctaccaggtgtccttgaattctggctaccacttctgcggtggctccctcatcagcgaacagtgggtggtgtcagcaggtcactgctacaagtcccgcatccaggtgagactgggagagcacaacatcgaagtcctggaggggaatgaacagttcatcaatgcagccaagatcatccgccaccccaaatacaacagccggactctggacaatgacatcctgctgatcaagctctcctcacctgccgtcatcaattcccgcgtgtccgccatctctctgcccactgcccctccagctgctggcaccgagtccctcatctccggctggggcaacactctgagttctggtgccgactacccagacgagctgcagtgcctggatgctcctgtgctgagccaggctgagtgtgaagcctcctaccctggaaagattaccaacaacatgttctgtgtgggcttcctcgagggaggcaaggattcctgccagggtgattctggtggccctgtggtctccaatggagagctccaaggaattgtctcctggggctatggctgtgcccagaagaacaggcctggagtctacaccaaggtctacaactatgtggactggattaaggacaccatagctgccaacagctaaagcccctggtccctctgcagtctctataccaataaagtgaccctgctctca

SEQ ID NO: 170026 - DNA, 807 bp, Homo sapiens
  Payload ID: 13482
  Gene Symbol: PRSS2
  Gene Name: protease, serine, 2 (trypsin 2)
  ENST ID: ENST00000632805
  CDS Start-End: 17-757
ggcacactctaccaccatgaatctacttctgatccttacctttgttgcagctgctgttgctgccccctttgatgatgatgacaagatcgttgggggctacatctgtgaggagaattctgtcccctaccaggtgtccttgaattctggctaccacttctgcggtggctccctcatcagcgaacagtgggtggtgtcagcaggtcactgctacaagtcggcaattaactcaaaattatcaggaagagggtgtgaatatcaccgcatccaggtgagactgggagagcacaacatcgaagtcctggaggggaatgaacagttcatcaatgcggccaagatcatccgccaccccaaatacaacagccggactctggacaatgacatcctgctgatcaagctctcctcacctgccgtcatcaattcccgcgagtccctcatctccggctggggcaacactctgagttctggtgccgactacccagacgagctgcagtgcctggatgctcctgtgctgagccaggctgagtgtgaagcctcctaccctggaaagattaccaacaacatgttctgtgtgggcttcctcgagggaggcaaggattcctgccagggtgattctggtggccctgtggtctccaatggagagctccaaggaattgtctcctggggctatggctgtgcccagaagaacaggcctggagtctacaccaaggtctacaactatgtggactggattaaggacaccatagctgccaacagctaaagcccctggtccctctgcagtctctataccaataaagtgaccctgctctc

SEQ ID NO: 170027 - DNA, 795 bp, Homo sapiens
  Payload ID: 13482
  Gene Symbol: PRSS2
  Gene Name: protease, serine, 2 (trypsin 2)
  Uniprot ID: P07478
  ENST ID: ENST00000539842
  CDS Start-End: 1-744
atgaatctacttctgatccttacctttgttgcagctgctgttgctgccccctttgatgatgatgacaagatcgttgggggctacatctgtgaggagaattctgtcccctaccaggtgtccttgaattctggctaccacttctgcggtggctccctcatcagcgaacagtgggtggtgtcagcaggtcactgctacaagtcccgcatccaggtgagactgggagagcacaacatcgaagtcctggaggggaatgaacagttcatcaatgcggccaagatcatccgccaccccaaatacaacagccggactctggacaatgacatcctgctgatcaagctctcctcacctgccgtcatcaattcccgcgtgtccgccatctctctgcccactgcccctccagctgctggcaccgagtccctcatctccggctggggcaacactctgagttctggtgccgactacccagacgagctgcagtgcctggatgctcctgtgctgagccaggctgagtgtgaagcctcctaccctggaaagattaccaacaacatgttctgtgtgggcttcctcgagggaggcaaggattcctgccagggtgattctggtggccctgtggtctccaatggagagctccaaggaattgtctcctggggctatggctgtgcccagaagaacaggcctggagtctacaccaaggtctacaactatgtggactggattaaggacaccatagctgccaacagctaaagcccctggtccctctgcagtctctataccaataaagtgaccctgctctca

SEQ ID NO: 170028 - DNA, 852 bp, Homo sapiens
  Payload ID: 13482
  Gene Symbol: PRSS2
  Gene Name: protease, serine, 2 (trypsin 2)
  ENST ID: ENST00000633969
  CDS Start-End: 17-802
ggcacactctaccaccatgaatctacttctgatccttacctttgttgcagctgctgttgctgccccctttgatgatgatgacaagatcgttgggggctacatctgtgaggagaattctgtcccctaccaggtgtccttgaattctggctaccacttctgcggtggctccctcatcagcgaacagtgggtggtgtcagcaggtcactgctacaagtcggcaattaactcaaaattatcaggaagagggtgtgaatatcaccgcatccaggtgagactgggagagcacaacatcgaagtcctggaggggaatgaacagttcatcaatgcggccaagatcatccgccaccccaaatacaacagccggactctggacaatgacatcctgctgatcaagctctcctcacctgccgtcatcaattcccgcgtgtccgccatctctctgcccactgcccctccagctgctggcaccgagtccctcatctccggctggggcaacactctgagttctggtgccgactacccagacgagctgcagtgcctggatgctcctgtgctgagccaggctgagtgtgaagcctcctaccctggaaagattaccaacaacatgttctgtgtgggcttcctcgagggaggcaaggattcctgccagggtgattctggtggccctgtggtctccaatggagagctccaaggaattgtctcctggggctatggctgtgcccagaagaacaggcctggagtctacaccaaggtctacaactatgtggactggattaaggacaccatagctgccaacagctaaagcccctggtccctctgcagtctctataccaataaagtgaccctgctctc

SEQ ID NO: 170029 - DNA, 886 bp, Homo sapiens
  Payload ID: 13482
  Gene Symbol: PRSS2
  Gene Name: protease, serine, 2 (trypsin 2)
  ENST ID: ENST00000634019
  CDS Start-End: 49-834
agattgcaaggacaacagtgaggctgcataaaaagaacctatgacaggatgcacatgagagagacaaatgtcttcacattgaagaaggggaggagtgcgccattggttttccatcctccagaggcactgattgctgccccctttgatgatgatgacaagatcgttgggggctacatctgtgaggagaattctgtcccctaccaggtgtccttgaattctggctaccacttctgcggtggctccctcatcagcgaacagtgggtggtgtcagcaggtcactgctacaagtcccgcatccaggtgagactgggagagcacaacatcgaagtcctggaggggaatgaacagttcatcaatgcggccaagatcatccgccaccccaaatacaacagccggactctggacaatgacatcctgctgatcaagctctcctcacctgccgtcatcaattcccgcgtgtccgccatctctctgcccactgcccctccagctgctggcaccgagtccctcatctccggctggggcaacactctgagttctggtgccgactacccagacgagctgcagtgcctggatgctcctgtgctgagccaggctgagtgtgaagcctcctaccctggaaagattaccaacaacatgttctgtgtgggcttcctcgagggaggcaaggattcctgccagggtgattctggtggccctgtggtctccaatggagagctccaaggaattgtctcctggggctatggctgtgcccagaagaacaggcctggagtctacaccaaggtctacaactatgtggactggattaaggacaccatagctgccaacagctaaagcccctggtccctctgcagtctctataccaataaagtgaccctgctctcac

SEQ ID NO: 170030 - DNA, 817 bp, Homo sapiens
  Payload ID: 13482
  Gene Symbol: PRSS2
  Gene Name: protease, serine, 2 (trypsin 2)
  ENST ID: ENST00000632998
  CDS Start-End: 18-761
aggcacactctaccaccatgaatccactcctgatccttgcctttgtgggagctgctgttgctgccccctttgatgatgatgacaagatcgttgggggctacatctgtgaggagaattctgtcccctaccaggtgtccttgaattctggctaccacttctgcggtggctccctcatcagcgaacagtgggtggtgtcagcaggtcactgctacaagtcccgcatccaggtgagactgggagagcacaacatcgaagtcctggaggggaatgaacagttcatcaatgcggccaagatcatccgccaccccaaatacaacagccggactctggacaatgacatcctgctgatcaagctctcctcacctgccgtcatcaattcccgcgtgtccgccatctctctgcccactgcccctccagctgctggcaccgagtccctcatctccggctggggcaacactctgagttctggtgccgactacccagacgagctgcagtgcctggatgctcctgtgctgagccaggctgagtgtgaagcctcctaccctggaaagattaccaacaacatgttctgtgtgggcttcctcgagggaggcaaggattcctgccagggtgattctggtggccctgtggtctccaatggagagctccaaggaattgtctcctggggctatggctgtgcccagaagaacaggcctggagtctacaccaaggtctacaactatgtggactggattaaggacaccatagctgccaacagctaaagcccctggtccctctgcagtctctataccaataaagtgaccctgctctcactgtc

SEQ ID NO: 170031 - DNA, 1101 bp, Homo sapiens
  Payload ID: 13483
  Gene Symbol: PRSS21
  Gene Name: protease, serine, 21 (testisin)
  Uniprot ID: Q9Y6M0
  ENST ID: ENST00000005995
  CDS Start-End: 43-987
gagaggaggcagagggggcgtcaggccgcgggagaggaggccatgggcgcgcgcggggcgctgctgctggcgctgctgctggctcgggctggactcaggaagccggagtcgcaggaggcggcgccgttatcaggaccatgcggccgacgggtcatcacgtcgcgcatcgtgggtggagaggacgccgaactcgggcgttggccgtggcaggggagcctgcgcctgtgggattcccacgtatgcggagtgagcctgctcagccaccgctgggcactcacggcggcgcactgctttgaaacctatagtgaccttagtgatccctccgggtggatggtccagtttggccagctgacttccatgccatccttctggagcctgcaggcctactacacccgttacttcgtatcgaatatctatctgagccctcgctacctggggaattcaccctatgacattgccttggtgaagctgtctgcacctgtcacctacactaaacacatccagcccatctgtctccaggcctccacatttgagtttgagaaccggacagactgctgggtgactggctgggggtacatcaaagaggatgaggcactgccatctccccacaccctccaggaagttcaggtcgccatcataaacaactctatgtgcaaccacctcttcctcaagtacagtttccgcaaggacatctttggagacatggtttgtgctggcaatgcccaaggcgggaaggatgcctgcttcggtgactcaggtggacccttggcctgtaacaagaatggactgtggtatcagattggagtcgtgagctggggagtgggctgtggtcggcccaatcggcccggtgtctacaccaatatcagccaccactttgagtggatccagaagctgatggcccagagtggcatgtcccagccagacccctcctggccgctactctttttccctcttctctgggctctcccactcctggggccggtctgagcctacctgagcccatgcagcctggggccactgccaagtcaggccctggttctcttctgtcttgtttggtaataaacacattccagttgatgccttgcagggcattcttcaaaa

SEQ ID NO: 170032 - DNA, 1106 bp, Homo sapiens
  Payload ID: 13483
  Gene Symbol: PRSS21
  Gene Name: protease, serine, 21 (testisin)
  Uniprot ID: Q9Y6M0
  ENST ID: ENST00000450020
  CDS Start-End: 90-992
gagctcccaccccgccccgcccccagggggcgccccgggcccggcgcgagaggaggcagagggggcgtcaggccgcgggagaggaggccatgggcgcgcgcggggcgctgctgctggcgctgctgctggctcgggctggactcaggaagccggagtcgcaggaggcggcgccgttatcaggaccatgcggccgacgggtcatcacgtcgcgcatcgtgggtggagaggacgccgaactcgggcgttggccgtggcaggggagcctgcgcctgtgggattcccacgtatgcggagtgagcctgctcagccaccgctgggcactcacggcggcgcactgctttgaaacctatagtgaccttagtgatccctccgggtggatggtccagtttggccagctgacttccatgccatccttctggagcctgcaggcctactacacccgttacttcgtatcgaatatctatctgagccctcgctacctggggaattcaccctatgacattgccttggtgaagctgtctgcacctgtcacctacactaaacacatccagcccatctgtctccaggcctccacatttgagtttgagaaccggacagactgctgggtgactggctgggggtacatcaaagaggatgaggcactgccatctccccacaccctccaggaagttcaggtcgccatcataaacaactctatgtgcaaccacctcttcctcaagtacagtttccgcaaggacatctttggagacatgggtgactcaggtggacccttggcctgtaacaagaatggactgtggtatcagattggagtcgtgagctggggagtgggctgtggtcggcccaatcggcccggtgtctacaccaatatcagccaccactttgagtggatccagaagctgatggcccagagtggcatgtcccagccagacccctcctggccgctactctttttccctcttctctgggctctcccactcctggggccggtctgagcctacctgagcccatgcagcctggggccactgccaagtcaggccctggttctcttctgtcttgtttggtaataaacacattccagttgatgccttgcagggcattcttcaaaa

SEQ ID NO: 170033 - DNA, 873 bp, Homo sapiens
  Payload ID: 13483
  Gene Symbol: PRSS21
  Gene Name: protease, serine, 21 (testisin)
  ENST ID: ENST00000574813
  CDS Start-End: 1-656
tgctggcgctgctgctggctcgggctggactcaggaagccggagtcgcaggaggcggcgccgttatcaggaccatgcggccgacgggtcatcacgtcgcgcatcgtgggtggagaggacgccgaactcgggcgttggccgtggcaggggagcctgcgcctgtgggattcccacgtatgcggagtgagcctgctcagccaccgctgggcactcacggcggcgcactgctttgaaactgaccttagtgatccctccgggtggatggtccagtttggccagctgacttccatgccatccttctggagcctgcaggcctactacacccgttacttcgtatcgaatatctatctgagccctcgctacctggggaattcaccctatgacattgccttggtgaagctgtctgcacctgtcacctacactaaacacatccagcccatctgtctccaggcctccacatttgagtttgagaaccggacagactgctgggtgactggctgggggtacatcaaagaggatgagggaagttcaggtcgccatcataaacaactctatgtgcaaccacctcttcctcaagtacagtttccgcaaggacatctttggagacatggtttgtgctggcaatgcccaaggcgggaaggatgcctgcttcggtgactcaggtggacccttggcctgtaacaagaatggactgtggtatcagattggagtcgtgagctggggagtgggctgtggtcggcccaatcggcccggtgtctacaccaatatcagccaccactttgagtggatccagaagctgatggcccagagtggcatgtcccagccagacccctcctggccgctactctttttccctcttctctgggctctccca

SEQ ID NO: 170034 - DNA, 809 bp, Homo sapiens
  Payload ID: 13483
  Gene Symbol: PRSS21
  Gene Name: protease, serine, 21 (testisin)
  ENST ID: ENST00000570594
  CDS Start-End: 1-244
gcggggcgctgctgctggcgctgctgctggctcgggctggactcaggaagccggagtcgcaggaggcggcgccgttatcaggaccatgcggccgacgggtcatcacgtcgcgcatcgtgggtggagaggacgccgaactcgggcgttggccgtggcaggggagcctgcgcctgtgggattcccacgtatgcggagtgagcctgctcagccaccgctgggcactcacggcggcgcactgctttgaaacctatagtgaccttagtgatccctccgggtggatggtccagtttggccagctgacttccatgccatccttctggagcctgcaggcctactacacccgttacttcgtatcgaatatctatctgagccctcgctacctggggaattcaccctatgacattgccttggtgaagctgtctgcacctgtcacctacactaaacacatccagcccatctgtctccaggcctccacatttgagtttgagaaccggacagactgctgggtgactggctgggggtacatcaaagaggatgagggaagttcaggtcgccatcataaacaactctatgtgcaaccacctcttcctcaagtacagtttccgcaaggacatctttggagacatggtttgtgctggcaatgcccaaggcgggaaggatgcctgcttcgtgagtgtccttgccaccactcccagcccaggaaagcatcctgtgtccctgtgccttatttgaccctcatgccaaccccgggaggtggagactgttgccccactctgcagatgcagaaacggaggcttggctgctgccag

SEQ ID NO: 170035 - DNA, 860 bp, Homo sapiens
  Payload ID: 13483
  Gene Symbol: PRSS21
  Gene Name: protease, serine, 21 (testisin)
  ENST ID: ENST00000574265
  CDS Start-End: 1-770
ggagcctgcgcctgtgggattcccacgtatgcggagtgagcctgctcagccaccgctgggcactcacggcggcgcactgctttgaaactgaccttagtgatccctccgggtggatggtccagtttggccagctgacttccatgccatccttctggagcctgcaggcctactacacccgttacttcgtatcgaatatctatctgagccctcgctacctggggaattcaccctatgacattgccttggtgaagctgtctgcacctgtcacctacactaaacacatccagcccatctgtctccaggcctccacatttgagtttgagaaccggacagactgctgggtgactggctgggggtacatcaaagaggatgaggcactgccatctccccacaccctccaggaagttcaggtcgccatcataaacaactctatgtgcaaccacctcttcctcaagtacagtttccgcaaggacatctttggagacatggtttgtgctggcaatgcccaaggcgggaaggatgcctgcttcggtgactcaggtggacccttggcctgtaacaagaatggactgtggtatcagattggagtcgtgagctggggagtgggctgtggtcggcccaatcggcccggtgtctacaccaatatcagccaccactttgagtggatccagaagctgatggcccagagtggcatgtcccagccagacccctcctggccgctactctttttccctcttctctgggctctcccactcctggggccggtctgagcctacctgagcccatgcagcctggggccactgccaagtcaggccctggttctcttctgtcttgtttggtaataaacacattccagttga

SEQ ID NO: 170036 - DNA, 626 bp, Homo sapiens
  Payload ID: 13483
  Gene Symbol: PRSS21
  Gene Name: protease, serine, 21 (testisin)
  ENST ID: ENST00000570629
  CDS Start-End: 1-246
gcgcggggcgctgctgctggcgctgctgctggctcgggctggactcaggaagccggagtcgcaggaggcggcgccgttatcaggaccatgcggccgacgggtcatcacgtcgcgcatcgtgggtggagaggacgccgaactcgggcgttggccgtggcaggggagcctgcgcctgtgggattcccacgtatgcggagtgagcctgctcagccaccgctgggcactcacggcggcgcactgctttgaaacgcctactacacccgttacttcgtatcgaatatctatctgagccctcgctacctggggaattcaccctatgacattgccttggtgaagctgtctgcacctgtcacctacactaaacacatccagcccatctgtctccaggcctccacatttgagtttgagaaccggacagactgctgggtgactggctgggggtacatcaaagaggatgaggcactgccatctccccacaccctccaggaagttcaggtcgccatcataaacaactctatgtgcaaccacctcttcctcaagtacagtttccgcaaggacatctttggagacatgggtgactcaggtggacccttggcctgtaacaagaatggactgtggtatcagat

SEQ ID NO: 170037 - DNA, 1106 bp, Homo sapiens; identical to SEQ ID NO: 170032
  Payload ID: 13483
  Gene Symbol: PRSS21
  Gene Name: protease, serine, 21 (testisin)
  ENST ID: ENST00000634454
  CDS Start-End: 90-992

SEQ ID NO: 170038 - DNA, 873 bp, Homo sapiens; identical to SEQ ID NO: 170033
  Payload ID: 13483
  Gene Symbol: PRSS21
  Gene Name: protease, serine, 21 (testisin)
  ENST ID: ENST00000634525
  CDS Start-End: 1-656

SEQ ID NO: 170039 - DNA, 1101 bp, Homo sapiens; identical to SEQ ID NO: 170031
  Payload ID: 13483
  Gene Symbol: PRSS21
  Gene Name: protease, serine, 21 (testisin)
  ENST ID: ENST00000634351
  CDS Start-End: 43-987

SEQ ID NO: 170040 - DNA, 626 bp, Homo sapiens; identical to SEQ ID NO: 170036
  Payload ID: 13483
  Gene Symbol: PRSS21
  Gene Name: protease, serine, 21 (testisin)
  ENST ID: ENST00000635401
  CDS Start-End: 1-246

SEQ ID NO: 170041 - DNA, 809 bp, Homo sapiens; identical to SEQ ID NO: 170034
  Payload ID: 13483
  Gene Symbol: PRSS21
  Gene Name: protease, serine, 21 (testisin)
  ENST ID: ENST00000634924
  CDS Start-End: 1-244

SEQ ID NO: 170042 - DNA, 860 bp, Homo sapiens; identical to SEQ ID NO: 170035
  Payload ID: 13483
  Gene Symbol: PRSS21
  Gene Name: protease, serine, 21 (testisin)
  ENST ID: ENST00000635090
  CDS Start-End: 1-770

SEQ ID NO: 170043 - DNA, 1386 bp, Homo sapiens
  Payload ID: 13484
  Gene Symbol: PRSS22
  Gene Name: protease, serine, 22
  Uniprot ID: Q9GZN4
  ENST ID: ENST00000161006
  CDS Start-End: 67-1020
acacaccctgacccgcatcgccctgggtctctcgagcctgctgcctgctcccccgccccaccagccatggtggtttctggagcgcccccagccctgggtgggggctgtctcggcaccttcacctccctgctgctgctggcgtcgacagccatcctcaatgcggccaggatacctgttcccccagcctgtgggaagccccagcagctgaaccgggttgtgggcggcgaggacagcactgacagcgagtggccctggatcgtgagcatccagaagaatgggacccaccactgcgcaggttctctgctcaccagccgctgggtgatcactgctgcccactgtttcaaggacaacctgaacaaaccatacctgttctctgtgctgctgggggcctggcagctggggaaccctggctctcggtcccagaaggtgggtgttgcctgggtggagccccaccctgtgtattcctggaaggaaggtgcctgtgcagacattgccctggtgcgtctcgagcgctccatacagttctcagagcgggtcctgcccatctgcctacctgatgcctctatccacctccctccaaacacccactgctggatctcaggctgggggagcatccaagatggagttcccttgccccaccctcagaccctgcagaagctgaaggttcctatcatcgactcggaagtctgcagccatctgtactggcggggagcaggacagggacccatcactgaggacatgctgtgtgccggctacttggagggggagcgggatgcttgtctgggcgactccgggggccccctcatgtgccaggtggacggcgcctggctgctggccggcatcatcagctggggcgagggctgtgccgagcgcaacaggcccggggtctacatcagcctctctgcgcaccgctcctgggtggagaagatcgtgcaaggggtgcagctccgcgggcgcgctcaggggggtggggccctcagggcaccgagccagggctctggggccgccgcgcgctcctagggcgcagcgggacgcggggctcggatctgaaaggcggccagatccacatctggatctggatctgcggcggcctcgggcggtttcccccgccgtaaataggctcatctacctctacctctgggggcccggacggctgctgcggaaaggaaaccccctccccgacccgcccgacggcctcaggccccgcctccaaggcatcaggccccgcccaacggcctcatgtccccgcccccacgacttccggccccgccccgggccccagcgcttttgtgtatataaatgttaatgatttttataggtatttgtaaccctgcccacatatcttatttattcctccaatttcaataaattatttattctccagtg

SEQ ID NO: 170044 - DNA, 1037 bp, Homo sapiens
  Payload ID: 13484
  Gene Symbol: PRSS22
  Gene Name: protease, serine, 22
  ENST ID: ENST00000571228
  CDS Start-End: 51-674
atcgccctgggtctctcgagcctgctgcctgctcccccgccccaccagccatggtggtttctggagcgcccccagccctgggtgggggctgtctcggcaccttcacctccctgctgctgctggcgtcgacagccatcctcaatgcggccaggatacctgttcccccagcctgtgggaagccccagcagctgaaccgggttgtgggcggcgaggacagcactgacagcgagtggccctggatcgtgagcatccagaagaatgggacccaccactgcgcagttcccttgccccaccctcagaccctgcagaagctgaaggttcctatcatcgactcggaagtctgcagccatctgtactggcggggagcaggacagggacccatcactgaggacatgctgtgtgccggctacttggagggggagcgggatgcttgtctgggcgactccgggggccccctcatgtgccaggtggacggcgcctggctgctggccggcatcatcagctggggcgagggctgtgccgagcgcaacaggcccggggtctacatcagcctctctgcgcaccgctcctgggtggagaagatcgtgcaaggggtgcagctccgcgggcgcgctcaggggggtggggccctcagggcaccgagccagggctctggggccgccgcgcgctcctagggcgcagcgggacgcggggctcggatctgaaaggcggccagatccacatctggatctggatctgcggcggcctcgggcggtttcccccgccgtaaataggctcatctacctctacctctgggggcccggacggctgctgcggaaaggaaaccccctccccgacccgcccgacggcctcaggccccgcctccaaggcatcaggccccgcccaacggcctcatgtccccgcccccacgacttccggccccgccccgggccccagcgcttttgtgtatataaatgttaatgatttttataggtatttgtaaccctgcccacatatcttatttattcctccaatttcaataaattatttattctcca

SEQ ID NO: 170045 - DNA, 850 bp, Homo sapiens
  Payload ID: 13484
  Gene Symbol: PRSS22
  Gene Name: protease, serine, 22
  ENST ID: ENST00000576381
  CDS Start-End: 1-350
atctcctttccgcttctgctctgtttatctcttgctccttaactgctctgtgcctcggtttcttctacggctgtgaggatgaaacagaaaacgcagcaagtacgcagcgcgcctcggtctccagttaccgtcggcgtcgccatcgcctgctccctctcgcctccgtgttctcccatctcctcgtcctccgctgcttgcctctggggaagcaccgttttgtgttgttcctgccgcaggaggtcaggggagggcacaccagcggcagcagcgtccagagccgaggggctcagccatcctcaatgcggccaggatacctgttcccccagcctgtgggaagccccagcagctgaaccgggttgtgggcggcgaggacagcactgacagcgagtggccctggatcgtgagcatccagaagaatgggacccaccactgcgcaggttctctgctcaccagccgctgggtgatcactgctgcccactgtttcaaggacaacctgaacaaaccatacctgttctctgtgctgctgggggcctggcagctggggaaccctggctctcggtcccagaaggtgggtgttgcctgggtggagccccaccctgtgtattcctggaaggaaggtgcctgtgcagacattgccctggtgcgtctcgagcgctccatacagttctcagagcgggtcctgcccatctgcctacctgatgcctctatccacctccctccaaacacccactgctggatctcaggctgggggagcatccaagatggagttcccttgccccaccctcagaccctgcagaagctgaaggttcctatcatcgactcggaagtctgcagccatctgtactggcgg

SEQ ID NO: 170046 - DNA, 4015 bp, Homo sapiens
  Payload ID: 13485
  Gene Symbol: PRSS23
  Gene Name: protease, serine, 23
  Uniprot ID: O95084
  ENST ID: ENST00000280258
  CDS Start-End: 426-1577
cgcgggtcccgggcaggagagcccgccagagccggtgctgcctggcgccgagaggcccggactggcgactgctgccgcgccaccggggcccacctgcgcagggacgctcggcctcaggccctctgggctgctccaccctgctccggccgcaggcgagcggcgaggggaggggggcacggtttatgtgcagtggggcgggcggcgtccgcgcggcttccccgaggccggaggcggggcgggcgggcctcgggtggcgcggggggcggacccgccagctgcctgcgctgctcgccagcttgctcgcactcggctgtgcggcggggcaggcatgggagccgcgcgctctctcccggcgcccacacctgtctgagcggcgcagcgagccgcggcccgggcgggctgctcggcgcggaacagtgctcggcatggcagggattccagggctcctcttccttctcttctttctgctctgtgctgttgggcaagtgagcccttacagtgccccctggaaacccacttggcctgcataccgcctccctgtcgtcttgccccagtctaccctcaatttagccaagccagactttggagccgaagccaaattagaagtatcttcttcatgtggaccccagtgtcataagggaactccactgcccacttacgaagaggccaagcaatatctgtcttatgaaacgctctatgccaatggcagccgcacagagacgcaggtgggcatctacatcctcagcagtagtggagatggggcccaacaccgagactcagggtcttcaggaaagtctcgaaggaagcggcagatttatggctatgacagcaggttcagcatttttgggaaggacttcctgctcaactaccctttctcaacatcagtgaagttatccacgggctgcaccggcaccctggtggcagagaagcatgtcctcacagctgcccactgcatacacgatggaaaaacctatgtgaaaggaacccagaagcttcgagtgggcttcctaaagcccaagtttaaagatggtggtcgaggggccaacgactccacttcagccatgcccgagcagatgaaatttcagtggatccgggtgaaacgcacccatgtgcccaagggttggatcaagggcaatgccaatgacatcggcatggattatgattatgccctcctggaactcaaaaagccccacaagagaaaatttatgaagattggggtgagccctcctgctaagcagctgccagggggcagaattcacttctctggttatgacaatgaccgaccaggcaatttggtgtatcgcttctgtgacgtcaaagacgagacctatgacttgctctaccagcaatgcgatgcccagccaggggccagcgggtctggggtctatgtgaggatgtggaagagacagcagcagaagtgggagcgaaaaattattggcattttttcagggcaccagtgggtggacatgaatggttccccacaggatttcaacgtggctgtcagaatcactcctctcaaatatgcccagatttgctattggattaaaggaaactacctggattgtagggaggggtgacacagtgttccctcctggcagcaattaagggtcttcatgttcttattttaggagaggccaaattgttttttgtcattggcgtgcacacgtgtgtgtgtgtgtgtgtgtgtgtgtaaggtgtcttataatcttttacctatttcttacaattgcaagatgactggctttactatttgaaaactggtttgtgtatcatatcatatatcatttaagcagtttgaaggcatacttttgcatagaaataaaaaaaatactgatttggggcaatgaggaatatttgacaattaagttaatcttcacgtttttgcaaactttgatttttatttcatctgaacttgtttcaaagatttatattaaatatttggcatacaagagatatgaattcttatatgtgtgcatgtgtgttttcttctgagattcatcttggtggtgggtttttttgtttttttaattcagtgcctgatctttaatgcttccataaggcagtgttcccatttaggaactttgacagcatttgttaggcagaatattttggatttggaggcatttgcatggtagtctttgaacagtaaaatgatgtgttgactatactgatacacatattaaactataccttatagtaaaccagtatcccaagctgcttttagttccaaaaatagtttcttttccaaaggttgttgctctactttgtaggaagtctttgcatatggccctcccaactttaaagtcataccagagtggccaagagtgtttatcccaacccttccatttaacaggatttcactcacatttctggaactagctatttttcagaagacaataatcagggcttaattagaacaggctgtatttcctcccagcaaacagttgtggccacactaaaaacaatcatagcattttacccctggattatagcacatctcatgttttatcatttggatggagtaatttaaaatgaattaaattccagagaacaatggaagcattgcctggcagatgtcacaacagaataaccacttgtttggagcctggcacagtcctccagcctgatcaaaaattattctgcatagttttcagtgtgctttctgggagctatgtacttcttcaatttggaaacttttctctctcatttatagtgaaaatacttggaagttactttaagaaaaccagtgtggcctttttccctctagctttaaaagggccgcttttgctggaatgctctaggttatagataaacaattaggtataatagcaaaaatgaaaattggaagaatgcaaaatggatcagaatcatgccttccaataaaggcctttacacatgttttatcaatatgattatcaaatcacagcatatacagaaaagacttggacttattgtatgtttttattttatggctctcggcctaagcacttctttctaaatgtatcggagaaaaaatcaaatggactacaagcacgtgtttgctgtgcttgcaccccaggtaaacctgcattgtagcaatttgtaaggatattcagatggagcactgtcacttagacattctctgggggattttctgcttgtctttcttgagctttttggaaggataattctgataaggcactcaagaaacgtacaaccacagtgctttcttcaaatcatatgagaaatactatgcatagcaaggagatgcagagccgccaggaaaattctgagttccagcacaattttctttggaatctaacaggaatctagcctgaggaagaagggaggtctccatttctatgtctggtatttgggggttttgtttgtttttgctttagcttggtgaaaaaaagttcactgaacaccaagaccagaatggatttttttaaaaaaatagatgttccttttgtgaagcaccttgattccttgattttgattttttgcaaagttagacaatggcacaaagtcaaaatgaaatcaatgtttagttcacaagtagatgtaatttactaaagaatgatacacccatatgctatatacagcttaactcacagaactgtaaaagaaaattataaaataattcaacatgtccatctttttagtgataataaaagaaagcatggtattaaactatcatagaagtagacagaaaaagaaaaaaggactcatggcattattaatataattagtgctttacatgtgttagttatacatattagaagcatatttgcctagtaaggctagtagaaccacatttcccaaagtgtgctccttaaacactcatgccttatgattttctaccaaaagtaaaaagggttgtattaagtcagaggaagatgcctctccattttccctctctttatcagaggttcacatgcctgtctgcacattaaaagctctgggaagacctgttgtaaagggacaagttgaggttgtaaaatctgcatttaaataaacatctttgatcacaaaa

SEQ ID NO: 170047 - DNA, 613 bp, Homo sapiens
  Payload ID: 13485
  Gene Symbol: PRSS23
  Gene Name: protease, serine, 23
  ENST ID: ENST00000527521
  CDS Start-End: 151-613
attgcctctgtcagtgtgacaggttccacagagctgtcaccctgcaaactcacccttcctccaggagcacaggcgcagagctgcagtggagggtacctgtgtggcttccttgtctgacacagatttgccttcatctgaacagtgctcggcatggcagggattccagggctcctcttccttctcttctttctgctctgtgctgttgggcaagtgagcccttacagtgccccctggaaacccacttggcctgcataccgcctccctgtcgtcttgccccagtctaccctcaatttagccaagccagactttggagccgaagccaaattagaagtatcttcttcatgtggaccccagtgtcataagggaactccactgcccacttacgaagaggccaagcaatatctgtcttatgaaacgctctatgccaatggcagccgcacagagacgcaggtgggcatctacatcctcagcagtagtggagatggggcccaacaccgagactcagggtcttcaggaaagtctcgaaggaagcggcagatttatggctatgacagcaggttcagcatttttgggaaggacttcctgctcaactaccctttctcaacatcagtga

SEQ ID NO: 170048 - DNA, 2172 bp, Homo sapiens
  Payload ID: 13485
  Gene Symbol: PRSS23
  Gene Name: protease, serine, 23
  ENST ID: ENST00000532234
  CDS Start-End: 143-391
gcgctgctcgccagcttgctcgcactcggctgtgcggcggggcaggcatgggagccgcgcgctctctcccggcgcccacacctgtctgagcggcgcagcgagccgcggcccgggcgggctgctcggcgcggatggctccctaatgagtagaatgagacctgtgtgccaaccctggcctagtcctcatgcccccacaactgtgaagcgagagggctcaacagtttcgaattcaattcaaccaccacctcctgaataccaactaggttccaggacctggctagaagcagagacaccaggacagaaaagacagtgttctgctttcatggagttcacagaagagtcgaggagagcttcacatttttcatccattcttaaaattgagccagtttagccctaggaggtgggcaggctctgaggaatcatcaatcaagagaagagaacatcgccagaaacaccatgctgcagtacaaaaattctataaaaataccttttttgagtcattaacataaaatgaagaaaacagcagcagccaagaagagagatgttgaaatttaagagaggaagacagagaagaaaaatccactggataccttatgtgtaattcaccaatctgttggaacacttctgccacgtgtgaagagttttggcagaccaaatccacatgcctgaagtgatgcccaccaacaaagacataaaaattttcaacatttcaacagccatgttggaatcatctgcagaataccgaaaaagtgcccagttggagatttcataaaaataacaggcaatcacacacgttgcaggaactgtgtacagtactgagaacaccccaatcttgaccatcagtctttctaacttgtctgtctttgtcccatccttttgaagatttgaccgaattttgaacaaggccaccaaacctgcagcaatgaacaaagttccaatgaccaaataagtaaagaggggagccaccacgaacccggtgagggcatcgagattttggtttccaacatagcacaagccagtcagttcatctgcatccaccagtctcataatcaagatgacaatggttttcactgcggggatggcccaggctgcaatgtggaaataagagctgtgcatttcaatggcttcatgaccccatttgagtcctgctgccaaaaaccaagtgagtgtcagaataacccaccaaatggagctggccattccaaaaaagtacatcagcaagaaaattattgcacatcctgtgttcttaagtccttcttggatgagaacaggttctgctgcctcttcaaaatcacaggatatcctttcccggcctacagtcagcctgacaatataagcaatgctataaatattatagcacatactgagaaatatgatggggcgctcagggtaggaaaacctagaagaatcgatcaggaaggtcagtactgtgaaggcagtggagatgaaacacaggctggcccacacagccatccagatatcagtgaactccttggctgagcggctgtataagccagcatcatagccacacttgagcacacagttcaggctccttttcacccagatgtactgatcagaattggttcccacagagtgacactcttccccaggctggatgggggttttgtgaggtaagggcacctcttcatcacctggcccttccatgcacatgtggttgtggtcgttctgtggtgggaatttgctgcagttcagactctctggccaggcaaatccaaattccttcaggacgggttcacagcgtctcttgactgaaagacacatgccgccgcatgggccaatggggatgttgatcttctctgtgcacattggcacataaacagaacaaaggaagaactggaaaagtaacaaaatgaacacacacaaaaaaaacaatgacttggaagtttgaccaaatgctcccacaaagctgagttgaatgcttccaggcaatctaggtatctacttttaaaccaacctatcgggagtctgtctgtttactctgacctcaaacaagggcgcctgataatccatcacttacatacttttcttagtttggctttagtaatcctttccagaagaatgtacataaataaataaataaaataaatagggtctgaagaattgcataagccctctttgcacaacacttgaaataaatcttaaaaaactggc

SEQ ID NO: 170049 - DNA, 2043 bp, Homo sapiens
  Payload ID: 13485
  Gene Symbol: PRSS23
  Gene Name: protease, serine, 23
  ENST ID: ENST00000533902
  CDS Start-End: 143-418
gcgctgctcgccagcttgctcgcactcggctgtgcggcggggcaggcatgggagccgcgcgctctctcccggcgcccacacctgtctgagcggcgcagcgagccgcggcccgggcgggctgctcggcgcggatggctccctaatgagtagaatgagacctgtgtgccaaccctggcctagtcctcatgcccccacaactgtgaagcgagagggctcaacagtttcgaattcaattcaaccaccacctcctgaataccaactaggttccaggacctggctagaagcagagacaccaggacagaaaagacagtgttctgctttcatggagttcacagaagagtcgaggagaattcaccaatctgttggaacacttctgccacgtgtgaagagttttggcagaccaaatccacatgcctgaagtgatgcccaccaacaaagacataaaaattttcaacatttcaacagccatgttggaatcatctgcagaataccgaaaaagtgcccagttggagatttcataaaaataacaggcaatcacacacgttgcaggaactgtgtacagtactgagaacaccccaatcttgaccatcagtctttctaacttgtctgtctttgtcccatccttttgaagatttgaccgaattttgaacaaggccaccaaacctgcagcaatgaacaaagttccaatgaccaaataagtaaagaggggagccaccacgaacccggtgagggcatcgagattttggtttccaacatagcacaagccagtcagttcatctgcatccaccagtctcataatcaagatgacaatggttttcactgcggggatggcccaggctgcaatgtggaaataagagctgtgcatttcaatggcttcatgaccccatttgagtcctgctgccaaaaaccaagtgagtgtcagaataacccaccaaatggagctggccattccaaaaaagtacatcagcaagaaaattattgcacatcctgtgttcttaagtccttcttggatgagaacaggttctgctgcctcttcaaaatcacaggatatcctttcccggcctacagtcagcctgacaatataagcaatgctataaatattatagcacatactgagaaatatgatggggcgctcagggtaggaaaacctagaagaatcgatcaggaaggtcagtactgtgaaggcagtggagatgaaacacaggctggcccacacagccatccagatatcagtgaactccttggctgagcggctgtataagccagcatcatagccacacttgagcacacagttcaggctccttttcacccagatgtactgatcagaattggttcccacagagtgacactcttccccaggctggatgggggttttgtgaggtaagggcacctcttcatcacctggcccttccatgcacatgtggttgtggtcgttctgtggtgggaatttgctgcagttcagactctctggccaggcaaatccaaattccttcaggacgggttcacagcgtctcttgactgaaagacacatgccgccgcatgggccaatggggatgttgatcttctctgtgcacattggcacataaacagaacaaaggaagaactggaaaagtaacaaaatgaacacacacaaaaaaaacaatgacttggaagtttgaccaaatgctcccacaaagctgagttgaatgcttccaggcaatctaggtatctacttttaaaccaacctatcgggagtctgtctgtttactctgacctcaaacaagggcgcctgataatccatcacttacatacttttcttagtttggctttagtaatcctttccagaagaatgtacataaataaataaataaaataaatagggtctgaagaattgcataagccctctttgcacaacacttgaaataaatcttaaaaaactggctttcaatctccttccattttagaaactatttgaaaaagctaaagaaactaatatgactcatttaggtggtttatttttatccccgtttctttatcattttaaaaataaaagttaaaaaaaaa

SEQ ID NO: 170050 - DNA, 1144 bp, Homo sapiens
  Payload ID: 13486
  Gene Symbol: PRSS3
  Gene Name: protease, serine, 3
  Uniprot ID: P35030
  ENST ID: ENST00000342836
  CDS Start-End: 309-1094
ggagttcctggggccagagacatctccaagggaaggtcaagggcctggaggatgtgcggacctgacgacagatgccccgcacgctggccgggaccgggaagggcggtcaagtgtggaaagggtctggcggctgccaggcctggcagagtggagcggggcggggcgcagcggggcggggcgggcctggagctgcacccgcttctgggtggacgcacttggcgagcggcgcgggatgcagacggctgcgaggcgctgggcacaggttgccaggacaaccgtgaggctgcataaaaagaacctatgacaggatgcacatgagagagacaagtggcttcacattgaagaaggggaggagtgcgccattggttttccatcctccagatgcactgattgctgtcccctttgacgatgatgacaagattgttgggggctacacctgtgaggagaattctctcccctaccaggtgtccctgaattctggctcccacttctgcggtggctccctcatcagcgaacagtgggtggtatcagcagctcactgctacaagacccgcatccaggtgagactgggagagcacaacatcaaagtcctggaggggaatgagcagttcatcaatgcggccaagatcatccgccaccctaaatacaacagggacactctggacaatgacatcatgctgatcaaactctcctcacctgccgtcatcaatgcccgcgtgtccaccatctctctgcccaccacccctccagctgctggcactgagtgcctcatctccggctggggcaacactctgagctttggtgctgactacccagacgagctgaagtgcctggatgctccggtgctgacccaggctgagtgtaaagcctcctaccctggaaagattaccaacagcatgttctgtgtgggcttccttgagggaggcaaggattcctgccagcgtgactctggtggccctgtggtctgcaacggacagctccaaggagttgtctcctggggccatggctgtgcctggaagaacaggcctggagtctacaccaaggtctacaactatgtggactggattaaggacaccatcgctgccaacagctaaagcccccggtccctctgcagtctctataccaataaagtggccctgctctc

SEQ ID NO: 170051 - DNA, 966 bp, Homo sapiens
  Payload ID: 13486
  Gene Symbol: PRSS3
  Gene Name: protease, serine, 3
  Uniprot ID: P35030
  ENST ID: ENST00000361005
  CDS Start-End: 1-915
atgtgcggacctgacgacagatgccccgcacgctggccgggaccgggaagggcggtcaagtgtggaaagggtctggcggctgccaggcctggcagagtggagcggggcggggcgcagcggggcggggcgggcctggagctgcacccgcttctgggtggacgcacttggcgagcggcgcgggatgcagacggctgcgaggcgctgggcacagttgctgtcccctttgacgatgatgacaagattgttgggggctacacctgtgaggagaattctctcccctaccaggtgtccctgaattctggctcccacttctgcggtggctccctcatcagcgaacagtgggtggtatcagcagctcactgctacaagacccgcatccaggtgagactgggagagcacaacatcaaagtcctggaggggaatgagcagttcatcaatgcggccaagatcatccgccaccctaaatacaacagggacactctggacaatgacatcatgctgatcaaactctcctcacctgccgtcatcaatgcccgcgtgtccaccatctctctgcccaccacccctccagctgctggcactgagtgcctcatctccggctggggcaacactctgagctttggtgctgactacccagacgagctgaagtgcctggatgctccggtgctgacccaggctgagtgtaaagcctcctaccctggaaagattaccaacagcatgttctgtgtgggcttccttgagggaggcaaggattcctgccagcgtgactctggtggccctgtggtctgcaacggacagctccaaggagttgtctcctggggccatggctgtgcctggaagaacaggcctggagtctacaccaaggtctacaactatgtggactggattaaggacaccatcgctgccaacagctaaagcccccggtccctctgcagtctctataccaataaagtggccctgctctca

SEQ ID NO: 170052 - DNA, 834 bp, Homo sapiens
  Payload ID: 13486
  Gene Symbol: PRSS3
  Gene Name: protease, serine, 3
  Uniprot ID: P35030
  ENST ID: ENST00000379405
  CDS Start-End: 40-783
gacaggccttccaccaccagtcaggcacactctaccaccatgaatccattcctgatccttgcctttgtgggagctgctgttgctgtcccctttgacgatgatgacaagattgttgggggctacacctgtgaggagaattctctcccctaccaggtgtccctgaattctggctcccacttctgcggtggctccctcatcagcgaacagtgggtggtatcagcagctcactgctacaagacccgcatccaggtgagactgggagagcacaacatcaaagtcctggaggggaatgagcagttcatcaatgcggccaagatcatccgccaccctaaatacaacagggacactctggacaatgacatcatgctgatcaaactctcctcacctgccgtcatcaatgcccgcgtgtccaccatctctctgcccaccacccctccagctgctggcactgagtgcctcatctccggctggggcaacactctgagctttggtgctgactacccagacgagctgaagtgcctggatgctccggtgctgacccaggctgagtgtaaagcctcctaccctggaaagattaccaacagcatgttctgtgtgggcttccttgagggaggcaaggattcctgccagcgtgactctggtggccctgtggtctgcaacggacagctccaaggagttgtctcctggggccatggctgtgcctggaagaacaggcctggagtctacaccaaggtctacaactatgtggactggattaaggacaccatcgctgccaacagctaaagcccccggtccctctgcagtctctataccaataaagtggccctgctctca

SEQ ID NO: 170053 - DNA, 623 bp, Homo sapiens
  Payload ID: 13486
  Gene Symbol: PRSS3
  Gene Name: protease, serine, 3
  ENST ID: ENST00000457896
  CDS Start-End: 91-623
ggcgcgggatgcagacggctgcgaggcgctgggcacaggttgccaggacaaccgtgaggctgcataaaaagaacctatgacaggatgcacatgagagagacaagtggcttcacattgaagaaggggaggagtgcgccattggttttccatcctccagatgcactgattgctgtcccctttgacgatgatgacaagattgttgggggctacacctgtgaggagaattctctcccctaccaggtgtccctgaattctggctcccacttctgcggtggctccctcatcagcgaacagtgggtggtatcagcagctcactgctacaagacccgcatccaggtgagactgggagagcacaacatcaaagtcctggaggggaatgagcagttcatcaatgcggccaagatcatccgccaccctaaatacaacagggacactctggacaatgacatcatgctgatcaaactctcctcacctgccgtcatcaatgcccgcgtgtccaccatctctctgcccaccacccctccagctgctggcactgagtgcctcatctccggctggggcaacactctgagctttggtgctgactacccagacgagctgaagtgcctggatgctccggtgct

SEQ ID NO: 170054 - DNA, 786 bp, Homo sapiens
  Payload ID: 13486
  Gene Symbol: PRSS3
  Gene Name: protease, serine, 3
  Uniprot ID: P35030
  ENST ID: ENST00000429677
  CDS Start-End: 14-736
ggttccgactcgcatgggacctgcgggggaggttgctgtcccctttgacgatgatgacaagattgttgggggctacacctgtgaggagaattctctcccctaccaggtgtccctgaattctggctcccacttctgcggtggctccctcatcagcgaacagtgggtggtatcagcagctcactgctacaagacccgcatccaggtgagactgggagagcacaacatcaaagtcctggaggggaatgagcagttcatcaatgcggccaagatcatccgccaccctaaatacaacagggacactctggacaatgacatcatgctgatcaaactctcctcacctgccgtcatcaatgcccgcgtgtccaccatctctctgcccaccacccctccagctgctggcactgagtgcctcatctccggctggggcaacactctgagctttggtgctgactacccagacgagctgaagtgcctggatgctccggtgctgacccaggctgagtgtaaagcctcctaccctggaaagattaccaacagcatgttctgtgtgggcttccttgagggaggcaaggattcctgccagcgtgactctggtggccctgtggtctgcaacggacagctccaaggagttgtctcctggggccatggctgtgcctggaagaacaggcctggagtctacaccaaggtctacaactatgtggactggattaaggacaccatcgctgccaacagctaaagcccccggtccctctgcagtctctataccaataaagtggccctgctctc

SEQ ID NO: 170055 - DNA, 1694 bp, Homo sapiens
  Payload ID: 13487
  Gene Symbol: PRSS33
  Gene Name: protease, serine, 33
  Uniprot ID: Q8NF86
  ENST ID: ENST00000293851
  CDS Start-End: 161-1003
ggagctgaggacagacagaaggaccacggagggggtgacgggctggtgtgaggattggtgcccctgggccaggactctcctctcttctccctgctggctccagaccagagtccaagccctaggcagtgccacccttacccagcccagccttgaagacagaatgagaggggtttcctgtctccaggtcctgctccttctggtgctgggagctgctgggactcagggaaggaagtctgcagcctgcgggcagccccgcatgtccagtcggatcgttgggggccgggatggccgggacggagagtggccgtggcaggcgagcatccagcatcgtggggcacacgtgtgcggggggtcgctcatcgccccccagtgggtgctgacagcggcgcactgcttccccaggagggcactgccagctgagtaccgcgtgcgcctgggggcgctgcgtctgggctccacctcgccccgcacgctctcggtgcccgtgcgacgggtgctgctgcccccggactactccgaggacggggcccgcggcgacctggcactgctgcagctgcgtcgcccggtgcccctgagcgctcgcgtccaacccgtctgcctgcccgtgcccggcgcccgcccgccgcccggcacaccatgccgggtcaccggctggggcagcctccgcccaggagtgcccctcccagagtggcgaccgctacaaggagtaagggtgccgctgctggactcgcgcacctgcgacggcctctaccacgtgggcgcggacgtgccccaggctgagcgcattgtgctgcctgggagtctgtgtgccggctacccccagggccacaaggacgcctgccagggtgattctgggggacctctgacctgcctgcagtctgggagctgggtcctggtgggcgtggtgagctggggcaagggttgtgccctgcccaaccgtccaggggtctacaccagtgtggccacatatagcccctggattcaggctcgcgtcagcttctaatgctagccggtgaggctgacctggagccagctgctggggtccctcagcctcctggttcatccaggcacctgcctataccccacatcccttctgcctcgaggccaagatgcctaaaaaagctaaaggccaccccaccccccacccaccacctcctgcctcctctcctctttggggatcaccagctctgactccaccaaccctcatccaggaatctgccatgagtcccagggagtcacactccccactcccttcctggcttgtatttacttttcttggccctggccagggctgggcgcaaggcacgcagtgatgggcaaaccaattgctgcccatctggcctgtgtgcccatctttttctggagaaagtcagattcacagcatgacagagatttgacaccagggagatcctccatagctggctttgaggacacggggaccacagccatgagcggcctctaagagctgagagacagccggcagggaatcggaaccctcagacccacagccgcaaggcactggattctggcagcaccctgaaggagctgggaagtaagttcttccccagcctccagataagagccccgccggccaatcccttcatttcaacctaaagagaccctaagcagagaacctagctgagccactcctgacctacaaagttgtgacttaataaatgtgtgctttaagctgc

SEQ ID NO: 170056 - DNA, 1676 bp, Homo sapiens
  Payload ID: 13487
  Gene Symbol: PRSS33
  Gene Name: protease, serine, 33
  Uniprot ID: Q8NF86
  ENST ID: ENST00000570702
  CDS Start-End: 143-985
ccaggacttccgtctgagatgggatttctggacagaacaatggagcgcagaagctccagcaacgtgtgctctgcagggagcccagaccagagtccaagccctaggcagtgccacccttacccagcccagccttgaagacagaatgagaggggtttcctgtctccaggtcctgctccttctggtgctgggagctgctgggactcagggaaggaagtctgcagcctgcgggcagccccgcatgtccagtcggatcgttgggggccgggatggccgggacggagagtggccgtggcaggcgagcatccagcatcgtggggcacacgtgtgcggggggtcgctcatcgccccccagtgggtgctgacagcggcgcactgcttccccaggagggcactgccagctgagtaccgcgtgcgcctgggggcgctgcgtctgggctccacctcgccccgcacgctctcggtgcccgtgcgacgggtgctgctgcccccggactactccgaggacggggcccgcggcgacctggcactgctgcagctgcgtcgcccggtgcccctgagcgctcgcgtccaacccgtctgcctgcccgtgcccggcgcccgcccgccgcccggcacaccatgccgggtcaccggctggggcagcctccgcccaggagtgcccctcccagagtggcgaccgctacaaggagtaagggtgccgctgctggactcgcgcacctgcgacggcctctaccacgtgggcgcggacgtgccccaggctgagcgcattgtgctgcctgggagtctgtgtgccggctacccccagggccacaaggacgcctgccagggtgattctgggggacctctgacctgcctgcagtctgggagctgggtcctggtgggcgtggtgagctggggcaagggttgtgccctgcccaaccgtccaggggtctacaccagtgtggccacatatagcccctggattcaggctcgcgtcagcttctaatgctagccggtgaggctgacctggagccagctgctggggtccctcagcctcctggttcatccaggcacctgcctataccccacatcccttctgcctcgaggccaagatgcctaaaaaagctaaaggccaccccaccccccacccaccacctcctgcctcctctcctctttggggatcaccagctctgactccaccaaccctcatccaggaatctgccatgagtcccagggagtcacactccccactcccttcctggcttgtatttacttttcttggccctggccagggctgggcgcaaggcacgcagtgatgggcaaaccaattgctgcccatctggcctgtgtgcccatctttttctggagaaagtcagattcacagcatgacagagatttgacaccagggagatcctccatagctggctttgaggacacggggaccacagccatgagcggcctctaagagctgagagacagccggcagggaatcggaaccctcagacccacagccgcaaggcactggattctggcagcaccctgaaggagctgggaagtaagttcttccccagcctccagataagagccccgccggccaatcccttcatttcaacctaaagagaccctaagcagagaacctagctgagccactcctgacctacaaagttgtgacttaataaatgtgtgctttaagctgc

SEQ ID NO: 170057 - DNA, 1755 bp, Homo sapiens
  Payload ID: 13487
  Gene Symbol: PRSS33
  Gene Name: protease, serine, 33
  ENST ID: ENST00000576886
  CDS Start-End: 295-642
gggggttaggctccagggcttctgtcgagaccaaggatgcccaaatatctgggtggtgggtgctgcatacctgggccctgggcagaacgaagggtatacagcctgggccaccaggataagtccagaacccaccaggagctgaggacagacagaaggaccacggagggggtgacgggctggtgtgaggattggtgcccctgggccaggactctcctctcttctccctgctggctccagaccagagtccaagccctaggcagtgccacccttacccagcccagccttgaagacagaatgagaggggtttcctgtctccaggtcctgctccttctggtgctgggagctgctgggactcagggaaggaagtctgcagcctgcgggcagccccgcatgtccagtcggatcgttgggggccgggatggccgggacggagagtggccgtggcaggcgagcatccagcatcgtggggcacacgtgtgcggggggtcgctcatcgccccccagtgggtgctgacagcggcgcactgcttccccagtgcccctcccagagtggcgaccgctacaaggagtaagggtgccgctgctggactcgcgcacctgcgacggcctctaccacgtgggcgcggacgtgccccaggctgagcgcattgtgctgcctgggagtctgtgtgccggctacccccagggccacaaggacgcctgccaggtgtgcacccagcctccccagcctccggagtcccctccctgtgcccagcaccctccctccctgaactccaggacccaggacatcccaactcaggctcaggatcctggcctccaacctagaggcaccacgccaggggtctggaaccctgagaactgaagtcctgggagggctgggacttaggctcctctttctcctgcagggtgattctgggggacctctgacctgcctgcagtctgggagctgggtcctggtgggcgtggtgagctggggcaagggttgtgccctgcccaaccgtccaggggtctacaccagtgtggccacatatagcccctggattcaggctcgcgtcagcttctaatgctagccggtgaggctgacctggagccagctgctggggtccctcagcctcctggttcatccaggcacctgcctataccccacatcccttctgcctcgaggccaagatgcctaaaaaagctaaaggccaccccaccccccacccaccacctcctgcctcctctcctctttggggatcaccagctctgactccaccaaccctcatccaggaatctgccatgagtcccagggagtcacactccccactcccttcctggcttgtatttacttttcttggccctggccagggctgggcgcaaggcacgcagtgatgggcaaaccaattgctgcccatctggcctgtgtgcccatctttttctggagaaagtcagattcacagcatgacagagatttgacaccagggagatcctccatagctggctttgaggacacggggaccacagccatgagcggcctctaagagctgagagacagccggcagggaatcggaaccctcagacccacagccgcaaggcactggattctggcagcaccctgaaggagctgggaagtaagttcttccccagcctccagataagagccccgccggccaatcccttcatttcaacctaaagagaccctaagcagagaacctagctgagccactcctgacctacaaagttgtgacttaataaatgtgtgctttaagctgc

SEQ ID NO: 170058 - DNA, 767 bp, Homo sapiens
  Payload ID: 13487
  Gene Symbol: PRSS33
  Gene Name: protease, serine, 33
  ENST ID: ENST00000571674
  CDS Start-End: 59-767
gaccagagtccaagccctaggcagtgccacccttacccagcccagccttgaagacagaatgagaggggtttcctgtctccaggtcctgctccttctggtgctggcctgcgggcagccccgcatgtccagtcggatcgttgggggccgggatggccgggacggagagtggccgtggcaggcgagcatccagcatcgtggggcacacgtgtgcggggggtcgctcatcgccccccagtgggtgctgacagcggcgcactgcttccccaggagggcactgccagctgagtaccgcgtgcgcctgggggcgctgcgtctgggctccacctcgccccgcacgctctcggtgcccgtgcgacgggtgctgctgcccccggactactccgaggacggggcccgcggcgacctggcactgctgcagctgcgtcgcccggtgcccctgagcgctcgcgtccaacccgtctgcctgcccgtgcccggcgcccgcccgccgcccggcacaccatgccgggtcaccggctggggcagcctccgcccaggagtgcccctcccagagtggcgaccgctacaaggagtaagggtgccgctgctggactcgcgcacctgcgacggcctctaccacgtgggcgcggacgtgccccaggctgagcgcattgtgctgcctgggagtctgtgtgccggctacccccagggccacaaggacgcctgccaggtgtgcacccagcctccccagcctccggagtcccctccctgtgcccagcaccctccct

SEQ ID NO: 170059 - DNA, 1597 bp, Homo sapiens
  Payload ID: 13487
  Gene Symbol: PRSS33
  Gene Name: protease, serine, 33
  ENST ID: ENST00000612593
  CDS Start-End: 65-919
gctccagaccagagtccaagccctaggcagtgccacccttacccagcccagccttgaagacagaatgagaggggtttcctgtctccaggtcctgctccttctggtgctgggagctgctgggactcagggaaggaagtctgcagcctgcgggcagccccgcatgtccagtcggatcgttgggggccgggatggccgggacggagagtggccgtggcaggcgagcatccagcatcgtggggcacacgtgtgcggggggtcgctcatcgccccccagtgggtgctgacagcggcgcactgcttccccaggagggcactgccagctgagtaccgcgtgcgcctgggggcgctgcgtctgggctccacctcgccccgcacgctctcggtgcccgtgcgacgggtgctgctgcccccggactactccgaggacggggcccgcggcgacctggcactgctgcagctgcgtcgcccggtgcccctgagcgctcgcgtccaacccgtctgcctgcccgtgcccggcgcccgcccgccgcccggcacaccatgccgggtcaccggctggggcagcctccgcccaggagtgcccctcccagagtggcgaccgctacaaggagtaagggtgccgctgctggactcgcgcacctgcgacggcctctaccacgtgggcgcggacgtgccccaggctgagcgcattgtgctgcctgggagtctgtgtgccggctacccccagggccacaaggacgcctgccagggtgattctgggggacctctgacctgcctgcagtctgggagctgggtcctggtgggcgtggtgagctggggcaagggttgtgccctgcccaaccgtccaggggtctacaccagtgtggccacatatagcccctggattcaggctcgcgtcgcttctaatgctagccggtgaggctgacctggagccagctgctggggtccctcagcctcctggttcatccaggcacctgcctataccccacatcccttctgcctcgaggccaagatgcctaaaaaagctaaaggccaccccaccccccacccaccacctcctgcctcctctcctctttggggatcaccagctctgactccaccaaccctcatccaggaatctgccatgagtcccagggagtcacactccccactcccttcctggcttgtatttacttttcttggccctggccagggctgggcgcaaggcacgcagtgatgggcaaaccaattgctgcccatctggcctgtgtgcccatctttttctggagaaagtcagattcacagcatgacagagatttgacaccagggagatcctccatagctggctttgaggacacggggaccacagccatgagcggcctctaagagctgagagacagccggcagggaatcggaaccctcagacccacagccgcaaggcactggattctggcagcaccctgaaggagctgggaagtaagttcttccccagcctccagataagagccccgccggccaatcccttcatttcaacctaaagagaccctaagcagagaacctagctgagccactcctgacctacaaagttgtgacttaataaatgtgtgctttaagctgc

SEQ ID NO: 170060 - DNA, 2440 bp, Homo sapiens
  Payload ID: 13488
  Gene Symbol: PRSS35
  Gene Name: protease, serine, 35
  Uniprot ID: Q8N3Z0
  ENST ID: ENST00000369700
  CDS Start-End: 178-1419
tctcagtggcgagctctgggtgctgtggcccggccttggcggggcggcctccggctcaggctggctgagaggctcccagctgcagcgtccccgcccgcctcctcgggagctctgatctcagctgacagtgccctcggggaccaaacaagcctggcaggacaaaattagaagatcaaaatggaaaatatgctgctttggttgatatttttcacccctgggtggaccctcattgatggatctgaaatggaatgggattttatgtggcacttgagaaaggtaccccggattgtcagtgaaaggactttccatctcaccagccccgcatttgaggcagatgctaagatgatggtaaatacagtgtgtggcatcgaatgccagaaagaactcccaactcccagcctttctgaattggaggattatctttcctatgagactgtctttgagaatggcacccgaaccttaaccagggtgaaagttcaagatttggttcttgagccgactcaaaatatcaccacaaagggagtatctgttaggagaaagagacaggtgtatggcaccgacagcaggttcagcatcttggacaaaaggttcttaaccaatttccctttcagcacagctgtgaagctttccacgggctgtagtggcattctcatttcccctcagcatgttctaactgctgcccactgtgttcatgatggaaaggactatgtcaaagggagtaaaaagctaagggtagggttgttgaagatgaggaataaaagtggaggcaagaaacgtcgaggttctaagaggagcaggagagaagctagtggtggtgaccaaagagagggtaccagagagcatctgcgggagagagcgaagggtgggagaagaagaaaaaaatctggccggggtcagaggattgccgaagggaggccttcctttcagtggacccgggtcaagaatacccacattccgaagggctgggcacgaggaggcatgggggacgctaccttggactatgactatgctcttctggagctgaagcgtgctcacaaaaagaaatacatggaacttggaatcagcccaacgatcaagaaaatgcctggtggaatgatccacttctcaggatttgataacgatagggctgatcagttggtctatcggttttgcagtgtgtccgacgaatccaatgatctcctttaccaatactgcgatgctgagtcgggctccaccggttcgggggtctatctgcgtctgaaagatccagacaaaaagaattggaagcgcaaaatcattgcggtctactcagggcaccagtgggtggatgtccacggggttcagaaggactacaacgttgctgttcgcatcactcccctaaaatacgcccagatttgcctctggattcacgggaacgatgccaattgtgcttacggctaacagagacctgaaacagggcggtgtatcatctaaatcacagagaaaaccagctctgcttaccgtagtgagatcacttcataggttatgcctggacttgaactctgtcaatagcatttcaacatttttcaaaatcaggagattttcgtccatttaaaaaatgtataggtgcagatattgaaactaggtgggcacttcaatgccaagtatatactcttctttacatggtgatgagtttcatttgtagaaaaattttgttgccttcttaaaaattagacacactttaaaccttcaaacaggtattataaataacatgtgactccttaatggacttattctcagggtcctactctaagaagaatctaataggatgctggttgtgtattaaatgtgaaattgcatagataaaggtagatggtaaagcaattagtatcagaatagagacagaaagttacaacacagtttgtactactctgagatggatccattcagctcatgccctcaatgtttatattgtgttatctgttgggtctgggacatttagtttagtttttttgaagaattacaaatcagaagaaaaagcaagcattataaacaaaactaataactgttttactgctttaagaaataacaattacaatgtgtattatttaaaaatgggagaaatagtttgttctatgaaataaacctagtttagaaatagggaagctgagacattttaagatctcaagtttttatttaactaatactcaaaatatggacttttcatgtatgcatagggaagacacttcacaaattatgaatgatcatgtgttgaaagccacattattttatgctatacattctatgtatgaggtgctacatttttaggacaaagaattctgtaatctttttcaagaaagagtctttttctccttgacaaaatccagcttttgtatgaggactatagggtgaattctctgattagtaattttagatatgtcctttcctaaaaatgaataaaatttatgaatatgacttaaaa

SEQ ID NO: 170061 - DNA, 2840 bp, Homo sapiens
  Payload ID: 13489
  Gene Symbol: PRSS36
  Gene Name: protease, serine, 36
  Uniprot ID: Q5K4E3
  ENST ID: ENST00000268281
  CDS Start-End: 60-2627
gacagagccctgcagggagcagaccttcacttggctctgcctccgctgactctagcgccatggcccggcacctgctcctcccccttgtgatgcttgtcatcagtcccatcccaggagccttccaggactcagctctcagtcctacccaggaagaacctgaagatctggactgcgggcgccctgagccctcggcccgcatcgtggggggctcaaacgcgcagccgggcacctggccttggcaagtgagcctgcaccatggaggtggccacatctgcgggggctccctcatcgccccctcctgggtcctctccgctgctcactgtttcatgacgaatgggacgctggagcccgcggccgagtggtcggtactgctgggcgtgcactcccaggacgggcccctggacggcgcgcacacccgcgcagtggccgccatcgtggtgccggccaactacagccaagtggagctgggcgccgacctggccctgctgcgcctggcctcacccgccagcctgggccccgccgtgtggcctgtctgcctgccccgcgcctcacaccgcttcgtgcacggcaccgcctgctgggccaccggctggggagacgtccaggaggcagatcctctgcctctcccctgggtgctacaggaagtggagctaaggctgctgggcgaggccacctgtcaatgtctctacagccagcccggtcccttcaacctcactctccagatattgccagggatgctgtgtgctggctacccagagggccgcagggacacctgccagggtgactctggggggcccctggtctgtgaggaaggcggccgctggttccaggcaggaatcaccagctttggctttggctgtggacggagaaaccgccctggagttttcactgctgtggctacctatgaggcatggatacgggagcaggtgatgggttcagagcctgggcctgcctttcccacccagccccagaagacccagtcagatccccaggagcccagggaggagaactgcaccattgccctgcctgagtgcgggaaggccccgcggccaggggcctggccctgggaggcccaggtgatggtgccaggatccagaccctgccatggggcgctggtgtctgaaagctgggtcttggcacctgccagctgctttctggacccgaacagctccgacagcccaccccgcgacctcgacgcctggcgcgtgctgctgccctcgcgcccgcgcgcggagcgggtggcgcgcctggtgcagcacgagaacgcttcgtgggacaacgcctcggacctggcgctgctgcagctgcgcacgcccgtgaacctgagcgcggcttcgcggcccgtgtgcctaccccacccggaacactacttcctgcccgggagccgctgccgcctggcccgctggggccgcggggaacccgcgcttggcccaggcgcgctgctggaggcggagctgttaggcggctggtggtgccactgcctgtacggccgccagggggcggcagtaccgctgcccggagacccgccgcacgcgctctgccctgcctaccaggaaaaggaggaggtgggcagctgctggaatgactcgcgttggagccttttgtgccaggaggaggggacctggtttctggctggaatcagagactttcccagtggctgtctacgtccccgagccttcttccctctgcagactcatggcccatggatcagccatgtgactcggggagcctacctggaggaccagctagcctgggattggggccctgatggggaggagactgagacacagacttgtcccccacacacagagcatggtgcctgtggcctgcggctggaggctgctccagtgggggtcctgtggccctggctggcagaggtgcatgtggctggtgatcgagtctgcactgggatcctcctggccccaggctgggtcctggcagccactcactgtgtcctcaggccaggctctacaacagtgccttacattgaagtgtatctgggccgggcaggggccagctccctcccacagggccaccaggtatcccgcttggtcatcagcatccggctgccccagcacctgggactcaggccccccctggccctcctggagctgagctcccgggtggagccctccccatcagccctgcccatctgtctccacccggcgggtatccccccgggggccagctgctgggtgttgggctggaaagaaccccaggaccgagtccctgtggctgctgctgtctccatcttgacacaacgaatctgtgactgcctctatcagggcatcctgccccctggaaccctctgtgtcctgtatgcagaggggcaggagaacaggtgtgagatgacctcagcaccgcccctcctgtgccagatgacggaagggtcctggatcctcgtgggcatggctgttcaagggagccgggagctgtttgctgccattggtcctgaagaggcctggatctcccagacagtgggagaggccaacttcctgccccccagtggctccccacactggcccactggaggcagcaatctctgccccccagaactggccaaggcctcgggatccccgcatgcagtctacttcctgctcctgctgactctcctgatccagagctgaggggctagggtcccagcaccacttcccccttctccaccctctacttcccgcccagtggggctggaatgtggcccagccggctggaacctcaagggccccacccaccgagattgcagcggctctggctaattgggcctcagtgcccgggctattttgaacccaggaatccttgggggtggtgggaggagcggacaataaaggtgtaaacacagg

SEQ ID NO: 170062 - DNA, 2446 bp, Homo sapiens
  Payload ID: 13489
  Gene Symbol: PRSS36
  Gene Name: protease, serine, 36
  Uniprot ID: Q5K4E3
  ENST ID: ENST00000418068
  CDS Start-End: 32-2290
acttggctctgcctccgctgactctagcgccatggcccggcacctgctcctcccccttgtgatgcttgtcatcagtcccatcccaggagccttccaggactcagctctcagtcctacccaggaagaacctgaagatctggactgcgggcgccctgagccctcggcccgcatcgtggggggctcaaacgcgcagccgggcacctggccttggcaagtgagcctgcaccatggaggtggccacatctgcgggggctccctcatcgccccctcctgggtcctctccgctgctcactgtttcatgacgaatgggacgctggagcccgcggccgagtggtcggtactgctgggcgtgcactcccaggacgggcccctggacggcgcgcacacccgcgcagtggccgccatcgtggtgccggccaactacagccaagtggagctgggcgccgacctggccctgctgcgcctggcctcacccgccagcctgggccccgccgtgtggcctgtctgcctgccccgcgcctcacaccgcttcgtgcacggcaccgcctgctgggccaccggctggggagacgtccaggaggcagatcctctgcctctcccctgggtgctacaggaagtggagctaaggctgctgggcgaggccacctgtcaatgtctctacagccagcccggtcccttcaacctcactctccagatattgccagggatgctgtgtgctggctacccagagggccgcagggacacctgccagggtgactctggggggcccctggtctgtgaggaaggcggccgctggttccaggcaggaatcaccagctttggctttggctgtggacggagaaaccgccctggagttttcactgctgtggctacctatgaggcatggatacgggagcaggtgatgggttcagagcctgggcctgcctttcccacccagccccagaagacccagtcagatccccaggagcccagggaggagaactgcaccattgccctgcctgagtgcgggaaggccccgcggccaggggcctggccctgggaggcccaggtgatggtgccaggatccagaccctgccatggggcgctggtgtctgaaagctgggtcttggcacctgccagctgctttctggacccgaacagctccgacagcccaccccgcgacctcgacgcctggcgcgtgctgctgccctcgcgcccgcgcgcggagcgggtggcgcgcctggtgcagcacgagaacgcttcgtgggacaacgcctcggacctggcgctgctgcagctgcgcacgcccgtgaacctgagcgcggcttcgcggcccgtgtgcctaccccacccggaacactacttcctgcccgggagccgctgccgcctggcccgctggggccgcggggaacccgcgcttggcccaggcgcgctgctggaggcggagctgttaggcggctggtggtgccactgcctgtacggccgccagggggcggcagtaccgctgcccggagacccgccgcacgcgctctgccctgcctaccaggaaaaggaggaggtgggcagctgctggaatgactcgcgttggagccttttgtgccaggaggaggggacctggtttctggctggaatcagagactttcccagtggctgtctacgtccccgagccttcttccctctgcagactcatggcccatggatcagccatgtgactcggggagcctacctggaggaccagctagcctgggattggggccctgatggggaggagactgagacacagacttgtcccccacacacagagcatggtgcctgtggcctgcggctggaggctgctccagtgggggtcctgtggccctggctggcagaggtgcatgtggctggtgatcgagtctgcactgggatcctcctggccccaggctgggtcctggcagccactcactgtgtcctcaggccaggctctacaacagtgccttacattgaagtgtatctgggccgggcaggggccagctccctcccacagggccaccagatgacctcagcaccgcccctcctgtgccagatgacggaagggtcctggatcctcgtgggcatggctgttcaagggagccgggagctgtttgctgccattggtcctgaagaggcctggatctcccagacagtgggagaggccaacttcctgccccccagtggctccccacactggcccactggaggcagcaatctctgccccccagaactggccaaggcctcgggatccccgcatgcagtctacttcctgctcctgctgactctcctgatccagagctgaggggctagggtcccagcaccacttcccccttctccaccctctacttcccgcccagtggggctggaatgtggcccagccggctggaacctcaagggccccacccaccgagattgcagcggctctggctaattgggcctcagtgcccgggctattttg

SEQ ID NO: 170063 - DNA, 2723 bp, Homo sapiens
  Payload ID: 13489
  Gene Symbol: PRSS36
  Gene Name: protease, serine, 36
  Uniprot ID: Q5K4E3
  ENST ID: ENST00000569305
  CDS Start-End: 27-2579
gctctgcctccgctgactctagcgccatggcccggcacctgctcctcccccttgtgatgcttgtcatcagtcccatcccaggagccttccaggactcagctctcagtcctacccaggaagaacctgaagatctggactgcgggcgccctgagccctcggcccgcatcgtggggggctcaaacgcgcagccgggcacctggccttggcaagtgagcctgcaccatggaggtggccacatctgcgggggctccctcatcgccccctcctgggtcctctccgctgctcactgtttcatgacgaatgggacgctggagcccgcggccgagtggtcggtactgctgggcgtgcactcccaggacgggcccctggacggcgcgcacacccgcgcagtggccgccatcgtggtgccggccaactacagccaagtggagctgggcgccgacctggccctgctgcgcctggcctcacccgccagcctgggccccgccgtgtggcctgtctgcctgccccgcgcctcacaccgcttcgtgcacggcaccgcctgctgggccaccggctggggagacgtccaggaggcagatcctctgcctctcccctgggtgctacaggaagtggagctaaggctgctgggcgaggccacctgtcaatgtctctacagccagcccggtcccttcaacctcactctccagatattgccagggatgctgtgtgctggctacccagagggccgcagggacacctgccagggtgactctggggggcccctggtctgtgaggaaggcggccgctggttccaggcaggaatcaccagctttggctttggctgtggacggagaaaccgccctggagttttcactgctgtggctacctatgaggcatggatacgggagcaggtgatgggttcagagcctgggcctgcctttcccacccagccccagaagacccagtcagatccccaggagcccagggaggagaactgcaccattgccctgcctgagtgcgggaaggccccgcggccaggggcctggccctgggaggcccaggtgatggtgccaggatccagaccctgccatggggcgctggtgtctgaaagctgggtcttggcacctgccagctgctttctggacccgaacagctccgacagcccaccccgcgacctcgacgcctggcgcgtgctgctgccctcgcgcccgcgcgcggagcgggtggcgcgcctggtgcagcacgagaacgcttcgtgggacaacgcctcggacctggcgctgctgcagctgcgcacgcccgtgaacctgagcgcggcttcgcggcccgtgtgcctaccccacccggaacactacttcctgcccgggagccgctgccgcctggcccgctggggccgcggggaacccgcgcttggcccaggcgcgctgctggaggcggagctgttaggcggctggtggtgccactgcctgtacggccgccagggggcggcagtaccgctgcccggagacccgccgcacgcgctctgccctgcctaccaggaaaaggaggagaatgactcgcgttggagccttttgtgccaggaggaggggacctggtttctggctggaatcagagactttcccagtggctgtctacgtccccgagccttcttccctctgcagactcatggcccatggatcagccatgtgactcggggagcctacctggaggaccagctagcctgggattggggccctgatggggaggagactgagacacagacttgtcccccacacacagagcatggtgcctgtggcctgcggctggaggctgctccagtgggggtcctgtggccctggctggcagaggtgcatgtggctggtgatcgagtctgcactgggatcctcctggccccaggctgggtcctggcagccactcactgtgtcctcaggccaggctctacaacagtgccttacattgaagtgtatctgggccgggcaggggccagctccctcccacagggccaccaggtatcccgcttggtcatcagcatccggctgccccagcacctgggactcaggccccccctggccctcctggagctgagctcccgggtggagccctccccatcagccctgcccatctgtctccacccggcgggtatccccccgggggccagctgctgggtgttgggctggaaagaaccccaggaccgagtccctgtggctgctgctgtctccatcttgacacaacgaatctgtgactgcctctatcagggcatcctgccccctggaaccctctgtgtcctgtatgcagaggggcaggagaacaggtgtgagatgacctcagcaccgcccctcctgtgccagatgacggaagggtcctggatcctcgtgggcatggctgttcaagggagccgggagctgtttgctgccattggtcctgaagaggcctggatctcccagacagtgggagaggccaacttcctgccccccagtggctccccacactggcccactggaggcagcaatctctgccccccagaactggccaaggcctcgggatccccgcatgcagtctacttcctgctcctgctgactctcctgatccagagctgaggggctagggtcccagcaccacttcccccttctccaccctctacttcccgcccagtggggctggaatgtggcccagccggctggaacctcaagggccccacccaccgagattgcagcggctctggctaattgggcctcagtgcc

SEQ ID NO: 170064 - DNA, 528 bp, Homo sapiens
  Payload ID: 13489
  Gene Symbol: PRSS36
  Gene Name: protease, serine, 36
  ENST ID: ENST00000571878
  CDS Start-End: 1-86
acattgaagtgtatctgggccgggcaggggccagctccctcccacagggccaccagtccctgtggctgctgctgtctccatcttgacacaacgaatctgtgactgcctctatcagggcatcctgccccctggaaccctctgtgtcctgtatgcagaggggcaggagaacaggtgtgagatgacctcagcaccgcccctcctgtgccagatgacggaagggtcctggatcctcgtgggcatggctgttcaagggagccgggagctgtttgctgccattggtcctgaagaggcctggatctcccagacagtgggagaggccaacttcctgccccccagtggctccccacactggcccactggaggcagcaatctctgccccccagaactggccaaggcctcgggatccccgcatgcagtctacttcctgctcctgctgactctcctgatccagagctgaggggctagggtcccagcaccacttcccccttctccaccctctacttcccgcccagtggggctggaatgtgg

SEQ ID NO: 170065 - DNA, 1189 bp, Homo sapiens
  Payload ID: 13490
  Gene Symbol: PRSS37
  Gene Name: protease, serine, 37
  Uniprot ID: A4D1T9
  ENST ID: ENST00000350549
  CDS Start-End: 373-1080
agaaactctgtggggaagataagtcctgagcctagagctgccatttccacagacaactgaactaccttcaaacagatgtgtttttaggggcagcagatagaaggagctgaatccaggagtttccttccctgaaatgccccaacagaggcacagtcctccaccttccctggaacagagggctttcatctgtctctctgaagccatctccctcccctgtttatgcccagagctgctttccaatcccatggagtgcctccgtatctaaccatagccactgagtctaccaggtgttcctgagaagacaactaagccaaccgctccacactctgctgattttcttctacatctcacagggggaagagctggatcaccatgaaatatgtcttctatttgggtgtcctcgctgggacatttttctttgctgactcatctgttcagaaagaagaccctgctccctatttggtgtacctcaagtctcacttcaacccctgtgtgggcgtcctcatcaaacccagctgggtgctggccccagctcactgctatttaccaaatctgaaagtgatgctgggaaatttcaagagcagagtcagagacggtactgaacagacaattaaccccattcagatcgtccgctactggaactacagtcatagcgccccacaggatgacctcatgctcatcaagctggctaagcctgccatgctcaatcccaaagtccagccccttaccctcgccaccaccaatgtcaggccaggcactgtctgtctactctcaggtttggactggagccaagaaaacagtggccgacaccctgacttgcggcagaacctggaggcccccgtgatgtctgatcgagaatgccaaaaaacagaacaaggaaaaagccacaggaattccttatgtgtgaaatttgtgaaagtattcagccgaatttttggggaggtggccgttgctactgtcatctgcaaagacaagctccagggaatcgaggtggggcacttcatgggaggggacgtcggcatctacaccaatgtttacaaatatgtatcctggattgagaacactgctaaggacaagtgagaccctacttctccctctgcattccactggctctgccatggactatacaagcagataattttccctctattcaaaataaaatctccaaatgaaaatttgggaatgtagc

SEQ ID NO: 170066 - DNA, 874 bp, Homo sapiens
  Payload ID: 13490
  Gene Symbol: PRSS37
  Gene Name: protease, serine, 37
  ENST ID: ENST00000452758
  CDS Start-End: 163-360
cccctgtttatgcccagagctgctttccaatcccatggagtgcctccgtatctaaccatagccactgagtctaccaggtgttcctgagaagacaactaagccaaccgctccacactctgctgattttcttctacatctcacagggggaagagctggatcaccatgaaatatgtcttctatttgggtgtcctcgctgaaagaagaccctgctccctatttggtgtacctcaagtctcacttcaacccctgtgtgggcgtcctcatcaaacccagctgggtgctggccccagctcactgctatttaccaaatctgaaagtgatgctgggaaatttcaagagcagagtcagagacggtactgaacagacaattaaccccattcagatcgtccgctactggaactacagtcatagcgccccacaggatgacctcatgctcatcaagctggctaagcctgccatgctcaatcccaaagtccagccccttaccctcgccaccaccaatgtcaggccaggcactgtctgtctactctcaggtttggactggagccaagaaaacagtggccgacaccctgacttgcggcagaacctggaggcccccgtgatgtctgatcgagaatgccaaaaaacagaacaaggaaaaagccacaggaattccttatgtgtgaaatttgtgaaagtattcagccgaatttttggggaggtggccgttgctactgtcatctgcaaagacaagctccagggaatcgaggtggggcacttcatgggaggggacgtcggcatctacaccaatgtttacaaatatgtatcctggattgagaacactgctaaggacaagtgagaccctacttctccctctgcattccactggctctgc

SEQ ID NO: 170067 - DNA, 1834 bp, Homo sapiens
  Payload ID: 13490
  Gene Symbol: PRSS37
  Gene Name: protease, serine, 37
  ENST ID: ENST00000419085
  CDS Start-End: 51-257
aaacctcaggacacttactccctgagctaagggggaagagctggatcaccatgaaatatgtcttctatttgggtgtcctcgctgggacatttttctttgctgactcatctgttcagaaagaagaccctgctccctatttggtgtacctcaagtctcacttcaacccctgtgtgggcgtcctcatcaaacccagctgggtgctggccccagctcactgctatttacctatgaatgcattttatcacttaaagatctagcaggtaactgatgatgcactcaaattgggtcaattgaggtgagttttaagaaggaaccaattgcaaaggtatggagacattaaagggacaatattaagaatagttccataccaccagggtttgtattaagaaaatgcagttaccacctctaggcctaaaaaggcaagaggagaagataatttcaaaggaggcaaggagagatagagaaaaagcgagacctgtgtgaggagacagcctgataaggattgtaacccctagtcaaggagcacagccactctgtgacaaaactgcagggagggacctgggaggataagtactccaatctcactcttcttcctccagttactttctggtgcttcctattggccaatagaaggaagccagaggacaagagagcccactgattaaatccatatatgtccccttccaaaggtgcagagcagaatggaataggactgttagtgcatcagctagggaaccaaacaggagacacccagaactaggttatttattctctggtctccaccaaaatggacattgttcagttagataggcgagaaaattacatttccttgacatgcatcctcttcctctccactacattaaagaacacaacattaaaatgtagtgaagggctccactacttactatatcaccctgagtgaattactcctatgtgcccccattaattcatgtgctaaatggggataaaaatggaatccactgcatagacttgttgtgagttaaatgacataatccagaaaaagcacttggtacagttcctggcactttgtaacattcagtatcttagcaatgatgatgatgatgatgatgattacttccaacccctctccctccagaaatctgaaagtgatgctgggaaatttcaagagcagagtcagagacggtactgaacagacaattaaccccattcagatcgtccgctactggaactacagtcatagcgccccacaggatgacctcatgctcatcaagctggctaagcctgccatgctcaatcccaaagtccagccccttaccctcgccaccaccaatgtcaggccaggcactgtctgtctactctcaggtttggactggagccaagaaaacagtgggctttggcagctggagccaccaggccatctgactctgcacagaggcccagccattcctgattggcagagacacaattcacatgaacaaggccgacaccctgacttgcggcagaacctggaggcccccgtgatgtctgatcgagaatgccaaaaaacagaacaaggaaaaagccacaggaattccttatgtgtgaaatttgtgaaagtattcagccgaatttttggggaggtggccgttgctactgtcatctgcaaagacaagctccagggaatcgaggtggggcacttcatgggaggggacgtcggcatctacaccaatgtttacaaatatgtatcctggattgagaacactgctaaggacaagtgagaccctacttctccctctgcattccactggctctgccatggactatacaagcagataattttccctctattcaaaataaaatctccaaatgaaaa

SEQ ID NO: 170068 - DNA, 826 bp, Homo sapiens
  Payload ID: 13490
  Gene Symbol: PRSS37
  Gene Name: protease, serine, 37
  Uniprot ID: A4D1T9
  ENST ID: ENST00000438520
  CDS Start-End: 53-760
gcaaacctcaggacacttactccctgagctaagggggaagagctggatcaccatgaaatatgtcttctatttgggtgtcctcgctgggacatttttctttgctgactcatctgttcagaaagaagaccctgctccctatttggtgtacctcaagtctcacttcaacccctgtgtgggcgtcctcatcaaacccagctgggtgctggccccagctcactgctatttaccaaatctgaaagtgatgctgggaaatttcaagagcagagtcagagacggtactgaacagacaattaaccccattcagatcgtccgctactggaactacagtcatagcgccccacaggatgacctcatgctcatcaagctggctaagcctgccatgctcaatcccaaagtccagccccttaccctcgccaccaccaatgtcaggccaggcactgtctgtctactctcaggtttggactggagccaagaaaacagtggccgacaccctgacttgcggcagaacctggaggcccccgtgatgtctgatcgagaatgccaaaaaacagaacaaggaaaaagccacaggaattccttatgtgtgaaatttgtgaaagtattcagccgaatttttggggaggtggccgttgctactgtcatctgcaaagacaagctccagggaatcgaggtggggcacttcatgggaggggacgtcggcatctacaccaatgtttacaaatatgtatcctggattgagaacactgctaaggacaagtgagaccctacttctccctctgcattccactggctctgccatggactatacaagcagataattttccct

SEQ ID NO: 170069 - DNA, 1267 bp, Homo sapiens
  Payload ID: 13491
  Gene Symbol: PRSS38
  Gene Name: protease, serine, 38
  Uniprot ID: A1L453
  ENST ID: ENST00000366757
  CDS Start-End: 25-1005
gctgggggcgctgcctcgagcctcatggctgcccctgcttccgtcatgggcccactcgggccctctgccctgggccttctgctgctgctcctggtggtggcccctccccgggtcgcagcattggtccacagacagccagagaaccagggaatctccctaactggcagcgtggcctgtggtcggcccagcatggaggggaaaatcctgggcggcgtccctgcgcccgagaggaagtggccgtggcaggtcagcgtgcactacgcaggcctccacgtctgcggcggctccatcctcaatgagtactgggtgctgtcagctgcgcactgctttcacagggacaagaatatcaaaatctatgacatgtacgtaggcctcgtaaacctcagggtggccggcaaccacacccagtggtatgaggtgaacagggtgatcctgcaccccacatatgagatgtaccaccccatcggaggtgacgtggccctggtgcagctgaagacccgcattgtgttttctgagtccgtgctcccggtttgccttgcaactccagaagtgaaccttaccagtgccaattgctgggctacgggatggggactagtctcaaaacaaggtgagacctcagacgagctgcaggagatgcagctcccgctgatcctggagccctggtgccacctgctctacggacacatgtcctacatcatgcccgacatgctgtgtgctggggacatcctgaatgctaagaccgtgtgtgagggcgactccgggggcccacttgtctgtgaattcaaccgcagctggttgcagattggaattgtgagctggggccgaggctgctccaaccctctgtaccctggagtgtatgccagtgtttcctatttctcaaaatggatatgtgataacatagaaatcacgcccactcctgctcagccagcccctgctctctctccagctctggggcccactctcagcgtcctaatggccatgctggctggctggtcagtgctgtgaggtcaggatacccactctaggattctcatggctgcacaccctgccccagcccagctgcctccagacccctaagcatctcctgtcctggcctctctgaagcagacaagggccacctatcccgggggtggatgctgagtccaggaggtgatgagcaagtgtacaaaagaaaaaagggaagggggagaggggctggtcagggagaacccagcttgggcagagtgcacctgagatttgataagatcattaaatatttacaaagcaa

SEQ ID NO: 170070 - DNA, 1280 bp, Homo sapiens
  Payload ID: 13492
  Gene Symbol: PRSS42
  Gene Name: protease, serine, 42
  ENST ID: ENST00000447340
  CDS Start-End: 55-357
cctgcggtccgcggcccggggaatctgaagcgtggctcgggagccccgggggacatggcctccttcttggctgtcgtcggggcgcccgggggagtcaactcctgtgtctttgaccgtttccattacagtgtcaagatgggagatcggagtgtctataatgaaaacacaagtgtggtggtctcagtccaaagagcttttgtccaccctaagttctcaacagttacaaccattcgaaatgaccttgcccttctccagctccaacatcctgtgaattttacctcaaacatccagcctatctgcatccctcaggagaatttccaggtggaagggagattctgggggccgcttggcctgtgaatataatgacacatgggtccaggtagggattgtgagctggggcatcggctgtggtcgctgagggttgcctggagtttatacagaaattggtgtctacagtaagtggctgattgcagtggtggatcaggctacctgtttgtatccagcagtgttcctcatcttagtcctgcatttggtgctgcccctgggcatcctggtggcccagtgatcaccccagcccactccccttttgtttctgagtctcatactaggcctctcctccaacctcccactccttctcaatgccgtttctgaaaatcccagttggaatccacgggccctctggagatccatacaatagagcacagcagggagactggggcctggaaagtgcccctgcctggtgctctggtcacctgcctcagccatgcctgcaccagggctgtgctctggctagtgggaaggagggggtgaactaattccagctagaggaccagcctccctgccaggtgggccacagtgactcatcagtatctgggggaacatctatcaaagaagagacatcatcaacagtgaagcaagtgttagatgtggttctggtttcagggctcccacctaagactttgtgaaaccagccagctgggtgattgctcagcgtgaaggaggcgttaccaggtccctgcagaggtgtgaggcctgggacttccactctaggctcagttgtctggggctgggagaagttcccctgcagcccagtgtggatccatctgtgagtggacagcctctgccacactaactctcttggggctacccattcttggcacccccttcctcagtgccctagtggccactttcagagacactacaagttgtattgaggcagttatggagtgcagagttttcagaaatcaactaaataaatgtttggagagtctcctatgttc

SEQ ID NO: 170071 - DNA, 882 bp, Homo sapiens
  Payload ID: 13492
  Gene Symbol: PRSS42
  Gene Name: protease, serine, 42
  Uniprot ID: Q7Z5A4
  ENST ID: ENST00000429665
  CDS Start-End: 1-882
atgtcctctggcggcggctcccggggcctcctggcgtggcttctgctccttcagccctggcccgggcagaactgggcgggcatggcggcgccacgcctcccgtcccctctcctctcagaggagggcggcgagaaccccgaagcgagcccggctccaggacctgaagcgggccccccactcaatctgtttacgtcctttccaggtgactcactgctgtgtggccgaacccctctgagaatcgtgggaggagtggacgcggaggaagggaggtggccctggcaggtgagcgtgaggaccaaaggcaggcacatctgcggcggcaccctggtcaccgccacgtgggtgctgacggcaggccactgcatttccagccgtttccattacagtgtcaagatgggagatcggagtgtctataatgaaaacacaagtgtggtggtctcagtccaaagagcttttgtccaccctaagttctcaacagttacaaccattcgaaatgaccttgcccttctccagctccaacatcctgtgaattttacctcaaacatccagcctatctgcatccctcaggagaatttccaggtggaaggtaggaccaggtgctgggtgaccggatggggcaaaacaccagaacgagagaaacttgcatcagaaattcttcaggatgtggaccaatacatcatgtgctatgaggaatgtaataagataatacagaaggccttgtcatctactaaggatgtaataataaaagggatggtctgtggctataaagaacaaggaaaggattcttgtcaaggagattctgggggccgcttggcctgtgaatataatgacacatgggtccaggtagggattgtgagctggggcatcggctgtggtcgctga

SEQ ID NO: 170072 - DNA, 687 bp, Homo sapiens
  Payload ID: 13493
  Gene Symbol: PRSS45
  Gene Name: protease, serine, 45
  Uniprot ID: Q7RTY3
  ENST ID: ENST00000442359
  CDS Start-End: 1-687
atgacccgccattggccctgggaggtgagcctccggatggaaaatgagcacgtgtgtggaggggccctcattgaccccagctgggtggtgactgcggcccactgcatccaaggcaccaaagagtactcagtggtgcttggcacctccaagctgcagcccatgaacttcagcagggccctctgggtccctgtgagggacatcattatgcaccccaagtactggggccgggccttcatcatgggtgacgttgcccttgtccaccttcaaacacctgtcaccttcagctccacagccaactccatgctgaccccagagctgcaggaggctgaggtgtttatcatggacaacaagaggtgtgaccggcattacaagaagtccttcttccccccagttgtcccccttgtcctgggggacatgatctgtgccaccaattatggggaaaacttgtgctatggggattctggagggccattggcttgtgaagttgagggcagatggattctggctggggtgttgtcctgggaaaaggcctgcgtgaaggcacagaatccaggtgtgtacacccgcatcaccaaatacaccaaatggatcaagaagcaaatgagcaatggagccttctcaggtccctgtgcctctgcctgcctcctgttcctgtgctggctgctgcagccccagatgggctcctga

SEQ ID NO: 170073 - DNA, 3128 bp, Homo sapiens
  Payload ID: 13493
  Gene Symbol: PRSS45
  Gene Name: protease, serine, 45
  ENST ID: ENST00000423292
  CDS Start-End: 2180-2512
agaacccatggccggcgtggaaaccgctgcgaggcggcgccacgacggaggctgaggtcgccggcagtatccatggcgtcccagagcggcagctccctggggctcctggcctggttcttgcttcttcagccatggctcgaagaggcccgggcaggcagggtgggtgcgcagggaggcgtagcactgctcttcccctccgcgctcccctcagggccaggcggccaggaccccggagcgagcggatgggagccgccacctgtaggggctccaggatccccagcggccccccagtccagggggaacgcagtgcgccccgcttcggtgttacttccctcagcctgtggccagcggacttcaaggataactggaggattgccggctccagacaggaagtggccctggcaggtgagcctgcagaccagcaacagacacatctgcggaggctcccttatcgccagacactgggtactcactgccgctcactgcatctctgggtgagggtttggggctcagagcttgggccctgatcaggctgtgggacctggagccagtctgtccccctccctgaacttcctcttcctcatctgtaaaagggggtgacagccccatagtttttatccagtctgggtgagacctgaggatttgcatttctaacaagtttctgggtgttgcctccgccgctgatctggggactactggctaaagtggtcaggggtcctggagggatgtggcttggagagagggaggtagctgctggctggcataggaagatggtaccaggcgggaagcacctcgaaggtgtggaagcagagtgtagaccctggaggatcttcctgcagccatctggaatacacagtgaagctgggagacacaaatgtgcatcatcgctccaaaacagcacttgtggtcccagttcgtgacgtcgttatccaccgatattttacgtctcctggaataattgaaaatgacattgcccttgccctgcttgacttccctgtgaattactccacgcacatccagcttgtgtgcctccctgaacaggctttcatggtgcaagctggtacgaactgctgggtgaccggatggggcaaagtaaatgaaacaggtgagccataccgacccgaggaggattccagaatgaccccggcaagcccagaagcccggacgtctcctgtgcacccgaaattccccaaaattccagaaacttctgtagctccagggtctccagcgaccgcagggcctccaggatcctgggttacttcagcatctacagtgggagaagccttggaatccgacggaatctctgaccttggaaggcagttttctcagggtattgtttctggtgctagatctgtcctggcctgcggggtaggtcaaaggggacacagcctggctcagggaggttgagggtcagaccctgacctagatgatttgagagagaggatagataacccgcctccgccctgggcagcctggtggggtggtgggaaggtagtggcttcacttccagtcccctctctttactgagcccaccagcctgtggccaccgtgtttcaaggatgattggaggattgccagccccaaacaagaagtggccctggcaggtgagcctgcagaccagcaacatacaccactgcggaggctccctcatcgacaggcgctgggtgctcactgccgcccactgtgtctttagtaatttggaatacaaggtgaagctgggagaccctgacttgcatgctggttccaaagaggcactggtgatcccagtttgagacatcatttttcctagcaattttgattttgccactttgacaagcgacattgcccttgctctgctcgcctactctgtgaattattcctcacatatccagcctgcgtgcctccccgaaaagctttttgaagtggaagctgggacagagtgctgggtgactggatggggccaagtgtcagagagtgtttcaggaccaatgccacttgttcttcaggagactgagctaaacattatgcgtcatgagaaatgttgtgagatgctcaagaacaagaatatatccaagagtaaaatggtcacgagggggaccgtctgtggctataatgaccaagggaaggatgcctgtcaggttataaagaggacacaaccaatccagtttgtggtgagccctggtggtcggaggatttggaaatgacccgccattggccctgggaggtgagcctccggatggaaaatgagcacgtgtgtggaggggccctcattgaccccagctgggtggtgactgcggcccactgcatccaaggcaccaaagagtactcagtggtgcttggcacctccaagctgcagcccatgaacttcagcagggccctctgggtccctgtgagggacatcattatgcaccccaagtactggggccgggccttcatcatgggtgacgttgcccttgtccaccttcaaacacctgtcaccttcagtgagctccacagccaactccatgctgaccccagagctgcaggaggctgaggtgtttatcatggacaacaagaggtgtgaccggcattacaagaagtccttcttccccccagttgtcccccttgtcctgggggacatgatctgtgccaccaattatggggaaaacttgtgctatggggattctggagggccattggcttgtgaagttgagggcagatggattctggctggggtgttgtcctgggaaaaggcctgcgtgaaggcacagaatccaggtgtgtacacccgcatcaccaaatacaccaaatggatcaagaagcaaatgagcaatggagccttctcaggtccctgtgcctctgcctgcctcctgttcctgtgctggctgctgcagccccagatgggctcctgacctccctaccttttcctcctcctgccttgcctctgctgaatggggccagatggtttgaccaaggtcatgtgtccatcttcaaaaagagtcagggtggggaagagtaacccctgggagaatgggtctggctttggcatcccggtgaggagaagtgtggtggatgactaggccttgggtgagcaggagaagggaagtgtggcctagaaggattctggaatctgggaccaggagagcagggattaaacatgtgcaaacttg

SEQ ID NO: 170074 - DNA, 1041 bp, Homo sapiens
  Payload ID: 13493
  Gene Symbol: PRSS45
  Gene Name: protease, serine, 45
  Uniprot ID: Q7RTY3
  ENST ID: ENST00000620911
  CDS Start-End: 1-783
atgacccgccattggccctgggaggtgagcctccggatggaaaatgagcacgtgtgtggaggggccctcattgaccccagctgggtggtgactgcggcccactgcatccaaggcaccaaagagtactcagtggtgcttggcacctccaagctgcagcccatgaacttcagcagggccctctgggtccctgtgagggacatcattatgcaccccaagtactggggccgggccttcatcatgggtgacgttgcccttgtccaccttcaaacacctgtcaccttcagtgagtacgtgcagcccatctgcctcccggagcccaatttcaacctgaaggttgggacgcagtgttgggtgactggctggagccaggttaagcagcgcttttcagccaactccatgctgaccccagagctgcaggaggctgaggtgtttatcatggacaacaagaggtgtgaccggcattacaagaagtccttcttccccccagttgtcccccttgtcctgggggacatgatctgtgccaccaattatggggaaaacttgtgctatggggattctggagggccattggcttgtgaagttgagggcagatggattctggctggggtgttgtcctgggaaaaggcctgcgtgaaggcacagaatccaggtgtgtacacccgcatcaccaaatacaccaaatggatcaagaagcaaatgagcaatggagccttctcaggtccctgtgcctctgcctgcctcctgttcctgtgctggctgctgcagccccagatgggctcctgacctccctaccttttcctcctcctgccttgcctctgctgaatggggccagatggtttgaccaaggtcatgtgtccatcttcaaaaagagtcagggtggggaagagtaacccctgggagaatgggtctggctttggcatcccggtgaggagaagtgtggtggatgactaggccttgggtgagcaggagaagggaagtgtggcctagaaggattctggaatctgggaccaggagagcagggattaaacatgtgcaaacttg

SEQ ID NO: 170075 - DNA, 982 bp, Homo sapiens
  Payload ID: 13494
  Gene Symbol: PRSS46
  Gene Name: protease, serine, 46
  Uniprot ID: E5RG02
  ENST ID: ENST00000463091
  CDS Start-End: 42-566
atccgttagaaggagcattgaggagtagatacccacttgccatggcctgtgggccgggggatcttcaaagccttacatctccgctttcctctgccagattagattatcagccgtctattgaagggccctggctccgggcctgcggtcagaccaacgtgtcctgcagggtggtgaaggggaagctggtagaggtaggcaagtggccatggcaggtgagcatccttttcctgggcacgtacatctgcagtggctccctcatccaccaccagtgggtcctcacggctgcgcactgcttgcagagattcaaggacctcagcctgtactccgtgatggtgggagtccaccagcgcccagaaaatagcactcagctcccgctcactcgcatggtgattcataaggatttcagcaatctcatgtctcaggacattgccctcctaaagctcagggactccatctcgtggtcccccttcgtccagcctgtctgcctccctaacatcaaattcaagccatccattggaagcatgtgctgggtaatcggctggggaactacagggaaaaaaggttgactctggaagctcccttgtctgccaaatggacaagacctggattcagataggagtggtaagctggagctttagttgtggccagcgccacttcccaggtatctacaccagcactgcccacttcaaccagtggatcaggactgaggttgctaacataaggttcatcagtagggctggccctgccttcctgagcccagttttcctcactggctacattctactgggctccttgagctccctgtggctcctgtgagcggtgtttcaaggacagtccctcccagaggctgcttctccctcccctctgttctaccctcagaagtggagacgagaggttgcccaggatggcagggcagagtgagggggagggtccgagagccactgttactttctgttgttcaatgaagatgcttttgaacttt

SEQ ID NO: 170076 - DNA, 989 bp, Homo sapiens
  Payload ID: 13495
  Gene Symbol: PRSS48
  Gene Name: protease, serine, 48
  Uniprot ID: Q7RTY5
  ENST ID: ENST00000455694
  CDS Start-End: 3-989
acatgggccctgctggctgtgccttcacgctgctccttctgctggggatctcagtgtgtgggcaacctgtatactccagccgcgttgtaggtggccaggatgctgctgcagggcgctggccttggcaggtcagcctacactttgaccacaactttatctgtggaggttccctcgtcagtgagaggttgatactgacagcagcacactgcatacaaccgacctggactactttttcatatactgtgtggctaggatcgattacagtaggtgactcaaggaaacgtgtgaagtactacgtgtccaaaatcgtcatccatcccaagtaccaagatacaacggcagacgtcgccttgttgaaactgtcctctcaagtcaccttcacttctgccatcctgcctatttgcttgcccagtgtcacaaagcagttggcaattccacccttttgttgggtgaccggatggggaaaagttaaggaaagttcagatagagattaccattctgcccttcaggaagcagaagtacccattattgaccgccaggcttgtgaacagctctacaatcccatcggtatcttcttgccagcactggagccagtcatcaaggaagacaagatttgtgctggtgatactcaaaacatgaaggatagttgcaagggtgattctggagggcctctgtcgtgtcacattgatggtgtatggatccagacaggagtagtaagctggggattagaatgtggtaaatctcttcctggagtctacaccaatgtaatctactaccaaaaatggattaatgccactatttcaagagccaacaatctagacttctctgacttcttgttccctattgtcctactctctctggctctcctgcgtccctcctgtgcctttggacctaacactatacacagagtaggcactgtagctgaagctgttgcttgcatacagggctgggaagagaatgcatggagatttagtcccaggggcagataa

SEQ ID NO: 170077 - DNA, 560 bp, Homo sapiens
  Payload ID: 13495
  Gene Symbol: PRSS48
  Gene Name: protease, serine, 48
  Uniprot ID: Q7RTY5
  ENST ID: ENST00000441586
  CDS Start-End: 3-560
acatgggccctgctggctgtgccttcacgctgctccttctgctggggatctcagatagagattaccattctgcccttcaggaagcagaagtacccattattgaccgccaggcttgtgaacagctctacaatcccatcggtatcttcttgccagcactggagccagtcatcaaggaagacaagatttgtgctggtgatactcaaaacatgaaggatagttgcaagggtgattctggagggcctctgtcgtgtcacattgatggtgtatggatccagacaggagtagtaagctggggattagaatgtggtaaatctcttcctggagtctacaccaatgtaatctactaccaaaaatggattaatgccactatttcaagagccaacaatctagacttctctgacttcttgttccctattgtcctactctctctggctctcctgcgtccctcctgtgcctttggacctaacactatacacagagtaggcactgtagctgaagctgttgcttgcatacagggctgggaagagaatgcatggagatttagtcccaggggcagataa

SEQ ID NO: 170078 - DNA, 1347 bp, Homo sapiens
  Payload ID: 13496
  Gene Symbol: PRSS50
  Gene Name: protease, serine, 50
  Uniprot ID: Q9UI38
  ENST ID: ENST00000315170
  CDS Start-End: 60-1217
gtcgtgggggcggcactgggagcgccttccggagagacgcagtcggctgccaccccgggatgggtcgctggtgccagaccgtcgcgcgcgggcagcgcccccggacgtctgccccctcccgcgccggtgccctgctgctgctgcttctgttgctgaggtctgcaggttgctggggcgcaggggaagccccgggggcgctgtccactgctgatcccgccgaccagagcgtccagtgtgtccccaaggccacctgtccttccagccggcctcgccttctctggcagaccccgaccacccagacactgccctcgaccaccatggagacccaattcccagtttctgaaggcaaagtcgacccataccgctcctgtggcttttcctacgagcaggaccccaccctcagggacccagaagccgtggctcggcggtggccctggatggtcagcgtgcgggccaatggcacacacatctgtgccggcaccatcattgcctcccagtgggtgctgactgtggcccactgcctgatctggcgtgatgttatctactcagtgagggtggggagtccgtggattgaccagatgacgcagaccgcctccgatgtcccggtgctccaggtcatcatgcatagcaggtaccgggcccagcggttctggtcctgggtgggccaggccaacgacatcggcctcctcaagctcaagcaggaactcaagtacagcaattacgtgcggcccatctgcctgcctggcacggactatgtgttgaaggaccattcccgctgcactgtgacgggctggggactttccaaggctgacggcatgtggcctcagttccggaccattcaggagaaggaagtcatcatcctgaacaacaaagagtgtgacaatttctaccacaacttcaccaaaatccccactctggttcagatcatcaagtcccagatgatgtgtgcggaggacacccacagggagaagttctgctatgagctaactggagagcccttggtctgctccatggagggcacgtggtacctggtgggattggtgagctggggtgcaggctgccagaagagcgaggccccacccatctacctacaggtctcctcctaccaacactggatctgggactgcctcaacgggcaggccctggccctgccagccccatccaggaccctgctcctggcactcccactgcccctcagcctccttgctgccctctgactctgtgtgccctccctcacttgtgggccccccttgcctccgtgcccaggttgctgtgggtgcagctgtcacagccctgagagtcagggtggagatgaggtgctcaattaaacattactgttttccatgc

SEQ ID NO: 170079 - DNA, 2958 bp, Homo sapiens
  Payload ID: 13496
  Gene Symbol: PRSS50
  Gene Name: protease, serine, 50
  Uniprot ID: Q9UI38
  ENST ID: ENST00000460241
  CDS Start-End: 1672-2829
gctccaagttgccgccagaacccatggccggcgtggaaaccgctgcgaggcggcgccacgacggaggctgaggtcgccggcagtatccatggcgtcccagagcggcagctccctggggctcctggcctggttcttgcttcttcagccatggctcgaagaggcccgggcaggcagggtgggtgcgcagggaggcgtagcactgctcttcccctccgcgctcccctcagggccaggcggccaggaccccggagcgagcggatgggagccgccacctgtaggggctccaggatccccagcggccccccagtccagggggaacgcagtgcgccccgcttcggtgttacttccctcaggtgagccataccgacccgaggaggattccagaatgaccccggcaagcccagaagcccggacgtctcctgtgcacccgaaattccccaaaattccagaaacttctgtagctccagggtctccagcgaccgcagggcctccaggatcctgggttacttcagcatctacagtgggagaagccttggaatccgacggaatctctgaccttggaaggcagttttctcagggtattgtttctggtgctagatctgtcctggcctgcggggtaggtcaaaggggacacagcctggctcagggaggttgagggtcagaccctgacctagatgatttgagagagaggatagataacccgcctccgccctgggcagcctggtggggtggtgggaaggtagtggcttcacttccagtcccctctctttactgagcccaccagcctgtggccaccgtgtttcaaggatgattggaggattgccagccccaaacaagaagtggccctggcaggtgagcctgcagaccagcaacatacaccactgcggaggctccctcatcgacaggcgctgggtgctcactgccgcccactgtgtctttagtttcaggaccaatgccacttgttcttcaggagactgagctaaacattatgcgtcatgagaaatgttgtgagatgctcaagaacaagaatatatccaagagtaaaatggtcacgagggggaccgtctgtggctataatgaccaagggaaggatgcctgtcaggttataaagaggacacaaccaatccaggttgactctggaagctcccttgtctgccaaatggacaagacctggattcagataggagtgttccttgggcaaagccccactggaggggctggagggaaagtagggtcacttggagatcctggatgccagcccctgaggtttggtcttcatctcactgcgggaggggtgacaccatgagccagtccagggcaatgggctgcgagggtgaggaggtctgagaatcggccgagattaagttgagggactccaggagactgcttggaccagcggagtgaggagagggaggggccaaggagggaagtcagccggggcgtacccagcccgggaggtataagggagggctgtcactaggggcgcccttgcgggtcagacaccacgagcgccgtggcgggtggcccctggggggcgccacgcaggcggggcactaggagcatccccacccagctcaccagaggccgcggcatgcggccaacagggggcgccgtcgtgggggcggcactgggagcgccttccggagagacgcagtcggctgccaccccgggatgggtcgctggtgccagaccgtcgcgcgcgggcagcgcccccggacgtctgccccctcccgcgccggtgccctgctgctgctgcttctgttgctgaggtctgcaggttgctggggcgcaggggaagccccgggggcgctgtccactgctgatcccgccgaccagagcgtccagtgtgtccccaaggccacctgtccttccagccggcctcgccttctctggcagaccccgaccacccagacactgccctcgaccaccatggagacccaattcccagtttctgaaggcaaagtcgacccataccgctcctgtggcttttcctacgagcaggaccccaccctcagggacccagaagccgtggctcggcggtggccctggatggtcagcgtgcgggccaatggcacacacatctgtgccggcaccatcattgcctcccagtgggtgctgactgtggcccactgcctgatctggcgtgatgttatctactcagtgagggtggggagtccgtggattgaccagatgacgcagaccgcctccgatgtcccggtgctccaggtcatcatgcatagcaggtaccgggcccagcggttctggtcctgggtgggccaggccaacgacatcggcctcctcaagctcaagcaggaactcaagtacagcaattacgtgcggcccatctgcctgcctggcacggactatgtgttgaaggaccattcccgctgcactgtgacgggctggggactttccaaggctgacggcatgtggcctcagttccggaccattcaggagaaggaagtcatcatcctgaacaacaaagagtgtgacaatttctaccacaacttcaccaaaatccccactctggttcagatcatcaagtcccagatgatgtgtgcggaggacacccacagggagaagttctgctatgagctaactggagagcccttggtctgctccatggagggcacgtggtacctggtgggattggtgagctggggtgcaggctgccagaagagcgaggccccacccatctacctacaggtctcctcctaccaacactggatctgggactgcctcaacgggcaggccctggccctgccagccccatccaggaccctgctcctggcactcccactgcccctcagcctccttgctgccctctgactctgtgtgccctccctcacttgtgggccccccttgcctccgtgcccaggttgctgtgggtgcagctgtcacagccctgagagtcagggtggagatgaggtgctcaattaaacattactgttttccatg

SEQ ID NO: 170080 - DNA, 2181 bp, Homo sapiens
  Payload ID: 13497
  Gene Symbol: PRSS53
  Gene Name: protease, serine, 53
  Uniprot ID: Q2L4Q9
  ENST ID: ENST00000280606
  CDS Start-End: 155-1816
tcacacagccacagccccagagctaggaactgctggctagggcaagcagacagctgaatcctagccaactggaggtggagcagaggtggagccagggagacccaggtggcctctctcagagtggagcacaggtggcagagtggcccggggcagcatgaagtggtgctggggcccagtgctgctcatcgcgggtgccacagtcctcatggagggtcttcaagccgctcagcgtgcctgtggacagcgtggccccggcccccccaagcctcaggagggcaacacagtccctggcgagtggccctggcaggccagtgtgaggaggcaaggagcccacatctgcagcggctccctggtggcagacacctgggtcctcactgctgcccactgctttgaaaaggcagcagcaacagaactgaattcctggtcagtggtcctgggttctctgcagcgtgagggactcagccctggggccgaagaggtgggggtggctgccctgcagttgcccagggcctataaccactacagccagggctcagacctggccctgctgcagctcgcccaccccacgacccacacacccctctgcctgccccagcccgcccatcgcttcccctttggagcctcctgctgggccactggctgggatcaggacaccagtgatgctcctgggaccctacgcaatctgcgcctgcgtctcatcagtcgccccacatgtaactgtatctacaaccagctgcaccagcgacacctgtccaacccggcccggcctgggatgctatgtgggggcccccagcctggggtgcagggcccctgtcagggagattccgggggccctgtgctgtgcctcgagcctgacggacactgggttcaggctggcatcatcagctttgcatcaagctgtgcccaggaggacgctcctgtgctgctgaccaacacagctgctcacagttcctggctgcaggctcgagttcagggggcagctttcctggcccagagcccagagaccccggagatgagtgatgaggacagctgtgtagcctgtggatccttgaggacagcaggtccccaggcaggagcaccctccccatggccctgggaggccaggctgatgcaccagggacagctggcctgtggcggagccctggtgtcagaggaggcggtgctaactgctgcccactgcttcattgggcgccaggccccagaggaatggagcgtagggctggggaccagaccggaggagtggggcctgaagcagctcatcctgcatggagcctacacccaccctgaggggggctacgacatggccctcctgctgctggcccagcctgtgacactgggagccagcctgcggcccctctgcctgccctatcctgaccaccacctgcctgatggggagcgtggctgggttctgggacgggcccgcccaggagcaggcatcagctccctccagacagtgcccgtgaccctcctggggcctagggcctgcagccggctgcatgcagctcctgggggtgatggcagccctattctgccggggatggtgtgtaccagtgctgtgggtgagctgcccagctgtgagggcctgtctggggcaccactggtgcatgaggtgaggggcacatggttcctggccgggctgcacagcttcggagatgcttgccaaggccccgccaggccggcggtcttcaccgcgctccctgcctatgaggactgggtcagcagtttggactggcaggtctacttcgccgaggaaccagagcccgaggctgagcctggaagctgcctggccaacataagccaaccaaccagctgctgacaggggacctggccattctcaggacaagagaatgcaggcaggcaaatggcattactgcccctgtcctccccaccctgtcatgtgtgattccaggcaccagggcaggcccagaagcccagcagctgtgggaaggaacctgcctggggccacaggtgcccactccccaccctgcaggacaggggtgtctgtggacactcccacacccaactctgctaccaagcaggcgtctcagctttcctcctcctttaccctttcagatacaatcacgccagccacgttgttttgaaaatttctttttttggggggcagcagttttcctttttttaaacttaaataaattgttacaaaatagactttagaaaata

SEQ ID NO: 170081 - DNA, 1810 bp, Homo sapiens
  Payload ID: 13498
  Gene Symbol: PRSS54
  Gene Name: protease, serine, 54
  Uniprot ID: Q6PEW0
  ENST ID: ENST00000219301
  CDS Start-End: 396-1583
aatggaacattcttcccaaggcagtagaagaaatccttctgttgaactctactgtgtcaggccagcctgagttcatttctccttgagcaggaacagttcatggacgaactctgaggaccattctgaggacaagaggcatccagtgtcatgagtggaacatgcagcattttatggctacagagttaaggcaagggttgaattccacgagtcaaaaagcagcccttttcagagacccaactctctggggtgctcaggggcttgggctggattgagaagaaaactgacaagagtaagctgccctctcttctctggccatctcacaaaccacagtgcgggccaactggtcctgcctctttaccacacagaaccaagcactagggataagacagctgcccatggtgtccgcggcgggtctctctggggatggcaagatgcgaggggtgctcctggtgctgctcggccttctctattcttccaccagttgtggcgtccagaaagcttccgttttctacggtcctgaccccaaggagggcttggtcagcagcatggagttcccgtgggtggtgtcgctgcaggactcccagtacacacacctggctttcggctgcatcctgagcgagttctgggtcctcagcatcgcatccgccattcagaacaggaaggacattgtcgttatagtgggtataagtaacatggatcctagcaagattgctcacacagagtatccagtcaataccatcatcatccatgaggactttgataacaactccatgagcaacaacatagccctcctgaagacagacacagcgatgcattttggcaacctggtccagtccatctgcttcctcggcagaatgctgcatacaccaccagtcttgcagaactgctgggtgtcaggatggaatcccacatctgcaacaggaaatcacatgacgatgagtgtcctgaggaaaatcttcgtgaaagatcttgacatgtgtcccctatacaaactccagaagacagaatgcggcagccacacgaaagaggaaaccaagactgcctgcttgggggacccaggaagcccaatgatgtgccagctacagcagttcgatctgtgggttctgagaggagtcctgaacttcggtggtgagacgtgccctggcctgtttctgtacaccaaggtggaagactacagcaaatggatcacatccaaggctgagagggccggccctcccctgtcctcactccaccactgggaaaagttgatttctttctcccaccatggaccaaatgccaccatgacacagaagacatattctgattctgaactgggccatgttggatcatacttgcagggacaaagaaggaccatcacgcattcacgactaggaaacagctctagagatagtctagatgttagggagaaggatgtaaaggaatcaggcaggtctcctgaggcgtctgtacaacccttatactatgactattacggtggggaggtgggggaaggtaggatttttgcaggtcagaacaggttgtatcagcccgaagaaatcatcttggtttccttcgtgcttgttttcttttgcagcagtatctagtccaggagctaccccaccaaactgaagagtaaactgagaatgctgagtgccaggcattcaccatgctgttttgatgtctgtttttgatagttgcacactggggctgccacggataagcccatggcatacactgggctggctctccctcctctatccctctcccaggtgtgggaaggtcactttcactatgcttgtgaactaaatgctggctaacaagtgtcaaacca

SEQ ID NO: 170082 - DNA, 1555 bp, Homo sapiens
  Payload ID: 13498
  Gene Symbol: PRSS54
  Gene Name: protease, serine, 54
  ENST ID: ENST00000543437
  CDS Start-End: 444-1334
ttcatttctccttgagcaggaacagttcatggacgaactctgaggaccattctgaggacaagaggcatccagtgtcatgagtggaacatgcagcattttatggctacagagttaaggcaagggttgaattccacgagtcaaaaagcagcccttttcagagacccaactctctggggtgctcaggggcttgggctggattgagaagaaaactgacaagagtaagctgccctctcttctctggccatctcacaaaccacagtgcgggccaactggtcctgcctctttaccacacagaaccaagcactagggataagacagctgcccatggtgtccgcggcgggtctctctggggatggcaagatgcgaggggtgctcctggtgctgctcggccttctctattcttccaccagaaggacattgtcgttatagtgggtataagtaacatggatcctagcaagattgctcacacagagtatccagtcaataccatcatcatccatgaggactttgataacaactccatgagcaacaacatagccctcctgaagacagacacagcgatgcattttggcaacctggtccagtccatctgcttcctcggcagaatgctgcatacaccaccagtcttgcagaactgctgggtgtcaggatggaatcccacatctgcaacaggaaatcacatgacgatgagtgtcctgaggaaaatcttcgtgaaagatcttgacatgtgtcccctatacaaactccagaagacagaatgcggcagccacacgaaagaggaaaccaagactgcctgcttgggggacccaggaagcccaatgatgtgccagctacagcagttcgatctgtgggttctgagaggagtcctgaacttcggtggtgagacgtgccctggcctgtttctgtacaccaaggtggaagactacagcaaatggatcacatccaaggctgagagggccggccctcccctgtcctcactccaccactgggaaaagttgatttctttctcccaccatggaccaaatgccaccatgacacagaagacatattctgattctgaactgggccatgttggatcatacttgcagggacaaagaaggaccatcacgcattcacgactaggaaacagctctagagatagtctagatgttagggagaaggatgtaaaggaatcaggcaggtctcctgaggcgtctgtacaacccttatactatgactattacggtggggaggtgggggaaggtaggatttttgcaggtcagaacaggttgtatcagcccgaagaaatcatcttggtttccttcgtgcttgttttcttttgcagcagtatctagtccaggagctaccccaccaaactgaagagtaaactgagaatgctgagtgccaggcattcaccatgctgttttgatgtctgtttttgatagttgcacactggggctgccacggataagcccatggcatacactgggctggctctccctcctctatccctctcccaggtgtgggaaggtcactttcactatgcttgtgaactaaatgctggctaacaagtgtc

SEQ ID NO: 170083 - DNA, 1799 bp, Homo sapiens
  Payload ID: 13498
  Gene Symbol: PRSS54
  Gene Name: protease, serine, 54
  Uniprot ID: Q6PEW0
  ENST ID: ENST00000567164
  CDS Start-End: 385-1572
attcttcccaaggcagtagaagaaatccttctgttgaactctactgtgtcaggccagcctgagttcatttctccttgagcaggaacagttcatggacgaactctgaggaccattctgaggacaagaggcatccagtgtcatgagtggaacatgcattttatggctacagagttaaggcaagggttgaattccacgagtcaaaaagcagcccttttcagagacccaactctctggggtgctcaggggcttgggctggattgagaagaaaactgacaagagtaagctgccctctcttctctggccatctcacaaaccacagtgcgggccaactggtcctgcctctttaccacacagaaccaagcactagggataagacagctgcccatggtgtccgcggcgggtctctctggggatggcaagatgcgaggggtgctcctggtgctgctcggccttctctattcttccaccagttgtggcgtccagaaagcttccgttttctacggtcctgaccccaaggagggcttggtcagcagcatggagttcccgtgggtggtgtcgctgcaggactcccagtacacacacctggctttcggctgcatcctgagcgagttctgggtcctcagcatcgcatccgccattcagaacaggaaggacattgtcgttatagtgggtataagtaacatggatcctagcaagattgctcacacagagtatccagtcaataccatcatcatccatgaggactttgataacaactccatgagcaacaacatagccctcctgaagacagacacagcgatgcattttggcaacctggtccagtccatctgcttcctcggcagaatgctgcatacaccaccagtcttgcagaactgctgggtgtcaggatggaatcccacatctgcaacaggaaatcacatgacgatgagtgtcctgaggaaaatcttcgtgaaagatcttgacatgtgtcccctatacaaactccagaagacagaatgcggcagccacacgaaagaggaaaccaagactgcctgcttgggggacccaggaagcccaatgatgtgccagctacagcagttcgatctgtgggttctgagaggagtcctgaacttcggtggtgagacgtgccctggcctgtttctgtacaccaaggtggaagactacagcaaatggatcacatccaaggctgagagggccggccctcccctgtcctcactccaccactgggaaaagttgatttctttctcccaccatggaccaaatgccaccatgacacagaagacatattctgattctgaactgggccatgttggatcatacttgcagggacaaagaaggaccatcacgcattcacgactaggaaacagctctagagatagtctagatgttagggagaaggatgtaaaggaatcaggcaggtctcctgaggcgtctgtacaacccttatactatgactattacggtggggaggtgggggaaggtaggatttttgcaggtcagaacaggttgtatcagcccgaagaaatcatcttggtttccttcgtgcttgttttcttttgcagcagtatctagtccaggagctaccccaccaaactgaagagtaaactgagaatgctgagtgccaggcattcaccatgctgttttgatgtctgtttttgatagttgcacactggggctgccacggataagcccatggcatacactgggctggctctccctcctctatccctctcccaggtgtgggaaggtcactttcactatgcttgtgaactaaatgctggctaacaagtgtcaaacca

SEQ ID NO: 170084 - DNA, 954 bp, Homo sapiens
  Payload ID: 13498
  Gene Symbol: PRSS54
  Gene Name: protease, serine, 54
  ENST ID: ENST00000569727
  CDS Start-End: 396-954
aatggaacattcttcccaaggcagtagaagaaatccttctgttgaactctactgtgtcaggccagcctgagttcatttctccttgagcaggaacagttcatggacgaactctgaggaccattctgaggacaagaggcatccagtgtcatgagtggaacatgcagcattttatggctacagagttaaggcaagggttgaattccacgagtcaaaaagcagcccttttcagagacccaactctctggggtgctcaggggcttgggctggattgagaagaaaactgacaagagtaagctgccctctcttctctggccatctcacaaaccacagtgcgggccaactggtcctgcctctttaccacacagaaccaagcactagggataagacagctgcccatggtgtccgcggcgggtctctctggggatggcaagatgcgaggggtgctcctggtgctgctcggccttctctattcttccaccagttgtggcgtccagaaagcttccgttttctacggtcctgaccccaaggagggcttggtcagcagcatggagttcccgtgggtggtgtcgctgcaggactcccagtacacacacctggctttcggctgcatcctgagcgagttctgggtcctcagcatcgcatccgccattcagaacaggaaggacattgtcgttatagtgggtataagtaacatggatcctagcaagattgctcacacagagtatccagtcaataccatcatcatccatgaggactttgataacaactccatgagcaacaacatagccctcctgaagacagacacagcgatgcattttggcaacctggtccagtccatctgcttcctcggcagaatgctgcatacaccaccagtcttgcagaactgctgggtgtcaggatggaatcccacatctgcaacaggaaatcacatgacgatgagtgtcctgaggaaaa

SEQ ID NO: 170085 - DNA, 1057 bp, Homo sapiens
  Payload ID: 13498
  Gene Symbol: PRSS54
  Gene Name: protease, serine, 54
  ENST ID: ENST00000569079
  CDS Start-End: 448-1057
gcctgagttcatttctccttgagcaggaacagttcatggacgaactctgaggaccattctgaggacaagaggcatccagtgtcatgagtggaacatgcattttatggctacagagttaaggcaagggttgaattccacgagtcaaaaagcagcccttttcagagacccaactctctggggtgctcaggggcttgggctggattgagaagaaaactgacaagagtaagctgccctctcttctctggccatctcacaaaccacagtgcgggccaactggtcctgcctctttaccacacagaaccaagcactagggataagacagctgcccatggtgtccgcggcgggtctctctggggatggcaagatgcgaggggtgctcctggtgctgctcggccttctctattcttccaccagaaggacattgtcgttatagtgggtataagtaacatggatcctagcaagattgctcacacagagtatccagtcaataccatcatcatccatgaggactttgataacaactccatgagcaacaacatagccctcctgaagacagacacagcgatgcattttggcaacctggtccagtccatctgcttcctcggcagaatgctgcatacaccaccagtcttgcagaactgctgggtgtcaggatggaatcccacatctgcaacaggaaatcacatgacgatgagtgtcctgaggaaaatcttcgtgaaagatcttgacatgtgtcccctatacaaactccagaagacagaatgcggcagccacacgaaagaggaaaccaagactgcctgcttgggggacccaggaagcccaatgatgtgccagctacagcagttcgatctgtgggttctgagaggagtcctgaacttcggtggtgagacgtgccctggcctgtttctgtacaccaaggtggaagactacagcaaatggatcacatccaaggctgagagggccggccctcccctgtcctcactccaccactgggaaaagttgatttctttctcccaccatggaccaaatgccaccatgacacagaagacatattctg

SEQ ID NO: 170086 - DNA, 1124 bp, Homo sapiens
  Payload ID: 13499
  Gene Symbol: PRSS55
  Gene Name: protease, serine, 55
  Uniprot ID: Q6UWB4
  ENST ID: ENST00000328655
  CDS Start-End: 41-1099
ggcctctgtcacccccgggcccacagcacagcccagggccatgctcctgttctcagtgttgctgctcctgtccctggtcacgggaactcagctcggtccacggactcctctcccagaggctggagtggctatcctaggcagggctaggggagcccaccgccctcagccccctcatccccccagcccagtcagtgaatgtggtgacagatctattttcgagggaagaactcggtattccagaatcacaggggggatggaggcggaggtgggtgagtttccgtggcaggtgagtattcaggcaagaagtgaacctttctgtggcggctccatcctcaacaagtggtggattctcactgcggctcactgcttatattccgaggagctgtttccagaagaactgagtgtcgtgctggggaccaacgacttaactagcccatccatggaaataaaggaggtcgccagcatcattcttcacaaagactttaagagagccaacatggacaatgacattgccttgctgctgctggcttcgcccatcaagctcgatgacctgaaggtgcccatctgcctccccacgcagcccggccctgccacatggcgcgaatgctgggtggcaggttggggccagaccaatgctgctgacaaaaactctgtgaaaacggatctgatgaaagcgccaatggtcatcatggactgggaggagtgttcaaagatgtttccaaaacttaccaaaaatatgctgtgtgccggatacaagaatgagagctatgatgcctgcaagggtgacagtggggggcctctggtctgcaccccagagcctggtgagaagtggtaccaggtgggcatcataagctggggaaagagctgtggagagaagaacaccccagggatatacacctcgttggtgaactacaacctctggatcgagaaagtgacccagctagagggcaggcccttcaatgcagagaaaaggaggacttctgtcaaacagaaacctatgggctccccagtctcgggagtcccagagccaggcagccccagatcctggctcctgctctgtcccctgtcccatgtgttgttcagagctattttgtactgataataaaatagaggctattctttca

SEQ ID NO: 170087 - DNA, 2374 bp, Homo sapiens
  Payload ID: 13499
  Gene Symbol: PRSS55
  Gene Name: protease, serine, 55
  ENST ID: ENST00000518641
  CDS Start-End: 1-547
ttggaagcctgctcctcccagcccggtccccagctcacactggatgctgactaagtgtttccccttttcctttccactctctttctttccaccagaatgtggtgacagatctattttcgagggaagaactcggtattccagaatcacaggggggatggaggcggaggtgggtgagtttccgtggcaggtgagtattcaggcaagaagtgaacctttctgtggcggctccatcctcaacaagtggtggattctcactgcggctcactgcttatattccgaggagctgtttccagaagaactgagtgtcgtgctggggaccaacgacttaactagcccatccatggaaataaaggaggtcgccagcatcattcttcacaaagactttaagagagccaacatggacaatgacattgccttgctgctgctggcttcgcccatcaagctcgatgacctgaaggtgcccatctgcctccccacgcagcccggccctgccacatggcgcgaatgctgggtggcaggttggggccagaccaatgctggtatgtgactgctcagcttcccctggggaaaaagccactgcaatgtgaaggagaggggaggaagctaaggaaggagtgaggacaagacttgcattggagcagattcccgctcagtggagtctcacagtgcccaaagtttagctccttttgggtgccgaaaccccaagctgacaaaaactctgtgaaaacggatctgatgaaagcgccaatggtcatcatggactgggaggagtgttcaaagatgtttccaaaacttaccaaaaatatgctgtgtgccggatacaagaatgagagctatgatgcctgcaagacccagcgctgccgcgtgcttctttcctctggattcgaatttcctgggccaccaccgaagatgcaaaggcaaattcaggaaatgcaaatccttaaatggaagcttgggcttttcctggggacctacagcctggctgagtgttctccagaaagagactgaagaaaagcttcctggttgggcgaggtggctcatgcctgtaatcccagcactttgggaggctgagatgggtggatcacctaaggccaggagttcaagaccagtctggccaccacggtgaaaccccgtctctactttaaaaaatacaaaagttagccgggtgtggtggcgggcacctgtaatcccagccaatcgggatcctgaggcaggataacggcttgaacccaggaggtggaggttgcaatgagcggagatcacgccactgcactccggcctgggcatcaagagtgaactctatctccaaaaaaaaagaaaaaagaaaaaaagcttcctagttatcctttttcccactctaaccctactcctccagaggtcctacagctacaatgtctagaagccattttttcagaagctcctaagaacctgggactcaggcaggcccagtggagggtggccagctggagtgttcaccatctcaggacatcaccactgtccactccactttcctgctcaccgccctctgacttctgtgtgggggccctcccttttcacccactctccaatttgcatagttctggatggctggccctttgctgggggctggggtgggcatagaactcgagcctggcctagaaggacattgattttggccacagggatgggagcagcaatgggctgtgggctttataggtcacaagagcaagaccaagacttctgctggagttatcaggaacaagactgactgactctcctgggactcccaacatggtagggtgcatgttgaaggtactgctcatgtgaaggctgctggggagtgtggtggttccttttgtctgtcaacttggaggggatctgtggatgagattgatgtttaaattggtaaactgtgacgaagcagattgccctccataatggggtgagcctcatccaatccgttgaaggcctgagtaggacaaaaatgattggcctccccacacaagagggaattcctcagccgcccaccttcagacttcatctgcattgtcagctcttctggggctctgcctgccagtctctaaaccagagcagcaccaccagctctcctgcatctcgagcctgccagtccacaccccaggtttgagcttgccagtctctgtaatcagggacagaaaactgactgtgtgctctgttgacccagcctcaacaaacaggacatggtggcctgcacctgtgcttctcagaccatctgtgaggaaaaagaccagggcttttggtttttggttttgcttcgaaatttccaacttatttcaaaccaatactttcataaaacataaaattgaactactcgaaaaatgaaatcgaaaatgaacaaataaaatgcaagcccaca

SEQ ID NO: 170088 - DNA, 1005 bp, Homo sapiens
  Payload ID: 13499
  Gene Symbol: PRSS55
  Gene Name: protease, serine, 55
  Uniprot ID: Q6UWB4
  ENST ID: ENST00000522210
  CDS Start-End: 41-871
ggcctctgtcacccccgggcccacagcacagcccagggccatgctcctgttctcagtgttgctgctcctgtccctggtcacgggaactcagctcggtccacggactcctctcccagaggctggagtggctatcctaggcagggctaggggagcccaccgccctcagccccctcatccccccagcccagtcagtgaatgtggtgacagatctattttcgagggaagaactcggtattccagaatcacaggggggatggaggcggaggtgggtgagtttccgtggcaggtgagtattcaggcaagaagtgaacctttctgtggcggctccatcctcaacaagtggtggattctcactgcggctcactgcttatattccgaggagctgtttccagaagaactgagtgtcgtgctggggaccaacgacttaactagcccatccatggaaataaaggaggtcgccagcatcattcttcacaaagactttaagagagccaacatggacaatgacattgccttgctgctgctggcttcgcccatcaagctcgatgacctgaaggtgcccatctgcctccccacgcagcccggccctgccacatggcgcgaatgctgggtggcaggttggggccagaccaatgctgctgacaaaaactctgtgaaaacggatctgatgaaagcgccaatggtcatcatggactgggaggagtgttcaaagatgtttccaaaacttaccaaaaatatgctgtgtgccggatacaagaatgagagctatgatgcctgcaagcaaagctattttcccactttacaaagaatgaacaccggaagctctcaaacaaagccgcctgggtctcacacctttcatctgcaaaactgatgctttgctctttcttctacatggagccatttttggggcagaaaacatacccttgggcatagccttgagttgaaaatctttgagggtgttttctgtccaaatgactgaaaaaatgaataaaagcctccccattt

SEQ ID NO: 170089 - DNA, 2157 bp, Homo sapiens
  Payload ID: 13500
  Gene Symbol: PRSS56
  Gene Name: protease, serine, 56
  ENST ID: ENST00000449534
  CDS Start-End: 137-1951
gatgatttgagggacaagaattcagtgcccgggggccgaaaggcagcagaaggcgggcaccaaaggataggcacccggaaggtggactccgaggaggagagaggacaggggtctctcaccccagctcctggtcaccatgctgctggctgtgctgctgctgctacccctcccaagctcatggtttgcccacgggcacccactgtacacacgcctgccccccagcgccctgcaagttctgtcggcccaggggactcaggcgttgcaggcagcccagaggagcgcccagtgggcaataaaccgagtggcgatggagatccagcacagatcgcacgagtgccgaggatctgggcgccccaggcctcaagctctcctccaggacccacctgagccagggccgtgcggcgagaggcgtccgagcactgccaatgtgacgcgggcccacggccgcatcgtggggggcagcgcggcgccgcccggggcctggccctggctggtgaggctgcagctcggcgggcagcctctgtgcggcggcgtcctggtagcggcctcctgggtgctcacggcagcgcactgctttgtaggcgccccgaatgagcttctgtggactgtgacgctggcagaggggtcccggggggagcaagcggaggaggtgccagtgaaccgcatcctgccccaccccaagtttgacccgcggaccttccacaacgacctggccctggtgcagctgtggacgccggtgagcccggggggatcggcgcgccccgtgtgcctgccccaggagccccaggagccccctgccggaaccgcctgcgccatcgcgggctggggcgccctcttcgaagacgggcctgaggctgaagcagtgagagaggcccgtgttcccctgctcagcaccgacacctgccgaagagccctggggcccgggctgcgccccagcaccatgctctgcgccgggtacctggcggggggcgttgactcgtgccagggtgactcgggaggccccctgacctgttctgagcctggcccccgccctagagaggtcctgttcggagtcacctcctggggggacggctgcggggagccagggaagcccggggtctacacccgcgtggcagtgttcaaggactggctccaggagcagatgagcgcagcctcctccagccgcgagcccagctgcagggagcttctggcctgggaccccccccaggagctgcaggcagacgccgcccggctctgcgccttctatgcccgcctgtgcccggggtcccagggcgcctgtgcgcgcctggcgcaccagcagtgcctgcagcgccggcggcgatgcgagctgcgctcgctggcgcacacgctgctgggcctgctgcggaacgcgcaggagctgctcgggcctcgtccgggactgcggcgcctggcccccgccctggctctccccgctccagcgctcagggagtctcctctgcaccccgcccgggagctgcggcttcactcaggatcgcgggctgcaggcactcggttcccgaagcggaggccggagccgcgcggagaagccaacggctgccctgggctggagcccctgcgacagaagttggctgccctgcagggggcccatgcctggatcctgcaggtcccctcggagcacctggccatgaactttcatgaggtcctggcagatctgggctccaagacactgaccgggcttttcagagcctgggtgcgggcaggcttggggggccggcatgtggccttcagcggcctggtgggcctggagccggccacactggctcgcagcctcccccggctgctggtgcaggccctgcaggccttccgcgtggctgccctggcagaaggggagcccgagggaccctggatggatgtagggcaggggcccgggctggagaggaaggggcaccacccactcaaccctcaggtaccccccgccaggcaaccctgagccatgtctgggcccccagcccctggggaggacctactgctcccaggggctgagaggggttcgggagcataatgacaaactgtcgctgccccagtggctgggtgtgtgtgggtgggatggggtgggggtcctgggccccccgtgtcttcccaggtttacaatcagagaatcacagctgctttaataaatgttatttataatacacg

SEQ ID NO: 170090 - DNA, 2158 bp, Homo sapiens
  Payload ID: 13500
  Gene Symbol: PRSS56
  Gene Name: protease, serine, 56
  Uniprot ID: P0CW18
  ENST ID: ENST00000617714
  CDS Start-End: 137-1948
gatgatttgagggacaagaattcagtgcccgggggccgaaaggcagcagaaggcgggcaccaaaggataggcacccggaaggtggactccgaggaggagagaggacaggggtctctcaccccagctcctggtcaccatgctgctggctgtgctgctgctgctacccctcccaagctcatggtttgcccacgggcacccactgtacacacgcctgccccccagcgccctgcaagttctgtcggcccaggggactcaggcgttgcaggcagcccagaggagcgcccagtgggcaataaaccgagtggcgatggagatccagcacagatcgcacgagtgccgaggatctgggcgccccaggcctcaagctctcctccaggacccacctgagccagggccgtgcggcgagaggcgtccgagcactgccaatgtgacgcgggcccacggccgcatcgtggggggcagcgcggcgccgcccggggcctggccctggctggtgaggctgcagctcggcgggcagcctctgtgcggcggcgtcctggtagcggcctcctgggtgctcacggcagcgcactgctttgtaggcgccccgaatgagcttctgtggactgtgacgctggcagaggggtcccggggggagcaagcggaggaggtgccagtgaaccgcatcctgccccaccccaagtttgacccgcggaccttccacaacgacctggccctggtgcagctgtggacgccggtgagcccggggggatcggcgcgccccgtgtgcctgccccaggagccccaggagccccctgccggaaccgcctgcgccatcgcgggctggggcgccctcttcgaagacgggcctgaggctgaagcagtgagagaggcccgtgttcccctgctcagcaccgacacctgccgaagagccctggggcccgggctgcgccccagcaccatgctctgcgccgggtacctggcggggggcgttgactcgtgccagggtgactcgggaggccccctgacctgttctgagcctggcccccgccctagagaggtcctgttcggagtcacctcctggggggacggctgcggggagccagggaagcccggggtctacacccgcgtggcagtgttcaaggactggctccaggagcagatgagcgcctcctccagccgcgagcccagctgcagggagcttctggcctgggaccccccccaggagctgcaggcagacgccgcccggctctgcgccttctatgcccgcctgtgcccggggtcccagggcgcctgtgcgcgcctggcgcaccagcagtgcctgcagcgccggcggcgatgcgagctgcgctcgctggcgcacacgctgctgggcctgctgcggaacgcgcaggagctgctcgggcctcgtccgggactgcggcgcctggcccccgccctggctctccccgctccagcgctcagggagtctcctctgcaccccgcccgggagctgcggcttcactcaggatcgcgggctgcaggcactcggttcccgaagcggaggccggagccgcgcggagaagccaacggctgccctgggctggagcccctgcgacagaagttggctgccctgcagggggcccatgcctggatcctgcaggtcccctcggagcacctggccatgaactttcatgaggtcctggcagatctgggctccaagacactgaccgggcttttcagagcctgggtgcgggcaggcttggggggccggcatgtggccttcagcggcctggtgggcctggagccggccacactggctcgcagcctcccccggctgctggtgcaggccctgcaggccttccgcgtggctgccctggcagaaggggagcccgagggaccctggatggatgtagggcaggggcccgggctggagaggaaggggcaccacccactcaaccctcaggtaccccccgccaggcaaccctgagccatgtctgggcccccagcccctggggaggacctactgctcccaggggctgagaggggttcgggagcataatgacaaactgtcgctgccccagtggctgggtgtgtgtgggtgggatggggtgggggtcctgggccccccgtgtcttcccaggtttacaatcagagaatcacagctgctttaataaatgttatttataatacacggaaa

SEQ ID NO: 170091 - DNA, 1025 bp, Homo sapiens
  Payload ID: 13501
  Gene Symbol: PRSS57
  Gene Name: protease, serine, 57
  ENST ID: ENST00000329267
  CDS Start-End: 32-880
ctctgcggggagacgccagcctgcgtctgccatggggctcgggttgaggggctggggacgtcctctgctgactgtggccaccgccctgatgctgcccgtgaagccccccggctcctggggggcccagatcatcgggggccacgaggtgaccccccactccaggccctacatggcatccgtgcgcttcgggggccaacatcactgcggaggcttcctgctgcgagcccgctgggtggtctcggccgcccactgcttcagccacagagacctccgcactggcctggtggtgctgggcgcccacgtcctgagtactgcggagcccacccagcaggtgtttggcatcgatgctctcaccacacaccccgactaccaccccatgacccacgccaacgacatctgcctgctgcggctgaacggctctgctgtcctgggccctgcagtggggctgctgaggccgccagggagaagggccaggccccccacagcggggacacggtgccgggtggctggctggggcttcgtgtctgactttgaggagctgccgcctggactgatggaggccaaggtccgagtgctggacccggacgtctgcaacagctcctggaagggccacctgacacttaccatgctctgcacccgcagtggggacagccacagacggggcttctgctcggccgactccggagggcccctggtgtgcaggaaccgggctcacggcctcgtttccttctcgggcctctggtgcggcgaccccaagacccccgacgtgtacacgcaggtgtccgcctttgtggcctggatctgggacgtggttcggcggagcagtccccagcccggccccctgcctgggaccaccaggcccccaggagaagccgcctgagccacaaccttgcggcatgcaaatgagatggccgctccaggcctggaatgttccgtggctgggccccacgggaagcctgatgttcagggttggggtgggacgggcagcggtggggcacacccattccacatgcaaagggcagaag

SEQ ID NO: 170092 - DNA, 1090 bp, Homo sapiens
  Payload ID: 13501
  Gene Symbol: PRSS57
  Gene Name: protease, serine, 57
  Uniprot ID: Q6UWY2
  ENST ID: ENST00000613411
  CDS Start-End: 69-920
ggccgttggctgagggtgggagccacggcccgaagacctctgcggggagacgccagcctgcgtctgccatggggctcgggttgaggggctggggacgtcctctgctgactgtggccaccgccctgatgctgcccgtgaagccccccgcaggctcctggggggcccagatcatcgggggccacgaggtgaccccccactccaggccctacatggcatccgtgcgcttcgggggccaacatcactgcggaggcttcctgctgcgagcccgctgggtggtctcggccgcccactgcttcagccacagagacctccgcactggcctggtggtgctgggcgcccacgtcctgagtactgcggagcccacccagcaggtgtttggcatcgatgctctcaccacacaccccgactaccaccccatgacccacgccaacgacatctgcctgctgcggctgaacggctctgctgtcctgggccctgcagtggggctgctgaggccgccagggagaagggccaggccccccacagcggggacacggtgccgggtggctggctggggcttcgtgtctgactttgaggagctgccgcctggactgatggaggccaaggtccgagtgctggacccggacgtctgcaacagctcctggaagggccacctgacacttaccatgctctgcacccgcagtggggacagccacagacggggcttctgctcggccgactccggagggcccctggtgtgcaggaaccgggctcacggcctcgtttccttctcgggcctctggtgcggcgaccccaagacccccgacgtgtacacgcaggtgtccgcctttgtggcctggatctgggacgtggttcggcggagcagtccccagcccggccccctgcctgggaccaccaggcccccaggagaagccgcctgagccacaaccttgcggcatgcaaatgagatggccgctccaggcctggaatgttccgtggctgggccccacgggaagcctgatgttcagggttggggtgggacgggcagcggtggggcacacccattccacatgcaaagggcagaagcaaacccagtaaaatgttaactgac

SEQ ID NO: 170093 - DNA, 1123 bp, Homo sapiens
  Payload ID: 13502
  Gene Symbol: PRSS58
  Gene Name: protease, serine, 58
  Uniprot ID: Q8IYP2
  ENST ID: ENST00000552471
  CDS Start-End: 321-1046
cgtctgtagagatatcatgaacttcaacttagctttggtactttcttccctgaagacagagggcagaactctgagttccagaaccattttcaactgtattggggaccaatcacttgactctattcttgtctctctgacagatgacgctacactctcctctgaataatggacaccatttctaaaactgaatcctgctactaaaataattcagatgatatatttttccaattctacaatcttgctttgttttatttagttgttttctctctctcttcccagttttccagagactggagctaaactgggctttcaacatcatcatgaagtttatcctcctctgggctctcttgaatctgactgttgctttggcctttaatccagattacacagtcagctccactcccccttacttggtctatttgaaatctgactacttgccctgcgctggagtcctgatccacccgctttgggtgatcacagctgcacactgcaatttaccaaagcttcgggtgatattgggggttacaatcccagcagactctaatgaaaagcatctgcaagtgattggctatgagaagatgattcatcatccacacttctcagtcacttctattgatcatgacatcatgctaatcaagctgaaaacagaggctgaactcaatgactatgtgaaattagccaacctgccctaccaaactatctctgaaaataccatgtgctctgtctctacctggagctacaatgtgtgtgatatctacaaagagcccgattcactgcaaactgtgaacatctctgtaatctccaagcctcagtgtcgcgatgcctataaaacctacaacatcacggaaaatatgctgtgtgtgggcattgtgccaggaaggaggcagccctgcaaggaagtttctgctgccccggcaatctgcaatgggatgcttcaaggaatcctgtcttttgcggatggatgtgttttgagagctgatgttggcatctatgccaaaattttttactatataccctggattgaaaatgtaatccaaaataactgagctgtggcagttgtggaccatatgacacagcttgtccccatcgttcacctttagaattaaatataaattaactcctc

SEQ ID NO: 170094 - DNA, 913 bp, Homo sapiens
  Payload ID: 13502
  Gene Symbol: PRSS58
  Gene Name: protease, serine, 58
  Uniprot ID: Q8IYP2
  ENST ID: ENST00000547058
  CDS Start-End: 110-835
aaggctggcaaaaaggagaccagacaggaggcgtctgtagagatatcatgaacttcaacttagctttgttttccagagactggagctaaactgggctttcaacatcatcatgaagtttatcctcctctgggctctcttgaatctgactgttgctttggcctttaatccagattacacagtcagctccactcccccttacttggtctatttgaaatctgactacttgccctgcgctggagtcctgatccacccgctttgggtgatcacagctgcacactgcaatttaccaaagcttcgggtgatattgggggttacaatcccagcagactctaatgaaaagcatctgcaagtgattggctatgagaagatgattcatcatccacacttctcagtcacttctattgatcatgacatcatgctaatcaagctgaaaacagaggctgaactcaatgactatgtgaaattagccaacctgccctaccaaactatctctgaaaataccatgtgctctgtctctacctggagctacaatgtgtgtgatatctacaaagagcccgattcactgcaaactgtgaacatctctgtaatctccaagcctcagtgtcgcgatgcctataaaacctacaacatcacggaaaatatgctgtgtgtgggcattgtgccaggaaggaggcagccctgcaaggaagtttctgctgccccggcaatctgcaatgggatgcttcaaggaatcctgtcttttgcggatggatgtgttttgagagctgatgttggcatctatgccaaaattttttactatataccctggattgaaaatgtaatccaaaataactgagctgtggcagttgtggaccatatgacacagcttgtccccatcgttcacctttagaattaaatataaattaactcctca

SEQ ID NO: 170095 - DNA, 913 bp, Homo sapiens
  Payload ID: 13502
  Gene Symbol: PRSS58
  Gene Name: protease, serine, 58
  Uniprot ID: Q8IYP2
  ENST ID: ENST00000621886
  CDS Start-End: 110-835
aaggctggcaaaaaggagaccagacaggaggcgtctgtagagatatcatgaacttcaacttagctttgttttccagagactggagctaaactgggctttcaacatcatcatgaagtttatcctcctctgggctctcttgaatctgactgttgctttggcctttaatccagattacacagtcagctccactcccccttacttggtctatttgaaatctgactacttgccctgcgctggagtcctgatccacccgctttgggtgatcacagctgcacactgcaatttaccaaagcttcgggtgatattgggggttacaatcccagcagactctaatgaaaagcatctgcaagtgattggctatgagaagatgattcatcatccacacttctcagtcacttctattgatcatgacatcatgctaatcaagctgaaaacagaggctgaactcaatgactatgtgaaattagccaacctgccctaccaaactatctctgaaaataccatgtgctctgtctctacctggagctacaatgtgtgtgatatctacaaagagcccgattcactgcaaactgtgaacatctctgtaatctccaagcctcagtgtcgcgatgcctataaaacctacaacatcacggaaaatatgctgtgtgtgggcattgtgccaggaaggaggcagccctgcaaggaagtttctgctgccccggcaatctgcaatgggatgcttcaaggaatcctgtcttttgcggatggatgtgttttgagagccgatgttggcatctatgccaaaattttttactatataccctggattgaaaatgtaatccaaaataactgagctgtggcagttgtggaccatatgacacagcttgtccccatcgttcacctttagaattaaatataaattaactcctca

SEQ ID NO: 170096 - DNA, 1123 bp, Homo sapiens
  Payload ID: 13502
  Gene Symbol: PRSS58
  Gene Name: protease, serine, 58
  Uniprot ID: Q8IYP2
  ENST ID: ENST00000622880
  CDS Start-End: 321-1046
cgtctgtagagatatcatgaacttcaacttagctttggtactttcttccctgaagacagagggcagaactctgagttccagaaccattttcaactgtattggggaccaatcacttgactctattcttgtctctctgacagatgacgctacactctcctctgaataatggacaccatttctaaaactgaatcctgctactaaaataattcagatgatatatttttccaattctacaatcttgctttgttttatttagttgttttctctctctcttcccagttttccagagactggagctaaactgggctttcaacatcatcatgaagtttatcctcctctgggctctcttgaatctgactgttgctttggcctttaatccagattacacagtcagctccactcccccttacttggtctatttgaaatctgactacttgccctgcgctggagtcctgatccacccgctttgggtgatcacagctgcacactgcaatttaccaaagcttcgggtgatattgggggttacaatcccagcagactctaatgaaaagcatctgcaagtgattggctatgagaagatgattcatcatccacacttctcagtcacttctattgatcatgacatcatgctaatcaagctgaaaacagaggctgaactcaatgactatgtgaaattagccaacctgccctaccaaactatctctgaaaataccatgtgctctgtctctacctggagctacaatgtgtgtgatatctacaaagagcccgattcactgcaaactgtgaacatctctgtaatctccaagcctcagtgtcgcgatgcctataaaacctacaacatcacggaaaatatgctgtgtgtgggcattgtgccaggaaggaggcagccctgcaaggaagtttctgctgccccggcaatctgcaatgggatgcttcaaggaatcctgtcttttgcggatggatgtgttttgagagccgatgttggcatctatgccaaaattttttactatataccctggattgaaaatgtaatccaaaataactgagctgtggcagttgtggaccatatgacacagcttgtccccatcgttcacctttagaattaaatataaattaactcctc

SEQ ID NO: 170097 - DNA, 1872 bp, Homo sapiens
  Payload ID: 13503
  Gene Symbol: PRSS8
  Gene Name: protease, serine, 8
  Uniprot ID: Q16651
  ENST ID: ENST00000317508
  CDS Start-End: 265-1296
aggtgcagccactcctgggaggaccctgcgtggccagacggtgctggtgactcgtccacactgctcgcttcggatactccaggcgtctcccgttgcggccgctccctgccttagaggccagccttggacacttgctgcccctttccagcccggattctgggatccttccctctgagccaacatctgggtcctgccttcgacaccaccccaaggcttcctaccttgcgtgcctggagtctgccccaggggcccttgtcctgggccatggcccagaagggggtcctggggcctgggcagctgggggctgtggccattctgctctatcttggattactccggtcggggacaggagcggaaggggcagaagctccctgcggtgtggccccccaagcacgcatcacaggtggcagcagtgcagtcgccggtcagtggccctggcaggtcagcatcacctatgaaggcgtccatgtgtgtggtggctctctcgtgtctgagcagtgggtgctgtcagctgctcactgcttccccagcgagcaccacaaggaagcctatgaggtcaagctgggggcccaccagctagactcctactccgaggacgccaaggtcagcaccctgaaggacatcatcccccaccccagctacctccaggagggctcccagggcgacattgcactcctccaactcagcagacccatcaccttctcccgctacatccggcccatctgcctccctgcagccaacgcctccttccccaacggcctccactgcactgtcactggctggggtcatgtggccccctcagtgagcctcctgacgcccaagccactgcagcaactcgaggtgcctctgatcagtcgtgagacgtgtaactgcctgtacaacatcgacgccaagcctgaggagccgcactttgtccaagaggacatggtgtgtgctggctatgtggaggggggcaaggacgcctgccagggtgactctgggggcccactctcctgccctgtggagggtctctggtacctgacgggcattgtgagctggggagatgcctgtggggcccgcaacaggcctggtgtgtacactctggcctccagctatgcctcctggatccaaagcaaggtgacagaactccagcctcgtgtggtgccccaaacccaggagtcccagcccgacagcaacctctgtggcagccacctggccttcagctctgccccagcccagggcttgctgaggcccatccttttcctgcctctgggcctggctctgggcctcctctccccatggctcagcgagcactgagctggccctacttccaggatggatgcatcacactcaaggacaggagcctggtccttccctgatggcctttggacccagggcctgacttgagccactccttccttcaggactctgcgggaggctggggccccatcttgatctttgagcccattcttctgggtgtgctttttgggaccatcactgagagtcaggagttttactgcctgtagcaatggccagagcctctggcccctcacccaccatggaccagcccattggccgagctcctggggagctcctgggacccttggctatgaaaatgagccctggctcccacctgtttctggaagactgctcccggcccgcctgcccagactgatgagcacatctctctgccctctccctgtgttctgggctggggccacctttgtgcagcttcgaggacaggaaaggccccaatcttgcccactggccgctgagcgcccccgagccctgactcctggactccggaggactgagcccccaccggaactgggctggcgcttggatctggggtgggagtaacagggcagaaatgattaaaatgtttgagcacaa

SEQ ID NO: 170098 - DNA, 729 bp, Homo sapiens
  Payload ID: 13503
  Gene Symbol: PRSS8
  Gene Name: protease, serine, 8
  ENST ID: ENST00000567531
  CDS Start-End: 143-729
cttggacacttgctgcccctttccagcccggattctgggatccttccctctgagccaacatctgggtcctgccttcgacaccaccccaaggcttcctaccttgcgtgcctggagtctgccccaggggcccttgtcctgggccatggcccagaagggggtcctggggcctgggcagctgggggctgtggccattctgctctatcttggattactccggtcggggacaggagcggaaggggcagaagctccctgcggtgtggccccccaagcacgcatcacaggtggcagcagtgcagtcgccggtcagtggccctggcaggtcagcatcacctatgaaggcgtccatgtgtgtggtggctctctcgtgtctgagcagtgggtgctgtcagctgctcactgcttccccagctacctccaggagggctcccagggcgacattgcactcctccaactcagcagacccatcaccttctcccgctacatccggcccatctgcctccctgcagccaacgcctccttccccaacggcctccactgcactgtcactggctggggtcatgtggccccctcagtgagcctcctgacgcccaagccactgcagcaactcgaggtgcctctgatcagtcgtgagacgtgtaactgcctgtacaacatcgacgccaagcctgaggagccgcactttgtccaagaggacatggtgtgtgctggctatgtggaggggggcaagga

SEQ ID NO: 170099 - DNA, 1214 bp, Homo sapiens
  Payload ID: 13503
  Gene Symbol: PRSS8
  Gene Name: protease, serine, 8
  Uniprot ID: Q16651
  ENST ID: ENST00000568261
  CDS Start-End: 230-1099
agacggtgctggtgactcgtccacactgctcgcttcggatactccaggcgtctcccgttgcggccgctccctgccttagaggccagccttggacacttgctgcccctttccagcccggattctgggatccttccctctgagccaacatctgggtcctgccttcgacaccaccccaaggcttcctaccttgcgtgcctggagtctgccccaggggcccttgtcctgggccatggcccagaagggggtcctggggcctgggcagctgggggctgtggccattctgctctatcttggattactccggtcggggacaggagcggaaggggcagaagctccctgcggtgtggccccccaagcacgcatcacaggtggcagcagtgcagtcgccggtcagtggccctggcaggtcagcaccctgaaggacatcatcccccaccccagctacctccaggagggctcccagggcgacattgcactcctccaactcagcagacccatcaccttctcccgctacatccggcccatctgcctccctgcagccaacgcctccttccccaacggcctccactgcactgtcactggctggggtcatgtggccccctcagtgagcctcctgacgcccaagccactgcagcaactcgaggtgcctctgatcagtcgtgagacgtgtaactgcctgtacaacatcgacgccaagcctgaggagccgcactttgtccaagaggacatggtgtgtgctggctatgtggaggggggcaaggacgcctgccagggtgactctgggggcccactctcctgccctgtggagggtctctggtacctgacgggcattgtgagctggggagatgcctgtggggcccgcaacaggcctggtgtgtacactctggcctccagctatgcctcctggatccaaagcaaggtgacagaactccagcctcgtgtggtgccccaaacccaggagtcccagcccgacagcaacctctgtggcagccacctggccttcagctctgccccagcccagggcttgctgaggcccatccttttcctgcctctgggcctggctctgggcctcctctccccatggctcagcgagcactgagctggccctacttccaggatggatgcatcacactcaaggacaggagcctggtccttccctgatggcctttggacccagggcctgacttgagccactccttccttcaggactctgc

SEQ ID NO: 170100 - DNA, 552 bp, Homo sapiens
  Payload ID: 13503
  Gene Symbol: PRSS8
  Gene Name: protease, serine, 8
  ENST ID: ENST00000567797
  CDS Start-End: 230-552
agacggtgctggtgactcgtccacactgctcgcttcggatactccaggcgtctcccgttgcggccgctccctgccttagaggccagccttggacacttgctgcccctttccagcccggattctgggatccttccctctgagccaacatctgggtcctgccttcgacaccaccccaaggcttcctaccttgcgtgcctggagtctgccccaggggcccttgtcctgggccatggcccagaagggggtcctggggcctgggcagctgggggctgtggccattctgctctatcttggattactccggtcggggacagctccctgcggtgtggccccccaagcacgcatcacaggtggcagcagtgcagtcgccggtcagtggccctggcaggtcagcatcacctatgaaggcgtccatgtgtgtggtggctctctcgtgtctgagcagtgggtgctgtcagctgctcactgcttccccagcgagcaccacaaggaagcctatgaggtcaagctgggggcccaccagctagactcctactccgaggacgccaaggt

SEQ ID NO: 170101 - DNA, 1083 bp, Homo sapiens
  Payload ID: 13504
  Gene Symbol: PRADC1
  Gene Name: protease-associated domain containing 1
  Uniprot ID: Q9BSG0
  ENST ID: ENST00000258083
  CDS Start-End: 69-635
gtcctgcgagcgacgcgcggcggggcggcgagaggaaacgcggcgccgggccgggcccggccctggagatggtccccggcgccgcgggctggtgttgtctcgtgctctggctccccgcgtgcgtcgcggcccacggcttccgtatccatgattatttgtactttcaagtgctgagtcctggggacattcgatacatcttcacagccacacctgccaaggactttggtggtatctttcacacaaggtatgagcagattcaccttgtccccgctgaacctccagaggcctgcggggaactcagcaacggtttcttcatccaggaccagattgctctggtggagagggggggctgctccttcctctccaagactcgggtggtccaggagcacggcgggcgggcggtgatcatctctgacaacgcagttgacaatgacagcttctacgtggagatgatccaggacagtacccagcgcacagctgacatccccgccctcttcctgctcggccgagacggctacatgatccgccgctctctggaacagcatgggctgccatgggccatcatttccatcccagtcaatgtcaccagcatccccacctttgagctgctgcaaccgccctggaccttctggtagaagagtttgtcccacattccagccataagtgactctgagctgggaaggggaaacccaggaattttgctacttggaatttggagatagcatctggggacaagtggagccaggtagaggaaaagggtttgggcgttgctaggctgaaagggaagccacaccactggccttcccttccccagggcccccaagggtgtctcatgctacaagaagaggcaagagacaggccccagggcttctggctagaacccgaaacaaaaggagctgaaggcaggtggcctgagagccatctgtgacctgtcacactcacctggctccagcctcccctacccagggtctctgcacagtgaccttcacagcagttgttggagtggtttaaagagctggtgtttggggactcaataaaccctcactgactttttagcaataaagcttctcatcagggttgcaa

SEQ ID NO: 170102 - DNA, 4994 bp, Homo sapiens
  Payload ID: 13505
  Gene Symbol: PAAF1
  Gene Name: proteasomal ATPase-associated factor 1
  Uniprot ID: Q9BRP4
  ENST ID: ENST00000310571
  CDS Start-End: 54-1232
gactcacttccgggaaggggcggaagaggtgggctggtggaggcggggtcgagatggcggcgcctttgaggattcagagcgactgggcgcaagccctcaggaaggatgaaggggaggcctggctgagctgtcatcccccagggaaaccatctttgtatggcagcctgacttgtcaaggaattggcctagatggcatcccagaggttacagcttcagaaggatttactgtgaatgaaataaacaagaaaagcattcatatttcatgtccaaaggaaaatgcatcttctaagtttttggcaccatatactactttttccagaattcatacaaagagtataacatgcctggacatttccagcagaggaggtcttggtgtgtcttctagtactgacgggaccatgaaaatctggcaggcttccaatggagaactcaggagagtattggaaggacatgtgtttgatgtgaattgttgcaggtttttcccatcaggccttgtggtcctgagtgggggaatggatgcccagctgaagatatggtcagctgaagatgctagctgcgtggtgaccttcaaaggtcacaaaggaggtatcctggatacagccatcgttgatcgggggaggaatgtggtgtctgcttctcgagatgggacagcacgactttgggattgtgggcgctcagcctgcttgggagtccttgcagattgtggttcttctatcaatggagtggcggtgggtgctgctgacaactccataaaccttggctcccctgagcagatgcccagtgaacgggaggttggaacagaggccaaaatgctgctcttggcccgggaagataagaaacttcagtgcttgggactacagagcaggcagctggtgttcctctttattggctcagacgctttcaactgctgtacttttctctctggcttcttgctattggctgggactcaagatggaaacatttatcagctggatgtgaggagtccaagggctccggtacaagtcatccacagatcaggagcaccagttctatccctgctaagtgtcagagatggattcattgctagccaaggtgatggaagctgttttattgtccagcaagacttagactatgtcactgagctcactggggctgactgtgaccctgtgtacaaggtagccacatgggagaagcagatctacacatgctgtcgagacggtcttgtacgacgctaccagctttctgacctctgacttcttggaaagagcagtcccggttagtgaaaaggtttgaccctgatcaacaatgagcagaaacatcatcagtccttcccaaggaccatggcgtttaatgtcttgggcaccccttggaaatcacagaaagtcagctgtactggccgtgtggaactctcatcccaagacctactttgaactgagtaagaaggtcattgtgcccactgcatttgttccaacttctccttgtataaactcaccccagcaacacagggcaaggatatagatgcttttagtttgttcttaaaccagttttgttaaatgtttacaaggacctcagtactaaagcctgttctctggaggaaataaagaaaatatgtttggaggtgcctgaatatgaagaactttgttaaatactcttactccagcaaaaagttggtcaggacgatggaattccttcctcagcactccctgttgcctggccatagagaaggcctgcttggcagtagcaataaatgtcctgtaagctgccacctgggagagattcttatgcaggtggtaaccaactgtcccagtttgcttggaactaaggggttttctgtgacttgaaactttcaatgccaaaactggggcagtctcaaaccaacatgattggtcagcctatatgtaggtgaggaaactgaatcataagcattgtaaaggcattggctgtcaaagtgtggttcttagaacagcagcatcagtatcacctgggaacttgacaggaaatagaaattgttaggcccaatcctagacctaaatcagaaattctacgggtgcagccagcagtctgtattttaacaagcattccaggtgattctgatgtatgctaaagcttgagagccactgatctagaggaagagatggtggagggcactttagtcacagctggaacccagggctcaaaatgacaagatcggtctgtaggagatgaggccacagaggttggcagagcccaaatagtgaaggagcacgaatgttagctaaggagctcagactttacgtggttggcagtggggaaccactgaagggttttaagcaagagaatggcatggtcacctccttttttctctaaacataaaaatggaatcataatgtatgtattccatggcttattttcacttaatgtctctgagattttccatctcagtacatgtagacgttcctcattcttttttaacaatgtccagaatatggataccatattatttatatttttgagattattagagaaaagtttcttgaaagatgtaacacttgagctgggacatgcagattaagatttttatttatttaacggaggaaggtcatttctggctggggtaataatgttgttgacagagttcttttttttgttttttttgagacggagtctcgctctgtcacccagactggtgcgatcttggctcactgcaacctccacctctcaggttcaaacgattctcctgcctcagcctccctagtagctgggactgcaggcatgcaccaccatgcccggctaatattttttttgtatttttattagagatggggtttcaccatgttggccaggctggtctcgaactcctgaccttgtgatccacctgccttggcctcccaaagtgctgggattacaggtgtgagccaccgtacccggccggccaccagagtttttaaaggcgtattctcatgtaaattttttttttttaaagacagggtcttgctctgttgcccaggctggaatgcgttggcatgattacagcttctgccttaacctcctgggctcaagcaatcctcccacttcagcctcccaagtagctgaaaccatgggtgcacaccaccacactcggctaattttttaaattttttgtagagacagagtctcaccatgttgcccaggctggtctcaaactcctgaactcaagtattcctcccaccttggcctctcatagtgctggcattacaggcatgagccacggcactcaaccaggaactttgtcttaactttaaatcccatttttttctacaacaccctgttacttaaaccaaagtgtaaaaagaaaatactgcaattcatttaatatctactctgttctagatactatatttatatatctaattcttacaagactcaaaaagcgaatgttattatttgttttattccgataaggaaactgagactcaatacattaaataccagaggcttcatttggaccttggacagcaccttctgctgcactgtgtaatcacaggcaggtagcaagagacttttgtgactagagcaatttcatttcaaggtgcagtttgtgacagggtcaggtagaccagaatggacatattccagaacttagaaacattaaatcctaggagctccaggtggaacatctaagaagtcagattaagaaaacaggatgaggctgggcatggtggctcacgcctataatcccagcactttgggaggccaagacgggtggatcacctgaggtcaggagttcgagaccagcctgaccaacatggagaaaccccgtctctactaaaaatacagaattagccgggcatgatggcgcatgtctgtaatcccagctacttgggaggctgaggcaggagaatcacttgatcccgggaggcagaggttgtggtgggctgagattgcgccattgcgctccagcctgggcaacaagagtgaaactccgtctcaaaaaaaaaaaaaaagaaaacaggatgaaatgggccgggcgcagtggctcacgcctgtaatcccagcactttgggaggccgaggcgggcggatcacaaggtaaggagattgagaccatcctggctaacacagtgaaaccctgtctacaaaaaatacaaaaaaatttagccaggcatggtggcaggcacctatagtcccagctacttgggaggctgaggcaggagaatggtgtgaacctggcaggcagagcttgcagtaagctgagatcgggccacagcactccagcctgggcgacagagcgaggctctatctcaagaaaaaaaaaaagaaaaaaagaaaacaggaagaaatgttgtcatttatttgtagaatctgaaacatttgaactcatagaagcagtgagtggaagaaccagcgtggtggctcacgcctgtaatcccagcactttgggaggctggggtgggtggatcgctggagcccaggaattggagaccagcctgcacaacatgaggaaactctgtctctactaaaaatacaaaacttagccaggtgtggtggtgggcacctgtaataccagctactaaggagactgaggcaggagaattgcttgaacccaggaggtggagggtgtagtgagctgagattgcaccactgcactccagcttgggcaacagagcgagactctctctcaaaaaagaaaaaaaaaatatgtatatatatatgtatatatatatatttatatatgtagaagcagtgagtagaatggtggttacagagactcggggaggaggaatggggaaatgatggtcatagggtgcaaagtctcaggaggaatatattgtgttttgagatctattgcatagcatggtagattgctaagagtaaatttcaaatgttctcaacccaaaaaatgttaagcatttgaggtgatggatatgttaactggcttcatttaattattccatattgtatttataagtcacaataggactttgtggcccataattataaacaagtataaattgtccatttacaattaaaaatcaattaaaagaaaagaggataagg

SEQ ID NO: 170103 - DNA, 1500 bp, Homo sapiens
  Payload ID: 13505
  Gene Symbol: PAAF1
  Gene Name: proteasomal ATPase-associated factor 1
  Uniprot ID: Q9BRP4
  ENST ID: ENST00000376384
  CDS Start-End: 1-1128
atgctggtgccatgcttcttgtacagtctgcagaaccggaaaccatctttgtatggcagcctgacttgtcaaggaattggcctagatggcatcccagaggttacagcttcagaaggatttactgtgaatgaaataaacaagaaaagcattcatatttcatgtccaaaggaaaatgcatcttctaagtttttggcaccatatactactttttccagaattcatacaaagagtataacatgcctggacatttccagcagaggaggtcttggtgtgtcttctagtactgacgggaccatgaaaatctggcaggcttccaatggagaactcaggagagtattggaaggacatgtgtttgatgtgaattgttgcaggtttttcccatcaggccttgtggtcctgagtgggggaatggatgcccagctgaagatatggtcagctgaagatgctagctgcgtggtgaccttcaaaggtcacaaaggaggtatcctggatacagccatcgttgatcgggggaggaatgtggtgtctgcttctcgagatgggacagcacgactttgggattgtgggcgctcagcctgcttgggagtccttgcagattgtggttcttctatcaatggagtggcggtgggtgctgctgacaactccataaaccttggctcccctgagcagatgcccagtgaacgggaggttggaacagaggccaaaatgctgctcttggcccgggaagataagaaacttcagtgcttgggactacagagcaggcagctggtgttcctctttattggctcagacgctttcaactgctgtacttttctctctggcttcttgctattggctgggactcaagatggaaacatttatcagctggatgtgaggagtccaagggctccggtacaagtcatccacagatcaggagcaccagttctatccctgctaagtgtcagagatggattcattgctagccaaggtgatggaagctgttttattgtccagcaagacttagactatgtcactgagctcactggggctgactgtgaccctgtgtacaaggtagccacatgggagaagcagatctacacatgctgtcgagacggtcttgtacgacgctaccagctttctgacctctgacttcttggaaagagcagtcccggttagtgaaaaggtttgaccctgatcaacaatgagcagaaacatcatcagtccttcccaaggaccatggcgtttaatgtcttgggcaccccttggaaatcacagaaagtcagctgtactggccgtgtggaactctcatcccaagacctactttgaactgagtaagaaggtcattgtgcccactgcatttgttccaacttctccttgtataaactcaccccagcaacacagggcaaggatatagatgcttttagtttgttcttaaaccagttttgttaaatgtttacaaggacctcagtactaaagcctgttctctggaggaaataaagaaaatatgtttggaggtgcctg

SEQ ID NO: 170104 - DNA, 1802 bp, Homo sapiens
  Payload ID: 13505
  Gene Symbol: PAAF1
  Gene Name: proteasomal ATPase-associated factor 1
  ENST ID: ENST00000544909
  CDS Start-End: 258-1439
gtgtgattttggacaaataacttagttctctgagtctcagtttcctcatcaataaagctgagatcctattctacctcctagaatggttaatggggaatgagactgcatgtggatgaatctataaaatactacagaagttagttttggttcttttaccataacaatcctgtgggattggcattttaaatttccattttgcagataagcaaaccaactcagagaggttaattaatctcaaataatcaaagacagactgtatgctggaattgaaacccagttctgttgattccaagtttagcactaccatgcaagcctacgtttttcccaggtgttttggcacagcctgggtgctgacttctttcttcccttcatactcagacctggatacagtctttatcacttcaaacatgattgctaatttttgctgtgaacctgctgagtgggttcagacaaaaagcattcatatttcatgtccaaaggaaaatgcatcttctaagtttttggcaccatatactactttttccagaattcatacaaagagtataacatgcctggacatttccagcagaggaggtcttggtgtgtcttctagtactgacgggaccatgaaaatctggcaggcttccaatggagaactcaggagagtattggaaggacatgtgtttgatgtgaattgttgcaggtttttcccatcaggccttgtggtcctgagtgggggaatggatgcccagctgaagatatggtcagctgaagatgctagctgcgtggtgaccttcaaaggtcacaaaggaggtatcctggatacagccatcgttgatcgggggaggaatgtggtgtctgcttctcgagatgggacagcacgactttgggattgtgggcgctcagcctgcttgggagtccttgcagattgtggttcttctatcaatggagtggcggtgggtgctgctgacaactccataaaccttggctcccctgagcagatgcccagtgaacgggaggttggaacagaggccaaaatgctgctcttggcccgggaagataagaaacttcagtgcttgggactacagagcaggcagctggtgttcctctttattggctcagacgctttcaactgctgtacttttctctctggcttcttgctattggctgggactcaagatggaaacatttatcagctggatgtgaggagtccaagggctccggtacaagtcatccacagatcaggagcaccagttctatccctgctaagtgtcagagatggattcattgctagccaaggtgatggaagctgttttattgtccagcaagacttagactatgtcactgagctcactggggctgactgtgaccctgtgtacaaggtagccacatgggagaagcagatctacacatgctgtcgagacggtcttgtacgacgctaccagctttctgacctctgacttcttggaaagagcagtcccggttagtgaaaaggtttgaccctgatcaacaatgagcagaaacatcatcagtccttcccaaggaccatggcgtttaatgtcttgggcaccccttggaaatcacagaaagtcagctgtactggccgtgtggaactctcatcccaagacctactttgaactgagtaagaaggtcattgtgcccactgcatttgttccaacttctccttgtataaactcaccccagcaacacagggcaaggatatagatgcttttagtttgttcttaaaccagttttgttaaatgtttacaaggacctcagtactaaagcctgttctctggaggaaataaagaaaatatgtttgg

SEQ ID NO: 170105 - DNA, 1639 bp, Homo sapiens
  Payload ID: 13505
  Gene Symbol: PAAF1
  Gene Name: proteasomal ATPase-associated factor 1
  Uniprot ID: Q9BRP4
  ENST ID: ENST00000536003
  CDS Start-End: 146-1273
gtgggctggtggaggcggggtcgagatggcggcgcctttgaggattcagagcgactgggcgcaagccctcaggaaggatgaaggggaggcctggctgagctgtcatcccccagtggaagcagcctgaggctctcatcagaagcagatgctggtgccatgcttcttgtacagtctgcagaaccggaaaccatctttgtatggcagcctgacttgtcaaggaattggcctagatggcatcccagaggttacagcttcagaaggatttactgtgaatgaaataaacaagaaaagcattcatatttcatgtccaaaggaaaatgcatcttctaagtttttggcaccatatactactttttccagaattcatacaaagagtataacatgcctggacatttccagcagaggaggtcttggtgtgtcttctagtactgacgggaccatgaaaatctggcaggcttccaatggagaactcaggagagtattggaaggacatgtgtttgatgtgaattgttgcaggtttttcccatcaggccttgtggtcctgagtgggggaatggatgcccagctgaagatatggtcagctgaagatgctagctgcgtggtgaccttcaaaggtcacaaaggaggtatcctggatacagccatcgttgatcgggggaggaatgtggtgtctgcttctcgagatgggacagcacgactttgggattgtgggcgctcagcctgcttgggagtccttgcagattgtggttcttctatcaatggagtggcggtgggtgctgctgacaactccataaaccttggctcccctgagcagatgcccagtgaacgggaggttggaacagaggccaaaatgctgctcttggcccgggaagataagaaacttcagtgcttgggactacagagcaggcagctggtgttcctctttattggctcagacgctttcaactgctgtacttttctctctggcttcttgctattggctgggactcaagatggaaacatttatcagctggatgtgaggagtccaagggctccggtacaagtcatccacagatcaggagcaccagttctatccctgctaagtgtcagagatggattcattgctagccaaggtgatggaagctgttttattgtccagcaagacttagactatgtcactgagctcactggggctgactgtgaccctgtgtacaaggtagccacatgggagaagcagatctacacatgctgtcgagacggtcttgtacgacgctaccagctttctgacctctgacttcttggaaagagcagtcccggttagtgaaaaggtttgaccctgatcaacaatgagcagaaacatcatcagtccttcccaaggaccatggcgtttaatgtcttgggcaccccttggaaatcacagaaagtcagctgtactggccgtgtggaactctcatcccaagacctactttgaactgagtaagaaggtcattgtgcccactgcatttgttccaacttctccttgtataaactcaccccagcaacacagggcaaggatatagatgcttttagtttgttcttaaaccagttttgttaaatgtttacaaggacctcagtactaaagcctgttctctggaggaaataaagaaaatatgtttggagg

SEQ ID NO: 170106 - DNA, 1695 bp, Homo sapiens
  Payload ID: 13505
  Gene Symbol: PAAF1
  Gene Name: proteasomal ATPase-associated factor 1
  Uniprot ID: Q9BRP4
  ENST ID: ENST00000535604
  CDS Start-End: 611-1444
aggtgggctggtggaggcggggtcgagatggcggcgcctttgaggattcagagcgactgggcgcaagccctcaggtgaatccaggcccagaacagagtcagaggaggcgggtagtggatgttgctttgcgtcaaggagagccatgcctggtccaggatatcaataggggttacttcgtcaattgtcgagggatatggagggaacagggtccggaaaaagaagtatcaaacccgtatggtcattctctgaaaagctatccctaggccaagggagcacatgagctgtgtgatccccgcgtcagaactagtatcagaaggatgaaggggaggcctggctgagctgtcatcccccagggaaaccatctttgtatggcagcctgacttgtcaaggaattggcctagatggcatcccagaggttacagcttcagaaggatttactgtgaatgaaataaacaagaaaagcattcatatttcatgtccaaaggaaaatgcatcttctaagtttttggcaccatatactactttttccagaattcatacaaagagtataacatgcctggacatttccagcagaggaggtcttggtgtgtcttctagtactgacgggaccatgaaaatctggcaggcttccaatggagaactcaggagagtattggaaggacatgtgtttgatgtgaattgttgcaggtttttcccatcaggccttgtggtcctgagtgggggaatggatgcccagctgaagatatggtcagctgaagatgctagctgcgtggtgaccttcaaaggtcacaaaggaggtatcctggatacagccatcgttgatcgggggaggaatgtggtgtctgcttctcgagatgggacagcacgactttgggattgtgggcgctcagcctgcttgggagtccttgcagattgtggttcttctatcaatggagtggcggtgggtgctgctgacaactccataaaccttggctcccctgagcagatgcccagtgaacgggaggttggaacagaggccaaaatgctgctcttggcccgggaagataagaaacttcagtgcttgggactacagagcaggcagctggtgttcctctttattggctcagacgctttcaactgctgtacttttctctctggcttcttgctattggctgggactcaagatggaaacatttatcagctggatgtgaggagtccaagggctccggtacaagtcatccacagatcaggagcaccagttctatccctgctaagtgtcagagatggattcattgctagccaaggtgatggaagctgttttattgtccagcaagacttagactatgtcactgagctcactggggctgactgtgaccctgtgtacaaggtagccacatgggagaagcagatctacacatgctgtcgagacggtcttgtacgacgctaccagctttctgacctctgacttcttggaaagagcagtcccggttagtgaaaaggtttgaccctgatcaacaatgagcagaaacatcatcagtccttcccaaggaccatggcgtttaatgtcttgggcaccccttggaaatcacagaaagtcagctgtactggccgtgtggaactctcatcccaagacctactttgaactgagtaagaaggtcattgtgcccactgcatttgttccaacttctccttgtataaactcaccccagcaacaca

SEQ ID NO: 170107 - DNA, 882 bp, Homo sapiens
  Payload ID: 13505
  Gene Symbol: PAAF1
  Gene Name: proteasomal ATPase-associated factor 1
  ENST ID: ENST00000543814
  CDS Start-End: 142-882
aagaggtgggctggtggaggcggggtcgagatggcggcgcctttgaggattcagagcgactgggcgcaagccctcaggaaggatgaaggggaggcctggctgagctgtcatcccccagcctgaggctctcatcagaagcagatgctggtgccatgcttcttgtacagtctgcagaaccggaaaccatctttgtatggcagcctgacttgtcaaggaattggcctagatggcatcccagaggttacagcttcagaaggatttactgtgaatgaaataaacaagaaaagcattcatatttcatgtccaaaggaaaatgcatcttctaagtttttggcaccatatactactttttccagaattcatacaaagagtataacatgcctggacatttccagcagaggaggtcttggtgtgtcttctagtactgacgggaccatgaaaatctggcaggcttccaatggagaactcaggagagtattggaaggacatgtgtttgatgtgaattgttgcaggtttttcccatcaggccttgtggtcctgagtgggggaatggatgcccagctgaagatatggtcagctgaagatgctagctgcgtggtgaccttcaaaggtcacaaaggaggtatcctggatacagccatcgttgatcgggggaggaatgtggtgtctgcttctcgagatgggacagcacgactttgggattgtgggcgctcagcctgcttgggagtccttgcagattgtggttcttctatcaatggagtggcggtgggtgctgctgacaactccataaaccttggctcccctgagcagatgcccagtgaacgggaggttggaacagaggccaaaatgctgctcttggcccgggaagataagaaacttcag

SEQ ID NO: 170108 - DNA, 667 bp, Homo sapiens
  Payload ID: 13505
  Gene Symbol: PAAF1
  Gene Name: proteasomal ATPase-associated factor 1
  ENST ID: ENST00000542293
  CDS Start-End: 367-667
gtgggctggtggaggcggggtcgagatggcggcgcctttgaggattcagagcgactgggcgcaagccctcaggatgaaggggaggcctggctgagctgtcatcccccagggaaaccatctttgtatggcagcctgacttgtcaaggaattggcctagatggcatcccagaggttacagcttcagaaggatttactgtgaatgaaataaacaagaaaagcattcatatttcatgtccaaaggaaaatgcatcttctaagtttttggcaccatatactactttttccagaattcatacaaagagtataacatgcctggacatttccagcagaggaggtcttggtgtgtcttctagtactgacgggaccatgaaaatctggcaggcttccaatggagaactcaggagagtattggaaggacatgtgtttgatgtgaattgttgcaggtttttcccatcaggccttgtggtcctgagtgggggaatggatgcccagctgaagatatggtcagctgaagatgctagctgcgtggtgaccttcaaaggtcacaaaggaggtatcctggatacagccatcgttgatcgggggaggaatgtggtgtctgcttctcgagatgggacagcacgactttgggattgtgggcgctcagcctgcttgggagtccttgcag

SEQ ID NO: 170109 - DNA, 975 bp, Homo sapiens
  Payload ID: 13505
  Gene Symbol: PAAF1
  Gene Name: proteasomal ATPase-associated factor 1
  ENST ID: ENST00000504441
  CDS Start-End: 265-975
gggaaggggcggaagaggtgggctggtggaggcggggtcgagatggcggcgcctttgaggattcagagcgactgggcgcaagccctcaggaaggatgaaggggaggcctggctgagctgtcatcccccagctgattgttaaaaagatcctggcatctcccttctctctcttacttcctctctcaccatgtgatctctgcatacactggctccccttctccttctgccatgagtggaagcagcctgaggctctcatcagaagcagatgctggtgccatgcttcttgtacagtctgcagaaccggaaaccatctttgtatggcagcctgacttgtcaaggaattggcctagatggcatcccagaggttacagcttcagaaggatttactgtgaatgaaataaacaagaaaagcattcatatttcatgtccaaaggaaaatgcatcttctaagtttttggcaccatatactactttttccagaattcatacaaagagtataacatgcctggacatttccagcagaggaggtcttggtgtgtcttctagtactgacgggaccatgaaaatctggcaggcttccaatggagaactcaggagagtattggaaggacatgtgtttgatgtgaattgttgcaggtttttcccatcaggccttgtggtcctgagtgggggaatggatgcccagctgaagatatggtcagctgaagatgctagctgcgtggtgaccttcaaaggtcacaaaggaggtatcctggatacagccatcgttgatcgggggaggaatgtggtgtctgcttctcgagatgggacagcacgactttgggattgtgggcgctcagcctgcttgggagtccttgcagattgtggttcttctatcaatggagtggcggtgggtgctgctgacaactccataaaccttggctcccctgagcagatgcccagtgaacgggaggttggaacagaggccaaaatgctg

SEQ ID NO: 170110 - DNA, 805 bp, Homo sapiens
  Payload ID: 13505
  Gene Symbol: PAAF1
  Gene Name: proteasomal ATPase-associated factor 1
  ENST ID: ENST00000546039
  CDS Start-End: 323-805
aggaaggatgaaggggaggcctggctgagctgtcatcccccagggaaaccatctttgtatggcagcctgacttgtcaaggaattggcctagatggcatcccagaggttacagcttcagaaggatttactgtgaatgaaataaacaagaaaagcattcatatttcatgtccaaaggaaaatgcatcttctaagtttttggcaccatatactactttttccagaattcatacaaagagtataacatgcctggacatttccagcagaggaggtcttggtgtgtcttctagtactgacgggaccatgaaaatctggcaggcttccaatggagaactcagggtttttcccatcaggccttgtggtcctgagtgggggaatggatgcccagctgaagatatggtcagctgaagatgctagctgcgtggtgaccttcaaaggtcacaaaggaggtatcctggatacagccatcgttgatcgggggaggaatgtggtgtctgcttctcgagatgggacagcacgactttgggattgtgggcgctcagcctgcttgggagtccttgcagattgtggttcttctatcaatggagtggcggtgggtgctgctgacaactccataaaccttggctcccctgagcagatgcccagtgaacgggaggttggaacagaggccaaaatgctgctcttggcccgggaagataagaaacttcagtgcttgggactacagagcaggcagctggtgttcctctttattggctcagacgctttcaactgctgtacttttctctctggcttcttgctattggctggg

SEQ ID NO: 170111 - DNA, 1383 bp, Homo sapiens
  Payload ID: 13505
  Gene Symbol: PAAF1
  Gene Name: proteasomal ATPase-associated factor 1
  Uniprot ID: Q9BRP4
  ENST ID: ENST00000541951
  CDS Start-End: 342-1175
gatcgcagccccgttgtgcccgcaacgcctcctgaagaacgcggaaggatgaaggggaggcctggctgagctgtcatcccccagggaaaccatctttgtatggcagcctgacttgtcaaggaattggcctagatggcatcccagaggttacagcttcagaaggatttactgtgaatgaaataaacaagaaaagcattcatatttcatgtccaaaggaaaatgcatcttctaagtttttggcaccatatactactttttccagaattcatacaaagagtataacatgcctggacatttccagcagaggaggtcttggtgtgtcttctagtactgacgggaccatgaaaatctggcaggcttccaatggagaactcaggagagtattggaaggacatgtgtttgatgtgaattgttgcaggtttttcccatcaggccttgtggtcctgagtgggggaatggatgcccagctgaagatatggtcagctgaagatgctagctgcgtggtgaccttcaaaggtcacaaaggaggtatcctggatacagccatcgttgatcgggggaggaatgtggtgtctgcttctcgagatgggacagcacgactttgggattgtgggcgctcagcctgcttgggagtccttgcagattgtggttcttctatcaatggagtggcggtgggtgctgctgacaactccataaaccttggctcccctgagcagatgcccagtgaacgggaggttggaacagaggccaaaatgctgctcttggcccgggaagataagaaacttcagtgcttgggactacagagcaggcagctggtgttcctctttattggctcagacgctttcaactgctgtacttttctctctggcttcttgctattggctgggactcaagatggaaacatttatcagctggatgtgaggagtccaagggctccggtacaagtcatccacagatcaggagcaccagttctatccctgctaagtgtcagagatggattcattgctagccaaggtgatggaagctgttttattgtccagcaagacttagactatgtcactgagctcactggggctgactgtgaccctgtgtacaaggtagccacatgggagaagcagatctacacatgctgtcgagacggtcttgtacgacgctaccagctttctgacctctgacttcttggaaagagcagtcccggttagtgaaaaggtttgaccctgatcaacaatgagcagaaacatcatcagtccttcccaaggaccatggcgtttaatgtcttgggcaccccttggaaatcacagaaagtcagctgtactggccgtgtggaactctcatcccaagacctactttgaactgagtaagaaggtcattgtgcccactgca

SEQ ID NO: 170112 - DNA, 1612 bp, Homo sapiens
  Payload ID: 13505
  Gene Symbol: PAAF1
  Gene Name: proteasomal ATPase-associated factor 1
  Uniprot ID: Q9BRP4
  ENST ID: ENST00000544552
  CDS Start-End: 102-1229
gcgcctttgaggattcagagcgactgggcgcaagccctcaggatgaaggggaggcctggctgagctgtcatcccccagcctgaggctctcatcagaagcagatgctggtgccatgcttcttgtacagtctgcagaaccggaaaccatctttgtatggcagcctgacttgtcaaggaattggcctagatggcatcccagaggttacagcttcagaaggatttactgtgaatgaaataaacaagaaaagcattcatatttcatgtccaaaggaaaatgcatcttctaagtttttggcaccatatactactttttccagaattcatacaaagagtataacatgcctggacatttccagcagaggaggtcttggtgtgtcttctagtactgacgggaccatgaaaatctggcaggcttccaatggagaactcaggagagtattggaaggacatgtgtttgatgtgaattgttgcaggtttttcccatcaggccttgtggtcctgagtgggggaatggatgcccagctgaagatatggtcagctgaagatgctagctgcgtggtgaccttcaaaggtcacaaaggaggtatcctggatacagccatcgttgatcgggggaggaatgtggtgtctgcttctcgagatgggacagcacgactttgggattgtgggcgctcagcctgcttgggagtccttgcagattgtggttcttctatcaatggagtggcggtgggtgctgctgacaactccataaaccttggctcccctgagcagatgcccagtgaacgggaggttggaacagaggccaaaatgctgctcttggcccgggaagataagaaacttcagtgcttgggactacagagcaggcagctggtgttcctctttattggctcagacgctttcaactgctgtacttttctctctggcttcttgctattggctgggactcaagatggaaacatttatcagctggatgtgaggagtccaagggctccggtacaagtcatccacagatcaggagcaccagttctatccctgctaagtgtcagagatggattcattgctagccaaggtgatggaagctgttttattgtccagcaagacttagactatgtcactgagctcactggggctgactgtgaccctgtgtacaaggtagccacatgggagaagcagatctacacatgctgtcgagacggtcttgtacgacgctaccagctttctgacctctgacttcttggaaagagcagtcccggttagtgaaaaggtttgaccctgatcaacaatgagcagaaacatcatcagtccttcccaaggaccatggcgtttaatgtcttgggcaccccttggaaatcacagaaagtcagctgtactggccgtgtggaactctcatcccaagacctactttgaactgagtaagaaggtcattgtgcccactgcatttgttccaacttctccttgtataaactcaccccagcaacacagggcaaggatatagatgcttttagtttgttcttaaaccagttttgttaaatgtttacaaggacctcagtactaaagcctgttctctggaggaaataaagaaaatatgtttggaggtgcctgaatatgaagaa

SEQ ID NO: 170113 - DNA, 349 bp, Homo sapiens
  Payload ID: 13505
  Gene Symbol: PAAF1
  Gene Name: proteasomal ATPase-associated factor 1
  ENST ID: ENST00000540659
  CDS Start-End: 1-349
atggtcagctgaagatgctagctgcgtggtgaccttcaaaggtcacaaaggaggtatcctggatacagccatcgttgatcgggggaggaatgtggtgtctgcttctcgagatgggacagcacgactttgggattgtgggcgctcagcctgcttgggagtccttgcagattgtggttcttctatcaatggagtggcggtgggtgctgctgacaactccataaaccttggctcccctgagcagatgcccagtgttcctctttattggctcagacgctttcaactgctgtacttttctctctggcttcttgctattggctgggactcaagatggaaacatttatcagctgga

SEQ ID NO: 170114 - DNA, 582 bp, Homo sapiens
  Payload ID: 13505
  Gene Symbol: PAAF1
  Gene Name: proteasomal ATPase-associated factor 1
  ENST ID: ENST00000536582
  CDS Start-End: 132-582
acttcacctgacttttaacacaggcacctgtttttctttcgtgggccaatttcatgggtatactatttatacagatgcctgaattgggtcttcaaagagaaaaataataaatttttcttattttttgagacatgcttcttttgtaccatatagggaaaccatctttgtatggcagcctgacttgtcaaggaattggcctagatggcatcccagaggttacagcttcagaaggatttactgtgaatgaaataaacaagaaaagcattcatatttcatgtccaaaggaaaatgcatcttctaagtttttggcaccatatactactttttccagaattcatacaaagagtataacatgcctggacatttccagcagaggaggtcttggtgtgtcttctagtactgacgggaccatgaaaatctggcaggcttccaatggagaactcaggagagtattggaaggacatgtgtttgatgtgaattgttgcaggtttttcccatcaggccttgtggtcctgagtgggggaatggatgcccagctgaagatatggtcagctgaagatgctagctgcgtggtgaccttca

SEQ ID NO: 170115 - DNA, 2154 bp, Homo sapiens
  Payload ID: 13506
  Gene Symbol: PSMG1
  Gene Name: proteasome (prosome, macropain) assembly chaperone 1
  Uniprot ID: O95456
  ENST ID: ENST00000331573
  CDS Start-End: 467-1333
ccacctcctggcgcccgcagggctcaagctgcgaatgaaagcctttgggggccggacgcggtggctgaggcctgtaatccaagcactttgggaggtctaaggaggacgatcgctagagtcctggagttcgagaccagtctgggcaacatagcgagaccccctcccccaatctgtaatttaaaaacaaaaaagctgcggggactgctggcccagggcatgacagcgcgggcgggcggtgtagagggcgtggccgcgagctcagggtgtgcctgggagcgagccctgtgcggggcgggacgtagcgcccgcgcggtgggggtgtggccgcgagcttgggctgtgcgcggagggcgtggcctgtgcggggcgggacttattgcccgcgcggtgagggagcgtggtctcgcgcaagccggcgtgcggtcccgcggcgctgcagttgtgtccagccggtcacggggcggctatggcggccacgttcttcggagaggtggtgaaggcgccgtgccgagctgggactgaggacgaagaggaggaggaggaggggcggagggagacgcccgaggacagggaggtgcgtctgcagctggcgcggaagagggaagtgcggctccttcgaagacaaacaaaaacatctttggaagtttctttgctagaaaaatatccgtgctccaagtttataattgctataggaaataatgcagtagcatttctgtcatcatttgttatgaattcaggagtctgggaggaagttggttgtgctaaactctggaatgaatggtgtagaacaacagacactacacatctgtcctccacagaggctttttgtgtgttttatcatctaaaatccaatccctcggtttttctctgtcagtgcagttgctatgttgcagaagatcaacagtatcagtggctggaaaaggtttttggctcttgtccaaggaagaacatgcagataactattctcacatgtcgacatgttaccgattataaaacctcagaatccaccggcagccttccttctcctttcctgagagccctaaaaacacagaatttcaaagactcggcgtgttgtccattgctagaacaaccgaatatagtacacgaccttcctgcagcagttctaagctactgtcaagtatggaaaatcccagcaattctgtacttgtgttatactgatgtgatgaaattagacctaatcacagtggaagcttttaagcctatactttctaccagaagcttgaagggtttggttaagaatattccccaaagcactgagatactaaagaaattgatgacaacaaatgagattcagagtaacatttatacatgatcttaaacattgttttgtagtgtatattacttgtccattcctttaaggggagcagcctgcactcttttgtagattacttttgggggatatattttgagaatgatgaaacggaataaaattgtaaaaaattaattgtagttttaattccttatttatggtggtattattcacaaccaaaataagccaagcattttccttttatccactaggtgggagtattgttgtatttgaatattttaaggtactatagttaaatttttatcttatttatttatttatttattttttgaggctgggtcttgctctgttgcccaggctgaagtgcagtgtgctatcatggttcactgcatcctcgacctcctgggctcaagcatttcccccgcctcggcctcccaaaatgctgggattacaggtgtgagccactgtgcccaactttagttaaatttttcaaagctacagatatcagcagatggtattcatgtggcaaagtgtagttaattaggtgtaactattcattgacctgttggtgattcttaatatgtggaaagtttctggatattttaggagtcctgcagttttttttatcttgtgggtaaaaattgatgacaaagtaacaaaattatatatttactaaaaatgaaacagaaatgtgtatgtcctcactttttagtaatatctgacagatagcctcttcacccagactttcccagggctctctttcaaggctggctctgcgcgtgtcagcagttctcttacagtcatgtgttatcattaggagtgtgaatggaatcatgaacccggagtagccacacaacttcaca

SEQ ID NO: 170116 - DNA, 907 bp, Homo sapiens
  Payload ID: 13506
  Gene Symbol: PSMG1
  Gene Name: proteasome (prosome, macropain) assembly chaperone 1
  Uniprot ID: O95456
  ENST ID: ENST00000380900
  CDS Start-End: 104-907
ggggcgggacttattgcccgcgcggtgagggagcgtggtctcgcgcaagccggcgtgcggtcccgcggcgctgcagttgtgtccagccggtcacggggcggctatggcggccacgttcttcggagaggtggtgaaggcgccgtgccgagctgggactgaggacgaagaggaggaggaggaggggcggagggagacgcccgaggacagggaggtgcgtctgcagctggcgcggaagagggaagtgcggctccttcgaagacaaacaaaaacatctttggaagtttctttgctagaaaaatatccgtgctccaagtttataattgctataggaaataatgcagtagcatttctgtcatcatttgttatgaattcaggagtctgggaggaagttggttgtgctaaactctggaatgaatggtgtagaacaacagacactacacatctgtcctccacagaggctttttgtgtgttttatcatctaaaatccaatccctcggtttttggctcttgtccaaggaagaacatgcagataactattctcacatgtcgacatgttaccgattataaaacctcagaatccaccggcagccttccttctcctttcctgagagccctaaaaacacagaatttcaaagactcggcgtgttgtccattgctagaacaaccgaatatagtacacgaccttcctgcagcagttctaagctactgtcaagtatggaaaatcccagcaattctgtacttgtgttatactgatgtgatgaaattagacctaatcacagtggaagcttttaagcctatactttctaccagaagcttgaagggtttggttaagaatattccccaaagcactgagatactaaagaaattgatgacaacaaatgagattcagagtaacatttatacatga

SEQ ID NO: 170117 - DNA, 760 bp, Homo sapiens
  Payload ID: 13506
  Gene Symbol: PSMG1
  Gene Name: proteasome (prosome, macropain) assembly chaperone 1
  ENST ID: ENST00000431628
  CDS Start-End: 1-192
atggcggccacgttcttcggagaggtggtgaaggcgccgtgccgagctgggactgaggacgaagaggaggaggaggaggggcggagggagacgcccgaggacagggaggtgcgtctgcagctggcgcggaagagcatttctgtcatcatttgttatgaattcaggagtctgggaggaagttggttgtgctaaactctggaatgaatggtgtagaacaacagacactacacatctgtcctccacagaggctttttgtgtgttttatcatctaaaatccaatccctcggtttttctctgtcagtgcagttgctatgttgcagaagatcaacagtatcagtggctggaaaaggtttttggctcttgtccaaggaagaacatgcagataactattctcacatgtcgacatgttaccgattataaaacctcagaatccaccggcagccttccttctcctttcctgagagccctaaaaacacagaatttcaaagactcggcgtgttgtccattgctagaacaaccgaatatagtacacgaccttcctgcagcagttctaagctactgtcaagtatggaaaatcccagcaattctgtacttgtgttatactgatgtgatgaaattagacctaatcacagtggaagcttttaagcctatactttctaccagaagcttgaagggtttggttaagaatattccccaaagcactgagatactaaagaaattgatgacaacaaatgagattcagagtaacatttatacatga

SEQ ID NO: 170118 - DNA, 959 bp, Homo sapiens
  Payload ID: 13506
  Gene Symbol: PSMG1
  Gene Name: proteasome (prosome, macropain) assembly chaperone 1
  ENST ID: ENST00000411828
  CDS Start-End: 1-40
ggacagggaggtgcgtctgcagctggcgcggaagaggtgaggcaccgggataagggcagcgcgctcaccgcagctggaaggtgcgcgggcctggcagccgcgacggcgcctaaggccggggctccgcggtcttccgagtggcccccgcggttgccgccgctccttggctctgcttgggccctgggtctccgtgaagccgcggcgtccagcggcgccagccccagggaagtgcggctccttcgaagacaaacaaaaacatctttggaagtttctttgctagaaaaatatccgtgctccaagtttataattgctataggaaataatgcagtagcatttctgtcatcatttgttatgaattcaggagtctgggaggaagttggttgtgctaaactctggaatgaatggtgtagaacaacagacactacacatctgtcctccacagaggctttttgtgtgttttatcatctaaaatccaatccctcggtttttctctgtcagtgcagttgctatgttgcagaagatcaacagtatcagtggctggaaaaggtttttggctcttgtccaaggaagaacatgcagataactattctcacatgtcgacatgttaccgattataaaacctcagaatccaccggcagccttccttctcctttcctgagagccctaaaaacacagaatttcaaagactcggcgtgttgtccattgctagaacaaccgaatatagtacacgaccttcctgcagcagttctaagctactgtcaagtatggaaaatcccagcaattctgtacttgtgttatactgatgtgatgaaattagacctaatcacagtggaagcttttaagcctatactttctaccagaagcttgaagggtttggttaagaatattccccaaagcactgagatactaaagaaattgatgacaacaaatgagattcagagtaacatttatacatgatc

SEQ ID NO: 170119 - DNA, 1686 bp, Homo sapiens
  Payload ID: 13507
  Gene Symbol: PSMG2
  Gene Name: proteasome (prosome, macropain) assembly chaperone 2
  Uniprot ID: Q969U7
  ENST ID: ENST00000317615
  CDS Start-End: 683-1477
ggcaggagggaaaggttatgggtcggcccggcggtctctcccagcacccgcgactctcaccttgctcagctgctggtggatgagctgcttcagctcggaggctttctccggaggcagcgacatgctggcagccggcgtctccccgccgcttctccccgcctcagatgccctaactgcgcggccccggccgggccagggagcgttaggagcgactggagcacaaagcgccgcagccgttcgcctagcgcagctcccgggggacgcaacgccgcgtcaggccgggggctgacctggaaatgaggccccggcggcggcggcgccaactgttttcaaacagtggcggacaaacagggcttggggctggcccgcacgctgcctgatcgtttccgcccgccgctccacctccccgcgggccccgcaccccgagacctcagcgcaccccatcgccttgcttgccagggtctccgaaagcgctgctggcccctcttcgcggccacccggcggcctctttccgccctctgaaccggcagttagctggacgggcctcaagggcccggcgcccagggactcaaaggaccctcccgcgccccgcgaggctccggggtctcgggcttccgccttcttgctgccctcgttcttgccagggccgcggttagtccctgctggccaccccactgcgaccatgttcgttccctgcggggagtcggcccccgaccttgccggcttcaccctcctaatgccagcagtatctgttggaaatgttggccagcttgcaatggatctgattatttctacactgaatatgtctaagattggttacttctataccgattgtcttgtgccaatggttggaaacaatccatatgcgaccacagaaggaaattcaacagaacttagcataaatgctgaagtgtattcattgccttcaagaaagctggtggctctacagttaagatccatttttattaagtataaatcaaagccattctgtgaaaaactgctttcctgggtgaaaagcagtggctgtgccagagtcattgttctttcaagcagtcattcatatcagcgtaatgatctgcagcttcgtagtactcccttccggtacctacttacaccttccatgcaaaaaagtgttcaaaataaaataaagagccttaactgggaagaaatggaaaaaagccggtgcattcctgaaatagatgattccgagttttgtatccgcattccgggaggaggtatcacaaaaacactctatgatgaaagctgttctaaagaaatccaaatggcagttctgctgaaatttgtttcagaaggggacaacatcccagatgcattaggtcttgttgagtatcttaatgagtggcttcagatactcaaaccacttagcgatgaccccacagtatctgcctcacggtggaaaataccaagttcttggagattactctttggcagtggtcttccccctgcacttttctgatctaatttctgttttataccttatacccaaaacacttactaccaacacagctgttaaacattctatacaaaaaaattgtatgatctggtattaggaaattactttcacagtaaatatcaaagaaaaaagattaagggtctctttgccatgcttttcatcatatgcaccaaatgtaaattttgtacaataaaattttatttcctaagtaa

SEQ ID NO: 170120 - DNA, 1036 bp, Homo sapiens
  Payload ID: 13507
  Gene Symbol: PSMG2
  Gene Name: proteasome (prosome, macropain) assembly chaperone 2
  ENST ID: ENST00000590217
  CDS Start-End: 86-808
tccggggtctcgggcttccgccttcttgctgccctcgttcttgccagggccgcggttagtccctgctggccaccccactgcgaccatgttcgttccctgcggggagtcggcccccgaccttgccggcttcaccctcctaatgccagcagtatctgttggaaatgttggccagcttgcaatggatctgattatttctacactgaatatgtctaagattggttacttctataccgattgtcttgtgccaatggttggaaacaatccatatgcgaccacagaaggaaattcaacagaacttagcataaatgctgaagtgtattcattgccttcaagaaagctggtggctctacagttaagatccatttttattaagtataaatcaaagccattctgtgaaaaactgctttcctgggtgaaaagcagtggctgtgccagagtcattgttctttcaagcagtcattcatatcagcgtaatgatctgcagcttcgtagtactcccttccggtacctacttacaccttccatgcaaaaaagtgttcaaaataaaataaagagccttaactgggaagaaatggaaaaaagccggtgcattcctgaaatagatgattccgagttttgtatccgcattccgggaggaggtatcacaaaaacactctatgatgaaagctgttctaaagaaatccaaatggcagttctgctgaaatttgtttcagaaggggacaacatcccagatgcattaggtcttgttgagtatcttaatgagtggcttcagatactcaaaccacttgtaagttctattatagcttaagcctcttctttgtctggttgtattcattaactcgcactttatatactacctaagtagaccaagtaagtgaacgtttgtattaaatatagacatatctttacataaaatttagtttaagctgaacttttgaaaattagaggacagttaaccaacctattatttacagttttttcattaaagctgactttccaaaaaggaaaatccttagttcttcattgtacttactat

SEQ ID NO: 170121 - DNA, 711 bp, Homo sapiens
  Payload ID: 13507
  Gene Symbol: PSMG2
  Gene Name: proteasome (prosome, macropain) assembly chaperone 2
  ENST ID: ENST00000586587
  CDS Start-End: 83-379
ggggtctcgggcttccgccttcttgctgccctcgttcttgccagggccgcggttagtccctgctggccaccccactgcgaccatgttcgttccctgcggggagtcggcccccgaccttgccggcttcaccctcctaatgccagcagtatctgttggaaatgttggccagcttgcaatggatctgattatttctacactgaatatgtctaagattggttacttctataccgattgtcttgtgccaatggttggaaacaatccatatgcgaccacagaaggaaattcaacagaacttagcataaatgctgaagtgtattcattgccttcaagaaagctggtggctctacagttaagatccatttttattaagctgttctaaagaaatccaaatggcagttctgctgaaatttgtttcagaaggggacaacatcccagatgcattaggtcttgttgagtatcttaatgagtggcttcagatactcaaaccacttagcgatgaccccacagtatctgcctcacggtggaaaataccaagttcttggagattactctttggcagtggtcttccccctgcacttttctgatctaatttctgttttataccttatacccaaaacacttactaccaacacagctgttaaacattctatacaaaaaaattgtatgatctggtattaggaaattactttcacagtaaatatcaaagaaaaa

SEQ ID NO: 170122 - DNA, 983 bp, Homo sapiens
  Payload ID: 13507
  Gene Symbol: PSMG2
  Gene Name: proteasome (prosome, macropain) assembly chaperone 2
  Uniprot ID: Q969U7
  ENST ID: ENST00000585331
  CDS Start-End: 73-774
tggttgaatacctccctctccactcccatcttcaggccagcagtatctgttggaaatgttggccagcttgcaatggatctgattatttctacactgaatatgtctaagattggttacttctataccgattgtcttgtgccaatggttggaaacaatccatatgcgaccacagaaggaaattcaacagaacttagcataaatgctgaagtgtattcattgccttcaagaaagctggtggctctacagttaagatccatttttattaagtataaatcaaagccattctgtgaaaaactgctttcctgggtgaaaagcagtggctgtgccagagtcattgttctttcaagcagtcattcatatcagcgtaatgatctgcagcttcgtagtactcccttccggtacctacttacaccttccatgcaaaaaagtgttcaaaataaaataaagagccttaactgggaagaaatggaaaaaagccggtgcattcctgaaatagatgattccgagttttgtatccgcattccgggaggaggtatcacaaaaacactctatgatgaaagctgttctaaagaaatccaaatggcagttctgctgaaatttgtttcagaaggggacaacatcccagatgcattaggtcttgttgagtatcttaatgagtggcttcagatactcaaaccacttagcgatgaccccacagtatctgcctcacggtggaaaataccaagttcttggagattactctttggcagtggtcttccccctgcacttttctgatctaatttctgttttataccttatacccaaaacacttactaccaacacagctgttaaacattctatacaaaaaaattgtatgatctggtattaggaaattactttcacagtaaatatcaaagaaaaaagattaagggtctctttgccatgcttttcatcatatgcaccaaatgtaaattttgtacaataaaattttatttcctaagtaa

SEQ ID NO: 170123 - DNA, 646 bp, Homo sapiens
  Payload ID: 13507
  Gene Symbol: PSMG2
  Gene Name: proteasome (prosome, macropain) assembly chaperone 2
  ENST ID: ENST00000586445
  CDS Start-End: 20-646
ctgaggagctacagctattatgcaacagagccaggttcaagctctgagctgttttactccaaaggctgtggcaataagaactcctctgagaaatgtgtggccagcagtatctgttggaaatgttggccagcttgcaatggatctgattatttctacactgaatatgtctaagattggttacttctataccgattgtcttgtgccaatggttggaaacaatccatatgcgaccacagaaggaaattcaacagaacttagcataaatgctgaagtgtattcattgccttcaagaaagctggtggctctacagttaagatccatttttattaagtataaatcaaagccattctgtgaaaaactgctttcctgggtgaaaagcagtggctgtgccagagtcattgttctttcaagcagtcattcatatcagcgtaatgatctgcagcttcgtagtactcccttccggtacctacttacaccttccatgcaaaaaagtgttcaaaataaaataaagagccttaactgggaagaaatggaaaaaagccggtgcattcctgaaatagatgattccgagttttgtatccgcattccgggaggaggtatcacaaaaacactctatgatgaaagctgttctaaagaaatccaaatg

SEQ ID NO: 170124 - DNA, 1007 bp, Homo sapiens
  Payload ID: 13508
  Gene Symbol: PSMG3
  Gene Name: proteasome (prosome, macropain) assembly chaperone 3
  Uniprot ID: Q9BT73
  ENST ID: ENST00000252329
  CDS Start-End: 554-922
cccagcactttgggaggccgaggaaggcagatcacctgaggtcaggagttcaagaccagcctgaccgacatggtgaaaccccatctctactaaaaatttaaaaagttagccgggcctggtggcgcacgcctgtaatcccagctacacaggaggctgaggcaggagaattgcttgaaccagggaggcggaggctgcagtgagccgagatcgcgccactgcactccagcctgggtgacacagcaagactccgtctcaaacaaaacaaaacaaaaaaccttccagcttggagaaactgagagtgagcagtagggagtgagggggtccctgggaggaaccagaactcatcccgcttcagggtggggctggcccccttcttggccttggccggggcttcgtgtcacggagcgcccgagggacggtcggagcccaccccagcccgcccgccgcctgagcctggccgagctctctgcacctgcacacgtctgtaaaacgcggatgaaacgcttctacggaaccgggtggctgagatgaactgccactgcagagccccgccatggaagacacgccgttggtgatatcgaagcagaagacggaggtggtgtgcggggtccccacccaggtggtgtgtacggccttcagcagtcacatcctggtggtggtgacccagtttgggaagatgggcaccctggtctccctggagcccagcagcgtggccagtgacgtcagcaagcctgtgctcaccacaaaagtccttctggggcaggatgagcctctcatccatgtctttgcaaagaacctggtagcgtttgtgtctcaagaagctggaaacagagcagtcctcctcgccgtggccgtgaaggacaaaagcatggaggggctgaaggcgctgagggaggtgatccgggtgtgccaggtgtggtgacctggaggcagccgccccgcgctgctcagcaggacacgtgaacacccagacacccactcagggactcaagtctcacctccctccc

SEQ ID NO: 170125 - DNA, 1391 bp, Homo sapiens
  Payload ID: 13508
  Gene Symbol: PSMG3
  Gene Name: proteasome (prosome, macropain) assembly chaperone 3
  Uniprot ID: Q9BT73
  ENST ID: ENST00000288607
  CDS Start-End: 655-1023
cgcgggcttccccgggcggctgcgtccccagtagcccggccggcctcggcaccgcgtgtcgtgggggtcccgggccgcggctgcagggccggggcggcggcgaggccgaggggcgggaagccactgcccggcctggcagtgtgaacgtgcaagtcgatcccctaacccagaaagccccaggcgcggtctctatgggcggccccgctcctgcttctgttttatttttttacggacagggtctcgctctaccgcccgggttgtaatgcaatggtgtgatcacggctcaccgcagcctcgacctcccgggctgaagcgatcttcccgcctcagcctcctgagtaactgggaccacaggcgcgccctgctggttttttttttttttttttttggtagagatgggggtctcgctatgttggccaggctggtctcgaattcctggcctcaacgatcgtcctgtctcggcctcccaaagtgccgggatgacaggcatgagccaccgcgcctggccccttcttttgaatgggcctccttgcgtttccgtttcaatgccccgtgctacttttttgggagccccaaggctgtactgtttgattgactcctttttttcccctttctttttaacctaaattaaagctgccactgcagagccccgccatggaagacacgccgttggtgatatcgaagcagaagacggaggtggtgtgcggggtccccacccaggtggtgtgtacggccttcagcagtcacatcctggtggtggtgacccagtttgggaagatgggcaccctggtctccctggagcccagcagcgtggccagtgacgtcagcaagcctgtgctcaccacaaaagtccttctggggcaggatgagcctctcatccatgtctttgcaaagaacctggtagcgtttgtgtctcaagaagctggaaacagagcagtcctcctcgccgtggccgtgaaggacaaaagcatggaggggctgaaggcgctgagggaggtgatccgggtgtgccaggtgtggtgacctggaggcagccgccccgcgctgctcagcaggacacgtgaacacccagacacccactcagggactcaagtctcacctccctccccggtggagggaggaactttggcactagcccttggagccaggaaaaaagactcgtgtctcaggcagactcttactctggttactaagatcatctgtgcatgacggggagggtggaacaggtcccggaggagtcgtgaatggttctcaccaggacctgaatcgttgcttgtgtttgagaattggaggaatgagtcagcaggcgtggctcatggcccccccgtgtgcaggatcaattgtaggaggaaatttcttttttattaaaagcgaatgtgtatcccaaaata

SEQ ID NO: 170126 - DNA, 774 bp, Homo sapiens
  Payload ID: 13508
  Gene Symbol: PSMG3
  Gene Name: proteasome (prosome, macropain) assembly chaperone 3
  Uniprot ID: Q9BT73
  ENST ID: ENST00000404674
  CDS Start-End: 59-427
cgcacgcagagccacttccgggcgcggcgccggcttgctgccactgcagagccccgccatggaagacacgccgttggtgatatcgaagcagaagacggaggtggtgtgcggggtccccacccaggtggtgtgtacggccttcagcagtcacatcctggtggtggtgacccagtttgggaagatgggcaccctggtctccctggagcccagcagcgtggccagtgacgtcagcaagcctgtgctcaccacaaaagtccttctggggcaggatgagcctctcatccatgtctttgcaaagaacctggtagcgtttgtgtctcaagaagctggaaacagagcagtcctcctcgccgtggccgtgaaggacaaaagcatggaggggctgaaggcgctgagggaggtgatccgggtgtgccaggtgtggtgacctggaggcagccgccccgcgctgctcagcaggacacgtgaacacccagacacccactcagggactcaagtctcacctccctccccggtggagggaggaactttggcactagcccttggagccaggaaaaaagactcgtgtctcaggcagactcttactctggttactaagatcatctgtgcatgacggggagggtggaacaggtcccggaggagtcgtgaatggttctcaccaggacctgaatcgttgcttgtgtttgagaattggaggaatgagtcagcaggcgtggctcatggcccccccgtgtgcaggatcaattgtaggaggaaatttcttttttattaaaa

SEQ ID NO: 170127 - DNA, 489 bp, Homo sapiens
  Payload ID: 13509
  Gene Symbol: PSMG4
  Gene Name: proteasome (prosome, macropain) assembly chaperone 4
  ENST ID: ENST00000380305
  CDS Start-End: 127-375
cccgcccttccggggccgaaagcgaaagcgcgctcggtctctcggtgctcgctccatcgggtctggcggggctggcagcggcgaggacccgggtctggcgctgtgggccgggagccgtggggcggcatggaggggctggttgtcgccgccggcggggacgtctccctgcacaacttcagcgcgaggctgtgggagcagctggtccacttccacgtcatgcggctgacggactcgctgttcctgtgggtgggggccacgccgcacctgcgcaacctcgccgtggccatgtgcagccgctacccaggaagaccaacaaacaggtgtttgtcagctataaccttcagaacacagacagtaacttcgcattacttgtagaaaacaggatcaaggaagagatggaggctttccccgaaaagttctagctgagtggcagaagtgagaatttgtaaacttatgtacaatgtacgtgtaaataaatggattgaattt

SEQ ID NO: 170128 - DNA, 726 bp, Homo sapiens
  Payload ID: 13509
  Gene Symbol: PSMG4
  Gene Name: proteasome (prosome, macropain) assembly chaperone 4
  ENST ID: ENST00000380306
  CDS Start-End: 283-657
cagggaatgcacgctgagtcctagacacagagccaggccgggtggaaaacaaaaagagaagaagtgattatgaaataataagacggaccgtgtgccccttgcaaggtgcggcctgcgaaatcaacagacttataaataaggtctggtggaagcgcaggagcgcacgcgggaggctatggcgggggaacctctgtgagttccgcggcggaggctagaacatcgctgtggctgcgggaccctcacccggcgctgaaaaccctccacatcagctcctgctcggaaatgtctccgcagctcaccagtgcttttcgaaatctgcccaagacctttgtttgccatttaaatgaaatgaaaacgaacaaacacacttggaatatgcttctattcctaagaagttggctgcataggagcacaacatcaccagcttaccacgtattggtcattctctttgaggagcagggccatactgacggcttacatgtgcgctctggtggaagtaggatgtttggtggcagcaggagcaaaatcaactctgccaggaagaccaacaaacaggtgtttgtcagctataaccttcagaacacagacagtaacttcgcattacttgtagaaaacaggatcaaggaagagatggaggctttccccgaaaagttctagctgagtggcagaagtgagaatttgtaaacttatgtacaatgtacgtgtaaataaatggattgaatttca

SEQ ID NO: 170129 - DNA, 629 bp, Homo sapiens
  Payload ID: 13509
  Gene Symbol: PSMG4
  Gene Name: proteasome (prosome, macropain) assembly chaperone 4
  Uniprot ID: Q5JS54
  ENST ID: ENST00000419065
  CDS Start-End: 72-560
atcgggtctggcggggctggcagcggcgaggacccgggtctggcgctgtgggccgggagccgtggggcggcatggaggggctggttgtcgccgccggcggggacgtctccctgcacaacttcagcgcgaggctgtgggagcagctggtccacttccacgtcatgcggctgacggactcgctgttcctgtgggtgggggccacgccgcacctgcgcaacctcgccgtggccatgtgcagccgctacgactccatccccgtgtctacctccctccttggagacacttccgacacgacctctactggccttgcccagcgcctagggctcggagggaagactggcctggcctgtgagtgtggcgtagagtggggattaagcaaaggtcatgaggctgaatgctccactcttcccacaccccaacacacttcctgtgggccagccaggaagaccaacaaacaggtgtttgtcagctataaccttcagaacacagacagtaacttcgcattacttgtagaaaacaggatcaaggaagagatggaggctttccccgaaaagttctagctgagtggcagaagtgagaatttgtaaacttatgtacaatgtacgtgtaaataaatggattgaatttca

SEQ ID NO: 170130 - DNA, 824 bp, Homo sapiens
  Payload ID: 13509
  Gene Symbol: PSMG4
  Gene Name: proteasome (prosome, macropain) assembly chaperone 4
  ENST ID: ENST00000451246
  CDS Start-End: 40-270
cccgggtctggcgctgtgggccgggagccgtggggcggcatggaggggctggttgtcgccgccggcggggacgtctccctgcacaacttcagcgcgaggctgtgggagcagctggtccacttccacgtcatgcggctgacggactcgctgttcctgtgggtgggggccacgccgcacctgcgcaacctcgccgtggccatgtgcagccgctacacagggagtgagcctgcggtcggcctgaggtatcctgcaactgcaagcactaaataagctcctgactcatctctcccctgtggctgatgcagaagctgatcctggagaaactaaaaccttctgcacagcaaaggaaacaatcaacagactgaaaagacaacctacagaatgagagaaagtctttgcaaactattcatctgacaggggattaacatctagaatatatgaggaactcaaacacctcaacagcaaaaaaagaaacaacctgatttttaaaatggacaataatctgaatagacatttcttaaaagacacaaatggccaacaaacatatattaaaaaaagctcaacatcactaatcatcagaaaacacaaatcaaaaccacaatgaggtatcaactcacctcagttaggatggctattatcaaaaagacacacacacaaaaatgctggcaaggatgtggagaaagggaactcttatatgatgttggtgggaatgtaaactagtacatcaactatggagaacagtacagaggttcctcaaaaaactacaaacagaattacctcatgacccagcaatcccactactggtgtttatccaaaggaaagga

SEQ ID NO: 170131 - DNA, 838 bp, Homo sapiens
  Payload ID: 13509
  Gene Symbol: PSMG4
  Gene Name: proteasome (prosome, macropain) assembly chaperone 4
  Uniprot ID: Q5JS54
  ENST ID: ENST00000438998
  CDS Start-End: 130-501
acccccgcccttccggggccgaaagcgaaagcgcgctcggtctctcggtgctcgctccatcgggtctggcggggctggcagcggcgaggacccgggtctggcgctgtgggccgggagccgtggggcggcatggaggggctggttgtcgccgccggcggggacgtctccctgcacaacttcagcgcgaggctgtgggagcagctggtccacttccacgtcatgcggctgacggactcgctgttcctgtgggtgggggccacgccgcacctgcgcaacctcgccgtggccatgtgcagccgctacgactccatccccgtgtctacctccctccttggagacacttccgacacgacctctactggccttgcccagcgcctagccaggaagaccaacaaacaggtgtttgtcagctataaccttcagaacacagacagtaacttcgcattacttgtagaaaacaggatcaaggaagagatggaggctttccccgaaaagttctagctgagtggcagaagtgagaatttgtaaacttatgtacaatgtacgtgtaaataaatggattgaatttcagtttgtcatcaggccgcgctcccgttttgtttttaaggggttaatcttttgagcttccttctcagcagtgtgtgggccaaaaggctcatactgacccacctggtgaaggagaggcaaagtgggcagtatatacttcctcatttggctgtgagtgatagagggatgaaatgggatttttgttgggattgaagactgtaatctaagagtttcaatcagacatgactgtgacgtgcatcctcaattagaattaaagtgatgtataaatatg

SEQ ID NO: 170132 - DNA, 2323 bp, Homo sapiens
  Payload ID: 13509
  Gene Symbol: PSMG4
  Gene Name: proteasome (prosome, macropain) assembly chaperone 4
  ENST ID: ENST00000454610
  CDS Start-End: 1-353
ccctgcacaacttcagcgcgaggctgtgggagcagctggtccacttccacgtcatgcggctgacggactcgctgttcctgtgggtgggggccacgccgcacctgcgcaacctcgccgtggccatgtgcagccgctacgttccgtgtccccaccaccttcacgatgcagaccttcttgggcctccgggaaagctctttctccagctctgcaaagaaacagaccctgtgagccctgggcaggccgcccacagaggacaggacagcagctgcagtcacagccctggttccccagttcgggtaccacagaagggagagagaagctttttttttttttttttttttgccagtggatagggtctaggtttccaggatagaaaggcactcataagaccccagctttgcagttcaggtttcgctcgggtgcctgagagggcaccaaggtgcaccgtcagcagaagtttccatcacaaacccttgttttggaaccagtcagagtgcacacaaacggtctcgactcagttcacttttgtctgagtacagagctcagcgatgatattctaggttactgaggcactcattaggccctgggcaaatctaaacatgcagttcttttccgtacactctacatctgcctgtgtcacccccggctcggagactgggaaggccacatgcagatatgcttcttagccttgtggggtggaactatggctgtagctacttctgctgaaactgcccttaggacatcatatgcatctttgaaagccaaatacataagtgaacacatctgcgtgtatgtgtatacaccatacatgcacacattcatacgcatgcatatacgtgtgcatgttttagttaacagaagtccttgggggctggacaatattttggctccaagggatgtgagcaactataaagtcatgagactgagtttcttgtgcggctccagcggctctgaaagcccctctgaagggagtccaccagcgcacagtgttacattcaccaggccaaggggtctgcagaggtgctggtgttgatctggcaatttacagggaagattcagaatggtgggggtgctggcctccaggagctgtctgcttgcacgtctgggagcaggaatgccacctcagccttctgttgcctctctgccttcctagcctggcatgtcttcatggagtaatcccctactggggagctaaaaaagaaaagggagacttcccgaagcggaggggaaccaggactcttcaagactgtcaaggtcaccagaaacaagaaagactgagcagctgtcagaccaggagactagggagaggggaggacaagacgcagtcctgggcggcatcccgggtgggaggagtcgtcatggaaagcacgatgatgggaggcaccaaataaaggctggggtttggtgaatggtagtgttccaatgtcactcttttagtttcgacaacagtaccacgacagtatcagacattcgcaatctgggaagtcgagtactgggaggtctgtcgttgcctctagagggatccttctgctccctcgggggctgtgtctccaggaccctggccctgtgcttccgagggccactctgaaccctggatggctcaagttcaaccctcctcttccacctccttcctgccatccagcggtaggagggtcacaaagctctttcattatagtttgaagaaaaaatgtgttgctaaaccgtagggatttgaataaagcaatgatgtttttattcaaacattgtttttgaactgagtgtcaccagccagggcacagaagggagaaggagaaacctttcacttgtctgagggagctcatgtctactgagtttccagaactttctcccttgccatacttgggtgcaaagattgaggtctgtgtgtaagcccacagggccggcgtttcagctgctggtccacggaccctctcagctcccaaggtccattatttttcctcagcaaaaatgggctactttgactacaggcacagtttctccatggttaaaataactaattttataaagagcttgaaaatatcatggttaacagaaaaccttggatccaatgatctgaatatctttgctattatagaactcatcagaaaccaactgtaatagctacgttttctcaccatggaagacttccgagaagaaaatttcaatgtccattagcaagtccatataagtttaaagttttaaaaagtatataccccaaactgaactcctgatatgttattgtttactaagtatgatgttaaagaagcaataacaactgcattatgacctgagctttttaaataaaattaaacctagaacccagtct

SEQ ID NO: 170133 - DNA, 4603 bp, Homo sapiens
  Payload ID: 13509
  Gene Symbol: PSMG4
  Gene Name: proteasome (prosome, macropain) assembly chaperone 4
  Uniprot ID: Q5JS54
  ENST ID: ENST00000473000
  CDS Start-End: 63-377
ggcggggctggcagcggcgaggacccgggtctggcgctgtgggccgggagccgtggggcggcatggaggggctggttgtcgccgccggcggggacgtctccctgcacaacttcagcgcgaggctgtgggagcagctggtccacttccacgtcatgcggctgacggactcgctgttcctgtgggtgggggccacgccgcacctgcgcaacctcgccgtggccatgtgcagccgctacgactccatccccgtgtctacctccctccttggagacacttccgacacgacctctactggccttgcccagcgcctaggtatgtacccacagctggcgctgcatggccagccaggtggggcccactctttaatggaaccatgaagcaagtcccttcggaagtaaagcatctttatgctaagaaccatcacctcattgctgctgggaagcacagacctttgcacgttgggtcttatttaaggggcacattccatgctcgcctgtcatcaccaccgtcccagggctggcctgttcccaaaggactcccacctcgtccttgggtgtgtccttgagtccatgagctgatttagttgccttccgtaagtgcatcaccacctcctgggaggagagcatgagaagtgcccacagcccctgtgggtggtggctcaaggtagcctcccgggccttaggaggagtcagtgcagctggtggagcaggtgtcacctctgtgcaggaaggactgtcctcactcagtgtgataccgttcagggctcggagggaagactggcctggcctgtgagtgtggcgtagagtggggattaagcaaaggtcatgaggctgaatgctccactcttcccacaccccaacacacttcctgtgggccaggtaaggcttccatgtgctctgcgacccccagccccagtgcctgtggccagtgtgcacaggatgcctgtctcctgcccaggcctggcgttctccagtaggcccagctgcttctgctctggagtcttctctgtgtctcaggcacaggacctggtacctgacaagcaggaacctctgtgtcagtcacactgaggcaaatgcacacgaatagcatggcacctggcccagggggaaggcagggcagggtggagtgtcaccagcaggcccatgacagtatgtggataggacagaggtcagggagggcacaggtcagcatttcaggaactcgcagtattctttttccctcccttggaggtggggacctgacttgtaagttaatttggtaatttttaactaggaagtaaatttaaaatttacagaaaagttgcaaagaagatagaattcctgcttagcttttgccccaatttcccacttgccacccttccctctttgtgtttgtatctttttttttctgagccacatgaaagtaaagctgccttttgtgtctgtgtcactctgtgtgtgtgactgtgtaaggggtagcacacttacatggaacaggttactgcgtgtgggagaaggctcaggaaggtattcatatttatacagacggaaagctgggtggggttgcggacacactcccatagagaaggtggtgtgagcttgtctggcaggccgtgaataactttcatatcaataaggtaaattagtctccagaatatttgcgagatggaggcctagtatctatatgcaaaaaagaggggttctcagtatctcgactgtctcaacaagtcacgggtgtgccgtggcttccggcgtctcttaagggaatggtgctgcagagctcggaccaagaaggttttccagcaaagtcccatgctttgccagttgccttgagcctgggtctgggccctcaagttgaaaatgcactataatgaaaagggagaggtgtcctgaatcagtatcttatatgagagatgaaagcaggtagggaaagagaaggcctggggggttctcagtagctctggaagcatcgcaggagttggtgtggccaaggggacccaacctcctatggccctggaggggcacagcttgggtctgaggggctcagtgcctccagacacagcgttgttcctcagaaatcctgtctctgcagttagaacagttggaataccaggggggcccccttagggtaaagggggatgttcctgcccctgggatatagggcagggtgtgacttacaggctcctcctaggcagccttggtgagccccagcttcctaccacactgcctgcctttagatcaccctctacatgagtggtcccagcctgcctaacacagctaggaaaggatgaggttggtccctaatggtgggggaagcctaagaggcttcctcactccccgcagggctgagcagataactgggcacaactctccgcctcgggggcacactgcacccagcacactggtgggaggctctgtgctaagtactgtaagctgttctttaaacaccagctcttggaataaccgaacagctgcctttgtccggacacattcctttttttttttttttaataaaaaaacagctttaccgagacgtaaacacatgtcatacaattcagcagctgtcctcaggcagaggctgtgcttgccgccgccttgctttttcataggtgtgttggctgctttgtaaggacagtcagtgagttaatacccaagacctttccagccctaaaaatcacgcagccttgtacagcggaaaaacaggcttttggggtcctgggctctccctctcctcaatttccaaacaaagctgggagaggtttccaggccacggtggggcctgggcctgcgcctgcacctgcgcccctgagccacactgcctctcagggttcttggtgggaccatagctcagatggcagcaactgaaaggacagaactgctgcccagatgagatcccatgacgtgtgttctaaatcggcctttagtaatggtgcaggtggcctggtgccctcagcctcaccgcaccacccttttgccttttggtgatgaggctaagtacatgcttgccatatgttgaggtgggggtgggtcagtgcctctccaggggtgagtagttctgcactggccctgcgtatgggtgaggctaaaggaggaggccgcgcagtggggcaggcaacatccaactgctttagcctttttgcccacgtattttcaggatattggctttcagattccaggtgtatgactctgcttgatttttgcagttggcccaatgtgcacctcagccattttctattgattctgtagaaggggactaaaacttacattcagtagaaaattacgtgtgtgtccatatgcctatctgtgcacacacacacaaatatatttgtgtgtatacacatatatgcaaatgcatggaaacgtaggagggagggaagtggaactggttggggtggggtggtgctgaaggagaactttaatattttattttaaatacttatttttttttgagacggagtcttgctctattgcccaggctggagtgcagtggcgcgatcttggctcactgcaagctccgcctcccgggttcacgccattctcctgcctcagcctcccgagtagctgggactacaggcgcccgccaccatgcccggctaattttttgtatttttagtagagacggggtttcaacgtgttagccaggatggtctcgatctcctgaccttatgatccacccgtctcggcctcccaaagtgctgggattatgggcgtgagccaccgctcccggccattttttgtgtttaaatttttttttttttttttaaatcaaaacaccagaaacccctctgtgtagggcagaggttcttaagcagtgcggggcacctgcaggatctgttccagcagacagctggccccaaatcctggctttctgggtcaggagggctgggtggggcccagcagctgcctctcgaacaagttccagggaggctgctgaggtggggcctgcccttcagaaccctgggtctggtggagagactgggagaggcctgagtgactcgtctgcatttgcagcacctgtctgaagagaggcatggagattagagctttcttttctccctacaaccccatcctctttctgagcatttcccagctgcacgtggctgtgaggaacacggggcctgcagtatttcaggagtggctgtatcaatgtgttttctctttttagccaggaagaccaacaaacaggtgtttgtcagctataaccttcagaacacagacagtaacttcgcattacttgtagaaaacaggatcaaggaagagatggaggctttccccgaaaagttctagctgagtggcagaagtgagaatttgtaaacttatgtacaatgtacgtgtaaataaatggattgaatttcagtttgtcatcaggccgcgctcccgttttgtttttaaggggttaatcttttgagcttccttctcagcagtgtgtgggccaaaaggctcatactgacccacctggtgaaggagaggcaaagtgggcagtatatacttcctcatttggctgtgagtgatagagggatgaaatgggatttttgttgggattgaagactgtaatctaagagtttcaatcagacatgactgtgacgtgcatcctcaattagaattaaagtgatgtataaatatgc

SEQ ID NO: 170134 - DNA, 2241 bp, Homo sapiens
  Payload ID: 13509
  Gene Symbol: PSMG4
  Gene Name: proteasome (prosome, macropain) assembly chaperone 4
  ENST ID: ENST00000509933
  CDS Start-End: 687-794
gtttagtcgcaggggctgcggggtggcagcctcagagccctgtccttccgcagccgtgggccccgcagggaccagccaagcagggcaaccaaaagctggaaccagcagcgaaaaccccgagcccacgaacgcagcgcagtgcgggaacacttgccctttgttcctcagtaaggccgggtgttttcgcatccccggaggttgtgaatttgagttataatggcctcggtcgggactgagagagccgagcttccacgagagagctttgcctgctttgtcctacaaatcggcggagggagtagcatcctggcttttctagggcgccatttccctgctacaggcaatctcccctcccccacgctgtcaatgatttgtgggattcttaggcaggcggggcaggccgagcccagggaatgcacgctgagtcctagacacagagccaggccgggtggaaaacaaaaagagaagaagtgattatgaaataataagacggaccgtgtgccccttgcaaggtgcggcctgcgaaatcaacagacttataaataaggtctggtggaagcgcaggagcgcacgcgggaggctatggcgggggaacctctgtgagttccgcggcggaggctagaacatcgctgtggctgcgggaccctcacccggcgctgaaaaccctccacatcagctcctgctcggaaatgtctccgcagctcaccagtgcttttcgaaatctgcccaagacctttgtttgccatttaaatgaaatgaaaacgttcccttccactctgctccaagaatttccatgatgaagagagctggctggagggcaggattcaggtggtgacttactcattcttcagcctcagataggctttgctccaagcgcagggcagcacctgggaggctgtgggagctctttcagtcagcaagtaggtacaacagatgcgacaccatgcagacacgcagctgtgaacgacagttcagaactcagcgtaagcttgtgctatgaacgagcaccgtcagagaattcccacccacacgtacagaaacacagtttttatattacaacctcaaggacagggagggaagtgttcgccgctagacatgacacaccatactgcttttccaaaacacacgggacatgaaagcgaggtggtgccttctagacgagaggacagctgtagtgtggacctcccccgcacatgcgatacctcgggccgggcggtgtgacctcacaggcccacttatggcacttgcagtttgggattgctcatttggctctaggaagcggtggtgtctgagtgtgatacttcccttacgaggtttgtttttgttttctttctgttctgtagccaaaccaatttaccagcccgtcttccagatgcaggtgatcttactctcagtaaacaaaaacatgtaacctttttcctgtttctcttgggtggtaataattttagggcatttgataagagtttgacttcagaaaaagaacaaagtgaagaaatgttcagctccatctcaggtgttcacatttgtgcataacttttattgaaaggctgacagggtaggctagcggaacggaggggtgtgtggaggagagtagcagggggtgggagggtcaagttgaaacagtgggtgcctgcgaagggtctccctattagccaggaagggaacagcacagaggggttcaagcgtgacagacggtgctgggaagtgggcagccgtagcagcctcccctgctgagcccggcgggcccagatgcgtatcaggcttgggtgggtcctgccaccttgctcacttggtaccggatttcccggggctgtgcccacagggaagtgttgctgctctggcaacatttcataaaggtgttgctcaacagcttcaggtatccctaggctgaagctgccaccaaacaggcacccggcctcctcctcctcaggctgccctgggaggagagctgtgggaccgcctcgccggctgagagccattacctgccgaccgtcggcaagtcagcctcacacccactggactctgctcccaagagcccaggctgttttcctcaaagctagcctcttttccagtcatcgatggattagtcctgatggctgaagtgctgagcagtgtcttcgttggaccagttttttattgtcatttgaggtggagatcagagatcatgaccagaagagtgtgagtgctgtcccttgccaccaacttcctagagatttcgggcagcactctacagcttcaatttcc

SEQ ID NO: 170135 - DNA, 778 bp, Homo sapiens
  Payload ID: 13509
  Gene Symbol: PSMG4
  Gene Name: proteasome (prosome, macropain) assembly chaperone 4
  ENST ID: ENST00000324987
  CDS Start-End: 47-373
gcgaggacccgggtctggcgctgtgggccgggagccgtggggcggcatggaggggctggttgtcgccgccggcggggacgtctccctgcacaacttcagcgcgaggctgtgggagcagctggtccacttccacgtcatgcggctgacggactcgctgttcctgtgggtgggggccacgccgcacctgcgcaacctcgccgtggccatgtgcagccgctacgactccatccccgtgtctacctccctccttggagacacttccgacacgacctctactggccttgcccagcgcctaggaaggactgtcctcactcagtgtgataccgttcagggctcggagggaagactggcctggcctgtgagtgtggcgtagagtggggattaagcaaaggtcatgaggctgaatgctccactcttcccacaccccaacacacttcctgtgggccagccaggaagaccaacaaacaggtgtttgtcagctataaccttcagaacacagacagtaacttcgcattacttgtagaaaacaggatcaaggaagagatggaggctttccccgaaaagttctagctgagtggcagaagtgagaatttgtaaacttatgtacaatgtacgtgtaaataaatggattgaatttcagtttgtcatcaggccgcgctcccgttttgtttttaaggggttaatcttttgagcttccttctcagcagtgtgtgggccaaaaggctcatactgacccacctggtgaaggagaggcaaagtgggcagtatatacttcctc

SEQ ID NO: 170136 - DNA, 2110 bp, Homo sapiens
  Payload ID: 13510
  Gene Symbol: PSMB11
  Gene Name: proteasome (prosome, macropain) subunit, beta type, 11
  Uniprot ID: A5LHX3
  ENST ID: ENST00000408907
  CDS Start-End: 60-962
accagaccccagccacaaattcctggcttgcttcttccaaacttcattcagccccagggatggctctgcaggatgtgtgcaagtggcagtcccctgacacccagggaccatcacctcacctgcctcgggctggcggctgggctgtgccccggggttgtgaccctcaaaccttcctgcagatccatggccccagactggcccacggcaccaccactctggccttccgcttccgtcatggagtcattgctgcagctgacacgcgttcctcctgtggcagctatgtggcgtgtccagcctcatgcaaggtcatccctgtgcaccagcacctcctgggtaccacctctggcacctctgccgactgtgctacctggtatcgggtattacagcgggagctgcggcttcgggaactgagggagggtcagctgcccagtgtggccagtgctgccaagctcttgtcagccatgatgtctcaataccggggactggatctctgtgtggccactgccctctgcggctgggaccgctctggccctgagctcttctacgtctatagcgacggcacccgcctgcagggggacatcttctctgtgggctctggatctccctatgcctacggcgtgctagaccgtggctatcgctacgacatgagcacccaggaagcctacgccctggctcgctgcgccgtggcccacgccacccaccgtgatgcctattcagggggctctgtagaccttttccacgtgcgggagagtggatgggagcatgtgtcacgcagtgatgcctgtgtgctgtacgtggagttacagaagctcctggagccggagccagaggaggatgccagccatgcccatcctgagcctgccactgcccacagagctgcagaagatagagagctctctgtggggccaggggaggtgacaccaggagactccaggatgccagcagggactgagacggtgtgagaagcaggacttggttggggatggtgtaggcctggggagtgggtgggaggatgggcagcagggggagggtcccgctggcagcagcctcacagcgtctggctctagcctgtatgggttgctggcttcatttattgcaagtctccatcctttcatgactcccagagctattatggctctgcccaacaagttcctattgactcccagtggattggtccagcctccttcttggcaccaagtccgtctttcattcaacacttgcagtgtgcctactgcatgccagacgcatgctaggtgctagaccctcttttcttgccatcttctctgcttttttccatcatctcatccccagtttctcttagtttcggtcctttatgtgtctcagcttcagcgtctttgtctttttctcctgatcactttgtcagcatggtaagatggggcacccgggaagggagcagcccctctcagaacgaggcgtagtgatagacaccctttggatggtgatgggcttgtcttatctgctctccttctctgacttgaccatcatgactagaatgattatccctttactgaatgcagttctcatcgcaaccctttgaggtaaaaatgagtctctctttacagaagaggaatcaggttcaaagggttatgtggcttgccagggtcacacagtaagtggcagggatgacacttagatccaggccttctcctccagggtccatgctctttcagcacagctccccctcccaggccctctgccctgcctttcctctcttccctgcaggcttccggagagggatgtggagggagaaagtagctaggccagtcccctgcctggtggctcatgtggctttatcttccaggcctggagccatcccccacagcccacccttgctctccagctttctgggcctggcggtgccgctgccagacttcccctcctcctttcttccctttgccttctttccagcccctccttcctgatgctccctctggagaatgaagacaagagagaggtggctgtgccagtgggaactgtctggctagcacatcctctcctgcccctcctgtccctgctcccactcccctagaagcccagacttgaagatccagactaacacctccaggagggccactgccctgctgtcccc

SEQ ID NO: 170137 - DNA, 4448 bp, Homo sapiens
  Payload ID: 13511
  Gene Symbol: PSMC1
  Gene Name: proteasome 26S subunit, ATPase 1
  Uniprot ID: P62191
  ENST ID: ENST00000261303
  CDS Start-End: 104-1426
tggttcctatcagcttccgtagcgtccctaacgacttccgcctctggcgggccgcagtggtggaggaacttccggcagcggcagctcaagtggccaaggcaagatgggtcaaagtcagagtggtggtcatggtcctggaggtggcaagaaggatgacaaggacaagaaaaagaaatatgaacctcctgtaccaactagagtggggaaaaagaagaagaaaacaaagggaccagatgctgccagcaaactgccactggtgacacctcacactcagtgccggttaaaattactgaagttagagagaattaaagactatcttctcatggaggaagaattcattagaaatcaggaacaaatgaaaccattagaagaaaagcaagaggaggaaagatcaaaagtggatgatctgagggggaccccgatgtcagtaggaaccttggaagagatcattgatgacaatcatgccatcgtgtctacatctgtgggctcagaacactacgtcagcattctttcatttgtagacaaggatctgctggaacctggctgctcggtcctgctcaaccacaaggtgcatgccgtgataggggtgctgatggatgacacggatcccctggtcacagtgatgaaggtagaaaaggccccccaggagacctatgcagatattggggggttggacaaccaaattcaggaaattaaggaatctgtggagcttcctctcacccatcctgaatattatgaagagatgggtataaagcctcctaagggggtcattctctatggtccacctggcacaggtaaaaccttgttagccaaagcagtagcaaaccaaacctcagccactttcttgagagtggttggctctgaacttattcagaagtacctaggtgatgggcccaaactcgtacgggaattgttccgagttgctgaagaacatgcaccgtccatcgtgtttattgatgaaattgacgccattgggacaaaaagatatgactccaattctggtggtgagagagaaattcagcgaacaatgttggaactgctgaaccagttggatggatttgattctaggggagatgtgaaagttatcatggccacaaaccgaatagaaactttggatccagcacttatcagaccaggccgcattgacaggaagattgagttccccctgcctgatgaaaagacgaagaagcgcatctttcagattcacacaagcaggatgacgctggctgatgatgtaaccctggacgacctgatcatggctaaagatgacctctctggtgctgacatcaaggcaatctgtacagaagctggtctgatggccttaagagaacgtagaatgaaagtaacaaatgaagacttcaaaaaatctaaagaaaatgttctttataagaaacaggaaggcacccctgaggggctgtatctctaatgaaccatggctgtcatcaggaaaatggttgggagatttctcaatccctgaaagggatgaggttgggggagttgcccagaggaatccctgttcccactgatttttattagcaaaacatcctgtgtcttttggagtacgatgtgtaagtgcccattgggtggcctgttggtcactgtgcagcagtctgcttcccaataaagcgtgctctttcacaaacacttcctgtttctgcagtctccacacacacctaccgctcaacagcagcctgtgggtggacccagctacagggaagcctttggacaggaactcaggctgcggtcccaaggagtgtggacctcactatgcgttcgccacatcacacccccagagctggcgttcaacggtaattacagtgggaaatggtcactaccacagagccagggatattcgttgtttaaataataaaggctgcgttaatgtggctattgcttccaaaggaagtacagctttcctttttggaagttttgtggaccatgcatgttcttagcactctgagggcagaaaataactactggtgttcccaagagactgaggattcctagagatatcttgaaagcccttctgagcccttgggctcagaaatctcatccctttcaaggtgttcagaaacatgtcagaacttccccttccctttctccgtctatttccgtcatttctctttctgaacaaatcaggcctaaagctattaagtgggacagatcaaggtaagcgttcccttgacaggtggcctggtgtgggttgtagggcccacactgaatgaggagtgtgtattagttttctgttaatactataacaagttaccacaggctttgtttaaaaacagcacaatttggccaggcacggtggctcacgcctgtaatcccagcactttgggaagctgaggcaggcggatcacaaggtcagaagtttgaggccagcctggccaacatggtgaaaccccatctttactaaaaatacaaaaattagctgtgcgtggtggcaggtgcctgtagtcccagctactcaggaggctgaggcaggacaatcgcttgaacccaggaggcggaggttgcagtgagccaagatcccgtcactgcactccagcctgggcgacagagcaagactccgtctcaaaaataaataaataaataaataaaaaccacaattttatctcagttctgtaggtcagaagtccaacacgagtgtctccaggctaaagtcttgctgttggcaggaccgttccctctggcgtctctaagggagaatccgtttccttgctgaggattattgttggcagaatttaatttcttggagttgtgggccagctgaggtcagcatttccttgctggctgccagctgaggcctttgccagtctgtgaaggccaccctccctcctgactcgtggcacttcattttccaccagcagcagcaggcccagtccctctctcccaccgacccttctttctgcctgccttttctattcttatggatccttgtgattgcattggacccatgcagatgatccaggataatttccctgttttaaagtttacaatcttcttaatttttatctgcaaagttccttttgccatgtaacattcacacgttccagggcttagggtgtggccatctttaggggcgccactctgcctaccacagaggacatccacacgtgggggtggcccagtgcagggtaaggacggggtgcttgtggggagggcgggtgtcagcccaagtagggtgtggagctgtccatgtggaggaacaccacagcacggggactcagcatgggcagggtgaggctggcatccgtgtggggtgtatgtgcagggctggggtggtccgatagggggagtcagtgtgggcagcctgatgtgcagtatgagagcccaagtgggtgaggaaggcatctgcagggacggggtggtggcaggggagggaggctgcttatgtatggaggcagtcaggcaggtaaacaggacagtgggagccaggtttctctgaggagttagacacagaaagaagaaaacaagaacgacctctgtccactgggagcacctgggaacagtgacaccccaactgcagtgagcacccctagacccagacctttgctgctaaaagtattattctccactaaaaggagtgagggctgattccggggctaggcagggaaaggacaggatgaacccaaagtctgttttgccagaaagcaagggagtgctcaaggaatgataaggacatgtcctaaggacaccgaagcctatgtgaaggggcttccactggccaaactcgggacaatctgagcatcctaacaaacagttactattaatggaatacagtatagccctttaaatagggaactacacacacacacacacacacacacacacacacacacacacacacacacacaccccaatacatatgaattgatctgaaagtttgctgaggaaggggtatttacagattttgagagtctgccacaaaacactgttcagttagaaagggaaagtcacactggagatgcccagcagacaccgtcttcaccaagtggtcaaatgcacatcatcagtaatgggcactttgaaagtacgtgccacccaagagtgtcagtgctgtcacactcctgccaaagatgcttagcctgaatccagtgctgaggaaacaccaggcaaacacaaactgaggaacattctacaaattcagaacacttcaaaagtatccacgtcttggaagtcaaaaagcttccaatcagaaggagaccaaagagatgacaaccaagtgcagctcctgctcctgaactggatccttttcctagaggacatgactgggcctgaggacctgctaggagtactgcgtccatgctgacttcctgttcagtgtctgtatcgtgggcgggtagcagactctcagcaactgactcacacggttcaggaaacaaaattctttgtaacgcacttgcatcttttcctaagtttgagattaaaaaaaacaaaaaacccca

SEQ ID NO: 170138 - DNA, 1389 bp, Homo sapiens
  Payload ID: 13511
  Gene Symbol: PSMC1
  Gene Name: proteasome 26S subunit, ATPase 1
  Uniprot ID: P62191
  ENST ID: ENST00000543772
  CDS Start-End: 143-1246
gctcaagtggccaaggcaagatgggtcaaagtcagagtggtggtcatggtcctggaggtggcaagaaggatgacaagtgacacctcacactcagtgccggttaaaattactgaagttagagagaattaaagactatcttctcatggaggaagaattcattagaaatcaggaacaaatgaaaccattagaagaaaagcaagaggaggaaagatcaaaagtggatgatctgagggggaccccgatgtcagtaggaaccttggaagagatcattgatgacaatcatgccatcgtgtctacatctgtgggctcagaacactacgtcagcattctttcatttgtagacaaggatctgctggaacctggctgctcggtcctgctcaaccacaaggtgcatgccgtgataggggtgctgatggatgacacggatcccctggtcacagtgatgaaggtagaaaaggccccccaggagacctatgcagatattggggggttggacaaccaaattcaggaaattaaggaatctgtggagcttcctctcacccatcctgaatattatgaagagatgggtataaagcctcctaagggggtcattctctatggtccacctggcacaggtaaaaccttgttagccaaagcagtagcaaaccaaacctcagccactttcttgagagtggttggctctgaacttattcagaagtacctaggtgatgggcccaaactcgtacgggaattgttccgagttgctgaagaacatgcaccgtccatcgtgtttattgatgaaattgacgccattgggacaaaaagatatgactccaattctggtggtgagagagaaattcagcgaacaatgttggaactgctgaaccagttggatggatttgattctaggggagatgtgaaagttatcatggccacaaaccgaatagaaactttggatccagcacttatcagaccaggccgcattgacaggaagattgagttccccctgcctgatgaaaagacgaagaagcgcatctttcagattcacacaagcaggatgacgctggctgatgatgtaaccctggacgacctgatcatggctaaagatgacctctctggtgctgacatcaaggcaatctgtacagaagctggtctgatggccttaagagaacgtagaatgaaagtaacaaatgaagacttcaaaaaatctaaagaaaatgttctttataagaaacaggaaggcacccctgaggggctgtatctctaatgaaccatggctgtcatcaggaaaatggttgggagatttctcaatccctgaaagggatgaggttgggggagttgcccagaggaatccctgttcccactgatttttattagcaaaacatcctgtgtcttttggagtacgatgtg

SEQ ID NO: 170139 - DNA, 390 bp, Homo sapiens
  Payload ID: 13511
  Gene Symbol: PSMC1
  Gene Name: proteasome 26S subunit, ATPase 1
  ENST ID: ENST00000553835
  CDS Start-End: 138-390
gacttccgcctctggcgggccgcagtggtggaggaacttccggcagcggcagctcaagtggccaagacaaggatctgctggaacctggctgctcggtcctgctcaaccacaaggtgcatgccgtgataggggtgctgatggatgacacggatcccctggtcacagtgatgaaggtagaaaaggccccccaggagacctatgcagatattggggggttggacaaccaaattcaggaaattaaggaatctgtggagcttcctctcacccatcctgaatattatgaagagatgggtataaagcctcctaagggggtcattctctatggtccacctggcacaggtaaaaccttgttagccaaagcagtagcaaaccaaacctcagccactttct

SEQ ID NO: 170140 - DNA, 2637 bp, Homo sapiens
  Payload ID: 13512
  Gene Symbol: PSMC2
  Gene Name: proteasome 26S subunit, ATPase 2
  Uniprot ID: P35998
  ENST ID: ENST00000292644
  CDS Start-End: 1-1302
atgccggattacctcggtgccgatcagcggaagaccaaagaggatgagaaggacgacaagcccatccgagctctggatgagggggatattgccttgttgaaaacttatggtcagagcacttactctaggcagatcaagcaagttgaagatgacattcagcaacttctcaagaaaattaatgagctcactggtattaaagaatctgacactggcctggccccaccagcactctgggatttggctgcagataagcagacactccagagtgaacagcctttacaggttgccaggtgtacaaagataatcaatgctgattcggaggacccaaaatacattatcaacgtaaagcagtttgccaagtttgtggtggaccttagtgatcaggtggcacctactgacattgaagaagggatgagagtgggcgtggatagaaataaatatcaaattcacattccattgcctcctaagattgacccaacagttaccatgatgcaggtggaagagaaacctgatgtcacatacagtgatgttggtggctgtaaggaacagattgagaaactgcgagaagtagttgaaaccccattacttcatccagagaggtttgtgaaccttggcattgagcctcccaagggcgtgctgctctttggtccacccggtacaggcaagacactctgtgcgcgggcagttgctaatcggactgatgcgtgcttcattcgagttattggatctgagcttgtacagaaatacgtcggtgagggggctcgaatggttcgtgaactctttgaaatggccagaacaaaaaaagcctgccttatcttctttgatgaaattgatgctattggaggggctcgttttgatgatggtgctggaggtgacaatgaagtgcagagaacaatgttggaactgatcaatcagcttgatggttttgatcctagaggcaatattaaagtgctgatggccactaacagacctgatactttggatccagcactgatgaggccagggagattggatagaaaaattgaatttagcttgcccgatctagagggtcggacccacatatttaagattcacgctcgttcaatgagtgttgaaagagatatcagatttgaactgttagcacgactgtgtccaaatagcactggtgctgagattagaagcgtctgcacagaggctggtatgtttgccatcagagcacggcgaaaaattgctaccgagaaggatttcttggaagctgtaaataaggtcattaagtcttatgccaaattcagtgctactcctcgttacatgacatacaactgaaccctgaaggctttcaagtgaaaactttaaattggaatcctaaccttatatagacttgttaataaccaattcataaacaaataaatggcttcaaaattgtatgcttttttccatatctcttcttgtaatataataaaaggtgatttctaatgttattaggcagaaaagcttgttagaatatattttgactatttttttgacccacacccgtttaaggatttcacatcatacaaagcgcttgcttagatggcttctatcctaggcatatgctggccgggtgctctacatataaattctcattgtatcctcccatctgtccactgaggaagattatcaaatggatcttcatccaatggatgcataaactttcctacttacttgtagtggcaaagctggctttcaagtacaagtttgttggctccattacctatgctcctattatccgcttctgtcccgcaacaaagtagctcacttaggcgtatgaccacatgcattatgatagtttcccaccaccatattgaataataaaagctttggccaaagcttttttaaagtaggagaaacattggatgtatatgttttgcattgccatttgatttcaaattaatcaggaagaattagtgattttaatgagcagtaaagtggtgcaataaagcagaaagaaaaatgttcagccagaagtgaaagactagtaaaaaaagaaaaaaaaatatttgtacatatgatctaatttagaaagtccagaattggcttcatacagaaaagtgattactttcattttacaaattactttaaaattttggtaaagtttctgttaggcttctggtctacagtgaggtattttaaaaataaaggttatattagaatcctcaacatctctttaaaattacctcctgtgtaaccaccaccaaatcctatcttctaccacaattaccccttcccccaatgccaagaccaaagcacaataatgaatatttttattgaagttcgatattcataaataagttgcaaaataagagttggatatatttttaattcacaatagaaaaagttgacaacatagaaaatgctgctttgcactgaaatacttaaaattatgaaagttttcaagtaaagaaattaaagccttttataaaatccaaccaacattcttgatttttcatttttatgaacttgatcagaaaaattcatcttttttaaccctgccctaatttttcttgaggaattaaatagagcaaactattttcaggttatgcttacaataaaatatacttaagaaaatgactgaagatgtatgtttttgaatgttttgattaaataaatgtacacatttag

SEQ ID NO: 170141 - DNA, 3054 bp, Homo sapiens
  Payload ID: 13512
  Gene Symbol: PSMC2
  Gene Name: proteasome 26S subunit, ATPase 2
  Uniprot ID: P35998
  ENST ID: ENST00000435765
  CDS Start-End: 412-1713
agttttcctgtaaaaaggattatattccacgtcccagtgcaatacatagaacataacctttaaaagcagttctttttatattatctttaagttcttactgctttatgtattaatctgaacctaatcagtgattttcccaggagcgctatacttttaagtaaaaaatgaaaatacctgtatgaaccagtatcgacgactagtatatacatttgcggagaattacgtaatcagtccaaaaaccagcgtgccaaagcgtttccccagggctctgtccggactctgaagcactgcataaaggggtctgtctgagcccaatttacttccggtggggaagggaaagggaagacaccaccggaagcaaggaaggtgctgtgtaatcattaaggagcggaggcttttggagctgctaaaatgccggattacctcggtgccgatcagcggaagaccaaagaggatgagaaggacgacaagcccatccgagctctggatgagggggatattgccttgttgaaaacttatggtcagagcacttactctaggcagatcaagcaagttgaagatgacattcagcaacttctcaagaaaattaatgagctcactggtattaaagaatctgacactggcctggccccaccagcactctgggatttggctgcagataagcagacactccagagtgaacagcctttacaggttgccaggtgtacaaagataatcaatgctgattcggaggacccaaaatacattatcaacgtaaagcagtttgccaagtttgtggtggaccttagtgatcaggtggcacctactgacattgaagaagggatgagagtgggcgtggatagaaataaatatcaaattcacattccattgcctcctaagattgacccaacagttaccatgatgcaggtggaagagaaacctgatgtcacatacagtgatgttggtggctgtaaggaacagattgagaaactgcgagaagtagttgaaaccccattacttcatccagagaggtttgtgaaccttggcattgagcctcccaagggcgtgctgctctttggtccacccggtacaggcaagacactctgtgcgcgggcagttgctaatcggactgatgcgtgcttcattcgagttattggatctgagcttgtacagaaatacgtcggtgagggggctcgaatggttcgtgaactctttgaaatggccagaacaaaaaaagcctgccttatcttctttgatgaaattgatgctattggaggggctcgttttgatgatggtgctggaggtgacaatgaagtgcagagaacaatgttggaactgatcaatcagcttgatggttttgatcctagaggcaatattaaagtgctgatggccactaacagacctgatactttggatccagcactgatgaggccagggagattggatagaaaaattgaatttagcttgcccgatctagagggtcggacccacatatttaagattcacgctcgttcaatgagtgttgaaagagatatcagatttgaactgttagcacgactgtgtccaaatagcactggtgctgagattagaagcgtctgcacagaggctggtatgtttgccatcagagcacggcgaaaaattgctaccgagaaggatttcttggaagctgtaaataaggtcattaagtcttatgccaaattcagtgctactcctcgttacatgacatacaactgaaccctgaaggctttcaagtgaaaactttaaattggaatcctaaccttatatagacttgttaataaccaattcataaacaaataaatggcttcaaaattgtatgcttttttccatatctcttcttgtaatataataaaaggtgatttctaatgttattaggcagaaaagcttgttagaatatattttgactatttttttgacccacacccgtttaaggatttcacatcatacaaagcgcttgcttagatggcttctatcctaggcatatgctggccgggtgctctacatataaattctcattgtatcctcccatctgtccactgaggaagattatcaaatggatcttcatccaatggatgcataaactttcctacttacttgtagtggcaaagctggctttcaagtacaagtttgttggctccattacctatgctcctattatccgcttctgtcccgcaacaaagtagctcacttaggcgtatgaccacatgcattatgatagtttcccaccaccatattgaataataaaagctttggccaaagcttttttaaagtaggagaaacattggatgtatatgttttgcattgccatttgatttcaaattaatcaggaagaattagtgattttaatgagcagtaaagtggtgcaataaagcagaaagaaaaatgttcagccagaagtgaaagactagtaaaaaaagaaaaaaaaatatttgtacatatgatctaatttagaaagtccagaattggcttcatacagaaaagtgattactttcattttacaaattactttaaaattttggtaaagtttctgttaggcttctggtctacagtgaggtattttaaaaataaaggttatattagaatcctcaacatctctttaaaattacctcctgtgtaaccaccaccaaatcctatcttctaccacaattaccccttcccccaatgccaagaccaaagcacaataatgaatatttttattgaagttcgatattcataaataagttgcaaaataagagttggatatatttttaattcacaatagaaaaagttgacaacatagaaaatgctgctttgcactgaaatacttaaaattatgaaagttttcaagtaaagaaattaaagccttttataaaatccaaccaacattcttgatttttcatttttatgaacttgatcagaaaaattcatcttttttaaccctgccctaatttttcttgaggaattaaatagagcaaactattttcaggttatgcttacaataaaatatacttaagaaaatgactgaagatgtatgtttttgaatgttttgattaaataaatgtacacatttagaacaca

SEQ ID NO: 170142 - DNA, 656 bp, Homo sapiens
  Payload ID: 13512
  Gene Symbol: PSMC2
  Gene Name: proteasome 26S subunit, ATPase 2
  ENST ID: ENST00000425206
  CDS Start-End: 266-656
ctggggtgctggggggttccgtcccgaaatgctcagcccaatccatgagtcagcagcggcgagaggaggaagcaacggtaatcagtccaaaaaccagcgtgccaaagcgtttccccagggctctgtccggactctgaagcactgcataaaggggtctgtctgagcccaatttacttccggtggggaagggaaagggaagacaccaccggaagcaaggaaggtgctgtgtaatcattaaggagcggaggcttttggagctgctaaaatgccggattacctcggtgccgatcagcggaagaccaaagaggatgagaaggacgacaagcccatccgagctctggatgagggggatattgccttgttgaaaacttatggtcagagcacttactctaggcagatcaagcaagttgaagatgacattcagcaacttctcaagaaaattaatgagctcactggtattaaagaatctgacactggcctggccccaccagcactctgggatttggctgcagataagcagacactccagagtgaacagcctttacaggttgccaggtgtacaaagataatcaatgctgattcggaggacccaaaatacattatcaacgtaaagcagtttgccaagtttgtggtggaccttagtgatcaggtggcac

SEQ ID NO: 170143 - DNA, 682 bp, Homo sapiens
  Payload ID: 13512
  Gene Symbol: PSMC2
  Gene Name: proteasome 26S subunit, ATPase 2
  ENST ID: ENST00000457587
  CDS Start-End: 292-682
atgagaacctttctggggtgctggggggttccgtcccgaaatgctcagcccaatccatgagtcagcagcggcgagaggaggaagcaacgtttccttctcacaggtaatcagtccaaaaaccagcgtgccaaagcgtttccccagggctctgtccggactctgaagcactgcataaaggggtctgtctgagcccaatttacttccggtggggaagggaaagggaagacaccaccggaagcaaggaaggtgctgtgtaatcattaaggagcggaggcttttggagctgctaaaatgccggattacctcggtgccgatcagcggaagaccaaagaggatgagaaggacgacaagcccatccgagctctggatgagggggatattgccttgttgaaaacttatggtcagagcacttactctaggcagatcaagcaagttgaagatgacattcagcaacttctcaagaaaattaatgagctcactggtattaaagaatctgacactggcctggccccaccagcactctgggatttggctgcagataagcagacactccagagtgaacagcctttacaggttgccaggtgtacaaagataatcaatgctgattcggaggacccaaaatacattatcaacgtaaagcagtttgccaagtttgtggtggaccttagtgatcaggtggcac

SEQ ID NO: 170144 - DNA, 1544 bp, Homo sapiens
  Payload ID: 13513
  Gene Symbol: PSMC3
  Gene Name: proteasome 26S subunit, ATPase 3
  Uniprot ID: P17980
  ENST ID: ENST00000298852
  CDS Start-End: 159-1478
attcgctgctccgcagcacggccggagctggtcgggtcaagagtcgggatttgtggggagaggttttccactggtcaagagaaggctttaagaaagacggtattaatctcccgttgcggctcccgcctggtcccatcttctgcccgctcctccaggaaatgaatctgctgccgaatattgagagtccagtgactcggcaggagaagatggcgaccgtgtgggatgaggccgagcaagatggaattggggaggaggtgctcaagatgtccacggaggagatcatccagcgcacacggctgctggacagtgagatcaagatcatgaagagtgaagtgttgagagtcacccatgagctccaagccatgaaggacaagataaaagagaacagtgagaaaatcaaagtgaacaagaccctgccgtaccttgtctccaacgtcatcgagctcctggatgttgatcctaatgaccaagaggaggatggtgccaatattgacctggactcccagaggaagggcaagtgtgctgtgatcaaaacctctacacgacagacgtacttccttcctgtgattgggttggtggatgctgaaaagctaaagccaggagacctggtgggtgtgaacaaagactcctatctgatcctggagacgctgcccacagagtatgactcgcgggtgaaggccatggaggtagacgagaggcccacggagcaatacagtgacattgggggtttggacaagcagatccaggagctggtggaggccattgtcttgccaatgaaccacaaggagaagtttgagaacttggggatccaacctccaaaaggggtgctgatgtatgggcccccagggacggggaagaccctcctggcccgggcctgtgccgcacagactaaggccaccttcctaaagctggctggcccccagctggtgcagatgttcattggagatggtgccaagctagtccgggatgcctttgccctggccaaggagaaagcgccctctatcatcttcattgatgagttggatgccatcggcaccaagcgctttgacagtgagaaggctggggaccgggaggtgcagaggacaatgctggagcttctgaaccagctggatggcttccagcccaacacccaagttaaggtaattgcagccacaaacagggtggacatcctggaccccgccctcctccgctcgggccgccttgaccgcaagatagagttcccgatgcccaatgaggaggcccgggccagaatcatgcagatccactcccgaaagatgaatgtcagtcctgacgtgaactacgaggagctggcccgctgcacagatgacttcaatggggcccagtgcaaggctgtgtgtgtggaggcgggcatgatcgcactgcgcaggggtgccacggagctcacccacgaggactacatggaaggcatcctggaggtgcaggccaagaagaaagccaacctacaatactacgcctagggcacacaggccagccccagtctcacggctgaagtgcgcaataaaagatggtttagggtccctgcc

SEQ ID NO: 170145 - DNA, 905 bp, Homo sapiens
  Payload ID: 13513
  Gene Symbol: PSMC3
  Gene Name: proteasome 26S subunit, ATPase 3
  ENST ID: ENST00000530651
  CDS Start-End: 1-905
gatgaggccgaggtgggcaccgggcgagctggcggtccgggaaccggggcccgcagggagacgccattgacaagagggaaggaggtggctgggggtcaagatggaattggggaggaggtgctcaagatgtccacggaggagatcatccagcgcacacggctgctggacagtgagatcaagatcatgaagagtgaagtgttgagagtcacccatgagctccaagccatgaaggacaagataaaagagaacagtgagaaaatcaaagtgaacaagaccctgccgtaccttgtctccaacgtcatcgagctcctggatgttgatcctaatgaccaagaggaggatggtgccaatattgacctggactcccagaggaagggcaagtgtgctgtgatcaaaacctctacacgacagacgtacttccttcctgtgattgggttggtggatgctgaaaagctaaagccaggagacctggtgggtgtgaacaaagactcctatctgatcctggagacgctgcccacagagtatgactcgcgggtgaaggccatggaggtagacgagaggcccacggagcaatacagtgacattgggggtttggacaagcagatccaggagctggtggaggccattgtcttgccaatgaaccacaaggagaagtttgagaacttggggatccaacctccaaaaggggtgctgatgtatgggcccccagggacggggaagaccctcctggcccgggcctgtgccgcacagactaaggccaccttcctaaagctggctggcccccagctggtgcagatgttcattggagatggtgccaagctagtccgggatgcctttgccctggccaaggagaaagcgccctctatcatcttcattgatgagttggatgccatcggcaccaagcg

SEQ ID NO: 170146 - DNA, 604 bp, Homo sapiens
  Payload ID: 13513
  Gene Symbol: PSMC3
  Gene Name: proteasome 26S subunit, ATPase 3
  ENST ID: ENST00000527906
  CDS Start-End: 25-138
agtccagtgactcggcaggagaagatggcgaccgtgtgggatgaggccgagatggaattggggaggaggtgctcaagatgtccacggaggagatcatccagcgcacacggctgctggacagtgagatcaagatcatgaagagtgaagtgttgagagtcacccatgagctccaagccatgaaggacaagataaaagagaacagtgagaaaatcaaagtgaacaagaccctgccgtaccttgtctccaacgtcatcgagctcctggatgttgatcctaatgaccaagaggaggatggtgccaatattgacctggactcccagaggaagggcaagtgtgctgtgatcaaaacctctacacgacagacgtacttccttcctgtgattgggttggtggatgctgaaaagctaaagccaggagacctggtgggtgtgaacaaagactcctatctgatcctggagacgctgcccacagagtatgactcgcgggtgaaggccatggaggtagacgagaggcccacggagcaatacagtgacattgggggtttggacaagcagatccaggagctggtggaggccattgtcttgccaatgaaccacaaggagaa

SEQ ID NO: 170147 - DNA, 777 bp, Homo sapiens
  Payload ID: 13513
  Gene Symbol: PSMC3
  Gene Name: proteasome 26S subunit, ATPase 3
  ENST ID: ENST00000531051
  CDS Start-End: 5-777
gaagatggcgaccgtgtgggatgaggccgagcaagatggaattggggaggaggtgctcaagatgtccacggaggagatcatccagcgcacacggctgctggacagtgagatcaagatcatgaagagtgaagtgttgagagtcacccatgagctccaagccatgaaggacaagataaaagagaacagtgagaaaatcaaagtgaacaagaccctgccgtaccttgtctccaacgtcatcgagctcctggatgttgatcctaatgaccaagaggaggatggtgccaatattgacctggactcccagaggaagggcaagtgtgctgtgatcaaaacctctacacgacagggtgtgaacaaagactcctatctgatcctggagacgctgcccacagagtatgactcgcgggtgaaggccatggaggtagacgagaggcccacggagcaatacagtgacattgggggtttggacaagcagatccaggagctggtggaggccattgtcttgccaatgaaccacaaggagaagtttgagaacttggggatccaacctccaaaaggggtgctgatgtatgggcccccagggacggggaagaccctcctggcccgggcctgtgccgcacagactaaggccaccttcctaaagctggctggcccccagctggtgcagatgttcattggagatggtgccaagctagtccgggatgcctttgccctggccaaggagaaagcgccctctatcatcttcattgatgagttggatgccatcggcaccaagcg

SEQ ID NO: 170148 - DNA, 1390 bp, Homo sapiens
  Payload ID: 13513
  Gene Symbol: PSMC3
  Gene Name: proteasome 26S subunit, ATPase 3
  ENST ID: ENST00000530912
  CDS Start-End: 164-1357
ggcagattcgctgctccgcagcacggccggagctggtcgggtcaagagtcgggatttgtggggagaggttttccactggtcaagagaaggctttaagaaagacggtattaatctcccgttgcggctcccgcctggtcccatcttctgcccgctcctccaggaaatgaatctgctgccgaatattgagagtccagtgactcggcaggagaagatggcgaccgtgtgggatgaggccgagcaagatggaattggggaggaggtgctcaagatgtccacggaggagatcatccagcgcacacggctgctggacagtgagatcaagctcctggatgttgatcctaatgaccaagaggaggatggtgccaatattgacctggactcccagaggaagggcaagtgtgctgtgatcaaaacctctacacgacagacgtacttccttcctgtgattgggttggtggatgctgaaaagctaaagccaggagacctggtgggtgtgaacaaagactcctatctgatcctggagacgctgcccacagagtatgactcgcgggtgaaggccatggaggtagacgagaggcccacggagcaatacagtgacattgggggtttggacaagcagatccaggagctggtggaggccattgtcttgccaatgaaccacaaggagaagtttgagaacttggggatccaacctccaaaaggggtgctgatgtatgggcccccagggacggggaagaccctcctggcccgggcctgtgccgcacagactaaggccaccttcctaaagctggctggcccccagctggtgcagatgttcattggagatggtgccaagctagtccgggatgcctttgccctggccaaggagaaagcgccctctatcatcttcattgatgagttggatgccatcggcaccaagcgctttgacagtgagaaggctggggaccgggaggtgcagaggacaatgctggagcttctgaaccagctggatggcttccagcccaacacccaagttaaggtaattgcagccacaaacagggtggacatcctggaccccgccctcctccgctcgggccgccttgaccgcaagatagagttcccgatgcccaatgaggaggcccgggccagaatcatgcagatccactcccgaaagatgaatgtcagtcctgacgtgaactacgaggagctggcccgctgcacagatgacttcaatggggcccagtgcaaggctgtgtgtgtggaggcgggcatgatcgcactgcgcaggggtgccacggagctcacccacgaggactacatggaaggcatcctggaggtgcaggccaagaagaaagccaacctacaatactacgcctagggcacacaggccagccccagtctcacggctgaa

SEQ ID NO: 170149 - DNA, 935 bp, Homo sapiens
  Payload ID: 13513
  Gene Symbol: PSMC3
  Gene Name: proteasome 26S subunit, ATPase 3
  ENST ID: ENST00000524447
  CDS Start-End: 1-935
accgtgtgggatgaggccgagcaagatggaattggggaggaggtgctcaagatgtccacggaggagatcatccagcgcacacggctgctggacagtgagatcaagatcatgaagagtgaagtgttgagagtcacccatgagctccaagccatgaaggacaagataaaagagaacagtgagaaaatcaaagtgaacaagaccctgccgtaccttgtctccaacgtcatcgagctcctggatgttgatcctaatgaccaagaggaggatggtgccaatattgacctggactcccagaggaagggcaagtgtgctgtgatcaaaacctctacacgacagacgtacttccttcctgtgattgggttggtggatgctgaaaagctaaagccaggagacctggtgggtgtgaacaaagactcctatctgatcctggagacgctgcccacagagtatgactcgcgggtgaaggccatggagctggtggaggccattgtcttgccaatgaaccacaaggagaagtttgagaacttggggatccaacctccaaaaggggtgctgatgtatgggcccccagggacggggaagaccctcctggcccgggcctgtgccgcacagactaaggccaccttcctaaagctggctggcccccagctggtgcagatgttcattggagatggtgccaagctagtccgggatgcctttgccctggccaaggagaaagcgccctctatcatcttcattgatgagttggatgccatcggcaccaagcgctttgacagtgagaaggctggggaccgggaggtgcagaggacaatgctggagcttctgaaccagctggatggcttccagcccaacacccaagttaaggtaattgcagccacaaacagggtggacatcctggaccccgccctcctccgctcgggccgccttgaccgcaa

SEQ ID NO: 170150 - DNA, 580 bp, Homo sapiens
  Payload ID: 13513
  Gene Symbol: PSMC3
  Gene Name: proteasome 26S subunit, ATPase 3
  ENST ID: ENST00000526993
  CDS Start-End: 28-580
gagagtccagtgactcggcaggagaagatggcgaccgtgtgggatgaggccgaggtgggcaccgggcgagctggcggtccgggaaccggggcccgcagggagacgccattgacaagagggaaggagcaagatggaattggggaggaggtgctcaagatgtccacggaggagatcatccagcgcacacggctgctggacagtgagatcaagatcatgaagagtgaagtgttgagagtcacccatgagctccaagccatgaaggacaagataaaagagaacagtgagaaaatcaaagtgaacaagaccctgccgtaccttgtctccaacgtcatcgagctcctggatgttgatcctaatgaccaagaggaggatggtgccaatattgacctggactcccagaggaagggcaagtgtgctgtgatcaaaacctctacacgacagacgtacttccttcctgtgattgggttggtggatgctgaaaagctaaagccaggagacctggtgggtgtgaacaaagactcctatctgatcctggagacgctgcccacagagtatgactcgcgggtgaaggccatggagg

SEQ ID NO: 170151 - DNA, 891 bp, Homo sapiens
  Payload ID: 13513
  Gene Symbol: PSMC3
  Gene Name: proteasome 26S subunit, ATPase 3
  ENST ID: ENST00000530887
  CDS Start-End: 1-159
accgggcgagctggcggtccgggaaccggggcccgcagggagacgccattgacaagagggaaggaggtggctgggggtcaagcaagatggaattggggaggaggtgctcaagatgtccacggaggagatcatccagcgcacacggctgctggacagtgagatcaagatcatgaagagtgaagtgttgagagtcacccatgagctccaagccatgaaggacaagataaaagagaacagtgagaaaatcaaagtgaacaagaccctgccgtaccttgtctccaacgtcatcgagctcctggatgttgatcctaatgaccaagaggaggatggtgccaatattgacctggactcccagaggaagggcaagtgtgctgtgatcaaaacctctacacgacagacgtacttccttcctgtgattgggttggtggatgctgaaaagctaaagccaggagacctggtgggtgtgaacaaagactcctatctgatcctggagacgctgcccacagagtatgactcgcgggtgaaggccatggaggtagacgagaggcccacggagcaatacagtgacattgggggtttggacaagcagatccaggagctggtggaggccattgtcttgccaatgaaccacaaggagaagtttgagaacttggggatccaacctccaaaaggggtgctgatgtatgggcccccagggacggggaagaccctcctggcccgggcctgtgccgcacagactaaggccaccttcctaaagctggctggcccccagctggtgcagatgttcattggagatggtgccaagctagtccgggatgcctttgccctggccaaggagaaagcgccctctatcatcttcattgatgagttggatgccatcggcaccaagcg

SEQ ID NO: 170152 - DNA, 1373 bp, Homo sapiens
  Payload ID: 13513
  Gene Symbol: PSMC3
  Gene Name: proteasome 26S subunit, ATPase 3
  ENST ID: ENST00000602866
  CDS Start-End: 36-1307
cgaatattgagagtccagtgactcggcaggagaagatggcgaccgtgtgggatgaggccgagcaagatggaattggggaggaggtgctcaagatgtccacggaggagatcatccagcgcacacggctgctggacagtgagatcaagatcatgaagagtgaagtgttgagagtcacccatgagctccaagccatgaaggacaagataaaagagaacagtgagaaaatcaaagtgaacaagaccctgccgtaccttgtctccaacgtcatcgagctcctggatgttgatcctaatgaccaagaggaggatggtgccaatattgacctggactcccagaggaagggcaagtgtgctgtgatcaaaacctctacacgacagacgtacttccttcctgtgattgggttggtggatgctgaaaagctaaagccaggagacctggtgggtgtgaacaaagactcctatctgatcctggagacgctgcccacagagtatgactcgcgggtgaaggccatggaggtagacgagaggcccacggagcaatacagtgacattgggggtttggacaagcagatccaggagctggtggaggccattgtcttgccaatgaaccacaaggagaagtttgagaacttggggatccaacctccaaaaggggtgctgatgtatgggcccccagggacggggaagaccctcctggcccgggcctgtgccgcacagactaaggccaccttcctaaagctggctggcccccagctggtgcagatgttcattggagatggtgccaagctagtccgggatgcctttgccctggccaaggagaaagcgccctctatcatcttcattgatgagttggatgccatcggcaccaagcgctttgacagtgagaaggctggggaccgggaggtgcagaggacaatgctggagcttctgaaccagctggatggcttccagcccaacacccaagttaaggtaattgcagccacaaacagggtggacatcctggaccccgccctcctccgctcgggccgccttgaccgcaagatagagttcccgatgcccaatgaggaggcccgggccagaatcatgcagatccactcccgaaagatgaatgtcagtcctgacgtgaactacgaggagctggcccgctgcacagatgacttcaatggggcccagtgcaaggctgtgtgtgtggaggcgggcatgatcgcactgcgcaggggtgccacggagctcacccacgaggactacatggaaggcatcctggaggtgcaggccaagaagaaagccaacctacaatactacgcctagggcacacaggccagccccagtctcacggctgaagtgcgcaataaaagatggtttagggtccctgcc

SEQ ID NO: 170153 - DNA, 1580 bp, Homo sapiens
  Payload ID: 13513
  Gene Symbol: PSMC3
  Gene Name: proteasome 26S subunit, ATPase 3
  Uniprot ID: P17980
  ENST ID: ENST00000619920
  CDS Start-End: 195-1514
gtggccaggggttggtctttggaatcggagaggcagattcgctgctccgcagcacggccggagctggtcgggtcaagagtcgggatttgtggggagaggttttccactggtcaagagaaggctttaagaaagacggtattaatctcccgttgcggctcccgcctggtcccatcttctgcccgctcctccaggaaatgaatctgctgccgaatattgagagtccagtgactcggcaggagaagatggcgaccgtgtgggatgaggccgagcaagatggaattggggaggaggtgctcaagatgtccacggaggagatcatccagcgcacacggctgctggacagtgagatcaagatcatgaagagtgaagtgttgagagtcacccatgagctccaagccatgaaggacaagataaaagagaacagtgagaaaatcaaagtgaacaagaccctgccgtaccttgtctccaacgtcatcgagctcctggatgttgatcctaatgaccaagaggaggatggtgccaatattgacctggactcccagaggaagggcaagtgtgctgtgatcaaaacctctacacgacagacgtacttccttcctgtgattgggttggtggatgctgaaaagctaaagccaggagacctggtgggtgtgaacaaagactcctatctgatcctggagacgctgcccacagagtatgactcgcgggtgaaggccatggaggtagacgagaggcccacggagcaatacagtgacattgggggtttggacaagcagatccaggagctggtggaggccattgtcttgccaatgaaccacaaggagaagtttgagaacttggggatccaacctccaaaaggggtgctgatgtatgggcccccagggacggggaagaccctcctggcccgggcctgtgccgcacagactaaggccaccttcctaaagctggctggcccccagctggtgcagatgttcattggagatggtgccaagctagtccgggatgcctttgccctggccaaggagaaagcgccctctatcatcttcattgatgagttggatgccatcggcaccaagcgctttgacagtgagaaggctggggaccgggaggtgcagaggacaatgctggagcttctgaaccagctggatggcttccagcccaacacccaagttaaggtaattgcagccacaaacagggtggacatcctggaccccgccctcctccgctcgggccgccttgaccgcaagatagagttcccgatgcccaatgaggaggcccgggccagaatcatgcagatccactcccgaaagatgaatgtcagtcctgacgtgaactacgaggagctggcccgctgcacagatgacttcaatggggcccagtgcaaggctgtgtgtgtggaggcgggcatgatcgcactgcgcaggggtgccacggagctcacccacgaggactacatggaaggcatcctggaggtgcaggccaagaagaaagccaacctacaatactacgcctagggcacacaggccagccccagtctcacggctgaagtgcgcaataaaagatggtttagggtccctgcc

SEQ ID NO: 170154 - DNA, 1591 bp, Homo sapiens
  Payload ID: 13514
  Gene Symbol: PSMC4
  Gene Name: proteasome 26S subunit, ATPase 4
  Uniprot ID: P43686
  ENST ID: ENST00000157812
  CDS Start-End: 199-1455
tgcgggtacggacagcgcatgagcttatgttgagggcggagcccagaccagcccttcgtcctatcctgcccttccagcacctctcagccgtaacttaaactacacttcccagaagcctcctcagccagggacttccgttgtcgtcagcggaagcggtgacagatcatcccaggccacacagaggccggcttggtcactatggaggagataggcatcttggtggagaaggctcaggatgagatcccagcactgtccgtgtcccggccccagaccggcctgtccttcctgggccctgagcctgaggacctggaggacctgtacagccgctacaagaagctgcagcaagagctggagttcctggaggtgcaggaggaatacatcaaagatgagcaaaagaacctgaaaaaggaatttctccatgcccaggaggaggtgaagcgaatccaaagcatcccgctggtcatcggacaatttctggaggctgtggatcagaatacagccatcgtgggctctaccacaggctccaactattatgtgcgcatcctgagcaccatcgatcgggagctgctcaagcccaacgcctcagtggccctccacaagcacagcaatgcactggtggacgtgctgccccccgaagccgacagcagcatcatgatgctcacctcagaccagaagccagatgtgatgtacgcggacatcggaggcatggacatccagaagcaggaggtgcgggaggccgtggagctcccgctcacgcatttcgagctctacaagcagatcggcatcgatcccccccgaggcgtcctcatgtatggcccacctggctgtgggaagaccatgttggcaaaggcggtggcacatcacacaacagctgcattcatccgggtcgtgggctcggagtttgtacagaagtatctgggtgagggcccccgcatggtccgggatgtgttccgcctggccaaggagaatgcacctgccatcatcttcatagacgagattgatgccatcgccaccaagagattcgatgctcagacaggggccgacagggaggttcagaggatcctgctggagctgctgaatcagatggatggatttgatcagaatgtcaatgtcaaggtaatcatggccacaaacagagcagacaccctggatccggccctgctacggccaggacggctggaccgtaaaattgaatttccacttcctgaccgccgccagaagagattgattttctccactatcactagcaagatgaacctctctgaggaggttgacttggaagactatgtggcccggccagataagatttcaggagctgatattaactccatctgtcaggagagtggaatgttggctgtccgtgaaaaccgctacattgtcctggccaaggacttcgagaaagcatacaagactgtcatcaagaaggacgagcaggagcatgagttttacaagtgacccttcccttccctccaccacaccactcaggggctggggcttctctcgcacccccagcacctctgtcccaaaacctcattcccttttttctttacccaggattggtttcttcaataaatagataagatcgaatcca

SEQ ID NO: 170155 - DNA, 1333 bp, Homo sapiens
  Payload ID: 13514
  Gene Symbol: PSMC4
  Gene Name: proteasome 26S subunit, ATPase 4
  Uniprot ID: P43686
  ENST ID: ENST00000455878
  CDS Start-End: 34-1197
atcccaggccacacagaggccggcttggtcactatggaggagataggcatcttggtggagaaggctcaggatgagatcccagcactgtccgtgtcccggccccagaccggcctgtccttcctgggccctgagcctgaggacctggaggacctgtacagccgctacaaggaggaggtgaagcgaatccaaagcatcccgctggtcatcggacaatttctggaggctgtggatcagaatacagccatcgtgggctctaccacaggctccaactattatgtgcgcatcctgagcaccatcgatcgggagctgctcaagcccaacgcctcagtggccctccacaagcacagcaatgcactggtggacgtgctgccccccgaagccgacagcagcatcatgatgctcacctcagaccagaagccagatgtgatgtacgcggacatcggaggcatggacatccagaagcaggaggtgcgggaggccgtggagctcccgctcacgcatttcgagctctacaagcagatcggcatcgatcccccccgaggcgtcctcatgtatggcccacctggctgtgggaagaccatgttggcaaaggcggtggcacatcacacaacagctgcattcatccgggtcgtgggctcggagtttgtacagaagtatctgggtgagggcccccgcatggtccgggatgtgttccgcctggccaaggagaatgcacctgccatcatcttcatagacgagattgatgccatcgccaccaagagattcgatgctcagacaggggccgacagggaggttcagaggatcctgctggagctgctgaatcagatggatggatttgatcagaatgtcaatgtcaaggtaatcatggccacaaacagagcagacaccctggatccggccctgctacggccaggacggctggaccgtaaaattgaatttccacttcctgaccgccgccagaagagattgattttctccactatcactagcaagatgaacctctctgaggaggttgacttggaagactatgtggcccggccagataagatttcaggagctgatattaactccatctgtcaggagagtggaatgttggctgtccgtgaaaaccgctacattgtcctggccaaggacttcgagaaagcatacaagactgtcatcaagaaggacgagcaggagcatgagttttacaagtgacccttcccttccctccaccacaccactcaggggctggggcttctctcgcacccccagcacctctgtcccaaaacctcattcccttttttctttacccaggattggtttcttcaataaatagataagatcgaatcca

SEQ ID NO: 170156 - DNA, 1333 bp, Homo sapiens; identical to SEQ ID NO: 170155
  Payload ID: 13514
  Gene Symbol: PSMC4
  Gene Name: Proteasome 26S subunit, ATPase 4
  ENST ID: ENST00000630857
  CDS Start-End: 34-1197

SEQ ID NO: 170157 - DNA, 1591 bp, Homo sapiens; identical to SEQ ID NO: 170154
  Payload ID: 13514
  Gene Symbol: PSMC4
  Gene Name: Proteasome 26S subunit, ATPase 4
  ENST ID: ENST00000629691
  CDS Start-End: 199-1455

SEQ ID NO: 170158 - DNA, 1579 bp, Homo sapiens
  Payload ID: 13515
  Gene Symbol: PSMC5
  Gene Name: proteasome 26S subunit, ATPase 5
  Uniprot ID: P62195
  ENST ID: ENST00000310144
  CDS Start-End: 309-1529
ctcaatactctgtccttgggttttgtaagttgaaagttgagactaggaaggcatatcacaagaactataaacagagtttcaatgaggcaacactgaggaggagttctactccttcctcatccccttccaaagcccctgaactcgagtagccgcccctcccatcatggttcccttagtgtggtctcgccgcacaccccgcccattgacccggaattcttctctgcctggtcttcaggtcccaatcctccgcttccgcgcttgcgcgccaagacggctcggatgccggcggtctctgctgaagagagaagatggcgcttgacggaccagagcagatggagctggaggaggggaaggcaggcagcggactccgccaatattatctgtccaagattgaagaactccagctgattgtgaatgataagagccaaaacctccggaggctgcaggcacagaggaacgaactaaatgctaaagttcgcctattgcgggaggagctacagctgctgcaggagcagggctcctatgtgggggaagtagtccgggccatggataagaagaaagtgttggtcaaggtacatcctgaaggtaaatttgttgtagacgtggacaaaaacattgacatcaatgatgtgacacccaattgccgggtggctctaaggaatgacagctacactctgcacaagatcctgcccaacaaggtagacccattagtgtcactgatgatggtggagaaagtaccagattcaacttatgagatgattggtggactggacaaacagatcaaggagatcaaagaagtgatcgagctgcctgttaagcatcctgagctcttcgaagcactgggcattgctcagcccaagggagtgctgctgtatggacctccaggcactgggaagacactgttggcccgggctgtggctcatcatacggactgtacctttattcgtgtctctggctctgaactggtacagaaattcataggggaaggggcaagaatggtgagggagctgtttgtcatggcacgggaacatgctccatctatcatcttcatggacgaaatcgactccatcggctcctcgcggctggaggggggttctggaggggacagtgaagtgcagcgcacgatgctggagttgctcaaccagctcgacggctttgaggccaccaagaacatcaaggttatcatggctactaataggattgatatcctggactcggcactgcttcgcccagggcgcattgacagaaaaattgaattcccaccccccaatgaggaggcccggctggacattttgaagattcattctcggaagatgaacctgacccgggggatcaacctgagaaaaattgctgagctcatgccaggagcatcaggggctgaagtgaagggcgtgtgcacagaagctggcatgtatgccctgcgagaacggcgagtccatgtcactcaggaggactttgagatggcagtagccaaggtcatgcagaaggacagtgagaaaaacatgtccatcaagaaattatggaagtgagtggacagcctttgtgtgtatctctccaataaagctctgtgggccaagtc

SEQ ID NO: 170159 - DNA, 1494 bp, Homo sapiens
  Payload ID: 13515
  Gene Symbol: PSMC5
  Gene Name: proteasome 26S subunit, ATPase 5
  Uniprot ID: P62195
  ENST ID: ENST00000375812
  CDS Start-End: 241-1437
ggtgagtcagggcaaggctgggagaggaagacgcggtagaagcggagtgagtgagggaagcgatgggcgcgggaatggccggcccacgggtcgcaggagacgggacgccagtcctttggctccgttccgctggctccttcgtcagtactgacacctcgggcttgtagagcacttcacgcagtgcaaagcgccccccgtctatatcatatcgcctctcggtcctcctaaaagtcgtatgagatggagctggaggaggggaaggcaggcagcggactccgccaatattatctgtccaagattgaagaactccagctgattgtgaatgataagagccaaaacctccggaggctgcaggcacagaggaacgaactaaatgctaaagttcgcctattgcgggaggagctacagctgctgcaggagcagggctcctatgtgggggaagtagtccgggccatggataagaagaaagtgttggtcaaggtacatcctgaaggtaaatttgttgtagacgtggacaaaaacattgacatcaatgatgtgacacccaattgccgggtggctctaaggaatgacagctacactctgcacaagatcctgcccaacaaggtagacccattagtgtcactgatgatggtggagaaagtaccagattcaacttatgagatgattggtggactggacaaacagatcaaggagatcaaagaagtgatcgagctgcctgttaagcatcctgagctcttcgaagcactgggcattgctcagcccaagggagtgctgctgtatggacctccaggcactgggaagacactgttggcccgggctgtggctcatcatacggactgtacctttattcgtgtctctggctctgaactggtacagaaattcataggggaaggggcaagaatggtgagggagctgtttgtcatggcacgggaacatgctccatctatcatcttcatggacgaaatcgactccatcggctcctcgcggctggaggggggttctggaggggacagtgaagtgcagcgcacgatgctggagttgctcaaccagctcgacggctttgaggccaccaagaacatcaaggttatcatggctactaataggattgatatcctggactcggcactgcttcgcccagggcgcattgacagaaaaattgaattcccaccccccaatgaggaggcccggctggacattttgaagattcattctcggaagatgaacctgacccgggggatcaacctgagaaaaattgctgagctcatgccaggagcatcaggggctgaagtgaagggcgtgtgcacagaagctggcatgtatgccctgcgagaacggcgagtccatgtcactcaggaggactttgagatggcagtagccaaggtcatgcagaaggacagtgagaaaaacatgtccatcaagaaattatggaagtgagtggacagcctttgtgtgtatctctccaataaagctctgtgggccaagtcctctagg

SEQ ID NO: 170160 - DNA, 804 bp, Homo sapiens
  Payload ID: 13515
  Gene Symbol: PSMC5
  Gene Name: proteasome 26S subunit, ATPase 5
  ENST ID: ENST00000584320
  CDS Start-End: 80-804
ggctcggatgccggcggtctctgctgaagagagaagatggcgcttgacggaccagagcagactcactctgtgtcttcagatggagctggaggaggggaaggcaggcagcggactccgccaatattatctgtccaagattgaagaactccagctgattgtgaatgataagagccaaaacctccggaggctgcaggcacagaggaacgaactaaatgctaaagttcgcctattgcgggaggagctacagctgctgcaggagcagggctcctatgtgggggaagtagtccgggccatggataagaagaaagtgttggtcaaggtacatcctgaaggtaaatttgttgtagacgtggacaaaaacattgacatcaatgatgtgacacccaattgccgggtggctctaaggaatgacagctacactctgcacaagatcctgcccaacaaggtagacccattagtgtcactgatgatggtggagaaagtaccagattcaacttatgagatgattggtggactggacaaacagatcaaggagatcaaagaagtgatcgagctgcctgttaagcatcctgagctcttcgaagcactgggcattgctcagcccaagggagtgctgctgtatggacctccaggcactgggaagacactgttggcccgggctgtggctcatcatacggactgtacctttattcgtgtctctggctctgaactggtacagaaattcataggggaaggggcaagaatggtgagggagctgtttgtcatggcacgggaacatgctccatctatcatcttcatggacga

SEQ ID NO: 170161 - DNA, 1552 bp, Homo sapiens
  Payload ID: 13515
  Gene Symbol: PSMC5
  Gene Name: proteasome 26S subunit, ATPase 5
  Uniprot ID: P62195
  ENST ID: ENST00000580864
  CDS Start-End: 306-1502
ggatgccggcggtctctgctgaagagagaagatggcgcttgacggaccagagcagcgccgccctcggtgagtcagggcaaggctgggagaggaagacgcggtagaagcggagtgagtgagggaagcgatgggcgcgggaatggccggcccacgggtcgcaggagacgggacgccagtcctttggctccgttccgctggctccttcgtcagtactgacacctcgggcttgtagagcacttcacgcagtgcaaagcgccccccgtctatatcatatcgcctctcggtcctcctaaaagtcgtatgagatggagctggaggaggggaaggcaggcagcggactccgccaatattatctgtccaagattgaagaactccagctgattgtgaatgataagagccaaaacctccggaggctgcaggcacagaggaacgaactaaatgctaaagttcgcctattgcgggaggagctacagctgctgcaggagcagggctcctatgtgggggaagtagtccgggccatggataagaagaaagtgttggtcaaggtacatcctgaaggtaaatttgttgtagacgtggacaaaaacattgacatcaatgatgtgacacccaattgccgggtggctctaaggaatgacagctacactctgcacaagatcctgcccaacaaggtagacccattagtgtcactgatgatggtggagaaagtaccagattcaacttatgagatgattggtggactggacaaacagatcaaggagatcaaagaagtgatcgagctgcctgttaagcatcctgagctcttcgaagcactgggcattgctcagcccaagggagtgctgctgtatggacctccaggcactgggaagacactgttggcccgggctgtggctcatcatacggactgtacctttattcgtgtctctggctctgaactggtacagaaattcataggggaaggggcaagaatggtgagggagctgtttgtcatggcacgggaacatgctccatctatcatcttcatggacgaaatcgactccatcggctcctcgcggctggaggggggttctggaggggacagtgaagtgcagcgcacgatgctggagttgctcaaccagctcgacggctttgaggccaccaagaacatcaaggttatcatggctactaataggattgatatcctggactcggcactgcttcgcccagggcgcattgacagaaaaattgaattcccaccccccaatgaggaggcccggctggacattttgaagattcattctcggaagatgaacctgacccgggggatcaacctgagaaaaattgctgagctcatgccaggagcatcaggggctgaagtgaagggcgtgtgcacagaagctggcatgtatgccctgcgagaacggcgagtccatgtcactcaggaggactttgagatggcagtagccaaggtcatgcagaaggacagtgagaaaaacatgtccatcaagaaattatggaagtgagtggacagcctttgtgtgtatctctccaataaagctctgtgggccaagtc

SEQ ID NO: 170162 - DNA, 1178 bp, Homo sapiens
  Payload ID: 13515
  Gene Symbol: PSMC5
  Gene Name: proteasome 26S subunit, ATPase 5
  ENST ID: ENST00000585242
  CDS Start-End: 13-171
tgaagagagaagatggcgcttgacggaccagagcagatggagctggaggaggggaaggcaggcagcggactccgccaatattatctgtccaagattgaagaactccagttcgcctattgcgggaggagctacagctgctgcaggagcagggctcctatgtgggggaagtagtccgggccatggataagaagaaagtgttggtcaaggtacatcctgaaggtaaatttgttgtagacgtggacaaaaacattgacatcaatgatgtgacacccaattgccgggtggctctaaggaatgacagctacactctgcacaagatcctgcccaacaaggtagacccattagtgtcactgatgatggtggagaaagtaccagattcaacttatgagatgattggtggactggacaaacagatcaaggagatcaaagaagtgatcgagctgcctgttaagcatcctgagctcttcgaagcactgggcattgctcagcccaagggagtgctgctgtatggacctccaggcactgggaagacactgttggcccgggctgtggctcatcatacggactgtacctttattcgtgtctctggctctgaactggtacagaaattcataggggaaggggcaagaatggtgagggagctgtttgtcatggcacgggaacatgctccatctatcatcttcatggacgaaatcgactccatcggctcctcgcggctggaggggggttctggaggggacagtgaagtgcagcgcacgatgctggagttgctcaaccagctcgacggctttgaggccaccaagaacatcaaggttatcatggctactaataggattgatatcctggactcggcactgcttcgcccagggcgcattgacagaaaaattgaattcccaccccccaatgaggaggcccggctggacattttgaagattcattctcggaagatgaacctgacccgggggatcaacctgagaaaaattgctgagctcatgccaggagcatcaggggctgaagtgaagggcgtgtgcacagaagctggcatgtatgccctgcgagaacggcgagtccatgtcactcaggaggactttgagatggcagtagccaaggtcatgcagaaggacagtgagaaaaacatgtccatcaagaaattatggaagtgagtggacagcctttgt

SEQ ID NO: 170163 - DNA, 809 bp, Homo sapiens
  Payload ID: 13515
  Gene Symbol: PSMC5
  Gene Name: proteasome 26S subunit, ATPase 5
  ENST ID: ENST00000581842
  CDS Start-End: 165-809
cgccaagacggctcggatgccggcggtctctgctgaagagagaagatggcgcttgacggaccagagcagtactgacacctcgggcttgtagagcacttcacgcagtgcaaagcgccccccgtctatatcatatcgcctctcggtcctcctaaaagtcgtatgagatggagctggaggaggggaaggcaggcagcggactccgccaatattatctgtccaagattgaagaactccagctgattgtgaatgataagagccaaaacctccggaggctgcaggcacagaggaacgaactaaatgctaaagttcgcctattgcgggaggagctacagctgctgcaggagcagggctcctatgtgggggaagtagtccgggccatggataagaagaaagtgttggtcaaggtacatcctgaaggtaaatttgttgtagacgtggacaaaaacattgacatcaatgatgtgacacccaattgccgggtggctctaaggaatgacagctacactctgcacaagatcctgcccaacaaggtagacccattagtgtcactgatgatggtggagaaagtaccagattcaacttatgagatgattggtggactggacaaacagatcaaggagatcaaagaagtgatcgagctgcctgttaagcatcctgagctcttcgaagcactgggcattgctcagcccaagggagtgctgctgtatggacctccaggcactgggaagacactgttggcccgggctgtggctcatcatacggactgtacctttattcgtgtctctggctctgaactggtacagaaattc

SEQ ID NO: 170164 - DNA, 828 bp, Homo sapiens
  Payload ID: 13515
  Gene Symbol: PSMC5
  Gene Name: proteasome 26S subunit, ATPase 5
  ENST ID: ENST00000582130
  CDS Start-End: 39-828
acggctcggatgccggcggtctctgctgaagagagaagatggcgcttgacggaccagagcagatggagctggaggaggggaaggcaggcagcggactccgccaatattatctgtccaagattgaagaactccagctgattgtgaatgataagagccaaaacctccggaggctgcaggcacagaggaacgaactaaatgctaaagttcgcctattgcgggaggagctacagctgctgcaggagcagggctcctatgtgggggaagtagtccgggccatggataagaagaaagtgttggtcaaggtgacacccaattgccgggtggctctaaggaatgacagctacactctgcacaagatcctgcccaacaaggtagacccattagtgtcactgatgatggtggagaaagtaccagattcaacttatgagatgattggtggactggacaaacagatcaaggagatcaaagaagtgatcgagctgcctgttaagcatcctgagctcttcgaagcactgggcattgctcagcccaagggagtgctgctgtatggacctccaggcactgggaagacactgttggcccgggctgtggctcatcatacggactgtacctttattcgtgtctctggctctgaactggtacagaaattcataggggaaggggcaagaatggtgagggagctgtttgtcatggcacgggaacatgctccatctatcatcttcatggacgaaatcgactccatcggctcctcgcggctggaggggggttctggaggggacagtgaagtgcagcgcacgatgctggagttgctcaaccagctcgacggct

SEQ ID NO: 170165 - DNA, 1474 bp, Homo sapiens
  Payload ID: 13515
  Gene Symbol: PSMC5
  Gene Name: proteasome 26S subunit, ATPase 5
  Uniprot ID: P62195
  ENST ID: ENST00000581882
  CDS Start-End: 261-1457
ccgtctatatcatatcgcctctcggtcctcctaaaagtcgtatgaggtaggcggcgttcccattcttttattttagtcctgggaaaatggagggttccaagggagggagggattagaacccagatcctgagcctccgaagtccaaactttttctactacgcaaagctacctggtgtcaagccttattcaaagtgccctgcaagtggctttaccccctcggatgtttaacctgtcgtttaagactcactctgtgtcttcagatggagctggaggaggggaaggcaggcagcggactccgccaatattatctgtccaagattgaagaactccagctgattgtgaatgataagagccaaaacctccggaggctgcaggcacagaggaacgaactaaatgctaaagttcgcctattgcgggaggagctacagctgctgcaggagcagggctcctatgtgggggaagtagtccgggccatggataagaagaaagtgttggtcaaggtacatcctgaaggtaaatttgttgtagacgtggacaaaaacattgacatcaatgatgtgacacccaattgccgggtggctctaaggaatgacagctacactctgcacaagatcctgcccaacaaggtagacccattagtgtcactgatgatggtggagaaagtaccagattcaacttatgagatgattggtggactggacaaacagatcaaggagatcaaagaagtgatcgagctgcctgttaagcatcctgagctcttcgaagcactgggcattgctcagcccaagggagtgctgctgtatggacctccaggcactgggaagacactgttggcccgggctgtggctcatcatacggactgtacctttattcgtgtctctggctctgaactggtacagaaattcataggggaaggggcaagaatggtgagggagctgtttgtcatggcacgggaacatgctccatctatcatcttcatggacgaaatcgactccatcggctcctcgcggctggaggggggttctggaggggacagtgaagtgcagcgcacgatgctggagttgctcaaccagctcgacggctttgaggccaccaagaacatcaaggttatcatggctactaataggattgatatcctggactcggcactgcttcgcccagggcgcattgacagaaaaattgaattcccaccccccaatgaggaggcccggctggacattttgaagattcattctcggaagatgaacctgacccgggggatcaacctgagaaaaattgctgagctcatgccaggagcatcaggggctgaagtgaagggcgtgtgcacagaagctggcatgtatgccctgcgagaacggcgagtccatgtcactcaggaggactttgagatggcagtagccaaggtcatgcagaaggacagtgagaaaaacatgtccatcaagaaattatggaagtgagtggacagcctttgtgt

SEQ ID NO: 170166 - DNA, 597 bp, Homo sapiens
  Payload ID: 13515
  Gene Symbol: PSMC5
  Gene Name: proteasome 26S subunit, ATPase 5
  ENST ID: ENST00000584880
  CDS Start-End: 1-383
caacttatgagatgattggtggactggacaaacagatcaaggagatcaaagaagtgatcgagctgcctgttaagcatcctgagctcttcgaagcactgggcattgctcagcccaagggagtgctgctgtatggacctccaggcactgggaagacactgttggcccgggctgtggctcatcatacggactgtacctttattcgtgtctctggctctgaactggtacagaaattcataggggaagctcggcctccacacaggggcaagaatggtgagggagctgtttgtcatggcacgggaacatgctccatctatcatcttcatggacgaaatcgactccatcggctcctcgcggctggaggggggttctggaggggacagtgaagtgcagcgcacgatgctggagttgctcaaccagctcgacggctttgaggccaccaagaacatcaaggttatcatggctactaataggattgatatcctggactcggcactgcttcgcccagggcgcattgacagaaaaattgaattcccaccccccaatgaggaggcccggctggacattttgaagattcattctcggaagatgaacctgacc

SEQ ID NO: 170167 - DNA, 558 bp, Homo sapiens
  Payload ID: 13515
  Gene Symbol: PSMC5
  Gene Name: proteasome 26S subunit, ATPase 5
  ENST ID: ENST00000579708
  CDS Start-End: 129-558
tccgccattttgagtgtggccctagattgttctcaatactctgtccttgggttttgtcccaatcctccgcttccgcgcttgcgcgccaagacggctcggatgccggcggtctctgctgaagagagaagatggcgcttgacggaccagagcaggtatggcgggtacatcctgaaggtaaatttgttgtagacgtggacaaaaacattgacatcaatgatgtgacacccaattgccgggtggctctaaggaatgacagctacactctgcacaagatcctgcccaacaaggtagacccattagtgtcactgatgatggtggagaaagtaccagattcaacttatgagatgattggtggactggacaaacagatcaaggagatcaaagaagtgatcgagctgcctgttaagcatcctgagctcttcgaagcactgggcattgctcagcccaagggagtgctgctgtatggacctccaggcactgggaagacactgttggcccgggctgtggctcatcatacggactgtacctttattcgtgtctctggctctgaactggtac

SEQ ID NO: 170168 - DNA, 899 bp, Homo sapiens
  Payload ID: 13515
  Gene Symbol: PSMC5
  Gene Name: proteasome 26S subunit, ATPase 5
  ENST ID: ENST00000585123
  CDS Start-End: 129-899
ggatgccggcggtctctgctgaagagagaagatggcgcttgacggaccagagcagagcacttcacgcagtgcaaagcgccccccgtctatatcatatcgcctctcggtcctcctaaaagtcgtatgagatggagctggaggaggggaaggcaggcagcggactccgccaatattatctgtccaagattgaagaactccagctgattgtgaatgataagagccaaaacctccggaggctgcaggcacagaggaacgaactaaatgctaaagttcgcctattgcgggaggagctacagctgctgcaggagcagggctcctatgtgggggaagtagtccgggccatggataagaagaaagtgttggtcaaggtacatcctgaaggtaaatttgttgtagacgtggacaaaaacattgacatcaatgatgtgacacccaattgccgggtggctctaaggaatgacagctacactctgcacaagatcctgcccaacaaggtagacccattagtgtcactgatgatggtggagaaagtaccagattcaacttatgagatgattggtggactggacaaacagatcaaggagatcaaagaagtgatcgagctgcctgttaagcatcctgagctcttcgaagcactgggcattgctcagcccaagggagtgctgctgtatggacctccaggcactgggaagacactgttggcccgggctgtggctcatcatacggactgtacctttattcgtgtctctggctctgaactggtacagaaattcataggggaaggggcaagaatggtgagggagctgtttgtcatggcacgggaacatgctccatctatcatcttcatggacgaaatcgactccatcggctcctcgcggctggaggggggttctggaggg

SEQ ID NO: 170169 - DNA, 804 bp, Homo sapiens
  Payload ID: 13515
  Gene Symbol: PSMC5
  Gene Name: proteasome 26S subunit, ATPase 5
  ENST ID: ENST00000584536
  CDS Start-End: 20-529
tctctgctgaagagagaagatggcgcttgacggaccagagcagatggagctggaggaggggaaggcaggcagcggactccgccaatattatctgtccaagattgaagaactccagctgattgtgaatgataagagccaaaacctccggaggctgcaggcacagaggaacgaactaaatgctaaagttcgcctattgcgggaggagctacagctgctgcaggagcagggctcctatgtgggggaagtagtccgggccatggataagaagaaagtgttggtcaaggtgacacccaattgccgggtggctctaaggaatgacagctacactctgcacaagatcctgcccaacaaggtagacccattagtgtcactgatgatggtggagaaagtaccagattcaacttatgagatgattggtggactggacaaacagatcaaggagatcaaagaagtgatcgagctgcctgttaagcatcctgagctcttcgaagcactgggcattgctcagcccaaggggcaagaatggtgagggagctgtttgtcatggcacgggaacatgctccatctatcatcttcatggacgaaatcgactccatcggctcctcgcggctggaggggggttctggaggggacagtgaagtgcagcgcacgatgctggagttgctcaaccagctcgacggctttgaggccaccaagaacatcaaggttatcatggctactaataggattgatatcctggactcggcactgcttcgcccagggcgcattgacagaaaaattgaattcccaccccccaatgaggag

SEQ ID NO: 170170 - DNA, 2188 bp, Homo sapiens
  Payload ID: 13516
  Gene Symbol: PSMC6
  Gene Name: proteasome 26S subunit, ATPase 6
  ENST ID: ENST00000445930
  CDS Start-End: 7-1218
acggccatggccattcccggcatcccctatgagagacggcttctcatcatggcggaccctagagataaggcgcttcaggactaccgcaagaagttgcttgaacacaaggagatcgacggccgtcttaaggagttaagggaacaattaaaagaacttaccaagcagtatgaaaagtctgaaaatgatctgaaggccctacagagtgttgggcagatcgtgggtgaagtgcttaaacagttaactgaagaaaaattcattgttaaagctaccaatggaccaagatatgttgtgggttgtcgtcgacagcttgacaaaagtaagctgaagccaggaacaagagttgctttggatatgactacactaactatcatgagatatttgccgagagaggtggatccactggtttataacatgtctcatgaggaccctgggaatgtttcttattctgagattggagggctatcagaacagatccgggaattaagagaggtgatagaattacctcttacaaacccagagttatttcagcgtgtaggaataatacctccaaaaggctgtttgttatatggaccaccaggtacgggaaaaacactcttggcacgagccgttgctagccagctggactgcaatttcttaaaggttgtatctagttctattgtagacaagtacattggtgaaagtgctcgtttgatcagagaaatgtttaattatgctagagatcatcaaccatgcatcatttttatggatgaaatagatgctattggtggtcgtcggttttctgagggtacttcagctgacagagagattcagagaacgttaatggagttactgaatcaaatggatggatttgatactctgcatagagttaaaatgatcatggctacaaacagaccagatacactggatcctgctttgctgcgtccaggaagattagatagaaaaatacatattgatttgccaaatgaacaagcaagattagacatactgaaaatccatgcaggtcccattacaaagcatggtgaaatagattatgaagcaattgtgaagctttcggatggctttaatggagcagatctgagaaatgtttgtactgaagcaggtatgttcgcaattcgtgctgatcatgattttgtagtacaggaagacttcatgaaagcagtcagaaaagtggctgattctaagaagctggagtctaaattggactacaaacctgtgtaatttactgtaagatttttgatggctgcatgacagatgttggcttattgtaaaaataaagttaaagaaaataatgtatgtattggtaatgatgtcattaaaagtatatgaataaaaatatgagtaacatcataaaaattagtaattcaacttttaagatacagaagaaatttgtatgtttgttaaagttgcatttattgcagcaagttacaaagggaaagtgttgaagcttttcatatttgctgcgtgagcattttgtaaaatattgaaagtggtttgagatagtggtataagaaagcatttcttatgacttattttgtatcatttgttttcctcatctaaaaagttgaataaaatctgtttgattcagttctcctacatatatattcttgtcttttctgagtatatttactgtggtcctttaggttctttagcaagtaaactatttgataacccagatggattgtggatttttgaatattattttaaaatagtacacatacttaatgttcataagatcatcttcttaaataaaacatggatgtgtgggtatgtctgtactcctcctttcagaaagtgtttacatattcttcatctactgtgattaagctcattgttggttaattgaaaatatacatgcacatccataactttttaaagagtatgattcaacgtaatatttgctaatatgtgactgggttttcttggtttatgtaagacgataggtccctgttgaggatgtggaggtctggaccctcttccaggaaaaattctaacatacaattttgcgtatactataatttcaggaaatttattgtttcccaagctcatccaaggactctttaggtatgtatggatacctggctaagagtgtatgatgtaggggatgtaggagtgtcagaaatgttcaaaacatgatttctgttacctatacatgattcttatatcatctggcaataaaagctataacaaa

SEQ ID NO: 170171 - DNA, 785 bp, Homo sapiens
  Payload ID: 13516
  Gene Symbol: PSMC6
  Gene Name: proteasome 26S subunit, ATPase 6
  ENST ID: ENST00000556813
  CDS Start-End: 1-785
ggcggaccctagagataaggcgcttcaggactaccgcaagaagttgcttgaacacaaggagatcgacggccgtcttaaggagttaagggaacaattaaaagaacttaccaagcagtatgaaaagtctgaaaatgatctgaaggccctacagagtgttgggcagatcgtgggtgaagtgcttaaacagttaactgaagaaaaattcattgttaaagctaccaatggaccaagatatgttgtgggttgtcgtcgacagcttgacaaaagtaagctgaagccaggaacaagagttgctttggatatgactacactaactatcatgagatatttgccgagagaggtggatccactggtttataacatgtctcatgaggaccctgggaatgtttcttattctgagattggagggctatcagaacagatccgggaattaagagaggtgatagaattacctcttacaaacccagagttatttcagcgtgtaggaataatacctccaaaaggctgtttgttatatggaccaccaggtacgggaaaaacactcttggcacgagccgttgctagccagctggactgcaatttcttaaaggttgtatctagttctattgtagacaagtacattggtgaaagtgctcgtttgatcagagaaatgtttaattatgctagagatcatcaaccatgcatcatttttatggatgaaatagatgctattgattatgaagcaattgtgaagctttcggatggctttaatggagcagatctgagaaatgtttgtactgaagcag

SEQ ID NO: 170172 - DNA, 563 bp, Homo sapiens
  Payload ID: 13516
  Gene Symbol: PSMC6
  Gene Name: proteasome 26S subunit, ATPase 6
  ENST ID: ENST00000553798
  CDS Start-End: 1-100
tagagataaggcgcttcaggactaccgcaagaagttgcttgaacacaaggagatcgacggccgtcttaaggagtgtgagtgcacctttctttccatttaatcaagtgcctcgactcgcttctgcctctgacaaagcagaagcctttcgccgagcccggcaaccgagccttagagatgaccaggcctagggccagggacaaggcgctttgtcatccggccctgagcttgtggagcagcactccttcgggtgtagaaatggcccagtccagcccgggtgacagaacatcggcggccttgagtaagggaacaattaaaagaacttaccaagcagtatgaaaagtctgaaaatgatctgaaggccctacagagtgttgggcagatcgtgggtgaagtgcttaaacagttaactgaagaaaaatgtgagtgatgaattagcttattaattagtaaagaaacagtccacctctctctcacttttgaaatgcttattattttaatgacaataatgcagagagagagagtatttttgaatagacttaagttttccttcaactaatgtctcc

SEQ ID NO: 170173 - DNA, 844 bp, Homo sapiens
  Payload ID: 13516
  Gene Symbol: PSMC6
  Gene Name: proteasome 26S subunit, ATPase 6
  ENST ID: ENST00000554044
  CDS Start-End: 12-224
ggcttctcatcatggcggaccctagagataaggcgcttcaggactaccgcaagaagttgcttgaacacaaggagatcgacggccgtcttaaggagttaagggaacaattaaaagaacttaccaagcagtatgaaaagtctgaaaatgatctgaaggccctacagagtgttgggcagatcgtgggtgaagtgcttaaacagttaactgaagaaaaatgtgagtgatgaattagcttattaattagtaaagaaacagtccacctctctctcacttttgaaatgcttattattttaatgacaataatgcagagagagagagtatttttgaatagacttaagttttccttcaactaatgtctccttggaggacagaaatacaactaaaccctctgtcaacgtggcttgacaaaagtaagctgaagccaggaacaagagttgctttggatatgactacactaactatcatgagatatttgccgagagaggtggatccactggtttataacatgtctcatgaggaccctgggaatgtttcttattctgagattggagggctatcagaacagatccgggaattaagagaggtgatagaattacctcttacaaacccagagttatttcagcgtgtaggaataatacctccaaaaggctgtttgttatatggaccaccaggtacgggaaaaacactcttggcacgagccgttgctagccagctggactgcaatttcttaaaggttgtatctagttctattgtagacaagtacattggtgaaagtgctcgtttgatcagagaaatgtttaattatgctagagatcatcaaccatgcatcatttttatggatgaa

SEQ ID NO: 170174 - DNA, 583 bp, Homo sapiens
  Payload ID: 13516
  Gene Symbol: PSMC6
  Gene Name: proteasome 26S subunit, ATPase 6
  ENST ID: ENST00000555339
  CDS Start-End: 2-583
catggcggaccctagagataaggcgcttcaggactaccgcaagaagttgcttgaacacaaggagatcgacggccgtcttaaggagttcattgttaaagctaccaatggaccaagatatgttgtgggttgtcgtcgacagcttgacaaaagtaagctgaagccaggaacaagagttgctttggatatgactacactaactatcatgagatatttgccgagagaggtggatccactggtttataacatgtctcatgaggaccctgggaatgtttcttattctgagattggagggctatcagaacagatccgggaattaagagaggtgatagaattacctcttacaaacccagagttatttcagcgtgtaggaataatacctccaaaaggctgtttgttatatggaccaccaggtacgggaaaaacactcttggcacgagccgttgctagccagctggactgcaatttcttaaaggttgtatctagttctattgtagacaagtacattggtgaaagtgctcgtttgatcagagaaatgtttaattatgctagagatcatcaaccatgcatcatttttatggatgaa

SEQ ID NO: 170175 - DNA, 625 bp, Homo sapiens
  Payload ID: 13516
  Gene Symbol: PSMC6
  Gene Name: proteasome 26S subunit, ATPase 6
  ENST ID: ENST00000557240
  CDS Start-End: 29-322
catcccctatgagagacggcttctcatcatggcggaccctagagataaggcgcttcaggactaccgcaagaagttgcttgaacacaaggagatcgacggccgtcttaaggagttaagggaacaattaaaagaacttaccaagcagtatgaaaagtctgaaaatgatctgaaggccctacagagtgttgggcagatcgtgggtgaagtgcttaaacagttaactgaagaaaaattcattgttaaagctaccaatggaccaagatatgttgtgggttgtcgtcgacagatatttgccgagagaggtggatccactggtttataacatgtctcatgaggaccctgggaatgtttcttattctgagattggagggctatcagaacagatccgggaattaagagaggtgatagaattacctcttacaaacccagagttatttcagcgtgtaggaataatacctccaaaaggctgtttgttatatggaccaccaggtacgggaaaaacactcttggcacgagccgttgctagccagctggactgcaatttcttaaaggttgtatctagttctattgtagacaagtacattggtgaaagtgctcgtttgatcagagaaatgtttaattatgc

SEQ ID NO: 170176 - DNA, 580 bp, Homo sapiens
  Payload ID: 13516
  Gene Symbol: PSMC6
  Gene Name: proteasome 26S subunit, ATPase 6
  ENST ID: ENST00000557517
  CDS Start-End: 1-44
acggccgtcttaaggagtgtgagtgcacctttctttccatttaatcaagtgcctcgactcgcttctgcctctgacaaagcagaagcctttcgccgagcccggcaaccgagccttagagatgaccaggcctagggccagggacaaggcgctttgtcatccggccctgagcttgtggagcagcactccttcgggtgtagaaatggcccagtccagcccgggtgacagaacatcggcggccttgagtaagggaacaattaaaagaacttaccaagcagtatgaaaagtctgaaaatgatctgaaggccctacagagtgttgggcagatcgtgggtgaagtgcttaaacagttaactgaagaaaaatgtgagtgatgaattagcttattaattagtaaagaaacagtccacctctctctcacttttgaaatgcttattattttaatgacaataatgcagagagagagagtatttttgaatagacttaagttttccttcaactaatgtctccttggaggacagaaatacaactaaaccctctgtcaacgtggggctctgtggatgccgaaagttggcatttctaa

SEQ ID NO: 170177 - DNA, 752 bp, Homo sapiens
  Payload ID: 13516
  Gene Symbol: PSMC6
  Gene Name: proteasome 26S subunit, ATPase 6
  ENST ID: ENST00000555175
  CDS Start-End: 1-202
tgtatctagttctattgtagacaagtacattggtgaaagtgctcgtttgatcagagaaatgtttaattatgctagagatcatcaaccatgcatcatttttatggatgaaatagatgctattggtggtcgtcggttttctgagggtacttcagctgacagagagattcagagaacgttaatggagattatgaagcaattgtgaagctttcggatggctttaatggagcagatctgagaaatgtttgtactgaagcaggtatgttcgcaattcgtgctgatcatgattttgtagtacaggaagacttcatgaaagcagtcagaaaagtggctgattctaagaagctggagtctaaattggactacaaacctgtgtaatttactgtaagatttttgatggctgcatgacagatgttggcttattgtaaaaataaagttaaagaaaataatgtatgtattggtaatgatgtcattaaaagtatatgaataaaaatatgagtaacatcataaaaattagtaattcaacttttaagatacagaagaaatttgtatgtttgttaaagttgcatttattgcagcaagttacaaagggaaagtgttgaagcttttcatatttgctgcgtgagcattttgtaaaatattgaaagtggtttgagatagtggtataagaaagcatttcttatgacttattttgtatcatttgttttcctcatctaaaaagttgaataaaatctgtttgattcagttctcctaca

SEQ ID NO: 170178 - DNA, 706 bp, Homo sapiens
  Payload ID: 13516
  Gene Symbol: PSMC6
  Gene Name: proteasome 26S subunit, ATPase 6
  ENST ID: ENST00000553899
  CDS Start-End: 19-129
gagagacggcttctcatcatggcggaccctagagataaggcgcttcaggactaccgcaagaagttgcttgaacacaaggagatcgacggccgtcttaaggagtgtgagtgcacctttctttccatttaatcaagtgcctcgactcgcttctgcctctgacaaagcagaagcctttcgccgagcccggcaaccgagccttagagatgaccaggcctagggccagggacaaggcgctttgtcatccggccctgagcttgtggagcagcactccttcgggtgtagaaatggcccagtccagcccgggtgacagaacatcggcggccttgagtaagggaacaattaaaagaacttaccaagcagtatgaaaagtctgaaaatgatctgaaggccctacagagtgttgggcagatcgtgggtgaagtgcttaaacagttaactgaagaaaaattcattgttaaagctaccaatggaccaagatatgttgtgggttgtcgtcgacagcttgacaaaagtaagctgaagccaggaacaagagttgctttggatatgactacactaactatcatgagatatttgccgagagaggtggatccactggtttataacatgtctcatgaggaccctgggaatgtttcttattctgagattggagggctatcagaacagatccgggaattaagagaggtgatagaattacctcttacaa

SEQ ID NO: 170179 - DNA, 1560 bp, Homo sapiens
  Payload ID: 13516
  Gene Symbol: PSMC6
  Gene Name: proteasome 26S subunit, ATPase 6
  Uniprot ID: P62333
  ENST ID: ENST00000606149
  CDS Start-End: 17-1186
gagacggcttctcatcatggcggaccctagagataaggcgcttcaggactaccgcaagaagttgcttgaacacaaggagatcgacggccgtcttaaggagttaagggaacaattaaaagaacttaccaagcagtatgaaaagtctgaaaatgatctgaaggccctacagagtgttgggcagatcgtgggtgaagtgcttaaacagttaactgaagaaaaattcattgttaaagctaccaatggaccaagatatgttgtgggttgtcgtcgacagcttgacaaaagtaagctgaagccaggaacaagagttgctttggatatgactacactaactatcatgagatatttgccgagagaggtggatccactggtttataacatgtctcatgaggaccctgggaatgtttcttattctgagattggagggctatcagaacagatccgggaattaagagaggtgatagaattacctcttacaaacccagagttatttcagcgtgtaggaataatacctccaaaaggctgtttgttatatggaccaccaggtacgggaaaaacactcttggcacgagccgttgctagccagctggactgcaatttcttaaaggttgtatctagttctattgtagacaagtacattggtgaaagtgctcgtttgatcagagaaatgtttaattatgctagagatcatcaaccatgcatcatttttatggatgaaatagatgctattggtggtcgtcggttttctgagggtacttcagctgacagagagattcagagaacgttaatggagttactgaatcaaatggatggatttgatactctgcatagagttaaaatgatcatggctacaaacagaccagatacactggatcctgctttgctgcgtccaggaagattagatagaaaaatacatattgatttgccaaatgaacaagcaagattagacatactgaaaatccatgcaggtcccattacaaagcatggtgaaatagattatgaagcaattgtgaagctttcggatggctttaatggagcagatctgagaaatgtttgtactgaagcaggtatgttcgcaattcgtgctgatcatgattttgtagtacaggaagacttcatgaaagcagtcagaaaagtggctgattctaagaagctggagtctaaattggactacaaacctgtgtaatttactgtaagatttttgatggctgcatgacagatgttggcttattgtaaaaataaagttaaagaaaataatgtatgtattggtaatgatgtcattaaaagtatatgaataaaaatatgagtaacatcataaaaattagtaattcaacttttaagatacagaagaaatttgtatgtttgttaaagttgcatttattgcagcaagttacaaagggaaagtgttgaagcttttcatatttgctgcgtgagcattttgtaaaatattgaaagtggtttgagatagtggtataagaaagcatttcttatgacttattttgtatcatttgttttcctcatctaaaaagttgaataaaatctgtttgattcagttctcct

SEQ ID NO: 170180 - DNA, 1590 bp, Homo sapiens
  Payload ID: 13516
  Gene Symbol: PSMC6
  Gene Name: proteasome 26S subunit, ATPase 6
  ENST ID: ENST00000612399
  CDS Start-End: 1-1212
atggccattcccggcatcccctatgagagacggcttctcatcatggcggaccctagagataaggcgcttcaggactaccgcaagaagttgcttgaacacaaggagatcgacggccgtcttaaggagttaagggaacaattaaaagaacttaccaagcagtatgaaaagtctgaaaatgatctgaaggccctacagagtgttgggcagatcgtgggtgaagtgcttaaacagttaactgaagaaaaattcattgttaaagctaccaatggaccaagatatgttgtgggttgtcgtcgacagcttgacaaaagtaagctgaagccaggaacaagagttgctttggatatgactacactaactatcatgagatatttgccgagagaggtggatccactggtttataacatgtctcatgaggaccctgggaatgtttcttattctgagattggagggctatcagaacagatccgggaattaagagaggtgatagaattacctcttacaaacccagagttatttcagcgtgtaggaataatacctccaaaaggctgtttgttatatggaccaccaggtacgggaaaaacactcttggcacgagccgttgctagccagctggactgcaatttcttaaaggttgtatctagttctattgtagacaagtacattggtgaaagtgctcgtttgatcagagaaatgtttaattatgctagagatcatcaaccatgcatcatttttatggatgaaatagatgctattggtggtcgtcggttttctgagggtacttcagctgacagagagattcagagaacgttaatggagttactgaatcaaatggatggatttgatactctgcatagagttaaaatgatcatggctacaaacagaccagatacactggatcctgctttgctgcgtccaggaagattagatagaaaaatacatattgatttgccaaatgaacaagcaagattagacatactgaaaatccatgcaggtcccattacaaagcatggtgaaatagattatgaagcaattgtgaagctttcggatggctttaatggagcagatctgagaaatgtttgtactgaagcaggtatgttcgcaattcgtgctgatcatgattttgtagtacaggaagacttcatgaaagcagtcagaaaagtggctgattctaagaagctggagtctaaattggactacaaacctgtgtaatttactgtaagatttttgatggctgcatgacagatgttggcttattgtaaaaataaagttaaagaaaataatgtatgtattggtaatgatgtcattaaaagtatatgaataaaaatatgagtaacatcataaaaattagtaattcaacttttaagatacagaagaaatttgtatgtttgttaaagttgcatttattgcagcaagttacaaagggaaagtgttgaagcttttcatatttgctgcgtgagcattttgtaaaatattgaaagtggtttgagatagtggtataagaaagcatttcttatgacttattttgtatcatttgttttcctcatctaaaaagttgaataaaatctgtttgattcagttctcctacat

SEQ ID NO: 170181 - DNA, 3326 bp, Homo sapiens
  Payload ID: 13517
  Gene Symbol: PSMD1
  Gene Name: proteasome 26S subunit, non-ATPase 1
  Uniprot ID: Q99460
  ENST ID: ENST00000308696
  CDS Start-End: 163-3024
ggggtcctggcgagaagcgagccggcggcctgaggaggcgactgactgagcagcgcacccggggagcaaggaggcgcggtgaactgagcggcccctgagctgacagatacactgcgcagctggaacggcgagcgagccgacgggcgagtgaggggcgcagccatgatcacctcggccgctggaattatttctcttctggatgaagatgaaccacagcttaaggaatttgcactacacaaattgaatgcagttgttaatgacttctgggcagaaatttccgagtccgtagacaaaatagaggttttatacgaagatgaaggtttccggagtcggcagtttgcagccttagtggcatctaaagtattttatcacctgggggcttttgaggagtctctgaattatgctcttggagcaggggacctcttcaatgtcaatgataactctgaatatgtggaaactattatagcaaaatgcattgatcactacaccaaacaatgtgtggaaaatgcagatttgcctgaaggagaaaaaaaaccaattgaccagagattggaaggcatcgtaaataaaatgttccagcgatgtctagatgatcacaagtataaacaggctattggcattgctctggagacacgaagactggacgtctttgaaaagaccatactggagtcgaatgatgtcccaggaatgttagcttatagccttaagctctgcatgtctttaatgcagaataaacagtttcggaataaagtactaagagttctagttaaaatctacatgaacttggagaaacctgatttcatcaatgtttgtcagtgcttaattttcttagatgatcctcaggctgtgagtgatatcttagagaaactggtaaaggaagacaacctcctgatggcatatcagatttgttttgatttgtatgaaagtgctagccagcagtttttgtcatctgtaatccagaatcttcgaactgttggcacccctattgcttctgtgcctggatccactaatacgggtactgttccgggatcagagaaagacagtgactcgatggaaacagaagaaaagacaagcagtgcatttgtaggaaagacaccagaagccagtccagagcctaaggaccagactttgaaaatgattaaaattttaagtggtgaaatggctattgagttacatctgcagttcttaatacgaaacaataatacagacctcatgattctaaaaaacacaaaggatgcagtacggaattctgtatgtcatactgcaaccgttatagcaaactcttttatgcactgtgggacaaccagtgaccagtttcttagagataatttggaatggttagccagagccactaactgggcaaaatttactgctacagccagtttgggtgtaattcataagggtcatgaaaaagaagcattacagttaatggcaacataccttcccaaggatacttctccaggatcagcctatcaggaaggtggaggtctctatgcactaggtcttattcatgccaatcatggtggtgatataattgactatctgcttaatcagcttaagaacgccagcaatgatatcgttagacacggtggcagtctgggccttggtttggcagccatgggaactgcacgtcaagatgtttatgatttgctaaaaacaaacctttatcaggatgatgcagtaacaggggaagcagctggcctggccctaggtttggttatgttgggctctaaaaatgctcaggctattgaggacatggttggttatgcacaagaaactcaacatgagaagattctgcgtggtcttgcagttggcatagctttagtaatgtatgggaggatggaagaggctgatgctctcattgaatctctctgtcgtgacaaggacccaattcttcgaaggtctggaatgtatactgtagccatggcttattgtggctctggtaacaacaaagcaattcgacgcctgctacatgttgctgtaagtgatgttaatgatgatgtcaggagggcagcagtagaatcacttgggttcattctattcagaacccctgaacagtgcccaagtgttgtctctttgttgtcagagagttacaaccctcatgtgcgctacggagctgcaatggccttggggatatgctgtgctggtacaggaaacaaggaagccattaatttgctagaaccaatgacaaacgaccccgtgaactacgtgaggcaaggggcactcatagcttcagctctcatcatgatccagcagactgaaatcacttgtccaaaggtgaatcagttcagacagctgtattccaaagtcatcaatgataagcatgatgatgtcatggccaagtttggcgctattctggcccagggcatactggatgcaggtggtcataatgtcacaatctccttgcagtccaggactgggcatactcatatgccttctgtggttggcgtccttgtatttacccagttttggttctggtttcctctttcacacttcctgtcattggcttatacccctacctgtgtcattggccttaacaaggacttaaagatgccgaaagttcagtataaatcgaactgtaaaccatccacatttgcatatcctgcccctctggaagtaccaaaagaaaaagaaaaggaaaaggtttctactgctgtattatctataactgccaaggctaaaaagaaggaaaaagaaaaggaaaaaaaggaggaggagaaaatggaagtggatgaggcagagaaaaaggaggaaaaagagaagaaaaaagaacctgagccaaacttccagttattggataacccagcccgagttatgcctgcccagcttaaggtcctaaccatgccggagacctgtagataccagcctttcaaaccactctctattggaggcatcatcattctgaaggataccagtgaagacattgaggagctggtggaacctgtggcagcacatggcccaaaaatcgaggaggaggaacaagagccagaacccccagaaccatttgagtatattgatgattaagggccagaggatctcacttgcttatctgaagaagattgtccaggctcatattgggaatgcttatgaggaaattcatgccgagacctgctattcaatgcatgtatcgttgcctctgcactgacctgaagaaccctgtctccaagtctttggttgaagagaagatatatgactgttgagtgtgctctttcacagaacttggttttcaaataaatataagatctccagatggacaagacatttgtttttcagcctgggtttttaataaatgtatctaatcctccccacaccatgaaatgcctaaa

SEQ ID NO: 170182 - DNA, 3230 bp, Homo sapiens
  Payload ID: 13517
  Gene Symbol: PSMD1
  Gene Name: proteasome 26S subunit, non-ATPase 1
  Uniprot ID: Q99460
  ENST ID: ENST00000373635
  CDS Start-End: 163-2931
ggggtcctggcgagaagcgagccggcggcctgaggaggcgactgactgagcagcgcacccggggagcaaggaggcgcggtgaactgagcggcccctgagctgacagatacactgcgcagctggaacggcgagcgagccgacgggcgagtgaggggcgcagccatgatcacctcggccgctggaattatttctcttctggatgaagatgaaccacagcttaaggaatttgcactacacaaattgaatgcagttgttaatgacttctgggcagaaatttccgagtccgtagacaaaatagaggttttatacgaagatgaaggtttccggagtcggcagtttgcagccttagtggcatctaaagtattttatcacctgggggcttttgaggagtctctgaattatgctcttggagcaggggacctcttcaatgtcaatgataactctgaatatgtggaaactattatagcaaaatgcattgatcactacaccaaacaatgtgtggaaaatgcagatttgcctgaaggagaaaaaaaaccaattgaccagagattggaaggcatcgtaaataaaatgttccagcgatgtctagatgatcacaagtataaacaggctattggcattgctctggagacacgaagactggacgtctttgaaaagaccatactggagtcgaatgatgtcccaggaatgttagcttatagccttaagctctgcatgtctttaatgcagaataaacagtttcggaataaagtactaagagttctagttaaaatctacatgaacttggagaaacctgatttcatcaatgtttgtcagtgcttaattttcttagatgatcctcaggctgtgagtgatatcttagagaaactggtaaaggaagacaacctcctgatggcatatcagatttgttttgatttgtatgaaagtgctagccagcagtttttgtcatctgtaatccagaatcttcgaactgttggcacccctattgcttctgtgcctggatccactaatacgggtactgttccgggatcagagaaagacagtgactcgatggaaacagaagaaaagacaagcagtgcatttgtaggaaagacaccagaagccagtccagagcctaaggaccagactttgaaaatgattaaaattttaagtggtgaaatggctattgagttacatctgcagttcttaatacgaaacaataatacagacctcatgattctaaaaaacacaaaggatgcagtacggaattctgtatgtcatactgcaaccgttatagcaaactcttttatgcactgtgggacaaccagtgaccagtttcttagagataatttggaatggttagccagagccactaactgggcaaaatttactgctacagccagtttgggtgtaattcataagggtcatgaaaaagaagcattacagttaatggcaacataccttcccaaggatacttctccaggatcagcctatcaggaaggtggaggtctctatgcactaggtcttattcatgccaatcatggtggtgatataattgactatctgcttaatcagcttaagaacgccagcaatgatatcgttagacacggtggcagtctgggccttggtttggcagccatgggaactgcacgtcaagatgtttatgatttgctaaaaacaaacctttatcaggatgatgcagtaacaggggaagcagctggcctggccctaggtttggttatgttgggctctaaaaatgctcaggctattgaggacatggttggttatgcacaagaaactcaacatgagaagattctgcgtggtcttgcagttggcatagctttagtaatgtatgggaggatggaagaggctgatgctctcattgaatctctctgtcgtgacaaggacccaattcttcgaaggtctggaatgtatactgtagccatggcttattgtggctctggtaacaacaaagcaattcgacgcctgctacatgttgctgtaagtgatgttaatgatgatgtcaggagggcagcagtagaatcacttgggttcattctattcagaacccctgaacagtgcccaagtgttgtctctttgttgtcagagagttacaaccctcatgtgcgctacggagctgcaatggccttggggatatgctgtgctggtacaggaaacaaggaagccattaatttgctagaaccaatgacaaacgaccccgtgaactacgtgaggcaaggggcactcatagcttcagctctcatcatgatccagcagactgaaatcacttgtccaaaggtgaatcagttcagacagctgtattccaaagtcatcaatgataagcatgatgatgtcatggccaagtttggcgctattctggcccagggcatactggatgcaggtggtcataatgtcacaatctccttgcagtccaggactgggcatactcatatgccttctgtggttggcgtccttgtatttacccagttttggttctggtttcctctttcacacttcctgtcattggcttatacccctacctgtgtcattggccttaacaaggacttaaaggtttctactgctgtattatctataactgccaaggctaaaaagaaggaaaaagaaaaggaaaaaaaggaggaggagaaaatggaagtggatgaggcagagaaaaaggaggaaaaagagaagaaaaaagaacctgagccaaacttccagttattggataacccagcccgagttatgcctgcccagcttaaggtcctaaccatgccggagacctgtagataccagcctttcaaaccactctctattggaggcatcatcattctgaaggataccagtgaagacattgaggagctggtggaacctgtggcagcacatggcccaaaaatcgaggaggaggaacaagagccagaacccccagaaccatttgagtatattgatgattaagggccagaggatctcacttgcttatctgaagaagattgtccaggctcatattgggaatgcttatgaggaaattcatgccgagacctgctattcaatgcatgtatcgttgcctctgcactgacctgaagaaccctgtctccaagtctttggttgaagagaagatatatgactgttgagtgtgctctttcacagaacttggttttcaaataaatataagatctccagatggacaagacatttgtttttcagcctgggtttttaataaatgtatctaatcctccccacaccatgaaatgcct

SEQ ID NO: 170183 - DNA, 2901 bp, Homo sapiens
  Payload ID: 13517
  Gene Symbol: PSMD1
  Gene Name: proteasome 26S subunit, non-ATPase 1
  Uniprot ID: Q99460
  ENST ID: ENST00000409643
  CDS Start-End: 133-2901
tgaggaggcgactgactgagcagcgcacccggggagcaaggaggcgcggtgaactgagcggcccctgagctgacagatacactgcgcagctggaacggcgagcgagccgacgggcgagtgaggggcgcagccatgatcacctcggccgctggaattatttctcttctggatgaagatgaaccacagcttaaggaatttgcactacacaaattgaatgcagttgttaatgacttctgggcagaaatttccgagtccgtagacaaaatagaggttttatacgaagatgaaggtttccggagtcggcagtttgcagccttagtggcatctaaagtattttatcacctgggggcttttgaggagtctctgaattatgctcttggagcaggggacctcttcaatgtcaatgataactctgaatatgtggaaactattatagcaaaatgcattgatcactacaccaaacaatgtgtggaaaatgcagatttgcctgaaggagaaaaaaaaccaattgaccagagattggaaggcatcgtaaataaaatgttccagcgatgtctagatgatcacaagtataaacaggctattggcattgctctggagacacgaagactggacgtctttgaaaagaccatactggagtcgaatgatgtcccaggaatgttagcttatagccttaagctctgcatgtctttaatgcagaataaacagtttcggaataaagtactaagagttctagttaaaatctacatgaacttggagaaacctgatttcatcaatgtttgtcagtgcttaattttcttagatgatcctcaggctgtgagtgatatcttagagaaactggtaaaggaagacaacctcctgatggcatatcagatttgttttgatttgtatgaaagtgctagccagcagtttttgtcatctgtaatccagaatcttcgaactgttggcacccctattgcttctgtgcctggatccactaatacgggtactgttccgggatcagagaaagacagtgactcgatggaaacagaagaaaagacaagcagtgcatttgtaggaaagacaccagaagccagtccagagcctaaggaccagactttgaaaatgattaaaattttaagtggtgaaatggctattgagttacatctgcagttcttaatacgaaacaataatacagacctcatgattctaaaaaacacaaaggatgcagtacggaattctgtatgtcatactgcaaccgttatagcaaactcttttatgcactgtgggacaaccagtgaccagtttcttagagataatttggaatggttagccagagccactaactgggcaaaatttactgctacagccagtttgggtgtaattcataagggtcatgaaaaagaagcattacagttaatggcaacataccttcccaaggatacttctccaggatcagcctatcaggaaggtggaggtctctatgcactaggtcttattcatgccaatcatggtggtgatataattgactatctgcttaatcagcttaagaacgccagcaatgatatcgttagacacggtggcagtctgggccttggtttggcagccatgggaactgcacgtcaagatgtttatgatttgctaaaaacaaacctttatcaggatgatgcagtaacaggggaagcagctggcctggccctaggtttggttatgttgggctctaaaaatgctcaggctattgaggacatggttggttatgcacaagaaactcaacatgagaagattctgcgtggtcttgcagttggcatagctttagtaatgtatgggaggatggaagaggctgatgctctcattgaatctctctgtcgtgacaaggacccaattcttcgaaggtctggaatgtatactgtagccatggcttattgtggctctggtaacaacaaagcaattcgacgcctgctacatgttgctgtaagtgatgttaatgatgatgtcaggagggcagcagtagaatcacttgggttcattctattcagaacccctgaacagtgcccaagtgttgtctctttgttgtcagagagttacaaccctcatgtgcgctacggagctgcaatggccttggggatatgctgtgctggtacaggaaacaaggaagccattaatttgctagaaccaatgacaaacgaccccgtgaactacgtgaggcaaggggcactcatagcttcagctctcatcatgatccagcagactgaaatcacttgtccaaaggtgaatcagttcagacagctgtattccaaagtcatcaatgataagcatgatgatgtcatggccaagtttggcgctattctggcccagggcatactggatgcaggtggtcataatgtcacaatctccttgcagtccaggactgggcatactcatatgccttctgtggttggcgtccttgtatttacccagttttggttctggtttcctctttcacacttcctgtcattggcttatacccctacctgtgtcattggccttaacaaggacttaaaggtttctactgctgtattatctataactgccaaggctaaaaagaaggaaaaagaaaaggaaaaaaaggaggaggagaaaatggaagtggatgaggcagagaaaaaggaggaaaaagagaagaaaaaagaacctgagccaaacttccagttattggataacccagcccgagttatgcctgcccagcttaaggtcctaaccatgccggagacctgtagataccagcctttcaaaccactctctattggaggcatcatcattctgaaggataccagtgaagacattgaggagctggtggaacctgtggcagcacatggcccaaaaatcgaggaggaggaacaagagccagaacccccagaaccatttgagtatattgatgattaa

SEQ ID NO: 170184 - DNA, 491 bp, Homo sapiens
  Payload ID: 13517
  Gene Symbol: PSMD1
  Gene Name: proteasome 26S subunit, non-ATPase 1
  ENST ID: ENST00000444007
  CDS Start-End: 1-491
agcaaaatgcattgatcactacaccaaacaatgtgtggaaaatgcagatttgcctgaaggagaaaaaaaaccaattgaccagagattggaaggcatcgtaaataaaatgttccagcgatgtctagatgatcacaagtataaacaggctattggcattgctctggagacacgaagactggacgtctttgaaaagaccatactggagtcgaatgatgtcccaggaatgttagcttatagccttaagctctgcatgtctttaatgcagaataaacagtttcggaataaagtactaagagttctagttaaaatctacatgaacttggagaaacctgatttcatcaatgtttgtcagaatcttcgaactgttggcacccctattgcttctgtgcctggatccactaatacgggtactgttccgggatcagagaaagacagtgactcgatggaaacagaagaaaagacaagcagtgcatttgtaggaaagacaccag

SEQ ID NO: 170185 - DNA, 2506 bp, Homo sapiens
  Payload ID: 13517
  Gene Symbol: PSMD1
  Gene Name: proteasome 26S subunit, non-ATPase 1
  ENST ID: ENST00000431051
  CDS Start-End: 160-306
gtcctggcgagaagcgagccggcggcctgaggaggcgactgactgagcagcgcacccggggagcaaggaggcgcggtgaactgagcggcccctgagctgacagatacactgcgcagctggaacggcgagcgagccgacgggcgagtgaggggcgcagccatgatcacctcggccgctggaattatttctcttctggatgaagatgaaccacagcttaaggaatttgcactacacaaattgaatgcagttgttaatgacttctgggcagaaatttccgagtccgtagacaaaatcaaaatgcattgatcactacaccaaacaatgtgtggaaaatgcagatttgcctgaaggagaaaaaaaaccaattgaccagagattggaaggcatcgtaaataaaatgttccagcgatgtctagatgatcacaagtataaacaggctattggcattgctctggagacacgaagactggacgtctttgaaaagaccatactggagtcgaatgatgtcccaggaatgttagcttatagccttaagctctgcatgtctttaatgcagaataaacagtttcggaataaagtactaagagttctagttaaaatctacatgaacttggagaaacctgatttcatcaatgtttgtcagtgcttaattttcttagatgatcctcaggctgtgagtgatatcttagagaaactggtaaaggaagacaacctcctgatggcatatcagatttgttttgatttgtatgaaagtgctagccagcagtttttgtcatctgtaatccagaatcttcgaactgttggcacccctattgcttctgtgcctggatccactaatacgggtactgttccgggatcagagaaagacagtgactcgatggaaacagaagaaaagacaagcagtgcatttgtaggaaagacaccagaagccagtccagagcctaaggaccagactttgaaaatgattaaaattttaagtggtgaaatggctattgagttacatctgcagttcttaatacgaaacaataatacagacctcatgattctaaaaaacacaaaggatgcagtacggaattctgtatgtcatactgcaaccgttatagcaaactcttttatgcactgtgggacaaccagtgaccagtttcttagagataatttggaatggttagccagagccactaactgggcaaaatttactgctacagccagtttgggtgtaattcataagggtcatgaaaaagaagcattacagttaatggcaacataccttcccaaggatacttctccaggatcagcctatcaggaaggtggaggtctctatgcactaggtcttattcatgccaatcatggtggtgatataattgactatctgcttaatcagcttaagaacgccagcaatgatatcgttagacacggtggcagtctgggccttggtttggcagccatgggaactgcacgtcaagatgtttatgatttgctaaaaacaaacctttatcaggatgatgcagtaacaggggaagcagctggcctggccctaggtttggttatgttgggctctaaaaatgctcaggctattgaggacatggttggttatgcacaagaaactcaacatgagaagattctgcgtggtcttgcagttggcatagctttagtaatgtatgggaggatggaagaggctgatgctctcattgaatctctctgtcgtgacaaggacccaattcttcgaaggtctggaatgtatactgtagccatggcttattgtggctctggtaacaacaaagcaattcgacgcctgctacatgttgctgtaagtgatgttaatgatgatgtcaggagggcagcagtagaatcacttgggttcattctattcagaacccctgaacagtgcccaagtgttgtctctttgttgtcagagagttacaaccctcatgtgcgctacggagctgcaatggccttggggatatgctgtgctggtacaggaaacaaggaagccattaatttgctagaaccaatgacaaacgaccccgtgaactacgtgaggcaaggggcactcatagcttcagctctcatcatgatccagcagactgaaatcacttgtccaaaggtgaatcagttcagacagctgtattccaaagtcatcaatgataagcatgatgatgtcatggccaagtttggcgctattctggcccagggcatactggatgcaggtggtcataatgtcacaatctccttgcagtccaggactgggcatactcatatgccttctgtggttggcgtccttgtatttacccagttttggttctggtttcctctttcacacttcctgtcattggcttatacccctacctgtgtcattggccttaacaaggacttaaagatgccgaaagttcagtataaatcgaactgtaaaccatccacatttgcatatcctgcccctctggaagtaccaaaagaaaaagaaaaggaaaaggtttctactgctgtattatctataactgccaaggct

SEQ ID NO: 170186 - DNA, 761 bp, Homo sapiens
  Payload ID: 13517
  Gene Symbol: PSMD1
  Gene Name: proteasome 26S subunit, non-ATPase 1
  ENST ID: ENST00000440838
  CDS Start-End: 152-761
gagaagcgagccggcggcctgaggaggcgactgactgagcagcgcacccggggagcaaggaggcgcggtgaactgagcggcccctgagctgacagatacactgcgcagctggaacggcgagcgagccgacgggcgagtgaggggcgcagccatgatcacctcggccgctggaattatttctcttctggatgaagatgaaccacagcttaaggaatttgcactacacaaattgaatgcagttgttaatgacttctgggcagaaatttccgagtccgtagacaaaatagaggttttatacgaagatgaaggtttccggagtcggcagtttgcagccttagtggcatctaaagtattttatcacctgggggcttttgaggagtctctgaattatgctcttggagcaggggacctcttcaatgtcaatgataactctgaatatgtggaaactattataggtaattatcgtctatctgcaaaatgcattgatcactacaccaaacaatgtgtggaaaatgcagatttgcctgaaggagaaaaaaaaccaattgaccagagattggaaggcatcgtaaataaaatgttccagcgatgtctagatgatcacaagtataaacaggctattggcattgctctggagacacgaagactggacgtctttgaaaagaccatactggagtcgaatgatgtcccaggaatgttagcttatagccttaagctctgcatgtctttaatgcagaataaacagtttcggaataaagtac

SEQ ID NO: 170187 - DNA, 696 bp, Homo sapiens
  Payload ID: 13517
  Gene Symbol: PSMD1
  Gene Name: proteasome 26S subunit, non-ATPase 1
  ENST ID: ENST00000447633
  CDS Start-End: 1-578
caggggaagcagctggcctggccctaggtttggttatgttgggctctaaaaatgctcaggctattgaggacatggttggttatgcacaagaaactcaacatgagaagattctgcgtggtcttgcagttggcatagctttagtaatgtatgggaggatggaagaggctgatgctctcattgaatctctctgtcgtgacaaggacccaattcttcgaaggtctggaatgtatactgtagccatggcttattgtggctctggtaacaacaaagcaattcgacgcctgctacatgttgctgtaagtgatgttaatgatgatgtcaggagggcagcagtagaatcacttgggttcattctattcagaacccctgaacagtgcccaagtgttgtctctttgttgtcagagagttacaaccctcatgtgcgctacggagctgcaatggccttggggatatgctgtgctggtacaggaaacaaggtaaagcccacagccaatggggtcagttctttcttggcgccagactgttttccctcgccgcagaatttatgtaacagctgtaaaaatacaagtgcaatgtgatctgtaagagtaaacttgccatacaaagcttcccagtactccctcattctgcgatgctggattgcccaaagctgcttaagaataaatcgtcacattacatggatagctgtaactgaaa

SEQ ID NO: 170188 - DNA, 3161 bp, Homo sapiens
  Payload ID: 13517
  Gene Symbol: PSMD1
  Gene Name: proteasome 26S subunit, non-ATPase 1
  ENST ID: ENST00000619128
  CDS Start-End: 1-2862
atggctacatctaaagctggaattatttctcttctggatgaagatgaaccacagcttaaggaatttgcactacacaaattgaatgcagttgttaatgacttctgggcagaaatttccgagtccgtagacaaaatagaggttttatacgaagatgaaggtttccggagtcggcagtttgcagccttagtggcatctaaagtattttatcacctgggggcttttgaggagtctctgaattatgctcttggagcaggggacctcttcaatgtcaatgataactctgaatatgtggaaactattatagcaaaatgcattgatcactacaccaaacaatgtgtggaaaatgcagatttgcctgaaggagaaaaaaaaccaattgaccagagattggaaggcatcgtaaataaaatgttccagcgatgtctagatgatcacaagtataaacaggctattggcattgctctggagacacgaagactggacgtctttgaaaagaccatactggagtcgaatgatgtcccaggaatgttagcttatagccttaagctctgcatgtctttaatgcagaataaacagtttcggaataaagtactaagagttctagttaaaatctacatgaacttggagaaacctgatttcatcaatgtttgtcagtgcttaattttcttagatgatcctcaggctgtgagtgatatcttagagaaactggtaaaggaagacaacctcctgatggcatatcagatttgttttgatttgtatgaaagtgctagccagcagtttttgtcatctgtaatccagaatcttcgaactgttggcacccctattgcttctgtgcctggatccactaatacgggtactgttccgggatcagagaaagacagtgactcgatggaaacagaagaaaagacaagcagtgcatttgtaggaaagacaccagaagccagtccagagcctaaggaccagactttgaaaatgattaaaattttaagtggtgaaatggctattgagttacatctgcagttcttaatacgaaacaataatacagacctcatgattctaaaaaacacaaaggatgcagtacggaattctgtatgtcatactgcaaccgttatagcaaactcttttatgcactgtgggacaaccagtgaccagtttcttagagataatttggaatggttagccagagccactaactgggcaaaatttactgctacagccagtttgggtgtaattcataagggtcatgaaaaagaagcattacagttaatggcaacataccttcccaaggatacttctccaggatcagcctatcaggaaggtggaggtctctatgcactaggtcttattcatgccaatcatggtggtgatataattgactatctgcttaatcagcttaagaacgccagcaatgatatcgttagacacggtggcagtctgggccttggtttggcagccatgggaactgcacgtcaagatgtttatgatttgctaaaaacaaacctttatcaggatgatgcagtaacaggggaagcagctggcctggccctaggtttggttatgttgggctctaaaaatgctcaggctattgaggacatggttggttatgcacaagaaactcaacatgagaagattctgcgtggtcttgcagttggcatagctttagtaatgtatgggaggatggaagaggctgatgctctcattgaatctctctgtcgtgacaaggacccaattcttcgaaggtctggaatgtatactgtagccatggcttattgtggctctggtaacaacaaagcaattcgacgcctgctacatgttgctgtaagtgatgttaatgatgatgtcaggagggcagcagtagaatcacttgggttcattctattcagaacccctgaacagtgcccaagtgttgtctctttgttgtcagagagttacaaccctcatgtgcgctacggagctgcaatggccttggggatatgctgtgctggtacaggaaacaaggaagccattaatttgctagaaccaatgacaaacgaccccgtgaactacgtgaggcaaggggcactcatagcttcagctctcatcatgatccagcagactgaaatcacttgtccaaaggtgaatcagttcagacagctgtattccaaagtcatcaatgataagcatgatgatgtcatggccaagtttggcgctattctggcccagggcatactggatgcaggtggtcataatgtcacaatctccttgcagtccaggactgggcatactcatatgccttctgtggttggcgtccttgtatttacccagttttggttctggtttcctctttcacacttcctgtcattggcttatacccctacctgtgtcattggccttaacaaggacttaaagatgccgaaagttcagtataaatcgaactgtaaaccatccacatttgcatatcctgcccctctggaagtaccaaaagaaaaagaaaaggaaaaggtttctactgctgtattatctataactgccaaggctaaaaagaaggaaaaagaaaaggaaaaaaaggaggaggagaaaatggaagtggatgaggcagagaaaaaggaggaaaaagagaagaaaaaagaacctgagccaaacttccagttattggataacccagcccgagttatgcctgcccagcttaaggtcctaaccatgccggagacctgtagataccagcctttcaaaccactctctattggaggcatcatcattctgaaggataccagtgaagacattgaggagctggtggaacctgtggcagcacatggcccaaaaatcgaggaggaggaacaagagccagaacccccagaaccatttgagtatattgatgattaagggccagaggatctcacttgcttatctgaagaagattgtccaggctcatattgggaatgcttatgaggaaattcatgccgagacctgctattcaatgcatgtatcgttgcctctgcactgacctgaagaaccctgtctccaagtctttggttgaagagaagatatatgactgttgagtgtgctctttcacagaacttggttttcaaataaatataagatctccagatggacaagacatttgtttttcagcctgggtttttaataaatgtatctaatcctccccacaccatgaaatgcct

SEQ ID NO: 170189 - DNA, 1546 bp, Homo sapiens
  Payload ID: 13518
  Gene Symbol: PSMD10
  Gene Name: proteasome 26S subunit, non-ATPase 10
  Uniprot ID: O75832
  ENST ID: ENST00000217958
  CDS Start-End: 99-779
attggtgaagctctaacggctgttttgactggcgtagccggagccggcgacgtgaggcgggcgttgctcgcgcgacaagtagttgctgggacagcgaaatggaggggtgtgtgtctaacctaatggtctgcaacctggcctacagcgggaagctggaagagttgaaggagagtattctggccgataaatccctggctactagaactgaccaggacagcagaactgcattgcactgggcatgctcagctggacatacagaaattgttgaatttttgttgcaacttggagtgccagtgaatgataaagacgatgcaggttggtctcctcttcatattgcggcttctgctggccgggatgagattgtaaaagcccttctgggaaaaggtgctcaagtgaatgctgtcaatcaaaatggctgtactcccttacattatgcagcttcgaaaaacaggcatgagatcgctgtcatgttactggaaggcggggctaatccagatgctaaggaccattatgaggctacagcaatgcaccgggcagcagccaagggtaacttgaagatgattcatatccttctgtactacaaagcatccacaaacatccaagacactgagggtaacactcctctacacttagcctgtgatgaggagagagtggaagaagcaaaactgctggtgtcccaaggagcaagtatttacattgagaataaagaagaaaagacacccctgcaagtggccaaaggtggcctgggtttaatactcaagagaatggtggaaggttaaacagcttggatttattcttactttgtatgttgtgttgttgtccccagtgtcctacaaactaatgtatttgtgcacaagacatcatctatgaatgatgaagttttctcaccttcaaagtcttataaacatgttgactcttgttcctgctgagttacttgttcgaagcttacagcttgttttccaggcatcgaataactgttgagattgttctactgttgtcgtatattcttctatattgaattctggttaatttggagtaactaattctgtggctgttgtgagtcttcagcaccctcccatgtaccttatatccctctctgaaacagaacagctccaatagcaacaagctagttgttctgccagatgtttctatgtggattctgtaatgttcctccatacagttaaaacatcctaacttgtttttcaagctcactcaggcctacgccaaacgtttctgttttttttaaccatgaggtttaatttatttttgtgataggagggatatttacatattttagtggaccacattttaagttggatggtgtgctctaaaatactgaaaaacaatagcccatatacctatgtatttgtttttgatgggttgtttactctgaaataaaatgtatggttttcttaaaaggaagttttaaagtacctattttgtgtcatcctgtattgaaaagaatgtcaagcttgttaaaatgacatgtaacaaaaatgtattttgatttgtatttcagaaactaaaaaataaaatgttgaaagaa

SEQ ID NO: 170190 - DNA, 713 bp, Homo sapiens
  Payload ID: 13518
  Gene Symbol: PSMD10
  Gene Name: proteasome 26S subunit, non-ATPase 10
  ENST ID: ENST00000340200
  CDS Start-End: 1-582
atggaggggtgtgtgtctaacctaatggtctgcaacctggcctacagcgggaagctggaagagttgaaggagagtattctggccgataaatccctggctactagaactgaccaggcaggttggtctcctcttcatattgcggcttctgctggccgggatgagattgtaaaagcccttctgggaaaaggtgctcaagtgaatgctgtcaatcaaaatggctgtactcccttacattatgcagcttcgaaaaacaggcatgagatcgctgtcatgttactggaaggcggggctaatccagatgctaaggaccattatgaggctacagcaatgcaccgggcagcagccaagggtaacttgaagatgattcatatccttctgtactacaaagcatccacaaacatccaagacactgagggtaacactcctctacacttagcctgtgatgaggagagagtggaagaagcaaaactgctggtgtcccaaggagcaagtatttacattgagaataaagaagaaaagacacccctgcaagtggccaaaggtggcctgggtttaatactcaagagaatggtggaaggttaaacagcttggatttattcttactttgtatgttgtgttgttgtccccagtgtcctacaaactaatgtatttgtgcacaagacatcatctatgaatgatgaagttttctcaccttcaaagtcttataaacatgt

SEQ ID NO: 170191 - DNA, 768 bp, Homo sapiens
  Payload ID: 13518
  Gene Symbol: PSMD10
  Gene Name: proteasome 26S subunit, non-ATPase 10
  Uniprot ID: O75832
  ENST ID: ENST00000361815
  CDS Start-End: 23-478
aagtagttgctgggacagcgaaatggaggggtgtgtgtctaacctaatggtctgcaacctggcctacagcgggaagctggaagagttgaaggagagtattctggccgataaatccctggctactagaactgaccaggacagcagaactgcattgcactgggcatgctcagctggacatacagaaattgttgaatttttgttgcaacttggagtgccagtgaatgataaagacgatgcaggttggtctcctcttcatattgcggcttctgctggccgggatgagattgtaaaagcccttctgggaaaaggtgctcaagtgaatgctgtcaatcaaaatggctgtactcccttacattatgcagcttcgaaaaacaggcatgagatcgctgtcatgttactggaaggcggggctaatccagatgctaaggaccattatgaggctacagcaatgcaccgggcagcagccaaggacacttagcctgtgatgaggagagagtggaagaagcaaaactgctggtgtcccaaggagcaagtatttacattgagaataaagaagaaaagacacccctgcaagtggccaaaggtggcctgggtttaatactcaagagaatggtggaaggttaaacagcttggatttattcttactttgtatgttgtgttgttgtccccagtgtcctacaaactaatgtatttgtgcacaagacatcatctatgaatgatgaagttttctcaccttcaaagtcttataaacatgttgactcttgttcc

SEQ ID NO: 170192 - DNA, 779 bp, Homo sapiens
  Payload ID: 13518
  Gene Symbol: PSMD10
  Gene Name: proteasome 26S subunit, non-ATPase 10
  ENST ID: ENST00000372295
  CDS Start-End: 23-580
aagtagttgctgggacagcgaaatggaggggtgtgtgtctaacctaatggtctgcaacctggcctacagcgggaagctggaagagttgaaggagagtattctggccgataaatccctggctactagaactgaccaggacagcagaactgcattgcactgggcatgctcagctggacatacagaaattgttgaatttttgttgcaacttggagtgccagtgaatgataaagacgatgcagcttcgaaaaacaggcatgagatcgctgtcatgttactggaaggcggggctaatccagatgctaaggaccattatgaggctacagcaatgcaccgggcagcagccaagggtaacttgaagatgattcatatccttctgtactacaaagcatccacaaacatccaagacactgagggtaacactcctctacacttagcctgtgatgaggagagagtggaagaagcaaaactgctggtgtcccaaggagcaagtatttacattgagaataaagaagaaaagacacccctgcaagtggccaaaggtggcctgggtttaatactcaagagaatggtggaaggttaaacagcttggatttattcttactttgtatgttgtgttgttgtccccagtgtcctacaaactaatgtatttgtgcacaagacatcatctatgaatgatgaagttttctcaccttcaaagtcttataaacatgttgactcttgttcctgctgagttacttgttcgaagcttacagcttgttttccaggcatcgaataactgt

SEQ ID NO: 170193 - DNA, 878 bp, Homo sapiens
  Payload ID: 13518
  Gene Symbol: PSMD10
  Gene Name: proteasome 26S subunit, non-ATPase 10
  ENST ID: ENST00000372296
  CDS Start-End: 23-355
aagtagttgctgggacagcgaaatggaggggtgtgtgtctaacctaatggtctgcaacctggcctacagcgggaagctggaagagttgaaggagagtattctggccgataaatccctggctactagaactgaccaggacagcagaactgcattgcactgggcatgctcagctggacatacagaaattgttgaatttttgttgcaacttggagtgccagtgaatgataaagacgatgcagcttcgaaaaacaggcatgagatcgctgtcatgttactggaaggcggggctaatccagatgctaaggaccattatgaggctacagcaatgcaccgggcagcagccaaggacacttagcctgtgatgaggagagagtggaagaagcaaaactgctggtgtcccaaggagcaagtatttacattgagaataaagaagaaaagacacccctgcaagtggccaaaggtggcctgggtttaatactcaagagaatggtggaaggttaaacagcttggatttattcttactttgtatgttgtgttgttgtccccagtgtcctacaaactaatgtatttgtgcacaagacatcatctatgaatgatgaagttttctcaccttcaaagtcttataaacatgttgactcttgttcctgctgagttacttgttcgaagcttacagcttgttttccaggcatcgaataactgttgagattgttctactgttgtcgtatattcttctatattgaattctggttaatttggagtaactaattctgtggctgttgtgagtcttcagcaccctcccatgtaccttatatccctctctgaaacagaacagctccaatagcaacaagctagttgttctgccagatgtttctatgtgg

SEQ ID NO: 170194 - DNA, 4098 bp, Homo sapiens
  Payload ID: 13519
  Gene Symbol: PSMD11
  Gene Name: proteasome 26S subunit, non-ATPase 11
  Uniprot ID: O00231
  ENST ID: ENST00000261712
  CDS Start-End: 264-1532
gatctagagctcccactgcggggcaccgcctcttttcctcgccggccgcccgctaggaggcgctggggagcttgcagcccacctgcgaggcggtcccgctctccccacccctcagcccgcgcccggcggagagactacaactcccggagtgctctgggaacggagccacgggagctacaggcggagggacccgagggcgggctttccgggtgtgtgtttccggcgtcggcggccgcggccggggacggtgtgagagcggtaagatggcggcggcggcggtggtggagttccagagagcccagtctctactcagcaccgaccgggaggcctccatcgacatcctccactccatcgtgaagcgtgacattcaggaaaacgatgaagaggcagtgcaagtcaaagagcagagcatcctggaactgggatctctcctggcaaagactggacaagctgcagagcttggaggactcctgaagtatgtacgacccttcttgaattccatcagcaaggctaaagcagctcgcctggtccgatctcttcttgatctgtttcttgatatggaagcagctacagggcaggaggtcgagctgtgtttagagtgcatcgaatgggccaagtcagagaaaagaactttcttacgccaagctttggaggcaagactggtgtctttgtactttgataccaagaggtaccaggaagcattgcatttgggttctcagctgctgcgggagttgaaaaagatggacgacaaagctcttttggtggaagtacagcttttagaaagcaaaacataccatgccctgagcaacctgccgaaagcccgagctgccttaacttctgctcgaaccacagcaaatgccatctactgcccccctaaattgcaggccaccttggacatgcagtcgggtattatccatgcagcagaagagaaggactggaaaactgcgtactcatacttctatgaggcatttgagggttatgactccatcgacagccccaaggccatcacatctctgaagtacatgttgctgtgcaaaatcatgctcaacaccccagaagatgtccaggctttggtgagcgggaagcttgcacttcggtatgcagggaggcagacagaagcattaaaatgcgtggctcaggctagcaagaacagatcactggcagattttgaaaaggctctgacagattaccgggcagagctccgggatgacccaatcatcagcacacacttggccaagttgtatgataacttactagaacagaatctgatccgagtcattgagcctttttccagagtacagattgaacacatatctagtctcatcaaactctccaaggccgacgtggaaaggaaattatcacagatgattcttgacaagaaatttcatgggattttggaccagggggagggtgtcctgattattttcgatgaacccccagtagataaaacttacgaagctgctctggaaacaattcagaacatgagcaaagtagtggattccctctacaacaaagccaagaaactgacatagagttggatctgtagcggtcctttggagagtgtgtgtggcgggagagtgaaaccttgggggaaaatgctaggagattcttttttctttttgttctacttttcgctcggaaagtttttaaatcctcatttggtgcatctgtattccagccaataggtgtgccagttttcatgtaatctttactggcccaacttgggagtggggaaattgcttaaaaaaaaagaaaaagaaaaaaaaaaagattattctaaataaaaggaaaaaggcttacactacctaaagctgtgctctctgcctcctgggagagggccgcaaagccaggcaccccgccaaccactgggggtcctaatccacctgctgggcatcacctctcctcctcctcagaattgggtgtttgctgaccatcaaaagcaatgactttttattctgtttgtactgaaccaaaacaaacaactgtgtatagactgctgttttcttttttatttgaaatgaggcattttggtgttctttcccctaccatacggcctgtctgcccttccctccccacattggctccagcagagtagccgaaggtcctgccgccgccgccaccaccaccaccactgcagcaacaacagcagcagcagcagcagcgcctgcatagctccactctgacctgtgaaggaatggggatgaggccaggagctagtgtctaccacggccacacagggagcagtgtgggcccttagcccccaaggggcctgctatgcatgtggctttttttttttttttaaacacagtaaactagattagtcgtcagtgttttaattgcccctcttctcctctcctgcattcctctcctctcttctttcctctctgtcccttctctttcccctctcaaccaggagaccatcatgtctctctgccttcctcctctcccctccaggggagtcaggctgtctgtgaaagccatgagcttctctccctctcccactcctcctctcctactttcagatggatttattccttttttaaacaatgaacatcggaaatgagactgtggggtgtggtttctctctctcttttttttttaattttctttgttgggtttttgagcaacctcatgtccccttcccagggagctttttaatttacctcttagaactcaagtggatgggaagtagagcactatgtgtcagtatgctttgttttctgacacgattacacagcgaggctttaatgccatttgggtaggtgagcttctgcacttctgttgtgctgaactgtattttcttctctcatctcctctttgtctttttctcttttcctctccttcctgccttcttctgctggcctccttttctctttctttaccttccttggattatccttccaggttttcataataaatttatattttgtaaaaggattttgttgtaccaggttttgcatcctcactgaatctgactggcttttattttcctctccaaaatcaggtttttgttctcaacatctttccccatcatgtctagtcactgttttggttttggcaccatcagtatcaaatgtacaaacggttcttgctaaccaacaccaggtatatctgatgttcagatgagttccaataaaaataatttttttttttttcaaaaggtgtctttttcttgagtgctggagggcttccaagcaagtccagacagctctgtgtggccccacactagtctagctctcatctggccaaagctgttatctcatttgtgtaatgggagtccttaaggtaaatttggggtccaaacttggagggctttgggggcaagaaagttggtgtgtgagttctgaggttggaaatgagttcaggtgtcttcttccagggcagcatggtccagtgagcacatgtaagtttgggcagtagatcctctgagcctactttctcttctactcagtgaggatgctgcttccttggcaggtgattgtgatgtgaagcttagtaagtcatagacgtgcaggtgtctggagagtcctgacatgcagttgtggtttcgtttccttttggaatcttcaaaggcagcgattttcatattgcctcacaccctggcgggggcggggggctctgggaccactgggggacctgctaaatcctcttcagtctgagcagttcagccattgtcagttttagtattgtgtctctgtatttcacttgcagaaagagctttgcttctataaaggactttaaaaagtactccaaagagatctagttttggagtagaggggagatgttttctcaaacttagggcagtcctgagatgctcaggcagtagcccttttctcagttccctttgcgggtcttggtcagatgatgccctctagacccgtgctgtccaatatgtagccgctagccatgtgcagctgtcaggcccttgcaacgtggctggttcgagctgtgatacactgcaagtgtaaacacaaaccagacttcgaaggcttagtatgataacaaaagaaaaggagtgtaaaatatgtcaataacttttttatatatgtgttgaaatattttgggtattgggttaaataaaatatattattaaaattc

SEQ ID NO: 170195 - DNA, 2159 bp, Homo sapiens
  Payload ID: 13519
  Gene Symbol: PSMD11
  Gene Name: proteasome 26S subunit, non-ATPase 11
  Uniprot ID: O00231
  ENST ID: ENST00000457654
  CDS Start-End: 51-1319
gtgtttccggcgtcggcggccgcggccggggacggtgtgagagcggtaagatggcggcggcggcggtggtggagttccagagagcccagtctctactcagcaccgaccgggaggcctccatcgacatcctccactccatcgtgaagcgtgacattcaggaaaacgatgaagaggcagtgcaagtcaaagagcagagcatcctggaactgggatctctcctggcaaagactggacaagctgcagagcttggaggactcctgaagtatgtacgacccttcttgaattccatcagcaaggctaaagcagctcgcctggtccgatctcttcttgatctgtttcttgatatggaagcagctacagggcaggaggtcgagctgtgtttagagtgcatcgaatgggccaagtcagagaaaagaactttcttacgccaagctttggaggcaagactggtgtctttgtactttgataccaagaggtaccaggaagcattgcatttgggttctcagctgctgcgggagttgaaaaagatggacgacaaagctcttttggtggaagtacagcttttagaaagcaaaacataccatgccctgagcaacctgccgaaagcccgagctgccttaacttctgctcgaaccacagcaaatgccatctactgcccccctaaattgcaggccaccttggacatgcagtcgggtattatccatgcagcagaagagaaggactggaaaactgcgtactcatacttctatgaggcatttgagggttatgactccatcgacagccccaaggccatcacatctctgaagtacatgttgctgtgcaaaatcatgctcaacaccccagaagatgtccaggctttggtgagcgggaagcttgcacttcggtatgcagggaggcagacagaagcattaaaatgcgtggctcaggctagcaagaacagatcactggcagattttgaaaaggctctgacagattaccgggcagagctccgggatgacccaatcatcagcacacacttggccaagttgtatgataacttactagaacagaatctgatccgagtcattgagcctttttccagagtacagattgaacacatatctagtctcatcaaactctccaaggccgacgtggaaaggaaattatcacagatgattcttgacaagaaatttcatgggattttggaccagggggagggtgtcctgattattttcgatgaacccccagtagataaaacttacgaagctgctctggaaacaattcagaacatgagcaaagtagtggattccctctacaacaaagccaagaaactgacataggtgagtgctggcttcaggaccccagggctgggcagctctgtcttctgcgtgtcgagactgaaaacctcctcctggtgtcctcatggcttcctgattgacactgctctgtcttctcttgcagagttggatctgtagcggtcctttggagagtgtgtgtggcgggagagtgaaaccttgggggaaaatgctaggagattcttttttctttttgttctacttttcgctcggaaagtttttaaatcctcatttggtgcatctgtattccagccaataggtgtgccagttttcatgtaatctttactggcccaacttgggagtggggaaattgcttaaaaaaaaagaaaaagaaaaaaaaaaagattattctaaataaaaggaaaaaggcttacactacctaaagctgtgctctctgcctcctgggagagggccgcaaagccaggcaccccgccaaccactgggggtcctaatccacctgctgggcatcacctctcctcctcctcagaattgggtgtttgctgaccatcaaaagcaatgactttttattctgtttgtactgaaccaaaacaaacaactgtgtatagactgctgttttcttttttatttgaaatgaggcattttggtgttctttcccctaccatacggcctgtctgcccttccctccccacattggctccagcagagtagccgaaggtcctgccgccgccgccaccaccaccaccactgcagcaacaacagcagcagcagcagcagcgcctgcatagctccactctgacctgtgaaggaatggggatgaggccaggagctagtgtctaccacggccacacagggagcagtgtgggc

SEQ ID NO: 170196 - DNA, 480 bp, Homo sapiens
  Payload ID: 13519
  Gene Symbol: PSMD11
  Gene Name: proteasome 26S subunit, non-ATPase 11
  ENST ID: ENST00000578213
  CDS Start-End: 344-480
gcgcccggcggagagactacaactcccggagtgctctgggaacggagccacgggagctacaggcggagggacccgagggcgggctttccgggtgtgtgtttccggcgtcggcggccgcggccggggacggtgtgagagcgtgaagcgtgacattcaggaaaacgatgaagaggcagtgcaagtcaaagagcagagcatcctggaactgggatctctcctggcaaagactggacaagctgcagagcttggaggactcctgaagtatgtacgacccttcttgaattccatcagcaaggctaaagcagctcgcctggtccgatctcttcttgatctgtttcttgatatggaagcagctacagggcaggaggtcgagctgtgtttagagtgcatcgaatgggccaagtcagagaaaagaactttcttacgccaagctttggaggcaagactggtgtctttgtactttgataccaagaggtacca

SEQ ID NO: 170197 - DNA, 540 bp, Homo sapiens
  Payload ID: 13519
  Gene Symbol: PSMD11
  Gene Name: proteasome 26S subunit, non-ATPase 11
  ENST ID: ENST00000580904
  CDS Start-End: 525-540
gaattggctcaacaagtagtatgagaatgcacctgtatgtgggacttgcaagatgttggcatttgacttagtgtgttgaattttggtattccagacctgcacggagaaaggacaatgacaagatcttgatactttatcattggggatactagagaaggagaggaagtgggcgtcaaggtgtatctttgaatgatattggtaaaaggtgtttcattttaaaagttctgatcttaggtcagttacttctacggaaccagagtcatctcaatcaccgttacatggatattttattctgagtacacactattatttagaactaattgaagcgtgacattcaggaaaacgatgaagaggcagtgcaagtcaaagagcagagcatcctggaactgggatctctcctggcaaagactggacaagctgcagagcttggaggactcctgaagtatgtacgacccttcttgaattccatcagcaaggctaaagcagctcgcctggtccgatctcttcttgatctgtttcttgatatggaagcagctacag

SEQ ID NO: 170198 - DNA, 582 bp, Homo sapiens
  Payload ID: 13519
  Gene Symbol: PSMD11
  Gene Name: proteasome 26S subunit, non-ATPase 11
  ENST ID: ENST00000579451
  CDS Start-End: 20-582
acggtgtgagagcggtaagatggcggcggcggcggtggtggagttccagagagcccagtctctactcagcaccgaccgggaggcctccatcgacatcctccactccatcgtgaagcgtgacattcaggaaaacgatgaagaggcagtgcaagtcaaagagcagagcatcctggaactgggatctctcctggcaaagactggacaagctgcagagcttggaggactcctgaagtatgtacgacccttcttgaattccatcagcaaggctaaagcagctcgcctggtccgatctcttcttgatctgtttcttgatatggaagcagctacagggcaggagtttctctttgttacagggcatttgatactttgggtctgttccatgctttgctttgtaagtggagattgtcagtggtccctggaatcctcattacatcagggtcacaaactgattcttgtctttgaggtcgagctgtgtttagagtgcatcgaatgggccaagtcagagaaaagaactttcttacgccaagctttggaggcaagactggtgtctttgtactttgataccaagaggtaccaggaagc

SEQ ID NO: 170199 - DNA, 559 bp, Homo sapiens
  Payload ID: 13519
  Gene Symbol: PSMD11
  Gene Name: proteasome 26S subunit, non-ATPase 11
  ENST ID: ENST00000584340
  CDS Start-End: 1-271
caaaacataccatgccctgagcaacctgccgaaagcccgagctgccttaacttctgctcgaaccacagcaaatgccatctactgcccccctaaattgcaggccaccttggacatgcagtcgggtattatccatgcagcagaagagaaggactggaaaactgcgtactcatacttctatgaggcatttgagggttatgactccatcgacagccccaaggccatcacatctctgaagtacatgttgctgtgcaaaatcatgctcaacacgtaggtgcaccttaactctggactacaagaactcagatccttcagcaagtctgtttgccatggcagagatggcctgagcagggagtttggccagttacagaaacagcagcagctgcggcctctagggctggctaagcccagaagatgtccaggctttggtgagcgggaagcttgcacttcggtatgcagggaggcagacagaagcattaaaatgcgtggctcaggctagcaagaacagatcactggcagattttgaaaaggctctgacagattaccgggcagagctccggga

SEQ ID NO: 170200 - DNA, 4406 bp, Homo sapiens
  Payload ID: 13520
  Gene Symbol: PSMD12
  Gene Name: proteasome 26S subunit, non-ATPase 12
  Uniprot ID: O00232
  ENST ID: ENST00000356126
  CDS Start-End: 109-1479
gcgtgggctcccgatgggctgcctgagcgggtgcgcgggcaacttccggtgtgggtgacgagtggtggccgaagcagggggacagcaagggacgctcaggcggggaccatggcggacggcggctcggagcgggctgacgggcgcatcgtcaagatggaggtggactacagcgccacggtggatcagcgcctacccgagtgtgcgaagctagccaaggaaggaagacttcaagaagtcattgaaacccttctctctctggaaaagcagactcgtactgcttccgatatggtatcgacatcccgtatcttagttgcagtagtgaagatgtgctatgaggctaaagaatgggatttacttaatgaaaatattatgcttttgtccaaaaggcggagtcagttaaaacaagctgttgccaaaatggttcaacagtgctgtacttatgttgaggaaatcacagaccttcctatcaaacttcgattaattgatactctacgaatggttaccgaaggcaagatttatgttgaaattgagcgtgcgcgactgactaaaacattagcaactataaaagaacaaaatggtgatgtgaaagaggcagcctccattttacaggagttacaggtggaaacctacgggtcaatggaaaagaaagagcgagtggaatttattttggagcaaatgaggctctgcctagctgtgaaggattacattcgaacacaaatcatcagcaagaaaattaacaccaaatttttccaggaagaaaatacagagaaattaaagttgaagtactataatttaatgattcagctggatcaacatgagggatcctatttgtctatttgtaagcactacagagcaatatatgatactccctgtatacaggcagaaagtgaaaaatggcagcaggctctgaagagtgttgtactctatgttatcctggctccttttgacaatgaacagtcagatttggttcaccgaataagtggtgacaagaagttagaagaaattcccaaatacaaggatcttttaaagctttttaccacaatggagttgatgcgttggtccacacttgttgaggactatggaatggaattaagaaaaggttcccttgagagtcctgcaacggatgtttttggttctacagaggaaggtgaaaaaaggtggaaagacttgaagaacagagttgttgaacataatattagaataatggccaagtattatactcggataacaatgaaaaggatggcacagcttctggatctatctgttgatgagtccgaagcctttctctcaaatctagtagttaacaagaccatctttgctaaagtagacagattagcaggaattatcaacttccagagacccaaggatccaaataatttattaaatgactggtctcagaaactgaactcattaatgtctctggttaacaaaactacgcatctcatagccaaagaggagatgatacataatctacaataagggtcttagtgctttagaaaaaagttaaaattggaagtcattaaaaaaagactgttataatggtgtatatgttggggttttttttctaagcttctttgtcttaaattttaaaatagtgaatatgtttgagactccctttgacctttcagttccccaagttcattgttaactttgcatttgcaattggtgcaaaaatacagatttctgtcgtctgaatacacaaaaagttgtgtcataacttacccagatatgtttttctatcatttgaaacctttttagctactgtttgttttcattcaactaacaaacatattccaataataaaagcagtatatacatatttcctttctacagttacctctgattctcaacattttgtggggtagtgatttggcaagtgttttttaaataaaacaaatctcattgtaaagctatcagtcatttagtagaatagaaaagcaacatagagcatacaagaacatttgggatagagttgtgatttgtgaagaatttgtactttgatattgtggcggaaagtctagactgagtgtgtatgctggtaaactgtagacttttttttttttttttttgagtccggctggttccaatcacagtagcttgattgctttcagccctcatcctctcacttgatcagttgttcaacagaatcagctgacataattgacacagtttattgggtgttaagtccgctctatagggatagtgactactttttttttttttttttttttgctcttcttcctctcccctttctttatatgggtttaaatttaacataaagttgtttttataaggcttatttgtggctttaacttgtaagtctgattacatcattattgttccaaattcattatctctgtaggaacttttagttccattatatgaacactggataacctaattttttttaatgctttaaaaaaatggcaaaaagacgtcaggccaccctcatagtaagtggtgtagtattaaaatattttcacggaattaaaagtagcttgctgtcaaagaaacacctgagatgaattggtgtgaacgaattttgcaagtttaatttgatttatttcagagaaaatagaaaaaacaatgttagaaggttatttaaaatgatacttaaataaagaaagtgtgaggtctactttaaaaaaattcaaatgaagagaaaaagaaaaacagcattctagaaatggcatttctcctaattaattttccacttaatggaagattatcaattgtcctattttatgatcccaggactgaagacagttgtgggatatctgtcatatttatcctgtgagtcattgtgaataatgacatacagtactgaagtaatctgattttattctttggaaattcaatgcattggtcacactaataacatcaacatctgctatcacttatctttttaaaactaaccaaaaaaggccgggtgcagtggatcccagcactttgggaggccaaggcgggtggatcatctaaggtcaggatttcgagactagcctggccaacatggcaaaaccctgtctctactaaaaaaaatacaaaaatttgccgggcgtggtggcgtgtgcctgtagtcccagttacttgggaggctgaggtgggagaattccttgaagccaggaggcggaggttgcagtgagccaagatcacaccattgcactccagcctgggtgacagagtgagactccgtctcaaaaaaaaaaaaacaaaactggaaagttcagaaacagaagttcacactaacagagtatggttttaattttcctttgaatgaaaaggatagaagataaaattgtgtattgttaacatgtaaataaaattggagctaatttgaaactagcttctcaataacttcatctttctagagactcattacctgtgggcttgtcaaacctggactatttggccaaataggttgctatagagattgcaagtgttcctcctctttatttttttcatattttttgagacggagtttcactcttgttgcccaggctggattgcagtgtcacgatctcggctcactgcaacctttgcctcccatattcaagcagttctcctgcctcaacctcccaagtagctgggattataggcgcctgccaccacacctagctaatttttgtgtttttagtagagatggtttcatcatgttggccgggctggtctcaaactcctgacctcaggtgatccacccgccttggctgcccaaagtgctgggattacaggcatgagccactgcacccaactcctctttcgtctttctttaacacacactaggctctttgtgtattatgattcagtgctatttgtaactgtgtcccagtgaccaaattgcactcgactcgatcagctgttcatccatttcgtgttttttcctgtcaaacattaatccagcaaatatatgaggtatttaccaatttattttcttagtattacaaaataattcattagcataaagtacaatagtgaaatatttgagttgttcggaacctcaattaatcctgttttacatttcagacctaaagctggcaatcaggagaagaagcactttgttttaaatgtggagaagataacacttgattccatttcattgtcattagtgtattaaccagcaggagaggtgatgagccatttttcaaatgaaataccttttatttccatataatttttttattttagagttcaatagctgtttctatgattatcctcaatttccatatgttactgaatctgaaaaacatctttaaaattcaaacagttccattttctctcttgtaagtgttaaatgtgataaaagtacatattttaaattgttttcagctcttggatatagcagcaataaaaacactaatttgtgggtatttaagaaaacctggagaataaactcatactttaaaagatca

SEQ ID NO: 170201 - DNA, 2437 bp, Homo sapiens
  Payload ID: 13520
  Gene Symbol: PSMD12
  Gene Name: proteasome 26S subunit, non-ATPase 12
  Uniprot ID: O00232
  ENST ID: ENST00000357146
  CDS Start-End: 87-1397
ctgagcgggtgcgcgggcaacttccggtgtgggtgacgagtggtggccgaagcagggggacagcaagggacgctcaggcggggaccatggcggacggcggctcggagcgggctgacgggcgcatcgtcaagatggaggtggactacagcgccacggtggatcagcgcctacccgagtgtgcgaagctagccaaggcttccgatatggtatcgacatcccgtatcttagttgcagtagtgaagatgtgctatgaggctaaagaatgggatttacttaatgaaaatattatgcttttgtccaaaaggcggagtcagttaaaacaagctgttgccaaaatggttcaacagtgctgtacttatgttgaggaaatcacagaccttcctatcaaacttcgattaattgatactctacgaatggttaccgaaggcaagatttatgttgaaattgagcgtgcgcgactgactaaaacattagcaactataaaagaacaaaatggtgatgtgaaagaggcagcctccattttacaggagttacaggtggaaacctacgggtcaatggaaaagaaagagcgagtggaatttattttggagcaaatgaggctctgcctagctgtgaaggattacattcgaacacaaatcatcagcaagaaaattaacaccaaatttttccaggaagaaaatacagagaaattaaagttgaagtactataatttaatgattcagctggatcaacatgagggatcctatttgtctatttgtaagcactacagagcaatatatgatactccctgtatacaggcagaaagtgaaaaatggcagcaggctctgaagagtgttgtactctatgttatcctggctccttttgacaatgaacagtcagatttggttcaccgaataagtggtgacaagaagttagaagaaattcccaaatacaaggatcttttaaagctttttaccacaatggagttgatgcgttggtccacacttgttgaggactatggaatggaattaagaaaaggttcccttgagagtcctgcaacggatgtttttggttctacagaggaaggtgaaaaaaggtggaaagacttgaagaacagagttgttgaacataatattagaataatggccaagtattatactcggataacaatgaaaaggatggcacagcttctggatctatctgttgatgagtccgaagcctttctctcaaatctagtagttaacaagaccatctttgctaaagtagacagattagcaggaattatcaacttccagagacccaaggatccaaataatttattaaatgactggtctcagaaactgaactcattaatgtctctggttaacaaaactacgcatctcatagccaaagaggagatgatacataatctacaataagggtcttagtgctttagaaaaaagttaaaattggaagtcattaaaaaaagactgttataatggtgtatatgttggggttttttttctaagcttctttgtcttaaattttaaaatagtgaatatgtttgagactccctttgacctttcagttccccaagttcattgttaactttgcatttgcaattggtgcaaaaatacagatttctgtcgtctgaatacacaaaaagttgtgtcataacttacccagatatgtttttctatcatttgaaacctttttagctactgtttgttttcattcaactaacaaacatattccaataataaaagcagtatatacatatttcctttctacagttacctctgattctcaacattttgtggggtagtgatttggcaagtgttttttaaataaaacaaatctcattgtaaagctatcagtcatttagtagaatagaaaagcaacatagagcatacaagaacatttgggatagagttgtgatttgtgaagaatttgtactttgatattgtggcggaaagtctagactgagtgtgtatgctggtaaactgtagacttttttttttttttttttgagtccggctggttccaatcacagtagcttgattgctttcagccctcatcctctcacttgatcagttgttcaacagaatcagctgacataattgacacagtttattgggtgttaagtccgctctatagggatagtgactactttttttttttttttttttttgctcttcttcctctcccctttctttatatgggtttaaatttaacataaagttgtttttataaggcttatttgtggctttaacttgtaagtctgattacatcattattgttccaaattcattatctctgtaggaacttttagttccattatatgaacactggataacctaattttttttaatgctttaaaaaaatggcaaaaagacgtcaggccaccctcatagtaagtggtgtagtattaaaatattttcacggaattaaaagtagcttgctgtcaaagaaacacctg

SEQ ID NO: 170202 - DNA, 1752 bp, Homo sapiens
  Payload ID: 13520
  Gene Symbol: PSMD12
  Gene Name: proteasome 26S subunit, non-ATPase 12
  ENST ID: ENST00000584008
  CDS Start-End: 29-157
gacagcaagggacgctcaggcggggaccatggcggacggcggctcggagcgggctgacgggcgcatcgtcaagatggaggtggactacagcgccacggtggatcagcgcctacccgagtgtgcgaagctagccaaggcatgcctttataggtattgatttaaatcttacaccaaccctgtggattggtacaattattgtgcccacttcgctgaagagaaaattgagagtcagagagcttgtgttttactcaaggttgtgtaacaaatcattgaaagattggattcattcaggaattaaaggaggtgcaaacagaacttatactcaacattgatgttgaacaaactcattagtcgcttacatcatttacaaggattattttaatgaggaaaatgagtcactgaagtcacatgttctaacaggaaggaagacttcaagaagtcattgaaacccttctctctctggaaaagcagactcgtactgcttccgatatggtatcgacatcccgtatcttagttgcagtagtgaagatgtgctatgaggctaaagaatgggatttacttaatgaaaatattatgcttttgtccaaaaggcggagtcagttaaaacaagctgttgccaaaatggttcaacagtgctgtacttatgttgaggaaatcacagaccttcctatcaaacttcgattaattgatactctacgaatggttaccgaaggcaagatttatgttgaaattgagcgtgcgcgactgactaaaacattagcaactataaaagaacaaaatggtgatgtgaaagaggcagcctccattttacaggagttacaggtggaaacctacgggtcaatggaaaagaaagagcgagtggaatttattttggagcaaatgaggctctgcctagctgtgaaggattacattcgaacacaaatcatcagcaagaaaattaacaccaaatttttccaggaagaaaatacagagaaattaaagttgaagtactataatttaatgattcagctggatcaacatgagggatcctatttgtctatttgtaagcactacagagcaatatatgatactccctgtatacaggcagaaagtgaaaaatggcagcaggctctgaagagtgttgtactctatgttatcctggctccttttgacaatgaacagtcagatttggttcaccgaataagtggtgacaagaagttagaagaaattcccaaatacaaggatcttttaaagctttttaccacaatggagttgatgcgttggtccacacttgttgaggactatggaatggaattaagaaaaggttcccttgagagtcctgcaacggatgtttttggttctacagaggaaggtgaaaaaaggtggaaagacttgaagaacagagttgttgaacataatattagaataatggccaagtattatactcggataacaatgaaaaggatggcacagcttctggatctatctgttgatgagtccgaagcctttctctcaaatctagtagttaacaagaccatctttgctaaagtagacagattagcaggaattatcaacttccagagacccaaggatccaaataatttattaaatgactggtctcagaaactgaactcattaatgtctctggttaacaaaactacgcatctcatagccaaagaggagatgatacataatctacaataagggtcttagtgctttagaaaaaagttaaaattggaagtcattaaaaaaagactgttataatggtgtata

SEQ ID NO: 170203 - DNA, 560 bp, Homo sapiens
  Payload ID: 13520
  Gene Symbol: PSMD12
  Gene Name: proteasome 26S subunit, non-ATPase 12
  ENST ID: ENST00000579365
  CDS Start-End: 59-175
gtgggtgacgagtggtggccgaagcagggggacagcaagggacgctcaggcggggaccatggcggacggcggctcggagcgggctgacgggcgcatcgtcaagatggaggtggactacagcgccacggtggatcagcgcctacccgagtgtgcgaagctagccaaggttgtgtaacaaatcattgaaagattggattcattcaggaattaaaggaggtgcaaacagaacttatactcaacattgatgttgaacaaactcattagtcgcttacatcatttacaaggattattttaatgaggaaaatgagtcactgaagtcacatgttctaacaggaaggaagacttcaagaagtcattgaaacccttctctctctggaaaagcagactcgtactgcttccgatatggtatcgacatcccgtatcttagttgcagtagtgaagatgtgctatgaggctaaagaatgggatttacttaatgaaaatattatgcttttgtccaaaaggcggagtcagttaaaacaagctgttgccaaaatggttcaacagtgctgtacttatgt

SEQ ID NO: 170204 - DNA, 1427 bp, Homo sapiens
  Payload ID: 13521
  Gene Symbol: PSMD13
  Gene Name: proteasome 26S subunit, non-ATPase 13
  ENST ID: ENST00000352303
  CDS Start-End: 25-1074
tgtgccgggggtcttcctgctgtcatgaaggacgtaccgggcttcctacagcagagccagaactccgggcccgggcagcccgctgtgtggcaccgtctggaggagctctacacgaagaagttgtggcatcagctgacacttcaggtgcttgattttgtgcaggatccgtgctttgcccaaggagatggtctcattaagctttatgaaaactttatcagtgaatttgaacacagggtgaaccctttgtccctcgtggaaatcattcttcatgtagttagacagatgactgatcctaatgtggctcttacttttctggaaaagactcgtgagaaggtgaaaagtagtgatgaggcagtgatcctgtgtaaaacagcaattggagctctaaaattaaacatcggggacctacaggttacaaaggaaacaattgaagatgttgaagaaatgctcaacaaccttcctggtgtgacatcggttcacagtcgtttctatgatctctccagtaaatactatcaaacaatcggaaaccacgcgtcctactacaaagatgctctgcggtttttgggctgtgttgacatcaaggatctaccagtgtctgagcagcaggagagagccttcacgctggggctagcaggacttctcggcgagggagtttttaactttggagaactcctcatgcaccctgtgctggagtccctgaggaatactgaccggcagtggctgattgacaccctctatgccttcaacagtggcaacgtagagcggttccagactctgaagactgcctggggccagcagcctgatttagcagctaatgaagcccagcttctgaggaaaattcagttgttgtgcctcatggaggtggagcttctggtgatgaaggccctttcggtggggctggtgaaaggcagtatagacgaggtggacaaacgagtccacatgacctgggtgcagccccgagtgttggatttgcaacagatcaagggaatgaaggaccgcctggagttctggtgcacggatgtgaagagcatggagatgctggtggagcaccaggcccatgacatcctcacctagggccccctggttccccgtcgtgtctcctttgactcacctgagagaggcgtttgcagccaatgaagctggctgctcagacggtcgacattgaatttgggtgggggttgggatcctgtctgaagtacagactgttcttgctctaaaaacaggactgtccctgatgggagccaggccacagggaggaggcttctttgtgggtctctcctgcagagggtgggggtctcagggtcttaggtgatacgggagagaaagaacgtgccaggcaggaggccccctgaagtctgtgtactccgaggtggatctccatccccatccacctgtacggacatcttttccgttgcggtttgagaatg

SEQ ID NO: 170205 - DNA, 1489 bp, Homo sapiens
  Payload ID: 13521
  Gene Symbol: PSMD13
  Gene Name: proteasome 26S subunit, non-ATPase 13
  ENST ID: ENST00000382671
  CDS Start-End: 13-231
cttcctgctgtcatgaaggacgtaccgggcttcctacagcagagccagaactccgggcccgggcagcccgctgtgtggcaccgtctggaggagctctacacgaagaagttgtggcatcagctgacacttcaggtgcttgattttgtgcaggatccgtgctttgcccaaggagatggtctcattaagggtgaaccctttgtccctcgtggaaatcattcttcatgtagttagacagatgactgatcctaatgtggctcttacttttctggaaaagactcgtgagaaggtgaaaagtagtgatgaggcagtgatcctgtgtaaaacagcaattggagctctaaaattaaacatcggggacctacaggttacaaaggaaacaattgaagatgttgaagaaatgctcaacaaccttcctggtgtgacatcggttcacagtcgtttctatgatctctccagtaaatactatcaaacaatcggaaaccacgcgtcctactacaaagatgctctgcggtttttgggctgtgttgacatcaaggatctaccagtgtctgagcagcaggagagagccttcacgctggggctagcaggacttctcggcgagggagtttttaactttggagaactcctcatgcaccctgtgctggagtccctgaggaatactgaccggcagtggctgattgacaccctctatgccttcaacagtggcaacgtagagcggttccagactctgaagactgcctggggccagcagcctgatttagcagctaatgaagcccagcttctgaggaaaattcagttgttgtgcctcatggagatgactttcacacgacctgccaatcacagacaactcacttttgaagaaattgccaaaagtgctaaaatcacagtgaatgaggtggagcttctggtgatgaaggccctttcggtggggctggtgaaaggcagtatagacgaggtggacaaacgagtccacatgacctgggtgcagccccgagtgttggatttgcaacagatcaagggaatgaaggaccgcctggagttctggtgcacggatgtgaagagcatggagatgctggtggagcaccaggcccatgacatcctcacctagggccccctggttccccgtcgtgtctcctttgactcacctgagagaggcgtttgcagccaatgaagctggctgctcagacggtcgacattgaatttgggtgggggttgggatcctgtctgaagtacagactgttcttgctctaaaaacaggactgtccctgatgggagccaggccacagggaggaggcttctttgtgggtctctcctgcagagggtgggggtctcagggtcttaggtgatacgggagagaaagaacgtgccaggcaggaggccccctgaagtctgtgtactccgaggtggatctccatccccatccacctgtacggacatcttttccgttgcggtttgagaatgttcctataataaacccctctgctttgtt

SEQ ID NO: 170206 - DNA, 1591 bp, Homo sapiens
  Payload ID: 13521
  Gene Symbol: PSMD13
  Gene Name: proteasome 26S subunit, non-ATPase 13
  Uniprot ID: Q9UNM6
  ENST ID: ENST00000431206
  CDS Start-End: 74-1210
agcatttccggcagccatccccgcggtgctgacatcccggttgttcttctgtgccgggggtcttcctgctgtcatgaaggacgtaccgggcttcctacagcagagccagaactccgggcccgggcagcccgctgtgtggcaccgtctggaggagctctacacgaagaactttatgaaaactttatcagtgaatttgaacacaggtaaaagcctctcatccgtttttcactttgaaaatgagtgcattgatgctcggcggtgctcaaaggctggtggcttttatttcagggtgaaccctttgtccctcgtggaaatcattcttcatgtagttagacagatgactgatcctaatgtggctcttacttttctggaaaagactcgtgagaaggtgaaaagtagtgatgaggcagtgatcctgtgtaaaacagcaattggagctctaaaattaaacatcggggacctacaggttacaaaggaaacaattgaagatgttgaagaaatgctcaacaaccttcctggtgtgacatcggttcacagtcgtttctatgatctctccagtaaatactatcaaacaatcggaaaccacgcgtcctactacaaagatgctctgcggtttttgggctgtgttgacatcaaggatctaccagtgtctgagcagcaggagagagccttcacgctggggctagcaggacttctcggcgagggagtttttaactttggagaactcctcatgcaccctgtgctggagtccctgaggaatactgaccggcagtggctgattgacaccctctatgccttcaacagtggcaacgtagagcggttccagactctgaagactgcctggggccagcagcctgatttagcagctaatgaagcccagcttctgaggaaaattcagttgttgtgcctcatggagatgactttcacacgacctgccaatcacagacaactcacttttgaagaaattgccaaaagtgctaaaatcacagtgaatgaggtggagcttctggtgatgaaggccctttcggtggggctggtgaaaggcagtatagacgaggtggacaaacgagtccacatgacctgggtgcagccccgagtgttggatttgcaacagatcaagggaatgaaggaccgcctggagttctggtgcacggatgtgaagagcatggagatgctggtggagcaccaggcccatgacatcctcacctagggccccctggttccccgtcgtgtctcctttgactcacctgagagaggcgtttgcagccaatgaagctggctgctcagacggtcgacattgaatttgggtgggggttgggatcctgtctgaagtacagactgttcttgctctaaaaacaggactgtccctgatgggagccaggccacagggaggaggcttctttgtgggtctctcctgcagagggtgggggtctcagggtcttaggtgatacgggagagaaagaacgtgccaggcaggaggccccctgaagtctgtgtactccgaggtggatctccatccccatccacctgtacggacatcttttccgttgcggtttgagaatgttcctataataaacccctctgctttgtt

SEQ ID NO: 170207 - DNA, 892 bp, Homo sapiens
  Payload ID: 13521
  Gene Symbol: PSMD13
  Gene Name: proteasome 26S subunit, non-ATPase 13
  ENST ID: ENST00000526783
  CDS Start-End: 1-665
ctaatgtggctcttacttttctggaaaagactcgtgagaaggtgaaaagtagtgatgaggcagtgatcctgtgtaaaacagcaattggagctctaaaattaaacatcggggacctacaggttacaaaggaaacaattgaagatgttgaagaaatgctcaacaaccttcctggtgtgacatcggttcacagtcgtttctatgatctctccagtaaatactatcaaacaatcggaaaccacgcgtcctactacaaagatgctctgcggtttttgggctgtgttgacatcaaggatctaccagtgtctgagcagcaggagagagccttcacgctggggctagcaggacttctcggcgagggagtttttaactttggagaactcctcatgcaccctgtgctggagtccctgaggaatactgaccggcagtggctgattgacaccctctatgccttcaacagtggcaacgtagagcggttccagactctgaagactgcctggggccagcagcctgatttagcagctaatgaagcccagcttctgaggaaaattcagttgttgtgcctcatggagatcaagggaatgaaggaccgcctggagttctggtgcacggatgtgaagagcatggagatgctggtggagcaccaggcccatgacatcctcacctagggccccctggttccccgtcgtgtctcctttgactcacctgagagaggcgtttgcagccaatgaagctggctgctcagacggtcgacattgaatttgggtgggggttgggatcctgtctgaagtacagactgttcttgctctaaaaacaggactgtccctgatgggagccaggccacagggaggaggcttctttgtgggtctctcctgcagagggtgggggtctcagg

SEQ ID NO: 170208 - DNA, 858 bp, Homo sapiens
  Payload ID: 13521
  Gene Symbol: PSMD13
  Gene Name: proteasome 26S subunit, non-ATPase 13
  ENST ID: ENST00000528906
  CDS Start-End: 70-858
tttccggcagccatccccgcggtgctgacatcccggttgttcttctgtgccgggggtcttcctgctgtcatgaaggacgtaccgggcttcctacagcagagccagaactccgggcccgggcagcccgctgtgtggcaccgtctggaggagctctacacgaagaaggtgaaccctttgtccctcgtggaaatcattcttcatgtagttagacagatgactgatcctaatgtggctcttacttttctggaaaagactcgtgagaaggtgaaaagtagtgatgaggcagtgatcctgtgtaaaacagcaattggagctctaaaattaaacatcggggacctacaggttacaaaggaaacaattgaagatgttgaagaaatgctcaacaaccttcctggtgtgacatcggttcacagtcgtttctatgatctctccagtaaatactatcaaacaatcggaaaccacgcgtcctactacaaagatgctctgcggtttttgggctgtgttgacatcaaggatctaccagtgtctgagcagcaggagagagccttcacgctggggctagcaggacttctcggcgagggagtttttaactttggagaactcctcatgcaccctgtgctggagtccctgaggaatactgaccggcagtggctgattgacaccctctatgccttcaacagtggcaacgtagagcggttccagactctgaagactgcctggggccagcagcctgatttagcagctaatgaagcccagcttctgaggaaaattcagttgttgtgcctcatggagatgactttcacacgacctgccaatcacagacaactcacttttgaagaaattgccaaaagtgctaaa

SEQ ID NO: 170209 - DNA, 1632 bp, Homo sapiens
  Payload ID: 13521
  Gene Symbol: PSMD13
  Gene Name: proteasome 26S subunit, non-ATPase 13
  ENST ID: ENST00000525665
  CDS Start-End: 51-263
cggtgctgacatcccggttgttcttctgtgccgggggtcttcctgctgtcatgaaggacgtaccgggcttcctacagcagagccagaactccgggcccgggcagcccgctgtgtggcaccgtctggaggagctctacacgaagaagttgtggcatcagctgacacttcaggtgcttgattttgtgcaggatccgtgctttgcccaaggagatggtctcattaagctttatgaaaactttatcagtgaatttgaacacaggtaaaagcctctcatccgtttttcactttgaaaatgagtgcattgatgctcggcggtgctcaaaggctggtggcttttatttcagggtgaaccctttgtccctcgtggaaatcattcttcatgtagttagacagatgactgatcctaatgtggctcttacttttctggaaaagactcgtgagaaggtgaaaagtagtgatgaggcagtgatcctgtgtaaaacagcaattggagctctaaaattaaacatcggggacctacaggttacaaaggaaacaattgaagatgttgaagaaatgctcaacaaccttcctggtgtgacatcggttcacagtcgtttctatgatctctccagtaaatactatcaaacaatcggaaaccacgcgtcctactacaaagatgctctgcggtttttgggctgtgttgacatcaaggatctaccagtgtctgagcagcaggagagagccttcacgctggggctagcaggacttctcggcgagggagtttttaactttggagaactcctcatgcaccctgtgctggagtccctgaggaatactgaccggcagtggctgattgacaccctctatgccttcaacagtggcaacgtagagcggttccagactctgaagactgcctggggccagcagcctgatttagcagctaatgaagcccagcttctgaggaaaattcagttgttgtgcctcatggagatgactttcacacgacctgccaatcacagacaactcacttttgaagaaattgccaaaagtgctaaaatcacagtgaatgaggtggagcttctggtgatgaaggccctttcggtggggctggtgaaaggcagtatagacgaggtggacaaacgagtccacatgacctgggtgcagccccgagtgttggatttgcaacagatcaagggaatgaaggaccgcctggagttctggtgcacggatgtgaagagcatggagatgctggtggagcaccaggcccatgacatcctcacctagggccccctggttccccgtcgtgtctcctttgactcacctgagagaggcgtttgcagccaatgaagctggctgctcagacggtcgacattgaatttgggtgggggttgggatcctgtctgaagtacagactgttcttgctctaaaaacaggactgtccctgatgggagccaggccacagggaggaggcttctttgtgggtctctcctgcagagggtgggggtctcagggtcttaggtgatacgggagagaaagaacgtgccaggcaggaggccccctgaagtctgtgtactccgaggtggatctccatccccatccacctgtacggacatcttttccgttgcggtttgagaatgttcctataataaa

SEQ ID NO: 170210 - DNA, 1991 bp, Homo sapiens
  Payload ID: 13521
  Gene Symbol: PSMD13
  Gene Name: proteasome 26S subunit, non-ATPase 13
  Uniprot ID: Q9UNM6
  ENST ID: ENST00000532097
  CDS Start-End: 505-1635
agtctggtgtctcatctctcgccccggaggtcaaacctggagccagcatttctgtaccctgcgctcacacctttttcaacccggatggcggtgatagttaatactttctgagcgcttttactatggtcaggcattatatttacacctaatcctcgcaaaacactactgggaagatcctcatttgacaggagcaattccgggtcacaaaggctgacaccacaaagctagtccgtagcgggttcgaccacaggcgcccacactctttgacgcctcaatggcacagccaagtgcgcgggaagtgggctgcaaacgccggagagttttgtccggagcgcagagacgcgctgtaaccgagcaaccagcggggcccgcccccggcctgctacggcgctcccagcctgccccgcgccgctcggcgccggaagtgagtgagcatttccggcagccatccccgcggtgctgacatcccggttgttcttctgtgccgggggtcttcctgctgtcatgaaggacgtaccgggcttcctacagcagagccagaactccgggcccgggcagcccgctgtgtggcaccgtctggaggagctctacacgaagaagttgtggcatcagctgacacttcaggtgcttgattttgtgcaggatccgtgctttgcccaaggagatggtctcattaagctttatgaaaactttatcagtgaatttgaacacagggtgaaccctttgtccctcgtggaaatcattcttcatgtagttagacagatgactgatcctaatgtggctcttacttttctggaaaagactcgtgagaaggtgaaaagtagtgatgaggcagtgatcctgtgtaaaacagcaattggagctctaaaattaaacatcggggacctacaggttacaaaggaaacaattgaagatgttgaagaaatgctcaacaaccttcctggtgtgacatcggttcacagtcgtttctatgatctctccagtaaatactatcaaacaatcggaaaccacgcgtcctactacaaagatgctctgcggtttttgggctgtgttgacatcaaggatctaccagtgtctgagcagcaggagagagccttcacgctggggctagcaggacttctcggcgagggagtttttaactttggagaactcctcatgcaccctgtgctggagtccctgaggaatactgaccggcagtggctgattgacaccctctatgccttcaacagtggcaacgtagagcggttccagactctgaagactgcctggggccagcagcctgatttagcagctaatgaagcccagcttctgaggaaaattcagttgttgtgcctcatggagatgactttcacacgacctgccaatcacagacaactcacttttgaagaaattgccaaaagtgctaaaatcacagtgaatgaggtggagcttctggtgatgaaggccctttcggtggggctggtgaaaggcagtatagacgaggtggacaaacgagtccacatgacctgggtgcagccccgagtgttggatttgcaacagatcaagggaatgaaggaccgcctggagttctggtgcacggatgtgaagagcatggagatgctggtggagcaccaggcccatgacatcctcacctagggccccctggttccccgtcgtgtctcctttgactcacctgagagaggcgtttgcagccaatgaagctggctgctcagacggtcgacattgaatttgggtgggggttgggatcctgtctgaagtacagactgttcttgctctaaaaacaggactgtccctgatgggagccaggccacagggaggaggcttctttgtgggtctctcctgcagagggtgggggtctcagggtcttaggtgatacgggagagaaagaacgtgccaggcaggaggccccctgaagtctgtgtactccgaggtggatctccatccccatccacctgtacggacatcttttccgttgcggtttgagaatgttc

SEQ ID NO: 170211 - DNA, 612 bp, Homo sapiens
  Payload ID: 13521
  Gene Symbol: PSMD13
  Gene Name: proteasome 26S subunit, non-ATPase 13
  ENST ID: ENST00000529372
  CDS Start-End: 85-426
ggaagtgagtgagcatttccggcagccatccccgcggtgctgacatcccggttgttcttctgtgccgggggtcttcctgctgtcatgaaggacgtaccgggcttcctacagcagagccagaactccgggcccgggcagcccgctgtgtggcaccgtctggaggagctctacacgaagaagttgtggcatcagctgacacttcaggtgcttgattttgtgcaggatccgtgctttgcccaaggagatggtctcattaagctttatgaaaactttatcagtgaatttgaacacagggtgaaccctttgtccctcgtggaaatcattcttcatgtagttagacagatgactgatcctaatgtggctcttacttttctggaaaagactcgtgagaaggtgaaaagtagtgatgaggcagtgatcctgtgaaacaattgaagatgttgaagaaatgctcaacaaccttcctggtgtgacatcggttcacagtcgtttctatgatctctccagtaaatactatcaaacaatcggaaaccacgcgtcctactacaaagatgctctgcggtttttgggctgtgttgacatcaaggatctaccagtgtctgagcagcagga

SEQ ID NO: 170212 - DNA, 1572 bp, Homo sapiens
  Payload ID: 13521
  Gene Symbol: PSMD13
  Gene Name: proteasome 26S subunit, non-ATPase 13
  ENST ID: ENST00000621534
  CDS Start-End: 55-1188
cccgcggtgctgacatcccggttgttcttctgtgccgggggtcttcctgctgtcatgaaggacgtaccgggcttcctacagcagagccagaactccgggcccgggcagcccgctgtgtggcaccgtctggaggagctctacacgaagaagttgtggcatcagctgacacttcaggtgcttgattttgtgcaggatccgtgctttgcccaaggagatggtctcattaagctttatgaaaactttatcagtgaatttgaacacagggtgaaccctttgtccctcgtggaaatcattcttcatgtagttagacagatgactgatcctaatgtggctcttacttttctggaaaagactcgtgagaaggtgaaaagtagtgatgaggcagtgatcctgtgtaaaacagcaattggagctctaaaattaaacatcggggacctacaggttacaaaggaaacaattgaagatgttgaagaaatgctcaacaaccttcctggtgtgacatcggttcacagtcgtttctatgatctctccagtaaatactatcaaacaatcggaaaccacgcgtcctactacaaagatgctctgcggtttttgggctgtgttgacatcaaggatctaccagtgtctgagcagcaggagagagccttcacgctggggctagcaggacttctcggcgagggagtttttaactttggagaactcctcatgcaccctgtgctggagtccctgaggaatactgaccggcagtggctgattgacaccctctatgccttcaacagtggcaacgtagagcggttccagactctgaagactgcctggggccagcagcctgatttagcagctaatgaagcccagcttctgaggaaaattcagttgttgtgcctcatggagatgactttcacacgacctgccaatcacagacaactcacttttgaagaaattgccaaaagtgctaaaatcacagtgaatgaggtggagcttctggtgatgaaggccctttcggtggggctggtgaaaggcagtatagacgaggtggacaaacgagtccacatgacctgggtgcagccccgagtgttggatttgcaacaggtgatgtgtatcaaggaaggaccgcctggagttctggtgcacggagtgaagagcatggagatgctggtggagcaccaggcccatgacatcctcacctagggccccctggttccccgtcgtgtctcctttgactcacctgagagaggcgtttgcagccaatgaagctggctgctcagacggtcgacattgaatttgggtgggggttgggatcctgtctgaagtacagactgttcttgctctaaaaacaggactgtccctgatgggagccaggccacagggaggaggcttctttgtgggtctctcctgcagagggtgggggtctcagggtcttaggtgatacgggagagaaagaacgtgccaggcaggaggccccctgaagtctgtgtactccgaggtggatctccatccccatccacctgtacggacatcttttccgttgcggtttgagaatgttcctataataaacccctctgctttgttctt

SEQ ID NO: 170213 - DNA, 1954 bp, Homo sapiens
  Payload ID: 13522
  Gene Symbol: PSMD14
  Gene Name: proteasome 26S subunit, non-ATPase 14
  Uniprot ID: O00487
  ENST ID: ENST00000409682
  CDS Start-End: 705-1637
agataaccaagttaaatctagctcaaatgaaccttttagtttttgaggagggcaataatagtagtgaacaccaaaacgaaaggggatctgggcttcaaaatactaacagttctatttcctagccagtcgtctcccgggctggatgtgccgccgtcccagatctcagcggcggccgcagagcgcagaggtagggagagaaaaaggaggcgtcggcggggcgcgagcgaccagggcgctaagtgccgcctcacagtcctgccagagacaggagacgccgggccgcccgcgccgtctgtcccaagagctcctcctggacatccgcttgactctccgtcgtctccaattggccgtcggggaacggaagccgaagcaaactagtgaacccggaagtgcttcgcggcggaggcccgggcaactcttttgaatggaatcgggctgattcatcgccggtttgcagacagagccgcgtcgggtgtgcgccgctgctgctgttgcctctgtcttcgcgtcaccacagaggcaagacaagggtccatatcgcggcatccggctcccgcccgtcttcaggagagaaagaaaaaataaaatatacttggggaagttgtacctgccagaattagcaagagctttctttaagaagacatttgtcaaactcaacaaattgaaggttaacaccttaagagttgtagttactgaccagaaatatggacagacttcttagacttggaggaggtatgcctggactgggccaggggccacctacagatgctcctgcagtggacacagcagaacaagtctatatctcttccctggcactgttaaaaatgttaaaacatggccgtgctggagttccaatggaagttatgggtttgatgcttggagaatttgttgatgattataccgtcagagtgattgatgtgtttgctatgccacagtcaggaacaggtgtcagtgtggaggcagttgatccagtgttccaagctaaaatgttggatatgttgaagcagacaggaaggccggagatggttgttggttggtatcacagtcaccctggctttggttgttggctttctggtgtggatatcaacactcagcagagctttgaagccttgtcggagagagctgtggcagtggttgtggatcccattcagagtgtaaaaggaaaggttgttattgatgccttcagattgatcaatgctaatatgatggtcttaggacatgaaccaagacaaacaacttcgaatctgggtcacttaaacaagccatctatccaggcattaattcatggactaaacagacattattactccattactattaactatcggaaaaatgaactggaacagaagatgttgctaaatttgcataagaagagttggatggaaggtttgacacttcaggactacagtgaacattgtaaacacaatgaatcagtggtaaaagagatgttggaattagccaagaattacaataaggctgtagaagaagaagataagatgacacctgaacagctggcaataaagaatgttggcaagcaggaccccaaacgtcatttggaggaacatgtggatgtacttatgacctcaaatattgtccagtgtttagcagctatgttggatactgtcgtatttaaataaagcaacgaaaaacgctattaatgatgccttcagtgtatattcctctgttgttcctaatgctcaaaatcaagggacctctgaaggtgtacttggctaaatgtaagacatctggcatcatttgcagcactgtaacaccttcagtctcagttgtgcaattacttctgtttctttagtcagggtctttgcagattctaaagttatacatgaatacatcaaagtggacaaattttgttaagatcccatttaatatttgaaaaaatcagtagcacaaatatattttgattgtcacttacaaaataaaatacatttacagtcta

SEQ ID NO: 170214 - DNA, 577 bp, Homo sapiens
  Payload ID: 13522
  Gene Symbol: PSMD14
  Gene Name: proteasome 26S subunit, non-ATPase 14
  ENST ID: ENST00000437630
  CDS Start-End: 325-577
ttcaggtaagacccagaaggcaggcctgggaggtctggggaggcagccgtgctaggccgccgccagccccgtgctttcctgagtcacgttgcccagctgagttgccacaggaggcctgggccgcgagggaggagcccggcctccttcattctcttcgcctgctctcagggctctctggcagggtcaggagagaaagaaaaaataaaatatacttggggaagttgtacctgccagaattagcaagagctttctttaagaagacatttgtcaaactcaacaaattgaaggttaacaccttaagagttgtagttactgaccagaaatatggacagacttcttagacttggaggaggtatgcctggactgggccaggggccacctacagatgctcctgcagtggacacagcagaacaagtctatatctcttccctggcactgttaaaaatgttaaaacatggccgtgctggagttccaatggaagttatgggtttgatgcttggagaatttgttgatgattataccgtcagagtgattgatgtgtttgctatgccacagtcaggaacaggtgtcagtgtgg

SEQ ID NO: 170215 - DNA, 3449 bp, Homo sapiens
  Payload ID: 13523
  Gene Symbol: PSMD2
  Gene Name: proteasome 26S subunit, non-ATPase 2
  Uniprot ID: Q13200
  ENST ID: ENST00000310118
  CDS Start-End: 559-3285
caacaacaacaacaaaaccaaatgaggttaatattccacagtggtgtggggctagacacagttacacagactttatacaggcggcaatcaagcgtcctggacgtcaagaaatctagtttgtctgtcgcgccacgcagtcaactggagtgtcactgtgggttctatttacaccgttatgagaaaaacctgtggcggagtaaaactcggtaactccgctcgcagaccgcccatctacagcagtgagcgaacccaaaccccacacggccaagtcccgcgggtttcaggaaactccgaagaggtcgggggccaggggcgactatggcgcgggggaggctgggaattgtagtctccacctgcctccgagggcggggtccgagggcggggctctcaggccgagggggtgggtgggtcgccgagcgccccggctcgccccggcgtttccggtcgcaggcgggctctggaggaggaggggcgccgcgaccgacgcgcgcgagttggtctgggaaaaagggcggtgcgagcgggtgcgcgcgcagcgggccggcagtggcggcggagatggaggagggaggccgggacaaggcgccggtgcagccccagcagtctccagcggcggcccccggcggcacggacgagaagccgagcggcaaggagcggcgggatgccggggacaaggacaaagaacaggagctgtctgaagaggataaacagcttcaagatgaactggagatgctcgtggaacgactaggggagaaggatacatccctgtatcgaccagcgctggaggaattgcgaaggcagattcgttcttctacaacttccatgacttcagtgcccaagcctctcaaatttctgcgtccacactatggcaaactgaaggaaatctatgagaacatggcccctggggagaataagcgttttgctgctgacatcatctccgttttggccatgaccatgagtggggagcgtgagtgcctcaagtatcggctagtgggctcccaggaggaattggcatcatggggtcatgagtatgtcaggcatctggcaggagaagtggctaaggagtggcaggagctggatgacgcagagaaggtccagcgggagcctctgctcactctggtgaaggaaatcgtcccctataacatggcccacaatgcagagcatgaggcttgcgacctgcttatggaaattgagcaggtggacatgctggagaaggacattgatgaaaatgcatatgcaaaggtctgcctttatctcaccagttgtgtgaattacgtgcctgagcctgagaactcagccctactgcgttgtgccctgggtgtgttccgaaagtttagccgcttccctgaagctctgagattggcattgatgctcaatgacatggagttggtagaagacatcttcacctcctgcaaggatgtggtagtacagaaacagatggcattcatgctaggccggcatggggtgttcctggagctgagtgaagatgtcgaggagtatgaggacctgacagagatcatgtccaatgtacagctcaacagcaacttcttggccttagctcgggagctggacatcatggagcccaaggtgcctgatgacatctacaaaacccacctagagaacaacaggtttgggggcagtggctctcaggtggactctgcccgcatgaacctggcctcctcttttgtgaatggctttgtgaatgcagcttttggccaagacaagctgctaacagatgatggcaacaaatggctttacaagaacaaggaccacggaatgttgagtgcagctgcatctcttgggatgattctgctgtgggatgtggatggtggcctcacccagattgacaagtacctgtactcctctgaggactacattaagtcaggagctcttcttgcctgtggcatagtgaactctggggtccggaatgagtgtgaccctgctctggcactgctctcagactatgttctccacaacagcaacaccatgagacttggttccatctttgggctaggcttggcttatgctggctcaaatcgtgaagatgtcctaacactgctgctgcctgtgatgggagattcaaagtccagcatggaggtggcaggtgtcacagctttagcctgtggaatgatagcagtagggtcctgcaatggagatgtaacttccactatccttcagaccatcatggagaagtcagagactgagctcaaggatacttatgctcgttggcttcctcttggactgggtctcaaccacctggggaagggtgaggccatcgaggcaatcctggctgcactggaggttgtgtcagagccattccgcagttttgccaacacactggtggatgtgtgtgcatatgcaggctctgggaatgtgctgaaggtgcagcagctgctccacatttgtagcgaacactttgactccaaagagaaggaggaagacaaagacaagaaggaaaagaaagacaaggacaagaaggaagcccctgctgacatgggagcacatcagggagtggctgttctggggattgcccttattgctatgggggaggagattggtgcagagatggcattacgaacctttggccacttgctgagatatggggagcctacactccggagggctgtacctttagcactggccctcatctctgtttcaaatccacgactcaacatcctggataccctaagcaaattctctcatgatgctgatccagaagtttcctataactccatttttgccatgggcatggtgggcagtggtaccaataatgcccgtctggctgcaatgctgcgccagttagctcaatatcatgccaaggacccaaacaacctcttcatggtgcgcttggcacagggcctgacacatttagggaagggcacccttaccctctgcccctaccacagcgaccggcagcttatgagccaggtggccgtggctggactgctcactgtgcttgtctctttcctggatgttcgaaacattattctaggcaaatcacactatgtattgtatgggctggtggctgccatgcagccccgaatgctggttacgtttgatgaggagctgcggccattgccagtgtctgtccgtgtgggccaggcagtggatgtggtgggccaggctggcaagccgaagactatcacagggttccagacgcatacaaccccagtgttgttggcccacggggaacgggcagaattggccactgaggagtttcttcctgttacccccattctggaaggttttgttatccttcggaagaaccccaattatgatctctaagtgaccaccaggggctctgaactgcagctgatgttatcagcaggccatgcatcctgctgccaagggtggacacggctgcagacttctgggggaattgtcgcctcctgctcttttgttactgagtgagataaggttgttcaataaagacttttatccccaaggtc

SEQ ID NO: 170216 - DNA, 609 bp, Homo sapiens
  Payload ID: 13523
  Gene Symbol: PSMD2
  Gene Name: proteasome 26S subunit, non-ATPase 2
  ENST ID: ENST00000432855
  CDS Start-End: 1-609
agaccatcatggagaagtcagagactgagctcaaggatacttatgctcgttggcttcctcttggactgggtctcaaccacctggggaagggtgaggccatcgaggcaatcctggctgcactggaggttgtgtcagagccattccgcagttttgccaacacactggtggatgtgtgtgcatatgcaggctctgggaatgtgctgaaggtgcagcagctgctccacatttgtagcgaacactttgactccaaagagaaggaggaagacaaagacaagaaggaaaagaaagacaaggacaagaaggaagcccctgctgacatgggagcacatcagctgagatatggggagcctacactccggagggctgtacctttagcactggccctcatctctgtttcaaatccacgactcaacatcctggataccctaagcaaattctctcatgatgctgatccagaagtttcctataactccatttttgccatgggcatggtgggcagtggtaccaataatgcccgtctggctgcaatgctgcgccagttagctcaatatcatgccaaggacccaaacaacctcttcatggtgcgcttggcacagggcctgacacatt

SEQ ID NO: 170217 - DNA, 2574 bp, Homo sapiens
  Payload ID: 13523
  Gene Symbol: PSMD2
  Gene Name: proteasome 26S subunit, non-ATPase 2
  Uniprot ID: Q13200
  ENST ID: ENST00000435761
  CDS Start-End: 215-2464
aaaatatctacagaagagctgaaaggaaggtcagcttctcagaagacactgtttctgtcatgtgtattggactttggggtttcattagcatggtctacttttaaccgttttgctgctgacatcatctccgttttggccatgaccatgagtggggagcgtgagtgcctcaagtatcggctagtgggctcccaggaggaattggcatcatggggtcatgagtatgtcaggagaagtggctaaggagtggcaggagctggatgacgcagagaaggtccagcgggagcctctgctcactctggtgaaggaaatcgtcccctataacatggcccacaatgcagagcatgaggcttgcgacctgcttatggaaattgagcaggtggacatgctggagaaggacattgatgaaaatgcatatgcaaaggtctgcctttatctcaccagttgtgtgaattacgtgcctgagcctgagaactcagccctactgcgttgtgccctgggtgtgttccgaaagtttagccgcttccctgaagctctgagattggcattgatgctcaatgacatggagttggtagaagacatcttcacctcctgcaaggatgtggtagtacagaaacagatggcattcatgctaggccggcatggggtgttcctggagctgagtgaagatgtcgaggagtatgaggacctgacagagatcatgtccaatgtacagctcaacagcaacttcttggccttagctcgggagctggacatcatggagcccaaggtgcctgatgacatctacaaaacccacctagagaacaacaggtttgggggcagtggctctcaggtggactctgcccgcatgaacctggcctcctcttttgtgaatggctttgtgaatgcagcttttggccaagacaagctgctaacagatgatggcaacaaatggctttacaagaacaaggaccacggaatgttgagtgcagctgcatctcttgggatgattctgctgtgggatgtggatggtggcctcacccagattgacaagtacctgtactcctctgaggactacattaagtcaggagctcttcttgcctgtggcatagtgaactctggggtccggaatgagtgtgaccctgctctggcactgctctcagactatgttctccacaacagcaacaccatgagacttggttccatctttgggctaggcttggcttatgctggctcaaatcgtgaagatgtcctaacactgctgctgcctgtgatgggagattcaaagtccagcatggaggtggcaggtgtcacagctttagcctgtggaatgatagcagtagggtcctgcaatggagatgtaacttccactatccttcagaccatcatggagaagtcagagactgagctcaaggatacttatgctcgttggcttcctcttggactgggtctcaaccacctggggaagggtgaggccatcgaggcaatcctggctgcactggaggttgtgtcagagccattccgcagttttgccaacacactggtggatgtgtgtgcatatgcaggctctgggaatgtgctgaaggtgcagcagctgctccacatttgtagcgaacactttgactccaaagagaaggaggaagacaaagacaagaaggaaaagaaagacaaggacaagaaggaagcccctgctgacatgggagcacatcagggagtggctgttctggggattgcccttattgctatgggggaggagattggtgcagagatggcattacgaacctttggccacttgctgagatatggggagcctacactccggagggctgtacctttagcactggccctcatctctgtttcaaatccacgactcaacatcctggataccctaagcaaattctctcatgatgctgatccagaagtttcctataactccatttttgccatgggcatggtgggcagtggtaccaataatgcccgtctggctgcaatgctgcgccagttagctcaatatcatgccaaggacccaaacaacctcttcatggtgcgcttggcacagggcctgacacatttagggaagggcacccttaccctctgcccctaccacagcgaccggcagcttatgagccaggtggccgtggctggactgctcactgtgcttgtctctttcctggatgttcgaaacattattctaggcaaatcacactatgtattgtatgggctggtggctgccatgcagccccgaatgctggttacgtttgatgaggagctgcggccattgccagtgtctgtccgtgtgggccaggcagtggatgtggtgggccaggctggcaagccgaagactatcacagggttccagacgcatacaaccccagtgttgttggcccacggggaacgggcagaattggccactgaggagtttcttcctgttacccccattctggaaggttttgttatccttcggaagaaccccaattatgatctctaagtgaccaccaggggctctgaactgcagctgatgttatcagcaggccatgcatcctgctgccaagggtggacacggctgcagacttctgggggaattgtcgcctcctgctc

SEQ ID NO: 170218 - DNA, 825 bp, Homo sapiens
  Payload ID: 13523
  Gene Symbol: PSMD2
  Gene Name: proteasome 26S subunit, non-ATPase 2
  ENST ID: ENST00000445558
  CDS Start-End: 1-430
aggggagaaggatacatccctgtatcgaccagcgctggaggaattgcgaaggcagattcgttcttctacaacttccatgacttcagtgcccaagcctctcaaatttctgcgtccacactatggcaaactgaaggaaatctatgagaacatggcccctggggagaataagcgttttgctgctgacatcatctccgttttggccatgaccatgagtggggagcgtgagtgcctcaagtatcggctagtgggctcccaggaggaattggcatcatggggtcatgagtatgtcagagaagtgcttcccctgaagctgtgctctcttaatcgtctgggactatctgtaggcatctggcaggagaagtggctaaggagtggcaggagctggatgacgcagagaaggtccagcgggagcctctgctcactctggtgaaggaaatcgtcccctataacatggcccacaatgcagagcatgaggcttgcgacctgcttatggaaattgagcaggtggacatgctggagaaggacattgatgaaaatgcatatgcaaaggtctgcctttatctcaccagttgtgtgaattacgtgcctgagcctgagaactcagccctactgcgttgtgccctgggtgtgttccgaaagtttagccgcttccctgaagctctgagattggcattgatgctcaatgacatggagttggtagaagacatcttcacctcctgcaaggatgtggtagtacagaaacagatggcattcatgctaggccggcatggggtgttcctggagctgagtgaagatgtcgaggagtatgaggacctgacagagatc

SEQ ID NO: 170219 - DNA, 942 bp, Homo sapiens
  Payload ID: 13523
  Gene Symbol: PSMD2
  Gene Name: proteasome 26S subunit, non-ATPase 2
  ENST ID: ENST00000433010
  CDS Start-End: 14-193
agtggcggcggagatggaggagggaggccgggacaaggcgccggtgcagccccagcagtctccagcggcggcccccggcggcacggacgagaagccgagcggcaaggagcggcgggatgccggggacaaggacaaagaacaggagctggtgaggcgcgaccccgagagtcggcgaaggaggctgcggggctgagtcacggcggctccgcaggcctcaggcccgacacccaactaccccaccgcgccagggagagggcggttggggcgaccctcgggactcccggcaccttgcctctctgctcctcattctccgttccgcgctgtcacctccgccgtccccaccaaccctcaccaccgccgcgtgaagtggactcgggcagtctgaagaggataaacagcttcaagatgaactggagatgctcgtggaacgactaggggagaaggatacatccctgtatcgaccagcgctggaggaattgcgaaggcagattcgttcttctacaacttccatgacttcagtgcccaagcctctcaaatttctgcgtccacactatggcaaactgaaggaaatctatgagaacatggcccctggggagaataagcgttttgctgctgacatcatctccgttttggccatgaccatgagtggggagcgtgagtgcctcaagtatcggctagtgggctcccaggaggaattggcatcatggggtcatgagtatgtcaggcatctggcaggagaagtggctaaggagtggcaggagctggatgacgcagagaaggtccagcgggagcctctgctcactctggtgaaggaaatcgtcccctataacatggcccacaatgcagagcatgaggcttgcgacctgcttatggaaattgagcaggtggacatgctggagaaggacattgatgaaaatgcatatgcaaaggtctgcctttatc

SEQ ID NO: 170220 - DNA, 721 bp, Homo sapiens
  Payload ID: 13523
  Gene Symbol: PSMD2
  Gene Name: proteasome 26S subunit, non-ATPase 2
  ENST ID: ENST00000417952
  CDS Start-End: 70-721
gcgagttggtctgggaaaaagggcggtgcgagcgggtgcgcgcgcagcgggccggcagtggcggcggagatggaggagggaggccgggacaaggcgccggtgcagccccagcagtctccagcggcggcccccggcggcacggacgagaagccgagcggcaaggagcggcgggatgccggggacaaggacaaagaacaggagctgtctgaagaggataaacagcttcaagatgaactggagatgctcgtggaacgactaggggagaaggatacatccctgtatcgaccagcgctggaggaattgcgaaggcagattcgttcttctacaacttccatgacttcagtgcccaagcctctcaaatttctgcgtccacactatggcaaactgaaggaaatctatgagaacatggcccctggggagaataagcgttttgctgctgacatcatctccgttttggccatgaccatgagtggggagcgtgagtgcctcaagtatcggctagtgggctcccaggaggaattggcatcatggggtcatgagtatgtcagttgtgtgaattacgtgcctgagcctgagaactcagccctactgcgttgtgccctgggtgtgttccgaaagtttagccgcttccctgaagctctgagattggcattgatgctcaatgacatggagttggtagaagacatcttcacctcctgcaaggatgtggtagtacagaaac

SEQ ID NO: 170221 - DNA, 2633 bp, Homo sapiens
  Payload ID: 13523
  Gene Symbol: PSMD2
  Gene Name: proteasome 26S subunit, non-ATPase 2
  Uniprot ID: Q13200
  ENST ID: ENST00000439383
  CDS Start-End: 139-2475
aaaatatctacagaagagctgaaaggaaggtcagcttctcagaagacactgtttctgtcatgtgtattggactttggggtttcattagcatggtctacttttaaccgttttgctgctgacatcatctccgttttggccatgaccatgagtggggagcgtgagtgcctcaagtatcggctagtgggctcccaggaggaattggcatcatggggtcatgagtatgtcaggcatctggcaggagaagtggctaaggagtggcaggagctggatgacgcagagaaggtccagcgggagcctctgctcactctggtgaaggaaatcgtcccctataacatggcccacaatgcagagcatgaggcttgcgacctgcttatggaaattgagcaggtggacatgctggagaaggacattgatgaaaatgcatatgcaaaggtctgcctttatctcaccagttgtgtgaattacgtgcctgagcctgagaactcagccctactgcgttgtgccctgggtgtgttccgaaagtttagccgcttccctgaagctctgagattggcattgatgctcaatgacatggagttggtagaagacatcttcacctcctgcaaggatgtggtagtacagaaacagatggcattcatgctaggccggcatggggtgttcctggagctgagtgaagatgtcgaggagtatgaggacctgacagagatcatgtccaatgtacagctcaacagcaacttcttggccttagctcgggagctggacatcatggagcccaaggtgcctgatgacatctacaaaacccacctagagaacaacaggtttgggggcagtggctctcaggtggactctgcccgcatgaacctggcctcctcttttgtgaatggctttgtgaatgcagcttttggccaagacaagctgctaacagatgatggcaacaaatggctttacaagaacaaggaccacggaatgttgagtgcagctgcatctcttgggatgattctgctgtgggatgtggatggtggcctcacccagattgacaagtacctgtactcctctgaggactacattaagtcaggagctcttcttgcctgtggcatagtgaactctggggtccggaatgagtgtgaccctgctctggcactgctctcagactatgttctccacaacagcaacaccatgagacttggttccatctttgggctaggcttggcttatgctggctcaaatcgtgaagatgtcctaacactgctgctgcctgtgatgggagattcaaagtccagcatggaggtggcaggtgtcacagctttagcctgtggaatgatagcagtagggtcctgcaatggagatgtaacttccactatccttcagaccatcatggagaagtcagagactgagctcaaggatacttatgctcgttggcttcctcttggactgggtctcaaccacctggggaagggtgaggccatcgaggcaatcctggctgcactggaggttgtgtcagagccattccgcagttttgccaacacactggtggatgtgtgtgcatatgcaggctctgggaatgtgctgaaggtgcagcagctgctccacatttgtagcgaacactttgactccaaagagaaggaggaagacaaagacaagaaggaaaagaaagacaaggacaagaaggaagcccctgctgacatgggagcacatcagggagtggctgttctggggattgcccttattgctatgggggaggagattggtgcagagatggcattacgaacctttggccacttgctgagatatggggagcctacactccggagggctgtacctttagcactggccctcatctctgtttcaaatccacgactcaacatcctggataccctaagcaaattctctcatgatgctgatccagaagtttcctataactccatttttgccatgggcatggtgggcagtggtaccaataatgcccgtctggctgcaatgctgcgccagttagctcaatatcatgccaaggacccaaacaacctcttcatggtgcgcttggcacagggcctgacacatttagggaagggcacccttaccctctgcccctaccacagcgaccggcagcttatgagccaggtggccgtggctggactgctcactgtgcttgtctctttcctggatgttcgaaacattattctaggcaaatcacactatgtattgtatgggctggtggctgccatgcagccccgaatgctggttacgtttgatgaggagctgcggccattgccagtgtctgtccgtgtgggccaggcagtggatgtggtgggccaggctggcaagccgaagactatcacagggttccagacgcatacaaccccagtgttgttggcccacggggaacgggcagaattggccactgaggagtttcttcctgttacccccattctggaaggttttgttatccttcggaagaaccccaattatgatctctaagtgaccaccaggggctctgaactgcagctgatgttatcagcaggccatgcatcctgctgccaagggtggacacggctgcagacttctgggggaattgtcgcctcctgctcttttgttactgagtgagataaggttgttcaataaagacttttatcccc

SEQ ID NO: 170222 - DNA, 2158 bp, Homo sapiens
  Payload ID: 13524
  Gene Symbol: PSMD3
  Gene Name: proteasome 26S subunit, non-ATPase 3
  Uniprot ID: O43242
  ENST ID: ENST00000264639
  CDS Start-End: 175-1779
ggcgtttcccagaaggcccagcgccgggaaggggtttgcagctgctccgtcatcgtgcggcccgacgctatctcgcgctcgtgtgcaggcccggctcggctcctggtccccggtgcgagggttaacgcgaggccccggcctcggtccccggactaggccgtgaccccgggtgccatgaagcaggagggctcggcgcggcgccgcggcgcggacaaggcgaaaccgccgcccggcggaggagaacaagaacccccaccgccgccggccccccaggatgtggagatgaaagaggaggcagcgacgggtggcgggtcgacgggggaggcagacggcaagacggcggcggcagcggctgagcactcccagcgagagctggacacagtcaccttggaggacatcaaggagcacgtgaaacagctagagaaagcggtttcaggcaaggagccgagattcgtgctgcgggccctgcggatgctgccttccacatcacgccgcctcaaccactatgttctgtataaggctgtgcagggcttcttcacttcaaataatgccactcgagactttttgctccccttcctggaagagcccatggacacagaggctgatttacagttccgtccccgcacgggaaaagctgcgtcgacacccctcctgcctgaagtggaagcctatctccaactcctcgtggtcatcttcatgatgaacagcaagcgctacaaagaggcacagaagatctctgatgatctgatgcagaagatcagtactcagaaccgccgggccctagaccttgtagccgcaaagtgttactattatcacgcccgggtctatgagttcctggacaagctggatgtggtgcgcagcttcttgcatgctcggctccggacagctacgcttcggcatgacgcagacgggcaggccaccctgttgaacctcctgctgcggaattacctacactacagcttgtacgaccaggctgagaagctggtgtccaagtctgtgttcccagagcaggccaacaacaatgagtgggccaggtacctctactacacagggcgaatcaaagccatccagctggagtactcagaggcccggagaacgatgaccaacgcccttcgcaaggcccctcagcacacagctgtcggcttcaaacagacggtgcacaagcttctcatcgtggtggagctgttgctgggggagatccctgaccggctgcagttccgccagccctccctcaagcgctcactcatgccctatttccttctgactcaagctgtcaggacaggaaacctagccaagttcaaccaggtcctggatcagtttggggagaagtttcaagcagatgggacctacaccctaattatccggctgcggcacaacgtgattaagacaggtgtacgcatgatcagcctctcctattcccgaatctccttggctgacatcgcccagaagctgcagttggatagccccgaagatgcagagttcattgttgccaaggccatccgggatggtgtcattgaggccagcatcaaccacgagaagggctatgtccaatccaaggagatgattgacatctattccacccgagagccccagctagccttccaccagcgcatctccttctgcctagatatccacaacatgtctgtcaaggccatgaggtttcctcccaaatcgtacaacaaggacttggagtctgcagaggaacggcgtgagcgagaacagcaggacttggagtttgccaaggagatggcagaagatgatgatgacagcttcccttgagctggggggctggggaggggtagggggaatggggacaggctctttcccccttgggggtcccctgcccagggcactgtccccattttcccacacacagctcatatgctgcattcgtgcagggggtgggggtgctgggagccagccaccctgacctcccccagggctcctccccagccggtgacttactgtacagcaggcaggagggtgggcaggcaacctccccgggcagggtcctggccagcagtgtgggagcaggaggggaaggatagttctgtgtactcctttagggagtgggggactagaactgggatgtcttggcttgtatgttttttgaagcttcgattatgatttttaaacaataaaaagttctccacagtgc

SEQ ID NO: 170223 - DNA, 1598 bp, Homo sapiens
  Payload ID: 13524
  Gene Symbol: PSMD3
  Gene Name: proteasome 26S subunit, non-ATPase 3
  ENST ID: ENST00000415039
  CDS Start-End: 136-396
agctgctccgtcatcgtgcggcccgacgctatctcgcgctcgtgtgcaggcccggctcggctcctggtccccggtgcgagggttaacgcgaggccccggcctcggtccccggactaggccgtgaccccgggtgccatgaagcaggagggctcggcgcggcgccgcggcgcggacaaggcgaaaccgccgcccggcggaggagaacaagaacccccaccgccgccggccccccaggatgtggagatgaaagaggagactttttgctccccttcctggaagagcccatggacacagaggctgatttacagttccgtccccgcacgggaaaagctgcgtcgacacccctcctgcctgaagtggaagcctatctccaactcctcgtggtcatcttcatgatgaacagcaagcgctacaaagaggcacagaagatctctgatgatctgatgcagaagatcagtactcagaaccgccgggccctagaccttgtagccgcaaagtgttactattatcacgcccgggtctatgagttcctggacaagctggatgtggtgcgcagcttcttgcatgctcggctccggacagctacgcttcggcatgacgcagacgggcaggccaccctgttgaacctcctgctgcggaattacctacactacagcttgtacgaccaggctgagaagctggtgtccaagtctgtgttcccagagcaggccaacaacaatgagtgggccaggtacctctactacacagggcgaatcaaagccatccagctggagtactcagaggcccggagaacgatgaccaacgcccttcgcaaggcccctcagcacacagctgtcggcttcaaacagacggtgcacaagcttctcatcgtggtggagctgttgctgggggagatccctgaccggctgcagttccgccagccctccctcaagcgctcactcatgccctatttccttctgactcaagctgtcaggacaggaaacctagccaagttcaaccaggtcctggatcagtttggggagaagtttcaagcagatgggacctacaccctaattatccggctgcggcacaacgtgattaagacaggtgtacgcatgatcagcctctcctattcccgaatctccttggctgacatcgcccagaagctgcagttggatagccccgaagatgcagagttcattgttgccaaggccatccgggatggtgtcattgaggccagcatcaaccacgagaagggctatgtccaatccaaggagatgattgacatctattccacccgagagccccagctagccttccaccagcgcatctccttctgcctagatatccacaacatgtctgtcaagggttggtaagattaaaagaagtccctgtattgaggcacttagcgaagtctaaattgtaaaaaagatggcgctggtatctagctccacaaaagggccatgaggtttcctcccaaatcgtacaacaaggacttggagtctgcagaggaacggcgtgagcgagaacagcaggacttggagtttgccaaggagatggcagaagatgatgatgacagcttcccttgagctggggggctggggaggggtagggggaat

SEQ ID NO: 170224 - DNA, 458 bp, Homo sapiens
  Payload ID: 13524
  Gene Symbol: PSMD3
  Gene Name: proteasome 26S subunit, non-ATPase 3
  ENST ID: ENST00000540504
  CDS Start-End: 1-353
cccgcacgggaaaagctgcgtcgacacccctcctgcctgaagtggaagcctatctccaactcctcgtggtcatcttcatgatgaacagcaagcgctacaaagaggcacagaagatctctgatgatctgatgcagaagatcagtactcagaaccgccgggccctagaccttgtagccgcaaagtgttactattatcacgcccgggtctatgagttcctggacaagctggatgtggtgcgcagcttcttgcatgctcggctccggacagctacgcttcggcatgacgcagacgggcaggcaacctccccgggcagggtcctggccagcagtgtgggagcaggaggggaaggatagttctgtgtactcctttagggagtgggggactagaactgggatgtcttggcttgtatgttttttgaagcttcgattatgatttttaaacaataaaaagttctccac

SEQ ID NO: 170225 - DNA, 1333 bp, Homo sapiens
  Payload ID: 13525
  Gene Symbol: PSMD4
  Gene Name: proteasome 26S subunit, non-ATPase 4
  ENST ID: ENST00000368881
  CDS Start-End: 75-1217
gagcgacgggccaattggaggagttgttgttaggccgtcccggagacccggtcgggagggaggaaggtggcaagatggtgttggaaagcactatggtgtgtgtggacaacagtgagtatatgcggaatggagacttcttacccaccaggctgcaggcccagcaggatgctgtcaacatagtttgtcattcaaagacccgcagcaaccctgagaacaacgtgggccttatcacactggctaatgactgtgaagtgctgaccacactcaccccagacactggccgtatcctgtccaagctacatactgtccaacccaagggcaagatcaccttctgcacgggcatccgcgtggcccatctggctctgaagcaccgacaaggcaagaatcacaagatgcgcatcattgcctttgtgggaagcccagtggaggacaatgagaaggatctggtgaaactggctaaacgcctcaagaaggagaaagtaaatgttgacattatcaattttggggaagaggaggtgaacacagaaaagctgacagcctttgtaaacacgttgaatggcaaagatggaaccggttctcatctggtgacagtgcctcctgggcccagtttggctgatgctctcatcagttctccgattttggctggtgaaggtggtgccatgctgggtcttggtgccagtgactttgaatttggagtagatcccagtgctgatcctgagctggccttggcccttcgtgtatctatggaagagcagcggcagcggcaggaggaggaggcccggcgggcagctgcagcttctgctgctgaggccgggattgctacgactgggactgaaggtgaaagagactcagacgatgccctgctgaagatgaccatcagccagcaagagtttggccgcactgggcttcctgacctaagcagtatgactgaggaagagcagattgcttatgccatgcagatgtccctgcagggagcagagtttggccaggcggaatcagcagacattgatgccagctcagctatggacacatctgagccagccaaggaggaggatgattacgacgtgatgcaggaccccgagttccttcagagtgtcctagagaacctcccaggtgtggatcccaacaatgaagccattcgaaatgctatgggctccctggcctcccaggccaccaaggacggcaagaaggacaagaaggaggaagacaagaagtgagactggagggaaagggtagctgagtctgcttaggggactgcatgggaagcacggaatatagggttagatgtgtgttatctgtaaccattacagcctaaataaagcttggcaacttt

SEQ ID NO: 170226 - DNA, 1350 bp, Homo sapiens
  Payload ID: 13525
  Gene Symbol: PSMD4
  Gene Name: proteasome 26S subunit, non-ATPase 4
  Uniprot ID: P55036
  ENST ID: ENST00000368884
  CDS Start-End: 81-1214
ggtgaagagcgacgggccaattggaggagttgttgttaggccgtcccggagacccggtcgggagggaggaaggtggcaagatggtgttggaaagcactatggtgtgtgtggacaacagtgagtatatgcggaatggagacttcttacccaccaggctgcaggcccagcaggatgctgtcaacatagtttgtcattcaaagacccgcagcaaccctgagaacaacgtgggccttatcacactggctaatgactgtgaagtgctgaccacactcaccccagacactggccgtatcctgtccaagctacatactgtccaacccaagggcaagatcaccttctgcacgggcatccgcgtggcccatctggctctgaagcaccgacaaggcaagaatcacaagatgcgcatcattgcctttgtgggaagcccagtggaggacaatgagaaggatctggtgaaactggctaaacgcctcaagaaggagaaagtaaatgttgacattatcaattttggggaagaggaggtgaacacagaaaagctgacagcctttgtaaacacgttgaatggcaaagatggaaccggttctcatctggtgacagtgcctcctgggcccagtttggctgatgctctcatcagttctccgattttggctggtgaaggtggtgccatgctgggtcttggtgccagtgactttgaatttggagtagatcccagtgctgatcctgagctggccttggcccttcgtgtatctatggaagagcagcggcagcggcaggaggaggaggcccggcgggcagctgcagcttctgctgctgaggccgggattgctacgactgggactgaagactcagacgatgccctgctgaagatgaccatcagccagcaagagtttggccgcactgggcttcctgacctaagcagtatgactgaggaagagcagattgcttatgccatgcagatgtccctgcagggagcagagtttggccaggcggaatcagcagacattgatgccagctcagctatggacacatctgagccagccaaggaggaggatgattacgacgtgatgcaggaccccgagttccttcagagtgtcctagagaacctcccaggtgtggatcccaacaatgaagccattcgaaatgctatgggctccctggcctcccaggccaccaaggacggcaagaaggacaagaaggaggaagacaagaagtgagactggagggaaagggtagctgagtctgcttaggggactgcatgggaagcacggaatatagggttagatgtgtgttatctgtaaccattacagcctaaataaagcttggcaactttttttccttttttgcttcaaa

SEQ ID NO: 170227 - DNA, 703 bp, Homo sapiens
  Payload ID: 13525
  Gene Symbol: PSMD4
  Gene Name: proteasome 26S subunit, non-ATPase 4
  ENST ID: ENST00000445776
  CDS Start-End: 1-580
gggaagcccagtggaggacaatgagaaggatctggtgaaactggctaaacgcctcaagaaggagaaagtaaatgttgacattatcaattttggggaagaggcccttcgtgtatctatggaagagcagcggcagcggcaggaggaggaggcccggcgggcagctgcagcttctgctgctgaggccgggattgctacgactgggactgaagactcagacgatgccctgctgaagatgaccatcagccagcaagagtttggccgcactgggcttcctgacctaagcagtatgactgaggaagagcagattgcttatgccatgcagatgtccctgcagggagcagagtttggccaggcggaatcagcagacattgatgccagctcagctatggacacatctgagccagccaaggaggaggatgattacgacgtgatgcaggaccccgagttccttcagagtgtcctagagaacctcccaggtgtggatcccaacaatgaagccattcgaaatgctatgggctccctggcctcccaggccaccaaggacggcaagaaggacaagaaggaggaagacaagaagtgagactggagggaaagggtagctgagtctgcttaggggactgcatgggaagcacggaatatagggttagatgtgtgttatctgtaaccattacagcctaaataaagcttggcaactttttttcct

SEQ ID NO: 170228 - DNA, 371 bp, Homo sapiens
  Payload ID: 13525
  Gene Symbol: PSMD4
  Gene Name: proteasome 26S subunit, non-ATPase 4
  ENST ID: ENST00000453615
  CDS Start-End: 1-254
acattgatgccagctcagctatggacacatctgagccagccaagagctcaattaacagagttctcagcaggcccctctatttggaggaggatgattacgacgtgatgcaggaccccgagttccttcagagtgtcctagagaacctcccaggtgtggatcccaacaatgaagccattcgaaatgctatgggctccctggcctcccaggccaccaaggacggcaagaaggacaagaaggaggaagacaagaagtgagactggagggaaagggtagctgagtctgcttaggggactgcatgggaagcacggaatatagggttagatgtgtgttatctgtaaccattacagcctaaataaagcttggcaactttt

SEQ ID NO: 170229 - DNA, 649 bp, Homo sapiens
  Payload ID: 13525
  Gene Symbol: PSMD4
  Gene Name: proteasome 26S subunit, non-ATPase 4
  ENST ID: ENST00000427779
  CDS Start-End: 1-119
ggcaggaggaggaggcccggcgggcagctgcagcttctgctgctgaggccgggattgctacgactgggactgaaggtgaaagaggtggaatccgaagtcctgggactgcgggatgctaaacattgaaagctgggtgtaggcactgcagggagagtgtggagactcagacgatgccctgctgaagatgaccatcagccagcaagagtttggccgcactgggcttcctgacctaagcagtatgactgaggaagagcagattgcttatgccatgcagatgtccctgcagggagcagagtttggccaggcggaatcagcagacattgatgccagctcagctatggacacatctgagccagccaaggaggaggatgattacgacgtgatgcaggaccccgagttccttcagagtgtcctagagaacctcccaggtgtggatcccaacaatgaagccattcgaaatgctatgggctccctggcctcccaggccaccaaggacggcaagaaggacaagaaggaggaagacaagaagtgagactggagggaaagggtagctgagtctgcttaggggactgcatgggaagcacggaatatagggttagatgtgtgttatctgtaaccattacagcctaaataaagcttggcaactttt

SEQ ID NO: 170230 - DNA, 787 bp, Homo sapiens
  Payload ID: 13525
  Gene Symbol: PSMD4
  Gene Name: proteasome 26S subunit, non-ATPase 4
  ENST ID: ENST00000437736
  CDS Start-End: 179-787
aattagctggcatggtggtgcacgcctgtggtcccagctacccgggaagctgaagtgggaagatctattgagcctgggaggttgaggctacagtgagctgtgactgcgcttgaacctgtgcctgcgcttgaacctgtgcctgaatactaccctagacagtgtggacaacagtgagtatatgcggaatggagacttcttacccaccaggctgcaggcccagcaggatgctgtcaacatagtttgtcattcaaagacccgcagcaaccctgagaacaacgtgggccttatcacactggctaatgactgtgaagtgctgaccacactcaccccagacactggccgtatcctgtccaagctacatactgtccaacccaagggcaagatcaccttctgcacgggcatccgcgtggcccatctggctctgaagcaccgacaaggcaagaatcacaagatgcgcatcattgcctttgtgggaagcccagtggaggacaatgagaaggatctggtgaaactggctaaacgcctcaagaaggagaaagtaaatgttgacattatcaattttggggaagaggaggtgaacacagaaaagctgacagcctttgtaaacacgttgaatggcaaagatggaaccggttctcatctggtgacagtgcctcctgggcccagtttggctgatgctctcatcagttctccgattttggctggtgaaggtggtgccatgctgggtcttggtgccagtgactttgaatttggagtagatcccagtgctgatcctgagctggccttg

SEQ ID NO: 170231 - DNA, 3443 bp, Homo sapiens
  Payload ID: 13526
  Gene Symbol: PSMD5
  Gene Name: proteasome 26S subunit, non-ATPase 5
  Uniprot ID: Q16401
  ENST ID: ENST00000210313
  CDS Start-End: 76-1590
gatcagatctcgcgaggttcaggaaagcgccccgggaactgggccgctgggccagcccctgcgtcggggggcaagatggcagcccaggctttggcgctgctgagagaggtagcgaggctggaagcgccgctggaggagctacgcgcgcttcactccgtgctgcaggcagtgccgctcaacgagcttcgccagcaagcggcggagctgcgcctcggcccgctcttctccctgcttaacgagaaccatagggaaaagactactttgtgtgtatccattctggagagattgctccaagctatggaaccggttcacgtggcccggaacctcagggttgacctgcagaggggactaattcaccctgatgattctgtaaaaatcctcactctttcccagattggaagaattgttgaaaattctgatgctgttactgagattctaaataatgctgaattactaaaacaaattgtttattgcattggtggagagaatctatctgtagcaaaagcggctatcaaatccctgtcaagaatatcactaacccaagctggactggaggctttatttgaaagcaatctgctggatgatttgaaaagtgtaatgaaaacaaatgacattgttcgatacagggtgtatgagctaattatagagatttcttccgtgtcaccagaatctttaaactactgtaccacaagtggattggtaacccagctcctgagagagctgactggtgaggatgtgttggtcagagccacctgtatagaaatggtgacatcactggcatatactcatcatgggcgacaatatcttgctcaagaaggagtaattgaccaaatttctaatataattgttggggcagattcagaccctttctctagcttctatctgccaggattcgtgaagttttttggaaacctggctgtcatggatagtcctcaacagatctgtgagcgttatcctatctttgtggaaaaagtctttgaaatgatagaaagtcaggaccccactatgattggtgtagctgtagacacagttggaatcttgggatccaatgttgaaggaaaacaggttttacagaaaacaggaactcgctttgaacgcttgcttatgagaataggacatcaatcaaagaatgccccagtggagctaaaaattagatgtttggatgcaatttcatctcttctgtacttaccacctgagcagcagactgatgaccttctgaggatgacagaatcctggttttcttctttatctcgggatccactggagctcttccgtggcattagtagtcagcccttccctgaactacactgtgctgccttaaaagtgtttacggccattgcaaaccaaccctgggctcagaaacttatgtttaacagtccaggttttgtagaatatgtggtggaccggtctgtggagcatgacaaagcttcaaaggatgccaaatatgaactagtgaaagcacttgccaattccaagacaattgcagaaatctttgggaacccaaattatttgaggctcagaacttacctgagtgaagggccatactatgtgaaacctgtttccacgacagcagtagaaggagccgaatgatttcttctagagctcatgtagaggaccacgttttgaccaaaacttctcctaaggcatttgactccatctatatttcacaaaagagacttcctttccccaagaattatcatggaatgtcagatgttactttgttaccaacactgttatatttctacattgaaatgcaaagtggaactaggagtttggaatgcattaagagcagacaagcttggtcataatagatccagtgtttttcagattcctttcactgccttaatctttgcaacagggtggaagtttttttcttccctcaaaattttcatggacatgcaatcttatctaaaagcctgcttcagggctgggcgcggtggctaacacctataattcccagcactttgggaggccaagatgggcaaatcacttgagtctaggagttcaagaccagcctggccaatatggcaaaaccctgtctctactaaaaatataaaatcagccaggcatggtggcgcacacctataatctcagctactcaggaggctgaggcacgagaatcgcttgagcctgggaggcagaggttgcagtgagctgagatcttgccactgcacaccagcctgggcaacacagcaagactctgtctcaaaaataaatgaataaaataaaaacctgccaccaaattatttctggattctcttcactatctttttttttctttttggtcctttttccatttctgattccactttcaaagtcttggatatattctttgaaaaatgagtagtatggaatattaagattatgttccttatactcagaatactttttatgagctctcttgtttttttgttactattattcctttgaaaaaaagacaaaatatctaaaaaatgtttatagtgttcatgtaattttttttgctgtttaccaatgaactttgccctgttgtggttttgggggatcagaaggattcctaaactgtcatttcatttattggtaggtcatgattgctgagggttttgctttggatttttcatacctataaagtcaatcttgagttgatcagagaaagggaaacttactcctaataaacagactcagaacagaagggacatatgcataaatcaggataccatctcattaatttacaaaggataatctttcttttcattgacaacacctacacccacctgttttccagtgttcttctctctaaacagcaaagccaaagcactctgcacaccaaatcacctgttcagaggtttatgcatgagcatatttcttttaggccgtggtgaagttgataaaccacccctgctttgtaacaaaattattttaaagtgactggaattatctagtccccagattgatcatctcccctggcaacgtgactctgttttttgtgtgtgtttccatgctgactagtcccctactgttaatatcactactaattaggctataaccaggtctttcctggcctgagaaatattctcttaaaatgacctttgttttaatctcattcatgatgttgattttttttcaatgtggtgcaatatatacaataaaatttgtcataactattttaagtgtacagttcagtatattacatatgttcataagttgtacaaccatcaccaccatccatcttcagaattattttcatcttatacaattgaaactgtattcattaaacaataactgtctattccctcttttccccagcctctggcaaccaccattctgcttcatgacattgattttattcacttaacatcagattttggggggatgccctctctcctatgtatggtctacacattctgattttttttttagattgaataaaatttgtaaatcattattttcatttcataagtaaa

SEQ ID NO: 170232 - DNA, 1538 bp, Homo sapiens
  Payload ID: 13526
  Gene Symbol: PSMD5
  Gene Name: proteasome 26S subunit, non-ATPase 5
  Uniprot ID: Q16401
  ENST ID: ENST00000373904
  CDS Start-End: 43-1428
gggaactgggccgctgggccagcccctgcgtcggggggcaagatggcagcccaggctttggcgctgctgagagaggtagcgaggctggaagcgccgctggaggagctacgcgcgcttcactccgtgctgcaggcagtgccgctcaacgagcttcgccagcaagcggcggagctgcgcctcggcccgctcttctccctgcttaacgagaaccatagggaaaagactactttgtgtgtatccattctggagagattgctccaagctatggaaccggttcacgtggcccggaacctcagggttgacctgcagaggggactaattcaccctgatgattctgtaaaaatcctcactctttcccagattggaagaattgttgaaaattctgatgctgttactgagattctaaataatgctgaattactaaaacaaattgtttattgcattggtggagagaatctatctgtagcaaaagcgctaattatagagatttcttccgtgtcaccagaatctttaaactactgtaccacaagtggattggtaacccagctcctgagagagctgactggtgaggatgtgttggtcagagccacctgtatagaaatggtgacatcactggcatatactcatcatgggcgacaatatcttgctcaagaaggagtaattgaccaaatttctaatataattgttggggcagattcagaccctttctctagcttctatctgccaggattcgtgaagttttttggaaacctggctgtcatggatagtcctcaacagatctgtgagcgttatcctatctttgtggaaaaagtctttgaaatgatagaaagtcaggaccccactatgattggtgtagctgtagacacagttggaatcttgggatccaatgttgaaggaaaacaggttttacagaaaacaggaactcgctttgaacgcttgcttatgagaataggacatcaatcaaagaatgccccagtggagctaaaaattagatgtttggatgcaatttcatctcttctgtacttaccacctgagcagcagactgatgaccttctgaggatgacagaatcctggttttcttctttatctcgggatccactggagctcttccgtggcattagtagtcagcccttccctgaactacactgtgctgccttaaaagtgtttacggccattgcaaaccaaccctgggctcagaaacttatgtttaacagtccaggttttgtagaatatgtggtggaccggtctgtggagcatgacaaagcttcaaaggatgccaaatatgaactagtgaaagcacttgccaattccaagacaattgcagaaatctttgggaacccaaattatttgaggctcagaacttacctgagtgaagggccatactatgtgaaacctgtttccacgacagcagtagaaggagccgaatgatttcttctagagctcatgtagaggaccacgttttgaccaaaacttctcctaaggcatttgactccatctatatttcacaaaagagacttcctttccccaagaattatcat

SEQ ID NO: 170233 - DNA, 569 bp, Homo sapiens
  Payload ID: 13526
  Gene Symbol: PSMD5
  Gene Name: proteasome 26S subunit, non-ATPase 5
  ENST ID: ENST00000373920
  CDS Start-End: 1-342
ggaaaacaggttttacagaaaacaggaactcgctttgaacgcttgcttatgagaataggacatcaatcaaagaatgccccagtggagctaaaaattagatgtttggatgcaatttcatctcttctgtacttaccacctgagcagcagactgatgaccttctgaggatgacagaatcctggttttcttctttatctcgggatccactggagctcttccgtggcattagtagtcagcccttccctgaactacactgtgctgccttaaaagtgtttacgggaaggaaacacctgcatcttgaagaactagtaggaggcaatcaagtgaagaatacagtggagtagcaaagcaagacagcaggtacacatgaaaacaagagaacatgtttgagaaactacaagtaattcaatatgaccaacgcctaggatttaaagggaaatttttgcaaaattctttatcattattactaataatagctaccatttcttagcattgattttatgttaggcacttggcatgcatttcttactttatcatcataatagccataaaagttacgtatcatttcaca

SEQ ID NO: 170234 - DNA, 382 bp, Homo sapiens
  Payload ID: 13526
  Gene Symbol: PSMD5
  Gene Name: proteasome 26S subunit, non-ATPase 5
  ENST ID: ENST00000476949
  CDS Start-End: 3-221
agatggcagcccaggctttggcgctgctgagagaggtagcgaggctggaagcgccgctggaggagctacgcgcgcttcactccgtgctgcaggcagtgccgctcaacgagcttcgccagcaagcggcggagctgcgcctcggcccgctcttctccctgcttaacgagaaccatagattggaagaattgttgaaaattctgatgctgttactgagattctaaataatgctgaattactaaaacaaattgtttattgcattggtggagagaatctatctgtagcaaaagcggctatcaaatccctgtcaagaatatcactaacccaagctggactggaggctttatttgaaagcaatctgctggatgatttgaaaagtgtaatg

SEQ ID NO: 170235 - DNA, 219 bp, Homo sapiens
  Payload ID: 13526
  Gene Symbol: PSMD5
  Gene Name: proteasome 26S subunit, non-ATPase 5
  ENST ID: ENST00000625444
  CDS Start-End: 1-219
atggcagcccaggctttggcgctgctgagagaggtagcgaggctggaagcgccgctggaggagctacgcgcgcttcactccgtgctgcaggcagtgccgctcaacgagcttcgccagcaagcggcggagctgcgcctcggcccgctcttctccctgcttaacgagaaccatagattggaagaattgttgaaaattctgatgctgttactgagattctaa

SEQ ID NO: 170236 - DNA, 1430 bp, Homo sapiens
  Payload ID: 13527
  Gene Symbol: PSMD6
  Gene Name: proteasome 26S subunit, non-ATPase 6
  Uniprot ID: Q15008
  ENST ID: ENST00000295901
  CDS Start-End: 142-1311
agcagaggacgctgccggcggagacgggaccggaagccgggccgcaggcggccgggcgtattcgccgactcctcccgcttccgctgccgcagccggtcgtaaccaagttgtgtcctgtcagccgctgtccccttcgccgcgatgccgctggagaacctggaggaggagggtctgcccaagaaccccgacttgcgtatcgcgcagctgcgcttcctgctcagcctgcccgagcaccgcggagacgctgccgtgcgcgacgagctgatggcggccgtccgcgataacaacatggctccttactatgaagccttgtgcaaatccctcgactggcagatagacgtggacctactcaataaaatgaagaaggcaaatgaagatgagttgaagcgtttggatgaggagctggaagatgcagagaagaatctaggagagagcgaaattcgcgatgcaatgatggcaaaggccgagtacctctgccggataggtgacaaagagggagctctgacagcctttcgcaagacatatgacaaaactgtggccctgggtcaccgattggatattgtattctatctccttaggattggcttattttatatggataatgatctcatcacacgaaacacagaaaaggccaaaagcttaatagaagaaggaggagactgggacaggagaaaccgcctaaaagtgtatcagggtctttattgtgtggctattcgtgatttcaaacaggcagctgaactcttccttgacactgtttcaacatttacatcctatgaactcatggattataaaacatttgtgacttatactgtctatgtcagtatgattgccttagaaagaccagatctcagggaaaaggtcattaaaggagcagagattcttgaagtgttgcacagtcttccagcagttcggcagtatctgttttcactctatgaatgccgttactctgttttcttccaatcattagcggttgtggaacaggaaatgaaaaaggactggctttttgcccctcattatcgatactatgtaagagaaatgagaattcatgcatacagtcagctgctggaatcatataggtcattaacccttggctatatggcagaagcgtttggtgttggtgtggaattcattgatcaggaactgtccaggtttattgctgccgggagactacactgcaaaatagataaagtgaatgaaatagtagaaaccaacagacctgatagcaagaactggcagtaccaagaaactatcaagaaaggagatctgctactaaacagagttcaaaaactttccagagtaattaatatgtaaagccatgtaactaacaaaggatttgctttagagataattatttggaatttttatagcttacttcacaatgtgcccaggtcagctgtataaaataaatactgcattgttgtttctttcca

SEQ ID NO: 170237 - DNA, 1349 bp, Homo sapiens
  Payload ID: 13527
  Gene Symbol: PSMD6
  Gene Name: proteasome 26S subunit, non-ATPase 6
  Uniprot ID: Q15008
  ENST ID: ENST00000394431
  CDS Start-End: 176-1231
cgcagaaagaatgtggattttagagttctagataggggttttcatttaggccttgcgacatggctgttacatgaccttggttggtctgtttccctaacctctttgtgcctcatttgtcttacctactaaataggctaatagtactacctcgcagcatgaagatgattttaataagatgaatgagagtaacgactcgacaaactatgacatggctccttactatgaagccttgtgcaaatccctcgactggcagatagacgtggacctactcaataaaatgaagaaggcaaatgaagatgagttgaagcgtttggatgaggagctggaagatgcagagaagaatctaggagagagcgaaattcgcgatgcaatgatggcaaaggccgagtacctctgccggataggtgacaaagagggagctctgacagcctttcgcaagacatatgacaaaactgtggccctgggtcaccgattggatattgtattctatctccttaggattggcttattttatatggataatgatctcatcacacgaaacacagaaaaggccaaaagcttaatagaagaaggaggagactgggacaggagaaaccgcctaaaagtgtatcagggtctttattgtgtggctattcgtgatttcaaacaggcagctgaactcttccttgacactgtttcaacatttacatcctatgaactcatggattataaaacatttgtgacttatactgtctatgtcagtatgattgccttagaaagaccagatctcagggaaaaggtcattaaaggagcagagattcttgaagtgttgcacagtcttccagcagttcggcagtatctgttttcactctatgaatgccgttactctgttttcttccaatcattagcggttgtggaacaggaaatgaaaaaggactggctttttgcccctcattatcgatactatgtaagagaaatgagaattcatgcatacagtcagctgctggaatcatataggtcattaacccttggctatatggcagaagcgtttggtgttggtgtggaattcattgatcaggaactgtccaggtttattgctgccgggagactacactgcaaaatagataaagtgaatgaaatagtagaaaccaacagacctgatagcaagaactggcagtaccaagaaactatcaagaaaggagatctgctactaaacagagttcaaaaactttccagagtaattaatatgtaaagccatgtaactaacaaaggatttgctttagagataattatttggaatttttatagcttacttcacaatgtgcccaggtcagctgtataaaataaatactgcattgttgtttctttcc

SEQ ID NO: 170238 - DNA, 469 bp, Homo sapiens
  Payload ID: 13527
  Gene Symbol: PSMD6
  Gene Name: proteasome 26S subunit, non-ATPase 6
  ENST ID: ENST00000478185
  CDS Start-End: 38-469
aagttgtgtcctgtcagccgctgtccccttcgccgcgatgccgctggagaacctggaggaggagggtctgcccaagaaccccgacttgcgtatcgcgcagctgcgcttcctgctcagcctgcccgagcaccgcggagacgctgccgtgcgcgacgagctgatggcggccgtccgcgataacaacttttggaacagaatccggcaagagcaaaccgaggattgccctccctccagccctagtagagacatggctccttactatgaagccttgtgcaaatccctcgactggcagatagacgtggacctactcaataaaatgaagaaggcaaatgaagatgagttgaagcgtttggatgaggagctggaagatgcagagaagaatctaggagagagcgaaattcgcgatgcaatgatggcaaaggccgagtacctctgccggataggtgacaaagagggagctctgacagcc

SEQ ID NO: 170239 - DNA, 1495 bp, Homo sapiens
  Payload ID: 13527
  Gene Symbol: PSMD6
  Gene Name: proteasome 26S subunit, non-ATPase 6
  Uniprot ID: Q15008
  ENST ID: ENST00000492933
  CDS Start-End: 54-1382
gcagccggtcgtaaccaagttgtgtcctgtcagccgctgtccccttcgccgcgatgccgctggagaacctggaggaggagggtctgcccaagaaccccgacttgcgtatcgcgcagctgcgcttcctgctcagcctgcccgagcaccgcggagacgctgccgtgcgcgacgagctgatggcggccgtccgcgataacaacttttggaacagaatccggcaagagcaaaccgaggattgccctccctccagccctagtagaggttggcattgccaggattggccgtcacgcaaacctcccaccagcatacgtttatgttttgccaagccgattattaagcgccatcgcatgccttcctacatggctccttactatgaagccttgtgcaaatccctcgactggcagatagacgtggacctactcaataaaatgaagaaggcaaatgaagatgagttgaagcgtttggatgaggagctggaagatgcagagaagaatctaggagagagcgaaattcgcgatgcaatgatggcaaaggccgagtacctctgccggataggtgacaaagagggagctctgacagcctttcgcaagacatatgacaaaactgtggccctgggtcaccgattggatattgtattctatctccttaggattggcttattttatatggataatgatctcatcacacgaaacacagaaaaggccaaaagcttaatagaagaaggaggagactgggacaggagaaaccgcctaaaagtgtatcagggtctttattgtgtggctattcgtgatttcaaacaggcagctgaactcttccttgacactgtttcaacatttacatcctatgaactcatggattataaaacatttgtgacttatactgtctatgtcagtatgattgccttagaaagaccagatctcagggaaaaggtcattaaaggagcagagattcttgaagtgttgcacagtcttccagcagttcggcagtatctgttttcactctatgaatgccgttactctgttttcttccaatcattagcggttgtggaacaggaaatgaaaaaggactggctttttgcccctcattatcgatactatgtaagagaaatgagaattcatgcatacagtcagctgctggaatcatataggtcattaacccttggctatatggcagaagcgtttggtgttggtgtggaattcattgatcaggaactgtccaggtttattgctgccgggagactacactgcaaaatagataaagtgaatgaaatagtagaaaccaacagacctgatagcaagaactggcagtaccaagaaactatcaagaaaggagatctgctactaaacagagttcaaaaactttccagagtaattaatatgtaaagccatgtaactaacaaaggatttgctttagagataattatttggaatttttatagcttacttcacaatgtgcccaggtcagctgtataaaataaatactgcattgttgtttc

SEQ ID NO: 170240 - DNA, 657 bp, Homo sapiens
  Payload ID: 13527
  Gene Symbol: PSMD6
  Gene Name: proteasome 26S subunit, non-ATPase 6
  ENST ID: ENST00000480205
  CDS Start-End: 1-415
taatgatctcatcacacgaaacacagaaaaggccaaaagcttaatagaagaaggaggagactgggacaggagaaaccgcctaaaagtgtatcagggtctttattgtgtggctattcgtgatttcaaacaggcagctgaactcttccttgacactgtttcaacatttacatcctatgaactcatggattataaaacatttgtgacttatactgtctatgtcagtatgattgccttagaaagaccagatctcagggaaaaggtcattaaaggagcagagattcttgaagtgttgcacagtcttccagcagttcggcagtatctgttttcactctatgaatgccgttactctgttttcttccaatcattagggaactgtccaggtttattgctgccgggagactacactgcaaaatagataaagtgaatgaaatagtagaaaccaacagacctgatagcaagaactggcagtaccaagaaactatcaagaaaggagatctgctactaaacagagttcaaaaactttccagagtaattaatatgtaaagccatgtaactaacaaaggatttgctttagagataattatttggaatttttatagcttacttcacaatgtgcccaggtcagctgtataaaataaatactgcattgttgtttct

SEQ ID NO: 170241 - DNA, 717 bp, Homo sapiens
  Payload ID: 13527
  Gene Symbol: PSMD6
  Gene Name: proteasome 26S subunit, non-ATPase 6
  ENST ID: ENST00000497323
  CDS Start-End: 40-717
ccaagttgtgtcctgtcagccgctgtccccttcgccgcgatgccgctggagaacctggaggaggaggacttttggaacagaatccggcaagagcaaaccgaggattgccctccctccagccctagtagaggttggcattgccaggattggccgtcacgcaaacctcccaccagcatacgtttatgttttgccaagccgattattaagcgccatcgcatgccttcctacatggctccttactatgaagccttgtgcaaatccctcgactggcagatagacgtggacctactcaataaaatgaagaaggcaaatgaagatgagttgaagcgtttggatgaggagctggaagatgcagagaagaatctaggagagagcgaaattcgcgatgcaatgatggcaaaggccgagtacctctgccggataggtgacaaagagggagctctgacagcctttcgcaagacatatgacaaaactgtggccctgggtcaccgattggatattgtattctatctccttaggattggcttattttatatggataatgatctcatcacacgaaacacagaaaaggccaaaagcttaatagaagaaggaggagactgggacaggagaaaccgcctaaaagtgtatcagggtctttattgtgtggctattcgtgatttcaaacaggcagctgaactcttccttgacactgtttcaacatttacatcctatgaa

SEQ ID NO: 170242 - DNA, 1176 bp, Homo sapiens
  Payload ID: 13527
  Gene Symbol: PSMD6
  Gene Name: proteasome 26S subunit, non-ATPase 6
  Uniprot ID: Q15008
  ENST ID: ENST00000482510
  CDS Start-End: 40-1092
ccaagttgtgtcctgtcagccgctgtccccttcgccgcgatgccgctggagaacctggaggaggaggacatggctccttactatgaagccttgtgcaaatccctcgactggcagatagacgtggacctactcaataaaatgaagaaggcaaatgaagatgagttgaagcgtttggatgaggagctggaagatgcagagaagaatctaggagagagcgaaattcgcgatgcaatgatggcaaaggccgagtacctctgccggataggtgacaaagagggagctctgacagcctttcgcaagacatatgacaaaactgtggccctgggtcaccgattggatattgtattctatctccttaggattggcttattttatatggataatgatctcatcacacgaaacacagaaaaggccaaaagcttaatagaagaaggaggagactgggacaggagaaaccgcctaaaagtgtatcagggtctttattgtgtggctattcgtgatttcaaacaggcagctgaactcttccttgacactgtttcaacatttacatcctatgaactcatggattataaaacatttgtgacttatactgtctatgtcagtatgattgccttagaaagaccagatctcagggaaaaggtcattaaaggagcagagattcttgaagtgttgcacagtcttccagcagttcggcagtatctgttttcactctatgaatgccgttactctgttttcttccaatcattagcggttgtggaacaggaaatgaaaaaggactggctttttgcccctcattatcgatactatgtaagagaaatgagaattcatgcatacagtcagctgctggaatcatataggtcattaacccttggctatatggcagaagcgtttggtgttggtgtggaattcattgatcaggaactgtccaggtttattgctgccgggagactacactgcaaaatagataaagtgaatgaaatagtagaaaccaacagacctgatagcaagaactggcagtaccaagaaactatcaagaaaggagatctgctactaaacagagttcaaaaactttccagagtaattaatatgtaaagccatgtaactaacaaaggatttgctttagagataattatttggaatttttatagcttacttcacaatgtgcccaggtcagct

SEQ ID NO: 170243 - DNA, 1670 bp, Homo sapiens
  Payload ID: 13528
  Gene Symbol: PSMD7
  Gene Name: proteasome 26S subunit, non-ATPase 7
  Uniprot ID: P51665
  ENST ID: ENST00000219313
  CDS Start-End: 141-1115
gggagcggaagaaggaggccgcgcgagggctgacgaaccggaagaagaggaactgggcctgaaagggtaccggtgaccgctactgctgccggtgtttgcgtgtggcagggagccaggcctggcgagcggggtgtgtcgcgatgccggagctggcagtgcagaaggtggtggtccaccccctggtgctgctcagtgtggtggatcatttcaaccgaatcggcaaggttggaaaccagaagcgtgttgttggtgtgcttttggggtcatggcaaaagaaagtacttgatgtatcgaacagttttgcagttccttttgatgaagatgacaaagacgattctgtatggtttttagaccatgattatttggaaaacatgtatggaatgtttaagaaagtcaatgccagggaaagaatagttggctggtaccacacaggccctaaactacacaagaatgacattgccatcaacgaactcatgaaaagatactgtcctaattccgtattggtcatcattgatgtgaagccgaaggacctagggctgcctacagaagcgtacatttcagtggaagaagtccatgatgatggaactccaacctcgaaaacatttgaacacgtgaccagtgaaattggagcagaggaagctgaggaagttggagttgaacacttgttacgagatatcaaagacacgacggtgggcactctgtcccagcggatcacaaaccaggtccatggtttgaagggactgaactccaagcttctggatatcaggagctacctggaaaaagtcgccacaggcaagctgcccatcaaccaccagatcatctaccagctgcaggacgtcttcaacctgctgccagatgtcagcctgcaggagttcgtcaaggccttttacctgaagaccaatgaccagatggtggtagtgtacttggcctcgctgatccgttccgtggtcgccctgcacaacctcatcaacaacaagattgccaaccgggatgcagagaagaaagaagggcaggagaaagaagagagcaaaaaggataggaaagaggacaaggagaaagataaagataaggaaaagagtgatgtaaagaaagaggagaaaaaggagaaaaagtaaaacatgtattaaatagcttttttaatttgtaaattaaaatcttacaaactaaatcagtgtgctgctagagggttctttttcacttgacatgcttattagaaagctgacccaacaagagctctctgcctccggtcactcttgctgtggtgctacgtggaagtgaatggagactgatctcaaatctgaactgcagctttcgctgctgtgagttggggatatgatagtcagctcaggcttcagattgtatgagaaaaatgaagagaagtcaacaaatattttggtactcttcattcatttatctctaaaaccaggagttgaattttcctcatcttgaaagactcttggggtctgtttctggtattttacaaaattgctaagtggaatgcatgaattgcattatgttctctggtaacacgtagagttcagacccttctgaactctgttgataataccacaccatgttctggacccatagctctggcatcctcaggggttgtgatccagctccatatattgtttaccttcaaagatacaattaaatggcttgatttttaa

SEQ ID NO: 170244 - DNA, 931 bp, Homo sapiens
  Payload ID: 13528
  Gene Symbol: PSMD7
  Gene Name: proteasome 26S subunit, non-ATPase 7
  ENST ID: ENST00000568615
  CDS Start-End: 87-620
gggcctgaaagggtaccggtgaccgctactgctgccggtgtttgcgtgtggcagggagccaggcctggcgagcggggtgtgtcgcgatgccggagctggcagtgcagaaggtggtggtccaccccctggtgctgctcagtgtggtggatcatttcaaccgaatcggcaaggttggaaaccagaagcgtgttgttggtgtgcttttggggtcatggcaaaagaaagtacttgatgtatcgaacagttttgcagttccttttgatgaagatgacaaagacgattctgtatggtttttagaccatgattatttggaaaacatgtatggaatgtttaagaaagtcaatgccagggaaagaatagttggctggtaccacacaggccctaaactacacaagaatgacattgccatcaacgaactcatgaaaagatactgtcctaattccgtattggtcatcattgatgtgaagccgaaggacctagggctgcctacagaagcgtacatttcagtggaagaagtccatgatgatggaactccaacctcgaaaacatttgaacacgtgaccagtgaaattggagcagaggaagctgaggaagttggagttgaacacttgttacggtgagaccctagtacagcatcaaaatcattcactgcccgagaggtcacacagtgtaaggaagaggtctgtgtcgggaatatggagacctggggtctcgtcctggccgtccactaacaagtctgccattctgagcaaatcacagtccctttccagacctttgttttattgtctgtaaattgaagtgtttgaactacatcaactgtaaaatgtcttgagttacaatttatgactttgtggatagcataccttgtctggaaactataatgttgactgacgggaagagaggtatgaaataaatgcaggcctgcactctc

SEQ ID NO: 170245 - DNA, 1395 bp, Homo sapiens
  Payload ID: 13528
  Gene Symbol: PSMD7
  Gene Name: proteasome 26S subunit, non-ATPase 7
  ENST ID: ENST00000568717
  CDS Start-End: 96-227
agaggaactgggcctgaaagggtaccggtgaccgctactgctgccggtgtttgcgtgtggcagggagccaggcctggcgagcggggtgtgtcgcgatgccggagctggcagtgcagaaggtggtggtccaccccctggtgctgctcagtgtggtggatcatttcaaccgggtttcgccatgttgcccacgctgcccatgctcgtctcaaactcctgagctcaagtgatctgcccacctcagcctctcgaagtgctgggattacaggcatgagccactgcatccggcctactccatcatctttattccaaaaaagatttcaggatgggaaaagtttaaagaatcggcaaggttggaaaccagaagcgtgttgttggtgtgcttttggggtcatggcaaaagaaagtacttgatgtatcgaacagttttgcagttccttttgatgaagatgacaaagacgattctgtatggtttttagaccatgattatttggaaaacatgtatggaatgtttaagaaagtcaatgccagggaaagaatagttggctggtaccacacaggccctaaactacacaagaatgacattgccatcaacgaactcatgaaaagatactgtcctaattccgtattggtcatcattgatgtgaagccgaaggacctagggctgcctacagaagcgtacatttcagtggaagaagtccatgatgatggaactccaacctcgaaaacatttgaacacgtgaccagtgaaattggagcagaggaagctgaggaagttggagttgaacacttgttacgagatatcaaagacacgacggtgggcactctgtcccagcggatcacaaaccaggtccatggtttgaagggactgaactccaagcttctggatatcaggagctacctggaaaaagtcgccacaggcaagctgcccatcaaccaccagatcatctaccagctgcaggacgtcttcaacctgctgccagatgtcagcctgcaggagttcgtcaaggccttttacctgaagaccaatgaccagatggtggtagtgtacttggcctcgctgatccgttccgtggtcgccctgcacaacctcatcaacaacaagattgccaaccgggatgcagagaagaaagaagggcaggagaaagaagagagcaaaaaggataggaaagaggacaaggagaaagataaagataaggaaaagagtgatgtaaagaaagaggagaaaaaggagaaaaagtaaaacatgtattaaatagcttttttaatttgtaaattaaaatcttacaaactaaatcagtgtgctgctagagggttctttttcacttgacatgcttattagaaagctgacccaacaagagctctctgcctccggtcactcttgctgtggtgctacgt

SEQ ID NO: 170246 - DNA, 692 bp, Homo sapiens
  Payload ID: 13528
  Gene Symbol: PSMD7
  Gene Name: proteasome 26S subunit, non-ATPase 7
  ENST ID: ENST00000567958
  CDS Start-End: 95-691
gaggaactgggcctgaaagggtaccggtgaccgctactgctgccggtgtttgcgtgtggcagggagccaggcctggcgagcggggtgtgtcgcgatgccggagctggcagtgcagaaggtggtggtccaccccctggtgctgctcagtgtggtggatcatttcaaccgaatcggcaaggttggaaaccagaagcgtgttgttggtgtgcttttggggtcatggcaaaagaaagtacttgatgtatcgaacagttttgcagttccttttgatgaagatgacaaagacgattctgtatggtttttagaccatgattatttggaaaacatgtatggaatgtttaagaaagtcaatgccagggaaagaatagttggctggtaccacacaggccctaaactacacaagaatgacattgccatcaacgaactcatgaaaagatactgtcctaattccgtattggtcatcattgatgtgaagccgaaggacctagggctgcctacagaagcgtacatttcagtggaagaagtccatgatgatggaactccaacctcgaaaacatttgaacacgtgaccagtgaaattggagcagaggaagctgaggaagttggagttgaacacttgttacgctgcaggacgtcttcaacctgctgccagatgtcagcctgcaggagttcgtcaaggccttttacctgaa

SEQ ID NO: 170247 - DNA, 1553 bp, Homo sapiens
  Payload ID: 13529
  Gene Symbol: PSMD8
  Gene Name: proteasome 26S subunit, non-ATPase 8
  Uniprot ID: P48556
  ENST ID: ENST00000215071
  CDS Start-End: 67-1119
agttagggcaaaagccaacttccggtcaccatcttgagtgacgacagaggcggagctccaactgacatgttcattaagggcagggctccgagggcgccacctcgagagcgacggcgggctacccggggcgggctgaggcaggttgtagccccgccccgggccttgggctccacctctcggccccacttccgccgggcaagcgtttgtaggcggcgctgccgtaaatcaggcggtctgcttgccgcatcacgcaagatggcggccgcggcggtgaacggggcggcaggcttctcgagctccgggcccgcggcaacctcgggcgctgttctgcaggccgcgaccggcatgtacgagcaactcaagggcgagtggaaccgtaaaagccccaatcttagcaagtgcggggaagagctgggtcgactcaagctagttcttctggagctcaacttcttgccaaccacagggaccaagctgaccaaacagcagctaattctggcccgtgacatactggagatcggggcccaatggagcatcctacgcaaggacatcccctccttcgagcgctacatggcccagctcaaatgctactactttgattacaaggagcagctccccgagtcagcctatatgcaccagctcttgggcctcaacctcctcttcctgctgtcccagaaccgggtggctgagttccacacggagttggagcggctgcctgccaaggacatacagaccaatgtctacatcaagcacccagtgtccctggagcaatacctgatggagggcagctacaacaaagtgttcctggccaagggtaacatccccgccgagagctacaccttcttcattgacatcctgctcgacactatcagggatgagatcgctgggtgcatcgagaaggcctacgagaaaatccttttcactgaggccacccggatcctcttcttcaacacacccaaaaagatgacagactacgccaagaagcgagggtgggtcctgggccccaacaactactacagttttgccagccagcagcagaagccggaagacaccaccattccctccacagaactggccaaacaggtcatcgagtatgcccggcagctggagatgatcgtctgagccccccgggcactgggtggggcagggcacgagttatttaaaacagttacactgcagggtttcgcccaataaaggtggactgacattccctcttccaggcccttgtctccccagttgggacggcagagagacaagttcttatatctgaagaacttggaggttttggggcattcaggagttggagatagcctccaactgggtcagcctctgtctggtgggcattgctcagggtctcaaacatggacgcccactgtggggccccagcagcactgtggcctgcaggagggcatggccccaggtagggggactgttctagccagctgtggacacataggaatgctggaccagggtaccagattttttcaacaaagggggtgaagtgtcctactaaaaagaataaatgttggcagtgaattaaacaatttttcaaatga

SEQ ID NO: 170248 - DNA, 1581 bp, Homo sapiens
  Payload ID: 13529
  Gene Symbol: PSMD8
  Gene Name: proteasome 26S subunit, non-ATPase 8
  ENST ID: ENST00000592035
  CDS Start-End: 643-1161
gctacgaggtgtctggacccaaccaagtcccgggccgcggaagccacctcggtgccagcgagactgaggcgggctgggggatccgatggggtgaaagatttggaacagccaaagtgggggctcggagggcgtcaagaagcgagagagggacagggagcgttgatggtcacgcctgtaatcgcagcgctttgggaggccgaggcgggggagcgtcgcttgagcccaggagttcaagatcagcctgagcaacatagcgagactctgtctctacattttttttttaagtgagagatgactggaatggacccacgcgggggtggtgggggaatgattggaagacttatggcagaactgagtgaggggttagatttttggtgcgtggaggcttaactggtcggagtggcaggattgggattcgggcttttcctgatggtggattccaggcaagaccaagtgggaagtgaggactgcccggagtgataaaagaatgaggctgaaaagctagttcttctggagctcaacttcttgccaaccacagggaccaagctgaccaaacagcagctaattctggcccgtgacatactggagatcggggcccaatggagcatcctacgcaaggacatcccctccttcgagcgctacatggcccagctcaaatgctactactttgattacaaggagcagctccccgagtcagcctatatgcaccagctcttgggcctcaacctcctcttcctgctgtcccagaaccgggtggctgagttccacacggagttggagcggctgcctgccaaggacatacagaccaatgtctacatcaagcacccagtgtccctggagcaatacctgatggagggcagctacaacaaagtgttcctggccaagggtaacatccccgccgagagctacaccttcttcattgacatcctgctcgacactatcagggatgagatcgctgggtgcatcgagaaggcctacgagaaaatccttttcactgaggccacccggatcctcttcttcaacacacccaaaaagatgacagactacgccaagaaggtggctggggtacagggcaaggggccgtgggaccaaggggtgaagtcactaacaacagtgtggggtggcttagagggacactggaacaagactgcccaggtttaagttcaactgtgtgactctaggcaagctgccaaagctctctgacatcagtttctctatccacagaatggggctagatacatgggatgagcttagtacctggcagcagctggaggtgggcgctgcacgcatgttggctgctgtctttatcaaaatttcttagaggtggcagctttttctgcaagactttgcttcatttggtctcaggcgtttgagcacgagcaacgcttggtgttgcaggaggagggctgggaccaggctatggaaggtgaaattgggctgggtgcagtggctcccgcgcaccaaggtggatcctcccacctaggctcactctgggaggctgaggtgggaggatcgcctgaggtcaggagttcgagaccagcctggtcaacatggtgaaacctcatctctactaaaaaatac

SEQ ID NO: 170249 - DNA, 771 bp, Homo sapiens
  Payload ID: 13529
  Gene Symbol: PSMD8
  Gene Name: proteasome 26S subunit, non-ATPase 8
  ENST ID: ENST00000592561
  CDS Start-End: 20-771
gcttgccgcatcacgcaagatggcggccgcggcggtgaacggggcggcaggcttctcgagctccgggcccgcggcaacctcgggcgctgttctgcaggccgcgaccggcatgtacgagcaactcaagggcgagtggaaccgtaaaagccccaatcttagcaagtgcggggaagagctgggtcgactcaagctagttcttctggagctcaacttcttgccaaccacagggaccaagctgaccaaacagcagctaattctggcccgtgacatactggagatcggggcccaatggagcatcctacgcaaggacatcccctccttcgagcgctacatggcccagctcaaatgctactactttgattacaaggagcagctccccgagtcagcctatatgcaccagctcttgggcctcaacctcctcttcctgctgtcccagaaccgggtggctgagttccacacggagttggagcggctgcctgccaaggacatacagaccaatgtctacatcaagcacccagtgtccctggagcaatacctgatggagggcagctacaacaaagtgttcctggccaagggtaacatccccgccgagagctacaccttcttcattgacatcctgctcgacactatcagggatgagatcgctgggtgcatcgagaaggcctacgagaaaatccttttcactgaggccacccggatcctcttcttcaacacacccaaaaagatgacagactacgccaagaaggtggctggggtacagggcaaggggcc

SEQ ID NO: 170250 - DNA, 422 bp, Homo sapiens
  Payload ID: 13529
  Gene Symbol: PSMD8
  Gene Name: proteasome 26S subunit, non-ATPase 8
  ENST ID: ENST00000590331
  CDS Start-End: 1-192
tacctgatggagggcagctacaacaaagtgttcctggccaagggtaacatccccgccgagagctacaccttcttcattgacatcctgctcgacactatcagtgaattgggcctggtcatgggattgtggataacggctctcatctcaccacccttggctgttgacatgtgtggccacgtgtgtcaaacctgagcatggaattggttcagcaggcagggattgtgcggcctgtcttagcccatcttccgtcctagatacccatccaggatgagatcgctgggtgcatcgagaaggcctacgagaaaatccttttcactgaggccacccggatcctcttcttcaacacacccaaaaagatgacagactacgccaagaagcgagggtgggtcctgggccccaacaactactacagttttgccagc

SEQ ID NO: 170251 - DNA, 541 bp, Homo sapiens
  Payload ID: 13529
  Gene Symbol: PSMD8
  Gene Name: proteasome 26S subunit, non-ATPase 8
  ENST ID: ENST00000585598
  CDS Start-End: 34-423
aaatcaggcggtctgcttgccgcatcacgcaagatggcggccgcggcggtgaacggggcggcaggcttctcgagctccgggcccgcggcaacctcgggcgctgttctgcaggccgcgaccggcatgtacgagcaactcaagggcgagtggaaccgtaaaagccccaatcttagcaagtgcggggaagagctgggtcgactcaagctagttcttctggagctcaacttcttgccaaccacagggaccaagctgaccaaacagcagctaattctggcccgtgagtgtcactggggtgaaattgggctgggtgcagtggctcccgcgcaccaaggtggatcctcccacctaggctcactctgggaggctgaggtgggaggatcgcctgaggtcaggagttcgagaccagcctggtcaacatggtgaaacctcatctctactaaaaaatacaaaaaaaattagccggatgtggtggcgggtgcctgtaatctcagctactcgggaggctgaggcaggagaattgcttgaacccaggagggtggag

SEQ ID NO: 170252 - DNA, 578 bp, Homo sapiens
  Payload ID: 13529
  Gene Symbol: PSMD8
  Gene Name: proteasome 26S subunit, non-ATPase 8
  ENST ID: ENST00000591250
  CDS Start-End: 378-578
tcggtgccagcgagactgaggcgggctgggggatccgatggggtgaaagatttggaacagccaaagtgggggctcggagggcgtcaagaagcgagagagggacagggagcgttgatggtcacgcctgtaatcgcagcgctttgggaggccgaggcgggggagcgtcgcttgagcccaggagttcaagatcagcctgagcaacatagcgagactctgtctctacattttttttttaactagttcttctggagctcaacttcttgccaaccacagggaccaagctgaccaaacagcagctaattctggcccgtgacatactggagatcggggcccaatggagcatcctacgcaaggacatcccctccttcgagcgctacatggcccagctcaaatgctactactttgattacaaggagcagctccccgagtcagcctatatgcaccagctcttgggcctcaacctcctcttcctgctgtcccagaaccgggtggctgagttccacacggagttggagcggctgcctgccaaggacatacagaccaatgtctacatcaagcacccagtgtccctggagcaa

SEQ ID NO: 170253 - DNA, 1330 bp, Homo sapiens
  Payload ID: 13529
  Gene Symbol: PSMD8
  Gene Name: proteasome 26S subunit, non-ATPase 8
  ENST ID: ENST00000602911
  CDS Start-End: 33-896
aatcaggcggtctgcttgccgcatcacgcaagatggcggccgcggcggtgaacggggcggcaggcttctcgagctccgggcccgcggcaacctcgggcgctgttctgcaggccgcgaccggcatgtacgagcaactcaagggcgagtggaaccgtaaaagccccaatcttagcaagtgcggggaagagctgggtcgactcaagctagttcttctggagctcaacttcttgccaaccacagggaccaagctgaccaaacagcagctaattctggcccgtgacatactggagatcggggcccaatggagcatcctacgcaaggacatcccctccttcgagcgctacatggcccagctcaaatgctactactttgattacaaggagcagctccccgagtcagcctatatgcaccagctcttgggcctcaacctcctcttcctgctgtcccagaaccgggtggctgagttccacacggagttggagcggctgcctgccaaggacatacagaccaatgtctacatcaagcacccagtgtccctggagcaatacctgatggagggcagctacaacaaagtgttcctggccaagggtaacatccccgccgagagctacaccttcttcattgacatcctgctcgacactatcagggatgagatcgctgggtgcatcgagaaggcctacgagaaaatccttttcactgaggccacccggatcctcttcttcaacacacccaaaaagatgacagactacgccaagaagcgagggtgggtcctgggccccaacaactactacagttttgccagccagcagcagaagccggaagacaccaccattccctccacagaactggccaaacaggtcatcgagtatgcccggcagctggagatgatcgtctgagccccccgggcactgggtggggcagggcacgagttatttaaaacagttacactgcagggtttcgcccaataaaggtggactgacattccctcttccaggcccttgtctccccagttgggacggcagagagacaagttcttatatctgaagaacttggaggttttggggcattcaggagttggagatagcctccaactgggtcagcctctgtctggtgggcattgctcagggtctcaaacatggacgcccactgtggggccccagcagcactgtggcctgcaggagggcatggccccaggtagggggactgttctagccagctgtggacacataggaatgctggaccagggtaccagattttttcaacaaagggggtgaagtgtcctactaaaaagaataaatgttggcagtgaattaaacaatttttcaaatga

SEQ ID NO: 170254 - DNA, 1538 bp, Homo sapiens
  Payload ID: 13529
  Gene Symbol: PSMD8
  Gene Name: proteasome 26S subunit, non-ATPase 8
  Uniprot ID: P48556
  ENST ID: ENST00000620216
  CDS Start-End: 53-1105
ccaacttccggtcaccatcttgagtgacgacagaggcggagctccaactgacatgttcattaagggcagggctccgagggcgccacctcgagagcgacggcgggctacccggggcgggctgaggcaggttgtagccccgccccgggccttgggctccacctctcggccccacttccgccgggcaagcgtttgtaggcggcgctgccgtaaatcaggcggtctgcttgccgcatcacgcaagatggcggccgcggcggtgaacggggcggcaggcttctcgagctccgggcccgcggcaacctcgggcgctgttctgcaggccgcgaccggcatgtacgagcaactcaagggcgagtggaaccgtaaaagccccaatcttagcaagtgcggggaagagctgggtcgactcaagctagttcttctggagctcaacttcttgccaaccacagggaccaagctgaccaaacagcagctaattctggcccgtgacatactggagatcggggcccaatggagcatcctacgcaaggacatcccctccttcgagcgctacatggcccagctcaaatgctactactttgattacaaggagcagctccccgagtcagcctatatgcaccagctcttgggcctcaacctcctcttcctgctgtcccagaaccgggtggctgagttccacacggagttggagcggctgcctgccaaggacatacagaccaatgtctacatcaagcacccagtgtccctggagcaatacctgatggagggcagctacaacaaagtgttcctggccaagggtaacatccccgccgagagctacaccttcttcattgacatcctgctcgacactatcagggatgagatcgctgggtgcatcgagaaggcctacgagaaaatccttttcactgaggccacccggatcctcttcttcaacacacccaaaaagatgacagactacgccaagaagcgagggtgggtcctgggccccaacaactactacagttttgccagccagcagcagaagccggaagacaccaccattccctccacagaactggccaaacaggtcatcgagtatgcccggcagctggagatgatcgtctgagccccccgggcactgggtggggcagggcacgagttatttaaaacagttacactgcagggtttcgcccaataaaggtggactgacattccctcttccaggcccttgtctccccagttgggacggcagagagacaagttcttatatctgaagaacttggaggttttggggcattcaggagttggagatagcctccaactgggtcagcctctgtctggtgggcattgctcagggtctcaaacatggacgcccactgtggggccccagcagcactgtggcctgcaggagggcatggccccaggtagggggactgttctagccagctgtggacacataggaatgctggaccagggtaccagattttttcaacaaagggggtgaagtgtcctactaaaaagaataaatgttggcagtgaattaaacaatttttcaaatg

SEQ ID NO: 170255 - DNA, 2307 bp, Homo sapiens
  Payload ID: 13530
  Gene Symbol: PSMD9
  Gene Name: proteasome 26S subunit, non-ATPase 9
  ENST ID: ENST00000261817
  CDS Start-End: 87-755
catgggcggagccgtagttacggtcgactggggcgtcgtccctagcccgggagccgggtctctggagtcgcggcccggggttcacgatgtccgacgaggaagcgaggcagagcggaggctcctcgcaggccggcgtcgtgactgtcagcgacgtccaggagctgatgcggcgcaaggaggagatagaagcgcagatcaaggccaactatgacgtgctggaaagccaaaaaggcattgggatgaacgagccgctggtggactgtgagggctacccccggtcagacgtggacctgtaccaagtccgcaccgccaggcacaacatcatatgcctgcagaatgatcacaaggcagtgatgaagcaggtggaggaggccctgcaccagctgcacgctcgcgacaaggagaagcaggcccgggacatggctgaggcccacaaagaggccatgagccgcaaactgggtcagagtgagagccagggccctccacgggccttcgccaaagtgaacagcatcagccccggctccccagccagcatcgcgggtctgcaagtggatgatgagattgtggagttcggctctgtgaacacccagaacttccagtcactgcataacattggcagtgtggtgcagcacagtgaggggcccctgaatgtgacagtgatccgcaggggggaaaaacaccagcttagacttgttccaacacgctgggcaggaaaaggactgctgggctgcaacattattcctctgcaaagatgattgtccctggggaacagtaacaggaaagcatcttcccttgccctggacttgggtctagggatttccaacttgtcttctctccctgaagcataaggatctggaagaggcttgtaacctgaacttctgtgtggtggcagtactgtggcccaccagtgtaatctccctggattaaggcattcttaaaaacttaggcttggcctctttcacaaattaggccacggccctaaataggaattccctggattgtgggcaagtgggcggaagttattctggcaggtactggtgtgattattattattatttttaataaagagttttacagtgctgatatgaccctgttgtcaccccagctgaatttcttatgaccctcccaaaccaaagctcagatggggtcagaagagcttcatagaaagttgggcaaaacaggctagcaattgcaaagtcaggctttgaccaacatatttctttgcactgaggccttgctgctgtggatacggaaatggttaagtactgtgcttcctcagcagctgggctgtcagggccatagtagctccctttggagaacagggaaagcctggaggcttcccaggtggcccagcgtggtgtcctgtcagcttcctctttaggaacccaccagagggcagcaagctcctttcacttcgctagtaagaacccctccgtttttgtgtgtttttgtttttgttttctggagacaaggtcttgctttgtcacccaggctggagtgcagtgtcgtgatcaaggttcactgaagccttgacgctgtgggcactgcctcagccgcccaagtatctgggaccacaggcgtgcaccaccatgcatagctaatttattttttgtagagacagggtctccctgtgttgaccaggttggtctcgaactcctgggctcaagcagtcctcctgccttggcctcctaaagtgctgggatcacaggcgtgagccactgcgcccagcccactgctagtttgactttttataattgaacctcctggctatgccctgagatcagcgctattttgtaaaccgctgaggtatggataggaacgagtagatcagacctcttgaaaatgcttattcttcctcccttttattttttgtctcttttaagatggtaaaatggttctcagggattcctgccaatactttgaattattttttcctctccatggtatcagtgttcatttccccagttcttgcacaccgctttctgttttggcagttctgccaggcaagccctgtgttccttgggactggttttgctgtggttggatacagataccagcttgccttgatgggattggtattgctgtgtgcttccagccacaggttctcacactcaattccaaagccttcctattgggcgaattccctcaaactctatttgacctgacagccatacgtattcccctctggtagccacagacatgctgtgtttaccaatgtttgctgtttaaattgcatgttctaattccacgtattttccagtctcttttataaagtctcagactataataaacacagcttgcccagtt

SEQ ID NO: 170256 - DNA, 2784 bp, Homo sapiens
  Payload ID: 13530
  Gene Symbol: PSMD9
  Gene Name: proteasome 26S subunit, non-ATPase 9
  Uniprot ID: O00233
  ENST ID: ENST00000541212
  CDS Start-End: 127-798
gactgttctcgcgttcgcggacggctgtggtgttttggcgcatgggcggagccgtagttacggtcgactggggcgtcgtccctagcccgggagccgggtctctggagtcgcggcccggggttcacgatgtccgacgaggaagcgaggcagagcggaggctcctcgcaggccggcgtcgtgactgtcagcgacgtccaggagctgatgcggcgcaaggaggagatagaagcgcagatcaaggccaactatgacgtgctggaaagccaaaaaggcattgggatgaacgagccgctggtggactgtgagggctacccccggtcagacgtggacctgtaccaagtccgcaccgccaggcacaacatcatatgcctgcagaatgatcacaaggcagtgatgaagcaggtggaggaggccctgcaccagctgcacgctcgcgacaaggagaagcaggcccgggacatggctgaggcccacaaagaggccatgagccgcaaactgggtcagagtgagagccagggccctccacgggccttcgccaaagtgaacagcatcagccccggctccccagccagcatcgcgggtctgcaagtggatgatgagattgtggagttcggctctgtgaacacccagaacttccagtcactgcataacattggcagtgtggtgcagcacagtgaggggaagcccctgaatgtgacagtgatccgcaggggggaaaaacaccagcttagacttgttccaacacgctgggcaggaaaaggactgctgggctgcaacattattcctctgcaaagatgattgtccctggggaacagtaacaggaaagcatcttcccttgccctggacttgggtctagggatttccaacttgtcttctctccctgaagcataaggatctggaagaggcttgtaacctgaacttctgtgtggtggcagtactgtggcccaccagtgtaatctccctggattaaggcattcttaaaaacttaggcttggcctctttcacaaattaggccacggccctaaataggaattccctggattgtgggcaagtgggcggaagttattctggcaggtactggtgtgattattattattatttttaataaagagttttacagtgctgatatgaccctgttgtcaccccagctgaatttcttatgaccctcccaaaccaaagctcagatggggtcagaagagcttcatagaaagttgggcaaaacaggctagcaattgcaaagtcaggctttgaccaacatatttctttgcactgaggccttgctgctgtggatacggaaatggttaagtactgtgcttcctcagcagctgggctgtcagggccatagtagctccctttggagaacagggaaagcctggaggcttcccaggtggcccagcgtggtgtcctgtcagcttcctctttaggaacccaccagagggcagcaagctcctttcacttcgctagtaagaacccctccgtttttgtgtgtttttgtttttgttttctggagacaaggtcttgctttgtcacccaggctggagtgcagtgtcgtgatcaaggttcactgaagccttgacgctgtgggcactgcctcagccgcccaagtatctgggaccacaggcgtgcaccaccatgcatagctaatttattttttgtagagacagggtctccctgtgttgaccaggttggtctcgaactcctgggctcaagcagtcctcctgccttggcctcctaaagtgctgggatcacaggcgtgagccactgcgcccagcccactgctagtttgactttttataattgaacctcctggctatgccctgagatcagcgctattttgtaaaccgctgaggtatggataggaacgagtagatcagacctcttgaaaatgcttattcttcctcccttttattttttgtctcttttaagatggtaaaatggttctcagggattcctgccaatactttgaattattttttcctctccatggtatcagtgttcatttccccagttcttgcacaccgctttctgttttggcagttctgccaggcaagccctgtgttccttgggactggttttgctgtggttggatacagataccagcttgccttgatgggattggtattgctgtgtgcttccagccacaggttctcacactcaattccaaagccttcctattgggcgaattccctcaaactctatttgacctgacagccatacgtattcccctctggtagccacagacatgctgtgtttaccaatgtttgctgtttaaattgcatgttctaattccacgtattttccagtctcttttataaagtctcagactataataaacacagcttgcccagtttatcctttcttttttattttaagatgtatgcatattaatcaatttaccatcactggggcatggcagtgtgggcggggagaattattcacattctcctaaaatgacagcagcagagagccttctgcctcagtggctctggctggtttcctgcaggggtcccagtggaaacccgtgtggccacctgttgccgtcttccatgagatgttagtggagagccactttgacgtggaatgatcctaatagatatagccagaccggttttgcggaaacgctttgtgctgagaaccgcaagctggtgcaccctgtgtcatatctgcccccagccagctggaattgtctgcaacacgcggtgcccggtgaggaggcaggcaggacggttgtgtgctgcatccatgagacctggaaattcagtttgcttttggaaaagagcattg

SEQ ID NO: 170257 - DNA, 1001 bp, Homo sapiens
  Payload ID: 13530
  Gene Symbol: PSMD9
  Gene Name: proteasome 26S subunit, non-ATPase 9
  ENST ID: ENST00000543699
  CDS Start-End: 13-552
ccggggttcacgatgtccgacgaggaagcgaggcagagcggaggctcctcgcaggccggcgtcgtgactgtcagcgacgtccaggagctgatgcggcgcaaggaggagatagaagcgcagatcaaggccaactatgacgtgctggaaagccaaaaaggcattgggatgaacgagccgctggtggactgtgagggctacccccggtcagacgtggacctgtaccaagtccgcaccgccaggcacaacatcatatgcctgcagaatgatcacaaggcagtgatgaagcaggtggaggaggccctgcaccagctgcacgctcgcgacaaggagaagcaggcccgggacatggctgaggcccacaaagaggccatgagccgcaaactgggtcagagtgagagccagggccctccacgggccttcgccaaagtgaacagcatcagccccggctccccagccagcatcgcggtaatccaggggttggccactcaagtccatgcccaggggacacgggtctgcaagtggatgatgagattgtggagttcggctctgtgaacacccagaacttccagtcactgcataacattggcagtgtggtgcagcacagtgaggggaagcccctgaatgtgacagtgatccgcaggggggaaaaacaccagcttagacttgttccaacacgctgggcaggaaaaggactgctgggctgcaacattattcctctgcaaagatgattgtccctggggaacagtaacaggaaagcatcttcccttgccctggacttgggtctagggatttccaacttgtcttctctccctgaagcataaggatctggaagaggcttgtaacctgaacttctgtgtggtggcagtactgtggcccaccagtgtaatctccctggattaaggcattcttaaaaacttaggcttggcctctttcacaaattaggccacggccctaaataggaattccctggattgtgggcaagtgggcggaagttattctgg

SEQ ID NO: 170258 - DNA, 793 bp, Homo sapiens
  Payload ID: 13530
  Gene Symbol: PSMD9
  Gene Name: proteasome 26S subunit, non-ATPase 9
  ENST ID: ENST00000540962
  CDS Start-End: 96-353
gttttggcgcatgggcggagccgtagttacggtcgactggggcgtcgtccctagcccgggagccgggtctctggagtcgcggcccggggttcacgatgtccgacgaggaagcgaggcagagcggaggctcctcgcaggccggcgtcgtgactgtcagcgacgtccaggagctgatgcggcgcaaggaggagatagaagcgcagatcaaggccaactatgacgtgctggaaagccaaaaaggcattgggatgaacgagccgctggtggactgtgagggctacccccggtcagacgtggacctgtaccaagtccgcaccgccaggcacaacatcatatggtctgcaagtggatgatgagattgtggagttcggctctgtgaacacccagaacttccagtcactgcataacattggcagtgtggtgcagcacagtgaggggaagcccctgaatgtgacagtgatccgcaggggggaaaaacaccagcttagacttgttccaacacgctgggcaggaaaaggactgctgggctgcaacattattcctctgcaaagatgattgtccctggggaacagtaacaggaaagcatcttcccttgccctggacttgggtctagggatttccaacttgtcttctctccctgaagcataaggatctggaagaggcttgtaacctgaacttctgtgtggtggcagtactgtggcccaccagtgtaatctccctggattaaggcattcttaaaaacttaggcttggcctctttcacaaattaggccacggccctaaataggaattcc

SEQ ID NO: 170259 - DNA, 534 bp, Homo sapiens
  Payload ID: 13530
  Gene Symbol: PSMD9
  Gene Name: proteasome 26S subunit, non-ATPase 9
  ENST ID: ENST00000538613
  CDS Start-End: 74-534
gtagttacggtcgactggggcgtcgtccctagcccgggagccgggtctctggagtcgcggcccggggttcacgatgtccgacgaggaagcgaggcagagcggaggctcctcgcaggccggcgtcgtgactgtcagcgacgtccaggagctgatgcggcgcaaggaggagatagaagcgcagatcaaggccaactatgacgtgctggaaagccaaaaaggcattgggatgaacgagccgctggtggactgtgagggctacccccggtcagacgtggacctgtaccaagtccgcaccgccaggcacaacatcatatgcctgcagaatgatcacaaggcagtgatgaagcaggtggaggaggccctgcaccagctgcacgctcgcgacaaggagaagcaggcccgggacatggctgaggcccacaaagaggccatgagccgcaaactgggtcagagtgagagccagggccctccacgggccttcgccaaagtgaacagcatcagccccggctccccagccagcatcgcggtaatcca

SEQ ID NO: 170260 - DNA, 516 bp, Homo sapiens
  Payload ID: 13530
  Gene Symbol: PSMD9
  Gene Name: proteasome 26S subunit, non-ATPase 9
  Uniprot ID: O00233
  ENST ID: ENST00000542602
  CDS Start-End: 72-428
agttacggtcgactggggcgtcgtccctagcccgggagccgggtctctggagtcgcggcccggggttcacgatgtccgacgaggaagcgaggcagagcggaggctcctcgcaggccggcgtcgtgactgtcagcgacgtccaggagctgatgcggcgcaaggaggagatagaagcgcagatcaaggccaactatgacgtgctggaaagcggtctgcaagtggatgatgagattgtggagttcggctctgtgaacacccagaacttccagtcactgcataacattggcagtgtggtgcagcacagtgaggggaagcccctgaatgtgacagtgatccgcaggggggaaaaacaccagcttagacttgttccaacacgctgggcaggaaaaggactgctgggctgcaacattattcctctgcaaagatgattgtccctggggaacagtaacaggaaagcatcttcccttgccctggacttgggtctagggatttccaacttgtcttctctccctgaag

SEQ ID NO: 170261 - DNA, 1773 bp, Homo sapiens
  Payload ID: 13530
  Gene Symbol: PSMD9
  Gene Name: proteasome 26S subunit, non-ATPase 9
  ENST ID: ENST00000535293
  CDS Start-End: 938-1324
ggttctgggggttagctcgtggttatctgtttttgggggccgctcttcaacccactatgctgtgtatgcgcgtggcatgtgctaagtactctgcaggtcagctcgttagttcttgcagcaggtagggagggaggcgagtgctcctattcccattttataattgaggaagctgaggcttagagaggagaaggtctcagctaaggatgcccagcttgtacatggcagagttgagattcaaattaaagtctaaccaattgcaaagcccctcccctgaaccatgtgactggtttcactgcttttgtgtactctcctctgactcatgttaaaaaaaaaaaaagtgttgttttgaataaagaatacattcccataggcaaaattcaaaacctacagaggggtataaaatggactgtctctctccctgccctgtcacctagccacccagttcttctccccggaggcagctggtgctatcagtttccttcttcagatctttttattttcagaagaatcaaagccctgccacagctgggtgctgtctgggcttttcactcccctctagcttccagggccagcagccaggtgtcagccacctgtgggaaggagggtgtgaaggagtggaggaagaggctggccttggggatgatgctcaaaggagtctttggttttatcggcactgttttaacttcaaaaaagaatggattcatgcattacttgcgtcgttaaaaataaaaaatgaaaaacacagtgcccaccccagggtagttgtgagggcatgagtagagcccctggtgtaagtgatcagtatgtggcagttttcattactgtcacctttattatgacttcagaggagaagggtctggggaaagacatcctggggacattacacccatgagcaccttttaaccacgtttctttcctccagcaaaaaggcattgggatgaacgagccgctggtggactgtgagggctacccccggtcagacgtggacctgtaccaagtccgcaccgccaggcacaacatcatatgcctgcagaatgatcacaaggcagtgatgaagcaggtggaggaggccctgcaccagctgcacgctcgcgacaaggagaagcaggcccgggacatggctgaggcccacaaagaggccatgagccgcaaactgggtcagagtgagagccagggccctccacgggccttcgccaaagtgaacagcatcagccccggctccccagccagcatcgcggtaatccaggggttggccactcaagtccatgcccaggggacacgggtctgcaagtggatgatgagattgtggagttcggctctgtgaacacccagaacttccagtcactgcataacattggcagtgtggtgcagcacagtgaggggaagcccctgaatgtgacagtgatccgcaggggggaaaaacaccagcttagacttgttccaacacgctgggcaggaaaaggactgctgggctgcaacattattcctctgcaaagatgattgtccctggggaacagtaacaggaaagcatcttcccttgccctggacttgggtctagggatttccaacttgtcttctctccctgaagcataaggatctggaagaggcttgtaacctgaacttctgtgtggtggcagtactgtggcccaccagtgtaatctccctggattaaggcattcttaaaaacttaggcttggcctctttcacaaattaggccacggccctaaataggaattccctggattgtgggcaagtgggcggaagttattctgg

SEQ ID NO: 170262 - DNA, 1195 bp, Homo sapiens
  Payload ID: 13530
  Gene Symbol: PSMD9
  Gene Name: proteasome 26S subunit, non-ATPase 9
  Uniprot ID: O00233
  ENST ID: ENST00000537407
  CDS Start-End: 126-755
actgttctcgcgttcgcggacggctgtggtgttttggcgcatgggcggagccgtagttacggtcgactggggcgtcgtccctagcccgggagccgggtctctggagtcgcggcccggggttcacgatgtccgacgaggaagcgaggcagagcggaggctcctcgcaggccggcgtcgtgactgtcagcgacgtccaggagctgatgcggcgcaaggaggagatagaagcgcagatcaaggccaactatgacgtgctggaaagccaaaaaggcattgggatgaacgagccgctggtggactgtgagggctacccccggtcagacgtggacctgtaccaagtccgcaccgccaggcacaacatcatatgcctgcagaatgatcacaaggcagtgatgaagcaggtggaggaggccctgcaccagctgcacgctcgcgacaaggagaagcaggcccgggacatggctgaggcccacaaagaggccatgagccgcaaactgggtcagagtgagagccagggccctccacgggccttcgccaaagtgaacagcatcagccccggctccccagccagcatcgcgggtctgcaagtggatgatgagattgtggagttcggctctgtgaacacccagaacttccagtcactgcataacattggcagtgtggtgcagcacagtgagggggccctggcacccaccatcctactttctgtctctatgaatttgactactccagggacctcatctagaagcccctgaatgtgacagtgatccgcaggggggaaaaacaccagcttagacttgttccaacacgctgggcaggaaaaggactgctgggctgcaacattattcctctgcaaagatgattgtccctggggaacagtaacaggaaagcatcttcccttgccctggacttgggtctagggatttccaacttgtcttctctccctgaagcataaggatctggaagaggcttgtaacctgaacttctgtgtggtggcagtactgtggcccaccagtgtaatctccctggattaaggcattcttaaaaacttaggcttggcctctttcacaaattaggccacggccctaaataggaattccctggattgtgggcaagtgggcggaagttattctggcaggtactggtgtgattattattattatttttaataaagagttttacagtgctgatatga

SEQ ID NO: 170263 - DNA, 1006 bp, Homo sapiens
  Payload ID: 13531
  Gene Symbol: PSME1
  Gene Name: proteasome activator subunit 1
  Uniprot ID: Q06323
  ENST ID: ENST00000206451
  CDS Start-End: 106-855
actacccaggaaggcggagctgggtgcgagcgccctaccgctttcgctttcccttcgcggtgcccactccactccttgtgcggcgctaggccccccgtcccggtcatggccatgctcagggtccagcccgaggcccaagccaaggtggatgtgtttcgtgaagacctctgtaccaagacagagaacctgctcgggagctatttccccaagaagatttctgagctggatgcatttttaaaggagccagctctcaatgaagccaacttgagcaatctgaaggccccattggacatcccagtgcctgatccagtcaaggagaaagagaaagaggagcggaagaaacagcaggagaaggaagacaaggatgaaaagaagaagggggaggatgaagacaaaggtcctccctgtggcccagtgaactgcaatgaaaagatcgtggtccttctgcagcgcttgaagcctgagatcaaggatgtcattgagcagctcaacctggtcaccacctggttgcagctgcagatacctcggattgaggatggtaacaattttggagtggctgtccaggagaaggtgtttgagctgatgaccagcctccacaccaagctagaaggcttccacactcaaatctctaagtatttctctgagcgtggtgatgcagtgactaaagcagccaagcagccccatgtgggtgattatcggcagctggtgcacgagctggatgaggcagagtaccgggacatccggctgatggtcatggagatccgcaatgcttatgctgtgttatatgacatcatcctgaagaacttcgagaagctcaagaagcccaggggagaaacaaagggaatgatctattgagagccctctctcccattctgtgatgagtacagcagagaccttcctgctttttactggggactccagattttccccaaacttgcttctgttgagatttttccctcaccttgcctctcaggcacaataaatatagttataccactgcccatca

SEQ ID NO: 170264 - DNA, 1136 bp, Homo sapiens
  Payload ID: 13531
  Gene Symbol: PSME1
  Gene Name: proteasome activator subunit 1
  Uniprot ID: Q06323
  ENST ID: ENST00000382708
  CDS Start-End: 64-816
ttcgctttcccttcgcggtgcccactccactccttgtgcggcgctaggccccccgtcccggtcatggccatgctcagggtccagcccgaggcccaagccaaggtggatgtgtttcgtgaagacctctgtaccaagacagagaacctgctcgggagctatttccccaagaagatttctgagctggatgcatttttaaaggagccagctctcaatgaagccaacttgagcaatctgaaggccccattggacatcccagtgcctgatccagtcaaggagaaagagaaagaggagcggaagaaacagcaggagaaggaagacaaggatgaaaagaagaagggggaggatgaagacaaaggtcctccctgtggcccagtgaactgcaatgaaaagatcgtggtccttctgcagcgcttgaagcctgagatcaaggatgtcattgagcagctcaacctggtcaccacctggttgcagctgcagatacctcggattgaggatggtaacaattttggagtggctgtccaggagaaggtgtttgagctgatgaccagcctccacaccaagctagaaggcttccacactcaaatctctaagtatttctctgagcgtggtgatgcagtgactaaagcagccaagcagccccatgtgggtgattatcggcagctggtgcacgagctggatgaggcagagtaccgggacatccggctgatggtcatggagatccgcaatgcttatgtgaggaggcaagggcagggcaggggtgggcagaggcagctttcccaggccacccactccctgaccctgcaggctaggggttaagggtgacaaagctcagcttctccacaaggctagaaatggggcacagagccactggaggcctctgactgacctctactccctggccctgtaggctgtgttatatgacatcatcctgaagaacttcgagaagctcaagaagcccaggggagaaacaaagggaatgatctattgagagccctctctcccattctgtgatgagtacagcagagaccttcctgctttttactggggactccagattttccccaaacttgcttctgttgagatttttccctcaccttgcctctcaggcacaataaatatagttataccactgccca

SEQ ID NO: 170265 - DNA, 1033 bp, Homo sapiens
  Payload ID: 13531
  Gene Symbol: PSME1
  Gene Name: proteasome activator subunit 1
  ENST ID: ENST00000559123
  CDS Start-End: 618-890
ccaggaaggcggagctgggtgcgagcgccctaccgctttcgctttcccttcgcggtgcccactccactccttgtgcggcgctaggccccccgtcccggtcatggccatgctcagggtccagcccgaggcccaagccaaggtgagcgccgcggggtctagaaagggcccactggggaggcgtggatgtgtttcgtgaagacctctgtaccaagacagagaacctgctcgggagctatttccccaagaagatttctgagctggatgcatttttaaaggagccagctctcaatgaagccaacttgagcaatctgaaggccccattggacatcccagtgcctgatccagtcaaggagaaagagaaagaggagcggaagaaacagcaggagaaggaagacaaggatgaaaagaagaagggggaggatgaagacaaaggtcctccctgtggcccagtgaactgcaatgaaaagatcgtggtccttctgcagcgcttgaagcctgagatcaaggatgtcattgagcagctcaacctggtcaccacctggttgcagctgcagatacctcggattgaggatggtaacaattttggagtggctgtccaggagaaggtgtttgagctgatgaccagcctccacaccaagctagaaggcttccacactcaaatctctaagtatttctctgagcgtggtgatgcagtgactaaagcagccaagcagccccatgtgggtgattatcggcagctggtgcacgagctggatgaggcagagtaccgggacatccggctgatggtcatggagatccgcaatgcttatgctgtgttatatgacatcatcctgaagaacttcgagaagctcaagaagcccaggggagaaacaaagggaatgatctattgagagccctctctcccattctgtgatgagtacagcagagaccttcctgctttttactggggactccagattttccccaaacttgcttctgttgagatttttccctcaccttgcctctcaggcacaataaatatagttataccact

SEQ ID NO: 170266 - DNA, 651 bp, Homo sapiens
  Payload ID: 13531
  Gene Symbol: PSME1
  Gene Name: proteasome activator subunit 1
  ENST ID: ENST00000558112
  CDS Start-End: 1-345
aaggaagacaaggatgaaaagaagaagggggaggatgaagacaaaggtcctccctgtggcccagtgaactgcaatgaaaagatcgtggtccttctgcagcgcttgaagcctgagatcaaggatgtcattgagcagctcaacctggtcaccacctggttgcagctgcagatacctcggattgaggatggtaacaattttggagtggctgtccaggagaaggtgtttgagctgatgaccagcctccacaccaagctagaaggcttccacactcaaatctctaagtatttctctgagcgtggtgatgcagtgactaaagcagccaagcagccccatgtggtagggtgattatcggcagctggtgcacgagctggatgaggcagagtaccgggacatccggctgatggtcatggagatccgcaatgcttatgctgtgttatatgacatcatcctgaagaacttcgagaagctcaagaagcccaggggagaaacaaagggaatgatctattgagagccctctctcccattctgtgatgagtacagcagagaccttcctgctttttactggggactccagattttccccaaacttgcttctgttgagatttttccctcaccttgcctctcaggcacaataaatatagttataccact

SEQ ID NO: 170267 - DNA, 945 bp, Homo sapiens
  Payload ID: 13531
  Gene Symbol: PSME1
  Gene Name: proteasome activator subunit 1
  Uniprot ID: Q06323
  ENST ID: ENST00000561435
  CDS Start-End: 37-738
cactccttgtgcggcgctaggccccccgtcccggtcatggccatgctcagggtccagcccgaggcccaagccaaggtggatgtgtttcgtgaagacctctgtaccaagacagagaacctgctcgggagctatttccccaagaagatttctgagctggatgcatttttaaaggagccagctctcaatgaagccaacttgagcaatctgaaggccccattggacatcccagtgcctgatccagtcaaggagaaagagaaagaggagcggaagaaacagcaggagaaggaagacaaggatgaaaagaagaagggggaggatgaagacaaaggtcctccctgtggcccagtgaactgcaatgaaaagatcgtggtccttctgcagcgcttgaagcctgagatcaaggatgtcattgagcagctcaacctggtcaccacctggttgcagctgcagatacctcggattgaggatggtaacaattttggagtggctgtccaggagaaggtgtttgagctgatgaccagcctccacaccaagctagaaggcttccacactcaaatctctaagtatttctctgagcgtggtgatgcagtgactaaagcagccaagcagccccatgtgggtgattatcggcagctggtgcacgagctggatgaggcagagtaccgggacatccggctgatggtcatggagatccgcaatgcttatgtgaggaggctgtgttatatgacatcatcctgaagaacttcgagaagctcaagaagcccaggggagaaacaaagggaatgatctattgagagccctctctcccattctgtgatgagtacagcagagaccttcctgctttttactggggactccagattttccccaaacttgcttctgttgagatttttccctcaccttgcctctcaggcacaataaatatagttataccactgcccatca

SEQ ID NO: 170268 - DNA, 1404 bp, Homo sapiens
  Payload ID: 13532
  Gene Symbol: PSME2
  Gene Name: proteasome activator subunit 2
  Uniprot ID: Q9UL46
  ENST ID: ENST00000216802
  CDS Start-End: 641-1360
ctggaccagtccggtacgctccgggcctcaccgaggaagtcccaccctgcaggggaaccgactctggccggccctaacccctctcgagcgagtcccgccccatctccggtctgtcctgaaggcagagggaagaccctcacccaacccctgcccgctctcttctaagagctgctagtccttctccaccccaggcgctccctctggctgcccctcccactcgctctgatctctctccgtccgctacttgcggtcgagccttcttgggggagccccgccactgaataccccctttgccatactcccacctctcttaccccaaccctggacttccagttggccctagctataagccccgcccctctccgagggacagcccccgctccagtctccgcggtcccacttaccctagcccctccctcgggcagcccctggactgtgacccagccagcaccgcctctcctagtggcaactggctgggaatggctgaggggctacctactgcttgcggcctgccagcgggaggaggggggcggaaagaagaaagggggcggggttgaggggggcgggcctggacctggggagtgaaagcgaaagcccgggcgactagccgggagaccagagatctagcgactgaagcagcatggccaagccgtgtggggtgcgcctgagcggggaagcccgcaaacaggtggaggtcttcagacagaatcttttccaggaggctgaggaattcctctacagattcttgccacagaaaatcatatacctgaatcagctcttgcaagaggactccctcaatgtggctgacttgacttccctccgggccccactggacatccccatcccagaccctccacccaaggatgatgagatggaaacagataagcaggagaagaaagaagtccataagtgtggatttctccctgggaatgagaaagtcctgtccctgcttgccctggttaagccagaagtctggactctcaaagagaaatgcattctggtgattacatggatccaacacctgatccccaagattgaagatggaaatgattttggggtagcaatccaggagaaggtgctggagagggtgaatgccgtcaagaccaaagtggaagctttccagacaaccatttccaagtacttctcagaacgtggggatgctgtggccaaggcctccaaggagactcatgtaatggattaccgggccttggtgcatgagcgagatgaggcagcctatggggagctcagggccatggtgctggacctgagggccttctatgctgagctttatcatatcatcagcagcaacctggagaaaattgtcaacccaaagggtgaagaaaagccatctatgtactgaacccgggactagaaggaaaataaatgatctatatgttgtgtgga

SEQ ID NO: 170269 - DNA, 512 bp, Homo sapiens
  Payload ID: 13532
  Gene Symbol: PSME2
  Gene Name: proteasome activator subunit 2
  ENST ID: ENST00000559056
  CDS Start-End: 258-512
ggcaccctgttgtgggtggaagcttttgacaacccagacccttaaccaacatccgggtactgctctctgtgtaggtggaggtcttcagacagaatcttttccaggaggctgaggaattcctctacagattcttgccacagaaaatcatatacctgaatcagctcttgcaagaggactccctcaatgtggctgacttgacttccctccgggccccactggacatccccatcccagaccctccacccaaggatgatgagatggaaacagataagcaggagaagaaagaagtccataagtgtggatttctccctgggaatgagaaagtcctgtccctgcttgccctggttaagccagaagtctggactctcaaagagaaatgcattctggtgattacatggatccaacacctgatccccaagattgaagatggaaatgattttggggtagcaatccaggagaaggtgctggagagggtgaatgccgtcaagaccaaagtggaagctttccagaca

SEQ ID NO: 170270 - DNA, 620 bp, Homo sapiens
  Payload ID: 13532
  Gene Symbol: PSME2
  Gene Name: proteasome activator subunit 2
  ENST ID: ENST00000560370
  CDS Start-End: 11-157
ctgaagcagcatggccaagccgtgtggggtgcgcctgagcggggaagcccgcaaacaggtggaggtcttcagacagaatcttttccaggagattcttgccacagaaaatcatatacctgaatcagctcttgcaagaggactccctcaatgtggctgacttgacttccctccgggccccactggacatccccatcccagaccctccacccaaggatgatgagatggaaacagataagcaggagaagaaagaagtccataagtgtggatttctccctgggaatgagaaagtcctgtccctgcttgccctggttaagccagaagtctggactctcaaagagaaatgcattctggtgattacatggatccaacacctgatccccaagattgaagatggaaatgattttggggtagcaatccaggagaaggtgctggagagggtgaatgccgtcaagaccaaagtggaagctttccagacaaccatttccaagtacttctcagaacgtggggatgctgtggccaaggcctccaaggagactcatgtaatggattaccgggccttggtgcatgagcgagatgaggcagcctatggggagctcagggccatggtgctggacctgagg

SEQ ID NO: 170271 - DNA, 1502 bp, Homo sapiens
  Payload ID: 13532
  Gene Symbol: PSME2
  Gene Name: proteasome activator subunit 2
  ENST ID: ENST00000558273
  CDS Start-End: 655-774
ctttctttttctagctggaccagtccggtacgctccgggcctcaccgaggaagtcccaccctgcaggggaaccgactctggccggccctaacccctctcgagcgagtcccgccccatctccggtctgtcctgaaggcagagggaagaccctcacccaacccctgcccgctctcttctaagagctgctagtccttctccaccccaggcgctccctctggctgcccctcccactcgctctgatctctctccgtccgctacttgcggtcgagccttcttgggggagccccgccactgaataccccctttgccatactcccacctctcttaccccaaccctggacttccagttggccctagctataagccccgcccctctccgagggacagcccccgctccagtctccgcggtcccacttaccctagcccctccctcgggcagcccctggactgtgacccagccagcaccgcctctcctagtggcaactggctgggaatggctgaggggctacctactgcttgcggcctgccagcgggaggaggggggcggaaagaagaaagggggcggggttgaggggggcgggcctggacctggggagtgaaagcgaaagcccgggcgactagccgggagaccagagatctagcgactgaagcagcatggccaagccgtgtggggtgcgcctgagcggggaagcccgcaaacaggtggaggtcttcagacagaatcttttccaggaggtcttcagtttcctcatttgcaagtcttggacccagtgatttccaaaggcccttccagttccatttgtcagacatctcattgagcatattctgtgattcccctcccttgcaatgtaacccacaggctgaggaattcctctacagattcttgccacagaaaatcatatacctgaatcagctcttgcaagaggactccctcaatgtggctgacttgacttccctccgggccccactggacatccccatcccagaccctccacccaaggatgatgagatggaaacagataagcaggagaagaaagaagtccataagtgtggatttctccctgggaatgagaaagtcctgtccctgcttgccctggttaagccagaagtctggactctcaaagagaaatgcattctggtgattacatggatccaacacctgatccccaagattgaagatggaaatgattttggggtagcaatccaggagaaggtgctggagagggtgaatgccgtcaagaccaaagtggaagctttccagacaaccatttccaagtacttctcagaacgtggggatgctgtggccaaggcctccaaggagactcatgtaatggattaccgggccttggtgcatgagcgagatgaggcagcctatggggagctcagggccatggtgctggacctgagggccttctatgctgagctttatcatatcatcagcagcaacctggagaaaattgtcaacccaaagggtgaagaaaagccatctatgtactgaaccc

SEQ ID NO: 170272 - DNA, 755 bp, Homo sapiens
  Payload ID: 13532
  Gene Symbol: PSME2
  Gene Name: proteasome activator subunit 2
  ENST ID: ENST00000560410
  CDS Start-End: 25-711
cagagatctagcgactgaagcagcatggccaagccgtgtggggtgcgcctgagcggggaagcccgcaaacaggctgaggaattcctctacagattcttgccacagaaaatcatatacctgaatcagctcttgcaagaggactccctcaatgtggctgacttgacttccctccgggccccactggacatccccatcccagaccctccacccaaggatgatgagatggaaacagataagcaggagaagaaagaagtccataagtgtggatttctccctgggaatgagaaagtcctgtccctgcttgccctggttaagccagaagtctggactctcaaagagaaatgcattctggtgattacatggatccaacacctgatccccaagattgaagatggaaatgattttggggtagcaatccaggagaaggtgctggagagggtgaatgccgtcaagaccaaagtggaagctttccagacaaccatttccaagtacttctcagaacgtggggatgctgtggccaaggcctccaaggagactcatgtaatggattaccgggccttggtgcatgagcgagatgaggcagcctatggggagctcagggccatggtgctggacctgagggccttctatgctgagctttatcatatcatcagcagcaacctggagaaaattgtcaacccaaagggtgaagaaaagccatctatgtactgaacccgggactagaaggaaaataaatgatctatatgttgtgtgga

SEQ ID NO: 170273 - DNA, 874 bp, Homo sapiens
  Payload ID: 13532
  Gene Symbol: PSME2
  Gene Name: proteasome activator subunit 2
  ENST ID: ENST00000615264
  CDS Start-End: 66-830
tggggagtgaaagcgaaagcccgggcgactagccgggagaccagagatctagcgactgaagcagcatggccaagccgtgtggggtgcgcctgagcggggaagcccgcaaacaggtggaggtcttcagacagaatcttttccaggaggctgaggaattcctctacagattcttgccacagaaaatcatatacctgaatcagctcttgcaagaggactccctcaatgtggctgacttgacttccctccgggccccactggacatccccatcccagaccctccacccaaggatgatgagatggaaacagataagcaggagaagaaagaaggtaagagagataagagaaagggcctgaatcccctctttctcacagtccataagtgtggatttctccctgggaatgagaaagtcctgtccctgcttgccctggttaagccagaagtctggactctcaaagagaaatgcattctggtgattacatggatccaacacctgatccccaagattgaagatggaaatgattttggggtagcaatccaggagaaggtgctggagagggtgaatgccgtcaagaccaaagtggaagctttccagacaaccatttccaagtacttctcagaacgtggggatgctgtggccaaggcctccaaggagactcatgtaatggattaccgggccttggtgcatgagcgagatgaggcagcctatggggagctcagggccatggtgctggacctgagggccttctatgctgagctttatcatatcatcagcagcaacctggagaaaattgtcaacccaaagggtgaagaaaagccatctatgtactgaacccgggactagaaggaaaataaatgatctatatgttgtgtgga

SEQ ID NO: 170274 - DNA, 185 bp, Homo sapiens
  Payload ID: 13532
  Gene Symbol: PSME2
  Gene Name: proteasome activator subunit 2
  ENST ID: ENST00000630027
  CDS Start-End: 66-185
tggggagtgaaagcgaaagcccgggcgactagccgggagaccagagatctagcgactgaagcagcatggccaagccgtgtggggtgcgcctgagcggggaagcccgcaaacaggtggaggtcttcagacagaatcttttccaggaggtcttcagtttcctcatttgcaagtcttggacccagtga

SEQ ID NO: 170275 - DNA, 3144 bp, Homo sapiens
  Payload ID: 13533
  Gene Symbol: PSME3
  Gene Name: proteasome activator subunit 3
  Uniprot ID: P61289
  ENST ID: ENST00000293362
  CDS Start-End: 162-965
gggcggacggcacagagggagggagcgagcgagcagtgagtaagccagcaagggcggtcgggtcccgaggtcagccgagatttctcaggtccctccggccccctccctggagtccacagcgcctccggtgtccagaggatcggacacggcccggcccggccatggcctcgttgctgaaggtggatcaggaagtgaagctcaaggttgattctttcagggagcggatcacaagtgaggcagaagacttggtggcaaattttttcccaaagaagttattagaacttgatagttttctgaaggaaccaatcttaaacatccatgacctaactcagatccactctgacatgaatctcccagtccctgaccccattcttctcaccaatagccatgatggactggatggtcccacttataagaagcgaaggttggatgagtgtgaagaagccttccaaggaaccaaggtgtttgtgatgcccaatgggatgctgaaaagcaaccagcagctggtggacattattgagaaagtgaaacctgagatccggctgttgattgagaaatgtaacacgccttcaggcaaaggtcctcatatatgttttgacctccaggtcaaaatgtgggtacagctcctgattcccaggatagaagatggaaacaactttggggtgtccattcaggaggaaacagttgcagagctaagaactgttgagagtgaagctgcatcttatctggaccagatttctagatattatattacaagagccaaattggtttctaaaatagctaaatatccccatgtggaggactatcgccgcaccgtgacagagattgatgagaaagaatatatcagccttcggctcatcatatcagagctgaggaatcaatatgtcactctacatgacatgatcctgaaaaatatcgagaagatcaaacggccccggagcagcaatgcagagactctgtactgaggccagggccagggccaggggactctgtgagtctggctcaagaccgacattgccttggtttgttacatgactatcgtgatggggaaactggctggaaatagtaatcacacctctctgtttttagttagagtctaatgaaactctcatctagttctgtgatgtgtttacctcttttttcaggcctcaggaactcttctatttccttccctaataccccacacccaacctgtcgtaatttctggagaactccaggtttgtgtgtgcaggatgttggcacaaaaatacctgtgttttcattctccccctctctccctcctgtgtcttgcgctttatgttttcttccgtttgataattagttggttaaaagctgagggaaccggaaggaaagtgctaggtgttttttaggaactagggtggcggggggacgaacttctcttcctcacatgaggttactgtttctttcctctgtggggcattggatcctcccacagttgccctggtgatgacttagggcttcccatctgtgtacatcccactttgaatcttgatcgtgacaagaaataccttaggccttcagtcaattccgaagctccttcagttgtttttataatgggcgttttcacatgcacatatgtgtatgcatgtatacgcccatacagacatgcacacacagactcctactccattagctaacataccctccctctccacaacccctgtcacatacctttcaggaggtgacagttgtcttagttgtcatctacccagacaaacgtcctgggcccgtcctccctcctgatactgtagcctcttggtacccagggtgagttggtggagaacagagagatgagaagcagagggcttggggaaagcctgttcctctctgactcagccctttttggcattattgcaagagcttgactcctggttgccttttcccagccagttttcagttggggtgaaggtttctgcaagtgtgaggtccagatgctgctgctcatgttgggctttccttttgggaactatttctctttatttatagtgtcgggcttccggggaaagcaatcattggtgtgtatgtgtatgtgcatgcacacacgtgcatatacacatttgtgtatgtggaaatgtgctgggcaagtcaaaactatagaagagttgcctcctgtctctcgaatcttccagagatatcacttaattgttaacagcttttgtgttaatccccttcagcccctagctcttttattctaccacggctggagagttgatacctgcagtcagcctgccagtgactcttagtgtctgtttctgacttatttttcctgtctctgtcttccaacccccaataatatttccaccggggatgcatcatttttactcccaatattctgtagagagggagtcaggatgctgtcttcccacgaatagtactcagtaacaaaccaattgcattttagttgggcagtgctcccacccaccctccagatcccttccagctaaaacccttcccccttccctccatgtgtttctcagtttcccgtttcgtttgttggactgttccactgcccctcctcctcaccctatcacccatggatcgtaatgtaaaattcttttaccatgtcaagaaattattaaaaatacaggtactttgacctctttctaaagccgcagaccctggtgcaatgctctggtggctagggatgtactcatgctcatatgtgtgcacgcttggacacccacctccatggacacctagccaccctgttgtgtgtccttatgccagttgagctgaatcttttccccagtatagtggaaagactgaggcttctgcctactgagcaaggttgggtgcttcatttgtgttcagtctgaattatgggaaagttagctcttcccagacctaagctgccttctctccctactttcagaagatcctagttccttccttcccgagtgatacccatgaactgccagtagaggctgctatcgttccatgtgtaaggaatgaactggttcaaggcgcgtcctacccagtcattttctttaccttatactaattcttcctgaataatgtcttcagtttcttgaggagactcctagttttggttttcaaattacttggagggctgcctaggaatctatctccctctgaaataaagtttcctcatcttccaccttg

SEQ ID NO: 170276 - DNA, 2944 bp, Homo sapiens
  Payload ID: 13533
  Gene Symbol: PSME3
  Gene Name: proteasome activator subunit 3
  Uniprot ID: P61289
  ENST ID: ENST00000441946
  CDS Start-End: 509-1306
gaaagccgggagggcgagcgagagagcaagcaggcagcaggctgccggcgggcgggcggacggcacagagggagggagcgagcgagcagtgagtaagccagcaagggcggtcgggtcccgaggtcagccgagatttctcaggtccctccggccccctccctggagtccacagcgcctccggtgtccagaggatcggacacggcccggcccggccatggcctcgttgctgaaggtggatcaggaagtgaagctcaagctctgagcttccgctcggctcagcccagcccccaactcccggggtcggcttcgcgggagaggaaaatataggatggctttctgtaccgcgtctgatgatggagagtcccggggacacctccgcggacacgtgttggactcagggctttaggcccgtgacagctgacagcttcagacacaggaggaagggagggaagggggaggacagaggagacaggcaggtgctgtcctcaaagccctgcgttcttctgagatggaaaaatggatcctcaaaaaaataaagtatttgcagtctgggggcctctcagcttcttattacagttacaaggttgattctttcagggagcggatcacaagtgaggcagaagacttggtggcaaattttttcccaaagaagttattagaacttgatagttttctgaaggaaccaatcttaaacatccatgacctaactcagatccactctgacatgaatctcccagtccctgaccccattcttctcaccaatagccatgatggactggatggtcccacttataagaagcgaaggttggatgagtgtgaagaagccttccaaggaaccaaggtgtttgtgatgcccaatgggatgctgaaaagcaaccagcagctggtggacattattgagaaagtgaaacctgagatccggctgttgattgagaaatgtaacacggtcaaaatgtgggtacagctcctgattcccaggatagaagatggaaacaactttggggtgtccattcaggaggaaacagttgcagagctaagaactgttgagagtgaagctgcatcttatctggaccagatttctagatattatattacaagagccaaattggtttctaaaatagctaaatatccccatgtggaggactatcgccgcaccgtgacagagattgatgagaaagaatatatcagccttcggctcatcatatcagagctgaggaatcaatatgtcactctacatgacatgatcctgaaaaatatcgagaagatcaaacggccccggagcagcaatgcagagactctgtactgaggccagggccagggccaggggactctgtgagtctggctcaagaccgacattgccttggtttgttacatgactatcgtgatggggaaactggctggaaatagtaatcacacctctctgtttttagttagagtctaatgaaactctcatctagttctgtgatgtgtttacctcttttttcaggcctcaggaactcttctatttccttccctaataccccacacccaacctgtcgtaatttctggagaactccaggtttgtgtgtgcaggatgttggcacaaaaatacctgtgttttcattctccccctctctccctcctgtgtcttgcgctttatgttttcttccgtttgataattagttggttaaaagctgagggaaccggaaggaaagtgctaggtgttttttaggaactagggtggcggggggacgaacttctcttcctcacatgaggttactgtttctttcctctgtggggcattggatcctcccacagttgccctggtgatgacttagggcttcccatctgtgtacatcccactttgaatcttgatcgtgacaagaaataccttaggccttcagtcaattccgaagctccttcagttgtttttataatgggcgttttcacatgcacatatgtgtatgcatgtatacgcccatacagacatgcacacacagactcctactccattagctaacataccctccctctccacaacccctgtcacatacctttcaggaggtgacagttgtcttagttgtcatctacccagacaaacgtcctgggcccgtcctccctcctgatactgtagcctcttggtacccagggtgagttggtggagaacagagagatgagaagcagagggcttggggaaagcctgttcctctctgactcagccctttttggcattattgcaagagcttgactcctggttgccttttcccagccagttttcagttggggtgaaggtttctgcaagtgtgaggtccagatgctgctgctcatgttgggctttccttttgggaactatttctctttatttatagtgtcgggcttccggggaaagcaatcattggtgtgtatgtgtatgtgcatgcacacacgtgcatatacacatttgtgtatgtggaaatgtgctgggcaagtcaaaactatagaagagttgcctcctgtctctcgaatcttccagagatatcacttaattgttaacagcttttgtgttaatccccttcagcccctagctcttttattctaccacggctggagagttgatacctgcagtcagcctgccagtgactcttagtgtctgtttctgacttatttttcctgtctctgtcttccaacccccaataatatttccaccggggatgcatcatttttactcccaatattctgtagagagggagtcaggatgctgtcttcccacgaatagtactcagtaacaaaccaattgcattttagttgggcagtgctcccacccaccctccagatcccttccagctaaaacccttcccccttccctccatgtgtttctcagtttcccgtttcgtttgttggactgttccactgcccctcctcctcaccctatcacccatggatcgtaatgtaaaattcttttaccatgtcaagaaattattaaaaa

SEQ ID NO: 170277 - DNA, 956 bp, Homo sapiens
  Payload ID: 13533
  Gene Symbol: PSME3
  Gene Name: proteasome activator subunit 3
  ENST ID: ENST00000543428
  CDS Start-End: 188-580
aagcaggcagcaggctgccggcgggcgggcggacggcacagagggagggagcgagcgagcagtgagtaagccagcaagggcggtcgggtcccgaggtcagccgagatttctcaggtccctccggccccctccctggagtccacagcgcctccggtgtccagaggatcggacacggcccggcccggccatggcctcgttgctgaaggtggatcaggaagtgaagctcaaggttgattctttcagggagcggatcacaagtgaggcagaagacttggtggcaaattttttcccaaagaagttattagaacttgatagttttctgaaggaaccaatcttaaacatccatgacctaactcagatccactctgacatgaatctcccagtccctgaccccattcttctcaccaatagccatgatggactggatggtcccacttataagaagcgaaggttggatgagtgtgaagaagccttccaaggtcaaaatgtgggtacagctcctgattcccaggatagaagatggaaacaactttggggtgtccattcaggaggaaacagttgcagagctaagaactgttgagagtgaagctgcatcttatctggaccagatttctagatattatattacaagagccaaattggtttctaaaatagctaaatatccccatgtggaggactatcgccgcaccgtgacagagattgatgagaaagaatatatcagccttcggctcatcatatcagagctgaggaatcaatatgtcactctacatgacatgatcctgaaaaatatcgagaagatcaaacggccccggagcagcaatgcagagactctgtactgaggccagggccagggccaggggactctgtgagtctggctcaagaccgacattgccttggtttgttacatgactatcgtgatggggaaactggctggaaatagtaatcacacctctctg

SEQ ID NO: 170278 - DNA, 3366 bp, Homo sapiens
  Payload ID: 13533
  Gene Symbol: PSME3
  Gene Name: proteasome activator subunit 3
  ENST ID: ENST00000541124
  CDS Start-End: 491-1186
ggagtgcagcggctgagaaggtcccttcggtgaaggcgagttccgggacaacagagagggccgcaccgtttccgagtctctcggaggctcagttctcagcgcaccattccccacagctctcctttttactttacccctacccgacacttgaccccggcagtgtgaaccccgctgggagcgtccaaagccatgcctcatcgcggctgcgcagcgcacgtgcacagcctcgcaggagtctcggcgattggctgtgacgcagtttccggcgtgagcggcgaaagccgggagggcgagcgagagagcaagcaggcagcaggctgccggcgggcgggcggacggcacagagggagggagcgagcgagcagtgagtaagccagcaagggcggtcgggtcccgaggtcagccgagatttctcaggtccctccggccccctccctggagtccacagcgcctccggtgtccagaggatcggacacggcccggcccggccatggcctcgttgctgaaggtggatcaggaagtgaagctcaaggttgattctttcagggagcggatcacaagtgaggcagaagacttggtggcaaattttttcccaaagaagttattagaacttgatagttttctgaaggaaccaatcttaaacatccatgacctaactcagatccactctgacatgaatctcccagtccctgaccccattcttctcaccaatagccatgatggactggatggtcccacttataagaagcgaaggttggatgagtgtgaagaagccttccaaggaaccaaggtgtttgtgatgcccaatgggatgctgaaaagcaaccagcagctggtggacattattgagaaagtgaaacctgagatccggctgttgattgagaaatgtaacacggaggaaacagttgcagagctaagaactgttgagagtgaagctgcatcttatctggaccagatttctagatattatattacaagagccaaattggtttctaaaatagctaaatatccccatgtggaggactatcgccgcaccgtgacagagattgatgagaaagaatatatcagccttcggctcatcatatcagagctgaggaatcaatatgtcactctacatgacatgatcctgaaaaatatcgagaagatcaaacggccccggagcagcaatgcagagactctgtactgaggccagggccagggccaggggactctgtgagtctggctcaagaccgacattgccttggtttgttacatgactatcgtgatggggaaactggctggaaatagtaatcacacctctctgtttttagttagagtctaatgaaactctcatctagttctgtgatgtgtttacctcttttttcaggcctcaggaactcttctatttccttccctaataccccacacccaacctgtcgtaatttctggagaactccaggtttgtgtgtgcaggatgttggcacaaaaatacctgtgttttcattctccccctctctccctcctgtgtcttgcgctttatgttttcttccgtttgataattagttggttaaaagctgagggaaccggaaggaaagtgctaggtgttttttaggaactagggtggcggggggacgaacttctcttcctcacatgaggttactgtttctttcctctgtggggcattggatcctcccacagttgccctggtgatgacttagggcttcccatctgtgtacatcccactttgaatcttgatcgtgacaagaaataccttaggccttcagtcaattccgaagctccttcagttgtttttataatgggcgttttcacatgcacatatgtgtatgcatgtatacgcccatacagacatgcacacacagactcctactccattagctaacataccctccctctccacaacccctgtcacatacctttcaggaggtgacagttgtcttagttgtcatctacccagacaaacgtcctgggcccgtcctccctcctgatactgtagcctcttggtacccagggtgagttggtggagaacagagagatgagaagcagagggcttggggaaagcctgttcctctctgactcagccctttttggcattattgcaagagcttgactcctggttgccttttcccagccagttttcagttggggtgaaggtttctgcaagtgtgaggtccagatgctgctgctcatgttgggctttccttttgggaactatttctctttatttatagtgtcgggcttccggggaaagcaatcattggtgtgtatgtgtatgtgcatgcacacacgtgcatatacacatttgtgtatgtggaaatgtgctgggcaagtcaaaactatagaagagttgcctcctgtctctcgaatcttccagagatatcacttaattgttaacagcttttgtgttaatccccttcagcccctagctcttttattctaccacggctggagagttgatacctgcagtcagcctgccagtgactcttagtgtctgtttctgacttatttttcctgtctctgtcttccaacccccaataatatttccaccggggatgcatcatttttactcccaatattctgtagagagggagtcaggatgctgtcttcccacgaatagtactcagtaacaaaccaattgcattttagttgggcagtgctcccacccaccctccagatcccttccagctaaaacccttcccccttccctccatgtgtttctcagtttcccgtttcgtttgttggactgttccactgcccctcctcctcaccctatcacccatggatcgtaatgtaaaattcttttaccatgtcaagaaattattaaaaatacaggtactttgacctctttctaaagccgcagaccctggtgcaatgctctggtggctagggatgtactcatgctcatatgtgtgcacgcttggacacccacctccatggacacctagccaccctgttgtgtgtccttatgccagttgagctgaatcttttccccagtatagtggaaagactgaggcttctgcctactgagcaaggttgggtgcttcatttgtgttcagtctgaattatgggaaagttagctcttcccagacctaagctgccttctctccctactttcagaagatcctagttccttccttcccgagtgatacccatgaactgccagtagaggctgctatcgttccatgtgtaaggaatgaactggttcaaggcgcgtcctacccagtcattttctttaccttatactaattcttcctgaataatgtcttcagtttcttgaggagactcctagttttggttttcaaattacttggagggctgcctaggaatctatctccctctgaaataaagtttcctcatcttccaccttgc

SEQ ID NO: 170279 - DNA, 3082 bp, Homo sapiens
  Payload ID: 13533
  Gene Symbol: PSME3
  Gene Name: proteasome activator subunit 3
  ENST ID: ENST00000545225
  CDS Start-End: 840-1421
aagtgtaggagccaaggccgcagagaatggggaggctccgctattctctaaattcagggggcggcgggcgcggtggctcacgcctgtaatctcagcacttggggaggccgaggagggcggatcacgtgaggtcaggagttcgagaccagcctggccaacacagtgaaaccccgtctctactaaaaatacaaaaactagccgggcgtggtggggcacgcctataatcccagcttaatcccagctactcgggaggctgaggcaggagaatcgcttgaacctgggaggtggaggttgcagtgagccgagatcgggccactgcactccagcctgggcgacagggcaaggctccatctcagaacaacaacagcaacaacaaaaggccgggcatggtggctcacgcttgtaattccagcactttgggaggccgaggcgggcggatcacaaggctggagtgaagcggaacaaacaaacatggctcactgcagatttgacttcctggctcaagcaatcctcttgcttcaacctccagtgtagcagggaccacagcatgaaagcccctttaggggaggtgactggaatcatccccaaagaattctcacctagtcctggtgtggctgcttcatagtcctgcgtttcttcctgcttggctgtccctaacatctcagaaacgcatagagaagtaacgggcttctagagaggttgattctttcagggagcggatcacaagtgaggcagaagacttggtggcaaattttttcccaaagaagttattagaacttgatagttttctgaaggaaccaatcttaaacatccatgacctaactcagatccactctgacatgaatctcccagtccctgaccccattcttctcaccaatagccatgatggactggatggtcccacttataagaagcgaaggttggatgagtgtgaagaagccttccaaggaaccaaggtgtttgtgatgcccaatgggatgctgaaaagcaaccagcagctggtggacattattgagaaagtgaaacctgagatccggctgttgattgagaaatgtaacacggtcaaaatgtgggtacagctcctgattcccaggatagaagatggaaacaactttggggtgtccattcaggaggaaacagttgcagagctaagaactgttgagagtgaagctgcatcttatctggaccagatttctagatattatattacaagagccaaattggtttctaaaatagctaaatatccccatgtggaggactatcgccgcaccgtgacagagattgatgagaaagaatatatcagccttcggctcatcatatcagagctgaggaatcaatatgtcactctacatgacatgatcctgaaaaatatcgagaagatcaaacggccccggagcagcaatgcagagactctgtactgaggccagggccagggccaggggactctgtgagtctggctcaagaccgacattgccttggtttgttacatgactatcgtgatggggaaactggctggaaatagtaatcacacctctctgtttttagttagagtctaatgaaactctcatctagttctgtgatgtgtttacctcttttttcaggcctcaggaactcttctatttccttccctaataccccacacccaacctgtcgtaatttctggagaactccaggtttgtgtgtgcaggatgttggcacaaaaatacctgtgttttcattctccccctctctccctcctgtgtcttgcgctttatgttttcttccgtttgataattagttggttaaaagctgagggaaccggaaggaaagtgctaggtgttttttaggaactagggtggcggggggacgaacttctcttcctcacatgaggttactgtttctttcctctgtggggcattggatcctcccacagttgccctggtgatgacttagggcttcccatctgtgtacatcccactttgaatcttgatcgtgacaagaaataccttaggccttcagtcaattccgaagctccttcagttgtttttataatgggcgttttcacatgcacatatgtgtatgcatgtatacgcccatacagacatgcacacacagactcctactccattagctaacataccctccctctccacaacccctgtcacatacctttcaggaggtgacagttgtcttagttgtcatctacccagacaaacgtcctgggcccgtcctccctcctgatactgtagcctcttggtacccagggtgagttggtggagaacagagagatgagaagcagagggcttggggaaagcctgttcctctctgactcagccctttttggcattattgcaagagcttgactcctggttgccttttcccagccagttttcagttggggtgaaggtttctgcaagtgtgaggtccagatgctgctgctcatgttgggctttccttttgggaactatttctctttatttatagtgtcgggcttccggggaaagcaatcattggtgtgtatgtgtatgtgcatgcacacacgtgcatatacacatttgtgtatgtggaaatgtgctgggcaagtcaaaactatagaagagttgcctcctgtctctcgaatcttccagagatatcacttaattgttaacagcttttgtgttaatccccttcagcccctagctcttttattctaccacggctggagagttgatacctgcagtcagcctgccagtgactcttagtgtctgtttctgacttatttttcctgtctctgtcttccaacccccaataatatttccaccggggatgcatcatttttactcccaatattctgtagagagggagtcaggatgctgtcttcccacgaatagtactcagtaacaaaccaattgcattttagttgggcagtgctcccacccaccctccagatcccttccagctaaaacccttcccccttccctccatgtgtttctcagtttcccgtttcgtttgttggactgttccactgcccctcctcctcaccctatcacccatggatcgtaatgtaaaattcttttaccatgtcaagaaattattaaaaatacaggtactttgacctctttct

SEQ ID NO: 170280 - DNA, 752 bp, Homo sapiens
  Payload ID: 13533
  Gene Symbol: PSME3
  Gene Name: proteasome activator subunit 3
  ENST ID: ENST00000586312
  CDS Start-End: 84-212
gatttctcaggtccctccggccccctccctggagtccacagcgcctccggtgtccagaggatcggacacggcccggcccggccatggcctcgttgctgaaggtggatcaggaagtgaagctcaagacagcttcagacacaggaggaagggagggaagggggaggacagaggagacaggcaggtgctgtcctcaaagccctgcgttcttctgagatggaaaaatggatcctcaaaaaaataaagtatttgcagtctgggggcctctcagcttcttattacagttacaaggttgattctttcagggagcggatcacaagtgaggcagaagacttggtggcaaattttttcccaaagaagttattagaacttgatagttttctgaaggaaccaatcttaaacatccatgacctaactcagatccactctgacatgaatctcccagtccctgaccccattcttctcaccaatagccatgatggactggatggtcccacttataagaagcgaaggttggatgagtgtgaagaagccttccaaggaaccaaggtgtttgtgatgcccaatgggatgctgaaaagcaaccagcagctggtggacattattgagaaagtgaaacctgagatccggctgttgattgagaaatgtaacacggtcaaaatgtgggtacagctcctgattcccaggatagaagatggaaacaactttggggtgtccattcaggaggaaacagttgcagagctaagaactgttga

SEQ ID NO: 170281 - DNA, 1018 bp, Homo sapiens
  Payload ID: 13533
  Gene Symbol: PSME3
  Gene Name: proteasome activator subunit 3
  ENST ID: ENST00000591152
  CDS Start-End: 663-1018
aaagccgggagggcgagcgagagagcaagcaggcagcaggctgccggcgggcgggcggacggcacagagggagggagcgagcgagcagtgagtaagccagcaagggcggtcgggtcccgaggtcagccgagatttctcaggtccctccggccccctccctggagtccacagcgcctccggtgtccagaggatcggacacggcccggcccggccatggcctcgttgctgaaggtggatcaggaagtgaagctcaaggtagcggcaccggtccggcctttttgcccctcgctttgatcccccagcagtctgaccggcttcctactccccatggcgtctttgtctccctggggataccagctctgagcttccgctcggctcagcccagcccccaactcccggggtcggcttcgcgggagaggaaaatataggatggctttctgtaccgcgtctgatgatggagagtcccggggacacctccgcggacacgtgttggactcagggctttaggcccgtgacagctggttgattctttcagggagcggatcacaagtgaggcagaagacttggtggcaaattttttcccaaagaagttattagaacttgatagttttctgaaggaaccaatcttaaacatccatgacctaactcagatccactctgacatgaatctcccagtccctgaccccattcttctcaccaatagccatgatggactggatggtcccacttataagaagcgaaggttggatgagtgtgaagaagccttccaaggaaccaaggtgtttgtgatgcccaatgggatgctgaaaagcaaccagcagctggtggacattattgagaaagtgaaacctgagatccggctgttgattgagaaatgtaacacggtcaaaatgtgggtacagctcctgattcccaggatagaagatggaaacaactttggggtgtccattcaggaggaaacagttgcagagctaagaactgttgagagtgaagctgcatcttatctggaccagatttc

SEQ ID NO: 170282 - DNA, 1364 bp, Homo sapiens
  Payload ID: 13533
  Gene Symbol: PSME3
  Gene Name: proteasome activator subunit 3
  ENST ID: ENST00000585805
  CDS Start-End: 1075-1364
gagcggcgaaagccgggagggcgagcgagagagcaagcaggcagcaggctgccggcgggcgggcggacggcacagagggagggagcgagcgagcagtgagtaagccagcaagggcggtcgggtcccgaggtcagccgagatttctcaggtccctccggccccctccctggagtccacagcgcctccggtgtccagaggatcggacacggcccggcccggccatggcctcgttgctgaaggtggatcaggaagtgaagctcaaggtagcggcaccggtccggcctttttgcccctcgctttgatcccccagcagtctgaccggcttcctactccccatggcgtctttgtctccctggggataccagctctgagcttccgctcggctcagcccagcccccaactcccggggtcggcttcgcgggagaggaaaatataggatggctttctgtaccgcgtctgatgatggagagtcccggggacacctccgcggacacgtgttggactcagggctttaggcccgtgacagctggtaatcccccagcccaacaacgtccctggacactgcccctgcccttggcggctggcctgcctagtatcatagactaggtctgggtgggggttggcacgtttgtgagctcacatcttccctaactacctgtcttttgtctgcttatcaaattcagacagcttcagacacaggaggaagggagggaagggggaggacagaggagacaggcaggtgctgtcctcaaagccctgcgttcttctgagatggaaaaatggatcctcaaaaaaataaagtatttgcagtctgggggcctctcagcttcttattacagttacaaggtgagggaaagacagttggattgggattctccatcctgctcttacctctgtccccaggtactgaattgctctctttgttaattttaggttgattctttcagggagcggatcacaagtgaggcagaagacttggtggcaaattttttcccaaagaagttattagaacttgatagttttctgaaggaaccaatcttaaacatccatgacctaactcagatccactctgacatgaatctcccagtccctgaccccattcttctcaccaatagccatgatggactggatggtcccacttataagaagcgaaggttggatgagtgtgaagaagccttccaaggaaccaaggtgtttgtgatgcccaatgggatgctgaaaagcaaccagcagctggtggacattattgagaaagtgaaacctgagatccggctgttgattgagaaatgtaacacggtcaaaatgtgggtacagctcctgattcccaggatagaagatggaaacaactttggggtgtccattca

SEQ ID NO: 170283 - DNA, 998 bp, Homo sapiens
  Payload ID: 13533
  Gene Symbol: PSME3
  Gene Name: proteasome activator subunit 3
  Uniprot ID: P61289
  ENST ID: ENST00000590720
  CDS Start-End: 234-998
agtttccggcgtgagcggcgaaagccgggagggcgagcgagagagcaagcaggcagcaggctgccggcgggcgggcggacggcacagagggagggagcgagcgagcagtgagtaagccagcaagggcggtcgggtcccgaggtcagccgagatttctcaggtccctccggccccctccctggagtccacagcgcctccggtgtccagaggatcggacacggcccggcccggccatggcctcgttgctgaaggtggatcaggaagtgaagctcaaggttgattctttcagggagcggatcacaagtgaggcagaagacttggtggcaaattttttcccaaagaagttattagaacttgatagttttctgaaggaaccaatcttaaacatccatgacctaactcagatccactctgacatgaatctcccagtccctgaccccattcttctcaccaatagccatgatggactggatggtcccacttataagaagcgaaggttggatgagtgtgaagaagccttccaaggaaccaaggtgtttgtgatgcccaatgggatgctgaaaagcaaccagcagctggtggacattattgagaaagtgaaacctgagatccggctgttgattgagaaatgtaacacggtcaaaatgtgggtacagctcctgattcccaggatagaagatggaaacaactttggggtgtccattcaggaggaaacagttgcagagctaagaactgttgagagtgaagctgcatcttatctggaccagatttctagatattatattacaagagccaaattggtttctaaaatagctaaatatccccatgtggaggactatcgccgcaccgtgacagagattgatgagaaagaatatatcagccttcggctcatcatatcagagctgaggaatcaatatgtcactctacatgacatgatcctgaaaaatatcgagaagatcaaacggccccggagcagcaatgcagagactctgtactga

SEQ ID NO: 170284 - DNA, 733 bp, Homo sapiens
  Payload ID: 13533
  Gene Symbol: PSME3
  Gene Name: proteasome activator subunit 3
  ENST ID: ENST00000589469
  CDS Start-End: 196-733
gagagagcaagcaggcagcaggctgccggcgggcgggcggacggcacagagggagggagcgagcgagcagtgagtaagccagcaagggcggtcgggtcccgaggtcagccgagatttctcaggtccctccggccccctccctggagtccacagcgcctccggtgtccagaggatcggacacggcccggcccggccatggcctcgttgctgaaggtggatcaggaagtgaagctcaaggttgattctttcagggagcggatcacaagtgaggcagaagacttggtggcaaattttttcccaaagaagttattagaacttgatagttttctgaaggaaccaatcttaaacatccatgacctaactcagatccactctgacatgaatctcccagtccctgaccccattcttctcaccaatagccatgatggactggatggtcccacttataagaagcgaaggttggatgagtgtgaagaagccttccaaggaaccaaggtgtttgtgatgcccaatgggatgctgaaaagcaaccagcagctggtggacattattgagaaagtgaaacctgagatccggctgttgattgagaaatgtaacacggaggaaacagttgcagagctaagaactgttgagagtgaagctgcatcttatctggaccagatttctagatattatattacaagagccaaattggtttctaaaatagctaaatatccccatgtggaggactatc

SEQ ID NO: 170285 - DNA, 580 bp, Homo sapiens
  Payload ID: 13533
  Gene Symbol: PSME3
  Gene Name: proteasome activator subunit 3
  ENST ID: ENST00000586114
  CDS Start-End: 249-580
agtttccggcgtgagcggcgaaagccgggagggcgagcgagagagcaagcaggcagcaggctgccggcgggcgggcggacggcacagagggagggagcgagcgagcagttgattctttcagggagcggatcacaagtgaggcagaagacttggtggcaaattttttcccaaagaagttattagaacttgatagttttctgaaggaaccaatcttaaacatccatgacctaactcagatccactctgacatgaatctcccagtccctgaccccattcttctcaccaatagccatgatggactggatggtcccacttataagaagcgaaggttggatgagtgtgaagaagccttccaaggaaccaaggtgtttgtgatgcccaatgggatgctgaaaagcaaccagcagctggtggacattattgagaaagtgaaacctgagatccggctgttgattgagaaatgtaacacggtcaaaatgtgggtacagctcctgattcccaggatagaagatggaaacaactttggggtgtccattcaggaggaaacagttgcagagctaagaactgttgagagtgaagc

SEQ ID NO: 170286 - DNA, 826 bp, Homo sapiens
  Payload ID: 13533
  Gene Symbol: PSME3
  Gene Name: proteasome activator subunit 3
  ENST ID: ENST00000592169
  CDS Start-End: 137-733
cgagcgagcagtgagtaagccagcaagggcggtcgggtcccgaggtcagccgagatttctcaggtccctccggccccctccctggagtccacagcgcctccggtgtccagaggatcggacacggcccggcccggccatggcctcgttgctgaaggtggatcaggaagtgaagctcaaggttgattctttcagggagcggatcacaagtgagcccacttataagaagcgaaggttggatgagtgtgaagaagccttccaaggaaccaaggtgtttgtgatgcccaatgggatgctgaaaagcaaccagcagctggtggacattattgagaaagtgaaacctgagatccggctgttgattgagaaatgtaacacggtcaaaatgtgggtacagctcctgattcccaggatagaagatggaaacaactttggggtgtccattcaggaggaaacagttgcagagctaagaactgttgagagtgaagctgcatcttatctggaccagatttctagatattatattacaagagccaaattggtttctaaaatagctaaatatccccatgtggaggactatcgccgcaccgtgacagagattgatgagaaagaatatatcagccttcggctcatcatatcagagctgaggaatcaatatgtcactctacatgacatgatcctgaaaaatatcgagaagatcaaacggccccggagcagcaatgcagagactctgtactgaggccagggccagggccaggggactctgtgagtctggctcaagaccgacattgccttggtttgttacatgactatcgtgatggggaaactggct

SEQ ID NO: 170287 - DNA, 3183 bp, Homo sapiens
  Payload ID: 13533
  Gene Symbol: PSME3
  Gene Name: proteasome activator subunit 3
  ENST ID: ENST00000622892
  CDS Start-End: 491-1003
ggagtgcagcggctgagaaggtcccttcggtgaaggcgagttccgggacaacagagagggccgcaccgtttccgagtctctcggaggctcagttctcagcgcaccattccccacagctctcctttttactttacccctacccgacacttgaccccggcagtgtgaaccccgctgggagcgtccaaagccatgcctcatcgcggctgcgcagcgcacgtgcacagcctcgcaggagtctcggcgattggctgtgacgcagtttccggcgtgagcggcgaaagccgggagggcgagcgagagagcaagcaggcagcaggctgccggcgggcgggcggacggcacagagggagggagcgagcgagcagtgagtaagccagcaagggcggtcgggtcccgaggtcagccgagatttctcaggtccctccggccccctccctggagtccacagcgcctccggtgtccagaggatcggacacggcccggcccggccatggcctcgttgctgaaggtggatcaggaagtgaagctcaaggttgattctttcagggagcggatcacaagtgaggcagaagacttggtggcaaattttttcccaaagaagttattagaacttgatagttttctgaaggaaccaatcttaaacatccatgacctaactcagctcctgattcccaggatagaagatggaaacaactttggggtgtccattcaggaggaaacagttgcagagctaagaactgttgagagtgaagctgcatcttatctggaccagatttctagatattatattacaagagccaaattggtttctaaaatagctaaatatccccatgtggaggactatcgccgcaccgtgacagagattgatgagaaagaatatatcagccttcggctcatcatatcagagctgaggaatcaatatgtcactctacatgacatgatcctgaaaaatatcgagaagatcaaacggccccggagcagcaatgcagagactctgtactgaggccagggccagggccaggggactctgtgagtctggctcaagaccgacattgccttggtttgttacatgactatcgtgatggggaaactggctggaaatagtaatcacacctctctgtttttagttagagtctaatgaaactctcatctagttctgtgatgtgtttacctcttttttcaggcctcaggaactcttctatttccttccctaataccccacacccaacctgtcgtaatttctggagaactccaggtttgtgtgtgcaggatgttggcacaaaaatacctgtgttttcattctccccctctctccctcctgtgtcttgcgctttatgttttcttccgtttgataattagttggttaaaagctgagggaaccggaaggaaagtgctaggtgttttttaggaactagggtggcggggggacgaacttctcttcctcacatgaggttactgtttctttcctctgtggggcattggatcctcccacagttgccctggtgatgacttagggcttcccatctgtgtacatcccactttgaatcttgatcgtgacaagaaataccttaggccttcagtcaattccgaagctccttcagttgtttttataatgggcgttttcacatgcacatatgtgtatgcatgtatacgcccatacagacatgcacacacagactcctactccattagctaacataccctccctctccacaacccctgtcacatacctttcaggaggtgacagttgtcttagttgtcatctacccagacaaacgtcctgggcccgtcctccctcctgatactgtagcctcttggtacccagggtgagttggtggagaacagagagatgagaagcagagggcttggggaaagcctgttcctctctgactcagccctttttggcattattgcaagagcttgactcctggttgccttttcccagccagttttcagttggggtgaaggtttctgcaagtgtgaggtccagatgctgctgctcatgttgggctttccttttgggaactatttctctttatttatagtgtcgggcttccggggaaagcaatcattggtgtgtatgtgtatgtgcatgcacacacgtgcatatacacatttgtgtatgtggaaatgtgctgggcaagtcaaaactatagaagagttgcctcctgtctctcgaatcttccagagatatcacttaattgttaacagcttttgtgttaatccccttcagcccctagctcttttattctaccacggctggagagttgatacctgcagtcagcctgccagtgactcttagtgtctgtttctgacttatttttcctgtctctgtcttccaacccccaataatatttccaccggggatgcatcatttttactcccaatattctgtagagagggagtcaggatgctgtcttcccacgaatagtactcagtaacaaaccaattgcattttagttgggcagtgctcccacccaccctccagatcccttccagctaaaacccttcccccttccctccatgtgtttctcagtttcccgtttcgtttgttggactgttccactgcccctcctcctcaccctatcacccatggatcgtaatgtaaaattcttttaccatgtcaagaaattattaaaaatacaggtactttgacctctttctaaagccgcagaccctggtgcaatgctctggtggctagggatgtactcatgctcatatgtgtgcacgcttggacacccacctccatggacacctagccaccctgttgtgtgtccttatgccagttgagctgaatcttttccccagtatagtggaaagactgaggcttctgcctactgagcaaggttgggtgcttcatttgtgttcagtctgaattatgggaaagttagctcttcccagacctaagctgccttctctccctactttcagaagatcctagttccttccttcccgagtgatacccatgaactgccagtagaggctgctatcgttccatgtgtaaggaatgaactggttcaaggcgcgtcctacccagtcattttctttaccttatactaattcttcctgaataatgtcttcagtttcttgaggagactcctagttttggttttcaaattacttggagggctgcctaggaatctatctccctctgaaataaagtttcctcatcttccaccttgc

SEQ ID NO: 170288 - DNA, 6581 bp, Homo sapiens
  Payload ID: 13534
  Gene Symbol: PSME4
  Gene Name: proteasome activator subunit 4
  ENST ID: ENST00000389993
  CDS Start-End: 57-1772
ggtgggggccggggagggttcgggtgggagggggtggggggggtgtccctgggctcatggagccggccgagcgggcgggagtcggagagcccccggagccgggcgggcgtcccgagccgggcccgcggggcttcgtcccgcagaaggagatcgtctacaacaagctgctgccctacgcggagcggctagacgccgagtccgacttgcagctggcccagatcaaatgcaacctgggccgggccgtgcagctccaagagctgtggcccgggggcctcttctggaccaggaaactctccacatatattcgactttatgggagaaaatttagcaaagaagatcatgttctttttattaagttattgtatgagctggtatcaattccaaaactggaaatcagcatgatgcagggatttgcccgccttttgatcaacttgttaaagaaaaaggaacttctttcaagagctgatttggagttaccctggagaccactttatgacatggtagaaagaatattatattccaagacagagcacctaggattaaattggtttcctaattctgtagaaaatattctcaaaacactcgtgaaaagctgccgaccatattttccagcagatgccaccgctgagatgctagaagaatggcgacctttaatgtgcccttttgatgtaaccatgcaaaaggccatcacttattttgaaatatttcttcctacctcccttcctccagaacttcatcataaaggttttaaactttggtttgatgaattaattggcctttgggtttcagtgcaaaatctcccacaatgggaggggcaactagtaaatctctttgctcgattggctacagataatatagggtacatagattgggatccatatgtaccaaagatatttacaagaattctgagaagcttgaacctcccagtgggaagcagtcaagtgttagtcccaagatttttaacaaatgcttatgatataggacatgctgtaatatggatcaccgccatgatgggtggaccaagtaagctagtgcaaaaacacttagctggtttgtttaacagcatcacatctttttaccatccttcaaataatgggcgctggctgaacaagttaatgaaactacttcagcggttgccaaacagtgttgttagaagattgcatcgtgaaagatacaagaagccctcttggttaactcctgtgcctgatagccacaagcttactgatcaagatgttacagactttgtacaatgcattattcagcctgtcctcttggctatgtttagcaaaaccggtagtctagaagcagcccaggctttgcagaatcttgcactcatgagacctgaattggtaataccccctgtacttgaaagaacatatcctgcattagagacattaacagaacctcaccagctcacagctactttaagttgtgtaattggagtagcccgcagtttggtatcaggaggcagatggtttcctgaaggtcctacacatatgctacctctgttgatgagagcattgcctggggtggatccaaatgactttagtaaatgcatgatcacattccagttcatagcaacattttctactctggtgcctttagtagattgttcatctgtactacaagaaagaaatgacctcacagaagtggaacgagaactttgttcagccacagctgaatttgaggatttcgtcttacagtttatggacaggtggcccttcagaaggtttttaatttttctacttcacatatatttgaaacaagagtagcaggtcgcatggtggcagacatgtgccgcgctgctgtaaagtgctgcccagaagaatctttgaagctctttgttccccactgctgcagtgttataactcagcttacaatgaatgatgatgtattaaatgatgaagagctagacaaggaattactatggaatcttcaacttttgtctgagattactcgagtggatggaaggaagttgcttctttatagggagcagcttgtaaagattctccaaagaaccctacatttaacctgtaagcagggttacactctgtcttgtaaccttttgcatcatcttctccgttctaccacacttatctaccctacagaatactgcagtgtgccaggtggctttgacaagcctccttctgaatactttcctatcaaggactggggcaaacccggggacttgtggaatctgggaatccagtggcatgttccttcttcagaagaagtgtcttttgccttttatcttttggactcctttcttcagcctgagctcgtcaaactccagcattgtggggatggaaaacttgaaatgtctagagatgatattctacagagtctgactatagtgcacaactgtttaattggctctggaaacctcctacctccgttgaaaggagagccagttactaacttagtaccaagtatggtgtccttggaagagacaaagttgtatactggacttgaatatgatctgtctcgagagaaccaccgagaagtaattgctacagttataaggaaacttcttaaccacatacttgataattcagaagatgatactaagtcattgtttcttattataaagattattggagaccttttacaattccaaggatctcacaagcatgaatttgactcccgatggaaaagcttcaacttagtaaagaaatcaatggaaaatcggctccatgggaaaaaacaacatatcagagcactgttgattgatagagtaatgttacagcatgagctacggacactaactgttgagggttgtgaatacaaaaagatacatcaagatatgatcagagatcttcttcgtttatctacaagttcatacagtcaggtgagaaataaggctcagcaaacattttttgctgccttgggagcatataacttctgttgcagagatatcattcccttggttttggagttcttaaggcctgatagacaaggtgttacacagcaacaattcaagggtgccttgtactgtctccttggaaatcacagtggtgtgtgcttggcaaaccttcatgattgggactgtattgtacagacgtggccagcgattgtttcttcagggcttagccaagcaatgtccctggaaaagccatcaatagtgagattgtttgatgatcttgcagaaaagattcataggcagtatgaaacaattggcttggacttcacaattccaaagtcatgtgttgaaatagcggaattacttcaacagtcaaaaaacccctctatcaaccagatattgcttagcccagaaaaaattaaggaaggaattaaacgccaacaggaaaagaatgccgatgccctaaggaactatgaaaatttggtagacaccttgctagatggtgtggagcaaagaaacctgccctggaaatttgaacatataggcattgggcttctgtctctactgctgagagatgaccgagtgttgcctcttcgtgccatacggttttttgttgagaatctcaaccatgatgcaattgtagttcgaaagatggctatctcagctgttgctggtatccttaaacagctaaaaagaacccacaaaaagctgaccattaacccctgtgaaatcagtggatgccctaaacccacccaaattattgctggtgataggcctgataatcattggttgcattatgacagcaaaactataccaagaactaaaaaagaatgggagtcaagttgctttgtggaaaaaactcactggggatactacacctggccaaagaatatggttgtttatgctggtgtggaagagcagcctaagcttggcagaagcagggaggatatgacagaggcagaacagattatatttgatcatttttctgatcctaaatttgttgagcagttaattacttttctatcattagaagacagaaaaggaaaagataagtttaatccacgacgtttttgcctctttaagggtatattcaggaattttgatgatgccttcctgccagttctgaagccccatttagaacatttggttgcagattcacatgaaagcacccagcgatgtgttgcagaaattatagctggtttaatcagaggttctaagcactggacatttgaaaaggtggagaagctttgggagcttctgtgccctctgcttagaacagcactgtccaatattaccgtagaaacttataatgactggggagcttgtatagcaacatcctgtgaaagcagagatccccggaaacttcactggctttttgaactgctgttggaatcaccattgagtggtgaaggaggatcctttgtagatgcatgtcgactttatgtactacaaggtggccttgcccagcaagaatggagagtgcctgaactattgcacagactactgaagtacttggaacccaaactcacccaggtttacaaaaatgtcagagaaagaataggaagtgtgctgacctacatattcatgatagatgtatctttgccaaataccacaccaaccatatcgcctcatgtccctgagtttactgctcgaattctggagaaattgaaacctctcatggatgtggatgaagaaattcagaaccatgttatggaagaaaatggaattggtgaagaagatgagcgaactcagggcattaaactcttgaaaaccatattgaaatggctgatggcaagtgcaggaagatccttttctacagcagttacagaacaacttcagcttctacctttgtttttcaagattgccccagtggaaaatgacaatagctacgatgaactgaaaagagatgcaaagttatgtttatcattaatgtctcaggggttgctttaccctcatcaagtgcctttggtacttcaggtgctaaaacaaacagcaagaagcagttcttggcatgcacgatacacagtactgacctacctccagaccatggtattttataacctctttattttcctaaacaatgaagatgcagttaaagatatcaggtggctggttataagtcttttggaggacgaacaactggaggttcgagaaatggctgctactaccttaagcggtctgctacagtgtaactttcttaccatggacagtcctatgcagattcattttgagcaactttgcaaaacaaaactacctaagaaaagaaagcgagaccctggttctgtaggagataccattccttctgcagagttggtcaaacgccatgctggggtgctaggacttggtgcatgtgttctttctagtccttacgatgttcccacctggatgccccagctcctcatgaatctcagtgcacatctaaatgatcctcagcctattgagatgactgtaaaaaaaaccttatccaatttccgaaggactcaccatgacaactggcaggaacataaacagcaattcactgatgaccaactgcttgttctcaccgatcttcttgtgtcaccatgctattatgcatagaaagatgactagtcctcacttcaggctcttttcatcaaaaattccacaccctcaggtaccatctgtggtggctctctgcaagttttaaaactgcctctgctgagctctcatcattttggtggtttctgtgttagatctcgttagtctgcattccacagcttctcagttgccatttgatttcccaacttgtccggaagtgtttccagaatactgatcactttttttttttgaggcatctgacaaagtcacaaagtctcagactagaaataattacccagtatgatcatggcatccaagaccagagtctcagaactcattaagaaacagtttacttggaatggagaatacccatctgtaatacaggtcctgtcatttcattcatctcaaattattttgaattcttcccaaatggctgctggatttaggtggtaataggggctgtgggccataaatctgaagccttgagaaccttgggtctggagagccatgaagagggaaggaaaagagggcaagtcctgaacctaaccaatgacctgatggattgctcgaccaagacacagaagtgaagtctgtgtctgtgcacttcccacagactggagtttttggtgctgaatagagccagttgctaaaaaattgggggtttggtgaagaaatctgattgttgtgtgtattcaatgtgtgattttaaaaataaacagcaacaacaataaaaaccctgactggctgttttttccctgtattctttacaactattttttgaccctctgaaaattattatacttcacctaaatggaagactgctgtgtttgtggaaattttgtaattttttaatttattttattctctctccctttttattttgcctgcagaatcgttgagagactaataaggcttaatatttaattgatttgtttaatatgttatataaatgtaaaagagtgtataaactgtagagatagcattggcaagacattgtacagatgcaaccttttacacaacatcattgtgtaatttgtaaagattcacgtgtagttctttattatagtgattttgggctttgtacccactgaatgccattttttgtgtttttaaattattttctttatcttgttacaaaaactgagatgtggggtttttttttttt

SEQ ID NO: 170289 - DNA, 7099 bp, Homo sapiens
  Payload ID: 13534
  Gene Symbol: PSME4
  Gene Name: proteasome activator subunit 4
  Uniprot ID: Q14997
  ENST ID: ENST00000404125
  CDS Start-End: 57-5588
ggtgggggccggggagggttcgggtgggagggggtggggggggtgtccctgggctcatggagccggccgagcgggcgggagtcggagagcccccggagccgggcgggcgtcccgagccgggcccgcggggcttcgtcccgcagaaggagatcgtctacaacaagctgctgccctacgcggagcggctagacgccgagtccgacttgcagctggcccagatcaaatgcaacctgggccgggccgtgcagctccaagagctgtggcccgggggcctcttctggaccaggaaactctccacatatattcgactttatgggagaaaatttagcaaagaagatcatgttctttttattaagttattgtatgagctggtatcaattccaaaactggaaatcagcatgatgcagggatttgcccgccttttgatcaacttgttaaagaaaaaggaacttctttcaagagctgatttggagttaccctggagaccactttatgacatggtagaaagaatattatattccaagacagagcacctaggattaaattggtttcctaattctgtagaaaatattctcaaaacactcgtgaaaagctgccgaccatattttccagcagatgccaccgctgagatgctagaagaatggcgacctttaatgtgcccttttgatgtaaccatgcaaaaggccatcacttattttgaaatatttcttcctacctcccttcctccagaacttcatcataaaggttttaaactttggtttgatgaattaattggcctttgggtttcagtgcaaaatctcccacaatgggaggggcaactagtaaatctctttgctcgattggctacagataatatagggtacatagattgggatccatatgtaccaaagatatttacaagaattctgagaagcttgaacctcccagtgggaagcagtcaagtgttagtcccaagatttttaacaaatgcttatgatataggacatgctgtaatatggatcaccgccatgatgggtggaccaagtaagctagtgcaaaaacacttagctggtttgtttaacagcatcacatctttttaccatccttcaaataatgggcgctggctgaacaagttaatgaaactacttcagcggttgccaaacagtgttgttagaagattgcatcgtgaaagatacaagaagccctcttggttaactcctgtgcctgatagccacaagcttactgatcaagatgttacagactttgtacaatgcattattcagcctgtcctcttggctatgtttagcaaaaccggtagtctagaagcagcccaggctttgcagaatcttgcactcatgagacctgaattggtaataccccctgtacttgaaagaacatatcctgcattagagacattaacagaacctcaccagctcacagctactttaagttgtgtaattggagtagcccgcagtttggtatcaggaggcagatggtttcctgaaggtcctacacatatgctacctctgttgatgagagcattgcctggggtggatccaaatgactttagtaaatgcatgatcacattccagttcatagcaacattttctactctggtgcctttagtagattgttcatctgtactacaagaaagaaatgacctcacagaagtggaacgagaactttgttcagccacagctgaatttgaggatttcgtcttacagtttatggacagatgttttggacttatagaaagtagcacattggagcaaacaagagaagagacagaaactgagaaaatgacacacttggagagtttggtcgaattaggtctgtcttctacgtttagtacaatcctcacccaatgttccaaagaaatatttatggtggcccttcagaaggtttttaatttttctacttcacatatatttgaaacaagagtagcaggtcgcatggtggcagacatgtgccgcgctgctgtaaagtgctgcccagaagaatctttgaagctctttgttccccactgctgcagtgttataactcagcttacaatgaatgatgatgtattaaatgatgaagagctagacaaggaattactatggaatcttcaacttttgtctgagattactcgagtggatggaaggaagttgcttctttatagggagcagcttgtaaagattctccaaagaaccctacatttaacctgtaagcagggttacactctgtcttgtaaccttttgcatcatcttctccgttctaccacacttatctaccctacagaatactgcagtgtgccaggtggctttgacaagcctccttctgaatactttcctatcaaggactggggcaaacccggggacttgtggaatctgggaatccagtggcatgttccttcttcagaagaagtgtcttttgccttttatcttttggactcctttcttcagcctgagctcgtcaaactccagcattgtggggatggaaaacttgaaatgtctagagatgatattctacagagtctgactatagtgcacaactgtttaattggctctggaaacctcctacctccgttgaaaggagagccagttactaacttagtaccaagtatggtgtccttggaagagacaaagttgtatactggacttgaatatgatctgtctcgagagaaccaccgagaagtaattgctacagttataaggaaacttcttaaccacatacttgataattcagaagatgatactaagtcattgtttcttattataaagattattggagaccttttacaattccaaggatctcacaagcatgaatttgactcccgatggaaaagcttcaacttagtaaagaaatcaatggaaaatcggctccatgggaaaaaacaacatatcagagcactgttgattgatagagtaatgttacagcatgagctacggacactaactgttgagggttgtgaatacaaaaagatacatcaagatatgatcagagatcttcttcgtttatctacaagttcatacagtcaggtgagaaataaggctcagcaaacattttttgctgccttgggagcatataacttctgttgcagagatatcattcccttggttttggagttcttaaggcctgatagacaaggtgttacacagcaacaattcaagggtgccttgtactgtctccttggaaatcacagtggtgtgtgcttggcaaaccttcatgattgggactgtattgtacagacgtggccagcgattgtttcttcagggcttagccaagcaatgtccctggaaaagccatcaatagtgagattgtttgatgatcttgcagaaaagattcataggcagtatgaaacaattggcttggacttcacaattccaaagtcatgtgttgaaatagcggaattacttcaacagtcaaaaaacccctctatcaaccagatattgcttagcccagaaaaaattaaggaaggaattaaacgccaacaggaaaagaatgccgatgccctaaggaactatgaaaatttggtagacaccttgctagatggtgtggagcaaagaaacctgccctggaaatttgaacatataggcattgggcttctgtctctactgctgagagatgaccgagtgttgcctcttcgtgccatacggttttttgttgagaatctcaaccatgatgcaattgtagttcgaaagatggctatctcagctgttgctggtatccttaaacagctaaaaagaacccacaaaaagctgaccattaacccctgtgaaatcagtggatgccctaaacccacccaaattattgctggtgataggcctgataatcattggttgcattatgacagcaaaactataccaagaactaaaaaagaatgggagtcaagttgctttgtggaaaaaactcactggggatactacacctggccaaagaatatggttgtttatgctggtgtggaagagcagcctaagcttggcagaagcagggaggatatgacagaggcagaacagattatatttgatcatttttctgatcctaaatttgttgagcagttaattacttttctatcattagaagacagaaaaggaaaagataagtttaatccacgacgtttttgcctctttaagggtatattcaggaattttgatgatgccttcctgccagttctgaagccccatttagaacatttggttgcagattcacatgaaagcacccagcgatgtgttgcagaaattatagctggtttaatcagaggttctaagcactggacatttgaaaaggtggagaagctttgggagcttctgtgccctctgcttagaacagcactgtccaatattaccgtagaaacttataatgactggggagcttgtatagcaacatcctgtgaaagcagagatccccggaaacttcactggctttttgaactgctgttggaatcaccattgagtggtgaaggaggatcctttgtagatgcatgtcgactttatgtactacaaggtggccttgcccagcaagaatggagagtgcctgaactattgcacagactactgaagtacttggaacccaaactcacccaggtttacaaaaatgtcagagaaagaataggaagtgtgctgacctacatattcatgatagatgtatctttgccaaataccacaccaaccatatcgcctcatgtccctgagtttactgctcgaattctggagaaattgaaacctctcatggatgtggatgaagaaattcagaaccatgttatggaagaaaatggaattggtgaagaagatgagcgaactcagggcattaaactcttgaaaaccatattgaaatggctgatggcaagtgcaggaagatccttttctacagcagttacagaacaacttcagcttctacctttgtttttcaagattgccccagtggaaaatgacaatagctacgatgaactgaaaagagatgcaaagttatgtttatcattaatgtctcaggggttgctttaccctcatcaagtgcctttggtacttcaggtgctaaaacaaacagcaagaagcagttcttggcatgcacgatacacagtactgacctacctccagaccatggtattttataacctctttattttcctaaacaatgaagatgcagttaaagatatcaggtggctggttataagtcttttggaggacgaacaactggaggttcgagaaatggctgctactaccttaagcggtctgctacagtgtaactttcttaccatggacagtcctatgcagattcattttgagcaactttgcaaaacaaaactacctaagaaaagaaagcgagaccctggttctgtaggagataccattccttctgcagagttggtcaaacgccatgctggggtgctaggacttggtgcatgtgttctttctagtccttacgatgttcccacctggatgccccagctcctcatgaatctcagtgcacatctaaatgatcctcagcctattgagatgactgtaaaaaaaaccttatccaatttccgaaggactcaccatgacaactggcaggaacataaacagcaattcactgatgaccaactgcttgttctcaccgatcttcttgtgtcaccatgctattatgcatagaaagatgactagtcctcacttcaggctcttttcatcaaaaattccacaccctcaggtaccatctgtggtggctctctgcaagttttaaaactgcctctgctgagctctcatcattttggtggtttctgtgttagatctcgttagtctgcattccacagcttctcagttgccatttgatttcccaacttgtccggaagtgtttccagaatactgatcactttttttttttgaggcatctgacaaagtcacaaagtctcagactagaaataattacccagtatgatcatggcatccaagaccagagtctcagaactcattaagaaacagtttacttggaatggagaatacccatctgtaatacaggtcctgtcatttcattcatctcaaattattttgaattcttcccaaatggctgctggatttaggtggtaataggggctgtgggccataaatctgaagccttgagaaccttgggtctggagagccatgaagagggaaggaaaagagggcaagtcctgaacctaaccaatgacctgatggattgctcgaccaagacacagaagtgaagtctgtgtctgtgcacttcccacagactggagtttttggtgctgaatagagccagttgctaaaaaattgggggtttggtgaagaaatctgattgttgtgtgtattcaatgtgtgattttaaaaataaacagcaacaacaataaaaaccctgactggctgttttttccctgtattctttacaactattttttgaccctctgaaaattattatacttcacctaaatggaagactgctgtgtttgtggaaattttgtaattttttaatttattttattctctctccctttttattttgcctgcagaatcgttgagagactaataaggcttaatatttaattgatttgtttaatatgttatataaatgtaaaagagtgtataaactgtagagatagcattggcaagacattgtacagatgcaaccttttacacaacatcattgtgtaatttgtaaagattcacgtgtagttctttattatagtgattttgggctttgtacccactgaatgccattttttgtgtttttaaattattttctttatcttgttacaaaaactgagatgtggggttttttttttttcagttcacttatcattagaatgtctgaacttttatgtaacatttttgtgtgcatctctcaatgctaacaccacatgtttgcctatgacaagtttatagagtgaaaggtatcttctgggttgaaataattcacaaattggtgaatgtcatcttgcaacacaccctgtacagtcttccttaaaggaacactacagtatatttttagtatctacatgctgaatgactgaatacagacctaagcacagcagtggtcctggtacagtatttaagtgtcggcatacacaggcgtaatccctgtataaagtagtgccaaactgatttcagttgtgtaactagtttaaaacccaataaatggattctttttaaca

SEQ ID NO: 170290 - DNA, 2042 bp, Homo sapiens
  Payload ID: 13535
  Gene Symbol: PSMF1
  Gene Name: proteasome inhibitor subunit 1
  ENST ID: ENST00000246015
  CDS Start-End: 177-968
ttccggcttccccgccccgccccgtccccgggcgtctccattttggtctcaggtgtggactcggcaagaaccagcgcaagagggaagcagagttatagctaccccggccgcggagccggctcactgcactacccccgcccccttctttcctccagacgccgaagtcgcgggcgctcatggcgggcctggaggtactgttcgcatcggcagcgccggccatcacctgcaggcaggacgcgctcgtctgcttcttgcattgggaagtggtgacacacggttacttcggcttgggtgtcggtgaccagccgggtcccaatgataagaagtcagaactgctgccagctgggtggaacaacaataaagacctgtatgtcctccggtatgagtataaggatgggtccagaaagctccttgtgaaagccatcaccgtggagagcagcatgatcctcaatgtgctggaatatggctcacagcaagtggcagacttgaccctgaacttggatgattatatcgatgcagaacacctgggtgacttccacaggacctacaagaacagtgaggagcttcggtctcgtattgtgtctggaatcatcacacctatccatgagcagtgggaaaaggctaatgtaagcagtccccaccgggagttcccccctgctaccgccagagaggtggacccactccggattcctccacaccacccacacaccagtcggcagcctccctggtgtgatcccctgggcccgtttgttgtcgggggagaagacttagacccttttgggcctcggagaggtggcatgattgtggatcccctgagatctggcttcccaagagcacttattgacccttcctcaggcctcccgaaccgacttcctccaggcgctgtgcccccaggagctcgctttgacccctttggacccattgggaccagcccacccggcccgaggcctgacagacgcgggcagtgatgagccctgttctggagtggaaagagcacgatagagcaccaggctaagaggcacgagatcaaggcggtagtcacttccgctctgcagctagcatttcaaccatatgtggatcctttcatttctcagctccctggattccttcccctaaattaggacctattatttacctgtaggtaagcaagctactgtagctcttctgaggtatctgccaggctgttttctgtagcctcagattgcctatctgcttagcctgagaacaggtagatgaaaactaaactgatgcctaggcccagggtcagtctcagatggaagctgggcctgggtggggaggctagcatgcgtggctccctgggtatttctgtcagtccccatggcaagcagtgatttagtaaaacaccccagagtcagggaagccaaccaccttgaaacctttagaacatctctgctttggagaaagacccagagatcaggcagaggtgcagattcaatcattactcataacctttgagagatggcaaatgggaggagtgttagtctttgttttggaattggaccattcttgcaaccaaaaggacttagagcagtttgctcataaagacatcctttattataaaaggaagtatttaaaggatgatagagaccatcagatagaagcagggaaggtagataacttttaggaccttgatgtgaggaaaagataaaatttaaacaataaatttgccacttagattttctagcagcaaagtccgaaaagatagttatatacaaaattctgttttctgaaaacaaaattgtgattcaccttcagaattggccattttttttgtgagtttccttgcatcaaggacactgagaaacacagtcattgtcttaggtgttctatgggaggaagtgaatagagcctttaggaacttcctggtcaagcttatggtgcttattttgatctgggccacttccctccttccagtcatgagtaatcatcaaggagcaagttggagtgtttcaggtgtatattttgtagaacccaaaagattggagccttaacaataaacatcagcactaagtgacctgttc

SEQ ID NO: 170291 - DNA, 3686 bp, Homo sapiens
  Payload ID: 13535
  Gene Symbol: PSMF1
  Gene Name: proteasome inhibitor subunit 1
  Uniprot ID: Q92530
  ENST ID: ENST00000333082
  CDS Start-End: 169-984
agccaagttctttccatcatcctgggccctcacctctggcataggctcttggtagtgggggcccagacagggaggcacctgccacctgcttcccttctcagccacccacagccctcatagggcagaatgggactcttgctgatgtagacgccgaagtcgcgggcgctcatggcgggcctggaggtactgttcgcatcggcagcgccggccatcacctgcaggcaggacgcgctcgtctgcttcttgcattgggaagtggtgacacacggttacttcggcttgggtgtcggtgaccagccgggtcccaatgataagaagtcagaactgctgccagctgggtggaacaacaataaagacctgtatgtcctccggtatgagtataaggatgggtccagaaagctccttgtgaaagccatcaccgtggagagcagcatgatcctcaatgtgctggaatatggctcacagcaagtggcagacttgaccctgaacttggatgattatatcgatgcagaacacctgggtgacttccacaggacctacaagaacagtgaggagcttcggtctcgtattgtgtctggaatcatcacacctatccatgagcagtgggaaaaggctaatgtaagcagtccccaccgggagttcccccctgctaccgccagagaggtggacccactccggattcctccacaccacccacacaccagtcggcagcctccctggtgtgatcccctgggcccgtttgttgtcgggggagaagacttagacccttttgggcctcggagaggtggcatgattgtggatcccctgagatctggcttcccaagagcacttattgacccttcctcaggcctcccgaaccgacttcctccaggcgctgtgcccccaggagctcgctttgacccctttggacccattgggaccagcccacccggacctaacccagaccatctccccccgccgggctacgatgacatgtacctgtgaaggcctcaagaatgtaacatcccaggcttccctccattctcctggagctgccaccgctgtccccatcagcaaccatgttcttgcaggctgggggcaagggattctgctcatgtgtttgcagaccggctgggatagcctccccaccccttatcagagccaagacacctgctgcagctctccacctagctgcagatagctcccaaagagaaatcagtgtgtctctttcaccatcagctcctcccctttcaccaccagctcctctccacttcccaagggagactccggcaaccttcagcaacatatatcctcgaccagatgcagtgctataagaacagaacgcattttggatgttattattaagaaccaaatgtcaatacagaattcatgttgccggtttcccacttttctttttacattaatgcatagctgcttccatttatgagactttagagtttgagtttctgtagggctgaatgactctttttcctgcccagggcccattcttgcttctcaggcaccttccgtttattaattgccattgctcctgacatcactaagatgggtccccttctggctgcatgaatggaaatgagtgactggaaatcccataggccacaagaatgactttcacaagggcaggaacattgtggaaagactgcatcattctgatgaggcaaaatcctccagctattcctgtctgggccagttttgtaggtccatctgtgcatgggcagcagtagtcaaaaagccaaggaaaaaacagagcagacctgaaggctaatcttatttttgccactaacttagtgaatgaccctaagcaagttccttctcctcttagggccttgtgccaagcctatgaaattggaggtggctttcctgctctaaagcattttgatgtctcattctgtgtttggtaacccctataaactggggcagaggaaaagaatgatggttcaaggccatacttcccttgaaccttgtgtggttcttgcctaactctgtggtttttggaccccatggggcccagacagagcacaggagcatgggctgcctctgagtgtggtgttgaacttcgggaggagcagggagccctgcaccttgtgtcctggcccacctgacctttggtgttctccggatccttttcagcccgaggcctgacagacgcgggcagtgatgagccctgttctggagtggaaagagcacgatagagcaccaggctaagaggcacgagatcaaggcggtagtcacttccgctctgcagctagcatttcaaccatatgtggatcctttcatttctcagctccctggattccttcccctaaattaggacctattatttacctgtaggtaagcaagctactgtagctcttctgaggtatctgccaggctgttttctgtagcctcagattgcctatctgcttagcctgagaacaggtagatgaaaactaaactgatgcctaggcccagggtcagtctcagatggaagctgggcctgggtggggaggctagcatgcgtggctccctgggtatttctgtcagtccccatggcaagcagtgatttagtaaaacaccccagagtcagggaagccaaccaccttgaaacctttagaacatctctgctttggagaaagacccagagatcaggcagaggtgcagattcaatcattactcataacctttgagagatggcaaatgggaggagtgttagtctttgttttggaattggaccattcttgcaaccaaaaggacttagagcagtttgctcataaagacatcctttattataaaaggaagtatttaaaggatgatagagaccatcagatagaagcagggaaggtagataacttttaggaccttgatgtgaggaaaagataaaatttaaacaataaatttgccacttagattttctagcagcaaagtccgaaaagatagttatatacaaaattctgttttctgaaaacaaaattgtgattcaccttcagaattggccattttttttgtgagtttccttgcatcaaggacactgagaaacacagtcattgtcttaggtgttctatgggaggaagtgaatagagcctttaggaacttcctggtcaagcttatggtgcttattttgatctgggccacttccctccttccagtcatgagtaatcatcaaggagcaagttggagtgtttcaggtgtatattttgtagaacccaaaagattggagccttaacaataaacatcagcactaagtgacctgttcctccttttttaaatagcagctttattgagatataatttacatacccataatttacatacctgtttaaagtatacaattcagtggatttagtatgttcacagtgttgcacatccaccaccatttctaattcctgaacattttcaccacctcaaaaagaaaccacacacccattggcatgactccccattcccttgctcccagccccaggcaaccactaacatctgtctctaaagattttttttttttttctggacagttctcataagtggaatcactcagtattatggccttttgtgtctggcttctttcatttcatgtgatgttttcaagattcattcatgctgtagcatgtatccatggtatggatatatcacattttgcttatccttttatcagttgatggacagttgggttgtttctacaaaaaggctattatgagtaatgcagccaagaa

SEQ ID NO: 170292 - DNA, 4290 bp, Homo sapiens
  Payload ID: 13535
  Gene Symbol: PSMF1
  Gene Name: proteasome inhibitor subunit 1
  Uniprot ID: Q92530
  ENST ID: ENST00000335877
  CDS Start-End: 177-992
ttccggcttccccgccccgccccgtccccgggcgtctccattttggtctcaggtgtggactcggcaagaaccagcgcaagagggaagcagagttatagctaccccggccgcggagccggctcactgcactacccccgcccccttctttcctccagacgccgaagtcgcgggcgctcatggcgggcctggaggtactgttcgcatcggcagcgccggccatcacctgcaggcaggacgcgctcgtctgcttcttgcattgggaagtggtgacacacggttacttcggcttgggtgtcggtgaccagccgggtcccaatgataagaagtcagaactgctgccagctgggtggaacaacaataaagacctgtatgtcctccggtatgagtataaggatgggtccagaaagctccttgtgaaagccatcaccgtggagagcagcatgatcctcaatgtgctggaatatggctcacagcaagtggcagacttgaccctgaacttggatgattatatcgatgcagaacacctgggtgacttccacaggacctacaagaacagtgaggagcttcggtctcgtattgtgtctggaatcatcacacctatccatgagcagtgggaaaaggctaatgtaagcagtccccaccgggagttcccccctgctaccgccagagaggtggacccactccggattcctccacaccacccacacaccagtcggcagcctccctggtgtgatcccctgggcccgtttgttgtcgggggagaagacttagacccttttgggcctcggagaggtggcatgattgtggatcccctgagatctggcttcccaagagcacttattgacccttcctcaggcctcccgaaccgacttcctccaggcgctgtgcccccaggagctcgctttgacccctttggacccattgggaccagcccacccggacctaacccagaccatctccccccgccgggctacgatgacatgtacctgtgaaggcctcaagaatgtaacatcccaggcttccctccattctcctggagctgccaccgctgtccccatcagcaaccatgttcttgcaggctgggggcaagggattctgctcatgtgtttgcagaccggctgggatagcctccccaccccttatcagagccaagacacctgctgcagctctccacctagctgcagatagctcccaaagagaaatcagtgtgtctctttcaccatcagctcctcccctttcaccaccagctcctctccacttcccaagggagactccggcaaccttcagcaacatatatcctcgaccagatgcagtgctataagaacagaacgcattttggatgttattattaagaaccaaatgtcaatacagaattcatgttgccggtttcccacttttctttttacattaatgcatagctgcttccatttatgagactttagagtttgagtttctgtagggctgaatgactctttttcctgcccagggcccattcttgcttctcaggcaccttccgtttattaattgccattgctcctgacatcactaagatgggtccccttctggctgcatgaatggaaatgagtgactggaaatcccataggccacaagaatgactttcacaagggcaggaacattgtggaaagactgcatcattctgatgaggcaaaatcctccagctattcctgtctgggccagttttgtaggtccatctgtgcatgggcagcagtagtcaaaaagccaaggaaaaaacagagcagacctgaaggctaatcttatttttgccactaacttagtgaatgaccctaagcaagttccttctcctcttagggccttgtgccaagcctatgaaattggaggtggctttcctgctctaaagcattttgatgtctcattctgtgtttggtaacccctataaactggggcagaggaaaagaatgatggttcaaggccatacttcccttgaaccttgtgtggttcttgcctaactctgtggtttttggaccccatggggcccagacagagcacaggagcatgggctgcctctgagtgtggtgttgaacttcgggaggagcagggagccctgcaccttgtgtcctggcccacctgacctttggtgttctccggatccttttcagcccgaggcctgacagacgcgggcagtgatgagccctgttctggagtggaaagagcacgatagagcaccaggctaagaggcacgagatcaaggcggtagtcacttccgctctgcagctagcatttcaaccatatgtggatcctttcatttctcagctccctggattccttcccctaaattaggacctattatttacctgtaggtaagcaagctactgtagctcttctgaggtatctgccaggctgttttctgtagcctcagattgcctatctgcttagcctgagaacaggtagatgaaaactaaactgatgcctaggcccagggtcagtctcagatggaagctgggcctgggtggggaggctagcatgcgtggctccctgggtatttctgtcagtccccatggcaagcagtgatttagtaaaacaccccagagtcagggaagccaaccaccttgaaacctttagaacatctctgctttggagaaagacccagagatcaggcagaggtgcagattcaatcattactcataacctttgagagatggcaaatgggaggagtgttagtctttgttttggaattggaccattcttgcaaccaaaaggacttagagcagtttgctcataaagacatcctttattataaaaggaagtatttaaaggatgatagagaccatcagatagaagcagggaaggtagataacttttaggaccttgatgtgaggaaaagataaaatttaaacaataaatttgccacttagattttctagcagcaaagtccgaaaagatagttatatacaaaattctgttttctgaaaacaaaattgtgattcaccttcagaattggccattttttttgtgagtttccttgcatcaaggacactgagaaacacagtcattgtcttaggtgttctatgggaggaagtgaatagagcctttaggaacttcctggtcaagcttatggtgcttattttgatctgggccacttccctccttccagtcatgagtaatcatcaaggagcaagttggagtgtttcaggtgtatattttgtagaacccaaaagattggagccttaacaataaacatcagcactaagtgacctgttcctccttttttaaatagcagctttattgagatataatttacatacccataatttacatacctgtttaaagtatacaattcagtggatttagtatgttcacagtgttgcacatccaccaccatttctaattcctgaacattttcaccacctcaaaaagaaaccacacacccattggcatgactccccattcccttgctcccagccccaggcaaccactaacatctgtctctaaagattttttttttttttctggacagttctcataagtggaatcactcagtattatggccttttgtgtctggcttctttcatttcatgtgatgttttcaagattcattcatgctgtagcatgtatccatggtatggatatatcacattttgcttatccttttatcagttgatggacagttgggttgtttctacaaaaaggctattatgagtaatgcagccaagaacatttgtgtaccagtttttgagttttcagttgtttgagtttcagatgttttcagttcatttgggtatataccaaggagtggaattgctggttcacatggtagctctatattctactttgtgaggaattgtcagactgttttccacggaagctgcaccattttacatttccactggtaatttatgagggttccagtttccccacatcttcaccaactcttgttatttttcatgcttatggccatcctagttagcgtgaagtagcatctcattgtggtcttctcttccattttttaaaaaagaattttgacctacaccaagcaaggcagagaccagagtcagtcccccttggggagcaatctgtggttttgataatcaccaccttgggatgaacatggctggtgagctgcagagcagttgatttgacttttggggatggttctaggctggatgtgatacagggcaggttttgtctctagagaaagttctcatgaccttcaggtctaatgagattcagatcatcactttggtttggtttgaaatttctttgtttatccagtgaattacaagtagaataaagatctggttctaaattgtc

SEQ ID NO: 170293 - DNA, 642 bp, Homo sapiens
  Payload ID: 13535
  Gene Symbol: PSMF1
  Gene Name: proteasome inhibitor subunit 1
  ENST ID: ENST00000381898
  CDS Start-End: 1-384
cacccacacaccagtcggcagcctccctggtgtgatcccctgggcccgtttgttgtcgggggagaagacttagacccttttgggcctcggagaggtggcatgattgtggatcccctgagatctggcttcccaagagcacttattgacccttcctcaggcctcccgaaccgacttcctccaggcgctgtgcccccaggagctcgctttgacccctttggacccattgggaccagcccacccggggccggagttaagatgagtccagcgaagtgcctagagtaccaaattcatggagacgtttcctctttggggaacacacgccaaccccagagacagctttggtctgaatcgtgcaggttccgggaagacacggtgaccagctgaatcgtgtggtctcgctgcagtctagtcatcagataaacatcagacaaatcccaatgaagaaaattctacaaaacatctgactagttctcctcaaaggtcatcaaaacaaggaaagtctgagaaattgtcacaaacgataggaacctaaaaagacataacgactcaatgtagtgtggtacccttgatagaatactggaacaggaaaaggaaattttgcaaaaactatggaaatataaataaagtatggactttagctaa

SEQ ID NO: 170294 - DNA, 704 bp, Homo sapiens
  Payload ID: 13535
  Gene Symbol: PSMF1
  Gene Name: proteasome inhibitor subunit 1
  ENST ID: ENST00000381899
  CDS Start-End: 154-704
atcatcctgggccctcacctctggcataggctcttggtagtgggggcccagacagggaggcacctgccacctgcttcccttctcagccacccacagccctcatagggcagaatgggactcttgctgatgtagacgccgaagtcgcgggcgctcatggcgggcctggaggtactgttcgcatcggcagcgccggccatcacctgcaggcaggacgcgctcgtctgcttcttgcattgggaagtggtgacacacggttacttcggcttgggtgtcggtgaccagccgggtcccaatgataagaagtcagaactgctgccagctgggtggaacaacaataaagacctgtatgtcctccggtatgagtataaggatgggtccagaaagctccttgtgaaagccatcaccgtggagagcagcatgatcctcaatgtgctggaatatggctcacagcaagtggcagacttgaccctgaacttggatgattatatcgatgcagaacacctgggtgacttccacaggacctacaagaacagtgaggagcttcggtctcgtattgtgtctggaatcatcacacctatccatgagcagtgggaaaaggctaatgtaagcagtccccaccgggagttcccccctgctaccgccagagaggtggacccactccggattcctccacaccacccacacaccagtcggcagcctccctg

SEQ ID NO: 170295 - DNA, 319 bp, Homo sapiens
  Payload ID: 13535
  Gene Symbol: PSMF1
  Gene Name: proteasome inhibitor subunit 1
  ENST ID: ENST00000435720
  CDS Start-End: 1-319
tatccatgagcagtgggaaaaggctaatgtaagcagtccccaccgggagttcccccctgctaccgccagagaggtggacccactccggattcctccacaccacccacacaccagtcggcagcctccctggcctcggagaggtggcatgattgtggatcccctgagatctggcttcccaagagcacttattgacccttcctcaggcctcccgaaccgacttcctccaggcgctgtgcccccaggagctcgctttgacccctttggacccattgggaccagcccacccggacctaacccagaccatctccccccgccgggc

SEQ ID NO: 170296 - DNA, 1330 bp, Homo sapiens
  Payload ID: 13536
  Gene Symbol: POMP
  Gene Name: proteasome maturation protein
  Uniprot ID: Q9Y244
  ENST ID: ENST00000380842
  CDS Start-End: 82-507
gccagccctcggaaacggaagtgagcggcggggtcgactgacggtaacggggcagagaggctgttcgcagagctgcggaagatgaatgccagaggacttggatctgagctaaaggacagtattccagttactgaactttcagcaagtggaccttttgaaagtcatgatcttcttcggaaaggtttttcttgtgtgaaaaatgaacttttgcctagtcatccccttgaattatcagaaaaaaatttccagctcaaccaagataaaatgaatttttccacactgagaaacattcagggtctatttgctccgctaaaattacagatggaattcaaggcagtgcagcaggttcagcgtcttccatttctttcaagctcaaatctttcactggatgttttgaggggtaatgatgagactattggatttgaggatattcttaatgatccatcacaaagcgaagtcatgggagagccacacttgatggtggaatataaacttggtttactgtaatagtgtgctgttcatggaaaccgagggctgcatcttgtttatagtcatctttgtactgtaatttgatgtacacaacattaaaagtactgacacctgagaatttctgctcaagtagtatcagtgatcatttaaaatttggaggggtctttggtttacagccatgtgacaattaaaagcactaaagggagatcatgttaaagctcttaatttatattaaaacagtagcctttgtctttaaaaaagttgttgctcatgaatattataaaatgatctacaggtttcaattcaacctgtttctaggtttttttgtaaatttagttttgattaagcattataagcatttgagtctataaactttatagtagcatctttcagaataaacatttttaattgatttcagtggcaactctcaaattgattacaatatgagatatatcagtgtcgtccattaacactcataagaataatatttactgtgtcagtgctattttaggattatagttattgtttgattatttcaggttgaaaagtagaagttccaaggttttgattttggtctggtctttaagtgaaaaattaaagcaaccagtagatgtaggttaaacttttacttcatagacttaatatgtaattaatatattgccaagcaacactgttaaagaaaagtaaaactcattttttcttgttcttaatttatatattacaagatactgtaaggtattctttatgaagttgatatataaaaatttacatttttagaacattagtgaatggatcatcttttacaattaaaagtatattttgattatcagtttcttaggaa

SEQ ID NO: 170297 - DNA, 1505 bp, Homo sapiens
  Payload ID: 13537
  Gene Symbol: PSMA1
  Gene Name: proteasome subunit alpha 1
  Uniprot ID: P25786
  ENST ID: ENST00000396394
  CDS Start-End: 398-1189
agtatcacccagagtcacggctgttgactcggacgactttagatgcagcccgccagcgggagaaactggagggaatccgccatacacaggaacctagaagggctacgtgacaggggctgccccgcagctctcagccgccggcactcccagccaggttttcccgccagtctcagttcctagatcttccgaggctccgcccgccgccgagcggtcggaaagttttaaggagggggaagtgttgcaagcctatcgatatctctggaatagactgcgctaccctgcgccgccgccgtcaaactcccgcagacttctctgtagatcgctgagcgatactttcggcagcacctccttgattctcagttttgctggaggccgcaaccaggcccgcgccgccaccatgtttcgaaatcagtatgacaatgatgtcactgtttggagcccccagggcaggattcatcaaattgaatatgcaatggaagctgttaaacaaggttcagccacagttggtctgaaatcaaaaactcatgcagttttggttgcattgaaaagggcgcaatcagagcttgcagctcatcagaaaaaaattctccatgttgacaaccatattggtatctcaattgcggggcttactgctgatgctagactgttatgtaattttatgcgtcaggagtgtttggattccagatttgtattcgatagaccactgcctgtgtctcgtcttgtatctctaattggaagcaagacccagataccaacacaacgatatggccggagaccatatggtgttggtctccttattgctggttatgatgatatgggccctcacattttccaaacctgtccatctgctaactattttgactgcagagccatgtccattggagcccgttcccaatcagctcgtacttacttggagagacatatgtctgaatttatggagtgtaatttaaatgaactagttaaacatggtctgcgtgccttaagagagacgcttcctgcagaacaggacctgactacaaagaatgtttccattggaattgttggtaaagacttggagtttacaatctatgatgatgatgatgtgtctccattcctggaaggtcttgaagaaagaccacagagaaaggcacagcctgctcaacctgctgatgaacctgcagaaaaggctgatgaaccaatggaacattaagtgataagccagtctatatatgtattatcaaatatgtaagaatacaggcaccacatactgatgacaataatctatactttgaaccaaaagttgcagagtggtggaatgctatgttttaggaatcagtccagatgtgagttttttccaagcaacctcactgaaacctatataatggaatacatttttctttgaaagggtctgtataatcattttctagaaagtatgggtatctatactaatgtttttatatgaagaacataggtgtctttgtggttttaaagacaactgtgaaataaaattgtttcaccgcctggta

SEQ ID NO: 170298 - DNA, 1266 bp, Homo sapiens
  Payload ID: 13537
  Gene Symbol: PSMA1
  Gene Name: proteasome subunit alpha 1
  Uniprot ID: P25786
  ENST ID: ENST00000418988
  CDS Start-End: 329-1138
cgcgagccgggaccacgccgacccagcgtgcccaggccgaggaaagcgcggcggcggcagtccgaagacccaccgggactgaaagagaaggacgaggtcatcttcggacgggaggggcaagccagccatcctgggaccccaggcgtgcaggttctctttgagggtattccaccctgcaaaaagcatgtattcatggtcagctctcagcaaggccagtagcagagtggtaaaggccttggccctccaaggctgggaaaagacaatgacaagtcaaatccagacctatgttgtatgttggtctactaggtgactgtctcctggaaatgttatgcagctcagcaaggtgaagtttcgaaatcagtatgacaatgatgtcactgtttggagcccccagggcaggattcatcaaattgaatatgcaatggaagctgttaaacaaggttcagccacagttggtctgaaatcaaaaactcatgcagttttggttgcattgaaaagggcgcaatcagagcttgcagctcatcagaaaaaaattctccatgttgacaaccatattggtatctcaattgcggggcttactgctgatgctagactgttatgtaattttatgcgtcaggagtgtttggattccagatttgtattcgatagaccactgcctgtgtctcgtcttgtatctctaattggaagcaagacccagataccaacacaacgatatggccggagaccatatggtgttggtctccttattgctggttatgatgatatgggccctcacattttccaaacctgtccatctgctaactattttgactgcagagccatgtccattggagcccgttcccaatcagctcgtacttacttggagagacatatgtctgaatttatggagtgtaatttaaatgaactagttaaacatggtctgcgtgccttaagagagacgcttcctgcagaacaggacctgactacaaagaatgtttccattggaattgttggtaaagacttggagtttacaatctatgatgatgatgatgtgtctccattcctggaaggtcttgaagaaagaccacagagaaaggcacagcctgctcaacctgctgatgaacctgcagaaaaggctgatgaaccaatggaacattaagtgataagccagtctatatatgtattatcaaatatgtaagaatacaggcaccacatactgatgacaataatctatactttgaaccaaaagttgcagagtggtggaatgctatgttttaggaatcagtc

SEQ ID NO: 170299 - DNA, 588 bp, Homo sapiens
  Payload ID: 13537
  Gene Symbol: PSMA1
  Gene Name: proteasome subunit alpha 1
  ENST ID: ENST00000532256
  CDS Start-End: 583-588
gtagatcgctgagcgatactttcggcagcacctccttgattctcagttttgctggaggccgcaaccaggcccgcgccgccaccatggtacgttgaatcccgatctctggaaggtttagggcagagctctggtgactgggggatgacgagccacctctcctgtcatccttagcgtcgcccggtgccacgaggtatgagagcctcggcagacggccgggctccggcagtgattcagcatctccggcctggccgggctaggggttatcggtagccagtgcggcctttccaccgctttcgcttcccggggagcctccgacacttcctcctcggtcagctagatgagttcgcccctcaggttccttcagtggagtagattctgagcggtccagaatagctcctagtgctgtgtatgggagaggagaagacagagacttgacttggaggcctacctgtaccaccagtgcggacttgacccccaggtttgtgttcctggacagcgtccgttttcctgtttcgaaatcagtatgacaatgatgtcactgtttggagcccccagggcaggattcatcaaattgaatatgcaatggaa

SEQ ID NO: 170300 - DNA, 571 bp, Homo sapiens
  Payload ID: 13537
  Gene Symbol: PSMA1
  Gene Name: proteasome subunit alpha 1
  ENST ID: ENST00000533068
  CDS Start-End: 529-571
gatatctctggaatagactgcgctaccctgcgccgccgccgtcaaactcccgcagacttctctgtagatcgctgagcgatactttcggcagcacctccttgattctcagttttgctggaggccgcaaccaggcccgcgccgccaccatgcgtcgcccggtgccacgaggtatgagagcctcggcagacggccgggctccggcagtgattcagcatctccggcctggccgggctaggggttatcggtagccagtgcggcctttccaccgctttcgcttcccggggagcctccgacacttcctcctcggtcagctagatgagttcgcccctcaggttccttcagtggagtagattctgagcggtccagaatagctcctagtgctgtgtatgggagaggagaagacagagacttgacttggaggcctacctgtaccaccagtgcggacttgacccccagtttcgaaatcagtatgacaatgatgtcactgtttggagcccccagggcaggattcatcaaattgaatatgcaatggaagctgttaaacaaggttcagccacagttggtctgaaat

SEQ ID NO: 170301 - DNA, 1527 bp, Homo sapiens
  Payload ID: 13537
  Gene Symbol: PSMA1
  Gene Name: proteasome subunit alpha 1
  ENST ID: ENST00000530457
  CDS Start-End: 532-1248
tttcggcagcacctccttgattctcagttttgctggaggccgcaaccaggcccgcgccgccaccatggtacgttgaatcccgatctctggaaggtttagggcagagctctggtgactgggggatgacgagccacctctcctgtcatccttagcgtcgcccggtgccacgaggtatgagagcctcggcagacggccgggctccggcagtgattcagcatctccggcctggccgggctaggggttatcggtagccagtgcggcctttccaccgctttcgcttcccggggagcctccgacacttcctcctcggtcagctagatgagttcgcccctcaggttccttcagtggagtagattctgagcggtccagaatagctcctagtgctgtgtatgggagaggagaagacagagacttgacttggaggcctacctgtaccaccagtgcggacttgacccccagtttcgaaatcagtatgacaatgatgtcactgtttggagcccccagggcaggattcatcaaattgaatatgcaatggaagctgttaaacaaggttcagccacagttggtctgaaatcaaaaactcatgcagttttggttgcattgaaaagggcgcaatcagagcttgcagctcatcagaaaaaaattctccatgttgacaaccatattggtatctcaattgcggggcttactgctgatgctagactgttatgtaattttatgcgtcaggagtgtttggattccagatttgtattcgatagaccactgcctgtgtctcgtcttgtatctctaattggaagcaagacccagataccaacacaacgatatggccggagaccatatggtgttggtctccttattgctggttatgatgatatgggccctcacattttccaaacctgtccatctgctaactattttgactgcagagccatgtccattggagcccgttcccaatcagctcgtacttacttggagagacatatgtctgaatttatggagtgtaatttaaatgaactagttaaacatggtctgcgtgccttaagagagacgcttcctgcagaacaggacctgactacaaagaatgtttccattggaattgttggtaaagacttggagtttacaatctatgatgatgatgatgtgtctccattcctggaaggtcttgaagaaagaccacagagaaaggcacagcctgctcaacctgctgatgaacctgcagaaaaggctgatgaaccaatggaacattaagtgataagccagtctatatatgtattatcaaatatgtaagaatacaggcaccacatactgatgacaataatctatactttgaaccaaaagttgcagagtggtggaatgctatgttttaggaatcagtccagatgtgagttttttccaagcaacctcactgaaacctatataatggaatacatttttctttgaaagggtctgtataatcattttctagaaagtatgggtatctatactaatgtttttatatgaagaacataggtgtctttgtggttttaa

SEQ ID NO: 170302 - DNA, 1487 bp, Homo sapiens
  Payload ID: 13538
  Gene Symbol: PSMA2
  Gene Name: proteasome subunit alpha 2
  Uniprot ID: P25787
  ENST ID: ENST00000223321
  CDS Start-End: 66-770
ggaaatgaaaggaaatcggccacagtgcgcatgtgtgcggctgtgctttggctcttcgggtaaagatggcggagcgcgggtacagcttttcgctgactacattcagcccgtctggtaaacttgtccagattgaatatgctttggctgctgtagctggaggagccccgtccgtgggaattaaagctgcaaatggtgtggtattagcaactgagaaaaaacagaaatccattctgtatgatgagcgaagtgtacacaaagtagaaccaattaccaagcatataggtttggtgtacagtggcatgggccccgattacagagtgcttgtgcacagagctcgaaaactagctcaacaatactatcttgtgtaccaagaacccattcctacagctcagctggtacagagagtagcttctgtgatgcaagaatatactcagtcaggtggtgttcgtccatttggagtttctttacttatttgtggttggaatgagggacgaccatatttatttcagtcagatccatctggagcttactttgcctggaaagctacagcaatgggaaagaactatgtgaatgggaagactttccttgagaaaagatataatgaagatctggaacttgaagatgccattcatacagccatcttaaccctaaaggaaagctttgaagggcaaatgacagaggataacatagaagttggaatctgcaatgaagctggatttaggaggcttactccaactgaagttaaggattacttggctgccatagcataacaatgaagtgactgaaaaatccagaatttcagataatctatctacttaaacatgtttaaagtatgttttgttttgcagactttttgcatacttatttctacatggtttaaatcgactgtttttaaaatgacacttataaatcctaataaactgttaaacccaccttccagccttttaggagttgctaaaattttaacagttatttcctgctttttatcacagttgatttctgaagactacattgccaagcagaatgatgaaatgactttttcgttgtcaggcaattttggttaagtcaaatcttaatgccctcttcgctatcagatgttgcctgtgtttccataaagcaaaatgctgattttggtaaaaaacatgactgcttctagagctgggaggatctgcagactttcacggattcatggaacaagaaaagaagcataggtacttttaggtgccattaggtattgatcagtgaaatcctagggtgctctatgagattgtactaggcctatgaagagtggtaagccaaataggtctccatgggagatacattatgtaaataaataaacaatggtttgctggttcctgttggtgtctccacaagtaggtaaacatgtttaaaggaacccgggttcttagattttgttagactttttaaactcaaggatgagcataagtgcttgaaataaaatgctaatacttaagtgtcaaaactat

SEQ ID NO: 170303 - DNA, 4251 bp, Homo sapiens
  Payload ID: 13538
  Gene Symbol: PSMA2
  Gene Name: proteasome subunit alpha 2
  ENST ID: ENST00000411875
  CDS Start-End: 15-83
ctcttcgggtaaagatggcggagcgcgggtacagcttttcgctgactacattcagctgcaaatggtgtggtattagcaactgagaaaaaacagaaatccattctgtatgatgagcgaagtgtacacaaagtagaaccaattaccaagcatataggtttggtgtacagtggcatgggccccgattacagagtgcttgtgcacagagctcgaaaactagctcaacaatactatcttgtgtaccaagaacccattcctacagctcagctggtacagagagtagcttctgtgatgcaagaatatactcagtcaggtggtgttcgtccatttggagtttctttacttatttgtggttggaatgagggacgaccatatttatttcagtcagatccatctggagcttactttgcctggaaagctacagcaatgggaaagaactatgtgaatgggaagactttccttgagaaaaggtaggcctactcattgtaactgcattctttagcaaactcactttatggtttttggtgctctttaagtaaattaatatcatgggactaaagaaacttgctatattactctgtatatgaatctagttacagataaaccaaaaacttctctcccttctagtttcctagacttcagtatattaagtggtaattaatattcatttcctaaggagttctctttctacattctatggtttcctaaatgcttttggtttttttactttttacttcactttttgtgccatttcaggagggaaaaaaaagaacattgaatctggaataaaacatttggggagacaaatttttaaatgatttaatgataacagtttacgacagtaaaaaaaattgtgaaaccaaatgcctggagttgaaggtatattaaatatttgatacatgtgcttgataaaaagtggagcactatgtaaaaatctgtcggtgcccaagtacaagctgctcttacttatttccagctgtattctagtctcagtgttactgtagtccttcgggactctccaagcttttgaagaagaaaatgttttatttcttgatatgtaatagttgcacatatttttgcagtacatgtgatattttgatacctgtatacagtgtcaaatcagggtaattggatatccattacctcaaacatctgtcttttctttgtgttgggaacatagcagatcttctagctgttctgaaatatacagtaaattgttaacgataatttcctgactgtactactggacaccagaacttattcctcctgtctgaccgtatttttagaccccttaaccaacttccttcagttcttcttcccttctcccttcccagcctctggtaaccactgtgctactctctccctccatgagatccacttttttagctcccacatatgagtgacaacatgcaatatttatctttctgtgcctggcttattttgcttaacgtaatgacctcgagttccatccatgttgctgcaaatgacaggatttcatttttttatggctgaataataataaaaaacttcgtaactccgtttaacagatgagccttcacagtacatttttcacgtaacgttaaggttattaaaaatcttaggcctggatttaaatggtaaacttaatcttaggctcttaaagcactttttcatttttcttttatatattaatgagtcttccaaagatttcacattgttattacatgatatgttatgatttgttttattttttgtttcagaggcattttatttagacaactaaaaataattagatgttcagaaccagtgtacaatgaaagaaattaaaccagttactttatcatgtattccctctttacaaccaaagcaaaaaacaatagcaacaaagacattctgctttaagggaaaagtcagacaaataagccaatatatttttcttctccataatgacataaacagctgcaagaactcttaattgtaataagagaagttggatgttatcttgtacatattcattaaaaagatgacaggccattgtactacaagaggataactcaacctcccttcatctgatactcttgagatttcacttatgggtaacaccatgttagttgtttcagcaatggagctaattcatattcctcattatttattgctgtttttgccttaagcagagagtaactctggaaggctgatgcttttctctgcttgctcgttctagtccagttgtatgctgtctgtggcacatgcttgatgttcaggccttaacttgaggagttgaagaatagatggaatctgaattctctgaagcaatttcttctagctcttctcttgtctttggaaaaccaatctttggctttgccagctcaccagtatcttcttcaggaagcacacatttccaaaggccatatgtttttcctaccacagtttgccagtctcagtgttccatcttcagaaccactggcatagagttctccatcaggatcaaatctcacacagtgaataggaccagagtgtcctttgtaggattctaattcttctccactattatcatcatacttataagtttaacatcttcaccacctgcaacaagaaattctttctcaaggtgaagagattcagagttaatgtttgcaggagcttgaaaggatttaattggttccaaacttactgtactgtcaaaagcactggatcagccataagttattaccaaaatctctccctcagaaatatattccatactactagccaacataataaaatttagagatttcacttctgtcatagtagcatgatcccaaagtcttaacagttttgtcatcagaagaaagaatctgtttatcctcactgtaccatagggcctttttaatatcagagctgtgatcactaatttcctcaggttctgcttcgggtttgttcaagtcatatatgcaaaacagtttattctgtcccctggttaacaaataattactatcctgcatgaaatccatagtcttgataatgtgtttatgagccagggtcatcagttcatctcctgggatagcatcccacactttgtgaaatctgcagctgctgtggctgctttggtggcatccttattcagtgttgcattccagacagcatctttatgacccaaaattgttccaatccagtctcctgtatctccctggcatagcataggtttgccgtctttgcaagcactgatttagaaatactcataagactggccaggcgcagtggctcacgcctgtaatcccagcactttgggaggccaaggcaggcggatcacctgaggtcagaagttcgagaccagctgggccaacatggtgaaaccccgtctctactaaaaatacaaaaattagccaggagtgatagcgcgcgcctgtaatcccagctactcgggaggctgaggcaggagaatcacttgaacctgggaggcggagtttgcagtgagccaagattgcaccactgcactccagcctgggcgacagagcaagattctgtcttgagggaaaaaaaagcccctaaggcatgatgccactgaaggccaagtcagccacgggccatatgtggccagaacaggtgagcagcatcagtctcattgctatggaggtggtgaacccagtgattgggctggtgggctgagggtcatccttgtcttttctcctctggtacagcgcccggggttcctccaggcttcaccctaacacgggctgagcagagaaaaaggaaaaggtggcaccgagattaggaaggagctagggaggggctggggagtctgggaagggtgagcaacagttgacaatggagggaggaaagtaggggatggggagaaccgaagaaacgacccagccactcttcgcaccgtccacactggtatcggcaggaagtgacatgttatgttttaacttataagaaaaagattttagcaaagttctgatttttctgtgttttaaaaattataataatgccaccacatcctgattgttaaaatatttatacttaagaagtttcctggctgggtgtgttggctcgtgcctgtaatcccagcactttggtaggtcaaggcaggcggatcacgaggtcaggagatcgagaccatcctggctgacacagtgaaacccatctctactaaaaatacaaagaaattagctgggcgtagtgggcgcctgtagtcccagctacttgggaggctgaggcaggagaatggcatgagcccgggaggtggagcttgcagtaagccaagataactgtgtctcaaaaaaaaaaaaaaaa

SEQ ID NO: 170304 - DNA, 683 bp, Homo sapiens
  Payload ID: 13538
  Gene Symbol: PSMA2
  Gene Name: proteasome subunit alpha 2
  ENST ID: ENST00000445517
  CDS Start-End: 28-522
ggctgtgctttggctcttcgggtaaagatggcggagcgcgggtacagcttttcgctgactacattcagagtgcttgtgcacagagctcgaaaactagctcaacaatactatcttgtgtaccaagaacccattcctacagctcagctggtacagagagtagcttctgtgatgcaagaatatactcagtcaggtggtgttcgtccatttggagtttctttacttatttgtggttggaatgagggacgaccatatttatttcagtcagatccatctggagcttactttgcctggaaagctacagcaatgggaaagaactatgtgaatgggaagactttccttgagaaaagatataatgaagatctggaacttgaagatgccattcatacagccatcttaaccctaaaggaaagctttgaagggcaaatgacagaggataacatagaagttggaatctgcaatgaagctggatttaggaggcttactccaactgaagttaaggattacttggctgccatagcataacaatgaagtgactgaaaaatccagaatttcagataatctatctacttaaacatgtttaaagtatgttttgttttgcagactttttgcatacttatttctacatggtttaaatcgactgtttttaaaatgacacttataaatcctaataaactgttaaaccc

SEQ ID NO: 170305 - DNA, 1453 bp, Homo sapiens
  Payload ID: 13538
  Gene Symbol: PSMA2
  Gene Name: proteasome subunit alpha 2
  ENST ID: ENST00000436986
  CDS Start-End: 1-56
cggagcgcgggtacagcttttcgctgactacattcagcttcttacagatgaactaaccgcagcttgtacaaattaaacaacttgtctaaggtcatcgcccgtctggtaaacttgtccagattgaatatgctttggctgctgtagctggaggagccccgtccgtgggaattaaagctgcaaatggtgtggtattagcaactgagaaaaaacagaaatccattctgtatgatgagcgaagtgtacacaaagtagaaccaattaccaagcatataggtttggtgtacagtggcatgggccccgattacagagtgcttgtgcacagagctcgaaaactagctcaacaatactatcttgtgtaccaagaacccattcctacagctcagctggtacagagagtagcttctgtgatgcaagaatatactcagtcaggtggtgttcgtccatttggagtttctttacttatttgtggttggaatgagggacgaccatatttatttcagtcagatccatctggagcttactttgcctggaaagctacagcaatgggaaagaactatgtgaatgggaagactttccttgagaaaagatataatgaagatctggaacttgaagatgccattcatacagccatcttaaccctaaaggaaagctttgaagggcaaatgacagaggataacatagaagttggaatctgcaatgaagctggatttaggaggcttactccaactgaagttaaggattacttggctgccatagcataacaatgaagtgactgaaaaatccagaatttcagataatctatctacttaaacatgtttaaagtatgttttgttttgcagactttttgcatacttatttctacatggtttaaatcgactgtttttaaaatgacacttataaatcctaataaactgttaaacccaccttccagccttttaggagttgctaaaattttaacagttatttcctgctttttatcacagttgatttctgaagactacattgccaagcagaatgatgaaatgactttttcgttgtcaggcaattttggttaagtcaaatcttaatgccctcttcgctatcagatgttgcctgtgtttccataaagcaaaatgctgattttggtaaaaaacatgactgcttctagagctgggaggatctgcagactttcacggattcatggaacaagaaaagaagcataggtacttttaggtgccattaggtattgatcagtgaaatcctagggtgctctatgagattgtactaggcctatgaagagtggtaagccaaataggtctccatgggagatacattatgtaaataaataaacaatggtttgctggttcctgttggtgtctccacaagtaggtaaacatgtttaaaggaacccgggttcttagattttgttagactttttaaactcaaggatgagcataagtgcttgaaataaaat

SEQ ID NO: 170306 - DNA, 801 bp, Homo sapiens
  Payload ID: 13538
  Gene Symbol: PSMA2
  Gene Name: proteasome subunit alpha 2
  ENST ID: ENST00000457444
  CDS Start-End: 1-111
ttaagcccgtctggtaaacttgtccagattgaatatgctttggctgctgtagctggaggagccccgtccgtgggaattaaagagtgcttgtgcacagagctcgaaaactagctcaacaatactatcttgtgtaccaagaacccattcctacagctcagctggtacagagagtagcttctgtgatgcaagaatatactcagtcaggtggtgttcgtccatttggagtttctttacttatttgtggttggaatgagggacgaccatatttatttcagtcagatccatctggagcttactttgcctggaaagctacagcaatgggaaagaactatgtgaatgggaagactttccttgagaaaagatataatgaagatctggaacttgaagatgccattcatacagccatcttaaccctaaaggaaagctttgaagggcaaatgacagaggataacatagaagttggaatctgcaatgaagctggatttaggaggcttactccaactgaagttaaggattacttggctgccatagcataacaatgaagtgactgaaaaatccagaatttcagataatctatctacttaaacatgtttaaagtatgttttgttttgcagactttttgcatacttatttctacatggtttaaatcgactgtttttaaaatgacacttataaatcctaataaactgttaaacccaccttccagccttttaggagttgctaaaattttaacagttatttcctgctttttatcacagttgatttctgaagactacattgccaagcagaatgatgaaatga

SEQ ID NO: 170307 - DNA, 970 bp, Homo sapiens
  Payload ID: 13539
  Gene Symbol: PSMA3
  Gene Name: proteasome subunit alpha 3
  Uniprot ID: P25788
  ENST ID: ENST00000216455
  CDS Start-End: 91-858
agcgggcctgttactagtttgcggcatcctgtggtataggggaagcgctccgggcctggaatccctacgcgtccctttgggtttagcacgatgagctcaatcggcactgggtatgacctgtcagcctctacattctctcctgacggaagagtttttcaagttgaatatgctatgaaggctgtggaaaatagtagtacagctattggaatcagatgcaaagatggtgttgtctttggggtagaaaaattagtcctttctaaactttatgaagaaggttccaacaaaagactttttaatgttgatcggcatgttggaatggcagtagcaggtttgttggcagatgctcgttctttagcagacatagcaagagaagaagcttccaacttcagatctaactttggctacaacattccactaaaacatcttgcagacagagtggccatgtatgtgcatgcatatacactctacagtgctgttagaccttttggctgcagtttcatgttagggtcttacagtgtgaatgacggtgcgcaactctacatgattgacccatcaggtgtttcatacggttattggggctgtgccatcggcaaagccaggcaagctgcaaagacggaaatagagaagcttcagatgaaagaaatgacctgccgtgatatcgttaaagaagttgcaaaaataatttacatagtacatgacgaagttaaggataaagcttttgaactagaactcagctgggttggtgaattaactaatggaagacatgaaattgttccaaaagatataagagaagaagcagagaaatatgctaaggaatctctgaaggaagaagatgaatcagatgatgataatatgtaacatttactccagcatctattgtattttaaatttctactccagtccaatgtaactatttagccctggattatacatactgtccaattttcattaaatttttgtcttataacta

SEQ ID NO: 170308 - DNA, 908 bp, Homo sapiens
  Payload ID: 13539
  Gene Symbol: PSMA3
  Gene Name: proteasome subunit alpha 3
  Uniprot ID: P25788
  ENST ID: ENST00000412908
  CDS Start-End: 45-791
gctccgggcctggaatccctacgcgtccctttgggtttagcacgatgagctcaatcggcactgggtatgacctgtcagcctctacattctctcctgacggaagagtttttcaagttgaatatgctatgaaggctgtggaaaatagtagtacagctattggaatcagatgcaaagatggtgttgtctttggggtagaaaaattagtcctttctaaactttatgaagaaggttccaacaaaagactttttaatgttgatcggcatgttggaatggcagtagcaggtttgttggcagatgctcgttctttagcagacatagcaagagaagaagcttccaacttcagatctaactttggctacaacattccactaaaacatcttgcagacagagtggccatgtatgtgcatgcatatacactctacagtgctgttagaccttttggctgcagtgtgaatgacggtgcgcaactctacatgattgacccatcaggtgtttcatacggttattggggctgtgccatcggcaaagccaggcaagctgcaaagacggaaatagagaagcttcagatgaaagaaatgacctgccgtgatatcgttaaagaagttgcaaaaataatttacatagtacatgacgaagttaaggataaagcttttgaactagaactcagctgggttggtgaattaactaatggaagacatgaaattgttccaaaagatataagagaagaagcagagaaatatgctaaggaatctctgaaggaagaagatgaatcagatgatgataatatgtaacatttactccagcatctattgtattttaaatttctactccagtccaatgtaactatttagccctggattatacatactgtccaattttcattaaatttttgtcttataactattgaa

SEQ ID NO: 170309 - DNA, 363 bp, Homo sapiens
  Payload ID: 13539
  Gene Symbol: PSMA3
  Gene Name: proteasome subunit alpha 3
  ENST ID: ENST00000553677
  CDS Start-End: 1-252
catcttgcagacagagtggccatgtatgtgcatgcatatacactctacagtgctgttagaccttttggctgcagaatttacatagtacatgacgaagttaaggataaagcttttgaactagaactcagctgggttggtgaattaactaatggaagacatgaaattgttccaaaagatataagagaagaagcagagaaatatgctaaggaatctctgaaggaagaagatgaatcagatgatgataatatgtaacatttactccagcatctattgtattttaaatttctactccagtccaatgtaactatttagccctggattatacatactgtccaattttcattaaatttttgtcttataact

SEQ ID NO: 170310 - DNA, 654 bp, Homo sapiens
  Payload ID: 13539
  Gene Symbol: PSMA3
  Gene Name: proteasome subunit alpha 3
  ENST ID: ENST00000557087
  CDS Start-End: 56-166
ataggggaagcgctccgggcctggaatccctacgcgtccctttgggtttagcacgatgagctcaatcggcactgggtatgacctgtcagcctctacattctctcctgacggaagagtttttcaagttgaatatgctatgaaggctgtggaaaatagtaggcagtagcaggtttgttggcagatgctcgttctttagcagacatagcaagagaagaagcttccaacttcagatctaactttggctacaacattccactaaaacatcttgcagacagagtggccatgtatgtgcatgcatatacactctacagtgctgttagaccttttggctgcagtttcatgttagggtcttacagtgtgaatgacggtgcgcaactctacatgattgacccatcaggtgtttcatacggttattggggctgtgccatcggcaaagccaggcaagctgcaaagacggaaatagagaagcttcagatgaaagaaatgacctgccgtgatatcgttaaagaagttgcaaaaataatttacatagtacatgacgaagttaaggataaagcttttgaactagaactcagctgggttggtgaattaactaatggaagacatgaaattgttccaaaagatataagagaagaagcagagaaatatgctaag

SEQ ID NO: 170311 - DNA, 814 bp, Homo sapiens
  Payload ID: 13539
  Gene Symbol: PSMA3
  Gene Name: proteasome subunit alpha 3
  ENST ID: ENST00000557508
  CDS Start-End: 160-702
cctttgggtttagcacgatgagctcaatcggcactgggtacagctattggaatcagatgcaaagatggtgttgtctttggggtagaaaaattagtcctttctaaactttatgaagaaggttccaacaaaagactttttaatgttgatcggcatgttggaatggcagtagcaggtttgttggcagatgctcgttctttagcagacatagcaagagaagaagcttccaacttcagatctaactttggctacaacattccactaaaacatcttgcagacagagtggccatgtatgtgcatgcatatacactctacagtgctgttagaccttttggctgcagtttcatgttagggtcttacagtgtgaatgacggtgcgcaactctacatgattgacccatcaggtgtttcatacggttattggggctgtgccatcggcaaagccaggcaagctgcaaagacggaaatagagaagcttcagatgaaagaaatgacctgccgtgatatcgttaaagaagttgcaaaaataatttacatagtacatgacgaagttaaggataaagcttttgaactagaactcagctgggttggtgaattaactaatggaagacatgaaattgttccaaaagatataagagaagaagcagagaaatatgctaaggaatctctgaaggaagaagatgaatcagatgatgataatatgtaacatttactccagcatctattgtattttaaatttctactccagtccaatgtaactatttagccctggattatacatactgtccaattttcattaaatttttgtcttataacta

SEQ ID NO: 170312 - DNA, 606 bp, Homo sapiens
  Payload ID: 13539
  Gene Symbol: PSMA3
  Gene Name: proteasome subunit alpha 3
  ENST ID: ENST00000555931
  CDS Start-End: 49-213
aagcgctccgggcctggaatccctacgcgtccctttgggtttagcacgatgagctcaatcggcactgggtatgacctgtcagcctctacattctctcctgacggaagagtttttcaagttgaatatgctatgaaggctgtggaaaatagtagctattggaatcagatgcaaagatggtgttgtctttggggtagaaaaattagtcctttctaaactttatgaagaaggttccaacaaaagactttttaatgttgatcggcatgttggaatggcagtagcaggtttgttggcagatgctcgttctttagcagacatagcaagagaagaagcttccaacttcagatctaactttggctacaacattccactaaaacatcttgcagacagagtggccatgtatgtgcatgcatatacactctacagtgctgttagaccttttggctgcagggtcttacagtgtgaatgacggtgcgcaactctacatgattgacccatcaggtgtttcatacggttattggggctgtgccatcggcaaagccaggcaagctgcaaagacggaaatagagaagcttcagatgaaagaaatgacctgccgtgatatcgtta

SEQ ID NO: 170313 - DNA, 4411 bp, Homo sapiens
  Payload ID: 13540
  Gene Symbol: PSMA4
  Gene Name: proteasome subunit alpha 4
  Uniprot ID: P25789
  ENST ID: ENST00000044462
  CDS Start-End: 151-936
aacccagcggttctgcgcatgcgcgggggccatattagcagcggttattcggtgagcggtggtggtttattcttccgtggagttaagggctccgtggacatctcaggtcttcagggtcttccatctggaactatataaagttcagaaaacatgtctcgaagatatgactccaggaccactatattttctccagaaggtcgcttataccaagttgaatatgccatggaagctattggacatgcaggcacctgtttgggaattttagcaaatgatggtgttttgcttgcagcagagagacgcaacatccacaagcttcttgatgaagtctttttttctgaaaaaatttataaactcaatgaggacatggcttgcagtgtggcaggcataacttctgatgctaatgttctgactaatgaactaaggctcattgctcaaaggtatttattacagtatcaggagccaataccttgtgagcagttggttacagcgctgtgtgatatcaaacaagcttatacacaatttggaggaaaacgtccctttggtgtttcattgctgtacattggctgggataagcactatggctttcagctctatcagagtgaccctagtggaaattacgggggatggaaggccacatgcattggaaataatagcgctgcagctgtgtcaatgttgaaacaagactataaagaaggagaaatgaccttgaagtcagcacttgctttagctatcaaagtactaaataagaccatggatgttagtaaactctctgctgaaaaagtggaaattgcaacactaacaagagagaatggaaagacagtaatcagagttctcaaacaaaaagaagtggagcagttgatcaaaaaacatgaggaagaagaagccaaagctgagcgtgagaagaaagaaaaagaacagaaagaaaaggataaatagaatcagagattttattactcatttggggcaccatttcagtgtaaaagcagtcctactcttccacactaggaaggctttactttttttaactggtgcagtgggaaaataggacattacatactgaattgggtccttgtcatttctgtccaattgaatactttattgtaacgatgatggttacccttcatggacgtcttaatcttccacacacatcccctttttttggaataaaatttggaaaatggaaatgaaggaataaattctctgtagcagtaattgttaaatatacaaaaactgacagggcgattactttttgcacattgtggcttacagtcctttcacaaagatgggcacgttcctcaggctggccagattattcgtctctgtctgcaggaattggtttgagaatgaacacgtgagctgaacaaagccagaattgatgtgtgggtgtggatctcgcagctaggactgaggctgcccacaggcagcagctcaagctgcgcggaagatgaggtgtagaagttaaggccacagaggaaaagtggaaccaagagatgagaacagttacgtgttggctgaagggagctctgttgctggggtttgttcaacctgagttcccttggctatctgtggcttcatgacagaagtgatacagggcagtggtacttaatgcgtagccatggtgctttagcatcacctatgcagattctgatgtcccatcccagatctactgaattaaaatctctgagggtgaaacccagtaatctgttctaacaagctctgcatgtgattcttaggaatgctaagtaaaactttaagaagtttttgttgcatattagaatcacctaggaagcttttgcagcttgtaagcatgctgtatcgattaactcaagctctgtggtggaacccagatattaacattgcttaaactcttcaggtgatttccatcagctagggtgagtgcattgagccatcatttacccttctctcagctgttgtcaaccaaatatgtgctcccagtctaatttctcattgtagattttcttaatgcagctccctgcagttttctgtataggctaaagtatttacaagccctatttgcagcacttttttgaacttctaaattattctcttactctgtacagcaggttctcgttatttttggtagttatgttctaaagtcaccacaaaaactaacaaaatactgaactcttgcacctagagaaagtactgggttagggtcctacaagccactggtcacatttttatcaactgatcagtacataacctgttttttgtgtatttctacttaaagacacctttttaaatgtgtattgtggattcattaacatagaactcagccaacagctctttacgtgaatgtttttgttttgttttgttttttgagactgggtcttgctctgtcacccaggctggagtgcagtggcgtgatcatatttcactgcaggctcaaacggtcttcctgccttgacctcccaaagtgttgacatcacagccctcttatgcttaggaacaacactaaacagtgtttttttcatagagacggtgagcagggaaggtctcaccatgtttcccatgccggtctcaagctcctggactcaagcgatcctcctgcctcagcctcccaaagtgctgacatcacagccctcttgtgcttaggaacattaaacagcacttcagcactatacctgggtgccatttgaaatagtaaaatcactaagaaaaatgcaaaaataaacggcacaaggtagactgcaggaacacttacacggtgtgagagctgaaacaagaattcagagtgtcgccttgctcaacctcagatgggaacatgtgcacctgggtactcaaaattttcaccactctgcatgtcaacaaatgactaaaagtaccacaagtattggtttgggggttacatgtacattttatgagaatgcaaattttgcaaattcacaagtacagaatcagcaagtagtgaagatgaatggcacgtcttcaccctccagtcttgctacacccagaggttgaggtagtcaataaatcttattaactctgtctgcagaatttacccataatccagccactttccactgcaggaacgctggtccaattcaccattatctctgacttggactattgcaacagcctcctaactggttccttgcctccacttcattccccacagtcaattctccagcagcagccacagtgatcctttcaaaatgtaaacggtactactgcacagttttggctcaaaaccctccaatggcttcccatcttgctcagtaagagtcaaattctttgtactggttcatgaggtatcctgtattctggccttgtgctaccttccatgtgcttccttcctcactcattcatccaaatgagccttctcatcattccctgaatgtgccaagctcccctcacatcacttgccaatccctctgccttgggaatgctcttcctgggtatctattgcccactccctcatctccaggtctctgcttgcatgtcaccttttttggggtacttctgtgaaggagcaatctctttcccctgcacactcacattttctattccctatacataccctgttgagtttttctccatagcactcatcaccagctggcatatttgtttcttgtctctccccactggaatacagacttccagagcagtactttgttttcattcaatagtcgtgtctcggtacctagaacagaaactggcacgtgttaggcaacaaataagtactgatgaatgaataaataccctggatatgctggtgtgaaatcctaaaaaatacctgctttccatccagatcagtagcactggtggattttctgtatcctgactaccccttcaacatttgcctaaagctaggacaacttcttcaaaggcaatagtgaataagagagcctggtatagtttgccgccacattaggaaagtcttcagaatttgaccctaacagcaggcaaatttcaacgtattcatctttttgttgaaataaattcatactgtgaggaaaagcaaaagataggaggtgaggcaaaagctactctttaactgtgagttttttttccttgcgatggggtttggctgcctagtctagattctcacgctagccccactttcgtctgctctgtggcatatttttaacctgagttgcaggacaggtggtttccagagtgttgcctgatgcatcccaaatgctgccttagcaatacacatctgaacaggggcccatcactaatagcaagcatttcattaatctgagcaaaactcatgggttttcacagggaccctaccagctcagaagcacgttgatataaataagtagaaaaccaaagacagctaagttttaaatcttgagtcaaaactttaaaatcaaagtcaaattgatttcattttggtgagctttcaaatcatgcttttaaaaataaattatgtaaaaaaatc

SEQ ID NO: 170314 - DNA, 1019 bp, Homo sapiens
  Payload ID: 13540
  Gene Symbol: PSMA4
  Gene Name: proteasome subunit alpha 4
  Uniprot ID: P25789
  ENST ID: ENST00000413382
  CDS Start-End: 187-759
gcgcatgcgcgggggccatattagcagcggttattcggtgagcggtggtggtttattcttccgtggagttaagggctccgtggacatctcaggtcttcagggtcttccatctggaactatataaagttcagaaaacatgtctcgaagatatgactccaggaccactatattttctccagaagggacatggcttgcagtgtggcaggcataacttctgatgctaatgttctgactaatgaactaaggctcattgctcaaaggtatttattacagtatcaggagccaataccttgtgagcagttggttacagcgctgtgtgatatcaaacaagcttatacacaatttggaggaaaacgtccctttggtgtttcattgctgtacattggctgggataagcactatggctttcagctctatcagagtgaccctagtggaaattacgggggatggaaggccacatgcattggaaataatagcgctgcagctgtgtcaatgttgaaacaagactataaagaaggagaaatgaccttgaagtcagcacttgctttagctatcaaagtactaaataagaccatggatgttagtaaactctctgctgaaaaagtggaaattgcaacactaacaagagagaatggaaagacagtaatcagagttctcaaacaaaaagaagtggagcagttgatcaaaaaacatgaggaagaagaagccaaagctgagcgtgagaagaaagaaaaagaacagaaagaaaaggataaatagaatcagagattttattactcatttggggcaccatttcagtgtaaaagcagtcctactcttccacactaggaaggctttactttttttaactggtgcagtgggaaaataggacattacatactgaattgggtccttgtcatttctgtccaattgaatactttattgtaacgatgatggttacccttcatggacgtcttaatcttccacacacatcccctttttttggaataaaatttggaaaatggaaatgaaggaataaa

SEQ ID NO: 170315 - DNA, 637 bp, Homo sapiens
  Payload ID: 13540
  Gene Symbol: PSMA4
  Gene Name: proteasome subunit alpha 4
  ENST ID: ENST00000559154
  CDS Start-End: 271-637
ggcattagccactgcacctggcctagttttgatgtttctaaggagagctcacttttgcaaagattaaagtcattaaaaatctttgaattgaaaattacagatttttttcaaccaaacttacaaaatattatttactatgagaatattcagatgttgacttgttccctccccttcaaattacaaatgactgttaggttgtccccatggcatagattgcttttcagagaatattttccttagagtctgtctgtgttttagagaaaactactaatgtgcccatctctttatcctaggtatttattacagtatcaggagccaataccttgtgagcagttggttacagcgctgtgtgatatcaaacaagcttatacacaatttggaggaaaacgtccctttggtgtttcattgctgtacattggctgggataagcactatggctttcagctctatcagagtgaccctagtggaaattacgggggatggaaggccacatgcattggaaataatagcgctgcagctgtgtcaatgttgaaacaagactataaagaaggagaaatgaccttgaagtcagcacttgctttagctatcaaagtactaaataagaccatggatgttagtaaactctctgctgaaaaag

SEQ ID NO: 170316 - DNA, 710 bp, Homo sapiens
  Payload ID: 13540
  Gene Symbol: PSMA4
  Gene Name: proteasome subunit alpha 4
  ENST ID: ENST00000559948
  CDS Start-End: 166-710
gcgcatgcgcgggggccatattagcagcggttattcggtgagcggtggtggtttattcttccgtggagttaagggctccgtggacatctcaggtcttcagggtcttccatctggaactatataaagttcagaaaacatggtcgcttataccaagttgaatatgccatggaagctattggacatgcaggcacctgtttgggaattttagcaaatgatggtgttttgcttgcagcagagagacgcaacatccacaagcttcttgatgaagtctttttttctgaaaaaatttataaactcaatgaggacatggcttgcagtgtggcaggcataacttctgatgctaatgttctgactaatgaactaaggctcattgctcaaaggtatttattacagtatcaggagccaataccttgtgagcagttggttacagcgctgtgtgatatcaaacaagcttatacacaatttggaggaaaacgtccctttggtgtttcattgctgtacattggctgggataagcactatggctttcagctctatcagagtgaccctagtggaaattacgggggatggaaggccacatgcattggaaataatagcgctgcagctgtgtcaatgttgaaacaagactataaagaaggagaaatgaccttgaagtcagcacttgctttagctatcaaagtactaaataagaccatggatgttagtaaact

SEQ ID NO: 170317 - DNA, 815 bp, Homo sapiens
  Payload ID: 13540
  Gene Symbol: PSMA4
  Gene Name: proteasome subunit alpha 4
  ENST ID: ENST00000560737
  CDS Start-End: 106-815
ccacattataatctatgactgcctctctcacctaactgccagtattagcttttcaggacaggaactggttttacacattttggaactatataaagttcagaaaacatgtctcgaagatatgactccaggaccactatattttctccagaaggtcgcttataccaagttgaatatgccatggaagctattggacatgcaggcacctgtttgggaattttagcaaatgatggtgttttgcttgcagcagagagacgcaacatccacaagcttcttgatgaagtctttttttctgaaaaaatttataaactcaatgaggacatggcttgcagtgtggcaggcataacttctgatgctaatgttctgactaatgaactaaggctcattgctcaaaggtatttattacagtatcaggagccaataccttgtgagcagttggttacagcgctgtgtgatatcaaacaagcttatacacaatttggaggaaaacgtccctttggtgtttcattgctgtacattggctgggataagcactatggctttcagctctatcagagtgaccctagtggaaattacgggggatggaaggccacatgcattggaaataatagcgctgcagctgtgtcaatgttgaaacaagactataaagaaggagaaatgaccttgaagtcagcacttgctttagctatcaaagtactaaataagaccatggatgttagtaaactctctgctgaaaaagtggaaattgcaacactaacaagagagaatggaaagacagtaatcagagttctcaaacaaaaagaagtggagcagttgat

SEQ ID NO: 170318 - DNA, 773 bp, Homo sapiens
  Payload ID: 13540
  Gene Symbol: PSMA4
  Gene Name: proteasome subunit alpha 4
  ENST ID: ENST00000558281
  CDS Start-End: 86-610
tttattcttccgtggagttaagggctccgtggacatctcaggtcttcagggtcttccatctggaactatataaagttcagaaaacatgtctcgaagatatgactccaggaccactatattttctccagaaggtcgcttataccaagttgaatatgccatggaagctattggacatgcaggcacctgtttgggaattttagcaaatgatggtgttttgcttgcagcagagagacgcaacatccacaagcttcttgatgaagtctttttttctgaaaaaatttataaactcaatgaggacatggcttgcagtgtggcaggcataacttctgatgctaatgttctgactaatgaactaaggctcattgctcaaaggtatttattacagtatcaggagccaataccttgtgagcagttggttacagcgctgtgtgatatcaaacaagcttatacacaatttggaggaaaacgtccctttggtgtttcattgctgtacattggctgggataagcactatggctttcagctctatcagagtgaccctagtggaaattacgggggatggaaggccacatgcattggaaataatagcgcttggaaattgcaacactaacaagagagaatggaaagacagtaatcagagttctcaaacaaaaagaagtggagcagttgatcaaaaaacatgaggaagaagaagccaaagctgagcgtgagaagaaagaaaaagaacagaaagaaaaggataaatagaatcagagattttattactcatttgg

SEQ ID NO: 170319 - DNA, 719 bp, Homo sapiens
  Payload ID: 13540
  Gene Symbol: PSMA4
  Gene Name: proteasome subunit alpha 4
  ENST ID: ENST00000558341
  CDS Start-End: 46-423
ggcttccgtcctcaggagttcggaactatataaagttcagaaaacatgtctcgaagatatgactccaggaccactatattttctccagaaggtcgcttataccaagttgaatatgccatggaagctattggacatgcaggcacctgtttgggaattttagcaaatgatggtgttttgcttgcagcagagagacgcaacatccacaagcttcttgatgaagtctttttttctgaaaaaatttataaactcaatgaggacatggcttgcagtgtggcaggcataacttctgatgctaatgttctgactaatgaactaaggctcattgctcaaagtggaaattgcaacactaacaagagagaatggaaagacagtaatcagagttctcaaacaaaaagaagtggagcagttgatcaaaaaacatgaggaagaagaagccaaagctgagcgtgagaagaaagaaaaagaacagaaagaaaaggataaatagaatcagagattttattactcatttggggcaccatttcagtgtaaaagcagtcctactcttccacactaggaaggctttactttttttaactggtgcagtgggaaaataggacattacatactgaattgggtccttgtcatttctgtccaattgaatactttattgtaacgatgatggttacccttcatggacgtcttaatcttccacacacatcccctttttttggaataaa

SEQ ID NO: 170320 - DNA, 756 bp, Homo sapiens
  Payload ID: 13540
  Gene Symbol: PSMA4
  Gene Name: proteasome subunit alpha 4
  ENST ID: ENST00000559437
  CDS Start-End: 128-756
ttagctctcccggaggtgccggtgaactcaaaatagtgctgtgcccggcgtcaggcgtggagacaacagaaagttgtgcttaaagctcgaatcagaaatccccggaactatataaagttcagaaaacatgtctcgaagatatgactccaggaccactatattttctccagaaggtcgcttataccaagttgaatatgccatggaagctattggacatgcaggcacctgtttgggaattttagcaaatgatggtgttttgcttgcagcagagagacgcaacatccacaagcttcttgatgaagtctttttttctgaaaaaatttataaactcaatgaggacatggcttgcagtgtggcaggcataacttctgatgctaatgttctgactaatgaactaaggctcattgctcaaaggtatttattacagtatcaggagccaataccttgtgagcagttggttacagcgctgtgtgatatcaaacaagcttatacacaatttggaggaaaacgtccctttggtgtttcattgctgtacattggctgggataagcactatggctttcagctctatcagagtgaccctagtggaaattacgggggatggaaggccacatgcattggaaataatagcgctgcagctgtgtcaatgttgaaacaagactataaagaaggagaaatgaccttgaagtcagcacttgctttagctatcaaagtactaaataagaccatggatgttagtaaactctctgctgaaaa

SEQ ID NO: 170321 - DNA, 674 bp, Homo sapiens
  Payload ID: 13540
  Gene Symbol: PSMA4
  Gene Name: proteasome subunit alpha 4
  ENST ID: ENST00000559146
  CDS Start-End: 124-674
ggccatattagcagcggttattcggtgagcggtggtggtttattcttccgtggagttaagggctccgtggacatctcaggtcttcagggtcttccatctggaactatataaagttcagaaaacatgtctcgaagatatgactccaggaccactatattttctccagaaggtcgcttataccaagttgaatatgccatggaagctattggacatgcaggcacctgtttgggaattttagcaaatgatggtgttttgcttgcagcagagagacgcaacatccacaagcttcttgatgaagtctttttttctgaaaaaatttataaactcaatgagtatttattacagtatcaggagccaataccttgtgagcagttggttacagcgctgtgtgatatcaaacaagcttatacacaatttggaggaaaacgtccctttggtgtttcattgctgtacattggctgggataagcactatggctttcagctctatcagagtgaccctagtggaaattacgggggatggaaggccacatgcattggaaataatagcgctgcagctgtgtcaatgttgaaacaagactataaagaaggagaaatgaccttgaagtcagcacttgctttagctatcaaagtactaaataagaccatggatgttagtaaactctctgctgaaaa

SEQ ID NO: 170322 - DNA, 651 bp, Homo sapiens
  Payload ID: 13540
  Gene Symbol: PSMA4
  Gene Name: proteasome subunit alpha 4
  ENST ID: ENST00000558094
  CDS Start-End: 202-462
tcattaaaaatctttgaattgaaaattacagatttttttcaaccaaacttacaaaatattatttactatgagaatattcagatgttgacttgttccctccccttcaaattacaaatgactgttaggttgtccccatggcatagattgcttttcagagaatattttccttagagtctgtctgtgttttagagaaaactactaatgtgcccatctctttatcctaggtatttattacagtatcaggagccaataccttgtgagcagttggttacagcgctgtgtgatatcaaacaagcttatacacaatttggaggaaaacgtccctttggtgtttcattgctgtacattggctgggataagcactatggctttcagctctatcagagtgaccctagtggaaattacgggggatggaaggccacatgcattggaaataatagcgcttggaaattgcaacactaacaagagagaatggaaagacagtaatcagagttctcaaacaaaaagaagtggagcagttgatcaaaaaacatgaggaagaagaagccaaagctgagcgtgagaagaaagaaaaagaacagaaagaaaaggataaatagaatcagagattttattactcatttggggcaccatttcagtgtaaaagcagtc

SEQ ID NO: 170323 - DNA, 786 bp, Homo sapiens
  Payload ID: 13540
  Gene Symbol: PSMA4
  Gene Name: proteasome subunit alpha 4
  ENST ID: ENST00000559365
  CDS Start-End: 125-786
agtgccaagcctggacgccggggcccgcgagggggcgggctgagggtgggggtctgtgggcaggaccgagagttggggtggcttccgtcctcaggagttcggaactatataaagttcagaaaacatgtctcgaagatatgactccaggaccactatattttctccagaaggtcgcttataccaagttgaatatgccatggaagctattggacatgcaggcacctgtttgggaattttagcaaatgatggtgttttgcttgcagcagagagacgcaacatccacaagcttcttgatgaagtctttttttctgaaaaaatttataaactcaatgaggacatggcttgcagtgtggcaggcataacttctgatgctaatgttctgactaatgaactaaggctcattgctcaaaggtatttattacagtatcaggagccaataccttgtgagcagttggttacagcgctgtgtgatatcaaacaagcttatacacaatttggaggaaaacgtccctttggtgtttcattgctgtacattggctgggataagcactatggctttcagctctatcagagtgaccctagtggaaattacgggggatggaaggccacatgcattggaaataatagcgctgcagctgtgtcaatgttgaaacaagactataaagaaggagaaatgaccttgaagtcagcacttgctttagctatcaaagtactaaataagaccatggatgttagtaaactctctgctgaaaaagtggaaattgcaacactaacaagagagaatgg

SEQ ID NO: 170324 - DNA, 944 bp, Homo sapiens
  Payload ID: 13540
  Gene Symbol: PSMA4
  Gene Name: proteasome subunit alpha 4
  ENST ID: ENST00000560217
  CDS Start-End: 159-851
cccgccccaacccagcggttctgcgcatgcgcgggggccatattagcagcggttattcggtgagcggtggtggtttattcttccgtggagttaagggctccgtggacatctcaggtcttcagggtcttccatctggaactatataaagttcagaaaacatgtctcgaagatatgactccaggaccactatattttctccagaagcagagagacgcaacatccacaagcttcttgatgaagtctttttttctgaaaaaatttataaactcaatgaggacatggcttgcagtgtggcaggcataacttctgatgctaatgttctgactaatgaactaaggctcattgctcaaaggtatttattacagtatcaggagccaataccttgtgagcagttggttacagcgctgtgtgatatcaaacaagcttatacacaatttggaggaaaacgtccctttggtgtttcattgctgtacattggctgggataagcactatggctttcagctctatcagagtgaccctagtggaaattacgggggatggaaggccacatgcattggaaataatagcgctgcagctgtgtcaatgttgaaacaagactataaagaaggagaaatgaccttgaagtcagcacttgctttagctatcaaagtactaaataagaccatggatgttagtaaactctctgctgaaaaagtggaaattgcaacactaacaagagagaatggaaagacagtaatcagagttctcaaacaaaaagaagtggagcagttgatcaaaaaacatgaggaagaagaagccaaagctgagcgtgagaagaaagaaaaagaacagaaagaaaaggataaatagaatcagagattttattactcatttggggcaccatttcagtgtaaaagcagtcctactcttccacactaggaaggctttactttttttaactgg

SEQ ID NO: 170325 - DNA, 1094 bp, Homo sapiens
  Payload ID: 13540
  Gene Symbol: PSMA4
  Gene Name: proteasome subunit alpha 4
  Uniprot ID: P25789
  ENST ID: ENST00000559082
  CDS Start-End: 67-852
ggttctgcgcatgcgcgggggccatattagcagcggttattcggaactatataaagttcagaaaacatgtctcgaagatatgactccaggaccactatattttctccagaaggtcgcttataccaagttgaatatgccatggaagctattggacatgcaggcacctgtttgggaattttagcaaatgatggtgttttgcttgcagcagagagacgcaacatccacaagcttcttgatgaagtctttttttctgaaaaaatttataaactcaatgaggacatggcttgcagtgtggcaggcataacttctgatgctaatgttctgactaatgaactaaggctcattgctcaaaggtatttattacagtatcaggagccaataccttgtgagcagttggttacagcgctgtgtgatatcaaacaagcttatacacaatttggaggaaaacgtccctttggtgtttcattgctgtacattggctgggataagcactatggctttcagctctatcagagtgaccctagtggaaattacgggggatggaaggccacatgcattggaaataatagcgctgcagctgtgtcaatgttgaaacaagactataaagaaggagaaatgaccttgaagtcagcacttgctttagctatcaaagtactaaataagaccatggatgttagtaaactctctgctgaaaaagtggaaattgcaacactaacaagagagaatggaaagacagtaatcagagttctcaaacaaaaagaagtggagcagttgatcaaaaaacatgaggaagaagaagccaaagctgagcgtgagaagaaagaaaaagaacagaaagaaaaggataaatagaatcagagattttattactcatttggggcaccatttcagtgtaaaagcagtcctactcttccacactaggaaggctttactttttttaactggtgcagtgggaaaataggacattacatactgaattgggtccttgtcatttctgtccaattgaatactttattgtaacgatgatggttacccttcatggacgtcttaatcttccacacacatcccctttttttggaataaaatttggaaaa

SEQ ID NO: 170326 - DNA, 3729 bp, Homo sapiens
  Payload ID: 13541
  Gene Symbol: PSMA5
  Gene Name: proteasome subunit alpha 5
  Uniprot ID: P28066
  ENST ID: ENST00000271308
  CDS Start-End: 22-747
ctgcctcctcctaccctcgccatgtttcttacccggtctgagtacgacaggggcgtgaatactttttctcccgaaggaagattatttcaagtggaatatgccattgaggctatcaagcttggttctacagccattgggatccagacatcagagggtgtgtgcctagctgtggagaagagaattacttccccactgatggagcccagcagcattgagaaaattgtagagattgatgctcacataggttgtgccatgagtgggctaattgctgatgctaagactttaattgataaagccagagtggagacacagaaccactggttcacctacaatgagacaatgacagtggagagtgtgacccaagctgtgtccaatctggctttgcagtttggagaagaagatgcagatccaggtgccatgtctcgtccctttggagtagcattattatttggaggagttgatgagaaaggaccccagctgtttcatatggacccatctgggacctttgtacagtgtgatgctcgagcaattggctctgcttcagagggtgcccagagctccttgcaagaagtttaccacaagtctatgactttgaaagaagccatcaagtcttcactcatcatcctcaaacaagtaatggaggagaagctgaatgcaacaaacattgagctagccacagtgcagcctggccagaatttccacatgttcacaaaggaagaacttgaagaggttatcaaggacatttaaggaatcctgatcctcagaacttctctgggacaatttcagttctaataatgtccttaaattttatttccagctcctgttccttggaaaatctccattgtatgtgcattttttaaatgatgtctgtacataaaggcagttctgaaataaagaaaattttaaaatatttgttaatagactgttctcttctaatagtcttttttttttttttttttttaagagatgaggtctcactatattgcccaggctggtttcaaactcctgggttcaagtgatcttcccgcctctgcctcctgaagtgctaggattataggcgagagccactgtgcccagccattgtaatacagtcttttgtttgaaatgcaaatgttagtgggccaaaaggacagtgttattaatatccctattctatgaagatgtctgttctaaaactgttttagtgatgctctataacagaatcaactatatccattaatcccatggtgttgataaatgaactagtccagctcttcccagtggttaatagatgttaacagcactgtaaatccatttcggccctataatttctggagcaaacgtgtatttttgctgcttttcttataaggagatgctactaattgactatcagaagaacatgttttgaggtcctcctcaaaacattgatgggttggaatcagccatcaacagtgttgtaccagttcttgggtcttgatagacaatttggaaagagatttccttgtttacgaagtgaaggactaagaattaaattaatgaccttggcctcactggcaatcaattacaaatctctatatcagtaagagaattgtaaaattcagaagcagtttacattagactttggaatgaatgatgaactttccccattagagctgccatcatatgattggtggagattgtttaaagaatcattctatctcagcctcaaaaattaccacgggaagatggtatcagtatcactacttaacagatgaagaatctaatgctgtgtgcccatggacacacaaaattaagctgttgggacttgaacagctcaaattttcttgtttcagatcaccagctcttgagtaatagggaaatctggagatttgaaaagtacttgcactgtccacaacatggctaatccatatgtggatgatgcagaattgatttaattcactaacagggaccccataattatttgctgggctctgggtatattgatgtgtaggaagttgtactatatgttaataaattatgactatttggataggctgaattcatactaaatccatactgtagttcaacaaaaaacaacatgtttatatacatttggaaactgcaatgataggaaacatttggaagaaagggattttgccctagaataacacataaggaaagcagagaattagagtatattgttactgaatgttccagagacttctagtgattttaacacttattaagtatagcatgttgatggggagatttgtttctctaaagatcactttgttttattaaatcctaatagaaaatacccttgaaaatcctatctcatttattcctgtaacaaatttattgagcacctacctactatatgccaagaaatgtattagccatcaggcagagagctgttcaaatggtagatatgatctgtgctcctgtgaaacttctagtggggagagccaaacaataaacaatattcctttttaactctaggttaatgcagaaatggataaagcccatgttgcttttgggagaggtgagttgtgtctctgaatcacatgcatttcatagggggaaaaatgcccaaatactaaggagtagctcttagcctatgtccgttcgcctcagcttaagttgttttccctcccactggctgggcagcatatttgtgttttacctggtaaaacagtaaatttcgtaccttctataattggcattcttcaaagaggtagaactttgatttttttgtagaatattaaaacaagctttcttaggttaaagaagtgatcttactacgaacagcaatggtttcatgatgtgtaattgctttatgttatctttctgctatagaatgtttcctggagaaaggtacggtttttagtaataagataaatttactttagtcctgcaaataaggtgaaatcttatgtccagtatctcacaaaggagaactgacagtgccacttttatatttaatgtcaatctcattagacaaaaatgaaatatagttcctagggtttccaatttaaaaagtgaaataataaatatattcactcaaacattttctcagtgccatatgcaagttaccatgtcccagaagctgatacagtttgaagaaggaaatatataagtactgtaagcctgtgataactaaaagcaacatactaaaaagtgaaggtacagataattggaacaaatttaatagcgtttaaaagtgtatttggtaatttctccaggaggtggcactgttgagttgttttttcttttcagacagtaagacaatagaccattcatctttgtgtcacccaaacaaagaaatattcctttataaccccctttcctccccccacctaatcacatgctactggaactgactgtcttgtgatctactcccatagttggcatagatttaaaaataatcttttttaaattaatctgatagtagttatggaaaggaacaaattgttcaccaattttcatcagctttatcttttcagtccagtaactgagaacttaaaaagactattctagtgattttactatcctgctcagatggcattcaaaaacatttttcacttctcacgtcttggaaaaatttgtaaattcgttaagtctttttgtttgaaagttaatgtgactggaaatattttaatgtaaatatcgggttgggtgcattgtatcattttgctctacaatgactatatcctcatttgggtttatggccagtttataattaaaagtaatctttacttgctttgagtgtaa

SEQ ID NO: 170327 - DNA, 1504 bp, Homo sapiens
  Payload ID: 13541
  Gene Symbol: PSMA5
  Gene Name: proteasome subunit alpha 5
  Uniprot ID: P28066
  ENST ID: ENST00000538610
  CDS Start-End: 953-1504
ccacatcggcggcacttgtcctaccgctgagtcacccctgggtcctaactcggtgcggaagcgagaagctccggctggtgcttggtaaagaaggcgtgaggagccggaactcctaccttgaacccggagaaggccaagggtcactctttgctccgttcatcttttcgtgcctagtatgactgccttgaacaaacaaacaaaaagttaaacgtgcttcctggaagaaaaagcaactggtttgtagtagggcatgctgcggtgtatagtttcttcagaagcgcgaaggcagtcgtagctttggctggatatattgtctggagtctgattttataggaactggaatttagaatggttttcaagagatttctcatcatgccgattccaattgaccaaaattttttctgactttttaaaagtttaaagcaagttttaaaaaacttttgtggtatgaaaatgttcacaatattaagttgtacatatatatgctgtagacatttttactttcagtttctgttttcgtcagttaagtttttacatagctactcttttttaaagtcagggaaggcagacattttctttgtactgagtggtatgagatgctgcatttcctgtcaagtatatgctgatcctgtcgaagttttaccacctgcagttaccactttttcatcttttttactgactcgtagaagatgtgtgtgaagttttgacatatttccccactgtcctataaagtgactttgttggtcgatatttaacttccagaacattgaagagaatcatcttcgggtgacataattttgagttagggggcgtgaatactttttctcccgaaggaagattatttcaagtggaatatgccattgaggctatcaagcttggttctacagccattgggatccagacatcagagggtgtgtgcctagctgtggagaagagaattacttccccactgatggagcccagcagcattgagaaaattgtagagattgatgctcacataggttgtgccatgagtgggctaattgctgatgctaagactttaattgataaagccagagtggagacacagaaccactggttcacctacaatgagacaatgacagtggagagtgtgacccaagctgtgtccaatctggctttgcagtttggagaagaagatgcagatccaggtgccatgtctcgtccctttggagtagcattattatttggaggagttgatgagaaaggaccccagctgtttcatatggacccatctgggacctttgtacagtgtgatgctcgagcaattggctctgcttcagagggtgcccagagctccttgcaagaagtttaccacaagtctatgactttgaaagaagccatcaagtcttcactcatcatcctcaaacaagtaatggaggagaagctgaatgcaacaaacattgagctagccacagtgcagcctggccagaatttccacatgttcacaaaggaagaacttgaagaggttatcaaggacatttaa

SEQ ID NO: 170328 - DNA, 1029 bp, Homo sapiens
  Payload ID: 13542
  Gene Symbol: PSMA6
  Gene Name: proteasome subunit alpha 6
  Uniprot ID: P60900
  ENST ID: ENST00000261479
  CDS Start-End: 121-861
gcggaagaaacgcggctggtaccccggaagcagtcgctgcaacttccgggaggtgcttgtgtgcctggtgcgggagctacggggcccagggattgtgtttaaagtagtgcttctaccaacatgtcccgtggttccagcgccggttttgaccgccacattaccattttttcacccgagggtcggctctaccaagtagaatatgcttttaaggctattaaccagggtggccttacatcagtagctgtcagagggaaagactgtgcagtaattgtcacacagaagaaagtacctgacaaattattggattccagcacagtgactcacttattcaagataactgaaaacattggttgtgtgatgaccggaatgacagctgacagcagatcccaggtacagagggcacgctatgaggcagctaactggaaatacaagtatggctatgagattcctgtggacatgctgtgtaaaagaattgccgatatttctcaggtctacacacagaatgctgaaatgaggcctcttggttgttgtatgattttaattggtatagatgaagagcaaggccctcaggtatataagtgtgatcctgcaggttactactgtgggtttaaagccactgcagcgggagttaaacaaactgagtcaaccagcttccttgaaaaaaaagtgaagaagaaatttgattggacatttgaacagacagtggaaactgcaattacatgcctgtctactgttctatcaattgatttcaaaccttcagaaatagaagttggagtagtgacagttgaaaatcctaaattcaggattcttacagaagcagagattgatgctcaccttgttgctctagcagagagagactaaacattgtcgttagtttaccagatccgtgatgccacttacctgtgtgtttggtaacaacaaaccaacatcatggaggtccctggattgaaaaaggagcctctcccactcctcctaccaccgaagtggttaggactctatataaataaaaacaaggcttttggaaaataa

SEQ ID NO: 170329 - DNA, 912 bp, Homo sapiens
  Payload ID: 13542
  Gene Symbol: PSMA6
  Gene Name: proteasome subunit alpha 6
  Uniprot ID: P60900
  ENST ID: ENST00000540871
  CDS Start-End: 68-751
agtgtcctaggctgggagaatgggatggagcctccacctcatgaagtagcttcctttggaggtggctatggcaggtcttcggagagaatatgcttttaaggctattaaccagggtggccttacatcagtagctgtcagagggaaagactgtgcagtaattgtcacacagaagaaagtacctgacaaattattggattccagcacagtgactcacttattcaagataactgaaaacattggttgtgtgatgaccggaatgacagctgacagcagatcccaggtacagagggcacgctatgaggcagctaactggaaatacaagtatggctatgagattcctgtggacatgctgtgtaaaagaattgccgatatttctcaggtctacacacagaatgctgaaatgaggcctcttggttgttgtatgattttaattggtatagatgaagagcaaggccctcaggtatataagtgtgatcctgcaggttactactgtgggtttaaagccactgcagcgggagttaaacaaactgagtcaaccagcttccttgaaaaaaaagtgaagaagaaatttgattggacatttgaacagacagtggaaactgcaattacatgcctgtctactgttctatcaattgatttcaaaccttcagaaatagaagttggagtagtgacagttgaaaatcctaaattcaggattcttacagaagcagagattgatgctcaccttgttgctctagcagagagagactaaacattgtcgttagtttaccagatccgtgatgccacttacctgtgtgtttggtaacaacaaaccaacatcatggaggtccctggattgaaaaaggagcctctcccactcctcctaccaccgaagtggttaggactctatataaataaaaacaaggcttttgg

SEQ ID NO: 170330 - DNA, 763 bp, Homo sapiens
  Payload ID: 13542
  Gene Symbol: PSMA6
  Gene Name: proteasome subunit alpha 6
  ENST ID: ENST00000556506
  CDS Start-End: 5-616
caacatgtcccgtggttccagcgccggttttgaccgccacattaccattttttcacccgagggtcggctctaccaagtagaatatgcttttaaggctattaaccagggtggccttacatcagtagctgtcagagggaaagactgtgcagtaattgtcacacagaagaaagtacctgacaaattattggattccagcacagtgactcacttattcaagataactgaaaacattggttgtgtgatgaccggaatgacagctgacagcagatcccaggtacagagggcacgctatgaggcagctaactggaaatacaagtatggctatgagattcctgtggacatgctgtgtaaaagaattgccgatatttctcaggtctacacacagaatgctgaaatgaggcctcttggttgttgtatgattttaattggtatagatgaagagcaaggccctcaggtatataagtgtgatcctgcaggttactactgtgggtttaaagccactgcagcgggagttaaacaaactgagtcaaccagcttccttgaaaaaaaagtgaagaagaaatttgattggacatttgaacagacagtggaagattcttacagaagcagagattgatgctcaccttgttgctctagcagagagagactaaacattgtcgttagtttaccagatccgtgatgccacttacctgtgtgtttggtaacaacaaaccaacatcatggaggtccctggattgaaaaaggagcctctcccactcctcct

SEQ ID NO: 170331 - DNA, 787 bp, Homo sapiens
  Payload ID: 13542
  Gene Symbol: PSMA6
  Gene Name: proteasome subunit alpha 6
  ENST ID: ENST00000553688
  CDS Start-End: 35-238
cagggattgtgtttaaagtagtgcttctaccaacatgtcccgtggttccagcgccggttttgaccgccacattaccattttttcacccgagggtcggctctaccaagtagcatggacttctgtggttaattccacacaggcactcgaagcctgctatataccagacactgctagtcctaggagatacaaatgtgaatgttacaccctcttctatactgaagctcacagcttagagtgacagatacgttaaacaaacggataaaaaaaattaaaagtgccaatttacaaatatctacagagttcaagacatctttgggaatctgatagaatgagtgactcaattctagagctgctcttgagattggcatcccctttttacccacatctgtttgaatgctcctgtaatttaaatgccgattctgagttgtagatgagaatatgcttttaaggctattaaccagggtggccttacatcagtagctgtcagagggaaagactgtgcagtaattgtcacacagaagaaagtacctgacaaattattggattccagcacagtgactcacttattcaagataactgaaaacattggttgtgtgatgaccggaatgacagctgacagcagatcccaggtacagagggcacgctatgaggcagctaactggaaatacaagtatggctatgagattcctgtggacatgctgtgtaaaagaattgccgatatttctcaggtctacacacagaatgctgaaatgaggcctcttggttgttgtatgattttaattggtat

SEQ ID NO: 170332 - DNA, 423 bp, Homo sapiens
  Payload ID: 13542
  Gene Symbol: PSMA6
  Gene Name: proteasome subunit alpha 6
  ENST ID: ENST00000556221
  CDS Start-End: 1-257
aaagaattgccgatatttctcaggtctacacacagaatgctgaaatgaggcctcttggttgttgtatgattttaattggtatagatgaagagcaaggccctcagactgcaattacatgcctgtctactgttctatcaattgatttcaaaccttcagaaatagaagttggagtagtgacagttgaaaatcctaaattcaggattcttacagaagcagagattgatgctcaccttgttgctctagcagagagagactaaacattgtcgttagtttaccagatccgtgatgccacttacctgtgtgtttggtaacaacaaaccaacatcatggaggtccctggattgaaaaaggagcctctcccactcctcctaccaccgaagtggttaggactctatataaataaaaacaaggcttttggaaaat

SEQ ID NO: 170333 - DNA, 814 bp, Homo sapiens
  Payload ID: 13542
  Gene Symbol: PSMA6
  Gene Name: proteasome subunit alpha 6
  ENST ID: ENST00000554961
  CDS Start-End: 85-531
ctgcaacttccgggaggtgcttgtgtgcctggtgcgggagctacggggcccagggattgtgtttaaagtagtgcttctaccaacatgtcccgtggttccagcgccggttttgaccgccacattaccattttttcacccgagggtcggctctaccaagtagaatatgcttttaaggctattaaccagggtggccttacatcagtagctgtcagagggaaagactgtgcagtaattgtcacacagaagaaagtacctgacaaattattggattccagcacagtgactcacttattcaagataactgaaaacattggttgtgtgatgaccggaatgacagctgacagcagatcccaggtacagagggcacgctatgaggcagctaactggaaatacaagtatggctatgagattcctgtggacatgctgtgtaaaagaattgccgatatttctcaggtctacacacagaatgctgaaatgaggcctcttggttgttactgcaattacatgcctgtctactgttctatcaattgatttcaaaccttcagaaatagaagttggagtagtgacagttgaaaatcctaaattcaggattcttacagaagcagagattgatgctcaccttgttgctctagcagagagagactaaacattgtcgttagtttaccagatccgtgatgccacttacctgtgtgtttggtaacaacaaaccaacatcatggaggtccctggattgaaaaaggagcctctcccactcctcctaccaccgaagtggttaggactctatataaataaaaacaaggcttttggaaaataa

SEQ ID NO: 170334 - DNA, 790 bp, Homo sapiens
  Payload ID: 13542
  Gene Symbol: PSMA6
  Gene Name: proteasome subunit alpha 6
  ENST ID: ENST00000554620
  CDS Start-End: 85-408
ctgcaacttccgggaggtgcttgtgtgcctggtgcgggagctacggggcccagggattgtgtttaaagtagtgcttctaccaacatgtcccgtggttccagcgccggttttgaccgccacattaccattttttcacccgagggtcggctctaccaagtagaatatgcttttaaggctattaaccagggtggccttacatcagtagctgtcagagggaaagactgtgcagtaattgtcacacagaagaaagtacctgacaaattattggattccagcacagtgactcacttattcaagataactgaaaacattggttgtgtgatgaccggaatgacagtctcactttgtcgcccaggctgctccgcctcctgggttcaagcaattctcgtgcctcaacctcccaggtagctgggactacagctgacagcagatcccaggtacagagggcacgctatgaggcagctaactggaaatacaagtatggctatgagattcctgtggacatgctgtgtaaaagaattgccgatatttctcaggtctacacacagaatgctgaaatgaggcctcttggttgttgtatgattttaattggtatagatgaagagcaaggccctcaggtatataagtgtgatcctgcaggttactactgtgggtttaaagccactgcagcgggagttaaacaaactgagtcaaccagcttccttgaaaaaaaagtgaagaagaaatttgattggacatttgaacagacagtggaaactgcaattacatgcctgtctactgttctatcaat

SEQ ID NO: 170335 - DNA, 925 bp, Homo sapiens
  Payload ID: 13542
  Gene Symbol: PSMA6
  Gene Name: proteasome subunit alpha 6
  ENST ID: ENST00000554541
  CDS Start-End: 129-254
atgcaagagcggaagaaacgcggctggtaccccggaagcagtcgctgcaacttccgggaggtgcttgtgtgcctggtgcgggagctacggggcccagggattgtgtttaaagtagtgcttctaccaacatgtcccgtggttccagcgccggttttgaccgccacattaccattttttcacccgagggtcggctctaccaagtaggacaaattattggattccagcacagtgactcacttattcaagataactgaaaacattggttgtgtgatgaccggaatgacagctgacagcagatcccaggtacagagggcacgctatgaggcagctaactggaaatacaagtatggctatgagattcctgtggacatgctgtgtaaaagaattgccgatatttctcaggtctacacacagaatgctgaaatgaggcctcttggttgttgtatgattttaattggtatagatgaagagcaaggccctcaggtatataagtgtgatcctgcaggttactactgtgggtttaaagccactgcagcgggagttaaacaaactgagtcaaccagcttccttgaaaaaaaagtgaagaagaaatttgattggacatttgaacagacagtggaaactgcaattacatgcctgtctactgttctatcaattgatttcaaaccttcagaaatagaagttggagtagtgacagttgaaaatcctaaattcaggattcttacagaagcagagattgatgctcaccttgttgctctagcagagagagactaaacattgtcgttagtttaccagatccgtgatgccacttacctgtgtgtttggtaacaacaaaccaacatcatggaggtccctggattgaaaaaggagcctctcccactcctcctaccaccgaagtggttaggactctatataaataaaaaca

SEQ ID NO: 170336 - DNA, 1002 bp, Homo sapiens
  Payload ID: 13542
  Gene Symbol: PSMA6
  Gene Name: proteasome subunit alpha 6
  Uniprot ID: P60900
  ENST ID: ENST00000555764
  CDS Start-End: 312-815
gtgtttaaagtagtgcttctaccaacatgtcccgtggttccagcgccggttttgaccgccacattaccattttttcacccgagggtcggctctaccaagtaggtgagtgaaccaggttcgcctgtgggccacctgaattgccctgtcatgaatatgcttttaaggctattaaccagggtggccttacatcagtagctgtcagagggaaagactgtgcagtaattgtcacacagaagaaagtacctgacaaattattggattccagcacagtgactcacttattcaagataactgaaaacattggttgtgtgatgaccggaatgacagctgacagcagatcccaggtacagagggcacgctatgaggcagctaactggaaatacaagtatggctatgagattcctgtggacatgctgtgtaaaagaattgccgatatttctcaggtctacacacagaatgctgaaatgaggcctcttggttgttgtatgattttaattggtatagatgaagagcaaggccctcaggtatataagtgtgatcctgcaggttactactgtgggtttaaagccactgcagcgggagttaaacaaactgagtcaaccagcttccttgaaaaaaaagtgaagaagaaatttgattggacatttgaacagacagtggaaactgcaattacatgcctgtctactgttctatcaattgatttcaaaccttcagaaatagaagttggagtagtgacagttgaaaatcctaaattcaggattcttacagaagcagagattgatgctcaccttgttgctctagcagagagagactaaacattgtcgttagtttaccagatccgtgatgccacttacctgtgtgtttggtaacaacaaaccaacatcatggaggtccctggattgaaaaaggagcctctcccactcctcctaccaccgaagtggttaggactctatataaataaaaacaaggcttttggaaaataattgcatcctgttgttttca

SEQ ID NO: 170337 - DNA, 879 bp, Homo sapiens
  Payload ID: 13542
  Gene Symbol: PSMA6
  Gene Name: proteasome subunit alpha 6
  ENST ID: ENST00000553809
  CDS Start-End: 80-838
acttccgggaggtgcttgtgtgcctggtgcgggagctacggggcccagggattgtgtttaaagtagtgcttctaccaacatgtcccgtggttccagcgccggttttgaccgccacattaccattttttcacccgagggtcggctctaccaagtagaatatgcttttaaggctattaaccagggtggccttacatcagtagctgtcagagggaaagactgtgcagtaattgtcacacagaagaaagtacctgacaaattattggattccagcacagtgactcacttattcaagataactgaaaacattggttgtgtgatgaccggaatgacagctgacagcagatcccaggtacagagggcacgctatgaggcagctaactggaaatacaagtatggctatgagattcctgtggacatgctgtgtaaaagaattgccgatatttctcaggtctacacacagaatgctgaaatgaggcctcttggttgttggtcttttctctttttaggtatgattttaattggtatagatgaagagcaaggccctcaggtatataagtgtgatcctgcaggttactactgtgggtttaaagccactgcagcgggagttaaacaaactgagtcaaccagcttccttgaaaaaaaagtgaagaagaaatttgattggacatttgaacagacagtggaaactgcaattacatgcctgtctactgttctatcaattgatttcaaaccttcagaaatagaagttggagtagtgacagttgaaaatcctaaattcaggattcttacagaagcagagattgatgctcaccttgttgctctagcagagagagactaaacattgtcgttagtttaccagatccgtgatgccacttacct

SEQ ID NO: 170338 - DNA, 978 bp, Homo sapiens
  Payload ID: 13542
  Gene Symbol: PSMA6
  Gene Name: proteasome subunit alpha 6
  Uniprot ID: P60900
  ENST ID: ENST00000622405
  CDS Start-End: 303-806
gctcgaactggctccagagccgtgagttcggcatgcaagagcggaagaaacgcggctggtaccccggaagcagtcgctgcaacttccgggaggtgcttgtgtgcctggtgcgggagctacggggcccagggattgtgtttaaagtagtgcttctaccaacatgtcccgtggttccagcgccggttttgaccgccacattaccattttttcacccgagggtcggctctaccaagtaggacaaattattggattccagcacagtgactcacttattcaagataactgaaaacattggttgtgtgatgaccggaatgacagctgacagcagatcccaggtacagagggcacgctatgaggcagctaactggaaatacaagtatggctatgagattcctgtggacatgctgtgtaaaagaattgccgatatttctcaggtctacacacagaatgctgaaatgaggcctcttggttgttgtatgattttaattggtatagatgaagagcaaggccctcaggtatataagtgtgatcctgcaggttactactgtgggtttaaagccactgcagcgggagttaaacaaactgagtcaaccagcttccttgaaaaaaaagtgaagaagaaatttgattggacatttgaacagacagtggaaactgcaattacatgcctgtctactgttctatcaattgatttcaaaccttcagaaatagaagttggagtagtgacagttgaaaatcctaaattcaggattcttacagaagcagagattgatgctcaccttgttgctctagcagagagagactaaacattgtcgttagtttaccagatccgtgatgccacttacctgtgtgtttggtaacaacaaaccaacatcatggaggtccctggattgaaaaaggagcctctcccactcctcctaccaccgaagtggttaggactctatataaataaaaacaaggcttttggaaaataattgc

SEQ ID NO: 170339 - DNA, 364 bp, Homo sapiens
  Payload ID: 13542
  Gene Symbol: PSMA6
  Gene Name: proteasome subunit alpha 6
  ENST ID: ENST00000628955
  CDS Start-End: 161-364
gctcgaactggctccagagccgtgagttcggcatgcaagagcggaagaaacgcggctggtaccccggaagcagtcgctgcaacttccgggaggtgcttgtgtgcctggtgcgggagctacggggcccagggattgtgtttaaagtagtgcttctaccaacatgtcccgtggttccagcgccggttttgaccgccacattaccattttttcacccgagggtcggctctaccaagtagcatggacttctgtggttaattccacacaggcactcgaagcctgctatataccagacactgctagtcctaggagatacaaatgtgaatgttacaccctcttctatactgaagctcacagcttagagtga

SEQ ID NO: 170340 - DNA, 484 bp, Homo sapiens
  Payload ID: 13542
  Gene Symbol: PSMA6
  Gene Name: proteasome subunit alpha 6
  ENST ID: ENST00000627895
  CDS Start-End: 161-484
gctcgaactggctccagagccgtgagttcggcatgcaagagcggaagaaacgcggctggtaccccggaagcagtcgctgcaacttccgggaggtgcttgtgtgcctggtgcgggagctacggggcccagggattgtgtttaaagtagtgcttctaccaacatgtcccgtggttccagcgccggttttgaccgccacattaccattttttcacccgagggtcggctctaccaagtagaatatgcttttaaggctattaaccagggtggccttacatcagtagctgtcagagggaaagactgtgcagtaattgtcacacagaagaaagtacctgacaaattattggattccagcacagtgactcacttattcaagataactgaaaacattggttgtgtgatgaccggaatgacagtctcactttgtcgcccaggctgctccgcctcctgggttcaagcaattctcgtgcctcaacctcccaggtag

SEQ ID NO: 170341 - DNA, 925 bp, Homo sapiens
  Payload ID: 13543
  Gene Symbol: PSMA7
  Gene Name: proteasome subunit alpha 7
  Uniprot ID: O14818
  ENST ID: ENST00000370858
  CDS Start-End: 128-577
cagcgcaggacacggcgccgagggtggggcgcgggcgtagtggcgccgggagtcgcgggtgcgcgcgggccgtgagtgtgcgcttttgagagtcgcggcggaaggagcccggccgccgcccgccggcatgagctacgaccgcgccatcaccgtcttctcgcccgacggccacctcttccaagtggagtacgcgcaggaggccgtcaagaagggctcgaccgcggttggtgttcgaggaagagacattgttgttcttggtgtggagaagaagtcagtggccaaactgcaggatgaaagaacagtgcggaagatctgtgctttggatgacaacgtctgcatggcctttgcaggcctcaccgccgatgcaaggatagtcatcaacagggcccgggtggagtgccagagccaccggctgactgtggaggacccggtcactgtggagtacatcacccgctacatcgccagtctgaagcaggtgggtgcctgcccgcttgcatgctcacctctggcagcagggcagtcacggctccgccatggagggtcctgccatgtcacttcaggtgaatcagaaaactgatttattctggggcgtgatcctaatcttgacttgcacaagtgtaacttgacctagctcaccaatttcagtaacattgttctgttctcagttcctggcatgggatattccaaattcctgtgtctggagggaaatgatagcttttgtcttgccatcctgagtgaccagtcacaaagcagttgaagggggctggaagccaccctatgaggacacgccattagtatgtaagcagaatgtgtgtctacctgtcaaagtaatttccagtaacctgagttcacaattctggtcctaggtgagtttttctaggagtgaaaatgcagaaaaggatgttgaaagctattggctaatgta

SEQ ID NO: 170342 - DNA, 773 bp, Homo sapiens
  Payload ID: 13543
  Gene Symbol: PSMA7
  Gene Name: proteasome subunit alpha 7
  Uniprot ID: O14818
  ENST ID: ENST00000370861
  CDS Start-End: 237-773
ccgcccgggtcaggactggtttggacgcggccgtttcgttttgacgagggctcgtgtacattgaccttagtgacattgtttgaaacttaaattcgtaccatcaagacgtgtcagtttaattggttggtgttcgaggaagagacattgttgttcttggtgtggagaagaagtcagtggccaaactgcaggatgaaagaacagtgcggaagatctgtgctttggatgacaacgtctgcatggcctttgcaggcctcaccgccgatgcaaggatagtcatcaacagggcccgggtggagtgccagagccaccggctgactgtggaggacccggtcactgtggagtacatcacccgctacatcgccagtctgaagcagcgttatacgcagagcaatgggcgcaggccgtttggcatctctgccctcatcgtgggtttcgactttgatggcactcctaggctctatcagactgacccctcgggcacataccatgcctggaaggccaatgccataggtcggggtgccaagtcagtgcgcgagttcctggagaagaactatactgacgaagccattgaaacagatgatctgaccattaagctggtgatcaaggcactcctggaagtggttcagtcaggtggcaaaaacattgaacttgctgtcatgaggcgagatcaatccctcaagattttaaatcctgaagaaattgagaagtatgttgctgaaattgaaaaagaaaaagaagaaaacgaaaagaagaaacaaaagaaagcatcatga

SEQ ID NO: 170343 - DNA, 996 bp, Homo sapiens
  Payload ID: 13543
  Gene Symbol: PSMA7
  Gene Name: proteasome subunit alpha 7
  Uniprot ID: O14818
  ENST ID: ENST00000370873
  CDS Start-End: 128-874
cagcgcaggacacggcgccgagggtggggcgcgggcgtagtggcgccgggagtcgcgggtgcgcgcgggccgtgagtgtgcgcttttgagagtcgcggcggaaggagcccggccgccgcccgccggcatgagctacgaccgcgccatcaccgtcttctcgcccgacggccacctcttccaagtggagtacgcgcaggaggccgtcaagaagggctcgaccgcggttggtgttcgaggaagagacattgttgttcttggtgtggagaagaagtcagtggccaaactgcaggatgaaagaacagtgcggaagatctgtgctttggatgacaacgtctgcatggcctttgcaggcctcaccgccgatgcaaggatagtcatcaacagggcccgggtggagtgccagagccaccggctgactgtggaggacccggtcactgtggagtacatcacccgctacatcgccagtctgaagcagcgttatacgcagagcaatgggcgcaggccgtttggcatctctgccctcatcgtgggtttcgactttgatggcactcctaggctctatcagactgacccctcgggcacataccatgcctggaaggccaatgccataggtcggggtgccaagtcagtgcgcgagttcctggagaagaactatactgacgaagccattgaaacagatgatctgaccattaagctggtgatcaaggcactcctggaagtggttcagtcaggtggcaaaaacattgaacttgctgtcatgaggcgagatcaatccctcaagattttaaatcctgaagaaattgagaagtatgttgctgaaattgaaaaagaaaaagaagaaaacgaaaagaagaaacaaaagaaagcatcatgatgaataaaatgtctttgcttgtaatttttaaattcatatcaatcatggatgagtctcgatgtgtaggcctttccattccatttattcacactgagtgtcctacaataaacttccgtattttt

SEQ ID NO: 170344 - DNA, 685 bp, Homo sapiens
  Payload ID: 13543
  Gene Symbol: PSMA7
  Gene Name: proteasome subunit alpha 7
  ENST ID: ENST00000442551
  CDS Start-End: 1-563
gcctcaccgccgatgcaaggatagtcatcaacagggcccgggtggagtgccagagccaccggctgactgtggaggacccggtcactgtggagtacatcacccgctacatcgccagtctgaagcagcgttatacgcagagcaatgggcgcaggccgtttggcatctctgccctcatcgtgggtttcgactttgatggcactcctaggctctatcagactgacccctcgggcacataccatgcctggaaggccaatgccataggtcggggtgccaagtcagtgcgcgagttcctggagaagaactatactgacgaagccattgaaacagatgatctgaccattaagctggtgatcaaggcactcctggaaggaaaggtggttaatgctcctgtcttctgtcccttcaaggtggttcagtcaggtggcaaaaacattgaacttgctgtcatgaggcgagatcaatccctcaagattttaaatcctgaagaaattgagaagtatgttgctgaaattgaaaaagaaaaagaagaaaacgaaaagaagaaacaaaagaaagcatcatgatgaataaaatgtctttgcttgtaatttttaaattcatatcaatcatggatgagtctcgatgtgtaggcctttccattccatttattcacactgagtgtcctacaataaacttccgtattttt

SEQ ID NO: 170345 - DNA, 1804 bp, Homo sapiens
  Payload ID: 13544
  Gene Symbol: PSMA8
  Gene Name: proteasome subunit alpha 8
  Uniprot ID: Q8TAA3
  ENST ID: ENST00000308268
  CDS Start-End: 90-860
gcggtagcacgctgtgttggcggcggctccccgcttgcctcagctgcagcagcgggaagctcggtggcaagcccttgtagtcctgtgcgatggcgtctcgatatgacagggcgatcactgtcttctccccagacggacacctttttcaagttgaatatgcccaggaagcggtgaagaaaggatccaccgcggtcggaattcgaggtaccaatatagttgttcttggggtagaaaaaaaatctgttgccaagcttcaagatgaaagaactgtgaggaaaatttgtgcccttgatgaccatgtctgcatggcttttgcagttttgacaatttttataggacttactgctgatgctagagtagtaataaacagagcccgtgtggagtgccagagccataagcttacggttgaggacccagtcactgtagaatacataactcgcttcatagcaactttaaagcagaaatatacccaaagcaatggacgaagaccttttggtatttctgccttaattgtaggttttgatgatgatggtatctcaagattgtatcagacagatccttctggtacttatcatgcttggaaggcaaatgcaataggccgaagtgctaaaactgttcgagaatttctagaaaagaattacacagaagatgccatagcaagtgacagtgaagctatcaagttagcaataaaagctttgctagaagttgtccagtctggtggaaaaaacattgaacttgctataataagaagaaatcaacctttgaagatgtttagtgcaaaagaagttgaattatatgtaactgaaatagaaaaggaaaaggaagaagcagagaagaaaaaatcaaagaaatctgtctaattcttaggatgaccactgggaggtcttaatgttttgttttattgtactgcctgaggttgtttagtgaaattttagaggaaaacagttattttgcagcattacatgcagtacttgtgtgatgttttgagaatgccagatctgtggctgtcttcattctattacatagtcaaacataggtttatgtgaagattttctttgaaaggggatttcagtaattgttgagagcagtcataattccacataagcctgagactctataatttgtccagtgtcttacttaccttcatatatgcaaatataattttaaaaaattttttaattaaaaaaatttaataatttggtgatgtttgaatattgactgtcagttaaggacatagctattccaaataaactaaatataatattgagctgcatttctcaaagaatgacaaaagcatccttatactgatgagttcttaaaattttgtcagagccttcttcattttacaatattttgttatttttattttacctttttcattttacaatatttcgttatttttattttacctttttcattttacaagttgcaatatattgtttcgttcatggaacaaatataggctgaattcaaacatgcaattaaagcatgggaagagcttctaagggcatcttaacaggatgctacatgaaaataaggaaagaaattaatacatatcacttttagtttagatttttattttatctcaagtatgtccagtgtgttcggtttgttacatattccatgaaatatctgagtgtgtattttatgattggtattatggaaggcttattgggggaacaagaaaaatataaaaagtgatctctgcccacggaaaggatttaatccaaatggtccacaagaggaatgtgcttaattcctacagtgagtttatatttttgaaaataaaagctagtaaatattc

SEQ ID NO: 170346 - DNA, 1675 bp, Homo sapiens
  Payload ID: 13544
  Gene Symbol: PSMA8
  Gene Name: proteasome subunit alpha 8
  Uniprot ID: Q8TAA3
  ENST ID: ENST00000343848
  CDS Start-End: 93-731
cgggcggtagcacgctgtgttggcggcggctccccgcttgcctcagctgcagcagcgggaagctcggtggcaagcccttgtagtcctgtgcgatggcgtctcgatatgacagggcgatcactgtcttctccccagacggacacctttttcaagttgaatatgcccaggaagcggtgaagaaaggatccaccgcggtcggaattcgaggacttactgctgatgctagagtagtaataaacagagcccgtgtggagtgccagagccataagcttacggttgaggacccagtcactgtagaatacataactcgcttcatagcaactttaaagcagaaatatacccaaagcaatggacgaagaccttttggtatttctgccttaattgtaggttttgatgatgatggtatctcaagattgtatcagacagatccttctggtacttatcatgcttggaaggcaaatgcaataggccgaagtgctaaaactgttcgagaatttctagaaaagaattacacagaagatgccatagcaagtgacagtgaagctatcaagttagcaataaaagctttgctagaagttgtccagtctggtggaaaaaacattgaacttgctataataagaagaaatcaacctttgaagatgtttagtgcaaaagaagttgaattatatgtaactgaaatagaaaaggaaaaggaagaagcagagaagaaaaaatcaaagaaatctgtctaattcttaggatgaccactgggaggtcttaatgttttgttttattgtactgcctgaggttgtttagtgaaattttagaggaaaacagttattttgcagcattacatgcagtacttgtgtgatgttttgagaatgccagatctgtggctgtcttcattctattacatagtcaaacataggtttatgtgaagattttctttgaaaggggatttcagtaattgttgagagcagtcataattccacataagcctgagactctataatttgtccagtgtcttacttaccttcatatatgcaaatataattttaaaaaattttttaattaaaaaaatttaataatttggtgatgtttgaatattgactgtcagttaaggacatagctattccaaataaactaaatataatattgagctgcatttctcaaagaatgacaaaagcatccttatactgatgagttcttaaaattttgtcagagccttcttcattttacaatattttgttatttttattttacctttttcattttacaatatttcgttatttttattttacctttttcattttacaagttgcaatatattgtttcgttcatggaacaaatataggctgaattcaaacatgcaattaaagcatgggaagagcttctaagggcatcttaacaggatgctacatgaaaataaggaaagaaattaatacatatcacttttagtttagatttttattttatctcaagtatgtccagtgtgttcggtttgttacatattccatgaaatatctgagtgtgtattttatgattggtattatggaaggcttattgggggaacaagaaaaatataaaaagtgatctctgcccacggaaaggatttaatccaaatggtccacaagaggaatgtgcttaattcctacagtgagtttatatttttgaaaataaaagctagtaaatattc

SEQ ID NO: 170347 - DNA, 1280 bp, Homo sapiens
  Payload ID: 13544
  Gene Symbol: PSMA8
  Gene Name: proteasome subunit alpha 8
  Uniprot ID: Q8TAA3
  ENST ID: ENST00000415576
  CDS Start-End: 115-867
gaggcgcgtgtggaagcgcttccgggcggtagcacgctgtgttggcggcggctccccgcttgcctcagctgcagcagcgggaagctcggtggcaagcccttgtagtcctgtgcgatggcgtctcgatatgacagggcgatcactgtcttctccccagacggacacctttttcaagttgaatatgcccaggaagcggtgaagaaaggatccaccgcggtcggaattcgaggtaccaatatagttgttcttggggtagaaaaaaaatctgttgccaagcttcaagatgaaagaactgtgaggaaaatttgtgcccttgatgaccatgtctgcatggcttttgcaggacttactgctgatgctagagtagtaataaacagagcccgtgtggagtgccagagccataagcttacggttgaggacccagtcactgtagaatacataactcgcttcatagcaactttaaagcagaaatatacccaaagcaatggacgaagaccttttggtatttctgccttaattgtaggttttgatgatgatggtatctcaagattgtatcagacagatccttctggtacttatcatgcttggaaggcaaatgcaataggccgaagtgctaaaactgttcgagaatttctagaaaagaattacacagaagatgccatagcaagtgacagtgaagctatcaagttagcaataaaagctttgctagaagttgtccagtctggtggaaaaaacattgaacttgctataataagaagaaatcaacctttgaagatgtttagtgcaaaagaagttgaattatatgtaactgaaatagaaaaggaaaaggaagaagcagagaagaaaaaatcaaagaaatctgtctaattcttaggatgaccactgggaggtcttaatgttttgttttattgtactgcctgaggttgtttagtgaaattttagaggaaaacagttattttgcagcattacatgcagtacttgtgtgatgttttgagaatgccagatctgtggctgtcttcattctattacatagtcaaacataggtttatgtgaagattttctttgaaaggggatttcagtaattgttgagagcagtcataattccacataagcctgagactctataatttgtccagtgtcttacttaccttcatatatgcaaatataattttaaaaaattttttaattaaaaaaatttaataatttggtgatgtttgaatattgactgtcagttaaggacatagctattccaaataaactaaatataatattgagctgca

SEQ ID NO: 170348 - DNA, 1876 bp, Homo sapiens
  Payload ID: 13544
  Gene Symbol: PSMA8
  Gene Name: proteasome subunit alpha 8
  ENST ID: ENST00000538664
  CDS Start-End: 115-306
gaggcgcgtgtggaagcgcttccgggcggtagcacgctgtgttggcggcggctccccgcttgcctcagctgcagcagcgggaagctcggtggcaagcccttgtagtcctgtgcgatggcgtctcgatatgacagggcgatcactgtcttctccccagacggacacctttttcaagttgaatatgcccaggaagcggtgaagaaaggatccaccgcgtatcatgtttctctgattgttcacgattcttgtggcctggcatggatgtctgcacatttgaaaaagtcggaattcgaggtaccaatatagttgttcttggggtagaaaaaaaatctgttgccaagcttcaagatgaaagaactgtgaggaaaatttgtgcccttgatgaccatgtctgcatggcttttgcaggacttactgctgatgctagagtagtaataaacagagcccgtgtggagtgccagagccataagcttacggttgaggacccagtcactgtagaatacataactcgcttcatagcaactttaaagcagaaatatacccaaagcaatggacgaagaccttttggtatttctgccttaattgtaggttttgatgatgatggtatctcaagattgtatcagacagatccttctggtacttatcatgcttggaaggcaaatgcaataggccgaagtgctaaaactgttcgagaatttctagaaaagaattacacagaagatgccatagcaagtgacagtgaagctatcaagttagcaataaaagctttgctagaagttgtccagtctggtggaaaaaacattgaacttgctataataagaagaaatcaacctttgaagatgtttagtgcaaaagaagttgaattatatgtaactgaaatagaaaaggaaaaggaagaagcagagaagaaaaaatcaaagaaatctgtctaattcttaggatgaccactgggaggtcttaatgttttgttttattgtactgcctgaggttgtttagtgaaattttagaggaaaacagttattttgcagcattacatgcagtacttgtgtgatgttttgagaatgccagatctgtggctgtcttcattctattacatagtcaaacataggtttatgtgaagattttctttgaaaggggatttcagtaattgttgagagcagtcataattccacataagcctgagactctataatttgtccagtgtcttacttaccttcatatatgcaaatataattttaaaaaattttttaattaaaaaaatttaataatttggtgatgtttgaatattgactgtcagttaaggacatagctattccaaataaactaaatataatattgagctgcatttctcaaagaatgacaaaagcatccttatactgatgagttcttaaaattttgtcagagccttcttcattttacaatattttgttatttttattttacctttttcattttacaatatttcgttatttttattttacctttttcattttacaagttgcaatatattgtttcgttcatggaacaaatataggctgaattcaaacatgcaattaaagcatgggaagagcttctaagggcatcttaacaggatgctacatgaaaataaggaaagaaattaatacatatcacttttagtttagatttttattttatctcaagtatgtccagtgtgttcggtttgttacatattccatgaaatatctgagtgtgtattttatgattggtattatggaaggcttattgggggaacaagaaaaatataaaaagtgatctctgcccacggaaaggatttaatccaaatggtccacaagaggaatgtgcttaattcctacagtgagtttatatttttgaaaataaaagctagtaaatattc

SEQ ID NO: 170349 - DNA, 1619 bp, Homo sapiens
  Payload ID: 13544
  Gene Symbol: PSMA8
  Gene Name: proteasome subunit alpha 8
  ENST ID: ENST00000612461
  CDS Start-End: 1-675
atggatgtctgcacatttgaaaaagtcggaattcgaggtaccaatatagttgttcttggggtagaaaaaaaatctgttgccaagcttcaagatgaaagaactgtgaggaaaatttgtgcccttgatgaccatgtctgcatggcttttgcaggacttactgctgatgctagagtagtaataaacagagcccgtgtggagtgccagagccataagcttacggttgaggacccagtcactgtagaatacataactcgcttcatagcaactttaaagcagaaatatacccaaagcaatggacgaagaccttttggtatttctgccttaattgtaggttttgatgatgatggtatctcaagattgtatcagacagatccttctggtacttatcatgcttggaaggcaaatgcaataggccgaagtgctaaaactgttcgagaatttctagaaaagaattacacagaagatgccatagcaagtgacagtgaagctatcaagttagcaataaaagctttgctagaagttgtccagtctggtggaaaaaacattgaacttgctataataagaagaaatcaacctttgaagatgtttagtgcaaaagaagttgaattatatgtaactgaaatagaaaaggaaaaggaagaagcagagaagaaaaaatcaaagaaatctgtctaattcttaggatgaccactgggaggtcttaatgttttgttttattgtactgcctgaggttgtttagtgaaattttagaggaaaacagttattttgcagcattacatgcagtacttgtgtgatgttttgagaatgccagatctgtggctgtcttcattctattacatagtcaaacataggtttatgtgaagattttctttgaaaggggatttcagtaattgttgagagcagtcataattccacataagcctgagactctataatttgtccagtgtcttacttaccttcatatatgcaaatataattttaaaaaattttttaattaaaaaaatttaataatttggtgatgtttgaatattgactgtcagttaaggacatagctattccaaataaactaaatataatattgagctgcatttctcaaagaatgacaaaagcatccttatactgatgagttcttaaaattttgtcagagccttcttcattttacaatattttgttatttttattttacctttttcattttacaatatttcgttatttttattttacctttttcattttacaagttgcaatatattgtttcgttcatggaacaaatataggctgaattcaaacatgcaattaaagcatgggaagagcttctaagggcatcttaacaggatgctacatgaaaataaggaaagaaattaatacatatcacttttagtttagatttttattttatctcaagtatgtccagtgtgttcggtttgttacatattccatgaaatatctgagtgtgtattttatgattggtattatggaaggcttattgggggaacaagaaaaatataaaaagtgatctctgcccacggaaaggatttaatccaaatggtccacaagaggaatgtgcttaattcctacagtgagtttatatttttgaaaataaaagctagtaaatattc

SEQ ID NO: 170350 - DNA, 928 bp, Homo sapiens
  Payload ID: 13545
  Gene Symbol: PSMB1
  Gene Name: proteasome subunit beta 1
  Uniprot ID: P20618
  ENST ID: ENST00000262193
  CDS Start-End: 100-825
agcgaacttcaggagaagccggaagtggcgtaacgtccggtcaaggcagccatctcgccgtgagacagcaagtgtcggatccgcaggcgcagccgtgcgatgttgtcctctacagccatgtattcggctcctggcagagacttggggatggaaccgcacagagccgcgggccctttgcagctgcgattttcgccctacgttttcaacggaggtactatactggcaattgctggagaagattttgcaattgttgcttctgatactcgattgagtgaagggttttcaattcatacgcgggatagccccaaatgttacaaattaacagacaaaacagtcattggatgcagcggttttcatggagactgtcttacgctgacaaagattattgaagcaagactaaagatgtataagcattccaataataaggccatgactacgggggcaattgctgcaatgctgtctacaatcctgtattcaaggcgcttctttccatactatgtttacaacatcatcggtggacttgatgaagaaggaaagggggctgtatacagctttgatccagtagggtcttaccagagagactccttcaaggctggaggctcagcaagtgccatgctacagcccctgcttgacaaccaggttggttttaagaacatgcagaatgtggagcatgttccgctgtccttggacagagccatgcggctggtgaaagatgtcttcatttctgcggctgagagagatgtgtacactggggacgcactccggatctgcatagtgaccaaagagggcatcagggaggaaactgtttccttaaggaaggactgatctgtgtgctcttatcaccaatcagttcagacctggttgattttgtactttggaactgtaccttggatggttttgtttattaaaagagaaacctgaagtactc

SEQ ID NO: 170351 - DNA, 1218 bp, Homo sapiens
  Payload ID: 13546
  Gene Symbol: PSMB10
  Gene Name: proteasome subunit beta 10
  Uniprot ID: P40306
  ENST ID: ENST00000358514
  CDS Start-End: 339-1160
aagagcaaggggctcagatggagggggaggaggacctgaacaagtccagaagggaagagatttgtccctctatccaacagagtacccagtgagcagcacagagggcacagcaagggacatcacccggttccccaaatgctcagagccacaagtgaagccaaaagtgaaagacaagatgcagaaaaccgccacgggcctttgaggaagggtaaaggcgaaagcgaaagcaggaagtacagacgtgaagcctagcagaggactttttagctgctcactggccccgcttgtctggccgactcatccgcccgcgacccctaatcccctctgcctgccccaagatgctgaagccagccctggagccccgagggggcttctccttcgagaactgccaaagaaatgcatcattggaacgcgtcctcccggggctcaaggtccctcacgcacgcaagaccgggaccaccatcgcgggcctggtgttccaagacggggtcattctgggcgccgatacgcgagccactaacgattcggtcgtggcggacaagagctgcgagaagatccacttcatcgcccccaaaatctactgctgtggggctggagtagccgcggacgccgagatgaccacacggatggtggcgtccaagatggagctacacgcgttatctacgggccgcgagccccgcgtggccacggtcactcgcatcctgcgccagacgctcttcaggtaccagggccacgtgggtgcatcgctgatcgtgggcggcgtagacctgactggaccgcagctctacggtgtgcatccccatggctcctacagccgtctgcccttcacagccctgggctctggtcaggacgcggccctggcggtgctagaagaccggttccagccgaacatgacgctggaggctgctcaggggctgctggtggaagccgtcaccgccgggatcttgggtgacctgggctccgggggcaatgtggacgcatgtgtgatcacaaagactggcgccaagctgctgcggacactgagctcacccacagagcccgtgaagaggtctggccgctaccactttgtgcctggaaccacagctgtcctgacccagacagtgaagccactaaccctggagctagtggaggaaactgtgcaggctatggaggtggagtaagctgaggcttagagcttggaacaagggggaataaacccagaaaatacagttaaacaga

SEQ ID NO: 170352 - DNA, 539 bp, Homo sapiens
  Payload ID: 13546
  Gene Symbol: PSMB10
  Gene Name: proteasome subunit beta 10
  ENST ID: ENST00000574576
  CDS Start-End: 1-417
atcctgcgccagacgctcttcaggtaccagggccacgtgggtgcatcgctgatcgtgggcggcgtagacctgactggaccgcagctctacggtgtgcatccccatggctcctacagccgtctgcccttcacagccctgggctctggtcaggacgcggccctggcggtgctagaagaccggttccagccgaacatgacgctggaggctgctcaggggctgctggtggaagccgtcaccgccgggatcttgggtgacctgggctccgggggcaatgtggacgcatgtgtgatcacaaagactggcgccaagctgctgcggacactgagctcacccacagagcccgtgaagagaggctgtccctcctccctcccaggtctggccgctaccactttgtgcctggaaccacagctgtcctgacccagacagtgaagccactaaccctggagctagtggaggaaactgtgcaggctatggaggtggagtaagctgaggcttagagcttggaacaagggggaataaacccagaaaatacagttaaa

SEQ ID NO: 170353 - DNA, 2701 bp, Homo sapiens
  Payload ID: 13547
  Gene Symbol: PSMB2
  Gene Name: proteasome subunit beta 2
  Uniprot ID: P49721
  ENST ID: ENST00000373237
  CDS Start-End: 413-1018
ggggagattttaccgagcaacgtagggaaacggctgcctggctacctacccctttttgacacccacacgtgctcggcaccttacatacactgcgtgattttatcctaaagccacttttaaaatcttagtgtgtaaacagagaaactgggcgtcacataaggcaagtgacctgcacagcctgctccggaggagacccgtacgatcccagagacaagcactgaacataaggcacccggcgccgcgcccgctttgcaacctctcgcgacagttgtacgtcatccgagagcgccgtggaagtcgtgctgcaggcgtcgcgccaatcttcgctctgaggtgctgtctcaccggtgagacctggaagcgggcgagtctcgtgctgtgtcggacctgcagcccctggccttccgccaccatggagtacctcatcggtatccaaggccccgactatgttcttgtcgcctccgaccgggtggccgccagcaatattgtccagatgaaggacgatcatgacaagatgtttaagatgagtgaaaagatattactcctgtgtgttggagaggctggagacactgtacagtttgcagaatatattcagaaaaacgtgcaactttataagatgcgaaatggatatgaattgtctcccacggcagcagctaacttcacacgccgaaacctggctgactgtcttcggagtcggaccccatatcatgtgaacctcctcctggctggctatgatgagcatgaagggccagcgctgtattacatggactacctggcagccttggccaaggccccttttgcagcccacggctatggtgccttcctgactctcagtatcctcgaccgatactacacaccgactatctcacgtgagagggcagtggaactccttaggaaatgtctggaggagctccagaaacgcttcatcctgaatctgccaaccttcagtgttcgaatcattgacaaaaatggcatccatgacctggataacatttccttccccaaacagggctcctaacatcatgtcctccctcccacttgccagggaacttttttttgatgggctcctttatttttttctactcttttcaggcgcactcttgataaatggttaattcagaataaaggtgactatggatataattgagccctctggtccaggtctcagtttacctaatattacctcagaaaggatatggagggaagatgatctttttgccaggtctgacttttcttcctgctccgccctccattaacgctcagtaccctttagcagctgacggccccacgttctactccatgcttggcttcctttccaactagctctttcatatattttacttgctagtatctccattctctctaaagtagtggttctttttgcccttaaacttaaatttttaaattaattaacctgaattaataatacatgcacttaatgtaacatgcaaacagtacaaaaacatgtagtgaaaaatatttcttccagagctgggtgtggtggctcatacctgtaatcccagcactttgggaggccgaggcgggcggatcacgaggtcaagagagcgagaccatcctgaccaacatggtaaaaccccgtctctactaaaaatacaaaaattagctgggcgtggtggcacgcacccctagtcccagctactggggaggctgagacaggagaatcggtcgaacccgggaggcagaggttgcagtgagcctagatcgcgccactgtactccagcctggcaacagagtgagactccgtctcaaaaaaagaaggaaaaatgtttcttccatccctataatccagtcatctgcttcctgcttcccttcctggaggaaacttcagctactaatttcttatgttttttaagagatattctgttactgtgtaaagtatacatacatacagacacatgccccctttaaattttttagatttatttatttatttagagacagggtctcactctagcccaggctggagtgctgtggcgtaatcttggctcactgcaacctccgcctcccgggcccaagtgatcctcccatctcagcctcctgagtagctaggattacaggcgcacaccaccaatgcccagctagtttttgtgtttttcatagagacagggtctcaccatgtcattcaggttggtcttgaactcctgggctcaagcagtctgcctgccttggcttcccagtgctgggattacaggcgtgagccaccgtgcccggctaaaaagtatttttaagttctgcatattgcttatttcacttaacactatattagagattgttttatatcaatacatatagatatgcttattcttgttgacagttgcataattttccattaaattgatgtatcatgggcagttaaccagttactcgttttactcttagcataactttagggaacaatgtggatgttttgtggttaaagctattaaaacagtggttcttgaccagatgtgtgtttcagaatgttcatctcacatttccagttgctactgatgctgctggtctaggaaccacatatcaaaaccatttggtctccgactaagataaaccctactttatccaattctgtgctcctcttaatatcatatacagataggtttttgttttgtctgtgattaaatgtatcatctaagatactacctactgatcataacgttcatattaaagtattgggttaacatta

SEQ ID NO: 170354 - DNA, 4217 bp, Homo sapiens
  Payload ID: 13547
  Gene Symbol: PSMB2
  Gene Name: proteasome subunit beta 2
  ENST ID: ENST00000621781
  CDS Start-End: 240-494
agtactaaccagctatttcatagctgttgcatgaggaaagggactagagtaggattgtacccctcagtctatgctttgtttactctgagtgtacaaaagatggatatgaattgtctcccacggcagcagctaacttcacacgccgaaacctggctgactgtcttcggagtcggaccccatatcatgtgaacctcctcctggctggctatgatgagcatgaagggccagcgctgtattacatggactacctggcagccttggccaaggccccttttgcagcccacggctatggtgccttcctgactctcagtatcctcgaccgatactacacaccgactatctcacgtgagagggcagtggaactccttaggaaatgtctggaggagctccagaaacgcttcatcctgaatctgccaaccttcagtgttcgaatcattgacaaaaatggcatccatgacctggataacatttccttccccaaacagggctcctaacatcatgtcctccctcccacttgccagggaacttttttttgatgggctcctttatttttttctactcttttcaggcgcactcttgataaatggttaattcagaataaaggtgactatggatataattgagccctctggtccaggtctcagtttacctaatattacctcagaaaggatatggagggaagatgatctttttgccaggtctgacttttcttcctgctccgccctccattaacgctcagtaccctttagcagctgacggccccacgttctactccatgcttggcttcctttccaactagctctttcatatattttacttgctagtatctccattctctctaaagtagtggttctttttgcccttaaacttaaatttttaaattaattaacctgaattaataatacatgcacttaatgtaacatgcaaacagtacaaaaacatgtagtgaaaaatatttcttccagagctgggtgtggtggctcatacctgtaatcccagcactttgggaggccgaggcgggcggatcacgaggtcaagagagcgagaccatcctgaccaacatggtaaaaccccgtctctactaaaaatacaaaaattagctgggcgtggtggcacgcacccctagtcccagctactggggaggctgagacaggagaatcggtcgaacccgggaggcagaggttgcagtgagcctagatcgcgccactgtactccagcctggcaacagagtgagactccgtctcaaaaaaagaaggaaaaatgtttcttccatccctataatccagtcatctgcttcctgcttcccttcctggaggaaacttcagctactaatttcttatgttttttaagagatattctgttactgtgtaaagtatacatacatacagacacatgccccctttaaattttttagatttatttatttatttagagacagggtctcactctagcccaggctggagtgctgtggcgtaatcttggctcactgcaacctccgcctcccgggcccaagtgatcctcccatctcagcctcctgagtagctaggattacaggcgcacaccaccaatgcccagctagtttttgtgtttttcatagagacagggtctcaccatgtcattcaggttggtcttgaactcctgggctcaagcagtctgcctgccttggcttcccagtgctgggattacaggcgtgagccaccgtgcccggctaaaaagtatttttaagttctgcatattgcttatttcacttaacactatattagagattgttttatatcaatacatatagatatgcttattcttgttgacagttgcataattttccattaaattgatgtatcatgggcagttaaccagttactcgttttactcttagcataactttagggaacaatgtggatgttttgtggttaaagctattaaaacagtggttcttgaccagatgtgtgtttcagaatgttcatctcacatttccagttgctactgatgctgctggtctaggaaccacatatcaaaaccatttggtctccgactaagataaaccctactttatccaattctgtgctcctcttaatatcatatacagataggtttttgttttgtctgtgattaaatgtatcatctaagatactacctactgatcataacgttcatattaaagtattgggttaacattagatttgggtgtcttatacactatttaatacgccaatgataaatgccttacaccataagaagaaagctaatcattgagtaaatgggagaaaagagatgattcacgtcactacagttgattcaacctccaacaccaccatgaatatgcataggtttgagcttttagctagattcctgagtgtaaggcatctattttaaaagtgccacaggttggccgggtgcggtggctcatgcctgtaatcccagcactttggccgcccgccgaggcgggcggatcacctgaggtcaggagttcaagaccagcctggccaacatggtgaaaccccatctctactaaaaaaatatataacaattagccaggcgtggtggcacacgcctgtaaacccaactacttgggaggctgaggcaggagaattgcttgagcccgggagagggaggttgcagtgagccgagatcatgccactgcactccagcctggctgacagagcaagactctgtctcaaaaaaaaaaaaaaaaaaaaaaaaaaagcgccacagatgattctgacgccctacccagtggagtgctgctactaaagcacagactatcctgctacatgattttcccatctgtacaatgactgaaatagcacctattctatgtggtagatatgagaattccatgaagtaatataggtaaacatttagttcagggcttggcatgtggtaagtgctcagtaagtgtataatgattggtaaacttgttattctgcattcaggcctcaccagggatgacatacggttctctgcctttgaatgtaagtgtccccagggcaatctcaggcaagcctgcaaacccatcctgactctcagtgtttttttgccaatctggatctctttcctgagctccaaatcaactcattcctagatagctcaccctccagatttagggacatcgaactcagtatgtctaaagctgagccttaccatctgcccctctccaaaccgcctctatgacattctgtcttagagaattagagctacctggtttcccaagtgcccaagtcagaaacccaggcatcatttatttttaataaatgttttattttggaataaatttggttttacagaaaagttgcaaagataatatggtgtccttataccccttattcagtttctgtaatgttaacatcttctatataccacagtatgtttgtcaaaactgagaaaccaacattggttggtgtattagtattactaagctccaggctttattcagattttaccagtttttccactaattttcttctgttctaggatataatccaagatacaacattgcatttagctgggcatcatttttatgccattctttatctcctgtctctacatggccaccaagttctggcatttctacatcctaaatcttttaattttattataattttttattgttgtttttcagagacagggtcttgctccatcacctaggctggagtacagtggcacgatcgtagcttactgcagtaagttcacttgaactcctgggctcaagtgaacctcttaccccagcctcccaactagctgggactagaggggtgcaccactgcacccagctaattttgtcaaaattttttgtagagacagggtctcgccatgttgcctaggctggtctcgaactcttggcctcaagtgatcctcccaccttggtctgccaaagcactgggattacagatgtgagccactgcacccagcctaatctttataaatctccatccccattactctggttcaccccctatcgtttcttagactatttaacagcctcctaacttcactctacttttaatctcttccctctccaggtctttctccatattttaaaaaactagtttcaccatccattcctctctgcccttaaaactttctggtggttttccatggcttaagagaataaagcccaattctttgatttgacatgctaggcattccataatcctctccgaacctaactccccacttcctttccctcctttacacctcataaagcctgtgttccaact

SEQ ID NO: 170355 - DNA, 510 bp, Homo sapiens
  Payload ID: 13548
  Gene Symbol: PSMB3
  Gene Name: proteasome subunit beta 3
  ENST ID: ENST00000610434
  CDS Start-End: 74-510
gagagcggttgcgcagtgaaggctagacccggtttactggaattgctctggcgatcgagggatcctatctattatgtcctataacggaggggccgtcatggccatgaaggggaagaactgtgtggccatcgctgcagacaggcgcttcgggatccaggcccagatggtgaccacggacttccagaagatctttcccatgggtgaccggctgtacatcggtctggccgggctcgccactgacgtccagacagttgcccagcgcctcaagttccggctgaacctgtatgagttgaaggaaggtcggcagatcaaaccttataccctcatgagcatggtggccaacctcttgtatgagaaacggtttggcccttactacactgagccagtcattgccgggttggacccgaagacctttaagcccttcatttgctctctagacctcatcggctgccccatggtgactgatgactttgtggtcagtggcacctgcgccgaacaaatgtacggaat

SEQ ID NO: 170356 - DNA, 662 bp, Homo sapiens
  Payload ID: 13548
  Gene Symbol: PSMB3
  Gene Name: proteasome subunit beta 3
  ENST ID: ENST00000613870
  CDS Start-End: 64-387
gaaggctagacccggtttactggaattgctctggcgatcgagggatcctagtacaccgcaatcatgtctattatgtcctataacggaggggccgtcatggccatgaaggggaagaactgtgtggccatcgctgcagacaggcgcttcgggatccaggcccagatggtgaccacggacttccagaagatctttcccatgggtgaccggctgtacatcggtctggccgggctcgccactgacgtccagacagttgcccagcgcctcaagttccggctgaacctgtatgagttgaaggaaggtcggcagatcaaaccttataccctcatgagcatggtggccaacctcttgtatgagaaacgacctcatcggctgccccatggtgactgatgactttgtggtcagtggcacctgcgccgaacaaatgtacggaatgtgtgagtccctctgggagcccaacatggatccggatcacctgtttgaaaccatctcccaagccatgctgaatgctgtggaccgggatgcagtgtcaggcatgggagtcattgtccacatcatcgagaaggacaaaatcaccaccaggacactgaaggcccgaatggactaaccctgttcccagagcccacttttttttctttttttgaaataaaatagcctgtctttca

SEQ ID NO: 170357 - DNA, 552 bp, Homo sapiens
  Payload ID: 13548
  Gene Symbol: PSMB3
  Gene Name: proteasome subunit beta 3
  ENST ID: ENST00000620309
  CDS Start-End: 55-393
acccggtttactggaattgctctggcgatcgagggatcctagtacaccgcaatcatgtctattatgtcctataacggaggggccgtcatggccatgaaggggaagaactgtgtggccatcgctgcagacaggcgcttcgggatccaggcccagatggtgaccacggacttccagaagatctttcccatgggtgaccggctgtacatcggtctggccgggctcgccactgacgtccagacagttgcccagcgcctcaagttccggctgaacctgtatgagttgaaggaaggtcggcagatcaaaccttataccctcatgagcatggtggccaacctcttgtatgagaaacggatccggatcacctgtttgaaaccatctcccaagccatgctgaatgctgtggaccgggatgcagtgtcaggcatgggagtcattgtccacatcatcgagaaggacaaaatcaccaccaggacactgaaggcccgaatggactaaccctgttcccagagcccacttttttttctttttttgaaataaaatagcctgtctttca

SEQ ID NO: 170358 - DNA, 773 bp, Homo sapiens
  Payload ID: 13548
  Gene Symbol: PSMB3
  Gene Name: proteasome subunit beta 3
  Uniprot ID: P49720
  ENST ID: ENST00000619426
  CDS Start-End: 92-709
gagacagcagtgagagcggttgcgcagtgaaggctagacccggtttactggaattgctctggcgatcgagggatcctagtacaccgcaatcatgtctattatgtcctataacggaggggccgtcatggccatgaaggggaagaactgtgtggccatcgctgcagacaggcgcttcgggatccaggcccagatggtgaccacggacttccagaagatctttcccatgggtgaccggctgtacatcggtctggccgggctcgccactgacgtccagacagttgcccagcgcctcaagttccggctgaacctgtatgagttgaaggaaggtcggcagatcaaaccttataccctcatgagcatggtggccaacctcttgtatgagaaacggtttggcccttactacactgagccagtcattgccgggttggacccgaagacctttaagcccttcatttgctctctagacctcatcggctgccccatggtgactgatgactttgtggtcagtggcacctgcgccgaacaaatgtacggaatgtgtgagtccctctgggagcccaacatggatccggatcacctgtttgaaaccatctcccaagccatgctgaatgctgtggaccgggatgcagtgtcaggcatgggagtcattgtccacatcatcgagaaggacaaaatcaccaccaggacactgaaggcccgaatggactaaccctgttcccagagcccacttttttttctttttttgaaataaaatagcctgtctttcactcctg

SEQ ID NO: 170359 - DNA, 773 bp, Homo sapiens; identical to SEQ ID NO: 170358
  Payload ID: 13548
  Gene Symbol: PSMB3
  Gene Name: proteasome subunit beta 3
  Uniprot ID: P49720
  ENST ID: ENST00000619951
  CDS Start-End: 92-709

SEQ ID NO: 170360 - DNA, 510 bp, Homo sapiens; identical to SEQ ID NO: 170355
  Payload ID: 13548
  Gene Symbol: PSMB3
  Gene Name: proteasome subunit beta 3
  ENST ID: ENST00000632832
  CDS Start-End: 74-510

SEQ ID NO: 170361 - DNA, 662 bp, Homo sapiens; identical to SEQ ID NO: 170356
  Payload ID: 13548
  Gene Symbol: PSMB3
  Gene Name: proteasome subunit beta 3
  ENST ID: ENST00000631787
  CDS Start-End: 64-387

SEQ ID NO: 170362 - DNA, 552 bp, Homo sapiens; identical to SEQ ID NO: 170357
  Payload ID: 13548
  Gene Symbol: PSMB3
  Gene Name: proteasome subunit beta 3
  ENST ID: ENST00000631987
  CDS Start-End: 55-393

SEQ ID NO: 170363 - DNA, 964 bp, Homo sapiens
  Payload ID: 13549
  Gene Symbol: PSMB4
  Gene Name: proteasome subunit beta 4
  Uniprot ID: P28070
  ENST ID: ENST00000290541
  CDS Start-End: 55-849
acttccgcttccgttggcgcaagcgctttcattttttctgctaccgtgactaagatggaagcgtttttggggtcgcggtccggactttgggcggggggtccggccccaggacagttttaccgcattccgtccactcccgattccttcatggatccggcgtctgcactttacagaggtccaatcacgcggacccagaaccccatggtgaccgggacctcagtcctcggcgttaagttcgagggcggagtggtgattgccgcagacatgctgggatcctacggctccttggctcgtttccgcaacatctctcgcattatgcgagtcaacaacagtaccatgctgggtgcctctggcgactacgctgatttccagtatttgaagcaagttctcggccagatggtgattgatgaggagcttctgggagatggacacagctatagtcctagagctattcattcatggctgaccagggccatgtacagccggcgctcgaagatgaaccctttgtggaacaccatggtcatcggaggctatgctgatggagagagcttcctcggttatgtggacatgcttggtgtagcctatgaagccccttcgctggccactggttatggtgcatacttggctcagcctctgctgcgagaagttctggagaagcagccagtgctaagccagaccgaggcccgcgacttagtagaacgctgcatgcgagtgctgtactaccgagatgcccgttcttacaaccggtttcaaatcgccactgtcaccgaaaaaggtgttgaaatagagggaccattgtctacagagaccaactgggatattgcccacatgatcagtggctttgaatgaaatacagatgcattatccagaactgaagttgccctacttttaactttgaacttggctagttcaaagatagactcttcttttgtaaagtaaataaattcttcaaaatgcttgctga

SEQ ID NO: 170364 - DNA, 796 bp, Homo sapiens
  Payload ID: 13550
  Gene Symbol: PSMB5
  Gene Name: proteasome subunit beta 5
  ENST ID: ENST00000334454
  CDS Start-End: 5-238
agacatggcgcttgccagcgtgttggagagaccgctaccggtgaaccagcgcgggtttttcggacttgggggtcgtgcagatctgctggatctaggtccagggagtctcagtgatggtctgagcctggccgcgccaggctggggtgtcccagaagagccaggaatcgaaatgcttcatggaacaaccaccctggccttcaaggtgtggagccagcccccttgccaggctgagtactgaacgcccgcgacttgcctggcctcccagcctgaccggagtttgcggtggccttggccaccaacccaggcggaggctgggtcctctcgttcggaccgcagcagttttgctgtctcattggcccaggaggcccctgtctttgctctggttggaaagggtggcggtggggccggggttccgccatggagtcatagttgcagctgactccagggctacagcgggtgcttacattgcctcccagacggtgaagaaggtgatagagatcaacccatacctgctaggcaccatggctgggggcgcagcggattgcagcttctgggaacggctgttggctcggcaatgtcgaatctatgagcttcgaaataaggaacgcatctctgtagcagctgcctccaaactgcttgccaacatggtgtatcagtacaaaggcatggggctgtccatgggcaccatgatctgtggctgggataagagaggccctggcctctactacgtggacagtgaagggaaccggatttcaggggccaccttctctgtaggttctggctctgtgtatgcata

SEQ ID NO: 170365 - DNA, 1294 bp, Homo sapiens
  Payload ID: 13550
  Gene Symbol: PSMB5
  Gene Name: proteasome subunit beta 5
  Uniprot ID: P28074
  ENST ID: ENST00000361611
  CDS Start-End: 265-1056
aggactacttgcatgaccaaagccaagatggcaggtacgtccttttagaatttaaggttagtgaagccatctatttccccgacccccttcagtgaaaatggtctttcgcatctggctcttctttttggaggcgtgcttgccagcagtcaaaatggctccattccggaatagatttaataggaagtgaagctgtgacggcgaggcgttgcccggcctatctttgctaggcgttctcagaattagttctttctgcccacactagacatggcgcttgccagcgtgttggagagaccgctaccggtgaaccagcgcgggtttttcggacttgggggtcgtgcagatctgctggatctaggtccagggagtctcagtgatggtctgagcctggccgcgccaggctggggtgtcccagaagagccaggaatcgaaatgcttcatggaacaaccaccctggccttcaagttccgccatggagtcatagttgcagctgactccagggctacagcgggtgcttacattgcctcccagacggtgaagaaggtgatagagatcaacccatacctgctaggcaccatggctgggggcgcagcggattgcagcttctgggaacggctgttggctcggcaatgtcgaatctatgagcttcgaaataaggaacgcatctctgtagcagctgcctccaaactgcttgccaacatggtgtatcagtacaaaggcatggggctgtccatgggcaccatgatctgtggctgggataagagaggccctggcctctactacgtggacagtgaagggaaccggatttcaggggccaccttctctgtaggttctggctctgtgtatgcatatggggtcatggatcggggctattcctatgacctggaagtggagcaggcctatgatctggcccgtcgagccatctaccaagccacctacagagatgcctactcaggaggtgcagtcaacctctaccacgtgcgggaggatggctggatccgagtctccagtgacaatgtggctgatctacatgagaagtatagtggctctaccccctgaaagagggtggatgcagctgcttgtgtttcttggggtgactgtcattggtaatacggacacagtgacccatcctccatcctatttatagtggaagggccttcaattgtatcagtacttttttttaagctctggcacattgacctctatgtgttaccagtcattaatgagctgctgcagaggtgactatttgttttactttcttggatgttaacattacactactcactactcaatctca

SEQ ID NO: 170366 - DNA, 900 bp, Homo sapiens
  Payload ID: 13550
  Gene Symbol: PSMB5
  Gene Name: proteasome subunit beta 5
  Uniprot ID: P28074
  ENST ID: ENST00000425762
  CDS Start-End: 231-713
cttctcaaagatggccgacctcacttcccttacgcaacatggacgttttcagtcacttcctgtgattttgaggttattctgatccaggactacttgcatgaccaaagccaagatggcagttccgccatggagtcatagttgcagctgactccagggctacagcgggtgcttacattgcctcccagacggtgaagaaggtgatagagatcaacccatacctgctaggcaccatggctgggggcgcagcggattgcagcttctgggaacggctgttggctcggcaatgtcgaatctatgagcttcgaaataaggaacgcatctctgtagcagctgcctccaaactgcttgccaacatggtgtatcagtacaaaggcatggggctgtccatgggcaccatgatctgtggctgggataagagaggccctggcctctactacgtggacagtgaagggaaccggatttcaggggccaccttctctgtaggttctggctctgtgtatgcatatggggtcatggatcggggctattcctatgacctggaagtggagcaggcctatgatctggcccgtcgagccatctaccaagccacctacagagatgcctactcaggaggtgcagtcaacctctaccacgtgcgggaggatggctggatccgagtctccagtgacaatgtggctgatctacatgagaagtatagtggctctaccccctgaaagagggtggatgcagctgcttgtgtttcttggggtgactgtcattggtaatacggacacagtgacccatcctccatcctatttatagtggaagggccttcaattgtatcagtacttttttttaagctctggcacattgacctctatgtgttaccagtcattaatgagctgctgcagaggtgactat

SEQ ID NO: 170367 - DNA, 729 bp, Homo sapiens
  Payload ID: 13550
  Gene Symbol: PSMB5
  Gene Name: proteasome subunit beta 5
  ENST ID: ENST00000460922
  CDS Start-End: 14-268
gcccacactagacatggcgcttgccagcgtgttggagagaccgctaccggtgaaccagcgcgggtttttcggacttgggggtcgtgcagatctgctggatctaggtccagggagtctcagtgatggtctgagcctggccgcgccaggctggggtgtcccagaagagccaggaatcgaaatgcttcatggaacaaccaccctggccttcaaggcctctactacgtggacagtgaagggaaccggatttcaggggccaccttctctgtaggttctggctctgtgtatgcatatggggtcatggatcggggctattcctatgacctggaagtggagcaggcctatgatctggcccgtcgagccatctaccaagccacctacagagatgcctactcaggaggtgcagtcaacctctaccacgtgcgggaggatggctggatccgagtctccagtgacaatgtggctgatctacatgagaagtatagtggctctaccccctgaaagagggtggatgcagctgcttgtgtttcttggggtgactgtcattggtaatacggacacagtgacccatcctccatcctatttatagtggaagggccttcaattgtatcagtacttttttttaagctctggcacattgacctctatgtgttaccagtcattaatgagctgctgcagaggtgactatttgttttactttcttggatgttaacattacactactcactactc

SEQ ID NO: 170368 - DNA, 444 bp, Homo sapiens
  Payload ID: 13550
  Gene Symbol: PSMB5
  Gene Name: proteasome subunit beta 5
  ENST ID: ENST00000555895
  CDS Start-End: 1-356
caggaatcgaaatgcttcatggaacaaccaccctggccttcaagttccgccatggagtcatagttgcagctgactccagggctacagcgggtgcttacattgcctcccagacggtgaagaaggtgatagagatcaacccatacctgctaggcaccatggctgggggcgcagcggattgcagcttctgggaacggctgttggctcggcaatgtcgaatctatgagcttcgaaataaggaacgcatctctgtagcagctgcctccaaactgcttgccaacatggtgtatcagtacaaaggcatggggctgtccatgggcaccatgatctgtggctgggataagagaggccctggttgaaagaagctcaaaggcaagaatgttacttttgaattcccaaagtttcaattgtaaacaaaaatgactaaataaaatatcattcacagtt

SEQ ID NO: 170369 - DNA, 1117 bp, Homo sapiens
  Payload ID: 13550
  Gene Symbol: PSMB5
  Gene Name: proteasome subunit beta 5
  Uniprot ID: P28074
  ENST ID: ENST00000493471
  CDS Start-End: 10-621
acactagacatggcgcttgccagcgtgttggagagaccgctaccggtgaaccagcgcgggtttttcggacttgggggtcgtgcagatctgctggatctaggtccagggagtctcagtgatggtctgagcctggccgcgccaggctggggtgtcccagaagagccaggaatcgaaatgcttcatggaacaaccaccctggccttcaagttccgccatggagtcatagttgcagctgactccagggctacagcgggtgcttacattgcctcccagacggtgaagaaggtgatagagatcaacccatacctgctaggcaccatggctgggggcgcagcggattgcagcttctgggaacggctgttggctcggcaatgtcgaatctatgagcttcgaaataaggaacgcatctctgtagcagctgcctccaaactgcttgccaacatggtgtatcagtacaaaggcatggggctgtccatgggcaccatgatctgtggctgggataagagaggccctgtgtctgaagttctgtgcttgaaacctaagtcatttggaatgtacttgttttgtgggtgtgctgagaggatcggcaacatggcaaggcctctactacgtggacagtgaagggaaccggatttcaggggccaccttctctgtaggttctggctctgtgtatgcatatggggtcatggatcggggctattcctatgacctggaagtggagcaggcctatgatctggcccgtcgagccatctaccaagccacctacagagatgcctactcaggaggtgcagtcaacctctaccacgtgcgggaggatggctggatccgagtctccagtgacaatgtggctgatctacatgagaagtatagtggctctaccccctgaaagagggtggatgcagctgcttgtgtttcttggggtgactgtcattggtaatacggacacagtgacccatcctccatcctatttatagtggaagggccttcaattgtatcagtacttttttttaagctctggcacattgacctctatgtgttaccagtcattaatgagctgctgcagaggtgactatttgttttactttcttggatgttaacattacactactcactactc

SEQ ID NO: 170370 - DNA, 852 bp, Homo sapiens
  Payload ID: 13551
  Gene Symbol: PSMB6
  Gene Name: proteasome subunit beta 6
  Uniprot ID: P28072
  ENST ID: ENST00000270586
  CDS Start-End: 52-771
gtgacagagcgctttacgacagttgctttgaggcagtaccggaggagaaagatggcggctaccttactagctgctcggggagccgggccagcaccggcttgggggccggaggcgttcactccagactgggaaagccgagaagtttccactgggaccactatcatggccgtgcagtttgacgggggcgtggttctgggggcggactccagaacaaccactgggtcctacatcgccaatcgagtgactgacaagctgacacctattcacgaccgcattttctgctgtcgctcaggctcagctgctgatacccaggcagtagctgatgctgtcacctaccagctcggtttccacagcattgaactgaatgagcctccactggtccacacagcagccagcctctttaaggagatgtgttaccgataccgggaagacctgatggcgggaatcatcatcgcaggctgggaccctcaagaaggagggcaggtgtactcagtgcctatggggggtatgatggtaaggcagtcctttgccattggaggctccgggagctcctacatctatggctatgttgatgctacctaccgggaaggcatgaccaaggaagagtgtctgcaattcactgccaatgctctcgctttggccatggagcgggatggctccagtggaggagtgatccgcctggcagccattgcagagtcaggggtagagcggcaagtacttttgggagaccagatacccaaattcgccgttgccactttaccacccgcctgaatcctgggattctagtatgcaataagagatgccctgtactgatgcaaaatttaataaagtttgtcacagagaatctttgta

SEQ ID NO: 170371 - DNA, 583 bp, Homo sapiens
  Payload ID: 13551
  Gene Symbol: PSMB6
  Gene Name: proteasome subunit beta 6
  ENST ID: ENST00000571309
  CDS Start-End: 1-309
accttactagctgctcggggagccgggccagcaccggcttgggggccggaggcgttcactccagactgggaaagccgagaagtttccactgggaccactatcatggccgtgcagtttgacgggggcgtggttctgggggcggactccagaacaaccactgggtcctacatcgccaatcgagtgactgacaagctgacacctattcacgaccgcattttctgctgtcgctcaggctcagctgctgatacccaggcagtagctgatgctgtcacctaccagctcggtttccacagcagccagcctctttaaggagatgtgttaccgataccgggaagacctgatggcgggaatcatcatcgcaggctgggaccctcaagaaggagggcaggtgtactcagtgcctatggggggtatgatggtaaggcagtcctttgccattggaggctccgggagctcctacatctatggctatgttgatgctacctaccgggaaggcatgaccaaggaagagtgtctgcaattcactgccaatgctctcgctttggccatggagcgggatggctccagtggaggagtgatccgc

SEQ ID NO: 170372 - DNA, 871 bp, Homo sapiens
  Payload ID: 13551
  Gene Symbol: PSMB6
  Gene Name: proteasome subunit beta 6
  ENST ID: ENST00000614486
  CDS Start-End: 52-693
gtgacagagcgctttacgacagttgctttgaggcagtaccggaggagaaagatggcggctaccttactagctgctcggggagccgggccagcaccggcttgggggccggaggcgttcactccagactgggaaagccgagaagtttccactgggaccactatcatggccgtgcagtttgacgggggcgtggttctgggggcggactccagaacaaccactgggtcctacatcgccaatcgagtgactgacaagctgacacctattcacgaccgcattttctgctgtcgctcaggctcagctgctgatacccaggcagtagctgatgctgtcacctaccagctcggtttccacagcattgaactgaatgagcctccactggtccacacagcagccagcctctttaaggagatgtgttaccgataccgggaagacctgatggcgggaatcatcatcgcaggctgggaccctcaagaaggagggcaggtgtactcagtgcctatggggggtatgatggtaaggcagtcctttgccattggaggctccgggagctcctacatctatggctatgttgatgctacctaccgggaaggcatgaccaaggaagagtgtctgcaattcactgccaatgctttcttcttttatccacagctctcgctttggccatggagcgggatggctccagtggaggagtgatccgcctggcagccattgcagagtcaggggtagagcggcaagtacttttgggagaccagatacccaaattcgccgttgccactttaccacccgcctgaatcctgggattctagtatgcaataagagatgccctgtactgatgcaaaatttaataaagtttgtcacagagaatctttgt

SEQ ID NO: 170373 - DNA, 980 bp, Homo sapiens
  Payload ID: 13552
  Gene Symbol: PSMB7
  Gene Name: proteasome subunit beta 7
  Uniprot ID: Q99436
  ENST ID: ENST00000259457
  CDS Start-End: 15-848
gctttcttgggaagatggcggctgtgtcggtgtatgctccaccagttggaggcttctcttttgataactgccgcaggaatgccgtcttggaagccgattttgcaaagaggggatacaagcttccaaaggtccggaaaactggcacgaccatcgctggggtggtctataaggatggcatagttcttggagcagatacaagagcaactgaagggatggttgttgctgacaagaactgttcaaaaatacacttcatatctcctaatatttattgttgtggtgctgggacagctgcagacacagacatgacaacccagctcatttcttccaacctggagctccactccctctccactggccgtcttcccagagttgtgacagccaatcggatgctgaagcagatgcttttcaggtatcaaggttacattggtgcagccctagttttagggggagtagatgttactggacctcacctctacagcatctatcctcatggatcaactgataagttgccttatgtcaccatgggttctggctccttggcagcaatggctgtatttgaagataagtttaggccagacatggaggaggaggaagccaagaatctggtgagcgaagccatcgcagctggcatcttcaacgacctgggctccggaagcaacattgacctctgcgtcatcagcaagaacaagctggattttctccgcccatacacagtgcccaacaagaaggggaccaggcttggccggtacaggtgtgagaaagggactactgcagtcctcactgagaaaatcactcctctggagattgaggtgctggaagaaacagtccaaacaatggacacttcctgaatggcatcagtgggtggctggccgcggttctggaaggtggtgagcattgaggcccagtaagacactcatgtggctagtgtttgccgaatgaaactcaactcaataaaaaacaaaaaccaaattgggcagctg

SEQ ID NO: 170374 - DNA, 650 bp, Homo sapiens
  Payload ID: 13552
  Gene Symbol: PSMB7
  Gene Name: proteasome subunit beta 7
  ENST ID: ENST00000441097
  CDS Start-End: 20-650
gaactgctttcttgggaagatggcggctgtgtcggtgtatgctccaccagttggaggcttctcttttgataactgccgcaggaatgccgtcttggaagccgattttgcaaagaggggatacaagcttccaaaggtccggaaaactggcacgaccatcgctggggtggtctataaggatggcatagttcttggagcagatacaagagcaactgaagggatggttgttgctgacaagaactgttcaaaaatacacttcatatctcctaatatttattgttgtggtgctgggacagctgcagacacagacatgacaacccagctcatttcttccaacctggagctccactccctctccactggccgtcttcccagagttgtgacagccaatcggatgctgaagcagatgcttttcaggtatcaaggttacattggtgcagccctagttttagggggagtagatgttactggacctcacctctacagcatctatcctcatggatcaactgataagttgccttatgtcaccatggtccattgtgaagaggagctctttacagagaatcttttctttattaggcaagctgaagtagtgtcagaagaagcttggggaccatcttttgctattagcttggcagtgttccttgtagcag

SEQ ID NO: 170375 - DNA, 1351 bp, Homo sapiens
  Payload ID: 13553
  Gene Symbol: PSMB8
  Gene Name: proteasome subunit beta 8
  Uniprot ID: P28062
  ENST ID: ENST00000374881
  CDS Start-End: 291-1109
gaagaggcggggtttagaggcgtgaaactccgcagtgctcagccaagcagggagcaacgctaggaagggcgggcagaaagggcacgctcttgtgggtgactacaggttaggagaccgttgaacctggaggggccctaggatggaccccgtggaaagattcagagactgcgccctctccctggcgccgccttcccctacacgcggcgggtatattctgttgcagttggcccaggacctgtttccaagactctgccccctcgcacttccgtccctcctggttttgtaaagtgatgctcataggaacccccaccccgcgtgacactactcccagctcctggctgacttctagtcttctggttgaagctgcgcctttagatgacacgaccctacccacccctgtttccagcggatgcccgggcctggagcccacagaattcttccagtccctgggtggggacggagaaaggaacgttcagattgagatggcccatggcaccaccacgctcgccttcaagttccagcatggagtgattgcagcagtggattctcgggcctcagctgggtcctacattagtgccttacgggtgaacaaggtgattgagattaacccttacctgcttggcaccatgtctggctgtgcagcagactgtcagtactgggagcgcctgctggccaaggaatgcaggctgtactatctgcgaaatggagaacgtatttcagtgtcggcagcctccaagctgctgtccaacatgatgtgccagtaccggggcatgggcctctctatgggcagtatgatctgtggctgggataagaagggtcctggactctactacgtggatgaacatgggactcggctctcaggaaatatgttctccacgggtagtgggaacacttatgcctacggggtcatggacagtggctatcggcctaatcttagccctgaagaggcctatgaccttggccgcagggctattgcttatgccactcacagagacagctattctggaggcgttgtcaatatgtaccacatgaaggaagatggttgggtgaaagtagaaagtacagatgtcagtgacctgctgcaccagtaccgggaagccaatcaataatggtggtggtggcagctgggcaggtctcctctgggaggtcttggccgactcagggacctaagccacgttaagtccaaggagaagaagaggcctagcctgagccaaagagagagtacgggctcagcagccagaggaggccggtgaagtgcatcttctgcgtgttctctatttgaacaagcatttcccccagggaagtttctgggtgccccactaagtagaataaagaaaaacggttataaata

SEQ ID NO: 170376 - DNA, 1124 bp, Homo sapiens
  Payload ID: 13553
  Gene Symbol: PSMB8
  Gene Name: proteasome subunit beta 8
  Uniprot ID: P28062
  ENST ID: ENST00000374882
  CDS Start-End: 52-882
gctttcacttcctcctccgagagcggacagatctctgggtgctgggcggtcatggcgctactagatgtatgcggagccccccgagggcagcggccggaatcggctctcccggttgcgggaagcgggcgtcgctcggacccaggacactacagtttctctatgcgatctccagagctcgctttaccccggggaatgcagcccacagaattcttccagtccctgggtggggacggagaaaggaacgttcagattgagatggcccatggcaccaccacgctcgccttcaagttccagcatggagtgattgcagcagtggattctcgggcctcagctgggtcctacattagtgccttacgggtgaacaaggtgattgagattaacccttacctgcttggcaccatgtctggctgtgcagcagactgtcagtactgggagcgcctgctggccaaggaatgcaggctgtactatctgcgaaatggagaacgtatttcagtgtcggcagcctccaagctgctgtccaacatgatgtgccagtaccggggcatgggcctctctatgggcagtatgatctgtggctgggataagaagggtcctggactctactacgtggatgaacatgggactcggctctcaggaaatatgttctccacgggtagtgggaacacttatgcctacggggtcatggacagtggctatcggcctaatcttagccctgaagaggcctatgaccttggccgcagggctattgcttatgccactcacagagacagctattctggaggcgttgtcaatatgtaccacatgaaggaagatggttgggtgaaagtagaaagtacagatgtcagtgacctgctgcaccagtaccgggaagccaatcaataatggtggtggtggcagctgggcaggtctcctctgggaggtcttggccgactcagggacctaagccacgttaagtccaaggagaagaagaggcctagcctgagccaaagagagagtacgggctcagcagccagaggaggccggtgaagtgcatcttctgcgtgttctctatttgaacaagcatttcccccagggaagtttctgggtgccccactaagtagaataaagaaaaacggttataaata

SEQ ID NO: 170377 - DNA, 1124 bp, Homo sapiens; identical to SEQ ID NO: 170376
  Payload ID: 13553
  Gene Symbol: PSMB8
  Gene Name: proteasome subunit beta 8
  Uniprot ID: P28062
  ENST ID: ENST00000383236
  CDS Start-End: 52-882

SEQ ID NO: 170378 - DNA, 1351 bp, Homo sapiens; identical to SEQ ID NO: 170375
  Payload ID: 13553
  Gene Symbol: PSMB8
  Gene Name: proteasome subunit beta 8
  Uniprot ID: P28062
  ENST ID: ENST00000383238
  CDS Start-End: 291-1109

SEQ ID NO: 170379 - DNA, 1025 bp, Homo sapiens
  Payload ID: 13553
  Gene Symbol: PSMB8
  Gene Name: proteasome subunit beta 8
  ENST ID: ENST00000395339
  CDS Start-End: 25-783
cagatctctgggtgctgggcggtcatggcgctactagatgtatgcggagccccccgagggcagcggccggaatcggctctcccggttgcgggaagcgggcgtcgctcggacccaggacactacagtttctctatgcgatctccagagctcgctttaccccggggaatgcagcccacagaattcttccagtccctgggtggggacggagaaaggaacgttcagattgagatggcccatggcaccaccacgctcgccttcaagttccagcatggagtgattgcagcagtggattctcgggcctcagctgggtcctacattaactgtcagtactgggagcgcctgctggccaaggaatgcaggctgtactatctgcgaaatggagaacgtatttcagtgtcggcagcctccaagctgctgtccaacatgatgtgccagtaccggggcatgggcctctctatgggcagtatgatctgtggctgggataagaagggtcctggactctactacgtggatgaacatgggactcggctctcaggaaatatgttctccacgggtagtgggaacacttatgcctacggggtcatggacagtggctatcggcctaatcttagccctgaagaggcctatgaccttggccgcagggctattgcttatgccactcacagagacagctattctggaggcgttgtcaatatgtaccacatgaaggaagatggttgggtgaaagtagaaagtacagatgtcagtgacctgctgcaccagtaccgggaagccaatcaataatggtggtggtggcagctgggcaggtctcctctgggaggtcttggccgactcagggacctaagccacgttaagtccaaggagaagaagaggcctagcctgagccaaagagagagtacgggctcagcagccagaggaggccggtgaagtgcatcttctgcgtgttctctatttgaacaagcatttcccccagggaagtttctgggtgccccactaagtagaataaagaaaaacggttataaata

SEQ ID NO: 170380 - DNA, 1025 bp, Homo sapiens; identical to SEQ ID NO: 170379
  Payload ID: 13553
  Gene Symbol: PSMB8
  Gene Name: proteasome subunit beta 8
  ENST ID: ENST00000399630
  CDS Start-End: 25-783

SEQ ID NO: 170381 - DNA, 1351 bp, Homo sapiens; identical to SEQ ID NO: 170375
  Payload ID: 13553
  Gene Symbol: PSMB8
  Gene Name: proteasome subunit beta 8
  Uniprot ID: P28062
  ENST ID: ENST00000436627
  CDS Start-End: 291-1109

SEQ ID NO: 170382 - DNA, 1025 bp, Homo sapiens; identical to SEQ ID NO: 170379
  Payload ID: 13553
  Gene Symbol: PSMB8
  Gene Name: proteasome subunit beta 8
  ENST ID: ENST00000446855
  CDS Start-End: 25-783

SEQ ID NO: 170383 - DNA, 1124 bp, Homo sapiens; identical to SEQ ID NO: 170376
  Payload ID: 13553
  Gene Symbol: PSMB8
  Gene Name: proteasome subunit beta 8
  Uniprot ID: P28062
  ENST ID: ENST00000429645
  CDS Start-End: 52-882

SEQ ID NO: 170384 - DNA, 1025 bp, Homo sapiens
  Payload ID: 13553
  Gene Symbol: PSMB8
  Gene Name: proteasome subunit beta 8
  ENST ID: ENST00000449883
  CDS Start-End: 25-783
cagatctctgggtgctgggcggtcatggcgctactagatgtatgcggagccccccgagggcagcggccggaatcggctctcccggttgcgggaagcgggcgtcgctcggacccaggacactacagtttctctatgcgatctccagagctcgctttaccccggggaatgaagcccacagaattcttccagtccctgggtggggacggagaaaggaacgttcagattgagatggcccatggcaccaccacgctcgccttcaagttccagcatggagtgattgcagcagtggattctcgggcctcagctgggtcctacattaactgtcagtactgggagcgcctgctggccaaggaatgcaggctgtactatctgcgaaatggagaacgtatttcagtgtcggcagcctccaagctgctgtccaacatgatgtgccagtaccggggcatgggcctctctatgggcagtatgatctgtggctgggataagaagggtcctggactctactacgtggatgaacatgggactcggctctcaggaaatatgttctccacgggtagtgggaacacttatgcctacggggtcatggacagtggctatcggcctaatcttagccctgaagaggcctatgaccttggccgcagggctattgcttatgccactcacagagacagctattctggaggcgttgtcaatatgtaccacatgaaggaagatggttgggtgaaagtagaaagtacagatgtcagtgacctgctgcaccagtaccgggaagccaatcaataatggtggtggtggcagctgggcaggtctcctctgggaggtcttggccgactcagggacctaagccacgttaagtccaaggagaagaagaggcctagcctgagccaaagagagagtacgggctcagcagccagaggaggccggtgaagtgcatcttctgcgtgttctctatttgaacaagcatttcccccagggaagtttctgggtgccccactaagtagaataaagaaaaacggttataaata

SEQ ID NO: 170385 - DNA, 1351 bp, Homo sapiens; identical to SEQ ID NO: 170375
  Payload ID: 13553
  Gene Symbol: PSMB8
  Gene Name: proteasome subunit beta 8
  Uniprot ID: P28062
  ENST ID: ENST00000416134
  CDS Start-End: 291-1109

SEQ ID NO: 170386 - DNA, 1025 bp, Homo sapiens; identical to SEQ ID NO: 170379
  Payload ID: 13553
  Gene Symbol: PSMB8
  Gene Name: proteasome subunit beta 8
  ENST ID: ENST00000458543
  CDS Start-End: 25-783

SEQ ID NO: 170387 - DNA, 1124 bp, Homo sapiens; identical to SEQ ID NO: 170376
  Payload ID: 13553
  Gene Symbol: PSMB8
  Gene Name: proteasome subunit beta 8
  Uniprot ID: P28062
  ENST ID: ENST00000421445
  CDS Start-End: 52-882

SEQ ID NO: 170388 - DNA, 1124 bp, Homo sapiens; identical to SEQ ID NO: 170376
  Payload ID: 13553
  Gene Symbol: PSMB8
  Gene Name: proteasome subunit beta 8
  Uniprot ID: P28062
  ENST ID: ENST00000438442
  CDS Start-End: 52-882

SEQ ID NO: 170389 - DNA, 1025 bp, Homo sapiens; identical to SEQ ID NO: 170379
  Payload ID: 13553
  Gene Symbol: PSMB8
  Gene Name: proteasome subunit beta 8
  ENST ID: ENST00000425784
  CDS Start-End: 25-783

SEQ ID NO: 170390 - DNA, 1124 bp, Homo sapiens; identical to SEQ ID NO: 170376
  Payload ID: 13553
  Gene Symbol: PSMB8
  Gene Name: proteasome subunit beta 8
  Uniprot ID: P28062
  ENST ID: ENST00000455660
  CDS Start-End: 52-882

SEQ ID NO: 170391 - DNA, 1124 bp, Homo sapiens
  Payload ID: 13553
  Gene Symbol: PSMB8
  Gene Name: proteasome subunit beta 8
  ENST ID: ENST00000446762
  CDS Start-End: 52-882
gctttcacttcctcctccgagagcggacagatctctgggtgctgggcggtcatggcgctactagatgtatgcggagccccccgagggcagcggccggaatcggctctcccggttgcgggaagcgggcgtcgctcggacccaggacactacagtttctctatgcgatctccagagctcgctttaccccggggaatgaagcccacagaattcttccagtccctgggtggggacggagaaaggaacgttcagattgagatggcccatggcaccaccacgctcgccttcaagttccagcatggagtgattgcagcagtggattctcgggcctcagctgggtcctacattagtgccttacgggtgaacaaggtgattgagattaacccttacctgcttggcaccatgtctggctgtgcagcagactgtcagtactgggagcgcctgctggccaaggaatgcaggctgtactatctgcgaaatggagaacgtatttcagtgtcggcagcctccaagctgctgtccaacatgatgtgccagtaccggggcatgggcctctctatgggcagtatgatctgtggctgggataagaagggtcctggactctactacgtggatgaacatgggactcggctctcaggaaatatgttctccacgggtagtgggaacacttatgcctacggggtcatggacagtggctatcggcctaatcttagccctgaagaggcctatgaccttggccgcagggctattgcttatgccactcacagagacagctattctggaggcgttgtcaatatgtaccacatgaaggaagatggttgggtgaaagtagaaagtacagatgtcagtgacctgctgcaccagtaccgggaagccaatcaataatggtggtggtggcagctgggcaggtctcctctgggaggtcttggccgactcagggacctaagccacgttaagtccaaggagaagaagaggcctagcctgagccaaagagagagtacgggctcagcagccagaggaggccggtgaagtgcatcttctgcgtgttctctatttgaacaagcatttcccccagggaagtttctgggtgccccactaagtagaataaagaaaaacggttataaata

SEQ ID NO: 170392 - DNA, 1025 bp, Homo sapiens; identical to SEQ ID NO: 170379
  Payload ID: 13553
  Gene Symbol: PSMB8
  Gene Name: proteasome subunit beta 8
  ENST ID: ENST00000427919
  CDS Start-End: 25-783

SEQ ID NO: 170393 - DNA, 1351 bp, Homo sapiens; identical to SEQ ID NO: 170375
  Payload ID: 13553
  Gene Symbol: PSMB8
  Gene Name: proteasome subunit beta 8
  Uniprot ID: P28062
  ENST ID: ENST00000441960
  CDS Start-End: 291-1109

SEQ ID NO: 170394 - DNA, 1351 bp, Homo sapiens; identical to SEQ ID NO: 170375
  Payload ID: 13553
  Gene Symbol: PSMB8
  Gene Name: proteasome subunit beta 8
  Uniprot ID: P28062
  ENST ID: ENST00000416564
  CDS Start-End: 291-1109

SEQ ID NO: 170395 - DNA, 1025 bp, Homo sapiens; identical to SEQ ID NO: 170379
  Payload ID: 13553
  Gene Symbol: PSMB8
  Gene Name: proteasome subunit beta 8
  ENST ID: ENST00000447073
  CDS Start-End: 25-783

SEQ ID NO: 170396 - DNA, 1351 bp, Homo sapiens; identical to SEQ ID NO: 170375
  Payload ID: 13553
  Gene Symbol: PSMB8
  Gene Name: proteasome subunit beta 8
  Uniprot ID: P28062
  ENST ID: ENST00000452573
  CDS Start-End: 291-1109

SEQ ID NO: 170397 - DNA, 1299 bp, Homo sapiens
  Payload ID: 13553
  Gene Symbol: PSMB8
  Gene Name: proteasome subunit beta 8
  Uniprot ID: P28062
  ENST ID: ENST00000435978
  CDS Start-End: 239-1057
agcaacgctaggaagggcgggcagaaagggcacgctcttgtgggtgactacaggttaggagaccgttgaacctggaggggccctaggatggaccccgtggaaagattcagagactgcgccctctccctggcgccgccttcccctacacgcggcgggtatattctgttgcagttggcccaggacctgtttccaagactctgccccctcgcacttccgtccctcctggttttgtaaagtgatgctcataggaacccccaccccgcgtgacactactcccagctcctggctgacttctagtcttctggttgaagctgcgcctttagatgacacgaccctacccacccctgtttccagcggatgcccgggcctggagcccacagaattcttccagtccctgggtggggacggagaaaggaacgttcagattgagatggcccatggcaccaccacgctcgccttcaagttccagcatggagtgattgcagcagtggattctcgggcctcagctgggtcctacattagtgccttacgggtgaacaaggtgattgagattaacccttacctgcttggcaccatgtctggctgtgcagcagactgtcagtactgggagcgcctgctggccaaggaatgcaggctgtactatctgcgaaatggagaacgtatttcagtgtcggcagcctccaagctgctgtccaacatgatgtgccagtaccggggcatgggcctctctatgggcagtatgatctgtggctgggataagaagggtcctggactctactacgtggatgaacatgggactcggctctcaggaaatatgttctccacgggtagtgggaacacttatgcctacggggtcatggacagtggctatcggcctaatcttagccctgaagaggcctatgaccttggccgcagggctattgcttatgccactcacagagacagctattctggaggcgttgtcaatatgtaccacatgaaggaagatggttgggtgaaagtagaaagtacagatgtcagtgacctgctgcaccagtaccgggaagccaatcaataatggtggtggtggcagctgggcaggtctcctctgggaggtcttggccgactcagggacctaagccacgttaagtccaaggagaagaagaggcctagcctgagccaaagagagagtacgggctcagcagccagaggaggccggtgaagtgcatcttctgcgtgttctctatttgaacaagcatttcccccagggaagtttctgggtgccccactaagtagaataaagaaaaacggttataaata

SEQ ID NO: 170398 - DNA, 1125 bp, Homo sapiens
  Payload ID: 13553
  Gene Symbol: PSMB8
  Gene Name: proteasome subunit beta 8
  Uniprot ID: P28062
  ENST ID: ENST00000457261
  CDS Start-End: 52-882
gctttcacttcctcctccgagagcggacagatctctgggtgctgggcggtcatggcgctactagatgtatgcggagccccccgagggcagcggccggaatcggctctcccggttgcgggaagcgggcgtcgctcggacccaggacactacagtttctctatgcgatctccagagctcgctttaccccggggaatgcagcccacagaattcttccagtccctgggtggggacggagaaaggaacgttcagattgagatggcccatggcaccaccacgctcgccttcaagttccagcatggagtgattgcagcagtggattctcgggcctcagctgggtcctacattagtgccttacgggtgaacaaggtgattgagattaacccttacctgcttggcaccatgtctggctgtgcagcagactgtcagtactgggagcgcctgctggccaaggaatgcaggctgtactatctgcgaaatggagaacgtatttcagtgtcggcagcctccaagctgctgtccaacatgatgtgccagtaccggggcatgggcctctctatgggcagtatgatctgtggctgggataagaagggtcctggactctactacgtggatgaacatgggactcggctctcaggaaatatgttctccacgggtagtgggaacacttatgcctacggggtcatggacagtggctatcggcctaatcttagccctgaagaggcctatgaccttggccgcagggctattgcttatgccactcacagagacagctattctggaggcgttgtcaatatgtaccacatgaaggaagatggttgggtgaaagtagaaagtacagatgtcagtgacctgctgcaccagtaccgggaagccaatcaataatggtggtggtggcagctgggcaggtctcctctgggaggtcttggccgactcagggacctaagccacgttaagtccaaggagaagaagaggcctagcctgagccaaagagagagtacgggctcagcagccagaggaggccggtgaagtgcatcttctgcgtgttctctatttgaacaagcatttcccccagggaagtttctgggtgccccactaagtagaataaagaaaaacggttataaatac

SEQ ID NO: 170399 - DNA, 782 bp, Homo sapiens
  Payload ID: 13554
  Gene Symbol: PSMB9
  Gene Name: proteasome subunit beta 9
  Uniprot ID: P28065
  ENST ID: ENST00000374859
  CDS Start-End: 70-729
gcgcgttgtgcgctgtcccaggttggaaaccagtgccccaggcggcgaggagagcggtgccttgcagggatgctgcgggcgggagcaccaaccggggacttaccccgggcgggagaagtccacaccgggaccaccatcatggcagtggagtttgacgggggcgttgtgatgggttctgattcccgagtgtctgcaggcgaggcggtggtgaaccgagtgtttgacaagctgtccccgctgcacgagcgcatctactgtgcactctctggttcagctgctgatgcccaagccgtggccgacatggccgcctaccagctggagctccatgggatagaactggaggaacctccacttgttttggctgctgcaaatgtggtgagaaatatcagctataaatatcgagaggacttgtctgcacatctcatggtagctggctgggaccaacgtgaaggaggtcaggtatatggaaccctgggaggaatgctgactcgacagccttttgccattggtggctccggcagcacctttatctatggttatgtggatgcagcatataagccaggcatgtctcccgaggagtgcaggcgcttcaccacagacgctattgctctggccatgagccgggatggctcaagcgggggtgtcatctacctggtcactattacagctgccggtgtggaccatcgagtcatcttgggcaatgaactgccaaaattctatgatgagtgaaccttccccagacttctctttcttattttgtaataaactctctagggccaaaa

SEQ ID NO: 170400 - DNA, 782 bp, Homo sapiens; identical to SEQ ID NO: 170399
  Payload ID: 13554
  Gene Symbol: PSMB9
  Gene Name: proteasome subunit beta 9
  Uniprot ID: P28065
  ENST ID: ENST00000383114
  CDS Start-End: 70-729

SEQ ID NO: 170401 - DNA, 782 bp, Homo sapiens; identical to SEQ ID NO: 170399
  Payload ID: 13554
  Gene Symbol: PSMB9
  Gene Name: proteasome subunit beta 9
  Uniprot ID: P28065
  ENST ID: ENST00000383234
  CDS Start-End: 70-729

SEQ ID NO: 170402 - DNA, 792 bp, Homo sapiens
  Payload ID: 13554
  Gene Symbol: PSMB9
  Gene Name: proteasome subunit beta 9
  ENST ID: ENST00000395330
  CDS Start-End: 149-739
ggaccatcacactggggaccggcttctctgctctcccgttatgggggtcgggggaatgatgggtcaagggtcttccgaagaaagcgagaaaggaacaggcgccttcaaaagcccacttggcgatgggttacagtaagagaccaccatcatggcagtggagtttgacgggggcgttgtgatgggttctgattcccgagtgtctgcaggcgaggcggtggtgaaccgagtgtttgacaagctgtccccgctgcacgagcgcatctactgtgcactctctggttcagctgctgatgcccaagccgtggccgacatggccgcctaccagctggagctccatgggatagaactggaggaacctccacttgttttggctgctgcaaatgtggtgagaaatatcagctataaatatcgagaggacttgtctgcacatctcatggtagctggctgggaccaacgtgaaggaggtcaggtatatggaaccctgggaggaatgctgactcgacagccttttgccattggtggctccggcagcacctttatctatggttatgtggatgcagcatataagccaggcatgtctcccgaggagtgcaggcgcttcaccacagacgctattgctctggccatgagccgggatggctcaagcgggggtgtcatctacctggtcactattacagctgccggtgtggaccatcgagtcatcttgggcaatgaactgccaaaattctatgatgagtgaaccttccccagacttctctttcttattttgtaataaactctctagggccaaaa

SEQ ID NO: 170403 - DNA, 792 bp, Homo sapiens; identical to SEQ ID NO: 170402
  Payload ID: 13554
  Gene Symbol: PSMB9
  Gene Name: proteasome subunit beta 9
  ENST ID: ENST00000399371
  CDS Start-End: 149-739

SEQ ID NO: 170404 - DNA, 640 bp, Homo sapiens
  Payload ID: 13554
  Gene Symbol: PSMB9
  Gene Name: proteasome subunit beta 9
  ENST ID: ENST00000399381
  CDS Start-End: 3-539
ggatgctgcgggcgggagcaccaaccggggacttaccccgggcgggagaagtccacaccgggaccaccatcatggcagtggagtttgacgggggcgttgtgatgggttctgattcccgagtgtctgcagggatagaactggaggaacctccacttgttttggctgctgcaaatgtggtgagaaatatcagctataaatatcgagaggacttgtctgcacatctcatggtagctggctgggaccaacgtgaaggaggtcaggtatatggaaccctgggaggaatgctgactcgacagccttttgccattggtggctccggcagcacctttatctatggttatgtggatgcagcatataagccaggcatgtctcccgaggagtgcaggcgcttcaccacagacgctacttctactaaaagaagagtatgtggatactttctaagaactcaaaaacgagaaaaccaaaatcagagggtgcatgaatatatgtgcacaggtgagaggtcactatcctcctctccactgctttcttgttcctgaacctgatactttggctccaagccttcagcagcagctaagttcttagccaagctatctgttgccatagcttcagtggtttctgtatcactacatgcatcttc

SEQ ID NO: 170405 - DNA, 792 bp, Homo sapiens; identical to SEQ ID NO: 170402
  Payload ID: 13554
  Gene Symbol: PSMB9
  Gene Name: proteasome subunit beta 9
  ENST ID: ENST00000399607
  CDS Start-End: 149-739

SEQ ID NO: 170406 - DNA, 640 bp, Homo sapiens; identical to SEQ ID NO: 170404
  Payload ID: 13554
  Gene Symbol: PSMB9
  Gene Name: proteasome subunit beta 9
  ENST ID: ENST00000399619
  CDS Start-End: 3-539

SEQ ID NO: 170407 - DNA, 640 bp, Homo sapiens; identical to SEQ ID NO: 170404
  Payload ID: 13554
  Gene Symbol: PSMB9
  Gene Name: proteasome subunit beta 9
  ENST ID: ENST00000445315
  CDS Start-End: 3-539

SEQ ID NO: 170408 - DNA, 782 bp, Homo sapiens
  Payload ID: 13554
  Gene Symbol: PSMB9
  Gene Name: proteasome subunit beta 9
  Uniprot ID: P28065
  ENST ID: ENST00000434471
  CDS Start-End: 70-729
gcgcgttgtgcgctgtcccaggttggaaaccagtgccccaggcggcgaggagagcggtgccttgcagggatgctgcgggcgggagcaccaaccggggacttaccccgggcgggagaagtccacaccgggaccaccatcatggcagtggagtttgacgggggcgttgtgatgggttctgattcccgagtgtctgcaggcgaggcggtggtgaaccgagtgtttgacaagctgtccccgctgcacgagcacatctactgtgcactctctggttcagctgctgatgcccaagccgtggccgacatggccgcctaccagctggagctccatgggatagaactggaggaacctccacttgttttggctgctgcaaatgtggtgagaaatatcagctataaatatcgagaggacttgtctgcacatctcatggtagctggctgggaccaacgtgaaggaggtcaggtatatggaaccctgggaggaatgctgactcgacagccttttgccattggtggctccggcagcacctttatctatggttatgtggatgcagcatataagccaggcatgtctcccgaggagtgcaggcgcttcaccacagacgctattgctctggccatgagccgggatggctcaagcgggggtgtcatctacctggtcactattacagctgccggtgtggaccatcgagtcatcttgggcaatgaactgccaaaattctatgatgagtgaaccttccccagacttctctttcttattttgtaataaactctctagggccaaaa

SEQ ID NO: 170409 - DNA, 439 bp, Homo sapiens
  Payload ID: 13554
  Gene Symbol: PSMB9
  Gene Name: proteasome subunit beta 9
  ENST ID: ENST00000414474
  CDS Start-End: 45-439
gccaggcgagccaggaaggaccagcgggcgaggtgaccaccatcatggcagtggagtttgacgggggcgttgtgatgggttctgattcccgagtgtctgcaggcgaggcggtggtgaaccgagtgtttgacaagctgtccccgctgcacgagcgcatctactgtgcactctctggttcagctgctgatgcccaagccgtggccgacatggccgcctaccagctggagctccatgggatagaactggaggaacctccacttgttttggctgctgcaaatgtggtgagaaatatcagctataaatatcgagaggacttgtctgcacatctcatggtagctggctgggaccaacgtgaaggaggtcaggtatatggaaccctgggaggaatgctgactcgacagccttttgccattggtggctccggcagcacctttatcta

SEQ ID NO: 170410 - DNA, 439 bp, Homo sapiens
  Payload ID: 13554
  Gene Symbol: PSMB9
  Gene Name: proteasome subunit beta 9
  ENST ID: ENST00000455846
  CDS Start-End: 45-439
gccaggcgagccaggaaggaccagcgggcgaggtgaccaccatcatggcagtggagtttgacgggggcgttgtgatgggttctgattcccgagtgtctgcaggcgaggcggtggtgaaccgagtgtttgacaagctgtccccgctgcacgagcacatctactgtgcactctctggttcagctgctgatgcccaagccgtggccgacatggccgcctaccagctggagctccatgggatagaactggaggaacctccacttgttttggctgctgcaaatgtggtgagaaatatcagctataaatatcgagaggacttgtctgcacatctcatggtagctggctgggaccaacgtgaaggaggtcaggtatatggaaccctgggaggaatgctgactcgacagccttttgccattggtggctccggcagcacctttatcta

SEQ ID NO: 170411 - DNA, 782 bp, Homo sapiens; identical to SEQ ID NO: 170399
  Payload ID: 13554
  Gene Symbol: PSMB9
  Gene Name: proteasome subunit beta 9
  Uniprot ID: P28065
  ENST ID: ENST00000444284
  CDS Start-End: 70-729

SEQ ID NO: 170412 - DNA, 792 bp, Homo sapiens
  Payload ID: 13554
  Gene Symbol: PSMB9
  Gene Name: proteasome subunit beta 9
  ENST ID: ENST00000434083
  CDS Start-End: 149-739
ggaccatcacactggggaccggcttctctgctctcccgttatgggggtcgggggaatgatgggtcaagggtcttccgaagaaagcgagaaaggaacaggcgccttcaaaagcccacttggcgatgggttacagtaagagaccaccatcatggcagtggagtttgacgggggcgttgtgatgggttctgattcccgagtgtctgcaggcgaggcggtggtgaaccgagtgtttgacaagctgtccccgctgcacgagcacatctactgtgcactctctggttcagctgctgatgcccaagccgtggccgacatggccgcctaccagctggagctccatgggatagaactggaggaacctccacttgttttggctgctgcaaatgtggtgagaaatatcagctataaatatcgagaggacttgtctgcacatctcatggtagctggctgggaccaacgtgaaggaggtcaggtatatggaaccctgggaggaatgctgactcgacagccttttgccattggtggctccggcagcacctttatctatggttatgtggatgcagcatataagccaggcatgtctcccgaggagtgcaggcgcttcaccacagacgctattgctctggccatgagccgggatggctcaagcgggggtgtcatctacctggtcactattacagctgccggtgtggaccatcgagtcatcttgggcaatgaactgccaaaattctatgatgagtgaaccttccccagacttctctttcttattttgtaataaactctctagggccaaaa

SEQ ID NO: 170413 - DNA, 792 bp, Homo sapiens; identical to SEQ ID NO: 170402
  Payload ID: 13554
  Gene Symbol: PSMB9
  Gene Name: proteasome subunit beta 9
  ENST ID: ENST00000451862
  CDS Start-End: 149-739

SEQ ID NO: 170414 - DNA, 439 bp, Homo sapiens; identical to SEQ ID NO: 170409
  Payload ID: 13554
  Gene Symbol: PSMB9
  Gene Name: proteasome subunit beta 9
  ENST ID: ENST00000415658
  CDS Start-End: 45-439

SEQ ID NO: 170415 - DNA, 792 bp, Homo sapiens; identical to SEQ ID NO: 170412
  Payload ID: 13554
  Gene Symbol: PSMB9
  Gene Name: proteasome subunit beta 9
  ENST ID: ENST00000439630
  CDS Start-End: 149-739

SEQ ID NO: 170416 - DNA, 661 bp, Homo sapiens
  Payload ID: 13554
  Gene Symbol: PSMB9
  Gene Name: proteasome subunit beta 9
  ENST ID: ENST00000418861
  CDS Start-End: 25-561
cgaggagagcggtgccttgcagggatgctgcgggcgggagcaccaaccggggacttaccccgggcgggagaagtccacaccgggaccaccatcatggcagtggagtttgacgggggcgttgtgatgggttctgattcccgagtgtctgcagggatagaactggaggaacctccacttgttttggctgctgcaaatgtggtgagaaatatcagctataaatatcgagaggacttgtctgcacatctcatggtagctggctgggaccaacgtgaaggaggtcaggtatatggaaccctgggaggaatgctgactcgacagccttttgccattggtggctccggcagcacctttatctatggttatgtggatgcagcatataagccaggcatgtctcccgaggagtgcaggcgcttcaccacagacgctacttctactaaaagaagagtatgtggatactttctaagaactcaaaaacgagaaaaccaaaatcagagggtgcatgaatatatgtgcacaagtgagaggtcactatcctcctctccactgctttcttgttcctgaacctgatactttggctccaagccttcagcagcagctaagttcttagcaagctatctgttgccatagcttcagtggtttctgtatcactacatgcatcttc

SEQ ID NO: 170417 - DNA, 792 bp, Homo sapiens; identical to SEQ ID NO: 170402
  Payload ID: 13554
  Gene Symbol: PSMB9
  Gene Name: proteasome subunit beta 9
  ENST ID: ENST00000420182
  CDS Start-End: 149-739

SEQ ID NO: 170418 - DNA, 439 bp, Homo sapiens; identical to SEQ ID NO: 170410
  Payload ID: 13554
  Gene Symbol: PSMB9
  Gene Name: proteasome subunit beta 9
  ENST ID: ENST00000419512
  CDS Start-End: 45-439

SEQ ID NO: 170419 - DNA, 792 bp, Homo sapiens; identical to SEQ ID NO: 170412
  Payload ID: 13554
  Gene Symbol: PSMB9
  Gene Name: proteasome subunit beta 9
  ENST ID: ENST00000422904
  CDS Start-End: 149-739

SEQ ID NO: 170420 - DNA, 439 bp, Homo sapiens; identical to SEQ ID NO: 170409
  Payload ID: 13554
  Gene Symbol: PSMB9
  Gene Name: proteasome subunit beta 9
  ENST ID: ENST00000417566
  CDS Start-End: 45-439

SEQ ID NO: 170421 - DNA, 782 bp, Homo sapiens; identical to SEQ ID NO: 170399
  Payload ID: 13554
  Gene Symbol: PSMB9
  Gene Name: proteasome subunit beta 9
  Uniprot ID: P28065
  ENST ID: ENST00000422729
  CDS Start-End: 70-729

SEQ ID NO: 170422 - DNA, 782 bp, Homo sapiens; identical to SEQ ID NO: 170408
  Payload ID: 13554
  Gene Symbol: PSMB9
  Gene Name: proteasome subunit beta 9
  Uniprot ID: P28065
  ENST ID: ENST00000453059
  CDS Start-End: 70-729

SEQ ID NO: 170423 - DNA, 640 bp, Homo sapiens; identical to SEQ ID NO: 170404
  Payload ID: 13554
  Gene Symbol: PSMB9
  Gene Name: proteasome subunit beta 9
  ENST ID: ENST00000448066
  CDS Start-End: 3-539

SEQ ID NO: 170424 - DNA, 439 bp, Homo sapiens; identical to SEQ ID NO: 170409
  Payload ID: 13554
  Gene Symbol: PSMB9
  Gene Name: proteasome subunit beta 9
  ENST ID: ENST00000434587
  CDS Start-End: 45-439

SEQ ID NO: 170425 - DNA, 673 bp, Homo sapiens
  Payload ID: 13554
  Gene Symbol: PSMB9
  Gene Name: proteasome subunit beta 9
  ENST ID: ENST00000425855
  CDS Start-End: 25-561
cgaggagagcggtgccttgcagggatgctgcgggcgggagcaccaaccggggacttaccccgggcgggagaagtccacaccgggaccaccatcatggcagtggagtttgacgggggcgttgtgatgggttctgattcccgagtgtctgcagggatagaactggaggaacctccacttgttttggctgctgcaaatgtggtgagaaatatcagctataaatatcgagaggacttgtctgcacatctcatggtagctggctgggaccaacgtgaaggaggtcaggtatatggaaccctgggaggaatgctgactcgacagccttttgccattggtggctccggcagcacctttatctatggttatgtggatgcagcatataagccaggcatgtctcccgaggagtgcaggcgcttcaccacagacgctacttctactaaaagaagagtatgtggatactttctaagaactcaaaaacgagaaaaccaaaatcagagggtgcatgaatatatgtgcacaagtgagaggtcactatcctcctctccactgctttcttgttcctgaacctgatactttggctccaagccttcagcagcagctaagttcttagcaagctatctgttgccatagcttcagtggtttctgtatcactacatgcatcttcatcatcacccat

SEQ ID NO: 170426 - DNA, 439 bp, Homo sapiens; identical to SEQ ID NO: 170410
  Payload ID: 13554
  Gene Symbol: PSMB9
  Gene Name: proteasome subunit beta 9
  ENST ID: ENST00000438515
  CDS Start-End: 45-439

SEQ ID NO: 170427 - DNA, 439 bp, Homo sapiens; identical to SEQ ID NO: 170409
  Payload ID: 13554
  Gene Symbol: PSMB9
  Gene Name: proteasome subunit beta 9
  ENST ID: ENST00000413480
  CDS Start-End: 45-439

SEQ ID NO: 170428 - DNA, 782 bp, Homo sapiens; identical to SEQ ID NO: 170408
  Payload ID: 13554
  Gene Symbol: PSMB9
  Gene Name: proteasome subunit beta 9
  Uniprot ID: P28065
  ENST ID: ENST00000427870
  CDS Start-End: 70-729

SEQ ID NO: 170429 - DNA, 661 bp, Homo sapiens; identical to SEQ ID NO: 170416
  Payload ID: 13554
  Gene Symbol: PSMB9
  Gene Name: proteasome subunit beta 9
  ENST ID: ENST00000423563
  CDS Start-End: 25-561

SEQ ID NO: 170430 - DNA, 4080 bp, Homo sapiens
  Payload ID: 13555
  Gene Symbol: POT1
  Gene Name: protection of telomeres 1
  Uniprot ID: Q9NUX5
  ENST ID: ENST00000357628
  CDS Start-End: 600-2504
cagtatttcgccaaacctccaggcgccatcagtgtgtgaaccgttacgcagctggtccaccgcgggcggagaacaagcgactatgcccagggatcctgcacgcatgcgtggagctgaaccgtcagcgtgcgtgtgacgtcacctgcgcgcccgcctaaactcttcctagggttctttctagagtacggcagcaagttgtcagattccctagttgaatttgctttggacatcagtgtgaagcagaactgatatgccacttgaattaataaaggaagtcaatggggtgcctgaagttcagccgctgagtaaattacataaagtagatttcggatccctacagccaggttacaattatagcaagaaatatattcagggaaaactttcacttatctcttctttaacttatcgtggaaataaaacagctgttttgcagattggactacaaggacaccattgcagtggctagatttattgtttttttagcttcttcatctacaagcagagatggtaaaccttgcatatttttgaaagcatttgaagacctcaaatcaactgtttatgtttatgtcaaatctttaagagatttttctacagaatcaatgtctttggttccagcaacaaattatatatatacacccctgaatcaacttaagggtggtacaattgtcaatgtctatggtgttgtgaagttctttaagcccccatatctaagcaaaggaactgattattgctcagttgtaactattgtggaccagacaaatgtaaaactaacttgcctgctctttagtggaaactatgaagcccttccaataatttataaaaatggagatattgttcgctttcacaggctgaagattcaagtatataaaaaggagactcagggtatcaccagctctggctttgcatctttgacgtttgagggaactttgggagcccctatcatacctcgcacttcaagcaagtattttaacttcactactgaggaccacaaaatggtagaagccttacgtgtttgggcatctactcatatgtcaccgtcttggacattactaaaattgtgtgatgttcagccaatgcagtattttgacctgacttgtcagctcttgggcaaagcagaagtggacggagcatcatttcttctaaaggtatgggatggcaccaggacaccatttccatcttggagagtcttaatacaagaccttgttcttgaaggtgatttaagtcacatccatcggctacaaaatctgacaatagacattttagtctacgataaccatgttcatgtggcaagatctctgaaggttggaagctttcttagaatctatagccttcataccaaacttcaatcaatgaattcagagaatcagacaatgttaagtttagagtttcatcttcatggaggtaccagttacggtcggggaatcagggtcttgccagaaagtaactctgatgtggatcaactgaaaaaggatttagaatctgcaaatttgacagccaatcagcattcagatgttatctgtcaatcagaacctgacgacagctttccaagctctggatcagtatcattatacgaggtagaaagatgtcaacagctatctgctacaatacttacagatcatcagtatttggagaggacaccactatgtgccattttgaaacaaaaagctcctcaacaataccgcatccgagcaaaattgaggtcatataagcccagaagactatttcagtctgttaaacttcattgccctaaatgtcatttgctgcaagaagttccacatgagggcgatttggatataatttttcaggatggtgcaactaaaaccccagatgtcaagctacaaaatacatcattatatgattcaaaaatctggaccactaaaaatcaaaaaggacgaaaagtagcagttcattttgtgaaaaataatggtattctcccgctttcaaatgaatgtctacttttgatagaaggaggtacactcagtgaaatttgcaaactctcgaacaagtttaatagtgtaattcctgtgagatctggccacgaagacctggaacttttggacctttcagcaccatttcttatacaaggaacaatacatcactatggatgtaaacagtgttctagtttgagatccatacaaaatctaaattccctggttgataaaacatcgtggattccttcttctgtggcagaagcactgggtattgtacccctccaatatgtgtttgttatgacctttacacttgatgatggaacaggagtactagaagcctatctcatggattctgacaaattcttccagattccagcatcagaagttctgatggatgatgaccttcagaaaagtgtggatatgatcatggatatgttttgtcctccaggaataaaaattgatgcatatccgtggttggaatgcttcatcaagtcatacaatgtcacaaatggaacagataatcaaatttgctatcagatttttgacaccacagttgcagaagatgtaatctaatattgccatccaatttagcatacataaaatgttgccactcaccttccctgtttgagcttcttttcctgacctgagttttgtatcagcaatgttgatgatgttagcatgggtatgggattagaaaatgtccttaccttaaatctcttggcttttactgggtgcaaggtaaataatggctatggattttgttttgctttctgttttgcttttgtacaaagagacctgcttaaacaagtactgctgagataagtgtctgatcaagctacagtgtactttaagtagaaatggcaaagttgctttgttggggtgctgatactgatgattttaggataaattcatttctttaaacttgtaatacatggttttattgcttgtttctctccaggatagtagagatttctctatttcacctcaacctaataaaagtggtcagatttataatgttaatgacttaatattatccttttctaatagtctcatgtaaaatatgccgctattacaacttacaactaattgaatgagatgttaacttagtaaaatagtttgatttttacctgacagtgtttgtcaaatttaaaatcatgaatattcaattttatacaaacatttatatatatatatatagatttgtgtatgttatttgccaaagacagatataaattacctggtttaatattagtgaagaataaataagtgcacacatttcaactgtttcatttatttgccctaagttgagctgaaaaatgatatgaggcaaagaatcgaaataggtgtggcaatgcagcagatgtttagggctgtctacatcccaggtactgtgctaagcactaaacatgtatttgatcctcacagcaacctatttttccgataagaaatctgaggcttgattgataagctgacttgactaagttcacacagtttgtaaaagctagagtctgtgccttaattcacataatctctattcagagcctgtactgttaaccactcaaggattctggaacagaagctaacagttttctgcaacgagtctttgacttaaacatctgaaataacattggaaatagattataagaggagtcagtgtgtttttctatagtttcaaaatacttttaacatcttattgtcaaaaagattggataactgactttctttgctcataataactctaaattctagttcctgagtacattaacacatcttctttacctaactaccaatgtcccccatcatcgacttatcagcttgtttgagacaatgagaaagactgattttattttcaagaatatagactcttggttcaaaacattttcaggaaaaatattttaaaaccctacagttgaacaggtgtgtttccgtgttgatgatgtgctcaggatacaaaggtgaaataaacattttttctgccttcaggaagccctcaatctagaagagtagaggtccaaaggtgccatatgttcacactgtgagcctgcaagatctccacgttaacaaaggaaaactcttcctatgaatcttcatgatgataggccatgtctcttcttatttttgttttaaataaacatccaccttatcatga

SEQ ID NO: 170431 - DNA, 3950 bp, Homo sapiens
  Payload ID: 13555
  Gene Symbol: POT1
  Gene Name: protection of telomeres 1
  ENST ID: ENST00000393329
  CDS Start-End: 864-2375
gtcagtatttcgccaaacctccaggcgccatcagtgtgtgaaccgttacgcagctggtccaccgcgggcggagaacaagcgactatgcccagggatcctgcacgcatgcgtggagctgaaccgtcagcgtgcgtgtgacgtcacctgcgcgcccgcctaaactcttcctagggttctttctagagtacggcagcaagttgtcagattccctagttgaatttgctttggacatcagtgtgaagcagaactgatatgccacttgaattaataaaggaagtcaatggggtgcctgaagttcagccgctgagtaaattacataaagtagatttcggatccctacagccaggttacaattatagcaagaaatatattcagggaaaactttcacttatctcttctttaacttatcgtggaaataaaacagctgttttgcagattggactacaaggacaccattgcagtggctagatttattgtttttttagcttcttcatctacaagcagagatggtaaaccttgcatatttttgaaagcatttgaagacctcaaatcaactgtttatgtttatgtcaaatctttaagagatttttctacagaatcaatgtctttggttccagcaacaaattatatatatacacccctgaatcaacttaagggtggtacaattgtcaatgtctatggtgttgtgaagttctttaagcccccatatctaagcaaaggaactgattcaagtatataaaaaggagactcagggtatcaccagctctggctttgcatctttgacgtttgagggaactttgggagcccctatcatacctcgcacttcaagcaagtattttaacttcactactgaggaccacaaaatggtagaagccttacgtgtttgggcatctactcatatgtcaccgtcttggacattactaaaattgtgtgatgttcagccaatgcagtattttgacctgacttgtcagctcttgggcaaagcagaagtggacggagcatcatttcttctaaaggtatgggatggcaccaggacaccatttccatcttggagagtcttaatacaagaccttgttcttgaaggtgatttaagtcacatccatcggctacaaaatctgacaatagacattttagtctacgataaccatgttcatgtggcaagatctctgaaggttggaagctttcttagaatctatagccttcataccaaacttcaatcaatgaattcagagaatcagacaatgttaagtttagagtttcatcttcatggaggtaccagttacggtcggggaatcagggtcttgccagaaagtaactctgatgtggatcaactgaaaaaggatttagaatctgcaaatttgacagccaatcagcattcagatgttatctgtcaatcagaacctgacgacagctttccaagctctggatcagtatcattatacgaggtagaaagatgtcaacagctatctgctacaatacttacagatcatcagtatttggagaggacaccactatgtgccattttgaaacaaaaagctcctcaacaataccgcatccgagcaaaattgaggtcatataagcccagaagactatttcagtctgttaaacttcattgccctaaatgtcatttgctgcaagaagttccacatgagggcgatttggatataatttttcaggatggtgcaactaaaaccccagatgtcaagctacaaaatacatcattatatgattcaaaaatctggaccactaaaaatcaaaaaggacgaaaagtagcagttcattttgtgaaaaataatggtattctcccgctttcaaatgaatgtctacttttgatagaaggaggtacactcagtgaaatttgcaaactctcgaacaagtttaatagtgtaattcctgtgagatctggccacgaagacctggaacttttggacctttcagcaccatttcttatacaaggaacaatacatcactatggatgtaaacagtgttctagtttgagatccatacaaaatctaaattccctggttgataaaacatcgtggattccttcttctgtggcagaagcactgggtattgtacccctccaatatgtgtttgttatgacctttacacttgatgatggaacaggagtactagaagcctatctcatggattctgacaaattcttccagattccagcatcagaagttctgatggatgatgaccttcagaaaagtgtggatatgatcatggatatgttttgtcctccaggaataaaaattgatgcatatccgtggttggaatgcttcatcaagtcatacaatgtcacaaatggaacagataatcaaatttgctatcagatttttgacaccacagttgcagaagatgtaatctaatattgccatccaatttagcatacataaaatgttgccactcaccttccctgtttgagcttcttttcctgacctgagttttgtatcagcaatgttgatgatgttagcatgggtatgggattagaaaatgtccttaccttaaatctcttggcttttactgggtgcaaggtaaataatggctatggattttgttttgctttctgttttgcttttgtacaaagagacctgcttaaacaagtactgctgagataagtgtctgatcaagctacagtgtactttaagtagaaatggcaaagttgctttgttggggtgctgatactgatgattttaggataaattcatttctttaaacttgtaatacatggttttattgcttgtttctctccaggatagtagagatttctctatttcacctcaacctaataaaagtggtcagatttataatgttaatgacttaatattatccttttctaatagtctcatgtaaaatatgccgctattacaacttacaactaattgaatgagatgttaacttagtaaaatagtttgatttttacctgacagtgtttgtcaaatttaaaatcatgaatattcaattttatacaaacatttatatatatatatatagatttgtgtatgttatttgccaaagacagatataaattacctggtttaatattagtgaagaataaataagtgcacacatttcaactgtttcatttatttgccctaagttgagctgaaaaatgatatgaggcaaagaatcgaaataggtgtggcaatgcagcagatgtttagggctgtctacatcccaggtactgtgctaagcactaaacatgtatttgatcctcacagcaacctatttttccgataagaaatctgaggcttgattgataagctgacttgactaagttcacacagtttgtaaaagctagagtctgtgccttaattcacataatctctattcagagcctgtactgttaaccactcaaggattctggaacagaagctaacagttttctgcaacgagtctttgacttaaacatctgaaataacattggaaatagattataagaggagtcagtgtgtttttctatagtttcaaaatacttttaacatcttattgtcaaaaagattggataactgactttctttgctcataataactctaaattctagttcctgagtacattaacacatcttctttacctaactaccaatgtcccccatcatcgacttatcagcttgtttgagacaatgagaaagactgattttattttcaagaatatagactcttggttcaaaacattttcaggaaaaatattttaaaaccctacagttgaacaggtgtgtttccgtgttgatgatgtgctcaggatacaaaggtgaaataaacattttttctgccttcaggaagccctcaatctagaagagtagaggtccaaaggtgccatatgttcacactgtgagcctgcaagatctccacgttaacaaaggaaaactcttcctatgaatcttcatgatgataggccatgtctcttcttatttttgttttaaataaacatccaccttatcatg

SEQ ID NO: 170432 - DNA, 806 bp, Homo sapiens
  Payload ID: 13555
  Gene Symbol: POT1
  Gene Name: protection of telomeres 1
  ENST ID: ENST00000446993
  CDS Start-End: 560-806
gaaccgttacgcagctggtccaccgcgggcggagaacaagcgactatgcccagggatcctgcacgcatgcgtggagctgaaccgtcagcgtgcgtgtgacgtcacctgcgcgcccgcctaaactcttcctagggttctttctagagtacggcaagttgtcagattccctagttgaatttgctttggacatcagtgtgaagcagaactgatatgccacttgaattaataaaggaagtcaatggggtgcctgaagttcagccgctgagtaaattacataaagtagatttcggatccctacagccaggttacaattatagcaagaaatatattcagggaaaactttcacttatctcttctttaacttatcgtggaaataaaacagctgttttgcagattggactacaaggacaccattgcagtggctagatttattgtttttttagcttcttcatctacaagcagagatggtaaaccttgcatatttttgaaagcatttgaagacctcaaatcaactgtttatgtttatgtcaaatctttaagagatttttctacagaatcaatgtctttggttccagcaacaaattatatatatacacccctgaatcaacttaagggtggtacaattgtcaatgtctatggtgttgtgaagttctttaagcccccatatctaagcaaaggaactgattattgctcagttgtaactattgtggaccagacaaatgtaaaactaacttgcctgctctttagtggaaactatgaagcccttccaataatttataaaaatggagatattgttcgctttcaca

SEQ ID NO: 170433 - DNA, 587 bp, Homo sapiens
  Payload ID: 13555
  Gene Symbol: POT1
  Gene Name: protection of telomeres 1
  ENST ID: ENST00000430927
  CDS Start-End: 1-256
tggaacaggagtactagaagcctatctcatggattctgacaaattcttccagattccagcatcagaagttctgatggatgatgaccttcagaaaagtgtggatatgatcatggatatgttttgtcctccaggaataaaaattgatgcatatccgtggttggaatgcttcatcaagtcatacaatgtcacaaatggaacagataatcaaatttgctatcagatttttgacaccacagttgcagaagatgtaatctaatattgccatccaatttagcatacataaaatgttgccactcaccttccctgtttgagcttcttttcctgacctgagttttgtatcagcaatgttgatgatgttagcatgggtatgggattagaaaatgtccttaccttaaatctcttggcttttactgggtgcaaggaagccctcaatctagaagagtagaggtccaaaggtgccatatgttcacactgtgagcctgcaagatctccacgttaacaaaggaaaactcttcctatgaatcttcatgatgataggccatgtctcttcttatttttgttttaaataaacatccaccttatcatga

SEQ ID NO: 170434 - DNA, 579 bp, Homo sapiens
  Payload ID: 13555
  Gene Symbol: POT1
  Gene Name: protection of telomeres 1
  ENST ID: ENST00000429326
  CDS Start-End: 30-167
aatctttaagagatttttctacagaatcaatgtctttggttccagcaacaaattatatatatacacccctgaatcaacttaagggtggtacaattgtcaatgtctatggtgttgtgaagttctttaagcccccatatctaagcaaaggaactgattcaagtatataaaaaggagactcagggtatcaccagctctggctttgcatctttgacgtttgagggaactttgggagcccctatcatacctcgcacttcaagcaagtattttaacttcactactgaggaccacaaaatggtagaagccttacgtgtttgggcatctactcatatgtcaccgtcttggacattactaaaattgtgtgatgttcagccaatgcagtattttgacctgacttgtcagctcttgggcaaagcagaagtggacggagcatcatttcttctaaaggtatgggatggcaccaggacaccatttccatcttggagagtcttaatacaagaccttgttcttgaaggtgatttaagtcacatccatcggctacaaaatctgacaatagacattttagtctacgataaccatgtt

SEQ ID NO: 170435 - DNA, 542 bp, Homo sapiens
  Payload ID: 13555
  Gene Symbol: POT1
  Gene Name: protection of telomeres 1
  ENST ID: ENST00000436534
  CDS Start-End: 1-415
atgtaaacagtgttctagtttgagatccatacaaaatctaaattccctggttgataaaacatcgtggattccttcttctgtggcagaagcactgggtattgtacccctccaatatgtgtttgttatgacctttacacttgatgatggaacaggagtactagaagcctatctcatggattctgacaaattcttccagattccagcatcagaagttctgatggatgatgaccttcagaaaagtgtggatatgatcatggatatgttttgtcctccaggaataaaaattgatgcatatccgtggttggaatgcttcatcaagtcatacaatgtcacaaatggaacagataatcaaatttgctatcagatttttgacaccacagttgcagaagatgaagccctcaatctagaagagtagaggtccaaaggtgccatatgttcacactgtgagcctgcaagatctccacgttaacaaaggaaaactcttcctatgaatcttcatgatgataggccatgtctcttcttatttttgttttaaataaaca

SEQ ID NO: 170436 - DNA, 368 bp, Homo sapiens
  Payload ID: 13555
  Gene Symbol: POT1
  Gene Name: protection of telomeres 1
  ENST ID: ENST00000487564
  CDS Start-End: 1-234
aaagcagaagtggacggagcatcatttcttctaaaggtatgggatggcaccaggacaccatttccatcttggagagtcttaatacaagaccttgttcttgaaggtgatttaagtcacatccatcggctacaaaatctgacaatagacattttagtctacgataaccatgttcatgtggcaagatctctgaaggtgatgtatagtaggaaaaaatgttattttatgtttttataaattatagtgatttttgctcatgtaaattttttatatatggttacatgtataggtgatacagtctagaaattatatttatttctttgatttttaagttgtaaaatgtatgttacaataaattattaaaagataaa

SEQ ID NO: 170437 - DNA, 2036 bp, Homo sapiens
  Payload ID: 13555
  Gene Symbol: POT1
  Gene Name: protection of telomeres 1
  ENST ID: ENST00000608057
  CDS Start-End: 12-1034
ctacagaatcaatgtctttggttccagcaacaaattatatatatacacccctgaatcaacttaagggtggtacaattgtcaatgtctatggtgttgtgaagttctttaagcccccatatctaagcaaaggaactgattattgctcagttgtaactattgtggaccagacaaatgtaaaactaacttgcctgctctttagtggaaactatgaagcccttccaataatttataaaaatggagatattgttcgctttcacaggctgaagattcaagtatataaaaaggagactcagggtatcaccagctctggctttgcatctttgacgtttgagggaactttgggagcccctatcatacctcgcacttcaagcaagtattttaacttcactactgaggaccacaaaatggtagaagccttacgtgtttgggcatctactcatatgtcaccgtcttggacattactaaaattgtgtgatgttcagccaatgcagtattttgacctgacttgtcagctcttgggcaaagcagaagtggacggagcatcatttcttctaaaggtatgggatggcaccaggacaccatttccatcttggagagtcttaatacaagaccttgttcttgaaggtgatttaagtcacatccatcggctacaaaatctgacaatagacattttagtctacgataaccatgttcatgtggcaagatctctgaaggttggaagctttcttagaatctatagccttcataccaaacttcaatcaatgaattcagagaatcagacaatgttaagtttagagtttcatcttcatggaggtaccagttacggtcggggaatcagggtcttgccagaaagtaactctgatgtggatcaactgaaaaaggatttagaatctgcaaatttgacagccaatcagcattcagatgttatctgtcaatcagaacctgacgacagctttccaaatggagtctcgcttcgtcctccaggctggagttcagtggcacggtctcggctcattgcagcctccacctcctgagttcaagcttctcctgcctcagcctcccaagtagctgggattacaggctctggatcagtatcattatacgaggtagaaagatgtcaacagctatctgctacaatacttacagatcatcagtatttggagaggacaccactatgtgccattttgaaacaaaaagctcctcaacaataccgcatccgagcaaaattgaggtcatataagcccagaagactatttcagtctgttaaacttcattgccctaaatgtcatttgctgcaagaagttccacatgagggcgatttggatataatttttcaggatggtgcaactaaaaccccagatgtcaagctacaaaatacatcattatatgattcaaaaatctggaccactaaaaatcaaaaaggacgaaaagtagcagttcattttgtgaaaaataatggtattctcccgctttcaaatgaatgtctacttttgatagaaggaggtacactcagtgaaatttgcaaactctcgaacaagtttaatagtgtaattcctgtgagatctggccacgaagacctggaacttttggacctttcagcaccatttcttatacaaggaacaatacatcactatggatgtaaacagtgttctagtttgagatccatacaaaatctaaattccctggttgataaaacatcgtggattccttcttctgtggcagaagcactgggtattgtacccctccaatatgtgtttgttatgacctttacacttgatgatggaacaggagtactagaagcctatctcatggattctgacaaattcttccagattccagcatcagaagttctgatggatgatgaccttcagaaaagtgtggatatgatcatggatatgttttgtcctccaggaataaaaattgatgcatatccgtggttggaatgcttcatcaagtcatacaatgtcacaaatggaacagataatcaaatttgctatcagatttttgacaccacagttgcagaagatgtaatctaa

SEQ ID NO: 170438 - DNA, 1827 bp, Homo sapiens
  Payload ID: 13555
  Gene Symbol: POT1
  Gene Name: protection of telomeres 1
  ENST ID: ENST00000607932
  CDS Start-End: 12-1568
ctacagaatcaatgtctttggttccagcaacaaattatatatatacacccctgaatcaacttaagggtggtacaattgtcaatgtctatggtgttgtgaagttctttaagcccccatatctaagcaaaggaactgattattgctcagttgtaactattgtggaccagacaaatgtaaaactaacttgcctgctctttagtggaaactatgaagcccttccaataatttataaaaatggagatattgttcgctttcacaggctgaagattcaagtatataaaaaggagactcagggtatcaccagctctggctttgcatctttgacgtttgagggaactttgggagcccctatcatacctcgcacttcaagcaagtattttaacttcactactgaggaccacaaaatggtagaagccttacgtgtttgggcatctactcatatgtcaccgtcttggacattactaaaattgtgtgatgttcagccaatgcagtattttgacctgacttgtcagctcttgggcaaagcagaagtggacggagcatcatttcttctaaaggtatgggatggcaccaggacaccatttccatcttggagagtcttaatacaagaccttgttcttgaaggtgatttaagtcacatccatcggctacaaaatctgacaatagacattttagtctacgataaccatgttcatgtggcaagatctctgaaggttggaagctttcttagaatctatagccttcataccaaacttcaatcaatgaattcagagaatcagacaatgttaagtttagagtttcatcttcatggaggtaccagttacggtcggggaatcagggtcttgccagaaagtaactctgatgtggatcaactgaaaaaggatttagaatctgcaaatttgacagccaatcagcattcagatgttatctgtcaatcagaacctgacgacagctttccaagctctggatcagtatcattatacgaggtagaaagatgtcaacagctatctgctacaatacttacagatcatcagtatttggagaggacaccactatgtgccattttgaaacaaaaagctcctcaacaataccgcatccgagcaaaattgaggtcatataagcccagaagactatttcagtctgttaaacttcattgccctaaatgtcatttgctgcaagaagttccacatgagggcgatttggatataatttttcaggatggtgcaactaaaaccccagatgtcaagctacaaaatacatcattatatgattcaaaaatctggaccactaaaaatcaaaaaggacgaaaagtagcagttcattttgtgaaaaataatggtattctcccgctttcaaatgaatgtctacttttgatagaaggaggtacactcagtgaaatttgcaaactctcgaacaagtttaatagtgtaattcctgtgagatctggccacgaagacctggaacttttggacctttcagcaccatttcttatacaaggaacaatacatcactatggcactgggtattgtacccctccaatatgtgtttgttatgacctttacacttgatgatggaacaggagtactagaagcctatctcatggattctgacaaattcttccagattccagcatcagaagttctgatggatgatgaccttcagaaaagtgtggatatgatcatggatatgttttgtcctccaggaataaaaattgatgcatatccgtggttggaatgcttcatcaagtcatacaatgtcacaaatggaacagataatcaaatttgctatcagatttttgacaccacagttgcagaagatgtaatctaa

SEQ ID NO: 170439 - DNA, 405 bp, Homo sapiens
  Payload ID: 13555
  Gene Symbol: POT1
  Gene Name: protection of telomeres 1
  ENST ID: ENST00000610141
  CDS Start-End: 1-358
tgaaggtgatttaagtcacatccatcggctacaaaatctgacaatagacattttagtctacgataaccatgttcatgtggcaagatctctgaaggttggaagctttcttagaatctatagccttcataccaaacttcaatcaatgaattcagagaatcagacaatgttaagtttagagtttcatcttcatggaggtaccagttacggtcggggaatcagggtcttgccagaaagtaactctgatgtggatcaactgaaaaaggatttagaatctgcaaatttgacagccaatcagcattcagatgttatctgtcaatcagaacctgacgacagctttccaagtaaggataatctttaacattgacagtttagttcttgctaaataaaatagttttatcaacataa

SEQ ID NO: 170440 - DNA, 2780 bp, Homo sapiens
  Payload ID: 13555
  Gene Symbol: POT1
  Gene Name: protection of telomeres 1
  ENST ID: ENST00000609106
  CDS Start-End: 757-2499
agagtacgggtgagtgaaatttgtaaggtttggtgtgttcatttgagtgggtgccagacgtaacgggcccgggattgaattagtttagatcaaaatttgatgtaattatcgcagagaaacgctttcttacgagtgtttatctcgagcctgctgtgttcagcatctttcttggtgttttgggagaagcagacaggagttaagtccaagtccccgccctcacagagctcaggtggcttgggggaaggttggtgcgcaaacattaaaattagatatcgacactagtgagtgtccccgtcaagaggtctgtgaaataaggttgagcctacgatgcagaagttaatctcacagcaagttgtcagattccctagttgaatttgctttggacatcagtgtgaagcagaactgatatgccacttgaattaataaaggaagtcaatggggtgcctgaagttcagccgctgagtaaattacataaagtagatttcggatccctacagccaggttacaattatagcaagaaatatattcagggaaaactttcacttatctcttctttaacttatcgtggaaataaaacagctgttttgcagattggactacaaggacaccattgcagtggctagatttattgtttttttagcttcttcatctacaagcagagatggtaaaccttgcatatttttgaaagcatttgaagacctcaaatcaactgtttatgtttatgtcaaatctttaagagatttttctacagaatcaatgtctttggttccagcaacaaattatatatatacacccctgaatcaacttaagggtggtacaattgtcaatgtctatggtgttgtgaagttctttaagcccccatatctaagcaaaggaactgattattgctcagttgtaactattgtggaccagacaaatgtaaaactaacttgcctgctctttagtggaaactatgaagcccttccaataatttataaaaatggagatattgttcgctttcacaggctgaagattcaagtatataaaaaggagactcagggtatcaccagctctggctttgcatctttgacgtttgagggaactttgggagcccctatcatacctcgcacttcaagcaagtattttaacttcactactgaggaccacaaaatggtagaagccttacgtgtttgggcatctactcatatgtcaccgtcttggacattactaaaattgtgtgatgttcagccaatgcagtattttgacctgacttgtcagctcttgggcaaagcagaagtggacggagcatcatttcttctaaaggtatgggatggcaccaggacaccatttccatcttggagagtcttaatacaagaccttgttcttgaaggtgatttaagtcacatccatcggctacaaaatctgacaatagacattttagtctacgataaccatgttcatgtggcaagatctctgaaggttggaagctttcttagaatctatagccttcataccaaacttcaatcaatgaattcagagaatcagacaatgttaagtttagagtttcatcttcatggaggtaccagttacggtcggggaatcagggtcttgccagaaagtaactctgatgtggatcaactgaaaaaggatttagaatctgcaaatttgacagccaatcagcattcagatgttatctgtcaatcagaacctgacgacagctttccaagctctggatcagtatcattatacgaggtagaaagatgtcaacagctatctgctacaatacttacagatcatcagtatttggagaggacaccactatgtgccattttgaaacaaaaagctcctcaacaataccgcatccgagcaaaattgaggtcatataagcccagaagactatttcagtctgttaaacttcattgccctaaatgtcatttgctgcaagaagttccacatgagggcgatttggatataatttttcaggatggtgcaactaaaaccccagatgtcaagctacaaaatacatcattatatgattcaaaaatctggaccactaaaaatcaaaaaggacgaaaagtagcagttcattttgtgaaaaataatggtattctcccgctttcaaatgaatgtctacttttgatagaaggaggtacactcagtgaaatttgcaaactctcgaacaagtttaatagtgtaattcctgtgagatctggccacgaagacctggaacttttggacctttcagcaccatttcttatacaaggaacaatacatcactatggatgtaaacagtgttctagtttgagatccatacaaaatctaaattccctggttgataaaacatcgtggattccttcttctgtggcagaagcactgggtattgtacccctccaatatgtgtttgttatgacctttacacttgatgatggaacaggagtactagaagcctatctcatggattctgtaagtatcagaggacaaattcttccagattccagcatcagaagttctgatggatgatgaccttcagaaaagtgtggatatgatcatggatatgttttgtcctccaggaataaaaattgatgcatatccgtggttggaatgcttcatcaagtcatacaatgtcacaaatggaacagataatcaaatttgctatcagatttttgacaccacagttgcagaagatgtaatctaatattgccatccaatttagcatacataaaatgttgccactcaccttccctgtttgagcttcttttcctgacctgagttttgtatcagcaatgttgatgatgttagca

SEQ ID NO: 170441 - DNA, 593 bp, Homo sapiens
  Payload ID: 13555
  Gene Symbol: POT1
  Gene Name: protection of telomeres 1
  ENST ID: ENST00000609702
  CDS Start-End: 373-593
ctaaactcttcctagggttctttctagagtacggcagcaagttgtcagattccctagttgaatttgctttggacatcagtgtgaagcagaactgatatgccacttgaattaataaaggaagtcaatggggtgcctgaagttcagccgctgagtaaattacataaagtagatttcggatccctacagccaggttacaattatagcaagaaatatattcaggacaccattgcagtggctagatttattgtttttttagcttcttcatctacaagcagagatggtaaaccttgcatatttttgaaagcatttgaagacctcaaatcaactgtttatgtttatgtcaaatctttaagagatttttctacagaatcaatgtctttggttccagcaacaaattatatatatacacccctgaatcaacttaagggtggtacaattgtcaatgtctatggtgttgtgaagttctttaagcccccatatctaagcaaaggaactgattattgctcagttgtaactattgtggaccagacaaatgtaaaactaacttgcctgctctttagtggaaactatgaagcccttccaataatttataa

SEQ ID NO: 170442 - DNA, 549 bp, Homo sapiens
  Payload ID: 13555
  Gene Symbol: POT1
  Gene Name: protection of telomeres 1
  ENST ID: ENST00000608200
  CDS Start-End: 1-261
cttcattgccctaaatgtcatttgctgcaagaagttccacatgagggcgatttggatataatttttcaggatggtgcaactaaaaccccagatgtcaagctacaaaatacatcattatatgattcaaaaatctggaccactaaaaatcaaaaaggacgaaaagtagcagttcattttgtgaaaaataatggtattctcccgctttcaaatgaatgtctacttttgatagaaggtaagatatttaagtcactgttttgttagaatactccttttgcatatttttcctaattaattattgtttaatacattttacagacaacctagtacatataaagtaaaaatagtatttaaatttaacaaaattgaatatatatgttaactaggttcaaatatatataagcacacgttcataaatttatcttaattacatttgaaattgtacttcagactcaagtgttaacatttaactatattgttggattgcattttattttgtcaatgctaagctgattgtctagttaagtaataataaaagaggctgattgctta

SEQ ID NO: 170443 - DNA, 1393 bp, Homo sapiens
  Payload ID: 13556
  Gene Symbol: PRMT1
  Gene Name: protein arginine methyltransferase 1
  Uniprot ID: Q99873
  ENST ID: ENST00000391851
  CDS Start-End: 130-1191
attgccaatgaaatcttccagcggggtcgcggtaggcgggccgtggaccctctggtataaggcggtcccgggggagtgaggagaaagggggggtcttggcggccggaggaggagtaggtgcgggtgaagatggcggcagccgaggccgcgaactgcatcatggaggtgtcctgtggccaggcggaaagcagtgagaagcccaacgctgaggacatgacatccaaagattactactttgactcctacgcacactttggcatccacgaggagatgctgaaggacgaggtgcgcaccctcacttaccgcaactccatgtttcataaccggcacctcttcaaggacaaggtggtgctggacgtcggctcgggcaccggcatcctctgcatgtttgctgccaaggccggggcccgcaaggtcatcgggatcgagtgttccagtatctctgattatgcggtgaagatcgtcaaagccaacaagttagaccacgtggtgaccatcatcaaggggaaggtggaggaggtggagctcccagtggagaaggtggacatcatcatcagcgagtggatgggctactgcctcttctacgagtccatgctcaacaccgtgctctatgcccgggacaagtggctggcgcccgatggcctcatcttcccagaccgggccacgctgtatgtgacggccatcgaggaccggcagtacaaagactacaagatccactggtgggagaacgtgtatggcttcgacatgtcttgcatcaaagatgtggccattaaggagcccctagtggatgtcgtggaccccaaacagctggtcaccaacgcctgcctcataaaggaggtggacatctataccgtcaaggtggaagacctgaccttcacctccccgttctgcctgcaagtgaagcggaatgactacgtgcacgccctggtggcctacttcaacatcgagttcacacgctgccacaagaggaccggcttctccaccagccccgagtccccgtacacgcactggaagcagacggtgttctacatggaggactacctgaccgtgaagacgggcgaggagatcttcggcaccatcggcatgcggcccaacgccaagaacaaccgggacctggacttcaccatcgacctggacttcaagggccagctgtgcgagctgtcctgctccaccgactaccggatgcgctgaggcccggctctcccgccctgcacgagcccaggggctgagcgttcctaggcggtttcggggctcccccttcctctccctccctcccgcagaagggggttttaggggcctgggctggggggatggggagggcacatcgtgactgtgtttttcataacttatgtttttatatggttgcatttacgccaataaatcctcagctggg

SEQ ID NO: 170444 - DNA, 1327 bp, Homo sapiens
  Payload ID: 13556
  Gene Symbol: PRMT1
  Gene Name: protein arginine methyltransferase 1
  ENST ID: ENST00000454376
  CDS Start-End: 10-1125
cgggtgaagatggcggcagccgaggccgcgaactgcatcatggagaattttgtagccaccttggctaatgggatgagcctccagccgcctcttgaagaagtgtcctgtggccaggcggaaagcagtgagaagcccaacgctgaggacatgacatccaaagattactactttgactcctacgcacactttggcatccacgaggagatgctgaaggacgaggtgcgcaccctcacttaccgcaactccatgtttcataaccggcacctcttcaaggacaaggtggtgctggacgtcggctcgggcaccggcatcctctgcatgtttgctgccaaggccggggcccgcaaggtcatcgggatcgagtgttccagtatctctgattatgcggtgaagatcgtcaaagccaacaagttagaccacgtggtgaccatcatcaaggggaaggtggaggaggtggagctcccagtggagaaggtggacatcatcatcagcgagtggatgggctactgcctcttctacgagtccatgctcaacaccgtgctctatgcccgggacaagtggctggcgcccgatggcctcatcttcccagaccgggccacgctgtatgtgacggccatcgaggaccggcagtacaaagactacaagatccactggtgggagaacgtgtatggcttcgacatgtcttgcatcaaagatgtggccattaaggagcccctagtggatgtcgtggaccccaaacagctggtcaccaacgcctgcctcataaaggaggtggacatctataccgtcaaggtggaagacctgaccttcacctccccgttctgcctgcaagtgaagcggaatgactacgtgcacgccctggtggcctacttcaacatcgagttcacacgctgccacaagaggaccggcttctccaccagccccgagtccccgtacacgcactggaagcagacggtgttctacatggaggactacctgaccgtgaagacgggcgaggagatcttcggcaccatcggcatgcggcccaacgccaagaacaaccgggacctggacttcaccatcgacctggacttcaagggccagctgtgcgagctgtcctgctccaccgactaccggatgcgctgaggcccggctctcccgccctgcacgagcccaggggctgagcgttcctaggcggtttcggggctcccccttcctctccctccctcccgcagaagggggttttaggggcctgggctggggggatggggagggcacatcgtgactgtgtttttcataacttatgtttttatatggttgcatttacgccaataaatcctcagctggg

SEQ ID NO: 170445 - DNA, 779 bp, Homo sapiens
  Payload ID: 13556
  Gene Symbol: PRMT1
  Gene Name: protein arginine methyltransferase 1
  ENST ID: ENST00000534465
  CDS Start-End: 159-779
agagttggcaaacccctgacctatgatggacgtattctctagccaattactagacggtattctcagacgggccgcctccattgccaatgaaatcttccagcggggtcgcggtgtcctgtggccaggcggaaagcagtgagaagcccaacgctgaggacatgacatccaaagattactactttgactcctacgcacactttggcatccacgaggagatgctgaaggacgaggtgcgcaccctcacttaccgcaactccatgtttcataaccggcacctcttcaaggacaaggtggtgctggacgtcggctcgggcaccggcatcctctgcatgtttgctgccaaggccggggcccgcaaggtcatcgggatcgagtgttccagtatctctgattatgcggtgaagatcgtcaaagccaacaagttagaccacgtggtgaccatcatcaaggggaaggtggaggaggtggagctcccagtggagaaggtggacatcatcatcagcgagtggatgggctactgcctcttctacgagtccatgctcaacaccgtgctctatgcccgggacaagtggctggcgcccgatggcctcatcttcccagaccgggccacgctgtatgtgacggccatcgaggaccggcagtacaaagactacaagatccactggtgggagaacgtgtatggcttcgacatgtcttgcatcaaagatgtggccattaaggagcccctagtggatgtcgtggaccccaaacagctggtcaccaacgcctgcctcataaag

SEQ ID NO: 170446 - DNA, 766 bp, Homo sapiens
  Payload ID: 13556
  Gene Symbol: PRMT1
  Gene Name: protein arginine methyltransferase 1
  ENST ID: ENST00000534280
  CDS Start-End: 109-273
cggggtcgcggtaggcgggccgtggaccctctggtataaggcggtcccgggggagtgaggagaaagggggggtcttggcggccggaggaggagtaggtgcgggtgaagatggcggcagccgaggccgcgaactgcatcatggagaattttgtagccaccttggctaatgggatgagcctccagccgcctcttgaagaagtaaccccctttgcccttccctgtgtctgcccccattttccttcccctcccctccccagctgtgggctgagctagagacggggtcagagagactggagagatggtgtcctgtggccaggcggaaagcagtgagaagcccaacgctgaggacatgacatccaaagattactactttgactcctacgcacactttggcatccacgaggagatgctgaaggacgaggtgcgcaccctcacttaccgcaactccatgtttcataaccggcacctcttcaaggacaaggtggtgctggacgtcggctcgggcaccggcatcctctgcatgtttgctgccaaggccggggcccgcaaggtcatcgggatcgagtgttccagtatctctgattatgcggtgaagatcgtcaaagccaacaagttagaccacgtggtgaccatcatcaaggggaaggtggaggaggtggagctcccagtggagaaggtggacatcatcatcagcgagtggatgggctactgcctcttctacgagtccatgctcaacaccgtgctctatgcccgggacaagtggctg

SEQ ID NO: 170447 - DNA, 1182 bp, Homo sapiens
  Payload ID: 13556
  Gene Symbol: PRMT1
  Gene Name: protein arginine methyltransferase 1
  ENST ID: ENST00000529284
  CDS Start-End: 703-1182
agtgcagtggcgcgatctcagctcactgcaagctccgcctcccgggttcacgccatcctcctgcctaagcctccacgcccggctaattttttgtatttttagtagagacgggggtttcaccatgttagccaggatggtctcgacctcctgaccttgtgatccgcccgcctcggtctcccaaaatgctgggattacaggcgtgagccaccgcgcccggccgcctggcgtaatttttgtatttttaatagaaatgggggtttcaccatgttgcccagactggtctcgaactcctgatgtcaagtgatccgcctgcctccgcctcctaaagtgctggaattacacccgtgagccatcgcgcccgaaccctattgtaaattttaagtctcaggcgtttgccagcggcacgccagagagtatagcctgcgcggaggcccagaaaccaaagagcgagctcattccgggattggagagaagtgtgagcagagggaagtagagggatcggggagaggaggggcaggacccacgcattcggccctttgcattcagcttcattcaactaggaactttttctgcaaatcaaggaaagcttcccggaggaagtggtgcctaagctgtgctctgattcacgtttagaagctgaccagacaaagagaggtgtcctgtggccaggcggaaagcagtgagaagcccaacgctgaggacatgacatccaaagattactactttgactcctacgcacactttggcatccacgaggagatgctgaaggacgaggtgcgcaccctcacttaccgcaactccatgtttcataaccggcacctcttcaaggacaaggtggtgctggacgtcggctcgggcaccggcatcctctgcatgtttgctgccaaggccggggcccgcaaggtcatcgggatcgagtgttccagtatctctgattatgcggtgaagatcgtcaaagccaacaagttagaccacgtggtgaccatcatcaaggggaaggtggaggaggtggagctcccagtggagaaggtggacatcatcatcagcgagtggatgggctactgcctcttctacgagtccatgctcaacaccgtgctctatgcccgggacaagtggctggcgcccgatggcctcatcttcccagaccgggccacgctgtatgtgacggccatcgaggaccgg

SEQ ID NO: 170448 - DNA, 699 bp, Homo sapiens
  Payload ID: 13556
  Gene Symbol: PRMT1
  Gene Name: protein arginine methyltransferase 1
  ENST ID: ENST00000527382
  CDS Start-End: 84-699
caaagagcgagctcattccgggattggagagaagtgtgtcctgtggccaggcggaaagcagtgagaagcccaacgctgaggacatgacatccaaagattactactttgactcctacgcacactttggcatccacgaggagatgctgaaggacgaggtgcgcaccctcacttaccgcaactccatgtttcataaccggcacctcttcaaggacaaggtggtgctggacgtcggctcgggcaccggcatcctctgcatgtttgctgccaaggccggggcccgcaaggtcatcgggatcgagtgttccagtatctctgattatgcggtgaagatcgtcaaagccaacaagttagaccacgtggtgaccatcatcaaggggaaggtggaggaggtggagctcccagtggagaaggtggacatcatcatcagcgagtggatgggctactgcctcttctacgagtccatgctcaacaccgtgctctatgcccgggacaagtggctggcgcccgatggcctcatcttcccagaccgggccacgctgtatgtgacggccatcgaggaccggcagtacaaagactacaagatccactggtgggagaacgtgtatggcttcgacatgtcttgcatcaaagatgtggccattaaggagcccctagtggatgtcgtggaccccaaacagctggtcaccaacgcctgcctca

SEQ ID NO: 170449 - DNA, 578 bp, Homo sapiens
  Payload ID: 13556
  Gene Symbol: PRMT1
  Gene Name: protein arginine methyltransferase 1
  ENST ID: ENST00000526224
  CDS Start-End: 97-578
gagctttaccctactggagccgtttatctcccccgggtctttgtgagggtgtcctgtggccaggcggaaagcagtgagaagcccaacgctgaggacatgacatccaaagattactactttgactcctacgcacactttggcatccacgaggagatgctgaaggacgaggtgcgcaccctcacttaccgcaactccatgtttcataaccggcacctcttcaaggacaaggtggtgctggacgtcggctcgggcaccggcatcctctgcatgtttgctgccaaggccggggcccgcaaggtcatcgggatcgagtgttccagtatctctgattatgcggtgaagatcgtcaaagccaacaagttagaccacgtggtgaccatcatcaaggggaaggtggaggaggtggagctcccagtggagaaggtggacatcatcatcagcgagtggatgggctactgcctcttctacgagtccatgctcaacaccgtgctctatgcccgggacaagtggctggcgcccgatggcctcatcttcccagaccgggccacgctgtatgtgacggccatcgaggaccggca

SEQ ID NO: 170450 - DNA, 713 bp, Homo sapiens
  Payload ID: 13556
  Gene Symbol: PRMT1
  Gene Name: protein arginine methyltransferase 1
  ENST ID: ENST00000524771
  CDS Start-End: 1-713
aggccgcgaactgcatcatggaggtgagcgcttggagcgccgccgtgggcgggaggcggctttggaattttgtagccaccttggctaatgggatgagcctccagccgcctcttgaagaagtgtcctgtggccaggcggaaagcagtgagaagcccaacgctgaggacatgacatccaaagattactactttgactcctacgcacactttggcatccacgaggagatgctgaaggacgaggtgcgcaccctcacttaccgcaactccatgtttcataaccggcacctcttcaaggacaaggtggtgctggacgtcggctcgggcaccggcatcctctgcatgtttgctgccaaggccggggcccgcaaggtcatcgggatcgagtgttccagtatctctgattatgcggtgaagatcgtcaaagccaacaagttagaccacgtggtgaccatcatcaaggggaaggtggaggaggtggagctcccagtggagaaggtggacatcatcatcagcgagtggatgggctactgcctcttctacgagtccatgctcaacaccgtgctctatgcccgggacaagtggctggcgcccgatggcctcatcttcccagaccgggccacgctgtatgtgacggccatcgaggaccggcagtacaaagactacaagatccactggtgggagaacgtgtatggcttcgacatgtcttgcatcaaa

SEQ ID NO: 170451 - DNA, 1686 bp, Homo sapiens
  Payload ID: 13556
  Gene Symbol: PRMT1
  Gene Name: protein arginine methyltransferase 1
  ENST ID: ENST00000532489
  CDS Start-End: 507-1484
gggtttcaccatgttagccaggatggtctcgacctcctgaccttgtgatccgcccgcctcggtctcccaaaatgctgggattacaggcgtgagccaccgcgcccggccgcctggcgtaatttttgtatttttaatagaaatgggggtttcaccatgttgcccagactggtctcgaactcctgatgtcaagtgatccgcctgcctccgcctcctaaagtgctggaattacacccgtgagccatcgcgcccgaaccctattgtaaattttaagtctcaggcgtttgccagcggcacgccagagagtatagcctgcgcggaggcccagaaaccaaagagcgagctcattccgggattggagagaagtgaactttttctgcaaatcaaggaaagcttcccggaggaagtggtgcctaagctgtgctctgattcacgtttagaagctgaccagacaaagagaggtgtcctgtggccaggcggaaagcagtgagaagcccaacgctgaggacatgacatccaaagattactactttgactcctacgcacactttggcatccacgaggagatgctgaaggacgaggtgcgcaccctcacttaccgcaactccatgtttcataaccggcacctcttcaaggacaaggtggtgctggacgtcggctcgggcaccggcatcctctgcatgtttgctgccaaggccggggcccgcaaggtcatcgggatcgagtgttccagtatctctgattatgcggtgaagatcgtcaaagccaacaagttagaccacgtggtgaccatcatcaaggggaaggtggaggaggtggagctcccagtggagaaggtggacatcatcatcagcgagtggatgggctactgcctcttctacgagtccatgctcaacaccgtgctctatgcccgggacaagtggctggcgcccgatggcctcatcttcccagaccgggccacgctgtatgtgacggccatcgaggaccggcagtacaaagactacaagatccactggtgggagaacgtgtatggcttcgacatgtcttgcatcaaagatgtggccattaaggagcccctagtggatgtcgtggaccccaaacagctggtcaccaacgcctgcctcataaaggaggtggacatctataccgtcaaggtggaagacctgaccttcacctccccgttctgcctgcaagtgaagcggaatgactacgtgcacgccctggtggcctacttcaacatcgagttcacacgctgccacaagaggaccggcttctccaccagccccgagtccccgtacacgcactggaagcagacggtgttctacatggaggactacctgaccgtgaagacgggcgaggagatcttcggcaccatcggcatgcggcccaacgccaagaacaaccgggacctggacttcaccatcgacctggacttcaagggccagctgtgcgagctgtcctgctccaccgactaccggatgcgctgaggcccggctctcccgccctgcacgagcccaggggctgagcgttcctaggcggtttcggggctcccccttcctctccctccctcccgcagaagggggttttaggggcctgggctggggggatggggagggcacatcgtgactgtgtttttcataacttatgtttttatatggttgcatttacgccaataaatcctcagctggg

SEQ ID NO: 170452 - DNA, 543 bp, Homo sapiens
  Payload ID: 13556
  Gene Symbol: PRMT1
  Gene Name: protein arginine methyltransferase 1
  ENST ID: ENST00000528623
  CDS Start-End: 354-543
ttccgggattggagagaagtgtgagcagagggaagtagagggatcggggagaggaggggcaggacccacgcattcggccctttgcattcagcttcattcaactaggaactttttctgcaaatcaaggaaagcttcccggaggaagtggtgcctaagctgtgctctgattcacgtttagaagctgaccagacaaagagagaattttgtagccaccttggctaatgggatgagcctccagccgcctcttgaagaagtaaccccctttgcccttccctgtgtctgcccccattttccttcccctcccctccccagctgtgggctgagctagagacggggtcagagagactggagagatggtaggcgtggctgaggtgtcctgtggccaggcggaaagcagtgagaagcccaacgctgaggacatgacatccaaagattactactttgactcctacgcacactttggcatccacgaggagatgctgaaggacgaggtgcgcaccctcacttaccgcaactccatgtttcataaccggcacctcttca

SEQ ID NO: 170453 - DNA, 580 bp, Homo sapiens
  Payload ID: 13556
  Gene Symbol: PRMT1
  Gene Name: protein arginine methyltransferase 1
  ENST ID: ENST00000529836
  CDS Start-End: 251-580
cttcggcatccggcctagcggagggtcttatcccccctcccacgtggaggagggctgggggcgcttccggccaggcccccacgtggccgctgcgcgaattttgtagccaccttggctaatgggatgagcctccagccgcctcttgaagaagtaaccccctttgcccttccctgtgtctgcccccattttccttcccctcccctccccagctgtgggctgagctagagacggggtcagagagactggagagatggtaggcgtggctgaggtgtcctgtggccaggcggaaagcagtgagaagcccaacgctgaggacatgacatccaaagattactactttgactcctacgcacactttggcatccacgaggagatgctgaaggacgaggtgcgcaccctcacttaccgcaactccatgtttcataaccggcacctcttcaaggacaaggtggtgctggacgtcggctcgggcaccggcatcctctgcatgtttgctgccaaggccggggcccgcaaggtcatcgggatcgagtgttccagtatctctgattatgcggtgaagatcgtcaaagccaacaag

SEQ ID NO: 170454 - DNA, 1192 bp, Homo sapiens
  Payload ID: 13556
  Gene Symbol: PRMT1
  Gene Name: protein arginine methyltransferase 1
  ENST ID: ENST00000610806
  CDS Start-End: 130-987
attgccaatgaaatcttccagcggggtcgcggtaggcgggccgtggaccctctggtataaggcggtcccgggggagtgaggagaaagggggggtcttggcggccggaggaggagtaggtgcgggtgaagatggcggcagccgaggccgcgaactgcatcatggaggtgtcctgtggccaggcggaaagcagtgagaagcccaacgctgaggacatgacatccaaagattactactttgactcctacgcacactttggcatccacgaggagatgctgaaggacgaggtgcgcaccctcacttaccgcaactccatgtttcataaccggcacctcttcaaggacaaggtggtgctggacgtcggctcgggcaccggcatcctctgcatgtttgctgccaaggccggggcccgcaaggtcatcgggatcgagtgttccagtatctctgattatgcggtgaagatcgtcaaagccaacaagttagaccacgtggtgaccatcatcaaggggaaggtggaggaggtggagctcccagtggagaaggtggacatcatcatcagcgagtggatgggctactgcctcttctacgagtccatgctcaacaccgtgctctatgcccgggacaagtggctggaggtggacatctataccgtcaaggtggaagacctgaccttcacctccccgttctgcctgcaagtgaagcggaatgactacgtgcacgccctggtggcctacttcaacatcgagttcacacgctgccacaagaggaccggcttctccaccagccccgagtccccgtacacgcactggaagcagacggtgttctacatggaggactacctgaccgtgaagacgggcgaggagatcttcggcaccatcggcatgcggcccaacgccaagaacaaccgggacctggacttcaccatcgacctggacttcaagggccagctgtgcgagctgtcctgctccaccgactaccggatgcgctgaggcccggctctcccgccctgcacgagcccaggggctgagcgttcctaggcggtttcggggctcccccttcctctccctccctcccgcagaagggggttttaggggcctgggctggggggatggggagggcacatcgtgactgtgtttttcataacttatgtttttatatggttgcatttacgccaataaatcctcagctggggtc

SEQ ID NO: 170455 - DNA, 1702 bp, Homo sapiens
  Payload ID: 13557
  Gene Symbol: PRMT2
  Gene Name: protein arginine methyltransferase 2
  Uniprot ID: P55345
  ENST ID: ENST00000291705
  CDS Start-End: 226-912
actgcgcctgcgcggggcgccgggccctgggcggggccttcccggctgacggcctgcgtgcactgcgcttgcgcgggttgagggcggtggctcaggctcctggaaaggaccgtccacccctccgcgctggcggtgtggacgcggaactcagcggagaaacgcgattgagaaatggaaaagaaaatgaaataaatcagcagttatgaggcagagcctaagagaactatggcaacatcaggtgactgtcccagaagtgaatcgcagggagaagagcctgctgagtgcagtgaggccggtctcctgcaggagggagtacagccagaggagtttgtggccatcgcggactacgctgccaccgatgagacccagctcagttttttgagaggagaaaaaattcttatcctgagacaaaccactgcagattggtggtggggtgagcgtgcgggctgctgtgggtacattccggcaaaccatgtggggaagcacgtggatgagtacgaccccgaggacacgtggcaggatgaagagtacttcggcagctatggaactctgaaactccacttggagatgttggcagaccagccacgaacaactaaataccacagtgtcatcctgcagaataaagaatccctgacggataaagtcatcctggacgtgggctgtgggactgggatcatcagtctcttctgtgcacactatgcgcggcctagagcggtgtacgcggtggaggccagtgagatggcacagcacacggggcagctggtcctgcagaacggctttgctgacatcatcaccgtgtaccagcagaaggtggaggatgtggtgctgcccgagaaggtggacgtgctggtgtctgagtggatggggacctgcctgctggttggagaaaaagtcttccccatctggagatgacagttgatgctttatttggaaagcagtgtgcatatcttgaggggtgatgaacacaagcaaaccaagttgcacctggcttctgcacactcctgcgaaagtcggtgaacattcactccacattgacccctccctagcctggcaggtgacgtcagggtccttcacagacaaacacgcttgggctcggcaggagctgccgtggccacccccgctgcccagtgtctgccctctagaagtaggctgtgtttccaggtgttcacccgtggtgcccacagtgccgacccgtggctgggtcggagctccatgttcctaagctaggtctaggtctacactcctaggacgcacgcatatcagcccgtgtaccctgtgacagtgactgtccccacctcctatgttagtggtgcccttactgccgtcgctcatccactcgtgtgggacgtaggattgcacagggctgtgccagtggcgtgtagggaacactgccctggctcagcgtgcgagctaaggtggtgatgtatgcgatgggactctgcatgggatagtacagttgtgtagacgtcttccaaataaattatgtgttggtccatcgcacatgctcaataaatatttttaaatgagtgaatgtcattgtgtatcctgttttatgcatatatgttattttttgtaattacaggatcatactatatgcattgctttataagtttttctcaatattgtgaaaaaacttccacatcagtagatacatgtccataatttttttttgtattgttttgatttttattaaattttattg

SEQ ID NO: 170456 - DNA, 1334 bp, Homo sapiens
  Payload ID: 13557
  Gene Symbol: PRMT2
  Gene Name: protein arginine methyltransferase 2
  Uniprot ID: P55345
  ENST ID: ENST00000334494
  CDS Start-End: 168-1022
tgcactgcgcttgcgcgggttgagggcggtggctcaggctcctggaaaggaccgtccacccctccgcgctggcggtgtggacgcggaactcagcggagaaacgcgattgagaaatggaaaagaaaatgaaataaatcagcagttatgaggcagagcctaagagaactatggcaacatcaggtgactgtcccagaagtgaatcgcagggagaagagcctgctgagtgcagtgaggccggtctcctgcaggagggagtacagccagaggagtttgtggccatcgcggactacgctgccaccgatgagacccagctcagttttttgagaggagaaaaaattcttatcctgagacaaaccactgcagattggtggtggggtgagcgtgcgggctgctgtgggtacattccggcaaaccatgtggggaagcacgtggatgagtacgaccccgaggacacgtggcaggatgaagagtacttcggcagctatggaactctgaaactccacttggagatgttggcagaccagccacgaacaactaaataccacagtgtcatcctgcagaataaagaatccctgacggataaagtcatcctggacgtgggctgtgggactgggatcatcagtctcttctgtgcacactatgcgcggcctagagcggtgtacgcggtggaggccagtgagatggcacagcacacggggcagctggtcctgcagaacggctttgctgacatcatcaccgtgtaccagcagaaggtggaggatgtggtgctgcccgagaaggtggacgtgctggtgtctgagtggatggggacctgcctgctggctgcgcctctcctgagctgccgcattctcccctgcacctgtgcgtctggccctcttcacgtcctcctggcctgctgtctgcctctcccctgcacctgtgcgtctgtccctcttcatgtcctccttgcctgctgtctgcctgttctcagagcccctcagccctcaggccttcatctctcctggcccatcttcctactctgacgctgacatgtagtaaaagtctgaagacagagaagagtgcatgtgcgtttagcataggaggggcagctttcagtcagtgcagcaagggcatgtagttgttcagagatggtgctggaacgactgatttggagaaaagaggcccttcttcacaccatctgctaaaataaacctcagatgggctcaagagttaaatatttaagaaaaggaggaaacaaaaaaattgctacaagtttatttgttgttaggatgggaaaggtttttctaagaaccaagttcataatgaagctgtcaaataaaatacttgacaaaaaa

SEQ ID NO: 170457 - DNA, 2688 bp, Homo sapiens
  Payload ID: 13557
  Gene Symbol: PRMT2
  Gene Name: protein arginine methyltransferase 2
  Uniprot ID: P55345
  ENST ID: ENST00000355680
  CDS Start-End: 763-2064
acttatccagaagaaaggcagagggcgcacactgcgcagcgcggatgggaaagttaactgaattatttgcgggaagacagaggaggtggggggtcccccaagccccagccattttgtggctcgtaggggttgtcgcttcccaagccgtgaatggcccaaacccgccccccgccccaggtcggactcctgccccgcgcccctctgggtcggaccccaagccgagccccccaaccccgcggctgggctgggcgattggggacgagctccacacatggagaacctggcctcgcctcgcaagaccgcgggacgcgcagatgtgaagtgcgcctgcgcggggcgcagccccagctgcagacgatctgtgagcgacgcgccggcgcaagtcgagggcggtggcttggcttccctggaatgggggacgtcttaggactgcgcctgcgcggggcgccgggccctgggcggggccttcccggctgacggcctgcgtgcactgcgcttgcgcgggttgagggcggtggctcaggctcctggaaaggaccgtccacccctccgcgctggcggtgtggacgcggaactcagcggagaaacgcgattgagagcagtgtgtggattacactatcactggaaaaatacgaattgagaagaaggaaaagactggaagatgcagaccttggttcctgttagtggaaacactgtaaggtcccagaaatggaaaagaaaatgaaataaatcagcagttatgaggcagagcctaagagaactatggcaacatcaggtgactgtcccagaagtgaatcgcagggagaagagcctgctgagtgcagtgaggccggtctcctgcaggagggagtacagccagaggagtttgtggccatcgcggactacgctgccaccgatgagacccagctcagttttttgagaggagaaaaaattcttatcctgagacaaaccactgcagattggtggtggggtgagcgtgcgggctgctgtgggtacattccggcaaaccatgtggggaagcacgtggatgagtacgaccccgaggacacgtggcaggatgaagagtacttcggcagctatggaactctgaaactccacttggagatgttggcagaccagccacgaacaactaaataccacagtgtcatcctgcagaataaagaatccctgacggataaagtcatcctggacgtgggctgtgggactgggatcatcagtctcttctgtgcacactatgcgcggcctagagcggtgtacgcggtggaggccagtgagatggcacagcacacggggcagctggtcctgcagaacggctttgctgacatcatcaccgtgtaccagcagaaggtggaggatgtggtgctgcccgagaaggtggacgtgctggtgtctgagtggatggggacctgcctgctgtttgagttcatgatcgagtccatcctgtatgcccgggatgcctggctgaaggaggacggggtcatttggcccaccatggctgcgttgcaccttgtgccctgcagtgctgataaggattatcgtagcaaggtgctcttctgggacaacgcgtacgagttcaacctcagcgctctgaaatctttagcagttaaggagtttttttcaaagcccaagtataaccacattttgaaaccagaagactgtctctctgaaccgtgcactatattgcagttggacatgagaaccgtgcaaatttctgatctagagaccctgaggggcgagctgcgcttcgacatcaggaaggcggggaccctgcacggcttcacggcctggtttagcgtccacttccagagcctgcaggaggggcagccgccgcaggtgctcagcaccgggcccttccaccccaccacacactggaagcagacgctgttcatgatggacgacccagtccctgtccatacaggagacgtggtcacgggttcagttgtgttgcagagaaacccagtgtggagaaggcacatgtctgtggctctgagctgggctgtcacttccagacaagaccccacatctcaaaaagttggagaaaaagtcttccccatctggagatgacagttgatgctttatttggaaagcagtgtgcatatcttgaggggtgatgaacacaagcaaaccaagttgcacctggcttctgcacactcctgcgaaagtcggtgaacattcactccacattgacccctccctagcctggcaggtgacgtcagggtccttcacagacaaacacgcttgggctcggcaggagctgccgtggccacccccgctgcccagtgtctgccctctagaagtaggctgtgtttccaggtgttcacccgtggtgcccacagtgccgacccgtggctgggtcggagctccatgttcctaagctaggtctaggtctacactcctaggacgcacgcatatcagcccgtgtaccctgtgacagtgactgtccccacctcctatgttagtggtgcccttactgccgtcgctcatccactcgtgtgggacgtaggattgcacagggctgtgccagtggcgtgtagggaacactgccctggctcagcgtgcgagctaaggtggtgatgtatgcgatgggactctgcatgggatagtacagttgtgtagacgtcttccaaataaattatgtgttggtccatcgcacatgctcaataaatatttttaaatgagtgaatgtca

SEQ ID NO: 170458 - DNA, 954 bp, Homo sapiens
  Payload ID: 13557
  Gene Symbol: PRMT2
  Gene Name: protein arginine methyltransferase 2
  ENST ID: ENST00000397628
  CDS Start-End: 147-908
gagggcggtggctcaggctcctggaaaggaccgtccacccctccgcgctggcggtgtggacgcggaactcagcggagaaacgcgattgagaaatggaaaagaaaatgaaataaatcagcagttatgaggcagagcctaagagaactatggcaacatcaggtgactgtcccagaagtgaatcgcagggagaagagcctgctgagtgcagtgaggccggtctcctgcaggagggagtacagccagaggagtttgtggccatcgcggactacgctgccaccgatgagacccagctcagttttttgagaggagaaaaaattcttatcctgagacaaaccactgcagattggtggtggggtgagcgtgcgggctgctgtgggtacattccggcaaaccatgtggggaagcacgtggatgagtacgaccccgaggacacgtggcaggatgaagagtacttcggcagctatggaactctgaaactccacttggagatgttggcagaccagccacgaacaactaaataccacagtgtcatcctgcagaataaagaatccctgacggataaagtcatcctggacgtgggctgtgggactgggatcatcagtctcttctgtgcacactatgcgcggcctagagcggtgtacgcggtggaggccagtgagatggcacagcacacggggcagctggtcctgcagaacggctttgctgacatcatcaccgtgtaccagcagaaggtggaggatgtggtgctgcccgagaaggtggacgtgctggtgtctgagtggatggggacctgcctgctggtgagggcgggcgtgcgggcagctgggggccggagctggggggcttctgagcacgggctcggctgggccaacctcaggatctcaagggtcgtgcgtgattcattttgatgttttccctaatgtgaggtctaattaatttcttgtgtggacattg

SEQ ID NO: 170459 - DNA, 2880 bp, Homo sapiens
  Payload ID: 13557
  Gene Symbol: PRMT2
  Gene Name: protein arginine methyltransferase 2
  Uniprot ID: P55345
  ENST ID: ENST00000397637
  CDS Start-End: 955-2256
gcgtgcactgcgcttgcgcgggttgagggcggtggctcaggctcctggaaaggaccgtccacccctccgcgctggcggtgtggacgcggaactcagcggagaaacgcgattgaggtaggtgtcctgatgggcagctcagatggctggactgcacgtaaggaaggacaggccaggtgaggcgtcctcgcactgcgtgtgcgtcgctggcggacagaggcctccgcccccttttgggacctccgagcgccttcgcgatctcagccactttccctggcgtccaaacgggagctcggtccccgtcacacccttccctgcgtgccgcaccccttcccggccactcccgccgtccagcgccttctacggccacgcccaccccaccaccatctctgtcacgcccttcgcggccacgcccacctgcctggcggcccctgccccgaagctcgcggcgctgtcccagcctgaccctctcgtgcccctgcgtccacgcgtggccctctcgcttcctgcccccttctcaccccccttcactggccacctgttccaaccctccatgatcctgttcctcccgagggcatcttaggagggcagggtcctgcgcgcactgcggcctccactccgaccccgtcccagtttggacccaggtcttccaatgaaaatataattatgcaaatcagtaagcatttgtaactacgaatatcacaaaaataagcttcaagtctggatttagaagtgaagcatgcattttaaacaaagaattgctatgcaattttaaaaacacattgatcccagagcagtgtgtggattacactatcactggaaaaatacgaattgagaagaaggaaaagactggaagatgcagaccttggttcctgttagtggaaacactgtaaggtcccagaaatggaaaagaaaatgaaataaatcagcagttatgaggcagagcctaagagaactatggcaacatcaggtgactgtcccagaagtgaatcgcagggagaagagcctgctgagtgcagtgaggccggtctcctgcaggagggagtacagccagaggagtttgtggccatcgcggactacgctgccaccgatgagacccagctcagttttttgagaggagaaaaaattcttatcctgagacaaaccactgcagattggtggtggggtgagcgtgcgggctgctgtgggtacattccggcaaaccatgtggggaagcacgtggatgagtacgaccccgaggacacgtggcaggatgaagagtacttcggcagctatggaactctgaaactccacttggagatgttggcagaccagccacgaacaactaaataccacagtgtcatcctgcagaataaagaatccctgacggataaagtcatcctggacgtgggctgtgggactgggatcatcagtctcttctgtgcacactatgcgcggcctagagcggtgtacgcggtggaggccagtgagatggcacagcacacggggcagctggtcctgcagaacggctttgctgacatcatcaccgtgtaccagcagaaggtggaggatgtggtgctgcccgagaaggtggacgtgctggtgtctgagtggatggggacctgcctgctgtttgagttcatgatcgagtccatcctgtatgcccgggatgcctggctgaaggaggacggggtcatttggcccaccatggctgcgttgcaccttgtgccctgcagtgctgataaggattatcgtagcaaggtgctcttctgggacaacgcgtacgagttcaacctcagcgctctgaaatctttagcagttaaggagtttttttcaaagcccaagtataaccacattttgaaaccagaagactgtctctctgaaccgtgcactatattgcagttggacatgagaaccgtgcaaatttctgatctagagaccctgaggggcgagctgcgcttcgacatcaggaaggcggggaccctgcacggcttcacggcctggtttagcgtccacttccagagcctgcaggaggggcagccgccgcaggtgctcagcaccgggcccttccaccccaccacacactggaagcagacgctgttcatgatggacgacccagtccctgtccatacaggagacgtggtcacgggttcagttgtgttgcagagaaacccagtgtggagaaggcacatgtctgtggctctgagctgggctgtcacttccagacaagaccccacatctcaaaaagttggagaaaaagtcttccccatctggagatgacagttgatgctttatttggaaagcagtgtgcatatcttgaggggtgatgaacacaagcaaaccaagttgcacctggcttctgcacactcctgcgaaagtcggtgaacattcactccacattgacccctccctagcctggcaggtgacgtcagggtccttcacagacaaacacgcttgggctcggcaggagctgccgtggccacccccgctgcccagtgtctgccctctagaagtaggctgtgtttccaggtgttcacccgtggtgcccacagtgccgacccgtggctgggtcggagctccatgttcctaagctaggtctaggtctacactcctaggacgcacgcatatcagcccgtgtaccctgtgacagtgactgtccccacctcctatgttagtggtgcccttactgccgtcgctcatccactcgtgtgggacgtaggattgcacagggctgtgccagtggcgtgtagggaacactgccctggctcagcgtgcgagctaaggtggtgatgtatgcgatgggactctgcatgggatagtacagttgtgtagacgtcttccaaataaattatgtgttggtccatcgcacatgctcaataaatatttttaaatgagtgaatgtca

SEQ ID NO: 170460 - DNA, 2131 bp, Homo sapiens
  Payload ID: 13557
  Gene Symbol: PRMT2
  Gene Name: protein arginine methyltransferase 2
  Uniprot ID: P55345
  ENST ID: ENST00000397638
  CDS Start-End: 206-1507
cgggccctgggcggggccttcccggctgacggcctgcgtgcactgcgcttgcgcgggttgagggcggtggctcaggctcctggaaaggaccgtccacccctccgcgctggcggtgtggacgcggaactcagcggagaaacgcgattgagaaatggaaaagaaaatgaaataaatcagcagttatgaggcagagcctaagagaactatggcaacatcaggtgactgtcccagaagtgaatcgcagggagaagagcctgctgagtgcagtgaggccggtctcctgcaggagggagtacagccagaggagtttgtggccatcgcggactacgctgccaccgatgagacccagctcagttttttgagaggagaaaaaattcttatcctgagacaaaccactgcagattggtggtggggtgagcgtgcgggctgctgtgggtacattccggcaaaccatgtggggaagcacgtggatgagtacgaccccgaggacacgtggcaggatgaagagtacttcggcagctatggaactctgaaactccacttggagatgttggcagaccagccacgaacaactaaataccacagtgtcatcctgcagaataaagaatccctgacggataaagtcatcctggacgtgggctgtgggactgggatcatcagtctcttctgtgcacactatgcgcggcctagagcggtgtacgcggtggaggccagtgagatggcacagcacacggggcagctggtcctgcagaacggctttgctgacatcatcaccgtgtaccagcagaaggtggaggatgtggtgctgcccgagaaggtggacgtgctggtgtctgagtggatggggacctgcctgctgtttgagttcatgatcgagtccatcctgtatgcccgggatgcctggctgaaggaggacggggtcatttggcccaccatggctgcgttgcaccttgtgccctgcagtgctgataaggattatcgtagcaaggtgctcttctgggacaacgcgtacgagttcaacctcagcgctctgaaatctttagcagttaaggagtttttttcaaagcccaagtataaccacattttgaaaccagaagactgtctctctgaaccgtgcactatattgcagttggacatgagaaccgtgcaaatttctgatctagagaccctgaggggcgagctgcgcttcgacatcaggaaggcggggaccctgcacggcttcacggcctggtttagcgtccacttccagagcctgcaggaggggcagccgccgcaggtgctcagcaccgggcccttccaccccaccacacactggaagcagacgctgttcatgatggacgacccagtccctgtccatacaggagacgtggtcacgggttcagttgtgttgcagagaaacccagtgtggagaaggcacatgtctgtggctctgagctgggctgtcacttccagacaagaccccacatctcaaaaagttggagaaaaagtcttccccatctggagatgacagttgatgctttatttggaaagcagtgtgcatatcttgaggggtgatgaacacaagcaaaccaagttgcacctggcttctgcacactcctgcgaaagtcggtgaacattcactccacattgacccctccctagcctggcaggtgacgtcagggtccttcacagacaaacacgcttgggctcggcaggagctgccgtggccacccccgctgcccagtgtctgccctctagaagtaggctgtgtttccaggtgttcacccgtggtgcccacagtgccgacccgtggctgggtcggagctccatgttcctaagctaggtctaggtctacactcctaggacgcacgcatatcagcccgtgtaccctgtgacagtgactgtccccacctcctatgttagtggtgcccttactgccgtcgctcatccactcgtgtgggacgtaggattgcacagggctgtgccagtggcgtgtagggaacactgccctggctcagcgtgcgagctaaggtggtgatgtatgcgatgggactctgcatgggatagtacagttgtgtagacgtcttccaaataaattatgtgttggtccatcgcacatgctcaataaatatttttaaatgagtgaatgtca

SEQ ID NO: 170461 - DNA, 1932 bp, Homo sapiens
  Payload ID: 13557
  Gene Symbol: PRMT2
  Gene Name: protein arginine methyltransferase 2
  Uniprot ID: P55345
  ENST ID: ENST00000440086
  CDS Start-End: 140-1135
gtggctcaggctcctggaaaggaccgtccacccctccgcgctggcggtgtggacgcggaactcagcggagaaacgcgattgagaaatggaaaagaaaatgaaataaatcagcagttatgaggcagagcctaagagaactatggcaacatcaggtgactgtcccagaagtgaatcgcagggagaagagcctgctgagtgcagtgaggccggtctcctgcaggagggagtacagccagaggagtttgtggccatcgcggactacgctgccaccgatgagacccagctcagttttttgagaggagaaaaaattcttatcctgagacaaaccactgcagattggtggtggggtgagcgtgcgggctgctgtgggtacattccggcaaaccatgtggggaagcacgtggatgagtacgaccccgaggacacgtggcaggatgaagagtacttcggcagctatggaactctgaaactccacttggagatgttggcagaccagccacgaacaactaaataccacagtgtcatcctgcagaataaagaatccctgacggataaagtcatcctggacgtgggctgtgggactgggatcatcagtctcttctgtgcacactatgcgcggcctagagcggtgtacgcggtggaggccagtgagatggcacagcacacggggcagctggtcctgcagaacggctttgctgacatcatcaccgtgtaccagcagaaggtggaggatgtggtgctgcccgagaaggtggacgtgctggtgtctgagtggatggggacctgcctgctgaccctgaggggcgagctgcgcttcgacatcaggaaggcggggaccctgcacggcttcacggcctggtttagcgtccacttccagagcctgcaggaggggcagccgccgcaggtgctcagcaccgggcccttccaccccaccacacactggaagcagacgctgttcatgatggacgacccagtccctgtccatacaggagacgtggtcacgggttcagttgtgttgcagagaaacccagtgtggagaaggcacatgtctgtggctctgagctgggctgtcacttccagacaagaccccacatctcaaaaagttggagaaaaagtcttccccatctggagatgacagttgatgctttatttggaaagcagtgtgcatatcttgaggggtgatgaacacaagcaaaccaagttgcacctggcttctgcacactcctgcgaaagtcggtgaacattcactccacattgacccctccctagcctggcaggtgacgtcagggtccttcacagacaaacacgcttgggctcggcaggagctgccgtggccacccccgctgcccagtgtctgccctctagaagtaggctgtgtttccaggtgttcacccgtggtgcccacagtgccgacccgtggctgggtcggagctccatgttcctaagctaggtctaggtctacactcctaggacgcacgcatatcagcccgtgtaccctgtgacagtgactgtccccacctcctatgttagtggtgcccttactgccgtcgctcatccactcgtgtgggacgtaggattgcacagggctgtgccagtggcgtgtagggaacactgccctggctcagcgtgcgagctaaggtggtgatgtatgcgatgggactctgcatgggatagtacagttgtgtagacgtcttccaaataaattatgtgttggtccatcgcacatgctcaataaatatttttaaatgagtgaatgtcattgtgtatcctgttttatgcatatatgttattttttgtaattacaggatcatactatatgcattgctttataagtttttctcaatattgtgaaaaaacttccacatcagtagatacatgtccataatttttttttgtattgttttgatttttattaaattttattgaaatata

SEQ ID NO: 170462 - DNA, 581 bp, Homo sapiens
  Payload ID: 13557
  Gene Symbol: PRMT2
  Gene Name: protein arginine methyltransferase 2
  ENST ID: ENST00000455177
  CDS Start-End: 1-581
gacaaaccactgcagattggtggtggggtgagcgtgcgggctgctgtgggtacattccggcaaaccatgtggggaagcacgtggatgagtacgaccccgaggacacgtggcaggatgaagagtacttcggcagctatggaactctgaaactccacttggagatgttggcagaccagccacgaacaactaaataccacagtgtcatcctgcagaataaagaatccctgacggataaagtcatcctggacgtgggctgtgggactgggatcatcagtctcttctgtgcacactatgcgcggcctagagcggtgtacgcggtggaggccagtgagatggcacagcacacggggcagctggtcctgcagaacggctttgctgacatcatcaccgtgtaccagcagaaggtggaggatgtggtgctgcccgagaaggtggacgtgctggtgtctgagtggatggggacctgcctgctgttgttacaggatcttgcttgttctcctgaggccacgccacgatttccgagaagcaggttgcacactcagcagtctcccactagccagtggcactgcaggtgcaggggc

SEQ ID NO: 170463 - DNA, 1874 bp, Homo sapiens
  Payload ID: 13557
  Gene Symbol: PRMT2
  Gene Name: protein arginine methyltransferase 2
  Uniprot ID: P55345
  ENST ID: ENST00000458387
  CDS Start-End: 226-1131
actgcgcctgcgcggggcgccgggccctgggcggggccttcccggctgacggcctgcgtgcactgcgcttgcgcgggttgagggcggtggctcaggctcctggaaaggaccgtccacccctccgcgctggcggtgtggacgcggaactcagcggagaaacgcgattgagaaatggaaaagaaaatgaaataaatcagcagttatgaggcagagcctaagagaactatggcaacatcaggtgactgtcccagaagtgaatcgcagggagaagagcctgctgagtgcagtgaggccggtctcctgcaggagggagtacagccagaggagtttgtggccatcgcggactacgctgccaccgatgagacccagctcagttttttgagaggagaaaaaattcttatcctgagacaaaccactgcagattggtggtggggtgagcgtgcgggctgctgtgggtacattccggcaaaccatgtggggaagcacgtggatgagtacgaccccgaggacacgtggcaggatgaagagtacttcggcagctatggaactctgaaactccacttggagatgttggcagaccagccacgaacaactaaataccacagtgtcatcctgcagaataaagaatccctgacggataaagtcatcctggacgtgggctgtgggactgggatcatcagtctcttctgtgcacactatgcgcggcctagagcggtgtacgcggtggaggccagtgagatggcacagcacacggggcagctggtcctgcagaacggctttgctgacatcatcaccgtgtaccagcagaaggtggaggatgtggtgctgcccgagaaggtggacgtgctggtgtctgagtggatggggacctgcctgctgcaccacacactggaagcagacgctgttcatgatggacgacccagtccctgtccatacaggagacgtggtcacgggttcagttgtgttgcagagaaacccagtgtggagaaggcacatgtctgtggctctgagctgggctgtcacttccagacaagaccccacatctcaaaaagttggagaaaaagtcttccccatctggagatgacagttgatgctttatttggaaagcagtgtgcatatcttgaggggtgatgaacacaagcaaaccaagttgcacctggcttctgcacactcctgcgaaagtcggtgaacattcactccacattgacccctccctagcctggcaggtgacgtcagggtccttcacagacaaacacgcttgggctcggcaggagctgccgtggccacccccgctgcccagtgtctgccctctagaagtaggctgtgtttccaggtgttcacccgtggtgcccacagtgccgacccgtggctgggtcggagctccatgttcctaagctaggtctaggtctacactcctaggacgcacgcatatcagcccgtgtaccctgtgacagtgactgtccccacctcctatgttagtggtgcccttactgccgtcgctcatccactcgtgtgggacgtaggattgcacagggctgtgccagtggcgtgtagggaacactgccctggctcagcgtgcgagctaaggtggtgatgtatgcgatgggactctgcatgggatagtacagttgtgtagacgtcttccaaataaattatgtgttggtccatcgcacatgctcaataaatatttttaaatgagtgaatgtcattgtgtatcctgttttatgcatatatgttattttttgtaattacaggatcatactatatgcattgctttataagtttttctcaatattgtgaaaaaacttccacatcagtagatacatgtccataatttttttttgtattgttttgatttttattaaattttattg

SEQ ID NO: 170464 - DNA, 1878 bp, Homo sapiens
  Payload ID: 13557
  Gene Symbol: PRMT2
  Gene Name: protein arginine methyltransferase 2
  Uniprot ID: P55345
  ENST ID: ENST00000451211
  CDS Start-End: 226-1095
actgcgcctgcgcggggcgccgggccctgggcggggccttcccggctgacggcctgcgtgcactgcgcttgcgcgggttgagggcggtggctcaggctcctggaaaggaccgtccacccctccgcgctggcggtgtggacgcggaactcagcggagaaacgcgattgagaaatggaaaagaaaatgaaataaatcagcagttatgaggcagagcctaagagaactatggcaacatcaggtgactgtcccagaagtgaatcgcagggagaagagcctgctgagtgcagtgaggccggtctcctgcaggagggagtacagccagaggagtttgtggccatcgcggactacgctgccaccgatgagacccagctcagttttttgagaggagaaaaaattcttatcctgagacaaaccactgcagattggtggtggggtgagcgtgcgggctgctgtgggtacattccggcaaaccatgtggggaagcacgtggatgagtacgaccccgaggacacgtggcaggatgaagagtacttcggcagctatggaactctgaaactccacttggagatgttggcagaccagccacgaacaactaaataccacagtgtcatcctgcagaataaagaatccctgacggataaagtcatcctggacgtgggctgtgggactgggatcatcagtctcttctgtgcacactatgcgcggcctagagcggtgtacgcggtggaggccagtgagatggcacagcacacggggcagctggtcctgcagaacggctttgctgacatcatcaccgtgtaccagcagaaggtggaggatgtggtgctgcccgagaaggtggacgtgctggtgtctgagtggatggggacctgcctgctgtttgagttcatgatcgagtccatcctgtatgcccgggatgcctggctgaaggaggacggggtcatttggcccaccatggctgcgttgcaccttgtgccctgcagtgctgataaggattatcgtagcaaggtgctcttctgggacaacgcgtacgagttcaacctcagcgctctgaagttggagaaaaagtcttccccatctggagatgacagttgatgctttatttggaaagcagtgtgcatatcttgaggggtgatgaacacaagcaaaccaagttgcacctggcttctgcacactcctgcgaaagtcggtgaacattcactccacattgacccctccctagcctggcaggtgacgtcagggtccttcacagacaaacacgcttgggctcggcaggagctgccgtggccacccccgctgcccagtgtctgccctctagaagtaggctgtgtttccaggtgttcacccgtggtgcccacagtgccgacccgtggctgggtcggagctccatgttcctaagctaggtctaggtctacactcctaggacgcacgcatatcagcccgtgtaccctgtgacagtgactgtccccacctcctatgttagtggtgcccttactgccgtcgctcatccactcgtgtgggacgtaggattgcacagggctgtgccagtggcgtgtagggaacactgccctggctcagcgtgcgagctaaggtggtgatgtatgcgatgggactctgcatgggatagtacagttgtgtagacgtcttccaaataaattatgtgttggtccatcgcacatgctcaataaatatttttaaatgagtgaatgtcattgtgtatcctgttttatgcatatatgttattttttgtaattacaggatcatactatatgcattgctttataagtttttctcaatattgtgaaaaaacttccacatcagtagatacatgtccataatttttttttgtattgttttgatttttattaaattttattg

SEQ ID NO: 170465 - DNA, 1301 bp, Homo sapiens
  Payload ID: 13557
  Gene Symbol: PRMT2
  Gene Name: protein arginine methyltransferase 2
  ENST ID: ENST00000621201
  CDS Start-End: 305-790
gggagaagagcctgctgagtgcagtgaggccggtctcctgcaggagggagtacagccagaggagtttgtggccatcgcggactacgctgccaccgatgagacccagctcagttttttgagaggagaaaaaattcttatcctgagacaaaccactgcagattggtggtggggtgagcgtgcgggctgctgtgggtacattccggcaaaccatgtggggaagcacgtggatgagtacgaccccgaggacacgtggcaggatgaagagtacttcggcagctatggaactctgaaactccacttggagatgttggcagaccagccacgaacaactaaataccacagtgtcatcctgcagaataaagaatccctgcggataaagtcatcctggacgtgggctgtgggactgggatcatcagtctcttctgtgcacactatgcgcggcctagagcgggtgtacgcggtggaggccagtgagatggcacagcacacggggcagctggtcctgcagaacggctttgctgacatcatcaccgtgtaccagcagaaggtggaggatgtggtgctgcccgagaaggtggacgtgctggtgtctgagtggatggggacctgcctgctgtttgagttcatgatcgagtccatcctgtatgcccgggatgcctggctgaaggagacggggtcatttggcccaccatggctgcgttgcaccttgtgccctgcagtgctgataaggattatcgtagcaaggtgctcttctgggacaacgcgtacgagttcaacctcagcgctctgaagtaagtgtccacagctgggactggcaccgtcttgtggggcctcctggtccacagtctgcaggtgggccaaggccctgggagatcccatacgacggttggataaatgagggtacctgtgcacccagataggacaatctgttgtagcattggagtaattaaagcagtatggtgctataacaagacagatgggcagagcagggtagaatgcaaggaacaaaaattttcgtatgtgaaaaaggtggcattacgattaggagggagtgagggccaagtcagcaaattattctggagcagttgattagcccttgttctctcacgccatacgtgaaaacttaattctgcatggaatcagcgtcagcgacagacatccatgggggcctgtgtgcaccatcttaggtggagaaatgagcagcaacaatggatggaatggaccctgggctagatagaatctggcagtctatgtggcagaaatcagcaaaaacacgattgtaaaagcaaacaagtaattag

SEQ ID NO: 170466 - DNA, 2530 bp, Homo sapiens
  Payload ID: 13558
  Gene Symbol: PRMT3
  Gene Name: protein arginine methyltransferase 3
  ENST ID: ENST00000330796
  CDS Start-End: 190-330
gaagcgattgcgagccagcgcgcgcgcttcggcgttcccggcggtctgcgaagtttccggagcccgggtcccgccgcgggttcgcgcttgtgctcgcgctcgttcctggagtcggcggccgctgcgcgcgctcgttgcccaacccggtccccgcccccagacacgccgggctctcggggcaccacagccatgtgctcgttagcgtcaggcgctaccggttattcacatctgctgaagaaacattttcacactgtaagtctgagcatcagtttaatattgacagcatggttcataaacatggacttgaattttatggatacattaagctaataaattttattagacttaagaatcctacagttgagtacatgaattccatatacaacccagtgccttgggagaaagaagagtatttgaagccagtattagaagatgaccttttacttcaatttgatgtagaagatctttatgaaccggtgtcagtacccttctcataccccaatggactcagtgaaaatacatctgttgttgaaaaattgaaacatatggaagccagggcactgtctgctgaagccgcattggccagagcacgtgaggatctgcaaaaaatgaaacaatttgctcaggattttgtgatgcacacagatgtcagaacctgctcgtcatctactagtgtcattgcggacctccaggaggatgaggatggtgtttatttcagctcatacgggcattatgggatacatgaagaaatgctaaaggacaaaatacgaacagaaagctaccgagatttcatataccaaaatccacatatcttcaaagacaaggtagttttggatgttgggtgtggaactggaattctctctatgtttgctgctaaagctggggcgaagaaggttcttggagttgatcaatctgaaatactttaccaggcaatggatattataagactaaataaacttgaagatactattacactaattaaaggaaagattgaagaagttcatcttcctgtagaaaaagtagatgttatcatatctgagtggatgggctattttcttctgtttgagtctatgttagattctgtcctttatgcaaagaacaaatacttggcaaaaggaggctcggtctaccctgacatttgcactatcagccttgtagcagtgagtgatgtgaataaacatgctgatagaattgctttttgggatgatgtctatggcttcaagatgtcctgcatgaagaaagcagttattccagaagctgttgtggaagttttagatccgaagactcttatttcagaaccttgtggtattaagcatatagattgccatacgacgtctatctcagatttggaattttcatcagattttaccctgaaaatcacaaggacatccatgtgcacggcaattgctggctactttgatatatattttgagaagaattgccacaacagggtcgtgttctctacgggccctcagagcaccaaaacacactggaaacaaacagtatttctactggaaaaaccattttcagttaaagcaggtgaagccttgaaaggaaaggtcacagttcacaagaataagaaagatccacgttctctcaccgtgaccctcacgttgaataattcaactcaaacttatggtctccagtgaaacagccataaaagcacactaccttgtagtttttaatgtgggggtagagtgggtcagcaggagggagctggttttatgtgagcagatggatggatgatggaccctttcctaatgagcctcctcaataagagagaagttctcattgtgggaatctgacatagttcagctgaggaagagaatcagctgatcctcatggtctgccacgtaatcattttcttagacgtttgctccaccagatttaaccaaatgtaactcccacattgagtttatctatattgaaaatcatttacattggcctatatttggaagagagatagtcttttgtttttaataagtttcttactataaattttaaacaaattggttagttatttggatattttattaaactagtaacacaggtactacacattttattatggactcctctgaggaggagtttttaattgtatttgctagaaaatcaggatgtaataaagatttgtataaaaaaactaaaatatggaaaagagcttcagccttcatatacaaatcatatatgcagacagcctagttgattatctagcatacttagggttctcattttgtagtttcttccctctttgtgactattccttagccttatagatttctagtactgcccaggaaatctaatttcaatacatttatcctaggtttcatgaaagtttttaaagattgggataaatatgtacttatttactaacgtattatctttttcaaaccagatttatgtgcaaaggttaaacatgtaactgttactaagcagtctataaagttgtcatttacaattactgattcaatttgaaatgtagaataaaattttaataaaatgtatcaacttataaaatattttaaaaata

SEQ ID NO: 170467 - DNA, 2653 bp, Homo sapiens
  Payload ID: 13558
  Gene Symbol: PRMT3
  Gene Name: protein arginine methyltransferase 3
  Uniprot ID: O60678
  ENST ID: ENST00000331079
  CDS Start-End: 218-1813
acgtgacccgcacggcgcctcgaggccggaagcgattgcgagccagcgcgcgcgcttcggcgttcccggcggtctgcgaagtttccggagcccgggtcccgccgcgggttcgcgcttgtgctcgcgctcgttcctggagtcggcggccgctgcgcgcgctcgttgcccaacccggtccccgcccccagacacgccgggctctcggggcaccacagccatgtgctcgttagcgtcaggcgctaccggcggccggggcgctgtggagaatgaggaggacctgccagaactgtcggacagcggggacgaggccgcctgggaggatgaggacgatgcagatctcccccacggcaagcagcagaccccctgcctgttctgtaacaggttattcacatctgctgaagaaacattttcacactgtaagtctgagcatcagtttaatattgacagcatggttcataaacatggacttgaattttatggatacattaagctaataaattttattagacttaagaatcctacagttgagtacatgaattccatatacaacccagtgccttgggagaaagaagagtatttgaagccagtattagaagatgaccttttacttcaatttgatgtagaagatctttatgaaccggtgtcagtacccttctcataccccaatggactcagtgaaaatacatctgttgttgaaaaattgaaacatatggaagccagggcactgtctgctgaagccgcattggccagagcacgtgaggatctgcaaaaaatgaaacaatttgctcaggattttgtgatgcacacagatgtcagaacctgctcgtcatctactagtgtcattgcggacctccaggaggatgaggatggtgtttatttcagctcatacgggcattatgggatacatgaagaaatgctaaaggacaaaatacgaacagaaagctaccgagatttcatataccaaaatccacatatcttcaaagacaaggtagttttggatgttgggtgtggaactggaattctctctatgtttgctgctaaagctggggcgaagaaggttcttggagttgatcaatctgaaatactttaccaggcaatggatattataagactaaataaacttgaagatactattacactaattaaaggaaagattgaagaagttcatcttcctgtagaaaaagtagatgttatcatatctgagtggatgggctattttcttctgtttgagtctatgttagattctgtcctttatgcaaagaacaaatacttggcaaaaggaggctcggtctaccctgacatttgcactatcagccttgtagcagtgagtgatgtgaataaacatgctgatagaattgctttttgggatgatgtctatggcttcaagatgtcctgcatgaagaaagcagttattccagaagctgttgtggaagttttagatccgaagactcttatttcagaaccttgtggtattaagcatatagattgccatacgacgtctatctcagatttggaattttcatcagattttaccctgaaaatcacaaggacatccatgtgcacggcaattgctggctactttgatatatattttgagaagaattgccacaacagggtcgtgttctctacgggccctcagagcaccaaaacacactggaaacaaacagtatttctactggaaaaaccattttcagttaaagcaggtgaagccttgaaaggaaaggtcacagttcacaagaataagaaagatccacgttctctcaccgtgaccctcacgttgaataattcaactcaaacttatggtctccagtgaaacagccataaaagcacactaccttgtagtttttaatgtgggggtagagtgggtcagcaggagggagctggttttatgtgagcagatggatggatgatggaccctttcctaatgagcctcctcaataagagagaagttctcattgtgggaatctgacatagttcagctgaggaagagaatcagctgatcctcatggtctgccacgtaatcattttcttagacgtttgctccaccagatttaaccaaatgtaactcccacattgagtttatctatattgaaaatcatttacattggcctatatttggaagagagatagtcttttgtttttaataagtttcttactataaattttaaacaaattggttagttatttggatattttattaaactagtaacacaggtactacacattttattatggactcctctgaggaggagtttttaattgtatttgctagaaaatcaggatgtaataaagatttgtataaaaaaactaaaatatggaaaagagcttcagccttcatatacaaatcatatatgcagacagcctagttgattatctagcatacttagggttctcattttgtagtttcttccctctttgtgactattccttagccttatagatttctagtactgcccaggaaatctaatttcaatacatttatcctaggtttcatgaaagtttttaaagattgggataaatatgtacttatttactaacgtattatctttttcaaaccagatttatgtgcaaaggttaaacatgtaactgttactaagcagtctataaagttgtcatttacaattactgattcaatttgaaatgtagaataaaa

SEQ ID NO: 170468 - DNA, 1736 bp, Homo sapiens
  Payload ID: 13558
  Gene Symbol: PRMT3
  Gene Name: protein arginine methyltransferase 3
  ENST ID: ENST00000437750
  CDS Start-End: 32-1441
agacacgccgggctctcggggcaccacagccatgtgctcgttagcgtcaggcgctaccggttattcacatctgctgaagaaacattttcacactgtaagtctgagcatcagtttaatattgacagcatggttcataaacatgaatcctacagttgagtacatgaattccatatacaacccagtgccttgggagaaagaagagtatttgaagccagtattagaagatgaccttttacttcaatttgatgtagaagatctttatgaaccggtgtcagtacccttctcataccccaatggactcagtgaaaatacatctgttgttgaaaaattgaaacatatggaagccagggcactgtctgctgaagccgcattggccagagcacgtgaggatctgcaaaaaatgaaacaatttgctcaggattttgtgatgcacacagatgtcagaacctgctcgtcatctactagtgtcattgcggacctccaggaggatgaggatggtgtttatttcagctcatacgggcattatgggatacatgaagaaatgctaaaggacaaaatacgaacagaaagctaccgagatttcatataccaaaatccacatatcttcaaagacaaggtagttttggatgttgggtgtggaactggaattctctctatgtttgctgctaaagctggggcgaagaaggttcttggagttgatcaatctgaaatactttaccaggcaatggatattataagactaaataaacttgaagatactattacactaattaaaggaaagattgaagaagttcatcttcctgtagaaaaagtagatgttatcatatctgagtggatgggctattttcttctgtttgagtctatgttagattctgtcctttatgcaaagaacaaatacttggcaaaaggaggctcggtctaccctgacatttgcactatcagccttgtagcagtgagtgatgtgaataaacatgctgatagaattgctttttgggatgatgtctatggcttcaagatgtcctgcatgaagaaagcagttattccagaagctgttgtggaagttttagatccgaagactcttatttcagaaccttgtggtattaagcatatagattgccatacgacgtctatctcagatttggaattttcatcagattttaccctgaaaatcacaaggacatccatgtgcacggcaattgctggctactttgatatatattttgagaagaattgccacaacagggtcgtgttctctacgggccctcagagcaccaaaacacactggaaacaaacagtatttctactggaaaaaccattttcagttaaagcaggtgaagccttgaaaggaaaggtcacagttcacaagaataagaaagatccacgttctctcaccgtgaccctcacgttgaataattcaactcaaacttatggtctccagtgaaacagccataaaagcacactaccttgtagtttttaatgtgggggtagagtgggtcagcaggagggagctggttttatgtgagcagatggatggatgatggaccctttcctaatgagcctcctcaataagagagaagttctcattgtgggaatctgacatagttcagctgaggaagagaatcagctgatcctcatggtctgccacgtaatcattttcttagacgtttgctccaccagatttaaccaaatgtaactcccacattgagtttatctatattgaaaatcatttacattgg

SEQ ID NO: 170469 - DNA, 532 bp, Homo sapiens
  Payload ID: 13558
  Gene Symbol: PRMT3
  Gene Name: protein arginine methyltransferase 3
  ENST ID: ENST00000526583
  CDS Start-End: 1-165
atgtgctcgttagcgtcaggcgctaccggtgggtaccctggcccctcagcacccggctcgtccagccccaggccgcgccgctgtggggccggtggaagaccctccgggacacgggcccgggcagggtggggggctcgcagggatcatgaaggaggtgctgagtgagggccgcgggcgaacggggcggaggagagcccatcgtcacctgctcctcgagcccccgggccgcaccggtgtccgaggccgatctgattgttgtgtgtgtgtgttaggcggccggggcgctgtggagaatgaggaggacctgccagaactgtcggacagcggggacgaggccgcctgggaggatgaggacgatgcagatctcccccacggcaagcagcagaccccctgcctgttctgtaacaggttattcacatctgctgaagaaacattttcacactgtaagtctgagcatcagtttaatattgacagcatggttcataaacatggacttgaattttatggatacattaagctaataaattttatt

SEQ ID NO: 170470 - DNA, 681 bp, Homo sapiens
  Payload ID: 13558
  Gene Symbol: PRMT3
  Gene Name: protein arginine methyltransferase 3
  ENST ID: ENST00000525188
  CDS Start-End: 108-248
cgcgcttgtgctcgcgctcgttcctggagtcggcggccgctgcgcgcgctcgttgcccaacccggtccccgcccccagacacgccgggctctcggggcaccacagccatgtgctcgttagcgtcaggcgctaccggttattcacatctgctgaagaaacattttcacactgtaagtctgagcatcagtttaatattgacagcatggttcataaacatggacttgaattttatggatacattaagctaataaattttattagacttaagaatcctacagttgagtacatgaattccatatacaacccagtgccttgggagaaagaagagtatttgaagccagtattagaagatgaccttttacttcaatttgcagaaagcaaaacagaaactggccaaacagtttgaagaattttgaaatcaaaatacaaaatgagatgtagaagatctttatgaaccggtgtcagtacccttctcataccccaatggactcagtgaaaatacatctgttgttgaaaaattgaaacatatggaagccagggcactgtctgctgaagccgcattggccagagcacgtgaggatctgcaaaaaatgaaacaatttgctcaggattttgtgatgcacacagatgtcagaacctgctcgtcatctactagtgtcattgcggacctccaggaggatg

SEQ ID NO: 170471 - DNA, 2271 bp, Homo sapiens
  Payload ID: 13559
  Gene Symbol: PRMT5
  Gene Name: protein arginine methyltransferase 5
  Uniprot ID: O14744
  ENST ID: ENST00000216350
  CDS Start-End: 167-1897
aatcccggcgtggacagcgcgaggagaaagatggcggcgatggcggtcgggggtgctggtgggagccgcgtgtccagcgggagggacctgaattgcgtccccgaaatagctgacacactaggggctgtggccaagcaggggtgagggccggacctccacgagcggaatgcggggtccgaactcggggacggagaagggcagactagtcatcccggagaagcaggggtttgatttcctctgcatgcctgtcttccatccgcgtttcaagagggagttcattcaggaacctgctaagaatcggcccggtccccagacacgatcagacctactgctgtcaggaagggctttcctgctgccccttaatcaggaagataacaccaacctggccagagttttgaccaaccacatccacactggccatcactcttccatgttctggatgcgggtacccttggtggcaccagaggacctgagagatgatataattgagaatgcaccaactacacacacagaggagtacagtggggaggagaaaacgtggatgtggtggcacaacttccggactttgtgtgactatagtaagaggattgcagtggctcttgaaattggggctgacctcccatctaatcatgtcattgatcgctggcttggggagcccatcaaagcagccattctccccactagcattttcctgaccaataagaagggatttcctgttctttctaagatgcaccagaggctcatcttccggctcctcaagttggaggtgcagttcatcatcacaggcaccaaccaccactcagagaaggagttctgctcctacctccaatacctggaatacttaagccagaaccgtcctccacctaatgcctatgaactctttgccaagggctatgaagactatctgcagtccccgcttcagccactgatggacaatctggaatctcagacatatgaagtgtttgaaaaggaccccatcaaatactctcagtaccagcaggccatctataaatgtctgctagaccgagtaccagaagaggagaaggataccaatgtccaggtactgatggtgctgggagcaggacggggacccctggtgaacgcttccctgcgggcagccaagcaggccgaccggcggataaagctgtatgctgtggagaaaaacccaaatgccgtggtgacgctagagaactggcagtttgaagaatggggaagccaagtgaccgtagtctcatcagacatgagggaatgggtggctccagagaaagcagacatcattgtcagtgagcttctgggctcatttgctgacaatgaattgtcgcctgagtgcctggatggagcccagcacttcctaaaagatgatggtgtgagcatccccggggagtacacttcctttctggctcccatctcttcctccaagctgtacaatgaggtccgagcctgtagggagaaggaccgtgaccctgaggcccagtttgagatgccttatgtggtacggctgcacaacttccaccagctctctgcaccccagccctgtttcaccttcagccatcccaacagagatcctatgattgacaacaaccgctattgcaccttggaatttcctgtggaggtgaacacagtactacatggctttgccggctactttgagactgtgctttatcaggacatcactctgagtatccgtccagagactcactctcctgggatgttctcatggtttcccatcctcttccctattaagcagcccataacggtacgtgaaggccaaaccatctgtgtgcgtttctggcgatgcagcaattccaagaaggtgtggtatgagtgggctgtgacagcaccagtctgttctgctattcataaccccacaggccgctcatataccattggcctctagccctgcgtgccaagtgtccagagccttggaagcagcttcaggttctgctcctgtagtacagaaggtgcagtacatctatgggctgtgattccccttgcccatcagagaggagcatttcaatctgctttcctgccttacatcaaggtgggcaagggattataattaattgcagggctcaagccaccaatctatgaagacctcaggccagggggtgaggaattagtgctggatttgaagctacgcactcagcctcaagaactccctggaatatccctgagaacatggggtttgaacggattttcagcctttttctgttcttgttttgatggttttgtgtaagaggaaatacaaataaagttatagccctttactgc

SEQ ID NO: 170472 - DNA, 2531 bp, Homo sapiens
  Payload ID: 13559
  Gene Symbol: PRMT5
  Gene Name: protein arginine methyltransferase 5
  Uniprot ID: O14744
  ENST ID: ENST00000324366
  CDS Start-End: 225-2138
aagttcgtcaggaaccagaccctgagattggtggatccatgccgtacgccactgtgcagcccgcggattggcaggaaaagccactccccatccctcctgttcgggagctgtggcagacgctctggttgttaaggcgactcgtcccgccttctggggcactagtttgactttgtgattggctactagtatcaaggaatcccggcgtggacagcgcgaggagaaagatggcggcgatggcggtcgggggtgctggtgggagccgcgtgtccagcgggagggacctgaattgcgtccccgaaatagctgacacactaggggctgtggccaagcaggggtttgatttcctctgcatgcctgtcttccatccgcgtttcaagagggagttcattcaggaacctgctaagaatcggcccggtccccagacacgatcagacctactgctgtcaggaagggactggaatacgctaattgtgggaaagctttctccatggattcgtccagactcaaaagtggagaagattcgcaggaactccgaggcggccatgttacaggagctgaattttggtgcatatttgggtcttccagctttcctgctgccccttaatcaggaagataacaccaacctggccagagttttgaccaaccacatccacactggccatcactcttccatgttctggatgcgggtacccttggtggcaccagaggacctgagagatgatataattgagaatgcaccaactacacacacagaggagtacagtggggaggagaaaacgtggatgtggtggcacaacttccggactttgtgtgactatagtaagaggattgcagtggctcttgaaattggggctgacctcccatctaatcatgtcattgatcgctggcttggggagcccatcaaagcagccattctccccactagcattttcctgaccaataagaagggatttcctgttctttctaagatgcaccagaggctcatcttccggctcctcaagttggaggtgcagttcatcatcacaggcaccaaccaccactcagagaaggagttctgctcctacctccaatacctggaatacttaagccagaaccgtcctccacctaatgcctatgaactctttgccaagggctatgaagactatctgcagtccccgcttcagccactgatggacaatctggaatctcagacatatgaagtgtttgaaaaggaccccatcaaatactctcagtaccagcaggccatctataaatgtctgctagaccgagtaccagaagaggagaaggataccaatgtccaggtactgatggtgctgggagcaggacggggacccctggtgaacgcttccctgcgggcagccaagcaggccgaccggcggataaagctgtatgctgtggagaaaaacccaaatgccgtggtgacgctagagaactggcagtttgaagaatggggaagccaagtgaccgtagtctcatcagacatgagggaatgggtggctccagagaaagcagacatcattgtcagtgagcttctgggctcatttgctgacaatgaattgtcgcctgagtgcctggatggagcccagcacttcctaaaagatgatggtgtgagcatccccggggagtacacttcctttctggctcccatctcttcctccaagctgtacaatgaggtccgagcctgtagggagaaggaccgtgaccctgaggcccagtttgagatgccttatgtggtacggctgcacaacttccaccagctctctgcaccccagccctgtttcaccttcagccatcccaacagagatcctatgattgacaacaaccgctattgcaccttggaatttcctgtggaggtgaacacagtactacatggctttgccggctactttgagactgtgctttatcaggacatcactctgagtatccgtccagagactcactctcctgggatgttctcatggtttcccatcctcttccctattaagcagcccataacggtacgtgaaggccaaaccatctgtgtgcgtttctggcgatgcagcaattccaagaaggtgtggtatgagtgggctgtgacagcaccagtctgttctgctattcataaccccacaggccgctcatataccattggcctctagccctgcgtgccaagtgtccagagccttggaagcagcttcaggttctgctcctgtagtacagaaggtgcagtacatctatgggctgtgattccccttgcccatcagagaggagcatttcaatctgctttcctgccttacatcaaggtgggcaagggattataattaattgcagggctcaagccaccaatctatgaagacctcaggccagggggtgaggaattagtgctggatttgaagctacgcactcagcctcaagaactccctggaatatccctgagaacatggggtttgaacggattttcagcctttttctgttcttgttttgatggttttgtgtaagaggaaatacaaataaagttatagccctttactgcacgaccatgctgccccctg

SEQ ID NO: 170473 - DNA, 1907 bp, Homo sapiens
  Payload ID: 13559
  Gene Symbol: PRMT5
  Gene Name: protein arginine methyltransferase 5
  Uniprot ID: O14744
  ENST ID: ENST00000397440
  CDS Start-End: 132-1532
ggcgatggcggtcgggggtgctggtgggagccgcgtgtccagcgggagggacctgaattgcgtccccgaaatagctgacacactaggggctgtggccaagcaggggtgagggccggacctccacgagcggaatgcggggtccgaactcggggacggagaagggcagactagtcatcccggagaagcaggggtttgatttcctctgcatgcctgtcttccatccgcgtttcaagagggagttcattcaggaacctgctaagaatcggcccggtccccagacacgatcagacctactgctgtcaggaagggactggaatacgctaattgtgggaaagctttctccatggattcgtccagactcaaaagtggagaagattcgcaggaactccgaggcgttggaggtgcagttcatcatcacaggcaccaaccaccactcagagaaggagttctgctcctacctccaatacctggaatacttaagccagaaccgtcctccacctaatgcctatgaactctttgccaagggctatgaagactatctgcagtccccgcttcagccactgatggacaatctggaatctcagacatatgaagtgtttgaaaaggaccccatcaaatactctcagtaccagcaggccatctataaatgtctgctagaccgagtaccagaagaggagaaggataccaatgtccaggtactgatggtgctgggagcaggacggggacccctggtgaacgcttccctgcgggcagccaagcaggccgaccggcggataaagctgtatgctgtggagaaaaacccaaatgccgtggtgacgctagagaactggcagtttgaagaatggggaagccaagtgaccgtagtctcatcagacatgagggaatgggtggctccagagaaagcagacatcattgtcagtgagcttctgggctcatttgctgacaatgaattgtcgcctgagtgcctggatggagcccagcacttcctaaaagatgatggtgtgagcatccccggggagtacacttcctttctggctcccatctcttcctccaagctgtacaatgaggtccgagcctgtagggagaaggaccgtgaccctgaggcccagtttgagatgccttatgtggtacggctgcacaacttccaccagctctctgcaccccagccctgtttcaccttcagccatcccaacagagatcctatgattgacaacaaccgctattgcaccttggaatttcctgtggaggtgaacacagtactacatggctttgccggctactttgagactgtgctttatcaggacatcactctgagtatccgtccagagactcactctcctgggatgttctcatggtttcccatcctcttccctattaagcagcccataacggtacgtgaaggccaaaccatctgtgtgcgtttctggcgatgcagcaattccaagaaggtgtggtatgagtgggctgtgacagcaccagtctgttctgctattcataaccccacaggccgctcatataccattggcctctagccctgcgtgccaagtgtccagagccttggaagcagcttcaggttctgctcctgtagtacagaaggtgcagtacatctatgggctgtgattccccttgcccatcagagaggagcatttcaatctgctttcctgccttacatcaaggtgggcaagggattataattaattgcagggctcaagccaccaatctatgaagacctcaggccagggggtgaggaattagtgctggatttgaagctacgcactcagcctcaagaactccctggaatatccctgagaacatggggtttgaacggattttcagcctttttctgttcttgttttgatggttttgtgtaagaggaaatacaaataaagttatagccctttactgca

SEQ ID NO: 170474 - DNA, 2418 bp, Homo sapiens
  Payload ID: 13559
  Gene Symbol: PRMT5
  Gene Name: protein arginine methyltransferase 5
  Uniprot ID: O14744
  ENST ID: ENST00000397441
  CDS Start-End: 177-2039
agtatcaaggaatcccggcgtggacagcgcgaggagaaagatggcggcgatggcggtcgggggtgctggtgggagccgcgtgtccagcgggagggacctgaattgcgtccccgaaatagctgacacactaggggctgtggccaagcaggggtgagggccggacctccacgagcggaatgcggggtccgaactcggggacggagaagggcagactagtcatcccggagaagcaggggtttgatttcctctgcatgcctgtcttccatccgcgtttcaagagggagttcattcaggaacctgctaagaatcggcccggtccccagacacgatcagacctactgctgtcaggaagggactggaatacgctaattgtgggaaagctttctccatggattcgtccagactcaaaagtggagaagattcgcaggaactccgaggcggccatgttacaggagctgaattttggtgcatatttgggtcttccagctttcctgctgccccttaatcaggaagataacaccaacctggccagagttttgaccaaccacatccacactggccatcactcttccatgttctggatgcgggtacccttggtggcaccagaggacctgagagatgatataattgagaatgcaccaactacacacacagaggagtacagtggggaggagaaaacgtggatgtggtggcacaacttccggactttgtgtgactatagtaagaggattgcagtggctcttgaaattggggctgacctcccatctaatcatgtcattgatcgctggcttggggagcccatcaaagcagccattctccccactagcattttcctgaccaataagaagggatttcctgttctttctaagatgcaccagaggctcatcttccggctcctcaagttggaggtgcagttcatcatcacaggcaccaaccaccactcagagaaggagttctgctcctacctccaatacctggaatacttaagccagaaccgtcctccacctaatgcctatgaactctttgccaagggctatgaagactatctgcagtccccgcttcagccactgatggacaatctggaatctcagacatatgaagtgtttgaaaaggaccccatcaaatactctcagtaccagcaggccatctataaatgtctgctagaccgagtaccagaagaggagaaggataccaatgtccaggtactgatggtgctgggagcaggacggggacccctggtgaacgcttccctgcgggcagccaagcaggccgaccggcggataaagctgtatgctgtggagaaaaacccaaatgccgtggtgacgctagagaactggcagtttgaagaatggggaagccaagtgaccgtagtctcatcagacatgagggaatgggtggctccagagaaagcagacatcattgtcagtgagcttctgggctcatttgctgacaatgaattgtcgcctgagtgcctggatggagcccagcacttcctaaaagatgatggtgtgagcatccccggggagtacacttcctttctggctcccatctcttcctccaagctgtacaatgaggtccgagcctgtagggagaaggaccgtgaccctgaggcccagtttgagatgccttatgtggtacggctgcacaacttccaccagctctctgcaccccagccctgtttcaccttcagccatcccaacagagatcctatgattgacaacaaccgctattgcaccttggaatttcctgtggaggtgaacacagtactacatggctttgccggctactttgagactgtgctttatcaggacatcactctgagtatccgtccagagactcactctcctgggatgttctcatggtttcccatcctcttccctattaagcagcccataacggtacgtgaaggccaaaccatctgtgtgcgtttctggcgatgcagcaattccaagaaggtgtggtatgagtgggctgtgacagcaccagtctgttctgctattcataaccccacaggccgctcatataccattggcctctagccctgcgtgccaagtgtccagagccttggaagcagcttcaggttctgctcctgtagtacagaaggtgcagtacatctatgggctgtgattccccttgcccatcagagaggagcatttcaatctgctttcctgccttacatcaaggtgggcaagggattataattaattgcagggctcaagccaccaatctatgaagacctcaggccagggggtgaggaattagtgctggatttgaagctacgcactcagcctcaagaactccctggaatatccctgagaacatggggtttgaacggattttcagcctttttctgttcttgttttgatggttttgtgtaagaggaaatacaaataaagttatagccctttactgcacgac

SEQ ID NO: 170475 - DNA, 617 bp, Homo sapiens
  Payload ID: 13559
  Gene Symbol: PRMT5
  Gene Name: protein arginine methyltransferase 5
  ENST ID: ENST00000454731
  CDS Start-End: 1-538
agatgatggtgtgagcatccccggggagtacacttcctttctggctcccatctcttcctccaagctgtacaatgaggtccgagcctgtagggagaaggaccgtgaccctgaggcccagtttgagatgccttatgtggtacggctgcacaacttccaccagctctctgcaccccagccctgtttcaccttcagccatcccaacagagatcctatgattgacaacaaccgctattgcaccttggaatttcctgtggaggtgaacacagtactacatggctttgccggctactttgagactgtgctttatcaggacatcactctgagtatccgtccagagactcactctcctgggatgttctcatggtttcccatcctcttccctattaagcccataacggtacgtgaaggccaaaccatctgtgtgcgtttctggcgatgcagcaattccaagaaggtgtggtatgagtgggctgtgacagcaccagtctgttctgctattcataaccccacaggccgctcatataccattggcctctagccctgcgtgccaagtgtccagagccttggaagcagcttcaggttctgctcctgtagtacagaaggtgcagtacatctat

SEQ ID NO: 170476 - DNA, 565 bp, Homo sapiens
  Payload ID: 13559
  Gene Symbol: PRMT5
  Gene Name: protein arginine methyltransferase 5
  ENST ID: ENST00000421938
  CDS Start-End: 8-565
gagaaagatggcggcgatggcggtcgggggtgctggtgggagccgcgtgtccagcgggagggacctgaattgcgtccccgaaatagctgacacactaggggctgtggccaagcaggggtttgatttcctctgcatgcctgtcttccatccgcgtttcaagagggagttcattcaggaacctgctaagaatcggcccggtccccagacacgatcagacctactgctgtcaggaagggtatttgtctttcttgggtgggggagtgcagactggaatacgctaattgtgggaaagctttctccatggattcgtccagactcaaaagtggagaagattcgcaggaactccgaggcggccatgttacaggagctgaattttggtgcatatttgggtcttccagctttcctgctgccccttaatcaggaagataacaccaacctggccagagttttgaccaaccacatccacactggccatcactcttccatgttctggatgcgggtacccttggtggcaccagaggacctgagagatgatataattgagaatgcaccaactacacacaca

SEQ ID NO: 170477 - DNA, 584 bp, Homo sapiens
  Payload ID: 13559
  Gene Symbol: PRMT5
  Gene Name: protein arginine methyltransferase 5
  ENST ID: ENST00000557415
  CDS Start-End: 32-292
gaatcccggcgtggacagcgcgaggagaaagatggcggcgatggcggtcgggggtgctggtgggagccgcgtgtccagcgggagggacctgaattgcgtccccgaaatagctgacacactaggggctgtggccaagcagggactggaatacgctaattgtgggaaagctttctccatggattcgtccagactcaaaagtggagaagattcgcaggaactccgaggcggccatgttacaggagctgaattttggtgcatatttgggtcttccagctttcctgctgccccttaatcaggaagataacaccaacctggccagagttttgaccaaccacatccacactggccatcactcttccatgttctggatgcgggtacccttggtggcaccagaggacctgagagatgatataattgagaatgcaccaactacacacacagaggagtacagtggggaggagaaaacgtggatgtggtggcacaacttccggactttgtgtgactatagtaagaggattgcagtggctcttgaaattggggctgacctcccatctaatcatgtcattgatcgctggcttggggag

SEQ ID NO: 170478 - DNA, 580 bp, Homo sapiens
  Payload ID: 13559
  Gene Symbol: PRMT5
  Gene Name: protein arginine methyltransferase 5
  ENST ID: ENST00000553550
  CDS Start-End: 32-580
gaatcccggcgtggacagcgcgaggagaaagatggcggcgatggcggtcgggggtgctggtgggagccgcgtgtccagcgggagggacctgaattgcgtccccgaaatagctgacacactaggggctgtggccaagcaggggtttgatttcctctgcatgcctgtcttccatccgcgtttcaagagggagttcattcaggaacctgctaagaatcggcccggtccccagacacgatcagacctactgctgtcaggaagggactggaatacgctaattgtgggaaagctttctccatggattcgtccagactcaaaagtggagaagattcgcaggaactccgaggcgttggaggtgcagttcatcatcacaggcaccaaccaccactcagagaaggagttctgctcctacctccaatacctggaatacttaagccagaaccgtcctccacctaatgcctatgaactctttgccaagggctatgaagactatctgcagtccccgcttcagccactgatggacaatctggaatctcagacatatgaagtgtttgaaaaggaccccatcaaatactctcagtac

SEQ ID NO: 170479 - DNA, 571 bp, Homo sapiens
  Payload ID: 13559
  Gene Symbol: PRMT5
  Gene Name: protein arginine methyltransferase 5
  ENST ID: ENST00000556616
  CDS Start-End: 16-571
agcgcgaggagaaagatggcggcgatggcggtcgggggtgctggtgggagccgcgtgtccagcgggagggacctgaattgcgtccccgaaatagctgacacactaggggctgtggccaagcagggtgcagactggaatacgctaattgtgggaaagctttctccatggattcgtccagactcaaaagtggagaagattcgcaggaactccgaggcggccatgttacaggagctgaattttggtgcatatttgggtcttccagctttcctgctgccccttaatcaggaagataacaccaacctggccagagttttgaccaaccacatccacactggccatcactcttccatgttctggatgcgggtacccttggtggcaccagaggacctgagagatgatataattgagaatgcaccaactacacacacagaggagtacagtggggaggagaaaacgtggatgtggtggcacaacttccggactttgtgtgactatagtaagaggattgcagtggctcttgaaattggggctgacctcccatctaatcatgtcattgatcgctggcttgggg

SEQ ID NO: 170480 - DNA, 414 bp, Homo sapiens
  Payload ID: 13559
  Gene Symbol: PRMT5
  Gene Name: protein arginine methyltransferase 5
  ENST ID: ENST00000553502
  CDS Start-End: 1-414
tcacagttggaggtgcagttcatcatcacaggcaccaaccaccactcagagaaggagttctgctcctacctccaatacctggaatacttaagccagaaccgtcctccacctaatgcctatgaactctttgccaagggctatgaagactatctgcagtccccgcttcagccactgatggacaatctggaatctcagacatatgaagtgtttgaaaaggaccccatcaaatactctcagtaccagcaggccatctataaatgtctgctagaccgagtaccagaagaggagaaggataccaatgtccaggtactgatggtgctgggagcaggacggggacccctggtgaacgcttccctgcgggcagccaagcaggccgaccggcggataaagctgctagagaactggcagtttgaa

SEQ ID NO: 170481 - DNA, 1931 bp, Homo sapiens
  Payload ID: 13559
  Gene Symbol: PRMT5
  Gene Name: protein arginine methyltransferase 5
  ENST ID: ENST00000553915
  CDS Start-End: 141-350
aaagatggcggcgatggcggtcgggggtgctggtgggagccgcgtgtccagcgggagggacctgaattgcgtccccgaaatagctgacacactaggggctgtggccaagcaggggtgagggccggacctccacgagcggaatgcggggtccgaactcggggacggagaagggcagactagtcatcccggagaagcagggactggaatacgctaattgtgggaaagctttctccatggattcgtccagactcaaaagtggagaagattcgcaggaactccgaggcggccatgttacaggagctgaattttggtgcatatttgggtcttccagctttcctgctgccccttaatcaggaagataacaccaacctggccagagttttgaccaaccacatccacactggccatcactcttccatgttctggatgcgggtacccttggtggcaccagaggacctgagagatgatataattgagaatgcaccaactacacacacagaggagtacagtggggaggagaaaacgtggatgtggtggcacaacttccggactttgtgtgactatagtaagaggattgcagtggctcttgaaattggggctgacctcccatctaatcatgtcattgatcgctggcttggggagcccatcaaagcagccattctccccactagcattttcctgaccaataagaagggatttcctgttctttctaagatgcaccagaggctcatcttccggctcctcaagttggaggtgcagttcatcatcacaggcaccaaccaccactcagagaaggagttctgctcctacctccaatacctggaatacttaagccagaaccgtcctccacctaatgcctatgaactctttgccaagggctatgaagactatctgcagtccccgcttcagccactgatggacaatctggaatctcagacatatgaagtgtttgaaaaggaccccatcaaatactctcagtaccagcaggccatctataaatgtctgctagaccgagtaccagaagaggagaaggataccaatgtccaggtactgatggtgctgggagcaggacggggacccctggtgaacgcttccctgcgggcagccaagcaggccgaccggcggataaagctgtatgctgtggagaaaaacccaaatgccgtggtgacgctagagaactggcagtttgaagaatggggaagccaagtgaccgtagtctcatcagacatgagggaatgggtggctccagagaaagcagacatcattgtcagtgagcttctgggctcatttgctgacaatgaattgtcgcctgagtgcctggatggagcccagcacttcctaaaagatgatggtgtgagcatccccggggagtacacttcctttctggctcccatctcttcctccaagctgtacaatgaggtccgagcctgtagggagaaggaccgtgaccctgaggcccagtttgagatgccttatgtggtacggctgcacaacttccaccagctctctgcaccccagccctgtttcaccttcagccatcccaacagagatcctatgattgacaacaaccgctattgcaccttggaatttcctgtggaggtgaacacagtactacatggctttgccggctactttgagactgtgctttatcaggacatcactctgagtatccgtccagagactcactctcctgggatgttctcatggtttcccatcctcttccctattaagcagcccataacggtacgtgaaggccaaaccatctgtgtgcgtttctggcgatgcagcaattccaagaaggtgtggtatgagtgggctgtgacagcaccagtctgttctgctattcataaccccacaggccgctcatataccattggcctctagccctgcgtgccaagtgtccagagccttggaagcagcttcaggttctg

SEQ ID NO: 170482 - DNA, 771 bp, Homo sapiens
  Payload ID: 13559
  Gene Symbol: PRMT5
  Gene Name: protein arginine methyltransferase 5
  ENST ID: ENST00000555454
  CDS Start-End: 1-534
gagaactggcagtttgaagaatggggaagccaagtgaccgtagtctcatcagacatgagggaatgggtggctccagagaaagcagacatcattgtcagtgagcttctgggctcatttgctgacaatgaattgtcgcctgagtgcctggatggagcccagcacttcctaaaagatgatggtgtgagcatccccggggagtacacttcctttctggctcccatctcttcctccaagctgtacaatgaggtccgagcctgtagggagaaggaccgtgaccctgaggcccagtttgagatgccttatgtggtacggctgcacaacttccaccagctctctgcaccccagccctgtttcaccttcagccatcccaacagagatcctatgattgacaacaaccgctattgcaccttggaatttcctgtggaggtgaacacagtactacatggctttgccggctactttgagactgtgctttatcaggacatcactctgagtatccgtccagagactcactctcctgggatcagcccataacggtacgtgaaggccaaaccatctgtgtgcgtttctggcgatgcagcaattccaagaaggtgtggtatgagtgggctgtgacagcaccagtctgttctgctattcataaccccacaggccgctcatataccattggcctctagccctgcgtgccaagtgtccagagccttggaagcagcttcaggttctgctcctgtagtacagaaggtgcagtacatctatgggctgtgattcccc

SEQ ID NO: 170483 - DNA, 579 bp, Homo sapiens
  Payload ID: 13559
  Gene Symbol: PRMT5
  Gene Name: protein arginine methyltransferase 5
  ENST ID: ENST00000553787
  CDS Start-End: 13-141
gcgaggagaaagatggcggcgatggcggtcgggggtgctggtgggagccgcgtgtccagcgggagggacctgaattgcgtccccgaaatagctgacacactaggggctgtggccaagcagggctttcctgctgccccttaatcaggaagataacaccaacctggccagagttttgaccaaccacatccacactggccatcactcttccatgttctggatgcgggtacccttggtggcaccagaggacctgagagatgatataattgagaatgcaccaactacacacacagaggagtacagtggggaggagaaaacgtggatgtggtggcacaacttccggactttgtgtgactatagtaagaggattgcagtggctcttgaaattggggctgacctcccatctaatcatgtcattgatcgctggcttggggagcccatcaaagcagccattctccccactagcattttcctgaccaataagaagggatttcctgttctttctaagatgcaccagaggctcatcttccggctcctcaagttggaggtgcagttcatcatcacaggcaccaaccaccactc

SEQ ID NO: 170484 - DNA, 555 bp, Homo sapiens
  Payload ID: 13559
  Gene Symbol: PRMT5
  Gene Name: protein arginine methyltransferase 5
  ENST ID: ENST00000554867
  CDS Start-End: 16-555
agcgcgaggagaaagatggcggcgatggcggtcgggggtgctggtgggagccgcgtgtccagcgggagggacctgaattgcgtccccgaaatagctgacacactaggggctgtggccaagcaggggtttgatttcctctgcatgcctgtcttccatccgcgtttcaagagggagttcattcaggaacctgctaagaatcggcccggtccccagacacgatcagacctactgctgtcaggaagggactggaatacgctaattgtgggaaagctttctccatggattcgtccagactcaaaagtggagaagattcgcaggaactccgaggcgttctggatgcgggtacccttggtggcaccagaggacctgagagatgatataattgagaatgcaccaactacacacacagaggagtacagtggggaggagaaaacgtggatgtggtggcacaacttccggactttgtgtgactatagtaagaggattgcagtggctcttgaaattggggctgacctcccatctaatcatgtcattgatcgctggcttggggagccc

SEQ ID NO: 170485 - DNA, 837 bp, Homo sapiens
  Payload ID: 13559
  Gene Symbol: PRMT5
  Gene Name: protein arginine methyltransferase 5
  ENST ID: ENST00000555530
  CDS Start-End: 1-837
cgcaggaactccgaggcggccatgttacaggagctgaattttggtgcatatttgggtcttccagctttcctgctgccccttaatcaggaagataacaccaacctggccagagttttgaccaaccacatccacactggccatcactcttccatgttctggatgcgggtacccttggtggcaccagaggacctgagagatgatataattgagaatgcaccaactacacacacagaggagtacagtggggaggagaaaacgtggatgtggtggcacaacttccggactttgtgtgactatactcttgaaattggggctgacctcccatctaatcatgtcattgatcgctggcttggggagcccatcaaagcagccattctccccactagcattttcctgaccaataagaagggatttcctgttctttctaagatgcaccagaggctcatcttccggctcctcaagttggaggtgcagttcatcatcacaggcaccaaccaccactcagagaaggagttctgctcctacctccaatacctggaatacttaagccagaaccgtcctccacctaatgcctatgaactctttgccaagggctatgaagactatctgcagtccccgcttcagccactgatggacaatctggaatctcagacatatgaagtgtttgaaaaggaccccatcaaatactctcagtaccagcaggccatctataaatgtctgctagaccgagtaccagaagaggagaaggataccaatgtccaggtactgatggtgctgggagcaggacggggacccctggtgaacgcttccctgcgggcagccaagcaggccgaccgg

SEQ ID NO: 170486 - DNA, 577 bp, Homo sapiens
  Payload ID: 13559
  Gene Symbol: PRMT5
  Gene Name: protein arginine methyltransferase 5
  ENST ID: ENST00000554910
  CDS Start-End: 69-577
aacttgtgggaggcctgtggtcactgagtcccaaagttgggagagttgttgggtttgatttcctctgcatgcctgtcttccatccgcgtttcaagagggagttcattcaggaacctgctaagaatcggcccggtccccagacacgatcagacctactgctgtcaggaagggactggaatacgctaattgtgggaaagctttctccatggattcgtccagactcaaaagtggagaagattcgcaggaactccgaggcggccatgttacaggagctgaattttggtgcatatttgggtcttccagctttcctgctgccccttaatcaggaagataacaccaacctggccagagttttgaccaaccacatccacactggccatcactcttccatgttctggatgcgggtacccttggtggcaccagaggacctgagagatgatataattgagaatgcaccaactacacacacagaggagtacagtggggaggagaaaacgtggatgtggtggcacaacttccggactttgtgtgactatagtaagaggattgcagtggctcttgaaattggggctgacct

SEQ ID NO: 170487 - DNA, 337 bp, Homo sapiens
  Payload ID: 13559
  Gene Symbol: PRMT5
  Gene Name: protein arginine methyltransferase 5
  ENST ID: ENST00000557443
  CDS Start-End: 1-185
gtatccgtccagagactcactctcctgggatgttctcatggtttcccatcctcttccctattaagcagcccataacggtacgtgaaggccaaaccatctgtgtgcgtttctggcgatgcagcaattccaagaagggctcaagccaccaatctatgaagacctcaggccagggggtgaggaattagtgctggatttgaagctacgcactcagcctcaagaactccctggaatatccctgagaacatggggtttgaacggattttcagcctttttctgttcttgttttgatggttttgtgtaagaggaaatacaaataaagttatagccctttactgca

SEQ ID NO: 170488 - DNA, 603 bp, Homo sapiens
  Payload ID: 13559
  Gene Symbol: PRMT5
  Gene Name: protein arginine methyltransferase 5
  ENST ID: ENST00000556043
  CDS Start-End: 292-603
gaataagaatcaggaatttcatatatagtatacaattttgctacttcccctctgtctcagactggctttctcttaaagaagtaaacagattttgcgcaaaggagcaaggaagggtttcttgcctggcagtggttgacagtttttcttttgcctcatgtagctcttgaaattggggctgacctcccatctaatcatgtcattgatcgctggcttggggagcccatcaaagcagccattctccccactagcattttcctgaccaataagaagggatttcctgttctttctaagatgcaccagaggctcatcttccggctcctcaagttggaggtgcagttcatcatcacaggcaccaaccaccactcagagaaggagttctgctcctacctccaatacctggaatacttaagccagaaccgtcctccacctaatgcctatgaactctttgccaagggctatgaagactatctgcagtccccgcttcagccactgatggacaatctggaatctcagacatatgaagtgtttgaaaaggaccccatcaaatactctcagtaccagcaggccatctataaatgtctgctagaccgagtaccagaagag

SEQ ID NO: 170489 - DNA, 1857 bp, Homo sapiens
  Payload ID: 13559
  Gene Symbol: PRMT5
  Gene Name: protein arginine methyltransferase 5
  Uniprot ID: O14744
  ENST ID: ENST00000553897
  CDS Start-End: 48-1829
ggctactagtatcaaggaatcccggcgtggacagcgcgaggagaaagatggcggcgatggcggtcgggggtgctggtgggagccgcgtgtccagcgggagggacctgaattgcgtccccgaaatagctgacacactaggggctgtggccaagcaggggtttgatttcctctgcatgcctgtcttccatccgcgtttcaagagggagttcattcaggaacctgctaagaatcggcccggtccccagacacgatcagacctactgctgtcaggaagggctttcctgctgccccttaatcaggaagataacaccaacctggccagagttttgaccaaccacatccacactggccatcactcttccatgttctggatgcgggtacccttggtggcaccagaggacctgagagatgatataattgagaatgcaccaactacacacacagaggagtacagtggggaggagaaaacgtggatgtggtggcacaacttccggactttgtgtgactatagtaagaggattgcagtggctcttgaaattggggctgacctcccatctaatcatgtcattgatcgctggcttggggagcccatcaaagcagccattctccccactagcattttcctgaccaataagaagggatttcctgttctttctaagatgcaccagaggctcatcttccggctcctcaagttggaggtgcagttcatcatcacaggcaccaaccaccactcagagaaggagttctgctcctacctccaatacctggaatacttaagccagaaccgtcctccacctaatgcctatgaactctttgccaagggctatgaagactatctgcagtccccgcttcagccactgatggacaatctggaatctcagacatatgaagtgtttgaaaaggaccccatcaaatactctcagtaccagcaggccatctataaatgtctgctagaccgagtaccagaagaggagaaggataccaatgtccaggtactgatggtgctgggagcaggacggggacccctggtgaacgcttccctgcgggcagccaagcaggccgaccggcggataaagctgtatgctgtggagaaaaacccaaatgccgtggtgacgctagagaactggcagtttgaagaatggggaagccaagtgaccgtagtctcatcagacatgagggaatgggtggctccagagaaagcagacatcattgtcagtgagcttctgggctcatttgctgacaatgaattgtcgcctgagtgcctggatggagcccagcacttcctaaaagatgatggtgtgagcatccccggggagtacacttcctttctggctcccatctcttcctccaagctgtacaatgaggtccgagcctgtagggagaaggaccgtgaccctgaggcccagtttgagatgccttatgtggtacggctgcacaacttccaccagctctctgcaccccagccctgtttcaccttcagccatcccaacagagatcctatgattgacaacaaccgctattgcaccttggaatttcctgtggaggtgaacacagtactacatggctttgccggctactttgagactgtgctttatcaggacatcactctgagtatccgtccagagactcactctcctgggatgttctcatggtttcccatcctcttccctattaagcagcccataacggtacgtgaaggccaaaccatctgtgtgcgtttctggcgatgcagcaattccaagaaggtgtggtatgagtgggctgtgacagcaccagtctgttctgctattcataaccccacaggccgctcatataccattggcctctagccctgcgtgccaagtgtccagagccttg

SEQ ID NO: 170490 - DNA, 129 bp, Homo sapiens
  Payload ID: 13559
  Gene Symbol: PRMT5
  Gene Name: protein arginine methyltransferase 5
  ENST ID: ENST00000627278
  CDS Start-End: 1-129
atggcggcgatggcggtcgggggtgctggtgggagccgcgtgtccagcgggagggacctgaattgcgtccccgaaatagctgacacactaggggctgtggccaagcagggctttcctgctgccccttaa

SEQ ID NO: 170491 - DNA, 2616 bp, Homo sapiens
  Payload ID: 13560
  Gene Symbol: PRMT6
  Gene Name: protein arginine methyltransferase 6
  Uniprot ID: Q96LA8
  ENST ID: ENST00000370078
  CDS Start-End: 38-1165
gcgctacgcccgccgggagccgggcagagcggccaagatgtcgcagcccaagaaaagaaagcttgagtcggggggcggcggcgaaggaggggagggaactgaagaggaagatggcgcggagcgggaggcggccctggagcgaccccggaggactaagcgggaacgggaccagctgtactacgagtgctactcggacgtttcggtccacgaggagatgatcgcggaccgcgtccgcaccgatgcctaccgcctgggtatccttcggaactgggcagcactgcgaggcaagacggtactggacgtgggcgcgggcaccggcattctgagcatcttctgtgcccaggccggggcccggcgcgtgtacgcggtagaggccagcgccatctggcaacaggcccgggaggtggtgcggttcaacgggctggaggaccgggtgcacgtcctgccgggaccagtggagactgtagagttgccggaacaggtggatgccatcgtgagcgagtggatgggctacggactcctgcacgagtccatgctgagctccgtcctccacgcgcgaaccaagtggctgaaggagggcggtcttctcctgccggcctccgccgagctcttcatagcccccatcagcgaccagatgctggaatggcgcctgggcttctggagccaggtgaagcagcactatggtgtggacatgagctgcctggagggcttcgccacgcgctgtctcatgggccactcggagatcgttgtgcagggattgtccggcgaggacgtgctggcccggccgcagcgctttgctcagctagagctctcccgcgccggcttggagcaggagctggaggccggagtgggcgggcgcttccgctgcagctgctatggctcggcgcccatgcatggctttgccatctggttccaggtgaccttccctggaggggagtcggagaaacccctggtgctgtccacctcgccttttcacccggccactcactggaaacaggcgctcctctacctgaacgagccggtgcaagtggagcaagacacggacgtttcaggagagatcacgctgctgccctcccgggacaacccccgtcgcctgcgcgtgctgctgcgctacaaagtgggagaccaggaggagaagaccaaagactttgccatggaggactgagcgttgccttttctcccagctacctcccaaagcagcctgacctgcgtgggagaggcgtagcgaggtcggaggggaaagggagatcccacgtgcaagtagggggaatatctcccccttttccctcatagcctctagggagggagagtgacttcattctccatttgaagagattcttctggtgatgtttacttaaaaagtgatccccctcaacaacggatacagcgtgcttattattgggcatttagcctcaaaagcatgtagtaccaagcacttgtatttccgtatattttgtttcgcgggggagtgagggggaagaacacggatgaaaatgtcagtttttgaagggtccatgcacatccctgacacctcacaccttatctaagtctgaagctggggagaaaggggttcatttagacttcatacatttccagtacgactttagtatctctccagagccatattttctcagtccgaattaattccccctccctaggtgcctgtaggctatggtacttcttcctcattgttttctaggtaaacttcactactggtaattaaggggaaggatatgaggaagcagtttaaatagccctgttctcattactctgaccacatacatcatagggtgctaaagttgatgaacacattaatccgttaagtaaaatggactttgtaattgtacagcatacctaagaaactcagaaggtgcatttaagagagagacctgaaagaaatagtatggatttttaaaaattcttgtctctactattataaccaaaaaatatttcttgtatgtcccataaaaatatttgtgtaattcttatgaaacaggctggtagaggaggtttctgagcctagcccaagggcttattcatcaccatgggtaaattatttaaactcacttaattaaggaaaatattttcccagctagaaaagtatactcattctcatttaaactctctcatttggagggatcatgtgagttggcctacttacaagtagtgaaagttcccttttcagttttgttttgttttgttttgtttttctctttcactcagccaaatgtgaaagttgtgaatttaggaaaatcacttgtaatgaagtgtgaatcttgttatcaaatttatttctctgatgtttccttccttatccttgtagccaataaaacattgacattctcacgttttatagatgaggtaaaaagtcttgtgtgctgtgagttataatgcttttgcctttttaatattattagttcttaagtgttacagccccttcagaatataacttcaggacaattcaaactatgcttaatgtatgattttcgagcttctgtatgctaagaaaataggtgtgaaaaactggtgttctgaaatagcctaacatttattgtaattctgaattttctgcccttttattcattgcatattaaagtattagagtataaaaactaa

SEQ ID NO: 170492 - DNA, 4238 bp, Homo sapiens
  Payload ID: 13561
  Gene Symbol: PRMT7
  Gene Name: protein arginine methyltransferase 7
  Uniprot ID: Q9NVM4
  ENST ID: ENST00000339507
  CDS Start-End: 831-2909
ctttggggttctgtgtgcagcgagcatggtgtccttggcaccagggtttcggcagaggagcctagcgtgggcctacttggactcctccgcgtggggcagctcgggacacccgggcctgcaggagagcggggttctaggctggccccggctctgcagtgcagccgggtgcctgccactcgcggggctctgtcgcagtactcgtgcctggcgcctcccctcagccacagagaccgcagtagctccaaccatcgcacccctaactgggccacgagttctctgattgccagacctgttgtctttgccactcactgttctgagtaattggagagtcgtgtattcactacacgccaaccagagtggtcctgtaaaagcgtaagcctagtgtagatacgcttctgcttaaaactcttgagtggctcccagtgcttttagaacaaaatccaaacgcctttccgaagtcgacaaggcccagcttgattgagcagaagatgtgataggagatgaggagcggggggcttctgcaaaagtgcttcggtcgctcaggcttttggcacattttgcttatgcaacctagttctttctaccttagggccttttcttgggaaagttgggagtctcactctgctgcctaggctgagtgcagtggtgtgatcgaggcgcactgcagccttgacctcctgggctcaagcgatcctcacctcggcctaccgagtagctgggactacaggcacgcgccactacactcggatttctgacagtcagacttgtccacaagaactcaactggcaaggctgcttttctgtgctaaaactggggagctagtgggcaccatgaagatcttctgcagtcgggccaatccgaccacggggtctgtggagtggctggaggaggatgaacactatgattaccaccaggagattgcaaggtcatcttatgcagatatgctacatgacaaagacagaaatgtaaaatactaccaaggtatccgggctgccgtgagcagggtgaaggacagaggacagaaggccttggttctcgacattggcactggcacgggactcttgtcaatgatggcggtcacagcaggtgccgacttctgctatgccatcgaggttttcaagcctatggctgatgctgctgtgaagattgtggagaaaaatggctttagtgataagattaaggttatcaacaagcattccaccgaggtgactgtaggtccagagggtgacatgccatgccgtgccaacatcctggtcacagagttgtttgacacagagctgatcggggagggggcgctgccctcctatgagcacgcacacaggcatctcgtggaggaaaattgtgaggccgtgccccacagagccaccgtctatgcacagctggtggagtccgggaggatgtggtcgtggaacaagctatttcccatccacgtgcagaccagcctcggagagcaggtcatcgtccctcccgttgacgtggagagctgccctggcgcaccctctgtctgtgacattcagctgaaccaggtgtcaccagccgactttacagtcctcagcgatgtgctgcccatgttcagcatagacttcagcaagcaagtcagtagctcagcagcctgccatagcaggcggtttgaacctctgacatctggccgagctcaggtggttctctcgtggtgggacattgaaatggaccctgaggggaagatcaagtgcaccatggcccccttctgggcacactcagacccagaggagatgcagtggcgggaccactggatgcagtgtgtgtacttcctgccacaagaggagcctgtggtgcagggctcagcgctctatctggtagcccaccacgatgactactgcgtatggtacagcctgcagaggaccagccctgaaaagaatgagagagtccgccagatgcgccccgtgtgtgactgccaggctcacctgctctggaaccggcctcggtttggagagatcaatgaccaggacagaactgatcgatacgtccaggctctgaggaccgtgctgaagccagacagcgtgtgcctgtgtgtcagcgatggcagcctgctctccgtgctggcccatcacctgggggtggagcaggtgtttacagtcgagagttcagcagcttctcacaaactgttgagaaaaatcttcaaggctaaccacttggaagataaaattaacatcatagagaaacggccggaattattaacaaatgaggacctacagggcagaaaggtctctctcctcctgggcgagccgttcttcactaccagcctgctgccgtggcacaacctctacttctggtacgtgcggaccgctgtggaccagcacctggggccaggtgccatggtgatgccccaggcagcctcgctgcacgctgtggttgtggagttcagggacctgtggcggatccggagcccctgtggtgactgcgaaggcttcgacgtgcacatcatggacgacatgattaagcgtgccctggacttcagggagagcagggaagctgagccccacccgctgtgggagtacccatgccgcagcctctccgagccctggcagatcctgacctttgacttccagcagccggtgcccctgcagcccctgtgtgccgagggcaccgtggagctcagaaggcccgggcagagccacgcagcggtgctatggatggagtaccacctgaccccggagtgcacgctcagcactggcctcctggagcctgcagaccccgaggggggctgctgctggaacccccactgcaagcaggccgtctacttcttcagccctgccccagatcccagagcactgctgggtggcccacggactgtcagctatgcagtggagtttcaccccgacacaggcgacatcatcatggagttcaggcatgcagataccccagactgaccactcttgagcaataaagtggcctgagggctggggttctgagtggctcatggctttctagcggggaaggctgaaggccctcctctcctctctgggagctgctcggcctcagggatgggaaagactgcgccgtgttgcatcttgttgcatctttgcactgctggcctctggctccagctgtggcaggaagcatgagagggtgactgaatttggagccctggaggggctgggaagacccccctgcttgtgcttctgaggtgctgagaatgctccaacacagagacatctctccccagctgggaagggagtggaagcacagggagcttgtggggctggccggtggggttgtccacgccgcccttggcgagcagtccccgtggcgggagcctgtcctgtctgtctcactctcgaggatctccgggtccctgctcttctggcttctgctaggagggtggagatgctgagttgtggctgggtctctggggcttgaagaccctggctgggcccgggctgagaggcctgggttctggccctttcacctgacaggtaacttcaagccacatccataggtgtctggcctcagtgctgcaccagctggtggcctgccaggacctgagactggacacaaggcagctgtcccagagcagttcctgagatgcaggcccaggaaagtggctgtcaggggagctgggaggcagccctgttccctgcacctccctcagattggaaagcccctcctgcaggtggggtatggcagggagcagcccctgcccagcgccgcttcaccaggaaggtcagtaggtgccgtggccttgcttctctcacacactaacccccctttggttatgtcccagctctcagaggtaacagcagacaccacgtgagagaacccagtggcctctggctcgcagcttagaaggtgaggcttgtgccaggccagccgagccgcctgtatgagcagagttccggtgtcctcggattcagggcagacttgggcagtgcctgtcctgcagttgggggcaggaactccctcccctgcccccaggcgtgcccctgaggcctggccccagcttgtcgctgaaataagtggagaacaccagccttgagcctcacagttttattttctcctcgttatccatccttcctttcagcaccagtaaggaaaaagaacacctctcttcgcaaaatattttatcaggtgtaaagacttgtttttcttctagggaagaaccgtctggatatatatttgataatgtttttaccaaaaccataggtgtgcttaccatagaaaacccctaatgtcccatgaagatacaatacagaaaaaaa

SEQ ID NO: 170493 - DNA, 2204 bp, Homo sapiens
  Payload ID: 13561
  Gene Symbol: PRMT7
  Gene Name: protein arginine methyltransferase 7
  Uniprot ID: Q9NVM4
  ENST ID: ENST00000441236
  CDS Start-End: 85-2163
gatttctgacagtcagacttgtccacaagaactcaactggcaaggctgcttttctgtgctaaaactggggagctagtgggcaccatgaagatcttctgcagtcgggccaatccgaccacggggtctgtggagtggctggaggaggatgaacactatgattaccaccaggagattgcaaggtcatcttatgcagatatgctacatgacaaagacagaaatgtaaaatactaccaaggtatccgggctgccgtgagcagggtgaaggacagaggacagaaggccttggttctcgacattggcactggcacgggactcttgtcaatgatggcggtcacagcaggtgccgacttctgctatgccatcgaggttttcaagcctatggctgatgctgctgtgaagattgtggagaaaaatggctttagtgataagattaaggttatcaacaagcattccaccgaggtgactgtaggtccagagggtgacatgccatgccgtgccaacatcctggtcacagagttgtttgacacagagctgatcggggagggggcgctgccctcctatgagcacgcacacaggcatctcgtggaggaaaattgtgaggccgtgccccacagagccaccgtctatgcacagctggtggagtccgggaggatgtggtcgtggaacaagctatttcccatccacgtgcagaccagcctcggagagcaggtcatcgtccctcccgttgacgtggagagctgccctggcgcaccctctgtctgtgacattcagctgaaccaggtgtcaccagccgactttacagtcctcagcgatgtgctgcccatgttcagcatagacttcagcaagcaagtcagtagctcagcagcctgccatagcaggcggtttgaacctctgacatctggccgagctcaggtggttctctcgtggtgggacattgaaatggaccctgaggggaagatcaagtgcaccatggcccccttctgggcacactcagacccagaggagatgcagtggcgggaccactggatgcagtgtgtgtacttcctgccacaagaggagcctgtggtgcagggctcagcgctctatctggtagcccaccacgatgactactgcgtatggtacagcctgcagaggaccagccctgaaaagaatgagagagtccgccagatgcgccccgtgtgtgactgccaggctcacctgctctggaaccggcctcggtttggagagatcaatgaccaggacagaactgatcgatacgtccaggctctgaggaccgtgctgaagccagacagcgtgtgcctgtgtgtcagcgatggcagcctgctctccgtgctggcccatcacctgggggtggagcaggtgtttacagtcgagagttcagcagcttctcacaaactgttgagaaaaatcttcaaggctaaccacttggaagataaaattaacatcatagagaaacggccggaattattaacaaatgaggacctacagggcagaaaggtctctctcctcctgggcgagccgttcttcactaccagcctgctgccgtggcacaacctctacttctggtacgtgcggaccgctgtggaccagcacctggggccaggtgccatggtgatgccccaggcagcctcgctgcacgctgtggttgtggagttcagggacctgtggcggatccggagcccctgtggtgactgcgaaggcttcgacgtgcacatcatggacgacatgattaagcgtgccctggacttcagggagagcagggaagctgagccccacccgctgtgggagtacccatgccgcagcctctccgagccctggcagatcctgacctttgacttccagcagccggtgcccctgcagcccctgtgtgccgagggcaccgtggagctcagaaggcccgggcagagccacgcagcggtgctatggatggagtaccacctgaccccggagtgcacgctcagcactggcctcctggagcctgcagaccccgaggggggctgctgctggaacccccactgcaagcaggccgtctacttcttcagccctgccccagatcccagagcactgctgggtggcccacggactgtcagctatgcagtggagtttcaccccgacacaggcgacatcatcatggagttcaggcatgcagataccccagactgaccactcttgagcaataaagtggcctgagggctggggttctg

SEQ ID NO: 170494 - DNA, 2091 bp, Homo sapiens
  Payload ID: 13561
  Gene Symbol: PRMT7
  Gene Name: protein arginine methyltransferase 7
  Uniprot ID: Q9NVM4
  ENST ID: ENST00000449359
  CDS Start-End: 128-2056
aaaagtggtagcagcggaggcgagcggagggtttcccgcggcggatttctgacagtcagacttgtccacaagaactcaactggcaaggctgcttttctgtgctaaaactggggagctagtgggcaccatgaagatcttctgcagtcgggccaatccgaccacggggtctgtggagtggctggaggaggatgaacactatgattaccaccaggagattgcaaggtcatcttatgcagatatgctacatgacaaagacagagttttcaagcctatggctgatgctgctgtgaagattgtggagaaaaatggctttagtgataagattaaggttatcaacaagcattccaccgaggtgactgtaggtccagagggtgacatgccatgccgtgccaacatcctggtcacagagttgtttgacacagagctgatcggggagggggcgctgccctcctatgagcacgcacacaggcatctcgtggaggaaaattgtgaggccgtgccccacagagccaccgtctatgcacagctggtggagtccgggaggatgtggtcgtggaacaagctatttcccatccacgtgcagaccagcctcggagagcaggtcatcgtccctcccgttgacgtggagagctgccctggcgcaccctctgtctgtgacattcagctgaaccaggtgtcaccagccgactttacagtcctcagcgatgtgctgcccatgttcagcatagacttcagcaagcaagtcagtagctcagcagcctgccatagcaggcggtttgaacctctgacatctggccgagctcaggtggttctctcgtggtgggacattgaaatggaccctgaggggaagatcaagtgcaccatggcccccttctgggcacactcagacccagaggagatgcagtggcgggaccactggatgcagtgtgtgtacttcctgccacaagaggagcctgtggtgcagggctcagcgctctatctggtagcccaccacgatgactactgcgtatggtacagcctgcagaggaccagccctgaaaagaatgagagagtccgccagatgcgccccgtgtgtgactgccaggctcacctgctctggaaccggcctcggtttggagagatcaatgaccaggacagaactgatcgatacgtccaggctctgaggaccgtgctgaagccagacagcgtgtgcctgtgtgtcagcgatggcagcctgctctccgtgctggcccatcacctgggggtggagcaggtgtttacagtcgagagttcagcagcttctcacaaactgttgagaaaaatcttcaaggctaaccacttggaagataaaattaacatcatagagaaacggccggaattattaacaaatgaggacctacagggcagaaaggtctctctcctcctgggcgagccgttcttcactaccagcctgctgccgtggcacaacctctacttctggtacgtgcggaccgctgtggaccagcacctggggccaggtgccatggtgatgccccaggcagcctcgctgcacgctgtggttgtggagttcagggacctgtggcggatccggagcccctgtggtgactgcgaaggcttcgacgtgcacatcatggacgacatgattaagcgtgccctggacttcagggagagcagggaagctgagccccacccgctgtgggagtacccatgccgcagcctctccgagccctggcagatcctgacctttgacttccagcagccggtgcccctgcagcccctgtgtgccgagggcaccgtggagctcagaaggcccgggcagagccacgcagcggtgctatggatggagtaccacctgaccccggagtgcacgctcagcactggcctcctggagcctgcagaccccgaggggggctgctgctggaacccccactgcaagcaggccgtctacttcttcagccctgccccagatcccagagcactgctgggtggcccacggactgtcagctatgcagtggagtttcaccccgacacaggcgacatcatcatggagttcaggcatgcagataccccagactgaccactcttgagcaataaagtggcctgagggctggg

SEQ ID NO: 170495 - DNA, 2996 bp, Homo sapiens
  Payload ID: 13561
  Gene Symbol: PRMT7
  Gene Name: protein arginine methyltransferase 7
  ENST ID: ENST00000568975
  CDS Start-End: 786-2489
tttgaagtccactgcgtacccctccttgatcccatctctttcccttctcttttaggagttaactatcctgattccttgctatgctttttagtgtgatccctgaagaacgtatcactccattttgcatagctataaatttcatagaaatggaatcgtattgcatgtgttgtgtgatttgctgtttttgctcatcattatattcctgggattatccatttttaggtttatgtgtgactgtaatttattgtttagatgaaagttttcctggtttgacttgctctatcttcatatttttccttaagctaagggttcagcatacgaaggcagtattggtggcacttctttaacagtaccccatctcttctcctagccttgagggctgcacctagatgaacttgtgaggctcatttgaaccttttggaagcaccgaagcctgctgaagtttccagacatctgtatgaatctgttgtagttttttaatgttatatgctgaatataaaaccaagtaactcctgctggaaacatttacaatatcgattaacaaatactatcagtggctttgacatttttgtcagtttcttgatttttttccccgcttttgtctccccttcccccctccacattttggggcattgtgctgttaatagattttttttctgttcgtttgtttatatacctcctgtttccttctgatgttaatagatttctgacagtcagacttgtccacaagaactcaactggcaaggctgcttttctgtgctaaaactggggagctagtgggcaccatgaagatcttctgcagtcgggccaatccgaccacggggtctgtggagtggctggaggaggatgaacactatgattaccaccaggagattgcaaggtcatcttatgcagatatgctacatgacaaagacagaaatgtaaaatactaccaaggtatccgggctgccgtgagcagggtgaaggacagaggacagaaggccttggttctcgacattggcactggcacgggactcttgtcaatgatggcggtcacagcaggtgccgacttctgctatgccatcgaggttttcaagcctatggctgatgctgctgtgaagattgtggagaaaaatggctttagtgataagattaaggttatcaacaagcattccaccgaggtgactgtaggtccagagggtgacatgccatgccgtgccaacatcctggtcacagagttgtttgacacagagctgatcggggagggggcgctgccctcctatgagcacgcacacaggcatctcgtggaggaaaattgtgaggccgtgccccacagagccaccgtctatgcacagctggtggagtccgggaggatgtggtcgtggaacaagctatttcccatccacgtgcagaccagcctcggagagcaggtcatcgtccctcccgttgacgtggagagctgccctggcgcaccctctgtctgtgacattcagctgaaccaggtgtcaccagccgactttacagtcctcagcgatgtgctgcccatgttcagcatagacttcagcaagcaagtcagtagctcagcagcctgccatagcaggcggtttgaacctctgacatctggccgagctcaggtggttctctcgtggtgggacattgaaatggaccctgaggggaagatcaagtgcaccatggcccccttctgggcacactcagacccagaggagatgcagtggcgggaccactggatgcagtgtgtgtacttcctgccacaagaggagcctgtggtgcagggctcagcgctctatctggtagcccaccacgatgactactgcgtatggtacagcctgcagaggaccagccctgaaaagaatgagagagtccgccagatgcgccccgtgtgtgactgccaggctcacctgctctggaaccggcctcggtttggagagatcaatgaccaggacagaactgatcgatacgtccaggctctgaggaccgtgctgaagccagacagcgtgtgcctgtgtgtcagcgatggcagcctgctctccgtgctggcccatcacctgggggtggagcaggtgtttacagtcgagagttcagcagcttctcacaaactgttgagaaaaatcttcaaggctaaccacttggaagataaaattaacatcatagagaaacggccggaattattaacaaatgaggacctacagggcagaaaggtctctctcctcctgggcgagccgttcttcactaccagcctgctgccgtggcacaacctctacttctggtacgtgcggaccgctgtggaccagcacctggggccaggtgccatggtgatgccccaggcagcctcgctgcacgctgtggttgtggagttcagggtgtgcagggaacagcaagatgtgcctcttgttcttgctgccacgcttccctgtgtcctggcgggcgggtgtggacggggctgctccttcctcacaggacctgtggcggatccggagcccctgtggtgactgcgaaggcttcgacgtgcacatcatggacgacatgattaagcgtgccctggacttcagggagagcagggaagctgagccccacccgctgtgggagtacccatgccgcagcctctccgagccctggcagatcctgacctttgacttccagcagccggtgcccctgcagcccctgtgtgccgagggcaccgtggagctcagaaggcccgggcagagccacgcagcggtgctatggatggagtaccacctgaccccggagtgcacgctcagcactggcctcctggagcctgcagaccccgaggggggctgctgctggaacccccactgcaagcaggccgtctacttcttcagccctgccccagatcccagagcactgctgggtggcccacggactgtcagctatgcagtggagtttcaccccgacacaggcgacatcatcatggagttcaggcatgcagataccccagactgaccactcttgagcaataaagtggcctgagggctggg

SEQ ID NO: 170496 - DNA, 584 bp, Homo sapiens
  Payload ID: 13561
  Gene Symbol: PRMT7
  Gene Name: protein arginine methyltransferase 7
  ENST ID: ENST00000566657
  CDS Start-End: 345-584
agctttccagttctgctttaggacccgccccccagcacgctcctcgacgctgcgaggtcccgccccgcgtgctggccgcggtaaaagtggtagcagcggaggcgagcggagggtttcccgcggcggagtctcactctgctgcctaggctgagtgcagtggtgtgatcgaggcgcactgcagccttgacctcctgggctcaagcgatcctcacctcggcctaccgagtagctgggactacaggcacgcgccactacactcggatttctgacagtcagacttgtccacaagaactcaactggcaaggctgcttttctgtgctaaaactggggagctagtgggcaccatgaagatcttctgcagtcgggccaatccgaccacggggtctgtggagtggctggaggaggatgaacactatgattaccaccaggagattgcaaggtcatcttatgcagatatgctacatgacaaagacagaaatgtaaaatactaccaaggtatccgggctgccgtgagcagggtgaaggacagaggacagaaggccttggttctcgacattggcactggcacgggactcttgtcaatg

SEQ ID NO: 170497 - DNA, 959 bp, Homo sapiens
  Payload ID: 13561
  Gene Symbol: PRMT7
  Gene Name: protein arginine methyltransferase 7
  ENST ID: ENST00000569571
  CDS Start-End: 291-959
gcgtgctggccgcggtaaaagtggtagcagcggaggcgagcggagggtttcccgcggcgggtgaggcgctgggtatgctgggaaggtggggtcgctttggggttctgtgtgcagcgagcatggtgtccttggcaccagggtttcggcagaggagcctagcgtgggcctacttggactcctccgcgtggggcagctcgggacacccggatttctgacagtcagacttgtccacaagaactcaactggcaaggctgcttttctgtgctaaaactggggagctagtgggcaccatgaagatcttctgcagtcgggccaatccgaccacggggtctgtggagtggctggaggaggatgaacactatgattaccaccaggagattgcaaggtcatcttatgcagatatgctacatgacaaagacagaaatgtaaaatactaccaaggtatccgggctgccgtgagcagggtgaaggacagaggacagaaggccttggttctcgacattggcactggcacgggactcttgtcaatgatggcggtcacagcaggtgccgacttctgctatgccatcgaggttttcaagcctatggctgatgctgctgtgaagattgtggagaaaaatggctttagtgataagattaaggttatcaacaagcattccaccgaggtgactgtaggtccagagggtgacatgccatgccgtgccaacatcctggtcacagagttgtttgacacagagctgatcggggagggggcgctgccctcctatgagcacgcacacaggcatctcgtggaggaaaattgtgaggccgtgccccacagagccaccgtctatgcacagctggtggagtccgggaggatgtggtcgtggaacaagctatttcccatccacgtgcagaccagcctcggagagcaggtcatcgtccctcccgttgacgtggagagctgccctggcgcaccc

SEQ ID NO: 170498 - DNA, 562 bp, Homo sapiens
  Payload ID: 13561
  Gene Symbol: PRMT7
  Gene Name: protein arginine methyltransferase 7
  ENST ID: ENST00000566341
  CDS Start-End: 146-247
cgcggtaaaagtggtagcagcggaggcgagcggagggtttcccgcggcgggtgaggcgctggatttctgacagtcagacttgtccacaagaactcaactggcaaggctgcttttctgtgctaaaactggggagctagtgggcaccatgaagatcttctgcagtcgggccaatccgaccacggggtctgtggagtggctggaggaggatgaacactatgattaccaccaggagattgcaagaatgtaaaatactaccaaggtatccgggctgccgtgagcagggtgaaggacagaggacagaaggccttggttctcgacattggcactggcacgggactcttgtcaatgatggcggtcacagcaggtgccgacttctgctatgccatcgaggttttcaagcctatggctgatgctgctgtgaagattgtggagaaaaatggctttagtgataagattaaggttatcaacaagcattccaccgaggtgactgtaggtccagagggtgacatgccatgccgtgccaacatcctggtcacagagttgtttgacacagagctgatcg

SEQ ID NO: 170499 - DNA, 440 bp, Homo sapiens
  Payload ID: 13561
  Gene Symbol: PRMT7
  Gene Name: protein arginine methyltransferase 7
  ENST ID: ENST00000565745
  CDS Start-End: 225-440
ctcgacgctgcgaggtcccgccccgcgtgctggccgcggtaaaagtggtagcagcggaggcgagcggagggtttcccgcggcggccttgagggctgcacctagatgaacttgtgaggctcatttgaaccttttggaagcaccgaagcctgctgaagtttccagacatctaactcaactggcaaggctgcttttctgtgctaaaactggggagctagtgggcaccatgaagatcttctgcagtcgggccaatccgaccacggggtctgtggagtggctggaggaggatgaacactatgattaccaccaggagattgcaaggtcatcttatgcagatatgctacatgacaaagacagaaatgtaaaatactaccaaggtatccgggctgccgtgagcagggtgaaggacagaggacagaaggccttggttctcgacattggc

SEQ ID NO: 170500 - DNA, 713 bp, Homo sapiens
  Payload ID: 13561
  Gene Symbol: PRMT7
  Gene Name: protein arginine methyltransferase 7
  ENST ID: ENST00000562381
  CDS Start-End: 210-534
agctttccagttctgctttaggacccgccccccagcacgctcctcgacgctgcgaggtcccgccccgcgtgctggccgcggtaaaagtggtagcagcggaggcgagcggagggtttcccgcggcggatttctgacagtcagacttgtccacaagaactcaactggcaaggctgcttttctgtgctaaaactggggagctagtgggcaccatgaagatcttctgcagtcgggccaatccgaccacggggtctgtggagtggctggaggaggatgaacactatgattaccaccaggagattgcaaggtcatcttatgcagatatgctacatgacaaagacagaaatgtaaaatactaccaaggtatccgggctgccgtgagcagggtgaaggacagaggacagaaggccttggttctcgacattggcactggcacgggactcttgtcaatgatggcggtcacagcaggtgccgacttctgctatgccatcgaggttttcaagcctatggctgatgctgctgtgaagattgtggagaaaaatggctttagtgataagattaaggttatcaacaagcattccaccgaggtgactgtaggtccagagggtgacatgccatgccgtgccaacatcctggtcacagagttgtttgacacagagctgatcggggagggggcgctgccctcctatgagcacgcacacaggcatctcgtggag

SEQ ID NO: 170501 - DNA, 648 bp, Homo sapiens
  Payload ID: 13561
  Gene Symbol: PRMT7
  Gene Name: protein arginine methyltransferase 7
  ENST ID: ENST00000569047
  CDS Start-End: 140-648
aaaagtggtagcagcggaggcgagcggagggtttcccgcggcgggtgaggcgctggatttctgacagtcagacttgtccacaagaactcaactggcaaggctgcttttctgtgctaaaactggggagctagtgggcaccatgaagatcttctgcagtcgggccaatccgaccacggggtctgtggagtggctggaggaggatgaacactatgattaccaccaggagattgcaaggtcatcttatgcagatatgctacatgacaaagacagaaatgtaaaatactaccaaggtatccgggctgccgtgagcagggtgaaggacagaggacagaaggccttggttctcgacattggcactggcacgggactcttgtcaatgatggcggtcacagcaggtgccgacttctgctatgccatcgaggttttcaagcctatggctgatgctgctgtgaagattgtggagaaaaatggctttagtgataagattaaggttatcaacaagcattccaccgaggtgactgtaggtccagagggtgacatgccatgccgtgccaacatcctggtcacagagttgtttgacacagagctgatcggggagggggcgctgccctcctatgagcacgcacacaggcatctcgtggaggaaaa

SEQ ID NO: 170502 - DNA, 1005 bp, Homo sapiens
  Payload ID: 13561
  Gene Symbol: PRMT7
  Gene Name: protein arginine methyltransferase 7
  ENST ID: ENST00000562050
  CDS Start-End: 116-217
agcggaggcgagcggagggtttcccgcggcggatttctgacagtcagacttgtccacaagaactcaactggcaaggctgcttttctgtgctaaaactggggagctagtgggcaccatgaagatcttctgcagtcgggccaatccgaccacggggtctgtggagtggctggaggaggatgaacactatgattaccaccaggagattgcaagaatgtaaaatactaccaaggtatccgggctgccgtgagcagggtgaaggacagaggacagaaggccttggttctcgacattggcactggcacgggactcttgtcaatgatggcggtcacagcaggtgccgacttctgctatgccatcgaggttttcaagcctatggctgatgctgctgtgaagattgtggagaaaaatggctttagtgataagattaaggttatcaacaagcattccaccgaggtgactgtaggtccagagggtgacatgccatgccgtgccaacatcctggtcacagagttgtttgacacagagctgatcggggagggggcgctgccctcctatgagcacgcacacaggcatctcgtggaggaaaattgtgaggccgtgccccacagagccaccgtctatgcacagctggtggagtccgggaggatgtggtcgtggaacaagctatttcccatccacgtgcagaccagcctcggagagcaggtcatcgtccctcccgttgacgtggagagctgccctggcgcaccctctgtctgtgacattcagctgaaccaggtgtcaccagccgactttacagtcctcagcgatgtgctgcccatgttcagcatagacttcagcaagcaagtcagtagctcagcagcctgccatagcaggcggtttgaacctctgacatctggccgagctcaggtggttctctcgtggtgggacattgaaatggaccctgaggggaagatcaagtgcaccatggcccccttctgggcacactcagacccagaggagatgcag

SEQ ID NO: 170503 - DNA, 2366 bp, Homo sapiens
  Payload ID: 13562
  Gene Symbol: PRMT8
  Gene Name: protein arginine methyltransferase 8
  Uniprot ID: Q9NR22
  ENST ID: ENST00000382622
  CDS Start-End: 391-1575
agttggcggctgcctccggccggccggactttgcgagcagcctggagaggatccgcgaccgccgccgccgccgccgcggaggcttcggggctgcttccctcgagcttagcccgcagcgcgggtggagaggggcggggagggggtcgggggcacgagaagaacttgaaaccgtgtgaaggaatccggagcagatgagaagggaggaaaataaaagaaagtggagactgcagaacagactccgctgtggctgactgtgccggccgacgctccagctgaggggctgggttggatttttttttttctcccatcctctcgctctctcttttaaagcgacaccagctctctctcctcctctactatctcggtatcaccaaacccttgccggctcttatgggcatgaaacactcctcccgctgcctgctcctgaggaggaaaatggcggagaacgcggccgagagcaccgaggtgaacagccccccctcccagcccccccagcccgtcgtccctgctaagcccgtgcaatgcgtccatcatgtgtccactcaacccagctgcccaggacggggcaagatgtccaagctgctgaacccagaggagatgacctcgagagattattacttcgactcctatgcccactttgggatccacgaggaaatgctgaaggatgaggtgcggactctcacttaccggaactccatgtaccacaacaagcacgtgttcaaggacaaagtggtactggatgtggggagtggtactgggatcctttccatgttcgctgccaaggcaggggccaagaaggtgtttgggatcgaatgctccagtatttctgactactcagagaagatcattaaggccaaccacttggacaacatcatcaccatatttaagggtaaagtggaagaggtggagctgcctgtggagaaggtggacatcatcatcagcgagtggatgggctactgtctgttctatgagtccatgctcaacacggtgatctttgccagggacaagtggctgaaacctggagggcttatgtttccagaccgggcagctttgtacgtggtagcgattgaagacagacagtacaaggacttcaaaatccactggtgggagaatgtctatggctttgacatgacctgcatccgggacgtggccatgaaggagcctctagtggacatcgtggatccaaagcaagtggtgaccaatgcctgtttgataaaggaggtggacatttacacagtgaagacggaagagctatcgttcacatctgcattctgcctgcagatacagcgcaacgactacgtccacgccctggtcacctattttaatattgaatttaccaagtgccacaagaaaatggggttttccacagcccctgatgctccctacacccactggaagcagaccgtcttctacttggaagattacctcactgtccggaggggggaggaaatctacgggaccatatccatgaagccaaatgccaaaaatgtgcgagacctcgatttcacagtagacttggattttaagggacagctgtgtgaaacatctgtatctaatgactacaaaatgcgttagcacacgtgggaagctgcagagagcaacgagaaaaggaactctcacctcgatctgccgtgccgtcccaaagaataccgtttgcaggactacacacttgaaaaccagagttttcaactctgccttgaagattggtgaactccccagggctcccgtgggctctgccactggacagaaggcctccagctcctccgctctgccctggtagcccttcacgaaggctttgtgttgccaacaaagagcgacctggcgtgctgtggctgggccccgagggtggaaacgtattcgcgtctccccgtctcctccttaactgtgactctccgggtcttctgagttttgcatgctgcgggtgtctaggacagattgcttccactagaacctggagacatagcatctttgatagcataagccagattatctgtgtgtgcggtggtgtgcgtgtgcgtgcatgtgtgaatgtgagcagcatagttgatatttacccacaaacacctgtatatgcgtgcatatacaaccaagtgggtagacctaggtgttctctcagaggggtgtgtgtgtgtgtgcgtgcgcgtgtgcctagaatatatattactctcagaggagattctgttgcttttgaataggaatttgttttgtgattagttcgccccttccccaccccttaccagatgttaagcagctatgaaacattctctgtactagttctggtctccttttgactggactgtggctctgaaccttgagcatagtaccacggactccgtgggcgctcaataaacacacatgagaacaaa

SEQ ID NO: 170504 - DNA, 1204 bp, Homo sapiens
  Payload ID: 13562
  Gene Symbol: PRMT8
  Gene Name: protein arginine methyltransferase 8
  Uniprot ID: Q9NR22
  ENST ID: ENST00000452611
  CDS Start-End: 47-1204
atttctgcaccagggaggcttgctgtttgaatgtgtgccaggttgaatggagtctctggcttcagatggattcaagctgaaagaggtttcttctgtgaacagccccccctcccagcccccccagcccgtcgtccctgctaagcccgtgcaatgcgtccatcatgtgtccactcaacccagctgcccaggacggggcaagatgtccaagctgctgaacccagaggagatgacctcgagagattattacttcgactcctatgcccactttgggatccacgaggaaatgctgaaggatgaggtgcggactctcacttaccggaactccatgtaccacaacaagcacgtgttcaaggacaaagtggtactggatgtggggagtggtactgggatcctttccatgttcgctgccaaggcaggggccaagaaggtgtttgggatcgaatgctccagtatttctgactactcagagaagatcattaaggccaaccacttggacaacatcatcaccatatttaagggtaaagtggaagaggtggagctgcctgtggagaaggtggacatcatcatcagcgagtggatgggctactgtctgttctatgagtccatgctcaacacggtgatctttgccagggacaagtggctgaaacctggagggcttatgtttccagaccgggcagctttgtacgtggtagcgattgaagacagacagtacaaggacttcaaaatccactggtgggagaatgtctatggctttgacatgacctgcatccgggacgtggccatgaaggagcctctagtggacatcgtggatccaaagcaagtggtgaccaatgcctgtttgataaaggaggtggacatttacacagtgaagacggaagagctatcgttcacatctgcattctgcctgcagatacagcgcaacgactacgtccacgccctggtcacctattttaatattgaatttaccaagtgccacaagaaaatggggttttccacagcccctgatgctccctacacccactggaagcagaccgtcttctacttggaagattacctcactgtccggaggggggaggaaatctacgggaccatatccatgaagccaaatgccaaaaatgtgcgagacctcgatttcacagtagacttggattttaagggacagctgtgtgaaacatctgtatctaatgactacaaaatgcgttag

SEQ ID NO: 170505 - DNA, 3528 bp, Homo sapiens
  Payload ID: 13563
  Gene Symbol: PRMT9
  Gene Name: protein arginine methyltransferase 9
  Uniprot ID: Q6P2P2
  ENST ID: ENST00000322396
  CDS Start-End: 244-2781
agcgtgcgccgctggccaggtgcgcaatagtggggtatgcgtcacggtctgcgccgcccgcggggccaggacggggcggagcttccgcctgggctggggttggcgagttcacccgcggcggagggtaactttgctgtgctgttttttgagcagttgtctggtccctggaagtgtagcatcgagagagttttctaattacgtttacaaaatatcttccctttggccatacaagtggtgactgccatgtcgaactcgcggcccaggtcccgccgagacgccgggggtggcgctggggcagccggccgggacgagctggtgtcgcggtccttgcagagcgcagagcactgtctgggcgtccaggacttcggcactgcctatgcccactacctcctcgtgctcagcctggcgccggagctgaaacacgacgtgaaggaaacttttcagtacacacttttcagatgggctgaagagcttgatgctctcagtcggatacaagacttacttggttgctatgagcaggccttggaactgtttcctgatgatgaagtgatttgcaatagtatgggggagcatctcttcagaatgggctttagggatgaagcagctgggtattttcataaagcagtgaagctaaaccctgatttcagtgatgcaaaggagaatttttatcgtgttgcaaactggttggtggaacgctggcactttatcatgcttaatgacaccaagaggaatacaatttataatgcagcaatccaaaaggcagtttgtttggggtccaaaagtgttttggacattggagcaggaactggaatactaagcatgtttgctaaaaaagctggagcacattccgtgtatgcctgtgagttatccaagaccatgtatgaacttgcctgtgatgtcgtggcagcaaacaagatggaagcagggatcaaactcttacatacgaagtcacttgacatagagattccaaaacatattcccgaaagagtgtccctagttgtaacagaaactgtcgatgcaggtttatttggagaaggaattgtggagagtttgattcatgcatgggagcatttacttttacagccaaagaccaaaggtgaaagtgctaattgtgaaaagtatgggaaagttataccagcaagtgctgttatatttgggatggcagtagaatgtgcagagataagaagacatcatagagtgggtattaaggacattgctggtatccatttgccaacaaatgtgaaatttcagagtccggcttattcttctgtagatactgaagaaacaattgaaccttatacaactgaaaagatgagtcgagttcctggaggatatttggctttgacagagtgctttgaaattatgacagtagatttcaacaaccttcaggaattaaaaagtcttgcaactaaaaagcctgataagattggtattcctgttattaaagaaggcatactagatgctattatggtttggtttgtgctccagcttgatgatgaacatagtttatccacaagtcctagtgaggaaacatgttgggaacaggctgtctaccccgtacaggaccttgcagactactggataaagcctggagaccatgtgatgatggaagtatcttgtcaagactgttacttaagaatccagagtattagtgtcttgggtttggaatgtgaaatggatgttgcaaaaagttttacccagaataaagacttgttatcgttaggaaatgaggctgaactttgtagtgccctcgctaaccttcagaccagtaaaccagatgctgtagagcagacatgtatattggaatctacagaaattgctttgcttaacaacatcccatatcatgaaggctttaaaatggcaatgagcaaagttttgtcttcactgactccagagaaactgtatcagaccatggatactcactgtcagaatgagatgagctctggaactggacagagtaatactgtacagaacatccttgaacctttctacgtgttagatgtgtccgaaggcttctctgttctgcctgttattgctggcacacttgggcaggttaaaccatacagttctgtggagaaagaccagcatcgtattgctctggacctcatatctgaagccaatcactttcctaaagaaacacttgagttttggctgagacatgtggaggatgaatctgctatgttacaaaggccaaaatcagacaagttatggagcataattatattggatgtcattgagccatctgggctcattcagcaggaaataatggaaaaagctgcaatatccaggtgtttactacaatctggaggcaagatctttcctcagtatgtgctgatgtttgggttgcttgtggaatcacagacactcctagaggagaatgctgttcaaggaacagaacgtactcttggattaaatatagcaccttttattaaccagtttcaggtacctatacgtgtatttttggacctatcctcattgccctgtatacctttaagcaagccagtggaactcttaagactagatttaatgactccgtatttgaacacctctaacagagaagtaaaggtatacgtttgtaaatctggaagactgactgctattccattttggtatcatatgtaccttgatgaagagattaggttggatacttcaagtgaagcctcccactggaaacaagctgcagttgttttagataatcccatccaggttgaaatgggagaggaacttgtactcagcattcagcatcacaaaagcaatgtcagcatcacagtaaagcaatgaagagcagttttccaatgaaaactgtgtaaatagagcatcaacaagtacaaaattcttgtcttaattagtgggggtatataaaaattccttgtaatggtcaaatattttttaaaattgacattaataaagcatattttaaaagattctaaataaaagggtagcattattatagaaatactgctgcagatttgctttctggaaaaggatacatcactagttttttaaattaggaaacttcttttgctcgattttacagaatagggattttaaaagtcttatcgttattgacatgtgtaagtaaagcaaaactttacttttgtaggcatcttggccttttttcttaaatccaaacttgtaattgggaaacactgaaaggcttccactgaagactgagggttatggttacctgtaaattccaatcttgcttcctttaaatactcagtgtacatctgaaacatctcaggttttgttttgagaatgcaagcttgaaaaagaatttaagctataagctaaatgtaattaaaacagtaaaggagttagggaatacatcttcaggaggcagcatttttcttggtctactttggcaaaagaacatttaaaagctggtaacaaaacaaagttaaattgaaggaagacttaatcctatactatttttcaaagttttgatttggatgtacaataagtacattaattgatccaatttttacaaacttttgaaataaaggaagatcattattatgcctccta

SEQ ID NO: 170506 - DNA, 2674 bp, Homo sapiens
  Payload ID: 13563
  Gene Symbol: PRMT9
  Gene Name: protein arginine methyltransferase 9
  ENST ID: ENST00000514886
  CDS Start-End: 139-339
agttcacccgcggcggagggtaactttgctgtgctgttttttgagcagttgtctggtccctggaagtgtagcatcgagagagttttctaattacgtttacaaaatatcttccctttggccatacaagtggtgactgccatgtcgaactcgcggcccaggtcccgccgagacgccgggggtggcgctggggcagccggccgggacgagctggtgtcgcggtccttgcagagcgcagagcactgtctgggcgtccaggacttcggcactgcctatgcccactacctcctcgtgctcagcctggcgccggagctgaaacacgacgtgaagaatgggctttagggatgaagcagctgggtattttcataaagcagtgaagctaaaccctgatttcagtgatgcaaaggagaatttttatcgtgttgcaaactggttggtggaacgctggcactttatcatgcttaatgacaccaagaggaatacaatttataatgcagcaatccaaaaggcagtttgtttggggtccaaaagtgttttggacattggagcaggaactggaatactaagcatgtttgctaaaaaagctggagcacattccgtgtatgcctgtgagttatccaagaccatgtatgaacttgcctgtgatgtcgtggcagcaaacaagatggaagcagggatcaaactcttacatacgaagtcacttgacatagagattccaaaacatattcccgaaagagtgtccctagttgtaacagaaactgtcgatgcaggtttatttggagaaggaattgtggagagtttgattcatgcatgggagcatttacttttacagccaaagaccaaaggtgaaagtgctaattgtgaaaagtatgggaaagttataccagcaagtgctgttatatttgggatggcagtagaatgtgcagagataagaagacatcatagagtgggtattaaggacattgctggtatccatttgccaacaaatgtgaaatttcagagtccggcttattcttctgtagatactgaagaaacaattgaaccttatacaactgaaaagatgagtcgagttcctggaggatatttggctttgacagagtgctttgaaattatgacagtagatttcaacaaccttcaggaattaaaaagtcttgcaactaaaaagcctgataagattggtattcctgttattaaagaaggcatactagatgctattatggtttggtttgtgctccagcttgatgatgaacatagtttatccacaagtcctagtgaggaaacatgttgggaacaggctgtctaccccgtacaggaccttgcagactactggataaagcctggagaccatgtgatgatggaagtatcttgtcaagactgttacttaagaatccagagtattagtgtcttgggtttggaatgtgaaatggatgttgcaaaaagttttacccagaataaagacttgttatcgttaggaaatgaggctgaactttgtagtgccctcgctaaccttcagaccagtaaaccagatgctgtagagcagacatgtatattggaatctacagaaattgctttgcttaacaacatcccatatcatgaaggctttaaaatggcaatgagcaaagttttgtcttcactgactccagagaaactgtatcagaccatggatactcactgtcagaatgagatgagctctggaactggacagagtaatactgtacagaacatccttgaacctttctacgtgttagatgtgtccgaaggcttctctgttctgcctgttattgctggcacacttgggcaggttaaaccatacagttctgtggagaaagaccagcatcgtattgctctggacctcatatctgaagccaatcactttcctaaagaaacacttgagttttggctgagacatgtggaggatgaatctgctatgttacaaaggccaaaatcagacaagttatggagcataattatattggatgtcattgagccatctgggctcattcagcaggaaataatggaaaaagctgcaatatccaggtgtttactacaatctggaggcaagatctttcctcagtatgtgctgatgtttgggttgcttgtggaatcacagacactcctagaggagaatgctgttcaaggaacagaacgtactcttggattaaatatagcaccttttattaaccagtttcaggtacctatacgtgtatttttggacctatcctcattgccctgtatacctttaagcaagccagtggaactcttaagactagatttaatgactccgtatttgaacacctctaacagagaagtaaaggtatacgtttgtaaatctggaagactgactgctattccattttggtatcatatgtaccttgatgaagagattaggttggatacttcaagtgaagcctcccactggaaacaagctgcagttgttttagataatcccatccaggttgaaatgggagaggaacttgtactcagcattcagcatcacaaaagcaatgtcagcatcacagtaaagcaatgaagagcagttttccaatgaaaactgtgtaaatagagcatcaacaagtacaaaattcttgtcttaattagtgggggtatataaaaattccttgtaatggtcaaatattttttaaaattgacattaataaagcatattttaaaagattct

SEQ ID NO: 170507 - DNA, 4072 bp, Homo sapiens
  Payload ID: 13564
  Gene Symbol: PATL1
  Gene Name: protein associated with topoisomerase II homolog 1 (yeast)
  Uniprot ID: Q86TB9
  ENST ID: ENST00000300146
  CDS Start-End: 86-2398
acccgcgcgcggaggagccggggagtcagcgcttcttccctccctccccctctcccctccccgctccctgcccccctccccaagaatgttccgctacgagtctttggaggattgtcctctggatgaagatgaagatgcatttcagggactgggagaagaagatgaagagattgatcaattcaatgatgatacatttgggtcaggtgcagttgatgatgattggcaggaagcacatgagcgcctggctgaattggaagaaaagctaccagtggcagttaatgaacaaacaggcaatggagagagagatgaaatggacttgttgggtgaccatgaggagaatctggcagaaaggctcagtaagatggtgattgaaaatgaactagaagatccagctattatgagggcagtgcagaccaggccagttttacaaccccaaccaggaagtctgaattccagtatctgggatggatctgaagttctgaggcgaatccgaggaccactgcttgctcaggaaatgcctacagtgtctgtattagaatatgctttgcctcagaggcccccccagggtccagaagatgatcgggacctttctgaacgagcattaccaaggcggtcaacttcacctatcattggcagtcctcctgttagagctgtccccataggcaccccacctaaacagatggctgtacccagcttcacccaacagattctgtgtccgaagcctgtccatgttcggcccccaatgccacctcgttatcctgctccctatggtgagaggatgtctccaaaccagctctgcagtgtcccgaactcttccctcctgggtcacccttttcctcctagtgttcctcctgttctcagccccctccagagagcacagcttcttggaggagcacagctacagcctggacggatgtctcccagccagtttgcacgggtccctggatttgttggtagtccacttgctgccatgaatcccaagttgctacaagggcgagttgggcagatgcttcccccagcaccaggcttccgtgccttctttagtgctccaccctccgctacaccacctccacagcagcaccctcctggcccaggaccccacctgcaaaacctaagatctcaggccccaatgtttagaccggacacaactcacctccatccacagcaccgtcgactcttgcatcagagacagcaacagaatagaagtcagcatcggaatctcaatggtgcgggagatagaggaagtcaccggagcagtcatcaagatcatctccgaaaggatccatatgccaatctcatgttgcagcgggaaaaggattgggtctctaaaatccagatgatgcaactgcaaagcactgatccctacctggatgatttttattaccagaattactttgaaaaactggagaaactgtcagctgctgaagaaatacaaggtgatggccctaagaaggagcgcaccaagcttatcacccctcaggtggccaaactggagcacgcctataagccagtgcaatttgagggctctttgggaaagcttaccgtttctagtgtgaataatccccgaaaaatgattgatgctgttgtgacatctcggagtgaggatgatgagacaaaagaaaaacaagttcgagacaagaggagaaaaacccttgttataattgagaaaacctacagcttactccttgatgtggaggactatgaaagacgttatctcctaagtctggaagaagagcgacctgccctaatggatgacagaaagcacaaaatttgtagcatgtatgacaacttaagggggaaattgcctggacaagagaggcctagtgatgaccactttgtacagatcatgtgtatccgaaaagggaagagaatggttgcccgtattcttcctttcctctccacagagcaagcagctgacattctcatgacaacagccaggaacctccctttccttatcaagaaggatgcacaagatgaggtgctgccatgcttactgagtcccttctctctccttctctatcatcttccatcagtgagtatcaccagccttttgcgacagctaatgaacctacctcaaagtgcagctacaccagcactctccaatcctcacctcactgctgtgctccagaacaagtttggcctgtcactgctcctcatcctcctgagccgtggtgaagacctacagagttcagaccctgctacagaatcaacacaaaataatcagtggacggaggtgatgttcatggcaacacgagaacttctgcggattccccaagcagccctggccaagccaatctctatacctacaaacctagtgtccctcttttctcgctatgttgaccggcagaaactgaacttgctggagacaaaactgcagctagttcaggggatacgataaaagatctccaaatgtgtcctgtacctccttttggctgccacctgcactgctgccatcaccaatggagtgtttttaatgagggaaggaaggtagctttttccccaaagcaaagtcttgtgggatcgattcctgtttacaggggttgtctctctaaatgtcagatatttccccactgctctatgaaatttggctgggtgatacttctgctggtttctttaccttctgtgttacagttctgcatgtcctacttttactcagttctgttttgcattttctttgccctagagacacaagtgtaatctctccctttatccctccactactccacctcagagtagattgtagcctgccaaaggattccttccctcatcctattgaagttgttttttcattgccccatattaatatgactatagaagagccaattaagtagaaatcaagatatacacacacacatagatacacacacacacaccccatacatgtatttatgtggtcttcagagggtccttaaagaatgaattttagattgaaaaatatttagttgtctcattacctcttctaaacacaaaccagctgatgtattttaatctgtttctgttctatcttgtaattaatttggtgggttctacttgttttaacataaataaagagtatgcagcacgtttaataaaatcagaactcttaattggcttatgcccaggtctaggctgagaagtcctttttcttcttcccacctttatttccttagtttctgtccaccttaatcgaaacaacacatggttatgtctttttcctgctacaactacagggtacttgagcctttcccctcaagtgcattcgaagtcacccaggatgatcctcactagtagcctgctttggcagtgtggctttttgcacacttgccctgtcttcctgagactacttcagtaagccatgcttccttcttccccacttttatttggtgtcatgaatagaaacttccaaatgtaaccatggaagctaagtttggcctgctttgctttttagtctccacaccatgggcagaactgctgtctttactacttcatctcacccaagtcccgttcccaggcagccaggggcctgggtttgaataattgcagggccagcctgccatgatctttctcacttactcctctcccattcagcaatcaaccagactaaggagttttgatccctagtgattacagccctgaagaaaattaaatctgaattaattttacatggccttcgtgatctttctgctgttcttactttttcgaatgtagttggggggtgggagggacaggttatggtatttaaagagaataaacattttgcacatacatgtattgtacaacagtaagatcctctgttaaaaccagctgtcctgttctccatctccatttcttcccatgctgtaaccccaggctccaccagctgttccccagtgatgttacctagcttccctctaccgttgtctactgaccatttccactacatgcctttcctaccttcccttcacaaccaatcaagtgaatacttgattattatctcttccttactgtgctttatcttttttgtttggattggttctaattaatgaaaataaaagtttctaaatttacatttttatagggtattgtaaataaaaacaaattgtatacttaaaaa

SEQ ID NO: 170508 - DNA, 1950 bp, Homo sapiens
  Payload ID: 13565
  Gene Symbol: PATL2
  Gene Name: protein associated with topoisomerase II homolog 2 (yeast)
  Uniprot ID: C9JE40
  ENST ID: ENST00000434130
  CDS Start-End: 99-1730
gaaaggacagcaacagtcaggtggtttaccttccagaggctggcaatgctgtttcactggaggacacggctaagaaggaagtccaccagcctgccaagatgaattgccttgaagggccaggtaagacctgtggccccttggcttctgaggaggagctggtgtctgcctgccagttggaaaaagaagaagagaatgaaggggaggaggaggaagaggaggaggacgaggaggatctggacccagatctggacccagacctagaggaggaagagaatgatcttggggatccagctgtacttggtgctgtccacaacacccagagagctctgcttagctcccctggagtcaaggcccctggtatgctgggaatgtcacttgcctccttgcattttctgtggcagaccttggactacctgtcgcccatccctttctggcctacatttcccagcaccagctctccagcacagcactttggacctcggctgccctcaccagacccaactctcttctgcagcctgctgacctcgtggccccctaggttcagtcatctgacccagctccaccctcggcaccaacgaatcttgcagcagcagcagcatagtcaaacaccaagtcccccagccaagaagccttggtctcagcagccagacccctatgctaacctcatgaccagaaaagagaaggactgggtgataaaagtgcagatggtgcagctgcagagtgcaaaaccccgcctggatgactactattaccaggaatattaccagaagctagagaagaagcaggcagacgaagagctacttggacgaagaaaccgggttgagtccctcaagctggtaacgccttacattccgaaggcagaggcttatgagtccgtggtccgaatcgagggttccctgggccaggtagctgtgtcgacatgcttcagccctcgccgagctattgatgcggtaccccatggaactcaagagcaggatatagaagctgcaagcagtcagaggcttcgggtattataccggattgagaagatgttccttcagttactagaaatagaggaaggctggaagtataggcctccaccgccctgcttttctgagcagcaaagcaaccaggttgagaagctcttccagaccttaaagacccaggagcagaacaacctggaagaggcagcagatggcttcctgcaggtgctctctgtgaggaaggggaaggccctggtggcccggctgctccccttcctgccccaggatcaggctgttaccattcttttggctatcacccaccatctgcccctcctggtccggagggatgtggctgatcaggccctacaaatgttattcaaacctctgggcaaatgtattagtcacttgaccctccacgaactcctccaaggacttcagggattaacgctgttgccacctggctcctcagagcggccagtcaccgtggtgcttcagaatcagtttggaatatctttgctctatgccctgctgagccatggggagcaactggtatcgctgcattcttccctagaggaacccaacagtgaccatacagcttggacagacatggtggttctgattgcctgggagatagcccaaatgcctacagcctctctggcagaacccctagctttccccagcaacctacttcccctgttctgtcaccacgtggacaaacaattggttcagcagctggaggccaggatggagtttgcctggatttactgatctgtttgttctggaatacgtgtatgtgggaagttgaatcatcagacactagctacatagactatgtttacagggatccagagagtctgaagacatttcttatgcctttatatattggagaacccttccccattttcatatcctttcttcaaaaatctaaatgatgtgcctaaaaataagacatggcataataaggtataattaaagagataatagaatg

SEQ ID NO: 170509 - DNA, 1863 bp, Homo sapiens
  Payload ID: 13565
  Gene Symbol: PATL2
  Gene Name: protein associated with topoisomerase II homolog 2 (yeast)
  ENST ID: ENST00000560780
  CDS Start-End: 581-1645
gaaaggacagcaacagtcaggtggtttaccttccagaggctggcaatgctgtttcactggaggacacggctaagaaggaagtccaccagcctgccaagatgaattgccttgaaggagagggagagggatcctggcccagctgactttgaatctgagggagggccaagctgccactgccctggatgttggaacacctggtcttgctgcttcctcccaccacctcaaaaacacagaccttggactacctgtcgcccatccctttctggcctacatttcccagcaccagctctccagcacagcactttggacctcggctgccctcaccagacccaactctcttctgcagcctgctgacctcgtggccccctaggttcagtcatctgacccagctccaccctcggcaccaacgaatcttgcagcagcagcagcatagtcaaacaccaagagagccccacttcctgctcaccacactccttaggaagtgccagtggtgggtaagtctaaagggttgttcctcctggcttaaagtcccccagccaagaagccttggtctcagcagccagacccctatgctaacctcatgaccagaaaagagaaggactgggtgataaaagtgcagatggtgcagctgcagagtgcaaaaccccgcctggatgactactattaccaggaatattaccagaagctagagaagaagcaggcagacgaagagctacttggacgaagaaaccgggttgagtccctcaagctggtaacgccttacattccgaaggcagaggcttatgagtccgtggtccgaatcgagggttccctgggccaggtagctgtgtcgacatgcttcagccctcgccgagctattgatgcggtaccccatggaactcaagagcaggatatagaagctgcaagcagtcagaggcttcgggtattataccggattgagaagatgttccttcagttactagaaatagaggaaggctggaagtataggcctccaccgccctgcttttctgagcagcaaagcaaccaggttgagaagctcttccagaccttaaagacccaggagcagaacaacctggaagaggcagcagatggcttcctgcaggtgctctctgtgaggaaggggaaggccctggtggcccggctgctccccttcctgccccaggatcaggctgttaccattcttttggctatcacccaccatctgcccctcctggtccggagggatgtggctgatcaggccctacaaatgttattcaaacctctgggcaaatgtattagtcacttgaccctccacgaactcctccaaggacttcagggattaacgctgttgccacctggctcctcagagcggccagtcaccgtggtgcttcagaatcagtttggaatatctttgctctatgccctgctgagccatggggagcaactggtatcgctgcattcttccctagaggaacccaacagtgaccatacagcttggacagacatggtggttctgattgcctgggagatagcccaaatgcctacagcctctctggcagaacccctagctttccccagcaacctacttcccctgttctgtcaccacgtggacaaacaattggttcagcagctggaggccaggatggagtttgcctggatttactgatctgtttgttctggaatacgtgtatgtgggaagttgaatcatcagacactagctacatagactatgtttacagggatccagagagtctgaagacatttcttatgcctttatatattggagaacccttccccattttcatatcctttcttcaaaaatctaaatgatgtgcctaaaaataagacatggcataataaggtataattaaagagataatagaa

SEQ ID NO: 170510 - DNA, 531 bp, Homo sapiens
  Payload ID: 13565
  Gene Symbol: PATL2
  Gene Name: protein associated with topoisomerase II homolog 2 (yeast)
  ENST ID: ENST00000558809
  CDS Start-End: 1-477
caggccctacaaatgttattcaaacctctgggcaaatgtattagtcacttgaccctccacgaactcctccaaggacttcagggattaacgctgttgccacctggctcctcagagcggccagtcaccgtggtgcttcagaatcaggacagacatggtggttctgattgcctgggagatagcccaaatgcctacagcctctctggcagaacccctagctttccccagcaacctacttcccctgttctgtcaccacgtggacaaacaattggttcagcagctggaggccaggatggagtttgcctggatttactgatctgtttgttctggaatacgtgtatgtgggaagttgaatcatcagacactagctacatagactatgtttacagggatccagagagtctgaagacatttcttatgcctttatatattggagaacccttccccattttcatatcctttcttcaaaaatctaaatgatgtgcctaaaaataagacatggcataataaggtataattaaagagataatagaa

SEQ ID NO: 170511 - DNA, 765 bp, Homo sapiens
  Payload ID: 13565
  Gene Symbol: PATL2
  Gene Name: protein associated with topoisomerase II homolog 2 (yeast)
  ENST ID: ENST00000560110
  CDS Start-End: 390-765
ctggtgatgtcggttgggaagtacttctcttcctgcttctagcctgtgcctcatttctgtccctttgtgggacagctccctagagccgagctgggagggtgggtgtttatggcagtctgagaccccagggtctctctcctcaagaccatggccaagaattctctaaccatcttgctgggaggattccatggctgttttagggtgccatgtcatccttactgactgaggatggtgcctcttggcctctttcttgtctcaggtttaccttccagaggctggcaatgctgtttcactggaggacacggctaagaaggaagtccaccagcctgccaagatgaattgccttgaagagagctctgcttagctcccctggagtcaaggcccctggtatgctgggaatgtcacttgcctccttgcattttctgtggcagaccttggactacctgtcgcccatccctttctggcctacatttcccagcaccagctctccagcacagcactttggacctcggctgccctcaccagacccaactctcttctgcagcctgctgacctcgtggccccctaggttcagtcatctgacccagctccaccctcggcaccaacgaatcttgcagcagcagcagcatagtcaaacaccaagagagccccacttcctgctcaccacactccttaggaagtgccagtggtgggtaagtctaaagggttgttcctcctggcttaaagtcccccagccaagaagccttggtctcagcagccagaccc

SEQ ID NO: 170512 - DNA, 1913 bp, Homo sapiens
  Payload ID: 13565
  Gene Symbol: PATL2
  Gene Name: protein associated with topoisomerase II homolog 2 (yeast)
  Uniprot ID: C9JE40
  ENST ID: ENST00000560775
  CDS Start-End: 61-1692
gctggcaatgctgtttcactggaggacacggctaagaaggaagtccaccagcctgccaagatgaattgccttgaagggccaggtaagacctgtggccccttggcttctgaggaggagctggtgtctgcctgccagttggaaaaagaagaagagaatgaaggggaggaggaggaagaggaggaggacgaggaggatctggacccagatctggacccagacctagaggaggaagagaatgatcttggggatccagctgtacttggtgctgtccacaacacccagagagctctgcttagctcccctggagtcaaggcccctggtatgctgggaatgtcacttgcctccttgcattttctgtggcagaccttggactacctgtcgcccatccctttctggcctacatttcccagcaccagctctccagcacagcactttggacctcggctgccctcaccagacccaactctcttctgcagcctgctgacctcgtggccccctaggttcagtcatctgacccagctccaccctcggcaccaacgaatcttgcagcagcagcagcatagtcaaacaccaagtcccccagccaagaagccttggtctcagcagccagacccctatgctaacctcatgaccagaaaagagaaggactgggtgataaaagtgcagatggtgcagctgcagagtgcaaaaccccgcctggatgactactattaccaggaatattaccagaagctagagaagaagcaggcagacgaagagctacttggacgaagaaaccgggttgagtccctcaagctggtaacgccttacattccgaaggcagaggcttatgagtccgtggtccgaatcgagggttccctgggccaggtagctgtgtcgacatgcttcagccctcgccgagctattgatgcggtaccccatggaactcaagagcaggatatagaagctgcaagcagtcagaggcttcgggtattataccggattgagaagatgttccttcagttactagaaatagaggaaggctggaagtataggcctccaccgccctgcttttctgagcagcaaagcaaccaggttgagaagctcttccagaccttaaagacccaggagcagaacaacctggaagaggcagcagatggcttcctgcaggtgctctctgtgaggaaggggaaggccctggtggcccggctgctccccttcctgccccaggatcaggctgttaccattcttttggctatcacccaccatctgcccctcctggtccggagggatgtggctgatcaggccctacaaatgttattcaaacctctgggcaaatgtattagtcacttgaccctccacgaactcctccaaggacttcagggattaacgctgttgccacctggctcctcagagcggccagtcaccgtggtgcttcagaatcagtttggaatatctttgctctatgccctgctgagccatggggagcaactggtatcgctgcattcttccctagaggaacccaacagtgaccatacagcttggacagacatggtggttctgattgcctgggagatagcccaaatgcctacagcctctctggcagaacccctagctttccccagcaacctacttcccctgttctgtcaccacgtggacaaacaattggttcagcagctggaggccaggatggagtttgcctggatttactgatctgtttgttctggaatacgtgtatgtgggaagttgaatcatcagacactagctacatagactatgtttacagggatccagagagtctgaagacatttcttatgcctttatatattggagaacccttccccattttcatatcctttcttcaaaaatctaaatgatgtgcctaaaaataagacatggcataataaggtataattaaagagataatagaatga

SEQ ID NO: 170513 - DNA, 845 bp, Homo sapiens
  Payload ID: 13565
  Gene Symbol: PATL2
  Gene Name: protein associated with topoisomerase II homolog 2 (yeast)
  ENST ID: ENST00000558481
  CDS Start-End: 1-566
aagagaatgaaggggaggaggaggaagaggaggaggacgaggaggatctggacccagatctggacccagacctagaggaggaagagaatgatcttggggatccagctgtacttggtgctgtccacaacacccagagagctctgcttagctcccctggagtcaaggcccctggtatgctgggaatgtcacttgcctccttgcattttctgtggcagaccttggactacctgtcgcccatccctttctggcctacatttcccagcaccagctctccagcacagcactttggacctcggctgccctcaccagacccaactctcttctgcagcctgctgacctcgtggccccctaggttcagtcatctgacccagctccaccctcggcaccaacgaatcttgcagcagcagcagcatagtcaaacaccaagagagccccacttcctgctcaccacactccttaggaagtgccagtggtgggtaagtctaaagggttgttcctcctggcttaaagtcccccagccaagaagccttggtctcagcagccagacccctatgctaacctcatgaccagaaaagagaaggactgggtgataaaagtgcagatggtgcagctgcagagtgcaaaaccccgcctggatgactactattaccaggaatattaccagaagctagagaagaagcaggcagacgaagagctacttggacgaagaaaccgggttgagtccctcaagctggtaacgccttacattccgaaggcagaggcttatgagtccgtggtccgaatcgagggttccctgggccaggtagctgtgtcgacatgcttcagccctcgccgagctattgatg

SEQ ID NO: 170514 - DNA, 1773 bp, Homo sapiens
  Payload ID: 13566
  Gene Symbol: PROC
  Gene Name: protein C (inactivator of coagulation factors Va and VIIIa)
  Uniprot ID: P04070
  ENST ID: ENST00000234071
  CDS Start-End: 88-1473
aactcgaactccaggctgtcatggcggcaggacggcgaacttgcagtatctccacgacccgcccctacaggtgccagtgcctccagaatgtggcagctcacaagcctcctgctgttcgtggccacctggggaatttccggcacaccagctcctcttgactcagtgttctccagcagcgagcgtgcccaccaggtgctgcggatccgcaaacgtgccaactccttcctggaggagctccgtcacagcagcctggagcgggagtgcatagaggagatctgtgacttcgaggaggccaaggaaattttccaaaatgtggatgacacactggccttctggtccaagcacgtcgacggtgaccagtgcttggtcttgcccttggagcacccgtgcgccagcctgtgctgcgggcacggcacgtgcatcgacggcatcggcagcttcagctgcgactgccgcagcggctgggagggccgcttctgccagcgcgaggtgagcttcctcaattgctcgctggacaacggcggctgcacgcattactgcctagaggaggtgggctggcggcgctgtagctgtgcgcctggctacaagctgggggacgacctcctgcagtgtcaccccgcagtgaagttcccttgtgggaggccctggaagcggatggagaagaagcgcagtcacctgaaacgagacacagaagaccaagaagaccaagtagatccgcggctcattgatgggaagatgaccaggcggggagacagcccctggcaggtggtcctgctggactcaaagaagaagctggcctgcggggcagtgctcatccacccctcctgggtgctgacagcggcccactgcatggatgagtccaagaagctccttgtcaggcttggagagtatgacctgcggcgctgggagaagtgggagctggacctggacatcaaggaggtcttcgtccaccccaactacagcaagagcaccaccgacaatgacatcgcactgctgcacctggcccagcccgccaccctctcgcagaccatagtgcccatctgcctcccggacagcggccttgcagagcgcgagctcaatcaggccggccaggagaccctcgtgacgggctggggctaccacagcagccgagagaaggaggccaagagaaaccgcaccttcgtcctcaacttcatcaagattcccgtggtcccgcacaatgagtgcagcgaggtcatgagcaacatggtgtctgagaacatgctgtgtgcgggcatcctcggggaccggcaggatgcctgcgagggcgacagtggggggcccatggtcgcctccttccacggcacctggttcctggtgggcctggtgagctggggtgagggctgtgggctccttcacaactacggcgtttacaccaaagtcagccgctacctcgactggatccatgggcacatcagagacaaggaagccccccagaagagctgggcaccttagcgaccctccctgcagggctgggcttttgcatggcaatggatgggacattaaagggacatgtaacaagcacaccggcctgctgttctgtccttccatccctcttttgggctcttctggagggaagtaacatttactgagcacctgttgtatgtcacatgccttatgaatagaatcttaactcctagagcaactctgtggggtggggaggagcagatccaagttttgcggggtctaaagctgtgtgtgttgagggggatactctgtttatgaaaaagaataaaaaacacaaccacgaagcca

SEQ ID NO: 170515 - DNA, 779 bp, Homo sapiens
  Payload ID: 13566
  Gene Symbol: PROC
  Gene Name: protein C (inactivator of coagulation factors Va and VIIIa)
  ENST ID: ENST00000402125
  CDS Start-End: 1-710
attgctcgctggacaacggcggctgcacgcattactgcctagaggaggtgggctggcggcgctgtagctgtgcgcctggctacaagctgggggacgacctcctgcagtgtcaccccgcaggagagtatgacctgcggcgctgggagaagtgggagctggacctggacatcaaggaggtcttcgtccaccccaactacagcaagagcaccaccgacaatgacatcgcactgctgcacctggcccagcccgccaccctctcgcagaccatagtgcccatctgcctcccggacagcggccttgcagagcgcgagctcaatcaggccggccaggagaccctcgtgacgggctggggctaccacagcagccgagagaaggaggccaagagaaaccgcaccttcgtcctcaacttcatcaagattcccgtggtcccgcacaatgagtgcagcgaggtcatgagcaacatggtgtctgagaacatgctgtgtgcgggcatcctcggggaccggcaggatgcctgcgagggcgacagtggggggcccatggtcgcctccttccacggcacctggttcctggtgggcctggtgagctggggtgagggctgtgggctccttcacaactacggcgtttacaccaaagtcagccgctacctcgactggatccatgggcacatcagagacaaggaagccccccagaagagctgggcaccttagcgaccctccctgcagggctgggcttttgcatggcaatggatgggacattaaagggacatgtaacaagca

SEQ ID NO: 170516 - DNA, 1586 bp, Homo sapiens
  Payload ID: 13566
  Gene Symbol: PROC
  Gene Name: protein C (inactivator of coagulation factors Va and VIIIa)
  ENST ID: ENST00000409048
  CDS Start-End: 62-1549
cgggggtaggcactgcccggagctcagaagtcctcctcagacaggtgccagtgcctccagaatgtggcagctcacaagcctcctgctgttcgtggccacctggggaatttccggcacaccagctcctcttgactcagtgttctccagcagcgagcgtgcccaccaggtgctgcggatccgcaaacgtgccaactccttcctggaggagctccgtcacagcagcctggagcgggagtgcatagaggagatctgtgacttcgaggaggccaaggaaattttccaaaatgtggatgacacactggccttctggtccaagcacgtcgacggtgaccagtgcttggtcttgcccttggagcacccgtgcgccagcctgtgctgcgggcacggcacgtgcatcgacggcatcggcagcttcagctgcgactgccgcagcggctgggagggccgcttctgccagcgcggtgagggggagaggtggatgctggcgggcggcggggcggggctggggccgggttgggggcgcggcaccagcaccagctgcccgcgccctcccctgcccgcagaggtgagcttcctcaattgctcgctggacaacggcggctgcacgcattactgcctagaggaggtgggctggcggcgctgtagctgtgcgcctggctacaagctgggggacgacctcctgcagtgtcaccccgcagtgaagttcccttgtgggaggccctggaagcggatggagaagaagcgcagtcacctgaaacgagacacagaagaccaagaagaccaagtagatccgcggctcattgatgggaagatgaccaggcggggagacagcccctggcaggtggtcctgctggactcaaagaagaagctggcctgcggggcagtgctcatccacccctcctgggtgctgacagcggcccactgcatggatgagtccaagaagctccttgtcaggcttggagagtatgacctgcggcgctgggagaagtgggagctggacctggacatcaaggaggtcttcgtccaccccaactacagcaagagcaccaccgacaatgacatcgcactgctgcacctggcccagcccgccaccctctcgcagaccatagtgcccatctgcctcccggacagcggccttgcagagcgcgagctcaatcaggccggccaggagaccctcgtgacgggctggggctaccacagcagccgagagaaggaggccaagagaaaccgcaccttcgtcctcaacttcatcaagattcccgtggtcccgcacaatgagtgcagcgaggtcatgagcaacatggtgtctgagaacatgctgtgtgcgggcatcctcggggaccggcaggatgcctgcgagggcgacagtggggggcccatggtcgcctccttccacggcacctggttcctggtgggcctggtgagctggggtgagggctgtgggctccttcacaactacggcgtttacaccaaagtcagccgctacctcgactggatccatgggcacatcagagacaaggaagccccccagaagagctgggcaccttagcgaccctccctgcagggctgggcttttgcatggcaat

SEQ ID NO: 170517 - DNA, 566 bp, Homo sapiens
  Payload ID: 13566
  Gene Symbol: PROC
  Gene Name: protein C (inactivator of coagulation factors Va and VIIIa)
  ENST ID: ENST00000431364
  CDS Start-End: 247-405
attctggagctgctttctaggcaggcagtgtgagctcagccccacgtagagcgggcagccgaggccttctgaggctatgtctctagcgaacaaggaccctcaatcccagcttccgccctgacggccagcacacagggacagccctttcattccgcttccacctgggggtgcaggcagagcagcagcgggggtaggcactgcccggagctcagaagtcctcctcagacaggtgccagtgcctccagaatgtggcagctcacaagcctcctgctgttcgtggccacctggggaatttccggcacaccagctcctcttggtgctgcggatccgcaaacgtgccaactccttcctggaggagctccgtcacagcagcctggagcgggagtgcatagaggagatctgtgacttcgaggaggccaaggaaattttccaaaatgtggatgacacactggccttctggtccaagcacgtcgacggtgaccagtgcttggtcttgcccttggagcacccgtgcgccagcctgtgctgcgggcacggcacgtgcatcgacggcatcggcagcttca

SEQ ID NO: 170518 - DNA, 500 bp, Homo sapiens
  Payload ID: 13566
  Gene Symbol: PROC
  Gene Name: protein C (inactivator of coagulation factors Va and VIIIa)
  ENST ID: ENST00000419985
  CDS Start-End: 84-242
aactcgaactccaggctgtcatggcggcaggacggcgaacttgcagtatctccacgacccgcccctgtgccagtgcctccagaatgtggcagctcacaagcctcctgctgttcgtggccacctggggaatttccggcacaccagctcctcttggtgctgcggatccgcaaacgtgccaactccttcctggaggagctccgtcacagcagcctggagcgggagtgcatagaggagatctgtgacttcgaggaggccaaggaaattttccaaaatgtggatgacacactggccttctggtccaagcacgtcgacggtgaccagtgcttggtcttgcccttggagcacccgtgcgccagcctgtgctgcgggcacggcacgtgcatcgacggcatcggcagcttcagctgcgactgccgcagcggctgggagggccgcttctgccagcgcggtgagggggagaggtggatgctggcgggcggcggggcggggctggggccggg

SEQ ID NO: 170519 - DNA, 598 bp, Homo sapiens
  Payload ID: 13566
  Gene Symbol: PROC
  Gene Name: protein C (inactivator of coagulation factors Va and VIIIa)
  ENST ID: ENST00000427769
  CDS Start-End: 251-598
ctgcattctggagctgctttctaggcaggcagtgtgagctcagccccacgtagagcgggcagccgaggccttctgaggctatgtctctagcgaacaaggaccctcaatcccagcttccgccctgacggccagcacacagggacagccctttcattccgcttccacctgggggtgcaggcagagcagcagcgggggtaggcactgcccggagctcagaagtcctcctcagacaggtgccagtgcctccagaatgtggcagctcacaagcctcctgctgttcgtggccacctggggaatttccggcacaccagctcctcttgactcagtgttctccagcagcgagcgtgcccaccaggtgctgcggatccgcaaacgtgccaactccttcctggaggagctccgtcacagcagcctggagcgggagtgcatagaggagatctgtgacttcgaggaggccaaggaaattttccaaaatgtggatgacacactggccttctggtccaagcacgtcgacggtgaccagtgcttggtcttgcccttggagcacccgtgcgccagcctgtgctgcgggcacggcacgtgcatcgacggcatcggc

SEQ ID NO: 170520 - DNA, 600 bp, Homo sapiens
  Payload ID: 13566
  Gene Symbol: PROC
  Gene Name: protein C (inactivator of coagulation factors Va and VIIIa)
  ENST ID: ENST00000442644
  CDS Start-End: 76-600
aggctgtcatggcggcaggacggcgaacttgcagtatctccacgacccgcccctacaggtgccagtgcctccagaatgtggcagctcacaagcctcctgctgttcgtggccacctggggaatttccggcacaccagctcctcttgactcagtgttctccagcagcgagcgtgcccaccaggtgctgcggatccgcaaacgtgccaactccttcctggaggagctccgtcacagcagcctggagcgggagtgcatagaggagatctgtgacttcgaggaggccaaggaaattttccaaaatgtggatgacacactggccttctggtccaagcacgtcgacggtgaccagtgcttggtcttgcccttggagcacccgtgcgccagcctgtgctgcgggcacggcacgtgcatcgacggcatcggcagcttcagctgcgactgccgcagcggctgggagggccgcttctgccagcgcgaggaggtgggctggcggcgctgtagctgtgcgcctggctacaagctgggggacgacctcctgcagtgtcaccccgcagtgaagttcccttgtgggaggccctggaagcggatggagaagaagcgc

SEQ ID NO: 170521 - DNA, 581 bp, Homo sapiens
  Payload ID: 13566
  Gene Symbol: PROC
  Gene Name: protein C (inactivator of coagulation factors Va and VIIIa)
  ENST ID: ENST00000429925
  CDS Start-End: 203-581
actcgaactccaggctgtcatggcggcaggacggcgaacttgcagtatctccacgacccgcccctcttccgccctgacggccagcacacagggacagccctttcattccgcttccacctgggggtgcaggcagagcagcagcgggggtaggcactgcccggagctcagaagtcctcctcagacaggtgccagtgcctccagaatgtggcagctcacaagcctcctgctgttcgtggccacctggggaatttccggcacaccagctcctcttgactcagtgttctccagcagcgagcgtgcccaccaggtgctgcggatccgcaaacgtgccaactccttcctggaggagctccgtcacagcagcctggagcgggagtgcatagaggagatctgtgacttcgaggaggccaaggaaattttccaaaatgtggatgacacactggccttctggtccaagcacgtcgacggtgaccagtgcttggtcttgcccttggagcacccgtgcgccagcctgtgctgcgggcacggcacgtgcatcgacggcatcggcagcttcagctgcgactgccgcagcggctggg

SEQ ID NO: 170522 - DNA, 1348 bp, Homo sapiens
  Payload ID: 13567
  Gene Symbol: PROCR
  Gene Name: protein C receptor, endothelial
  Uniprot ID: Q9UNN8
  ENST ID: ENST00000216968
  CDS Start-End: 83-799
cttctcttttccctagactgcagccagcggagcccgcagccggcccgagccaggaacccaggtccggagcctcaacttcaggatgttgacaacattgctgccgatactgctgctgtctggctgggccttttgtagccaagacgcctcagatggcctccaaagacttcatatgctccagatctcctacttccgcgacccctatcacgtgtggtaccagggcaacgcgtcgctggggggacacctaacgcacgtgctggaaggcccagacaccaacaccacgatcattcagctgcagcccttgcaggagcccgagagctgggcgcgcacgcagagtggcctgcagtcctacctgctccagttccacggcctcgtgcgcctggtgcaccaggagcggaccttggcctttcctctgaccatccgctgcttcctgggctgtgagctgcctcccgagggctctagagcccatgtcttcttcgaagtggctgtgaatgggagctcctttgtgagtttccggccggagagagccttgtggcaggcagacacccaggtcacctccggagtggtcaccttcaccctgcagcagctcaatgcctacaaccgcactcggtatgaactgcgggaattcctggaggacacctgtgtgcagtatgtgcagaaacatatttccgcggaaaacacgaaagggagccaaacaagccgctcctacacttcgctggtcctgggcgtcctggtgggcagtttcatcattgctggtgtggctgtaggcatcttcctgtgcacaggtggacggcgatgttaattactctccagccccctcagaaggggctggattgatggaggctggcaagggaaagtttcagctcactgtgaagccagactccccaactgaaacaccagaaggtttggagtgacagctcctttcttctcccacatctgcccactgaagatttgagggaggggagatggagaggagaggtggacaaagtacttggtttgctaagaacctaagaacgtgtatgctttgctgaattagtctgataagtgaatgtttatctatctttgtggaaaacagataatggagttggggcaggaagcctatggcccatcctccaaagacagacagaatcacctgaggcgttcaaaagatataaccaaataaacaagtcatccacaatcaaaatacaacattcaatacttccaggtgtgtcagacttgggatgggacgctgatataatagggtagaaagaagtaacacgaagaagtggtggaaatgtaaaatccaagtcatatggcagtgatcaattattaatcaattaataatattaataaatttcttatatttaaggca

SEQ ID NO: 170523 - DNA, 642 bp, Homo sapiens
  Payload ID: 13567
  Gene Symbol: PROCR
  Gene Name: protein C receptor, endothelial
  ENST ID: ENST00000635377
  CDS Start-End: 1-641
cctacttccgcgacccctatcacgtgtggtaccagggcaacgcgtcgctggggggacacctaacgcacgtgctggaaggcccagacaccaacaccacgatcattcagctgcagcccttgcaggagcccgagagctgggcgcgcacgcagagtggcctgcagtcctacctgctccagttccacggcctcgtgcgcctggtgcaccaggagcggaccttggcctttcctctgaccatccgctgcttcctgggctgtgagctgcctcccgagggctctagagcccatgtcttcttcgaagtggctgtgaatgggagctcctttgtgagtttccggccggagagagccttgtggcaggcagacacccaggtcacctccggagtggtcaccttcaccctgcagcagctcaatgcctacaaccgcactcggtatgaactgcgggaattcctggaggacacctgtgtgcagtatgtgcagaaacatatttccgcggaaaacacgaaagataatggagttggggcaggaagcctatggcccatcctccaaagacagacagaatcacctgaggcgttcaaaagatataaccaaataaacaagtcatccacaatcaaaatacaacattcaatacttccagatctctactaag

SEQ ID NO: 170524 - DNA, 442 bp, Homo sapiens
  Payload ID: 13567
  Gene Symbol: PROCR
  Gene Name: protein C receptor, endothelial
  ENST ID: ENST00000634509
  CDS Start-End: 1-105
gcctacaaccgcactcggtatgaactgcgggaattcctggaggacacctgtgtgcagtatgtgcagaaacatatttccgcggaaaacacgaaagatctctactaagaatgtcactctggccgggcgcagtggctcactcctgtaatcccagcactttgggaggccgaggcaggaggatcacttgaggttgggagttcgagaccagcatgaccaacatggaaaaaccccgtctctactaaaaatacaaaattagccaggcgtggtggtgcatgtctgtaatcccagctactcgggaggctgaggcaggagaatcacttgaacccgggaggcaggggttgcggtgagccgagatcacaccattgcactccagcctgggctacaagagcgaaactctgtctcaaataaataaataaataaaacaaaataaaaaataaagaatgtc

SEQ ID NO: 170525 - DNA, 1698 bp, Homo sapiens
  Payload ID: 13568
  Gene Symbol: PDIA2
  Gene Name: protein disulfide isomerase family A, member 2
  Uniprot ID: Q13087
  ENST ID: ENST00000219406
  CDS Start-End: 19-1596
acgcgccctggcagcaccatgagccgccagcttctgcctgtactgctgctgctgctgctcagggcttcgtgcccatggggtcaggaacagggagcgaggagcccctcggaggagcctccagaggaggaaatccccaaggaggatgggatcttggtgctgagccgccacaccctgggcctggccctgcgggagcaccctgccctgctggtggaattctatgccccgtggtgtgggcactgccaggccctggcccccgagtacagcaaggcagctgccgtgctcgcggccgagtcaatggtggtcacgctggccaaggtggatgggcccgcgcagcgcgagctggctgaggagtttggtgtgacggagtaccctacgctcaagttcttccgcaatgggaaccgcacgcacccggaggagtacacaggaccacgggacgctgagggcattgccgagtggctgcgacggcgggtggggcccagtgccatgcggctggaggacgaggcggccgcccaggcgctgatcggtggccgggacctagtggtcattggcttcttccaggacctgcaggacgaggacgtggccaccttcttggccttggcccaggacgccctggacatgacctttggcctcacagaccggccgcggctctttcagcagtttggcctcaccaaggacactgtggttctcttcaagaagtttgatgaggggcgggcagacttccccgtggacgaggagcttggcctggacctgggggatctgtcgcgcttcctggtcacacacagcatgcgcctggtcacggagttcaacagccagacgtctgccaagatcttcgcggccaggatcctcaaccacctgctgctgtttgtcaaccagacgctggctgcgcaccgggagctcctagcgggctttggggaggcagctccccgcttccgggggcaggtgctgttcgtggtggtggacgtggcggccgacaatgagcacgtgctgcagtactttggactcaaggctgaggcagcccccactctgcgcttggtcaaccttgaaaccactaagaagtatgcgcctgtggatgggggccctgtcaccgcagcgtccatcactgctttctgccatgcagtcctcaacggccaagtcaagccctatctcctgagccaggagataccccctgattgggatcagcggccagttaagaccctcgtgggcaagaattttgagcaggtggcttttgacgaaaccaagaatgtgtttgtcaagttctatgccccgtggtgcacccactgcaaggagatggcccctgcctgggaggcattggctgagaagtaccaagaccacgaggacatcatcattgctgagctggatgccacggccaacgagctggatgccttcgctgtgcacggcttccctactctcaagtacttcccagcagggccaggtcggaaggtgattgaatacaaaagcaccagggacctggagactttctccaagttcctggacaacgggggcgtgctgcccacggaggagcccccggaggagccagcagccccgttcccggagccaccggccaactccactatggggtccaaggaggaactgtagctgcccccgtgtcacccccgccatcactgctggacaggagccacccccttgggtaccagagggagctgtgcattgtgaataaagagtgagcttggttctgga

SEQ ID NO: 170526 - DNA, 1575 bp, Homo sapiens
  Payload ID: 13568
  Gene Symbol: PDIA2
  Gene Name: protein disulfide isomerase family A, member 2
  Uniprot ID: Q13087
  ENST ID: ENST00000404312
  CDS Start-End: 6-1574
gcaccatgagccgccagcttctgcctgtactgctgctgctgctgctcagggcttcgtgcccatggggtcaggaacagggagcgaggagcccctcggaggagcctccagaggaggaaatccccaaggaggatgggatcttggtgctgagccgccacaccctgggcctggccctgcgggagcaccctgccctgctggtggaattctatgccccgtggtgtgggcactgccaggccctggcccccgagtacagcaaggcagctgccgtgctcgcggccgagtcaatggtggtcacgctggccaaggtggatgggcccgcgcagcgcgagctggctgaggagtttggtgtgacggagtaccctacgctcaagttcttccgcaatgggaaccgcacgcacccggaggagtacacaggaccacgggacgctgagggcattgccgagtggctgcgacggcgggtggggcccagtgccatgcggctggaggacgaggcggccgcccaggcgctgatcggtggccgggacctagtggtcattggcttcttccaggacgaggacgtggccaccttcttggccttggcccaggacgccctggacatgacctttggcctcacagaccggccgcggctctttcagcagtttggcctcaccaaggacactgtggttctcttcaagaagtttgatgaggggcgggcagacttccccgtggacgaggagcttggcctggacctgggggatctgtcgcgcttcctggtcacacacagcatgcgcctggtcacggagttcaacagccagacgtctgccaagatcttcgcggccaggatcctcaaccacctgctgctgtttgtcaaccagacgctggctgcgcaccgggagctcctagcgggctttggggaggcagctccccgcttccgggggcaggtgctgttcgtggtggtggacgtggcggccgacaatgagcacgtgctgcagtactttggactcaaggctgaggcagcccccactctgcgcttggtcaaccttgaaaccactaagaagtatgcgcctgtggatgggggccctgtcaccgcagcgtccatcactgctttctgccatgcagtcctcaacggccaagtcaagccctatctcctgagccaggagataccccctgattgggatcagcggccagttaagaccctcgtgggcaagaattttgagcaggtggcttttgacgaaaccaagaatgtgtttgtcaagttctatgccccgtggtgcacccactgcaaggagatggcccctgcctgggaggcattggctgagaagtaccaagaccacgaggacatcatcattgctgagctggatgccacggccaacgagctggatgccttcgctgtgcacggcttccctactctcaagtacttcccagcagggccaggtcggaaggtgattgaatacaaaagcaccagggacctggagactttctccaagttcctggacaacgggggcgtgctgcccacggaggagcccccggaggagccagcagccccgttcccggagccaccggccaactccactatggggtccaaggaggaactgtagc

SEQ ID NO: 170527 - DNA, 680 bp, Homo sapiens
  Payload ID: 13568
  Gene Symbol: PDIA2
  Gene Name: protein disulfide isomerase family A, member 2
  ENST ID: ENST00000456379
  CDS Start-End: 1-680
agcttctgcctgtactgctgctgctgctgctcagggcttcgtgcccatggggtcaggaacagggagcgaggagcccctcggaggagcctccagaggaggaaatccccaaggaggatgggatcttggtgctgagccgccacaccctgggcctggccctgcgggagcaccctgccctgctggtggaattctatgccccgtggtgtgggcactgccaggccctggcccccgagtacagcaaggcagctgccgtgctcgcggccgagtcaatggtggtcacgctggccaaggtggatgggcccgcgcagcgcgagctggctgaggagtttggtgtgacggagtaccctacgctcaagttcttccgcaatgggaaccgcacgcacccggaggagtacacaggaccacgggacgctgagggcattgccgagtggctgcgacggcgggtggggcccagtgccatgcggctggaggacgaggcggccgcccaggcgctgatcggtggccgggacctagtggtcattggcttcttccaggacgccctggacatgacctttggcctcacagaccggccgcggctctttcagcagtttggcctcaccaaggacactgtggttctcttcaagaagtttgatgaggggcgggcagacttccccgtggacgaggagcttggcctggacctgggg

SEQ ID NO: 170528 - DNA, 567 bp, Homo sapiens
  Payload ID: 13568
  Gene Symbol: PDIA2
  Gene Name: protein disulfide isomerase family A, member 2
  ENST ID: ENST00000435833
  CDS Start-End: 1-465
gcagtcctcaacggccaagtcaaggagataccccctgattgggatcagcggccagttaagaccctcgtgggcaagaattttgagcaggtggcttttgacgaaaccaagaatgtgtttgtcaagttctatgccccgtggtgcacccactgcaaggagatggcccctgcctgggaggcattggctgagaagtaccaagaccacgaggacatcatcattgctgagctggatgccacggccaacgagctggatgccttcgctgtgcacggcttccctactctcaagtacttcccagcagggccaggtcggaaggtgattgaatacaaaagcaccagggacctggagactttctccaagttcctggacaacgggggcgtgctgcccacggaggagcccccggaggagccagcagccccgttcccggagccaccggccaactccactatggggtccaaggaggaactgtagctgcccccgtgtcacccccgccatcactgctggacaggagccacccccttgggtaccagagggagctgtgcattgtgaataaagagtgagcttggttctgga

SEQ ID NO: 170529 - DNA, 3727 bp, Homo sapiens
  Payload ID: 13569
  Gene Symbol: PDIA3
  Gene Name: protein disulfide isomerase family A, member 3
  Uniprot ID: P30101
  ENST ID: ENST00000300289
  CDS Start-End: 149-1666
gccgggtttgggggttgggacctccggctgcaggtccgcctgggccagacgcgcgagcgcaagcagcgggttagtggtcgcgcgcccgacctccgcagtcccagccgagccgcgacccttccggccgtccccaccccacctcgccgccatgcgcctccgccgcctagcgctgttcccgggtgtggcgctgcttcttgccgcggcccgcctcgccgctgcctccgacgtgctagaactcacggacgacaacttcgagagtcgcatctccgacacgggctctgcgggcctcatgctcgtcgagttcttcgccccctggtgtggacactgcaagagacttgcacctgagtatgaagctgcagctaccagattaaaaggaatagtcccattagcaaaggttgattgcactgccaacactaacacctgtaataaatatggagtcagtggatatccaaccctgaagatatttagagatggtgaagaagcaggtgcttatgatggacctaggactgctgatggaattgtcagccacttgaagaagcaggcaggaccagcttcagtgcctctcaggactgaggaagaatttaagaaattcattagtgataaagatgcctctatagtaggttttttcgatgattcattcagtgaggctcactccgagttcctaaaagcagccagcaacttgagggataactaccgatttgcacatacgaatgttgagtctctggtgaacgagtatgatgataatggagagggtatcatcttatttcgtccttcacatctcactaacaagtttgaggacaagactgtggcatatacagagcaaaaaatgaccagtggcaaaattaaaaagtttatccaggaaaacatttttggtatctgccctcacatgacagaagacaataaagatttgatacagggcaaggacttacttattgcttactatgatgtggactatgaaaagaacgctaaaggttccaactactggagaaacagggtaatgatggtggcaaagaaattcctggatgctgggcacaaactcaactttgctgtagctagccgcaaaacctttagccatgaactttctgattttggcttggagagcactgctggagagattcctgttgttgctatcagaactgctaaaggagagaagtttgtcatgcaggaggagttctcgcgtgatgggaaggctctggagaggttcctgcaggattactttgatggcaatctgaagagatacctgaagtctgaacctatcccagagagcaatgatgggcctgtgaaggtagtggtagcagagaattttgatgaaatagtgaataatgaaaataaagatgtgctgattgaattttatgccccttggtgtggtcactgtaagaacctggagcccaagtataaagaacttggcgagaagctcagcaaagacccaaatatcgtcatagccaagatggatgccacagccaatgatgtgccttctccatatgaagtcagaggttttcctaccatatacttctctccagccaacaagaagctaaatccaaagaaatatgaaggtggccgtgaattaagtgattttattagctatctacaaagagaagctacaaacccccctgtaattcaagaagaaaaacccaagaagaagaagaaggcacaggaggatctctaaagcagtagccaaacaccactttgtaaaaggactcttccatcagagatgggaaaaccattggggaggactaggacccatatgggaattattacctctcagggccgagaggacagaatggatataatctgaatcctgttaaattttctctaaactgtttcttagctgcactgtttatggaaataccaggaccagtttatgtttgtggttttgggaaaaattatttgtgttgggggaaatgttgtgggggtggggttgagttgggggtattttctaattttttttgtacatttggaacagtgacaataaatgagacccctttaaactgtcttattttccaccagattgagaaccagatgttctctacacactatcactgttcaatagagctttcttcagtgatggaaatgctctgtaatctacactgttcagtacaggtagctacggagcatctgaaatatggctagaaactacatttttgttttgattaatttaaatagccatacagttgctaccatactggtcacggcagctgtagactgactgggtccatagttcatcacctcaaaattctttcaaaatttattatctctttctctccttacatgtttatttcccaggcctaccctggtgattagaacagctgaagggcctttcttgttaggctgtccatgccctaaggatgggttcctgtttatccttgccacgcagctgagcttactgcatgtttatatctcccaaggactgttctctgctcagaaatgccctgtcaagggtgtggcatcacgcagtttcatccaagttgtttcaggaattgctgacactgctgggtgcagttctatcccctaaagcctagggtgtggccctttaacttccccttcagtagaactgggaaaggcagtaccattcctagttatgagtgaagcatccactttcttttgtaacaatgaggaacagaaaggataagactgaagagtgatcttttgtccaactaaaccatttatctccttttgtaggtaaattcaaatcctgcccagttatagttttcagtcactggagaattccaggtaggagccctactttaggtgatcctaggaactcctatgttcagaaaagaattttcttcctactatataattacagtatttagctgtcaattttaagatgaatttggtagagccttatagtaaagtatgtatcttggtcacacacaaagcttggaaaaagtaaaagatgtctaaaccataatcttgtaactcataacatctgggctggggcccggggatctaattgtttagagagccccaaaagtggctcagatgtaaagccagggttaagaaccatctgccttggaagatttaagggaaacatataaacttgtacaaaggacacagaagcagtcagttttaattttttagccatgttggtaaaagttcattttcagtacatgggtaacacccaggccctttcccattatatccaggtatgctacaagttcttttaactcttatcagaagttattattactgtttccttagagaggctaccaggctaaaattcacttagtttggtttgtctaatgtcctcattattttatcctgaagatgatgtcatttctcaggacttgaaaatgacttggctgaactaaaggtaaaaaagccaagcctctgtcacttttcctagactcctaggcacagctatggagtctttgcacagtgcccataccctaaaaattaataatgaaaaccaaacctcaagaacctagagcagctctctacttgccaccatggactccagtggtcagcataagaaaagcagatagttgcattctatttagtttatagctgctttgttcctttgtgtttcactaagcagaggctcaaaaattcccttgataacttcagctgcccctgttcttttcctcaaactccaggatgagacctttaatgtgggacaatttctggtgaaggtactcacagcgacgcttttcttctctgtaacttgggtactgctgcagagaaaaagcatccatgtcaaaaagtaaaaattctcattctaccttgc

SEQ ID NO: 170530 - DNA, 725 bp, Homo sapiens
  Payload ID: 13569
  Gene Symbol: PDIA3
  Gene Name: protein disulfide isomerase family A, member 3
  ENST ID: ENST00000455250
  CDS Start-End: 1-372
tccgacgtgctagaactcacggacgacaacttcgagagtcgcatctccgacacgggctctgcgggcctcatgctcgtcgagttcttcgccccctggtgtggacactgcaagagacttgcacctgagtatgaagctgcagctaccagattaaaaggaatagtcccattagcaaaggttgattgcactgccaacactaacacctgtaataaatatggagtcagtggatatccaaccctgaagatatttagagatggtgaagaagcaggtgcttatgatggacctaggactgctggggtatcatcttatttcgtccttcacatctcactaacaagtttgaggacaagactgtggcatatacagagcaaaaaatgaccagtggcaaaattaaaaagtttatccaggaaaacatttttggtatctgccctcacatgacagaagacaataaagatttgatacagggcaaggacttacttattgcttactatgatgtggactatgaaaagaacgctaaaggttccaactactggagaaacagggtaatgatggtggcaaagaaattcctggatgctgggcacaaactcaactttgctgtagctagccgcaaaacctttagccatgaactttctgattttggcttggagagcactgctggagagattcctgttgttgctatcagaactgctaaaggagagaagtttgtcatgcaggaggagttctcgcgtgat

SEQ ID NO: 170531 - DNA, 596 bp, Homo sapiens
  Payload ID: 13569
  Gene Symbol: PDIA3
  Gene Name: protein disulfide isomerase family A, member 3
  ENST ID: ENST00000446523
  CDS Start-End: 88-315
agcagcgggttagtggtcgcgcgcccgacctccgcagtcccagccgagccgcgacccttccggccgtccccaccccacctcgccgccatgcgcctccgccgcctagcgctgttcccgggtgtggcgctgcttcttgccgcggcccgcctcgccgctgcctccgacgtgctagaactcacggacgacaacttcgagagtcgcatctccgacacgggctctgcgggcctcatgctcgtcgagttcttcgccccctggttacagaactcaccttctcaacgtgatccctctgcaaccctttggcttttgaaaaggtgatgtacagctggtgctagctgtatatacactgattaggattttctgggcagaggagccggtgcttctggtggccctctgggaaaggtgtggacactgcaagagacttgcacctgagtatgaagctgcagctaccagattaaaaggaatagtcccattagcaaaggttgattgcactgccaacactaacacctgtaataaatatggagtcagtggatatccaaccctgaagatatttagagatggtgaagaagcaggtgcttatgatggacctaggactgctg

SEQ ID NO: 170532 - DNA, 2107 bp, Homo sapiens
  Payload ID: 13569
  Gene Symbol: PDIA3
  Gene Name: protein disulfide isomerase family A, member 3
  ENST ID: ENST00000434494
  CDS Start-End: 88-303
agcagcgggttagtggtcgcgcgcccgacctccgcagtcccagccgagccgcgacccttccggccgtccccaccccacctcgccgccatgcgcctccgccgcctagcgctgttcccgggtgtggcgctgcttcttgccgcggcccgcctcgccgctgcctccgacgtgctagaactcacggacgacaacttcgagagtcgcatctccgacacgggctctgcgggcctcatgctcgtcgagttcttcgccccctgttccattcctgctggatttgaagaggagagtctcctccagcctcattgaaactctttttgtggatttgatgaccttatggatattgccaaagtttaaggcagtggattttagtcccagccttgcagcttacacacacacctggttgctccccagatttctggagattctcattcagtgtggacactgcaagagacttgcacctgagtatgaagctgcagctaccagattaaaaggaatagtcccattagcaaaggttgattgcactgccaacactaacacctgtaataaatatggagtcagtggatatccaaccctgaagatatttagagatggtgaagaagcaggtgcttatgatggacctaggactgctgatggaattgtcagccacttgaagaagcaggcaggaccagcttcagtgcctctcaggactgaggaagaatttaagaaattcattagtgataaagatgcctctatagtaggttttttcgatgattcattcagtgaggctcactccgagttcctaaaagcagccagcaacttgagggataactaccgatttgcacatacgaatgttgagtctctggtgaacgagtatgatgataatggagagggtatcatcttatttcgtccttcacatctcactaacaagtttgaggacaagactgtggcatatacagagcaaaaaatgaccagtggcaaaattaaaaagtttatccaggaaaacatttttggtatctgccctcacatgacagaagacaataaagatttgatacagggcaaggacttacttattgcttactatgatgtggactatgaaaagaacgctaaaggttccaactactggagaaacagggtaatgatggtggcaaagaaattcctggatgctgggcacaaactcaactttgctgtagctagccgcaaaacctttagccatgaactttctgattttggcttggagagcactgctggagagattcctgttgttgctatcagaactgctaaaggagagaagtttgtcatgcaggaggagttctcgcgtgatgggaaggctctggagaggttcctgcaggattactttgatggcaatctgaagagatacctgaagtctgaacctatcccagagagcaatgatgggcctgtgaaggtagtggtagcagagaattttgatgaaatagtgaataatgaaaataaagatgtgctgattgaattttatgccccttggtgtggtcactgtaagaacctggagcccaagtataaagaacttggcgagaagctcagcaaagacccaaatatcgtcatagccaagatggatgccacagccaatgatgtgccttctccatatgaagtcagaggttttcctaccatatacttctctccagccaacaagaagctaaatccaaagaaatatgaaggtggccgtgaattaagtgattttattagctatctacaaagagaagctacaaacccccctgtaattcaagaagaaaaacccaagaagaagaagaaggcacaggaggatctctaaagcagtagccaaacaccactttgtaaaaggactcttccatcagagatgggaaaaccattggggaggactaggacccatatgggaattattacctctcagggccgagaggacagaatggatataatctgaatcctgttaaattttctctaaactgtttcttagctgcactgtttatggaaataccaggaccagtttatgtttgtggttttgggaaaaattatttgtgttgggggaaatgttgtgggggtggggttgagttgggggtattttctaattttttttgtacatttggaacagtgacaataaatgagacccctttaaactgtc

SEQ ID NO: 170533 - DNA, 2903 bp, Homo sapiens
  Payload ID: 13570
  Gene Symbol: PDIA4
  Gene Name: protein disulfide isomerase family A, member 4
  Uniprot ID: P13667
  ENST ID: ENST00000286091
  CDS Start-End: 234-2171
ggcggcggagccgactcgtcgcggccgaggcgcgcgcggtccgtgccggcgtcagtctgggattggccggcccgcgacttcctccgccccctgccaatcgccggggacgacttccgtgggtttttccggctcccccgcgtcgctaaggagcgacgggctgtcggccagaccccgagttctcggtgcgctcagcggccgccgacgctaggaggccgcgctccgcccccgctaccatgaggccccggaaagccttcctgctcctgctgctcttggggctggtgcagctgctggccgtggcgggtgccgagggcccggacgaggattcttctaacagagaaaatgccattgaggatgaagaggaggaggaggaggaagatgatgatgaggaagaagacgacttggaagttaaggaagaaaatggagtcttggtcctaaatgatgcaaactttgataattttgtggctgacaaagacacagtgctgctggagttttatgctccatggtgtggacattgcaagcagtttgctccggaatatgaaaaaattgccaacatattaaaggataaagatcctcccattcctgttgccaagatcgatgcaacctcagcgtctgtgctggccagcaggtttgatgtgagtggctaccccaccatcaagatccttaagaaggggcaggctgtagactacgagggctccagaacccaggaagaaattgttgccaaggtcagagaagtctcccagcccgactggacgcctccaccagaagtcacgcttgtgttgaccaaagagaactttgatgaagttgtgaatgatgcagatatcattctggtggagttttatgccccatggtgtggacactgcaagaaacttgcccccgagtatgagaaggccgccaaggagctcagcaagcgttctcctccaattcccctggcaaaggtcgacgccaccgcagaaacagacctggccaagaggtttgatgtctctggctatcccaccctgaaaattttccgcaaaggaaggccttatgactacaacggcccacgagaaaaatatggaatcgttgattacatgatcgagcagtccgggcctccctccaaggagattctgaccctgaagcaggtccaggagttcctgaaggatggagacgatgtcatcatcatcggggtctttaagggggagagtgacccagcctaccagcaataccaggatgccgctaacaacctgagagaagattacaaatttcaccacactttcagcacagaaatagcaaagttcttgaaagtctcccaggggcagttggttgtaatgcagcctgagaaattccagtccaagtatgagccccggagccacatgatggacgtccagggctccacccaggactcggccatcaaggacttcgtgctgaagtacgccctgcccctggttggccaccgcaaggtgtcaaacgatgctaagcgctacaccaggcgccccctggtggtcgtctactacagtgtggacttcagctttgattacagagctgcaactcagttttggcggagcaaagtcctagaggtggccaaggacttccctgagtacacctttgccattgcggacgaagaggactatgctggggaggtgaaggacctggggctcagcgagagtggggaggatgtcaatgccgccatcctggacgagagtgggaagaagttcgccatggagccagaggagtttgactctgacaccctccgcgagtttgtcactgctttcaaaaaaggaaaactgaagccagtcatcaaatcccagccagtgcccaagaacaacaagggacccgtcaaggtcgtggtgggaaagacctttgactccattgtgatggaccccaagaaggacgtcctcatcgagttctacgcgccatggtgcgggcactgcaagcagctagagcccgtgtacaacagcctggccaagaagtacaagggccaaaagggcctggtcatcgccaagatggacgccactgccaacgacgtccccagcgaccgctataaggtggagggcttccccaccatctacttcgcccccagtggggacaaaaagaacccagttaaatttgagggtggagacagagatctggagcatttgagcaagtttatagaagaacatgccacaaaactgagcaggaccaaggaagagctttgaaggcctgaggtctgcggaaggtgggaggaggcagacgccctgcgtggcccatggtcggggcgtccacgccgaggccggcaacaaacgacagtatctcggattcctttttttttttttttaattttttatactttggtgtttcacttcatgctctgaatactgaataaccatgaatgactgaatagtttagtccagatttttacagaggatacatctatttttatcattatttggggtttgaaaaatttttttttacaccttctaatttctttatttctcaaagcagataattcttctgtgtgaaaatgttttctttttttaatttaaggtttaaaattccttttccaaatcatgttgattttgctctttgctttttcgttgtctgagaaattgttggcgtagatttggcttctggtatgtgtttctgattgcttcctgttgagcacaaagtgagagctgccactgagcagccctgccaggggtgctgtttcaggctgggcatcgccaggcggcctccctgcaaaccaagggctgggggcaaaggggcatgatccagggtcccccagggtgggctcagctccagggagaggccacccacgtggcagccccacctcttgagagcccccagtgccggagcagaaaggaccctggacccagaggcagatactgcggggtggtagaaaaggtagagtaggctgtggcaatggaataaaacacgattaaaaacgttaa

SEQ ID NO: 170534 - DNA, 550 bp, Homo sapiens
  Payload ID: 13570
  Gene Symbol: PDIA4
  Gene Name: protein disulfide isomerase family A, member 4
  ENST ID: ENST00000413966
  CDS Start-End: 61-550
gagttctcggtgcgctcagcggccgccgacgctaggaggccgcgctccgcccccgctaccatgaggccccggaaagccttcctgctcctgctgctcttggggctggtgcagctgctggccgtggcgggtgccgagggcccggacgaggattttcgtcaggtccaggctaactccaggcgaacgcgcccaggcagtgggaagggagagggagagccactggagagaaggggcgagggcgtgaagaaacaagtgcgagttctttggaacagcaagcattccttttcaaaatgtgattcttctaacagagaaaatgccattgaggatgaagaggaggaggaggaggaagatgatgatgaggaagaagacgacttggaagttaaggaagaaaatggagtcttggtcctaaatgatgcaaactttgataattttgtggctgacaaagacacagtgctgctggagttttatgctccatggtgtggacattgcaagcagtttgctccggaatatgaaaaaattgccaacatattaaaggataaagatcctcccattc

SEQ ID NO: 170535 - DNA, 1799 bp, Homo sapiens
  Payload ID: 13571
  Gene Symbol: PDIA5
  Gene Name: protein disulfide isomerase family A, member 5
  Uniprot ID: Q14554
  ENST ID: ENST00000316218
  CDS Start-End: 96-1655
gccgtggtggttggccgcggtggagctagcaggcgggcgggcgggagcgggcgccggagtggagaaaggagccagcggtgggcagcgctgctgggatggcgcgggccgggccggcgtggctgctgctggcaatctgggtggtcctgccatcatggctgtcctctgcaaaggtctcctcgctcattgagagaatctctgaccccaaggacttgaaaaaactgctcagaacccggaataatgtactggtgctttactccaaatctgaggtggcagctgaaaatcatctcaggttactgtccacagtggcccaggcggtgaaaggacaagggaccatctgctgggtggactgtggtgatgcagagagtagaaaattgtgcaagaagatgaaagttgacctgagcccgaaggacaaaaaggttgaattattccattaccaggatggtgcatttcatactgaatataaccgagctgtgacatttaagtccatagtggcctttttgaaggatccaaaagggcccccactgtgggaggaagatcctggagccaaagatgttgtccaccttgacagtgaaaaggacttcagacggctcctgaagaaggaagagaagccgctcctgatcatgttttatgccccctggtgcagcatgtgcaagaggatgatgccgcatttccagaaggctgcgactcagctgcgaggccacgccgtgctggccgggatgaatgtctactcctctgaatttgaaaacatcaaggaggagtacagcgtgcgcggcttccccaccatctgctattttgagaaaggacggttcttgttccagtatgacaactatgggtccacagctgaggacattgtggagtggctgaagaatccgcagccgccacagccccaggtccctgagactccctgggcagatgagggcggctccgtttatcacctgaccgatgaagactttgaccagtttgtgaaggaacactcctctgtcctcgtcatgttccacgccccatggtgtggccactgtaagaaaatgaagccggagtttgagaaggcagcagaagccctccatggagaagcggatagctctggtgtccttgcagctgtcgatgccactgtcaacaaggccctggcagaaagattccacatctcagagtttcctacgttgaagtattttaagaatggagagaaatacgcagtgcctgtgctcaggacaaagaagaagtttctcgagtggatgcaaaaccctgaggcccccccgcccccagagcccacgtgggaagagcagcagacaagcgtgttgcacctggtgggggacaacttccgggagaccctgaagaagaagaaacacaccttggtcatgttctacgccccttggtgcccacactgtaagaaggtcattccgcactttactgctactgctgatgccttcaaagatgaccgaaagattgcctgtgccgctgttgactgtgtcaaagacaagaaccaagacctgtgccagcaggaggcggtcaagggctaccccactttccactactaccactatgggaagttcgcagaaaagtatgacagcgaccgcacagaattgggatttaccaattatattcgagccctccgggagggagaccatgaaagactagggaaaaagaaggaagagttataattcctgcctcagaaaaagcttttccattacactgtgaatgatacctgttttgttgtttctgaatttccacatgttctgaagacaaattttttatagccgcttatggccattttgtacaattttgaaataaaattaaaccattta

SEQ ID NO: 170536 - DNA, 722 bp, Homo sapiens
  Payload ID: 13571
  Gene Symbol: PDIA5
  Gene Name: protein disulfide isomerase family A, member 5
  ENST ID: ENST00000469649
  CDS Start-End: 1-250
caccttggtcatgttctacgccccttggtgcccacactgtaagaaggtcattccgcactttactgctactgctgatgccttcaaagatgaccgaaagattgcctgtgccgctgttgactgtgtcaaagacaagaaccaagacctgtgccagcaggaggcggtcaagggctaccccactttccactactaccactatgggaagttcgcagaaaagtatgacagcgaccgcacagtcttctctgttggttgaaatgtctatgattttatctgcctcagtcattcgtgtcagagatggactgccactttctgcttctactgattatgaacaaagcacaggaatgcaggagtgcagaaagtattttaaaatgctttcgaggaaacttgctcaacttcctgatagatgtacactgaaaactggacattataacattaattttattagctctctgggagtgagctacatgatgttgtgcactgaaaattacccaaatgttctcgccttctctttcctggatgagcttcagaaggagttcattactacttataacatgatgaagacaaatactgctgtcagaccatactgtttcattgaatttgataacttcattcagaggaccaagcagcgatataataatcccaggtctctttcaacaaagataaatctttctgacatgcagacggaaatcaagctgaggcctccttatcaaatttccatgtgcgaa

SEQ ID NO: 170537 - DNA, 1651 bp, Homo sapiens
  Payload ID: 13571
  Gene Symbol: PDIA5
  Gene Name: protein disulfide isomerase family A, member 5
  Uniprot ID: Q14554
  ENST ID: ENST00000489923
  CDS Start-End: 104-892
gggaagtggccgtggtggttggccgcggtggagctagcaggcgggcgggcgggagcgggcgccggagtggagaaaggagccagcggtgggcagcgctgctgggatggcgcgggccgggccggcgtggctgctgctggcaatctgggtggtcctgccatcatggctgtcctctgcaaaggtctcctcgctcattgagagaatctctgaccccaaggacttgaaaaaactgctcagaacccggaataatgtactggtgctttactccaaatctgaggtggcagctgaaaatcatctcaggttactgtccacagtggcccaggcggtgaaaggacaagggaccatctgctgggtggactgtggtgatgcagagagtagaaaattgtgcaagaagatgaaagttgacctgagcccgaaggacaaaaaggttgaattattccattaccaggatggtgcatttcatactgaatataaccgagctgtgacatttaagtccatagtggcctttttgaaggatccaaaagggcccccactgtgggaggaagatcctggagccaaagatgttgtccaccttgacagtgaaaaggacttcagacggctcctgaagaaggaagagaagccgctcctgatcatgttttatgccccctggtgcagcatgtgcaagaggatgatgccgcatttccagaaggctgcgactcagctgcgaggccacgccgtgctggccgggatgaatgtctactcctctgaatttgaaaacatcaaggaggagtacagcgtgcgcggcttccccaccatctgctattttgagaaaggacggttcttgttccagtatgacaactatgggtccacagctgaggacattgtggagtggctgaagaaggtgtggccactgtaagaaaatgaagccggagtttgagaaggcagcagaagccctccatggagaagcggatctgtcgatgccactgtcaacaaggccctggcagaaagattccacatctcagagtttcctacgttgaagtattttaagaatggagagaaatacgcagtgcctgtgctcaggacaaagaagaagtttctcgagtggatgcaaaaccctgaggcccccccgcccccagagcccacgtgggaagagcagcagacaagcgtgttgcacctggtgggggacaacttccgggagaccctgaagaagaagaaacacaccttggtcatgttctacgccccttggtgcccacactgtaagaaggtcattccgcactttactgctactgctgatgccttcaaagatgaccgaaagattgcctgtgccgctgttgactgtgtcaaagacaagaaccaagacctgtgccagcaggaggcggtcaagggctaccccactttccactactaccactatgggaagttcgcagaaaagtatgacagcgaccgcacagaattgggatttaccaattatattcgagccctccgggagggagaccatgaaagactagggaaaaagaaggaagagttataattcctgcctcagaaaaagcttttccattacactgtgaatgatacctgttttgttgtttctgaatttccacatgttctgaagacaaattttttatagccgcttatggccattttgtacaattttgaaataaaattaaaccattta

SEQ ID NO: 170538 - DNA, 667 bp, Homo sapiens
  Payload ID: 13571
  Gene Symbol: PDIA5
  Gene Name: protein disulfide isomerase family A, member 5
  ENST ID: ENST00000484644
  CDS Start-End: 475-667
gggcactgggtgctacgcgggagacagcgggcgtcccggtgccctcgccgccaagcgctcccggacgcaggggcaggaggcagctgtggggcgccgggagatccctggcagggtgcttacgccacggccacaactttgcggggatgcaggtcggggcacagccggtcgggcaggacgccggcgggctgcggggtgagctccgctccagactccgagccctgcacctgtgtggtcctgccatcatggctgtcctctgcaaaggtctcctcgctcattgagagaatctctgaccccaaggacttgaaaaaactgctcagaacccggaataatgtactggtgctttactccaaatctgaggtggcagctgaaaatcatctcaggttactgtccacagtggcccaggcggtgaaaggacaagggaccatctgctgggtggactgtggtgatgcagagagtagaaaattgtgcaagaagatgaaagttgacctgagcccgaaggacaaaaaggttgaattattccattaccaggatggtgcatttcatactgaatataaccgagctgtgacatttaagtccatagtggcctttttgaaggatccaaaagggcccccactgtgggaggaagatcctggagccaaagatgttgtccaccttgacagtgaaaagg

SEQ ID NO: 170539 - DNA, 2338 bp, Homo sapiens
  Payload ID: 13572
  Gene Symbol: PDIA6
  Gene Name: protein disulfide isomerase family A, member 6
  Uniprot ID: Q15084
  ENST ID: ENST00000272227
  CDS Start-End: 149-1471
agcgccttccggcccgcccccgcgcggccgcccctcggaccaccggactggcctggggcgggacgtgggcgcgggggcgcggcgtgcggcacgctgcagggctgaagcggcggcggcggtggggactgcacgtagcccggcgctcggcatggctctcctggtgctcggtctggtgagctgtaccttctttctggcagtgaatggtctgtattcctctagtgatgatgtgatcgaattaactccatcgaatttcaaccgagaagttattcagagtgatagtttgtggcttgtagaattctatgctccatggtgtggtcactgtcaaagattaacaccagaatggaagaaagcagcaactgcattaaaagatgttgtcaaagttggtgcagttgatgcagataagcatcattccctaggaggtcagtatggtgttcagggatttcctaccattaagatttttggatccaacaaaaacagaccagaagattaccaaggtggcagaactggtgaagccattgtagatgctgcgctgagtgctctgcgccagctcgtgaaggatcgcctcgggggacggagcggaggatacagttctggaaaacaaggcagaagtgatagttcaagtaagaaggatgtgattgagctgacagacgacagctttgataagaatgttctggacagtgaagatgtttggatggttgagttctatgctccttggtgtggacactgcaaaaacctagagccagagtgggctgccgcagcttcagaagtaaaagagcagacgaaaggaaaagtgaaactggcagctgtggatgctacagtcaatcaggttctggcctcccgatacgggattagaggatttcctacaatcaagatatttcagaaaggcgagtctcctgtggattatgacggtgggcggacaagatccgacatcgtgtcccgggcccttgatttgttttctgataacgccccacctcctgagctgcttgagattatcaacgaggacattgccaagaggacgtgtgaggagcaccagctctgtgttgtggctgtgctgccccatatccttgatactggagctgcaggcagaaattcttatctggaagttcttctgaagttggcagacaaatacaaaaagaaaatgtgggggtggctgtggacagaagctggagcccagtctgaacttgagaccgcgttggggattggagggtttgggtaccccgccatggccgccatcaatgcacgcaagatgaaatttgctctgctaaaaggctccttcagtgagcaaggcatcaacgagtttctcagggagctctcttttgggcgtggctccacggcacctgtaggaggcggggctttccctaccatcgttgagagagagccttgggacggcagggatggcgagcttcccgtggaggatgacattgacctcagtgatgtggagcttgatgacttagggaaagatgagttgtgagagccacaacagaggcttcagaccattttcttttcttgggagccagtggatttttccagcagtgaagggacattctctacactcagatgactctaccagtggccttttaaccaagaagtagtacttgattggtcatttgaaaacactgcaacagtgaacttttgcatctcaagaaaacattgaaaaattctatgaattgttgtagccggtgaattgagtcgtattctgtcacataatattttgaagaaaacttggctgtcgaaacatttttctctctgactgctgcttgaatgttcttggaggctgtttcttatgtatgggttttttttaatgtgatcccttcatttgaatattaatggctttttccattaaagaataaaatattttggacaatgccgataaatgtatgaagttagtatccacatcataaattcagagtgatgtttagcagtaaatcaatattttgaagtgatacacagatgtctttcctccccacaaacttttttaaacaaaaaacaagacctcttttctttagatggtgccacctatgcccaccacaacagagattttacatggaaaccgggctcagtgagaactgatttcctgcccaatatttgtctttgggctgtctctagtgactaattattaaggaatctagctggttatacagttcaaggctttctatgttgttaatgaacctcaaaatagccgttaagacatgaaatacagcagcaggttaccaatgcgaacaggtagttcgcatttatgtaaaacattcagaaaatgaagttttgaatttgttggaacattcaaaggacttgagagcattttattgtaacttaaaaaaataaatacaactgtcactaa

SEQ ID NO: 170540 - DNA, 2534 bp, Homo sapiens
  Payload ID: 13572
  Gene Symbol: PDIA6
  Gene Name: protein disulfide isomerase family A, member 6
  Uniprot ID: Q15084
  ENST ID: ENST00000381611
  CDS Start-End: 332-1669
aaccgagggtgcccgctgcaaggttaggtctcctggcctcgtgcttcaaacaggaattaatagaatcccaccaggtggtgtttgtgaggcgtagatggcgaggatatctgcagctgcagtttgctcattctcacggctgcactgcattgcactgtgtgagcagaacacaatttatccttccactgctgatgggcatttgggcggtttgcagtttgggatctggccagttctgctgttgtgagcattcttaagcctgcctttcggtgaattcacacgcccgtggggctcaccaacttctcctgcccactccctatcaaggaaaagtcccataatgtatccatcaaccaccatggctaatgcacccggtctggtgagctgtaccttctttctggcagtgaatggtctgtattcctctagtgatgatgtgatcgaattaactccatcgaatttcaaccgagaagttattcagagtgatagtttgtggcttgtagaattctatgctccatggtgtggtcactgtcaaagattaacaccagaatggaagaaagcagcaactgcattaaaagatgttgtcaaagttggtgcagttgatgcagataagcatcattccctaggaggtcagtatggtgttcagggatttcctaccattaagatttttggatccaacaaaaacagaccagaagattaccaaggtggcagaactggtgaagccattgtagatgctgcgctgagtgctctgcgccagctcgtgaaggatcgcctcgggggacggagcggaggatacagttctggaaaacaaggcagaagtgatagttcaagtaagaaggatgtgattgagctgacagacgacagctttgataagaatgttctggacagtgaagatgtttggatggttgagttctatgctccttggtgtggacactgcaaaaacctagagccagagtgggctgccgcagcttcagaagtaaaagagcagacgaaaggaaaagtgaaactggcagctgtggatgctacagtcaatcaggttctggcctcccgatacgggattagaggatttcctacaatcaagatatttcagaaaggcgagtctcctgtggattatgacggtgggcggacaagatccgacatcgtgtcccgggcccttgatttgttttctgataacgccccacctcctgagctgcttgagattatcaacgaggacattgccaagaggacgtgtgaggagcaccagctctgtgttgtggctgtgctgccccatatccttgatactggagctgcaggcagaaattcttatctggaagttcttctgaagttggcagacaaatacaaaaagaaaatgtgggggtggctgtggacagaagctggagcccagtctgaacttgagaccgcgttggggattggagggtttgggtaccccgccatggccgccatcaatgcacgcaagatgaaatttgctctgctaaaaggctccttcagtgagcaaggcatcaacgagtttctcagggagctctcttttgggcgtggctccacggcacctgtaggaggcggggctttccctaccatcgttgagagagagccttgggacggcagggatggcgagcttcccgtggaggatgacattgacctcagtgatgtggagcttgatgacttagggaaagatgagttgtgagagccacaacagaggcttcagaccattttcttttcttgggagccagtggatttttccagcagtgaagggacattctctacactcagatgactctaccagtggccttttaaccaagaagtagtacttgattggtcatttgaaaacactgcaacagtgaacttttgcatctcaagaaaacattgaaaaattctatgaattgttgtagccggtgaattgagtcgtattctgtcacataatattttgaagaaaacttggctgtcgaaacatttttctctctgactgctgcttgaatgttcttggaggctgtttcttatgtatgggttttttttaatgtgatcccttcatttgaatattaatggctttttccattaaagaataaaatattttggacaatgccgataaatgtatgaagttagtatccacatcataaattcagagtgatgtttagcagtaaatcaatattttgaagtgatacacagatgtctttcctccccacaaacttttttaaacaaaaaacaagacctcttttctttagatggtgccacctatgcccaccacaacagagattttacatggaaaccgggctcagtgagaactgatttcctgcccaatatttgtctttgggctgtctctagtgactaattattaaggaatctagctggttatacagttcaaggctttctatgttgttaatgaacctcaaaatagccgttaagacatgaaatacagcagcaggttaccaatgcgaacaggtagttcgcatttatgtaaaacattcagaaaatgaagttttgaatttgttggaacattcaaaggacttgagagcattttattgtaacttaaaaaaataaatacaactgtcact

SEQ ID NO: 170541 - DNA, 2236 bp, Homo sapiens
  Payload ID: 13572
  Gene Symbol: PDIA6
  Gene Name: protein disulfide isomerase family A, member 6
  Uniprot ID: Q15084
  ENST ID: ENST00000404824
  CDS Start-End: 373-1839
agaacccctcagggcctcagctgaagctcagacagagtgcctgcgtgcgcgcgcacacacacacacacacacacacacaacctaattttcaacacacttgcacaaatatagaaacatcatggggaaaaatgcaaaatacctatgatttctggaacaagatccaagatgacaaagatattccctgcttattctgctcatgcccgggctcccctgcccacccccagtgcgttcatgtgatatcatgaaaaagcagcaggggtggcatgaacttgcacaccaggctgcccaggcttgagacccagctctgccacctagaagcttggagcccctgaacaagctgcaattctgtgcctgggcttttctgactgcaaaatgaggataatcacagcccctgcctccaaagtgtcccgaggatcaaatgagttgatgatacttgcacggcgctcggatcgtggctcaccaacttctcctgcccactccctatcaaggaaaagtcccataatgtatccatcaaccaccatggctaatgcacccggtctggtgagctgtaccttctttctggcagtgaatggtctgtattcctctagtgatgatgtgatcgaattaactccatcgaatttcaaccgagaagttattcagagtgatagtttgtggcttgtagaattctatgctccatggtgtggtcactgtcaaagattaacaccagaatggaagaaagcagcaactgcattaaaagatgttgtcaaagttggtgcagttgatgcagataagcatcattccctaggaggtcagtatggtgttcagggatttcctaccattaagatttttggatccaacaaaaacagaccagaagattaccaaggtggcagaactggtgaagccattgtagatgctgcgctgagtgctctgcgccagctcgtgaaggatcgcctcgggggacggagcggaggatacagttctggaaaacaaggcagaagtgatagttcaagtaagaaggatgtgattgagctgacagacgacagctttgataagaatgttctggacagtgaagatgtttggatggttgagttctatgctccttggtgtggacactgcaaaaacctagagccagagtgggctgccgcagcttcagaagtaaaagagcagacgaaaggaaaagtgaaactggcagctgtggatgctacagtcaatcaggttctggcctcccgatacgggattagaggatttcctacaatcaagatatttcagaaaggcgagtctcctgtggattatgacggtgggcggacaagatccgacatcgtgtcccgggcccttgatttgttttctgataacgccccacctcctgagctgcttgagattatcaacgaggacattgccaagaggacgtgtgaggagcaccagctctgtgttgtggctgtgctgccccatatccttgatactggagctgcaggcagaaattcttatctggaagttcttctgaagttggcagacaaatacaaaaagaaaatgtgggggtggctgtggacagaagctggagcccagtctgaacttgagaccgcgttggggattggagggtttgggtaccccgccatggccgccatcaatgcacgcaagatgaaatttgctctgctaaaaggctccttcagtgagcaaggcatcaacgagtttctcagggagctctcttttgggcgtggctccacggcacctgtaggaggcggggctttccctaccatcgttgagagagagccttgggacggcagggatggcgagcttcccgtggaggatgacattgacctcagtgatgtggagcttgatgacttagggaaagatgagttgtgagagccacaacagaggcttcagaccattttcttttcttgggagccagtggatttttccagcagtgaagggacattctctacactcagatgactctaccagtggccttttaaccaagaagtagtacttgattggtcatttgaaaacactgcaacagtgaacttttgcatctcaagaaaacattgaaaaattctatgaattgttgtagccggtgaattgagtcgtattctgtcacataatattttgaagaaaacttggctgtcgaaacatttttctctctgactgctgcttgaatgttcttggaggctgtttcttatgtatgggttttttttaatgtgatcccttcatttgaatattaatggctttttccattaaagaataaaatattttggacaatgcc

SEQ ID NO: 170542 - DNA, 2682 bp, Homo sapiens
  Payload ID: 13572
  Gene Symbol: PDIA6
  Gene Name: protein disulfide isomerase family A, member 6
  Uniprot ID: Q15084
  ENST ID: ENST00000404371
  CDS Start-End: 339-1817
aaccgagggtgcccgctgcaaggttaggtctcctggcctcgtgcttcaaacaggaattaatagaatcccaccaggtggtgtttgtgaggcgtagatggcgaggatatctgcagctgcagtttgctcattctcacggctgcactgcattgcactgtgtgagcagaacacaatttatccttccactgctgatgggcatttgggcggtttgcagtttgggatctggccagttctgctgttgtgagcattcttaagcctgcctttcggtgaattcacacgcccgtggggacgctcactctcagagcacagcttccagaggagagaagatacccccagcatccatgagaagagacctccgggagaagcttgtgtgggtgtgccgaccactggccccagttgaggtcccagccaacatcagctccgacttccagccatgctcaccaacttctcctgcccactccctatcaaggaaaagtcccataatgtatccatcaaccaccatggctaatgcacccggtctggtgagctgtaccttctttctggcagtgaatggtctgtattcctctagtgatgatgtgatcgaattaactccatcgaatttcaaccgagaagttattcagagtgatagtttgtggcttgtagaattctatgctccatggtgtggtcactgtcaaagattaacaccagaatggaagaaagcagcaactgcattaaaagatgttgtcaaagttggtgcagttgatgcagataagcatcattccctaggaggtcagtatggtgttcagggatttcctaccattaagatttttggatccaacaaaaacagaccagaagattaccaaggtggcagaactggtgaagccattgtagatgctgcgctgagtgctctgcgccagctcgtgaaggatcgcctcgggggacggagcggaggatacagttctggaaaacaaggcagaagtgatagttcaagtaagaaggatgtgattgagctgacagacgacagctttgataagaatgttctggacagtgaagatgtttggatggttgagttctatgctccttggtgtggacactgcaaaaacctagagccagagtgggctgccgcagcttcagaagtaaaagagcagacgaaaggaaaagtgaaactggcagctgtggatgctacagtcaatcaggttctggcctcccgatacgggattagaggatttcctacaatcaagatatttcagaaaggcgagtctcctgtggattatgacggtgggcggacaagatccgacatcgtgtcccgggcccttgatttgttttctgataacgccccacctcctgagctgcttgagattatcaacgaggacattgccaagaggacgtgtgaggagcaccagctctgtgttgtggctgtgctgccccatatccttgatactggagctgcaggcagaaattcttatctggaagttcttctgaagttggcagacaaatacaaaaagaaaatgtgggggtggctgtggacagaagctggagcccagtctgaacttgagaccgcgttggggattggagggtttgggtaccccgccatggccgccatcaatgcacgcaagatgaaatttgctctgctaaaaggctccttcagtgagcaaggcatcaacgagtttctcagggagctctcttttgggcgtggctccacggcacctgtaggaggcggggctttccctaccatcgttgagagagagccttgggacggcagggatggcgagcttcccgtggaggatgacattgacctcagtgatgtggagcttgatgacttagggaaagatgagttgtgagagccacaacagaggcttcagaccattttcttttcttgggagccagtggatttttccagcagtgaagggacattctctacactcagatgactctaccagtggccttttaaccaagaagtagtacttgattggtcatttgaaaacactgcaacagtgaacttttgcatctcaagaaaacattgaaaaattctatgaattgttgtagccggtgaattgagtcgtattctgtcacataatattttgaagaaaacttggctgtcgaaacatttttctctctgactgctgcttgaatgttcttggaggctgtttcttatgtatgggttttttttaatgtgatcccttcatttgaatattaatggctttttccattaaagaataaaatattttggacaatgccgataaatgtatgaagttagtatccacatcataaattcagagtgatgtttagcagtaaatcaatattttgaagtgatacacagatgtctttcctccccacaaacttttttaaacaaaaaacaagacctcttttctttagatggtgccacctatgcccaccacaacagagattttacatggaaaccgggctcagtgagaactgatttcctgcccaatatttgtctttgggctgtctctagtgactaattattaaggaatctagctggttatacagttcaaggctttctatgttgttaatgaacctcaaaatagccgttaagacatgaaatacagcagcaggttaccaatgcgaacaggtagttcgcatttatgtaaaacattcagaaaatgaagttttgaatttgttggaacattcaaaggacttgagagcattttattgtaacttaaaaaaataaatacaactgtcact

SEQ ID NO: 170543 - DNA, 986 bp, Homo sapiens
  Payload ID: 13572
  Gene Symbol: PDIA6
  Gene Name: protein disulfide isomerase family A, member 6
  ENST ID: ENST00000458536
  CDS Start-End: 953-986
attgcactgtgtgagcagaacacaatttatccttccactgctgatgggcatttgggcggtttgcagtttgggatctggccagttctgctgttgtgagcattcttaagcctgcctttcggtgaattcacacgcccgtgggaagttcatatgagccataacaaggattggaagaagttttagaagtaacctcctgggagtccatgaattagcagcagtgagaggctagaggcctgacaaagaattgagaagcagctgctatatcccaagtggcaaatgccagtgtggatggagaagagagagcttcattctgtggcaggaaagcttggctgctgacaatgagactgcacccttgggatttgtcccttggattctttagcatctgagctctaacctctgaaacacaagaaaaaatgagcaagatgtttgctcagcatcaattcagataccgctgaatagaaggcaacacccaaccacacagccagaggcctcctgggtaaatcggggactgctctcctctgacccctctttctcctgcctctaccccttggcttcacagcaattattcattttttaacactcaaatgctgggtacctgttgcctatgtcggggcacgctgttactccctacacacaggtaaaattgattaaccgaatcttgccctccactggcttactgtgcaacggtagagactggaagcaacagacgagggtgagctttggaagagctgatgaggccatgattaatttcaactgagaggacgctcactctcagagcacagcttccagaggagagaagatacccccagcatccatgagaagagacctccgggagaagcttgtgtgggtgtgccgaccactggccccagttgaggtcccagccaacatcagctccgacttccagccatgctcaccaacttctcctgcccactccctatcaaggaaaagtcccataatgtatccatcaaccaccatggctaatgcacccg

SEQ ID NO: 170544 - DNA, 2509 bp, Homo sapiens
  Payload ID: 13572
  Gene Symbol: PDIA6
  Gene Name: protein disulfide isomerase family A, member 6
  Uniprot ID: Q15084
  ENST ID: ENST00000540494
  CDS Start-End: 331-1644
cttccggcccgcccccgcgcggccgcccctcggaccaccggactggcctggggcgggacgtgggcgcgggggcgcggcgtgcggcacgctgcagggctgaagcggcggcggcggtggggactgcacgtagcccggcgctcggcatggctctcctggtgctcgcctgcttgtaacagcatgaagaggagaggactgacgttattgctgtccttgattggcaaagagaagtgaaagtacctaattctgccacagtctacctaatgatgctctgtggattatacccctgcattctccagcccttcggttagaaatttgggtctatctaattatatgatcttaggtctggtgagctgtaccttctttctggcagtgaatggtctgtattcctctagtgatgatgtgatcgaattaactccatcgaatttcaaccgagaagttattcagagtgatagtttgtggcttgtagaattctatgctccatggtgtggtcactgtcaaagattaacaccagaatggaagaaagcagcaactgcattaaaagatgttgtcaaagttggtgcagttgatgcagataagcatcattccctaggaggtcagtatggtgttcagggatttcctaccattaagatttttggatccaacaaaaacagaccagaagattaccaaggtggcagaactggtgaagccattgtagatgctgcgctgagtgctctgcgccagctcgtgaaggatcgcctcgggggacggagcggaggatacagttctggaaaacaaggcagaagtgatagttcaagtaagaaggatgtgattgagctgacagacgacagctttgataagaatgttctggacagtgaagatgtttggatggttgagttctatgctccttggtgtggacactgcaaaaacctagagccagagtgggctgccgcagcttcagaagtaaaagagcagacgaaaggaaaagtgaaactggcagctgtggatgctacagtcaatcaggttctggcctcccgatacgggattagaggatttcctacaatcaagatatttcagaaaggcgagtctcctgtggattatgacggtgggcggacaagatccgacatcgtgtcccgggcccttgatttgttttctgataacgccccacctcctgagctgcttgagattatcaacgaggacattgccaagaggacgtgtgaggagcaccagctctgtgttgtggctgtgctgccccatatccttgatactggagctgcaggcagaaattcttatctggaagttcttctgaagttggcagacaaatacaaaaagaaaatgtgggggtggctgtggacagaagctggagcccagtctgaacttgagaccgcgttggggattggagggtttgggtaccccgccatggccgccatcaatgcacgcaagatgaaatttgctctgctaaaaggctccttcagtgagcaaggcatcaacgagtttctcagggagctctcttttgggcgtggctccacggcacctgtaggaggcggggctttccctaccatcgttgagagagagccttgggacggcagggatggcgagcttcccgtggaggatgacattgacctcagtgatgtggagcttgatgacttagggaaagatgagttgtgagagccacaacagaggcttcagaccattttcttttcttgggagccagtggatttttccagcagtgaagggacattctctacactcagatgactctaccagtggccttttaaccaagaagtagtacttgattggtcatttgaaaacactgcaacagtgaacttttgcatctcaagaaaacattgaaaaattctatgaattgttgtagccggtgaattgagtcgtattctgtcacataatattttgaagaaaacttggctgtcgaaacatttttctctctgactgctgcttgaatgttcttggaggctgtttcttatgtatgggttttttttaatgtgatcccttcatttgaatattaatggctttttccattaaagaataaaatattttggacaatgccgataaatgtatgaagttagtatccacatcataaattcagagtgatgtttagcagtaaatcaatattttgaagtgatacacagatgtctttcctccccacaaacttttttaaacaaaaaacaagacctcttttctttagatggtgccacctatgcccaccacaacagagattttacatggaaaccgggctcagtgagaactgatttcctgcccaatatttgtctttgggctgtctctagtgactaattattaaggaatctagctggttatacagttcaaggctttctatgttgttaatgaacctcaaaatagccgttaagacatgaaatacagcagcaggttaccaatgcgaacaggtagttcgcatttatgtaaaacattcagaaaatgaagttttgaatttgttggaacattcaaaggacttgagagcattttattgtaacttaaaaaaataaatacaactgtcact

SEQ ID NO: 170545 - DNA, 2344 bp, Homo sapiens
  Payload ID: 13572
  Gene Symbol: PDIA6
  Gene Name: protein disulfide isomerase family A, member 6
  Uniprot ID: Q15084
  ENST ID: ENST00000617249
  CDS Start-End: 1-1479
atgagaagagacctccgggagaagcttgtgtgggtgtgccgaccactggccccagttgaggtcccagccaacatcagctccgacttccagccatgctcaccaacttctcctgcccactccctatcaaggaaaagtcccataatgtatccatcaaccaccatggctaatgcacccggtctggtgagctgtaccttctttctggcagtgaatggtctgtattcctctagtgatgatgtgatcgaattaactccatcgaatttcaaccgagaagttattcagagtgatagtttgtggcttgtagaattctatgctccatggtgtggtcactgtcaaagattaacaccagaatggaagaaagcagcaactgcattaaaagatgttgtcaaagttggtgcagttgatgcagataagcatcattccctaggaggtcagtatggtgttcagggatttcctaccattaagatttttggatccaacaaaaacagaccagaagattaccaaggtggcagaactggtgaagccattgtagatgctgcgctgagtgctctgcgccagctcgtgaaggatcgcctcgggggacggagcggaggatacagttctggaaaacaaggcagaagtgatagttcaagtaagaaggatgtgattgagctgacagacgacagctttgataagaatgttctggacagtgaagatgtttggatggttgagttctatgctccttggtgtggacactgcaaaaacctagagccagagtgggctgccgcagcttcagaagtaaaagagcagacgaaaggaaaagtgaaactggcagctgtggatgctacagtcaatcaggttctggcctcccgatacgggattagaggatttcctacaatcaagatatttcagaaaggcgagtctcctgtggattatgacggtgggcggacaagatccgacatcgtgtcccgggcccttgatttgttttctgataacgccccacctcctgagctgcttgagattatcaacgaggacattgccaagaggacgtgtgaggagcaccagctctgtgttgtggctgtgctgccccatatccttgatactggagctgcaggcagaaattcttatctggaagttcttctgaagttggcagacaaatacaaaaagaaaatgtgggggtggctgtggacagaagctggagcccagtctgaacttgagaccgcgttggggattggagggtttgggtaccccgccatggccgccatcaatgcacgcaagatgaaatttgctctgctaaaaggctccttcagtgagcaaggcatcaacgagtttctcagggagctctcttttgggcgtggctccacggcacctgtaggaggcggggctttccctaccatcgttgagagagagccttgggacggcagggatggcgagcttcccgtggaggatgacattgacctcagtgatgtggagcttgatgacttagggaaagatgagttgtgagagccacaacagaggcttcagaccattttcttttcttgggagccagtggatttttccagcagtgaagggacattctctacactcagatgactctaccagtggccttttaaccaagaagtagtacttgattggtcatttgaaaacactgcaacagtgaacttttgcatctcaagaaaacattgaaaaattctatgaattgttgtagccggtgaattgagtcgtattctgtcacataatattttgaagaaaacttggctgtcgaaacatttttctctctgactgctgcttgaatgttcttggaggctgtttcttatgtatgggttttttttaatgtgatcccttcatttgaatattaatggctttttccattaaagaataaaatattttggacaatgccgataaatgtatgaagttagtatccacatcataaattcagagtgatgtttagcagtaaatcaatattttgaagtgatacacagatgtctttcctccccacaaacttttttaaacaaaaaacaagacctcttttctttagatggtgccacctatgcccaccacaacagagattttacatggaaaccgggctcagtgagaactgatttcctgcccaatatttgtctttgggctgtctctagtgactaattattaaggaatctagctggttatacagttcaaggctttctatgttgttaatgaacctcaaaatagccgttaagacatgaaatacagcagcaggttaccaatgcgaacaggtagttcgcatttatgtaaaacattcagaaaatgaagttttgaatttgttggaacattcaaaggacttgagagcattttattgtaacttaaaaaaataaatacaactgtcact

SEQ ID NO: 170546 - DNA, 2153 bp, Homo sapiens
  Payload ID: 13573
  Gene Symbol: PDILT
  Gene Name: protein disulfide isomerase-like, testis expressed
  Uniprot ID: Q8N807
  ENST ID: ENST00000302451
  CDS Start-End: 250-2004
agaactttgctgctgaggctgctgtggcctctgtgtgcccaggaagggacttcatttctgcctgtggattctttagaatgcccagtcgtctgcgggtcctgccctgatcacaaggagaagccaggagcctcctcttcaggctacaaccttccttcttaagggccacagagtttgtggccccacccccagcacagccccaccttggccccaggaaccctgggagtggccttggcttcctgcaggacagccatggacctactctggatgcccctgctgctggtggccgcttgtgtctctgctgtccacagctcaccagaggttaacgccggtgtttccagcatccacataaccaagcctgtgcacatcctggaggaacgcagtctcctagtgctaacgcccgctggcctgacccagatgctgaaccagacccgcttcctcatggtgcttttccacaacccatcctcaaagcaatccaggaacttggcggaagagctgggcaaagctgtggagatcatgggcaaaggcaagaatgggatcggctttggcaaagtggacattaccatagagaaggagcttcagcaggagtttgggattaccaaggccccggagttgaagctgttttttgagggcaacaggtcagagcccatcagctgcaaaggagtggttgaatctgctgccttagtcgtttggttgagacgacaaattagccagaaagcatttttgttcaacagcagcgagcaggtggcagagtttgtgatatccaggcccttggtcatcgttggcttcttccaggatttagaggaagaagtagcagagttgttctatgatgtgatcaaagactttccagagctaacgtttggagtcataacgattggcaatgtcattgggcgtttccacgtcacccttgacagcgtcctggtgttcaaaaagggaaaaattgtgaaccgccaaaagcttattaatgacagtaccaacaaacaggaactcaatcgtgtcataaaacagcaccttacagattttgtgatcgaatacaacactgagaataaggatctgatttccgagttgcacatcatgagtcacatgctgctgtttgtctccaaaagctccgagtcatatggtatcataattcagcattataagctggcatcaaaggaattccaaaacaagatccttttcatccttgtggatgcagacgaacccagaaatggacgtgtcttcaagtacttccgggtcacagaggtcgatatcccatccgtccaaatcctaaacttgagctctgacgccaggtacaaaatgccttcagatgacataacctacgaaagcctcaagaaatttggccgcagcttcctgagtaaaaatgccacaaaacatcaatccagtgaagagattccaaaatactgggaccagggactggttaagcagctcgtggggaagaacttcaacgtagtcgtctttgacaaagaaaaggacgtatttgtgatgttctatgcaccctggtctaaaaagtgcaagatgctgttcccactgttggaggaattgggcagaaaatatcaaaaccactccacaattatcattgccaagatcgatgtcacagcaaatgacattcagctgatgtacctggaccggtacccattcttcaggctgttccccagcggctctcaacaagctgtcctgtataagggagaacacaccctgaagggcttctctgacttcctggaaagccacatcaaaactaagattgaggatgaggatgagctgttgtctgttgagcaaaatgaagtgatagaagaggaagtgctagctgaggaaaaggaggtgcctatgatgaggaaagggttacctgaacagcagtcgcctgagctggagaacatgaccaagtacgtatccaagctggaagagcccgctgggaagaagaaaacatctgaggaggtggtggtggtggtggctaagccaaagggacctccagtgcaaaagaagaaaccaaaagtcaaggaagaactttagcttctccaataccaggaaaaaagatgcttattttccagatcctggcatcattttctgaatggattgattccaataaaagcatatatcattgtggtagggtaggtggggcgggggtaggggtggataataaagcctctgagtgtccttgg

SEQ ID NO: 170547 - DNA, 600 bp, Homo sapiens
  Payload ID: 13573
  Gene Symbol: PDILT
  Gene Name: protein disulfide isomerase-like, testis expressed
  ENST ID: ENST00000575561
  CDS Start-End: 69-600
acccccagcacagccccaccttggccccaggaaccctgggagtggccttggcttcctgcaggacagccatggacctactctggatgcccctgctgctggtggccgcttgtgtctctgctgtccacagctcaccagaggttaacgccggtgtttccagcatccacataaccaagcctgtgcacatcctggaggaacgcagtctcctagtgctaacgcccgctggcctgacccagatgctgaaccagacccgcttcctcatggtgcttttccatgaagttttgctcttgttgcccaggctgaaatacaatggtgcaatcttggctcaccgcaacctccacctcccaggttccagcgattctcctgcctcagcctcccaagtagctgggattacagacaacccatcctcaaagcaatccaggaacttggcggaagagctgggcaaagctgtggagatcatgggcaaaggcaagaatgggatcggctttggcaaagtggacattaccatagagaaggagcttcagcaggagtttgggattaccaaggccccggagttgaagctgttttttgagggcaacaggtcagagcccatcagctgcaaag

SEQ ID NO: 170548 - DNA, 903 bp, Homo sapiens
  Payload ID: 13574
  Gene Symbol: PGGT1B
  Gene Name: protein geranylgeranyltransferase type I, beta subunit
  Uniprot ID: P53609
  ENST ID: ENST00000379615
  CDS Start-End: 1-903
atggcggccactgaggatgagaggctagcagggagcggtgagggagagcggctggatttcttacgggatcggcacgtgcgatttttccagcgctgcctccaggttttgccggagcgctattcttcactcgagacaagcaggttgacaattgcattttttgcactctccgggctggatatgttggattccttagatgtggtgaacaaagatgatataatagagtggatttattccctgcaggtccttcccacagaagacagatcaaatctaaatcgctgtggtttccgaggctcttcatacctgggtattccgttcaatccatcaaaggctcctggaacagctcatccttatgatagtggccacattgcaatgacctacactggcctctcatgcttagttattcttggagacgacttaagccgagtaaataaagaagcttgcttagcgggcttgagagcccttcagctggaagatgggagtttttgtgcagtacctgaaggcagtgaaaatgacatgcgatttgtgtactgtgcttcctgtatttgctatatgctcaacaactggtcaggcatggatatgaaaaaagccatcacctatattagaaggagtatgcttctaaaaattttccaatacactaactttgagaaaaatagaaattacatcttatcaactcaagatcgccttgtagggggatttgccaagtggccagacagtcatccagatgctttgcatgcatactttgggatctgtggcctgtcactaatggaggaaagtggaatttgtaaagttcatcctgctctgaatgtaagcacacggacttctgaacgccttctagatctccatcaaagctggaaaaccaaggactctaaacaatgctcagagaatgtacatatctccacatga

SEQ ID NO: 170549 - DNA, 9545 bp, Homo sapiens
  Payload ID: 13574
  Gene Symbol: PGGT1B
  Gene Name: protein geranylgeranyltransferase type I, beta subunit
  Uniprot ID: P53609
  ENST ID: ENST00000419445
  CDS Start-End: 22-1155
ggacgtcgcttccggagcagcatggcggccactgaggatgagaggctagcagggagcggtgagggagagcggctggatttcttacgggatcggcacgtgcgatttttccagcgctgcctccaggttttgccggagcgctattcttcactcgagacaagcaggttgacaattgcattttttgcactctccgggctggatatgttggattccttagatgtggtgaacaaagatgatataatagagtggatttattccctgcaggtccttcccacagaagacagatcaaatctaaatcgctgtggtttccgaggctcttcatacctgggtattccgttcaatccatcaaaggctcctggaacagctcatccttatgatagtggccacattgcaatgacctacactggcctctcatgcttagttattcttggagacgacttaagccgagtaaataaagaagcttgcttagcgggcttgagagcccttcagctggaagatgggagtttttgtgcagtacctgaaggcagtgaaaatgacatgcgatttgtgtactgtgcttcctgtatttgctatatgctcaacaactggtcaggcatggatatgaaaaaagccatcacctatattagaaggagtatgtcctatgacaatggactggcacagggagctggacttgaatctcatggaggatcaactttttgtggcattgcctcactatgtctgatgggtaaactagaagaagttttttcagaaaaagaattgaacaggataaagaggtggtgtataatgaggcaacaaaatggttatcatggaagacctaataagcctgtagacacctgttattctttttgggtgggagcaactctgaagcttctaaaaattttccaatacactaactttgagaaaaatagaaattacatcttatcaactcaagatcgccttgtagggggatttgccaagtggccagacagtcatccagatgctttgcatgcatactttgggatctgtggcctgtcactaatggaggaaagtggaatttgtaaagttcatcctgctctgaatgtaagcacacggacttctgaacgccttctagatctccatcaaagctggaaaaccaaggactctaaacaatgctcagagaatgtacatatctccacatgactgattttagattgggagggtggggggatttgtagcataactgtagctcaagtttaaaagccatgtataaccaagtgtgctctttttttaaaaggtagagtcttacaatcaaatctcctgctgatttcactttgggatatggtcttgagccagtaatctttatactgggtttcaagaaaatctttgttgaagtttgaaccacaactttgtcgtggttcttaaatgtttatactgtatttctaagaagttgtttgaggcaaattaactgtatgtgtgtaggttatctttttaaaaactcttcagtgcaaattgtatcttattataaaatggacacaaattttcaagtttacacttcatatagcattgataatcttcaggtgaacacttagtgatcatttaaaaagctcactgctgatcgtagaaaatttgctttaattaattaagtatctgggattattctttgaaaacagatgaccataattttttttaaagaagagtgacttattttgtcttattcttaagtaaagtgtgccaattaaacctgtgtggcctatataaatgaagttaataacttcatagtaagaataaataggtttaactaatgtgatagttttctaaaaggagattgtttgaagacaactattatgtaactgagggaaaagcaacttaactgtatgtgattgtgaatgagaaagttttgtgctatgtgggtcatttatctagacattgctgtggtgaataccagttatgtttgattttattctcaaatcattagttgcctttttttttttttttttttttttgctttctaggaagaaaacaatcttttttatctagaaggaaagatactttgtgttttcatttttagccatttgaagtttttaatttattgcccccagtgtgttagctgctctaatttcaaactaatacttttctaatttttttcaaattaaataagtaaaaaatacaaaaacagaaccattcaaacagattcagtggtgtaactcaatacatggtcatttttattctcatattttcaggtaagtgaaagggaaatgcgaccatttagagggtaagaaatagggttttgtttttgttcattgttttgttttaagtctatgaactagctaattataaaggaggtagtataaaaactcttcattagtaattaatttatcaataactcatatccgttacttgctcagtgacattcagaactattgcgtctagtactgaaatggggaaagaaatctcttcactaaaggagttggctttaagttagtcttggtgataataaatgttgaaatacaagtatcagtataaaaactggattactggtatcactgtttaggcattgtaatactttaaatgttatctttttttctaaatcagagggaaaaaaatgttgtgaaataacagtccttcccaagggaaacactgtgtacttggagaaatgattgatttattattggcatgcttagttttaaacctgagtttgccaactgtatgttttttaattagaaataaaataaatcttctgatggtgggggaaaaagtaagcttaataacagatgttatccgtctatgggttattccagttgctactatttaaatcctggcagattaagacatccatatctcaaactaagtcatctcttagacattggaagttaaagtagcatatatataatggctttaggactatataaaaagcccaaattgttttttctgtatcaccaagaaaggttagaaggcaataaaggtagtaacagtgattttattcataaatgttagagaaaaattccaatctaaaagtatttcataaggctaaatattttctaactcctgataatttaataccataagattataaattttagtatgcttctaattgatacacttgtgggagactttcttgtgaaactttatggactagtaaatgttcacattccacagcaactgaattgaccagaaaatagcagcccagtgtgaattgtggagaaactatttctaacttttctaaatagttatttacaagaaaagcatttatcgattaaataaattataagcaatatttcacatatacactttattccttaacaggagcgatgtaatgagggaaaatacgaagtccgaaatctcaaaaagctctgttacctactctatacttgtctccttcccgccccctaattttgtggcattttttttttagaaggtaggaggaggagctttattttgagcatctgtgtacaaatgagattaatcagatcatatggcctaatttaacctgtttatcatttcagtgtttttagatttgatctataatatatatgtgttattagatctttagttatttatatttaatctaaattcatatagaaatcttgctgacagtggtatataatttgaaaactgttggacctgatcatttttgagagacagttaatgaggaggtgctctggaatcagatgacctgggtttaaatcccagatttgccagttcagcagcatgatcttggaccctaactctgccgtggataaaataagggtaaaacctaacacacagggtttaggattaaatgagataatacagataaagcacttaggatagtacctggaatacagcaaatttcaaattataggttctttataatgatcataaaattatttttgtaattaaaacctctcttctacaacagaaagaggtcttaacagtttaacctcagggaaaatgatgacaacagtgttgttttctaatctccccataagaatacagagcaactaggatagccacagacactattacaacgctagatgacaaggtatctctatgaacttcaaaatacaactaagtgaggacaaaccactgaaccacatagtttcagtatctgtgggaggaagtagaaggaaggcagctggtttctgacagctctgcaaattggagaactacaacactgcccacagtttctcaactacaaagtgcagcgggccaatctaagaacagacactgaaactgggaagtgactacagaatctcatttgcagatgaatgttaaagcaatatgataaggtctgctgattgcattagagctgtctgggttttacgctgtgtacctcttgaagcttatgagacaaagcccagcactgaggacaaacttctagaattagaatccaaatgggcaggatgggtaaaataggacaaaggaaagaagatctagataagtattgggaagaaaggccaagacacagagacattatatatgtgtattttcatatatatatatattcttttaaatcactgtgaaaatgggagctctaaggctgtgaagtcatcctagagccactccttcctcctaaaagtacagaaaaactcatttcagttaaggggaaaaaaagagtaagtgagccaggattacagtccaactccagtcaaagttagtataagaaataagagaataaatagatcaacatcctcacagacaatgaaagcacaccggaaggacatgaccacaagacagataaaaacctaatatttgccaaaaaataaaatgcaaatatgacaggaaatttatattaattagtacagttatcaataaaagtaggaaaaggggaaaattaaccaagtaccaaacacttggagtaaaaagcaaaataaagcagaaggaaggaattaataaaagcaaaaaagaattactagtagaaaaccaaaacaatagaggcaataataaatccaagttggtgatgggtagtgcggggagttgagtcagataaactaccagctaacctatttaagaaaaaaaggaggaagcacaaatacaaaaatttaaatgacaagggggaaatagtaaaacaggaaatttgtttaaattgactattttgagcaattttacacaataaattcaaaaactattttgagaaaaatgcaaattgccaaaatttactctaggtagataaagtcacaacaaaccaattaccgtagaagaaacaaatagttaaaagtaccccttaccaaaagaagcatcaagcccagattgtttcaaggggatttctaccaaaccttttaagattaaataatcccattcttgcttaaacaattgcagagactaggaaaagaatcttgaacctcaaagtgccaaaaaaagaaaaaaaacaaataaagaaaaactcctgaattcattttataaaatgaatgtaatagcattgattcaaaaacctgacaaagatggtaccaaaaagaaaatatagagcaatctcatgaatattaataaaaagttttaatgataacattagcaaacaatccaacagcactttcaaaaggtaatcatgactaagttgggtttattgtaagaatgcaagggtagttcaatactagataatctgttactattcatattaagagttaaaaaatatcttcatctttgcagaaaagacatgatagaattgagcactcacttatgttaactatactaagtagaaattgatgaataatctattaacattgtacctctacctaaaagccagcatcttaaatttcaaagcaaaggagactttccagctgaagtcaggaacaagacatgcccactaactcctctgctacttaacaatgtgttgagagttatagccaatgaagttagacaaaataaagacgtgaattggaaaggaagaggtaaaactatttgcagatatgaatatgtatctagaaagcccaaaggaacttgttgaaaaactaaacaataaaagaacttagtaaagtagctattaaatacaatttacataaaaatatcagtaggcttcaccagacacaagtgcatactttgattccatttcggtgaagttcaaaacagacagcatctatgtatggtgtcagaaatcagcaccctctttcagtcactacctctcttcccaaaggtaagtgctgtcaaaattaccatcaattagttttgtctgtttttgaattttatatgagtggaaccatatagtatacattatttttcaactggctttaactcagtaggactgaaagagggtacaagggagactctgcggtgctggtaatgttctgtttcatgatctaggtgctggttacgtaggtgcattcaccttatgaatatttatcaagctgtatatgatttgtgcacttttctgtatgtataattatagctcagtaaaaatgtttactaaaaagagtaacaagactatatatatatatatatatatatatatgtatgtatatgcaaacctaaactagttagaagatacttgaagagaagaccacctttgtgatagcaaaagtaaaaagaaaacttaatgtgtaaatttaagacacatctaaaatctgtatgaggaaaactaaaaaaactcttgagaggcaaaaatgtagattccaccaaatggaaagatacatgatattcttagatagacaacatcaaaacatgtctttccccacttaggttcatttataaattcagtgccattccaataaaaattatattgttatttgagagaacatactagaataaccatggaaactgaaaagaattagaggggaccagccatatccgacactaaaacatactctaaatcctccatggcagaagctatcagaattttttaaagtgtgcacactttttggcccagatactctctatctatagatttagcataaagaaacatgcaaataggcaatgatacattttcaaggatctcacagccacatttttgtaattgtgaaaaataagacacattatgatacatttatgtaactcaatactatgcaactgttaaagtatggatattggaaggcattcgtaatgttgaataaatgaaaagttttgtattggcacataaataggaagtccaatggaacagaagaggaattccagaaatagactcagtggcatttagaatacagtaaaggcagcatctcaagttagtgagaaaatgaacttttaagtaagtgctattgagattactggtgcttaattattcagatatttacaattttaaaaaatatatagcttatttcactttgaacctttttttaaaatggtcatttagttttataatttaaagaaaaatgatagttctctccccatcccagcctatactatacccacagcctatacttcctggaggtaaacaccactgttgcatacatctttcagacctttaatctctgtatatagagatatagaaatagagaatattctttaaatatctgaacatttaagtattactcatcccaatacaatatatacttatacaaatagatatatgtatgtatactatacataaagatctgaggtactaaatattccatggttttttttcattcaacaatgtattatgaatgcctttcaatagccatactttaatagttgcatagtatcacgttgcataaacatattaggtcagtgcataagtaattgcactttttaccattttaatggcaaatgaggcactgattaatcagtgccttatttttcacaactacaaaaatattgctgtgagatccttgaaaatgtataattgcccatttgcatgtttctttaaatttatagataaggaattactggggcaaaaagtgtgcacaatttaaatttgatgtttttgtttttgccaagctgctttttaagaaggttgtactaatgcacacttttatcttgacactaagattttaaatatgatcagaaaatgggtttctgatagtaaaactgtctacttgtaataattgtggcattagaaaagacctttgtggcttcgttcctcaaactcatttacgaattataaatctgaattccaaatatgaattaactcacacaagataaagctttaacagttagtagcagtactgtaactagagtgcatgttttctgtctccagaaataacattctttttatgccacatttttttaactgaggtgatcattctccaccctcttctttccatgtttttccatgtttgttcaaacttttcattaaatatcttgaggctctaactaaattaagggtggccattaaaattgtatgtgggattccctgaaccaactggtaatgcactaccagcatataaggtgtcctcattaaagcagttggtgattggtacatgggacctcactcatgtatgtttgcatctacttgtgagtcaaaaagttttcttaaagtataggtgggatcatgaaagacatacaattcactggagaaattgtgaaaaagtaaaagattatgaatttaggctcaaagccaatttccctctcatttaattctacatgagcaagtcaaggagtttggtagagctttatgaaatctctaaagattgaaggaaaacaatcactaaaatcgatttgataaagtgcaactaagtagtatgctagcctgttaatggattttcatcttgtcatttaagtttcagcaattgagtaccacactagaacacccacaaatgagattctgttacagagtatcttttttctactacagaacatactgtagacagttattcagtggttaacttgtggaaataatcagaagatgcttttcacttttatgactggatatattttaatatttatcatattaagagaaacttaggttacttacagctcataaacgttgctatgaacatcattcatttattcacttatttatttttatggtgttcctagaaagaatttcctggactaaaggatttatgctttaaaaatattggtagttactgccaagaattgccatccagaaacagtgtagccattcataaactcaacaacaaggtatgagagtgcctgtttcctcatatcctttgtgacaccggattttatcaagcttaaagttttttcattctaggtgggtgaaaatggtattccgttattgataatgtgtggaaatcaagttctaataagtttggggggaggttaattctttatatgtgctgtatgaattaatgccaactgtatgcctttgagagtgaaatcagaataatgtctctccactaaagcaggacttagagcactagttttccaaatgttgtctacagatggaaacactagcatcacctgggtactcgttagaaagtgcagattctctggcggtaccttagacctcctgaattagaaactctgggggtagggttagacatttgtgttttaaacaagccctccaagtggtttcaatgcacattcaaagttgagaaccaatcactgatagagaaaaagcagcttgggtagaaacagttgattatttgcaaatttatattttaaaaagataggattcttaacagtaagctctttataattcaacaatgtgatctttactcctacccccgaaaaactaatatgattttagtgtgtggtagctggatcgaaaacataataaatactcagatatgcaaagaaaa

SEQ ID NO: 170550 - DNA, 8115 bp, Homo sapiens
  Payload ID: 13575
  Gene Symbol: PIAS1
  Gene Name: protein inhibitor of activated STAT, 1
  Uniprot ID: O75925
  ENST ID: ENST00000249636
  CDS Start-End: 149-2104
ggggcttcgagcgccctgagcggggcggaggctagaggcgggctgggaaggtggaggggcgggccggggcggggccaggccggctagaggggcgggtctagcggcggcccccggcgaagttcactgcgcttgcgctgacagacgcaagatggcggacagtgcggaactaaagcaaatggttatgagccttagagtttctgaactccaagtactgttgggctacgccgggagaaacaagcacggacgcaaacacgaacttctcacaaaagccctgcatttgctaaaggctggctgtagtcctgctgtgcaaatgaaaattaaggaactctataggcggcggttcccacagaaaatcatgacgcctgcagacttgtccatccccaacgtacattcaagtcctatgccagcaactttgtctccatctaccattccacaactcacttacgatggtcaccctgcatcatcgccattactccctgtttctcttctgggacctaaacatgaactggaactcccacatcttacatcagctcttcacccagtccatccggatataaaacttcaaaaattaccattttatgatttactggatgaactgataaaacccaccagtctagcatcagacaacagtcagcgctttcgagaaacctgttttgcatttgccttgacaccacaacaagtgcagcaaatcagtagttccatggatatttctgggaccaaatgtgacttcacagtacaggtccagttaaggttttgtttatcagaaaccagttgtccacaagaagatcacttcccacccaatctttgtgtgaaagtgaatacaaaaccttgcagccttccaggttaccttccacctacaaaaaatggcgtggaaccaaagcgacccagccgaccaattaatatcacctcacttgtccgactgtccacaacagtaccaaacacgattgttgtttcttggactgcagaaattggaagaaactattccatggcagtatatcttgtaaaacagttgtcctcaacagttcttcttcagaggttacgagcaaagggaataaggaatccggatcattctagagctttaattaaagagaagttgactgcggatccagacagtgaaatagctacaaccagcctaagggtttctctactatgtccacttggtaaaatgcggctgacaattccgtgtcgggcccttacatgttctcatctacaatgttttgacgcaactctttacattcagatgaatgagaaaaaaccaacctgggtttgtcctgtctgtgataagaaggctccatatgaacaccttattattgatggcttgtttatggaaatcctaaagtactgtacagactgtgatgaaatacaatttaaggaggatggcacttgggcaccgatgagatcaaaaaaggaagtacaggaagtttctgcctcttacaatggagtcgatggatgcttgagctccacattggagcatcaggtagcgtctcaccaccagtcctcaaataaaaacaagaaagtagaagtgattgacctaaccatagacagttcatctgatgaagaggaagaagagccatctgccaagaggacctgtccttccctatctcccacatcaccactaaataataaaggcattttaagtcttccacatcaagcatctccagtatcccgcaccccaagccttcctgctgtagacacaagctacattaatacctccctcatccaagactataggcatcctttccacatgacacccatgccttacgacttacaaggattagatttctttcctttcttatcaggagacaatcagcattacaacacctccttgcttgccgctgcagcagcagcagtttcagatgatcaagacctcctacactcgtctcggtttttcccgtatacctcctcacagatgtttcttgatcagttaagtgcaggaggcagtacttctctgccaaccaccaatggaagcagtagtggcagtaacagcagcctggtttcttccaacagcctaagggaaagccatagccacaccgtcacaaacaggagcagcacggacacggcatccatctttggcatcataccagacattatttcattggactgattcccaggccctgctgctcccatccccaccccagatcgaatgaacttggcagaaagaagagaactttgtgctctgttttaccttactctgtttagaaaagtatacaagcgtgttttttttcctttttttagggaaaaaattaaaagaaatgtacagagaacaaaactatattttcagttttacttttgtatataaatctaagactgcctgtgtgataaaacacttgtttaaaaaaaaaaaggaaagaaaagaaaaaagaaaaacaagcacccacaaaccaccttcagttcatttttttctggattctgaagatttttcattatttgtcctatggttttggttttatttgacttcgatggcattattttatttgcaataacagaaaaggaattgcatgtatgaagttttcaatcgtgggcttttctttgttgtggggagggggtcgggggatagtttgatttccattttctgaaaacgacagacttggattctgtttgtgtgtgcatattttatccagccttaagttataaagctcatctgtcccgctgcattccctgtgtattttcaggacatggctcgtgggtgtgtgtgttcattgtgtgcgtctgtatgtatttttctgtcatcactgttccctctcctcccgagtgtgcattcagttaatataatcagttgcttgcttctttcaaagtgctttgaaggtcttgaactcacgtgtgagcatctttatcaactatcccaattgcatgttctccatcacatattctcttatttgctctgtaccccctgagaatatgttttagagatattggaataaagctgtctgggtaaggagtaggcttagccgacctatgaataatacactttagtctagttctttattctaaatctggattgccagtattgtgtatttaaaccaagtctgtgaatacctgctttttttggccacagagtaacaagttttcatgtaagatcttcataccaaagtaggaagtaaaaatagcttagaaagctctgtcaggtgttttgtgcagctgacagaggtaatgttacatcacctaaaaaagaaagatacacggtcagttatcctaaaaataaattgtttggaaagtacaatgcaccacatttttgtagaagtctactatttgataaacagttgaaattcaagatgtgtttgacccttagtcatttttactctttggttctgagtatacctattttcttagcgtatctgccttgtttatctttttcttcaccttttaacaagtatgacataggaaagtcatttttttttagaattcatggatcagtctgatctactcttattcataatggaacatgtaaatatactgaaaactgtttttcaggagagaaatatgagttggagggaaggaaaagtggttctactaatgttccaaaatcctcatcagagaaggtatgatgttctcaggtgtggaaaatattttttagttgattgagaatgcaggtttaacagaagagataaggggcataatgactgctggttttccagactggattttcctaccgcaactattaatgttctcagagttgatgaggaccacctttgtgtatacacttgtagttttaaaccttgcattggtaacaaaatgatcaactttaatccaggtagaattcaagatggctgtacttcagttgtatgataaaattaatggttctcatgacttgtgtggcatctaaaaataatgtttttatagcatctctctgccactaaattgttgacttgaattttgggaaaaaaaaaagttggtgttgatatgtatatgtgtgtgtgtatatatgtatttataaacaagtgtgtttgagtaacaagtgagtttcatagtcttcccctacgcatgtgtattccacacacaaatggctgagttatagtcataaaacaatttgcaataaaaaaaaaaccaaaacagattgtcagttaaccaggaaacagttaatgttttttaatgaatctggcattatagtgagcaaatgtcgtattaatttaggctaatttctaatactaccataatttgtgtctaaatttctgttggggtagaaattactaaaattgtggggagttttttctgatttttacattgctttaggaaacatttttactaattcagctgtcttaggtaaaatgaatagttttcttcctgtttttttatgtgtcattgttagtggtctcagaattctgatcagtaactttgtgtatgatgctgaattacaaaccgtttgaatgatccagttgaaaacgtatccctctactttcttcagttgtagaaaaggttaatttccctcagtgtcccacattataccaacctaagagaagaacaggtaatagggagaaataaacatacggtggtttcagtggttttggtcatgtgtccacaggagaaactaaccattcagttgtcttaattttagttcgttctaccctgtgaggagtttgtttccatcagttgttgactttccaaaatgttgcattaagtaatagttgtcactctgttggtctcatggtcaatatcaatcagactttcatgatctctactaattattagtagagtcctgtactatgtctgtaactactaagtttaaagaaaagcacatagtcacttcatctctttttttcttagcctacgctcactccccaacccatcccaacattgacatgctatctgtggacaaatagcagttctcagaatctagtcaagttgccatcatcccccttgccttggccgttcatagtaggtatgcatatgtttgtttctgtacagtactgtgtgtgtgtgtgtgtatatatatatacatctgtatgcacacatctttgataaaatagctatttgactagcagggttaaagtggcttttaattacttcgtgagtgttattggatacatcttaaaaaaaaaaaatctgaaccagaaccatgccatacttggttgactattttgagcattaaaattgctttactaattatttagacatgatcacaattctgtatctttactgaggaaagattcacgtaagctctgaaaaatcggattctttggcagattttcctttgagtcaagtgtctgaaatggagtgaaaatatatcctaactaaattaatgtggaaagagcatttttttagacaatttcaattttaaacacataaaactttcaagatcttcaggactttttaaagcacatttgaaattattttagtaagaattttgttttatcaatagatgttgaattctgttttttaattaaatacaaagcttagatttcagaaagagagggaaaatagctggtggtcccagagtgtgctgctgttaattgtttaacaaaggggaaaatgtacataaacagataaagttaccataaattccatgaacttaaatctgtgattcattgccttaaaactttctctcttagaatttccataccgcatgccaaaccagtaaaatggcttttaaaaatgtatagtagacaatgtcagtttgtataaaagtaccaagtgaaaatatttattacatgcattggaaaaaaattgtttacctattgaatgttacctgtttatgtagagctctttagatgtaataaaagaaaagccttcagttaatttgtcttctgtaaaataacactgctggatgttcaaggggacaatccctatgagacaagtgataatggtttgtgcttccaaagcacctttcatccagagatttcaaagcatgacaagtaactaactaattttcttgcagcatgctttgaggtaagtaatgaatatagccatcatttccctttcttgttgaaatatggctaactctttaataaatcacagcatctgtttagtatctgcagtttgaatgctaagagcaccgtggccttcttgtaaacaacactaggtgctagagaaaccagctggaatttcaggaatgagcttgaaaccaggaccaggagtaaggtaacagcccttcctcgggtagaggtttgaatcaaacacttaataggatcttagactctggaccactgaatcccttaatgagcagggagtccgtgaagaggagccccaggttctaatgaccattccacaccaactgtgtgtttttggcaagttatatttcagattcctgttaggcaaatgagattcataaaacttgctttaaaaccatactgggactattcagtgataaatatagacatagaaaagctttgacggaaagtaccctcatttattatatccagaacttgctcttcctgtgccatctaaatcattggtatctatctcccatctaatctttggtattccaggttggctgtgcaggatttacttcctaatgtccatgactggagctcaaaagaactgtgggcctaggacctttgagctttgcctgaaagtgacagcagttctctcggcggggccagcatctaaccggccctctggtggatttaccatgaaggtaatgaagtttaagcaccaggacccttcacttgttctggtcctaggagcagccccagaaattctgcatttctgtttttgtattcttaaggcagccaaatctcgtaaacctcagaccccacaaaacatctgctcctacactgtgtggacctgggcttcccagccagatggtcacaacttcacctagttggcatttgggccatttatttaccctcaccccacaaaactctttggctcctaggaattcctcctctccttgcagttatgcttggggaaatgagagtctccttcctcagggccttgtttgggtctgaagccacacagcatcgttgagacagttgcactaacactacaactcttgttccctgcagttttccctgtgcccggtgcctagtgaaagatttgtgtcttgtacatcctcccaaaagacacatcccatttgatttggttttcttctactttagccactgtggtactactagacaaagccacagcccagagaacccacttttgatacatacatggatgcaaatctttgtacttgaagccctgcacccctacctgtgttggtgtggtactccagcccttttaggactgtgctggcactacgaatgatccagatttgacaagtgtatggcacctctgaatctctggcagcaccaacctggcaccttctagctgtgtaactcactcaaagccactccagctggatggactcccagaaagcctagtgctcctactactgttttccagggctgttgtaccctggccattgctggttacatccccttatttctctccgtaagtcctggggaggtggcttaaggcaatgaccagtgtgggccacttgagcagaccatcccggaacctctctgcctgttaacagagcccagggaacagctcggaattctcacagcattggaagcccccttcttgagctctgcaaggccagtcaatttagcagctcacatctggtttcctttggtgtggggtgtaaagtagatcgctcttcctgctctcagctgatgctgcctcattgtagcatgtgttttcactctagtgttttcactctacactctgtgtttatgaatgaatagcctgagctatgtcactatatctgttgagatggaaatgagaatttgtaaatgggcctctggcactgcaagaattgttgtcataagtgttacagctttctgttcattgctgcttctcagctagcactggcttcatcttggaaaatcttggaaatatggaagatggttctagcccccaaatacagaataagtctcttggtagattgcccttaagtcatcagctcaatccttcctcaacaggctccatgaggtaagaagtgggaatccagcttgtgtgggggggctttgaggagtgaaatgatttgcccaaagtcacagtgggaagcagcagagccaggactggaacccaggccagactccaaaccgcaggctccttccatgcttgaaagggccggactcacggtagttaataaaatcaatacaaatcttttattaaagatctactcatacc

SEQ ID NO: 170551 - DNA, 2932 bp, Homo sapiens
  Payload ID: 13575
  Gene Symbol: PIAS1
  Gene Name: protein inhibitor of activated STAT, 1
  Uniprot ID: O75925
  ENST ID: ENST00000545237
  CDS Start-End: 742-2703
ttgttgtgggcgcctctggcgggggtggcgggggaagagatagggagtccggaggtaggggctgcagctgtctcatgggctcggctttttcaccttccagttagcctccctgccccccatggggagctggggctgggggcagggtgctctcgtaggggggattgggaaagctccccgtggccgcttcctcttcctcctttgcagtcccgggctcctgtcaggcgctcttctcagacccccgggaacttggcttcggccgccccgcccctccgtggatcccagtagcccccgccccggactcggctttccccggctgctcgcttgtcaggaagcgcctggggtgccccgcttgtgggaagcgcgatcccggggcgatagggtggggatctgggggagaagctctggtaaagtttagcgagccccgggccggcgttggggttcggctgagaggtagtgagcgggacgttactctttctctctgattccgggcagccgaggggagaaaccccctcgaagagtgtgtctttggaagcagtgttgggagggggggatgcagctacctctctcccttcttttgccttagctggtgtggagggtgagaggagcctttgggggtctctgcacacaccatgatggcgatgctgtagctgatggagaacaaccaaatgccagatttgattctgtagagtttttcctgtggaatatcctcaccgaaagagcttttctcctaataacttcacaatgtttacactccaagattcgtatgttaagcaaatggttatgagccttagagtttctgaactccaagtactgttgggctacgccgggagaaacaagcacggacgcaaacacgaacttctcacaaaagccctgcatttgctaaaggctggctgtagtcctgctgtgcaaatgaaaattaaggaactctataggcggcggttcccacagaaaatcatgacgcctgcagacttgtccatccccaacgtacattcaagtcctatgccagcaactttgtctccatctaccattccacaactcacttacgatggtcaccctgcatcatcgccattactccctgtttctcttctgggacctaaacatgaactggaactcccacatcttacatcagctcttcacccagtccatccggatataaaacttcaaaaattaccattttatgatttactggatgaactgataaaacccaccagtctagcatcagacaacagtcagcgctttcgagaaacctgttttgcatttgccttgacaccacaacaagtgcagcaaatcagtagttccatggatatttctgggaccaaatgtgacttcacagtacaggtccagttaaggttttgtttatcagaaaccagttgtccacaagaagatcacttcccacccaatctttgtgtgaaagtgaatacaaaaccttgcagccttccaggttaccttccacctacaaaaaatggcgtggaaccaaagcgacccagccgaccaattaatatcacctcacttgtccgactgtccacaacagtaccaaacacgattgttgtttcttggactgcagaaattggaagaaactattccatggcagtatatcttgtaaaacagttgtcctcaacagttcttcttcagaggttacgagcaaagggaataaggaatccggatcattctagagctttaattaaagagaagttgactgcggatccagacagtgaaatagctacaaccagcctaagggtttctctactatgtccacttggtaaaatgcggctgacaattccgtgtcgggcccttacatgttctcatctacaatgttttgacgcaactctttacattcagatgaatgagaaaaaaccaacctgggtttgtcctgtctgtgataagaaggctccatatgaacaccttattattgatggcttgtttatggaaatcctaaagtactgtacagactgtgatgaaatacaatttaaggaggatggcacttgggcaccgatgagatcaaaaaaggaagtacaggaagtttctgcctcttacaatggagtcgatggatgcttgagctccacattggagcatcaggtagcgtctcaccaccagtcctcaaataaaaacaagaaagtagaagtgattgacctaaccatagacagttcatctgatgaagaggaagaagagccatctgccaagaggacctgtccttccctatctcccacatcaccactaaataataaaggcattttaagtcttccacatcaagcatctccagtatcccgcaccccaagccttcctgctgtagacacaagctacattaatacctccctcatccaagactataggcatcctttccacatgacacccatgccttacgacttacaaggattagatttctttcctttcttatcaggagacaatcagcattacaacacctccttgcttgccgctgcagcagcagcagtttcagatgatcaagacctcctacactcgtctcggtttttcccgtatacctcctcacagatgtttcttgatcagttaagtgcaggaggcagtacttctctgccaaccaccaatggaagcagtagtggcagtaacagcagcctggtttcttccaacagcctaagggaaagccatagccacaccgtcacaaacaggagcagcacggacacggcatccatctttggcatcataccagacattatttcattggactgattcccaggccctgctgctcccatccccaccccagatcgaatgaacttggcagaaagaagagaactttgtgctctgttttaccttactctgtttagaaaagtatacaagcgtgttttttttcctttttttagggaaaaaattaaaagaaatgtacagagaacaaaactatattttcagttttacttttgtatataaatctaagactgcctgtgtgataaaacacttgttt

SEQ ID NO: 170552 - DNA, 1168 bp, Homo sapiens
  Payload ID: 13575
  Gene Symbol: PIAS1
  Gene Name: protein inhibitor of activated STAT, 1
  ENST ID: ENST00000563996
  CDS Start-End: 1-194
gcattttaagtcttccacatcaagcatctccagtatcccgcaccccaagccttcctgctgtagacacaagctacattaatacctccctcatccaagactataggcatcctttccacatgacacccatgccttacgacttacaagcattacaacacctccttgcttgccgctgcagcagcagcagtttcagatgatcaagacctcctacactcgtctcggtttttcccgtatacctcctcacagatgtttcttgatcagttaagtgcaggaggcagtacttctctgccaaccaccaatggaagcagtagtggcagtaacagcagcctggtttcttccaacagcctaagggaaagccatagccacaccgtcacaaacaggagcagcacggacacggcatccatctttggcatcataccagacattatttcattggactgattcccaggccctgctgctcccatccccaccccagatcgaatgaacttggcagaaagaagagaactttgtgctctgttttaccttactctgtttagaaaagtatacaagcgtgttttttttcctttttttagggaaaaaattaaaagaaatgtacagagaacaaaactatattttcagttttacttttgtatataaatctaagactgcctgtgtgataaaacacttgtttaaaaaaaaaaaggaaagaaaagaaaaaagaaaaacaagcacccacaaaccaccttcagttcatttttttctggattctgaagatttttcattatttgtcctatggttttggttttatttgacttcgatggcattattttatttgcaataacagaaaaggaattgcatgagagaaatatgagttggagggaaggaaaagtggttctactaatgttccaaaatcctcatcagagaagcctacgctcactccccaacccatcccaacattgacatgctatctgtggacaaatagcagttctcagaatctagtcaagttgccatcatcccccttgccttggccgttcatagtaggtatgcatatgtttgtttctgtacagtactgtgtgtgtgtgtgtgtatatatatatacatctgtatgcacacatctttgataaaatagctatttgactagcagggttaaagtggcttttaattacttcgtgagtgttattggatacatctt

SEQ ID NO: 170553 - DNA, 671 bp, Homo sapiens
  Payload ID: 13575
  Gene Symbol: PIAS1
  Gene Name: protein inhibitor of activated STAT, 1
  ENST ID: ENST00000564915
  CDS Start-End: 19-501
tgcgctgacagacgcaagatggcggacagtgcggaactaaagcaaatggttatgagccttagagtttctgaactccaagtactgttgggctacgccgggagaaacaagcacggacgcaaacacgaacttctcacaaaagccctgcatttgctaaaggctggctgtagtcctgctgtgcaaatgaaaattaaggaactctataggcggcggttcccacagaaaatcatgacgcctgcagacttgtccatccccaacgtacattcaagtcctatgccagcaactttgtctccatctaccattccacaactcacttacgatggtcaccctgcatcatcgccattactccctgtttctcttctgggacctaaacatgaactggaactcccacatcttacatcagctcttcacccagtccatccggatataaaacttcaaaaattaccattttatgatttactggatgaactgataaaacccaccagtctagcagaaattatctgaatacacgaagattataggagtcattttcaaacaaccatcagacaacagtcagcgctttcgagaaacctgttttgcatttgccttgacaccacaacaagtgcagcaaatcagtagttccatggatatttctgggaccaaatgtgacttcacagtacaggtccagttaaggt

SEQ ID NO: 170554 - DNA, 766 bp, Homo sapiens
  Payload ID: 13575
  Gene Symbol: PIAS1
  Gene Name: protein inhibitor of activated STAT, 1
  ENST ID: ENST00000562190
  CDS Start-End: 10-72
agacgcaagatggcggacagtgcggaactaaaggaagaagagtgggagagaagaagtccatcagcattttagtggagtaaataatgaaattaaatgggaagagaaaccataattataaaagttactatgagtgttagtgtcacatgaaaagaaaattccctagaacccttccttcagagttttctgcaaatggttatgagccttagagtttctgaactccaagtactgttgggctacgccgggagaaacaagcacggacgcaaacacgaacttctcacaaaagccctgcatttgctaaaggctggctgtagtcctgctgtgcaaatgaaaattaaggaactctataggcggcggttcccacagaaaatcatgacgcctgcagacttgtccatccccaacgtacattcaagtcctatgccagcaactttgtctccatctaccattccacaactcacttacgatggtcaccctgcatcatcgccattactccctgtttctcttctgggacctaaacatgaactggaactcccacatcttacatcagctcttcacccagtccatccggatataaaacttcaaaaattaccattttatgatttactggatgaactgataaaacccaccagtctagcatcagacaacagtcagcgctttcgagaaacctgttttgcatttgccttgacaccacaacaagtgcagcaaatcagtagttccatggatatttctgggaccaaatgtgacttcacagtacaggtccagttaaggt

SEQ ID NO: 170555 - DNA, 4543 bp, Homo sapiens
  Payload ID: 13576
  Gene Symbol: PIAS2
  Gene Name: protein inhibitor of activated STAT, 2
  Uniprot ID: O75928
  ENST ID: ENST00000324794
  CDS Start-End: 159-1877
gacgggcccggctgtagcggcggcggccgcggcgtcttaagcggcgcccagtgcaggatggtgctggaggcggcggcggccgtggtggcggcagcgtcgttggcggcagcgggagtgggtgcggcggcagcggcggcggcgcccgcgggtggtataaaatggcggatttcgaagagttgaggaatatggtttctagttttagggtttctgaactacaagtattactaggctttgctggacggaataaaagtggacgcaagcatgacctcctgatgagggcgctgcatttattgaagagcggctgcagccctgcggttcagattaaaatccgagaattgtatagacgccgatatccacgaactcttgaaggactttctgatttatccacaatcaaatcatcggttttcagtttggatggtggctcatcacctgtagaacctgacttggccgtggctggaatccactcgttgccttccacttcagttacacctcactcaccatcctctcctgttggttctgtgctgcttcaagatactaagcccacatttgagatgcagcagccatctcccccaattcctcctgtccatcctgatgtgcagttaaaaaatctgcccttttatgatgtccttgatgttctcatcaagcccacgagtttagttcaaagcagtattcagcgatttcaagagaagttttttatttttgctttgacacctcaacaagttagagagatatgcatatccagggattttttgccaggtggtaggagagattatacagtccaagttcagttgagactttgcctggcagagacaagttgccctcaagaagataactatccaaatagtctatgtataaaagtaaatgggaagctatttcctttgcctggctatgcaccaccgcctaaaaatgggattgaacagaagcgccctggacgccccttgaatattacatctttagttaggttatcttcagctgtgccaaaccaaatttccatttcttgggcatcagaaattgggaagaattactctatgtctgtatatcttgtacggcagcttacatcagccatgttattacagagattaaaaatgaaaggtattagaaaccctgatcattccagagcactaattaaagaaaaacttactgcagatcctgatagtgaaattgctacaactagccttcgggtatccttgatgtgccctttaggaaaaatgaggctgacaatcccatgccgtgcagtgacttgtacacatctgcagtgttttgatgctgccctctatctacaaatgaatgagaaaaagcccacctggatttgtcctgtgtgtgacaaaaaagctgcctatgaaagtctaatattagatgggctttttatggaaattctcaatgactgttctgatgtagatgagatcaaattccaagaagatggttcttggtgtccaatgagaccgaagaaagaagctatgaaagtatccagccaaccgtgtacaaaaatagaaagttcaagcgtcctcagtaagccttgttcagtgactgtagccagtgaggcaagcaagaagaaagtagatgttattgatcttacaatagaaagctcttctgacgaagaggaagaccctcctgccaaaaggaaatgcatctttatgtcagaaacacaaagcagcccaaccaaaggggttctcatgtatcagccatcttctgtaagggtgcccagtgtgacttcggttgatcctgctgctattccgccttcattaacagactactcagtaccattccaccatacgccaatatcaagcatgtcatcagatttgccaggagaacaaagaagaaatgatattaataatgaactgaagcttggaacatcttctgatactgtgcaacagtgaatacaaaataaaacaaataatttgtatttatggagtggaaaacagcttatttcaaggaaaaatatgactgccttattattgctagtgccatattgtcaggtgcgaatggtgctcaaaagttgtatcattaaaatttgaaagtgctaaacatttacatatttaatcatgtagcagttatgttttgttaaaagtttatgactcaaataaggaaaatgtgttgtcatcaatgagaaaaaatctaatgagtcaatttcacagtgaagcacttaaaatttttaaattaaaattttatcagtgttaataaaataatgttaacactacctgctttttagttaaaagtaattgagcattttcaaccatgaaatacttcggagggcataaaaatatatcagtatgacacgctgcagttgaaacttatggtgaaataagaaacagcattttgctaaacttacgaaacaaggcagtaaaattttaatcactactgatgaaacttgattttatataagagttttaatattctgcttaaaatgtaaaatgcaagaagactttgatggtttcgttttttgttagaaagaataacatctaaaataccatatcaaacttcactgttagtacttgagaaaaaaatggtttcagtgagagaaatatttacattaaacaggttttatatagacagcacccttgtaatgcttggtaaacaatctagaattccaaccaatattttagaaaaatttctaggtattttattatggtgttgtataagtcaccacattcaattttccgtggatgaggtatcaatatacagataagtaaatctcttaattgttttctaaataaactttatatttaccacacacatgaaatcatcaaagagaattacagtacatctgaagaactggaattgaaataacaaaaataggatcctcagtgggtattctctggtgatagagcttcaatttttaatttcaattaaaataaataggcttgatataattttcaaactgttttatatcaagcttgcgtattttaattgaaattctgaaattgaaatagttgaacatttagaaaatgagcatttttgagtggcttggcttcagtacacaatattccaacaccattgtcaatacttagcgttataaaaaggtttcagttactaacatgaactgagagatacagcaaatattaaagatgattgaacatatgaaactgaaaaactataaaaaggtagaagctattgtaaaaatgaagaaaactgaaaaactgaaaagataagaagttactgtaaaaagaaaacggttataccatttgaagcagaacaaaatgttccaataaactttttttacttaataatagaaatattgaaaatgcaaaactctgaaggtattacaagggctagacaaattttgaattgtttggcataagaagggagaggatttattgaatattattaatatgaagacaaaatctgcttattgagatatctcacctattatcattttaatagagaagtcattggaaaagtttgttgtaattctctttggtttagtattggctcaaaccactgtgtcatatagctagtgacagacatatgaaatgaaaaattacagcaagctgggtgcggtggcttatgtctgtaatcccagcactttgggaggctgaggcgggaggatcacttgagctctggagttcaaaaccaacctaggcaacatagcgagaccctctctctacaaaaaaaaaataataataataattagctgggcatagtgacacacacctgtagctcctgcttcttgcgaagctgaggccagaaggtaaaggctacagttacctatgattgtgcctctgcactccagcctgggcaacagagcagactcagtgtctcccaaaaaaaggaaaaaaaaaaaatctgtagcaacaattttcaaaaaggctttagaaatcgttggaatgatttctttcaaatgattggtgctatagcttgtatcacttgataagcatttttgtaatacccttatttggagattataagagaataaatatacttaaattttttgagttataaattcatactggttagtagatattttaaatgtacccactgatattctctattttgcataaaagcataatgtcagactttctctgtgtggtggttatattcggggtgtctctgaatgccagcataaaaattcacggaattgaatagaaattggcctgtcttaatgacctatggtttcttttttaatgttttgaaataattaaagagagtttagtcacacagggaggtctaggtgaactgatgttgaagtttattactagacttttcagacctaaaaattttatttattgttattacttgaatatgtcaaaagtatattactggacaaccttttacacattcctctttctaaaatcgaattggacaattacagttctctggttcagaaaattacattagctcagaacccagtaacccttgataaccctgttagcgcagcaattcccgagtgtgtgctttgtgcagagcgttggactatgtactgctcttgatgtggggacagcggggacagagagctgtcattgaaatagacatctgtttaagaagcgatacttagatgaacctctgtatttctgaaaaataaatgtgaaatatcttaagagcttaa

SEQ ID NO: 170556 - DNA, 2043 bp, Homo sapiens
  Payload ID: 13576
  Gene Symbol: PIAS2
  Gene Name: protein inhibitor of activated STAT, 2
  ENST ID: ENST00000398654
  CDS Start-End: 110-658
agtgcaggatggtgctggaggcggcggcggccgtggtggcggcagcgtcgttggcggcagcgggagtgggtgcggcggcagcggcggcggcgcccgcgggtggtataaaatggcggatttcgaagagttgaggaatatggtttctagttttagggtttctgaactacaagtattactaggctttgctggacggaataaaagtggacgcaagcatgacctcctgatgagggcgctgcatttattgaagagcggctgcagccctgcggttcagattaaaatccgagaattgtatagacgccgatatccacgaactcttgaaggactttctgatttatccacaatcaaatcatcggttttcagtttggatggtggctcatcacctgtagaacctgacttggccgtggctggaatccactcgttgccttccacttcagttacacctcactcaccatcctctcctgttggttctgtgctgcttcaagatactaagcccacatttgagatgcagcagccatctcccccaattcctcctgtccatcctgatgtgcagttaaaaaatctgcccttttatgatgtccttgatgttctcatcaagcccacgagtttagggattttttgccaggtggtaggagagattatacagtccaagttcagttgagactttgcctggcagagacaagttgccctcaagaagataactatccaaatagtctatgtataaaagtaaatgggaagctatttcctttgcctggctatgcaccaccgcctaaaaatgggattgaacagaagcgccctggacgccccttgaatattacatctttagttaggttatcttcagctgtgccaaaccaaatttccatttcttgggcatcagaaattgggaagaattactctatgtctgtatatcttgtacggcagcttacatcagccatgttattacagagattaaaaatgaaaggtattagaaaccctgatcattccagagcactaattaaagaaaaacttactgcagatcctgatagtgaaattgctacaactagccttcgggtatccttgatgtgccctttaggaaaaatgaggctgacaatcccatgccgtgcagtgacttgtacacatctgcagtgttttgatgctgccctctatctacaaatgaatgagaaaaagcccacctggatttgtcctgtgtgtgacaaaaaagctgcctatgaaagtctaatattagatgggctttttatggaaattctcaatgactgttctgatgtagatgagatcaaattccaagaagatggttcttggtgtccaatgagaccgaagaaagaagctatgaaagtatccagccaaccgtgtacaaaaatagaaagttcaagcgtcctcagtaagccttgttcagtgactgtagccagtgaggcaagcaagaagaaagtagatgttattgatcttacaatagaaagctcttctgacgaagaggaagaccctcctgccaaaaggaaatgcatctttatgtcagaaacacaaagcagcccaaccaaaggggttctcatgtatcagccatcttctgtaagggtgcccagtgtgacttcggttgatcctgctgctattccgccttcattaacagactactcagtaccattccaccatacgccaatatcaagcatgtcatcagatttgccaggtttggattttctttcccttattccagttgatccccagtactgtcctcctatgtttttggatagtctcacctcacccttaacagcaagcagtacgtctgtcaccaccaccagctcccatgaaagcagtactcatgttagttcatccagcagcaggagtgagacaggggtcataaccagcagtggaagtaacattcctgacatcatctcattggactaaaggaggactcacttgattctgggaatcattcatcagaactgctttttcttggatctctagtctgtggaaacgttcttttttttttttttttaataatttggtatttattgaaagtcagatggattcttttgctttctgaggggtgaacacaga

SEQ ID NO: 170557 - DNA, 1590 bp, Homo sapiens
  Payload ID: 13576
  Gene Symbol: PIAS2
  Gene Name: protein inhibitor of activated STAT, 2
  ENST ID: ENST00000545673
  CDS Start-End: 556-1404
gtgacgggcccggctgtagcggcggcggccgcggcgtcttaagcggcgcccagtgcaggatggtgctggaggcggcggcggccgtggtggcggcagcgtcgttggcggcagcgggagtgggtgcggcggcagcggcggcggcgcccgcgggtggtataaaatggcggatttcgaagagttgaggttcaaagcagtattcagcgatttcaagagaagttttttatttttgctttgacacctcaacaagttagagagatatgcatatccagggattttttgccaggtggtaggagagattatacagtccaagttcagttgagactttgcctggcagagacaagttgccctcaagaagataactatccaaatagtctatgtataaaagtaaatgggaagctatttcctttgcctggctatgcaccaccgcctaaaaatgggattgaacagaagcgccctggacgccccttgaatattacatctttagttaggttatcttcagctgtgccaaaccaaatttccatttcttgggcatcagaaattgggaagaattactctatgtctgtatatcttgtacggcagcttacatcagccatgttattacagagattaaaaatgaaaggtattagaaaccctgatcattccagagcactaattaaagaaaaacttactgcagatcctgatagtgaaattgctacaactagccttcgggtatccttgatgtgccctttaggaaaaatgaggctgacaatcccatgccgtgcagtgacttgtacacatctgcagtgttttgatgctgccctctatctacaaatgaatgagaaaaagcccacctggatttgtcctgtgtgtgacaaaaaagctgcctatgaaagtctaatattagatgggctttttatggaaattctcaatgactgttctgatgtagatgagatcaaattccaagaagatggttcttggtgtccaatgagaccgaagaaagaagctatgaaagtatccagccaaccgtgtacaaaaatagaaagttcaagcgtcctcagtaagccttgttcagtgactgtagccagtgaggcaagcaagaagaaagtagatgttattgatcttacaatagaaagctcttctgacgaagaggaagaccctcctgccaaaaggaaatgcatctttatgtcagaaacacaaagcagcccaaccaaaggggttctcatgtatcagccatcttctgtaagggtgcccagtgtgacttcggttgatcctgctgctattccgccttcattaacagactactcagtaccattccaccatacgccaatatcaagcatgtcatcagatttgccaggagaacaaagaagaaatgatattaataatgaactgaagcttggaacatcttctgatactgtgcaacagtgaatacaaaataaaacaaataatttgtatttatggagtggaaaacagcttatttcaaggaaaaatatgactgccttattattgctagtgccatattgtcaggtgcgaatggtgctcaaaagttgtatcattaaaatttgaaagtgctaaacatttacatatttaatcatgtagcagttatgttttgtt

SEQ ID NO: 170558 - DNA, 561 bp, Homo sapiens
  Payload ID: 13576
  Gene Symbol: PIAS2
  Gene Name: protein inhibitor of activated STAT, 2
  ENST ID: ENST00000589917
  CDS Start-End: 196-561
aacctacccaacccatccaggagctgctacacattgaggaaggggcagaatgaatgctgggaagcaactacaaagaacactgcactggctgtaccattttacatccctaccagcaatgtatggagtgatccagtttctcagcatcctcgccagcatttggtgttatcagtgtttttcattttagccattctgaatatggtttctagttttagggtttctgaactacaagtattactaggctttgctggacggaataaaagtggacgcaagcatgacctcctgatgagggcgctgcatttattgaagagcggctgcagccctgcggttcagattaaaatccgagaattgtatagacgccgatatccacgaactcttgaaggactttctgatttatccacaatcaaatcatcggttttcagtttggatggtggctcatcacctgtagaacctgacttggccgtggctggaatccactcgttgccttccacttcagttacacctcactcaccatcctctcctgttggttctgtgctgcttcaagatactaagcccacatttgag

SEQ ID NO: 170559 - DNA, 11075 bp, Homo sapiens
  Payload ID: 13576
  Gene Symbol: PIAS2
  Gene Name: protein inhibitor of activated STAT, 2
  Uniprot ID: O75928
  ENST ID: ENST00000585916
  CDS Start-End: 1-1866
atggcggatttcgaagagttgaggaatatggtttctagttttagggtttctgaactacaagtattactaggctttgctggacggaataaaagtggacgcaagcatgacctcctgatgagggcgctgcatttattgaagagcggctgcagccctgcggttcagattaaaatccgagaattgtatagacgccgatatccacgaactcttgaaggactttctgatttatccacaatcaaatcatcggttttcagtttggatggtggctcatcacctgtagaacctgacttggccgtggctggaatccactcgttgccttccacttcagttacacctcactcaccatcctctcctgttggttctgtgctgcttcaagatactaagcccacatttgagatgcagcagccatctcccccaattcctcctgtccatcctgatgtgcagttaaaaaatctgcccttttatgatgtccttgatgttctcatcaagcccacgagtttagttcaaagcagtattcagcgatttcaagagaagttttttatttttgctttgacacctcaacaagttagagagatatgcatatccagggattttttgccaggtggtaggagagattatacagtccaagttcagttgagactttgcctggcagagacaagttgccctcaagaagataactatccaaatagtctatgtataaaagtaaatgggaagctatttcctttgcctggctatgcaccaccgcctaaaaatgggattgaacagaagcgccctggacgccccttgaatattacatctttagttaggttatcttcagctgtgccaaaccaaatttccatttcttgggcatcagaaattgggaagaattactctatgtctgtatatcttgtacggcagcttacatcagccatgttattacagagattaaaaatgaaaggtattagaaaccctgatcattccagagcactaattaaagaaaaacttactgcagatcctgatagtgaaattgctacaactagccttcgggtatccttgatgtgccctttaggaaaaatgaggctgacaatcccatgccgtgcagtgacttgtacacatctgcagtgttttgatgctgccctctatctacaaatgaatgagaaaaagcccacctggatttgtcctgtgtgtgacaaaaaagctgcctatgaaagtctaatattagatgggctttttatggaaattctcaatgactgttctgatgtagatgagatcaaattccaagaagatggttcttggtgtccaatgagaccgaagaaagaagctatgaaagtatccagccaaccgtgtacaaaaatagaaagttcaagcgtcctcagtaagccttgttcagtgactgtagccagtgaggcaagcaagaagaaagtagatgttattgatcttacaatagaaagctcttctgacgaagaggaagaccctcctgccaaaaggaaatgcatctttatgtcagaaacacaaagcagcccaaccaaaggggttctcatgtatcagccatcttctgtaagggtgcccagtgtgacttcggttgatcctgctgctattccgccttcattaacagactactcagtaccattccaccatacgccaatatcaagcatgtcatcagatttgccaggtttggattttctttcccttattccagttgatccccagtactgtcctcctatgtttttggatagtctcacctcacccttaacagcaagcagtacgtctgtcaccaccaccagctcccatgaaagcagtactcatgttagttcatccagcagcaggagtgagacaggggtcataaccagcagtggaagtaacattcctgacatcatctcattggactaaaggaggactcacttgattctgggaatcattcatcagaactgctttttcttggatctctagtctgtggaaacgttcttttttttttttttttaataatttggtatttattgaaagtcagatggattcttttgctttctgaggggtgaacacagaagactgcaacaagaaccaaatgacatgcaaggatttttcttaattatgctgtactctcagcatcagatacattcaaccataactgtatcttcctgagagatggatttcactttcatacgttaatggatggagtctacaaatcagtgaaaaaagtttttgttaaaataaagagcaataaaattatgtaaatattcaagtaaccttttttctaattaaaaaaaaaattgtaatcactgattctagaatgacagcaacttctgtttaaccttacgtgaaggaaaaaaaatatatggaaagaacttaatgtttgctgaatgagtcctttccatggagatttgctctgtttcattgaagtaatgaagtttcagtacgtggccaaagcttggattccacttttcgtcctgcatttccacttttcttcgtgattgcatcaaagaaaaatggcattcgtgttacttggtttttttcctgcttatcatttacactttgacgttgtttgctaatgagtgctgtgtgaagttctgggatttggctactcttcattggtgattatgtttaaaagcactatgcagattctgccctgacataaagtgtgttattatgtttttagtaattgtacatttttcattctagagttttctataaatttgaggcttgccttctcaaaaaagaaactatgcagccattgaatgaaatgtctttggggtacggtgtgactggaatgtttgttagaaatttgttcacactatcaaatattgatatcttggagccagcagaagagcagattttgggaggtggtaataacaaaatttaatttcttcccaacaacttaattttctcatttattttacagaatagtagtgaaatatttgatgaaactttgtattttggtagcactacatagaaaatgtgttttagatttatgatgatcatatttctcaccaatgtaatttcagtctcagcagtgattttcaaacttagggaaagggacagcattagattttttttttttttcatttttttaaaatgatatcttacctgaaactacaaacgacaaaagagaattagaaatgtttgaattaaagtgaagaagggttgggggagatgggcctgaacccacttcctgtctcaatccatgctaccccaaacactccagggaacctctgaggttttattgggtgcactttgaaaatttctcttctatagtgtgtttgtttgattttaaatcacagagaaaactgggttttactcttagagaaacattttcatccagttttttagtttgcttcatttgacttcctaaatcatttttgagttcacaaggatttggtacttttctgtttagctttctctctctaagctttatctaccttaaaaacaaagtcctttttttaatggccagtccaaccaattgatttctcaaactgaagtgcccaggtgtggactcatcaatttccgttagaatagggacatcctacttaagagttggtgcagctccaaggagctgacttgtccttgcttggggttttttttttttttctttcaccttctcaagtttccatggcctttgtgtgttctttttatgttgatttaaattcatatggttttccacaaatcccttctttggctacattgtctccttattcaatggattatccctttgtgggggctgcttattttaaagatgttgggggggaaacaaacccaaatctacgagcagtagttgcacatagttgccagttttaccttcttagtcattagatttccaaaccatgttgcagttttttggtccagatatagtatttctttctaataaagttttatgttgctgctctaaatacagatgcaatatttattgactctgtaatcagatagaaaaaacttaacttggtttgtgtggtatgacttataaagaaatgatgtatatttgttattttgttaccctttagattgtcagagactcccccaatttaatcaacaaagttttataaagtaaatgaaaatattaatagaaattagtttatttacttggttcttataactgatatctctgtgcttttataattgtgatttgtttttttgtttttttttctattttctgtgaacagttttaatgttcggttttggtgttttacactgaaattacatataaatttttaatttatttcatacaggcaacttgcattttaaaaaatacactttgaagtttatcatcttgaaattggggcttacgttgtttatctgtcttgagcattagtactttatgactttggccttatggcaacatcatgattattaatccgtcagcctttaatgtggtcactgtttcttatccagaccctgactttctagtagtttattttgctagcccagatttctgcttaaccaaatataagggagtttcagaggggtgatcttagctgtcacctagattctgtcagccaaccagtgattgtctggaatatcttaggaaatgaactgtaattgtcagcctcctaaaatcaatttttttttttttttttttgaggctgagtcttgctcttgttgcccgggatggagtgcaatggtgcgatcttggctcaccgcaacctccacctacagggttcaagcgattctcctgcctcagcctcccgagtagctgggattacaggcatgtatcaccacgcccagctaattttgtatttttagtagatacggggtttctccattttggtcaggctggtctcgaactcccgacctcaggtgatccgcctgccttggcctcccaaagtgctgggatttacaggcgtgagccaccgcgcctggccaaaataaaatgtttttatctttcttcacttagaactatgaaggccttttcttgttctggtaaccccccacagtgtaattggtgctgaaaatagtttcgtgcctgaggtctgttgtcactcactcactttctgacaattaggtgagccacttgaggattttctggcctgaagttataaaaacttggcatctgtcctaaggtaattgtaaaggcaaaatgaaagcattgaggtgaatttaggttatatggcatttatctggtaatgtgtttcagaaaagctagaatgaaaatgtgatgtaagggatagcaagtgtaggttgattcataattcttggtataaaaccaagttttccttagtcttgaggaatttgaagaaaggtaaaatgttggattttaagcaaagtaggattgaccagagactgttctgactttgacattcagacctttcagatgttcttccttcagaccagtccaagacactcagcatttccagccaagttgtcttttttttctgccaataaagtattcattagttgacgtttgtttgtattttaagtaaagtcaattttttttaaagcattaatttaattcacgggtatgcctttcatttctctggccttcagttggtttaaaaaaaaaaaaaaaaaaaaaagcacttagccggaccattctttctttagtaaacatttttattttcttaatttttcctgaaagattttcttcattttcatggaatgtcataatgacactaccattattttctagctctttgcataatagaaaaatgtagagcagtgcaccatttaaacacgtctgacattggatttagtggtcctaggttcatgtgatttgggagccttaagttgttatttagattgattcagcctgattcaccatcttttttactacagttctacatgaatgtggtgaaacaggtagaagaaaattaagcatttctctgcttttggagtctaatgttcctgcctagtgactggtttgtaacacccccctcacccctactttgttaggaacctgcaattcctaaaagaaataaataaagctgtacccaatgtccattctttaatgcttgcctggttgaataatgtttgttttttctgtttatgtcagtagtacatgcttattgtggaaaatttagacaatacagaaaagtataacaattaattgcctatgattctgtcaccagaaaaaatcacttgatatttttgcatcttccttgccattgtctttgctacttctgcatatttttacttagtttcatcattctcagtgtaatttatatcttggggtttttccccgcaacctacaggcattattccatgtcattaaaactgtgtcaactattattaattttatggtactccattgttatggatgtgccatgtttcatataacctttacttattttgaacagtttagattatatctcataatgccacaatgaatgtctttgtgtataaattattttcttaggataaaatactggaggtggaatttctagtcaagggtatatgaacacttttgtagttcttgattcataccacttttccacatgggtatgttaatttatactgcagctagatggtatgggaagggtggtctagccatattttccaagaacatgcaacgttttatctttatgcaggcatctgcactaagaccctctgcctttctgactctatggaacggggttaactgatatggagatcattggcagagattttcccaagctttcttagttttaaatatatctgacatgggccgggtatggaggctcacgcctgtaatcccagcactttgggaggccaaggcgggcagataatctgaagtcaggagttggagaccagcctggctaacatggaacatggtgaaaccccatctctagcaaaaacataaattaggtgggtgtgatggcaggcgcctgtagtcccagctacttgggagaccgaggcaggagaatcgcttgaacccaggaggcggaggatttgcagtgatccgagattgtgccactgcactccagcctgggtaacaaagcaagactctctaaaaaaaaaaaaaaaaaaaaaaaaaaatatatatatatatatatatatatatataaaatctgacatgtttcagaaacacctacgtatggctatccaagcttttcccatgattttactggcactgtaaagttgcacaaatattctttgtcagactacgttttccatctttagttcaaaagttttgtcactttttaaaaaaagcctcttgtacctaaggcctgcccttaagaggtcagctctctttttcctcttcctgtaggccccattatggcctttctgagctccccaaagccagtagaatctactgagccaaaggcattccatccccaaactgaaaagtggtaaggctaaaagctataaaaacaggcaaacattgcctgttttcactttatattcccttatgtttccaataagggtagctgcagggaaagaaaaaaacagattgctaccttcagatgtttgaggtacaacattttcttgattggcgtagcacaatcatttcccaaactgcttcctatttctgaatggcttttttaaaaagctttattttgtgttctcaaagcttaattattttaagtgacgaagagtgttaccgtgttgtagaatagcatatgcctcttattttggccttcatcaaactgtttaataaatgtttagagtgttttgtaagtacacgtggaatagagtgttacagaagttttggttccagacatcaggcagcttataatcaaggttccaaaaatcaagaattcttaagctgggcatggtggctcatgcctgtaatcccagcactttgggaagccaaggcaggcaaatcacttgaggccaggagtttgagaccagcctggccaacttggtaaaaccccatctctactaaaaatacaaaaaattagggcatgatggctcatgtctgtaatcccagctacttgggaggctgagggatgagaattgcttgaacctgagaggcggaggttgcagtgactcaggatcatgaccctgtactccagcctgggtgacagagtgagaccaaaaaaaaaaaaaaaaaaaaaaaaaaaaagtaacaggcattgtgcaaagaattttccaagaatgtctcattcttgcaatggcttctcagaggaaagtggtgttattccccattttacaaatgaaacaggtttaggtaagtttcccaaggtcacagtgaatgagtagtggacttgggagtctgacctagacttaccccaaaagctctctgcgtaaactgaagtgacgttaattagctgtgctatctaggagactgatatgggaatctagacttaaaattatgagaactggtttcagatgatggccagagtaataaggaaggagtggatgctgaagccatttcaaaggaagactcaagattcagtgactgaatataggagtaagggttgagtgcatttttcatccatttttcaagcctgggtaacttggatgttaatggcactatctacagagacaggaggcagtttagagtgaagacgaatcatgtatgggagacagtgatgaatgttaagcatgggatttcagaaatgaagcatccatgaggctcattcctggtttttctgcagtcttttaaataaaagtacaaacctcccttgtcatccatttttgccttcacttatctccattctgtattatgttctagtcacgccccagtcactgatcccttcctaggccatacttggctacatcttagccttttcttttgatttttctcttcactgccttgcccattacaaatttggctgccacctgaggccctgccataccctacagctcacaccagcgtgggctgtgttcacattctacatatctcaagatacagtggttgctgtccttcccccctactgcatcgttacacgtctctaaaaaatctctgcctctgaagctcatgccaagaggttatactatcagctacctctagtcttataactgcctgatcattccctttgatttgctggaagctttgactcacagtgttccttgccttccttgattctggtcattattattaatatcttgaacattctatagatgatttatccaagttggtctgtgaggtattggttactttacctccagcattttcgtctactgaaccacgctttctgttttcctctttgctacttgtccagactgttctttcattattgcagccttgaagaaatcctcagtaacctatccatcctccgacatgacgtagcatagttcctttgcccattctcatcagttataacaaatgttattgccctcttttcaggccacttccttctcagaagatgactttgctgcttaattcaaacagaagggacagtccgaaagcatgatttcttccccacctatgaccacctccatccttttttgtttccagtttcagagaatgaggtaggcctttaaggccaactgactctggtctcctcctgtcatcttcaggaccttcctctgtcagacttcccctctcttatctccatgtctctcacctctctactgctgcttttcttggcttacaaatggtctcagtcatccagtatttgagattatattaggtgccaggcattgtatcaggcacttggaacacaaggcaggatcctgcccccaccaaagttgtgctccaatagcgtcaacagaggtgtgaaatagggagattacaatgttaatggtaaaagacaaagtatagggtgctacaagagcatgtaaatgaggcacctcaatgatttaatagaagtaatgtggagaaatgtgaggattgatgaaaagcttgtccaaaaagggccagaaatgtttagaattgctggaagtttgctaaggaatattgagaaatatgcatagatagatcgtgaagggccttgtaaaacagtgatgagacattgaagagttttcatgatcattagtagtaatgagaatttgttgagtttggcatgattatctccatattacaaatgtggaaacagattctgacaggataagcgacttacttgcccagggtcatgcagcttgtaattgaggagtcaggtttcaaatccagttttaactactttctcagaggcctttcttgatcattctatctaaaaagcaagtgttccctaactattatcccagtaccctggtttatatactcttaatacataaaataatccctgcatattgtgtgtttcccctactagattgtaagctccatgagggcagaggtgataacttttttcacttgcatcccagagcctaacatgatatgggctacatagaaggtgcccagtaaatattggtggatgaagaaatggtggataaccatttgcatttgacttatgctgactggaaattcaatacctttggaatatataatacctcagcagtaagcattcaccaagagaggaaaacagaaggaggtgcatgtttagggtaggtggtacgggagatggatgctgaggtgttgaaaggcagcatactcaccttctgaactccaaaacttacaggggcaagggccattaatgaggggtgggtagagcagtgcacagtggggataatatgggagtaggtgtattaaacctggaagtgtaagcaactccttgtagacccaccctactgtgtataaaaggctggagaaattcttcatatgatctactctaggttatgtactgaggaccaccttatctgggtcaggtacactacacagagtgctacaatataattgtaaacataatttatcctcactgtgatggctagccacctgacccaaatcattattagactcaatactttggaactggaacaaaaatcagttgacctgatgtctgaaagacatgcccacctgctatttgacaagctatagacatatcctaccaattgatgggtagtagcactgaaactatgaaagtggatgaactcatccagaggagttgatgagtgagaaaagaagactggaaaaggaacacaaggaaatcaagaagcagcagctgagactgaaggaaaataacgtggtattacagaggccaaaaaatagagtatttcaagaagcaagtggttagtggagttaaaagctgctgatacaacctaaaaaagtaagtatccattttttaaaaaactttcatttaaaataccaccatattttattgaatctaagtacctgattgtaagacattaaagaaaaattaaacctgctaattaaa

SEQ ID NO: 170560 - DNA, 502 bp, Homo sapiens
  Payload ID: 13576
  Gene Symbol: PIAS2
  Gene Name: protein inhibitor of activated STAT, 2
  ENST ID: ENST00000592221
  CDS Start-End: 234-502
gaccttcaggtgcccttcaaggtcagaaaaactcggcaaggatctccagtacaatgttgaatagaagctgtgatgggggcatcctgatcttgttcctgattttaaagggaatgctttcaaagtttcacaagttaacatcttaaagaccatagtacagtatcacaaccaggatattgacatgaacacaatcaagatatagaccattttatcaccacaaggatccctctctccaaatggctgtaccattttacatccctaccagcaatgtatggagtgatccagtttctcagcatcctcgccagcatttggtgttatcagtgtttttcattttagccattctgaatatggtttctagttttagggtttctgaactacaagtattactaggctttgctggacggaataaaagtggacgcaagcatgacctcctgatgagggcgctgcatttattgaagagcggctgcagccctgcggttcagattaaaatccgagaattgtatag

SEQ ID NO: 170561 - DNA, 447 bp, Homo sapiens
  Payload ID: 13576
  Gene Symbol: PIAS2
  Gene Name: protein inhibitor of activated STAT, 2
  ENST ID: ENST00000587810
  CDS Start-End: 161-447
agtcaaacctacccaacccatccaggagctgctacacattgaggaaggggcagaatgaatgctgggaagcaactacaaagaacactgcacgatctccagtacaatgttgaatagaagctgtgatgggggcatcctgatcttgttcctgattttaaagggaatgctttcaaagtttcacatggctgtaccattttacatccctaccagcaatgtatggagtgatccagtttctcagcatcctcgccagcatttggtgttatcagtgtttttcattttagccattctgaatatggtttctagttttagggtttctgaactacaagtattactaggctttgctggacggaataaaagtggacgcaagcatgacctcctgatgagggcgctgcatttattgaagagcggctgcagccctgcggttcagattaaaatccgagaattgtatag

SEQ ID NO: 170562 - DNA, 497 bp, Homo sapiens
  Payload ID: 13576
  Gene Symbol: PIAS2
  Gene Name: protein inhibitor of activated STAT, 2
  ENST ID: ENST00000586953
  CDS Start-End: 234-497
gtggtccgcacacctggcgcggggggtcggggcgccctccaggaggggcacatggggacccgacatcccggttcgcagtgagggccgatgtgggaagcaacgtttgatcttgcaccttcaccggggtgtacgtgtctgtggctattcacaagtctgcatgctactcacttggtggaggactgttttctgaaagctgaagttgcgtttaggaatctctcctcttcttatggctgatgctaccgtttagtcagaatatggtttctagttttagggtttctgaactacaagtattactaggctttgctggacggaataaaagtggacgcaagcatgacctcctgatgagggcgctgcatttattgaagagcggctgcagccctgcggttcagattaaaatccgagaattgtatagacgccgatatccacgaactcttgaaggactttctgatttatccacaatcaaatcatcggttttcagtttggatggtggctcatca

SEQ ID NO: 170563 - DNA, 2790 bp, Homo sapiens
  Payload ID: 13576
  Gene Symbol: PIAS2
  Gene Name: protein inhibitor of activated STAT, 2
  ENST ID: ENST00000592212
  CDS Start-End: 1-1611
cacatggctgtaccattttacatccctaccagcaatgtatggagtgatccagtttctcagcatcctcgccagcatttggtgttatcagtgtttttcattttagccattctgaatatggtttctagttttagggtttctgaactacaagtattactaggctttgctggacggaataaaagtggacgcaagcatgacctcctgatgagggcgctgcatttattgaagagcggctgcagccctgcggttcagattaaaatccgagaattgtatagacgccgatatccacgaactcttgaaggactttctgatttatccacaatcaaatcatcggttttcagtttggatggtggctcatcacctgtagaacctgacttggccgtggctggaatccactcgttgccttccacttcagttacacctcactcaccatcctctcctgttggttctgtgctgcttcaagatactaagcccacatttgagatgcagcagccatctcccccaattcctcctgtccatcctgatgtgcagttaaaaaatctgcccttttatgatgtccttgatgttctcatcaagcccacgagtttagttcaaagcagtattcagcgatttcaagagaagttttttatttttgctttgacacctcaacaagttagagagatatgcatatccagggattttttgccaggtggtaggagagattatacagtccaagttcagttgagactttgcctggcagagacaagttgccctcaagaagataactatccaaatagtctatgtataaaagtaaatgggaagctatttcctttgcctggctatgcaccaccgcctaaaaatgggattgaacagaagcgccctggacgccccttgaatattacatctttagttaggttatcttcagctgtgccaaaccaaatttccatttcttgggcatcagaaattgggaagaattactctatgtctgtatatcttgtacggcagcttacatcagccatgttattacagagattaaaaatgaaaggtattagaaaccctgatcattccagagcactaattaaagaaaaacttactgcagatcctgatagtgaaattgctacaactagccttcgggtatccttgatgtgccctttaggaaaaatgaggctgacaatcccatgccgtgcagtgacttgtacacatctgcagtgttttgatgctgccctctatctacaaatgaatgagaaaaagcccacctggatttgtcctgtgtgtgacaaaaaagctgcctatgaaagtctaatattagatgggctttttatggaaattctcaatgactgttctgatgtagatgagatcaaattccaagaagatggttcttggtgtccaatgagaccgaagaaagaagctatgaaagtatccagccaaccgtgtacaaaaatagaaagttcaagcgtcctcagtaagccttgttcagtgactgtagccagtgaggcaagcaagaagaaagtagatgttattgatcttacaatagaaagctcttctgacgaagaggaagaccctcctgccaaaaggaaatgcatctttatgtcagaaacacaaagcagcccaaccaaagggtttgttaatttatagttcactattgttcattacccttgcaactaattgctcttggatagatttataaatgtctctttgggaaatggcataactgtagaaggctattttaatttgcctttgttgagttgaaatattttcgagtaagcacattgtttataggaagcaaattttgatggagaaaatatttacatctttggaaagtgagcgtgtgaggtatttatttcctacctgagactttttgttattttcttgaacctgtttgtaaggaaatttggcatctcagaccagatgagaaagtctggtgtaatggagtgtggaactgggaatctgacaagtatggattccaattttggcacaccatcgcttacttgttctgtgatcttagatgaaatacttaatttgattgagcctcttttttgtgttctgttaaatggagctaaataacgcctatattacaggatcattttcaggttttaatgagatgaaagaaagcctcggtgtcaggcatgtggtaatttcccaataaaaattgattcctttcccttttcaccctctccagggcaaaatataggtgggtaggatggcattctacctgaattttagcgtggattctctgtaagttatctggcagaaggcattactgacctgcattaaaaatcaggtttgggtatttaacaatagttgctttttcagagaggttttgaaccataaaaggagataacaggagagttctcctggctgtctacgaacacattctttcaaacttgggtttgctagtgtcatctttttggcctcttggtccacttggttttctaatggctttactgagttataatttacatagcataaaatgtacccatcttaagtatataatggcacaattcagtgattttagtaaatacatagagctgtgcaatcatcaccatgattcagtagtagaatattttcaacacccaaaaaactttcttcatgttcttttgtagtttattcctatttacaccccaaatctaggcaatcgtttttttgtgtctataatgcctgtttagacattttatataaaatgtcttgttttgcaacattgtttatttttataattttaagaattaaaccttttcagctgccttctttgctgttaaaatacttacatttccaaatataatttacacatatattaaaggcatatatttacttcta

SEQ ID NO: 170564 - DNA, 2761 bp, Homo sapiens
  Payload ID: 13577
  Gene Symbol: PIAS3
  Gene Name: protein inhibitor of activated STAT, 3
  ENST ID: ENST00000369298
  CDS Start-End: 56-1837
gccggtccctgggcctgagctccggctccggctggggcgcctgcgatgtctcaagatggcggagctgggcgaattaaagcacatggtgatgagtttccgggtgtctgagctccaggtgcttcttggctttgctggccggaacaagagtggacggaagcacgagctcctggccaaggctctgcacctcctgaagtccagctgtgcccctagtgtccagatgaagatcaaagagctttaccgacgacgctttccccggaagaccctggggccctctgatctctcccttctctctttgccccctggcacctctcctcctgtgcaccctgatgtcaccatgaaaccattgcccttctatgaagtctatggggagctcatccggcccaccacccttgcatccacttctagccagcggtttgaggaagcgcactttacctttgccctcacaccccagcaagtgcagcagattcttacatccagagaggttctgccaggagccaaatgtgattataccatacaggtgcagctaaggttctgtctctgtgagaccagctgcccccaggaagattattttccccccaacctctttgtcaaggtcaatgggaaactgtgccccctgccgggttaccttcccccaaccaagaatggggccgagcccaagaggcccagccgccccatcaacatcacacccctggctcgactctcagccactgttcccaacaccattgtggtcaattggtcatctgagttcggacggaattactccttgtctgtgtacctggtgaggcagttgactgcaggaacccttctacaaaaactcagagcaaagggtatccggaacccagaccactcgcgggcactgatcaaggagaaattgactgctgaccctgacagtgaggtggccactacaagtctccgggtgtcactcatgtgcccgctagggaagatgcgcctgactgtcccttgtcgtgccctcacctgcgcccacctgcagagcttcgatgctgccctttatctacagatgaatgagaagaagcctacatggacatgtcctgtgtgtgacaagaaggctccctatgaatctcttatcattgatggtttatttatggagattcttagttcctgttcagattgtgatgagatccaattcatggaagatggatcctggtgcccaatgaaacccaagaaggaggcatctgaggtttgccccccgccagggtatgggctggatggcctccagtacagcccagtccaggggggagatccatcagagaataagaagaaggtcgaagttattgacttgacaatagaaagctcatcagatgaggaggatctgccccctaccaagaagcactgttctgtcacctcagctgccatcccggccctacctggaagcaaaggagtcctgacatctggccaccagccatcctcggtgctaaggagccctgctatgggcacgttgggtggggatttcctgtccagtctcccactacatgagtacccacctgccttcccactgggagccgacatccaaggtttagatttattttcatttcttcagacagagagtcagcactatggcccctctgtcatcacctcactagatgaacaggatgcccttggccacttcttccagtaccgagggaccccttctcactttctgggcccactggcccccacgctggggagctcccactgcagcgccactccggcgccccctcctggccgtgtcagcagcattgtggcccctgggggggccttgagggaggggcatggaggacccctgccctcaggtccctctttgactggctgtcggtcagacatcatttccctggactgagttccctggattatggaaacttcgctgtcccccaacactgagcaagtatgctgtggagtcccaaccccagctactctgatccctctgggggctctggccaagggccagacagaccttcacagatgcctacttttggcctcatctctgcctgacaaggccagcacccaaagggttaatatttaacctctttttaaggacactggggtctgtttctggaaatgttctttagatggtggcacattcctttgggtatgttaacctaggcagtgggaggcaaatgggatggtatgtgagctaggagaagggctgaaccctcagccttgactatgtctagagcctcttggggaaggggcacctctcttgaaccccaaatgctctctcttcttattacccaaacccatggctctatttcttcttcacatccattgtctcttcatgtctattccattcccttcggccaaacagacaggtggaaaaactgagacaggcagtttcagagatggacagagaactttattttggattgtggatgtggacttttttgtacataaataagaaaaaccaaaatactccaaagatgacttcccctgcctcctactccagtatgacagaggaggatgtaaggccttagccatgatctgcaggggtctgggagtcaggcccggcctattgcttgggtctctctctatttatatatctaagttcacagtgtttcttattcccccctaagcttctagaggctcatggccctgtagttaggcctggctcattctgcacctttccagggaggtggaaggaccctgtgccctccttcccaatcttctttttcaggctcgccaaggcctaggacctatgttgtaattttactttttatttctaaagttgtagtgaagctctcacccataataaaggttgtgaatgttc

SEQ ID NO: 170565 - DNA, 2901 bp, Homo sapiens
  Payload ID: 13577
  Gene Symbol: PIAS3
  Gene Name: protein inhibitor of activated STAT, 3
  Uniprot ID: Q9Y6X2
  ENST ID: ENST00000393045
  CDS Start-End: 91-1977
gcatttgcggccggcgccagggtggagagttgtgcgccggtccctgggcctgagctccggctccggctggggcgcctgcgatgtctcaagatggcggagctgggcgaattaaagcacatggtgatgagtttccgggtgtctgagctccaggtgcttcttggctttgctggccggaacaagagtggacggaagcacgagctcctggccaaggctctgcacctcctgaagtccagctgtgcccctagtgtccagatgaagatcaaagagctttaccgacgacgctttccccggaagaccctggggccctctgatctctcccttctctctttgccccctggcacctctcctgtaggctcccctggtcctctagctcccattcccccaacgctgttggcccctggcaccctgctgggccccaagcgtgaggtggacatgcacccccctctgccccagcctgtgcaccctgatgtcaccatgaaaccattgcccttctatgaagtctatggggagctcatccggcccaccacccttgcatccacttctagccagcggtttgaggaagcgcactttacctttgccctcacaccccagcaagtgcagcagattcttacatccagagaggttctgccaggagccaaatgtgattataccatacaggtgcagctaaggttctgtctctgtgagaccagctgcccccaggaagattattttccccccaacctctttgtcaaggtcaatgggaaactgtgccccctgccgggttaccttcccccaaccaagaatggggccgagcccaagaggcccagccgccccatcaacatcacacccctggctcgactctcagccactgttcccaacaccattgtggtcaattggtcatctgagttcggacggaattactccttgtctgtgtacctggtgaggcagttgactgcaggaacccttctacaaaaactcagagcaaagggtatccggaacccagaccactcgcgggcactgatcaaggagaaattgactgctgaccctgacagtgaggtggccactacaagtctccgggtgtcactcatgtgcccgctagggaagatgcgcctgactgtcccttgtcgtgccctcacctgcgcccacctgcagagcttcgatgctgccctttatctacagatgaatgagaagaagcctacatggacatgtcctgtgtgtgacaagaaggctccctatgaatctcttatcattgatggtttatttatggagattcttagttcctgttcagattgtgatgagatccaattcatggaagatggatcctggtgcccaatgaaacccaagaaggaggcatctgaggtttgccccccgccagggtatgggctggatggcctccagtacagcccagtccaggggggagatccatcagagaataagaagaaggtcgaagttattgacttgacaatagaaagctcatcagatgaggaggatctgccccctaccaagaagcactgttctgtcacctcagctgccatcccggccctacctggaagcaaaggagtcctgacatctggccaccagccatcctcggtgctaaggagccctgctatgggcacgttgggtggggatttcctgtccagtctcccactacatgagtacccacctgccttcccactgggagccgacatccaaggtttagatttattttcatttcttcagacagagagtcagcactatggcccctctgtcatcacctcactagatgaacaggatgcccttggccacttcttccagtaccgagggaccccttctcactttctgggcccactggcccccacgctggggagctcccactgcagcgccactccggcgccccctcctggccgtgtcagcagcattgtggcccctgggggggccttgagggaggggcatggaggacccctgccctcaggtccctctttgactggctgtcggtcagacatcatttccctggactgagttccctggattatggaaacttcgctgtcccccaacactgagcaagtatgctgtggagtcccaaccccagctactctgatccctctgggggctctggccaagggccagacagaccttcacagatgcctacttttggcctcatctctgcctgacaaggccagcacccaaagggttaatatttaacctctttttaaggacactggggtctgtttctggaaatgttctttagatggtggcacattcctttgggtatgttaacctaggcagtgggaggcaaatgggatggtatgtgagctaggagaagggctgaaccctcagccttgactatgtctagagcctcttggggaaggggcacctctcttgaaccccaaatgctctctcttcttattacccaaacccatggctctatttcttcttcacatccattgtctcttcatgtctattccattcccttcggccaaacagacaggtggaaaaactgagacaggcagtttcagagatggacagagaactttattttggattgtggatgtggacttttttgtacataaataagaaaaaccaaaatactccaaagatgacttcccctgcctcctactccagtatgacagaggaggatgtaaggccttagccatgatctgcaggggtctgggagtcaggcccggcctattgcttgggtctctctctatttatatatctaagttcacagtgtttcttattcccccctaagcttctagaggctcatggccctgtagttaggcctggctcattctgcacctttccagggaggtggaaggaccctgtgccctccttcccaatcttctttttcaggctcgccaaggcctaggacctatgttgtaattttactttttatttctaaagttgtagtgaagctctcacccataataaaggttgtgaatgttc

SEQ ID NO: 170566 - DNA, 952 bp, Homo sapiens
  Payload ID: 13577
  Gene Symbol: PIAS3
  Gene Name: protein inhibitor of activated STAT, 3
  ENST ID: ENST00000393046
  CDS Start-End: 176-952
gctaggccgggcggagctccggcccgggcggagccgcggccgccgcgtccggctgctggaccgaacttctgccgtgcggacagcaggagcagcgccgagccccattcccccacctctccagctcgccctctgagcctcccgagccctctctccatttcccacaattgtgctgcacatggtgatgagtttccgggtgtctgagctccaggtgcttcttggctttgctggccggaacaagagtggacggaagcacgagctcctggccaaggctctgcacctcctgaagtccagctgtgcccctagtgtccagatgaagatcaaagagctttaccgacgacgctttccccggaagaccctggggccctctgatctctcccttctctctttgccccctggcacctctcctgtaggctcccctggtcctctagctcccattcccccaacgctgttggcccctggcaccctgctgggccccaagcgtgaggtggacatgcacccccctctgccccagcctgtgcaccctgatgtcaccatgaaaccattgcccttctatgaagtctatggggagctcatccggcccaccacccttgcatccacttctagccagcggtttgaggaagcgcactttacctttgccctcacaccccagcaagtgcagcagattcttacatccagagaggttctgccaggagccaaatgtgattataccatacaggtgcagctaaggttctgtctctgtgagaccagctgcccccaggaagattattttccccccaacctctttgtcaaggtcaatgggaaactgtgccccctgccgggttaccttcccccaaccaagaatggggccgagcccaagaggcccagccgccccatcaacatcacacccctggctcgactctcagccactgttcccaacaccattgtggtcaattggtcatctgagttcggacgg

SEQ ID NO: 170567 - DNA, 429 bp, Homo sapiens
  Payload ID: 13577
  Gene Symbol: PIAS3
  Gene Name: protein inhibitor of activated STAT, 3
  ENST ID: ENST00000463514
  CDS Start-End: 154-429
gcgccgagccccattcccccacctctccagctcgccctctgagcctcccgagccctctctccatttcccacaattgtgctggaggctgggatgggtttgagagtctgagaaagggcaagagaggagataagcagcttaaagcagagtccagggatggaggcgggaggctgcatggactcggagcacatggtgatgagtttccgggtgtctgagctccaggtgcttcttggctttgctggccggaacaagagtggacggaagcacgagctcctggccaaggctctgcacctcctgaagtccagctgtgcccctagtgtccagatgaagatcaaagagctttaccgacgacgctttccccggaagaccctggggccctctgatctctcccttctctctttgccccctggcacctctcctgtaggctcccct

SEQ ID NO: 170568 - DNA, 3159 bp, Homo sapiens
  Payload ID: 13578
  Gene Symbol: PIAS4
  Gene Name: protein inhibitor of activated STAT, 4
  Uniprot ID: Q8N2W9
  ENST ID: ENST00000262971
  CDS Start-End: 116-1648
ggaggagcgcgcgcgggtgctaattggcccgggcggcggccccgcccgcgagtggtgagcggtcacgtgacgcgacggctgggggctcccggcgcgggggacgctggtgaccaagatggcggcggagctggtggaggccaaaaacatggtgatgagttttcgagtctccgaccttcagatgctcctgggtttcgtgggccggagtaagagtggactgaagcacgagctcgtcaccagggccctccagctggtgcagtttgactgtagccctgagctgttcaagaagatcaaggagctgtacgagacccgctacgccaagaagaactcggagcctgccccacagccgcaccggcccctggaccccctgaccatgcactccacctacgaccgggccggcgctgtgcccaggactccgctggcaggccccaatattgactaccccgtgctctacggaaagtacttaaacggactgggacggttgcccgccaagaccctcaagccagaagtccgcctggtgaagctgccgttctttaatatgctggatgagctgctgaagcccaccgaattagtcccacagaacaacgagaagcttcaggagagcccgtgcatcttcgcattgacgccaagacaggtggagttgatccggaactccagggaactgcagcccggagttaaagccgtgcaggtcgtcctgagaatctgttactcagacaccagctgccctcaggaggaccagtacccgcccaacatcgctgtgaaggtcaaccacagctactgctccgtcccgggctactacccctccaataagcccggggtggagcccaagaggccgtgccgccccatcaacctcacccacctcatgtacctgtcctcggccaccaaccgcatcactgtcacctgggggaactacggcaagagctactcggtggccctgtacctggtgcggcagctgacctcatcggagctgctgcagaggctgaagaccattggggtaaagcacccggagctgtgcaaggcactggtcaaggagaagctgcgccttgatcctgacagcgagatcgccaccaccggtgtgcgggtgtccctcatctgtccgctggtgaagatgcggctctccgtgccctgccgggcagagacctgtgcccacctgcagtgcttcgacgccgtcttctacctgcagatgaacgagaagaagcccacctggatgtgccccgtgtgcgacaagccagccccctacgaccagctcatcatcgacgggctcctctcgaagatcctgagcgagtgtgaggacgccgacgagatcgagtacctggtggacggctcgtggtgcccgatccgcgccgaaaaggagcgcagctgcagcccgcagggcgccatcctcgtgctgggcccctcggacgccaatgggctcctgcccgcccccagcgtcaacgggagcggtgccctgggcagcacgggtggcggcggcccggtgggcagcatggagaatgggaagccgggcgccgatgtggtggacctcacgctggacagctcatcgtcctcggaggatgaggaggaggaggaagaggaggaggaagacgaggacgaagaggggccccggcccaagcgccgctgccccttccagaagggcctggtgccggcctgctgaccccggccgcacactcgactttcctggtgctcaccacgcagaggggcacgggccagcctcgggcgcagagggaggagtgacctttctttttctttttattgtcgttcgttttgtttttccacccttttgcctggctcctggcacctgtacctctggactctcctatcgggggattaaaaaaaaaagtaaaatgacaaaaaaagatacaaaaaagaaaaatgaaacaaaaaagtcaaactcttaaaaacaaggccggccacccacacagccgcctccccggctggagtccgagccgggaaggggtagtgggcgggagggaccaggacgccgccccgcgccctcccctccggatgccccgccgcccgccgccctctgcccacgaccattccagccagtgcgcggggacccgggcggcgggcggtggggcgcagcccctctctggcgaccactttgacgtttgtctcttcctttgctttttctctgcaaatgcatcctcgcccagagaccctcacgcgccgagcagcgagcgttttagccgagaagccatggagtgggttggggcggggaggggcagtagggtggggggatgggtgggcaggatgggggtacagtgggcggctggggagggtttagccacagatgtgttgtattttttgaaagtgcaataatttggtattttgaagacccggcgtgtggtcaggaacccccggggaaggcgggggcccagggtgcggcaccgtgtggcgtgggggggtctcagttttctagccagctacctcggtaattccaattcaggttaacttccctacggaacagcacagatgtccacagatgtccacagctgccgccgccgccgccgccaccataccccggtccttggggcatgggttgcggtcgcttcccaaggggcagcagggaccccggccaccccggctctcggtttgggttgattcctctcctttttgctcttggttttccgacgggtacgaggctggcccggcaccctgtcccccgggagcctcactcttccagcaggaccagaccaggggcctccttcctgtccccaggcgttcccggcccctcgcaggccccacccatgcccttggcctcagggtccaacaactgggggagctaccagggctctgccttcaggagcccacagctgggcaccccccttgccccgcaggagaccggggcgcaggcggggcaccggcctcacctggttctccaacaccgctgcctgcggtctgttttgcttttgtcctccccagcccagaattttcctttgtataaacagaactcctagtcaggaagcaatatcatttcaggtctaaagaaagggacgtgcatctggccgagggcagttcagtctcactgcagagcccgcagcccgctgcgcagctcggcccctcccgcccgcacgggcagctgaaggccgctgttttctaatatttgtattctaatttaattgtttttaaaaaatgcaaataaaaaaggtcgaggtgaagcca

SEQ ID NO: 170569 - DNA, 1566 bp, Homo sapiens
  Payload ID: 13579
  Gene Symbol: PROCA1
  Gene Name: protein interacting with cyclin A1
  Uniprot ID: Q8NCQ7
  ENST ID: ENST00000301039
  CDS Start-End: 195-1205
gggaagactacgcagcctggagccgggctggggaggccggcgggggctgcgccagcatgaggcggggttaggggctaggcgggggcgaagccgagactggagttcacggctgggccgagggctcggccgggctgaggctcagggttggacttcacgcaagagtcctgtagagacgaagacctgggcggagagcgatgtgggtcaggacgacgctcacaattgaaagatggactaaggaaaagaccgagcccaaggcccgctcgtgggatgagagcagatgccgcggtgactgcaaggagcctgacaagtgctgctggagacacaagcagtgcactgggcacatcatctaccctttcgcctctgactgtgtccgccacagcctgcacctacactctgtcaaccactgcaactgtaattctaggctgaaggactcttcagaggatagcagcagctcccggggcgcgggcccaacctgctcccatgtcatcgagtccccttgctttgagctcacaccggaggaggagcatgtggagcgattccggtatggctggtgcaaaagctacagacctgtctctgtggcagtgatccaccatccactctaccatgagtgtggggcagatgatctaaatgaagaagaggaagaggaggaggaggaaagcaagccccccatcccgacacaggtggggcccgccaccgcctcccctgacctaggcaccagcatggccactggtacccctgactccacagcgcccatcaccatctggcgctctgagagccccacagggaagggtcagggcagcaaggtgatcaagaaggtaaagaagaaaaaggaaaaagagaaagacaaggaggagatggatgagaaggcaaagctgaagaaaaaagccaagaaaggccagttgactaagaagaaaagcccggttaaattggagccttccccgccagacgtgagccgatcattaagcgcaagacagctggccaggatgtccgagtccagcccagaaagccgggaagagctggagagcgaggacagttacaatggccgggggcagggagaactgtccagcgaggatattgtggaatcatcatcgcccaggaagagagagaacacagtccaggccaaaaagacaggggcaaagccctcacaagccaggaaggtaaacaagagaaaatctcccccaggatcaaaccccaacctcagttgaggccagggtggtcagggtgcagaataaatgccatcgagcctgtggctggccctctgctgctgttctctccctccaacctggctgtttcttgcggggcaaggggtgggctcagggctgcaggggtttctcaaaggcaatccagctttcacaaaggaagcccatgggaaggcaggtgggagggaaaggaaggggcacagccctatttcttcctacctgctaggacaaggtggaagagtgtatctggggtgggaaggagggcttcccctctctgctgcgagagactggtctgtgtgaaatccacttctgggacaggcagtactgtctgcagcgatacccccaataaacggaactttttaaccca

SEQ ID NO: 170570 - DNA, 1137 bp, Homo sapiens
  Payload ID: 13579
  Gene Symbol: PROCA1
  Gene Name: protein interacting with cyclin A1
  ENST ID: ENST00000439862
  CDS Start-End: 1-1095
atgtgggtcaggacgacgctcacaattgaaagatggactaaggaaaagaccgagcccaaggcccgctcgtgggatgaggctctctcagatgtaaacaggttacccagctgggagagaggacatctgctggctggtgtggcgtccagcactgatgtgtctaccttctctgaaggtggtgactgcaaggagcctgacaagtgctgctggagacacaagcagtgcactgggcacatcatctaccctttcgcctctgactgtgtccgccacagcctgcacctacactctgtcaaccactgcaactgtaattctaggctgaaggactcttcagaggatagcagcagctcccggggcgcgggcccaacctgctcccatgtcatcgagtccccttgctttgagctcacaccggaggaggagcatgtggagcgattccggtatggctggtgcaaaagctacagacctgtctctgtggcagtgatccaccatccactctaccatgagtgtggggcagatgatctaaatgaagaagaggaagaggaggaggaggaaagcaagccccccatcccgacacaggtggggcccgccaccgcctcccctgacctaggcaccagcatggccactggtacccctgactccacagcgcccatcaccatctggcgctctgagagccccacagggaagggtcagggcagcaaggtgatcaagaaggtaaagaagaaaaaggaaaaagagaaagacaaggaggagatggatgagaaggcaaagctgaagaaaaaagccaagaaaggccagttgactaagaagaaaagcccggttaaattggagccttccccgccagacgtgagccgatcattaagcgcaagacagctggccaggatgtccgagtccagcccagaaagccgggaagagctggagagcgaggacagttacaatggccgggggcagggagaactgtccagcgaggatattgtggaatcatcatcgcccaggaagagagagaacacagtccaggccaaaaagacaggggcaaagccctcacaagccaggaaggtaaacaagagaaaatctcccccaggatcaaaccccaacctcagttgaggccagggtggtcagggtgcagaataaatgccatcgagcctg

SEQ ID NO: 170571 - DNA, 848 bp, Homo sapiens
  Payload ID: 13579
  Gene Symbol: PROCA1
  Gene Name: protein interacting with cyclin A1
  ENST ID: ENST00000473751
  CDS Start-End: 23-481
acgaagacctgggcggagagcgatgtgggtcaggacgacgctcacaattgaaagatggactaaggaaaagaccgagcccaaggcccgctcgtgggatgagagcagatgccgcgatgtaaacaggttacccagctgggagagaggacatctgctggctggtgtggcgtccagcactgatgtgtctaccttctctgaaggtgactgcaaggagcctgacaagtgctgctggagacacaagcagtgcactgggcacatcatctaccctttcgcctctgactgtgtccgccacagcctgcacctacactctgtcaaccactgcaactgtaattctagctttgaattggtgctgccagcccagtcccagctctgcacaccttgctctgctctaagagaaatggggaggaggtctgttggcctgaggcaggcccagcggaagcccactgtccctcaggcttctggctctgggtccctgggggagtgatgggagccaggctgagagtcccatgtgtggcaggctgaaggactcttcagaggatagcagcagctcccggggcgcgggcccaacctgctcccatgtcatcgagtccccttgctttgagctcacaccggaggaggagcatgtggagcgattccggtatggctggtgcaaaagctacagacctgtctctgtggcagtgatccaccatccactctaccatgagtgtggggcagatgatctaaatgaagaagaggaagaggaggaggaggaaagcaagccccccatcccgacacaggtggggcccgccaccgcctcccctgacctaggcaccagcatggccactggtacccctgactccacagcgcccatc

SEQ ID NO: 170572 - DNA, 766 bp, Homo sapiens
  Payload ID: 13579
  Gene Symbol: PROCA1
  Gene Name: protein interacting with cyclin A1
  ENST ID: ENST00000581289
  CDS Start-End: 88-213
ggctgggccgagggctcggccgggctgaggctcagggttggacttcacgcaagagtcctgtagagacgaagacctgggcggagagcgatgtgggtcaggacgacgctcacaattgaaagatggactaaggaaaagaccgagcccaaggcccgctcgtgggatgagagcagatgccgcggtgcaaaagctacagacctgtctctgtggcagtgatccaccatccactctaccatgagtgtggggcagatgatctaaatgaagaagaggaagaggaggaggaggaaagcaagccccccatcccgacacaggtggggcccgccaccgcctcccctgacctaggcaccagcatggccactggtacccctgactccacagcgcccatcaccatctggcgctctgagagccccacagggaagggtcagggcagcaaggtgatcaagaaggtaaagaagaaaaaggaaaaagagaaagacaaggaggagatggatgagaaggcaaagctgaagaaaaaagccaagaaaggccagttgactaagaagaaaagcccggttaaattggagccttccccgccagacgtgagccgatcattaagcgcaagacagctggccaggatgtccgagtccagcccagaaagccgggaagagctggagagcgaggacagttacaatggccgggggcagggagaactgtccagcgaggatattgtggaatcatcatcgcccaggaagagagagaacacagtccaggccaaaaagacaggggcaaa

SEQ ID NO: 170573 - DNA, 811 bp, Homo sapiens
  Payload ID: 13579
  Gene Symbol: PROCA1
  Gene Name: protein interacting with cyclin A1
  ENST ID: ENST00000415329
  CDS Start-End: 482-811
ggtggctggaagagaagaaagaagtgaagacactgagctcactgaaggtgactgcaaggagcctgacaagtgctgctggagacacaagcagtgcactgggcacatcatctaccctttcgcctctgactgtgtccgccacagcctgcacctacactctgtcaaccactgcaactgtaattctaggctgaaggactcttcagaggatagcagcagctcccggggcgcgggcccaacctgctcccatgtcatcgagtccccttgctttgagctcacaccggaggaggagcatgtggagcgattccggtatggctggtgcaaaagctacagacctgtctctgtggcagtgatccaccatccactctaccatgagtgtggggcagatgatctaaatgaagaagaggaagaggaggaggaggaaagcaagccccccatcccgacacaggtggggcccgccaccgcctcccctgacctaggcaccagcatggccactggtacccctgactccacagcgcccatcaccatctggcgctctgagagccccacagggaagggtcagggcagcaaggtgatcaagaaggtaaagaagaaaaaggaaaaagagaaagacaaggaggagatggatgagaaggcaaagctgaagaaaaaagccaagaaaggccagttgactaagaagaaaagcccggttaaattggagccttccccgccagacgtgagccgatcattaagcgcaagacagctggccaggatgtccgagtccagcccagaaagccgggaagagctggagagcgaggacagttacaatggccggggg

SEQ ID NO: 170574 - DNA, 2055 bp, Homo sapiens
  Payload ID: 13580
  Gene Symbol: PICK1
  Gene Name: protein interacting with PRKCA 1
  Uniprot ID: Q9NRD5
  ENST ID: ENST00000356976
  CDS Start-End: 239-1486
aatcgcggccaccgccaggtggaacggcaggtgggttcaggtaccagcctggccgggacccggctgtgggaccaacgcttccggtgagcgacagaggcagctccccagggcctggagacccgtggggcggactctgggatctgagcctatcgccctggcctggagcccccctttgtacctattccccattcccctaccgagctgggcagttagccagcccactccaactctcggaaccatgtttgcagacttggattatgacatcgaagaggataaactcggaatcccgactgtgcctgggaaggtgaccctgcagaaggatgctcagaacctgatcgggatcagcattggaggaggggcccagtactgtccctgcctctatatcgtccaggtatttgacaacaccccagcagccttggacggcacagtggcagctggcgatgagatcaccggtgtcaatggcaggtcaatcaaagggaaaactaaggtggaggtggcgaagatgattcaggaggtgaagggggaggtgaccatccactacaacaagctgcaggcggaccccaagcagggcatgtccctggacattgtgttgaagaaagtcaagcaccggctggtggagaacatgagttcagggaccgcagatgctctgggcctgagccgggccatcctgtgcaatgatgggcttgtcaagaggctagaggagctggagcggaccgctgagctatacaaagggatgacggaacacaccaagaacctcctacgggccttttatgagctgtcgcagactcaccgggcctttggggacgtgttctccgtgatcggggtgcgggagccccagccagctgcgagcgaggcttttgtgaagttcgccgatgcccaccgcagcatcgagaagttcggcattcggcttctgaaaaccatcaagccgatgctgacggatctgaacacgtacctcaacaaagccatcccggacactcgcctcaccatcaagaagtacctggacgtgaagtttgagtacctgtcgtactgcctgaaggtgaaggagatggatgacgaggaatacagctgcattgccctaggcgagcccctttaccgggtgagcaccggcaactatgagtaccgcctgatcctgcgctgccgccaggaggcgcgcgcccgcttctcccagatgcgcaaggatgtgctggagaagatggagctgctggaccagaagcacgtccaggacatcgtgttccagctgcagcgcctcgtgtccaccatgtccaagtactacaacgactgctacgcagtgctgcgggatgccgacgtcttccccatcgaggtagacctggcgcacaccacattggcctatggcctcaaccaggaggagttcacagatggggaggaggaggaggaggaggaagacacggcagctggggagccgtccagggatacacgaggggctgctgggcccttggacaagggtggaagctggtgtgactcctgagtgccccgcggctgtggtgccgggggcagggtgcgtgggaggacggagcctgggagcggggcggggccgccgcgcaagggggcgacgcataaaggcctgctggcttggggcgcctgcctccctgctcctctgtcctcgcacagcgaacctgggctcctgcccaggacaggcaccagggtcatggcctgggacctggacactggcccctccaccctccctcccctcccggctccccggccagagggagagcttggtctctggacctgccttaggaaggagagggagggcaggaaggaaaagaaaggacttggaggtggcaggagtccgagccctgctccttgtgggcgctcacactgcccccggagcctgctgggagtggggccagccgtggacagctgaggttggggtcaatgcctcctgggcacccttgcctcgccccagaccggcccgtccagtccccatcacacctcggcggcctttatttattctgttcccccagctcggccacttctctgaaggagggctgggttctgggcctgtatcgaataaacacaaacctggatggcgca

SEQ ID NO: 170575 - DNA, 2164 bp, Homo sapiens
  Payload ID: 13580
  Gene Symbol: PICK1
  Gene Name: protein interacting with PRKCA 1
  Uniprot ID: Q9NRD5
  ENST ID: ENST00000404072
  CDS Start-End: 348-1595
ggcggggttagacgctgtcagcctgtccagaccgttcctctgttttcgcttgttcctactaacagcgagcttccgccaatacttgttctcgttcttggttccgagcgtcccgggagccgggaagggaaggattgtctgcagggattggagcaaatatccagtggggggaaagccgggacttccgcgtcttgccggaagtgacgtgacaatcgcggccaccgccaggtggaacggcaggtgggttcaggtaccagcctggccgggacccggctgtgggaccaacgcttccgttccccattcccctaccgagctgggcagttagccagcccactccaactctcggaaccatgtttgcagacttggattatgacatcgaagaggataaactcggaatcccgactgtgcctgggaaggtgaccctgcagaaggatgctcagaacctgatcgggatcagcattggaggaggggcccagtactgtccctgcctctatatcgtccaggtatttgacaacaccccagcagccttggacggcacagtggcagctggcgatgagatcaccggtgtcaatggcaggtcaatcaaagggaaaactaaggtggaggtggcgaagatgattcaggaggtgaagggggaggtgaccatccactacaacaagctgcaggcggaccccaagcagggcatgtccctggacattgtgttgaagaaagtcaagcaccggctggtggagaacatgagttcagggaccgcagatgctctgggcctgagccgggccatcctgtgcaatgatgggcttgtcaagaggctagaggagctggagcggaccgctgagctatacaaagggatgacggaacacaccaagaacctcctacgggccttttatgagctgtcgcagactcaccgggcctttggggacgtgttctccgtgatcggggtgcgggagccccagccagctgcgagcgaggcttttgtgaagttcgccgatgcccaccgcagcatcgagaagttcggcattcggcttctgaaaaccatcaagccgatgctgacggatctgaacacgtacctcaacaaagccatcccggacactcgcctcaccatcaagaagtacctggacgtgaagtttgagtacctgtcgtactgcctgaaggtgaaggagatggatgacgaggaatacagctgcattgccctaggcgagcccctttaccgggtgagcaccggcaactatgagtaccgcctgatcctgcgctgccgccaggaggcgcgcgcccgcttctcccagatgcgcaaggatgtgctggagaagatggagctgctggaccagaagcacgtccaggacatcgtgttccagctgcagcgcctcgtgtccaccatgtccaagtactacaacgactgctacgcagtgctgcgggatgccgacgtcttccccatcgaggtagacctggcgcacaccacattggcctatggcctcaaccaggaggagttcacagatggggaggaggaggaggaggaggaagacacggcagctggggagccgtccagggatacacgaggggctgctgggcccttggacaagggtggaagctggtgtgactcctgagtgccccgcggctgtggtgccgggggcagggtgcgtgggaggacggagcctgggagcggggcggggccgccgcgcaagggggcgacgcataaaggcctgctggcttggggcgcctgcctccctgctcctctgtcctcgcacagcgaacctgggctcctgcccaggacaggcaccagggtcatggcctgggacctggacactggcccctccaccctccctcccctcccggctccccggccagagggagagcttggtctctggacctgccttaggaaggagagggagggcaggaaggaaaagaaaggacttggaggtggcaggagtccgagccctgctccttgtgggcgctcacactgcccccggagcctgctgggagtggggccagccgtggacagctgaggttggggtcaatgcctcctgggcacccttgcctcgccccagaccggcccgtccagtccccatcacacctcggcggcctttatttattctgttcccccagctcggccacttctctgaaggagggctgggttctgggcctgtatcgaataaacacaaacctggatggcgca

SEQ ID NO: 170576 - DNA, 582 bp, Homo sapiens
  Payload ID: 13580
  Gene Symbol: PICK1
  Gene Name: protein interacting with PRKCA 1
  ENST ID: ENST00000432756
  CDS Start-End: 155-310
actgctgtcccgtatgaggtggtggagggaggggtggcgttggcatttaggcacttgggttccttaaatcctatgctcctttctctcccggatccagttccccattcccctaccgagctgggcagttagccagcccactccaactctcggaaccatgtttgcagacttggattatgacatcgaagaggataaactgtatttgacaacaccccagcagccttggacggcacagtggcagctggcgatgagatcaccggtgtcaatggcaggtcaatcaaagggaaaactaaggtggaggtggcgaagatgattcaggaggtgaagggggaggtgaccatccactacaacaagctgcaggcggaccccaagcagggcatgtccctggacattgtgttgaagaaagtcaagcaccggctggtggagaacatgagttcagggaccgcagatgctctgggcctgagccgggccatcctgtgcaatgatgggcttgtcaagaggctagaggagctggagcggaccgctgagctatacaaagggatgacggaacacaccaagaacctcctacgggccttttatgagctg

SEQ ID NO: 170577 - DNA, 559 bp, Homo sapiens
  Payload ID: 13580
  Gene Symbol: PICK1
  Gene Name: protein interacting with PRKCA 1
  ENST ID: ENST00000435166
  CDS Start-End: 158-559
ggcactgctgtcccgtatgaggtggtggagggaggggtggcgttggcatttaggcacttgggttccttaaatcctatgctcctttctctcccggatccagttccccattcccctaccgagctgggcagttagccagcccactccaactctcggaaccatgtttgcagacttggattatgacatcgaagaggataaactcggaatcccgactgtgcctgggaaggtgaccctgcagaaggatgctcagaacctgatcgggatcagcattggaggaggggcccagtactgtccctgcctctatatcgtccaggtatttgacaacaccccagcagccttggacggcacagtggcagctggcgatgagatcaccggtgtcaatggcaggtcaatcaaagggaaaactaaggtggaggtggcgaagatgattcaggaggtgaagggggaggtgaccatccactacaacaagctgcaggcggaccccaagcagggcatgtccctggacattgtgttgaagaaagtcaagcaccggctggtggagaacatgagttcagggaccgca

SEQ ID NO: 170578 - DNA, 954 bp, Homo sapiens
  Payload ID: 13580
  Gene Symbol: PICK1
  Gene Name: protein interacting with PRKCA 1
  ENST ID: ENST00000424694
  CDS Start-End: 267-954
agaccgttcctctgttttcgcttgttcctactaacagcgagcttccgccaatacttgttctcgttcttggttccgagcgtcccgggagccgggaagggaaggattgtctgcagggattggagcaaatatccagtggggggaaagccgggacttccgcgtcttgccggaagtgacgtgacaatcgcggccaccgccaggtggaacggcagttccccattcccctaccgagctgggcagttagccagcccactccaactctcggaaccatgtttgcagacttggattatgacatcgaagaggataaactcggaatcccgactgtgcctgggaaggtgaccctgcagaaggatgctcagaacctgatcgggatcagcattggaggaggggcccagtactgtccctgcctctatatcgtccaggtatttgacaacaccccagcagccttggacggcacagtggcagctggcgatgagatcaccggtgtcaatggcaggtcaatcaaagggaaaactaaggtggaggtggcgaagatgattcaggaggtgaagggggaggtgaccatccactacaacaagctgcaggcggaccccaagcagggcatgtccctggacattgtgttgaagaaagtcaagcaccggctggtggagaacatgagttcagggaccgcagatgctctgggcctgagccgggccatcctgtgcaatgatgggcttgtcaagaggctagaggagctggagcggaccgctgagctatacaaagggatgacggaacacaccaagaacctcctacgggccttttatgagctgtcgcagactcaccgggcctttggggacgtgttctccgtgatcggggtgcgggagccccagccagctgcgagcgaggcttttgtgaagttcgccgatgcccaccgcagcatcgagaagttcggcattcggcttctgaaaaccatcaagc

SEQ ID NO: 170579 - DNA, 544 bp, Homo sapiens
  Payload ID: 13580
  Gene Symbol: PICK1
  Gene Name: protein interacting with PRKCA 1
  ENST ID: ENST00000437453
  CDS Start-End: 153-544
aagtgacgtgacaatcgcggccaccgccaggtggaacggcaggtgggttcaggtaccagcctggccgggacccggctgtgggaccaacgcttccgttccccattcccctaccgagctgggcagttagccagcccactccaactctcggaaccatgtttgcagacttggattatgacatcgaagaggataaactcggaatcccgactgtgcctgggaaggtgaccctgcagaaggatgctcagaacctgatcgggatcagcattggaggaggggcccagtactgtccctgcctctatatcgtccaggtatttgacaacaccccagcagccttggacggcacagtggcagctggcgatgagatcaccggtgtcaatggcaggtcaatcaaagggaaaactaaggtggaggtggcgaagatgattcaggaggtgaagggggaggtgaccatccactacaacaagctgcaggcggaccccaagcagggcatgtccctggacattggccagcgcctcggcttccatggcccagggcctcactcttcata

SEQ ID NO: 170580 - DNA, 555 bp, Homo sapiens
  Payload ID: 13580
  Gene Symbol: PICK1
  Gene Name: protein interacting with PRKCA 1
  ENST ID: ENST00000426258
  CDS Start-End: 242-397
gacaatcgcggccaccgccaggtggaacggcaggtgggttcaggtaccagcctggccgggacccggctgtgggaccaacgcttccggtgagcgacagaggcagctccccagggcctggagacccgtggggcggactctgggatctgagcctatcgccctggcctggagcccccctttgtacctattccccattcccctaccgagctgggcagttagccagcccactccaactctcggaaccatgtttgcagacttggattatgacatcgaagaggataaactgtatttgacaacaccccagcagccttggacggcacagtggcagctggcgatgagatcaccggtgtcaatggcaggtcaatcaaagggaaaactaaggtggaggtggcgaagatgattcaggaggtgaagtgttgaagaaagtcaagcaccggctggtggagaacatgagttcagggaccgcagatgctctgggcctgagccgggccatcctgtgcaatgatgggcttgtcaagaggctagaggagctggagcggaccgctgagctatacaaag

SEQ ID NO: 170581 - DNA, 631 bp, Homo sapiens
  Payload ID: 13580
  Gene Symbol: PICK1
  Gene Name: protein interacting with PRKCA 1
  ENST ID: ENST00000445628
  CDS Start-End: 518-631
actcaattagccacctaaggagagagtagggcggggcttccaccggccgtgggatatgtggataatcatccttctgtatctttcttccatggctcctggggcagctggggaagcaagctggatgggcctggccccatgctgccggatgaggtggatgcctggctgtggctctgggagagccaacctcccccagggaacccactttacacaatagcagtggcagcagaggctggcgaggagacaagattcggactctggggagcactgatagcatttcccgagcctcagcgagcttccgccaatacttgttctcgttcttggttccgagcgtcccgggagccgggaagggaaggattgtctgcagggattggagcaaatatccagtggggggaaagccgggacttccgcgtcttgccggaagtgacgtgacaatcgcggccaccgccaggtggaacggcagttccccattcccctaccgagctgggcagttagccagcccactccaactctcggaaccatgtttgcagacttggattatgacatcgaagaggataaactcggaatcccgactgtgcctgggaaggtgaccctgcagaaggatgctcagaacctgatcgggatcagcattgga

SEQ ID NO: 170582 - DNA, 1736 bp, Homo sapiens
  Payload ID: 13581
  Gene Symbol: PKIA
  Gene Name: protein kinase (cAMP-dependent, catalytic) inhibitor alpha
  Uniprot ID: P61925
  ENST ID: ENST00000352966
  CDS Start-End: 142-372
tgctggcaggtggggcgcgggccggcgcgagctgaccgagcactcggcgggcgcggcgggactgcggcccgtggcggcgtgcgcggggacctgcgctgactaggtccggggaagtccctgctatgtggatatttggtagcaatgactgatgtggaaactacatatgcagattttattgcttcaggaagaacaggtagaagaaatgcaatacatgatatcctggtttcctctgcaagtggcaacagcaatgaattagccttgaaattagcaggtcttgatatcaacaagacagaaggtgaagaagatgcacaacgaagttctacagaacaaagtggggaagcccagggagaagcagcaaaatctgaaagctaacaccccactttgaccctcgaccacacctgaaaatgtctcaaatctccaggagtatctggaatgcatttgtttccatgagtgaaaagaggaaaaagaaaatggctgtgctgcattgcaggaacctgctcattatcatgttaaaaatgagggcagaggctgtggctgcaggcagacttttccctacctctgtcattagcaatggttgaaatcatgtggcttgtgtttgggcgtcatttttgtatggatcctttcacttgatcatatgacgaaatgcttatagagagtagctccgacctagatgatgattcttcctgtagcatctggcccctcacaatgtcagaggatttaattgtgtctaattgcgaagggttgattgaaccccagagtttaaatatctctggctcaagtgttcacccagtaaaagaaagatccagaaagcactgtttttagcattacgtatctgtgtgttactgctgtgttatttacactgttttgtattgtacaatatatatgctcagcactgcccccttctctgattgcttatgaaaaacaaaatgatgtacattactgtgaatttttataccactcatttttaaaagggctgtcttttcattttagttttccatactgtggtggtgtacacaggatagaacacccttttttaaaacacagtctttccccttgctcattgtatgttgatgagttgattaagtctaacagattcatcaagactccattgctttattatagagacatttgaaaatatccattaatgtgaatatcacctgaattcagtctgtttggtgtctgcacagactggaattcaatctgtcaaatttgttttattctcaagtggagaacttctcccacataatatatatatatatatatattttaatttatgagaattttggacaattggaaaggtagaaaagaaaagccaagatcatactaaggactggaaatattttgttctatggaatcaaatttctcacaatgctgtatgatactatttaaatttggaggacaacttatcttcactaagctgaatcaggtggagaaagtaatctccttgcaatcatgtggacaccaatcacaaaagtaaagccctggtgttgtgttttcatgtcttttttcagccctctcagatccaaatgttattatgcactttttaatgtttgtaaacttttactaataattagtgtgaattgcattctgatacaataatgattatcattagaagctaacaaaattctcattaatactgtgtttgatggcctctgctgtgttttaacatcgtgcttcttatatggaaagtttttgtgagctgtgtaatccctctggtcagtattatgaaatcattt

SEQ ID NO: 170583 - DNA, 4163 bp, Homo sapiens
  Payload ID: 13581
  Gene Symbol: PKIA
  Gene Name: protein kinase (cAMP-dependent, catalytic) inhibitor alpha
  Uniprot ID: P61925
  ENST ID: ENST00000396418
  CDS Start-End: 487-717
atccataatccagcgatgctgcagctgtaaaagcattaatagaaaatcaatccacaacctcgcggggcagcgatcgtcgagcgccgtttccaggctgccttccctggggtcgggagcggccccgctccccccgtggctggcgcggaatgtggtgatccgtcccggggcggggatgacttcatgcagccggagctccgcggcgggagcggaggctgctgctggcaggtggggcgcgggccggcgcgagctgaccgagcactcggcgggcgcggcgggactgcggcccgtggcggcgtgcgcggggacctgcgctgactaggtccggggaagtttcctgactttctgagaagccctggtttccccaaagaagtgatttctgatagaaatctgaaggtcatctccaagaaaaaagagatctagtatagtcaatgaattaaagacaagaaggtttccaatcagtccctgctatgtggatatttggtagcaatgactgatgtggaaactacatatgcagattttattgcttcaggaagaacaggtagaagaaatgcaatacatgatatcctggtttcctctgcaagtggcaacagcaatgaattagccttgaaattagcaggtcttgatatcaacaagacagaaggtgaagaagatgcacaacgaagttctacagaacaaagtggggaagcccagggagaagcagcaaaatctgaaagctaacaccccactttgaccctcgaccacacctgaaaatgtctcaaatctccaggagtatctggaatgcatttgtttccatgagtgaaaagaggaaaaagaaaatggctgtgctgcattgcaggaacctgctcattatcatgttaaaaatgagggcagaggctgtggctgcaggcagacttttccctacctctgtcattagcaatggttgaaatcatgtggcttgtgtttgggcgtcatttttgtatggatcctttcacttgatcatatgacgaaatgcttatagagagtagctccgacctagatgatgattcttcctgtagcatctggcccctcacaatgtcagaggatttaattgtgtctaattgcgaagggttgattgaaccccagagtttaaatatctctggctcaagtgttcacccagtaaaagaaagatccagaaagcactgtttttagcattacgtatctgtgtgttactgctgtgttatttacactgttttgtattgtacaatatatatgctcagcactgcccccttctctgattgcttatgaaaaacaaaatgatgtacattactgtgaatttttataccactcatttttaaaagggctgtcttttcattttagttttccatactgtggtggtgtacacaggatagaacacccttttttaaaacacagtctttccccttgctcattgtatgttgatgagttgattaagtctaacagattcatcaagactccattgctttattatagagacatttgaaaatatccattaatgtgaatatcacctgaattcagtctgtttggtgtctgcacagactggaattcaatctgtcaaatttgttttattctcaagtggagaacttctcccacataatatatatatatatatatattttaatttatgagaattttggacaattggaaaggtagaaaagaaaagccaagatcatactaaggactggaaatattttgttctatggaatcaaatttctcacaatgctgtatgatactatttaaatttggaggacaacttatcttcactaagctgaatcaggtggagaaagtaatctccttgcaatcatgtggacaccaatcacaaaagtaaagccctggtgttgtgttttcatgtcttttttcagccctctcagatccaaatgttattatgcactttttaatgtttgtaaacttttactaataattagtgtgaattgcattctgatacaataatgattatcattagaagctaacaaaattctcattaatactgtgtttgatggcctctgctgtgttttaacatcgtgcttcttatatggaaagtttttgtgagctgtgtaatccctctggtcagtattatgaaatcatttgtcagtggtaataaataaggaaccagtaatatgccaatggttcatgaattactggacaaatagcagacaatgggagtccctttacaataacgagcccacttagctgtccttgagggcttagataccttgccacgtgaagtaggtagagcagcatttcaataggtaatttgtgtggttgtgccagaaactcagcccttctatgtaattacatacaggataaaaggtaagtctgctcacttctccttctacagggcatttcaactgactggaataagggcatggttgcatttagtactcaatcagatattactagaaaaaaaattaataatgtgagcctttccgagagcagaacgaggaaagattaaattttagaatgcttccttctgtctaatccatcaggggccaaaatgcccagtaaaattcaaacacatcacctattaatagacttacaagtgagaaaagaggttcctagggttattttaggcaatccctggtaaactgtttaaaccatcaaacccctacagtcagttttcagtatcctcatttaatattttaataggtttcttgtgaatttaaacttctcttctttcttaaggttgtgaaattccaaactgattttatgtgattttgaaaagtttagaaccagtgctgagtctatgtggagggtttatattcctatgtgatatactgttattaatgcatgtggtgccatgcttgtctttaaatatataaatagtgctaaattgcaaagtcatatggagctttggatttagtttgacttcttactactgctttgtctgctatattcaaacccaaaggcattcccaagctagggagataaaaattaattttctaaaatgtccacatcctatacattttgcttattcatggcatctttcaaattttattttagtttcctttatttgccaagaatacatatggatttgaatttttaaggagagaaggaaagggtaggaaaccagggccttgggtttagtaacaggcattggatgtctattaaccaactattcttacgctaatggctttgcagctcctattctcccatttgatcctcaaacaattctattagagtggtatttttatccaatttcacagattaaaatataagcactcaataaaatataacctttagaagcttaaaaagctagtaagtgatgaactgaggatttgaacccatgtttgtcaccaaggagctttccagggcacatgtcataaaattagagccaactgcagagctgtaagggaacttttagagatgaacttcttcagcctccatattttacagaaggaaactgaatcccagaaggagaaattgccgttctcaaggctccctggatgggtaataacacagatatgagtaggtcacataaagtatatcttttttaaaaaaaagaaattcaattatgtcttatttggggggtatatttcccagaagatatttttctggcatgtggtctgtaaacacagcatgattcatattttttatgtttcatgctactcattttgtttaattaccaacaaacatggggactttggctttttgacttatttgcaacaagcatgaaattgttaaatttaccttttatcaattgtaatcatcctatgccaacatattatcataaattcatagaaatatttttaaaaataaataacagacattgaaatccaattcttagataatactcccagaacagccaatggtaaatgccctatacttgagtcttacttagatgctgtggtaatgcaccattttagaagatgaatgatactgctatttctcttcagggaaacaataatggataaagaaatgtaactgccgggcagcaaagcttctaagtgaaacctgtagtagcagtagtagtagggagaaaatgtgtagtcatcaagtgaaaataggaaaggatctatgatttatgatgtcttaatagaccctaaattgttctttaattacaagagtggcagtctctgaagtcatttgtgagcttgtatgacttttgtatttagcaatgttgcatgctcacataattgaaaattaaaagtaacacatttttctgaaatgta

SEQ ID NO: 170584 - DNA, 588 bp, Homo sapiens
  Payload ID: 13581
  Gene Symbol: PKIA
  Gene Name: protein kinase (cAMP-dependent, catalytic) inhibitor alpha
  Uniprot ID: P61925
  ENST ID: ENST00000518467
  CDS Start-End: 81-311
aacttctagaatccatcgatgtggaacacttcagtttgtttaacgtaggagactccctgctatgtggatatttggtagcaatgactgatgtggaaactacatatgcagattttattgcttcaggaagaacaggtagaagaaatgcaatacatgatatcctggtttcctctgcaagtggcaacagcaatgaattagccttgaaattagcaggtcttgatatcaacaagacagaaggtgaagaagatgcacaacgaagttctacagaacaaagtggggaagcccagggagaagcagcaaaatctgaaagctaacaccccactttgaccctcgaccacacctgaaaatgtctcaaatctccaggagtatctggaatgcatttgtttccatgagtgaaaagaggaaaaagaaaatggctgtgctgcattgcaggaacctgctcattatcatgttaaaaatgagggcagaggctgtggctgcaggcagacttttccctacctctgtcattagcaatggttgaaatcatgtggcttgtgtttgggcgtcatttttgtatggatcctttcacttgatcatatgacgaaatgctta

SEQ ID NO: 170585 - DNA, 1595 bp, Homo sapiens
  Payload ID: 13582
  Gene Symbol: PKIB
  Gene Name: protein kinase (cAMP-dependent, catalytic) inhibitor beta
  Uniprot ID: Q9C010
  ENST ID: ENST00000258014
  CDS Start-End: 160-417
tatccgcacaggctctagaacttggtttcttgaagaagttgtaggaaagaaagtttatcagaattttttaaacctgtctcagaaataacaacatattttaatcagagatttgctgaagcttcagagatcacctgccaaacacaggctgaacctgacagcatgtcacaccaggatgttgctatgaggacagattcatcaaaaatgactgacgtggagtctggggtcgccaattttgcatcttcagcaagggcaggccgccggaatgccttaccagacatccagagttcagctgccacagacggaacctcagatttgcccctcaaactggaggctctctccgtgaaggaagatgcaaaagagaaagatgaaaaaacaacacaagaccaattggaaaagcctcaaaatgaagaaaaatgaaggctcataatctatcaagagtgctgaatttctgcatgttgaaagacttagtggttctgttttcttgagacatttaatctggtggtaactgtggtaacattgcagccctaagcagcatgtgtatattagataattgtgttgtgatgctactcactttgattgcaatgatgatgtccaaggtaagctattaaaaggcaggttacttccaaatcgcactgaaggaaaaggttaagaataatacatgatcacagaaatgcataccactgtctgtaaacccaacaaaattcactgttctcttttggatttatttagcctgatgtatttttaattcaatttttatggtgatgggcaaatcattcttggtaaatgtaaatcaaacatgattgatttaaaacttcatggaatttgtagaaaattatggacatttttggtgagaaagaacaatagtcaaaactcacatggatagagtgtgtttgttttttgccaaaaatgccccagactttttcccaaacctcaaaaacgtcttggaaaaattgtaaaagtttgataacagaaacatctttaggatatttttgtctgacatattttgcttctagtatgtgcctactgtgatttttttcatgtggaaaatgcaaaatttgtaacaaaatggttatatggaacatgcctattaaatgaattttactatcttccctaactttggtctgtgtatgtgtgtgtgttttactttaatatgaattatacaaaatactagttgttttacactctcttttcttattcttagggcttttgtgtatgtctgacttgtttttaaataacttcctcagcaatgcagaccttaatttttatatttttttaaagtagctaacatagcagtaggcacttaagcatttagtcaatgatattggtagaaatagtaaaatacatcctttaaatatatatctaagcatatattttaaaaggagcaaaaataaaaccaaagtgttagtaaattttgatttattagatattttagaaaaataatagaattctgaagttttaaaaatgtcagtaattaatttattttcattttcagaaatatatgcatgcagttatgttttatttgattgttgacttaggctatgtctgtatacagtaaccaaataaactctttcactattaaagagatttcttactga

SEQ ID NO: 170586 - DNA, 1043 bp, Homo sapiens
  Payload ID: 13582
  Gene Symbol: PKIB
  Gene Name: protein kinase (cAMP-dependent, catalytic) inhibitor beta
  Uniprot ID: Q9C010
  ENST ID: ENST00000354275
  CDS Start-End: 110-346
gggttatttttagcaatctggctcacactgagggcttcctgctctattcagcaaatgtgcaaatggatgctgcaggaccgtaacagtagacattgatgaagatgttgctatgaggacagattcatcaaaaatgactgacgtggagtctggggtcgccaattttgcatcttcagcaagggcaggccgccggaatgccttaccagacatccagagttcagctgccacagacggaacctcagatttgcccctcaaactggaggctctctccgtgaaggaagatgcaaaagagaaagatgaaaaaacaacacaagaccaattggaaaagcctcaaaatgaagaaaaatgaaggctcataatctatcaagagtgctgaatttctgcatgttgaaagacttagtggttctgttttcttgagacatttaatctggtggtaactgtggtaacattgcagccctaagcagcatgtgtatattagataattgtgttgtgatgctactcactttgattgcaatgatgatgtccaaggtaagctattaaaaggcaggttacttccaaatcgcactgaaggaaaaggttaagaataatacatgatcacagaaatgcataccactgtctgtaaacccaacaaaattcactgttctcttttggatttatttagcctgatgtatttttaattcaatttttatggtgatgggcaaatcattcttggtaaatgtaaatcaaacatgattgatttaaaacttcatggaatttgtagaaaattatggacatttttggtgagaaagaacaatagtcaaaactcacatggatagagtgtgtttgttttttgccaaaaatgccccagactttttcccaaacctcaaaaacgtcttggaaaaattgtaaaagtttgataacagaaacatctttaggatatttttgtctgacatattttgcttctagtatgtgcctactgtgatttttttcatgtggaaaatgcaaaatttgtaacaaaatggttatatggaacatgcctattaaatgaattttactatcttccctaa

SEQ ID NO: 170587 - DNA, 556 bp, Homo sapiens
  Payload ID: 13582
  Gene Symbol: PKIB
  Gene Name: protein kinase (cAMP-dependent, catalytic) inhibitor beta
  ENST ID: ENST00000368446
  CDS Start-End: 207-470
ggttatttttagcaatctggctcacactgagggcttcctgctctattcagcaaatgtgcaaatggatgctgcaggaccgtaacagtagacattgatgaaggttgtgatcaatgattagactctcaagcctgttgtgtttttgatctagccatgcctttcaaccactgtggtgaacatttacttctgaataggctcatcttcttcatatgcacattctatttgtagatgttgctatgaggacagattcatcaaaaatgactgacgtggagtctggggtcgccaattttgcatcttcagcaagggcaggccgccggaatgccttaccagacatccagagttcagctgccacagacggaacctcagatttgcccctcaaactggaggctctctccgtgaaggaagatgcaaaagagaaagatgaaaaaacaacacaagaccaattggaaaagcctcaaaatgaagaaaaatgaaggctcataatctatcaagagtgctgaatttctgcatgttgaaagacttagtggttctgttttcttgagacatttaatctggtggt

SEQ ID NO: 170588 - DNA, 1561 bp, Homo sapiens
  Payload ID: 13582
  Gene Symbol: PKIB
  Gene Name: protein kinase (cAMP-dependent, catalytic) inhibitor beta
  Uniprot ID: Q9C010
  ENST ID: ENST00000368448
  CDS Start-End: 628-864
gaaaaaagctaccgtggcacgtgccccggggagtgatgcggtggcccggtttgcacggagagcgggacaccgcctggggagccgcgctcgtagcctgggggcgggacgcggcggccgctccctccgcccccgagtagctgccaccgcctggctgcgccccagcccagtagctcagacgcggccgcatcccggtggactgtagaggcggcagcgagctagagcccgagtcgcagctccgggccgcagagcgctgggcgagcgcgagcgccagggcaccggcagggcaggcagctgcgcgcggctggagtcatgctatactgaaaagacacttcatcaagataactctgggagaagcagaaaaccctgtgccagggacaggaaagataggagaaagaaagtttatcagaattttttaaacctgtctcagaaataacaacatattttaatcagagatttcacctgtgccacaggccaccatggatctgcacctcgatgcccttcggagtcatgagagtgcaagcaatagcagctcaggaagcagcagcagaggagaccagaaaggtcactacctttgcatgaacaacaatggcaaccaggataccatgcttggttctccatgatgttgctatgaggacagattcatcaaaaatgactgacgtggagtctggggtcgccaattttgcatcttcagcaagggcaggccgccggaatgccttaccagacatccagagttcagctgccacagacggaacctcagatttgcccctcaaactggaggctctctccgtgaaggaagatgcaaaagagaaagatgaaaaaacaacacaagaccaattggaaaagcctcaaaatgaagaaaaatgaaggctcataatctatcaagagtgctgaatttctgcatgttgaaagacttagtggttctgttttcttgagacatttaatctggtggtaactgtggtaacattgcagccctaagcagcatgtgtatattagataattgtgttgtgatgctactcactttgattgcaatgatgatgtccaaggtaagctattaaaaggcaggttacttccaaatcgcactgaaggaaaaggttaagaataatacatgatcacagaaatgcataccactgtctgtaaacccaacaaaattcactgttctcttttggatttatttagcctgatgtatttttaattcaatttttatggtgatgggcaaatcattcttggtaaatgtaaatcaaacatgattgatttaaaacttcatggaatttgtagaaaattatggacatttttggtgagaaagaacaatagtcaaaactcacatggatagagtgtgtttgttttttgccaaaaatgccccagactttttcccaaacctcaaaaacgtcttggaaaaattgtaaaagtttgataacagaaacatctttaggatatttttgtctgacatattttgcttctagtatgtgcctactgtgatttttttcatgtggaaaatgcaaaatttgtaacaaaatggttatatggaacatgcctattaaatgaattttactatcttccctaa

SEQ ID NO: 170589 - DNA, 1398 bp, Homo sapiens
  Payload ID: 13582
  Gene Symbol: PKIB
  Gene Name: protein kinase (cAMP-dependent, catalytic) inhibitor beta
  Uniprot ID: Q9C010
  ENST ID: ENST00000368452
  CDS Start-End: 465-701
gaaaaaagctaccgtggcacgtgccccggggagtgatgcggtggcccggtttgcacggagagcgggacaccgcctggggagccgcgctcgtagcctgggggcgggacgcggcggccgctccctccgcccccgagtagctgccaccgcctggctgcgccccagcccagtagctcagacgcggccgcatcccggtggactgtagaggcggcagcgagctagagcccgagtcgcagctccgggccgcagagcgctgggcgagcgcgagcgccagggcaccggcagggcaggcagctgcgcgcggctggagtcatgctatactgaaaagacacttcatcaagataactctgggagaagcagaaaaccctgtgccagggacaggaaagataggagaaagaaagtttatcagaattttttaaacctgtctcagaaataacaacatattttaatcagagatttatgttgctatgaggacagattcatcaaaaatgactgacgtggagtctggggtcgccaattttgcatcttcagcaagggcaggccgccggaatgccttaccagacatccagagttcagctgccacagacggaacctcagatttgcccctcaaactggaggctctctccgtgaaggaagatgcaaaagagaaagatgaaaaaacaacacaagaccaattggaaaagcctcaaaatgaagaaaaatgaaggctcataatctatcaagagtgctgaatttctgcatgttgaaagacttagtggttctgttttcttgagacatttaatctggtggtaactgtggtaacattgcagccctaagcagcatgtgtatattagataattgtgttgtgatgctactcactttgattgcaatgatgatgtccaaggtaagctattaaaaggcaggttacttccaaatcgcactgaaggaaaaggttaagaataatacatgatcacagaaatgcataccactgtctgtaaacccaacaaaattcactgttctcttttggatttatttagcctgatgtatttttaattcaatttttatggtgatgggcaaatcattcttggtaaatgtaaatcaaacatgattgatttaaaacttcatggaatttgtagaaaattatggacatttttggtgagaaagaacaatagtcaaaactcacatggatagagtgtgtttgttttttgccaaaaatgccccagactttttcccaaacctcaaaaacgtcttggaaaaattgtaaaagtttgataacagaaacatctttaggatatttttgtctgacatattttgcttctagtatgtgcctactgtgatttttttcatgtggaaaatgcaaaatttgtaacaaaatggttatatggaacatgcctattaaatgaattttactatcttccctaa

SEQ ID NO: 170590 - DNA, 1811 bp, Homo sapiens
  Payload ID: 13582
  Gene Symbol: PKIB
  Gene Name: protein kinase (cAMP-dependent, catalytic) inhibitor beta
  Uniprot ID: Q9C010
  ENST ID: ENST00000392490
  CDS Start-End: 398-634
gaaaaaagctaccgtggcacgtgccccggggagtgatgcggtggcccggtttgcacggagagcgggacaccgcctggggagccgcgctcgtagcctgggggcgggacgcggcggccgctccctccgcccccgagtagctgccaccgcctggctgcgccccagcccagtagctcagacgcggccgcatcccggtggactgtagaggcggcagcgagctagagcccgagtcgcagctccgggccgcagagcgctgggcgagcgcgagcgccagggcaccggcagggcaggcagctgcgcgcggctggagtcatgctatactgaaaagacacttcatcaagataactctgggagaagcagaaaaccctgtgccagggacaggaaagataggaatgttgctatgaggacagattcatcaaaaatgactgacgtggagtctggggtcgccaattttgcatcttcagcaagggcaggccgccggaatgccttaccagacatccagagttcagctgccacagacggaacctcagatttgcccctcaaactggaggctctctccgtgaaggaagatgcaaaagagaaagatgaaaaaacaacacaagaccaattggaaaagcctcaaaatgaagaaaaatgaaggctcataatctatcaagagtgctgaatttctgcatgttgaaagacttagtggttctgttttcttgagacatttaatctggtggtaactgtggtaacattgcagccctaagcagcatgtgtatattagataattgtgttgtgatgctactcactttgattgcaatgatgatgtccaaggtaagctattaaaaggcaggttacttccaaatcgcactgaaggaaaaggttaagaataatacatgatcacagaaatgcataccactgtctgtaaacccaacaaaattcactgttctcttttggatttatttagcctgatgtatttttaattcaatttttatggtgatgggcaaatcattcttggtaaatgtaaatcaaacatgattgatttaaaacttcatggaatttgtagaaaattatggacatttttggtgagaaagaacaatagtcaaaactcacatggatagagtgtgtttgttttttgccaaaaatgccccagactttttcccaaacctcaaaaacgtcttggaaaaattgtaaaagtttgataacagaaacatctttaggatatttttgtctgacatattttgcttctagtatgtgcctactgtgatttttttcatgtggaaaatgcaaaatttgtaacaaaatggttatatggaacatgcctattaaatgaattttactatcttccctaactttggtctgtgtatgtgtgtgtgttttactttaatatgaattatacaaaatactagttgttttacactctcttttcttattcttagggcttttgtgtatgtctgacttgtttttaaataacttcctcagcaatgcagaccttaatttttatatttttttaaagtagctaacatagcagtaggcacttaagcatttagtcaatgatattggtagaaatagtaaaatacatcctttaaatatatatctaagcatatattttaaaaggagcaaaaataaaaccaaagtgttagtaaattttgatttattagatattttagaaaaataatagaattctgaagttttaaaaatgtcagtaattaatttattttcattttcagaaatatatgcatgcagttatgttttatttgattgttgacttaggctatgtctgtatacagtaaccaaataaactctttcactattaaagagatttcttactg

SEQ ID NO: 170591 - DNA, 1379 bp, Homo sapiens
  Payload ID: 13582
  Gene Symbol: PKIB
  Gene Name: protein kinase (cAMP-dependent, catalytic) inhibitor beta
  Uniprot ID: Q9C010
  ENST ID: ENST00000392491
  CDS Start-End: 448-684
gtcactagacgacacggctgtcttctttcctggagaatttctcaaggactgctggctggaaacttaacggctaatgtggatctgaccgtagtttgccaaattaagaaaacgtttttaccctgttgaagatttgctttaacttcaaaagtgatgacaagaaagtatggacaccccttcaggaccaacctgataagtcactggtttttctttcgtttaaagatgacacactctgaaattaatttgattttgagatttgagaacttggacatacatacttcctatggaaggagtcatgctatactgaaaagacacttcatcaagataactctgggagaagcagaaaaccctgtgccagggacaggaaagataggagaaagaaagtttatcagaattttttaaacctgtctcagaaataacaacatattttaatcagagatttatgttgctatgaggacagattcatcaaaaatgactgacgtggagtctggggtcgccaattttgcatcttcagcaagggcaggccgccggaatgccttaccagacatccagagttcagctgccacagacggaacctcagatttgcccctcaaactggaggctctctccgtgaaggaagatgcaaaagagaaagatgaaaaaacaacacaagaccaattggaaaagcctcaaaatgaagaaaaatgaaggctcataatctatcaagagtgctgaatttctgcatgttgaaagacttagtggttctgttttcttgagacatttaatctggtggtaactgtggtaacattgcagccctaagcagcatgtgtatattagataattgtgttgtgatgctactcactttgattgcaatgatgatgtccaaggtaagctattaaaaggcaggttacttccaaatcgcactgaaggaaaaggttaagaataatacatgatcacagaaatgcataccactgtctgtaaacccaacaaaattcactgttctcttttggatttatttagcctgatgtatttttaattcaatttttatggtgatgggcaaatcattcttggtaaatgtaaatcaaacatgattgatttaaaacttcatggaatttgtagaaaattatggacatttttggtgagaaagaacaatagtcaaaactcacatggatagagtgtgtttgttttttgccaaaaatgccccagactttttcccaaacctcaaaaacgtcttggaaaaattgtaaaagtttgataacagaaacatctttaggatatttttgtctgacatattttgcttctagtatgtgcctactgtgatttttttcatgtggaaaatgcaaaatttgtaacaaaatggttatatggaacatgcctattaaatgaattttactatcttccct

SEQ ID NO: 170592 - DNA, 1936 bp, Homo sapiens
  Payload ID: 13582
  Gene Symbol: PKIB
  Gene Name: protein kinase (cAMP-dependent, catalytic) inhibitor beta
  Uniprot ID: Q9C010
  ENST ID: ENST00000615438
  CDS Start-End: 502-759
gactgcgcatgcgcgtcactagacgacacggctgtcttctttcctggagaatttctcaaggactgctggctggaaacttaacggctaatgtggatctgaccgtagtttgccaaattaagaaaacgtttttaccctgttgaagatttgctttaacttcaaaagtgatgacaagaaagtatggacaccccttcaggaccaacctgataagtcactggtttttctttcgtttaaagatgacacactctgaaattaatttgattttgagatttgagaacttggacatacatacttcctatggaaggagtcatgctatactgaaaagacacttcatcaagataactctgggagaagcagaaaaccctgtgccagggacaggaaagataggagaaagaaagtttatcagaattttttaaacctgtctcagaaataacaacatattttaatcagagatttgctgaagcttcagagatcacctgccaaacacaggctgaacctgacagcatgtcacaccaggatgttgctatgaggacagattcatcaaaaatgactgacgtggagtctggggtcgccaattttgcatcttcagcaagggcaggccgccggaatgccttaccagacatccagagttcagctgccacagacggaacctcagatttgcccctcaaactggaggctctctccgtgaaggaagatgcaaaagagaaagatgaaaaaacaacacaagaccaattggaaaagcctcaaaatgaagaaaaatgaaggctcataatctatcaagagtgctgaatttctgcatgttgaaagacttagtggttctgttttcttgagacatttaatctggtggtaactgtggtaacattgcagccctaagcagcatgtgtatattagataattgtgttgtgatgctactcactttgattgcaatgatgatgtccaaggtaagctattaaaaggcaggttacttccaaatcgcactgaaggaaaaggttaagaataatacatgatcacagaaatgcataccactgtctgtaaacccaacaaaattcactgttctcttttggatttatttagcctgatgtatttttaattcaatttttatggtgatgggcaaatcattcttggtaaatgtaaatcaaacatgattgatttaaaacttcatggaatttgtagaaaattatggacatttttggtgagaaagaacaatagtcaaaactcacatggatagagtgtgtttgttttttgccaaaaatgccccagactttttcccaaacctcaaaaacgtcttggaaaaattgtaaaagtttgataacagaaacatctttaggatatttttgtctgacatattttgcttctagtatgtgcctactgtgatttttttcatgtggaaaatgcaaaatttgtaacaaaatggttatatggaacatgcctattaaatgaattttactatcttccctaactttggtctgtgtatgtgtgtgtgttttactttaatatgaattatacaaaatactagttgttttacactctcttttcttattcttagggcttttgtgtatgtctgacttgtttttaaataacttcctcagcaatgcagaccttaatttttatatttttttaaagtagctaacatagcagtaggcacttaagcatttagtcaatgatattggtagaaatagtaaaatacatcctttaaatatatatctaagcatatattttaaaaggagcaaaaataaaaccaaagtgttagtaaattttgatttattagatattttagaaaaataatagaattctgaagttttaaaaatgtcagtaattaatttattttcattttcagaaatatatgcatgcagttatgttttatttgattgttgacttaggctatgtctgtatacagtaaccaaataaactctttcactattaaagagatttcttactg

SEQ ID NO: 170593 - DNA, 1153 bp, Homo sapiens
  Payload ID: 13583
  Gene Symbol: PKIG
  Gene Name: protein kinase (cAMP-dependent, catalytic) inhibitor gamma
  Uniprot ID: Q9Y2B9
  ENST ID: ENST00000349959
  CDS Start-End: 250-480
aaaagtctgagcccatgttctttaaaatgttgatggtggttgtctgggtgtggaattatgagtgacttgttttgttctttgtacttttctgtgctttttgctttgttttcaataagaggcaataactgtcattttgacagaagccactgtgctggggaactggagctgtcctctctgcagaatgcatctggacttacctctgcccccttgccttctgtccccacaggcctgaggagcgatgcgacaggcatgatggaggtcgagtcctcctactcggacttcatctcctgtgaccggacaggccgtcggaatgcggtccctgacatccagggagactcagaggctgtgagcgtgaggaagctggctggagacatgggcgagctggcactcgagggggcagaaggacaggtggagggaagcgccccagacaaggaagctggcaaccagccccagagcagcgatgggaccacctcgtcttgaatctgaccttgtccaagaaggctggacgagagaccttctgtcccctcccagagggggaaccctggcactggcccagcagcctcttctctgagctccatgtcccagataaaccaggccagactgagaaggctccccagaggcctctgtggcctccactccgggaaagccctctgcccacacccacaggcttcacattcccaccaccttcgcaccgtgcccaggtacactttcaagacactgtaaccacaagatgttatttattgagctggcgccgggacttgggcggggcctgccctacagtgagcagcccacacaggaacgctcctctcgcgagcggcccgggcagggaccctgtcccaacaccaacacctcctctccagcccaatcttctgggtccagacctgcttgtcccttttttagaaaacacttttaaactttttaaaaattttaaaccttttttcagcagatatggagagagctgacaatcaattcacattttttaagccattttagctaaactgtcattgtgcatctctgaggttccctcatggagctccacagatccatttttagggaagggattttggctcaaaacgatctgaccacctctgccctgtccaccaggataagtgacacctaggacccaggaaataaatgccgatgatttgtgtga

SEQ ID NO: 170594 - DNA, 1180 bp, Homo sapiens
  Payload ID: 13583
  Gene Symbol: PKIG
  Gene Name: protein kinase (cAMP-dependent, catalytic) inhibitor gamma
  Uniprot ID: Q9Y2B9
  ENST ID: ENST00000372886
  CDS Start-End: 277-507
aacacccactaaaacctcaaagtgcttttcatttaggagacacggggaagagacagagaggagggtaaagtgagaatcctgcccgcaccacaggtctggactgctaaccttgaatcctggtttcttaaattctgcctccgcttctgactgaggaccactggattttgaggaaactttggtcttaattcccgtactgattagtcaacagtggaaaatctgaagagatgcaagcaggaaaaagaaattaaaccaggcctgaggagcgatgcgacaggcatgatggaggtcgagtcctcctactcggacttcatctcctgtgaccggacaggccgtcggaatgcggtccctgacatccagggagactcagaggctgtgagcgtgaggaagctggctggagacatgggcgagctggcactcgagggggcagaaggacaggtggagggaagcgccccagacaaggaagctggcaaccagccccagagcagcgatgggaccacctcgtcttgaatctgaccttgtccaagaaggctggacgagagaccttctgtcccctcccagagggggaaccctggcactggcccagcagcctcttctctgagctccatgtcccagataaaccaggccagactgagaaggctccccagaggcctctgtggcctccactccgggaaagccctctgcccacacccacaggcttcacattcccaccaccttcgcaccgtgcccaggtacactttcaagacactgtaaccacaagatgttatttattgagctggcgccgggacttgggcggggcctgccctacagtgagcagcccacacaggaacgctcctctcgcgagcggcccgggcagggaccctgtcccaacaccaacacctcctctccagcccaatcttctgggtccagacctgcttgtcccttttttagaaaacacttttaaactttttaaaaattttaaaccttttttcagcagatatggagagagctgacaatcaattcacattttttaagccattttagctaaactgtcattgtgcatctctgaggttccctcatggagctccacagatccatttttagggaagggattttggctcaaaacgatctgaccacctctgccctgtccaccaggataagtgacacctaggacccaggaaataaatgccgatgatttgtgtga

SEQ ID NO: 170595 - DNA, 769 bp, Homo sapiens
  Payload ID: 13583
  Gene Symbol: PKIG
  Gene Name: protein kinase (cAMP-dependent, catalytic) inhibitor gamma
  ENST ID: ENST00000372887
  CDS Start-End: 304-498
aggctgccccggggaggcgctgcggaccggcggcccaggcacggagaggcggcgagaccgcaggagacacggggaagagacagagaggagggtaaagtgagaatcctgcccgcaccacaggtctggactgctaaccttgaatcctggtttcttaaattctgcctccgcttctgactgaggaccactggattttgaggaaactttggtcttaattcccgtactgattagtcaacagtggaaaatctgaagagatgcaagcaggaaaaagaaattaaaccaggcctgaggagcgatgcgacaggcatgatggaggtcgagtcctcctactcggacttcatctcctgtgaccggacaggccgtcggaatgcggtccctgacatccagggagactcagaggctgtgagcgtgaggaagctggctggagacatgggcgagctggcactcgagggggcagagatggatctcactatgttgccctggctggtctcaaactcctaggctcaagcaatcctcctgcctcgcctcccaaagtgctgggatcacaggcatgaaccaccacgcctggcccagggggattccagttccaagccttaagacccaacaaagacacacttcagaactcaggagacaccatggtccctggttcttgtgatttctcccaactatgggtgggagacaagctcacccagggccagcctctccattccttctcacaggacccacctggtaggcctggacatgtccaggcaagaggctgcttcctgggatg

SEQ ID NO: 170596 - DNA, 1489 bp, Homo sapiens
  Payload ID: 13583
  Gene Symbol: PKIG
  Gene Name: protein kinase (cAMP-dependent, catalytic) inhibitor gamma
  Uniprot ID: Q9Y2B9
  ENST ID: ENST00000372889
  CDS Start-End: 586-816
gggcgctaggctgccccggggaggcgctgcggaccggcggcccaggcacggagaggcggcgagaccgcaggagacacggggaagagacagagaggagggtaaagtgagaatcctgcccgcaccacaggtctggactgctaaccttgaatcctggtttcttaaattctgcctccgcttctgactgaggaccactggattttgaggaaactttggtcttaattcccgtactgattagtcaacagtggaaaatctgaagagatgcaagcaggaaaaagaaattaaaccagtaagatagagactgccactctctgggaaccttgctgtgtagctgagcctcagcaagtttgataatacagacacagcaggaggcctggggaggacccagcatgcccggccaccaagcagtgatgcagctggactgttccgcagctttccagagacctccatggaagcacagacttccatgggttgaagagagtttgtgtcacaattccagtccctagccctggccctgtgtgaagtagtaacaccgccctgccagtaggatatagctgctgaggaggcctgaggagcgatgcgacaggcatgatggaggtcgagtcctcctactcggacttcatctcctgtgaccggacaggccgtcggaatgcggtccctgacatccagggagactcagaggctgtgagcgtgaggaagctggctggagacatgggcgagctggcactcgagggggcagaaggacaggtggagggaagcgccccagacaaggaagctggcaaccagccccagagcagcgatgggaccacctcgtcttgaatctgaccttgtccaagaaggctggacgagagaccttctgtcccctcccagagggggaaccctggcactggcccagcagcctcttctctgagctccatgtcccagataaaccaggccagactgagaaggctccccagaggcctctgtggcctccactccgggaaagccctctgcccacacccacaggcttcacattcccaccaccttcgcaccgtgcccaggtacactttcaagacactgtaaccacaagatgttatttattgagctggcgccgggacttgggcggggcctgccctacagtgagcagcccacacaggaacgctcctctcgcgagcggcccgggcagggaccctgtcccaacaccaacacctcctctccagcccaatcttctgggtccagacctgcttgtcccttttttagaaaacacttttaaactttttaaaaattttaaaccttttttcagcagatatggagagagctgacaatcaattcacattttttaagccattttagctaaactgtcattgtgcatctctgaggttccctcatggagctccacagatccatttttagggaagggattttggctcaaaacgatctgaccacctctgccctgtccaccaggataagtgacacctaggacccaggaaataaatgccgatgatttgtgtga

SEQ ID NO: 170597 - DNA, 1443 bp, Homo sapiens
  Payload ID: 13583
  Gene Symbol: PKIG
  Gene Name: protein kinase (cAMP-dependent, catalytic) inhibitor gamma
  Uniprot ID: Q9Y2B9
  ENST ID: ENST00000372891
  CDS Start-End: 540-770
ccgcggctgcggaaggggacgcgaaccgtcctggtcccatccgagccgccgtagcgcgagtgccgcgggagttcggcagcccaggtcgccaaggcaacgggctccgctgcgggttgcgggctgcgggcgctaggctgccccggggaggcgctgcggaccggcggcccaggcacggagaggcggcgagaccgcaggagacacggggaagagacagagaggagggtaaagtgagaatcctgcccgcaccacaggtctggactgctaaccttgaatcctggtttcttaaattctgcctccgcttctgactgaggaccactggattttgaggaaactttggtcttgtggtggtgaggaggtgatgttctggaaggaaggtacctagactttgtggtccctgccaggaagtggagagtggaaatgtggaatgcctcacactcctcaactagaattcccgtactgattagtcaacagtggaaaatctgaagagatgcaagcaggaaaaagaaattaaaccaggcctgaggagcgatgcgacaggcatgatggaggtcgagtcctcctactcggacttcatctcctgtgaccggacaggccgtcggaatgcggtccctgacatccagggagactcagaggctgtgagcgtgaggaagctggctggagacatgggcgagctggcactcgagggggcagaaggacaggtggagggaagcgccccagacaaggaagctggcaaccagccccagagcagcgatgggaccacctcgtcttgaatctgaccttgtccaagaaggctggacgagagaccttctgtcccctcccagagggggaaccctggcactggcccagcagcctcttctctgagctccatgtcccagataaaccaggccagactgagaaggctccccagaggcctctgtggcctccactccgggaaagccctctgcccacacccacaggcttcacattcccaccaccttcgcaccgtgcccaggtacactttcaagacactgtaaccacaagatgttatttattgagctggcgccgggacttgggcggggcctgccctacagtgagcagcccacacaggaacgctcctctcgcgagcggcccgggcagggaccctgtcccaacaccaacacctcctctccagcccaatcttctgggtccagacctgcttgtcccttttttagaaaacacttttaaactttttaaaaattttaaaccttttttcagcagatatggagagagctgacaatcaattcacattttttaagccattttagctaaactgtcattgtgcatctctgaggttccctcatggagctccacagatccatttttagggaagggattttggctcaaaacgatctgaccacctctgccctgtccaccaggataagtgacacctaggacccaggaaataaatgccgatgatttgtgtga

SEQ ID NO: 170598 - DNA, 1338 bp, Homo sapiens
  Payload ID: 13583
  Gene Symbol: PKIG
  Gene Name: protein kinase (cAMP-dependent, catalytic) inhibitor gamma
  Uniprot ID: Q9Y2B9
  ENST ID: ENST00000372892
  CDS Start-End: 435-665
ccgcggctgcggaaggggacgcgaaccgtcctggtcccatccgagccgccgtagcgcgagtgccgcgggagttcggcagcccaggtcgccaaggcaacgggctccgctgcgggttgcgggctgcgggcgctaggctgccccggggaggcgctgcggaccggcggcccaggcacggagaggcggcgagaccgcaggagacacggggaagagacagagaggagggtaaagtgagaatcctgcccgcaccacaggtctggactgctaaccttgaatcctggtttcttaaattctgcctccgcttctgactgaggaccactggattttgaggaaactttggtcttaattcccgtactgattagtcaacagtggaaaatctgaagagatgcaagcaggaaaaagaaattaaaccaggcctgaggagcgatgcgacaggcatgatggaggtcgagtcctcctactcggacttcatctcctgtgaccggacaggccgtcggaatgcggtccctgacatccagggagactcagaggctgtgagcgtgaggaagctggctggagacatgggcgagctggcactcgagggggcagaaggacaggtggagggaagcgccccagacaaggaagctggcaaccagccccagagcagcgatgggaccacctcgtcttgaatctgaccttgtccaagaaggctggacgagagaccttctgtcccctcccagagggggaaccctggcactggcccagcagcctcttctctgagctccatgtcccagataaaccaggccagactgagaaggctccccagaggcctctgtggcctccactccgggaaagccctctgcccacacccacaggcttcacattcccaccaccttcgcaccgtgcccaggtacactttcaagacactgtaaccacaagatgttatttattgagctggcgccgggacttgggcggggcctgccctacagtgagcagcccacacaggaacgctcctctcgcgagcggcccgggcagggaccctgtcccaacaccaacacctcctctccagcccaatcttctgggtccagacctgcttgtcccttttttagaaaacacttttaaactttttaaaaattttaaaccttttttcagcagatatggagagagctgacaatcaattcacattttttaagccattttagctaaactgtcattgtgcatctctgaggttccctcatggagctccacagatccatttttagggaagggattttggctcaaaacgatctgaccacctctgccctgtccaccaggataagtgacacctaggacccaggaaataaatgccgatgatttgtgtga

SEQ ID NO: 170599 - DNA, 1191 bp, Homo sapiens
  Payload ID: 13583
  Gene Symbol: PKIG
  Gene Name: protein kinase (cAMP-dependent, catalytic) inhibitor gamma
  Uniprot ID: Q9Y2B9
  ENST ID: ENST00000372894
  CDS Start-End: 288-518
ccgcggctgcggaaggggacgcgaaccgtcctggtcccatccgagccgccgtagcgcgagtgccgcgggagttcggcagcccaggtcgccaaggcaacgggctccgctgcgggttgcgggctgcgggcgctaggctgccccggggaggcgctgcggaccggcggcccaggcacggagaggcggcgagaccgcagaattcccgtactgattagtcaacagtggaaaatctgaagagatgcaagcaggaaaaagaaattaaaccaggcctgaggagcgatgcgacaggcatgatggaggtcgagtcctcctactcggacttcatctcctgtgaccggacaggccgtcggaatgcggtccctgacatccagggagactcagaggctgtgagcgtgaggaagctggctggagacatgggcgagctggcactcgagggggcagaaggacaggtggagggaagcgccccagacaaggaagctggcaaccagccccagagcagcgatgggaccacctcgtcttgaatctgaccttgtccaagaaggctggacgagagaccttctgtcccctcccagagggggaaccctggcactggcccagcagcctcttctctgagctccatgtcccagataaaccaggccagactgagaaggctccccagaggcctctgtggcctccactccgggaaagccctctgcccacacccacaggcttcacattcccaccaccttcgcaccgtgcccaggtacactttcaagacactgtaaccacaagatgttatttattgagctggcgccgggacttgggcggggcctgccctacagtgagcagcccacacaggaacgctcctctcgcgagcggcccgggcagggaccctgtcccaacaccaacacctcctctccagcccaatcttctgggtccagacctgcttgtcccttttttagaaaacacttttaaactttttaaaaattttaaaccttttttcagcagatatggagagagctgacaatcaattcacattttttaagccattttagctaaactgtcattgtgcatctctgaggttccctcatggagctccacagatccatttttagggaagggattttggctcaaaacgatctgaccacctctgccctgtccaccaggataagtgacacctaggacccaggaaataaatgccgatgatttgtgtga

SEQ ID NO: 170600 - DNA, 4231 bp, Homo sapiens
  Payload ID: 13584
  Gene Symbol: PACSIN1
  Gene Name: protein kinase C and casein kinase substrate in neurons 1
  Uniprot ID: Q9BY11
  ENST ID: ENST00000244458
  CDS Start-End: 196-1530
agagcgacgcggtggcggcggcagcgccagccccctcctcccccgggaagtcggccgggcttgaggccgggccccagacgtcccgcttcgccccgagtcgccgccgatggtccccggagctcctgcccccagtgcatgagcagccgagcctgctaaccgcagctccgcacttgtccatccccctgcggctacaccatgtccagctcctacgatgaggcctcactggcgccagaggagaccaccgacagcttctgggaggtggggaactacaagcggaccgtgaagcgcatcgatgacggccaccgtctatgcaacgacctgatgaactgcgtgcaggagcgcgccaagatcgagaaggcgtacgggcagcagctcaccgactgggccaagcgttggcgccagctcatcgagaaaggcccacagtatggcagcctggagcgggcctggggtgccataatgacagaggcagacaaggtgagcgagctgcaccaggaggtgaagaacaatctgctgaatgaggacctggagaaggtgaagaactggcagaaggacgcctatcacaagcagatcatgggtggcttcaaggagacgaaggaggctgaagatggcttccgcaaggcccagaagccttgggccaagaagatgaaggagctggaggcagccaagaaggcctaccatttggcttgcaaagaggaaaagctggccatgacacgggagatgaacagcaagacggagcaatcggtcacacctgagcagcaaaagaagctgcaggacaaagtggacaagtgcaagcaggatgtgcagaagacacaggagaagtatgagaaagtgctggaagatgtgggcaagaccacaccccagtacatggagaacatggagcaggtgtttgagcaatgccagcaatttgaggaaaagcggctggtcttcctcaaggaggtgctgctggacatcaaacggcacctcaacctggctgagaacagcagctacatccatgtgtaccgtgagctggagcaggccatccggggggctgatgcccaggaagacctcagatggttccgcagcaccagtggccccggcatgcccatgaactggccccagtttgaggagtggaacccagaccttcctcacaccaccaccaagaaggagaaacagcctaagaaggcagagggagtggcgctgaccaatgccactggggcggtagagtccacatcccaggctggggaccgcggcagtgttagcagctacgacagaggccagccctacgccaccgagtggtcagacgacgagagtgggaacccctttgggggcagtgagaccaacgggggcgccaacccctttgaggacgactccaagggagtgcgcgtgcgggcactctacgactatgacggccaggagcaggacgagctcagctttaaggccggagacgaactcaccaagctgggcgaggaggatgagcagggctggtgccgtgggcggctggacagcgggcagctgggcctctaccctgccaactacgtggaggctatctagaggccccctccctccatactcccgtcactcctccccactgccgcccctcccctcccactctcgtctccttcccctcgccatagagttccagacatattttccgatcaagcttttatttttttaaaagtcaaaacagaacaaaacaaagtatgcagagacagagcatttgcagggccacctggaggctggggtgctggggcttggggtggccccagggtaggtaacagtcttaggacttagcccaacatcacaacatctgctcttcgggttccaccaaagagtctcctgagccctgagggatggatgtctcctgacccttccaccccgcctcactccctccgtcccactccactccaggctgccggcacctgccccattccctggcctggtttcctaacctcttcttcctcccctgccctgcttcccttcctccaccaccctgctctcaaaggcctcctctccagacccctggaagggaggcttccccatctttagttttccactctgccccggggagcacccttctactcctagccacgtcccttgggaccggtgggactggaggaggaacggtcaccctcctcccccatggaggtttccaggggtcccccagacatgaaagaggggtgagctggaggaagtcatggtgtcactggggtacaggagggtgaatgaagggcatgcaggccctcagcccgggctgtgccagccctcccagccccaggcccatctgagggaccaagacgctgttacgcaggcccttctttccagctatcagcactttcagcatcggctcttcagcagatccaaaccccctcagcaacttgcagaggacctgtcccctctcaaaagtcccctggcctagggtggggacccccaaacctacggcaaagccagcaacagtagcagcctgctcccatttgctggggaggagatcatcttgttcccctggccccccactctccctccatgtccatccaaaaaccataaaatcactgggttccacatcagcctccatgaggccaagccttgtacctgcaaggctcttggcctaaccattcctctgtcctcttctctggcctgcctggggagcccgtgaaggccgcacgggtgcctccagcctgagacatcaggggagagcctgcagctgagttcagcagaaaggaggaatcctggccctcaggaagaagatagtcacatgtttttcttccttgtccccacggcccccagaacaacattctccctgctggcagcccttccatgtctccaaacctgggtcagagtgaaaggacctttgggggtgggtgggagcaaagggcccacctgctggttggtgaaagcagtggtgccggagtgctaggtaccgcacgagagggtgcgggggcttgggaagcagaccagggttggacaaaaccccatgagggcggggagctggaagaaaagtctcttggggacctctggggcaaggagctgagaagtcctgcagcaccaggtgagacttgcttacagtggatgccacttctaggcctctggaccgcagatgccctcctccctcctgcacacctggcctcctgggcctccaggtaaagagagagagccagcccagccctgtttcccctcagtcctcctttgctcctgctgcttctcccaacagcccactgttaggaggtagtagaccccagcctcaaggctctgaccttcttcatgtgggcacagagggtcctgacactctggcagggcctgagctggggcaggcctccctcagggccaggggcgatggcaccccggggacaggcagacctccttcctgccgtcagcacccccttccttatcactgtctggtctccgagcttcggctgcagcctgaggtgtgtcctgggctcctcagagcctgaagcaagcttttggaagcctgcagtcctcccagctccagtgcagaagcctctctctccagcctttccccaggcaggagttggggttgggggcctctgtccctcatcgcttaccttggaaaggtgggaagctggcaatctgcaccttggggcctgggctccccctctctgtgccagcggcttcccagcacctgggaggggctgcagccccagctggactccagcctgtccctcttagcactctagctgcccactccagggcagggactcgaaaccccctccgtcctgagcagccacctccagggccctgtttgggaccactctctcagtccccaggtcctcagggccccagagcgggagggtctcctacctggaagtccccctgagctccagggcccagccctacctgccagtgctggtgtcagggcactcaacaccgagtgtgggggccacgccccttgccatgcccacggcctcctcctgtagctcctgcctgcacccacgatgctgcacgggcccgccctggtggggctcggcgagtaatgtgttttgtccccagttaaccaccattctgcggcctggttctgcaaggaaccagggctgccccaccgcccgccgtctgccgccctaggcttcctgactccattagttccgacacttgtgaaactccgagaagtgctgtggtctcagcaatgcacctgttttgtacatgattgtgtaatttaaaggtatataaatacaaatatatatatatatcagttgtgattgtatgactgtggataaaatccagaactgtgtcaacctggctg

SEQ ID NO: 170601 - DNA, 4229 bp, Homo sapiens
  Payload ID: 13584
  Gene Symbol: PACSIN1
  Gene Name: protein kinase C and casein kinase substrate in neurons 1
  ENST ID: ENST00000374043
  CDS Start-End: 322-1530
agagcgacgcggtggcggcggcagcgccagccccctcctcccccgggaagtcggccgggcttgaggccgggccccagacgtcccgcttcgccccgagtcgccgccgatggtccccggagctcctgcccccagtgcatgagcagccgagcctgctaaccgcagctccgcacttgtccatccccctgcggctacaccatgtccagctcctacgatgaggcctcactggcgccagaggagaccaccgacagcttctgggaggtggggaactacaagcggaccgtgaagcgcatcgatgacggccaccgtctatgcaacgacctgatgaactgcgtgcaggagcgcgccaagatcgagaaggcgtacgggcagcagctcaccgactgggccaagcgttggcgccagctcatcgagaaaggcccacagtatggcagcctggagcgggcctggggtgccataatgacagaggcagacaaggtgagcgagctgcaccaggaggtgaagaacaatctgctgaatgaggacctggagaaggtgaagaactggcagaaggacgcctatcacaagcagatcatgggtggcttcaaggagacgaaggaggctgaagatggcttccgcaaggcccagaagccttgggccaagaagatgaaggagctggaggcagccaagaaggcctaccatttggcttgcaaagaggaaaagctggccatgacacgggagatgaacagcaagacggagcaatcggtcacacctgagcagcaaaagaagctgcaggacaaagtggacaagtgcaagcaggatgtgcagaagacacaggagaagtatgagaaagtgctggaagatgtgggcaagaccacaccccagtacatggagaacatggagcaggtgtttgagcaatgccagcaatttgaggaaaagcggctggtcttcctcaaggaggtgctgctggacatcaaacggcacctcaacctggctgagaacagcagctacatccatgtgtaccgtgagctggagcaggccatccggggggctgatgcccaggaagacctcagatggttccgcagcaccagtggccccggcatgcccatgaactggccccagtttgaggagtggaacccagaccttcctcacaccaccaccaagaaggagaaacagcctaagaaggcagagggagtggcgctgaccaatgccactggggcggtagagtccacatcccaggctggggaccgcggcagtgttagcagctacgacagaggccagccctacgccaccgagtggtcagacgacgagagtgggaacccctttgggggcagtgagaccaacgggggcgccaacccctttgaggacgactccaagggagtgcgcgtgcgggcactctacgactatgacggccaggagcaggacgagctcagctttaaggccggagacgaactcaccaagctgggcgaggaggatgagcagggctggtgccgtgggcggctggacagcgggcagctgggcctctaccctgccaactacgtggaggctatctagaggccccctccctccatactcccgtcactcctccccactgccgcccctcccctcccactctcgtctccttcccctcgccatagagttccagacatattttccgatcaagcttttatttttttaaaagtcaaaacagaacaaaacaaagtatgcagagacagagcatttgcagggccacctggaggctggggtgctggggcttggggtggccccagggtaggtaacagtcttaggacttagcccaacatcacaacatctgctcttcgggttccaccaaagagtctcctgagccctgagggatggatgtctcctgacccttccaccccgcctcactccctccgtcccactccactccaggctgccggcacctgccccattccctggcctggtttcctaacctcttcttcctcccctgccctgcttcccttcctccaccaccctgctctcaaaggcctcctctccagacccctggaagggaggcttccccatctttagttttccactctgccccggggagcacccttctactcctagccacgtcccttgggaccggtgggactggaggaggaacggtcaccctcctcccccatggaggtttccaggggtcccccagacatgaaagaggggtgagctggaggaagtcatggtgtcactggggtacaggagggtgaatgaagggcatgcaggccctcagcccgggctgtgccagccctcccagccccaggcccatctgagggaccaagacgctgttacgcaggcccttctttccagctatcagcactttcagcatcggctcttcagcagatccaaaccccctcagcaacttgcagaggacctgtcccctctcaaaagtcccctggcctagggtggggacccccaaacctacggcaaagccagcaacagtagcagcctgctcccatttgctggggaggagatcatcttgttcccctggccccccactctccctccatgtccatccaaaaaccataaaatcactgggttccacatcagcctccatgaggccaagccttgtacctgcaaggctcttggcctaaccattcctctgtcctcttctctggcctgcctggggagcccgtgaaggccgcacgggtgcctccagcctgagacatcaggggagagcctgcagctgagttcagcagaaaggaggaatcctggccctcaggaagaagatagtcacatgtttttcttccttgtccccacggcccccagaacaacattctccctgctggcagcccttccatgtctccaaacctgggtcagagtgaaaggacctttgggggtgggtgggagcaaagggcccacctgctggttggtgaaagcagtggtgccggagtgctaggtaccgcacgagagggtgcgggggcttgggaagcagaccagggttggacaaaaccccatgagggcggggagctggaagaaaagtctcttggggacctctggggcaaggagctgagaagtcctgcagcaccaggtgagacttgcttacagtggatgccacttctaggcctctggaccgcagatgccctcctccctcctgcacacctggcctcctgggcctccaggtaaagagagagagccagcccagccctgtttcccctcagtcctcctttgctcctgctgcttctcccaacagcccactgttaggaggtagtagaccccagcctcaaggctctgaccttcttcatgtgggcacagagggtcctgacactctggcagggcctgagctggggcaggcctccctcagggccaggggcgatggcaccccggggacaggcagacctccttcctgccgtcagcacccccttccttatcactgtctggtctccgagcttcggctgcagcctgaggtgtgtcctgggctcctcagagcctgaagcaagcttttggaagcctgcagtcctcccagctccagtgcagaagcctctctctccagcctttccccaggcaggagttggggttgggggcctctgtccctcatcgcttaccttggaaaggtgggaagctggcaatctgcaccttggggcctgggctccccctctctgtgccagcggcttcccagcacctgggaggggctgcagccccagctggactccagcctgtccctcttagcactctagctgcccactccagggcagggactcgaaaccccctccgtcctgagcagccacctccagggccctgtttgggaccactctctcagtccccaggtcctcagggccccagagcgggagggtctcctacctggaagtccccctgagctccagggcccagccctacctgccagtgctggtgtcagggcactcaacaccgagtgtgggggccacgccccttgccatgcccacggcctcctcctgtagctcctgcctgcacccacgatgctgcacgggcccgccctggtggggctcggcgagtaatgtgttttgtccccagttaaccaccattctgcggcctggttctgcaaggaaccagggctgccccaccgcccgccgtctgccgccctaggcttcctgactccattagttccgacacttgtgaaactccgagaagtgctgtggtctcagcaatgcacctgttttgtacatgattgtgtaatttaaaggtatataaatacaaatatatatatatatcagttgtgattgtatgactgtggataaaatccagaactgtgtcaacctggc

SEQ ID NO: 170602 - DNA, 4286 bp, Homo sapiens
  Payload ID: 13584
  Gene Symbol: PACSIN1
  Gene Name: protein kinase C and casein kinase substrate in neurons 1
  Uniprot ID: Q9BY11
  ENST ID: ENST00000538621
  CDS Start-End: 261-1595
agttctggcgctgctgccttcctgagtgagcggtggagggaaccctagaggacagagcccccagcccggcagcaggccccctctccgcccgccaccacggaggagaaggaggacagccagcccctccagccctggcctggcccagcgggggcagtaagctcctacttgcccccagcttggtgcccacacgggcccagtgcatgagcagccgagcctgctaaccgcagctccgcacttgtccatccccctgcggctacaccatgtccagctcctacgatgaggcctcactggcgccagaggagaccaccgacagcttctgggaggtggggaactacaagcggaccgtgaagcgcatcgatgacggccaccgtctatgcaacgacctgatgaactgcgtgcaggagcgcgccaagatcgagaaggcgtacgggcagcagctcaccgactgggccaagcgttggcgccagctcatcgagaaaggcccacagtatggcagcctggagcgggcctggggtgccataatgacagaggcagacaaggtgagcgagctgcaccaggaggtgaagaacaatctgctgaatgaggacctggagaaggtgaagaactggcagaaggacgcctatcacaagcagatcatgggtggcttcaaggagacgaaggaggctgaagatggcttccgcaaggcccagaagccttgggccaagaagatgaaggagctggaggcagccaagaaggcctaccatttggcttgcaaagaggaaaagctggccatgacacgggagatgaacagcaagacggagcaatcggtcacacctgagcagcaaaagaagctgcaggacaaagtggacaagtgcaagcaggatgtgcagaagacacaggagaagtatgagaaagtgctggaagatgtgggcaagaccacaccccagtacatggagaacatggagcaggtgtttgagcaatgccagcaatttgaggaaaagcggctggtcttcctcaaggaggtgctgctggacatcaaacggcacctcaacctggctgagaacagcagctacatccatgtgtaccgtgagctggagcaggccatccggggggctgatgcccaggaagacctcagatggttccgcagcaccagtggccccggcatgcccatgaactggccccagtttgaggagtggaacccagaccttcctcacaccaccaccaagaaggagaaacagcctaagaaggcagagggagtggcgctgaccaatgccactggggcggtagagtccacatcccaggctggggaccgcggcagtgttagcagctacgacagaggccagccctacgccaccgagtggtcagacgacgagagtgggaacccctttgggggcagtgagaccaacgggggcgccaacccctttgaggacgactccaagggagtgcgcgtgcgggcactctacgactatgacggccaggagcaggacgagctcagctttaaggccggagacgaactcaccaagctgggcgaggaggatgagcagggctggtgccgtgggcggctggacagcgggcagctgggcctctaccctgccaactacgtggaggctatctagaggccccctccctccatactcccgtcactcctccccactgccgcccctcccctcccactctcgtctccttcccctcgccatagagttccagacatattttccgatcaagcttttatttttttaaaagtcaaaacagaacaaaacaaagtatgcagagacagagcatttgcagggccacctggaggctggggtgctggggcttggggtggccccagggtaggtaacagtcttaggacttagcccaacatcacaacatctgctcttcgggttccaccaaagagtctcctgagccctgagggatggatgtctcctgacccttccaccccgcctcactccctccgtcccactccactccaggctgccggcacctgccccattccctggcctggtttcctaacctcttcttcctcccctgccctgcttcccttcctccaccaccctgctctcaaaggcctcctctccagacccctggaagggaggcttccccatctttagttttccactctgccccggggagcacccttctactcctagccacgtcccttgggaccggtgggactggaggaggaacggtcaccctcctcccccatggaggtttccaggggtcccccagacatgaaagaggggtgagctggaggaagtcatggtgtcactggggtacaggagggtgaatgaagggcatgcaggccctcagcccgggctgtgccagccctcccagccccaggcccatctgagggaccaagacgctgttacgcaggcccttctttccagctatcagcactttcagcatcggctcttcagcagatccaaaccccctcagcaacttgcagaggacctgtcccctctcaaaagtcccctggcctagggtggggacccccaaacctacggcaaagccagcaacagtagcagcctgctcccatttgctggggaggagatcatcttgttcccctggccccccactctccctccatgtccatccaaaaaccataaaatcactgggttccacatcagcctccatgaggccaagccttgtacctgcaaggctcttggcctaaccattcctctgtcctcttctctggcctgcctggggagcccgtgaaggccgcacgggtgcctccagcctgagacatcaggggagagcctgcagctgagttcagcagaaaggaggaatcctggccctcaggaagaagatagtcacatgtttttcttccttgtccccacggcccccagaacaacattctccctgctggcagcccttccatgtctccaaacctgggtcagagtgaaaggacctttgggggtgggtgggagcaaagggcccacctgctggttggtgaaagcagtggtgccggagtgctaggtaccgcacgagagggtgcgggggcttgggaagcagaccagggttggacaaaaccccatgagggcggggagctggaagaaaagtctcttggggacctctggggcaaggagctgagaagtcctgcagcaccaggtgagacttgcttacagtggatgccacttctaggcctctggaccgcagatgccctcctccctcctgcacacctggcctcctgggcctccaggtaaagagagagagccagcccagccctgtttcccctcagtcctcctttgctcctgctgcttctcccaacagcccactgttaggaggtagtagaccccagcctcaaggctctgaccttcttcatgtgggcacagagggtcctgacactctggcagggcctgagctggggcaggcctccctcagggccaggggcgatggcaccccggggacaggcagacctccttcctgccgtcagcacccccttccttatcactgtctggtctccgagcttcggctgcagcctgaggtgtgtcctgggctcctcagagcctgaagcaagcttttggaagcctgcagtcctcccagctccagtgcagaagcctctctctccagcctttccccaggcaggagttggggttgggggcctctgtccctcatcgcttaccttggaaaggtgggaagctggcaatctgcaccttggggcctgggctccccctctctgtgccagcggcttcccagcacctgggaggggctgcagccccagctggactccagcctgtccctcttagcactctagctgcccactccagggcagggactcgaaaccccctccgtcctgagcagccacctccagggccctgtttgggaccactctctcagtccccaggtcctcagggccccagagcgggagggtctcctacctggaagtccccctgagctccagggcccagccctacctgccagtgctggtgtcagggcactcaacaccgagtgtgggggccacgccccttgccatgcccacggcctcctcctgtagctcctgcctgcacccacgatgctgcacgggcccgccctggtggggctcggcgagtaatgtgttttgtccccagttaaccaccattctgcggcctggttctgcaaggaaccagggctgccccaccgcccgccgtctgccgccctaggcttcctgactccattagttccgacacttgtgaaactccgagaagtgctgtggtctcagcaatgcacctgttttgtacatgattgtgtaatttaaaggtatataaatacaaatatatatatatatcagttgtgattgtatgactgtggataaaatccagaactgtgtc

SEQ ID NO: 170603 - DNA, 4299 bp, Homo sapiens
  Payload ID: 13584
  Gene Symbol: PACSIN1
  Gene Name: protein kinase C and casein kinase substrate in neurons 1
  Uniprot ID: Q9BY11
  ENST ID: ENST00000620693
  CDS Start-End: 274-1608
gcacgcctcctcctcatccttcccccctctccgcctcagctctgaccttcctccttcccgcagccccggcgagatcccagagcgacgcggtggcggcggcagcgccagccccctcctcccccgggaagtcggccgggcttgaggccgggccccagacgtcccgcttcgccccgagtcgccgccgatggtccccggagctcctgcccccagtgcatgagcagccgagcctgctaaccgcagctccgcacttgtccatccccctgcggctacaccatgtccagctcctacgatgaggcctcactggcgccagaggagaccaccgacagcttctgggaggtggggaactacaagcggaccgtgaagcgcatcgatgacggccaccgtctatgcaacgacctgatgaactgcgtgcaggagcgcgccaagatcgagaaggcgtacgggcagcagctcaccgactgggccaagcgttggcgccagctcatcgagaaaggcccacagtatggcagcctggagcgggcctggggtgccataatgacagaggcagacaaggtgagcgagctgcaccaggaggtgaagaacaatctgctgaatgaggacctggagaaggtgaagaactggcagaaggacgcctatcacaagcagatcatgggtggcttcaaggagacgaaggaggctgaagatggcttccgcaaggcccagaagccttgggccaagaagatgaaggagctggaggcagccaagaaggcctaccatttggcttgcaaagaggaaaagctggccatgacacgggagatgaacagcaagacggagcaatcggtcacacctgagcagcaaaagaagctgcaggacaaagtggacaagtgcaagcaggatgtgcagaagacacaggagaagtatgagaaagtgctggaagatgtgggcaagaccacaccccagtacatggagaacatggagcaggtgtttgagcaatgccagcaatttgaggaaaagcggctggtcttcctcaaggaggtgctgctggacatcaaacggcacctcaacctggctgagaacagcagctacatccatgtgtaccgtgagctggagcaggccatccggggggctgatgcccaggaagacctcagatggttccgcagcaccagtggccccggcatgcccatgaactggccccagtttgaggagtggaacccagaccttcctcacaccaccaccaagaaggagaaacagcctaagaaggcagagggagtggcgctgaccaatgccactggggcggtagagtccacatcccaggctggggaccgcggcagtgttagcagctacgacagaggccagccctacgccaccgagtggtcagacgacgagagtgggaacccctttgggggcagtgagaccaacgggggcgccaacccctttgaggacgactccaagggagtgcgcgtgcgggcactctacgactatgacggccaggagcaggacgagctcagctttaaggccggagacgaactcaccaagctgggcgaggaggatgagcagggctggtgccgtgggcggctggacagcgggcagctgggcctctaccctgccaactacgtggaggctatctagaggccccctccctccatactcccgtcactcctccccactgccgcccctcccctcccactctcgtctccttcccctcgccatagagttccagacatattttccgatcaagcttttatttttttaaaagtcaaaacagaacaaaacaaagtatgcagagacagagcatttgcagggccacctggaggctggggtgctggggcttggggtggccccagggtaggtaacagtcttaggacttagcccaacatcacaacatctgctcttcgggttccaccaaagagtctcctgagccctgagggatggatgtctcctgacccttccaccccgcctcactccctccgtcccactccactccaggctgccggcacctgccccattccctggcctggtttcctaacctcttcttcctcccctgccctgcttcccttcctccaccaccctgctctcaaaggcctcctctccagacccctggaagggaggcttccccatctttagttttccactctgccccggggagcacccttctactcctagccacgtcccttgggaccggtgggactggaggaggaacggtcaccctcctcccccatggaggtttccaggggtcccccagacatgaaagaggggtgagctggaggaagtcatggtgtcactggggtacaggagggtgaatgaagggcatgcaggccctcagcccgggctgtgccagccctcccagccccaggcccatctgagggaccaagacgctgttacgcaggcccttctttccagctatcagcactttcagcatcggctcttcagcagatccaaaccccctcagcaacttgcagaggacctgtcccctctcaaaagtcccctggcctagggtggggacccccaaacctacggcaaagccagcaacagtagcagcctgctcccatttgctggggaggagatcatcttgttcccctggccccccactctccctccatgtccatccaaaaaccataaaatcactgggttccacatcagcctccatgaggccaagccttgtacctgcaaggctcttggcctaaccattcctctgtcctcttctctggcctgcctggggagcccgtgaaggccgcacgggtgcctccagcctgagacatcaggggagagcctgcagctgagttcagcagaaaggaggaatcctggccctcaggaagaagatagtcacatgtttttcttccttgtccccacggcccccagaacaacattctccctgctggcagcccttccatgtctccaaacctgggtcagagtgaaaggacctttgggggtgggtgggagcaaagggcccacctgctggttggtgaaagcagtggtgccggagtgctaggtaccgcacgagagggtgcgggggcttgggaagcagaccagggttggacaaaaccccatgagggcggggagctggaagaaaagtctcttggggacctctggggcaaggagctgagaagtcctgcagcaccaggtgagacttgcttacagtggatgccacttctaggcctctggaccgcagatgccctcctccctcctgcacacctggcctcctgggcctccaggtaaagagagagagccagcccagccctgtttcccctcagtcctcctttgctcctgctgcttctcccaacagcccactgttaggaggtagtagaccccagcctcaaggctctgaccttcttcatgtgggcacagagggtcctgacactctggcagggcctgagctggggcaggcctccctcagggccaggggcgatggcaccccggggacaggcagacctccttcctgccgtcagcacccccttccttatcactgtctggtctccgagcttcggctgcagcctgaggtgtgtcctgggctcctcagagcctgaagcaagcttttggaagcctgcagtcctcccagctccagtgcagaagcctctctctccagcctttccccaggcaggagttggggttgggggcctctgtccctcatcgcttaccttggaaaggtgggaagctggcaatctgcaccttggggcctgggctccccctctctgtgccagcggcttcccagcacctgggaggggctgcagccccagctggactccagcctgtccctcttagcactctagctgcccactccagggcagggactcgaaaccccctccgtcctgagcagccacctccagggccctgtttgggaccactctctcagtccccaggtcctcagggccccagagcgggagggtctcctacctggaagtccccctgagctccagggcccagccctacctgccagtgctggtgtcagggcactcaacaccgagtgtgggggccacgccccttgccatgcccacggcctcctcctgtagctcctgcctgcacccacgatgctgcacgggcccgccctggtggggctcggcgagtaatgtgttttgtccccagttaaccaccattctgcggcctggttctgcaaggaaccagggctgccccaccgcccgccgtctgccgccctaggcttcctgactccattagttccgacacttgtgaaactccgagaagtgctgtggtctcagcaatgcacctgttttgtacatgattgtgtaatttaaaggtatataaatacaaatatatatatatatcagttgtgattgtatgactgtggataaaatccagaactgtgtc

SEQ ID NO: 170604 - DNA, 3249 bp, Homo sapiens
  Payload ID: 13585
  Gene Symbol: PACSIN2
  Gene Name: protein kinase C and casein kinase substrate in neurons 2
  Uniprot ID: Q9UNF0
  ENST ID: ENST00000263246
  CDS Start-End: 203-1663
gcggccgcaggggtctgggcagggctgggcagtgctgccggagcaaaagcggtagcgggagcccggccggagctgggtctggagacgccgtggcagcctgaacggagtgtgcgacggattgggaggtttgtctacagattttgagcgttcgaagttgacccctgactaagtatactttgctgctccctcagcctttgaaaaaatgtctgtcacatatgatgattccgttggagtagaagtgtccagcgacagcttctgggaggtcgggaactacaagcggactgtgaagcggatcgacgatggccaccgcctgtgcagcgacctcatgaactgcctgcatgagcgggcgcgcatcgagaaggcgtatgcgcagcagctcactgagtgggcccggcgctggaggcagctcgtggagaaagggccccagtacgggaccgtggagaaggcctggatggccttcatgtccgaggcagagagggtgagcgagctgcacctcgaggtgaaggcctcactgatgaacgatgacttcgagaagatcaagaactggcagaaggaagcctttcacaagcagatgatgggcggcttcaaggagaccaaggaagctgaggacggctttcggaaggcacagaagccctgggccaagaagctgaaagaggtagaagcagcaaagaaagcccaccatgcagcgtgcaaagaggagaagctggctatctcacgagaagccaacagcaaggcagacccatccctcaaccctgaacagctcaagaaattgcaagacaaaatagaaaagtgcaagcaagatgttcttaagaccaaagagaagtatgagaagtccctgaaggaactcgaccagggcacaccccagtacatggagaacatggagcaggtgtttgagcagtgccagcagttcgaggagaaacgccttcgcttcttccgggaggttctgctggaggttcagaagcacctagacctgtccaatgtggctggctacaaagccatttaccatgacctggagcagagcatcagagcagctgatgcagtggaggacctgaggtggttccgagccaatcacgggccgggcatggccatgaactggccgcagtttgaggagtggtccgcagacctgaatcgaaccctcagccggagagagaagaagaaggccactgacggcgtcaccctgacgggcatcaaccagacaggcgaccagtctctgccgagtaagcccagcagcacccttaatgtcccgagcaaccccgcccagtctgcgcagtcacagtccagctacaaccccttcgaggatgaggacgacacgggcagcaccgtcagtgagaaggacgacactaaggccaaaaatgtgagcagctacgagaagacccagagctatcccaccgactggtcagacgatgagtctaacaaccccttctcctccacggatgccaatggggactcgaatccattcgacgacgacgccacctcggggacggaagtgcgagtccgggccctgtatgactatgaggggcaggagcatgatgagctgagcttcaaggctggggatgagctgaccaagatggaggacgaggatgagcagggctggtgcaagggacgcttggacaacgggcaagttggcctatacccggcaaattatgtggaggcgatccagtgatgagtcggggacaggccagcggggggacggaggcggcgggcccaggagcctcagccagccacgtgggcatccactccttttcctgcaagagatgatggttccattgctcttggcttcatggtgttcctggaaggcagatgagctggtcatttcgcctgggactcggcacctttccgagtgcagctggagggatctgagcgcaggaagacgcagaacaacagaaatagccgcccctccccgcccactgtgcctgttggcctatcatagatctctatgttcttgactttgtctctcctttccgagtcaatggtgggttacactgatcttgttccactgattactctctctgacgagtccatcacctgcaacttaaatgaacaagcttacatcccattttgagtgaagattttgaggtttttaatttaaaggctgtgtacagttatacttttttatacacctgttcatttctacttaaattatggcacagattgatgcgcaccagtcttgaggaaacgatctccctattcccttaccctgttactcagccacgccgtgtgtaggcttagcctcaggtggcagatgtttgaggaaaggaattatgccaggaaggtgggaccgggttatggtcgggtttctattgggaatgctctttgtgcttttgggcatctgaatggaagctttacatagaaccttaggtagaactcccccaaatcgccatatttaaaaattattttcactctattcttgcttaaaactgtactcttttgcaaattaacaattttatcactgattcagagttaaaaagaagactaacttttcaagcaaatgcatctgtaaagatgctttagattagactgtcatgtctcagtgtctatctgtatatattatttgatattcagagaatctaaagcactcgtctactgttttaatgagatttaacagcttttaacagtgagtttcgtttgtaaactgcttgaagtctgtggcattcaggcacacgtctggctggccggctgggtctcctcccgggctcagtgggcctggggcctctctgacgtggtgcctgctggagggaggctcgtcgtcaccagctgactgctggtccggcttctgaccggcctttgtcctggctccgtagcagaacactgtaaaagtgcccgcgtctttgcagtagttgcagatttcagtcgtcgtgttacttgtgcacaaacagaagctgggtcttacccgcagcacgagtgtctcgggctgcccggagtcgcccgggagcaggtgctgcagccagagttacgcgggggccacgcgggccggcgggggtggggggaacgtgggggaacctgtgtttcacgtgactcagcagtgcccgccgccgtcaccagctatgcattcactccgtttccagtgagcagatgtcttgcttggaaagtggacctgtgtctgtgtctgtcctgagaacttaccagcagaaatcctcatttctgtgctacggatttaccaaaaattgtcaagtctttttcagtttaacagttcctttacatgtgtagtatttgaggaaaaaaatcaataaacagttgatctcgtgcata

SEQ ID NO: 170605 - DNA, 3149 bp, Homo sapiens
  Payload ID: 13585
  Gene Symbol: PACSIN2
  Gene Name: protein kinase C and casein kinase substrate in neurons 2
  Uniprot ID: Q9UNF0
  ENST ID: ENST00000337959
  CDS Start-End: 223-1560
ctgtcccactgggcaggtgcctctgacggagaggaggcgtcgtcgggaagtatgtggccgtggctgctctggcatgatcctgaagactggcacgaaggggaatggagccgcacagagaatttcaggcatcagaggggaagcgcaggtttgtctacagattttgagcgttcgaagttgacccctgactaagtatactttgctgctccctcagcctttgaaaaaatgtctgtcacatatgatgattccgttggagtagaagtgtccagcgacagcttctgggaggtcgggaactacaagcggactgtgaagcggatcgacgatggccaccgcctgtgcagcgacctcatgaactgcctgcatgagcgggcgcgcatcgagaaggcgtatgcgcagcagctcactgagtgggcccggcgctggaggcagctcgtggagaaagggccccagtacgggaccgtggagaaggcctggatggccttcatgtccgaggcagagagggtgagcgagctgcacctcgaggtgaaggcctcactgatgaacgatgacttcgagaagatcaagaactggcagaaggaagcctttcacaagcagatgatgggcggcttcaaggagaccaaggaagctgaggacggctttcggaaggcacagaagccctgggccaagaagctgaaagaggtagaagcagcaaagaaagcccaccatgcagcgtgcaaagaggagaagctggctatctcacgagaagccaacagcaaggcagacccatccctcaaccctgaacagctcaagaaattgcaagacaaaatagaaaagtgcaagcaagatgttcttaagaccaaagagaagtatgagaagtccctgaaggaactcgaccagggcacaccccagtacatggagaacatggagcaggtgtttgagcagtgccagcagttcgaggagaaacgccttcgcttcttccgggaggttctgctggaggttcagaagcacctagacctgtccaatgtggctggctacaaagccatttaccatgacctggagcagagcatcagagcagctgatgcagtggaggacctgaggtggttccgagccaatcacgggccgggcatggccatgaactggccgcagtttgaggagtggtccgcagacctgaatcgaaccctcagccggagagagaagaagaaggccactgacggcgtcaccctgacgggcatcaaccagacaggcgaccagtctctgccgagtaagcccagcagtgtgagcagctacgagaagacccagagctatcccaccgactggtcagacgatgagtctaacaaccccttctcctccacggatgccaatggggactcgaatccattcgacgacgacgccacctcggggacggaagtgcgagtccgggccctgtatgactatgaggggcaggagcatgatgagctgagcttcaaggctggggatgagctgaccaagatggaggacgaggatgagcagggctggtgcaagggacgcttggacaacgggcaagttggcctatacccggcaaattatgtggaggcgatccagtgatgagtcggggacaggccagcggggggacggaggcggcgggcccaggagcctcagccagccacgtgggcatccactccttttcctgcaagagatgatggttccattgctcttggcttcatggtgttcctggaaggcagatgagctggtcatttcgcctgggactcggcacctttccgagtgcagctggagggatctgagcgcaggaagacgcagaacaacagaaatagccgcccctccccgcccactgtgcctgttggcctatcatagatctctatgttcttgactttgtctctcctttccgagtcaatggtgggttacactgatcttgttccactgattactctctctgacgagtccatcacctgcaacttaaatgaacaagcttacatcccattttgagtgaagattttgaggtttttaatttaaaggctgtgtacagttatacttttttatacacctgttcatttctacttaaattatggcacagattgatgcgcaccagtcttgaggaaacgatctccctattcccttaccctgttactcagccacgccgtgtgtaggcttagcctcaggtggcagatgtttgaggaaaggaattatgccaggaaggtgggaccgggttatggtcgggtttctattgggaatgctctttgtgcttttgggcatctgaatggaagctttacatagaaccttaggtagaactcccccaaatcgccatatttaaaaattattttcactctattcttgcttaaaactgtactcttttgcaaattaacaattttatcactgattcagagttaaaaagaagactaacttttcaagcaaatgcatctgtaaagatgctttagattagactgtcatgtctcagtgtctatctgtatatattatttgatattcagagaatctaaagcactcgtctactgttttaatgagatttaacagcttttaacagtgagtttcgtttgtaaactgcttgaagtctgtggcattcaggcacacgtctggctggccggctgggtctcctcccgggctcagtgggcctggggcctctctgacgtggtgcctgctggagggaggctcgtcgtcaccagctgactgctggtccggcttctgaccggcctttgtcctggctccgtagcagaacactgtaaaagtgcccgcgtctttgcagtagttgcagatttcagtcgtcgtgttacttgtgcacaaacagaagctgggtcttacccgcagcacgagtgtctcgggctgcccggagtcgcccgggagcaggtgctgcagccagagttacgcgggggccacgcgggccggcgggggtggggggaacgtgggggaacctgtgtttcacgtgactcagcagtgcccgccgccgtcaccagctatgcattcactccgtttccagtgagcagatgtcttgcttggaaagtggacctgtgtctgtgtctgtcctgagaacttaccagcagaaatcctcatttctgtgctacggatttaccaaaaattgtcaagtctttttcagtttaacagttcctttacatgtgtagtatttgaggaaaaaaatcaataaacagttgatctcgtgcatatgg

SEQ ID NO: 170606 - DNA, 1883 bp, Homo sapiens
  Payload ID: 13585
  Gene Symbol: PACSIN2
  Gene Name: protein kinase C and casein kinase substrate in neurons 2
  Uniprot ID: Q9UNF0
  ENST ID: ENST00000402229
  CDS Start-End: 194-1654
ggtcagacatgccagcagggttggaaagaggcaggtacggaagctgagctgcagagttagccggcatctgacagaaaaatgtgagtgtgctgtggaaggcttgcatttcctttaaggtttgtctacagattttgagcgttcgaagttgacccctgactaagtatactttgctgctccctcagcctttgaaaaaatgtctgtcacatatgatgattccgttggagtagaagtgtccagcgacagcttctgggaggtcgggaactacaagcggactgtgaagcggatcgacgatggccaccgcctgtgcagcgacctcatgaactgcctgcatgagcgggcgcgcatcgagaaggcgtatgcgcagcagctcactgagtgggcccggcgctggaggcagctcgtggagaaagggccccagtacgggaccgtggagaaggcctggatggccttcatgtccgaggcagagagggtgagcgagctgcacctcgaggtgaaggcctcactgatgaacgatgacttcgagaagatcaagaactggcagaaggaagcctttcacaagcagatgatgggcggcttcaaggagaccaaggaagctgaggacggctttcggaaggcacagaagccctgggccaagaagctgaaagaggtagaagcagcaaagaaagcccaccatgcagcgtgcaaagaggagaagctggctatctcacgagaagccaacagcaaggcagacccatccctcaaccctgaacagctcaagaaattgcaagacaaaatagaaaagtgcaagcaagatgttcttaagaccaaagagaagtatgagaagtccctgaaggaactcgaccagggcacaccccagtacatggagaacatggagcaggtgtttgagcagtgccagcagttcgaggagaaacgccttcgcttcttccgggaggttctgctggaggttcagaagcacctagacctgtccaatgtggctggctacaaagccatttaccatgacctggagcagagcatcagagcagctgatgcagtggaggacctgaggtggttccgagccaatcacgggccgggcatggccatgaactggccgcagtttgaggagtggtccgcagacctgaatcgaaccctcagccggagagagaagaagaaggccactgacggcgtcaccctgacgggcatcaaccagacaggcgaccagtctctgccgagtaagcccagcagcacccttaatgtcccgagcaaccccgcccagtctgcgcagtcacagtccagctacaaccccttcgaggatgaggacgacacgggcagcaccgtcagtgagaaggacgacactaaggccaaaaatgtgagcagctacgagaagacccagagctatcccaccgactggtcagacgatgagtctaacaaccccttctcctccacggatgccaatggggactcgaatccattcgacgacgacgccacctcggggacggaagtgcgagtccgggccctgtatgactatgaggggcaggagcatgatgagctgagcttcaaggctggggatgagctgaccaagatggaggacgaggatgagcagggctggtgcaagggacgcttggacaacgggcaagttggcctatacccggcaaattatgtggaggcgatccagtgatgagtcggggacaggccagcggggggacggaggcggcgggcccaggagcctcagccagccacgtgggcatccactccttttcctgcaagagatgatggttccattgctcttggcttcatggtgttcctggaaggcagatgagctggtcatttcgcctgggactcggcacctttccgagtgcagctggagggatctgagcgcaggaagacgcagaacaacagaaatagcc

SEQ ID NO: 170607 - DNA, 2110 bp, Homo sapiens
  Payload ID: 13585
  Gene Symbol: PACSIN2
  Gene Name: protein kinase C and casein kinase substrate in neurons 2
  Uniprot ID: Q9UNF0
  ENST ID: ENST00000403744
  CDS Start-End: 223-1683
ctgtcccactgggcaggtgcctctgacggagaggaggcgtcgtcgggaagtatgtggccgtggctgctctggcatgatcctgaagactggcacgaaggggaatggagccgcacagagaatttcaggcatcagaggggaagcgcaggtttgtctacagattttgagcgttcgaagttgacccctgactaagtatactttgctgctccctcagcctttgaaaaaatgtctgtcacatatgatgattccgttggagtagaagtgtccagcgacagcttctgggaggtcgggaactacaagcggactgtgaagcggatcgacgatggccaccgcctgtgcagcgacctcatgaactgcctgcatgagcgggcgcgcatcgagaaggcgtatgcgcagcagctcactgagtgggcccggcgctggaggcagctcgtggagaaagggccccagtacgggaccgtggagaaggcctggatggccttcatgtccgaggcagagagggtgagcgagctgcacctcgaggtgaaggcctcactgatgaacgatgacttcgagaagatcaagaactggcagaaggaagcctttcacaagcagatgatgggcggcttcaaggagaccaaggaagctgaggacggctttcggaaggcacagaagccctgggccaagaagctgaaagaggtagaagcagcaaagaaagcccaccatgcagcgtgcaaagaggagaagctggctatctcacgagaagccaacagcaaggcagacccatccctcaaccctgaacagctcaagaaattgcaagacaaaatagaaaagtgcaagcaagatgttcttaagaccaaagagaagtatgagaagtccctgaaggaactcgaccagggcacaccccagtacatggagaacatggagcaggtgtttgagcagtgccagcagttcgaggagaaacgccttcgcttcttccgggaggttctgctggaggttcagaagcacctagacctgtccaatgtggctggctacaaagccatttaccatgacctggagcagagcatcagagcagctgatgcagtggaggacctgaggtggttccgagccaatcacgggccgggcatggccatgaactggccgcagtttgaggagtggtccgcagacctgaatcgaaccctcagccggagagagaagaagaaggccactgacggcgtcaccctgacgggcatcaaccagacaggcgaccagtctctgccgagtaagcccagcagcacccttaatgtcccgagcaaccccgcccagtctgcgcagtcacagtccagctacaaccccttcgaggatgaggacgacacgggcagcaccgtcagtgagaaggacgacactaaggccaaaaatgtgagcagctacgagaagacccagagctatcccaccgactggtcagacgatgagtctaacaaccccttctcctccacggatgccaatggggactcgaatccattcgacgacgacgccacctcggggacggaagtgcgagtccgggccctgtatgactatgaggggcaggagcatgatgagctgagcttcaaggctggggatgagctgaccaagatggaggacgaggatgagcagggctggtgcaagggacgcttggacaacgggcaagttggcctatacccggcaaattatgtggaggcgatccagtgatgagtcggggacaggccagcggggggacggaggcggcgggcccaggagcctcagccagccacgtgggcatccactccttttcctgcaagagatgatggttccattgctcttggcttcatggtgttcctggaaggcagatgagctggtcatttcgcctgggactcggcacctttccgagtgcagctggagggatctgagcgcaggaagacgcagaacaacagaaatagccgcccctccccgcccactgtgcctgttggcctatcatagatctctatgttcttgactttgtctctcctttccgagtcaatggtgggttacactgatcttgttccactgattactctctctgacgagtccatcacctgcaacttaaatgaacaagcttacatcccattttgagtgaagattttgaggtttttaatttaaa

SEQ ID NO: 170608 - DNA, 3080 bp, Homo sapiens
  Payload ID: 13585
  Gene Symbol: PACSIN2
  Gene Name: protein kinase C and casein kinase substrate in neurons 2
  Uniprot ID: Q9UNF0
  ENST ID: ENST00000407585
  CDS Start-End: 161-1498
agaggtcagacatgccagcagggttggaaagaggcaggtacggaagctgagctgcagagttagccggcatctgacagaaaaatgtttgtctacagattttgagcgttcgaagttgacccctgactaagtatactttgctgctccctcagcctttgaaaaaatgtctgtcacatatgatgattccgttggagtagaagtgtccagcgacagcttctgggaggtcgggaactacaagcggactgtgaagcggatcgacgatggccaccgcctgtgcagcgacctcatgaactgcctgcatgagcgggcgcgcatcgagaaggcgtatgcgcagcagctcactgagtgggcccggcgctggaggcagctcgtggagaaagggccccagtacgggaccgtggagaaggcctggatggccttcatgtccgaggcagagagggtgagcgagctgcacctcgaggtgaaggcctcactgatgaacgatgacttcgagaagatcaagaactggcagaaggaagcctttcacaagcagatgatgggcggcttcaaggagaccaaggaagctgaggacggctttcggaaggcacagaagccctgggccaagaagctgaaagaggtagaagcagcaaagaaagcccaccatgcagcgtgcaaagaggagaagctggctatctcacgagaagccaacagcaaggcagacccatccctcaaccctgaacagctcaagaaattgcaagacaaaatagaaaagtgcaagcaagatgttcttaagaccaaagagaagtatgagaagtccctgaaggaactcgaccagggcacaccccagtacatggagaacatggagcaggtgtttgagcagtgccagcagttcgaggagaaacgccttcgcttcttccgggaggttctgctggaggttcagaagcacctagacctgtccaatgtggctggctacaaagccatttaccatgacctggagcagagcatcagagcagctgatgcagtggaggacctgaggtggttccgagccaatcacgggccgggcatggccatgaactggccgcagtttgaggagtggtccgcagacctgaatcgaaccctcagccggagagagaagaagaaggccactgacggcgtcaccctgacgggcatcaaccagacaggcgaccagtctctgccgagtaagcccagcagtgtgagcagctacgagaagacccagagctatcccaccgactggtcagacgatgagtctaacaaccccttctcctccacggatgccaatggggactcgaatccattcgacgacgacgccacctcggggacggaagtgcgagtccgggccctgtatgactatgaggggcaggagcatgatgagctgagcttcaaggctggggatgagctgaccaagatggaggacgaggatgagcagggctggtgcaagggacgcttggacaacgggcaagttggcctatacccggcaaattatgtggaggcgatccagtgatgagtcggggacaggccagcggggggacggaggcggcgggcccaggagcctcagccagccacgtgggcatccactccttttcctgcaagagatgatggttccattgctcttggcttcatggtgttcctggaaggcagatgagctggtcatttcgcctgggactcggcacctttccgagtgcagctggagggatctgagcgcaggaagacgcagaacaacagaaatagccgcccctccccgcccactgtgcctgttggcctatcatagatctctatgttcttgactttgtctctcctttccgagtcaatggtgggttacactgatcttgttccactgattactctctctgacgagtccatcacctgcaacttaaatgaacaagcttacatcccattttgagtgaagattttgaggtttttaatttaaaggctgtgtacagttatacttttttatacacctgttcatttctacttaaattatggcacagattgatgcgcaccagtcttgaggaaacgatctccctattcccttaccctgttactcagccacgccgtgtgtaggcttagcctcaggtggcagatgtttgaggaaaggaattatgccaggaaggtgggaccgggttatggtcgggtttctattgggaatgctctttgtgcttttgggcatctgaatggaagctttacatagaaccttaggtagaactcccccaaatcgccatatttaaaaattattttcactctattcttgcttaaaactgtactcttttgcaaattaacaattttatcactgattcagagttaaaaagaagactaacttttcaagcaaatgcatctgtaaagatgctttagattagactgtcatgtctcagtgtctatctgtatatattatttgatattcagagaatctaaagcactcgtctactgttttaatgagatttaacagcttttaacagtgagtttcgtttgtaaactgcttgaagtctgtggcattcaggcacacgtctggctggccggctgggtctcctcccgggctcagtgggcctggggcctctctgacgtggtgcctgctggagggaggctcgtcgtcaccagctgactgctggtccggcttctgaccggcctttgtcctggctccgtagcagaacactgtaaaagtgcccgcgtctttgcagtagttgcagatttcagtcgtcgtgttacttgtgcacaaacagaagctgggtcttacccgcagcacgagtgtctcgggctgcccggagtcgcccgggagcaggtgctgcagccagagttacgcgggggccacgcgggccggcgggggtggggggaacgtgggggaacctgtgtttcacgtgactcagcagtgcccgccgccgtcaccagctatgcattcactccgtttccagtgagcagatgtcttgcttggaaagtggacctgtgtctgtgtctgtcctgagaacttaccagcagaaatcctcatttctgtgctacggatttaccaaaaattgtcaagtctttttcagtttaacagttcctttacatgtgtagtatttgaggaaaaaaatcaataaacagttgatctcgtg

SEQ ID NO: 170609 - DNA, 622 bp, Homo sapiens
  Payload ID: 13585
  Gene Symbol: PACSIN2
  Gene Name: protein kinase C and casein kinase substrate in neurons 2
  ENST ID: ENST00000418133
  CDS Start-End: 167-622
ctttccagaagacattccaaccaccatggtagagtcacagtaatgtcatggagaatgaagggagtcggggactaaacaagtggctgcaggtttgtctacagattttgagcgttcgaagttgacccctgactaagtatactttgctgctccctcagcctttgaaaaaatgtctgtcacatatgatgattccgttggagtagaagtgtccagcgacagcttctgggaggtcgggaactacaagcggactgtgaagcggatcgacgatggccaccgcctgtgcagcgacctcatgaactgcctgcatgagcgggcgcgcatcgagaaggcgtatgcgcagcagctcactgagtgggcccggcgctggaggcagctcgtggagaaagggccccagtacgggaccgtggagaaggcctggatggccttcatgtccgaggcagagagggtgagcgagctgcacctcgaggtgaaggcctcactgatgaacgatgacttcgagaagatcaagaactggcagaaggaagcctttcacaagcagatgatgggcggcttcaaggagaccaaggaagctgaggacggctttcggaaggcacagaagccctgggccaagaagctgaaagaggta

SEQ ID NO: 170610 - DNA, 818 bp, Homo sapiens
  Payload ID: 13585
  Gene Symbol: PACSIN2
  Gene Name: protein kinase C and casein kinase substrate in neurons 2
  ENST ID: ENST00000453643
  CDS Start-End: 354-818
gggtctgggcagggctgggcagtgctgccggagcaaaagcggtagcgggagcccggccggagctgggtctggagacgccgtggcagcctgaacggagtgtgcgacggattgggaggaggaactgccaggtcggatgtggagatgaacccggagagtgtccttcggctctggtcggccttcaggggcattcctgccagtctcagaagatgacagtctgcaatcgtgttatcatcaacgtggaaaaaataagggcaatgcagttttcatgtgtgtaaggtttgtctacagattttgagcgttcgaagttgacccctgactaagtatactttgctgctccctcagcctttgaaaaaatgtctgtcacatatgatgattccgttggagtagaagtgtccagcgacagcttctgggaggtcgggaactacaagcggactgtgaagcggatcgacgatggccaccgcctgtgcagcgacctcatgaactgcctgcatgagcgggcgcgcatcgagaaggcgtatgcgcagcagctcactgagtgggcccggcgctggaggcagctcgtggagaaagggccccagtacgggaccgtggagaaggcctggatggccttcatgtccgaggcagagagggtgagcgagctgcacctcgaggtgaaggcctcactgatgaacgatgacttcgagaagatcaagaactggcagaaggaagcctttcacaagcagatgatgggcggcttcaaggagaccaaggaagctgaggacggctttcggaaggcacagaagccctgggccaagaagctgaaagaggtacatctgtcc

SEQ ID NO: 170611 - DNA, 505 bp, Homo sapiens
  Payload ID: 13585
  Gene Symbol: PACSIN2
  Gene Name: protein kinase C and casein kinase substrate in neurons 2
  ENST ID: ENST00000453079
  CDS Start-End: 406-505
agaattcagctgagagacagaggtcagacatgccagcagggttggaaagaggcaggtacggaagctgagctgcagagttagccggcatctgacagaaaaatgtgagtgtgctgtggaaggcttgcatttcctttaaggtagacctctttgaaagtagaattttcacggaattgttttctttctcactgagtgactgatttaacagaactctcaccttctatgcaagcgcacctagttttagagctccgtgacggcaatgttcaattagttcattattaactgagcaatgcagaatgctttatccagggtgcttggagaagatgtcagagtttgtctacagattttgagcgttcgaagttgacccctgactaagtatactttgctgctccctcagcctttgaaaaaatgtctgtcacatatgatgattccgttggagtagaagtgtccagcgacagcttctgggaggtcgggaactacaagcggactgtgaagcggatcgacgatg

SEQ ID NO: 170612 - DNA, 664 bp, Homo sapiens
  Payload ID: 13585
  Gene Symbol: PACSIN2
  Gene Name: protein kinase C and casein kinase substrate in neurons 2
  ENST ID: ENST00000422336
  CDS Start-End: 209-664
actttgatgagcaaggaacgctgttttagaaaatccttactacttgatgattaatccttggagctaatgttccacgttcccaaggttgtgagtgcttatggccacattcctgcatcagctcagccatcgcggtttgtctacagattttgagcgttcgaagttgacccctgactaagtatactttgctgctccctcagcctttgaaaaaatgtctgtcacatatgatgattccgttggagtagaagtgtccagcgacagcttctgggaggtcgggaactacaagcggactgtgaagcggatcgacgatggccaccgcctgtgcagcgacctcatgaactgcctgcatgagcgggcgcgcatcgagaaggcgtatgcgcagcagctcactgagtgggcccggcgctggaggcagctcgtggagaaagggccccagtacgggaccgtggagaaggcctggatggccttcatgtccgaggcagagagggtgagcgagctgcacctcgaggtgaaggcctcactgatgaacgatgacttcgagaagatcaagaactggcagaaggaagcctttcacaagcagatgatgggcggcttcaaggagaccaaggaagctgaggacggctttcggaaggcacagaagccctgggccaagaagctgaaagaggta

SEQ ID NO: 170613 - DNA, 362 bp, Homo sapiens
  Payload ID: 13585
  Gene Symbol: PACSIN2
  Gene Name: protein kinase C and casein kinase substrate in neurons 2
  ENST ID: ENST00000507586
  CDS Start-End: 1-178
gacggaagtgcgagtccgggccctgtatgactatgaggggcaggagcatgatgagctgagcttcaaggctgagacggggtttcaccatattatccagtctggtcttgaactcctgagctcaagtgatcctcccgcctcagcctcccaaagtgctgggatcacaggcatgagcccctgagactgcaaataaaccatgctttagagaagatctacagagttggattccaactggtcatggtttcagttgcgatgcatgcaagtcggaggaaacgctagtgcatcttccttttttcatcaacatgggtgttccaccaatgacaccaatgccaagtacaacagtcgtgctgctcagctctataggg

SEQ ID NO: 170614 - DNA, 1431 bp, Homo sapiens
  Payload ID: 13585
  Gene Symbol: PACSIN2
  Gene Name: protein kinase C and casein kinase substrate in neurons 2
  ENST ID: ENST00000634914
  CDS Start-End: 78-1431
gtttgtctacagattttgagcgttcgaagttgacccctgactaagtatactttgctgctccctcagcctttgaaaaaatgtctgtcacatatgatgattccgttggagtagaagtgtccagcgacagcttctgggaggtcgggaactacaagcggactgtgaagcggatcgacgatggccaccgcctgtgcagcgacctcatgaactgcctgcatgagcgggcgcgcatcgagaaggcgtatgcgcagcagctcactgagtgggcccggcgctggaggcagctcgtggagaaagggccccagtacgggaccgtggagaaggcctggatggccttcatgtccgaggcagagagggtgagcgagctgcacctcgaggtgaaggcctcactgatgaacgatgacttcgagaagatcaagaactggcagaaggaagcctttcacaagcagatgatgggcggcttcaaggagaccaaggaagctgaggacggctttcggaaggcacagaagccctgggccaagaagctgaaagaggtagaagcagcaaagaaagcccaccatgcagcgtgcaaagaggagaagctggctatctcacgagaagccaacagcaaggcagacccatccctcaaccctgaacagctcaagaaattgcaagacaaaatagaaaagtgcaagcaagatgttcttaagaccaaagagaagtatgagaagtccctgaaggaactcgaccagggcacaccccagtacatggagaacatggagcaggtgtttgagcagtgccagcagttcgaggagaaacgccttcgcttcttccgggaggttctgctggaggttcagaagcacctagacctgtccaatgtggctggctacaaagccatttaccatgacctggagcagagcatcagagcagctgatgcagtggaggacctgaggtggttccgagccaatcacgggccgggcatggccatgaactggccgcagtttgaggatgaagagtggtccgcagacctgaatcgaaccctcagccggagagagaagaagaaggccactgacggcgtcaccctgacgggcatcaaccagacaggcgaccagtctctgccgagtaagcccagcagcacccttaatgtcccgagcaaccccgcccagtctgcgcagtcacagtccagctacaaccccttcgaggatgaggacgacacgggcagcaccgtcagtgagaaggacgacactaaggccaaaaatgtgagcagctacgagaagacccagagctatcccaccgactggtcagacgatgagtctaacaaccccttctcctccacggatgccaatggggactcgaatccattcgacgacgacgccacctcggggacggaagtgcgagtccgggccctgtatgactatgaggggcaggagcatgatgagctgagcttcaaggctg

SEQ ID NO: 170615 - DNA, 1843 bp, Homo sapiens
  Payload ID: 13586
  Gene Symbol: PACSIN3
  Gene Name: protein kinase C and casein kinase substrate in neurons 3
  Uniprot ID: Q9UKS6
  ENST ID: ENST00000298838
  CDS Start-End: 163-1437
aggactcgggccggagcgtggccggacccccacccgccgaggggcccagggaggacgcggcagagtcacggtggcagcattgagagttggacacccgggtccttgaagtgatctctaggccccagccccaaatccgccaccattccgtgctgcggggacaccatggctccagaagaggacgctggaggggaggccttagggggcagtttctgggaggctggcaactacaggcgcacggtacagcgggtggaggacgggcaccggctgtgcggggacctggtcagctgcttccaggagcgcgcccgcatcgagaaggcttatgcccagcagttggctgactgggcccgaaagtggagggggaccgtggagaagggcccccagtatggcacactggagaaggcctggcatgcctttttcacggcggctgagcggctgagcgcgctgcacctggaggtgcgggagaagctgcaagggcaggacagtgagcgggtgcgcgcctggcagcggggggctttccaccggcctgtgctgggcggcttccgcgagagccgggcggccgaggacggcttccgcaaggcccagaagccctggctgaagaggctgaaggaggttgaggcttccaagaaaagctaccacgcagcccggaaggatgagaagaccgcccagacgagggagagccacgcaaaggcagacagcgccgtctcccaggagcagctgcgcaaactgcaggaacgggtggaacgctgtgccaaggaggccgagaagacaaaagctcagtatgagcagacgctggcagagctgcatcgctacactccacgctacatggaggacatggaacaggcctttgagacctgccaggccgccgagcgccagcggcttcttttcttcaaggatatgctgctcaccttacaccagcacctggacctttccagcagtgagaagttccatgaactccaccgtgacttgcaccagggcattgaggcagccagtgacgaagaggatctgcgctggtggcgcagcacccacgggccaggcatggccatgaactggccacagttcgaggagtggtccttggacacacagaggacaatcagccggaaagagaagggtggccggagccctgatgaggttaccctgaccagcattgtgcctacaagagatggcaccgcacccccaccccagtccccggggtccccaggcacggggcaggatgaggagtggtcagatgaagagagtccccggaaggctgccaccggggttcgggtgagggcactctatgactacgctggccaggaagctgatgagctgagcttccgagcaggggaggagctgctgaagatgagtgaggaggacgagcagggctggtgccaaggccagttgcagagtggccgcattggcctgtaccctgccaactacgtggagtgtgtgggcgcctgagtgtcctgacagcccttctgcaacgtttacccaccctggttcagagcccagcttctcctggagagccggaccctcagggccctgaaccgtcgctctctggctgctcctctgtcccttgagggaggaagtcctgggacccagggaggggaggggcctttgtctagggaagggactggtagggaagggacgagtctaggctgagggcaagatgggaggtcagaggtgacagaagcgttcaggggtgcctgggcctccccaggagctgtggactcagttcctgacctctgctttggggttcctggggtgggcttggggtgagtgtagttctggcctagcagcaccctcttgtggcttgttctagcgtgtattaaaacttgacacacacccacacacaaaaacaaaaaca

SEQ ID NO: 170616 - DNA, 554 bp, Homo sapiens
  Payload ID: 13586
  Gene Symbol: PACSIN3
  Gene Name: protein kinase C and casein kinase substrate in neurons 3
  ENST ID: ENST00000524509
  CDS Start-End: 347-554
agcggcaggactcgggccggagcgtggccggacccccacccgccgaggggcccagggaggacgcgcgcgtggggacacacaaatcagaatcctggaagcctctgtcggtgactgaagatagacactgtcctgtcagccacaactccatgggttatacaccccggctgaagggtcacccggggctacaggagcaaggacagagaaacaggggaagtgactgaggagaagatgccttaattggaggcagagtcacggtggcagcattgagagttggacacccgggtccttgaagtgatctctaggccccagccccaaatccgccaccattccgtgctgcggggacaccatggctccagaagaggacgctggaggggaggccttagggggcagtttctgggaggctggcaactacaggcgcacggtacagcgggtggaggacgggcaccggctgtgcggggacctggtcagctgcttccaggagcgcgcccgcatcgagaaggcttatgcccagcagttggctgactgggcccgaaagtggagggggaccgtggaga

SEQ ID NO: 170617 - DNA, 912 bp, Homo sapiens
  Payload ID: 13586
  Gene Symbol: PACSIN3
  Gene Name: protein kinase C and casein kinase substrate in neurons 3
  ENST ID: ENST00000530513
  CDS Start-End: 768-912
cgctccgggaggccgcggcgcgggcccaggagcggcaggactcgggccggagcgtggccggacccccacccgccgaggggcccagggaggacgcggcagagtcacggtggcagcattgagagttggacacccgggtccttgaagtgatctctaggccccaggctggcaactacaggcgcacggtacagcgggtggaggacgggcaccggctgtgcggggacctggtcagctgcttccaggagcgcgcccgcatcgagaaggcttatgcccagcagttggctgactgggcccgaaagtggagggggaccgtggagaagggcccccagtatggcacactggagaaggcctggcatgcctttttcacggcggctgagcggctgagcgcgctgcacctggaggtgcgggagaagctgcaagggcaggacagtgagcgggtgcgcgcctggcagcggggggctttccaccggcctgtgctgggcggcttccgcgagagccgggcggccgaggacggcttccgcaaggcccagaagccctggctgaagaggctgaaggaggttgaggcttccaagaaaagctaccacgcagcccggaaggatgagaagaccgcccagacgagggagagccacgcaaaggcagacagcgccgtctcccaggagcagctgcgcaaactgcaggaacgggtggaacgctgtgccaaggaggccgagaagacaaaagctcagtatgagcagacgctggcagagctgcatcgctacactccacgctacatggaggacatggaacaggcctttgagacctgccaggccgccgagcgccagcggcttcttttcttcaaggatatgctgctcaccttacaccagcacctggacctttccagcagtgagaagttccatgaactccaccgtgacttgc

SEQ ID NO: 170618 - DNA, 1845 bp, Homo sapiens
  Payload ID: 13586
  Gene Symbol: PACSIN3
  Gene Name: protein kinase C and casein kinase substrate in neurons 3
  ENST ID: ENST00000532457
  CDS Start-End: 196-1158
tccgggaggccgcggcgcgggcccaggagcggcaggactcgggccggagcgtggccggacccccacccgccgaggggcccagggaggacgcggcagagtcacggtggcagcattgagagttggacacccgggtccttgaagtgatctctaggccccagccccaaatccgccaccattccgtgctgcggggacaccatggctccagaagaggacgctggaggggaggccttagggggcagtttctgggaggctggcaactacaggcgcacggtacagcgggtggaggacgggcaccggctgtgcggggacctggtcagctgcttccaggagcgcgcccgcatcgagaaggcttatgcccagcagttggctgactgggcccgaaagtggagggggaccgtggagaagggcccccagtatggcacactggagaaggcctggcatgcctttttcacggcggctgagcggctgagcgcgctgcacctggaggtgcgggagaagctgcaagggcaggacagtgagcgggtgcgcgcctggcagcggggggctttccaccggcctgtgctgggcggcttccgcgagagccgggcggccgaggacggcttccgcaaggcccagaagccctggctgaagaggctgaaggaggttgaggcttccaagaaaagctaccacgcagcccggaaggatgagaagaccgcccagacgagggagagccacgcaaaggcagacagcgccgtctcccaggagcagctgcgcaaactgcaggaacgggtggaacgctgtgccaaggaggccgagaagacaaaagctcagtatgagcagacgctggcagagctgcatcgctacactccacgctacatggaggacatggaacaggcctttgagacctgccaggccgccgagcgccagcggcttcttttcttcaaggatatgctgctcaccttacaccagcacctggacctttccagcagtgagaagttccatgaactccaccgtgacttgcaccagggcattgaggcagccagtgacgaagaggatctgcgctggtggcgcagcacccacgggccaggcatggccatgaactggccacagttcgaggcattggtccttggacacacagaggacaatcagccggaaagagaagggtggccggagccctgatgaggttaccctgaccagcattgtgcctacaagagatggcaccgcacccccaccccagtccccggggtccccaggcacggggcaggatgaggagtggtcagatgaagagagtccccggaaggctgccaccggggttcgggtgagggcactctatgactacgctggccaggaagctgatgagctgagcttccgagcaggggaggagctgctgaagatgagtgaggaggacgagcagggctggtgccaaggccagttgcagagtggccgcattggcctgtaccctgccaactacgtggagtgtgtgggcgcctgagtgtcctgacagcccttctgcaacgtttacccaccctggttcagagcccagcttctcctggagagccggaccctcagggccctgaaccgtcgctctctggctgctcctctgtcccttgagggaggaagtcctgggacccagggaggggaggggcctttgtctagggaagggactggtagggaagggacgagtctaggctgagggcaagatgggaggtcagaggtgacagaagcgttcaggggtgcctgggcctccccaggagctgtggactcagttcctgacctctgctttggggttcctggggtgggcttggggtgagtgtagttctggcctagcagcaccctcttgtggcttgttctagcgtgtattaaaac

SEQ ID NO: 170619 - DNA, 443 bp, Homo sapiens
  Payload ID: 13586
  Gene Symbol: PACSIN3
  Gene Name: protein kinase C and casein kinase substrate in neurons 3
  ENST ID: ENST00000533686
  CDS Start-End: 1-229
agaggatctgcgctggtggcgcagcacccacgggccaggcatggccatgaactggccacagttcgaggagtggtccttggacacacagaggacaatcagccggaaagagaagggtggccggagccctgatgaggttaccctgaccagcattgtgcctacaagagatggcaccgcacccccaccccagtccccggggtccccagggggaggagctgctgaagatgagtgaggaggacgagcagggctggtgccaaggccagttgcagagtggccgcattggcctgtaccctgccaactacgtggagtgtgtgggcgcctgagtgtcctgacagcccttctgcaacgtttacccaccctggttcagagcccagcttctcctggagagccggaccctcagggccctgaaccgtcgctctctggctgctcctctgtcccttgaggga

SEQ ID NO: 170620 - DNA, 864 bp, Homo sapiens
  Payload ID: 13586
  Gene Symbol: PACSIN3
  Gene Name: protein kinase C and casein kinase substrate in neurons 3
  ENST ID: ENST00000528201
  CDS Start-End: 757-864
ggaggccgcggcgcgggcccaggagcggcaggactcgggccggagcgtggccggacccccacccgccgaggggcccagggaggacgcgagtcacggtggcagcattgagagttggacacccgggtccttgaagtgatctctaggccccaggctggcaactacaggcgcacggtacagcgggtggaggacgggcaccggctgtgcggggacctggtcagctgcttccaggagcgcgcccgcatcgagaaggcttatgcccagcagttggctgactgggcccgaaagtggagggggaccgtggagaagggcccccagtatggcacactggagaaggcctggcatgcctttttcacggcggctgagcggctgagcgcgctgcacctggaggtgcgggagaagctgcaagggcaggacagtgagcgggtgcgcgcctggcagcggggggctttccaccggcctgtgctgggcggcttccgcgagagccgggcggccgaggacggcttccgcaaggcccagaagccctggctgaagaggctgaaggaggttgaggcttccaagaaaagctaccacgcagcccggaaggatgagaagaccgcccagacgagggagagccacgcaaaggcagacagcgccgtctcccaggagcagctgcgcaaactgcaggaacgggtggaacgctgtgccaaggaggccgagaagacaaaagctcagtatgagcagacgctggcagagctgcatcgctacactccacgctacatggaggacatggaacaggcctttgagacctgccaggccgccgagcgccagcggcttcttttcttcaaggatatgctgctcaccttacaccagcacctggacctttcc

SEQ ID NO: 170621 - DNA, 654 bp, Homo sapiens
  Payload ID: 13586
  Gene Symbol: PACSIN3
  Gene Name: protein kinase C and casein kinase substrate in neurons 3
  ENST ID: ENST00000531226
  CDS Start-End: 210-654
gcaggactcgggccggagcgtggccggacccccacccgccgaggggcccagggaggacgcggcagagtcacggtggcagcattgagagttggacacccgggtccttgaagtgatctctaggccccagaaacataatgtccagctttcctgcttacccctctgccctccacagccccaaatccgccaccattccgtgctgcggggacaccatggctccagaagaggacgctggaggggaggccttagggggcagtttctgggaggctggcaactacaggcgcacggtacagcgggtggaggacgggcaccggctgtgcggggacctggtcagctgcttccaggagcgcgcccgcatcgagaaggcttatgcccagcagttggctgactgggcccgaaagtggagggggaccgtggagaagggcccccagtatggcacactggagaaggcctggcatgcctttttcacggcggctgagcggctgagcgcgctgcacctggaggtgcgggagaagctgcaagggcaggacagtgagcgggtgcgcgcctggcagcggggggctttccaccggcctgtgctgggcggcttccgcgagagccgggcggccgaggacggcttccgcaaggcccagaagccctggctgaagaggctgaagg

SEQ ID NO: 170622 - DNA, 683 bp, Homo sapiens
  Payload ID: 13586
  Gene Symbol: PACSIN3
  Gene Name: protein kinase C and casein kinase substrate in neurons 3
  ENST ID: ENST00000525725
  CDS Start-End: 258-683
aggggctgcccgggaaagaagcccttgggcgcagcctgtgactcaggttccagggatgggccaggcagaatggctgagctccctcccaggggcaagcccccagcttctggaagaggttggggctggtctggggccgggtaccttcaggcctcaggcagagtcacggtggcagcattgagagttggacacccgggtccttgaagtgatctctaggccccagccccaaatccgccaccattccgtgctgcggggacaccatggctccagaagaggacgctggaggggaggccttagggggcagtttctgggaggctggcaactacaggcgcacggtacagcgggtggaggacgggcaccggctgtgcggggacctggtcagctgcttccaggagcgcgcccgcatcgagaaggcttatgcccagcagttggctgactgggcccgaaagtggagggggaccgtggagaagggcccccagtatggcacactggagaaggcctggcatgcctttttcacggcggctgagcggctgagcgcgctgcacctggaggtgcgggagaagctgcaagggcaggacagtgagcgggtgcgcgcctggcagcggggggctttccaccggcctgtgctgggcggcttccgcgagagccgggcggccgaggacggcttccgcaaggcccagaagccc

SEQ ID NO: 170623 - DNA, 563 bp, Homo sapiens
  Payload ID: 13586
  Gene Symbol: PACSIN3
  Gene Name: protein kinase C and casein kinase substrate in neurons 3
  ENST ID: ENST00000530405
  CDS Start-End: 356-563
gtcactcaagggaaggcaacagaggccctagcctgggcaggagtcctctcatcggcagttgggggagtggggccttctgcccaccgcccacccccgcctgccatttaatccctggctggatcgtgtgacctgcctggcattctcctccctggaatccggcgcttctgacagcagttgctatattgggggtgccgggcaccgccctggacgctctaggcccccaccctcacccccgctctgttctccttcaaggcagagtcacggtggcagcattgagagttggacacccgggtccttgaagtgatctctaggccccagccccaaatccgccaccattccgtgctgcggggacaccatggctccagaagaggacgctggaggggaggccttagggggcagtttctgggaggctggcaactacaggcgcacggtacagcgggtggaggacgggcaccggctgtgcggggacctggtcagctgcttccaggagcgcgcccgcatcgagaaggcttatgcccagcagttggctgactgggcccgaaagtggagggggaccgtggaga

SEQ ID NO: 170624 - DNA, 1560 bp, Homo sapiens
  Payload ID: 13586
  Gene Symbol: PACSIN3
  Gene Name: protein kinase C and casein kinase substrate in neurons 3
  ENST ID: ENST00000528462
  CDS Start-End: 344-1560
aagaccaagttcaacaagtttggccaagaagtctagagcttcggtggctaggcctggccctgccgctccgcgtggctccacgggctccgagttatgcagctccgggcggcaaggggtcctgtcgaggggcgcggtccataagggttgaggccagaggcgcgtagcctctgggcgccgagctctggagtggaggctggggttcggagtgcgtcatctggaagcaggcaccccggccggcaggcagagtcacggtggcagcattgagagttggacacccgggtccttgaagtgatctctaggccccagccccaaatccgccaccattccgtgctgcggggacaccatggctccagaagaggacgctggaggggaggccttagggggcagtttctgggaggctggcaactacaggcgcacggtacagcgggtggaggacgggcaccggctgtgcggggacctggtcagctgcttccaggagcgcgcccgcatcgagaaggcttatgcccagcagttggctgactgggcccgaaagtggagggggaccgtggagaagggcccccagtatggcacactggagaaggcctggcatgcctttttcacggcggctgagcggctgagcgcgctgcacctggaggtgcgggagaagctgcaagggcaggacagtgagcgggtgcgcgcctggcagcggggggctttccaccggcctgtgctgggcggcttccgcgagagccgggcggccgaggacggcttccgcaaggcccagaagccctggctgaagaggctgaaggaggttgaggcttccaagaaaagctaccacgcagcccggaaggatgagaagaccgcccagacgagggagagccacgcaaaggcagacagcgccgtctcccaggagcagctgcgcaaactgcaggaacgggtggaacgctgtgccaaggaggccgagaagacaaaagctcagtatgagcagacgctggcagagctgcatcgctacactccacgctacatggaggacatggaacaggcctttgagacctgccaggccgccgagcgccagcggcttcttttcttcaaggatatgctgctcaccttacaccagcacctggacctttccagcagtgagaagttccatgaactccaccgtgacttgcaccagggcattgaggcagccagtgacgaagaggatctgcgctggtggcgcagcacccacgggccaggcatggccatgaactggccacagttcgaggagtggtccttggacacacagaggacaatcagccggaaagagaagggtggccggagccctgatgaggttaccctgaccagcattgtgcctacaagagatggcaccgcacccccaccccagtccccggggtccccaggcacggggcaggatgaggagtggtcagatgaagagagtccccggaaggctgccaccggggttcgggtgagggcactctatgactacgctggccaggaagctgatgagctgagcttccgagcaggggaggagctgctgaagatgagtgaggaggacgagcagggctggtgccaaggccagtt

SEQ ID NO: 170625 - DNA, 2009 bp, Homo sapiens
  Payload ID: 13586
  Gene Symbol: PACSIN3
  Gene Name: protein kinase C and casein kinase substrate in neurons 3
  Uniprot ID: Q9UKS6
  ENST ID: ENST00000539589
  CDS Start-End: 344-1618
aagaccaagttcaacaagtttggccaagaagtctagagcttcggtggctaggcctggccctgccgctccgcgtggctccacgggctccgagttatgcagctccgggcggcaaggggtcctgtcgaggggcgcggtccataagggttgaggccagaggcgcgtagcctctgggcgccgagctctggagtggaggctggggttcggagtgcgtcatctggaagcaggcaccccggccggcaggcagagtcacggtggcagcattgagagttggacacccgggtccttgaagtgatctctaggccccagccccaaatccgccaccattccgtgctgcggggacaccatggctccagaagaggacgctggaggggaggccttagggggcagtttctgggaggctggcaactacaggcgcacggtacagcgggtggaggacgggcaccggctgtgcggggacctggtcagctgcttccaggagcgcgcccgcatcgagaaggcttatgcccagcagttggctgactgggcccgaaagtggagggggaccgtggagaagggcccccagtatggcacactggagaaggcctggcatgcctttttcacggcggctgagcggctgagcgcgctgcacctggaggtgcgggagaagctgcaagggcaggacagtgagcgggtgcgcgcctggcagcggggggctttccaccggcctgtgctgggcggcttccgcgagagccgggcggccgaggacggcttccgcaaggcccagaagccctggctgaagaggctgaaggaggttgaggcttccaagaaaagctaccacgcagcccggaaggatgagaagaccgcccagacgagggagagccacgcaaaggcagacagcgccgtctcccaggagcagctgcgcaaactgcaggaacgggtggaacgctgtgccaaggaggccgagaagacaaaagctcagtatgagcagacgctggcagagctgcatcgctacactccacgctacatggaggacatggaacaggcctttgagacctgccaggccgccgagcgccagcggcttcttttcttcaaggatatgctgctcaccttacaccagcacctggacctttccagcagtgagaagttccatgaactccaccgtgacttgcaccagggcattgaggcagccagtgacgaagaggatctgcgctggtggcgcagcacccacgggccaggcatggccatgaactggccacagttcgaggagtggtccttggacacacagaggacaatcagccggaaagagaagggtggccggagccctgatgaggttaccctgaccagcattgtgcctacaagagatggcaccgcacccccaccccagtccccggggtccccaggcacggggcaggatgaggagtggtcagatgaagagagtccccggaaggctgccaccggggttcgggtgagggcactctatgactacgctggccaggaagctgatgagctgagcttccgagcaggggaggagctgctgaagatgagtgaggaggacgagcagggctggtgccaaggccagttgcagagtggccgcattggcctgtaccctgccaactacgtggagtgtgtgggcgcctgagtgtcctgacagcccttctgcaacgtttacccaccctggttcagagcccagcttctcctggagagccggaccctcagggccctgaaccgtcgctctctggctgctcctctgtcccttgagggaggaagtcctgggacccagggaggggaggggcctttgtctagggaagggactggtagggaagggacgagtctaggctgagggcaagatgggaggtcagaggtgacagaagcgttcaggggtgcctgggcctccccaggagctgtggactcagttcctgacctctgctttggggttcctggggtgggcttggggtgagtgtagttctggcctagcagcaccctcttgtggcttgttctagcgtgtattaaaacttgacacacacccacac

SEQ ID NO: 170626 - DNA, 569 bp, Homo sapiens
  Payload ID: 13587
  Gene Symbol: PRKCSH
  Gene Name: protein kinase C substrate 80K-H
  ENST ID: ENST00000591946
  CDS Start-End: 384-569
aactttctttccggcttgagaagccgccactcccaagatggaggtacgctgcgccgccattaagagctagccctcagaactatcctctctaaggtttcacagtcctgcccaagatggccgtctcggctctggcaccgcccccactcctgcctctcccaacatggcgaccctgagtctccgttcccggtgcggaacgtacgaccggaagtgacggggtccagaaatttccgctttctttctgcagcaggaaccgcggctgctggacaagaggggtgcggtggatactgacctttgctccggcctcgtcgtgaagacacagcgcatctccccgctgtaggcttcctcccacagaacccgtttcgggcctcagagcgtctggtgagatgctgttgccgctgctgctgctgctacccatgtgctgggccgtggaggtcaagaggccccggggcgtctccctcaccaatcatcacttctacgatgagtccaagcctttcacctgcctggacggttcggccaccatcccatttgatcaggtcaacgatgactattgcgactgcaaagatggctct

SEQ ID NO: 170627 - DNA, 578 bp, Homo sapiens
  Payload ID: 13587
  Gene Symbol: PRKCSH
  Gene Name: protein kinase C substrate 80K-H
  ENST ID: ENST00000593101
  CDS Start-End: 147-578
agtttcttacagggggcaaccggagggtgcatgtgtgggtgtggacggcggaggctgttaatccctttgcgtgaagacacagcgcatctccccgctgtaggcttcctcccacagaacccgtttcgggcctcagagcgtctggtgagatgctgttgccgctgctgctgctgctacccatgtgctgggccgtggaggtcaagaggccccggggcgtctccctcaccaatcatcacttctacgatgagtccaagcctttcacctgcctggacggttcggccaccatcccatttgatcaggtcaacgatgactattgcgactgcaaagatggctctgacgagccaggcacggctgcctgtcctaatggcagcttccactgcaccaacactggctataagcccctgtatatcccctccaaccgggtcaacgatggtgtttgtgactgctgcgatggaacagacgagtacaacagcggcgtcatctgtgagaacacctgcaaagagaagggccgtaaggagagagagtccctgcagcagatggccgaggtcacccgcgaagggttccgtctgaagaagatcctt

SEQ ID NO: 170628 - DNA, 1898 bp, Homo sapiens
  Payload ID: 13587
  Gene Symbol: PRKCSH
  Gene Name: protein kinase C substrate 80K-H
  Uniprot ID: P14314
  ENST ID: ENST00000589838
  CDS Start-End: 1-1587
atgctgttgccgctgctgctgctgctacccatgtgctgggccgtggaggtcaagaggccccggggcgtctccctcaccaatcatcacttctacgatgagtccaagcctttcacctgcctggacggttcggccaccatcccatttgatcaggtcaacgatgactattgcgactgcaaagatggctctgacgagccaggcacggctgcctgtcctaatggcagcttccactgcaccaacactggctataagcccctgtatatcccctccaaccgggtcaacgatggtgtttgtgactgctgcgatggaacagacgagtacaacagcggcgtcatctgtgagaacacctgcaaagagaagggccgtaaggagagagagtccctgcagcagatggccgaggtcacccgcgaagggttccgtctgaagaagatccttattgaggactggaagaaggcacgggaggagaagcagaaaaagctcattgagctacaggctgggaagaagtctctggaagaccaggtggagatgctgcggacagtgaaggaggaagctgagaagccagagagagaggccaaagagcagcaccagaagctgtgggaagagcagctggctgctgccaaggcccaacaggagcaggagctggcggctgatgccttcaaggagctggatgatgacatggacgggacggtctcggtgactgagctgcagactcacccggagctggacacagatggggatggggcgttgtcagaagcggaagctcaggccctcctcagtggggacacacagacagacgccacctctttctacgaccgcgtctgggccgccatcagggacaagtaccggtccgaggcactgcccaccgaccttccagcaccttctgcccctgacttgacggagcccaaggaggagcagccgccagtgccctcgtcgcccacagaggaggaggaggaggaggaggaggaggaggaagaagaggctgaagaagaggaggaggaggaggattccgaggaggccccaccgccactgtcacccccgcagccggccagccctgctgaggaagacaaaatgccgccctacgacgagcagacgcaggccttcatcgatgctgcccaggaggcccgcaacaagttcgaggaggccgagcggtcgctgaaggacatggaggagtccatcaggaacctggagcaagagatttcttttgactttggccccaacggggagtttgcttacctgtacagccagtgctacgagctcaccaccaacgaatacgtctaccgcctctgccccttcaagcttgtctcgcagaaacccaaactcgggggctctcccaccagccttggcacctggggctcatggattggccccgaccacgacaagttcagtgccatgaagtatgagcaaggcacgggctgctggcagggccccaaccgctccaccaccgtgcgcctcctgtgcgggaaagagaccatggtgaccagcaccacagagcccagtcgctgcgagtacctcatggagctgatgacgccagccgcctgcccggagccaccgcctgaagcacccaccgaagacgaccatgacgagctctagctggatgggcgcagagaacctcaagaaggcatgaagccagcccctgcagtgccgtccacccgcccctctgggcctgcctgtggctctgttgccctcctctgtggcggcaggacctttgtggggcttcgtgccctgctctggggcccaggcggggctggtccacattcccaggccccaacagccttcaaagatgggtaaaggagcttgccctccctgggccccccaccttggtgactcgccccaccacccccagccctgtccctgccacccctcctagtggggactagtgaatgacttgacctgtgacctca

SEQ ID NO: 170629 - DNA, 2209 bp, Homo sapiens
  Payload ID: 13587
  Gene Symbol: PRKCSH
  Gene Name: protein kinase C substrate 80K-H
  Uniprot ID: P14314
  ENST ID: ENST00000591462
  CDS Start-End: 296-1873
agagccgcgccgcaggacggagggtctggacactttggggtcacgtgctcattccgtttccctacctcccccaaccttatcccgcccctgggggttcgcgggcatttttcaggaactttctttccggcttgagaagccgccactcccaagatggagcaggaaccgcggctgctggacaagaggggtgcggtggatactgacctttgctccggcctcgtcgtgaagacacagcgcatctccccgctgtaggcttcctcccacagaacccgtttcgggcctcagagcgtctggtgagatgctgttgccgctgctgctgctgctacccatgtgctgggccgtggaggtcaagaggccccggggcgtctccctcaccaatcatcacttctacgatgagtccaagcctttcacctgcctggacggttcggccaccatcccatttgatcaggtcaacgatgactattgcgactgcaaagatggctctgacgagccaggcacggctgcctgtcctaatggcagcttccactgcaccaacactggctataagcccctgtatatcccctccaaccgggtcaacgatggtgtttgtgactgctgcgatggaacagacgagtacaacagcggcgtcatctgtgagaacacctgcaaagagaagggccgtaaggagagagagtccctgcagcagatggccgaggtcacccgcgaagggttccgtctgaagaagatccttattgaggactggaagaaggcacgggaggagaagcagaaaaagctcattgagctacaggctgggaagaagtctctggaagaccaggtggagatgctgcggacagtgaaggaggaagctgagaagccagagagagaggccaaagagcagcaccagaagctgtgggaagagcagctggctgctgccaaggcccaacaggagcaggagctggcggctgatgccttcaaggagctggatgatgacatggacgggacggtctcggtgactgagctgcagactcacccggagctggacacagatggggatggggcgttgtcagaagcggaagctcaggccctcctcagtggggacacacagacagacgccacctctttctacgaccgcgtctgggccgccatcagggacaagtaccggtccgaggcactgcccaccgaccttccagcaccttctgcccctgacttgacggagcccaaggaggagcagccgccagtgccctcgtcgcccacagaggaggaggaggaggaggaggaggaggaggaagaagaggctgaagaagaggaggaggaggaggattccgaggtgcagggggagcagcccaagccggccagccctgctgaggaagacaaaatgccgccctacgacgagcagacgcaggccttcatcgatgctgcccaggaggcccgcaacaagttcgaggaggccgagcggtcgctgaaggacatggaggagtccatcaggaacctggagcaagagatttcttttgactttggccccaacggggagtttgcttacctgtacagccagtgctacgagctcaccaccaacgaatacgtctaccgcctctgccccttcaagcttgtctcgcagaaacccaaactcgggggctctcccaccagccttggcacctggggctcatggattggccccgaccacgacaagttcagtgccatgaagtatgagcaaggcacgggctgctggcagggccccaaccgctccaccaccgtgcgcctcctgtgcgggaaagagaccatggtgaccagcaccacagagcccagtcgctgcgagtacctcatggagctgatgacgccagccgcctgcccggagccaccgcctgaagcacccaccgaagacgaccatgacgagctctagctggatgggcgcagagaacctcaagaaggcatgaagccagcccctgcagtgccgtccacccgcccctctgggcctgcctgtggctctgttgccctcctctgtggcggcaggacctttgtggggcttcgtgccctgctctggggcccaggcggggctggtccacattcccaggccccaacagccttcaaagatgggtaaaggagcttgccctccctgggccccccaccttggtgactcgccccaccacccccagccctgtccctgccacccctcctagtggggactagtgaatgacttgacctgtgacctcaatacaataaatgtgatcccccaccc

SEQ ID NO: 170630 - DNA, 545 bp, Homo sapiens
  Payload ID: 13587
  Gene Symbol: PRKCSH
  Gene Name: protein kinase C substrate 80K-H
  ENST ID: ENST00000587509
  CDS Start-End: 124-545
tccgctttctttctgcagcaggaaccgcggctgctggacaagagggcgtgaagacacagcgcatctccccgctgtaggcttcctcccacagaacccgtttcgggcctcagagcgtctggtgagatgctgttgccgctgctgctgctgctacccatgtgctgggccgtggaggtcaagaggccccggggcgtctccctcaccaatcatcacttctacgatgagtccaagcctttcacctgcctggacggttcggccaccatcccatttgatcaggtcaacgatgactattgcgactgcaaagatggctctgacgagccaggcacggctgcctgtcctaatggcagcttccactgcaccaacactggctataagcccctgtatatcccctccaaccgggtcaacgatggtgtttgtgactgctgcgatggaacagacgagtacaacagcggcgtcatctgtgagaacacctgcaaagagaagggccgtaaggagagagagtccctgcagcagatggccgaggtcacccgcgaagggttccgtctgaa

SEQ ID NO: 170631 - DNA, 557 bp, Homo sapiens
  Payload ID: 13587
  Gene Symbol: PRKCSH
  Gene Name: protein kinase C substrate 80K-H
  ENST ID: ENST00000588269
  CDS Start-End: 161-557
atttccgctttctttctgcagcaggaaccgcggctgctggacaagaggggtgcggtggatactgacctttgctccggcctcgtcgtgaagacacagcgcatctccccgctgtaggcttcctcccacagaacccgtttcgggcctcagagcgtctggtgagatgctgttgccgctgctgctgctgctacccatgtgctgggccgtggaggtcaagaggccccggggcgtctccctcaccagtgagtcctcctgttcaccctcccgccaggctggaggtgggaggggccaacattgggccttagggataggcatttacagccttttgactcagtttcccggtagtgctccgctggtggggatgggaggacagaggtggtatttggtggagaaggcgcttacctgccctgggctgagcttcctgtaccccgcagatcatcacttctacgatgagtccaagcctttcacctgcctggacggttcggccaccatcccatttgatcaggtcaacgatgactattgcgactgcaaagatggctctgacgagccaggcacggctg

SEQ ID NO: 170632 - DNA, 1613 bp, Homo sapiens
  Payload ID: 13587
  Gene Symbol: PRKCSH
  Gene Name: protein kinase C substrate 80K-H
  ENST ID: ENST00000586486
  CDS Start-End: 1-603
gctgaagaagaggaggaggaggaggattccgaggtgcagggggagcagcccaagccggccagccctgctgaggaagacaaaatgccgccctacgacgagcagacgcaggccttcatcgatgctgcccaggaggcccgcaacaagttcgaggaggccgagcggtcgctgaaggacatggaggagtccatcaggaacctggagcaagagatttcttttgactttggccccaacggggagtttgcttacctgtacagccagtgctacgagctcaccaccaacgaatacgtctaccgcctctgccccttcaagcttgtctcgcagaaacccaaactcgggggctctcccaccagccttggcacctggggctcatggattggccccgaccacgacaagttcagtgccatgaagtatgagcaaggcacgggctgctggcagggccccaaccgctccaccaccgtgcgcctcctgtgcgggaaagagaccatggtgaccagcaccacagagcccagtcgctgcgagtacctcatggagctgatgacgccagccgcctgcccggagccaccgcctgaagcacccaccgaagacgaccatgacgagctctagctggatgggcgcagaggtgggcggggaggtggagtctcgtcggcctgccccagcaaggggaggcggcgggccctgaggaagatggacccacatggccactctatcaacctgtgtccccatgttccctgcttttttgttttgtttttttgaggtggagtctcactctttggcccaggctggagtgcagtgatgcgacctcagctgactgcaacctctacctcccgggttcaaacaattgtcttgtctcagcctcccaagtagctgggattacaggtgtgcaccaccatgcctggctaatttttagtagagatggggtttcaccatgttggcctggatggtctcgaactcctgacctcagatgatccacctgccttggcctcccaaagtgctgggattacaggcatgagccaccacacccggccatctcctgcctttttttttttggatggagtttcactcttgttgccgagatcatgctactgcactctccagcctgggctacagagtgagactctcaaaaaaaaaaaataataataataagagaaaatagacaaggtctccaggctggtcaactcctggcctcaaatgatcctcccacctcagcctcccaagcagccgggactacaggcaaacatcaccatgtccagctgtccccagctttctaatctggtctttctcttgccccagaacctcaagaaggcatgaagccagcccctgcagtgccgtccacccgcccctctgggcctgcctgtggctctgttgccctcctctgtggcggcaggacctttgtggggcttcgtgccctgctctggggcccaggcggggctggtccacattcccaggccccaacagccttcaaagatgggtaaaggagcttgccctccctgggccccccaccttggtgactcgccccaccacccccagccctgtccctgccacccctcctagtggggactagtgaatgacttgacctgtgacctcaatacaataaatgtgatcccccacccaaa

SEQ ID NO: 170633 - DNA, 2189 bp, Homo sapiens
  Payload ID: 13587
  Gene Symbol: PRKCSH
  Gene Name: protein kinase C substrate 80K-H
  Uniprot ID: P14314
  ENST ID: ENST00000587327
  CDS Start-End: 374-1951
cttacagggggcaaccggagggtgcatgtgtgggtgtggacggcggaggctgttaatccctttggtctgttggcgggaattgggtcacaattgggcacagggagcggaggttttgagatcttgagatcctcgccattgatttgagcaaagtgagactggccaggattggggagatcgctgcccctcgcccccatatcggaaacaaagtgaggcctcattgcctggaagcgatggaggaatccaattggctggaagtagccctctcccactgaccgggatccgctttcttcctgcagcgtgaagacacagcgcatctccccgctgtaggcttcctcccacagaacccgtttcgggcctcagagcgtctggtgagatgctgttgccgctgctgctgctgctacccatgtgctgggccgtggaggtcaagaggccccggggcgtctccctcaccaatcatcacttctacgatgagtccaagcctttcacctgcctggacggttcggccaccatcccatttgatcaggtcaacgatgactattgcgactgcaaagatggctctgacgagccaggcacggctgcctgtcctaatggcagcttccactgcaccaacactggctataagcccctgtatatcccctccaaccgggtcaacgatggtgtttgtgactgctgcgatggaacagacgagtacaacagcggcgtcatctgtgagaacacctgcaaagagaagggccgtaaggagagagagtccctgcagcagatggccgaggtcacccgcgaagggttccgtctgaagaagatccttattgaggactggaagaaggcacgggaggagaagcagaaaaagctcattgagctacaggctgggaagaagtctctggaagaccaggtggagatgctgcggacagtgaaggaggaagctgagaagccagagagagaggccaaagagcagcaccagaagctgtgggaagagcagctggctgctgccaaggcccaacaggagcaggagctggcggctgatgccttcaaggagctggatgatgacatggacgggacggtctcggtgactgagctgcagactcacccggagctggacacagatggggatggggcgttgtcagaagcggaagctcaggccctcctcagtggggacacacagacagacgccacctctttctacgaccgcgtctgggccgccatcagggacaagtaccggtccgaggcactgcccaccgaccttccagcaccttctgcccctgacttgacggagcccaaggaggagcagccgccagtgccctcgtcgcccacagaggaggaggaggaggaggaggaggaggaggaagaagaggctgaagaagaggaggaggaggaggattccgaggtgcagggggagcagcccaagccggccagccctgctgaggaagacaaaatgccgccctacgacgagcagacgcaggccttcatcgatgctgcccaggaggcccgcaacaagttcgaggaggccgagcggtcgctgaaggacatggaggagtccatcaggaacctggagcaagagatttcttttgactttggccccaacggggagtttgcttacctgtacagccagtgctacgagctcaccaccaacgaatacgtctaccgcctctgccccttcaagcttgtctcgcagaaacccaaactcgggggctctcccaccagccttggcacctggggctcatggattggccccgaccacgacaagttcagtgccatgaagtatgagcaaggcacgggctgctggcagggccccaaccgctccaccaccgtgcgcctcctgtgcgggaaagagaccatggtgaccagcaccacagagcccagtcgctgcgagtacctcatggagctgatgacgccagccgcctgcccggagccaccgcctgaagcacccaccgaagacgaccatgacgagctctagctggatgggcgcagagaacctcaagaaggcatgaagccagcccctgcagtgccgtccacccgcccctctgggcctgcctgtggctctgttgccctcctctgtggcggcaggacctttgtggggcttcgtgccctgctctggggcccaggcggggctggtccacattcccaggccccaacagccttcaaagatgggtaaaggagcttgccctccctgggccccccaccttggtgactcg

SEQ ID NO: 170634 - DNA, 2100 bp, Homo sapiens
  Payload ID: 13587
  Gene Symbol: PRKCSH
  Gene Name: protein kinase C substrate 80K-H
  ENST ID: ENST00000592741
  CDS Start-End: 154-1761
ctttctgcagcaggaaccgcggctgctggacaagaggggtgcggtggatactgacctttgctccggcctcgtgtagcgtgaagacacagcgcatctccccgctgtaggcttcctcccacagaacccgtttcgggcctcagagcgtctggtgagatgctgttgccgctgctgctgctgctacccatgtgctgggccgtggaggtcaagaggccccggggcgtctccctcaccaatcatcacttctacgatgagtccaagcctttcacctgcctggacggttcggccaccatcccatttgatcaggtcaacgatgactattgcgactgcaaagatggctctgacgagccaggcacggctgcctgtcctaatggcagcttccactgcaccaacactggctataagcccctgtatatcccctccaaccgggtcaacgatggtgtttgtgactgctgcgatggaacagacgagtacaacagcggcgtcatctgtgagaacacctgcaaagagaagggccgtaaggagagagagtccctgcagcagatggccgaggtcacccgcgaagggttccgtctgaagaagatccttattgaggactggaagaaggcacgggaggagaagcagaaaaagctcattgagctacaggctgggaagaagtctctggaagaccaggtggagatgctgcggacagtgaaggaggaagctgagaagccagagagagaggccaaagagcagcaccagaagctgtgggaagagcagctggctgctgccaaggcccaacaggagcaggagctggcggctgatgccttcaaggagctggatgatgacatggacgggacggtctcggtgactgagctgcagactcacccggagctggacacagatggggatggggcgttgtcagaagcggaagctcaggccctcctcagtggggacacacagacagacgccacctctttctacgaccgcgtctgggccgccatcagggacaagtaccggtccgaggcactgcccaccgaccttccagcaccttctgcccctgacttgacggagcccaaggaggagcagccgccagtgccctcgtcgcccacagaggaggaggaggaggaggaggaggaggaggaagaagaggctgaagaagaggaggaggaggaggattccgaggtgcagggggagcagcccaaggaggccccaccgccactgtcacccccgcagccggccagccctgctgaggaagacaaaatgccgccctacgacgagcagacgcaggccttcatcgatgctgcccaggaggcccgcaacaagttcgaggaggccgagcggtcgctgaaggacatggaggagtccatcaggaacctggagcaagagatttcttttgactttggccccaacggggagtttgcttacctgtacagccagtgctacgagctcaccaccaacgaatacgtctaccgcctctgccccttcaagcttgtctcgcagaaacccaaactcgggggctctcccaccagccttggcacctggggctcatggattggccccgaccacgacaagttcagtgccatgaagtatgagcaaggcacgggctgctggcagggccccaaccgctccaccaccgtgcgcctcctgtgcgggaaagagaccatggtgaccagcaccacagagcccagtcgctgcgagtacctcatggagctgatgacgccagccgcctgcccggagccaccgcctgaagcacccaccgaagacgaccatgacgagctctagctggatgggcgcagagaacctcaagaaggcatgaagccagcccctgcagtgccgtccacccgcccctctgggcctgcctgtggctctgttgccctcctctgtggcggcaggacctttgtggggcttcgtgccctgctctggggcccaggcggggctggtccacattcccaggccccaacagccttcaaagatgggtaaaggagcttgccctccctgggccccccaccttggtgactcgccccaccacccccagccctgtccctgccacccctcctagtggggactagtgaatgacttgacctgtgacctcaatacaataaatgtgatcccccacccaaa

SEQ ID NO: 170635 - DNA, 625 bp, Homo sapiens
  Payload ID: 13587
  Gene Symbol: PRKCSH
  Gene Name: protein kinase C substrate 80K-H
  ENST ID: ENST00000589126
  CDS Start-End: 121-625
cagaaatttccgctttctttctgcagcaggaaccgcggctgctggacaagaggggtgcggtggatactgacctttgctccggcctcgtaacccgtttcgggcctcagagcgtctggtgagatgctgttgccgctgctgctgctgctacccatgtgctgggccgtggaggtcaagaggccccggggcgtctccctcaccaatcatcacttctacgatgagtccaagcctttcacctgcctggacggttcggccaccatcccatttgatcaggtcaacgatgactattgcgactgcaaagatggctctgacgagccaggcacggctgcctgtcctaatggcagcttccactgcaccaacactggctataagcccctgtatatcccctccaaccgggtcaacgatggtgtttgtgactgctgcgatggaacagacgagtacaacagcggcgtcatctgtgagaacacctgcaaagagaagggccgtaaggagagagagtccctgcagcagatggccgaggtcacccgcgaagggttccgtctgaagaagatccttattgaggactggaagaaggcacgggaggagaagcagaaaaagctcattgagctacaggctgggaagaagtctc

SEQ ID NO: 170636 - DNA, 2718 bp, Homo sapiens
  Payload ID: 13588
  Gene Symbol: PRKCA
  Gene Name: protein kinase C, alpha
  ENST ID: ENST00000284384
  CDS Start-End: 1-451
cgttttcccgggcaacgactccacggcgtctcaggacgtggccaaccgcttcgcccgcaaaggggcgctgaggcagaagaacgtgcacgaggtgaaggaccacaaattcatcgcgcgcttcttcaagcagcccaccttctgcagccactgcaccgacttcatctgggggtttgggaaacaaggcttccagtgccaagtttgctgttttgtggtccacaagaggtgccatgaatttgttactttttcttgtccgggtgcggataagggacccgacactgatctcttctcccctgtattgctagtctgcctctaccttttgagatcctactcactctccgaaggaccccaggagcaagcacaagttcaaaatccacacttacggaagccccaccttctgcgatcactgtgggtcactgctctatggacttatccatcaagggatgaaatgtgacacctgcgatatgaacgttcacaagcaatgcgtcatcaatgtccccagcctctgcggaatggatcacactgagaagagggggcggatttacctaaaggctgaggttgctgatgaaaagctccatgtcacagtacgagatgcaaaaaatctaatccctatggatccaaacgggctttcagatccttatgtgaagctgaaacttattcctgatcccaagaatgaaagcaagcaaaaaaccaaaaccatccgctccacactaaatccgcagtggaatgagtcctttacattcaaattgaaaccttcagacaaagaccgacgactgtctgtagaaatctgggactgggatcgaacaacaaggaatgacttcatgggatccctttcctttggagtttcggagctgatgaagatgccggccagtggatggtacaagttgcttaaccaagaagaaggtgagtactacaacgtacccattccggaaggggacgaggaaggaaacatggaactcaggcagaaattcgagaaagccaaacttggccctgctggcaacaaagtcatcagtccctctgaagacaggaaacaaccttccaacaaccttgaccgagtgaaactcacggacttcaatttcctcatggtgttgggaaaggggagttttggaaaggtgatgcttgccgacaggaagggcacagaagaactgtatgcaatcaaaatcctgaagaaggatgtggtgattcaggatgatgacgtggagtgcaccatggtagaaaagcgagtcttggccctgcttgacaaacccccgttcttgacgcagctgcactcctgcttccagacagtggatcggctgtacttcgtcatggaatatgtcaacggtggggacctcatgtaccacattcagcaagtaggaaaatttaaggaaccacaagcagtattctatgcggcagagatttccatcggattgttctttcttcataaaagaggaatcatttatagggatctgaagttagataacgtcatgttggattcagaaggacatatcaaaattgctgactttgggatgtgcaaggaacacatgatggatggagtcacgaccaggaccttctgtgggactccagattatatcgccccagagataatcgcttatcagccgtatggaaaatctgtggactggtgggcctatggcgtcctgttgtatgaaatgcttgccgggcaggtaatgttttgctacattttcatgtttgtttattgctgtgttatgtgaatacttcagctctggttgggcctcgagagcaagacctgacgttttagtgcagctggtgttggcgtgacttccctgacccaggcgaaagagggagaaacgcccccttcaaagtggatcacgttcagtatgcacagaaattatctctggtcatagaaactccaaattgaaagctacaacctggagtgtagacagtgtcagtttcacgttatgaaatgtacatgttggccaggcgcggtggctcatggctataatcccagcactttcagaagccaaggcaggcggatcgcctgaggtcaggagttcgagaccaccctggccaacatggcgaaaccccatctctactaaaaatacaaaaattagccaggcgtggtggtgcacatctgtaaactcagctacttgagctactgaggcatgagaattgcttaagcctgagaggcggaggctgcagtgagccaagatcgtgccactgcactgcagcctgggcaacagagtgagacggtctcaaaaaagaaaaaaatgtgcacgttgatgacagcagtggcctctaagttttcagtatcttaaaactggggttgggttatatggttccctgcaagtttgtctgcaaagattgccccagctgctgccaatgtgtgtaattagtattattatttaaggaagaagacagttaccttgaagaagtgttttaatagtttctccccatctcctcctatctcacccttggcaattcgttgtaattttcactgaagtccagtgaggctgaacatccagttaaggaaggtaaattagctttctcttatgatgtgacatgtaccagataaccatgtgccttattgcctaacatggcactttctaatataatggccttaatatctgtgtcatcagggtgaatcgtactatctgccacttctaggcctggcccctaagacatcctttatgactgtcctcatgctctaggctgaaattaggaggaattagtggagaaatctgagaccctacaagatggtggtgc

SEQ ID NO: 170637 - DNA, 8751 bp, Homo sapiens
  Payload ID: 13588
  Gene Symbol: PRKCA
  Gene Name: protein kinase C, alpha
  Uniprot ID: P17252
  ENST ID: ENST00000413366
  CDS Start-End: 27-2045
gaggcaagaggtggttgggggggaccatggctgacgttttcccgggcaacgactccacggcgtctcaggacgtggccaaccgcttcgcccgcaaaggggcgctgaggcagaagaacgtgcacgaggtgaaggaccacaaattcatcgcgcgcttcttcaagcagcccaccttctgcagccactgcaccgacttcatctgggggtttgggaaacaaggcttccagtgccaagtttgctgttttgtggtccacaagaggtgccatgaatttgttactttttcttgtccgggtgcggataagggacccgacactgatgaccccaggagcaagcacaagttcaaaatccacacttacggaagccccaccttctgcgatcactgtgggtcactgctctatggacttatccatcaagggatgaaatgtgacacctgcgatatgaacgttcacaagcaatgcgtcatcaatgtccccagcctctgcggaatggatcacactgagaagagggggcggatttacctaaaggctgaggttgctgatgaaaagctccatgtcacagtacgagatgcaaaaaatctaatccctatggatccaaacgggctttcagatccttatgtgaagctgaaacttattcctgatcccaagaatgaaagcaagcaaaaaaccaaaaccatccgctccacactaaatccgcagtggaatgagtcctttacattcaaattgaaaccttcagacaaagaccgacgactgtctgtagaaatctgggactgggatcgaacaacaaggaatgacttcatgggatccctttcctttggagtttcggagctgatgaagatgccggccagtggatggtacaagttgcttaaccaagaagaaggtgagtactacaacgtacccattccggaaggggacgaggaaggaaacatggaactcaggcagaaattcgagaaagccaaacttggccctgctggcaacaaagtcatcagtccctctgaagacaggaaacaaccttccaacaaccttgaccgagtgaaactcacggacttcaatttcctcatggtgttgggaaaggggagttttggaaaggtgatgcttgccgacaggaagggcacagaagaactgtatgcaatcaaaatcctgaagaaggatgtggtgattcaggatgatgacgtggagtgcaccatggtagaaaagcgagtcttggccctgcttgacaaacccccgttcttgacgcagctgcactcctgcttccagacagtggatcggctgtacttcgtcatggaatatgtcaacggtggggacctcatgtaccacattcagcaagtaggaaaatttaaggaaccacaagcagtattctatgcggcagagatttccatcggattgttctttcttcataaaagaggaatcatttatagggatctgaagttagataacgtcatgttggattcagaaggacatatcaaaattgctgactttgggatgtgcaaggaacacatgatggatggagtcacgaccaggaccttctgtgggactccagattatatcgccccagagataatcgcttatcagccgtatggaaaatctgtggactggtgggcctatggcgtcctgttgtatgaaatgcttgccgggcagcctccatttgatggtgaagatgaagacgagctatttcagtctatcatggagcacaacgtttcctatccaaaatccttgtccaaggaggctgtttctgtctgcaaaggactgatgaccaaacacccagccaagcggctgggctgtgggcctgagggggagagggacgtgagagagcatgccttcttccggaggatcgactgggaaaaactggagaacagggagatccagccaccattcaagcccaaagtgtgtggcaaaggagcagagaactttgacaagttcttcacacgaggacagcccgtcttaacaccacctgatcagctggttattgctaacatagaccagtctgattttgaagggttctcgtatgtcaacccccagtttgtgcaccccatcttacagagtgcagtatgaaactcaccagcgagaacaaacacctccccagcccccagccctccccgcagtgggaagtgaatccttaaccctaaaattttaaggccacggccttgtgtctgattccatatggaggcctgaaaattgtagggttattagtccaaatgtgatcaactgttcagggtctctctcttacaaccaagaacattatcttagtggaagatggtacgtcatgctcagtgtccagtttaattctgtagaagttacgtctggctctaggttaacccttcctagaaagcaagcagactgttgccccattttgggtacaatttgatatactttccataccctccatctgtggatttttcagcattggaatcccccaaccagagatgttaaagtgagcctgtcccaggaaacatctccacccaagacgtctttggaatccaagaacaggaagccaagagagtgagcagggagggattgggggtgggggaggcctcaaaataccgactgcgtccattctctgcctccatggaaacagcccctagaatctgaaaggccgggataaacctaatcactgttcccaaacattgacaaatcctaacccaaccatggtccagcagttaccagtttaaacaaaaaaacctcagatgagtgttgggtgaatctgtcatctggtaccctccttggttgataactgtcttgatacttttcattctttgtaagaggccaaatcgtctaaggacgttgctgaacaagcgtgtgaaatcatttcagatcaaggataagccagtgtgtacatatgttcattttaatctctgggagattatttttccatccagggtgccatcagtaatcatgccactactcaccagtgttgttcaccaacacccacccccacacacaccaacattttgctgcctaccttgttatccttctcaagaagctgaagtgtacgccctctccccttttgtgcttatttatttaataggctgcagtgtcgcttatgaaagtacgatgtacagtaacttaatggaagtgctgactctagcatcagcctctaccgattgattttcctcccttctctagccctggatgtccacttagggataaaaagaatatggttttggttcccatttctagttcacgttgaatgacaggcctggagctgtagaatcaggaaacccggatgcctaacagctcaaagatgttttgttaatagaaggattttaatacgttttgcaaatgcatcatgcaatgaattttgcatgtttataataaaccttaataacaagtgaatctatattattgatataatcgtatcaagtataaagagagtattataataattttataagacacaattgtgctctatttgtgcaggttcttgtttctaatcctcttttctaattaagttttagctgaatcccttgcttctgtgctttccctccctgcacatgggcactgtatcagatagattactttttaaatgtagataaaatttcaaaaatgaatggctagtttacgtgatagattaggctcttactacatatgtgtgtgtatatatatgtatttgattctacctgcaaacaaatttttattggtgaggactatttttgagctgacactccctcttagtttcttcatgtcacctttcgtcctggttcctccgccactcttcctcttggggacaacaggaagtgtctgattccagtctgcctagtacgttggtacacacgtggcattgccgcagcacctgggctgacctttgtgtgtgcgtgtgtgtgtgtttccttcttcccttcagcctgtgactgttgctgactccaggggtgggagggatggggagactcccctcttgctgtgtgtactggacacgcaggaagcatgctgtcttgctgcctctgcaacgacctgtcgtttgctccagcatgcacaaacttcgtgagaccaacacagccgtgccctgcaggcaccagcacgtgcttttcagaggctgcggactttcttccagccattgtggcattggcctttccagtcttgggaggagcgcgctgctttggtgagacacccccatgcaaggtcctcagagtagccgggttctaccacaaacagaaacagaatgaaagtagctgtcagtccttgtagagagccgctctgtttcctcccagaagcatctcccagctaagctcgcattatttttctcctctggctgtttgcctgaagttcacagaacacacaaccatgaaaggctttttgaggtgagaggcccaggtggtcctggcaaccctgagtagaaggagagacggggtagggaacgggcccggccagaaaagaaccatttcttctgccatcttttatgcaccatagacatcgagactccagggggtcctggctcccctgtccctgcagccctgcaggtcagtgcatgatctgggttcgtgtcctgaccaggtgctcctcctttgatccgaggggaaagggactggtttatagaaagagcctaggagacaaaagggccagtccccctgcccagaatggagcagcagcaggacagacccccacgaggccccccagagaggaggaagatcccacggaggaacacatgaggttagggacccttgttcagcaccccaaacagcctgcctgtttaaagcaggcagcaggcttaggccttccctgcaaccccaacacccacaagtttgtttctctaggaaacacattcactgtctcagctggctgttactctctcagaccatatggcaaagttttccaagaaaatgccccgacaggggtgcccagcacactgcctgagggacaacagacatcagaacaaacccccagagagaaacagtcaaaatcagggcccggtgcagtgttgtcatgtggaacctgctttatccattgctgagtgttgaatgtgggtaatggttagggctttccagatctcagcagccaaagacagttattgttggaagactgtcatgtagataaccatgagcaatggctcgcctcagaatcagttcataaaattctatggtactggccccttcgtgggtattgtgtgaaatgagatggtggcgaggggtgcgctgtggaactgccgcagccacgcaggaggtccctgggggatgctttgggaagtccttgcccctgagcactgcctgattgccagggcctgtggaggtctaggccgcctggcagaatctagcaccgtccgaatccccgcaggacccatggagctatgaccacaccaggccattcaaatggctctgcattatcttcccttggaaggtggccactcctcggtggcagggcctttccctgaggctgcaggccgtgggctggcagcccgtctcttggcatttcaattgaaggtcaccaggtgctgggtttgaaaggaagtcactggagtgctgccaggggccgccctccaaggttaatgagaggcccacatccaggcaagaactaattcaaaaggcagatcagaaaccacaggagtcaaaattattgctccggcagtgcttcccttcctttcatccactggcctcgtgtggtccatgcagggccactgtctgccctttctgatgccacgtattaggctttcttactcagaattttgatagaaaaccatggggccaagagctctggaagcctggccggaaagaccaaggttcatgcagcccaacaaatgattgttgagcacctctcggagccaaagtccttaggcgagtgtggtgacttcctggaaggaggatgcagacttccagagagcccccccaacggacgtgctgagaagggagagggaggcgggggctgtagtcaggaaggagccagagaagaacagggtttgggtgcatccagaaatatgcctgcagtaggagggagaggaaggggtgccaccgtcaacggcttcccatcggaggtggttggtgcagatggaagtttctgtctgctggccctcaagagagtgttttgccagggacacagtctgttcctcctcagaaaacaccccccaaatgctaacaacatccccaccagctgctagaagcccctttcccctccccaccttgaagtagctcatagttctctgggcagagccagaccatccagtgtaccccagaggccagtaggttcctgcccattttcctctctggcttcctgccaagaattatggcagctgaggatgaatggagaagtaaaaacaactaacaccgcacaactaacaactaacaccgcagttcccacctgggttccacttagcaggagacatttcggagggttttttttgtttttgttcctgttttttttttttttgctggaatttgttttctcagtactgaaaagagaaaaagtgacaatcttgtatttttaaaagcctcggaaaggtgataccatctgacagtcattttctcacgttggtcttctaaagtcacctatttcttgtgtgtgcacatcacaccatttcctgtttctttataacccgacaagggtaggagtgcctgtttcccctgctgggcacaccagacaatcgtaatcacaaaacagacactgagccaggggcccaaagggtgtgatcatgagagttaccgggacagcagtaggcatgacagtcaccaggaaggacaagggtgctctgttgttagtggccacacaccaatttgacaaggagtgttgcgaaatttttatttatttatttatttattttgagatggagtttcactcttgttgcccaggctggagtgcggtggtacaatctcggctcactgcaacctccacctcccaggttcaagcgattctcctgcctcagcctcccaagtacctgggactacaggtgcgtgccaccacacccagctaaattttgtgtttttagtagagatggggtttcaccatgttggccaggatggtcttgaacccctgacctcatgatctgcctgcctcggcctcccaaagtgctgggattacaggcatgagccaccacgcccagccaaaatatttttttaaagtcattttccttaagctgcttgggctacatgtgaaatacactggacggtcaacattcctgtctcctcccatttgggctgatgcagcagatccagggaatgttacctgtttctgctgctagaagatccaggaaattgggaaggttacctgacgcacacatggatgaaggccatcatctagaaatggggtcaaccacaattgtgttaattccgtagtgtcagggattcttcgggaaggtcaacagtatgaaggattctgacccctgtgcctcccatttatgtgatcaggtgacagttaataaccgtggaggtcacactcagccatccaacagccttacagtgaccctacacaaaagcccccaaattccaaagactttttcttaacctaaaggaagaaattatttgttaattccagtagagcaactgaatatactgggctatttgtacttttttatagagaactttaataataattctttaaaaatgagtttttagaacaaagcaactgacgatttcctaagattccaatgccctggagcttgtaggaggacttagcctgggtcagctggagcacccccgacctgatctcccactgccagattttcccatgctcctagggtatggagtccacgtgggaatgactgcaagttcaggtggaacttggccgactgatgctctgcgagtttttaatagacactggggacaactgcttaaggtttagaaacttccaaaccacaggaaagacatttttagtgtcccccatccagaggcagccctggaataggattcccaggggtttctgggacccctttccttgctccgtgaggctctgtggccatcttttggcaggaggaggatgcttccttggctctgtgcccagacccgcctggtccccaggtctctcaccttgggtgaagattcagagatgccctgtaaggattttgcccactgggcaactcagaaatacttcgatctcccaagatataagaggcagcagcaaacgtgcctattgacgtctgtttcatagttaccacttacgcgagtagacagaactcggcttttcagaaaataggtgtcaagtccactttataagaacctttttttctaaaataagataaaaggtggctttgcattttctgattaaacgactgtgtctttgtcacctctgcttaactttaggagtatccattcctgtgattgtagacttttgttgatattcttcctggaagaatatcattcttttcttgaagggttggtttactagaatattcaaaatcaatcatgaaggcagttactattttgagtctaaaggttttctaaaaattaacctcacatcccttctgttagggtctttcagaatatcttttataaacagaagcatttgaagtcattgcttttgctacatgatttgtgtgtgtgaaggacataccacgtttaaatcattaattgaaaaacatcatataagccccaactttgtttggaggaagagacggaggttgaggtttttccttctgtataagcacctactgacaaaatgtagaggccattcaaccgtcaaacaccatttggttatatcgcagaggagacggatgtgtaaattactgcattgctttttttttcagtttgtataacctctaatctccgtttgcatgatacgctttgttagaaacattaattgtagtttggaagcaagtgtgtatgaataaagataatgatcattc

SEQ ID NO: 170638 - DNA, 1733 bp, Homo sapiens
  Payload ID: 13588
  Gene Symbol: PRKCA
  Gene Name: protein kinase C, alpha
  ENST ID: ENST00000578063
  CDS Start-End: 217-1143
gcgagccagcggctccggctcccgctcccgctccgcgcagcaccagcccgactctccccggcccccgccgcgccccctcgccgcgacctcggccaccggcccgcgccccgcgcccggggtcgccccgagcccgcacctctcccccgccgcccccgcccacccggccctccgcggccgcagctccccggcggaggcaagaggtggttgggggggaccatggctgacgttttcccgggcaacgactccacggcgtctcaggacgtggccaaccgcttcgcccgcaaaggggcgctgaggcagaagaacgtgcacgaggtgaaggaccacaaattcatcgcgcgcttcttcaagcagcccaccttctgcagccactgcaccgacttcatctgggggtttgggaaacaaggcttccagtgccaagtttgctgttttgtggtccacaagaggtgccatgaatttgttactttttcttgtccgggtgcggataagggacccgacactgatgaccccaggagcaagcacaagttcaaaatccacacttacggaagccccaccttctgcgatcactgtgggtcactgctctatggacttatccatcaagggatgaaatgtgacacctgcgatatgaacgttcacaagcaatgcgtcatcaatgtccccagcctctgcggaatggatcacactgagaagagggggcggatttacctaaaggctgaggttgctgatgaaaagctccatgtcacagtacgagatgcaaaaaatctaatccctatggatccaaacgggctttcagatccttatgtgaagctgaaacttattcctgatcccaagaatgaaagcaagcaaaaaaccaaaaccatccgctccacactaaatccgcagtggaatgagtcctttacattcaaattgaaaccttcagacaaagaccgacgactgtctgtagaaatctgggactgggatcgaacaacaaggaatgacttcatgggatccctttcctttggagtttcggagctgatgaagatgccggccagtggatggtacaagttgcttaaccaagaagaaggtgagtactacaacgtacccattccggaaggggacgaggaaggaaacatggaactcaggcagaaattcgagtggagatgataatagagactgccgcataggactgctgggaggattcactcagttcacttacgtcaggatcatccatatggctgtccctcacctctgcatcttgtcccactggaaggtcttcaggggcagtaatacacatggagctgtcatcacccctgataacaatgccttctggaatacctcctgaaggctctgcctaaggctgttctacagttaacttttgttttaataagtagaaaaaaataagacctgatgtggtggctcatgcctataatcccagcaagtttgccaggccaaggcgggtggatcacctgaggttaggagttcaagaccagctgggccaacatagtgaaaccgcatctctactaaaaatacaaaaattagccaggcatggtggtgagagcttgtaatcccagctacttgggaggctgaggcagtagaatcacttgaacccaggaggtggaggttgcagtgagctgagatcgtgccattgcattccagcctgggtgacagaccgagactccatctcaagaaaaaaaaaaatagaaaaaatatactcttaagataacaataaaaatatagtatagtgaatacataaa

SEQ ID NO: 170639 - DNA, 7969 bp, Homo sapiens
  Payload ID: 13589
  Gene Symbol: PRKCB
  Gene Name: protein kinase C, beta
  Uniprot ID: P05771
  ENST ID: ENST00000303531
  CDS Start-End: 153-2174
gcgcgccgcggccgccagagccggcgcaggggaagcgcccgcggccccgggtgcagcagcggccgccgcctcccgcgcctccccggcccgcagcccgcggtcccgcggccccggggccggcacctctcgggctccggctccccgcgcgcaagatggctgacccggctgcggggccgccgccgagcgagggcgaggagagcaccgtgcgcttcgcccgcaaaggcgccctccggcagaagaacgtgcatgaggtcaagaaccacaaattcaccgcccgcttcttcaagcagcccaccttctgcagccactgcaccgacttcatctggggcttcgggaagcagggattccagtgccaagtttgctgctttgtggtgcacaagcggtgccatgaatttgtcacattctcctgccctggcgctgacaagggtccagcctccgatgacccccgcagcaaacacaagtttaagatccacacgtactccagccccacgttttgtgaccactgtgggtcactgctgtatggactcatccaccaggggatgaaatgtgacacctgcatgatgaatgtgcacaagcgctgcgtgatgaatgttcccagcctgtgtggcacggaccacacggagcgccgcggccgcatctacatccaggcccacatcgacagggacgtcctcattgtcctcgtaagagatgctaaaaaccttgtacctatggaccccaatggcctgtcagatccctacgtaaaactgaaactgattcccgatcccaaaagtgagagcaaacagaagaccaaaaccatcaaatgctccctcaaccctgagtggaatgagacatttagatttcagctgaaagaatcggacaaagacagaagactgtcagtagagatttgggattgggatttgaccagcaggaatgacttcatgggatctttgtcctttgggatttctgaacttcagaaagccagtgttgatggctggtttaagttactgagccaggaggaaggcgagtacttcaatgtgcctgtgccaccagaaggaagtgaggccaatgaagaactgcggcagaaatttgagagggccaagatcagtcagggaaccaaggtcccggaagaaaagacgaccaacactgtctccaaatttgacaacaatggcaacagagaccggatgaaactgaccgattttaacttcctaatggtgctggggaaaggcagctttggcaaggtcatgctttcagaacgaaaaggcacagatgagctctatgctgtgaagatcctgaagaaggacgttgtgatccaagatgatgacgtggagtgcactatggtggagaagcgggtgttggccctgcctgggaagccgcccttcctgacccagctccactcctgcttccagaccatggaccgcctgtactttgtgatggagtacgtgaatgggggcgacctcatgtatcacatccagcaagtcggccggttcaaggagccccatgctgtattttacgctgcagaaattgccatcggtctgttcttcttacagagtaagggcatcatttaccgtgacctaaaacttgacaacgtgatgctcgattctgagggacacatcaagattgccgattttggcatgtgtaaggaaaacatctgggatggggtgacaaccaagacattctgtggcactccagactacatcgcccccgagataattgcttatcagccctatgggaagtccgtggattggtgggcatttggagtcctgctgtatgaaatgttggctgggcaggcaccctttgaaggggaggatgaagatgaactcttccaatccatcatggaacacaacgtagcctatcccaagtctatgtccaaggaagctgtggccatctgcaaagggctgatgaccaaacacccaggcaaacgtctgggttgtggacctgaaggcgaacgtgatatcaaagagcatgcatttttccggtatattgattgggagaaacttgaacgcaaagagatccagcccccttataagccaaaagcttgtgggcgaaatgctgaaaacttcgaccgatttttcacccgccatccaccagtcctaacacctcccgaccaggaagtcatcaggaatattgaccaatcagaattcgaaggattttcctttgttaactctgaatttttaaaacccgaagtcaagagctaagtagatgtgtagatctccgtccttcatttctgtcattcaagctcaacggctattgtggtgacatttttatgtttttcattgccaagttgcatccatgtttgattttctgatgagactagagtgacagtgtttcagaacccaaatgtcctcaggtagtttggagcatctctatgagatgggattatgcagatggcctatggaaaatgcagctgcataattaacacattatcaaagtcctcttacaatttattttccgcagcatgtcagctaagtagacccaatggggagagaaaatgcctgctttctttccctctttttctgcactgccatattcacccccaaccatccaatctgtggataattggatgttagcggtactcttccacttccgggcctggagcttggcttgtatccaagtgtatggttgctttgcctaagaggaatccctctatttcacctgttctggaggcaccagaccttgaaaagaacatgctcaaaataaaatgttatctgttatttttgtaaactcaaagttaagatgatcaaagttctaaaattccaagaatgtgcttttagacggtctcaatctaaaagcacttcaaggggtcaaagggcaaccagcttgggtgctacctcagtgttgtagtttctgatactttatgtctttgctcaccctcatccccaaactacttgaaaagggcatttggcaccactctctgaaacaacacagtcactctagcaaggcccccaaagggccctggttttacattacatttcaaactttatttgctttggggttttgtttctgttgttgttcaaatgcaaaaaaaagaaaaaaaaagaaaaaaaaaggtgactcacattgttacacatgctttaaaatatgtattcaaatgttattaaccacaatgacgacctgctttgatttaaccaagaagacggctgcggagcctagcagactcaggcctgtgggaatgggatttgttacaaatctaggtttgttactggcttcagaaagctaattaagtgctctgaaaaagacaccgtttcttgaaacaaagatggttgtattcctcactttgatgttgttttgcaagatgtttgtggaaatgttcatttgtatctggatctctgttatgtgccatttttcttctagcatcgagatacaataaaaaaaaaaaaaaagaaaagaagaagaaatactatttcaaggaaaactgctctttttgagaaacgtggacctaaactacaaagtgggaactgaggagggaactcaggagaaaggaactaactgcggagctttaatcttggccccagtgttcagccactcggaggggcgggggctgtggcccattcaggggctgctggtgggctgtagtggggtgggatgacctggccagagccaacgaggatactggagcccaaagtcaagtttagagaccagctgggaacgtgaatggggctcttgattttcttatcaaaatcaccactcctcccagcttggactaaatattctttctagcaagcagctttgtgagctccctgaagcccaaggaaacccttcggtgggagaaatttcatttctgtctgagaggattaaggcagcaggtgactccccctcctcgcctgccgtgtcctgctattctcaggcagctctaaggagaattcttatcacagttcaagtgatttccagaagttccagggcttctgagagaccatcaagggaactttaacaacttgacaaatgtccttgaagtaagatgcctcatctttagggaaaaatggggtttggatttctgcttaggcaaagtctcctgcagttcatccttctctgtcctcttcttgcttcaggcttggggaccgtccctgctgtccccactgtggtggcaatcaggacctaaggtgaagcaaacttgaagttctatctgacaagtttaggcagtaagagaaggagggaaatcggagcaaagctccctcactttattgttgagaaactggcatctggaaagaggaaggaatttgcccaaagtcagtcagctgggataaaaacctgggtgtcctgtccagaaagtgcagggtgctttctgctctgtagcaaggcagcagacatctctgagccaggcccaccaacaggcccttatctggtggttggatcatgatcccattttgcttggacatgctctcaggaagataaaaaccatggagaaacactaggccattgacaaatgatctgagacaactttagaaaacaatgtaggatgaatggaaagagaaagaaaggaaagaaagaagaaaaagaaagaaggaaagaaagaaagagaaaggaaggaaggaaagaaggaaggaaaagaaggaaggaaggaaggaatatagtgttataaatactgcactcaacattttccaaattcttgccattatttttcaaaagtttaatagtttgcagaaatagatactcaagccaaagtctgttttagagaaactttccatggaaagtcagaatttctaccacttccttttctatccacatttccagtgcagaagaaactgagaaacagagctttttgaagagaggacagggccatagcaacaaggaccttcttgggggattaatgggaggtcagtagaattaataaccctccttggatgagtgctactgttttcacatggcttcagatgctatcaacctcaaagaaatgatctcaacagagaagcttattctctcccaacttctacggtaaaatccaggagtattttctctggggatctgcccacaggacaaagtccataaaagcaagtcctgtctggaccatgtggttatctgaagcattagccatcaccagcacaacaaacggggcagggctttccaaggtggggctggtcagaagggaatctttgataagaggcccacaggcagggaaagcgaaatagggttgatgagaccaggggagacctaaaaaaaaggcagctttgtgtcttctagctccaaatatacctgccttttagctcacacactgtcctggagttctcagacctttaggggccctaacacagttcagttcatacaggggttcaaaagggacagtggcccatttgggagacctttaggatcaatgggaatcaattccattgttttgcctcagagtaaagtttctggctcggggacaattataagttgcaaaaaggatagaggcatatcccaagtcttccttcattccacaaataattacaaacaacctactgtgtgccaggcactattcttagcactggaaatacactagtgaagaagcagatgaggaccctgtttattgtttctctccaagaaattctccaagaatattgtttcttggagagaaataataaataaacaagacaatttctgaaagcaataagtgcaatcaagataattaaaggatgctaaagtgtgacttgtggggattgggagagagatgcacagacaatattaaagaggaggcattcgagctttgttgtgaacaccggaagtaacatgccgagcgcctgggggatggaaactcctatagcaccccacaggctaacagcaagcaggacaagacaaaaagggcaggtgggacatggtagagatggaccctacccaggaaacagctccatcagcatcttagcctgccccactctagccacacatacccacgtgtgctcctgagttcagtgtgcccacctcactcccacaccctcacatagacttggcaagagtaaggagggaactccatagagacattttacctatctcaggggagcagccacaaagaagcaagtcttgtaaaaggtcttttgcaaaggagagtgaacccagcaatgagagatccttaacagctagtgcccattagggggctaaacctaaagcctgggtggtgatggctcaaacgctaatgagtcagtgaatccttaccgaccccctggcctttataatctgaggcaactttggctgcagcccgggaatgtgcagggcactagggaatacaaggccttcttccctggttgtcttgtaataaaacagccatggggttgtccctccagtccgagagactgtgatgaggcctacatagcagcgatgtggtcaggtaaaaatcaggaacccactgaaatcttgggcaagccaccctgcctgcttgtgcctcggttctctcatatgtcatatataggaggtgaggactccagctccacctgccccaggtgggtgtggtgatgatgaggaaagacaagaggcttgcaaggaccctgaagaggtcggagcatcatacagattcctttattagcccacattctgatgttccctggtgagacttgccccaagcaattgctagtaaatgggggttaatttcttctccacctccctactgaacaaaaaaagaaatgccagacttactaggagaatcgagttgctttgagtttcttttgttttgttttgttttgttttgttttaaggctccccttacacaccctcctttaagctttgggttttctctcttatagtttgttgacacatgctaaaaatgtctttggagagaacttctgcctgataaacacccaattctagactgtgggtggattttcgagctgacggtggtcaattcctttcattaagcagtgatctgatttctccacatggccattctgccttcttgggggcagagtagatgggcagcagttcaccttttcagagaaagaggtcttctagccacctgggctgctactgaatggttttctccaggacgctctacctaatgattatttctataacattaagcatggtaataagtagcttccaattcaattcatcctaaagccaaagaaaatacagcaacacacacacacacacacacacacacacacacacacacacacacacaccactttatggcaattcttaactgacattcaatgacttacttcttttcttagaaaatttccaccacatttctatccccaagccaacatacaatgtgaaatgaaagccagtgcgtggagtgcagctgctaaaaattttcagcacagggctctttctgactctgctcatgagatggtatcagccacccaatgactggcgtatcttggtcctgtgtctttcttcttacgctgtgttaatgtgtttactttccatttggcagagagacaagagagacacctccaacttcgacaaagagttcaccagacagcctgtggaactgacccccactgataaactcttcatcatgaacttggaccaaaatgaatttgctggcttctcttatactaacccagagtttgtcattaatgtgtaggtgaatgcaaactccatcgttgagcctggggtgtaagacttcaagccaagcgtatgtatcaattctagtcttccaggattcacggtgcacatgctggcattcaacatgtggaaagcttgtcttagagggcttttctttgtatgtgtagcttgctagtttgttttctacatttgaaaatgtttagtttagaataagcgcattatccaattatagaggtacaattttccaaacttccagaaactcatcaaatgaacagacaatgtcaaaactactgtgtctgataccaaaatgcttcagtatttgtaatttttcaagtcagaagctgatgttcctggtaaaagtttttacagttattctataatatcttctttgaatgctaagcatgagcgatatttttaaaaattgtgagtaagctttgcagttactgtgaactattgtctcttggaggaagttttttgtttaagaattgatatgattaaactgaattaatatatgcaa

SEQ ID NO: 170640 - DNA, 2689 bp, Homo sapiens
  Payload ID: 13589
  Gene Symbol: PRKCB
  Gene Name: protein kinase C, beta
  Uniprot ID: P05771
  ENST ID: ENST00000321728
  CDS Start-End: 176-2191
gggcgagtgacagccccggctccgcgcgccgcggccgccagagccggcgcaggggaagcgcccgcggccccgggtgcagcagcggccgccgcctcccgcgcctccccggcccgcagcccgcggtcccgcggccccggggccggcacctctcgggctccggctccccgcgcgcaagatggctgacccggctgcggggccgccgccgagcgagggcgaggagagcaccgtgcgcttcgcccgcaaaggcgccctccggcagaagaacgtgcatgaggtcaagaaccacaaattcaccgcccgcttcttcaagcagcccaccttctgcagccactgcaccgacttcatctggggcttcgggaagcagggattccagtgccaagtttgctgctttgtggtgcacaagcggtgccatgaatttgtcacattctcctgccctggcgctgacaagggtccagcctccgatgacccccgcagcaaacacaagtttaagatccacacgtactccagccccacgttttgtgaccactgtgggtcactgctgtatggactcatccaccaggggatgaaatgtgacacctgcatgatgaatgtgcacaagcgctgcgtgatgaatgttcccagcctgtgtggcacggaccacacggagcgccgcggccgcatctacatccaggcccacatcgacagggacgtcctcattgtcctcgtaagagatgctaaaaaccttgtacctatggaccccaatggcctgtcagatccctacgtaaaactgaaactgattcccgatcccaaaagtgagagcaaacagaagaccaaaaccatcaaatgctccctcaaccctgagtggaatgagacatttagatttcagctgaaagaatcggacaaagacagaagactgtcagtagagatttgggattgggatttgaccagcaggaatgacttcatgggatctttgtcctttgggatttctgaacttcagaaagccagtgttgatggctggtttaagttactgagccaggaggaaggcgagtacttcaatgtgcctgtgccaccagaaggaagtgaggccaatgaagaactgcggcagaaatttgagagggccaagatcagtcagggaaccaaggtcccggaagaaaagacgaccaacactgtctccaaatttgacaacaatggcaacagagaccggatgaaactgaccgattttaacttcctaatggtgctggggaaaggcagctttggcaaggtcatgctttcagaacgaaaaggcacagatgagctctatgctgtgaagatcctgaagaaggacgttgtgatccaagatgatgacgtggagtgcactatggtggagaagcgggtgttggccctgcctgggaagccgcccttcctgacccagctccactcctgcttccagaccatggaccgcctgtactttgtgatggagtacgtgaatgggggcgacctcatgtatcacatccagcaagtcggccggttcaaggagccccatgctgtattttacgctgcagaaattgccatcggtctgttcttcttacagagtaagggcatcatttaccgtgacctaaaacttgacaacgtgatgctcgattctgagggacacatcaagattgccgattttggcatgtgtaaggaaaacatctgggatggggtgacaaccaagacattctgtggcactccagactacatcgcccccgagataattgcttatcagccctatgggaagtccgtggattggtgggcatttggagtcctgctgtatgaaatgttggctgggcaggcaccctttgaaggggaggatgaagatgaactcttccaatccatcatggaacacaacgtagcctatcccaagtctatgtccaaggaagctgtggccatctgcaaagggctgatgaccaaacacccaggcaaacgtctgggttgtggacctgaaggcgaacgtgatatcaaagagcatgcatttttccggtatattgattgggagaaacttgaacgcaaagagatccagcccccttataagccaaaagctagagacaagagagacacctccaacttcgacaaagagttcaccagacagcctgtggaactgacccccactgataaactcttcatcatgaacttggaccaaaatgaatttgctggcttctcttatactaacccagagtttgtcattaatgtgtaggtgaatgcaaactccatcgttgagcctggggtgtaagacttcaagccaagcgtatgtatcaattctagtcttccaggattcacggtgcacatgctggcattcaacatgtggaaagcttgtcttagagggcttttctttgtatgtgtagcttgctagtttgttttctacatttgaaaatgtttagtttagaataagcgcattatccaattatagaggtacaattttccaaacttccagaaactcatcaaatgaacagacaatgtcaaaactactgtgtctgataccaaaatgcttcagtatttgtaatttttcaagtcagaagctgatgttcctggtaaaagtttttacagttattctataatatcttctttgaatgctaagcatgagcgatatttttaaaaattgtgagtaagctttgcagttactgtgaactattgtctcttggaggaagttttttgtttaagaattgatatgattaaactgaattaatatatgcaa

SEQ ID NO: 170641 - DNA, 480 bp, Homo sapiens
  Payload ID: 13589
  Gene Symbol: PRKCB
  Gene Name: protein kinase C, beta
  ENST ID: ENST00000498058
  CDS Start-End: 95-268
gcggccgccgcctcccgcgcctccccggcccgcagcccgcggtcccgcggccccggggccggcacctctcgggctccggctccccgcgcgcaagatggctgacccggctgcggggccgccgccgagcgagggcgaggagagcaccgtgcgcttcgcccgcaaaggcgccctccggcagaagaacgtgcatgaggtcaagaaccacaaattcaccgcccgcttcttcaagcagcccaccttctgcagccactgcaccgacttcatctgaagggacacactttccttcccactgatgtggagcattggccaatggaacgtgagcagacacaatctactctacatttaaacagaggctttgagaagctattgtgtggtttagccattgttcttcccacctctgccacaagaccaagaaagggctgttgcctcagctgcgtcctgggatggaaaagacacaggaagtagaatcacagagccaca

SEQ ID NO: 170642 - DNA, 556 bp, Homo sapiens
  Payload ID: 13589
  Gene Symbol: PRKCB
  Gene Name: protein kinase C, beta
  ENST ID: ENST00000472066
  CDS Start-End: 166-556
ttcaaaggaaaagaaagaacaggatgtggtcatggaattgtttggctttcaagagccactgaagggctttcagcattcaagtggcacagtcagagctgcattttcagaacagtcattagctgaagcaagttaatctccctgagcctcagtgtgtttatctacgaaatgggggtcatgctttcagaacgaaaaggcacagatgagctctatgctgtgaagatcctgaagaaggacgttgtgatccaagatgatgacgtggagtgcactatggtggagaagcgggtgttggccctgcctgggaagccgcccttcctgacccagctccactcctgcttccagaccatggaccgcctgtactttgtgatggagtacgtgaatgggggcgacctcatgtatcacatccagcaagtcggccggttcaaggagccccatgctgtattttacgctgcagaaattgccatcggtctgttcttcttacagagtaagggcatcatttaccgtgacctaaaacttgacaacgtgatgctcgattctgagggacacatcaagattgccg

SEQ ID NO: 170643 - DNA, 536 bp, Homo sapiens
  Payload ID: 13589
  Gene Symbol: PRKCB
  Gene Name: protein kinase C, beta
  ENST ID: ENST00000466124
  CDS Start-End: 1-367
gtctatgtccaaggaagctgtggccatctgcaaagggctgatgaccaaacacccaggcaaacgtctgggttgtggacctgaaggcgaacgtgatatcaaagagcatgcatttttccggtatattgattgggagaaacttgaacgcaaagagatccagcccccttataagccaaaagctgtaagtagcccattctctctgactgccgggtattcacacacaaggtattcttgcctgtgcctcatgttttccaaatgctccctgaggggtagacgtcaatgtgtctactggaacatgggtgtatgtattcacacatatgcacaaaatcactggttactaagatggacattttccattggcccagcttagtctctataaagatggaaacgacgatgcctattgaatttttgtttcttcgattcaattattgtaactgtcttagctgacaactttctgagaatggttcttgggtgagcagagttcagatccatttttggactgtgataaaggatctaattttgccctcattctttctctt

SEQ ID NO: 170644 - DNA, 569 bp, Homo sapiens
  Payload ID: 13589
  Gene Symbol: PRKCB
  Gene Name: protein kinase C, beta
  ENST ID: ENST00000498739
  CDS Start-End: 211-569
acaaaggcggaagactcttgggcacccgcctgtggctgggagtttgcacctggggtacagaggcagggaggaaggcgggtgactctgtgggtaactagctggaggctgggccccccgggctgcctgacatacacctccttctgcttttgcaggggcttcgggaagcagggattccagtgccaagtaagagatgctaaaaaccttgtacctatggaccccaatggcctgtcagatccctacgtaaaactgaaactgattcccgatcccaaaagtgagagcaaacagaagaccaaaaccatcaaatgctccctcaaccctgagtggaatgagacatttagatttcagctgaaagaatcggacaaagacagaagactgtcagtagagatttgggattgggatttgaccagcaggaatgacttcatgggatctttgtcctttgggatttctgaacttcagaaagccagtgttgatggctggtttaagttactgagccaggaggaaggcgagtacttcaatgtgcctgtgccaccagaaggaagtgaggccaatgaagaactgcggcagaaatt

SEQ ID NO: 170645 - DNA, 2680 bp, Homo sapiens
  Payload ID: 13590
  Gene Symbol: PRKCD
  Gene Name: protein kinase C, delta
  Uniprot ID: Q05655
  ENST ID: ENST00000330452
  CDS Start-End: 362-2392
ccgccccctcgcacttccgtgtgccgcggcgccggagcccgaggcggctgtagcccacatctcccgagcgacccccggcgcccgcccgccgcgcggaggcccgggccacacctcactggccgcttggcccatcccagtcagcgccgcgccgaaccccgtccgcgcgcgccggggagcggcgcccccgccgctgccgccgcgacccttggcgcctgcccctgcaacgggaggtctgcagggaactggccaggcaagggggcaggcccgtttctcctggtggttggtgcgttgtagcagcagcgggagccaggactaaggacaagcaggagctgggagccccagccccactgcaggccccaccatggcgccgttcctgcgcatcgccttcaactcctatgagctgggctccctgcaggccgaggacgaggcgaaccagcccttctgtgccgtgaagatgaaggaggcgctcagcacagagcgtgggaaaacactggtgcagaagaagccgaccatgtatcctgagtggaagtcgacgttcgatgcccacatctatgaggggcgcgtcatccagattgtgctaatgcgggcagcagaggagccagtgtctgaggtgaccgtgggtgtgtcggtgctggccgagcgctgcaagaagaacaatggcaaggctgagttctggctggacctgcagcctcaggccaaggtgttgatgtctgttcagtatttcctggaggacgtggattgcaaacagtctatgcgcagtgaggacgaggccaagttcccaacgatgaaccgccgcggagccatcaaacaggccaaaatccactacatcaagaaccatgagtttatcgccaccttctttgggcaacccaccttctgttctgtgtgcaaagactttgtctggggcctcaacaagcaaggctacaaatgcaggcaatgtaacgctgccatccacaagaaatgcatcgacaagatcatcggcagatgcactggcaccgcggccaacagccgggacactatattccagaaagaacgcttcaacatcgacatgccgcaccgcttcaaggttcacaactacatgagccccaccttctgtgaccactgcggcagcctgctctggggactggtgaagcagggattaaagtgtgaagactgcggcatgaatgtgcaccataaatgccgggagaaggtggccaacctctgcggcatcaaccagaagcttttggctgaggccttgaaccaagtcacccagagagcctcccggagatcagactcagcctcctcagagcctgttgggatatatcagggtttcgagaagaagaccggagttgctggggaggacatgcaagacaacagtgggacctacggcaagatctgggagggcagcagcaagtgcaacatcaacaacttcatcttccacaaggtcctgggcaaaggcagcttcgggaaggtgctgcttggagagctgaagggcagaggagagtactttgccatcaaggccctcaagaaggatgtggtcctgatcgacgacgacgtggagtgcaccatggttgagaagcgggtgctgacacttgccgcagagaatccctttctcacccacctcatctgcaccttccagaccaaggaccacctgttctttgtgatggagttcctcaacgggggggacctgatgtaccacatccaggacaaaggccgctttgaactctaccgtgccacgttttatgccgctgagataatgtgtggactgcagtttctacacagcaagggcatcatttacagggacctcaaactggacaatgtgctgctggaccgggatggccacatcaagattgccgactttgggatgtgcaaagagaacatattcggggagagccgggccagcaccttctgcggcacccctgactatatcgcccctgagatcctacagggcctgaagtacacattctctgtggactggtggtctttcggggtccttctgtacgagatgctcattggccagtcccccttccatggtgatgatgaggatgaactcttcgagtccatccgtgtggacacgccacattatccccgctggatcaccaaggagtccaaggacatcctggagaagctctttgaaagggaaccaaccaagaggctgggagtgaccggaaacatcaaaatccaccccttcttcaagaccataaactggactctgctggaaaagcggaggttggagccacctttcaggcccaaagtgaagtcacccagagactacagtaactttgaccaggagttcctgaacgagaaggcgcgcctctcctacagcgacaagaacctcatcgactccatggaccagtctgcattcgctggcttctcctttgtgaaccccaaattcgagcacctcctggaagattgaggttcctggacagatcaggctagccctgccctccacccacacctgcccgctccccacgataagcaccagtgggactgtggtgacttctgctgctggccccgcccctgcccccagagcgtccttggctgccgtctggccgggctctcatggtacttcctctgtgaactgtgtgtgaatctgcttttcctctgccttcggagggaaattgtaaatcctgtgtttcattacttgaatgtagttatctattgaaaatatatattatatacatagacatatatatatatataa

SEQ ID NO: 170646 - DNA, 2810 bp, Homo sapiens
  Payload ID: 13590
  Gene Symbol: PRKCD
  Gene Name: protein kinase C, delta
  Uniprot ID: Q05655
  ENST ID: ENST00000394729
  CDS Start-End: 329-2359
ggcctggcagggcgaggcctggcgggggcggggcctggcgggggcggggccggcggcacctgggtgaggtcgctcggccccgccccctcgcacttccgtgtgccgcggcgccggagcccgaggcggctgtagcccacatctcccgagcgacccccggcgcccgcccgccgcgcggaggcccgggccacacctcactggccgcttggcccatcccagtcagcgccgcgccgaaccccgtccgcgcgcgccggggagcggcgcccccgccgctgccgccgcgacccttggcgcctgcccctgcaacgggagccccactgcaggccccaccatggcgccgttcctgcgcatcgccttcaactcctatgagctgggctccctgcaggccgaggacgaggcgaaccagcccttctgtgccgtgaagatgaaggaggcgctcagcacagagcgtgggaaaacactggtgcagaagaagccgaccatgtatcctgagtggaagtcgacgttcgatgcccacatctatgaggggcgcgtcatccagattgtgctaatgcgggcagcagaggagccagtgtctgaggtgaccgtgggtgtgtcggtgctggccgagcgctgcaagaagaacaatggcaaggctgagttctggctggacctgcagcctcaggccaaggtgttgatgtctgttcagtatttcctggaggacgtggattgcaaacagtctatgcgcagtgaggacgaggccaagttcccaacgatgaaccgccgcggagccatcaaacaggccaaaatccactacatcaagaaccatgagtttatcgccaccttctttgggcaacccaccttctgttctgtgtgcaaagactttgtctggggcctcaacaagcaaggctacaaatgcaggcaatgtaacgctgccatccacaagaaatgcatcgacaagatcatcggcagatgcactggcaccgcggccaacagccgggacactatattccagaaagaacgcttcaacatcgacatgccgcaccgcttcaaggttcacaactacatgagccccaccttctgtgaccactgcggcagcctgctctggggactggtgaagcagggattaaagtgtgaagactgcggcatgaatgtgcaccataaatgccgggagaaggtggccaacctctgcggcatcaaccagaagcttttggctgaggccttgaaccaagtcacccagagagcctcccggagatcagactcagcctcctcagagcctgttgggatatatcagggtttcgagaagaagaccggagttgctggggaggacatgcaagacaacagtgggacctacggcaagatctgggagggcagcagcaagtgcaacatcaacaacttcatcttccacaaggtcctgggcaaaggcagcttcgggaaggtgctgcttggagagctgaagggcagaggagagtactttgccatcaaggccctcaagaaggatgtggtcctgatcgacgacgacgtggagtgcaccatggttgagaagcgggtgctgacacttgccgcagagaatccctttctcacccacctcatctgcaccttccagaccaaggaccacctgttctttgtgatggagttcctcaacgggggggacctgatgtaccacatccaggacaaaggccgctttgaactctaccgtgccacgttttatgccgctgagataatgtgtggactgcagtttctacacagcaagggcatcatttacagggacctcaaactggacaatgtgctgctggaccgggatggccacatcaagattgccgactttgggatgtgcaaagagaacatattcggggagagccgggccagcaccttctgcggcacccctgactatatcgcccctgagatcctacagggcctgaagtacacattctctgtggactggtggtctttcggggtccttctgtacgagatgctcattggccagtcccccttccatggtgatgatgaggatgaactcttcgagtccatccgtgtggacacgccacattatccccgctggatcaccaaggagtccaaggacatcctggagaagctctttgaaagggaaccaaccaagaggctgggagtgaccggaaacatcaaaatccaccccttcttcaagaccataaactggactctgctggaaaagcggaggttggagccacctttcaggcccaaagtgaagtcacccagagactacagtaactttgaccaggagttcctgaacgagaaggcgcgcctctcctacagcgacaagaacctcatcgactccatggaccagtctgcattcgctggcttctcctttgtgaaccccaaattcgagcacctcctggaagattgaggttcctggacagatcaggctagccctgccctccacccacacctgcccgctccccacgataagcaccagtgggactgtggtgacttctgctgctggccccgcccctgcccccagagcgtccttggctgccgtctggccgggctctcatggtacttcctctgtgaactgtgtgtgaatctgcttttcctctgccttcggagggaaattgtaaatcctgtgtttcattacttgaatgtagttatctattgaaaatatatattatatacatagacatatatatatatataataggctgtatatattgctcagtagagaaaaaccatgggggactggtgatatgttgatctttttcaaaaaaatatatatatgacaaaaaaaaaaaaaaaggagcacaagctgtttgaaccaccaggtttatttgtgtgtctaaataaacaccaaatagtaccaa

SEQ ID NO: 170647 - DNA, 562 bp, Homo sapiens
  Payload ID: 13590
  Gene Symbol: PRKCD
  Gene Name: protein kinase C, delta
  ENST ID: ENST00000487897
  CDS Start-End: 187-562
aaactgagaaactgagccgcggtcagcgaaagtcccgccgcgccgagacctgccggtctgcagggaactggccaggcaagggggcaggcccgtttctcctggtggttggtgcgttgtagcagcagcgggagccaggactaaggacaagcaggagctgggagccccagccccactgcaggccccaccatggcgccgttcctgcgcatcgccttcaactcctatgagctgggctccctgcaggccgaggacgaggcgaaccagcccttctgtgccgtgaagatgaaggaggcgctcagcacagagcgtgggaaaacactggtgcagaagaagccgaccatgtatcctgagtggaagtcgacgttcgatgcccacatctatgaggggcgcgtcatccagattgtgctaatgcgggcagcagaggagccagtgtctgaggtgaccgtgggtgtgtcggtgctggccgagcgctgcaagaagaacaatggcaaggctgagttctggctggacctgcagcctcaggccaaggtgttgatgtctgttcagtatttcctggaggacgtgg

SEQ ID NO: 170648 - DNA, 777 bp, Homo sapiens
  Payload ID: 13590
  Gene Symbol: PRKCD
  Gene Name: protein kinase C, delta
  ENST ID: ENST00000464818
  CDS Start-End: 107-777
ggggcaggcccgtttctcctggtggttggtgcgttgtagcagcagcgggagccaggactaaggacaagcaggagctgggagccccagccccactgcaggccccaccatggcgccgttcctgcgcatcgccttcaactcctatgagctgggctccctgcaggccgaggacgaggcgaaccagcccttctgtgccgtgaagatgaaggaggcgctcagcacagagcgtgggaaaacactggtgcagaagaagccgaccatgtatcctgagtggaagtcgacgttcgatgcccacatctatgaggggcgcgtcatccagattgtgctaatgcgggcagcagaggagccagtgtctgaggtgaccgtgggtgtgtcggtgctggccgagcgctgcaagaagaacaatggcaaggctgagttctggctggacctgcagcctcaggccaaggtgttgatgtctgttcagtatttcctggaggacgtggattgcaaacagtctatgcgcagtgaggacgaggccaagttcccaacgatgaaccgccgcggagccatcaaacaggccaaaatccactacatcaagaaccatgagtttatcgccaccttctttgggcaacccaccttctgttctgtgtgcaaagactttgtctggggcctcaacaagcaaggctacaaatgcaggcactgcggcatgaatgtgcaccataaatgccgggagaaggtggccaacctctgcggcatcaaccagaagcttttggctgaggccttgaaccaagtcaccca

SEQ ID NO: 170649 - DNA, 589 bp, Homo sapiens
  Payload ID: 13590
  Gene Symbol: PRKCD
  Gene Name: protein kinase C, delta
  ENST ID: ENST00000478843
  CDS Start-End: 357-589
aaggattagggagtcctgagccccaggctgctctgctcagtcttggaaggcctcacgcaacccccttcacaaagcctgcccgattgtgtcctcaagggacaatttatagcatgcaatgacagtgcggagggcaggtctgtctggggagatgaaacgacctgtgcgattacaggagattcctactttcctcgcccccagtcctcaaggtcttctcagaggttcccactaggaggccggctgcagtgccctggacgaccctcacacccaggacctcagttgctccatccaaggaatgggcgagctcaggtcttcctgactttcctggagaacaaagaggccccactgcaggccccaccatggcgccgttcctgcgcatcgccttcaactcctatgagctgggctccctgcaggccgaggacgaggcgaaccagcccttctgtgccgtgaagatgaaggaggcgctcagcacagagcgtgggaaaacactggtgcagaagaagccgaccatgtatcctgagtggaagtcgacgttcgatgcccacatctatgaggggcgcgtcatccagattgtgctaatgcgggcagcaga

SEQ ID NO: 170650 - DNA, 1174 bp, Homo sapiens
  Payload ID: 13591
  Gene Symbol: PRKCDBP
  Gene Name: protein kinase C, delta binding protein
  Uniprot ID: Q969G5
  ENST ID: ENST00000303927
  CDS Start-End: 172-957
aagagaccccgctgccaacatccccacgccctcgcgccctcccgccgccccagaaggccaactccgcctgcctgagtcacagctggagctggggaggagccagggaaaggaggcccctgaccgtagtgcggccagcagttgcaggcagacggagcagagcggtcagggatcatgagggagagtgcgttggagcgggggcctgtgcccgaggcgccggcggggggtcccgtgcacgccgtgacggtggtgaccctgctggagaagctggcctccatgctggagactctgcgggagcggcagggaggcctggctcgaaggcagggaggcctggcagggtccgtgcgccgcatccagagcggcctgggcgctctgagtcgcagccacgacaccaccagcaacaccttggcgcagctgctggccaaggcggagcgcgtgagctcgcacgccaacgccgcccaagagcgcgcggtgcgccgcgcagcccaggtgcagcggctggaggccaaccacgggctgctggtggcgcgcgggaagctccacgttctgctcttcaaggaggagggtgaagtcccagccagcgctttccagaaggcaccagagcccttgggcccggcggaccagtccgagctgggcccagagcagctggaggccgaagttggagagagctcggacgaggagccggtggagtccagggcccagcggctgcggcgcaccggattgcagaaggtacagagcctccgaagggccctttcgggccggaaaggccctgcagcgccaccgcccaccccggtcaagccgcctcgccttgggcctggccggagcgctgaagcccagccggaagcccagcctgcgctggagcccacgctggagccagagcctccgcaggacaccgaggaagatcccgggagacctggggctgccgaagaagctctgctccaaatggagagtgtagcctgagggctggtgttgcctgcctcccctgtgcttgtgccttgtcccaaaataaatcctttcagaatgtagcactcacgccctaataaggagcgaatcctacatccaccaaggcgggcgctctggccctcccttccttaagcccagtcctgtgtcctctgaaagaggtgcagtcactcacacctgcttgcgctcaccatcaataaaagtaatttcacccgaa

SEQ ID NO: 170651 - DNA, 957 bp, Homo sapiens
  Payload ID: 13591
  Gene Symbol: PRKCDBP
  Gene Name: protein kinase C, delta binding protein
  ENST ID: ENST00000530979
  CDS Start-End: 57-938
cctgaccgtagtgcggccagcagttgcaggcagacggagcagagcggtcagggatcatgagggagagtgcgttggagcgggggcctgtgcccgaggcgccggcggggggtcccgtgcacgccgtgacggtggtgaccctgctggagaagctggcctccatgctggagactctgcgggagcggcagggaggcctggctcgaaggcagggaggcctggcagggtccgtgcgccgcatccagagcggcctgggcgctctgagtcgcagccacgacaccaccagcaacaccttggcgcagctgctggccaaggcggagcgcgtgagctcgcacgccaacgccgcccaagagcgcgcggtgcgccgcgcagcccaggtgcagcggctggaggccaaccacgggctgctggtggcgcgcgggaagctccacgttctgctcttcaaggcctcacctactttacagcgttttgcagttcgcacgcagctttccctccccttaccttcccacgcctgcctttccccccagactctggctgcggaggaggagggtgaagtcccagccagcgctttccagaaggcaccagagcccttgggcccggcggaccagtccgagctgggcccagagcagctggaggccgaagttggagagagctcggacgaggagccggtggagtccagggcccagcggctgcggcgcaccggattgcagaaggtacagagcctccgaagggccctttcgggccggaaaggccctgcagcgccaccgcccaccccggtcaagccgcctcgccttgggcctggccggagcgctgaagcccagccggaagcccagcctgcgctggagcccacgctggagccagagcctccgcaggacaccgaggaagatcccgggagacctggggctgccgaagaagctctgctccaaatggagagtgtagcctgagggctggtgttgcctgcct

SEQ ID NO: 170652 - DNA, 5650 bp, Homo sapiens
  Payload ID: 13592
  Gene Symbol: PRKCE
  Gene Name: protein kinase C, epsilon
  Uniprot ID: Q02156
  ENST ID: ENST00000306156
  CDS Start-End: 328-2541
cagcccccgcggcttgcagcggagccgacagctcgtcttctcttctggaggtgcagctggtggtcggggggagagacttgctccaaacacggacatcccccagctctcccccctccctgttttccgttaggaacccggcgaggaaatacatgcactggctgagaatcgcccgcgccagggcgcaacgccacaaggtgtagggagtgtgcggggtggggcgaaaggggacccaagagtccctgtggctcggagtgccgggccgtcggttcttcattcctgccctcggggcagacggagtgaccccggcccccactccccgccccgaccatggtagtgttcaatggccttcttaagatcaaaatctgcgaggccgtgagcttgaagcccacagcctggtcgctgcgccatgcggtgggaccccggccgcagactttccttctcgacccctacattgccctcaatgtggacgactcgcgcatcggccaaacggccaccaagcagaagaccaacagcccggcctggcacgacgagttcgtcaccgatgtgtgcaacggacgcaagatcgagctggctgtctttcacgatgcccccataggctacgacgacttcgtggccaactgcaccatccagtttgaggagctgctgcagaacgggagccgccacttcgaggactggattgatctggagccagaaggaagagtgtatgtgatcatcgatctctcagggtcgtcgggtgaagcccctaaagacaatgaagagcgtgtgttcagggaacgcatgcggccgaggaagcggcagggggccgtcaggcgcagggtccatcaggtcaacggccacaagttcatggccacctatcttcggcagcccacctactgctcccattgcagagacttcatctggggtgtcataggaaagcagggataccagtgtcaagtctgcacctgcgtggtccacaagcggtgccacgagctcataatcacaaagtgtgctgggttaaagaagcaggagacccccgaccaggtgggctcccagcggttcagcgtcaacatgccccacaagttcggtatccacaactacaaggtccctaccttctgcgatcactgtgggtccctgctctggggactcttgcggcagggtttgcagtgtaaagtctgcaaaatgaatgttcaccgtcgatgtgagaccaacgtggctcccaactgtggagtggatgccagaggaatcgccaaagtactggccgacctgggcgttaccccagacaaaatcaccaacagcggccagagaaggaaaaagctcattgctggtgccgagtccccgcagcctgcttctggaagctcaccatctgaggaagatcgatccaagtcagcacccacctccccttgtgaccaggaaataaaagaacttgagaacaacattcggaaagccttgtcatttgacaaccgaggagaggagcaccgggcagcatcgtctcctgatggccagctgatgagccccggtgagaatggcgaagtccggcaaggccaggccaagcgcctgggcctggatgagttcaacttcatcaaggtgttgggcaaaggcagctttggcaaggtcatgttggcagaactcaagggcaaagatgaagtatatgctgtgaaggtcttaaagaaggacgtcatccttcaggatgatgacgtggactgcacaatgacagagaagaggattttggctctggcacggaaacacccgtaccttacccaactctactgctgcttccagaccaaggaccgcctctttttcgtcatggaatatgtaaatggtggagacctcatgtttcagattcagcgctcccgaaaattcgacgagcctcgttcacggttctatgctgcagaggtcacatcggccctcatgttcctccaccagcatggagtcatctacagggatttgaaactggacaacatccttctggatgcagaaggtcactgcaagctggctgacttcgggatgtgcaaggaagggattctgaatggtgtgacgaccaccacgttctgtgggactcctgactacatagctcctgagatcctgcaggagttggagtatggcccctccgtggactggtgggccctgggggtgctgatgtacgagatgatggctggacagcctccctttgaggccgacaatgaggacgacctatttgagtccatcctccatgacgacgtgctgtacccagtctggctcagcaaggaggctgtcagcatcttgaaagctttcatgacgaagaatccccacaagcgcctgggctgtgtggcatcgcagaatggcgaggacgccatcaagcagcacccattcttcaaagagattgactgggtgctcctggagcagaagaagatcaagccacccttcaaaccacgcattaaaaccaaaagagacgtcaataattttgaccaagactttacccgggaagagccggtactcacccttgtggacgaagcaattgtaaagcagatcaaccaggaggaattcaaaggtttctcctactttggtgaagacctgatgccctgagagcccactgcagttggactttgccgatgctgcaagaaggggtgcagagaagactcctgtgttggagacactcagcaggtcttgaactacttctcctcctcggagccccagtcccatgtccactgtctatttattgcattcccttgccccaggccacctcctccccctcccacctggtgaccagaaggcgctctcggttcttgtctcaccagtaatgcagactcattgggtcagcaattagctgtatacactgccgtgtttggaccattggcaagcctggttccactcctcaggggctcctggcagtgaagcaacttcagttcttttactgcaaagaacagaaaaaagaaagaaagcaaacaagaagactccggctctgctatcggacacagatcctgatccctcttgcttcttttccctcctgcaccgcagcttgccatccctgcccttctgtcctggagaagagactggtgcttctccgcacacacgagggagggcgcccttgaggcatgccctctgagggagggagaccagagatgcagggattggccagctgggttggtttgctctggaatggctaactcttgcctgctttggttttagcttttcagcatgccaaagtcatgtaagtttgtgtcttgtggaagaaatcctctttgtggaaaaagaaacagggttttgaactctgttaacatttgaaaaatatattttcaaattcactttctaattggccaaaagagatgagttccagtctgaatacaggtagatattaaagggctaataaaaaatgagaaaccggtcgtccaaggtggatgctgtcaatgcccgagtgacacatgagagctgtatgaattgagagaaaaggcaacaagtagcattcttcatcattcaagttctacctggacacaaaggcgaggaccctggggttccaacaaagctcagctcccagattctctttccagtttcatcctaagttcctagcataaacactatttattttctgcagcagtgtgttatttttgcgcacttatacaaaatggtagtactactgtgttgtggtttttaaacattaaacatgtaaagttatatacgaaatatctgcttttggaataagcagaatgaggctaaacatgggttatacaaagggtatctggaaactgaagagcaacttgttagaaaactgacaatgtcgcaagatgtactcagttttgtttctgtgtgacatgcaatggcaactcatgtggacactattgaagggatgtgacattacctcctgtagatatgctaacagtgttattctttcatttccaagggttctctgtggctttgtgtatatgtttcccagaggtcatttgattacctaatttactgaactgatttagcagggaatggaatccattccaactattgcacgtggatttcccagctgcccctaaatatatatacttgtgagtggcaaagtggcactaatgaagcttttgccttttgtacatttgagatttttgtatatagtgtttgctgcaaggcctgtggaattaattcgttgcatatagaggtatcaactgctgcatgttcaggcatattataaaactttagtctatgaaagaataattataataatgtccaggtgcaatactctgtaagtctattggttcaagttaccgagagataggtgtgttcctttatgggggatgggggggtgtgttggggattctttgtattgtttatttcattttggtttattttaaaagatgtaaacatatattaagctatattaaatctcacatacagttcttctgtgctctattataccctgatagagatgggggagagaaaggaatgtttttgatggtggtttcaaagctcggacagtaactatcttgagcccattagagagtctgtgtccatatttgcatctggctggtcatagcctttgttactaatgatgacattcagttctcttttgtttttattttttaaaaactcaggtgtaattattatctgttcttaagataattgcaaatattaaatattatgatatatcaattcatgtgtttggcataccagtgaatgatgaagaacatgagattaatttaatttatcttcggtaacttgacattctggagagagactatcttctggagttgagtacaagcacagaaacatctttacggtggcatcatctcattttttaggaagacatgataatactgcccatcatattcatgtgtaactactgttctttcttctgctttcttcaccataataaactttggacaaccaagcaagctctaaccgcaatgccagatggccttgtccgagggcctagtgtttgcacggcagtgggaactgggcctttcctacaggacaactggcaagtttgctgggaagtcaaataatacattccacctggcagctgaaggcagccagtcagtctgtcccagaaagggcccttttcagcacccaaagctgggctggctgggatgcctctggctggtgaagttctcacataggctgatttaaatccagcaaaggtctatagaaaaaggcttgcgtgttcgttgagtaatcattgtttcattttcatttttacgagagtttgaaaatagacacactgttaacacttctgccagttttttctgatctttccagccccaccccctttctctttctctctctctctcaaagaaaaaaaaaatgggagtgcaaaaaaaacaaagccaaaaaatatatgaaggatagctgttcttctgtgttctctcattatggactttgtgaagtagaaacataattttttttcctccaaaggtgaaaaaacaatgcattcttgctttaaaaaaaaaaaagaaggctaaaaaattacctctttttaaattatgtgcaaaataattctggctaactgtaaaatgtattcaattttaggattttttttttttgtattgtgatgctttatttgtacatttttttcctttctggatgtaattttaatctcttgccattcattagtgttatttcattgtaaacgttattgtgccaaatgtactgtattcaaaaggatgtgaatgtgtattgtttcagaacctaataaatacaatgacgttaagtctta

SEQ ID NO: 170653 - DNA, 996 bp, Homo sapiens
  Payload ID: 13592
  Gene Symbol: PRKCE
  Gene Name: protein kinase C, epsilon
  ENST ID: ENST00000394874
  CDS Start-End: 110-769
tcggaagagctgttgattttgtagtttgttcagcgttttgcttgttagaatggagtgctgctgacttctaagccccttaggtgccagacttcaatgagcagtctgcaaaatgaatgttcaccgtcgatgtgagaccaacgtggctcccaactgtggagtggatgccagaggaatcgccaaagtactggccgacctgggcgttaccccagacaaaatcaccaacagcggccagagaaggaaaaagctcattgctggtgccgagtccccgcagcctgcttctggaagctcaccatctgaggaagatcgatccaagtcagcacccacctccccttgtgaccaggaaataaaagaacttgagaacaacattcggaaagccttgtcatttgacaaccgaggagaggagcaccgggcagcatcgtctcctgatggccagctgatgagccccggtgagaatggcgaagtccggcaaggccaggccaagcgcctgggcctggatgagttcaacttcatcaaggtgttgggcaaaggcagctttggcaaggtcatgttggcagaactcaagggcaaagatgaagtatatgctgtgaaggtcttaaagaaggacgtcatccttcaggatgatgacgtggactgcacaatgacagagaagaggattttggctctggcacggaaacacccgtaccttacccaactctactgctgcttccagaccaagggcacaggattttccattcaaggttgtgcttgtgaagggatgagagagctgtagaattctttgcagccagagttggacaaagccaaatggctaaactcactgtttgctcattggaaaaaccaacaagtgtggttagtccttgctctgctcctaactttctatcactaatcaaatcacttaacttctaagttattttcatgtcatatgaaaaagagtaaaggccaccttaatctcttctaatctgtgtaatgtcatctgaaataaaggatgtgaacaaatgc

SEQ ID NO: 170654 - DNA, 939 bp, Homo sapiens
  Payload ID: 13592
  Gene Symbol: PRKCE
  Gene Name: protein kinase C, epsilon
  ENST ID: ENST00000421201
  CDS Start-End: 557-939
gcggccgcccggactccgagcccgcgcggatgtgagattccgggctcctggcgcctcccgatcgccggctccggcgcggcgctgcttcgcccaggaggcggcggccccggctggccgtggggcttgtggatttttaaaaatttggctccgaggaggaccatttcctctcgacatgcatccctccggatagactgaacatccctccgttcacccccccgccccgcgcggtcagaggcaggcgctgagtgtgcgaagaggatccgggttgaaatctgcgcccccggttctcgtccccgccccgtcccaccgccccatccccctcccggagtcgaaatttcccgggattatgtttcggaaaggaacccggcgaggaaatacatgcactggctgagaatcgcccgcgccagggcgcaacgccacaaggtgtagggagtgtgcggggtggggcgaaaggggacccaagagtccctgtggctcggagtgccgggccgtcggttcttcattcctgccctcggggcagacggagtgaccccggcccccactccccgccccgaccatggtagtgttcaatggccttcttaagatcaaaatctgcgaggccgtgagcttgaagcccacagcctggtcgctgcgccatgcggtgggaccccggccgcagactttccttctcgacccctacattgccctcaatgtggacgactcgcgcatcggccaaacggccaccaagcagaagaccaacagcccggcctggcacgacgagttcgtcaccgatgtgtgcaacggacgcaagatcgagctggctgtctttcacgatgcccccataggctacgacgacttcgtggccaactgcaccatccagtttgaggagctgctgcagaacgggagccgccacttcgaggactggattgatctggagccagaaggaagagtgtatgtgat

SEQ ID NO: 170655 - DNA, 3582 bp, Homo sapiens
  Payload ID: 13593
  Gene Symbol: PRKCH
  Gene Name: protein kinase C, eta
  Uniprot ID: P24723
  ENST ID: ENST00000332981
  CDS Start-End: 386-2437
gggaagagacgcttggggctggggctcaccggacgggtaggtccggctctccagggagaggagctgcccggccctggagaaggggcgagtcctgcgcgagtccccgggaggcgccgcgcgcttggaagggacggtcgggcttccccggcccgctgagggctcggcggcgggctcccctcctttccacctcgggagggagggaaggaggggagggaaaagtcccacggaggaggcagaatggccagtcgaggggcgcttaggcgctgcctttccccagggctgcctcgactcctgcacctgtcccgagggctggcctgagacgggactcccggttctcccgctgcgaagcagcgcggccccccggggccggggcagcggcgccggcatgtcgtctggcaccatgaagttcaatggctatttgagggtccgcatcggtgaggcagtggggctgcagcccacccgctggtccctgcgccactcgctcttcaagaagggccaccagctgctggacccctatctgacggtgagcgtggaccaggtgcgcgtgggccagaccagcaccaagcagaagaccaacaaacccacgtacaacgaggagttttgcgctaacgtcaccgacggcggccacctcgagttggccgtcttccacgagacgcccctgggctacgaccacttcgtggccaactgcaccctgcagttccaggagctgctgcgcacgaccggcgcctcggacaccttcgagggttgggtggatctcgagccagaggggaaagtatttgtggtaataacccttaccgggagtttcactgaagctactctccagagagaccggatcttcaaacattttaccaggaagcgccaaagggctatgcgaaggcgagtccaccagatcaatggacacaagttcatggccacgtatctgaggcagcccacctactgctctcactgcagggagtttatctggggagtgtttgggaaacagggttatcagtgccaagtgtgcacctgtgtcgtccataaacgctgccatcatctaattgttacagcctgtacttgccaaaacaatattaacaaagtggattcaaagattgcagaacagaggttcgggatcaacatcccacacaagttcagcatccacaactacaaagtgccaacattctgcgatcactgtggctcactgctctggggaataatgcgacaaggacttcagtgtaaaatatgtaaaatgaatgtgcatattcgatgtcaagcgaacgtggcccctaactgtggggtaaatgcggtggaacttgccaagaccctggcagggatgggtctccaacccggaaatatttctccaacctcgaaactcgtttccagatcgaccctaagacgacagggaaaggagagcagcaaagaaggaaatgggattggggttaattcttccaaccgacttggtatcgacaactttgagttcatccgagtgttggggaaggggagttttgggaaggtgatgcttgcaagagtaaaagaaacaggagacctctatgctgtgaaggtgctgaagaaggacgtgattctgcaggatgatgatgtggaatgcaccatgaccgagaaaaggatcctgtctctggcccgcaatcaccccttcctcactcagttgttctgctgctttcagacccccgatcgtctgttttttgtgatggagtttgtgaatgggggtgacttgatgttccacattcagaagtctcgtcgttttgatgaagcacgagctcgcttctatgctgcagaaatcatttcggctctcatgttcctccatgataaaggaatcatctatagagatctgaaactggacaatgtcctgttggaccacgagggtcactgtaaactggcagacttcggaatgtgcaaggaggggatttgcaatggtgtcaccacggccacattctgtggcacgccagactatatcgctccagagatcctccaggaaatgctgtacgggcctgcagtagactggtgggcaatgggcgtgttgctctatgagatgctctgtggtcacgcgccttttgaggcagagaacgaagatgacctctttgaggccatactgaatgatgaggtggtctaccctacctggctccatgaagatgccacagggatcctaaaatctttcatgaccaagaaccccaccatgcgcttgggcagcctgactcagggaggcgagcacgccatcttgagacatcctttttttaaggaaatcgactgggcccagctgaaccatcgccaaatagaaccgcctttcagacccagaatcaaatcccgagaagatgtcagtaattttgaccctgacttcataaaggaagagccagttttaactccaattgatgagggacatcttccaatgattaaccaggatgagtttagaaacttttcctatgtgtctccagaattgcaaccatagccttatggggagtgagagagagggcacgagaacccaaagggaatagagattctccaggaatttcctctatgggaccttcccagcatcagccttagaacaagaaccttaccttcaaggagcaagtgaagaactctgtgaaggatggaactttcagatatcaactatttagagtccagagggagccatggcactagaaatagttgataatgaaatgagattttatgaagtataccgctccacctatgagcgtctgtctctgtgggcttgggatgttaacaggagccaaaaggagggaaagtgtgaagaataaagtagatctgagaaattctgagccaatcaggcttcttaattcaagagacaaaccaagacgttctgtcaactgtgctgtgctcttctttaagccaatgaaccccaattcctggcagtctacaagaagtctcttaatgctaatgaagaatttaaaggtctttttaaggaaatgaagggctttccaaatagaatgatttactctgaagaaacaaacaatggtatctctgaaactcacaacctaaagcccaatcttgaaaatatgttgtgcaccaagacgactgcttcagcttcttctcttatccttactttctttaatagatatttattaaactgtccagtgaaaaggtgccacaatgcccagtattgtaaacaacaggtttgcattcatgaagctttcattcattctggagtctactaatttacctgaatggtgtttgcattctgtgaaatgcctctccacgttgcatatgtcacacttttgtctgcacataactcttttttcacaagaagggtcactgccacaacagcacagtcagcgggtgaattacaggtgcctgctgcctgcctacctgggtaatctgatcttgtctgtatcgccgtgtgctcatcactgaagaattgcaggccactcatgtcagtgaccagatttgtggcttataaacattagcagtttatttatgttttaagatgcaaagatgtgtgtttgatattcactttaataattagaaatggatcttgtaaacagggcatatatcaaagatgaccttataatatgtacccgaatatacagttcaagaattttgtctgactggaaataaatgcattttgtagcaaaa

SEQ ID NO: 170656 - DNA, 545 bp, Homo sapiens
  Payload ID: 13593
  Gene Symbol: PRKCH
  Gene Name: protein kinase C, eta
  ENST ID: ENST00000553831
  CDS Start-End: 296-545
ataaatgtaaaatgcctggcaccactgaggaagtagggtgaggagttaagttagacagtgactggcatttcccagccacactagtacagaagtgtcctgtggtacgaacggaggcaggctggggggttccattgtgtgccaggtgtttccatgaaaataaactgttgagtgccaggtggatctcgagccagaggggaaagtatttgtggtaataacccttaccgggagtttcactgaagctactctccagagagaccggatcttcaaacattttaccaggaagcgccaaagggctatgcgaaggcgagtccaccagatcaatggacacaagttcatggccacgtatctgaggcagcccacctactgctctcactgcagggagtttatctggggagtgtttgggaaacagggttatcagtgccaagtgtgcacctgtgtcgtccataaacgctgccatcatctaattgttacagcctgtacttgccaaaacaatattaacaaagtggattcaaagattgcagaacagaggttcgggatcaacatcc

SEQ ID NO: 170657 - DNA, 2932 bp, Homo sapiens
  Payload ID: 13593
  Gene Symbol: PRKCH
  Gene Name: protein kinase C, eta
  Uniprot ID: P24723
  ENST ID: ENST00000555082
  CDS Start-End: 219-1787
agccggcctggacacgatcccctttcaggacagcggcttggcctaacgggaagtcgggcaggggtccagggcggtcaccctttccgcccagtctttgggtggatctcgagccagaggggaaagtatttgtggtaataacccttaccgggagtttcactgaagctactctccagagagaccggatcttcaaacattttaccaggaagcgccaaagggctatgcgaaggcgagtccaccagatcaatggacacaagttcatggccacgtatctgaggcagcccacctactgctctcactgcagggagtttatctggggagtgtttgggaaacagggttatcagtgccaagtgtgcacctgtgtcgtccataaacgctgccatcatctaattgttacagcctgtacttgccaaaacaatattaacaaagtggattcaaagattgcagaacagaggttcgggatcaacatcccacacaagttcagcatccacaactacaaagtgccaacattctgcgatcactgtggctcactgctctggggaataatgcgacaaggacttcagtgtaaaatatgtaaaatgaatgtgcatattcgatgtcaagcgaacgtggcccctaactgtggggtaaatgcggtggaacttgccaagaccctggcagggatgggtctccaacccggaaatatttctccaacctcgaaactcgtttccagatcgaccctaagacgacagggaaaggagagcagcaaagaaggaaatgggattggggttaattcttccaaccgacttggtatcgacaactttgagttcatccgagtgttggggaaggggagttttgggaaggtgatgcttgcaagagtaaaagaaacaggagacctctatgctgtgaaggtgctgaagaaggacgtgattctgcaggatgatgatgtggaatgcaccatgaccgagaaaaggatcctgtctctggcccgcaatcaccccttcctcactcagttgttctgctgctttcagacccccgatcgtctgttttttgtgatggagtttgtgaatgggggtgacttgatgttccacattcagaagtctcgtcgttttgatgaagcacgagctcgcttctatgctgcagaaatcatttcggctctcatgttcctccatgataaaggaatcatctatagagatctgaaactggacaatgtcctgttggaccacgagggtcactgtaaactggcagacttcggaatgtgcaaggaggggatttgcaatggtgtcaccacggccacattctgtggcacgccagactatatcgctccagagatcctccaggaaatgctgtacgggcctgcagtagactggtgggcaatgggcgtgttgctctatgagatgctctgtggtcacgcgccttttgaggcagagaacgaagatgacctctttgaggccatactgaatgatgaggtggtctaccctacctggctccatgaagatgccacagggatcctaaaatctttcatgaccaagaaccccaccatgcgcttgggcagcctgactcagggaggcgagcacgccatcttgagacatcctttttttaaggaaatcgactgggcccagctgaaccatcgccaaatagaaccgcctttcagacccagaatcaaatcccgagaagatgtcagtaattttgaccctgacttcataaaggaagagccagttttaactccaattgatgagggacatcttccaatgattaaccaggatgagtttagaaacttttcctatgtgtctccagaattgcaaccatagccttatggggagtgagagagagggcacgagaacccaaagggaatagagattctccaggaatttcctctatgggaccttcccagcatcagccttagaacaagaaccttaccttcaaggagcaagtgaagaactctgtgaaggatggaactttcagatatcaactatttagagtccagagggagccatggcactagaaatagttgataatgaaatgagattttatgaagtataccgctccacctatgagcgtctgtctctgtgggcttgggatgttaacaggagccaaaaggagggaaagtgtgaagaataaagtagatctgagaaattctgagccaatcaggcttcttaattcaagagacaaaccaagacgttctgtcaactgtgctgtgctcttctttaagccaatgaaccccaattcctggcagtctacaagaagtctcttaatgctaatgaagaatttaaaggtctttttaaggaaatgaagggctttccaaatagaatgatttactctgaagaaacaaacaatggtatctctgaaactcacaacctaaagcccaatcttgaaaatatgttgtgcaccaagacgactgcttcagcttcttctcttatccttactttctttaatagatatttattaaactgtccagtgaaaaggtgccacaatgcccagtattgtaaacaacaggtttgcattcatgaagctttcattcattctggagtctactaatttacctgaatggtgtttgcattctgtgaaatgcctctccacgttgcatatgtcacacttttgtctgcacataactcttttttcacaagaagggtcactgccacaacagcacagtcagcgggtgaattacaggtgcctgctgcctgcctacctgggtaatctgatcttgtctgtatcgccgtgtgctcatcactgaagaattgcaggccactcatgtcagtgaccagatttgtggcttataaacattagcagtttatttatgttttaagatgcaaagatgtgtgtttgatattcactttaataattagaaatggatcttgtaaacagggcatatatcaaagatgaccttataatatgtacccgaatatacagttcaagaattttgtctgactggaaataaatgcattttgtagcaaaa

SEQ ID NO: 170658 - DNA, 459 bp, Homo sapiens
  Payload ID: 13593
  Gene Symbol: PRKCH
  Gene Name: protein kinase C, eta
  ENST ID: ENST00000555906
  CDS Start-End: 241-459
gcggccgcgcggggaccgacgcgcgggctgaccgagtgggggccccgccgcggggcgcctccctctccgcgccgcgcaagcccggggactgctcgcgggtcgggtttcccgccagctcaggtggatctcgagccagaggggaaagtatttgtggtaataacccttaccgggagtttcactgaagctactctccagagagaccggatcttcaaacattttaccaggaagcgccaaagggctatgcgaaggcgagtccaccagatcaatggacacaagttcatggccacgtatctgaggcagcccacctactgctctcactgcagggagtttatctggggagtgtttgggaaacagggttatcagtgccaagtgtgcacctgtgtcgtccataaacgctgccatcatctaattgttacagcctgtacttgccaaaacaatattaacaaagtggattcaaag

SEQ ID NO: 170659 - DNA, 521 bp, Homo sapiens
  Payload ID: 13593
  Gene Symbol: PRKCH
  Gene Name: protein kinase C, eta
  ENST ID: ENST00000555542
  CDS Start-End: 477-521
gtactccagctccttgatgccgttggaggagtagtagaggcccaggcccaggccgatgaaggccaggcccgcgcagaagaagagcggcagcgcgatgctggccgacagcagcggctgccaggcggggaggcgctgctgagtgaaggcggtgttgtcgggctggtgggcgccccgggccgtggcgctccaggtcatggcggccgcgcggggaccgacgcgcgggctgaccgagtgggggccccgccgcggggcgcctccctctccgcgccgcgcaagcccggggactgctcgcgggtcgggtttcccgccagctcaggtgggtttttgcccgggcccctcctctgcctccgtcacaggtggatctcgagccagaggggaaagtatttgtggtaataacccttaccgggagtttcactgaagctactctccagagagaccggatcttcaaacattttaccaggaagcgccaaagggctatgcgaaggcgagtccaccagatcaatggacacaagttcatggcc

SEQ ID NO: 170660 - DNA, 545 bp, Homo sapiens
  Payload ID: 13593
  Gene Symbol: PRKCH
  Gene Name: protein kinase C, eta
  ENST ID: ENST00000553726
  CDS Start-End: 387-545
agtacagaagtgtcctgtggtacgaacggaggcaggctggggggttccattgtgtgccaggtgtttccatgaaaataaactgttgagtgccaggtggatctcgagccagaggggaaagtatttgtggtaataacccttaccgggagtttcactgaaggggagtgtttgggaaacagggttatcagtgccaagtgtgcacctgtgtcgtccataaacgctgccatcatctaattgttacagcctgtacttgccaaaacaatattaacaaagtggattcaaagattgcagaacagaggttcgggatcaacatcccacacaagttcagcatccacaactacaaagtgccaacattctgcgatcactgtggctcactgctctggggaataatgcgacaaggacttcagtgtaaaatatgtaaaatgaatgtgcatattcgatgtcaagcgaacgtggcccctaactgtggggtaaatgcggtggaacttgccaagaccctggcagggatgggtctccaacccggaaatatttctccaacctcgaaactc

SEQ ID NO: 170661 - DNA, 582 bp, Homo sapiens
  Payload ID: 13593
  Gene Symbol: PRKCH
  Gene Name: protein kinase C, eta
  ENST ID: ENST00000555185
  CDS Start-End: 129-582
agaactctgcatgcttatcggggtgtaatgcctgcctcctgctgctgctccaagctcctccaggagaaggacgctgcttctgcctggtccaggatcgtatcagggtctgggatcgtctgttttttgtgatggagtttgtgaatgggggtgacttgatgttccacattcagaagtctcgtcgttttgatgaagcacgagctcgcttctatgctgcagaaatcatttcggctctcatgttcctccatgataaaggaatcatctatagagatctgaaactggacaatgtcctgttggaccacgagggtcactgtaaactggcagacttcggaatgtgcaaggaggggatttgcaatggtgtcaccacggccacattctgtggcacgccagactatatcgctccagagatcctccaggaaatgctgtacgggcctgcagtagactggtgggcaatgggcgtgttgctctatgagatgctctgtggtcacgcgccttttgaggcagagaacgaagatgacctctttgaggccatactgaatgatgaggtggtctaccctacctggctccatgaagatgccacaggga

SEQ ID NO: 170662 - DNA, 938 bp, Homo sapiens
  Payload ID: 13593
  Gene Symbol: PRKCH
  Gene Name: protein kinase C, eta
  ENST ID: ENST00000557585
  CDS Start-End: 266-938
atgcaaggctcctaaacttccttccctagtgcttccttaagattgaccagactttggtggaaatatgtagcagagactctttatactttttactccataaaactaaagatttgcagttgaccaagccacatgtgttcattaccttgtggatctcgagccagaggggaaagtatttgtggtaataacccttaccgggagtttcactgaagctactctccagagagaccggatcttcaaacattttaccaggaagcgccaaagggctatgcgaaggcgagtccaccagatcaatggacacaagttcatggccacgtatctgaggcagcccacctactgctctcactgcagggagtttatctggggagtgtttgggaaacagggttatcagtgccaagtgtgcacctgtgtcgtccataaacgctgccatcatctaattgttacagcctgtacttgccaaaacaatattaacaaagtggattcaaagattgcagaacagaggttcgggatcaacatcccacacaagttcagcatccacaactacaaagtgccaacattctgcgatcactgtggctcactgctctggggaataatgcgacaaggacttcagtgtaaaatatgtaaaatgaatgtgcatattcgatgtcaagcgaacgtggcccctaactgtggggtaaatgcggtggaacttgccaagaccctggcagggatgggtctccaacccggaaatatttctccaacctcgaaactcgtttccagatcgaccctaagacgacagggaaaggagagcagcaaagaaggaaatgggattggggttaattcttccaaccgacttggtatcgacaactttgagttcatccgagtgttggggaaggggagttttgggaaggtgatgcttgcaagagtaaaagaaacaggagacctctatgctgtgaaggtgc

SEQ ID NO: 170663 - DNA, 552 bp, Homo sapiens
  Payload ID: 13593
  Gene Symbol: PRKCH
  Gene Name: protein kinase C, eta
  ENST ID: ENST00000553265
  CDS Start-End: 290-552
aaatagcactttaacaagcttggcggaggcagtggggtgaggagaggaagttaataggcccagggaggagagtatctcactggtttctccaagctgattcttctgggtgccaagagagctgtggaaacccacagaggaatgccccggttcctttccttccttctttctggtggatctcgagccagaggggaaagtatttgtggtaataacccttaccgggagtttcactgaagctactctccagagagaccggatcttcaaacattttaccaggaagcgccaaagggctatgcgaaggcgagtccaccagatcaatggacacaagttcatggccacgtatctgaggcagcccacctactgctctcactgcagggagtttatctggggagtgtttgggaaacagggttatcagtgccaagtgtgcacctgtgtcgtccataaacgctgccatcatctaattgttacagcctgtacttgccaaaacaatattaacaaagtggattcaaagattgcagaacagaggttcgggatcaacatcccacacaagttcag

SEQ ID NO: 170664 - DNA, 545 bp, Homo sapiens
  Payload ID: 13593
  Gene Symbol: PRKCH
  Gene Name: protein kinase C, eta
  ENST ID: ENST00000556778
  CDS Start-End: 157-545
atgcttatcggggtgtaatgcctgcctcctgctgctgctccaagctcctccaggagaaggacgctgcttctgcctggtccaggatcgtatcagggtctggctactctccagagagaccggatcttcaaacattttaccaggaagcgccaaagggctatgcgaaggcgagtccaccagatcaatggacacaagttcatggccacgtatctgaggcagcccacctactgctctcactgcagggagtttatctggggagtgtttgggaaacagggttatcagtgccaagtgtgcacctgtgtcgtccataaacgctgccatcatctaattgttacagcctgtacttgccaaaacaatattaacaaagtggattcaaagattgcagaacagaggttcgggatcaacatcccacacaagttcagcatccacaactacaaagtgccaacattctgcgatcactgtggctcactgctctggggaataatgcgacaaggacttcagtgtaaaatatgtaaaatgaatgtgcatattcgatgtcaagcgaacgt

SEQ ID NO: 170665 - DNA, 562 bp, Homo sapiens
  Payload ID: 13593
  Gene Symbol: PRKCH
  Gene Name: protein kinase C, eta
  ENST ID: ENST00000557294
  CDS Start-End: 209-562
atgcttatcggggtgtaatgcctgcctcctgctgctgctccaagctcctccaggagaaggacgctgcttctgcctggtccaggatcgtatcagggtctggggctgcctcgactcctgcacctgtcccgagggctggcctgagacgggactcccggttctcccgctgcgaagcagcgcggccccccggggccggggcagcggcgccggcatgtcgtctggcaccatgaagttcaatggctatttgagggtccgcatcggtgaggcagtggggctgcagcccacccgctggtccctgcgccactcgctcttcaagaagggccaccagctgctggacccctatctgacggtgagcgtggaccaggtgcgcgtgggccagaccagcaccaagcagaagaccaacaaacccacgtacaacgaggagttttgcgctaacgtcaccgacggcggccacctcgagttggccgtcttccacgagacgcccctgggctacgaccacttcgtggccaactgcaccctgcagttccaggagctgctgcgcacgaccggcgcctcggacaccttc

SEQ ID NO: 170666 - DNA, 429 bp, Homo sapiens
  Payload ID: 13593
  Gene Symbol: PRKCH
  Gene Name: protein kinase C, eta
  ENST ID: ENST00000556164
  CDS Start-End: 216-429
ggctgcagcaggtgggatattttttggattatggagagctgtttgatttcacatcagtgggttcttccctcaaccttgttcagatcagtgcctgagtggatctcgagccagaggggaaagtatttgtggtaataacccttaccgggagtttcactgaagctactctccagagagaccggatcttcaaacattttaccaggaagcgccaaagggctatgcgaaggcgagtccaccagatcaatggacacaagttcatggccacgtatctgaggcagcccacctactgctctcactgcagggagtttatctggggagtgtttgggaaacagggttatcagtgccaagtgtgcacctgtgtcgtccataaacgctgccatcatctaattgttacagcctgtacttgccaaaacaatattaacaaagtggatt

SEQ ID NO: 170667 - DNA, 567 bp, Homo sapiens
  Payload ID: 13593
  Gene Symbol: PRKCH
  Gene Name: protein kinase C, eta
  ENST ID: ENST00000557473
  CDS Start-End: 249-567
gtgctacaagagattggcccatgatagccagttataaccaggcagtgggcatctcaggggtttgcataggtctaaccttaaaaagccacatgactgggtgcggtgacacacacttgtaatcccagcactttgggaggccaagacacaaggatcacctgaacctgggagttggagaccagctctggcatcacactactctccagagagaccggatcttcaaacattttaccaggaagcgccaaagggctatgcgaaggcgagtccaccagatcaatggacacaagttcatggccacgtatctgaggcagcccacctactgctctcactgcagggagtttatctggggagtgtttgggaaacagggttatcagtgccaagtgtgcacctgtgtcgtccataaacgctgccatcatctaattgttacagcctgtacttgccaaaacaatattaacaaagtggattcaaagattgcagaacagaggttcgggatcaacatcccacacaagttcagcatccacaactacaaagtgccaacattctgcgatcactgtggctcactgctctggg

SEQ ID NO: 170668 - DNA, 514 bp, Homo sapiens
  Payload ID: 13593
  Gene Symbol: PRKCH
  Gene Name: protein kinase C, eta
  ENST ID: ENST00000553830
  CDS Start-End: 81-514
gtttaaactctattttcttctttcgtgtacttgctcttgatttgctgaccttctaaatggggaccagcatctaatgcttaatgcagagtgctggggacatggggaggcaggaggagctggaggctgcgtcatggaaagaccttggcgccccctcaggaaggaaggactggcttggcaggatcccaggctgttttcctggttcagccctcccgaagacattgtgttctctgcagccctggagggcctctttctctcaatttctcagtgaggtggatctcgagccagaggggaaagtatttgtggtaataacccttaccgggagtttcactgaagctactctccagagagaccggatcttcaaacattttaccaggaagcgccaaagggctatgcgaaggcgagtccaccagatcaatggacacaagttcatggccacgtatctgaggcagcccacctactgctctcactgcagggagtttatctggggagtgtttgggaaacagggttatcagtg

SEQ ID NO: 170669 - DNA, 3133 bp, Homo sapiens
  Payload ID: 13594
  Gene Symbol: PRKCG
  Gene Name: protein kinase C, gamma
  Uniprot ID: P05129
  ENST ID: ENST00000263431
  CDS Start-End: 283-2376
cggagctggagctcccaccgccgccgcccgtgcctccggctgccggcgcccctgcctttggctcttcctccccactcgcccgctccccctggcggagccggcgcgcccggggtgccgctccctgcctggcgcgctccgcacctggaggtgccttgcccctctcctgcccacctcggaatttccctgtggctcctttgatccttcgagtctccagctcctctcccttccacctgtttcccccaagaaaggcaggatcctggtccctgctacgtttctggggccatggctggtctgggccccggcgtaggcgattcagaggggggaccccggcccctgttttgcagaaagggggccctgaggcagaaggtggtccacgaagtcaagagccacaagttcaccgctcgcttcttcaagcagcccaccttctgcagccactgcaccgacttcatctggggtatcggaaagcagggcctgcaatgtcaagtctgcagctttgtggttcatcgacgatgccacgaatttgtgaccttcgagtgtccaggcgctgggaagggcccccagacggacgacccccggaacaaacacaagttccgcctgcatagctacagcagccccaccttctgcgaccactgtggctccctcctctacgggcttgtgcaccagggcatgaaatgctcctgctgcgagatgaacgtgcaccggcgctgtgtgcgtagcgtgccctccctgtgcggtgtggaccacaccgagcgccgcgggcgcctgcagctggagatccgggctcccacagcagatgagatccacgtaactgttggcgaggcccgtaacctaattcctatggaccccaatggtctctctgatccctatgtgaaactgaagctcatcccagaccctcggaacctgacgaaacagaagacccgaacggtgaaagccacgctaaaccctgtgtggaatgagacctttgtgttcaacctgaagccaggggatgtggagcgccggctcagcgtggaggtgtgggactgggaccggacctcccgcaacgacttcatgggggccatgtcctttggcgtctcggagctgctcaaggcgcccgtggatggctggtacaagttactgaaccaggaggagggcgagtattacaatgtgccggtggccgatgctgacaactgcagcctcctccagaagtttgaggcttgtaactaccccctggaattgtatgagcgggtgcggatgggcccctcttcctctcccatcccctccccttcccctagtcccaccgaccccaagcgctgcttcttcggggcgagtccaggacgcctgcacatctccgacttcagcttcctcatggttctaggaaaaggcagttttgggaaggtgatgctggccgagcgcaggggctctgatgagctctacgccatcaagatcttgaaaaaggacgtgatcgtccaggacgacgatgtggactgcacgctggtggagaaacgtgtgctggcgctggggggccggggtcctggcggccggccccacttcctcacccagctccactccaccttccagaccccggaccgcctgtatttcgtgatggagtacgtcaccgggggagacttgatgtaccacattcaacagctgggcaagtttaaggagccccatgcagcgttctacgcggcagaaatcgctatcggcctcttcttccttcacaatcagggcatcatctacagggacctgaagctggacaatgtgatgctggatgctgagggacacatcaagatcactgactttggcatgtgtaaggagaacgtcttccccgggacgacaacccgcaccttctgcgggaccccggactacatagccccggagatcattgcctaccagccctatgggaagtctgtcgattggtggtcctttggagttctgctgtatgagatgttggcaggacagcctcccttcgatggggaggacgaggaggagctgtttcaggccatcatggaacaaactgtcacctaccccaagtcgctttcccgggaagccgtggccatctgcaaggggttcctgaccaagcacccagggaagcgcctgggctcagggcctgatggggaacctaccatccgtgcacatggctttttccgctggattgactgggagcggctggaacgattggagatcccgcctcctttcagaccccgcccgtgtggccgcagcggcgagaactttgacaagttcttcacgcgggcggcgccagcgctgacccctccagaccgcctagtcctggccagcatcgaccaggccgatttccagggcttcacctacgtgaaccccgacttcgtgcacccggatgcccgcagccccaccagcccagtgcctgtgcccgtcatgtaatctcacccgccgccactaggtgtccccaacgtcccctccgccgtgccggcggcagccccacttcacccccaacttcaccaccccctgtcccattctagatcctgcaccccagcattccagctctgcccccgcgggttctagacgcccctcccaagcgttcctggccttctgaactccatacagcctctacagccgtcccgcgttcaagacttgagcggagcccgatattctccctgaccttagcgttctggactctgccccaatcgggtccagagaccacaccactaaccatccccaactccatggggttcgagactccatcttggtagttctgtgcctccccccagaccccgcccctggggaaatagcctcacggggttggctgttccagactcaggttccagaacagccctcggcctccgaggctccccgcctccactctagttctagatgagtgggaggcgtgcccccctcctccagtacgtcccgctgctgtgctctggggatttctgggatatatggaggattctttccccagaggctcccaatcagcttttgttctagacttccccatcccgaagccatcacttctccccgcagcccgcctgccgtgcatggctcctgtctggctcggacccaccccaactctccccagtgcctgccactctctgggactctcctcctcccctcctcttcccttagcctctcccacccggccacagctgctggagaataaatttgggatgctgatgctgaa

SEQ ID NO: 170670 - DNA, 560 bp, Homo sapiens
  Payload ID: 13594
  Gene Symbol: PRKCG
  Gene Name: protein kinase C, gamma
  ENST ID: ENST00000419486
  CDS Start-End: 454-560
accgccgccgcccgtgcctccggctgccggcgcccctgcctttggctcttcctccccactcgcccgctccccctggcggagccggcgcgcccggggtgccgctccctgcctggcgcgctccgcacctggagaaagggggccctgaggcagaaggtggtccacgaagtcaagagccacaagttcaccgctcgcttcttcaagcagcccaccttctgcagccactgcaccgacttcatctggggtatcggaaagcagggcctgcaatgtcaagtctgcagctttgtggttcatcgacgatgccacgaatttgtgaccttcgagtgtccaggcgctgggaagggcccccagacggacgacccccggaacaaacacaagttccgcctgcatagctacagcagccccaccttctgcgaccactgtggctccctcctctacgggcttgtgcaccagggcatgaaatgctcctgctgcgagatgaacgtgcaccggcgctgtgtgcgtagcgtgccctccctgtgcggtgtggaccacaccgagcgccgcgggcgcctgcagctgga

SEQ ID NO: 170671 - DNA, 678 bp, Homo sapiens
  Payload ID: 13594
  Gene Symbol: PRKCG
  Gene Name: protein kinase C, gamma
  ENST ID: ENST00000474397
  CDS Start-End: 380-678
acacaaataatggagaggccaggggaggaaataaagactcagccggcatcggagaaaaaagggggccctgaggcagaaggtggtccacgaagtcaagagccacaagttcaccgctcgcttcttcaagcagcccaccttctgcagccactgcaccgacttcatctggggtatcggaaagcagggcctgcaatgtcaagtctgcagctttgtggttcatcgacgatgccacgaatttgtgaccttcgagtgtccaggcgctgggaagggcccccagacggacgacccccggaacaaacacaagttccgcctgcatagctacagcagccccaccttctgcgaccactgtggctccctcctctacgggcttgtgcaccagggcatgaaatgctcctgctgcgagatgaacgtgcaccggcgctgtgtgcgtagcgtgccctccctgtgcggtgtggaccacaccgagcgccgcgggcgcctgcagctggagatccgggctcccacagcagatgagatccacgtaactgttggcgaggcccgtaacctaattcctatggaccccaatggtctctctgatccctatgtgaaactgaagctcatcccagaccctcggaacctgacgaaacagaagacccgaacggtgaaagccacgctaaaccctgtgtggaatgagacctttgt

SEQ ID NO: 170672 - DNA, 571 bp, Homo sapiens
  Payload ID: 13594
  Gene Symbol: PRKCG
  Gene Name: protein kinase C, gamma
  ENST ID: ENST00000479081
  CDS Start-End: 514-571
attcctaggtcggtttcggggccatccccgccgcctatccttcgccctaggtcacctggaggtggctggaaggccagtggactccacatttagggagagtggttacaagaggactcggattcccccaccttcccttcggctttgggaatcccaggaaacccgccccgaacccctgaaaagtcccagagaagaaagggggccctgaggcagaaggtggtccacgaagtcaagagccacaagttcaccgctcgcttcttcaagcagcccaccttctgcagccactgcaccgacttcatctggggtatcggaaagcagggcctgcaatgtcaagtctgcagctttgtggttcatcgacgatgccacgaatttgtgaccttcgagtgtccaggcgctgggaagggcccccagacggacgacccccggaacaaacacaagttccgcctgcatagctacagcagccccaccttctgcgaccactgtggctccctcctctacgggcttgtgcaccagggcatgaaatgctcctgctgcgagatgaacgtgcaccggcgctgtgtgcgtagcgtgccct

SEQ ID NO: 170673 - DNA, 4950 bp, Homo sapiens
  Payload ID: 13595
  Gene Symbol: PRKCI
  Gene Name: protein kinase C, iota
  Uniprot ID: P41743
  ENST ID: ENST00000295797
  CDS Start-End: 306-2096
ggttgcgcccgccctaccccggaatgtgggcctttggagcgagcgaagtgggagggaccgacgcaggaggtgtcttgggcccgggcggctgtagaggcggcggcgcctacgggcagtgggaggagccgcgcggttccggctgctccggcgaggcgacccttgggtcggcgctgcgggcgaggtgggcaggtaggtgggcggacggccgcggttctccggcaagcgcaggcggcggagtcccccacggcgcccgaagcgcccccccgcacccccggcctccagcgttgaggcgggggagtgaggagatgccgacccagagggacagcagcaccatgtcccacacggtcgcaggcggcggcagcggggaccattcccaccaggtccgggtgaaagcctactaccgcggggatatcatgataacacattttgaaccttccatctcctttgagggcctttgcaatgaggttcgagacatgtgttcttttgacaacgaacagctcttcaccatgaaatggatagatgaggaaggagacccgtgtacagtatcatctcagttggagttagaagaagcctttagactttatgagctaaacaaggattctgaactcttgattcatgtgttcccttgtgtaccagaacgtcctgggatgccttgtccaggagaagataaatccatctaccgtagaggtgcacgccgctggagaaagctttattgtgccaatggccacactttccaagccaagcgtttcaacaggcgtgctcactgtgccatctgcacagaccgaatatggggacttggacgccaaggatataagtgcatcaactgcaaactcttggttcataagaagtgccataaactcgtcacaattgaatgtgggcggcattctttgccacaggaaccagtgatgcccatggatcagtcatccatgcattctgaccatgcacagacagtaattccatataatccttcaagtcatgagagtttggatcaagttggtgaagaaaaagaggcaatgaacaccagggaaagtggcaaagcttcatccagtctaggtcttcaggattttgatttgctccgggtaataggaagaggaagttatgccaaagtactgttggttcgattaaaaaaaacagatcgtatttatgcaatgaaagttgtgaaaaaagagcttgttaatgatgatgaggatattgattgggtacagacagagaagcatgtgtttgagcaggcatccaatcatcctttccttgttgggctgcattcttgctttcagacagaaagcagattgttctttgttatagagtatgtaaatggaggagacctaatgtttcatatgcagcgacaaagaaaacttcctgaagaacatgccagattttactctgcagaaatcagtctagcattaaattatcttcatgagcgagggataatttatagagatttgaaactggacaatgtattactggactctgaaggccacattaaactcactgactacggcatgtgtaaggaaggattacggccaggagatacaaccagcactttctgtggtactcctaattacattgctcctgaaattttaagaggagaagattatggtttcagtgttgactggtgggctcttggagtgctcatgtttgagatgatggcaggaaggtctccatttgatattgttgggagctccgataaccctgaccagaacacagaggattatctcttccaagttattttggaaaaacaaattcgcataccacgttctctgtctgtaaaagctgcaagtgttctgaagagttttcttaataaggaccctaaggaacgattgggttgtcatcctcaaacaggatttgctgatattcagggacacccgttcttccgaaatgttgattgggatatgatggagcaaaaacaggtggtacctccctttaaaccaaatatttctggggaatttggtttggacaactttgattctcagtttactaatgaacctgtccagctcactccagatgacgatgacattgtgaggaagattgatcagtctgaatttgaaggttttgagtatatcaatcctcttttgatgtctgcagaagaatgtgtctgatcctcatttttcaaccatgtattctactcatgttgccatttaatgcatggataaacttgctgcaagcctggatacaattaaccattttatatttgccacctacaaaaaaacacccaatatcttctcttgtagactatatgaatcaattattacatctgttttactatgaaaaaaaaattaatactactagcttccagacaatcatgtcaaaatttagttgaactggtttttcagtttttaaaaggcctacagatgagtaatgaagttatcttttttgtttaaaaaaaaaaaaaacactgcattaaaaaagtatctgttgcattaaggcacatagtgggattacatcataaacctcccataatttttgtcattctgtgttaaatcatttcagggtttaattttgaaataaaagattaatataaaatgcaacaactttttatattacctattagttttggagttctttatgtttaaaaattcaggtgtaaattttattgccttggataaataaattattgatcttttttaaggcagcagttattaaattggtaatagaagatgctgcttgcttagaattgggaaattcggctgggtgcagtgactcaatgcctgtgatcccagtactttgggaggttgaggcgggcagatcacttgaggtcaggagtttgagattggcctggtcaacatggtgaaatcctgtctctactaaaaatacaaaaattagctgggcatggtggcacatacctgtaatcccagctactcgggaggctgaaacaggagaatcgcttgaacccaggagatggagttggcagtgagccaagattagcctgggcaacagtgagtgagactcggtctcaaacaaaaaccaaattgggaaattcttcttgagttaaaaaagacactttttattatgaatcagattccaaatcattaactatttttgcaaaactggcacaagtggtttttctttttaagtatattaacagggtagctcctgagcctttccctttattggaaactttaactgcagtgttaatatatacactgcaaaagaccaaggatgcagttgaatggaaaattactcagtgtatagaaaggaaaaaaaccagaaatttaaaatagatacagaaaagtacactggtaatatttttatttcctattggagagtgaatccccacagttgctttttgtgacttgattcaaatgaggcactcattattgttaccaaacttgtaaaagcattccatgtattcagtggaggcagaatgtataatattttttccttataatttagcatacaggaaaagtatttattttttaagtagggtatcttaattatgctcatttcttcccctaaaccacattatctatatgattggaccctttagtgaaatcagaaaaataaagtaggcatgaataaatgttcaggacacacacatacactcacacacatcacagtatcagctctttcagtgagtttttattaactagataacacatgtaatacatagtagaatacatttcagaggcagagttcctcggattattttttatggatattagtgttcagcagcttattatttaaaggggtgccaaatatagcatccttctgttgtttattttaaatatatttttaatgaaaagggacttaaaaagtaaacatgattatctaaattacttaaaattttttaatcttagtaaaaattttaggaaagttatctagtttaaatttcaaatgttttaaaatttgtaggcatttaataaattatctttttttggaggggtggatgctgcatttcattggaaatgtcatttttccaaagtttctagctatatactctctttccttcaaataacataagtctgaaagcaatgaaaacgtcaaaggaaaatgtttatatacatccacatgtttatttaatatgtttctcttaacacctgaaacttgttttaaaacaaaaagcagtattcacttcaaatcataaacttagaattctgtatctcatgtcagaaatatgtttatggccttgcttttaagtggtgctgtttcccatagggcattagttctcagattttggaatgtgaaataatcacctaggaagttggtttaaaatgcacactagtgagcccaccttagacttcttttggggccttcgacctcactttgagaaataccttcttcaggttattctttatgtttgtcctgtggttaaatattagagtattcatgataaaacattttgagaaggggtaagcagtgagttattacccacaatttaaagcaaattttgaatgaatctttaagttaggtatctaccttcccaccagccccccaaaaaacctctcagtagtttctttcagtgtacaaaatgatgagcatttttctatgatgaggttttaaccattattcagggtggtcttttgtttttaaatctttttttaactaataagatttacggtgtgtattttatacagaaatgcattataaatgtttttaattgtgttctgttttttgcagtctttaagtgccatgccaattgttcttatattctatagaagttcgctcaaaatactcaacaggggaataggcagcggacagtcagaatggttggaattttggctttctaagaaaaactttattttgcataagcatgtggtcagatcattttgtgcatatgcagcctggattggatgttaagtaaatgcttgttcagtgccggtacatttacttaaatctgtttttatttttgtcatgtagaatactactgtggtcatcataatgtaatctatttctgtaccttttttttttttttttactttgaagtctttaaataaaatgtataatacccattga

SEQ ID NO: 170674 - DNA, 3285 bp, Homo sapiens
  Payload ID: 13596
  Gene Symbol: PRKCQ
  Gene Name: protein kinase C, theta
  Uniprot ID: Q04759
  ENST ID: ENST00000263125
  CDS Start-End: 101-2221
ccgccagccccgccagtccccgcgcagtccccgcgcagtccccgcgcagtcccagcgccaccgggcagcagcggcgccgtgctcgctccagggcgcaaccatgtcgccatttcttcggattggcttgtccaactttgactgcgggtcctgccagtcttgtcagggcgaggctgttaacccttactgtgctgtgctcgtcaaagagtatgtcgaatcagagaacgggcagatgtatatccagaaaaagcctaccatgtacccaccctgggacagcacttttgatgcccatatcaacaagggaagagtcatgcagatcattgtgaaaggcaaaaacgtggacctcatctctgaaaccaccgtggagctctactcgctggctgagaggtgcaggaagaacaacgggaagacagaaatatggttagagctgaaacctcaaggccgaatgctaatgaatgcaagatactttctggaaatgagtgacacaaaggacatgaatgaatttgagacggaaggcttctttgctttgcatcagcgccggggtgccatcaagcaggcaaaggtccaccacgtcaagtgccacgagttcactgccaccttcttcccacagcccacattttgctctgtctgccacgagtttgtctggggcctgaacaaacagggctaccagtgccgacaatgcaatgcagcaattcacaagaagtgtattgataaagttatagcaaagtgcacaggatcagctatcaatagccgagaaaccatgttccacaaggagagattcaaaattgacatgccacacagatttaaagtctacaattacaagagcccgaccttctgtgaacactgtgggaccctgctgtggggactggcacggcaaggactcaagtgtgatgcatgtggcatgaatgtgcatcatagatgccagacaaaggtggccaacctttgtggcataaaccagaagctaatggctgaagcgctggccatgattgagagcactcaacaggctcgctgcttaagagatactgaacagatcttcagagaaggtccggttgaaattggtctcccatgctccatcaaaaatgaagcaaggccgccatgtttaccgacaccgggaaaaagagagcctcagggcatttcctgggagtctccgttggatgaggtggataaaatgtgccatcttccagaacctgaactgaacaaagaaagaccatctctgcagattaaactaaaaattgaggattttatcttgcacaaaatgttggggaaaggaagttttggcaaggtcttcctggcagaattcaagaaaaccaatcaatttttcgcaataaaggccttaaagaaagatgtggtcttgatggacgatgatgttgagtgcacgatggtagagaagagagttctttccttggcctgggagcatccgtttctgacgcacatgttttgtacattccagaccaaggaaaacctcttttttgtgatggagtacctcaacggaggggacttaatgtaccacatccaaagctgccacaagttcgacctttccagagcgacgttttatgctgctgaaatcattcttggtctgcagttccttcattccaaaggaatagtctacagggacctgaagctagataacatcctgttagacaaagatggacatatcaagatcgcggattttggaatgtgcaaggagaacatgttaggagatgccaagacgaataccttctgtgggacacctgactacatcgccccagagatcttgctgggtcagaaatacaaccactctgtggactggtggtccttcggggttctcctttatgaaatgctgattggtcagtcgcctttccacgggcaggatgaggaggagctcttccactccatccgcatggacaatcccttttacccacggtggctggagaaggaagcaaaggaccttctggtgaagctcttcgtgcgagaacctgagaagaggctgggcgtgaggggagacatccgccagcaccctttgtttcgggagatcaactgggaggaacttgaacggaaggagattgacccaccgttccggccgaaagtgaaatcaccatttgactgcagcaatttcgacaaagaattcttaaacgagaagccccggctgtcatttgccgacagagcactgatcaacagcatggaccagaatatgttcaggaacttttccttcatgaaccccgggatggagcggctgatatcctgaatcttgcccctccagagacaggaaagaatttgccttctccctgggaactggttcaagagacactgcttgggttcctttttcaacttggaaaaagaaagaaacactcaacaataaagactgagacccgttcgcccccatgtgacttttatctgtagcagaaaccaagtctacttcactaatgacgatgccgtgtgtctcgtctcctgacatgtctcacagacgctcctgaagttaggtcattactaaccatagttatttacttgaaagatgggtctccgcacttggaaaggtttcaagacttgatactgcaataaattatggctcttcacctgggcgccaactgctgatcaatgaaatgcttgttgaatcaggggcaaacggagtacagacgtctcaagactgaaacggccccattgcctggtctagtagcggatctcactcagccgcagacaagtaatcactaacccgttttattctattcctatctgtggatgtgtaaatggctggggggccagccctggataggtttttatgggaattctttacaataaacatagcttgtaacttgagatctacaaatccattcatcctgattgggcatgaaatccatggtcaagaggacaagtggaaagtgagagggaaggtttgctagacaccttcgcttgttatcttgtcaagatagaaaagatagtatcatttcacccttgccagtaaaaacctttccatccacccattctcagcagactccagtattggcacagtcactcactgccattctcacactataacaagaaaagaaatgaagtgcataagtctcctgggaaaagaaccttaaccccttctcgtgccatgactggtgatttcatgactcataagcccctccgtaggcatcattcaagatcaatggcccatgcatgctgtttgcagcagtcaattgagttgaattagaattccaaccatacattttaaaggtatttgtgctgtgtgtatattttgataaaatgttgtgacttcatggcaaacaggtggatgtgtaaaaatggaataaaaaaaaaaaaagagtc

SEQ ID NO: 170675 - DNA, 3096 bp, Homo sapiens
  Payload ID: 13596
  Gene Symbol: PRKCQ
  Gene Name: protein kinase C, theta
  Uniprot ID: Q04759
  ENST ID: ENST00000397176
  CDS Start-End: 101-2032
ccgccagccccgccagtccccgcgcagtccccgcgcagtccccgcgcagtcccagcgccaccgggcagcagcggcgccgtgctcgctccagggcgcaaccatgtcgccatttcttcggattggcttgtccaactttgactgcgggtcctgccagtcttgtcagggcgaggctgttaacccttactgtgctgtgctcgtcaaagagtatgtcgaatcagagaacgggcagatgtatatccagaaaaagcctaccatgtacccaccctgggacagcacttttgatgcccatatcaacaagggaagagtcatgcagatcattgtgaaaggcaaaaacgtggacctcatctctgaaaccaccgtggagctctactcgctggctgagaggtgcaggaagaacaacgggaagacagaaatatggttagagctgaaacctcaaggccgaatgctaatgaatgcaagatactttctggaaatgagtgacacaaaggacatgaatgaatttgagacggaaggcttctttgctttgcatcagcgccggggtgccatcaagcaggcaaaggtccaccacgtcaagtgccacgagttcactgccaccttcttcccacagcccacattttgctctgtctgccacgagtttgtctggggcctgaacaaacagggctaccagtgccgacaatgcaatgcagcaattcacaagaagtgtattgataaagttatagcaaagtgcacaggatcagctatcaatagccgagaaaccatgttccacaaggagagattcaaaattgacatgccacacagatttaaagtctacaattacaagagcccgaccttctgtgaacactgtgggaccctgctgtggggactggcacggcaaggactcaagtgtgatgcatgtggcatgaatgtgcatcatagatgccagacaaaggtggccaacctttgtggcataaaccagaagctaatggctgaagcgctggccatgattgagagcactcaacaggctcgctgcttaagagatactgaacagatcttcagagaaggtccggttgaaattggtctcccatgctccatcaaaaatgaagcaaggccgccatgtttaccgacaccgggaaaaagagagcctcagggcatttcctgggagtctccgttggatgaggtggataaaatgtgccatcttccagaacctgaactgaacaaagaaagaccatctctgcagattaaactaaaaattgaggattttatcttgcacaaaatgttggggaaaggaagttttggcaaggtcttcctggcagaattcaagaaaaccaatcaatttttcgcaataaaggccttaaagaaagatgtggtcttgatggacgatgatgttgagtgcacgatggtagagaagagagttctttccttggcctgggagcatccgtttctgacgcacatgttttgtacattccagaccaaggaaaacctcttttttgtgatggagtacctcaacggaggggacttaatgtaccacatccaaagctgccacaagttcgacctttccagagcgacgttttatgctgctgaaatcattcttggtctgcagttccttcattccaaaggaatagtctacagggacctgaagctagataacatcctgttagacaaagatggacatatcaagatcgcggattttggaatgtgcaaggagaacatgttaggagatgccaagacgaataccttctgtgggacacctgactacatcgccccagagctcttcgtgcgagaacctgagaagaggctgggcgtgaggggagacatccgccagcaccctttgtttcgggagatcaactgggaggaacttgaacggaaggagattgacccaccgttccggccgaaagtgaaatcaccatttgactgcagcaatttcgacaaagaattcttaaacgagaagccccggctgtcatttgccgacagagcactgatcaacagcatggaccagaatatgttcaggaacttttccttcatgaaccccgggatggagcggctgatatcctgaatcttgcccctccagagacaggaaagaatttgccttctccctgggaactggttcaagagacactgcttgggttcctttttcaacttggaaaaagaaagaaacactcaacaataaagactgagacccgttcgcccccatgtgacttttatctgtagcagaaaccaagtctacttcactaatgacgatgccgtgtgtctcgtctcctgacatgtctcacagacgctcctgaagttaggtcattactaaccatagttatttacttgaaagatgggtctccgcacttggaaaggtttcaagacttgatactgcaataaattatggctcttcacctgggcgccaactgctgatcaatgaaatgcttgttgaatcaggggcaaacggagtacagacgtctcaagactgaaacggccccattgcctggtctagtagcggatctcactcagccgcagacaagtaatcactaacccgttttattctattcctatctgtggatgtgtaaatggctggggggccagccctggataggtttttatgggaattctttacaataaacatagcttgtaacttgagatctacaaatccattcatcctgattgggcatgaaatccatggtcaagaggacaagtggaaagtgagagggaaggtttgctagacaccttcgcttgttatcttgtcaagatagaaaagatagtatcatttcacccttgccagtaaaaacctttccatccacccattctcagcagactccagtattggcacagtcactcactgccattctcacactataacaagaaaagaaatgaagtgcataagtctcctgggaaaagaaccttaaccccttctcgtgccatgactggtgatttcatgactcataagcccctccgtaggcatcattcaagatcaatggcccatgcatgctgtttgcagcagtcaattgagttgaattagaattccaaccatacattttaaaggtatttgtgctgtgtgtatattttgataaaatgttgtgacttcatggcaaacaggtggatgtgtaaaaatggaataaaaaaaaaaaaagagtc

SEQ ID NO: 170676 - DNA, 3224 bp, Homo sapiens
  Payload ID: 13596
  Gene Symbol: PRKCQ
  Gene Name: protein kinase C, theta
  Uniprot ID: Q04759
  ENST ID: ENST00000539722
  CDS Start-End: 415-2160
ccgccagccccgccagtccccgcgcagtccccgcgcagtccccgcgcagtcccagcgccaccgggcagcagcggcgccgtgctcgctccagggcgcaaccatgtcgccatttcttcggattggcttgtccaactttgactgcgggtcctgccagtcttgtcagggcgaggctgttaacccttactgtgctgtgctcgtcaaagagtatgtcgaatcagagaacgggcagatgtatatccagaaaaagcctaccatgtacccaccctgggacagcacttttgatgcccatatcaacaagggaagagtcatgcagatcattgtgaaaggcaaaaacgtggacctcatctctgaaaccaccgtggagctctactcgctggctgagaggtgcaggaagaacaacgggaagacagaaatatggacacaaaggacatgaatgaatttgagacggaaggcttctttgctttgcatcagcgccggggtgccatcaagcaggcaaaggtccaccacgtcaagtgccacgagttcactgccaccttcttcccacagcccacattttgctctgtctgccacgagtttgtctggggcctgaacaaacagggctaccagtgccgacaatgcaatgcagcaattcacaagaagtgtattgataaagttatagcaaagtgcacaggatcagctatcaatagccgagaaaccatgttccacaaggagagattcaaaattgacatgccacacagatttaaagtctacaattacaagagcccgaccttctgtgaacactgtgggaccctgctgtggggactggcacggcaaggactcaagtgtgatgcatgtggcatgaatgtgcatcatagatgccagacaaaggtggccaacctttgtggcataaaccagaagctaatggctgaagcgctggccatgattgagagcactcaacaggctcgctgcttaagagatactgaacagatcttcagagaaggtccggttgaaattggtctcccatgctccatcaaaaatgaagcaaggccgccatgtttaccgacaccgggaaaaagagagcctcagggcatttcctgggagtctccgttggatgaggtggataaaatgtgccatcttccagaacctgaactgaacaaagaaagaccatctctgcagattaaactaaaaattgaggattttatcttgcacaaaatgttggggaaaggaagttttggcaaggtcttcctggcagaattcaagaaaaccaatcaatttttcgcaataaaggccttaaagaaagatgtggtcttgatggacgatgatgttgagtgcacgatggtagagaagagagttctttccttggcctgggagcatccgtttctgacgcacatgttttgtacattccagaccaaggaaaacctcttttttgtgatggagtacctcaacggaggggacttaatgtaccacatccaaagctgccacaagttcgacctttccagagcgacgttttatgctgctgaaatcattcttggtctgcagttccttcattccaaaggaatagtctacagggacctgaagctagataacatcctgttagacaaagatggacatatcaagatcgcggattttggaatgtgcaaggagaacatgttaggagatgccaagacgaataccttctgtgggacacctgactacatcgccccagagatcttgctgggtcagaaatacaaccactctgtggactggtggtccttcggggttctcctttatgaaatgctgattggtcagtcgcctttccacgggcaggatgaggaggagctcttccactccatccgcatggacaatcccttttacccacggtggctggagaaggaagcaaaggaccttctggtgaagctcttcgtgcgagaacctgagaagaggctgggcgtgaggggagacatccgccagcaccctttgtttcgggagatcaactgggaggaacttgaacggaaggagattgacccaccgttccggccgaaagtgaaatcaccatttgactgcagcaatttcgacaaagaattcttaaacgagaagccccggctgtcatttgccgacagagcactgatcaacagcatggaccagaatatgttcaggaacttttccttcatgaaccccgggatggagcggctgatatcctgaatcttgcccctccagagacaggaaagaatttgccttctccctgggaactggttcaagagacactgcttgggttcctttttcaacttggaaaaagaaagaaacactcaacaataaagactgagacccgttcgcccccatgtgacttttatctgtagcagaaaccaagtctacttcactaatgacgatgccgtgtgtctcgtctcctgacatgtctcacagacgctcctgaagttaggtcattactaaccatagttatttacttgaaagatgggtctccgcacttggaaaggtttcaagacttgatactgcaataaattatggctcttcacctgggcgccaactgctgatcaatgaaatgcttgttgaatcaggggcaaacggagtacagacgtctcaagactgaaacggccccattgcctggtctagtagcggatctcactcagccgcagacaagtaatcactaacccgttttattctattcctatctgtggatgtgtaaatggctggggggccagccctggataggtttttatgggaattctttacaataaacatagcttgtaacttgagatctacaaatccattcatcctgattgggcatgaaatccatggtcaagaggacaagtggaaagtgagagggaaggtttgctagacaccttcgcttgttatcttgtcaagatagaaaagatagtatcatttcacccttgccagtaaaaacctttccatccacccattctcagcagactccagtattggcacagtcactcactgccattctcacactataacaagaaaagaaatgaagtgcataagtctcctgggaaaagaaccttaaccccttctcgtgccatgactggtgatttcatgactcataagcccctccgtaggcatcattcaagatcaatggcccatgcatgctgtttgcagcagtcaattgagttgaattagaattccaaccatacattttaaaggtatttgtgctgtgtgtatattttgataaaatgttgtgacttcatggcaaacaggtggatgtgtaaaaatggaataaaaaaaaaaaaagagtc

SEQ ID NO: 170677 - DNA, 3077 bp, Homo sapiens
  Payload ID: 13596
  Gene Symbol: PRKCQ
  Gene Name: protein kinase C, theta
  ENST ID: ENST00000610727
  CDS Start-End: 1-2013
atgtcaaatgagaacgggcagatgtatatccagaaaaagcctaccatgtacccaccctgggacagcacttttgatgcccatatcaacaagggaagagtcatgcagatcattgtgaaaggcaaaaacgtggacctcatctctgaaaccaccgtggagctctactcgctggctgagaggtgcaggaagaacaacgggaagacagaaatatggttagagctgaaacctcaaggccgaatgctaatgaatgcaagatactttctggaaatgagtgacacaaaggacatgaatgaatttgagacggaaggcttctttgctttgcatcagcgccggggtgccatcaagcaggcaaaggtccaccacgtcaagtgccacgagttcactgccaccttcttcccacagcccacattttgctctgtctgccacgagtttgtctggggcctgaacaaacagggctaccagtgccgacaatgcaatgcagcaattcacaagaagtgtattgataaagttatagcaaagtgcacaggatcagctatcaatagccgagaaaccatgttccacaaggagagattcaaaattgacatgccacacagatttaaagtctacaattacaagagcccgaccttctgtgaacactgtgggaccctgctgtggggactggcacggcaaggactcaagtgtgatgcatgtggcatgaatgtgcatcatagatgccagacaaaggtggccaacctttgtggcataaaccagaagctaatggctgaagcgctggccatgattgagagcactcaacaggctcgctgcttaagagatactgaacagatcttcagagaaggtccggttgaaattggtctcccatgctccatcaaaaatgaagcaaggccgccatgtttaccgacaccgggaaaaagagagcctcagggcatttcctgggagtctccgttggatgaggtggataaaatgtgccatcttccagaacctgaactgaacaaagaaagaccatctctgcagattaaactaaaaattgaggattttatcttgcacaaaatgttggggaaaggaagttttggcaaggtcttcctggcagaattcaagaaaaccaatcaatttttcgcaataaaggccttaaagaaagatgtggtcttgatggacgatgatgttgagtgcacgatggtagagaagagagttctttccttggcctgggagcatccgtttctgacgcacatgttttgtacattccagaccaaggaaaacctcttttttgtgatggagtacctcaacggaggggacttaatgtaccacatccaaagctgccacaagttcgacctttccagagcgacgttttatgctgctgaaatcattcttggtctgcagttccttcattccaaaggaatagtctacagggacctgaagctagataacatcctgttagacaaagatggacatatcaagatcgcggattttggaatgtgcaaggagaacatgttaggagatgccaagacgaataccttctgtgggacacctgactacatcgccccagagatcttgctgggtcagaaatacaaccactctgtggactggtggtccttcggggttctcctttatgaaatgctgattggtcagtcgcctttccacgggcaggatgaggaggagctcttccactccatccgcatggacaatcccttttacccacggtggctggagaaggaagcaaaggaccttctggtgaagctcttcgtgcgagaacctgagaagaggctgggcgtgaggggagacatccgccagcaccctttgtttcgggagatcaactgggaggaacttgaacggaaggagattgacccaccgttccggccgaaagtgaaatcaccatttgactgcagcaatttcgacaaagaattcttaaacgagaagccccggctgtcatttgccgacagagcactgatcaacagcatggaccagaatatgttcaggaacttttccttcatgaaccccgggatggagcggctgatatcctgaatcttgcccctccagagacaggaaagaatttgccttctccctgggaactggttcaagagacactgcttgggttcctttttcaacttggaaaaagaaagaaacactcaacaataaagactgagacccgttcgcccccatgtgacttttatctgtagcagaaaccaagtctacttcactaatgacgatgccgtgtgtctcgtctcctgacatgtctcacagacgctcctgaagttaggtcattactaaccatagttatttacttgaaagatgggtctccgcacttggaaaggtttcaagacttgatactgcaataaattatggctcttcacctgggcgccaactgctgatcaatgaaatgcttgttgaatcaggggcaaacggagtacagacgtctcaagactgaaacggccccattgcctggtctagtagcggatctcactcagccgcagacaagtaatcactaacccgttttattctattcctatctgtggatgtgtaaatggctggggggccagccctggataggtttttatgggaattctttacaataaacatagcttgtaacttgagatctacaaatccattcatcctgattgggcatgaaatccatggtcaagaggacaagtggaaagtgagagggaaggtttgctagacaccttcgcttgttatcttgtcaagatagaaaagatagtatcatttcacccttgccagtaaaaacctttccatccacccattctcagcagactccagtattggcacagtcactcactgccattctcacactataacaagaaaagaaatgaagtgcataagtctcctgggaaaagaaccttaaccccttctcgtgccatgactggtgatttcatgactcataagcccctccgtaggcatcattcaagatcaatggcccatgcatgctgtttgcagcagtcaattgagttgaattagaattccaaccatacattttaaaggtatttgtgctgtgtgtatattttgataaaatgttgtgacttcatggcaaacaggtggatgtgtaaaaatggaataaaaaaaaaaaaagagtc

SEQ ID NO: 170678 - DNA, 2326 bp, Homo sapiens
  Payload ID: 13597
  Gene Symbol: PRKCZ
  Gene Name: protein kinase C, zeta
  Uniprot ID: Q05513
  ENST ID: ENST00000378567
  CDS Start-End: 162-1940
gccccgcgcgccgccggagttccgcggagttgaccgggtcggcgccgtcggtcctgagcgctgccttccgcgttccgccgcggccccacctggagcccccgccccgcgccatggccggagctcccggggcgcagcgctgacggcggcggggggagcgcgccatgcccagcaggaccggccccaagatggaagggagcggcggccgcgtccgcctcaaggcgcattacgggggggacatcttcatcaccagcgtggacgccgccacgaccttcgaggagctctgtgaggaagtgagagacatgtgtcgtctgcaccagcagcacccgctcaccctcaagtgggtggacagcgaaggtgacccttgcacggtgtcctcccagatggagctggaagaggctttccgcctggcccgtcagtgcagggatgaaggcctcatcattcatgttttcccgagcacccctgagcagcctggcctgccatgtccgggagaagacaaatctatctaccgccggggagccagaagatggaggaagctgtaccgtgccaacggccacctcttccaagccaagcgctttaacaggagagcgtactgcggtcagtgcagcgagaggatatggggcctcgcgaggcaaggctacaggtgcatcaactgcaaactgctggtccataagcgctgccacggcctcgtcccgctgacctgcaggaagcatatggattctgtcatgccttcccaagagcctccagtagacgacaagaacgaggacgccgaccttccttccgaggagacagatggaattgcttacatttcctcatcccggaagcatgacagcattaaagacgactcggaggaccttaagccagttatcgatgggatggatggaatcaaaatctctcaggggcttgggctgcaggactttgacctaatcagagtcatcgggcgcgggagctacgccaaggttctcctggtgcggttgaagaagaatgaccaaatttacgccatgaaagtggtgaagaaagagctggtgcatgatgacgaggatattgactgggtacagacagagaagcacgtgtttgagcaggcatccagcaaccccttcctggtcggattacactcctgcttccagacgacaagtcggttgttcctggtcattgagtacgtcaacggcggggacctgatgttccacatgcagaggcagaggaagctccctgaggagcacgccaggttctacgcggccgagatctgcatcgccctcaacttcctgcacgagagggggatcatctacagggacctgaagctggacaacgtcctcctggatgcggacgggcacatcaagctcacagactacggcatgtgcaaggaaggcctgggccctggtgacacaacgagcactttctgcggaaccccgaattacatcgcccccgaaatcctgcggggagaggagtacgggttcagcgtggactggtgggcgctgggagtcctcatgtttgagatgatggccgggcgctccccgttcgacatcatcaccgacaacccggacatgaacacagaggactaccttttccaagtgatcctggagaagcccatccggatcccccggttcctgtccgtcaaagcctcccatgttttaaaaggatttttaaataaggaccccaaagagaggctcggctgccggccacagactggattttctgacatcaagtcccacgcgttcttccgcagcatagactgggacttgctggagaagaagcaggcgctccctccattccagccacagatcacagacgactacggtctggacaactttgacacacagttcaccagcgagcccgtgcagctgaccccagacgatgaggatgccataaagaggatcgaccagtcagagttcgaaggctttgagtatatcaacccattattgctgtccaccgaggagtcggtgtgaggccgcgtgcgtctctgtcgtggacacgcgtgattgaccctttaactgtatccttaaccaccgcatatgcatgccaggctgggcacggctccgagggcggccagggacagacgcttgcgccgagaccgcagagggaagcgtcagcgggcgctgctgggagcagaacagtccctcacacctgggcccgggcaggccagcttcgtgctggaggaacttgctgctgtgcctgcgtcgcggcggatccgcggggaccctgccgagggggctgtcatgcggtttccaaggtgcacattttccacggaaacagaactcgatgcactgacctgctccgccaggaaagtgagcgtgtagcgtcctgaggaataaaatgttccgatgatgtggaa

SEQ ID NO: 170679 - DNA, 2009 bp, Homo sapiens
  Payload ID: 13597
  Gene Symbol: PRKCZ
  Gene Name: protein kinase C, zeta
  Uniprot ID: Q05513
  ENST ID: ENST00000400920
  CDS Start-End: 396-1625
agaacatcgctcggtgccagacaggcaggacgcagcgggctggcctgcggggctcactgctgccccccggggccgagcacgaaagggagagttggagggcgcttcctcgccgggtgttgcggtgtgagcggggactggtgagtgtgtgctgtcttcagagagagaagagcagttttcaggaatctatctaccgccggggagccagaagatggaggaagctgtaccgtgccaacggccacctcttccaagccaagcgctttaacaggagagcgtactgcggtcagtgcagcgagaggatatggggcctcgcgaggcaaggctacaggtgcatcaactgcaaactgctggtccataagcgctgccacggcctcgtcccgctgacctgcaggaagcatatggattctgtcatgccttcccaagagcctccagtagacgacaagaacgaggacgccgaccttccttccgaggagacagatggaattgcttacatttcctcatcccggaagcatgacagcattaaagacgactcggaggaccttaagccagttatcgatgggatggatggaatcaaaatctctcaggggcttgggctgcaggactttgacctaatcagagtcatcgggcgcgggagctacgccaaggttctcctggtgcggttgaagaagaatgaccaaatttacgccatgaaagtggtgaagaaagagctggtgcatgatgacgaggatattgactgggtacagacagagaagcacgtgtttgagcaggcatccagcaaccccttcctggtcggattacactcctgcttccagacgacaagtcggttgttcctggtcattgagtacgtcaacggcggggacctgatgttccacatgcagaggcagaggaagctccctgaggagcacgccaggttctacgcggccgagatctgcatcgccctcaacttcctgcacgagagggggatcatctacagggacctgaagctggacaacgtcctcctggatgcggacgggcacatcaagctcacagactacggcatgtgcaaggaaggcctgggccctggtgacacaacgagcactttctgcggaaccccgaattacatcgcccccgaaatcctgcggggagaggagtacgggttcagcgtggactggtgggcgctgggagtcctcatgtttgagatgatggccgggcgctccccgttcgacatcatcaccgacaacccggacatgaacacagaggactaccttttccaagtgatcctggagaagcccatccggatcccccggttcctgtccgtcaaagcctcccatgttttaaaaggatttttaaataaggaccccaaagagaggctcggctgccggccacagactggattttctgacatcaagtcccacgcgttcttccgcagcatagactgggacttgctggagaagaagcaggcgctccctccattccagccacagatcacagacgactacggtctggacaactttgacacacagttcaccagcgagcccgtgcagctgaccccagacgatgaggatgccataaagaggatcgaccagtcagagttcgaaggctttgagtatatcaacccattattgctgtccaccgaggagtcggtgtgaggccgcgtgcgtctctgtcgtggacacgcgtgattgaccctttaactgtatccttaaccaccgcatatgcatgccaggctgggcacggctccgagggcggccagggacagacgcttgcgccgagaccgcagagggaagcgtcagcgggcgctgctgggagcagaacagtccctcacacctgggcccgggcaggccagcttcgtgctggaggaacttgctgctgtgcctgcgtcgcggcggatccgcggggaccctgccgagggggctgtcatgcggtttccaaggtgcacattttccacggaaacagaactcgatgcactgacctgctccgccaggaaagtgagcgtgtagcgtcctgaggaataaaatgttccgatgatgtgg

SEQ ID NO: 170680 - DNA, 2294 bp, Homo sapiens
  Payload ID: 13597
  Gene Symbol: PRKCZ
  Gene Name: protein kinase C, zeta
  Uniprot ID: Q05513
  ENST ID: ENST00000400921
  CDS Start-End: 684-1913
ctggcaggccaacctgcaggaccccgggcttagctgggttctgttctgatgtcgcattttcaaggtccgctgagtccgagccctgcctgggtctggctgctgcccgcccgctctctggactgtgctgatgcagagatgcttgttttcctgtgacgtcagcgtcagctcctgcacatccatgccgtgttttagtttgtgcctcagctgctggctacagcttcccgggggagccgggtaccacccgggcctggagacatgaggaggcagggatgtgaggggcgggggacaggacagccggccttccgttaaatatctgctcctcgcgctcgagcctccctgcctattgtcggggccggaggcgagccgacgcagcatcagctcgtcaacgggaaggaagatgcctccctgcacgcccgccgcgcacagagcataaagaatctgcgctgaggaggcaggagaagaaagccgaatctatctaccgccggggagccagaagatggaggaagctgtaccgtgccaacggccacctcttccaagccaagcgctttaacaggagagcgtactgcggtcagtgcagcgagaggatatggggcctcgcgaggcaaggctacaggtgcatcaactgcaaactgctggtccataagcgctgccacggcctcgtcccgctgacctgcaggaagcatatggattctgtcatgccttcccaagagcctccagtagacgacaagaacgaggacgccgaccttccttccgaggagacagatggaattgcttacatttcctcatcccggaagcatgacagcattaaagacgactcggaggaccttaagccagttatcgatgggatggatggaatcaaaatctctcaggggcttgggctgcaggactttgacctaatcagagtcatcgggcgcgggagctacgccaaggttctcctggtgcggttgaagaagaatgaccaaatttacgccatgaaagtggtgaagaaagagctggtgcatgatgacgaggatattgactgggtacagacagagaagcacgtgtttgagcaggcatccagcaaccccttcctggtcggattacactcctgcttccagacgacaagtcggttgttcctggtcattgagtacgtcaacggcggggacctgatgttccacatgcagaggcagaggaagctccctgaggagcacgccaggttctacgcggccgagatctgcatcgccctcaacttcctgcacgagagggggatcatctacagggacctgaagctggacaacgtcctcctggatgcggacgggcacatcaagctcacagactacggcatgtgcaaggaaggcctgggccctggtgacacaacgagcactttctgcggaaccccgaattacatcgcccccgaaatcctgcggggagaggagtacgggttcagcgtggactggtgggcgctgggagtcctcatgtttgagatgatggccgggcgctccccgttcgacatcatcaccgacaacccggacatgaacacagaggactaccttttccaagtgatcctggagaagcccatccggatcccccggttcctgtccgtcaaagcctcccatgttttaaaaggatttttaaataaggaccccaaagagaggctcggctgccggccacagactggattttctgacatcaagtcccacgcgttcttccgcagcatagactgggacttgctggagaagaagcaggcgctccctccattccagccacagatcacagacgactacggtctggacaactttgacacacagttcaccagcgagcccgtgcagctgaccccagacgatgaggatgccataaagaggatcgaccagtcagagttcgaaggctttgagtatatcaacccattattgctgtccaccgaggagtcggtgtgaggccgcgtgcgtctctgtcgtggacacgcgtgattgaccctttaactgtatccttaaccaccgcatatgcatgccaggctgggcacggctccgagggcggccagggacagacgcttgcgccgagaccgcagagggaagcgtcagcgggcgctgctgggagcagaacagtccctcacacctgggcccgggcaggccagcttcgtgctggaggaacttgctgctgtgcctgcgtcgcggcggatccgcggggaccctgccgagggggctgtcatgcggtttccaaggtgcacattttccacggaaacagaactcgatgcactgacctgctccgccaggaaagtgagcgtgtagcgtcctgaggaataaaatgttccgatgatg

SEQ ID NO: 170681 - DNA, 706 bp, Homo sapiens
  Payload ID: 13597
  Gene Symbol: PRKCZ
  Gene Name: protein kinase C, zeta
  ENST ID: ENST00000470986
  CDS Start-End: 380-706
ggcggggctgctgccggcctggactcaggaccctcaccctccagcccgcaccctcgactccccaccagccagaccctctgtcctggtgtggacagcacccacatcctggctccacccttgtttcttgccctttgacctacagcctcaggacgtgcaggagggagaatctatctaccgccggggagccagaagatggaggaagctgtaccgtgccaacggccacctcttccaagccaagcgctttaacaggagagcgtactgcggtcagtgcagcgagaggatatggggcctcgcgaggcaaggctacaggtgcatcaactgcaaactgctggtccataagcgctgccacggcctcgtcccgctgacctgcaggaagcatatggattctgtcatgccttcccaagagcctccagtagacgacaagaacgaggacgccgaccttccttccgaggagacagatggaattgcttacatttcctcatcccggaagcatgacagcattaaagacgactcggaggaccttaagccagttatcgatgggatggatggaatcaaaatctctcaggggcttgggctgcaggactttgacctaatcagagtcatcgggcgcgggagctacgccaaggttctcctggtgcggttgaagaagaatgaccaaatttacgccatgaaagtggtgaagaaagagctggtgcatgatgacgag

SEQ ID NO: 170682 - DNA, 567 bp, Homo sapiens
  Payload ID: 13597
  Gene Symbol: PRKCZ
  Gene Name: protein kinase C, zeta
  ENST ID: ENST00000470511
  CDS Start-End: 322-567
gaattcccgatgcacctccttccagcacatggactgtcagagccctgcgttgtcgccagcacagcagatctgaaaggcactaggctgtggcctcgcgacggctgagaatctatctaccgccggggagccagaagatggaggaagctgtaccgtgccaacggccacctcttccaagccaagcgctttaacaggagagcgtactgcggtcagtgcagcgagaggatatggggcctcgcgaggcaaggctacaggtgcatcaactgcaaactgctggtccataagcgctgccacggcctcgtcccgctgacctgcaggaagcatatggattctgtcatgccttcccaagagcctccagtagacgacaagaacgaggacgccgaccttccttccgaggagacagatggaattgcttacatttcctcatcccggaagcatgacagcattaaagacgactcggaggaccttaagccagttatcgatgggatggatggaatcaaaatctctcaggggcttgggctgcaggactttgacctaatcagagtcatcgggcgcgggagctacgccaag

SEQ ID NO: 170683 - DNA, 468 bp, Homo sapiens
  Payload ID: 13597
  Gene Symbol: PRKCZ
  Gene Name: protein kinase C, zeta
  ENST ID: ENST00000503297
  CDS Start-End: 273-468
ggtcgctgcgggcccggggctgtcgcgggaggtcctcggtccccgcccgtgagcgtcacccgcggacacgtcgtggacagcgcgggctccttccccgggaccgggtttccctggggtcggccccgcgccgcgagctcctcggcccggtcattgtggtagacgttttcgctggaaagttgggcggggacgttccggccgcaaacctggacatcttcatcaccagcgtggacgccgccacgaccttcgaggagctctgtgaggaagtgagagacatgtgtcgtctgcaccagcagcacccgctcaccctcaagtgggtggacagcgaaggtgacccttgcacggtgtcctcccagatggagctggaagaggctttccgcctggcccgtcagtgcagggatgaaggcctcatcattcatgttttcccgagcacccctgagcagcctggcctgccatgtccgggagaagaca

SEQ ID NO: 170684 - DNA, 563 bp, Homo sapiens
  Payload ID: 13597
  Gene Symbol: PRKCZ
  Gene Name: protein kinase C, zeta
  ENST ID: ENST00000496325
  CDS Start-End: 352-563
tttcgtgtgagcccacgctggccatgcacagctggcacgatcccttgcggtgtgaatacactgctggggtgggagcgccgtggccagggtcaggattcgagcggttactggcttttggtctgatggccctcggtggaatctatctaccgccggggagccagaagatggaggaagctgtaccgtgccaacggccacctcttccaagccaagcgctttaacaggagagcgtactgcggtcagtgcagcgagaggatatggggcctcgcgaggcaaggctacaggtgcatcaactgcaaactgctggtccataagcgctgccacggcctcgtcccgctgacctgcaggaagcatatggattctgtcatgccttcccaagagcctccagtagacgacaagaacgaggacgccgaccttccttccgaggagacagatggaattgcttacatttcctcatcccggaagcatgacagcattaaagacgactcggaggaccttaagccagttatcgatgggatggatggaatcaaaatctctcaggggcttgggctgcaggactttgacct

SEQ ID NO: 170685 - DNA, 716 bp, Homo sapiens
  Payload ID: 13597
  Gene Symbol: PRKCZ
  Gene Name: protein kinase C, zeta
  ENST ID: ENST00000471018
  CDS Start-End: 579-716
gtccgtccctcggttccgcccccggctgcgcgtctgtccctcgactcggcccctcagctgtgcgccactttctctgtggcccacagtacctccgtctccgccgcttcacacccttctctttctttctctcttcagagagggttgttgggcaggcagagcatcccccgaggggacaagtcaggcctacggactcctggagccaggacctgccgtaggctggttagggcaggatgcgccctgtcttcgtgggtagagccacatgaggggtcacccgaccccctcagggctgaggggcacaggggccgaaagtgtggccgcccctgggggtctgcgcctcttgtggagcccaggcctggcgcccagaatctatctaccgccggggagccagaagatggaggaagctgtaccgtgccaacggccacctcttccaagccaagcgctttaacaggagagcgtactgcggtcagtgcagcgagaggatatggggcctcgcgaggcaaggctacaggtgcatcaactgcaaactgctggtccataagcgctgccacggcctcgtcccgctgacctgcaggaagcatatggattctgtcatgccttcccaagagcctccagtagacgacaagaacgaggacgccgaccttccttccgaggagacagatggaattgcttacatttcctcatcccggaagcatgacagcattaaagacgactcggag

SEQ ID NO: 170686 - DNA, 763 bp, Homo sapiens
  Payload ID: 13597
  Gene Symbol: PRKCZ
  Gene Name: protein kinase C, zeta
  ENST ID: ENST00000497183
  CDS Start-End: 448-763
ccgtggtggatcctgtccgccctgcgaggacacctggctccatccacacctgggcctctgtctccagccgccgaggccgtgacaccatgaggatcataatctatctaccgccggggagccagaagatggaggaagctgtaccgtgccaacggccacctcttccaagccaagcgctttaacaggagagcgtactgcggtcagtgcagcgagaggatatggggcctcgcgaggcaaggctacaggtgcatcaactgcaaactgctggtccataagcgctgccacggcctcgtcccgctgacctgcaggaagcatatggatgcagctttgggacaggggagatgaccaagcattgtgcaaaatatcccgttgtataaagcacttggtggaaaggtcatggcctgcagtaccgagtggccacctccgtctgcagaatcataggattctgtcatgccttcccaagagcctccagtagacgacaagaacgaggacgccgaccttccttccgaggagacagatggaattgcttacatttcctcatcccggaagcatgacagcattaaagacgactcggaggaccttaagccagttatcgatgggatggatggaatcaaaatctctcaggggcttgggctgcaggactttgacctaatcagagtcatcgggcgcgggagctacgccaaggttctcctggtgcggttgaagaagaatgaccaaatttacgccatgaaagtggtgaagaaagagctggtgcatgatgacgagg

SEQ ID NO: 170687 - DNA, 788 bp, Homo sapiens
  Payload ID: 13597
  Gene Symbol: PRKCZ
  Gene Name: protein kinase C, zeta
  ENST ID: ENST00000470596
  CDS Start-End: 495-788
ttttttttaaaaaaaaaaacaacaaaaaaccaaaacaacaaccagcctccccagtcaggcttgtggggagccgtgggcctggggagactgggctgctgaaggtggggactgggctgctgggggaggcggctttccctctcggggggtgctggctgctggggaggctggcagcgcgcccctcccccaggtgcgaagggacctcagcagacgcagggctgctccgcacagccagcttgggccgcaggggtccttgagtgatgaagattctgtgttgatgggaatctatctaccgccggggagccagaagatggaggaagctgtaccgtgccaacggccacctcttccaagccaagcgctttaacaggagagcgtactgcggtcagtgcagcgagaggatatggggcctcgcgaggcaaggctacaggtgcatcaactgcaaactgctggtccataagcgctgccacggcctcgtcccgctgacctgcaggaagcatatggattctgtcatgccttcccaagagcctccagtagacgacaagaacgaggacgccgaccttccttccgaggagacagatggaattgcttacatttcctcatcccggaagcatgacagcattaaagacgactcggaggaccttaagccagttatcgatgggatggatggaatcaaaatctctcaggggcttgggctgcaggactttgacctaatcagagtcatcgggcgcgggagctacgccaaggttctcctggtgcggttgaagaagaatgaccaaatttacgccatgaaa

SEQ ID NO: 170688 - DNA, 1542 bp, Homo sapiens
  Payload ID: 13597
  Gene Symbol: PRKCZ
  Gene Name: protein kinase C, zeta
  ENST ID: ENST00000478770
  CDS Start-End: 135-1178
aggatgcagctttgggacaggggagatgaccaagcattgtgcaaaatatcccgttgtataaagcacttggtggaaaggtcatggcctgcagtaccgagtggccacctccgtctgcagaatcataggattctgtcatgccttcccaagagcctccagtagacgacaagaacgaggacgccgaccttccttccgaggagacagatggaattgcttacatttcctcatcccggaagcatgacagcattaaagacgactcggaggaccttaagccagttatcgatgggatggatggaatcaaaatctctcaggggcttgggctgcaggactttgacctaatcagagtcatcgggcgcgggagctacgccaaggttctcctggtgcggttgaagaagaatgaccaaatttacgccatgaaagtggtgaagaaagagctggtgcatgatgacgaggatattgactgggtacagacagagaagcacgtgtttgagcaggcatccagcaaccccttcctggtcggattacactcctgcttccagacgacaagtcggttgttcctggtcattgagtacgtcaacggcggggacctgatgttccacatgcagaggcagaggaagctccctgaggagcacgccaggttctacgcggccgagatctgcatcgccctcaacttcctgcacgagagggggatcatctacagggacctgaagctggacaacgtcctcctggatgcggacgggcacatcaagctcacagactacggcatgtgcaaggaaggcctgggccctggtgacacaacgagcactttctgcggaaccccgaattacatcgcccccgaaatcctgcggggagaggagtacgggttcagcgtggactggtgggcgctgggagtcctcatgtttgagatgatggccgggcgctccccgttcgacatcatcaccgacaacccggacatgaacacagaggactaccttttccaagtgatcctggagaagcccatccggatcccccggttcctgtccgtcaaagcctcccatgttttaaaaggatttttaaataaggaccccaaagagaggctcggctgccggccacagactggattttctgacatcaagtcccacgcgttcttccgcagcatagactgggacttggtgtttcatacaaagaatacaagtaactgatgaatgaagggggcatcttgtgtccccacaatcctgctgtgcgcacaccacagctggagaagaagcaggcgctccctccattccagccacagatcacagacgactacggtctggacaactttgacacacagttcaccagcgagcccgtgcagctgaccccagacgatgaggatgccataaagaggatcgaccagtcagagttcgaaggctttgagtatatcaacccattattgctgtccaccgaggagtcggtgtgaggccgcgtgcgtctctgtcgtggacacgcgtgattgaccctttaactgtatccttaaccaccgcatatgcatgccaggctgggcacggctccgagggcggccaggga
